(19) United States
(12) Patent Application Publication
(10) Pub. No.: US 2007/0283459 A1
(43) Pub. Date: Dec. 6, 2007

(54) Nucleic acid molecules and other molecules associated with plants

(76) Inventors: Joseph R. Byrum, Des Moines, IA (US); Gregory R. Heck, Crystal Lake Park, MO (US); Thomas J. La Rosa, Maryland Heights, MO (US)

Correspondence Address: ARNOLD & PORTER, LLP, 555 TWELFTH STREET, N.W., ATTN: IP DOCKETING, WASHINGTON, DC, 20004, US

(21) Appl. No.: 11/239,591

(22) Filed: Sep. 30, 2005

Related U.S. Application Data
(63) Continuation of application No. 09/440,687, filed on Nov. 16, 1999, now abandoned.

(51) Int. Cl. A01H 5/00; C07H 21/04; C12N 15/82; C07K 14/415

(52) U.S. Cl. 800/288; 800/312; 800/320.1; 536/23.6; 530/370

(57) ABSTRACT

Expressed Sequence Tags (ESTs) isolated from soybean are disclosed. The ESTs provide a unique molecular tool for the targeting and isolation of novel genes for plant protection and improvement. The disclosed ESTs have utility in the development of new strategies for understanding critical plant developmental and metabolic pathways. The disclosed ESTs have particular utility in isolating genes and promoters, identifying and mapping the genes involved in developmental and metabolic pathways, and determining gene function. Sequence homology analyses using the ESTs provided in the present invention, will result in more efficient gene screening for desirable agronomic traits. An expanding database of these select pieces of the plant genomics puzzle will quickly expand the knowledge necessary for subsequent functional validation, a key limitation in current plant biotechnology efforts.

### FIELD OF THE INVENTION

[0001] The present invention is in the field of plant biochemistry. More specifically the invention relates to nucleic acid molecules that encode proteins and fragments of proteins produced in plant cells, in particular, soybean plants. The invention also relates to proteins and fragments of proteins so encoded and antibodies capable of binding the proteins. The invention also relates to methods of using the nucleic acid molecules, proteins and fragments of proteins.

### BACKGROUND OF THE INVENTION

I. Expressed Sequence Tag Nucleic Acid Molecules

[0002] Expressed sequence tags, or ESTs, are short sequences of randomly selected clones from a cDNA (or complementary DNA) library which are representative of the cDNA inserts of these randomly selected clones. McCombie, et al., Nature Genetics, 1: 124-130 (1992); Kurata, et al., Nature Genetics, 8: 365-372 (1994); Okubo, et al., Nature Genetics, 2: 173-179 (1992), all of which references are incorporated herein in their entirety.

[0003] Using conventional methodologies, cDNA libraries can be constructed from the mRNA (messenger RNA) of a given tissue or organism using poly dT primers and reverse transcriptase (Efstratiadis, et al., Cell 7:279-288 (1976), the entirety of which is herein incorporated by reference; Higuchi, et al., Proc. Natl. Acad. Sci. (U.S.A.) 73:3146-3150 (1976), the entirety of which is herein incorporated by reference; Maniatis, et al., Cell 8:163 (1976) the entirety of which is herein incorporated by reference; Land, et al., Nucleic Acids Res. 9:2251-2266 (1981), the entirety of which is herein incorporated by reference; Okayama, et al., Mol. Cell. Biol. 2:161-170 (1982), the entirety of which is herein incorporated by reference; Gubler, et al., Gene 25:263 (1983), the entirety of which is herein incorporated by reference).

[0004] Several methods may be employed to obtain full-length cDNA constructs. For example, terminal transferase can be used to add homopolymeric tails of dC residues to the free 3′ hydroxyl groups (Land, et al., Nucleic Acids Res. 9:2251-2266 (1981), the entirety of which is herein incorporated by reference). This tail can then be hybridized by a poly dG oligo which can act as a primer for the synthesis of full length second strand cDNA. Okayama and Berg, report a method for obtaining full length cDNA constructs. This method has been simplified by using synthetic primer-adapters that have both homopolymeric tails for priming the synthesis of the first and second strands and restriction sites for cloning into plasmids (Coleclough, et al., Gene 34:305-314 (1985), the entirety of which is herein incorporated by reference) and bacteriophage vectors (Krawinkel, et al., Nucleic Acids Res. 14:1913 (1986), the entirety of which is herein incorporated by reference; and Han, et al., Nucleic Acids Res. 15:6304 (1987), the entirety of which is herein incorporated by reference).

[0005] These strategies have been coupled with additional strategies for isolating rare mRNA populations. For example, a typical mammalian cell contains between 10,000 and 30,000 different mRNA sequences. Davidson, Gene Activity in Early Development, 2nd ed., Academic Press, New York (1976). The number of clones required to achieve a given probability that a low-abundance mRNA will be present in a cDNA library is N=(ln(1-P))/(ln(1-1/n)) where N is the number of clones required, P is the probability desired, and l/n is the fractional proportion of the total mRNA that is represented by a single rare mRNA. (Sambrook, et al., Molecular Cloning: A Laboratory Manual, 2nd ed., Cold Spring Harbor Laboratory Press (1989), the entirety of which is herein incorporated by reference.).

[0006] A method to enrich preparations of mRNA for sequences of interest is to fractionate by size. One such method is to fractionate by electrophoresis through an agarose gel (Pennica, et al., Nature 301:214-221 (1983), the entirety of which is herein incorporated by reference). Another such method employs sucrose gradient centrifugation in the presence of an agent, such as methylmercuric hydroxide, that denatures secondary structure in RNA (Schweinfest, et al., Proc. Natl. Acad. Sci. (U.S.A.) 79:4997-5000 (1982), the entirety of which is herein incorporated by reference).

[0007] A frequently adopted method is to construct equalized or normalized cDNA libraries (Ko, Nucleic Acids Res. 18:5705-5711 (1990), the entirety of which is herein incorporated by reference; Patanjali, S. R. et al., Proc. Natl. Acad Sci. (U.S.A.) 88:1943-1947 (1991), the entirety of which is herein incorporated by reference). Typically, the cDNA population is normalized by subtractive hybridization. Schmid, et al., J. Neurochem. 48:307-312 (1987) the entirety of which is herein incorporated by reference; Fargnoli, et al., Anal. Biochem. 187:364-373 (1990) the entirety of which is herein incorporated by reference; Travis, et al., Proc. Natl. Acad. Sci (U.S.A.) 85:1696-1700 (1988) the entirety of which is herein incorporated by reference; Kato, Eur. J. Neurosci. 2:704 (1990); and Schweinfest, et al., Genet. Anal. Tech. Appl. 7:64 (1990), the entirety of which is herein incorporated by reference). Subtraction represents another method for reducing the population of certain sequences in the cDNA library. Swaroop, et al., Nucleic Acids Res. 19:1954 (1991), the entirety of which is herein incorporated by reference).

[0008] ESTs can be sequenced by a number of methods. Two basic methods may be used for DNA sequencing, the chain termination method of Sanger et al., Proc. Natl. Acad. Sci. (U.S.A.) 74: 5463-5467 (1977), the entirety of which is herein incorporated by reference and the chemical degradation method of Maxam and Gilbert, Proc. Nat. Acad. Sci. (U.S.A.) 74: 560-564 (1977), the entirety of which is herein incorporated by reference. Automation and advances in technology such as the replacement of radioisotopes with fluorescence-based sequencing have reduced the effort required to sequence DNA (Craxton, Methods, 2: 20-26 (199 1), the entirety of which is herein incorporated by reference; Ju et al., Proc. Natl. Acad Sci. (U.S.A.) 92: 4347-4351 (1995), the entirety of which is herein incorporated by reference; Tabor and Richardson, Proc. Natl. Acad. Sci. (U.S.A.) 92: 6339-6343 (1995), the entirety of which is herein incorporated by reference). Automated sequencers are available from, for example, Pharmacia Biotech, Inc., Piscataway, N.J. (Pharmacia ALF), LI-COR, Inc., Lincoln, Nebr. (LI-COR 4,000) and Millipore, Bedford, Mass. (Millipore BaseStation).

[0009] In addition, advances in capillary gel electrophoresis have also reduced the effort required to sequence DNA and such advances provide a rapid high resolution approach for sequencing DNA samples (Swerdlow and Gesteland, Nucleic Acids Res. 18:1415-1419 (1990); Smith, Nature 349:812-813 (1991); Luckey et al., Methods Enzymol. 218:154-172 (1993); Lu et al., J. Chromatog. A. 680:497-501 (1994); Carson et al., Anal. Chem. 65:3219-3226 (1993); Huang et al., Anal. Chem. 64:2149-2154 (1992); Kheterpal et al., Electrophoresis 17:1852-1859 (1996); Quesada and Zhang, Electrophoresis 17:1841-1851(1996); Baba, Yakugaku Zasshi 117:265-281 (1997), all of which are herein incorporated by reference in their entirety).

[0010] ESTs longer than 150 bases have been found to be useful for similarity searches and mapping. (Adams, et al., Science 252:1651-1656 (1991), herein incorporated by reference.) EST sequences normally range from 150-450 bases. This is the length of sequence information that is routinely and reliably generated using single run sequence data. Typically, only single run sequence data is obtained from the cDNA library, Adams, et al., Science 252:1651-1656 (1991). Automated single run sequencing typically results in an approximately 2-3% error or base ambiguity rate. (Boguski, et al., Nature Genetics, 4:332-333 (1993), the entirety of which is herein incorporated by reference).

[0011] EST databases have been constructed or partially constructed from, for example, C. elegans (McCombrie, et al., Nature Genetics 1: 124-131 (1992), human liver cell line HepG2 (Okubo, et al., Nature Genetics 2:173-179 (1992)), human brain RNA (Adams, et al., Science 252:1651-1656 (1991); Adams, et al., Nature 355:632-635 (1992)), Arabidopsis, (Newman, et al., Plant Physiol. 106:1241-1255 (1994)); and rice (Kurata, et al., Nature Genetics 8:365-372 (1994).

II. Sequence Comparisons

[0012] A characteristic feature of a protein or DNA sequence is that it can be compared with other known protein or DNA sequences. Sequence comparisons can be undertaken by determining the similarity of the test or query sequence with sequences in publicly available or propriety databases (“similarity analysis”) or by searching for certain motifs (“intrinsic sequence analysis”)(e.g., cis elements)(Coulson, Trends in Biotechnology, 12: 76-80 (1994), the entirety of which is herein incorporated by reference; Birren, et al., Genome Analysis, 1: 543-559 (1997), the entirety of which is herein incorporated by reference).

[0013] Similarity analysis includes database search and alignment. Examples of public databases include the DNA Database of Japan (DDBJ)(http://www.ddbj.nig.acjp/); Genebank (http://www.ncbi.nlm.nih.gov/web/Genbank/Index.htlm); and the European Molecular Biology Laboratory Nucleic Acid Sequence Database (EMBL) (http://www.ebi.ac.uk/ebi_docs/embl_db.html). A number of different search algorithms have been developed, one example of which are the suite of programs referred to as BLAST programs. There are five implementations of BLAST, three designed for nucleotide sequences queries (BLASTN, BLASTX, and TBLASTX) and two designed for protein sequence queries (BLASTP and TBLASTN) (Coulson, Trends in Biotechnology, 12: 76-80 (1994); Birren, et al., Genome Analysis, 1: 543-559 (1997)).

[0014] BLASTN takes a nucleotide sequence (the query sequence) and its reverse complement and searches them against a nucleotide sequence database. BLASTN was designed for speed, not maximum sensitivity, and may not find distantly related coding sequences. BLASTX takes a nucleotide sequence, translates it in three forward reading frames and three reverse complement reading frames, and then compares the six translations against a protein sequence database. BLASTX is useful for sensitive analysis of preliminary (single-pass) sequence data and is tolerant of sequencing errors (Gish and States, Nature Genetics, 3: 266-272 (1993), the entirety of which is herein incorporated by reference). BLASTN and BLASTX may be used in concert for analyzing EST data (Coulson, Trends in Biotechnology, 12: 76-80 (1994); Birren, et al., Genome Analysis, 1: 543-559 (1997).

[0015] Given a coding nucleotide sequence and the protein it encodes, it is often preferable to use the protein as the query sequence to search a database because of the greatly increased sensitivity to detect more subtle relationships. This is due to the larger alphabet of proteins (20 amino acids) compared with the alphabet of nucleic acid sequences (4 bases), where it is far easier to obtain a match by chance. In addition, with nucleotide alignments, only a match (positive score) or a mismatch (negative score) is obtained, but with proteins, the presence of conservative amino acid substitutions can be taken into account. Here, a mismatch may yield a positive score if the non-identical residue has physical/chemical properties similar to the one it replaced. Various scoring matrices are used to supply the substitution scores of all possible amino acid pairs. A general purpose scoring system is the BLOSUM62 matrix (Henikoff and Henikoff, Proteins, 17: 49-61 (1993), the entirety of which is herein incorporated by reference), which is currently the default choice for BLAST programs. BLOSUM62 is tailored for alignments of moderately diverged sequences and thus may not yield the best results under all conditions. Altschul, J. Mol. Biol. 36: 290-300 (1993), the entirety of which is herein incorporated by reference, uses a combination of three matrices to cover all contingencies. This may improve sensitivity, but at the expense of slower searches. In practice, a single BLOSUM62 matrix is often used but others (PAM40 and PAM250) may be attempted when additional analysis is necessary. Low PAM matrices are directed at detecting very strong but localized sequence similarities, whereas high PAM matrices are directed at detecting long but weak alignments between very distantly related sequences.

[0016] Homologues in other organisms are available that can be used for comparative sequence analysis. Multiple alignments are performed to study similarities and differences in a group of related sequences. CLUSTAL W is a multiple sequence alignment package available that performs progressive multiple sequence alignments based on the method of Feng and Doolittle, J. Mol. Evol. 25: 351-360 (1987), the entirety of which is herein incorporated by reference. Each pair of sequences is aligned and the distance between each pair is calculated; from this distance matrix, a guide tree is calculated, and all of the sequences are progressively aligned based on this tree. A feature of the program is its sensitivity to the effect of gaps on the alignment; gap penalties are varied to encourage the insertion of gaps in probable loop regions instead of in the middle of structured regions. Users can specify gap penalties, choose between a number of scoring matrices, or supply their own scoring matrix for both the pairwise alignments and the multiple alignments. CLUSTAL W for UNIX and VMS systems is available at: ftp.ebi.ac.uk. Another program is MACAW (Schuler et al., Proteins, Struct. Func. Genet, 9:180-190 (1991), the entirety of which is herein incorporated by reference, for which both Macintosh and Microsoft Windows versions are available. MACAW uses a graphical interface, provides a choice of several alignment algorithms, and is available by anonymous ftp at: ncbi.nlm.nih.gov (directory/pub/macaw).

[0017] Sequence motifs are derived from multiple alignments and can be used to examine individual sequences or an entire database for subtle patterns. With motifs, it is sometimes possible to detect distant relationships that may not be demonstrable based on comparisons of primary sequences alone. Currently, the largest collection of sequence motifs in the world is PROSITE (Bairoch and Bucher, Nucleic Acid Research, 22: 3583-3589 (1994), the entirety of which is herein incorporated by reference.) PROSITE may be accessed via either the ExPASy server on the World Wide Web or anonymous ftp site. Many commercial sequence analysis packages also provide search programs that use PROSITE data.

[0018] A resource for searching protein motifs is the BLOCKS E-mail server developed by S. Henikoff, Trends Biochem Sci., 18:267-268 (1993), the entirety of which is herein incorporated by reference; Henikoff and Henikoff, Nucleic Acid Research, 19:6565-6572 (1991), the entirety of which is herein incorporated by reference; Henikoff and Henikoff, Proteins, 17: 49-61 (1993). BLOCKS searches a protein or nucleotide sequence against a database of protein motifs or “blocks.” Blocks are defined as short, ungapped multiple alignments that represent highly conserved protein patterns. The blocks themselves are derived from entries in PROSITE as well as other sources. Either a protein or nucleotide query can be submitted to the BLOCKS server; if a nucleotide sequence is submitted, the sequence is translated in all six reading frames and motifs are sought in these conceptual translations. Once the search is completed, the server will return a ranked list of significant matches, along with an alignment of the query sequence to the matched BLOCKS entries.

[0019] Conserved protein domains can be represented by two-dimensional matrices, which measure either the frequency or probability of the occurrences of each amino acid residue and deletions or insertions in each position of the domain. This type of model, when used to search against protein databases, is sensitive and usually yields more accurate results than simple motif searches. Two popular implementations of this approach are profile searches (such as GCG program ProfileSearch) and Hidden Markov Models (HMMs)(Krough et al., J. Mol. Biol. 235:1501-1531 (1994); Eddy, Current Opinion in Structural Biology 6:361-365 (1996), both of which are herein incorporated by reference in their entirety). In both cases, a large number of common protein domains have been converted into profiles, as present in the PROSITE library, or HHM models, as in the Pfam protein domain library (Sonnhammer et al., Proteins 28:405-420 (1997), the entirety of which is herein incorporated by reference). Pfam contains more than 500 HMM models for enzymes, transcription factors, signal transduction molecules, and structural proteins. Protein databases can be queried with these profiles or HMM models, which will identify proteins containing the domain of interest. For example, HMMSW or HMMFS, two programs in a public domain package called HMMER (Sonnhammer et al., Proteins 28:405-420 (1997)) can be used.

[0020] PROSITE and BLOCKS represent collected families of protein motifs. Thus, searching these databases entails submitting a single sequence to determine whether or not that sequence is similar to the members of an established family. Programs working in the opposite direction compare a collection of sequences with individual entries in the protein databases. An example of such a program is the Motif Search Tool, or MoST (Tatusov et al. Proc. Natl. Acad. Sci. 91: 12091-12095 (1994), the entirety of which is herein incorporated by reference.) On the basis of an aligned set of input sequences, a weight matrix is calculated by using one of four methods (selected by the user); a weight matrix is simply a representation, position by position in an alignment, of how likely a particular amino acid will appear. The calculated weight matrix is then used to search the databases. To increase sensitivity, newly found sequences are added to the original data set, the weight matrix is recalculated, and the search is performed again. This procedure continues until no new sequences are found.

### SUMMARY OF THE INVENTION

[0021] The present invention provides a substantially purified nucleic acid molecule that encodes a soybean protein or fragment thereof comprising a nucleic acid sequence selected from the group consisting of SEQ ID NO: 1 through SEQ ID NO: 31015.

[0022] The present invention also provides one or more substantially purified nucleic acid molecules comprising a nucleic acid sequence selected from the group consisting of SEQ ID NO: 1 through SEQ ID NO: 31015 or complements thereof.

[0023] The present invention also provides a substantially purified soybean protein or fragment thereof, wherein said soybean protein is encoded by a nucleic acid molecule that comprises a nucleic acid sequence selected from the group consisting of SEQ ID NO: 1 through SEQ ID NO: 31015.

[0024] The present invention further provides a substantially purified protein, peptide, or fragment thereof encoded by a nucleic acid sequence which specifically hybridizes to a nucleic acid molecule comprising a nucleic acid sequence selected from the group consisting of a complement of SEQ ID NO: 1 through SEQ ID NO: 31015.

[0025] The present invention further provides a substantially purified antibody capable of specifically binding to a protein or fragment thereof encoded by a nucleic acid sequence which specifically hybridizes to a nucleic acid molecule having a nucleic acid sequence selected from the group consisting of a complement of SEQ ID NO: 1 through SEQ ID NO: 31015.

[0026] The present invention also provides a transformed plant transformed to contain a nucleic acid molecule which comprises: (A) an exogeneous promoter region which functions in plant cells to cause the production of an mRNA molecule; which is linked to (B) a structural nucleic acid molecule, wherein said structural nucleic acid molecule comprises a nucleic acid molecule that encodes a protein, peptide, or fragment thereof which hybridizes to a nucleic acid sequence selected from the group consisting of a complement of SEQ ID NO: 1 through SEQ ID NO: 31015 expressed in an effective amount to produce a desirable agronomic effect; which is linked to (C) a 3′ non-translated sequence that functions in plant cells to cause the termination of transcription and the addition of polyadenylated ribonucleotides to the 3′ end of the mRNA sequence.

[0027] The present invention also provides a transformed plant cell containing a nucleic acid molecule whose non-transcribed strand encodes a protein or fragment thereof, wherein the transcribed strand of said nucleic acid is complementary to a nucleic acid molecule that encodes a protein or fragment thereof. The present invention also provides bacterial, viral, microbial, and plant cells comprising a nucleic acid molecule of the present invention.

[0028] The present invention also provides a method of producing a plant containing one or more proteins encoded by sequences comprising SEQ ID NO: 1 or complement thereof through SEQ ID NO: 31015 or complements thereof, expressed in a sufficient amount and/or fashion to produce a desirable agronomic effect.

[0029] In accomplishing the foregoing, there is provided, in accordance with one aspect of the present invention, methods of producing genetically transformed plants, comprising the steps of:
[0030] (a) inserting into the genome of a plant cell a recombinant, double-stranded DNA molecule comprising:
   [0031] (i) a promoter which functions in plant cells to cause the production of an RNA sequence,
   [0032] (ii) a structural DNA sequence that causes the production of an RNA sequence which encodes a desired protein,
   [0033] (iii) a 3′ non-translated DNA sequence which functions in plant cells to cause the addition of polyadenylated nucleotides to the 3′ end of RNA sequence; where the promoter is homologous or heterologous with respect to the coding sequence and adapted to cause sufficient expression of a protein in desired plant tissues to enhance the agronomic utility of a plant transformed with said gene;
[0034] (b) obtaining a transformed plant cell with said nucleic acid molecule that encodes one or more proteins, wherein said nucleic acid molecule is transcribed and results in expression of said protein(s); and
[0035] (c) regenerating from the transformed plant cell a genetically transformed plant.

[0036] The present invention also encompasses differentiated plants, seeds, and progeny comprising said transformed plant cells and which exhibit novel properties of agronomic significance.

[0037] The present invention also provides a method of producing a plant containing reduced levels of a protein comprising: (A) transforming a plant cell with a nucleic acid molecule that encodes a protein, wherein said nucleic acid molecule is transcribed and results in co-suppression of endogenous protein synthesis activity, and (B) regenerating plants and producing subsequent progeny from the transformed plant.

[0038] The present invention also provides a method of determining an association between a polymorphism and a plant trait comprising: (A) hybridizing a nucleic acid molecule specific for a polymorphism to genetic material of a plant, wherein said nucleic acid molecule comprising a nucleic acid sequence selected from the group consisting of SEQ ID NO: 1 through SEQ ID NO: 31015 or complements thereof; and (B) calculating the degree of association between the polymorphism and the plant trait.

[0039] The present invention also provides a method of isolating a genetic region, or nucleic acid that encodes a protein or fragment thereof comprising: (A) incubating under conditions permitting nucleic acid hybridization: a marker nucleic acid molecule, preferably an EST, with a complementary nucleic acid molecule obtained from a plant cell or plant tissue; (B) permitting hybridization between said marker nucleic acid molecule, preferably an EST, and said complementary nucleic acid molecule obtained from said plant cell or plant tissue; and (C) isolating said complementary nucleic acid molecule.

[0040] The present invention also provides a method for determining a level or pattern in a plant cell of a protein in a plant comprising: (A) incubating, under conditions permitting nucleic acid hybridization, a marker nucleic acid molecule, the marker nucleic acid molecule selected from the group of marker nucleic acid molecules which specifically hybridize to a nucleic acid molecule having the nucleic acid sequence selected from the group consisting of SEQ ID NO: 1 through SEQ ID NO: 31015 or complements thereof or fragments of either, with a complementary nucleic acid molecule obtained from the plant cell or plant tissue, wherein nucleic acid hybridization between the marker nucleic acid molecule and the complementary nucleic acid molecule obtained from the plant cell or plant tissue permits the detection of an mRNA for the enzyme; (B) permitting hybridization between the marker nucleic acid molecule and the complementary nucleic acid molecule obtained from the plant cell or plant tissue; and (C) detecting the level or pattern of the complementary nucleic acid, wherein the detection of the complementary nucleic acid is predictive of the level or pattern of the protein.

[0041] The present invention also provides a method for determining the level or pattern of a protein in a plant cell or plant tissue comprising: (A) incubating under conditions permitting nucleic acid hybridization: a marker nucleic acid molecule, the marker nucleic acid molecule comprising a nucleotide sequence selected from the group consisting of SEQ ID NO: 1 through SEQ ID NO: 31015 or complements thereof, with a complementary nucleic acid molecule obtained from a plant cell or plant tissue, wherein nucleic acid hybridization between the marker nucleic acid molecule, and the complementary nucleic acid molecule obtained from the plant cell or plant tissue permits the detection of said protein; (B) permitting hybridization between the marker nucleic acid molecule and the complementary nucleic acid molecule obtained from the plant cell or plant tissue; and (C) detecting the level or pattern of the complementary nucleic acid, wherein the detection of said complementary nucleic acid is predictive of the level or pattern of the protein synthesis.

[0042] The present invention also provides a method for determining a level or pattern of a protein in a plant cell or plant tissue which comprises assaying the concentration of a molecule, whose concentration is dependent upon the expression of a gene, the gene having a nucleic acid sequence which specifically hybridizes to a protein marker nucleic acid molecule, the molecule being present in a plant cell or plant tissue, in comparison to the concentration of that molecule present in a plant cell or plant tissue with a known level or pattern of said protein, wherein an assayed concentration of the molecule is compared to the assayed concentration of the molecule in a plant cell or plant tissue with a known level or pattern of said protein.

[0043] The present invention also provides a method of determining a mutation in a plant whose presence is predictive of a mutation affecting a level or pattern of a protein comprising the steps: (A) incubating, under conditions permitting nucleic acid hybridization, a marker nucleic acid, the marker nucleic acid selected from the group of marker nucleic acid molecules which specifically hybridize to a nucleic acid molecule consisting of the nucleic acid sequence selected from the group consisting of SEQ ID NO 1 through SEQ ID NO: 31015 or complements thereof or fragments of either and a complementary nucleic acid molecule obtained from the plant, wherein nucleic acid hybridization between the marker nucleic acid molecule and the complementary nucleic acid molecule obtained from the plant permits the detection of a polymorphism whose presence is predictive of a mutation affecting the level or pattern of the protein in the plant; (B) permitting hybridization between the marker nucleic acid molecule and the complementary nucleic acid molecule obtained from the plant; and (C) detecting the presence of the polymorphism, wherein the detection of the polymorphism is predictive of the mutation.

[0044] The present invention also provides a method for determining a mutation in a plant whose presence is predictive of a mutation affecting the level or pattern of protein synthesis comprising the steps: (A) incubating under conditions permitting nucleic acid hybridization: a marker nucleic acid molecule, the marker nucleic acid molecule comprising a nucleic acid molecule that is linked to gene, the gene having a nucleic acid sequence which specifically hybridizes to a sequence selected from the group consisting of SEQ ID NO: 1 through SEQ ID NO: 31015 and complements thereof, and a complementary nucleic acid molecule obtained from a plant tissue or plant cell of the plant, wherein nucleic acid hybridization between the marker nucleic acid molecule and the complementary nucleic acid molecule obtained from the plant permits the detection of a polymorphism whose presence is predictive of a mutation affecting said level or pattern of a protein synthesis in the plant; (B) permitting hybridization between said marker nucleic acid molecule and said complementary nucleic acid molecule obtained from said plant; and (C) detecting the presence of the polymorphism, wherein the detection of the polymorphism is predictive of the mutation.

[0045] The present invention also provides a method for reducing expression of a protein in a plant cell, the method comprising: growing a transformed plant cell containing a nucleic acid molecule whose non-transcribed strand encodes a protein or fragment thereof, wherein the transcribed strand of said nucleic acid is complementary to a nucleic acid molecule that encodes the protein in said plant cell, and whereby the strand that is complementary to the nucleic acid molecule that encodes the protein reduces or depresses expression of the protein.

[0046] The present invention provides soybean nucleic acid molecules for use as molecular tags to isolate genetic regions (i.e., promoters and flanking sequences), isolate genes, map genes, and determine gene function. The present invention further provides soybean nucleic acid molecules for use in determining if genes are members of a particular gene family.

[0047] The present invention also provides a method of obtaining full length genes using soybean ESTs or complements thereof or fragments of either.

[0048] The present invention also provides a method of isolating promoters and flanking sequences using soybean ESTs or complements thereof or fragments of either.

[0049] The present invention also provides soybean ESTs or complements thereof or fragments of either for use in marker-assisted breeding programs.

[0050] The present invention also provides a method of identifying tissues comprising hybridizing nucleic acids from the tissue with soybean ESTs or complements thereof or fragments of either.

[0051] The present invention also provides a method for production of antibodies targeted against the proteins, peptides, or fragments produced by the disclosed or complements thereof or fragments of either.

[0052] The present invention also provides a method for the transformation and regeneration of plants comprising sequences hybridizable to the disclosed ESTs or complements thereof or fragments of either.

[0053] The present invention also provides a method of modifying plant protein expression by inserting in a chimeric gene sense or antisense constructs of the soybean ESTs.

### DETAILED DESCRIPTION OF THE INVENTION

Agents

[0054] (a) Nucleic Acid Molecules

[0055] Agents of the present invention include nucleic acid molecules and more specifically EST nucleic acid molecules or nucleic acid fragment molecules thereof. Fragment EST nucleic acid molecules may encode significant portion(s) of, or indeed most of, the EST nucleic acid molecule. Alternatively, the fragments may comprise smaller oligonucleotides (having from about 15 to about 250 nucleotide residues, and more preferably, about 15 to about 30 nucleotide residues).

[0056] A subset of the nucleic acid molecules of the present invention includes nucleic acid molecules that are marker molecules. Another subset of the nucleic acid molecules of the present invention include nucleic acid molecules that encode a protein or fragment thereof. Another subset of the nucleic acid molecules of the present invention are EST molecules.

[0057] As used herein, an agent, be it a naturally occurring molecule or otherwise may be “substantially purified,” if desired, referring to a molecule separated from substantially all other molecules normally associated with it in its native state. More preferably a substantially purified molecule is the predominant species present in a preparation. A substantially purified molecule may be greater than 60% free, preferably 75% free, more preferably 90% free, and most preferably 95% free from the other molecules (exclusive of solvent) present in the natural mixture. The term “substantially purified” is not intended to encompass molecules present in their native state.

[0058] The agents of the present invention will preferably be “biologically active” with respect to either a structural attribute, such as the capacity of a nucleic acid to hybridize to another nucleic acid molecule, or the ability of a protein to be bound by antibody (or to compete with another molecule for such binding). Alternatively, such an attribute may be catalytic, and thus involve the capacity of the agent to mediate a chemical reaction or response.

[0059] The agents of the present invention may also be recombinant. As used herein, the term recombinant means any agent (e.g., DNA, peptide etc.), that is, or results, however indirect, from human manipulation of a nucleic acid molecule.

[0060] It is understood that the agents of the present invention may be labeled with reagents that facilitate detection of the agent (e.g., fluorescent labels (Prober, et al., Science 238:336-340 (1987); Albarella et al., EP 144914, chemical labels (Sheldon et al., U.S. Pat. No. 4,582,789; Albarella et al., U.S. Pat. No. 4,563,417, modified bases (Miyoshi et al., EP 119448, all of which are hereby incorporated by reference in their entirety).

[0061] It is further understood, that the present invention provides bacterial, viral, microbial, and plant cells comprising the agents of the present invention.

[0062] Nucleic acid molecules or fragment thereof of the present invention are capable of specifically hybridizing to other nucleic acid molecules under certain circumstances. As used herein, two nucleic acid molecules are said to be capable of specifically hybridizing to one another if the two molecules are capable of forming an anti-parallel, double-stranded nucleic acid structure. A nucleic acid molecule is said to be the “complement” of another nucleic acid molecule if they exhibit complete complementarity. As used herein, molecules are said to exhibit “complete complementarity” when every nucleotide of one of the molecules is complementary to a nucleotide of the other. Two molecules are said to be “minimally complementary” if they can hybridize to one another with sufficient stability to permit them to remain annealed to one another under at least conventional “low-stringency” conditions. Similarly, the molecules are said to be “complementary” if they can hybridize to one another with sufficient stability to permit them to remain annealed to one another under conventional “high-stringency” conditions. Conventional stringency conditions are described by Sambrook, et al., In: Molecular Cloning, A Laboratory Manual, 2nd Edition, Cold Spring Harbor Press, Cold Spring Harbor, N.Y. (1989), and by Haymes, et al. In: Nucleic Acid Hybridization, A Practical Approach, IRL Press, Washington, D.C. (1985), the entirety of which is herein incorporated by reference. Departures from complete complementarity are therefore permissible, as long as such departures do not completely preclude the capacity of the molecules to form a double-stranded structure. Thus, in order for an nucleic acid molecule or fragment of the present invention to serve as a primer or probe it need only be sufficiently complementary in sequence to be able to form a stable double-stranded structure under the particular solvent and salt concentrations employed.

[0063] Appropriate stringency conditions which promote DNA hybridization are, for example, 6.0× sodium chloride/sodium citrate (SSC) at about 45° C., followed by a wash of 2.0×SSC at 50° C., are known to those skilled in the art or can be found in Current Protocols in Molecular Biology, John Wiley & Sons, N.Y. (1989), 6.3.1-6.3.6. For example, the salt concentration in the wash step can be selected from a low stringency of about 2.0×SSC at 50° C. to a high stringency of about 0.2×SSC at 50° C. In addition, the temperature in the wash step can be increased from low stringency conditions at room temperature, about 22° C., to high stringency conditions at about 65° C. Both temperature and salt may be varied, or either the temperature or the salt concentration may be held constant while the other variable is changed.

[0064] In a preferred embodiment, a nucleic acid of the present invention will specifically hybridize to one or more of the nucleic acid molecules set forth in SEQ ID NO: 1 through SEQ ID NO: 31015 or complements thereof under moderately stringent conditions, for example, at about 2.0×SSC and about 65° C.

[0065] In a particularly preferred embodiment, a nucleic acid of the present invention will include those nucleic acid molecules that specifically hybridize to one or more of the nucleic acid molecules set forth in SEQ ID NO: 1 through SEQ ID NO: 31015 or complements thereof under high stringency conditions.

[0066] In one aspect of the present invention, the nucleic acid molecules of the present invention have one or more of the nucleic acid sequences set forth in SEQ ID NO: 1 through SEQ ID NO:31015 or complements thereof. In another aspect of the present invention, one or more of the nucleic acid molecules of the present invention share between 100% and 90% sequence identity with one or more of the nucleic acid sequences set forth in SEQ ID NO: 1 through SEQ ID NO: 31015 or complements thereof. In a further aspect of the present invention, one or more of the nucleic acid molecules of the present invention share between 100% and 95% sequence identity with one or more of the nucleic acid sequences set forth in SEQ ID NO: 1 through SEQ ID NO: 31015 or complements thereof. In a more preferred aspect of the present invention, one or more of the nucleic acid molecules of the present invention share between 100% and 98% sequence identity with one or more of the nucleic acid sequences set forth in SEQ ID NO: 1 through SEQ ID NO: 31015 or complements thereof. In an even more preferred aspect of the present invention, one or more of the nucleic acid molecules of the present invention share between 100% and 99% sequence identity with one or more of the sequences set forth in SEQ ID NO: 1 through SEQ ID NO: 31015 or complements thereof. In a further, even more preferred aspect of the present invention, one or more of the nucleic acid molecules of the present invention exhibit 100% sequence identity with one or more nucleic acid molecules present within the cDNA libraries LIB3040, LIB3065, LIB3051, LIB3054, LIB3107, LIB3109 and LIB3093 (Monsanto Company, St. Louis, Mo., United States of America).

[0067] In a preferred embodiment of the present invention, a soybean protein or fragment thereof of the present invention is a homologue of another plant protein. In another preferred embodiment of the present invention, a soybean protein or fragment thereof of the present invention is a homologue of a fungal protein. In another preferred embodiment of the present invention, a soybean protein or fragment thereof of the present invention is a homologue of mammalian protein. In another preferred embodiment of the present invention, a soybean protein or fragment thereof of the present invention is a homologue of a bacterial protein. In another preferred embodiment of the present invention, a soybean protein or fragment thereof of the present invention is a homologue of a maize protein.

[0068] In a preferred embodiment of the present invention, the nucleic molecule of the present invention encodes a soybean protein or fragment thereof where a soybean protein or fragment thereof exhibits a BLAST probability score of greater than 1E-12, preferably a BLAST probability score of between about 1E-30 and about 1E-12, even more preferably a BLAST probability score of greater than 1E-30 with its homologue.

[0069] In another preferred embodiment of the present invention, the nucleic acid molecule encoding a soybean protein or fragment thereof exhibits a % identity with its homologue of between about 25% and about 40%, more preferably of between about 40 and about 70%, even more preferably of between about 70% and about 90% and even more preferably between about 90% and 99%. In another preferred embodiment, of the present invention, a soybean protein or fragment thereof exhibits a % identity with its homologue of 100%.

[0070] In a preferred embodiment of the present invention, the nucleic molecule of the present invention encodes a soybean protein or fragment thereof where the soybean protein exhibits a BLAST score of greater than 120, preferably a BLAST score of between about 1450 and about 120, even more preferably a BLAST score of greater than 1450 with its homologue.

[0071] Nucleic acid molecules of the present invention also include non-soybean homologues. Preferred non-homologues are selected from the group consisting of alfalfa, Arabidopsis, barley, Brassica, broccoli, cabbage, citrus, cotton, garlic, oat, oilseed rape, onion, canola, flax, an ornamental plant, maize, pea, peanut, pepper, potato, rice, rye, sorghum, strawberry, sugarcane, sugarbeet, tomato, wheat, poplar, pine, fir, eucalyptus, apple, lettuce, lentils, grape, banana, tea, turf grasses, sunflower, oil palm and Phaseolus.

[0072] The degeneracy of the genetic code, which allows different nucleic acid sequences to code for the same protein or peptide, is known in the literature. (U.S. Pat. No. 4,757,006, the entirety of which is herein incorporated by reference).

[0073] In an aspect of the present invention, one or more of the nucleic acid molecules of the present invention differ in nucleic acid sequence from those encoding a soybean protein or fragment thereof in SEQ ID NO: 1 through SEQ ID NO: 31015 due to the degeneracy in the genetic code in that they encode the same protein but differ in nucleic acid sequence.

[0074] In another further aspect of the present invention, one or more of the nucleic acid molecules of the present invention differ in nucleic acid sequence from those encoding a soybean protein or fragment thereof in SEQ ID NO: 1 through SEQ ID NO: 31015 due to the fact that the different nucleic acid sequences encode a protein having one or more conservative amino acid residues.

[0075] It is understood that codons capable of coding for such conservative amino acid substitutions are known in the art.

[0076] It is well known in the art that one or more amino acids in a native sequence can be substituted with another amino acid(s), the charge and polarity of which are similar to that of the native amino acid, i.e., a conservative amino acid substitution, resulting in a silent change. Conserved substitutes for an amino acid within the native polypeptide sequence can be selected from other members of the class to which the naturally occurring amino acid belongs. Amino acids can be divided into the following four groups: (1) acidic amino acids, (2) basic amino acids, (3) neutral polar amino acids, and (4) neutral nonpolar amino acids. Representative amino acids within these various groups include, but are not limited to, (1) acidic (negatively charged) amino acids such as aspartic acid and glutamic acid; (2) basic (positively charged) amino acids such as arginine, histidine, and lysine; (3) neutral polar amino acids such as glycine, serine, threonine, cysteine, cystine, tyrosine, asparagine, and glutamine; and (4) neutral nonpolar (hydrophobic) amino acids such as alanine, leucine, isoleucine, valine, proline, phenylalanine, tryptophan, and methionine.

[0077] Conservative amino acid changes within the native polypeptides sequence can be made by substituting one amino acid within one of these groups with another amino acid within the same group. Biologically functional equivalents of the proteins or fragments thereof of the present invention can have 10 or fewer conservative amino acid changes, more preferably seven or fewer conservative amino acid changes, and most preferably five or fewer conservative amino acid changes. The encoding nucleotide sequence will thus have corresponding base substitutions, permitting it to encode biologically functional equivalent forms of the proteins or fragments of the present invention.

[0078] It is understood that certain amino acids may be substituted for other amino acids in a protein structure without appreciable loss of interactive binding capacity with structures such as, for example, antigen-binding regions of antibodies or binding sites on substrate molecules. Because it is the interactive capacity and nature of a protein that defines that protein's biological functional activity, certain amino acid sequence substitutions can be made in a protein sequence and, of course, its underlying DNA coding sequence and, nevertheless, obtain a protein with like properties. It is thus contemplated by the inventors that various changes may be made in the peptide sequences of the proteins or fragments of the present invention, or corresponding DNA sequences that encode said peptides, without appreciable loss of their biological utility or activity. It is understood that codons capable of coding for such amino acid changes are known in the art.

[0079] In making such changes, the hydropathic index of amino acids may be considered. The importance of the hydropathic amino acid index in conferring interactive biological function on a protein is generally understood in the art (Kyte and Doolittle, J. Mol. Biol. 157, 105-132 (1982), herein incorporated by reference in its entirety). It is accepted that the relative hydropathic character of the amino acid contributes to the secondary structure of the resultant protein, which in turn defines the interaction of the protein with other molecules, for example, enzymes, substrates, receptors, DNA, antibodies, antigens, and the like.

[0080] Each amino acid has been assigned a hydropathic index on the basis of its hydrophobicity and charge characteristics (Kyte and Doolittle, 1982); these are isoleucine (+4.5), valine (+4.2), leucine (+3.8), phenylalanine (+2.8), cysteine/cystine (+2.5), methionine (+1.9), alanine (+1.8), glycine (−0.4), threonine (−0.7), serine (−0.8), tryptophan (−0.9), tyrosine (−1.3), proline (−1.6), histidine (−3.2), glutamate (−3.5), glutamine (−3.5), aspartate (−3.5), asparagine (−3.5), lysine (−3.9), and arginine (4.5).

[0081] In making such changes, the substitution of amino acids whose hydropathic indices are within ±2 is preferred, those which are within ±1 are particularly preferred, and those within ±0.5 are even more particularly preferred.

[0082] It is also understood in the art that the substitution of like amino acids can be made effectively on the basis of hydrophilicity. U.S. Pat. No. 4,554,101, incorporated herein by reference in its entirety, states that the greatest local average hydrophilicity of a protein, as govern by the hydrophilicity of its adjacent amino acids, correlates with a biological property of the protein.

[0083] As detailed in U.S. Pat. No. 4,554,101, the following hydrophilicity values have been assigned to amino acid residues: arginine (+3.0), lysine (+3.0), aspartate (+3.01), glutamate (+3.0±1), serine (+0.3), asparagine (+0.2), glutamine (+0.2), glycine (0), threonine (−0.4), proline (−0.5±1), alanine (−0.5), histidine (−0.5), cysteine (−1.0), methionine (−1.3), valine (−1.5), leucine (−1.8), isoleucine (−1.8), tyrosine (−2.3), phenylalanine (−2.5), and tryptophan (−3.4). In making such changes, the substitution of amino acids whose hydrophilicity values are within ±2 is preferred, those which are within ±1 are particularly preferred, and those within ±0.5 are even more particularly preferred.

[0084] In a further aspect of the present invention, one or more of the nucleic acid molecules of the present invention differ in nucleic acid sequence from those encoding a protein or fragment thereof set forth in SEQ ID NO: 1 through SEQ ID NO: 31015 or fragment thereof due to the fact that one or more codons encoding an amino acid has been substituted for a codon that encodes a nonessential substitution of the amino acid originally encoded.

[0085] One aspect of the present invention concerns markers that include nucleic acid molecules SEQ ID NO: 1 through SEQ ID NO: 31015 or complements thereof or fragments of either that can act as markers or other nucleic acid molecules of the present invention that can act as markers. Genetic markers of the present invention include “dominant” or “codominant” markers “Codominant markers” reveal the presence of two or more alleles (two per diploid individual) at a locus. “Dominant markers” reveal the presence of only a single allele per locus. The presence of the dominant marker phenotype (e.g., a band of DNA) is an indication that one allele is present in either the homozygous or heterozygous condition. The absence of the dominant marker phenotype (e.g., absence of a DNA band) is merely evidence that “some other” undefined allele is present. In the case of populations where individuals are predominantly homozygous and loci are predominately dimorphic, dominant and codominant markers can be equally valuable. As populations become more heterozygous and multi-allelic, codominant markers often become more informative of the genotype than dominant markers. Marker molecules can be, for example, capable of detecting polymorphisms such as single nucleotide polymorphisms (SNPs).

[0086] SNPs are single base changes in genomic DNA sequence. They occur at greater frequency and are spaced with a greater uniformity throughout a genome than other reported forms of polymorphism. The greater frequency and uniformity of SNPs means that there is greater probability that such a polymorphism will be found near or in a genetic locus of interest than would be the case for other polymorphisms. SNPs are located in protein-coding regions and noncoding regions of a genome. Some of these SNPs may result in defective or variant protein expression (e.g., as a results of mutations or defective splicing). Analysis (genotyping) of characterized SNPs can require only a plus/minus assay rather than a lengthy measurement, permitting easier automation.

[0087] SNPs can be characterized using any of a variety of methods. Such methods include the direct or indirect sequencing of the site, the use of restriction enzymes (Botstein et al., Am. J. Hum. Genet. 32:314-331 (1980), the entirety of which is herein incorporated reference; Konieczny and Ausubel, Plant J. 4:403-410 (1993), the entirety of which is herein incorporated by reference), enzymatic and chemical mismatch assays (Myers et al., Nature 313:495-498 (1985), the entirety of which is herein incorporated by reference), allele-specific PCR (Newton et al., Nucl. Acids Res. 17:2503-2516 (1989), the entirety of which is herein incorporated by reference; Wu et al., Proc. Natl. Acad. Sci. (U.S.A.) 86:2757-2760 (1989), the entirety of which is herein incorporated by reference), ligase chain reaction (Barany, Proc. Natl. Acad. Sci. (U.S.A.) 88:189-193 (1991), the entirety of which is herein incorporated by reference), single-strand conformation polymorphism analysis (Labrune et al., Am. J. Hum. Genet. 48: 1115-1120 (1991), the entirety of which is herein incorporated by reference), primer-directed nucleotide incorporation assays (Kuppuswami et al., Proc. Natl. Acad. Sci. USA 88:1143-1147 (1991), the entirety of which is herein incorporated by reference), dideoxy fingerprinting (Sarkar et al., Genomics 13:441-443 (1992), the entirety of which is herein incorporated by reference), solid-phase ELISA-based oligonucleotide ligation assays (Nikiforov et al., Nucl. Acids Res. 22:4167-4175 (1994), the entirety of which is herein incorporated by reference), oligonucleotide fluorescence-quenching assays (Livak et al., PCR Methods Appl. 4:357-362 (1995), the entirety of which is herein incorporated by reference), 5′-nuclease allele-specific hybridization TaqMan assay (Livak et al., Nature Genet. 9:341-342 (1995), the entirety of which is herein incorporated by reference), template-directed dye-terminator incorporation (TDI) assay (Chen and Kwok, Nucl. Acids Res. 25:347-353 (1997), the entirety of which is herein incorporated by reference), allele-specific molecular beacon assay (Tyagi et al., Nature Biotech. 16: 49-53 (1998), the entirety of which is herein incorporated by reference), PinPoint assay (Haff and Smirnov, Genome Res. 7: 378-388 (1997), the entirety of which is herein incorporated by reference) and dCAPS analysis (Neff et al., Plant J. 14:387-392 (1998), the entirety of which is herein incorporated by reference).

[0088] Additional markers, such as AFLP markers, RFLP markers and RAPD markers, can be utilized (Walton, Seed World 22-29 (July, 1993), the entirety of which is herein incorporated by reference; Burow and Blake, Molecular Dissection of Complex Traits, 13-29, Paterson (ed.), CRC Press, New York (1988), the entirety of which is herein incorporated by reference). DNA markers can be developed from nucleic acid molecules using restriction endonucleases, the PCR and/or DNA sequence information. RFLP markers result from single base changes or insertions/deletions. These codominant markers are highly abundant in plant genomes, have a medium level of polymorphism and are developed by a combination of restriction endonuclease digestion and Southern blotting hybridization. CAPS are similarly developed from restriction nuclease digestion but only of specific PCR products. These markers are also codominant, have a medium level of polymorphism and are highly abundant in the genome. The CAPS result from single base changes and insertions/deletions.

[0089] Another marker type, RAPDs, are developed from DNA amplification with random primers and result from single base changes and insertions/deletions in plant genomes. They are dominant markers with a medium level of polymorphisms and are highly abundant. AFLP markers require using the PCR on a subset of restriction fragments from extended adapter primers. These markers are both dominant and codominant are highly abundant in genomes and exhibit a medium level of polymorphism.

[0090] SSRs require DNA sequence information. These codominant markers result from repeat length changes, are highly polymorphic and do not exhibit as high a degree of abundance in the genome as CAPS, AFLPs and RAPDs, SNPs also require DNA sequence information. These codominant markers result from single base substitutions. They are highly abundant and exhibit a medium of polymorphism (Rafalski et al., In: Nonmammalian Genomic Analysis, Birren and Lai (ed.), Academic Press, San Diego, Calif., pp. 75-134 (1996), the entirety of which is herein incorporated by reference). It is understood that a nucleic acid molecule of the present invention may be used as a marker.

[0091] A PCR probe is a nucleic acid molecule capable of initiating a polymerase activity while in a double-stranded structure with another nucleic acid. Various methods for determining the structure of PCR probes and PCR techniques exist in the art. Computer generated searches using programs such as Primer3 (www-genome.wi.mit.edu/cgi-bin/primer/primer3.cgi), STSPipeline (www-genome.wi.mit.edu/cgi-bin/www-STS Pipeline), or GeneUp (Pesole et al., BioTechniques 25:112-123 (1998) the entirety of which is herein incorporated by reference), for example, can be used to identify potential PCR primers.

[0092] It is understood that a fragment of one or more of the nucleic acid molecules of the present invention may be a probe and specifically a PCR probe.

[0093] (b) Protein and Peptide Molecules

[0094] A class of agents comprises one or more of the protein or peptide molecules encoded by SEQ ID NO: 1 through SEQ ID NO: 31015 or one or more of the protein or fragment thereof or peptide molecules encoded by other nucleic acid agents of the present invention. As used herein, the term “protein molecule” or “peptide molecule” includes any molecule that comprises five or more amino acids. It is well know in the art that proteins may undergo modification, including post-translational modifications, such as, but not limited to, disulfide bond formation, glycosylation, phosphorylation, or oligomerization. Thus, as used herein, the term “protein molecule” or “peptide molecule” includes any protein molecule that is modified by any biological or non-biological process. The terms “amino acid” and “amino acids” refer to all naturally occurring L-amino acids. This definition is meant to include norleucine, ornithine, homocysteine, and homoserine.

[0095] One or more of the protein or fragment of peptide molecules may be produced via chemical synthesis, or more preferably, by expression in a suitable bacterial or eukaryotic host. Suitable methods for expression are described by Sambrook, et al., (In: Molecular Cloning, A Laboratory Manual, 2nd Edition, Cold Spring Harbor Press, Cold Spring Harbor, N.Y. (1989)), or similar texts.

[0096] A “protein fragment” is a peptide or polypeptide molecule whose amino acid sequence comprises a subset of the amino acid sequence of that protein. A protein or fragment thereof that comprises one or more additional peptide regions not derived from that protein is a “fusion” protein. Such molecules may be derivatized to contain carbohydrate or other moieties (such as keyhole limpet hemocyanin, etc.). Fusion protein or peptide molecule of the present invention are preferably produced via recombinant means.

[0097] Another class of agents comprise protein or peptide molecules encoded by SEQ ID NO: 1 through SEQ ID NO: 31015 or complements thereof or, fragments or fusions thereof in which nonessential, or not relevant, amino acid residues have been added, replaced, or deleted. An example of such a homologue is the homologue protein of all non-soybean plant species, including but not limited to alfalfa, Arabidopsis, barley, Brassica, broccoli, cabbage, citrus, cotton, garlic, oat, oilseed rape, onion, canola, flax, maize, an ornamental plant, pea, peanut, pepper, potato, rice, rye, sorghum, strawberry, sugarcane, sugarbeet, tomato, wheat, poplar, pine, fir, eucalyptus, apple, lettuce, peas, lentils, grape, banana, tea, turf grasses, etc. Particularly preferred non-soybean plants to utilize for the isolation of homologues would include alfalfa, Arabidopsis, barley, cotton, corn, oat, oilseed rape, rice, corn, canola, ornamentals, sugarcane, sugarbeet, tomato, potato, wheat, and turf grasses. Such a homologue can be obtained by any of a variety of methods. Most preferably, as indicated above, one or more of the disclosed sequences (SEQ ID NO: 1 through SEQ ID NO: 31015 or complements thereof) will be used to define a pair of primers that may be used to isolate the homologue-encoding nucleic acid molecules from any desired species. Such molecules can be expressed to yield homologues by recombinant means.

[0098] (c) Antibodies

[0099] One aspect of the present invention concerns antibodies, single-chain antigen binding molecules, or other proteins that specifically bind to one or more of the protein or peptide molecules of the present invention and their homologues, fusions or fragments. Such antibodies may be used to quantitatively or qualitatively detect the protein or peptide molecules of the present invention. As used herein, an antibody or peptide is said to “specifically bind” to a protein or peptide molecule of the present invention if such binding is not competitively inhibited by the presence of non-related molecules.

[0100] Nucleic acid molecules that encode all or part of the protein of the present invention can be expressed, via recombinant means, to yield protein or peptides that can in turn be used to elicit antibodies that are capable of binding the expressed protein or peptide. Such antibodies may be used in immunoassays for that protein. Such protein-encoding molecules, or their fragments may be a “fusion” molecule (i.e., a part of a larger nucleic acid molecule) such that, upon expression, a fusion protein is produced. It is understood that any of the nucleic acid molecules of the present invention may be expressed, via recombinant means, to yield proteins or peptides encoded by these nucleic acid molecules.

[0101] The antibodies that specifically bind proteins and protein fragments of the present invention may be polyclonal or monoclonal, and may comprise intact immunoglobulins, or antigen binding portions of immunoglobulins (such as (F(ab′), F(ab′)₂) fragments, or single-chain immunoglobulins producible, for example, via recombinant means). It is understood that practitioners are familiar with the standard resource materials which describe specific conditions and procedures for the construction, manipulation and isolation of antibodies (see, for example, Harlow and Lane, In Antibodies: A Laboratory Manual, Cold Spring Harbor Press, Cold Spring Harbor, N.Y. (1988), the entirety of which is herein incorporated by reference).

[0102] Murine monoclonal antibodies are particularly preferred. BALB/c mice are preferred for this purpose, however, equivalent strains may also be used. The animals are preferably immunized with approximately 25 μg of purified protein (or fragment thereof) that has been emulsified a suitable adjuvant (such as TiterMax adjuvant (Vaxcel, Norcross, Ga.)). Immunization is preferably conducted at two intramuscular sites, one intraperitoneal site, and one subcutaneous site at the base of the tail. An additional i.v. injection of approximately 25 μg of antigen is preferably given in normal saline three weeks later. After approximately 11 days following the second injection, the mice may be bled and the blood screened for the presence of anti-protein or peptide antibodies. Preferably, a direct binding Enzyme-Linked Immunoassay (ELISA) is employed for this purpose.

[0103] More preferably, the mouse having the highest antibody titer is given a third i.v. injection of approximately 25 μg of the same protein or fragment. The splenic leukocytes from this animal may be recovered 3 days later, and are then permitted to fuse, most preferably, using polyethylene glycol, with cells of a suitable myeloma cell line (such as, for example, the P3X63Ag8.653 myeloma cell line). Hybridoma cells are selected by culturing the cells under “HAT” (hypoxanthine-aminopterin-thymine) selection for about one week. The resulting clones may then be screened for their capacity to produce monoclonal antibodies (“mAbs), preferably by direct ELISA.

[0104] In one embodiment, anti-protein or peptide monoclonal antibodies are isolated using a fusion of a protein, protein fragment, or peptide of the present invention, or conjugate of a protein, protein fragment, or peptide of the present invention, as immunogens. Thus, for example, a group of mice can be immunized using a fusion protein emulsified in Freund's complete adjuvant (e.g., approximately 50 μg of antigen per immunization). At three week intervals, an identical amount of antigen is emulsified in Freund's incomplete adjuvant and used to immunize the animals. Ten days following the third immunization, serum samples are taken and evaluated for the presence of antibody. If antibody titers are too low, a fourth booster can be employed. Polysera capable of binding the protein or peptide can also be obtained using this method.

[0105] In a preferred procedure for obtaining monoclonal antibodies, the spleens of the above-described immunized mice are removed, disrupted, and immune splenocytes are isolated over a ficoll gradient. The isolated splenocytes are fused, using polyethylene glycol with BALB/c-derived HGPRT (hypoxanthine guanine phosphoribosyl transferase) deficient P3x63xAg8.653 plasmacytoma cells. The fused cells are plated into 96-well microtiter plates and screened for hybridoma fusion cells by their capacity to grow in culture medium supplemented with hypothanthine, aminopterin and thymidine for approximately 2-3 weeks.

[0106] Hybridoma cells that arise from such incubation are preferably screened for their capacity to produce an immunoglobulin that binds to a protein of interest. An indirect ELISA may be used for this purpose. In brief, the supernatants of hybridomas are incubated in microtiter wells that contain immobilized protein. After washing, the titer of bound immunoglobulin can be determined using, for example, a goat anti-mouse antibody conjugated to horseradish peroxidase. After additional washing, the amount of immobilized enzyme is determined (for example through the use of a chromogenic substrate). Such screening is performed as quickly as possible after the identification of the hybridoma in order to ensure that a desired clone is not overgrown by non-secreting neighbors. Desirably, the fusion plates are screened several times since the rates of hybridoma growth vary. In a preferred sub-embodiment, a different antigenic form of immunogen may be used to screen the hybridoma. Thus, for example, the splenocytes may be immunized with one immunogen, but the resulting hybridomas can be screened using a different immunogen. It is understood that any of the protein or peptide molecules of the present invention may be used to raise antibodies.

[0107] As discussed below, such antibody molecules or their fragments may be used for diagnostic purposes. Where the antibodies are intended for diagnostic purposes, it may be desirable to derivatize them, for example with a ligand group (such as biotin) or a detectable marker group (such as a fluorescent group, a radioisotope or an enzyme).

[0108] The ability to produce antibodies that bind the protein or peptide molecules of the present invention permits the identification of mimetic compounds of those molecules. A “mimetic compound” is a compound that is not that compound, or a fragment of that compound, but which nonetheless exhibits an ability to specifically bind to antibodies directed against that compound.

[0109] It is understood that any of the agents of the present invention can be substantially purified and/or be biologically active and/or recombinant.

### Uses of the Agents of the Invention

[0110] The nucleic acid molecules and fragments thereof from LIB3040 are isolated from heart to torpedo stage embryos harvested from soybean cultivar Asgrow 3244 plants which are grown in Metromix under greenhouse growth conditions. The ESTs of this library can enable the acquisition of, but are not limited to, genes involved in seed development, therefore, the ESTs of the present invention will find great use in the isolation of a variety of agronomically significant genes, including but not limited to, genes that regulate proteins, amino acids, sterols, oils, minerals, isoflavones, saponins, trypsin inhibitors, vitamins, tocopherols, antinutrient components, carbohydrates, starch metabolism and seed regulatory elements. Such genes are associated with plant growth, quality, yield, and could also serve as links in metabolic and catabolic pathways. Libraries from the embryo tissue can enable the acquisition of a variety of agronomically significant genes involved in the synthesis and catabolism of commercially important traits.

[0111] The nucleic acid molecules and fragments thereof of LIB3065 are isolated from seeds harvested at 25, 35, 45, 55, 65 and 75 days after flowering from soybean cultivar Asgrow 3244 plants. Seed libraries can enable the acquisition of, but are not limited to, genes that store food and seed regulatory elements, therefore, the ESTs of the present invention will find great use in the isolation of a variety of agronomically significant genes, including but not limited to, genes that regulate proteins, amino acids, sterols, oils, minerals, isoflavones, saponins, trypsin inhibitors, vitamins, tocopherols, antinutrient components, carbohydrates, starch metabolism and seed regulatory elements. Such genes are associated with plant growth, quality, yield, and could also serve as links in metabolic and catabolic pathways.

[0112] The nucleic acid molecules and fragments thereof from LIB3051 are isolated from the endosperm tissue and seed coat of germinating seedlings. The endosperm consists a very thin layer of tissue affixed to the inside of the seed coat harvested from Asgrow 3244 seedlings at 8, 10 and 14 HAI (hours after imbibition). The ESTs of the present invention can enable the acquisition of, but are not limited to genes involved in germination and seedling development, therefore, the ESTs of the present invention will find great use in the isolation of a variety of agronomically significant genes, including but not limited to genes that regulate protein, amino acids, sterols, oils, minerals, isoflavones, saponins, trypsin inhibitors, vitamins, tocopherols, antinutrient components, carbohydrates, starch metabolism and seed regulatory elements. Such crucial genes are associated with plant growth, quality, yield, and could also serve as links in important metabolic and catabolic pathways.

[0113] The nucleic acid molecules and fragments thereof from LIB3054 are isolated from soybean root tissue. Roots play a critical role in major vegetative organs which supply water, minerals, and substances essential for plant growth and development, therefore, the ESTs of the present invention will find great use in the isolation of a variety of agronomically significant genes, including but not limited to genes that are necessary for absorption, anchorage, storage, transport, propagation, and nitrogen fixation. Such crucial genes are associated with plant growth, quality, and yield and could also serve as links in important plant metabolic and catabolic pathways.

[0114] The nucleic acid molecules and fragments thereof from LIB3093 are isolated from soybean leaf tissue. Leaves are the carbohydrate factories of crop plants, therefore, the ESTs of the present invention will find great use in the isolation of a variety of agronomically significant genes, including but not limited to genes that are necessary for the interception and transformation of light energy via photosynthesis linked with plant growth, quality, and yield. Genes isolated utilizing the disclosed ESTs would also be critical in pathways including but not limited to a pathway such as nitrogen metabolism linked to fruiting and mobilization and distribution of nitrogen.

[0115] The nucleic acid molecules and fragments thereof from LIB3107 are isolated from drought-stressed soybean plants at the R3 stage (beginning pod) of development. The ESTs of the present invention can enable the acquisition of genes expressed in soybean flower pedicels and those expressed during the process of abscission under drought stress conditions. The ESTs of the present invention will find great use in the isolation of a variety of agronomically significant genes, including but not limited to, genes that encode receptors, signal transducers, transcription factors, translation factors, enzymes, and structural proteins. These gene products are expected to control biochemical and physiological responses to developmental and environmental cues leading to abscission. ESTs from this tissue can enable the acquisition of a variety of agronomically significant genes involved in the synthesis and catabolism of commercially important traits.

[0116] The nucleic acid molecules and fragments thereof from LIB3109 are isolated from non-drought stressed (control) soybean plants at the R3 stage of development. The ESTs of the present invention can enable the acquisition of genes expressed in soybean flower pedicels and those expressed during the process of abscission under non-drought stressed conditions. The ESTs of the present invention will find great use in the isolation of a variety of agronomically significant genes, including but not limited to, genes that encode receptors, signal transducers, transcription factors, translation factors, enzymes, and structural proteins. These gene products are expected to control biochemical and physiological responses to developmental and environmental cues leading to abscission. The library from this tissue can enable the acquisition of a variety of agronomically significant genes involved in the synthesis and catabolism of commercially important traits.

[0117] The nucleic acid molecules and fragments thereof of the present invention from libraries LIB3040, LIB3051, LIB3065, LIB3093, LIB3107, and LIB3109, are from soybean genotype A3244. This genotype has disease resistance to brown stem rot (Phialophora gregata) and Phytophthora root rot (Phytophthora sojae). Libraries from this genotype are likely to find use in the isolation of genes involved in disease resistance against a number of agronomically important fungal pathogens.

[0118] The nucleic acid molecules and fragments thereof the present invention from library LIB3054, are from soybean genotype FT108 and Cristiliana. Libraries from this genotype are likely to find use in the isolation of genes involved in frog eye leaf spot and stem canker resistance genes.

[0119] Nucleic acid molecules and fragments thereof of the present invention may be employed to obtain other nucleic acid molecules. Such molecules include the nucleic acid molecules of other plants or other organisms (e.g., alfalfa, rice, potato, cotton, oat, rye, barley, maize, wheat, Arabidopsis, Brassica, etc.) including the nucleic acid molecules that encode, in whole or in part, protein homologues of other plant species or other organisms, and sequences of genetic elements such as promoters and transcriptional regulatory elements. Such molecules can be readily obtained by using the above-described nucleic acid molecules or fragments thereof to screen cDNA or genomic libraries obtained from such plant species. Methods for forming such libraries are well known in the art. Such homologue molecules may differ in their nucleotide sequences from those found in one or more of SEQ ID NO: 1 through SEQ ID NO: 31015 or complements thereof because complete complementarity is not needed for stable hybridization. The nucleic acid molecules of the present invention therefore also include molecules that, although capable of specifically hybridizing with the nucleic acid molecules may lack “complete complementarity.”

[0120] Any of a variety of methods may be used to obtain one or more of the above-described nucleic acid molecules (Zamechik et al., Proc. Natl. Acad. Sci. (U.S.A.) 83:4143-4146 (1986), the entirety of which is herein incorporated by reference; Goodchild et al., Proc. Natl. Acad. Sci. (U.S.A.) 85:5507-5511 (1988), the entirety of which is herein incorporated by reference; Wickstrom et al., Proc. Natl. Acad. Sci. (U.S.A.) 85:1028-1032 (1988), the entirety of which is herein incorporated by reference; Holt, et al., Molec. Cell. Biol. 8:963-973 (1988), the entirety of which is herein incorporated by reference; Gerwirtz, et al., Science 242:1303-1306 (1988), the entirety of which is herein incorporated by reference; Anfossi, et al., Proc. Natl. Acad. Sci. (U.S.A.) 86:3379-3383 (1989), the entirety of which is herein incorporated by reference; Becker, et al., EMBO J. 8:3685-3691 (1989); the entirety of which is herein incorporated by reference). Automated nucleic acid synthesizers may be employed for this purpose. In lieu of such synthesis, the disclosed nucleic acid molecules may be used to define a pair of primers that can be used with the polymerase chain reaction (Mullis, et al., Cold Spring Harbor Symp. Quant. Biol. 51:263-273 (1986); Erlich et al., EP 50,424; EP 84,796, EP 258,017, EP 237,3-62; Mullis, EP 201,184; Mullis et al., U.S. Pat. No. 4,683,202; Erlich, U.S. Pat. No. 4,582,788; and Saiki, R. et al., U.S. Pat. No. 4,683,194, all of which are hereby incorporated by reference in their entirety) to amplify and obtain any desired nucleic acid molecule or fragment.

[0121] Promoter sequence(s) and other genetic elements including but not limited to transcriptional regulatory elements associated with one or more of the disclosed nucleic acid sequences can also be obtained using the disclosed nucleic acid sequences provided herein.

[0122] In one embodiment, such sequences are obtained by incubating EST nucleic acid molecules or preferably fragments thereof with members of genomic libraries (e.g., maize and soybean) and recovering clones that hybridize to the EST nucleic acid molecule or fragment thereof. In a second embodiment, methods of “chromosome walking,” or inverse PCR may be used to obtain such sequences (Frohman, et al., Proc. Natl. Acad. Sci. (U.S.A.) 85:8998-9002 (1988); Ohara, et al., Proc. Natl. Acad. Sci. (U.S.A.) 86: 5673-5677 (1989); Pang et al., Biotechniques, 22(6); 1046-1048 (1977); Huang et al., Methods Mol. Biol. 69: 89-96 (1977); Hartl et al., Methods Mol. Biol. 58: 293-301 (1996), all of which are hereby incorporated by reference in their entirety). In one embodiment, the disclosed nucleic acid molecules are used to identify cDNAs whose analogous genes contain promoters with desirable expression patterns. The nucleic acid molecules isolated-from the library of the present invention are used to isolate promoters of tissue-enhanced, tissue-specific, developmentally- or environmentally-regulated expression profiles. Isolation and functional analysis of the 5′ flanking promoter sequences of these genes from genomic libraries, for example, using genomic screening methods and PCR techniques would result in the isolation of useful promoters and transcriptional regulatory elements. These methods are known to those of skill in the art and have been described (See for example Birren et al., Genome Analysis: Analyzing DNA, 1, (1997), Cold Spring Harbor Laboratory Press, Cold Spring Harbor, N.Y., the entirety of which is herein incorporated by reference).

[0123] Promoters obtained utilizing the nucleic acid molecules of the present invention could also be modified to affect their control characteristics. Examples of such modifications would include but are not limited to enhancer sequences as reported by Kay et al., Science 236:1299 (1987), herein incorporated by reference in its entirety. Such genetic elements could be used to enhance gene expression of new and existing traits for crop improvements.

[0124] The nucleic acid molecules of the present invention may be used to isolate promoters of tissue enhanced tissue specific, cell-specific, cell -type, developmentally or environmentally regulated expression profiles. Isolation and functional analysis of the 5′ flanking promoter sequences of these genes from genomic libraries, for example, using genomic screening methods and PCR techniques would result in the isolation of useful promoters and transcriptional regulatory elements. These methods are known to those of skill in the art and have been described (See, for example, Birren et. al., Genome Analysis: Analyzing DNA, 1, Cold Spring Harbor Laboratory Press, Cold Spring Harbor, N.Y. (1997), the entirety of which is herein incorporated by reference). Promoters obtained utilizing the nucleic acid molecules of the present invention could also be modified to affect their control characteristics. Examples of such modifications would include but are not limited to enhancer sequences as reported by Kay, et al Science 236:1299 (1987), herein incorporated reference in its entirety. Such genetic elements could be used to enhance gene expression of new and existing traits for crop improvements.

[0125] In an aspect of the present invention, one or more of the nucleic molecules of the present invention are used to determine whether a plant (preferably soybean) has a mutation affecting the level (i.e., the concentration of mRNA in a sample, etc.) or pattern (i.e., the kinetics of expression, rate of decomposition, stability profile, etc.) of the expression encoded in part or whole by one or more of the nucleic acid molecules of the present invention (collectively, the “Expression Response” of a cell or tissue). As used herein, the Expression Response manifested by a cell or tissue is said to be “altered” if it differs from the Expression Response of cells or tissues of plants not exhibiting the phenotype. To determine whether a Expression Response is altered, the Expression Response manifested by the cell or tissue of the plant exhibiting the phenotype is compared with that of a similar cell or tissue sample of a plant not exhibiting the phenotype. As will be appreciated, it is not necessary to re-determine the Expression Response of the cell or tissue sample of plants not exhibiting the phenotype each time such a comparison is made; rather, the Expression Response of a particular plant may be compared with previously obtained values of normal plants. As used herein, the phenotype of the organism is any of one or more characteristics of an organism (e.g., disease resistance, pest tolerance, environmental tolerance, male sterility, yield, quality improvements, etc.). A change in genotype or phenotype may be transient or permanent. Also as used herein, a tissue sample is any sample that comprises more than one cell. In a preferred aspect, a tissue sample comprises cells that share a common characteristic (e.g., derived from leaf, root, or pollen etc).

[0126] In one sub-aspect, such an analysis is conducted by determining the presence and/or identity of polymorphism(s) by one or more of the nucleic acid molecules of the present invention and more specifically, one or more of the EST nucleic acid molecules or fragments thereof which are associated with phenotype, or a predisposition to phenotype.

[0127] Any of a variety of molecules can be used to identify such polymorphism(s). In one embodiment, one or more of the EST nucleic acid molecules (or a sub-fragment thereof) may be employed as a marker nucleic acid molecule to identify such polymorphism(s). Alternatively, such polymorphisms can be detected through the use of a marker nucleic acid molecule or a marker protein that is genetically linked to (i.e., a polynucleotide that co-segregates with) such polymorphism(s).

[0128] In an alternative embodiment, such polymorphisms can be detected through the use of a marker nucleic acid molecule that is physically linked to such polymorphism(s). For this purpose, marker nucleic acid molecules comprising a nucleotide sequence of a polynucleotide located within 1 mb of the polymorphism(s), and more preferably within 100 kb of the polymorphism(s), and most preferably within 10 kb of the polymorphism(s) can be employed.

[0129] The genomes of animals and plants naturally undergo spontaneous mutation in the course of their continuing evolution (Gusella, Ann. Rev. Biochem. 55:831-854 (1986)). A “polymorphism” is a variation or difference in the sequence of the gene or its flanking regions that arises in some of the members of a species. The variant sequence and the “original” sequence co-exist in the species' population. In some instances, such co-existence is in stable or quasi-stable equilibrium.

[0130] A polymorphism is thus said to be “allelic,” in that, due to the existence of the polymorphism, some members of a species may have the original sequence (i.e., the original “allele”) whereas other members may have the variant sequence (i.e., the variant “allele”). In the simplest case, only one variant sequence may exist, and the polymorphism is thus said to be di-allelic. In other cases, the species' population may contain multiple alleles, and the polymorphism is termed tri-allelic, etc. A single gene may have multiple different unrelated polymorphisms. For example, it may have a di-allelic polymorphism at one site, and a multi-allelic polymorphism at another site.

[0131] The variation that defines the polymorphism may range from a single nucleotide variation to the insertion or deletion of extended regions within a gene. In some cases, the DNA sequence variations are in regions of the genome that are characterized by short tandem repeats (STRs) that include tandem di- or tri-nucleotide repeated motifs of nucleotides. Polymorphisms characterized by such tandem repeats are referred to as “variable number tandem repeat” (“VNTR”) polymorphisms. VNTRs have been used in identity analysis (Weber, U.S. Pat. No. 5,075,217; Armour, et al., FEBS Lett. 307:113-115 (1992); Jones, et al., Eur. J. Haematol. 39:144-147 (1987); Horn, et al., PCT Application WO91/14003; Jeffreys, European Patent Application 370,719; Jeffreys, U.S. Pat. No. 5,699,082; Jeffreys. et al., Amer. J. Hum. Genet. 39:11-24 (1986); Jeffreys. et al., Nature 316:76-79 (1985); Gray, et al., Proc. R. Acad. Soc. Lond. 243:241-253 (1991); Moore, et al., Genomics 10:654-660 (1991); Jeffreys, et al., Anim. Genet. 18:1-15 (1987); Hillel, et al., Anim. Genet. 20:145-155 (1989); Hillel, et al., Genet. 124:783-789 (1990), all of which are herein incorporated by reference in their entirety).

[0132] The detection of polymorphic sites in a sample of DNA may be facilitated through the use of nucleic acid amplification methods. Such methods specifically increase the concentration of polynucleotides that span the polymorphic site, or include that site and sequences located either distal or proximal to it. Such amplified molecules can be readily detected by gel electrophoresis or other means.

[0133] The most preferred method of achieving such amplification employs the polymerase chain reaction (“PCR”) (Mullis, et al., Cold Spring Harbor Symp. Quant. Biol. 51:263-273 (1986); Erlich, et al., European Patent Appln. 50,424; European Patent Appln. 84,796, European Patent Application 258,017, European Patent Appln. 237,362; Mullis, European Patent Appln. 201,184; Mullis, et al., U.S. Pat. No. 4,683,202; Erlich., U.S. Pat. No. 4,582,788; and Saiki, et al., U.S. Pat. No. 4,683,194, all of which are herein incorporated by reference), using primer pairs that are capable of hybridizing to the proximal sequences that define a polymorphism in its double-stranded form.

[0134] In lieu of PCR, alternative methods, such as the “Ligase Chain Reaction” (“LCR”) may be used (Barany, Proc. Natl. Acad. Sci. (U.S.A.) 88:189-193 (1991), the entirety of which is herein incorporated by reference). LCR uses two pairs of oligonucleotide probes to exponentially amplify a specific target. The sequences of each pair of oligonucleotides is selected to permit the pair to hybridize to abutting sequences of the same strand of the target. Such hybridization forms a substrate for a template-dependent ligase. As with PCR, the resulting products thus serve as a template in subsequent cycles and an exponential amplification of the desired sequence is obtained.

[0135] LCR can be performed with oligonucleotides having the proximal and distal sequences of the same strand of a polymorphic site. In one embodiment, either oligonucleotide will be designed to include the actual polymorphic site of the polymorphism. In such an embodiment, the reaction conditions are selected such that the oligonucleotides can be ligated together only if the target molecule either contains or lacks the specific nucleotide that is complementary to the polymorphic site present on the oligonucleotide. Alternatively, the oligonucleotides may be selected such that they do not include the polymorphic site (see, Segev, PCT Application WO 90/01069, the entirety of which is herein incorporated by reference).

[0136] The “Oligonucleotide Ligation Assay” (“OLA”) may alternatively be employed (Landegren, et al., Science 241:1077-1080 (1988), the entirety of which is herein incorporated by reference). The OLA protocol uses two oligonucleotides which are designed to be capable of hybridizing to abutting sequences of a single strand of a target. OLA, like LCR, is particularly suited for the detection of point mutations. Unlike LCR, however, OLA results in “linear” rather than exponential amplification of the target sequence.

[0137] Nickerson, et al. have described a nucleic acid detection assay that combines attributes of PCR and OLA (Nickerson, et al., Proc. Natl. Acad. Sci. (U.S.A.) 87:8923-8927 (1990), the entirety of which is herein incorporated by reference). In this method, PCR is used to achieve the exponential amplification of target DNA, which is then detected using OLA. In addition to requiring multiple, and separate, processing steps, one problem associated with such combinations is that they inherit all of the problems associated with PCR and OLA.

[0138] Schemes based on ligation of two (or more) oligonucleotides in the presence of nucleic acid having the sequence of the resulting “di-oligonucleotide”, thereby amplifying the di-oligonucleotide, are also known (Wu, et al., Genomics 4:560 (1989), the entirety of which is herein incorporated by reference), and may be readily adapted to the purposes of the present invention.

[0139] Other known nucleic acid amplification procedures, such as allele-specific oligomers, branched DNA technology, transcription-based amplification systems, or isothermal amplification methods may also be used to amplify and analyze such polymorphisms (Malek, et al., U.S. Pat. No. 5,130,238; Davey, et al., European Patent Application 329,822; Schuster et al., U.S. Pat. No. 5,169,766; Miller, et al., PCT Application WO 89/06700; Kwoh, et al., Proc. Natl. Acad. Sci. (U.S.A.) 86:1173-1177 (1989); Gingeras, et al., PCT Application WO 88/10315; Walker, et al., Proc. Natl. Acad. Sci. (U.S.A.) 89:392-396 (1992), all of which are herein incorporated by reference in their entirety).

[0140] The identification of a polymorphism can be determined in a variety of ways. By correlating the presence or absence of it in a plant with the presence or absence of a phenotype, it is possible to predict the phenotype of that plant. If a polymorphism creates or destroys a restriction endonuclease cleavage site, or if it results in the loss or insertion of DNA (e.g., a VNTR polymorphism), it will alter the size or profile of the DNA fragments that are generated by digestion with that restriction endonuclease. As such, individuals that possess a variant sequence can be distinguished from those having the original sequence by restriction fragment analysis. Polymorphisms that can be identified in this manner are termed “restriction fragment length polymorphisms” (“RFLPs”). RFLPs have been widely used in human and plant genetic analyses (Glassberg, UK Patent Application 2135774; Skolnick, et al., Cytogen. Cell Genet. 32:58-67 (1982); Botstein, et al., Ann. J. Hum. Genet. 32:314-331 (1980); Fischer, et al. (PCT Application WO90/13668); Uhlen, PCT Application WO90/11369).

[0141] Polymorphisms can also be identified by Single Strand Conformation Polymorphism (SSCP) analysis. The SSCP technique is a method capable of identifying most sequence variations in a single strand of DNA, typically between 150 and 250 nucleotides in length (Elles, Methods in Molecular Medicine: Molecular Diagnosis of Genetic Diseases, Humana Press (1996), the entirety of which is herein incorporated by reference); Orita et al., Genomics 5: 874-879 (1989), the entirety of which is herein incorporated by reference). Under denaturing conditions a single strand of DNA will adopt a conformation that is uniquely dependent on its sequence conformation. This conformation usually will be different, even if only a single base is changed. Most conformations have been reported to alter the physical configuration or size sufficiently to be detectable by electrophoresis. A number of protocols have been described for SSCP including, but not limited to Lee et al., Anal. Biochem. 205, 289-293 (1992), the entirety of which is herein incorporated by reference; Suzuki et al., Anal. Biochem. 192: 82-84 (1991), the entirety of which is herein incorporated by reference; Lo et al., Nucleic Acids Research 20: 1005-1009 (1992), the entirety of which is herein incorporated by reference; Sarkar et al., Genomics 13: 441-443 (1992), the entirety of which is herein incorporated by reference). It is understood that one or more of the nucleic acids of the present invention, may be utilized as markers or probes to detect polymorphisms by SSCP analysis.

[0142] Polymorphisms may also be found using a DNA fingerprinting technique called amplified fragment length polymorphism (AFLP), which is based on the selective PCR amplification of restriction fragments from a total digest of genomic DNA to profile that DNA. Vos, et al., Nucleic Acids Res. 23:4407-4414 (1995), the entirety of which is herein incorporated by reference. This method allows for the specific co-amplification of high numbers of restriction fragments, which can be visualized by PCR without knowledge of the nucleic acid sequence.

[0143] AFLP employs basically three steps. Initially, a sample of genomic DNA is cut with restriction enzymes and oligonucleotide adapters are ligated to the restriction fragments of the DNA. The restriction fragments are then amplified using PCR by using the adapter and restriction sequence as target sites for primer annealing. The selective amplification is achieved by the use of primers that extend into the restriction fragments, amplifying only those fragments in which the primer extensions match the nucleotide flanking the restriction sites. These amplified fragments are then visualized on a denaturing polyacrylamide gel.

[0144] AFLP analysis has been performed on Salix (Beismann, et al., Mol. Ecol. 6:989-993 (1997), the entirety of which is herein incorporated by reference); Acinetobacter (Janssen, et al., Int. J. Syst. Bacteriol 47:1179-1187 (1997), the entirety of which is herein incorporated by reference), Aeromonas popoffi (Huys, et al., Int. J. Syst. Bacteriol. 47:1165-1171 (1997), the entirety of which is herein incorporated by reference), rice (McCouch, et al., Plant Mol. Biol. 35:89-99 (1997), the entirety of which is herein incorporated by reference); Nandi, et al., Mol. Gen. Genet. 255:1-8 (1997); Cho, et al., Genome 39:373-378 (1996), herein incorporated by reference), barley (Hordeum vulgare)(Simons, et al., Genomics 44:61-70 (1997), the entirety of which is herein incorporated by reference; Waugh, et al., Mol. Gen. Genet. 255:311-321 (1997), the entirety of which is herein incorporated by reference; Qi, et al., Mol. Gen Genet. 254:330-336 (1997), the entirety of which is herein incorporated by reference; Becker, et al., Mol. Gen. Genet. 249:65-73 (1995), the entirety of which is herein incorporated by reference), potato (Van der Voort, et al., Mol. Gen. Genet. 255:438-447 (1997), the entirety of which is herein incorporated by reference; Meksem, et al., Mol. Gen. Genet. 249:74-81 (1995), the entirety of which is herein incorporated by reference), Phytophthora infestans (Van der Lee, et al., Fungal Genet. Biol. 21:278-291 (1997), the entirety of which is herein incorporated by reference), Bacillus anthracis (Keim, et al., J. Bacteriol. 179:818-824 (1997)), Astragalus cremnophylax (Travis, et al., Mol. Ecol. 5:735-745 (1996), the entirety of which is herein incorporated by reference), Arabidopsis (Cnops, et al., Mol. Gen. Genet. 253:3241 (1996), the entirety of which is herein incorporated by reference), Escherichia coli (Lin, et al., Nucleic Acids Res. 24:3649-3650 (1996), the entirety of which is herein incorporated by reference), Aeromonas (Huys, et al., Int. J. Syst. Bacteriol. 46:572-580 (1996), the entirety of which is herein incorporated by reference), nematode (Folkertsma, et al., Mol. Plant Microbe Interact. 9:47-54 (1996), the entirety of which is herein incorporated by reference), tomato (Thomas, et al., Plant J. 8:785-794 (1995), the entirety of which is herein incorporated by reference), and human (Latorra, et al., PCR Methods Appl. 3:351-358 (1994)). AFLP analysis has also been used for fingerprinting mRNA (Money, et al., Nucleic Acids Res. 24:2616-2617 (1996), the entirety of which is herein incorporated by reference; Bachem, et al., Plant J. 9:745-753 (1996), the entirety of which is herein incorporated by reference). It is understood that one or more of the nucleic acids of the present invention, may be utilized as markers or probes to detect polymorphisms by AFLP analysis for fingerprinting mRNA.

[0145] Polymorphisms may also be found using random amplified polymorphic DNA (RAPD) (Williams et al., Nucl. Acids Res. 18: 6531-6535 (1990), the entirety of which is herein incorporated by reference) and cleaveable amplified polymorphic sequences (CAPS) (Lyamichev et al., Science 260: 778-783 (1993), the entirety of which is herein incorporated by reference). It is understood that one or more of the nucleic acids of the present invention, may be utilized as markers or probes to detect polymorphisms by RAPD or CAPS analysis.

[0146] Polymorphisms are useful, through linkage analysis, to define the genetic distances or physical distances between polymorphic traits. A physical map or ordered array of genomic DNA fragments in the desired region containing the gene may be used to characterize and isolate genes corresponding to desirable traits. For this purpose, yeast artificial chromosomes (YACs), bacterial artificial chromosomes (BACs), and cosmids are appropriate vectors for cloning large segments of DNA molecules. Although fewer clones are needed to make a contig for a specific genomic region by using YACs (Agyare et al., Genome Res. 7: 1-9 (1997), the entirety of which is herein incorporated by reference; James et al., Genomics 32: 425430 (1996), the entirety of which is herein incorporated by reference), chimerism in the inserted DNA fragment can arise. Cosmids are convenient for handling smaller-size DNA molecules and may be used for transformation in developing transgenic plants. BACs also carry DNA fragments and are less prone to chimerism.

[0147] Through genetic mapping, a fine scale linkage map can be developed using DNA markers and, then, a genomic DNA library of large-sized fragments can be screened with molecular markers linked to the desired trait. Molecular markers are advantageous for agronomic traits that are otherwise difficult to tag, such as resistance to pathogens, insects and nematodes, tolerance to abiotic stress, quality parameters and quantitative traits such as high yield potential.

[0148] The essential requirements for marker-assisted selection in a plant breeding program are: (1) the marker(s) should co-segregate or be closely linked with the desired trait; (2) an efficient means of screening large populations for the molecular marker(s) should be available; and (3) the screening technique should have high reproducibility across laboratories and preferably be economical to use and be user-friendly.

[0149] The genetic linkage of marker molecules can be established by a gene mapping model such as, without limitation, the flanking marker model reported by Lander and Botstein, Genetics 121:185-199 (1989) and the interval mapping, based on maximum likelihood methods described by Lander and Botstein, Genetics 121:185-199 (1989) and implemented in the software package MAPMAKER/QTL (Lincoln and Lander, Mapping Genes Controlling Quantitative Traits Using MAPMAKER/QTL, Whitehead Institute for Biomedical Research, Massachusetts, (1990). Additional software includes Qgene, Version 2.23 (1996), Department of Plant Breeding and Biometry, 266 Emerson Hall, Cornell University, Ithaca, N.Y., the manual of which is herein incorporated by reference in its entirety). Use of Qgene software is a particularly preferred approach.

[0150] A maximum likelihood estimate (MLE) for the presence of a marker is calculated, together with an MLE assuming no QTL effect, to avoid false positives. A log=hd 10 =l of an odds ratio (LOD) is then calculated as: LOD=log₁₀ (MLE for the presence of a QTL/MLE given no linked QTL).

[0151] The LOD score essentially indicates how much more likely the data are to have arisen assuming the presence of a QTL than in its absence. The LOD threshold value for avoiding a false positive with a given confidence, say 95%, depends on the number of markers and the length of the genome. Graphs indicating LOD thresholds are set forth in Lander and Botstein, Genetics 121:185-199 (1989) the entirety of which is herein incorporated by reference and further described by Arús and Moreno-González, Plant Breeding, Hayward et al., (eds.) Chapman & Hall, London, pp. 314-331 (1993), the entirety of which is herein incorporated by reference.

[0152] Additional models can be used. Many modifications and alternative approaches to interval mapping have been reported, including the use of non-parametric methods (Kruglyak and Lander, Genetics 139:1421-1428 (1995), the entirety of which is herein incorporated by reference). Multiple regression methods or models can be also be used, in which the trait is regressed on a large number of markers (Jansen, Biometrics in Plant Breeding, van Oijen and Jansen (eds.), Proceedings of the Ninth Meeting of the Eucarpia Section Biometrics in Plant Breeding, The Netherlands, pp. 116-124 (1994); Weber and Wricke, Advances in Plant Breeding, Blackwell, Berlin, 16 (1994), both of which is herein incorporated by reference in their entirety). Procedures combining interval mapping with regression analysis, whereby the phenotype is regressed onto a single putative QTL at a given marker interval and at the same time onto a number of markers that serve as ‘cofactors,’ have been reported by Jansen and Stam, Genetics 136:1447-1455 (1994), the entirety of which is herein incorporated by reference and Zeng, Genetics 136:1457-1468 (1994) the entirety of which is herein incorporated by reference. Generally, the use of cofactors reduces the bias and sampling error of the estimated QTL positions (Utz and Melchinger, Biometrics in Plant Breeding, van Oijen and Jansen (eds.) Proceedings of the Ninth Meeting of the Eucarpia Section Biometrics in Plant Breeding, The Netherlands, pp. 195-204 (1994), the entirety of which is herein incorporated by reference, thereby improving the precision and efficiency of QTL mapping (Zeng, Genetics 136:1457-1468 (1994)). These models can be extended to multi-environment experiments to analyze genotype-environment interactions (Jansen et al., Theo. Appl. Genet. 91:33-37 (1995), the entirety of which is herein incorporated by reference).

[0153] Selection of an appropriate mapping population is important to map construction. The choice of an appropriate mapping population depends on the type of marker systems employed (Tanksley et al., Molecular mapping plant chromosomes. Chromosome structure and function: Impact of new concepts, Gustafson and Appels (eds.), Plenum Press, New York, pp. 157-173 (1988), the entirety of which is herein incorporated by reference). Consideration must be given to the source of parents (adapted vs. exotic) used in the mapping population. Chromosome pairing and recombination rates can be severely disturbed (suppressed) in wide crosses (adapted x exotic) and generally yield greatly reduced linkage distances. Wide crosses will usually provide segregating populations with a relatively large array of polymorphisms when compared to progeny in a narrow cross (adapted x adapted).

[0154] An F₂ population is the first generation of selfing after the hybrid seed is produced. Usually a single F₁ plant is selfed to generate a population segregating for all the genes in Mendelian (1:2:1) fashion. Maximum genetic information is obtained from a completely classified F₂ population using a codominant marker system (Mather, Measurement of Linkage in Heredity, Methuen and Co., (1938), the entirety of which is herein incorporated by reference). In the case of dominant markers, progeny tests (e.g., F₃, BCF₂) are required to identify the heterozygotes, thus making it equivalent to a completely classified F₂ population. However, this procedure is often prohibitive because of the cost and time involved in progeny testing. Progeny testing of F₂ individuals is often used in map construction where phenotypes do not consistently reflect genotype (e.g., disease resistance) or where trait expression is controlled by a QTL. Segregation data from progeny test populations (e.g., F₃ or BCF₂) can be used in map construction. Marker-assisted selection can then be applied to cross progeny based on marker-trait map associations (F2, F₃), where linkage groups have not been completely disassociated by recombination events (i.e., maximum disequilibrium).

[0155] Recombinant inbred lines (RIL) (genetically related lines; usually >F₅, developed from continuously selfing F₂ lines towards homozygosity) can be used as a mapping population. Information obtained from dominant markers can be maximized by using RIL because all loci are homozygous or nearly so. Under conditions of tight linkage (i.e., about <10% recombination), dominant and co-dominant markers evaluated in RIL populations provide more information per individual than either marker type in backcross populations (Reiter et al., Proc. Natl. Acad. Sci. (U.S.A.) 89:1477-1481 (1992), the entirety of which is herein incorporated by reference). However, as the distance between markers becomes larger (i.e., loci become more independent), the information in RIL populations decreases dramatically when compared to codominant markers.

[0156] Backcross populations (e.g., generated from a cross between a successful variety (recurrent parent) and another variety (donor parent) carrying a trait not present in the former) can be utilized as a mapping population. A series of backcrosses to the recurrent parent can be made to recover most of its desirable traits. Thus a population is created consisting of individuals nearly like the recurrent parent but each individual carries varying amounts or mosaic of genomic regions from the donor parent. Backcross populations can be useful for mapping dominant markers if all loci in the recurrent parent are homozygous and the donor and recurrent parent have contrasting polymorphic marker alleles (Reiter et al., Proc. Natl. Acad. Sci. (U.S.A.) 89:1477-1481 (1992)). Information obtained from backcross populations using either codominant or dominant markers is less than that obtained from F₂ populations because one, rather than two, recombinant gametes are sampled per plant. Backcross populations, however, are more informative (at low marker saturation) when compared to RILs as the distance between linked loci increases in RIL populations (i.e., about 15% recombination). Increased recombination can be beneficial for resolution of tight linkages, but may be undesirable in the construction of maps with low marker saturation.

[0157] Near-isogenic lines (NL) created by many backcrosses to produce an array of individuals that are nearly identical in genetic composition except for the trait or genomic region under interrogation can be used as a mapping population. In mapping with NILs, only a portion of the polymorphic loci are expected to map to a selected region.

[0158] Bulk segregant analysis (BSA) is a method developed for the rapid identification of linkage between markers and traits of interest (Michelmore et al., Proc. Natl. Acad. Sci. (U.S.A.) 88:9828-9832 (1991), the entirety of which is herein incorporated by reference). In BSA, two bulked DNA samples are drawn from a segregating population originating from a single cross. These bulks contain individuals that are identical for a particular trait (resistant or susceptible to particular disease) or genomic region but arbitrary at unlinked regions (i.e., heterozygous). Regions unlinked to the target region will not differ between the bulked samples of many individuals in BSA.

[0159] It is understood that one or more of the nucleic acid molecules of the present invention may be used as molecular markers. It is also understood that one or more of the protein molecules of the present invention may be used as molecular markers.

[0160] In accordance with this aspect of the present invention, a sample nucleic acid is obtained from plants cells or tissues. Any source of nucleic acid may be used. Preferably, the nucleic acid is genomic DNA. The nucleic acid is subjected to restriction endonuclease digestion. For example, one or more EST nucleic acid molecule or fragment thereof can be used as a probe in accordance with the above-described polymorphic methods. The polymorphism obtained in this approach can then be cloned to identify the mutation at the coding region which alters the protein's structure or regulatory region of the gene which affects its expression level.

[0161] In one aspect of the present invention, an evaluation can be conducted to determine whether a particular mRNA molecule is present. One or more of the nucleic acid molecules of the present invention, preferably one or more of the EST nucleic acid molecules of the present invention are utilized to detect the presence or quantity of the mRNA species. Such molecules are then incubated with cell or tissue extracts of a plant under conditions sufficient to permit nucleic acid hybridization. The detection of double-stranded probe-mRNA hybrid molecules is indicative of the presence of the mRNA; the amount of such hybrid formed is proportional to the amount of mRNA. Thus, such probes may be used to ascertain the level and extent of the mRNA production in a plant's cells or tissues. Such nucleic acid hybridization may be conducted under quantitative conditions (thereby providing a numerical value of the amount of the mRNA present). Alternatively, the assay may be conducted as a qualitative assay that indicates either that the mRNA is present, or that its level exceeds a user set, predefined value.

[0162] A principle of in situ hybridization is that a labeled, single-stranded nucleic acid probe will hybridize to a complementary strand of cellular DNA or RNA and, under the appropriate conditions, these molecules will form a stable hybrid. When nucleic acid hybridization is combined with histological techniques, specific DNA or RNA sequences can be identified within a single cell. An advantage of in situ hybridization over more conventional techniques for the detection of nucleic acids is that it allows an investigator to determine the precise spatial population (Angerer et al., Dev. Biol. 101: 477-484 (1984), the entirety of which is herein incorporated by reference; Angerer et al., Dev. Biol. 112: 157-166 (1985), the entirety of which is herein incorporated by reference; Dixon et al., EMBO J. 10: 1317-1324 (1991), the entirety of which is herein incorporated by reference). In situ hybridization may be used to measure the steady-state level of RNA accumulation. It is a sensitive technique and RNA sequences present in as few as 5-10 copies per cell can be detected (Hardin et al., J. Mol. Biol. 202: 417-431.(1989), the entirety of which is herein incorporated by reference). A number of protocols have been devised for in situ hybridization, each with tissue preparation, hybridization, and washing conditions (Meyerowitz, Plant Mol. Biol. Rep. 5: 242-250 (1987), the entirety of which is herein incorporated by reference; Cox and Goldberg, In: Plant Molecular Biology: A Practical Approach (ed. C. H. Shaw), pp. 1-35. IRL Press, Oxford (1988), the entirety of which is herein incorporated by reference; Raikhel et al., In situ RNA hybridization in plant tissues. In Plant Molecular Biology Manual, vol. B9: 1-32. Kluwer Academic Publisher, Dordrecht, Belgium (1989), the entirety of which is herein incorporated by reference).

[0163] In situ hybridization also allows for the localization of proteins within a tissue or cell (Wilkinson, In Situ Hybridization, Oxford University Press, Oxford (1992), the entirety of which is herein incorporated by reference; Langdale, In Situ Hybridization 165-179 In: The Maize Handbook, eds. Freeling and Walbot, Springer-Verlag, New York (1994), the entirety of which is herein incorporated by reference). It is understood that one or more of the molecules of the present invention, preferably one or more of the EST nucleic acid molecules of the present invention or one or more of the antibodies of the present invention may be utilized to detect the level or pattern of a protein or fragment thereof by in situ hybridization.

[0164] Fluorescent in situ hybridization also enables the localization of a particular DNA sequence along a chromosome which is useful, among other uses, for gene mapping, following chromosomes in hybrid lines or detecting chromosomes with translocations, transversions or deletions. In situ hybridization has been used to identify chromosomes in several plant species (Griffor et al., Plant Mol. Biol. 17: 101-109 (1991), the entirety of which is herein incorporated by reference; Gustafson et al., Proc. Nat'l. Acad. Sci. (U.S.A.). 87: 1899-1902 (1990), herein incorporated by reference; Mukai and Gill, Genome 34: 448-452. (1991); Schwarzacher and Heslop-Harrison, Genome 34: 317-323 (1991); Wang et al., Jpn. J. Genet. 66: 313-316 (1991), the entirety of which is herein incorporated by reference; Parra and Windle, Nature Genetics, 5: 17-21 (1993), the entirety of which is herein incorporated by reference). It is understood that the nucleic acid molecules of the present invention may be used as probes or markers to localize sequences along a chromosome.

[0165] It is also understood that one or more of the molecules of the present invention, preferably one or more of the EST nucleic acid molecules of the present invention or one or more of the antibodies of the present invention may be utilized to detect the expression level or pattern of a protein or mRNA thereof by in situ hybridization.

[0166] Another method to localize the expression of a molecule is tissue printing. Tissue printing provides a way to screen, at the same time on the same membrane many tissue sections from different plants or different developmental stages. Tissue-printing procedures utilize films designed to immobilize proteins and nucleic acids. In essence, a freshly cut section of an organ is pressed gently onto nitrocellulose paper, nylon membrane or polyvinylidene difluoride membrane. Such membranes are commercially available (e.g., Millipore, Bedford, Mass.). The contents of the cut cell transfer onto the membrane, and the molecules are immobilized to the membrane. The immobilized molecules form a latent print that can be visualized with appropriate probes. When a plant tissue print is made on nitrocellulose paper, the cell walls leave a physical print that makes the anatomy visible without further treatment (Varner and Taylor, Plant Physiol. 91: 31-33 (1989), the entirety of which is herein incorporated by reference).

[0167] Tissue printing on substrate films is described by Daoust, Exp. Cell Res. 12: 203-211 (1957), the entirety of which is herein incorporated by reference, who detected amylase, protease, ribonuclease, and deoxyribonuclease in animal tissues using starch, gelatin, and agar films. These techniques can be applied to plant tissues (Yomo and Taylor, Planta 112:3543 (1973); Harris and Chrispeels, Plant Physiol. 56: 292-299 (1975). Advances in membrane technology have increased the range of applications of Daoust's tissue-printing techniques allowing (Cassab and Varner, J. Cell. Biol. 105: 2581-2588 (1987), the entirety of which is herein incorporated by reference; the histochemical localization of various plant enzymes and deoxyribonuclease on nitrocellulose paper and nylon (Spruce et al., Phytochemistry, 26: 2901-2903 (1987), the entirety of which is herein incorporated by reference; Barres et al. Neuron 5: 527-544 (1990), the entirety of which is herein incorporated by reference; the entirety of which is herein incorporated by reference; Reid and Pont-Lezica, Tissue Printing: Tools for the Study of Anatomy, Histochemistry, and Gene Expression, Academic Press, New York, N.Y. (1992), the entirety of which is herein incorporated by reference; Reid et al. Plant Physiol. 93: 160-165 (1990), herein incorporate by reference; Ye et al. Plant J. 1: 175-183 (1991), the entirety of which is herein incorporated by reference).

[0168] It is understood that one or more of the molecules of the present invention, preferably one or more of the EST nucleic acid molecules of the present invention or one or more of the antibodies of the present invention may be utilized to detect the presence or quantity of a protein by tissue printing.

[0169] Further, it is also understood that any of the nucleic acid molecules of the present invention may be used as marker nucleic acids and or probes in connection with methods that require probes or marker nucleic acids. As used herein, a probe is an agent that is utilized to determine an attribute or feature (e.g., presence or absence, location, correlation, etc.) or a molecule, cell, tissue or plant. As used herein, a marker nucleic acid is a nucleic acid molecule that is utilized to determine an attribute or feature (e.g., presence or absence, location, correlation, etc.) or a molecule, cell, tissue or plant.

[0170] A microarray-based method for high-throughput monitoring of plant gene expression may be utilized to measure gene-specific hybridization targets. This ‘chip’-based approach involves using microarrays of nucleic acid molecules as gene-specific hybridization targets to quantitatively measure expression of the corresponding plant genes (Schena et al., Science 270: 467-470 (1995), the entirety of which is herein incorporated by reference; Shalon, Ph.D. Thesis. Stanford University (1996), the entirety of which is herein incorporated by reference). Every nucleotide in a large sequence can be queried at the same time. Hybridization can be used to efficiently analyze large amounts of nucleotide sequence.

[0171] Several microarray methods have been described. One method compares the sequences to be analyzed by hybridization to a set of oligonucleotides representing all possible subsequences (Bains and Smith, J. Theor. Biol. 135: 303 (1989), the entirety of which is herein incorporated by reference). A second method hybridizes the sample to an array of oligonucleotide probes. An array consisting of oligonucleotides complementary to subsequences of a target sequence can be used to determine the identity of a target sequence, measure its amount, and detect differences between the target and a reference sequence. Nucleic acid molecules microarrays may also be screened with protein molecules or fragments thereof to determine nucleic acid molecules that specifically bind protein molecules or fragments thereof.

[0172] The microarray approach may be used with polypeptide targets (U.S. Pat. No. 5,445,934; U.S. Pat. No: 5,143,854; U.S. Pat. No. 5,079,600; U.S. Pat. No. 4,923,901, all of which are herein incorporated by reference in their entirety). Essentially, polypeptides are synthesized on a substrate (microarray) and these polypeptides can be screened with either protein molecules or fragments thereof or nucleic acid molecules in order to screen for either protein molecules or fragments thereof or nucleic acid molecules that specifically bind the target polypeptides. Implementation of these techniques rely on recently developed combinatorial technologies to generate any ordered array of a large number of oligonucleotide probes (Fodor et al., Science 251:767-773 (1991), the entirety of which is herein incorporated by reference).

[0173] It is understood that one or more of the molecules of the present invention, preferably one or more of the nucleic acid molecules or protein molecules or fragments thereof of the present invention may be utilized in a microarray based method.

[0174] In a preferred embodiment of the present invention microarrays may be prepared that comprise nucleic acid molecules where preferably at least 10%, preferably at least 25%, more preferably at least 50% and even more preferably at least 75%, 80%, 85%, 90% or 95% of the nucleic acid molecules located on that array are selected from the group of nucleic acid molecules that specifically hybridize to one or more nucleic acid molecule having a nucleic acid sequence selected from the group of SEQ ID NO: 1 through SEQ ID NO: 31015 or complement thereof or fragments of either.

[0175] A particular preferred microarray embodiment of the present invention is a microarray comprising nucleic acid molecules encoding genes or fragments thereof that are homologues of known genes or nucleic acid molecules that comprise genes or fragment thereof that elicit only limited or no matches to known genes. A further preferred microarray embodiment of the present invention is a microarray comprising nucleic acid molecules having genes or fragments thereof that are homologues of known genes and nucleic acid molecules that comprise genes or fragment thereof that elicit only limited or no matches to known genes. Site-directed mutagenesis may be utilized to modify nucleic acid sequences, particularly as it is a technique that allows one or more of the amino acids encoded by a nucleic acid molecule to be altered (e.g., a threonine to be replaced by a methionine). Three basic methods for site-directed mutagenesis are often employed. These are cassette mutagenesis (Wells et al., Gene 34:315-23 (1985), the entirety of which is herein incorporated by reference), primer extension (Gilliam et al., Gene 12:129-137 (1980), the entirety of which is herein incorporated by reference); Zoller and Smith, Methods Enzymol. 100:468-500 (1983), the entirety of which is herein incorporated by reference; and Dalbadie-McFarland et al., Proc. Natl. Acad. Sci. (U.S.A.) 79:6409-6413 (1982), the entirety of which is herein incorporated by reference) and methods based upon PCR (Scharf et al., Science 233:1076-1078 (1986), the entirety of which is herein incorporated by reference; Higuchi et al., Nucleic Acids Res. 16:7351-7367 (1988), the entirety of which is herein incorporated by reference). Site-directed mutagenesis approaches are also described in European Patent 0 385 962, the entirety of which is herein incorporated by reference, European Patent 0 359 472, the entirety of which is herein incorporated by reference, and PCT Patent Application WO 93/07278, the entirety of which is herein incorporated by reference.

[0176] Site-directed mutagenesis strategies have been applied to plants for both in vitro as well as in vivo site-directed mutagenesis (Lanz et al., J. Biol. Chem. 266:9971-6 (1991), the entirety of which is herein incorporated by reference; Kovgan and Zhdanov, Biotekhnologiya 5:148-154; No. 207160n, Chemical Abstracts 110:225 (1989), the entirety of which is herein incorporated by reference; Ge et al., Proc. Natl. Acad. Sci. (U.S.A.) 86:4037-4041 (1989), the entirety of which is herein incorporated by reference, Zhu et al., J. Biol. Chem. 271:18494-18498 (1996), Chu et al., Biochemistry 33:6150-6157 (1994), the entirety of which is herein incorporated by reference, Small et al., EMBO J. 11:1291-1296 (1992), the entirety of which is herein incorporated by reference, Cho et al., Mol. Biotechnol. 8:13-16 (1997), Kita et al., J. Biol. Chem. 271:26529-26535 (1996), the entirety of which is herein incorporated by reference, Jin et al., Mol. Microbiol. 7:555-562 (1993), the entirety of which is herein incorporated by reference, Hatfield and Vierstra, J. Biol. Chem. 267:14799-14803 (1992), the entirety of which is herein incorporated by reference, Zhao et al., Biochemistry 31:5093-5099 (1992), the entirety of which is herein incorporated by reference).

[0177] Any of the nucleic acid molecules of the present invention may either be modified by site-directed mutagenesis or used as, for example, nucleic acid molecules that are used to target other nucleic acid molecules for modification. It is understood that mutants with more than one altered nucleotide can be constructed using techniques that practitioners skilled in the art are familiar with such as isolating restriction fragments and ligating such fragments into an expression vector (see, for example, Sambrook et al., Molecular Cloning: A Laboratory Manual, Cold Spring Harbor Press (1989)).

[0178] Sequence-specific DNA-binding proteins play a role in the regulation of transcription. The isolation of recombinant cDNAs encoding these proteins facilitates the biochemical analysis of their structural and functional properties. Genes encoding such DNA-binding proteins have been isolated using classical genetics (Vollbrecht et al., Nature 350: 241-243 (1991), the entirety of which is herein incorporated by reference) and molecular biochemical approaches, including the screening of recombinant cDNA libraries with antibodies (Landschulz et al., Genes Dev. 2: 786-800 (1988), the entirety of which is herein incorporated by reference) or DNA probes (Bodner et al., Cell 55: 505-518 (1988), the entirety of which is herein incorporated by reference). In addition, an in situ screening procedure has been used and has facilitated the isolation of sequence-specific DNA-binding proteins from various plant species (Gilmartin et al., Plant Cell 4: 839-849 (1992), the entirety of which is herein incorporated by reference; Schindler et al., EMBO J. 11: 1261-1273 (1992) the entirety of which is herein incorporated by reference). An in situ screening protocol does not require the purification of the protein of interest (Vinson et al., Genes Dev. 2: 801-806 (1988), the entirety of which is herein incorporated by reference; Singh et al., Cell 52: 415-423 (1988), the entirety of which is herein incorporated by reference).

[0179] Steps may be employed to characterize DNA-protein interactions. The first is to identify promoter fragments that interact with DNA-binding proteins, to titrate binding activity, to determine the specificity of binding, and to determine whether a given DNA-binding activity can interact with related DNA sequences (Sambrook et al., Molecular Cloning: A Laboratory Manual, 2^{nd} edition. Cold Spring Harbor Laboratory Press, Cold Spring Harbor, N.Y. (1989). Electrophoretic mobility-shift assay is a widely used assay. The assay provides a simple, rapid, and sensitive method for detecting DNA-binding proteins based on the observation that the mobility of a DNA fragment through a nondenaturing, low-ionic strength polyacrylamide gel is retarded upon association with a DNA-binding protein (Fried and Crother, Nucleic Acids Res. 9: 6505-6525 (1981), the entirety of which is herein incorporated by reference). When one or more specific binding activities have been identified, the exact sequence of the DNA bound by the protein may be determined. Several procedures for characterizing protein/DNA-binding sites are used, including methylation and ethylation interference assays ( Maxam and Gilbert, Methods Enzymol. 65: 499-560 (1980), the entirety of which is herein incorporated by reference; Wissman and Hillen, Methods Enzymol. 208: 365-379 (1991), the entirety of which is herein incorporated by reference) and footprinting techniques employing DNase I (Galas and Schmitz, Nucleic Acids Res. 5: 3157-3170 (1978), the entirety of which is herein incorporated by reference), 1,10-phenanthroline-copper ion methods (Sigman et al., Methods Enzymol. 208: 365-379 (1991), the entirety of which is herein incorporated by reference) or hydroxyl radical methods (Dixon et al., Methods Enzymol. 208: 380-413 (1991), the entirety of which is herein incorporated by reference). It is understood that one or more of the nucleic acid molecules of the present invention, preferably one or more of the EST nucleic acid molecules of the present invention may be utilized to identify a protein or fragment thereof that specifically binds to a nucleic acid molecule of the present invention. It is also understood that one or more of the protein molecules or fragments thereof of the present invention may be utilized to identify a nucleic acid molecule that specifically binds to it.

[0180] The two-hybrid system is based on the fact that many cellular functions are carried out by proteins that interact (physically) with one another. Two-hybrid systems have been used to probe the function of new proteins (Chien et al., Proc. Natl. Acad. Sci. (U.S.A.) 88: 9578-9582 (1991) the entirety of which is herein incorporated by reference; Durfee et al., Genes Dev. 7: 555-569 (1993) the entirety of which is herein incorporated by reference; Choi et al., Cell 78: 499-512 (1994), the entirety of which is herein incorporated by reference; Kranz et al., Genes Dev. 8: 313-327 (1994), the entirety of which is herein incorporated by reference).

[0181] Interaction mating techniques have facilitated a number of two-hybrid studies of protein-protein interaction. Interaction mating has been used to examine interactions between small sets of tens of proteins (Finley and Brent, Proc. Natl. Acad. Sci. (U.S.A.) 91: 12098-12984 (1994), the entirety of which is herein incorporated by reference), larger sets of hundreds of proteins, (Bendixen et al., Nucl. Acids Res. 22: 1778-1779 (1994), the entirety of which is herein incorporated by reference) and to comprehensively map proteins encoded by a small genome (Bartel et al., Nature Genetics 12: 72-77 (1996), the entirety of which is herein incorporated by reference). This technique utilizes proteins fused to the DNA-binding domain and proteins fused to the activation domain. They are expressed in two different haploid yeast strains of opposite mating type, and the strains are mated to determine if the two proteins interact. Mating occurs when haploid yeast strains come into contact and result in the fusion of the two haploids into a diploid yeast strain. An interaction can be determined by the activation of a two-hybrid reporter gene in the diploid strain. The primary advantage of this technique is that it reduces the number of yeast transformations needed to test individual interactions. It is understood that the protein-protein interactions of protein or fragments thereof of the present invention may be investigated using the two-hybrid system and that any of the nucleic acid molecules of the present invention that encode such proteins or fragments thereof may be used to transform yeast in the two-hybrid system.

[0182] Synechocystis 6803 is a photosynthetic Cyanobacterium capable of oxygenic photosynthesis as well as heterotrophic growth in the absence of light. The entire genome has been sequenced, and it is reported to have a circular genome size of 3.57 Mbp containing 3168 potential open reading frames. Open reading frames (ORFs) were identified based upon their homology to other reported ORFs and by using ORF identification computer programs. Sixteen hundred potential ORFs were assigned based on their homology to previously identified ORFs. Of these 1600 ORFs, 145 were identical to reported ORFs (Kaneko et al., DNA Research 3:109-36 (1996), herein incorporated by reference in its entirety).

[0183] Several prokaryote promoters have been used in Synechocystis to express heterologous genes including the tac, lac, and lambda phage promoters (Bryant (ed.), The Molecular Biology of Cyanobacteria, Kluwer Academic Publishers, (1994); Ferino and Chauvat, Gene 84:257-266 (1989), both of which are herein incorporated by reference in their entirety). Several bacterial origins of replication such as RSF1010 and ACYC are reported to replicate in Synechocystis (Mermet-Bouvier and Chauvat, Current Microbiology 28:145-148 (1994); Kuhlemeier et al., Mol. Gen. Genet. 184:249-254 (1981), both of which are herein incorporated by reference in their entirety).

[0184] Synechocystis has been used to study gene regulation by gene replacement through homologous recombination or by gene disruption using antibiotic resistance markers (Pakrasi et al., EMBO 7:325-332 (1988), herein incorporated by reference in its entirety). In such gene regulation studies, double reciprocal homologous regions of the host genome flanking the gene of interest recombine to stably integrate the gene of interest into the genome. The gene of interest can be expressed once that gene has been stably integrated into the genome. Biochemical analysis can be performed to study the effect of the replaced or deleted gene.

[0185] It is understood that the agents of the present invention may be employed in a Synechocystis system.

[0186] Exogenous genetic material may be transferred into a plant cell and the plant cell regenerated into a whole, fertile or sterile plant. Exogenous genetic material is any genetic material, whether naturally occurring or otherwise, from any source that is capable of being inserted into any organism. Such genetic material may be transferred into either monocotyledons and dicotyledons including but not limited to the crops, maize and soybean (See specifically, Chistou, Particle Bombardment for Genetic Engineering of Plants, pp. 63-69 (maize), pp50-60 (soybean), Biotechnology Intelligence Unit. Academic Press, San Diego, Calif. (1996), the entirety of which is herein incorporated by reference and generally Chistou, Particle Bombardment for Genetic Engineering of Plants, Biotechnology Intelligence Unit. Academic Press, San Diego, Calif. (1996), the entirety of which is herein incorporated by reference).

[0187] Transfer of a nucleic acid that encodes for a protein can result in overexpression of that protein in a transformed cell or transgenic plant. One or more of the proteins or fragments thereof encoded by nucleic acid molecules of the present invention may be overexpressed in a transformed cell or transformed plant. Such overexpression may be the result of transient or stable transfer of the exogenous material.

[0188] Exogenous genetic material may be transferred into a plant cell by the use of a DNA vector or construct designed for such a purpose. Design of such a vector is generally within the skill of the art (See, Plant Molecular Biology: A Laboratory Manual eds. Clark, Springer, N.Y. (1997), the entirety of which is herein incorporated by reference).

[0189] A construct or vector may include a plant promoter to express the protein or protein fragment of choice. A number of promoters which are active in plant cells have been described in the literature. These include the nopaline synthase (NOS) promoter (Ebert et al., Proc. Natl. Acad. Sci. (U.S.A.) 84:5745-5749 (1987), the entirety of which is herein incorporated by reference), the octopine synthase (OCS) promoter (which are carried on tumor-inducing plasmids of Agrobacterium tumefaciens), the caulimovirus promoters such as the cauliflower mosaic virus (CaMV) 19S promoter (Lawton et al., Plant Mol. Biol. 9:315-324 (1987), the entirety of which is herein incorporated by reference) and the CAMV 35S promoter (Odell et al., Nature 313:810-812 (1985), the entirety of which is herein incorporated by reference), the figwort mosaic virus 35S-promoter, the light-inducible promoter from the small subunit of ribulose-1,5-bis-phosphate carboxylase (ssRUBISCO), the Adh promoter (Walker et al., Proc. Natl. Acad. Sci. (U.S.A.) 84:6624-6628 (1987), the entirety of which is herein incorporated by reference), the sucrose synthase promoter (Yang et al., Proc. Natl. Acad. Sci. (U.S.A.) 87:4144-4148 (1990), the entirety of which is herein incorporated by reference), the R gene complex promoter (Chandler et al., The Plant Cell 1:1175-1183 (1989), the entirety of which is herein incorporated by reference), and the chlorophyll a/b binding protein gene promoter, etc. These promoters have been used to create DNA constructs which have been expressed in plants; see, e.g., PCT publication WO 84/02913, herein incorporated by reference in its entirety.

[0190] Promoters which are known or are found to cause transcription of DNA in plant cells can be used in the present invention. Such promoters may be obtained from a variety of sources such as plants and plant viruses. It is preferred that the particular promoter selected should be capable of causing sufficient expression to result in the production of an effective amount of a protein to cause the desired phenotype. In addition to promoters which are known to cause transcription of DNA in plant cells, other promoters may be identified for use in the current invention by screening a plant cDNA library for genes which are selectively or preferably expressed in the target tissues or cells.

[0191] For the purpose of expression in source tissues of the plant, such as the leaf, seed, root or stem, it is preferred that the promoters utilized in the present invention have relatively high expression in these specific tissues. For this purpose, one may choose from a number of promoters for genes with tissue- or cell-specific or -enhanced expression. Examples of such promoters reported in the literature include the chloroplast glutamine synthetase GS2 promoter from pea (Edwards et al., Proc. Natl. Acad. Sci. (U.S.A.) 87:3459-3463 (1990), herein incorporated by reference in its entirety), the chloroplast fructose-1,6-biphosphatase (FBPase) promoter from wheat (Lloyd et al., Mol. Gen. Genet. 225:209-216 (1991), herein incorporated by reference in its entirety), the nuclear photosynthetic ST-LS1 promoter from potato (Stockhaus et al., EMBO J. 8:2445-2451 (1989), herein incorporated by reference in its entirety), the phenylalanine ammonia-lyase (PAL) promoter and the chalcone synthase (CHS) promoter from Arabidopsis thaliana. Also reported to be active in photosynthetically active tissues are the ribulose-1,5-bisphosphate carboxylase (RbcS) promoter from eastern larch (Larix laricina), the promoter for the cab gene, cab6, from pine (Yamamoto et al., Plant Cell Physiol. 35:773-778 (1994), herein incorporated by reference in its entirety), the promoter for the Cab-1 gene from wheat (Fejes et al., Plant Mol. Biol. 15:921-932 (1990), herein incorporated by reference in its entirety), the promoter for the CAB-1 gene from spinach (Lubberstedt et al., Plant Physiol. 104:997-1006 (1994), herein incorporated by reference in its entirety), the promoter for the cabIR gene from rice (Luan et al., Plant Cell. 4:971-981 (1992), the entirety of which is herein incorporated by reference), the pyruvate, orthophosphate dikinase (PPDK) promoter from maize (Matsuoka et al., Proc. Natl. Acad. Sci. (U.S.A.) 90: 9586-9590 (1993), herein incorporated by reference in its entirety), the promoter for the tobacco Lhcb1*2 gene (Cerdan et al., Plant Mol. Biol. 33: 245-255. (1997), herein incorporated by reference in its entirety), the Arabidopsis thaliana SUC2 sucrose-H+ symporter promoter (Truemit et al., Planta. 196: 564-570 (1995), herein incorporated by reference in its entirety), and the promoter for the thylacoid membrane proteins from spinach (psad, psaF, psae, PC, FNR, atpC, atpD, cab, rbcS). Other promoters for the chlorophyll a/b-binding proteins may also be utilized in the present invention, such as the promoters for LhcB gene and PsbP gene from white mustard (Sinapis alba; Kretsch et al., Plant Mol. Biol. 28: 219-229 (1995), the entirety of which is herein incorporated by reference).

[0192] For the purpose of expression in sink tissues of the plant, such as the tuber of the potato plant, the fruit of tomato, or the seed of maize, wheat, rice, and barley, it is preferred that the promoters utilized in the present invention have relatively high expression in these specific tissues. A number of promoters for genes with tuber-specific or -enhanced expression are known, including the class I patatin promoter (Bevan et al., EMBO J. 8: 1899-1906 (1986); Jefferson et al., Plant Mol. Biol. 14: 995-1006 (1990), both of which are herein incorporated by reference in its entirety), the promoter for the potato tuber ADPGPP genes, both the large and small subunits, the sucrose synthase promoter (Salanoubat and Belliard, Gene. 60: 47-56 (1987), Salanoubat and Belliard, Gene. 84: 181-185 (1989), both of which are incorporated by reference in their entirety), the promoter for the major tuber proteins including the 22 kd protein complexes and proteinase inhibitors (Hannapel, Plant Physiol. 101: 703-704 (1993), herein incorporated by reference in its entirety), the promoter for the granule bound starch synthase gene (GBSS) (Visser et al., Plant Mol. Biol. 17: 691-699 (1991), herein incorporated by reference in its entirety), and other class I and II patatins promoters (Koster-Topfer et al., Mol Gen Genet. 219: 390-396 (1989); Mignery et al., Gene. 62: 2744 (1988), both of which are herein incorporated by reference in their entirety).

[0193] Other promoters can also be used to express a fructose 1,6 bisphosphate aldolase gene in specific tissues, such as seeds or fruits. The promoter for β-conglycinin (Chen et al., Dev. Genet. 10: 112-122 (1989), herein incorporated by reference in its entirety) or other seed-specific promoters such as the napin and phaseolin promoters, can be used. The zeins are a group of storage proteins found in maize endosperm. Genomic clones for zein genes have been isolated (Pedersen et al., Cell 29: 1015-1026 (1982), herein incorporated by reference in its entirety), and the promoters from these clones, including the 15 kD, 16 kD, 19 kD, 22 kD, 27 kD, and gamma genes, could also be used. Other promoters known to function, for example, in maize, include the promoters for the following genes: waxy, Brittle, Shrunken 2, Branching enzymes I and II, starch synthases, debranching enzymes, oleosins, glutelins, and sucrose synthases. A particularly preferred promoter for maize endosperm expression is the promoter for the glutelin gene from rice, more particularly the Osgt-1 promoter (Zheng et al., Mol. Cell Biol. 13: 5829-5842 (1993), herein incorporated by reference in its entirety). Examples of promoters suitable for expression in wheat include those promoters for the ADPglucose pyrophosphorylase (ADPGPP) subunits, the granule bound and other starch synthases, the branching and debranching enzymes, the embryogenesis-abundant proteins, the gliadins, and the glutenins. Examples of such promoters in rice include those promoters for the ADPGPP subunits, the granule bound and other starch synthases, the branching enzymes, the debranching enzymes, sucrose synthases, and the glutelins. A particularly preferred promoter is the promoter for rice glutelin, Osgt-1. Examples of such promoters for barley include those for the ADPGPP subunits, the granule bound and other starch synthases, the branching enzymes, the debranching enzymes, sucrose synthases, the hordeins, the embryo globulins, and the aleurone specific proteins.

[0194] Root specific promoters may also be used. An example of such a promoter is the promoter for the acid chitinase gene (Samac et al., Plant Mol. Biol. 25: 587-596 (1994), the entirety of which is herein incorporated by reference). Expression in root tissue could also be accomplished by utilizing the root specific subdomains of the CaMV35S promoter that have been identified (Lam et al., Proc. Natl. Acad. Sci. (U.S.A.) 86:7890-7894 (1989), herein incorporated by reference in its entirety). Other root cell specific promoters include those reported by Conkling et al. (Conkling et al., Plant Physiol. 93:1203-1211 (1990), the entirety of which is herein incorporated by reference).

[0195] Additional promoters that may be utilized are described, for example, in U.S. Pat. Nos. 5,378,619, 5,391,725, 5,428,147, 5,447,858, 5,608,144, 5,608,144, 5,614,399, 5,633,441, 5,633,435, and 4,633,436, all of which are herein incorporated in their entirety. In addition, a tissue specific enhancer may be used (Fromm et al., The Plant Cell 1:977-984 (1989), the entirety of which is herein incorporated by reference).

[0196] Constructs or vectors may also include, with the coding region of interest, a nucleic acid sequence that acts, in whole or in part, to terminate transcription of that region. For example, such sequences have been isolated including the Tr7 3′ sequence and the nos 3′ sequence (Ingelbrecht et al., The Plant Cell 1:671-680 (1989), the entirety of which is herein incorporated by reference; Bevan et al., Nucleic Acids Res. 11:369-385 (1983), the entirety of which is herein incorporated by reference), or the like.

[0197] A vector or construct may also include regulatory elements. Examples of such include the Adh intron 1 (Callis et al., Genes and Develop. 1:1183-1200 (1987), the entirety of which is herein incorporated by reference), the sucrose synthase intron (Vasil et al., Plant Physiol. 91:1575-1579 (1989), the entirety of which is herein incorporated by reference) and the TMV omega element (Gallie et al., The Plant Cell 1:301-311 (1989), the entirety of which is herein incorporated by reference). These and other regulatory elements may be included when appropriate.

[0198] A vector or construct may also include a selectable marker. Selectable markers may also be used to select for plants or plant cells that contain the exogenous genetic material. Examples of such include, but are not limited to, a neo gene (Potrykus et al., Mol. Gen. Genet. 199:183-188 (1985), the entirety of which is herein incorporated by reference) which codes for kanamycin resistance and can be selected for using kanamycin, G418, etc.; a bar gene which codes for bialaphos resistance; a mutant EPSP synthase gene (Hinchee et al., Bio/Technology 6:915-922 (1988), the entirety of which is herein incorporated by reference) which encodes glyphosate resistance; a nitrilase gene which confers resistance to bromoxynil (Stalker et al., J. Biol. Chem. 263:6310-6314 (1988), the entirety of which is herein incorporated by reference); a mutant acetolactate synthase gene (ALS) which confers imidazolinone or sulphonylurea resistance (European Patent Application 154,204 (Sep. 11, 1985), the entirety of which is herein incorporated by reference); and a methotrexate resistant DHFR gene (Thillet et al., J. Biol. Chem. 263:12500-12508 (1988), the entirety of which is herein incorporated by reference).

[0199] A vector or construct may also include a transit peptide. Incorporation of a suitable chloroplast transit peptide may also be employed (European Patent Application Publication Number 0218571, the entirety of which is herein incorporated by reference). Translational enhancers may also be incorporated as part of the vector DNA. DNA constructs could contain one or more 5′ non-translated leader sequences which may serve to enhance expression of the gene products from the resulting mRNA transcripts. Such sequences may be derived from the promoter selected to express the gene or can be specifically modified to increase translation of the mRNA. Such regions may also be obtained from viral RNAs, from suitable eukaryotic genes, or from a synthetic gene sequence. For a review of optimizing expression of transgenes, see Koziel et al., Plant Mol. Biol. 32:393-405 (1996), the entirety of which is herein incorporated by reference.

[0200] A vector or construct may also include a screenable marker. Screenable markers may be used to monitor expression. Exemplary screenable markers include a β-glucuronidase or uidA gene (GUS) which encodes an enzyme for which various chromogenic substrates are known (Jefferson, Plant Mol. Biol, Rep. 5: 387-405 (1987), the entirety of which is herein incorporated by reference; Jefferson et al., EMBO J. 6: 3901-3907 (1987), the entirety of which is herein incorporated by reference); an R-locus gene, which encodes a product that regulates the production of anthocyanin pigments (red color) in plant tissues ((Dellaporta et al., Stadler Symposium 11:263-282 (1988), the entirety of which is herein incorporated by reference); a β-lactamase gene (Sutcliffe et al., Proc. Natl. Acad. Sci. (U.S.A.) 75: 3737-3741 (1978), the entirety of which is herein incorporated by reference), a gene which encodes an enzyme for which various chromogenic substrates are known (e.g., PADAC, a chromogenic cephalosporin); a luciferase gene (Ow et al., Science 234: 856-859 (1986), the entirety of which is herein incorporated by reference) a xylE gene (Zukowsky et al., Proc. Natl. Acad. Sci. (U.S.A.) 80:1101-1105 (1983), the entirety of which is herein incorporated by reference) which encodes a catechol dioxygenase that can convert chromogenic catechols; an α-amylase gene (Ikatu et al., Bio/Technol. 8:241-242 (1990), the entirety of which is herein incorporated by reference); a tyrosinase gene (Katz et al., J. Gen. Microbiol. 129:2703-2714 (1983), the entirety of which is herein incorporated by reference) which encodes an enzyme capable of oxidizing tyrosine to DOPA and dopaquinone which in turn condenses to melanin; an α-galactosidase, which will turn a chromogenic α-galactose substrate.

[0201] Included within the terms “selectable or screenable marker genes” are also genes which encode a scriptable marker whose secretion can be detected as a means of identifying or selecting for transformed cells. Examples include markers which encode a secretable antigen that can be identified by antibody interaction, or even secretable enzymes which can be detected catalytically. Secretable proteins fall into a number of classes, including small, diffusible proteins detectable, e.g., by ELISA, small active enzymes detectable in extracellular solution (e.g., α-amylase, β-lactamase, phosphinothricin transferase), or proteins which are inserted or trapped in the cell wall (such as proteins which include a leader sequence such as that found in the expression unit of extension or tobacco PR-S). Other possible selectable and/or screenable marker genes will be apparent to those of skill in the art.

[0202] Methods and compositions for transforming a bacteria and other microorganisms are known in the art (see for example Sambrook et al., Molecular Cloning: A Laboratory Manual, Second Edition, Cold Spring Harbor Laboratory Press, Cold Spring Harbor, N.Y., (1989), the entirety of which is herein incorporated by reference).

[0203] There are many methods for introducing transforming nucleic acid molecules into plant cells. Suitable methods are believed to include virtually any method by which nucleic acid molecules may be introduced into a cell, such as by Agrobacterium infection or direct delivery of nucleic acid molecules such as, for example, by PEG-mediated transformation, by electroporation or by acceleration of DNA coated particles, etc. (Pottykus, Ann. Rev. Plant Physiol. Plant Mol. Biol. 42:205-225 (1991), the entirety of which is herein incorporated by reference; Vasil, Plant Mol. Biol. 25: 925-937 (1994), the entirety of which is herein incorporated by reference. For example, electroporation has been used to transform maize protoplasts (Fromm et al., Nature 312:791-793 (1986), the entirety of which is herein incorporated by reference).

[0204] Other vector systems suitable for introducing transforming DNA into a host plant cell includes but is not limited to binary artificial chromosome (BIBAC) vectors (Hamilton et al., Gene 200:107-116, (1997), the entirety of which is herein incorporated by reference, and transfection with RNA viral vectors (Della-Cioppa et al., Ann. N. Y. Acad. Sci. (1996), 792 (Engineering Plants for Commercial Products and Applications), 57-61, the entirety of which is herein incorporated by reference.

[0205] Technology for introduction of DNA into cells is well known to those of skill in the art. Four general methods for delivering a gene into cells have been described: (1) chemical methods (Graham and van der Eb, Virology, 54:536-539 (1973), the entirety of which is herein incorporated by reference); (2) physical methods such as microinjection (Capecchi, Cell 22:479-488 (1980), electroporation (Wong and Neumann, Biochem. Biophys. Res. Commun., 107:584-587 (1982); Fromm et al., Proc. Natl. Acad. Sci. USA, 82:5824-5828 (1985); U.S. Pat. No. 5,384,253; and the gene gun (Johnston and Tang, Methods Cell Biol. 43:353-365 (1994), all of which the entirety is herein incorporated by reference; (3) viral vectors (Clapp, Clin. Perinatol., 20:155-168 (1993); Lu et al., J. Exp. Med., 178:2089-2096 (1993); Eglitis and Anderson, Biotechniques, 6:608-614 (1988), all of which the entirety is herein incorporated by reference); and (4) receptor-mediated mechanisms (Curiel et al., Hum. Gen. Ther., 3:147-154 (1992); Wagner et al., Proc. Natl. Acad. Sci. USA, 89:6099-6103 (1992), all of which the entirety is herein incorporated by reference).

[0206] Acceleration methods that may be used include, for example, microprojectile bombardment and the like. One example of a method for delivering transforming nucleic acid molecules to plant cells is microprojectile bombardment. This method has been reviewed by Yang and Christou, eds., Particle Bombardment Technology for Gene Transfer, Oxford Press, Oxford, England (1994), the entirety of which is herein incorporated by reference). Non-biological particles (microprojectiles) that may be coated with nucleic acids and delivered into cells by a propelling force. Exemplary particles include those comprised of tungsten, gold, platinum, and the like.

[0207] A particular advantage of microprojectile bombardment, in addition to it being an effective means of reproducibly, and stably transforming monocotyledons, is that neither the isolation of protoplasts (Cristou et al., Plant Physiol. 87:671-674 (1988), the entirety of which is herein incorporated by reference) nor the susceptibility of Agrobacterium infection is required. An illustrative embodiment of a method for delivering DNA into maize cells by acceleration is a biolistics g-particle delivery system, which can be used to propel particles coated with DNA through a screen, such as a stainless steel or Nytex screen, onto a filter surface covered with corn cells cultured in suspension. Gordon-Kamm et al., describes the basic procedure for coating tungsten particles with DNA (Gordon-Kamm et al., Plant Cell 2: 603-618 (1990), the entirety of which is herein incorporated by reference). The screen disperses the tungsten nucleic acid particles so that they are not delivered to the recipient cells in large aggregates. A particle delivery system suitable for use with the present invention is the helium acceleration PDS-1000/He gun which is available from Bio-Rad Laboratories (Bio-Rad, Hercules, California)(Sanford et al., Technique 3:3-16 (1991), the entirety of which is herein incorporated by reference).

[0208] For the bombardment, cells in suspension may be concentrated on filters. Filters containing the cells to be bombarded are positioned at an appropriate distance below the microprojectile stopping plate. If desired, one or more screens are also positioned between the gun and the cells to be bombarded.

[0209] Alternatively, immature embryos or other target cells may be arranged on solid culture medium. The cells to be bombarded are positioned at an appropriate distance below the macroprojectile stopping plate. If desired, one or more screens are also positioned between the acceleration device and the cells to be bombarded. Through the use of techniques set forth herein one may obtain up to 1000 or more foci of cells transiently expressing a marker gene. The number of cells in a focus which express the exogenous gene product 48 hours post-bombardment often range from one to ten and average one to three.

[0210] In bombardment transformation, one may optimize the prebombardment culturing conditions and the bombardment parameters to yield the maximum numbers of stable transformants. Both the physical and biological parameters for bombardment are important in this technology. Physical factors are those that involve manipulating the DNA/microprojectile precipitate or those that affect the flight and velocity of either the macro- or microprojectiles. Biological factors include all steps involved in manipulation of cells before and immediately after bombardment, the osmotic adjustment of target cells to help alleviate the trauma associated with bombardment, and also the nature of the transforming DNA, such as linearized DNA or intact supercoiled plasmids. It is believed that pre-bombardment manipulations are especially important for successful transformation of immature embryos. In another alternative embodiment, plastids can be stably transformed. Methods disclosed for plastid transformation in higher plants include the particle gun delivery of DNA containing a selectable marker and targeting of the DNA to the plastid genome through homologous recombination (Svab et al., Proc. Natl. Acad. Sci. (U.S.A.) 87:8526-8530 (1990); Svab and Maliga, Proc. Natl. Acad. Sci. (U.S.A.) 90:913-917 (1993); Staub and Maliga, EMBO J. 12:601-606 (1993); U.S. Pat. Nos. 5,451,513 and 5,545,818, all of which are herein incorporated by reference in their entirety).

[0211] Accordingly, it is contemplated that one may wish to adjust various aspects of the bombardment parameters in small scale studies to fully optimize the conditions. One may particularly wish to adjust physical parameters such as gap distance, flight distance, tissue distance, and helium pressure. One may also minimize the trauma reduction factors by modifying conditions which influence the physiological state of the recipient cells and which may therefore influence transformation and integration efficiencies. For example, the osmotic state, tissue hydration and the subculture stage or cell cycle of the recipient cells may be adjusted for optimum transformation. The execution of other routine adjustments will be known to those of skill in the art in light of the present disclosure.

[0212] Agrobacterium-mediated transfer is a widely applicable system for introducing genes into plant cells because the DNA can be introduced into whole plant tissues, thereby bypassing the need for regeneration of an intact plant from a protoplast. The use of Agrobacterium-mediated plant integrating vectors to introduce DNA into plant cells is well known in the art. See, for example the methods described (Fraley et al., Biotechnology 3:629-635 (1985); Rogers et al., Meth. In Enzymol, 153:253-277 (1987), both of which are herein incorporated by reference in their entirety. Further, the integration of the Ti-DNA is a relatively precise process resulting in few rearrangements. The region of DNA to be transferred is defined by the border sequences, and intervening DNA is usually inserted into the plant genome as described (Spielmann et al., Mol. Gen. Genet., 205:34 (1986), the entirety of which is herein incorporated by reference).

[0213] Modern Agrobacterium transformation vectors are capable of replication in E. coli as well as Agrobacterium, allowing for convenient manipulations as described (Klee et al., In: Plant DNA Infectious Agents, T. Hohn and J. Schell, eds., Springer-Verlag, New York, pp. 179-203 (1985), the entirety of which is herein incorporated by reference. Moreover, recent technological advances in vectors for Agrobacterium-mediated gene transfer have improved the arrangement of genes and restriction sites in the vectors to facilitate construction of vectors capable of expressing various polypeptide coding genes. The vectors described have convenient multi-linker regions flanked by a promoter and a polyadenylation site for direct expression of inserted polypeptide coding genes and are suitable for present purposes (Rogers et al., Meth. In Enzymol., 153:253-277 (1987), the entirety of which is herein incorporated by reference). In addition, Agrobacterium containing both armed and disarmed Ti genes can be used for the transformations. In those plant strains where Agrobacterium-mediated transformation is efficient, it is the method of choice because of the facile and defined nature of the gene transfer.

[0214] A transgenic plant formed using Agrobacterium transformation methods typically contains a single gene on one chromosome. Such transgenic plants can be referred to as being heterozygous for the added gene. More preferred is a transgenic plant that is homozygous for the added structural gene; i.e., a-transgenic plant that contains two added genes, one gene at the same locus on each chromosome of a chromosome pair. A homozygous transgenic plant can be obtained by sexually mating (selfing) an independent segregant transgenic plant that contains a single added gene, germinating some of the seed produced and analyzing the resulting plants produced for the gene of interest.

[0215] It is also to be understood that two different transgenic plants can also be mated to produce offspring that contain two independently segregating added, exogenous genes. Selfing of appropriate progeny can produce plants that are homozygous for both added, exogenous genes that encode a polypeptide of interest. Back-crossing to a parental plant and out-crossing with a non-transgenic plant are also contemplated, as is vegetative propagation.

[0216] Transformation of plant protoplasts can be achieved using methods based on calcium phosphate precipitation, polyethylene glycol treatment, electroporation, and combinations of these treatments. See for example (Potrykus et al., Mol. Gen. Genet., 205:193-200 (1986); Lorz et al., Mol. Gen. Genet., 199:178, (1985); Fromm et al., Nature, 319:791,(1986); Uchimiya et al., Mol. Gen. Genet.:204:204, (1986); Callis et al., Genes and Development, 1183,(1987); Marcotte et al., Nature, 335:454, (1988), all of which the entirety is herein incorporated by reference).

[0217] Application of these systems to different plant strains depends upon the ability to regenerate that particular plant strain from protoplasts. Illustrative methods for the regeneration of cereals from protoplasts are described (Fujimura et al., Plant Tissue Culture Letters, 2:74,(1985); Toriyama et al., Theor Appl. Genet. 205:34. (1986); Yamada et al., Plant Cell Rep., 4:85, (1986); Abdullah et al., Biotechnology, 4:1087, (1986), all of which the entirety is herein incorporated by reference).

[0218] To transform plant strains that cannot be successfully regenerated from protoplasts, other ways to introduce DNA into intact cells or tissues can be utilized. For example, regeneration of cereals from immature embryos or explants can be effected as described (Vasil, Biotechnology, 6:397,(1988), the entirety of which is herein incorporated by reference). In addition, “particle gun” or high-velocity microprojectile technology can be utilized (Vasil et al., Bio/Technology 10:667, (1992), the entirety of which is herein incorporated by reference).

[0219] Using the latter technology, DNA is carried through the cell wall and into the cytoplasm on the surface of small metal particles as described (Klein et al., Nature, 328:70, (1987); Klein et al., Proc. Natl. Acad. Sci. USA, 85:8502-8505, (1988); McCabe et al., Biotechnology, 6:923, (1988), all of which the entirety is herein incorporated by reference). The metal particles penetrate through several layers of cells and thus allow the transformation of cells within tissue explants.

[0220] Other methods of cell transformation can also be used and include but are not limited to introduction of DNA into plants by direct DNA transfer into pollen (Zhou et al., Methods in Enzymology, 101:433, (1983); Hess et al., Intern Rev. Cytol., 107:367, (1987); Luo et al., Plant Mol Biol. Reporter, 6:165, (1988), all of which the entirety is herein incorporated by reference), by direct injection of DNA into reproductive organs of a plant (Pena et al., Nature, 325:274, (1987), the entirety of which is herein incorporated by reference), or by direct injection of DNA into the cells of immature embryos followed by the rehydration of dessicated embryos (Neuhaus et al., Theor. Appl. Genet., 75:30, (1987), the entirety of which is herein incorporated by reference).

[0221] The regeneration, development, and cultivation of plants from single plant protoplast transformants or from various transformed explants is well known in the art (Weissbach and Weissbach, In: Methods for Plant Molecular Biology, (Eds.), Academic Press, Inc. San Diego, Calif., (1988), the entirety of which is herein incorporated by reference). This regeneration and growth process typically includes the steps of selection of transformed cells, culturing those individualized cells through the usual stages of embryonic development through the rooted plantlet stage. Transgenic embryos and seeds are similarly regenerated. The resulting transgenic rooted shoots are thereafter planted in an appropriate plant growth medium such as soil.

[0222] The development or regeneration of plants containing the foreign, exogenous gene that encodes a protein of interest is well known in the art. Preferably, the regenerated plants are self-pollinated to provide homozygous transgenic plants, as discussed before. Otherwise, pollen obtained from the regenerated plants is crossed to seed-grown plants of agronomically important lines. Conversely, pollen from plants of these important lines is used to pollinate regenerated plants. A transgenic plant of the present invention containing a desired polypeptide is cultivated using methods well known to one skilled in the art.

[0223] There are a variety of methods for the regeneration of plants from plant tissue. The particular method of regeneration will depend on the starting plant tissue and the particular plant species to be regenerated.

[0224] Methods for transforming dicots, primarily by use of Agrobacterium tumefaciens, and obtaining transgenic plants have been published for cotton (U.S. Pat. No. 5,004,863, U.S. Pat. No. 5,159,135, U.S. Pat. No. 5,518,908, all of which the entirety is herein incorporated by reference); soybean (U.S. Pat. No. 5,569,834, U.S. Pat. No. 5,416,011, McCabe et al., Biotechnology 6:923, (1988), Christou et al., Plant Physiol., 87:671-674 (1988), all of which the entirety is herein incorporated by reference); Brassica (U.S. Pat. No. 5,463,174, the entirety of which is herein incorporated by reference); peanut (Cheng et al., Plant Cell Rep. 15: 653-657 (1996), McKently et al., Plant Cell Rep. 14:699-703 (1995), all of which the entirety is herein incorporated by reference); papaya (Yang et al., (1996), the entirety of which is herein incorporated by reference); pea (Grant et al., Plant Cell Rep. 15:254-258, (1995), the entirety of which is herein incorporated by reference).

[0225] Transformation of monocotyledons using electroporation, particle bombardment, and Agrobacterium have also been reported. Transformation and plant regeneration have been achieved in asparagus (Bytebier et al., Proc. Natl. Acad. Sci. USA 84:5345, (1987), the entirety of which is herein incorporated by reference); barley (Wan and lemaux, Plant Physiol 104:37, (1994), the entirety of which is herein incorporated by reference); maize (Rhodes et al., Science 240: 204, (1988), Gordon-Kamm et al., Plant Cell, 2:603, (1990), Fromm et al., Bio/Technology 8:833, (1990), Koziel et al., Bio/Technology 11: 194, (1993), Armstrong et al., Crop Science 35:550-557, (1995), all of which the entirety is herein incorporated by reference); oat (Somers et al., Bio/Technology, 10:1589, (1992), the entirety of which is herein incorporated by reference); orchardgrass (Horn et al., Plant Cell Rep. 7:469, (1988), the entirety of which is herein incorporated by reference); rice (Toriyama et al., Theor Appl. Genet. 205:34, (1986); Park et al., Plant Mol. Biol.,32: 1135-1148, (1996); Abedinia et al., Aust. J. Plant Physiol.24:133-141, (1997); Zhang and Wu, Theor. Appl. Genet. 76:835, (1988); Zhang et al. Plant Cell Rep. 7:379, (1988); Battraw and Hall, Plant Sci. 86:191-202, (1992); Christou et al., Bio/Technology 9:957, (1991), all of which the entirety is herein incorporated by reference); sugarcane (Bower and Birch, Plant J. 2:409, (1992), the entirety of which is herein incorporated by reference); tall fescue (Wang et al., Bio/Technology 10:691, (1992), the entirety of which is herein incorporated by reference), and wheat (Vasil et al., Bio/Technology 10:667, (1992), the entirety of which is herein incorporated by reference; U.S. Pat. No. 5,631,152, the entirety of which is herein incorporated by reference.

[0226] Assays for gene expression based on the transient expression of cloned nucleic acid constructs have been developed by introducing the nucleic acid molecules into plant cells by polyethylene glycol treatment, electroporation, or particle bombardment (Marcotte, et al., Nature, 335: 454-457 (1988), the entirety of which is herein incorporated by reference; Marcotte, et al., Plant Cell, 1: 523-532 (1989), the entirety of which is herein incorporated by reference; McCarty, et al., Cell 66: 895-905 (1991), the entirety of which is herein incorporated by reference; Hattori, et al., Genes Dev. 6: 609-618 (1992), the entirety of which is herein incorporated by reference; Goff, et al., EMBO J. 9: 2517-2522 (1990), the entirety of which is herein incorporated by reference). Transient expression systems may be used to functionally dissect gene constructs (See generally, Mailga et al., Methods in Plant Molecular Biology, Cold Spring Harbor Press (1995)).

[0227] Any of the nucleic acid molecules of the present invention may be introduced into a plant cell in a permanent or transient manner in combination with other genetic elements such as vectors, promoters enhancers etc. Further any of the nucleic acid molecules of the present invention may be introduced into a plant cell in a manner that allows for over expression of the protein or fragment thereof encoded by the nucleic acid molecule.

[0228] Cosuppression is the reduction in expression levels, usually at the level of RNA, of a particular endogenous gene or gene family by the expression of a homologous sense construct that is capable of transcribing mRNA of the same strandedness as the transcript of the endogenous gene (Napoli et al., Plant Cell 2: 279-289 (1990), the entirety of which is herein incorporated by reference; van der Krol et al., Plant Cell 2: 291-299 (1990), the entirety of which is herein incorporated by reference). Cosuppression may result from stable transformation with a single copy nucleic acid molecule that is homologous to a nucleic acid sequence found with the cell (Prolls and Meyer, Plant J. 2:465-475 (1992), the entirety of which is herein incorporated by reference) or with multiple copies of a nucleic acid molecule that is homologous to a nucleic acid sequence found with the cell (Mittlesten et al., Mol. Gen. Genet. 244: 325-330 (1994), the entirety of which is herein incorporated by reference). Genes, even though different, linked to homologous promoters may result in the cosuppression of the linked genes (Vaucheret, C. R. Acad Sci. III 316: 1471-1483 (1993), the entirety of which is herein incorporated by reference).

[0229] This technique has, for example been applied to generate white flowers from red petunia and tomatoes that do not ripen on the vine. Up to 50% of petunia transformants that contained a sense copy of the chalcone synthase (CHS) gene produced white flowers or floral sectors; this was as a result of the post-transcriptional loss of mRNA encoding CHS (Flavell, Proc. Natl. Acad. Sci. (U.S.A.) 91:3490-3496 (1994)), the entirety of which is herein incorporated by reference). Cosuppression may require the coordinate transcription of the transgene and the endogenous gene, and can be reset by a developmental control mechanism (Jorgensen, Trends Biotechnol, 8:340344 (1990), the entirety of which is herein incorporated by reference; Meins and Kunz, In: Gene Inactivation and Homologous Recombination in Plants (Paszkowski, J., ed.), pp. 335-348. Kluwer Academic, Netherlands (1994), the entirety of which is herein incorporated by reference).

[0230] It is understood that one or more of the nucleic acids of the present invention including those comprising SEQ ID NO: 1 through SEQ ID NO: 31015 or complement thereof or fragments of either or other nucleic acid molecules of the present invention may be introduced into a plant cell and transcribed using an appropriate promoter with such transcription resulting in the co-suppression of an endogenous protein.

[0231] Antisense approaches are a way of preventing or reducing gene function by targeting the genetic material (Mol et al., FEBS Lett. 268: 427-430 (1990), the entirety of which is herein incorporated by reference). The objective of the antisense approach is to use a sequence complementary to the target gene to block its expression and create a mutant cell line or organism in which the level of a single chosen protein is selectively reduced or abolished. Antisense techniques have several advantages over other ‘reverse genetic’ approaches. The site of inactivation and its developmental effect can be manipulated by the choice of promoter for antisense genes or by the timing of external application or microinjection. Antisense can manipulate its specificity by selecting either unique regions of the target gene or regions where it shares homology to other related genes (Hiatt et al., In Genetic Engineering, Setlow (ed.), Vol. 11, New York: Plenum 49-63 (1989), the entirety of which is herein incorporated by reference).

[0232] The principle of regulation by antisense RNA is that RNA that is complementary to the target mRNA is introduced into cells, resulting in specific RNA:RNA duplexes being formed by base pairing between the antisense substrate and the target mRNA (Green et al., Annu. Rev. Biochem. 55: 569-597 (1986), the entirety of which is herein incorporated by reference). Under one embodiment, the process involves the introduction and expression of an antisense gene sequence. Such a sequence is one in which part or all of the normal gene sequences are placed under a promoter in inverted orientation so that the ‘wrong’ or complementary strand is transcribed into a noncoding antisense RNA that hybridizes with the target mRNA and interferes with its expression (Takayama and Inouye, Crit. Rev. Biochem. Mol. Biol. 25: 155-184 (1990), the entirety of which is herein incorporated by reference). An antisense vector is constructed by standard procedures and introduced into cells by transformation, transfection, electroporation, microinjection, or by infection, etc. The type of transformation and choice of vector will determine whether expression is transient or stable. The promoter used for the antisense gene may influence the level, timing, tissue, specificity, or inducibility of the antisense inhibition.

[0233] It is understood that protein synthesis activity in a plant cell may be reduced or depressed by growing a transformed plant cell containing a nucleic acid molecule whose non-transcribed strand encodes a protein or fragment thereof.

[0234] Antibodies have been expressed in plants (Hiatt et al., Nature 342:76-78 (1989), the entirety of which is herein incorporated by reference; Conrad and Fielder, Plant Mol. Biol. 26: 1023-1030 (1994), the entirety of which is herein incorporated by reference). Cytoplasmic expression of a scFv (single-chain Fv antibodies) has been reported to delay infection by artichoke mottled crinkle virus. Transgenic plants that express antibodies directed against endogenous proteins may exhibit a physiological effect (Philips et al., EMBO J. 16: 4489-4496 (1997), the entirety of which is herein incorporated by reference; Marion-Poll, Trends in Plant Science 2: 447-448 (1997), the entirety of which is herein incorporated by reference). For example, expressed anti-abscisic antibodies reportedly result in a general perturbation of seed development (Philips et al., EMBO J. 16: 4489-4496 (1997)).

[0235] Antibodies that are catalytic may also be expressed in plants (abzymes). The principle behind abzymes is that since antibodies may be raised against many molecules, this recognition ability can be directed toward generating antibodies that bind transition states to force a chemical reaction forward (Persidas, Nature Biotechnology 15:1313-1315 (1997), the entirety of which is herein incorporated by reference; Baca et al., Ann. Rev. Biophys. Biomol. Struct. 26:461-493 (1997), the entirety of which is herein incorporated by reference). The catalytic abilities of abzymes may be enhanced by site directed mutagenesis. Examples of abzymes are, for example, set forth in U.S. Pat. No: 5,658,753; U.S. Pat. No. 5,632,990; U.S. Pat. No. 5,631,137; U.S. Pat. No. 5,602,015; U.S. Pat. No. 5,559,538; U.S. Pat. No. 5,576,174; U.S. Pat. No. 5,500,358; U.S. Pat. No. 5,318,897; U.S. Pat. No. 5,298,409; U.S. Pat. No. 5,258,289 and U.S. Pat. No. 5,194,585, all of which are herein incorporated in their entirety.

[0236] It is understood that any of the antibodies of the present invention may be expressed in plants and that such expression can result in a physiological effect. It is also understood that any of the expressed antibodies may be catalytic.

[0237] In addition to the above discussed procedures, practitioners are familiar with the standard resource materials which describe specific conditions and procedures for the construction, manipulation and isolation of macromolecules (e.g., DNA molecules, plasmids, etc.), generation of recombinant organisms and the screening and isolating of clones, (see for example, Sambrook et al., Molecular Cloning: A Laboratory Manual, Cold Spring Harbor Press (1989); Mailga et al., Methods in Plant Molecular Biology, Cold Spring Harbor Press (1995), the entirety of which is herein incorporated by reference; Birren et al., Genome Analysis: Analyzing DNA, 1, Cold Spring Harbor, N.Y., the entirety of which is herein incorporated by reference).

[0238] The nucleotide sequence provided in SEQ ID NO: 1, through SEQ ID NO: 31015 or fragment thereof, or complement thereof, or a nucleotide sequence at least 90% identical, preferably 95%, identical even more preferably 99% or 100% identical to the sequence provided in SEQ ID NO: 1 through SEQ ID NO: 31015 or fragment thereof, or complement thereof, can be “provided” in a variety of mediums to facilitate use fragment thereof. Such a medium can also provide a subset thereof in a form that allows a skilled artisan to examine the sequences.

[0239] In one application of this embodiment, a nucleotide sequence of the present invention can be recorded on computer readable media. As used herein, “computer readable media” refers to any medium that can be read and accessed directly by a computer. Such media include, but are not limited to: magnetic storage media, such as floppy discs, hard disc, storage medium, and magnetic tape: optical storage media such as CD-ROM; electrical storage media such as RAM and ROM; and hybrids of these categories such as magnetic/optical storage media. A skilled artisan can readily appreciate how any of the presently known computer readable mediums can be used to create a manufacture comprising computer readable medium having recorded thereon a nucleotide sequence of the present invention.

[0240] As used herein, “recorded” refers to a process for storing information on computer readable medium. A skilled artisan can readily adopt any of the presently known methods for recording information on computer readable medium to generate media comprising the nucleotide sequence information of the present invention. A variety of data storage structures are available to a skilled artisan for creating a computer readable medium having recorded thereon a nucleotide sequence of the present invention. The choice of the data storage structure will generally be based on the means chosen to access the stored information. In addition, a variety of data processor programs and formats can be used to store the nucleotide sequence information of the present invention on computer readable medium. The sequence information can be represented in a word processing text file, formatted in commercially-available software such as WordPerfect and Microsoft Word, or represented in the form of an ASCII file, stored in a database application, such as DB2, Sybase, Oracle, or the like. A skilled artisan can readily adapt any number of data processor structuring formats (e.g., text file or database) in order to obtain computer readable medium having recorded thereon the nucleotide sequence information of the present invention.

[0241] By providing one or more of nucleotide sequences of the present invention, a skilled artisan can routinely access the sequence information for a variety of purposes. Computer software is publicly available which allows a skilled artisan to access sequence information provided in a computer readable medium. The examples which follow demonstrate how software which implements the BLAST (Altschul et al., J. Mol. Biol. 215:403-410 (1990)) and BLAZE (Brutlag et al., Comp. Chem. 17:203-207 (1993), the entirety of which is herein incorporated by reference) search algorithms on a Sybase system can be used to identify open reading frames (ORFs) within the genome that contain homology to ORFs or proteins from other organisms. Such ORFs are protein-encoding fragments within the sequences of the present invention and are useful in producing commercially important proteins such as enzymes used in amino acid biosynthesis, metabolism, transcription, translation, RNA processing, nucleic acid and a protein degradation, protein modification, and DNA replication, restriction, modification, recombination, and repair.

[0242] The present invention further provides systems, particularly computer-based systems, which contain the sequence information described herein. Such systems are designed to identify commercially important fragments of the nucleic acid molecule of the present invention. As used herein, “a computer-based system” refers to the hardware means, software means, and data storage means used to analyze the nucleotide sequence information of the present invention. The minimum hardware means of the computer-based systems of the present invention comprises a central processing unit (CPU), input means, output means, and data storage means. A skilled artisan can readily appreciate that any one of the currently available computer-based system are suitable for use in the present invention.

[0243] As indicated above, the computer-based systems of the present invention comprise a data storage means having stored therein a nucleotide sequence of the present invention and the necessary hardware means and software means for supporting and implementing a search means. As used herein, “data storage means” refers to memory that can store nucleotide sequence information of the present invention, or a memory access means which can access manufactures having recorded thereon the nucleotide sequence information of the present invention. As used herein, “search means” refers to one or more programs which are implemented on the computer-based system to compare a target sequence or target structural motif with the sequence information stored within the data storage means. Search means are used to identify fragments or regions of the sequence of the present invention that match a particular target sequence or target motif. A variety of known algorithms are disclosed publicly and a variety of commercially available software for conducting search means are available and can be used in the computer-based systems of the present invention. Examples of such software include, but are not limited to, MacPattern (EMBL), BLASTIN and BLASTIX (NCBIA). One of the available algorithms or implementing software packages for conducting homology searches can be adapted for use in the present computer-based systems.

[0244] The most preferred sequence length of a target sequence is from about 10 to 100 amino acids or from about 30 to 300 nucleotide residues. However, it is well recognized that during searches for commercially important fragments of the nucleic acid molecules of the present invention, such as sequence fragments involved in gene expression and protein processing, may be of shorter length.

[0245] As used herein, “a target structural motif,” or “target motif,” refers to any rationally selected sequence or combination of sequences in which the sequences or sequence(s) are chosen based on a three-dimensional configuration which is formed upon the folding of the target motif. There are a variety of target motifs known in the art. Protein target motifs include, but are not limited to, enzymatic active sites and signal sequences. Nucleic acid target motifs include, but are not limited to, promoter sequences, cis elements, hairpin structures and inducible expression elements (protein binding sequences).

[0246] Thus, the present invention further provides an input means for receiving a target sequence, a data storage means for storing the target sequences of the present invention sequence identified using a search means as described above, and an output means for outputting the identified homologous sequences. A variety of structural formats for the input and output means can be used to input and output information in the computer-based systems of the present invention. A preferred format for an output means ranks fragments of the sequence of the present invention by varying degrees of homology to the target sequence or target motif. Such presentation provides a skilled artisan with a ranking of sequences which contain various amounts of the target sequence or target motif and identifies the degree of homology contained in the identified fragment.

[0247] A variety of comparing means can be used to compare a target sequence or target motif with the data storage means to identify sequence fragments sequence of the present invention. For example, implementing software which implement the BLAST and BLAZE algorithms (Altschul et al., J. Mol. Biol. 215:403-410 (1990)) can be used to identify open frames within the nucleic acid molecules of the present invention. A skilled artisan can readily recognize that any one of the publicly available homology search programs can be used as the search means for the computer-based systems of the present invention. Having now generally described the invention, the same will be more readily understood through reference to the following examples which are provided by way of illustration, and are not intended to be limiting of the present invention, unless specified.

### EXAMPLE 1

[0248] The Soy54 (LIB3040) cDNA library is generated from soybean cultivar Asgrow 3244 (Asgrow Seed Company, Des Moines, Iowa U.S.A.) heart to torpedo stage embryo tissue. Seeds are planted at a depth of approximately 2 cm into 2-3 inch peat pots containing Metromix 350 medium and the plants are grown in an environmental chamber under 12 hr daytime/12 hr nighttime cycles. The daytime temperature is approximately 29° C. and the nighttime temperature 24° C. Soil is checked and watered daily to maintain even moisture conditions. Seeds are collected and embryos removed from surrounding endosperm and maternal tissues. Embryos from globular to young torpedo stages (by corresponding analogy to Arabidopsis) are collected with a bias towards the middle of this spectrum. Embryos which are beginning to show asymmetric development of cotyledons are considered the upper developmental boundary for the collection and are excluded. A total of 12 mg embryo tissue is frozen in liquid nitrogen. The harvested tissue is stored at −80° C. until RNA preparation. Total RNA is prepared from 12 mg of tissue and used directly to generate a library using the Clontech SMART™ PCR cDNA (Clontech Laboratories, Palo Alto, Calif. U.S.A. ) library construction kit. The Sal I adaptors are used in this library construction. The cDNA is ligated into the pSPORT vector. SEQ ID NO: 1 through SEQ ID NO: 4486 are from LIB3040.

[0249] The Soy59 (LIB3051) cDNA library is generated from soybean cultivar Asgrow 3244 (Asgrow Seed Company, Des Moines, Iowa U.S.A.) endosperm tissue. Seeds are germinated on paper towels under laboratory ambient light conditions. At 8, 10 and 14 hours after imbibition, the seed coats are harvested. The endosperm consists of a very thin layer of tissue affixed to the inside of the seed coat. The seed coat and endosperm are frozen immediately after harvest in liquid nitrogen. The harvested tissue is stored at −80° C. until RNA preparation. The stored tissue is then used immediately for preparation of poly A+RNA using Dynabeads oligo-dT in a direct isolation procedure described by the manufacturer. The cDNA library is constructed using the pSPORT cDNA synthesis kit from Life Technologies (Life Technologies, Gaithersburg, Md. U.S.A.). The resulting cDNA is ligated into the pSPORT. SEQ ID NO: 4487 through SEQ ID NO: 13842 are from LIB3051.

[0250] LIB3054 is a normalized cDNA library generated from roots from two exotic soybean cultivars Cristilliana (USDA Soybean Germplasm Collection, Urbana, Ill. U.S.A.) and FT108 (Monsoy, Brazil, tropical germ plasma). The roots are harvested from plants grown an environmental chamber set to a 12 h day/12 h night cycle, 29° C. daytime temperature, 24° C. night temperature and 70% relative humidity. Daytime light levels are measured at 450 μEinsteins/m². Soil is checked and watered daily to maintain even moisture conditions. Approximately 50 g and 56 g of roots are collected from cultivar Cristilliana and cultivar FT108. The plants are uprooted and the roots quickly rinsed in a pail of water. The root tissue is then cut from the plants, placed immediately in 14 ml polystyrene tubes and immersed in dry-ice. The tissue is stored at −80° C. until RNA preparation. Total RNA is prepared from the combination of equal amounts of root tissue from each cultivar and a cDNA library is constructed as described in Example 2. For normalization, approximately 1 million clones from the cDNA library are used for generation of double and single stranded plasmid DNA. Double stranded plasmid DNA is used as a template for preparation of biotinylated RNA transcripts. Single stranded plasmid DNA from the cDNA library is hybridized with biotinylated RNA transcripts from the same library. Hybridized molecules are removed with Streptavidin beads (Dynal Inc. Lake Success, N.Y.). Remaining single stranded molecules are partially repaired with “Klenow” before transforming E. coli for the generation of the normalized cDNA library. SEQ ID NO: 13843 through SEQ ID NO: 14575 are from LIB3054.

[0251] Soy67 (LIB3065) normalized cDNA library is prepared from SOYMON007, SOYMON015 and SOYMON020 prepared tissue. Equal amounts of Soy19 (SOYMON007), Soy27 (SOYMON015) and Soy33 (SOYMON020), in the form of double stranded DNA, are mixed and used as the starting material for normalization. For normalization, biotinylated genomic soybean DNA is used as the driver for the normalization reaction. Double stranded plasmid DNA representing approximately 1×10⁶ colony forming units is used as the target. The double stranded plasmid DNA is isolated using standard protocols. Approximately 4 micrograms of biotinylated genomic DNA is mixed with approximately 6 micrograms of double stranded plasmid DNA and allowed to hybridize. Genomic DNA-plasmid DNA hybrids are captured on Dynabeads M280 streptavidin. The dynabeads with captured hybrids are collected with a magnet. Captured hybrids are eluted in water. The resulting clones are subjected to a second round of hybridization identical to the first. SEQ ID NO: 14576 through SEQ ID NO: 16318 are from LIB3065.

[0252] The SOYMON007 cDNA library is generated from soybean cultivar Asgrow 3244 (Asgrow Seed Company, Des Moines, Iowa U.S.A.) seed tissue. Seeds are harvested from plants grown in a field in Jerseyville 25 and 35 days after flowering. Seed pods are picked from all over the plant and the seeds are extracted from the pods. Approximately 4.4 g and 19.3 g of seeds are collected from the 25 and 35 days after flowering plants, respectively, placed into 14 ml polystyrene tubes and immediately immersed in dry ice. The harvested tissue is then stored at −80° C. until RNA preparation. Total RNA is prepared from the combination of 1.0 g and 3.4 g of seeds from 25 and 35 days after flowering plants and the cDNA library is constructed as described in Example 2.

[0253] The SOYMON015 cDNA is generated from soybean cultivar Asgrow 3244 (Asgrow Seed Company, Des Moines, Iowa U.S.A.) seed tissue harvested 45 and 55 days post-flowering. Seed pods from field grown plants are harvested 45 and 55 days after flowering. The seed pods are picked from all over the plant and the seeds extracted from the pods. Approximately 19 g and 31 g of seeds are harvested from the respective seed pods and immediately frozen in dry ice. The harvested tissue is then stored at −80° C. until RNA preparation. Total RNA is prepared from the combination of 0.75 g and 1.25 g of seeds from 45 and 55 days after flowering and the cDNA library is constructed as described in Example 2.

[0254] The SOYMON020 cDNA is generated from soybean cultivar Asgrow 3244 (Asgrow Seed Company, Des Moines, Iowa U.S.A.) seeds harvested from plants grown in a field in Jerseyville 65 and 75 days post-flowering. The seed pods are picked from all over the plant and the seeds extracted from the pods. Approximately 14 g and 31 g of seeds are harvested from the respective seed pods and immediately frozen in dry ice. The harvested tissue is then stored at −80° C. until RNA preparation. Total RNA is prepared from the combination of equal numbers of seeds from 65 and 75 days after flowering and the cDNA library is constructed as described in Example 2.

[0255] Soy74 (LIB3093) cDNA library is generated from soybean cultivar Asgrow 3244 (Asgrow Seed Company, Des Moines, Iowa U.S.A.) leaves collected from control (watered regularly) plants. Seeds are planted at a depth of approximately 2 cm into 2-3 inch peat pots containing Metromix 350 medium and the plants are grown in an environmental chamber set to a 12 hr daytime/12 hr nighttime cycle, 26° C. daytime temperature, 21° C. night temperature and 70% relative humidity. Daytime light levels are measured at 300 μEinsteins/m². Soil is checked and watered daily to maintain even moisture conditions. At the R3 stage of the plant drought is induced by withholding water. After 3 and 6 days seeds and pods from both drought stressed and control (watered regularly) plants are collected from the fifth and sixth node and frozen in dry-ice. The harvested tissue from control plants is stored at −80° C. until RNA preparation. The RNA is purified from the stored control tissue and the cDNA library is constructed as described in Example 2. SEQ ID NO: 16319 through SEQ ID NO: 21208 are from LIB3093.

[0256] The Soy65 (IB3107) cDNA library is generated from soybean cultivar Asgrow 3244 (Asgrow Seed Company, Des Moines, Iowa U.S.A.) abscission zone tissue from drought-stressed plants. Seeds are planted at a depth of approximately 2 cm into 2-3 inch peat pots containing Metromix 350 medium and the plants are grown in an environmental chamber set to 12 h day/12 h night cycle; 26 degree C. daytime temperature, 21 degree C. night temperature; 70% relative humidity. Daytime light levels are measured at 300 microeinsteins per square meter. Plants are irrigated with 15-16-17 Peter's Mix. At the R3 stage of development, drought is imposed by withholding water. At 3, 4, 5 and 6 days, tissue is harvested and wilting is not obvious until the fourth day. Abscission layers from reproductive organs are harvested by cutting less than one millimeter proximal and distal to the layer. Immediately upon excision, samples are frozen in liquid nitrogen and are stored at −80° C. until RNA preparation. The following tissues are combined for the single library: four day stress, all nodes; 5 day stress, all nodes. The RNA is prepared from the stored tissue and the cDNA library is constructed as described in Example 2. SEQ ID NO: 21209 through SEQ ID NO: 26320 are from LIB3107.

[0257] The Soy66 (LIB3109) cDNA library is generated from soybean cultivar Asgrow 3244 (Asgrow Seed Company, Des Moines, Iowa U.S.A.) abscission zone tissue from control (watered regularly) plants. Seeds are planted at a depth of approximately 2 cm into 2-3 inch peat pots containing Metromix 350 medium and the plants are grown in an environmental chamber set to 12 h day/12 h night cycle; 26 degree C. daytime temperature, 21 degree C. night temperature; 70% relative humidity. Daytime light levels are measured at 300 microeinsteins per square meter. Plants are irrigated with 15-16-17 Peter's Mix. At 3, 4, 5 and 6 days (relative to drought stress induction in plants for Soy65), abscission layer tissue is harvested. Abscission layers from reproductive organs are harvested by cutting less than one millimeter proximal and distal to the layer. Immediately upon excision samples are frozen in liquid nitrogen and stored at −80° C. until RNA preparation. The following samples are combined for this cDNA library: 4 day control, all nodes; 5 day control; all nodes. The RNA is prepared from the stored tissue and the cDNA library is constructed as described in Example 2. SEQ ID NO: 26321 through SEQ ID NO: 31015 are from LIB3109.

### EXAMPLE 2

[0258] The stored RNA is purified using Trizol reagent from Life Technologies (Gibco BRL, Life Technologies, Gaithersburg, Md. U.S.A.), essentially as recommended by the manufacturer. Poly A+ RNA (mRNA) is purified using magnetic oligo dT beads essentially as recommended by the manufacturer (Dynabeads, Dynal Corporation, Lake Success, N.Y. U.S.A.).

[0259] Construction of plant cDNA libraries is well-known in the art and a number of cloning strategies exist. A number of cDNA library construction kits are commercially available. The Superscript™ Plasmid System for cDNA synthesis and Plasmid Cloning (Gibco BRL, Life Technologies, Gaithersburg, Md. U.S.A.) is used, following the conditions suggested by the manufacturer.

### EXAMPLE 3

[0260] The cDNA libraries are plated on LB agar containing the appropriate antibiotics for selection and incubated at 37° for a sufficient time to allow the growth of individual colonies. Single colonies are individually placed in each well of a 96-well microtiter plates containing LB liquid including the selective antibiotics. The plates are incubated overnight at approximately 37° C. with gentle shaking to promote growth of the cultures. The plasmid DNA is isolated from each clone using Qiaprep plasmid isolation kits, using the conditions recommended by the manufacturer (Qiagen Inc., Santa Clara, Calif. U.S.A.).

[0261] The template plasmid DNA clones are used for subsequent sequencing. For sequencing the cDNA libraries of LIB3040, LIB3051 LIB3054, LIB3065, LIB3093, LIB3107, and LIB3109 a commercially available sequencing kit, such as the ABI PRISM dRhodamine Terminator Cycle Sequencing Ready Reaction Kit with AmpliTaq® DNA Polymerase, FS, is used under the conditions recommended by the manufacturer (PE Applied Biosystems, Foster City, Calif.). The ESTs of the present invention are generated by sequencing initiated from the 5′ end of each cDNA clone.

[0262] A number of sequencing techniques are known in the art, including fluorescence-based sequencing methodologies. These methods have the detection, automation and instrumentation capability necessary for the analysis of large volumes of sequence data. Currently, the 377 DNA Sequencer (Perkin-Elmer Corp., Applied Biosystems Div., Foster City, Calif.) allows the most rapid electrophoresis and data collection. With these types of automated systems, fluorescent dye-labeled sequence reaction products are detected and data entered directly into the computer, producing a chromatogram that is subsequently viewed, stored, and analyzed using the corresponding software programs. These methods are known to those of skill in the art and have been described and reviewed (Birren et al., Genome Analysis: Analyzing DNA, 1, Cold Spring Harbor, N.Y., the entirety of which is herein incorporated by reference).

1. A substantially purified nucleic acid molecule that encodes a soybean protein or fragment thereof wherein the substantially purified nucleic acid molecule consists essentially of the nucleic acid sequence of SEQ ID NO: 3920.

2. (canceled)

3. A transformed plant having a nucleic acid molecule which comprises:
(a) an exogenous promoter region which functions in a plant cell to cause the production of a mRNA molecule;
(b) a structural nucleic acid molecule consisting essentially of the nucleic acid sequence of SEQ ID NO: 3920 or the complement thereof;
(c) a 3′ non-translated sequence that functions in said plant cell to cause termination of transcription and addition of polyadenylated ribonucleotides to a 3′ end of said mRNA molecule.

4. The transformed plant according to claim 3, wherein said structural nucleic acid molecule is the complement of SEQ ID NO: 3920.

5. The transformed plant according to claim 4, wherein said plant is soybean or maize.

6. The transformed plant according to claim 4, wherein said plant is maize.

7. The transformed plant according to claim 4, wherein said plant is soybean.

8. A substantially purified nucleic acid molecule that shares between 100% to 90% sequence identity with SEQ ID NO: 3920 or complement thereof.

9. The substantially purified nucleic acid molecule of claim 8, wherein the nucleic acid molecule shares between 100% to 95% sequence identity with SEQ ID NO: 3920 or complement thereof.

10. The substantially purified nucleic acid molecule of claim 9, wherein the nucleic acid molecule shares between 100% to 98% sequence identity with SEQ ID NO: 3920 or complement thereof.

11. The substantially purified nucleic acid molecule of claim 10, wherein the nucleic acid molecule shares 100% sequence identity with SEQ ID NO: 3920 or complement thereof.

The application's sequence listing, which the Patent Office published only in electronic form, follows.

SEQUENCE LISTING (31015 sequences)

SEQ ID NO: 1 - DNA, 419 bp, Glycine max
gacagtgttcacagacactggaagcagcacgatgtcaccgttaaggacgagaagacccttctcttcggtgacaaggcagtcactgtttttggacacagaaaccctgaagagatcccatgggggtcaactggagctgacatcattgttgagtccaccggagttttcaccgataaggacaaagctgccgcacatttgaagggtggtgccaagaaggttattatttctgcccccagtaaggatgcccccatgtttgttgttggtgttaatgagcacgagtacaagccagagcttgatactatttccaacgctagctgcacaatcaactgccttgctccactccccaaggttatcaatgacaggtttggcattgttgacggtttgatgacaacggttcattccatcactgccacccagaagac

SEQ ID NO: 2 - DNA, 198 bp, Glycine max
ataagaattaattttactccacaaaatcacggtgttatcatgaaaaagtagaagtaattatttgttattttgtttttatcatgaaagttttattgattgtttatcaccaaattttaaccaagcacactatgaatctcgtaaagtccaaaatgactatggctaaggaccatcttaacgaattaaaagacttccaagtat

SEQ ID NO: 3 - DNA, 336 bp, Glycine max
gacctaaaaattgtaccgatatggcttcacttgtgtgtctccttttttccttgcatttcatggttatcatgtcaggttccttaccagcaaatagtgaagtgtttacaaaagagtctcctatgtctctatccacaaaacccgtggaaagactcacccaactccacttttatttccataacaacaaaatgggggaacacccgactgctatgaaaattgttgagcctcctaaggcgtccatttctggttttgggactatttacatgatggatgaccctctaaccgaaggaccaagtccaacttcaaagcttgttggaagatgtcagggaatatatgctg

SEQ ID NO: 4 - DNA, 374 bp, Glycine max
ggtggtggggtgtgcagaagagcgtcgcagttgtaaccctaatcagaagaagcgcagcttcaagcgagtgacagccaccagccatgggtcgtatgcacagccgcggtaagggtatatcctcttctgctttgccctacaaaaggacacctcctagctggctcaagatctcttcgcaagatgtcgaagaaaatatctgcaagtttgcgaagaaaggtttgaccccgtctcagattggtgtcattctcagagattctcacggtattgctcaggtcaatagcgtcactggcagcaaaatccttcgcatcctcaaagctcacggacttgcgcctgaaattccagaggatctgtaccatttgattaagaaggcagtttca

SEQ ID NO: 5 - DNA, 359 bp, Glycine max
gacattcatattttcctttcgtttcctttcattttccctcactttctcgctccccaaacgcccctctctctcctccaatggccgaccagctcaccgacgaccagatcgccgagttcaaggaggccttcagcctcttcgacaaggacggcgatggttgcattactaccaaggaacttgggactgttatgaggtcacttggtcaaaacccaactgaggcagaactgcaggatatgataaacgaggttgatgctgatggcaacggaaccatcgatttcccagagttcctcaacctgatggctcgcaagatgaaagacaccgactcagaggaggagcttaaggaggctttccgtgtgtttgac

SEQ ID NO: 6 - DNA, 79 bp, Glycine max
gccggtttcccgaacgatttgatggtttggaatgcatttcccaagcaacgagtcttcggttcgaaaccagcagagagac

SEQ ID NO: 7 - DNA, 378 bp, Glycine max
gatcatcatcaacaacaagcagatcaacctctctctctctctcaaccataatagtcatgggtttgaaggaggattttgagcagtatgctgagaaagcaaagactttgccaccgactcaatcaaacgaagacttgcttatcctttatggattgtacaaacaggccaccgttggacctgtcaacaccagccgtcctggaatgttcaacatgagggacagagctaaatgggatgcatggaaggctgttgaagggaaatccaaggacgaagcaatgggtgattacatcattaaggtgaaacagctgctggaagcagctggcttgcctgcttgataacattgtcatgcccttgcttctgaatctgtgctagaagttcacaaca

SEQ ID NO: 8 - DNA, 168 bp, Glycine max
caaaaaaacaacagaaggggactcattcatacaatagagaccagcttttgcttctttgtgaacatggagatgaggaaatcatgtggcttcttcttcttgctcctcctccttgtctttgcttcccaggtggtggtgcaaacggagggaaaaatgtgtgagtcacaaagc

SEQ ID NO: 9 - DNA, 266 bp, Glycine max
  modified_base (210)..(210): a, c, g, t, unknown, or other
cgtgacggcttcacgttgtcacagtcatcatctcttgcggctacggttttagcgcagcttcttctagatttaaggaagatgggtaaggaaaaggttcacatcagtattgtggtcattggccatgtcgactctgggaaatccactaccactggtcacctgatttacaagcttggaggcattgacaagcgtgttattgagaggtttgagaangaagctgctgagatgaacaagaggtctttcaagtatgcctgggtgctggacaaact

SEQ ID NO: 10 - DNA, 321 bp, Glycine max
ggttgttgttgtattgcagtaagtaacagcgaacgaagaagaagaagaagaagaagaagaagaacgcagaagccacgatgagtggcagagccatgatctcctgtttccctcctccttcaacaactccatgctctgcccccattccactctggcgccgaaaccacctcctccatgcaactcctccaccttcgctacacctcctctcgcggcggagccacctcgttgccggcggaaggagggtgtgggtgaatgtgaagtccgagaagaacttatccgaatcccccaagtacgaggatgatgtcgtggttcagaagaagaaga

SEQ ID NO: 11 - DNA, 361 bp, Glycine max
gaccctacgtacagatgactcatcattttcttctgggagcaactaaatggttctgacctgatggcaaatcagaacaaaacattagctctagcttcagtccaacaacataaacacattattcagactcttcactccatttttttttataaaagttggccaagaataatatgcatctcttgcttccttttcgcttttatactcactttttggtagttgagtcttcaagatgcattcttcctgagatattcagcttcgacatctcacgtatcactgtgattggttttgtctaatgtgattgctgctccaccagcagcttttctagacacagctaattcttgccagatgctaacgtcacagtata

SEQ ID NO: 12 - DNA, 350 bp, Glycine max
gagggtttcacgttttcatgtgaaaatggattgagaatctctttctatttttatattttctttcgggtcaattagggttttttctggcgtgattctgaaagcttggatctggatatcttctttgcttctttgctatggaagactcagattcagttgctacgctgatagattccacaacttctaagatacagcagctgcaaaaggcatttgctgaacttgaaagttaccgagctgttactctgaacttgaaatggaaagaactcgaggaacattttcatggtctggagaaatccttgaagaggcgctttcatgaattggaagaccaggaaaaagagtttgagaacaaaaca

SEQ ID NO: 13 - DNA, 359 bp, Glycine max
aacttggtatatccactatatgaccattaactaaaacatgtctatggttaattaattggcgtgcttgaggaatagtcgcagccatacccaaccgaaaaagtatgttatccaagcgcatttcaagtagttgtaataaaacctgaccagttgatcctttagcttttccggcgatacgaacgtatttaagcaattgtcgttctgtaagaccataatgaaaacgcaatttttgtttttcttctaaacgaatacgatattgagattttttactggagcgcgattgatttctaagttcgcttttgactgttggccttttactagttagtcctggtaaagaccccagacgacgtatttttttgaaa

SEQ ID NO: 14 - DNA, 344 bp, Glycine max
gaagaagccaaagagtgagaggtttgagaagctggaggctctaagcaggcgcctgaggctttgccttctaaagggatcaacccatggaaggcacaagtcaacttagacacacctcttccttctttgtatcatatcacccatccatcgtctaattctaatgttttattttacaacactgtttctaggtagttcttcacattcaactttctttttaggttttgcctaacattggctttgatttccctgctctcattattatttcatacttatgaaggtgactcatcacattgatgtgcaggtatcagatacaatacgtgtatccaatatatagataagattattcg

SEQ ID NO: 15 - DNA, 403 bp, Glycine max
  modified_base (225)..(225): a, c, g, t, unknown, or other
  modified_base (354)..(354): a, c, g, t, unknown, or other
tgggacagagagagaggttttgatgcaacgctgtcactgagaaaggatctctatctacgaaggagcggaataaaacccttctctctgtgattaagagaatggcttcagatcggaaacttcacacttttgaggaggtggcaaagcacaaccagaccaaggattgctggctcatcatttctggcaaggtgtatgatgtcacccctttcatggaggatcatcccggangtgatgaggttttgttatctgcaacagggaaagatgcaaccaatgactttgaagatgtggggcacagtgattctgctagagatatgatggaaaaatactacattggtgagattgatgcatcaaccgtcncactaaaacggacctacattccaactcagcaagctcagtacaatcctga

SEQ ID NO: 16 - DNA, 334 bp, Glycine max
gaattcacttgcggctgcagtagagaagcactcttcgttcttcgactgtctacgatctgctttctctgaattgtgaaaatgtcgctcggagaaactgcttgttcatacgcagctctcatccttcatgaagatggaattagtgtaactgctgacaagatcagcaccttgttgaaaactgcaaaggttcaattagactcttattggccaaccttgtttgctaaacttgctgaaaagaaaaatcttggcgatttgataccaaatgcggaaggcggtggtgcacaatttgctgttgcagctgcccaatttgctgctgctgctggtggtgctgctgccg

SEQ ID NO: 17 - DNA, 349 bp, Glycine max
tatgggtcttttgataagccctctgagaagaagaaggggtacttgcttcccaggcccaagatggttaactctgatcttgccaggattattaattctgacgaggttcagtctgttgtgaggcccattaagaaggatgtgaagaaggccacgctgaagaagaaccctcttaagaacctgaactctatgctgaagctgaatccttatgccaagactgctaagaggatggctcttcttgctgaagctcagcgcgttaaggccaagaaggagaagctcgacaagaagaggaagactgtctctaaggaagaagcttctgccatcaagtctgctgggaaagcatggtatcacacta

SEQ ID NO: 18 - DNA, 399 bp, Glycine max
ggtgtgtgcgttcctaacattattgtttcctaccaagttctctgtctggggagttcttagcaccaccaccagcttctgcagtagctttaagctacgaaagattttccttgaccatggggcaaaagcatttagtgacggtgttctgtttatgggctttaacatgttcccttcttccatctttctcctttggaattctgagaattggtttgaagaagagacctctagatcttgatagtattaatgctgctagaaaggcaagagaaggtctaagatctgtaagaccaatgatgggtgcacatgatcagtttattggtaagtcaaaaggtgaagatatagtacctttgaagaattatttggacgctcaatattttggtgagattggaattggcacacccccac

SEQ ID NO: 19 - DNA, 131 bp, Glycine max
gttcgatgttggattttcccaaacattttaagaagaaatgtgatgtgtaatgggtctgtaatgacctttgaaaataagtttggtttgtgttgaactctattgtcccattaatgttactactgtttgttaac

SEQ ID NO: 20 - DNA, 348 bp, Glycine max
  modified_base (286)..(286): a, c, g, t, unknown, or other
  modified_base (327)..(327): a, c, g, t, unknown, or other
caaaaaaacaacaaaagggggcaacccttgaaacaaaccccaactcaaccaccaaaccactctctctgctcctcctctacctttcaagtttttaaagtattaagatggcagagacattcctatttacctcagagtcagtgaacgaaggacaccctgacaagctctgcgaccaaatctccgatgctgtcctcgacgcttgccttgaacaggacccagacagcaaggttgcctgcgaaacatgcaccaagaccaacttggtcatggtcttcggagagataccaccaangccaacgttgactacgagaagatcgtgcgtgacacctgcangaacatcggcttcgtctcaaa

SEQ ID NO: 21 - DNA, 400 bp, Glycine max
  modified_base (140)..(140): a, c, g, t, unknown, or other
aaaataaattgatacacaccacatttccccaaagtaatttattaattaataaataaatggcggcggcggcggcattgacggtgcaactcccacctaggattccgaccgccaacaacgttacccgctgctctgctttgccntctctgcctcctcgcggcaacaacactaaaaccactttgctcttatcttccctcaaccacttctcagtgtcccgaaaatcttctctgcttcagaccagagcttcttcagaggaatcatcctcagtagatgccaatgaggtgttcacagatttgaaggaaaagtgggatgctcttgaaaacaagtccacagtacttttttatggtggtggggctttagttgctgtttggctatcgtcgattcctgtgagcgccatcaactc

SEQ ID NO: 22 - DNA, 389 bp, Glycine max
ggtcacaaccctactctcaacacactgcagcgagaaccaaagaaaaaaaaagcttcttccattttccgaaatcgaagcattatggttagggttttttccgatctgagaaattcgcggcccaatggcggaggaaccggagagcaccgtcaccaccggcgccgccgacgaatcgctgctcgataagatcaccgagaagcttcacggccacgattcttcgtcctcttcatctcccgactccgactccgactccgaaaaaaccgttacttcctccgttaaggataaggtttttcgcctcttcggaagggagagacccgttcactccgttttcggcgccggaaaacctgctgatgtgttattgtggacgaacaagaaaatttctgctggcatgc

SEQ ID NO: 23 - DNA, 364 bp, Glycine max
gaagttcttcagcgaccaagaccagatcgacttcatcgattccttccagaagtgtctcttcgagaacacgcacggcgtcgaggccacggaggccaacaaactcaaaatctacggcaaggatttcgcggcgtgggcaaaacccgaaaccgccgatgattccatgtgggaggacgcagaggaagccttcaccaaaagccccacactggttaggtcaaaccaagacctaaaagaagagttcgaagaagcttccaacggtggaattcagagccttgctttgggtgctttggacaacagtttcctggtgagtgaaaatgggattcacggttgtgaagaatttcgcacatgggattcatgggaagggtgc

SEQ ID NO: 24 - DNA, 334 bp, Glycine max
gagacctcaggtcaggcggggctacccgctgagtttaagcatatcaataagcgaagaaaaaaaaaaaaaaaaaaaaaaaaaaaaaaacgggcgctccaaaagattcaagcttaagtaagccttcaagcgaatttaaaactcctccaaaatgtcaaccaaattcaattcaatggccgtccttttacaacgtccttaatgggaaaaaccttgcgttaaccaacttaatccccttgcaacaaaatcccctttccccaactggcgttataaccaagaaggccgcaacgattgcccttcccaacaatttcccaacctgaatggccaatgggaacccccc

SEQ ID NO: 25 - DNA, 385 bp, Glycine max
gacttgttcgcgctctctctctctctgtctttgttaaccctctcggcctctgtgtgttgtgttgtgaatcgagattcaacacttcaactcggcccattgggattttcagggtacaatggcttccaacatctcgccctctgcctttgataaagaacagatatttggaatggctgaaaaggagatggaatatagggtcgaattattcaacaagatgacccagacctgtttcaataagtgtgttgacaataggtacaaggagtctgagctaaatatgggtgaaaatagttgcattgaccgctgtgtttcaaaatattggcatgtgactaatctaattggtcagctgcttggttctgggaagcctccaatgtaatccaagtgttttgta

SEQ ID NO: 26 - DNA, 386 bp, Glycine max
  modified_base (352)..(352): a, c, g, t, unknown, or other
  modified_base (361)..(361): a, c, g, t, unknown, or other
gacacaattcaataccatttatcaactcactcatcaatctcgtttgttctcactaactattacttcatcatgtcgtcgagcacagttggtcaagtcatcaaatgcaaagctgcggtttcatgggaggcagggaagccacttgtgattgaagaagtagaggtggcaccaccacaagctggtgaagtgcgtttgaagatcctctacacctctctttgccacactgatgtttacttctgggaagccaagggccaaactccattgtttcctcgtatatttggtcatgaagctggagggattgtggagagcgtaggtgagggtgtgactcatctcaaaccaggggaccatgccctcncagtgtttnacggggagtgtggagaatgccctca

SEQ ID NO: 27 - DNA, 380 bp, Glycine max
  modified_base (322)..(322): a, c, g, t, unknown, or other
gcgtacacagcctcaacaaccctaacgcctgcagagcagagagagacgcagccatggggcgaagacccgcgaggtgttataggcaaattaagaacaaaccataccccaagtcacggttttgccgtggtgttcctgatcccaagatcaggatttacgatgttggtatgaagaagaagggtgttgatgagtttcctttctgtgtccatctggttagttgggagaaggaaaacgtttctagtgaggccctggaagctgctcgtattgcttgcaacaagtacatggccaaatttgctggaaaggatgctttccacttgagagtcanggtgcacccattccatgttcttaagatcaacaagatgctttcgtgtgctggagctgat

SEQ ID NO: 28 - DNA, 52 bp, Glycine max
gaagtccgtcctttcttttgttaaacaggctggctgtgacttcggctccccc

SEQ ID NO: 29 - DNA, 339 bp, Glycine max
gacagcgaaacagagagtgatttcagtgagtgatcggtgttcacttgatctcatcataatcgtcagcgtcaattgaagaagatgccgatcagaaacatcgccgtcggaaggcctgaagaggcgactcaccccgacacgttgaaggcggctttggctgagttcatctcaaccttcatcttcgtgttcgccggctcaggctccggcatcgcctacaacaagctcaccgacaacggcgctgccacccctgccggcctcatctccgcctccatcgcccatgcattcgccctcttcgtcgccgtctccgtcggcgccaacatctccggcggccacgtcaacccg

SEQ ID NO: 30 - DNA, 350 bp, Glycine max
gacagccacaacactttccacttgtctccgaattagttatcttgagaaacattattcccattgctatatattatggctagcatgaaggttacatgggtggttgtgatcatgtgcatggccgtggtgggtgcaccgatgatggcgcaagccatgacatgcaatgatgtgacggtgaacatggcacagtgcctatcctacctgatgcagggaggaacaccttcaacactctgctgtcaccaacgttgacaaacaaactgtgtgcaactggtctcaagcggatgctgccaggtaaaacatcaatgaccagtatgctcaggaattccctggtttctgcaaggtcaatgtccctt

SEQ ID NO: 31 - DNA, 353 bp, Glycine max
gaccgttccatttctcaacaacttctgctacttcctactccaaccgcacttctgctccgcaattatcatgggcaaggtcaagatcggaatcaacggatttggaagaattggccgtttggtagccagagtggctctgcagagagacgatgttgaactcgttgccgttaacgaccctttcatcaccaccgattacatgacatacatgtttaaatacgacagtgttcacggacactggaagcatcacgatgtcaccgttaaggacgagaagacccttctcttcggtgacaagccagtcactgtttttggacacaggaaccctgaagagatccatgggggtcaactggagctgacat

SEQ ID NO: 32 - DNA, 405 bp, Glycine max
gagggtttggttattagggttttcgctcaccggtgtgcagtcgagcccccgaagaaaaagcgaaaatgccgtcgcacaagacattcagaatcaagaagaagttggcgaagaagatgaggcagaacaggcctatcccctactggatccgcatgtggaccgacaacaccatcaggtacaacgcgaagcgccgtcactggcgtcgcaccaagcttggattctgaggtgcttgctttgcctcggttctgtttatccaattaattagtgttttattttcttgagccaaaaacaatgctttggagattttaatattttgcattttgttccaagactatattgtgtaaggaacttattgtagttcagactaatggtggtgttggtcacctttttttaaaagtattttgcaaa

SEQ ID NO: 33 - DNA, 286 bp, Glycine max
aaatcatttaaacacatgttgtttttgtatgcgcacttccaagtgcgcaagtcattgtacaagaacaacagtgcaatgtgtttgaccctatttaaacttcatggttgcgaattgaaggagatttgatttacgggaggagagctctctagggttgaggggaaggctatgaagctcttccccttgctctccatggcttccctaacatttctcatcaactctttcatctatttgcatattttcctcgtgtggttatgtaattggatttatccatttgggggttgatgta

SEQ ID NO: 34 - DNA, 222 bp, Glycine max
gaaggctttgcatttcatttgagagagagagcgtcttacctttccattatcaaaatggctgtttccgctatcacaggagccaagctaaccctaaggataaggttggcgatacctccttcctctcccaagcgctctcgaaccgtcgcaatggccgtatccgtcgaccccaagaccgacaacaaactcaatcctaccaagtccgaagaagctttcgctgctgcc

SEQ ID NO: 35 - DNA, 367 bp, Glycine max
  modified_base (33)..(33): a, c, g, t, unknown, or other
  modified_base (140)..(140): a, c, g, t, unknown, or other
gattgttggcttgtgctctgctcgtgcctctanggttatcatatctccatttccatttcctctctctcagtttccaagaatcttaagctatgggaaagtcttacccaaccgtgagcgctgattaccagaaggccgttganaaagcgaagaagaatctcaaaaggttcaacccctaaaaaaaaatgccctcctctaatgctccgtttggcatggcactctgctggaacttacgacgtgagctcgaagaccggtggtcccttcggaaccataaagcatccctccgaactcgctcacggcgctaacaacggtcttgacatcgctgttaggcttttggagccactcaaagcggagtttcctattttgagct

SEQ ID NO: 36 - DNA, 397 bp, Glycine max
cgggcccaaccaagcctccaacgggtggcaaaagacgacagaaggggataggtgtgagaaaacgacagaaggggtgggtcacattatcacgaaagtgtaatttgtgataatcacaagaatccacgatgacgttttctgcgaatcagtcagaatgcctgcagtctcgtcagattattagaggatgttctgagcagaatcaaagattccttcgtgagactttctccacgatcgttagattacactccacttatttggtcagttttaagttatgggtgaggtagagtatattaaagtttgatgcgttgttaaaccattagttatttcaggggacgccgtttgtcgcgtaagttttggaaattatgtatcttgtggtgggattatccgtatctaaaacaat

SEQ ID NO: 37 - DNA, 311 bp, Glycine max
aatcatcaaaaacagccacagcacagcacaggcctcatcagttttgtgttgctgttcctgaaacatacacagatcaggtagcaggaggaggaggagttgcactttgctcaactctcctcactcttttcttctaacagatagatagatagatacaatattgagaaaaaaaaagggttcctgaaacttaatccccttcttctaaaccctctcaagctacccctaagttctgcaactcattcactactaggatatttgctgatgttgctggtgacattacaattgtcgttgatggcgagtcttttcttctgcat

SEQ ID NO: 38 - DNA, 387 bp, Glycine max
gccgctgagctccctttctcctcggtccacagagacaaaatgtaagacaggtgccaacagttcatcacgaaagaaaggactagctgagccgagatcactaactaaaacgaatttaatactaatcgaaaatactaatagaatagaaatagaactgtcttttcatatagatatcccttcaacacaacataggtcatcgaaaggatctcgaagacccaccaacgcacgaaagccgggatctttcagaaaatggattcctattcgaagggtgcataaccgcatggataagctcacactaacccgtcaatttgggatccaattcggttccttaagaggtatcgggaaggaattttggaatgtaataatatcgattcatacagatacagaaga

SEQ ID NO: 39 - DNA, 373 bp, Glycine max
  modified_base (49)..(49): a, c, g, t, unknown, or other
  modified_base (113)..(113): a, c, g, t, unknown, or other
  modified_base (144)..(144): a, c, g, t, unknown, or other
tttattttgatttttcttagtttcactggcaattgacaccataccatanaactatactaccgtatggttgtttcaagtgacagtgaacttggattcttaagggttcggagcanattttattaatgaaaaaaaaatgtaattcanaagagagattttactataaataactaatttttttactgaaaataaattaaccacaaagttgttaaatacactagtatcattcataaaaaaaacaatttaccctaaagtaagatttgacttttttttagttaatattgtttggccctcctattgtttagagctttaattcctgatatggtatggaagcagacaatggtaaaagccctttcctttttgcaaccacttcatt

SEQ ID NO: 40 - DNA, 404 bp, Glycine max
gattgttggcttgtgctctgctcgtgcctctagggttatcatatctccatttccatttcctctctctcagtttccaagaatcttaagctatgggaaagtcttacccaaccgtgagcgctgattaccagaaggccgttgagaaggcgaagaagaagctcagaggcttcatcgctgagaagagatgcgttcctctaatgctccgtttggcatggcactctgctagaacttacgacgtgagctcgaagaccggtggtcccttcggaaccataaagcacccctccgaactcgctcacggcgctaacaacggtcttgacatcgctgttaggcttttggagccactcaaagcggagtttcctattttgagctacgccgatttctaccagttggctggcgttgttgccgtt

SEQ ID NO: 41 - DNA, 370 bp, Glycine max
  modified_base (358)..(358): a, c, g, t, unknown, or other
ggagtgagacaccgatagatagagagcgcggcataacctaaacctatctttcttctctctctgtgtgtgcgcttcaacggcaaccagaagcagccatggccactgcaaggactgtgaaggatgtttcacctcatgagttcgttaaggcgtactcctctcacctcaagcgatccggcaagatggagctgccagagtggactgatattgtgaaaactgcaagatttaaggagttggctccttatgatcctgactggtactatgtcagagctgcttccatggcaagaaagatctacttgagaggaggacttggtgttggtgcctttcagaggatttatggtgggagcaagaggaatggtantcgccctcctca

SEQ ID NO: 42 - DNA, 393 bp, Glycine max
  modified_base (355)..(355): a, c, g, t, unknown, or other
gaaaccacaaaatttatgtagctgatcaatctctttctctctctatctgtctcttccatggaatggtagatttgaggtgaaaaggttccacattggtcaggttccgatctcacaatggggaagtcaccaggaaaatggatcaaaactgtattgtttgggaaaaagtcatccaaatcaaatatttcaaaaggcagagagaagcttgttaatcaagaagaaggagttgtagttacctccaaggtgctagaaactggtttggctttagaaccaacctccgatactattgccagacatgaggaagacctagagctggaaaatgaagaagcagaaaatgttaaaacttgggaatcaaganatagacacagtgggatcaattaatgaagatgctgcact

SEQ ID NO: 43 - DNA, 363 bp, Glycine max
  modified_base (105)..(105): a, c, g, t, unknown, or other
agggggtccgataatttcctttcctcctcctccccccttcgtctccccccccctcctaatccctttctctccgaatcccacgtcctagatccgttgttctcttcncacagttctcactgaatcaggatccattttgataccaagttgctgttgaatatcgagtttgctctttagagatctgtttccctctagacaacggtctgtgtgacctgttattttagttgaatcgaagccgcgaccaaatcttcctgatctttgcctgaggtgatggcatcggcgggtgtagcacctgcttctggagtaagagatgtgaatgcaaattcggttgctgttgaaaggttgcctgatgagatgaatggcatg

SEQ ID NO: 44 - DNA, 331 bp, Glycine max
gaccacgtgaaccaatatatcccaagccctatacaaccataccctaacacatacccatttgattcagtttccatggctagcctcaacgttgcatttttggctgcagtgctctgcatggttgtggctagtgcacccatggcacatgcacctatcacgtgcgggcaggtgaccaatatcctgatcaattgcatcggttacctccagaacggacgaacgccgccgtcgggatgctgcaactgagtcaataacctcaatgccaccgccaacactaacgccgaccgccagaccgcgtgcaactgcctcaagtcggtctccagcccaatctccggct

SEQ ID NO: 45 - DNA, 367 bp, Glycine max
  modified_base (356)..(356): a, c, g, t, unknown, or other
ggcccttctagctttttcccagtccaagcagcttccaattcgtgccactctcttcaaaatggccgttaccttctcaaatctccacacagaatcaggtctcaagtccctcgacgacttcctctctgggaaggtctacgtttctggggatcagttcacaaaggacgacatcaaagtgtatggtgctgttttggagaagccaggtgactcttttcccaatgctgccaagtggtacgaggttgtctcatctcagcttgctgcaagcttccccggcaatgctcaaggggtgagattcagtggcaaagcttctgctccagcggaggctgctcctgcgataccggatgcttctgctgctgaanatgatgatgac

SEQ ID NO: 46 - DNA, 386 bp, Glycine max
  modified_base (278)..(278): a, c, g, t, unknown, or other
gatagtattatcattcattctcatctttctctcttctctctccacccaaaccctaactcccgaccctgttcccctctcgtatccgtcatgaaaggaggaaagtccaagaccgaatctaagagagccgatcccaaacttgctgtgaataagaagggagccgccaccaaggctaggaaacccgccggcaaggggaaggcagcgaaagaccctaacaagccaaagaggcctccaagtgctttcttcgttttcatggaggagttcaggaaggtattcaacanagaacatcctgaaaacaaagcagtgtctgctgtgggcaaagctgctggagcaaaatggaagaccatgtctgatgctgaaaaagcaccttatgtggcaaagtctgagaa

SEQ ID NO: 47 - DNA, 316 bp, Glycine max
gattcttccgacgaagaaacacgatcgtatcgtatcaccggaaattctgactctcacagatttctgggagcgacaattgcaactccgattcgacttgaaaagagggaggaaggtgaaaaagattggcaaattataagaatactttaagatgtcagcgcttttcaatttcaattcatttcaaaccgtgatacttcgggaaatatttgcctgcacttatttcaagatgcattttccggatatccttgaccagaaaactgggtctcgtggtctcttctggagggcagcaagaatatgtgaacttaaacccatgggtatc

SEQ ID NO: 48 - DNA, 399 bp, Glycine max
gagggttttgcgctgttgttgctgctcatcctccgtaacctccgagctctgcaccgaagaacgaagccatggggaagacacatggaatgggatctgctcgcaagctcaagtcccaccgcaggaggcaaaggtgggctgacaagtcatacaagaaatcacatcttggaaatgaatggaagaaaccttttgctggttcatcccatgccaagggaattgtccttgaaaagataggtattgaggctaagcagcccaactctgccattcgtaagtgtgccagggttcaacttatcaagaatgggaagaagattgccgcttttgtccctaatgacggttgcttgaactacattgaagagaatgacgaagtcttgattgctggatttggacgaaaaggtcatgctg

SEQ ID NO: 49 - DNA, 395 bp, Glycine max
  modified_base (386)..(386): a, c, g, t, unknown, or other
gatccaaattcaagttcgcaccaaattttcctcccaaaatgtcaggccgtggaaaaggtgggaagggtttgggaaagggaggagctaagaggcacagaaaggttcttcgtgacaacattcaaggaatcacgaaacctgcgattcgtaggttagcgagaagaggtggcgtgaagaggatcagtggtttgatttacgaggaaaccagaggagttctgaagatattcttggagaacgtgattcgcgatgctgtaacctacactgagcacgctaggaggaaaactgttactgctatggatgtcgtttatgctctcaagagacagggaaggaccctctatggctttggaggctaaagaatagaatctttaggtttaatgactgtgttgcangataaaaca

SEQ ID NO: 50 - DNA, 342 bp, Glycine max
gtacggtctagaatcccgggtccaaccaagcctccaaacggcggaaaaaaccaacaaaagggaaaaccaaaccaaaaattggttcattaattgttcggggtcaactgttcctcaaaaatccgtcatcatcatcatcaatcatcaacgttgattgaagaagatgccgatcagaaacatcgccatcggaaggcctgaaaaggctactcaccccgacacgttgaaggccgggttggctgagttcatctccaccttgatcttcctgttcgcccgttcaagttccggcatcgcctacaacaagctcaccgacaacggcgccgccaatcccggcggcctcaactccgc

SEQ ID NO: 51 - DNA, 215 bp, Glycine max
attggaatgtgcacacactgcacaatatgggaaataaaaaaaacaaaaataaaaactgaagccattcaactcatgtaatagcacagttgcttccgattagatgcagttatcctggttagtggttagcattccgtaaagtaaccaaaacatgtttgggatgtgccttactaatctatatgggtgatttcagctgtctgatgtggatacttgtttac

SEQ ID NO: 52 - DNA, 325 bp, Glycine max
gattgttggcttgtgctctgctcgtgcctctagggttatcatatctccatttccatttcctctctctcagtttccaagaatcttaagctatgggaaagtcttacccaaccgtgagcgctgattaccagaaggccgttgagaaggcgaagaagaagctcagaggcttcatcgctgagaagagatgcgctcctctaatgctccgtttggcatggcactctgctggaacttacgacgtgagctcgaagaacggtggtcccttcggaaccataaagcacccctccgaactcgctcacggcgctaacaacggtctttacatcgctgttaa

SEQ ID NO: 53 - DNA, 375 bp, Glycine max
gaattttgttgccaaagttaaaatggaaatagtagtgagaaaggaccaggttgaggcagtaattgacaaaattatcgaggaggcaaggactggggagattggtgatggcaaaattttcttgatccccgtctcagatgttataagaattcgaacaggtgagcgtggggagcaggcagagaggatgactgggggccgaagtgatatgctatctgctgtatgactgattggaacgaaagatcagcatttgtaatctggttccccttacctttcccctttttcccctgtggaaaaatgaatgcattacgatgctgtatgcttcatatgtttttgcactatatgtcggaagatgtatgacagacagtattgaaagggcac

SEQ ID NO: 54 - DNA, 375 bp, Glycine max
  modified_base (276)..(276): a, c, g, t, unknown, or other
gacacaaactttattacagttgttgtattgtaattaagcaagaatattaggcaatggagtcttctagaacttcaactactcttgctctttttttaaccatcaatttgcttttctttgtcatggcaagtggctgctacacttgcacacagcctaagccaaaccctatcccattcccttaccctaaccctagtcctgccgcgaagagctgccccagggacgcacttaagctcggagtgtgcgcaaacgtgcttaatggaccaattggtgctattgtanggtcaccaccggaccacccatgttgctcagtgctagaagggcttcttgatcttgaagttgcggtttgcctctgcactgccatcaaagccaacattcttg

SEQ ID NO: 55 - DNA, 394 bp, Glycine max
ttcttttcaattataaacgatggaatcgtccatttcgatatataaaaaataatcgatttgaaaatgtcgtaaaaaatgaaatttcagaatttttttttcatacatgtcaaagtgatggaaaagaaagaatatcttttatgtatccaccaaatttatcaacttttcataaaatgatggaaaccaaattttatctcttcacaaaagataaaatttcctatgatgaattgtctaattattggagctatactaatgaagaaaaaagaaacaaattgagcaatgaatttgtaaatagggcaaaagtaatggataaggaattaatttctctggatatattagaaaaccgaattcgattgtctaatgatgaaactaaaacaaaatatttaactaaaatata

SEQ ID NO: 56 - DNA, 379 bp, Glycine max
ggtctccctcatttgttcactttctctctctaaatccctaaaccagatctcgcactcgcgctttctctctctaggattcgacaatggcggccgctccctcgcctcgcgaagagaacgtgtacatggcgaagctcgccgagcaggccgagcgctacgaagagatggtggagttcatggagaaggtctccgccgccgccgacaacgaggagctcaccgtcgaggagaggaacctcctctccgtcgcgtacaagaacgtgatcggagcgcgccgcgcctcgtggcgcatcatctcctcgatcgagcagaaggaggagagccgcggcaacgaggaccacgtctccgtcatccgcgactaccgattcaagatcgagtccgagct

SEQ ID NO: 57 - DNA, 328 bp, Glycine max
gatagtgggttaagcctcgcttctaacgtcaccgactcagttgttgtcagcgagtgagtgagtcgcttctctgcagcaacaaggtttagccactccaaacagacgagaaatgggtcgtggggtcagtgctggtggtggtcagagttccttaggttatctctttggcagtggggtgcctgccagcagtgcaaacagtcagcctgcaaatggtgctcgcgctcaaaatgctagtgctccttcaccaccagtcgataagcaaagtccagcaccagcaccagcaccagcaccagcacctgcatcatcaccaattgataagcaaattccaact

SEQ ID NO: 58 - DNA, 356 bp, Glycine max
ggagaacacaaacagcagcgtcttggtttgtgagagagacagaggcacagagagaaaatggtttcggggtcaggaatctgcgcgaagagggtagttgtggacgcgcggcaccacatgctggggaggctggcatcgatcgtggcgaaggaacttctgaatgggcagaaggtggtggtggtgcgctgcgaggagatttgcatctccggtgggctcgtcaggcagaagatgaagtacttgcgtttcctccgcaagcgcgtgaacaccaagccctctcacggccccatccatttccgtgcacccggcaagatcttctggcgcaccgttcgtgggatgatacaacacaaaacaaaccccgg

SEQ ID NO: 59 - DNA, 200 bp, Glycine max
gactcactcatacaataaagaacaacttttggctccttggtgacaatggaaataaggaatccaggtggcttctcctcctggccctcctccctggccttggcttccaagttggtgttgcaaacggaggaaaaattttttaattcaaaaggcaacggttccaagggttggggtataaaaaacaacactggtccttgggccgg

SEQ ID NO: 60 - DNA, 390 bp, Glycine max
  modified_base (200)..(200): a, c, g, t, unknown, or other
gatacctaaaaattgtaccgatatggcttcacttgtgtgtctccttttttccttgcatttcatggttatcatgtcaggttccttaccagcaaatagtgaagtgtttacaaaagagtctcctatgtctctatccacaaaacccgtggaaagactcacccaactccacttttatttccataacaacaaaatgggggaacacncgactgctatgaaaattgttgagcctcctaaggcgtccatttctggttttgggactatttacatgatggatgaccctctaaccgaaggaccaagtccaacttcaaagcttgttggaagatgtcagggaatatatgctgaggcttcgcaacatgaacctgcgatactcatggtaacgaatttgtccttcac

SEQ ID NO: 61 - DNA, 220 bp, Glycine max
gaaggatcagcagggagaattaggtttttagggtttacaccgagcagccacacctcccgcagcagccatggttctcaaaactgaactatgccgattcagtggtgccaagatctacccaggaaagggcatcagatttgttcgtggtgattctcaggttttcctgtttgcaaactcaaaatgtaagaggtatttccacaatcgcctgaagccttcaaagctc

SEQ ID NO: 62 - DNA, 391 bp, Glycine max
ggtgagtgaaagaccacaaacaacaaggttggttcaacttgtgtgaagggattggtacatggataatcttggaggttctagtcgtatgaaagcaattgaggagcttcttagagggcgtgattctgcacaacaacttaagagtgtcatcaatgggacctatgatgatggatcagacatcccatttgctcaacaacttgtgatagaggtgctcatgtccttcataaactccctcgtgttcttgcataacaaccccacttctgaatcacatcatgtcttcaatgttcaagtatgggactctcgcaagtctgatgactctcaagagagcatttgcaaaagctccaccattaacgaaccaagatggtgctacacaagaagaagaactgaacaaaca

SEQ ID NO: 63 - DNA, 380 bp, Glycine max
tataacattaagttaaatatcaaatttgtttaattatcaaattttgtaaataaattaatgtataaaaaattctaaataaattataattaaaaaaattcaaaacatacggattgccaatctgtatgttttgaaaagaaaatacgcacatcttcttctccggtgatgaaaaactatcgaacttcatcttatatccgtaaacaacgcacatacaccactggcgataacatactcacaaaaggacgctagtgaaagcaagttacgattagggagtgcagttttacgaaaaaaaggtgctgcagaaattaaaaagctaatttgctatttataactgaaaataccgaacaggacattttcgatattttgaaaaattgttgggtgta

SEQ ID NO: 64 - DNA, 386 bp, Glycine max
gaggaagggaggaggcattaggtgtagaaagagcgaaagagagagagatggcgtcggggtggggaatcacaggaaacaaaggtcgctgctacgatttctggatggatttcagcgagtgcatgtctcgctgccgagagcccaaggactgtgctcttctccgcgaagactacctcgagtgcctccaccattccaaggagtttcaacgacgaaaccgaatttacaaggaggagcagcgcaaactaagggctgcttccaggaaaggccaggaggatggggttaatgaacatcatcattagcacctgaagttaattttcaatttaagcttctgaacaattatttttgataaaacgtttgtgatttgcttggatcggtattcctgcatgttc

SEQ ID NO: 65 - DNA, 366 bp, Glycine max
  modified_base (315)..(315): a, c, g, t, unknown, or other
atctagttcatggcctattagaagtagaaggcgctctggtgggatcctcacgtacagaaaaagattgcagtcagtttgataaggatcgagtgacattgcttcttcggtccgaaccaaggaatcccttaaatatgattcaaaatggatcttattctatcgttgatcagagatttctctatgaaaaatatgaatcggagtttgaagaaggggggggagtcctcgacccacaacagatagaggaggatttttttcaatcacatcgtttgggctcctagaatatggagcccttggggctttctattttattgtattganaggcccaatgaattgggatttccctattgggccaagtcatttcgggacaag

SEQ ID NO: 66 - DNA, 169 bp, Glycine max
  modified_base (120)..(120): a, c, g, t, unknown, or other
ggttggcagtggaaaatggcgcagcttccgtgcgactccgatggcgtctgcatgctctgcaaactcaaacccagtccctcccaaaccctctcctgtggaacgtgtgccactccctggcancttccgtgtctcccttcgccccctctctccctctctgactcccattggg

SEQ ID NO: 67 - DNA, 369 bp, Glycine max
gcccccattacgcacttttcatccttcgatgatacacttagttgcttccaattaagatggttctgctagagaagctctgggatgatgttgtggctggccctcaacctgagcgtggacttggtaagctcagtaaactcaccaccctcaaaactattgatgaatgagaaagtagcaagctgcagaagacgttgtcgatgccgtcgacaccaataaccccgatgactccgacgactccaacgataccgggatcggaccgtaaagctgacaacgtttggaagagcgtcttccatcctgtgagcaactccgccacaaagaccatcggtgctcagatgtttgacaatacacttctcaacactcccactgtctatg

SEQ ID NO: 68 - DNA, 371 bp, Glycine max
ggggtaggagaatatattattggccgtttgtaggtctggcaggcttggtgattcttaccagaaagtgaattcaggtcttgatttgtagtcagaaatgcttgtacaatttgaaaaggtcaagcatgtctggtggctttaacttggtgccttcattgaatccggatctacttctgtagcatatataattatacacgttcatttgtcaagtattagactgaatcagttcatagttttcaagtgtagtcaaggatgagatctgctgcaaacttcttattgttcattactgctccttgcaagaacagatgttctttcctgtgacattcatttgctgaaactttattctgctattcttgttgccatttttttaaaag

SEQ ID NO: 69 - DNA, 355 bp, Glycine max
gggtgtggtagtgtggcagcgacacgtatcaacttcaataatcgcatcgcagaagcagtttccggtgcatctcatcgtctccgaaaatgaacgacgcagatgtctcgaagcaaatccagcagatggtgcggttcatccgccaggaagctgaggaaaaggccaacgagatctctgtctccgccgaagaggaattcaatatcgagaagctgcagttggtcgaagccgacaagaagaagatcaggcaagaatacgaacgcaaagagcgccaagttgaaattcgcaagaagattgagtactcaatgcagctgaatgcttctcggattaaagttcttcaagctcaagatgacgtgattag

SEQ ID NO: 70 - DNA, 369 bp, Glycine max
ggggtacatacattttatggcttgaaaatatcattctccattccagtccactgcgagcaacactaccaaatcgccatggcaacactcacacagcgaacagtggcatcttccattttccattcccacacactcccacgcaaaccatgcttcttcctccgctttcgctttccctccactttctgcaacttcacattttccccttccaatttcgccgtgaaatcttcttcgcgcctcgccgtcatctccgcttcatcttcctccgagcaccaccacaactcctcctcatctccagacatcgccgtccttctcgaagtcgacggggttcttatggactcgcaccgcgtcggaaatcgcctcgccttcaataaa

SEQ ID NO: 71 - DNA, 321 bp, Glycine max
gacaactcaaactgcttcattgcataattgcagataagatcaacccttctaccttcagattcgcgggaagatggcatcacttcatgctaatgtgacatcagttgtttacaacagtggcaaccgtgtttctcaatcgaaatttgcaagctcttccttcttgtctgggttcgatgttgttggtcgtgcttcaagtgcttggcataaggaacttgtcccatcttccatttccttggtgcctatagccaccctaacatttgattccccaactaccaattcagacatatacaagcattagaagcacactcttgaccctgcttctcc

SEQ ID NO: 72 - DNA, 352 bp, Glycine max
agaaggcagttcttgaggcagagaaagaggaaaagagtgtgttgccccagcagaagaaagatgaccagaaaactgtggacgctgcagtgttaaaagccattgagagtgtgccagacttgaagtcctatttgggtgccaggttttctctgaaggccggggtgaaaccacatgagctagtcttctagaggaaagaggggtgttactcttgtttttgatatcgtgtttgtttattgatgctggttcttatagttgccctcttataacattcttgttagcagacaaatgaagaacctaaaattttgttagtcaaattgtgacgcgtgctctttacattttgttgaatggtgtgaat

SEQ ID NO: 73 - DNA, 53 bp, Glycine max
gaaccaagtttgcttgcgtgtatattcattttagcatcaaggttgaatctcat

SEQ ID NO: 74 - DNA, 231 bp, Glycine max
tctttctcaaatcgccctatcttcaaaatttcaaggttatcactctaaagacagatttttttcttaaatgactgtggctatggctgtttggagtgctggtcttcacttcagtgctgctacgaagcctcatagtagcttgaggcctttggagaaaatcatttgcactgcccctttcttcaaggcctcatctgggtttgctgctactaagccattctgcatccttaacacaac

SEQ ID NO: 75 - DNA, 342 bp, Glycine max
ggttctagtgtgtgattgtttgttgttgtaactcgttcttcttcttttgttgttctgtgtttgtgtttgttttttctctcacctgaaaatgtcttgctgcggtggtaactgtggttgcggaagctcctgcaagtgcggcaacggctgcggaggctgcaagatgtacccagacttgagctacactgagtcaaccaccaccgagaccttggtcatgggagtggcacctgttaaggctcaatttgagggtgctgaaatgggtgtgcccgctgagaacgatggctgcaaatgtggaccaaactgctcctgcaacccctgcacttgcaagtgaggtgttgggagagc

SEQ ID NO: 76 - DNA, 218 bp, Glycine max
ggctactggatttcagcctcaaatattcttgatattcctcagtagaaaatcttggcttggtccctcatggacctagatagagggggtgtgttgaaggtcgcacatggcggagatataaggttgacttggtgctaaagagcgaagggagggagggataagtcttgggtttgaatcctcccactaacaaaaaccaacaaattaacaactaacatttgccg

SEQ ID NO: 77 - DNA, 336 bp, Glycine max
gagcgccaatgtttttttcagaggagtttcatcttgtaatcaaaagagtttatcttatagtaagaaatcgatgtcttactccattttaaggaacaaaacaagagaacaatagcctgacaaagggtttagccataaaatcgaatccatcattgatttgagatattgataaggtgaatactcatttctcgtcaatgctaggcataatgcgggtatagggacctaaaaaagattatcttttcttcctatcttatgaactttaaggtgtatgaagtgtcatttcctatcttagattttaattttagtacgtagataaagagtcatttaacttaagttgat

SEQ ID NO: 78 - DNA, 384 bp, Glycine max
gcagcagcatttgaactctactatcgttttctccgttctttctcaaagccgcactcaactttctaaaaccaaatcggtttgaatcctcatttcccgcctctcactggaaagcagcaaaatcacctttctctactatctatctgttccttttgtactctgagtgggtagaagtcatggtaaggctcactgctgacttgatttggaaaagccctcatttcttcaacacgattaaagagcgtgagttagatctcagaggcaacaagatagctgtaattgaaaacttgggtgctactgaggaccaatttgacacaatagacttatctgacaatgagattgttaaacttgaaaatgtaccatatcttaaccggttgggcacaatgctca

SEQ ID NO: 79 - DNA, 272 bp, Glycine max
ggtgctctgctcgtgcctctagggttatcatttctccatttccattttctctctcacttttcaagaatcgtaagctatgggaaagtcttacccaactgtgagtgctgattaccagaaggccgttgagaaggcgaagaagaagctcagaggcttcatcgctgagaagagatgcgctcctctaatgctccgtttggcatggcactctgctggaacctttgacaagggcacgaagaccggtggacccttcggaaccatcaagcaccctgccgaac

SEQ ID NO: 80 - DNA, 370 bp, Glycine max
ggaagttcgggagatggattttctttataaggtgattgatgaaacattgcgtgtgattacattctcactagtggtctttcgggaggcaaaaactgatgttaatatcaatggatacacagttccaaaaggttggaaagtgcttgtgtggttcagatcagttcaccttgatcctgaaatatttcctgatccaaaggaatttaaccctaatagatggaataaagagcacaaggctggagaattccttccctttggaggaggaagtagattgtgtcctgggaatgatcttgccaagatggaaatagcagtttttcttcaccatttccttctgaattaccgatttgaacagcataatccctatttgccctgtgag

SEQ ID NO: 81 - DNA, 257 bp, Glycine max
caagaccagaaggggaaggcaagggaaaggccccttgtggttcctcctggccttcgccggtcccccggttccccgttttggggtcaaaacggaacccaagtccggaatccaaacaattttaaccacccaaggtggaaagcctaaccctttgacaaaccccagttctgataacaaggattccaacaaaattgaggtggttacaatccagaatacaaaggacaaggaaaagggcctaaaggctttgaacgcaaaggcgc

SEQ ID NO: 82 - DNA, 300 bp, Glycine max
  modified_base (55)..(55): a, c, g, t, unknown, or other
  modified_base (112)..(112): a, c, g, t, unknown, or other
aaatgtctggtcgtggaaagggtggaaagggtttgggaaagggaagtgccaagangcacaagaaggttcttcgtgacaacatccagggcatcacgaaacctgcgattcgtangttagcgagaagaggtggcgtgaagaggatcagtggtttgatctacgaggaaaccagaggagttctgaagatattcttggagaacgtgattcgcgatgctgtgacctacactgagcacgctaggaggaagacggttactgctatggatgttgtttatgctcctaaaaagcaaggaaaggaccctctat

SEQ ID NO: 83 - DNA, 310 bp, Glycine max
ggggaagggtaaggctgcttggaaccaaaacaaaggaggcgataccagaagaagccttcttattaaaggcccttctcggaaaaaccggatttcttcccttcttcccttctctttcgtttcaatcttcgatccctgaaaatgaaagagtgcatttcaatccacatcggtcatgccggtattcaggtcgggaacgcctgctgggagtctctgtaggcaattcagtcacatttagcatgatgggtacattcttggatgttcttatgttgagggacagtaagacacgcattatgtttacaacagtgaaactggg

SEQ ID NO: 84 - DNA, 204 bp, Glycine max
gttttaccatgtgatttatcgtagaatctcagttgagcttactgatgaaatgcaaggtgtcccgcttcttgtagcattttggtattcatggtcatgttagcagaataggcataattcttgtaagcaattcagtcacatttggcattagcttttctttcttggatgttcttataagcatatctcatttaagcaagcattatgttt

SEQ ID NO: 85 - DNA, 323 bp, Glycine max
atgctgaagcctttgctgtgctgcagtatatgaaagaaaacaacattgaacctgatgtagttacttataccacactaatgaaagctttgattcgtgttgaaaagttccaaaaggttccagctgtgtatgaagaaatggtcgcatctgggtgcactcctgatcgaaaagctagagcaatgctgcggtctgctcttagatacatgaagcagacactaaaatcatagttaaattatcaagcacattctttcatgaagacagaacagaatcacatttgctcaccttacatggttataattctgaagcaagtgctttggggcagtatg

SEQ ID NO: 86 - DNA, 342 bp, Glycine max
aacttttagataagtgcttttatttaagttctccggtagctgggatgcataaattgagtttagcttacacaagaaattcatttcactttctattcttattttctactcttataagtacttacataaaagtttatcacgtcataacacatgaccaaactttacctctgttctgtttgtcaatagcatgaatgatgtcaaagtcaacgaaatcagagggcttgattggcctcgaaatagaagttatctgaatctcacgcctttttgaagctgccctcattcacgaatacgcttcatttcccttcgagaatcacacactcaacacctcccatgaatggtaaaaat

SEQ ID NO: 87 - DNA, 353 bp, Glycine max
  modified_base (62)..(62): a, c, g, t, unknown, or other
gactcacaccaaaatttgccaattgccatttcaatccccagtttcttcttcaacgtcccctnacgaagaagttccaattccccctcccaagttcaaaacctaaatccctcaatcccaagggctcaggagaggccaatggcgcggggggaaccggtcccgaaactggcaacggcgagcctcccccggaggagaaagaggagcccaaacctgaagccaaggctatgaaaaccaaggaacccaaacctaaaaaggtttccagaccacgcaaccctcccactcatccttcctacgaggagatgattaaagacgcaattacctcgctgaaggagaaaaccggttcgagccaacacgcg

SEQ ID NO: 88 - DNA, 379 bp, Glycine max
gattgttggcttgtgctctgctcgtgcctctagggttatcatatctccatttccatttcctctctctcagtttccaagaatcttaagctatgggaaagtcttacccaaccgtgagcgctgattaccagaaggccgttgagaaggcgaagaagaagctcagaggcttcatcgctgagaagagatgcgctcctctaatgctccgtttggcatggcactctgctggaacttacgacgtgagctcgaagaccggtggtcccttcggaaccataaagcacccctccgaactcgctcacggcgctaacaacggtcttgacatcgctgttatgcttttggagccactcaaagcggagttttccagtttgagctacgccgatttcta

SEQ ID NO: 89 - DNA, 382 bp, Glycine max
gacacagagcaatattcattcatttagattcatcaaaagcttataacaacaattaaacatgagtgcagccagcagagcttggattgtggcatcaagcattggagcagtggaggcattgaaggatcaattgggggtgtgcaggtggaatcatgcattgaggtcactgcagcagcatgccaagagcaacattagatcctacactcaggccaaaaccttgtcgtctgctacttctgctgctgtctccaataaggtcaagaggaccaacgaggagtccatgacgaaagtcatggacttgagctgttggggtcccaatacttcaaggttttagtgtgtggactagtccaactgcattcatcattgtgctgcaaggtttatgaagatt

SEQ ID NO: 90 - DNA, 257 bp, Glycine max
gagacctcaggtcaagccgggctacccgctgagtttaagcatagcagtataaaataaaaggtaaaaaaaatccgaaccgccactcgatacgatcatagcttacctttgctttcatgtcacatcatatctcttctaatatgtcaacttaattcacttcacttccccttactttaaaacgtcgtgaactggaataaccttaccttacccaaattaattgcctttcaacacaatttcctttacccaacttgtattataac

SEQ ID NO: 91 - DNA, 322 bp, Glycine max
gattcttctcaaagtcatataaatagactcctttgtgacacattataaataatcctcaggtttccccacgtttcctctgtcacgaggaacagcgcagaacctaaccctcacgaaaacccctttcgattccgataactctcgttgtgccgaaaccctaaccttaaccgggttttctcgttggttgggattgaattggcatcggagggaggcgatcgattggaaaattggtagtagtagtttagcgttgaagaacgatgtctgctgctgtgtgcggaagcacgagatctttcttcgaagagcttcctccttctccgccactctc

SEQ ID NO: 92 - DNA, 363 bp, Glycine max
gatctcagtctctacctcaaaccactccagaaaaaatggcagtgcctcttctctcgaagaagatcgtgaagaagaggctgaagaagttcaagaggcctcaaagtgacaggaagatttctgtgaagacaaactggcgcagaccaaagggtatcgattcccgtgttaggagaaagttcaagggatgcactttgatgccgaacattggttatgcttcagacaagaagacccgccactatctcccgaatggtttcaagaaatttgttgttcacaatgtgaaggatttggaactgctcatgatgcacaacaggacttactgtgctgagattgccacaatataccacaggaaagaaaaagatatagtcg

SEQ ID NO: 93 - DNA, 355 bp, Glycine max
  modified_base (331)..(331): a, c, g, t, unknown, or other
gccgccatttttcgtagctgctgttcttgcgcgtgaacaagcctcaggtaagccaaaaccatggttaagcataacaatgttatcccaaacggacacttccgtaagcactggcagaactatgtgaagacttggttcaatcagccagcacggaagacaaggagacgattggctcgtcagaagaaagctgtgaagatattccccagacctacggctggacctctcaggcccattgtacatggtcaaactttgaaatacaacatgaaagtgagaggtggaaggggattttctcttgaagaactcaaggcagcagggattcccaaaaagcttgcancaaccataggtattgctgttgatc

SEQ ID NO: 94 - DNA, 315 bp, Glycine max
gatagcaaaacttcagcaacccttttgcatctgatctaagaatcccaacctcaaatacccattttttgtcatttcatgatctaggttatagttcgtgaaaatgacgaggatgacccgtgattttggggatactatgcaaaaagatgcagtgccggcggtgtcggctgatataatatttgcttctcttcggtttcctaattacaaaatcggagttaacaatcagatcatggagacaaaggatagtccaaaagtgctatctatgaaggaggttgttgcgcgagagactgcacagctgttggaccagcagaaacgtct

SEQ ID NO: 95 - DNA, 339 bp, Glycine max
gacggcactcgttttcgttctcgttctggtttatagatctttgcgaaggaggtttacagcgctcaaccaaagatgcagaacgaggaaggacagatcactgagctttacattcctaggaagtgctccgccacaaacagattgattaccgctaaggaccatgcttcggttcagatcaacattgggcatgtggatgagaatggcgtctacaatggccatttctccacttttgccctctgcggattcatccgtgctcagggtgatgctgacagtgctctagaccgcttgtggcagaagaagaaagttgaagttaagcaacagtagacacccatgatagtttgt

SEQ ID NO: 96 - DNA, 57 bp, Glycine max
gtggaagttgatgaagatacagctgaagacaaaaaggatgatcaagatgataagact

SEQ ID NO: 97 - DNA, 331 bp, Glycine max
ggtgcctggccatccggtttcccagatctgctccttcctcaccccacagaagtcagttgaagagcatgggtcgtggagttagcagtggtggtggtcaaagttccttgggttatctttttggcagtggagaggcccctgccgcaaaaccggcaacaaacaatgccccagcccaacctgaagtgcaggctgtaaataatgcgcctccttcaaaagcatctcctcctactaaaacaatagaccctaacaaggctgctggtataaacagtcattctactgatggccagaacaccggcaacttcatcacggaccgaccctcaaccaaggtccatgc

SEQ ID NO: 98 - DNA, 357 bp, Glycine max
gagtgccagacgcagtgactaaaccaaacctctcactcgccgtcgtagggtttctcctttcgtttagcaacaacaacaatggttgcagccaagaaaaccaagaagacccatgagagcatcaacaacaggctcgctcttgtcatgaagagtggaaaattcaccctcggttacaagacggttctcaaatcacttaggagctccaaagggaaattgattatcattgctaacaactgcccccctttgaggaaatcagagattgaatactatgctatgttggccaaggttggagttcatcattacaatgggaacaatgtggatttgggcactgcatgtggaaaatattacagagtgtgctgc

SEQ ID NO: 99 - DNA, 292 bp, Glycine max
ggattttcatcagttgagttgagagaaggaaagggaaaatgggtaaggatctgagcgaggaacaagtgtcttccatgaaggaagccttctctctattcgacactgacggagacggtcggatcgctccgtcggagctggggatcctgatgaggtctctgggaggtaacccgacgcaggcccaactcaaagccatcgtggctgaagagaacctcacggcccccttcgacttcccccgattcctcgatctaatggccaaacacattaaacccgaacccttcgattgccaactccg

SEQ ID NO: 100 - DNA, 376 bp, Glycine max
gatgcatcccaacggctagcccattcaatttgaatcggggagacagaaagaatagggcaaattttcgattttgattttccaaccaaaaaatccagggtttaccctcacaccccactccctccaaagcgtttgcaattcatcgttctcttaaaaaagttttcaattgaaacactgattttgaattcgaggtttgagttagttctcagaaagaattgcagcaatggatctccctcgagacgttgacgactacatcaaacaaaccctcgacgatacattaggtattcccgtatcgtcgaaaaccctagaatccaaacttcgagcttcccaagactcgcaatggcgcctcccccaacgcctcctttcccttctcacccaa

SEQ ID NO: 101 - DNA, 276 bp, Glycine max
  modified_base (222)..(222): a, c, g, t, unknown, or other
gccgctctctgagaaaaacagatagtgtgggagagagaagagcggaagagaaaatgacgaccaggttcaagaagaacaggaagaagagaggtcacgtcagcgccggacacggccgtatcggaaagcaccgcaagcatcccggaggtcgcggtaacgccggtggcatgcatcaccaccgtatcctcttcgacaagtaccatcctggtttcttcgggaaggtangcatgcgctacttccacaaacttcgcaacaaattctacaatccgatcatcaaca

SEQ ID NO: 102 - DNA, 347 bp, Glycine max
gacagcactgcactcttcgcaacacaacaaaaaaagacaacccagagagcgcgtcttaataaacgctcttctctgaaaacccccatttcttttcttctttcttcttctctttcgcttcttcgatcttcgatcttcgtcgctgaaaatgagagagtgcatttcaatccacatcggccaggccgggattcaggttggaaacgcctgctgggagctttactgcctcgaacacggcattcagcctgatgggcagatgccaagtgacaagaccgttggtggaggtgatgatgctttcaacaccttcttcagtgaaactggggcatgaaagcacgtgccccgtgcgaattttg

SEQ ID NO: 103 - DNA, 151 bp, Glycine max
ggagatctcagattgcaattgcctcttctcttctcccagaatcggtgtaggttacaggtttaagggttttgttttcatttaggtcactaatccgatatcatgaagctcgatacgactagtctcgaatccttttccacactgattgcacctc

SEQ ID NO: 104 - DNA, 150 bp, Glycine max
tcagctatttaagtgagcagatactagttgttgcttgagtgtaatatgtagggtacaaaacccattgaggaaaaatataacacatcatgcaatctagtgtttaatattttatcttatgattaaaaattaatagcggttttcatttcttcc

SEQ ID NO: 105 - DNA, 347 bp, Glycine max
ggaagaagtgcccaaggaagctcgttctttcgtcgtcgtcacaagtcataactcgcaaaccacaatgcctaagcagatccacgagattaaggattttcttctgacggcgcggaggaaggatgcgaggtcggtgaaaatcaagaggagcagggatgtcgttaagtttaaggttcgatgctccaagtacttgtacacgctttgtgtcgttgaccctgagaaagccgataagttgaagcaatctcttcctcccggtttgagtgttcaagacctgtagagctgttgagtgtggcagcatgcgtttgtttctccttttgttacctgatgctctagaatttgttgcttggttt

SEQ ID NO: 106 - DNA, 54 bp, Glycine max
tacattctttccttgaaaaataaaataaaataaaatgaacttaatcattgttat

SEQ ID NO: 107 - DNA, 359 bp, Glycine max
ggcaccgcttgagcagacttaacaacagcacaaagcgggttactgtctgttcaagctaccatctctctctctctttcttagtgcctccttgccagaagttaaaatggcccaagaaactttcctattcacatctgaatcagtgaacgaggggcaccctgacaagctctgtgaccagatctccgatgctgtgctcgatgcatgcttggagcaggaccctgacagcaaggttgcctgtgaaacctgcaccaagaccaacatggtgatggttttcggagagatcacaaccaaggccaacgtggactatgagaagattgtgcgtgacacatgcaagaacattggttttgtctctgatgatgttg

SEQ ID NO: 108 - DNA, 198 bp, Glycine max
aaccccttgaaatggtcttttccgcttttattggttaagtgtatatttctaaaaagcctaaaatcaatatgtaactttgttacctctttcaaaaataaagaaatcattaatggtccaatgccttaatgttttctcacttttcaaaagaatcgaaagattgtctaatggtccaacgccttaaatgacctttcattcaat

SEQ ID NO: 109 - DNA, 322 bp, Glycine max
ggaataccaaggtagttcgttggtcactacctgctcatagcgacacacacagctgctggctacggatacataaaatcgttcccagattcaaaacctgagatgcttttcttgagctggggtcgcccctctccccaagaccaaaagacttgcatcaacaagtcaggtactttcaactatgatgacaaatataaaggagctactgctaaatcagtggcttcccttaaagcagacgagggactctccaaagatggatttttactaaacgaggcgcgagttctggttggttctggtattgagacctttgaaaagggcaagagtgctc

SEQ ID NO: 110 - DNA, 334 bp, Glycine max
ggaaacagagagtgatttcagtgagtgatcggtgttcacttgatctcatcataatcgtcagcgtcaattgaagaagatgccgatcagaaacatcgccgtcggaaggcctgaagaggcgactcaccccgacacgttgaaggcggctttggctgagttcatctcaaccttcatcttcgtgttcgccggctcaggctccggcatcgcctacaacaagctcaccgacaacggcgctgccacccctgccggcctcatctccgcctccatcgcccatgcattcgccctcttcgtcgccgtctccgtcggcgccaacatctccggcggccacgtcaacccc

SEQ ID NO: 111 - DNA, 274 bp, Glycine max
gattgttggcttgtgctctgctcgtgcctctatggttatcatatctccatttccatttcctctctctcagtttccaagaatcttatgctatgggaaagtcttacccaaccgtgagcgctgattaccagaatgccgttgagaaggcgacgaagaagctcagaagcttcatcgctgagaagagatgcactcctctaatgctccgtttggcatggcactctgctggaacttatcgacgtgagctcgaagaccggtggtcccttcggaaccataaagc

SEQ ID NO: 112 - DNA, 204 bp, Glycine max
gatgtttttttattaagaggttcttattttggtcaatctgtataggtaagtggaggcagcagagaagtattaatggtagggtaagtaatagtgttacttaatgtgacagttacaactaagtgaacagagtttaatttaagctgaagcgatcttgcttgccaaattgaacttctagtataattttaagaatttagtatgttactt

SEQ ID NO: 113 - DNA, 344 bp, Glycine max
gaattcacttgcggctgcagcagagaagcactcatcattcttcgtttgtctaagatccgccttctctgaattgtaaaaatgtcgctcggagaaactgcttgttcatacgcagctctcatccttcatgaagatggaatcagtgtaactgccgacaagatcagcaccttgttggaaactgcaaaggttcaagtagatacctattggccaaccttatttgctaaacttgctgagaagaaaaatcttggcgatttgatagccaatgcagcaggcggtggtgcaccagttgctgttgcagctgcccctgttgctgcctcaggtggtggtggtgctgctgctgcggcccc

SEQ ID NO: 114 - DNA, 251 bp, Glycine max
cgtcagtcggtggcaagacgacaacagggcggcatgtctgtttatggacaaaatctctatatggtctcatacaagcacctcgccgctctctatgattcatgcttgagtcaggctttctccgacggtctttctctgctattgtgtcttccaagttctattcaattgccgtcctttttcacagtcttgactgggaaacccctggcgtttcccaacttattcgccttgcaccgcatccccctttgatcagctgg

SEQ ID NO: 115 - DNA, 390 bp, Glycine max
ggttctgcttcttcttttcccttccacacaaatacatcacatcattgccattgctctctctctctctctctctctcgtgcggacacaatttttgatggggatatacctcagcactcccaaaacagagaaggcctctgaagatggtgagaacgacaagcttcgcttcggtttgtcttccatgcagggctggcgtgcttccatggaagatgctcatgcagctcatccatatttggacgagtctacgtcatactttggtgtttatgacggccatggaggcaaagcagtttcaaaattctgtgccaagtatctacaccagcaagtgcttaagagtgaagcttacttagctggagaattaggcacatctttacagaaatcttttctcagaatgga

SEQ ID NO: 116 - DNA, 339 bp, Glycine max
gatccaaatccaccccaacacaaatcttagccgccattgatttttcctcttccatttctcttactttctcagcctttttcgattacccatttggttatttcgccctaatggctcttgctccatccaaagtttccaccttttctggtttttctcccaaacccagtgttgggggtgctcagaaaaacccaacttgctctgtttctctgagctttttgaatgagaaacttggaagcagaaaccttagggtttgtgcctcaacggtgcctctcactggggtgatttttgaaccgtttgaggaggttaagaagagcgagcttgctgttccaactgctccccaag

SEQ ID NO: 117 - DNA, 341 bp, Glycine max
tagggaacacttggagaaaaggactaggagcagagaatgaagacataggaggttgtgaattgtcattgtcaatcacattgccacaaccccatccttcctcacagaaaagtaatacttcttcagtcagtgagaccagtgaggcattttcattgtgccctgagtttagcaacaacgttatcatgggctgttctagttcttccaatgtcccaaaaacaattaatttggacctttctttggccatttgaatgttagtattaaggactaatttactcgatctaattactctattcattttagaggaatcaaatcagatattaacatgtcaagaaatgtgctatcta

SEQ ID NO: 118 - DNA, 317 bp, Glycine max
cagggagtgagagagagagaaggcaagatgtcgaagagaggacgcggtggttcggcggggaacaagttccggatgtcgctgggtctgccggtggcggcgacggtgaactgcgccgacaatacgggggcgaagaacctctacatcatatcggtgaaagggatcaaagggcgtttgaaccgtctcccctcggcttgcgttggcgacatggtgatggccaccgtgaagaaggggaaacccgatctgaggaagaaggttttgccagctgtcattgttcgccagcgcaagccatggcgccgaaaggacggcgtctacatgta

SEQ ID NO: 119 - DNA, 340 bp, Glycine max
gattgttggcttgtgctctgctcgtgcctctagggttatcatatctccatttccatttcctctctctcagtttccaagaatcttaagctatgggaaagtcttacccaaccgtgagtgctgattaccagaaggccgttgagaaggcgaagaagaagctcagaggcttcatcgctgagaagagatgcgctcctctaatgctccgtttggcatggcactctgctggaacttacgacgtgagctcgaagaccggtggtcccttcggaaccataaagcacccctccgaactcgctcacggcgctaacaacggtcttgacatcgctgttaggcttttggagccact

SEQ ID NO: 120 - DNA, 348 bp, Glycine max
gatttaaatattccaggttcgtccttgactctacaacattccattttcataggaaaagccaaaactgaagctcgaggaagataactacgatgaaacaagaggaatggatgattacgacagcgttgctatcgttgctgtttgtttcatcttttccgccgttgagttacggagttgttcctcctcgtactctgctcaataagctgtcggagggcaaatatctcaacactcaggagctctggttcgaccaaaccctcgatcacttctctccctatgatcaccgacaattccggcaacgttactatgagtttctagactatttccggattcccgatggaacaatttttttgg

SEQ ID NO: 121 - DNA, 352 bp, Glycine max
gacagcaaaacaattttcaaactcaattaccattccataacctaaatctcctctttgtttccgagtcagagagcaatggcacgtaccaagcaaaccgctcgcaagtccaccggcggaaaggcgccgaggaagcaattggcgactaaagccgctcgcaagtcagctccggccaccggcggagtgaagaagccccaccgcttcaggcccggaacggtggctctgagggagatcagaaagtaccagaagagcactgaacttctgatccgaaaactcccattccagaggctcgtcagagaaatcgctcaggatttcaaaacagatcttcgtttccagagcagcgctgtttctgcgc

SEQ ID NO: 122 - DNA, 338 bp, Glycine max
ggtgcgtaattgcatttggtagttttgtttgactctctttgttgttggcaccttccaattcttctaatcttctgcgtttatctctcttttcttcttcatttccgcagcatagagagagatagaaagcgaaagaaacctaacacaatggcgtcttcgatcgcagctggtgctggatccaccgatcccacagctgccagaagaaacactaagcgacccaagtattcaaagtttactcagcaagaacttccagcgtgtaagccaattctcacgccacgagcggttatttcggcattcttgcttgtcagcattgtattcgttcctattggagttgcttcact

SEQ ID NO: 123 - DNA, 361 bp, Glycine max
ggggcgaggtagccagagagtgatacaatacagagtgcgttgttgctccttcgccacaactccctgccaacatgggtatctccagagattctatgcacaagaagcgtgccactggtggcaagaagaaggcatggaggaagaagagaaagtatgagcttggtcgccagcctgctaacactaagctgtcaagcaacaagacagtcaggaggatccgggttagaggtggaaatgtgaagtggagggcactgagattggatactggaaattactcctggggaagtgaagctgtaactcgcaagactcgtatactagatgtggtttacaatgcctcaaacaacgagcttgtgcgtactcagactct

SEQ ID NO: 124 - DNA, 354 bp, Glycine max
ggttccaatttgcgtgagaacgaaaaaagaaaaaaaaaaccctaacgcactcgagaccctgagatttttcatcttcgtttctcattctctttttgatcatggacgtcggggtgcggcagatcttcaacaagttcgacaagaacggcgacggaaaaatctcggtaacggagctgaaggacatgctcgcggccctcggatccaaaacgacggacgaggagttgaaacgcatgatggaggagctcgaccagaacggcgacggtttcatcgacctcaaggagttcgcggattttcactgcaatggcggtgccggaaaagacgactccaacgagctccgcgacgcgttcgatctctacg

SEQ ID NO: 125 - DNA, 324 bp, Glycine max
gaacactgatataaagtgaaaatcattgtctcatcacagtagtactcacactatacggtggcggaaccagagaaaaccaaccagaccgattactcttgaggaaacaaaaatctaagatgagccgccatccttctgtcaaatgggctcagacgtctgatgtactctacttaacagttgagctgcctgatgctcaggatgttaagctcaaactggagccagaaggaaaattttacttctctgcaactgctggtgcagagaaaattccttatgaggttgacattgatctgtttgacaagattgatgtaaataatagcaaagctagtg

SEQ ID NO: 126 - DNA, 358 bp, Glycine max
gacgacaatgacgaccaagaaaatgatgctcctgaccggggttaccaccaacaacaaccaaaattattaagaaaaaaggtatgttcaaccttgttgttagccttaccaattacataacgactcaaacgacgactcagacgacgacgaagatgaagacgacgaggacgaggaggagcaaggggaagaggaggatttgggaacagagtaccttatccgccctttagaaactgctgaggaggaggaagcatcaagtgattttgaaccagaggagaatggtgaggaggaggaagaagatgttgacgacgaggactgtgagaaggctgaggctccaccgaaaaggacagaggtcagataaaga

SEQ ID NO: 127 - DNA, 334 bp, Glycine max
gacatcacgacatcacatcgcagagaagaacagagagagatccatccatcaattccaatggccgatcagctcaccgacgaacagatctccgagttcaaggaagccttcagcctcttcgacaaggacggggatggttgtattaccaccaaggaacttgggaccgtgatgcggtcacttggccagaacccaactgaggcagagctgcaggacatgataaatgaggttgatgctgatgggaatggtaccattgatttcccagaattcctgaatctcatggctcgcaagatgaaagacactgattcagaggaggagctgaaggaggctttccgcgtgt

SEQ ID NO: 128 - DNA, 237 bp, Glycine max
gaaaattctgagaatgaatcagaacgtgaggatggcaacacgagcagtgaatcatcagatgagaatatagaacatggtttttctgaagatgatgctgatccattatatgatgaggattttgatgaatatgaaggtgctcatagtgatgatgttgagcatatggatgatgaaaattgggggtggtcgtaccgatgaagttggctttagttttacttttgcaaaatgtaaacctgatgg

SEQ ID NO: 129 - DNA, 173 bp, Glycine max
ttcccgcctcgacacacgcgtacgcccacgcgtccgccgactccaaacgaccgacagggagtgacatcagagaaagtgagaacagggtctaacaactggtgatgtcattgatggctacagaggacgatagtgcggtgaacgagcctttggatctcattacgctcagcctcgac

SEQ ID NO: 130 - DNA, 341 bp, Glycine max
ggcgttccgtcaccttctgtcagcgcgactctctttccttccctctttttccgaatctgaatcgaaaatggcttcggagactgatacgtttgcatttcaggccgaaattaaccagctcctcagtctaaccatcaacaccttctacagcaacaaggagatctttcttcgtgagctcatcagcaatgcctctgatgctttggacaagattcgatttgagagtcttacatacaagagcaagcttgatgctcagccagagttgttcattcacattattcctgacatgaccaacaacacattgtctatcattgacagtggtattggcatgactaaggccgatttgg

SEQ ID NO: 131 - DNA, 311 bp, Glycine max
agaaagctgcgaaagagcagaagaaggctgaggcgcgcaagtgagtttcctggaaaatgtcatgccaccaaaaatttgctccaattagtaaggtggaacggttgctcctactacacttaaaacattatgtccatttggctttatattatggtattaccacaccaagctggtaacatgtaatgcaattatattttcatattctgtggtttaaaatcgtgattatatataaacgtttttaaaaaaaaaaaaaaaaaaaaaaaaaaaaaaaaaaaaacaaaaaaaaaaaaacaaaacaaaacaaaacaagaaaa

SEQ ID NO: 132 - DNA, 397 bp, Glycine max
gcaccgcttgagcagacttaacaacagcacaaagcgggttactgtctgttcaagctaccatctctctctctctttcttagtgccttcttgccagaagttaaaatggcccaagaaactttcctattcacatctgaatcagtgaacgaggggcaccctgacaagctctgtgaccagatctccgatgctgtgctcgatgcatgcttggagcatgaccctgacagcaaggttgcctgtgaaacctgcaccaagaccaacatggtgatggttttcggagagatcacaaccaaggccaacgtggactatgagaagattgtgcgtgacacatgcacgaacattggttttgtctctgatgatgttggtcttgatgctgacaactgcaaaggtctcgttaacattg

SEQ ID NO: 133 - DNA, 333 bp, Glycine max
gactccgcagctgcagcactcaaaaccctagagaggacgagagagcgtgcaactttcggcaaccacagaccatgacattcaaacgcaggaatggaggtcgcaacaaacacggccgctgccatgtcaaattcatccgatgctccaactgcggaaaatgctgccccaaggacaaggccatcaagaggtttttggttaggaacattgttgaacaggctgcagtcagagatgtgcaggaagcttgtgtctatgaacaatatacacttccaaaactctatgtgaagatgcagtactgtgtatcctgtgctatccactctcatgttgtgagggttcgat

SEQ ID NO: 134 - DNA, 360 bp, Glycine max
ggacgagagagagagagagagagatggacgagaagacggagaaggtgaagtctgatgcagttcagataattgaagcgtttgaggttctgccaaagctcgtggttttcgatctcgattacactctctggcctttctactgtgagtgtcgatcgaagcgcgagattccttctctgtatccccacgccaaatgcataatgttagctctcaaagagaaaggcatcgacatttccatcgcttctcgctcgccaacggcagacatcgcaaccgctttcctcaacaaattgaacctcagcccaatgttcgtctcacaggaaatatattccagttggacatataacaccgatcattttcagaggattc

SEQ ID NO: 135 - DNA, 283 bp, Glycine max
gagaaaagaaagaggaaaccctatctggataggtcaaacatcatcatgtcggacgaagagcaccatttcgagtccaaagcagacaccggtgcctccaaaacctaccctcagcaagccggtaccattcgcaagaacggctacatcgtcatcaaaggacgcccctgcaaggttgtggaagtttcgacttccaaaactggaaagcactgtcacgccaagtggcacattgttggaattgacattttcactgccaagaaacttgtggatattgtgccctcttctcaca

SEQ ID NO: 136 - DNA, 126 bp, Glycine max
ttctttcaattcaattgggtatatgagtttcagtttgtgtaaagcatttttaacaatgttcttaatgaattcggcctcgctcctagtataaaaatggtaagaacattaaaggaaagaatgtatcac

SEQ ID NO: 137 - DNA, 340 bp, Glycine max
gtcatttcaccgatttttattccgtgtttcaaaagagggactcctattttgtttcagacaaagttttgttgcaaagcaaaaaactacgaggagctttcctccatacgaatccaaggaggagagaggagacacagacacaaaggaaacggaaaaagcaacacacacaaaaaaggtctgtgcctcctcttatatgtaatagatagtttctgaaacataagaaaacaataaaatagaaataaaaggaccacatggattatgaaaacaacagttggatttgggagggggtaaactactacccgcgtgtgtttggtggtctaatggttacagcagccttgctggg

SEQ ID NO: 138 - DNA, 335 bp, Glycine max
gcgcattgaacgaaaattagggtttgtactgtagcaggaacgagcagcaatggcgccgaaggtaacacgcaaggttagcagaaaccccgaattgataaggggaattggaaagtactcgaggtcgcagatgtaccacaagaggggcatttgggctatcaaggccaaaaatggtggcgttttacctcgccacgatcctaaacccaaacctgaaacacccgctgaaaaaccacccaaattttaccctgctgatgatatcaagaagccccttgtcaacaagcacaaagccaaacacgctaagctcatggctaacattactccgggaacagtgttgattc

SEQ ID NO: 139 - DNA, 273 bp, Glycine max
gacaccatccacgactcttctgagttccagcacagcaggctcttcatttctcggacactttcgtttcattcaccgttaatgtcaccagatttcacacattgggacttcccggaactcatacattccactaggatcactttccgagccattctccgcgtcatgctcatcatcctcatgttcaacctgctcttcactcatggcgggcttccatgggcctgggcacgggccatacacatcatacctggcccagtatctgaccagttccggatcatt

SEQ ID NO: 140 - DNA, 333 bp, Glycine max
gctctctctttgccggtgccacaatccctctctctccgacgtacatttccatctttttagggtttcatttcatggactccgattcctggatttccacgcgcctctcttcctcttcacgccgccaccattatcgatctgatctgtacgcggaggagagtgaagggaacgatgatttcagggcggagtttctatgccctttctgcgccgaggattacgacgtcgtttccctctgttgccacattgacgaccaccaccctatccaagccaaaaacggggtgtgtcccatttgtgggaagaaggtgggagtggatctcgttggacattttactacac

SEQ ID NO: 141 - DNA, 157 bp, Glycine max
gagcaacatggtgaagctggtggagagatttacttgccagaagcttacgttagaaccaagaggactacttaatggagcatatcagttggaaaaacttgtagctagcttcccaactggcttatctgagtgtggagaagcatttacaagccttaagagt

SEQ ID NO: 142 - DNA, 279 bp, Glycine max
gagcaacatggtgaagctggtggagagatttacttgccagaagcttacgttagaaccaagaggactacttaatggagcaaatcagttggaagaacttgtagctagcttcccaactggcttatctgagtgtggagaagcattatcaagccttaggagtaggagaacgagtactgtttgtgatgaatgtctatggtttaagaaatctgtctttagtcaacttgtgtgttttgttattcagttctcagcaataaactgctctggcaatctagtttcatgttc

SEQ ID NO: 143 - DNA, 295 bp, Glycine max
cggcaaaccttacatttatcataccttgaacaatatacaaatcagaagattatttattattgcacttctttaaacttttattcttaattttctaaagaaacgcctttttataaataaaaaaatcaattattgaaatttctaaagtgttttaggtaatcttttttcaagggtaaaaaaataatcagatttatgctttttagtagcaaatatgacctgctgttctggaaattcagtttttgtagaagaaagatatcaattttcttctttttactatcctccattttgtttaacattt

SEQ ID NO: 144 - DNA, 287 bp, Glycine max
gagtttcagccgcagcttgccccacagcattgcgaccattatcagctatggctgtctgtaagattagacgatctccaaaggaaacatgggtggcactatgacatccgctgatccctttgccaagagagactggtacgatatcaaggctccatcgctcttcgacgtcaagaatattggcaaaaccctcgtctctcgtacacagtgaaccataattgcatcagaacgactcaaacatccagtttttgaggtcacattggctgatctccaaggggatgaagaccactcct

SEQ ID NO: 145 - DNA, 297 bp, Glycine max
gaacagagcaggcgaagggccgaccctctactactactcacacggccttccttcgcgtatattcagactcaccagatcgtacacccgcagatgcacgacgcataagcgcacgcgactgcgacagatggagcgttgctaagaatgagatgaactatttacacaccatcatacacatgttgagaaagcttccgttcccgcgcagcggtcgctccaaaggatctcaccctaagtccgcgtgcatgctacgtcgcatcgctcctcgcgtgtgacatacactcaaggcaatggccgtcgttt

SEQ ID NO: 146 - DNA, 336 bp, Glycine max
ggtaactcgcatcggattgccccattttgccacctctatctgtctgcaaccggtgacgttgttagagagagaaagaaaaaaaatggtgaaaggaagaagcgaaatggatggcgtagaagtacctgaagccatgatagatactctcaaccgtactttggagagccttcaacaactcgagacacagttaccccaatttctctctctccgaccctgattttctcgctgaattaccactcgttgaacgcgctcactcactcttctccctcgccaaactcacctctaccctcttctcattgaagttgaggtgtagaggtgttaacccaaatggccaccctg

SEQ ID NO: 147 - DNA, 349 bp, Glycine max
gtacaccgactcaaccggagcatacacaatgtacgtggatgaggatcacgcagatcagatctgcagtgccaagctcgtaagcagccctcaccctcaatgcaaggaagtcaccccaggccgcgacgaagccgtcgtgattctcacccgctacaacggcattgcctccgacgataggttcgccaatgccatgggcttcatgtctcaggaggttgcttctggctgtgctgagatcctcaggcaataccaggagttcgacaatgagaattaattacgtaattaatttcagtatattattaatctacttcctaatgtctcctgatgtggagtgttatctcgacattttcatatt

SEQ ID NO: 148 - DNA, 218 bp, Glycine max
ggaatagcatcggcagcaccacaacactgtgccctctttctctctttccttcgcagaagccatggcctcatttgcacgtggagccgcatctttaacccgcattggtcgttccacctccaagactccccttcaactcatccaacgccgtgggctcgccgatcagcatggcacggcccaagttgcctgccgggaagatcaagttcgcccatcccaatgga

SEQ ID NO: 149 - DNA, 284 bp, Glycine max
ggcagtttcaggttttcttttccttcactttcacgagaaatgaaataccacttttcagtttcttcactacgttctcacttcgatatggctcgtacgaagcaaaccgctcgcaagtccaccggtggcaaggcgccacgtaagcagctcgccaccaaggccgctcggaagtctgctccggcgaccggaggagtgaagaagccccaccgcttcaagccgggaaacgtggcgctgatggaaatcagaatgtactagacgagcaccgagcttctcatcaggaagcttcc

SEQ ID NO: 150 - DNA, 347 bp, Glycine max
gacagcactgcactcttcgcaacacaacaaaaaaagacaacccagagagcgcgtcttaataaacgctcttctctgaaaacccccatttcttttcttctttcttcttctctttcgcttcttcgatcttcgatcttcgtcgctgaaaatgagagagtgcatttcaatccacatcggccaggccgggattcaggttggaaacgcctgctgggagctttactgcctcgaacacggcattcagcctgatgggcagatgccaagtgacaagaccgttggtggaggtgatgatgctttcaacaccttcttcagtgaaactggggcaagaaagcccgtgccccgtgcgatttttg

SEQ ID NO: 151 - DNA, 378 bp, Glycine max
gatcgctctcacacctgtgattattcctcttttaacaatccacacccaaattctagggttccgaaatggacgctggcggaaagatcaagaagggcgccggaggtagaaagggcggcggcccaaagaagaagccggtttcaaggtccgtcaaagccggtctccaattccccgtcggaagaattggccgttatttgaagaaaggaaggtacgctcagcgtgtcggtaccggtgctcccgtatacttggctgcagttctcgaatacctagctgccgaggtgcttgagttggctgggaatgccgcacgttacaacaagaagaacacgattattccaagacacgtgcttttggcagttaagaaacattgagaattggggaaaa

SEQ ID NO: 152 - DNA, 338 bp, Glycine max
tgtgtgtttgtctattgattacattcatagttagaagtatcttttctacatacacatggcacctacacctcgcacacacattgagatattaggccctatgtccgggtctatgtgagccataaggagtggaggttgatctgtggtcatgctgggtcttcgactcgcttgatgatagtgaagcctcatctagagttttcttcttttggtgatgcattgtacttgatagtccctatccccacaatgtattacctaagaggatgatatctctagaagccagtaaagttacatgaaaccacccttgggaattattgcttgaagtggacttttggattctttcc

SEQ ID NO: 153 - DNA, 354 bp, Glycine max
gaaccatttctttctttcggatttctgtttctctgtcttcattttagtttttacggctagaagaatgtccagctcatcggaatatttggtattttccggccaccacccggcgaactctccggcggaaaagtccactttctctcagacttgtagtctattgagccaatacatcaaggaaaagggtaccttcggagaccttaccctcgggatgacttgcactgccgaaacaaacggttcccctgagacatcgtgtcactctgcaacaaccatggagttgtttcccacgatcatcacgcatcggaacccaactactgtggatttcctatctccccagactgcttatcctcaccactc

SEQ ID NO: 154 - DNA, 52 bp, Glycine max
gaagtccgtcctttcttttgttaaacaggctggctgtgacttcggctcccac

SEQ ID NO: 155 - DNA, 322 bp, Glycine max
gacaacttcaatccctcttttgctttaccaaattccattttccaattcaaaaccctaactccgttcgaagcaccaaatcgtgatggcaccaaaggcagagaagaagccagcagagaagaagcctgtggaggagaagaaatcgacggtgggagacaaggctccggcggagaagaagccaaaggccggaaagaagcttccgaaggagggaggcgccggcggagaaggtaagaagaagaagagaaacaagaagagcgtggagacatacaagatctacatcttcaaggttctgaagcaggttcaccctgacattggtatctcaagc

SEQ ID NO: 156 - DNA, 250 bp, Glycine max
gaagatttgtgagagaaagggagaaagggtgtgagaatggagagcaaagaggaagatgtaagggttggagcaactaagttctcagaaaggcaaccaattggtacagcagctcagggtgacaaggactacaaagaaccacccccagcacctttgtttgagcctggtgagctaaagtcatggtccttctacagagctggaattgctgagtttgtggccactttcctgttcctctacattaccatcttaactg

SEQ ID NO: 157 - DNA, 337 bp, Glycine max
gactccatcctccgcttcgtgacttgcagcaattcccaatggcttccgtttccaagctctcaacgccaaatccacttgcttccttatcagaagcgcttcgcccccgagattctcgcttcctcaccttcaaaccttcttccatcgcttttaatcacaaaactaacctatccgcttccctccgatccattcactcgctccctcttaaaacctccttacggatcaaatgctcccaaacagatgggaatggaagtcctgcaaagaggacagtgcttcatgatctttatgagaaagaagggcagagtccatggtatgataatctctgcagacctgttacaga

SEQ ID NO: 158 - DNA, 383 bp, Glycine max
  modified_base (371)..(371): a, c, g, t, unknown, or other
ggtgaacaagcctcaggtaagccaaagccatggttaagcataacaatgttatccccaacggacacttccgtaagcactggcagaactatgtgaagacctggttcaatcagccagcacggaagacaagaagacggttggctcgtcagaagaaagctgtgaagattttccccagacctacagctggacctcttagacccattgtacatggtcaaactttgaaatacaacatgaaagtgagagctggaaggggattttcccttgaagaactcaaggcagcagggattcccaaaaagcttgcaccaacaattggtattgctgttgatcatcgccgcaagaaccgttctttggaaagtctgcaggctaatgtgcanaggctgaaaaca

SEQ ID NO: 159 - DNA, 305 bp, Glycine max
  modified_base (253)..(253): a, c, g, t, unknown, or other
gacttctcttcacacctttgttcactcttcttctcttgcggctagggttttagcgcagcttcttctagatttaaggaagatgggtaaggaaaaggttcacatcagtattgtggtcattggccatgtcgactctgggaaatccactaccactggtcacctgatttacaagcttggaggcattgacaagcgtgttattgagaggtttgagaaggaagctgctgagatgaacaagaggtctttcaagtatgcctgngtgctggacaaacttaaggctgagcctgaaagaggaatcaccattgatattg

SEQ ID NO: 160 - DNA, 366 bp, Glycine max
gtcttagatttggcttgtgaacatggaatctttgtgaaacatgagggaagctactttattgaaggtaacagttttgatagtagagaagcagctgaactgtttttggctcaaaatcatgctgtttgtgacaaggtggttaaggatatgagaagactttatttttaaaatcaggtggaccttacatcttcctataaacttgctcagcatggtttcactaggccaaatctctttcaatggtatatatggcaaactttatgtaattgagcattgccaacattttttatcatcaaggcattaatattgtcttctatgggtaccaagtatcaaccattctttagatgagcttgtggcatttgaagttacaag

SEQ ID NO: 161 - DNA, 300 bp, Glycine max
gattgtgcgacacgtttttacaagtgattggtatccatacacatcatcaccactacagattactccatatttccttccacaaccctgtaatcacctgcctcattgtcacaccaccacctacaagaagactgttggctcgtcaaaaaaacagtggtcacaatatgctccaaacctacatactgcgtgtcttaaactcattgtacatcgacaatcgttgctatattccattcacgtgacatctggtaagagattttcgactgagaaactcctggcatcacggaatctcaacaagcttgcacc

SEQ ID NO: 162 - DNA, 347 bp, Glycine max
gaatcgcaagtcgtctgtcccgcaggtgcagacgacctgtcttcatagccaaacaacctcaaaaacattcaacaacgttcactattaattcatcataaaataaaaacaagtttcgattttttatctttgttttgtttctgatccattcatggaggtgccgagttcctgggatgctcttcgcaaacaggcgagaaaacttgaagctcagttggatgagcagatgaattcttatcgtaaattggtttctgctaatgtttctacaaaagctgacattgcagagagtgatctagggtcttggattgagcgtttactaaagcaactccaacaagtaaacacacagatgcaag

SEQ ID NO: 163 - DNA, 262 bp, Glycine max
gacttctcttcacacctttgttcactcttcttctcttgcggctagggttttagcgcagcttcttctagatttaaggaagatgggtaaggaaaaggttcacatcagtattgtggtcattggccatgtcgactctgggaaatccactaccactggtcacctgatttacaagcttggaggcattgacaagcgtgttattgagaggtttgagaaggaagctgctgagatgaacaagaggtctttcaagtatgcctgggtgctggac

SEQ ID NO: 164 - DNA, 372 bp, Glycine max
gacccacagggaggcgaacagagaaactcagagacccgaaggcagatttcaagatgaagttcaacattgcgaatcccaccaccggttgtcagaagaagctggagatcgatgatgacctgaagctgcgagcattttgggacaagaggatctcacaagaggttgttggtgatgctctgggtgaggaattcaaaggttatgtcttcaaaattactggaggttgcgacaagcagggatttccaatgaagcaaggagtgttgacccctggtcgtgttcgcctcttgctgcatagaggaactccttgtttccgtggttacggaaggcgcaatggagagcgtaggaggaagtctgttcgtgggtgcattgtcaaccctg

SEQ ID NO: 165 - DNA, 338 bp, Glycine max
gaaccattcaaacgcacactctctctcaccaaagccttcctagaacgaaaaaaaaaagaagagcaattttccctcaccaaagaagaagaagcaaacaatggccgatcaacttaccgatgaacagatctccgagttcaaggaagccttcagcttgttcgacaaggacggcgatggttgcatcacaaccaaggagcttggaactgttatgcgttcattggggcaaaacccaactgaggcagagctccaggacatgatcaatgaagtggatgctgatgggaatggtaccattgacttccctgagttcctaaatctcatggccaagaagatgaaggacactg

SEQ ID NO: 166 - DNA, 367 bp, Glycine max
ggctcttggctgatatttcctgataagtggacagacgcttaaacagagaaactaacacagatttgcatgcatggggaaaataacgcacattgtagtaattcccagtgcagggtacagccacttcgttcccgttatccacttctcaaagagacttgttgagcttcacccagaaattcacgtcacatgcatcattcccattctggggtctctcccaagtgctgcaaaacccattctccaaacccttccacagaacatcaacacggttttccttccaccggtgaaccctaatgacctaccacaaggtgttcccgtagttgtccaaattcagctagcaatggctcactccatgccctcaattcaacaaaac

SEQ ID NO: 167 - DNA, 375 bp, Glycine max
ggtccaaaatcctcactccagccacacgcctcagtagaccatggcctcattgggtgggttacaaaatctaagcggcatcaattttcttatcaaaaaagagggtccaaaagtcaatgcgaagttcgagctgaagccgccaccatatccactgaatggtttggagccggtgatgagccagcagacacttgagtttcattgggggaaacaccacaagacatatgtggaaaatctgaaaaaacaaattgttgggacagagcttgatgggaaatcactagaagagattatagtgacatcatataataagggtgacattcttccagctttcaacaatgcagcacaggtatggaaccatgacttcttctgggagtgcatgaa

SEQ ID NO: 168 - DNA, 260 bp, Glycine max
  modified_base (208)..(208): a, c, g, t, unknown, or other
gaaggcggtgttactccttctctcgttgattcggatctagagtcttttttcactcttcagttctcgttgttgttcttcgctttcctgaaactagggttttcaatttcgattcattcgttaataattaaagatgtttgggagggcaccgaagaagagcgataatacgaggtactacgagatcctcggcgtctcgaagaacgcttcgcangatgatctgaagaaggcttacaagaaagccgccatcaagaatcaccctgaca

SEQ ID NO: 169 - DNA, 246 bp, Glycine max
gacttcccagttgctacctcaacgtccccaacactgtgttcctgttcttcttcttcgatggcggcaacctcaacatcactggcttctcaactctacattggcctgcgccgcccatgcctcaagcttgattctttcaattctcaatctttctctgtcttcgaccccaatcttcgcctatccctctctcctcccagaccctcacgcgccatcgtcgccatggcaggcaccggcaagttctttgttggc

SEQ ID NO: 170 - DNA, 366 bp, Glycine max
aagcctgccgagaaaaccctagttcgcttgcagtcacacaagaggccaatcctattcatagctcgagatgggtgaagaagtgaaggtagttgttccagaatcagtgttgaagaagcgcaagagggaggaggaatgggcgttggccaagaagcaagaactcgatgctgccaagaagaagagagccgagagccgcaaactcatctacaacagagctaagcagtacgctaaggagtacgatcaccaggagaaggaattgattcggttgaaacgcgaggccaagctgaaaggtggtttctatgtggatccagaggctaagctgttgtttaatattcgcattcgtggtattaatgccatgggacccaaatc

SEQ ID NO: 171 - DNA, 404 bp, Glycine max
ggacatcacatttcgttgcgcctttgatctctgtccccgctgcgtctctcgtaatcatgcctaagcaaatccacgagattaaggatttccttctcactgccagaaggaaggatgcgaggtcagtgaagatcaagaggagcagagatgtggttaagttcaaggtcagatgctccaagtacctctacacactttgtgtgtttgacccagagaaagctgataaattgaagcaatctcttcctccaggtttgagtgttcaagacctgtaaaggtactgggcgagagatcaagaagaagcaattcattgattcttctgaagtttgattctctgtagttgaagcttgagatttttgtcagttggtcttttattatagattattgctaagacatggttgtttttatctgtt

SEQ ID NO: 172 - DNA, 81 bp, Glycine max
ggatagttcctggatggaggcttggttggtttgttacaaatgatccatctggcacttttagaaatccaaaggtagatgagt

SEQ ID NO: 173 - DNA, 363 bp, Glycine max
gttcccaacaaaacactcactatcataagggaaaattgcctaaaattattacacacaaatggaagtagggtgacctattggaggctcccaacttacttccaatgaaaggcctttttgttacaaaatttgaaagcaaaacaaattgccaattacaaaattacaaaaacaaaaagtcctcaattgtggtggctattctctctttattgtttcactcaatttggagtgcttcttagtccaatagctcttatggtggttggccccttgcttcttgactcaaattcttcaagatatggcaccaatcctcctttccaattccctatatggcaactcacaagcaaggaaacaaagagacaagcaataatc

SEQ ID NO: 174 - DNA, 331 bp, Glycine max
gagaatagagagctcctccaattagggtttttgtgatctgcagctacgatgggtaagggaacggggagtttcggtaagaggaggaacaagacccacaccctctgtgtgaggtgtggccgccgcagcttccacctccagaagagtcgttgctctgcgtgcgcttaccccgctgcgcgcaccaggaaatataactggagcgtgaaggccattacgagaaagaccaccggaactggaaggatgaggtacttgcgtaacgtgcctcgcagattcaagagcggcttcagagagggtaccgaagctgcacccatgaagagaggagctgctgcctctg

SEQ ID NO: 175 - DNA, 345 bp, Glycine max
ggttctagtgtgtgattgtttgttgttgtaactcgttcttcttcttttgttgttctgtgtttgtgtatgttttttctctcacctgaaaatgtcttgctgcggtggtaactgtggttgcggaagctcctgcaagtgcggcaacggctgcggaggctgcaagatgtacccagacttgagctacactgagtcaaccaccaccgagaccttggtcatgggagtggcacctgttaaggctcaatttgagggtgctgaaatgggtgtgcccgctgagaacgatggctgcaaatgtggaccaaactgctcctgcaacccctgcacttgcaagtgaggtgttgggatagcaag

SEQ ID NO: 176 - DNA, 383 bp, Glycine max
ttatgtccacatgtcttcgccccacgtttcatactagaaataaacaaatcaattatagtagtaatcaagttttaatgtctccatattttgccttcaagattttaaaaagattatgacagtagtacgttcttgttaacaaagtactactagtagtataaacatttaaagtatttttcaattaattaatcacatatgaaatggaataaaatgaatttagtgtaggattaagtcaaactatttattctagtcttaaaacagactactaataaccttatccagtcagtcataactcgtactaacaattaaagtacagtaaaagctagtcaaatttaaagagatcatttataatcctattctatgagctataacgattaatagccaaa

SEQ ID NO: 177 - DNA, 142 bp, Glycine max
gatccaaattcaagttcgcaccaaattttcctcccaaaatgtcaggccgtggaaaaggtgggaagggtttgggaaacggacgagctaagacgcacagaaaggttcttcgtgacaacattcaaggaatcacgaaacctgcgat

SEQ ID NO: 178 - DNA, 365 bp, Glycine max
gatccacatcctccacagcacaactccactcttagctgccattggtttttcttcttccatttctcttcctttctaagcttttttcgattacccatttggagattctgtcctaatggctcttgctccttccaaagtttcctccttttccgggttttctcccaaacccagtgttggggatgctctgaaaaacccaacttgctctgtttctctgagctttgcgaatgtgaaacttggaagcagaaaccttagggtttgtgcctcaactgtgcctctctcaggggtgattttcgaacccttcgacgaggttaagaaaggtgaacttgctgttccaacggctccccaagtctcgcttgctcgtcagaact

SEQ ID NO: 179 - DNA, 212 bp, Glycine max
gaccgtttcggttaacactttccaatacaataatcactaactgaatattcgatcggagatgtctgccgccgccgaagaagctaacgctcccgccgtcgaaaagccggttgaggaggtgaaggcgccgaaccccgcgaaggagaagaaacctaaggctccgaaggaaaagaagccaaaacaggccagaacagcttcacatcctccatattttc

SEQ ID NO: 180 - DNA, 368 bp, Glycine max
ggtctcgtggaagtgtaagcaagcaaaaccctagcggcgcctgctttctttgttcgtgttttgcatcaggatggagtctcaggtgaagcacgcacttgttgtcaaagttatgggtcgtactggatccagaggacaagtgacccaggttagagtgaagtttttggatgatcagaaccgtcacatcatgaggaatgtgaaaggacctgtgagagaaggagacattctcaccctactcgagtctgaaagggaagcaagaagattgcgctagatggtctcttttttttggcttgcctccaaattcgaacaaaagcaatatttttcttgatatttatggtagttagtcggtgctaaaggggttatagcaccct

SEQ ID NO: 181 - DNA, 302 bp, Glycine max
gaacccattcgcttacgaacaaccatactctctaaaaaattgatggtctcaccgacgagcgagtggcataatcgaaggccatgatcggcggtacaaacatgttcatcttcagatccatcctcgacacaccactcaagcaactcatcggtgatcacatttctgagctcactcgcgaatactgtctcagattcctcaagaaaccagggatgctcaggccatcctgcaagatatcgcatgtcatccaacatgtcatttcactgaaaacgctactgaggaacttctgataatgatactcctcttcc

SEQ ID NO: 182 - DNA, 359 bp, Glycine max
ggattttcgttctctgcgttttctttcatcgtcgtcttcaagactgcgacgacgatccaagtgatggacactcgtcgcgatggaacgtgtagctgaatccgagcgaactctgtacccatacgtgactggatcctctgtagtcgctatcaaatacaaagatgggattctaatggccgctgacatgggaggttcgtatggatctaccctgcggtacaagagtgttgagcgtatcaagcctattggaaagcattctcttcttggtgctagcggggagataagtgactttcaggagattctgcgttaccttgatgagcttatcctatatgacaacatgtgggatgatgggaaatttctagggc

SEQ ID NO: 183 - DNA, 348 bp, Glycine max
gagagagggtctgtggaaaccgagaaacaaagcagggataggaagaaggaaaaatggaaaagtatttcggaaacgcttatcgtggcgacccgggagtgccccattcggacccggatcgcttcgtcaacatatgggtcggatccgctgccttcgctgttctcacatatttcaatccctacatgtggcagctctctaatcagttcaattggcatgacaaagcaatgctatatgagcaatatcactggaaacaggcaaggaagaagaatcagccatatgagttcatgtggaacaagacctgggacaagaaccaccgggaacattactactacaactggcctatttactttc

SEQ ID NO: 184 - DNA, 291 bp, Glycine max
ggcccaggtaaaaaaaccaaaaaaccaaaaccataagggaacacagcggcggtaacagaagaacaagcagagaatgggtccagtgagaacgaagaccgtgaagaaatcctctccgcacgtgatatagcgtcactactcgcgcatgaccctggacttccacacgaacaagaaacttctggaggaaatggcgataatcccgtctaaaaggctcaagaacaagatctccgggttctcgacacacctgatgaaacgcatccacaacggccctgtgcgccgcatctccctcaagct

SEQ ID NO: 185 - DNA, 359 bp, Glycine max
gaccaacacttgtagccacaaatccaaattatagtaatatttcatgcttctctatcactcttgtcaaattccacaaaaaccaagtactacaagggaagaagaacttagctacaagctaaggaaggatcaaagagaatggctcaagcaatggcatcaatgactagcttacgtggttcctctcaggctgtgttggaaggtagccttggctccacacgcttgaatgtggggagtggaagcagggtggcctcagtcacacgtgcagggttcacagttagagcacagcaacaacaagtgaatggtggtgaggtacaaagtagccgtacggcagtgcttccacttgttgctgctggtttgaccac

SEQ ID NO: 186 - DNA, 60 bp, Glycine max
atatgtgtatatctgtattatattcgttgttctggttgttgtttgtattttgttttgtac

SEQ ID NO: 187 - DNA, 293 bp, Glycine max
  modified_base (224)..(224): a, c, g, t, unknown, or other
ggctttcagttggcgcgggtgaggtagaacccttccactgtggtgactctgcgatgggtgcctacaagtatgtttcagagctatggcgcaagaagcagtctgatgtcatgcgcttcttgcagcgggtgaagtgctgggagtataagcagcaaccttccattgttcgtttgacaaggtctacccgccctgacaaggctcgtcgcttgggcttcaaggctaagcanggctatgtgatttaccgtgttcgtgttaggaagggtggccgaaagagaccagttcccaaatgtattgtt

SEQ ID NO: 188 - DNA, 361 bp, Glycine max
gaatagaaatagaactgtcttttcatatagatatcccttcaacacaacataggtcatcgaaaggatctcgaagacccaccaacgcacgaaagccgggatctttcagaaaatggattcctattcgaagggtgcataaccgcatggataagctcacactaacccgtcaatttgggatccaattcggttccttaggaggtatcgggaaggaattttggaatgtaataatatcgattcatacagatacagaagaaagggttctctattgattcaaacgctctacctacgagatagggatagagaaagaggaaaaaaccgaggatttcacatagtacttttggtcgaaaaatcgatctgatttttt

SEQ ID NO: 189 - DNA, 136 bp, Glycine max
gttaataagtaaggagcaagttatcaaaaaatttcctttgaatgacaaaggtgtatgcattagagttaggtagaaaaattcacatgattaaagtgtttgagtagaaagaaatctgcaatgaaactaaattccaatc

SEQ ID NO: 190 - DNA, 364 bp, Glycine max
gaggtttttagggtttacactgaggaggcacaccttcaggagcagtcatggttctcaaaaccgagctgtgccgattcagcggtgccaagatctacccagggaaaggcatcagatttgttcgtggtgattctcaggttttcctgtttgctaactcaaaatgtaagaggtatttccacaacaggttgaagccgtcaaagctcacgtggactgcaatgtaccgaaagcagcataagaaggatattgctcaagaagctgtgaagaagagaagacgtgctaccaaaaaaccttactctaggtctattgttggtgctactttagaagttatccagaaaaagagaaccgagaagccagaagttcgagatgc

SEQ ID NO: 191 - DNA, 290 bp, Glycine max
gacttcacaacgcaaactgcgtcattgcatcattgcagatatcattaacccttctaccttcagattcgcgggaagatggcatcacctcacgctaatgtgacatcagttgtttagaacagtggtcaacgtgtttctcaatcgagatttgcatgctcttcattcttgtctgggttcgatgttgttggtcatgcatcaagtgcttggaagaaggaacttgtcacatcttcgatttccatggtgcctagagccacactaacatttgatcccccaactaccacttcagagcatac

SEQ ID NO: 192 - DNA, 400 bp, Glycine max
  modified_base (366)..(366): a, c, g, t, unknown, or other
gacttctcttcacacctttgttcactcttcttctcttgcggctagggttttagcgcagcttcttctagatttaaggaagatgggtaaggaaaaggttcacatcagtattgtggtcattggccatgtcgactctgggaaatccactaccactggtcacctgatttacaagcttggaggcattgacaagcgtgttattgagaggtttgagaaggaagctgctgagatgaacaagaggtctttcaagtatgcctgcgtgctggacaaacttaaggctgagcgtgaaagaggaatcaccattgatattgctttgtggaagtttgaaacaacaaagtattattgcacagttattgatgcgcctggacatanggatttcattaagaatatgattactgggacatcc

SEQ ID NO: 193 - DNA, 370 bp, Glycine max
ggcgactgagaagtgcgacgctgctgcaaagtgcaagcggatttggtcttcttctttactcccaatcatttctctgtgcaaggataagtgtgttatctatctaataacacaagatgtcagctgggcctggacttgaatctctagtagatcagacaatttcagtcattacaaatgatggacgaaatatagtgggaatcctgaaaggttttgaccaggcaacaaatattattcttgatgagtcccatgaacgggtttattctacaaaggaacgtgtgcaacaacttgttcttggtttgtacatcatcaggggttaaaatataagtgttgttggtgaactggatgaaaaactagattccaatcaggatttgtc

SEQ ID NO: 194 - DNA, 220 bp, Glycine max
  modified_base (208)..(208): a, c, g, t, unknown, or other
caccttcctcgttctcattctcctcgctctcggcatcctctccattcccagctcctcgcgcggcaatttgcccaaacctaacgatctcgcatccatcgctcgcaacacaatcgagacttccgacagtgacgagaggggggagcagtgggttgaagtagtgtcgtgggggcccagagcctttgtttatcacaattttctgaccaaggangaatgcgaatat

SEQ ID NO: 195 - DNA, 292 bp, Glycine max
gacagtaatgatggtcacgtctcaccttccgagacccttttcttgaaggaaactctactccaccaaaaccttgccttttcttggtgaagaagaacaagaagaaaaataccaataataacaacaacaataataataaatatattattgttgttattgttattaaaaattatgacggaagtgcttcagttgccttcatcctcaagctgttcgcgtcggccatgtggtggtctcacacccaatgatgggtcgcacccgattccccttattaacgctcccactgtggaagaacaac

SEQ ID NO: 196 - DNA, 347 bp, Glycine max
ggaaacgagggtaaggtcacgttgtgttgcgtcgtgtcgtgcgctgttcctctgtccgtcgtttttgttttcagaccaaaccctagctccgcatcgcaaccatgtcgaccaagcaaggtggaaaagctaagcctttgaagaaacccaagtctgataagaaggattacgacgaggttgacatggctaacattcagaataaaaaggaagatgagaatgcgctaaatgagttgaaagccaaggcgcaacagaagggaagctttggaggttctgggctcaagaaaagtggaaagaaataagggctctttatcatgattgtatacatccaatattgagccctgtaatttatt

SEQ ID NO: 197 - DNA, 343 bp, Glycine max
gattgttggcttgtgctctgctcgtgcctctagggttatcatatctccatttccatttcctctctctcagtttccaagaatcttaagctatgggaaagtcttacccaaccgtgagcgctgattaccagaaggccgttgagaaggcgaagaagaagctcagaggcttcatcgctgagaagagatgcgctcctctaatgctccgtttggcatggcactctgctggaacttacgacgtgagctcgaagaccggtggtcccttcggaaccataaagcacccctccgaactcgctcacggcgctaacaacggtcttgacatcgctgttaggcttttggagccactcaa

SEQ ID NO: 198 - DNA, 334 bp, Glycine max
ggaatgttttttttattattgtgttgtttgtttggtttaattcttttgaaccccaatcatctaaacatgacattttcttcataatttctgaaccctggaggcttcagtttactgttgattttcgtgttatgcttctaccaatgccataagcttgaagcaggaactaaatatggctgacttgttggaatggtcaaagcaagataagaaacgaatgcttcatgtcgtctaccgtgttggtgaccttgatcgcaccatcaaattttacacagaatgtttaggaatgaagcttttgaggcaaagagatatcccagaggagaaatatgctaatgctttt

SEQ ID NO: 199 - DNA, 280 bp, Glycine max
gagagtgatccttctacactaactaaagccgagcagcgagagagagaaaccctatcagaaatgccggctggtcacggtttgagatcccgcaccagagattccgtctctcgtcccttcaggaagaagggtaccatcgtcctcaccacatatctcagaacctaccacgtctgcgattatgtcgacatcaaggttaacggcgccatccacaaaggaatgcctcacaagttctaccatggccgcaccggtcgcgtctggaatgtcaccaaacgtgctgttgggg

SEQ ID NO: 200 - DNA, 313 bp, Glycine max
  modified_base (284)..(284): a, c, g, t, unknown, or other
gagggtttggttattagggttttcgctgaccggtgcgcagtcgagcctccagaagacgaatcgaaaatgccgtcgcacaagacattcagaatcaagaagaagttggcgaagaagatgaggcagaacaggcccattccctactggatccgcatgaggaccgataacaccatcaggtacaacgcgaagcgccgtcactggcgtcgcaccaagcttggattctgaggtgtatgctctgcctaggttcaatttatccaattaattagtgttttattttcttgaggcanaaacaatgttttgagtttttaatattttc

SEQ ID NO: 201 - DNA, 349 bp, Glycine max
ggaggctgagttctgtaattgtgttttggctgtggacaatggctctgtcttctgggcttttcttgtgttcttcttcccgtgttctcccaccaccagaaacccacactttcatgaggaccaggccttcttctgctgccttgcgcaccatttccgttagctgttgcaccgtctctcagtcgtctaagccagcccgcaaaatccgtggtatcatgaaaccccgcaaagtctcccccgagatggaagacctcgtcggcgctcccgagatggctcgaacccaagtcctcaaacggatttgggcttacattaaggacaacaatcttcaggaccctacagacaaggggactataaa

SEQ ID NO: 202 - DNA, 319 bp, Glycine max
ggttctagtgtgtgattgtttgttgttgtaactcgttcttcttcttttgttgttctgtgtttgtgtttgtttttttctctcacctgaaaatgtcttgctgcggtggtaactgtggttgcggaagctcctgcaagtgcggcaacggctgcggaggctgcaagatgtacccagacttgagctacactgagtcaaccaccaccgagaccttggtcatgggagtggcacctgttaaggctcaatttgagggtgctgaaatgggtgtgcccgctgagaacgatggctgcaaatgtggaccaaactgctcctgcaacccctgcac

SEQ ID NO: 203 - DNA, 356 bp, Glycine max
ggccgaaaagtagtaccaagatggcttcagttgtgtatctcctctttggcttccatctcattgttatcatgtcaagttccttacccgcaactagtgaagtgtttgcaaaacagtatccatccacagaacccgtggaagaaaaactcacccaactccacttctatttccataacaacataacgggggaacacccaactgctatgaaaactgttttgcctcctaaggggtccattcatggttttggggctacttacatgatggatgaccctctaactgaaggaccaagtccaacttcaaagcttgtgggaagatctcaaggaatatacgctttggcttcacaacatgagcctgggttg

SEQ ID NO: 204 - DNA, 322 bp, Glycine max
gactccaaagcttatttgttgctttgtgcttaatggaagggccttgagcttttctttctctctttctttgctctcttttcttttaggtttccactctctctcacacacacactctgcaataatctctcttctcttcttcagtctctcaactactgcctaaccaaaccttccatttccgcaagcagtttcttaaatttggagtctgatgtctccgccactgctggttactgaagaagacgaaggacagagcaatgcctcgatggtagcatctgcatcttcatcctcctcggagtgtttcaccctaaatgaagctagattgaaa

SEQ ID NO: 205 - DNA, 75 bp, Glycine max
ctggaatctcttggttatgtgctcatgtacttcttaagaggaagtcttccctggcagggactgaaggctggcacc

SEQ ID NO: 206 - DNA, 337 bp, Glycine max
gatggtttggttattagggttttcgctgaccggtgcgcagtcgagcctccagaagacgaatcgaaaatgccgtcgcacaagacattcagaatcaagaagaagttggcgaagaagatgaggcagaacaggcccattccctactggatccgcatgaggaccgataacaccatcaggtacaacgcgaagcgccgtcactggcgtcgcaccaagcttggattctgaggtgtatgctctgcctaggttcaatttatccaattaattagtgttttattttcttgaggcaaaaacaatgttttgagtttttaatattttccatttgttcgaagactatattgtg

SEQ ID NO: 207 - DNA, 357 bp, Glycine max
gaatttgtggtcgacaaagaagctgcaatggtttcacagaccatacataacatgcttacttctccagggagtttcgctgagaggcagcacggcgaagttacctttcctgagatcagcaccaccattctcgagaagatttgccagtacttttattggcatctccaattcgccagtgggaaggagacggaatttcccattgaacctgaattaactctggagctaatgatggctgccaattacctccatacatagcattttgacttccccaagggtgatagttcttcggccacataatggaactattgcctagttgggcattcaaagggaaatcagcgtattagtgttgccactgaaact

SEQ ID NO: 208 - DNA, 381 bp, Glycine max
gggttctgcaaaaagcagccaaaaccctatccgacatcctcgtatgccctctctctaagcaacctttgaggtattgtcaggaatcaaattccctaatcagtgatgctattggcgttgccttccctataaaaaatgggataccatgcttggttctaagagatgggaaggtactcgaggaggaagatgcttcaaaacctgatcatgatatcaatttatctgcagtgaatgaagagaatcgatgaagaagtgcgtaatatgtagtgtaagatgtttggacttcaatttttatgatcaactgtctgtgtaacttggggggtgtggaatgttgtgtaattaagaatttaccctgtttaaaactttggtaaaaaaacctttcttttt

SEQ ID NO: 209 - DNA, 399 bp, Glycine max
ggtgttccaaaacggaacccccccggccctggtccaaacctggccgccgtcatcgacgagaaggaacaaatttgaatttgaagaaagatgggagagaggaaggtgttgaacaagtattacccaccggactttgatccgtcgaagcttcccagagcaagaaggccaaagaaccaccagatcaaggtccgcatgatgcttccaatgagcattcgatgcaacacttgtggtaattacatctacaagggacccaagttcaattccagaagggaagatgttattggcgacacatatctgggaattcaaatattcaggttctactttaaatgcactaagtgctcagctgaggttaccatgaagactgatccgcagaattcggattacatcgttgaatccggggcc

SEQ ID NO: 210 - DNA, 367 bp, Glycine max
gatcacatacaacactctctccaaagttcaaattaagactgaggggtgagaaagagagaattgatatgggtgccggtctagttgcgttcctcttaatggttcttgtgcaattggtctatgcagtgatgaacattacttcaaagcttgcaatagaatctggaatgagccctcttgtccttgttgcttatcgacaactctttgctactgtgtccattgctcactttgcttattggctcgagtggaatacgcttcccaggattacacagcgtcttatgattcagatattattttcgtccctgaccggagttacaggaaatcagatgctttattttgtggggctgaaatattcatccgctacaattgcatg

SEQ ID NO: 211 - DNA, 313 bp, Glycine max
gaaaagaagaaaaaaaaaagggaatcaacaaaaagaggaacaacagcaatatcaaacatgtcctcctcatccacttccttttcaccggaccaacaacacctctctccctccgaccagctctgctatgtccattgcaacttctgtgacactgtcctcgcggtgagtgttccttgcaccagcttgttcaagaatgtcactgtgagatgtggtcattgcaccaaccttctctcagtcaacatgcgtggactgcttcttccaagtgccaatcagcttcaccttggccacactttcttcactcctcaaaatcttatgg

SEQ ID NO: 212 - DNA, 352 bp, Glycine max
agggctgaacgaaagaagatattaagggttttgagtgccgtgcggcgatcctagcactctcttctgcagctttcgccgacagcttcattcaccatggctgagcaaaccgagaaggcttttttgaaacaaccaaaagtgtttctcagctcgaagaaaactgggaagggaaagagacccggaaagggtgggaaccgcttttggaaatccattgggcttggatttaagactcccagggaagccatcgaaggaacctacattgacaagaagtgccccttcactggcaatgtttctatccgtggccgtatcttggctggaacatgtcacagtgctaagatgaacaggactattattg

SEQ ID NO: 213 - DNA, 364 bp, Glycine max
agggagcattcatcacaagcctctctctatattccattgccacccagttttgaatatatttttattccttctttgtttcttcacgttcgtccatacacataaccatgtcgtctcagactgttgtcctcaaagttggtatgtcatgtcaagggtgtgctggagcagtgaacatggttttgggaaaaatggaacgtgttgagtcatttgacattgatctgaaggagcagaaggtgacagtgaaaggaaatgtggagccagatgaagttctgcaagccgtttccaaatctgggaagaagactgcattctgggtggatgaagcaccagagtctaaaaacaagcctttatacagtgcacctgttgcctc

SEQ ID NO: 214 - DNA, 401 bp, Glycine max
ggaatagagagctcctccaattagggtttttgtgatctgcagctacgatgggtaagggaacggggagtttcggtaagaggaggaacaagacccacaccctctgtgtgaggtgtggccgccgcagcttccacctccagaagagtcgttgctctgcgtgcgcttaccccgctgcgcgcaccaggaaatataactggagcgtgaaggccattaggagaaagaccaccggaactggaaggatgaggtacttgcgtaacgtgcctcgcagattcaagagcggcttcagagaaggtaccgaagctgcacccaggaagagaagagctgctgcctctgcctaagctttgaatgaatgacagcaatttttgctgggtcagtgaattataggagttaatgtatctgtgttg

SEQ ID NO: 215 - DNA, 352 bp, Glycine max
gacacttcagaatcctctggtaacccttattttatctattctctctctttcttttgtgttctaagcagctagaagcaatggagaggaaaagaagccatgcctctttcaccatgtttgcaatgcttgttggagtgatctctcagagccttgtcattcctgtagtatccaccactgttgaagatcagaagaactactacaccccagatccacatgctggaagtctcccctcaggtttctccgattctctgtgctcacacagtagtactcctccatctcatggccatggaagctctccaccctcacatcatcacagtagtccaagtactccatcaaaaacctcatgtggaaactg

SEQ ID NO: 216 - DNA, 413 bp, Glycine max
gggggtggccctgtagttgaatttggttgttgttcccaaatccaaatccaaatcctggatcaaagctgaaacatttagcgtcctcaggaaatgctcgtgatctcggttttgcagtccctcacatcgctctgcagattcgagatccgtcacagattgcaccatgcagaaagcaaatctgataagaagaagaagaatatgtatatggcatatgggtggcctcaagtcatccctctggagcaaggactgtgtccctctgcacagaagattgtgtacctcaaaatcatcaatcgcacgttgctcgttgtctcacccactcactttgaactctggagcacttcccaagtacatggatccgtgcaagatgttgatgttacccgttgtgtgaatgagttccgtgtaaaatttttggccct

SEQ ID NO: 217 - DNA, 334 bp, Glycine max
gggggagaaggacttgacattgttgtagtgatgatctgtgaacatttccggtattcaccactctccttcttatctttttcttctcctccttcaactcgttaccatctctatataccttcttcttcttcttcttccttttctgtgtcttgctctctcatggagaatcaggagacccacaacaaccaaggccgcagcaaattcgtggactttccgttcgtttcatctgcccagaacaatcttatggttgatctcgtctcaacgcttgagaatcgctttcacactcagcttcttccttgcacactcccctctgatgttcagtattatcaaagccaaa

SEQ ID NO: 218 - DNA, 325 bp, Glycine max
gacacaaactttattacagttgttgtattgtaattaagcaagaatattaggcaatggagtcttctagaacttcaactactcttgctctttttttaaccatcaatttgcttttctttgtcatggcaagtggctgctacacttgcacacagcctaagccaaaccctatcccattcccttaccctaaccctagtcctgccgcgaagagctgccccagggacgcacttaagctcggagtgtgcgcaaacgtgcttaatggaccaattggtgctattgtagggtcaccaccggaccacccatgttgctcagtgctagaagggcttcttga

SEQ ID NO: 219 - DNA, 362 bp, Glycine max
aacagaactactatttagaagtgtttgtacatcttagtaggttgagtattcagcagtttatactcggaactttttcaaataaatgttttcatttacgttcttgaatgtagtatactttttacgttttgaagataacggagttttttttaagtgtttttgtgaagtaattttgttttgacattcattgtattaccacaatttgttgtttttgatttcaacagccgagccttttacttccacaagatcgggatttcatggccagaaccactattcatcatgattcgttccagacaacatactgaatgcttttttgtacataatttccgtcagatagctcgtaggaattggcacaatacaggaat

SEQ ID NO: 220 - DNA, 367 bp, Glycine max
ggtttgttgttgtaactcgttcttcttcttttgttgttctgtgtttgtgtttgttttttctctcacctgaaaatgtcttgctgcggtggtaactgtggttgcggaagctcctgcaagtgcggcaacggctgcggaggctgcaagatgtacccagacttgagctacactgagtcaaccaccaccgagaccttggtcatgggagtggcacctgttaaggctcaatttgagggtgctgaaatgggtgtgcccgctgagaacgatggctgcaaatgtggaccaaactgctcctgcaacccctgcacttgcaagtgaggtgttgggagagcaagcttcaagcagagatacccttaattaggaataatgataa

SEQ ID NO: 221 - DNA, 370 bp, Glycine max
ggcccaaattttttcatagcattttcagaggaacaatggcgggtagggtttcgacgtgcttcttcttcgtgtttgctctttctctccttcttccttttcagatctccgctgaggaatcatcggagaaagagttcgtactcacattggatcactctaactttcacgacactgtcagcaagcacgatttcatcgtcgtcgagttctacgctccatggtgtggccactgtaagaagcttgctcccgagtatgagaaagctgcttctatcttgagtagtcatgatcctccggttgttttggctaaaattgatgccaatgaggagaagaacaaagaccttgcatctcaatatgatgttgggggatacccaacaat

SEQ ID NO: 222 - DNA, 390 bp, Glycine max
ggtgcctggccatccggtttcccagatctgctccttcctcaccccacagaagtcagttgaagagcatgggtcgtggagttagcagtggtggtggtcaaagttccttgggttatctttttggcagtggagaggcccctgccgcaaaaccggcaacaaacaatgccccagcccaacctgaagtgcaggctgtaaataatgcgcctccttcaaaagcatctcctcctactaaaacaatagaccctaacaaggctgctggtataaacagtcattctactgatggccagaacaccggcaacttcatcacggaccgaccctcaaccaacgtccatgctgcccctggtggtggttcttctctgagttatctctttggtggacctggagaggggaaat

SEQ ID NO: 223 - DNA, 389 bp, Glycine max
ggtgctctgctcgtgcctctacggttatcagttctccatttccattttctctctcacttttcaagaatcgtaagctatgggaaagtcttacccaactgtgagtgctgattaccagaaggccgttgagaaggcgaagaagaagctcagaggcttcatcgctgagaagagatgcgctcctctaatgctccgtttggcatggcactctgctggaacctttgacaagggcgcgaagaccggtggacccttcggaaccatcaagcaccctgccgaactggctcacagcgctaacaacggtcttgacatcgctgttaggcttttggagccactcaaggcggagttccctattttgagctacgccgaattccaccagttggccggcgttgttgccg

SEQ ID NO: 224 - DNA, 389 bp, Glycine max
gatgccgaaaagtactaccaagatggcttcagttgtgtatctcctctttggcttccatctcattgttatcatgtcaagttccttacccgcaactagtgaagtgtttgcaaaacagtagccatccacagaacccgtggaagaaaaactcacccaactccacttctatttccataacaacataacgggggaacacccaactgctatgaaaactgttttgcctcctaaggggtccattcatggttttggggctacttacatgatggatgaccctctaactgaaggaccaagtccaacttcaaagcttgtgggaagatctcagggaatatacgctttggcttcacaacatgaacctgggttgctcatggtgacaaattttcccttcaatttgg

SEQ ID NO: 225 - DNA, 301 bp, Glycine max
  modified_base (88)..(88): a, c, g, t, unknown, or other
  modified_base (178)..(178): a, c, g, t, unknown, or other
tttggacctacaacactctcgaaccccctcttgtgtgttgtagccgcccccgtgaccatcaatggcggaaactgctgtcgacaaatcncaatctctcgctgaggaatattatgtgaaggataagcaaacagctgtagttgaaaaacctgttgaggtcaaagaagttgaaaacccagangaagctgcttctgaagaacccgttgctgagaaaactgtggaagaaacaactcctgttgcccctgcagttgctcaagaaagcagtgaagttcaccctcctcctgctgaagaaagcactgaagag

SEQ ID NO: 226 - DNA, 216 bp, Glycine max
agacgacagaaagggagaacacttgcgcgctgcaggatccaagctcgcatcagtcatcgtgtgtcgaacatcaggcctctctgaagtgttaaaatgtcgccctgagaaaatgcgtgttcatatgcagctctcaaccttcatgaagatggtaacaatgttactgttgacgagaatcgcaccttggtgagaaatgcaaatgttcaagtcgatacctat

SEQ ID NO: 227 - DNA, 345 bp, Glycine max
  modified_base (319)..(319): a, c, g, t, unknown, or other
gatgccgaaaagtagtaccaagatggcttcagttgtgtatctcctctttggcttccatctcattgttatcatgtcaagttccttacccgcaactagtgaagtgtttgcaaaacagtatccatccacagaacccgtggaagaaaaactcacccaactccacttctatttccataacaacataacgggggaacacccaactgctatgaaaactgttttgcctcctaaggggtccattcatggttttggggctacttacatgatggatgaccctctaactgaaggaccaagtccaacttcaaagcttgtgggaagatctcanggaatatacgctttggcttcacaaca

SEQ ID NO: 228 - DNA, 359 bp, Glycine max
  modified_base (338)..(338): a, c, g, t, unknown, or other
gaaagtggacagaagagagcgtcctagtcgcaaccctaataagaagaaccacagcttcaagcgagtgacatccaccagccatgggtcgtatgcacagccgcggtaagggtatatcctcttctgctttgccctacaaaaggacaccccctagctggctcaagatctcttcgcaagatgtggaagaaaatatctgcaagtttgcgaagaagggtttgaccccgtctcagattggtgtcattcttcgagattctcacggtattactcaggtcaacagcgtcactggcagcaaaatccttcgcatcctcaaagctcacgggcttgcgcctgaaattccagangatctttaccatttgattaag

SEQ ID NO: 229 - DNA, 347 bp, Glycine max
gaatcctcagaatcagcttcagcctttctctctaactccctcactcacactcacagttaagcaatggcggggaaaggaggaaaggggcttcttgtagcgaaaaccaccgcggctaacaaggacaaagacaaggacaagaagagacctatttctcgttcatctcgtgccggaatccagtttcctgtgggacgtatccataggcagctgaaacaaagggtccaagctaatggacgtgttggtgccactgctgccgtatacttagcctcaattcttgagtatcttactgctgaagttcttgaacttgctgggaatgcaagcaaggatctgaaggtgaaaaggataacacc

SEQ ID NO: 230 - DNA, 348 bp, Glycine max
gaaactcgttctagtgtgtgattgtttgttgttgtaactcgttcttcttcttttgttgttctgtgtttgtgtatgttttttctctcacctgaaaatgtcttgctgcggtggtaactgtggttgcggaagctcctgcaagtgcagcaacggctgcggaggctgcaagatgtacccagacttgagttacactgagtcaaccaccaccgagaccttggtcatgggagtggcacctgttaaggctcaatttgagggtgctgaaatgggtgtgcccgctgagaacgatggctgcaaatgtggaccaaactgctcctgcaacccctgcacttgcaagtgaagtgttgggagagc

SEQ ID NO: 231 - DNA, 391 bp, Glycine max
gaaatcaagttgaaccccctccggacctttgacaacacaagaaactaaaactttcccctccggctcaaatcataacacagaaagttcccattaatttccaagcactttcccccccctcaacccctcaaagcctcaaaagctgcaatctttcttcttccttgtttttttttcctggctctccgttgaaccttccatgtttcccagccccttttgattgttttccactagaagcagtgttttctgttaatagttaggaggttctaatggctgtgctgatgatttttcacatgtttgctgcaatagctttgcctgcttatggagatgctttcatcggtgtcaacattggtacagatgccaccaacatgccaagtccaacagaggttgttgccct

SEQ ID NO: 232 - DNA, 291 bp, Glycine max
aggcggatataacccataaaggtttgcccgttctttgtacataaacccttgtgatactttcacgcagtttcagtagctcttccgcttccaagataaagtctcccgtttgtgcctcataaaaagaactagcgggttggtggatcattaccctgattttataacttaataagtatttcccttatcttgataaagattttgataatgacttctcctatattggtaaagattatccttattcccaaataaaggtaaaaaggataaatacacgtgacgggagagacagtggccaaa

SEQ ID NO: 233 - DNA, 339 bp, Glycine max; identical to SEQ ID NO: 116

SEQ ID NO: 234 - DNA, 277 bp, Glycine max
ggtaaagagatagatgaagcaagcaagcgatttgtgaaagcgttgaccagaaagtgtgaactacaaagtgtaggaatgagcatataccaccagatacctgcgttgattctggattcttgaagccattccttctattttctggtgacagcttcgtcttgtgctatactatataacaactcaccctctctccttacctcttcattcccaacacaaaacactctctcctccttcaaccaacccctggtcactaccaaccaagtgtcccccctcctctccc

SEQ ID NO: 235 - DNA, 319 bp, Glycine max
aaagggaaaatcaaccaatccaaaatggcctcccaacaatccccaatttaaaaaggctccttaacaaaagaaaaatggctcaagtttgtttgctcttggtggggcttctcacaatgttctcctctgcctatggctatggatatggtggtggctgggttaatgcacatgccaccttctatggaggaagtgatgcctcaggaacaatgggtggggcatgtggatatggcaacctctacagccaagggtatggaacaaacactgctgctttgagcactgctttgttcaaaaatggtcttagttgtggctcatgctatgaaat

SEQ ID NO: 236 - DNA, 336 bp, Glycine max
gactcaacatttgcatttcctcttcatatacagtacacacttcagctggtggtagcctggtacatagtgtgcttctaaaatgaagaacaaaaggaagactttacaattgctgcggctcatggctgcaacccccttttgcatgccaattgtgtcgtatccggttccaaaggtcaacattcaggaccatctcaccaatatttctgacctggtaaagggtccaattagagggcttttgccatttgtggattgtggagagaggtgcagggtgaggtacattttgcactcagggcaaaatttgtgcaagagagtttgcgagacattctgtctgatgtacat

SEQ ID NO: 237 - DNA, 368 bp, Glycine max
gacactttccgtgtaaacagaacagagcaacactgaacaatggcgcaaccttcctcctcctcgaagcctgttgtccctctcctgaaggacgagctggacatcgtgatcccgacaatccgaaacctcgacttcctcgagatgtggcggcccttcttcgaaccttaccacctcatcatcgtgcaggacggagaccccaacaggaccatcaatgtccccgaaggcttcgattatgaactctacaaccgcaacgacatcaatcgcatcctcggacccaaagcctcctgcatctcgtttaaggattctgcgtgtcgctgctttggttacatggtctccaagaagaagtacatctacaccatcgatgacgactg

SEQ ID NO: 238 - DNA, 134 bp, Glycine max
taacgggagcaccaaccataacgacttttcttggtcgctacttcgcatttccgttctttgcatttcacgggctacgaaaaacgacgtccttttcccaattttccccggcgaacgggaaatggtggaacccgtgg

SEQ ID NO: 239 - DNA, 375 bp, Glycine max
gacttgcggctgcagtagagaagcactcttcgttcttcgactgtctacgatctgctttctctgaattgtgaaaatgtcgctcggagaaactgcttgttcatacgcagctctcatccttcatgaagatggaattagtgtaactgctgacaagatcagcaccttgttgaaaactgcaaaggttccagtagactcttattggccaaccttgtttgctaaacttgctgagaagaaaaatcttggcgatttgatagcaaatgcggcaggcggtggtgcaccagttgctgttgcagctgccccagttgctgctgctgctggtggtgctgctgccgcagctccagctgctgaggagaaaaagaaggaagaaccggaagaaga

SEQ ID NO: 240 - DNA, 385 bp, Glycine max
actcacaactccataacacaaggcagaaagcaagctcatcctagagttttaaaaatggcagcagcctcctccatggctctctcttccccatccttggctggcaaggccgtgaagctgggcccatcagcccccgaagtcgggagggtcagcatgaggaagaccgtcaccaagcaggcctcctccggaagcccatggtacggcccagaccgcgtcaagtacttgggcccattctctggcgagcccccgtcctacctcactggcgagttcccaggtgactacggctgggacactgctgggctttcggccgacccagaaaccttcgccagaaaccgtgagctcgaagtgatccactccaggtgggccatgctcggggccttgggctgcg

SEQ ID NO: 241 - DNA, 342 bp, Glycine max
gggaagcgaaagaggaatcagaaccgtggaatgtgagaagccccagggcacacagctactacaaaaacccgacctatttcatttcacgtgttgtctagcccgccgagaaaaccctaattcgctcgcagtcacccaagaggcgaatccttaccattgctcgagatgggtgaagaagtgaaggccgtggttccagagtctgttttgaagaagcagaagagagatgaggaatgggcgttggccaagaagcaagacctcgaggctgcgaagaagaagagagccgagagccgcaaactcatctacaacagagctaagcagtacgctaaggagtacgatcaccaggag

SEQ ID NO: 242 - DNA, 392 bp, Glycine max
ggctgacaagccaatcctttgtgtaggtgctcaaccctagtaagccgcaatggtgaagtactcaagggagcctgacaatccaactaagtcttgcaaggctagaggcgccgaccttagggttcattttaagaacacaagggaaactgcctttgcaatcaggaagttgcccttggtcaaggctaaaaggtacttggaatatgttcttgcccacaagcaggcaattccattcagacgtttttgtcgaggtgttggaaggacagcccaggctaagaatagacactctaatggccaatgacggtggcctgtcaagtcagcaaaattcattcttgatttgctcaaaaatgctgagagcaatgctgaagtgaaacgtttggatgttgatgcactgtaca

SEQ ID NO: 243 - DNA, 368 bp, Glycine max
ggttgatataaacttcagacagagcgagttgttgtaaagctagccttgttgcagccatggccacccacgcggctctagcttctacaaggatccccactaacaccaagttcccatccaaggcttcacactctttcccaacccaatgcgcctcaaagagacttgaggtgacagaattctctgggctaagatccacttcatgtgtgacatatgctaacgatgctagagaatcttccttttttgatcttgtagcttcccaactcactcccaagaccaatggatcatcaactcctgtgaggggagagacagtggccaagttgaacgtggcaatcaatggtttcggacgcattggtataaacttccatcgctgc

SEQ ID NO: 244 - DNA, 79 bp, Glycine max
aaaacacaaaggtacgctcaaaaacacagaggggaatagggctacataagaaacaaaagtggaaagtttttattgggtc

SEQ ID NO: 245 - DNA, 385 bp, Glycine max
gagagtggtggagtgtgcaaaagagcgtcgtagtcgcaaccctaatcagaggaagcgcagcttcaagcgagtgacagccaccagccatgggtcgtatgcacagccgccgtaaagggtaaacctccttcggcttggcccaacaaaagggaactcctaacctggtccagatatccttcgcagatattcaagagaaaatacctgcaatttggcgagaaaagggttagaccctgtcacagatgggtgtcattcacagagattcacagggtattgcacaggtcaatagcgtcactggcagcaaaatctttcgcatcctcaaagctcacggatttgcgcctgaaattccagacgacctgtaccatttgattaagaagcagtttcaattagg

SEQ ID NO: 246 - DNA, 174 bp, Glycine max
caaaagaccacagaagggggaatttaaaagattctgaaaaggggaattacccaaaatcccttaattgcaaaaatgaagaacaatccttccaaccagaacaagaacaacccggaccggcttaacaacaaaattcaagccaaaggcaaccaaatttaagggcccccccggaaaatt

SEQ ID NO: 247 - DNA, 261 bp, Glycine max
aggggggccaggtattgaaatactgctacaatacagattgcgttgttgctccgtcgccacaagtccctgccatgcatgggtatctccagagattctatgcacaacatgcgtgctgactggtggcaagaatagcgcatgcatgaacaagagaaagtatgagcttggtcgccagcctgctaacaatacactgtcaagcaaccagacagtcaggacgattcgggtgacaagtggaaatgtgaattgcatggcactgatattgga

SEQ ID NO: 248 - DNA, 115 bp, Glycine max
agggacacatcaaaatccgccaatatacctgcttttctcactctcacgcactcgtgttcagatacgatacaaacccaggataggacaagaagccatgcttctttcaccatgtttg

SEQ ID NO: 249 - DNA, 384 bp, Glycine max
  modified_base (336)..(336): a, c, g, t, unknown, or other
ggacagacacgaacacgatggttgaaatttggagcaaagcacgtgtttgtgtgtgaccttctctctctctaaactccgatggctttctctgcaatcactaccttgccctctcctcaatttctccgccttcctcaatcttcaccctctcttcgattttcaccgccaattctcaaacgccccaaacccctctccattcgatcagtttcaatccccgctgcaccagcatctggttctctggcccctgcagtttcacttacggataatgcgctgaagcacttgaataagatgaggtctgaacgaaatcaagatttatgtttaagaatacgtgtcaaacanggacggtgctctggtatgtcatacacaatggattttgaagacagggct

SEQ ID NO: 250 - DNA, 368 bp, Glycine max
ggtctcactctcacttttgatttttttgccctaaaaccctcgctgccgtcgtggtggccgcccaagaaaagagaatagagagcgcaaacgagtcttcatcttcgactcaccatgaagctcgtcaggtttttaatgaagttgaacaatgaaaccgtgtcaattgagctcaagaatggcactattgttcatggcaccattacaggtgttgatatcagtatgaacacacatttgaaaacagttaaactaactctgaaagggaaaaatccagtgactctggatcatctcagtgtgaggggtaacaacatccgttactacattcttcctgacagcttgaatctcgagaccctgcttgtggaagagacacctaa

SEQ ID NO: 251 - DNA, 323 bp, Glycine max
aatggaagtagggtgatctattggaggctccgaacatacatccaatgaaagacctttttgttacaaaatttgaaagcaaagcaaatttccaattacaaaaatcacaaaaaaaagtcctcaattgtggtggctattctctctttggtgtttcactcaatttcgagtgtttcttagtccaatatctcttaaggtggttggccccttgcttcttgactcaaattcttcaaggtatgacaccaatcctcctttccaattccctatatggcaactcacaggcaatgaaacaaagagacaagcaataaccaaaaaaaaaagattctgac

SEQ ID NO: 252 - DNA, 337 bp, Glycine max
  modified_base (322)..(322): a, c, g, t, unknown, or other
gaacatgccgaaaagtagtaccaagatggcttcagttgtgtatctcctctttggcttccatctcattgttatcatgtcaagttccttacccgcaactagtgaagtgtttgcaaaacagtatccatccacagaacccgtggaagaaaaactcacccaactccacttctatttccataacaacataacgggggaacacccaactgctatgaaaactgttttgcctcctaaggggtccattcatggttttggggctacttacatgatggatgaccctctaactgaaggaccaagtccaacttcaaagcttgtgggaagatctcanggaatatacgctttg

SEQ ID NO: 253 - DNA, 386 bp, Glycine max
catccaatgactatacattcattatatttttgtgtaaatagaggaaaaactcgatggaaaaatggtggtttaattctatgttgtttaataggaagttagaatacaggtgtgaattaagtaaatcaatggatagtcttggtcctattgaaaataccagtctaagggaagaccctaaaattttaaccgatatagaaaaaaaaattcacagggatttggattatttagaaatggaaggttttttttctagcgatctgaatactgtttctaagaatgatgatgatcattacatgtatgagactcaatttagttttaacaataatattactagtttcattgatagttgcattgagagtttcaatttaggtgatattgacaaatacaatgat

SEQ ID NO: 254 - DNA, 350 bp, Glycine max
gtcatccaactctctaaacaacacattaacctttctcattccccatctcctcaccttattcagccactgctaatttctagggttccgaaatggacgctggcggaaagatcaagaagggcgccggaggaagaaagggcggcggccctaagaagaagccggtttcaaggtccgtcaaggccggtctccaattccccgtcggaagaattggccgttatttgaagaaaggaaggtacgcccagcgtgtcggtaccggtgctcccgtttacttggccgcagttctcgagtacctagctgctgaggtgcttgagttggctgggaatgctgcacgtgacaacaagaagaacaggatt

SEQ ID NO: 255 - DNA, 355 bp, Glycine max
gatccgcatctctatgtttgggtgataggatacaacagcttcttcacctccgaagccgtatatcttagcttagcttagcaggggcaaagcaatggcttcgtcttccctcacttcagttcctctctcctcttcttccctcaatattccactttcttcctccaaaccttcctctagctttttatcttctccaattcccgcattctctcgcactcccaaaaccctgtttgccgaatcaaaatcccacttttacccaaagagaaacgataatgggttttccatcagagcccaaaccctagacttctcggattcattcttcgaaaggggtttccgctccgaagacgaaccctcttccccc

SEQ ID NO: 256 - DNA, 356 bp, Glycine max
ggccgttgtttcatggaccagaacaacgcctcatagctcctttctcatttcacacacacaaagaaccttgagacatcatgaagattccaagttccaagcaactggttgtgggatttgcacttggaaatgaaggatatgcaacgttggagagctgaagaggatgctttactacgcgcatatgtcaaacagtatggtcctagggaatggaatctggtgtctcagcgcatgaacacacctcttaacagggatgccaagtcatgcttagaaaggtggaagaactacctcaagcccggcattaagaaaggatctcttacagaggaagagcagcgtctagtcatcaaccttcaagcaacaca

SEQ ID NO: 257 - DNA, 54 bp, Glycine max
agcgaaaagacgacagaagggatccaatgattccaaaggtacaaactttatgcc

SEQ ID NO: 258 - DNA, 374 bp, Glycine max
ggctttgcttttaacgttaacctgcaattgcataaactttcaataactcagtgctcacacttcaattacaagctttggtttttcacttcacgcttgaaacccaatggcagcctcagctttctccaacacattggtttctcccatttctcttccatccaaacccaaacccaaagccatttccttgcaacccaaatttccacttgtcaaattccccaaccccagatcccatcccttgtcgaggaaaacgacgtcgctcaccacgttttgttcctccgatgctgccaatgctcctcaacatgacaccccaattgaattaaggtatcccgcattcccaaccgtcatggacatcaaccagattcgtgacattttgcccc

SEQ ID NO: 259 - DNA, 366 bp, Glycine max
gagcacaacgcaacacaacgcgcactctctcttttctctccttaacacaaaaaccctatcgttcttcgcggtttcgccgattctcgccatgccgaaagccaaatccgacgccaaagccgccgatagccggttgaagcgcaagggcgctggtgctggaaggaagcaatcgaagaaagctgctaaggatcctaacaagccaaagagacctccaagcgctttcttcgttttcatgtccgagttcagagagcagtttaagaaggagcatcctaacaacaaatccgtcgctgttgtcggtaaagctggtggtgacacatggaaatcgctgtctgatgctgaaaaggccccttcgttgccacggccgaaaag

SEQ ID NO: 260 - DNA, 385 bp, Glycine max
ggaacttcactgggaaatttgattgttctgtcaataaaacggtgccgttgaggttggagatggaggaaccgctacaagaagagcatgctcctcccaacaagcactttaaatcttcatccgcttcacaagatgagcaatgggatgcttcaaacggtgcatcaacttccagttctccctcccagtacaatatacttgatgagcctaaccctctgggcttacgtctgaagaaaaacccttcgcttttagatttgatacaaatgaagctttctcaagggaatgtgattattgcaaatacacaagatgaaaattttataagctctggattgaaaaaggagagtcggggtgctgctgcatcaggttctgtggagaagcttaaggcttcaaa

SEQ ID NO: 261 - DNA, 303 bp, Glycine max
gattttattcggcgagtgtcatttccttcccttccctcacgatctgaggaagacaccaatcttctctccacgcccttcttgggtaaccgtctgaagtgcagcaatggcagatggattgcattcgcagcatccatcggtagttcagaagttatctggacagtcttatcttgtgtccaggcttgctcctaatcactccaaaaactgttctaccactggtaattacctcaatggaagtttgcagtcctcaaggttggttccaatcacggcacacgcgccggctgagaaaggggtgtccggaatttt

SEQ ID NO: 262 - DNA, 364 bp, Glycine max
caaaaggggaaaaacaagtgaatagatgaatttgccgttaatttatttatccctctcttaaccatcgttgttcataatcacttacacatcataggttctctctctagggtttgatcatactcaagggtttaagccattgaaaaaaggaatgcataggcaaagcctcctctaaacaagcgaatcgataagctcgataacgtcttcagctgctctttctgcaatcattgcaacaacgtctaatgccgccttgacatgaataacttcataagggaagctatttgccggatatgccaagacagctttagcactaccatcacagctttatcatagccaatagacatatacaatgagtggattgattaat

SEQ ID NO: 263 - DNA, 389 bp, Glycine max
gacacacacttgcccatcatcaaagtttcttcctttctctgctctttgtcttctctgacacatttggggccttgttgagtgtgtttttgcaagagggtatggcgaaggacgttgaggttgctgagcgtggctccttctctgggaatgactaccatgaccctccaccagcagcactcattgatgctgaggagctcacagagtggtccttttacagggctcttattgctgagttcattgccactttgctcttcctctacattactgtgctcacacttatagggtacaagcaccagacggatcatgctgatgcgtgtggtggggttggcattcttggcattgcatgggcctttggtggcatgatcttcatccttgtccactgcactgctggg

SEQ ID NO: 264 - DNA, 331 bp, Glycine max
gagcaacatggtgaagctggtggagagatttacttgccagaagcttacgttagaaccaagaggactacttaatggagcaaatcagttggaagaacttgtagctagcttcccaactggcttatctgagtgtggagaagcattatcaagccttaggagtaggagaacgagtactgtttgtgatgaatgtctatggtttaagaaatctgtctttagtcaacttgtgtgttttgttattcagttctcagcaataaactgctctggcaatctagtttcatgttcaatgccatctttatcttttgggctaaaaaaataaacaaaccgagaaatgaag

SEQ ID NO: 265 - DNA, 372 bp, Glycine max
gagtaagagaaagaatcgaggttgaaatgaaggtagctcccatcgtggtgttcttgttcagagatacagagggtttcgcctccaccatctcacaagcttttcgccccaagccttcctcctccttcacgcgccaagaggactcctttgagctctccttggaggcttatggaatcaaacacctcaaagcatctgggagcgtttctcacttcgttgatgatcacggcgcttacaaggtgacaattgtggctatggagcattatgagccaccggtactatcttgtgctcttaatgagttaccaaccttttttctaattggacaagctagtcaatatttggacaataaatccaccaagcaacaggagatacttcatg

SEQ ID NO: 266 - DNA, 387 bp, Glycine max
  modified_base (329)..(329): a, c, g, t, unknown, or other
  modified_base (372)..(372): a, c, g, t, unknown, or other
ggttctagtgtgtgattgtttgttgttgtaactcgttcttcttcttttgttgttctgtgtttgtgtttgttttttctctcacctgaaaatgtcttgctgcggtggtaactgtggttgcggaagctcctgcaagtgcggcaacggctgcggaggctgcaagatgtacccagacttgagctacactgagtcaaccaccaccgagaccttggtcatgggagtggcacctgttaaggctcaatttgagggtgctgaaatgggtgtgcccgctgagaacgatggctgcaaatgtggaccaaactgctcctgcaacccctgcacttgcaagtgangtgttgggagagcaagcttcaagcagagatagcccttaattangaataaatgataact

SEQ ID NO: 267 - DNA, 337 bp, Glycine max
ggaagaggatgtgagcataatggggtctgatttgcggttggcaactttcgggtctggaagaagagtgtgtcctgtgaaggcccttggtttggcctcggttcatctttggctcgctcagttgcttcaaaattttcattgggtttcagctgatggtgtttctgtggaattggatgagtttctcaagctttctatggatatgaagaagccactgtcttgcaaggctgtgcctatggtttctgtttaggtttatgtgtgtagttgggttgatgtggtttggtttgtctgtataggtttatggatgttcttcggatgagttggtttggtttgtgctatttgc

SEQ ID NO: 268 - DNA, 249 bp, Glycine max
  modified_base (174)..(174): a, c, g, t, unknown, or other
aaacaacaaaagggggtgttaatccaaccaaccaattataacaaaaaattcttcttcaaatccttcttcttctggtcctggttccatctgtgacgagcatcatggcctcgagagcagtgctattgttggctatgtgtgtgcttccggccatggttgtggccattcgcccagcanagaaccctttttgcgtgaagggtcgcgtctactgtgacccttgccgtgctggttttgagacctcagcaaccacct

SEQ ID NO: 269 - DNA, 296 bp, Glycine max
ggtggtagtggggtaacgatacgtaataagttctatcattgaggaagtttcctgtgcatcgtctccgaaaatgaacgacgcagatgtctcaaagcaaatccagcagatggtgcagttcatccgccaggaagctgaggaaaaggccaacgagatctctgtctccgccgaagaggaattcaatatcgagaagctgcagttggtcgaagccgacaagaagaagatcaggcaagaatacgaacgcaaagagcgccaagttgaaattcgcaagaagattgagtactcgatgcaactaaatg

SEQ ID NO: 270 - DNA, 362 bp, Glycine max
gacctaaaaattgtaccgatatggcttcacttgtgtgtctccttttttccttgcatttcatggttatcatgtcaggttccttaccagcaaatagtgaagtgtttacaaaagagtctcctatgtctctatccacaaaacccgtggaaagactcacccaactccacttttatttccataacaacaaaatgggggaacacccgactgctatgaaaattgttgagcctcctaaggcgtccatttctggttttgggactatttacatgatggatgaccctctaaccgaaggaccaagtccaacttcaaagcttgttggaagatgtcagggaatatatgctgaggcttcgcaacatgaacctgcgata

SEQ ID NO: 271 - DNA, 369 bp, Glycine max
gatgtcaatcttcaattcaaatccctaatgtcaatcattctcacgaaccttcccaacgcgtcctcgtttcatccgaaacctaaacctaagccctctcatcatcacccacagatggctctcagtcagtctgcagtaattgtagcgcggacaatttgcttgaggaatctgttgcgaatggcagcgtcttctgaagagcgatccagtggaggaagtcaagttatcactgagaaaagcgatggtgtcagagtcctggagaatgtgaaagacgataataagaatgagttcgatgatacggtgattgaagacgcgtaagaagaagagttgtctgaagatggacagggtctgtcatatgatttgatggattagctc

SEQ ID NO: 272 - DNA, 351 bp, Glycine max
tgggatttccagacgcggcggcttcttcttccgtttttgtctatcggcgtgaacaatggcgacttacgctgcgatgaagcccacaaagcccggcttggaggagccccaggagcagatccacaagataaggatcaccctttcctccaagcacgtcaaaaacctcgagaaggtttgtgccgacttggttcgcggtgcaaatgacaagcgcctcacggttaagggacctgtcaggatgcccactaatgttcttctcatcacttacaggaagtccccttgtggtgaaggtaccaacacatgggacagatttgaacttcgtgtgcacaagagagtgattgacctctacagttcccc

SEQ ID NO: 273 - DNA, 359 bp, Glycine max
gatagtattatcattcattctcatctttctctcttctctctccacccaaaccctaactcccgaccctgttcccctctcgtatccgtcatgaaaggaggaaagtccaagaccgaatctaagagagccgatcccaaacttgctgtgaataagaagggagccgccaccaaggctaggaaacccgccggcaaagggaaagcagcgaaagaccctaacaagccaaagaagcctccaagtgctttcttcgttttcatggaggagttcaggaaggtattcaacaaggaacatcccgacaacaaagcagtgtctgctgtgggcaaagctgctggagcaaaatggaagacgatgtctgatgctgaaaa

SEQ ID NO: 274 - DNA, 374 bp, Glycine max
  modified_base (356)..(356): a, c, g, t, unknown, or other
ggcgtacacagcctcaacaaccctaacgcgtgcagagcagagagagacgcagccatggggcgaagacccgcgaggtgttataggcaaattaagaacaaaccataccccaagtcacggttttgccgtggtgttcctgatcccaagatcaggatttacgatgttggtatgaagaagaagggtgttgatgagtttcctttctgtgtccatctggttagttgggagaaggaaaacgtttctagtgaggccctggaagctgctcgtattgcttgcaacaagtacatggccaaatttgctggaaaggatgctttccacttgagagtcagggtgcacccattccatgttcttaggatcaacangatgctttcgtgtgctgg

SEQ ID NO: 275 - DNA, 369 bp, Glycine max
gagttacatcctatgttagtgttactcttccgtcaaacaccacataatcctttcctgcatttcacggtttttcttcaacactctcagtctcgttttcttcatctttttcttctttgttccactggaaaaagaagtaccttacttgtgaagtgggatttagagcttaatctgaagttgggttttgcttcccttgtccaaattccatggctttaatcttctttacttgttttcccttactcgatttcacatggcatttcaaccccgctctggagctgatagtgaagttgcaggaagctctatacaaaattcagagcattggtcagaggcttatacataccaccaaataattgaagaatgccggttatgaag

SEQ ID NO: 276 - DNA, 337 bp, Glycine max
ccggtatcgctgctacactaccatataacggtacagctgccatacgacaatataagggttctgctgcaaaactccaactcacgggtacggctgcaatattcctccttatgggtctggctccgaaattaccacacttggttattgctgctataacacgacatctggttacggctgctacatcactactcaaggttacagctgctaaatcactcacatacgggtactgctgcaaacaatttgacatagggttacatgcgaactcaatggacgtattttacttacccagcttccacaactgcaaaatcaccacctttttcattctgaaaaaaatatcacc

SEQ ID NO: 277 - DNA, 310 bp, Glycine max
gaattacaagcataagaaccatgtttttagtaatttataatttacaagtaacatatcggttgtctctctaaaaaaaaaaaaaaggaaaaaaaggaaaaaaaagaacaaaacaaaaaagaaaaaaagcagaccaaaagaaaagagaaaaaagagaaagaatgaaacttaacgaccagagcacaaaagcaaaaaaaaaaagggggggccccaaagggttaaaggctaagtcaccgtgccatggaaagtaaagcccctccaaaggggccccccaacgtacgtaacgggggcgcatttttaaaaaccgtggagg

SEQ ID NO: 278 - DNA, 257 bp, Glycine max
taccgctgcaagaagactacataacgggacgggacattgtttttctgttccacttctaagatctctttcacgtcagtctcacacgtgaaacacatccttgttctgaaaatatatgctcgtcctagttccactgcgcatctggctcatgtttaacttgcatttttgaattatggccagttttaccccgcaatggtgtttctggcaaccttcaaaattagtttggtgcttcctcacaacatgggtttggtccttatgtg

SEQ ID NO: 279 - DNA, 101 bp, Glycine max
atcatattctacgtagcatccatactgtatattaattatcttaaatttctttatatgcttcaagtgttagatgcaaacttaatgaatatgtttacgtgttt

SEQ ID NO: 280 - DNA, 345 bp, Glycine max
  modified_base (246)..(246): a, c, g, t, unknown, or other
aggggaattttttcaacccgttccccggaaaatttaaattgaactttcccccccccaaaaaaaaaaactaacaattggtcccccaaaaggaaaaaaaaaaccccccggaaaaaaaacccggaagaaaaaggcccaaccggaaaaaaaacccaaaggcggggaaaaaaaatatccaaaggaaggaggaaccgaaaaaaaaaaaaaaaagaacaaaaaagagctttgagacctacaagatctacatcntcaaggtgttgaagcaagtgcaccccgacatcgggatctcaaagcaagctatggggatcatgaacagtttcataaacgacatcttcgagaagctcgccc

SEQ ID NO: 281 - DNA, 362 bp, Glycine max
gactcaccacttcaaaacactcataacacaaagcacaaagcaaagctcatccttgagttaaaaaatggcagcagcttcttccatggctctctcatccccatccttggctggcaaggccgtgaagctgggcccatcagccccagaagtgggaagggtgagcatgaggaagaccgtcaccaagcaggtctcctcaggaagcccatggtacggcccagaccgagtcaagtacttgggcccattctctggcgagcccccgtcctacctaaccggtgagttcccaggcgactacggctgggacactgctgggctttccgcagacccagaaaccttcgccaagaaccgtgaactcgaagtgattcact

SEQ ID NO: 282 - DNA, 375 bp, Glycine max
gattcccaaaatttctcattctccctttcctctccgaaccctcgatcactctcacgcgctcctatattcgctcctcaacggtcgctctctcgaacaaccacaacaccatcttcatcacatggcaaacgcagcatcgggtatggcagtccaggaggacggcaagttgaggtttttggagctgaaggcaaaaaggacacacggttacagagtttttaagatggaggagcaccagagccgggtcattgtggagaaccttggagagcgtgcacagcgctatgaagatttcagtgccagccttcctgctgacgagtgccgttatgctgtatatgattttgagtatctgactgaggggaatgtccctaaaagcagaatttt

SEQ ID NO: 283 - DNA, 326 bp, Glycine max
gaaaacaaaaaccaatgagtcatggccaaaccaagaagccacaagcagacggtgaacccaccgaatgcggcgacgttttcggtgtctccaccgccgcggagcctcacgctgcgccggtggtgtccgccggtatcggttcggctgccatagatggcgaccccataaccatcggagaagctctggaagcggcggcaatatcgatcggggataaaccagtggaccaaaatgacgccgatgcgattggcgtcgcggagattagggccaccggagagaataaggtgaggtccggtggggtgggtgaaaccgcacaagaagcagctactttc

SEQ ID NO: 284 - DNA, 343 bp, Glycine max
gactgactcactcttgttttcgcttcgctactcatcatcctaagaagtaccaggaagaaacaaacaatgtttctcaaagtccatctgcactggaatgtcatcatcgctgctgaaaatctgcaaccggaatgtctgatgcttcataaggcaatcattgtccgccttctgagtgactttgctgtgaacaaggccaccaaagatctgggatactttcttgcagtgaccacactggagaaaatatgggaaggaaaggtcagacaacatactggggatgtgcgcttccctgtggtttttaatgccatcaccttcaagtttttcaagggagagatattacatggtgttg

SEQ ID NO: 285 - DNA, 367 bp, Glycine max
gttctttgcgagatagaagagaaagccgtcgctatcctagtctcttcttcccctctacccatttcagtttcaggatggaatctcaggtgaagcacgcccttgttgtcaaagttatgggtcgtactgggtctagggggcaggtgactcaggttagagtgaagtttttggatgatcaaaaccgacacatcatgaggaacgtgaagggacccgtgagagaaggagacattctcaccctacttgagtctgaaagagaagcaagaaggttgcgctagaggatctcttcatggtttggctcaggacttaaacaaaacatcgttgtttttgttgtagttaaaggatgtcaaatgttaattgtcatggacctgaa

SEQ ID NO: 286 - DNA, 386 bp, Glycine max
  modified_base (214)..(214): a, c, g, t, unknown, or other
ggtccctactcagttcacagagaaagatggctgcggaaaacgttgtagagttcacagacttacccgtcaagagacctagagaagaagaagaagaagaacaaaccaatggagtctccaacgacgccgtttcaacgctacccaatgaccctcaataccctggtatctctgctgttattcccggttggttctcagaaatcagcccaatgtggcctgnggaggcgcactccttgaaggtggaaaagattttgtttcaagggaagtctgactatcagaatgtcatggtcttccagtcatcaacatatggcaaggttcttgttttggatggagtcattcagctcacagaaagggatgagtgtgcctaccaagagatgatcactcatcttcct

SEQ ID NO: 287 - DNA, 382 bp, Glycine max
ggctgtgagtgagacaccgatagatagagagcgcggcatagcctagacctatctttcttctctctctgtgtgtgcgcttcaacggcaaccagaagcagccatggccactgcaaggactgtgaaggatgtttcacctcatgagttcgttaaggcgtactcctctcacctcaagcgatccggcaagatggagctgccagagtggactgatattgtgaaaactgcaagatttaaggagttggctccttatgatcctgactggtactatgtcagagctgcttccatggcaagaaagatctacttgagaggaggacttggtgttggtgcctttcagaggatttatggtgggagcaagaggaatggtagtcgccctcctcatttttgc

SEQ ID NO: 288 - DNA, 323 bp, Glycine max
  modified_base (235)..(235): a, c, g, t, unknown, or other
  modified_base (243)..(243): a, c, g, t, unknown, or other
ggacggttaaagctttctcatggctactacctttaccctcgcaacgctgtcactaccgtcgtcttctcgtgtttccattggcggagctccgattcgccaccaccgttctccgaaccggatcgggttgttgccgcctctcaaatgctcctctttggagccggaaaccgccccgcctcctcccttcgactggactcgcaagttgatcgccggtgtcgccggcgtcggattcctcganacctcgtnactcacttaccttaaactcaacggcgcagacgccttttgccccgtcggcggcggcacctgctctaaaatactcgacagtg

SEQ ID NO: 289 - DNA, 343 bp, Glycine max
gagggttttactttagacccgtcgtggagcaaaactttacattttgagaccgcaaaatgtctgaagtgaatgcgacccctgaaattcctcaaagcaacaccatctacatcaacaacctcaacgagaaaattaagattgatgagttgaagaagtctctgaacgctgttttcactcagttcgggaagatacttgaggtgttagctttcaaaaccctaaagcacaaaggtcaagcttgggtggtctttgaagatgcctcttctgcttccaacgccctaaggcaaatgcaaggtttccccttctatgataagcccatgagaatacagtatgcaaagaccaaatccga

SEQ ID NO: 290 - DNA, 369 bp, Glycine max
caacataggtcatcgaaaggatctcgaagacccaccaacgcacgaaagccgggatctttcagaaaatggattcctattcgaagggtgcataaccgcatggataagctcacactaacccgtcaatttgggatccaattcggttccttaggaggtatcgggaaggaattttggaatgtaataatatcgattcatacagatacagaagaaagggttctctattgattcaaacgctctacctacgagatagggatagagaaagaggaaaaaaccgaggatttcacatagtacttttggtcgaaaaatcgatctgaattttttccgtactttccgctcaatgatgaaatgggtcagattctacagggacaaacc

SEQ ID NO: 291 - DNA, 303 bp, Glycine max
gagggcgaggaagccacatagagacacaatacagagtgagttgttgctccttcgccacaactctctgccaacatgggtatctccagagattctatgcacaagaggcgtgccactggtggcaagaagaaggcctggaggaaaaagagaaagtatgagcttggccgccagcctgctaacactaagctgtcaagcaacaagacagtcaggaggatccgtgttagaggtggaaatgtgaaatggagggcattgagattggatactggaaattactcctggggaagtgaagctgttactcgcaagact

SEQ ID NO: 292 - DNA, 394 bp, Glycine max
gaatgtagaaaacattgtcagagaagcagtcaaaaagaagtttcatcaaacatttgttacggtccctgccaccattcgtctcttcttccatgattgcttcgtgcagggctgtgatgcctcggttttggttgcatccacaaaaaacaacaaagcagagaaggatcaccctgataatctttcactagctggagatgggtttgatacagtgattaaagcaaaagaagcagtggatgcagttccattgtgcaggaacaaagtttcatgtgctgatattttagctatggcaacccgtgatgttattgcactggctggtgggcctttctacgaggtttgatttggaaaaatttgatgggctaagatctaaatcttcagatgtaaataggaggctgcctca

SEQ ID NO: 293 - DNA, 373 bp, Glycine max
ggagcgagagaagttattagggtttttgagtgcggcggtccaaacactcttctctgcagcttttgcctacaactcccttcaccatggctgaacaaaccgagaaagcttttctgaagcaaccaaaagtgtttctcagcacaaagaagactgggaagggaaagagacctggaaaaggtgggaaccgcttttggaagtccattgggcttggatttaagactcccagggaagccatcgaaggaacctatattgacaagaagtgccccttcactggcaatgtttccatccgtggccgtatcttggctggaacatgtcacagtgctaagatgaacaggactattattgttagaaggaattatctccattttatcaagaa

SEQ ID NO: 294 - DNA, 360 bp, Glycine max
gagggttttgtgctgttgtcgctgctcatcctccataacctccgagctctacaccgaagaacgaagccatggggaagacacatggaatgggagctgctcgcaagctcaagtctcaccgcaggaggcaaaggtgggctgataagtcatacaagaaatcccatcttgggaatgaatggaagaaaccttttgccggttcatcccatgccaagggaattgtccttgaaaagataggtattgaagctaagcagcccaactctgctattcgtaagtgtgccagagttcaacttatcaagaatgggaagaaaattgcagcttttgtccctaatgatggttgcttgaactacattgaagagaatgacg

SEQ ID NO: 295 - DNA, 334 bp, Glycine max
gactcctctcttccaagttctctctctctgtgtatattcaaatccatactatcactttcgcatcggtacttctcttttcattgtcgcgcagacacaaatcagtaccatacgaagcccgacactacgtgaattaagcatgtcgggcagaaaggaaacggttttggaccttgcaaagtttgtagacaaaggcgttcaagttaagcttactggtggcagacaagtgacagggactctgaaagggtatgatcagttgcttaaccttgtcctagatgaagctgtagagtttttaagagatcctgatgatcccctcaaaactaccgattagaccagaaat

SEQ ID NO: 296 - DNA, 155 bp, Glycine max
gatacaaggagagaaaaaaaagtgtgttccagagaagcatttcccattaaagtatattatgtcttcaccaaagaaccaccctcaagttagaagcatctctttgctgtagctgtagccaatagtaatacccttccagctggtatacgtaccctcca

SEQ ID NO: 297 - DNA, 55 bp, Glycine max
gacaccgtcggcatcagttggaattttcgtggacgtagctgttaccgggttcact

SEQ ID NO: 298 - DNA, 401 bp, Glycine max
  modified_base (377)..(377): a, c, g, t, unknown, or other
ggttccagtgtgtgattggtttgatgtttgtaactccgttccttcatccttttgttgatcggtgtatgtgtgtgttttttctctcacctgaaaatgtcttgctgcggtggtaactgtggttgcggaagctcctgcaagtgcggcaacagctgcggaagctgcaagatgtacccagacttgagctacactgagtcaaccaccatcgagaccttggtcatgggagtggcacctgttaaggctcaatttgagggtgctgaaatgggtgtgcccgctgagaacgatggctgcaaatgtggaccaaactgctcctgcaacccctgcacttgcaagtgaggtgttgggagagcaagcttcaagcagagatagcccttaattangaataatgataaactattaatgtg

SEQ ID NO: 299 - DNA, 388 bp, Glycine max
  modified_base (382)..(382): a, c, g, t, unknown, or other
gggagcgagagcgagaaacagaaacctatttttattttctctcttcatatcacttagactgagactggatgcttctgtatccatcatattatatgatgattattgaattgattatgcgttcagatttcacttcaggatcactttgacagtttgacttgtccggcaccaacttctggtattactattgtctgagttctcaggagttctttcacagaaggtagatgggttctagaatcccatctcataagcttagcaatggcctctacgtatcaggacggccggagcagcccaaagaaagaactccaacaatgacatcaacagccgtgccatataccggtggagacataaaaaagtctggagaattggggaagatgtttgatantcctgt

SEQ ID NO: 300 - DNA, 146 bp, Glycine max
  modified_base (103)..(103): a, c, g, t, unknown, or other
aatatgacaaagaaattaaaattggtatcaagattttcgtcccttagttagtcactctcttttgacttccatttgaacttttgcataattgtatgtatgtgtnccaatccttttttaacgatatcctcaagttatcaacaatgggc

SEQ ID NO: 301 - DNA, 312 bp, Glycine max
gataccatagaagaagcacattggagaagcattatcactacgagcagcaacaactactctcagctgaaatggcctcttcagtgatggcatctgtggccctcaaacctgcccctttcactgttgagaagtcctcagtgagaggccttccctctctctcaaggaactcttcttcattcagagttgtggccagtggcaagaagattaagactgacaaaccttatggcattaatggtggcatggctttgaaggaatgaactgattcatctggcaagaaaaggaaaggaaagggtgtttaccagtctgtagacaaat

SEQ ID NO: 302 - DNA, 258 bp, Glycine max
ggtgttcggagagagacagatttgtgtgttgagcgcatagaacgatgagtttggttggtagaggagcaagttttgcattgtagtagttgtagcaatagccacacaacaaaagaaaacaaaaaaccaagtcttcgtcatcttcgtatgcagagatttttcttcaacatgatgatgatgattagtttatttaccaaacaatgattgccttgccttccttcgtgagatactggtagcaatttcaaaccttttcgagtaacc

SEQ ID NO: 303 - DNA, 378 bp, Glycine max
aatgcagacatacgtcaggatggggcgtcactcttcaaagaggtcataactgaactcgctgactgaaactcgcacgcattaaggttttgcagtgatggcactgtccaaccgcgtccgatcgggaatctctctcttcaccaaatccacgttcctcacttccgagcgatccactctccaacgattcctcgttgccccttccatttccttcgcctccagaaattacgccaacgtgccggggcaaaatgaaaacacagttaacgtcacactggctttgtatggacgttcaggaaactatgcctctgctttgtatattgcatctgtgaaagctaatgcagtggcaaaggttgagtctgagcttccgcaatttgttgacgctgt

SEQ ID NO: 304 - DNA, 239 bp, Glycine max
cggggaagagagagagagagagagagagagtcctgaaacttgggtgcgattccttcactcacaacaacaacacatcactatggctcttctgagtcgagcctcttcacgcttccctcagctggtttcccctcaaagggtagtttcactccacacaacgctcccatctctgaacgcatccccatccacagccacgcctacaccatatgccccgccaccgcctccgtccgcttcctctcccg

SEQ ID NO: 305 - DNA, 392 bp, Glycine max
gagtctcagcttcacattttaaccctaggatcctttctcctctcatccacctgaagcaaaaaatgagccggccaatggaggaagataatgaggaagaggagttcaacaccgaaccgctatttgtactcatgatgagtgttaaaaataatactcaggtactgataaattgtcagaacaacaaaaagcttctgggtcgtgtaagggcttttgacaggaactgcaacatggttcttgaaaatgtcagggagatatggactgaggtgccaaagactggtaaaggaaagaaaaacgcctagccagtcaacagggatagattcatcagcaaaatgtttctccgtggagattctgtcaccattgttcttaagaaccccaaatgagattctcttatcaac

SEQ ID NO: 306 - DNA, 366 bp, Glycine max
ggcaaaagccctctcttacttccatacgcggcggcttcttcttccgtttttgtctatcggcgtgaacaatggcgacttacgctgcgatgaagcccacaaagcccggcttggtagagccccaagagcacattcacatgataaggataaccctttcctccaagcatgtcaagaatctcgacaaggtttgtgcggacatggttcccggtgtaaaggacatgcgccgcagggttaaaggacctgtcacgatgcacacaacagttcttctcatcacgaccaggacatccccttgtagtgaatgtagcaacatatgggacagattttaacttcgtgtgcaaattagagtgattgacctctacagtttcccac

SEQ ID NO: 307 - DNA, 132 bp, Glycine max
tccaccatgtggtgttcttctatgcacttgctaattcactaggaaaaaaacattataagcctaacccaccatctcactgcatacacacaacaataatgcaaaccccacaacaaagttcatcgaatcaacccc

SEQ ID NO: 308 - DNA, 354 bp, Glycine max
gaattcattttgaattgacaccgcggagagtttgcagctgcatcatcgatcatcgtcacctcatggacggacaccattcacaagacccgaagcacagccctgctgacatgactgcctttgtgcaaaatcttctccagcagatgcaacataggttccagacaatgtccgactccattgttacaaagattgatgatatgggaagtcgcataaatgagttggaacaaagcatcaatgacctaagagcagagatgggagtggagtcctctccatcacctgcgacccctgctaagccaacagaggaaatcaccatagaagagggttcagcttaagtggcgtgttctgatttcagttgct

SEQ ID NO: 309 - DNA, 325 bp, Glycine max
gattggacacattcttcagcgactgcgtttttggatcggaacctcttctgcggcgtagcaatgggacactccaacgtttggaactctcacccaaaaaactacggtcctggttctcgcacttgccgtgtgtgtgggaatccacatggactgatcaggaagtatggccttatgtgctgcaggcagtgcttccgtagcaatgccaaggaaattggtttcatcaagtatcgctaaaagagcagttgtcaactacggaccaatattgtgttctggcactaagatgttttgaggatgttatgtttgaagaaacttgagactttcctttttc

SEQ ID NO: 310 - DNA, 153 bp, Glycine max
gacagaagcacaccacaggaactagaaaatccatacaatcttcaccaccagaaagaaaataatggcaatggccagtgcaacaactctagccacaatcactgttgtggcagctagccccagtgttggcagcataaggagtgggaagatgaatgt

SEQ ID NO: 311 - DNA, 322 bp, Glycine max
ggtctagcccgccgagaaaaccctaattcgctcgcagtcacccaagaggcgaatccttaccattgctcgagatgggtgaagaagtgaaggccgtggttccagagtctgttttgaagaagcagaagagagaggaggaatgggcgttggccaagaagcaagacctcgaggctgcgaagaagaagagagccgagagccgcaaactcatctacaacagagctaagcagtacgctaaggagtacgatcaccaggagaaggaattgattcggttgaaacgcgaggccaagctgaaaggtggattctatgtcgatccagaggctaagct

SEQ ID NO: 312 - DNA, 385 bp, Glycine max
gagcaacagcagcattcactgaaagcactcagtagggtttgcggtttcagagtttgtgacgcacgcatccatggccaccaccaccaacgccgccgcagccccgccgcgccagctctcccagaaggaagccgacatccagatgatgttagccgccgacgtccacctcggcaccaaaaactgcgacttccaaatggaacgttacatcttcaagcgccgcaacgacgggatttacattattaaccttgggaagacatgggagaagcttcagttagcagctagggttattgttgcaattgagaaccctcaggatatcattgttcaatccgcaaggccttatggtcaaagagcggttctgaagtttgctcagtacactggtgctcatgct

SEQ ID NO: 313 - DNA, 371 bp, Glycine max
gaagcaaaaccctaatccctctttcttcctcttcctcagtactgcgattttcgattctcttctctgcaactatgcctaaccctaaggtcttcttcgacatgaccatcggcggtcaacctgccggccgcatcgtgatggagctctacgccgacgtgactccgagcaccgccgagaacttccgcgcgctctgcaccggcgagaatggcgccgggcggagcggcaagccgctccactacaaaggctcgtccttccaccgcgtgatcccgaacttcatgtgccagggcggcgacttcaccgccggatacggcaccggaggcgagtcgatctacggcgccaagttcgccgacgagaacttcgtgaagaagcacact

SEQ ID NO: 314 - DNA, 391 bp, Glycine max
gaagcaaaaccctaatccctctttcttcctcttcctcagtagtgcgattttcgattctcttctctgcaactatgcctaaccctaaggtcttcttcgacatgaccatcggcggtcaacctgccggccgcatcgtgatggagctctacgccgacgtgactccgagcaccgccgagaacttccgcgcgctctgcaccggcgagaagggcgccgggcggagcggcaagcccctccactacaaaggctcgtccttccaccgcgtgatcccgaacttcatgtgccagggcggcgacttcaccgccggaaacggcaccggaggcgagtcgatctacggcgccaagttcgccgacgagaacttcgtgaagaagcacactggtcccgggatcctctccat

SEQ ID NO: 315 - DNA, 401 bp, Glycine max
gaggtattggtgggtgaaatcaaaaaccctagccctcactctcatcactttttttgagctatgtttcaagagagttagttagggataatagggcagggaagaataagagggatgtacaaagaacgagagcgagttggtgtttctgtttccgcttccaaatcggaggatcggaagcgaatcaacgacgttctcgataagcacttggaacgatcctctccttccacttctcgccccatcacctccgcctccaagaattccaacctccaagtggaggaatctgaaacggagagtgaagagtctgatgttagtggctctgatggggatgacacctcttggatctcgtggttctgtaatctcagagggaatgagttcttttgtgaggtggatgatgattacataca

SEQ ID NO: 316 - DNA, 96 bp, Glycine max
gaagggggcagaaaagtagtaccaagatggcttcagttgtgtatctcctccttggcttccatcacattggaatcacgtcacgttccctacgcgcaa

SEQ ID NO: 317 - DNA, 299 bp, Glycine max
gatcactagaagtgttggatgcatttctatttctaactaattattgtgcttattattattgttgagaaagaaaagaatggcaagttaataaaattctttgagttgaacacaggggccaagattccttctgttgggttaggcacttggcaagctgagcctggtgttgtagccaaagctgtcaccacagccattctggttggatacaggcatattgattgtgctcaagcgtataacaatcaagcagagattggttctgctcttaagaagctttttgatgatggtgtggtgaagcgtgagga

SEQ ID NO: 318 - DNA, 383 bp, Glycine max
gacatgcccatcatcaaagtttcttcctttctctgctctttgtcttctctgacacatttggggccttgttgagtgtgtttttgcaagagggtatggcgaaggacgttgaggttgctgagcgtggctccttctctgggaaggactaccaggaccctccaccagcaccactcattgatgctgaggagctcacaaagtggtccttttacagggctcttattgctgagttcattgccactttgctcttcctctacattactgtgctcacagttatagggtacaagcaccagacggatcatgctgatgcgtgtggtggggttggcattcttggcattgcatgggcctttggtggcatgatcttcatccttgtctactgcactgctggg

SEQ ID NO: 319 - DNA, 401 bp, Glycine max
gagcaaatagaagagcaaagagagtgagaaaagaaggaagaagaagaagaagagatggcaaatgaactacccgtcaaagcttttggttgggctgcttcagacacttctggcacccttgccccttttcatttctccagaagggaaaatggcgtcgatgacgtcactctcaagattctcttctgcggggtttgccactctgatctccacactctcaaaaacgactggggtttcaccacctaccctgtcgttcctgggcatgaaattgttggtgttgtgacagaagttggaaacaatgtgaaaaacttcaaagtgggtgataaagttggagttggtgtgatagtggagtcttgcaaggaatgtgaaaattgccaacaggatctggagaattactgtccccgccc

SEQ ID NO: 320 - DNA, 291 bp, Glycine max
gaacatgccgaaaagtagtaccaagatggcttcagttgtgtatctcctctttggcttccatctcattgttatcatgtcaagttccttacccgcaactagtgaagtgtttgcaaaacagtatccatccacagaacccgtggaagaaaaactcacccaactccacttctatttccataacaacataacgggggaacacccaactgctatgaaaactgttttgcctcctaaggggtccattcatggttttggggctacttacatgatggatgaccctctaactgaaggaccaag

SEQ ID NO: 321 - DNA, 63 bp, Glycine max
agtcaattcgaatgaaaagaaaaaggttaagcatcaacacacacaacaaataagttgtatgtt

SEQ ID NO: 322 - DNA, 348 bp, Glycine max
gaaactacatttcaatctttaaagtttaaacaattctgcccggtggggcacttaaggtaggcgatcaaaccaagcgtgcacagctaaaccctaacgttagggtttaaatgtcctctcaattccctccaccgagaaagcatctttctctaaattgaatgatttcgtgtgtattattctctcaagattggtgttggtgaaattttgttgttctctgttcaatcgggccttattgctcactgcgccttcaaatccatggtcgtcagtttaccatggatccctgtcatcacattgaacatcaagaagacgagtgggacactgatggacttgtgattccaagtttgggaattg

SEQ ID NO: 323 - DNA, 373 bp, Glycine max
gctcttctctcgcgtcgctccgcaccagtttcaccgcacgaatatcttgttgtttggagcgatccgagaaaaactctgtaaacatgttggtttaccaggacctccttacaggtgatgagcttctctctgactccttccgttacaaggaaattgagaatggaatgctgtgggaagttgaggggaagtgggttgttaaaggagcagttgatgtagacattggtgcaaacccttctgctgagggtggaggagaagatgagggagttgatgatgcagctgttaaggttgttgacattgttgacacattcagacttcaggagcaacccgcattcgataagaagcagtttgttaccttcatgaagaggtttatcaagaa

SEQ ID NO: 324 - DNA, 207 bp, Glycine max
gctgtgggaccacgttggggtcagttagatttcactccctcaattttcaacactgtcgcacagtgggaatcttcgtgtgcgcaatctgctgaagctttcaaatatactcccgcacgtttcggttcatatgtacgcgctgtttcctcaacagtgtgtgcctctatctcttctttgaaggaattcatctgtattatttgttaaatgatt

SEQ ID NO: 325 - DNA, 371 bp, Glycine max
ggttgtcaagcctgccgagaaaaccctagttcgcttgcagtcacacaagaggccaatcctattcatagctcgagatgggtgaagaagtgaaggtagttgttccagaatcagtgttgaagaagcgcaagagggaggaggaatgggcgttggccaagaagcaagaactcgatgctgccaagaagaagagagccgagagccgcaaactcatctacaacagagctaagcagtacgctaaggagtacgatcaccaggagaaggaattgattcggttgaaacgcgaggccaagctgaaaggtggtttctatgtggatccagaggctaagctgttgtttattattcgcattcgtggtattaatgccatggaacccaaa

SEQ ID NO: 326 - DNA, 326 bp, Glycine max
ggggtcaccgattgatacacccttcttcgttcctcactcaccagccacagattctctcttctctattcagtaaacggctgttttgtatacgagctgtcccggtctcagcctctacatcccaaaacatcaaaacaactggttgggctccttgtatggcttcttcctcagttggtagaagagctacatattcaacacaatctgtatcgacaaatgagccagttgtatctgtagattggctttatgataacctgaaggagccagatatcaaggtactagatgcttcgtggtacatgccggatgagcagaggaatccaattcaagaatat

SEQ ID NO: 327 - DNA, 266 bp, Glycine max
gaaataaattaaaactaaaggaaaggccacatctaacgaggagcacacatcttagagaagaaatgaagcccatctttgccttgttcgtagtcttgtcgcttctcctggttgccaacatcaacttaagccatgcaagaaaagacctgggggaatattggaagaaaatgatgaatgacgaacccatgcctgaagcaattaaagatcttattcaagatcaacaggtacaagatgcaacagcagatcattttataaggtacttcgatatg

SEQ ID NO: 328 - DNA, 330 bp, Glycine max
gggacttggtcgtcaacacagtctaattaatatctttttgctccttcgcttatgaatcttcttcttcttcttcttgttcctgcaacgcactgaattcgatcaatcaatccatcttcaattgctttgtttcgatcggaggaaaatggccgatcagttatcgaagggagaggaattcgagaaaaaggctgagaagaagctcaacggttgaggcttgtttggctccaagtatgaagatgccgccgatctcttcgataaagccgccaattgcttcaagctcgccaaatcatgggacaaggctggagcgacatacctgaagttggcaagttgtca

SEQ ID NO: 329 - DNA, 390 bp, Glycine max
  modified_base (380)..(380): a, c, g, t, unknown, or other
ggacaaccagcaagtgagacattttttttttctcttttctcttaagccatataccactttggtcatactcataatcctttttcttcattttcactaagtccaccaacaccaagtcatggctcaaagacagatctttgctcatgtggtgattttgttgcttatggtcttagttggagccaggtttgctaaagcagaaggaggaggagaagctgctgataggattttggaactccctggtcagccaaaagtgtcatttcagcagttttctggctatgttactgttaacaaggttgctggtagagctctcttttactggctcactgaagctgcccaaaatcctctcaccaaacctttggtcatttggctcaatggaggtccangatgttcatc

SEQ ID NO: 330 - DNA, 144 bp, Glycine max
aatgcatatcgaccaaaacaactacaacaaccaacaaggagtttagccaaaacaaaacgaagattaatgtgtgaagaaaaaaacaacgaacgaaagaaaaagtaaacatggataagattagaattttaataattatgttggatg

SEQ ID NO: 331 - DNA, 379 bp, Glycine max
gtgaacatgtgtgcacagaaccgaataactgctgaaattcatcccacagaatctgccaactccgaaatgaagttatcatccggagaacatcccgggaagaaacacatcattttgaacatcaggagcaggtttgaagagttcctctccaagcctcaaccagtagagcctttttcatataaaaatcttgctgcagtttcaccttcaacaccttctaaatcctatgaaatgaggcaaattcctggcttgaattctaggaagttctcgaaggagaacgattacgagtattccgtcagggtagtcaaatggttagagcatcaagggcatatagatgaaatcttcagagtaaggtttctcacttggttcagcctcaaggctactc

SEQ ID NO: 332 - DNA, 247 bp, Glycine max
  modified_base (127)..(127): a, c, g, t, unknown, or other
gcacttcaattgcaatcaaatgagttcattctctttgcgcagttccctacctctcctttcaagatgcagatcttcgtcaagaccctcaccggaaagaccatcaccctttaggtggaaagctctgacnacatcgacaacgtcaaggccaagattcacgacaaggaacgaattcccccgggataacaacgtctcatcgttcgcggaaagcagctcgaggacgggcggtacctcgccgactacaacatcc

SEQ ID NO: 333 - DNA, 363 bp, Glycine max
ggaagactatatcccccttcggtggaggctcaagccagacagcgtgcgatctctgcgacggacgcccaaaaggatttacgcatatctgaacgtacctgcgacgtcgacgcgcggcaaaaatgacagtcagattcacttcagcggccgtcgtgtcacaacgtcataaaggggatcatcctgatctttggcgccataaactccttgcaacgtatcgcacttgcgtgagcaggagttggaggaaagtggccagcatcaatgtgatttctcagcatatgcgtctcctgaagggctacatgggaggctcgctgtgtctgagcattgatcgctgacgttacgctgtgtactcggatcgtgaccgctttc

SEQ ID NO: 334 - DNA, 293 bp, Glycine max
ggagtgatccttctacactaactaaagccgagcagcgagagagagaaaccctagcaaaaatgccggctggtcacggtttgagatcccgcaccagagattccttctctcgtcccttcaggaagaagggtaccatcgccctcaccacatacctcagaacctaccacgtcggcgattatgtcgacgtcaaggttaacggcgccgtccacaagggaatgcctcacaagttctaccatggccgcaccggtcgcgtctggaatgtcaccaaacgtgctgttggggtcgaagtcaacaag

SEQ ID NO: 335 - DNA, 348 bp, Glycine max
gacccaagcgtcagtaggtgcgagaaaacaacacaaagggagttctcttcacacctttgttcactcttcttctcttgcggctacggttttagcgcagcttcttctacatttaaggaagatgggtaacgaaaatgttcacatcagtattgtggtcattggccatgtcgactctgggaaatccactaccactggtcacctgatttacaagcttggaggcattgacaagcgtgttattgacaggtttgagaaggaagctgctgacatgaacaagaggtctttcaagtatgcctgggtgctggacaaacttaaggctgatcgtgaaagaggaatcaccattgagattgcttt

SEQ ID NO: 336 - DNA, 396 bp, Glycine max
tggggaatcccattttaattctcaagtccaagcttgggagacagagaaagagaaagagaatggacgccattgattctgtgttcgatccgctgagagaattcgcaacggacagcgtgaggctcgtgaggcgctgccacaaagccgatcgcaaagaattctccaaggttgccgtccgtactgcaattggtttcgtcgtgatgggattcgtcggtttcgtcgtgaagctcattttcattccaattaacaacatcatcatcggatctggttaaattaagggaactactatcgccaaagtaattcaagttgtcaagcataaggaggcagacagatttccctcatcaatagatcattctatgccaccaatcttagatccattttcacttttgtcattttcct

SEQ ID NO: 337 - DNA, 303 bp, Glycine max
gatcctcatttttctgatccttctctacacacgccccaggaccactgggctccattatattatcagttattcaacgtggcaatagcttattgggcatttcatgaacgagataagattacatggtcctactaccacaatgccctagtttgtgatttacgttccatatattcatcctttggttcattctttggttcagtattcagattacattgcaaaaatggcatcattcaccatgacagcttccatccttggcagcccagccgtcaccaaccggtcggcagtagcaacgcagaggagatcact

SEQ ID NO: 338 - DNA, 354 bp, Glycine max
ggaacgaactaaggcatcgttttcatttttgttttttgttttttgttttttgaaaaagggtcttccccgccaccaaaccctagctagcgctggaaaaatgccgagggaaatcatcactctccaggttggccaatgtgggaatcagatcggcatggagttctggaagcagctctgcctcgaacacggcatcagcaaagaaggcatcctcgaagacttcgccactcaggggggtgaccgtaaagacgtgttcttctaccaagctgatgaccagcattatataccacgggctctcctgattgacttggagccaagagtgattaatggaattcaaaataattactaaccgaatcctca

SEQ ID NO: 339 - DNA, 331 bp, Glycine max
ggtgtagtataggattctcttctttattccttttgtaatttcattcattcttaatctttgtgaaaaataatgttcatcgagaattttaaggttgagtgtcctaatgtgaagtacaccgagactgagattcagtccgtgtacaactacgaaaccaccgaacttgttcacgagaacaggaatggcacctatcagtggattgtcaaacccaaatctgtcaaatacgaatttaaaaccaacatccatgttcctaaattaggggtaatgcttgtgggttggggtggaaacaacggctcaacactcaccggtggtgttattgctaaccgagagggca

SEQ ID NO: 340 - DNA, 283 bp, Glycine max
attccgaatcgacccacgcctccatccggtcgtaagagaacacctcagggggaatactgagtgacaacggtaagttaattcatcagtgaccacggtagcgtagctgatcgatctgcattagatctctccggtatctgaagcgacagacttcaatcggagatctgcatgcatggcccgagtcaccagattcccattctccaacacatccttcaggatccgttcggtctgaccattcgtctgatcggatcaggagtcgtcgatttcggcggtaggctaattttca

SEQ ID NO: 341 - DNA, 362 bp, Glycine max
tcattgggtttcatctgatggtgtttctgtggagttggatgagtttcttaagctttctatggagatgaagaagccactgtcttgcaaggctgtgcctaaggtttctgtttacgtttatgtgtgttgttgggttgagttggtttggtttgtctgcttacgtttgtggatgttgttcccaaggctgtgcctagggtttctgtttaggtttatgtgtgttgtttggtttgtctgtttacgtttatggatgttgtttggttgagttggtttggtttgtgttaactgctaagtttagttcaagaaaagtatggtttagagcacctttttactaatcgctaagggttgttattccgtgtacggtttgt

SEQ ID NO: 342 - DNA, 370 bp, Glycine max
ggagaccgcgaagaagaagatggagatgtatcagatctggagcaggagaatagcgttgggagcgttcgcgtttgttctgcttttcctatcggcctcagcatacgacgtcgttgtgctctctgagtataacttcgagaaggaggttggtcaggacagaggagctctcgttgagttcgatgctccttggtgtggacactgcaagaagcttgctccagaatatgaaaagcttggtagcagcttcaagagagccaaatctgttttaatcggcaaggttgactgtgatgagcacaagagtttgtgcagcatatatggagtctctgggtacccaacaattcagtggtttccaaaaagatctcttgaacccaaaaag

SEQ ID NO: 343 - DNA, 371 bp, Glycine max
gattctgaaaaagccgtagtttcgttggaaagggtctcgtttttcctacttcaaaggtttcttcttcgtatttctcgtaaatttctctctcaacctcctcaaaggaaaaaagaaaaggcatatagttatatggataacaaatcaccgagcaaggagtccaaggaggtgacacgagagtcgcttattgctatttctaactctttacctgataagactctggaatcaacttctgccttagagagcaagaaatcagacggggttatgataccaaaccgtgatcaagatgacaagtttaggtctgaactgatttcaatttcttatgctgaatcccctgatgacaaaatctgatctgttcacgtgtaactcctgga

SEQ ID NO: 344 - DNA, 321 bp, Glycine max
ggcagttcaattccaatatattccattctctctgtgtatttccctacctctcccttcaagatgcagatcttcgtcaagaccctcaccggcaagaccatcacccttgaggtggaaagctctgacaccatcgacaacgtcaaggccaagatccaggacaaggaaggaatccccccggaccagcaacgtctcattttcgccggaaagcaacttgaggacggccgtacccttgctgactacaacattcagaaggagagtactcttcacctcgtcctccgtctccgtggtggcatgcagatcttcgttaagacactcaccggcaag

SEQ ID NO: 345 - DNA, 314 bp, Glycine max
ggacacaaactttattacagttgttgtattgtaattaagcaagaatattaggcaatggagtcttctagaacttcaactactcttgctctttttttaaccatcaatttgcttttctttgtcatggcaagtggctgctacacttgcacacagcctaagccaaaccctatcccattcccttaccctaaccctagtcctgccgcgaagagctgccccagggacgcacttaagctcggagtgtgcgcaaacgtgcttaatggaccaattggtgctattgtagggtcaccaccggaccacccatgttgctcagtgctaga

SEQ ID NO: 346 - DNA, 339 bp, Glycine max
cacgcgtcaatccaggcgtcagaagatacataggggagaggagggggttagtgtggtagcttcactaagtcgaaaagtctctcgatagataaatggcatcaaatcgccggcttcatttgagaggtcaactttccgttcatgtctcgatctccgttgttcatccagtcacgggtgtcatctccacacaggctcggtcgccgttcagtgtcgctgccagtaaatctcgctcgcgaatccagactcaggtatccctttgaattgaccgtttgtgtgcaatccatgcaaccgtaccacaacgctcctgcttctgatgtgatgacttcgatgccaaccttctcg

SEQ ID NO: 347 - DNA, 58 bp, Glycine max
ggagacctcaggtcaggcggggctacccgctgagtttaagcatatcaataagcggagc

SEQ ID NO: 348 - DNA, 391 bp, Glycine max
gatgccgaaaagtagtaccaagatggcttcagttgtgtatctcctctttggcttccatctcattgttatcatgtcaagttccttacccgcaactagtgaagtgtttgcaaaacagtatccatccacagaacccgtggaagaaaaactcacccaactccacttctatttccataacaacataacgggggaacacccaactgctatgaaaactgttttgcctcctaaggggtccattcatggttttggggctacttacatgatggatgaccctctaactgaaggaccaagtccaacttcaaagcttgtgggaagatctcagggaatatacgctttggcttcacaacatgagcctgggttgctcatggtgacaaattttctcttcactttgggc

SEQ ID NO: 349 - DNA, 395 bp, Glycine max
gactcaccacttcaaaacactcataacacaaagcacaaagcaaagctcatccttgagttaaaaaatggcagcagcttcttccatggctctctcatccccatccttggctggcaaggccgtgaagctgggcccatcagccccagaagtgggaagggtgagcatgaggaagaccgtcaccaagcaggtctcctcaggaagcccatggtacggcccagaccgagtcaagtacttgggcccattctctggcgagcccccgtcctacctaaccggtgagttcccaggcgactacggctgggacactgctgggctttccgcagacccagaaaccttcgccaagaaccgtgaactcgaagtgatccactccaggtgggccatgctcggagccttgggctgcg

SEQ ID NO: 350 - DNA, 386 bp, Glycine max
ggaggaactggttctggacttggttcccttctgttggagcgtctctccgttgattatggcaagaaatccaagcttggtttcactgtctacccctcccctcaggtctccacctccgttgttgagccatacaacagtgtcctctccacccactctctcttggagcacaccgatgttgctgtccttttggataatgaagccatctatgacatctgtaggcgctcccttgacattgaacgtcctacctacaccaacctcaaccgtcttgtttctcatgtgatttcttcattgactacttccctgaggtttgatggggccctgaatgtggatgtgactgaattccagaacaacttggtcccatatccgagaatccatttcatgctttcctc

SEQ ID NO: 351 - DNA, 291 bp, Glycine max
  modified_base (245)..(245): a, c, g, t, unknown, or other
gtaaattttacagctcttagagaaattaagctgctaaaagagctcaaagatccaaacattgttgaattgattgatgcattcccacataaagggaatctgcatcttgtttttgaattcatggagacggacctagaagccgtcatacgagaccgaaatatttttctttcaccatctgatacaaaatcctacctgcaaatgacactaaaaggtcttgcttattgccacaagaaatgggttttgcatanggacatgaagccaaataatttattgataggatctaatggacagctg

SEQ ID NO: 352 - DNA, 359 bp, Glycine max
gatgccgaaaagtaataccaagatggcttcagttgtgtatctcctctttggcttccatctcattgttatcatgtcaagttccttacccgcaactaatgaagtgtttgcaaaacagtatccatccacagaacccgtggaagaaaaactcacccaactccacttctatttccataacaacataaccggggaacacccaactgctatgaaaactgttttgcctcctaaggggtccattcatggttttggggctacttacatgatggatgaccctctaactgaaggaccaagtccaacttcaaagcttgtgggaagatctcagggaatatacgctttggcttcacaacatgagcctgggttgc

SEQ ID NO: 353 - DNA, 129 bp, Glycine max
gtacgtccgcgacacagcaaccaccttctgcgtacctcgtttgccgccgccgaccaccacaacgcaccttcaccttcacctcacctaaccgttcacaacgaaccaacaaacctgagacaatgccgcacg

SEQ ID NO: 354 - DNA, 305 bp, Glycine max
gattcacaactttacccactcttcattctagcaattcgaattcccaatccaaaaccctaataccttcaaagaacctagtagtgaatcagtgatggcacctaaggcagagaagaagccagcggagaagaagccggtggaggagaagaagtcgacggtgggagacaaggctccggcggagaagaagccgaaggccggaaagaagcttccgaaggagggaggagccggcggagaaggggggaagaagaaaaagaggaacaagaagagcgtggagacatacaagatatacatattcaaggttctgaagc

SEQ ID NO: 355 - DNA, 268 bp, Glycine max
gataccatagaataagcacaaagagaagcattagcactaggagcagcaacaactagtctcagctgaaatggcctcttcagtgatggcatctgtggccctcaaacctgcccctttcactgttgagaagtcctcagtgagaggccttccctctctctcaaggaactcttcttcattcagagttgtggccagtggcaacaagatcaagactgacaaaccttatggaattaatggtggcatggctttgagggatggaactgatgcatccggc

SEQ ID NO: 356 - DNA, 387 bp, Glycine max
gacttcacaactcaaactgcttcattgcataattgcagataagatcaacccttctaccttcagattcgcgggaagatggcatcacttcatgctaatgtgacatcagttgtttacaacagtggcaaccgtgtttctcaatcgaaatttgcaagctcttccttcttgtctgggttcgatgttgttggtcgtgcttcaagtgcttggaagaaggaacttgtcccatcttccatttccttggtgcctagagccaccctaacatttgatcccccaactaccaattcagacataaccaagcaaaagaagcacactcttgaccctgcttctccagattttcctcctcctccctcaatttgagcattgctttcaaaagagcaccaacgaacacag

SEQ ID NO: 357 - DNA, 77 bp, Glycine max
gccggtttcccgaacgatttgatggtttggaatgcatttcccaagcaacgagtcttcggttcgaaaccagcagagag

SEQ ID NO: 358 - DNA, 180 bp, Glycine max
tctcatgcccagcactggaccaagcgggaagcgcagctgggggatagcctagtatcctttaaactcccagaaattattactgttgtgtctttaaagtaaatatcggatgcctcatctaccctaaagggggttcgagtaagcgaacgccaacccgtagagagcgcatacttgtgtcttccc

SEQ ID NO: 359 - DNA, 393 bp, Glycine max
  modified_base (378)..(378): a, c, g, t, unknown, or other
gacagatactctttacaattgcttgaacctctcagaagcaaatgaggattattcacagcctcgcatgtttggttctcaccttcatctccttcaatccttgtaaagcagaacaagcacaaactattttgaattccctcagcattgaccaaatcctacagaaaatatatgaatggggaaatggtgcacaagggttccaagaaggccagattcaaatttcaggccctatagtggtggcaggagtgctgtgtttcatagcttcttcaatatctagtgctggtggaattggtggtggtggacttttcttaccaatattaactattgtggctggcctagacctcaaaacagcttcaagtttgtcagctttcatggtcacagganggtcaattgcaaatg

SEQ ID NO: 360 - DNA, 388 bp, Glycine max
ggagaaagaaagaaaagatgggaatgacaccgaaaatagctccttcgatgctctcttccgacttcgccaatttggcttccgaggctcagcgcatgctccacttcggcgccgattggctccacatggacatcatggatgggcattttgtccccaatttaactattggcgctccagttattgaaagtttgagaaagcacacaaaggcatatttggattgtcaccttatggttacaaatcctcttgattatgttgaacccttggcaaaagctggtgcttctggttttacatttcacgtagagacatcaaaagataactggaaagaacttatccaaagaatcaagtcacatggcatgattcctggtgtagcattaaagcctgggacccccgt

SEQ ID NO: 361 - DNA, 377 bp, Glycine max
gaaatttgtgagaatcaagataggttgagtgttcaagatgaattatgtgacaacgcaagtgataaatcattgatcttgctgaagtctgctgataattttgacttgcgaaatgaattaaatattgaagatagggagtctaataaatctgacagccaagtgaatggaagccctgacgttattgataaactgagttataattctgaatcatgtaatgactcaagtgacacttcagaatcatgtgataaagataaagtatttaccaatagtggggagtctagtagtgactcacttgatgttgctgaaattcttagaaagctaagtagtaagtttaattttccccatgaaaaaaattggtgaagcaaggaaaaataagtttt

SEQ ID NO: 362 - DNA, 390 bp, Glycine max
gagaatcaatctctccctttcacctttcttcatagcctaccacttttctgctttcatctactctcacttctcttcacacactgagacacacagagagagaaaaataaagggtgtgatgggtgtcttactgagtgttttctttttataatgaacaaagaactgcacaccctcttcttcaccgaagaagaagatggcaattcagcaccacaatgaccaactagagcataatgaaaatgtctcatctgtccttgatgccctttactgtgacgaaggaaagtgggaagaggaagaggaggagaaagaagaagaagaagatgaaggtgaaaatgaaagtgaagtgacaacaaacactgcaacttgtcttttccctctgctcttgttggagcaaga

SEQ ID NO: 363 - DNA, 336 bp, Glycine max
ggaagttagtaaggtttttgagtgcagtggtccaaacactcttctctgcagcttttgcctacagctcccttcaccatggctgaacagaccgagaaagcttttctgaagcaaccaaaagtgtttctcagcacaaagaagactgggaagggaaagagacctggaaaaggtgggaaccgcttttggaagtccattgggcttggatttaagactcccagggaagccatcgaaggaacctatattgacaagaagtgccccttcactggtaatgtttccatccgtggccgtatcttggctggaacatgtcacagtgctaagatgaacatgactattattgtt

SEQ ID NO: 364 - DNA, 337 bp, Glycine max
ggcgtacacagcctcaacaaccctaacgcgtgcagagcagagagagacgcagccatggggcgaagacccgcgaggtgttataggcaaattaagaacaaaccataccccaagtcacggttttgccgtggtgttcctgatcccaagatcaggatttacgatgttggtatgaagaagaagggtgttgatgagtttcctttctgtgtccatctggttagttgggagaaggaaaacgtttctagtgaggccctggaagctgctcgtattgcttgcaacaagtacatggccaaatttgctggaaaggatgctttccacttgagagtcaaggtgcacccattcc

SEQ ID NO: 365 - DNA, 379 bp, Glycine max
gactcaccacttcaaaacactcataacacaaagcacaaagcaaagctcatccttgagttaaaaaatggcagcagcttcttccatggctctctcatccccatccttggctggcaaggccgtgaagctgggcccatcagccccagaagtgggaagggtgagcatgaggaagaccgtcaccaagcaggtctcctcaggaagcccatggtacggcccagaccgagtcaagtacttgggcccattctctggcgagcccccgtcctacctaaccggtgagttcccaagcgactacggctgggacactgctgggctttccgcagaaccagaaacctttcccaaagaaccgtgaactcgaagtgattcactccaggtgggccatgct

SEQ ID NO: 366 - DNA, 383 bp, Glycine max
gcggctcgaaccactcatcagaccactcgtcagcgcagccatccgtacagatgcggggaagacattgaggtcctggtgttaggaggtaacctacaggtactggtgctatagcagtacacacggtgatcggctcacttcctctgctttcatcatcatctgtctaagttggttacttgcgtcatcgcattcaggcatctctgtcacgatacatctccatcaatttgtgaatacctatactttagtgtcttcacacaccttattctcgtcaatcgattggttgctatctggatgttccgaaatcttctacagtgcatttgatgctgagttaacacaggttatccctgtgatcaagagatccattggtggcactcgtattggaggtc

SEQ ID NO: 367 - DNA, 303 bp, Glycine max
gactcaccacttcaaaacactcataacacaaagcacaaagcaaagctcatccttgagttaaaaaatggcagcagcttcttccatggctctctcatccccatccttggctggcaaggccgttaagctgggcccatcaaccccagaagtgggaagggtgagcatgaggaagaccgtcaccaagcaggtctcctcaagaagcccatggtacggcccagaccgagtcaagtacttgggcccattctctggcgaacccccgtcctacctaaccggtgagttcccaagcgactacggctgggacactgc

SEQ ID NO: 368 - DNA, 316 bp, Glycine max
tcagtggttcaataaatatttaactctatattaaaattgaaaaatgatatttaatgcgataaaataattaaattttatgatatacatgcttatggttcatatttgcatttttcttcttcttcttttttgtatatacgaatgaacaaatatgattggaacatgacagtagaaaaaccatatatgagatagcgtgagagagttcaacctgcaaaatttttattattttatatattattttgcattacactttatttaacattatttccattttatcccaaaccactccaaaaaaacaaagccattgactactacaatt

SEQ ID NO: 369 - DNA, 102 bp, Glycine max
cccgggcccaaccaagcgtcagaccaagcctccgcccaagcctccgtaacggtgccaaaaaaacacaaaaaggaaaaaaaggttgaataatggtgccaatgg

SEQ ID NO: 370 - DNA, 391 bp, Glycine max
ggtgtagtataggattctcttctttattccttttgtaatttcattcattcttaatctttgtgaaaaataatgttcatcgagaattttaaggttgagtgtcctaatgtgaagtacaccgagactgagattcagtccgtgtacaactacgaaaccaccgaacttgttcacgagaacaggaatggcacctatcagtggattgtcaaacccaaatctgtcaaatacgaatttaaaaccaacatccatgttcctaaattaggggtaatgcttgtgggttggggtggaaacaacggctcaaccctcaccggtggtgttattgctaaccgagagggcatttcatgggctacaaaggacaagattcaacaagccaattactttggtccctcacccaaac

SEQ ID NO: 371 - DNA, 302 bp, Glycine max
  modified_base (283)..(283): a, c, g, t, unknown, or other
gatgtcatagtattatcattcattctcatctttctctcttctctctccacccaaaccctaactcccgaccctgttcccctctcgtatccgtcatgaaaggaggaaagtccaagaccgaatctaagagagccgatcccaaacttgctgtgaataagaagggagccgccaccaaggctaggaaacccgccggcaaggggaaggcagcgaaagaccctaacaagccaaagaggcctccaagtgctttcttcgttttcatggaggagttcaggaaggtattcaacanagaacatcctgaaaacaaa

SEQ ID NO: 372 - DNA, 362 bp, Glycine max
gtcttcatcgtagcgccagactgagaggaagagagagggagattctttgtttgctaccttctctcggaaaaatgtttcaccagtaccaggtggttgggagggctcttcccacggaagcagatcagcaccccaagatctaccgaatgaagctctgggccaccaacgaggttcgcgccaagtccaagttctggtattttctgaggaaactgaaaaaggtgaagaagagcaatggccaagtgcttgccatcaacgagatttttgagaagaacccaaccaaaattaagaactatggtatatggttgcggtatcagagtacgactggttaccacaacatgtacaaggagtaccgtgacaccactcta

SEQ ID NO: 373 - DNA, 317 bp, Glycine max
gagcgaaacagagagtgatttcagtgagtgatcggtgttcacttgatctcatcataatcgtcagcgtcaattgaagaagatgccgatcagaaacatcgccgtcggaaggcctgaagaggcgactcaccccgacacgttgaaggcggctttggctgagttcatctcaaccttcatcttcgggttcgccggctcaagctccggcatcgcctacaacaagctcaccgacaacggcgctgccacccctgccggtctcatctccgcctccatcgcccatgcattcgcactcttcgtcgccgtctccgtcggcgccaacatct

SEQ ID NO: 374 - DNA, 359 bp, Glycine max
agcgaaacagagagtgatttcagtgagtgatcggtgttcacttgatctcatcataatcgtcagcgtcaattgaagaagatgccgatcagaaacatcgccgtcggaaggcctgaagaggcgactcaccccgacacgttgaaggcggctttggctgagttcatctcaaccttcatcttcgtgttcgccggctcaggctccggcatcgcctacaacaagctcaccgacaacggcgctgccacccctgccggcctcatctccgcctccatcgcccatgcattcgccctcttcgtcgccgtctccgtcggcgccaacatctccggcggccacgtcaaccccgccgtcaccttcggcgccttcgt

SEQ ID NO: 375 - DNA, 330 bp, Glycine max
gatacctaaaatttgtaccgatatggcctcacttgtgtgtctccttttttccttgcatttcatggttatcatgtcaggttccttaccagcaaataatgaagtgtttacaaaagagtctcctatgtctctatccacataacccgtggaaagactcacccagctcgacttttatttccataacaacaaaatgggggaacacccgactgctatgagaattgttgagcctcctaaggcgtccatttctggttttgggactatttacatgatggatgactctctaaccgaacgaccaagtccaacttcaaagcttgttggaaaatgtcatggaat

SEQ ID NO: 376 - DNA, 327 bp, Glycine max
ggtcagcttcataataaagatgacaatgaagctggttttggtagttgttgttgaagttgcatgcttagtttctgggatcttgtcctttggatctgagacactctctgagctttctttcttagaaaatgatgtcgtctcaacaacaagaccttcctcttcatctcaacttcaacctcaacctcaacctcaacctcttatggtggacctcactctcattcatgaagctgattctaaaggagctgtctgtttggatggaacggtgcctggataccatttggatcgtggatttggatctggtgcagatagttggcttattcatttggaagg

SEQ ID NO: 377 - DNA, 311 bp, Glycine max
cgggatccacatcctccacaacacaactccactcttaactgccattggtttttcttcatccatttctcttcccttctaagcttttttcgaataaccatttggagattctgtcctaatggctcttgctccatctaaagtttcctccttttccgggttatctcacacacccagtgttggggatgctctgaaaaaaccaacttgctcagtgactcagatctttgcgaatgttacacttggatgcataaaccttaaggtttgtgcactcaactgttcctctctcaagggtgattttcgaaaccttctaggaggtt

SEQ ID NO: 378 - DNA, 357 bp, Glycine max
ggccagtgccattcccttcacaccattctcacaaaacaactttcaaactctgagaaagaatggctgccaacacattgatgagtactgctatctcagccttcccatctctcctttcttcctcaaaatccagatttgccaccgcagttcctctttctagctttggtgtcaccaatgcctcttcttctcgcttttctatgagtgctgactggatgccaggccagcctagacctccttaccttgatggttcagcacctggtgacttaggattcgaccctcttcgtcttggtgaagtaccagagaatcttgagaggttcaaagagtcagaactcattcactgcagatgggccatgcttgctg

SEQ ID NO: 379 - DNA, 363 bp, Glycine max
  modified_base (342)..(342): a, c, g, t, unknown, or other
gaccgcgcaccacactgagaggaagagggagtgagagagagtgttcttcgtttgctaccttctcccagaaatggttacgttcaggtttcgccagtaccaggtggtcgggagggctctcccaacggaagcagatcagcatccgaagatctaccgaatgaagctctgggccaccaacgaggttcgcgccaagtctaagttctggtattttttgaggaagctgaagaaggtgaagaagagcaatggtcaagttcttgctatcaacgagatttttgagaagaacccaaccaagattaagaactacgggatatggttgcggtatcagagtaggactggttaccacancatgtacaaaggagtacgcga

SEQ ID NO: 380 - DNA, 77 bp, Glycine max
cacgcgtcaataagactacaaaagggttcttaaaacagaaaaaccaaaaaacaataaaaggaggaagaatgagctgc

SEQ ID NO: 381 - DNA, 63 bp, Glycine max
atatcaaccaaaaaataatctcaatcaacatggatcacaaaaaaaatttaatcgatatcaacc

SEQ ID NO: 382 - DNA, 382 bp, Glycine max
ggtcgttcttctccatttgtctgagaaattcgtgaaggaacctcactctgttgctgcattcccccatggcttctggttcagattttgcgttagcggtttcttctgaactcgagtcagttttgaggctggagactgttaactactttgttacgaggaggccatggcttgatctttatggagttaacgtgagacctgttgcgccagttgggagtgctagtaggaggccttatgtggatcctgcacttatacatcgttccttacctgatgagctgctttttgaggtttttgctcgaatgactccatatgacttggggagggcatcttgtgtatgtcgaaaatggaagtacacaattcgtaaccctgtattttggcgcaatgcatg

SEQ ID NO: 383 - DNA, 372 bp, Glycine max
gactcactcatacaatagagaccagcttttgcttctttgtgaacatggagatgaggaaatcatgtggcttcttcttcttgctcctcctccttgtctttgcttcccaggtggtggtgcatacggagggaagagtgtgtgagtcacaaagccacgggttccatggtttgtgtaatagagaccacaactgtgctttggtctgcaggaacgaaggtttctccggtggcaggtgcaaaggcttccgccgccgctgcttttgcaccaggatttgttgagatctcatcaaacactactcttgccatgcaaattaataaatcatagctatgccaaataaattgcatctactctttatccatttgggagctagctaccaca

SEQ ID NO: 384 - DNA, 352 bp, Glycine max
gaaacccatctctctttcatccctccaatcttcatcctgtgaaaaccgcgaacgaatcaacaaatgggtggttgcgtgttgaagctagtagattccgttctgttcctgttcttcctcctaatagcggtggtggctcctctgatcgacgctcaaacctgtcttcctctctcttacttccccgacatcatcgtccaactcaaggaacagtacaccaatgattactgcgattaccttgtcgcagaaaatccgcacttttttgtacgccttgtttggcttgagcttctcttccaatggccccttgcactcctcaacctctacaccatgctcacttccaggccttggttcaacaaca

SEQ ID NO: 385 - DNA, 353 bp, Glycine max
ggcagtttcaaattttcttttccttcactttcccgagaaaaaaataacacttttcactttcttcactacgttctcacttcgatatggctcgtacgaagcaaaccgctcgcaagtccaccggtggcaaggcgccacgtaagcagctcgccaccaaggccgctcggaagtccgctccggcgaccggaggagtgaagaagccccaccgcttcaggccgggaaccgtggcgctgagggaaatcagaaagtaccagaagagcaccgagcttctcatcaggaagcttccatttcagaggctcgtgagagaaatcgcgcaggatttcaagaccgatttgcgtttccagagcagcgctgtt

SEQ ID NO: 386 - DNA, 332 bp, Glycine max
ggccattgttgttgctattatcatccgcagctgcttttattcgcaccgcaaacagtgagccatggccgtcggaaagaacaagcgcatctccaaggggaagaagggtggcaagaagaaggcagctgatccctttgccaagaaggattggtatgacattaaggctccttctgtttttcaagtgaaaaatgttggcaaaaccctcgtctctcgtactcagggtaccaagattgcttctgaaggactcaagcatagagtgtttgaggtctccttggctgatcttcaaggggatgaggatcatgcattcaagaagattaggttgagagctgaagatg

SEQ ID NO: 387 - DNA, 340 bp, Glycine max
gacagtatactatcacattcgcttcggtacttctctcttcattgtcgcagacacaaagcagcactaaaggaagcccttcactacgccgattaagcatgtcaggcagaaaagaaacggttttggaccttgcaaagtttgtagacaaaggcgttcaagttaagcttactggtggaagacaagtgacagggactctgaaagggtatgatcaattgcttaaccttgtcctacatgaagctgtagagtttttaagagatcctgatgatcctctcaaaactactgaccagaccagaaatcttggcttaattgtttgtaaaggaactgctgtgatgcctgtgtcccc

SEQ ID NO: 388 - DNA, 343 bp, Glycine max
gagagaaagagagagaaagatgtcgaagcgtggtcgtggtggttcggcggggaacaagttccgcatgtcgctgggtcttccagtggcggcgacggtgaactgcgccgacaacacgggggcgaagaacctctacatcatttcggtgaaagggatcaaaggccgtttgaaccgtcttccctcggcctgcgttggcgacatggtgatggccaccgtgaagaagggaaaacccgatctgaggaagaaggtcttgccagctgtcatcgttcgccagcgcaagccatggcgccgaaaggacggcgtctacatgtacttcgaagatgatgctggtgttattgtcaatccc

SEQ ID NO: 389 - DNA, 354 bp, Glycine max
ggtaccattaaattaacaccgaaatcgccgaatacgactaaaatcaaaatcacaacactgatcctttcatttgcaaattgcaaatgcagaaaggaaaagcggattctatctccatcatcagctcccttcctgaagatgttgccctcaaaattgcttcgctacttcaggtgcgggatttgtgtgccttaggttgttgttcgatgttctggaaggaactctgcttctcagattgcatttgggagtctcttgtcagaaacagatggccctcactctcttccttccatttcccttcttcttcttccactcattctcccagtttcgagaaattgtttgtttggaaaattgggttacaga

SEQ ID NO: 390 - DNA, 388 bp, Glycine max
ggttctagtgtgtgattgtttgttgttgtaactcgttcttcttcttttgttgttctgtgtttgtgtttgttttttctctcacctgaaaatgtcttgctgcggtggtaactgtggttgcggaagcgcctgcaagtgcggcaacggctgcggaggctgcaagatgtacccagacttgagctacaccgagtcaaccaccaccgagaccttggtcatgggagtggcaccagttaaggctcaattcgagagtgctgaaatgggtgttcccgctgagaacgatggctgcaaatgtggagctaactgcacctgcaacccctgcacttgcaagtgaggtgttggagagctaaagcttcaagcagaaatggcccttagacataatgataaaaactat

SEQ ID NO: 391 - DNA, 377 bp, Glycine max
  modified_base (294)..(294): a, c, g, t, unknown, or other
ggagatagagagggtttgttttgttcttattgtttgtgtgattgagaagaagagagcgtgaaggagaagaagagagaggaatgggttcaccgacatcaaggattgtgttccgtattgtggtggtggcgcttctgcttcttcttctcttctacattggtcgccctctgtattggaaaatctccgccaccgtccacgacatccgcaacaacaagcaaactgtcagacaaggtctttcccaaatcgtcattgaggctcagaaatcggtcggttggtatcacgatgagtccgactcangggttcgtgctaactaccgaaaactgcttcttcataagcccatttccacagtttttgcttaattatagttagataaatacatg

SEQ ID NO: 392 - DNA, 352 bp, Glycine max
gagccacagctctcctctcactttcacttctacgtccctggctctgttccgtctatgatcatggcgtttagggtgctaaaccctgacctccgctttcgcattcatctctctctcttgtccatcacttccgccaaggtcatcttcgaggagcgtttcgatcaccgatggggaaatcgtagggtataagtcagattggagcaaagatgacaccctggctggggagtggaaacatacctctggccaatggaatggagacgctaacgacaaaggtattcataccagtgaggattacagattctacgctatttcagctcagtaccctgaaatcagcaatcaggataagacactagtc

SEQ ID NO: 393 - DNA, 349 bp, Glycine max
gaatgtagttcaaaaacacaacagaatgtgaaggctgtttttgatgcagccatcaaggtagttctccagcccccaaagcagaagaaaaagaagagaaagggacaaaaggcctgttccattttgtgatcttcagttcttaatatagtagtttgtggaggatgacatgactgtagtcttcatcattctatatcttatactatttccaacctagatgaaggaatcatcatgtccaactgaccgcatcaaggttcgctcataagcatcgagctatctgtctaattgtctctggctgtaggatctgtacagtcgtaatttcaatatgttcggtgtgcacacaacacttgcgtta

SEQ ID NO: 394 - DNA, 336 bp, Glycine max
gacacacactctgtcacgcacccaccattctactacactcctctctctcactctcactctctgctccgtgatagctgtaccacgtttttctctccatctcgaaacaccatctctgcctcagtcccaacccatcaccattctcatggctgctctagctctagcacttcttcttctggctttcaccggcacttcaagtgctacatggtgcgtttgcaaggatggaagcgacgcgatcctgcagaagacgttagactatgcttgtggagctggtgctgactgtaaccctcttcacctaaacgggccttgttttcagcccaacaccgtcaaggcccactg

SEQ ID NO: 395 - DNA, 77 bp, Glycine max
gactcttctccacttctcaaactttgtaacttcaaaacatactcctctgttctctctgtttctcttcaatcttcctg

SEQ ID NO: 396 - DNA, 364 bp, Glycine max
ggaggtagccagagagtgatacaatacagagtgcgttgttgctccttcgccacaactccctgccaacatgggtatctccagagattctatgcacaagaggcgtgccactggtggcaagaagaaggcatggaggaagaagagaaagtatgagcttggtcgccagcctgctaacactaagctgtcaagcaacaagacagtcaggaggatccgggttagaggtggaaatgtgaagtggagggcactgagattggatactggaaattactcctggggaagtgaagctgtaactcgcaagactcgtatactagatgtggtttacaatgcctcaaacaacgagcttgtgcgtactcagactcttgtaaaa

SEQ ID NO: 397 - DNA, 355 bp, Glycine max
gtagtaatagttcttatctgtgaatcttgtgttctcatgttctgctttcactgatcaagctttttactcaattattgaagccacgtgatagaatttaacataaattgaagtggggtctgttatagtaccatatctgcttttctacacaatgtgacaacaggaactttcacatgtcacaattgtagattaagcactcatgcagtccacctttcccaaatgatagctccctagctagtggcagcatctcaacttaaattcggtcatatagatgttgatatatatggcaactccatcaagtgtaaagtctttcaatataaaataaaatactatgtaatttcttttgtttcaacttttt

SEQ ID NO: 398 - DNA, 383 bp, Glycine max
caacgggattttttttttacattcctacaaacgaaacttgattttgcgtaacacaaaacaaacaacaacaaaaacacaaaaaacacaccaacaccaaccaaaaaacacaacccaaaaaaaacacaaaacaacaccaacaaccaacacacaaacacacacaaccaccacaccacaatcgggcacaccacaaccacaccacacaccaacccacacaaaaacccgccccccccaaaagacccacccccaacccccacccccaaccaaaccccaacccccccccaaacccccccccaacacccaccccgggcccccccttaaacccaaccccacccgggaaacaccccggcccatccccaacaaaacccccctccacacaaaacccc

SEQ ID NO: 399 - DNA, 339 bp, Glycine max
  modified_base (317)..(317): a, c, g, t, unknown, or other
ggccgaaaagtagtaccaagatggcttcagttgtgtatctcctctttggcttccatctcattgttatcatgtcaagttccttacccgcaactagtgaagtgtttgcaaaacagtatccatccacagaacccgtggaagaaaaactcacccaactccacttctatttccataacaacataacgggggaacacccaactgctatgaaaactgttttgcctcctaaggggtccattcatggttttggggctacttacatgatggatgaccctctaactgaatgaccaagtccaacttcaaagcttgtgggaagatctcanggaatatacgctttggcttcac

SEQ ID NO: 400 - DNA, 386 bp, Glycine max
aagaaggcgtcttcataaacgcctttcttctccgtttccgtttcctcgttcgaattcgctttttgatctgcgaaaatgagagagtgcatctcgatccacattggtcaggctggtatccaggtcggaaatgcttgctgggagctctactgcctcgagcacggcatcgggcccgatgggcaaatgccaagtgacaagacagttggcggtggtgatgatgctttcaatactttcttcagcgagactggtgctggaaagcacgtgccacgtgcagtgtttgtagatcttgagcccactgttattgatgaggtgagaaccggaacttaccgccagcttttccacccagagcagctcatcagcggcaaaaaagatgccgccaacaactttgc

SEQ ID NO: 401 - DNA, 339 bp, Glycine max
gatagtagatattcattccccttatctttctctcttctctctccccgcccaaaccctaactccctaccctattccgctttctctcatccatcatgaaaggaggaaagtccaagaccgaatctaagagagccgatgccaaacttgctgtgaataagaagggcgccgccaccaagactaggaaacccgccggaaaggggaaggcagcgaaagatcctaacaagccatttaggcctccaagtgctttcttcgttttcatggaggaattcaggaaggtgttcaacaaggaacatcccgacaacaaagcaatgtctgctgtgggcaaacctgctggagcaaaat

SEQ ID NO: 402 - DNA, 361 bp, Glycine max
gagcgaaacagagagtgatttcagtgagtgatcggtgttcacttgatctcatcataatcgtcagcgtcaattgaagaagatgccgatcagaaacatcgccgtcggaaggcctgaagaggcgactcaccccgacacgttgaaggcggctttggctgagttcatctcaaccttcatcttcgtgttcgccggctcaggctccggcatcgcctacaacaagctcaccgacaacggcgctgccacccctgccggcctcatctccgcctccatcgcccatgcattcgccctcttcgtcgccgtctccgtcggcgccaacatctccggcggccacggtcaaccccgccgtcaccttcggcgccttcgt

SEQ ID NO: 403 - DNA, 379 bp, Glycine max
gacccccaaactctgcatcggaagaaaccctagccactctcccggcgtcacgatgcagatcttcgtgaaaaccctaacgggtaaaacgatcacgttggaggtggagtcttcggacaccatcgacaacgtgaaggccaagatccaggacaaggaaggcatccctccggaccagcagcgcctcatcttcgccgggaagcagctggaggacggccgcaccctcgccgactacaacatccagaaggagtccacgcttcacctcgtcctccgcctccgtggcggcgccaagaagcgcaagaagaagacctacaccaagcccaagaagattaagcacaagcacaagaaggtcaagctcggcattcttcagttctacaaggtcgac

SEQ ID NO: 404 - DNA, 77 bp, Glycine max; identical to SEQ ID NO: 357

SEQ ID NO: 405 - DNA, 346 bp, Glycine max
gagaactctgtaagcggatctcctttagtcctttgtctccgttccgtcgtcaaccctacctttggatctgcgtttggccttcaggttttgaagtccgaaggacgaagaagaagagattcctgacagcgtaatcatgtttggtgtcataaggcgaagggttgcctctggcagcccgtctccttggttgctaggtcagtcagctcagaaaatccggtctggcccatcagtttctgctagagcttcttccattgtggaaaaagagattgtatttcgttcaggcggatgtggatttgtccagaacttcagtcatataactcctgtaagctggattaattcaaagcctatg

SEQ ID NO: 406 - DNA, 272 bp, Glycine max
gagggttgtaacagtgtgaaagagagggggtcccaagtggaatttattgtttctacctatcgcatgcatccgttttgttttctttttattttagatgtggtgttgtgaaatctaatggcatgcttagaaatgtacaacaactcagagcacaacaagaacaacaagggtgataatcatcaccatcatcatcaatgcgctccaatgagcccaagaatctctttctcaaatgattttgtggatgtgcaacaagccatgaagctgcaagaacaaag

SEQ ID NO: 407 - DNA, 317 bp, Glycine max
  modified_base (290)..(290): a, c, g, t, unknown, or other
gagcaacatggtgaagctggtggagagatttacttgccagaagcttacgttagaaccaagaggactacttaatggagcaaatcagttggaagaacttgtagctagcttcccaactggcttatctgagtgtggagaagcattatcaagccttaggagtaggagaacgagtactgtttgtgatgaatgtctatggtttaagaaatctgtctttagtcaacttgtgtgttttgttattcagttctcagcaataaactgctctggcaatctagtttcatgtacaaaagacatcngtaagtgaacaaaaaaaaaagcggccg

SEQ ID NO: 408 - DNA, 372 bp, Glycine max
gaagagtgatccttctacactaactaaagccgagcagcgagagagagaaaccctagcaaaaatgccggctggtcacggtttgagatcccgcaccagagattccttctctcgtcccttcaggaagaagggtaccatcgccctcaccacatacctcagaacctaccacgtcggcgattatgtcgacgtcaaggttaacggcgccgtccacaagggaatgcctcacaagttctaccatggccgcaccggtcgcgtctggaatgtcaccaaacgtgctgttggggtcgaagtcaacaagcaggtcggcaacagaatcataaggaagaggattcacgtgcgtgtggagcatgttatgccatcaaggtgcactgagga

SEQ ID NO: 409 - DNA, 369 bp, Glycine max
agaccacgcgtccgagccactctgtcttctctgcagcaactatgcctaaccctaaggtcttcttcgacatgaccatcggcggtcaatctgctggccgcatcgtgatggagctctacgccgacgtcactccccgcaccgccgagaacttccgcgcgctttgcaccggcgagaagggcgtagggcggagcggcaagcccctccactacaagggctcgtccttccaccgcgtgatcccgagtttcatgtgtcagggtggcgacttcaccgccggaaacggaaccggcggcgagtcgatttatggcgccaagttcgccgacgagaacttcgtgaagaagcacaccggtcccggcatcctctccatggcgaacg

SEQ ID NO: 410 - DNA, 57 bp, Glycine max
gagacctcaggtcaggcggggctacccgctgagtttaagcatatcaataagcggagg

SEQ ID NO: 411 - DNA, 222 bp, Glycine max
ggcccttctagctttttcccagtccaagcagcctccaattcgtgccactctcttcaaaatggccgttaccttctcaaatctccacacagaatcaggtctcaagtccctcgacgacttcctctctgggaaggtctacgtttctggggatcagttcacaaaggacgacatcaaagtgtatggtgctgttttggagaagccaagtgactcttttcccaatgctgc

SEQ ID NO: 412 - DNA, 386 bp, Glycine max
gatgccgaaaagtagtaccaagatggcttcagttgtgtatctcctctttggcttccatctcattgttatcatgtcaagttccttacccgcaactagtgaagtgtttgcaaaacagtatccatccacagaacccgtggaagaaaaactcacccaactccacttctatttccataacaacataacgggggaacacccaactgctatgaaaactgttttgcctcctaaggggtccattcatggttttggggctacttacatgatggatgaccctctaactgaaggaccaagtccaacttcaaagcttgtgggaagatctcagggaatatacgctttggcttcacaacatgagcctgggttgctcatggtgacaaaatttctcttcactt

SEQ ID NO: 413 - DNA, 365 bp, Glycine max
atttgtccagactttaacaaatctttgtttatggggagccaaccatgtttgtttgacatagtcaacaaacattggccatggtgagcaagcaatttcaaacttcataaggcagtcattaaactcttgctcaaaaggacaatcctccagactctcctatgcttccatgacataatctcatacattttttttttacccacaagagttttacattttgtcgtcacattcttattaatgtgaaaccgacacaacaggttggttgactcaaggaaaatagtttttactacattcatcaatgctgaatctttgtcggtaacaataacttgagggattgtatcacgtctcagaaaattacctcgaaaccgttc

SEQ ID NO: 414 - DNA, 261 bp, Glycine max
ggcacttgccatgcgttttacaatttacatcacatttcgttgcgcctttgatctctgtccccgctgcgtctctcgtaatcatgcctaagcaaatccacgagattaaggatttccttctcactgccagaaggaaggatgcgaggtcagtgaagatcaagaggagcagagatgtggttaagttcaaggtcagatgctccaagtacctctacacactttgtgtgtttgacccagagaaagctgataaattgaagcaatctcttc

SEQ ID NO: 415 - DNA, 340 bp, Glycine max
agcaacatggtgaagctggtggagagatttacttgccagaagcttacgttagaaccaagaggactacttaatggagcaaatcagttggaagaacttgtagctagcttcccaactggcttaactgagtgtggagaagcattatcaagccttaggagtaggagaacgagtactgtttgtgatgaatgtccatggtttaagaaatctgtccttagtcaacttgtgtgttttggtaatcaattctcaacaataaactgctctggcaatccagtttcatgttcaaaaaaggaaacttacaagatgggaaggccatcaacagaattgaccaactcgaacttcaaaa

SEQ ID NO: 416 - DNA, 334 bp, Glycine max
gatctggcagcagaagaacaagtagttgagaactaagaaggagaagcaaatggcttcctcaatgatctcttccccagctgttaccactgtcaaccgtgccggtgccggcatggttgctccattcactggcctcaagtccatggctggcttccccaccagaaagaccaacaatgacattacctccattgctagcaacggtggaagagtgcaatgcatgcaggtgtggccaccagttggcaagaagaagtttgagactctttcctacctgccagaccttgatgatgcacaattggcaaaggaagtagaataccttcttacgaagggatggattcct

SEQ ID NO: 417 - DNA, 341 bp, Glycine max
ggactcgcagttgtattgttgaacaagggtttctctgtctgcttcttcactttctctcgtttcaatcgaaaccaaaacaaaaacatgggcagaaaattcttcgtcggtggcaactggaaatgcaatgggaccactgaggaggtaaagaagattgttactactttgaatgaggctaaagtccctggagaagatgtcgtagaagttgttgtgagccctccttttgtgttccttcctgttgtaaaaagtttgctgcgccctgatttccatgtttcggcacaaaactgttgggttcgcaaaggtggtgcttataccggtgaggttagtgctgaaatgcttgttaa

SEQ ID NO: 418 - DNA, 385 bp, Glycine max
gaactacttttccctccaatttcgcttcaccacacatgcatggattctttgattttcatcttctctcgcgttttctgattctgatcttaggatagttgttaacagagtgatttgggagcttttgatatgtcgagtggatccgtgagacgggtttcccgtcaagatatccagctggtgcaaaatctcatagaacgatgtctacaactgtatatgagccagaaagaagttgtggaaacactattagctcaagcaaaaatagagcctggtttcactgaactagtttggcaaaagcttgaagaagaaaatgaagaattcttcaaggcttattatgcaagattggttttgaagcagcaaataatgcaattcaacaaattgctggattagc

SEQ ID NO: 419 - DNA, 303 bp, Glycine max
gagcgccaatgtttttttcagaggagtttcatcttgtaatcaaaagagtttatcttatagtaagaaatcgatgtcttactccattttaaggaacaaaacaagagaacaatagcctgacaaagggtttagccataaaatcgaatccatcattgatttgagatattgataaggtgaatactcatttctcgtcaatgctaggcataatgcgggtatagggacctaaaaaagattatcttttcttcctatcttatgaactttaaggtgtatgaagtgtcatttcctatcttagattttaattttagt

SEQ ID NO: 420 - DNA, 315 bp, Glycine max
gctctctcaatcacttcacgcacactgtcacaggtgtagcggcgaaactgaggtcgtagaaagaatggcgaaaacgacgtcgttgttgctctttacactgctcctcttcggaaccttagctctcatccaggcgaagaaatcgaaggaggatttgaaggaagtgacccacaaggtttactttgatgttgagattaatggaaaagaagcaagtcgtattgtgatgggtctttttggaaaggctgttccaaaaactgcagaaaactttcgagctctttgcactggggaaaagggaactggtaaaagtggcaagcctct

SEQ ID NO: 421 - DNA, 355 bp, Glycine max
ggtttaggttttcttagtcagacttaccccttgctaccaacactgagcttaaccgagcttcgcaaagatgaatcgggaaaagttaatgaagatggccggttcggttagaactggaggaaagggtactgtgagaagaaagaagaaggctgtccacaagacaacaaccacagatgacaaaaggcttcagagcaccctgaagagaataggggtgaatgccatccctgctattgaagaggtcaatatctttaaggatgacgtagttatccagtttctaaatcccaaagttcaagcatccattgctgctaatacttgggttgtcagtggttcaccgcaaacaaagaagttgcaggatata

SEQ ID NO: 422 - DNA, 333 bp, Glycine max
gaaggatcagcagggagaattaggtttttagggtttacaccgagcagccacacctcccgcagcagccatggttctcaaaactgaactatgccgattcagtggtgccaagatctacccaggaaagggcatcagatttgttcgtggtgattctcaggttttcctgtttgcaaactcaaaatgtaagaggtatttccacaatcgcctgaagccttcaaagctcacctggactgcaatgtacagaaagcaacacaaaaaggacattgctcaagaagctgtgaggaagaggagacgtgctgccaaaaagccttactctaggtccattgttggtgcgac

SEQ ID NO: 423 - DNA, 388 bp, Glycine max
gaccacaccgagtcgcagaaaaagaaaaaagcgatcatagtttcacttcggccttatccagtttagggtttcggttctctaccctatctttcacgtatcgaaaccttaaatttacgatcaggtctgagcaatctggttggtagaacctttggtcttagtgagtcaagttttatgtctgaattagacgatcaaattcctactgccttcgatccttttgctgatgcaaatgctgatgactcgggtgctgggtcaaaggagtatgtgcatattcgtgtacagcagcgaaatggtaggaaaagcctgacaaccgttcagggattgaaaaaggaattcagctataacaagatacttaaagacgtcaagaaagagttctgttgcaatggaacag

SEQ ID NO: 424 - DNA, 151 bp, Glycine max
taccggtgccaaaagaccaccgaaaggtaccggttccagaagaccacagaaagataccggtgccaaaagaccacagaaaggtaccggtgccaaaagaccaccgaaagggtaacggttccggataccacccgaagggaattcttttcctccc

SEQ ID NO: 425 - DNA, 333 bp, Glycine max
gacacagaacaaaaacaaagaaaaaaaaaaacccttagccaacacaaccatcatggccacctctgctattcagcaatcagcattcactggtcaaactgctctgaagcagctcaatgagttcgtccgcaagaccggtggcgccggcaaaggtcgcactaacatgcgccgcaccgtcaagagtgctcctcagagcatttggtatggccctgaccgtcccaagtacttgggtccattctcggagcagattccatcatacctgaccggagaattccctggtgactacggatgggacactgctggattatcagctgacccggaaaccttcgccaggaa

SEQ ID NO: 426 - DNA, 283 bp, Glycine max
agggctatagctcagttaggtagagcacctcgtttacacgagcgccaatgtttttttcagaggagtttcatcttgtaatcaaaagagtttatcttatagtaagaaatcgatgtcttactccattttaaggaacaaaacaagagaacaatagcctgacaaagggtttagccataaaatcgaatccatcattgatttgagatattgataaggtgaatactcatttctcgtcaatgctaagcataatgcgggtataaggacctaaaaaagattatcttttcttcct

SEQ ID NO: 427 - DNA, 342 bp, Glycine max
ggggttttctccttcttctcctccctctgcctgcagcggtgcaacctatcagcctccaaatccaatggcttcagagaagaaactgtcgaacccaatgagggagatgaaggtgcagaagctcgttctcaatatctctgttggagagagtggagatcgtctcaccagagccgccaaggtgttggaacagcttagtggccaaaccccagtgttttccaaagcaaggtacactgttcgttcctttgggattagaagaaatgagaagattgcatgctatgtcactgtcagaggtgacaaggcgatgcaacttttggagagtggtttgaaggtgaaggaatatgaact

SEQ ID NO: 428 - DNA, 336 bp, Glycine max
ggtgccccatatcttccaccctttggctattcctaaccattgagtacaacttcacattttagaagaataccccctcttttgctgcatcagaggagttgtaaattaagagcatggctgcacaagctcttgtatcatcatcttctcttaccttctcagcggaggctgcaagacaaagtcttggaccaagatcactccaatctccatttggcttctccagaaaagcctcctttcttgttaaggcagctgctaccccccctgtcaagcaaggatcagacagacctttgtggtttgcatcaaagcaaagtctttcttacttggatggcagccttccgggtg

SEQ ID NO: 429 - DNA, 366 bp, Glycine max
gggagatttgatgatgtcaccagtaaccaaaggccttcttgctagaactagaaggggtggtggtgcggtgttaccacctgggggtaaaaatcgaccaaagattctagacatgcccttgaaggatgtcggtcctatccagaacaagcttccaatgcttattgatgagaagatcaactcagcttgaaggattcaaaggacttttgttcaacatgataattcatttgacagtggttcaaagggagtttaaagatgatgatgtaataacaataacatcacacagagagagaaagagagagtttatctccttgttcccatgttaaacaactctgttctgagattataagcttatgaagtttgtgatgctca

SEQ ID NO: 430 - DNA, 368 bp, Glycine max
gaatattaaacatcgaatctttgttcaattgcgaggcaaagcaagcaaagcacaacacaagatggggatacttagtccagaacagctccgattcttcaactctcaaggttatcttgtgattgaatctttcgcatgtagcgatgagattgagtccatgatgaagaggatggagcagtcggtagatgactttgacccttcttccaccgcctctattttctccaccaagaaccagcaacagtcgactgataattactttttcgacagcgccgagaggatttctttcttcttcgaggagaaagcatttggtaatgatgctcttcatgagattgagccagcattcaaaaagttttcttcctctgagaaagttt

SEQ ID NO: 431 - DNA, 346 bp, Glycine max
ggtcgtaaccctaaaatcagaaccagtggcactgacacaaaaaatatctgttcctctcgatcgaactcactcagtcatttccctctctgcgcgcgcgcttctcattcacagtcacagttcatggcggaggaagaagttgtggcacccgctgctagccccgttccctctgataacaaacgcaagctcgaagatctgcaacccgaaaacaccgaatctaatgccaactccatctccatctccgacgccgagaacgccgatgccgcggtttccgccgagaccgagaacaagcgcctccgcctcgacgaccaccaggatggcctcgctaataatacaaatgggcatcaag

SEQ ID NO: 432 - DNA, 357 bp, Glycine max
ggccgaaaagtattacgaagatggcttcagttgtgtagcgcctctttggcttccaactcaatggtatcaagtcaaattccttacccgcaactagtgaagtgtttgcaaaacagtagccatccacagaacccgtggaagaaaaactcagccaactccagttcgatttccataacaacataaccggggaacacccaactgccatgaacactgttttgcctcctaaagggtccattcatggttttggggctacttacatgatggatgacactctaaactgaacgatcaagtcgaacttcaaagcatgtgggaagatctcacggaagatacgctttggcttcacaacatgatcctgagttg

SEQ ID NO: 433 - DNA, 365 bp, Glycine max
gagagtggtggagtgtgcaaaagagcgtcgtagtcgcaaccctaatcagaagaagcgcagcttcaagcgagtgacagccaccagccatgggtcgtatgcacagccgcggtaagggtatatcctcttctgctttgccctacaaaaggacacctcctagctggctcaagatctcttcgcaagatgtcgaagaaaatatctgcaagtttgcgaagaaaggtttgaccccgtctcagattggtgtcattctcagagattctcacggtattgctcaggtcaatagcgtcactggcagcaaaatccttcgcatcctcaaagctcacggacttgcgcctgaaattccagaggacctgtaccatttgattaag

SEQ ID NO: 434 - DNA, 370 bp, Glycine max
gatgccgaaaagtagtaccaagatggcttcagttgtgtatctcctctttggcttccatctcattgttatcatgtcaagttccttacccgcaactagtgaagtgtttgcaaaacagtatccatccacagaacccgtggaagaaaaactcacccaactccacttctatttccataacaacataacgggggaacacccaactgctatgaaaactgttttgcctcctaaggggtccattcatggttttggggctacttacatgatggatgaccctctaactgaaggaccaagtccaacttcaaagcttgtgggaagatctcagggaatatacgctttggcttcacaacatgagcctgggttgctcatggtgaca

SEQ ID NO: 435 - DNA, 318 bp, Glycine max
ggtagttctaacttctaagcccttgcccaatgctcaacgaggcttaaaccctttcggcggcagcgaaaaaagtctccccgcccccaaacccaaacaatgatgaagaagaaacaatggttcagaagacccgttgtcataaaaaagccgaagcaaccgcaagagcaacccagcgttgatcctaatacgggaaagaaaatccccaaaagtttcgtgttttcgcgatgcaaattgccggctcctctcaaacagcttcagatggacctcagaaagttgatgcttccataaactgctctcagccttagggaaaagaaactgaat

SEQ ID NO: 436 - DNA, 372 bp, Glycine max
gataacagacctaatcaatcagtcatacgaatttccagaatacaaattcacactctctttggctctggtgttgtgttgtgttgaggtacttgagaagagaaaatggtgtcgtcgcaggttgtgaatacgtacccgttgtcgagctacacgttcggcacgaaggagcccaagatggagaaggatacctccgtcgcggatcgtctcgctcgcatgaaagtcaactatatgaaggagggaatgaggaccagtgtggaaggaattttactggtacaagagcacaatcatcctcatatacttcttctgcaaattggaaacacattctgcaaactcccaggtggtcgtctcaaaccaggagagaatgaaaatgagggc

SEQ ID NO: 437 - DNA, 321 bp, Glycine max
  modified_base (308)..(308): a, c, g, t, unknown, or other
ggctccgccatttttcgtagctgctgttcttgcgcgtgaacaagcctcagccaaaaccatggttaagcataacaatgttatcccaaacggacacttccgtaagcactggcagaactatgtgaagacttggttcaatcagccagcacggaagacaaggagacgattggctcgtcagaagaaagctgtgaagatattccccagacctacggctggacctctcaggcccattgtacatggtcaaactttgaaatacaacatgaaagtgagaggtggaaggggattttctcttgaagaactcaaggcagcanggattcccaaaaa

SEQ ID NO: 438 - DNA, 293 bp, Glycine max
gactcatgggctgcgtctcctcaaaacacatcaagaaagaccttaagcaagaagaagtcattgccaccaatggcggcagttacgtgaaccacgtcgtatccctcacttcctccacctatggagcactcatgttggacaaggagaaggagcaacaccaacttcaactccccgtcgaagaatccaaaacatctccacctcggattcgcgaagaacccgaagttatcaacgcttgggaactcatggagggtctcgaagagggagtgcccatttcaaacaaccccatgaaaatcccc

SEQ ID NO: 439 - DNA, 304 bp, Glycine max
agggagcaacatggtgaagctggtggagagatttacttgccataagcttacgttagaaccaagaggactacttaatggagcaaatcagttggaagaacttgtagctagcttcccaactggcttatctgagtgtggagaagcattatcaagccttaggagtaggagaacgagtactgtttgtgatgaatgtctatggtttaagaaatctgtctttagtcaacttgtgtgttttgttattcagttctcagcaataaactgctctggcaaaaaaaaaaaaaacaaacaaacaaaaaaagcggccgct

SEQ ID NO: 440 - DNA, 322 bp, Glycine max
ggaacctttgcattctattcattcaagattcagcaagtgcgttttggaagcagagaccgaaatacttcgagatggcccgtacaaagcaaactgctcgtaagtcaactggaggaaaagctcccaggaagcagcttgcaaccaaggctgcacgtaagtctgcaccaacaactggtggtgtgaagaagcctcatcgttatcgccctggaactgttgctcttcgtgagattaggaaataccagaagagcactgagctcctaatcaggaagcttcctttccagaggttggttcgtgaaattgcccaggatttcaagactgatctgcg

SEQ ID NO: 441 - DNA, 324 bp, Glycine max
gattcacacaactaactaagaaagtcttccatagccccccaaaaatgaagagcaccatcttctttgctctctttctcttttgtgccttcaccacctcatacctaccttcagccatcgctgatttcgtgctcgataatgaaggtaaccctcttgaaaatggtggcacatattatatcttgtcagacataacagcatttggtggaataagagcagccccaacgggaaatgaaagatgccctctcactgtggtgcaatctcgcaatgagctcgacaaagggattggaacaatcatctcgttcccatatcgaatccgttttatcgccg

SEQ ID NO: 442 - DNA, 389 bp, Glycine max
aggagtgtaggagtggctcttggtttgcacttgggtggtacctttctctctactacttgtgttgtgttgtgtgtgtgggggttcagttcagcctttgattccgatggatcttcacggaaacccccacaattctgggatgaagaaacgaaagccggagcaggatactttgatcagtgatcatggaaattctgtgagtgtgggagagtcatctgggagtggcgatctctgcaagagttctacctcaggatcactgaattcaaacaatcaaaatggttccaattctgatatttcatgtcatgatgatgaggatatgattgatgatgatgcagatatgattgacgatgacggagatgaagatgctgattatgcttttgattacaatgaagatg

SEQ ID NO: 443 - DNA, 310 bp, Glycine max
ggccattgttgttgctattatcatccgcagctgcttttattcgcaccgcaaacagtgagccatggccgtcggaaagaacaagcgcatctccaaggggaagaagggtggcaagaagaaggcagctgatccctttgccaagaaggattggtatgacattaaggctccttctgtttttcaagtgaaaaatgttggcaaaaccctcgtctctcgtactcagggtaccaagattgcttctgaaggactcaagcatagagtgtttgaggtctccttggctgatcttcaaggggatgaggatcatgcattcaagaag

SEQ ID NO: 444 - DNA, 275 bp, Glycine max
gaaaatagagaaaacacaaaaagttctgttctttttcccacccaattcagttttctcaaatggctcgtacgaagcaaacggctcgcaagtccaccggcggcaaggcgccacgtaagcagctggccaccaaggcggctcgtaagtctgctccggctaccggcggcgtgaagaagccgcacagattccgtccgggaaccgtaacgctccgcgagatccggaagtaccaagaagagcacggaacttctgatcgggaagctcccgttccagcgattggt

SEQ ID NO: 445 - DNA, 318 bp, Glycine max
gaaaaccgagtgagtgtgagcgttaactacaacgcaatggtttacataacttcgtgggatgaattcgtggagcgatccgttcagttgttccgtgccgatcctgattctacgcggtatgtgatgaagtaccggcattgtgatggcaagttggtactcaaggtcactgataataggcagtgtctgaagtataagacagaccaagcacaagaagccaagaagatggtaaaactcactaatatattctttactttgatggctcggggaccagaagtggatccatcagaagtcactgggaaagaaccactggatacacatacg

SEQ ID NO: 446 - DNA, 307 bp, Glycine max
ggatccttctacactaactaaagccgagcagcgagagagagaaaccctagcaaaaatgccggctggtcacggtttgagatcccgcaccagagattccttctctcgtcccttcaggaagaagggtaccatcgccctcaccacatacctcagaacctaccacgtcggcgattatgtcgacgtcaaggttaacggcgccgtccacaagggaatgcctcacaagttctaccatggccgcaccggtcgcgtctggaatgtcaccaaacgtgctgttggggtcgaagtcaacaagcaagtcggcaacagaatc

SEQ ID NO: 447 - DNA, 314 bp, Glycine max
ggcgaaacagagagtgatttcagtgagtgatcggtgttcacttgatctcatcataatcgtcagcgtcaattgaagaagatgccgatcagaaacatcgccgtcggaaggcctgaagaggcgactcaccccgacacgttgaaggcggctttggctgagttcatctcaaccttcatcttcgtgttcgccggctcaggctccggcatcgcctacaacaagctcaccgacaacggcgctgccacccctgccggcctcatctccgcctccatcgcccatgcattcgccctcgtcgtcgccgtctccgtcggcgccaacat

SEQ ID NO: 448 - DNA, 310 bp, Glycine max
gggtgctggtggtgcagaaagggccattttctgaatgcgctctatctatctcttccgatctggctactaaccctaacccgcttcgaaccgtggcttcctcggcctcgcagaacctctctcgaagaaaatcttcttcttcgtcttcgttttctcaacaaacttccgggtcgacccggatcgtttaccgcgaacctcggatcccatcggaatccaattttccgatctggcggcagaactggttcatcgcattgctcttcctcatggctctcggattcttcgccctcgctctcttcctcgtcaacactttcga

SEQ ID NO: 449 - DNA, 322 bp, Glycine max
gatgaaattgacttctttgggttcggcggtaccctacacttagttgttgtgttgctgtgcacccggtgagcggtgacctcttccgctttgatcttcttctgtccaggctggttacttgggtcaaagatttctggcatctctgtcatggcaactagacttcagtttgagaataattgtgaagttggagtcttctcaaaacttaccaatgcctattgtttggttgctattggaggttccgaaaacttctacagtgcatttgaggctgagttagcagatgttatccctgtggtcaagacctccattggtggcactcgtattgttg

SEQ ID NO: 450 - DNA, 386 bp, Glycine max
  modified_base (371)..(371): a, c, g, t, unknown, or other
aattcgccgctcgacccactcaataacggtgccaaaagaacaacagaaggggatccaaattcaatttcgcaccaaattttcctcccaaaatgtcaggccttggaaaaggtgggaagggtttgggaaagggaggagctaagaggcacagaaaggttcttcgtgacaacattcaaggaatcacgaaacctgcgattcgtaggttagcgagaagaggtggcgtgaagaggatcagtggtttgatttacgaggaaaccagaggagttctgaagatattcttggagaacgtgattcgcgatgctgtaacctacactgagcacgctaggaggaaaactgttactgctatggatgtcgtttatgctctcaagagacanggaaggaccctctat

SEQ ID NO: 451 - DNA, 272 bp, Glycine max
ggccgaaaagtagtaccaagatggcttcagttgtgtatctcctctttggcttccatctcattgttatcatgtcaagttccttacccgcaactagtgaagtgtttgcaaaacagtatccatccacagaacccgtggaagaaaaactcacccaactccacttctatttccataacaacataacgggggaacacccaactgctatgaaaactgttttgcctcctaaggggtccattcatggttttggggctacttacatgatggatgaccctcta

SEQ ID NO: 452 - DNA, 326 bp, Glycine max
ggaggtttctcaaaatctcaataatccctttgttgaaaccaaaacgacgacgcgtcacttcactttcatgtatctgcgtgtctcgtcgtttctacttgctgttgctgttgctgttgttgattagcctcattcactcactcactcactcactcactcgctcgcaaccacaaccttggatttcaattttttttcattcatggcttcgaccaccacctcctccctctgcacgtggctcgtcgctgcttgcatgtcagtcacgtgcgacgccgaccgcaccagaacccctcacgcaatcttccgctcctccaaaaagtctcgcaagtctc

SEQ ID NO: 453 - DNA, 338 bp, Glycine max
ggccgttttcttcttcatcatagtcgtggccgtgtcgcagcaaaaccaaaccacatattaacttgtttgctctaagtcatggctctgatcttgcacgcaaccaaagcaaacaagaatgctttcaagactctgattgcggcagagtacagtggcgtccaagtggaattggcccctaatttcgagatgggtgtctctaatagaactcctgaattccttaaaatgaatcccataggaaaggttcctgtcttggaaacgcccgatggtccagtctttgagagcaatgccattgctcgttacgttgctcgactcaagggtgacaacgctttgttctcatcttc

SEQ ID NO: 454 - DNA, 341 bp, Glycine max
gaccgtgcgctagttctgagtattctgatcgctccctgagagagctcgtcgcggcggttgcagaagaagattgcaagatgaagttcaacatcgcgaatcccaccactggatgccagaagaagctcgagatcgacgacgatctgaaactgcgagcattttgggacaagaggatctcacaggaggtcatcggagatgcactcggtgaggaatttaagggctatgtcttcaaaattaccggaggttgtgacaaacaaggatttccaatgaagcagggagtgctgactcctggtcgtgttagacttttgcttcacaggggaactccttgcttccgtggatatgga

SEQ ID NO: 455 - DNA, 358 bp, Glycine max
gaaattaaatcgttcaacactggaactctttgatataatatagaaagagacagagagagagagacagacaagaagaacaaagatgcaatcttcaaaggagaagctgaaaaacatgaccagtgctgccaaggagcaagtcgacatctataaagcaaaaatagacgagaaggtcagcttttccatctctatacatccatatatttttgttccattatacaatgattcatttgtggcgtagctaggcatcaatatcatgaagttagaatcgtgatatatatttatatatgtatgtaacctcttcaacaagtttttttttttttttatgtcaaagcttgtcaaaattaatattatataattt

SEQ ID NO: 456 - DNA, 68 bp, Glycine max
aaccaagccttcataacggctgcaaaaaaacaacaaaagggctaaatgaattattgtttttcattaac

SEQ ID NO: 457 - DNA, 384 bp, Glycine max
gggcaaagtgagagtcagagatggtagctattggctttggagcccctccttctccacttccgtttcatcttcgcctggcttcctctccttctcctttggccttcccaataatccacaaattccaaaacgcaggcaagtcagtgataacaatctgttcaaagaaaaatgcaaaatcaagggtggtcactctctgctctgcacctgtgcaagagcaggaggttagtgatattactttgagagagagaagtgtttcggttgtcctattggctggagggcaaggcaagaggatgggagctagcatgccaaagcagtatcttcctctttttggtcaacccattgctttgtatagtttccacactttttttcacctggttcaagtcaaag

SEQ ID NO: 458 - DNA, 64 bp, Glycine max
gagaacaacataacataagaaaaacacacacacaaacaccctttgagttcattaacctcttcag

SEQ ID NO: 459 - DNA, 69 bp, Glycine max
gaacagcgctcagatcagaatgagataaattatttgatgaagtgttttgctgaagaaaaggctgcttag

SEQ ID NO: 460 - DNA, 360 bp, Glycine max
gactgccgcggaaacagaacagggactcactctcttcgcagcggcactctcggtggctttcatcttctcggggtgagttgtcaagatgtacacatcgaggaagaaaattcacaaggataaggatgctgagccaactgaatttgaggaatcagttggacaggcattgtttgatctagaaaataccaacaatgagctgaaaagtgatctgaaagatttatacataaactcagctgtccaaattgatgtttctggcaaccgaaaggctgtggttatccatgtcccctacagactaaggaaaggattccggaagattcatgtcaggcttgtgagagaacttgagaaaaagtttagtggaaaaag

SEQ ID NO: 461 - DNA, 380 bp, Glycine max
cgtaacgctttcgagacgtttccgtgagcaatttcatgaagattttccgtagttcttcgttcgttcttcgttcttcaaccggtaagttttcgaatccgtgactttcaattcatttcttgttttgtttgctttcatctttatttcgttcactttcggttttattttcttccttttttaacgagctttaactgatcgtttaagccgttatctcgcctaaagaatgataaaatgaattccaaccgatcatttgcgttgtaatctcgtttaatcactgttaaagcaaaatctaaccgatcgatcacattgtaaccacggttaaaccaaaaaaggcaaaataataataaaataatcaaaatatctttgaataaaataatcaaaaa

SEQ ID NO: 462 - DNA, 298 bp, Glycine max
  modified_base (249)..(249): a, c, g, t, unknown, or other
gctcttcacacctttgttcactcttcttctcttgcggctagggttttagcgcagcttcttctagatttaaggaagatgggtaaggaaaaggttcacatcagtattgtggtcattggccatgtcgactctgggaaatccactaccactggtcacctgatttacaagcttggaggcattgacaagcgtgttattgagaggtttgagaaggaagctgctgagatgaacaagaggtctttcaagtatgcctgngtgctggacaaacttaaggctgagcgttaaagaggaatcaccattgata

SEQ ID NO: 463 - DNA, 337 bp, Glycine max
  modified_base (298)..(301): a, c, g, t, unknown, or other
  modified_base (303)..(318): a, c, g, t, unknown, or other
ggagagtagaaacaaaaagaaaaaaaacattgtaagcgctgtaacagcaggtttcggaggcttttggggtagccgacgagacacagtggattccttaattctccatggatatggagatgaaagaaggtgaagcccccgtgttgtggttcgaaacccctgactctgtctgtcgtcgacaccagtttgaacccgatggtcaactctccgtagtgattgtcgatgattccaggcccttataccaaagggtggctggatctttcatgaataaatttttcccctcgggggagagtagaaacannnnannnnnnnnnnnnnnnnaaaaaaaagcggccgctct

SEQ ID NO: 464 - DNA, 271 bp, Glycine max
gacaccgcaaactctctctgtaaagtgcaaagcctctattttttcttgtgaatttgaaggacgatgagttccacagaggtcgcagccacaacgaagaagggtggaagagggaaacccaagaccacaaagtccgtttcccgttcctccaaagccggccttcagttccccgtcggccgcgtcgctcgctacctcaaggccggtcgctatgcccagcgcgttggttccggttcccctgtttacctatctgcggttctcgaataccttgccgctg

SEQ ID NO: 465 - DNA, 356 bp, Glycine max
gattctcccacaacacaacaccttttccttttcccttccgttggtgccattcgtgcagcaccggatcctctcatttctccggcgataactctcccttttccggcgaattcaccgcttcctcgatatgaatcccgagtatgactatctgttcaagctccttctgattggagactctggtgttggtaaatcatgccttcttctaagatttgctgatgattcatacattgagagctacataagcaccatcggagttgattttaaaattcgcactgttgagcaggatgggaagacaattaaactacagatttgggatactgctggacaagaacgatttaagacaataactagtaactact

SEQ ID NO: 466 - DNA, 307 bp, Glycine max
gactcatctcttacaacgaaaccctcttcatcttgttctatctgtgacgagcatcatggcctcaagagcagtgttattgttggctatgtgtgtgcttccggcgatggttgtggccattcgcccagcaaagaaccctttttgcgtgaagggtcgtgtctactgtgacccttgccgtgctggttttgagacctcagctaccacctacattgctggtgctgagattatgttgcaatgcaagagcagggttagcaacgaggttgtgtacacgaagaaggggtacaccgactcaaccggagcatacacaatg

SEQ ID NO: 467 - DNA, 308 bp, Glycine max
gacacgttaacatatccaacccatttcatcgctcttcacataaacttcaagcgagcaaacaaacaactagcaagggaagaaagaaactacagaaaagaaatggcttccacttctgcagtttcaatggctatgccagtaacttatgctagccagaagagggtggtgcctagctcggatgcattcttcaagccactgcctctacggtcttccaaggcagtgacagcatcaaaactcaatggaaggtttcaagtgagggcctccatgaaggagaaagttgtgacggggctcaacgcagctgcattgacagc

SEQ ID NO: 468 - DNA, 320 bp, Glycine max
gactcactcatacaatagagaccagcttttgcttctttgtgaacatggagatgaggaaatcatgtggcttcttcttcttgctcctcctccttgtctttgcttcccaagtggtggtgcagacagagggaagagtgtgtgagtcacaaagccacgggttccatggtttgtgtaatagagaccacaactgtgctttggtctgcaggaacgaaggtttctccggtggcaggtgcaaaggcttccgccgccgctgcttttgcaccaggatttgttgagatctcatcaaacactactcttgccatgcaaattaataaatcatagct

SEQ ID NO: 469 - DNA, 291 bp, Glycine max
gagggagagagaaaaaggagaaccttcttttctctgtttttttgttgttattcttcttccagacctaaagacccaaagcaccgattctgatttcaagaattacatcatcatatcaagaaaaccttggaactacacaaaaatggtgtcggcgaacaaggagatggtcgtgcactgctttgacaccctcctcgctcactacaacagcacggaagcacctcctcctgccttcgatcaggctcaacatccattgtttgttacatggaagaaagtggtgaatggtggagatcctcg

SEQ ID NO: 470 - DNA, 342 bp, Glycine max
gcacaccaagtcctgctcttcttccagagcaacaacaaacaaaccctttctttctggcttcagtttttgcagtgaaaatggcggtgactttaacatcaaccctctttatggctttgctatttgctgcttcagcttttgctgctcttcagcctagagtacctgaagcttaccttcaaaatggaaactttgaggagcagccaaaccccaaaaacctccagaaaacaaagctcatggggaaatattctttgcccaaatgggaagtcaatggtctggttgagtatgtctctgggggtccccaacctggaggcatgttcttcccagtgactcatggaatccatgctg

SEQ ID NO: 471 - DNA, 298 bp, Glycine max
ggtgattgagtttggctgtcataatctctctctcatccgaaaatgtcactcaccttgcaaactccgccttctacaactctctcttctgcatctcccattcacagaacaataacaagatacaccacattctccttctcgcttcgtcctccaacaactcttcacttcaatccccacaggtccctccctctaattcgcgcttccaattcttctatcaatgccgcttcgaccactgaactggacgctgtgtccgccttcagcgagatcgttcccgacaccgtcgttttcgatgatttcgaaa

SEQ ID NO: 472 - DNA, 387 bp, Glycine max
cccgggctcaaccaagccttaataacggttgcaaaaagacaacagaaggggtctgttaacaggcttcgctatcatttttcggagcaatctgcttctgcatcaaggaaggacatcttgttcttcactatcaactagtatgttgtcaggtgaagatggtgtcactgcagttcaaccagctgctgctgctgctatcataccagacgaactagtggatatcatgactgtcttacatcttgtgatcagaacatcgctggattatggtgggttgtctcgtcgtcatcatggtggtgcaataattaatgagcatcatgctgcacaccgctgtcttcctgcagaatactgtgaccatgctgacgatgttcaactgaataacgccctttgtgcaca

SEQ ID NO: 473 - DNA, 77 bp, Glycine max
gtcagcttttgcctttgatacagtgccactgcattattaaacatttgaacgaattggtagatcatctttagatcccc

SEQ ID NO: 474 - DNA, 307 bp, Glycine max
gggcatagcaaaatcgtttctccaatttaatcgccattgtacaacccaattcccttcgtcgttttcgattaagagagcaatggcacgtaccaagcaaaccgctcgcaagtccaccggaggaaaggctccgaggaagcaattggcaaccaaagccgctcgcaagtcagccccggcgaccggcggagtgaagaagccccaccgcttcaggccaggaacggtggctctgagggagattcgaaagtaccagaagagcaccgaacttctgatccgaaaactcccattccagaggctcgtcagagaaatcgct

SEQ ID NO: 475 - DNA, 335 bp, Glycine max
gacacgcattcctcgattggaagactggcctgttatgcccgtggaacgcattggtttcatgcttatgccgcatgggtttttcaattgctcgcctgctgtagatgttccacctaacccaagtgatttggatgacaaagagaatggcttgccagccaagcctattcagaatgggctaattgccaagctttgaaaggataaaaaatgaggatctgccactttacgtggttatgttcaaattattaaattttcaatactattgtttgggctggtgttcaaaccttagctggataattaagaaacgcctatattgtagaaaaaaaaaaaggtgcaagaag

SEQ ID NO: 476 - DNA, 314 bp, Glycine max
gaattccaatatattccattctctctgtgtatttccctacctctcccttcaagatgcagatcttcgtcaagaccctcaccggcaagaccatcacccttgaggtggaaagctctgacaccatcgacaacgtcaaggccaagatccaggacaaggaaggaatccccccggaccagcaacgtctcattttcgccggaaagcaacttgaggacggccgtacccttgctgactacaacattcagaaggagagtactcttcacctcgtcctccgtctccgtggtggcatgcagatcttcgttaagacactcaccggcaag

SEQ ID NO: 477 - DNA, 347 bp, Glycine max
gattggaatgtggaaagagtctccgcagtcctcaccagaagcaaaaagactgggttttggcgttaacctaagcgaagagagagagaggttgaagaaggtgaattgaatggcttcctcatcctcttatcctcggacggaaggtgaagaagagtatgggtctgaatcgggatgggtggatgctcgaagttggtgcgatcacctggcatcatccttatcggaggatctagggcagattccggggcctgatactccgtgccagacctgccaacacccaactgaaaactggttgtgtctgtcctgtaagcaggtcctctgtaaccgttttgtgaacaagcacatgctccaac

SEQ ID NO: 478 - DNA, 240 bp, Glycine max
gcacttcaattgcaatcaaattagttcattctctttgcgcagttccctacctctcctttcaagatgcagatcttcgtcaagaccctcaccggaaagaccatcacccttgaggtggaaagctctgacaccatcgacaacgtcaaggccaagatccaggacaaggaaggaattccccggattagcaacgtctcatcttcgccggaaagcagctcgaggacgggcggtacctcgccgactaca

SEQ ID NO: 479 - DNA, 289 bp, Glycine max
ggtcaagcctgccgagaaaaccctagttcgcttgcagtcacacaagaggccaatcctattcacagctcgagatgggtgaagaagtgaaggtagttgttccagaatcagtgttgaagaagcgcaagagggaggaggaatgggcgttggccaagaagcaagaactcgatgctgccaagaagaagagagccgagagccgcaaactcatctacaacagagctaagcagtacgctaaggagtacgatcaccaggagaaggaattgattcggttgaaacgcgaggccaagctgaa

SEQ ID NO: 480 - DNA, 344 bp, Glycine max
ttctccactagtttccattacactccatacgcattttactaatccaaacaatgaaacataatgccattccattccatcatctaccaccaatccaaatataaccaaaagtatgaaatccacttaaagagcgaagttataaccacattaaaaatcgtaatagaataatatgcacacacacacataacaaatcatggaactattaaaatctcaaccatgaactttaaaactaacaaccataattccatattttatcctctaaaagtctaaagcacactcttaaaatcagatgaaccaaaccatccaagcaatgtcgcaaaaacctctaaaattaaacaagtcctccc

SEQ ID NO: 481 - DNA, 364 bp, Glycine max
gaccgccgttctcatctctcttcccagccctcacctcaacgctgcatcttcacgtcgtctcacgaggtgcatatagtagagagggaaaatgagtcgaggaggcgcagtagcagcagcgaagggaaagaagaagggtgctacattcaccattgactgtgcaaagccagtggaagataagatcatggacattgcttctctcgaaaagtttcttcaagagaggatcaaggttggtggcaaagctggtgctcttggtgacagtatcactgttacccgcgagaagaccaagatcattgtcacctctgacagtaacttttccaaacggtatttgaagtacttgacgaagaagtacttggaagaacacaat

SEQ ID NO: 482 - DNA, 320 bp, Glycine max
gagcgaaacagagagtggtttcagtgagtgatcggtgttcacttgatccttcataagtcgtcatcatcatcatcatcatcaccgttgattgaagaagatgccgatcagaaacatcgccatcggaaggcctgaagaggctactcaccccgacacgttgaaggcggggttggctgagttcatctccaccttgatcttcgtgttcgccggttcaggttccggcatcgcctacaacaagctcaccgacaacggcgccgccactcccgccggcctcatctccgcttccatcgcccatgctttcgccctcttcgtcgccgtctccg

SEQ ID NO: 483 - DNA, 329 bp, Glycine max
gacatctctctatcttctcaatcttcatctccaacaagtgtttctgtaaccatggcatccaccactctatcccctacaaccccttctcagctatgctcaggaaagagtgggattttcagtccctcacaggcacttcttgtgaagccagtgaagaggcagatgatggggaagagcaagggaatgagaattgcatgccaagccaccagcattcctgctgatagagtccctgacatgggcaaaagacagctcatgaatctgcttcttcttggtgccatttcactcccctctgctggaatgcttattccctacacctacttttttgtccctcc

SEQ ID NO: 484 - DNA, 328 bp, Glycine max
gagatctgctgcttctcattgttgaaaagaaaccctagcaagtggagcaatggcagacgttgaagtcgatgtggcggcagcagcagcagcagggctgccgaagaagagaacgttcaagaagttcagttttcgaggcgtggatctcgatgcacttctcgacatgtccaccgatgaactcgtcaagatgttcagtgcccgcgctcgtagaaggttccagagaggcctcaccagaaagcccatggccttgatcaagaagctccgtaaagcgaaaagggaagctccaccaggtgagaagccagaaccagtacgcacccacctccgcaacatg

SEQ ID NO: 485 - DNA, 253 bp, Glycine max
aggtgattttgagcattacatcttctaaatttgcattatattactctttttttattattattttagtggtttgtcttctgaacgggtagttctcagcctccttgcctgcttgaggcactttatagacttgtaaagaaaggtcaagttaatgaaacaagtttgcttaaaaaaagagaatcgaaaaaaaaaaaaaaaaaaaaaaaaaaaaaaaaaaaaaaaaaaaaaaaaaaaaaaaaaaaaaaaacacccaagg

SEQ ID NO: 486 - DNA, 327 bp, Glycine max
ggggtacactcaccacacactacacactagtttgtgtttttcgcgccactcagttattcatttagaaagctactgctgagttcacaagtttctcaagcttgatggggacacaaaagtctaatatgtttgatgcacctttcaaatacatggtgcctgaagataaggaaattcccgacagacctttgccatcacattggactccttctatgcaggcatataacacttctgggtctactccaactccctttttaaatcaacaggcagctggttctcacatgcctctctacatgtgggtaaatcaggtaaacaacacactacctcaatccg

SEQ ID NO: 487 - DNA, 305 bp, Glycine max
ggcagcgcttgagaccaagccccactcaaccaccacaccactctctctgctcttcttctacctttcaagtttttaaagtattaagatggcagagacattcctatttacctcagagtcagtgaacgagggacaccctgacaagctctgcgaccaaatctccgatgctgtcctcgacgcttgccttgaacaggacccagacagcaaggttgcctgcgaaacatgcaccaagaccaacttggtcatggtcttcggagagatcaccaccaaggccaacgttgactacgagaagatcgtgcgtgacacct

SEQ ID NO: 488 - DNA, 122 bp, Glycine max
gaagaagggttcgtagacagcccgaaagaaggtcctctcttcgtattctatagaaagacgaaatagcgtaagagaagaaagtagaaaggatttggattcgaggcttgctaggtgaagtcaac

SEQ ID NO: 489 - DNA, 326 bp, Glycine max
tccctatacttctttctctttctctctcactcagatttgtaaccattgcaattcgcaattccatctatcttctcttctcctccttatatattccactccgctgggtaccctctcccccttattcctcacttctcttctcttctcttctcttcgagggtacccctcctcgcagatccgatccgcacccttcactaaacccattattattgattattgattgataataacatttgggtttcattttcattccaagttgttgcatttttcaacatgtctttagctcactgctgaaccccttttctttctttctttgcccccttttgtcc

SEQ ID NO: 490 - DNA, 276 bp, Glycine max
gatagcaaaatcgtttctccaatttaatcaccattgtacaacccaattcccttcgtcgttttcgattaagagagcaatggcacgtaccaagcaaaccgctcgcaagtccaccggaggaaaggctccgaggaagcaattggcaaccaaagccgctcgcaagtcagccccggcgaccggcggagtgaagaagccccaccgcttcaggccaggaacggtggctctgaaggagattccaaagtaccagaagagcaccgaacttccgattcgaaaactccc

SEQ ID NO: 491 - DNA, 318 bp, Glycine max
ggttctagtgtgtgattgtttgttgttgtaactcgttcttcttcttttgttgttctgtgtttgtgtttgttttttctctcacctgaaaatgtcttgctgcggtggtaactgtggttgcggaagctcctgcaagtgcggcaacggctgcggaggctgcaagatgtacccagacttgagctacactgagtcaaccaccaccgagaccttggtcatgggagtggcacctgttaaggctcaatttgagggtgctgaaatgggtgtgcccgctgagaacgatggctgcaaatgtggaccaaactgctcctgcaacccctgcac

SEQ ID NO: 492 - DNA, 213 bp, Glycine max
  modified_base (73)..(73): a, c, g, t, unknown, or other
aaaaaaacaacaaaaggaaaaatacaaggtgaagtcaatcatgtccttcaactaacttgatggcaaggccaanatataacagttatagaaaaaaaaaggctattatgcttaaaaaaaaaaaaaagaagaatattacgaaactgtaaaataaagctcaaacaaagcaagttcaaccacaaaccagacttttaataaataacgtatattttctcc

SEQ ID NO: 493 - DNA, 319 bp, Glycine max
gactgccgcggaaacagaacagggactcactctcttcgcagcggcactctcggtggctttcatcttctcggggtgagttgtcaagatgtacacatcgaggaagaaaattcacaaggataaggatgctgagccaactgaatttgaggaatcagttggacaggcattgtttgatctagaaaataccaacaatgagctgaaaagtgatctgaaagatttatacataaactcagctgtccaaattgatgtttctggcaaccgaaaggctgtggttatccatgtcccctacagactaaggaaaggattccggaagattcatgtc

SEQ ID NO: 494 - DNA, 296 bp, Glycine max
gtggaacacacctgacacctgatccgcgagcgagggtttgtgaagatgacgacgattcgcaggttttgctgcaacgatcttcttcgctttgccgccgtcaatctcgaccatctcaccgaaacagtaagcgtttttttgtcctttttccatttgatactgaatctgactgtgtattcgcttaattgcttcattggtttagttcaacatgtccttctacatgacctatcttgcaagatggcctgactatttccacgttgccgaaggccctggaaatcgaatcatgggttacagtgagt

SEQ ID NO: 495 - DNA, 279 bp, Glycine max
agcaacatggtgaagctggtggagagatttacttgccagaagcttacgttagaaccaagaggactacttaatggagcaaatcagttggaagaacttgtagctagcttcccaactggcttatctgagtgtggagaagcattatcaagccttaggagtaggagaacgagtactgtttgtgatgaatgtctatggtttaagaaatctgtctttagtcaacttgtgtgtttcgttattcagttctcagcaataaactgctctggcaatctagtttcatgttcc

SEQ ID NO: 496 - DNA, 336 bp, Glycine max
ggttgtgtgagtgaagaagcagagggagtagcggcattaaaaatgtagatcttcgtgaaaactctgacagggaagactataaccctcgaggtcgagagcagcgacaccatcgacaatgtcaaggccaagattcaagacaaggaaggcattcctccggatcagcagcgtttgattttcgccggaaagcagcttgaagatggaaggaccctggccgattacaacatccagaaggaatcaacccttcatctcgtcctcaggcttcgtggtggcatcattgagccttccctcatggctttggctcgcaaatacaaccatgacaagatgatttgccgcaag

SEQ ID NO: 497 - DNA, 250 bp, Glycine max
gagtcacagtagggttaccttgcctcgcaaacgcagttgctttgctttgcaggtcgcaaaacgccacccttctctctctctctctcgtgatcctatctatctgtctatcatttaatttaatttcattctcttcctatcgaatctctctgcaacaccagcatccctgcatcaatgggcgcttctctgccccccaaggaggccaacctcttcaagcttattgtcaaatcatatgaaaccaaacaatattaaa

SEQ ID NO: 498 - DNA, 337 bp, Glycine max
ggcagtgtgtgctactttccattcgttcaccgccccaatctctgcagcgccttcgatctagaaaacatgactaagagaacaaagaaggctggcattgttggaaaatacggtacccgttatggtgccagtctgcgaaagcagattaagaagatggaagttagtcagcacagcaaatttttctgtgaattttgtgggaagtatgctgtgaagaggaaagctgtaggaatatggggatgcaaggactgtggtaaagtgaaagcaggcggtgcttatactttgaataccgcaagtgctgtgacggtacggagcaccatcaggaagttgaaggaacaaactg

SEQ ID NO: 499 - DNA, 298 bp, Glycine max
gattttgatagggtttataggaaaagcagcatacccgagttcacaaacactgaacgccgctgctccgtagtttcgatcgacgcattcttcacttcaagatatcacagtgtctatagcgcacagcctcactactccactctcttcttcttcctctgctttcttagctccttcttccttcaattgcaggggacaggtttcgttgcctgtgaagagcgtgagcatttgcaaatgcgttgccacacccgaagctgagactgcctacaagacaggggtcaatcgcaatccagatatggggaaa

SEQ ID NO: 500 - DNA, 102 bp, Glycine max
gacgccgttagacgtaacggcgggaggtacggtggtggtgttgttgccttggttttgagtttggtttttgggttaccgttaatgctttgatgtgagttaatt

SEQ ID NO: 501 - DNA, 262 bp, Glycine max
  modified_base (12)..(12): a, c, g, t, unknown, or other
ggtttagaacanacataagtacattatctaaaaaacatttaaccaacagacacactaacgtactaaagtgatttatgattatgaagaaatgccttttttattatgtaaatgccaattcgttatggacaatttggcatggagtttaccctttcttgtaaatgttactttttgtaggaaatgggaattctcaaaattaatgaacctgcgttggattttgatctgcaacagttcttttcgtgttatttgacacatgcaaaggaat

SEQ ID NO: 502 - DNA, 300 bp, Glycine max
gacaaacagcagcgtcttggtttgtgagagagacagaggcacagagagaaaatggtttcggggtcaggaatctgcgcgaagagggtagttgtggacgcgcggcaccacatgctggggaggctggcatcgatcgtggcgaaggaacttctgaatgggcagaaggtggtggtggtgcgctgcgaggagatttgcatctccggtgggctcgtcaggcagaagatgaagtacttgcgtttcctccgcaagcgcatgaacaccaagccctctcacggccccatccatttccgtgcacccggcaag

SEQ ID NO: 503 - DNA, 299 bp, Glycine max
gaaagtgttgaatttacagtgtagtagtaaagtgagtagagaaatcgaagttgaaaagataatagatagtaacagcatcattcatcactcatcagagatggctaccgttgaaagtagaagcaaatcagtggtattggctctctccaagtacctatcattggatcctagtgttgttccagccgatacttcagacagtgatattaagagtctttacctgaacatcatagcggtatcaggacatggggttaatcactctgatgaggtgttgaagtgggtagcatttgcagaagccttccctg

SEQ ID NO: 504 - DNA, 309 bp, Glycine max
gacgttcacattcaggaatcgttttcttcagaaatttgccatcgttgagagaagcgtgagagccttagtcgttcaagatgagagctaagtggaagaagaagcgcatgaggaggttgaagaggaagcgccgaaagatgagacaaagatctaagtaggtgcttgagcaggagttgagatgagctttccatctgctaccagcctcatgacattttaggctgttatggctcttatgatcttgaggtctagtcgctaggggagcttcactcttgacttagtttgctttactggtcctggtcctggtccaagact

SEQ ID NO: 505 - DNA, 310 bp, Glycine max
ggttgcgctcacatcgtgttctctgcggcgcgagctagctagggtttagaacctcgcagttacagaaaacatggcgactgtggtgccaacctccgaagaagacgctgcactctccgtcgttcgattcgcctctgaacttgcctgggccgatgccggtcccgaggttgctgagccccaagttagcagactctgcgtggaggctgaagaattcattgttatgggaaagtggttggagctagcatcattgatgattacctctgctgaattgattttctcgaaggtttctgaaaaagatatagagtccatcctc

SEQ ID NO: 506 - DNA, 185 bp, Glycine max
atcatcaaatgcttttcaaaaaaaaaaaaaaaaaaaaaaaaaaaacagccgccccacaagatgatcccatcctaactcctccttgatacgacatcacacctctacaatatcgtcaactatcatctcatcagtggtcgtcttataacaacgtcattactaagaaaatcctgttattaaacataata

SEQ ID NO: 507 - DNA, 282 bp, Glycine max
gactcttacaatcacagttgtcgagtcaccggatctgggttgcatagattcagagaaaattttccactttcaaatagcaagcaccgtcaatacccacgggttggatcggtgagactgttcattcaatcaaatctcatcagatttgggagatcatcaccaattctgttagccgatgcacaattgtaacatcatcactgcaaatacggaaggcattgatcatacgtatacggcactgaatctcccgtagtcgtcgttctttcaggaatcatgcaaccccgatta

SEQ ID NO: 508 - DNA, 340 bp, Glycine max
gaggtttttagggtttacaccgaggagacacaccttcagcagcagcagccatggttctcaaaaccgaactatgccgattcagcggtgccaagatctacccagggaaaggcatcagatttgttcgtggtgattctcaggttttcctgtttgctaactcgaaatgtaagaggtatttccacaacaggttgaagccatcaaagctcacctggactgcaatgtacagaaagcaacacaagaaggacattgctcaagaagctgtgaagaaaagaagacgtgctgccaaaaagccttactccaggtccattgtcggtgccactttggaagttatccagaaaaagag

SEQ ID NO: 509 - DNA, 379 bp, Glycine max
aaccaagccttcaaacggtggcaaaaagacaacagaaggggataaacaacatcggtggtctggggcatatgctaaaacagatgtcagacatggatactgtagagaacagcattagaggcaatggcgagatatccgagaaagaagagcaccaacaccataccagtaagacggagcatcgacgaggaggcatcagaaccttacccttcatccttgcaaatgaattgtgtgatagatttgcgagctctggttttcatgcaaacatgataagctacctcactcagcagctgaacatgccattggtatctgcctcagtcacgctcaccaactttaatggaacttctagcttcactcctctctttggagctctcattgctgactc

SEQ ID NO: 510 - DNA, 314 bp, Glycine max
ggggaaaatttgtcaaataaattcatctaaccccaaacaaaaccctagcacacttttatcgcttagtggcagcagcagtggcggcaagcaactccatccgcaatgggaatcgatttgaaggcaggaggtaagtccaagaagaccaagcgaaccgcccccaaatccgatgatatctacctcaagcttctcgtcaagctgtaccgttttcttgttcggaggactgggagtaacttcaatgctgttgtcctcaagcgccttttcatgagcaaggtcaacaagcccccgctatccctctctagattgatccgttacac

SEQ ID NO: 511 - DNA, 156 bp, Glycine max
ggggtctagttagagtgaatccatgaccgtgaccatggcggctgcgtttacaagtacaagtgcaacactgagactgtcaaatgttggagagagcagaggtttgcagctgcgtaagtgtaaccctaatcctaataagctgaaggttatgggggggtt

SEQ ID NO: 512 - DNA, 285 bp, Glycine max
gatcgtagcgccagactgagaggaagagagagggagattctttgtttgctaccttctctcggaaaaatggttacgttcaggtttcaccagtaccaggtggttgggagggctcttcccacggaagcagatcagcaccccaagatctaccgaatgaagctctgggccaccaacgaggttcgcgccaagtctaagttctggtattttttgaggaagctgaagaaggtgaagaagagcaatggtcaagttcttgctatcaacgagatttttgagaagaacccaaccaag

SEQ ID NO: 513 - DNA, 326 bp, Glycine max
gactgcgaaccagtagggactcccattccgactcttagccgccgatctctcagggcttgcatcttctcaggtaagctgtgaagatgtacacatcaaggaagaaaatccacaaggataatgatgctgaaccaactgaatttgaagagtcagttggacaggcattgtttgatctggaaaataacaatcaggagctttaaagtgacctgaaggatttatacataaactcagccgtgcaagttgatgtttctggaaaccgcaacgctgttgttattcatgtcccttacagattaaggaaacgtttccgtaagattcatgttaagcttgtc

SEQ ID NO: 514 - DNA, 331 bp, Glycine max
gatagctgagagagaaaggaaaggttaactaagaagcaatacttcaatggccacccttgttgttcataaccaaacttcttctgctcaagatgctgaggctctccaacaggctttcaaaggatggggggctgatgacaaggccattatagcaatactgggtcacagaaatgttcatcagaggcaagaaatcagaaaagcttatgaggagatttaccaagaggatctcatcaaacgccttgagtccgagatctctggtgactttgagagagctatgtaccggtggatgttgcagcctgcggatcgtgatgctgttttggtgaatgtggcaatc

SEQ ID NO: 515 - DNA, 330 bp, Glycine max
gattcattccccttatctttctctcttctctctccccgcccaaaccctaactccctaccctattccgctttctctcatccatcatgaaaggaggaaagtccaagaccgaatctaagagagccgatgccaaacttgctgtgaataagaagggcgccgccaccaagactaggaaacccgccggaaaggggaaggcagcgaaagatcctaacaagccaaagaggcctccaagtgctttcttcgttttcatggaggaattcaggaaggtgttcaacaaggaacatcccgacaacaaagcagtgtctgctgtgggcaaagctgctggagcaaaat

SEQ ID NO: 516 - DNA, 64 bp, Glycine max
taagagagaaggataaaaaatatagagagagagaaaaaaaaaggaaagatggtgcaggagagag

SEQ ID NO: 517 - DNA, 279 bp, Glycine max; identical to SEQ ID NO: 142

SEQ ID NO: 518 - DNA, 353 bp, Glycine max
ggactccctctattattatcattattcttgcggtcttcatctctccaatatctctgcacacacaaaaacagagtttaactaggaatcaaccaaaatggacaaagttaacaccaccaacaacagcaacagcaacagcaacagcaacagcaacaacaactgtgggttcatgtcgtgcgacaaactggaccgagtggccaactgggtcggcgccaacgttgcctctgctttctttgcatccttggagcggtgctcttgcatcaacctcagcatcaaagacaacgaagatgacaccaacaacgatgatcgccctctcttcctctctcaacccactactcctttttcctccaactcca

SEQ ID NO: 519 - DNA, 271 bp, Glycine max
ggtatttcatttcatttccctccccccactcccaccgccaacgccaaacaaaccctaaatctctctcgtcttcttcttcttcttcctccttcaaccatgagagagatcctgcacgttcagggaggccaatgcggtaaccaaatcggttccaagttctgggaggtgatatgcgacgagcacggcatcgatcctaccggaaagtacaacgacgaaggcaacagcggcatccaactcgagaggatcaatgtctattacaatgaggcctctggcg

SEQ ID NO: 520 - DNA, 118 bp, Glycine max
aaccaccagctgaacatgatttcaatctgagtaaatgtataccactaccctcaacttgtgtacagattctccccacgggatgaggaaaatcatgtaaattcaatatatttttttttcc

SEQ ID NO: 521 - DNA, 311 bp, Glycine max
gtgaattaagtaaatcaatggatagtcttggtcctattgaaaataccagtctaagggaagaccctaaaattttaaccgatatagaaaaaaaaattcacagggatttggattatttagaaatggaaggttttttttctagcgatctgaatactgtttctaagaatgatgatgatcattacatgtatgagactcaatttagttttaacaataatattactagtttcattgatagttgcattgagagtttcaatttaggtgatattgacaaatacaatgatatttatttttatagttacatttttttgaagggc

SEQ ID NO: 522 - DNA, 274 bp, Glycine max
tgggacgaacgagcaaaacgatgctctgggattccttcatttcccgtgtgattcaccaccgatctgatagtcgtagtgcgttgtgtgtttgggaagtgggatggagtgtgtgtgaagagtctcatgagattttcgtcagcgaggaacacgagcagcagaggtttctgtctcgtgagctcgcggatcgggagccacactgcgaactggatgcaagatacaggcaggagatctccgatcgagctgattaatgaagttcctccaattgacgttgaaa

SEQ ID NO: 523 - DNA, 376 bp, Glycine max
agacgacagaaggggattgttggcttgtgctctgctcgtgcctctagggttatcatatctccatttccatttcctctctctcagtttccaagaatcttaagctatgggaaagtcttacccaaccgtgagcgctgattaccagaaggccgttgagaaggcgaagaagaagctcagaggcttcatcgctgagaagagatgcgctcctctaatgctccgtttggcatggcactctgctggaacttacgacgtgagctcgaagaccggtggtcccttcggaaccataaagcacccctccgaactcgctcacggcgctaacaacggtcttgacatcgctgttaagcttttggagccactcaaagccgaatttcctaatttg

SEQ ID NO: 524 - DNA, 346 bp, Glycine max
ggcccaaattttttcatagcattttcagaggaacaatggcgggtagggtttcgacgtgcttcttcttcgtgtttgctctttctctccttcttccttttcagatctccgctgaggaatcatcggagaaagagttcgtactcacattggatcactctaactttcacgacactgtcagcaagcacgatttcatcgtcgtcgagttctacgctccatggtgtggccactgtaagaagcttgctcccgagtatgagaaagctgcttctatcttgagtagtcatgatcctccggttgttttggctaaaattgatgccaatgaggagaagaacaaagaccttgcatctcaata

SEQ ID NO: 525 - DNA, 322 bp, Glycine max
gacaacacagactcacacaaagagttacaagagaaatcatcatggcatcagcagcatctgggtttgtgttgtcacttaatgttgcagctgccaccacaaactcaagggtggtcatgttcaacaccaagaacaacacttctaggtttgttgtaaaggcttcagatgagcctgcagcggcggcacccgccaccgccacacccccagctgaagctgaagctaaaccaaagccaccacctattggccccaagagaggtgctaaggtgaagattcttaggaaggaatcttactggtacaaaggcaccggttcagtggttgctgttga

SEQ ID NO: 526 - DNA, 309 bp, Glycine max
  modified_base (294)..(294): a, c, g, t, unknown, or other
ggtggttcttgtttgcgagatagaagcgtaagcagcggctaccctaacctcgtcttcctctctactaatttcagctatggccgacgaagctgtggttgttccagatcccacccagatcgatgtcaagctctttaaccgctggagcttcgaggatattgaggttactgacatttcactggctgattacattggagttgcggcatccaagcacgccacatatgttcctcacaccgccggaaggtactccgtgaagcggttcaagaaggcgcagtgccccattgttgaaaggctcancaactctctcatgat

SEQ ID NO: 527 - DNA, 266 bp, Glycine max
tgggcaccgcttgagcagacttaacaacagcacagagcgggttactgtctgttcaggctaccatctctctctctctttcttagtgcctccttgccagaagttcgaatgggtgatgaaacttgcctatgcacatctgagtcggtgaacgatggggggtctgacaagctctgtgaccagatctcggagtcggtgctcgatgcatgcttggagcacgaccctgacagcaacgttgcctgtgaaacctgcaccaataccaacatggtgat

SEQ ID NO: 528 - DNA, 303 bp, Glycine max
ggcagtggagagagagtgttagcaccaaaaatgtcgaagttaatcttcgtgttccttgcactaattcctcttctctgcacctccttctcgccagagaaaccctcagattggggcaacctccttttggcccaagaattccgcaacaaatcctctcaatccctcctcctcaaatccctcaaatcccgccggttcgaattccaattccaacttcgcgaagaacccaaaattgccctccaaaaatacgggcaattcctccatgaagccctaattccccttttccccaacattgaaccttttggagga

SEQ ID NO: 529 - DNA, 291 bp, Glycine max
ggaacgtctcacgttcagttctagacatcgcgagctctggtcgtgccgtcgtgtgcgagggggtttcgggtgcgaagccctggacctccgctctctcgttcttctcgctcgcgtgtccatcgcttccgcgagggtcggcggcggagaacgtttcgataacgggtgggaaaatcgatgggttggatcagattggcaggaagataggagctgctggggagtggaaccacacctctggtcaatggaatggggacgctggtgacaaaggtattcaaaccagtgaggattacagat

SEQ ID NO: 530 - DNA, 287 bp, Glycine max
gagggtttggttattagggttttcgctcaccggtgtgcagtcgagcccccgaagaaaaagcgaaaatgccgtcgcacaagacattcagaatcaagaagaagttggcgaagaagatgaggcagaacaggcctatcccctactggatccgcatgaggaccgacaacaccatcaggtataacgcgaagcgccgtcactggcgtcgcaccaagcttggattctgaggtgcttgctttgcctcggttccgtttatccaattaattagtgtcttagtttcttgagccaaaaac

SEQ ID NO: 531 - DNA, 350 bp, Glycine max
gacatttttcttttcttttctttttctctgaaagatctgtgactattattattattattattatttctgatttttgtgggaaaatggctgactgggcaccggtgttgatcggggtggtgctgttcgtgctgctccaaccggggctgcttttttcctttccgggaaacgggaagcagctagagtttgggagcatgaagaccaacggcaaggccattttcatccacactctcatcttcttcgccctctactccatcctcatcctcgccgttaaagtccacatctacaccggctgaaccggttcccgggcgggatctcacgtatcaattggttttgttactgagaaattaaag

SEQ ID NO: 532 - DNA, 123 bp, Glycine max
cggggaaacacagagtgatttcactgagtgatcggtgttcacttgatcgcatgcagaagcgtcagcgtcaagtgaagaagatgccgatcagaaacatcgccgtcggaaggcctgaagaggcga

SEQ ID NO: 533 - DNA, 72 bp, Glycine max
gaccaaacaataagcaagaatttccattgcatgcaaagcaaatacgcattatattactaattttaatttgtt

SEQ ID NO: 534 - DNA, 74 bp, Glycine max
aaagctgccagagttcagaatcacagacgactaaatatccataccaaacggcaagtaacatcttcactgattgt

SEQ ID NO: 535 - DNA, 336 bp, Glycine max
ggttccatttctcaacaacttctgctacttcctactccaaccgcacttctgctccgcaattatcatgggcaaggtcaagatcggaatcaacggatctggaagaattggccgtttggtagccagagtggctctgcagagagacgatgttgaactcgttgccgttaacgaccctttcatcaccaccgattacatgacatacatgtttaaatacgacagtgttcatggacactggaagcatcacgatgtcaccgttaaggacgagaagacccttctcttcggtgacaagccagtcactatttttggacacagaaaccctgaagagatcccatgggggtc

SEQ ID NO: 536 - DNA, 79 bp, Glycine max; identical to SEQ ID NO: 6

SEQ ID NO: 537 - DNA, 80 bp, Glycine max
gccggtttcccgaacgatttgatggtttggaatgcatttcccaagcaacgagtcttcggttcgaaaccagcagagagagg

SEQ ID NO: 538 - DNA, 296 bp, Glycine max
gacttctcttcacacctttgttcactcttcttctcttgcggctatggttttagcgcaacttcttctatatttaaggaacatcggtaaggaaaaggttcacagcagtattgttgtcattggccatgtccactctgggaaatccagtaccactggtcacctgatttacaagcttggaggcattgacatgcgtgttattgagacgtttgagaacgaagctgctgagatgaacacgatgtcattcaagtatgcctgggtgctggacaaacttaaggctgagcgtgaaagaggaatcacca

SEQ ID NO: 539 - DNA, 264 bp, Glycine max
ggtgtgtagtagaggattctctgtctggatgccttttgtgagttcagtcattcttaatctttgtgaaggagaatgttcatcgagaattttaagggtgacgtgcggagggggaagtacgccgagactgagattcagtgcgtatacggcgaggagaccaccgaacttgtgcacgagaacaggaatggcacctatcagtggattgtcaaacccaaatctgtcagggaggaatttaaaaccaacatccatgttcctaaattaggggta

SEQ ID NO: 540 - DNA, 296 bp, Glycine max
aggggttagaagaaaggttctaacggaaccaaaggcaacaaaggtgcccaaaagaagaagttaatccttccggctggttcaacaagggaagttggttacaataaatgttgggttcctttccgtactcctgtgtcctcctttctaagtaacttgtttttcggacaaaatttgaaatctccaacatcatctctcaactgttgttcccaaaactgggttcttgatataacgtggcaaacatgcttttaattatctgtgttttaaaatgttttgtttgtccgaacccctgattacaattt

SEQ ID NO: 541 - DNA, 273 bp, Glycine max
  modified_base (83)..(83): a, c, g, t, unknown, or other
ggcgtacacagcctcaacaaccctaacgcgtgcagagcagagagagacgcagccatggggcgaagacccgcgaggtgttatangcaaattaagaacaaaccataccccaagtcacggttttgccgtggtgttcctgatcccaagatcaggatttacgatgttggtatgaagaagaagggtgttgatgagtttcctttctgtgtccatctggttagttgggagaaggaaaacgtttctaatgaggcccctgaagctgctcgtattgcttgcaac

SEQ ID NO: 542 - DNA, 360 bp, Glycine max
gaacgcagccaagaaaagaaaatcctcacccattttcttcgtagccaaacactctgaaattctcagttatgtcgtggcaagcgtatgtggatgatcacctactgtgtgaaatcgaaggtaaccacctcactcacgccgctatcatcggccaagacggaagcgtttgggctcagagcaccaacttccctcagttcaaacctgaggaaataactgccatcaataatgactttaatgagcctggatcacttgctccaactggattgtatatcggtggcaccaaatacatggtcatccaaggtgagcctggtgctgtcattcgagggaaaaagggtcctggtggtgttactgtgaagaagaccg

SEQ ID NO: 543 - DNA, 308 bp, Glycine max
ggagtgagtgagggcattgttgtttaggtacagaaaaatggcatcatctcagtcgaagaagagagttgacgctgtcgattctcgcgctgcttccgttctccttcgcgccaaagatggaagtgcttttgctcgatgcgacgactgcaagaagaatgtgccggttgcactcatcgacatgcacagttgcagccttgaagctaaaattaaaatgaacctagatgctcaagttgtggaacaggctgctgaagctaagaagccagagaggaagaagcccaaatccaaagagcctatggcaaaaaaggctaaag

SEQ ID NO: 544 - DNA, 335 bp, Glycine max
ggtgagttgagtcagtgatgataatgatgaagatgaagtgttccatgtggatgtgggttgtccatgtggccaatgctggtgccctttaagtcctaaaatccatccgcaggactgcatattgatggctctatgaatccaaattgggtgtgaaccagtactctttgccaccaggtgacatgggatggcccttcattggcaacatgtgagtcctttcacagtgctttcaaatccagggaacctgattccgtcatctcctcctttgtctccatattttgaagaactggaatgtatactaccatcatgttatggaatccaagtatcattgtgagaacacc

SEQ ID NO: 545 - DNA, 242 bp, Glycine max
cggataagctttgctaaacatagtaatatcgacctttcgtcgtaaaaagccattttcagttgatgatgaacttaattttccataacagtctcagtgacagtccttcaaaccatacaaggctttattaactttgagaacatgatgagggtatatacaactctcaaacgcagggatttgtccgacatagacctcttccttgattagtcgattgaggaaagccttttttacctccagttgagaca

SEQ ID NO: 546 - DNA, 69 bp, Glycine max
ggtgctcggtttttgatcgagtttttctccgtttagcgcagagcgaatttcgaaatcccgtggagaacg

SEQ ID NO: 547 - DNA, 339 bp, Glycine max
ggtgctctgctcgtgcctctagggttatcatttctccatttccattttctctctcacttttcaagaatcgtaagctatgggaaagtcttacccaactgtgagtgctgattaccagaaggccgttgagaaggcgaagaagaagctcagaggcttcatcgctgagaagagatgcgctcctctaatgctccgtttggcatggcactctgctggaacctttgacaagggcacgaagaccggtgaacccttcggaaccatcaagcaccctgccgaactggctcacagcgccaacaacggtcttgacatcgctgttaagcttttggagccactcaaaggggagtt

SEQ ID NO: 548 - DNA, 268 bp, Glycine max
  modified_base (202)..(202): a, c, g, t, unknown, or other
gagtacagaaaacgcagttctcaccatttccctctcgattgtgagacttgttgttgttaactgaacttttctgagcaagaatgtctgggcgtggaaagggaggcaagggtttgggaaagggaggagcgaaacgacaccgtaaggtgctgcgcgataacattcagggaatcaccaagcccgcgattcggcgtttggctcgtangggtggcgtgaagcgtatcagtggtctcatctaccacgagacacgttgcgtgctcaagatcttttt

SEQ ID NO: 549 - DNA, 334 bp, Glycine max
  modified_base (263)..(263): a, c, g, t, unknown, or other
gaacatgccgaaaagtagtaccaagatggcttcagttgtgtatctcctctttggcttccatctcattgttatcatgtcaagttccttacccgcaactagtgaagtgtttgcaaaacagtatccatccacagaacccgtggaagaaaaactcacccaactccacttctatttccataacaacataacgggggaacacccaactgctatgaaaactgttttgcctcctaaggggtccattcatggttttggggctactttcatgnatggatgacctctaactgaaggaccaagtccaacttcaaagcttgtgggaagattcaaggaatatacgctt

SEQ ID NO: 550 - DNA, 330 bp, Glycine max
ggaaggaagggagggaagaatagaatgggatctggaagtggaaaacacactggagggttcttcaggagaacggatgcatggaggaagcatccgatgctcaccaatcagctccgccaggccacccctggccttggcatcgccgtcgtcgccttcggtatctacctcgtcggcgaacaagtctacaataggctctatgctcccgagtctcattcgatttctcacgtgaaagccggggatcaccagtaaacgtttggacggacgcactccattccatcatcacttagtaagcttgctagcatgttctcgcagcctttaatgtttaaatttcag

SEQ ID NO: 551 - DNA, 354 bp, Glycine max
ggccattgttgttgctattatcatccgcagctgcttttattcgcaccgcaaacagtgagccatggccgtcggaaagaacaagcgcatctccaaggggaagaagggtggcaagaagaacgcagctgatccctttgccaagaaggattggtatgacattaacgctccttctgtttttcaagtgaaaaatgttggcaaaaccctcgtctctcgtactcagggtaccaagattgcttctgaaggactcaagcatagagtgtttgaggtctccttggctgatcttcaaggggatgaggatcatgcattcaagaaaattacgttgagagctgaagatgtccaagggaaaaatgttctgac

SEQ ID NO: 552 - DNA, 288 bp, Glycine max
gatagagaaagaagagggggacacagcgtcctagatttccgcgtcgctgcttcggaagaaagagaagacaaacaaaacaatggcgttcgcttctttcctcgggagagtcctcgtcgcttctgtctgcaggctctcggcttaccaagaatttaatgaatatggagttgatgggggacctgctacaggagcaggcagaccgaagtttgatgcctttagacatcgggtgcattctcaagtgggcgttcaaattccagagattaatctgaaatttttaattgctggggctat

SEQ ID NO: 553 - DNA, 281 bp, Glycine max
cggggcgtacacagcctcaacaaccctaacgcgtgcagagcagacagagacgcaggcatggggcgaagacccgcgaggtgttataggcaaattaagaacaaaccatgccccaagtcacggttttgccggtgtgtgccggatcccaagatcaggatttacgatgttcggatgaagaagaagggtgttgatgagtttcctttctgtgtccatctggttagttgggagaaggaaaacgtttcgagtgaggcccgggaagctgctcgtattgcttgcaacaagta

SEQ ID NO: 554 - DNA, 158 bp, Glycine max
gatcgctctcacacctgtgattattcctcttttaacaatccacacccagattcgaaggttccgaaatggacgctggcggaaagatcaagaagggcgccggacgtagaaagggcggcggcccagagaagaagccggtttcaaggtccgtcaaagccggt

SEQ ID NO: 555 - DNA, 337 bp, Glycine max
gaaacagagagtgatttcagtgagtgatcggtgttcacttgatctcatcataatcgtcagcgtcaattgaagaagatgccgatcagaaacatcgccgtcggaaggcctgaagaggcgactcaccccgacacgttgaaggcggctttggctgagttcatctcaaccttcatcttcgtgttcgccggctcaggctccggcatcgcctacaacaagctcaccgacaacggcgctgccacccctgccggcctcatctccgcctccatcgcccatgcattcgccctcttcgtcgccgtctccgtcggcgccaacatctccggcggccacgtcaaccccgccg

SEQ ID NO: 556 - DNA, 317 bp, Glycine max
ggcggttctgcctgcaaattttcttcccctcaatcgtatattgctcaggtggtgttcctgttcccccccaagcacccctgagattcgttcgcaaaaagcttaataagaacaaaaaatagaaataatagtcttcgttagtaggtcatttcaatttcgttttcgttttcgttttctgttttgatttgatcttccaatggcgtccgatggctttaccgacaagaacaccgtgttcagaaagctcaaggcgaagtctgaaaataagatgtgtttcgattgcaatgcgaagaaccctacctgggcgtccgttacgtatggga

SEQ ID NO: 557 - DNA, 319 bp, Glycine max
gatccataaccatggcgtctaactctgcttccgctctttacttccttttatgcctatcgcccatcactttgcttctttctgcgtttcgtgctcaagctcaatctcatgctccagctcccactttcaagtactgtgaaaagaatgcagactatgctgtgaaggtgagtggagtggaaatattgcctgaccccgtggagagaggagtgccattcacctttaagatcccagcttatactcctgaaccaattcaaagcggggacttgttatatgaaatttcttatgctggaatagaagcacaacctgctacatttctccatga

SEQ ID NO: 558 - DNA, 85 bp, Glycine max
aggagctttaacttgttcatacatgagatggctgcgataggaccacatgacgggatccatattcatggcgtcgaacgctgcttcc

SEQ ID NO: 559 - DNA, 361 bp, Glycine max
gattcctcaagaactagggtttgcagtcactgctctgtttcaccgagtttgggcgtttagatcagaaccaaatcgtgttctcttccattggcaaacatggcaactcaaatgagcaagaagagaaagtttgttgcggacggagtgttctttgccgaactgaacgaggttctgacacgtgaattggcggaggacggttactccggcgtcgaagttagggttacgccgatgcgcaccgagatcatcatcagagccaccagaacccaagccgttctaggtgagaagggaaggagaattagggaacttacctcagtggtgcagaagaggttcaaattccccgaaaacagcgtcgagctttatgctg

SEQ ID NO: 560 - DNA, 147 bp, Glycine max
caatggcgtctctggcaagcttagctgttgttcaaccatctactgtcaagggccttgctggaactaagctctctttcaagccctctcgccagagcttcagacccaagaatttcaggagtggtgccgttggtacaaagtagcgtgaca

SEQ ID NO: 561 - DNA, 336 bp, Glycine max
gagtagcagcagcagctttactccatagtgagatatggtttcttccaaccgttttgctgctctacctctctgttctcttctcctagctctgcttctatgtgcagttggggctagctcttcttcttcgtcttccacaggtgccaccagaattggccaaggctaccgtcttgtctccattgaagagacccctgacggtggtcttatagggatccttcaagttaagcagaaaaccaaaacctatggccctgacattccccttcttaggttctatgtcaagcatgagacagataatccgtttagggttaacataaccgatgcacaaaagcaaaggtggga

SEQ ID NO: 562 - DNA, 287 bp, Glycine max
  modified_base (131)..(131): a, c, g, t, unknown, or other
gggttttccacattcatattttccttgcgtttccctttcattttccctcacgttctcgctcgccaaacgcgcctctctctcctccaatggccgaccagctcaccgacgaccagatcgccgagttgaacganggcttcagcctcttcgacaaggacggcgatggttgtattactacgaaggaacttgggactgtgatgcggtcactaggggcagaacccaactgaggcagaactgcaggatatgagtaatgaggttgatgctgatggcaatggaaccatcgacttccc

SEQ ID NO: 563 - DNA, 213 bp, Glycine max
  modified_base (120)..(120): a, c, g, t, unknown, or other
cgggggtctgagagaaaccctagctagccacaatgcagagattcgtgaaaaccctaacggggaagacgatgaccctagaggtagagtcagcggacacagtcgacaatggtgaaggggaanatcgaggacaacgacggcatcccgccggaccaggagcgcctgatcggcgccggtaagcagctggacgagggccgcacgctcggggacgacaac

SEQ ID NO: 564 - DNA, 319 bp, Glycine max
gatccaacaaccgttcacaaatctttttctaagtgtagtagaagagaggaaccgcgccaaccctctcttcttcttcttcttcaatccttttacaacatttatagtttcattcttaatcgttgggaaaaatgttcatcgagaattttaaggtagagagtcctaatgtgaagtacaccgggactgacattcagtccgtgtacaactacgaaaccaccgaacttgttcacgagaacaggaatggcacctatcagtggattgtcaaacccaaatccgtcaactaccaatttaaaaccaagcaccatgttccaaaattgggggt

SEQ ID NO: 565 - DNA, 316 bp, Glycine max
ggctgccgctctctgagaaaaacagatagtgtgggagagagaagaacggaagagaaaatgacgaccaggttcaagaagaacaggaacaagagaggtcacgtcagcgccggacacggccgtatcggaaagcaccgcaagcatcccggaggtcgcggtaacgccggtggcatgcatcaccaccgtatcctcttcgacaagtaccatcctgggtttcttcgggaaggtaggcatgcgctacttccacaaacttcgcaacaaattctacaatccgatcatcaacatcgacaagctgtggtccctcctccccaggaggcca

SEQ ID NO: 566 - DNA, 246 bp, Glycine max
gtgggggaagggggaagaagaaaacccagaatcaaatcaaaaggtaaaaaagtagaagtatacgcagaagaggtggttcaagttcaatggctgagaagaaggaaatgattcccaaacaatatgacatcgatgccaaatgggacgcctgcattgatctcaccgtccgtcgcttcgtctactccgcatctgccggtgcatttggcggtctcctattttttaggagtcctgttactcgatgggcatcta

SEQ ID NO: 567 - DNA, 347 bp, Glycine max
gacaacacaacgcaacacaacgcgcactctctcttttctctcttaacacaaaaaccctatcgttcttcgcggtttcgccgattctcgccatgccgaaagccaaatccgacgccaaagccgccgatagccggttgaagcgcaagggcgctggtgctggaaggaagcaatcgaagaaagctgctaaggatcctaacaagccaaagagacctccaagcgctttcttcgttttcatgtccgagttcagagagcagtttaagaaggagcatcctaacaacaaatccgtcgctgttgtcggtaaagctggtggtgacaaatggaaatcgctgtctgatgctgaaaaaggcccc

SEQ ID NO: 568 - DNA, 337 bp, Glycine max
gattcactcactcacttcagtgtcattttttcttattctcttcctctctctctactctgagacacaaaggaaaattataagaaattatggctggttattcaaaagcttcagctctttggatcctttttcttctctttggcttctctgtagctaaggaaattttggttggaggtaagactgatgcatggaaggtttcagcctctgaatcagattcactcaaccaatgggcagaaaagtctcgtttccaagttggagactatcttgtttggaaatatgatggtggaaaagactcagtgttgcaagtgagcaaagagaactatgtgaattgcagaatctc

SEQ ID NO: 569 - DNA, 358 bp, Glycine max
ggtttcactcggatcgcgcattcacaaataaggttgaagaggtcactgccggaagaagggagcaacaccatctttcattttccggcgatctcttgtttcttccatcatcaccgttttccggcgatccctaatcctcgcaaacagaaatgacgacatcaaggcgccttgcggacaggaaggtggagaagtttgagaagaacatcacaaaaagaggatttgtgccagacactaccactaagaagggaaaagactaccctgttggcccagtgctgctcggtttctccgtctttgttgtcattggatcatctctcttccagataatcaggacagcaaccagtggaggcatggcttaaatgga

SEQ ID NO: 570 - DNA, 97 bp, Glycine max
gcacgacagttggtggtagctgattgcatctgcatcggtttggtgttcagcagagcaggaaccgcaaacctttgtgtcgagaatcttagccatgggt

SEQ ID NO: 571 - DNA, 300 bp, Glycine max
ggatccttcgacactaactagagccgagcagcgagagagagaagccctagcagaaatgccggctggtcacggtttgagatcccgcaccagagattccttcgctcgtcgcttcaggaagaagggtagcatcggcggcagcacatacctcaggaacctaccacgtcggcgagtatgtcggcatcagcgttaacggcgccgtccacaagggaatgcgtcacaagttctagcatggccgcaccggtcgcgtctggaatgtcaccaaacgtgctgttggggtcgaagtcaacaagcgaggcggca

SEQ ID NO: 572 - DNA, 259 bp, Glycine max
ggagctggtttttttgtcgcgtttgtttataacgttggtgttccttgactcgtgtactagtactagtactacccccaacacagcacgcagcagaccacgcgccgaggcgaagtccaggtccgggtcaaggcctacgacagcaatccagggagaccttcttcggctcaattctccgatcccatccgcaatggaagaaggcggattcctctctgccgctctccagcaagaaggagaacgtgactcccattacctctaaaat

SEQ ID NO: 573 - DNA, 365 bp, Glycine max
acacagaccaatattcattcatttagattcatcaaaagcttataacaacaattaaacatgagtgcagccagcagagcttggattgtggcatcaagcattggagcagtggaggcattgaaggatcaattgggggtgtgcaggtggaaccatgcattgaggtcactgcagcagcatgccaagagcaacattagatcctacactcaggccaaaaccttgtcttctgctacttctgctgctgtctccaataaggtcaagaggaccaaggaggagtccatgaggaaagtcatggacttgagctgttggggtcccaatacttcaaggttttagtgtgtggaccattccaaatgcattcatcattgtgctgc

SEQ ID NO: 574 - DNA, 168 bp, Glycine max
agaaggggattgcaccccaaaaccaaaaccaaaaccacattgtcattaagccataccgttaaaacttaaaagggtgtgttttgagtttcacaatttgctcccttcttttcatccttttaccactctttcatcataaattggagtcgcctatagtttcttatatactac

SEQ ID NO: 575 - DNA, 380 bp, Glycine max
  modified_base (316)..(316): a, c, g, t, unknown, or other
gactcaccacttcaaaacactcataacacaaagcacaaagcaaagctcatccttgagttaaaaaatggcagcagcttcttccatggctctctcatccccatccttggctggcaaggccgtgaagctgggcccatcagccccagaagtgggaagggtgagcatgaggaagaccgtcaccaagcaggtctcctcaggaagcccatggtacggcccagaccgagtcaagtacttgggcccattctctggcgagcccccgtcctacctaaccggtgagttcccaggcgactacggctgggacactgctgggctttccgcnagaccagaaaccttcgccaagaaccgtgaactcgaagtgattcactcaaggtgggccatgctcg

SEQ ID NO: 576 - DNA, 340 bp, Glycine max
gaaatccaagctcgggaacagagaaggagaaagagaatggacgccattgattctgtgttcgatccgttgagagaattcgcaaaggacagcgtgaggctcgtgaagcgctgccacaaacccgatcgcaaagaattctccaaggttgccgtgcgtaccgcaattggtttcgttgtgatgggattcgtgggtttcttcgtgaagcttattttcattccaattaacaacatcattgtcggatctggttaggatgaagggtactacaatcgcctcaggaattcaggttgtcaagcaaaagtaggcagaaagagttcccacatcaatagatcattttatgccctca

SEQ ID NO: 577 - DNA, 313 bp, Glycine max
  modified_base (171)..(171): a, c, g, t, unknown, or other
aggggacaacaaaaggggaagcacaatgttgaacctgttggagagatttacttgccagaaccttactttagaaccaaaaggactacttattggaccagatcagttggaagaacttgtacctagcttcgcaactggcttatctgagtgtggagaagcattatcaagccttangagtatgagaacgagtaccgtttgtgatgaatgtctatggtttaagaaatctgtctttagtcaacttgtgtgtcctgttaatcacttctcagcaataaactgctctgggaaactagtttcatgttcaatgcaacgataggaa

SEQ ID NO: 578 - DNA, 321 bp, Glycine max
gccaccctaacatttgatccccgaactaccaattcagacataagcaagcaaaagaagcacactcttgaccctgcttctccagattttcttcctcttccttcacttgaacagtgctttccaaagagcaccaaagaacacagggaagtcactcatgaagaaactggtcatgtgctcaaagttccctttcgtcgagttcaactgtctggggaagcaggacactttgatacctatgacactagcggtccccacaatgtaaacccaatgacaggactccgaaaattgcgctgacggtgggttgataggagggataaactgggttat

SEQ ID NO: 579 - DNA, 341 bp, Glycine max
gggtcacaaagagatgtattgtagaactgagcaatggtttctctttctcattcgcagtctgcttcttcaatttcacgcgtttcagtcaagcatgatcatgggcagaaaattcttcgtcggtggcaattggaattgcaatgggaccactgatgaggtgaagaagattgttaatactttagatgaagctaaagtcgctgaagaagatgttgtacatgttgttgtgagccctccttttgtgtaccttccttttgtaaatagtttgctgcatcctgatttccatgtcacggcccaaaattgttgggttcgcaaatgtggcacttacactggagacgttattgctg

SEQ ID NO: 580 - DNA, 354 bp, Glycine max
agtccaggcgtcagacggctgcgaaaggacgataaaaagggatatttctaactccgagcacttccatatcttatcttctccgcctccagctttgaggttctcacggaaacttctgaagattgctggcatagcattcggaagcttcagggattctttcagtttggcctccatcaaggcctacattgctgagttcatctcaacccttctctttgtttgttgctggtgtaggttcagccatagcctatgctaagttgatatcagatgcagctcttgatccaactgggttggtagcagttgccatttgccatggttttgctcacttcgatgctggttctgttggagccaacatttctg

SEQ ID NO: 581 - DNA, 338 bp, Glycine max
tccgtttttacgttatttcgcactgtattgtacaattcctttatttgtgggatttatttctcacacgataattcattaaattatagaatggatttttacctatgcctagatctcggataaatgaaaattttattgataaaaccttttcaattgtagccaatatcttattacgaataattccgacaacttcgggagaaaaaagggcattcacttattacagagatggtgcgatttgattctatttttttaccgaaatcggtaaaaagtggaaaaaacccacgcttgctgaaggtgaaatttgtaaatataaaggattaattccttctgtcgtgtatcct

SEQ ID NO: 582 - DNA, 322 bp, Glycine max
ggaagtaagggatcgagcctcggaggagggaatcgcagcgaagtccactatgccgaagcaaattcacgagattaaggacttcctcctcactgctaggaggaaggatgcacgctctgtgaaaatcaagcggagcaaggatgtggtgaagttcaaggtccgttgctccaagtacctttacaccctctgtgtgtttgattctgagaaggctgataagttgaagcaatcacttcctccaggtttaagcgtgcaggatgtgtgattcttactgctgtatgaagatcaggtttttctctggattttggggattcatagttagtaaaat

SEQ ID NO: 583 - DNA, 368 bp, Glycine max
gacaaccctaagaccctacgtcatggcaagcgatctattgagccttccctactgcttgtctaccacacaaattccacctagatcacatattagacatagaataagtactctttccaatgacaaatttctcaatagatctttgcaacaactcaactgtgccgagagcaaacaagatatccagttaactcaaaatggaaataggtgttcatctaactgagctaagcacgcgcccaatctttggacccatgaaattgtccagtccctggaaaatcatctagcggtaataacttcatatttcatttttcttttagtttagtgtagaacttgtgcagcaaggccaataacctaggcagatatatgatgtgaaa

SEQ ID NO: 584 - DNA, 334 bp, Glycine max
gacttcacaactcaaactgcttcattgcataattgcagataagatcaacccttctaccttcagattcgcgggaagatggcatcacttcatgctaatgtgacatcagttgtttacaacagtggcaaccgtgtttctcaatcgaaatttgcaagctcttccttcttgtctgggttcgatgttgttggtcgtgcttcaagtgcttggaagaaggaacttgtcccatcttccatttccttggtgcctagagccaccctaacatttgatcccccaactaccaattcagacataaccaagcaaaagaagcacactcttgaacctgcttctccagattttc

SEQ ID NO: 585 - DNA, 303 bp, Glycine max
gaaggttttgcgctgttgttgctgctcatcctccgtaacctccgagctctgcaccgaagaacgaagccatggggaagacacatggaatgggatctgctcgcaagctcaagtcccaccgcaggaggcaaaggtgggctgacaagtcatacaagaaatcacatcttggaaatgaatgggagaaaccttttgctggttcatcccatgccaagggaattgtccttgaaaagataggtattgaggctaagcagcccaactctgccattcgtaagtgtgccaaggttcaacttatcaagaatgggaaga

SEQ ID NO: 586 - DNA, 66 bp, Glycine max
gctcgccaccttttcttgttccattttgcttcaccgaattcaacccacttcggaggccaaattcaa

SEQ ID NO: 587 - DNA, 342 bp, Glycine max
ggctgacaagccaatcctttgtgtaggtgctcaaccctagtaagccgcaatggtgaagtactcaagggagcctgacaatccaactaagtcttgcaaggctagaggcgccgaccttagggttcattttaagaacacaagggaaactgcctttgcaatcaggaagttgcccttggtcaaggctaaaaggtacttggaagatgttcttgcccacaagcaggcaattccattcagacgtttttgtcgaggtgttggaaggacagcccaggctaagaatagacactctaatggccaaggacggtggcctgtcaagtcagcaaaattcattcttgatttgctcaaaaa

SEQ ID NO: 588 - DNA, 105 bp, Glycine max
cgggaccacttcaaaacactcataacacaaagcacaaagcaaagctcatccttgagttaaaaaatggcagcagcttcttccaagggtctctcatccccaaccttg

SEQ ID NO: 589 - DNA, 337 bp, Glycine max
gacacactgactcactgttctaattcatttctgaaatagaattccgttattctctctctctctctcttgtttcatcgatgggtggcacagttgttgctgaagtacccacaaagaggggaaggggcagaagggccctgaaggagaaaaccccatcaacgaacgatgctaacatcatcatagccacaccaatttcgccatcatccgaaaaggcggcacaagttgttccctcaaagaaaaaacaagattcaaagaagcagcaatctttcgaaaaagaattgctggagatgcaggaaatgctgcagcagatgcgcctcgagaaggagaagaccgaagagct

SEQ ID NO: 590 - DNA, 266 bp, Glycine max
actggcaaacaattttgaatatgtcatgtatgggaagctctacaggataacagagggttcacggcgtgaaaaagcggagatgaatatttcatttggtgggcttctgatgatgctcaagggacatacctctcattgcaacaagtttgaactggatcagacgttgtatcttctgataaggaaagtctgaaaattgtatgtaaaaaataaatatgaagatgtgaagccttgttgcagcaaaaagacagcagctatttccatcttcatgt

SEQ ID NO: 591 - DNA, 357 bp, Glycine max
ggggatctatcacaatagaaagcaaagctatataggattatttcccatatcaagaaaatgaaaatccctttttattttcccatcctcgtgcttgttgtcttcattgcttctggaaaacaagtgcaaatgacagtggtaccaaattgtgtggtagaaagcttgtcagttcattgtgaaatattcaagaatccttgcgaacttctttgccaacaacattttggatcacccgcagcacatggagcttgtggcattaagttccatgtatgtgtttgttatttatgttaaatataaagtttaaccataacaatcacagctttcatacctatttaatagtatgtaagccgattaaaaaaaata

SEQ ID NO: 592 - DNA, 381 bp, Glycine max
ggacgaagagaaaagacagtgaattgcggtttcaattcaacccacttcatctcaggtgtttgaagttgagataaaatgagtggaacagagaaagcaggatcaggaaccacgaaaacccctgccgattttctcaaatccattcgtgggaggccggttgttgtcaagctcaattctggtgttgattacagaggtatacttgcttgtctagatggctatatgaatattgcaatggagcagacagaggaatacgtcaatggacaattgaagaacaagtatggtgacgccttcatccgaaggaataatgttccaaacattagtacctccaagaggacccctaccaaagggggcttaaaaagtaaaggaatccgaatttttgggttt

SEQ ID NO: 593 - DNA, 378 bp, Glycine max
ggctgtgagtgagacaccgatagatagagagcgcggcataacctaaacctatctttcttctctctctgtgtgtgcgcttcaacggcaaccagaagcagccatggccactgcaaggactgtgaaggatgtttcacctcatgagttcgttaaggcgtactcctctcacctcaagcgatccggcaagatggagctgccagagtggactgatattgtgaaaactgcaagatttaaggagttggctccttatgatcctgactggtactatgtcagagctgcttccatggcaagaaagatctacttgagaggaggacttggtgttggtgcctttcagaggatttatggtgggagcaagaagaatggtaatccccctcctcaatt

SEQ ID NO: 594 - DNA, 333 bp, Glycine max
gatagcaaaatcgtttctccaatttaatcaccattgtacaacccaaattcccttcgtcgttttcgattaagagagcaatggcacgtaccaagcaaaccgctcgcaagtccaccggaggaaaggctccgaggaagcaattggcaaccaaagccgctcgcaagtcagccccggcgaccggcggagtgaagaagccccaccgcttcaggccaggaacggtggctctgagggagattcgaaagtaccagaagagcaccgaacttctgatccgaaaactcgcattccagaggctcgtcagagaaatcgctcaggatttcaaaaccgatctccgctttc

SEQ ID NO: 595 - DNA, 297 bp, Glycine max
ggagaaagtgatggattacgatttagcagcgttgaagcttttctgttcgcagctgaagcaggctcgagaagtagcaatgccttgtcaaactcaaagtcaaagtcaaagcagcttcactctcggcggcctccttttccagcgcccttggttgcagggcgttctcgtctccgcctccgacgccggctctctgcttctcgacgacggaaccgacctcgtcgagctctccctcaatagcgagtttcgccaccgtccatggaaactcgggatgtatgtaatggtggttggagggtatgctgc

SEQ ID NO: 596 - DNA, 349 bp, Glycine max
ggatgcagatgcagcctatcatggcagcctactaccccaacaacgtcaccactgatcacattcaacagtacctggatgagaacaagtccttgatcctgaagattgttgaaagccagaattctggcaagctgagcgagtgtgcagagaaccaatcaaggctgcagagaaatctcatgtacctagctgcaatagctgattctcaaccccaaccatctccaatgcctggtcagtatccttctagtggacttatgcagcagggagcacactacatgcaggctcagcaggctcagcagatgtcacaacaacagctaatggcttcgcgctcctcactcttgtactcccaaaagcc

SEQ ID NO: 597 - DNA, 338 bp, Glycine max
gatcctacgaacgctcctcacttgcagaattcaaagaaggcgtcttcataaacgcctttattctccgtttccgtttccttcccggaattcgatttttcatctctgaaaatgagtgagtgcatctcgatccacattggtcaggccggtatccaggtcggaaatgcttgctgggagctctactgtcttgagcacggcatcgggcccgatgggcaaatgccaagtgacaaaacagttggcggaggtgatgatgctttcaacactttcttcagtgagactggtgctggaaagcacgtgccacgtgccgtctttgtagatcttgagcccactgttattgatga

SEQ ID NO: 598 - DNA, 376 bp, Glycine max
gatacctaaaaattgtaccgatatggcttcacttgtgtgtctccttttttccttgcatttcatggttatcatgtcaggttccttaccagcaaatagtgaagtgtttacaaaagagtctcctatgtctctatccacaaaacccgtggaaagactcacccaactccacttttatttccataacaacaaaatgggggaacacccgactgctatgaaaattgttgagcctcctaaggcgtccatttctggttttgggactatttacatgatggatgaccctctaaccgaaggaacaagtccaacttcaaagcttgttggaagatgtcagggaatatatgctgaggcttcgcaacatgaacctgcgatactcatggtaacg

SEQ ID NO: 599 - DNA, 314 bp, Glycine max
gactacaccagaaccataaccaccacgagtttctctatctgctttcttcacaaagagtaactcagtcttctaaaaactttctcaaaaccattattattctctaatctttcgtttcttcaattaattaattggtttcttgctatggctgtggactctgcgatttcgtccccattgggtcccccggcctgtgagaaggacgcaaaggcgttgcggttcatcgaagaaatgactcgcaacgccgacgccgtccaggagagagtcctggaggagattctcacacgcaacgcccagacagagtaccttaaacgcttcga

SEQ ID NO: 600 - DNA, 333 bp, Glycine max
ggagagaaagagagagaaagatgtcgaagcgtggtcgtggtggttcggcggggaacaagttccgcatgtcgctgggtcttccagtggcggcgacggtgaactgcgccgacaacacgggggcgaagaacctctacatcatttcggtgaaagggatcaaaggccgtttgaaccgtcttccctcggcctgcgttggcgacatggtgatggccaccgtgaagaacggaaaacccgatctgaggaagaaggtcttgccagctgtcatcgttcgccagcgcaagccatggcgccgaaaggacggcgtctacatgtacttcgaagataatgctggtgtta

SEQ ID NO: 601 - DNA, 239 bp, Glycine max
ggactcaaaaagagggttaacaagaaaaaaaaaaaaacttgaaataccttcaactcgaagaacacaaccactgaaaaaagagaaagtgagaaaagggtcgaacaactggtgaagtcattgatggctacagaggaagagagtgcggtgaaggagcctttggatctcattaggctcagcctcgacgagcgtatctatgtcaaactccgttccgacagagagcttcgtggcaaacttcacgc

SEQ ID NO: 602 - DNA, 365 bp, Glycine max
aggcatcttcttcaaattcctgtcctgaagatgacagcaaagtggtatctcattgtgtgtgttgtagcgatctgggccgttgatctgggttcatcatcacaccatgcccgtgccccagcaccagcaccgtcagtggagtgttcaaacctggtattgaccttatcggattgcctcaccttcgttagcaacggcagcaccgtcaccaagccacagggaacatgctgctcttccttgaaaactgtgctcaacacagcccctaagtgcctttgcgaggctttcaacagcagcgctcagttaggtttagccatcaatgtcaccaaggctgtcacgcttcccgctgcttgcaaactctctactccttctgc

SEQ ID NO: 603 - DNA, 146 bp, Glycine max
  modified_base (64)..(64): a, c, g, t, unknown, or other
gacctcaacacgtttattcgttacagaaattaagctcagtgtgtgtgagtgagagaaaaaaaanggagaaaaagggaaaaaaagggggcggtccaaaaggttcaaggctaagttagcgtggaagggaaggtaaaggtcctccaaag

SEQ ID NO: 604 - DNA, 374 bp, Glycine max
ggacctatcaagttaatttgcgtctatattcattttggcatcgaggttgaatctcatcggagagagaaaaaccataaccatgtctggaagaggaaagggaggcaagggtctcggaaagggaggagcgaaacgacaccgtaaggttctgagggataacattcagggcataacgaagcccgcaattcgccgtctcgcgagacgtggcggcgtgaagcgtatcagtggtctcatctacgaagaaactcgcggtgttctcaagatcttcctcgagaacgtcattcgcgacgctgtcacctacactgagcacgctcgccgcaagaccgtcactgccatggacgttgtttacgccctcaagaggcaaggcaagaccctct

SEQ ID NO: 605 - DNA, 352 bp, Glycine max
  modified_base (190)..(190): a, c, g, t, unknown, or other
  modified_base (199)..(199): a, c, g, t, unknown, or other
cggttgcaaaaaaacaacaaaagggggggttaaaaaaatggtccaaccttggaattcaaaattcaattaaattccaacatcaaaaatggcttacaaccatcatgaccacacaaaccggaaatcccttttggacaccctatactgctccgaagcagaggaggactacggtcatttcctaaacaactcctcncctgcgtcncctctttcttgctccaaagcgacatgttttcggacgaacaagagttgacatcactgctggggaaagaacaccacaaccctctaagcacctgtctccaaaccaaccctgccttggactttgctcgccgggaagccgtggaatggatgctcaaag

SEQ ID NO: 606 - DNA, 204 bp, Glycine max
gacatgctcaatgtttatgttgctttcagtcattttagataatattgctacatttaatttgagtttttctttggacattcttgttccttaagtgtcttttacgtatgaaatcaaatttaagggtaaattaaactgattaaaacaaaaaaacacagaacaataacatcccaccttaaaactcccctccccaaaaaaaaccggccc

SEQ ID NO: 607 - DNA, 354 bp, Glycine max
ggtgaaggacgaggcaagaaggaagtgttgtgggacgaaagaggcagagctgcaatcaccagagtggaagcgcgaaacggtcctccccggctttccattttttctcttctgatgaaattttagttcatcccagttgctgattgagatcgaatttaaattcgaaaaagcgtacttgtgccactgtacttttacagatctgcggctacgggctagcctatcgtatttttgcgtagatctagtgtccgtgaagcggttaccatttcaccactcaccactattcatctctttcttctatattgatctgaaattgaagatggaaagcgaaaagaaatcgtcagcaatatttgatgtggg

SEQ ID NO: 608 - DNA, 210 bp, Glycine max
gacccaatggatcctgtggattcatacatacacatttctcaagttgcgctcggagaggcgaaaaaggacaaacctaatgaacctgtggttctgtacatgaaagttggtgaacagaacattgttttgggaaccctttctagggaaggcatccctcacctatcattggatttggttcccgactccgattctgaactttcccacacttcaaaa

SEQ ID NO: 609 - DNA, 315 bp, Glycine max
ggaatcagcaccacattcacctgagctttttgtgaggattccaaagcatggcttcccttgcagcatccactgctgctgcttcccttggcatgtcagaaatgcttggaaaccccatcaacctcagtggtgccacaaggccagctccatctgcctctagccctgcctccttcaagactgtggctcttttctccaaaaagaacgctgcacctccaaaaaaagctgcagctgctgctcctgccaatgatgagcttgccaagtggtatggtcctgacagaacgatcttcatgcctgatggtctcttggaccgatctgaga

SEQ ID NO: 610 - DNA, 371 bp, Glycine max
accaaccccttttagctcaccctcgcactctcagccaccgcacgccgccgtctccggcagccactgtccgttttcacttgtaatttgtcaactcagcataaaaggggtgggttaggctttgcaaccattggaagttccaacaatggcaggcatagctatacttttagatctatggaggaaaaatcaaaacttgagctctggattgcactcctctcatgcttttcagtcttccagtgcctttttttctgcctctgctgcaactgctgctgcagcgtcttttgctgcagggactggttttgcctcaagggcattgtttgggtcatcagttgcatattgtgatgctggtgcagcattaccaaaagactacattt

SEQ ID NO: 611 - DNA, 298 bp, Glycine max
ggatagagagcgcggcataacctaaacctatctttcttctctctctgtgtgtgcgcttcaacggcaaccagaagcagccatggccactgcaaggactgtgaaggatgtttcacctcatgagttcgttaaggcgtactcctctcacctcaagcgatccggcaagatggagctgccagagtggactgatattgtgaaaactgcaagatttaaggagttggctccttatgatcctgactggtactatgtcagagctgcttccatggcaagaaagatctacttgagaagaggacttggtgtt

SEQ ID NO: 612 - DNA, 365 bp, Glycine max
aggggattcacttgcggctgcagcagagaagcactcatcattcttcgtttgtctaagatccgccttctctgaattgtaaaaatgtcgctcggagaaactgcttgttcatacgcagctctcatccttcatgaagatggaatcagtgtaactgccgacaagatcagcaccttgttggaaactgcaaaggttcaagtagatacctattggccaaccttatttgctaaacttgctgagaagaaaaatcttggcgatttgatagccaatgcagcaggcggtggtgcaccagttgctgttgcagctgcccctgttgctgcctcaggtggtggtggtgctgctgctgccgcccaactgctgaagagaaaaag

SEQ ID NO: 613 - DNA, 85 bp, Glycine max
gagaatagagttgttcccgttgactggctttttattgtgctgtttgctcatgaataaggaccatgttttagaaatcatatttgcc

SEQ ID NO: 614 - DNA, 387 bp, Glycine max
  modified_base (372)..(372): a, c, g, t, unknown, or other
ggttctagtgtgtgattgtttgttgttgtaactcgttcttcttcttttgttgttctgtgtttgtgtttgttttttctctcacctgaaaatgtcttgctgcggtggtaactgtggttgcggaagctcctgcaagtgcggcaacggctgcggaggctgcaagatgtacccagacttgagctacactgagtcaaccaccaccgagaccttggtcatgggagtggcacctgttaaggctcaatttgagggtgctgaaatgggtgtgcccgctgagaacgatggctgcaaatgtggaccaaactgctcctgcaacccctgcacttgcaagtgaagtgttgggagagcaagcttcaagcagagatagcccttaattangaataatgataaact

SEQ ID NO: 615 - DNA, 345 bp, Glycine max
ggaaagcagtgaccacggagagagagagagaggttttgacgcaacacactttcactgagaaaggatctctatctaccaaggagcagaataaaacccttctctctggtaagtgaataagagaatggcttcagatcggaaacttcacactttcgaggaggtggcaaagcacgaccagaccaaggattgctggctcatcatttctggcaaggtgtatgatgtcacccctttcatggaggatcatcccggaggtgatgaggttttgttatctgcaacagggaaagatgcaaccaatgattttgaagatgttggacacagtgattctgctagagatatgatggaaaaata

SEQ ID NO: 616 - DNA, 320 bp, Glycine max
gtatactacggttaagttgggtaaccttgctccggaggcaactcaacttgatctccatcaccacttccattctcttggagctggagtgattgaagaagttcgtgtccagcgtgataaagggtttggttttgtgaggtacagtactcatgctgaagcagctctagccattcagatgggaaatgcccagtctcttctctgtggaaaacaaattaagtgctcttgggggaacaagcccactccagccggaactgcttcaaatctccttcccccaactgcagctgcatccttgcctggcctctctgcaactgattttttggtgt

SEQ ID NO: 617 - DNA, 352 bp, Glycine max
  modified_base (338)..(338): a, c, g, t, unknown, or other
tttcgtgagtctcgtatctctaaaagctcattaaacccaaggcccttcctaggtgagtctcatttctccaaaggctcgaaaaatccaaggcacgtccttaatagtcctcacaaaaaccaaggatgaacacttcctttgtccaaagcttgttaaacccaaggtccggccttggaatacaagaaaccgaaggtccagccttggtaagcgctcctacaaaaacccaaggtacacccttggtaagctctctcctttagaactacaacaaggatagtcaaaggtccaggttccacaaggtaaaaggacataccactagactagttggcaagaccttcaactangagaaaatcaaact

SEQ ID NO: 618 - DNA, 117 bp, Glycine max
tggaacgtggaagtggaacccactttgatgtcacaaaacaaacaagtaccacatcagaaatccactcttataaaagaacaacctaacaacaaatctatcacaaatcgtcagtaatcc

SEQ ID NO: 619 - DNA, 374 bp, Glycine max
gattggacacattcttcagcgactgcgtttttggatcggaacctcttctgcggcgtagcaatgggacactccaacgtttggaactctcacccaaaaaactacggtcctggttctcgcacttgccgtgtgtgtgggaatccacatggactgatcaggaagtatggccttatgtgctgcaggcagtgcttccgtagcaatgccaaggaaattggcttcatcaagtatcgctaaaagagcagttgtcaactacggaccaatattgtgttctggcactaggatgttttgaggatgttatgtttgaagaaacttgagactttcttttttcatctaattaattatcagacgtaatttgtggtactaagaatacttttata

SEQ ID NO: 620 - DNA, 267 bp, Glycine max
ggatattagcctccaaataggaattaagatctacgttagggtagtagtagggattaaatatagagaaaaaataggattaattgaattgccaagaagagtaactcagctcaactcaagtgtttgttattgtttatcgagttgaggctcaggacccgacgaacgacggagaaacagagattaatcggggaagggtttagggtttgtgagtggaaaaatcgaatcgaatcgaattgagaatgtctctgacgagcgtgaaaatgtcggagg

SEQ ID NO: 621 - DNA, 290 bp, Glycine max
  modified_base (251)..(251): a, c, g, t, unknown, or other
cgggtcttccattcggtttcgaattctcgcgattcgcgatgggggaacgacgctgacgttgaatttcaaggttctggtttttcgtcgtcgctgtggagtgaagaattctgtgttgctggagatgtttacgccgccgagggtttggtcgggttggtccctgactccgaacatcagcggggttcggggaggaatcgggtctggttcggaattgggtccgaattcgggagatggaacgatcccgaatggaaaangtgtcttggctgttgacaatggtgggaacttggatcgcg

SEQ ID NO: 622 - DNA, 335 bp, Glycine max
ggttccatttctcaacaacttctgcgacttcctactccaaccgcacttctgctccgcaattatcatgggcaaggtcaagatcggaatcaacggatttggaagaattggccgtttggtagccagagtggctctgcagagaggcgatgttgaactcgttgccgttaacgaccctttcatcaccaccgattacatgacatacatgtttaaatacgacagtgttcatggacactggaagcatcacgatgtcaccgttaaggacgagaagacccttctcgtcggtgacaagccaatcactatttttggacacagaaatcctgaagaaatccaagggggtc

SEQ ID NO: 623 - DNA, 57 bp, Glycine max; identical to SEQ ID NO: 410

SEQ ID NO: 624 - DNA, 305 bp, Glycine max
gaacagcgaaacagagagtgatttcagtgagtgatcggtgttcacttgatctcatcataatcgtcagcgtcaattgaagaagatgccgatcagaaacatcgccgtcggaaggcctgaagaggcgactcaccccgacacgttgaaggcggctttggctgagttcatctcaaccttcatcttcgtgttcgccggctcaggctccggcatcgcctacaacaagctcaccgacaacggcgctgccacccctgccggcctcatctccgcctccatcgcccatgcattcgccctcttcgtcgccgtctccg

SEQ ID NO: 625 - DNA, 158 bp, Glycine max
cggcgaaattgccactgaggaagagtgaagtggcactttctaacggaaccattagggtttttttttaagctcggtttttttttgttttattttgtttttaatggttgactttgtttgaaatcaacgttcagtagtataattaaatttgttttcagagc

SEQ ID NO: 626 - DNA, 320 bp, Glycine max
gacaacacagggcaacacaacgcgcactctctcttttctctcttaacacaaaaaccctatcgttcttcgcggtttcgccgattctcgccatgccgaaagccaaatccgacgccaaagccgccgatagccggttgaagcgcaagggcgctggtgctggaaggaagcaatcgaagaaagctgctaaggatcctaacaagccaaagagacctccaagcgctttcttcgttttcatgtccgagttcagagagcagtttaagaaggagcatcctaacaacaaatccgtcgctgttgtcggtaaagctggtggtgacaaatgggaa

SEQ ID NO: 627 - DNA, 292 bp, Glycine max
gatgtttgcttactcagacataccccttgctagcaacactgagcttaatcgagcttcgcacacatgaatcaggaaaagttaatgaatatggacggttcggtcagaactggctgaaagggtagtgtgagaagaaagaagaaagctggccatacaacaacaaccacacatgacagacagcttgataccaacctgactagaataagggtgagtgccatccatgctagtgaataagtcggtatctttaatgatggcgtacttatccagttactaactcacacacttcatgcatcca

SEQ ID NO: 628 - DNA, 355 bp, Glycine max
ggatgatcctttaatttcctgagttccggcgaattaacaagcttcaaattcaattgcttttcatgcaaatggatgtttatacacacatctcattaccatctttcatatcgcatcgcttctcttcttcacgattccaatgctcatcactttcttcttgttctcctttcaagcttgtctgttccaacagagactccaaggaatctcaacgaaacgacgataacaataacaagggtgataaatcttcaacagactgggacaaggcatggtcaaaattcaaaaagcaagggggaaaaaacccttctccaaattttcagataagtatgtgagctggaatcctaagcgttcaaagttccct

SEQ ID NO: 629 - DNA, 381 bp, Glycine max
gcacctccgtagggtttggttattacggttttcgctcacccgtgtgcagtcgagcctctcgaagaaaaagcgaaaatgccgtcgcacaagacattcagaatcaagaagaagttggcgaagaagatgaggcagaacaggcgcatcccctactggattcgcatgaggaccgacaacaccatcacgtacaacgcgaagcgccgtcactggcgtcgcaccaagcttggattctgaggtgcttgctttgcctccattcagtttatccaattaattagtgttttattttcttgagccaaaaacaatgctttggagtttttaatattttgcattttattccaagactatattgtgtaaggaatttattggagtacgtttgacgtgggt

SEQ ID NO: 630 - DNA, 298 bp, Glycine max
gatccttcgaccagctggcaccacattcacctgaggcttccaaagcaatggcttcccttgcaacatccactgctgctgcttcccttggcatgtcagaaatgcttggaaaccccatcaacttcagtggtgccacaaggccagctccatctgcttctagtcctgcctccttcaagactgtggctcttttctccaaaaagaaagctacaccaacacctccaaaaaaagctgctgctgctgctcctgccaatgatcagcttgccaagtggtatggtcctgacagaaggatcttcttgcctga

SEQ ID NO: 631 - DNA, 320 bp, Glycine max
gaacgggatgccgaaaagtactaccaagatggcttcagttgtgtatctcctctttggcttccatctcattgttatcatgtcaagttccttacccgcaactagtgaagtgtttgcaaaacagtatccatccacagaacccgtggaagaaaaactcacccaactccacttctatttccataacaacataacgggggaacacccaactgctatgaaaactgttttgcctcctaaggggtccattcacggttttggggctacttacatgatggatgaccctctaactgaaggaccaagtccaacttcaaagcttgtgggaagat

SEQ ID NO: 632 - DNA, 318 bp, Glycine max
ggaacctgaaaatctagtttcttacaaggctctactctactgcttcaccttctgctctagaaaattcagtggtgatacatggcttcggctactctctctgtagccaaaccagcccttcaggcaaatgggaaaggcttctctgaattctctggcctccgcagctcatcaggcttccttcccttttctagaaaatcttcagaggatttccattctgtcattgccttccagacctatgcacttggaagcagtggaggatacaagaagggtgtgacataagcaaaactgaaggttgccataaacggatttggaacgattgga

SEQ ID NO: 633 - DNA, 340 bp, Glycine max
cgagagacgacaaaagggggtgctttcttgaagcatttggaattctctcgattagctatgacgtaaaaagaacggtcaggagagatagagagggaacaagaatgagtgtatcagtgactgtgatgaccttcaatcaccatgatgaggagccgcaacacagtcacgattcgtgggagaagatataggatatgtgcaaaggcgtgtttagcagttactcaaccatcatcctcagtatccataatggagtgaatgcacaattggattttctctagcaaggtttgccagtttacaatcaaattgggatatcactggaagggccctacgacactactgaacagca

SEQ ID NO: 634 - DNA, 371 bp, Glycine max
gacaacacaacacaacgcgcactctctctttttctctctgttttttgttctctcttcgcttaaaccctatcgttcttctcgttttcgccgattctcgccatgccgaaagctaaatccgacgccaaagccgccgatagcaggttgaagcggaagggcgctggtgctgggaggaagcaatcgaggaaagctgctaaggaccctaacaagccgaagagacctccaagcgctttcttcgttttcatgtccgagttcagagagcagttcaagaaggagcatcctaacaacaaatccgtcgctgttgtcggcaaagctggtggtgaaaaatggaaatcgctatctgatgctgaaaaggcccctttcgttgctactgc

SEQ ID NO: 635 - DNA, 276 bp, Glycine max
gaaaagtttgaggagagagagagagagagagatggaggagaagacggagaaggtgaagtctgaggcagttcagataattgaagcgtttgaggttctgccaaagctcgtggttttcgatctcgattacactctctggcctttctactgtgagtgtcgatcgaagcgcgagattccttctctgtatccccacgccaaaggcatattgttagctctcaaagagaaaggcatcgacattgccatcgcttctcgctcgccaacggcagacatcgcaaccgc

SEQ ID NO: 636 - DNA, 259 bp, Glycine max
gggttgcctgatgaggttaaaaaaagataaagatacaaaaaaaaaaaaaaaaagataaagatacaaaaaaaaaacaaaaaagataaggataaaaaaaaacaaaaaaaaaaaaaaaacttagaagaaaaaaaaaaaaaaaaaaaaaaaagggggccccccaaaagtgttaagtctaatttacctttgattgcaatttcaaaccccttcaaaagggcccccaaatttcatttctggggcctccttttaaaaacttcttaac

SEQ ID NO: 637 - DNA, 358 bp, Glycine max
gaatttaattagaatcgtttaatgtcaaaaaaaaaaaaaaaaaaaaaaaaaaaaaaaaaaaaaaaaaaaaaaaaaaaaaaaaaaaaaccaaaaaaaaacaaaaaaaaaaaaaaaaaaaaaaaaaaaaaccggccgcccaaaaggatcaaacctaacgtacccttccatgcaacttcaaaccccttcaaaagtgtcaccaaaatccaattcacgggccgtcctttaacaacctcctaacgggaaaaaccctgccgtaaccaaatttaaccaccttgaaaaaaacccccctttcccaaacacggcataaaaccaaaaaggccacaaccaatcccccttcccaaacaattcccaacccaaa

SEQ ID NO: 638 - DNA, 290 bp, Glycine max
gattccattacagaagaagaagaagaagaaaagagaagaagcttcttcttggttaccttgacagacagagagtggagcaaacgacaaatcagcgagttggaacattttgtgtttggtggagatgcctattcggagcttggtagaagtggagccaccaagcccactgagatacttgatcggcgccgccgttatgatgatcggagttgtgttaccagtcggttacatgatgttccgtaacaagcgcgtcccctcctcttccctctactccaaacagacgaacaatgttttga

SEQ ID NO: 639 - DNA, 385 bp, Glycine max
gtgtgagagagcgagcgagcgagcagtttcaaagagaggatttgggattgggaaggcgagggattgcgctgcgtctcttcctcttctctttcgattcatccctcattcataatcttccaatccaacaacctcagcctcacactcacacatacacacatctgaacgcgtatcgtccctcccatggcttcaaagcgcatcctcaaggagctcaaggacttgcagaaagacccatcaacttcttgcagcgctggtccagtatctgaggacatgttccattggcaagcaacgattatgggtcctgctgatagtccttatgctggacgtgtattcctagtcactattcactttcctccggattaacctttcaaacctcccaaggttgcct

SEQ ID NO: 640 - DNA, 343 bp, Glycine max
ggaagttattagggtttttgagtgcggcggtccaaacactcttctctgcagcttttgcctacaactcccttcaccatggctgaacaaaccgagaaagcttttctgaagcaaccaaaagtgtttctcagcacaaagaagactgggaagggaaagagacctggaaaaggtgggaaccgcttttggaagtccattgggcttggatttaagactcccagggaagccatcgaaggaacctatattgacaagaagtgccccttcactggcaatgtttccatccgtggccgtatcttggctggaacatgtcacagtgccaagatgaacaagactattattgttagaagga

SEQ ID NO: 641 - DNA, 176 bp, Glycine max
gacgtcacgatgtgcatgtcagagtgtgtattagagtacaagccgcatttgatcgcagtgtgttaggatgagtaacaccatcagggactctagctgaagtgggagacgtgattccagaccgcactgtcgccaacctggctcacgccaacagcacccaagtcgtcaccattcaggct

SEQ ID NO: 642 - DNA, 329 bp, Glycine max
gctcgtctcgtggaagtgtaagcaagcaaaaccctagcggcgcctgctttctttgttcgtgttttgcatcaggatggagtctcaggtgaagcacgcacttgttgtcaaagttatgggtcgtactggatccagaggacaagtgacccaggttagagtgaagtttttggatgatcagaaccgtcacatcatgaggaatgtgaaaggacctgtgagagaaggagacattctcaccctactcgagtctgacagggaagcaagaagattgcgctagatggtctctttttttggcttgcctccaaattccaacaaaagcaatatttttcttgata

SEQ ID NO: 643 - DNA, 342 bp, Glycine max
gattcctcaagaactagggtttgcagtcactgctctgtttcaccgagtttgggcgtttaggtcagaaccaaatcgtgttctcttccattggcaaacatggcaactcaaatgagcaagaagagaaagtttgttgcggacggagtgttctttgccgaactgaacgaggttctgacacgtgaattggcggaggacggttactccggcgtcgaagttagggttacgccgatgcgcaccgagatcatcatcagagccaccagaacccaagccgttctaggtgagaagggaaggagaattagggaacttacctcagtggtgcagaagaggttcaaattccccgaaaac

SEQ ID NO: 644 - DNA, 408 bp, Glycine max
  modified_base (69)..(69): a, c, g, t, unknown, or other
  modified_base (159)..(159): a, c, g, t, unknown, or other
  modified_base (254)..(254): a, c, g, t, unknown, or other
tcacggactcgatcccacgcagtaagtccgtatgcgatacaacgagacgacagggaagggacatcacantttcgattgcgcctctgtgtctctgtcactggctgcgtctctccgtaaccaaatgcgctaagcaaatccatcgagattaagggatttccnttctcaactggctagaagggaaggacgcaaggggtcggtgaagatcatagaggagcaagagatgtttggttaagttcaaggggtcagatgctcgnaagtacctcctacacaaactttgtgtgtttgaccccagagaaagctgataaattgaagcaatctcttcctccaggtttgagtgttcaagaccttgtaaagtacaaggcgagagaccaagaagaagcaattcattgattcctctgaacttcgttt

SEQ ID NO: 645 - DNA, 374 bp, Glycine max
gaagcagagccgaagcggaacgcttgctagcgatcggcgagaagctgcttcagagccgcgatctgagcagctcgcgcgacttcgccatcctcgcccaggaagccgagccgctcctcgaaggctccgaccagatcctggccatcgtcgaagtcctcctcgccgccgagaagccaatcaccaacgaccacctcgattggtacgctattctccaggtcgatcgcacgtgccaggacctcgatctcatcaaaaaacagtaccgtagactcggtcttcttcttcaccccgacaagaaccctttctccctcgccgaccacgccttcaagctcgtctccgatgcctgggccgtgctttccgacccggtccagaaagcgatt

SEQ ID NO: 646 - DNA, 285 bp, Glycine max
gacagctcttggctttagcaaattccaattcccaattcccaattcgaaacccttagtcctttcaaagaaccaaattgagtgatcgtgatggcaccaaaggcagagaagaagccagcggagaagaagcccgcggaggagaagaagtcgacggtgggagacaaggctccggcggagaagaagccaaaggccggaaagaagcttccgaaggagggaggcgccggcggagaagggaagaagaagaagagaaacaagaagagcgtggagacatacaagatctacatcttc

SEQ ID NO: 647 - DNA, 322 bp, Glycine max
ggttctaaggggtgattgtttgttgttgtaactcgttcttcatcatttgttgttctgtgtttgtgtttgttttttctctcacctgaaaatgtcttgctgcggtggtaactgtggttgcggaagctcctgcaagtgcggcaactgctgccgaggctgcaagatgtacccaaacttgagctacactgagtcaaccaccaccgagaccttggtcatgggagtggcacctgttaaggctcaatttgagggtgctgaaatgggtgtgcccgctgagaacgatggctgcaaatgtggaccaaactgctcctgcaacccctgcacttgc

SEQ ID NO: 648 - DNA, 367 bp, Glycine max
ccaggcgtcagacagctacaaaagggggacacaaaggggtctcgtggaagtgtaagcaagcaaaaccctaacggcgcctgctttcattgtacgtgttttgcagcaggatggagtcacatgtgaagcacgcacttgttgtcaaagttatgggtcgtactggatgtataagacaagtcgaacaggttagagtgaagtttttggacgatcagaagcctcacatcatgacgaatgtgaaaagacctgtgagagaaggatacattctcatcctacgcgagtctgaaaaggaagcacgaagattgcgctagatggtctctcttttttggcttgcctccaaattcgaacaaaatcaatatttttcttgatattt

SEQ ID NO: 649 - DNA, 347 bp, Glycine max
gaagtcttatccattcatttcatccatccagcacgcgcacttcctttggagtctctgcctgaagatggcaagccttcagttaacaacaacacccttcactcttttgagacaacaaaggcagcaccccacaaagaagaagtccactgcttctcagctgaaccctcctcggccacgtcgcctcagagtgagtgtgaggtcctataaagtggtgattgagcacgatggagagtccactgaggtggaggttgaacctgacgagaccattctgtcaaaggcattggactctggcttgtctgtgcctcatgattgcaagcttggagtctgcatgacatgccctgctcgcctca

SEQ ID NO: 650 - DNA, 351 bp, Glycine max
ggtggtcgtcgaagcgcgagcaagcatcccaaaaccctagctcgcgttctgctttcgtcttttacatcaggatggagtctcaggtgaagcacgcacttgttgtcaaagttatgggtcgtactggatccagaggacaagtaacccaggttagagtgaaatttttggatgatcagaaccgtcacatcatgaggaatgtgaaaggacctgtgcgagaaggagacattctcaccctactcgagtctgaaagggaagcaagaagattgcgctagatggtttcttttggcttgcctccaaattcgaacaaaacagtgtgattttgttgattttaatggtagttggtggatgtcaaaa

SEQ ID NO: 651 - DNA, 388 bp, Glycine max
gattcttattcattcactctgctccctcactccaactttcaaaaccctaatttcttcctcgaaatcttctcctcccttccgcgatttcatttccactgctttttccttcgcttggccgtagtcgcttcaattgcgaattccgtcacattctttgtgcagatggcaggggcggataatggtgacggcaacgggagtgaaagggaattagcgggaaatagcgataacggttctgtggaagttgcagaggcttctgttagtgatagtggttgtgaagggaacgacagcgtttcttacgcgaacgtcttgcgttcgaggaacaagtctgttgaagcgcttgctatctacgagcgcgtgttggacagtgatggtgcagatgtagaggggctca

SEQ ID NO: 652 - DNA, 395 bp, Glycine max
gaaacatcatcatgtcggacgaagagcaccatttcgagtccaaggcagacgccggtgcctccaaaacctaccctcagcaagccggtaccattcgcaagaacggctacatcgtcatcaaaggacgcccctgcaaggttgtggaagtttcgacttccaaaactggaaagcacggtcacgccaagtgccactttgttggaattgatattttcactgccaagaaacttgaggatattgtgccctcttctcacaactgtgatgttcctcatgtgaatcgtactgattaccagctcattgatattgctgaggatggatttttgagtctgcttactgaaaatgggaacaccaaggatgacctcaagcttcccactgatgagagtctgctcactcagataaag

SEQ ID NO: 653 - DNA, 374 bp, Glycine max
aggggactcactcatacaataaagaacagcttttgcttctttgtgaacatggagatgaggaaatcatgtggcttcttcgtcatgctcctcctccttgtctttgcttctcaagtggtggtgcagacggagggaagaatgtgtgagtcacaaagccacgggttccaagggttgtgtaaaagagaccacaaatgtgcgttgggctgcacgaaagaaagtgtctcccgtgtcacatgtacaagggttctcccccgcggggtttttgcaacaatattttttgatatctcatcaaacactactcttgccaagcaatttaataaatcatagctaggccaaataaattgcatctactctttatccatttgggagcctactac

SEQ ID NO: 654 - DNA, 382 bp, Glycine max
ggttggcccaacttggcaaagcaatggctctttctgtatcccttatgcaactcagttgcgtctctcttcttcacaataatccctcatcatcatcatcaccggtgacccttttgcccaaatccctctttccttgtggaatttccctgaaactgaaagggttggttttttggagtaaaagtagttcagtgtgtggaagaagaagagtgggagttgggagtatcagtgtgaatgcctctttggttgaggctccagttttgtgggctggaaggctatgcatcttctatgccctcctcaaggctggcttggctggatctcaagccaacccacttgtctcagatttggaaattggggatactaatgatgaatctgctcctggtgctgc

SEQ ID NO: 655 - DNA, 313 bp, Glycine max
ggatcctttgtattctattcttcaagattcaggtactgcgtttcggaagcaggtaccaaagtagtccttcgagacacagatggctcgtacgaagcaaaccgctcgtaagtccacaggaggaaaggctcctaagaagcagcttgcaaccaaggctgcacgtaagtctgcaccaactactggtggtgtgaagaagccccaccgttatcgtcctggtaccgttgctcttcgtgagattaggaaataccagaagagtaccgagcttttgatccggaagctccccttccagaggctggttcgtgaaattgctcaggac

SEQ ID NO: 656 - DNA, 317 bp, Glycine max
tgcgacattcaccattgactgcgccaagccagtggaggacaagatcatggacatcgcgtctctcgagaagttccttcaagagaggattaacgttggtggcaaggccggtgctctcgccgacaccatcaccgtcacacgtgagaagaccaaaatcatagttacttcagacagcaacttctccaaacggtatctcaagtacttgactaagaagtacttgaagaagcacaatgtgcgggactggctcagagtgattgcttctaacacagatagaagcatttatgaattgaggtacttcaacattgctgagaatgaaggag

SEQ ID NO: 657 - DNA, 419 bp, Glycine max
gagtgttgttatttgaggatgacaggaaaaaaatgcagtagaaggacctagatgggtgattttgatttttgatgataattgttgcattcatcatcaatgctgattgatattcctggcatcctcaaataacaacactctgtatttgcagcagagaataatagcaacccagcaacacagtttcattaactgtttgtattttgacaagattttgcctatttatcatatgcacgtttgtagtttttagtttctaaatccctcaatcattttaagtttgtttatctaaaaaagcactggatgggaaaaggaaaaatggctttccaaactcacttgttccgttcaaccatgatcacaaaactcttacttgttaccgttgtcatgtgcaactgtttaaaatgagtatctccaatgaaaatttcttc

SEQ ID NO: 658 - DNA, 385 bp, Glycine max
gattttcgcggcgcacagcagaactctgcttcatcggaatccgatcgcacgcgccgtcaccatggtgaacgttccgaaaacaaagaagacatactgcaagagtaaggagtgcaggaagcacacgctgcacaaggttacccaatacaagaagggtaaggatagcattgctgcccaaggaaaacgccgttatgatcgcaaacaatccggttatggtggacaaactaagcccgtcttccacaagaaggctaaaaccaccaagaagattgttctgaggttgcaatgccagcgttgcaagcatgtctcccaacacgctattaagaggtgcaagcactttgagattggtggtgacaagaacggcaagggaacatcactcctctagtttgag

SEQ ID NO: 659 - DNA, 273 bp, Glycine max
tgggactccgcagctgcagcactcaaaaccctagagaggacgagagagcgtgcaactttcggcaaccacagaccatgacattcaagcgcaggaatggaggtcgcaacaaacacggccgcgggcatgtcaaagtcatccgatgctccaactgcggaaaatgctgccccaaggacaaaggcatcaagaggtttttggttaggaacattgttaaacacgctgcagtccgagatgtgcaagaaacttgtgtctatgaacaatatacacgtccaaaac

SEQ ID NO: 660 - DNA, 248 bp, Glycine max
ggaacttctcacgttcatttctacacatccctagctctgtcgttccgtcgttgacgatggcgtttcgggtgcgaagccctgacctccgctctctctttcttctctctctcttgtccatcgcttccgccaatgtcttcttcgaggagcgtttcgatgaccggtgggaaaatcgatgggttaaatcacattggagagcagatgagaacgtggctggggagtggaaccacacctctggtcaatggaatgga

SEQ ID NO: 661 - DNA, 373 bp, Glycine max
gagtctcaacacagaagcagaaggaggagaagcagaaagaggagacgaagcaatggcgccgaagaagccccgaaccacgtcgaggaaccctgatttggtcaggggaattggcaaatattcgaggtcgcagatgtaccacaagaggggcatctgggccatcaaggccaaaaacggcggtgttttgcccctccacgatcccaagcccaaacccgaggccccggcccagaagccgcccaagttctacccggccgatgacgtgaagaagcccctcgtcaacaagcacaagcccaagcccgcgaaactcacggctagcattactccagggactgttctgatcctgcctgctgggaggttcaacggaaagacggttgtt

SEQ ID NO: 662 - DNA, 113 bp, Glycine max
gttataactttgacatcaatgtccatttggccaggcattagttcaataaatccatcttgcttatgtattctaacatttgttgtctttttttcagatttctttctattgaagtt

SEQ ID NO: 663 - DNA, 303 bp, Glycine max
  modified_base (38)..(38): a, c, g, t, unknown, or other
ggtgtccactacggtctttaagggggtacaggaagtanaaccctacatgtagactagaagattaggacaaaaaatattaaggaaaataatactaaaccgtagagaaaagggacacgtcctcgaaaaccacgtcacctggtagaatctgaaagtgtgaagagtgaagatggccgaagaaaaagaatcaacgtcaattcctcttagtcaaagggaaaatgcatctcgcgacgattccgaagacccagccaagtctccaccaagctcgcccaactcctccactcgcaaagcttgctgctttgttct

SEQ ID NO: 664 - DNA, 365 bp, Glycine max
ggtacgcaccttcatccctaacgcgtgcataccagagtcacagacagagacgcagccatggggcggagacctgcgaagtgttataggcaaattaagaacaagccataccccaagtcacgtttccgcccttgtgttcctgatcccaagattaagatttaagatgttggtatgaagaaggaaggtgttgatgaatttcctttccgtgtccatctggttaattgggagaaagaaaatgtttctaatgaggccctggaaactgctcgtattgcctgcaacaaatacatggccaaatttgctcgaaaagatactttccacattagagtcacggtgcacccattccatgttcttatgatcaacaagatgct

SEQ ID NO: 665 - DNA, 304 bp, Glycine max
  modified_base (53)..(53): a, c, g, t, unknown, or other
ggtttgattatggtttgtcattagcacttcatcttttcacactgccgctgcanaaatggcttcagagaagaaactttcgaacccagtgagggagataaaagtgcagaagctcgttctcaatatctctgttggcgagagttgagatcgtcacaacatatccgccaaggtgttggaacaacgtagtggccaaatcccagtgttttccaaagcatggtaaactgttcgttccattgggattagaataaatgacaagaatgcatgctaagtcactgtcacaagttaataggcaatgttacttttggag

SEQ ID NO: 666 - DNA, 131 bp, Glycine max
gattggtaccgctaaacgcacatttcactattcaatctcgtttccctttccactgtgaatgtttgttaactgaacttttcgagcaaaatgtcaggacgcgtaaaggggggcaacggttttggaaaaggagg

SEQ ID NO: 667 - DNA, 268 bp, Glycine max
atattagcatgaactctaatatcatggttgtactctttgtaaccgttcaacttcacatttaagctagtaattggtgctttttctattgtacagtcgattagacatttctcatgaactcattacatgaagtttgatgtgagtttctggatgttgttatcacataatacgtcactgatgatgatattagcatctaaatccgtgattcaattgccatattgaatttcactgcagtatatgtatttgccgacccagatgaatagtgtcacta

SEQ ID NO: 668 - DNA, 298 bp, Glycine max
gatggtggatttggggagggtgaagaggagttgtcatctgaagatggaggtggatatggcaacaattccaacaacaagagcaactcaaagaaggcacccgaaggtggcgcaggaggggcacaagagaatggggaagaggatgaagatgaagatggtgatgatcaagatgacgacgatgaggatgacgatgatgatgacgaagaggacgaggcacgtgaagaagacgatgaagatggtgctgaggatgaggagaatgaagatgacgaggaagatgaggaagcattgcagcccccaaaac

SEQ ID NO: 669 - DNA, 369 bp, Glycine max
ggtacgcagcttcatccctaacgcgtgcatagcagagtcagagacagagacgcagccatggggcggagacctgcgaggtgttataggcaaattaagaacaagccataccccaagtcacgtttctgccgtggtgttcctgatcccaagatcaggatttatgatgttggtatgaagaagaagggtgttgatgagtttcctttctgtgtccatctggttagttgggagaaggaaaatgtttcaagtgaggccttggaagctgctcgcattgcttgcaacaagtacatggccaaatttgctggaaaggatgctttccacttgagagtcaaggtgcagccattccatgttcttacgattaacaagatgctttcg

SEQ ID NO: 670 - DNA, 334 bp, Glycine max
ggctgacaagccaatcctttgtgtaggtgctcaaccctagtaagccgcaatggtgaagtactcaagggagcctgacaatccaactaagtcttgcaaggctagaggcgccgaccttagggttcattttaagaacacaagggaaactgcctttgcaatcacgaagttgcccttggtcaaggctaaaaggtacttggaacatgttcttgcccacaagcaggcaattccattcagacgtttttgtccaggtgttggaaggacagcccacgctaagaatagacactctaatggccaaggacggtcgcctgtcaagtcaacaaaattcattcctgatttg

SEQ ID NO: 671 - DNA, 382 bp, Glycine max
gattcccacattgtactaccctgttagttagtcaagtagcttcactcactctttctatttccagaatgccaaatccaaatccaaagcaccttttccacgccactctcttcctctcgatacttctccaggcgctgtctaaatccacgattgagccatgctcgaactccgactcatgcaacgcgcttctgggatacaccctctacacggacctcaaagtctccgaagtggcgtcgctcttccaaatcgaccccatcgcgcttctcaccgcgaacgccatcgacatctcttaccccgacgtggagcaccacattcttccctcgaagctcttcctcaaagtccccatctcctgctcctgcgtcgacggcattcgcaaatccgtcgc

SEQ ID NO: 672 - DNA, 392 bp, Glycine max
gacactcactctttgactcttcttcgtctcaaatctcttcgttccttcgattcgttccatttcttccaaaatggccaaagacccagttcgcgttctcgtcactggagctgcagggcaaattgggtatgctcttgtccctatgattgctaggggagtgatgttgggtcctgaccagcccgtgatcctccacatgcttgacattcctccggcagcagagtcattgaatggggttaaaatggaattggtggatgctgcattctctcttcttaaaggtgttgttgccacaactgatgtggttgaggcatgcactggggtcaatattgccgtgatggttggtggattcccaagaaaagaaggtatggagaggaaggatgtgatgactaagaacgtct

SEQ ID NO: 673 - DNA, 104 bp, Glycine max
ctcttgccgctaatacgaatcctgacaaagtcacaaatccgttgttcgaaaaacgtccgaagcaattccgaatcggaggagcgttgcctccgaagaaaaacctg

SEQ ID NO: 674 - DNA, 231 bp, Glycine max
gatgtcatattacaagaccctcatcaccatgtacaaactctcacaagaatacaacactcaagatcagtgttaatataggtaatatctatagcacgtcgttaagatattggcacacatggatccagtgggccattttcacgttaatggtcccgtcaactgtgcactttgcctttccaggtatgagaagtttgctcttggatacactacagatgttgacattaagttgcactg

SEQ ID NO: 675 - DNA, 368 bp, Glycine max
ggcatcatttcattgcactcattcaccgcacatgtccggcaaggaccgaaagaaaattaaaacggcgtttcgataactgccacaaaaaagtacaaataaaataagaaaaagaaaaccaacatacatcagtcactagtgtgttaaaagcgacacaacacaacataagctttattcttttttcttcgcttcttctgtacagcacccaagattgaagatgatagaccttgcgcgcgtgcagaatgagctcgtggaatgcagcaaggactcggacggatcgggcatcaaagtctgccccaaaagcgacaaccttgttctcttgatcggcaccattcctggccctgtcggaactccttatgaaaggggcattt

SEQ ID NO: 676 - DNA, 297 bp, Glycine max
cggggaggtttacaccgaggagacacaccttcagcagcagcagccatggttctcaaaaccgaactatgccgaatcaacggtgccaagatctacccatggaaaagcatcagatttgttcgtggtgattctcaagttttcctgtttgctaactccaaatgtgataggtatttccacaacaagttgaaaccatcaaagctcacctggactgcaatgtacagaaaacaccacacgaaggacatttctcaagaagctgtgaagaaattaacacgtgctgccaaaaagccttactccacgtcc

SEQ ID NO: 677 - DNA, 375 bp, Glycine max
  modified_base (368)..(368): a, c, g, t, unknown, or other
ggcagtttcaaattttcttttccttcactttcccgagaaaaaaataacacttttcactttcttcactacgttctcacttcgatatggctcgtacgaagcaaaccgctcgcaagtccaccggtggcaaggcgccacgtaagcagctcgccaccaaggccgctcggaagtccgctccggcgaccggaggagtgaagaagccccaccgcttcaggccgggaaccgtggcgctgagggaaatcagaaagtaccagaagagcaccgagcttctcatcaggaagcttccatttcagaggctcgtgagagaaatcgcgccggatttcaagaccgatttgcgtgtccagagcagcgctgtttccgcgcttcaggangctgctg

SEQ ID NO: 678 - DNA, 370 bp, Glycine max
ggttgaatgtagaacgctgctgccgaaacccttcccgatccctaaggtaagtgagtaatccgtggttgagaatggtggagaacgcgaatggtacgaaggaggacgtggttaccacagagtacaccattaacctccacaagcgcctccatggctgcacatttaagaagaacgctcctaaagctattaagagagataacgaaatttgcccaaaaggccatggggaccaatgatgtgagggtggatctgaagttgaacacctttgtctggagccacagaatcatgactgttccaacgaagattacggtaagaattgctcgcatgacgaatgacgatcaatatgccaacgaagagctatactcgcttgtcaccg

SEQ ID NO: 679 - DNA, 318 bp, Glycine max
ggttctagtgtgtgattgtttgttgttgtaactcgttcttcttcttttgttgttctgtgtatgtgtctgttttttctctcaactgaaaatgtcttgctgcggtggtaactgtggttgcggaagctcctgcaagtgcggcaacggatgcggaggctgcgagatgtacccagacttgagctacactgagtcaaccaccaccgagaccttggtcatgggagtggcacctgttaaggctcaatttgagggtgctgaaatgggtgtgcccgctgagaacgatgactgcatatgtggaccaaactgctcctgcataccctgcac

SEQ ID NO: 680 - DNA, 387 bp, Glycine max
aaggaagcagaagtgaaagaagagaagaaggaaggggaagtgacggaagagaagaaggaagttgaagtgacggaagagaagaaggaagcggaagtgatagtagaagagaagaaggaagttgaagtgacggaagagaagaaggaagtggaagtgaccgaaggaaagaaagaagtggaagtgatcgaagagaagaaggaaacagaagtgacagaagaaaagaaagaagtggaagtagaagtgagggaagagaagaaggaaagtgaagtgaaagaagaagagaaaggtcgggaagtgaccgaagagaagaacgaagttgaagtgacggaagagaagaacgaagcggaagtgatagtagacgacaagaaggaagttgaagtgaccggagag

SEQ ID NO: 681 - DNA, 53 bp, Glycine max
gacgttcacattcacgatccgttttcttcagattatttgccaccgctgaggga

SEQ ID NO: 682 - DNA, 401 bp, Glycine max
gagatcccgtcgtcgcaggcgcagagtagagcagcacagaagagggaaaacggcaccgccgccgtagaagaaaacaaccatggtgcacgtctccttttacaggaactatgggaagacattcaagaagccgcgtcgtccgtacgagaaggagcgtctcgacgcggagttgaagctggttggtgagtacgggcttcggtgcaagagagagctgtggagggtgcagtacgcgctcagccgcatccgcaacaacgcgcggaacctcctcaccctcgacgagaagaacccgcgccggatcttcgagggagaggcgctgctccgaaggatgttccgttacggtctcctcgatgagacacagaacaagcttgattacgtcctcgccctcaccgtcgagaactttctcg

SEQ ID NO: 683 - DNA, 358 bp, Glycine max
gaaaaacaagaagaagaattggattcgaaaatcgtagcgtagcgttggtgcgattgaacgatacgatgggaagaggaaaattcaagagcaagcccactggtcgccgccagttctccaccccggaagatatgcttgctggaacctctaaccgtcctcgaacttttagacagaaagaagctgagcatgaagaggaagaacccgaggaagtatctggagatgaatctggagaagaatctgaagaagaaacttctaagaaaaaaggaacacaaggggttattgagattgaaaatcccaacttagtaaagccaaagaccttgaaagctagagatgttgatgttggaaaaacaacagaactttc

SEQ ID NO: 684 - DNA, 297 bp, Glycine max
gagttctttgaggcacagaaggaggaaaagagcgtgttaccccagcagaggaaagatgaccagatgacagtggatgctgcattgttaaaagccattgagagtgtgccagacttgaagtcttatttgggtgccaagttttctctaaaggctggcgtgaaacctcatgagctagtcttctagaggaaagaacggtgttactcctgtatttgataacctgtttgtttattggtgttgatccttatagttgcactcatataacagtcttgttaacatacaaatgaagaacctaaaattttg

SEQ ID NO: 685 - DNA, 317 bp, Glycine max
gagaaaagaagagaaagcgagaaaggaacagaagagaaaagcaaagggctttgagttgttccaatggaagaagcgaaaccagcgatgggtcctcctcctcctcttgctcctctcactacgaagaataggccactggaagactccaatgcccactccaattacttcaagattcgcgctgttattcgagaccttcgtcctcactttctcgaggttctccgaactccagactacgcaaattgcaaggcatcccatgacattcacgaacagctgaagattgtggtcaagttatacgagaatatgaaagcagatgcggcttc

SEQ ID NO: 686 - DNA, 364 bp, Glycine max
gacttctcttcacacctttgttcactcttcttctcttgcggctagggttttagcgcagcttcttctagatttaaggaagatgggtaaggaaaaggttcacatcagtattgtggtcattggccatgtcgactctgggaaatccactaccactggtcacctgatttacaagcttggaggcattgacaagcgtgttattgagaggtttgagaaggaagctgctgagatgaacaagaggtctttcaagtatgcctgggtgctggacaaacttaaggctgagcgtgaaagaggaatcaccattgatattgctttgtggaagtttgaaacaacaaagtattattgcacagttattgatgcgcctggacat

SEQ ID NO: 687 - DNA, 369 bp, Glycine max
gaatcatatatcatttcatttcttttttctcgtccatccgtaaccatgtctcagactgttgtcctcaaagttggtatgtcatgtgaaggatgtgttggagcagtgaagagagttttaggaaaattggatggtgtggaatcatatgacattgatttgaaggaacagaaggtggtactgaagggaaatgtccagccagacacagttcttgcgaccgtttccaaaactgggaagaagactaccttctgggaaggtgaaacagcagcatccgaaactagcacagcaactgcctagaacatttcgctctattatgtgcagaagaagtagctgcgtaaatcaaatactattttatggacctgaaataacgatggg

SEQ ID NO: 688 - DNA, 376 bp, Glycine max
cacgggagagcgagctagagagagagagagagagagaaagagaagagagagaagcagcgattcatcacaatgggtaaggttcacggatctctcgcacgtgcgggtaaagtgagaggacaaactcccaaagtggcgaagcaagacaagaagaaaaagccacgcggacgcgctcacaagagaatgcaatacaaccgccgattcgtcaccgccgtggtgggattcggaaagaagcgtggaccaaactcctcggagaagtgagggaggcgtgttgaagatcatggtttttcttagtttgtgaaatgtatcacttgttttgatttgattgatgaactcaaacctttatgatagttcttattatggttcactgaaggagttt

SEQ ID NO: 689 - DNA, 61 bp, Glycine max
cactcttctatcatgttccccaaattcaactccctggccatcgttttataacctcgttact

SEQ ID NO: 690 - DNA, 393 bp, Glycine max
aacagaactactatttagaagtgtttgtacatcttagtaggttgagtattcagcagtttatactcggaactttttcaaataaatgttttcatttacgttcttgaatgtagtatactttttacgttttgaagataacggagttttttttaagtgtttttgtgaagtaattttgttttgacattcattgtattaccacaatttgttgtttttgatttcaacagccgagccttttacttccacaagatcgggatttcatggccagaaccactattcatcatgattcgttccagacaacatactgaatgcttttttgtacataatttccgtcagatagctcgtaggaattggcacaatacaggaatctaatttacctcctacattccaagttgtacg

SEQ ID NO: 691 - DNA, 372 bp, Glycine max
gacgccaaaaccactgtatcagtgtgtccttccattccaggtttttccaccacactagaaagtaactttaaggttactatgatcttttttcaacatgattcatcacattttcaagcacacactgcattaagaagcgagaaatcataactcatacatatatatggtcacttataaataattcttatagcaaaacggatggcatggaaagcgtagggaaggatgtgcctgtaattgtctttgtctaagtagagtctgtaattgtctttttgagaaaacaacagctaacgtaattacatagagccatatttcatctacaaaatagcctgaaatctcatctgccactagttcgtgaagaacacacttgagctaact

SEQ ID NO: 692 - DNA, 378 bp, Glycine max
gataccatagaagaagcacaaagagaagcattagcactaggagcagcaacaactagtctcagctgaaatggcctcttcagtgatggtatctgtggccctcaaacctgcccctttcactgttgagaagtcctcagtgagaggccttccctctctctcaaggaactcttcttcattcagagttgtggccagtggcaagaagatcaagactgacaaaccttatggaattaatggtggcatggctttgagggatggaactgatgcatctggcacgaaaggaaagggaaagggtgtttaccagtttgtacacaaatacggtgctaatgtcgatggttacagtcctatctacgacaccaaggactggtccccaaccggtgatgt

SEQ ID NO: 693 - DNA, 393 bp, Glycine max
ggagcgtgtctctccgcagcagccttcttcgccgtttcagctcaagagccaccagcaggtaagatatggttaagcataacaacgctatccccaatgggcacttcaggaaacactggcaaaactatgtgaagacttggtttaatcaaccagcacggaagaccagaaggcgtttagctcggcagaagaaggctgtcaagattttcccaaggcctactgctggacctctcaggccaattgttcatggccagactctgaaatacaacatgaaagtcagatctgggagaggattttctctcgaagagttgaaggctgtgggaattcccaagaaacttggtccaactattgggatttctgttgatcaccggagaaagaatcgttctttggagagtctgc

SEQ ID NO: 694 - DNA, 379 bp, Glycine max
gactccgcagctgcagagctcaaaaccctagagaggaggaagagagagcgtgcaagttccggccaccaccgaccatgacattcaagcgcaggaatggaggtcgcaacaaacacggccgcggccacgtcaaattcatccggtgctccaactgtggcaaatgctgtcccaaggacaaggccatcaagaggtttctggtgaggaacattgttgaacaggctgcagtcagagatgtgcaggaagcttgtgtctatgaacaatatactcttccgaaactctatgtgaagatgcagtactgtgtttcttgtgctatccactctcatgttgtgagggttcgattccgcactgacaggaggaaacgttagcctccacagagattcat

SEQ ID NO: 695 - DNA, 109 bp, Glycine max
atatttctgccatataatattttattgcatataatacgtagtgaacaaataaaaagagagggggttggggaatttgattaaacaaattgaatttcttcaattaacttgt

SEQ ID NO: 696 - DNA, 258 bp, Glycine max
catgctaagagggttaccattatgcccaaggatatccagcttgcacgcaggatcagaggcgagagggcttagaaacaaggttgagaggtttgggtgttaggtgcttagggttagggttctggtcttgaaggatgtgtttgggagtttggttgtaggaatcctctccatctgtgtgtttatgtggaatgtgaaatgtgaatctctttgcttttgtaattatattgtgttactatgaggagttaatgaaaatgctatggc

SEQ ID NO: 697 - DNA, 115 bp, Glycine max
ggttctagtgtgtgattgtttgttgttgtaactcgttcttcttcttttgttgttctgtgtttgtgtttgttttttctctcaactgaaaatgtcttgctgcggtggtaactgtggt

SEQ ID NO: 698 - DNA, 388 bp, Glycine max
gatacctaaaaattgtaccgatatggcttcacttgtgtgtctccttttttccttgcatttcatggttatcatgtcaggttccttaccagcaaatagtgaagtgtttacaaaagagtctcctatgtctctatccacaaaacccgtggaaagactcacccaactccacttttatttccataacaacaaaatgggggaacacccgactgctatgaaaattgttgagcctcctaaggcgtccatttctggttttgggactatttacatgatggatgaccctctaaccgaaggaccaagtccaacttcaaagcttgttggaagatgtcagggaatatatgctgaggcttcgcaacatgaacctgcgatactcatggtaacgaatttgttcttc

SEQ ID NO: 699 - DNA, 379 bp, Glycine max
taatttgggaattattgctcccatcgccattggtttcattgtcggcgctaacattttgttgggtggggccttctctggaacggccatgaaccccgctgtgacatttgggcctgctgtcgtgagctggacctggaccaaccactggatctactgggccgggcctctcatcggtggtggaatcgctggccttgtttacgaagttgtctttatcagccacacccacgagcagcttcccaccactgactactagagggggggaaatgaaaataaaaaaaaaaaaattgtgtattattgaatttctctggaatcttcttctgtgtatggttttccttccttgtgttttcttcctaattcactttcgagggttgtacttgttcct

SEQ ID NO: 700 - DNA, 393 bp, Glycine max
gaaaagcggcgtttgctaattgcttcgaccgagtgattcagaggaggagaagtaatggctgcgatcgcgggagcgcacgtgtttggtgttgtgagttttcagctcaagcaagctgaaatgccctttgcatgttccagcttaatccgcaagcatattggagattctcctcagcgcaatgtggctctaagacgcagagcaaatggaacaattcttccccaaatcagagcccagaacgttcttccagactatgttccaaaatcggagttttataaagtagaagccattctcaggccctggcgagtccctcaggtttcttcggctatgttgaaaatgggaattcgcggtgtcactgtatctgatgtcaagggccttggttctcaaggtggttcaaaa

SEQ ID NO: 701 - DNA, 373 bp, Glycine max
gaggggttcaatgtataacgctgctgccgagccccttcgcgatcactaaggtaagtgagtcatctgtggtcgacaacggtcgccaccgccatggctatgaatgacgaggtggttaccagacagtacagcattatccgccactcacgcctccatggctgcacatttatgagtaaagctcctaacgctagtactgagatcaggaagtttgcccagtacgccatggggaccaatgatgtgatggtggatgtgcaacttgatcaactttgtctggagccaatgaatcaggactgttccaatgacgactaaggtaagaattgctcgcaggacgaatgacgatgaacatgcccatgaacagctatacactcatgtcacc

SEQ ID NO: 702 - DNA, 276 bp, Glycine max
ggcgcattgaacgaagcttagggtttgtagtgtagcatgaataagcagcaatggccccgaatataagaccttaggtgagcaaaaaccctgaactgatcctgggaatcggacagtactccaagtcgcatatgtactacaataggggcatttgggctatcaaggccaaatacggtggcgttttatcgcggctcgacgctaaactcaagcccgatgcgactgctgaagaaccaatcaaattttaccctgctgatgacatcaaaaaacctcctgtcaaca

SEQ ID NO: 703 - DNA, 375 bp, Glycine max
ggagcgaagaagatattagggtttttgagtgcggtgcggcgatcctagcactctcttctgcagctttcgccgacagcttcattcaccatggctgagcaaaccgagaaggcttttttgaaacaaccaaaagtgtttctcagctcgaagaaaactgggaagggaaagagacccggaaagggtgggaaccgcttttggaaatccattgggcttggatttaagactcccagggaagccatcgaaggaacctacattgacaagaaatgccccttcactggcaatgtttccatccgtggccgtatcttggctggaacatgtcacagtgctaagatgaacaggactattattgttacgaggaattatctccattttatcaag

SEQ ID NO: 704 - DNA, 391 bp, Glycine max
  modified_base (341)..(341): a, c, g, t, unknown, or other
gagcgccaatgtttttttcagaggagtttcatcttgtaatcaaaagagtttatcttatagtaagaaatcgatgtcttactccattttaaggaacaaaacaagagaacaatagcctgacaaagggtttagccataaaatcgaatccatcattgatttgagatattgataaggtgaatactcatttctcgtcaatgctaggcataatgcgggtatagggacctaaaaaagattatcttttcttcctatcttatgaactttaaggtgtatgaagtgtcatttcctatcttagattttaattttagtacgtagataaagagtccatttaacttaagttgatctangccagaagcagacctacgtcaagataatccttctttgaaacactttggta

SEQ ID NO: 705 - DNA, 395 bp, Glycine max
ggattcggcaaagttgatttcaattcaatttgatttccccctttttcttctccacgtttgtgcctgcaacctcaaataccgattagggttcatgctacactgaacttggtttcggtgttccaagttagttagaggcattgttgcttgcatagatctctgatctgaaaatgagtgcgtcgaggttcactaagtgcgtcaccgtcggcgacggtgctgtcggcaaaacctgcttgttgatttcctacaccagcaacacttttcccacagactatgtgcccaccgtttttgacaatttcagtgctaatgtggtggtggatggaagcaccgtaaacctacgattgtgggatacagctggtcacgaggattacaatagattaagacccttgagctatcga

SEQ ID NO: 706 - DNA, 383 bp, Glycine max
ggcgtacgcagcttcatccctaacgcgtgcatagcagagtcagagacagagacgcagccatggggcggagacctgcgaggtgttataggcaaattaagaacaagccataccccaagtcacgtttctgccgtggtgttcctgatcccaagatcaggatttatgatgttggtatgaagaagaacggtgttgatgagtttcctttctgtgtccatctggttagttgggagaaggaaaatgtttcaagtgaggccctggaagctgctcgcattgcttgcaacaagtacatggccaaatttgctggaaaggatgctttccacttgagagtcagggtgcacccattccatgttcttatgatcaacaagatgctttcgtgtgctggtgct

SEQ ID NO: 707 - DNA, 140 bp, Glycine max
aagaactctaagattttgaagaatgcgcaacctttcattgattggcttcagagtgcagaatcagaaagcgacgaagaataatttttcctacattctccgttacttaggtttacttgattgtgtcatgttcgttatttcca

SEQ ID NO: 708 - DNA, 345 bp, Glycine max
gccacaccgcaaactctctctgtaaagtgcaaagcctctattttttcttgtgaatttgaaggacgatgagttccacagaggtcgcagccacaacgaagaagggtggaagagggaaacccaagaccacaaagtccgtttcccgttcctccaaagccggccttcagttccccgtcggccgcgtcgctcgctacctcaaggccggtcgctatgcccagcgcgttggttccggttcccctgtttacctatctgcggttctcgaataccttgccgctgaggttttggagcttgccggcaacgctgcgaaggacaacaagaagacgaggatcgttcctaagcacattcaac

SEQ ID NO: 709 - DNA, 342 bp, Glycine max
ggtttctcttcttttctcactcagtgtcacttcttcaccgccatgaatgctatagccactgcttctgctctctctcttccgatttttcttagagctgggaagcttgacaccaaaagggatttgaaaggtagatttagagtgtttgctgtatttggagaagaagagaagaaaaatgcatggggtgcgctttttgatgttgaggatccgagatctaagtttccacagaataaagggaaggttttggatatatctcaagcactagaagtggcaagacatgatattcagtacttagattggcgagctcggcaagatgtgctaacaatcatgcacctccatgaaaag

SEQ ID NO: 710 - DNA, 354 bp, Glycine max
gggaagcagaaagagaagcattagcaaaagcaagaagaactagtctaagcagaaatggcctcttcagtgatggcatctgtggccctcaaacctgcccctttcactgttgagaagtcctcagttagaggccttccctccctctcaaggaactcctcttcattcagagttgtggccagtggtggcaagaagatcaagactgacaagccttatggaattaatggtggcatggctttgagggaaggagttgatgcatctggcaggaagggaaagggaaagggcgtttaccagtttgtagacaaatacggtgctaatgtcgatggttacagtcctatctacgacaccaaggactggtct

SEQ ID NO: 711 - DNA, 365 bp, Glycine max
gatataccgttgcatacttgcatagtagtaatggcgctctttgttttgtctctcttattcttcgtcattcttaatggggagttccgagagtcagcttcaagtacgtttctactccaacacatgtcctcacgttgactctattaaccgtgccgttgttagagactccgttctctctgaccacaatatggcggctgtcttactcatacttcattttcacgactgctttgctcacggatgtgatggttcaattctgattgagaatggtgcacaatcggatagacatgcatttggacatcacggggttatagggtttgaagtgatacaaagagcagaggcacaattgggaggctcttacctcggcctgg

SEQ ID NO: 712 - DNA, 277 bp, Glycine max
ggttttgcactgccattgaaggaagagcacaaactgtttcttgttcgtatactgattccgttgcacaagccaaagtgcttagcagtgtagcatcaacagttatcttagtgcattacccaatttgtagagaaagactgcaagcttgctgatacaattagtaggggattgttgaagtagtggcctataacaaatagtccaaaggacgttatgtgccgtgggtgagttgggagaagtcgtggaaggaacgcaggggcgatgggttcagcgttgtatggtg

SEQ ID NO: 713 - DNA, 129 bp, Glycine max
gctaggcagtcgtaacgtttgcttaagatgagaaagagcaccacttggtcagtctcttaaacgtccgaagagtgcggcgatcgagtccggtcctaggacgcgggagagggcttagcagcagggcgaaca

SEQ ID NO: 714 - DNA, 139 bp, Glycine max
cactggaggaggaggctgaagctgatgctgagggcagcataatggaggatgttgattagacttttatatcatgcggaacggaattgggtatgttttttccctttttttcctttccgattgctctgacagtgtttaatgg

SEQ ID NO: 715 - DNA, 281 bp, Glycine max
gagagagagagagagttggaagaagaagaagggaagatgaacttgagatggatgcaagcggtgctgccgctgggaatcatagcgggaatgctctgcgtcatgggaaacgctcagtattacattcacaaatccgcgcatggcagacctaagcagatcgggaacgagatgtgggacgtggccatggaacgacgggacaggaggcgtgtcaaggaagcctctgcggcgaatgaacatcgttggtttgccaatgacattgtgaagaaaatagactgcgcagctgg

SEQ ID NO: 716 - DNA, 294 bp, Glycine max
  modified_base (250)..(250): a, c, g, t, unknown, or other
gaccgtgcgctagttctgagtattctgatcgctccctgagagagctcgtcgcggcggttgcagaagaagattgcaagatgaagttcaacatcgcgaatcccaccactggatgccagaagaagctcgagatcgacgacgatctgaaactgcgagcattttgggacaagaggatctcacaggaggtcatcggagatgcactcggtgaggaatttaagggctatgtcttcaaaattaccggaggttgtgacanacaaggatttccaatgaagcagggagtgctgaatcctggtcgtg

SEQ ID NO: 717 - DNA, 360 bp, Glycine max
gattcaccacaaccctctctctatattccattgccacccagttttgaatatatttttattccttctttgtttcttcactttcttccatacacataaccatgtcttctcagactgttgtcctcaaagttggtatgtcatgtcaagggtgtgctggagcagtgaacagggttttgggaaaaatggaaggtgttgagttatttgacattgatctgaaggagcagaacgtgacagtgaaaggaaatgtggagccacatgaagttctgcaagccgtttccaaatctgggaagaagactgcattctgggtggatgaagcagcacgatctaagagcaagcgtttagaaagtgcagctgttgcctcag

SEQ ID NO: 718 - DNA, 360 bp, Glycine max
gacccccaaaccctgctgcataggaagaaaccctagcctctcaccctccctgcgacacgatgcagatcttcgtgaaaaccctaacgggtaagacgatcacccttgaggtggagtcttctgacaccatcgacaacgtgaaggccaagatccaggacaaggaaggcatccctccggaccagcagcgcctcatcttcgccggaaagcagctggaggacggccgcaccctcgccgactacaacatccagaaggagtccaccctccacctcgtcctccgtctccgcggtggcgccaagaagcgcaagaagaagacctacaccaagcccaagaagatcaaacacaagcacaagaaggtcaagctcg

SEQ ID NO: 719 - DNA, 349 bp, Glycine max
gaattcacttgcggctgcagtagagaagcactcttcgttcttcgactgtctacgatctgctttctctgaattgtgaaaatgtcgctcggagaaactgcttgttcatacgcagctctcatccttcatgaagatggaattagtgtaactgctgacaagatcagcaccttgttgaaaactgcaaaggttccagtagactcttattggccaaccttgtttgctaaacttgctgagaagaaaaatcttggcaatttgatagcaaatgcggcaggcggtggtgcaccagttgctgttgcagctgccccagttgctgctgctgctggtggtgctgctgccgcagctccagctgctg

SEQ ID NO: 720 - DNA, 138 bp, Glycine max
tgggaagactgtctctagcatcagaagatcatctatgagatatcagaaaactcactgcagatatacactcgagacttaactaagatgtagttgtgcagtatctttcgctctcacattaccaagtttaagctcgtaagc

SEQ ID NO: 721 - DNA, 245 bp, Glycine max
gcttgcgcccaatttccatggaactgtaaagagaggatagttagaagattaaatcttaaagcagtaagtcatcatggataaatcagagcagactcaacagcagcagcagcaacaacagcatgtgatgggagttgccgcaggggctaaccaaatggcctattcgtctcactaagcgactgcttccatggtggcttctggcacgcccgctgtaactgctccttcaccaactcaggctccagctgcct

SEQ ID NO: 722 - DNA, 151 bp, Glycine max
ggggacgaggaagagagagagagatagattgttgtattttttggaaatgagagatagagagagagagagagagagagagaagacagtggtggcgaggcgacgcgagactcggaacgagtcattattcggtcgtggggttctggcggttttc

SEQ ID NO: 723 - DNA, 373 bp, Glycine max
ggtcttgcaggcgaagagatggccaccgttccagggcagctcgtgtgggagatcgtcaagaaaaacaattccttcttggtcaagcagtttggaaggggcacccagagcgtcgaattcagcagagagagcaacaatctctacaacctcaattcgttcaagtactctggtttggcaaacaagaaaactgttactgttcagcctgagggcaaagatcaggctgtgttgttggctacaaccaagacaaagaagcaaaacaagcccgctgcattgctccacaaatctgtgatgaagaaggagttcaggaggatggcaaaagctgttgaaaaccaggtggccaaaaattactacaggcctgatctcaagaaggctgccc

SEQ ID NO: 724 - DNA, 354 bp, Glycine max
  modified_base (227)..(227): a, c, g, t, unknown, or other
ggttgacctccttgcttctctcatgttacaatcctcttgccgctgagctccctttctcctcggtccacagagacaagatgtaagacaggtgccaacagttcatcacgaaagaaaggactagctgagccgagatcactaactaaaacgaatttaatactaatcgaaaatactaatagaatagaaatagaactgtcgtttcatatagatatcccgtcaacacaacatangtcatcgaaaggatctcgaagacccagcaacgcacgaaagccgggatctttcagaaaatggattcctagtcgaagggtgcataaccgcatggataagctcacactaacccgtcaatttgggatccaa

SEQ ID NO: 725 - DNA, 323 bp, Glycine max
gaaaacgagaattagggtttgtagtgcagcaggaagaagcaataatggcgccgaagataacacgtaaggttagcagaaaccccgaattgataaggggaatcggaaagtactcgaggtctcaaatgtaccacaagaggggcatttgggctatcaaggccaaaaacagtggcgttttagctcgccacagccctaaacccaaacctgaaactcccgctgaaaaacgagccagattttacgctgctgacgatgtcaagaaaccccttgtcaacaagcacaaacccgaacgcgcgaagctcaaggcgagcattagtccgcgggacagt

SEQ ID NO: 726 - DNA, 253 bp, Glycine max
ggacccttttttggcagacttacttgtttgtggtccgaaactgctgattgcaactgttcagtggtcacaggaagcaccaggctccaaagccagcacttaagacctttccttctcttccgtctctcttctttacccttctgtttttattaacaatgcaatatcgaggagagataaagaacacaagtttaattaggattgacattcaagaatcattttcttttatgccaagaaggaattagatgccgataagtgg

SEQ ID NO: 727 - DNA, 384 bp, Glycine max
gatcatttgtaagagaagggaaaagcgggaaaagagaaaaaacagagggttttgtttctcttttgcagttgcactcttgcgttgcaggcaggggcatctgtttcccgttctgctccgagcgatcaagtgagtgagtgagtgagtgtcatatatatatacatagtgcgttcgagaaatgcagcagcacctgatgcagatgcagcccatgatggctgcctactaccccaacaacgtcaccactgatcacattcaacagtacctggatgagaacaagtccttgattctgaagattgttgaaagccagaattctggcaagctgagcgagtgtgccgagaaccaatcaaggctgcagagaaatctcatgtacctagctgcaatagctga

SEQ ID NO: 728 - DNA, 365 bp, Glycine max
gattcattcacaaatcttagttactttatcagtatcattcattgtcactacgattgttctaaaagcaattagtactcttgagaagaattaagatatcatcatcacaataacaagatgagttcaggaattagagcatggagtgtggcagctagtgttggagttgtggaggccttgaaagaccaaggcatatgcaggtggaatcatgctttaagatcagctcaacaccatctcaaaggccatgttggctcattctctcaggctaacaagctttcttctactgctatgatctccacagcactaagagatgagaaggcaaagcagtcagaggagtccttcagaactgtcatgttgttaagctgctgggg

SEQ ID NO: 729 - DNA, 154 bp, Glycine max
ggagcaaaagcctaatccctatttttcttcctcagtagtgtcatttacgcttctcttctctgcagcagctatgcgtaaacctaaagtcttcttcgacatgaccatcagcagtcaatctgctggccgcatcgtgatggagctctacgccgacgtc

SEQ ID NO: 730 - DNA, 272 bp, Glycine max
gtgagggacatgcgtcaaactgtggctgtcggagtcatcaagagtgttgagaagaaagaccccaccggagccaaggtcaccaaggccgctgccaagaagaagtgattgcatttgggcaattttgctagcacatgtgatcatcatcgtggtgacgcctttatagtagttttatccgtgcagagtcgtaggtgttttgtcgaagttagagttgtgagtgtcggccgagggcatgtagccgtaactttcagaactaggttcgtgatcggcggtgg

SEQ ID NO: 731 - DNA, 92 bp, Glycine max
atagcttctattaaccctctagggcagccagtttatgtttgtctataatatacacagtttatcataagaagtattattcctgctatgtcaag

SEQ ID NO: 732 - DNA, 104 bp, Glycine max
accacgcgtccgtccagacgtcagggtacaacacaacgaaaaaacgcaatgaggactctaggcgtatccaatttaggtatgagggcgagctcgacgattcagca

SEQ ID NO: 733 - DNA, 233 bp, Glycine max
gacaggtgtttgcaatactagcgatagctgataagagagataccaacaagaagagaaaagaagaagagttgagattccctttgaagaaaagatggcatcccataggcaaagctatgaagctggtcaaactaagggccgaactgaggaaaacacgaaccagacgatgggcaagattggagagaaggctcaggctgcagacgagaagacccaggaaatggcccaagctgcaaagg

SEQ ID NO: 734 - DNA, 363 bp, Glycine max
gaggggcttaatatctcccctcacttgtgcctagccttatgtcatagtattatcattcattctcagctttctctcttctctctccacccaaaccctaactcccgaccctgttcccctctcgtatccgtcatgaaaggaggaaagtccaagaccgaatctaagagagccgatcccaaacttgctgtgaataagaagggagccgccaccaaggctaggaaacccgccggcaaggggaaggcagcgaaagaccctaacaagccaaagaggcctccaagtgctttcttcgttttcatggatgagttcaggaaggtattcaacatagaacatcctgaaaacaaagcagtgtctgctgtgggcaaagct

SEQ ID NO: 735 - DNA, 55 bp, Glycine max
gaagccagagaaagagaaggaaccagcaacaaagagcagagagaaagagaggacc

SEQ ID NO: 736 - DNA, 365 bp, Glycine max
ggagagctttaccaacttcaaaacttggagcttttcatttcattgatggcgttctctctcttcatccccagccaacccttccctttggtgccaacccttcttcttctcgttctcctccacgcttctctcttggaaccctctcacggcgctagaatttccaaggatgcttcaactcggcacctgtttgagtcgaggaacactaagcaccccaacaagtgtggagagttggtggcgctgtctcagtgctcgcagaactcaaagtgcagctggtgcaccagtgaggtccttgatgacatgtgtttcaccaaatctgaggcgtggaggttgccacaacaggtttactcttgcagcttgattcggtgaga

SEQ ID NO: 737 - DNA, 374 bp, Glycine max
gacagaaaacgcagttctcaccatttccctctcgattgtgagacttgttgttgttaactgaacttttctgagcaagaatgtctgggcgtggaaagggaggcaagggtttgggaaagggaggagcgaaacgacaccgtaaggtgctgcgcgataacattcagggaaccaccaagcccgcgattcggcgtttggctcgtaggggtggcgtgaagcgtatcagtggtctcatctacgaagagacacgtggcgtgctcaagatctttttggagaacgtgattcgtgaccccgttacctacactgagcatactaggagaaacaccgttaccgcaatggacgtggtttatgcccccaagagacatggaaggaccctctac

SEQ ID NO: 738 - DNA, 315 bp, Glycine max
gaaacaaaagcagatcatagttgttgcgattaacaagatgaagagagtggagtttatggggctgaggctgtgattggtggtgatgatgggatgttgtgggtctgcgagctgctgccgatgacttggcagccaagtgttcggcggtgattcagaatgtaataccgtgtctgaacttcgcgactgggaatgaacacatgcccaaaaaggaatgttgcgacgccgccactgtcataaaggagatcaacccatagtgcttgtgctacatcattcaagacacccacaagggtagcccacaggtcagaagcttgggcattc

SEQ ID NO: 739 - DNA, 132 bp, Glycine max
ggtagcgcacagaaagaactagaactagggtttcatcgttgggagcagtaaacgacaatgatttacgacgttaactctccgcttttccgatccttcctcagccagaagggaagctcctctgataagaggaag

SEQ ID NO: 740 - DNA, 127 bp, Glycine max
gacagcactgcactcttcgcaacacagcacgaggggagaacccagagagcacgtcttaataaagactcttctcgtgaagagcccatttcttttcttcgttcttcgtcgcggtcgcgtcttcgatctt

SEQ ID NO: 741 - DNA, 279 bp, Glycine max
ggaaactcaactcctgaaaggcaagagtgagagagaaatggagaatgcggaggagatgatgcagcacaacgacgaggttttgtcggttgaacttccagctccttccggttggaataaactgtttttccctaagaaactgggaacaccaggaaaaagtgagattgtattcattgcgccaactggagaggagatcagtacgagtggacaagtggggcagtacctgggggcacagcgtggcaagcctgtcagttcagagtttgactggggaactggtgagac

SEQ ID NO: 742 - DNA, 133 bp, Glycine max
ggtatccaatactcaccgtttctcagatgttttatttgcaacactgagagcacgagcagttgcgtagtgggttgttcgtcgccgctgcgacagagtgccctagcgacctctcgagcttgccacctacgcgact

SEQ ID NO: 743 - DNA, 142 bp, Glycine max
gttcactttcttccaacctctaacctagctcgttttcttctcgctcatgagcttcaccttcgtcctcctcgatcatgtctcacttcaggggcaagtaccatgaggagcttatcgccaatgctgcgtacattggcactcctgg

SEQ ID NO: 744 - DNA, 364 bp, Glycine max
gtccgccatttttcgtagctgctgttcttgcgcgtgaacaagcctcaggtaagccaaaaccatggttaagcataacaatgttatcccaaacggacacttccgtaagcactggcagaactatgtgaagacttggttcaatcagccagcacggaagacaaggagacgattggctcgtcagaagaaagctgtgaagatattccccagacctacggctggacctctcaggcccattgtacatggtcaaactttgaaatacaacatgaaagtgagaggtggaaggggattttctcttgaagaactcaaggcatcagggattcccaaaaagcttgcaccaaccataagtattgctgttgatcatcgtcgc

SEQ ID NO: 745 - DNA, 216 bp, Glycine max
aattcgcggtctgacccacgcatacatacggccctagaagaggagagaaaggggaaggagagggaatgcaagacattgagtagtttcagtaagtgattggtgttcaattgatccttcataagtcatcatcagcagcagcatcatcaccgtagattgagaaatatgccgcttacacacatcgctatcgcgaaagcctgaagaggcgactcatcacca

SEQ ID NO: 746 - DNA, 141 bp, Glycine max
gagtacagaataggcagttctcaccatttcccgctcgggaagttccaggtactacgaactttgccatggtttcgtcagcttactcttaatcctctttggtttactttaagtggtgtgtgtttgaacttacggtgcacattg

SEQ ID NO: 747 - DNA, 269 bp, Glycine max
gaacttggcttgttccaattccattcactcgttcattcccaggttgtgatggcagcagcaccagcagctaccttcgctattggaaccaccggttccctcggccaaagaggaagctcgcttcctcaatcaaagtcctttgggttgaaatttaactctcctaatcacttgaagagcttctgtggcctcaagggcatgtcatccgtgagatgtgaatcggaatccaccttcctccgtaacaaaaccgggtgctgctccacgggagctctttt

SEQ ID NO: 748 - DNA, 129 bp, Glycine max
cgggaatcttggtgctgttgcagttcctagattccgagggagcgtgtaccgtgtaattcgcggagtttcattctgaacggagcacggaggatttcagcatcggagaccgaatcgttcgggtgaggggag

SEQ ID NO: 749 - DNA, 122 bp, Glycine max
ggtgcataagaggaacaggaaacataggattggagggtcaccacgtttagcaacaagtaatcgctctcgactctttcgtcttcacttcacgagggttttagcttcttcctcttcacttcgtt

SEQ ID NO: 750 - DNA, 268 bp, Glycine max
gaggtaagcacaaccaaagcaacaccccaaatggcttcagcttctgttcccatggcgttgtcactgagctctgttaccaacaacaacaagccttcatccgaaggcttcttcaggccactacccctacgccaaccaaagaggaccctcttcagcacgaagggagtgtcaaagtccagggctcaagtcaatgcatcgttgagggagaaggcggttgccggaggcagagcaggtgctgtgagagcatcgagggtgaatccggaggtggctc

SEQ ID NO: 751 - DNA, 169 bp, Glycine max
gatccccatttcgcgttggtgcaaagcatccttcgtttcaatttctctctctcagcgctttctgcaatcgaacctttcagctccaaggggatccacaggccgaaggagaaatggggctgacattcacagaacttttcagtcggcttttcgcgaggaaggaagtgcgagt

SEQ ID NO: 752 - DNA, 377 bp, Glycine max
taatttgggaattattgctcccatcgccattggtttcattgtcggcgctaacattttgttgggtggggccttctctggagcggccatgaaccccgctgtgacatttgggcctgctgtcgtgagctggacctggaccaaccactggatctactgggccgggcctctcatcggtggtggaatcgctggccttgtttacgaggttgtctttatcagccacacccacgagcagcttcccaccactgactactagagggggggaaatgaagataaagaaataaaaaattgtgtattattgaatttctctggaatcttcttctgtgtatggttttccttccttgtgttttcttcctaattcactttcgaaggttgtacttgtt

SEQ ID NO: 753 - DNA, 364 bp, Glycine max
gatcttcagtgtgtttttcctaacaggatcatttcgttccaagctgaggaggcacaaacaccataacatatgacatggaagctgcaaatggaaccgtcaaaggtgtggctaacatcatcagagacaacaacattaaaagctctcttcagtgtcgtcagcaccccaatgggaccacccatgtgacagggatagtgacagggttgtcccaaggatttcatgggttccatagtcatgcttttggtgacaccagcactggctgcaacgccactggtccacacttcaatccgttcaagaatgatcatggagctcaatgatatgataagcaccatgctggtgacattgggcaacattgctgcaagccctg

SEQ ID NO: 754 - DNA, 348 bp, Glycine max
ggaattaggtttttagggtttacaccgagcagccacacctcccgcagcagccatggttctcaaaactgaactatgccgattcagtggtgccaagatctacccaggaaagggcatcagatttgttcgtggtgattctcaggttttcctgtttgcaaactcaaaatgtaagaggtatttccacaatcgcctgaagccttcaaagctcacctggactgcaatgtacagaaagcaacacaaaaaggacattgctcaagaagctgtgaggaagaggagacgtgctgccaaaaagccttactccaggtccattgttggtgcgaccttgggagtaatccaaataaagagagctga

SEQ ID NO: 755 - DNA, 134 bp, Glycine max
ggccgagaaaacgctaattcgcttgcagtcacagaagaggccaatcctattcatagctcgaggatggtgaagaagtgaaggtagttgttccagaatcagtgttgaataagcgcaagagggatgaggaatgggcg

SEQ ID NO: 756 - DNA, 235 bp, Glycine max
gattcaccacggggctctcactatcttccattgccactcagttttgactctcattttattccctccatgtttcttcactttcttccagagacatgaccatgtcttcacacagtgttggcctcaaaattgcgtaatcatctgtaaggtgtgctggagcagtaaacagggtcatgggaaacatgtacagtgctaagtcagttgacatcgattcaaatgaactcaaggtgagtgtgat

SEQ ID NO: 757 - DNA, 349 bp, Glycine max
ggtgtggtctctctctatactataggtctcgcccaatacctactctccgctcccaagagcacgcaccaccactattgcacttcttcctcgttctccctctttttcttcttcttcgctaaacccttttttctatctcactaacacaacaatgggagacgagaagaagggcaagcctgctgcttccggcgtgtggtccaccatcaagcctttcgtcaatggtggagcctccggcatgctcgccacctgcgtcattcaacccatcgatatgatcaaggtgaggattcaacttgggcaaggatcagctgcgcaggtcacttccaccatgcttaagaatgagggttttgctgcc

SEQ ID NO: 758 - DNA, 147 bp, Glycine max
gctccgtcacttttctcagctgctgttcctgcgcgtgaacaagcctcaggtaagccaaagccatggttaagcatgagaatcttatccccaacggacacttccgtaagcagtggcagaactatgtgaagacctgggtcaatcagccag

SEQ ID NO: 759 - DNA, 299 bp, Glycine max
gagggtttttgtcgttgcgactaagagttgctgcttcttccgccactcagcacttcgctccctctgtgcttcagcaagcatggccgaaatcgaagctaccgttccagatcgctctcaaatcgacgtcaaacttttcaaccgctggagcttcgaggacgttgaggttactgagaggtcgctggcggagtacattggagtgtccccgtcaaggcatgggagggatgtgcgtgagactgctggtagggtactcagtgaggaggttcaggaaggcgcagtgccccattgttgagagactcagc

SEQ ID NO: 760 - DNA, 361 bp, Glycine max
gacaccaaaatttgccaattgccatttcaatccccagtttcttcttcaacgtcctcttacgagcagatcgcaattctccttcccagtttcaaaccctaattccctcattcccatggcctcagaagagcccactgtcgcggtggaagccgctcccgaacctgccagcgccgagcctcgcccggaggagaaggaggagccgagagctgaagccagggctaagaggaccaaggagcccagacctaaagaggtttcgagaggacgcaaccctcccactcatccttcggacgaggagatgattaagggggcagttagctcgctgaaggagaagagcggttcgagccaacacgcgattgcgaagttc

SEQ ID NO: 761 - DNA, 276 bp, Glycine max
ggagttgagttttgaaagcgtgtgcgtgggagggtccgaagttggagatagtgattctggttctgttctgttcttctttctactcacaacaacatcagaatcagaaacaacaatggccaacactaacttggaagatgttccctcgctggatggcatgactgagctccttcgtcgtctcaggtgctcttcgaaacctgacaagcgtcgtagtctcattggggcacctggatctggaaaaggcacccattcaccagtcataaaagatgagtactgctt

SEQ ID NO: 762 - DNA, 256 bp, Glycine max
  modified_base (184)..(184): a, c, g, t, unknown, or other
gactcaccacttcaaaacactcataacacaaagcacaaagcaaagctcatccttgagttaaaaaatggcagcagcttcgtccatggctctctcatccccatccttggctggcaaggccgtgaagctgggcccatcagccccagaagtgggaagggtgagcatgaggaagaccgtcaccaagcanggtctcctcaggaagcccatgggacggcccagaccgagtcaagtaggtgggcccattctctggcgagccccc

SEQ ID NO: 763 - DNA, 84 bp, Glycine max
gacagacacctcacttcacacaattgctctctaaaatgcgtgagctcatgtggttgacagaccattgccgcgagacagtttccg

SEQ ID NO: 764 - DNA, 371 bp, Glycine max
ggccaacactttctcgcattttccctcttctttctctctcacgttttccgcttcagttttctcgggaaaatcatggtgaaaggtccaggcctctactctgacattggcaagagagctcgcgatcttctgttcaaggattatcagaatgaccacaagttcaccatcaccacttacacttccaccggagtggaaatcacttcaactggagtcaggaaaggtgagatatatttggccgatgtcagcactaaggtgaagaacaagaacatcacaactgatgtcaaagtggacactaactcaaatctgcgtacaatcattactgtggatgaacctgcccctggactcaagacaatttttagctttaattttccaga

SEQ ID NO: 765 - DNA, 276 bp, Glycine max
gacagcactgcactcttcgcaacacaacaaagaaagacaacccagagagcgcgtcttaataaacgctcttctctgaaaacccccatttcttttcttctttcttcttctctttcgcttcttcgatcttcgatcttcgtcgctgaagatgagagagtgcatttcaatccacatcggccacgccgggattcaggttggaaacgcctgctgggagcgttactgcctcgaacacgggattcagcctgatgggcagatgccaagtgacaagaccgttggtgg

SEQ ID NO: 766 - DNA, 381 bp, Glycine max
ggttcaccctgacattggtatctcaagcaaggccatgggaatcatgaacagcttcatcaacgacatcttcgagaagcttgcccaggaatcttctagacttgcccgctacaacaagaagcccaccatcacttcaagggaaattcagaccgcggtcaggcttgtgctgcccggtgaattggccaagcacgccgtttcggagggtaccaaggccgtcaccaagttcactagctcttgaacaaaatatctttgcctggctcttgtttttcttcatgtgtttctgttagatctagcgacctatgcttagatttgaacagttaacttttttattattatttgtaattgaagtattgggattacgttcatcctctgtgtatggaaatg

SEQ ID NO: 767 - DNA, 356 bp, Glycine max
ggagaggagagaggagaagagaagctaaagaaagaaaggagatgggagtggagaagcagttgttgaggtctggcaccggtccgaagccaattcccggtcagaacgtaaccgttcactgcactggtttcgggaagaacggtgacctttctcagaaattctggagcacgaaggatcctggccagaacccattcactttcaaaatcggccaaggttctgttagcaaaggatgggatgaaggtgtgcttggcatgcaaattggtgaagttgctcgtctccggtgctctccggattatgcgtatggtgctggtggctttcctgcgtggggaatacggcccaactctgtcttggaatttgaa

SEQ ID NO: 768 - DNA, 283 bp, Glycine max
ggaggacaccatggccaacaacaacgaagaggaagaggaagcagtggcgccaatggtgaagttgggttcgtacggtggtgaggttcggttggtggttggtggggaggaatccgctgcggaggagaccatgctgctttggggtattcagcaggccacactttccagacgcgaatgccttcggcgcgcaagctcccttgcaactctcccgcgacgcgtgtggccaggcgcgctcgaggcatcggtcgcggtccgcggggggaacgcctggagtaactggagcagt

SEQ ID NO: 769 - DNA, 282 bp, Glycine max
gacatcacatttcgttgcgcctttgatctctgtccccgctgcgtctctcgtaatcatgcctaagcaaatccacgagattaaggatttccttctcactgccagaaggaaggatgcgaggtcagtgaagatcaagaggagcagagatgtggttaagttcaaggtcagatgctcgaagtacctctacacactttgtgtgtgtgagccagagaaggctgatagagtgaagcaatctcttcctccaggtttgagtggttaggacctgtaaaggtactgggctagaga

SEQ ID NO: 770 - DNA, 363 bp, Glycine max
gaccatccagtactcttcttttcagcacaacctcttcatctctcccaggctttcttttctttgcaacaacactaccaaaaatgtcaccagatttcacacttttgttctccccggaactcatgcagtcccctatcatcactttccaagccactttctgtgtccttctcttcaccctcatgttcacgccgttcttcactcctggtgggcttccttgggcctgggcccggcccagaaccatcatccctggcccagtaactgccctgctcggggtcttcacgggttccacacctcacagcgctttatccaaactggcccgcacttatcacgcggaaaagctcatggctttccccatcggttaacccg

SEQ ID NO: 771 - DNA, 284 bp, Glycine max
gacaccttcgaattttcttttccttcagtttcccgagataaaaaaaacacgcttgcactttcttgactacggtctcacttcgacatggctcgtactaagcaaactgctcgcaagtccagcggcggcaaggcgccacgtaagcagttggcgacgaatgccgcggggaagtcagctcccgcgactggaggactgaagaaggcggagcgcggtcgggccggggaagcgtgggcggctgagggagggcagagggtatcagaagagcagcgagcttctggtcaggaagc

SEQ ID NO: 772 - DNA, 122 bp, Glycine max
gcgcacccagagaggaggcttagagagagagagagagagagagagagagatgagagagtgttggcgcttcatcaagatgggtatttctaggggttccatgcacaagaggcgtgccactggtg

SEQ ID NO: 773 - DNA, 379 bp, Glycine max
gattcatagctattcgcagttcccaaattcattttaatcctaattctgcacttcttgatcattcgatttttctcctcaagatgcagatattcgtaaaaactttgaccggcaagaccatcacccttgaggtggaatcctccgacaccattgacaacgtaaaagctaagattcaagacaaggaagggatcccacctgaccagcagagacttatctttgcgggtaaacaacttgaggatggtcgcacccttgccgattacaacatccaaaaggaatcaaccctccatctcgtgcttcgcctcaggggtggcatgcaaatctttgtcaagactttgaccgggaagaccatcacccttgaggtggaatcctcggacaccattga

SEQ ID NO: 774 - DNA, 220 bp, Glycine max
aagaagatgtcgggtatgggagatgggtacgtgggcaccgcccaagacgcggtgaggattcgacggttggagaagcagagagaagcggagcgtcgcaaaatccaagagctgaaaaccaagtctgcctccgccaaggaccaacccggtcatctccaattcggttccagcacctccgagattctagagactgcctttaacaatgaaactgtgggtttggtca

SEQ ID NO: 775 - DNA, 359 bp, Glycine max
atagcgaaacagagagtggtttcagtgagtgatcggtgttcacttgatccttcataagtcgtcatcatcatcatcatcatcaccgttgattgaagaagatgccgatcagaaacatcgccatcggaaggcctgaagaggctactcaccccgacacgttgaaggcggggttggctgagttcatctccaccttgatcttcgtgttcgccggttcaggttccggcatcgcctacaacaagctcaccgacaacggcgccgccactcccgccggcctcatctccgcttccatcgcccatgctttcgccctcttcgtcgccgtctccgtcggcgccaacatctccggcggccacgtcaaccccgcc

SEQ ID NO: 776 - DNA, 317 bp, Glycine max
ggttaaacttcaccttacagtccactaaagcataacctaatcgcactccgctctccgcactccgctattgcacctccctcgacggcacctcaggcgcactcgttttcggttccgattgcattgaatcaaatctgagaaccattctcattgcccgtgtagtctgtaatcatgtcaggaaagtatatcatttctgctattcttggattatttggagttgcatgggtttgtgattattatgtttcagagaaaaagctatttggaggttctacccctggcactattacgaacaatgagtgggcagaagagactgacagaaa

SEQ ID NO: 777 - DNA, 385 bp, Glycine max
gactcaccacttcaaaacactcataacacaaagcacaaagcaaagctcatccttgagttaaaaaatggcagcagcttcttccatggctctctcatccccatccttggctggcaaggccgtgaagctgggcccatcagccccagaagtgggaagggtgagcatgaggaagaccgtcaccaagcaggtctcctcaggaagcccatggtacggcccagaccgagtcaagtacttgggcccattctctggcgagcccccgtcctacctaaccggtgagttcccaggcgactacggctgggacactgctgggctttccgcagacccagaaaccttcgccaagaaccgtgaactcgaagtgatccactccaggtgggccatgctcggagcc

SEQ ID NO: 778 - DNA, 279 bp, Glycine max
gagcaacatggtgaagctggtggagagatttacttgccagaagcttacgttagaaccaagaggactacttaatggagcaaatcagttggaagaacttgtagctagcttcccaactggcttatctgagtgtggagaagcattatcaagccttaggagtaggagaacgagtactgtttgtgatgaatgtctatggtttaagaaatctgtctttagtcaacttgtgtgttttgttattcagttctcagcaataaactgctctggcaatctagtttcatgtcc

SEQ ID NO: 779 - DNA, 322 bp, Glycine max
gaccgtgcgctagttctgagtattctgatcgctccctgagagagctcgtcgcggcggttgcagaagaagattgcaagatgaagttcaacatcgcgaatcccaccactggatgccagaagaagctcgagatcgacgacgatctgaaactgcgagcattttgggacaagaggatctcacaggaggtcatcggagatgcactcggtgaggaatttaagggctatgtcttcaaaattaccggaggttgtgacaaacaaggatttccaatgaagcatggagtgctgactcctggtcgtgttagacttttgcttcacaggggaactcc

SEQ ID NO: 780 - DNA, 392 bp, Glycine max
ggcccttctagctttttcccagtccaagcagcctccaattcgtgccactctcttcaaaatggccgttaccttctcaaatctccacacagaatcagatctcaagtccctcgacgacttcctctctgggaaggtctacgtttctggggatcagttcacaaaggacgacatcaaagtgtatggtgctgttttggagaagccaggtgactcttttcccaatgctgccaagtggtacgaggttgtctcatctcagcttgctgcaagcttccccggcaatgctcaaggggtgagattcagtggcaaagcttctgctccagcggaggctgctcctgcgaaaccggatgcttctgctgctgaagatgatgatgaccttgatctctttggcgatgagactg

SEQ ID NO: 781 - DNA, 345 bp, Glycine max
gactccgcagctgcagcactcaaaaccctagagaggacgagagagcgtgcaactttcggcaaccacagaccatgacattcaagcgcaggaatggaggtcgcaacaaacacggccgcggccatgtcaaattcatccgatgctccaactgcggaaaatgctgccccaaggacaaggccatcaagaggtttttggttaggaacattgttgaacaggctgcagtcagagatgtgcaggaagcttgtgtctatgaacaatatacacttccaaaactctatgtgaagatgcagtactgtgtttcctgtgctatccactcccatgttgtgagggttcgattccgcaccgaca

SEQ ID NO: 782 - DNA, 106 bp, Glycine max
tggggcgcacccagagaggaagcttagagagagagagagagagagagagagagaggagagagtattggcgcttcatcaagatgggtatttctagggattccatgca

SEQ ID NO: 783 - DNA, 414 bp, Glycine max
ggagtaagatttttcttgttcctttgttggtgggtttcctttccgcttcaggttcagcttcaacttcaaattctcagtgaaaccaattcagctgagtccaaatcccaaatccgaatcaaaatccgaagtgagatttgcgatggagaggcttcagcgaatgtttgcaggtgcaggtggagcgctagggcaccctcccccagattccccaactctcgattcctccgagcaggtctacatctcctcactcgctctcctcaagatgcttaagcacggaagggctggggttcccatggaggtgatgggtttgatgcttggagaattcgtggacgagtacaccgttcgtgtggttgatgtcttcgcaatgccgcagagtggcactggtgttagtgtttacgctgttgatcacgtttttca

SEQ ID NO: 784 - DNA, 403 bp, Glycine max
  modified_base (331)..(331): a, c, g, t, unknown, or other
gatcccgcccaacggtatctccttatccgtgtttttttcaaaatttgagctcgtttgttgtcgtgtttgtttataacgttggtgtttctaaactcgtgtgcgctccgattcaaattccaactccgaatcaaaccctagtacaacaaaccaacgaaaccctcttcttcccaattctccgaccccatcatcctcaatggccaaccctgattcctctcttcctctctccatcaagaaggagaacatcactctcattacctctaaaatcgaggaacttaatgaatcgagatcggagcttctgggcagagttcagagtttgaaacaggatttgcanagttggacgtctaagttggatacacaagtcaaggtccatcgcgatgagctgtcagaacttaagaaaacactt

SEQ ID NO: 785 - DNA, 250 bp, Glycine max
caaaaggggctattcttggtgctaataccatcagcagactgcatttaatcacaccgcaaacagtgaaccacggtcgtcggaaacaactaactcatctccaaagggaagacaggtcggacgaagaacgcaactgatacccttgcgacgaaggattggcatgaaattaatgccccctctgtgtttcaagtaacaaatgttggcgcaacactcgtctcacggatccacggtaccaagattgcgtcctaacgac

SEQ ID NO: 786 - DNA, 371 bp, Glycine max
gatggcaactgaactcgcaggttgagaactgttaaaccctagcttcttcttcctcttcctcttcgcttagcgtcttcgtctctcgcacttcgttttcagcttcacctcgcagaagaaagagtgtaaaaagaaacgaagatgaacatgaacgaagagagtgttgaaggaagcgcgaggaggatccaagtgcgcttcgtgacaaagttaggcgagccgtacaaagttccgaccaccgccatcgctatccccgccgacctcggtcgattcggcctctcctcactcgtgaacgcactccttcaatccaatgacgctgatcatcagctggagccgtttgattttttgatcgatggcgagttcgttcggatgtcgct

SEQ ID NO: 787 - DNA, 277 bp, Glycine max
gagcaacatggtgaagctggtggagagatttacttgccagaagcttacgttagaaccaagaggactacttaatggagcaaatcagttggaagaacttgtagctagcttcccaactggcttatctgagtgtggagaagcattatcaagccttaggagtaggagaacgagtactgtttgtgatgaatgtctatggtttaagaaatctgtctttagtcaacttgtgtgttttgttattcagttctcagcaataaactgctctggcaatctagtttcatgg

SEQ ID NO: 788 - DNA, 391 bp, Glycine max
ggcagaaacaaaagcataaccctagctaggacgtgtttggagttggtttgagcgtattgaggcaatgacgcgaccttacggtgtgaaggggggccggaagcgaaagcacgccgaacccaaatacgacgaagaagaccaagaaacgcaaccaaaaaaagctgtggtggaggtggagcacaacaaagaagaagaacaacagcaacaaacaccagagggggatgaattgagcggtatcccaattacgcccagtgagaacaacaccaacaaacccaacgtcatcttcattctagaaaaagcttctttggaagtcgccaaagtcggcaagacatatcagctcttaaactccgacgaccatgccaatttgctccgcaaaaaataacaagaatcccgg

SEQ ID NO: 789 - DNA, 396 bp, Glycine max
ggcagtttcaaattttcttttccttcactttcccgagaaaaaaataacacttttcactttcttcactacgttctcacttcgatatggctcgtacgaagcaaaccgctcgcaagtccaccggtggcaaggcgccacgtaagcagctcaccaccaaggccgctcggaagtccgctccggcgaccggaggagtgaagaagccccaccgcttcaggccgggaaccgtggcgctgagggaaatcagaaagtaccagaagagcaccgagcttctcatcaggaagcttccatttcagaggctcgtgagagaaatcgcgcaggatttcaagaccgatttgcgtttccagagcagcgctgtttccgcgcttcaggaggctgctgaggcttacctcgttgggttgt

SEQ ID NO: 790 - DNA, 325 bp, Glycine max
  modified_base (192)..(192): a, c, g, t, unknown, or other
gacagaaagagaaagcaatggcttctctggcaagcttagctgttgttcaaccatctactgtcaagggccttgctggaactaagctctctttcaagccctctcgccagagcttcagacccaagaatttcaggagtggtgccgttgtagcaaagtacggtgacaagagtgtgtactttgatttggaggatctangcaacactactggtcagtgggacttgtacggctccgatgcaccttcaccctacaaccctcttcagagcaagttcttcgagacattcgccgctccattcacaaagaggggattgttactaaagtttttgatcct

SEQ ID NO: 791 - DNA, 157 bp, Glycine max
gggtcgaggcacgcgtccgcctcaacgtcagggctgcaaaaagacgacagaacgggacggtttggttaataaggtttacgctcaaacgtgtgcagtctcaccccccgacgcaagatcgatcataccgtcgcacaagacactcagtcacatcatgaaa

SEQ ID NO: 792 - DNA, 332 bp, Glycine max
ggaagaagaagaagaagatgtcgtacctgttgcctcacttgcactctggatgggccgtcgatcaagcaatcctcgccgaagaggagcgtctcgtcgtcatccgtttcggccacgactgggacgaaacctgcatgcagatggacgaggtgttggcgtcagtggcggatacgattaagaactttgcggtgatatacctggtggacataacggatgtgccggatttcaacaccatgtacgagctctacgacccttccacggtgaagttcctcttcaggaacaagcacatcatgaatgatctcagaaacggtaacaacaacatgattaactgggct

SEQ ID NO: 793 - DNA, 124 bp, Glycine max
gaacgcagccaaagaaaagaaaatcctcaattttctgagcagccaaacactctctctctgtctctcgaaaattctcagtttgcagagaaaatctgaatcatgtcgtggcaagcgtatgtcgacg

SEQ ID NO: 794 - DNA, 103 bp, Glycine max
gtgtgtaattttcaatatgatccaacggttacaaattccgtgatcatagttttaatgggacaggtttgggtgtacgcgagaaaaagagaaggttttgttagac

SEQ ID NO: 795 - DNA, 201 bp, Glycine max
gaacgcagccaaagaaaagaaaatcctcaattttctgagcagccaaacactctctctctgtctctcgaaaattctcagtttgcagagaaaatctgaatcatgtcgtggcaagcgtatgtcgacgatcaccttcggtgtgacatcgaaggtaaccacctcactcacgctgctatcatcggccaagacggaagcgtttgggct

SEQ ID NO: 796 - DNA, 401 bp, Glycine max
aggggacgagcacgaggaccaagagcaagaagaggaggaggaggaggaggaaatgggattctcactggcggcggcggcgagttacgactcgctgggaaacgccgcggtgaggtctaaaattaccggcggcgatggtgttgcggccaccgtgaattccggtcgcaaagggacggtgagatacagagaatgtcagaagaaccatgccgtcagcatcggcggccacgccgtcgacggatgctgcgagttcttggctgccggagaggaaggcacgctggaagccgtaatttgcgccgcctgtaactgccaccgcaacttccaccgcaaggagatcgacagcgaaaccagcccttaacagcaccgttcgcagccacagcctcagcctctgcaccctcagtaacacc

SEQ ID NO: 797 - DNA, 325 bp, Glycine max
gactcaccacttcaaaacactcataacacaaagcacaaagcaaagctcatccttgagttaaaaaatggcagcagcttcttccatggctctctcatccccatccttggctggcaaggccgtgaagctgggcccatcagccccagaagtgggaagggtgagcatgaggaagaccgtcaccaagcaggtctcctcaggaagcccatggtacggcccagaccgagtcaagtacttgggcccattctctggcgagcccccgtcctacctaaccggtgagttcccaggcgactacggctgggacactgctgggctttccgcagacccaaga

SEQ ID NO: 798 - DNA, 383 bp, Glycine max
gatcttcattttcgtcgtcgttcatttttttattttttttttctgttttccattcgcttcttctctcagaaaagctcgccaatcgatcttgctctcttctacgcttttcgaattccttccattccattatggacgcagattagattcacgttcacattcacttctcttcgtttgcttcaaccactctgctctgctctgctctactctgagatccgatcgcattttcattcagaaaggaaactcgtgtgactgatttatgcgctaattgcaattgcactgcgagcgtccctgtgccgaatcggaagatgggattagtgtttaccaaattgttttcctctcttttcggtaacaaggaagctcgaatcctcgttctcgggctcgag

SEQ ID NO: 799 - DNA, 334 bp, Glycine max
gaaatttgtttgtggcactttttgtagtctaggcattgaattaaacaattggaattcaaagagatgtggttttattaaaaaaaaaaaaaaaaaaaacaaaaaaaaaaaaaaaaaaaaaaaaaaaaaaaaaaaaaaaaaaaaaaaaaaaaaaaaaaaaaaaacccaaaaaaaaaaaaaaaaaaaaaaaaaaaaaggggaaaaaaaaaattccccaagggggaaaaaacccccccccaactgtcccaaaccttaattccaaaaaaaaacacacatcccacaaaatcccccttttttccaaaacaaaccccaaacccccaaaacagttccccccccg

SEQ ID NO: 800 - DNA, 293 bp, Glycine max
gacttccagatttcaaagaaggcgtcttcataaacgcctttcttctccgtttccgtttcctcgttcgaattcgctttttgatctgcgaaaatgagagagtgcatctcgatccacattggtcaggctggtatccaagtcggaaatgcttgctgggagctctactgcctcgagcacggcatcgggcccgatgggcaaatgccaagtgacaagacagttggcggtggtgatgaagccttcaatactttcttcaacgagaactggtgctggaaaacacgtgccacgtgcagtgtttg

SEQ ID NO: 801 - DNA, 274 bp, Glycine max
gaagatttgtgagagaaagggagaaagggtgtgagaatggagagcaaagaggaagatgtaagggttggagcaactaagttctcagaaaggcaatcaattggtacagcagctcaaggtgacaacgactacaaagaaccacccccagcacctttgtttgagcctggtgagctaaagtcatggtccttctacacagctggaattgctgactttgtggccactttcttgttcctctacattaccatcttaactgtcatgggtgtcaacaggtcaccct

SEQ ID NO: 802 - DNA, 400 bp, Glycine max
gaaccaagtttgcttgcgtgtatattcattttagcatcaaggttgaatctcagagaaaaagaaacatcgacaagcatgtctggaagaggaaagggaggcaagggtctcggaaagggaggagccaaacgacaccgtaaggttctgagggataacattcagggaatcaccaagcccgcgattcgccgtctggccagacgtggtggcgtcaagcgtatcagtggtcttatctatgaagaaactcgcggtgttctcaagatctttctagagaacgtcattcgcgacgctgtcacctacactgaagacgctcgccgcaagaccgttaatgccatggacgttgtttaagcccttaataagcaggggaagatcctctacggattttgcggtaagacaattggggatt

SEQ ID NO: 803 - DNA, 57 bp, Glycine max
agggagacctcaggtcaggcggggctacccgctgagtttaagcatatcaataagcgg

SEQ ID NO: 804 - DNA, 102 bp, Glycine max
agtccaggcgtcagtaaggaagcaaagggaacacacacagagacacctcaagacctgctgcgccactctctaagttgaaacatcgcacatcatctggaatca

SEQ ID NO: 805 - DNA, 374 bp, Glycine max
ggctttagattcttttcccctagattcagccacagttggaaaaaaaaaaagttgttcgagatggcacgtacgaagcaaactgctcgtaagtccacaggaggaaaggcacctaggaagcagctcgcaaccaaggctgcacgtaagtctgcaccaactactggtggtgtgaagaagccacatcgttatcgtcctggtaccgttgctcttcgtgagattaggaaataccagaagagtaccgagcttttgatcaggaagctccccttccagaggctggttcgtgaaattgctcaggacttcaagactgatctgcgtttccagagccatgctgtgcttgcattgcaagaagctgctgaggcataccttgttggactcct

SEQ ID NO: 806 - DNA, 406 bp, Glycine max
gagcctcagtctcaacacagaagcagaaggaggagaagcagaaagaggagacgaagcaatggcgccgaagaagccccgaaccacgtcgaggaaccctgatttggtcaggggaattggcaaatattcgaggtcgcagatgtaccacaagaggggcatctgggccatcaaggccaaaaacggcggtgttttgcccctccacgatcccaagcccaaacccgaggccccggcccagaagccgcccaagttctacccggccgatgacgtgaagaagcccctcgtcaacaagcacaagcccaagcccgcgaaactcagggctagcattactccagggactgttctgatcctgcttgctgggaggttcaagggaaagaggggttgtttcttgaagcagcttccatctggattg

SEQ ID NO: 807 - DNA, 390 bp, Glycine max
ggcccgaactccttcgacgaccgtcttccccaatcgcctgcgtctctctctgaattgacaagcttaaagacaaagtcttaaatggctggtccaaggattgcccatgctaccttgaaaggtccgagtgtggttaaggagataataattggaataacacttggcttagctgctggtagcgtgtggaagatgcaccactggaatgaacagaggaaaaccaggaccttctacgatttactggaaaagggtgagatcagtgttgttgcagaggaacagtgaaaatgttcttgttttgttgcctatgctctccatttatacgcttttttttttcccatgctatattcaattggctcttcaactgtaaatgagccaacttactattagattgaaaag

SEQ ID NO: 808 - DNA, 413 bp, Glycine max
ggtgagagagcgagcgagcgagcagtttcaaagagaggatttgggattgggaaggcgagggattgcgctgcgtctcttcctcttctctttcgattcatccctcattcataatcttccaatccaacaacctcagcctcacactcacacatacacacatctgaacgcgtatcgtccctcccatggcttcaaagcgcatcctcaaggagctcaaggacttgcagaaagacccaccaacttcttgcagcgctggtccagtagctgaggacatgttccattggcaagcaacgattatgggtcctgctgatagtccttatgctggaggtgtattcctagtcactattcactttcctccggattatccttttcaaactcccaaggttgcctttaggactaaggtgtttcatccgaacatc

SEQ ID NO: 809 - DNA, 395 bp, Glycine max
gaacatgccgaaaagtagtaccaagatggcttcagttgtgtatctcctctttggcttccatctcattgttatcatgtcaagttccttacccgcaactagtgaagtgtttgcaaaacagtatccatccacagaacccgtggaagaaaaactcacccaactccacttctatttccataacaacataacgggggaacacccaactgctatgaaaactgttttgcctcctaaggggtccattcatggttttggggctacttacatgatggatgaccctctaactgaaggaccaagtccaacttcaaagcttgtgggaagatctcagggaatatacgctttggcttcacaacatgagcctgggttgctcatggtgacaaattttctcttcactttgggca

SEQ ID NO: 810 - DNA, 376 bp, Glycine max
gagagtggtggagtgtgcaaaagagcgtcgtagtcgcaaccctaatcagaagaagcgcagcttcaagcgagtgacagccaccagccatgggtcgtatgcacagccgcggtaagggtatatcctcttctgctttgccctacaaaaggacacctcctagctggctcaagatctcttcgcaagatgtcgaagaaaatatctgcaagtttgcgaagaaaggtttgaccccgtctcacattggtgtcattctcagagattctcacggtattgctcaggtcaatagcgtcactggcagcaaaatccttcgcatcctcaaagctcacggacttgcgcctgaaattccataggacctgtaccatttgattaagaaagcagtttc

SEQ ID NO: 811 - DNA, 371 bp, Glycine max
caatccggaaccaacaacagttccaccaaggggtttcaacgagacattacatattgaagaattgatggcagctttattggttgctaactatctatattctgccattgctatatctgcctttcagagctttattgtatgattaagttgagtaaaatgctactacgtcaacgtttaaagtagacaatatctataattatctataataaagataaaaaaaactaaatacattagaaaaaagaaatagaggcttggctcacgcgggaaaatgaaaaatataaaatatgactttgcaagttaacttttttttgtttagttctaagaatgttaacatgcaaagtcgtattttatatttaactttttttgttcaattt

SEQ ID NO: 812 - DNA, 345 bp, Glycine max
ggtggagtggaagtagtagcaagtacgtcatatatgtggttgatcttttgctggttgtttgttttgttccttccaattgtcagatctgaatcaccggactcactcttcacactcactcacactgaatggcttctgaaggcgaccatcaccaccaccaccaccatcaagatcacgatcatcatcatcatgatcatgatcaccatcatcatcacgatggagagggagagaccaactcatgggtaggtaacgatgggaacgtgtaccatagccacgatggtctggcgccgcattctcacgaacccatttactccaccggctacatcaacacaagagctccaccgcttc

SEQ ID NO: 813 - DNA, 274 bp, Glycine max
gacgccaaaaccactgtatcagtgtgtccttccattccaggtttttccaccacactagaaagtaactttaaggttactatgatcttttttcaacatgattcatcacattttcaagcacacactgcattaagaagcgagaaatcataacgcatacatatatatggtcacttataaataattcttatagcaaaacggatggcatggaaagcgtagggaagaatgtgtctgtaactgtcattgtctaagtagagtccgtaattgtccttttgagaaa

SEQ ID NO: 814 - DNA, 252 bp, Glycine max
gagttttctgttggcgcgggtgaggtagaacccttccacggtggtgactgcgcgatgggtgcctacaagtatgtttcagagctatggcgcaagaagcagtctgatgtcatgcgcttcttgcagcgggtgaggtgctgggagtatacgcagcaaccttcccttgttcgcttgacaaggtcgacccgccctgacaaagctcgtcgcttgggcttcaaagctaaccacggctatgtgatataccgtgttcgtgtt

SEQ ID NO: 815 - DNA, 292 bp, Glycine max
aggcaaaattcaatacattaatgaatgagcatgatagtatttgtgatgtagaagcagtagaaaagtaaatcttaagtagcagggttacttttataatatccaaacatttaattaatttttgtaacatctagttaaggttagtattttgggccagatctgttttttaagaattctagtattttagtctaaggacgtttaatgggcatgggcttgtactaagagtctatcattatgttatggtagttgtttagttgtaagttgctttcctaataagttattcctacagagttgt

SEQ ID NO: 816 - DNA, 245 bp, Glycine max
gacacaaactttattacagttgttgtattgtaattaagcaagaatattaggcaatggagtcttctagaacttcaactactcttgctctttttttaaccatcaatttgcttttccttgtcatggcaagtggctgctacacttgcacacagcctaagccaaaccctatcccattcccttaccctaaccctagtcctgccgcgaagagctgccccagggacgcacttaagctcggagtgtgcgcaaac

SEQ ID NO: 817 - DNA, 341 bp, Glycine max
ggaaattctaagagcttgttccgtcgtcccccaagtgctgcagagccgcattttgcttgcaattcagaaactttgtgcgtataggggacgaaacaatacaatggcttacgctgcaatgaagcctactaaggccggcttggaggagcctcaggagcagatccataacattaggatcaccctttcctctaagaacgtcaagaatctcgagaaagtgttcgccgaccttgttcgtggtgccaaggacaagcgcctcacggtgaacggacctgttaggatgccaactaaagtacctaacatcaccaccaggaaatccccgttttgttaacgcaccaacacatggg

SEQ ID NO: 818 - DNA, 257 bp, Glycine max
agaattcacatagatacatacataacacaacgtatgctgcataacaacaatatacatacaaatgagcatgttgattatatagaacgtagaaggcaacactcatttttgtttaccatgggtaacgacaccatctctcatataagagcctatataacacatgctgacatgtatgataaacgaatggttcaaacaccatttactaacctaacagactacattcgtacaaagacctttacgccatggttttgttgaacacg

SEQ ID NO: 819 - DNA, 396 bp, Glycine max
gatttcgcttcttttcctaacctaaaccctactcattctccatacctcaacgaagaggttaaagagacggcaacactttgctgtccgccttgaccgagcagagcttcgtcttggccctcgattttgccctaaagtactctcagtcacaacagacaccgtcgtcgtcgtcgtcatcaatggcaccgaagcagaccaaggctgagaagaagatcgcttacgatgcgaagctgtgcgacctaatggaggagtacggccagatcctcgttgtgaactccgataacgtgcgatcgaaccagctccagaacattcgcaagggtctccgtggcgactccgtcgtcctcatggggaaaaacaccatgatgaagcgctcagtcaggaatccagcctgagaaaacg

SEQ ID NO: 820 - DNA, 83 bp, Glycine max
cacgcgtccgtccactcgtaaaagggcagccagagggcgaccctcgggtttcgctgccagtcgccttccccaggggacatgtc

SEQ ID NO: 821 - DNA, 371 bp, Glycine max
gatatcagaagcgcagacctaggatttcggccgtttgctccccaaggaaagaagcagagtgtttcttttgaaatcagctagaaaagatgtcaggtgaagaggtagctgttgcagctgaggcacctgctgcttcaattccaggtgagccaatggacatcatgactgctctacagcttgtgctgagaaaatctctggcctatggtggtcttgcacgaggtcttcatgaaggtgctaaggtgatcgagaagcatgctgcacagctctgcgttctagcagaagattgtgaccaacctgattatgtgaaactggtgaaggctctttgtgcagagcacaatgttagccttttgacagttccaagtgcaaagaccctt

SEQ ID NO: 822 - DNA, 387 bp, Glycine max
gacagacagacacacactcggttctgccttcacaaaaaaattatcgagatcccctttttctcctaagaaaagccatggctaagggtcccggtctctactctgacatcggcaagaaagccagggatctgctgttcaaggactaccacagtgaccagaagttcaccatcaccacctactcacccactggagttgctataacagcatcaggaaccaggaaaagtgaactgtttgtggctgatgtcaacacccagttgaagaacaaaaacatcactactgatatcaaagttgatacagattctaatctcttcacaactatcactgttaatgaatctgctcctggtctgaaagctatttttagcttcaaagttcctgaccaaaagtctggaa

SEQ ID NO: 823 - DNA, 396 bp, Glycine max
ggaggctcgtgagatactggagaagcgggaagcagctgtttttgctaaggagcaagattcgttgcagaggcttcaagagaaaagagatgctgcttcatttgccattgtaaatgctcgagaaaagcagaggaagatttcatcacgtgaattggctactttctctaatggtggtaaaggagggatgccaggagtggaggagaaaccagtggatactttgtccactgcagctgaaggtaatgtggaagatgtaaaacttcctgataatggaaatgtggagttggtatcttatccagagttggtaaaactatgcaaagagatggatgctgctggacttcacaaattcatatctgataaacgtaagaaacttgctgctgtaagggatgaaataccaaatgc

SEQ ID NO: 824 - DNA, 92 bp, Glycine max
gactcacaactccataacacaaggcagaaagcaagctcatcctagagttttaaaaatggcagcagcctcctccagggctctctcttccccat

SEQ ID NO: 825 - DNA, 372 bp, Glycine max
gatggaaactggaggctttcatggctaccgcaagctccccaacacaacctctgggttgaagctgtcagtgtcagacatgaacatgaacatgaggcagcagcaggtagcatcatcagatcagaactgcagcaaccacagtgcagcaggagaggagaacgaatgcacggtgagggagcaagacaggttcatgccaatcgctaacgtgatacggatcatgcgcaagattctccctccacacgcaaaaatctccgatgatgcaaaggagacaatccaagagtgcgtgtcggagtacatcagcttcatcaccggggagggcaacgagcgttgccagaggggtgcaacgcaagaccatagccgcagaggacgtgcttt

SEQ ID NO: 826 - DNA, 339 bp, Glycine max
gctagtggcagtgaccaaactccatttctcactcgccgtcgtctcttccgtctagggtttctcctcttcacaaaaatggttgccgcaaaaaaaactaagaagacccatgagagcatcaacaacaggctcgctctcgtcatgaagagtggcaaattcaccctcggttacaagaccgttctcaaatctcttaagagctccaaagggaaattgattatcattgctaacaattgcccccctttgaggaagtcagagattgaatactacgctatgttggcaaaggttggggttcatcattacaatgggaacaatgtggatttgggcaatgcatgttggaaatat

SEQ ID NO: 827 - DNA, 360 bp, Glycine max
gggcagtggcaccttcagctgcacaaagattcccaaagttgagaaacagcacactctctcactcacttgtcattgttatttttgttttacattttgtcacaatctgtgactgttcgagttatccgaggcccctcttttatatggtcgttaataaaaatggcttcgacccttttcacaaagatgcttctgggccaacgattgatccatccttattcgttcctcactcaccagccacagattctctcttctctattcagtaaacggctgttttgtatacgatctgtcccagtctcagcctatacatcccaaaacatcaaaacaactggttgggctccttgtatggcttcttcctcagtttgt

SEQ ID NO: 828 - DNA, 340 bp, Glycine max
gagtagttttttattttctgctttcaaaacccattgagttgaatctgatgacggcatgactcagtttttcattccgtaaaatttctttacgttaatttccgtagcagttcatccttacaaaaaatcttccgtagcttctttctcttcctcctttttgggtcgtgagtgtacacgcatcacgcatggtagctttccttcgacgctggattccacgatggaaggtgttagcttcaccaccctgacgggatagcaagtcgttcatgaaattgagaattgctgctgctaacagagaggcttccattagggatggggagttcaccgggagtggtgagtatgtgac

SEQ ID NO: 829 - DNA, 339 bp, Glycine max
gatcgtaaatcaattcaaacaataggagaagaagggactagcggcgaactcaaacggcgtcgtatcgactcgttgttcatccatttgagaggcatctggtagcggaagatggataagggtaagatccaagaggtgatcgagaaccaagtcctgacggtggcgcaagccgtcgaggacaagatcgacgatgagatcgccgccctggaacgcctcgatgccgacgacatcgaagccctccgcgagcgccgcctccagcagatgaagaagatggcggagaagcgctcccgctggatctccctcggccactccgaatattccgagattccctccgagaaagac

SEQ ID NO: 830 - DNA, 407 bp, Glycine max
gaatttgaaagaagagattccttcataattcgttcttttctactaccttgaaatgtttatgataggcattaattaattaataagaaagaatttctgggaagggatcacaatcacattgatggatagattaactatcacaaactaaactacacacacaagatccggggtttgatcaaccatcatgtctgacgaagtcaacagcgttttcaagaaatatctcaaccagcttcagcttcatcctctcagaaccaaggcgattactgcggcatttttggctggttttagtgatgcagtggcgcagaagttatctggggccaataaacttcagttgagaagggtacttcttttcatgctctatggtttcccctactctgggccctttggaaattttctccacacattgatgg

SEQ ID NO: 831 - DNA, 318 bp, Glycine max
gacattttcttcgttgagcagaaagctaaaggctaaagcctagaaccttcttcctttacacctcgctggaaccagcgatggatcctcagcctgagctagtcagctacatatgcggagattgtggaatggagaatacgctgaagcccggtgacgttatacagtgccgtgagtgcggttaccgtattctttacaagaagcgcactcgtcgcattgtccagtacgaggcacgctgaagaaaactgctataacgtttgcaagtaatttccatgaagaaattgttactacatctgtgttgtgtgatattgaagaactactttt

SEQ ID NO: 832 - DNA, 192 bp, Glycine max
gacaccttcgaattttcttttccttcactttcccgagaaaaaaaaaaacactctttcactttcttgactacggtctcacttcgacatggctcgtactaagcaaactgcccgcaagtcaaccggcggcaaggcgcaacttaaccatttggcaaccaaggccccccgaaattccgttcccctaaccggagaatt

SEQ ID NO: 833 - DNA, 302 bp, Glycine max
ggtgtgtagtataggattctcttctttattccttttgtaatttcattcattcttaatctttgtgaaaaataatgttcatcgagaattttaaggttgagtgtcctaatgtgaagtacaccgagactgagattcagtccgtgtacaactacgaaaccaccgaacttgttcacgagaacaggaatggcacctatcagtggattgtcaaacccaaatctgtcaaatacgaatttaaaagcaacatccatgttcctaaatttagggtaatgcctgtgggttggggtggaaacaacgggtcaaccctc

SEQ ID NO: 834 - DNA, 156 bp, Glycine max
gcagagaaagggacacaatcaggtaacgatgcaaggttttaacaaacggttatggcagctgcaagggttttcggagcgatagccgcgacagcgttcatggacccagggtcaaagagttcggccaatcaacaaacacgttccgtccggcggagccga

SEQ ID NO: 835 - DNA, 383 bp, Glycine max
gagtgtaactcggaagcgcagcagcaatggcaagagcgactctccttcacttgctgcggtcacagagcctccgccacgtgtccaaaaacgctccttcagcatatcgttgttttgggtcctctacctgtcaacgacccattagccccaatccatcattcaaaacttcctcccatcttgctattttccaaagaagatgggcatcacaaatcccaactacagaggaagacgacaagattagcatcggacctcgtagtggaggacaaccaggggagggtgacaaggaaactggagtcgtttattatggcccgatctcaaacaccataaagaaagtaaaacttctgtctctctcaacttgttgcccttcggtatctcttggtccggtc

SEQ ID NO: 836 - DNA, 144 bp, Glycine max
gatcgcatttcatagcactcaccctcattaccaacacgaaagcatagccaaaaccttttttcgaagtctctgattttcctaatggctccggcaaaggcagagaagaagccggcggagaagaagccagcggccggagacagcacc

SEQ ID NO: 837 - DNA, 356 bp, Glycine max
gatggctgcgcttggggaacaatcagaagaacaagccatggctgcccaacctaaacctcagaaccgacgacccatttctaacatcgtcatcgtcgttgctatgcagacggaggcacttcccattgtcaacagatttcagctcaccgaggaccctcactctccgtttccgcgaggggttccttgggttcgttatcaggggacatacaaagatcttaatataagcttgatttggcctggaaaagatccaactttgggggttgatagtgtaggcacgatatcatctgctcttgtaacgtatgctgctattcaagcattacaaccagacttgatcatcaatgcaagcactgctggtggct

SEQ ID NO: 838 - DNA, 417 bp, Glycine max
cagaaggggaaccacttttaaatttgagggatcaaagggtaagttgtttcagcgaaccagaagaaggggctcctcaactttaaaaagtgaagttagaattgaatgaatgaaaaagggtccgtggcaatggagacagagccaaaagggctagaagcttccctagaacatttgattgaccttcaccaccacaaatctcttgtccttgcccaccacacagacaaagccaagaaggacgcaataaggaaagccgagcacgtttctgatttgttggttgaagcggtgaatggtggggtccaagattccttcatcaaccagaagcgaattgagctcgaaattcgaactctggctaccaccatcacgaggttcatgaagcagactgatcaatggctcgctgccactcatgccctcaacactgct

SEQ ID NO: 839 - DNA, 309 bp, Glycine max
ggaattgattgttgtaagactttgtaattgaggtgctgcaatggcttcaagtcaggaagaggtgactcttttgggagtaattggaagcccatttgcttgcagggtgaagattgcccttaagttgaagggagttgaatacaaatatgcggaagaaaatttggccaacaagagtgatttgcttctcaaatccaacccagttcacaagaaagttccagtttttattcacaatgagaagcccatagcagagtctcttgtgattgttgagtacattgatgagacatggaagaacaaccccatcttgccttctga

SEQ ID NO: 840 - DNA, 272 bp, Glycine max
cggggaattgattgttgtcagactttgtaactgacgtgctgcaatggcttcaagtcaggaagacgtgactcttttgggagtaattggaaacccatttgcttgcagggtgaagattgcccttaagttgaacggagttgactacaaatatgccgaataaaatttggccaacaagagtgatttgcttctcaaatccaacccagttcacaagaaagttccagtttttattcacaatgagaatcccataccagagtctcttgtgaccgttgactaca

SEQ ID NO: 841 - DNA, 239 bp, Glycine max
gggaaattcgcaagacctttaacattaagaatgacttcacccctgaggaggaagaggaagttcgtcgggaaaaccaatgggcatttgaatggttttgttaatctcaaaaaatctgaatcaaagatctgccatgtggatttatgctatgcttgtttgtttatcaaagatctctcttgtagatttgcctatgctatatacttgtttgttttatattcaagactatttccgttgactgtgtg

SEQ ID NO: 842 - DNA, 380 bp, Glycine max
gaagatggccggttcggttagaactggaggaaagggtactgtgagaagaaagaagaaggctgtccacaagacaacaaccacagatgacaaaaggcttcagagcaccctgaagagaataggggtgaatgccatccctgctattgaagaggtcaatatctttaaggatgacgtagttatccagtttctaaatcccaaagttcaagcatccattgctgctaatacttgggttgtcagtggttcaccgcaaacaaagaagttgcaggatatactccctagcattatccaccaattaggaccagataacttggaaaacctgaagaagctagccgagcaattccagaagcaggctcctgaaagggccgctggttcaaccacagctc

SEQ ID NO: 843 - DNA, 387 bp, Glycine max
gactccactcacaactgaaaccaaaactgaagcggacgacctacaagatcataacatggcttcttctaccatcaactcctccttcctaacatcatgcccttcatctctcttcaacagatcatcatctccttccttccatgctaggcataatctccgcgttctcgcgccaagcccccctatgtcagcctcagctttcgcctacgagctcggatcgttccagttcgatccgattacagagtcgattgtgtcgcgcgagatgactcgcaggtacatgatcgacatggtcacccattccgacaccgacgtcgtcatcgttagcgcaggctccacgggtcactcgtgcgcctacgagctctcgaaaaacttctccatcaacatcgccattgt

SEQ ID NO: 844 - DNA, 259 bp, Glycine max
gaatcacgcactatcagtacaacaactcactcactaagctaaacaatttcatcaagcctgccatggcttcctcgcgtgcttcctctgccattgcagctgttgccatctccacaacaggttcccagaagaatggatcactcttgggaagcacaaaagcttcttttcttaatgggaggaaactgaaggtgaacagttttacagcaccagttggaccacgatgcaggaatagattgcgcttcccaacagttcctcaacctga

SEQ ID NO: 845 - DNA, 340 bp, Glycine max
ggactaaccctagttcattgcactgcaacttagccacttgaacgcccgtcactacgaaaccacagggaattcagagaagaggttacgatgtcggcccatgacagagaggacaaggagttggatctcacttctccggaagttgtcaccaagtacaagagcgccgcggagattgttaacagggctttgcagttagttatttcagaatgtggatcgaaggcagagattgttgacctttgccagaaaggggagtcctatattagtcagcaaactggtctcaggtacaagaacgtgacgaggacacatcgagagatgtgtttgccttcctacatgtgtgtctgtg

SEQ ID NO: 846 - DNA, 370 bp, Glycine max
  modified_base (313)..(313): a, c, g, t, unknown, or other
ggtttttatccttccttaaggttaagatttgggtggcatattttcaagtggttgagaaaaattatacagcgggagtgttgtgatttctaaatctgagattctgaatctgaagctacgatgagaagttgaagttgaagaagcaaaatggtgaagcattcgcaagcgtggttgttgtgatttctaaatctgagattctgaatctgaagctacgatgagaagttgaagttgaagaagcaaaatggtgaagcattcgcaagcgtggttggcaatgcggagcaagacttgtgcgctaacactcctggcactcttgtcnctctgcaacctcaacctcctcttcctccgaaccacttccgattcctgcaccaaactc

SEQ ID NO: 847 - DNA, 321 bp, Glycine max
ggtgtagtggaagtactagcaagtacgtcgtatatgtggttgatcttttgctggttgtttgttttgttccttccaattgtcagatctgaatcaccggactcactcttcacactcactcacactgaatggcttctgaaggcgaccatcaccaccaccaccaccaccatcaagatcacgatcatcatcatcatgatcatgatcaccatcatcatcacgatggagagggagagaccaactcatgggtaagtaaagattggaaagtgtaccatagccacgatggtctggcgccgcattctcacgaacccatttactcccccggct

SEQ ID NO: 848 - DNA, 60 bp, Glycine max
gatgagaactactttcaccaaaacacactctactctcgcaaaaaaaaaaaattgagtttc

SEQ ID NO: 849 - DNA, 344 bp, Glycine max
ggagatacagaaaagaaaaaggaaaccctagctggataggtcaaacatcatcatgtcggacgaagggcaccatttcgagtccaaggcagacgccggtgcctccaaaacctaccctcagcaagccggtaccattcgcaagaacggctacatcgtcatcaaaggacgcccctgcaaggttgtggaagtttcgacttccaaaactggaaagcacggtcacgccaagtgccactttgttggaattgatattttcactgccaagaaacttgaggatattgtgccctcttctcacaactgtgatgttcctcatgtgaatcgtactgattaccagctcattgatattgctg

SEQ ID NO: 850 - DNA, 363 bp, Glycine max
ggtagttccaccgagtagcaacaatgtcgaagcgaggtcgcggaggatcggcgggaaacaagttccgcatgtcgctgggtctgccggtggcggcgacggtgaactgcgccgacaacaccggcgcgaagaacctctacatcatatcagtgaaggggatcaagggtaggctgaaccggttgccgtcagcttgcgtcggagacatggttatggccaccgtcaagaagggaaagcccgatctccgtaagaaggtgctgcccgccgtcatcgtccgccagcgcaagccttggcgccgaaaggacggtgtttacaagtacttccaagataatgctggtgttaccgtgaatcccaagggtgaaatgaaag

SEQ ID NO: 851 - DNA, 393 bp, Glycine max
gatctcaatttcttttctctttgtcgcaaagagaagagatctgcctcctttttccttcccaaatcaaatctatctcttcttcaagttgaaaatggggctgtcgttcaccaagttgttcagccggctgtttgccaagaaagagatgcgtatactaatggtgggtctcgatgctgcgggtaagaccaccattctgtacaagctcaagcttggagagattgtcaccaccattcccaccattgggtttaatgtggaaactgtggaatacaagaacatcagcttcactgtctgggatgttggaggtcaggacaagatccgtcctttgtggagacattacttccaaaatacacaacgactcatttttgtggttgatagcaatgacagggaccgagttgt

SEQ ID NO: 852 - DNA, 395 bp, Glycine max
ttaatgcagtgcttcagttaactgaaaagcaccaaagtgatccataccagcttcaagggagccacatgagagggaatattttttaatggatcttccatctgaacgtccttcaaaatccatttaaaccaatgaacacctgacttgcacctggacaaaaataatgtcaacaccttacactatcatttgtaaattcggcagatttaagatttatagaatagactgataaacactagatattagaaacacaagaaatgcatctgtacatcaataattaaaagaagattccatgtcccacaaaaatgctccctatctgatgtgttttgcaccccaattaagaagggtgacaaatgatgaagagcatgataaaattcaaaatgcacataacaaagtgattc

SEQ ID NO: 853 - DNA, 381 bp, Glycine max
gactgcaactttgctctctgtgaggcttcaatttctaattagggtttcgcttagagtaaccaataaccatgggagtcttcacctttgtcgtccgcaaatccggcagcgaatggagcgccaagcaacattccggcgacatcgaggcctccgccgattccaccttcgatctccaacggaagctcgtgcaagccgctctcgccgttgattcctccggtggagttcagtcctctttctctcccgtgtctcctacctccgctgtgttccaggtgatagtgggtggtgcagtattcgttggaggtggtggtggtgctgttgcagctgcacctgcaggtggtgctgccgcagctgatgctgccccagctgctgagaaaaaggaagaaa

SEQ ID NO: 854 - DNA, 358 bp, Glycine max
ggcagcgcttgatttgaggccaggcaagccccactcaaccaccacacctctcctcgttcacgctacccctttctgctcttcttctacctttcaagttttaaaagtataaagatggcagagacattcctatttacctcagagtcggtgaacgagggacaccctgacaagctctgcgaccaaatctccgatgctgtcctcgacgcttgcctcgagcaggacccagacagcaaagttgcctgcgaaacatgcaccaaaaccaacttggtcatggtcttcggaaaaatcaggaccaacgccaacgttgactacgagaagatagtgcgttacacctggaggaacatccggctcgtctcaaatg

SEQ ID NO: 855 - DNA, 328 bp, Glycine max
gactcatacaatagagaccagcttttgcttctttgtgaacatggagatgaggaaatcatgtggcttcttcttcttgctcctcctccttgtctttgcttcccaggtggtggtgcagacggagggaagagtgtgtgagtcacaaagccacgggttccatggtttgtgtaatatagaccacaactgtgctttggtctgcaggaacgatggtttctccggtggcaggtgcagaggcttccgccgccgcttttgcaccaggatttgttgagatctcatcagttagttattcttgccatgcaaattaataaatcatagctaggccaaatcaatt

SEQ ID NO: 856 - DNA, 368 bp, Glycine max
gacagcagcttccctcgcacccatgcccaatcacatcgacgagactcacgatttccttctcactgctatccagaaggacgcagagtccgttcacatcacgaggagcgagagatgtggtgacgttcaaggtcagatgcgcgaaatatctcgacacacttctgtgtctttgacccaaagaaagctgatacattgagtcagtctcatccaccaagtttcaatgttcaagacctgtcacggtacacggctatagatcaacaagaaccaattcagtgattcgtcagaacatcgtatcacagtagtcgatacttcatattcatttcagtttcctgtagttttaaatcaatactctgacaaggttcttttcatct

SEQ ID NO: 857 - DNA, 374 bp, Glycine max
gaccgcacagaattagggttttccaattcacagagcaacacaacgaaccaacaatggcgcagcctcagccgcagtcgcagccgcagcacgggcaagcagcgctggagcaggtgcagtgcttcggtcgcaagaagaccgccgtggccgtgacctactgcaagcgcgggcgcggtctcatcaagatcaacggctgccccattgagctcgtggagccggagatcctccgcttcaaggccttcgagcctatcctcctgttgggtaagagccgcttcgccggcgtcgacatgcgcatccgcgtcaagggtggcggccacacctcccagatctacgccatccgccagagcatcgccaaagcgctcgtcgcgttctaccag

SEQ ID NO: 858 - DNA, 269 bp, Glycine max
gatcacaacactaacacagattttgattcgattcgattcgattcagtcgaggttttaagcagcagcaagatgtctgggcgtggaaagggaggaaagggattgggaaaaggaggagcaaaacgacatcgtaaggtgctccgcgacaacattcagggaattacgaagccagcgattcgtcgtttggctcgcaggggtggcgtgaagcgtatcagcggtttgatctacgaggagactcgcggtgttctcaagatcttcctggagaatgtcat

SEQ ID NO: 859 - DNA, 374 bp, Glycine max
gggtgaaactaacaacaacacaaggccatcatcatggcagctgcttccccaatggcaagccaactcaagtccaccttcactaggactcttgtagctcccaagggcctctctgcctcttcaccacttcacctcgtgcctcctagaaggcaatttagcttcactgttaaggccatccaatcagagaagccaacctatcaagtgattcagccaatcaacggtgacccattcattggaagcctggaaaccccagttacatccagccctttgatcgcatggtacttgtccaacctgcccgcatacagaaccgcagtgagcccactactaagagggatccacgtgggcctggcccacggataccttctggtgggcccata

SEQ ID NO: 860 - DNA, 396 bp, Glycine max
ggcgtacgcagcttcatccctaacgcgtgcatagcagagtcagagacagagacgcagccatggggcggagacctgcgacgtgttataggcaaattaagaacaagccataccccaagtcacgtttctgccgtggtgttcctgatcccaagatcacgatttatgatgttggtatgaagaacaagggtgttgatgagtttcctttctgtgtccatccggttagttgggagaaggaaaatgtttcaagttaggccctggaagctgctcgcattgcttgcaacaagtacatggccaaatttgctggaaacgatgctttccacttgagagtcagggtgcacccatttcatgttcttaggatcaacaagatgccttcgtgtgctggtgctgatacgctccaaa

SEQ ID NO: 861 - DNA, 326 bp, Glycine max
acgacagaacggtacagctgccagaaacgacagaacggtacggctgccagcaacacgacacaaaggtacagctgcgacaacacgacaacaaggtacggctgccacaacacgacaaaaaggtacggctgctactacgacgacaacaacgggatatttctaactctcaacacttccatatcttatcgtctcctcctccatcattgatgttctcacagaaacttctcaagattgctggcataccattctgaagcttcaatgactccttcaatttggcctccatcaacgcctacattgctgagttcatctcaacccttctccttgttttt

SEQ ID NO: 862 - DNA, 385 bp, Glycine max
ggtttgattagggtttgtcattagcacttcttcttttcacactgccgctgcaacaatggcttcagagaagaaactttcgaacccaatgagggagataaaagtgcagaagctcgttctcaatatctctgttggcgagagtggagatcgtctcaccagagccgccaaggtgttggaacaacttagtggccaaaccccagtgttttccaaagcaaggtacactgttcgttcctttgggattagaagaaatgagaagattgcatgctatgtcactgtcagaggtgacaaggcaatgcaacttttggagagtggtttgaaggttaaggaatatgaacttctcagaaggaatttcagtgatactggttgcttcggctttggtattcacgag

SEQ ID NO: 863 - DNA, 255 bp, Glycine max
accgacgttctgccatttgacaagaacagggttgttctcaaatctagtactgattatagacctgaagcacaggggtatatcaatgcaagccttgtctcgacctcctcagctggaaacgtgtcccagtttatagccacgcaaggtccacttcaacatacttacgaggatttctgggaaatgatcatccaatatcactgccctgcaattatcatgcttactaggttggtggataattacaagatgacaaaatgtgga

SEQ ID NO: 864 - DNA, 362 bp, Glycine max
gactcctttccgtcagttttggggaaaaggtcgagtttcacagcagcaatggtgtacgtcaaggctcagaaatcaaaagcctacttcaagagatagcaagtcaagttcaagagaagaagagagggaaaaaccgattaccgtgccaggattcggttgattaatcaggacaagaacaaatataacactccgaaataccgagttgttgttcgctttagcaacaacgacattgttgcacaaataagatctgctagcaatgctggcgatattgttcttgcctcagcatatgcacatgatctgccacaatatggtcctgaagtacggcttacaaattatgctgcagcttagtgcactggtctcctgtt

SEQ ID NO: 865 - DNA, 299 bp, Glycine max
gaggcacacactgcgacaccacactccctgcgatcccgagatcacactctcttgcgcgagactctaactctcactatctcgctcgacactggttccgcttgtcggtcttgatctctgtggttcacaccaatgtctctcacacacatatgtggtcagtcattgtctagctgcactttaatttattaccagtggggcaattcatacactacccatgaatctcattttgagttgcttggtggaagctgatatttgagaaaacagtgaaattactgtcactattgcatctgtacatagaccac

SEQ ID NO: 866 - DNA, 195 bp, Glycine max
gaggaacagtgaaaatgttcttgttttgttgcctatgctctccatttataggcttttttttcccgtgttatattcaattggctcttcaaatgtaaatgagccaacatactatgagattgaaaagaataagtttcttgaactgattgaatactatgttggcctgtaaaagtttcatgcagttatgtttttatttcg

SEQ ID NO: 867 - DNA, 377 bp, Glycine max
gagttcaattccaatatattccattctctctgtgtatttccctacctctcccttcaagatgcagatcttcgtcaagaccctcaccggcaagaccatcacccttgaggtggaaagctctgacaccatcgacaacgtcaaggccaagatccaggacaaggaaggaatccccccggaccagcaacgtctcattttcgccggaaagcaacttgaggacggccgtacccttgctgactacaacattcagaaggagagtactcttcacctcgtcctccgtctccgtggtggcatgcagatcttcgttaagacactcaccggcaagaccataaccctagaggttgaaagctccgacaccatcgataacgtcaaggcaaagatcc

SEQ ID NO: 868 - DNA, 66 bp, Glycine max
gagaacagtgggagctcgaggaagtacacttttcaggtgcagagtggggatgctgagaagaaggcg

SEQ ID NO: 869 - DNA, 273 bp, Glycine max
gagcaacatggtgaagctggtggagagatttacttgccagaagcttacgttagaaccaagaggactacttaatggagcagatcagttggaagaacttgtagctagcttcccaactggcttatctgagtgtggagaagcattatcaagccttaggagtatgagaacgagtactgtttgtgatgaatgtctatggtttaagaaatctgtctttagtcaacttgtgtgttttgttattcagttctcagcaataaactgctctggcaatctagtttc

SEQ ID NO: 870 - DNA, 396 bp, Glycine max
ggttttaggttttcttagatagagttgttaccatttgctcccagtacagagcttaaccgagcttcacaaagatgaatcgggaaaagttgatgaagatggccggttcggttagaactgggggaaagggtaccatgagaagaaagaagaaggctgtccacaagacaacaaccacagatgacaaaaggcttcagagcaccctgaagagaataggggtgaatgccatcccggctattgaggaggtcaatatctttaaggatgacgtagttatccagtttctaaatcccaaagttcaagcatccattgctgctaatacttgggttgtcagtggttctccacaaacaaagaagttgcaagatatactccctagcattatccaccaattaggaccagataact

SEQ ID NO: 871 - DNA, 422 bp, Glycine max
accacgcgtccgtgcactagagaatttggtatacagcttctgaaggcaatctttactagccagagcataatattccagaagcaaattaatttcagggcacatatttacaacttagacacaaacccttccatttccattatcctctccgacgtctccgtcagtcacatacacatactcttcttcttcttctgcttccatggcgctcactgcttcgctcgctcacaactcatttctgaaaatcccaacagccattcatagcgaagcctctccgttatgttcatccttcatgggttctccgcctacactctcgcgctcttctactcttcccgggaaccagtcgctttcgaggaaccaattcgtggtttttgcgaagaagatttcgggattggaggaggccatgaatatcagaagagatcgtgaac

SEQ ID NO: 872 - DNA, 399 bp, Glycine max
gacacttactagtagtaagcatggagtcctcaaagatctatgcttacctcttcctctgcatgatctttctctcttccgccactcccattctcggttgtggctactgtggcaaaccccccaaaaagcacaagcctggtaaaacaccaaagacacccaaaacacccgttgttaagccaccagtcaccatccctcccattaatgttcctcccgttgttcttccaccaatagtgaagcccccaggtattctccctccaattccaattattaacccaccaaccacaccagggaagggagggaacactccatgcccaccaccaaagtctcctgcgcaggctacgtgccccattgacacgctcaaacttggtgcctgtgtggatcctcttggagggttggttcaca

SEQ ID NO: 873 - DNA, 229 bp, Glycine max
gaacttttaagttattattattattatgaacactattgtgttaacaatgctgccattttttctcttcctgttagtttggcttcctagggttacctgtggctggacggctgcacatgccacattctatggtggtgcacatgcttcagggaccatggggggagcatgccgttacgggaacttgtatcagcaagggtatggaaccagtacagcaccattaaccgctgcactt

SEQ ID NO: 874 - DNA, 389 bp, Glycine max
gactttcacacagtttcctttcttctctctctggacctatggcgagtgaccggagcggcgaatatagagtcagatcggaagcggaagaaggcgtcgacctcggcggcggacaatgagaaccggaataagaataagaagttgaagatgtcgtcgtcgtcctcgaacgctggtggccgtggcgatgttagggcttcgcacatactgataaagcacgaacgttctacaacgaaggcctcgtggaacgatccagaaagccgcatcatcaagagcacaaccaggataaaacgccgtttctcagctcaaggccctccgcgacgacatcgtttcgggcaacgccacttttgacgacatcgcctctcgcctcctcccaatgcaactccgccaagccc

SEQ ID NO: 875 - DNA, 382 bp, Glycine max
gaactcaaactgcttcattgcataattgcagataagatcaacccttctaccttcagattcgcgggaagatggcatcacttcatgctaatgtgacatcagttgtttacaacagtggcaaccgtgtttctcaatcgaaatttgcaagctcttccttcttgtctgggttcgatgttgttggtcgtgcttcaagtgcttggaagaaggaacttgtcccatcttccatttccttggtgcctagagccaccctaacatttgatcccccaactaccaattcagacataaccaagcaaaagaagcacactcttgaccctgcttctccagattttcttcctcttccttcatttgaacagtgctttccaaagagcaccagagaacacaggga

SEQ ID NO: 876 - DNA, 384 bp, Glycine max
gatctcaagccacttcagagaaaatggcggtacctctgctctcgaagaagatcgtgaagaagagggtgaagaagttcaagaggcctcagagtgacaggaaaatttccgtcaagacaaactggcgtagaccaaagggtatagattcccgtgttaggagaaagttcaagggatgcactttgatgccaaacatcggttatggttctgacaagaagacccgccactatctccctaatggttttaagaaatttgttgttcacaatgtgaaggacttggaactgctcatgatgcacaacaggacttactgtgctgagattgctcacaatatatccacaagaaagagaaaagatatagttgagaaagctgcgcaacttgatgttgttgtga

SEQ ID NO: 877 - DNA, 378 bp, Glycine max
ggattcatctctctcattgcactgcattgcaccactcactcaccaatgggactcagacccatcgacaacgctcttccaacaaccccagagagacctaacttacaacccaaagtcgctcttgcaacccaaaagcaacaagaccgtgctggcgtcaatggcgaaaacatagttccattgccctcatctggggatgccactgttgactatgtctcctccgagaaccttaagcccttgtcggaccctgaagttaagattcagagcttggttgaagatttggattcgaaaaattggacgaaggtttgtgagtcgctgaatgatgttaggcgcgtcacgatgtgacactcgtctcatctgttccccagtttgggaaaaattgtg

SEQ ID NO: 878 - DNA, 154 bp, Glycine max
ggtgaacaaattgaggtgtggtgtgcatgttcaacattgggcaccgatgatgggttcagctactgtgcaaatagcgacgtcaaaatttgttctttgcccgaatgcttcagcggcgaaggttgcgagtcccaacaagaatgccgtcatcaatttc

SEQ ID NO: 879 - DNA, 281 bp, Glycine max
gagatttctgagagaaaggaaagggtgtgagaagagaatggagagtaaagaggaagatgttaacgttggagcaaacaagttctcagaaaggcaaccaattggtacagcagctcagggtggtggtgacaaggactacaaggaggcacccccagctcctttgtttgaacctgcttagctcagatcatggtccttctacacagctggaattgctcagtttgtggcaactttcttgtacctctacattaccatctaaactgccatgggtgtcaacaggtcaccct

SEQ ID NO: 880 - DNA, 317 bp, Glycine max
gaatcctctgttgtttctcagccgcctcggctagggttcggaaacgaagaagggttctgttttcttttcgcgatgagggccaagtggaagaagaagcgtatgaggaggctgaagaggaagcgccgaaagatgagacagagatccaagtagtgcgttaaacctagtttgtttccgttgcttttacaattgcttatgttgtcaaatacgacacccagttgttaatggcactggtctctcctttttgatgttttgatacattttgttggattttatttcgtcgtatgttcttagctgaaaacaatgctgttactgcgttt

SEQ ID NO: 881 - DNA, 359 bp, Glycine max
ggtgcaaaggaggaagaggaaaaagaggattggagggtcgccacgtttagcaacaaccaaaccctctctactctttcttcttctcttcgctagggttttagcttcttcctcttcacttcgttcttctggcctctacaatgagcaacgacaaggacaccttcaacgtcgctgatctcacttccgctctcaacgaggacaatagagcagaccttgtcaatgctctcaagagcaagatacagagtttggctggacagcattctgatattctagagtctctgtcgcccaatgtcaggaagcgtgtggaggttcttagaaagatccacggtcaacattatgaattagaggcaaaattttttgag

SEQ ID NO: 882 - DNA, 291 bp, Glycine max
ggttctagtgtgtgattgtttgttgttgtaactcgttcttcttcttttgttgttctgtgtttgtgtttgttttttctctcacctgaaaatgtcttgctgcggtggtaactgtggttgcggaagctcctgcaagtgcggcaacggctgctgaggctgcaagatgtacccagacttgagctacactgagtcaaccaccaccgagaccttggtcatgggagtggcacctgttaaggctcaatttgacggtgctgaaataggtgtgcccgctgagaacgattgctgcaaatgtgg

SEQ ID NO: 883 - DNA, 350 bp, Glycine max
gatcattagcaaatagaagagcaaagagagtgagaaaagaaggaagaagaagaagaagagatggcaaatgaactacccgtcaaagcttttggttgggctgcttcagacacttctggcacccttgccccttttcatttctccagaagggaaaatggcgtcgatgacgtcactctcaagattctcttctgcggggtttgccactctgatctccacactctcaaaaacgactggggtttcaccacctaccctgtcgttcctgggcatgaaattgttggtgttgtgacagaagttggaaacaatgtgaaaaacttcagagttgggtgataaagttggagttggtgtgatagtgg

SEQ ID NO: 884 - DNA, 362 bp, Glycine max
attgattttctaattctccttattttcttgtatataatgattttgtatactcattttagtttcataatctacatgtattataatttttcattttcttatgatatcgataaaaaaaatgtaataaaaaaactcataatgaggacatagaaattatatttcaataaccaaaataatagcatatagttcaaagatttataatttaaatttctattgtaaatcaaagtatgacataaaatccataacaaagtaatattagtattgtactaaacttttaatttaaatccaaaatacattataagcaaactaagggttgctagcaccagaagatcctcttgcatccaaacgtgtattacgaacacttg

SEQ ID NO: 885 - DNA, 393 bp, Glycine max
gactcaccacttcaaaacactcataacacaaagcacaaagcaaagctcatccttgagttaaaaaatggcagcagcttcttccatggctctctcatccccatccttggctggcaaggccgtgaagctgggcccatcagccccagaagtgggaagggtgagcatgaggaagaccgtcaccaagcaggtctcctcaggaagcccatggtacggcccagaccgagtcaagtacttgggcccattctctggcgagcccccgtcctacctaaccggtgagttcccaggcgactacggctgggacactgctgggctttccgcagacccagaaaccttcgccaagaaccgtgaactcgaagtgatccactccacgtggggcatgctcggagccttgggctg

SEQ ID NO: 886 - DNA, 251 bp, Glycine max
ggaaccctagccatccattcatccacgagtcagtatttgcatcttggacccagatacctcgatattgcgcgttggcccctacctgctcgtctgtccgttggtcgactggctgacaagctcccacgtgccagcttggctgcacggctgtctgtacctctgcatgatggtctggtgatgtcacaacgccacagccctataactgtggcactgcgtcacatcatgagattccggaatagcactgaactcctgat

SEQ ID NO: 887 - DNA, 376 bp, Glycine max
gatcacaaataacaatggggctttgtacagttcagcctatcactctctcgaagcttcctaacgcctcctcttttcttcctaaacctaaaccctctcttcctcagtcttacactccctccgccgcacacttatctcggtcagtttgcttaaggaatctgtcgccaaaggcaacatcttctgaagaagaaaggtccagtgggggaagtcaatttttcaatgagaagcgcgatggtgtaataatcctggaggatgttaaagaggataataataagaatgagttcgataaaacggtgattgaagatacaaagcaggacttgtttgatgatgatggacagggtctatcatttgatttgctggataagctcaattttgatac

SEQ ID NO: 888 - DNA, 384 bp, Glycine max
tggggcgacaacatagcgcacttgtttcgttgatcaccgttcttcacctgccggtgacggaattcaaaaacacccgcctctttctctttctctctctgtctgtcaccagaatctgttccattcatcttctctggtttcgattccaattcgcttggggatctgaagattgatgacaaatactctggttctgtaccaataacaaaaatcaagttgagtactattttgctggaaaataatggaagcacatcctactttctccattgaaagttccaagcaactcaatatcatggggatgtctggagcactttcttcatccttgtcaatccttccaatacacccagaagaattgtttcccaagctggcctgaatcacagctggattttg

SEQ ID NO: 889 - DNA, 381 bp, Glycine max
gaacacaatactcttcaaacactttaccttcttcttaagacaacaagctaaaagcgcttctaacttaagtgatggctaacgctgctgaagtttcagcgttgaaacgcatcaagttgcatcttttgggtgaactctctccactggccactccccaaaacaaatttgaccaaacaaaccctagcccctctgaatcttccaattccgaatcttcttctatttctcttaaccactacttcactgacctcctcgaacccgaaattgaatttcctctcttcgaattcgattccaaaccccaagtaatcgacctcgaaaccccgaaaaacctaatttcagctgagaagaagcctcaatttaatcggaaaccgtcgctgctaatcgctg

SEQ ID NO: 890 - DNA, 369 bp, Glycine max
tcatgccattttttttatcggcattgatatatgcaatgacattagacacgttaattataattataacttgtatgagattctttctttcttttttcgtcaaatattgagaggcttattcacgaagcttttatcggagcagacttgtattttaagggagaattatgacaacatagcaatcattgcagtacatggtagcaataatttatcataatgttcgcagtatttaaaataatcaagaccaccaattttagtataactttttttaatctttttattcaacaaaaaaatttcatcagttctgttgcaagtgctacttattagcatcattctatttttttttcctacatattcttttaacattccgatata

SEQ ID NO: 891 - DNA, 380 bp, Glycine max
gagggtttggttattagggttttcgctcaccggtgtgcagtcgagcccccgaagaaaaagcgaaaatgccgtcgcacaagacattcagaatcaagaagaagttggcgaagaagatgaggcagaacaggcctatcccctactggatccgcatgaggaccgacaacaccatcaggtacaacgcgaagcgccgtcactggcgtcgcaccaagcttggattctgaggtgcttgctttgcctcggttctgtttatccaattaattagtgttttattttcttgagccaaaaacaatgctttggagattttaatattttgcattttgttccaagactatattgtgtaaggaacttattgtacttcagactaatggtggtgttggtca

SEQ ID NO: 892 - DNA, 392 bp, Glycine max
gacttgaatcacagtggtgccttatcgctgtggttatcatcttcttcttcctctttctcagatctcttctttctctacgccgcacgccgaaaccatggccggaaaaggagagggtcctgctatcggaatcgatctcggaaccacctactcttgcgtcggtgtgtggcaacatgaccgcgttgaaatcatcgccaacgaccaagggaacagaaccacgccgtcttacgtcggattcactgacaccgagcgtctcatcggtgatgcggccaagaatcaagtcgccatgaaccccatcaacaccgtcttcgatgccaagaggttgattggtcgtagattcagtgattcctctgttcagagtgatatcaaattgtggcctttcaaagtcattcctg

SEQ ID NO: 893 - DNA, 317 bp, Glycine max
aggggcgtgttttcatcattgtcgttctgaacggaaaagcactggcgcagctaccctgaagcttctcttctcgtctcttctctgtcgtgagtcaccatggtgagggttagtgtgctgaacgatgctctgaagagcatgtacaatgctgagaatatgggaaagcgccaagtcatgattaagtcatcctccacagtcattatcaaattccttttggtgatgcaaaagcacggatacatccggagaatttgagtacgttgatgaccacagggctggtaaaatcctggttgaattgaacggttcactgaacaactgttggg

SEQ ID NO: 894 - DNA, 304 bp, Glycine max
ggtgctctgctcgtgcctctagggttatcatttctccatttccattttctctctcacttttcaagaatcgtaagctatgggaaagtcttacccaactgtgagtgctgattaccagaatgccgttgagaaggcgaagaagaagctcacaggcttcatcgctgagaacagatgcgctcctctaatggctccgtttggcatggcactctgctggaacctttgacaagggcacgaagaccggtggacccttcggaaccatcaagcaccctgccgaactggctcacagcgctaacaacggtcttgacat

SEQ ID NO: 895 - DNA, 297 bp, Glycine max
gatccctgaaaatcaaatcagactcagaaagagaaagggaaagaaaatggcgctgaagtttctgaacaagaaacatcataaggctcaatcagattcagagtagcagtcaagtgaaggagaaatgagaagaaggaaggatcgctatgaggacaaaaaatacatggaaagatcacccagtcaccaacagagacaaagaaatggcaaagactacaaagaagatgccggtgacagatattataacaggtccaggtcagaaaggactgtccaaaacggtcaattggattcacggtatgaatc

SEQ ID NO: 896 - DNA, 204 bp, Glycine max
cacagaagggactcgcagattcaaacgtttccaggtgaggctgacgcatctctctctgcgttcatatgggagctgggcgtggagtcccagcgcacttgaggggtgagggacaaaaccttatgcagtcacaaagcctcaatcgcgcacttttccccgttcgttacaatgacacgttctatgtctatgcattcccttccgggtgaa

SEQ ID NO: 897 - DNA, 393 bp, Glycine max
gatgtcatagtattatcattcattctcatctttctctcttctctctccacccaaaccctaactcccgaccctgttcccctctcggatccgtcatgaaaggaggaaagtccaggaccgaatctaagagagccgatcccaaacttgctgtgaataataagggagccgccaccagagctaggaaacccgccggcaaggggaaggcagcgaaagaccctaacaagccaaagaggcctccaagtgcgttcttcgttttcatggaggagttcaggaacgtattcaacaaagaacatcctgaaaacaaagcagtgtctgctgtgggcaaagctgctggagcaaaatggaagaccatgtctgaagctgaataagcaccttatgtggcaaagtctgagaaaa

SEQ ID NO: 898 - DNA, 378 bp, Glycine max
gactcgcagattcaaacgtttccgaggtgaggctgaggcatctctctctgctttctacaatgggagctgggcgtggagtctccatctcacttgatggggtgagggacaagaaccttatgcagctcaaaaagctcaatctcgctcttttccccgttcgttacaatgacaaatactatgtcgatgcactcgcttccggtgaatttaccacactagcttactatagtgatatttgtgttggagcaattgcatgccggctggataagaatgaacgtggggggcaagttcgggtttacatcatgacgttaggtgttttggcaccttaccctggacttggtaatggaacaaaattattgaattcatgttcttgatcctttctcc

SEQ ID NO: 899 - DNA, 155 bp, Glycine max
ggatagcgaaacagagagtggtttcagtgagtgatcggtgttcacttgatccttcataagtcgtcatcatcatcatcatcatcaccgttgattgaagaagatgccgatcagaaacatcgccatcggaaggcctgaagaggctactcaccccgaca

SEQ ID NO: 900 - DNA, 352 bp, Glycine max
ggttgtagcaacctaacgtgagtgagtgatagaacttcagaccctttgttgcgctcttccctcgcaagcacttcacgtttccaaccatcgtagtctatcatcaacagcgtttggcacccacgctccattaacaaaccaaattcatggatttcggttcggaaacccctcatagtgtttataatgggtgattaaagagacttcacttttgggaatgagcgaatctacgaagcttctattacatgcatctgattccaatttataaggtggcttggaagttcatccacaacaaagttctagtgtacccgttactacatttaacagtgtggaaccgtgtcatggtagatcaggttct

SEQ ID NO: 901 - DNA, 392 bp, Glycine max
gacacttactagtagtaagcatggagtcctcaaagatctatgcttacctcttcctctgcatgatctttctctcttccgccactcacattctcggttgtggctactgtggcaaactccccaagaagcacaagcctggtaaaacaccaaagacacccagaacacccgttgttaagccaccagtcaccatccctcccattaatgttcctcccgttgttcttccaccaatagtgaagcccccatgtattctccctccaattccaattattaacccaccaaccacaccagggaagggagggaacactccatgcccaccaccaaaatctcctgcgcaggctacgtgccccattgacacgctcaaacttggtgcctgtctggatcgtcttggaaggttg

SEQ ID NO: 902 - DNA, 313 bp, Glycine max
tgggacacagaccaatattcagtcatttagattcatcagaagcttataacaacaattaaacatgagtgcagccagcacagcttggattgtggcatcaagcattggagcactggaggcattgaaggatcaattgggggtgtgcaggtggaaccatgcattgaggtcactgcagcagcatgccaagatcaacattagatcctacactcaggccaaaagcttgtcttctgctacttctgctgctgtccccaataacgtcaagaggaccaatgaggagtccatgagggaaagtcatggacttgagccgtcagggtcc

SEQ ID NO: 903 - DNA, 394 bp, Glycine max
gacactgtttttttcagatttcagttttctataatagagagttctattatagaaatttcgattgtaaaatacaataaaattggattcgatactaaacataaaatagatatctatatagatagataatttgagacaaaatcaattaacatatggaaaaggtactctacgggggattttttgtcttttcctagagtccgattcctattccttcttgtttgtgtcgaaatacaaatattctaaaaatatcaataaaataatcttttttaaccccttcctgaaaaatcctacatcttagtttctattttttccaacttagaatatttctgccatataatattttattgcatataatacgtagtgaacaagttatacgagagggggttggggaatttga

SEQ ID NO: 904 - DNA, 391 bp, Glycine max
ggttctagtgtgtgattgtttgttgttgtaactcgttcttcttcttttgttgttctgtgtttgtgtttgttttttctctcacctgaaaatgtcttgctgcggtggtaactgtggttgcggaagctcctgcaagtgcggcaacggctgcggaggctgcaagatgtacccagacttgagctacactgagtcaaccaccaccgagaccttggtcatgggagtggcacctgttaaggctcaatttgagggtgctgaaatgggtgtgcccgctgagaacgatggctgcaaatgtggaccaaactgctcctgcaacccctgcacttgcaagtgaggtgttgggagagcaagcttcaagcagagatagcccttaattaggaataatgataaactatta

SEQ ID NO: 905 - DNA, 350 bp, Glycine max
gacgttcacattcaggaatcgttttcttcagaaaatttgccatcgttgagggaagcgcgagagccttcgttgttcaagatgagagctaagtggaagaagaagcgcatgaggaggttgaagaggaagcgccgaaagatgagacaaagatctaagtaggtgcttgaacaacgagtggagatgatgtgcttttccatctgctaccagcttcatgacattttatgctgtcatggctcttatgatgatcttgaggtctagtggccaggggagcttccatcttgactttagtttagctttactggtctaaagattgctgttttagtgtgggttaagttatgatattgagagttttg

SEQ ID NO: 906 - DNA, 350 bp, Glycine max
gattatcatagtagatattcattccccttatctttctctcttctctctccccgcccaaaccctaactccctatcctattccgctttctctcatccatcatgaaacgaggaaagtccaagatctgaatctaacagagccgatgccaaacctgccgtgaataagaagggcgccgccatcacgactaggaaacccgccggaaaggggaatgcatcgaaagattctaacaagccaaagacgcctccaagtgctttcttcgttttcatggaggaaatcatgaacgtgttcaacaaggaacatcccgacagcaaaacagtgtctgctgttggcaaaactgctggagcaaaatggaa

SEQ ID NO: 907 - DNA, 169 bp, Glycine max
gagtgtggaagtatgtgcagaactttgtttcccaacctccattgcctccgcttctacctcgctaccatgatcattcctgagaagaaccgcaacgagatctgcaaatacctcttccacgagggagtttgctttgccaagatggacttcaatttgggcaagcaccctgaga

SEQ ID NO: 908 - DNA, 131 bp, Glycine max
agattatggatttcgtagtttgtttccctatttatagatcgtgccaatccctgttgattttccccctcctttgcctgacgctttgactaacttccctaatgcaagtaagcatgatttaccgccgcattccg

SEQ ID NO: 909 - DNA, 376 bp, Glycine max
gattatttgacgagttatccctaaacaaatgctctgcaattgcaaattcagaggatgtcgatcttcgagtacaacggaagcgccgtggtggctagggtcggcaagaactgcttcgccattgccagcgaccgaaggctcggcgttcagctccaaactatagccacagattttcaacgcatttccaagattcacgacaagctcttcatcgctctctcgggcctcgccaccgatgctcaaacattgtatcagcgtcgtgttttccggcacaaactgtagcaactgcatgcacagagggatatgatgccagagagctttgccaatttagtcgctgctctgctctatgagaaaaagtttgatccatatttttgccaacctg

SEQ ID NO: 910 - DNA, 355 bp, Glycine max
gacaccactaaaatatctctctattattctcgttttcaatatgcagatcttcgtcaaaaccctaaccggtaaaacgattacgctagaggtcgagtcctccgacacaatcgataacgtgaaagctaaaatccaagacaaggaaggcattccaccggatcagcagcgtttgatcttcgccggtaaacaactcgaagacggcagaactctcgccgattacaatatccagaaagaatcgacgctccacctcgtcctccgccttcgcggtggcatgcaaatcttcgtcaaaaccctaaccggtaaaacgattacgctagaggtcgagtcctctgacaccatcgataacgtgaaagctaag

SEQ ID NO: 911 - DNA, 369 bp, Glycine max
gacacaaactttattacagttgttgtattgtaattaagcaagaatattaggcaatggagtcttctagaacttcaactactcttgctctttttttaaccatcaatttgcttttctttgtcatggcaagtggccgctacacttgcacacagcctaagccaaaccctatcccattcccttaccctaaccctagtcctgccgcgaagagctgccccagggacgcacttaagctcggagtgtgcgcaaacgtgcttaatggaccaattggtgctattgtagggtcaccaccggaccacccatgttgctcagtgctagaagggcttcttgatcttgaagttgcggtttgcctctgcactgccatcaaaggcaaca

SEQ ID NO: 912 - DNA, 347 bp, Glycine max
gatcgcatttcatagcactcaccctcattaccaacacgaaagcatagccaaaaccttttttcgaagtctctgattttcctaatggctccggcaaaggcagagaagaagccggcggagaagaagccagcggcggagaaggcaccggcggagaagaagccgaaggcggagaagaagatctcgaaggaaggagggagcgagaagaagaagaagcgcacgaagaagagcgtggagacctacaagatctacatcttcaaggtcctcaagcaggttcaccccgacattggtatttccagcaaggccatgggcatcatgaacagcttcatcaacgacatcttcgagaagctcgc

SEQ ID NO: 913 - DNA, 404 bp, Glycine max
gacaacacaacacaaacacacagagttagaggagaaatcatcatggcatcagcagcatctgggtttgtgttgtcacttaatgttgcagctgccaccacaaactcaagggtggtcatgttcaacacaaagaacaacgcttctaggcttgttgtaagggcttcagatgagcctgcagcggcggcacccgccaccgccacacccccagctgaagctgaagctaaaccaaagccaccacctattggccccaagagaggtgctaaggtgaagattcttaggaaggaatcttactggtacaaaggcactggttcagtggttgctgttgatcaggaccccaacactcgctaccctgttgtggttcgattcaacaaagtcaactatgccaatgtatcaacaaacaactatgc

SEQ ID NO: 914 - DNA, 363 bp, Glycine max
gatttttgagttgcggcacaaagcattcactgtgtcggaaaaagaagaagagaaaaaagatgagcgacggaggaaaacgacaaggtggaagagcgttgccgccgccgccaagaggccctccgcctcctcccccctctcgccctcgcctcgaacccgtcgatcgcgaaaagacatgtccgttactgctgcgagtgttcactaagattgggagtcaccattccatggaagactttgccgtcagaggcaaagagcccaaagacgaggttcagatttacacctggaaggacgctactctccgagaactcaccgatcttgtcaaagaagttgctccggctgcaaggagaagaaacgccaaactctcct

SEQ ID NO: 915 - DNA, 394 bp, Glycine max
ggaaaccgcggagagtttgctgctacatcgatcatcatcacctcatggacggacacgatccacaagacccaaagcagagccctgctgacatgactgcctttgtgcaaaatcttcttcagcagatgcaaaataggttccagacaatgtccgactccattgttacaaagattgatgatatgggaagtcgcataaatgagttggaacaaagcatcaatgacctgagagcagagatgggagtggagtcctctccatcacctgcagcccctgctaagctaacggaggagataaccaaagaagaaggttcagcttaagtggcattctgatttcagttgctcattattcatgcattgtattgcacaaggattgatattctgcatctacttttgtctgctgt

SEQ ID NO: 916 - DNA, 399 bp, Glycine max
gagggtttttgtcgtcgctactaagagttgctgcttcttcagccactccgcacctcgcagcctctgtgccctcaacaaccatggctgaaatcgaaactaccgttccagatcccacccaaatcgacgtcaaactcttcaatcgctggagcttcgaggatgttgaggttaatgatatgtctctggctgattacattggagtgtccccatcaaagcatgctacatatgttcctcacactgctggtaggtactcagtgaagaggttcaggaaagcgcagtgccccattgttgagaggctcaccaactctctgatgatgcacgggaggaacaatggaaagaagctcatggctgtcaggattatcaagcatgccatggagatcatccacttgctcactgacctga

SEQ ID NO: 917 - DNA, 393 bp, Glycine max
ggaggttttagcctaggaaccgtgttcatctactctgagccgcatcacttcccggaatcgtgcatccctacgttcaatatgtcgctggtggcaaacgaggatttcaagcacatacttcgtgttttgaacacgaacgtagatgggaagcagaagataatgttcgctcttacctcaatcaaatgtattgggaggcgatttgctaacatttgctgcaagaaggctgatgttgacatgaacaaaagagctggtgaactgagtgctgctgagttggatagtgtgatgactgtggttgccaacccccggcaattcaagattccggactggtttttgaacagaaagaaggactataaggatggcaagtattctcacgtggtgtcaaatgcactggatatg

SEQ ID NO: 918 - DNA, 319 bp, Glycine max
gagggacccaaattttaagaacttggctttgcgtccttcaaagtgaggtctctaagtttcactttctttgcataaggcaacctcgtttctctgtgactctgagtatcgtatcgtgttattagtatttctaattctctcttatcacgtccattgaatatgtctccgtcgttggatcttcctcccaatggtggcttcagttttgatcgaagccgaagaaacgcaatgcttcataacaatggcctcaaagccccaacctttctcaaaaatggcatcactagtgtcggtttagttctccaagatggtgtcaatcctggtgctg

SEQ ID NO: 919 - DNA, 373 bp, Glycine max
ggcttctatggacgaaagagaaaatagagttaaaaaggttactactcagattttgcagagcctggagctgagctgagaaaacccccaaccccaacctcaaccttaacctctcctcactttcttttcaaccagaactatgattaagctttttaaagtaaaggaaaaacagagagaactggcagaaaatgcgagtggcggaccacccgttaagaagcaaagtgccggcgagttgcgtcttcacaaagatataagcgagctgaatctaccaaaatcatgtaccatgcaattccccaatggcaaagatgacctgatgaactttgaagtttcaattcgacctgatgatggatattacttaggtggcacatttttgttt

SEQ ID NO: 920 - DNA, 361 bp, Glycine max
ggaacttctcacgttcatttctacacatccctagctctgtcgttccgtcgttgacgatggcgtttcgggtgcgaagccctgacctccgctctctctttcttctctctctcttgtccatcgcttccgccaatgtcttcttcgaagagcgtttcgatgacgggtgggaaaatcgatgggttaaatcagattggaaaaaagatgagaacgtggctggggagtggaaccacacctctggtcaatggaatggagacgctaatgacaaaggtattcaaaccagtgaggattacagattctatgctatttcagctgagtaccctgaattcagcaacaagggtatgacactagtctttcaattttctgt

SEQ ID NO: 921 - DNA, 314 bp, Glycine max
gtggacattgaattattgcacgatgccacaagaagagaagcccggggcggttagtgtcttcattttgtgatgtatcttatttatgagaattcggtgggcttacataaggtggatgttaaccttcctacttcagaaggaaactcttttcagatgttaaaggttatgtaactgtattggcttttccttttagttcttttggaagctttgtccagttttaatgtgacaaaaatgatactggtgtaactgcatttctttttctttcccctagtgcctctatattcgaagaaatatcaccaagtataatgcatttatat

SEQ ID NO: 922 - DNA, 340 bp, Glycine max
  modified_base (156)..(156): a, c, g, t, unknown, or other
agaaggggaaagggtttttgttttgtttccttgggtgctgcatgcactttcactcgaagaaccttgaagcgagtctgggccacagcaaccagcgacaacaactcaatcagctagggttgctttgccttgcatcctgttggaggatttcctgttcangaaaagatggtactaaaaattgtggatctcgttcagacacagttacaaagccaactgaagcaatgagagctgctatggcaagtgctgaagttgatgacgatgttctaggctatgattcaactgcttttcgcttagaaacagagatggcaaagacaatgggcaaagaaactgctccttttggtcc

SEQ ID NO: 923 - DNA, 393 bp, Glycine max
gataacggcgatttctccaaaaccttcaattccaccttcttcttctcatcttcacaccctacccctttattcttcttcacacacaattccttcaactctctttctctctctctctctctctctaaaaatgtctcatgtagtggtcactcgatccattcacacctccctcacgcgccccacctcaggatctgcacaccacagagcccaaacgttgttgaagcctccaacttttgcttccaaagtgttcccacaacaaaggaacaacccctccaaagtttgctcccgaagttgcctcgtcaatgcgaggaaatctgcacccactgaagttgttcccgtctcacccgaggatgattcaaagattgaagaagagttgcagcactcgcgtggtatgcg

SEQ ID NO: 924 - DNA, 400 bp, Glycine max
ggcagccaaagaaaagaaaatcctcaattttctgagcagccaaacactctctctctgtctctcgaaaattctcagtttgcagagaaaatctgaatcatgtcgtggcaagcgtatgtcgacgatcaccttctgtgtgacatcgaaggtaaccacctcactcacgctgctatcatcggccaagacggcagcgtttgggctcagagtaccgacttccctcagttcaaacctgaggagataactgccatcatgaatgactttaatgagcctggatcacttgctccaactggattgtatctcggtggcaccaaatatatggtcatccagggtgaacccggtgctgtcattcgagggaagaagggtcctggtggtgttactgtgaagaagaccggtgcggccttga

SEQ ID NO: 925 - DNA, 363 bp, Glycine max
ggaacctttgcattctattcattcaagattcagcaagtgcgttttggaagcagagaccgaaatacttcgagatggcccgtacaaagcaaactgcccgtaagtcaactggaggaaaagctcccaggaagcagcttgcaaccaaggctgcacgtaagtctgcaccaacaactggtggtgtgaagaagcctcatcgttatcgccctggaactgttgctcttcgtgagattaggaaataccagaagagcactgagctcctaatcaggaagcttcctttccagaggttggttcgtgaaattgcccaggatttcaagactgatctgcgtttccagagccatgctgtgcttgcattgcaagaggctgctg

SEQ ID NO: 926 - DNA, 357 bp, Glycine max
  modified_base (221)..(221): a, c, g, t, unknown, or other
  modified_base (272)..(272): a, c, g, t, unknown, or other
ggaacttctcacgttcatttctacacatccctagctctgtcgttccgtcgttgacgatggcgtttcgggtgcgaagccctgacctccgctctctctttcttctctctctcttgtccatcgcttccgccaatgtcttcttcgaagagcgtttcgatgacgggtgggaaaatcgatgggttaaatcagattggaaaaaagatgagaacgtggctggggagtgngaacacacctctggtcaatggaatggagacgctaatgacaaaggtattcanaccagtgaggattacagattctatgctatttcagctgagtaccctgaattcagcaacaagggtaagacactagtccttcaatttt

SEQ ID NO: 927 - DNA, 339 bp, Glycine max
ggcgagagaagttattagggtttttgagtgcggcggtccaaacactcttctctgcagcttttgcctacaactcccttcaccatggctgaacaaaccgagaaagcttttctgaagcaaccaaaagtgtttctcagcacaaagaagactgggaagggaaagagacctggaaaaggtgggaaccgcttttggaagtccattgggcttggatttaagactcccagggaagccatcgaaggaacctatattgacaagaagtgccccttcactggcaatgtttccatccgtggccgtatcttggctggaacatgtcacagtgctaagatgaacaggactattatt

SEQ ID NO: 928 - DNA, 374 bp, Glycine max
ggacacatacaaacatccatcatcattattattttactccgaacgagttgacaccgattccactcactcaaccatgagccgattcaggcgttttgagctcatagaacaaccacctttcttccactcctgctactctttcccttccttcgtcctccaagactcactctctctcgacctcgacctcttgccacttcccagccacttcgacgctttcgcagatctggtgcacgcgccgtcgttcgcttaccggcgcgtggagaggcatctcgagaatgagttgcgtttgcagagcctctctgaccgtgtggcggagctggagtcgcggttcgaccgtgtgctcggcggagatcggaagtacacgtggacagcggaga

SEQ ID NO: 929 - DNA, 370 bp, Glycine max
ggtgctctgctcgtgcctctagggttatcatttctccatttccattttctctctcacttttcaagaatcgtaagctataggaaagtcttacccaactgtgagtgctgattaccagaaggccgttgagaaggcgaagaagaagctcagaggcttcatcgctgagaagagatgcgctcctctaatgctccgtttggcatggcactctgctggaacctttgacaagggcacgaagaccggtggacccttcggaaccatcaagcaccctgccgaactggctcacagcgctaacaacggtcttgacatcgctgttacgcttttggagccactcaaggcggagttccctattttgagctacgccgatttctaccag

SEQ ID NO: 930 - DNA, 393 bp, Glycine max
ggcagtcacctcagagacatcatttctctctctaactttctctctcctctccgctccggcgagtaagaaaaatgcagcatttcgtggatttgcaagagaattcggagttgggtgagtcgaattcatggctttcagcgaaagagcagtccggtgcggcacccaacaccaatttggatcgcgtcctcttcaacgacctcgtcgagattgtccctctcgttcagtcactcatcgatcgtaaagcaagccgttcattcacgcggcgtggttccatgatctacaccaagacacccacaagagaatcattgtccaaaagaacaacagattcaaaaagtaggaatgttgcccaatctattcttgccaaaaagaaaagggaacatggagaaaaagaacaag

SEQ ID NO: 931 - DNA, 405 bp, Glycine max
ggcagcagcaactttaaacgccgaagaaagttcatccaatctccgaagcccttcaccgcattgcaaccatgtcgagaagaaaggttagagagccaaaggaagaaaacgtgactctgggcccagctgttagagatggcgaacatgtctttggcgtcgctcgcatctttgcctccttcaatgataccttcattcatgtcactgatctgtccgggagggaaacacttgtccgcatcacaggtggaatgaaggttaaggctgacagagatgaatcgtctccctatgctgctatgcttgctgcacaggacgttgctgccagatgcaaggaactgggcataactgctcttcacatcaagctccgtgcgacgggtggaaacaagacaaaaacacctggtcctggtgctcaat

SEQ ID NO: 932 - DNA, 401 bp, Glycine max
  modified_base (373)..(373): a, c, g, t, unknown, or other
  modified_base (381)..(381): a, c, g, t, unknown, or other
ggttctttcgccgccgtcgctcacaactcgcaaaccacaatgcctaagcagatccacgagattaaggatttccttctgacggcacggaggaaggatgcgaggtcggtgaaaatcaagaggagcagggatgtcgttaagtttaaggttcgatgctccaagtatttgtacacgctttgtgtctttgatcctgagaaagccgataaattgaagcaatctcttccccccggtttgagtgttcaagacctgtagaggtgctgagtgcggcagcgtgcgtttgtttatctttttgttgcctcatgctctagattttgtggcttgcttttatattttggtaattgttatgaggatatgcttgttttttatttgctatganaatgcganagttttattttgagcacaat

SEQ ID NO: 933 - DNA, 354 bp, Glycine max
ggatcaaagtggaccttccatttcatagccggcggtgaagatagttagcagacttggctgaccctgagcaggaggaataagaataagatgcctccttatgattgtatgtttctgtttaagccccatataacgaaggaagctgtcatggatttagttgtgagggtgggaaagcatgtgtgcagaagaaatggggttgtcactgatatcaagagtctcggaaaagttcacttgggctatggtgtgaaaaagctagatggcagatattatcagggcctactgatgcaaatgagcatgattgctacacctgaaatcaacaaagagtttcattacctaaacaatgaagaccggttactg

SEQ ID NO: 934 - DNA, 286 bp, Glycine max
ggcagtccatacctcacaccacatctatccaaacaatcaataacaatggcttatgcaaggcatgctcctacggatgtcttcctgcttgccacttccatcaaactgttcccaacgaacatagatacagcagattgtattggttcatgtacatctttctatataccaccgtgcctctcacgtgattgtcgttctgtctctatatgactaattactggtttctgcatacatccatctggacttacatccgtcgctaacatcatcgattaacatccctccttatgtcaat

SEQ ID NO: 935 - DNA, 382 bp, Glycine max
ggcccaaattttttcatagcattttcagaggaacaatggcgggtagggtttcgacgtgcttcttcttcgtgtttgctctttctctccttcttccttttcagatctccgctgaggaatcatcggagaaagagttcgtactcacattggatcactctaactttcacgacactgtcagcaagcacgatttcatcgtcgtcgagttctacgctccatggtgtggccactgtaagaagcttgctcccgagtatgagaaagctgcttctatcttgagtagtcatgatcctccggttgttttggctaaaattgatgccaatgaggagaagaacaaagaccttgcatctcaatatgatgttaggggatacccaacaattaagattctgag

SEQ ID NO: 936 - DNA, 390 bp, Glycine max
  modified_base (365)..(365): a, c, g, t, unknown, or other
gacatttctgcgtggcgtctccggtgagggaaaagtagtagaagagaagatgtcgaccgtaccaggacagctcatctgggagatcgtgaagaagaacaactcctttttggtgaaagagttcggaaggggcactcagagcgtgcagttcagcagagagcccaacaatctctacaacctcaacactttcaagtactccggtttggcgaaccagaaaactgtcactgttcaacctgctggtaaagaccagtccgtgttgctcgcaacaaccaagacaaagaagcaaaacaagcctgctgctttgcttcacaaatctgtcatgaaaaaggagttccgtaggatggcaaaggctgtgcaaaatcaggtancagataactactacaggcctgatct

SEQ ID NO: 937 - DNA, 403 bp, Glycine max
gaatcgcgcaatgtcttatgtcattcacatgtactttctcctctctttccgttccctctttttttcctttcttgtcaaccaatatttaattcctttttcttcaagcatttcaattgcaatttgcaaactttaaaccaaaacccacataagaaaatataaaaaagagcattacttttttaatttctccttcttttatgcaaccagaagtgtagtgtgttgtgtatgactaggtttctgccagccctggggataatgggtaattatctagattcttcagctaaagtagaagcagctcacagttccagaaccccttctggaatttcaaaaactagaccttcatctgttcctcccaacttatctattctgtcatatagtgaagcaagtgatttctcagatcttccca

SEQ ID NO: 938 - DNA, 354 bp, Glycine max
gggaagaagaaaaagaggaacaagaagagcgtggagacgtacaagatatacatattcaaggtactgaagcaggtccaccctgacattggtatctcaagcaaggccgtgggaatcatgaacagcttcatcaacgacatcttcgagaagcttgctcaggaatcttccagacttgcccgctacaacaagaagcccaccatcacttcaagggaaatccagaccgcggtcaggcttgtgcttcccggtgaattggccaagcacgccgtttctgaaggtaccaaggccgtcaccaagttcaccagctcatgaaccgactattaattggattttgtttctggttgcacacacaaatctgtt

SEQ ID NO: 939 - DNA, 401 bp, Glycine max
ggcagcgcttgatttgaggccaggcaagccccactcaaccaccacacctctcctcgttcacgctacccctttctgctcttcttctacctttcaagttttaaaagtataaagatggcagagacattcctatttacctcagagtcggtgaacgagggacaccctgacaagctctgcgaccaaatctccgatgctgtcctcgacgcttgcctcgagcaggacccagacagcaaagttgcctgcgaaacatgcaccaaaaccaacttggtcatggtcttcggagaaatcacgaccaaggccaacgttgactacgagaagatagtgcgtgacacctgcaggaacatcggcttcgtctcaaatgatgtgggactggatgccgacaactgcaaggtcctcgtcaacat

SEQ ID NO: 940 - DNA, 324 bp, Glycine max
ggtggaagtggtggattaggaggaccggtggtgccgggtggtgcggggactttaggtggagctggtggtttgggatgtggtgttggtggtgctggtgtctttcaacattgtaataatccttgatatcattctggggcttgcatgcatggctgttcttgttaatctaaggctgccaatattaattgttttttaggttagataatcttagcctcttagcatttgatttacttgttatgttattttagattcaagttgttataattgtcttggtttactgtttgatgtttctggtcattaaaggctgcatgcatcgacagggtcact

SEQ ID NO: 941 - DNA, 61 bp, Glycine max
aagaaggaagctgaagtcatagaagagaagaaggaagtggaagtgacggaagagaagaagg

SEQ ID NO: 942 - DNA, 57 bp, Glycine max
  modified_base (15)..(15): a, c, g, t, unknown, or other
gagacctcaggtcangcggggctacccgctgagtttaagcatatcaataagcggagg

SEQ ID NO: 943 - DNA, 367 bp, Glycine max
gaacagccacaacactttccacttgtctccgaattagttatcttgagaaacattattcccattgctatatattatggctagcatgaaggttacatgggtggttgtgatcatgtgcatggccgtggtgggtgcaccgatgatggcgcaagccatgacatgcaatgatgtgacggtgaacatggcacagtgcctatcctacctgatgcatggaggaacaccttcaacactttgctgcagcggagtcaagaacattcttggctctgctgtcaccaccgttgacaaacaaactgtgtgcaactgtctcaaggcggatgctgctaggtacaacatcaatgaccagtatgctcaggcactccctggtttctgc

SEQ ID NO: 944 - DNA, 264 bp, Glycine max
  modified_base (114)..(114): a, c, g, t, unknown, or other
  modified_base (133)..(133): a, c, g, t, unknown, or other
gatcgcacaacattattctttcgcaccttgcagaatcagttttctctctcaatcgtctttcatggctcgtaccaagcaaaccgctcgcaaatccaccggtgggaaggctcctangaagcaactcgccaccaangctgcaagaaaatctgcacctaccaccggtggagtcaagaagcctcatcgctatcgtcctggaactgttgctcttcgtgagatccgaaaataccaaaagagcacagagcttctgatccgcaagctcccctt

SEQ ID NO: 945 - DNA, 358 bp, Glycine max
  modified_base (344)..(344): a, c, g, t, unknown, or other
gaccttcgaattttcttttccttcactttcccgagaaaaaaaaacactctttcactttcttgactacggtctcacttcgacatggctcgtactaagcaaactgctcgcaagtccaccggcggcaaggcgccacgtaagcagttggcgaccaaggccgcccggaagtccgctcccgcgaccggaggagtgaagaagccccaccgcttcaggccgggaaccgtggcgctgagggaaatcagaaagtatcagaagagcaccgagcttctcatcaggaagcttccgtttcagagactcgtgagggaaatcgcgcaggacttcaagaccgatttgcgttttcagagtancgccgtttctgcgc

SEQ ID NO: 946 - DNA, 326 bp, Glycine max
gacttcacaactcaaactgcttcattgcataattgcagataagatcaacccttctaccttcagattcgcgggaagatggcatcacttcatgctaatgtgacatcagttgtttacaacagtggcaaccgtgtttctcaatcgaaatttgcaagctcttccttcttgtctgggttcgatgttgttggtcgtgcttcaagtgcttggaagaaggaacttgtcccatcttccatttccttggtgcctagagccaccctaacatttgatcccccaactaccaattcagacataaccaagcaaaagaggcacactcttgaccctgcttctcc

SEQ ID NO: 947 - DNA, 361 bp, Glycine max
gacttcacaactcaaactgcttcattgcataattgcagataagatcaacccttctaccttcagattcgcgggaagatggcatcacttcatgctaatgtgacatcagttgtttacaacagtggcaaccgtgtttctcaatcgaaatttgcaagctcttccttcttgtctgggttcgatgttgttggtcgtgcttcaagtgcttggaagaaggaacttgtcccatcttccatttccttggtgcctagagccaccctaacatttgatcccccaactaccaattcagacataaccaagcaaaagaagcacactcttgaccctgcttctccagattttcttcctcttccttcatttgaacagtgct

SEQ ID NO: 948 - DNA, 361 bp, Glycine max
  modified_base (321)..(321): a, c, g, t, unknown, or other
gagggttttgcgctgttgttgctgctcatcctccgtaacctccgagctctgcaccgaagaacgaagccatggggaagacacatggaatgggatctgctcgcaagctcaagtcccaccgcaggaggcaaaggtgggctgacaagtcatacaagaaatcacatcttggaaatgaatggaagaaaccttttgctggttcatcccatgccaagggaattgtccttgaaaagataggtattgaggctaagcagcccaactctgccattcgtaagtgtgccagggttcaacttatcaagaatgggaagaagattgccgcttttgtcnctaatgacggttgcttgaactacattgaagagaatgacga

SEQ ID NO: 949 - DNA, 376 bp, Glycine max
ctatattactttaaaaatacagaacaaaatagtgttttgggtgactgcacctttatggttaaaaataagattaaaatatgtttttaatttttatggatataaataaattttatttcagtttttttaaaaaaaaaaaaaaaaaaaaaaaaaaaaaaaaaaaaaaaaaaaaaaaaaaaaaaaaaaaaaaaaaaaaaaaaaaaaaaaaaaaacaaaaaaaaaaaaaaaaaaaaaaaaaaaaaaaaagggcccccccaaagatttaaatttaaatttccgtttcagggaaattcaaaccctttcaaattggtccccaaaatcaaattaaagggcccgcgttttaaaattttcgcccgggaaaaaccagggcttttccaaa

SEQ ID NO: 950 - DNA, 230 bp, Glycine max
ggttctagtgtgtgattgtttgttgttgtaactcgttcttcttcttttgttgttctgtgtttgtgtttgttttttctctcacctgaaaatgtcttgctgcggtggtaactgtggttgcggaagctcctgcaagtgcggcaacggctgcggaggctgcaagatgtacccagacttgagctacactgagtcaaccaccaccgagaccttggtcatgggagtggcacctgtta

SEQ ID NO: 951 - DNA, 306 bp, Glycine max
ggagaagagggtcagagtgagaaagagagagagagagagagaaactgagagaaattcgcaaaccctaatttcggaaagatcggcgatggctgcctccaaggatcgcgagaacttcgtctacatcgccaagctcgccgaacaggccgagcgatacgaagagatggtggaatcaatgaagaacgttgcgaatctcgacgttgaactgactgtggaggagcggaatttactttctgttgggtacaagaatgtgattggtgctcggagagcatcgtggaggatcctgtcttcgattgagcaagatgaaca

SEQ ID NO: 952 - DNA, 386 bp, Glycine max
ggatcaaacacagagagcgcagtccaaccctcaaaatgcattcattcggctacagagccaacgcgttgctaacctttgccgtaaccattctggcgcttatgtgcgctatggcttctgtatccgacaacttcaacacccccactccctctgcacaagtccaggttctgaacatcaactggtttcagaaacaacccaatggcaacgacgaggtcagcatgacgatgaatatttccgcagacttgcagtcccttttcacatggaacacaaaacaggttttcgtttttctagccgctgagtatgaaactcctaagaattccttgaatcagatatccctatgggatggtatcattccctctaaagagcatgcaaagttttggattccatac

SEQ ID NO: 953 - DNA, 382 bp, Glycine max
  modified_base (359)..(359): a, c, g, t, unknown, or other
gattgtgtgagtgaagaagcagagggagtagcggcattaaaaatgcagatcttcgtgaaaactctgacagggaagactataaccctcgaggtcgagagcagcgacaccatcgacaatgtcaaggccaagattcaagacaaggaaggcattcctccggatcagcagcgtttgattttcgccggaaagcagcttgaagatggaaggaccctggccgattacaacatccagaaggaatcaacccttcatctcgtcctcaggcttcgtggtggcatcattgagccttccctcatggctttggctcgcaaatacaaccaggacaagatgatttgccgcaagtgctatgcccgtctgcatcctanggctgtgaactgccgcaagaaaa

SEQ ID NO: 954 - DNA, 103 bp, Glycine max
gtgttcggattgcggcgacgtgagcggttcgctgcccgcgacgttgtgagaagtccactgaaccttatcatttagaagaagaaagaagaagcagcagcagcgg

SEQ ID NO: 955 - DNA, 404 bp, Glycine max
ggcactgtagaaattcagaagctcatcgtcatcgcgagaaatcttggtcataaaccctaaactagttttagtttctggaacattgataaccaattcaacaattgagaagcgatgcttggcgatggaggcgaaaccccctcaaggtatgaattgttgagcatggtgaagaagcattccaatttaatagggaaaacggtagttgaggagcaagatgcttctgatatcgaaatggatatgaggttttggcacgatgtctttgatttgtattttgtctgtggcaaggaatcaaggggacgccaagatgatgatcttgttttctttgtcagaaaattgggttcccatggttctggttccaacaataaaacagagagcgttgatccttattttgtacgcagttgagcgac

SEQ ID NO: 956 - DNA, 352 bp, Glycine max
ccagggaaaaaaaaaaaaaaaacatgacgtttacccagaaaaatgtaaagtggaaattgtagacaagcaaagttacctaacaaatgaggattataccctcttttaatgtgatggaactgaaattttcccagccatgaaaaccttgggaacccacatggccacaaaactcattaaaatcatgtgggacaaacatatgaaaggacatgagttacaatgtcagactttgtagtttaaaatctcttttcattttctcatcctttagatctagcctcagtgctctgaagatcctctgtcaaaaggatccaaaacccttttcttatccattgccttgtttcctttcatcactcaaatc

SEQ ID NO: 957 - DNA, 310 bp, Glycine max
ggaattaaactgcaaagtgaaatccccatgctacaaagcgttatactcatctttctagatacgttgttgactggaaagttccctctcagaaacagaagaccttgccttcgtcaccgtctctagaaacatgactaccacgaaaaccatcaccaccagcagcgatgtctttgacaaacggttcggggaaactgtctgcctgagaaaagtatgctcagaatcacgataacttcaccatgcgagatcatgtctcaactgccttgaagaaagaaggtttatcaccatcaactcttgtccctggcattgaattcac

SEQ ID NO: 958 - DNA, 406 bp, Glycine max
tgatcccctatccactcgataattcaatggtagccataaccccaaccaaggttcctcaacctccatttctccgagaatacgactcgaaacgcaacgtgtgcttgtcacggaggagccccggggcattccattgagcattgtatgaccccgaagcataaagtgtgaagtctaattgatacgggctggctgaaatttgaggagaatcgcttgttgaatcctaacattgacaagcaacaccatacatggggcaattctggaagctgttgttatgactcatcaggattttcaagtttatgccattattataaaccacagttacaatgctaaatgaaatggataaagttggtatctttgtccctcatcctctcacaaacgcatgtttgcttattcaactttcactggaatg

SEQ ID NO: 959 - DNA, 349 bp, Glycine max
ggttgtttgttgttgcattttgcacttgcaaaattttggttgcagaggcagagagaggaggcaacgccacaccgcaccactctcactctgcaacacccgaatctcgtttcacctaaacgacctcgtttttgcgttcttttcccttttcttcttctgatttaggtttcagagagaagaagaaggagcagcaatggactctcgcacgtataatcctcgcaccgtcgaagaggtttttaaggatttcaagggccgaagagctggtctcatcaaagccctaaccaccgatgttgaagatttctacaaccaatgtgatcctgagaaggagaatttgtgcttgtatggctttccc

SEQ ID NO: 960 - DNA, 316 bp, Glycine max
gacaccagcgactactcttcttagttccagcacaacaagctctgtcatttctcccacactttcttttctttcaccaaaaatgtcaccagatttcagacttttgtgcttcccggaactcatgcagtcccctatgatcactttccagggccaccctctgcgtccttctcttcaccctcatgttcacgctgctcttcactcctggtgggcttccttgggcctggggccggccgagacccagcatccctggcccattaactgccctgttagggatctttactggctccaggcctcacggtggtttatccaaagtcgcccg

SEQ ID NO: 961 - DNA, 385 bp, Glycine max
ggtggaacaaccttgtaacaatggcttcctcagttacttcctcttttcgcatcagcaatttgaagtcggtttttgttggtgagactaataaactcagagtttcaagtgttcctggtgctcatgttggtttcaatagaaagactgtagaatgtaaggaatcacgaattgggaagcaaccaattcctgtgccatccaatgtcacagtcaaattggaaggacaagatatacaagtgaaaggtcctttgggtgaacttgcattaacttatcctcgagaagtgttggttgagagggaagagtcagggactctaagggttaaaaaggcagttgaaaccagaagggccaatcaaatgcatgggctttttacgacacttacagacaacctggt

SEQ ID NO: 962 - DNA, 376 bp, Glycine max
gagactaaaaatttccacacccaacgaagatatgtttttctctttttttcctacggtgtggccaggctgttcactttagcgaaggatcaaaaaccctgtgaaagtgtgtttgtttggtcgagttgattgaattcgctggcagcttacagctatgatcatcaacaacgccccttttcctctatgattgattcgattcgattgaagtcgattccgtagagagtgagaaatcagatcacagtaatcatcgatgggtaatttgttcgtgaagaagcccaaggtaacagacgttgataaagcaatcctcgcactcaagacccagagacgcaaactcgcccaatatcaacaaaaggttacttttttttttcaaaatcaattt

SEQ ID NO: 963 - DNA, 198 bp, Glycine max
agggacaccatccactactcttcttagttccagcacaacaagctcttcaattctcccacactttcctttccttcaccaaaaatgtcaccagatttcacacttttgttcttcccggaactcatgcagtcccctatgattactttccaagccaacctctgcgtccttctcttcaacctcatgttcacgctgctcttcaat

SEQ ID NO: 964 - DNA, 385 bp, Glycine max
gaagggagaaatgaccgaatgctattcacttctaaatcttcgatttccatcgtttcccgtcattgatttcggcgcaaaaatcttccccaaacgtttccccaaatccatttcattctcacacccttcatcgaagtttcaactttgtggaatttcccgagctatggaagtggtcgaaggaagtgaagagagtaaagggtcgtcatcccctctaatgaagctcttgttcgtggaaatgggtgtcggctacgatcaacatggacaggacataacggttgcagcaatgagggcttgcagggatgcaatctcttctaattcaatccctgctttccgcagaggttccattcctggtgtcagttttgatcagatgaaattgcagattaaacta

SEQ ID NO: 965 - DNA, 300 bp, Glycine max
ggaagaagtaatagtatggcattggcattgggtaacgctattcctctctcaaacttgaaaccttgtccaaagttatcttgttgttgtatgaagaaactctttttcactcactcagtccccatttctcgcatcccaacaacgccaaagcgtactcccaccaccgtaattcgagccacttcctctttcgggtctcgcctcgaagacaccatcaagaagactgtatccgagaacccagtggtgctttattccaaaacatggtgctcctaatcttctgaggtcaaaatcttgttcaaaaagctc

SEQ ID NO: 966 - DNA, 403 bp, Glycine max
gatgtcatagtattatcattcattctcatctttctctcttctctctccaccaaaaccctaactcccgaccctgttcccctctcgtatccgtcatgataagaggaaagtccaagaccgaatctaagagagccgatcccaaacttgctgtgaataagaatggagccgccaccaacgctatgaaacccgccggcaatgggaaggcagcgaaagaccctaacaagccaaagaggcctccaagtgctttcttcgttttcatggaggagttcaagaaggtattcaacaaagaacatcctgaaaacaaagcagtgtctgctgtgggcaaagctgctggagcaaaatggaagaccatgtctgatgctgaaaaagcaccttatgtggcaaagtctgagaaaaggaaagtgga

SEQ ID NO: 967 - DNA, 375 bp, Glycine max
  modified_base (162)..(162): a, c, g, t, unknown, or other
  modified_base (177)..(177): a, c, g, t, unknown, or other
aaaatcggtccggaaagatcctaaccccttcttaaggggccatcaaggagcaacgcggtccttccttcaattcgcaatctgcaattctcccatcgcaattgctggaaagagctattacgaatatatttcaacggtcaaagggtgcatcggacaagcagatanagagggcgtataagnagctagcattgaagtacatcctgataagaacccggcaatgaagaagctaataagaaatttgctgagattagcaatgcgtatgaagtgttgtcggatagcgagaagaggaatatttacgataggtatggtgaggaatgtttgaagcaacatgctgctagtggaggcagaggtggtggaatgaacttccaagatattttt

SEQ ID NO: 968 - DNA, 405 bp, Glycine max
tggggtggttcttgtttgcgagatacaagcgtaagcagcggctaccctaacctcgtcttcctctctactaatttcagctatggccgacgaagctgtggttgttccagatcccacccagatcgatgtcaagctctttaaccgctggagcttcgaggatattgatgttactgacatttcactggctgattacattggagttgcggcatccaagcacgccacatatgttcctcacaccgccggaaggtactccgtgaatcggttcaggaaggcgcagtgccccattgttgagaggctcaccaactctctcatgatgcacggtagaaacaatggcaagaaactcttggctgttaggatcatcaagcatgctatggacattattcatttgttgactgaccagaaccccat

SEQ ID NO: 969 - DNA, 378 bp, Glycine max
  modified_base (328)..(328): a, c, g, t, unknown, or other
gactgcgaaccagtagggactcccattccgactcttagccgccgatctctcagggcttgcatcttctcaggtaagctgtgaagatgtacacatcaaggaagaaaatccacaaggataaggatgctgaaccaactgaatttgaagagtcagttggacaggcattgtttgatctggaaaataccaatcaggagcttaaaagtgatctgaaggatttatacataaactcagccgtgcaagttgatgtttctggaaaccgcaaggctgttgttattcatgtcccttacagattaaggaaaggtttccgtaagattcatgttaggcttgtcanggagcttgagaagaagtttagtggcaaggatgtaatcttggttgccaccg

SEQ ID NO: 970 - DNA, 367 bp, Glycine max
gacagcactgcactcttcgcaacacaacaaaaaaagacaacccagagagcgcgtcttaataaacgctcttctctgaaaacccccatttcttttcttctttcttcttctctttcgcttcttcgatcttcgatcttcgtcgctgaaaatgagagagtgcatttcaatccacatcggccaggccgggattcaggttggaaacgcctgctgggagctttactgcctcgaacacggcattcagcctgatgggcagatgccaagtgacaagaccgttggtggaggtgatgatgctttcaacaccttcttcagtgaaactggggcaagaaagcacgtgccccgtgcgatttttgtagatcttgagcccactgtg

SEQ ID NO: 971 - DNA, 389 bp, Glycine max
  modified_base (377)..(377): a, c, g, t, unknown, or other
gacttcacaactcaaactgcttcattgcataattgcagataagatcaacccttctaccttcagattcgcgggaagatggcatcacttcatgctaatgtgacatcagttgtttacaacagtggcaaccgtgtttctcaatcgaaatttgcaagctcttccttcttgtctgggttcgatgttgttggtcgtgcttcaagtgcttggaagaaggaacttgtcccatcttccatttccttggtgcctagagccaccctaacatttgatcccccaactaccaattcagacataaccaagcaaaagaagcacactcttgaccctgcttctccagattttcttcctcttccttcatttgaacagtgctttccaaagagcaccanagaacacaggga

SEQ ID NO: 972 - DNA, 404 bp, Glycine max
gacaactcaaactgcttcattgcataattgcagatcagatcaacccttctaccttcagattcgcgggaagatggcatcacttcatgctaatgtgacatcagttgtttacaacagtggcaaccgtgtttcgcaatcgaaatttgcaagctcttccttcttgtctgggttcgatgttgttggtcgtgcctcaagtgcttggaagaaggaacttgtcccatcttccatttccttggtgcctagagccaccctaacatttgatcccccaactaccaattcagacataaccaagcaaaagaagcacactcttgaccctgcttcgccagattttcttcctcttccctcatttgaacagtgctttccatagagcaccatagcacacagggaagtcactcatgacgaaactg

SEQ ID NO: 973 - DNA, 74 bp, Glycine max
ggaagaagaacattaaattaaaccacagtgaagaagtaactaaaccaaactgcgaaacgctgaacatttgaagc

SEQ ID NO: 974 - DNA, 328 bp, Glycine max
gaagcaaaaccctaatccctctttcttcctcttcctcagtagtgcgattttcgattctcttctctgcaactatgcctaaccctaaggtcttcttcgacatgaccatcggcggtcaacctgccggccgcatcgtgatggagctctacgccgacgtgactccgagcaccgccgataacttccgcgcgctctgcaccggccataagggcgccgggcggagcggcaagcccctccactacaaaagctcgtccttccaccgcgtgatcccgaacttcatgtgccagggcggctacttcaccgccggaaacggcaccggaagcgagtcgatcta

SEQ ID NO: 975 - DNA, 339 bp, Glycine max
gagggtttcaaagtggacagaagagagcgtcctagtcgcaaccctaataagaagaaccacagcttcaagcgagtgacatccaccagccatgggtcgtatgcacagccgcggtaagggtatatcctcttctgctttgccctacaaaaggacaccccctagctggctcaagatctcttcgcaagatgtggaagaaaatatctgcaagtttgcgaagaagggtttgaccccgtctcagattggtgtcattcttcgagattctcacggtattgctcaggtcaacagcgtcactggcagcaaaatccttcgcatcctcaaagctcacgggcttgcgcctgaaat

SEQ ID NO: 976 - DNA, 371 bp, Glycine max
ggtgtgtgtagtataggattctcttctttattccttttgtaatttcattcattcttaatctttgtgaaaaataatgttcatcgagaattttaaggttgagtgtcctaatgtgaagtacaccgagactgagattcagtccgtgtacaactacgaaaccaccgaacttgttcacgagaacaggaatggcacctatcagtggattgtcaaacccaaatctgtcaaatacgaatttaaaaccaacatccatgttcctaaattaggggtaatgcttgtgggttggggtggaaacaacggctcaaccctcaccggtggtgttattgctaaccgagagggcatttcatgggctacaaaggacaagattcaacaagcca

SEQ ID NO: 977 - DNA, 354 bp, Glycine max
gagtgccattcccttcacaccattctcacaaaacaactttcaaactctgagaaagaatggctgccaacacattgatgagtactgctatctcagccttcccatctctcctttcttcctcaaaatccagatttgccaccgcagttcctctttctagctttggtgtcaccaatgcctcttcttctcgcttttctatgagtgctgactggatgccaggccagcctagacctccttaccttgatggttcagcacctggtgactttggattcgaccctcttcgtcttggtgaagtaccagagaatcttgagaggttcaaagagtcagaactcattcactgcagatgggccatgcttgctg

SEQ ID NO: 978 - DNA, 375 bp, Glycine max
  modified_base (249)..(249): a, c, g, t, unknown, or other
ggaaggctcgttgatataaaagggagtccttatcttctcatattgtttaggttttcttagtcagacttaccccttgctaccaacactgagcttaaccgagcttcgcaaagatgaatcgggaaaagttaatgaagatggctggttcggttagaactggaggaaagggtactgtgagaagaaagaagaaggctgtccacaagacaacaaccacagatgacaaaaggcttcagagcaccctgaagagaatangggtgaatgccatccctgctattgaagaggtcaatatctttaaggatgacgtagttatccagtttctaaatcccagagttcaagcatccattgctgctaatacttgggttgtcagtggttcaccgc

SEQ ID NO: 979 - DNA, 373 bp, Glycine max
gatagtctgaggaaagtgagtgagagaaagagatcgcagacacagagcagaatggcttctacccaatgtttcttgcaccaccatgctcttaccacccctgccagtgccagatccccatcactacgcatcttggttagcaccaagcctaaccagcttgtttgcaaggcacagaaacaacaaacaccacaagaggatattgatgtcagcccaatctctcgccgtttagctctaactgtgctcattggtgctgctgctgttggctccaaagtccaacctgctgatgcagcctatggtgaagctgccaatgtgtttggaaagccaaagacagacacagatttcctgccatacaatggagatggattcaaactatcta

SEQ ID NO: 980 - DNA, 365 bp, Glycine max
gacctgatgcagatgcagcctatcatggcagcctactaccccaacaacgtcaccactgatcacattcaacagtacctggatgagaacaagtccttgatcctgaagattgttgaaagccagaattctggcaagctgagcgagtgtgcagagaaccaatcaaggctgcagagaaatctcatgtacctagctgcaatagctgattctcaaccccaaccatctccaatgcctggtcagtatccttctagtggacttatgcagcagggagcacactacatgcaggctcagcaggctcagcagatgtcacaacaacagctaatggcttcgcgctcctcactcttgtactcccaacagcctttctcagtgct

SEQ ID NO: 981 - DNA, 349 bp, Glycine max
ggaaacagaaaatatattaggagagatatactaatatttatatcatgaacatccttccgacgaaatgagtgatttccatcaatgaacagtatactcggtaaaagaaaaagaaaaaaacatgtgaaagtgacagtaagctttgatgttaacaggttaaagatataagcctaagctaagtggagacgctgttgccatttctgctcattgagtgaaagttccattgggcgtggtttaatggaagggatgaagcagcttgcgtacaacactgcggtgaagctcattctggctgcactcgaacacaacttgctccctgactttgtcaccaggagatatggtcgcttcatggcgg

SEQ ID NO: 982 - DNA, 388 bp, Glycine max
gagagaaagagagagaaagatgtcgaagcgtggtcgtggtggttcggcggggaacaagttccgcatgtcgctgggtcttccagtggcggcgacggtgaactgcgccgacaacacgggggcgaagaacctctacatcatttcggtgaaagggatcaaaggccgtttgaaccgtcttccctcggcctgcgttggcgacatggtgatggccaccgtgaagaagggaaaacccgatctgaggaagaaggtcttgccagctgtcatcgttcgccagcgcaagccatggcgccgaaaggacggcgtctacatgtacttcgaagataatgctggtgttattgtcaatcccaagggagaaatgaaaggttctgctatcactggtcccattggaaaa

SEQ ID NO: 983 - DNA, 385 bp, Glycine max
gtctcctacagattcttcagcaactgcgattttggatcggaacctcttctgcggcgtagcaatgggacactccaacgtttggaattctcacccaaaaaactacggtcctggttctcgcacttgccgagtgtgtgggaatccacatggattgatcaggaagtatggccttatgtgctgcaggcagtgcttccgtagcaatgccaaggaaattggcttcatcaagtatcgctaaaagagctgttgtcacctacggaccaatattatgttctggcactaggatgttttgaagatgttatgtttgaagaaacttgagacttgtttttttcatctattttattatcagacataatgtgtggaacgaagaatacttttatataaattgttt

SEQ ID NO: 984 - DNA, 271 bp, Glycine max
ggttctagtgtgtgattgtttgttgttgtaactcgttcttcttcttttgttgttctgtgtttgtgtttgttttttctctcacctgaaaatgtcttgctgcggtggtaactgtggttgcggaagctcctgcaagtgcggcaacggctgcggaggctgcaagatgtacccagacttgagctacactgagtcaaccaccaccgagaccttggtcatgggagtggcacctgttaaggctcaatttgagggtgctgaaatgggtgtgcccgctgag

SEQ ID NO: 985 - DNA, 347 bp, Glycine max
ggtgctctgctcgtgcctctagggttatcatttctccatttccattttctctctcacttttcaagaatcgtaagctatgggaaagtcttacccaactgtgagtgctgattaccagaaggccgttgagaaggcgaagaagaagctcagaggcttcatcgctgagaagagatgcgctcctctaatgctccgtttggcatggcactctgctggaacctttgacaagggcacgaagaccggtggacccttcggaaccatcaagcaccctgccgaactggctcacagcgctaacaacggtcttgacatcgctgttaggcttttggagccactcaaggcggggttccctattt

SEQ ID NO: 986 - DNA, 337 bp, Glycine max
acttcacaaaatatatatatgtatgtttaggtagaaagataccttggatatgcatgtatgtagcaaaaagatacctcaccaaaatatatatatgtatgtttaggtagaaagataccttggatatgcatgtatatagcaaaaatacctcacaaaacatatatatgcatgtttaggtagcaagataccttggatatgcatgtatatagcaaaaatacctcacaaaacatatatatgtatgtttaggtagcaagataccttggatatgcatgtatatagcaaaaatacctcacaaaaataaacacatgtttaggtagcaaaatatctcatgaaaagaaaa

SEQ ID NO: 987 - DNA, 383 bp, Glycine max
  modified_base (346)..(346): a, c, g, t, unknown, or other
gatattaaattttttcgtcacccagaagaagagcgagagagagtgggggaacgaagaagctacagctacagctgaaacagaagctccttcgatctacaatctatagcgattaagctctcattttctgagagtgttctttctttctctctctctctctctcaccgtgattccaccatttccccatcatgatttctgctaccaaactcaaatccgttgatttttacaggaaaatcccgagagatttgactgaggcgtcgctatcaggagccggattatccatagtggcagctctggctatgatgtttttatttggaatggaactaagtagttatttgtctgttagcanctcgacatctgtaattgttgacaagagttctgatggg

SEQ ID NO: 988 - DNA, 256 bp, Glycine max
ggcgtacacagcctcaacaaccctaacgcgtgcagagcagagagagacgcagccatggggcgaagacccgcgaggtgttataggcaaattaagaacaaaccataccccaagtcacggttttgccgtggtgttcctgatcccaagatcaagatttacgatgttggtatgaagaagaaaggtgttgatgaatttcctttccgtgtccatctgggtaatttggaaaaagaaaacgtttccaatgaaggcctggaaactg

SEQ ID NO: 989 - DNA, 339 bp, Glycine max
gaaccattcaaacgcacactctctctcaccaaagccttcctagaacgaaaaaaaaaagaagagcaattttccctcaccaaagaagaagaagcaaacaatggccgatcaacttaccgatgaacagatctccgagttcaaggaagccttcagcttgttcgacaaggacggcgatggttgcatcacaaccaaggagcttggaactgttatgcgttcattggggcaaaacccaactgaggcagagctccaggacatgatcaatgaagtggatgctgatgggaatggtaacattgacttccctgagttcctaaatctcatggccaggaagatgaaggacactga

SEQ ID NO: 990 - DNA, 319 bp, Glycine max
gagcttgacctcaccgacaagggtctcggcgtccgctcaaagaggtttgctttgctggtggaagacctcaaggtgaaggttgcaaatgttgaaagtggaggagagttcaccatctccagtgctgaagagatcatcaaggccctctaaacccttgaatcctcttgtttgctcttttgccgtctttaatgtgtggtgtgactcttttgatgcctgaacatactagaatcctttcccttttcatagatgtaattgtgttatgtgctctggaaaggaccatgatatggtgcatattatggaaataaataagatttcttgctac

SEQ ID NO: 991 - DNA, 382 bp, Glycine max
agacacaggctgctcaacagttcaggatgccagatatgggatctgtaacggcaaaacaagaagatgctgctgctgcagcagcgcaacctgaagaagaggaggaggttgatgaaactggtgtcgagccccatgacattgatttggtgatgacacaggcaggagtgtcaagaagcaaggctgtcaaggctctcaagactcacaacggggacattgttggagccatcatggaactcactgcttaattggggtttatgttctatttgtttgttttttgggaatgatattagaactagtgccgtttctatgttaaaccgaatcaacataaccgttatatgtttgggatttgggttttaccctttacatcataattttgttgcgttct

SEQ ID NO: 992 - DNA, 358 bp, Glycine max
ggccgttttcttcttcatcatagtcgtggccgtgtcgcagcaaaaccaaaccacatattaacttgtttgctctaagtcatggctctgatcttgcacgcaaccaaagcaaacaagaatgctttcaagactctgattgcggcagagtacagtggcgtccaagtggaattggcccctaatttcgagatgggtgtctctaatagaactcctgaattccttaaaatgaatcccataggaaaggttcctgtcttggaaacgcccgatggtccagtctttgagagcaatgccattgctcgttacgttgctcgactcaagggtgacaacgctttgttctcatcttctgccaatgataatgcccaca

SEQ ID NO: 993 - DNA, 57 bp, Glycine max
gagacctcaggtcaggcggggctacccgctgagtttaagcatatcaataagcggaag

SEQ ID NO: 994 - DNA, 115 bp, Glycine max
gaattagaaaactttcaaccgtattaaaagattacgaatccataatccataattagcaacaaatcaaaaccgtatccggaaacaagcaattcagcaaaatgcgcgcgcagctacc

SEQ ID NO: 995 - DNA, 337 bp, Glycine max
ggcttccgctgccattgaaagaagctgttgaatcgcgtcgaataaggttctgaaatttttaagctttcatctcagacagggtgtaataagaaatgatagatataagtactctcaatgctgcacagattactgtgctgggatccgcgttttgtgttatgctttccatgcatttcacgacgcagttaatgtctcagcatctcttctattggaagaatccgaaagagcaaaaggctattatcattatcatccttatggctcctatctatgcagctgtctcctttgtgggtctcttggatatcagaggaagcaaggagtttttcacctttttagagtcagt

SEQ ID NO: 996 - DNA, 351 bp, Glycine max
  modified_base (310)..(310): a, c, g, t, unknown, or other
aagaaggaagctgaagtcatagaagagaagaaggaagtggaagtgacggaagagaagaaggaaattgaagtaacagaagagaagaaggaagctgaagtcatagaagagaagaaggaagtggaagtgacggaagagaagaaggaaattgaagtaacagaagagaagaaggaagcagaagtgaaagaagagaagaaggaaggggaagtgacggaagagaagaaggaagttgaagtgacggaagagaagaaggaagcggaagtgatagtagaagagaagaagggagttgaagtgacggaagagaagaaggaantggaagtgaccgaaagaaagaaagaagtggaagtgatcgaa

SEQ ID NO: 997 - DNA, 162 bp, Glycine max
agtctagacttttagatgatatggtactttccaaacttaaaaatgttaaacgcctgtattaatccaacaaaaaatgggcctttgaaactaaagaaaaacaaactaagattggcccaaactgaagaaatacaaaaaaatggcttgagatcaagcctaaccatg

SEQ ID NO: 998 - DNA, 335 bp, Glycine max
gggtggagagcaagagctataagtgtgggaagtgattggaaattgttggaacccaccctatcaacaaggagaagctgttttcgttcgtcgccactaacactaatcgtttcttcaatgccttacgagaaggaactcgccgctgcaaagaaagcagtcactctcgctgctcgtctctgccagaaagttcagaaggctcttctgcaatccgatgtgcactcaaagtcagacaaaagtcctgtcacagtggctgattatggttcacaagcattggtcagctttatacttgagagagaacttccttctgaatcattttcattagtagctgaggaggattc

SEQ ID NO: 999 - DNA, 321 bp, Glycine max
gaagactgtctctaaggaggaagcgtctgccatcaaggctgctgggaaagcatggtatcacactatggtgtcagattctgattatacagaattcgacaacttttctaagtggttgggtgtttcacagtaaacttcatgatttattttttcgtattagaattttgttttttatgctcatcagaactaaatatccttatctttggtttttttgttttgcgggttaaggttgtcatcataattacgcagacaatgtggaaattttgtttgttggattttagtgcaaattctggttcttatattaaaaacagcatctcttttatt

SEQ ID NO: 1000 - DNA, 283 bp, Glycine max
ggcacttcaattgcaatcaaattagttcattctctttgcgcagttccctacctctcctttcaagatgcagatcttcgtcaagaccctcaccggaaagaccatcacccttgaggtggaaagctctgacaccatcgacaacgtcaaggccaagatccaggacaaggaaggaattcccccggatcagcaacgtctcatcttcgccggaaagcatctcgaggacggccgttacctcgccgactacaacatccaagaaagagtcaacccttcaccttgtccttcgtct

SEQ ID NO: 1001 - DNA, 58 bp, Glycine max
cccacgagtcaaaccacgcgtccgccgacacgtcagacggctgcgataagagcaccga

SEQ ID NO: 1002 - DNA, 387 bp, Glycine max
gaagcactaaggagtagcgagtattggctgatacttgcaccctcttaacaataacatgagacagagaaagggttgacggaaaggaaaaccaaatcaaacccaacccaccttgtccgatctgccaccaggtgtggttgttgtgatttgaatggaggcaagtggaggtggcggtggcggtgcttcaccgtctgcaccagtgaagcaatatctgcacgatttctcgaagctgtttcagtactatctggataaatccactccacattccacgtacagatggattgggacttttgtgatagcatccatctacgtattacgcgttgtttatgtgcaggggttttacattgtctcttatggcctcggaatctaccttctgaatctcttgattgg

SEQ ID NO: 1003 - DNA, 362 bp, Glycine max
gacttccaacttgaggattcaaaagcaggaattctttgaattctctgagcaatcagtgctgtccaatctctattggggtattgacagcattgaggctgcaattcaagctcaacagccagaagaaagatccttcaggctaaggaactcagaacaaatgcttcaggtgccagcaatgcttgatgaggaagaggtcacagccacaattccaaaccgttacttggtgtgctgctcctacttttacctctcagtggttaggaagctccagggagatgagtggcaggcagcactgcattttctccaagcagttttggtctcaccaaagcttgtttggacagaatttgcatcacaactttgtgaaagtc

SEQ ID NO: 1004 - DNA, 356 bp, Glycine max
gactctgttacggtgcaacctagcagcctccaaatccaatggcttcagagaagaaactttcgaacccaatgagggagataaaagtgcagaagctcgtcctcaatatctctgttggcgagagtggagatcgtctcaccagagccgccaaggtgttggaacaacttagtggccaaaccccagtgttttccaaagcaaggtacactgttcgttcctttgggattagaagaaatgagaagattgcatgctatgtcactgtcagaggtgacaaggcaatgcaacttttggagagtggtttgaaggtgaaggaatatgaacttctcagaaggaacttcagtgataacggttgccttgggctt

SEQ ID NO: 1005 - DNA, 74 bp, Glycine max
gacctaagtaagttcaagttaggcaaaatgctaatccctgagaagggaggggacatggttaatgttcccctcac

SEQ ID NO: 1006 - DNA, 352 bp, Glycine max
ggagcagaaagctaaaggctaaagcctagaaccttcttcctttacacctcgctggaaccagcgatggatcctcagcctgagccagtcagctacatatgcggagattgtggaatggagaatacgctgaagcccggtgacgttatacagtgccgtgagtgcggttaccgtattctttacaagaagcgcactcgtcgcattgtccagtacgaggcacgctgaagaaaactgctataacgtttgcaagtaatttccatgaagaaattgttactacatctgtgttgtgtgatattgaagaactacttttaattctacagtagattgctttttgggtgatgtttatgcaaagattaaa

SEQ ID NO: 1007 - DNA, 82 bp, Glycine max
gaagacgacagaaggcggagaaagaaaatactagtaatagtctaaatagtgttccctttttgtctcgagtaacgaagccagg

SEQ ID NO: 1008 - DNA, 379 bp, Glycine max
ggtgctctgctcgtgcctctagggttatcatttctccatttccattttctctctcacttttcaagaatcgtaagctatgggaaagtcttacccaactgtgagtgctgattaccagaaggccgttgagaaggcgaggaagaagctcagaggcttcatcgctgagaagagatgcgctcctctaatgctccgtttggcatggcactctgctggaacctttgacaagggcacgaagaccggtggacccttcggaaccatcaagcaccctgccgaactggctcacagcgctaacaacggtcttgacatcgctgttaggcttttggagccactcaaggcggagttccctattttgagctacgccgatttctaccagttggctggg

SEQ ID NO: 1009 - DNA, 379 bp, Glycine max
gatgccgaaaagtagtaccaagatggcttcagttgtgtatctcctctttggcttccatctcattgttatcatgtcaagttccttacccgcaactagtgaagtgtttgcaaaacagtatccatccacagaacccgtggaagaaaaactcacccaactccacttctatttccataacaacataacgggggaacacccaactgctatgaaaactgttttgcctcctaaggggtccattcatggttttggggctacttacatgatggatgaccctctaactgaaggaccaagtccaacttcaaagcttgtgggaagatctcagggaatatacgctttggcttcacaacatgagcctgggttgctcatggtgacaaattttctc

SEQ ID NO: 1010 - DNA, 365 bp, Glycine max
gacaccatccactactcttcttagttccagcacaacaagctcttcatttctcccacactttcttttctttcaccaaaaatgtcaccagatttcacacttttgttcttcccggaactcatgcagtcccctatgatcactttccaagccaccctctgcgtccttctcttcaccctcatgttcacgctgctcttcactcctggtgggcttccttgggcctgggcccggcccagacccatcatccctggcccagtaactgccctgttagggatctttactggctccacgcctcaccgtgctttatccaaactcgcccgtaattaccacgcggaaaaactcatggctttctccatcggtttaacccgttt

SEQ ID NO: 1011 - DNA, 386 bp, Glycine max
ggacgaagaccggatatattccctcaatttagtccaatgaagacacctttgccgcctccgttgcctgcagatcctccagaagaggatgaagaggaggaagaaaagaaagaggaagagcaagaacctgataaggaggagccagataagccagacaagccagaaaagcaatagtgtgtagtaaatgactagtcttgatttctccagttatccttgatatgtcaagccagactgctgattgattaagtgaatgtaagggtatcacatgaatacctatagcgtcagaaattttagctttcaagtttttctagcaccatgtggccttatatgagttagctcatgcaagaaggaaaaaaaaacaattttgtgctacggacatatttgtaggc

SEQ ID NO: 1012 - DNA, 387 bp, Glycine max
gactgtggttgaaaatcgaatcctttctctctctctctctctaggcaataaagtgaaacgcatcagagaaattcaattcaatggatgcaaatcgcgagcaaattgtggacgttgggtcggtggtggaagccgtttctgctgacgacggtgacgctcctctctacagcctcgaaagtctctgcatgcgttgcggtgaaaacgggacttcaagatttttattgactttaattcctaactttagaaagattttgttgtcagcttttgaatgtccacactgtggtgagaggaacaatgaagtacagtttgctggtgaaattcaaccacgtggttgttgttactctttggagatcccatcatgcgaacaaaagatgctaaatcgacaagtgg

SEQ ID NO: 1013 - DNA, 130 bp, Glycine max
caataaaaattaaattaatagtacagatgttatcattaatttatattaataatatgattctttatatatattaagaaattttttggtttatatatagaaattgtttatattcttaatactaagaataccg

SEQ ID NO: 1014 - DNA, 302 bp, Glycine max
gatgccgaaaagtagtaccaagatggcttcagttgtgtatctcctctttggcttccatctcattgttatcatgtcaagttccttacccgcaactagtgaagtgtttgcaaaacagtatccatccacagaacccgtggaagaaaaactcacccaactccacttctatttccataacaacataacgggggaacacccaactgctatgaaaactgttttgcctcctaaggggtccattcatggttttggggctacttacatgatggatgaccctctaactgaaggaccaagtccaacttcaaagc

SEQ ID NO: 1015 - DNA, 328 bp, Glycine max
actcaccacttcaaaacactcataacacaaagcacaaagcaaagctcatccttgagttaaaaaatggcagcagcttcttccatggctctctcatccccatccttggctggcaaggccgtgaagctgggcccatcagccccagaagtgggaagggtgagcatgaggaagaccgtcaccaagcaggtctcctcaggaagcccatggtacggcccagaccgagtcaagtacttgggcccattctctggcgagcccccgtcctacctaaccggtgagttcccaggcgactacggctgggacactgctgggctttccgcagacccagaaacct

SEQ ID NO: 1016 - DNA, 373 bp, Glycine max
ggcccctcttctaattcttctctcaaaaggactgaacgaaaaaaccttagggttcctctgttcttcttcgccccccaaaaaattttctggctcagagaaattcaaccgttctcgccattgccgaagctccaactcctcgcatttccaactcttcacccaaaaccctttttgttggaacagagtttcagagagagacccttcacaacatggcaaaaacgaggccaggcagaaaagacttggattcctacaccatcagaggcaccaacaagatcgtaagagctggggactgtgtgctgatgcgcccctctgatacgagcaagccaccgtacgtggcgcgcgtggagaagatcgaacaggatagtaggaacaacgt

SEQ ID NO: 1017 - DNA, 329 bp, Glycine max
gagagtggtggggtgtgcagaagagcgtcgcagttgtaaccctaatcagaagaagcgcagcttcaagcgagtgacagccaccagccatgggtcgtatgcacagccgcggtaagggtatatcctcttctgctttgccctacaaaaggagagctcctagctggctcaagatctcttcgcaagatgtcgaagaaaatatctgcaagtttgcgaagaaaggtttgaccccgtctcagattggggtcattctcagagattctcacggtattgctcaggtcaatagcgtcactggcagcaagatccttcgcatcctcagagctcacggacttgcg

SEQ ID NO: 1018 - DNA, 335 bp, Glycine max
gagggtttttgtcgtcgctactaagagttgctgcttcttcagccactccgcacctcgcagcctctgtgccctcaacaaccatggctgaaatcgaaactaccgttccagatcccacccaaatcgacgtcaaactcttcaatcgctggagcttcgaggatgttgaggttaatgagatgtctctggctgattacattggagtgtccccatcaaagcatgctacatatgttcctcacactgctggtaggtactcagtgaagaggttcaggaaagcgcagtgccccattgttgagaggctcaccaactctctgatgatgcacgggaagaacaagggaaag

SEQ ID NO: 1019 - DNA, 280 bp, Glycine max
  modified_base (258)..(258): a, c, g, t, unknown, or other
ggtgtgtagtataggattctcttctttattccttttgtaatttcattcattcttaatctttgtgaaaaataatgttcatcgagaattttaaggttgagtgtcctaatgtgaagtacaccgagactgagattcagtccgtgtacaactacgaaaccaccgaacttgttcacgagaacaggaatggcacctatcagtggattgtcaaacccaaatctgtcaaatacgaatttaaaaccaacatccatgttcctaaattangggtaatgcttgtgggttgggg

SEQ ID NO: 1020 - DNA, 393 bp, Glycine max
gggccgcacttactcttgttctcaagggattcgattttctctgcactcacttctagggtttcctccgcgctatcagcaatcatggccgacgaaacaccaaatgagatgaaggaggaggttccagaaattgttccttttgatcctaccaagaagaagaagaagaagaagattacaattgtagatcctgctgatgaccctgtggagaaattggctgagaagacagaaaacctctcagtttctgagggggttgagactgcatttgctggtttgaaaaagaagaagaagaagcctgttgaaatgagtaacttgaatgatgagagtggagatgcaaatgaagatttggatgatcaccctgaagatgatgaaggagaagtggttgctcccgaggctcgc

SEQ ID NO: 1021 - DNA, 388 bp, Glycine max
  modified_base (383)..(383): a, c, g, t, unknown, or other
gatcatcaataggtgttttcatttgggattcaaactcaccatggtggacgccttcaaactttgcatcttccttcttgcgtcgatctgtgctttcctagtcttttctaatccagtgctgtgtagtgataaggaggacagtgtattcaagggaatcaacagctacaggcaaacacggagcctggtacccctgagccaagtttcgaaggcaacatgtttggctgatgaagttgcagaagaaatagagaagatgccctgtgaaaacgtgaaccaatactacccttcatctgttcctggtagtgggaacctcaaaatcccaaacttgcagaagcacataaataaatgtgacattaacttcaacaccaccactgatggggtcattctcnccgtt

SEQ ID NO: 1022 - DNA, 69 bp, Glycine max
  modified_base (45)..(45): a, c, g, t, unknown, or other
ggtctgcagtgtgcacttctcttgcataggaagggaaagaccganaactagagaagaaggaaaaccttc

SEQ ID NO: 1023 - DNA, 385 bp, Glycine max
gatcatagtagatattcattccccttatctttctctcttccctctccccgcccaaaccctaactccctaccctattccgctttctctcatccatcatgaaaggaggaaagtccaagaccgaatctaagagagccgatgccaaacttgctgtgaataagaagggcgccgccaccaagactaggaaacccgccggaaaggggaaggcagcgaaagatcctaacaagccaaagaggcctccaagtgctttcttcgttttcatggaggaattcaggaaggtgttcaacaaggaacatcccgacaacaaagcagtgtctgctgtgggcaaagctgctggagcaaaatggaagacgatgtctgatgctgaaaaagcaccttatgtggcaaa

SEQ ID NO: 1024 - DNA, 376 bp, Glycine max
gacacttactagtagtaagcatggagtcctcaaagatctatgcttacctcttcctctgcatgatctttctctcttccgccactcccattctcggttgtggctactgtggcaaaccccccaaaaagcacaagcctggtaaaacaccaaagacacccaaaacacccgttgttaagccaccagtcaccatccctcccattaatgttcctcccgttgttcttccaccaatagtgaagcccccaggtattctccctccaattccaattattaacccaccaaccacaccagggaagggagggaacactccatgcccaccaccaaagtctcctgcgcaggctacgtgccccattgacacgctcaaacttggtgcctgtgtgga

SEQ ID NO: 1025 - DNA, 332 bp, Glycine max
  modified_base (253)..(253): a, c, g, t, unknown, or other
  modified_base (259)..(259): a, c, g, t, unknown, or other
ggccattgttgctgtcatcatccgcagctgctgttattcgcaccgcaaacaaacagtgagccatggccgtcggaaagaacaagcgcatctccaaagggaaaaagggtggcaagaagaaggcagctgatccctttgccaagaaggattggtatgacattaaggccccttctctttttcaagtgaaaaatgttggcaaaaccctcgtctctcgtacgcagggtaccaagattgcttctgaaggacttaaacatanagtgtntgaggtctccttggctgatcttcaaggggatgaggatcatgcattcaagaagattagggtgagagctgaagat

SEQ ID NO: 1026 - DNA, 353 bp, Glycine max
ggtcctaaatcctcattccagccacacgcttcagaagacatggcctcattgggtgggttacaaaatgtgagcggcatcaattttcttatcaaagagggtccaaaagtcaatgcaaagttcgagctgaagccgccaccatatccactgaatggtttggagccggtgatgagccagcagacacttgagtttcactgggggaagcaccacaagacttatgtggaaaatctgaaaaaacaagttgttgggacagagcttgatgggaaagtcaactagaagagaatattggcacatcatacaataagggtgacattcttccagctttcaacaatgcagcacaggtatggaaccatgac

SEQ ID NO: 1027 - DNA, 372 bp, Glycine max
gaggaaaggaaaggggaacccaaaccgaaaccctaaccctaacggagagatggcggagcacttggcatcgatattcgggacggagaaggacagggtgaactgtccgttctacttcaagatcggcgcgtgcaggcacggcgaccggtgctcccggcttcacaccaagccgacaattagcccaacattggttctgtcgaacatgtaccagaggcccgacatgaacatgagcattatcaccaaccccgatcagccacaaccccaatcccttgaccccgacaaggtgcaggatcacttcgacgacttctacgaagatctcttcgaggagctcagcaagtacggccccattcagagcttgaatatttgtgacaacct

SEQ ID NO: 1028 - DNA, 356 bp, Glycine max
ggtcgtgaacgtgtacaattccacaaccactttatttactctccttctctcctctcccttgagcagattaaaatcatgggtccgatgctgctgagccaactcgccaccggtctaagcgttctcgccggagcggttcttgtgaaatcggttatggaccagaagcccatggcaggcccattcactcgctgccccacgtgcaacggaaccggtcgagtcacgtgcctctgttcgcgttggtccgacggcgatgtcggatgctccacatgctccgggtcgggtcggatggcctgcagcagttgcggcggctccgggaccggtcgtcccttgccggccaaaatcgcgattcgcccaccgaa

SEQ ID NO: 1029 - DNA, 374 bp, Glycine max
atcaagagaagcactcaattgaagaagcttatgaatgcttactgtgaccgacagtcggtggatttcaactccattgcttttctgtttgatggacgccgcctccgagctgagcagactccagatgagttggaaatggaggacggggacgagattgatgccatgcttcaccagacaggaggttctgttgtctgaaggatgtgattacctttgctcctcattataagtaggaattagttaacttagagctatgtatggcataagatacatattttattatctgctattatatacagcttttgccggtggattttggaggcattgtgcttcctcttcaatatgatgattatgaatggattgtcatatttctgctttac

SEQ ID NO: 1030 - DNA, 388 bp, Glycine max
ggttgaacttcattgtttttggctaagcctcgaaatccagaaaaatcgtgagcgaagatgatgcacatgaccttttactggagcaggaaggtgaatctcctaatagattcatggaagaccaacgattggacggagtatctcatcactctgctcgcatgcctcgtcgttgccgccttctaccagttcctagagaatcgccgcatccgcctcaagctcatcggcgccggaaatcccttcccggcagagatcgaggccccgcttctgcgacggaagcttgccggaaaccgcgccaaggtgggcgtgaaggtagccggagcgtttctgttcgggctgagctcggcgatcgggtacttgctgatgttgtcggtgatgtccttcaacggtgggg

SEQ ID NO: 1031 - DNA, 388 bp, Glycine max
caccagttccctgatgagtccttgagtgaagcattggagaggtttcggggtttgttgagaaagactcccacacatggattctctgagccaattcaattgaacatgtttatagatgggctgagaccataaaccaagcagttgttagaggcttcatcaggaggaaagataaagctgaagacccctaaggaggcaactgagttgattgaaaatatgtctgccagtgatcatgctattctaggtgatagagtgcatcaacccaccaagaggagcttattggagttatcatcgcaagacattgtgttggcacaaaataagttgctttctaagcaacttgagatcttaatagaaacaattggtaagttgccaactaaattgtctactggtcaac

SEQ ID NO: 1032 - DNA, 180 bp, Glycine max
aaaccatcatcagcaatgtcaagtacacacgtttatgacattttctatcgtttgccaaaattcttattggtttgagttattatagtgtctttgtaggtacctcaactcttcaccggtcaccaccgatatcaccattttgaagagagaactattgcaaaatcatctcagagctaacttgac

SEQ ID NO: 1033 - DNA, 373 bp, Glycine max
gaaaatcctctcgtctatagtctattgcactctgacagacactatcagatttcagaggcggaggcggaggctggagctgcctcaactcaagtcctcaactatctgaatctgaactcatccactcactcgttagcgctgctagaacgaaaactgagtaatggaaagtggagggaactcccttccatcagggtcagatggtgtgaagagaaaggtttcatatttctatgatccagaggttggaaactattattatgggcagggacacccaatgaaacctcataggattcgaatgacacatgctcttttagcccactatggattgcttcaacacatgcaggtcctgaagcctacggctgctaaagatagggacctt

SEQ ID NO: 1034 - DNA, 397 bp, Glycine max
attgacttcccaatccaagaaggctgggttccttacacagtcaaccagtaattcaaccatttgtggagcataggtctttaatgcatcaaatgtataacccatttgctcccgagaggctgaggctcctatatttccaccaattgcttctacttcccttacaatgtcaagtgtggaggagcctaagccaaaggaatgtgatagtaaaatgttaacttcaccgtctgctagtcctttcactaaatttaccaatgcctcatgtagcattggctccaaatttggtgcaaaagacctcctggttgagttgctgtggattgtttgaagttctgtcaagttcaaatagataatttcagaaatacaagatacaagcgtcaagcgtgagtatctcaaatgatgggtc

SEQ ID NO: 1035 - DNA, 392 bp, Glycine max
gagaacagaaaaataaattgaagattgagagaagatacaaaacagaagagagatgggcgtgacgaaggaacaagttgaattatccttgaaggccaaactgaacccttctcaccttgaagtggttgatatatctggagggtgcggtgcaagttttgtggtagagattgtatccgaacagtttgaaggcaaaaggctacttgagaggcatcgaatggtgaatgctgccttagaggaggaaatgaaacaaattcatgctctctctattaagaaagctgttaccccagagcagtggaaacaacagcaagaatccaaccaatcaaatcctgctgcctagagcatatgttttagttataaaataagaaatccatacagtgtgttgctgactgttgaca

SEQ ID NO: 1036 - DNA, 293 bp, Glycine max
gcctgagcaaaaccctaatccctatttttcttcctcagtagtgtcatttacgcttctcttctctgcagcagctatgcctaaccctaaggtcttcttcgacatgaccatcggcggtcaatctgctggccgcatcgtgatggacgtctacgccgacgtcagtccccggaccgccgagaacttccgcgcgctttgcaccggcgagaagggcgtaaggcggagcggcaagcccctccactacaagggggtcgtccttcgaccgcgtgattccgagtttcatgtgtcagggtggcgac

SEQ ID NO: 1037 - DNA, 377 bp, Glycine max
  modified_base (350)..(350): a, c, g, t, unknown, or other
ggtgtgtgcgttcctaacattattgtttcctaccaagttctctgtctggggagttcttagcaccaccaccagcttctgcagtagctttaagctacgaaagattttccttgaccatggggcaaaagcatttagtgacggtgttctgtttatgggctttaacatgttcccttcttccatctttctcctttggaattctgagaattggtttgaagaagagacctctagatcttgatagtattaatgctgctagaaaggcaagagaaggtctaagatctgtaagaccaatgatgggtgcacatgatcagtttattggtaagtcaaaaggtgaagatatagtacctttgaaaganttatttggacgctcaatattttggtga

SEQ ID NO: 1038 - DNA, 357 bp, Glycine max
gactgcaactttgctctctgtgaggcttcaatttccaattagggtttcgcttagagtaaccaattaccatgggagtcttcacctttgtcgttcgcaaatccggcgccgaatggagcgccaagcaacattccggcgacatcgaggcctccgccgactccacgtacgatctccaaaggaagctcgtgcaagccgctctcgccgttgattcggccggtggagtccagtcctcggtcgcgcgcgtgtctcctacctccgctgtgtgcgaagtgagagtgggtggtgctgtagtcggtagaagtggcggtggggcggttgcgagtggggccgggagggtggtgctgctgcagctgatgctgc

SEQ ID NO: 1039 - DNA, 354 bp, Glycine max
gacactcactctttgactcttcttcgtctcaaatctcttcgttccttcgattcgttccatttcttccaaaatggccaaagacgcagttcgcgttctcgtcactggagctgcagggcaaattgggtatgctcttgtccctatgattgctaggggagtgatgttgggtcctgaccagcccgtgatcctccacatgcttgacattcctccggcagcagagtcattgaatggggttaaaatggaattggtggatgctgcagtccctcgtcgtaaaggtgttgttgccagaactgatgtggttgaggcatgcactgggggcaagagtgccgtgatggttggtggattcccaagaaaaga

SEQ ID NO: 1040 - DNA, 77 bp, Glycine max
agacgacgacagcattgatattcaagttggtgatgttgatgatgcctctgaggctgattaggaggaagttggtaaaa

SEQ ID NO: 1041 - DNA, 146 bp, Glycine max
gggggcaccagctgtcgaatctgatgacctcactcctgaagtcgtatcttgcctcacaattccaaagttaaacacaagtctttcagcacaatcgcaaacatcagtatccacggcgacaattagttacgaagctgaagtacgcattt

SEQ ID NO: 1042 - DNA, 326 bp, Glycine max
gacacttcactctctagtcatggcttcttctcttcctcttctcaaccttcttagcctcgctctgtcactactcttctgcattgccttaacttccgaggttggcgtgcaggcgcagatggaggagacaggcttgaacctcatgtcggaggcgttggagtggccaaccgcaatgtcgcgctacgacgaagacagcgaagaagaggatgtccagaacggttacagtcggagatggttgttctggcggaggatgaagtactagatctcctagggcgctctttgggcgaagcgagtcgggtgcccacctgcgttctggtggatcttactac

SEQ ID NO: 1043 - DNA, 248 bp, Glycine max
atactttttatcatccaggaaagattgctctatttattatctatccagcgtcccacgtgctaaaatcaaaaggcatccactctttttgataatcaatgatagatattgtgttatggttattccatgcgtctagctcgtaagaaactcacagagcttctgaaatgatcagtattgagcagaaagtttgtgataacggaaagggaaaggtgagtacaggtgcgtgatgggagaaaattcattttgtctcg

SEQ ID NO: 1044 - DNA, 272 bp, Glycine max
aaagataaaaatggatacctcaaagcccaacactggggcaatgaaaggcaccatgcataaacctcaaacgaacctaggggcagattagaagttctcacccaataggttccttgctacaaggtcatgacggaagacaacgattgggaccttagagccttacactggggcaatgaaaggcaccatgcagaaacctcaagcgaaactaggggtagattggaagttctcacccaataagttcccagctacaaggtcatgaggaaagataacaattg

SEQ ID NO: 1045 - DNA, 359 bp, Glycine max
gagaacaattaggaagacagagaaatcggacaaaaacctaaacctaaaccctgcaaagtgttgaatttacagtttagtagtgagtgaattgagaaatcgaagttaaaaagataatagatagtaacagcaccattcaatcactcatcagagatggctaccattgaaagtagaaggaaatcagtggctttggctctctccaagtacttttcattggatcctagtgttgttccagccgatagttcagacagtgatattaagagtctttacttgaacatcatggcggtttctggacatagggttaatcactctgatgaggtgttgaagtgggtagcatttgcagaagcctttcccggtggccc

SEQ ID NO: 1046 - DNA, 108 bp, Glycine max
ggtaagtttaggggttgttattccgtgtacggtttgtagtactcgtaaaagactagaagagaatgtaagaggtttgttttgtgttagttgttaattaagtgtatttgc

SEQ ID NO: 1047 - DNA, 364 bp, Glycine max
gagagccggcttcttcctctgcgcaggaattaggaatattcgacaggtagagtttcttcaatggctcctaaagttgataagaagaatgatccaaaggcccaggccttgaagactgctaaggcagttaagtcaggtgctacctttaagaagaaggtaaagaagatccgaacttctgtcactttccacaggccgaagaccttgaagaaggacaggaaccccaagtaccctcgcattagcgccccgccgaggaacaagcttgatcattatcagatcctgaaataccccctcaccactgagtctgccatgaagaagattgaggacaacaacactttggttttcaatgtcgacctgcgtgccgacaaga

SEQ ID NO: 1048 - DNA, 88 bp, Glycine max
agggggttcccggagagatttgcaaaagataggataaggttgcatgaattatcacctttttcaaaagggcagtcaatctgtgttttcc

SEQ ID NO: 1049 - DNA, 333 bp, Glycine max
gatccatttctcgcaacaacgcttaacctctctcattccccatttcctcacctccttcaaccgctgctaaattctagggttccgaaatggacgctggcggaaagatcaagaacggcgccggaggtagaaagggcggcggcccaaagaagaagccggtttcaaggtccgtcaaagccggtctccaattccccgtcggaagaattggccgttatttgaagaaaggaacgtacgctcagcgtgtcggtaccggtgctcccgtatacttggctgcagttctcgaatacctagctgccgaggtgcttgacttggctgggaatgccgcacgtgacaaca

SEQ ID NO: 1050 - DNA, 89 bp, Glycine max
gaaaaaaagcctaagacaaagacagtgaaggaaacaacttatgagtgggaacttttaaatgatgtgaaagctatatggctgaggaatcc

SEQ ID NO: 1051 - DNA, 207 bp, Glycine max
aactccattctataccatcaaacaaacaaacgcataagaaacatcacaaaaaaacaattaagctaccaaaacacaagaaaaacaaaaattaagaagaaaagcaagcatttgcaacttgcaaagaagccaaactacacataccctcaactgggtagggacagtgtctccttgatggtaaaaggtaatccccgaaaaacggggaaaagg

SEQ ID NO: 1052 - DNA, 355 bp, Glycine max
  modified_base (316)..(316): a, c, g, t, unknown, or other
  modified_base (329)..(329): a, c, g, t, unknown, or other
gcttccctcgccgctttgtgctgctgctgctgcaaaacctagggttgagccttttgctcaggttttcagcgcttctttcttacaatggttctacagaacgatattgatttgctgaatcctccagctgagttggagaagagaaagcacaagctcaagcgtcttgtgcagtcaccaaactctttcttcatggatgttaagtgccagggctgcttcaacataacaactgtgtttagccactctcagactgttgtggtttgcggaaactgccagactgtgttgtgccaaccaacaggcggacgggcaaggttaaccgaanggtgctcttttangaagaagggagattgaatggtttgtt

SEQ ID NO: 1053 - DNA, 324 bp, Glycine max
ggttgtgtgagtgaagaagcagagggagtagcggcattaaaaatgcagatcttcgtgaaaactctgacagggaagactataaccctcgaggtcgagagcagcgacaccatcgacaatgtcaaggccaagattcaagacaaggaaggcattcctccggatcagcagcgtttgattttcgccggaaagcagcttgaagatggaaggaccctggccgattacaacatccagaaggaatcaacccttcatctcgtcctcaggcttcgtggtggcatcattgagccttccctcatggctttggctcgcaaatacaaccaggacaagatg

SEQ ID NO: 1054 - DNA, 388 bp, Glycine max
gcagatagatctgcttcttgttgttggaaagaaaccctagcaagcggaacaatggcagacgttgaggtcgatgtggcggctgcagcagcagcagggcagccgaagaagagaacgttcaagaagttcagtttcaggggcgtggatctcgatgcgcttctggacatgtccaccgatgaactcgtgaagatgttcagtgctcgcgcacgtagaaggttccagagaggcctcaccagaaagcccatggccttgatcaagaagcttcgcaaagcgaaaagagaagctccaccaggtgagaagccagaacctgtccgcacccacctccgcaacatgattattgtgcctgagatgattggtagcattattggagtgtacaatggcaagaccttta

SEQ ID NO: 1055 - DNA, 376 bp, Glycine max
tatatgcagtacctgtacctcataatgtaaaaccttatccttaagtttttattaaattcatagatacaacacatacacaataaattccatgtatcaaaccgaaagaaccgttcgttcactttactgatcgagactccatttcaggaagcaccagcgcatgtggaaagtaatcaaattccattttttgctcatcttaattacgggcgtggtagaattaaactaattatatattattatggcgatgatattagcgacaaaatcgaaaaactggaacaaaaaatgtggcaatctctcatggtttttgtacgcaccgaaagcttgtgattatgcatccacagcatgaattaacaaataaattggctgcgcaaattttgct

SEQ ID NO: 1056 - DNA, 389 bp, Glycine max
ctccttaaggttccttttgaatccaagggtggcctttgttgtataaaatattttgggattaacccatgtcatcaagcttcaaggggattgacaaacccttggcatcactctacgatcttaaatcaagaaagtttcacttagtcacataccaaggttgacaatccattgccatccttcaatggggcacacaatcgatcccaaagccttatgttttcttgttgtgcataataatcgaagcttttttaaaaaaaataagaaacgggaaaaccctaggatcaatatttcgattgattgattaaatgtcaaacagctccattatcgtcacccaaaattgtcaagtgatttaacagaacatatgctctgagggagtccccgaagagatttgcaaa

SEQ ID NO: 1057 - DNA, 88 bp, Glycine max
gtacttcaacaaaatgattgtcatacacatgaccgatacaaattatacgatacaatgaagaatttgccagcggttgacttgtaagagg

SEQ ID NO: 1058 - DNA, 322 bp, Glycine max
gattgttggcctgtgctctgctcgtgcctctagggttatcatatctccatttccatttcctctctctcagtttccaagaatcttaagctatgggaaagtcttacccaaccgtgagcgctgattaccagaaggccgttgagaaggcgaagaagaagctcagaggcttcatcgctgagaagagatgcgctcctctaatgctccgtttggcatggcactctgctggaacttacgacgtgagctcgaagaccggtggtcccttcggaaccatagagcacccctccgaactcgctcacggcgctaacaacggtcttgacatcgctgt

SEQ ID NO: 1059 - DNA, 372 bp, Glycine max
  modified_base (343)..(343): a, c, g, t, unknown, or other
gatgccgaaaagtagtaccaagatggcttcagttgtgtatctcctctttggcttccatctcattgttatcatgtcaagttccttacccgcaactagtgaagtgtttgcaaaacagtatccatccacagaacccgtggaagaaaaactcacccaactccacttctatttccataacaacataacgggggaacacccaactgctatgaaaactgttttgcctcctaaggggtccattcatggttttggggctacttacatgatggatgaccctctaactgaaggaccaagtccaacttcaaagcttgtgggaagatctcaaggaatatacgctttggcttcacancatgagcctgggttgctcatggtgacaaa

SEQ ID NO: 1060 - DNA, 363 bp, Glycine max
  modified_base (327)..(327): a, c, g, t, unknown, or other
  modified_base (342)..(342): a, c, g, t, unknown, or other
gaccgcgcaccacactgagaggaagagggagtgagagagagtgttcttcgtttgctaccttctcccagaaatggttacgttcaggtttcaccagtaccaggtggtcgggagggctctcccaacggaagcagatcagcatccgaagatctaccgaatgaagctctgggccaccaacgaggttcgcgccaagtctaagttctggtattttttgaggaagctgaagaaggtgaagaagagcaatggtcaagttcttgctatcaacgagatttttgagaagaacccaaccaagattaagaactacgggatatggttgcggtatcagagtanggcttggttacacancatgtacaaggagtaccgcga

SEQ ID NO: 1061 - DNA, 367 bp, Glycine max
tatcaaccgaggcagagacagatcagccagcaattgaactaaaacctggaattgaccttctaggacctgttgatgagatattttttgatatctatgacagatatgaaccggtcaatgaacccactttggacaactgctttgtatcaacaagttatgatgctactactcactttgagtcgaccgtggatgatgttctcaacatgtatacattgataactggaaaggttattgacctgagtgtggatcttagtgctgctagtgctgcagaagagtaaagaaaactcggtgatgtccttccttcatgatttgttgctgatgggatccgtaatggacttgataatgaatgttataaacgtttataataaat

SEQ ID NO: 1062 - DNA, 358 bp, Glycine max
  modified_base (292)..(292): a, c, g, t, unknown, or other
gacacatgcccatcatcaaagtttcttcctttctctgctctttgtcttctctgacacatttggggccttgttgagtgtgtttttgcaagagggtatggcgaaggacgttgaggttgctgagcgtggctccttctctgggaaggactaccaggacgctccagcagcaccactcattgatgctgaggagctcacaaagtggtccttttacagggctcttagtgctgagttcaggtgcactttgctcttcctctacattactgtgctcacagttatagggtacaagcaggagacngatcatgctgatgcgtgtggtggggttggcattcttggcattgcatgggcctttggtggcatgatg

SEQ ID NO: 1063 - DNA, 141 bp, Glycine max
ggagggttattggacagattcgtcagcgacggcgttgttggatcggaacctcttctgcggcgtaccaatgggacactccaacgtttggaacgcgcacccaagagactagggtcctggttctcgcacttgccgtgtctgtgg

SEQ ID NO: 1064 - DNA, 245 bp, Glycine max
gaagagaagctgaatgaggttgaagccgtttgcaacccaatcattagtgctgtgtatcagagatctggaggagccccaggcggtggtggtgcatcaggcgaggaagacgacgacgattctcacgatgagctctagattagtcggagtctgtgagatttttatgatagctgcgaattaagaagtcccctgcgcttgctttggtggtggcgatgatgggatacggtggggaattacttgtactttac

SEQ ID NO: 1065 - DNA, 369 bp, Glycine max
gatcactgtcttgtccgttttctaaatctcattcttcacctgcaactatttggattgctgatttttgttaataccatatttactgatattggcgcatttctttgagaaagttactaattcctagatagaggcaaaaatgttgggaattttcaaggagaagttggttaaagcacccaaagagctgaacagtccagcttcgttgaattcatggactaagcctaagctaagtcacgaaatccttcaggatttcatgtcctgcaattcctccaaggctttctcaatgtgctttgggaatgaagcctttgtagcctattcgccttcaaacaagccctccattcatcaagggttgtttagtgggttggataacat

SEQ ID NO: 1066 - DNA, 126 bp, Glycine max
ggtgtgagttgagtctgtgatgataatgatgatgatgatgtgttccatgtggatgtgggttgtccttgtggccattgctggtgcccttttagtcctaagatgtatcctcaatctacgatagagctc

SEQ ID NO: 1067 - DNA, 280 bp, Glycine max
ggtagcattcagtgaaacactagcgagggtattgggagctctcgttgtttcggagttagggaccttacgcagccatggcgactgctacgaatgccgccgccgccccaccacgccagctctcccagatggaagctgacatccagatgatgttggccgccgacgtccacctcggcagcaacaactgcgacttccaaatggagcgtggcagcgtgaagcgccggatgcgacgggatttacattagtaaccttgggaagacgtgggaggggcttcagctagcag

SEQ ID NO: 1068 - DNA, 340 bp, Glycine max
  modified_base (330)..(330): a, c, g, t, unknown, or other
ggaaacgtgaaagcaaaacagagaagaggagctgcggaactcttcacttcatctcagcgagacagatagaaaaagcattaacgatgagatttcacggtaactttattatttgccgttatctttctcggttgcgaaatcaattcaattcaaacttcgaattcccactcccgaatttccggcatcgagctccattcttcctccgttcttactctgccgaagtgccagctcaactgtctccggagctcttaaacataatggagcaaagactctccgctattgagtacaggacttcttgtcttaacaattttctaaatcagccagaagcatcancatcagagta

SEQ ID NO: 1069 - DNA, 149 bp, Glycine max
ggagccgccgccgcactgtggttttgcgtttctgaaagtggagagaaccctagaaaccaaactgtgctgtgcttcctacagtcatgggggacgtcatgattatgaaggagatcgaggacacgtcgcttcgtctcggcgtcgatctctcc

SEQ ID NO: 1070 - DNA, 382 bp, Glycine max
  modified_base (350)..(350): a, c, g, t, unknown, or other
gctcttttccctttctttcattgtttgttttgtttgcactctcctctccccttaacagtaactcaacaatcaagaggatcagatccataggagaagttttatctgtccatcaccaaaaccgcgactactgatcagtcaatcccatcaatcaaatcaaatcatcagaaagaaaagaaaggaaagaaaagaagaaaaaaaaaagggaatcaacaaaaagaggaacaacagcaatatcaaacatgtcctcctcatccacttccttttcaccggaccaacaacacctctctccctccgaccagctctgctatgtccattgcaacttctgtgacactgtcctcgcggtgagtgtntccttgcacagcttgttcaagaatgtcactgt

SEQ ID NO: 1071 - DNA, 326 bp, Glycine max
  modified_base (319)..(319): a, c, g, t, unknown, or other
gatgccgaaaagtagtaccaagatggcttcagttgtgtatctcctctttggcttccatctcattgttatcatgtcaagttccttacccgcaactagtgaagtgtttgcaaaacagtatccatccacagaacccgtggaagaaaaactcacccaactccacttctatttccataacaacataacgggggaacacccaactgctatgaaaactgttttgcctcctaaggggtccattcatggttttggggctacttacatgatggatgaccctctaactgaaggaccaagtccaacttcaaagcttgtgggaagatctcanggaatat

SEQ ID NO: 1072 - DNA, 339 bp, Glycine max
gaggatcgttccgaggcacattcaactggcggctaggagctacaaggagttgtgcacgctgatgggatctgtgaccactgccaacggtggtgttctgcctaacattcaccacgatctttgttgcccaatcaaggtctctggcaacgggaagaccgacattggatctgccattcaggagttttacatttaacgctcttgttttcgtatgtagttggttgccttatatactatgattaggattgacattggctgatgtataatcgcttaacatttggtaatagttaattgttttctaacattgttcctgcatagctcacagttacttgagtttctcgtgaa

SEQ ID NO: 1073 - DNA, 282 bp, Glycine max
aggtcagacacaactaaattgaacggtgggtgagtatatccttcctggaaaaagaaaatttcattcacaactcacaaggactatgcactaataggtatcttaaatatattcacacattaacatgacgtgattggtggtgacgttattagaatgaatggagagtaatagtagtatttaacaggtgtgaagaaggacatttgtttcgtcgttcgcgctttcgccagacacgtcggtaaactaattaaggctgtacaataggtggaaccagttatttcaccaaaa

SEQ ID NO: 1074 - DNA, 338 bp, Glycine max
  modified_base (291)..(291): a, c, g, t, unknown, or other
gaaaccgagaagaagaagatggagatgtatcagatctggagcaggagaatagcgttgggagcgttcgcgtttgttctgcttttccgatcggcctcagcagacgacgtcgttgtgctctctgaagataacttcgagaaggaagttggtcaggacagaggagctctcgttgagttctaggctccttggtgtggacactgcgagaggcgtgctccagaatatgaaaagcttgggagcagcttcaagaaagccagatctgttttaatcggcaaggttgactgtgatgaggacaanagtttgtgcagcaaatgatgagtctctgggtacccaacaattcagtg

SEQ ID NO: 1075 - DNA, 197 bp, Glycine max
ggacttcaccttacactctcgatgtatttgcaagttttgaagatctattaaaattgacgcgaacacgaaaagactagaaaaaagggttaagaagtaaaagtttggtgtgaggtgtgagtgttctgcacgcaccgaatcaacaataatttctcaaacagcgttgtgaaagaaacacattagaccatgcagataactat

SEQ ID NO: 1076 - DNA, 324 bp, Glycine max
attgcatcaaatcctgtttttcatgaaaggacccagcacattgaagtggactgtcattttattatacagaaaatcgagtcaggtgacatcatcactagatttgttcattcatgtgatcatggcagatgtgtttaccaaatccttgaggggtccatgggttaactacatatgcattattgcattaggtacaaataaatagaggacataatgattcctctaaatcaaagatacagtttccatataacactatataaactggcatccgtgaagtctctagacccacagtgttgttctgcctttctctatgttatttgttgctctgtt

SEQ ID NO: 1077 - DNA, 239 bp, Glycine max
ctgatctagttcatggcctattagaagtagaaggcgctctggtgggatcctcacgtacagaaaaagattgcagtcagtttgataaggatcgagtgacattgcttcttcggtccgaaccaaggaatcccttaaatatgattcaaaatggatggtattctatcgttgagtagagatttctctatgagaaatatgaatcgcggttttgaggagggggggggagtggtcggggcacaacaggt

SEQ ID NO: 1078 - DNA, 270 bp, Glycine max
gaaccgtaacggcgacgtccgtgaagtcaatcgcaagtactacgatcgcgacgtctgtcgcctctacctcgtcggtctctgccctcacgaactcttccagttgacgaaaatggatatgggcccctgccctaaggtccactcgttgcaggtccggagaggatatgaggaggggaaagcaaaggggaccgatgaggatgagacggagttggggggagtgggggacaagcttattggtgagtggtggggggaaatggggagggctctaaagcg

SEQ ID NO: 1079 - DNA, 133 bp, Glycine max
gactcactcatacaatagagaccagcttttgcgtctttgtgaacatggagatgatgaaatcatgtggcttcctcttcgtgctcctcctccttgtcgttgcttcccaggtggtggtgcaaatggagggaagagt

SEQ ID NO: 1080 - DNA, 354 bp, Glycine max
gaaacacagagggagagagagtgagagaagcagtaattcatcacaatgggtaaggttcacggatctctcgcacgtgcggggaaagtgagaggacaaactcccaaagtggcgaagcaagacaagaagaagaagccacgcggacgtgctcacaagagaatgcagtacaaccgccgattcgtcaccgccgtggtgggattcggaaagaagcgtggacgaaactcgtcagagaagtgacggaggcgtttggaagatgatgggttttcttaggttgcgaaatgtatcacctcgtggtagttgagtgatgaactcaagacggtcggagttgggattaagcgtcaatgaacgagttttttg

SEQ ID NO: 1081 - DNA, 285 bp, Glycine max
gaaaacagcgcactgagtgctgagaacgttacctcattcaaaagcagcaacagcagattattcttctttgtttctgttctttcttcatcagccgattcagctttgtccatggccaccgaaccaaaagcagccgccgatgacgtcaagatcgatctcgtcgaagacgacgacgagttcgaagagttcgaaatcaatgaagagtgggatgacaaggaagaagggaaggaagtgaggcaacagtgggaggatgattggggatgatgatgatgtgagtgatgatttttc

SEQ ID NO: 1082 - DNA, 63 bp, Glycine max
aatgcttttttcctataaaaaaaaaagggaactactaaatgcacttcgattggatttttctac

SEQ ID NO: 1083 - DNA, 370 bp, Glycine max
ggctcttggctgatatttcctgataagtggacagacgcttaaacagagaaactaacacagatttgcatgcatggggaaaataacgcacattgtagtaattcccagtgcagggtacagccacttcgttcccgttatccacttctcaaagagacttgttgagcttcacccagaaattcacgtcacatgcatcattcccattctggggtctctcccaagtgctgcaaaacccattctccaaacccttccacaaaacatcaacacggttttccttccaccggtgaaccctaatgacctaccacaaggtgttcccgtagttgtccaaattcagctagcaatggctcactccatgccctccatccaccaaaccctc

SEQ ID NO: 1084 - DNA, 279 bp, Glycine max
tgaagccgaagatgagggtgaggatggtgaggacggtgaagaagaacaagctgtgattggattatggagtggcattgcttggttggtagggatgactgtgttcagtgctgtgttgtctgaatatgcggtggatagaggtgaggatgcatcagattcgtgcggtttgtctgtgagctttctcagcataagcgtgctagcaatagttgggaatgcagctgggcatgcaggagcaatcatatttgcgtgcaggaacaagctggacatttcagtgggtgttgc

SEQ ID NO: 1085 - DNA, 328 bp, Glycine max
aatgagggttgtccctcacgtggaaaaaaaaaaaagagaggagggaaaaaaaaagcggcccacgcgtccgcccacgcgtccggagacacaaaacaagcccgctgcattgctccacaaatctgtgatgaagaaggagttcaggaggatgggaaaagctgttgaaaagcagggggccaaaaattactacaggcctgatcgcaagaaggctgcccttgcaaggttgagtggtgttcagaggaagcctcaaagtgtccaaggtctggggtcaggaacaggaatagacagggcgtgagagtcgcggggagagagtgaaagggaattgagaaag

SEQ ID NO: 1086 - DNA, 255 bp, Glycine max
ggattagggtttgtcattagcacttcgtcttttcacactgccgctgcaacaatggcttcagggaagaaactttcgaacccaatgagggagagaaaagtgcagaagctcgttctcaatatctctgttcgcgagagtggagatggtctcaccagagccgccaaagtgttgggacaacttagtatggaaaccccagtgttgtccaaaggaggaggcactgttcgttcctttgcgattagggggaatgggaagattgca

SEQ ID NO: 1087 - DNA, 323 bp, Glycine max
gggagtcctctggtttattctgaggcctgtgctgtgctctgaggggccatagtttgggaccctttgaaccctaatctccacccaaacccattttcccgggaaattgccttggaaaagaaagagcgaagaggaaaatgcagaatcacaggctgaagcagcagcagcagcagcaacaacaagctcttatgcagcaagctcttctccaacaacagtctctctaccaccctggcctccttgctcctcctcagatcgaaccatatccaagtggaaatttgccccctggttttgattccagtacttgccgcaatgtgtatgttgggaac

SEQ ID NO: 1088 - DNA, 348 bp, Glycine max
  modified_base (249)..(249): a, c, g, t, unknown, or other
gatttgcgctaacaacaactaacgtgcaagttccaaggcggagaaaacaataatggccaccaacgaggagagggatatggagaacaagaagagtgaggaagaactgaagcatctcgggtttgtgaagattgcggcaatgaaagccttagtgtgtgtgtcgaatctctacggcttcgcaaagcaaaactcgggacttttgagatctgctgttggaaccgtggaagacactgtaaccaccgttctgggtcncgtctaccacaaattcaacgctgttcccaaccacatcctcctttttgtcgacaacaaggtggatgaagctgctcacaaattcgatgagcatgcaccttc

SEQ ID NO: 1089 - DNA, 61 bp, Glycine max
gcaattaagatcgcagagagagatggggagtgacagcgaggcagagaaggagaagaagaag

SEQ ID NO: 1090 - DNA, 283 bp, Glycine max
  modified_base (238)..(238): a, c, g, t, unknown, or other
gattgagcaaacaaaaagaatctttgggagatcggagaggtcatcgtcgtcatttctgcgctcgagattaacataaggaacaacagtgagcagggtattgtagctgaacgatatggagagaagcactccggtgaggaagccacacacgtcaagtggagatctgcttacgtggcctgaaagacgaagttctcagtccccaacgcatcggtcctccgccgttcgttcccaccaggcgtcngatgagatcaggaaggtggtatttgggggtcaggccaccgatgaa

SEQ ID NO: 1091 - DNA, 278 bp, Glycine max
gtctcttttccctttctttcattgtttgttttgtttgcactctcctctccccttaacagtaactcaacaatcaagaggatcagatccataggagaagttttatctgtccatcacgaaaaccgcgactactgatcagtcaatcccatcaatcaaaggaaatcatcagaaagggaggaaaggaaagaagagaagaaggggaagagggaatcaacaggaagaggaacaggaggagtatcaaacatgtcctcctcagggaggtccgtttcggcggaccaaca

SEQ ID NO: 1092 - DNA, 153 bp, Glycine max
gacagcactgcactcttcgcaacacaagagaggaagacaacccatagagcgcgtcttaataaacgcgcgtcgctgaaaacccgcatttcgtttcgtcgtgcgtcgtcgcgttcacatcttcgatggtcgatcgtcgtcgcggaaggggagaga

SEQ ID NO: 1093 - DNA, 201 bp, Glycine max
ggtgtctgctcactcgctcttctccgccacttctgaatctattggatcaacaatcatgtcggacgaagagcaccatttcgagtccaaggccgacgccggagcctccaaaacctaccctcagcaagccggtaccatccgcaagaacggctacatcgtcatcaaaggccggggctggcagagttgtggaagtttcgacgtcca

SEQ ID NO: 1094 - DNA, 305 bp, Glycine max
tgtaaaaaaaaaaaaaaaaaaaaaaaaaaaaaaaaaaaaaataaaaaaaaaaaaaaaaaaaaaaataataaaaaaaaaaaaaaattaaaaaaaaaaaaaaaaaaaaaaaaaaaaaaccggccgcccaaaaggttcaagccttacttacccttgcatgcaacttcaaaccccttcaaaattgtcaccaaatttaaattcacgggccttcttttaaaaacttcttgacgggaaaaaccctggctttaccaaattaaaccgctttgcacaaaatccccttttcccaaacgggcttaataccaaaaagg

SEQ ID NO: 1095 - DNA, 329 bp, Glycine max
  modified_base (200)..(200): a, c, g, t, unknown, or other
aagctcggtatgaaatattaaggtcctgcttacaggaaatgatgcgtacagggatattgactagtttacaggattgtaagaacgccatgcttcctcattacgctagtgcgaaagataggttgaacactctagattttcatgaggacgcgacattcatgcaactgtgcaaacaactacttgagactgcagaggcatgtganggaatgggtggaaggtcgttgagagagcttccagttttgggagatgctgcgcttgcaaatccgtttgaatgcaagcctattaagttcttaggttcaagggtagaaacagcaaacgaggagcgttctgag

SEQ ID NO: 1096 - DNA, 344 bp, Glycine max
gatttgcgtgttttcatcattgtcgttctgaacggaaaagcactggcgcagctaccctgaggcttctcttctcttctcttctctgtcgtgagtcaccatggtgagggttagtgtgctgaacgatgctctgaagagcatgtacaatgctgagaaaaggggaaagcgccaagtcatgattaggccatcctccaaagtcattatcaaattccttttggtgatgcaaaagcacggatacatcggagagtttgagtatgttgatgaccacagggctggtaaaatcgtggttgaattgaacggtagactgaacaagtgtggggttattagtccccgttctgatgtgggcg

SEQ ID NO: 1097 - DNA, 343 bp, Glycine max
gaccgcattagcactcgtctttggttctggtttatagatctctgtgaagtcgctttataacactcaacctaagatgcagaacgaggaaggacagatcaccgagctttacattcctaggaagtgctctgccacaaaccgattgattaccgctaaggaccatgcttcggttcaggttaacattgggcatgtggatgagaatggcgtctacaatggccatttctccacttttgctctctgcggcttcatacgtgctcagggtgatgctgacagtgccctagatcgcttgtggcagaagaagaaagttgaagttaagcaacagtagacacccatgatagtttgttac

SEQ ID NO: 1098 - DNA, 373 bp, Glycine max
  modified_base (324)..(324): a, c, g, t, unknown, or other
ggcgcctgatttctcagttctctcacacactcattcggtgctccgaatctcagattctagggttagggttcccaatttctccaccgatcagaaaatgagttcaactggtggttctaccaagggcggaaggggcaagcccaaagcctccaaatccgtttcaagatcgcagaaagctggtctccaattccccgttggaagaatcgctcgattccttaaggctgggaaatacgccgagcgtgttggtgctggtgctcctgtgtacctctctgcagtgctcgaatatctcgctgctgaggttttggaattggctgggaatgctgctanggataacaagaagaatcgtattgttcctaagcacattcagcttgctgtg

SEQ ID NO: 1099 - DNA, 120 bp, Glycine max
cacaacctcctacaatgtatatatcatgccccacaccactcaaatggggtcatcaatcatgcactttcctccctaactttgcaggtacatgcagacaaactatggagtcttattcttaaa

SEQ ID NO: 1100 - DNA, 147 bp, Glycine max
gagttctactccatcgtcactccgtcttcgctgtttatgtgtatctcacgtgcatcgagcaaggacgtcaaagggacctcatcgagatctacttaaaggctacattccgtgtagacaccttgtctaaatccagtccatatccaaaca

SEQ ID NO: 1101 - DNA, 138 bp, Glycine max
ggtgtgtagtataggattctcttctttattccttttgtaatttcattcagtcttaatctttgtgaaaaataatgttcatcgagaattttaaggttgagtgtcctaatgtgaagtagaccgagactgagattcagtccg

SEQ ID NO: 1102 - DNA, 359 bp, Glycine max
gacatatgcagtgtggggaaggagtaaacaaacgttggagtcagaaatgaaagagcaaaggaaaaaccatgctgctcactgtcttgtcctaccttatccagcccaaggacacatcaatcctatgcttcagttctccaagcgtttggtgcagagaggagtgaaggtaacacttgtaactgttgtgtccaattggaagaacatgagaaagagaaacttcacttccagtggggttgagagcatctcagatggctatgatgatggaaggcttgcagcagcagagagtcgtgaggcttacatagagaccttttggagggttggatcacaaacttttgctgagcttgttcagaagcttgcagggt

SEQ ID NO: 1103 - DNA, 75 bp, Glycine max
gccggtttcccgaacgatttgatggtttggaatgcatttcccaagcaacgagtcttcggttcgaaaccagcagag

SEQ ID NO: 1104 - DNA, 142 bp, Glycine max
gacagcgaaacagagagtgatttcagtgagtgatcggtgttcacgtgatctcatcataagcgtcagcgtcaattgaagaagatgccgatcagaaagatcggcgtcggaaggcctgaagaagggactcaacccgacacgttga

SEQ ID NO: 1105 - DNA, 347 bp, Glycine max
gacaacacaacgcaacacaacgcgcactctctcttttctctcctaacacaaaaaccctatcgttcttcgcggtttcgccgattctcgccatgccgaaagccaaatccgacgccaaagccgccgatagccggttgaagcgcaagggcgctggtgctggaaggaagcaatcgaagaaagctgctaaggatcctaacaagccaaagagacctccaagcgctttcttcgttttcatgtccgagttcagagagcagtttaagaaggagcatcctaacaacaaatccgtcgctgttgtcggtaaagctggtggtgacaaatggaaatcgctgtctgatgctgaaaaagccccc

SEQ ID NO: 1106 - DNA, 182 bp, Glycine max
gatagtttcttcattttggttccgtccgttggtttgctcaatcaatcacttttcaatttcttcacgttcctaacacatagaatatctatcgtatgaaccaggactgtctgaagtacacacgcgataaggtcagtcattaccagcacggcagggacggcattcattatcacgcaaggaagact

SEQ ID NO: 1107 - DNA, 378 bp, Glycine max
  modified_base (290)..(290): a, c, g, t, unknown, or other
gaaaaacagagcataggaaatagctttcctcggttataaccttcaaggtggaaagaaaaacccacccactatcccaattccaataaataccttcctctctatattttcgcacaataccctctcacccttcaacgatgagttactacaatcagcagcaaccacccgtcggtgttcctcctccccaaggttacccaccgccggattcttacggaaaggacgcgtaccctccgccagggtacccgccgcaaggaggataccctccgcaagcgtatccagcacaagggtacccntcaccctacgcgcctcctcagtacgctcagcctccgccgcaacaacaccagaattcatctggcccaagttgcttagaaggatgtttgg

SEQ ID NO: 1108 - DNA, 376 bp, Glycine max
gattgtggtgaatgtttgagtgcagaaggtaaaaaagaaaatggtggtgaagattcgattggcaaggctcgggtgccggaaccacccattctatcgtgtggttgttacggatagcaaaacaacaagagatggcaagcaacttgaagttttaggtttctacaatcccgtcgcaggcaaggatgatgacaaaagaatgagcctcaaactggagagaatcaagtattggctttccgttggagctaagccttcagagcctgttgagcatcttctatttagagcaggtttaggacaatctcatcaattccctgttgctgctctaaatggacatatcctcaaccaagaccaaccaaccattgctgctgatcacaatggtata

SEQ ID NO: 1109 - DNA, 365 bp, Glycine max
gatgccgaaaagtagtaccaagatggcttcagttgtgtatctcctctttggcttccatctcattgttatcatgtcaagttccttacccgcaactagtgaagtgtttgcaaaacagtatccatccacagaacccgtggaagaaaaactcacccaactccacttctatttccataacaacataacgggggaacacccaactgctatgaaaactgttttgcctcctaaggggtccattcatggttttggggctacttacatgatggatgaccctctaactgaaggaccaagtccaacttcaaagcttgtgggaagatctcaaggaatatacgctttggcttcacaacatgagcctgggttgctcatgg

SEQ ID NO: 1110 - DNA, 350 bp, Glycine max
gggctttcccttcatacaaaacctacaaggcacggacttgagatttctaagaccctctctctctcgtacttcatcggaaccgaaacccttcgccgcaaaaaatgcctcccaaatctgccaaatccaaggaagctccagctgagcgacccatcctcggtcgattctcttctcacctcaaaattggcattgttggcttgccaaatgttggaaagtctactctctttaatactctcaccaagttggcaatacctgctgagaacttccccttttgcaccattgagcctaatgaggcacgggtcaatgtacccgatgaacggttcgagtggctttgccaattattcaagccaaaa

SEQ ID NO: 1111 - DNA, 345 bp, Glycine max
aggggagtctgaggcgatcgtgaagaaatggagaaggcggtgagagcgtatgcggaggttctgagattggtgaggctcttaccaaaggacagcagggcttattatgccaagtacgcccgcgagaacttcgtcaattaccgtgatgtcgttgatccttctgatttcgatgacctctttcaacgcagctagactcattctctatgggtccgtcataagtattccattgataaatctgctgcggataagctcagagggatatgctgcacttgatgcaatttcaattgccacccaagtgtttgttcgtagttcgcactcattcacacccttccttgcatgcgtgagatg

SEQ ID NO: 1112 - DNA, 210 bp, Glycine max
ggcttcttcaaccttttaagggtaaaagttgagacgattcctatttcataacggaagaagatcttgccagtctcagaaacagaggcgagtgagggtatcagaattggagaagagaggggtagaagcaaaaattatataagcttttgtgctatcaaatagcaagaactagagcgcatagagggttttgcagttttgtgtcatgatgatgga

SEQ ID NO: 1113 - DNA, 281 bp, Glycine max
gagatctgtatcgtattattaagcacaaccaagcaagggtgcaaggtgggggtgttttttttttttttttttgctggatgagtcgtagctgacactcgcttatggcgtctgaaacggcgtcgtcggcggatgaagaaaccgctgttgttgttgtttcaactgcgggtgcaggaggggactgataagagaggcaagcaccggattcttgccgaattgaagcgtctcgagcaggactccatgtttcttcaggaaaaattgggagagcttgagaaaacagaaaa

SEQ ID NO: 1114 - DNA, 308 bp, Glycine max
ggaacggaaaagcactggcgcagctaccctgaggcttctcttctcttctcttctctgtcgtgagtcaccatggtgagggttagtgtgctgaacgatgctctgaagagcatgtacaatgctgagaaaaggggaaagcgccaagtcatgattaggccatcctccagagtcattagcaaagtccttttggtgatgcaaaagcacggatagagtcgggagtttgagtatgttgatgggcacagggctggtaaaatcgtggttggattgaacggtagactgaacaagtgtgggggtattagtcggcgttttga

SEQ ID NO: 1115 - DNA, 183 bp, Glycine max
gagtgcagcatcgtagagaaataagggaaaaatggtgtcgctgaaactgcagaagcgcctctccgcaagcgtgctcaagtgctggagaggaaacgtttggcttgaccccaatggagtcaacgaaatctccatggccaattctcggcaaaacatcaggaagttggttaaggatgggtttagcat

SEQ ID NO: 1116 - DNA, 54 bp, Glycine max
ggctgcgagcgaatccctctctctcgttctctttcgctctcatccagatcttgc

SEQ ID NO: 1117 - DNA, 371 bp, Glycine max
gactgcaactttgctctctgtgaggcttcaatttctaattagggtttcgcttagagtaaccaataaccatgggagtcttcacccttgtcgtccgcaaatccggcagcgaatggagcgccaagcaacattccggcgacatcgaggcctccgccgattccaccttcgatctccaacggaagctcgtgcaagccgctctcgccgttgattcctccggtggagttcagtcctctttctctcccgtgtctcctacctccgctgtgttccaggtgatagtgggtggtgcagtattcgttggaggtggtggtgctgttgcagctgcacctgcaggtggtgctgccgcagctgatgctgccccagctgctgagaaaaag

SEQ ID NO: 1118 - DNA, 228 bp, Glycine max
gcttgttggagatgcacctgcatagtctagtgcttaattaggttgctgaagagtgaagaatgagacagcctggttcgaaggggaaaagcctaaggatatagcaaaggatcctatatgtataagataaatgttgcttttttaccttcggtagtgatatctgaagtcgagtttggcagcctatatatgaatatatgatctatgtgggtctttagtggagaaggggggggg

SEQ ID NO: 1119 - DNA, 321 bp, Glycine max
cggtttcaaggtccgtcaaggccggtctccaattccccgtcggaagaattggccgttatttgaagaaaggaaggtacgcccagcgtgtcggtaccggtgctcccgtttacttggccgcagttctcgagtacctagctgctgaggtgcttgagttggctgggaatgctgcacgtgacaacaagaagaacaggattattccgagacatgtgctattggctgtgaggaacgatgaggagttggggaaattgcttgctggtgtcaccattgctcatggtggtgttcttccgaacattaaccctgttttgttgcctaagaagactg

SEQ ID NO: 1120 - DNA, 314 bp, Glycine max
ggttctagtgtgtgattgtttgttgttgtaactcgttcttcttcttttgttgttctgtgtttgtgtttgttttttctctcacctgaaaatgtcttgctgcggtggtaactgtggttgcggaagctcctgcaagtgcggcaacggctgcggaggctgcaagatgtacccagacttgagctacactgagtcaaccaccaccgagaccttggtcatgggagtggcacctgttaaggctcaatttgagggtgctgaaatgggtgtgcccgctgagaacgatggctgcaaatgtggaccaaactgctcctgaaaccctg

SEQ ID NO: 1121 - DNA, 375 bp, Glycine max
gatgaatagtactagtacattttgaaaatagaagtaaatgatgaatcccttgagtttgtgatatatagagagagagagttatgagcatgtatagctatagttgtatctccacaagcacaatgattcgtcggttatggtgtttacagagcggctctccctccgtgcccccctcgagcaccaagaagaagaagccccttgtcttgttgggcgcacctcatgtctccgccatcgtccttgaagcccttctgaacgctcctacttgtccagattcttcatttgaggttgcggctattgtgactcaacctgctgccagaagggacagggggaagaagctctctctctctccctttggcctctcatgctcttcagaggggc

SEQ ID NO: 1122 - DNA, 60 bp, Glycine max
ctttggaagggcacttcaacagagcacccttaaggcatggagtggaaaaaaagaaggagg

SEQ ID NO: 1123 - DNA, 279 bp, Glycine max
gaggccctacctttgtgtccgctactctctctaccccttccttttttctcacccttttgaaatttgagcagtagcactgttgcgacacaacaacatcatgaacatgaacatgaacatgaacatgaacactaagagcaggttgatcaccctttgggttgtgctctatttttggtccagcacagactcactagctgcttcaaagcagtgccatttccctggcagcttcaacgtgtggtgactccaattcagacactgggggtcgctctggtgcctttggac

SEQ ID NO: 1124 - DNA, 356 bp, Glycine max
ggtcttgcaggcgaagagatggccaccgttccagggcagctcgtgtgggagatcgtcaagaaaaacaattccttcttgggcaagcagtttggaaggggcacccagagcgtcgaattcagcagagagagcaacaatctctacaacctcaattcgttcaagtactctggtttggcaaacacgagaactgttactgttcagcctgagggcaaagatcaggctgtgttgttgggtacaaccaagacaaagaagcagaacgagcccgctgcattgctccacagatctgtggataacaaggagttcaggaggatgggaggagctgttgaaaaccaggtggccaaaaattactacagggctga

SEQ ID NO: 1125 - DNA, 359 bp, Glycine max
ggcagtttcaaattttcttttccttcactttcccgagaaaaaaataacacttttcactttcttcactacgttctcacttcgatatggctcgtacgaagcaaaccgctcgcaagtccaccggtggcaaggcgccacgtaagcagctcgccaccaaggccgctcggaagtccgctccggcgaccggaggagtgaagaagccccaccgcttcaggccgggaaccgtggcgctgagggaaatcagaaagtaccagaagagcaccgagcttctcatcaggaagcttccatttcagaggctcgtgagagaaatcgcgcaggatttcaagaccgatttgcgtttccagagcagcgctgtttccgcg

SEQ ID NO: 1126 - DNA, 413 bp, Glycine max
gcaagttgatgggtagaaacagcggatttattgcaatgtatgctacacttgcaagtcgagacgtggactgttgcttaattccagagtcacccttttaccttgaaggtcctggtggactctatgaatatatagagaaaagactcagagaaaatgggcacatggttatcgtcattgctgaaggagcaggacaagaacttgtttctgagagcgtgcagtcaatgagcagacagggtgcttctggaaataagctttttcgggatgttggcctatggatatcccaagggattagggatcattttgctgcacagaagaggctgccgagaactctcagatacgaagagtgaacttagatgattcgagctagtccaagcaatgcttctgacagggtgtgctgcacaggtcttgctcaaagt

SEQ ID NO: 1127 - DNA, 364 bp, Glycine max
  modified_base (303)..(303): a, c, g, t, unknown, or other
gacctaaaaattgtaccgatatggcttcacttgtgtgtctccttttttccttgcatttcatggttatcatgtcaggttccttaccagcaaatagtgaagtgtttacaaaagagtctcctatgtctctatccacaaaacccgtggaaagactcacccaactccacttttatttccataacaacaaaatgggggaacacccgactgctatgaaaattgttgagcctcctaaggcgtccatttctggttttgggactatttacatgatggatgaccctctaaccgaaggaccaagttcaacttcanagcttgttggaagatgtcagggaatatatgctgaggcttcgcaacatgaacctgcgatact

SEQ ID NO: 1128 - DNA, 122 bp, Glycine max
agctagttacactctgtctgtttccattggcattgtagttgtacactctgcttggaaacttgggtgcatttcccagtaggaaattttatatttttccttccttgtgtaatttgtaatcgtag

SEQ ID NO: 1129 - DNA, 356 bp, Glycine max
gagagaaccttcagaaaccctaatttctcaaaatcttcagaggacacacagcacaaccaacacctccacagcctctcctacctcccggagccatggccgccgccgactcctccgccgctccatcgcaccagttgtcgcagagggagacggacatccagatgatgctcgccgccgacgttcacctcggcaccaaaaactgcgactttcagatggaacgctacgtcttcaagcgcagaaccgatggtatttacataattaaccttggcaagacatgggagaagctccagctcgctgctaggattattgttgccattgagaacccacaggatatcattgttcagtctgccaggccttat

SEQ ID NO: 1130 - DNA, 382 bp, Glycine max
ggcagcgccccaagttccaggtttcagcgagcattctacaatggctactataccagttaatcccaagcctttcttgaacaatttgactgggaagcctgtaattgtgaaactgaagtggggaatggagtacaagggctatctcgtttccgttgattcctatatgaacttgcagctggccaacaccgaggagtacattgagggacaatttactggaaatttgggagagattttaatcagatgtaacaatgttctctaccttcgaggagtaccggaggatgaggaaatcgaagatgctgctgaagactagagagtgatagaagctgctaatggctatgacataaacagaactcgaatttctactggttttgtatcctcacataaa

SEQ ID NO: 1131 - DNA, 374 bp, Glycine max
gaaggaacggagggaagaatataatgggatctggaagtggaaaacacactggagagttcttcaggagaagggatgcatggaggaagcatccgatgctcaccaatcagctccgccacgccacccctggccttgggatcgccgtcgtcgccttcgattgattgctcttgcaggtgaaagccggggatcaccactaaacgtttggacggacgcactccattccatcatcacttaataagcttgctagcatgttctcgcagcctttaatgtttaaatttcagaccgtgttcgcttctttggcactcactatgttgtcgtgtatgcctacattttatgccttcaatttgcattcacaatgaaactcaatttacgttaat

SEQ ID NO: 1132 - DNA, 351 bp, Glycine max
cgagcaattttaaaaataagaaaataaaaaacacactaaaaaaattcatcaagaaaaaggatacaaaaaaagaaacataaaaaacacaacaaaaaaactaaaaaaaacaaaacctaaacataaaaaacgcggccgcccaaagggttccaacttaacttacccgtgaatgcaagttataaccccttcaaaagtgtccccaaatttcatttcacgggccttcttttaaaaacttcttaacgggaaaaccccggctttaacccatctaattccccttgcagaaaatccccttttcccaactgggtttattaccaaaaaggcccgcaccgttcgcctttccaaaaatttgcccac

SEQ ID NO: 1133 - DNA, 377 bp, Glycine max
gatagcattttcagaggaaaatggcgggtacggtttcgacttgtttcttcttcgtgtttcttctttctctccttcttccttttcagatgtccgctgaggaatcctcggagaaggagttcgtactcacattggatcactctaactttcacgacactgtcagcaagcacgatttcatcgtcgtcgagttctacgcaccatggtgtggtcactgcaagaagcttgctccggagtatgagaaagctgcttctatcttgagtagtcatgatcctcctattgttttggctaaagtagatgccaatgatgagaagaacatggaccttgcatcacaatatgatgttaaaggattcccaacaattaatattctgacaaatggggga

SEQ ID NO: 1134 - DNA, 341 bp, Glycine max
ggaagtaagggatcgagcctcggaggagggaatcgcagcgaagtccactatgccgaagcaaattcacgagattaaggacttcctcctcactgctaggaggaaggatgcacgctctgtgaaaatcaagcggagcaaggatgtggtgaagttcaaggtccgttgctccaagtacctttacaccctctgtgtgtttgattctgagaaggctgataagttgaagcaatcacttcctccaggtttaagcgtgcaggatgtgtgattcttactgctgtatgaagatcaggtttttctctggattttggggattcatagttagtaaaatggttcagagaattttcgta

SEQ ID NO: 1135 - DNA, 369 bp, Glycine max
gcaatccgacccgaatacttcactctcagtcccaggatccgaatactaccaccgcggatcctcatgttctgcttcagaacctttccctggttcggaccagaatggattctctacaacacttcctatctcaatccatcaacaccaacactcccctcgccgtcgatcaaatcgccatggtctccagccagatcgtctcctccatccatcaattgatcgtcaacggctcagctctcgtctcttactctcaaaattccaccgccgcctccggagcaccggatccaccgttgtatccgaagaagccggagccggaaccttcagtcgccgataaagcgaagcaaatactcgattccaaatttgggcctctcgaag

SEQ ID NO: 1136 - DNA, 349 bp, Glycine max
gactccgcagctgcagcactcaaaaccctagagaggacgagagagcgtgcaactttcggcaaccacagaccatgacattcaagcgcaggaatggaggtcgcaacaaacacggccgcggccatgtcaaattcatccgatgctccaactgcggaaaatgctgccccaaggacaaggccatcaagaggtttttggttaggaacattgttgaacaggctgcagtcagagatgtgcaggaagcttgtgtctatgaacaatatacacttccaaaactctatgtgaagatgcagtactgtgtttcctgtgctatccactctcatgttgtgagggttcgatcccgcaccgacaggag

SEQ ID NO: 1137 - DNA, 383 bp, Glycine max
atgggatttccagacgcggcggcttcttcttccgtttttgtctatcggcgtgaacaatggcgacttacgctgcgatgaagcccacaaagcccggcttggaggagccccaggagcagatccacaagataaggatcaccctttcctccaagcacgtcaaaaacctcgagaaggtttgtgcggacttggttcgcggtgcaaaggacaagcgcctcagggttaagggacctgtcaggatgcccactaaggttcttctcatcactaccaggaagtccccttgtggtgaaggtaccaacacatgggacagatttgaacttcgtgtgcacaagagagtgattgacctctacagttccccagatgtagttaagcagattacctctatcacg

SEQ ID NO: 1138 - DNA, 402 bp, Glycine max
  modified_base (325)..(325): a, c, g, t, unknown, or other
  modified_base (365)..(365): a, c, g, t, unknown, or other
ggatatgaacggtgaaccggatcccccttcgaagtgaattatattgcagcgaatcacacacactctgaacaacgcccaccatgcaggccagtgataggtttaacatcaattctcagctcgagcatctccaagccaaatatgttggaactggccatgctgatttgaacagatttgagtgggcagtgaacattcaacgtgatagctatgcatcatatattgggcactaccctttactgggattctttgctattgctgaaaatgaatctattggaagagaacgctacagctttatgcagaaaatgctcctgccttgtggtttgcctcncgaaagagaagaagattaagaattgccatctggattgcanatggatcacacagtacagttaatatagcctatgacag

SEQ ID NO: 1139 - DNA, 436 bp, Glycine max
gtcaaaacggtggcaaaagacaaccgaaaggggatacgggttgagaacctgattaccattctaggtgagttacattgcagcgaatcacacacactctgaacaacggccaccatgcaggataatgataagtttaacatcaattctcagctcgagcatctctaagccagttatgttggaactggccatgctgatttgaacagatttgagtgagcagtaaacattcaacgtgatagctatgcatcatatagtgggcaataccctttactgggattcgttgctaatgctgaaaatgaatctaatggaagataacgctacagctttatgcagaaaatgcacctgccttgtggtttgcctcgcgaatgagaagaagagtaagaattgccatctcgattgcatatggattacacagtacagttaatatagcctaggacagttt

SEQ ID NO: 1140 - DNA, 360 bp, Glycine max
  modified_base (8)..(8): a, c, g, t, unknown, or other
ggaccganacagagagtgctatcagtgattgatctgtattcacttgatctcatcacaagcgtcagcgtcgattgaagaagatgtcgatcagaaccatctccgtcggcatgcctgaataagccactcagaccgatacgttgaaggccgccttgacttaattcaactcatcattcatctgcatgttcgccggcgcacgcgccggcatcacctacaacaagctcaccgaggacggcgctgccatgcctgccggatttagcactgcatctatcacacatgcattcgccctcttcgtctccgtctccgtcggcgccaatatcgccggcagctacatcaagccctccgtcaccgtccgcgccttcg

SEQ ID NO: 1141 - DNA, 316 bp, Glycine max
gggggatgcaagcagagaatgctatgagtgattgatccgtattcaggtgatcccatgatatgcgtgaccatcgattaacaacgacgtggctcataaagatgtcagtcggcttgccaggataagcaagtcaaatcgatacgtggaatgtcgccttgactgaatgcatctcatcattcatctacaggttggtgggtgctagtgcatgcaatgactatctacggattactgagtctgtctctacccatcctgtgtgttttggtactcagttcacagcacatgaatgcgctggcaatctagctgcatctgcaagaacaaa

SEQ ID NO: 1142 - DNA, 282 bp, Glycine max
gagcaacatggtgaagctggtggagagatttacttgccagaagcttacgttagaaccaagaggactacttaatggagcaaatcagttggaagaacttgtagctagcttcccaactggcttatctgagtgtggagaagcattatcaagccttaggagtaggagaacgagtactgtttgtgatgaatgtctatggtttaagaaatctgtctttagtcaacttgtgtgttttgttattcagttctcagcaataaactgctctggcaatctagtttcatgttcaat

SEQ ID NO: 1143 - DNA, 364 bp, Glycine max; identical to SEQ ID NO: 686

SEQ ID NO: 1144 - DNA, 385 bp, Glycine max
gactctcatcacattattctatatcaattttggttaagagtcttgaaaaagcaagagaaaaaaaaataccaaccatggcaaccatttctgatcaacctagagggtcctactcctatggaacctcatatggagcaccctatggaaccacgtatgagaccaacaccagcattaacaacccaccttcacgccaaacagtgaagttcataactgctgccactattggcatcacactcttgctcctgtctgggttgaccctcacaggcactgtcataggtttgatcattgcaacccctcttcttgttatcttcagccccatccttgtccctgctgcgtttgtgctgttcctagttgcttctggctttttgttctctgggggctgtggtgt

SEQ ID NO: 1145 - DNA, 396 bp, Glycine max
ggcagttcaattccaatatattccattctctctgtgtatttccctacctctcccttcaagatgcagatcttcgtcaagaccctcaccggcaagaccttcacccttgaggtggaaagctctgacaccatcgacaacgtcaaggccaagatccaggacaaggaaggaatccccccggaccagcaacgtctcattttcgccggaaagcaacttgaggacggccgtacccttgctgactacaacattcagaaggagagtactcttcacctcgtcctccgtctccgtggtggcatgcagatcttcgttaagacactcaccggcaagaccataaccctagaggttgaaagctccgacaccatcgataacgtcaaggccaagatccaggacaaggagggtatc

SEQ ID NO: 1146 - DNA, 379 bp, Glycine max
gaataagatttgtgagagaaagggagaaagggtgtgagaatggagagcaaagaggaagatgtaagggttggagcaactaagttctcagaaaggcaaccaattggtacagcagctcagggtgacaaggactacaaagaaccacccccagcacctttgtttgagcctggtgagctaaagtcatggtccttctacagagctggaattgctgagtttgtggccactttcttgttcctctacattaccatcttaactgtcatgggtgtcaacaggtcaccctccaagtgtgcctctgttggcattcaaggcattgcttgggcctttggtggcatgatctttgcccttgtctactgcactgctggaatttcaaggggacacatca

SEQ ID NO: 1147 - DNA, 402 bp, Glycine max
gaccgtaatccttacgctctctcactcacaaacgcacactgaattcaaaaacatcgaaagagagaggcatggccgagcaaaccttcatcatgatcaagccagatggcgttcaaagaggccttattggcgagattattagcagatttgagaggaagggtttttacttgaaagggttgaaactcgttactgtggaccgtccttttgctgagaagcactatgctgatttgtctgcaaagcctttctttagtggtttggtggattacattgtctctggccctgttgttgccatgatctgggagggtaagaatgttgttacaactggccgaaagattatcggagccacaaacccagctcaatctgagcctggaactattcgtggtgactttgctattgacattggaa

SEQ ID NO: 1148 - DNA, 341 bp, Glycine max
gaagtgaatgggaaggaagttgtcatgtcaaatgtagaggagtatcttggagtgcttgatgtttagatacatcaagccagggacattcaaaacatttgcatataccacaagcatgatgtttatgctaagatttgtctgaccagtaatcctgagacaactgtgtctaccaaatccatcactggaggacgaaagaaccctgtgttcaacgagaatcttcgtattgatgttacgactgttgatgcttctctcaagtgttagatatggatgcctaccagggtgaagaactatcatgaatagcagttgcttggttgtgctttggtaaccttgtctgaagtactagt

SEQ ID NO: 1149 - DNA, 388 bp, Glycine max
gacatataacactgtcactcttacaatctcagctcatagcattcttcttcttccaacgagaatcagtctttgtgttccaaatggctcgtacgaagcaaacagcaagaaagtccaccggaggaaaagctccaaggaagcagctcgccaccaaggcagcacgtaagtccgctccggcgacgggcggcgtgaagaagccccaccgtttcaggccggggacagtggctctgagggagattcggaagtaccagaagagcacggagcttctcataaggaagcttcctttccagaggctcgtaagggaaatcgctcaggacttcaagaccgatctacgcttccagagcagtgctgtctccgctcttcaggaagccgctgaggcctacctcgttgg

SEQ ID NO: 1150 - DNA, 356 bp, Glycine max
ggcaacaaggcttaacctctctcattcccgatttcgtcacctccttcaaccgctgcgaaattctagggttccgaaatggacgctggcggaaagatcaagaagggcgccggaggtagaaagggcggcggcccagagaagaagccggtttcaaggtccgtcaaagccggtctccaattcgccgtcggaagaattggccgttatttgaagaaaggaaggtacgctcagcgtgtcggtaccggtgctcccgtatacttggctgcagttctcgaatacctagctgccgaggtgcttgagttggccgggaatgccgcacgtgacaacaggaagaacaggattattccaatacacgtgctttt

SEQ ID NO: 1151 - DNA, 190 bp, Glycine max
  modified_base (185)..(185): a, c, g, t, unknown, or other
  modified_base (187)..(189): a, c, g, t, unknown, or other
gaatagcacagttaccccttattgatctagaaatacaaactgaaaaggagattgaattgaggctgctgccctcacttgatacactgaaggtgaaagataagaaggatcgaggaaccttaacagtaaaggtcatgtattatcagtttaacaaggaagagcagctggttgcactagaggcgaaaaanannna

SEQ ID NO: 1152 - DNA, 373 bp, Glycine max
ggccgtcacacagagagagaagagacaatgaagtttaacccaagggtttcctcaagccgtcgaaagagccgcaaggctcacttcaccgctccgtcgagcgtgcgtcgcgtcctgatgagcgcgcctctctcgaccgatctccggtcgaagtacaacgtgcggtccattccggttcgcaaggacgacgaggtgcaggtggtgaggggaacctacaagggccgcgagggcaaagtggtccaggtctatcgccgcaagtgggtcatccacatcgagcgcatcacccgcgagaaggttaacggctccaccgtcaacgttggcattcacccttccaaggttgtcgtcaccaagcttcgaatggacaaggaccgcaaat

SEQ ID NO: 1153 - DNA, 385 bp, Glycine max
gactcgccgctttgtgctgctgttgcaacacttaaggctgggcctttttttgaggttttcagcgcttctttctcacaatggatcttcataatgatattgatttgctgaatcctccaactgagttggataagacaaagcagaaactcaagcgtcttgttcagtcaccaaactctttcttcatggatgttaaatgccatggatgcttcaacataacaactgtgtttagccactctcaaactgttatggagtgcggaaactgccagactgttttgtgccaaccaacagggggaccgactatgttaaccgatggttgctcatttaggaatatgggacattgactggtttgttaaccagacgttgccttgtcaaataattgacattttcg

SEQ ID NO: 1154 - DNA, 370 bp, Glycine max
ggtcaaacaatcaaacaaactcatttagcatagacagtgaagcaggctttctctagcagctagagatggcagagggaagagggtccactctcgtgcacctcttggtcgtggttctgtgcttggtcgctttcgggttcgccattgccgccgagagaagaagaagcgtcggaaccatgcacaaaattgaaggaacaaatgaaacattctgcagctatagttcagatgttgccactggttatggagtgggcgctttcctgtttcttctttctggtgaatcactgctaatgggagtgacaaagtgcatgtgctttgggaggcccttaacacctggggtaaatcgagcgtggtccattatatattttctttcttc

SEQ ID NO: 1155 - DNA, 106 bp, Glycine max
gaattggattgagtcttggtatggaaacttaccaagtgagaactttcaaattcagagaaaccctggaattcacaaagggcaatcctgagccaaatcctgttttcct

SEQ ID NO: 1156 - DNA, 59 bp, Glycine max
atagaactggccaggtaatgctgaaaatgaagagcagacatgttgcaggaaccattacc

SEQ ID NO: 1157 - DNA, 381 bp, Glycine max
ggctcttggctgatatttcctgataagtggacagacgcttaaacagagaaactaacacagatttgcatgcatggggaaaataacgcacattgtagtaattcccagtgcagggtacagccacttcgttcccgttatccacttctcaaagagacttgttgagcttcacccagaaattcacgtcacatgcatcattcccattctggggtctctcccaagtgctgcaaaacccattctccaaacccttccacaaaacatcaacacggttttccttccaccggtgaaccctaatgacctaccacaaggtgttcccgtagttgtccaaattcagctagcaatggctcactccatgccctccatccaccacaccctcaagtccataac

SEQ ID NO: 1158 - DNA, 379 bp, Glycine max
gaacgccaaactcaaagtggagaagaaacgtgaacacattcaccgttttttctatcttcttcttttaaattccttccttttcttttgattccgctcttctaatcgtcgttccaatttcacagttttctatacatctcccaaccattccatcgatgcttcaagttattacaggaataggttccttcgccatagcatatgcaactggaatgtgcttctgcttgactcgaaagaggtaggtggaagaaaagaaaagttaatatataacttcctaaaagcctgtaagagtttgaaacactgcagttttcgcctaagatttttctccattgtccatatggataattagaatttaatggataagaacttgggaccatgattgtga

SEQ ID NO: 1159 - DNA, 384 bp, Glycine max
gatctcaccatcactctcgctcttgcaattagtcctcttccaacaatccgcacctaaactctagggttctgacatggacactggtggaaagatcaagaagggcgccggaggaagaaagggcggcggcccaaagaagaagccggtttcaaggtccgtcaaggccggtctccaattccccgtcggaagaattggccgttatttgaagaaaggaaggtacgcccagcgtgtcggtaccggtgctcccgtttacttggccgcagttctcgagtacctagctgctgaggtgcttgagttggctgggaatgctgcacgtgacaacaagaagaacaggattattccgagacatgtgctattggctgtgaggaacgatgaggagttggggaa

SEQ ID NO: 1160 - DNA, 362 bp, Glycine max
gacggaaagcatgatataggagccaacattttttgtgctaagtgcaaaccacgccagaatttcattatttccattaactcccgattcggcttaaattggaacaccaccaattttcgtgggaaccaacaaaacaaaaaaagggtccaattttttgaaaattattaccatcattcatattcatcaacgacccctcttctgtgcccacttccaaatcttctcctctcgctatgggttgcggctcctcccttccagataggggctcaaggcagttgggtcgacccaattcagagaatggtggagggcaggacgccaagaatctgagggtcaagcttgttctcttaggtgattccggtgttggtaaa

SEQ ID NO: 1161 - DNA, 361 bp, Glycine max
ggtcgtcgtttatctctcctcgttcgcatcttcaccctttccctgtctctcagaaagatgaaggtggtcgctgcgtatctgctcgccgtcctcggtggcaacaacaccccctccaccgatgacatcaaggaaatcctcggctccgttggaatagaggcagatgaagataggattgaatcgttcttgtctgaagttaagggtaaggatatagttgagctaattgctgccggtaaggaaaagctggcctcggtgccttctggtggcggtggtgccgttgccgtcgccgctgctcctggtggaggtggcggtggtgctgctccggctgctgaggtaaagaaagatgaaaaggtggaggagaaag

SEQ ID NO: 1162 - DNA, 348 bp, Glycine max
gagggtttttgtcgtcgctactaagagttgctgcttcttcagccactccgcacctcgcagcctctgtgccctcaacaaccatggctgaaatcgaaactaccgttccagatcccacccaaatcgacgtcaaactcttcaatcgctggagcttcgaggatgttgaggttaatgatatgtctctggctgattacattggagtgtccccatcaaagcatgctacatatgttcctcacactgctggtaggtactcagtgaagaggttcaggaaagcgcagtgccccattgttgagaggctcaccaactctctgatgatgcacgggaagaacaatggaaagaagctcatggctg

SEQ ID NO: 1163 - DNA, 326 bp, Glycine max
cgggctcgtccgacagctgcgaaaggggtacagaaggggggtggagacaggggcaatgaatcatacccaaagtattcgggggcagcttcagattgcatccggattgtcgcctactcttattgttctcttcgcctcggatcagttctaggtcttctatctcagttcgacattgcagatgagcaaagatcttttctctgcgacatgcacatctctcttcagttctgagctctggactacatctctgatttaaatatcgttcatgcatacgtcctgcacacttacccgttccttcattgcggtgtcacaacgtgaatgttaatggctgc

SEQ ID NO: 1164 - DNA, 401 bp, Glycine max
ggtgtttgcattgcagagagagagagaatggcgaccacacccggtttgtgtggcagtgtgttgttgagcacctcgttcctgaggaagcaggcaatggcatcagtgaacatgagaatgctgaaggctaatgctggtgtttttggcttaaagggagggcgtggagggcgtgtgagtgcgatggcaagttacaatgtgaagctgataaccccagaaggagaacaagaatttgaatgcccagatgatgttttcattcttgaaaaggctgaggaatttggcattgaccttccctactcatgcaaggctggtgcttgctcttcctgtgccggcaaagttgtttctggcaaagtcgaccaatctgatggtagttaccttgatgatacccaaatcggtaacggatttgt

SEQ ID NO: 1165 - DNA, 373 bp, Glycine max
gggagttcatagttccaataccatatgtcaaacaagtaaagctgtcaaaagctggtgggaggcttgtaattgcctctgatggcatacgggatgctctatcatcagaaatggctgcaaaattttgccgtggtttgcctgctgaacttgctgctatgcaggttgtcaaggaagcactaagaacgagagggttaaaggacgatacaacttgcatagtagttgacattatcccacctgataatgaattgccaccaacacctccccccccaaaacggaacaagctgagagatcttctttccttcaggaagaggtcccgtgattctgccagtaagctgtcaaaaaagctttcagctataaatatagtggaagaactgtt

SEQ ID NO: 1166 - DNA, 364 bp, Glycine max
gatcgtacgatcgttaatttcctctctttgtttcgcagacctcaccaaccccttttagctcaccctctcactctcagccaccgcacgccgccgtctccggcagccactgtccgttttcacttgtaatttgtcaactcagcataaaaggggtgggttaggctttgcaaccattggaagttccaacaatggcaggcatagctatacttttagatctatggaggaaaaatcaaaacttgagctctggattgcactcctctcatgcttttcagtcttccagtgcctttttttctgcctctgctgcaactgctgctgcagcgtcttttgctgcagggactggttttgcctcaagggcattgtttgggtc

SEQ ID NO: 1167 - DNA, 372 bp, Glycine max
gacaccatccagtactcttcttttcagcacaacctcttcatctctcccaggctttcttttctttgcaacaacactaccaaaaatgtcaccagatttcacacttttgttctccccggaactcatgcagtcccctatcatcactttccaagccactttctgtgtccttctcttcaccctcatgttcacgccgttcttcactcctggtgggcttccttgggcctgggcccggcccagaaccatcatccctggcccagtaactgccctgctcggggtcttcacgggttccacacctcacagcgctttatccaaactggcccgcacttatcacgcggaaaagctcatggctttctccatcggtttaacccggttcgt

SEQ ID NO: 1168 - DNA, 252 bp, Glycine max
ggtaacagcctccgcattccaaacaactccattgtccgtctcatgcactgcatacgtagcatctgcattggcattcccctctactgaatgaagttgtggatcttccaaagtccactaatctactgctcctcgtgcgttacattgcgtacctgctgcatggaaccaagtctgtaccttagattcggttgtggaagccattccacaaattgatgtgatactcggcgtcactcacacggcctaacaatctgactc

SEQ ID NO: 1169 - DNA, 379 bp, Glycine max
gacgttcacattcaggaatcgttttcttcagaaaatttgccatcgttgagggaagcgcgagagccttcgttgttcaagatgagagctaagtggaagaagaagcgcatgaggaggttgaagaggaagcgccgaaagatgagacaaagatctaagtaggtgcttgaacaaggagtggagatgatgtgcttttccatctgctaccagcttcatgacattttatgctgtcatggctcttatgatgatcttgaggtctagtggcgaggggagcttccatcttgactttagtttagctttactggtctaaagattgctgttttagtgtgggttaagttatgatattgagagttttgtgttatctaattatgttctggtacgtttt

SEQ ID NO: 1170 - DNA, 354 bp, Glycine max
ggaacctttgcattctattcattcaagattcagcaagtgcgttttggaagcagagaccgaaatacttcgagatggcccgtacaaagcaaactgctcgtaagtcaactggaggaaaagctcccaggaagcagcttgcaaccaaggctgcacgtaagtctgcaccaacaactggtggtgtgaagaagcctcatcgttatcgccctggaactgttgctcttcgtgagattaggaaataccagaagagcactgagctcctaatcaggaagcttcctttccagaggttggttcgtgaaattgcccaggatttcaagactgatctgcgtttccagagccatgctgtgcttgcattgcaag

SEQ ID NO: 1171 - DNA, 349 bp, Glycine max
gcttgcttgggttaaaatatttagaaccctaagccactcaccgatagagaagccgccgccaccttcactagtcaccgtcgccgccgccgccgccttcaccagtcaccgtcgcattcctctttcagcaaaaccccttcttctcactcacactctcacacccatattctcaaacacacaaaataacaaacacaacacagcaccaacctcggtgataacaattcaaagaaacacagaaatacacagacacgaacaatggctggtcgattccgtgagctgatgaagaaatatggaaaagtcgcactcggcgttcacttgagcgtctccaccgcctccatcacgggtctctacg

SEQ ID NO: 1172 - DNA, 354 bp, Glycine max
ggactcggctaagctgaactgcgagaggagctgcgtccacagggaaacgcatagcatattcgtattccggggaagaaagaaagaaacatcatgtgttcttcggagacgatcaacatcgctgcgagtacacagaaacttgatgttgataatcgaattgctcttcgcttctactacagaattgccgataatatcctcaaacaggctgatatctttcgtgcagagacaaatatagttgatctgtatatcatgctcctaagattttccagtttggtctctgagacaatacctcgtcaccgagattatagatcatctcctcaaggcaagaaagaagctttgagaaagaaattgttacat

SEQ ID NO: 1173 - DNA, 400 bp, Glycine max
ggattctgattctgtccatccaaatcgtacaaatattcagtgaagatcaacctcaatggcatctcttggcgtgcgaccagttcttccccctccattaacttccatctccgacccacctcctcttttcgatggcaccaccaggttgtacatcagttattcttgcccctatgcacaacgtgtgtggatcgctatgaactacaaggggctacaagataagatcaatttggtccctatgaaccttcacgacaggccagcttggtataaggagaaagtctaccctgaaaataaggtgccatccttggcgcagaatggcaaagtgttgggagacagtcttgatttgatcaaatatgtagatgcaaactttgaagggacacctttgtttcacagtgatcctgccaag

SEQ ID NO: 1174 - DNA, 401 bp, Glycine max
gaccgcctctttcgtaaagcagagtccgcatacgcagtttgcattcgtttgaactctgttctgttgcctccacaaaccaaaccaggcccaagtagtacagtgaaaacgaaattgaagtatagctaggtgaaaggaagtagtcaagtacaagagaatggcgaagtcattgagatcaaagagggagaagaggctgagggctattcggagggagattgttgaacctttctatgacaagaaagaagctgctaagctcgctgcccaagaggccgcccttgccgcacctaagctggaggttccttcgaaaccaaatactgccatggaagcgtccacttccactaacaacaccaacattgatgtggagatggctgatggcagtcaaagcatggcttccttaaagcctg

SEQ ID NO: 1175 - DNA, 400 bp, Glycine max
gaatcggagacaaagctagctcgaacgaacgaagtacagtagtgtgctacgaaaaatgtggcggtgcatcgcacgtggtctccgtggacctgcttccaccagatccacctccaatcactcacttggatctcaactttctagattcttctctagtggggcgaactcctcgtacaccgtggtggatcatacttatgatgctgttgtcgtacgagctggtggcgcgggattgagagctgctattggactttcagaacacgggttcaatactgcttgtattaccaagctcttcccaactcgttcacacactgttgcagctcaaggtggtataaatgctgctttgggaaatatgactgaagatgactggaggtggcacatgtatgacactgtcaagggaagtgat

SEQ ID NO: 1176 - DNA, 382 bp, Glycine max
agggttcttccttgtaagagtgaagtgggtgaaggtaatgattaacctgtatcactgggcttgggacattggtggtctcttcgtccccatcgttgttgttgtaagcggcgggcatggcctgtggttctaataaatctaaagccttgctctctgaaaccccatcgagcttaggatcagtgagggattgggtctttggtttcttcttgtcttgttggaaataggtttgggggtggtgtctgtttcagagagagagagagtgaaggcatggcgatggaggcatggagagaagaaagagaaaggaagtgatagattatcaaactccgtgtgtggtcggaaaatagtgcaaatgagtagaataaaaacttgaacaatttgaagttgt

SEQ ID NO: 1177 - DNA, 384 bp, Glycine max
gccgaaaagtagtaccaagatggcttcagttgtgtatctcctctttggcttccatctcattgttatcatgtcaagttccttacccgcaactagtgaagtgtttgcaaaacagtatccatccacagaacccgtggaagaaaaactcacccaactccacttctatttccataacaacataacgggggaacacccaactgctatgaaaactgttttgcctcctaaggggtccattcatggttttggggctacttacatgatggatgaccctctaactgaaggaccaagtccaacttcaaagcttgtgggaagatctcagggaatatacgctttggcttcacaacatgagcctgggttgctcatggtgacaaattttctcttcacttt

SEQ ID NO: 1178 - DNA, 382 bp, Glycine max
ggccgaaaagtagtaccaagatggcttcagttgtgtatctcctctttggcttccatctcattgttatcatgtcaagttccttacccgcaactagtgaagtgtttgcaaaacagtatccatccacagaacccgtggaagaaaaactcacccaactccacttctatttccataacaacataacgggggaacacccaactgctatgaaaactgttttgcctcctaaggggtccattcatggttttggggctacttacatgatggatgaccctctaactgaaggaccaagtccaacttcaaagcttgtgggaagatctcagggaatatacgctttggcttcacaacatgagcctgggttgctcatggtgacaaattttctcttcac

SEQ ID NO: 1179 - DNA, 178 bp, Glycine max
ggagatctcagattgcaattgcctcttctcttctcccagaatcggtgtaggttacaggtttaagggttttgttttcatttaggtcactaatccgatatcatgaagctcgatacgactagtctcgaatcgtttcccacactgattgcacctcaaaacgacgtcgccggagaactctccg

SEQ ID NO: 1180 - DNA, 376 bp, Glycine max
gattgttggcttgtgctctgctcgtgcctctagggttatcatatctccatttccatttcctctctctcagtttccaagaatcttaagctatgggaaagtcttacccaaccgtgagcgctgattaccagaaggccgttgagaaggcgaagaagaagctcagaggcttcatcgctgagaagagatgcgctcctctaatgctccgtttggcatggcactctgctggaacttacgacgtgagctcgaagaccggtggtcccttcggaaccataaagcacccctccgaactcgctcacggcgctaacaacggtcttgacatcgctgttaggcttttggagccactcaaagcggagtttcctattttgagctacgccgattt

SEQ ID NO: 1181 - DNA, 398 bp, Glycine max
ccagggaaaaaaaaaaaaaaaacatgacgtttacccagaaaaatgtaaagtggaaattgtagacaagcaaagttacctaacaaatgaggattataccctcttttaatgtgatggaactgaaattttcccagccatgaaaaccttgggaacccacatggccacaaaactcattaaaatcatgtgggacaaacatatgaaaggacatgagttacaatgtcagactttgtagtttaaaatctcttttcattttctcatcctttagatctagcctcagtgctctgaagatcctctgtcaaaaagatccaaaacccttttcttatccattgtcttgtttcctttcatcactcaaatcttagaccaactctgccatatcgagtcttttatgtgcttttacagct

SEQ ID NO: 1182 - DNA, 378 bp, Glycine max
ggttcactttcttccaacctctaacctacctctttttcttctctctcaacaacttcaccttcttcctcctcgatcatgtctcacttcaagggcaagtaccatgatgagcttatcgccaatgctgcgtacattggcactcctggaaagggtattcttgctgctgatgagtcaacagggacaattggcaagcgtttggccagcatcagtgtagagaacattgaatccaacaggcgagctcttagggagctgcttttcactgctcctggtgttcttcaatatctcagtggtgtcatcctctttgaggaaaccctctaccagagcacagctgcaggcaagccctttgtgaatgtcttgaaggaagctggtgtgcttcctggc

SEQ ID NO: 1183 - DNA, 369 bp, Glycine max
gatgtcatagtattatcattcagtctcatctttctctcttctctctccacccaaaccctaactcccgaccctgttcccctctcgtatccgtcatgaaaggaggaaagtccaagaccgaatctaagagagccgatcccaaacttgctgtgaataagaagggagccgccaccaaggctaggaaacccgccggcaaggggaaggcagcgaaagaccctaacaagccaaagaggcctccaagtgctttcttcgttttcatggaggagttcaggaaggtattcaacaaagaacatcctgaaaacaaagcagtgtctgctgtgggcaaagctgctggagcaaaatggaagaccatgtctgatgctgaaaaagcac

SEQ ID NO: 1184 - DNA, 378 bp, Glycine max
gatacctaaaaattgtaccgatatggcttcacttgtgtgtctccttttttccttgcatttcatggttatcatgtcaggttccttaccagcaaatagtgaagtgtttacaaaagagtctcctatgtctctatccacaaaacccgtggaaagactcacccaactccacttttatttccataacaacaaaatgggggaacacccgactgctatgaaaattgttgagcctcctaaggcgtccatttctggttttgggactatttacatgatggatgaccctctaaccgaaggaccaagtccaacttcaaagcttgttggaagatgtcagggaatatatgctgaggcttcgcaacatgaacctgcgatactcatggtaacgaa

SEQ ID NO: 1185 - DNA, 388 bp, Glycine max
gttgttgggtttctgttcaaatcatgagacaaaccttttggtctatgagtacatgcccaatggaagtttaggtgaggttcttcatggaaaaaaggggggtcatttgcattgggacaccaggtataaaattgcggtggaggctgccaaggggctttgctatctgcaccatgattgttcgccactcattgtccatcgtgatgtgaagtcaaacaacatccttcttgattcaaatcatgaagcccatgttgctgattttgggcttgctaagttcctgcaagattctgggacatctgaatgcatgtctgctattgctggttcatatggatacatagctccagagtatgcctacacattgaaagttgatgagaaaagcgatgtgtacagtttt

SEQ ID NO: 1186 - DNA, 339 bp, Glycine max
ggtgaatcagcaccacattcacctgagctttttgtgaggattccaaagcatggcttcccttgcagcatccactgctgctgcttcccttggcatgtcagaaatgcttggaaaccctatcaacctcagtggtgccacaaggccagctccatctgcctctagccctgcctccttcaagactgtggctcttttctccaaaaagaaggctgcacctccaaaaaaagctgcagctgctgctcctgccaatgatgagcttgccaagtggcatggtcctgacagaaggatcttcttgcctgagggtctcttggaccgatctgagatcccagagtacttgaccggaga

SEQ ID NO: 1187 - DNA, 365 bp, Glycine max
gcttctgaatcgtcttttacttctcagcagcttcggctagggttcagaaacgaaaaagggttcggtgttctgttcgcgatgagagccaagtggaagaagaagcgtatgaggaggttgaagaggaagcgccgaaagatgagacagagatccaagtagtgcgttaaacctagtttgtttctgttgcttttacaattgcttatgttgtcgaatgggacacccagttgttagtggcactggtttctcctttttgatgtttgatacattttgttggattcaagtagtttatgttcgtcttatgttattagctcaaaacaatgttgttactgcttttgctaatcaacatgatctcctatttgcatctctgc

SEQ ID NO: 1188 - DNA, 389 bp, Glycine max
ggtacctaaaattccgaagttctttttcttataatggggctcttgtggaaaactcacacgaggatacacgtgattagaacattttttgcaatccttttggttgcactgctgagttcagagagagtagagagcagaaaagccaaagttgtgaccacttccttggagtacaatgctataaactgcagagctcacagtgctgcattgacagattttggtggtgttggggatggaaaaacatccaacacaaaggcatttcagtctgcaataagtcacctgagtcagtatgcttctgaaggtggctctcagctctatgttcctgcatgaaaatggctcactggtagcttcagcctcactagtcactttcacctctatcttgacaaagatgctgt

SEQ ID NO: 1189 - DNA, 359 bp, Glycine max
ggtagttccaccgagtagcaacaatgtcgaagcgaggtcgcggaggatcggcgggaaacaagttccgcatgtcgctgggtctgccggtggcggcgacggtgaactgcgccgacaacaccggcgcgaagaacctctacatcatatcagtgaaggggatcaagggtaggctgaaccggttgccgtcagcttgcgtcggagacatggttatggccaccgtcaagaagggaaagcccgatctccgtaagaaggtgctgcccgccgtcatcgtccgctagcgcaagccttggcgccgaaaggacggtgtttacatgtacttcgaagataatgctggtgttatcgtgaatcccaagggtgaaatg

SEQ ID NO: 1190 - DNA, 364 bp, Glycine max
ggcaacgagcagcggctaacaccggaatctgcaaactcaaaagttccatctcttcttccacacatccatcgttaatcattttcccgcaaaatattttctttctctgttctgtgccttcttctccaccgttggttcaaaaatcgcagccgttgatcagattgagcctccgtgttgatcttcatcgccatcatggaggtccgttccaatcccgcctccgacaactcctccgaccaccttcgaccgcccgccgtttcgtccaagcagccgctgccttctcctaccgccgtcgacacctccgccgtttctcagagactccagaaggaattaatggctctcatgatgagtggaggagatctcggggtgt

SEQ ID NO: 1191 - DNA, 335 bp, Glycine max
aacaaagaacagcgttgggacccacaagatctacatcttcagggtgttgcagcaagtgcaccccgacatcgggatctccagcaaggctatggggatcatgaacagtttcatatacgacatcttcgagaaactcgcccaatagtcatcgcgtctcgctaggtacaacaagaagcccaccattacttccagggagatccaaacggcggtgcgtttggtcctccctgcggagttggccaggcatgccgtttctgaaggcaccaaggccgtcaccaaattcagcagctcttgattggcttcgtgtgtttatgtcacggttttctgtgagcccgatttaa

SEQ ID NO: 1192 - DNA, 337 bp, Glycine max
gactcaccacttcaaaacactcataacacaaagcacaaagcaaagctcatccttgagttaaaaaatggcagcagcttcttccatggctctctcatccccatccttggctggcaaggccgtgaagctgggcccatcagccccagaagtgggaagggtgagcatgaggaagaccgtcaccaagcaggtctcctcaggaagcccatggtacggcccagaccgagtcaagtacttgggcccattctctggcgagcccccgtcctacctaaccggtgagttcccaggcgactacggctgggacactgctgggctttccgcagacccagaaaccttcgccaag

SEQ ID NO: 1193 - DNA, 368 bp, Glycine max
gatagcatcagcccatcaactagcaaaaaggagtttgtgtaagggaagaagatggtgtcaggttctggaatctgcgcaaagcgagtggtggtgggacgctcgccaccacatgttgggtcggctagcgtccatcgtggcgaaagagcttctgaatgggcagaaggttgcggtggtgcgctgcgaagagatttgcatctccggcggtctggtgaggcagaagatgaaatacttgagattcctccgcaaacgcatgaacaccaaaccctcccatggccctatccacttccgcgccccagccaagatcttctggcgcaccgttcgtggaatgataccacacaagacaaagcgtggggaagctgctcttgctc

SEQ ID NO: 1194 - DNA, 357 bp, Glycine max
taatttgggaattattgctcccatcgccattggtttcattgtcggcgctaacattttgttgggtggggccttctccggagcggccatgaaccccgctgtgacatttgggcctgctgtcgtgagctggacctggaccaaccactggatctactgggccgggcctctcatcggtggtggaatcgctggccttgtttacgaggttgtctttatcagccacacccacgagcagcttcccaccactgactactagagggggggaaatgaaaataaaaaaaaaaaattgtgtattattgaatttctctggaatcttcttctgtgtatggttttccttccttgtgttttcttcctaattcactt

SEQ ID NO: 1195 - DNA, 383 bp, Glycine max
ggatccccccctctctctctcatcactacctctgcatttttctctcgctctctgccttccatcaccctcgccatttcccttcccaagatagtagaagatggcagacgctgaggatattcaacctcttgtttgtgacaatggaacaggaatggttaaggctggttttgctggagatgatgccccacgtgctgtgtttcccagcattgtaggtcgtcctcgtcacactggtgtgatggttggcatgggccaaaaagatgcatatgttggtgatgaggcacagtctaagaggggtattttgactctcaagtaccccattgaacacggaattgtgagcaattgggatgatatggaaaagatttggcatcataccttctataatgagc

SEQ ID NO: 1196 - DNA, 380 bp, Glycine max
gagggttacacgccgtcgtcgctgtttttgtgtgtcgcttcttcgtaggtgcagctgcaatggtgaagggactccaaggagaacgtgtcagactctacgtgaggggtacaatccttggatacaaaaggtccaagtcaaaccagtatccaaatacatccctgatccaaattgatggtgtgaatgccaaagaagaagtatcatggtatgctggcaataaaatggcctatatctacaaggctaacgtgaacaagaatggaagccattaccgctgcatatggggcaaggttacaaggcctcatggtaacagtggtattgtccgtgcaaaattcaagtcgaaccttccacccaaatcaatgggagcccgagtaagagtattcatg

SEQ ID NO: 1197 - DNA, 404 bp, Glycine max
gacttcacaactcaaactgcttcattgcataattgcagataagatcaacccttctaccttcagattcgcgggaagatggcatcacttcatgctaatgtgacatcagttgtttacaacagtggcaaccgtgtttctcaatcgaaatttgcaagctcttccttcttgtctgggttcgatgttgttggtcgtgcttcaagtgcttggaagaaggaacttgtcccatcttccatttccttggtgcctagagccaccctaacatttgatcccccaactaccaattcagacataaccaagcaaaagaagcacactcttgaccctgcttctccagattttcttcctcttccttcatttgaacagtgctttccaaagagcaccaaagaacacagggaagtcactcatgaaga

SEQ ID NO: 1198 - DNA, 363 bp, Glycine max
gcttcagctacatagctccatcactgcagcattagggtttatcatctgcttcaatggggaagggaacagggagcttcggtaagaggaggaacaagacccacactctctgtgtgaggtgtggccgccgcagcttccacctccagaagagtcgctgcgccgcttgtgctttccccgctgcacgcacgcggaaatataactggagcgtcaaggcaattcgcagaaagaccaccggaactggcaggatgagatacttgcgtaacgtgcctcgccgtttcaagagtggcttcagagaaggtaccgaagctgcaccaaggaagaagggagcagctaccactgcatagacctttcaaagatcgttctcgt

SEQ ID NO: 1199 - DNA, 325 bp, Glycine max
gatccacacctctctctctctctcagaatttctatctatctcttgtttcaatttcaacaacggttactcctttttcgttttgagtttcaatcaagccatcatcatgtctaccgcatcgcaacccaagggcaagaaaacggcgtcgtccaagaagcccctctcccaacctcccttcgccgtgatgatagcagaggcgattgcgagtctgaaagagagaaccggttcgagccaatacgcgataaccaaatacatcgaagggaagcacaaggagttgcctgcaacctacaagaagcttgtcctcgttcatctcaagaaatctgttgct

SEQ ID NO: 1200 - DNA, 399 bp, Glycine max
agcccacgcgtccgcccacgcgtccgagacgacagaaggggagggttttgcgctgttgttgctgctcatcctccgtaacctccgagctctgcaccgaagaacgaagccatggggaagacacatggaatgggatctgctcgcaagctcaagtcccaccgcaggaggcaaaggtgggctgacaagtcatacaagaaatcacatcttggaaatgaatggaagaaaccttttgctggttcatcccatgccaagggaattgtccttgaaaagataggtattgaggctaagcagcccaactctgccattcgtaagtgtgccagggttcaacttatcaagaatgggaagaagattgccgcttttgtccctaatgacggttgcttgaactacattgaagagaatgac

SEQ ID NO: 1201 - DNA, 242 bp, Glycine max
gaataatacaaaagaaaataatagaagaaaaatttttgaataataattaaaaaattccttcatatttttagagataggagacaaaatttacatggatatagtaagtcttgcttgggctgctttaatggtagttttttcattttctctttccctcgtagtatggggaagaagtggactatagggatactcaaaattgagttaagggatcaaagtacccattttgttttctacttgggtttttc

SEQ ID NO: 1202 - DNA, 350 bp, Glycine max
gagagtggtggagtgtgcaaaagagcgtcgtagtcgcaaccctaatcagaagaagcgcagcttcaagcgagtgacagccaccagccatgggtcgtatgcacagccgcggtaagggtatatcctcttctgctttgccctacaaaaggacacctcctagctggctcaagatctcttcgcaagatgtcgaagaaaatatctgcaagtttgcgaagaaaggtttgaccccgtctcagattggtgtcattctcagagattctcacggtattgctcaggtcaatagcgtcactggcagcaaaatccttcgcatcctcaaagctcacggacttgcgcctgaaattccagaggacctg

SEQ ID NO: 1203 - DNA, 395 bp, Glycine max
gcctccctttttaattgaaaccaaaccaaaccaaaccaaaccaaacctctctttctcagtttctctctcttaaggttttctcctcccccattgacccaccgtccatcgcaaaggaagtcgcgcccaatttccatggtttgtagattaaatcttaaagcagtaagtcatcatggataaatcagagcagactcagcagcaacatcagcatgggatgggcgttgccacaggtgctagccaaatggcctattcttctcactacccgactgctcccatggtggcttctggcacgcctgctgtagctgttccttccccaactcaggctccagctgccttctctagttctgctcaccagcttgcataccagcaagcacagcatttccaccaacaacagcagc

SEQ ID NO: 1204 - DNA, 399 bp, Glycine max
acaacaaaaggggaattgaagaggttccctttccatcattttcagttccaccaaaattcacaaatctctcggcatggggtgcgtgtcttcgaatttgctgaaccaagacgaagacttcagcacccaacttggctcctccgcactgggccaccacatcgtgtccctcacctccaccacctacggcctcctcaccctcgaccctccttccacgcctccttcccgctttaccctcggatctctcttcccctccgaaccagaggtcatcaactcatgggagctcatgtccggcctcgacaccgacagcttccgcttctctcctttacctttacccaaacccaaagaaaaccgcctcactcgcccaaccggttccaaactcttattaaccccaactctggcgga

SEQ ID NO: 1205 - DNA, 373 bp, Glycine max
ggctgaagattgaagaacagtcgtcggctcctcgctcgcccttcgctgctgcgccatcaccgtgctcttctcaaagcgattttaaccgaaccgcgttctttttttcttcagaaatcgagcataaggatttgaggattgaagtattgaacaccaaatcctttatacttgttgggcaagaagggagggaaaaaggagatacacaaaaatgtttttccacatagtgctggagcgaaatatgcagctgcatccacgctactttggtcgcaatcttcgtgataatctcgtttccaagctaatgaaagatgtggaaggcacttgcagcggccgacatggatttgtggtggcagttacagggatagaacacatatggaaa

SEQ ID NO: 1206 - DNA, 71 bp, Glycine max
ggagtttggcaactggaaaaaaacttctcaccttctttggtggttgataatgatatatatgttctttgaac

SEQ ID NO: 1207 - DNA, 370 bp, Glycine max
gaccacaccgccgctcgttattcacactgtgctgtgcttatttggcgtagcttaagagattagcaatagaaagtgaaagaaaatgagtcgaggaagtgcaactgctgcgaagggcaagaagaagggtgcgacattcaccattgactgcgccaagccagtggaggacaagatcatggacatcgcgtctctcgagaagttccttcaagagaggattaaggttggtggcaaggccggtgctctcgccgacaccatcaccgtcacacgtgagaagaccaaaatcatagttacttcagacagcaacttctccaaacggtatctcaagtacttgactaagaagtacttgaagaagcacaatgtgcgggactggctc

SEQ ID NO: 1208 - DNA, 365 bp, Glycine max
ggaactcataatattcatcactagaagtgttggatgcatttctatttctaactaattattgtgcttattattattgttgagaaagaaaagaatggcaaagttaataaaattctttgagttgaacacaggggccaagattccttctgttgggttaggcacttggcaagctgagcctggtgttgtagccaaagctgtcaccacagccattctggttggatacaggcatattgattgtgctcaagcgtataacaatcaagcagagattggttctgctcttaagaagctttttgatgatggtgtggtgaagcgtgaggacttatggatcacctccaaactctggtgttcagatcgtgcttcagaagatg

SEQ ID NO: 1209 - DNA, 382 bp, Glycine max
caagtcatagggtatttggatcaatttggcactggacttcctattaagtctgatgtggctggagaagtgttgaaactacttgttgaggatggagagcctgttggttatggagaccctcttattgctgtgttgccatcttttcatgacatcaagtgagatagccttttcctgttaatgattaatcatgcggcattttttttattaggggagctattcgcgtattcgcaaaagtttttaataggttacaaataaatgtgactaaatatttggtacggaggttccttattgaaaatcatactttgtatatcaattgcttaaattgtaccggataagctattctgagaccgcctcattatgtatcttacttgctggagtttgatta

SEQ ID NO: 1210 - DNA, 398 bp, Glycine max
  modified_base (323)..(323): a, c, g, t, unknown, or other
ggcaatcagcaaccaaaatgactcaagcccagattcaaccagttaaacttggaacccaaggctttgaggtttcaaaattgggattcggatgtatgggccttactggagcgtacaatgaccctctccaagaacaggatggcatatctgttatcaagtatgcgttcagtaagggaatcacattttttgatactgcggatgtttatggagccaatgctaatgaacttttggttggaaaggctttgaagcagctgcccagagaaaagattcagatagccacaaaatttggtattgcttcacgaggttttcctgatatgaagatcganggttcgcctgaatatgtgcgatcatgctgtgaagctagcttgaagcgtcttgatgttgaatacattgatctctat

SEQ ID NO: 1211 - DNA, 400 bp, Glycine max
gattgttggcttgtgctctgctcgtgcctctagggttatcatatctccatttccatttcctctctctcagtttccaagaatcttaagctatgggaaagtcttacccaaccgtgagcgctgattaccagaaggccgttgagaaggcgaagaagaagctcagaggcttcatcgctgagaagagatgcgctcctctaatgctccgtttggcatggcactctgctggaacttacgacgtgagctcgaagaccggtggtcccttcggaaccataaagcacccctccgaactcgctcacggcgctaacaacggtcttgacatcgctgttaggcttttggagccactcaaagcggagtttcctattttgagctacgccgatttctaccagttggctggcgttgttgc

SEQ ID NO: 1212 - DNA, 404 bp, Glycine max
ggtccaaaatcctcactcgagccacacgcctcagtagaccatggcctcattgggtgggttacaaaatctaagcggcatcaattttcttatcaaaaaagagggtccaaaagtcaatgcgaagttcgagctgaagccgccaccatatccactgaatggtttggagccggtgatgagccagcagacacttgagtttcattgggggaaacaccacaagacatatgtggaaaatctgaaaaaacacattgttgggacagagcttgatgggaaatcactagaagagattatactgacatcatataataagggtgacattcatccagctttcagcaatgcagcacaggtatggaaccatgacttcttctgggagtgcatgaaaccaggtggaggtggaaagccatccgggg

SEQ ID NO: 1213 - DNA, 378 bp, Glycine max
gacaacacaaatcgtagattgaaaaaaataataataaagaatcagaaaaaatgggttctgagaacaaagaagccgcaggtggagaacttaacaattcgtctccttcgccctcttcttctcatgcttggaaaagtcgaatcgttattccaacccttctcgcaggagttgctggtgctggagctgggttgatttcaaagcatcgaagaactcttggtcttgctactgtgtgttctaactatgctgtgaatttcaccattgtcaccgggtgctattgtggggcacgtgaatttgtggctgcaactagaaaaacgggacctgatgacatattgaattctgcagtagctggatttggaactggtgctcttctaaggcgtctcc

SEQ ID NO: 1214 - DNA, 355 bp, Glycine max
  modified_base (341)..(341): a, c, g, t, unknown, or other
ggttgtgtgagtgaagaagcagagggagtagcggcattaaaaatgcagatcttcgtgaaaactctgacagggaagactataaccctcgaggtcgagagcagcgacaccatcgacaatgtcaaggccaagattcaagacaaggaaggcattcctccggatcagcagcgtttgattttcgccggaaagcagcttgaagatggaaggaccctggccgattacaacatccagaaggaatcaacccttcatctcgtcctcaggcttcgtggtggcatcattgagccttccctcatggctttggctcgcaaatacaaccaggacaagatgatttgccgcaagtgctnatgccgtctgcatc

SEQ ID NO: 1215 - DNA, 238 bp, Glycine max
gacattcatattttcctttcgtttcctttcattttccctcactttctcgctccccaaacgcccctctctctcctccaatggccgaccagctcaccgacgaccagatcgccgagttcaaggaggccttcagcctcttcgacaaggacggcgatggttgcactactaccaaggaacttgggactgttatgaggtcacttggtcaaaacccaactgaggcagaactgcaggatatgataaa

SEQ ID NO: 1216 - DNA, 386 bp, Glycine max
agagacgacagaaggggaaaacagagagtgatttcagtgagtgatcggtgttcacttgatctcatcataatcgtcagcgtcaattgaagaagatgccgatcagaaacatcgccgtcggaaggcctgaagaggcgactcaccccgacacgttgaaggcggctttggctgagttcatctcaaccttcatcttcgtgttcgccggctcaggctccggcatcgcctacaacaagctcaccgacaacggcgctgccacccctgccggcctcatctccgcctccatcgcccatgcattcgccctcttcgtcgccgtctccgtcggcgccaacatctccggcggccacgtcaaccccgccgtcaccttcggcgccttcgtcggcggcaacatc

SEQ ID NO: 1217 - DNA, 376 bp, Glycine max
gataacacaacgcaacacaacgcgcactctctcttttctctcttaacacaaaaaccctatcgttcttcgcggtttcgccgattctcgccatgccgaaagccaaatccgacgccaaagccgccgatagccggttgaagcgcaagggcgctggtgctggaaggaagcaatcgaagaaagctgctaaggatcctaacaagccaaagagacctccaagcgctttcttcgttttcatgtccgagttcagagagcagtttaagaaggagcatcctaacaacaaatccgtcgctgttgtcggtaaagctggtggtgacaaatggaaatcgctgtctgatgctgaaaaggcccccttcgttgccaccgcccgaaaagaagaaac

SEQ ID NO: 1218 - DNA, 359 bp, Glycine max
gacagactacagtaatattttatttgcactactactactactttatttaagcagaagcaggcgagtgaggaagagcgaagagtgaagagaatggctcccaagggtttaacctttctggctgtgttaatatgcgtttcagcactgtcactgagtccttctgttgcgggggaagggcaaaataatggccttgttatgaacttctacaaggaatcatgccctcaggctgaagacatcatcacagaacaagtcaagcttctctacaagcgccacaagaacactgctttctcctggctcaggaacatcttccatgactgtgctgttcagagttgtgatgcttcactgttgctggactccacaag

SEQ ID NO: 1219 - DNA, 387 bp, Glycine max
gccgctcaaacgcaaaggaccagaagcctaagcctcaaacatggcaaaagggttaaagaaacacctgaaaaggctaaatgctccaaaacattggatgcttgacaagcttggtggtgcctttgcacccaagccatcatctggaccccacaagtcccgggagtgtcttcctctgatcctcatcctacgaaacaggctaaagtatgctctaacatatagagaagttattgccatcttgatgcagcgccatgttcttgttgatggcaaggttaggacagacaagacataccctgctggtttcatggatgttgtttctattcccaaaacaaatgaaaatttccgtctactgtatgacacaaaaggtcgattccgtctccactctgtaaagga

SEQ ID NO: 1220 - DNA, 336 bp, Glycine max
atcacgacatcacatcgcagagaagaacagagagagatccatccatcaattccaatggccgatcagctcaccgacgaacagatctccgagttcaaggaagccttcagcctcttcgacaaggacggggatggttgtagtaccaccaaggaacttgggaccgtgatgcggtcacttggccagaacccaactgaggcagagctgcaggacatgataaatgaggttgatgctgatgggaatgggaccattgatttcccagaattcccgaatctcatggctcgcaagatgaaagacactgattcagaggaggagctgaaggaggctttccgcgtgtttgac

SEQ ID NO: 1221 - DNA, 105 bp, Glycine max
gaagaaagctgctagcagagggaagttctacacttttttgtttggattgatcgagtgtactttttcttttcgagattggcttggtgtgcagtggaaagagggtgc

SEQ ID NO: 1222 - DNA, 408 bp, Glycine max
ggctattgctaagagtaccaaacaatttttgttcattcagagctttactcactcctttgcacgtctcaatctgagtcttcacttcatcgtttttgggattctctctctcaataatggcagcacgctttcaatctgcagctgtactatgctggtgttccctatagggaaagatgaaattgaagtctaagaaaggatggaaatctattgtaccacttcatttgaaaggaaaatccgcaagccgtttttctttatttcgcaaagtcaattctgctggctatggacctggcaaaacaccagtttatctgaatgtgtatgacttgacacccatgaatggttatgtgtattgggctggtcttggtatctatcactctggtgtagaagttcatggtgtagaatacgcgtttggag

SEQ ID NO: 1223 - DNA, 374 bp, Glycine max
gactcagccgctgcgaggcgaacagagagacccgaagccagatttcaagatgaagttcaacattgcgaatcccaccactggttgtcagaagaagctggagatcgatgatgacctgaagctacgagcattttgggacaagaggatctcacaagaggttgttggtgatgctctgggtgaggaattcaaaggctatgtcttcaaaattactggaggttgcgacaagcaaggatttccaatgaagcaaggagtgttgacccctggtcgtgttcgcctcttgctgcatagaggaactccttgtttccgtggttatggaaggcgcaatggagagcgtaggaggaagtctgttcgtgggtgcattgtcagccctgacctct

SEQ ID NO: 1224 - DNA, 367 bp, Glycine max
agggaaagtagacacagccatgtccactactggtactgttctggcttccactccaacacaaaggctattatgcaaagtggcattggttactggtggagcgtctggaattggagaaagcattgtgcgcctcttccatatccatggtgctaaaatatgtatagctgatgtgcaagacaaccttggaaagcacgtctgtcagtctcttggtgatgaagcaaatgttgtttttgtccattgtgatgttacagtagaggatgatgtttcccatgcagtggacttcactgtgggtaaatttggcacccttcacatcatagtcaacaatgccggaatttctggatcaccttgttccgatatccgcaatgcagac

SEQ ID NO: 1225 - DNA, 381 bp, Glycine max
  modified_base (352)..(352): a, c, g, t, unknown, or other
gacgttcacattcaggaatcgttttcttcagaaaatttgccatcgttgagggaagcgcgagagccttcgttgttcaagatgagagctaagtggaagaagaagcgcatgaggaggttgaagaggaagcgccgaaagatgagacaaagatctaagtaggtgcttgaacaaggagtggagatgatgtgcttttccatctgctaccagcttcatgacattttatgctgtcatggctcttatgatgatcttgaggtctagtggcgaggggagcttccatcttgactttagtttagctttactggtctaaagattgctgttttagtgtgggttaagttatgatattgagagttttgtngtatctaattatgtactggtacgttttgt

SEQ ID NO: 1226 - DNA, 329 bp, Glycine max
gacacagcctcaacagccctaacgcgtgcagagcagagagagacgcagccatggggcgaagacccgcgaggtgttataggcaaattaagaacaaaccataccccaagtcacggttttgccgtggtgttcctgatcccaagatcaggatttacgatgttggtatgaacaagaagggtgttgatgagtttcctttctgtgtccatctggttagttgggagaaggaaaacgtttctagtgatgccctggaagctgctcgtattgcttgcaacaagtacatggccaaatttgctggaaaggatgctttccacttgagagtcatggtgcaccca

SEQ ID NO: 1227 - DNA, 366 bp, Glycine max
  modified_base (325)..(325): a, c, g, t, unknown, or other
ggaaaagaggcgaaggtagctcatgacatgttccttgaaggaaaaaaaacgcagttgaaagattgaagctcgagatgtcggggaaaggcgcaaagggtttgataactgctaagaacccttcttcctctaaggacaaagacaagaaaaaacccatttctcgctcctcaagagccggtcttcagttccctgttggacgcattcatcgtcttctgaagtcaagggtgacagcacatggaagagttggggcaacagctgcagtttattctgctgccatcctggagtatttaactgcagaggtgttggagttggccggcaatgcgagcanagatctgaaggtgaagcgtattacccctagacatctacagc

SEQ ID NO: 1228 - DNA, 386 bp, Glycine max
  modified_base (366)..(366): a, c, g, t, unknown, or other
gacttctcttcacacctttgttcactcttcttctcttgcggctagggttttagcgcagcttcttctagatttaaggaagatgggtaaggaaaaggttcacatcagtattgtggtcattggccatgtcgactctgggaaatccactaccactggtcacctgatttacaagcttggaggcattgacaagcgtgttattgagaggtttgagaaggaagctgctgagatgaacaagaggtctttcaagtatgcctgggtgctggacaaacttaaggctgagcgtgaaagaggaatcaccattgatattgctttgtggaagtttgaaacaacaaagtattattgcacagttattgatgcgcctggacatanggatttcattatagaatatg

SEQ ID NO: 1229 - DNA, 320 bp, Glycine max
tgggttgcaacgtgtactcaaacatgtcctagctaactcattaagaaaacacctttcctgaactttttccattgccattctacgagaacgttaaagttgatgtcgttgggtggagcctcccatagcattgtctattaatacgtctgaaataagtgccattaatgtaaaaatatacttgtgcagaaaccaaacttcagaattcagtttgttaggaggcaaataaatatcgttgctcacactcttccagggatgacaacttcttacgttatactcagttttttattatataccctcttgtatcttccaacttagaatgaaaa

SEQ ID NO: 1230 - DNA, 372 bp, Glycine max
gagggttttatctcattaacgtttcttctcttcactctgcccgctgcatcaatggcttcagagaagaaactttcgaacccaatgagggagataaaagtgcagaagctcgtcctcaatatctctgttggcgagagtggagatcgtctcaccagagcctccaaggtgttggaacaacttagtggccaaaccccagtgttttccaaagcaaggtacactgttcgttcctttgggattagaagatatgagaagattgcatgctatgtcactgtcagaggtgacaaggcaatgcaacttttggagagtggtttgaaggtgaaggaatatgaacttctcagaaggaacttcagtgatactggttgcttcggctttggt

SEQ ID NO: 1231 - DNA, 97 bp, Glycine max
gatgtttagttgaatcatttgcctaagctaattgaattattattatttttgttttctttgggattatgctatacaaattactgatctttgaatttag

SEQ ID NO: 1232 - DNA, 358 bp, Glycine max
ggcggcttggtttgttctacttgttcttacactgggattaggacgagacgtttctacactaacaataatacctttccctctttctcctttaccttcccccaccaacctcaatcattctctttccctaaacctctcagactcatgtctcagcctttgaccaccaactctgctgatggtgattcctccgtcgccgcacctcccatcctcttcgattatcatcttatcgaccaaaaacttctccaaaacatagtctacgatgctcttgtctggagcaccctcaactgcctccttgttggtgacaaatcagttcagagatcaggaacagttcctggtgttggcctggtgcatctcccgcttt

SEQ ID NO: 1233 - DNA, 363 bp, Glycine max
gacaactccataacacaaggcagaaagcaagctcatcctagagttttaaaaatggcagcagcctcctccatggctctctcttccccatccttggctggcaaggccgtgaagctgggcccatcagcccccgaagtcgggagggtcagcatgaggaagaccgtcaccaagcaggcctcctccggaagcccatggtacggcccagaccgcgtcaagtacttgggcccattctctggcgagcccccgtcctacctcactggcgagttcccaggtgactacggctgggacactgctgggctttcggccgacccagaaaccttcgccagaaaccgtgagctcgaagtgattcactccaggtgggccatg

SEQ ID NO: 1234 - DNA, 375 bp, Glycine max
ggagagagagagagaaatggagaagacaggagtgttatcggcgaaggaggcattcgagaagcttgaaaaggtgggagaagggacatatgggaaggtgtacagagcaagagagaaggcaactgggaagatcgtggctctgaagaagactcgtctccacgaggacgaagaaggtgtccctcccaccactctccgtgaggtttccattctgcgaatgctctctcgcgatccccatgtcgttaggttaatggatgtcaaacaaggtcagaacaaggaagggaagacagtgctctacttggtatttgagtacatggacaccgatctcaagaaattcatacgctctttccgtcaatctggggaaaccaatcctccccatat

SEQ ID NO: 1235 - DNA, 331 bp, Glycine max
  modified_base (207)..(207): a, c, g, t, unknown, or other
gccaccagtacagaaaacgcagttctcaccatttccctctcgattgtgagacttgttgttgttaactgaacttttctgagcaagaatgtctgggcgtggaaagggaggcaagggtttgggaaagggaggagcgaaacgacaccgtaaggtgctgcgcgataacattcagggaatcaccaagcccgcgattcggcgtttggctcgtangggtggcgtgaagcgtatcagtggtctcatctacgaagagacacgtggcgtgctcaagatctttttggagaacgtgattcgtgacgccgttacctacactgagcatgctaggagaaagaccgtt

SEQ ID NO: 1236 - DNA, 357 bp, Glycine max
gacacaaactttattacagttgttgtattgtaattaagcaagaatattaggcaatggagtcttctagaacttcaactactcttgctctttttttaaccatcaatttgcttttctttgtcatggcaagtggctgctacacttgcacacagcctaagccaaaccctatcccattcccttaccctaaccctagtcctgccgcgaagagctgccccagggacgcacttaagctcggagtgtgcgcaaacgtgcttaatggaccaattggtgctattgtagggtcaccaccggaccacccatgttgctcagtgctagaagggcttcttgatcttgaagttgcggtttgcctctgcactgcca

SEQ ID NO: 1237 - DNA, 378 bp, Glycine max
  modified_base (323)..(323): a, c, g, t, unknown, or other
gaaacgattctccgtttattcaaaaacgaaaaacacatctctctgattaatacgcactctcgctgtgagtttgaatttagttgggagactcgaaataatgtcgtcgacgacgcagaatcgtcgttcgtcgtttactccctcgacggcgtcgtctttggcgaaagcgaaacgacatccatcgtcggtgtcgtcgtcgtcgtcggggaaggcgaaggtggtttctactcagaacttggctgtgaagagagcgcctctcgccaacctcactaatcaaaggaacgcgccttattcttcttcttcttcttctttggtgcaaggttcanataaagttgccaagaccaagaaagaggctcctgcaaagaacagcgtctcaaaatc

SEQ ID NO: 1238 - DNA, 217 bp, Glycine max
cctgacaacattcacaaaactgaatccgccatagcagctgcaaagacttgataattaattgcaagtctgtctctatgctcaaaccagagttcccactatccatcaagctaggaacgcattggctatcactgcagcagatgataactaacttgtaatttaactaaggacaacaattcaattcttctagcaggtttttagggaaaggaaacttgttgtt

SEQ ID NO: 1239 - DNA, 450 bp, Glycine max
  modified_base (205)..(205): a, c, g, t, unknown, or other
gtacgtccagaattcacggcgaccacgcgtcaagccaccctccgcccaaccctcccaacggcgccaaaaaaacacaaaaagggaaaattcctaaaaaaaaggaaaaaaggttttaaaaatgaagagcaaaaaagaaagatttaacgtttgagcaactaagttcccagaaaggcaaccaattggtacagcagctcaaggtgacaangactacaaagaaccacccccagcacctttgtttgagcctggtgagctaaagtcatggtccttctacagagctggaattgctgagtttgtggccactttcttgttcctctacattaccatcttaactgtcatgggtgtcaacaggtcaccctccaagtgtgcctctgttggcattcaaggcattgcttgggcctttggtggcatgatctttgcccttgtctactgcactgctggaatttcaagggg

SEQ ID NO: 1240 - DNA, 306 bp, Glycine max
gattatcaataggtgttttcatttgggattcaaactcaccatggtggacgccttcaaactttgcatcttccttcttgcgtcgatctgtgctttcctagtcttttctaatccagtgctgtgtagtgataaggaggacagtgtattcaagggaatcaacagctacaggcaaacacggagcctggtacccctgagccaagtttcgaatgcaacatgtttggctgatgaagttgcagaagaaatagagaagatgccctgtgaaaacgtgtaacaatactacgcttcacctgttcctggtactgggaacct

SEQ ID NO: 1241 - DNA, 360 bp, Glycine max
ggcagcgcttgagaccaagccccactcaaccaccacaccactctctctgctcttcttctacctttcaagtttttaaagtattaagatggcagagacattcctatttacctcagagtcagtgaacgagggacaccctgacaagctctgcgaccaaatctccgatgctgtcctcgacgcttgccttgaacaggacccagacagcaaggttgcctgcgaaacatgcaccaagaccaacttggtcatggtcttcggagagatcaccaccaaggccaacgttgactacgagaagatcgtgcgtgacacctgcaggaacatcggcttcgtctcaaacgatgtgggacttgatgctgacaactgcaa

SEQ ID NO: 1242 - DNA, 347 bp, Glycine max
gaaggtttttgaatgctgtgctgttatcctaccattctcttctgcaactttcgccgtcagcttcattcaccaaggttgtccttcacgatagcgcatttttcctacaacgattattgtatctcagctcgaatatttctgagatcggaaagagatgcgaaaggggtgagaaccgcttttggtaatacactcgtcttggatttaagactcccagggaatccatctcacgaagatacattcacaagaagtgacccttcactgaaattgctcctaactgtggacgtatctagccttgaacatatcatagtgctaacatgtccaagtgtattaatgatcagaagaattatcgc

SEQ ID NO: 1243 - DNA, 373 bp, Glycine max
ggcagttacagaaaccatgacgacggtggtgcccacctccgaagaagacgctgctctctctgttgtccgattcgcctctgaactcgcctgggccgatgccggtcccgaggttgctgagcctcaagttagtagactctgcatggaggctgaagagtttatcgttatgggaaaatggttggaactagcatcattgatgattacctctgctgaattggttttctcaaaggtttctgaaacagatatagagtccatcttcactatcatctgcaatcttgtgacaaagactgagaatccagatgaagtgatggagattgtaaaagttataactgcaaaaataattcagcagccaaacgaaaagcctgctgtgcgattg

SEQ ID NO: 1244 - DNA, 371 bp, Glycine max
ggttgtcaagcctgccgagaaaaccctagttcgcttgcagtcacacaggaggccaatcctattcatagctcgagatgggtgaagaagtgaaggtagttgttccagaatcagtgttgaagaagcgcaagagggaggaggaatgggcgttggccaagaagcaagaactcgatgctgccaagaagaagagagccgagagccgcaaactcatctacaacagagctaagcagtacgctaaggagtacgatcaccaggagaaggaattgattcggttgaaacgcgaggccaagctgaaaggtggtttctatgtggatccagaggctaagctgttgtttaatattcgcattcgtggtaataatgccatggaacccaaa

SEQ ID NO: 1245 - DNA, 376 bp, Glycine max
gggactcactcttcacactcactcacactgaatggcttctgaaggcgaccatcaccaccaccaccaccaccatcaagatcacgatcatcatcatcatgatcatgatcaccatcatcatcacgatggagagggagagaccaactcatgggtaggtaaggatgggaaggtgtaccatagccacgatggtctggcgccgcattctcacgaacccatttactcccccggctacttcaccagaagagctccaccgcttctcaacagaaacttcaacgaaagagccttcaccgtcggaatcggtggacccgtcggtactggcaaaacagctctcatgttggccctttgtgaactcttgcgcgaaaactacagtctcgcagct

SEQ ID NO: 1246 - DNA, 375 bp, Glycine max
gatccaaagcttcttcagttattcatctgcttactaaaatttcttccattcttagctttgttcaatcaaagttttttaagatggcccagagaaatgttactgctaattcttcttttgaaaggactagcttgccttccctagatcaaaagttggccatggccaagcgctgctctcatgagggtgtgatggcaggagcaaaagcagctgttgttgctactattgctactgccataccaactctggctagtgtaaggatgcttccttgggcaagagccaatctcaatcactctgctcaagctctcataatttccacagtggcgggagcagcatatttcatagtagctgacaagactgtcttggcaactgctagaaaga

SEQ ID NO: 1247 - DNA, 194 bp, Glycine max
aattgagtatcaaggagttaaagaatttaagacaaaataccaaattaaagtagatcaattttttttcattcccgaggaagtgcatattttaccagaatcttcttccataatggtacggaacaatagtatcgttgaagtagatacactaatcactttaaatataagaagtcgagtaaggggattggtccgattgg

SEQ ID NO: 1248 - DNA, 385 bp, Glycine max
ggagcaaaaccctaatccctatttttcttcctcagtagtgtcatttacgcttctcttctctgcagcaactatgcctaaccctaaggtcttcttcgacatgaccatcggcggtcaatctgctggccgcatcgtgatggagctctacgccgacgtcactccccgcaccgccgagaacttccgcgcgctttgcaccggcgagaagggcgtagggcggagcggcaagcccctccactacaagggctcgtccttccaccgcgtgatcccgagtttcatgtgtcagggtggcgacttcaccgccggaaacggaaccggcggcgagtcgatttatggcgccaagttcgccgacgagaacttcgtgaagaagcacaccggtcccggcatcctc

SEQ ID NO: 1249 - DNA, 394 bp, Glycine max
agacgggtgccaaaaaaagaaaaaaggggacatcagtcagtcattacgtattattcgtctacagtagtgtcaattacgcttctcctctctgtaacatgtacgaatacttataaggtcttcttagaaataaccttcagcgggtaatcagccagccgaatcattatagatccaggttcctacataactcaccacaccgtcaaaaatgtccacttgatttgcaggatctaaaaagtcgtagggcagataggcattttgatcaatacatgggctcggtcctcgatcacgtgatccagattttcatgtgtcacagtagcaacttcaccgtaggaaagatacctcgtagcgaatatatttaaggctccatgttcaccgacgagaacttcttaaaaatcca

SEQ ID NO: 1250 - DNA, 354 bp, Glycine max
gcattctattcattcaagattcagcaagtgcgttttggaagcagagaccgaaatacttcgagacggcccgtacaaagcaaactgctcgtaagtcaactggaggaaaagctcccaggaagcagcttgcaaccaaggctgcacgtaagtctgcaccaacaactggtggtgtgaagaagcctcatcgttatcgccctggaactgttgctcttcgtgagattaggaaataccagaagagcactgagctcctaatcaggaagcttcctttccagaggttggttcgtgaaattgcccaggatttcaagactgatctgcgtttccagagccatgctgtgcttgcattgcaagaggctgctg

SEQ ID NO: 1251 - DNA, 345 bp, Glycine max
cgggggctccgccatttttcgtagctgctgttcttgcgcgtgaacaagcctcaggtaagccaaaaccatggttaagcataacaatgttatcccaaacggtcacttccgtaagcactggcagaactatgtgaagacttggttcaatcagccagcacggaagacaaggagacgattggctcgtcagaagaaagctgtgaagatattccccagacctacggctggacctctcaagcccattgtacatggtcaaactttgaaatacaacatgaaagtgatacgtggaacgggattttctcttgaagaactcaacgctgcacggattcgcaaaaagcttgcaccaaccat

SEQ ID NO: 1252 - DNA, 56 bp, Glycine max
aatcaatgactattcatgattccataattgaatcaattacatactggatccaagcg

SEQ ID NO: 1253 - DNA, 361 bp, Glycine max
gagctgcgaaaacctagtgcaccgtaagggttgtgaagcatgcagagaagagccatggtgcacgtttctttctaccgaaactatgggaaaacgttcaagaagcctcgtcgtccctacgagaaggagcgtttggacgccgagttgaagctggtcggtgagtacgggcttcgctgcaagagggagttatggagggtccagtacgccctgagccgcatccgtaacaacgccagaaacctattgacccttgatgagaagaaccctcgccgtatcttcgagggtgaagcccttctccgaagaatgttccgttacggactcctcgacgagacacagaacaagctggattatgtgttggctctcaacg

SEQ ID NO: 1254 - DNA, 369 bp, Glycine max
gatagttatttattatctgaagttgcgagagtgaagaaatggcgcaagacttggcattggatttggaggagcttcgccgcctccacagcatcgccaaaagacctcgaaccctctctcttctctcctccgaaattcgtaacctcgaaaagttatcgtcagaggaagcttctgcgcagattccggcgccgatttcgaccggaactaaagtggcgccttcacctgcgctgaagtatgcggcactcgcgtcgttcagttgggaccaggatagtgacaaagttaagatatatgtgttaatggagggaatcgatgagaataaggttgaatccgagtttaagtcgatgtcattcgatgttaagttccatgatgttc

SEQ ID NO: 1255 - DNA, 368 bp, Glycine max
gacacaaactttattacagttgttgtattgtaattaagcaagaatattaggcaatggagtcttctagaacttcaactactcttgctctttttttaaccatcaatttgcttttctttgtcatggcaagtggctgctacacttgcacacagcctaagccaaaccctatcccattcccttaccctaaccctagtcctgccgcgaagagctgccccagggacgcacttaagctcggagtgtgcgcaaacgtgcttaatggaccaattggtgctattgtagggtcaccaccggaccacccatgttgctcagtgctagaagggcttcttgatcttgaagttgcggtttgcctctgcactgccatcaaagccaac

SEQ ID NO: 1256 - DNA, 383 bp, Glycine max
ggtgctcactcatctatctattataaccaaacactcttcttcatattcttcttcttcttcttgttcttgttctatctgtgacgagcatcatggcctcgagagcagtgctattgttggccatgtgtgtgcttccggccatggttgtggccattcgcccagcaaagaaccctttttgcgtgaagggtcgcgtctactgtgacccttgccgtgctggttttgagacctcagcaaccacctacattgccggtgctgagattatgttgcaatgcaagagcagggttagcaacgaggttgtgtacaccaagaaggggtacactgactcaactggagcatatacaatgtacgtggacgaggatcacgcagattaaatatgcagtgccaag

SEQ ID NO: 1257 - DNA, 340 bp, Glycine max
gacacgcaactatttctgactacgttttgctctacgcctctccctctctctcaaaaatcgttctcttcgattttagggttttgttttgctgctgcctccgttccccccttctcataaacaacgcgttttctcttctgcttcgtatctattctttgcttttggttttggttgattcaaggccttcacagcattcgttgcggcattttaatcgatttatccaagcaggactgaatgaactaatggagtctaaaggtgggaaaaagaagtctagtagtagtagtagtaaatcattgttctacgaagctcccctcggatacagcattgaagacgttagaccaaa

SEQ ID NO: 1258 - DNA, 295 bp, Glycine max
ggccaagattgaaatattactggggaagactgaaaaatttgatgagttgatggctgctgctgctgctgctgctgcagaagatggtgaaaacggagatgttgaagagtacgccgcataagttcatcgaagttatacctgtcttgggtgaagatatgcactctttaatgaactgcactgatgttgttagtatgtagcaggactagtaaagcaaagaactcgttatatagactgtcatgcaatattgaactatgcaattccttcatttcttttccctataaatagaggcttttttcgt

SEQ ID NO: 1259 - DNA, 373 bp, Glycine max
gacacgttcacattcaggaatcgttttcttcagaaatttgccatcgttgagagaagcgtgagagccttagtcgttcaagatgagagctaagtggaagaagaagcgcatgaggaggttgaagaggaagcgccgaaagatgagacaaagatctaagtaggtgcttgagcaggagttgagatgagctttccatctgctaccagcctcatgacattttaggctgttatggctcttatgatcttgaggtctagtcgctaggggagcttcgctcttgacttagtttgctttactggtcctggtcctggtccaagactattgagtgtgggttaagttgtgatgtttagtgttttgtggtatctaattatgtactggtttt

SEQ ID NO: 1260 - DNA, 370 bp, Glycine max
gaattttgaaaataaagaggaaagcttgaagcataagagagagatgtcatcatcttcagacctggacaggcaaatagagcagttgaagaggtgtgagcctcttaaggagtctgaagtgaaggtgctctgcctcaaagccatggaaatcctcgtcgaagagagcaacgttcaaagggtcgacgctcctgtcatcatatgtggtgatattcacggtcagttttatgacatgaatgagcttttcaaagtatgatgggattgccccaaaactaagtagttattcctgggggattttgttgatagagggttttactcggttgaaacgtttctgcatctgctcgctcttaaggtgaggtatccagattcgataaca

SEQ ID NO: 1261 - DNA, 356 bp, Glycine max
  modified_base (313)..(313): a, c, g, t, unknown, or other
ggctccgccatttttcgtagctgctgttcttgcgcgtgaacaagcctcaggtaagccaaaaccatggttaagcataacaatgttatcccaaacggacacttccgtaagcactggcagaactatgtgaagacttggttcaatcagccagcacggaagacaaggagacgattggctcgtcagaagaaagctgtgaagatattccccagacctacggctggacctctcaggcccattgtacatggtcaaactttgaaatacaacatgagagtgagaggtggaaggggattttctcttgaagaactcaaggcagcanggattcccaaaaagcttgcaccaaacataggtattgctgttga

SEQ ID NO: 1262 - DNA, 373 bp, Glycine max
gagggttgggctatccatttgtttcgagaatgcggtctctctcagccaacccttccttactgcgacaagctgttccagttttggtcaaaccctacaaatccattctctctcgagcattcctcttcagctcccctgcctccacatctcattctcacaatactcaatttcttagatccgtcacgtttttctctactacttctcttcgtaattttaattcacgcgccacccatctcaacgatgctggctctatcgactctcctcttatacagtccatgcagaacaagataaaggaacaactcaatgcagaatcggtctccgtcaaggatgcttatggtgatggtcggcatgttagcattgatgtggtagctactgc

SEQ ID NO: 1263 - DNA, 365 bp, Glycine max
  modified_base (93)..(93): a, c, g, t, unknown, or other
gtctccacacaatttctctctcctctctctctctacaaatccttctttctttcttctcttcgctgctcactgtagccatggctttcagagtangaggagcgggagggggaaatgcctcttctggcatgggtgttgctgagcatagtgtaaacaccttcctggaattgcagaggaagaaagttcatcgctatgtgatttttaaaattgatgagaaaaagaaagaggttatcgttgaaaaaactggaggccctgctgagagctatgatgatttcactgcatccttgcctgaaaatgattgccgatacgctgtctttgactttgattttgtgacatctgagaactgccaaaagagcaaaatctttttt

SEQ ID NO: 1264 - DNA, 363 bp, Glycine max
gaaggttttgcgctgttgttgctgctcatcctccgtaacctccgagctctgcaccgaagaacgaagccatggggaagacacatggaatgggatctgctcgcaagctcaagtcccaccgcaggaggcaaaggtgggctgacaagtcatacaagaaatcacatcttggaaatgaatggaagaaaccttttgctggttcatcccatgccaagggaattgtccttgaaaagataggtattgaggctaagcagcccaactctgccattcgtaagtgtgccagggttcaacttatcaagaatgggaagaagattgccgcttttgtccctaatgacggttgcttgaactacattgaagagaatgacgaag

SEQ ID NO: 1265 - DNA, 359 bp, Glycine max
gaggcgaggtagtgagatagtgatacaacacagagtgcgttgttgctcattcgtcacaactcacagccaacatgggtaacgccagagattcgatgcacaagaagcgtgtcaatgatggcaagaagatggcatggaggacgacgacatggtatgagcatggtctccagcctgctaacactaagcagtctagcggtaagacattcaggaggatcctggttagaagtggaaatgtgaactggagggcactcatattggattctggaaattactcctggggaactgaagctgtaactcgcaagactcgtatactagatgtggtttacaatgcctcaaactcctatcttgtgcgtactcagaca

SEQ ID NO: 1266 - DNA, 385 bp, Glycine max
gaaactcaattatacaaaaccctgaagaaagacacagccattgtttgtttactttccattgattgagcgaaagctttgttttttctgcgatcattttccattgggtggaagaaagtctcaacctttagtcgaaagagcaaggatctgagtgagtgagcgatcatgtgtggtggtgcgattatctccgacttcattccagcgggtcccgccggcggggcgcagcgcgtgaccgccgacatcctgtggccgaatttgaggaagcggttctcgaagtcgctgctggacgatgatttcgaggcaaggttcagagaattcgaggatgactcggaaatcgaggatgtcgatgatgaggacgatgaagaggaggaggagttgaagaagaaga

SEQ ID NO: 1267 - DNA, 359 bp, Glycine max
gactctgttgttttccaaaaccctaatttatcgaaaggtagggttttgcagagcctcctcctccgttaccagtttcttcttctttatcctctctcctttcttcttccattcctctaacctaagatgggcaagtcaagcaagaaatcagctatcaaggttgacgctgctccagctgtggttccgccatccaagtctgccaagaatggaggcaagcgacaagctcaagatgaaattgagaagcaagtgagtgccaaaaaacagaagatagaggaggttgctcagaagcaaaagaatgaggccaaggtgcaaaagaatgaagccaaggtgcaaaagaagaaggaaagtagttcagatgattc

SEQ ID NO: 1268 - DNA, 182 bp, Glycine max
caaacgttggcaaaaggaaaaaggatggggggggtgaaactaaaagttgctgcttcttcagaaacgggggatctcaaggtttcaaccttacattaacttgaatgcaaatctaaactcctttacaagatcccccaaaattcaattaacggcccttcattttaaaaatcctgaacgggaaaaac

SEQ ID NO: 1269 - DNA, 351 bp, Glycine max
  modified_base (315)..(315): a, c, g, t, unknown, or other
  modified_base (333)..(333): a, c, g, t, unknown, or other
aggggcaagagggtatagcgaaagacgttgaggttgctgaacgtggctccttccctgggaatgactaccacgaccctccatcagcatcactcattgatgctgacgagctcacaaagtggtccttttacagggctcttattgccgagttcattgccactttgctcttcctctacattactgtgctcacagttatagggtacaagcaccagacggatcatgctgatgcgtgtggtggggttggcattcttggcattgcatgggcctttggtggcatgattctcatccttgtctactgcactgctgggatttcatgangtcacattaacccagcantgacatttgggctgtttt

SEQ ID NO: 1270 - DNA, 100 bp, Glycine max
aacccaatgcccacaacacaaaatccaaactttatcccaaaaccaaacacattaagtcattcaacaccgaccacatcaatcaaccgtataatgttcactc

SEQ ID NO: 1271 - DNA, 355 bp, Glycine max
  modified_base (201)..(201): a, c, g, t, unknown, or other
ggcgcctctgcgtgcaagagtgaaaaccttctcttacccttctctcaagtttcaagagatttcatcatggctccaaagaatgacaatgctccaccaccttcctccaagcccgccaaatctggcggtggcaagcagaagaagaagaagtggagcaagggaaagcaaaatgagaatgtgaacaatatggtgctgtttgatcanggcacctatgacaagctcctttctgaagctcccaaatacaagctcatcactccttccattctctctgatcgtttgaggattaatggatcacttgcaaggaaggctataagagaattgatggcaagaggttctatcacgatggtgtctgcccatg

SEQ ID NO: 1272 - DNA, 67 bp, Glycine max
atacccgctctcttattgtagctagtagaccatcattccactcttccccgtctaaacatatctctac

SEQ ID NO: 1273 - DNA, 356 bp, Glycine max
ggttttcaacttcgtttttttttggtgtttcggtgtctctcagattaataggttgttcctacggctgctgcctccatcttcaccttgtttctcaacagaacctactgatctacctctccatcacccttctctacacaagaaatagtatcttcgtttcaacaatatgtttggttcatcccgcatggcacatgaatctggtatgttcatggttacacaaacaatttgcagtgtattgtgctgcaaatgtggaattccaatgcaaccaaatgctgctaatatgtgtgtgaagtgtctgcgctcggaagtcgatattacagaaggactgctgaatcctctaatgctggtgaattgccctg

SEQ ID NO: 1274 - DNA, 355 bp, Glycine max; identical to SEQ ID NO: 1271
  modified_base (201)..(201): a, c, g, t, unknown, or other

SEQ ID NO: 1275 - DNA, 351 bp, Glycine max
gctctgcattcattcagcgttcatctcaatctagatttgtgtgcggtgcgtctccggtgaagagaagaagatggcgaccgtaccaggacagctcatatgggaggtcgtaaagaagaacaactctttcttggtgaaagagttcggaaggggcactcagagcgtgcagttcagcagagagcccaacaatctctacaacctcaacactttcaagtactccggtttggcgaacaagaaaactgtcactgttcaacctgcgggtaaagaccagtctgtgttgctggcaacaaccaagacaaagaagcaaaacaagcctgctgctttgcttcacaaatctgtcatgaaaaaggagtt

SEQ ID NO: 1276 - DNA, 257 bp, Glycine max
gaagcctggttcgggagactataggatacggctttttatccgaactgaactcttggggaagggaattccacccactcatcaatggcatctactctcttcgcttgcccgtcgttgtgttcctcctcttcttctatattttctacttccgtcaaattctccttaaacccgaataaaatttctcttccgttcgccggaaacaaaaaacctctttcggctccaattcgaaggcggttcaatgtcattgctatggctccccc

SEQ ID NO: 1277 - DNA, 368 bp, Glycine max
  modified_base (356)..(356): a, c, g, t, unknown, or other
ggcacttcaattgcaatcaaattagttcattctctttgcgcagttccctacctctcctttcaagatgcagatcttcgtcaagaccctcaccggaaagaccatcacccttgaggtggaaagctctgacaccatcgacaacgtcaaggccaagatccaggacaaggaaggaattcccccggatcagcaacgtctcatcttcgccggaaagcagctcgaggacggccgtaccctcgccgactacaacatccagaaggagtcaacccttcaccttgtccttcgtctccgtggtggcatgcagatcttcgtcaagactctcactggcaaaaccataaccctagaggtcgaaagctctgacnacattgacaacg

SEQ ID NO: 1278 - DNA, 365 bp, Glycine max
gatagcaaaatcgtttctccaatttaatcaccattgtacaacccaattcccttcgtcgttttcgattaagagagcaatggcacgtaccaagcaaaccgctcgcaagtccaccggaggaaaggctccgaggaagcaattggcaaccaaagccgctcgcaagtcagccccggcgaccggcggagtgaagaagccccaccgcttcatgccaggaacggtggctctgagggagattcgaaagtaccagaagagcaccgaacttctgatccgaaaactcccattccagaggctcgtcagagaaatcgctcaggatttcaaaaccgatctccgctttcagagcagcgccgtttcggctcttcaggaagccg

SEQ ID NO: 1279 - DNA, 363 bp, Glycine max
ggtagtataggattctcttctttattccttttgtaatttcattcattcttaatctttgtgaaaaataatgttcatcgagaattttaaggttgagtgtcctaatgtgaagtacaccgagagtgagattcagtccgtgtacaactacgaaaccaccgaacttgttcacgagaacaggaatggcacctatcagtggattgtcaagcccaaatctgtcaaatacgagtttaaaaccaacatccatgttcctaaattaggggtaatgcttgtgggttggggtggaaagaacggctcaaccctcaccggtggtgttattgctaatcgagagggcatttcatgggctacaaaggacaagattcaacaagc

SEQ ID NO: 1280 - DNA, 372 bp, Glycine max
tggatgcgattggcaacatgcttgtgaagtttcctcctctactcacttacagtctgaacaagaagattagaccagtggtcatattcttgatgaccaaagctggagtcagtgagaaagatatcgccaaggttgtagctcttggacctgagctgttgggatgcaatatagcacataagcttgatctaaatgtaaaatattttttgtctcttggcatacgtcttcggcaattgggtgagatgattgctgattttccaatgctgctcagatacaatccagatgtccttcgtcccaaatatatttatttgcgaaaaacaatggtccggcctttgcaagatcttactgagtttccaaggtttttcagctattctcctg

SEQ ID NO: 1281 - DNA, 344 bp, Glycine max
gattgttgtcgtttcgttcctcactgtcactgactcactcttgttttcgcttcgctactcatcatcctaataagtaccatcaagaaacaaacaatgtttctcaaagtccagctgcactggaatgtcatcatcgctgctgaaaatctgcaaacggaaggtctgatgcttcataaggcaatcattgtccgccttctgagtgactttgctgtgaataatgccaccaaagatctgggatactttcttgcagtgaccacactggagaaaatacgggaaggaaacgtcacacaacatactggggatgtgctcttccctgtggtttttaatgccatcatcttcaagttttt

SEQ ID NO: 1282 - DNA, 53 bp, Glycine max
gagacctcaggtcaggcggggctacccgctgagtttaagcatatcaataagcg

SEQ ID NO: 1283 - DNA, 387 bp, Glycine max
  modified_base (323)..(323): a, c, g, t, unknown, or other
ggtaatataagattctcttctttaatccttttgtaatttcaatcattcttaatctttgtgaaaaataatgttcatcgagaattttaaggttgagtgtcctaatgtgaagtacaccgagactgagattcagtccgtgtacaactacgaaaccaccgaacttgttcacgagaacaggaatggcacctatcagtggattgtcaaacccaaatctgtcaaatacgaatttaaaaccaacatccatgttcctaaattaggggtaatgcttgtgggttggggtggaaacaacggctcaaccctcaccggtggtgttattgctaaccganagggcatttcatgggctacaaaggacaagattcaacaagccaattactttgggtcccctcacca

SEQ ID NO: 1284 - DNA, 375 bp, Glycine max
gacatacacacccacatcgaccatcttctctcttccctttcagatcacacgcacacagttacgctcttcaaatctatctcttctcagcgattcttgcttcaagttccagaaatgggtgtggctcaaaacattcccgatgcggaggagggaaccttggagattggcatggaatacagaactgtttctggagttgctgggccattggtcattcttgataaagttaagggacccaagtttcaagagattgttaacattcgcttaggagatggtactactcggcgtggacaagtgctagaagttgatggtgaaaaggctgttgttcaagtctttgacggtacatctgggattgacaataaatttacaactgtgcaattt

SEQ ID NO: 1285 - DNA, 368 bp, Glycine max
gatataacactgtcactcttacaatctcagctcatagcattcttcttcttccaacgagaatcagtctttgtgttccaaatggctcgtacgaagcaaacagcaagaaagtccaccggaggaaaagctccaaggaagcagctcgccaccaaggcagcacgtaagtccgctccggcgacgggcggcgtgaagaagccccaccgtttcaggccggggacagtggctctgagggagattcggaagtaccagaagagcacggagcttctcataaggaagcttcctttccagaggctcgtaagggaaatcgctcaggacttcaagaccgatctacgcttccagagcagtgctgtctccgctcttcaaggaagcgc

SEQ ID NO: 1286 - DNA, 340 bp, Glycine max
  modified_base (45)..(45): a, c, g, t, unknown, or other
gattcaaacgcacactctctctcaccaaagccttcctagaacganaaaaaaaaggagagcaattttccctcaccaaagaagaagaagcaaacaatggccgatcaacttaccgatgaacagatctccgagttcaaggaagccttcagcttgttcgacaaggacggcgatggttgcatcacaaccaaggagcttggaactgttatgcgttcattggggcaaaacccaactgaggcagagctccaggacatgatcaatgaagtggatgctgatgggaatggtaccattgacttccctgagttcctaaatctcatggccaggaagatgaaggacactgattctg

SEQ ID NO: 1287 - DNA, 368 bp, Glycine max
  modified_base (5)..(5): a, c, g, t, unknown, or other
gatanggttgttgtcgttgcgactaacagttgctgcttcttccgccactcagcacttcgctccctctgtgcttcaccaagcatggccgatatcgaagctaccgttccagatccctctcaaatcgacgtcaaacttttcaaccgctggagcttcgacgacgttgaggttactgatatgtctctggctgattacattggagtgtccccgtcaaagcatgctacatatgttcctcacactgctggtacgtactcagtgaagaggttcacgaaggcgcagtgccccattgttgagagactcaccaactctctcatgatgcacggaaggaacaatggaaagaagctcatggctgtcacgattatcacgcatgc

SEQ ID NO: 1288 - DNA, 352 bp, Glycine max
ggcccaaaatattttcatagcattttcagaggaaaatggcgggtacggtttcgacttgtttcttcttcgtgtttcttctttctctccttcttccttttcagatctccgctgaggaatcctcggagaaggagttcgtactcacattggatcactctaactttcacgacactgtcagcaagcacgatttcatcgtcgtcgagttctacgccccatggtgtggtcactgtaagaagcttgctccggagtatgagaaagctgcttctatcttgagtagtcatgatcctcctattgttttggctaaagtagatgccaatgaggagaagaacaaagaccttgcatcacaatatgatgt

SEQ ID NO: 1289 - DNA, 402 bp, Glycine max
  modified_base (395)..(395): a, c, g, t, unknown, or other
ggcgtacgcagcttcatccctaacgcgtgcatagcagagtcagagacagagacgcagccatggggcggagacctgcgaggtgttataggcaaattaagaacaagccataccccaagtcacgtttctgccgtggtgttcctgatcccaagatcaggatttatgatgttggtatgaagaagaagggtgttgatgagtttcctttctgtgtccatctggttagttgggagaaggaaaatgtttcaagtgaggccctggaagctgctcgcattgcttgcaacaagtacatggccaaatttgctggaaaggatgctttccacttgagagtcagggtgcacccattccatgttcttaggatcaacaagatgctttcgtgtgctggtgctgataggctccanactggaa

SEQ ID NO: 1290 - DNA, 356 bp, Glycine max
gacagaaaagaaaaaggaaaccctagctggataggtcaaacatcatcatgtcggacgaagagcaccatttcgagtccaaggcagacgccggtgcctccaaaacctaccctcagcaagccggtaccattcgcaagaacggctacatcgtcatcaaaggacgcccctgcaaggttgtggaagtttcgacttccaaaactggaaagcacggtcacgccaagtgccactttgttggaattgatattttcactgccaagaaacttgaggatattgtgccctcttctcacaactgtgatgttcctcatgtgaatcgtactgattaccagctcattgatattgctgaggatggatttttgagt

SEQ ID NO: 1291 - DNA, 166 bp, Glycine max
tcatgtcctaacttacgtgacgaaacttgagggacattattaaaactacaagagttgaatcttccatcaatgctctgacccctttccagatctcattcctctctcgtttcctcatgtgcaccatgtgcacactcataggcccactacaatgatagggctctccctc

SEQ ID NO: 1292 - DNA, 384 bp, Glycine max
gatccatttctcgcaacaacgcttaacctctctcattccccatttcctcacctccttcaaccgctgctaaattctagggttccgaaatggacgctggcggaaagatcaagaagggcgccggaggtagaaagggcggcggcccaaagaagaagccggtttcaaggtccgtcaaagccggtctccaattccccgtcggaagaattggccgttatttgaagaaaggaaggtacgctcagcgtgtcggtaccggtgctcccgtatacttggctgcagttctcgaatacctagctgccgaggtgcttgagttggctgggaatgccgcacgtgacaacaagaagaacaggattattccaagacacgtgcttttggcagtgaggaacgatg

SEQ ID NO: 1293 - DNA, 386 bp, Glycine max
ggcattttgtatcgatggctagtgctgtcagtaaggtttccggcgacctgaagtcgtcgagtttcgatcgtgtcagagaagcaccgccgccgcctcctgattcctcccttcttttggctaccagacctcccagacaagcggtgtcatactggacatgctcaaagctttgtgcattttgttttgttgctggagcggttttcggttactcgctcaggggacgagttaagcgctgggcttccaagatgctcaagaagctcagctgaaactaacataattcaatgattctcgttaaaggtagtcatttggtttggttagacttcaccttcatagattacatgtaaaacaatgatatcaattttgtgaaatttttagacgctccgtcattg

SEQ ID NO: 1294 - DNA, 358 bp, Glycine max
gagcattagttagagcgagacaacacctcagagaacccaaattccgcgtcaagaggttagggtttggcgtttctgcgagaagaagaagagagagcagaagcagcaatggaagcatacggcggcttcatggtcgacgagaaagccgttagggttgagaacgctttccttgatttcctcaaaagcttcaagtctagtagccagcggaacgaactttattacgaagcggagatcgaattgatgaagagcaatgaatccaacagcatgttcatcgatttcgaccacgtcatcagattcagcgacctcctccagcaaaccatctccgatgaatacttgagatttgaaccttatttgaagaacg

SEQ ID NO: 1295 - DNA, 379 bp, Glycine max
ggatcgaaacaaagaagccacgcaaggcaagggttttcatcttttccacaacagtcgaacggcgaacgttcgcaagagacgcaacacaaagttgaacgaggaataggcgtgtagggaaaccgtttcattttcaagcgcgtgactttcaaatccaatcttccataccaatggccttcagcaacgctctcagatctgccgcgaagcttgtcgcttcttccgaatcctccctctctaactcagtgagcagaggttttcattcaactggcatgaagaggatgggaggtggacatggccatgatgagccctattatcttcatgcaaagcacatgtacaacttggacaggatgaagcaccaggggttgaaaatgtcccttgctgt

SEQ ID NO: 1296 - DNA, 377 bp, Glycine max
ggaggccaaaatatctgttcactgattaaagataaacacagagacagggattccagaaccagcgatgaaacctcaaacaaaacataactaaactaaactaaattaaaagtaaaaacaaaacatgttggtttttcaaaatcaatggctgtgtcttcctctcactcattcccttttctccaagttacttcccagaacaaaacatgcagcaacagtgttatccccaagactatgccccgtttggtgtcattcagtagctcgtgccaccactctgcccacttctccaggtggggcggagcaagttgtggacagttcgtttgatgcacctaaagtgaaattattgaagcagaaaatggaacttcttggtatcaacttggaaa

SEQ ID NO: 1297 - DNA, 420 bp, Glycine max
ccaacccttcaatagggtggcaaaaaaacaaaaaaggggaaccaaaaatttgtaccgaaagggcttaacttgggggccccctttttccctgtgcatttcagggttataaggttaggttccttacaaccaataattgaatgtttaacaaaaaagtccccaacgtccctatccacaatacccgtggaaagactcacccaactcaacttttatttccataacaacataatgggggaacacccgactgctatgaaaattgttgagcctcctaaggcgtccatttctggttttgggactatttacatgatggatgaacctctaaccgaaggaccaagtccaacttcaaagcttgttggaagatgtcagggaatatatgctgaggcttcgcaacactgaactgcgatactcatggtaacgaatttg

SEQ ID NO: 1298 - DNA, 407 bp, Glycine max
ggagagcagcaacaaacaaacgcagaactgcccaatcttcaagctaacataaacaccatggaagccgtccaagtcatatccaccactacaatcaaggcaccaccgagtcacaataaccatgactcagttcagaaaatcgatttaactccctgggatcttcagttcctcccaattgaaaccattcagaaaggccttctttttcgcaacaaaaaacacacagaaaaccaaatcgagcacctccaacactccctttcatccactctcgccttctttccacccctcgcaggtcgtcttgtcattctccaacaccacgacaacactgtctcgtcccacattgtatgcaacaacgcaggagcactctttgtccacgccgttgcagacaacaccactgtcgttgatattcttca

SEQ ID NO: 1299 - DNA, 342 bp, Glycine max
gacacaccatccgttctagtctcaacttctgctcttccaactcctacaacgcttttctctgcactcatgggcaaggtcaagatcggaatcaacggatttggaagaattggccgtttggttgccagagtcgctctgcaaagagacgatgttgaactcgttgccgttaacgaccctttcattaccaccgattacatgacatacatgtttaaatacgacagtgttcacggacactggaagcatcacgatgtcaccgttaaggacgagaagacccttctcttcggtgacaaggcagtcactgtttttggacacagaaaccctgaagagatccatgggggtcaactg

SEQ ID NO: 1300 - DNA, 398 bp, Glycine max
ggcgtacacagcctcaacaaccctaacgcgtgcagagcagagagagacgcagccatggggcgaagacccgcgaggtgttataggcaaattaagaacaaaccataccccaagtcacggttttgccgtggtgttcctgatcccaagatcaggatttacgatgttggtatgaagaagaagggtgttgatgagtttcctttctgtgtccatctggttagttgggagaaggaaaacgtttctagtgaggccctggaagctgctcgtattgcttgcaacaagtacatggccaaatttgctggaaaggatgctttccattgagagtcagggtgcacccattccatgttcttaggatcaacaagatgctttcgtgtgctggagctgataggctccgaactggaatg

SEQ ID NO: 1301 - DNA, 364 bp, Glycine max
gaagaaagtgagggaaaaaagtagagtggtatgtgggttgctgcggcaacaaaaccattcatcaaattccaattccacagacacactacttctcttccgcttcttctgatggcaaaccaagcttcactctccttttcttcttccgtgtctcctgttcacgcgcctctcaagcgcgtgggcacgcacaacggaagctttcattgcgacgaggccctcggctgcttcatgattcgcctcacgaacaaattcaacagcgccgaaatcgttcgctcccgagaccctcaagtgttggaggttctcgatgctgttctcgatgttgggggagtgtatgaccctgcccgagatcggtatgatcatcatcaaa

SEQ ID NO: 1302 - DNA, 383 bp, Glycine max
gactcactcatacaatagagaccagcttttgcttctttgtgaacatggagatgaggaaatcatgtggcttcttcttcttgctcctcctccttgtctttgcttcccaggtggtggtgcagacggagggaagagtgtgtgagtcacaaagccacgggttccatggtttgtgtaatagagaccacaactgtgctttggtctgcaggaacgaaggtttctccggtggcaggtgcaaaggcttccgccgccgctgcttttgcaccaggatttgttgagatctcatcaaacactactcttgccatgcaaattaataaatcatagctaggccaaataaattgcatctactctttatccatttgggagctagcttacacaaacaactcata

SEQ ID NO: 1303 - DNA, 325 bp, Glycine max
cgggatattgaaaaggcgcccaagcaagtttgttctttcgccgccgtcgctcaaaactcgcaaaccacaatgcctaagcagatccacgagattaaggatttccttctgacggcacggaggaaggatgcgaggtcggtgaaaatcaagaggagcaaggatgtcgttaagtttaaggttcgatgctccaagtatttgtacacgctttgtgtccttgatcctgagaaagccgataaattgaagcaatctcttcctcccggtttgagtgttcaagacctgtagaagtgctgagtgccgcagcgtgcgtttgtttatccttttgttgcct

SEQ ID NO: 1304 - DNA, 404 bp, Glycine max
  modified_base (356)..(356): a, c, g, t, unknown, or other
gcagccactctgtgagagaaagagatagtgtggtagagagagaggagcggaggagagaaaatgacgacgaggttcaagaagaacaggaagaagagaggccacgtcagcgccggtcacggtcgtatcgggaagcaccgcaagcatcccggtggtcggggtaacgccggtggcatgcaccaccaccgcatcctcttcgacaagtaccatcccggtttcttcggaaaggtgggtatgcgctacttccacaaactccgcaacaaattctactgccccatcgtcaacattgataagctatggtccctcctaccccaggaggccaaggacaaggccaccgccgacaaggcgccattgctcgnatgtcaccagttcggttactttaaggttttgggtaaaagggttttgcc

SEQ ID NO: 1305 - DNA, 381 bp, Glycine max
gaacacttccaattctctttctttctccctctctagggtttcgaagatgttctcgggatcccaattcgacgccaccaccgccttctccggaggcggtttcacgtcctcccagccgtctaccctcaacgattcttctcccgcgccgtcaaacagccgcgaaactccgggtttggtgccggtgacagtgaagcagataagcgaggcctctcaatccggtgatgaaaagtcgaatttcgtgatcaacggtgtagatctgaacaatgtaacactggttgggatgatgtttgagaaagttgagagaaatactgatgtcagttttgttttggatgatggaacaggacgaatcaaatgtcgaagatggattaatgaggcttttgacac

SEQ ID NO: 1306 - DNA, 79 bp, Glycine max
gccggtttcccgaacgatttgatggtttggaatgcatttcccaagcaacgagtcctcggttcgaaaccagcagagagac

SEQ ID NO: 1307 - DNA, 279 bp, Glycine max
  modified_base (118)..(118): a, c, g, t, unknown, or other
tgggtaccttagatgaaggtcagtgaagatttcattctaataatgcataaacacatgaagatggcttggctccaatccgttatacctcttcatgggccctctctatttactgaccagnggccatcaagcaaggaggaataaattctgtaggtatacacgtttctgtttaaagatctcaatgggagtttgttctacaattatggatgagtacagttatcttgtaaactagaaatttggattaacaatgtaacaattctctgtgtgatgcattgccatttc

SEQ ID NO: 1308 - DNA, 360 bp, Glycine max
ggccgtcacacagagagagaagagacaatgaagtttaacccaagggtttcctcaagccgtcgaaagagccgcaaggctcacttcaccgctccgtcgagcgtgcgtcgcgtcctgatgagcgcgcctctctcgaccgatctccggtcgaagtacaacgtgcggtccattccggttcgcaaggacgacgaggtgcaggtggtgaggggaacctacaagggccgcgagggcaaagtggtccaggtctatcgccgcaagtgggtcatccacatcgagcgcatcacccgcgagaaggttaacggctccaccgtcaacgttggcattcacccttccaaggttgtcgtcaccaagcttcgaatggac

SEQ ID NO: 1309 - DNA, 400 bp, Glycine max
ggtctcgctctgcacaaaccctaacaccaaaaccagaagcgaaatcgcaatcgcaatccagcgaatatgaaggtcgtcgctgcatacttgctcgcagtgttgggagggaatccttccccttctgccgatgacatcaaacacatcctcggcgcagttggagctgaggctgagaatgagttgattgagttgctcttgactgaagtcaagggaaaagacttcaatgagctaattgctagtggaagtgaaaagatgtctgcagtgtctggtggcggtgcagcggttgccgttgctgctgcaccagctggaggtgctgctgcacctgctgccgaagcaaaggaagaaaagaaagtagaagagaaggaggagtctgatgatgatatgggtttcagtttgttcgact

SEQ ID NO: 1310 - DNA, 376 bp, Glycine max
ataactaataggtagagacaacgccgtttgagtcgcgtctgataataaaaatacacagtgagctctcgcttctagccctagggcgctgctcccgattttctctcttcggattgagtgaattgtgaaatgggttggaaagctgctgagaaactcattaggcactggaaagttgtcagaggggataatgttatgataataaggggcaaagataagggcgagactgggactattaagcgtgtcattcgctctcagaatcgtgtcattgttgagggtaaaaatctggtgaaaaagcacatcaagcaagggcaaggtcatgaagggggcatctttacagttgaagctccaatccatgcctccaatgtgcaagttcttgacc

SEQ ID NO: 1311 - DNA, 378 bp, Glycine max
gacaactcaaactgcttcattgcataattgcagataagatcaacccttctaccttcagattcgcgggaagatggcatcacttcatgccaatgtgacatcagttgtttacaacagtggcaaccgtgtttctcaatcgaaatttgcaagctcttccttcttgtctgggttcgatgttgttggtcgtgcttcaagtgcttggaagaaggaacttgtcccatcttccatttccttggtgcctagagccaccctaacatttgatcccccaactaccaattcagacataaccaagcaagagaagcacactcttgaccctgcttctccagattttcttcctcttccttcatttgaacagtgctttccaaagagcatcaaagaaca

SEQ ID NO: 1312 - DNA, 399 bp, Glycine max
ggttctagtgtgtgattgtttgttgttgtaactcgttcttcttcttttgttgttctgtgtttgtgtttgttttttctctcacctgaaaatgtcttgctgcggtggtaactgtggttgcggaagctcctgcaagtgcggcaacggctgcggaggctgcaagatgtacccagacttgagctacactgagtcaaccaccaccgagaccttggtcatgggagtggcacctgttaaggctcaatttgagggtgctgaaatgggtgtgcccgctgagaacgatggctgcaaatgtggaccaaactgctcctgcaacccctgcacttgcaagtgaggtgttgggagagcaagcttcaagcagagatagcccttaattaagaataatgataaactattaatgtgtag

SEQ ID NO: 1313 - DNA, 381 bp, Glycine max
ggcagccaaagaaaagaaaatcctcaattttctgagcagccaaacactctctctctgtctctcgaaaattctcagtttgcagagaaaatctgaatcatgtcgtggcaagcgtatgtcgacgatcaccttctgtgtgacatcgaaggtaaccacctcactcacgctgctatcatcggccaagacggcagcgtttgggctcagagtaccgacttccctcagttcaaacctgaggagataactgccatcatgaatgactttaatgagcctggatcacttgctccaactggattgtatctcggtggcaccaaatatatggtcatccagggtgaacccggtgctgtcattcgagggaagaagggtcctggtggtgttactgtgaaa

SEQ ID NO: 1314 - DNA, 368 bp, Glycine max
gaaggcctgagattcggttctttacttgttgggttgttctgatcttctctcatagcaatcaaatcacactcccatcttctcatctcgtaaaccctaaaccccgttttcagtgacatcgagatcgatcgaacatggatgaggagtacgatgtgatcgtgttgggcacgggtctcaaggagtgcattctcagcggtcttctctccgtcgatggcctcaaggttctgcacatggacaggaatgactattacggaggagaatccacttcgctcaatcttattcagctttggaagagattcaggggagatgacaagcctcctccacatttgggagctagcagggactataacatcgatatgaaccctaagttt

SEQ ID NO: 1315 - DNA, 351 bp, Glycine max
  modified_base (9)..(9): a, c, g, t, unknown, or other
gaaaaacanactccgaaagaaacagtcagaatcagaatcagaagaagcgagcaaagatgtcgggtcgtggaaagggacgcaacggtttgggtaagggaggagccaagaggcacatgaaggtgctccgcgataacatccagggaatcacaaaacccgccattcgccgtttggctcgcagaggcggcgtcaagagaatcagtggcctcatctatgaagaaacccgcggcgtccttaagatcttcctcgagaacgttattcgcgacgctgttacctacaccgagcatgctaggaggaagactgttaccgctatggatgttgtttatgctctcaagaagcaaggcaagactctct

SEQ ID NO: 1316 - DNA, 397 bp, Glycine max
agggattgttgctgtcatcatccgcagctgctgttattcgcatcgcagactaacagtgagccatggccgtcggaaagaacaagcgcatctccaaacgcaaaaagggtggcacgtaagaacgcagctgatcccttttccaagaacgactggtatgacattaaagccccttccctttttcaactgaaaaatgttggcaaaaccctcgtctctcgtactcacggtaccaagactgcttctgaaagacctacccatagactgtttgaggtctccctggctgatcctcaacgggatcacgatcaagcattcacgaacactaagttgagagctgaacatgtgcaatggaagaatgtcctgaccaatttctggggaatggatttcacaactgacaagctgacgt

SEQ ID NO: 1317 - DNA, 403 bp, Glycine max
gatgccgaaaagtagtaccaagatggcttcagttgtgtatctcctctttggcttccatctcattgttatcatgtcaagttccttacccgcaactagtgaagtgtttgcaaaacagtatccatccacagaacccgtggaagaaaaactcacccaactccacttctatttccataacaacataacgggggaacacccaactgctatgaaaactgttttgcctcctaaggggtccattcatggttttggggctacttacatgatggatgaccctctaactgaaggaccaagtccaacttcaaagcttgtgggaagatctcagggaatatacgctttggcttcacaacatgagcctgggttgctcatggtgacaaattttctcttcactttgggcatttacaatggc

SEQ ID NO: 1318 - DNA, 367 bp, Glycine max
ggccgaaaagtagtaccaagatggcttcagttgtgtatctcctctttggcttccatctcattgttatcatgtcaagttccttacccgcaactagtgaagtgtttgcaaaacagtatccatccacagaacccgtggaagaaaaactcacccaactccacttctatttccataacaacataacgggggaacacccaactgctatgaaaactgttttgcctcctaaggggtccattcatggttttggggctacttacatgatggatgaccctctaactgaaggaccaagtccaacttcaaagcttgtgggaagatctcagggaatatacgctttggcttcacaacatgagcctgggttgctcatggtgac

SEQ ID NO: 1319 - DNA, 313 bp, Glycine max
gaattccccattcccaaaatttctcattctccctttcctctccgaaccctcgatcactctcacgcgctcctatattcgctcctccaccgtcgctctctcgaacaaccacaacaccatcttcatcacatggcaaacgcagcatctggtatggcagtccatgatgactgcaagttgaggtttttggagctgaaggcaaaaaggacacaccgtttcatagtttttaagattgaagagcagcagaagcaagtcattgtggagaagcttggtgagcctgcccaaggctatgaagatttcactgccagccttcctgctg

SEQ ID NO: 1320 - DNA, 361 bp, Glycine max
gattgtaaagcattcttcgcctttctctctcttctttttactctctctctgtctctctctacgctttctcgttcgagatccctcaagggatccactaactgaaggagaaatggggttgacattcaccaagcttttcagccggcttttcgccaagaaggaaatgcgaattctgatggtgggtctcgatgcagctggtaagaccgccatcctgtacaagctcaaacttggagagatcgttaccacaattcccaccattgggttcaatgtggagactgtggaatacaagaacattagtttcactgtctgggatgttggtggccaggacaagattcgtcccttgtggaggcactacttccaaaac

SEQ ID NO: 1321 - DNA, 267 bp, Glycine max
gagcaacatggtgaagctggcggagagatttacttgccagaagcttacgttagaaccaagaggactacttaatggagcaaatcagttggaagaacttgtagctagcttcccaactggcttatctgagtgtggagaagcattatcaagccttaggagtaggagaacgagtactgtttgtgatgaatgtctatggtttaagaaatctgtctttagtcaacttgtgtgttttgttattcagttctcagcaataaactgctctggcaatct

SEQ ID NO: 1322 - DNA, 378 bp, Glycine max
  modified_base (342)..(342): a, c, g, t, unknown, or other
gatttgaagaaaaagacaaagcagtagcagatcgaagataacaatgtctttatttgctagaagtgtttccacactactggtgcttatattgttattaccaacgttgaacaatactatggcagagaaggcacttattggggttacaaataatttgggaagtcgaaacttaactgtttcctgcaagattgataatcatccacaccttctcggccccactgattactatgagtggaagttttctcctgaatataatgacgaatttggaactgaaccattattcagtaattgttcctttcaatgggaaggtgcccatcactcatttgatctctacgtacttgttanggatggtgattgcaacaattgctcatggcatattaa

SEQ ID NO: 1323 - DNA, 370 bp, Glycine max
ggcactgcaactttgctctctgtgaggcttcaatttctaattagggtttcgcttagagtaaccaataaccatgggagtcttcacctttgtcgtccgcaaatccggcagcgaatggagcgccaagcaacattccggcgacatcgaggcctccgccgattccaccttcgatctccaacggaagctcgtgcaggccgctctcgccgttgattcctccggtggagttcagtcctctttctctcccgtgtctcctacctccgctgtgttccaagtgataatgggtggtgcagtattcgttggaagtggtggtgctgttgcaactgcaactgcaagtggtgctgccgcagctgatgctgccccagctgctgagaaa

SEQ ID NO: 1324 - DNA, 111 bp, Glycine max
gggacaaaaggattgatcgcgaaaaagatttcttgttcttattagaagatcgtgattggatccacatatgtttggtaaaaagaaagaaaaatattcttctttgagaataat

SEQ ID NO: 1325 - DNA, 348 bp, Glycine max
  modified_base (340)..(340): a, c, g, t, unknown, or other
ggtgtgagttgagtctgtgatgataatgatgatgatgatgtgttccatgtggatgtgggttgtccttgtggccattgctggtgcccttttagtcctaagatctatcctcaagaatgtaaattggtggctctatgaatccaaattgggtgtgaagcagtactctttgccaccaggtgacatgggatggcccttcattggcaacatgtggtcctttctcagtgctttcaagtccaaggaccctgattccttcatctcctcctttgtctccagatttggaagaactggaatgtacaagaccgtgatgtttggaaatccaagtataattgtgacaacacctganatatgcaa

SEQ ID NO: 1326 - DNA, 371 bp, Glycine max
  modified_base (335)..(335): a, c, g, t, unknown, or other
ggtctctcttgaggttgcagacttagaaagagagagagagagagaatgggtctcatctcaatgcaatttaggttctgaaaaccaaagcttttcataggaaaagttgtgctaagatgccagggaaacctgacactgatgattggcgtgtagagcgtggggagcagattcagtttcagtcttccatttactctcatcatcagccttggtggcgcggagtgggggaaaatgcctccaaatcatcttcagatgatcagttaaatggttcaaccgtgaatggtatcacgcggtctgagaccaatgataagtcaggcggaggtgttgccaaagaataccanaacatcaaacatgccatgttgtcaaccccattttac

SEQ ID NO: 1327 - DNA, 265 bp, Glycine max
atcctttttggtaatttatttctatttaattattgattatattggataacttttcaatctaaaaaaaaaaaaaaaaaaaaaaaaaaaaaaaaaaaaaaaaaaagaacaaaaagaaaaaaaataaaaaaaaaaaaaaaaaaaaaataaaaaaactagcaaaaaaagcaaataaaagataaacacatggcacttcaaaaaaaacgtagaagaatgaaaaaataaatggtaatagacaactaagcctccatgaagaacatcgcgactg

SEQ ID NO: 1328 - DNA, 332 bp, Glycine max
ggtctcgctctgcacaaaccggatcaccacaaccagaagcgaaatcgcaatcgcaatccagcgaatatgaaggtcgtcgctgcatacttgctcgcagtgttgggagggaatccttccccttctgccgatgacatcaaacacatcctcggcgcagttggagctgaggctgagaatgagttgattgagttgctcttgactgaagtctagggaaaagacttcattgagctaattgctagtggaagtgaaaagatgtctgcagtgtctggtggcggtgcagcggttgccgttgctgctgcaccagctggatgtgctggtgcatctgctgccgaagc

SEQ ID NO: 1329 - DNA, 373 bp, Glycine max
ggttctagtgtatgtgattgttgtgactcgttcttcttcgtcattagcttcttcttatgttgtctgtgtgtctgttttttctctcatctgaaaatgtcttgctgcggtggtaactgtggttgcggaagcgcctgcaagtgcggcaacggctgccgaggctgcaagatgtacccatacttgagctacaccgagtcaacgatgacctagaccttggtcatgggagtggcatcagttaaggctcaattcgagagtgctgaaatgggtgttcccgctgagaacgatcgctgcaaatgtggagctaactgcacctgcaacccctgcacttgcaactgaggtgttggagagctaaagcttcaatcagaaatggccctta

SEQ ID NO: 1330 - DNA, 302 bp, Glycine max
  modified_base (251)..(251): a, c, g, t, unknown, or other
accattgcacatggtggtgtgcttccaaacattaaccctgttttgttgcctaagaagacggagagggctgccaaggagcctaagtctccatccaaggctactaaatctcctaagaaggcctagattatcctttttttttttttttttttaaatctagtgttgtatatcggtgcttagatgcttttggtgtaacaggaaatttgatgtgtttcttaaacattgtaattcttgtcccattgtgttgcttgtangagtgagtttgctttattaatgaaaagtggaaacctcttgttttcaatcgg

SEQ ID NO: 1331 - DNA, 291 bp, Glycine max
gaggtttctctctcccgtatacatcttgaacctaccgcgtttccgtgacagagacatcgcagtggcgatgaggcctacgccgtgttagcggcagatgcaaatcaatccataccccaactcccgtttctgccgtggtcttcctgatcctaatatcagaatctaagatgttggtattagtatgaaaagtgttggtgattatcccttctgcgttcatctggatatcttggactaggaaaatgtttcaagtgcagctgtggcagctgctacaactgcaagcaccagctatatggc

SEQ ID NO: 1332 - DNA, 359 bp, Glycine max
gggttcgaatgttggaatcaaagcaggagagaagatggaaaacagtgaggaacaaaagtacagagtccggagattagagatctcagacaagggaaaaggcttcatcgagttactgcagcaactcagcgtatgcgattccgtctccgacaaggaattcgaggatcgattccgagacctcagtgttctcggcgacgagcacgtgatcggcgtgatcgaagacgaggcttccggaaagatcattgcgacggggagcgtgtttatcgagaagaagtttttgaggaattgcggtaaagttgggcacattgaggatgttgttgtggattctagcatacgcgggaagcatttggggaagagaatga

SEQ ID NO: 1333 - DNA, 366 bp, Glycine max
ggagaaatggagcattttgtttggagggtgttgcctttgctcacaatcctcatttccttagtagtattcttctacttgcaggattcttacagggcccatttgcatcctctcgtaaagttcccgcggaataagtgcagccttcttccccatcgtcatttctggataaccagcaaacgcattgtgaccccacaagggatcatttctggttcagtggagataaatgaagggaaaataatatctgtcatcgagggatatagtaagcaggggaagtctaagcaagaaaaaataattgattatggagatgctgttgtcatgcctggcttgattgatgtgcacgtacatcttgatgagccaggaagaactgca

SEQ ID NO: 1334 - DNA, 360 bp, Glycine max
ggatttagaattaaaataaaatagtgagggaattgattgatactatactagtgagaaaagaaagggaagtcctccgcgccgccactcctcccatctctctgctctaaacgacaccgttttagtcttctcctcaagtcatggccacactcaagagcctctgcttcagaggaactgcctttcccgtttgcccctccaatgtcaccaacaatagaaactccaggagctcatattggaggcctgcacaagcagccgtgaagcccaatttccatctcccaatgcgcagttttgagttaaaaaataggacttctccagaggacataaaggctctgagattgataactgccattaaaactccatacc

SEQ ID NO: 1335 - DNA, 376 bp, Glycine max
gaccacttcaaaacactcataacacaaagcacaaagcaaagctcatccttgagttaaaaaatggcagcagcttcttccatggctctctcatccccatccttggctggcaaggccgtgaagctgggcccatcagccccagaagtgggaagggtgagcatgaggaagaccgtcaccaagcaggtctcctcaggaagcccatggtacggcccagaccgagtcaagtacttgggcccattctctggcgagcccccgtcctacctaaccggtgagttcccaggcgactacggctgggacactgctgggctttccgcagacccagaaaccttcgccaagaaccgtgaactcgaagtgatccactccaggtgggccatgctcg

SEQ ID NO: 1336 - DNA, 372 bp, Glycine max
gacggacgagggtttcgtttcgggtttgacgttgttcacaatcactttctgcgcttcactcactcccttcgtgcggttttctttctttgtcgaactcgtgcgaaaatgcgtgagattcttcacatacagggagggcaatgcggaaaccagatcggagcgaagttctgggaggtggcgtgcgcggagcacgggatcgattccacggggaggtaccagggggacaacgagttgcaactcgagcgagtcaacgtctattacaatgaagcgagttgcggaaggttcgtgccgagggcggtgctcatggatctagagccagggaccatggacagcgtcagatctggtccctacggtcagattttccgacctgataac

SEQ ID NO: 1337 - DNA, 380 bp, Glycine max
ggaaaaagggtgttatgttatccgaagcagggtggattgaaaagcacgaacaggagcgatggccgcggcaacgttgtacttggcaaaaccgccttcgtcttttactcccaaaatcccgtttccaagagtgagggacagtggaattggaactgtaaagtgtcaagttaaaacccaagtgaaagcgggtatcctgggactgggtctgggtctgttccacttccttaacttcgtcgaacccggttcatgtctccaactgcaattccacgaaccccccaatgccctctctttgcccacatgggccattcacgtgtccagtgtcgctgaatggattatagctatggctttggtgtggcaatacggagaaaaatctggatacccag

SEQ ID NO: 1338 - DNA, 395 bp, Glycine max
gattggcagtagtagcaacgtcgttgtgtggcggtgacaaccatggccgactcatctcaagaccttgaccaacctctcgatagtgctttggatgattttcagtccttcaacctcaatcctccccctccaagtggggaagcaactgcgaatagcaagaaggagagtccttctttgccgtcgggggttcaaggattgggcatgggtttacccgatttgagaacgaagaaaaaggggaaacagaaggcttccaaagacagccacgtgtcggaggcgctcaacaagctcagggagcagaccaaagaggctgtgaaggggctggagtctatatccccacccactgccgatgatttacgtaaggatgccttgatggaagattgggtcaaacatttgagcag

SEQ ID NO: 1339 - DNA, 399 bp, Glycine max
gagcctcagcagaagcagaacgaggagaagcagaaggagcaaaagcaatggcgccgaagaagccgagaaccacgacaaggaaccctgatttggttagggggattggcaagtattcgaggtcgcagatgtaccacaagaggggcatctgggccatcaaggccaaaaacggtggcgttttgccccgccacgatcccaagcccaagcccgaggccccggcccagaagccgcccaagttctaccccgcggacgatgttaagaagcccctcgtcaacaagcacaagcccaaacccgcgaaactcagggctagcattactccagggactgtgttgatcctgcttgctgggaggttcaagggaaagagggttgttttcctgaagcagctcccatctggattgcttc

SEQ ID NO: 1340 - DNA, 365 bp, Glycine max
gatacctaaaaattgtaccgatatggcttcacttgtgtgtctccttttttccttgcatttcatggttatcatgtcaggttccttaccagcaaatagtgaagtgtttacaaaagagtctcctatgtctctatccacaaaacccgtggaaagactcacccaactccacttttatctccataacaacaaaatgggggaacacccgactgctatgaaaattgttgagcctcctaaggcgtccatttctggttttgggactatttacatgatggatgaccctctaaccgaaggaccaagtccaacttcaaagcttgttggaagatgtcagggaatatatgctgaggcctcgcaacatgaacctgcgatac

SEQ ID NO: 1341 - DNA, 386 bp, Glycine max
gactttagtttcgcaaagttgattctttctctctttatctttctttccccaatttgtgagtgttactgttgaatcgattggattggcattaggttgatctgaaatacgcaattgacatggcgagcgcgatggtagaggacgcgaacttcgaagatgaccaactagccaatatgaccaccgacgacatcgtcagagcttctcgtcttctcgacaacgagattcgcatcctcaaggaagagttgcagaggaccaatttggaattggaatcgtacaaggacaagatcaaggagaatcaggagaagattaagctcaataagcagttgccctacctcgttggcaacattgttgagatattggaaatgaacccggaagacgaagctgaagaa

SEQ ID NO: 1342 - DNA, 308 bp, Glycine max
gatcaccatgacggtcgccagcaccaagagactcttcaagatcacgctctctctcctccgcctcggcttcaactcctccaaatgcaaaacggcagccaagatggccgtggccaggatcaagctgctgagggacaagcgagaggtggtcgtgaggcagatgcgtcgcgacattgctcttcttctccagtctggtcaagacgccaccgctcgcatcagggttgagcatgtcatgagagagcaaaatgttttggctgcaaatgagttcattgaactcttctgtgaattagtggtggccaggctcgcaatca

SEQ ID NO: 1343 - DNA, 381 bp, Glycine max
ggacattgctaaaccttaaaccctaatttttacaatccgagggtgaagagtttgatgggtcagcgaaagaacgacaacaacatcaatcagtgctcctcaagcaaggaagacgctgacatgaataacaaccaccttcgctttgaagaggctgtcgacgagagttccaacctcgaccaatccatgtgcgacatcgaagaatccgatgataaaaccagcgccgactattacttcgattcctactctcattttggaattcacgaagagatgttgaaggacactgtgagaaccaagacatatcaaaatgttatttatcagaacaagtttttattcaagaataaagtagttcttgatgttggtgctgggactgggattttatcacta

SEQ ID NO: 1344 - DNA, 254 bp, Glycine max
ggcgagattgaatcgtaagcagcggctaccctaatcctctcctcttcctctctactaatttcagctatggccgacgaagctgtggttgttccagatcccacccagatcgatgtcaagctctttaaccgctggagcttcgacgatattgagattactgacatttctctggctgattatatcggagtggcgacatccaagcacgccacgtatgtgcctcacaccgccggcaggtactcggtgaagcggttcatgaa

SEQ ID NO: 1345 - DNA, 57 bp, Glycine max; identical to SEQ ID NO: 410

SEQ ID NO: 1346 - DNA, 260 bp, Glycine max
caccaaaggcagagaagaagccagcagagaagaagcctgtggaggagaagaaatcgacggtgggagacaaggctccggcggagaagaagccaaaggccggaaagaagcttccgaaggagggaggcgccggcggagaacgtaagaagaagaagagagagaggaagagcgtggagacatacaagatctacatcttcaaggttctgaagcaggttcaccctgacattggtatctcaagcaaggccatgggaatcatgaacagc

SEQ ID NO: 1347 - DNA, 374 bp, Glycine max
gagagttgcatcgactgaaacccctaggaaaaaccccagtttctctctttcactagttccgttcaagttctaaccaagcactcacagtacttttgcttctctcgaagatgtctctacgagtgctgaaccctaacgccgaagtgctgaacaaatcggcggcacttcacatgaacatcaatgccgccaagggtttgcaagatgtcctcaaaaccaacctcggtcccaaaggaaccatcaaaatgctcgttggtggtgctggtgatatcaagcttaccaaagatggcaacactctcttgaaagagatgcaaatccaaaacccgacggcgattatgattgctagaacggctgtggcgcaggatgatgctagtggtgat

SEQ ID NO: 1348 - DNA, 364 bp, Glycine max
gatgacattgagaacaggatacaacagatgaaagaggtgacaagccagacattatcacaccttgaagaggagaatgaatctactcttgctcagatggctgaactcaagaaaattttgtatgcgacgttcaatgactcgatcaatcttgacgaggattagtaactttcttcttgtcgatagatttctagttgttgttttcatgttaagatgaacgaatggacatttggcacttttgagtcagattgtctcatatgatctgattttatgatgtatgttaccttgcttgatcctctttcacaccctggtcacagtgactgctttctttggcttcatgtgtagaatacagcttcactttattgtgtcc

SEQ ID NO: 1349 - DNA, 331 bp, Glycine max
gagggtttttgagtgcggtgcggcgatcctagcactctcttctgcagctttcgccgacagcttcattcaccatggctgcgcaaaccgagaaggcttttttgaaacaaccaaaagtgtttctcagctcgaagaaaactgggaagggaaagagacccggaaagggtgggaaccgcttttgggaatccattgggcttggatttaagactcccagggaagccatcgaaggaacctacattgacaagaagtgccccttcactggcaatgtttccatccgtggccgtagcttggctgggacatgtcacagtgcgaggagtgagaggactattagtgt

SEQ ID NO: 1350 - DNA, 334 bp, Glycine max
gacactcaaaccaccccttttattgaaatccagagcttccattgtgctcactcatctcttaaaacgaaaccctcttcatcttgttccaactgtgacgagcatcatggcctcaagaacagtgttattgttggctatgtgtgtgcttccgggcgatgttgtgggcattcgcccagcagagaagcctttttgcgttaagggtcctgtctactgtgacccttgccgtgctggttttgagacctcagctaacacctacattgctggtgctgagattatgttgcaatgcgagagcagggttagcaacgaggttgtgtaggcgaagaaggggtacaccgac

SEQ ID NO: 1351 - DNA, 336 bp, Glycine max
ggtccctctctcacgttaaacggcagagccactgcaacaagaagcagcagagttcgccgctgctccgcaaccttaccctatcaattttcgtccttgttttcgtaattgcagcgaagaatggggaagcgtaaggagcggattcagaacccggaacccttcgatccgtacggcgccgaccccgcgaaaacgaagaagcgctcgaaggcgccgaagcggcaccagcaggaggagcagttcatcgctcccaaactcagctccaagatcatgaagcaggcgctaatccagcagaaggaggaggagaatgaggatgcgccctagaacaacgccgcaaattta

SEQ ID NO: 1352 - DNA, 301 bp, Glycine max
gattgcagtctcaaactgaaagtctcacaaattttgtagaaaactgtagttttatccccaggggcctcccccatctgaaagaaagagtatttgcctcgcatcatttttcttttcgttcgcgcgttctgtcgcgctctctgtcggtaggatgagagcaggacgagacccattaggtcttaggaatttgcccgatgagtactctaaggatggcagggaagtcctcgaagaccatacctcttcagccggttgcacggaaaaggaaagcggcggggaggagtggggaaggcgagtgtgggaaggt

SEQ ID NO: 1353 - DNA, 143 bp, Glycine max
ccgggccgactcaaacgtccatccaggcgtcagacagcggcaaaaagacaatagaatgggaaatttcaacgtttacttattttggtggaaagtatagctgtagcagcggacgctcaccctcactgttgttaagagtggatcac

SEQ ID NO: 1354 - DNA, 54 bp, Glycine max
gaagtccgtcctttcttttgttaaacaggctggctgtgacttcggctcccttac

SEQ ID NO: 1355 - DNA, 353 bp, Glycine max
  modified_base (338)..(338): a, c, g, t, unknown, or other
agtgatgattacctttcagttgttgattcagaaaccatagagggggaggaccaaggaactcaaatcactaaatttctcgaaggatacagggaaggaagaaccataaagaaaacatttagtggcccttcactaatgcgattcatccatcgatcctttgacattagaatggtgtacatcattgtttttgtggtggcagtactgatgctaattcagacattcagtaaaggaggtgatgaataccagagtgtacccaatcaagttcaaactgatcatgcaatcaagttctgtttctgaagctgaaaacaatgagtataaacctggtgacaaggaagactaanaattaacataataca

SEQ ID NO: 1356 - DNA, 373 bp, Glycine max
gaggggtgatgaatattaagttagaataaaggatccgaacgtttggggggggttttgagaagggttttacattttattcgttctccggtgaaacagaaacagagagagagagtgagaaaaaacgaaacgatggagggaggagtctcctacgcgcgcatgcctcgtgtcaaaatccgcgagctgaaggacgactacgccaagttcgagctccgcgacaccgacgcgagtatagccaacgcgctgcggcgcgtgatgatcgcggaggtgccgacggtcgccatcgacctcgtggagatcgaggtcaactcgtcggtgctcaacgacgagttcatcgcgcacaagctcggcctcattcccctcacgagcgagcgcg

SEQ ID NO: 1357 - DNA, 298 bp, Glycine max
gctaaacattaacaccttgggttggctgtagctcacagctcgctctcctcgccgtttctctcaacgctagtttcaagtctccttgtgacaatggtgagggttagtgtgttgaatgatgctctgaagagcatgtacaacgccgagaaacgggggaagcgccaagtcatgattaggccgtcctcgaaggtcataataaaattcctcttggtgatgcagaagcatgggtacattggtgagttcgagtatgttgatgaccacagggctgggaaaatcgtggttgaattgaatggcaggctga

SEQ ID NO: 1358 - DNA, 392 bp, Glycine max
gactcaccacttcaaaacactcataacacaaagcacaaagcaaagctcatccttgagttaaaaaatggcagcagcttcttccatggctctctcatccccatccttggctggcaaggccgtgaagctgggcccatcagccccagaagtgggaagggtgagcatgaggaagaccgtcaccaagcaggtctcctcaggaagcccatggtacggcccagaccgagtcaagtacttgggcccattctctggcgagcccccgtcctacctaaccggtgagttcccaggcgactacggctgggacactgctgggctttccgcagacccagaaaccttcgccaagaaccgtgaactcgaagtgatccactccaggtgggccatgctcggagccttgggct

SEQ ID NO: 1359 - DNA, 334 bp, Glycine max
ggaggctttcacgggtaccgcaagctccccaacaccaccgctgggttgaaactgtcagtgtcagacatgaacatgaagcagcacgtaacatcatcagatcacagtgcaatcgcatgagaggagaacgaatgcacggtgagggagcaagacaggttcatgccaatcgccaacgtgattacgatcatgcacaagattctccctccacacgcaaaaatctcggacgatgcagatgaaacaatccaagagtgcgtgtctgagtacatcagcttcatcacaggtgaggcgaacgagcgttgccagatggagcagcggaagaccataaccgcagaggacg

SEQ ID NO: 1360 - DNA, 365 bp, Glycine max
gaacgtcatcaacattacacaaggcgcaaggtggtctctgtgatggcaacctctttctctccgacagcctctgtcggctccatcatcttccaaaaccctcccaaaggccttcttcttctctcccagcagcagcaacaacgctccttcgcctcttctgcaagctatgcaactctcaagctccctcgcgccttcgcactttctccaagacccctcctttccaaagggagaacaacactttttaaggctgctactatcgaagaaattgaagccgaaaaagccgcaattgaaaaagatgctaaaaccaggatgggtaggactattgataatgtccgtacaaatttcagttccataaggacagggagagc

SEQ ID NO: 1361 - DNA, 265 bp, Glycine max
ggatatacttttaaaataaccccaaactcaggagtacttgaggttaactgttatgatcctctcaaaatagaagtcccatcaagtggctcctcaaagggtaaagatgagaatgacaatagatctagtttcccaacagagtctgactgccaggctgcaattgtccattctcaaagacaaactgaagatccaatgcagaaagcaaggggactaaattttggtacgaatgaaagcagtaagatagattcgtcccctgtaatattaatga

SEQ ID NO: 1362 - DNA, 365 bp, Glycine max
gagacctcaggtcaggcggggctacccgctgagtttaagcatatcaataagcggaggaaaaaaaaaaaaaaaaagaaaaaaaaaaagctggcggcccaaaagattcaagcttaaatacccctgcaagccaagtcaaaacccctccaaaatgtcaccgaaattcaattcaatgggcctccatttaaaacgtcctgactgggaaaaacctggccttaaccaacttaatcccctttcaacaaaaccccctttccccaactggggtaataacgaaaaagcccccaaccattggccttcccaacaattgcacaacctgaatggccaatgggaagcaccctgtaaccgggcaataaaccccgccggttttg

SEQ ID NO: 1363 - DNA, 354 bp, Glycine max
tacagctgaggtaaggcgacacaaggggatcgatagcggcggttcaagcataatgggttccgcggtgaggttggcttcaaggtccttcttcgctaatcgttctagaagcttcgtcaagagctcaacgacgccgtttgtcttctcttcgtcttccgcatcatgcatctctcgtgcttcgagggttctgtcggttgtgataagcgttgagtcgttgatgcctcttcacagtgctattgctaatgctatgctcacctccaatatcgccttcgattccacctgctggagctcgctttctcgaggacttaaaccaacattgtgacaggcctgctggatccattcaagatgaaagaccaa

SEQ ID NO: 1364 - DNA, 398 bp, Glycine max
  modified_base (339)..(339): a, c, g, t, unknown, or other
ggtgtgaaattgttgagtctcttgtcttagtctaataaacaacacggacgcagagccttcgatccagaaaccatgactaagagaacgaagaaggcaggcattgtcggaaaatatggtacccgatatggtgctagtttgcggaagcagattaagaagatggaagttagtcagcatagcaaattcttttgtgaattttgtgggaagtatgctgtgaagaggaaggctgtgggaatatggggatgcaaggattgtggtaaagtgaaagctggcggtgcctacactttgaatactgcaagtgctgtcactgtgcgcagcaccatccggaggttgagggaacanaccgagggttgagctttttggttgatgttagattttgagcaaattaactggagaaatga

SEQ ID NO: 1365 - DNA, 385 bp, Glycine max
gatgaacgataacactgaactagctctcacgtttgtgcttgcacttgcacctctccaacgataacaacgacgagcacaagatccagccgaacatttttgtctataattggtggagttgttgctggaattttggggttcacaagcttgaaaggatttgtattttacttccttctcatgatggttacttcacttgggcttgtagccaaagccagattttcaatccactcctactttgactcctcgaatcgagttctacttgatggcttcctaggtggtctaatgtcattcgtgctgttctggacatttgcattcgacattgtacatatattttgacggaggatcgtgcacaaaatgtctctaaagaaggcaattgttggcttctgac

SEQ ID NO: 1366 - DNA, 354 bp, Glycine max
gacacaccatccgttctagtctcaacttctgctcttccaactcctacaacgcttttctctgcactcatgggcaaggtcaagatcggaatcaacggatttggaagaattggccgtttggttgccagagtcgctctgcaaagagacgatgttgaactcgttgccgttaacgaccctttcattaccaccgattacatgacatacatgtttaaatacgacagtgttcacggacactggaagcatcacgatgtcaccgttaaggacgagaagacccttctcttcggtgacaaggcagtcactgtttttggacacagaaaccctgaagagatcccatgggggtcaactggagctgacatc

SEQ ID NO: 1367 - DNA, 243 bp, Glycine max
gatccacatcctccacaacacaactccactcttagctgccattggtttttcttcttccagttcgcttcctttctaagcttttttcgattacccatttggagattctgtcctaatggctctggcggcggcgggagtttcctccgtgtccgggtgtgtctggcggggggagtgttggggatgggcggaggaaggcaagttgctcggtgtctctcagctttgggaatgtgaaacttggaagcagaa

SEQ ID NO: 1368 - DNA, 332 bp, Glycine max
gagaacctctctcacacaatagcaaagaagggaagactaaaactaaaaccccactctctttttccgagtcttccagtgaaagaaaggcagcgatggaagaagacttcgacatccccggcggcgaggaaatggatctcggcgaagacgaggtcggcgaggagagggacatcggctctggcggcctcaagaagaagctcctcaaggaaggtcaaggctgggaaacccccgaagtcggtgacgaagtccaagttcattacacggggactttgctcgacgggaacaagttcgattcgagccgcgacagggaggtgcgcttcagcttcacgctcgga

SEQ ID NO: 1369 - DNA, 398 bp, Glycine max
ggtcactcaccacttcaaaacactcataacacaaagcacaaagcaaagctcatccttgagttaaaaaatggcagcagcttcttccatggctctctcatccccatccttggctggcaaggccgtgaagctgggcccatcagccccagaagtgggaagggtgagcatgaggaagaccgtcaccaagcaggtctcctcaggaagcccatggtacggcccagaccgagtcaagtacttgggcccattctctggcgagcccccgtcctacctaaccggtgagttcccatgcgactacggctgggacactgctgggctttccgcagacccagaaaccttcgccaagaaccgtgaactcgaagtgatccactccaggtgggccatgctcggagccttgggctgcg

SEQ ID NO: 1370 - DNA, 368 bp, Glycine max
gtcatatttcacttacaaaacaccctctcctaccttctctcttatcacttccaaccatgactgcaactgatattgctcgaacagcggtcggcatcataggaaacatcatctcgggcgctttgttcctgtccccagcgcccacttttgtcgaaatatgcaagaagggatcagtggagcagtactcggcagcaccatacctagcaacgctggtgaactgcatggtttggaccctgtacggtctacccatggtgcacccaaatagcattttggtggtaaccattaacggctctgggtgcatcattgagcttatctttgtgacactcttcttgatctactctggtgggaaaaagaggctcaaggtcctcctg

SEQ ID NO: 1371 - DNA, 377 bp, Glycine max
  modified_base (368)..(368): a, c, g, t, unknown, or other
gaaattttggaggtttcagtttaactccttccgatgagagccatggaggattggaatgatgaacagtgtgatgacaccctcaccatgaccaccgtttctcagcactttttcggcgatgattctgaaacgccaagcttctccatctccatcatcgagaacatgaaggaagactatggcctattcgtgtggccctgcagcgtagttctcgccgagtacatttggcaacacaagcatcgattttcaggagccaccgttgttgagctaggtgctggaacttccatgcctggcttggttgcagcaaaactcggtgcccgtgtcactcttactgatgactccaccagattagaggtgcttgacaacatgagtanggtttgtga

SEQ ID NO: 1372 - DNA, 232 bp, Glycine max
ggatccaaattcaagttcgcaccaaattttcctcccaaaatgtcaggccgtggaaaaggtgggaagggtttgggaaagggaggagctaagaggcacagaaaggttcttcgggagaacagtcaacggagcacgaaacctgcgattcgtaggttagcgagaagaggtggcgtgaagaggatcagtggtttgatttacgaggaaaccagaggagttctgaagatagtcgtgggga

SEQ ID NO: 1373 - DNA, 141 bp, Glycine max
gaggtttttagggtttacaccgagcagccacacctcccgcagcagccatggttctcaaaactgaactatgccgattcaatggtgccaagatctacccaggaaagggcatcagatttgttcggtggggggtctcaagttttc

SEQ ID NO: 1374 - DNA, 330 bp, Glycine max
ggcccgaactccttcgacgaccgtcttccccaatcgcctgcgtctctctctgaattgacaagcttaaagacaaagtcttaaatggctggtccaaggattgcccatgctaccttgaaaggtccgagtgtggttaaggagatgataagtggaataacacttggcttagctgctggtagcgtgtggaagatgcaccactggaatgaacagaggaaaaccaggaccttctacgatttactggaaaagggtgagatcagtgttgttgcagaggaacagtgaaagtgttcgtgttttgttgcctatgctctccagttagaggctttttttcccatg

SEQ ID NO: 1375 - DNA, 266 bp, Glycine max
ggcgtacacagcctcaacaaccctaacgcgtgcagagcagagagagactcagccatggggcgaagacccgcgaggtgttataggcggattaagaacagaccataggccaagtcacggttttgccgtggtgttcctgatcccaagatcaggatttacgatgttggtatgaacaacaagggtgttgatgactttcctttctgtgtccatctggttagttgggagaacgaaaacgtttctagtgaggccctggaagctgctcgtattgc

SEQ ID NO: 1376 - DNA, 99 bp, Glycine max
gacataaagaggtacatgcattctaaagtgtgcacatcactgagagaggcaaacatgtggtcaagaggatcgaagtttaagtagccgtgtatgaaaagt

SEQ ID NO: 1377 - DNA, 410 bp, Glycine max
ggatagatacctaaatccctaattctcctctcctcgcactccaccacgacctccacggcttctccacacctcgcaccctcgcactcgcagtctctctctctcatgctctcgccaccacaaaaatggtgcttccttgaaacttggtgaaacctagtttcatttttctaccattcttatattgattttgtgttggaagcagctcgaattttgtgtcttgatagagtagctatagtatccgattatgagagtaaaagtggtgactattctaatccatggagactttgcaccgtgacccaagtggaggaattgaaaatcttgatctgcgtgtttccaatttgggccaccaggatcatttttgctgcagtctatgcccagatgtcaacattgtttatggagcaaagaacaatgat

SEQ ID NO: 1378 - DNA, 342 bp, Glycine max
ggacgaaattctccactgagagacatagaaaaccgagaaaaagaaaaaaagacaatatgtatgtggtgaagagagatgggaggcaagagacggtgcattttgataaaatcaccgcgcgtctcaagaaacttagttacggtttaagcaccgaacactgtgaccctgttctggtgtctcagaaagtgtgcgctggcgtctacaaaggcgtcaccactagccagctcgatgagttggcggcggaaaccgccgcggctatgaccgccaaccaccctgactatgcttctttggctgcgaggattgccgtttcaaatctgcacaagaatacgaggaagtcattttcgg

SEQ ID NO: 1379 - DNA, 384 bp, Glycine max
  modified_base (344)..(344): a, c, g, t, unknown, or other
gaccaagttagtttaatttgagtgtatattcagagagaaaaacgaagaaaacatcgtgaagcatgtctggaagaggaaagggagggaagggtctaggaaagggaggagcgaaacggcaccgtaaggttctgagggataacattcagggaatcacgaagcccgtgattcggcgtctggcgcgacgtggtggcgtgaagcgtatcagtggtctcatctatgaagaaactcgcggtgttctcaagatcttcctcgagaacgtcattcgcgacgctgtcacctatactgagcacgctcgccgcaagaccgtcactgctatggacgttgtttacgctctcaagaggcanggcatgaccctctatggtttcggtggttagagatttgggg

SEQ ID NO: 1380 - DNA, 264 bp, Glycine max
gacacaccgtttgttctattcttaactcaacttctgctacccactctcttcttcgaggtccaaccacgcttttctctacagtcatgggcaaggtcaagatcgggatcaacggatgtgggagaagtgggcgtttggttgccagagtggctcggcacagagacgatgtggcgcgcgttgccgttaacgaccctttcattaccaccgaggacatgacatacatgtttaaatacgacagtgttcaggggcactgggagcatcacgagg

SEQ ID NO: 1381 - DNA, 381 bp, Glycine max
ggttgaaaaggttaatgtttttgttggaggggttattaaggagcatagggtgaatagggagaagggtgactgtgtgaaggatgaaggagctgacgattttgttgatgttttgcttgatttggagaatgaaaacaggctcagtgaagctgacatgattgctgttctttgggaaatgatattcacgggaactgacacggtatcaattctgctacagtggattctggctcgcatggttctccaccctgaaatccaagcaaatgcacagcgcgaaatacacttcgtttgcggatcctccaggctcgtatccgaagcagacattccgaacctgcgctaccttcagtgcatagtaaaagaaaccctccgttttgcaccaccaagccc

SEQ ID NO: 1382 - DNA, 281 bp, Glycine max
gaaaaccaaacctctcactcgccgtcgtagggtttctcctttcgtttagcaacaacaacaatggttgcagccaagaaaaccaagaagacccatgagagcatcaacaacaggctcgctcttgtcatgaagagtggaaaattcaccctcggttacaagacggttctcaaatcacttacgagctccaatgggaaattgattatcattgctaacaactgcccccctttgaggaaatcagagattgaatactatgctatgttggccaacgttggagttcatcatta

SEQ ID NO: 1383 - DNA, 272 bp, Glycine max
gaggtttttagggtttacaccgagcagccacacctcccgcagcagccatggttctcaaaactgaactatgccgattcagtggtgccaagatctacccaggaaagggcatcagatttgttcgtggtgattctcaggttttcctgtttgcaaactcaaaatgtaagaggtatttccacaatcgcctgaagccttcaaagctcacctggactgcaatgtacagaaagcaacacaaaaaggacattgctcaagaagctgtgaggaacaggagacgt

SEQ ID NO: 1384 - DNA, 245 bp, Glycine max
gaacgaaacagagagtgatttcactgagtgatcggtgtgcacttgatcgcaacagaatcgtcagcgtcaattgaagaagatgccgatcagagagagcgccgtcggaacgcctcaagcagcgaggcatcccgacacgttcagggccgcggtggctgagttcatcgcaaccttcaacgtcgtgttcgccggcgcatgctccggtatcgcctacaacagtctcaccgagaagggcgctgccacccctg

SEQ ID NO: 1385 - DNA, 312 bp, Glycine max
ggttttcactcggatcgcgcattcacaaataaggttgaagaggtcactgccggaagaagggagcaacaccatctttcattttccggcgatctcttgtttcttccatcatcaccgttttccggcgatccctaatcctcgcaaacagaaatgacgacatcaaggcgccttgcggacaggaacgtggagaagtttgagaagaacatcacaaaaagaggatttgtgccagacactaccactaagaacggaaaagactaccctgttggcccaatgctgctcggtttcttcgtcgttgttgtcattcgatcatctctc

SEQ ID NO: 1386 - DNA, 239 bp, Glycine max
gatgatcacttattggatagttccttgttccactgaacactcaaccctcaagcagcaatcagggatttagtatttggagaaacaatgatcagtgatatggagattcctgttgcctttgcgcttgtccacaggaacgctcatcactcggcaattggctatcgtatcgcttagtatgaaacgcgctacaccctacatagtacgcattacgcatgccgtgggtcatgaatcctgctctcgtc

SEQ ID NO: 1387 - DNA, 322 bp, Glycine max
  modified_base (257)..(257): a, c, g, t, unknown, or other
ggatgggtattgggccgcgtttggtagagaagagaagaacttcttgtatggttattataaataataaattggcgcggttgttgttcccgccaagtgtgttgcatcgtcggcgggcgcaatggagcaagagaattacaaagtcaaggcagtgaatttgctgcgaagcagaatctgtgatcccaaattcatcttcatcaatgaatctccagaaagcaaccacagcaagctgaagttcatgagtatcgagttcggtgacngaggcgtgcaggaggtctagtcgtcttctcggtccccgcgaggcgggcgagaatgcggttttgga

SEQ ID NO: 1388 - DNA, 100 bp, Glycine max
gatttcgcttcgtttcctaacctaaaccctactcattctccatacctcaacgagggaggttagggagacggcaacactttgctgtccgccttgaccgagc

SEQ ID NO: 1389 - DNA, 379 bp, Glycine max
gacgctcaattcattttcttctcctctctctctctcctagggttagggttttctctcttcatcactctctgtgtcgctccgtttcaatggctcagcaagacgctcaaaacggcgggtcggagaatgccgctgctgctgctacggtgtcgtttgtcgctgtgaagccgcagctcctcgtcgaagctcccaaagccaacgacgccattctgttcttcaaggctgcgtttggcgctgaggaagttggccgtacgctcaaccctaagcgcaaagctgagcacgagctccctctcatactctccgcagaactcaaaatcgctggctccaccattctcgtcgccgacctcgttgatgacacttcttcgccagcgaaaacgggggg

SEQ ID NO: 1390 - DNA, 229 bp, Glycine max
gacaccatccactactcttcttagttccagcacaacaagctcttcagttctcgcacactttcttttctttcagcaaagatgtcaccagatttcacacgtttgttctgcccgggactcatggagtcccctaggatgacgttgcaaggcaccctcggcgtccttctcgtcagccgcatgttcacgctgctcttcactcctggtgggcgtccttgggcctgggcccggccca

SEQ ID NO: 1391 - DNA, 398 bp, Glycine max
gggggttcctgaggtttgttgtcgtttgagaggattcgatcggcgaatcttgttttcgacctcaaattgaattcaacagtgaattgctggaaggaaaagggaacgaaccaaaaaatgggagacacaaaccacgcgtccaccgtcgatgacgatttgctcctcaaaaacttcttcgccgaagttagcgaagttgaaagggataacgaagtgcttaggattctctcttgttttaagttgaatccttttgagtatctaaacttatcatttgattcatcaattgatgatgtgaaaaagcagtaccgcaagttatcattgatggttcaccctgacaaatgtaagcatccgcaagcaaaggaggcttttggagcattagcgaaagctcaacagttattactgga

SEQ ID NO: 1392 - DNA, 380 bp, Glycine max
gattattatcatagtagatattcattccccttatctttctctcttctctctccccgcccaaaccctaactccctaccctattccgctttctctcatccatcatgaaaggaggaaagtccaagaccgaatctaagagagccgatgccaaacttgctgtgaataagaagggcaccgccaccaagactaggaaacccgccggaaaggggaaggcagcgaaagatcctaacaagccagagaggcctccaagtgctttcttcgttttcatggaggaattcaggaaggtgttcaacaaggaacatcccgacaacaaagcagtgtctgctgtgggcaaagctgctggagcaaaatggaagacgatgtctgatgctgaaaaagcacct

SEQ ID NO: 1393 - DNA, 116 bp, Glycine max
gaaaatcatctcttcaatggcttccctcatgagcaccatcctcatgcaaaggtcttcgtctacttcacatgctgctggcatgtttttccctacatgagaagtcaccactattgaat

SEQ ID NO: 1394 - DNA, 304 bp, Glycine max
gacagcaaaacaattttcaaactcaattaccattccataacctaaatctcctctttgtttccgagtcagagagcaatggcacgtaccaagcaaaccgctcgcaagtccaccggcggaaaggcgccgaggaagcaattggcgactaaagccgctcgcaagtcagctccgggcaccggcggagtgaagaagccccaccgcttcaggcccggaacggtggctctgagggagatcagaaagtaccagaagagcactgaacttctgatccgaaaactcccagtccagaggctcgtcagggaaatcgctc

SEQ ID NO: 1395 - DNA, 293 bp, Glycine max
ggatccccccctctctctctctcatcactacctctgcatttttctctcgctctctgcggtgcagcgggctcgccatttcccttcccaagatagtagaagatggcagacgctgaggatggtggagctcgtgtttgtgagagtggaagaggagtggttgaggcgggttgtgctggacgaggtggccgacgtgctgtgtttcccagcagtgtaggtcgtcgtcgtcacactggtgtgatggttggcatgggccagaaggagtcaggggttggtgaggagggacagtgcgggagggg

SEQ ID NO: 1396 - DNA, 122 bp, Glycine max
aggcgtcagacagctacgacaaggtgacgctacgagaaaaccagcttctgggactgcgcagggcttgggcagagtcgacaagtgccactttcctcaatggctcatcatggtgatctctgcaa

SEQ ID NO: 1397 - DNA, 298 bp, Glycine max
cgtcgtggctagctgcattagatccctgtgatggtatccatgttccaacctggttccagaaaggtttacttccgacaccatcagcgtcactccccctcatacttgttggacctggaacaggatgtgcaccttttcgtggatttatagaggaaagaccagtgcagagtagaagtaattccactgctccaattatttttttctttggttgttgggatgaagacggtgactttctgtatcgtgaggtttggttgagtcagtcacagaacaaaggggtgctttgaggagcaaacggtggcgg

SEQ ID NO: 1398 - DNA, 306 bp, Glycine max
ggctccgccatttttcgtagctgctgttcttgcgcgtgaacaagcctcaggtaagccaaaaccatggttaagcataacaatgttatcccaaacggacacttccgtaagcactggcagaactatgtgaagacttggttcaatcagccagcacggaagacaaggagacgattggctcgtcagaagaaagctgtgaagatattccccagacctacggctggacctctcaggcccattgtacatggtcaaactttgaaatacaacatgaaagtgagacgtggaaggggattttctcttgaagaactcaag

SEQ ID NO: 1399 - DNA, 113 bp, Glycine max
atgatgagttgacaagttcctttatttttaatgaatcaaagatatttttcaattcttaaatgaattttatttgtccccccaaaattttccattaaccatactagggaatccta

SEQ ID NO: 1400 - DNA, 378 bp, Glycine max
ggcgcatcccatacagactctgcgcgctgtggtgcctgtgtgtgtgtgcgagagatagagacatcgatccctgacgcttccactctttctttggcggcggcgtcgttttcccaacgcattacccatttcatcactcagtctcaagttcggggcacttcaatctgattcactatggccaatggtccagcagcgttttctgagattgggaaaagggcaaaagaccttttaaacaaggattacaacctcgatcaacagtttagcctctcaattccaaactccactggattggggcttatagctacacgattgaagaatgatcaactttttgttggtgacataagtacactctacaagagtggaaatactacagtggatgtg

SEQ ID NO: 1401 - DNA, 392 bp, Glycine max
ggcacccacagaggaggaagctttgagagagagagagggaggagggagagtgttgacgctccatcaagatgggtatttctagggattccatgcacaagaggcgtgccactggtggcaagaagaaggcatggagaaagaagagaaagtatgagcttgggcgtcaggccgcaaacaccaagttatcaagcaacaaaactatccggaggattcgtgttcgaggtggcaatgttaaatggagggcattgaggttggataccggcaattactcatggggtagtgaagcagttactcgcaagactcgtattctagatgttgtttacaatgcctcaaacaatgagcttgtgcgaactcagaccctggtcaagaatgctattgttcatgttgatgctgct

SEQ ID NO: 1402 - DNA, 240 bp, Glycine max
ggctgcttccaggaaaagactacaacactgacttgactccttcatgcatgctccacgcggctcggggggatatagctcagttggtagagctccgctcttgcaattgggtcgttgcgattacaggttggatgtctaagtgtccaggcagtgatgatgatatcgtgtacctgaaccggtggctcactttttctaagtaatgggaaagacgaccgaaacatgccactgaaatactctactgag

SEQ ID NO: 1403 - DNA, 244 bp, Glycine max
ggaaaacagagagtgatttcagtgagtgatcggtgttcacttgatctcatcataatcgtcagcgtcaggtgaagaagatgccgatgagaaacatcgccgtcggaaggcctgaagaggcgactcagcccgagacgttgaaggcggctttggctcggttcatctcgggcttgagcggcgggtgcgccggctcaggctccggcatcgcctagaacaagctcagcgacaacggcgctgccacccctgc

SEQ ID NO: 1404 - DNA, 278 bp, Glycine max
gaatggtgaagaaggaggagttcttgagagaaaacggcgacaacgaaaaccgttccgtctcgcggagtgacttccctcccaacttcatcttcggagttgccacttctgcatatcagatggaaggtgcttgtaaggacggtgggagaggtccgagcagatgggatgcctttacacacgcggaaggaaaaattcttgacaaaagcaatggtgatgttgcagttaatcattatcatcggtacatggaagatattgatcgtatagccaagttgggatttgat

SEQ ID NO: 1405 - DNA, 274 bp, Glycine max
gacactcactcgttcactcttcttcgtctcaaacctcttcgttccttcgattcagtccatgtcttccaaaatggccaaagacccagttcgcgttctcgtcactggagccgcagggcggattggagaggctcttgtccgtatgagtggtaggggagtggtgctgggtccggaggagccggtgatcctccacatgcttgacattcctccagcaggagagtcgttgaatggggttaaaatggaattggtggatgctgcaggggctcgtcgtagaggg

SEQ ID NO: 1406 - DNA, 242 bp, Glycine max
gacaacatcatcatcaacaacaagcagatcaatctctgtctctctctcaaccataatagtcatgggtttgaaggaggattttgagcagtatgctgaggaggcaaagactttgccaccggctcagtcaagcgaagacttgcttatccgtgtaggagtgtacaaacaggccaccgttggacctgtcaacacgggccgtcctggaatgttcaacatgagcgacagagctaagtgggatgcatgga

SEQ ID NO: 1407 - DNA, 350 bp, Glycine max; identical to SEQ ID NO: 1202

SEQ ID NO: 1408 - DNA, 343 bp, Glycine max
gacgggaaaggggaatctaacaaacgcaatttacaaatggcatcatgctgttcactcttgcgttcacacttagtcgctggcttcttcttccattttcgcttctcgtagcgttttcggaacagttatggcttccagtgccggatccaactacgtcgctctccgaatcgacaacttcggtgcctccggtaaccggaaaatctgggagatccggcaatggtctccgattcgcacgaagctccgtcgcgtttccggtcttcgtcaccgatcgaatactccgtttaactccaccggtgtgagagcatacgttgctactctggaggaagcacgaagcggagcaactcag

SEQ ID NO: 1409 - DNA, 379 bp, Glycine max
ggtctcgtggaagtgtaagcaagcaaaaccctagcggcgcctgctttctttgttcgtgttttgcatcaggatggagtctcaggtgaagcacgcacttgttgtcaaagttatgggtcgtactggatccagaggacaagtgacccaggttagagtgaagtttttggatgatcagaaccgtcacatcatgaggaatgtgaaaggacctgtgagagaaggagacattctcaccctactcgagtctgaaagggaagcaagaagattgcgctagatggtctcttttttttggcttgcctccaaattcgaacaaaagcaatatttttcttgatatttatggtagttagtccgtgctaaaggggttatagcaccctatcttattgtt

SEQ ID NO: 1410 - DNA, 374 bp, Glycine max
tgcggctcccatccccacgacttcacgagtactcgccgtcatacgactatccaaggggaatcattccaattaccatgccactttcaagagactgcgaaagactaaagggtatgttgagttccatgagtcgccgccggacaatttcgatcccggacagccgtataacgacccagtggctactcagcagattacggagcctatcgttctggacaagctaattcaaatcgagattgccaggatcattagggagaaactccaatagtgctaccgcatctatggcgtcacacacctccactaatgccgccatctcgtcaaccactatcacaagtccagcctcgtcatcagatgaggcaacgactgtcttcatccttctc

SEQ ID NO: 1411 - DNA, 71 bp, Glycine max
  modified_base (1)..(1): a, c, g, t, unknown, or other
nggacgacacacatccccagaaattcatcatgagtcccctgtcttcgacgtatcaccaaagacctgatttc

SEQ ID NO: 1412 - DNA, 309 bp, Glycine max
gggtcccactaaccttgaccaagatgataagcgcgtggacttcaacataatttcaggtacatccatggcatgccctcacgcaagcggtatatcagctttgatcaagtcatttcatccagattggagcccagctgcaattcggtctgcgcttatgaccacagcttatacaacttacaacaacggtaaaaaattgctagacagtgccacaaatggcccgtcaacgccgtttgaggtccgtgctggacatgtgaaccctgttgctgcgcttaatccaagtcttgtctatgatttagcactggatgattatct

SEQ ID NO: 1413 - DNA, 315 bp, Glycine max
gtgcttctcaagcctcaacagccatatgtctgagcatggatcaagcctcatgctcctcttccaacaccattctactcggaggccgaaccattgatcgccacaatcccattatcaatgactcaagaaggagcacttccaaatccctcactgccccatgttcctcttctcagtcccccatcaaccccaagccttaccatgagctccacaaggccgagaaaaactcttcttcaaaaaatgcaacaaagggtcatgataatcagaagaagagaagtacagcagaaagactcactgaacatgtcaccaacacttctaaac

SEQ ID NO: 1414 - DNA, 402 bp, Glycine max
gacttcacaactcaaactgcttcattgcataattgcagataagatcaacccttctaccttcagaatcatgggtgtgaaactgcattatatacatccttgccccacagatacatgacctatatgataaagaagtagaaggaagacttgaattttctacgaaagtgatctcagattcgcgggaagatggcatcacgtcatgctaatgtgacatcagttgtttacaacagtggcaaccgtgtttctcaatcgaaatttgcaagctcttccttcgtgtctgggttcgatgttgttggtcgtgcttcaagtgcttggaagaaagaacttgtcccatcttccatttccttggtgcctagagccaccctaacatttgatcccccaactaccaattcagacattaccaag

SEQ ID NO: 1415 - DNA, 376 bp, Glycine max
ggaaaattgattaggtcacgcgcttcttccggaattagtcggtgtaatttacatttatccattttttgaaccttcccttcccaccccagaactttcaaatttcaacaaaatcgcagacatggcttctgcggtgcccgcgacggggcgagagttgtcgaatcctccattggacggcatcaccaatcttcgattctccaatcacagcgatcatctccttgtgtcctcatgggacaagagcgtgaggttgtatgatgccagtgccaatgtcttgagaggagagtttatgcacgctggtcccgtcctcgattgctgcttccacgatgattcctccggcttcagtgtcgccgccgacaacactgttagacggcttgtcctc

SEQ ID NO: 1416 - DNA, 373 bp, Glycine max
acctgatgcagatgcagcccatgatggcagccgagtaccccaacaacgtcaccactgatcacattcagcagtatctggatgagaacaagtccttagttctgaagattgttgaaagccagaattctggcaagctgaacgagtgtgccgagaaccaagcaaggcttcagagaaatctcatgtacttagctgcaatagctgattctcagccccaaccacccaccatgtctggtcagtaccctccgagtgggatgatgcagcagggagcacagtacatgcaggctcaacaacaggcacagcagatgacaccacaacaactaatggcagcacgctcatctcttttgtacgcacagcagccgtactcagcacttcaaca

SEQ ID NO: 1417 - DNA, 262 bp, Glycine max
gcttttacgccggggttttggttgctcacaccgtgttctctgccgcacgagataactagggtttagaatctcgcagttacagaaaacatggcgactgtggtgccaagctccgaagaagacgctgcactctccgtcgttcgattcgcctctgaacttgcctgggccgatgccggtcctgaagttgctgagccccaagttagcagactctgcacggaggctgaagagttcattgttatcggaaagtggttggagttagcatcag

SEQ ID NO: 1418 - DNA, 242 bp, Glycine max
gagggttttgtgctgttgtcgctgctcatcctccataacctccgagctctacaccgaggagcgaagccatggggaagacacatggaatgggagctgctcgcaagctcaagtctcaccgcacgacggcggatgtgggctgagaagtcatacaggaagtgccatcgtgggaaggacggcgggaaagggtttgccggttcatcccatgccaagggaattgtggttgaaaagataggtattgaagc

SEQ ID NO: 1419 - DNA, 198 bp, Glycine max
gagtcagagatatagaaatggcttcgtggtgcagtgtgtcgaagcttccaggttccggcgatggaacgcagcgcactgcgcaaccgtgcgtcaggtggccgccagagtggggtgtttgtccgtggccggcacctccttctggcgttcctcttcgtcaccgaagcactctttgtcattcacatgcttgagcagttcgtc

SEQ ID NO: 1420 - DNA, 78 bp, Glycine max
tgaagactgtctctaacgaggaagcgtctgccatcaaatctgctgggaaagcgggggatcgaggtatggtgtcggatt

SEQ ID NO: 1421 - DNA, 242 bp, Glycine max
cgggtcaaatacagactcacaacacactttgtacactccgtccctcttccctgtctctcaagatcgcttccctgacgcaaactttcatgtccctcgcctctcttcccaatctagtagccgcgtagaggatgtcgcaggcaagttcagtttggctcgcagtggaggagggaagaggttgcccagccgttacattgcagcccagaggatgtcggtttcgatttagatgtgtggcaaaaccagag

SEQ ID NO: 1422 - DNA, 373 bp, Glycine max
gcgctgtgagtgctgagaacgttacttcattcaaaagcagcaacagcaggttattctttgtttcttttcgttcttccacagccggtagattcggctttgtccatggccaccgaaccaaaagcagccactgaggaggtcaagattgatctcttcgaagacgatgacgaaattgtggagtttgtgatctccgacaagtgggatgacaaggaggaagggaaagaagtgactcaacagtgggaggatgattgggatgacgatgatgttattgatgatgtctcccctcagcagttaagggagtagttgagcagcaccaccaagaagtaatcacctgctagttattgttgcttgatatggcatgcgttattaattaggt

SEQ ID NO: 1423 - DNA, 370 bp, Glycine max
gatgtcatagtattatcattcattctcatctttctctcttctctctccacccaaaccctaactcccgaccctgttcccctctcgtatccgtcatgaaaggaggaaagtccaagaccgaatctaagagagccgatcccaaacttgctgtgaataagaagggagccgccaccaaggctaggaaacccgccggcaaggggaaggcagcgaaagaccctaacaagccaaagaggcctccaagtgctttcttcgttttcatggaggagttcaggaaggtattcaacaaagaacatcctgaaaacaaagcagtgtctgctgtgggcaaagctgctggagcaaaatggaagaccatgtctgatgctgaaaaagcacc

SEQ ID NO: 1424 - DNA, 363 bp, Glycine max
ggagaagagaagagtgggggaggagagatgagtaagtggcctttcacaatatctcagtggcaggaactggaacatcaagctttaatttacaaatacatggtggctggtcttcctgtgcctcctgatctagtcattcccattcagaacagcttccactccatttcccaaaccttcttgcaccatccctctaccaccatgagttattgttccttctatgggaagaaggtggacccggagccaggacgatgcacgaggactgatgggaaaaagtggaagtgctccaaggaaggctacccagactccaagtactgtgagcgacacgatgcaccgtggccgcaaacgttaaagaaaacctgtgggatc

SEQ ID NO: 1425 - DNA, 385 bp, Glycine max
  modified_base (345)..(345): a, c, g, t, unknown, or other
tgggaaaatcaatggcatcatccttgggttttgagttcctgacgaataagccttacagtcctccatcctgggcatcccatctccaccctttaccttcccacttcttctctcttgcccatcttcccactccaattcacagatggaaccttcccaatctgcccaccaataccgagctgtggatcaagcgagacgacctttccggaatgcagctgagtggtaacaaagtgaggaaattggagttcctgatggccgatgccattgcgcaaggcgccgactctatcatcacaatcggaggcattcagagcaaccactgtcgcgccaccgccgttgccgccaagtatttanaccttgactgttttctcatcctccgcacttctgacctcct

SEQ ID NO: 1426 - DNA, 306 bp, Glycine max
ggtgttggtggtatgcctattgggggaggtggacctggtgttggtgcccctggtggcggaagaggatatggtggtgggcctcgtgtttaagaactattttggaagacataaagtagagttattttggagtacataaagtacatgcttatttgaatacaaaatagtggaagagtgtgcaccttggattttacttaaataataatgattttttttaaaaaaagtattccagaaaaaattaagcaattgcacaaagagcataaacgatcaactctgacacaatgactgacaacaaaaaaaaaacgggcc

SEQ ID NO: 1427 - DNA, 304 bp, Glycine max
tcaggggctaaaaacaaaacctagaaagcttagggactaaaaagatagtaaaccctgaaaatttaaaagaaaaaggagcatggttccatagaatgacggaaattccgaactttataaccactatttggatatttcttcttgtgagatactacctccaatcctttttataagaaacaagtgatattgtaaaatacactatcacttgtaagtgacttcattccttgaatcagaatggttacaaggcaggtttaacctagagagaaatatttacgtcaatcagaatccagaaaaaaaaaggaaggac

SEQ ID NO: 1428 - DNA, 379 bp, Glycine max
  modified_base (364)..(364): a, c, g, t, unknown, or other
tggaggtccagacatagtaaggattgacagactgatagctctttcttgattctatgggtgatggtggtgatggaggctggagaaactaaggcttgatgtcctcaattacggtttatgattatgccccgtatttttagttgctgtggcttgagttctagtttccttaaggtttcgtgttaccgtggttcctgtttttgaccaatatatctgggtgtttaaagtcgacttaattaaattgataatcactaactgcagtatccaagagccaccgttgttgagctaagtgctggaacttccatgcctggcttggttgcagcaaaactcggtgcccgtgtcactcttactgatgactccaccagattanacgtgcttgacaaca

SEQ ID NO: 1429 - DNA, 400 bp, Glycine max
gagggtttttgtcgttgcgactaagagttgctgcttcttccgccactcagcacttcgctccctctgtgcttcaccaaccatggccgaaatcgaagctaccgttccagatccctctcaaatcgacgtcaaacttttcaaccgctggaacttcgacgacgttgaggttactgatatgtctctggctgattacattggagtgtccccgtcaaagcatgctacatatgttcctcacactgctggtaggtactcagtgaagaggttcaggaaggcgcagtgccccattgttgagagactcaccaactctctcatgatgcacggaaggaacaatggaaagaagctcatggctgtcaggattatcaagcatgcaatggagattattcacttgctcactgacctgaac

SEQ ID NO: 1430 - DNA, 239 bp, Glycine max
ctttcggctcaaacatcactacaggtgggaaggggccgaaaatctgggaatcaaaaggttcttcaaaaggactgtaaatctttactcctaggatccaataacggctttttggttttaatcttcctaattacataaattactatcctactactgtagtgtctactgactgaatcgtgaattacattggatgggccaatggagaatcaaattacgagttgtgcaaacgacttaagatacta

SEQ ID NO: 1431 - DNA, 375 bp, Glycine max
  modified_base (271)..(271): a, c, g, t, unknown, or other
gagtgttagtgttcctcaagccaccgtaccgtgttgcctctctgcaatctacagccaaaatgcctttcaagaggtacgttgagatcgggagggttgcccaaatcaactacggcaaggaatatggcaggctcgtcgtcattgtcgacgtcattgatcagaacagagctcttgtcgatgcccctgatatggtgaggtcccaagtcaatttcaaaaggctttccctaaccgatatcaagattgacattaagagggtccccaagaagaaagatcntgtcaaagccatggaagatgctgatgttaagaccaagtgggagaagagttcatggggcaggaaactcattgtcaggaagagaaggggatccctcaatgattttg

SEQ ID NO: 1432 - DNA, 318 bp, Glycine max
gagaacgaaccagagaatgatttcagtgagtgatcggtgttcacttgatctcatcataatcgtcaacgtcaattgaagaagatgccgatgataaacatccacgtcggcaggcctgaaaaggcgactcaccccgacacgttgaacgcggctttggccgaattcatcccaaccttcatcttcgtattcgccggctcatgctccggcatcgcctaaaagaagctcaccgaaaaccgcgctgccaaccttgcctgcctcatcacaggctccatcggacatgcattcgccatcttcgtcgacgtcgacgtctgagccaagatc

SEQ ID NO: 1433 - DNA, 365 bp, Glycine max
gaacagcgaaacagagagtgatttcagtgagtgatcggtgttcacttgatctcatcataatcggcagcgtcaattgaagaagatgccgatcagaagcatcgccgtcggaaggcctgaagaggcgactcaccccgacacgttgaaggcggctttggctgaattcatctcaagcttcatcttcgtgttcgccggctcaagctccggcatcgcctacaacaagctcaccgacaacggtgctgccacccctggcggactcatctcggcctccatcgcccatgcattcgcccacttcggcgccgtctccgtcggggccaagatcatccggggccacgtctatgccgccgtcaccttcggcgccttcgtcg

SEQ ID NO: 1434 - DNA, 370 bp, Glycine max
gacttcgcgcaaccccagacctcatgcccaacatggcatgctaagtagggtttttgtgcttggcaaaagaaagagaagacaagatggagtctcgttccgggatctgcgctaagcgcgatggtggtggacgcccagcaccacatgctgggtcagctcacctcgattgtggcaaaagagctgctgaacggacaaaaactggtggtcgtacgacacgaacagatttgcatctccggtggtctggtgatgcagaaaatgaaatacatgacgttcctcatcaaacgcatgaacactaagccatcccacaggcccatcgagatccgcgcagtctccaagatcttctggcgcaccgttcgtggaatgataccacaca

SEQ ID NO: 1435 - DNA, 390 bp, Glycine max
  modified_base (317)..(317): a, c, g, t, unknown, or other
ggttactaccaatttaaagaaagagcgttacactccgaacaacactccctttctgagtttgtggaagatgccattgccatgacatgaagaccaaacccattattgccttagccttcttcttcttgtgctcaacctgaaagcaaaagaaacagatctgagataatgggttgttttcttcattgctttggttcctccaaaagcacaaaacctatgcgcaaggcacaacatcaccaccatcgaattgctagagacaggttggagaaagttgttccttgtggtatgtttcaccttccaatgatgtgattttgggagtgtantgtgttggggtgcattttttgattcttttgtgaatttgatagtgtttgttgtttgcttttcctttgtaatatg

SEQ ID NO: 1436 - DNA, 347 bp, Glycine max
gacagcaaaacaattttcaaactcaattaccattccataacctaaatctcctctttgtttccgagtcagagagcaatggcacgtaccaagcaaaccgctcgcaagtccaccggcggaaaggcgccgaggaagcaattggcgactaaagccgctcgcaagtcagctccggccaccggcggagtgaagaagccccagcgcttcaggcccggaacggtggctctgagggagatcagaaagtaccagaagagcactgaacttctgatccgaaaactcccattccagaggctcgtcagagaaatcgctcaggatttcaaaacagatcttcgtttccagagcagcgctgtttc

SEQ ID NO: 1437 - DNA, 53 bp, Glycine max
tgtagcaactgttactagaatatgtatcccatcaagtgccccaatcgaattct

SEQ ID NO: 1438 - DNA, 401 bp, Glycine max
  modified_base (324)..(324): a, c, g, t, unknown, or other
gatctgcgcctgatttctcagttctcacactcattccgtgctctaaatctcaaattctagggttagggttcccaatttctccgccaatcagaagatgagttccaccggtggttctaccaagggcggaaggggcaagcccaaagcctccaaatccgtttcaagatcgcagaaagctggtctccaattccccgttggaagaatcgctcgattccttaaggctgggaaatacgctgagcgtgttggtgctggtgctcctgtgtacctctctgcagtgctcgagtatctcgctgctgaggttttggaattggctgggaatgctgctanggataacaagaagaatcgtattgttcctaagcacattcagcttgctgtgaggaacgatgaggagctgagcaagcttt

SEQ ID NO: 1439 - DNA, 409 bp, Glycine max
ggaggaaaagaaagaaatagaaaaagaagaaaaaaacacagcgtcctagatttcctcttctctgcttcggaagaaagagaaaacaaacaaaacaatggcgttcgcttctttcctcggcagagtcctcttcgcttctgtcttcatactctctgcttaccaacaatttaatgaatatggagttgatgggggacctgctacaaaagcactcagacctaagtttgatgcctttacacatcgggtgcattctcaagtgggctttcaaattccagagattaatctgaaatttttaattgctggggctattgctctgaagggtcttggaggggttcttttcatatttggcagctcttttggagctttgcttctgctcctgcaccagctgattgctactccaatccattatgatttt

SEQ ID NO: 1440 - DNA, 184 bp, Glycine max
atgagtactgtattttgttttgatggtaaaagtctgagattttcaaattcacaagcaaccataaggttttagtccatttcctttgctgctgaagagggatgtcgtaaatttgcatttaatttacaaggaagttttgttaaaaaaagcatctcagaatcaaataaagaagatctccaattgaaaa

SEQ ID NO: 1441 - DNA, 348 bp, Glycine max
  modified_base (314)..(314): a, c, g, t, unknown, or other
gatccttcaccctcttggcttgtgaatcagcaccacattcacctgagctttttgtgaggattccaaagcatggcttcccttgcagcatccactgctgctgcttcccttggcatgtcagaaatgcttggaaaccccatcaacctcagtggtgccacaaggccagctccatctgcctctagccctgcctccttcaagactgtggctcttttctccaaaaagaacgctgcacctccaaaaaaagctgcagctgctgctcctgccaatgatgagcttgccaagtggtatggtcctgacagaaggatcttcttgcctgngggtctcttggaccgatctgagatcccagagtac

SEQ ID NO: 1442 - DNA, 379 bp, Glycine max
gactgcaactttgctctctgtgaggcttcaatttccaattagggtttcgcttagagtaaccaattaccatgggagtcttcacctttgtcgttcgcaaatccggcgccgaatggagcgccaagcaacattccggcgacatcgaggcctccgccgactccacctacgatctccaaaggaagctcgtgcaagccgctctcgccgttgattcctccggtggagtccagtcctccttctctcccgtgtctcctacctccgctgtgttccaggtgatagtgggtggtgctgtattcgttggaagtggcggtggtgctgttgcagctgcacctgcatgtggtgctgctgcagctgatgctgcaccggctgctgagaaaaaagaaga

SEQ ID NO: 1443 - DNA, 316 bp, Glycine max
gaccaccatgcggtattttacatgttcacaacgttagcattaaaaccggtgtgatctggataagaccgccatcaatcagtcccaacgtttgccaacaccaccaacaggtcttcactccatgatccggtatggtgagattcattaagagtatagatgacgagatttagaccgtcacggatttttatgtcttttgcagacttcttggcataaattttggatggagtcagacgtgacacaatattaagggtgtctggttgacctgtttttttaattttaatttcaatagaaatacggcctcctgataagattgtgtttg

SEQ ID NO: 1444 - DNA, 382 bp, Glycine max
gatatccagtacttgcttccacttctgattcagaaactcttaggcattccacattctcaaccccgaaccctaagagcagagcgaaagtgacagccagcttcgcgaccgtcacaggactcggtggcgcattattgtcatccacctcatctcgtctcacctcagggtttgtgaaatccccagtgattgctacgaatcccttgatgcaagctgtggcaatgggaaatgggacgagtagatgccttgagaagaattggttgcgggcagattacagtgtgattgggtttgggttgactggttggctagcaccctcaagcataccggctatcaacggtaatcgtctgactggcctcttctttgagagcattggtgctgaacttgctca

SEQ ID NO: 1445 - DNA, 398 bp, Glycine max
gagtcttcatttgtgtttttgtagagagaagcccagccatggataggcttctatcatcgccttcacccccttctttcacatttctcactcgattcgaatctgcaactgcaagattcattttcacacgttctcaatctcacttgaagcgggtcacctcaatttgttgccaacatgcttatccatctcctttcactcgctttctcgcttcttccaaccaccccaatacttttcgatccatttcctctccttcagttcgcttcacacccgaatcctattctctcaatgacatcaaaactggggctttccaaaagccataggcaatatcatctcggacgcttgtaatacttgctgctcgtgctatgatcttaatccaaccagctagtgcaccagcagctttt

SEQ ID NO: 1446 - DNA, 358 bp, Glycine max
gggcagcgcttgagaccaagccccactcaaccaccacaccactctctctgctcttcttctacctttcaagtttttaaagtattaagatggcagagacattcctatttacctcagagtcagtgaacgagggacaccctgacaagctctgcgaccaaatctccgatgctgtcctcgacgcttgccttgaacaggacccagacagcaaggttgcctgcgaaacatgcaccaagaccaacttggtcatggtcttcggagagatcaccaccaaggccaacgttgactacgagaagatcgtgcgtgacacctgcaggaacatcggcttcgtctcaaacgatgtgggacttgatgctgacaactg

SEQ ID NO: 1447 - DNA, 370 bp, Glycine max
gggtcctcaaatcaacacactcccttataattgcagcgtcgacaaaaaccctaactcctaaactttttttcttcccttcacctcttcagcagtcgttacagagactccataacccgagaatgcctttcaagaggtgcgttgagattggaaggggtgctcagatcaactatggcaaagagtatgggaggctcgtggttattgtcgatgtcattgaccagaatagggctcttgttgatgctcctgacatggtgaggtcccaagtgaacttcaagaggctagcactcactgacatcaagatcgatattaagaggatccccaagaagaaggatctcattcaagccatggaagctgctgatgttaagaacagatg

SEQ ID NO: 1448 - DNA, 390 bp, Glycine max
gataatagaaggttgtggggttagggctttagagtgtcttttcttctttttcttcttcttcttcttcgttgaatcgcgattgttctgttgtgcgactgaaagaagagagatcgaaaatggcgttggctttcgacgagttcggaaggcctttcataatcctgaaggaacaggagcagaagagcagacttcgaggtttggacgctcagaaagccaacatctccgccggcaaagccgtcgctcgcatcctccgaacctccctcggccccaaaggcatggacaagatgctccagagccccgacggcgacgtcactatcacgaacgacggtgccacgatccttgaccagatggacgtggacaaccaaatcgcgaagctgatggtggagctctcgc

SEQ ID NO: 1449 - DNA, 406 bp, Glycine max
gaggggggctagtgacagtaaccaacctcgatttctcactcgccgtcgtctcttccgtctagggtttctcctcttcacaaaaatggttgccgcaaaaaaaactaagaagacccatgagagcatcaacaacaggctcgctctcgtcatgaagagtggcaaattcaccctcggttacaaaaccgttctcaaatctcttaggagctccaaagggaaattgattatcattgctaacaactgcccccctttgaggaagtcagagattgaatactatgctatgttggcaaaggttggggttcatcattacaatgggaacaatgtggatttgggcactgcatgtggcaaatattacagagtgtgctgccttagcattattgatcctggtgattcggatatcatcaagacactg

SEQ ID NO: 1450 - DNA, 405 bp, Glycine max
gaattgaaaagagcaaagtttggaaatttgggaaacttgaaagcatagcagagagatcacatcgcggctctctcatgtctcaacccaaccacccgctgaatctaaatgatgataacagagagagatgtaagaatacaatcaaacagcatgaagataatcttaagtttcttaattctcaatcaaatcaattagctgaatcaatatttgacttgcaagtgagtcttgcaaggtaccattcaactaatgtaattacgttagagaatggaaatggtgcctttcatactgaagaggaaacaatggaacaggtaatgaagaaagagaactctgctgctagtatatttagttggctaaaagttaatgcacagacatcaaatttgacattaacaaaggatgttgtgggagttg

SEQ ID NO: 1451 - DNA, 222 bp, Glycine max
ctcggggacctgtgcaccgactcccctgacttacgctgctggaacccatcactggataacgttttcgctatacatattcctctgcttactctaacctgtcacaaacagacgctccacttcatcaatcattactacttcgcatacgtgccttaactttgctcatctctccaatgtcctccaccagtagcttcatcaacacagctttatcatgcaacccattcc

SEQ ID NO: 1452 - DNA, 396 bp, Glycine max
ggcagatatctgtaatttgtgtctgctcactcgctcgtctccgccacttctgaatctattgaatcaacaatcatgtcggacgaagagcaccatttcgagtccaaggccgacgccggagcctccaaaacctaacctcagcaagccggtaccatccgcaagaacgggtacatcgtcatcaaaggccgcccctgcaaggttgtggaagtttcgacttccaaaactggaaagcacggtcacgctaagtgtcactttgttggaattgatattttcactgccaagaaacttgaggatattgtgccctcttctcacaactgtgatgttcctcatgtgaatcgtactgattaccagctcattgatattgctgaggatggatttttgagtctgcatactgaaaat

SEQ ID NO: 1453 - DNA, 344 bp, Glycine max
ggatcccttgtattctattcttcgggattcacatggctcgtttcaagcacaacgctcttaagtccacaagaggatacgctctctacgaagcagcttgcaaccgaagctgcacgtatttctgcaacagctactggtggtgtgaagaccccccaccgttatcatcctgttaacgttgctcttcgtgtgattaagctgtacctgaagattaccgaccttttgatgcggaatctctccttccagtagctggttcttgaaattgctcatgacgtcacgactgatatgcgtttctagagtcacgccgtgcttgcattacaaggaactgctgtggctttccttgttaggct

SEQ ID NO: 1454 - DNA, 396 bp, Glycine max
gactcactcatacaatagagaccagcttttgcttctttgtgaacatggagatgaggaaatcatgtggcttcttcttcttgctcctcctccttgtctttgcttcccaggtggtggtgcagacggagggaagagtgtgtgagtcacaaagccacgggttccatggtttgtgtaatagagaccacaactgtgctttggtctgcaggaacgaaggtttctccggtggcaggtgcaaaggcttccgccgccgctgcttttgcaccaggatttgttgagatctcatcaaacactactcttgccatgcaaattaataaatcatagctaggccaaataaattgcatctactcgttatccatttgggagctagctatcacaatcaactcatacttggtcaatgga

SEQ ID NO: 1455 - DNA, 364 bp, Glycine max
gacatcacatcacatcgcagagagagagagatccatcgatcaattaatttccaatggccgatcagctcaccgacgaacagatctctgagttcaaggaagcctttagcctcttcgacaaggacggcgatggttgtattaccaccaaggaacttgggactgtgatgcggtcgcttgggcagaacccaactgaggctgagctgcaggacatgataaatgaggttgatgctgatgggaatggtaccattgatttcccagaattcctcaatctcatggcgcgcaagatgaaagacactgattcagaggaagagctgaaggaggctttccgtgtgtttgacaaggatcagaatggtttcatctctgccgc

SEQ ID NO: 1456 - DNA, 372 bp, Glycine max
ggactctgatgcgaacgtaaccaggctctggttttgcggttagggtagctctttctactcaaaacaaaacaaaacatcaatttctgtttcagttcgcggagatcaatatttgtcgctgaggtcgatcgtcgataaaaggcaatgtttttgtgggattggttttatgggattctagcgtcgcttggcctgtggcagaaggaggccaagatcttattcttgggcctcgataacgctggcaaaaccaccttgcttcacatgctcaaagatgagagattagtccagcatcagcctacccaatatcctacatcagaggagttgagtattgggaaggtcaagtttaaagcttttgatctcgggggtcatcagattgct

SEQ ID NO: 1457 - DNA, 367 bp, Glycine max
tccgtttttacgttatttcgcactgtattgtacaattcctttatttgtgggatttatttctcacacgataattcattaaattatagaatggatttttacctatgcctagatctcggataaatgaaaattttattgataaaaccttttcaattgtagccaatatcttattacgaataattccgacaacttcgggagaataaagggcattcacttattacagagatggtgcgatttgattctatttttttagcgatatcggtaaaaagtggaaaaaatccacgcttgctgaacgtgaaatttgtaaatatcaacgattaattccttctgtcgtgtatcctcgattaatgcagcctcatatgcttaaact

SEQ ID NO: 1458 - DNA, 400 bp, Glycine max
  modified_base (371)..(371): a, c, g, t, unknown, or other
ggagagggcgaggaagccacatagagacacaatacagagtgagttgttgctccttcgccacaactctctgccaacatgggtatctccagagattctatgcacaagaggcgtgccactggtggcaagaagaaggcctggaggaaaaagagaaagtatgagcttggtcgccagcctgctaacactaagctgtcaagcaacaagacagtcaggaggatccgtgttagaggtggaaatgtgaaatggagggcattgagattggatactggaaattactcctggggaagtgaagctgtaactcgcaagactcgtgtactagatgtggtttacaatgcctcaaacaatgagcttgtgcgtactcagactcttgtcanaagtgctatcgttcaggttgatgctgctc

SEQ ID NO: 1459 - DNA, 100 bp, Glycine max
gaatgttaatgttcctcaagccatcgtaccgtgttgcctctcagacatctatccgtcatattgcctttcatcacgtacctttacatctggagggttgccc

SEQ ID NO: 1460 - DNA, 399 bp, Glycine max
gacacaactaactaagaaagtcttccatagccccccaaaaatgaagagcaccatcttctttgctctctttctcttttgtgccttcaccacctcatacctaccttcagccatcgctgatttcgtgctcgataatgaaggtaaccctcttgaaaatggtggcacatattatatcttgtcagacataacagcatttggtggaataagagcagccccaatgggaaatgaaagatgccctctcactgtggtgcaatctcgcaatgagctcgacaaagggattggaacaatcatctcgtcgccatatcgaatccgttttatcgccgaaggccatcctttgagccttaagttcgattcaattgcagttataatgctgtgtgttgggattcctaacgaatggtccgt

SEQ ID NO: 1461 - DNA, 407 bp, Glycine max
ggttttccacattcatattttccttgcgtttccctttcattttccctcactttctcgctcgccaaacgcccctctctctcctccaatggccgaccagctcaccgacgaccagatcgccgagttcaaggaggccttcagcctcttcgacaaggacggcgatggttgtattactactaaggaacttgggactgtgatgcggtcactagggcaaaacccaactgaggcagaactgcaggatatgattaatgaggttgatgctgatggcaatggaaccatcgacttcccagagttcctcaacctgatggctcgcaagatgaaagacaccgactccgaggaggagcttaaggaggctttccgtgtgttcgacaaggatcagaatggtttcatctctgcagctgagctccgcc

SEQ ID NO: 1462 - DNA, 393 bp, Glycine max
ggtcgtcgaagcgcgagcaagcatcccaaaaccctagctcgcgttctgcattcgtcttttacatcaggatggagtctcaagtgaagcacgcacttgttgtcaaagttaagggtcgtactggatccagaggacaagtaacccaagttacagtgaaatttttggatgatcagaaccgtcacatcatgacgaatgtgaaaagacctgtgcgagaaggagacattctcaacctactcgagtctgaaagggaagcaagaagattgcgctagatggtttcttttggcttggctccaaattctaacaagacagtggtgatttgttgattttaatggtacatggtggatgtcaaaggttttagcaccctatcctaatgtccgtctttgggccaattttaat

SEQ ID NO: 1463 - DNA, 371 bp, Glycine max
ggtcgctttttctctatcttcatcacacacacttcaatctttttcgcttttgtctttctttgtcctttgattgctgccattaattaattaattaatattctccctccctcttcacatcaagaagttagaagaagtccatgcggtgtcagcttgtgaagaagaaatgtgagaaggatcttggtttacacctgacctgacagttctagtagtagagtgcaacagctacaatctaatctaatggggtccgagcaaaatcgatttcctcagcacgaaagacgaaagagatggggaggatgttggggtgcattttcctgtttaggttcacagaagggtgggaagcgcattgtacctgcatctcgcattcctgacag

SEQ ID NO: 1464 - DNA, 335 bp, Glycine max
gagacattgtgctttcaacttggctccgctctttggtttgctcaaccgatctccgcaacaatggtgaacgttccgaagacaaagaagacctactgcaagagcaaggagttcaggaagcacacgctccataaggtcacccaatacaagaagggcaaggacagcatcgccgctcagggaaaacgccgttatgaccgcaaacagtccggttacggtgggcagaccaagcccgttttccacaaaaaggcgaaaaccaccaagaaaattgtgttgaggctccagtgccaaggatgcaagcatgtctcgcagcacgctatcaagaggtgcaagcactttga

SEQ ID NO: 1465 - DNA, 208 bp, Glycine max
tgggaacatcgttttctcgtttgtgttttttccgttaaaatcataaatttctcacggaacaccagatccacgctcccgcttacaggccttccaccatctacagatccatgcttgacgagttcaccgacgacgtcatgttcctcgacaacgaccgcgatcactgtattgataccaccgaagctggcattgaaaccccgtcaatagggca

SEQ ID NO: 1466 - DNA, 375 bp, Glycine max
ggagtgtgtcgtgtggtgtgagacagtgtaactcggaagcgcagcagcaatggcaagagcgactctccttcacttgctgcggtcacagagcctccgccacgtgtccaaaaacgctccttcagcatatcgttgttttgggtcctctacctgtcaacgacccattagccccaatccatcattcaaaacttcctcccatcttgctattttccaaagaagatgggcatcacaaatcccaactacagaggaagacgacaagattagcatcggacctcgtagtggaggacaaccacgggagggtgacaaggaaactggagtcgtttattatggcccgatctcaaacaccataaagaaagtaaaacttctgtctctctcaac

SEQ ID NO: 1467 - DNA, 388 bp, Glycine max
gattgaggacggtgcagacgcagatgtggagaacagaaacgatgaaataactggagagcctattgacaccgatgataatgaagaggaacaaccactgaagcggcctcgatagacatcgatatatatgactaagtatgatcgtgctagaattttgggcacccgtgctcttcacatcagtatgaatgcacctgtcatggactacttggagggggaaactgacccactcgatattgctatgaaggagcttcgaaagcggaaaataccctttacaattcggcgctacttgcctgatagaagctatgaagattggggagttgatgaactgattgtgtgagactcctggaaaaagcaactgggttgtgactgatgattgaactgacaagtgtgg

SEQ ID NO: 1468 - DNA, 397 bp, Glycine max
gagtggcagacgcagacgccgtgactagacactcatctcactcgcgccatcttagggtttctccttttgtttcgcaacatggttgccgctaagaaaactaagaagacccatgagagcatcaacaacaggctcgctcttgtcatgaagagtggcaaattcaccctcggttacaagaccgttctcaaatctcttaggaactccaaaggaaaattgattatcattgctaacaactgccccccctttgagaaagtcagagattgaatactatgctatgttggcaaaggttggagctcatcattacaatgggaacaatgtggatttgggcaccgcatgtggaaaatattacagagtgtgctgccttagcattattgatcctggtgattctgatatcatcaag

SEQ ID NO: 1469 - DNA, 354 bp, Glycine max
ggaacctttgcattctattcattcaagattcagcaagtgcgttttggaagcagagaccgaaatacttcgagatggcccgtacaaagcaaactgctcgtaagtcaactggaggaaaagctcccaggaagcagcttgcaaccaaggctgcacgtaagtctgcaccaacaactggtggtgtgaagaagcctcatcgttatcgccctggaactgttgctcttcgtgagattaggaaataccagaagagcactgagctcctaatcaggaagcttcctttccagaagttggttcgtgaaattgcccaggatttcaagactgatctgcgtttccagagccatgctgtgctcgcattgcaag

SEQ ID NO: 1470 - DNA, 382 bp, Glycine max
ggacgcaactcacaagtgaagaagaacgagagattgagaagagaaagcgttccaaaatgttcacgctatctcgcgtgttccctctcacttccccttccaggcataggctcttggaagtgctgtcctctaggaaagttgaagtcggagaccgtctgcgccaagaggggcgcgattttacctattcagctgccatttctactgctacaaataactatgctgccaaaggacacgcttccgatcgaatatttgctccttatactgtttacaagggcaaagctgcattctcgttgattccttgtcttccaactttcactaagttggattctgggactgttgtagttgatcgacgcggttcaatcatgatgtctttcatgcattctat

SEQ ID NO: 1471 - DNA, 384 bp, Glycine max
gagtgaagagataaagaagacggaggcggtttggagtatgacttcttgcacctcttttgcatcctttctcatttcttcttcttcatttccttcattgtgcttcgcgcaaacccactcaatcacatgtaaacaacgcttcccatttccttctgtaaagggaagaagaaagttctcaactttatcattttcatccaccaaaggctcgttacaagagccgctgagtacaaattcccagaccctattcccgaatttgcagatgccgagactcaaaaattcaaaagccaccttctcaaaaagctttcaaagaaagatatgtatggagaatcaattgaggaagttgtaggaatttgcactgagattttcagcactttcttacactccgag

SEQ ID NO: 1472 - DNA, 372 bp, Glycine max
ggagggttggttcatttgatctgcgagtggagaagagaatcgtgatgggaggaggacacggtcacggcaccacctacaaaggagttaccgttcatcacccaaagcgctggcacactatcaccggcaagggtttgtgcgcggtcatgtggttttgggtattctacagggcaaagcaagacggtcctgttgtattgggctggaagcatccttgggagggtcatcacgatgatcatggcaagggccattaagcattccttaggcatgagctccaagaacaggaagaacagaatttgaagtgactgttgctgtgggtgtgctgttagttgaaatgtttactttgatcaattcaataaatttggctgtaaaataaga

SEQ ID NO: 1473 - DNA, 376 bp, Glycine max
ggcccttctagctttttcccagtccaagcagcctccaattcgtgccactctcttcaaaatggccgttaccttctcaaatctccacacagaatcaggtctcaagtccctcgacgacttcctctctgggaaggtctacgtttctggggatcagttcacaaaggacgacatcaaagtgtatggtgctgttttggagaagccaggtgactcttttcccaatgctgccaagtggtacgaggttgtctcatctcagcttgctgcaagcttccccggcaatgctcaaggggtgagattcagtggcaaagcttctgctccagcggaggctgctcctgcgagaccggatgcttctgctgctgaagatgatgatgaccttgatctc

SEQ ID NO: 1474 - DNA, 392 bp, Glycine max
gatagaggttgttggttgttggtgtttaaaattaaaaccgagcctcttccccaaaggagacacagagcgagagagaatcgtaacaaaagcggtaaccggaataagttgtctctacgatttgagccatggcaacaacaacatcctcaaaccgatcatcagaggcgtttgctctcatggcaatcctcagcactctgctttgcacggcggtggcggcgaaggagagcgtgtacgagatactccccaagtacggcctcccgagcggtctgttaccggacaccgtcaccgactacacgctcgacgaggacgggcaattcgtcgtcgttttggcgaagccctgctacatacagttcgattacttagtttactacgagaacaagatctccgggaagctc

SEQ ID NO: 1475 - DNA, 381 bp, Glycine max
ggcaaagtgtttcttgtagcattcagtgaagcactagctaaggtattgggagctctcgttgtttcggagttagggaccttacgcagccatgggcactgctacgaatgccgccgccgccccatcacgccagctctcccagaaggaagctgacatccagatgatgttggccgccgacgtccacctcggcaccaagaactgcgacttccaaatggaacgttacatcttcaagcgccgcaacgacgggatttacattattaaccttgggaagacgtgggagaagcttcagctagcagctagggttatagttgcaattgagaacccccaggatatcattgttcaatctgcaaggccttatgggcaaagagcggttctgaagtttgc

SEQ ID NO: 1476 - DNA, 424 bp, Glycine max
aggggttcaaagcaagtttcccttttaagtcgagtcgcattgcaatgactgcatcggattttgtctttcatggcttcatcaaggtctcgcaaacaacgaagtcgcatccctgaggcagtttttgaaaacattgcatggagtattctactacaaaatccttccttccaagcataggttcatgcccctgaaaatcacatacgataatatggcagcattcttcaagtctcgggaacggtttctttcaaagaatgtcactttcaaattggattgaactgttggtcaagcccgttgagaaaattaaatactcgatccttgttaagattctccatacagctttttacatctgctgcacacactccattccacttgggcatcgcttatccattttgttgaatccgggttgtattacaacacagttcaaaat

SEQ ID NO: 1477 - DNA, 430 bp, Glycine max
  modified_base (336)..(336): a, c, g, t, unknown, or other
ttacgattgcaaaaagacaacaaaaggttacggttgcaaaaaaacaacaaaaggttacggttgcaaaaaaacaacagaaggggaacacaatggcaactaatttaaccccttcccaaccaaccaaaccctcacttttttgaaattacttgcatagatagataatcatggctatgatgaaacgtgctgcttcctctgcgcttcgctctcttattgcctcatcctccaccttcaccagaaaccttcatgcctcaggtgaaaagaagaagattgtgggggtgttctacaaagggaatgaatatgctaaattgaatccaaattttgttggatgtgttgaangtgcattgggaatacgtgagtggctggaatcacagggtcatcagtacattgtcactgatgacaaagaaggacctgattctgaacttgagaaaca

SEQ ID NO: 1478 - DNA, 340 bp, Glycine max
ggtcctccgatagttataatataaccatgtaacgttcaaattctacgccaatctctgtctcattctctttcctctttcctttttccttacaagaatcgaaaacgtcttcaaaaaaccaagccattattaatggctgtcgattccttcttccagaaagaacatcaaattcgggagtttgtggacgggaatggaaacgtatctgtcggtttgaagttgcataatacaccaagtaatgatggccttaaacgacagtttcctctagagattccgccgattctatttgaagagacttcacttccagcatgattgcacggttcacatactacagatgtttatagta

SEQ ID NO: 1479 - DNA, 267 bp, Glycine max
gacaccatccagtactcttcttttcagcacaacctcttcatctctcccaggctttcttttctttgcaacaacactaccaaaaatgtcaccagatttcacacttttgttctccccggaactcatgcagtcccctatcatcactttccaagccactttctgtgtccttctcttcaacctcatgttcacgccgttcttcactcctggtgggcttccttgggcctggggccgggccaagaacatcatccctggcccagtaactgccctgct

SEQ ID NO: 1480 - DNA, 371 bp, Glycine max
attatggtgaatagccatgaatagtattcccttgttcctgcatgcaaattcatatgaattgaaatctattacaaattgagtagtggatcacaatcattgatgtacaaggcaggcctcaagtacgatccatccatgtattcaaaatttgtgagatttaaaaaataaaataaaatacaagtaggaaggctaagttaattgtgctagtctgggagcatcaaatcattgatatatcaacaaaatgaaaataaaataaaaacagtgtatacataacaaataaataagaatggtactttgttagaaaacaaaacaagtttaataatagctcacaaaccactatttttattacgtctcatcactggaaccaatagaga

SEQ ID NO: 1481 - DNA, 376 bp, Glycine max
ggagcgaagaagatattagggtttttgagtgcggtgcggcgatcctagcactctcttctgcagctttcgccgacagcttcattcaccatggctgagcaaaccgagaaggcttttttgaaacaaccaaaagtgtttctcagctcgaagaaaactgggaagggaaagagacccggaaagggtgggaaccgcttttggaaatccattgggcttggatttaagactcccagggaagccatcgaaggaacctacattgacaagaagtgccccttcactggcaatgtttccatccgtggccgtatcttggctggaacatgtcacagtgctaagatgaacaggactattattgttacgacgaattatctccattttatcaaga

SEQ ID NO: 1482 - DNA, 330 bp, Glycine max
gatcatcgctgtggtttttctttttctctgttgaggttgtcattgggagcactcaacctaaactattcaagttgtgaaagcacatcacaagaaaattcgcaagcgatggatccgaagctaaaagaggtttctcagctcttcgatcgctttaaggcttcgtttatcaggaacgactttgatacctgttccaatctcctttctcagctaaaggtgttacttacaggtttcagaagccttccaccgttgtttgcagatacacctaatgcagttcatgaattaacaatagcaagggatatatacgagcatgctgttgtccctagtgtgaaaaat

SEQ ID NO: 1483 - DNA, 288 bp, Glycine max
aggaagactgtctctaaggaggaagcgtctgccatcaaggctgctgggaaagcatggtatcacactatggtgtcagattctgattatacagaattcgacaacttttctaagtggttgggtgtttcacagtaaacttcatgatttatttttttcgtattagaattttgttttttatgctcatcagaactaaatatccttatctttggtttttttgttttgcgggttaaggttgtcatcataattatgcagacaatgtggaaattttgtttgttggattttagtgcaaat

SEQ ID NO: 1484 - DNA, 379 bp, Glycine max
taccagatgagcaatcttaggacctattcctggcagcaagagtagtccttcaattgagcttggtatgtctccatcgtacttcaagaaacaaaaatattggcaattttcttcaagttactcgcttttcttgtataaaatccagattatttgaatagcatgagtaaatggttttcaaccgataccatagattctgtgacaaagaacatactgggtaaatcaacttttagatggtttcctcatcagttttgttcattgcatcagctgtaagcaaaccattttcacaaagaggttgagtcgctcctactcttaaaagtacaaacttgtaattaaaacaatttcataagcaagttgaatatcatgacactggcaatgggcatca

SEQ ID NO: 1485 - DNA, 373 bp, Glycine max
ggagcttttctttctttctctgctctcttttcttttaggtttccactctcacacactctccctcttctccttctctgcaataatctctcttctcttcttcactctctcaactcctgccaaacccccatttccgcagttcttaaatttggagtctgatgtctccgccattgctggttaccgaagatgaagggcagtgccatgcctcgatggtagcatctgcatcttcaccatccctgaactgtttctccctaaatgaggccggatttaaagaatgcaattacctgggattgtcagattgctcttcggtggacagttctactgtcccgaatttgtctgatgagaaaaaggagaatctgaatttgaaggctactga

SEQ ID NO: 1486 - DNA, 59 bp, Glycine max
agggtgtctaccattttttttatgtagctttcttacccaaactagaccaccattatcgc

SEQ ID NO: 1487 - DNA, 242 bp, Glycine max
cgctgaaggttcatggtagctgactcaatgtgaaatgaaacagaattttaaatggatatgaaatgggttccaacaggactcttcaaggtgttaatggatattaaatgagacttgatgttttcatatttatttttttaagattcctatggtggttcgaattgatcttttcattagaatttctattccagtttcgtttcaaaaaaaaaaaaaaaatcaaaaaaataagaaaaatatatcaacat

SEQ ID NO: 1488 - DNA, 109 bp, Glycine max
gtagcggacaaacaaagcaaagaattcgttatatagactggcctgcaatgttgaactatgcaattccttcatttcttttccctataaatagaggctttttgtgtcttat

SEQ ID NO: 1489 - DNA, 230 bp, Glycine max
tcacttaaatgatcgcatttggctagcatattaaccaacagattgccaagtggagtatatgcgcgcttagggtgcttgttccatgcgaaaacatgtgtcattcatgctgagatcgatcacttgaatttttggtctgactctacactgcgtaatcctcgcaggcgtcaaagagatttatctccacagcaggctccacatgatcgcaatgaagtacttgcgtttcctccgca

SEQ ID NO: 1490 - DNA, 401 bp, Glycine max
gacacaccgtttgttctattcttaactcaacttctgctacccactctcttcttccaagtccaaccacgcttttctctacagtcatgggcaaggtcaagatcggaatcaacggatttggaagaattggccgtttggttgccagagtcgctctgcaaagagacgatgtggagctcgttgccgttaacgaccctttcattaccaccgattacatgacatacatgtttaaatacgacagtgttcacggacactggaagcatcacgatgtcaccgttaaggacgagaagacccttctcttcggtgacaagccagtcactgtttttggacacaggaaccctgaagagatcccatgggggtcaactggagctgatatcattgttgagtccaccggagttttcaccgat

SEQ ID NO: 1491 - DNA, 328 bp, Glycine max
gttccaatgagaacccaactataattgcagggactgtttttgatgaaaatccagaagaagcagtagaccttgataccgtcattaaagcagcgctgaaagacagtaacaagctcagcagtggaactttcaacactgtttacaaggcagtcatgccttctggggtggtcatatctgttaggagactgaagtctgtagacaagacaataatccactaacagaacaagatgatctatagaacttgaaagactgagcaaagtttgccatgataatctaatgcgtcacattgtctatgtcacttatgaagatgttgctcatcgcctgcatcaat

SEQ ID NO: 1492 - DNA, 370 bp, Glycine max
gactccacaacacaaacaaaaactcccgttttctctctctgtttttccatggtcatctgatcaaacttttcttgattcactctctcagtttttgctattctgagtgatgggtatgccctgccgctgttcccacacctcccacatcactgagatcatcatcatcagcttcttccgccacaagtctgaaattacaacaatttccctcaattattcatcaaccaatcaccttaaaaaccttttccaatggatccctaaagattcaacttggtcagagtaaacatggcggctaatggaaattccttttccaacatcactagctttccttcgcatccaacatacctcttaccaacctctcgattcttctcacttc

SEQ ID NO: 1493 - DNA, 391 bp, Glycine max
gagtgcctccattcgggactgtaactagccgcagcacgaggagcagcctcaggaggagaaggatgtctcacaggaagttcgagcacccaaggcacggttcactgggatttcttcccacgaagcgtgctgctcgtcacaggggaaaagtgaaggcattccccaaggatgacccatccatggcacccaagctcactgcattcatgggttacaaggccggtatgactcacattgttagagaggtcgagaagccaggatcaaagcttcacaagaaggaaacttgtgagcctgttacaattattgagactcctccaatggttactgttggtgttgtgggttatgtgaaaactccacgtggtctccgaacattgaacactgtctgggctcagcattt

SEQ ID NO: 1494 - DNA, 346 bp, Glycine max
tactgtcgcaaaaagatcacagtcagctacggttgcgagaatgactacacatgggtctaagtgttgacaaggtagaccttcatcggaccaatgccatcaaagccgtcgctaagaaaaagtcattgcaattgggcaactttgctagcacatgtgatcatcatcgtggttacacctttataataattttatccatgcagagtcctaagtgttctgtttaagttatatttataagtctctgccgacttcacgtacccgtaactttcaaaactatagttcttgatcagaggtggtcaattttcactgctgtcagtttttgatgagtactgttttttgttttgatggtaag

SEQ ID NO: 1495 - DNA, 392 bp, Glycine max
ggcgtacacagcctcaacaaccctaacgcgtgcagagcagagagagacgcagccatggggcgaagacccgcgaggtgttataggcaaattaagaacaaaccataccccaagtcacggttttgccgtggtgttcctgatcccaagatcaggatttacgatgttggtatgaagaagaagggtgttgatgagtttcctttctgtgtccatctggttagttgggagaaggaaaacgtttctagtgaggccctggaagctactcgtattgcttgcaacaagtacatggccaaatttgctggaaaggatgctttccacttgagagtcagggtgcacccattccatgttcttaggatcaacaagatgctttcgtgtgccggagctgataggctccaaac

SEQ ID NO: 1496 - DNA, 81 bp, Glycine max
gggatagttgtagacatgtgacattggtttggttcatgttttggaccaaatatttttaacatgtctaagattgtctggtac

SEQ ID NO: 1497 - DNA, 350 bp, Glycine max
ggttttgcatttgtcttctttaacttgtcactctctctctctctctaatggcttcattttccatcacctcctcgcctcccacccttcacaaagccactatcaccgacccttcttcttcttcttcccacgccttccctcaccgttctcccttcgttttacgcatgccccaccaaccccatcgccctcaaactcctcttgttttgcccaagattcaatctttgcgcaacgaaactagagctattccagttaccaaagacctgtgggataattcaattctgaaaagtgaaatcccagtccttgttatattctatgcaaattggtgcggcccgtgcaggatggttcaccggata

SEQ ID NO: 1498 - DNA, 389 bp, Glycine max
ggtgctctgctcgtgcctctagggttatcatttctccatttccattttctctctcacttttcaagaatcgtaagctatgggaaagtcttacccaactgtgagtgctgattaccagaaggccgttgagaaggcgaagaagaagctcagaggcttcatcgctgagaagagatgcgctcctctaatgctccgtttggcatggcactctgctggaacctttgacaagggcacgaagaccggtggacccttcggaaccatcaagcaccctgccgaactggctcacagcgctaacaacggtcttgacatcgctgttaggcttttggagccactcaaggcggagttccctattttgagctacgccgatttctaccagttggctggcgttgttgccg

SEQ ID NO: 1499 - DNA, 364 bp, Glycine max
  modified_base (347)..(347): a, c, g, t, unknown, or other
gaatcctctgttacctctcagcagcttaggctagggttcagaaacgaaaaagggttcggtgttcagttcgcgatgggagccaagtggaagaagaagcgtatgaggaggttgaagaggaagcgccgaaagatgagacagagatccaagtagtgcgttaatccaagtagttgatttccgttgcttttataattatgttgtcaaattgggcacccagttgttagaggcactggtttctcctttttgatgttttgatacatttttgtttggtttaattcgtcttatgttattagctgaaaacaatgctgttactgcgtttgcgaatcaacatgatctcttatacgaaaaanattttcaacaatttaat

SEQ ID NO: 1500 - DNA, 378 bp, Glycine max
gacagaaaagaaaaaggaaaccctagctggataggtcaaacatcatcatgtcggacgaagagcaccatttcgagtccaaggcagacgccggtgcctccaaaacctaccctcagcaagccggtaccattcgcaagaacggctacatcgtcatcaaaggacgcccctgcaaggttgtggaagtttcgacttccaaaactggaaagcacggtcacgccaagtgccactttgttggaattgatattttcactgccaagaaacttgaggatattgtgccctcttctcacaactgtgatgttcctcatgtgaatcgtactgattaccagctcattgatattgctgaggatggatttttgagtctgcttactgaaaatgggaaca

SEQ ID NO: 1501 - DNA, 337 bp, Glycine max
gatcccaatcagaaaaagttagggtttgtaactttgtcttttgcttgcgaatctgaatcgaataataatcaatcaatcatcatgtcgtcggcgaagaagatcacactgaagagttcggacggcgaggctttcgaggtggacgaggcggtggcgctggagtctcagacgataaagcacatgatcgaggacgactgcgccgacagcggcatccctctgccgaacgtgacgagcaagatcctggcgaaggtgatcgagtactgcaagaagcacgtcgaggccgcgaatcccgaagacaaaccctccgaggacgatctcaaagcctgggacgccgatttcg

SEQ ID NO: 1502 - DNA, 398 bp, Glycine max
  modified_base (333)..(333): a, c, g, t, unknown, or other
  modified_base (364)..(364): a, c, g, t, unknown, or other
gaaaatcacaatccctaattccccaaaattttctctgaagaagaagcaacaatgtctggtcgcggaaagggaggcaagggtttgggaaagggtggagcgaagaggcatcgcaaggtgctccgcgacaacatccagggaatcacgaaacccgcgattcggaggctagccagaagaggcggcgtgaaaagaatcagcggcttgatctacgaggaaaccaggggtgtgctcaagatcttcctcgagaacgtcattcgcgacgccgtcacctacaccgagcacgctaggagaaagaccgtcacggccatggacgtcgtttacgcgctcaagaggcanggaagaaccctctacggtttcggaggctganggcttgggctttttctgggcctggaattgttcct

SEQ ID NO: 1503 - DNA, 359 bp, Glycine max
gaagtatataacttcttctaggtgtccggaaatcgttcctatcatcacttctcaaatctcgaaccctctcgttcgtgccgatcactaggtcacacttcatcaatggcgggtagaggcaaaaccctaggatccagcgccgctaagaaggccacctcaaggagcagcaaagccggcctccaattccccgtcggtcgtatcgccaggttcctcaaggccggaaagtacgccgagcgcgtcggcgccggagcccccgtcgacctcgccgccgttctcgaatatctcgctgctgaggttttggaattggctggaaacgctgcgagagataacaagaagactcgaattgttccacgccacatcca

SEQ ID NO: 1504 - DNA, 389 bp, Glycine max
  modified_base (374)..(374): a, c, g, t, unknown, or other
ggccattgaaagaaactgttgaatcgcgtcgattaaggttttgagatttctaggctttcatctcagacagtgaaaaaatgatagatataagtacacttaatgctgcacagattactgtgctgggatctgccttttgtgctatgctttccatgcatttcacgtcgcagttactgtctcagcatctcttttattggaagaatccgaaagagcaaaaggctattatcattatcatcctcatggctccaatctatgcagctgtctcctttgtgggtctcttggatatcagaggaagcaaggagtttttcacctttttggagtcagttaaagaatgttatgaagctttggtcattgccaagtttttggctttgatgtanagttaccttaacata

SEQ ID NO: 1505 - DNA, 397 bp, Glycine max
ggcacctccgtagggtttggttattagggttttcgctcacccgtgtgcagtcgagcctcccgaagaaaaagcgaaaatgccgtcgcacaagacattcagaatcaagaagaagttggcgaagaagatgaggcagaacaggcccatcccctactggatccgcatgaggaccgacaacaccatcaggtacaacgcgaagcgccgtcactggcgtcgcaccaagcttggattctgaggtgcttgctttgcctcgattcagtttatccaattaattagtgttttattttcttgagccaaaaacaatgctttggagtttttaatattttgcattttattccaagactatattgtgtaaggaatttattgtagtacgtttgacgtgggtccatttgcagaaaaa

SEQ ID NO: 1506 - DNA, 374 bp, Glycine max
ggatttttgttttgggtttttgctcgctgatgttttcacaaaatcggtttccactgatttcgcattcttcactcttccatgtctaaaatctccgaaatggacgttgctttcaaagacgcaaacgccaaatcccctctctgggaacaagtctcaagattcaaacttttgcatcaagaagatatagagtttcaaagatttggtatgcgtaacaatgttgatcagctttgtgtttttgagtgtggaatcccaggaagtgcttgatgctgaactctcagcttgagtttcacagttgataaatgtaactgacagttgaatacagtcaggaaaggagatgttcccttgcaacagatctcagcttgtttacttacgaataa

SEQ ID NO: 1507 - DNA, 340 bp, Glycine max
ggcccattgagcgatgttttaggtttgtgatgtgacatgaacaattctgaatggcacacaagatactcctttaagtttgcagctgccctgttctaaccccgggaatgatgaacatatcctagtcacaacattttccatagacagtcattttagctaactttggcatttacagcagcatttttgcttacctacacccttaattcatttctgaaactactgctgttttaccacctatattatattctgcagatgatttcttgactaccattgttaacatgcacgtaccggattcagtcatacttatggctaccattactcccgggacagtgttgattcttct

SEQ ID NO: 1508 - DNA, 390 bp, Glycine max
gagaagggagaattaggtttttagggtttacaccgagcagcgacacctccctcccgcagtagccatggttctcaaaactgaactatgccgattcagtggtgccaagatctaccccggaaagggcatcagatttgttcgtggtgattctcaggttttcctgtttgccaactcaaaatgtaagcggtatttccacaaccgcctgaagccctcaaagctcacctggactgctatgtacagaaagcaacacaaaaaggacattgctcaagaagctgtgaagaagaggagacgcgctgccaaaaagccttactctaggtccattgttggtgccactctggaagttatccagaaaaagagagctgagaagccagaagttcgagatgcagctaggga

SEQ ID NO: 1509 - DNA, 388 bp, Glycine max
gactcaccacttcaaaacactcataacacaaagcacaaagcaaagctcatccttgagttaaaaaatggcagcagcttcttccatggctctctcatccccatccttggctggtaaggccgtgaagctgggcccatcagccccagaagtgggaagggtgagcatgaggaagaccgtcaccaagcatgtctcctcaggaagcccatggtacggcccagaccgagtcaagtacttgggcccattctctggcgagcccccgtcctacctaaccggtgagttcccaggcgactacggctgggacactgctgggctttccgcagacccagaaaccttcgccaagaaccgtgaactcgaagtgatccactccaggtgggccatgctcggagccttg

SEQ ID NO: 1510 - DNA, 51 bp, Glycine max
ggcatgttgttcatctcatttaggaggccaacaaaacgttggcacacccgg

SEQ ID NO: 1511 - DNA, 311 bp, Glycine max
  modified_base (294)..(294): a, c, g, t, unknown, or other
gacttctcttcacacctttgttcactcttcttctcttgcggctagggttttagcgcagcttcttctagatttaaggaagatgggtaaggaaaaggttcacatcagtattgtggtcattggccatgtcgactctgggaaatccactaccactggtcacctgatttacaagcttggaggcattgacaagcgtgttattgagaggtttgagaaggaagctgctgagatgaacaagaggtctttcaagtatgcctgggtgctggacaaacttaaggctgagcgtgaaagaggaatcancattgatattgctttgt

SEQ ID NO: 1512 - DNA, 371 bp, Glycine max
gttcacacaaactttattacagttgttgtattgtaattaagcaagaatattaggcaatggagtcttctagaacttcaactactcttgctctttttttaaccatcaatttgcttttctttgtcatggcaagtggctgctacacttgcacacagcctaagccaaaccctatcccattcccttaccctaaccctagtcctgccgcgaagagctgccccagggacgcacttaagctcggagtgtgcgcaaacgtgcttaatggaccaattggtgctattggagggtcaccaccggaccacccatgttgctcagtgctagaagggcttcttgatcttgaagttgcggtttgcctctgcactgccatcaaagccaac

SEQ ID NO: 1513 - DNA, 142 bp, Glycine max
ggttgttatgttatgctatgggattcgattactattgtgtgaaagttacccttctcttaagttatgttttcaacacttcatttggtttgatatttagatttttgtcttccgtccccattgataaccatgaaacccctaaact

SEQ ID NO: 1514 - DNA, 340 bp, Glycine max
gaaagtggacagaagagagcgtcctagtcgcaaccctaataagaagaaccacagcttcaagcgagtgacatccaccagccatgggtcgtatgcacagccgcggtaagggtatatcctcttctgctttgccctacaaaaggacaccccctagctggctcaagatctcttcgcaagatgtggaagaaaatatctgcaagtttgcgaagaagggtttgaccccgtctcagattggtgtcattcttcgagattctcacggtattgctcaggtcaacagcgtcactggcagcaaaatccttcgcatcctcaaagctcacgggcttgcgcctgaaattccagagga

SEQ ID NO: 1515 - DNA, 377 bp, Glycine max
ggtaataaccggagaaaaatcaagcaccgagtcctcttctctctgtggtcgccgcgactacgcttcttcgaaactcgaggcgcgtgaaaaaagaccttctggatctggatctcgaacgccatggcgttttggagatctctcgtagcgttctctgcggctcttctgcttctcatccatggcgctcactgcttctacctccccggcgtcgctccacaggacttcctgaagggagatcaattgcaagtgaaagtaaataaattaacatcaacaaagacccagcttccatattcatattattcacttccctactgtgccccatcaaaaatacaggatagtgcagaaaatcttggggaagtacttcgtggtgaccgcattga

SEQ ID NO: 1516 - DNA, 371 bp, Glycine max
gaggttttctgagttattgttaccatttgctcccagcactgagcttaaccgagcttcacaaagatgaatcgggaaaaattgatgaatatggccggttcggttagaactgggggaaagggcaccgtgagaagaaagaagaaggctgtccacaagacaacaaccacagatgacaaaaggcttcagagcaccctgaagagaataggggtgaatgccatcccggctattgaggaggtcaatatctttaaggatgacgtagttatccagtttctaaatcccaaagttcaagcatccattgctgctaatacttgggttgtcagtggttctccacaaacaaagaagttgcaggatatactccctagcattatccacca

SEQ ID NO: 1517 - DNA, 360 bp, Glycine max
ggtgctctgctcgtgcctctagggttatcatttctccatttccattttctctctcacttttcaagaatcgtaagctatgggaaagtcttacccaactgtgagtgctgattaccagaaggccgttgagaaggcgaagaagaagctcagaggcttcatcgctgagaagagatgcgctcctctaatgctccgtttggcatggcactctgctggaacctttgacaagggcacgaagaccggtggacccttcggaaccatcaagcaccctgccgaactggctcacagcgctaacaacggtcttgacatcgctgttaggcttttggagccactcaaggcggagttccctattttgagctacgccga

SEQ ID NO: 1518 - DNA, 363 bp, Glycine max
gactgaaaaaagagaaagtgagaaaagggtcgaacaactggtgaagtcattgatggctacagaggaagagagtgcggtgaacgagcctttggatctcattaggctcagcctcgacgagcgtatctatgtcaaactccgttccgacagagagcttcgtggcaaacttcacgcttatgattagcatcttaatatgattcttggtgatgttgaagaaattgttactacagtggaaatcgatgatgagacatacgaagaaattgtgaggactacaaagcggacagttcctttcctgtttgtcaggggagatggggtgatattggtttccccgccattgaggactgcatgactggactgatgaactaa

SEQ ID NO: 1519 - DNA, 378 bp, Glycine max
gactcaccacttcaaaacactcataacacaaagcacaaagcaaagctcatccttgagttaaaaaatggcagcagcttcttccatggctctctcatccccatccttggctggcaaggccgtgaagctgggcccatcagccccagaagtgggaagggtgagcatgaggaagaccgtcaccaagcaggtctcctcaggaagcccatggtacggcccagaccgagtcaagtacttgggcccattctctggcgagcccccgtcctacctaaccggtgagttcccaggcgactacggctgggacactgctgggctttccgcaggcccagaaaccttcgccaagaaccgtgaactcgaagtgatccactccaggtgggccatgct

SEQ ID NO: 1520 - DNA, 379 bp, Glycine max
gcagcagcatttgaactctactatcgttttctccgttctttctcaaagccgcactcaactttctaaaaccaaatcggtttgaatcctcatttcccgcctctcactggaaagcagcaaaatcacctttctctactatctatctgttccttttgtacgctgagtgggtagaagtcatggtaaggctcactgctgacttgatttggaaaagccctcatttcttcaacacgattaaagagcgtgagttagatctcagaggcaagaagatagctgtaattgaaaacttgggtgctactgaggaccaatttgacacaatagacttatctgacaatgagattgttaaacttgaaaatgtaccatatcttaaccggttgggcacaat

SEQ ID NO: 1521 - DNA, 340 bp, Glycine max
gaggggaaaagaactaagatcagattacaagatgatagcaagaagatgccaaggttgaatgtggagatcttcaatgaaaacgagcaagaagattgtagtctggaagatggacagaaggtagagaagatgtatttgtatcgtacattggctgggaaaaggaaagatgcaccagaatatgtatggactctgtaggtgcattttttaggtcatttaatttcttgttattcagaagtttgtacttgtttttaggctgactgaattaatgcaattttagccgggtgtagtgttttgtaacttccttgcatttgctagttttatacatatgttagtttgtcttttc

SEQ ID NO: 1522 - DNA, 370 bp, Glycine max
gagggtttttgtcgttgcgactaagagttgctgcttcttccgccactcagcacttcgctccctctgtgcttcaccaaccatggccgaaatcgaagctaccgttccagatccctctcaaatcgacgtcaaacttttcaaccgctggagcttcgacgacgttgaggttactgatatgtctctggctgattacattggagtgtccccgtcaaagcatgctacatatgttcctcacactgctggtaggtactcagtgaagaggttcaggaaggcgcagtgccccattgttgagagactcaccaactctctcatgatgcacggaaggaacaatggaaagaagctcatggctgtcaggattatcaagcatgcaatg

SEQ ID NO: 1523 - DNA, 281 bp, Glycine max
gagcaacatggtgaagctggtggagagatttacttgccagaagcttacgttagaaccaagaggactacttaatggagcaaatcagttggaagaacttgtagctagcttcccaactggcttatctgagtgtggagaagcattatcaagccttaggagtaggagaacgagtactgtttgtgatgaatgtctatggtttaagaaatctgtctttagtcaacttgtgtgttttgttattcagttctcagcaataaactgctctggcaatctagtttcatgttcat

SEQ ID NO: 1524 - DNA, 373 bp, Glycine max
ggtaataaccggagaaaaatcaagcaccgagtcctcttctctctgtggtcgccgcgactacgcttcttcgaaactcaaggcgcgtgaaaaaagaccttctggatctggatctcgaacgccatggcgttttggagatctctcgtagcgttctctgcggctcttctgcttctcatccatggcgctcactgcttctacctccccggcgtcgctccagaggacttcctgaagggagatcaattgcaagtgaaactagataaattaacatcaacacagatccagcttccatattcatattattcacttccctactgtgccccatcaaaaatagaggatagtgcacaatatcttggggaagtacttcgtggtgaccgca

SEQ ID NO: 1525 - DNA, 377 bp, Glycine max
ggcgcattgaacgaaaattagggtttgtagtgtagcaggaagaagcagcaatggcgccgaagataacacgtaaggttagcagaaaccctgaattgataaggggaatcggaaagtactcgaggtcgcagatgtaccacaagaggggcatttgggctatcaaggccaaaaacggtggcgttttacctcgccacgaccctaaacccaagcctgaagctcctgctgaaaaaccacccaaattttaccctgctgatgatatcaagaagccccttgtcaacaagcacaaaccgaaaccagctaagctcaaggctagcattactcccgggacagtgttgattcttcttgccggtagatttaagggaaagagggtagtctttttg

SEQ ID NO: 1526 - DNA, 387 bp, Glycine max
  modified_base (339)..(339): a, c, g, t, unknown, or other
ggaattttgctgtgctgacaagagaaaatgctgtgggcaaagtgaaacaatcaagcctaccaatccacaagagctgttgccttcagtttctcgcgaccttgatctaaatgttgtttcggcgcctgatttaaatgaagagcttacacctccattcgagtcttctagggatgaagataatggttgcactttgcagcaggctgttgaggcagatgatgatgctgcttcgcatgatttagaaaaaaatttagcaagatcacacggtagtggtggttcccaaacttggaaccatggacctactggtgaagttccagcagttgactctcgtggagatgcatgtangaagagggtagcaagcacaaatgaagagacacatgattgtgacagcac

SEQ ID NO: 1527 - DNA, 357 bp, Glycine max
ggaaacagagagtgatttcagtgagtgatcggtgttcacttgatctcatcataatcgtcagcgtcaattgaagaagatgccgatcagaaacatcgccgtcggaaggcctgaagaggcgactcaccccgacacgttgaaggcggctttggctgagttcatctcaaccttcatcttcgtgttcgccggctcaggctccggcatcgcctacaacaagctcaccgacaacggcgctgccacccctgccggcctcatctccgcctccatcgcccatgcattcgccctcttcgtcgccgtctccgtcggcgccaacatctccggcggccacgtcaaccccgccgtcaccttcggcgccttcgt

SEQ ID NO: 1528 - DNA, 368 bp, Glycine max
ggtctattaactcttttttgttgttgtggtgtttcatttgtgaaactaacaacaacacaaggccatcatcatggcagctgcttccccaatggcaagccaactcaagtccaccttcactaggactcttgtagctcccaagggcctctctgcctcttcaccacttcacctcgtgccttctagaaggcaatttagcttcactgttaaggccatccaatcagagaagccaacctatcaagtgattcagccaatcaacggtgacccattcattggaagcctggaaaccccagttacatccagccctttgatcgcatggtacttgtccaacctgcccgcatacagaaccgcagtgagcccactactaagaggga

SEQ ID NO: 1529 - DNA, 366 bp, Glycine max
gacaacacaacgcaacacaacgcgcactctctcttttctctcttaacacaaaaaccctatcgttcttcgcggtttcgccgattctcgccatgccgaaagccaaatccgacgccaaagccgccgatagccggttgaagcgcaagggcgctggtgctggaaggaagcaatcgaagaaagctgctaaggatcctaacaagccaaagagacctccaagcgctttcttcgttttcatgtccgagttcagagagcagtttaagaaggagcatcctaacaacaaatccgtcgctgttgtcggtaaagctggtggtgacaaatggaaatcgctgtctgatgctgaaaaggcccccttcgttgccacgggcgaaa

SEQ ID NO: 1530 - DNA, 411 bp, Glycine max
gcgcccttcttcttgcttgttgccagttgagtctcagcctccttcttcaccggctcttccttctcagataatatcagctcaatgtggcatggagatgacatgtaagggttgattcttcccttagccgttgctctgcttcaacattgcggaagcagaataagcgccgcagctatggtgaagtactccagagaaaccgacaatcccagcacgtcctgcaacgccagaggcgctgacctcagagttcattttaagaacactagggagactgcctttgccatcaggaagttgccccttgttaaagctaaacgatacttagaggatgttttggaccacaaacaggctattcctttccgacgcttttgtggtggtgttgggacgacggcacatgctaagaacagacactccaatggg

SEQ ID NO: 1531 - DNA, 380 bp, Glycine max
gacaacacaacgcaacacaacgcgcactctctcttttctctcttaacacaaaaaccctatcgttcttcgcggtttcgccgattctcgccatgccgaaagccaaatccgacgccaaagccgccgatagccggttgaagcgcaagggcgctggtgctggaaggaagcaatcgaagaaagctgctaaggatcctaacaagccaaagagacctccaagcgctttcttcgttttcatgtccgagttcagagagcagtttaagaaggagcatcctaacaacaaatccgtcgctgttgtcggtaaagccggtggtgacaaatggaaatcgctgtctgatgctgaaaaggcccccttcgttgccacggccgaaaagaagaaacaagag

SEQ ID NO: 1532 - DNA, 295 bp, Glycine max
gaacccaaagtttcaaaccaacaacaccaacaaggttcaaaatatggagatgaagagagagattattaccaaggaggaagagcacaaggaggatagcatgcacactatagtgttcacagcaggtacatttcttctgatggtgtgtctaaagcactttctagttgagcaatggcgtgcttgggttttcctcatcctcaatgtcattttgttagccattttattcatgtctatgaggccagccaagctggaggatcacagttcacgaagtgaaatcactgttgaagaagtgaaaagt

SEQ ID NO: 1533 - DNA, 365 bp, Glycine max
ggaacttagaacctttgctgaccctcgtggagtgatccggtggacgcaataactgcaggcagctctgacttcagtgcaagcaagcatcaaaacattgctttaaaagcatcaattcagcgtttctgcaagttccaattttccaactatccacagaaacggtcgtttgaaaaaaagctgttaattcgggagcgatatggaggtcgaactcaaagagctgcacgccgatcttcaatctctgagccaatcgcttcccgatccatctcaccatgatttgctccgcaagattcaattgcgtgttggggaccttgcgaagcttgcagaggcagcacctgttcgacgctctaaagttgaggatatgagtgctg

SEQ ID NO: 1534 - DNA, 161 bp, Glycine max
gaggtgaagactgaagaggtagctagtactgcacacgctgcgacgtcgcttcggagaaggattttgggcgccaaataaatcgtctcatcatagactccatagtctgaacgctaaacgaaaccaagccccaaatacaaataacgttggtgtcaggtgtcact

SEQ ID NO: 1535 - DNA, 348 bp, Glycine max
gcagagaaaggatatagtatgtgatctgcgaatctctctctgttatccggaatgtccctagtaaatttcatgattcaagattattgcatgcaaaccgattataggtatcctcagaaggctatgtttacgattcggttgccggtcggatatttaagtgtgacaaatacgttatgatatgatgtctgcacttagctagatgctgcagaatgaattgtatatgctgagatgggcgcgtctgaattggcttctaaggaagttggattttgtaatctgaagaacaatttaagggttttgaatgatagagttagttttgcgacgaataatatacggtgggagaaggctgggatt

SEQ ID NO: 1536 - DNA, 375 bp, Glycine max
gatcgttgcttaacactgttcactcactcaaccgttcctttatcttttggattcccttctcattcactttcactttcactccttagcctggttataggagctagggtttatcgagggtttcgttccttcctctctgcaacaacaatggcgaaacctgggcgaggtcgtcgctctccctccggttccgtttccggctcctcctctcgctcctcttccccctccgactctcgttcctcctctcgctcgcgctccctttctcggtcccgtcctccctcgcgctccagatcctcttccccctcctcctcctcttcctcccgaagctcccgcagccgcagccctcccccgcagaggcgccgaagtcctgctgacgcaact

SEQ ID NO: 1537 - DNA, 334 bp, Glycine max
ggagttgaaatctgaagctgaatcgtatcgttgagtttagggtttgaaattggatctgacagcatagcatagaatggcgggggttcgtagagacgcattgctgacgagagataaaggccaatcatcggtccgatttcgaatcgtcgtcgctgtcgtgatcggcgttctcctcggctgcgtctttgccttcttctcctccgctcccactcctcttcacattccctaccctattaagatggtttcatctgcatgtgaatcgccagaacaagttaatgcgcttaaagttgatattctatcagcgaaagtgaaaaattctgagctgaagaaacgggtc

SEQ ID NO: 1538 - DNA, 347 bp, Glycine max
ggccgaaaagtagtaccaagatggcttcagttgtgtatctcctctttggcttccatctcattgttatcatgtcaagttccttacccgcaactagtgaagtgtttgcaaaacagtatccatccacagaacccgtggaagaaaaactcacccaactccacttctatttccataacaacataacgggggaacacccaactgctatgaaaactgttttgcctcctaaggggtccattcatggttttggggctacttacatgatggatgaccctctaactgaaggaccaagtccaacttcaaagcttgtgggaagatctcagggaatatacgctttggcttcacaacatgag

SEQ ID NO: 1539 - DNA, 393 bp, Glycine max
gatatgagaaactcatgaaaactctggtggtgacttattagttctctcggcaagtaaggatttcaaacaaactaaagttgaagagagtataaatgactttggaaactcttcaatccaatgagttctccaacttcattatctatgacactatctctgcaactccatttagcagccatggctccccagaggctagtttcttggaaagttttgtgaactatcaggagcagcatgaccaccctacatttgataattgcgcaatgaggacccgaaagcgtgaagccagcgaaccagaaagcattggccggaggcagaattcggtggcagtgcaagggaggaagaagaggagaaggaagccaagggtttgcaaaaacacggaagaggctgagacacaaa

SEQ ID NO: 1540 - DNA, 377 bp, Glycine max
ggtagcgctatctttctcagtgtaacgcctttagctagctcagatactcgagggtggtgattttcagtttcgtgttcgtttcttggtttttctgttcagtcatttgtttgtttgcaccgaaaacccatttcgaaactggtcttacttatttttttgctgatctggtcgaagaatacatagcgacacacacaaacaaaccatggctggtgccacgaattggcttacgttttcgttgactcacatggaaatgcagcagttcggtccatacgacaccaccactcactctcactgcttcaacgacagcaatttttatgggtggacgaattctaagagcgtcatggattcacagagtgagaccaacaactttgcggtgcaaa

SEQ ID NO: 1541 - DNA, 389 bp, Glycine max
gatacctaaaaattgtaccgatatggcttcacttgtgtgtctccttttttccttgcatttcatggttatcatgtcaggttccttaccagcaaatagtgaagtgtttacaaaagagtctcctatgtctctatccacaaaacccgtggaaagactcacccaactccacttttatttccataacaacaaaatgggggaacacccgactgctatgaaaattgttgagcctcctaaggcgtccatttctggttttgggactatttacatgatggatgaccctctaaccgaaggaccaagtccaacttcaaagcttgttggaagatgtcagggaatatatgctgaggcttcgcaacatgaacctgcgatactcatggtaacgaatttgttcttca

SEQ ID NO: 1542 - DNA, 349 bp, Glycine max
gggcatagcaaaatcgtttctccaatttaatcaccattgtacaacccaattcccttcgtcgttttcgattaagagagcaatggcacgtaccaagcaaaccgctcgcaagtccaccggaggaaaggctccgaggaagcaattggcaaccaaagccgctcgcaagtcagccccggcgaccggcggagtgaagaagccccaccgcttcaggccaggaacggtggctctgagggagattcgaaagtaccagaagagcaccgaacttctgatccgaaaactcccattccagaggctcgtcagagaaatcgctcaggatttcaaaaccgatctccgctttcagagcagcgccgtt

SEQ ID NO: 1543 - DNA, 304 bp, Glycine max
gactcaccacttcaaaacactcataacacaaagcacaaagcaaagctcatccttgagttaaaaaatggcagcagcttcttccatggctctctcatccccatccttggctggcaaggccgtgaagctgggcccatcagccccagaagtgggaagggtgagcatgaggaagaccgtcaccaagcaggtctcctcaggaagcccatggtacggcccaggccgagtcaagtacttgggcccattctctggcgagcccccgtcctacctaaccggtgagttcccaggcgactacggctgggacactgct

SEQ ID NO: 1544 - DNA, 390 bp, Glycine max
gacccccaaaccctgctgcataggaagaaaccctagcctctcaccctccctgcgacacgatgcagatcttcgtgaaaaccctaacgggtaagacgatcacccttgaggtggagtcttctgacaccatcgacaacgtgaaggccaagatccaggacaaggaacgcatccctccggaccaacagcgcctcatcttcgccggaaagcagctggaggacgggcgcaccctcgccgactacaacatccagaaggagtccaccctccacctcgtcctccgtctccgcggtggcgccaagaagcgcaagaagaagacctacaccaagcccaagaagatcaaacacaagcacaagaaggtcaagctcggcattctccagttccacaaggtccacgatt

SEQ ID NO: 1545 - DNA, 363 bp, Glycine max
ggaacctttgcattctattcattcaagattcagcaagtgcgttttggaagcagagaccgaaatacttcgagatggcccgtacaaagcaaactgctcgtaagtcaactggaggaaaagctcccaggaagcagcttgcaaccaaggctgcacgtaagtctgcaccaacaactggtggtgtgaagaagcctcatcgttatcgccctggaactgttgctcttcgtgagattaggaaataccagaagagcactgagctcctaatcaggaagcttcctttccagaggttggttcgtgaaattgcccaggatttcaagactgatctgcgtttccagagccatgctgtgcttgcattgcaagaggctgctg

SEQ ID NO: 1546 - DNA, 374 bp, Glycine max
ggcgggttaatatgcagcgataacggttgaaatagaagtttgaataacagtgttttggtgaagctgagaacacaaaggtttagatcacctctgaaattctgctatggcctcaaccagatcactcattccttgtctgttcattcaactgtgcttcgatcttctaccccgctcattcgctcaatcccccgccaccatgtctgccgaaggttacaccatttatggtcgagtgaagatccccagtgtgggaacatcagattatattcttcctggaaaaatttcaaatgtcaaactcatactcaatggtggtcacagagttacttttctgaggcctgatggatatttcgcattccacaatgttcctgccgggacacatc

SEQ ID NO: 1547 - DNA, 362 bp, Glycine max
gattttgcttcatcgtattccacccacctcggaggcctaagccaaagcagatcctgcggacattgtaagtaaatcttatgaagatggagatgataactaatgttaccgagtatgaggcaattgcaaaggaaaaattgccaaagatggtttatgactactatgcatcaggggcagaggatcagtggactttgaaggagaaccgaaatgcattctcaaggattctgttccggccgcgtattcttgttgatgtgagcaagatagacttgactgcaactgtattgggcttcaaaatatcaatgcctatcatgattgctccaacagccatgcaaaagatggctcaccctgaaggagaattagctact

SEQ ID NO: 1548 - DNA, 365 bp, Glycine max
gactcaccacttcaaaacactcataacacaaagcacaaagcaaagctcatccttgagttaaaaaatggcagcagcttcttccatggctctctcatccccatccttggctggcaaggccgtgaagctgggcccatcagccccagaagtgggaagggtgagcatgaggaagaccgtcaccaagcaggtctcctcaggaagcccatggtacggcccagaccgagtcaagtacttgggcccattctctggcgagcccccgtcctacctaaccggtgagttcccaggcgactacggctgggacactgctgggctttccgcagacccagaaaccttcgccaagaaccgtgaactcgaagtgatccactcca

SEQ ID NO: 1549 - DNA, 378 bp, Glycine max
tactcaccacttcaaaacactcataacacaaagcacaaagcaaagctcatccttgagttaaaaaatggcagcagcttcttccatggctctctcatccccatccttggctggcaaggccgtgaagctgggcccatcagccccagaagtgggaagggtgagcatgaggaagaccgtcaccaagcaggtctcctcaggaagcccatggtacggcccagaccgagtcaagtacttgggcccattctctggcgagcccccgtcctacctaaccggtgagttcccaggcgactacggctgggacactgctgggctttccgcagacccagaaaccttcgccaagaaccgtgaactcgaagtgatccactccaggtgggccatgct

SEQ ID NO: 1550 - DNA, 382 bp, Glycine max
gagtgtttgaatgaatcattgatcaatctaatgtctcatcaggagcaagccgtgttgtcccttctctccaagctcgccctttccttcgacggtgccgttttgggcgttgccttggccttcgccgccgtccgcaccctcttcaaattcaccgccacctccgcctccctccgcaagctccgccgcgcaccctccatctccgtctccgacctccgctccctcctcgccgagccaccctccgatgccgacgccggcgaaatcgtaattatccgtggcactgtcgacgccaagtccgccgtcgacggcacctggaaaactttgaaacccggcgtattggtttctcgcgagtccggcgataaaggtgtcattcttcaaagaactcaaa

SEQ ID NO: 1551 - DNA, 378 bp, Glycine max
gaaaagagcattttttttttctttcggttcagagctatgatcttttgagtcttcttattcaaagtatgaccttccctcctttgttgcctgtttgacattttagcaactggttataccaaaataggaagcacggtatgagctgaaagttattatcaacttatatctttgctgtgccacaatctgtattttcaagtcataaaaaagtacagaactacagattgaacaatttttcagccactgtatttgcaatcttcctagtgatcttcttctccttttcagcagtacttcttgcagtctttgttgggtgaggttgaactttacatttgctttggctttgactcaagaagtatattctctagtgaatgatcatggtgaaag

SEQ ID NO: 1552 - DNA, 349 bp, Glycine max
ggacacacaccgaacactcaaacacacacagtgtgcagcagcagcagcaacaacaagagaagaagatggctctgcaactatgggagacattgaaggaggccatagttgcctacacggggctctccccgcccaccttcttcacccttctggccctgatcctagccctatactacgtcgtttctgggctcttcccctcttccgaccaccgccacaacaccgcctcgcgcgacttggagccccagatggagcctctgcgaccccccgttcagatcggcgaggtcaccgaggacgacctcaaggcctacgacggcaccgatcccgagaagcctctcctcatggccatcaaggg

SEQ ID NO: 1553 - DNA, 380 bp, Glycine max
gacaacacaacgcaacacaacgcgcactctctcttttctctcctaacacaaaaaccctatcgttcttcgcggtttcgccgattctcgccatgccgaaagccaaatccgacgccaaagccgccgatagccggttgaagcgcaagggcgctggtgctggaaggaagcaatcgaagaaagctgctaaggatcctaacaagccaaagagacctccaagcgctttcttcgttttcatgtccgagttcagagagcagtttaagaaggagcatcctaacaacaaatccgtcgctgttgtcggtaaagctggtggtgacaaatggaaatcgctgtctgatgctgaaaagggccccttcgttgccacggccgaaaagaagaaacaagag

SEQ ID NO: 1554 - DNA, 323 bp, Glycine max
gaaatagagaaaacacaaaaagttctgttctttttcccacccaattcagttttctcaaatggctcgtacgaagcaaacggctcgcaagtccaccggcggcaaggcgccacgtaagcagctggccaccaaggcggctcgtaagtctgctccggctaccggcggcgtgaagaagccgcacagattccgtccgggaaccgtagcgctccgcgagatccggaagtaccagaagagcacggaacttctgatccggaagctcccgttccagcgattggtccgtgagatcgcgcaggacttcaagaccgaccttcgatttcagagctccg

SEQ ID NO: 1555 - DNA, 342 bp, Glycine max
ggcagccaaagaaaagaaaatcctcaattttctgagcagccaaacactctctctctgtctctcgaaaattctcagtttgcagagaaaatctgaatcatgtcgtggcaagcgtatgtcgacgatcaccttctgtgtgacatcgaaggtaaccacctcactcacgctgctatcatcggccaagacggcagcgtttgggctcagagtaccgacttccctcagttcaaacctgaggagataactgccatcatgaatgactttaatgagcctggattacttgctccaactggattgtatctcggtggcaccaaatatatggtcatccagggtgaaaccggtgctgtc

SEQ ID NO: 1556 - DNA, 305 bp, Glycine max
tacaactgcgagaacacgatcctacggtatctaaacaacacacactaagttctgttccttttcccacccaattcaattttcgcaattggctcataacgatacatactgatcacaggtcgaccttcggcatagcgttatatcagcagctttccactaaagcggatcgtaagtcttgctccagctaccggccgctttaagaagcctcacagattctgtcccagaaccgtagcgctccgatagatccaggatctacagactagcacggaacttcagattcttaatctcccgttccatcgattggtccc

SEQ ID NO: 1557 - DNA, 395 bp, Glycine max
ggcctacgcagagagaaattgagtttctgagataaccacttttctctttgattcatcaatggcaaccgcgaggaccgtgaaggatgtttcgcctcacgatttcgtgaaggcttacgcctcccatctcaagcgttccggcaagatggagcttcctgagtggactgatattgtaaaaacagcaaaatttaaggaattggctccatatgatcctgactggtattatgttacggctgcctcaatggcaagaaagatttatttgagaggcggtcttggtgttggggctttccagaggatctatggtggaagcaagagaaatggaagccgtcccccacatttctgcaagagcagtggggctattgcaagacacattctgcaacaattgcaaaacatgagca

SEQ ID NO: 1558 - DNA, 387 bp, Glycine max
gaaggtttggttattacggttttcgctcaccggtgtgcagtcgagcccccgaagaaaaagcgaaaatgccgtcgcacaagacattcagaatcaagaagaagttggcgaagaagatgaggcagaacaggcctatcccctactggatccgcatgaggaccgacaacaccatcaggtacaacgcgaagcgccgtcactggcgtcgcaccaagcttggattctgaggtgcttgctttgcctcggttctgtttatccaattaattagtgttttattttcttgagccaaaaacaatgctttggagattttaatattttgcattttgttccaagactatattgtgtaaggaacttattgtagttcagactaatggtggtgttggtcaccttttt

SEQ ID NO: 1559 - DNA, 275 bp, Glycine max
gaagactgtctctaaggaggaagcgtctgccatcaaggctgctgggaaagcatggtatcacactatggtgtcagattctgattatacagaattcgacaacttttctaagtggttgggtgtttcacagtaaacttcatgatttattttttcgtattagaattttgttttttatgctcatcagaactaaatatccttatctttggtttttttgttttgccggttaaggttgtcatcataattatgcagacaatgtggaaattttgtttgttggattt

SEQ ID NO: 1560 - DNA, 53 bp, Glycine max; identical to SEQ ID NO: 1282

SEQ ID NO: 1561 - DNA, 352 bp, Glycine max
ggcagcgcttgagaccaagccccactcaaccaccacaccactctctctgctcttcttctacctttcaagtttttaaagtattaagatggcagagacattcctatttacctcagagtcagtgaacgagggacaccctgacaagctctgcgaccaaatctccgatgctgtcctcgacgcttgccttgaacaggacccagacagcaaggttgcctgcgaaacatgcaccaagaccaacttggtcatggtcttcggagagatcaccaccaaggccaacgttgactacgagaagatcgtgcgtgacacctgcaggaacatcggcttcgtctcaaacgatgtgggacttgatgctgac

SEQ ID NO: 1562 - DNA, 281 bp, Glycine max
gagagtgatccttctacactaactaaagccgagcagcgagagagagaaaccctagcaaaaatgccggctggtcacggtttgagatcccgcaccagagattccttctctcgtcccttcaggaagaagggtaccatcgccctcaccacatacctcagaacctaccacgtcggcgattatgtcgacgtcaaggttaacggcgccgtccacaagggaatgcctcacaagttctaccatggccgcaccggtcgcgtctggaatgtcaccaaacgtgctgttggggt

SEQ ID NO: 1563 - DNA, 392 bp, Glycine max
gtctcaagccacttcagagaaaatggcggtacctctgctctcgaagaagatcgtgaagaagagggtgaagaagttcaagaggcctcagagtgacaggaaaatttccgtcaagacaaactggcgtagaccaaagggtatagattcccgtgttaggagaaagttcaagggatgcactttgatgccaaacatcggttatggttctgacaagaagacccgccactatctccctaatggttttaagaaatttgttgttcacaatgtgaaggacttggaactgctcatgatgcacaacaggacttactgtgctgagattgctcacaatatatccacaagaaagagaaaagatatagttgagagagctgcgcaacttgatgttgttgtgacaaaccaaa

SEQ ID NO: 1564 - DNA, 203 bp, Glycine max
gattgttgttgctattatcatccgcagctgcttttattcgcaccgcaaacagtgagccatggccgtcggaaagaacaagcgcatctccaaggggaaaaagggtggcaagaaaaaggaaccgattccctttgcaaaaaaggattggaagaaaattaagcgccctccggtttcaaatgtgaaatgtttggaaaaacctcgtctct

SEQ ID NO: 1565 - DNA, 350 bp, Glycine max
gacagcactgcactcttcgcaacacaacaaaaaaagacaacccagagagcgcgtcttaataaacgctcttctctgaaaacccccatttcttttcttctttcttcttctctttcgcttcttcgatcttcgatcttcgtcgctgaaaatgagagagtgcatttcaatccacatcggccaggccgggattcaggttggaaacgcctgctgggagctttacgggcctcgaacacggcattcagcctgatgggcagatgccaattgacaagaccgttggtggaggtgatgatgctttcaacaccttcttcagtgaaactggggcaggaaagcatgtgccccgtgcgatttttgta

SEQ ID NO: 1566 - DNA, 361 bp, Glycine max
attcatgtcgtgaactctctcccttcatctagctcgagtttttttcttgcttccgggagctctgaacttgaccgacgtcgttttcacatcaaaacccttcaacaaaaaaatggcgttcttcttgaaccaaactagtatcgcttcccattttcgatctcactctcagaagactgaagatttggcttcttttcctcgccgtcgattccacgtcgaaccaggggctcgtgaaaaagctctcttggcagaagatgcaactctgaaaccgttcaaatcgtacaagaagagtgtaaaaaagcttagaaaaattgggaatgcccttacaattgttgttgttgcaggatgctgttacgaagtatatgtc

SEQ ID NO: 1567 - DNA, 359 bp, Glycine max
gagcactcactgcgctaaccccttctctctctctctctgctcggttctccgatcgccgtcttcgccttgcccattcctgatcaatatgtctagaagatatgatagccgtacaacaatcttctcccccgaaggacgtctttaccaagtggagtatgcaatggaggccattgggaatgctggaactgcaatagggatcttgtcaaaagatggggtagttctggttggtgaaaagaaggtcacatccaagctgctgcaaacctcaacctccactgagaaaatgtacaagattgatgatcatgttgcatgtgctgtggctggaattatgtctgatgccaacatcttaatcaatactgctagag

SEQ ID NO: 1568 - DNA, 354 bp, Glycine max
ggagcaaaaccctaatccctatttttcttcctcagtagtgtcatttacgcttctcttctctgcagcaactatgcctaaccctaaggtcttcttcaacatgacaatcggcggtcaatctgctggccgcatcttaatgaacctctacgccaacttaattcccggaaccgccgagaacttccgcgcgctttgcaccggcgagaagggcgtagggcggagcggcaagcccctccactacaagggctcgtccttccaccgcgtgatcccgattttcatgtgtcagggtggcgacttcaccgccggaaacggaaccggcggcgagtcgatttatggcgccaatttcgccgacgagaactt

SEQ ID NO: 1569 - DNA, 342 bp, Glycine max
gcagctgcgaaaacctagtgcaccgtaagggttgtgaagcaggcagagaagagccatggtgcacgtttctttctaccgaaactatgggaaaacgttcaagaagcctcgtcgtccctacgagaaggagcgtttggacgccgagttgaagctggtcggtgagtacgggcttcgctgcaagagggagttatggagggtccagtacgccctgagccgcatccgtaacaacgccagaaacctattgacccttgatgagaagaaccctcgccgtatcttcgagggtgaagcccttctccgaagaagttccgttacggactcctcgacgagacacagaacaaggctgga

SEQ ID NO: 1570 - DNA, 320 bp, Glycine max
ggatcaaccctgccgacagtataatccatgtggttgccaaacggcttgtggaaagcagtgtccttgtcttcaaaatggaacctgctgtgagaagtactgtggacgccccaagagctgcaagaatcgatttcgtggctgtcattgtgctaagagtcaatgcagaagccgtcaatgtccatgttttgctgcagatagggaatgtgatccagatgtttgtaggaattgttgggtcagttgtggcgatggtacacttgggattcctagccaaagaggggacaattatgaatgtagaaacatgaagcttcttctcaaacaacagc

SEQ ID NO: 1571 - DNA, 374 bp, Glycine max
ggatcaaacacagagagcgcagtccaaccctcaaaatgcattcattcggctacagagccaacgcgttgctaacctttgccgtaaccattctggcgcttatgtgcgctatggcttctgtatccgacaacttcaacacccccactccctctgcacaagtccaggttctgaacatcaactggtttcagaaacaacccaatggcaacgacgaggtcagcatgacgatgaatatttccgcagacttgcagtcccttttcacatggaacacaaaacaggttttcgtttttctagctgctgagtatgaaactcctaagaattccttgaatcagatatccctatgggatggtatcattccctctaaagagcatgcaaagttt

SEQ ID NO: 1572 - DNA, 389 bp, Glycine max
  modified_base (368)..(368): a, c, g, t, unknown, or other
ggggttatcggaactgaagtgatgcgcggcaacatttgggaaacacaatggttgacagtgagcataaccgtaacagtcaccgccatttccatctctgcatacgtattaaagagaaaatggaatcatctgaactcgaaaatcgaggagctggaagcatctctcaagtcttgctccgacaaatgcgcctccgaaaggcaaggccgaattagggctcaactggccttgagaaaacaagtaacacagtcgcaacctaaatctcaaaacctaaacctcacttcttatcccatgataccaattggtgtcgtccactcatgcttctccaccaggaacgggaccccgaggcaaccgttactcgtcccacttgctanggcctgtttggttttcaacac

SEQ ID NO: 1573 - DNA, 328 bp, Glycine max
ggccacataacacacattgaaactaaactccaacaagttcctaccatagtctgaggaaagtgagtgagagaaagagatcgcagacacagagcagaatggcttctacccaatgtttcttgcaccaccatgctcttaccacccctgccagtgccagatccccatcactacgcatcttggttagcaccaagcctaaccagcttgtttgcaaggcacagaaacaacaaacaccacatgaggatattgatgtcagcccaatctctcgccgtttagctctaactgtgctcattggtgctgctgccgttggctccaaagtccaacctgctgatgc

SEQ ID NO: 1574 - DNA, 368 bp, Glycine max
gaaaaacgccacttcctcacgcatttcctcgttttcttcttcttcccttttctctcttctctctctttctccggcgacgatctcagattccggtcactcctctcgccggcgatcccttattcctccgtcctccgtcgagtcctttccgattcgaatcgttcccagccttgtgccaccatgaatcccgaatacgattatttgttcaagcttttgctgattggagattctggtgtaggcaagtcatgtcttctcctgaggtttgctgatgattcataccttgacagctatatcagtaccattggagtggactttaaaatccgcactgtggagcaggatgggaagactattaaacttcaaatttgggacac

SEQ ID NO: 1575 - DNA, 319 bp, Glycine max
gagcgaaacagagagtgatttcagtgagtgatcggtgttcacttgatctcatcataatcgtcagcgtcaattgaagaagatgccgatcagaaacatcgccgtcggaaggcctgaagaggcgactcaccccgacacgttgaaggcggctttggctgagttcatctcaaccttcatcttcgtgttcgccggctcaggctccggcatcgcctacaacaagctcaccgacaacggcgctgccacccctgccggcctcatctccgcctccatcgcccatgcattcgccctcttcgtcgccgtctccgtcggggccaaacatctc

SEQ ID NO: 1576 - DNA, 376 bp, Glycine max
ggagactgtgagcacttagcagagaggaagaaagatgatcatccctgttcgttgtttcacctgcggaaaggtcattggaaacaaatgggatacctatttagaccttctgcagtcagattacagtgaaggagatgccctggatgctttgggactggttcgatattgctgtacgcgcatgcttatgacccatgtcgatctcattgagaagttattgaattacaacactctggacaagtctgatcccagttaagaaggccttagggagcaaaggatgaccaagatgtttcagttgaattccatgctatctggccaatgaacaatcttttttccttttctgaattgttttgctacaagctggtcatggttgtgtgctggt

SEQ ID NO: 1577 - DNA, 383 bp, Glycine max
gaacttgtgacaggaagtgctaagcaatcaaaggatcaaccagctgctcacaacaatggtagcaaatgcaaatcaagtggaaagtcccatcagtctgagtctcaggccaaggggatgaagatgtctgcaccacccaaagaagaggatgagagtggagaagaagaagaagaagatgatgaacagggtgcaacatgtggtgcttgcggtgataattatggcactgatgaattctggatctgttgtgatatgtgtgaaagatggttccatggtaaatgtgttaaaattactcctgctaaggctgagcacatcaagcaatacaagtgccctagctgcagtaacaagagggttagagtttgaaagctctaaacctttggatcaatcac

SEQ ID NO: 1578 - DNA, 61 bp, Glycine max
gaaacaatgggcagtcaaacactccccgtgctggtcactgcactggcgaccgtattcatcc

SEQ ID NO: 1579 - DNA, 288 bp, Glycine max
gactgcgaaccagtagggactcccattccgactcttagccgccgatctctcagggcttgcatcttctcaggtaagctgtgaagatgtacacatcaaggaagaaaatccacaaggataaggatgctgaaccaactgaatttgaagagtcagttggacaggcattgtttgatctggaaaataccaatcaggagcttaaaagtgatctgaaggatttatacataaactcagccgtgcaagttgatgtttctggaaaccgcaaggctgttgttattcatgtcccttacagat

SEQ ID NO: 1580 - DNA, 346 bp, Glycine max
gatgccgaaaagtagtaccaagatggcttcagttgtgtatctcctctttggcttccatctcattgttatcatgtcaagttccttacccgcaactagtgaagtgtttgcaaaacagtatccatccacagaacccgtggaagaaaaactcacccaactccacttctatttccataacaacataacgggggaacacccaactgctatgaaaactgttttgcctcctaaggggtccattcatggttttggggctacttacatgatggatgaccctctaactgaaggaccaagtccaacttcaaagcttgtgggaagatctcagggaatatacgctttggcttcacaacat

SEQ ID NO: 1581 - DNA, 355 bp, Glycine max
gtgtagtataggattctcttctttattccttttgtaatttcattcattcttaatctttgtgataaaatcatgttcatccataattttaaggttaaatgtcctaaagtgaagtacaccgatactgatcattcagtccgtgtataactactaaaccaccgagacttgttcacgagtaacacgaatggcaccgtatcagtggattagtcaaattaaatctgtcagatacgaatttaaaacgaacatccatgttcctaaattaagggtaatgcatgtcggttggggtggtaacaacggctcagtactcaccagtagtgttagtgcgaaccgagagggcatttcatgggctacaaaggac

SEQ ID NO: 1582 - DNA, 229 bp, Glycine max
gaaaaaggcagaccatacttgttgcgagtaagatcatgaatacagtggaatttatggggctgtcgcagttactggtgctgctgatgggatgttgtgggtctgctactgctgctgatgacttgccaaccaaatgttctgcggtgattcactaatgtaagacagtgtccgaacttcgctacggagaatgaccaaatgcccttcaacgcaagttgcgacgccgccatcgcca

SEQ ID NO: 1583 - DNA, 392 bp, Glycine max
gatagtagatattcattccccttatctttctctcttctctctccccgcccaaaccctaactccctaccctattccgctttctctcatccatcatgaaaggaggaaagtccaagaccgaatctaagagagccgatgccaaacttgctgtgaataagaagggcgccgccaccaagactaggaaacccgccggaaaggggaaggcagcgaaagatcctaacgagccaaagaggcctccaagtgctttcttcgttttcatggaggaattcaggaatgtgttcaacaaggaacatcccgacaacaaagcagtgtctgctgtgggcaaagctgctggagcaaaatggaagacgatgtctgatgctgaacaagcaccttatgtggcaaagtctgagaaa

SEQ ID NO: 1584 - DNA, 392 bp, Glycine max
  modified_base (303)..(303): a, c, g, t, unknown, or other
  modified_base (320)..(320): a, c, g, t, unknown, or other
ggcctctagtgcccccgtctcttcctcctctctccgcatcgctgcgttttccgaatcgaaaggtacgcaagtaacaatggtggaggccaagggtaggaaagaggaggtcgtcactcgagagttcaccatcaacctccacaaacgcttgcatggctgcacattcaagaagaaggctcctaaagcaattaaggagataaggaagtttgctcagaaagcgatggggacgaatgatgtgagagtggatgtgaagctgaacaaggctgtgtggagccaggggattcggagcgtcccgaggaggattanggttcgcattgcccganagaggaacgacgatgaggatgcaaaggaagagctatattcccttgttactgttgtcgaaatccccaaagatg

SEQ ID NO: 1585 - DNA, 380 bp, Glycine max
gatccaaattcaagttcgcaccaaattttcctcccaaaatgtcaggccgtggaaaaggtgggaagggtttgggaaagggaggagctaagaggcacagaaaggttcttcgtgacaacattcaaggaatcacgaaacctgcgattcgtaggttagcgagaagaggtggcgtgaagaggatcagtggtttgatttacgaggaaaccagaggagttctgaagatattcttggagaacgtgattcgcgatgctgtaacctacactgagcacgctaggaggaaaactgttactgctatggatgtcgtttatgctctcaagagacagggaaggaccctctatggctttggaggctaaagaatagaatctttaagtttaatgactgtg

SEQ ID NO: 1586 - DNA, 388 bp, Glycine max
gattcgcttcttttcctaacctaaaccctactcattctccatacctcaacgaagaggttaaagagacggcaacactttgctgtccgccttgaccgagcagagcttcgtcttggccctcgattttgccctaaagtactctcagtcacaacagacaccgtcgtcgtcgtcgtcgtcatcaatggcaccgaagcagaccaaggctgagaagaagatcgcttacgatgcgaagctgtgcgacctaatggaggagtacggccagatcctcgttgtgaactccgataacgtgggatcgaaccagctccagaacattcgcaagggtctccgtggcgactccgtcgtcctcatggggaagaacaccatgatgaagcgctcagtcaggatgcacgct

SEQ ID NO: 1587 - DNA, 287 bp, Glycine max
ggcccttcgccgccgcagcatccgaattcctttgctcgctggagtggaccgatggaacactgctcatacactgatcagagtaagtcaacatttactctcgtagatgacgatcagacttttgcaaacgctgtaagattcaccttatctcaagacccaagattgtcattttgtggctacagcattccacagccttcagataatcgtgttaatatcatagtctagacaacaagcgatccatcacgcgaggtgttatacgatgcatttcacgatctgatgcttatgtgcca

SEQ ID NO: 1588 - DNA, 355 bp, Glycine max
ggaatcgtcttttacttctcagcagcttcggctagggttcagaaacgaaaaagggttcggtgttctgttcgcgatgagagccaagtggaagaagaagcgtatgaggaggttgaagaggaagcgccgaaagatgagacagagatccaagtagtgcgttaaacctagtttgtttctgttgcttttacaattgcttatgttgtcgaatgggacacccagttgttagtggcactggtttctcctttttgatgtttgatacattttgttggattcaagtagtttatgttcgtcttatgttattagctcaaaacaatgttgttactgcttttgctaatcaacatgatctcctatttgcacc

SEQ ID NO: 1589 - DNA, 275 bp, Glycine max
gagcaacatggtgaagctggcggagagatttacttgccagaagaatacgttagttccaagaggacttaaatggagcaaatcagttggaagaacttggagctagcttcccaactggcttatcagggtgtggagaagcattattaagccttaggaataggagagtaagtactgtttgtgaatgtctttggtttaagaactccgtcttatgtcaacttgtattctgttatacagttctcagcaataaactgctctggcaatctagtttcatgtacaat

SEQ ID NO: 1590 - DNA, 346 bp, Glycine max
gaacagccacaacactttccacttgtctccgaattagttatcttgagaaacattattcccattgctatatattatggctagcatgaaggttacatgggtggttgtgatcatgtgcatggccgtggtgggtgcaccgatgatggcgcaagccatgacatgcaatgatgtgacggtgaacatggcacagtgcctatcctacctgatgcacggaggaacaccttcaacactttgctgcagcggagtcaagaacattcttggctctgctgtcaccaccgttgacaaacaaactgtgtgcaactgtctcaaggcggatgctgctaggtacaacatcaatgcacagtatgct

SEQ ID NO: 1591 - DNA, 324 bp, Glycine max
tacggtttcgataatacggttttcggtgaacagtgcgcaatctatccactataccacaattgattatcctgtcacacattacactcagtgccataaataagttcgcgcataaaagttagctgaataggtctaatcacgattatatccgcttgacgatgcataacaacatcaggtagccatcaaatccccttcactgacgtcgcacctagcatagtttctaacgtatatgctctacctaggttcaccttatccacttaactactgttgtatcttcatgatgcatggctcttctgttgagttcgtagtcttttccacttgttccaa

SEQ ID NO: 1592 - DNA, 358 bp, Glycine max
  modified_base (302)..(302): a, c, g, t, unknown, or other
agcccaggcgtcagacggctgcgaaaggacaagataagggggagtacaacttcagagtttagaagaataccccctcttttgctgcatcagaggagttgtaaattaagagcatggctgcacaagctcttgtatcagcatcttctcttaccttctcagcggacgctgcaagacaaagtcttggaccaagatcactctaatctccatttggcttctcgagaaaagtctcctttcttgttaaggcagctgctacctcccctgtcaagcagggatcagacagacctttgtggtttgcatcaaagcanagtcgttcttacttggatggcagccttccgggtgactatggatttgacccactggg

SEQ ID NO: 1593 - DNA, 344 bp, Glycine max
ggcggaagaccgacaagaaggaaacgttatcacaaattggattgttcctccgaacagtgaaccctcacctaacaatcagaacccaggatttggtgaaacgatgaacagtgataggaaaattggggttgccttggacttttccaaaggaagcaaaatcgctctgaaatgggctattgacaatcttatcagcaacggtgacactctctacatcgtccacaccaagccttccggaggaagtgaatcaggaaatcttctctggtccaccactggttcacctctgattccattgtcggagtttcgtgaaaaggaggtgatgcgtcactatgaggtggatactgatgctg

SEQ ID NO: 1594 - DNA, 345 bp, Glycine max
gagctccattctgcacaattctctcttatcatctttgttattacctctttccaaagtccaaattttctagttccaccaaaccaaaccaaaccaaaatggcagcagcctcagcctcatccatgatatcaacaccagccttatctccaaccatccaaaagcaccatcatttgaagccatccaacgtgtgcttccaaggtcttagacccctcgcaaggttcaccaaagcctcatcaaccaaagtgagcaccaccaccaaaagggttattccaaagggtggtgttagagctgaactcaactcagcccttgtgataagcctcagcactggcctctccctcttcttgggaa

SEQ ID NO: 1595 - DNA, 359 bp, Glycine max
  modified_base (346)..(346): a, c, g, t, unknown, or other
gactctaaccggcaatcagattcggaagcctttgacttgtgttcactctgttattctcgcaatggaggttcagattccaaatcacactgttttcgacatgccttcacttctccaagctgtggtcgccgacactgttctcgccgctgctcaatctattgctttgattggatatctgcttactaatggcactagttcagtgtcaccaaatttgactgaagtggatggaatgtttcctttagaagacctttttgggatgaaacatgcttatctacaaaacaagaatagtgaaacagaggacgatgatgatggagatgaggatgatgaagatggacctgacgaggatgangatggagatgacg

SEQ ID NO: 1596 - DNA, 345 bp, Glycine max
aaaaccaaaaaaagggaatgccatccatctgattaatgtggacagtattttgatcgcgttcaagtcactctctcaaaatggaccacgatacgctcaagcgcaacatcgattgcatataattcctatccgcaccactcacatgcaaaagcgtggctaagtgtgacatatcggcataattgagatgtgcgaggctgaagcctaaggattgctggtactggctagctggccagtgcatgaatccaaactgtgcatttagacatcatcgattggatgggcataatgcagcgtcagtgcaatctgaatttaagcaaacatcattacgtgcacacaatacacttgttcccc

SEQ ID NO: 1597 - DNA, 395 bp, Glycine max
ggtcctaaatcctcattccagccacacgcttcagaagacatggcctcattgggtgggttacaaaatgtgagcggcatcaattttcttatcaaagagggtccaaaagtcaatgcaaagttcgagctgaagccgccaccatatccactgaatggtttggagccggtgatgagccagcagacacttgagtttcactgggggaagcaccacaagacttatgtggaaaatctgaaaaaacaagttgttgggacagagcttgatgggaagtcactagaagagattattgtcacatcatacaataagggtgacattcttccagctttcaacaatgcagcacaggtatggaaccatgacttcttctgggagtgcatgaaaccaggtggacgtggaaaccatcc

SEQ ID NO: 1598 - DNA, 265 bp, Glycine max
gaccgaaaaccaaatccgaagagtgaacgttcgttgaatcccatggcgagagtgaagcacacgccagcttctcgcaaatccgctaaaaagcaagcgccacgcgcatccacttccacgcagccgccaccacaatcccaatcgcctgcaactagagagaggaggagagctcaacaagtggagccgcagcaggagcctgaggctcacggaaggaagaagaggcgcaatacgtctggaactgtggcgcttcgtgagattccgcattttc

SEQ ID NO: 1599 - DNA, 371 bp, Glycine max
ggctccgtctccatcctaaatcgaatagatagataggtgaaaatggcgcagtgtgtgaccaacacattcatgcacggaaaaccctttcatccagttgcagcaactccgactaacaatgttcggagagcggttcatgtgcggtatgtggtgcaagaagaacgagatacacccgcaactctatcaggaatcgaacgtgtaccgcagcggcgaacttgtgctgacgacaggtgggacccagaacgaatacgtggtggacgtgtggtcggggaaccaccccttcgacctcagaagccagtcggcgtcaatggtcagcgacgaccagatcgagaagttccgcaggacgttccgggagcccacagagatcacggaca

SEQ ID NO: 1600 - DNA, 383 bp, Glycine max
gatagtctcacatgctacatttcacagatatcaatctcgcatagcagtcaacacaggtcaccacacgactttcctccaaacctttcctgagaaacctgtcagtgaaacccttaattgtggaacgcaattcaggaacgagactcgaatggctagctccttaccgtagcttccaacatgaccttacagctgactaacactgaggactacattcagggacactttaatagatttttgccagatatttcaatgatctctaacatcgttcactaccttcggagaatgacgtcggatatgcagctcaagactatagcatgatactagatactgatggctactgcatatggctaagacatatttcgaacgcgaatgtaccaccgtatttg

SEQ ID NO: 1601 - DNA, 374 bp, Glycine max
gatgccgaaaagtagtaccaagatggcttcagttgtgtatctcctctttggcttccatctcattgttatcatgtcaagttccttacccgcaactagtgaagtgtttgcaaaacagtatccatccacagaacccgtggaagaaaaactcacccaactccacttctatttccataacaacataacgggggaacacccaactgctatgaaaactgttttgcctcctaaggggtccattcatggttttggggctacttacatgatggatgaccctctaactgaaggaccaagtccaacttcaaagcttgtgggaagatctcagggaatatacgctttggcttcacaacatgagcctgggttgctcatggtgacaaatt

SEQ ID NO: 1602 - DNA, 343 bp, Glycine max
gcgagctagagaagttattatggtttttgactgcggcggtccaaacactcttctctgcagcgtttgcctaaatctcgcttcaacatggctgaacacatcgggaaagcttttctgaagcaaccacaagtgtttctcagcactccgaatactgggaatggacagagatctggaaaaggtgggaaccgcttttgaaattccaatgggcatggatttatcactcccattgaagtcatctatcgaatctatattgacaagagttgccccttcactggcaatgtatccatccgtggccgtaacttggctggaacatgtcacactgctaagatgaaccggactattattg

SEQ ID NO: 1603 - DNA, 366 bp, Glycine max
gaaggcatttcattagcagcgttaaagaagagagaagaaaaatgcgaaagttcgatccatggcccgttttcttcaagcgcgagtggaaacgcaactggcccttcctcgttggattcgcagtcaccggagctctaatcaccaaactttcccttggccttaccgaggaagatgctaagaattccaaattcgttaaggcgcacaaaaggtgatttctgaatcgtgacatctgcctggctttgcactttatgttaggtttgtcaagattactttgcttgtcttgattttatggattgtaataacagaagagagatgctctagatagtctctttaagtctgtatcccatgttcttattttcagttttgggt

SEQ ID NO: 1604 - DNA, 66 bp, Glycine max
gcttatgatgatcatataattatcttagcggatttcagtgagatttctatcaatgatctgattgcg

SEQ ID NO: 1605 - DNA, 386 bp, Glycine max
gatcaacatttgtctctcatctttcaatttcaatcaacggttatacccttttctatttgagcatcatcatgtccaccgcagcgcagcccaaggccaagaaaacggcgtcgtccaagaagcccctctcccatcctaccttcgccgcgatgatagcggaggcgatagcgagtctgaaggagagaaccggttcgagccaatacgcgataaccaaattcatcgaaggcaagcacaaggagttgcctccaacctacaagaagcttgttctcgttcatctcaagaagtctgttgctgctggcaagctcgttaaggtcaaaaactctttcaagctcgcaccgactaagtctgctcctgttaaagccgctgctgctcccaagaagcccacaaag

SEQ ID NO: 1606 - DNA, 368 bp, Glycine max
gagaataatcaatggaagtaggaatgtctctgaacgcgctggttcgtcttcctctctcgaattcacgcttccacgacgatgctgctccgatgattattaggcactctctgttttcgagccgaaagcaacagcagcagcagcagagttataaggttccacagcgtcatcaagtgttcgtggttgaagccaagggcaaaaagggaatgatgtctcgtcaatttcagcgcaatgctcctcctcctttacccaagattgaagacgatggcaatcccaaattcgtcatcttcattcgcatggccaatgtatacctttggtaccctcttagtatcgtatcaggcggcaccactgctaagataatggttgcagct

SEQ ID NO: 1607 - DNA, 301 bp, Glycine max
aagctttggaggttctgggctcaagaaaagtggaaagaaataagggctctttatcatgattgtatacatccaatattgagccctgtagtttattaccatgataacttctgtcttattgtggccttctttattgctctaatgttagtactgaactgaggtatttcgtgatgtaagctgcaacaagttacttgtttgtagctttattgtgtggcccttcatggggttctgataattacatcctattagtagtgctgtggatttggcatagacttgttcaagtaataatgacttggcttgcgat

SEQ ID NO: 1608 - DNA, 353 bp, Glycine max
gacacaccatccgttctagtctcaacttctgctcttccaactcctacaacgcttttctctgcactcatgggcaaggtcaagatcggaatcaacggatttggaagaattggccgtttggttgccagagtcgctctgcaaagagacgatgttgaactcgttgccgttaacgaccctttcattaccaccgattacatgacatacatgtttaaatacgacagtgttcacggacactggaagcatcacgatgtcaccgttaaggacgagaagacccttctcttcggtgacaaggcagtcactgtttttggacacagaaaccctgaagagatccatgggggtcaactggagctgacatc

SEQ ID NO: 1609 - DNA, 383 bp, Glycine max
  modified_base (353)..(353): a, c, g, t, unknown, or other
gatccctgctttccttttttgacttagatacttcttatgcaactatagtgaggctaagagttggtgcataattaatcaaaatgttggccatattccacaaagcttttgctcatccacctgaagagctgaacagtcctgcatcttacaaaggttccaagaagcctaaggttcctgaggaaactctcaaagatttcctttcccaccatcctcacaacacttgctccatgagctttggtgaagctgctgtgctagcttatgttcgtcctgatcaatccttctctcgtcatcaaaggttgttttgtgggattgataacatatactgtctcttcttggggagcttgaacaatttgtcnctactcaacaagcaatatggattgtcaaag

SEQ ID NO: 1610 - DNA, 341 bp, Glycine max
ggaaaattgtggggaactcaaattgattgaaatcaaacctcagcaccactaggtcaagcttctgtctcagtcactgtttctccggcctcgcttcttctctcagattcagataccaattcggtttcttctgaaccaaacttggtttgagaaattcggccgttaattttccatggccaacaatccatcacagcttctcccatcagagttgattgaccggtgtataggttcaaaaatttgggtgataatgaagggtgacaaggagcttgttggtactcttagaggctttgatgtttatgtcaacatggtccttgaagatgtcactgaatatgaaatcactgctg

SEQ ID NO: 1611 - DNA, 222 bp, Glycine max
gacagcgaaacaaagagtgatttcagtgagtgatcggtgttcacttgatctcatcataatcgtcagcgtcaattgaagaagatgccgatcagaaacatcgccgtcggaaggcctgaagaggcgactcaccccgacacgttgaaggcggctttggctgagttcatctcaaccttcatcttcgtgttcgccggctcaagctccggcatcgcctacaacaagctc

SEQ ID NO: 1612 - DNA, 361 bp, Glycine max
gactgcgagagtgtgggagccataaaactgctgcttctcgacccacttttgaagttcaaaacttaaaccctagttctctctctttctttctcctgcatcttcaaccatgtcagcaatgctgcaacctcagatcattctgctcaaggaatgcacggacacttcgcaagggaagccacagctggtgagcaacatcaatgcctgcaccgccgtcgccgatgtcgtccggaccatcctcggacctcgcggcatggacaagctcatccacgacggacaaggaaccgtcaccatctctaacgacggctgcaacatcatgaagctcctcgacatcgtccaacccgctgcaaaaatcctcgccgacatc

SEQ ID NO: 1613 - DNA, 356 bp, Glycine max
gacaacacaacacaacgcgcactctctctttttctctctgttttttgttctctcttcgcttaaaccctatcgttcttctcgttttcgccgattctcgccatgccgaaagctaaatccgacgccaaagccgccgatagcaggttgaagcggaagggcgctggtgctgggaggaagcaatcgaggaaagctgctaaggaccctaacaagccgaagagacctccaagcgctttcttcgttttcatgtccgagttcagagagcagttcaagaaggagcatcctaacaacaaatccgtcgctgttgtcggcaaagctggtggtgaaaaatggaaatcgctatctgatgctgaaaaaggccc

SEQ ID NO: 1614 - DNA, 382 bp, Glycine max
gacacactcatttttcttttcactcaaatcatggatttcttgcaagcacaagaaaatcagatacttgtgggtgtggccgtggccgttgtagccattgggcttggtgcagtatatctctattcatccaagaagaccaaaggttgcttggacccagagaactttaaggcattcaaacttgttaagcgtgcacagctgagccataatgttgcaaagttcacatttgcactcccaacacctacatctgttttgggtcttccaattgggcaacacataagttgcaggggtaaagatgctcaaggtgaagaggttatcaaaccatatactcctactactttggattccgatgttggacattttgaactagttattaagatgtacccac

SEQ ID NO: 1615 - DNA, 322 bp, Glycine max
gggatgatgaattgagcaaggcaagatttgagttccgatggatggaccagtttgctttgtcattggatccgatgacagccacgtccttccatgacgaaaccctaccggcagatggtgcgaaagtggcccatttctgctcaatgtgtggccctaaattctgctctatgaagattacagaggatgtgaggaagtatgctgcggaacatggctatggaactgatgaagctttgcagcgtgggatggatgctatgagtgctgaatttcaagctgccaagaagaccatcagtggggagcaacatggtgaagctggtggagagattta

SEQ ID NO: 1616 - DNA, 375 bp, Glycine max
ggctagaacgttgaactgcaccttctcactggagctggcattaccttcttcagttctcctcaaatttgatgtattttctatctacaacttcagtgtttattctgtctcactctcaaaacctgtgtgttctggcggtgattgctgaagaccccaatgctttgttgatccatctcagcgtcttaacgtttactaaattctgctttgaaaatgagagttgagaaaggagcaaaaaatgaaggtggatatgttggtggtttcttccacttgtttgactggacctcaaaatctcgtaagaaattatttgcagccaagtcagatttgccagagtcctcaaaacagagaagaaaggttgatggcaacatggcaatggtgctg

SEQ ID NO: 1617 - DNA, 371 bp, Glycine max
gagtgagagagagagaaggcaagatgtcgaagagaggacgcggtggttcggcggggaacaagttccggatgtcgctgggtctgccggtggcggcgacggtgaactgcgccgacaatacgggggcgaagaacctctacatcatatcggtgaaagggatcaaagggcgtttgaaccgtctcccctcggcttgcgttggcgacatggtgatggccaccgtgaagaaggggaaacccgatctgaggaagaaggttttgccagctgtcattgttcgccagcgcaagccatggcgccgaaaggacggcgtctacatgtatttcgaagataatgctggtgttattgtcaatcccaaaggagaaatgaaaagttctgct

SEQ ID NO: 1618 - DNA, 377 bp, Glycine max
caacataggtcatcgaaaggatctcgaagacccaccaacgcacgaaagccgggatctttcagaaaatggattcctattcgaagggtgcataaccgcatggataagctcacactaacccgtcaatttgggatccaattcggttccttaggaggtatcgggaaggaattttggaatgtaataatatcgattcatacagatacagaagaaagggttctctattgattcaaacgctctacctacgagatagggatagagaaagaggaaaaaaccgaggatttcacatagtacttttggtcgaaaaatcgatctgatttttttcgtacttttcgctcaatgatgaaatgggtcagattctacagggacaaaccttgtgggag

SEQ ID NO: 1619 - DNA, 270 bp, Glycine max
gggccttcattcgggactttcactagccgcatcagcctcaggacgagaatcaggatgtctcacaagaagttcgatcacccaacgcacgggtcactgggatttctccccagaaagcttgctgcacgtcacaagggaaacgtgaatgcattccccaaggatgacccatccaacgcatccaagctcactgcattcctgggttacaacgctcgtatgactcacattgttagagatgtcgataagccaggatcaaagcttcacaacaacgaaaca

SEQ ID NO: 1620 - DNA, 361 bp, Glycine max
gagcgaaacagagagtgatttcagtgagtgatcggtgttcacttgatctcatcataatcgtcagcgtcaattgaagaagatgccgatcagaaacatcgccgtcggaaggcctgaagaggcgactcaccccgacacgttgaaggcggctttggctgagttcatctcaaccttcatcttcgtgttcgccggctcaggctccggcatcgcctacaacaagctcaccgacaacggcgctgccacccctgccggcctcatctccgcctccattcgccatgcattcgccctcttcgtcgccgtctccgtcggcgccaacatctccggcggccacgtcaaccccgccgtcaccttcggcgccttcgtc

SEQ ID NO: 1621 - DNA, 350 bp, Glycine max
ggagcataactctttgtttcccacttgacccctaaattcgtgcccattcccacaactgcacattcttctttctatatattccaaatcccttttccgatttccaccaaaatctaaaccgaaattcccaattacccttcccaattttcaccaaaacctaatactcccacaccaatcttcgatcatggacgccgattcacaacctcaacaactcgaagagagaacagaggagcaagaactgaagtacctggaattcgtgcaattcgcgaccatacaggctctgatgcgctgcgccatcctctactcatacgccaaggagcgcgcgggtcctctgaagcccggtgtcgacaccg

SEQ ID NO: 1622 - DNA, 297 bp, Glycine max
ggggttattggacacattcttcagcgactgcgtttttggatcggaacctcttctgcggcgtagcaatgggacactccaacgtttggaactctcacccaaaaaaactaccgtcctggttctcgcacttgccgtgtgtgtgggaatccacatggactgatcaggaagtatggccttatgtgctgcacgcagtgcttccgtaacaatgcgaacggaattggcttcatcaagtatcgctaaaagagcagttgtcaactacggaccagtattgtgttctggcactaagatgttttgaggatg

SEQ ID NO: 1623 - DNA, 331 bp, Glycine max
ggttgcgtgtgtgagtatcggcaatggaagaatgttcatccattgaggaatcggtggcgagcgtgatcgaagaaccagggaggttgaagacaccgtttcctctcacatctcaaaggcttccagcgatgaagaatctcgccaccaacgtgtccgtgccgtcgattccagaatccattcgataagttcctctctcgattctcttgtctccaccatacaaagccctccctccttaaccgtcacattacatgaagatttgcagagagcgagatgcatcatcgttgatggtgacgcctcatcgctcctccctggccatgcacaaggtagcgttttg

SEQ ID NO: 1624 - DNA, 394 bp, Glycine max
gagaaaccaaaaggctctctcacgcagtcgcagtgagtgaaaaggaaaaccctaattgcggtattctcagtgccttcgagagaaagaaaaaatggcagataatcttgttctccgtggcaccatgcgcgcccacaccgacgttgtgacggcgattgccactcccatcgacaactccgacatgatcgtcaccgcctcacgcgacaaatccatcatcctctggcatcttaccaaggaagacaagacttacggtgtcccccgccgccgcctcaccggccattctcattttgtccaggacgtcgtcctctcttctgacggccagtttgccctatccggctcctgagacggcgagctccgcctctgggaccttgctgctggcacctccgctcgccgcttt

SEQ ID NO: 1625 - DNA, 347 bp, Glycine max
gacttcacaactcaaactgcttcattgcataattgcagataagatcaacccttctaccttcagattcgcgggaagatggcatcacttcatgctaatgtgacatcagttgtttacaacagtggcaaccgtgtttctcaatcgaaatttgcaagctcttccttcttgtctgggttcgatgttgttggtcgtgcttcaagtgcttggaagaaggaacttgtcccatcttccatttccttggtgcctagagccaccctaacatttgatcccccaactaccaattcagacataaccaagcaaaagaagcacactcttgaccctgcttctccagattttcttcctcgtccttc

SEQ ID NO: 1626 - DNA, 152 bp, Glycine max
ggcagcatccattcttgttctcttctttctttcgatcagggtttcccctcgtctccgggctcgtttcgttctcgaataatcgatctacgataatgactcgcggtagccagagggatcgtgatcgcgaaagggctcaggctagaactggtgct

SEQ ID NO: 1627 - DNA, 336 bp, Glycine max
ggcagtttcaaattttcttttccttcactttcccgagaaaaaaataacacttttcactttcttcactacgttctcacttcgatatggctcgtacgaagcaaaccgctcgcaagtccaccggtggcaaggcgccacgtaagcagctcgccaccaaggccgctcggaagtccgctccggcgaccggaggagtgaagaagccccaccgcttcaggccgggaaccgtggcgctgagggaaatcagaaagtaccagaagagcaccgagcttctcatcaggaagcttccatttcagaggctcgtgagagaaatcgcgcacgatttcaagaccgatttgcgtt

SEQ ID NO: 1628 - DNA, 342 bp, Glycine max
ataacagtagtccgtttcacagaagataacccagatggaaaagcaactgctcttctaaattggaggctattggttgttgaagtattgccagaagaagatgcagtactgatgcttctcctttgcctttcaatactcaaaagtgtatcagaaatgaagaaacaagacgtgggaggcttgttggtgaggagaagattaaaagaagcaaggcttggaagtagggattggggttctgtgatacttcatccatcttcatggtcatcatccattgattcaacttatcttcaaccctggcattggaatgctgtggttgtcatgaaatctgatgctgtagattagctgaaa

SEQ ID NO: 1629 - DNA, 309 bp, Glycine max
ggggcttatgaaaaccaaggttgggtccggcccttttagggtttcgtctgagttataaaatacctaattcattgtcctctgtgccgttttcttcttcatcatagtcgtggccgtgtcgcagcaaaaccaaaccacatattaacttgtttgctctaagtcatggctctgatcttgcacgcaaccaaagcaaacaagaatgctttcaagactctgattgcggcagagtacagtggcgtccaagtggaattggcccctaatttcgagatgggtgtctctaatagaactcctgaattccttaaaatgaatccc

SEQ ID NO: 1630 - DNA, 319 bp, Glycine max
gaaccaagtttgcttgcgtgtatattcattttagcatcaaggttgaatctcagagaaaaagaaacatcgacaagcatgtctggaagaggaaagggaggcaagggtctcggaaagggaagagccaaacgacaccgtaaggttctgagggataacattcagggaatcaccaagcccgcgattcgccgtctggccagacgtggtggcgtcaagcgtatcagtggtcttatctatgaagaaactcgcggtgttctcaagatctttctagagaacgtcattcgcgacgctgtcacctaaactgaacaagctcggcgcaagaacg

SEQ ID NO: 1631 - DNA, 349 bp, Glycine max
gagcatagaagaagcagaaagagaagcattagcaaaagcaagaagaactagtctaagcagaaatggcctcttcagtgatggcatctgtggccctcaaacctgcccctttcactgttgagaagtcctcagttagaggccttccctccctctcaaggaactcctcttcattcagagttgtggccagtggtggcaagaagatcaagactgataagccttatggaattaatggtggcatggctttgagggaaggagttgatgcatctggcaggaaaggaaagggaaagggcgtttacaagtttgtagacaaatacggtgctaatgtcaatggttacagtcctatctacgacac

SEQ ID NO: 1632 - DNA, 334 bp, Glycine max
ggaacacttcaacatctcttaataaagattagaaatcgacatatggggggagcaaagagttactcttgttttgcagtaatagctgtggccttggttttgctacttctgaatgtggctgtggtttgcaatggaggcaagacaagcacattcattaggaaagttgagaaaactggggacatgccccttcatagtgatgtatttgttgccccttctggctataatgctcctcagcaggttcatataacacaaggtgaccaagtgggaagggccatgatcgtgtcatgggtgactgtggacgaaccaggaaagagtctagtgcattactggagtgacg

SEQ ID NO: 1633 - DNA, 357 bp, Glycine max
tggttatcatctgcccaatttatatatacagttaaatttgtataaaaataactttttgaaaatattttttttctgtattaacttctatactagtttataaaattagtacttttaataaattaataaggtaatttttttaagggttaaatgttttttctccctaataatttttaaaatttagttttaatctctatgaattttttaactttttagtccctaataaatttatgtttgattaacacacttaatttatttttggtccctaataacattttgaaaaataaaatataataaagtgatttagatagtactatagagaccaagaataaaagaataaacattattagagaccaattt

SEQ ID NO: 1634 - DNA, 97 bp, Glycine max
  modified_base (23)..(23): a, c, g, t, unknown, or other
aggaaaatcaagagagagaaganaacacccacaattcgagtattaagaggaattaaatgagccgttaaatcctccaatcaggaaggggacgcgtggc

SEQ ID NO: 1635 - DNA, 265 bp, Glycine max
gatagcgaaacagagagtggtttcagtgagtgatcggtgttcacttgatccttcataagtcgtcatcatcatcatcatcatcaccgttgattgaagaagatgccgatcagaaacatcgccatcggaaggcctgaagaggctactcaccccgacacgttgaaggcggggttggctgagttcatctccaccttgatcttcgtgttcgccggttcaggttccggcatcgcctacaacaagctcaccgacaacggcgccgccactcccg

SEQ ID NO: 1636 - DNA, 329 bp, Glycine max
gacaccatccagtactcttcttttcagcacaacctcttcatctctcccaggctttcttttctttgcaacaacactaccaaaaatgtcaccagatttcacacttttgttctccccggaactcatgcagtcccctatcatcactttccaagccactttctgtgtccttctcttcaccctcatgttcacgccgttcttcactcctggtgggcttccttgggcctgggcccggcccagaaccatcatccctggcccagtaactgccctgctcggggtcttcacgggttccacacctcacagcgctttatccaaactggcccgcacttatcacg

SEQ ID NO: 1637 - DNA, 315 bp, Glycine max
gactgcgaaccagtagggactcccattccgactcttagccgccgatctctcagggcttgcatcttctcaggtaagctgtgaagatgtacacatcaaggaagaaaatccacaaggataaggatgctgaaccaactgaatttgaagagtcagttggacaggcattgtttgatctggaaaataccaatcaggagcttaaaagtgatctgaaggatttatacataaactcagccgtgcaagttgatgtttctggaaaccgcaaggctgttgttattcatgtcccttacagattaaggaaaggtttccgtaagattcatg

SEQ ID NO: 1638 - DNA, 335 bp, Glycine max
ggcacttcaattgcaatcaaattagttcattctctttgcgcagttccctacctctcctttcaagatgcagatcttcgtcaagaccctcaccggaaagaccatcacccttgaggtggaaagctctgacaccatcgacaacgtcaaggccaagatccaggacaaggaaggaattcccccggatcagcaacgtctcatcttcgccggaaagcagctcgaggacggccgtaccctcgccgactacaacatccagaaggagtcaacccttcaccttgtccttcgtctccgtggtggcatgcagatcttcgtcaagactctcactgggcaaaacataaccc

SEQ ID NO: 1639 - DNA, 314 bp, Glycine max
gagttctgcatcgcgttttgctctggactctcaccgttccttcagagtggaaccctagttgtctctatccttaaggttccgccaccgcaccaagtctcagcacccaaccaggtcttctttcattcatggcggaggaacttatttctcaattaaacaatatgctagaagaaaatggaacaccaagtcatgtagaaagggctgctgatgctgatgctgatgctgagctttctcccaccatcacaaaaggagatgacactaaagaagtttcaaagaagaaaaagaagaaatctaaaagcaggaaaaagaaagaactc

SEQ ID NO: 1640 - DNA, 331 bp, Glycine max
gatgagcagcaagctatggcggaagaaccgaaagttccaccaccttctgatcctccgttaccgtttgatcctagtcggatgattggtatcatcaagagggaggccttgatcaaagacttagctgcggtataccatgctgaatgccttgcatactgtcaagagcttttgggacttcaaactaaatgggaagaggttttcaggtggttgatgcataactcatttagggcgcaaaagatgcaccatctgaggatatacctttttcttgctgctggtgtgtacctgttagtatcagagcacatatttaatgtagtatcgatgtacttttcaaatg

SEQ ID NO: 1641 - DNA, 305 bp, Glycine max
gaacagcgaaacagagagtgatttcagtgagtgatcggtgttcacttgatctcatcataatcgtcagcgtcaattgaagaagatgccgatcagaaacatcgccgtcggaaggcctgaagaggcgactcaccccgacacgttgaaggcggctttggctgagttcatctcaaccttcatcttcgtgttcgccggctcaggctccggcatcgcctacaacaagctcaccgacaacggcgctgccacccctgccggcctcatctccgcccccatcgcccatgcattcgccctcttcgtcgccgtctccg

SEQ ID NO: 1642 - DNA, 359 bp, Glycine max
  modified_base (276)..(276): a, c, g, t, unknown, or other
gacacaaactttattacagttgttgtattgtaattaagcaagaatattaggcaatggagtcttctagaacttcaactactcttgctctttttttaaccatcaatttgcttttctttgtcatggcaagtggctgctacacttgtacacagcctaagccaaaccctatcccattcccttaccctaaccctagtcctgccgcgaagagctgccccagggacgcacttaagctcggagtgtgcgcaaacgtgcttaatggaccaattggtgctattgtanggtcaccaccggaccacccatgttgctcagtgctagaagggcttcttgatcttgaagttgcggtttgcctctgcactgccatc

SEQ ID NO: 1643 - DNA, 248 bp, Glycine max
ggtgtccaagcttatttgttgctttgtgcttaatggaaggcccttgagcttttctttctttctctgctctcttttcttttaggtttccactctcacacactctccctcttctctttctctgcaataatctctcttctcttcttcactctctcaactcctgccaaacccccatttccgcagttcttaaatttggagtctgatgtctccgccattgctggttaccgaagatgaagggcagtgccatgcct

SEQ ID NO: 1644 - DNA, 387 bp, Glycine max
  modified_base (328)..(328): a, c, g, t, unknown, or other
ggcttcgtctcagatcattctgcgcaggtaagacagagagaaagaactgacctcagcggcggcggcggcggcaacagaagaacaaccaccaccacacacaatgggtcgcgtgagaacaaaaacggtgaagaaatcctcccgccaggtgattgagcgttactactcgcgcatgaccctcgacttccacacaaacaaaaagcttctcgaagaagtggccatcatcccttccaagaggctgcggaacaagatcgcgggtttctccacgcatctcatgaagcgcatccagaagggtcccgttcgcggcatctccctcaagctccaggaggangagcgcgagcgccgcatggacttcgtccccgacgtctccgccatcaacaccgaccacat

SEQ ID NO: 1645 - DNA, 341 bp, Glycine max
gatccaactctctaaacaacacattaacctttctcattccccatctcctcaccttattcagccactgctaatttctagggttccgaaatggacgctggcggaaagatcaagaagggcgccggaggaagaaagggcggcggccctaagaagaagccggtttcaaggtccgtcaaggccggtctccaattccccgtcggaagaattggccgttatttgaagaaaggaacgtacgcccagcgtgtcggtaccggtgctcccgtttacttggccgcagttctcgagtacctagctgctgaggtgcttgagttggctgggaatgctgcacgtgacaacaagaagaa

SEQ ID NO: 1646 - DNA, 103 bp, Glycine max
ggcggaattcagatctagcgtttgcactttgcacaatgcgagttctataggatcgtttggttataccgattagtgttactaaaacaacgtttttgtgatatcg

SEQ ID NO: 1647 - DNA, 277 bp, Glycine max
ggtcaatactttctcgtattttcccctcttcttcccctctctcgtgttatccgctttagttttctcgggaaaatcatggtgaaaggtccaggtctctactctgacatcggcaagagagctcgcgatcttctgttcaaggattatcagaatgaccacaagttcaccatcaccacttacacttccactggagtggaaatcacttcaactggagtcaggaaaggtgaaatatatttggccgatgtcagcactaaggtgaagaacaagaacatcacaactg

SEQ ID NO: 1648 - DNA, 330 bp, Glycine max
ggcagcgcttgatttgaggccaggcaagccccactcaaccaccacacctctcctcgttcacgctacccctttctgctcttcttctacctttcaagttttaaaagtataaagatggcagagacattcctatttacctcagagtcggtgaacgagggacaccctgacaagctctgcgaccaaatctccgatgctgtcctcgacgcttgcctcgagcaggacccagacagcaaagttgcctgcgaaacatgcaccaaaaccaacttggtcatggtcttcggagaaatcacgaccaaggccaacgttgactacgagaagatagtgcgtgacacc

SEQ ID NO: 1649 - DNA, 332 bp, Glycine max
ggagcagaatcttcaggccaagccaggtaagcacaaccaaagcaacaccccaaatggcttcagcttctgttcccatggcgttgtcactgagctctgttaccaacaacaacaagccttcatccgaagccttcttcaggccactacccctacgccaaccaaagaggaccctcttcaccacgaaggcagtgtcaaactccaagcctcaaatcaatgcatctttgaaggagaaggcagttgccggactcacagcagcttctgtgacagcatctatggtggttccggaggtggctcatgctgctggatatgagttctccccttccctaaagaacttt

SEQ ID NO: 1650 - DNA, 306 bp, Glycine max
attcccaccattgggtccaccttggagacggtggaggataggaccattagtttcactgtctgggaggttggtggccaggataggattcgtcccttgtggaggcactgcttcgaaaatacacagggtcgcatttttgttgttcacagcaatgacagggagagatttgttaaggccagagatgagttgcacaggattttgattgaggatgaactgggatatgctgtatcgcttgtatttgcgaacagtcactatcttcccagtgcaatgaatgcggcccaaattactgagaacctgggatcccagtct

SEQ ID NO: 1651 - DNA, 332 bp, Glycine max
ggttctcctacagattcttcagcaactgcgattttggatcggaacctcttctgcggcgtagcaatgggacactccaacgtttggaattctcacccaaaaaactacggtcctggttctcgcacttgccgagtgtgtgggaatccacatggattgatcaggaagtatggccttatgtgctgcaggcagtgcttccgtagcaatgccaaggaaattggcttcatcaagtatcgctaaaagagctgttgtcacctacggaccaatattatgttctggcactaggatgttttgaagatgttatgtttgaagaaacttgagacttgtttttttcatct

SEQ ID NO: 1652 - DNA, 152 bp, Glycine max
actaatgaaattataaattatccataaattggatagaaagatctttcaacccttaattgccatttttttttaagaaaaattttcttgtccaaaggccttttaagggatagtgataaaatgaaaatggttcaggcaaaaggcccacaatttgg

SEQ ID NO: 1653 - DNA, 281 bp, Glycine max
gaacagccaaaggacttgcccacgttcattctgttggtggtcccaaatttacacatggaaatattaagtcctcaaatgtcctcctcaaccaagataatgatggctgcatttctgattttggccttgctccccttatgaatgttcctgctaccccttctagaactgcaggttatcgtgctcctgaggtgattgaagcccgtaaacactctcataaatccgatgtgtatagctttggtgtcctccttcttgagatgcttaccgggaaagctcctctccaatct

SEQ ID NO: 1654 - DNA, 289 bp, Glycine max
ggaatttgaaaaccaaaatcgaaatcaaaatcatttggctcctttgattcattcatcaaatcaaaaaatccattttccatgggcacttctcagagccgcgaaggcctcgaagtcaccgactcagactccgactacgaaaacgaagaagaaacagagcactacgaagacgcgaaaaccacccactccaccgagctcgatgacgtggacgcgaaactcaaagccttaaaactcaaataccaaacgccgtcctcctccgccaaaccgcttccccaaaacgcccttaaactct

SEQ ID NO: 1655 - DNA, 335 bp, Glycine max
gagagtggtggggtgtgcagaagagcgtcgcagttgtaaccctaatcagaagaagcgcagcttcaagcgagtgacagccaccagccatgggtcgtatgcacagccgcggtaagggtatatcctcttctgctttgccctacaaaaggacacctcctagctggctcaagatctcttcgcaagatgtcgaagaaaatatctgcaagtttgcgaagaaaggtttgaccccgtctcagattggtgtcattctcagagattctcacggtattgctcaggtcaatagcgtcactggcagcaaaatccttcgcatcctcaaagctcacggacttgcgcctgag

SEQ ID NO: 1656 - DNA, 333 bp, Glycine max
gatctcgtggaagtgtaagcaagcaaaaccctagcggcgcctgctttctttgttcgtgttttgcatcaggatggagtctcaggtgaagcacgcacttgttgtcaaagttatgggtcgtactggatccagaggacaagtgacccaggttagagtgaagtttttggatgatcagaaccgtcacatcatgaggaatgtgaaaggacctgtgagagaaggagacattctcaccctactcgagtctgaaagggaagcaagaagattgcgctagatggtctcttttttttggcttgcctccaaattcgaacaaaagcaatatttttcttgatatttaag

SEQ ID NO: 1657 - DNA, 309 bp, Glycine max
ggactgagagcaattgcatcaacaacaaattgaaaggatgtcgatcttcgagtacaacggaagcgccgtggtggctatggtcggcaagaactgcttcgccattgccagcgaccgaaggctcggcgttcagctccaaaccatagccacggatttccaacgcatttccaagattcacgacaagctcttcatcgctctctctggcctcgccaccgatgctcaaacattgtatcagcgtcttgttttccggcacaaactgtatcagcttcgtgaagagagggatatgaaaccagagacctttgccaacttaat

SEQ ID NO: 1658 - DNA, 318 bp, Glycine max; identical to SEQ ID NO: 491

SEQ ID NO: 1659 - DNA, 329 bp, Glycine max
aacaaagaagagcgttgagacctacaagatctacatcttcaaggtgttgaagcaagtgcaccccgacatcgggatctccagcaaggctatggggatcatgaacagtttcataaacgacatcttcgagaagctcgcccaggagtcatcgcgtctcgctaggtacaacaagaagcccaccattacttccagggagatccaaacggcggtgcgtttggtcctccctggggagttggccaagcatgccgtttctgaaggcaccaaggccgtcaccaaattcaccagctcttgattggtttcgtgtgtttatgtcagggttttctgttagcccg

SEQ ID NO: 1660 - DNA, 328 bp, Glycine max
gaacatttgtctctcatctttcaatttcaatcaacggttatacccttttctatttgagcatcatcatgtccaccgcagcgcagcccaaggccaagaaaacggcgtcgtccaagaagcccctctcccatcctaccttcgccgcgatgatagcggaggcgatagcgagtctgaaggagagaaccggttcgagccaatacgcgataaccaaattcatcgaaggcaagcacaaggagttgcctccaacctacaagaagcttgttctcgttcatctcaagaagtctgttgctgctggcaagctcgttaaggtcaaaaactctttcaagctcgc

SEQ ID NO: 1661 - DNA, 318 bp, Glycine max
gatagggtttttgtcgttgcgactaagagttgctgcttcttccgccactcagcacttcgctccctctgtgcttcaccaaccatggccgaaatcgaagctaccgttccagatccctctcaaatcgacgtcaaacttttcaaccgctggagcttcgacgacgttgaggttactgatatgtctctggctgattacattggagtgtccccgtcaaagcatgctacatatgttcctcacactgctggtaggtactcagtgaagaggttcaggaaggcgcagtgccccattgttgagagactcaccaactctctcatgatgcac

SEQ ID NO: 1662 - DNA, 360 bp, Glycine max
ggaagggagaattaggtttttagggtttacaccgagcagcgacacctccctcccgcagtagccatggttctcaaaactgaactatgccgattcagtggtgccaagatctaccccggaaagggcatcagatttgttcgtggtgattctcaagttttcctgtttgccaactcaaaatgtaagcggtatttccacaaccgcctgaagccctcaaagctcacctggactgctatgtacagaaagcaacacaaaaaggacattgctcaagaagctgtgaagaagaggagacgcgctgccaaaaagccttactctaggtccattgttggtgccactctggaagttatccagaaaaagagagctgag

SEQ ID NO: 1663 - DNA, 322 bp, Glycine max
gagcaacatggtgaagctggtggagagatttacttgccagaagcttacgttagaaccaagaggactacttaatggagcaaatcagttggaagaacttgtagctagcttcgcaactggcttatctgagtgtggagaagcattatcaagccttaggagtaggagaacgagtactgtttgtgatgaatgtctatggtttaagaaatctgtctttagtcaacttgtgtgttttgttattcagttctcagcaataaactgctctggcaatctagtttcatgttctaaaacaataaggaaacaagttaaagaaaaagcggccgctcta

SEQ ID NO: 1664 - DNA, 355 bp, Glycine max
gatcacatttaggatcaaaacaacaaattttcagactcaacaagcttcgaaccaaatcttattgagaaaatgtctggtcatggaaagggtggaaagggtttgggaaagggatgtgccaagaggcacatgaaggttcttcgtgacaacatccagggcatcacgaaacctgcgattcgtacgttaacgataagaggtggcgtgaaaaggatcagtggtttgatctacaatgaaaccatatgagttctgaagatattcttggagaacgtgattcgcgatgctgtgacctacactgaccacgctaggaggaagacggttactgctatggatgttgtttatgctcataagaggcaaggaa

SEQ ID NO: 1665 - DNA, 316 bp, Glycine max
gatatcagaagctcagacctagggatttcggccgtttgctccccaaaaagggaagaagcagattctgtcctttgaaatcaacaagaaaagatgtcaggtgaagaggtagctgttgcagttgaggtacctgctacttcaattccaggtgagccaatggacatcatgactgctctacagcttgtgctgagaaaatctctggcctatggtggtcttgcacgaggtcttcatgaaggtgccaaggtgatcgagaagcatgctgcacagctctgtgttctagcagaagattgtgaccaacctgattatgtgaaactggtga

SEQ ID NO: 1666 - DNA, 299 bp, Glycine max
ggttccgctgcaaaacaaaaacaccgcgtcttccccgtgcggggaaaaagaacagaaaagaaaagaaccctcaattttccgggaaaaccctccccacaatggtttcccgggaaaacaccaattggctcttcgattacggcttgatcgacgatattcccgttccggacgccaccttcggcgtcaattcctccccttcacatggccccctaacgccttgaacgcttcctccaatgtcggcgttgaaattgacggctcgttgggggattctgacagtctcaaagagtctggctcaaagaaaa

SEQ ID NO: 1667 - DNA, 329 bp, Glycine max
gagagttgcatcgactgaaacccctaggaaaaaccccagtttctctctttcactagttccgttcaagttctaaccaagcactcacagtacttttgcttctctcgaggatgtctctacgagtgctgaaccctaacgccgaagtgctgaacaaatcggcggcacttcacatgaacatcaatgccgccaagggtttgcaagatgtcctcaaaaccaacctcggtcccaaaggaaccatcaaaatgctcgttggtggtgctggtgatatcaagcttaccaaagatggcaacactctcttgaaagagatgcaaatccaaaacccgacggcgatt

SEQ ID NO: 1668 - DNA, 114 bp, Glycine max
agaggttggtgagcgaagtggaggcgtagagcgagaccgcgagaggaaggatatggtaatttctaaaattaaaatggtttcaaattgaaacgatgtagtttcaactataacctc

SEQ ID NO: 1669 - DNA, 329 bp, Glycine max
gactccactcacaactgaaaccaaaactgaaaaaaaaaacaaacaataccataacatggcttcttccaccatcacctcctccttcctaacatcacccccttcatctctcttcaacaaatcatcatccccttccttccatgccacccctactctccgccccctcgcgccacgcgcctccatgtccgcctcagcgccgccctacgacttcggatcgttccggttcgatccgattagagagtcgattgtgtcgcgcgagatgacccgcaggtacatgatcgacatggtcacccacgccgacaccgacgtcgtcatcgttggcgcgggctccg

SEQ ID NO: 1670 - DNA, 344 bp, Glycine max
gatatacctctctcatttcccaacgcagcagcagcggcagcttcatctgtttttctgcatcggcgtgaacaatggcgacgtacgctgcgatgaagcccaataagcctggcttggaggagtcccaagaacagatccacaagataaggatcaccctttcctccaagcacgtcaaaaatctcgagaaggtttgtggggacttggttcgtggtgcaaaggataagaggctcaaggttaagggacctgtcaggatgcccactaaggttcttcacatcactaccaggaagtccccctgtggtgaaggtaccaacacatgggacagatttgaacttcgtgtgcacaagaag

SEQ ID NO: 1671 - DNA, 333 bp, Glycine max
gatcccaatcagaaaaagttagggtttgtaactttgtcttttgcttgcgaatctgaatcgaataataatcaatcaatcatcatgtcgtcggcgaagaagatcacactgaagagttcggacggcgaggctttcgaggtggacgaggcggtggcgctggagtctcagacgataaagcacatgatcgaggacgactgcgccgacagcggcatccctctgccgaacgtgacgagcaagatcctggcgaaggtgatcgagtactgcaagaagcacgtcgaggccgcgaatcccgaagacaaaccctccgaggacgatctcaaagcctgggacgccgat

SEQ ID NO: 1672 - DNA, 260 bp, Glycine max
ttatatagttaagccctcttttatgcgtcaaaaaaaaattacaaagaaattactgaagactagcctttagcaagagagtcttgggtgcacgagaggggttattttaaccttttaaaattcataaaagttcaaaagaataatttacaaaaattagtatgtaaaataaatttacctaaaaatatattccagataaagaaggaatattataatagatattttttataaaaaaaaaaaaacaaaaaaaaaaaaaaaagcgggcg

SEQ ID NO: 1673 - DNA, 342 bp, Glycine max
gatccaactctctaaacaacacattaacctttctcattccccatctcctcaccttattcagccactgctaatttctagggttccgaaatggacgctggcggaaagatcaagaagggcgccggaggaagaaagggcggcggccctaagaagaagccggtttcaaggtccgtcaaggccggtctccaattccccgtcggaagaattggccgttatttgaagaaaggaaggtacgcccagcgtgtcggtaccggtgctcccgtttacttggccgcagttctcgagtacctagctgctgaagtgcttgagttggctgggaatgctgcacgtgacaacaagaagaac

SEQ ID NO: 1674 - DNA, 353 bp, Glycine max
  modified_base (33)..(33): a, c, g, t, unknown, or other
  modified_base (165)..(165): a, c, g, t, unknown, or other
gacaactaaacacactagctatagctagaatcncctccaatccctctttgtctttgtgcttttctttagttctttccaaaacagcaacaatgatgagttgccaagcatggcctgaacccatagttcgagtccaatccttagctgacagtggcctaagctcaatcncttcacgctatattaggccacactctcaaagactctccaacaccacttcttttaaactttcacaaaccgaacatgatcatggtcacggtcgagagactcgtgaccatgatcatgttaacatccccgttattgacctggaacatcttttctcggaggatgaaatcctccgagaaaagatattccgacac

SEQ ID NO: 1675 - DNA, 336 bp, Glycine max
gagggttacacgccgtcgtcgctgtttttgtgtgtcgcttcttcgtaggtgcagctgcaatggtgaagggacgccaaggagaacgtgtcagactctacgtgaggggtacaatccttggatacaaaaggtccaagtcaaaccagtatccaaatacatccctgatccaaattgacggtgtgaatgccaaagaagaagtagcatggtatgctggcaagaaaatggcctatatctacaaagctaatgtgaagaagaatggaagccattaccgctgcatatggggcaaggttacaaggcctcatggtaacagtggtattgtccgtgcaaaattcaagtcga

SEQ ID NO: 1676 - DNA, 205 bp, Glycine max
ggaccgcgttcttttctacggagcctcgaccaagaagaatcgcagagagaagagggtcagagtgagaaagagagagagagagagagaaactgagagaaattcgcaaaccctaatttcggaaagatcggcgatggctgcctccaaggatcgcgagaacttcgtctacatcgccaagctcgccgaacaggccgagcgatacgaagag

SEQ ID NO: 1677 - DNA, 316 bp, Glycine max
gaaaatacggaacttgaaaccctcccaatataaaccctcgcttccttgtgtactctctcactttccattctcttcaaacctaacgcagcatcgctattctcttcattccatggctttgcccaaccagcaaaccgtggattaccctagtttcaaactcgttatcgtcggcgatggtggcacaggaaagacaacctttgtgaaaaagcatctcaccggaattcgagaagaaatatgagccaaccatcggtgtggaggttcacccattggattttttcacaaactgtggaaagattcgattttactgctgggatactgc

SEQ ID NO: 1678 - DNA, 317 bp, Glycine max
gacacataatagcacgcaattttcatttttctctctcccttagtcaaagggattcatcgttcttcttcccacgttatttagaaaagcaagatggtgaagatttgctgcattggtgctgggtatgtggggggtcctactatggcagtcattgcacttaagtgcccatccattgaagtcgctgttgttgatatctctaaatcccgcattgcagcctggaacatcgaccagcttcctatctatgaacctggccttgatggtgttgtgaagcaatgccgtggcaagaacctcttcttcagcactgaagttgaaaagcatgt

SEQ ID NO: 1679 - DNA, 346 bp, Glycine max
ggctcccactaataaacttttcaaataattaaacccacacatgaccatggcggaagccactgcatcggaactggaaatcgtcgagcccaccaccacggacgccgccgccgcagacgtggctgtcgacggcgttgaatcaaacctgaagcggactagagaggacagcgatgacgaagaagacggtgtttcgaagaagcagaaggtggatgcagaagaaaagaaagcatcaggtcccgtgaaattgggtttcaaaagcttcgcctcttccgtggaaatgttcgattacttctacaatctccttcatgcttggcccgcttatctcaatcttaaccagtatgaacatatg

SEQ ID NO: 1680 - DNA, 357 bp, Glycine max
agtgataagactgaagaattgaggtgtgttgtaaaggagtgcagtgctgagtggaaagggattttgtgagtccatgacaactaaactaagtccaggacagttactgccaaaacccacaccacactgcatttttcacagtcccaaaaccctcactttcttctttttttaattaaatgaagccctgtagctatagctctatttgtcggatattcatgttacacgcctccaaatcatatcaaatcaactgaaaaccattactaacttattaatgcatattttatgtatataatactactactataacaatatactagaatatagaccatagaatactatacatataagtaattttaacct

SEQ ID NO: 1681 - DNA, 343 bp, Glycine max
gacagcgaaacagagagtgatttcagtgagtgatcggtgttcacttgatctcatcataatcgtcagcgtcaattgaagaagatgccgatcagaaacatcgccgtcggaaggcctgaagaggcgactcaccccgacacgttgaaggcggctttggctgagttcatctcaaccttcatcttcgtgttcgccggctcaggctccggcatcgcctacaacaagctcaccgacaacggcgctgccacccctgccggcctcatctccgcctccatcgcccatgcattcgccctcttcgtcgccgtctccgtcggcgccaacatctccggcggccacgtcaaccccgccg

SEQ ID NO: 1682 - DNA, 347 bp, Glycine max
gggggactcatacaatagagaccagcttttgcttctttgtgaacatggagatgaggaaatcatgtggcttcttcttcttgctcctcctccttgtctttgcttcccaggtggtggtgcagacggagggaagagtgtgtgagtcacaaagccacgggttccatggtttgtgtaatagagaccacaactgtgctttggtctgcaggaacgaaggtttctccggtggcaggtgcaaaggcttccgccgccgctgcttttgcaccaggatttgttgagatctcatcaaacactactcttgccatgcaaattaataaatcatagctaggccaaataaattgcatctactcttt

SEQ ID NO: 1683 - DNA, 281 bp, Glycine max
aggaagacgacagaagggaaagaaaggtaggtttctttcttatgaaaaggttattggactcttgtgctagaattgcttttttttggggagaaaaacgaaaattatcgtctaattgaatttctttgaaatagtgttgtatatagagaacatcttctatcatatctcatcgcatctttacagtttatagattgagaaagtgttccgttagtgttgtaagcgaccttgcttggttaacaatttggagagtttgcttttacacggaaacgaagactttcgagaac

SEQ ID NO: 1684 - DNA, 374 bp, Glycine max
gaaggtggttgtggaagaagagatggaggaagcaaagggagtagtgaagcacgtgctcctagctaagttcaaggacgacgtcactccagagcggattgaagagctcatcaaggactatgccaatctggtcaatctcatcccacccatgaagtcattccattggggcaaggatgtaagtgctgaaaacctgcatcaaggcttcactcatgtctttgaatcaacctttgagagtccagaaggcgttgcagagtatgtagctcatcctgcccatgttgaatatgcaaatttgttcctttcctgcttggagaaagtcattgtgattgactataagcctaccgttgttaagctttgattggagaagtaaagcctcgttc

SEQ ID NO: 1685 - DNA, 332 bp, Glycine max
ggtccttctctctctctccctctttctcgtcactagctctgtgcattcttctctcgctctctgccttccatcacactcgggatttcctttcccaagatagtagaagatggcagacactgaggatattcaacctcttgtttgtgacaatggaacaggaatggttaaggctggatttgctggagatgatgccccacgtgctgtgtttcccagcattgtaggtcgtcctcgtcacactggtgtgatggttggcatgggccaaaaagatgcatatgttggtgatgaggcacaatctaagaggggtattttgactctcaagtatcccaatgaccatg

SEQ ID NO: 1686 - DNA, 402 bp, Glycine max
gccgctctctgagaaaaacagatagtgtgggagagagaagagcggaagagaaaatgacgaccaggttcaagaagaacacgaagaagagaggtcacgtcagcgccggacacggccgtatcggaaagcaccgcaagcatcccggaggtcgcggtaacgccggtggcatgcatcaccaccgtatcctcttcgacaagtaccatcctggtttcttcgggaaggtaggcatgcgctacttccacaaacttcgcaacaaattctacaatccgatcatcaacatcgacaagctgtggtccctcctcccccaggaggccaaagacaatgccaccgccgacaaaggcaccttgctcgatgtcaaccaatttcgggttaccttaaaggttttgggtaacaggggtttttccc

SEQ ID NO: 1687 - DNA, 320 bp, Glycine max
ctatagaaacaatgaaagtggacgaatggtgctaaatcaaacctttacaattgaacctatgctgactattggcagcatcaatcctgtgatgtggaatgacgactggacagttgtaacggaagatggaagcctttcagcacagtttgaacacaccattctgataacacctgacggggctgagattatgactcaatgctgaaagatgcaacacttgttatttatggataaaaccacatcgagaaacttcattatttaaatgcaactgatttaattacttctaaaaaaaaaaaaaaagacaaaaaaaaaaaagcggccgctct

SEQ ID NO: 1688 - DNA, 192 bp, Glycine max
aggttacggcttccagaaaaacaacaaaaggaaggaaaatgggtgttttgatttgtaaaatttccggaattttataatggggttttaaattagttggcctaaaaaggaatcctccttgaaggccgttttacccacccttttttaaggtaaattaaaaaaattaaattagggaaatttggccaaattcaaccc

SEQ ID NO: 1689 - DNA, 338 bp, Glycine max
gacaacacagaacaaaaacaaagaaaaaaaaaaacccttggccaacacaaccatcatggccacctctgctattcagcaatcagcattcactggtcaaactgctctgaagcagctcaatgagttcgtccgcaagaccggtggcgccggcaaaggtcgcactaacatgcgccgcaccgtcaagagtgctcctcagagcatttggtatggccctgaccgtcccaagtacttgggtccattctcggagcagattccatcatacctgaccggagaattccctggtgactacggatgggacactgctggattatcagctgacccggaaaccttcgccaggaacc

SEQ ID NO: 1690 - DNA, 85 bp, Glycine max
gaataatcacataacatgaagagaaagataagaagaaagaggaacatataaagaaatagatagatgtcgtatagtgatctgatgg

SEQ ID NO: 1691 - DNA, 87 bp, Glycine max
gtgtaaatggtcattctattggcttttaacttgcctgttgtgatactcctggaattgtaacgctgttggattttaagagttctttgc

SEQ ID NO: 1692 - DNA, 328 bp, Glycine max
  modified_base (313)..(313): a, c, g, t, unknown, or other
ggccacggcattctccggccccattgtcaccgtgaaggtgtttgaagacaacgtgttggtgagggagcttgttgagacgaaaggcgaaggaagagtattggttgttgatggaggaggaagcttgaggtgtgcattgatgggagggaatttggtacagattgcatataacatggggtgggctgggattgtggtgaatggttgcgttagagatgtggatgatatcaatgcgtgtaatattggcgtcaaagccttggcttctcatccactcagatccaacaaaaagcgcactggtgaaaagaatgtccctgtttangttggtggaacattt

SEQ ID NO: 1693 - DNA, 325 bp, Glycine max
gacatagctgagagagaaaggaaaggttaactaagaagcaatacttcaatggccacccttgttgttcataaccaaacttcttctgctcaagatgctgaggctctccaacaggctttcaaaggatggggggctgatgacaaggccattatagcaatactgggtcacagaaatgttcatcagaggcaagaaatcagaaaagcttatgaggagatttaccaagaggatctcatcaaacgccttgagtccgagatctctggtgactttgagagagctatgtaccggtggatgttgcagcctgcggatcgtgatgctgttttggtgaatg

SEQ ID NO: 1694 - DNA, 336 bp, Glycine max
ggaagctgtgacagtttcagatgagtgaagcaacaacaagaaacgaacggcgggttctggtggcggtggacgaaggcgaggaaagtatgtacgctctttcttggagcctcaagaacataattttccaaaattccaacgatacccttatccttctttacgtcaagccccctcatgccgtttattcccccttagattccacagccaggatagatcatcctgaaactccaggatatttgttttcgtcggacgtaagtgcggccatcgagaagtatggccaagaagtggcagattgcgtgttagagaaagcaaaaaaattgtgtaaagatctccaaaacg

SEQ ID NO: 1695 - DNA, 353 bp, Glycine max
gatttcactcccaaacaaacaaagaagaagttagatttgaaattgaaagagaaacaaacttgggatataagaagaatggctagtggaggaggctatggagacgcgaaccagaaggtagattacgtgttcaaagtggtgctaattggtgattcagccgtggggaagtcgcagatacttgcacgcttcgcgagaaacgagttcagtttggattcaaaggccacaatcggcgtcgagttccaaacgcgcactttggtcattcagcacaagagcgtaaaggctcagatctgggacactgccggccaagaacgatacagagcagttacaagtgcatactacaggggtgctgttggggc

SEQ ID NO: 1696 - DNA, 322 bp, Glycine max
ggcgagagaagttattaaggtttttgagtgcggcggtccaaacactcttctctgcagcttttgcctacaactcccttcaccatggctgaacaaaccgagaaagcttttctgaagcaaccaaaagtgtttctcagcacaaagaagactgggaagggaaagagacctggaaaaggtgggaaccgcttttggaagtccattgggcttggatttaagactcccagggaagccatcgaaggaacctatattgacaagaagtgccccttcactggcaatgtttccatccgtggccgtatcttggctggaacatgtcacagtgctaaga

SEQ ID NO: 1697 - DNA, 318 bp, Glycine max
ggcgtcagaactacgctgaagaatatcatcaccatcaaagtgtttcgttggaaggggaatttggcagatcattggaagaaaatggcgggtggtggaaaggtttcgttcaaagtcacactcacctccgatccaaaattacccttcaaagtgtttagcgttccagaggctgcgccttttactgccgttctcaaattcgccgccgaagaattcaaagtcccgccccagaccagcgctatcatcaccaatgatggtgttggcataaatccccagcagagcgcaggcaatgtcttccttaaacatggttcaaaattgcgcctg

SEQ ID NO: 1698 - DNA, 244 bp, Glycine max
gacatactcttcttcttcttccaatggcgctcactgcttcgctcgctaacaacgcatttctgaaaatcccaacactccatcatggcgaatgctcactgtcttcgtcatccttcatcggttctcggctcacactctcgcgctcttgtactcttcaagggaaccaattgctttcgagaaagcaattcgtggttttcgcgaggaagatttcggggttggaggaggccatgaatatcagaagagaacg

SEQ ID NO: 1699 - DNA, 295 bp, Glycine max
ggagtgaaaccctagctagccacaatgcagatattcgtgaaaaccctaacggggaagacgataaccctagaggtagagtcttcggacacgatcgacaatgtgaaggcgaagattcaggacaaggagggcatcccgccggattagcaacgcctgatcttcgccggaaagcagctggaggacgggcgcacccttgccgactacaacatccagaaggagtccaccctccacctcgtcctccgcctccgcggcggcgccaagaagcgcaagaagaagacctacaccaagcccaagaaga

SEQ ID NO: 1700 - DNA, 317 bp, Glycine max
ggcgcctgatttctcagttctctcacacactcattcggtgctccgaatctcagattctagggttagggttcccaatttctccaccgatcagaaaatgagttcaactggtggttctaccaagggcggaaggggcaagcccaaagcctccaaatccgtttcaagatcgcagaaagctggtctccaattccccgttggaagaatcgctcgattccttaaggctgggaaatacgccgagcgtgttggtgctggtgctcctgtgtacctctctgcagtgctcgaatatctcgctgctgaggttttggaattggctgggaatg

SEQ ID NO: 1701 - DNA, 355 bp, Glycine max
ggaatcgtcttttacttctcagcagcttcggctagggttcagaaacgaaaaagggttcggtgttctgttcgcgatgagagccaagtggaagaagaagcgtatgaggaggttgaagaggaagcgccgaaagatgagacagagatccaagtagtgcgttaaacctagtttgtttctgttgcttttacaattgcttatgttgtcgaatgggacacccagttgttagtggcactggtttctcctttttgatgtttgatacattttgttggattcaagtagtttatgttcgtcttatgttattagctcaaaacaatgttgttactgcttttgctaatcaacatgatttcctaattggcac

SEQ ID NO: 1702 - DNA, 307 bp, Glycine max
gacacaaaaaatttctagagcgagaaagtgagaggagagagaaagtagctgatcctccatggcctccaccaaggaacgcgaaaactttgtctacaccgccaagctcgccgaacaagccgaacgctatgaagaaatggtggaagcaatgaagaatgtggcgaagctgaacgtggaattgacggtcgaggagcggaaccttctgtcggtagggtacaagaacgtggtgggtgctcgtagggcttcgtggaggattctatcgtcgattgaacagaaagaagaagctaaagggaacgatgtgagtgtgaag

SEQ ID NO: 1703 - DNA, 351 bp, Glycine max
ttacaggacaaacgtgaagaagcctgatactgacttcgaattttacaagtgatgatgttgtagcttttagattggtgtgtgctcgcgaagttaatatacagtgcagggtacatttctagagggatcaccacgatcatgagaaatgaagcaatgtttctgtttcttgttggcctttcatcttttgtaatttagattatttaatttactaaatatattaattgtggcagcttaatgttgagtacgtactgcatgtctgatttcaaaagtaatatggatgacttgcttctgccttcattttgccttgatgctaaaaacaagatgacttaagtctataaaatgagtatgttttta

SEQ ID NO: 1704 - DNA, 109 bp, Glycine max
taggctattatgatacagtaacttgtgtacaacatatacataaagtcaaaagagtaaaagcaaatggattttacaccatactataattattttatatatccctcgttgc

SEQ ID NO: 1705 - DNA, 249 bp, Glycine max
taatggggagggaaaaagattccacggttctcgagttcggtgcgtcgatgctagcattctcttctgcaactttcgcggggagcttcattcaccatggatgtccgtgccgaggatgctttgttgtttgaaccgtcagtgtttcgcatctctaggaaaactggtaatggaaagcgtcccggaaggggtgcgaaatgcgtttggaaatgtcttgcgcttggtcatcatactcccacggaagccatcgaacga

SEQ ID NO: 1706 - DNA, 314 bp, Glycine max
ggagcgaacaagatattaaggtttttgagtgcggtgcggcgatgctagcactctcttctgcagctttcgccgacagcttcattcaccatggctggacaaaccgagaaggcttttttgaaacaaccaatagtgtttctcaggctcgaataaaactgggaagggaaagcgacccggaaagggtgggaaccgcttttggaaatccaatgggcttggatttaagactcccacggaagccaaccaaggaatctacattgacaagaagtgcgccttcactggcaatgtctccaaccgtggccgtatcttggctggaacat

SEQ ID NO: 1707 - DNA, 145 bp, Glycine max
gtctttaattcttcgtcaaaaaaaaaaaaaaaaaaaaaaaaaaaaaaaaaaaaaaaaaaaaaaaaaaaaaaaaaaaaaaaaaaaaaaaaataaaaaaaaaaaaaaaaaaaaaaaaaaaaaaaaaaaaaaaaaaaggcaactaaaa

SEQ ID NO: 1708 - DNA, 204 bp, Glycine max
gatggggttttatcatgagcgcgaacaccgattgtgtcaatgttcctgtgagctcaaggcaagggagagaatagtacaataaaaaaaaagatgcatgtttggaagtttttctttcttcttgaagaagagaaaataaaatggcttgttcaatatatgggacaagcgtttcatgctgcaaataataatgaatgattttcaggggct

SEQ ID NO: 1709 - DNA, 338 bp, Glycine max
ggtggtattttggcagcgacacgtatcttcatcaagaatcgcagaagcagtttccggtgcatcgcatcgtcttccaaaatgaacgacgcagatgtcgcgaagcaaatccagcagatggtgcgtttcatccgccaggaagctgatgagaaagccaacgagatctctgtatctgccgaagaggaattcaatatcgagaagctgcagttggttgaagccgaaaagaagaagatcaggcaagaatacgaacgcaatgagcgccaagtcgaaattcgcaagaagattgagtactcactgcagctgaatgcttctcggattaaagttcttcaagctcaagatga

SEQ ID NO: 1710 - DNA, 353 bp, Glycine max
gaagagaaaaatgagtataattcaatacaacgcatcatgttaagagtgaaggtactgaccgagcgaaagcatatataatacatactgagtgcttacagttgctgcgtcgcaaggtatcggcagcaacagataactatcatcacaattttcgatcactgcattggttcagtggacaagggatttgaactacctgacttgcatacgtgatagcttcaaagttgcagaagttgcacgctagagcatctcaagcgtcacaatttgcacccacacgtggaactaacgactactggcaattgctggaacataatatgccatacattcaggagcctcctacagtagagaaatgcaccctg

SEQ ID NO: 1711 - DNA, 58 bp, Glycine max
gaccagtccccgtttgttccgctgcaaaacaaaaacaccgcgtcttccccgtgcggcg

SEQ ID NO: 1712 - DNA, 383 bp, Glycine max
ggtgctgttccaagtcccatagcagcgatgggaatcgatcttaatgctgggggtaagagcaaaaagaccaaaagaacagcaccaaaatccaatgacatctacctcaaattacttgtcaagctttatcggttccttgttcgaaggactggcagcaatttcaatgctgttatactcaagcgcttgttcatgagcaaggttaacaagcctccaatttctttgtcaaggttaattaagtatacaaaggggaaggaggataaaattgctgtaatagtggggactgtaactgatgatatcagagtatatgaagttccagcattgaaaattacagcactcaagtttactgagagagcacgtgcaagaatagaaaacgctggtggtgaatg

SEQ ID NO: 1713 - DNA, 125 bp, Glycine max
aaggtgtatcattgacaaaaaatagcttaaaagtaaccccataacgttttcgacgtatcattgacaaaatttcattgaaagcccagaggggcaaaaagactgcatgcatgaaggtgtgctttctc

SEQ ID NO: 1714 - DNA, 385 bp, Glycine max
gatatttctaactcccaacacttccatatcttatcttctcctcctccatctttgaggttctcacggaaacttctgaagatggctggcatagcattcggaagcttcaatgattctttcagtttggcctccatcaaggcctacattgctgagttcatctcaacccttctctttgtttttgctggtgttggttcagccatagcctatgctaagttgacatcagatgcagctcttgatccaactgggttggtagctgttgccatttgccatggttttgctctcttcgttgctgtttctgttggagccaacatttctggtggccatgtcaaccctgctgtgaccttcgggttggctcttgggggccacatcaccatcctcactggtctct

SEQ ID NO: 1715 - DNA, 355 bp, Glycine max
gagtgtgtgcgactttccattcgggcacagcgccaatctctgcagcgccttcgatctagagcacatgacaaagataccaaccaaagctggcattgataggcaatacagtactcgtaaaggtgccagtctgcgaaagcagattaagaagatggaagttagtcagcacaccatatttgatctgtgaattttgtgggaagtatgctgtgacgaggaacgctgtatgaatatggggatgcaaggactgtggtaaactgaaagcaggctgtgcttagacattgactaccgcatgtgctgtgacagtaccgagcaccatcacgacgttgagggagcagactgagagttgagcattttgttg

SEQ ID NO: 1716 - DNA, 366 bp, Glycine max
  modified_base (352)..(352): a, c, g, t, unknown, or other
gaatcctctgttgtttctcagccgcctcggctagggttcggaaacgaagaagggttctgttttcttttcgcgatgagggccaagtggaagaagaagcgtatgaggaggctgaagaggaagcgccgaaagatgagacagagatccaagtagtgcgttaaacctagtttgtttccgttgcttttacaattgcttatgttgtcaaataggacacccagttgttagtggcactggtctctcctttttgatgttttgatacattttgttggattttatttcgtcttatgttcttagctgaaaacaatgctgttactgcgtttgcgaatcaacaggatatcttgtttgcatttctgtntctctctttgctac

SEQ ID NO: 1717 - DNA, 373 bp, Glycine max
  modified_base (315)..(315): a, c, g, t, unknown, or other
gacaacacagaacaaaaacaaagaaaaaaaaaaacccttagccaacacaaccatcatggccacctctgctattcagcaatcagcattcactggtcaaactgctctgaagcagctcaatgagttcgtccgcaagaccggtggcgccggcaaaggtcgcactaacatgcgccgcaccgtcaagagtgctcctcagagcatttggtatggccctgaccgtcccaagtacttgggtccattctcggagcagattccatcatacctgaccggagaattccctggtgactacggatgggacactgctggattatcagctgnaccggaaaccttcgccaggaaccgggagctggaggtgattcacagcagatgggcaatg

SEQ ID NO: 1718 - DNA, 298 bp, Glycine max
ggggctatggagcactatacttggtttcggctttccctattattataggtatttcagttgttctgattttgttttacaattccctccagtaggaaattgcattccactcaaattcagtgtataatgttacactatattgaaatgagttagtatatcgcaatgttcacctaacatcaaaaaaaaaaaaaaaaaaaaaaaaaaaaaaaaaaaaaaaaaaaaaaaaaaaaaaaaaaaaaaaaaaaaaaaaaaaaaaaaaaaaacctaataacctttcaaaacaattcaacacccctcaatg

SEQ ID NO: 1719 - DNA, 120 bp, Glycine max
  modified_base (95)..(95): a, c, g, t, unknown, or other
taacgatacggctgctataaaccacaccatgggtgtattacacatgctcaatgtttatgttgctttcagtcagtttagatgatactgccacatcnttgaatcaacctttgagagtccaaa

SEQ ID NO: 1720 - DNA, 383 bp, Glycine max
  modified_base (194)..(194): a, c, g, t, unknown, or other
gaactcacacttcaactttttcataacacaaagcacaaagcaaagctcatccttgagttaaaaaatggcagcagcttcttccatggctctctcatccccatccttggctggcaaggccgtgaagctgggcccatcagccccagaagtgggaagggtgagcatgaggaagaccgtcaccaagcaggtctcctcangaagcccatggtacgggccagaccgagtcaagtacttgggcccattctctggcgagccccgtcctaactaaccggtgagttccaggcgactacggctgggacactgctgggctttccgcagacccagaaaccttcgccaagaaacgtgaactcgaagtgattcactccaggtgggccatgctcggagcc

SEQ ID NO: 1721 - DNA, 381 bp, Glycine max
  modified_base (163)..(163): a, c, g, t, unknown, or other
gactcttgtctccccagcattcatattaatatcatgccctccttctgcatccaaaccttcattttgtagtgggtgggggtttctcatttctctgccgttccatggatcgggaaggaggatccaacggcggatcttgctactactccgttctcgggattcgtanggacgcctccttctctgatattcgcactgcctaccgcaaactcgctatgaggtggcacccggacaagtgggctcagaatcctgcaaccgctggcgaagccaagcggcggtttcagcaaatccaagaagcctactcagttctctccgatcagtctaaaggtcaatgtacgatgcggggctctacgattctttggaggaagaagaccaagacttttgtga

SEQ ID NO: 1722 - DNA, 306 bp, Glycine max
atggcaaggtcatgagcttactaggccatgagtctcgctaatggaaatctcttttgacaaaaaaaaaaaaaaaaaaaaaaaaaaaaaaaaaaaaaaaaaaaaaaaaagtaaaaaaaaaaaaaaaaaaaaaaaaaaaaaaaacggccgctcaaaaagattcaaacttaaataagcctgaaaggaaagttaaaacccctcaaaaatgttaactaaattcaattcaatggccgttcttttaaaaagtccttaatgggaaaaacctggcgttaaccaaattaaaccccttgtaagaaaatccccttttcc

SEQ ID NO: 1723 - DNA, 376 bp, Glycine max
ggcagcagcacctttaaacgccgaaggttcatccaatctccgaaggccttcaccggattgcaaccatgtcgaggagaaaggttagagagccaaaggaggaaaacgtgactctgggcccagctgttagagatggtgaacatgtttttggagtcgctcgcatctttgcctccttcaatgacaccttcattcatgtcactgatctgtctgggagggaaacacttgtccgcatcactggcgggatgaaggttaaagctgacagagatgaatcatctccatatgctgctatgcttgctgcgcaggatgttgctgctagatgcaaggaactgggcataactgctcttcatatcaagctccgtgccacaggtggaaacaagac

SEQ ID NO: 1724 - DNA, 369 bp, Glycine max
ggctcgcgttcacaacacaaaccctagaagccaacatttttcaggaacgagtgcgagcagaggtagtggagtgcggatgcgtaattgaattgccagaattaaaagtgttcattcagttatttctttgattcttgctttcattttggaccgtgctgctcatcatcacaggatctttcaggaataatttggagacgtattttaatgaagttagatcattggaagcagttagattcaaggcgctttgcatccagtgggcacagtattatctaaaatttagaaatcaaacataggatgttagacaactatgtaactttaggttacttaattagtttacatactttgcattacattttttacaattgttgtttc

SEQ ID NO: 1725 - DNA, 379 bp, Glycine max
  modified_base (319)..(319): a, c, g, t, unknown, or other
gatgccgaaaagtagtaccaagatggcttcagttgtgtatctcctctttggcttccatctcattgttatcatgtcaagttccttacccgcaactagtgaagtgtttgcaaaacagtatccatccacagaacccgtggaagaaaaactcacccaactccacttctatttccataacaacataacgggggaacacccaactgctatgaaaactgttttgcctcctaaggggtccattcatggttttggggctacttacatgatggatgaccctctaactgaaggaccaagtccaacttcaaagcttgtgggaagatctcanggaatatacgctttggcttcacaacatgagcctgggttgctcatggtgacaaattttctc

SEQ ID NO: 1726 - DNA, 109 bp, Glycine max
attactattactgatcaatcaaaatatctatcaaaagtaaaaagcgaagagaagggaaaaactttaatttttttatggtaaaaaattcaattatacctgttatttcact

SEQ ID NO: 1727 - DNA, 312 bp, Glycine max
  modified_base (216)..(216): a, c, g, t, unknown, or other
  modified_base (265)..(265): a, c, g, t, unknown, or other
gtcagtcatacactgagagagagagagagagagagagagaacatcgttgcagtggcgcgcccaatggctctgggaatctcaaacatactgcactgccccaaattgagtttctcccacaacaattttcgcccaaaagtttcaacctctctcagcctcaggtttccccagacagcagcacggagtgatagaaagatcatctgtgctgctgcatctgcngctggaagctctaatcccgatggtgaatttaatccttatgaggtgctangtgtaagccctattgagaaatttgacatggtcaagggaacatatgct

SEQ ID NO: 1728 - DNA, 386 bp, Glycine max
ggatcctttgtattctattcttcaagattcaggtactgcgtttcggaagcagacacagatggctcgtacgaagcaaaccgctcgtaagtccacaggaggaaaggctcctaggaagcagcttgcaaccaaggctgcacgtaagtctgcaccaactactggtggtgtgaagaagccccaccgttatcgtcctggtaccgttgctcttcgtgagattaggaaataccagaagagtaccgagcttttgatccggaagctccccttccagaggctggttcgtgaaattgctcaggacttcaagactgatctgcgtttccagagccacgccgtgcttgcattgcaagaagctgctgaggcataccttgttgggctctttgaggacactaacc

SEQ ID NO: 1729 - DNA, 377 bp, Glycine max
gacatctttcactcgttctctgaaattttaattgacttttctcccctcataaaaaaaacctaccaatggctcccgcaaaggcagagaagaagcccgcggagaagaagccggcagagaaggccccagcggagaagaagccgaaggcggagaagaagatatcgaaggaaggaggaagcgagaagaagaagaagagaacaaagaagagcgttgagacctacaagatctacatcttcaaggtgttgaagcaagtgcaccccgacatcgggatctccagcaaggctacggggatcatgaacagtttcataaacgacatcttcgagaagctcgcccaggagtcatcgcgtctcgctaggtacaacaagaagcccaccattact

SEQ ID NO: 1730 - DNA, 377 bp, Glycine max
  modified_base (355)..(355): a, c, g, t, unknown, or other
gggttcttcttagccgtagttttctctcacagccgcagacagagatggaagctgtgtgtggaagtgtttgggtcacatcctctcttccacgctcacccaagtccactctctctctattccgctctactcatcaacacctaacagcatttccttcacaatcccatcttttcttatatcaccctcctccctatgctaatgctaaaaccctccgcgccagaacctcctccaaacccgccattttccttccccacttaattgcttctctggaacaagttgaccagacttacataatggtcaagcccgacggcgtgcaacgtggcctcgtgggagaaattacttctaggtttgagaaganagggtttaagtcaactggcttg

SEQ ID NO: 1731 - DNA, 374 bp, Glycine max
gacccccaaaccctgctgcataggaagaaaccctagcctctcaccctccctgcgacacgatgcagatcttcgtgaaaaccctaacgggtaagacgatcacccttgaggtggagtcttctgacaccatcgacaacgtgaaggccaagatccaggacaaggaaggcatccctccggaccagcagcgcctcatcttcgccggaaagcagctggaggacggccgcaccctcgccgactacaacatccagaaggagtccaccctccacctcgtcctccgtctccgcggtggcgccaagaagcgcaagaagaagacctgcaccaagcccaagaagatcaaacacaagcacaagaaggtcaagctcggcattctccagttc

SEQ ID NO: 1732 - DNA, 363 bp, Glycine max
ggaacctttgcattctatacattcaagattcagcaagtgcgttttggaagcagagaccgaaatacttcgagatggcccgtacaaagcaaactgctcgtaagtcaactggaggaaaagctcccaggaagcagcttgcaaccaaggctgcacgtaagtctgcaccaacaactggtggtgtgaagaagcctcatcgttatcgccctggaactgttgctcttcgtgagattaggaaataccagaagagcactgagctcctaatcaggaagcttcctttccagaggttggttcgtgaaattgcccaggatttcaagactgatctgcgtttccagagccatgctgtgcttgcattgcaagaggctgctg

SEQ ID NO: 1733 - DNA, 339 bp, Glycine max
caaggctgcccagaagaagaagtgaatcgtgcgggctggttcatcaggggatgttggttacaataaatgttggtttcttttctgtactcttgtgtcttcttttctaggtagcttgtttttcggacaaagtttgaagtctccaccatcatctcgcaactgttgttcccagaactgggttcttgatcgacggtggcaaaattgcttttatttatctgtgttttaatgtgttgtgtttgtcggaacccctgattacatttttgttaagcgcagcgagtttcaggactttgctgcgttgtgttgctttggtttattaaatgtcaactttctatttgtagtgtt

SEQ ID NO: 1734 - DNA, 383 bp, Glycine max
  modified_base (186)..(186): a, c, g, t, unknown, or other
  modified_base (373)..(373): a, c, g, t, unknown, or other
gagccacaccacaagctccttatcgtgtttgcattgcagagagagagagaatggcgaccacacccggtttgtgtggcagtgtgttgttgagcacctcgttcctgaggaagcacgcaatggcatcagtgaacatgagaatgctgaacgctaatgctggtgtttttggcttaaagggagggcgtgganggcgtgtgagtgcgatggcaagttacaatgtgaagctgataaccccagaaggagaacaagaatttgaatgcccagatgatgttttcattcttgaaaaggctgaggaatttggcattgaccttccctactcatgcaaggctggtgcttgctcttcctgtgccggcaaagttgtttctggcaaagtcgnacaatctgat

SEQ ID NO: 1735 - DNA, 345 bp, Glycine max
  modified_base (180)..(180): a, c, g, t, unknown, or other
ggtgattgagtttggctgtcataatctctctctcatccgaaaatgtcactcaccttgcaaactccgccttctacaactctctcttctgcatctcccattcacagaacaataacaagatacaccacattctccttctcgcttcgtcctccaacaactcttcacttcaatccccacaggtcnctccctctaattcgcgcttccaattcttctatcaatgccgcttcgaccactgaactggacgctgtgtccgccttcagcgagatcgttcacgacaccgtcgttttcgatgatttcgaaaagtttcctccaactgctgctactgtaagttcatcgcttctcttggga

SEQ ID NO: 1736 - DNA, 353 bp, Glycine max
gactgcgaaccagtagggactcccattccgactcttagccgccgatctctcagggcttgcatcttctcaggtaagctgtgaagatgtacacatcaaggaagaaaatccacaaggataaggatgctgaaccaactgaatttgaagagtcagttggacaggcattgtttgatctggaaaataccaatcaggagcttaaaagtgatctgaaggatttatacataaactcagccgtgcaagttgatgtttctggaaaccgcaaggctgttgttattcatgtcccttacagattaaggaaaggtttccgtaagattcatgttaggcttgtcagggagcttgagaagaagtttagtggc

SEQ ID NO: 1737 - DNA, 385 bp, Glycine max
gactcaccacttcaaaacactcataacacaaagcacaaagcaaagctcatccttgagttaaaaaatggcagcagcttcttccatggctctctcatccccatccttggctggcaaggccgtgaagctgggcccatcagccccagaagtgggaagggtgagcatgaggaagaccgtcaccaagcaggtctcctcaggaagcccatggtacggcccagaccgagtcaagtacttgggcccattctctggcgagcccccgtcctacctaaccggtgagttcccaggcgactacggctgggacactgctgggctttccgcagacccagaaaccttcgccaagaaccgtgaactcgaagtgattcactccaggtgggccatgctcggagcc

SEQ ID NO: 1738 - DNA, 383 bp, Glycine max
gatagggtttttgtcgttgcgactaagagttgctgcttcttccgccactcagcacttcgctccctctgtgcttcaccaaccatggccgaaatcgaagctaccgttccagatccctctcaaatcgacgtcaaacttttcaaccgctggagcttcgacgacgttgaggttactgatatgtctctggctgattacattggagtgtccccgtcaaagcatgctacatatgttcctcacactgctggtaggtactcagtgaagaggttcaggaaggcgcagtgccccattgttgagagactcaccaactctctcatgatgcacggaaggaacaatggaaagaagctcatggctgtcaggattatcaagcatgcaatggaaattattca

SEQ ID NO: 1739 - DNA, 154 bp, Glycine max
gacgcatccttctttctctctctctcctcctcgatcccaattccactagggattcaattccgatgcgattccgagcttgttagatccacgacaacgtttcgtttcccagattcttttgtaaaaaaaaataatcttcctttgcccaacaggtaag

SEQ ID NO: 1740 - DNA, 383 bp, Glycine max
ggctgacaagccaatcctttgtgtaggtgctcaaccctagtaagccgcaatggtgaagtactcaagggagcctgacaatccaactaagtcttgcaaggctagaggcgccgaccttagggttcattttaagaacacaagggaaactgcctttgcaatcaggaagttgcccttggtcaaggctaaaaggtacttggaagatgttcttgcccacaagcaggcaattccattcagacgtttttgtcgaggtgttggaaggacagcccaggctaagaatagacactctaatggccaaggacggtggcctgtcaagtcagcaaaattcattcctgatttgctcaaaaatgctgagagcaatgctgaagtgaaaggtttggatgttgatg

SEQ ID NO: 1741 - DNA, 380 bp, Glycine max
gatagcaaaatcgcttctccaatttaatcaccattgtacaacccaattcccttcgtcgttttcgattaagagagcaatggcacgtaccaagcaaaccgctcgcaagtccaccggaggaaaggctccgaggaagcaattggcaaccaaagccgctcgcaagtcagccccggcgaccggcggagtgaagaagccccaccgcttcaggccaggaacggtggctctgagggagattcgaaagtaccagaagagcaccgaacttctgatccgaaaactcccattccagaggctcgtcagagaaatcgctcaggatttcaaaaccgacctccgctttcagagcagcgccgtttcggctcttcaggaagccgcggaggcttatctcg

SEQ ID NO: 1742 - DNA, 366 bp, Glycine max
gaaggcaagtttcacttcacaactcctcaacacaagaactacagtagtagtagtagcttcacttcactcacaacacagcaatgcccactggcttctctctcatctttgcggcatcacttttccttttgcttctcgattgttgctctgggagttttgttggggtctgctatggaagaagtgctgatgacctccctacacctgacaaggtggcacagttggttcaacttcataaaatcaaatatgtcacgatttatgattctaatatacaggttctgaaggcctttgcaaacactggaattgagcttatgattggggttccaaattcggacttgctttcagtctctcagttccaatctaatgcagact

SEQ ID NO: 1743 - DNA, 100 bp, Glycine max
  modified_base (50)..(50): a, c, g, t, unknown, or other
gacgttcacattcaggaatcgttttcttcagaaaatttgccatcgttganggaagcgcgagagccttcgttgttcaagatgagagctaagtggaagaaga

SEQ ID NO: 1744 - DNA, 313 bp, Glycine max
  modified_base (251)..(251): a, c, g, t, unknown, or other
catctgagaactgccaaaagagcaaaatcttttttattgcatggtctccttcggtagcccgcattcgccctaagatgctatatgcaacatccaaggacaggttcagaagggagctgcagggcatccattatgagattcaggcaacagacccaaccgagatggatcttgaagtcctcagagagcgtgcaaactgagcacctacacaagagggttgtgtctaggtgatgtagttaagatatctgaggcctcanggaatgatgttgactgataccctttagttgttctactatgatctctgtctgtttcgcgacat

SEQ ID NO: 1745 - DNA, 375 bp, Glycine max
gatcgcatttcatagcactcaccctcattaccaacacgaaagcatagccaaaaccttttttcgaagtctctgattttcctaatggctccggcaaaggcagagaagaagccggcggagaagaagccagcggcggagaaggcaccggcggagaagaagccgaaggcggagaagaagatctcgaaggaaggagggagcgagaagaagaagaagcgcacgaagaagagcgtggagacctacaagatctacatcttcaaggtcctcaagcaggttcaccccgacattggtatttccagcaaggccatgggcatcatgaacagcttcatcaacgacatcttcgagaagctcgcccaggaagcgtcgcgtttggctcgctac

SEQ ID NO: 1746 - DNA, 360 bp, Glycine max
ggagggttattggacacattcttcagcgactgcgtttttggatcggaacctcttctgcggcgtagcaatgggacactccaacgtttggaactctcacccaaaaaactacggtcctggttctcgcacttgccgtgtgtgtgggaatccacatggactgatcaggaagtatggccttatgtgctgcatgcagtgcttccgtagcaatgccaaggaaattggcttcatcaagagcagttgtcaactacggaccaatattgtgttctggcactaagatgttttgaggatgttatgtttgaagaaacttgagactttcttttttcatctaattaattatcagacgtaatttgtggtactaagaat

SEQ ID NO: 1747 - DNA, 316 bp, Glycine max
gaagttgcgtgtgatgaaccataaccatgtcagacgatgaacaccacttcgactcaaaagctgacgctggagcatcaaacacatttccccaacatgctggaaccatccgcataaacggttacattgtcaacataaacatgccatgcaatgttgtcgatgtttcaacttccaagactggctagcatggatacgcaaagtgtcacattgttgcaattgacatcttcactgggaaaaaacttgaggataatgtcacatcttcccataactgtgatgttccccatgttaatcgcattgaataccaactcattgacatctc

SEQ ID NO: 1748 - DNA, 356 bp, Glycine max
ggcacttcaattgcaatcaaattagttcattctctttgcgcagttccctacctctcctttcaagatgcagatcttcgtcaagaccctcaccggaaagaccatcacccttgaggtggaaagctctgacaccatcgacaacgtcaaggccaagatccaggacaaggaaggaattcccccggatcagcaacgtctcatcttcgccggaaagcagctcgaggacggccgtaccctcgccgactacaacatccagaaggagtcaacccttcaccttgtccttcgtctccgtggtggcatgcagatcttcgtcaagactctcactggcaaaaccataaccctagaggtcgaaagctctgaca

SEQ ID NO: 1749 - DNA, 130 bp, Glycine max
ggcgaaacagagagtgatttcagtgagtgatcggtgttcacctgatttcaacacaaacctcaacgtccaatgtagaaaatgcccattaaaaacaacccccctcggaaggcttaaaaagggaatcaacccc

SEQ ID NO: 1750 - DNA, 315 bp, Glycine max
gacagagaagggtttcttccgggttcacgtttcacaatcactttttgcgcttctctcactcactcactcatcttcttcctcttcgtgtggttttctttctcgaactcgaacgaagatgcgtgagattcttcacatcgagagatggcaatgcgggaaggagatctgcaccaaattctgggacgtggtgtgcgcggggcaagggatcgattcaacggagaggtagcacagggacaacgagttggaaatcgagcgagtcaacatctacgacaatgaagcgaattgcggaaggttcgtgcctacggtggtgctcatgga

SEQ ID NO: 1751 - DNA, 373 bp, Glycine max
  modified_base (349)..(349): a, c, g, t, unknown, or other
gatccacacctctctctctctctcagaatttctatctatctcttgtttcaatttcaacaacggttactcctttttcgttttgagtttcaatcaagccatcatcatgtctaccgcatcgcaacccaaggccaagaaaacggcgtcgtccaagaagcccctctcccaccctcccttcgccgtgatgatagcagaggcgattgcgagtctgaaagagagaaccggttcgagccaatacgcgataaccaaatacatcgaagggaagcacaaggagttgcctgcaacctacaagaagcttgtcctcgttcatctcaagaaatctgttgctgctggcaagcttgttaaggtgaanaactcctttaagctcgcaccgact

SEQ ID NO: 1752 - DNA, 381 bp, Glycine max
gaccggattgcaaccatgtcgaggagaaaggttagagagccaaaggaggaaaacgtgactctgggcccagctgttagagatggtgaacatgtttttggagtcgctcgcatctttgcctccttcaatgacaccttcattcatgtcactgatctgtctgggagggaaacacttgtccgcatcactggcgggatgaaggttaaagctgacagagatgaatcatctccatatgctgctatgcttgctgcgcaggatgttgctgctagatgcaaggaactgggcataactgctcttcatatcaagctccgtgccacaggtggaaacaagacagagacaccaggtcctggtgctcaatcagctcttcgagcccttgcccgttcagga

SEQ ID NO: 1753 - DNA, 379 bp, Glycine max
cgggtgccaaaaaacgcacaaagggagagctgagacaagacgacaaaaaggtacagttttcagaacaccaaagcacgcgatctctatcccacgaaaattctcagtttgcagagaaaatctgaggcatctctagacgatcgtatctcaactatgagtgtctgtgacatcataactcgtcacacctcacatcatacattcaattaactggcagtactgtaacatttgcgcgcatggtaaagacttgccttaattcaaatctgacgacatgcatgacatcatcattgacctaactgaccctgtatcaattacgccaactgcaatgtatctccgtagcacttgctcaaccgtcatcgagagtgaaacccgtcctgtcactcca

SEQ ID NO: 1754 - DNA, 378 bp, Glycine max
ggaagtgatttctgagattggatgcgagagttctgagaagaaaagagaagatcggtgagtgaggaagcaaatagcaatagcaccgccaccgtcaccactgccgctgccactgccactagcaacagcagaatgggaaccttgggcagagttttctacgccgtcggattttggatccgcgagaccggccaagccatcgatcgcctcggctctcgtctccaaggcaactacctctttcaagaacagctgtctaggcatcgacctctgatgaatctgttcgacaaagctccctcggttcacagggatgcatttgtggcccctagtgcctccctcctcggcgatgtccacgttggccccgcttcctccatttggggaggatgc

SEQ ID NO: 1755 - DNA, 389 bp, Glycine max
  modified_base (348)..(348): a, c, g, t, unknown, or other
gatcgcatttcatagcactcaccctcattaccaacacgaaagcatagccaaaaccttttttcgaagtctctgattttcctaatggctccggcaaaggcagagaagaagccggcggagaagaagccagcggcggagaaggcaccggcggagaagaagccgaaggcggagaagaagatctcgaaggaaggagggagcgagaagaagaagaagcgcacgaagaagagcgtggagacctacaagatctacatcttcaaggtcctcaagcaggttcaccccgacattggtatttccagcaaggccatgggcatcatgaacagcttcatcaacgacatcttcgagaagctcgcncaggaagcgtcgcgtttggctcgctacaacaagaagcccac

SEQ ID NO: 1756 - DNA, 149 bp, Glycine max
gattgctggctggtaaagaatctctaaactgatttccgcacttagtcacttgctttcttcacaattcactccagatttttattttcgtgttgatcttcttgttactctgatgttccataaagataaactcaagtttctttgatgatgat

SEQ ID NO: 1757 - DNA, 346 bp, Glycine max
gcatcaaatcaaaaaccctaattcccaaattctctcatttttcaagtttcaaccaagaaaagcagcaacaatgtcgggtcgcggaaagggtgggaagggtttaggaaagggaggagcaaagaggcatcgcaaggtgctccgcgacaatatccagggaatcacgaagcccgcgattcggagactggcgagaagaggtggcgtgaagagaatcagtggtttgatctacgaagagaccaggggcgtgctcaagatctttctcgagaacgtgattcgcgatgccgtgacgtacacggagcacgctaggagaaagacagtgacggccatggatgtcgtttacgctctcaag

SEQ ID NO: 1758 - DNA, 347 bp, Glycine max
gaattgttaatttgcgtccataattcactcatcctcctcgcaatttccgatctttctgtagttgtctggtctccgtcaaccatcaatcaccaacgtagatcgcacacaaataacaatgggtttaggttttgttgtcggattcctcgggcttctgattctatttcacgccgcatattctaccatccaatacaagggtttgttgaagattacggaggaagagttttcagggcctcctttgaatgtggtgattgaggtgactctagggttagttttttgcatgtgggctgcactaaccgtgccaggaaagtttttgtcaatccaacctcactctgaagagaacagaattg

SEQ ID NO: 1759 - DNA, 88 bp, Glycine max
ggctacgctttcttttccttcagggttaagccgtgagatttgccaatctgagaaatggccgattcttctcgggaggagaacgtttaca

SEQ ID NO: 1760 - DNA, 361 bp, Glycine max
gattttgtgtttaattaatctaataaaataacccaaatttcgaatggggtaatccttccgagttctgagaatgagatgttgctaaatgtttcagatgttgtcgacaagtatgaggttcaacttattagggcactacgaacatactctgggcattgaaaactggtttgtccctcgaacattttccgcatcatatggtcccacattcttagatgcctaatcattggaaaaggctactttggctctacttgatgaattgtatggctgggatttttttccctttgcttgtagaatcctctcaaaatttatttaaccattgtgtactcatttagaacaaacaactcttcccaaatatcaaaaagcg

SEQ ID NO: 1761 - DNA, 371 bp, Glycine max
  modified_base (273)..(273): a, c, g, t, unknown, or other
ggattccttcagtcacttccctcattttttaacattcccctcggcgctgcgcacctttctcgatctccgatctataaaccccacaacaccctccttccttctttctcaaccttacactctctctctctctctcaaaataaatctcgtttctctctcctctcgttgggcctcttcaacgggcttcccggcccaacgctacaaccttttttctgctctttcgattttttagggttttcgcgcgctccccctttcttcttctcctggatctgctangagaagtgctgcatgctctgaacttccttccatactcttagagatggcgtcttcgtatcccggttctgttagtgccgcgcaggttggttcctacttcg

SEQ ID NO: 1762 - DNA, 339 bp, Glycine max
ggaaacagagagtgatttcagtgagtgatcggtgttcacttgatctcaacaaaatcctcagcgtcaattgaagaagatgccgattagaaacatccccgtccgaaaggctgaagaagcgaatcaacccgacacgttgaaagccgctttggctgaattcaactcaaccttcaacctcctgttcgccggctcaagctccgggaacggcctacaacaagctcaccgacaacggcgctgccaaccctgccggcctcatctccgcctccatcgcccatgcattcgccctcttcgtcgccgtctccgtcggcgccaacatctccggcggccacgtcaaccccgccg

SEQ ID NO: 1763 - DNA, 352 bp, Glycine max
gaggcgcggcgggatcagcacaagattgcaaaatgaagttcaacattgcaaatcccaccactgggtgccagaagaagctggaaatcgatgacgacctgaagcttcgagcattttgggacaagaggatctcccaggaggttcttggtgatgctctgggtgaggagtttaaaggatatgttttcaaaatcaccggtgggtgtgacaaacaaggattccctatgaagcagggagtgctgacccctggtcgtgttcgacttttgctccatagaggaactccttgtttccgtggatatggaaggcgcaatggagagcgtagaaggaagtctgttcgtggttgcattgtcagtccaga

SEQ ID NO: 1764 - DNA, 255 bp, Glycine max
gttattgacctccggaagcaacagaagaaggagcctgagaggcctctttatcaagtactccaatacaaggaagaaaagattgctcctggaactttgcttggaaccattcaaacttatgtggttggcactagcacacaggactcgtcatcgtgctaaaaaggttgatctgcttagaggtctgaacacagatatagtaaatgtcacattacaccctgaaaagttggaagccatggaaaatgttttgccctcgaagta

SEQ ID NO: 1765 - DNA, 320 bp, Glycine max
gggatgaagggggaaaatagttcagtttgttaatcaccaacgttaaacgttaacgctaacgctgtcttataaaatgttagcttaataataatttgaaacctcttactttgagagacagtggcaactgtggtactctgaaattgatcctctcagtctcaggaacacgggtgcgttagtcaaaagtgaaaaagagatggcagaactgagtttgggaattctaattgatattgttgatgacgaatggatgagagacactcttcctgatgatgatcttccactgcccccaacactggttgttacgacagatgatactgaggact

SEQ ID NO: 1766 - DNA, 377 bp, Glycine max
gatccatttctcgcaacaatgcttaacctctctcattccccatttcctcacctccttcaaccgctgctaaattctagggttccgaaatggacgctggcggaaagatcaagaagggcgccggaggtagaaagggcggcggcccaaagaagaagccggtttcaaggtccgtcaaagccggtctccaattccccgtcggaagaattggccgttatttgaagaaaggaaggtacgctcagcgtgtcggtaccggtgctcccgtatacttggctgcagttctcgaatacctagctgccgaggtgcttgagttggctaagaatgccgcacgtgacaacaagaagaacaggattattccaagacacgtgcttttggcagtgagg

SEQ ID NO: 1767 - DNA, 309 bp, Glycine max
gaactgttgaatcgtcttgattaccattttgtagcatgttctgtacaactagaatgtgtttgattataagacattattatttattttatctgctgcaagtatctaattaagcaatagtatcattacagtggatgtggaatttgcaggtatataaactgctaattagtcaagttaacttgtctcaaatatcttaaagtgctaatttccttgtgtctgtcctttttatagtttgactattattagtttgttgaattggagaaattgatacaagggcaccaaatttggtgattacagtatttgtttgatgtg

SEQ ID NO: 1768 - DNA, 344 bp, Glycine max
ggtggttcttgtttgcgagatagaagcgtaagcagcggctaccctaacctcgtcttcctctctactaatttcagctatggccgacgaagctgtggttgttccagatcccacccagatcgatgtcaagctctttaaccgctggagcttcgaggatattgaggttactgacatttcactggttgattacattggagttgcggcatccaagcacgccacatatgttcctcacaccgccggaaggcactccgtgaagcggttcaggaaggcgcagtgccccattgttgagaggctcaccaactctctcatgatgcacggtagaaacaatggcaagaaactcttggctg

SEQ ID NO: 1769 - DNA, 374 bp, Glycine max
gatcgaagaacagcactctggttgccgtgccaccatcttctccaaagttatcatattcgaagagaaaaaaggagtgactgtccaggttgggcaattagggacggaaaaggagaaacacgaaaatgtttttccacatagtactggagcgaaatatgcagcttcatccacgctactttggtcgtaaccttcgcgataatctcgtttccaagcttatgaaagacgtggaaggcacttgcagtggccgacatggatttgtggtggcagttacagggatagagaacatagggaaagggctaattcgtgatggaacagggtttgtgacatttccagttaagtaccaatgtgttgtcttcagaccgtttaagggagagatc

SEQ ID NO: 1770 - DNA, 303 bp, Glycine max
gacttcacaactcaaactgcttcattgcataattgcagataagatcaacccttctaccttcagattcgcgggaagatggcatcacttcatgctaatgtgacatcagttgtttacaacagtggcaaccgtgtttctcaatcgaaatttgcaagctcttccttcttgtctgggttcgatgttgttggtcgtgcttcaagtgcttggaagaaggaacttgtcccatcttccatttccttggtgcctaaagccaccctaacatttgattccccaactaccaattcaaacattaccaagccaaagaag

SEQ ID NO: 1771 - DNA, 314 bp, Glycine max
gagcctcagcagaagcagaacgaggagaagcagaaggagcaaaagcaatggcgccgaagaagccgagaaccacgacaaggaaccctgatttggttagggggattggcaagtattcgaggtcgcagatgtaccacaagaggggcatctgggccatcaaggccaaaaacggtggcgttttgccccgccacgatcccaagcccaagcccgaggccccggcccagaagccgcccaagttctactccgcggacgatgttaagaagcccctcgtcaacaagcacaagcccaaacccgcgaaactcagggggggccccttt

SEQ ID NO: 1772 - DNA, 353 bp, Glycine max
  modified_base (274)..(274): a, c, g, t, unknown, or other
gatcccaatcagaaaaagttagggtttgtaactttgtcttttgcttgcgaatctgaatcgaatgataatcaatcaatcatcatgtcgtcggcgaagaagatcacactgaagagttcggacggcgaggctttcgaggtggacgaggcggtggcgctggagtctcagacgataaagcacatgatcgaggacgactgcgccgacagcggcatccctctgccgaacgtgacgagcaagatcctggcgaaggtgatcgagtactgcaagaagcacgtcnagggcgcgaatccccgaagacagaccctcccgaggacgattctcaaaaaaaggggccccccccctgtgggggggggggg

SEQ ID NO: 1773 - DNA, 285 bp, Glycine max
ggcctccattcgggactgtaactagccgcagcacgaggagcagcctcaggaggagaaggatgtctcacaggaagttcgagcacccaaggcacggttcactgggatttcttcccaggaagcgtgctgctcgtcacaggggaaaagtgaaggcattccccaaggatgacccatccaaggcacccaagctcactgcattcttgggttacaaggccggtatgactcacattgttagagaggtcgagaagccaggatcaaagcttcacaagaaggaaacttgtgagcctg

SEQ ID NO: 1774 - DNA, 81 bp, Glycine max
gccggtttcccgaacgatttgatggtttggaatgcatttcccaagcaacgagtcttcggttcgaaaccagcagagagagag

SEQ ID NO: 1775 - DNA, 295 bp, Glycine max
ggctcttggctgatatttcctgataagtggacagacgcttaaacagagaaactaacacagatttgcatgcatggggaaaataacgcacattgtagtaattcccagtgcagggtacagccacttcgttcccgttatccacttctcaaagagacttgttgagcttcacccagaaattcacgtcacatgcatcattcccattctggggtctctcccaagtgctgcaaaacccattctccaaacccttccacaaaacatcaacacggttttccttccaccggtgaaccctaatgaccta

SEQ ID NO: 1776 - DNA, 303 bp, Glycine max
tattttagggaggaatttatttcattgctacaaatatggattatttaaaagaataagacatgtatttggatatttcccttcaacttaacaaaaattgaatttttttccatacacgcacgaatagttgaagggaactctccgaagaaaaaatggattatgggagtaacaaaaaaacctgacttgaatgatcctgtattaagagctaaattggctaagggaatgggtcataattattatggagaacctacatggcccaacgatcttttatatatttttccagtagtaattctaggtactattgcc

SEQ ID NO: 1777 - DNA, 374 bp, Glycine max
aagcataaaaagaaaagaaataacacaactatcctaaaaaaatcagattgcaactaactgaaagggagataagaaatcctgggtttcctcccaataagcgtatttttaacgtcattagcttgacgagtcaaatgccttcaaggtggcatgaaggtcacaaagaacacatattccttgtatttttgcctcctagctagagactccatgaaagtcatgtattctggaagcaccttccatatcattgcaagagaagtgctagtgatcaaggaaagaataacacttaaggctttctcatgttctccatgtccttcttccttgacaatcagttgatgaggatgagtattgacttggagaatactttcttgttgaatttc

SEQ ID NO: 1778 - DNA, 377 bp, Glycine max
gatagatagaatagataaggtgtgggaaataagaacagcaacttctctttactgtgtgtgaaaaaaatggtcacactcacacttttatcatctctgtctctgcgctcttcatcttcttcttcttcttcttcttttacactctcttcttctttttcttctccctcctcctttgactttttttgtagcttccacttgcgctctgccacttcatcattgaaggtacaaacaattcataagaacaagcgcgtggttaatgtagtggaagatgatacccagcatgaactcaacgctgctgatgactctgatcaaccatcaaacttcgaagcaccaaccgttgtggttaccgtatcatcatcagatactctcaacatgttctt

SEQ ID NO: 1779 - DNA, 382 bp, Glycine max
cgccaaatgtggacttttctttgttttaggtgttgaagcaatgtccatttttcatggcactgacattccttctcctgttcaacatgtatcattgacatggaagttacattcgttatctgtcaatttccttgttggtatggaaatacttgaacaagattgtgacaaggatatttttgaagctttgcaggatctttatggtgagcttcttgataatgcaaggttaaaccaaagtaaagaagttatttcagatgataaaaagcatcttgagtttctgatgttccaagctgagattcatgaaagttactcaacttttcttgaagaacttgtggagcagttttctgctgtttcttatggtgatgttatttttaggcggcaagtttca

SEQ ID NO: 1780 - DNA, 264 bp, Glycine max
gggattggttcttcttccacttccaacgccatgcctctttttggaattttccagataccctcatttatggacataatcactgacctcgccatgttcattactccgctatggattgcggttatcgtcggcgtcgtcgtgggctgggcgtggaagcccaaatgggcctttcaccccaaagacgctcttctcaagtttcgctctcctcgccctcccaatccccaaaacgacaccgcttttacctactccgccaccagttcctccgcg

SEQ ID NO: 1781 - DNA, 360 bp, Glycine max
ggcagttcaattccaatatattccattctctctgtgtatttccctacctctcccttcaagatgcagatcttcgtcaagaccctcaccggcaagaccatcacccttgaggtggaaagctctgacaccatcgacaacgtcaaggccaagatccaggacaaggaaggaatccccccggaccagcaacgtctcattttcgccggaaagcaacttgaggacggccgtacccttgctgactacaacattcagaaggagagtactcttcacctcgtcctccgtctccgtggtggcatgcagatcttcgttaagacactcaccggcaagaacataaccctagaggttgaaagctcccgacacatcgat

SEQ ID NO: 1782 - DNA, 305 bp, Glycine max
gggaatcgttgctatttctcacagttgcactggagtagcagcaagagcttgtggtttagtgggactagaacccactagggttgcagaaatcctcaaagatcggcctttgtggtttcaggattgccgagctgttgatgttctcaatgtgctgcccacagcaaatggtggaaccattgagctgctttatatgcagctatatgcaccaaccacattggctcctgctcgagacttctggttgttgcgctacacttctgttttagaagatggcagcttagtgatctgtgagaggtcacttaaaaatactc

SEQ ID NO: 1783 - DNA, 376 bp, Glycine max
gggggtggcccccaattcgttccttcaggaagaaccttgcaagcagcagcagtgcttctaagccacctcctgagtctcaggctgagcagcacaacaaggttgctggtaaaaaacctgttgacaactatgctaataataaaggtttgtttgtcaagatcaacatggatggtgttcctatagggagaaaagtggacctcaatgcctatgacagctatgaaaatctctcttccgccgtggacgagctattcagaggtcttcttgctgctcaaagagattcctctgctggtggagttcacaacaagcatgaggaagagaaagcaattacggcgttattggatggaagtggagagtatactcttgtttatgaggataatga

SEQ ID NO: 1784 - DNA, 290 bp, Glycine max
ggcagttcaattccaatatattccattctctctgtgtatttccctacctctcccttcaagatgcagatcttcgtcaagaccctcaccggcaagaccatcacccttgaggtggaaagctctgacaccatcgacaacgtcaaggccaagatccaggacaaggaaggaatccccccggaccagcaacgtctcattttcgcccggaaagcaacttgaggacggccgtacccttgctgactacaacattcagaaggagagtactcttcacctcgtcctccgtctccgtggtggcc

SEQ ID NO: 1785 - DNA, 305 bp, Glycine max
gagggttacacgccgtcgtcgctgtttttgtgtgtcgcttcttcgtaagtgcagctgcaatggtgaagggacgccaatgagaacgtgtcagactctacgtgaggggtacaatccttggatacaaaaggtccaagtcaaaccagtatccaaatacatccctgatccaaattgagggtgtgaatgccaaagaagaagtagcatggtatgctggcaagaaaatggcctatatctacaaggctaaggtgaagaagaatggaagccattaccgctgcatatggggcaaggttacaaggcctcatggtaac

SEQ ID NO: 1786 - DNA, 303 bp, Glycine max
ggttgttgttttcagtgtactggaagaatcactcccttatccatttccacaccacaccatggcctcaagcaacgctctctcttcagcctccattctacgctctcccaaccgccagtctctgacccgaggagcgaaccatactggaagagtaaattaccggaaaccgaataaccgtttctccgtgaaagcctccgccaaagagattgcctttgaccagcattcccgctctgctatgcaggccggcattgacaagctcgccgacgctgttgggctcactcttgggcccagagggaggaatgttgt

SEQ ID NO: 1787 - DNA, 288 bp, Glycine max
tatctggcatatagtattagtaaaggtcttgttaatcagtgtccttaggatattgattaaaaaattaaaaggagaaagtatttattatgaaaatcataagagagcataaaaaaatcatgagcagtgtaattttacacatcccaataatttttttctccttttaattccttaaccaatgtcctaagagagttagcatttgcctatattagtaatagtacctaccttgaaatggggaatggttagtttgaggaaatcaggattgggctggaaatctgcatctaatattgc

SEQ ID NO: 1788 - DNA, 302 bp, Glycine max; identical to SEQ ID NO: 1014

SEQ ID NO: 1789 - DNA, 335 bp, Glycine max
gacaatcgaacgggaaaaggcgtcttcataaacgccgcccaaaacttctcatacccttttattcattccattcgtttctagggttttcttttctttgccgagaaaatgagagagtgcatttcgatccacattggccaggccggtatccaggttggaaacgcctgctgggaactctattgccttgaacacggcattcagcccgatggacagatgccgagtgacaagaccgttggcggaggagacgacgccttcaacacatttttcagcgagaccggcgccggaaagcacgtgccccgcgctgtcttcgtggatcttgaacccaccgtgatcgacga

SEQ ID NO: 1790 - DNA, 360 bp, Glycine max
ggaggtgacttgattttccctcttctctttttctctctcgtgagtctcgtccctgaagcgaaattctagaatggcggaagaagctcctgcatctgaaacctccgtcacaatgcctcaaccggcggaagtcatcaccgtcgacggaaccctaacctcttccgagaatgacaagagcggaatctccgtcgatgccgccgcgcacggcggtgaaaagacggtgtccaacgctgaaccttccggtagcgatcctcagaagtctctggagttggcgaacgagctgatggaaaaaggaaacaaggcattaaggagaacgattttggagaagcagctgatagcttcagccgtgctctcgaaatcaga

SEQ ID NO: 1791 - DNA, 375 bp, Glycine max
gggagtttcaacattcaacaatggtacctcaagctttgtcagtgcctgcgagttccagcttggctatcgcttctcgcaccagaagtccctcccacctcgtattttctcaaagaaacccgtgctcgatagcttcttccttgccaaacccatatggccattcatcggaagttgggttatcaagtaaaagccgtggctttcctttaaaacatgatgagaaaaatatccatggtgctagtacaagttatggtgcaattgaagccaaggggaatctgccgataactccagcagtgatgactcctggaggacctcttgatctcacatccggttttgttcaggaatcgtataatcttcataggtcagccagtcaattcacaa

SEQ ID NO: 1792 - DNA, 307 bp, Glycine max
ggtttttgtttcccatagcatagaagaagcagaaagagaagcattagcaaaagcaagaagaactagtctaagcagaaatggcctcttcagtgatggcatctgtggccctcaaacctgcccctttcactgttgagaagtcctcagttagaggccttccctccctctcaaggaactcctcttcattcagagttgtggccagtggtggcaagaagatcaagactgacaagccttatggaattaatggtggcatggctttgagggaaggagttgatgcatctggcaggaaaggaaagggaaagggcgttta

SEQ ID NO: 1793 - DNA, 236 bp, Glycine max
  modified_base (230)..(230): a, c, g, t, unknown, or other
aatagattcaatctcagcctcgaacaaataaaggatatctctgatcgctctcaagaatttgtggataagctttttgaagaatcaaagaagcttgaagactatgcatcacaggctgaccaaatgcaattgaagagcattgatgagtttaagaaagcatacgaggaacaatcaaaatctgatacagagaaacttattgccaatatgactagtttagtttcagatcacattcnggcgaa

SEQ ID NO: 1794 - DNA, 320 bp, Glycine max
tacgccaaagccctctcttatttccagacgcggcggcttcttcttccgtttttgtctatcggcgtgaacaatggcgacttacgctgcgatgaagcccacaaagcccggcctggaggagccccaggagcagatccacaagataaggatcaccctttcctccaagcacgtcaaaaacctcgagaaggtttgtgcggacttggttcgcggtgcaaaggacaagcgcctcagggttaagggacctgtcaggatgcccactaaggttcttctcatcactaccaggaagtccccttgtggtgaaggtaccaacacatgggacagat

SEQ ID NO: 1795 - DNA, 294 bp, Glycine max
ggagtgagtgagggcattgttgtttaggtacagaaaaatggcatcatctcagtcgaagaagagagttgacgctgtcgattctcgcgctgcttccgttctccttcgcgccaaagatggaagtgcttttgctcgatgcgacgactgcaagaagaatgtgccggttgcactcatcgacatgcacagttgcagccttgaagctaaaattaaaatgaacctagatgctcaagttgtggaacaggctgctgaagctaagaagccagagaggaagaagcccaaatccaaagagcctatggc

SEQ ID NO: 1796 - DNA, 304 bp, Glycine max
ggggttctcctacagattcttcagcaactgcgattttggatcggaacctcttctgcggcgtagcaatgggacactccaacgtttggaattctcacccaaaaaactacggtcctggttctcgcacttgccgagtgtgtgggaatccacatggattgatcaggaagtatggccttatgtgctgcaggcagtgcttccgtagcaatgccaaggaaattggcttcatcaagtatcgctaaaagagctgttgtcacctacggaccaatattatgttctggcactaggatgttttgaagatgttatgttt

SEQ ID NO: 1797 - DNA, 293 bp, Glycine max
ggtagaatagagagctcctccaattagggtttttgtgatctgcagctacgatgggtaagggaacggggagtttcggtaagaggaggaacaagacccacaccctctgtgtgaggtgtggccgccgcagcttccacctccagaagagtcgttgctctgcgtgcgcttaccccgctgcgcgcaccaggaaatataactggagcgtgaaggccattaggagaaagaccaccggaactggaaggatgaggtacttgcgtaacgtgcctcgcagattcaagagcggcttcagagagggt

SEQ ID NO: 1798 - DNA, 288 bp, Glycine max
gactcatacaatagagaccagcttttgcttctttgtgaacatggagatgaggaaatcatgtggcttcttcttcttgctcctcctccttgtctttgcttcccaggtggtggtgcagacggagggaagagtgtgtgagtcacaaagccacgggttccatggtttgtgtaatagagaccacaactgtgctttggtctgcaggaacgaaggtttctccggtggcaggtgcaaaggcttccgccgccgctgcttttgcaccaggatttgttgagatctcatcaaacactactc

SEQ ID NO: 1799 - DNA, 300 bp, Glycine max
  modified_base (285)..(285): a, c, g, t, unknown, or other
ggttccatttctcaacaacttctgctacttcctactccaaccgcacttctgctccgcaattatcatgggcaaggtcaagatcggaatcaacggatttggaagaattggccgtttggttgccagagtcgctctgcaaagagacgatgtggagctcgttgccgttaacgaccctttcattaccaccgattacatgacatacatgtttaaatacgacagtgttcacggacactggaagcatcacgatgtcaccgttaaggacgagaagacccttctcttcggtgacangccagtcactgtttt

SEQ ID NO: 1800 - DNA, 372 bp, Glycine max
ggtcttctccgcccccactcacccaccctccatacacactctctctgagtcggtcgagttgaatcggtgtgagtcagtgaccgagtcgaaccatgtcggacgaagaacaccatttcgaatccaaggccgatgctggagcctccaagacctatcctcaacaagccggaaccatccgcaaaaacggttacatcgtcatcaagggtcgtccctgcaaggttgttgaagtttctacttccaagactggtaagcacggtcatgccaagtgtcactttgttgggattgatattttcactgccaagaagcttgaagatattgtgccctcttctcacaactgtgatgttccccatgtgaatcgtactgattaccagttga

SEQ ID NO: 1801 - DNA, 349 bp, Glycine max
ccaggcgtcaggagaagaagacagaagggggaaaaaccgtgtttcactcggatcgcgcattcacaaataaggttgaagagggccctgccggaagaagataaataccgtctttcattttccggcgatctcttttttcttccatcaccgttttccggctatccctaatccttaacagaaatgacgacatcaaggcgccttgcggacaggaaggtggagaagtttgagaaaaacatcaccaaaagaggatttgtgccagacacaaccactaaaaaggggaaagactaccctgttggcccagtgctgctcggtttcttcgtctttgttgtcattggatcatctctcttccaga

SEQ ID NO: 1802 - DNA, 290 bp, Glycine max
gacagctgcaataacaatggctgcctcactagatgctgcagctaccttcatgcgacccaccagcgttcgaatatcctctcgcatcctcatatctacacaatgcatttctaaagcatttggcatgtcacctgctgcaactaacctcacttgctcccttcagcctgatttccaagaacttgctcaagtgtgtgtccacgctaccaaaattgcaagattcgcccttgccacctctgctctcgttgtttctggatcaagtgcacaaagtgttccaatcaggccaaccctcaacc

SEQ ID NO: 1803 - DNA, 90 bp, Glycine max
gccattagataaaattcctcaatatgaaagagacattctaacgactattaaaccagaattactacaatcactaaaaggtggactaactag

SEQ ID NO: 1804 - DNA, 314 bp, Glycine max
  modified_base (261)..(261): a, c, g, t, unknown, or other
gattgaattgaaaactctccccacaactcaaattgaaaaggaagacaaaaaaaaaaccccattgctttgttttccattattggtgccaaagtttcaaactttctctgcttcctctgctcctccagggtaagaactgctttccctttcgagtttacagtgatttgattcttgccccttttgtggtttgatccaaatcaaaggacgtttctctactggtgctttgattctaagttttggtggggggaaatgatgggaaattanggcctgggtctggaatttttcatcatttctatcgaaaaattgtaccttgttgt

SEQ ID NO: 1805 - DNA, 134 bp, Glycine max
gattgtgatgtgagagacccatgccattataatcagcaacaacgtttctgataatctgatctatggttttagtaatttatgtcatttttgtcttcgtattgcaacttgcaagttagtttaacttaattttgagg

SEQ ID NO: 1806 - DNA, 246 bp, Glycine max
ggtctcatctcacgccacccaaagttgtctttcgacctttctctctcaaaacctttgcttttgcgttggctatatatatataaaactaacttccccaaaacccaatcatatatcatttcatttcttttttctcgtccatccgtaaccatgtctcagactgttgtcctcaaagttggtatgtcatgtgaaggatgtgttggagcagtgaagagagttttaggaaaattggatggtgtggaatcatat

SEQ ID NO: 1807 - DNA, 259 bp, Glycine max
gacttatctaaaagtagatggtccagattactaccacataaatggacaaatagaataactgaatatcgtatagctcaaaataaagatttaaccaaatgcaattcatatgaaaaaagccaattaattctttacaaagaacaacaagtaaacgcattataccaaataattagacaacaatatatatacgatcttttatcctataattttatcaattatgcagataagaaagactcatatatttatggatatagatccctat

SEQ ID NO: 1808 - DNA, 325 bp, Glycine max
gagcaacatggtgaagctggtggagagatttacttgccagaagcttacgttagaaccaagaggactacttaatggagcaaatcagttggaagaacttgtagctagcttcccaactggcttatctgagtgtggagaagcattatcaagccttaggagtaggagaacgagtactgtttgtgatgaatgtctatggtttaagaaatctgtctttagtcaacttgtgtgttttgttattcagttctcagcaataaactgctctggcaatctagtttcatgtgcaaaaaaaaaaaaaaaaaaaaaaaaaaaaaagcgggggccccccggg

SEQ ID NO: 1809 - DNA, 311 bp, Glycine max
ggtggtggaggttatccggatagtggacactatggtttatcagcttcatctgggtaccagaatcagcaccaccctccttctggggcttcacctgtgcctagggttccgcccatgtatcccaacgtgcccccttactactgaagaggtgtatcatcgcttattgggcgcagatgctttgtgtgcttctggtgattgcgtgaattgcagactatgtgctctggtgtagtgtatttgttagactgtacttttacagcctcttgacttcatctgctcccttttaagccttgattcatatgaatgttactagtttt

SEQ ID NO: 1810 - DNA, 304 bp, Glycine max
ggcccattcaccgaggcaatgcagatagagttactgagtttccgagattaccagttgactcattgattcaacatgggaagatgctaagagagttaacgacgtatcacctcatgaatgcgtaaacgtctaagcttaagagttcaagcgttatggaactacggaacttcatgaatggagtgatattgtcaaaatttcaggatttagcgacttagcatcatgagatgcagaatggtacgacagtatggctgcctcaatggctcgaaatatcaagttgacatgtggtcgtggcgttcgagatgatcaa

SEQ ID NO: 1811 - DNA, 301 bp, Glycine max
gatgccgaaaagtagtaccaagatggcttcagttgtgtatctcctctttggcttccatctcattgttatcatgtcaagttccttacccgcaactagtgaagtgtttgcaaaacagtatccatccacagaacccgtggaagaaaaactcacccaactccacttctatttccataacaacataacgggggaacacccaactgctatgaaaactgttttgcctcctaaggggtccattcatggttttggggctacttacatgatggatgaccctctaactgaaggaccaagtccaaaccctttt

SEQ ID NO: 1812 - DNA, 345 bp, Glycine max
ggtctacagacattatgtacatgtcctttttaggcaccttagccatgagggagatattttggaagacccagctaatgagcctacaaaggacatgtacataatgtctgtagaccctgatgactcacctgatcaaccagaacatgtgcaaattgggatagagtcagggcttcctgtttcagtgaatgggacgaggctttcatcaacatctttacttgctgagctcagtgagattggtggactgcatggaattggcagggtcgacatgggtcaaaatcggcttgtaggtatgaatagccgtggagtgtaccacactccaggaggaaccattctggggtttttttttgg

SEQ ID NO: 1813 - DNA, 378 bp, Glycine max
gacacacagagcggttctcatattttggagaatccgaaaaacacgttaaagaaagtcccattcccactaccgaagcaaattaagaagatgaagcagcagagagtggagtttatgggcatgggcatgggcatgggcatgggcctgggccttttggtggtgatgatggcatgtgggtcggcgagtggtgcggatgatttggcaaccaagtgttcagcggtgattcagaaggtaataccgtgtttggatttcgcgaaggggaaggaagaaacgccgaaaaagcaatgttgcgacgcagcaacgtccataaaggagagcaacccagagtgcctctgctacatcattgaagagacccacaagggtagcccacaggttaaaagc

SEQ ID NO: 1814 - DNA, 309 bp, Glycine max
gaaacacaccacaccttcaaaccctaaccctagaagaagaaaaaaaccacaaccaccaccatctagggtttttctttttctcatggctagtttgtcaactaggattttcttcatcatgtcccttgtgtgcctggctctcggtccaatggcacaaggggaaatgacatgtggccaggttgtgagcaacctgaccccatgcatctcccatgtggtgtatggtggaaccaatgttcctgaacagtgtcgcactgggataagagatctctatggcatggctcagaccaaacctataccgccaagctgtttgca

SEQ ID NO: 1815 - DNA, 384 bp, Glycine max
cccacgcgtccgagaattggagagcgagacctcacaactcgtcctgcgacatcggataattgcacaatatgatcaactcatctaccttcagatcggatgataaaacctttacaatcagatagcggcggatgtatgttggtgttagaatcatgggtgtgaaactgcattaaatacatccttgccccagaactagatgacgtatatgatagacaagtagagagaacacgtgagttttctacgagagtgatctcagattcgcgggaagatggcatcacttcatgctaatgtgacatcagttgtttacaacagtggcaagcgtgtttctcaatcgaaatttgcaggctcttccttcgtgtcggggttccatgttgttggtcgtgcttc

SEQ ID NO: 1816 - DNA, 362 bp, Glycine max
ggatttaaccatgtatattgcactttgcagcatagagtttgactgcgatgatgatttgtttgctactgctggagtttcccggcgcatcaaagtttttgacttttctgctgttgtgaatgaacctacagatgctcactgtcctgttgtggagatgtctacacgttcaaaacttaattgcttgagttggaataaatatgctaagaatcaaatagctagtagtgattatgaaggaattgtgactgtttgggatgtaaccactcgaaagagtttaatggaatatgaagagcatgaaaagcgtgcatggagtgttgatttttcaagaacagatccctctatgcttgtatctggtagcgatgactgta

SEQ ID NO: 1817 - DNA, 163 bp, Glycine max
gggagagcgtgatggtggtgctgtcaaaaggggggaaagttatcatcaaagacaaaggtatggtggaagtatatctttcatgttgtataattaagaatgtttgtagaaaatgttgtttttagaagaggataagaatattttggaaggttcctttcctttttgc

SEQ ID NO: 1818 - DNA, 313 bp, Glycine max
gacaacacagaacaaaaacaaagaaaaaaaaaaacccttagccaacacaaccatcatggccacctctgctattcagcaatcagcattcactggtcaaactgctctgaagcagctcaatgagttcgtccgcaagaccggtggcgccggcaaaggtcgcactaacatgcgccgcaccgtcaagagtgctcctcagagcatttggtatggccctgaccgtcccaagtacttgggtccattctcggagcagattccatcatacctgaccggagaattccctggtgactacggatgggacactgctggattatcagcc

SEQ ID NO: 1819 - DNA, 307 bp, Glycine max
ggtgctctgctcgtgcctctagggttatcatttctccatttccattttctctctcacttttcaagaatcgtaagctatgggaaagtcttacccaactgtgagtgctgattaccagaaggccgttgagaacgcgaagaagaagctcagaggcttcatcgctgagaagagatgcgctcctctaatgctccgtttggcatggcactctgctggaacctttgacaagggcacgaagaccggtggacccttcggaaccatcaagcaccctgccgaactggctcacagcgctaacaacggtcttgacatcgct

SEQ ID NO: 1820 - DNA, 297 bp, Glycine max
tcaggcaccggggaaggaggtctaatttacggagtaaagcagtaagtataagggcttagtgctccgattgcgccttaggactaggactgataggtaaatgcccctgactcttccaatgaaggtgggtaggcttttcttttgtttaggattggcaagaggatggctgcctcggtctcaaagctgttagataatgcgctcttatcaatacagggacgcgagaggaattcctcgaaggtagtccctaaataaagggatagggcattatcggtgtggggatatctttgaatatgactctta

SEQ ID NO: 1821 - DNA, 259 bp, Glycine max
gacagcacagcactctttgcaacacaacaaaaaaagacaacacagagagaagcgtcttaataaacgctcttctctgaaaaacctgatttcttctcttcttctcttctctttcgtttcgatcttcgatctctgaaaatgagagagtgcatttcaatccacatcggtcaggccggtattcaggtcggaaacgcctgctgggagctctactgcctcgaacacggcattcagcctgatgggcagatgccaagtgataagactg

SEQ ID NO: 1822 - DNA, 301 bp, Glycine max
ggggaattgtctttcatctggtaagactgatgacgaagttgttatcaccttcagcaccaccatgtccatgtctaagggttccaattccaaatccaaccgtaaaatatcgatatgcatacagtcacagagggcaattgcgtgttcgatgcagtgataatagtgatgaagagaaggagaaggagaagaagaagaagaaggaaaagcggttgtctcagcagtcgtcgtgggaagcccaagacgctgagggaagagactatctctaccgacttgggaaagaggctgataacatgaacatcgccgt

SEQ ID NO: 1823 - DNA, 367 bp, Glycine max
gacttcacaactcaaactgcttcattgcataattgcagataagatcaacccttctaccttcagatcggatgataaaacctttacaatctgatattggaggatgtttgttggtgttagaatcatgggtgtgaaactgcattatatacatccttgccccacaaatacatgacctatatgataaagaagtagaaggaagacttgaattttctacgaaagtgatctcagattcgcgggaagatggcatcacttcatgctaatgtgacatcagttgtttacaacagtggcaaccgtgtttctcaatcgaaatttgcaagctcttccttcttgtctgggttcgatgttgttggtcgtgcttcaagtgcttgga

SEQ ID NO: 1824 - DNA, 376 bp, Glycine max
gagggtgaaggaagacgcgtgcgtggataatatagagaatagtaatgtaatggcagagcaaagtggtgcagagttgattgatcgatgattgatgatggttcgggcgtcggtgaaggtgggttccgccaagttcgtagtgatctgcgtggggcttttaggcttcgctctcgtcgccgactttctatgggcctctacctcttccactcttcccacctccaccaaaccctccgcatttgtggttccctccaaccacaataagaagaaatatgagaatgccactgcttctggaagattccttgccgcggcttaccccgatttggatgcgccgcagctcaggtggcagaagatggctcctgctcccgtcactcgccttgag

SEQ ID NO: 1825 - DNA, 316 bp, Glycine max
ggcgtacacagcctcaacaaccctaacgcgtgcagagcagagagagacgcagccatggggcgaagacccgcgaggtgttataggcaaattaagaacaaaccataccccaagtcacggttttgccgtggtgttcctgatcccaagatcaggatttacgatgttggtatgaagaagaagggtgttgatgagtttcctttctgtgtccatctggttagttgggagaaggaaaacgtttctagtgaggccctggaagctgctcgtattgcttgcaacaagtacatggccaaatttgctggaaaggatgctttccaccctt

SEQ ID NO: 1826 - DNA, 262 bp, Glycine max
attggaacatgaagagtgtggaaagagaacttatgatataaatgactgaatgccgggttttgatggttaactgctattccagatgttgtctatggttaccagtttcataataatgtcctggtcctttgtttgtgttacatttgtttctacttatataccttatgaagctaccttgaatattagtaattgtggaacctgtaatccttaaaggaacatgtttgtttggataagttgaatgtatgttgcaatcactgtaatgttt

SEQ ID NO: 1827 - DNA, 372 bp, Glycine max
  modified_base (326)..(326): a, c, g, t, unknown, or other
ggaaaatctagtttcttacaaggctctactctactgcttcaccttctgctctagaaaattcagtggtgatacatggcttcggctactctctctgtagccaaaccagcccttcaggcaaatgggaaaggcttctctgaattctctggcctccgcagctcatcaggcttccttcccttttctagaaaatcttcagaggatttccattctgtcattgccttccagacctatgcagttggaagcagtggaggatacaagaagggtgtgacagaagcaaaactgaaggttgccataaacggatttggaaggattggaaggaacttcttgangtgctggcacggtcgcaaagactcccctcttgatgtcattgccatc

SEQ ID NO: 1828 - DNA, 317 bp, Glycine max
gacagacagacacacactcggttctgccttcacaaaaaaattatcgagatcccctttttctcctaagaaaagccatggctaagggtcccggtctctactctgacatcggcaagaaagccagggatctgctgttcaaggactaccacagtgaccagaagttcaccatcaccacctactcacccactggagttgctataacagcatcaggaaccaggaaaagtgaactgtttgtggctgatgtcaacacccagttgaagaacaaaaacatcactactgatatcaaagttgatacagattctaaatcccttccccttttt

SEQ ID NO: 1829 - DNA, 277 bp, Glycine max
gagcaacatggtgaagctggtggagagatttacttgccagaagcttacgttagaaccaagaggactacttaatggagcaaatcagttggaagaacttgtagctagcttcccaactggcttatctgagtgtggagaagcattatcaagccttaggagtaggagaacgagtactgtttgtgatgaatgtctatggtttaagaaatctgtctttagtcaacttgtgtgttttgttattcagttctcagcaataaactgctctggcaatctagtttcatgc

SEQ ID NO: 1830 - DNA, 150 bp, Glycine max
ggatgttaggttgtatcgtatcatcattcattcatccatccagctgtctactgtgtgccatttccattgccaccaccgatgactctctcacccatcaactgagtccactaacttcatcaccttcgctgccttcttcaaatttcattaatc

SEQ ID NO: 1831 - DNA, 248 bp, Glycine max
gaaagcaaagcaatcgcataatctagggtttgttcgttggttcgcaacaatggcgatgaggagattctacaacgagatcaaggggaagagggtgagcgaggttccggagcacgtgaagccgatgctgtcgctgaactacatcaagaaggcgattcagagaggcttcgataattaccatgccaagtacattgaaaccagctcccccgatcccatcttccatgtctgctacggcggcatgatcttctcct

SEQ ID NO: 1832 - DNA, 232 bp, Glycine max
gagaatagagagctcctccaattagggtttttgtgatctgcagctacgatgggtaagggaacggggagtttcggtaagaggaggaacaagacccacaccctctgtgtgaggtgtggccgccgcagcttccacctccagaagagtcgttgctctgcgtgcgcttaccccgctgcgcgcaccaggaaatataactggagcgtgaaggccattaggagaaagaccaccggaactg

SEQ ID NO: 1833 - DNA, 307 bp, Glycine max
gggcatataaaacacattttgcttgcagcaatctgtttcactccgcatccgcccgcagctgctgcagacaaaaccctagtgagcagagcgtgaaagcaccggccaccggccatgacattcaagcgcaggaatggaggtcgcaacaaacacggccgtggccacgtcaaattcatccgatgctccaactgtggcaaatgctgccccaagggcaaggccatcaagaggtttcttgtgaggaacattgttgaacaggctgcagtcagagatgtgcaggaagcctgtgtctatgaacagtacacgcttccga

SEQ ID NO: 1834 - DNA, 302 bp, Glycine max
ggggaagaagaacttagctacaagctaaggaaggatcaaagagaatggctcaagcaatggcatcaatgactagcttacgtggttcctctcaggctgtgttggaaggtagccttggctccacacgcttgaatgtggggagtggaagcagggtggcctcagtcacacgtgcagggttcacagttagagcacagcaacaacaagtgaatggtggtgaggtacaaagtagccgtagggcagtgctttcacttgttgctgctggtttgaccactggctcttttgttcaagctgtgcttgctgatgcc

SEQ ID NO: 1835 - DNA, 368 bp, Glycine max
  modified_base (303)..(303): a, c, g, t, unknown, or other
  modified_base (338)..(338): a, c, g, t, unknown, or other
ggcgcctctgcttgcaagagtgaaaaccttctcttacccttctctcaagtttcaagagatttcatcatggctccaaagaaggacaaggctccaccaccttcctccaagcccgccaaatctggcggtggcaagcagaagaagaagaagtggagcaagggaaagcaaaaggagaaggtgaacaatatggtgctgtttgatcagggcacctatgacaagctcctttctgaagctcccaaatacaagctcatcactccttccattctctctgatcgtttgaggattaatggatcacttgcaaggaanggctatagagaattgatggcaagaggttctatcangatggtgtctgcccatgcaagtcagcaaat

SEQ ID NO: 1836 - DNA, 360 bp, Glycine max
aattcgagcggacgattatagaatggttaatgttagcctcttgaggctttcattcgttatcgctcctatgggagtgaggtccaagatgtgacctatgccgtccttcataatagtcacgaagttcttcacttaagctcttgcaagagttataactactattggaggcatgtttttatcttttcatttctttcattatttttcttctttcttcctctcttattttctctctttcaacttgacttagttcttcgactttttttttacctttttcttttctctcttgtttttctttccaaaacttaagggatctcaactcatctaatatcttatacaacgggtccttaggagtagaaccctcac

SEQ ID NO: 1837 - DNA, 367 bp, Glycine max
ggctgtgcccataatttctgaggctgaggaaagtgagttaggatagccccagaaatagaaactcgaagttactcacttactcaactaccaccaccaccaccatgttctgatattcccccaaccacacacagtcactcttaaaaaaataattaaactttatgcaaatgcaaagcatgtcaaccaccatggcttcgttttctcctccgacccatttctcagccgcaccttcttcctcgaaactccgtcttgtctacaagaacaacaatttcttctctctcaggtcgaagagtcttgctttctctcccttgaaggctgctgctgctgagaacggcgttgggaccgccgtggagccgccgccggagcaggc

SEQ ID NO: 1838 - DNA, 311 bp, Glycine max
gagttcggtggagggagggagccgtagcagcggaagctctagcttgggtagcgaatcacaatggcgagaggattaaagaagcatctgaagaggcttaatgccccaaagcattggatgcttgacaaactgggtggtgcatttgctcctaagccctcatctggaccacacaaatcgagggaatgcctgccactcatactcattttgcgaaaccggctgaagtatgctctaacataccgtgaagtcattgctattctgatgcagcgacatgtccttgttgatggcaaagtcaggactgacaaaacataccctgc

SEQ ID NO: 1839 - DNA, 188 bp, Glycine max
ggataaaaaaaaaaaagaaaaaaaaaagattgttgaaaacggcatagtattgtatggcttgcttgggctaaaattagaaccctaagcccctcagcgagacagccgccgccgccttcttcaataaccgtcgcaatcctctttcggcaaaaaaagaaaacccttcttctcactcatattcttacgcacac

SEQ ID NO: 1840 - DNA, 282 bp, Glycine max
gactcaccacttcaaaacactcataacacaaagcacaaagcaaagctcatccttgagttaaaaaatggcagcagcttcttccatggctctctcatccccatccttggctggcaaggccgtgaagctgggcccatcagccccagaagtgggaagggtgagcatgaggaagaccgtcaccaagcaggtctcctcaggaagcccatggtacggcccagaccgagtcaagtacttgggcccattctctggcgagcccccgtcctacctaaccggtgagttcccagg

SEQ ID NO: 1841 - DNA, 302 bp, Glycine max
gacacatccagtcatgacggggtagtcgctgtaattccgcatagcactctttatctctttctccgccgcaaactagtcgttctacaggatcgccactgtagtacccttgaattaaacatcagagcacttcaatgatgtgcttggatgccaattgacggcacctcaagcaacaacgacgtcactgccaacgccgaggggtccgtgatgagcctcatcatgaagcacatccgcgttgtccgaactaggctgatacgcatccacgccatggcagatagcgtttcccagggcttgcctctgatcaa

SEQ ID NO: 1842 - DNA, 174 bp, Glycine max
gacacactatccagaagaaaagaaacgagtggttctgctgcatctccaaccctgggaacagcatctccacactcatttccaaattatcaagcactaatgaaattaacacaaccaaaaaaaatttagaaacagaagaaacatatcaataacttaagtcacatacattctgacacc

SEQ ID NO: 1843 - DNA, 57 bp, Glycine max; identical to SEQ ID NO: 410

SEQ ID NO: 1844 - DNA, 379 bp, Glycine max
gactacaaatcagttttttacttgaattttcttcatccttctctgttctcctagaacttgattacttgaacattccctatgacagatgacgtggttcttctggatttctggccaagtccatttgggatgagggtcaggattgcacttgctgaaaagggtatcgaatatgagtacaaagaagaggacttgaggaacaagagtcctcttctcttacaaatgaatccggttcataagaagattccggttcccatccacaatggcaaacccatttccgaatccctcattgctgttcagtacattgacgaggtttggcatgacagaaatcccttgttgccttcagacccttaccagagagctcacgctaaattctgggctgatt

SEQ ID NO: 1845 - DNA, 373 bp, Glycine max
  modified_base (319)..(319): a, c, g, t, unknown, or other
ttaatgttagcctcttgaggctttctttccttttctctcctatgggagtgaggtccaagatgtgacctatgccttccttcataatagtcacgaagttcttcacttaggctcttgcaagagttataactactattggaggcatgtttttatcttttcatttctttcattatttttcttctttcttcctctcttattttctctctttcatcttgacttatttcttccactttttttttacctttttcttttctctcttgtttttctttccacaacttaagggatctcaactcatctaatatcttatacaaggggtccttangagtagaaccctcaccattaacactagatgaagaatgaagactcatgttggttc

SEQ ID NO: 1846 - DNA, 341 bp, Glycine max
gatgccgaaaagtagtaccaagatggcttcagttgtgtatctcctctttggcttccatctcattgttatcatgtcaagttccttacccgcaactagtgaagtgtttgcaaaacagtatccatccacagaacccgtggaagaaaaactcacccaactccacttctatttccataacaacataacgggggaacacccaactgctatgaaaactgttttgcctcctaaggggtccattcatggttttggggctacttacatgatggatgaccctctaactgaaggaccaagtccaacttcaaagcttgtgggaagaaatttcctttgcccaaaagtgggggggg

SEQ ID NO: 1847 - DNA, 374 bp, Glycine max
ggcttcgcctcattttctggctaaccaaccctgacactccttcttctccgcttcctcttcgatcatcgcttcagaatgccgccgaagttcgacccctcccagatcgtcgacgtcttcgtacgcgtcaccggcggtgaggtcggcgcggcgagttccctcgccccgaagatcggtcccctcggtctctcccccaagaagatcggagaagatatcgccaaggaaaccgccaaggactggaagggcctccgcgtcaccgtcaagctcagcgtgcagaaccgtcaggccaatgtcacggtggtcccatccgccgccgcgctcgtcatcaaggccctcaaggagcccgagcgtgaccgcaagaaaacgaagaacatcaa

SEQ ID NO: 1848 - DNA, 402 bp, Glycine max
cccgctcctacaacagcaccgaaagggctacacaacggtaccgctgccatactactacagaagggtacggccgcgaggatacaacctaacgttaccgttgctacaacatcacagctcggtatggctgccatataactacatatcggtaccgctgctataagacgatcgaatggtacagctgccatgaacattacataactgttatcgctgcgaaactactcacacttgcgactccagacctcccacctaaccacgctttccccgcatcgcccttcctgcctcttgagcggcttgatgcttatatgccatgccacctgtatcagaacatctaccttctgtcacctaatctctattcactggctgtcgtttaacattgccatcactgtaacaaccgtgcctttc

SEQ ID NO: 1849 - DNA, 315 bp, Glycine max
ggatacctaaaaattgtaccgatatggcttcacttgtgtgtctccttttttccttgcatttcatggttatcatgtcaggttccttaccagcaaatagtgaagtgtttacaaaagagtctcctatgtctctatccacaaaacccgtggaaagactcacccaactccacttttatttccataacaacaaaatgggggaacacccgactgctatgaaaattgttgagcctcctaaggcgtccatttctggttttgggactatttacatgatggatgaccctctaaccgaaggaccaagtccaacttcaaagcttgttg

SEQ ID NO: 1850 - DNA, 172 bp, Glycine max
gaaagcactgcactcctcgcaacacaacaaaagaagacaacccagagagcgcgtcttaataaacgctcttctctgaaaacccccatttcctttcttctttcttcttctccttcgcctcttcgatcttcgatcttcctcgctgaaaatgagagaatgcatttcaatccacatc

SEQ ID NO: 1851 - DNA, 378 bp, Glycine max
gggaggaacctgagagagagaatcagaggaagaagatgatctataggaagtggagtctccttaccggcccggtcgccattctcggcggcgtagtcgtcgccatcgccgccgcaaacgtcatcttcgtcaagaatgatcctttcctcaaaccagaggagaggaagtatgaaaatgaacctgctaccaagtaggagaaaagagacaacagaagtttgcgttttgatgtcttttaaaccctgatttatgagctctgtatactgttttgcaagacatgctctgggtagttaataagattgagattctgaatggagtctggactctggagcacgggcccttagtttagaactaaccttccaaggttctagaaaactggttcat

SEQ ID NO: 1852 - DNA, 319 bp, Glycine max
aagggttttgccctgttgttgcggctcatcctccgtaacctccgagctctgcaccgaagaacgaagccatggggaagacacatggaatgggatctgctcgcaagctcaagtcccaccgcaggaggcaaaggtgggctgacaagtcatacaagaaatcacatcttggaaatgaatggaagaaaccttttgctggttcatcccatgccaagggaattgtccttgaaaagataggtattgaggctaagcagcccaactctgccattcgtaattgtgccagggttcaacttatcaggaatgggaagaagattgccgcttttgt

SEQ ID NO: 1853 - DNA, 229 bp, Glycine max
ggtcaagggatgctgtgttggtcccaagaagagggtcattacattgcgtcaatccctccttaagcagacttctcgtgttgctcttgaggagatcaaactcaagtttatcgatacctcttcaaagtttgggcatggtcgcttccagaccacacaggagaagcagaagttctttggacgcctcaaagcataattaggttaattggatggaaatgctggaatccaattgggt

SEQ ID NO: 1854 - DNA, 369 bp, Glycine max
ggtgctctgctcgtgcctctagggttatcatttctccatttccattttctctctcacttttcaagaatcgtaagctatgggaaagtcttacccaactgtgagtgctgattaccagaaggccgttgagaaggcgaagaagaagctcagaggcttcatcgctgagaagagatgcgctcctctaatgctccgtttggcatggcactctgctggaacctttgacaagggcacgaagaccggtggacccttcggaaccatcaagcaccctgccgaactggctcacaacgctaacaacggtcttgacatcgctgttaggcttttggagccactcaaggcggagttcctattttgaactaacccgatttctaccag

SEQ ID NO: 1855 - DNA, 64 bp, Glycine max
gagcaacatggtgacgctggtggacagatttacttgccacaagcttacgttagaaccacgagga

SEQ ID NO: 1856 - DNA, 196 bp, Glycine max
gactgacagtggcagacagagaaagacgtgcatagtgtgagtgaagctctctgttctgttctaatgttcttctcttgcaacctctgaatctgtaggcgtcagttgtgcaatttaacagagtgtgcttaagaaatagtaattttgtatatttactgtaaataatatcagtatgggtgacgaagaacgaccgaatgaa

SEQ ID NO: 1857 - DNA, 298 bp, Glycine max
ggactcactcttgttttcgcttcgctactcatcatcctaagtaccaggaagaaacaaacaatgtttctcaaagtccagctgcactggaatgtcatcatcgctgctgaaaatctgcaaccggaaggtctgatgcttcatagggcaatcattgtccgccttctgagtgactttgctgtgaagaaggccaccaaagatctgggatactttcttgcagtgaccacactggagaaaataggggaaggaaaggtcagacaacatactggggatgtgctcctccctgtggtttttaatgccatca

SEQ ID NO: 1858 - DNA, 314 bp, Glycine max
ggctcttccttgagcatccagcagcaacaaacaagaggggtttgccttgtgccgtttggtttggtttccggaacaaaaaaaaaaatggtgtcaggttctggaatctgcgcaaagcgggtggtggtggacgcgcgccaccacatgctgggtcgtctagcctccatcgtggcgaaggagcttctgaacggccaaaaattggtggtcgttcccggtgaaaaaatttccacctcggccggcttgttaaggcagagaatgaattacttaaggtcccttcgcaaaccctatgacccaaaaccttccaatggcccattcaa

SEQ ID NO: 1859 - DNA, 285 bp, Glycine max
atccagctctcgcaacagtgcataccctctcgcattccgtatttcctcccctccttcattcaccgctaactatcgacggttccaacatggacactggccgaagaattaagaatggatcccgacgtagaaaaggacgaggtccaaagaagaagccggtttcaacgtctgtcaaaaccagtctccaagtcaccatctgaagaattggccgtaagttgactaaaagaaggtacgctcagcgtgtcggtaccggtgctcccgtatacttcgctgcagttctcgaatacc

SEQ ID NO: 1860 - DNA, 339 bp, Glycine max
gaaagtatataacttcttctaggtgtccggaaatcgttcctatcatcacttctcaaatctcgaaccctctcgtccgtgccgatcactaggtcacacttcatcaatggcgggtagaggcaaaaccctaggatccagcgccgctaagaaggccacctcaaggagcagcaaagccggcctccaattccccgtcggtcgtatcgccaggttcctcaaggccggaaagtacgccgagcgcgtcggcgccggagcccccgtctacctcgccgccgttctcgaatatctcgctgctgaggttttggaattggctggaaacgctgcgagagataacaagaagactcg

SEQ ID NO: 1861 - DNA, 283 bp, Glycine max
ccaacccttaagccaagccttcgtaacggtgccaaaaaaacaacagaagggaaataaccccaaaggccaaagaaaaaaaacaaaaaaccaaaaaaaaaccggccgccctaaaggatcaaacctaagttacccttcaagccaagtcaaaaaccctccaaagtggtcacctaattcaattccacgggccgtcttttacaacgtccttaacgggaaaaacctggcggtaacccaactaaacccccttcaacaaatccccccttccccaactggcgttataaccaaa

SEQ ID NO: 1862 - DNA, 103 bp, Glycine max
agttttatacacaaaagttagtcgttttcactgactaacagtcgacttacagggttgaatgccagttacagtgcaaaacagatgatcatttagtgttttgatc

SEQ ID NO: 1863 - DNA, 375 bp, Glycine max
gacacaaactttattacagttgttgtattgtaattaagcaagaatattaggcaatggagtcttctagaacttcaactactcttgctctttttttaaccatcaatttgcttttctttgtcatggcaagtggctgctacacttgcacacagcctaagccaaaccctatcccattcccttaccctaaccctagtcctgccgcgaagagctgccccagggacgcacttaagctcggagtgtgcgcaaacgtgcttaatggaccaattggtgctattgtagggtcaccaccggaccacccatgttgctcagtgctagaagggcttcttgatcttgaagttgcggtttgcctctgcactgccatcaaaggcaacattcttg

SEQ ID NO: 1864 - DNA, 255 bp, Glycine max
gatttctgcgtggcgtctccggtgagggaaaagtagtagaagagaagatgtcgaccgtaccaggacagctcatctgggagatcgtgaagaagaacaactcctttttggtgaaagagttcggaaggggcactcagagcgtgcagttcagcagagagcccagcaatctctacaacctcaacactttcacgtactccggtttggcgagccagatcacggtcgctgtgcaacctgctggtagagaccactccgtgtttg

SEQ ID NO: 1865 - DNA, 53 bp, Glycine max
tacagctgcgataatacaattgaaggggtggatgtggacacgatcattaaatc

SEQ ID NO: 1866 - DNA, 319 bp, Glycine max
ataaggaaggagaaaacagtgcactcattatttgttctaattctgtgggaaagagaagccattccccttctgtcacagacaagtttttcatttgtcaaatctgcactttgagtctgtgggagagagaagccactcccctccctaacgcactgttgctactgtatctctttcttccatccatccatccattacactaagaaaaggtaggcaagttttctgaagttcctccttgaaggattaaatcttgatgaaatcaatatatgttttctattgcatttttaatgagtcaagttattaaatttattttcttgcccttttt

SEQ ID NO: 1867 - DNA, 360 bp, Glycine max
gtccgtcacttttctcagctgctgttcctgcgcgtgaacaagcctcaggtaagccaaagccatggttaagcataacaatgttatccccaacggacacttccgtaagcactggcagaactatgtgaagacctggttcaatcagccagcacggaagacaagaagacggttggctcgtcagaagaaagctgtgaagattttccccagacctacagctggacctcttagacccattgtacatggtcaaactttgaaatacaacatgaaagtgagagctggaaggggattttcccttgaagaactcaaggcatcagggattcccaaaaagcttgcaccaacaattggtattgctgttgattatcg

SEQ ID NO: 1868 - DNA, 248 bp, Glycine max
ggagagaaactagtgactgacttttcgagaaaggaaaaaaaaagagtttccggcattattccatcatgaacgctcttcccattcttctcttcttcctcttcgtttcggcattagtttatgcgaagaaaactggcgatgtgacggagttgcaaattggcgtgaagcataaaccagcatcatgtgaagttctggcacacaaaggtgacagagtcagagtacactatcggggaaaactcactgatggaact

SEQ ID NO: 1869 - DNA, 118 bp, Glycine max
actaatctacaaattacaggcatccctaccaagcaccttttggccaccccacatgagagagcacgcggatttatcgacttacctttcaccaccactgccatacgtacacggcccccac

SEQ ID NO: 1870 - DNA, 377 bp, Glycine max
gtacaaatctgaggatgaagagcacaaaaagaaggttgaggccaagaatgctttggaaaactatgcatacaacatgaggaacactgtgaatgatgacaaaattggtgagaaacttgatcctactgacaagaagacgattgacgacgcagttgaacaagctatccagtggctacacagcaaccagctcgcagaagcagatgaatttgatgacaaaatgacagaattggtaagcatctgcaatcctatcattgccaagatgtaccaaggtggtgctggtcctgacatgggtggtgctggtgctgggggaaacgacgatgatctatgcgctccttctggtggaagtggtgctggccccaagattgaggaactggactaaa

SEQ ID NO: 1871 - DNA, 375 bp, Glycine max
gactcaccacttcaaaacactcataacacacagcacaaagcaaagctcatccttgagttaaaaaatggcagcagcttcttccatggctctctcatccccatccttggctggcaaggccgtgaagctgggcccatcagccccagaagtgggaagggtgagcatgaggaagaccgtcaccaagcaggtctcctcaggaagcccatggtacggcccagaccgagtcaagtacttgggcccattctctggagagcccccgtcctacctaaccggtgagttcccaggcgactatcgctgggacactgctgggctttccgcagacccagaaaccttcgccaagaaccgtgaactcgaagtgatccactccaggtgggccat

SEQ ID NO: 1872 - DNA, 285 bp, Glycine max
gattcaccacaaccctctctctatattccattgccacccagttttgaatatatttttattccttctttgtttcttcactttcttccatacacataaccatgtcttctcagactgttgtcctcaaagttggtatgtcatgtcaagggtgtgctggagcagtgaacagggttttgggaaaaatggaacgtgttgagtcatttgacattgatctgaatgaacagaaggtgacagtgaaatgaaatgttgagccagatgaagttctgcaagccgtttccacatctggga

SEQ ID NO: 1873 - DNA, 320 bp, Glycine max
actacagagagggatacctaaaaattgtaccgatatggcttcacttgtgtgtctccttttttccttgcatttcatggttatcatgtcaggttccttaccagcaaatagtgaagtgtttacaaaagagtctcctatgtctctatccacaaaacccgtggaaagactcacccaactccacttttatttccataacaacaaaatgggggaacacccgactgctatgaaaattgttgagcctcctaaggcgtccatttctggttttgggactatttacatgatggatgaccctctaaccgaatgaccaagtccaacttcaaagc

SEQ ID NO: 1874 - DNA, 350 bp, Glycine max
  modified_base (281)..(281): a, c, g, t, unknown, or other
ggggttattggacacattcttcagcgactgcgtttttggatcggaacctcttctgcggcgtagcaatgggacactccaacgtttggaactctcacccaaaaaactacggtcctggttctcgcacttgccgtgtgtgtgggaatccacatggactgatcaggaagtatggccttatgtgctgcaggcagtgcttccgtagcaatgccaaggaaattggcttcatcaagtatcgctaaaagagcagttgtcaactacggaccaatattgtgttctggcactangatgttttgaggatgttatgtttgaagaaacttgagactttcttttttcatctaattaattatcagacg

SEQ ID NO: 1875 - DNA, 238 bp, Glycine max
gattttcatttggagagacagagtagtgagtagtgagagggcgaagcgatgaatgccccagatcgttacgagcgtttcgtcgtccctgaaggcaccaaaaaggtttcttatgagagggacacgaagatcatcaatgcggcgtccttcaccatcgagagagaggagcacactatcgggaacatcctccgcatgcagctgcacaaagagcccaatgtcttgtttgccagatacaagcttc

SEQ ID NO: 1876 - DNA, 351 bp, Glycine max
gactccttttctccttcaaaacttgaattaccttcaaccataccttgtttttcaagcctctaaaggtaagatactttggaataaccatgaatgacgaacatggaaccactccaacaatggtgtcaccaccttcacctcatagctcatgtgcgtccactgatcccagccaggaggacaacaacaacaacaacgataataacaaagatggtgacaacaacaacgacgatgataacaacaataataacgatgacaacgacaacaacaacaacgaccccaacaacaacaaccctgaagctccttccttggttctagtagggtgccctcactgccttatgtatctgatgatctctg

SEQ ID NO: 1877 - DNA, 251 bp, Glycine max
gactctgctgttttccaaaaccctaatttctcgaaaggtagggttttgcagagcctcgtcctcctctcacggtttcttctttttatcttctcacctttcttcttccactgctctaatctaagatgggcaagtcaagcaagaaatcagctctcaaggtcgacgctgttccagctgtggttccgccatccaagtctgccaagaagggaggcaagagacaagctcaagatgaaattgagaagcaattgagtgcc

SEQ ID NO: 1878 - DNA, 253 bp, Glycine max
ggactatcagctgacccggaaaccttcgccaggaaccgggagctggaggtgattcacagcagatgggccatgcttggtgcacttggctgcaccttcccagagatccttgagaagaatggtgtgaaattcggcgaggccgtgtggttcaaggctggttcacagatcttctcggagggaggacttgactacttgcgcaacccaaacctgatccatgctcaaagccatccttgccatctgggctgttcaggttgtg

SEQ ID NO: 1879 - DNA, 258 bp, Glycine max
acttgatatcacattctgccacagtgcttaacatgcggattggataagcccctctatctgcagatcttagattcagacttttaaatgcgaattagccccatgtttacttgtttgcataacaagaggaatggctgtgttgatctaaatccttgccccacacatacataacctaaaggagaaagaactacaaggaggacttgaattttctacgaaagtgactctcacaattcgcgggaccctctcaagaattcaggctaa

SEQ ID NO: 1880 - DNA, 268 bp, Glycine max
tgcttcttggcgtgatgggtgctccaatcgcccgtccacgtgtgcaccactgacccctttcctcacctcagcataaaagacatccccattattagtcccctcttgttgtttagagatcatatagagctaggttcagaaattgtttcatttctcttaattattaagttatgttgtctaagatcagtagatattatcattattatgtcatgttaagcattatgttagggaaaatgtgtgtgaatgagtattagcactttttttagcttgc

SEQ ID NO: 1881 - DNA, 313 bp, Glycine max
ggcattctattcattcaagattcagcaagtgcgttttggaagcagagaccgaaatacttcgagatggcccgtacaaagcaaactgctcgtaagtcaactggaggaaaagctcccaggaagcagcttgcaaccaaggctgcacgtaagtctgcaccaacaactggtggtgtgaagaagcctcatcgttatcgccctggaactgttgctcttcgtgagattaggaaataccacaagatcactgagctcctaatcaggaagcttcctttccagatgttgggtcgtgaaattgccccacgatttcaacactgatctg

SEQ ID NO: 1882 - DNA, 376 bp, Glycine max
tagaatcccattccagagccaaggtaggttaaacactcttcttcatcgtcgtcgcaatgggacgtgtgatccgtgcgcagcgtaagggagcaggctcggtcttcaagtcccacacgcaccaccgcaagggccctgcccgcttccggagcctggatttcggagagcgcaacggctacctgaagggtgtcgtcactgacgtcatccacgatcctggccgtggcgcgcctctcgctaaggtcgccttccgccacccgttccgctacaagaagcagaacgagctcttcatcgccgccgagggtctctacaccggccagttcatctactgcggcaagaaggccaccctcgttgtcggcaatgtgttgcctcttcgatccat

SEQ ID NO: 1883 - DNA, 202 bp, Glycine max
cacgcgtcagaccacgcgtccgacgcgacagaagggggtctccagctcatgagaagtgcatcatagttagaagcaaacccacccttttcatccaattttgattatagatggaaaaccagcccccatcatcaaaggcttctgaagtagatgccccccttcaatcacttggctttgagattcaagacttgtctccacaaacggt

SEQ ID NO: 1884 - DNA, 196 bp, Glycine max
aataaagaagatttgtgttggttcaatatggcagcagactcaacccctttccacaacctttcatatgctaacaaagcaggaatcagatttgctccaggttgccaaattaaatgataagcagcctttgaatgaagtagggaacacttggagaaaaggactaggagcagagaatgaagacataggaggttgtgaattg

SEQ ID NO: 1885 - DNA, 269 bp, Glycine max
gatttcaattcattttgaattgaaaccgcggagagtttgcagctgcatcatcgatcatcgtcacctcatggacggacacgattcacaagacccgaagcagagccctgctgacatgactgcctttgtgcaaaatcttctccagcagatgcaaaataggttccagacaatgtccgactccattgttacaaagattgatgatatgggaagtcgcatagctgagttggaacaacgcatcaatgacctaagagcagagatgcggagtggagtcc

SEQ ID NO: 1886 - DNA, 395 bp, Glycine max
gtgctgctgcaagaagacgaaagagagggacagcacagttctcatactttggagaatcccaacccttagttaacacaactatcattgccacctctgctattcagtaatcagcattcactggtcaaactgctctgaagcagctcaatgagttcgtccgcatgaccggtggcgcctgcaaaggtcgcactaacattcgccccaccgtcaatagtgctcctcagagcatctggtatggacctgaccgtcccaagtacttgggtccattctcggaccagattccaacagacctgaccgcggaattccctggttactaccgattggacactgccgggttatcagctgaccctgaaaccttctccaggaaccgggagctggaggtgattcacagcagattg

SEQ ID NO: 1887 - DNA, 382 bp, Glycine max
ggccgttgcctctgcctctcacccgcagggtttagagaaaatttaacaattagggttgcttctcctttgccgacccatggctcccaaagctgatagttcaaagaaggctgatccaaaggcacaggccttgaaaactgccaaggcagttaagtccggtgctaactttaagaagaagaccaagaagatccgaacatctgttaccttccatcgaccaaggactttgaaaaaggataggagccccaaatatccacgcattagtgctccacccaggaacaagcttgatcactatcagatattgaagtttcctctcacgactgagtctgcaatgaagaagattgaagacaacaacactttggttttcattgttgacttgcgggccgac

SEQ ID NO: 1888 - DNA, 381 bp, Glycine max
gagtgccagacgcagtgactaaaccaaacctctcactcgccgtcgtagggtttctcctttcgtttagcaacaacaacaatggttgcagccaagaaaaccaagaagacccatgagagcatcaacaacaggctcgctcttgtcatgaagagtggaaaattcaccctcggttacaagacggttctcaaatcacttaggagctccaaagggaaattgattatcattgctaacaactgcccccctttgaggaaatcagagattgaatactatgctatgttggccaaggttggagttcatcattacaatgggaacaatgtggatttgggcactgcatgtgggaaaaatatacagagtgtgctgccttagcattattgatcctggtga

SEQ ID NO: 1889 - DNA, 240 bp, Glycine max
gctccgatctaatggccaccgtaatcgacggcaaaaccgttgcgcaaatcatccgatctgaaatcgccaacgaggtgcgcctgctctctcaaaaatatcgcaaggttccgggactatcagttgtgatagtacggaacagaaaggattcacgcgactacctgggaatgaagagaggagcatgcgccgaattgggaatcatatccgtcgatgtggaccttcccgaacaactctcccaagctg

SEQ ID NO: 1890 - DNA, 139 bp, Glycine max
gacacgcagttgtattgtagaactgaacaagggtttctctttctctttctctgtctgcgtcttcactttctctcgtttcagtcgaaaaagatcatgggcagaaaattcctcgtcggtggcaactggaagatgcaatggg

SEQ ID NO: 1891 - DNA, 53 bp, Glycine max
gttaaaaataatgtaccaaattttacgtaccagcttcgccagtacctgcgaag

SEQ ID NO: 1892 - DNA, 179 bp, Glycine max
ggaagaagagagtgatgatgatatgggattcggcttgtttgattagggacattctcaatgatttggttaaattttgtggttctttaccttttaaggttactctggatattgtaggttttatttttgtgctggttatttatatctgtatacgacttgattttgttatgttatatgaactt

SEQ ID NO: 1893 - DNA, 272 bp, Glycine max
gaaagtgccttcattcgggactttcactagccgcagcagcctcaggaggagaataaggatgtctcacaggaagttcgagcacccaaggcacgggtcactgggatttctccccaggaagcgtgctgctcgtcacaggggaaaagtgaaggcattccccaaggatgacccatccaaggcacccaagctcactgcattcttgggttacaaggctggtatgactcacattgttagagaggtcgagaagccaggatcaaggcttcacaagaaggaaa

SEQ ID NO: 1894 - DNA, 354 bp, Glycine max
gagtgccagacgcagtgactaaaccaaacctctcactcgccgtcgtagggtttctcctttcgtttagcaacaacaacaatggttgcagccaagagaaccaggaagacccatgagagcatcaacaacaggctcgctcttgtcatgaagagtggaaaattcaccctcggttacaagacggttctcaaatcacttaggagctccaaagggaaattgattatcattgctaacaactgcccccctttgaggaaatcagagattgaatactatgctatgttggccaaggttggagttcatcattacaatgggaacaatgtggatttgggcacggcaagtggaaaatattacagagtgtgc

SEQ ID NO: 1895 - DNA, 255 bp, Glycine max
gaggaaaagcgcgacgcagactgtgtgaagtagatgtgtgcggaaaatccacgaatcattcttagggtttcaacataggatccaaaaaaggacaaggctccaacaacttcctgcaagcccacaagatctggccgtggctagcactacaaacaacaatctgtagcactggaaaacagtcagctaaagtgaacacaatggcgctcttttttcaaggcacctattgcaaaatcccttctgaaactccccaatacaagc

SEQ ID NO: 1896 - DNA, 288 bp, Glycine max
ggtgtactatcattgcaacatcatggaaaaatggtgtaactgtgacgtcacaaacaccgcacaacaagcgtgctcaaatgctgcacaagtaaggtttaggataagtctagtgtgatccccgagatctccatgaacacttcacggcaaaatctcaggaaattagctagagattggtttatgatcaggatatcaaccagaattcaatcacgatcaactcctcctcagatgcacgaaggataaaggaagggccgacgaacgggttatagtccagttaagggtaccatggag

SEQ ID NO: 1897 - DNA, 276 bp, Glycine max
cgggggcacccccattggcgtctcagaaggagaatttggttttgaatcaagagtctagacctgcatttgctgcagaaactcctaagaagttgaaccgagaaatcgcggttgatgctagcctttcaaattggctgggttcatcagaaactacacctgttaccaaaggtttgtacgtgggtaccctggagaggagcagctcacaaagctcaaattcagtggttagccattaaaataggcctattttaggtgcattgacagttgaagagctcaaacatt

SEQ ID NO: 1898 - DNA, 57 bp, Glycine max; identical to SEQ ID NO: 993

SEQ ID NO: 1899 - DNA, 379 bp, Glycine max
ggagaaaggggtgcattctgttctgtgtttcggggttacgctttgcgagtgagaattgataaacaaatcgttagggttttttggttgtgcgagtgagagtgagagagaacaatggaagacataacagagggagtgaacaacatcaacatctctgattcgtataagaaaaatcgcattcaggtctctaacaccaagaagcccctcttcttctacgtcaatctggccaagagatatatgcaacagcatgatgaggtcgagctctcagctctaggaatggctattgccacagtagtaactgttgctgaaattttgaaacacaccagacttgccgttgacaagaacatcaggacatcaactgttgacataaaggatgactcta

SEQ ID NO: 1900 - DNA, 166 bp, Glycine max
ggttgaatgtagaacgctgctgccgaaacccttcccgatccctaaggtaagtgagtaatcggtggttgagaatggtggagaacgcgaacggtatgaaggacgacgtgagctccacagactacatcatcaacctccatccccgcctccatggcggcacatttgacaa

SEQ ID NO: 1901 - DNA, 372 bp, Glycine max
gatagcaagctctgaaaagaagagagagagagagagaagtgcatagcgtgatagagttttttgttgtctatacatcttccttcgttgtttgggttcgttcgccttcactctccgacattcatatcattcatcagagactggagcctgagaagaaaaggagaatttatggaggacggcgcaggaagaggtttggaatgcccgaagactatggatgggaaggcgagtaacgggaatgggttagagaaggaaattccttcttgttgtctgaaggctaacgcttcaatccctgagtctgaggcgaagtgccattctaccgtttgttccgggttggtctcaacgtcccaaaacttgccctggggaaagtctgggaaa

SEQ ID NO: 1902 - DNA, 341 bp, Glycine max
ggtctcgcaacttcatgcttagaaccctagcaacactgtgacccactctactctcgtgtgatggttcagagtgtgttttcacactctcatgcagcggttcacgctctcactctctctcacggtggttcacactcgcattgtggttcagagtgtgttctcattctctctcacacggtggttcacgctctcactctcacggaggtgctctatcaaggtcgagtttacttctcactttagtcgaaagaaggactcttttgtatccagcagtgtctcgagcctacccaaacgttaataggtagtattaacttcaatggagccatccaaaggaaacatcaagggga

SEQ ID NO: 1903 - DNA, 331 bp, Glycine max
ggttctagtgtgtgattgtttgttgttgtaactcgttcttcttcttttgttgttctgtgtttgtgtttgttttttctctcacctgaaaatgtcttgctgcggtggtaactgtggttgcggaagctcctgcaagtgcggcaacggctgcggaggctgcaagatgtacccagacttgagctacactgagtcaaccaccaccgagaccttggtcatgggagtggcacctgttaaggctcaatttgagggtgctgaaatgggtgtgcccgctgagaacgatggctgcaaatgtggaccaaactgctcctgcaacccctgcacttgcaagtgaagt

SEQ ID NO: 1904 - DNA, 63 bp, Glycine max
gtctttaattcttcgtcaaaaacaaaacaaaaaaaaaagcaacaacaaacgaacacaacaaaa

SEQ ID NO: 1905 - DNA, 161 bp, Glycine max
gatgccgaaaagtagtaccaagatggcttcagttgtgtatctcctctttggcttccatctcattgttatcatgtcaagttccttacccgcaactagtgaagtgtttgcaaaacagtatccatccacagaacccgtggaagaaagactcacgcaactccacc

SEQ ID NO: 1906 - DNA, 218 bp, Glycine max
  modified_base (85)..(85): a, c, g, t, unknown, or other
gagagtggagtaaaaaaaaagagcagtgtaagaaattagaaagggcgaaaggcgcactttatctgaaagcaaaaaccctacctanggtcaaccgtgacgccacaatcgccttcggcatctttgcaacgggatcaggtgctcctcgtccttcacgatggcggggaactgaaacccaaaaaacctaattccaaaaacctggccgctaacaatcccgttcc

SEQ ID NO: 1907 - DNA, 304 bp, Glycine max
gtctcctcctttgtggtgtcgagctgagaataccagttgctccagtagccggcactaaacaacatggcggacaatgcagtcaccatccgaaccaggaagtttatgacaaacaggcttctctccagaaagcagttcgtcgttgatgtccttcatccagtgagggctaatgtttccaaggctgaactgaaggagaagctgggaagaatgtatgacgtgaaagacaccaacactgtatttgtcctcaagttccgaactcattttggtggtggcaagtctactgggtttggtttgatcgacgattcag

SEQ ID NO: 1908 - DNA, 385 bp, Glycine max
gattgccgtcacagagagagacaagaaacaatgaagtttaaccctagggtttcctcaagccgtcgcaagagccgcaaggctcacttcaccgctccgtcgagcgtgcgccgcgtcctgatgagcgcgcctctctccaccgatctccggtcaaagtacaacgtgcggtccattccggttcgcaaggacgacgaggttcaggtcgtgaggggaacctacaagggccgcgagggcaaagtggtccaggtctatcgccgcaagtgggtcatccacatcgagcgcatcacccgcgagaaggttaacggctccaccgtttaacgttggcattcacccttccaaggttgtcgtcaccaagctccgaatggacaaggaccgcaaatccttgctc

SEQ ID NO: 1909 - DNA, 378 bp, Glycine max
ccacatcacgacatcacatcgcagagaagaacagagagggatccatccatcaattccaatggccgatcagctcaccgacgaacagatctccgagttcaaggaagccttcagcctcttcgacaaggacggggatggttgtattaccaccaaggaacttgggaccgtgatgcggtcacttggccagaacccaactgaggcagagctgcaggacatgataaatgaggttgatgctgatgggaatggtaccattgatttcccagaattcctgaatctcatggctcgcaagatgaaagacactgattcagaggatgagctgaaggatgctttccgcgtgtttgacaaggatcagaatggcttcatctctgcagcggaactccg

SEQ ID NO: 1910 - DNA, 219 bp, Glycine max
gtcagcggagacgttcgactttccttcagagcgctgctctaatgctacagcttgggctcttatactctaaatggtggataatcgcttccgatactctctctgtaccctcattatcccttcatgtctcagcgaaacgattcaccgaattcacaggtctctgcagatcaacatgcttccctcacttatctagataatcctcagaagatttccagtctgtca

SEQ ID NO: 1911 - DNA, 218 bp, Glycine max
ggttcaacttccacttgaacttgccgcttcttcaagtcgaagacaacaaacacacaacagagactgaaacgacagcattttttgatctattatggtgaaggggttgcacgggcagaacctccccgcccacgtggcacagctggttgatcagctggagcgccactgcttcgctcccgatggatctcccatctccaagccctcgcttcaacgatctccaa

SEQ ID NO: 1912 - DNA, 262 bp, Glycine max
gaagtttaggcccgagcggtttgtggaggaggatgtgagcataatggggtctgatttgaggttggcacctttcgggtctggaagaagagtgtgccctgggaaggcccttggtttggcctcggttcatctttggctcgctcagttgcttcaaaattttcattgggtttcatctgatggtgtttctgtggagttggatgagtttcttaagctttctatggagactaagaacccactgtcttgcaaggctgtgcctagggtttcc

SEQ ID NO: 1913 - DNA, 205 bp, Glycine max
gattgtagaactgaacaagggtttctctttctctttctctgtctgcttcttcactttctctcgtttcaatcgaaaaaaatcatgggcagaaaattcttcgtcggtggcaactggaaatgcaatgggaccactgaggaggtgaagaagattgttactactttaaatgaagctaaagtccctggagaagatgttgtacaagttgttg

SEQ ID NO: 1914 - DNA, 350 bp, Glycine max
agattgtagatcatcttcaatttcttgatcatccgtagaatactggttgatagcacctcatctatgcaagtgaggagggtaaccatgtttcttgtagcaagtgtctaccatatgacctgatatgttacaataagtgcacatttttgtgcttctgcctctacctcttccaccagatgtatggcctccacgacctctgcttctgccacaagtaccattgttggtatccaattgagcgaaaactctagaatcatcaaattgaagaaccaatcgcctttcttgttgaatgaggatagaaaaaaatttgtctaaatcagggaaggggtccatcatcattatatttgacctaactg

SEQ ID NO: 1915 - DNA, 283 bp, Glycine max
ggaagaaggaagcatcataaccggccaaagcttctctctcttccatttatcccccataaataaaactaggtgaaaaaaatatactctgtgcttctcatgatggtagtgtagctgaagctgcttctgctgcagcattggcgatttggacacaaaaaaagtttcaaacttttcagttctctgagcttctggtttatcaattttgaaggagttcaatactttaccctattagttggttccctgaaatttgtattggtattgctgtatcagaaattcttctgaacaa

SEQ ID NO: 1916 - DNA, 80 bp, Glycine max; identical to SEQ ID NO: 537

SEQ ID NO: 1917 - DNA, 244 bp, Glycine max
ggcctacttcatctctcttataatcacacacacacctaccttaatagctatggaaactggaagctttcacggctaccgcaagctccccaacaccaccgctgggttgaagctgtcaatgtcagacatgaacatcaagcaccacgtagcatcaccagatcacagtgcagccacaggagaggataacgaatgcacggtgagggagcaagacacgttcatgccaatcgccaccgtgactacgatcacg

SEQ ID NO: 1918 - DNA, 232 bp, Glycine max
gatgagctcaaagactaggatgttttcacttgtggagctccaaatgctacgaggacggcgtggaccttggtcattgcacagtgctttattccctggtttggtaatcattggcgctagacattcttagcatttaaaaacagaacagtgtttctaattgtagctcttggatgcaatgcttgtattggtagcatgaacttgggtatctcgctgtacatctgccctttaatttgtg

SEQ ID NO: 1919 - DNA, 324 bp, Glycine max
ggaagtcgccgtttgttttcttttcgttcgcatcttctctctctctcagaaagatgaaggtggtcgccgcgtatttgctcgccgtcctcggtggcaacaacagccgctccgccgatgtcatcaaggaaatccttggctccgttggagtagaagcagatgacgataggattgaatcgtttttgtctgaagttaagggtaaggatatagttgagcttattgctgccggtagggaaaagttggccacggttccttctggtggtggtggtgccgttgccgtcgccgcagctcctgggggacgtgctgctgctgcgtgctcctgctgct

SEQ ID NO: 1920 - DNA, 368 bp, Glycine max
ggcacttcaattgcaatcaaattagttcattctctttgcgcagttccctacctctcctttcaagatgcagatcttcgtcaagaccctcaccggaaagaccatcacccttgaggtggaaagctctgacaccatcgacaacgtcaaggccaagatccaggacaaggaaggaattcccccggatcagcaacgtctcatcttcgccggaaagcagctcgaggacggccgtaccctcgccgactacaacatccagaaggagtcaaaccttcaccttgtccttcgtctccgtggtggcatgcagatcttcgtcaagactctcactggcaaaaccataaccccaaagggtcaaagctctgacaccatttacaacg

SEQ ID NO: 1921 - DNA, 57 bp, Glycine max; identical to SEQ ID NO: 410

SEQ ID NO: 1922 - DNA, 381 bp, Glycine max
gagagtgatccttctacactaactaaagccgagcagcgagagagagaaaccctagcaaaaatgccggctggtcacggtttgagatcccgcaccagagattccttctctcgtcccttcaggaagaagggtaccatcgccctcaccacatacctcagaacctaccacgtcggcgattatgtcgacgtcaaggttaacggcgccgtccacaagggaatgcctcacaagttctaccatggccgcaccggtcgcgtctggaatgtcaccaaacgtgctgttggggtcgaagtcaacaagcaggtcggcaacagaatcataaggaagaggattcacgtgcgtgtggagcatgttatgccatcaaggtgcactgaggagttccgcctt

SEQ ID NO: 1923 - DNA, 350 bp, Glycine max
ggctgccgctctctgagaaaaacagatagtgtgggagagagaagagcggaagagaaaatgacgaccaggttcaagaagaacaggaagaagagaggtcacgtcagcgccggacacggccgtatcggaaagcaccgcaagcatcccggaggtcgcggtaacgccggtggcatgcatcaccaccgtatcctcttcgacaagtaccatcctggtttcttcgggaaggtaggcatgcgctacttccacaaacttcgcaacaaattctacaatccgatcatcaacatcgacaagctgtggtccctcctcccccaggaggccaaagacaaggccaccgccgacaaggcacccttgct

SEQ ID NO: 1924 - DNA, 81 bp, Glycine max
gtggtagggctgcaaaaagacgacgcaatggtgtctgatgtaaactataatgacttcagcatagatcatccgaatcttcag

SEQ ID NO: 1925 - DNA, 317 bp, Glycine max
ggagagacttcactttctgctttgctttcgacaattccaaagtctccaactcaacccagctgcctacagccgctacaactaaaaaagccctttgctttctcttgcattgctcttttcaactcgtcacattggctcatttatcacccatcagatttagggtcccttctgccatactgcgcacattgaagatgacaacaacatcattttctggcttgcgatttgcaatgtcaagatcatgcattccttcatcacaaaagattgcagatgcaggggctgtggttcttggcggcaagtccaagattgggtcctggaataaa

SEQ ID NO: 1926 - DNA, 365 bp, Glycine max
gatacctaaaaattgtaccgatatggcttcacttgtgtgtctccttttttccttgcatttcatggttatcatgtcaggttccttaccagcaaatagtgaagtgtttacaaaagagtctcctatgtctctatccacaaaacccgtggaaagactcacccaactccacttttatttccataacaacaaaatgggggaacacccgactgctatgaaaattgttgagcctcctaaggcgtccatttctggttttgggactatttacatgatggatgaccctctaaccgaaggaccaagtccaacttcaaagcttgttggaagatgtcagggaatatatgctgaggcttcgcaacatgaacctgcgatac

SEQ ID NO: 1927 - DNA, 305 bp, Glycine max
attgggcatgtggatgagaatggcgtctacaatggccatttctccacttttgctctctgcggcttcatacgtgcgcagggtgatgctgacagtgccctagatcgcttgtggcagaagaacaaagttgaagttaagcaacagtagacacccatgatagtttgttactttgctacgtattaatttctacgcatgctagagcatatttgagtactatgactgtcgtcttgagcaaatactcattctaaattttcgttggtatttggtaccgccagctaaatttgcttttttgacagtttgccactgcg

SEQ ID NO: 1928 - DNA, 363 bp, Glycine max
gacacatcacaacaacaacaacaacaaaaaaagacaaaaactacttccttctctcctttgctgtgttttctttctcaaaaatgggtcgtacctatgttcttatgatggttgctgcattgttgttgagctccaccatggctcaatctccagcttcgtcgccggctttgtcccccacccacacgccggtggccactccacctaggagggcgttgtcgccgtctccgtcgtctgtgtcaccagcggcttcacccgccaccggaaattctcctccggcaccacctacttcttctccttcggaatcgccacttccatcagctgctactcccaacatctctccctcgaccatctcgactccgccatctg

SEQ ID NO: 1929 - DNA, 362 bp, Glycine max
gactcagccagggcagaaaattcagaagctctccctcttcctcacgttgcattttccttctcctccattctccattgagacgccatcacagctccaacctttggtgctcatttctgctccaaatctcgaaacaagggcattttcggggtcgtgaagtgcgtggctacgactgggacttcgaaatttcagatcgtgatggcggcgcagctaatccgtgatcgagtagagatggagtgcctagagggagcttgggataccctcgaaggcaacacaaggtgccgatttcggggcaccattcgattcacggctacttctttggtgcatccagatgaacctgcaccgacgcttcagcgaactgtgga

SEQ ID NO: 1930 - DNA, 368 bp, Glycine max
gagtgcaaaactcacaacacatctaaacaaaaaatcaagaacaatggcttatgctaggcttgctcctatggctgtcttcttgcttgccacttccaccataatgttcccaacgaagatagaagcagcagattgtaatggtgcatgttcacctttcgagatgccaccgtgccgctcacgtgattgtcgttgtgtccctataggactagttgctggtttctgcatacatccaactggactttcatctgttgcgaagatgatcgacgaacatcccaacttaagtcaatctgatgatgaatgcatgaagaaaggaagtggcaatttttgcgctcgttaccctaataattatatcgattatggatggtgttttg

SEQ ID NO: 1931 - DNA, 325 bp, Glycine max
aggttcctttcttgcagctcataatatctaggcatttaaataaagatttagtgaacacaacaaccacaaagccccaatctacttaagctataaacagtggtttaggcatgaattggaggatccatggacggaaaaaaaatctgttaatcgtgtggtacgtggaaagattccttcttattagttatcaatcaaattcaagcatcaaacgcactcgctcatgtcgtcgacaaggaccaatgatataggttcctccagcggagtaacaagaaagaaaacatcaaacagtacatgtcattaatgtgtgttttggccttttcaacagaaa

SEQ ID NO: 1932 - DNA, 358 bp, Glycine max
ggaatggagagctcaacaacaataagaaggatatgaacttgttccggaggattaagaatggcttatcccgccataataacaatgaaggaggcaacagcagcagcagtgatagcgaaagtgatgatgagaagtgcccaaagacaaagaaaggaggaaactgcaagcaggacgcaactaagacaaagccagtttaactgacggaaagaacatcgccacaaagtgtgtttaccatttcatctgttcttgtacccaaatagttgggaaaaataaattccaatatttcacttgggtgtgagtatcttatgataaataatatattttgaagtttacccacaaggaaatcaaggcgcctcccaac

SEQ ID NO: 1933 - DNA, 389 bp, Glycine max
gataccatagaagaagcacaaagagaagcattagcactaggagcagcaacaactagtctcagctgaaatggccgcttcagtgatggcatctgtggccctcaaacctgcccctttcactgttgagaagtcctcagtgagaggccttccctctctctcaaggaactcttcttcattcagagttgtggccagtggcaagaagatcaagactgacaaaccttatggaattaatggtggcatggctttgagggatggaactgatgcatctggcaggaaaggaaagggaaagggtgtttaccagtttgtagacaaatacggtgctaatgtcgatggttacagtcctatctacgacaccaaggactggtctccaaccggtgatgtctacgctggcg

SEQ ID NO: 1934 - DNA, 273 bp, Glycine max
taatttgggaattattgctcccatcgccattggtttcattgtcggcgctaacattttgttgggtggggccttctctggagcggccatgatccccgctgtgacatttgggcctgctgtcgtgagctggacctggaccaaccactggatctactgggccgggcctctcatcggtggtggaatcgctggccttgtttacgaggttgtctttatcagccacacccacgagcagcttcccaccactgactactacagggggggagatgaatatgtgtt

SEQ ID NO: 1935 - DNA, 86 bp, Glycine max
gtcagtggaagccggcatgtccacatgcgcatttggaaatgtatacattgagcactactcctccaaatgcccaagttagaagagac

SEQ ID NO: 1936 - DNA, 271 bp, Glycine max
ggggggagtttcttcttggatcttaccctcttgtttgctaatattctcattcttctgtctctgcttcttctccttctgaactaagagatggggttgtctttcaccaagctttttaacccgctctttgctaagaaagagatgcgtattctcatggtaggtcttgatgctgctggtaagactaccatcttgtacaagctcaagctgggagaaattgtcacaaccattcccacaattggattcaatgtggaaactgtggaatatacgaattatt

SEQ ID NO: 1937 - DNA, 182 bp, Glycine max
gatcatagcgatccagagagtgggttcaatcagtgatcggggttcacttgctccttcgtaaagtcctcgtcatcagcataatcatcactccttggttggagacgatgctgatgacagacgtcgccatcggaacgcctgaagacgctactcatcccgacacctctgaacgtggggttggctga

SEQ ID NO: 1938 - DNA, 268 bp, Glycine max
ggcagtttcaaattttcttttccttcactttcccgagaaaaaaataacacttttcactttcttcactacgttctcacttcgatatggctcgtacgaagcaaaccgctcgcaagtccaccggtggcaaggcgccacgtaagcagctcgccaccaaggccgctcggaagtccgctccggcgaccggaggagtgaagaagccccaccgcttcaggccgggaaccgtggcgctgagggaaatcagagagtgccagaagaggaccgagcttcg

SEQ ID NO: 1939 - DNA, 201 bp, Glycine max
ttaatctaaatatgacacgtgagttaaaacaaatcgaataagtgatatttaaatggagcaaggcatgtgtttaagaaatacagaacaaataaaaaaaaatctacatgtggacggaagaggatttgcatgtcactcgcgtgtcgaattcatagatgttaacttgtcctcattcgtacgtgtccttacaatgacgttagcgtt

SEQ ID NO: 1940 - DNA, 384 bp, Glycine max
gactccgcagctgcagcactcaaaaccctagagaggacgagagagcgtgcaactttcggcaaccacagaccatgacattcaagcgcaggaatggaggtcgcaacaaacacggccgcggccatgtcaaattcatccgatgctccaactgcggaaaatgctgccccaaggacaaggccatcaagaggtttttggttaggaacattgttgaacaggctgcagtcagagatgtgcaggaagcttgtgtctatgaacaatatacacttccaaaactctatgtgaagatgcagtactgtgtttcctgtgctatccactctcatgttgtgagggttcgattccgcaccgacaggaggaagcgtgagcctccacagagattcatcaggcgca

SEQ ID NO: 1941 - DNA, 301 bp, Glycine max
gtcagtaggagatgcaaggagaaaacataacccaatatcaaatataattgggataagaagatacataataataaatcagcttcagccatttcagtacatgatgaaaaggaatcattgtacttacggcccagtaatgacgatttgcaatgtcccaaccaccttgataacgtcgaaatccgtgtagaatgtcaggcctattggtcctgtttgctgctagcacaagagtacccttagttctaggacgtgctgcttgagctacttgtgtgacgccattcttccatggacccaaattctgaccccc

SEQ ID NO: 1942 - DNA, 381 bp, Glycine max
gttcttaaatgaaaggccccaacctaggcctggaaaaggggtcaccaatacctgccaagtctgtgagcgcagcctccttgattccttcaacttctgctctcttggttgtaaggtatatttaaatggaattcctaatcttaactacatcttagttgtaacaaaatatgatgaatagatttcctaattttttaagaaatgttgtatgtcctttgtaaattgtaactacctcctacttttttgctgtataaagtatgtaacattatagttgtactttttatgcctgctttgaaaaagtaagaaaaaaatgatgatgagaacagttggatacgaatgaataatgatctcttgaacttttgaattttcttctcagattgttggaac

SEQ ID NO: 1943 - DNA, 336 bp, Glycine max
ggaaagcaagcattatcagaagcagaaagaaagaataagaggttgcagcaacaatggcagccatggctgcgcttcagagctcaatggtcggtctctccctctcctccaactctttcttaggccaacgcctttctcccatcaccctcccctctcttcttccgggtaagtcaacagagaagcaatgtcctattgtaatgaggcttaaacgatgggaacggaaggagtgtaaaccaaacagccttcctatcttgcacaaaatgcatgttaaacttggagatacggtgcaagtcatatctggacgtgaaaggggtaaagttggggagattactaaaatct

SEQ ID NO: 1944 - DNA, 160 bp, Glycine max
taaacccctgttctatggtttccagatcaaccatactctcaccagtactggtgcgagtaaaaataccctcttctttaacttctgttattattctgatggagtgcaactccttcataagtatttcgagaataccaccacgattttttccatcaaatcccca

SEQ ID NO: 1945 - DNA, 236 bp, Glycine max
agtttggaattggaactaccgaaagccgaaccttaaacacaaacgccaaatctagcaactattgagttttgttttctttgaaacatcgtgtgcacagtaccccagaagatcgaacaaggatctccacgaagacaaacctctgttctcaactgtgtttctttacctctcacctactttcagaccatacccagattgactaggctgagaagatgcatcagatagcgcctatgattcct

SEQ ID NO: 1946 - DNA, 248 bp, Glycine max
tgggagccctcgtcagcacgttgtgcatgcccagtttgggagttccgacgctcttagcaaccagtcaagacccggtgcctctaggctcatgttcccattcaacttgggttttcgaagcccagtcatgcatcacaatgcgaacggagtaataccatcgtgcccattattgttatgtatgtcgacggtccccaatcaaacatgccggtaggaagttgggtgcaggcctcgctcaacggcaagcttggtgc

SEQ ID NO: 1947 - DNA, 309 bp, Glycine max
gatccaactctctaaacaacacattaacctttctcattccccatctcctcaccttattcagccactgctaatttctagggttccgaaatggacgctggcggaaagatcaagaagggcgccggaggaagaaagggcggcggccctaagaagaagccggtttcaaggtccgtcaaggccggtctccaattccccgtcggaagaattggccgttatttgaagaaaggaaggtacgcccagcgtgtcggtaccggtgctcccgtttacttggccgcagttctccagtagctagctgctgaggtgcctgagttg

SEQ ID NO: 1948 - DNA, 241 bp, Glycine max
ggctattccgcaccttctctgctaccaatggaattcaacccgatcccaatcggttcgtgctcgaacaaacaccagatgatctatacagagtagttcaattccactgaatcagatcacgataggcacattacggggactgatcccaacacgtttttcgccatgtcgaatttgtcccgcgaagatcctaagcaagtgtactctagtgcacattcacagcgacgacgatatctcagattcactg

SEQ ID NO: 1949 - DNA, 75 bp, Glycine max
ggtggtagtaatcacagaacttagcgtcacaggttccattgcctccgcttccatctcgcatgcatggatgactct

SEQ ID NO: 1950 - DNA, 325 bp, Glycine max
gatccacatcacaaaaattacaacaccaatctcacccatttcaaaaaaaggccgttagtgttactattcgtaaaatggccactcttgttctttaccaattctttctcaaactcttgctcctaatttcagtctttcagctttcctttgctgctaggagactcaaacaactggttcaggaccagtcacagttactccattaccacaacggtcctcttccataccgcaaaatcgccgtgaacctaatctggtatggtcacttcagaccatcccaaaaagccatcatcacagatttcgttacctcactgtcatccccatcgtctcaaga

SEQ ID NO: 1951 - DNA, 292 bp, Glycine max
ggattctgcaacactttcgtttcgtcactctgttgttttcccatccacagtactctctacaatacaaaacctccactttcagttctacaatataagattgttcatcaatggaatgtaatgatcagcgtgtaagtgtaagcttgaagagaaaatcaccagaaaatggagatcatgtactcttcaacaccttttctctggatgaccttaatgaagatctctttgaaaggatactttcatggctccaaacttccacattctttcgcctcaattctgtgtgcaaaagatggaaatc

SEQ ID NO: 1952 - DNA, 246 bp, Glycine max
gtaccgggcacgaattcacgggtcaatacaggcgtcagtaaggctagcaaaaggggacatgccggtgttgcaactaatacttcatgtatatgcatcgtcaggcccttactagatgccaatggtcatgatctaattttaagtgattcttctgatgaccagattgacagttagatgaagccaattcacgttttaaatcgtcccaataccgagttcaattcgtcacaagttgaatgttatcactcaatg

SEQ ID NO: 1953 - DNA, 329 bp, Glycine max
gctctaccgcattaccacccgtcttgggtccgggttaatagatctctgtgaagtcgctttataacactcaacctaagatgcagaacgaggaaggacagttcaccgggctttacattcctaggaagtgctctgccacaaaccgattgattaccgctagggaccatgcttcggttcaggttaacattgggcatgtggatgagaatggcgtctacaatggccatttctccacttttgctctctgcggcttcatacgtgctcagggtgatgccgacagtgccccatatcgcttgtggcaaaacaagaaagttgaagttaagcaacagtaaaca

SEQ ID NO: 1954 - DNA, 340 bp, Glycine max
gatcatcaaatcaaaaaccctaattcccaaattccctcatttttcaagtttcaaccaagaaaagcagcaacaatgtccggtccccgaaaaggttggaaagggttaagaaaaggaagaacaaacaaggctcccaaagtgccccgccacaatatccacggaatcacgaaacccgcgattccgagaatggcgacaacaaggtgcctgaagaagatcaaccggttgatctaccaacagaccaggggcctgctcaagatctttctcgagaacgtcattcgcgatgccgtgacctacacggagcacgccaggagaaagacagtgaccgccatggatgtcctttacc

SEQ ID NO: 1955 - DNA, 187 bp, Glycine max
ggttgtgaatcaccataactcttccgtcttgcgtttctctgcctacaaggattgaaacatgggtcaagcactacgttgctagcaacttgatcagtcaaatgtcgatatcaccgagcattttggcacatttgatcatgtcctacaacctgcatgtcatcacctgccttggtgtcctgcgtaccacctt

SEQ ID NO: 1956 - DNA, 300 bp, Glycine max
gaagggagaaatgaccgaatgctattcacttctaaatcttcgatttccatcgtttcccgtcattgatttcggcgcaaaaatcttccccaaacgtttccccaaatccatttcattctcacacccttcatcgaagtttcaactttgtggaatttcccgagctatggaagtggtcgagggaagtgaagagagtaaagggtcgtcatcccctctaatgaagctcttgttcgtggaaatgggtgtcggctacgatcaacatggacaggacataacggttgcagcaatgagggcttgcaaggatgc

SEQ ID NO: 1957 - DNA, 268 bp, Glycine max
gaaaccacaagtaaaagaaagaagctttcttgagttgagttaacagcatggagagggaggaagatgttaaggttggagcacagaaattctcacagaggcaagcattggggacaggagctcacggtgacaaggactacaaggaggcaccaccagcacccttgtttgagccaagggagttaaagtcatggtctttttacagagctgggattgcagagtttgtggccacattcttgttcctctacatcactgtcctgaccgtcatgggtgt

SEQ ID NO: 1958 - DNA, 222 bp, Glycine max
gatttacgttactcccaaatcgcaattggccaattccaccaaagctcctcacgctcacactcactcatttgcaaagaaagagagagaaatggcactgagggcagccgtgctccgccacgttcgtgtgccactccaagccgctccaaaactgcagccatggcgtgccatgtcatcacacggcgacgatcatctctccaaagaggaggtcgtcgaaagagtcct

SEQ ID NO: 1959 - DNA, 383 bp, Glycine max
gacacgcaactatttctgactacgttttgctctacgcctctccctctctctcaaaaatcgttctcttcgattttagggttttgttttgctgctgcctccgttccccccttctcataaacaacgcgttttctcttctgcttcgtatctattctttgcttttggttttggttgattcaaggccttcacagcattcgttgcggcattttaatcgatttatccaagcaggactgaatgaactaatggagtctaaaggtgggaaaaagaagtctagtagtagtagtagtaaatcattgttctacgaagctcccctcggatacagcattgaagacgttagaccaaacggtggaatcaagaaattcagatctgctgcttactccaactgc

SEQ ID NO: 1960 - DNA, 388 bp, Glycine max
ggcgctcacatcgtgttctctgcggcgcgagctagctagggtttagaacctcgcagttacagaaaacatggcgactgtggtgccaacctccgaagaagacgctgcactctccgtcgttcgattcgcctctgaacttgcctgggccgatgccggtcccgaggttgctgagccccaagttagcagactctgcgtggaggctgaagaattcattgttatgggaaagtggttggagctagcatcattgatgattacctctgctgaattgattttctcgaaggtttctgaaaaagatatagagtccatcttcactatcatctgcaatcttgttacaaagaccgaaaatccagatgaagtgatggagattgtaaaagttataactacaaatact

SEQ ID NO: 1961 - DNA, 382 bp, Glycine max
gtttacctgaacaagcaatctatcaagactcaaaggggacgagaaatactcactgatagtgttgccaaagctgcacttggtaacagcagccggacctcctacagaagagcactaaagaaaggtggcggccatggagggtcaagttccagtgtgcatagaagcagtgctagtgtttcccagaaaatcaggaacaggtcaaggagccaaactaaacatcattaggtgtctgtgaaaagctgcaattcatcagtatttctaagacttgataaaatggaggagtatttttcaaacttgtttttacccagtacttgcttcaacctgtaacccactctgtggaataagaaggctttgctgtgattgttgttgttttgtttcaacctgt

SEQ ID NO: 1962 - DNA, 331 bp, Glycine max
gccctttcttctgcatcactttccattctcttcaacctaacgcagcatcgctatactcttcattccatggctttgcccaatcagcaaaccgtggattaccctagtttcaaactcgttatcgtcggtgatggtggcacaggaaagacaacctttgtgaaaaggcatctcaccggagaattcgagaagaaatatgagccaaccatcggtgtggaggttcacccattggattttttcacaaactgtggaaagattcgattctactgctgggatactgctggacaggagaagtttggtggcctcagagatggatactatatccatgggcaatgtg

SEQ ID NO: 1963 - DNA, 292 bp, Glycine max
gatccatttctcgcaacaatgcttaacctctctcattccccatttcctcacctccttcaaccgctgctaaattctatggttccgaaatggacgctggcggaaagatcaagaagggcgccggaggtataaagggcggcggcccaaagaagaagccggtttcaaggtccgtcaaagccggtctccaattccccgtcggaagaattggccgttatttgaagaaaggaaggtacgctcagcgtgtccgtaccggtgctcccgtatacttggctgcagttctcgaatacctagctgc

SEQ ID NO: 1964 - DNA, 205 bp, Glycine max
ggtggccgctgtgattcccatgaggtcctccccatgccgcatctcccaccctcaatgtcgcccgatcatattgttgtcgtcgatgctcacccaagctctttgtgtggtcaaagttatgatctactcacaatgggtgctagtgagtcatggtggatgatagagatgacaatggatgctggtgatttcttggttcattgttcatgga

SEQ ID NO: 1965 - DNA, 339 bp, Glycine max
gaccctcttgtttgctaatattctcattcttctgtctctgcttcttctccttctgaactaagagatggggttgtctttcaccaagctttttagccggctctttgctaagaaagagatgcgtattctcatggtaggtcttgatgctgctggtaagactaccatcttgtacaagctcaagctgggagaaattgtcacaaccattcccacaattggattcaatgtggagactgtggaatataagaatattagctttactgtatgggatgtgggtggcaagataagatccgtccctttaggagacactacttccaaaacactcaggggctaatcgttgttgtg

SEQ ID NO: 1966 - DNA, 230 bp, Glycine max
ggcgtacacagcctcaacaaccctaacgcgtgcagagcagagagagacgcagccatggggcgaagacccgcgaggtgttataggcaaattaagaacaaaccataccccaggtcacggttttgccgtggtgttcctgatcccaagatcaggatttacgatgttggtatgaagaagaacggtgttgatgagtttccattctgtgtcgcatctggctagttgggagaaggaac

SEQ ID NO: 1967 - DNA, 165 bp, Glycine max
ctttccaaaacgtgaatagtttaaagaagggagttctttatttgtacttctaaatccaactgtttagttaaggggtgtttatctcttgtagagcttttagtttgatttagagttttcttgttgaaatctggttaagtttgtatcaatataattggcttatcattc

SEQ ID NO: 1968 - DNA, 225 bp, Glycine max
gacagtaacaaagactccttttccaatttccttcctttgggttgtgttctgtgttattgggttggattgtgttgtgtgttccatacaactccaactagtcagagattcttgtctgggctacattgcactttgcaccccaaaaagtgaaaggaagagaggcataaacaccccaaaaaatggagagagctcacactaaagtcaccagcttaaaagtagggtttgggg

SEQ ID NO: 1969 - DNA, 351 bp, Glycine max
gactcaccacttcaaaacactcataacacaaagcacaaagcaaagctcatccttgagttaaaaaatggcagcagcttcttccatggctctctcatccccatccttggctggcaaggccgtgaagctgggcccatcagccccagaagtgggaagggtgagcatgaggaagaccgtcaccaagcaggtctcctcaggaagcccatggtacggcccagaccgagtcaagtacttgggcccattctctggcgagcccccgtcctacctaaccggtgagttcccaggcgactaccggtgggacactgctggggcttccgcagacccagaaaccttcggcaaagaaccgtgaactcg

SEQ ID NO: 1970 - DNA, 238 bp, Glycine max
gattacttggttgccgacccttacccttaccctagattatgtgggtgtcaaatgatacccaaccttctcccggctagtcccaagccaaactcttttggcagattatttcagtgtagagttattaacgttctatggattatatgtactttatgcgctcttaagtacttatagataagtagatatgtgtggagtgaataaatgtttttagcaataaacaagccaaaacagttggaaggtg

SEQ ID NO: 1971 - DNA, 348 bp, Glycine max
ggattgaggaaggttaggcgaggaagggaaaaagaggacagaggttgcttgcgcaaatctagctaatctgggctttctgggacaaccagtagagaaagtaaaaggattgagattgagatttgagagaaagagaaagagaaagagaaagaagaggttaaacacacacaaaacagaagaagagaactctcccaccatgccatgcccaaaaccgtactacacaataaagcacaccaaccattcatttccttttgcccacatttactatcccacattatgtttccacagacaatcgcagtgccacagaaccaactaggcactccttcatgtccttagctagtttagttacct

SEQ ID NO: 1972 - DNA, 269 bp, Glycine max
gggtggagtgtgcacaagagactcacagtctcaaccctacttagatcatttgcagcatcaagctcgtgacaggcaccacccatgggtcctgtgcacagccgcggtaacggtatctcgtcttctgctttgccctacaaaaggacacctcctagctggctcaagatctctgcgcaagatgtcgatgaccatatctgcaagtttgcgaacacaagtttgtcgccctctcagattgctgtcattctcacagattcccaccgtattgctcaggt

SEQ ID NO: 1973 - DNA, 189 bp, Glycine max
gggagctgggtttgttttccgcctttggtcttccactctctctccttttctctcgcgaaaaccgtatcaacaatgtctggagaatcagccagcgcgattcacaacggtcaaatcgatctcttagacttcattgactggtctcgggttgaatgcctcaatcaaagctccacccactctctccccaatgct

SEQ ID NO: 1974 - DNA, 240 bp, Glycine max
acgaaagagaaagtggagagtgcagaagaacgacagaaacgacaagtggaagatcaatatgcacaggtcctttctgagtccccaaaagcagcagaagcaagtgagcagaaatcttccaagcctgctcctgcccagggtttgatcctttgatttgcttcttgtattgataaatatacttcctcgtaccgaccttgatttcatccagatcgaaagtgaatgtaggactgatttactgtcgag

SEQ ID NO: 1975 - DNA, 271 bp, Glycine max
gagggttacacgccgtcgtcgctgtttttgtgtgtcgcttcttcgtaggtgcagctgcaatggtgaacggacgccaaggagaacgtgtcagactctacgtgaggggtacagtccttggatacaaaaggtccaagtcaaaccagtatccagatacatccctgatccaaattgagggtgtgaatgccagagaagaagtagcatggtatgctggcaagacagatggctatatctacaacgcgaaggtgaagaagaatggaagccattaccgctg

SEQ ID NO: 1976 - DNA, 383 bp, Glycine max
gggtagatgaggtgaaatgagagcattggtgagagttgagagagagtgagttatgttatcaatgttatggtgaaagtgaaaccacacgcaaagctgaaagagaagctattcagtgattttgattcagatcgtgtctgtgtctacaaccatgtacagcggctccagcgacggcgaaagccatgacgctcctcaaaatcagaggaaaattccgcctgcatcctccatgctatgggtccgcaatcttcgccgtttcatccggatccggcgccggtctccgatcccaagcccctgatggagcttgaaactaagagaattttgctccacatttttaaggaaaagcagcagaaaaccgccgaaactgctacaattcccactttctacaa

SEQ ID NO: 1977 - DNA, 256 bp, Glycine max
ggattgcagcgtcactgttagttattgtatcctagaggaccctatcttctcccacccccttcctatattacataagccttgcatttcattgcatgcccttcttcttgttctgatcttttggggtgtgcgtgtgtgtcacgttgattgactgattgtttgttcgttcctccatcaacgcaattaccatatcggatgagcaacagttctacaccaatccgcgctacatgttttcaccgagggatagccatgtgcgggg

SEQ ID NO: 1978 - DNA, 205 bp, Glycine max
cggggcgtttgtgtttggtcttagacgccggacgccaccaccgtcactgtttcaatcctcgaactgtgtcttcttcgctttctggtctttttattaggttttgttcatcgatctatctccaaacatgccttccagtcacttgcttctccatgaaaccaatatgatggtctccatccttgagccatccaagcctaattttttctct

SEQ ID NO: 1979 - DNA, 358 bp, Glycine max
ggaacggaaaagcactggcgcagctaccctgaggcttctcttctcttctcttctctgtcgtgagtcaccatggtgagggttagtgtgctgaacgatgctctgaagagcatgtacaatgctgagaaaaggggaaagcgccaagtcatgattaggccatcctccaaagtcattatcaaattccttttggtgatgcaaaagcacggatacatcggagagtttgagtatgttgatgaccacagggctggtaaaatcgtggttgaattgaacggtagactgaacaagtgtggggttattagtccccgttttgatgtgggcgtcaaagagattgaaggttggactgctaggcttctcccctcaa

SEQ ID NO: 1980 - DNA, 79 bp, Glycine max
gaccatcatgctcatagggaacaagtgtgatctgtctcatcgacgggcagtgagcaaagaggagggagagcaatttgtg

SEQ ID NO: 1981 - DNA, 223 bp, Glycine max
gtccctgacatgggcaaaagacagctcatgaatcttcttcctcttggtgccatttcactccccactgctggaatgcttattcccgacacctacttctttgtccctccaggttcaggttcttcagctggcggtactgttgccaacgatgccgttgggaatgatctaattgcccagaattggctcacggcacatcgacctcgtcaccgaccccttccgcacggat

SEQ ID NO: 1982 - DNA, 341 bp, Glycine max
gacaacacaacgcaacacaacgcgcactctctcttttctctcttaacacaaaaaccctatcgttcttcgcggtttcgccgattctcgccatgccgaaagccaaatccgacgccaaagccgccgatagccggttgaagcgcaagggcgctggtgctggaaggaagcaatcgacgaaagctgctaaagatcctaacaagccaaagacacgtccaagcgctttcttcgttttcatgtcggagttcagagagcagtttaagaaggagcatcctaacaacaaatccgtcgctgttgtcggtaacactggtggtgaccaatggaaatcgctgtctgatgctgaaaag

SEQ ID NO: 1983 - DNA, 266 bp, Glycine max
gaaatcaagagaattctagagaagattgtgcagccaagcaggaaagattggagtaccaggcttgatgatgctctctgggcacatcggactgcctacaaagcacccataggaatgtctccttatcgggttgtctttggaaaggcatgtcatcttccagtggaaatttagcacagagcatactgggcagtgaagacgtgcaacttctctaggggtgaggttggcgaggaaagggagttgcaactgagtgagttagatgaaatccgcct

SEQ ID NO: 1984 - DNA, 282 bp, Glycine max
gagagccggcttcttcctctgcgcaggaattaggaatattcgacaggtagagtttcttcaatggctcctaaagttgataagaagaatgatccaaaggcccaggccttgaagactgctaaggcagttaagtcaggtgctacctttaagaagaaggtaaagaagatccgaacttctgtcactttccacaggccgaagaccttgaagaaggacagggaccccaagtaccctcgcattagcgccccgccgaggaacaagcttgatcattatcagatcctgaaatac

SEQ ID NO: 1985 - DNA, 374 bp, Glycine max
ggtgagacgagggtaaggtcgcgttgtgttgcgtcgtgtcgtgcgctgttcctctgtctgtcgtttttgttttcagaccaaaccctagctccgcatcgcaaccatgtcgaccaagcaaggtggaaaagctaagcctttgaagaaacccaagtctgataagaaggattacgacgaggttgacatggctaacattcagaagaaaaaggaagaggagaaggcgctaaaggagttgaaagccaaggcgcaacagaagggaagctttggaggttctgggctcaagaaaagtggaaagaaataagggctctttatcatgattgtatacatccaatattgagccctgtagtttattaccatgataacttctgtcttattgt

SEQ ID NO: 1986 - DNA, 219 bp, Glycine max
gagtgcagcatcggagagaaataatggaaaactggtgtcgctgaaactgcataagcgccgctccgcaagcgtgctcaagtgcggcagaggaaaggtttggcttgaccccaatgaagtcatcgaaatcgccatgggcaattctcggcaatacatcatgaagttggttaaggatgggtttatcatcatgaagccaatcaagattcactcgcgctcacgtgc

SEQ ID NO: 1987 - DNA, 300 bp, Glycine max
tatgcttagaatctggggcaattaaggatgtagctgcatgttcttttatttttgtgtgttcttcttggtttcccccaaggattcctgtctgctgtaattttcccgtcacggtcttctataaagaagagaacataagtttgaggcttcagtcctcactttgtgctttaaaccatgtgcagtctatgatagcctgagccctttcgctcagtccacgggatgccccaaagcgcttaattaaaactgaacctaactggctcgttgcatttgaaaacattcatacatacacatacgcatgcaggt

SEQ ID NO: 1988 - DNA, 54 bp, Glycine max
gagacctcaggtcaagcggggctacccgctgagtttaagcatatcaataagcgc

SEQ ID NO: 1989 - DNA, 250 bp, Glycine max
gattcacaactttacccactcttcattctagcaattcgaattcccaatccaaaaccctaataccttcaaagaacctagtagtgaatcagtgatggcacctaaggcagagaagaagccagcggagaagaagccggtggaggagaagaagtcgacggtgggagacaaggctccggcggagaagaagccgaaggccggaaagaagcttccgaaggagggaggagccggcggagaaagggggaagaagaaaaag

SEQ ID NO: 1990 - DNA, 314 bp, Glycine max
atgtataagaatttctaagattccgctcgcacttttataatgccaacaattatattgaattgatactggtatttaatatttacttatacttaataattgaataaaatgtcaaactcactacaatcaattactcgcgagtttcgtccatcgcagatatgaagtgtatatagtatgtataaaaaagaaatattaagattgtaaaatcattcgcacatgccttgtctcgaatgttccagtttgatactatttagaagattcagactaaaaataatgtttaagtttttacaagatcgaggtcatattaatttgtgaaa

SEQ ID NO: 1991 - DNA, 319 bp, Glycine max
  modified_base (277)..(277): a, c, g, t, unknown, or other
gattagcaaaagcaagaagaactagtctaagcagaaatggcctcttcagtgatggcatctgtggccctcaaacctgcccctttcactgttgagaagtcctcagttagaggccttccctccctctcaaggaactcctcttcattcagagttgtggccagtggtggcaagaagatcaagactgacaagccttatggaattaatggtggcatggctttgagggaaggggttgatgcatctggcagggaaaggaagggaaagggcgtttaagagtttgtanacaaataccgtgctaatgtcgatggttacagtcctatctacg

SEQ ID NO: 1992 - DNA, 385 bp, Glycine max
ggaatcacagtggtgccttatcgctgtggttatcatcttcttcttcctctttcttagatctcttctttctctacgccgcacgccgaaaccatggccggaaaaggagagggtcctgctatcggaatcgatctcggaaccacctactcttgcgtcggtgtgtggcaacatgaccgcgttgaaatcatcgccaacgaccaagggaacagaaccacgccgtcttacgtcggattcactgacaccgagcgtctcatcggtgatgcggccaagaatcaagtcgccatgaaccccatcaacaccgtcttcgatgccaagaggttgattggtcgtagattcagtgattcctctgttcagagtgatatcaaattgtggcctttcaaggtcgttc

SEQ ID NO: 1993 - DNA, 381 bp, Glycine max
ggggttttggtgtttgttgttgaatcgtgaaaatgttcagaaaccagtacgacacggacgtgaccacatggagccctgcggggaggctgttccaggtggagtacgctatggaggcggtgaagcagggctcggcggcgatagggctccgatcgaagacccacgtggtcctcgcatgcgtcaacaaggccaactccgaactctcctcgcaccagaagaagatcttcaaggtcgacaatcacatcggcgtcgccatcgctggcctcaccgccgatggccgcgtcctctcccgctacatgagatccgaatgcatcaactataattacacctacgagtcgccgcttcccgtcggcagactagtcgttcagctcgccgataaggctc

SEQ ID NO: 1994 - DNA, 333 bp, Glycine max
gacaacacaacgcaacacaacgcgcactctcgcttttctctctgatcacagctaccctatcgttcttcgcggtttcgccgattctcgccatggcgaaagccatatccgacgccgaaggcgccgatagacggttgaaacgcaaaggcgctggtgctggaaggaagcaatcgacgaaagctgctaaggattctaacaagccagagagacctccaagcactttcttcggtttcatgtccgaattcatagagcagtttaagatggagcatccgaacaacacagccgtcgctgttgtcggtaaagctggttggtagatatggaaatcgctgtctgatg

SEQ ID NO: 1995 - DNA, 293 bp, Glycine max
gacgtctctcagcacagagcgcggcatgctcacccgagaccggtaccagcaatcgggatccatcccattgtcggacgtacatccacacataccaaaacaacagcacccatatccagagaaatctatcctacgcccttggaccaactttatcacttccgtcatcggcgaactggcaacatcttcaatgccgttctacgcaagagattgtccatgaccagggctcacaagccttcattgtccttgtcaacggtgcgtaaatctaccacagggaaagaacatatcagtgctctcat

SEQ ID NO: 1996 - DNA, 349 bp, Glycine max
ggttttacaatttacatcacatttcgttgcgcctctgttctctgtcactgctgcgtctctcgtaaccatgcctaagcaaatccacgagattaaggatttccttctcactgctagaaggaaggacgcagggtcggtgaagatcaagaggagcagagatgtggttaagttcaaggtcagatgctcgaagtacctctacacactttgtgtgtttgacccagagaaagctgataaattgaagcaatctcttcctccaggtttgagtgttcaagacctgtaaaggtacagggcgagagaccaagaagaagcaattcattgattcttctgaacttcgtttctctgtagttgaaac

SEQ ID NO: 1997 - DNA, 311 bp, Glycine max
gagatttctgagagaaaggaaagggtgtgagaagagaatggagagtaaagaggaagatgttaacgttggagcaaacaagttctcagaaaggcaaccaattggtacagcagctcagggtggtggtgacaaggactacaaggaggcacccccaactcccttggttgaacctggttgagcccaaatcaaggtccttccaacaagctggaattgctgagtttgtggcaacgttcttgttcctctacattaccatcttaactgtcatgggtgtcaacaggtcaccctccaagtgtgcctccgttggcattcaaggc

SEQ ID NO: 1998 - DNA, 112 bp, Glycine max
gtgaagtttcattgtgattctttgttgagtcaccatccttcattttcgtgctttgtggccaaattctttttgcatgtcttggatgaatagaacttttactaggttaagtggc

SEQ ID NO: 1999 - DNA, 303 bp, Glycine max
gtgttctgctacatttgaggagtttctttctgttctgatttttatgtatgatgtctaaatcaacattttgttgtggagcaaaacactttaacttttttttttaaaacttacaatgaatgttattttctgcaacaactgggaagaaaaaaaaaaaaaaagacaaataaaaaaaaaaaaaaaaaacaaaaaaaaaaaaaaaaaaaagagaaaaaagacaaaaaaaagaaaaaagaaaccaccaaataaaaaatataaacgaaaaaaaggcgccgcttaagaagttaccagctagaggcgcctcaa

SEQ ID NO: 2000 - DNA, 258 bp, Glycine max
ggagagagaaggggatattcactccacatcgtgtgctcactctctcttctcctaggtgtcgctctcaacgatagaaactaaggtacacatgcacactaattcaaagctctacaactatgtcaccaaatttaaattcacatgggcttctttttaccccttcttgaaagttagaagtctagagtatcacaactagatcaccttgcactacatgccccgttcgtgagatgacgttctaacgaatacgacacttacgatctg

SEQ ID NO: 2001 - DNA, 375 bp, Glycine max
gacagcgaaacagagagtgatttcagtgagtgatcggtgttcacttgatctcatcataatcgtcagcgtcaattgaagaagatgccgatcagaaacatcgccgtcggaaggcctgaagaggcgactcaccccgacacgttgaaggcggctttggctgagttcatctcaaccttcatcttcgtgttcgccggctcaggctccggcatcgcctacaacaagctcaccgacaacggcgctgccacccctgccggcctcatctccgcctccatcgcccatgcattcgccctcttcgtcgccgtctccgtcggcgccaacatctccggcggccacgtcaaccccgccgtcaccttcggcgccttcgtcggcgggaacatc

SEQ ID NO: 2002 - DNA, 322 bp, Glycine max
gattcacaacttcaatccctcttttgctttaccaaattccattttccaattcaaaaccctaactccgttcgaagcaccaaatcgtgatggcaccaaaggcagagaagaagccagcagagaagaagcctgtggaggagaagaaatcgacggtgggagacaaggctccggcggagaagaagccaaaggccggaaagaagcttccgaaggagggaggcgccggcggagaaggtaagaagaagaagagaaacaagaagagcgtggagacatacaagatctacatcttcaaggttctgaagcaggttcaccctgacattggtatctc

SEQ ID NO: 2003 - DNA, 209 bp, Glycine max
aagaaggggtgtcaattaatccaacattcaacgtttctgttatatttggcaaacgggatgagccaatgttagtagcatgtgcacgccagctgattgagcacatgagtttatctggctcctccaggccattggtgctctcacttggtcttaaagaccattctgtggaaacattgaaaggcattgtttctgctgtgatggacaatagcatg

SEQ ID NO: 2004 - DNA, 195 bp, Glycine max
ggagtcttttaacgcatgtttctagacacatacgtcattgggacaagatctcacatcgttcaagcttctcctacttctgccctacaatactctcgaatcttctcttgtgtgttgtacccgcatcgtgaccatcagtgacagtgactgctgtcgacatctcccaatctcacgctgagtgacatattatgtgaatga

SEQ ID NO: 2005 - DNA, 255 bp, Glycine max
  modified_base (191)..(191): a, c, g, t, unknown, or other
  modified_base (250)..(250): a, c, g, t, unknown, or other
gctagtggcagtgaccaaactccatttctcactcgccgtcgtctcttccgtctagggtttctcctcttcacaaaaatggttgccgcaaagaaaactaagaagacccatgagagcatcaacaacaggctcgctctcgtcatgaagagtggcaaattcaccctcggttacaagaccgttctcaaatctcgtangagctccaaagggaaattgattatcattgctaacaactgcccccctttgaggaagtcanagatt

SEQ ID NO: 2006 - DNA, 349 bp, Glycine max
  modified_base (341)..(341): a, c, g, t, unknown, or other
ggcagaggtgtattttctcacttctcagcactcagcagcgatatcagttgaagaaacagaaacaaacaaaagaggcagaagatgttgtgggtggacaaatatcgtcccaaaaccctcgaccaggttatggtccacaccgacatcgctcgcaatctcaagaaattggtaacggaacaggattgcccccatttactcttctatggcccatctggctccggcaagaaaaccctaatcatggctcttctccgccaaatgttcggacctggtgccgaaaaggtgaaggtggataataggacctggaaagtggatgctgggagtagatctcttgatttagagctgancacattat

SEQ ID NO: 2007 - DNA, 382 bp, Glycine max
  modified_base (288)..(288): a, c, g, t, unknown, or other
aggggaatctgaaattgcaatgcttcacccggcggcactgatagcatcgtgtccttatccttatccttatcctgggcggcatgagttaccctcagcctcagcgtcagcgacagccagagtcgctgttccaatgccaaatctgagaggcaaagcggttgttggtgttggttccagaatgataaggtgcatggctaaccccagaagagttcaaatggtggccaagcaaattaggagagagctttctcatatgcttctcaccgataaagtcttgcagtatgctgttcttcncgaagcctccttaggagccgaccgttacctctcttctctcaccaccatcaccgacgtccaagtctccgccgacttgcaggttgttaaggtgtat

SEQ ID NO: 2008 - DNA, 318 bp, Glycine max
acggttttgcgcagttgtcgcagctcatcctccgtaacctccgagctctgcaccgaataacgaagccatggggaagacacatggaatgggatctgctcgcaagctcaagtcccaccgcaggaggcaaaggtgggctgacaagtcatacaagaaatcacatcttggaaatgaatggaagaaaccttttgctggttcatcccatgccaagggaattgtccttgaagagagagggattgaggctaagcagcccaactctgccagtcgtaagtttgccacggttcaacttatcaggaatgggaagagagatgccgcttttgt

SEQ ID NO: 2009 - DNA, 366 bp, Glycine max
ggaacatcaatacatactttagggctgcagtttcgtgctttcccgccgccgctacactgccaccgtcttccccgccgtctccgccagagatggcagaagaggattcaaagcctctgaactacatctccgaggtcattctcaagaagaggaagaacaccgaagcatgggctttaaggaaaaaagaacagttccagcaaaagaaataccaatccatcaagaagccggaggatttcatccacgagtatcgcaacaaggaagtggaccttataagaatgaagcggggggtgaagaggaaagtgcctgaagctaactccaacactctaagtatcagtcggattcaggggaaaaaggacatgcatccgagga

SEQ ID NO: 2010 - DNA, 344 bp, Glycine max
gacatctttcactcgttctctgaaattttaattgacttttctcccctcataaaaaaaacctaccaatggctcccgcaaaggcagagaagaagcccgcggagaagaagccggcagagaagaagatatcgaaggaaggaggaagcgagaagaagaagaagagaacaaagaagagcgttgagacctacaagatctacatcttcaaggtgttgaagcaagtgcaccccgacatcgggatctccagcaaggctatggggatcatgaacagtttcataaacgacatcttcgagaagctcgcccaggagtcatcgcgtctcgctaggtagaacaagaagcccaccattact

SEQ ID NO: 2011 - DNA, 305 bp, Glycine max
ggaccaatcacaattctctgtgaactttctagaatctcgttcttcctttgccttctccttcttcttcaaccctttttctttctcattctttcacactttcattctctaaaaagatctaagtccctttggtcttcatcttctgttctgatccatgtatggcttctaaacgcatcttgaaggagctcaaggatttgcagaaggatcctcctagctcatgcactgcatgccctgtggctgaggacatgtttcactggcaagccataatcatgggacctgctgagtacccatatgcaggtggtgttttc

SEQ ID NO: 2012 - DNA, 350 bp, Glycine max
gactcaccacttcaaaacactcataacacaaagcacaaagcaaagctcatccttgagttaaaaaatggcagcagcttcttccatggctctctcatccccatccttggctggcaaggccgtgaagctgggcccatcagccccagaagtgggaagggtgagcatgaggaagaccgtcaccaagcaggtctcctcaggaagcccatggtacggcccagaccgagtcaagtacttgggcccattctctggcgagcccccgtcctacctaaccggtgagttcccaggcgactacggctgggacactgctgggctttccgcagacccagaaaccttcgccaagaaccgtgaactcg

SEQ ID NO: 2013 - DNA, 359 bp, Glycine max
ggggatgcaagcagagattttttcttacgcaggcagtggacacagacaccatgtcacttattaaccagctctttaacagaggcgttttcggcactcgatgcaaaacatgcctgaacctggcaatttcacgaattaagctgctgcaaaacaagagagatatccaactgaaacaaatgtgcaaggagattagccaattcttgcaggctggccaagaggcaattgctagaattagggtggagcatatcatacgagaacaaaatacatgggctgcatatgaaatattggagttgttctgtgaatttgttctagcacgtgtacctataattgagaaccagagggagtgccccacagaattgcga

SEQ ID NO: 2014 - DNA, 329 bp, Glycine max
  modified_base (293)..(293): a, c, g, t, unknown, or other
  modified_base (324)..(324): a, c, g, t, unknown, or other
gacccttaacctctctgctgcgtttgcttctcctccacccatccacaaacgaacacacactttgattgagaatggggcgtgttcgcacaaagacagtgaagaagtcctcgcggcaagtgatcgagaggtactactctcgcatgacgctggacttccacacgaacaagaaggttctggaagaggtggccatcattccctccaagaggctccgcaacaagatcgcgggattctccagccacctcatgaagcggatccagaagggtcccgtacgtggaatctccctcaagctgcangaggaggagcgcgagcgccgcatggacttcngtccc

SEQ ID NO: 2015 - DNA, 379 bp, Glycine max
  modified_base (373)..(373): a, c, g, t, unknown, or other
gggttctagtgtgtgattgtttgttgttgtaactcgttcttcttcttttgttgttctgtgtttgtgtttgttttttctctcacctgaaaatgtcttgctgcggtggtaactgtggttgcggaagctcctgcaagtgcggcaacggctgcggaggctgcaagatgtacccagacttgagctacactgagtcaaccaccaccgagaccttggtcatgggagtggcacctgttaaggctcaatttgagggtgctgaaatgggtgtgcccgctgagaacgatggctgcaaatgtggaccaaactgctcctgcaacccctgcacttgcaagtgaggtgttgggagagcaagcttcaagcagagatagcccttaattangaataa

SEQ ID NO: 2016 - DNA, 295 bp, Glycine max
gacaccatccactactcttcttagttccagcacaacaagctcttcatttctcccacactttcttttctttcaccaaaaatgtcaccagatttcacacttttgttcttcccggaactcatgcagtcccctatgatcactttccaagccaccctctgcgtccttctcttcaccctcatgttcacgctgctcttcactcctggtgggcttccttgggcctgggcccggggcagagccatcatccctggcccagtaactgccctgttagggatctttactggctccacgcctcaccgtg

SEQ ID NO: 2017 - DNA, 361 bp, Glycine max
gggtttctagtgtgtgattgtttgttgttgttactcgttcctcctcctttggtggcctggggttggggttggtttttcccccaactgaaaatgtcctgctgccgtggtaactgtggttgcggaagctcctgcaagtgcggcaacggctgccgaggctgcaagatgtacccagacttgagctacactgagtcaaccaccaacgagaccttggtcatgggagtggcacctgttaaggcgcaatttgagggtgctgaaatgggtgtgcccgctgagaacgatggctgcaaatgtggaccaaactgctcctgggaaacctgtacattcaaatgaggtgtttggagagcaaacttttagcacagat

SEQ ID NO: 2018 - DNA, 191 bp, Glycine max
  modified_base (159)..(159): a, c, g, t, unknown, or other
  modified_base (187)..(187): a, c, g, t, unknown, or other
  modified_base (189)..(189): a, c, g, t, unknown, or other
atatattttctgagtgaaacaaatttcctgtggatttgatattcggttcttatcattttatattacttgtacgacttggtacatttgccgattagcatcgcagaagagcgaacatatgtgcataaggtttcacaagagtatttggtaaaaattattaanaataaaaagaactcatattacatacaananaa

SEQ ID NO: 2019 - DNA, 281 bp, Glycine max
gaagtaacttaaggtttcaaacctaggaagttggaagtcatggcagcaacattgatggcagcaacaagttctggcactcttaaagcaactcctttcctaggccaaggcaagggtgccaatgccaatgctcttagggatgttgtttccatgggaactgggaagtacaccagtggcaatgatttgtggtatggaccagacagagtgaaatacttgggacccttttcagctcagaccccttcatacgtgagaggagaattcccaggggattatggatgggacac

SEQ ID NO: 2020 - DNA, 321 bp, Glycine max
ggatacagtgtgggcataaaattttcgaagttgaagcgagaacttgccatttcaagggttttagggttagggttttctcaaattgcaaggacatgggtttcaaccttcaaccatatgagattcaatccatgctcaaggaaggccataagcacctttctggcctcgacgaagcggttctcaagaacatcgacgcttgcaaacaactttccactattactcgaacttccctgcgtcccaatggaatgaataagatggttatgaatcacttggacaagctttttgtcacgaacgatgctgggacaattgtgaatgaacttgaag

SEQ ID NO: 2021 - DNA, 278 bp, Glycine max
gttcgcttcttttcctaacctaaaccctactcattctccatacctcaacgaagaggttaaagagacggcaacactttgctgtccgccttgaccgagcagagcttcgtcttggccctcgattttgccctaaagtactctcagtcacaacagacaccgtcgtcgtcgtcgtcgtcatcaatggcaccgaagcagaccaaggctgagaagaggatcgcttacgatgcgaagctgtgcgacctaatggaggagtacggccagatcctcgttgtgaactccga

SEQ ID NO: 2022 - DNA, 302 bp, Glycine max
ggggctctctcttctcttctcttctctctcaaaatcgtttctctgcattttcagctaaacctgagcacacccaactgagattttagcttcagattccgaggtaagaggagaaagaagagaactaagtgctacccagagttcgatttttgggttggtcaacaaggtcaagatgtttctgagcttgatgggtatcatgtagatgaagaggggtgcgtgtgtggattggggaagcaatttgtttatgaagttgaagaagcatggatagagtgacttcgtcgtttatgggttccgtttttgtttgg

SEQ ID NO: 2023 - DNA, 373 bp, Glycine max
ggcccttctagctttttcccagtccaagcagcctccaattcgtgccactctcttcaaaatggccgttaccttctcaaatctccacacagaatcaggtctcaagtccctcgacgacttcctctctgggaaggtctacgtttctggggatcagttcacaaaggacgacatcaaagtgtatggtgctgttttggagaagccaggtgactcttttcccaatgctgccaagtggtacgaggttgtctcatctcagcttgctgcaagcttccccggcaatgctcaaggggtgagattcagtggcaaagcttctgctccggcggaggctgctcctgcgaaaccggatgcttctgctgctgaagatgatgatgaccttgat

SEQ ID NO: 2024 - DNA, 375 bp, Glycine max
gaccctagctcgcgttcttcgttcgtcttttacatcaggatggagtctcaggtgaagcacgcacttgttgtcaaagtaatgggtcgtactggatccagaggacaggtgacccaggttagagtgaagtttctggatgatcagaaccgtcacatcatgaggaatgttaaaggaccagtgagagaaggagacattctcaccctactcgagtctgaaagggaagctagaaggttgcgctaagagggtccttctttcttgatctttatggtagttagtcggtgctaaaggttatagcaccctatcttgtcttggatctattttcattcgaattatggcttgagttttgctgttttgagtctaagcttcaaggttgaagta

SEQ ID NO: 2025 - DNA, 313 bp, Glycine max
gaggcgcggcgggatcagcacaagattgcaaaatgaagttcaacattgcaaatcccaccactgggtgccagaagaagctggaaatcgatgacgacctgaagcttcgagcattttgggacaagaggatctcccaggaggttcttggtgatgctctgggtgaggagtttaaaggatatgttttcaaaatcaccggtgggtgtgacaaacaaggattccctatgaagcagggagtgctgacccctggtcgtgttcgacttttgctccatagaggaactccttgtttccctggatatggaaggcgcaatggagagcg

SEQ ID NO: 2026 - DNA, 361 bp, Glycine max
atgcgtgaattgcttacaacatgctagaatagggttttcaagtttaggctaagagtagggtttccttaggcttatattcacagagggtcctagtgttggatgccttagtctctttttccgggtgggaattgtagaatgcttgtgattgcttgtaaggattcttaatgcatagtgaaaatctaattcaggttgtggactagacaattggagtagcttttctagaaatagagagtgaaccagtataaaagattatatctttgtctcttggttcatatctttcactcattgaagttttattcaatgtttgaaaagattcaagttttatgattttgaaagaaaggaagttaatgaaggatgatgt

SEQ ID NO: 2027 - DNA, 314 bp, Glycine max
ggttcatccactaatctgattatggtggcttctacaaccctgatgctgtttgctggaaggtttggattggctccatcagcaaacaggaaagccactgcagggctaaagctggaggtgatggactcaggcttgcagactggtgaccctgctggcttcacccttgctgacaccttggcctgtggatctgttggccacatcattggggttggggttgttcttggtctcaagaacattggtgccctgtaaaaagcaactatataagtttagtgcttgatgcatctgtaatcaatgttagtatgtacttcattttcaca

SEQ ID NO: 2028 - DNA, 387 bp, Glycine max
gggtcgtgtgttgttgtatactataatagcagaatcgtgagtaacagcagagcagaacaccgataaatcgctatgactgctcagacccaagaggagcttcttgcggccgaccttgagcaacaaaagatccatgatgatgagcctgtagttgaggatgatgatgaggatgacgaagatgacgacgatgaggatgacgacaatgttgaagaaggtgatgcatctggtaggtccaagcagaccagaagcgaaaagaagagtcgcaaggcaatgctcaaacttggaatgaaacctgtcacaggtgtcagtcgtgtgactgttaagaagagcaaaaatatcctgtttgttatatcaaaaccagatgttttcaggagcccgacttctgacaca

SEQ ID NO: 2029 - DNA, 352 bp, Glycine max
ggacaaggaaagtgaaagtgagagagagagagagaaacttcgaggaaacaaccttcaccgttcaattcatcaacatcaattgaacaacaacaacatcaaaacatatcccattcttattcttatcatttctcaatcactgccacactgatactactgacacgcccacctaccaccttaatgctcttcaactcccactactgcctcactctctctcaggcccttcaaggttttctttaggataaagaatttatgggtggatcaatttcaaaacggaggcgttctaagcaacattcgtcaaatttttttcctcggtatcagcaacctcatttcccacaaagccaagataatgggt

SEQ ID NO: 2030 - DNA, 171 bp, Glycine max
ggggcagagcaaacttgctcctcggtctttatcaccaatgtgtaagataggtcccatcagctcatcactataaaatagaataggtgagtcgaaatcactaagcacaccggtctaactactgaacggctccacagaagcaattggcatagaaatgtcctctcacatcaacat

SEQ ID NO: 2031 - DNA, 321 bp, Glycine max
ggtgtatcaatcggccacacagaaatgggcagtgcttctctgattccagtttcctggttgccttggcggccactttctcctttcaagggaacggtgaaaaccttggtcgcaaaaccatggctgaagaagattcagcaagcaagacccctcatttccgtggttaacaaggctgcctctctatcttcccccgtgacagcacccagcgtcggcgttcggtttcgggtggagagtttggggccgcaagcgggttcgaggaagagggctaagagaaagggtagaggaatatccgcagggcaaagggcaagttgtgggtttgggatg

SEQ ID NO: 2032 - DNA, 265 bp, Glycine max
gagccatagaatttcacattttatcttttgcattgagcaactaactcactcgcgccatggctgctaccatcatcaccacatgcaagctctcactgcttttgagtcttctctcagtttcacttttgctgggtgtgaggtctgatacccttcagaatgtaggcgcaattccccccacatgcaagcgcatagagtgtcccagctatgatgtcattcacgtaggcaacggctacgaaatccgtcgctataattcacccgtttggatttc

SEQ ID NO: 2033 - DNA, 62 bp, Glycine max
aacaaatttaacctttacaaaatcttgaaatagtttgtaaagacttaaagaagagttaaggc

SEQ ID NO: 2034 - DNA, 226 bp, Glycine max
gagaggcaaagcaaataagcagtaatagatctgactctgattttcagaaagcaaaatgcctggtttcaacggcgatgaaactgctccgttcttcggcttcctgggcgcggcgggcgccctagtagtctcctgtatgggagcggcgtacggcacggccaagagcggggtccgcgttgcgtcgatgggcgtcaagagaccggagctggtcatgaaatccatcggcccg

SEQ ID NO: 2035 - DNA, 294 bp, Glycine max
gagcctcagcgggtgcagtacgaggagaagcattaggtgcaaattcattggcgccgaagaagccgagaaccacgacaaggaaccctgatttggttaggtggattggcaagtattcgacgtcgcagatgtaccacaagaggggcatctgggccatcatggccaaaaaccgtggcgttttgccccgccacgattgcaaacccaatcccgaggccccggttcagaggccggccaagttctacccctgcgacgatggttagaagcccctcgtcgacaagcacaatcgcaaatccgcga

SEQ ID NO: 2036 - DNA, 288 bp, Glycine max
gatcaatagcaccggagaatagaatagcccatggcttcttccaacaaaatgaagatcatcaagtcaacgttccttgttttgtgcctcttagcctcgtcgttcctctgtccaatcaaggctcacggaggaagcggtgattctcatgacgatgaatctgatatcgaaggtttgcagtctcggggtctgatcgtggtgaaaatatggtgtttgatcatcttccttgtgagcactttcgctggtggggtttcgccgtagttcgaccgttggaacgagtcgttgcgtcttttg

SEQ ID NO: 2037 - DNA, 358 bp, Glycine max
ggggcatagcaaaatcgtttctccaatttaatcaccattgtacaacccaattcccttcgtcgttttcgattaagagagcaatggcacgtaccaagcaaaccgctcgcaagtccaccggaggaaaggctccgaggaagcaattggcaaccaaagccgctcgcaagtcagccccggcgaccggcggagtgaagaagccccaccgcttcaggccaggaacggtggctctgagggagattcgaaagtaccagaagagcaccgaacttctgatccgaaaactcccattccagaggctcgtcagagaaatcgctcaggatttcaaaaccgatctccgctttcagagcagcgccgtttcggctct

SEQ ID NO: 2038 - DNA, 365 bp, Glycine max
gatgccgaaaagtagtaccaagatggcttcagttgtgtatctcctctttggcttccatctcattgttatcatgtcaagttccttacccgcaactagtgaagtgtttgcaaaacagtatccatccacagaacccgtggaagaaaaactcacccaactccacttctatttccataacaacataacgggggaacacccaactgctatgaaaactgttttgcctcctaaggggtccattcatggttttggggctacttacatgatggatgaccctctaactgaaggaccaagtccaacttcaaagcttgtgggaagatctcagggaatatacgctttggcttcacaacatgagcctgggttgctcatgg

SEQ ID NO: 2039 - DNA, 354 bp, Glycine max
ggctctgctcgtgcctctagggttatcatttctccatttccattttctctctcacttttcaagaatcgtaagctatgggaaagtcttacccaactgtgagtgctgattaccagaaggccgttgagaaggcgaagaagaagctcagaggcttcatcgctgagaagagatgcgctcctctaatgctccgtttggcatggcactctgctggaacctttgacaagggcacgaagaccggtggacccttcggaaccatcaagcaccctgccgaactggctcacagcgctaacaacggtcttgacatcgctgttaggcttttggagccactcaaggcggagttccctattttgagctacg

SEQ ID NO: 2040 - DNA, 375 bp, Glycine max
aacgtagcaacggtataataattcagtatgatgataatgctgcagttgtcattgatcaagaaggaaatccaaaaggaactcgaatcttttgtgcaatcgcccgggaattgagacagttaaatttcactaaaatagtttcattagcacccgaggtattataagacgaaactgtgctatggatacattatttttttgtgaaatagattaattaatctattttatctaacatatatcccttttgtagtaattattagaatttgtagtaattattataagtattagaagcagcaattcttatttatttcagattaatacttgataacctaaacaatatatctatatatagaatatagatagatatatatataatagaac

SEQ ID NO: 2041 - DNA, 274 bp, Glycine max
  modified_base (206)..(206): a, c, g, t, unknown, or other
tggggcgcaggtagagagagcgagagaacacgaacatatcggaaccacagctgcggtaacagaagaacaatcacagaatgggtcgagtgagaacgaagacggtgaagaagtcctctcagcatgtgatatagcgtcactactcgcgcatgaccctggacttccacacgatcaagaagcttctggaggaagtggcgataatcccgtcnaagaggctaaggaaacaggatcgcggggttctcgacgcacctgatgaagcgcatccacaatggccctg

SEQ ID NO: 2042 - DNA, 268 bp, Glycine max
gatccacacctctctctctctctcagaatttctatctatctcttgtttcaatttcaacaacggttactcctttttcgttttgagtttcaatcaagccatcatcatgtctaccgcatcgcaacccaaggccaagaaaacggcgtcgtccaagaagcccctctcccagcctcccttcgccgtgatgatagcagaggcgattgggagtctgaaagagagaaccggttcgagccaatacgcgataaccaaatacatccaagggaagcacaag

SEQ ID NO: 2043 - DNA, 297 bp, Glycine max
gacaaactcacaccacatccatctttgccttctgcatgttggttctctgtaaacagatactgcaaaagaagaataatattgaatatttggttgggttgaatccctgggttgaagcgttgcagacatcacggctattctaagagtgtctcgctctctcattcatgtcccaactgtacgacggaggacaggttgcgtaactgccagcaacccttcgccgcacggtgggcgtggtgctttgccttctgaaggtggtagcccttcagacttgctcttcttagctggtggtggttctgctgt

SEQ ID NO: 2044 - DNA, 379 bp, Glycine max
ggaggaacttaatggtaccagagtaaagtattgcggaagaaaagaaaaacgaaatccctcgctttgagaaatgggtgtagtactcttccggtgggttctgccactgactctgttgctcacttgcgcgttaggtttccaatcggacgagcttctcctcgacgaccaagagttcggcatcgagggaggacgagcctccttcgattccgattcgcacccatctcccacctccaccttgaggaagagcttttctgactcgtcctccgactccaagatccacttccctctccaacacgctttcggcgactccgatttctccgacgccggcaacttctccgctcgccttaagacgtggagccactgcgtccagacgctgacgaag

SEQ ID NO: 2045 - DNA, 95 bp, Glycine max
agtaccatgacgacgtgaccgtaattgtaatcatgcttgggatgaatcagcgtacttcaaaggcatcaacttgcatttaagacttgccacttcag

SEQ ID NO: 2046 - DNA, 385 bp, Glycine max
gggtggcaaaagaacaacgaaggggggacgaagttaatggtaccagagtagagtacagccgtagaatggaaaaacgaactccctcgcgttgagaaatgggtgtagtactcttccggtgggttctgccactgactctgttgctcacttgcgcgttacgtttccagtctgacgatcgtctcctctactaccaagagttcggcatcgagggaggactagcctccttcgattcagattcggacccatctcgcacctccaacatggggaaggacttttctgactcgtccaccgactctatttatctacttccctctcgaagacgctttcggcgacgccgaattctccgaacgcttgcaacttctccgcgcgccttaacacgtggagccac

SEQ ID NO: 2047 - DNA, 378 bp, Glycine max
gaaaacaaacaacacagtttttcttgtctctatattcttccggccaccgcagatggcggcggagcacgacagctgctgctcgcgctgtgtcaccttcctaataaccataggcctcacagcgctcttcctatggctgagtctccgcgttgacgaaccaaaatgctacctcgactacatttacgttcctgccctcaacaaaaccctaaattccaattccactcacaacaaaaacaccacaatactcttcgctctcaagctcaccaacgggaacaatgacaaaggcatccaatacgacgacgttctcctctccttcagagtcttcgagagcgtcaacctcacgcgcccactcggcaacgccaccgtgcaaaggttctacca

SEQ ID NO: 2048 - DNA, 174 bp, Glycine max
gagaacacaagacaacgcgcactctctctttttctctctgttttttgttctctcttcgcttaaaccctatcgtgcgtcgcgttttcgccgattctcgccatgccgaaagcgaagtgggacgccaaaggcgccgatagcaggttgaagcggaagggcgctggtgctgggaggaag

SEQ ID NO: 2049 - DNA, 306 bp, Glycine max
gacacctccttttttccccgatgctaactctacaagcttcgtctcgtaaagaaaattcgaaagctcaatagagaggactcaattgaatcatcaaatgaggacagtgatttcgcgcttgatccattccacgccttccatttccaggctcaatgccacggtagtgtcaatcagcgggagaaatctctgcacagattctaacaaagttgatgggccattcaaagttgaagaagcagagactgtaaatgtgcctccactcccaacagaaaagttgcttgtgttgagaggaaatgggtttgtggtctcaca

SEQ ID NO: 2050 - DNA, 115 bp, Glycine max
gggtgaaccaatcgtatgttattggtacatccacaaaggtggatatctctgatgtcaatgttgataaatttgatgacaagtactttgccaaggaagctaagaaaaagaaaacaaa

SEQ ID NO: 2051 - DNA, 55 bp, Glycine max
aatggaaataaacaaaaagactgcaaaagcacaagctactagaatcattcaatcc

SEQ ID NO: 2052 - DNA, 242 bp, Glycine max
gctcttcatcgtagcgccagactgagaggaagggagagggagattctttgtttgctaccttctctcggaaaaatggttacgttcaggtttcaccagtaccaagtggttgggagggctcttcccacggaagcagatcagcacccgaagatctaccgaatgaagctctgggccaccaacgaggttcgcgcgaggtggaggttctggtattttctgaagaaactgaagaaggtgaagaagagcaa

SEQ ID NO: 2053 - DNA, 342 bp, Glycine max
ggcagttcaattccaatatattccattctctctgtgtatttccctacctctcccttcaagatgcagatcttcgtcaagaccctcaccggcaagaccatcacccttgaggtggaaagctctgacaccatcgacaacgtcaaggccaagatccaggacaaggaaggaatccccccggaccagcaacgtctcattttcgccggaaagcaacttgaggacggccgtacccttgctgactacaacattcagaaggagagtactcttcacctcgtcctccgtctccgtggtggcatgcagatcttcgttaagacactcaccggcaagaccataaccctagaggttgaa

SEQ ID NO: 2054 - DNA, 308 bp, Glycine max
gacaacacagaacaaaaacaaagaaaaaaaaaaacccttagccaacacaaccatcatggccacctctgctattcagcaatcagcattcactggtcaaactgctctgaagcagctcaatgagttcgtccgcaagaccggtggcgccggcaaaggtcgcactaacatgcgccgcaccgtcaagagtgctcctcagagcatttggtatggccctgaccgtcccaagtacttgggtccattctcggagcagattccatcatacctgaccggagaattccctggtgactacggatgggacactgctggattat

SEQ ID NO: 2055 - DNA, 370 bp, Glycine max
gcatatcagaagctcagacctagggatttcggccgtttgctccccaaaaaggaaagaagcagattctgtcctttgaaatcaacaagaaaagatgtcaggtgaagaggtagctgttgcagttgaggtacctgctacttcaattccaggtgagccaatggacatcatgactgctctacagcttgtgctgagaaaatctctggcctatggtggtcttgcacgaggtcttcatgaaggtgccaaggtgatcgagaagcatgctgcacagctctgtgttctagcagaagattgtgaccaacctgattatgtgaaactggtgaaagctctttgtgcagagcacaatgttagtcttttgacagttccaagtgcaaag

SEQ ID NO: 2056 - DNA, 315 bp, Glycine max
gacaccatccactactcttcttagttccagcacaacaagctcttcatttctcccacactttcttttctttcaccaaaaatgtcaccagatttcacacttttgttcttcccggaactcatgcagtcccctatgatcactttccaagccaccctctgcgtccttctcttcaccctcatgttcacgctgctcttcactcctggtgggcttccttgggcctgagcccggcccagacgcatcatccctggcccagtaactgccctgttagggatctttactggctccacgcctcaccgtgctttatccaaactcgcccgt

SEQ ID NO: 2057 - DNA, 360 bp, Glycine max
ggtgcctggccatccggtttcccagatctgctccttcctcaccccacaggctgatactagactgtaactttcagaagtcagttgaagagcatgggtcgtggagttagcagtggtggtggtcaaagttccttgggttatctttttggcagtggagaggcccctgccgcaaaaccggcaacaaacaatgccccagcccaacctgaagtgcaggctgtaaataatgcgcctccttcaaaagcatctcctcctactaaaacaatagaccctaacaaggctgctggtataaacagtcattctactgatggccagaacaccggcaacttcatcacggaccgaccctcaaccaaggtccatgctgcc

SEQ ID NO: 2058 - DNA, 66 bp, Glycine max
cacatagacccatgaatccatacatctcgatcgaaaaagaatcgaaattgatgaatatatctctcg

SEQ ID NO: 2059 - DNA, 366 bp, Glycine max
gaacatcaaggaatgaaaggaatgggtaacatctaacataaggagatccaaaaagtcaagacattcatgaaaatcatccaagcaacccaatcatggcaaaatagttaatcagctcaagaatgaaaagtgataaagcctcacaagatatacactctatctctcaagtgtctaggctactatttaccctcaaagcacccatgaaagcaaacaccacataaacttggcaagattctaaaattgacaatcaacccataaacacaagcacatgaggatcaaaaggtcttttaaggttgtaatggggccaaggacaaggtatggagaaatatggaataagtggctaaatcccaaaggaatagaggagcaaag

SEQ ID NO: 2060 - DNA, 351 bp, Glycine max
ggaacctgatcgatctctttaccagttgccacactacaccgagattccccctaaacccgtttgcgttgttgtttgcgaagaaatggcgactaagaggagcgtgggaacgttgaaggagggtgatttgaaagggaagagggtgttcgtgagggtcgatctgaacgtgcctttggatgacaaccttaacatcaccgatgacactagagtccgtgctgctgttcccaccatcaagtacttaactggtcatggaaccaaagtgatcctttctagccacttgggacgtcctaaaggtgtaacacctaaatacagtttgaagcctcttgtgccaaggctgtcgcaacttctcggaat

SEQ ID NO: 2061 - DNA, 316 bp, Glycine max
  modified_base (223)..(223): a, c, g, t, unknown, or other
gacacttcaaaatcctctggtaacccttattttatctattctctctctttcttttgtgttctaagcagctagaagcaatggagaggaaaagaagccatgcctctttcaccaagtttgcaatgcttgttggagtgatctctcagagccttgtcattcctgtagtatccaccactgttgaagatcagaagaactactacaccccagattcacatgctggaagtcncccctcaggctcacacagtagtactcctccatctcatggccatggaagctctccaccctcacatcatcacagtagtccaagtactccatcaac

SEQ ID NO: 2062 - DNA, 336 bp, Glycine max
ggatagcagctactcggtccatatggaagctcagaaatgatgtgatctttcataatcagcctttccacatttctaagttggtggataacactaacttcctcacttggtcctggttgaggggatgggaaaaggacttcaatgccccttttcaccaatggtctacagccatgcctatggcctttacttagctagtggtctgttgggttaaggattttgggggcttcttgtagggcatttgtgttatgtatttttggactcatgatcctggagatgttatctccttcttctcttgtagtacctctggtactattatttggttaatatatatattagatc

SEQ ID NO: 2063 - DNA, 370 bp, Glycine max
ggcactgcaactttgctctctgtgaggcttcaatttccaattagggtttcgcttagagtaaccaattaccatgggagtcttcacctttgtcgttcgcaaatccggcgccgaatggagcgccaagcaacattccggcgacatcgaggcctccgccgactccacctacgatctccaaaggaagctcgtgcaagccgctctcgccgttgattcctccggtggagtccagtcctccttctctcccgtgtctcctacctccgctgtgttccaggtgatagtgggtggtgctgtattcgttggagggtgcggtggtgctgttgcagctgcacctgcaggtggtgctgctgcagctgatggtgccccggctgctgag

SEQ ID NO: 2064 - DNA, 351 bp, Glycine max
gccgctgagctccctttctcctcggtccacagagacaaaatgtaagacaggtgccaacagttcatcacgaaagaaaggactagctgagccgagatcactaactaaaacgaatttaatactaatcgaaaatactaatagaatagaaatagaactgtcttttcatatagatatcccttcaacacaacataagtcatcgaaaggatctcgaacgaccaccaacgcacgaaagccgggatctttcagaaaatggattcccattcgaagggtgcataaccgcatggattagctcacactaacccgtcaatttgggatccaattcggttccttaagaggtatcgggaaggaattttg

SEQ ID NO: 2065 - DNA, 383 bp, Glycine max
gattcacaacttcaatccctcttttgctttaccaaattccattttccaattcaaaaccctaactccgttcgaagcaccaaatcgtgatggcaccaaaggcagagaagaagccagcagagaagaagcctgtggaggagaagaaatcgacggtgggagacaaggctccggcggagaagaagccaaaggccggaaagaagcttccgaaggagggaggcgccggcggagaaggtaagaagaagaagagaaacaagaagagcgtggagacatacaagatctacatcttcaaggttctgaagcaggttcaccctgacattggtatctcaagcaaggccatgggaatcatgaacagcttcatcaacgacatcttcgagaagcttgcccag

SEQ ID NO: 2066 - DNA, 373 bp, Glycine max
ggcgaaacagagagtgatttcagtgagtgatcggtgttcacttgatctcatcataatcgtcagcgtcaattgaagaagatgccgatcagaaacatcgccgtcggaaggcctgaagaggcgactcaccccgacacgttgaaagcggctttggctgagttcatctcaaccttcatcttcgtgttcgccggctcaggctccggcatcgcctacaacaagctcaccgacaacggcgctgccacccctgccgggctcatctccgcctccatcgcccatgcattcgccctcttcgtcgccgtctccgtcggagccaacatctccggcggccacgtcaaccccgccgtcaacttcggcgccttcgtcggcggcaacatca

SEQ ID NO: 2067 - DNA, 274 bp, Glycine max
caccaccaccatgctcgtggaatctccaatgctcatgaaccaaatgctcgctccatataaaattatataattatgactaggattcagaacaagacttgatgatgattagcttaattctcattaattggggctagagtactactgttgttgaggatactttattttataattaagggctggaaaggaatttataaaatcccaaatctaaataaggtgcatctttaatttatgaaatcactttgttttaacctttgtaaaaaaaaaaatttttttt

SEQ ID NO: 2068 - DNA, 351 bp, Glycine max
gagagagaaggctccatttataaaacatcgtgtgcgtactcgctcttcacctaggtttcggtcccatcaacttcagggatggtgcaaacgtccacttatcgcaagtctcagagctatgctactagttccaactaactacgggttgttaagatccctgatggcgaattggtgtactataacatctagttgagagcacgtggacgtaactgccctgtcagtggtaagaagatccaatggattctatacttaagtcctgctgaattcaagaggtctagattgccgatgaatcgcatgacagtagatcgatcctatcgatgtctgttatcctggggagctgttacagagttgatt

SEQ ID NO: 2069 - DNA, 354 bp, Glycine max
gagcagcgaggagaggaatcagaatcgcgttagggagaagaagagaaaatcgcaggtgaaaatgagcggaacggtgaagaaagtaaccgatgtagcattcaaggtgggaaggaacatcgattgggatggaatggcgaagcttctcgtctccgatgaggctcgcagggagttctccaatctccgtcgcgctttcgacgaggttaactcccaactcgaaaccaagttcagccaggaacctgaacccatagactgggattactatagaaaaggaattggcactcgcttggtggatatgtacaaggagcattatgagaacaatgaagtccccaagtttgttgacacagtaactcctca

SEQ ID NO: 2070 - DNA, 349 bp, Glycine max
  modified_base (71)..(71): a, c, g, t, unknown, or other
cggggatggtgaggacggtgaataataacaagctgcgattggattatggagtggcattgcttggttggtanggatgactgtgttcattgctgtgttgtctgaatatgtggtggatacaattgaggatgcatcagattcgtggggtttgtctgtgagctttctcagcataatcttgctaccaatagttggaaatgcagctgaacatgcaggagcaatcatatttgctttcaagaacaagctggacatttcattgggtgttgcattgggttcagcaactcagattgccatgtttgtggtcccattatgtgtaatcgttgcttggataatgggtatcgatatggacctgaac

SEQ ID NO: 2071 - DNA, 365 bp, Glycine max
gaggaggaggccgatcgatggcggcgactcggatttcgatttggatgtggaagatggggagttggagttcacggaaggggatgatgcctttgttggtttgaagtttgactagtgatgatgatgcagcagcaatgggtgatggaaattttactgcttttttttttgttgctaattctaggaggagtagcagcatatagggtggtagagtagtgtttttggatagtgttttttgcacagattatttgtggagaaacaactgaaaacaaagtatacgtgttgatttggggttttgtcattttggtaaagaggcattaccttgttcatattttaccatttttgtaatgccccttttgatttgatgacct

SEQ ID NO: 2072 - DNA, 342 bp, Glycine max
gaatccaacagaacagaactagtaccatgttgctgtcacaagccaaactgcacaacaacaacaacatctccaatgccattaacatgattatgaagaagaagggtaataacaataacaacaatcattgttcacctgctatactttatcactacccttgccctgatggtgcttttgctgcccttgctgcacacctttactttaaggccacttcatcattctctcctcttttctttcccaacactgtcttcaaccccctcagtgctgaagatcttcctctgaatgaaattggtgatctttatctcttaaattttgtggggcccgatggttttgttcaagaaatct

SEQ ID NO: 2073 - DNA, 380 bp, Glycine max
gattcaccacaaccctctctctatattccattgccacccagttttgaatatatttttattccttctttgtttcttcactttcttccatacacataaccatgtcttctcagactgttgtcctcaaagttggtatgtcatgtcaagggtgtgctggagcagtgaacagggttttgggaaaaatggaaggtgttgagtcatttgacattgatctgaacgagcagaaggtgacagtgaaaaggaaatgtggagccaagaatgaagttctgcaaagccttgttccaaatctgggaaagaagactgcattctggggtggataaagcaccacaatctagaaaacaagccttttagaaagtgcacctgttgcctcagaaaacaagcct

SEQ ID NO: 2074 - DNA, 328 bp, Glycine max
gactgcgaaccagtagggactcccattccgactcttagccgccgatctctcagggcttgcatcttctcaggtaagctgtgaagatgtacacatcaaggaagaaaatccacaaggataaggatgctgaaccaactgaatttgaagagtcagttggacaggcattgtttgatctggaaaataccaatcaggagcttaaaagtgatctgaaggatttatacataaactcagccgtgcaagttgatgtttctggaaaccgcaaggctgttgttattcatgtcccttacagattaaggaaaggtttccgtaagattcatgttaggcttgtcag

SEQ ID NO: 2075 - DNA, 83 bp, Glycine max
gagacaagggtggcatcgcggtatacgcgatagacaccgattttggactatatgggaatgccgactttgtttcatcgcgttcg

SEQ ID NO: 2076 - DNA, 356 bp, Glycine max
gaacagcgaaacagagagtgatttcagtgagtgatcggtgttcacttgatctcatcataatcgtcagcgtcaattgaagaagatgccgatcagaaacatcgccgtcggaaggcctgaagaggcgactcaccccgacacgttgaaggcggctttggctgagttcatctcaaccttcatcttcgtgtccgccggctcaggctccggtatcgcctacaacaagctcagcgacaacggcgctgccacccctgccggccgcatctccgcctccatcgctcatgcattcgccctcttcgtcgccgtcgccgtcggcgccaatatctctgggggcaacgttaaccccgctgtcaacctcggcg

SEQ ID NO: 2077 - DNA, 348 bp, Glycine max
ggaaacacagtgtcagaatctgagttctttgaactcaaaccctaaaaaaaacgatgtatcgttttttgtcttccattcgccatggctgtggatcttccctcacatcacttctcgcgccgaaacccacccttccattcgacgccgccctacgatctcgccgtttacctcaaaacgacggacatgttagaggattttcaagctcgaattttgattggaggaatcttattgtgaacgagaatgtgaatgcagatgattctatgcaggatgcagagaacagaaactccgaaaagtggaataatatgaggctgaatatgaatgcagatgcaaaagctcctccagattttgtgc

SEQ ID NO: 2078 - DNA, 371 bp, Glycine max
gacttgctataatgttacataaagctaaggagaaatattgagaagcaggaagaagcaagttatggcgacgaagcagcttccgcagatcgccattctgggagctggtatctttgtgaagactcagtaccttccgagactctccgagatctctcatcttttcattctgaaatccatttggagccgcactcaggaatcagctacagctgccgtaaacatagctcgtaagcattttctccaagtagagactaagtggggagataacggttttgatgacatcattcacgatggatcaatcgatgctgttgccgtggtcttggctggacaaaatcacgttgacatctcactcacgttgctaaatgctggtaaacatg

SEQ ID NO: 2079 - DNA, 384 bp, Glycine max
  modified_base (320)..(321): a, c, g, t, unknown, or other
ggttgacaaaggaaacgtgtagtacgagggccaatttccaaaaaccttttgtctcgcaacctcacctcttcctccttcaatctctttcggaatttcccaaaatccttagtgggaggaagagatggttctgactcagaagattcacgaagctttcaaaggcaccgtcgagaggatcactggcccccgaaccgtttccgccttcaaagaaaaaggagttctcagtgtctccgagttcgtcaccggcggcgataatctcgttggcaaatgccccaactggtcctgggaatccgggtgatcaggcaagaggaagccatacttgnncactgagaaacagttcttgattactagaaatgtgccttgtcttcggagagctgcatctgttga

SEQ ID NO: 2080 - DNA, 353 bp, Glycine max
gacagcaaaacaattttcaaactcaattaccattccataacctaaatctcctctttgtttccgagtcagagagcaatggcacgtaccaagcaaaccgctcgcaagtccaccggcggaaaggcgccgaggaagcaattggcgactaaagccgctcgcaagtcagctccggccaccggcggagtgaagaagccccaccgcttcaggcccggaacggtggctctgaaggagaataaaaagttacagaagagcactgaacttctgatccgaaaactcccattccagaggctcgtcagagaaatcgctcaggatttcaaaacagatcttcgtttccagagcagcgctgtttctgcgct

SEQ ID NO: 2081 - DNA, 370 bp, Glycine max
  modified_base (81)..(81): a, c, g, t, unknown, or other
ggtacacagcctcaacaaccctaacgcgtgcatagcaaagagagacgcacccatggggcgaaaacccgcgaggtgttatangcaaattaagaacaaaccataccccaagtcacggttttgccgtggtgttcctgatcccaagatcaggatttacgatgttggtatgaagaaaaagggtgttgatgagtttcctttctgtgtccatctggttagttgggacaaggaaaacgtttctagtgaagccctggaagctgctcctaatgcttgcaacaagtacatggccaaatttgctggaaaggatgcattccacttgagagtcagggtgcacccattccatgttcttacgatcaacaagatgctttcgtgtgct

SEQ ID NO: 2082 - DNA, 342 bp, Glycine max
ggcagcaggagcaggatgtccatctctctacccgtttccatggcaaccacaatccattccttaccctattcacttctcaaactcaaaccaccctccctcaccccatctctatttcgccgcacgctctttcccaattcaactctcaacgccgcccctaaacgcaccgtttcgtccaccactttctcactgacgctcactaacggaacctgcaaaaccagacacgttgccgccaaatcatccgaagccgacaccggaaacacttccacctcgctaacccaaaccgtgtttggggtgcttcatttggcggtgtcactgggcctcattctcgcggtggacaagttt

SEQ ID NO: 2083 - DNA, 375 bp, Glycine max
ggaaattctaagagcttgttccgtcgtcccccaagtgctgcagagccgcattttgcttgcaattcagaaactttgtgcgtagaggggacgaaacaatacaatggcttacgctgcaatgaagcctactaaggccggcttggaggagcctcaggagcagatccataagattaggatcaccctttcctctaagaacgtcaagaatctcgagaaagtgtgcgccgaccttgttcgtggtgccaaggacaagcgcctcacggtgaaagggacctgttaaggatgcaacctaagtatcttacaatcacaacaggaaatccccgtgtggtgaaggcaccaacacatgggacagatttgagctgcgtgtgcacaagagaatta

SEQ ID NO: 2084 - DNA, 364 bp, Glycine max
  modified_base (354)..(354): a, c, g, t, unknown, or other
gatgccgaaaagtagtaccaagatggcttcagttgtgtatctcctctttggcttccatctcattgttatcatgtcaagttccttacccgcaactagtgaagtgtttgcaaaacagtatccatccacagaacccgtggaagaaaaactcacccaactccacttctatttccataacaacataacgggggaacacccaactgctatgaaaactgttttgcctcctaaggggtccattcatggttttggggctacttacatgatggatgaccctctaactgaaggaccaagtccaacttcaaagcttgtgggaagatctcagggaatatacgctttggcttcacaacatgagcctgngttgctcatg

SEQ ID NO: 2085 - DNA, 345 bp, Glycine max
gatcattgatattggcttaggcgctgcatctgcaaaatctcagcccaaacaaacatctctgtacctctctccctctttccctctctttcgcttatcaattttcgttttaatttctctacgactcgggtcgacctccgatcactttgggtctatcggcggggacttgggtcgaactcgcatgactcaatttactgcgaggtacggaatccgtgaattttcctgcgaggtaagattccgttgaaattttgctttggtccgagggggaaggtggaattaggatcgatttggcttcagatcttggaattagggtttagtattggttgcaggtgacgttaattttgtgat

SEQ ID NO: 2086 - DNA, 59 bp, Glycine max
ggtagttccaccgagtagcaacaatgtcgaagcgaagtcgcggaggatctgcgggaaac

SEQ ID NO: 2087 - DNA, 370 bp, Glycine max
gagacaagggtttcttccgggttcacgtttcacaatcactttttgcgcttctctcactcactcactcttcttcttcctcttcgtgtggttttctttctcgaactcgaacgaagatgcgtgagattcttcacatccagggagggcaatgcgggaaccagatcggagccaagttctgggaggtggtgtgcgcggagcacgggatcgattcaacggggaggtaccaaggggacaacgagttgcaactcgagcgagtcaacgtctactacaatgaagcgagttgcggaaggttcgtgcctagggcggtgctcatggatctggagccagggaccatggacagcgtcagatctggtccctacggtcagattttccg

SEQ ID NO: 2088 - DNA, 366 bp, Glycine max
gaaataacagtggggctttgtacagttcagcctatcactctctcgaagcttcctaacgcctcctcgtttcttcctaaacctaaaccctctcttcctcagtcttacactccctccgccgcacacttatctcggtcagtttgcttaaggaatctgtcgccaaaggcaacatcttctgaagaagaaaggtccagtgggggaagtcaatttttcaatgagaagcgcgatggtgtaataatcctggaggatgttaaagaggataataataagaatgagttcgataaaacggtgattgaagatacaaagcaagacttgtttgatgatgatggacagggtctatcatttgatttgctggataagctcaatttt

SEQ ID NO: 2089 - DNA, 165 bp, Glycine max; identical to SEQ ID NO: 1967

SEQ ID NO: 2090 - DNA, 378 bp, Glycine max
ggagacaccattctgattttgtccatccaaaccttaaaaagattcagtgaagaacaacgttaatggcatctcttggtgtgcaagcagttcatcctcctccattaacatccacctccgacacacctcctctttttgatggcaccaccaggttgtacatcagttattcttgcccctatgcacaacgtgtatggatcgctcggaacttcaagggactaaaagacaagatcaatttggtccctataaaccttcaagacatgccagcttggtataaggagaaagtctaccctgaaaataaggtgccatccttggagcacaatggcaaggtgttgggagaaagtcttgatttgatcaaatatgtagattaaaactttgaaggga

SEQ ID NO: 2091 - DNA, 349 bp, Glycine max
gggcatagcaaaatcgtttctccaatttaatcaccattgtacaacccaattcccttcgtcgttttcgattaagagagcaatggcacgtaccaagcaaaccgctcgcaagtccaccggaggaaacgctccgaggaagcaattggcaaccaaagccgctcgcaagtcagccccggcgaccggcggagtgaagaatccccaccgcttcaggccaagaacggtggctctgagggagattcgaaagtaccagaaaagcaccgaacttctgatccgaaaactcccattccagaggctcgtcagagaaatcgctcatgatttcaaaaccgatctccgcattcagagcagcgccgtt

SEQ ID NO: 2092 - DNA, 355 bp, Glycine max
ggaaactgcggaagcattccttgggaagaacattaatgatgctgtggtcactgtcccagcttacttcaatgatgctcacacgcaggccaccaaagatgctggtgtcattgctggtctcactgttgctagaattattaatgaacctactgctgctgccattgcgtatggattggacaagaaaggtggcgagaagaacattcttgtttttgaccttgggggtggaacatttgatgtcagtatcttgacaattgataatggtgtttttgaggttcttgctacaaatggagatactcatcttggatgtgaggactttgatcacagaataatggaatacttcattaagttgatcaataaa

SEQ ID NO: 2093 - DNA, 378 bp, Glycine max
  modified_base (319)..(319): a, c, g, t, unknown, or other
gatgccgaaaagtagtaccaagatggcttcagctgtgtatctcctctttggcttccatctcattgttatcatgtcaagttccttacccgcaactagtgaagtgtttgcaaaacagtatccatccacagaacccgtggaagaaaaactcacccaactccacttctatttccataacaacataacgggggaacacccaactgctatgaaaactgttttgcctcctaaggggtccattcatggttttggggctacttacatgatggacgaccctctaactgaaggaccaagtccaacttcaaagcttgtgggaagatctcanggaatatacgctttggcttcacaacatgagcctgggttgcccatggtgacaaattttct

SEQ ID NO: 2094 - DNA, 163 bp, Glycine max; identical to SEQ ID NO: 1817

SEQ ID NO: 2095 - DNA, 378 bp, Glycine max
ggacattgctaaaccttaaaccctaatttttacaatccgagggtgaagagtttgatgggtcagcgaagaacgacaacaacatcaatcagtgctcctcaagcaaggaagacgctgacatgaataacaaccaccttcgctttgaagaggctgtcgacgagagttccaacctcgaccaatccatgcgcgacatcgaagaatccgatgataaaaccagcgccgactattacttcgattcctactctcattttggaattcacgaagagatgttgaaggacactgtgagaaccaagacatatcaaaatgttatttatcagaacaagtttttattcaagaataaagtagttcttgatgttggtgctgggactgggattttatcac

SEQ ID NO: 2096 - DNA, 345 bp, Glycine max
gagggcgaggaagccacatagagacacaatacagagtgagttgttgctccttcgccacaactctctgccaacatgggtatctccagagattctatgcacaagaggcgtgccactggtggcaagaagaaagcctggaggaaaaagagaaagtatgagcttggtcgccagcctgctaacactaagctgtcaagcaacaagacagtcaagaggattcgggttagaggtggaaaatgtgaaatggacggcattgagattggatactggaaaattactcctggggaagtgaagctgtaactcgcaagactcgtgtactagatgtggtttacaatgcctcaaacaatgagc

SEQ ID NO: 2097 - DNA, 360 bp, Glycine max
ggatttaaccatgtatattgcactttgcagcatagagtttgactgcgatgatgatttgtttgctactgctggagtttcccggcgcatcaaagtttttgacttttctgctgttgtgaatgaacctacagatgctcactgtcctgttgtggagatgtctacacgttcaaaacttaattgcttgagttggaataaatatgctaagaatcaaatagctagtagtgattatgaaggaattgtgactgtttgggatgtaaccactcgaaagagtttaatggaatatgaagagcatgaaaagcgtgcatggagtgttgatttttcaagaacagatccctctatgcttgtatctggtagcgatgactg

SEQ ID NO: 2098 - DNA, 354 bp, Glycine max
  modified_base (298)..(298): a, c, g, t, unknown, or other
  modified_base (342)..(342): a, c, g, t, unknown, or other
gattatcatagtagatattcattccccttatctttctctcttctctctccccgcccaaaccctaactccctaccctattccgctttctctcatccatcatgaaaggaggaaagtccaagaccgaatctaagagagccgatgccaaacttgctgtgaataagaagggcgccgccaccaagactaggaaacccgccggaaaggggaaggcagcgaaagatcctaacaagccaaagaggcctccaagtgctttcttcgttttcatggaggaattcaggaaggtgttcaacaaggaacatcncgacaacaaagcagtgtctgctgtgggcaaagctgctggagcanaatggaagacga

SEQ ID NO: 2099 - DNA, 355 bp, Glycine max
ggttttagagtggtggagtgtgcagaagagcgtcgcagtcgcaaccctaatcagaagaagcgcagcttcaagcgagtgacagccaccagccatgggtcgtatgcacagccgcggtaagggtatatcctcttctgctttgccctacaaaaggacacctcctagctggctcaagatctcttcgcaagatgtcgaagaaaatatctgcaagtttgcgaagaaaggtttgaccccgtctcagattggtgtcattctcagagattctcacggtattgctcaggtcaatagcgtcactggcagcaaaatccttcgcatcctcaaagctcacggacttgcgcctgaaattccagaggacctg

SEQ ID NO: 2100 - DNA, 362 bp, Glycine max
ggtgtgtttttctcaatccaaacaaacagtttctagtttctgggctatagtactaaggtttcttcttctcttctcttcctccgctaacacatacagtagatgcgtttgcttctatattgttgatcatgaaccgtcacgaccaatttcagaaacctcaatctctctctaaaggaactacagatcatagtcagcatcagaacaaggaagatgtggtttctataaaagattgtatctcaccggacttgacatcatttgcgacctcctctggagatgttgctgctggtttcacaggtgttcatgaatcagaaaccctgtcttgttattcatcagtctcaacttctgtttgcgttcaaagcaaaact

SEQ ID NO: 2101 - DNA, 234 bp, Glycine max
ggcccaaaagttatacaaaaatggcttcagttgtgtatctcctctttggcttccatctcattgttatcatgtcaagttccttacccgcaactagtgaagtgtttgcaaaacagtatccatccacagaacccgtggaagaaaaactcacccaactccacttctatttccataacaacataacgggggaacacccaactgctatgaaaactgttttgcctcctaaggggtccattc

SEQ ID NO: 2102 - DNA, 355 bp, Glycine max
ggcattctattcattcaagattcagcaagtgcgttttggaagcagagaccgagatacttcgagatggcccgtacaaagcaaactgctcgtaagtcaactggaggaaaagctcccaggaagcagcttgcaaccaaggctgcacgtaagtctgcaccaacaactggtggtgtgaagaagcctcatcgttatcgccctggaactgttgctcttcgtgagattaggaaataccagaagagcactgagctcctaatcaggaagcttcctttccagaggttggttcgtgaaattgcccaggatttcaagactgatctgcgtttccagagccatgctgtgcctgcattgcaagaggctgctg

SEQ ID NO: 2103 - DNA, 375 bp, Glycine max
ggcagcgcttgatttgaggccaggcaagccccactcaaccaccacacctctcctcgttcacgctacccctttctgctcttcttctacctttcaagttttaaaagtataaagatggcagagacattcctatttacctcagagtcggtgaacgagggacaccctgacaagctctgcgaccaaatctccgatgctgtcctcgacgcttgcctcgagcaggacccagacagcaaagttgcctgcgaaacatgcaccaaaaccaacttggtcatggtcttcggagaaatcacgaccaaggccaacgttgactacgagaagatagtgcgtgacacctgcaggaacatcggcttcgtctcaaatgatgtgggactggatgcc

SEQ ID NO: 2104 - DNA, 360 bp, Glycine max
ggctacaaaaacattgaaagaaatagaaaaagcaaaactggtttctcgcatttcctccgaaacagaccgtttcgctcgtttctcggatctgcaatggaagccccacccaaaggcgctgctggaagaagaggtgacaggaagaagtccgtttccaaatccatcaaagctggcctccaattccccgtcagccgcgtcgccaggtactttaaaaaaggccgttactctcgccgccttggcaccggggctcccatttacctcgccgccgttctcgaaaatctcgccgcagaattgttggagctggccgggaacgctgcacgtgacaacaggaagaataggattaaccctaggcacgtgttgctg

SEQ ID NO: 2105 - DNA, 356 bp, Glycine max
ggttctagtgtgtgattgtttgttgttgtaacccgttcttcttcttttgttgttctgtgtttgtgtttgttttttctctcacctgaaaatgtcttgctgcggtggtaactgtggttgcggaagctcctgcaagtgcggcaacggctgcggaggctgcaagatgtacccagacttgagctacactgagtcaacaccaccgagaccttggtcatgggagtggcacctgttaaagctcaatttgagggtgctgaaatgggtgtgcccgctgagaacgatggctgcaaatgtggaccaaactgctcctgcaacccctgcacttgcaagtgaggtgttgggagagcaagcttcaagcagag

SEQ ID NO: 2106 - DNA, 366 bp, Glycine max
gatcatcaataggtgttttcatttgggattcaaactcaccatggtggacgccttcaaactttgcatcttccttcttgcgtcgatctgtgctttcctagtcttttctaatccagtgctgtgtagtgataaggaggacagtgtattcaagggaatcaacagctacaggcaaacacggagcctgatacccctgagccaagtttcgaaggcaacatgtttggctgatgaagttgcagaagaaatagagaagatgccctgtgaaaacgtgaaccaatactacccttcatctgttcctggtagtgggaacctcaaaatcccaaacttgcagaagcacataaataaatgtgacattaacttcaacaccaccac

SEQ ID NO: 2107 - DNA, 342 bp, Glycine max
gatccttcgtccagctagcaccacattcacctgaggcttccaaagcaatggcttcccttgcagcatccactgctgctgcttcccttggcatgtcagaaatgcttggaaaccccatcaacttcagtggtgccacaaggccagctccatctgcttctagtcctgcctccttcaagactgtggctcttttctccaaaaagaaggctacaccaacacctccaaaaaaagctgctgctgctgctcctgccaatgatgagcttgccaagtggtatggtcctgacagaaggatcttcttgcctgagggtctcttggaccgatccgaaatccagagtacttgaccggaga

SEQ ID NO: 2108 - DNA, 274 bp, Glycine max
  modified_base (44)..(44): a, c, g, t, unknown, or other
  modified_base (189)..(189): a, c, g, t, unknown, or other
  modified_base (192)..(192): a, c, g, t, unknown, or other
gaaaaatagagagtttcgttcgtcaccatgactttcaagcgcangaatggaggtcgcaacaaacacggccgcggccacgtcaagttcattcgatgctccaactgcggcaaatgctgccctaaggacaaggctatcaagaggtttctggtgaggaacattgttgaacaagctgcagtcagagatgtgcangangcttgtgtctacgaacaatacacgcttccgaagctgtatgtgaagatgcagtattgtgtttcctgtgctatccactctcatg

SEQ ID NO: 2109 - DNA, 350 bp, Glycine max
ggtcctccgatagttataatataaccatgtaacgttcaaattctacgccaatctctgtctcattctctttcctctttcctttttccttagaagaatcgaaaacgtcttcaaaaaaccaagccattattaatggctgtcgattccttcttccagaaagaacatcaaattcgggagtttgtggacgggaatggaaacgtagctgtcggtttgaagttgcataataaaccaagtaatgatggccttaaccgacagtttcctctagagattccgccgattctatttgaagagacttcacttccagcaggattgcacggttcacatactaaagatgtttatagtatttcagtgtt

SEQ ID NO: 2110 - DNA, 372 bp, Glycine max
gacccccaaaccctgctgcataggaagaaaccctagcctctcaccctccctgcgacacgatgcagatcttcgtgaaaaccctaacgggtaagacgatcacccttgaggtggagtcttctgacaccatcgacaacgtgaaggccaagatccaggacaaggaaggcatccctccggaccagcagcgcctcatcttcgccggaaagcagctggaggacggccgcaccctcgccgactacaacatccagaaggagtccaccctccacctcgtcctcggtctccgcggtggcgccaagaagcgcaagaagaagacctacaccaagcccaagaagaatccagcacaagcacaagaacgtcaagctcggcattctccag

SEQ ID NO: 2111 - DNA, 265 bp, Glycine max
gatccgaggcccctcttttatatggtcgttgataaaatggcttcgacccttttaacaaagatgcttttgggtcaccgattgatacacccttcttcgttcctcactcaccagccacagattctctcttctctattcagtaaacggctgttttgtatacgagctgtcccggtctcagcctctacatcccaaaacatcaaaacaactggttgggctccttgtatggcttcttcctcagttggtagaagagctacatattcaacacaat

SEQ ID NO: 2112 - DNA, 329 bp, Glycine max
gattcaccacaaccctctctctatattccattgccacccagttttgaatatatttttattccttctttgtttcttcactttcttccatacacataaccatgtcttctcagactgttgtcctcaaagttggtatgtcatgtcaagggtgtgctggagcagtgaacagggttttgggaaaaatggaaggtgttgagtcatttgacattgatctgaaggagcagaaggtgacagtgaaaggaaatgtggagccagatgaagttctgcaagccgtttccaaatctgggaagaagactgcaatctggggtggataagcaccacaatctaaaaac

SEQ ID NO: 2113 - DNA, 354 bp, Glycine max
  modified_base (128)..(128): a, c, g, t, unknown, or other
ggttttacaatttacatcacatttcgttgcgcctctgttctctgtcactgctgcgtctctcgtaaccatgcctaagcaaatccacgagattaaggatttccttctcactgctagaaggaaggacgcanggtcggtgaagatcaagaggagcagagatgtggttaagttcaaggtcagatgctcgaagtacctctacacactttgtgtgttttgaccagagaaagctgataaattgaagcaatctcttcctccaggtttgagtgttcaagacctgtaaaggtacagggcgagagaccaagaagaagcaattcattgattcgtctgaacttcgtttctctgtagttgaaacttgag

SEQ ID NO: 2114 - DNA, 378 bp, Glycine max
gacactaaacaagttaaaagaagagcatcactgaactaacaaagcaaccctatgtcgaaggtggtttgtgtcaccggagccagcggcgccatcggatcatgggtggtcctactcctcctccagcgtggttacaccgtccatgccaccgtccaagatatcaaggatgaaaatgagacgaaacatttggaggaaatggaaggagcaaagagtcatctccatttttttgaaatggatcttcttgacatcgactccattgccgctgccataaagggttgttccggcgtaatccaccttgcatgtcctaacatcattggtcaagtcgaagatcccgagaaacagatattggaaccggcgataaaaggaaccgttaatgtgttg

SEQ ID NO: 2115 - DNA, 350 bp, Glycine max
gactccactcacaactgaaaccaaaactgaaaaaaaaaacaaacaataccataacatggcttcttccaccatcacctcctccttcctaacatcacccccttcatctctcttcaacaaatcatcatccccttccttccatgccacccctactctccgccccctcgcgccacgcgcctccatgtccgcctcagcgccgccctacgacttcggatcgttccggttcgatccgattacagagtcgattgtgtcgcgcgagatgattctcaagtacatgatcgacatggtcacccacgccaacaccgacgtcgtcatcgttggcgcgggctccgcgggtctctcgtgcacctacg

SEQ ID NO: 2116 - DNA, 362 bp, Glycine max
gacggctttcaccattattttcctttctctctcactcgaaacaaaacaaaacaacacaaccggaaaaccaaaccacctctccctgctcccgccgctgttttccgccgctgtcgccgtcgttcccacctcaccgtggcggcgcgcgcgtctccgatgggaaagtacatgaagaaagcgaagccgaaaggagaactcgcgctcgtcgaatccaccaccagcaacaccaccacctcctacatgggggtccgaacccgcgccaaaaccctagcgcttcagaaatcgcacgcgcagcagcacgagctcgccgccacctccgactcctacctccagctccggagccgtcgcctccagaagcctccgat

SEQ ID NO: 2117 - DNA, 294 bp, Glycine max
gattcatcacatacaacactctctccaaagttcaaattaagactgagaggtgagaaagagagaattcatatgggtgccggtctagttgcgttcctcttaatggttcttgtgcaattggtctatgcagtgatgaacattacttcaaagcttgcaatagaatctggaatgagccctcttgtccttgttgcttatcgacaactctttgctactgtgtccattgctccctttgcttattggctcgagtggaatacgcttcccaggattacacagcgtcttatgattcagataataatt

SEQ ID NO: 2118 - DNA, 321 bp, Glycine max
gaaccatcttcgtttttcagcatttctactctccaaacactcgaattcgcattctcttcactctttccccaatccatggccaagggagagaagaaaccggcggagaagaagcccgcggagaacgctccggcggtgaaaacaaaagccgagaagaagatcccaaaggaacccgcctcgggcgagaagaaggagaagaagagaaacaagaagagcgtggagacgtacaagatctacatattcaacgtgctgaagcaagtgcaccctgacatcgggatctccagcaaagccatggggatcatgaacagcttcatcaacgacatc

SEQ ID NO: 2119 - DNA, 352 bp, Glycine max
gatccataaccatggcgtctaactctgcttccgctctttacttccttttatgcctatcgcccatcactttgcttctttctgcgtttcgtgctcaagctcaatctcatgctccagctcccactttcaagtactgtgaaaagaatgcagactatgctgtgaacgtgagtggagtggaaatattgcctgaccccgtggagagaggagtgccattcacctttaagatcccagcttatactcctgaaccaattcaaagcggggacttgttatatgaaatttcttatgctggaatagaagcacaacctgctacatttctccatgatctctgtgaggaagcaccatgcccagtacctgc

SEQ ID NO: 2120 - DNA, 405 bp, Glycine max
ggggtttcgtttcgaaagcagcaccgcacgtgttctgctccgccgcgattgcaatcgtttccactcccgccgctgatgggtttctcaaaggaacagcttcttgcgcggttaaaggagcttcaggttccattttcccagtatgagcatcctgttgttttgaccgtcgacgctcaggctcaatgtgttggacatttggggggtggcctcagcaagaatttgtttctcaaggacaagaaaagcacgttgtatattgtttctgctttagctggtaccaaagtagatctcaaagtgttgtctcagcggcttggtttgggaaaaggtggtctcagaatggcacctgatgatgctttatgtgaagtacttcacgtacccttgggttgtgtcactccatttgcacctgtgaat

SEQ ID NO: 2121 - DNA, 282 bp, Glycine max
aaaataacaaggtatgggaaacagcctattattcatacctttctctcgcgctcatacattgaaattgtaacagtcaagggtgtatccaacagaccttagcctgtgggtcaaagcattggaggattggatgcattgcacgatgaatcggtggtattcaggtggaaacatgcattgatgtcactgtaggagcatgccaagagcaatattagatcctacactcatgccaaaaccttgtcttctgctacgtctgctgctgtctccaattaaccctttaagccaccc

SEQ ID NO: 2122 - DNA, 349 bp, Glycine max
ggtgcaacatgcattgcattctagcaaagcaagtggaccttgccagctcaaggaaattttaccagacaataaatgagtgagtattcagaaaccaaaaaccaatagcagtacatttccgatttccagacagaggaactactcagcttagcttgagtattttcaagaggggatcaaagggaagaagaagggaaggactcaaacttgcacacgcaacctttggttcctttcccaacactcaccatggtggcagattctaagtccaattccgacctctccttcggaaaaatctttgccagcagtgctttctctgcatgtttcgctgaggtgtgtactattcctttggatactg

SEQ ID NO: 2123 - DNA, 376 bp, Glycine max
  modified_base (309)..(309): a, c, g, t, unknown, or other
gacacagaccaatattcattcatttagattcatcaaaagcttataacaacaattaaacatgagtgcagccagcagagcttggattgtggcatcaagcattggagcagtggaggcattgaaggatcaattgggggtgtgcaggtggaaccatgcattgaggtcactgcagcagcatgccaagagcaacattagatcctacactcaggccaaaaccttgtcttctgctacttctgctgctgtctccaataaggtcaagaggaccaaggaggagtccatgaggaaagtcatggacttgagctgttggggtcncaatacttcaaggttttagtgtgtggactattctaattgcattcatcattgtgctgcaaggtttatg

SEQ ID NO: 2124 - DNA, 375 bp, Glycine max
gactttccattctcttcaaacctaacgcagcatcgctattctcttcattccatggctttgcccaaccagcaaaccgtggattaccctagtttcaaactcgttatcgtcggcgatggtggcacaggaaagacaacctttgtgaaaatgcatctcaccggagaattcgagaagaaatatgagccaaccatcggtgtggaggttcacccattggattttttcacaaactgtggaaagattcgattttactgctgggatactgctggacaggagaaatttggtggcctcagagatggatactatatccatggacaatgtgctattatcatgtttgatgttactgcccggcttacatacaaaaatgttcccacctggctc

SEQ ID NO: 2125 - DNA, 380 bp, Glycine max
gacactcattccatttttacctttctctctcgctcgcaaacgcaaataataaaaaacaaggttttagccatggcatcgaagcggatcttgaaggaactcaaggatctccaaaaggatcctcctacctcatgcagcgccggtcctgttgctgaagacatgtttcactggcaagcaacaattatgggtcctccagacagtccttatgctggaggtgttttcctagtcactaatcaattccccccaaattatccctttaagccacccaaagttgcattcaggacgaaggtatttcacccaaatataaatagcaatgggagcaattgtcctgacatattgaaagagcaatggagacctgcgctaactatttcaaaggtgttgct

SEQ ID NO: 2126 - DNA, 348 bp, Glycine max
gactccctctattattatcattattcttgcggtcttcatctctccaatatctctgcacacacaataacagagtttaactatgaatcaaccataatggacaaagttaacaccagcaacaacagcaacagcaacagcaacagcaacagcaacaacaactgtgggttcatgtcgtgcgacaaactggaccgagtggccaactgggtcggcgccaacgttgcccctgctttctttgcatccttggagcggtgctcttgcatcaacctcagcatcaaagacaacgaagatgacaccaacaacgatgatcgccctctcttcctctctcaccccactactcctttttcctccaac

SEQ ID NO: 2127 - DNA, 379 bp, Glycine max
gaatctttccactttgacattgccgacgcctccagataaacaaccttaactttcccacaacaccacccatcattctttttctctctctagatttcatttagttgttgctgtcttcttctgtttgtgtgtgccaacacagagcgaaaaacatggctctgaaccaatcaaaagccgtgttgttgagggtgagtttggtggtggtggcgctcttcatagcagggtacatagtgggtccccctctctactggcatttcgttgaaggtttggctgcggtcaaccactcttcttctacttgtgccccctgcatctgcgattgctcttcacaacccattctttctattccacaaggactgagcaacacttccttcggagattgtgc

SEQ ID NO: 2128 - DNA, 230 bp, Glycine max
catgtctaacattcacaatcttctccttcccaagaatgctggtggatcatccaatgctgctgctgcaaacgatgactcttaaataagggttttttttccgtgaaaagttatccaatttattctctttggattctcactgtctttgtagtttttcagtttttgataattgcgttctgtacatgtaattacgttttcaatcactgatgtgaatatagaacactcattttctc

SEQ ID NO: 2129 - DNA, 328 bp, Glycine max
  modified_base (78)..(78): a, c, g, t, unknown, or other
gattgcttctaacgtgagatctcagattgcaattgcctcttctcttctcccagaatcggtgtaggttacatgtttaanggttttgttttcatttaagtcactaatccgatatcatgaagctcgatacgactagtctcgaatcgtttcccacactgattgcacctcaaaacgacgtcgccggagaactctccgccgctccgttctttgaccttccgaattccaatgacttcgatgggttcttgaaagacgctattcagatggtgaagcccgcgaagggtactacaactcttgcttttatatttaaagagggtgttatggtagctgctga

SEQ ID NO: 2130 - DNA, 302 bp, Glycine max
gggtggagagatgggcactgactcacacccacaatagtctagggcagcttcaaagtacctccacattgtctcctactcttactgttctcttctcttctcatcatttttattttttccaatcaaaccaaacactccataagcaccgctcttttctctccgaaatctccatctcacttcacttctgagctctggacgagatcccagatcgtcacatctttcacgcactcttccatcagattcaccctttcgtttaacgcatactcataacttgaaggttaatggctgctccaccggcaatggct

SEQ ID NO: 2131 - DNA, 366 bp, Glycine max
  modified_base (358)..(358): a, c, g, t, unknown, or other
gagaagaaccagatctctctttctcaaatcaccaagaatagttgaaaatggggctgtctttcacgaagctgttcagccggctctttgcgaagaaggagatgcgtattcttatggtgggtctcgacgccgccggtaagaccaccattctctacaaactcaagctaggagagatcgtcacaaccattcccaccattgggtttaatgttgaaactgtggaatacaagaacatcagcttcactgtctgggatgttggtggccaggacaagatccgtcctctgtggagacactacttccaaaatacccaagggcttaactttgtggttgatagcaatgaccgggatcgtgtggttgaagctanggatgagc

SEQ ID NO: 2132 - DNA, 372 bp, Glycine max
taatttgggaattattgctcccatcgccattggcttcattgtcggcgctaacattttgttgggtggggccttctctggagcggccatgaaccccgctgtgacatttgggcctgctgtcgtgagctggacctggaccaaccactggatctactgggccgggcctctcatcggtggtggaatcgctggccttgtttacgaggttgtctttatcagccacacccacgagcagcttcccaccactgactactatagggggggaaatgaaaataaaaaagaataatattgtgtattattgaatttctctggaatcttcttctgtgtacggttttccttccttgtgttttcttcctaattcactttcgagggttgtac

SEQ ID NO: 2133 - DNA, 378 bp, Glycine max
agaagggcagaaaaacaagatttgtaacacaaactgtcctttttattaggcttttacccccaaaaaaaaaaaaaaaaaaaaaaaaaaaaaaaaaaaaaacaaaaaaaaaaaaaaaaaaaaaaaaaaaaaaaaaaaaaaagaaaaaaaaaaaaaaaaaaaaaaaaaaaaaaaaaaagaaaaaaaaaaaatagaggaaaataaaaaacatgatgaaaaaagatgacaaaaaaaaaaaaaaaaaagggggagccaaagggggtaaaactaatagaggggggggaagggaataaaaaccccctaaaaagggcacccaaaaaaaaattcgggggggggtttttaaaaaaacgggggggggaaaaaccgtgggtttccaaaata

SEQ ID NO: 2134 - DNA, 376 bp, Glycine max
agaaggggaagtgagtgagtagtgagaatggagtttcaagggttaccggaaggttgcattgctagtatactctctcgcactacgccggcggacgtgtgtaggttttccgtcgtatcaaagattttccgttcggccgctgaatcggacgctgtgtggaaacgttttctcccttccgattaccattccatcatttcccagtctccttcgcctctcaactatccttccaagaaggagctctatctcgctctctcggatcgccctatcatcatcgatcagggtaaaaagagctttcaattggagaaaaagagtgggaagaagtgttacatgcttgctgctagagctctcagcattatttggggtgacactgagcaatact

SEQ ID NO: 2135 - DNA, 371 bp, Glycine max
gatcactcacactagtctctgtgaaaagcgacacgacacaacacaacacaagctttattctttttcttcgcttcttctgtacagcacccaagattgaagatgatagaccttgcgcgcgtgcagaaggagcttgtggaatgcagcaaggacgcggagggatcgggcatcaaagtcagccccaaaaacgacaaccttgttctcttgatcggcaccattcctggccccgtcggaactccatatgaagggggcattttccagattgatatcacattgcctgatgggtacccgtttgaaccccccaagatgcagtttaaaaccaaagtttggcatcctaatatcagcagccaaagtggagctatttgcctggatat

SEQ ID NO: 2136 - DNA, 245 bp, Glycine max
  modified_base (203)..(203): a, c, g, t, unknown, or other
  modified_base (207)..(207): a, c, g, t, unknown, or other
  modified_base (214)..(215): a, c, g, t, unknown, or other
gagattcgtcttcagtttcagcctttctctcccactcactcactcacaggtaagcaatggcgggaaaaggagggaaggggcttcttgcagcgaaaaccaccgcggcgaataaggacaaagacaaggacaagaagagacctatttctcgctcttcccgtgctggaatccagtttcctgtgggacgttatccataggcagctganacanagggtcnnaagcaatggacgtgttggggcaacagctgc

SEQ ID NO: 2137 - DNA, 342 bp, Glycine max
gagcctcaccagaagcacaacgaggagaagcagaaggagcaaaagcaatggcgccgaagaagccgacaaccacgacaaggaaccctgatttggttagggggattggcaagtattccaggtcgcagatgtaccacaagaggggcatctggaccatcaaggccaaaaacagtggcgttttgccccgccacgattccaagcccaagcccgacgccacggctcataagccgctcaagttctaacccgcggacgatgtttacaagcccctcgtcaacaagcacaagcccaaacccgcgaaactcagggctagcattactccagcgactgtgttgatcctgcttgctg

SEQ ID NO: 2138 - DNA, 392 bp, Glycine max
ggtgtgtagtataggattctcttctttattccttttgtaatttcattcattcttaatctttgtgaaaaataatgttcatcgagaattttaaggttgagtgtcctaatgtgaagtacaccgagactgagattcagtccgtgtacaactacgaaaccaccgaacttgttcacgagaacaggaatggcacctatcagtggattgtcaaacccaaatctgtcaaatacgaatttaaaaccaacatccatgttcctaaattaagggtaatgcttgtgggttggggtggaaacaacggctcaaccctcaccggtggtgttattgctaaccgagagggcatttcatgggctacaaaggacaagatttaacaagccaattaatttggctccctcaaccaa

SEQ ID NO: 2139 - DNA, 404 bp, Glycine max
gggcaagtgataagagtaatagaacaaccactcaccccctctccgatctaatggccaccgtaatcgacggcaaagccgttgcgcaaatcatccgatctgaaatcgccgacgaggtgcgcctgctctctcaaaaatacggcaaggttccgggactagcagttgtgatagtagggaacagaaaggattcacaaagctacgtgggaatgaagagaaaggcatgcgccgaattgggaatcaaatccttcgatgtggaccttcccgaacaagtctcccaagctgaactaataaaacaagttcacgagttgaatgttaaccctgatgtacatggtatattggttcagcttccgttgcccaagcacataaatgaagagaaagttctgactgaaatcagccttgagaaagat

SEQ ID NO: 2140 - DNA, 282 bp, Glycine max
caaccacgaagcaccggatgataacctaagatttgccagaggtagtgattgttatgagaatcgcctttagaggaatttcccacctcaccgtgtgtaagaaacaccaaaataacaaaattgagagtggtataaataggacgaaaatgcctaagtataatctcttttgggattttacattatacttatatctatttcacacaccattcgtagctccagcaagtgggaccaacaaataagcattttgatggctgttaatttttaacaagtagcacacatattatc

SEQ ID NO: 2141 - DNA, 407 bp, Glycine max
gacggcactcgttttcgttctcgttctggtttatagatctttgcgaaggaggtttacggcgctcaaccaaagatgcagaacgaggaaggacagatcactgagctttacattcctaggaagtgctccgccacaaacagattgattaccgctaaggaccatgcttcggttcagatcaacattgggcatgtggatgagaatggcgtctacaatggccatttctccacttttgccctctgcggattcatccgtgctcagggtgatgctgacagtgctctagaccgcttgtggcagaagaagaaagttgaagttaagcaacagtagacacccatgatagtttgttacttcgttatgtattaatttctactcttgctagagatatttgagtactatgattgtccttttgagca

SEQ ID NO: 2142 - DNA, 393 bp, Glycine max
gacaacacaacgcaacacaacgcgcactctctcttttctctcttaacacaaaaaccctatcgttcttcgcggtttcgccgattctcgccatgccgaaagccaaatccgacgccaaagccgccgatagccggttgaagcgcaagggcgctggtgctggaaggaagcaatcgaagaaagctgctaaggatcctaacaagccaaagagacctccaagcgctttcttcgttttcatgtccgagttcagagagcagtttaagaaggagcatcctaacaacaaatccgtcgctgttgtcggtaaagctggtggtgacaaatggaaatcgctgtctgatgctgaaaaggcccccttcgttgccacggccgaaaagaagaaacaagagtatgagaaaacta

SEQ ID NO: 2143 - DNA, 403 bp, Glycine max
gaagaagaatgatgatgacctctggtgaagctgtcaagtacaagagttccttggacgcattcacacagatcctcaagaatgagggcgccaagtccttgttcaagggtgccggtgctaacatcctccgtgccgttgctggtgctggtgtgcttgctggttacgacaagttgcaggttcttgtgttcggcaagaagtatggttctggtggtgcttaatttcagtgctgagtcagtgttattattattgttttttagatggcgatgataaaaaccgttctgagtttcaagagttttttagactaatggctgccgcaaattttgtttaataaattttctagatgggatattgtcccaaaaaccgtttttaaatttcatcatgatggaaattttacatttgagaatga

SEQ ID NO: 2144 - DNA, 382 bp, Glycine max
ggtaatccttacgctctctcactcacaaacgcacactgaattcaaaaacatcgaaagagagaggcatggccgagcaaaccttcgggatgatcaagccagatggcgttcaaagaggccttattggcgagattattagcagatttgagaggaagggtttttacttgaaagggttgaaactcgttactgtggaccgtccttttgctgagaagcactatgctgatttgtctgcaaagcctttctttagtggtttggtggattacattgtctctggccctgttgttgccatgatctgggaaggtaagaatgttgttacaaactggcgaaagattatcggagccacagacccagctcaatctgagcctggaactattcctggtgactt

SEQ ID NO: 2145 - DNA, 389 bp, Glycine max
gccgcagcaagtgccattttattttgccctacctcctcgattcgagggtttcaacaatggtgctgttccttccctacgaatccggttcaggctacagcctgttcgacgttcacggcgtcgatgaaatcggacagaataccgaatcggttcggaactccgtttcagacctcatcaagttcggcaaagtcgttaagcttcggtccttcaagtctttcacttccgctctcgatgctctcaaacagtgcaacgccgtctccgaaggcatattaactgatgagctgaggactgtcgtggagagcaacttgcctaaagtgaatgaaggtaagaagtctaagttcagtttacgtgtgtccgatcctaagattggttcccagatatctgaagtgact

SEQ ID NO: 2146 - DNA, 275 bp, Glycine max
gacagcaaaacaattttcaaactcaattaccattccataacctaaatctcctctttgtttccgagtcagagagcaatggcacgtaccaagcaaaccgctcgcaagtccaccggcggaaaggcgccgaggaagcaattggcgactaaagccgctcgcaagtcagctccggccaccggcggagtgaagaagccccaccggctcatggcccgaacggtggctctgaaggagattataaagtaccagaagagcaatgaacttctgatccgaaaactccc

SEQ ID NO: 2147 - DNA, 378 bp, Glycine max
  modified_base (43)..(43): a, c, g, t, unknown, or other
ggccgttttcttcttcatcatagtcgtggccgtgtcgcagcanaaccaaaccacatattaacttgtttgctctaagtcatggctctgatcttgcacgcaaccaaagcaaacaagaatgctttcaagactctgattgcggcagagtacagtggcgtccaagtggaattggcccctaatttcgagatgggtgtctctaatagaactcctgaattccttaaaatgaatcccataggaaaggttcctgtcttggaaacgcccgatggtccagtctttgagagcaatgccattgctcgttacgttgctcgactcaagggtgacaacgctttgttctcatcttctgccattgataatgcccacattgaccagtggattgacttt

SEQ ID NO: 2148 - DNA, 402 bp, Glycine max
gatcatataaaccacctcggattttgcttcctctgctgcgttttaacgcccatcacgcgtttctttgcttatacactaactaagatttcaaaccccccgcggccaactaactaagatctggttttgttctgattgattcgtgcattggactgtgaaacgcacgccaaaatgtggtggatgatgaacgagactggaggcaattactgttctaagaagagcgatgatttgtgcagcaatgtttgtgatcaggaatcaagtcaagtattgggcatgtcacgaattcgctgtattctgcgtggtttggatgtgaaaacctatatattcatgtttgctgttatcccaatgtgcgtctttggattctatatacacgggcagaagatctcctactttctgcgaccgctg

SEQ ID NO: 2149 - DNA, 404 bp, Glycine max
gacacacaacacagtttccactttccactttgactgtaccaaagtcacgcttgctccctctctcaacggcttccctcttcttcctctctctctctctctctctggacacacacatccttggtgttgaacgggtttttgggtgaaggagtagtgttggtggcttcatcttttagtgaataaggatacagcagcatgcggtggtggcttactctctctgttgatgtataccgcaaagtgatttccttgaatctgtattgcaaagttattctgtaactcttaagtcccttttgatcaaaaaaccttttacaatcatctcactcatctcttccttgccttgaatcaatgggatccaatttttttgttgttgttccttgttatgtccgtcagatcagctgaagaaaccc

SEQ ID NO: 2150 - DNA, 394 bp, Glycine max
actcaccacttcaaaacactcataacacaaagcacaaagcaaagctcatccttgagttaaaaaatggcagcagcttcttccatggctctctcatccccatccttggctggcaaggccgtgaagctgggcccatcagccccagaagtgggaagggtgagcatgaggaagaccgtcaccaagcaggtctcctcaggaagcccatggtacggcccagaccgagtcaagtacttgggcccattctctggcgagcccccgtcctacctaaccggtgagttcccaggcgactacggctgggacactgctgggctttccgcagacccagaaaccttcgccaagaaccgtgaactcgaagtgatccactccaggtgggccatgctcggagccttgggctgcg

SEQ ID NO: 2151 - DNA, 283 bp, Glycine max
aaatgaggccgttatcatcgtcatcatacacgtagtcatggcccatcagaatcacgccacatctggccatgtgttcgcccactcaagcggctgggggggcacacaacccaggtcatcagcagttcgatcaacagtcaggtcgcaggccaccatagtatcgaccgtgtccgctgcgaacacctcttcaacatgcggcacacaaccccgacgcctgcatgcgtggccgatgtgaaccttgaacttctcccgctcgtgcaaggccacgaatgtccagtcggcggta

SEQ ID NO: 2152 - DNA, 392 bp, Glycine max
tggggtgctctgctcgtgcctctagggttatcatttctccatttccattttctctctcacttttcaagaatcgtaagctatgggaaagtcttacccaactgtgagtgctgattaccagaaggccgttgagaaggcgaacaagaagctcagaggcttcatcgctgagaagagatgcgctcctctaatgctccgtttggcatggcactctgctggaacctttgacaagggcacgaagaccggtggacccttcggaaccatcaagcaccctgccgaactggctcacagcgctaacaacggtcttgacatcgctgttaggcttttggaaccactcaaggcggagttccctattctgagctacgccgatttctaccagttggctggcgttgttgccg

SEQ ID NO: 2153 - DNA, 390 bp, Glycine max
ggagggttacacgccgtcgtcactgtttttgtgtgtcgcttcttcgtaagtgcagctgcaatggtgaagggacgccaaggagagggtgtcagactctacgtgaggggtacaatccttggatacaaaaggtccaagtcaaaccagtatccaaatacatccctgatccaaattgagggtgtgaatgccaaagaagaagtagcatggtatgctggcaagaaaatggcctatatctacaaggctaaggtgaagaagaatggaagccattaccgctgcatatgtggcaaggttacaaggcctcatggtaacagtggtattgtccgtgcaaaattcaagtcgaaacttccacccaaatcaatgggagcccgactaagagtattcatgtatccaagc

SEQ ID NO: 2154 - DNA, 272 bp, Glycine max
ccttgggtaactcaccccgatacagacaactacctccacacccgtagtaactgtggtctgatactgacctcccgcgcgtcaacttaacttggtgaagtcacgggggcctattggtcgccgtatgcgttcagggaagcgttccatcgaaccgaaccgtacttacacgcgtatcttgccggggcccatgatcgtcctcgctgaggacgtccgaaatgcacacgactacggcgacaacggtgaccaccccaaatatgtcccttgagatatcatca

SEQ ID NO: 2155 - DNA, 364 bp, Glycine max; identical to SEQ ID NO: 686

SEQ ID NO: 2156 - DNA, 379 bp, Glycine max
ggaaatgaaaaaagtgacatgaagtgacgagaatgcgggttgtttgttgttccaattcaagcgtgagtgctttccctagttgtcttagattccctccactgatcgcaatttcaacaacaccctcttcgatccgcgttctaaattctccacccctccgttccactgcttcgtcgcaacacgttacaataatggcttctacgaattctcaacaagacacgcgcttaacgagaatcgcctctgcaatccgagtcatccccgactttcctaagccaggaattttgtttcaggacataatcacgctgcttcttgatacaaatgctttcacagacaccattgacttgtttgttgaaacgtacatagatcacaacatcaatgttgt

SEQ ID NO: 2157 - DNA, 352 bp, Glycine max
ggccaaaccaactccccaaaggggaccttagagagcaatcttctaccttctctctcctctctctctctctctctcttttgcttttattattctctttcaatggcttcatcctcttccagaacaaattcaattgaccgtgtctaactctctctcacactccaccagattctgctcatacaccacttccaaaactcctttctcttctccttcatcggccttcccttcctccacaagctctggcttttcgtcctcatccttcttcaaccagccacgttagcatcacgctcacaggcatcaccgtgccggatcgcccacccgtgtcaatctatgcagccccgcccctctctcctct

SEQ ID NO: 2158 - DNA, 393 bp, Glycine max
gactgcaactttgcacactgtgaggcatcaaattccaattaaggttacgcttaaaataaccaatcaacatgggagtcctcatctttgtcgcccgcacatccggcatcaaaaggcgcgccaagcaacattccggtcacatcgaagactccgccgagtccaccttccatctccaacggaagctcgtacaagccgctctcgccgttaaatcctccggtggacttcactcctctttctcacccgtgtcccctacctccacatgtgttcgacgtgacatcgggatccttcgtattcgatggaggtggtagtagtgctatagcaactgcacttgcaggtggcgcagccgcatctgacgatgcaccagctgctgacaaaaatgaacaaaacgtggatgaa

SEQ ID NO: 2159 - DNA, 409 bp, Glycine max
gatacctaaaaattgtaccgatatggcttcacttgtgtgtctccttttttccttgcatttcatggttatcatgtcaggttccttaccagcaaatagtgaagtgtttacaaaagagtctcctatgtctctatccacaaaacccgtggaaagactcacccaactccacttttatttccataacaacaaaatgggggaacacccgactgctatgaaaattgttgagcctcctaaggcgtccatttctggttttgggactatttacatgatggatgaccctctaaccgaaggaccaagtccaacttcaaagcttgttggaagatgtcagggaatatatgctgaggcttcgcaacatgaacctgcgatactcatggtaacgaatttgttcttcactgagggcatttacaatggg

SEQ ID NO: 2160 - DNA, 395 bp, Glycine max
cacccgagaatgtcccaatttataaaaatgaaaataaaagcttgaataatacgaaacacattttatttcttcataaaattcaagtcaaacaatcatgacctaatttatctctaaaatagaacaaagacgcccctataccaagagggtagtggaccattcctacatctaagagggtccttcaagaccaccattattattattcctaaaagctaaaagtaacatcaacaacaactgaaaatttctaacagatactaaaatctagtacttcctcctctcattggagaccgttgtttgacaaagtgcatcgatcgcaagcctgttctctgggactctgcatccagtaggtccaagcattttctcattaacatgaatagaacattgctgcttgccaagac

SEQ ID NO: 2161 - DNA, 405 bp, Glycine max
gacaccgcaaactctctctgtaaagtgcaaagcctctattttttcttgtgaatttgaaggacgatgagttccacagaggtcgcagccacaacgaagaagggtggaagagggaaacccaagaccacaaagtccgtttcccgttcctccaaagccggccttcagttccccgtcggccgcgtcgctcgctacctcaaggccggtcgctatgcccagcgcgttggttccggttcccctgtttacctatctgcggttctcgaataccttgccgctgaggttttggagcttgccggcaacgctgcgagggacaacaagaagacgaggatcgttcctaggcacattcaacttgcggtgaggaacgatgaggagttgagcaagctgatggggtctgtgaccattgccaatggt

SEQ ID NO: 2162 - DNA, 352 bp, Glycine max
ggatgcagatgcagcctatcatggcagcctactaccccaacaacggcaccactgatcacattcaacagtacctggatgagaacaagtccttgatcctgaagattgttgaaagccagaattctggcaagctgagcgagtgtgcagagaaccaatcaaggctgcagagaaatctcatgtacctagctgcaatagctgattctcaaccccaaccatctccaatgcctggtcagtatccttctagtggacttatgcagcagggagcacactacatgcaggctcagcaggctcagcagatgtcacaacaacagctaatggcttcgcgctcctcactcttgtactcccaacagccttt

SEQ ID NO: 2163 - DNA, 391 bp, Glycine max
gacctgatgcagatgcagcctatcatggcagcctactaccccaacaacgtcaccactgatcacattcaacagtacctggatgagaacaagtccttgatcctgaagattgttgaaagccagaattctggcaagctgagcgagtgtgcagagaaccaatcaaggctgcagagaaatctcatgtacctagctgcaatagctgattctcaaccccaaccatctccaatgcctggtcagtatccttctagtggacttatgcagcagggagcacactacatgcaggctcagcaggctcagcagatgtcacaacaacagctaatggcttcgcgctcctcactcttgtactcccaacagcctttctcagtgcttcaacagcagcaaggcatgcacagcc

SEQ ID NO: 2164 - DNA, 388 bp, Glycine max
gaggtcgcgagcgagcatcttcgagttgcatttcgcagtgtgtgtgagaagaagagaaaaatggagaaaatgatgcgactgagaccactgttccgatcactgagttgcagatcttatcatgccttcccattcatcaaccatgtcgttcttcgaccttctcttatctctcgctctcccaatcctcttccttctccttcacactcagaatgcatgtctcctttctcgatgggtttagggagcatgcgattctatagtgaagatttgacccacgtgcccaatattaaggaccctgcactttacaatgctttcaaggatttgatggcagtaagttggagtgagcttccggatcctgttgtatctgatgttaagaatgtgttgtctaaaaaca

SEQ ID NO: 2165 - DNA, 401 bp, Glycine max
gctctaccgcattagcactcgtctttggttctggtttatagatctctgtgaagtcgctttataacactcaacctaagatgcagaacgaggaaggacagatcaccgagctttacattcctaggaagtgctctgccacaaaccgattgattaccgccaaggaccatgcttcggttcaggttaacattgggcatgtggatgagaatggcgtctacaatggccatttctccacttttgctctctgcggcttcatacgtgctcagggtgatgctgacagtgccctagatcgcttgtggcagaagaagaaagttgaagttaagcaacagtagacacccatgatagtttgttactttgctatgtattaatttctacgcttgctagagatattttgagtacatgattgt

SEQ ID NO: 2166 - DNA, 63 bp, Glycine max
gaataatatattttacgatagttcttgatcagatattcatgtccgtgatagctctttttgccc

SEQ ID NO: 2167 - DNA, 407 bp, Glycine max
gaatcaaaaccctccaaggtttgatctcaaaataaacaatggaaaactcttcaccccttcctctttctaaacacaacagagatctccttttatctgctttataactcccatctggtcatccttcgcaaaaagaatttcagaatgagaatgtgtcaccactcttttgccttcaccatctcaatgtccttttctaattatctttatcttgctccttagaagaagaacctcacactacagagctcaagcaccccacccccaagtggtcaaaatgtcaactatgccaatgtatcaacagcaacaagaacaacctcctccgatgagtgtgacacaacattcaccacatgagtccattggtcccgtgattggggttctggtcgtggttattgtgttaggcgtaattgctgtta

SEQ ID NO: 2168 - DNA, 378 bp, Glycine max
gagacaagaatcttttgctgttttttctttcttttctcttcttctatattgcactattgcttatgcaaaacaattttacatatttcaggacggaaaagagagcgagtttcccttgatagatgagactagtgcaacacaacaacaaaacagtatcatcatggaagtgcatcatcttcaaggggttgttgttgataaaagcactgatttcttcccagttgaacaccctatggagccaccagatgaagatcgtcccgtgaaatgcccaatgcccgagtcttcggttatcaatgatgaaaggatgcatgaaaagagatttgcagaaagctcaaagaagagagtggagacaacccgggccgtggtgaatggagaatgaacacc

SEQ ID NO: 2169 - DNA, 376 bp, Glycine max
ggaggtaaaagtggaggagcgagttctggaggaagaggtcaaggtagtgccccgattttacgaggtgttcgtttctgaaatttgtggcacagcaagtgagcgatggggagagcttcaagggataagagggatatctattaccggaaagcaaaagaagaaggttggcgagctcgaagtgcgtttaaactccttcagatacacgaggaattcaacctttttgatggagtgaagcgtgttgtagatttatgtgctgccccaggtagctggagtcaggttttgagtcgtaaattgtatctcccagccaagcttgcacctgatgcaaaggatgaaaatcttcctcttattgtagctattgatttgcaaccaatggctccaa

SEQ ID NO: 2170 - DNA, 151 bp, Glycine max
atagtgcactacctctatactcacgtgtgagattgcaggccgttcagttgcaccaatgtctcaaccacatgcagcaaagcttaaatagggaaacccaagaccaccaagtccgtatcccgttccaccagcacctgacttcaattacacatct

SEQ ID NO: 2171 - DNA, 389 bp, Glycine max
gaactcaaactgcttcattgcataattgcagataagatcaacccttctaccttcagattcgcgggaagatggcatcacttcatgcgaatgtgacatcagttgtttacaacagtggcaaccgtgtttctcaatcgaaatttgcaagctcttccttcttgtctgggttcgatgttgttggtcgtgcttcaagtgcttggaagaaggaacttgtcccatcttccatttccttggtgcctagagccaccctaacatttgatcccccaactaccaattcagacataaccaagcaggagaagcacactcttgaccctgcttctccagattttcttcctcttccttcatttgaacagtgctttccaaagagcaccaaagaacacagggaagtcact

SEQ ID NO: 2172 - DNA, 380 bp, Glycine max
ggaggaggaagaagagcgagatggcgtcagtggtgaagaacgtactcaaatcggtcagagaaaagggtttcggcgctttcctcagggagctcaaggatgaaggctacctgagatgccttccggatggaaatctcttgcaaaccaagatccacaatattggggcaacacttgttggtgttgataaatttggtaacaagtattatgagaagcttggagacacacagtttggaaggcacaggtgggttgaatatgcagagaagactagatataatgcctctcaggttccagctgaatggcatggttggctccacttcatcactgatcacacaggagatgagcttcttttactgaaaccgaaaaggtatggtattgaacacaaa

SEQ ID NO: 2173 - DNA, 357 bp, Glycine max
ggacaagccaatcctttgtgtaggtgctcaaccctagtaagccgcaatggtgaagtactcaagggagcctgacaatccaactaagtcctgcaaggctagaggcgccgaccttacggttcattttaagaacacaagggaaactgcctttgcaatcaggaagttgcccttggtcaacgctaaaaggtacttggaagatgttcttgcccacaagcaagcaattccattcagacgtttttgtccacgtgttggcaggacagcccaggctaagaatatacactctaatggccaaagacggtggcctgtcaagtcaccaaaattcattcttgatttgctcaaaaatgctgagagcaatgctga

SEQ ID NO: 2174 - DNA, 391 bp, Glycine max
gacctaaaaattgtaccgatatggcttcacttgtgtgtctccttttttccttgcatttcatggttatcatgtcaggttccttaccagcaaatagtgaagtgtttacaaaagagtctcctatgtctctatccacaaaacccgtggaaagactcacccaactccacttttatttccataacaacaaaatgggggaacacccgactgctatgaaaattgttgagcctcctaaggcgtccatttctggttttgggactatttacatgatggatgaccctctaaccgaaggaccaagtccaacttcaaagcttgttggaagatgtcagggaatatatgctgaggcttcgcaacatgaacctgcgatactcatggtaacgaatttgttcttcactga

SEQ ID NO: 2175 - DNA, 384 bp, Glycine max
cctacttgcagcaaatattctcaatatgatgtaaaagtcaagactatgcagaaaatgaatacatgtcctcacgacacagaagcacaaaaaggattgtatggtttctatcaggcatttacaagttcaatgatgtatccttatttatactacttgcagtatttatcatcaagcatgactcttacactaaattagatagatggaatagtcttatcatacttgaaatatataatatctttagtaaattcggtatctactaactatatgaatcaaaattatgcagattatcttaattcacggttcaatggcatccaactagtcagaaattgattccatagttttctagtagctactcatgaatccagtgatacaatcctaatatgcctt

SEQ ID NO: 2176 - DNA, 393 bp, Glycine max
gcttcttatttgtaaccaagcaaacgctgccgaattcgttatcgctttgcactagcagctttgaaacccggttcatccgaagcccttcaccgaaccatgtcgatgagaaaggttagagagccaaaggaggaaaatgtgactctgggtccagctgttatagatggtgaacacgtttttggcgttgctcgcatccttgcctccttcaacgacaccttcatccatgtcactgatttgtctggcagggaaacccttgtccgaatcactggtggtatgaaagttaaagctgacagagatgaatcatctccttatgctgctatgcttgcagctcaagatgttgctgccagatgcaaggaactgggcataactgctcttcatatcaagctccgtgctact

SEQ ID NO: 2177 - DNA, 402 bp, Glycine max
gatcatcaataggtgttttcatttgggattcaaactcaccatggtggacgccttcaaactttgcatcttccttcttgcgtcgatctgtgctttcctagtcttttctaatccagtgctgtgtagtgataaggaggacagtgtattcaagggaatcaacagctacaggcaaacacggagcctggtacccctgagccaagtttcgaaggcaacatgtttggctgatgaagttgcagaagaaatagagaagatgccctgtgaaaacgtgaaccaatactacccttcatctgttcctggtagtgggaacctcaaaatcccaaacttgcagaagcacataaataaatgtgacattaacttcaacaccaccactgatggggtcattctccccgtttgtgtctccaagct

SEQ ID NO: 2178 - DNA, 232 bp, Glycine max
ccagacggctacagaagggtaacgctgagagcatacgacagtgtgggctacttgcagcacatattctcaatatgatgtgcaagtcaagactatgcacgcactgcataggggtcctcatcacacagacatacacatgagattgtatggtttccaacatgcagttacaagttcactgatgtcaccttacttacactacgtgcactatttatcatcaaccatgactcttacacca

SEQ ID NO: 2179 - DNA, 445 bp, Glycine max
ggtcgagcacgcgtccacgacagaagggggatcatagagtaagtgagtgagagaaggagattctgatttgatctctcagatctgagcttaccgtcgccggaatccaactcaacctgggtcggattcttgggtatcatcgcatcgccattcgttttagcctctcaataagagattttagttcgcttcaaattcgaggtttgatttgaagttgaaagttggaatagcttaactgttgtgtaaaacaaccaacacacacgagcatgggaagccaagacaacaacgtagaattgtcatccaattcatttctagcttacaaatctgctaaggtgtttgttgctggtcaccggggtcttgttggctcggccattggtcgcaagctcacccaacttgggttcactaatctagtcttgcgctcccatgccgagcttgatctcactcgacaatc

SEQ ID NO: 2180 - DNA, 376 bp, Glycine max
gactcactcatacaatagagaccagcttttgcttctttgtgaacatggagatgaggaaatcatgtggcttcttcttcttgctcctcctccttgtctttgcttcccaggtggtggtgcagacggagggaagagtgtgtgagtcacaaagccacgggttccatggtttgtgtaatagagaccacaactgtgctttggtctgcaggaacgaaggtttctccggtggcaggtgcaaaggcttccgccgccgctgcttttgcaccaggatttgttgagatctcatcaaacactactcttgccatgcaaattaataaatcatagctaggccaaataaattgcatctactctttatccatttgggagctagctaccacaacca

SEQ ID NO: 2181 - DNA, 261 bp, Glycine max
cccacccgtccgcccacgcaaacataccgctgctatatactacagaacgggatccacatcctccacaccacatctccactcttagctgccattggcttttcttcttccatttctcttcctttctaaccttgtttctattacccattctcgtattctgtcctaatcactcttgctccttccaaactttcctccttttccgagttttctcccaaacccacttttggggattctcttaaaataccaacttgctccgtttccctc

SEQ ID NO: 2182 - DNA, 379 bp, Glycine max
ggcgatccaaatccaaaaaaagaagacttcaaaaaatcggaagggtacttttgtaattatatggagactcgtgagatcagaatatcagatcgaatttaaacgggtcatattcgcattttcatttcattttgaattgaaaccgcggagagtttgctgctacatcgatcatcatcacctcatggacggacacgatccacaagacccaaagcagagccctgctgacatgactgcctttgtgcaaaatcttcttcagcagatgcaaaataggttccagacaatgtccgactccattgttacaaagattgatgatatgggaagtcgcataaatgagttggaacaaagcatcaatgacctgagagcagagatgggagtggagtcc

SEQ ID NO: 2183 - DNA, 297 bp, Glycine max
gcactgcgttatcgcacgaccagcttcatgaccaactgctcgcgcatcctattcactcttgcagctgttaacattccgtaaccttgaaatttccagatcgagaaccgtatctaggcgatttggtcagtcgcatgattcgaaaattatctttgaccgacaagttccacttctgttaccttgtcacggcctgaacagattggattctcgatatcacattgtaaccccatccatctggattaagactccgctgaccatcaatgatgtcgtcataggcttcaggtaaattatctcatgtat

SEQ ID NO: 2184 - DNA, 354 bp, Glycine max
ggattccatcaaatctcttcagatccgccaggtcctcacccaggctgtgagcctaggcatgattgttacgtctgcactgataatatggaaggcattgatgtgcgttactggcagtgaatctcccgttgttgttgttctttctggaagcatggaacccggattcaagcggggagacatcttgttcttgttgtgtttaatgttgatggacgtgagattccaattgttcatcgcgtaattaacgtacatgaaatggaagatactggggaggttgatgttctcacataaggagacaacaattatggggatgacaggctactgtacgctcactggcaactttggctgcaaaggcaccac

SEQ ID NO: 2185 - DNA, 297 bp, Glycine max
gattacattatcaaacaacccattccaattctcgtgaactccattccattgcttctcttcttcacaaattccattcctagagagagagagaagcaacaacatcataatcggaatttgattgaattcgatttgggtgatgagcgcgtgaaaaaagaagaagaggaagaagatggcagggaagaaaggggtggcggcagaagacgcaataagggccattgggttaaggttacaatctcacaaacgatctcaagctcaaattctgcaagaaccactccagattgatcgctatcgacgatg

SEQ ID NO: 2186 - DNA, 406 bp, Glycine max
gctagctagggtttctgagtttatgtggttgcgcctctgcctgtaagagtgaaaaaaccttctcttttccttctctcaagtctcaagagatttcatcatggctccaaagaaggacaaggctccaccaccttcctccaagcccgccaaatctggcggtggcaagcagaagaagaagaagtggagcaagggaaagcaaagggagaaggtgaataacatggtgctgtttgatcagggcacctatgataagctcctttctgaagctcccaaattcaagctcatcactccttccattctttctgatcgtttgaggattaatggatcacttgcaaggaaggctataagagaattgatggctaagggttcaatcaggatggtgtctgcccatgcaagccagcaaatttacacc

SEQ ID NO: 2187 - DNA, 379 bp, Glycine max
gatggaatggttagagaaaagagaggcccatatagtgatccacagcatccttacttttatgaagaagaggatgtgtggatggcacctggcttcattaaccagttttatgaagtccctgattactggaaagtatatgtgcatgaagttgatcaagaaagagaaatgtggttaaactctttttataaagctcctcttaggttacccatgccagctgagctagagcactggtggtcaaaagaggagaatcataagattcctgaatttgtccttattaacaaggaaccggagcctgatcctgaagatccttcaaagcttatatatactgaggatcctctcatcctccatacaccaactggaaatattatcaattatgtcgagg

SEQ ID NO: 2188 - DNA, 376 bp, Glycine max
gggtgaaaaaacaatgtctcactgtgccgcaaggtgtgccacaaggagtgccacgaggcttcttaacctaacgcgcgctctctccacggaggcgcgtgggcaaaagatcgagcgcatcgccacggagcttctcgacctcaacaggttcgagaggcacgatttcacggtcctctggcggctcaagatgggtctgcaccgctacggcgctcctgtggctggcatgacgatgccgtccgtcggggcggctgcccgggctgaggccggtgctgccgcagtcgcggagaagatggcatttgacttgaagttggagaagtatgatgctgctgccaagatcaagatcatcaaggaagtgaggtctttcaccgatttggggttg

SEQ ID NO: 2189 - DNA, 261 bp, Glycine max
gataacgggacaataaaacacacatactcttttctgtttttatactaatctcatgtaggtgtgacagacaatgtcattcttggcttatatgagggtatcaataatgctcttctgaatcgaggctcttcacgcttccctcatgtggtttcccctcaaataattgtttcccaccaaaaaaagctcccatctcttacagcatcaacatccacacccacgcgcgtcccatattcccctccaccttcctccatctgcttcccctcc

SEQ ID NO: 2190 - DNA, 402 bp, Glycine max
gacacaaactttattacagttgttgtattgtaattaagcaagaatattaggcaatggagtcttctagaacttcaactactcttgctcttttttaaccatcaatttgcttttctttgtcatggcaagtggctgctacacttgcacacagcctaagccaaaccctatcccattcccttaccctaaccctagtcctgccgcgaagagctgccccagggacgcacttaagctcggagtgtgcgcaaacgtgcttaatggaccaattggtgctattgtagggtcaccaccggaccacccatgttgctcagtgctagaagggcttcttgatcttgaagttgcggtttgcctctgcactgccatcaaagccaacattcttggcattaaccttaacatccccatttcgct

SEQ ID NO: 2191 - DNA, 344 bp, Glycine max
gagcgaaacagagagtgatttcagtgagtgatcggtgttcacttgatctcatcataatcgtcagcgtcaattgaagaagatgccgatcaggaacatcgccgtcggaaggcctgaagaggcgactcaccccgacacgttgaaggcggctttggctgagttcatctcaaccttcatcttcgtgttcgccggctcaagctccggcatcgcctacaacaagctcaccgacaacggcgctgccacccctgccggcctcatctccgcctccatcgcccatgcattcgccctcttcgtcgccgtctccgtcggcgccaacatctccggcgggcacgtcaaccccgccgtca

SEQ ID NO: 2192 - DNA, 346 bp, Glycine max
tggggtgctctgctcgtgcctctagggttatcatttctccatttccattttctctctcacttttcaagaatcgtaagctatgggaaagtcttacccaactgtgagtgctgattatcagaaggccgttgagaaggcgaagaagaagctcagaggcttcatcgctgagaagagatgcgctcctcgaatgctccgtttggcatggcactctgctggaacctttgacaagggcacgaagaccggtggacccttcggaaccatcaagcaccctgccgaactggctcagatcgctaacaacggtcttgacatcgctgttacgcttttggagccactcaaagcggagttccct

SEQ ID NO: 2193 - DNA, 234 bp, Glycine max
ggagggttacacgccgtcgtcactgtttttgtgtgtcacttcttcgtaggtgcaactgcaatggtgaagggacgccaaggggaacgtgtcaaagtctacgtgatgggtacaatccttggatacaacaggtctcagtcaaaccagtatccaaatacatccctgagtcaaattgagggtgtgaatgtcactgaagaaatagcatgggatgctgggcaaaaaatggcctatatctac

SEQ ID NO: 2194 - DNA, 379 bp, Glycine max
atcaacatttgtctctcatctttcaatttcaatcaacggttatacccttttctatttgagcatcatcatgtccaccgcagcgcagcccaaggccaagaaaacggcgtcgtccaagaagcccctctcccatcctaccttcgccgcgatgatagcggaggcgatagcgagtctgaaggagagaaccggttcgagccaatacgcgataaccaaattcatcgaaggcaagcacaaggagttgcctccaacctacaagaagcttgttctcgttcatctcaagaagtctgttgctgctggcaagctcgttaaggtcaaaaactctttcaagctcgcaccgactaagtctgctcctgttaaagccgctgctgctcccaagaagccc

SEQ ID NO: 2195 - DNA, 282 bp, Glycine max
ggtgtgtagtataagattcacttccttactcattttgtaatttcagtcagtcataatctttgtgaaaaataatgttcatcgagaattttaaggttgagtgtcctaaggtgaagtacagcgcaactgagattcagtccgtatacaactaccacatcaccgaccttgtttacgagaacacgaatgggacctatcagtggattgtcaaaccaaaatctgtcacgtccgaatttacaagcaacatccacgttcctatcttaggggtaatgcctgtgggttggggtg

SEQ ID NO: 2196 - DNA, 370 bp, Glycine max
agccgagacgaagacgacagaaggggaaaagtagagagaattagcagggtgttattggtgggtgtagaaagtagcagaaaatggctgtgatcccgtgtcactgttaccgtaccgtcggatcagacaaaccctacctctccggtcagagtctccgccgtcgcgctcctttccccgccgtctctgtttcatttcgacgccgaatatcatgcgtcgcctcttctgccatcgctcacaaagttgggctgagagattttcttcacttagatgattttgataaggacactattctgaagatgctggaccgggcacttgaggtcaaggccttgctgaagtcaagggacaggtcgtttcgaccttttgaggggaagac

SEQ ID NO: 2197 - DNA, 366 bp, Glycine max
gacacagaccaatattcattcatttagattcatcaaaagcttataacaacaattaaacatgagtgcagccagcagagcttggattgtggcatcaagcattggagcagtggaggcattgaaggatcaattgggggtgtgcaggtggaaccatgcattgaggtcactgcagcagcatgccaagagcaacattagatcctacactcaggccaaaaccttgtcttctgctacttctgctgctgtctccaataaggtcaagaggaccaaggaggagtccatgaggaaagtcatggacttgagctgttggggtcccaatacttcaaggttttagtgtgtggactattctaattgcattcatcattgtgctgc

SEQ ID NO: 2198 - DNA, 284 bp, Glycine max
gacgttccattctcttcaaacgtaacgcagcatcgctattctcttcattccatggctttgcgcagccagcagaccgtggattacccgagtttcagactcgttatcgtctgcgatggtggcacaggaaagacaagctttgtggggaggcatcgcacggggagaattctgggaggagatatgagccgggcagcggtgtgggggtgcacccattggagtttttcagagactgtggaaagagtcgatgttactgccggggagcggctgggcaggagaagtttggtggg

SEQ ID NO: 2199 - DNA, 335 bp, Glycine max
gacactcattccatttttacctttctctctcgctcgcatacgcaaataataaagaacaaggttttagccatggcatcgaagcggatcttgaatgaactcaaggatctctaaaaggatactcctacctcatgcatcgccggtcctgttgctgaagacatgtttcactggcaagcaacaattatgggtcctccagacagtccttatgctggaggtgttttcctagtcactattcatttcactccagattatccctttaagccacccaaggatgcattcaggacgaaggtatttcacccatatataaatagcaatggtagcatttgccttgacatatt

SEQ ID NO: 2200 - DNA, 296 bp, Glycine max
ggttctagtgtgtgattgtttgttgttgtaactcgttcttcgtcttttgttgttctgtgtttgtgtttgttttttctctcacctgaaaatgtcttgctgcggtggtaactgtggttgcggaagctcctgcaagtgcggcaacggctgcagaggctgcaagatgtacccagacttgagctacactgagtcaaccaccaccgagaccttggtcatgggagtggcacctgttaaggctcaatttgaaggttcttaaattggttttcccgcttaaaaccaatggtggcaattttgaacaa

SEQ ID NO: 2201 - DNA, 282 bp, Glycine max
gagcaacatggtgaagctggtggagagatttacttgccagaagcttacgttagaaccaagaggacgacctaatggagcatatcagttggaagaacttgtagctagcttcccaactggcttatctgagtgtggagaagctttatcatgccttatgagtaggagaacgagtactgtttgtggtgaatgtctatggttgaagaaatctgtccttagtcaacttgtgtgttttgttattcagttctcagcaataaactgctctggcaatctagtttcatgttcaca

SEQ ID NO: 2202 - DNA, 389 bp, Glycine max
ggctggaatgctttacaaatcaccgaggactcgggaattttggatgatgttggaaatcaccatgtctattttgtgcactcttatcgtgccatgccttcagatgacaacaatgagtggatatcctccaactgtgactatggtgacaaatttatagcatctattagaagaggaaatgtgcatgcagttcaattccatccagagaagagtggacatgttggcctctctattttgggaagattcttgaatccgaagtcagacatggcaaagaagcctggggaaggcaaagcttcaaaacttgcaaaaagggtgattgcttgtctcgatgtgagaacaaatgataacggggaccttgttgtaaccaaaggagaccagtatgatgtaagagaaca

SEQ ID NO: 2203 - DNA, 405 bp, Glycine max
gatctcattgctctgcattgcaacactcacacaccaatggcactcagacccatcgacaacgctcttccgacaacaaccccagagagacccaaaaaacaacctaaaatcgctgttgcaacccaaaaacaacaagatcgtgcttccgtcaacggcgaaaacgtagttccattgccatcatctgaggatgccactgttgactatgtctcctccgacaaccttaaacccttggcggaccccgaagttaagattcagagtttggtggaagatttggattcgaaaaattggatcaaggtttgtgaatcgttgaatgatgttaggcgcttctcgttactccactcctctcttctattcccaatcttgggtaaaattgtgttggtggtggcgaagacaatgaggaaccctcgt

SEQ ID NO: 2204 - DNA, 384 bp, Glycine max
ggaagcatagagcggcaaatgcaacacaggaagagaagaaaggaaaagcagcagaaagtgacaaaatcccagtaaagagtgacagtgccagctccctcaagccaaagtcttgtgcttttcacatccccattttctcatttccctttctgcttcctctttcgccaaatgggtctcccataacacaatcttcagcttttttttttcctctttctttcttcttcgcttctcggtggggcttcaagtttcaccataggatgttttctaagttgatacatcctcatgaagggcaggaagacatgcagggtggctccaatcaggctcacctcggagacccttgtcttgttttaacctccgaatccaaacctcgtcttcgttggaccgctg

SEQ ID NO: 2205 - DNA, 393 bp, Glycine max
gacttgcggctgcagcagagaagcactcatcattcttcgtttgtctaagatccgccttctctgaattgtaaaaatgtcgctcggagaaactgcttgttcatacgcagctctcatccttcatgaagatggaatcagtgtaactgccgacaagatcagcaccttgttggaaactgcaaaggttcaagtagatacctattggccaaccttatttgctaaacttgctgagaagaaaaatcttggcgatttgatagccaatgcagcaggcggtggtgcaccagttgctgttgcagctgcccctgttgctgcctcaggtggtggtggtgctgctgctgccgccccagctgctgaggagaaaaagaaggaggaacctgaagaagagagtgatgatgatat

SEQ ID NO: 2206 - DNA, 273 bp, Glycine max
acgcgtccaacggctgaacacagaatggtacagctgccacaagaccacatacgggtacagctgccaaaagaccacaaaacggtactgctgctaaaatacgacatccaggagaagaatacagagttgggtttcccactaacgacatatgctatcaatgtgtaactttacatcaatcttatcggttaactggacatttacctcctttatactcgataagttttgctataactcgttttgtagtttcatgtttactgcttaatatctgtgtttaac

SEQ ID NO: 2207 - DNA, 379 bp, Glycine max
actcaccacttcaaaacactcataacacaaagcacaaagcaaagctcatccttgagttaaaaaatggcagcagcttcttccatggctctctcatccccatccttggctggcaaggccgtgaagctgggcccatcagccccagaagtgggaagggtgagcatgaggaagaccgtcaccaagcaggtctcctcaggaagcccatggtacggcccagaccgagtcaagtacttgggcccattctctggcgagcccccgtcctacctaaccggtgagttcccaggcgactacgggtgggacactgctgggctttccgcagacccagaaaccttcgccaagaaccgtgaactccaagtgatccactccaggtgggccatgctcg

SEQ ID NO: 2208 - DNA, 392 bp, Glycine max
gaccgcattagcactcgtctttggttctggtttatagatctctgtgaagtcgctttataacactcaacctaagatgcagaacgaggaaggacagatcaccgagctttacattcctaggaagtgctctgccacaaaccgattgattaccgctaaggaccatgcttcggttcaggttaacattgggcatgtggatgagaatggcgtctacaatggccatttctccacttttgctctctgcggcttcatacgtgctcagggtgatgctgacagtgccctagatcgcttgtggcagaagaagaaagttgaagttaagcaacagtagacacccatgatagtttgttactttgctaagtattaatttctacgcttgctagagatatttgagtactatg

SEQ ID NO: 2209 - DNA, 354 bp, Glycine max
gaggacacaagacgataacaaatggcatcatctcagtcgaggaagagagttgacgccgtcgattctcgcgctgcttccgttctcgttcgcgccaaagatggcagtgcttttgctcgttgcgacgattgcaagaagaatgtgccggttgcactcatcgacatgcacagttgcagccttgaagctaaaattaaaatgaacccagacgctcaagttgtggaacaggctgctgaagctaagaagccggagaggaagaagcccaaatctaaagagcctatggcaaaaaaagctaaagttgggaaggggaagaaagtcaaggatcctaacatgcctaagcgtcctcccacagctttcttt

SEQ ID NO: 2210 - DNA, 376 bp, Glycine max
gacctgatccagatgaacccaaccagggaagccaataacccaaccaagttaacaacggataacattcaaaagtacctgaatgaaaaaaagtccttgatcctgaaaattgttgaaagccagaattctggcaagctgagcgagtgtgcagagaaccaatcaaggctgcagagaaatctcatgtacctagctgcaatagctgattctcaaccccaaccatctccaatgcctggtcagtatccttctagtggacttatgcagcagggagcacactacatgcatgctcagcaggctcagcagatgtcacaacaacagctaatggcttcgcgctcctcactcttgtactcccaacagcctttctcagtgcttcaacagcagc

SEQ ID NO: 2211 - DNA, 169 bp, Glycine max
gaggtcgcgagcgagcatcttcgagttgcatttcgcagtgtgtgtgagaagaagagaagaatggagaaaatgatgcgactgagaccactgttccgatcactgagttgcagatcttatcatgccttcccattcatcaaccatgtcgttcttcgaccttctcttatctcgc

SEQ ID NO: 2212 - DNA, 361 bp, Glycine max
gagacaagaatcttttgctgttttttctttcttttctcttcttctatattgcactattgcttatgcaaaacaattttacatatttcaggacggaaaagagagcgagtttcccttgatagatgagactagtgcaacacaagaacaaaacagtatcatcatggaagtgcatcatcttcaaggggttgttgttgataaaagcactgatttcttcccagttgaacagcctatggagccaccagatgaagattgtcgcgtgaaaatgccaatgcccgagtcgtcggttatcaatgatgaaaggatggatgaaaagagatttggagaaagctcaaagaagagagtggagaacaaccgggccgtggtg

SEQ ID NO: 2213 - DNA, 230 bp, Glycine max
gacaaaagtagcaaagcaattcactcagcctcttcaccacctctttaagctcaggctatctaagaaatgttagtacttctttcctggcaggtttaaatccgtttgtggtgtgagaaaaaaggggatggatttggcaagagcaagggtcttcttcatggggttcgttgtggggggtctatttgctgcaagggtgagtgctcagaccagtgagttccctcaagcggcaggac

SEQ ID NO: 2214 - DNA, 384 bp, Glycine max
gaactcaaactgcttcattgcataattgcagataagatcaacccttctaccttcagattcgcgggaagatggcatcacttcatgctaatgtgacatcagttgtttacaacagtggcaaccgtgtttctcaatcgaaatttgcaagctcttccttcttgtctgggttcgatgttgttggtcgtgcttcaagtgcttggaagaaggaacttgtcccatcttccatttccttggtgcctagagccaccctaacatttgatcccccaactaccaattcatacataaccaagcaaaagaagcacactcttgaccctgcttctccagattttcttcctcttccttcatttgaacagtgctttccaaagagcaacaaagaacacagggaag

SEQ ID NO: 2215 - DNA, 57 bp, Glycine max; identical to SEQ ID NO: 942
  modified_base (15)..(15): a, c, g, t, unknown, or other

SEQ ID NO: 2216 - DNA, 366 bp, Glycine max
gacttctcttcacacctttgttcactcttcttctcttgcggctagggttttagcgcagcttcttctagatttaaggaagatgggtaaggaaaaggttcacatcagtattgtggtcattggccatgtcgactctgggaaatccactaccactggtcacctgatttacaagcttggaggcattgacaagcgtgttattgagaggtttgagaaggaagctgctgagatgaacaagaggtctttcaagtatgcctgggtgctggacaaacttaaggctgagcctgaaagaagaatcaccattgatattgcttttgtggagtttgaaacaacaaagtaatagtgcacagttattgatgcgcctggacatag

SEQ ID NO: 2217 - DNA, 312 bp, Glycine max
caaccacgaagcaccggatgataacctaagatttgccagaggtagtgattgttatgagaatcgcctttagaggaatttcccacctcaccgtgtgtaagaaacaccaaaataacaaaattgagagtggtataaataggacgaaaatgcctaagtataatctcgtttggtattttacattatacttatatctatttcacacaccattcgtagctccagcaagtggaaccaacagataaacattttggtggctgttaattttaagcaagtagcacacatattatcagggagcactgatatatcgtgggaaattaa

SEQ ID NO: 2218 - DNA, 364 bp, Glycine max
gacaacacaacgcaacacaacgcgcactctctcttttctctcttaacacaaaaaccctatcgttcttcgcggtttcgccgattctcgccatgccgaaagccaaatccgacgccaaagccgccgatagccggttgaagcgcaagggcgctggtgctggaaggaagcaatcgaagaaagctgctaaggatcctaacaagccaaagagacctccaagcgctttcttcgttttcatgtccgagttcagagagcagtttaagaaggagcatcctaacagcaaatccgtcgctgttgtcggtaaagctggtggtgacaaatggaaatcgctgtctgatgctgaaaaggcccccttcgttgccacgggcga

SEQ ID NO: 2219 - DNA, 358 bp, Glycine max
gacaacaaaatttgccaattgccatttcaatcctcagtttctttcttcaacgtttccatcatacacagatcccaatcctctctcaagccctaatttcccctcatttccatggccacagaagagcccactgtcgcggtggaaccgctcccgaacctgcctccggcgatcctcccccggaggagaaggaggagaccaaacctgaagccaaggctaagaaaaccaaggagcccaaacctaaaaaggtttccagacctcgcaaccctcccactcatccttcctacgaagagatggttaaagatgcaattacctcgctgaaggagaaaaccggttcgagccaatacgcgattgcgaagttcat

SEQ ID NO: 2220 - DNA, 380 bp, Glycine max
ggtaatccttacgctctctcactcacaaacgcacactgaattcaaaaacatcgaaagagagaggcatggccgagcaaaccttcatcatgatcaagccagatggcgttcaaagaggccttattggcgagattattagcagatttgagaggaagggtttttacttgaaagggttgaaactcgttactgtggaccgtccttttgctgagaagcactatgctgatttgtctgcaaagcctttctttagtggtttggtggattacattgtctctggccctgttgttgccatgatctgggagggtaagaatgttgttacaactggccgaaagattatcggagccacaaacccagctcaatctgagcctggaactattcgtggtgac

SEQ ID NO: 2221 - DNA, 372 bp, Glycine max
gaaagaagagaaaataataatatgaataacaacccacaaaacttgggtcttgcaaattaagttcattttcctccctttcactctcgtagacatcacaaaccttccctccattcatcccacgcatggctgccatgaactctagcgtattggcctgtagctatgccatatcaggtgcagcgtgttcggagctcaatgggaaggtcacttccgtggcctatgttgcatgctctggctacaagttgccattgatcaaagctgaggccagagttcctaaagccaaagaatctgaaggaggaaggagaggtgcccttgttctcttggcagctacccttttcacctctgcagcttccaattcttctgccaatgctggga

SEQ ID NO: 2222 - DNA, 345 bp, Glycine max
ggatgcagatgcagcctatcatggcagcctactaccccaacaacgtcaccactgatcacattcaacagtacctggatgagaacaagtccttgatcctgaagattgttgaaagccagaattctggcaagctgagcgagtgtgcagagaaccaatcaaggctgcagagaaatctcatgtacctagctgcaatagctgattctcaaccccaaccatctccaatgcctggtcagtatccttctagtggacttatgcagcagggagcacactacatgcaggctcagcaggctcagcagatgtcacaacaacagctaatggcttcgcgctcctcactcttgtactcccaac

SEQ ID NO: 2223 - DNA, 392 bp, Glycine max
gccgcagcaagtgccattttattttgccctacctcctcgattctagggtttcaacaatggcgcagttccttccctacgaatccgcttcaggctacagcctgttccacgttcacggcgtcgattaaatcggacagaacaccgaagcggttcggaactccgtttcggacctcaacaagttcggcaaagtcgttaagcttcgctccttcaaccctttcacttccgctctcgatgctctcaaacagtgcaacgccgtctccgaaggcatattaactgatgagctgaggactgtcttggagaccaacttgcctaaagtgaacgaaggtaagaagtccaagttcactttacgtgtgtccgattctaagattgggtcccagatatctgaagtgactaag

SEQ ID NO: 2224 - DNA, 355 bp, Glycine max
gacagcaaaacaattttcaaactcaattaccattccataacctaaatctcctctttgtttccgagtcagagagcaatggcacgtaccaagcaaaccgctcgcaagtccaccggcggaaaggcgccgaggaagcaattggcgactaaagccgctcgcaagtcagctccggccaccggcggagtgaagaagccccaccgcttcaggcccggaacggtggctctgagggagatcagaaagtaccagaagagcactgaacttctgatccgaaaactcccattccagaggctcgtcagagaaatcgctcaggatttcaaaacagatcttcgtttccagagcagcgctgtttctgcgcttc

SEQ ID NO: 2225 - DNA, 322 bp, Glycine max
ggccgttttcttcttcatcatagtcgtggccgtgtcgcagcaaaaccaaaccacatattaacttgtttgctctaagtcatggctctgatcttgcacgcaaccaaagcaaacaagaatgctttcaagactctgattgcggcagagtacagtggcgtccaagtggaattggcccctaatttcgagatgggtgtctctaatagaactcctgaattccttaaaatgaatcccataggaaaggttcctgtcttggaaacgcccgatggtccagtctttgagagcaatgccattgctcgttacgttgctcgactcaagggtgacaacg

SEQ ID NO: 2226 - DNA, 375 bp, Glycine max
gatcatataaaccacctcggcttttgcttcctctgctgcgttttaacgcccatcacgcgtttctttgcttatacactaactaagatttcaaaccccccgcggccaactaactaagatctggttttgttctgattgattcgtgcattggactgtgaaacgcacgccaaaatgtggtggatgatgaacgagactggaggcaattactgttctaagaagagcgatgatttgtgcagcaatgtgtgtgatcaggaatcaagtcaagtattgggcatgtcacgaattcgctgtattctgcgtggtttggctgtgaaaacctatatatgcacgtatgctgttatcccaatgtgcgtcattggattcgatatacacgggcag

SEQ ID NO: 2227 - DNA, 331 bp, Glycine max
gaaagcaatctcaacttccaagttaggtcactcttccagatggcgcgtacaaagcaaactgctcgcgagtccaccggcggcaaggctccccggaagcagctggcgacgaaggccgctcggaagtctgctccggcgaccggcggagtgaagaagccgcacaggttcaagcctggaacagtggccctgagggagatcagaaagtaccagaagagcacggagcttctgatccgaaagcttccgtttcagcgtttggttcgtgaaatcgctcaagatttcaaaacggatctgaggtttcagagcagtgctgtttcggcgctccaggaagctgctg

SEQ ID NO: 2228 - DNA, 380 bp, Glycine max
gagaacaaaacacacagagtcttttctgtttttatacaaacctcatgtaggtgggagagagagtgtctttcttggctcatagcatagcatcactatggctcttctgagtcgagcctcttcacgcttccctcagctggtttcccctcaaagagttgtttccctccacacaacgctcccatctcttaacgcatcaacatccacacccacgcccgccccatatgccccgccaccgcctccgtccgcttcccctcccgccggcgtgtcgaaggcggcggagttcgtgatctcgaaggttgacgatctgatgaactgggcccggcgcggctccatcctggcccatgaccttcggcctcgcctgctgcgccgtcgaaatgatgcac

SEQ ID NO: 2229 - DNA, 253 bp, Glycine max
gtgacattttagattccaatgcacataaaatttatgtatataaagatggacactgaaatcaaatcaggcatttcatttagtcctttgtactgtatactagtagtatgttgctggccatcatttgttgaaaacttaaaatgttagaaatagtacaagggtgacaaattgtaataatgtatttatcagaagagacgaagagaaagagggtgacaaggagaagagcactaggagagaagaaaatggaggggaggat

SEQ ID NO: 2230 - DNA, 363 bp, Glycine max
tgggcttcttatttgtaacgaagcaaacgctgccgaattcgttatcgctttgcactagcagctttgaaacccggttcatccgaagcccttcaccgaaccatgtcgatgagaaaggttagagagccaaaggaggaaaatgtgactctgggtccagctgttagagatggtgaacacgtttttggcgttgctcgcatctttgcctccttcaacgacaccttcatccatgtcactgatttgtctggcagggaaacccttgtccgaatcactggtggtatgaaagttaaagctgacagagatgaatcatctccttatgctgctatgcttgcagctcacgatgttgctgccagatgcaaagaactgggc

SEQ ID NO: 2231 - DNA, 363 bp, Glycine max
  modified_base (104)..(104): a, c, g, t, unknown, or other
gactcactcatacaatagagaccagcttttgcttctttgtgaacatggagatgaggaaatcatgtggcttcttcttcttgctcctcctccttgtctttgcttcncaggtggtggtgcagacggagggaagagtgtgtgagtcacaaagccacgggttccatgggttgtggtatagaggacaaaactgtgctttggtctgcaggaacgaaaggttctccggtggcaggtgcaaaagctttcgccgccgctgcttttgcaccaggatttgttgagatctcatcaaacactactcttgccatgcaaattaataaatcatagctaggccaaataaattgcatctactctttatccatttgggagcta

SEQ ID NO: 2232 - DNA, 329 bp, Glycine max
gatccacatcctccacaacacaactccactcttaactgccattggtttttcctcctccaattcccctcctttccaaacttttttcgattacccatttggagattctgtcctaatgggtcctgctccctccaaaatttcctcccttttccgggttttctcacaaacccattgttggggatctctgaaaaacccaacttgctctgtttctctgagctttgcgaatgtgaaacttggaagcagaaaccttagggtttgtgcctcaactgtgcctctctcacgggtgattttcgaacccttcgaggaggttaagaagggtgaacttgctgttc

SEQ ID NO: 2233 - DNA, 374 bp, Glycine max
ggcgatccaaatccaaaaaaagaagacttcaaaaaatcggaagggtacttttgtaattatatggaaacccgtgagatcagaatatcagatcgaatttaaacgggtcaaattcgcattttcatttcattttgaattgaaaccgcggaaagtttgctgctacatcgatcatcatcacctcatggacggacacgatccacaagacccaaagcagagccctgctgacatgactgcctttgtgcaaaatcttcttcagcagatgcaaaataggttccagacaatgtccgactccattgttacaaagattgatgatatgggaagtcgcataaatgagttggaacaaagcatcaatgacctgagagcagagatgggagtgg

SEQ ID NO: 2234 - DNA, 139 bp, Glycine max
gcactgcgttatagcaggaccaacttcatgaccacactgctcgctattgctgttcgctcttgctgctcgtgggacttcggtaaccttgacaatgtccagttcggtatccgtaccttggccatttggtcagtctcatgat

SEQ ID NO: 2235 - DNA, 330 bp, Glycine max
gctagctagggtttctgagtttatgtggttgcgcctctgcctgtaagagtgaaaaaaccttctcttttccttctctcaagtctcaagagatttcatcatggctccaaagaaggacaaggctccaccaccttcctccaagcccgccaaatctggcggtggcaagcagaagaagaagaagtggagcaagggaaagcaaagggagaaggtgaataacatggtgctgtttgatcagggcacctatgataagctcctttctgaagctcccaaattcaagctcatcactccgtccagtcgttctgatcgtttgaggattaatggatcacttgcaag

SEQ ID NO: 2236 - DNA, 359 bp, Glycine max
  modified_base (335)..(335): a, c, g, t, unknown, or other
ggaacttgtaaaataaaatttgcatcatatagagtcatatatagcttgcgctgcgcagttattttgaacctttttttaatatgtgtaattcatatatgtgtttgtactagcttatgctataagataattattctgtgtgactgactgaactatttactttatggtaacgaagatattctcttgtattattttaattgttttcatgttcaccttttctatcctcccctactttttcatctaatctaaagctggctcctgcttctgcttctgccattcttcttcattattctctgcactaatttaagagcatgatacacgatgcaggtccctataanggagggtttctcatgcatgtgact

SEQ ID NO: 2237 - DNA, 372 bp, Glycine max
gatggaatggttagagaaaagagaggcccatatagtgatccacagcatccttacttttatgaagaagaggatgtgtggatggcacctggcttcattaaccagttttatgaagtccctgattactggaaagtatatgtgcatgaagttgatcaagaaagagaaatgtggttaaactctttttataaagctcctcttacgttacccatgccagctgagctagagcactggtggtccaaaagaggagaatcaatagattcctgaatttgtccttattaacaaggaaccggagcctgatcctgaagatccttcaaagcttatatatactgaggatcctctcatcctccatacaccaactggaaatattatcaatta

SEQ ID NO: 2238 - DNA, 111 bp, Glycine max
gaccattttggagggagagaaaaaaaagggggggaaatttcaatggcgtcaagggtttctctgaaggcaaggggtaagatttcaagggtatcaagcgccgcgaaatatcta

SEQ ID NO: 2239 - DNA, 208 bp, Glycine max
gggtgaaaaaacaatgtctcactgtgccgcaaggtgtgccacaaggagtgccacgaggcttcttaacctaacgcgcgctctctccacggaggcgcgtgggcaaaagattgaacgcatcgccacggagcttctcgacctcaacaagttccagaagcacgatttcacggtcctctggcggctcaagatgggtctgcaacgctaaggggct

SEQ ID NO: 2240 - DNA, 296 bp, Glycine max
gacacaaactttattacagttgttgtattgtaattaagcaagaatattaggcaatggagtcttctagaacttcaactactcttgctcttttttaaccatcaatttgcttttctttgtcatggcaagtggctgctacacttgcacacagcctaagccaaaccctatcccattcccttagcctaaccctagtcctgccgcgaagagctgccccagggacgcacttaagctcggagtgtgcgcaaacgtgcttaatggaccaattggtgctattgtagggtcaccagcggaacacccat

SEQ ID NO: 2241 - DNA, 251 bp, Glycine max
ggaaatgaaaaaggtgacaagaagtgaagagaatgcgggttgtttgttgttccaattcaggcgtgagtgctttccctagttgtcttagattccctccactgatcgcaatttcaacaacaccctcttcgatccgctttctaaattcgccacccctccgttccactgcttcgtcgcaacacgttacaatagtggcttcgaagaattctcaacaggacacgcgcttagcgagaatcgcgtctgcagtccgagtc

SEQ ID NO: 2242 - DNA, 260 bp, Glycine max
gactgcaactttgctctctgtgaggcttcaatttctaattagggtttcgcttagggtaaccaatagccatgggagtcttcacctttgtcgtccgcaaatccggcagcgaatggagcgccaagcagcattccggggacatcgaggcctccgccgagtccaccttcgatctccaacggggagctcgtgcaagccgctcgcgccgttgattcgtccggtggagttgagtcctctttcgcgcgcgtgtcgcggagctccgcggt

SEQ ID NO: 2243 - DNA, 393 bp, Glycine max
gacttgcggctgcagcagagaagcactcatcattcttcgtttgtctaagatccgccttctctgaattgtaaaaatgtcgctcggagaaactgcttgttcatacgcagctctcatccttcatgaagatggaatcagtgtaactgccgacaagatcagcaccttgttggaaactgcaaaggttcaagtagatacctattggccaaccttatttgctaaacttgctgagaagaaaaatcttggcgatttgatagccaatgcagcaggcggtggtgcaccagttgctgttgcagctgcccctgttgctgcctcaggtggtggtggtgctgctgctgccgccccagctgctgaggagaaaaagaaggacgaacctgaagaagagagtgatgatgatat

SEQ ID NO: 2244 - DNA, 337 bp, Glycine max
cacccgagaatgtcccaatttataaaaatgaaaatagaagcttgaataataggaaacacattttatttcttcataagattcaagtcaaacaatcatgacctaatttatctcgaagatagaacaaagacgcccctataccaagagggtagtggaccattcctacatcgaagagggtccttcaagaccagcattattagtagtcctaaaggctaaaagtgacatcagcaggcactgacgatttctaacgagatactaaaatctagtaggtcctcgtcgcattgggggagcgttggttgacagggtggagcgatcgcgagcctgttcgctgggaggctgg

SEQ ID NO: 2245 - DNA, 275 bp, Glycine max
gagcaacatggtgaagctggtggagagatttacttgccagaagcttacgttagaaccaagaggactacttaatggagcaaatcagttggaagaacttgtagctagcttcccaactggcttatctgagtgtggagaagcattatcaagccttaggagtaggagaacgagtactgtttgtgatgaatgtctatggtttaagaaatctgtctttagtcaacttgtgtgttttgttattcagttctcagcaataaactgctctggcaatctagtttcat

SEQ ID NO: 2246 - DNA, 367 bp, Glycine max
  modified_base (348)..(348): a, c, g, t, unknown, or other
ggtgtgagttgagtctgtgatgataatgatgatgatgatgtgttccatgtggatgtgggttgtccttgtggccattgctggtgcccttttagtcctaagatctatcctcaagaatgtaaattggtggctctatgaatccaaattgggtgtgaagcagtactctttgccaccaggtgacatgggatggcccttcattggcaacatgtggtcctttctcagtgctttcaagtccaaggaccctgattccttcatctcctcctttgtctccagatttggaagaactggaatgtacaagaccatgatgtttggaaatccaagtataattgtgacaacacctgaaatatgcanaagggtgcttacagatgac

SEQ ID NO: 2247 - DNA, 384 bp, Glycine max
gacctttcacctttgacatacaacaggtgcagagtgatacgatgccgtgcctcaacctctccaccaacgttaacctaaatggcgtcgacaccacctccattctctcagaagcaaactcaaccgtctccagcaacatcggcatagccgaagcctatgtgatgactgtactgaaaggatcagtacctaaatctcatggcgggagtgagcagccaacagcttatggtgaattggtgtccattggtagtcctagccctgacgtgaccaagaaacttagtgctggcagtgcttcaagtctcgattacaagttgtctgtgacgtagtcgcgattctacgtgacgtattatgacaccaagggttccagcattggatagaatggatctacat

SEQ ID NO: 2248 - DNA, 383 bp, Glycine max
gattgttggcttgtgctctgctcgtgcctctagggttatcatatctccatttccatttcctctctctcagtttccaagaatcttaagctatgggaaagtcttacccaaccgtgagcgctgattaccagaaggccgttgagaaggcgaagaagaagctcagaggcttcatcgctgagaagagatgcgctcctctaatgctccgtttggcatggcactctgctggaacttacgacgtgagctcgaagaccggtggtcccttcggaaccataaagcacccctccgaactcgctcacggcgctaacaacggtcttgacatcgctgttaggcttttggagccactcaaagcggagtttcctattttgagctacgccgatttctaacag

SEQ ID NO: 2249 - DNA, 362 bp, Glycine max
gaagcacaaaccttattcaacactcatatccttatcctgtttctttcaatggaagtcatttctgcttctagcttgaatcccaacgctccgatgttcgtgccactcgcctatcggacggtggaggatttctccgaccagtggtgggacctcgttcactcctccccctggttccgcgactactggctccgcgagtgcttccaatatccccagttccaaaacgacgacgctttcgacttcgactttgacctagatctccaagatgaagatgaaatggaacgagatgaatggaaagatgtggtgtcattggggctgctgaaatggcgacgctgtggatgatgatcggcccatgcgccgaggtatgt

SEQ ID NO: 2250 - DNA, 270 bp, Glycine max
gacacatgcccatcatcaaagtttcttcctttctctgctctttgtcttctctgacacatttggggccttgttgagtgtgtttttgcgagagggtatggcgaaggacgttgaggttgctgaacgttgctccttccctgggaaagactaccaagaccctccaacagcaacactcattgatgctgaagaactcacaaagtggtccttttacagggctcttaatgctgagttcaatgccactttgctcttcctctacattaatgtgctcacagt

SEQ ID NO: 2251 - DNA, 389 bp, Glycine max
gggcagccaaagaaaagaaaatcctcaattttctgagcagccaaacactctctctctgtctctcgaaaattctcagtttgcagagaaaatctgaatcatgtcgtggcaagcgtatgtcgacgatcaccttctgtgtgacatcgaaggtaaccacctcactcacgctgctatcatcggccaagacggcagcgtttgggctcagagtaccgacttccctcagttcaaacctgaggagataactgccatcatgaatgactttaatgagcctggattacttgctccaactggattgtatctcggtggcaccaaatatatggtcatccagggtgaacccggtgctgtcattcgagggaagaagggtcctggtggtgttactgtgaagaagaccg

SEQ ID NO: 2252 - DNA, 397 bp, Glycine max
acctacattgtacattttttatgcaacaccaaaacacgaaaacaaacttccactgccgtaataaaaacattatctgccagcgagggtttttttaataaaaattgcgcaatgtcagctgaaaaatatcagtcgcggtgaataatatttttttgccgtgttgggctaatgttttcctggccgaataaatgggaacatgccagtttcggccgtaacaaaacgtcggttgagctcgcacaaaaaaacctagccgacctacattgttcattttttatgcatcaccaaaacaagaaaacttcctctgccgtaaaaaaaacattatctgccggcgagcgtttttaaataaaaattgcgcaacgtcggctgagaaatatcagtcgcggctatttcacgaccgatg

SEQ ID NO: 2253 - DNA, 263 bp, Glycine max
ggcagtttcaaattttcttttccttcactttcccgagaaaaaaataacacttttcactttcttcactacgttctcacttcgatatggctcgtacgaagcaaaccgctcgcaagtccaccggtggcaaggcgccacgtaagcagctcgccaccaaggccgctcggaagtccgctccggcgaccggaggagtgaagaagccccaccgcttcaggccgggaaccgtggcgctgagggaaatcagaaagtaccagagagcaccgagc

SEQ ID NO: 2254 - DNA, 397 bp, Glycine max
gattgttggcttgtgctctgctcgtgcctctagggttatcatatctccatttccatttcctctctctcagtttccaagaatcttaagctatgggaaagtcttacccaaccgtgagcgctgattaccagaaggccgttgagaaggcgaagaagaagctcagaggcttcatcgctgagaagagatgcgctcctctaatgctccgtttggcatggcactctgctggaacttacgacgtgagctcgaagaccggtggtcccttcggaaccataaagcacccctccgaactcgctcacggcgctaacaacggtcctgacatcgctgttaggcttttggagccactcaaagcggagtttcctatttttgagctacgccgatttcttacagttggctggcgttg

SEQ ID NO: 2255 - DNA, 261 bp, Glycine max
ggcagaatctggggttgctcctgctttggccagggctctcagctctgaaagattggtaccgattccggatgtgagccaaaacagctttcatttgaatcccctgtttttcctttcgggaaagttaacaatatgtgggagtttctgctgtgaattgaattcgagtcgtagcttctggattcggtgcttgctgctttggtggcataagttattggactaagtgagatgatacgatttgagtgcaaaggagacttacactgtgtg

SEQ ID NO: 2256 - DNA, 383 bp, Glycine max
gactcctttccgtcacttttggggaagaggtcgagtttcacagcagcaatggtgtacgtcaaggctcagaaatcaaaagcctacttcaagagatatcaagtcaagttcaagagaagaagagagggaaaaaccgattaccgtgccaggattcggttgattaatcaggacaagaacaaatataacactccgaaataccgatttgttgttcgctttagcaacaaggacattgttgcacaaataatatctgctaacattgctggcgatattgttcttgctgcagcatatgcacatgagctgccacaatatggtcttgaagtagggcttacaaattatgctggagcttaatgcactggtctcctgttggcccgaagagtcctcaatac

SEQ ID NO: 2257 - DNA, 269 bp, Glycine max
acacacagagcggttctcataatttggagaatccgaaaaagacgttaaagaaagtcccattcccactaccgaagcaaattaagaagatgaagcagcagagagtggagtttatgggcatgggcatgggcatgggcatgggcctgggccttttggtggtgatgatggcatgtgggtcggcgagtggtgcggatgatttgggcaccaagttgtcagcggtgattcagaaggtaataccgtgtatggagttcgcgaaggggaaggaagaaacg

SEQ ID NO: 2258 - DNA, 379 bp, Glycine max
gacagcgaaacagagagtgatttcagtgagtgatcggtgttcacttgatctcatcataatcgtcagcgtcaattgaagaagatgccgatcagaaacatcgccgtcggaaggcctgaagaggcgactcaccccgacacgttgaaggcggctttggctgagttcatctcaaccttcatcttcgtgttcgccggctcaggctccggcatcgcctacaacaagctcaccgacaacggcgctgccacccctgccggcctcatctccgcctccatcgcccatgcattcgccctcttcgtcgccgtctccgtcggcgccaacatctccggcggccacgtcaaccccgccgtcaccttcggcgccttcgtcggcggcaacatcacct

SEQ ID NO: 2259 - DNA, 386 bp, Glycine max
  modified_base (372)..(372): a, c, g, t, unknown, or other
ggttctagtgtgtgattgtttgttgttgtaactcgttcttcttcttttgttgttctgtgtttgtgtttgttttttctctcacctgaaaatgtcttgctgcggtggtaactgtggttgcggaagctcctgcaagtgcggcaacggctgcggaggctgcaagatgtacccagacttgagctacactgagtcaaccaccaccgagaccttggtcatgggagtggcacctgttaaggctcaatttgagggtgctgaaatgggtgtgcccgctgagaacgatggctgcaaatgtggaccaaactgctcctgcaacccctgcacttgcaagtgaggtgttgggagagcaagcttcaagcagagatagcccttaattangaataatgataaac

SEQ ID NO: 2260 - DNA, 371 bp, Glycine max
ggttctaatgtgtgattgtttgttgttgtaactcgttcttcgtcatttgttgttctgtgtttgtgtatgttttttctctcacctgaaaatgtcttgctgcggtggtaactgtggttgcggaagctcctgcaagtgcggcaacggctgcagaggctgcaaaaatgtacccaagacttgagctacactgagtcaactaccaccgagaccttggtcatgggagtggcacctgttaaggctcaatttgagggtgctgaaatgggtgtgcccgctgagaacgatggctgcaaatgtggaccaaactgctcctgcaacccctgcacttgcaagcgacgtgttgggagagcaagcttcaagcagagatagcccttaat

SEQ ID NO: 2261 - DNA, 215 bp, Glycine max
agaagaagaaagagttatatttcccactaaggaaatatgctatcaaggtgtaactttagagcaatcttatcggttaattggacatttacctcctttatactcgacaagttttgatatatctcgttttgtagtttcatgtttattgcttattggctgtgttaaacttcatgtcttctttacacctggggtttcttgaagctaccaggatttatgga

SEQ ID NO: 2262 - DNA, 384 bp, Glycine max
gatctcattgctctgcattgcaacactcacacaccaatggcactcagacccatcgacaacgctcttccgacaacaaccccagagagacccaagagacaagctaaaatcgctgttgcaacccagagacaacaagatcgtgcttccgtcaacggcgaaaacgtagttccattgccatcatctgaggatgccactgttgactatgtctcctccgacaaccttaaacccttggcggaccccgaagttaagattcagagtttggtggaagatttggattcgaaaaattggatcaaggtttgtgaatcgttgaatgatgttaggcgcttctcgttactccactcctctcgtcgagtcccaatcttgggtaaaattgtgttgggtgtgggg

SEQ ID NO: 2263 - DNA, 360 bp, Glycine max
gagcgaaacagagagtgatttcagtgagtgatcggtgttcacttgatctcatcataatcgtcagcgtcaattgaagaagatgccgatcagaaacatcgccgtcggaaggcctgaagaggcgactcaccccgacacgttgaaggcggctttggctgagttcatctcaaccttcatcttcgtgttcgccggctcaggctccggcatcgcctacaacaagctcaccgacaacggcgctgccacccctgccagcctcatctccgcctccatcgcccatgcattcgccctcttcgtcgccgtctccgtcggatccaacatctccggcggtcaggtcaccccgccgtcaccttcggcgccttcgtc

SEQ ID NO: 2264 - DNA, 365 bp, Glycine max
gacactgctacaaaaacattgaaagaaatagaaaaagcaaaactggtttctcgcatttcctccgaaacaaaccgtttcgctcgtttctcggatctgcaatggaagccccacccaaaggcgctgctggaagaagaggtgacaggaagaagtccgtttccaaatccatcaaagctggcctccaattccccgtcagccgcgtcgccaggtacttgaagaaaggccgttactctcgccgccttggcaccggcgctcccatttatctcgccgccgttctcgaatatctcgccgcagaagtgttggagctggccgggaacgctgcacgtgacaacaagaagaataggattaaccctaggcacgtgttgctg

SEQ ID NO: 2265 - DNA, 377 bp, Glycine max
ggaaagcgcatttactagtgtttaccaactccctcacgcccccaaggccaagaaaagaaaacacacacttttttagccttccctctctctctctctttctcttctccattctccattttttttttcttcttatcacgcgtttgtgaccacaaccaagtacgaaagttgagatttttagcatacccatttccacacaatgtccaacaagtccccagttttccccatcccagacccccaacacttcagcgactatggatttgaccctcaaatcaactatttccaggtgttggaagaagccatgaagcacaagcgcgagacagcgagatccatagactccatccacttcaagctccagaagcccatatccaaggacgact

SEQ ID NO: 2266 - DNA, 375 bp, Glycine max
ggcccttctagctttttcccagtccaagcagcctccaattcgtgccactctcttcaagatggccgttaccttctcaaatctccacacagaatcaggtctcaagtccctcgacgacttcctctctgggaaggtctacgtttctggggatcagttcacaaaggacgacatcaaagtgtatggtgctgttttggagaagccaggtgactcttttcccaatgctgccaagtggtacgaggttgtctcatctcagcttgctgcaagcttccccggcaatgctcaaggggtgagattcagtggcaaagcttctgctccagcggaggctgctcctgcgaaacctgatgcttctgctgctgaagatgatgatgaccttgatct

SEQ ID NO: 2267 - DNA, 391 bp, Glycine max
gagggtttggttattacggttttcgctgaccggtgcgcagtcgagcctccagaagacgaatcgaaaatgccgtcgcacaagacattcagaatcaagaagaagttggcgaagaagatgaggcagaacaggcccattccctactggatccgcatgaggaccgataacaccatcaggtacaacgcgaagcgccgtcactggcgtcgcaccaagcttggattctgaggtgtatgctctgcctaggttcaatttatccaattaattagtgttttattttcttgaggcaagaacaatgttttgagtttttaatattttccatttgttcgaagactatattgtgtaaggaacttattgtagttcatactcatggcgtttgtcaactccttttaaagta

SEQ ID NO: 2268 - DNA, 391 bp, Glycine max
ggctgacaagccaatcctttgtgtaggtgctcaaccctagtaagccgcaatggtgaagtactcaagggagcctgacaatccaactaagtcttgcaaggctagaggcgccgaccttagggttcattttaagaacacaagggaaactgcctttgcaatcaggaagttgcccttggtcaaggctaaaaggtacttggaagatgttcttgcccacaagcaggcaattccattcagacgtttttgtcgaggtgttggaaggacagcccaggctaagaatagacactctaatggccaaggacggtggcctgtcaagtcagcaaaattcattcttgatttgctcaaaaatgctgagagcaatgctgaagtgaaaggttggatgttgatgcactgtaca

SEQ ID NO: 2269 - DNA, 322 bp, Glycine max
gctctacggcactcgttttcgttctcgttctggtttatagatctttgcgaaggaggtttacagcgctcaaccaaagatgcagaacgaggaaggacagatcactgagctttacattccgaggaagtgctccgccacaaacagattgattaccgctaaggaccatgcttcggttcagatcaacattgggcatgtggatgagaatggcgtctacaatggccatttctccacttttgccctctgcggattcatccgtgctcagggtgatgctgacagtgctctagaccgcttgtggcagaagaagaaagttgaagttaagcaacag

SEQ ID NO: 2270 - DNA, 347 bp, Glycine max
gaggaggttctgatcttctttcttttttgtctggttccctttcttccttcaaccaatttcgagatccgaaaccggcatcagatccgatccgaaatgtacggattcgaagctctcaccttcaacatccacggcggcttcctaaaaggcaacctccgcgggcaacgcgccgggctcctcaacaacgccgattacaacaacctctgccaatgcgaaaccctcgacgacatcaagatgcacctctccgccaacgagtacgggccttaactccaaaacgaaccttccccaatggataacacaacgattgtggagaaatgtactcctaagctgggtgatgaataccagaacat

SEQ ID NO: 2271 - DNA, 390 bp, Glycine max
gggtgcagccccttctgccctccccagccattaactgaaaagaaacaaccaaaaaaccaaaagtactacaaatttttttcagtttctccgccgccgcacaaccaccacctcctccgttcggatctccggcggacctactatccctactactactctactctatttacacggaagaacataaaactatccccctcccccaaaaaaaaccccaaagcggatcggttagggtttagttttgtaccatttcgtgtaatctaatttttcatccgtaaaaatctaattttgaggcggggagatggcggtgattcaggtgcagcatcagagtccggtgtccgcggctcctcctccaaacggcggcgtgacgaacgccccgaacaacgcgaaccagtt

SEQ ID NO: 2272 - DNA, 312 bp, Glycine max
ggtccaaaatcctcactccagccacacgcctcagtagaccatggcctcattgggtgggttacaaaatctaagcggcatcaattttcttatcaaaaaagagggtccaaaagtcaatgcgaagttcgagctgaagccgccaccatatccactgaatggtttggagccggtgatgagccagcagacacttgagtttcattgggggaaacaccacaagacatatgtggaaaatctgaaaaaacacattgttgggacagagcttgatgggaaatcactagaagagattatagtgacatcatataattaagggtgaca

SEQ ID NO: 2273 - DNA, 67 bp, Glycine max
ggtccaaaatcctcactccagccacaacccttcatgtggaccatgggctcaatgggtgggttacaaa

SEQ ID NO: 2274 - DNA, 383 bp, Glycine max
gacaccatccagtactcttcttttcagcacaacctcttcatctctcccaggctttcttttctttgcaacaacactaccaaaaatgtcaccagatttcacacttttgttctccccggaactcatgcagtcccctatcatcactttccaagccactttctgtgtccttctcttcaccctcatgttcacgccgttcttcactcctggtgggcttccttgggcctgggcccggcccagaaccatcatccctggcccagtaactgccctgctcggggtcttcacgggttccacacctcacagcgctttatccaaactggcccgcacttatcacgcggaaaagctcatggctttctccatcggtttaacccggttcgttatctccagcg

SEQ ID NO: 2275 - DNA, 305 bp, Glycine max
gggctgcgtcggtctctctcggtttcaactgtgaactgtgagctggtaatggtttcataaatctcactgcatccatggcttcggagaagatttcctcgattctcttgttttctgctgtaattttgcttgtccgtgatgctccttctgccatagctggggacatagttcacgacgacgattcaactcccaaaaagcccggttgcgagaaccagttcgttctggtaaaagtgcaaacttgggtcaatggtgtcgaggatgtttgaattttttggtgtgggtgcaagatttggcagagctattgtgtc

SEQ ID NO: 2276 - DNA, 390 bp, Glycine max
gatcgcttctcttctcttcaaagtgaactttgcaactttgagcagaaaatctcacagtcgaaggaagaaataatcgccaatggcaattgaacacgaagacgatctcaaagacgagaagaacccacgacccctcgacgaggatgacatcgccctcctcaaaacctacggtttgggaccttattccacaagcataaaaaaggcggagaaggaaatcaaagatatggccaagaaagtgaatgacttatgtggtatcaaggagtctgatactggattagcagcaccaagccagtgggatcttgtttctgataagcaaatgatgcaggaagagcagcctcttcaggtggcacgatgcacaaagatcataaatccaaactctgaagatgccaaata

SEQ ID NO: 2277 - DNA, 367 bp, Glycine max
ggctctgtggctctctacatttcatcattcatcggaaaaatggctctcgaggttgctgttaaggctgctgttggtgctccaaatgttctcggagattgtccattttcccaaagggtcctcttaactttagaggagaagaaaatcccttacaaactccacctcatcgatctcagtagtaaacccgaatggtttttgggtgtgaatcccgaagggaaggtgccagtggttctttttgatggcaaatgggtggctgattctgatgtgattgtggggatactcgaggaaaagtacccagaaccctctctcgtcactcctcctgaatttgcctccgtgggatcaaagatatttgggtcctttgtgagttttt

SEQ ID NO: 2278 - DNA, 312 bp, Glycine max
ggcttttgctggaactgtgaaggatcagagcctctatgaccctcacaagtattcctctgtggaagcttttgctgatgacttgatcactctgctgaatgagatggacctcaaagctgtcacttttgttggccactccatgtcgggcatcattggttgcattgcctctgtcaaaagacctcaactcttcaagacccttattctcgttggtgcttccccaaggtttctaaattcagatgattatgagggaggctttaacagctcagatattgagcaattgctctcaaacatatggaacaactatgaaaactttgc

SEQ ID NO: 2279 - DNA, 366 bp, Glycine max
ggaaaactgaaaagtaaaggcgaaagactttaggtttggaattgggaagtagggttgttcgcgtcacgaagatgatcgaggtggtgttgaacgatccactggggaagaacgtgcgcgtgaagtgcaacgacgatcacaccatcggcgacctgaagaagctggtggcggctcacacgggcacaagagccgacaagatccgcatccataagtggtacaccatatacaaggatcacatcactctcaaggattacgagatccacgacggcatgggtctcgaactctactacaactaaacacaaggtgtgttttatgcatgatatattactatgatctgggaatgggattacgcgccaaatgtaattttga

SEQ ID NO: 2280 - DNA, 393 bp, Glycine max
  modified_base (281)..(281): a, c, g, t, unknown, or other
  modified_base (284)..(284): a, c, g, t, unknown, or other
gatgtcatagtattatcattcagtctcatctttctctcttctctctccatccaaaccctaactcccgaccctgttcccctctcgtatccgtcatgaaaggaggaaagtccaagaccgaatctaagagagccgatcccaaacttgctgtgaataagaacggagccgccaccaaggctagggaaacccgccggcaaggggaatgcagcgaaagaccctaacaagccaaagaggcctccaagtgctttcttcgttttcatggaggagttcaggaaggtattcancanagaacatcctgaaaacaaagcagtgtctgctgtgggcaaagctgctggagcaaaatggaagaccatgtctgatgctgaaaaagcaccttatgtggcaaagtctgagaaa

SEQ ID NO: 2281 - DNA, 277 bp, Glycine max
  modified_base (72)..(72): a, c, g, t, unknown, or other
  modified_base (185)..(185): a, c, g, t, unknown, or other
tagcctgctggtcggccatgtgtcgtaggcaacgctctaacctttttgcggatgagctgaggtgaactctanaggtggtggcggtgtgtctattgcccgctaccggccatcccaatgctgctgtggtgtttcgccctgcgcctgcctgggggcgcagtacttcttgatgaaagctcgattagtanggggcctgatgcccttgctggaggtgacaggtactccgtagaactgacagagacccgtaattagagcttgacaactccaagaccctattgga

SEQ ID NO: 2282 - DNA, 377 bp, Glycine max
gacttcaattgcaatcaaattagttcattctccttgcgcagttccctacctctcctttcacgatgcagatcttcgtcaagaccctcaccggaaagaccatcacccttgaggtggaaagctctgacaccatcgacaacgtcaaggccaagatccaggacaaggaaggaattcccccggatcagcaacgtctcatcttcgccggaaagcagctcgaggacggccgtaccctcgccgactacaacatccagaaggagtcaatccttcaacttgtccttcgtctccgtggtggcatgcagatcttcgtcaagactcccactggcaataacataaccctagaggtcgaaagctctgacaccattgacaacgtccaggccaag

SEQ ID NO: 2283 - DNA, 401 bp, Glycine max
ggttcgtggaatgcgcaccttccctaacacccccattacaaatctctgtatttcagggttgaagattcacacattgaattgaagtttggaaatttgacacctaccccacaccatcatggcctgcatcgacaaattttgggttttcgccctcgctcttctcctcctcgcttcccctctcctccaagttgctaggtgccagtcagactctgatgatgtagtggaggctgctgaagaatcaggtgatattggcattgttggtgatgatgtccaagactttggtgatgggactttcccttctgctccaggaattgaaacaataagtgtatttccgaaaaatagtgcaagattgataacagctggagaagagtcagagctgcttgttggtgttaaaaattgatggg

SEQ ID NO: 2284 - DNA, 343 bp, Glycine max
ggccgagcttagtagaagagaaaaggaggagcaggaggcatcaccgttaccaaacatggtgaaagggcgccaaggagagcgtgttagactttacgtcaggggttcaatacttggatacaagaggtccaagtcaaatcaatacccaaacacctcattaatccagattgagaatgtaaacactaaggaagaagttgcgtggtactgtgggaagcgtatggcttacatttacaaagccaaggtaaagaaggacggaagccactatcgctgcatttggggtaaggtcaccaggcctcatggtaacagtggtatagttcgtgctaagttcaagtccaatctgccgccc

SEQ ID NO: 2285 - DNA, 373 bp, Glycine max
gaagtctcatctaatctataccccgtctaaatctccgagtggttgacaccgatcgaagtagcagcacacagaaaatgggcactcgagaggtgtacgaagagaaactaaggaccggaaatctccaccacgattccaacatcaaccctggcctcggttccgctcgatgccctcgctgtctctctcccctcaaacctaaatttcaaagaaggcaattgaacaacaatcccgttctgcaagaagccaatggcgtccctgggttcgggattggtggtatgcttggttttgttcatggtttcaatacaggtttacctcctcttcaaaatggtctgaagggaccgaagtggcttccttttgttgttgggattcctccaat

SEQ ID NO: 2286 - DNA, 364 bp, Glycine max
  modified_base (288)..(288): a, c, g, t, unknown, or other
ggatccttctacactaactaaagccgagcagcgagagagagaaaccctagcaaaaatgccggctggtcacggtttgagatcccgcaccagagattccttctctcgtcccttcaggaagaagggtaccatcgccctcaccacatacctcagaacctaccacgtcggcgattatgtcgacgtcaaggttaacggcgccgtccacaagggaatgcctcacaagttctaccatggccgcaccggtcgcgtctggaatgtcaccaaacgtgctgttggggtcgaagtcaacangcaggtcggcaacagaatcataaggaagaggattcacgtgcgtgtggagcatggtatggcatcaaggtgcactgag

SEQ ID NO: 2287 - DNA, 123 bp, Glycine max
ggaggctactgtaatcactactcatactagtcttcgactctcattcatcattacgcacctatatcaccaatccacacagtcccatgtttcacgtttaaccattcccaccttacattccattcc

SEQ ID NO: 2288 - DNA, 337 bp, Glycine max
gacacttggtatagtgcaggaggaacagagaaaggggatggccataacactcaacaatggcttcaagatgcctatcattggattgggcgtgtggcgcatggaaggaaacgaaatcagggacctaattctcaattccatcaaaattggttatcgccattttgattgtgctgctgactacaaaaacgaagcagaagttggagatgcgcttaaggaggcttttgatagtggccttgtgaagagagaggatctcttcattaccaccaggctttggaattctgatcaagggcacgttcttgaggcgtgtaaagacagtctcaagaagcttcagttaacgtat

SEQ ID NO: 2289 - DNA, 158 bp, Glycine max
gatggctctgaatagaagacaatagggtaggccgttgagatggtgtcgtgtgggctaatgctcagaactgcagttctaaagtcttctgacaatattcttactagtactaaatcatttcgtattatgtgagtagtgcttggcctcttaaacgtgtgtcg

SEQ ID NO: 2290 - DNA, 305 bp, Glycine max
gatagcaaaatcgtttctccaatttaatcaccattgtacaacccaattcccttcgtcgttttcgattaagagagcaatggcacgtaccaagcaaaccgctcgcaagtccaccggaggaaaggctccgaggaagcaattggcaaccaaagccgctcgcaagtcagccccggcgaccggcggagtgaagaagccccaccgcttcaggccaggaacggtggctctgagggagattcgaaagtaccagaagagcaccgaacttctgatccgaaaactcccattccagaggctcgtcagagaaatcgctc

SEQ ID NO: 2291 - DNA, 267 bp, Glycine max
gatcacaacactaacacagattttgattcgattcgattcgattcagtcgaggttttaagcagcagcaagatgtctgggcgtggaaagggaagaaagggaatgggaaaaagacgaacataacgacatcgtaaggtgctccgcgacaacattcagggaattacgaaaccagcgattcgtcgtttggctcgcacgggtggcgtgaaacgtatcagccgtttgatctacgaagaaactcccagtgttctcaagatcttcctggagaatgtc

SEQ ID NO: 2292 - DNA, 362 bp, Glycine max
gacctccacaacattgcatacccttttgagttttgattctctctcctcacataactaggtggtatcgaatatttttggggtgtgtcaaagtttgtgaaggaacttgaagaagtaaatgcatggatcgaggggaccaaatgacattacctggctctgcatcttactatatgcagagaggaatacctggtgctggaaaccaacctgtactgcacaattcacctaatattggaccattgtctaaccctaatctaccatgtcaatcaagcattgggggtggtggtaccattggatccacattacccttagagtcttcgggaatttcagctccatgtgtcaatgtgagtgctccttctgggactctg

SEQ ID NO: 2293 - DNA, 382 bp, Glycine max
gacaacacagaacaggaacacagaaaaaatacaacccttagccaacacaaccatcatggccacctctgctattcatcaatcagcattcactggtcaaactgctctgaagcagctcaatgagttcgtccgcaagaccggtggcgccggcaaaggtcgcactaacatgcgccgcaccgtcaagagtgctcctcagagcatttggtatggccctgaccgtcccaagtacttgggtccattctcggagcagattccatcatacctgaccggagaattccctggtgactacggatgggacactgctggattatcagctgacccggaaaccttcgccaggaaccgggagctggatgtgattcacagcagatgggcaatgcttggtgcc

SEQ ID NO: 2294 - DNA, 395 bp, Glycine max
agaaacagctggggaaagcgagggcaagttgggaatagacccacccaaaatcgcatccgaaattcctaacagaagagaaaaggaaggcatagattcacatttcacacacacacacatacgactctctctctctctctctctctgatggattcgagggagtaaaagcaagaaagcaagcatttggatttggattgagatccgcaatggcaccgaacaacaccagaaccatgggatcccatttccctcttctcgctttcctctttctctgcctcctcgcgccccttctcttcttcttcttcgcatcgccccttcacggtctcattctctcattctcaactctcacttgttttcaattattagttttgtttctagtgttggcacatccacgtagagtg

SEQ ID NO: 2295 - DNA, 388 bp, Glycine max
gacacaaactttattacagttgttgtattgtaattaagcaagaatattaggcaatggagtcttctagaacttcaactactcttgctctttttttaaccatcaatttgcttttctttgtcatggcaagtggctgctacacttgcacacagcctaagccaaaccctatcccattcccttaccctaaccctagtcctgccgcgaagagctgccccagggacgcacttaagctcggagtgtgcgcaaacgtgcttaatggaccaattggtgctattgtagggtcaccaccggaccacccatgttgctcagtgctagaaaggcttcttgatcttgaagttgcggtttgcctctgcactgccatcaaagccaacattcttggcattaaccttaa

SEQ ID NO: 2296 - DNA, 391 bp, Glycine max
gttgaacttcattgtttttggctaagcctcgaaatccagaaaaatcgtgagcgaagatgatgcacatgaccttttactggagcaggaaggtgaatctcctaatagattcatggaagaccaacgattggacggagtatctcatcactctgctcgcatgcctcgtcgttgccgccttctaccagttcctagagaatcgccgcatccgcctcaagctcatcggcgccggaaatcccttcccggcagagatcgaggccccgcttctgcgacggaagcttgccggaaaccgcgccaaggtgggcgtgaaggtagccggagcgtttctgttcgggctgagctcggcgatcgggtacttgctgatgttgtcggtgatgtccttcaacggtggggtgtt

SEQ ID NO: 2297 - DNA, 235 bp, Glycine max
gatttcactcccatacagacgtcgaagaagttagatttgaaattgaccgagaaacaaacttgggatataagaagaatggctagtggaggaggctatggagacgcgaaccagaaggtatattacgtgttcacggtggtgctaactggtgattcagccgtggggaagtcacacagacctgcacgcttcgcgagaaatgagttcagtttggactcagacgccacagtcggcgtccagt

SEQ ID NO: 2298 - DNA, 365 bp, Glycine max
gacacaccgtttgttctattcttaactcaacttctgctacccactctcttcttccaagtccaaccacgcttttctctacagtcatgggcaaggtcaagatcggaatcaacggatttggaagaattggccgtttggttgccagagtcgctctgcaaagagacgatgtggagctcgttgccgttaacgaccctttcattaccaccgattacatgacatacatgtttaaatacgacagtgttcacggacactggaagcatcacgatgtcaccgttaaggacgagaagaaccttctcttcggtgacaagccagtcactgtttttggacacaggaaccctgaagagatcccatgggggtcaactggagct

SEQ ID NO: 2299 - DNA, 320 bp, Glycine max
ggttacggtaaatagcgtttcgttaacttactcagtcctctatgacggtgtgcgtgcgcaaaccctaacctagttcttctatatcggcacctctatcccctgaaccctgttccatcttccaaccatggcgaaccaagacttcgaagagcgctcgcagcaaccgcaggagctagggtacgacccgaactttgtccccgactcggtaaaatcttttgtggttcacctgtagcgtcacatccgtgaaaagaacgtgtacgagatccaccagatgtactagagctccttccagaccctctcggagcgtctcttcaaggataccc

SEQ ID NO: 2300 - DNA, 367 bp, Glycine max
agggtgtgtagctccaccgagtagcagcaatgtctaagcgatgtcgcagatgatcggcagggaacaagttccgcatgtcactgggtctgccggtggcggcgacagtgaactgcgccgacatcaccggggcgaagaatctctacatcagatcagtgaaggggatcaacggaaagctgaaccggttgccgtcagcttgcctgggtgacatggttatggccaccgtcaagaatggaaagcctgatctccgtaaaaaggtgctccccgccgtcatcgtccgtcagcgcaagccgtggcaccgaaaggacggtgtttacatgtacttccaacataatgctggggtcatagtggatcacaatggtgaaatgaa

SEQ ID NO: 2301 - DNA, 126 bp, Glycine max
gtctgcctatttttacatctaggatttacatatacaacatatatcactgtcaagattaagagtgaatttttggattatttagattagatatttcgattccaaaattaaaaaaagggataggagatt

SEQ ID NO: 2302 - DNA, 354 bp, Glycine max
agtgtagaatcggatctgaagctctttactaggattggaacaagcgaggaacgagtgaccacaagctccgcttaagcgctcgacatttagcttaaaacatgttcatcatgtggccgagcgaagcgcacctgcgtgaagcagcctagcatcactttagataggagcagaatggatgacttacaactgaaagttcttcggatcgatatatcgtacgacgtaatggagattttgggctacgtccggtgggtcgcagaattccggacctaacaatgttcgattcgtcacatgaacgggaacggacgattccctcgtcgcgcccgttttcggggaatggctgcattcacaggcaagtga

SEQ ID NO: 2303 - DNA, 281 bp, Glycine max
caatattatatgtgagcttgttgatcccgatggtctactaacgcagctaagggtgttgaaatcagtacatgttgatggtgttatggtagactgttggtggggaatagtggaggcacatgctccacaagagtataattggaatggctacaagagactctttcaaatggtgcgagagcttaagcttaagctgcaggttgtaatttcatttcatgaatgtggaggcaattttggtgatgatgtttgtattccactaccgcattgggttgctgaaattggtcgga

SEQ ID NO: 2304 - DNA, 371 bp, Glycine max
agaagttttgtatttggagacacatttgtccagatatgaactttgttttactggagagaagatggtcaaggttacaccagcaacccagttgcatgaccccgtcacagaaaagtctcaaaatcaccacccacattctacaaatggtgaaaaaaatgattgtgagaatgtcatgattgatgcattcaggtggtctcgttgtaagaagcctctgccacagaaactgatgcgtacaattggcatccctttgcctattgaacatatagagttactggaggaaaatttggactgggaagatgtgcaatggtcgcaaacaggtgtttggattgctggaaaggaatataccttggcacgagtgcatttcttgtcaatga

SEQ ID NO: 2305 - DNA, 400 bp, Glycine max
gaggcatggattcgttaccacctgcaaaacggcgtcgtgagagcaaagacggcgagactgaagcttcaacgttgtcaccggttgtgatcttcgctcacggtgccggtgctccttcctcttctgattggatgcaaagatggaagaacatgataaaggaggcactgcgcgctgtcgatgttgtcacttttgactatccttacatgtctgcgaaaaagaaggcccctcctaaggcggaaaaactggtggagtttcactcaaattttgtcaaggaaactgcaactaagtaccctggtcatcccctgatacttgcaggcaaatcaatgggttcaagagttggctgcatggtggctagcatgaaagacattaatgtttctgctgtagtatgcttgggctacccaat

SEQ ID NO: 2306 - DNA, 358 bp, Glycine max
gggctccgccatttttcgtagctgctgttcttgcgcgtgaacaagcctcagccaaaaccatggttaagcataacaatgttatcccaaacggacacttccgtaagcactggcagaactatgtgaagacttggttcaatcagccagcacggaagacaaggagacgattggctcgtcagaagaaagctgtgaagatattccccagacctacggctggacctctcaggcccattgtacatggtcaaactttgaaatacaacatgaaagtgagaggtggaaggggattttctcttgaagaactcaaggcagcagggattcccaaaaagcttgcaccaaccataggtattgctgttgatcatcg

SEQ ID NO: 2307 - DNA, 257 bp, Glycine max
gagaacaaaaaagagtcaagcggcgagcaatggcgacatcgctggtgcgatcgggttttcttcgtagcgccctacgaggaagagctcgtagctctcaggttcccaagcgaaactttgcttcctctggtcatcacgatgatgcatatgagacggccaaatgggagaagattacatatttaggcattgttggttgcaccggtttagccgtttataatctatcaaagggccacccgcacttcaaagaacctcctgcatac

SEQ ID NO: 2308 - DNA, 360 bp, Glycine max
gacactgtgtttggagcagaatcagatcgtgtgttccgtacgttcgttcgttcatttccagtgtcaaacatggcgtctcagatgagcaagaagagaaagtttgttgcggacggagtgttcttcgccgaactgaacgaggttctgacacgtgaattggcggaggacggttactccggcgtggaagttagggttacgccgatgcgcaccgagatcatcatcagagccaccagaacccaggctgttctaggtgagaagggaaggagaattagggaacttacctcagtggtgcagaagaggttcaaattccccgaaaacagtgtcgagctttatgctgagaaggtcaacaacagaggcttgtgt

SEQ ID NO: 2309 - DNA, 290 bp, Glycine max
ggcagtttcaaattttcttttccttcactttcccgagaaaaaaataacacttttcactttcttcactacgttctcacttcgatatggctcgtacgaagcaaaccgctcgcaagtccaccggtggcaaggcgccacgtaagcagctcgccaacaaggccgctcggaagtccgctccggcgaccggaggagtgaagaagccccaccgcttcaggcccggaaccgttttcgctcagggaaatccagaacgtatcacacgagcaccgcgcttcccatcaggaagcttccacttc

SEQ ID NO: 2310 - DNA, 193 bp, Glycine max
gaacacactcatattgtatacctcacaacttccatgtcactgcccgtgtgtcgccgctatggccagtgtcatcaaccaagcctccgtcgcaattttccgggcatgtaccgctaaatcgaggctgctgagcggcacttccggtcaacttaaaccggaagtaaccttgctgccaatgaggtgccctccttcagcc

SEQ ID NO: 2311 - DNA, 258 bp, Glycine max
gctgctttttctttctcatattttccttcattcccagtttccacacctttcccacaattcactatttctctcgccatgccatctcgacaactgcccacgtctgcaccacctcccaaccaccgcgtctcaacccctctcttcgctttcaccgcctccgtctgctctttattctttctagccctcctctgcctccggaagcgtcaaccgaacaactccatcctcgaacccccctcaaccgttcccctaccccgtcctccg

SEQ ID NO: 2312 - DNA, 382 bp, Glycine max
gggcagcgcttgatttgaggccaggcaagccccactcaaccaccacacctctcctcgttcacgctacccctttctgctcttcttctacctttcaagttttaaaagtataaagatggcagagacattcctatttacctcagagtcggtgaacgagggacaccctgacaagctctgcgaccaaatctccgatgctgtcctcgacgcttgcctcgagcaggacccagacagcaaagttgcctgcgaaacatgcaccagaaccaacttggtcatggtcttcggagaaatcacgaccaaggccaacgttgactacgagaagatagtgcgtgacacctgcaggaacatcggcttcgtctcagatgatgtgggactggatgccgacaac

SEQ ID NO: 2313 - DNA, 383 bp, Glycine max
tattaaaaattatttatatttttattaaggtttaattacttatttagtttctatagtttttaaacttatttattttagtctctatcgttaataagttgattttttagtttctaaaatctacattttaattcccaaacaatttcaactgttaaaattatttaactaatgaagttaaaaaaattttaataacattgatattttaggaattaaaatgtaaattgcaggaattaaaaaatatacttattaaatttcaaaaattaaaaaattcacttattaaatataagaattaaaaggaataagtttaaaaactataaaaactaaatggataattaaatcttaattaaataactttttgaatcaacattttcattaaataatagaca

SEQ ID NO: 2314 - DNA, 360 bp, Glycine max
ggctcctcctcctccttcttcttctgccttacatcacatacttcactctcttgtttttccctttcctctcctcaaaatttcttctgattcatttaatctttactcatcaatggctctgagactgaaccctatccccacccaaaccttctccctctcccaaatggccagtctcagatttcccaggttccgcatggcctccaacctccgctccggttccaaagaagttgaaaatattaagaagccattcactcctcccaaagaagtgcatgttcaagtaagccactctatgccttctcagaagaattagattttcaaatctttggaagattgggcttagcacaacatcttgactcatcttaa

SEQ ID NO: 2315 - DNA, 321 bp, Glycine max
aaccacagcggcggtaacagaagaacaagcagagaatgggtcgagtgagaactaacacggtgaagaaatcctctcggcaggtgatagagcgtcactactcgcgcatgatcctggacttccacacgaacaataagcttctggaggaagtggcgataatcccgtccatcaggctaaggaacatgatctcggggttctcgacgcacctgatgactcgcatccagaagggccctgtgcgcggcatctccctcaagctctaggatgaggagcgctagcgccgcatggacttcgactgcgaggtctccgccatcagcaccgaccaca

SEQ ID NO: 2316 - DNA, 417 bp, Glycine max
ctgggatgccaaatttctcagacatcaaggccaaccttttgccagtcaaattattaaatcacttgttcacatagatcagctgatgccatcatcttagtatggattcacaacagctcttcagtttcggtggtgttactagtgcaggattaccttacatgtcttcttttcccactgttccatcgctacccaacagtctacttagatccttgaaatatgacacaggaaactcacctaattcacccttttccacttattttgattctgatactctttcagcattgagtgacggccaggagcaatacagcccaggagaaatcctctctggtgtcagctcttcactggaaaccaaccattatatgtataatagatcaatctccactttggacagtttcccattatattctgatcggaactctc

SEQ ID NO: 2317 - DNA, 381 bp, Glycine max
gacaccatccagtactcttcttttcagcacaacctcttcatctctcccaggctttcttttctttgcaacaacactaccaaaaatgtcaccagatttcacacttttgttctccccggaactcatgcagtcccctatcatcactttccaagccactttctgtgtccttctcttcaccctcatgttcacgccgttcttcactcctggtgggcttccttgggcctgggcccggcccagaaccatcatccctggcccagtaactgccctgctcggggtcttcacgggttccacacctcacagcgctttatccaaactggcccgcacttatcacgcggaaaagctcatggctttctccatcggtttaacccggttcgttatctccag

SEQ ID NO: 2318 - DNA, 234 bp, Glycine max
gctcctacagattcttcagcaactgcgattttggatcggaacctcttctgcggcgtagcaatgggacactccaacgtttggaattctcacccaaaaaactacggtcctggttctcgcacttgccgattgtgtgggaatccacatggattgttcaggaattatggccttatgtgctgcaggcattgcttccgtaccaatgccaaggaaattggcttcatcaattatcgctaaaaa

SEQ ID NO: 2319 - DNA, 122 bp, Glycine max
taatttgggaattattgctcccatcgccattggtttcattgtcggcgctaacattttgttgggtggggccttctctgaaccggcaatgaaccccgcggtgacatttgggcctgcggtcgtaa

SEQ ID NO: 2320 - DNA, 159 bp, Glycine max
cgcacgaagaagagcgtggagacctacgggatctacatcttcaaggtcctcaagcaggttcattgcgatgttggtagttccagcggggtcatggggcatcctgagcggcttcgagcacgacatcttcgagaagctcgctgaggaggcgtcgcgtttggg

SEQ ID NO: 2321 - DNA, 229 bp, Glycine max
ttggcgtgtaaatattttttattataaaataacaatgatgatggtgatttggtgtatatattaattaatattataaaataacaattaatcttattctttaatagatatcatttatttttgtgtggcacacaggacaaaaagtattttttttttcgaaaagaagcactagttaggcacagttcccaggaataaagtatagccggtccagtgcgtcctgatacttcgagga

SEQ ID NO: 2322 - DNA, 168 bp, Glycine max
tggcaaagtctccagtgctgccaaacgaactgttacagcatacgttgcttcctggtagagatatggtgaagtttaaacttcaccgtactttttggtagtcttgtttgagggcgattatgacgcacatttagggttttttactttaagtacattgtagtgcatttaagt

SEQ ID NO: 2323 - DNA, 369 bp, Glycine max
gaaatcaagagaattctagagaagattgtgcagccaagcaggaaagattggagtaccaggcttgatgatgctctctgggcacatcggactgcctacaaagcacccataggaatgtctccttatcgggttgtctttggaaaggcatgtcatcttccagtggaaatttagcacaaagcatactgggcagtgaagacttgcaacttctctatggatcaagttggcgaggaaaggaagttgcaactgagtgagttagatgaaatccgcctagaagcctacgagaatgccaagttctacaaagaaaagaccaagaagttccatgatagcatgatagttaaaaaagacttcgtggttgggcaaaaagtgttattg

SEQ ID NO: 2324 - DNA, 172 bp, Glycine max
ggagagagagagagagagagagaggcacttggaatccaaaaatgagagaaatcatcagcattcacataggtcaggccgggatccaggttggcaactcctgctgggaactctactgcctggaacatggcatccagcccgatggcatgatgccaagtgactcctccttcggtgt

SEQ ID NO: 2325 - DNA, 68 bp, Glycine max
attatccaacttgctacaatgaacatagcaaatcaaacaaaaaaaaaaaggcggcccctcaagatgat

SEQ ID NO: 2326 - DNA, 385 bp, Glycine max
ggttctagtgtgtgattgtttgttgttgtaactcgttcttcttcttttgttgttctgtgtttgtgtttgttttttctctcacctgaaaatgtcttgctgcggtggtaactgtggttgcggaagctcctgcaagtgcggcaacggctgcggaggctgcaagatgtacccagacttgagctacactgagtcaaccaccaccgagaccttggtcatgggaatggcacctgttaaggctcaatttgagggtgctgaaatgggtgtgcccgctgagaacgatggctgcaaatgtggaccaaactgctcctgcaacccctgcacttgcaagtgaagtgttgggagagcaagcttcaagcagagatagcccttaattaggaataatgataaa

SEQ ID NO: 2327 - DNA, 293 bp, Glycine max
gactcgcagttgtattgttgaacaagggtttctctgtctgcttcttcactttctctcgtttcaatcgaaaccaaaacaaaaacatgggcagaaaattcttcgtcggtggcaactggaaatgcaatgggaccactgaggaggtaaagaagattgttactactttgaatgaggctaaagtccctggagaagatgtcgtagaagttgttgtgagccctccttttgtgttccttcctgttgtaaaaagtttggctgcgccctgatttccatggttcggcacaaaactgttgggttcg

SEQ ID NO: 2328 - DNA, 94 bp, Glycine max
caaagtctccagtgctgccacatgaactgttacagcataggttgcttcctggtagagatatggtgaagtttaagcttcagggtattttttggga

SEQ ID NO: 2329 - DNA, 111 bp, Glycine max
aaggttccgctgccaaaaaaccacaaaaaggtaccgcttccaaaaaaccacaaaaaggtaccgcttccaaaaaacgacaaaagggtaccgcttccaaaaaacgacagaaag

SEQ ID NO: 2330 - DNA, 344 bp, Glycine max
ggagaattcgaatctaggatttgtttgagcgtgcgcgaaggatcatggtggggttcagaaacagatacatggtgatggaggtttttctgaaccctaatagagacaaagttggggatgcgtctgttataattacacagtttaatgtgtcaaaagctgtaagagacagcatattggtgaattttggggagtgtggtttggcttcatcattgggatcgttccaggttaagtacgtgaatccaatcactaatgtgtgtataattagggcatcaagggaggagtatcacagagtatgggctgcgattagaggggtcacaaatattggaaactgcccggtcatgtttaac

SEQ ID NO: 2331 - DNA, 220 bp, Glycine max
ggttacggtggtgatggtggttctcgctactctcgcggtggggaaggcggtggatccgatggaaactggagaaattaggcatatgaccctgtaaattagggtttatgattaagttcaattattttaaggtgttgtctgtgtgtggtttaagtttcggtagctgtgttggtttcgtgtcgtgttcctgtggttttcgtggttgacctacaattctagttgt

SEQ ID NO: 2332 - DNA, 254 bp, Glycine max
ggaagagtgaagagaatggctcccaagggtttaacctttctggctgtgttaatatgcgtttcagcactgtcactgagtccttctgttgcgggggaacggcaaaataatggccttgttatgaacttctacaaggaatcatgcccccaggctgaagacatcatcacagaacaagtcgagggtctctacggggcggccgcaagaacactgctttctcggggcgcaggaacatcttccatgactgtgcggttcagagt

SEQ ID NO: 2333 - DNA, 266 bp, Glycine max
ggcgatggtgactgactgagagagaagagaaaaacaatgtcagggctgaatgaattgctgaacaaatggttaggtttatgcgacatggcgttcaacgccggctgcggagccataacctggttccccggccacatggtcgccgctatacctgccaaccgccaccgcctcaatctcgctgacctcgtcatcgaagttcgcgacgctcgcattcccctctcctccgtcaacgccgacctccatccacatctctccgctaaacgatgcgt

SEQ ID NO: 2334 - DNA, 360 bp, Glycine max
gactcttacaaacataacacattcagatactcactcacctgtttttagtagtttcttccctattttctgttcataactcagtttgtaactatgactgctgaggttatggctcaagaggagacacacgcagctgaggttgttgttgctgttgagcccctgaaataggaaaatgttgctgaagaaaatgtgaaactaagagagtcatcactggaaacatccaaacccaaaatggtggagaaaagctcttcttacactgaagaaagcaactacctttctgatctcaacgagtttgaacgacaggctttgactgaactcaagtcacatcttgaagaagctatcttggggaacaacctttttgag

SEQ ID NO: 2335 - DNA, 187 bp, Glycine max
ggtttgattagggtttgtcattagcacttcttcttttcacactgccgctgcaacaatggcttcagagaagaaactttcgaacccaatgagggagataaaagtgcagaagctcgttctcaatatctctgttggcgagagtggagatcgtctcaccagagccgccaatgtgttggaacaacttagtggg

SEQ ID NO: 2336 - DNA, 366 bp, Glycine max
  modified_base (246)..(246): a, c, g, t, unknown, or other
gaggtttgtgatactgattgcctccctctgctgccgtccctaatctgaaggctcccgccatctgcgatcggatttcatggctccaaagaaggacaaggctcccccaccttcatccaagcctgccaagtctggcggtggcaagcagaagaagaagaagtggagcaagggtaagcaaaaggaaaaggtgaataacatggtgctcttcgatcagggtacctatgacaagctcctctctgaggcacccanatacaagctcattactcctgtcattctctctgaccgtttgatgattaatggatcacttgcaaggaaggctattagggaattgatggctataggttcaatcaggatggtgtctgcccatgc

SEQ ID NO: 2337 - DNA, 57 bp, Glycine max
gagacctcaggtcaggcggggctacccgctgagtttaagcatatcaataagcggagc

SEQ ID NO: 2338 - DNA, 340 bp, Glycine max
gggttctggatgctgacagtttcagtctgaaagctattccccaacgtagccgcaagcttcgccgtttgaaacagtgcctcaaccatggcagaacaaacagagaaggcttttctgacgcaaccaaatgtgtttcacagcacagagaatactgagaagggaaagagacctgcaaaaggtgggaaccgctttaggtagtccattgagcttggatttaagactcgcagggaagctatccaacgaacctacattgagaagaagtgtccctgcactgcgacggtggccatccgtagacgtatcttggctgggacatctcacaatgctaatatgaacaggactacta

SEQ ID NO: 2339 - DNA, 249 bp, Glycine max
gacacagactttagtacagttgttgtagtgtacttatgcacgaatattaggcaatggactcttctagaacttcaactactcttgctctttttttaaccatcaatgtgcttttctttgtcatggcaagtggctgctacacttgcacacagcctaagccaaaccctatgccattcgcttatcctaatccgagtcctgccgggaagatctgcctcagggacgcacttaaggtctgaatgtgcgcaaaagtgc

SEQ ID NO: 2340 - DNA, 89 bp, Glycine max
aagcttatggaacatgtcagtgtgatgtctgtctgctataccatgagctttagtaatctcactcactggattgataggttttgtcgaaa

SEQ ID NO: 2341 - DNA, 263 bp, Glycine max
ggcagtgatagagataagaaaatgtggcttgtgcagctctcaaccccatttctgaacggacatggtcattccaccacccttctctccaagcacagttcggcggtgactcagacccactgggccccaccgagtttcctgcctcaaatcaatgcgatgaagacaatgcaggggagagtggtgtgctccagcagggacaagacggtggcagtggaggtggtgcggctggccgctcggccaaagtacaagaggcgcgtgaggaagaa

SEQ ID NO: 2342 - DNA, 161 bp, Glycine max
ggcaacattgttaaccattctcttcactttaaagttacatagtttttcattgttttacttaatctacaatggctgcttcaacaatgactctctcttcatcatcattggctggccaagctatcaagcttgtcacctccacccctgaacttggtgtttgaatg

SEQ ID NO: 2343 - DNA, 140 bp, Glycine max
gtttttaatctttatctttggtattacaacttgattgtctaagtaactgctagttcttttctggattgtattgcgattactataataatagttttaagaactcagtcattttgtttccgttgaatgaaattgattgtcag

SEQ ID NO: 2344 - DNA, 357 bp, Glycine max
gacctaggaaaaaccgtttccaactctaccattttcccaccaaccctccactctcttcctcaaaacaatcgttaatctcttctacattgtgaagtctgatattctctaagtagacaacacaaacacacctcaatttatagcacccatctttcttttctcccacaaattcagctccattttgttacacgttcaaataataagccaagaagccaccatgatctcttcaatgaagtgcacagcctcatctctcacatgttccgctttctcaaacagaaagattcccattgcaaggccacaacttgtcacgttaccaaccattaacaacgttgaacaaaacacgggtctctctcagttgtg

SEQ ID NO: 2345 - DNA, 60 bp, Glycine max
ggttggtagaaaaaattgggcttgtgggacttgtttaatcgggaatcacaactcgtgaca

SEQ ID NO: 2346 - DNA, 177 bp, Glycine max
ggaccatggagggttttgcctgcagctaaaatcgaaagcaggacgccgcagtgtcatatagtaggtcaagcgatcacaatgcgaaggtcaccaattcatttcattatacctcacacgtctagcctcacttcaaaatcatctcgcaagcttcatgtcacctctgatcgatgacatact

SEQ ID NO: 2347 - DNA, 169 bp, Glycine max
gacggttacacgccgtcgtcgctgtttttgtgtgtcgcttcttcgtacgtgcagctgcaatggtgaagggacgccaaggagaacgtgtcagactctacgtgaggggtacaatccttgggtaaaaaaggtccaattcaaaccagtatccaaatacatccctgatccaaat

SEQ ID NO: 2348 - DNA, 222 bp, Glycine max
cagagcacaactcatccgtgagtgtaaggatggagacagcttcttccatggctctctcatccccatccttggatggcaacgccgtaaagctgggccgatcaacgggatcaatgctaacggtgcgtatgaggaagatcgtcacccttcaagtctcctcaggaatcccattctacggcccatactttgacaagtacttgagcggaatctccggggagctcccgt

SEQ ID NO: 2349 - DNA, 351 bp, Glycine max
gactcaccacttcaaaacactcataacacaaagcacaaagcaaagctcatccttgagttaaaaaatggcagcagcttcttccatggctctctcatccccatccttggctggcaaggccgtgaagctgggcccatcagccccagaagtgggaagggtgagcatgaggaagaccgtcaccaagcaggtctcctcaggaagcccatggtacggcccagaccgagtcaagtacttgggcccattctctggcgagcccccgtcctacctaaccggtgagttcccaggcgactacggctgggacactgctgggcttttcgcagagccagaaaaccttcgccaagaaccgtgaactcg

SEQ ID NO: 2350 - DNA, 373 bp, Glycine max
gagataaaagaagacgaagttgcatcttatctgcaacactccgtatccacttcgctggtaataagagaagagaagagagagagagagagagagagggcgtggagaatgttaagtctctcagttgcttctccttcttcttcaaccatttcctttctcccaaagccattcaatggcattcagctccgtcgctctgccacatgctccattccacccacgaaatgcagcgcttcggtgccagtggtgatgatgtctaaaaggacggaggaattgaaggaaattagacaaatgaccaccgaacaaattaacgaagaggttgtcgaccttaagggcgagcttgtcatgcttcgccttcagaaatcggctcgcaacgagt

SEQ ID NO: 2351 - DNA, 112 bp, Glycine max
gttttgaggatgttatgtttgaagaaacttgagactttcttttttcagcgaattaattatcagacgtaaattgtggtactaagaatacgtttacataaattgttttgaacca

SEQ ID NO: 2352 - DNA, 183 bp, Glycine max
agggacaaaactcgaagcagaaactcaactcaccaagacagttgcattattttctttccagatccaactcaaaattgcaatgggagtagaagatacagatatttgtatcatcaaggagccagatcatgttgtagtccaatcagatggcatttcccatgattcaggtcatgaagctggaagtga

SEQ ID NO: 2353 - DNA, 369 bp, Glycine max
gacatctttcactcgttctctgaaattttaattgacttttctcccctcataaaaaaaacctaccaatggctcccgcaaaggcagagaagaagcccgcggagaagaagccggcagagaaggccccagcggagaagaagccgaaggcggagaagaaaagatatcgagggagggaggaagcgagaagaagaagaagagaataaagaacagcgttgagacgtaggatatctacatcatcagggtgtagaagcatgtggaccacgacatggggatctcgagcaaggctatgggggatatgaggagtttcataaacgacatcttcgagaagctcgcccaggaatcatcgcgtcccgctaggtacaacaagaagcc

SEQ ID NO: 2354 - DNA, 330 bp, Glycine max
gaccgcattagcactcgtctttggttctggtttatagatctctgtgaagtcgctttataacactcaacctaagatgcagaacgaggaaggacagatcaccgagctttacattcctaggaagtgctctgccacaaaccgattgattaccgctaaggaccatgcgtcggttcaggttaacattgggcatgtggatgagaatggcgtctacaatggccatttctccacttttgctctctgcggcttcatacgtgctcagggtgatgctgacagtgccctagatcgcttgtggcagaagaagaaagttgaagttaagcaacagtagacacccat

SEQ ID NO: 2355 - DNA, 232 bp, Glycine max
ggttgtcaagcgtgccgagaaaaccctacttcgcttgcagtcacacaagaggccaatcctattcatagctcgagatgggtgaagaagtgaaggtagttgttccagaatcagtgttgaagaagcgcaagagggaggaggaatgggcgttggccaagaagcaagaactcggtgcggccgggaggaagagagccgagagccgcagacgcatctacgggggagggaagcagtacgc

SEQ ID NO: 2356 - DNA, 330 bp, Glycine max
gaaggaagggagggaagaatagaatgggatctggaagtggaaaacacactggagagttcttcaggagaagggatgcatggaggaagcatccgatgctcaccaatcagctccgccacgccacccctggccttggcatcgccgtcgtcgccttcggtatctacctcgtcggcgaacaagtctacaataggctctatgctcccgatcctcattcgatttctcacgtgaaagccggggatcaccactaaacgtttggacggacgcactccatttcatcatcacttaataagcttgctagcatgttctcgcatcctttaatgtttaaatttcaga

SEQ ID NO: 2357 - DNA, 377 bp, Glycine max
gaccgcgcaccacactgagaggaagagggagtgagagagagtgttcttcgtttgctaccttctcccagaaatggttacgttcaggtttcaccagtaccaggtggtcgggagggctctcccaacggaagcagatcagcatccgaagatctaccgaatgaagctctgggccaccaacgaggttcgcgccaagtctaagttctggtattttttgaggaagctgaagaaggtgaagaagagcaatggtcaagttcttgctatcaacgagatttttgagaagaacccaaccaagattaagaactacgggatatggttgcggtatcagagtaggactggttaccacaacatgtacaaagagtaccgcgattccaatctaaacg

SEQ ID NO: 2358 - DNA, 54 bp, Glycine max; identical to SEQ ID NO: 1354

SEQ ID NO: 2359 - DNA, 231 bp, Glycine max
gacaatagagactagagaagagagaggtgttggtgccctaatcgtgagaagaaaggaaagggaaaagaggaaaatggtgtgcataaggaaggcgacggtgaaggaccttctggcgatgcaggcgtgcaacctgttctgcctccctgagaactaccagatgaagtactacctctatcacatcctctcctgggcccagctcctctacgtcgccgaagaagagaacgggcgcat

SEQ ID NO: 2360 - DNA, 170 bp, Glycine max
gagtgagaacaatactgttccaaaacttaatttgaggtagggcctaccctaaaatgccataacatggacctatcagtagcatttacaatagaatctattaaaaaatttttgtccaaaaaaaaaaaaggaataaaaaaaaaaaaacgggccgcccaaaaggttccaagctt

SEQ ID NO: 2361 - DNA, 204 bp, Glycine max
ggttggtagaagaaattgggcgtgtgggagttgttgaatcgggaagcaaaaaaaatgagaatccatcacatagcatgcctccaagacaattattcctatctgatcgtagacgagagcacgaaggaagccgcggcggtggacccggtcgaaccggagaaggttcttgaagttgccagctcgcacggcctcacgctcaaattcgtc

SEQ ID NO: 2362 - DNA, 254 bp, Glycine max
tggtctgcgcctgatttctcagttctctcacacacgcattcggtgctccgaatctcagattctagggttagggttcccaatttctccaccgatcagaaaatgagttcaactggtggttctaccaagggcggaaggggcaagcccaaagcctccaaatccgtttcaagatcgcagaaagctggtctccaattccgcgttgggagaatcgcgcgattccttaagggtggggaaagacccggagcgtgttcgtgctg

SEQ ID NO: 2363 - DNA, 244 bp, Glycine max
gatcacaattcatttcacaactcggagttgctgttgttcatcattctcttctcttcactggcacttgatagatccctctctcgcagcttccattcgtaatccagattctctttgatcggatgcatcttctgggttttgaacctgttactcctcatcaacattatttgtagagggaaaggaggtgtggtttcagtttgaaaagctttagattctcaggcaattaagggaggtcagttatggctcc

SEQ ID NO: 2364 - DNA, 173 bp, Glycine max
aatgtttgtcacgggctatacctactaaaactttaggagtcttttggtttcagttttgttttagctatttatcatcattccttcttagcactgaagtcgaacgggacttagatgttgtagttgtatcgtgttttcaacttctagcatatgacagtttgaataaattgaaaagc

SEQ ID NO: 2365 - DNA, 383 bp, Glycine max
gatcatatttaaaatcaaaacaacaaattttcagactcaacaagcttcgaaccaaatcttactgagaaaatgtctggtcgtggaaagggtggaaagggtttgggaaagggaggtgccaagaggcacaggaaggttcttcgtgacaacatccagggcatcacgaaacctgcgattcgtaggttagcgagaagaggtggcgtgaagaggatcagtggtttgatctacgaggaaaccagaggagttctgaagatattcttggagaacgtgattcgcgatgctgtgacctacactgagcacgctaggaggaagacggttactgctatggatgttgtttatgctcttaagaggcacggaaggaccctctatggttttggaggctaaaa

SEQ ID NO: 2366 - DNA, 265 bp, Glycine max
ttagggttttccaattcacagagcaacacaacgaaccaacaatggcgcagcctcagccgcagtcgcagccgcagcacgggcaagcagcgctggagcaggtgcagtgcttcggtcgcaagaagaccgccgtggccgtgacctactgcaagcgcgggcgcggtctcatcaagatcaacggctgccccattgagctcgtggagccggagatcctccgcttcaaggccgtcgagccgaggcaccggttgggtaagagccgcttcgccgg

SEQ ID NO: 2367 - DNA, 390 bp, Glycine max
ggccgctctctgaggaaaacagatagtgtgggagagagaagagcggaagagaaaatgacgaccaggttcaagaagaacaggaagaagagaggtcacgtcagcgccggacacggccgtatcggaaagcaccgcaagcatcccggaggtcgcggtaacgccggtggcatgcatcaccaccgtatcctcttcgacaagtaccatcctggtttcttcgggaaggtaggcatgcgctacttccacaaacttcgcaacaaattctacaatccgatcatcaacatcgacaagctgtggtccctcctcgcccaggaggccaaagacaaggccaccgccgacaagggcaccttgctcgatgtcacccagttcggttaccttaaggttttgggtaaaggg

SEQ ID NO: 2368 - DNA, 388 bp, Glycine max
gagggttggttgctcttcttcctcttcctcttcctctgtgaatagggtttctgccttttttaacaacaatttcgaatcgattcgattgggtctctcaaagttttgattgcacagtttgcgaagatgcctcgtcccaaaagaaaagctgccccaccaatcacttcctctgatgttgattcgtctcttcgcaccgaaccaaagaaatcaactacaaagcaatttgatcgaatagataacttatttgagtcatatgcaaataagtcattgggtttaattgacccagacgggattgaagcactttgtaaagatgtgcatgtggaccacacacatgttagaatgctcatacttgcttggaaattgaaagctgaaaaacaaagttatttttcca

SEQ ID NO: 2369 - DNA, 172 bp, Glycine max
ggaagttgaacttgattgacgtgtgttaatgcagagagagatatttcattgttgttcaaagtctttggtgcacttaaaagagaccagatacaagtgaaagtggatgatgaagtggaggagtatgagacaatagtggagtggggtacaactttctggttcggattgagaattt

SEQ ID NO: 2370 - DNA, 343 bp, Glycine max
ggagaacacaaacagcagcgtcttggtttgtgagagagacagaggcacagagagaaaatggtttcggggtcaggaatctgcgcgaagagggtagttgtggacgcgcggcaccacatgctggggaggctggcatcgatcgtggcgaaggaacttctgaatgggcagaaggtggtggtggtgcgctgcgaggagatttgcatctccggtgggctcgtcaggcagaagatgaagtacgtggcgtttcctccgcaagcgcatgaacaccaagccctctcacggggccatccatttccgtgcacccggcaagatcttctggcgcaccgttcgtgggatgataccacac

SEQ ID NO: 2371 - DNA, 193 bp, Glycine max
gagactcgcagaaaaggtctttcttttgatcaatggaggaaagaggagaatgctctgcttcagcttcagcttcagccaatccctcagatgaaatctgggccaagcttgttctgtcagatgagggatattcagatgtgcagataagttcagatgaaagagtggtatcttcagagatatcagctacgtctaatga

SEQ ID NO: 2372 - DNA, 282 bp, Glycine max
gagagttctcattctctctctctctctcaataatttctctctctctacagttttctctatactccaactgtggtatttctgtcactgctaagatccccacctaatcgcctcgtctcaggctcatcagtcttttcccttctcttccaagctcataaactcacacacccacgtgcttcattttccccgtcggtctgggaggttttgttagtattagatgggtgtttctggcagggtcgcattcagagttatcgagcgtcagaggtggggggggggggggggggg

SEQ ID NO: 2373 - DNA, 357 bp, Glycine max
  modified_base (336)..(336): a, c, g, t, unknown, or other
ggcgcacccagagaggaagcttagagagagagagagagagagagagaggagagagtattggcgcttcatcaagatgggtatttctagggattccatgcacaagaggcgtgccactggtggcaagaaaaaggcttggagaaagaagagaaagtatgagcttgggcgtcaggcagcaaacaccaagttatcaagcaacaggacaatcaggaggattcgtgttagaggtggcagtgttaaatggagggcattgaggctggatactggcaattactcaggggggtactgaagcagttactcgcaagactcgtattcgagatattgtttacaatgcctcanacaacgagcttgtgcgaactc

SEQ ID NO: 2374 - DNA, 388 bp, Glycine max
ggaaccacctacttggtgtcttgcaattcccaatggcctccattttcaagctctcaacgccatctccagctgcttccttatcagaagcgcttcgccccagagattctcgcttcctctccttcaatccttcttccaacgctattaattacaaaattaacctctccgcttccctccgatccattcactccctccctcttaaaacctccttgcggatcaaatgctcccaaacagatgggaatggaagtcctgcaaagaggacagtgcttcatgatctttatgagaaagaagggcagagtccatggtatgataatctctgcagacctgttacagaccttcttcctcttatagcaagtggtgtcagaggcgtcactagcaaccctgcgatttt

SEQ ID NO: 2375 - DNA, 370 bp, Glycine max
gaattgactgtgggaacatgcgaattgcgagcctgatacgagagcttcagattccagtttgttcctcagaccctccatcatgtgtcataggcttcaaattagtggtaacatcatcttaggggagagatttgactgatcgcaccttccagatatgcaatgactcttatgagagcacagaagatctttggagcatgcggagacgttgccattacagaaacatgattcccgtattgtggtagtggcagcagtgtgtgcgctggggatattagatgtggatctgaacgacgaatacgccttggatctgggccaaaattgaccatctgtggaagagatttgggacaacgtgaggaaatgtggattcgagcctctc

SEQ ID NO: 2376 - DNA, 384 bp, Glycine max
  modified_base (339)..(339): a, c, g, t, unknown, or other
ggtagttccaccgagtagcaacaatgtcgaagcgaggtcgcggaggatcggcagggaacaagttccgcatgtcactgggtctgccggtggcggcgacggtgaactgcgccgacaacaccggcgcgaagaatctctacatcatatcagtgaaggggatcaagggaacgctgaaccggttgccgtcagcttgcgtgggtgacatggttatggccaccgtcaagaagggaaagcctgatctccgtaaaaaggtgctccccgccgtcatcgtccgtcagcgcaaaccctggcgccgaaaaggacgtgtctacatgtacttcgaaaataatgctggggtcatantgaatcgcaagggtgaatatgaaagttctgctatcactggtccta

SEQ ID NO: 2377 - DNA, 371 bp, Glycine max
gcttcacactcatctactccacattgtcctctcaccactctccaattgaaaaggcttctttatcaaaagaaaaatggctcaagtttgtttgctcttggtggggcttctcacaatgttctcctctgcctatggctatggatatggtggtggctgggttaatgcacatgccaccttctatggaggaagtgatgcctcaggaacaatgggtggggcatgtggatatggcaacctctacagccaagggtatggaacaaacactgctgctttgagcactgctttgttcaacaatggtcttagttgtggctcatgctataaaataaggtgtgtgaatgaacataggtggtgcctccctggctccattatggtcactg

SEQ ID NO: 2378 - DNA, 344 bp, Glycine max
  modified_base (156)..(156): a, c, g, t, unknown, or other
aagttaatcgaagaagggtaaaatcagcaattctatctcctggatctgcatcatctgtccgtcaatctcctcgtttgaaggtcaggaaatgaagcggtgtgggggatgctcacctgctcggtaccttattttgatgagacatgctggttcatgtanggaattaattgctaactaattgacatgtaaattaagacatacccaggttccagatgtctgaacctgtagataatagaccagaagattcctacattttttgtgtatggtccaggtgagatttgtgtgtagtttaattggtagttgccattgctgaaaaactggtattgttcaataaaacatcattcaat

SEQ ID NO: 2379 - DNA, 371 bp, Glycine max
gaaaaggccatggctggttcctctgcttctcttttgttccttttccttctctttggattctcagcagctaaggagctattggttggaggcaaaatagatgcttggaagattccatcttctgaatcagataccctcaatcaatgggctgaaaggtctcgtttcagagtgggcgatcatctagtgtggaaatatgagagtgggaaggactcagtgttggaagtaacaagggaagattatgctaattgcagcacatccaagcccatgagggagtacaatgatggaaacactaaggtgaagcttgaacatcctggtccattttacttcatcagtggatcaaaggggcactgtgagaaggggcaaaagttgattgt

SEQ ID NO: 2380 - DNA, 73 bp, Glycine max
gggaaatgaaaataaaaaaaaaaaaattgtgtattattgaatttctctggaatcttcttctgtgtatgggggg

SEQ ID NO: 2381 - DNA, 339 bp, Glycine max
gcttggtgttgattcttgacgatgtccgccgccaggtgtttgctgcgctccgccgtctcccgagctgccggtgcggcaaatctggctgccggagctagaacgaagcctgcacgatctccgtttcggctcccaaagcaaacctcagtctccaatcgcgttttcaggttaccggtggaagcgagcttctgcgtggaatcgatgcttccttatcacagtgctactgcgtctgcattgctgaattcgatgctctctgtgtctcgccactcctacggttggacccctgaagggtgatgctgaatgccacaatttctggtctgtaagctcgtgatttggaattta

SEQ ID NO: 2382 - DNA, 359 bp, Glycine max
  modified_base (339)..(339): a, c, g, t, unknown, or other
ggaggtgaaggggaaaaaaaaaagagtagagtggataatggcttcgttatcgctttgcatagccatgagagcacccactccctcagcttctctcattctcactaccccaaaaccatcttcactctctttgaaccttacccgcacttgctccagcgctcgctctccgctcctccattgctccttcctctcttctccttcccatctctcttccccttcctccgtttcaggcttgtcacttggattggatttgacatctaatgttgggaccagaagaggaaaaggttctggcctagttgtgagggcaggcaaggctgctctttgtctgactaagagaagcanatcaagaaaatcattggcac

SEQ ID NO: 2383 - DNA, 253 bp, Glycine max
ggcacaggcaaaaaccctagccttcgaaaaccctaatcctgaggcactgtgatatggcaagagccgtttcctcttcctgcgcgcgcctcacaatgcgcctcttctccaccaccaccaccaccaccaccaccaccgctgcgttcgccgttacattacccaaaccctcgtcactctcagtctcaacgcgtcgattgctcgtcgctctctcgcatgccatcgtccctccctcgaggcaggtcgccggaatccggtg

SEQ ID NO: 2384 - DNA, 391 bp, Glycine max
gaccgtgcgctagttctgagtattctgatcgccccctgagagagctcgtcgcggcggttgcagaagaagattgcaagatgaagttcaacatcgcgaatcccaccactggatgccagaagaagctcgagatcgacgacgatctgaaactgcgagcattttgggacaagaggatctcacaggaggtcatcggagatgcactcggtgaggaatttaagggctatgtcttcaaaattaccggaggttgtgacaaacaaggatttccaatgaagcagggagtgctgactcctggtcgtgttagacttttgcttcacaggggaactccttgcttccgtggatatggaaggcgtaatggagagcgtaggagaaagtctgttcgtgggtgcattgtcag

SEQ ID NO: 2385 - DNA, 216 bp, Glycine max
gagctttcaattggctcaggtgaggtagtgatctgcgaccgtggggtctcagcaatagctgcatagtcgtatgtttcagatgtatgtcacaagcatcactctgaggtcgtgcgcttcttgcagtcagtgaggtgcttggagtgtaggtttgaatgttttaatgttcagcttgcaactgtctattcgcccggacagggtccgtctcctgggacttca

SEQ ID NO: 2386 - DNA, 258 bp, Glycine max
gggtagcagaggattgggcgccatacagagggtattgctggggagtgtgactaattatgtcaccacaaatgcgagttgccctataacgattgtgaaagactctgccccttctactaactgatatgctactgaatttggttggcctttgtaatcggttgtttttatcttcatcagagaccagactgcttttccctccgttcttacttcttacagatgcggaatgtgggtttatgaacacacatgatgattaaggattcg

SEQ ID NO: 2387 - DNA, 263 bp, Glycine max
ggagggttggttcatttgatctgcgactgagagaagagaagagaattgtgatggggggaggacagggtcacggcacaacctacaaaggtgttaccattcatcagccaaagcgctggcacactatcaccggcaagggtttgtgcgcggtcatgtggttttgggtattctacagggcaaagcaagatggtcctgttgtattgggctggagacatccttgggaaggtcaccatgatgatcatggcaagggccattagcattcctta

SEQ ID NO: 2388 - DNA, 394 bp, Glycine max
gactcactcatacaatagagaccagcttttgcttctttgtgaacatggagatgaggaaatcatgtggcttcttcttcttgctcctcctccttgtctttgcttcccaggtggtggtgcagacggagggaagagtgtgtgagtcacaaagccacgggttccatggtttgtgtaatagagaccacaactgtgctttggtctgcaggaacgaaggtttctccggtggcaggtgcaaaggcttccgccgccgctgcttttgcaccaggatttgttgagatctcatcagacactactcttgccatgcagattaataaatcatagctaagccaaataaattgcatctactctttatccatttgggagctagctaccacaaccaactcatacttggtcattg

SEQ ID NO: 2389 - DNA, 245 bp, Glycine max
ggatctggatccaacggtccaaaatgttcggggcttgtgctgcttgttttcccaggttttagagctccaaaccttcacatgcacctcattcgtctccatatcttccttccttgataacgttttcgggttcgagaatgcacttgtttgtttgtcgtacgacatggagactataccgagttcggtgacggttacgcggagtgacggcgcgttgacgtgcgccgcggagctgctcgcgactttgctag

SEQ ID NO: 2390 - DNA, 389 bp, Glycine max
gatacctaaaaattgtaccgatatggcttcacttgtgtgtctccttttttccttgcatttcatggttatcatgtcaggttccttaccagcaaatagtgaagtgtttacaaaagagtctcctatgtctctagccacaaaacccgtggaaagactcacccaactccacttttaattccataacaacaaaatgggggaacacccgactgctatgaaaattgttgagcctcctaaggcgtccatttctgggtttggggactatttacatgatgggatgaccctcgaaacgaaaggacaagtccaacttcaaagcttgttggaagatgtcagggaatatatgctgaggcttcgcaacatgaacctgcgatactcatggtaacgaatttgttctt

SEQ ID NO: 2391 - DNA, 344 bp, Glycine max
gattcacatatgtacgactgtcagtggcagagagagacagacgtggagtgtgtgggtgaagaagctctctgttgatgtttacctcttccattctaacctttgactctgtaggcttcagttgtgctatttaacagtgtagggcattgtgtgcctaggaaatagtaagtttgtataattactgtgcataaaatcagtatgggtgacgaagagtcagtgaatgaggtttcagaaactgattcatatgggaagagctttcaggagaaagctttggatgaaattactgacatgtaggacttggtcactgatggaagacaaatcctggagaacattggtatcaaaaacac

SEQ ID NO: 2392 - DNA, 379 bp, Glycine max
gagtcagagagacagaaggcaggaagtcaaagagaggacacggtggttcggcggggaacaagttcctgatgtctctgggtctgccggtggccgctacagttaaatgccccgacaacacggcggcgaataagctcgacatcatagcggtgaaagggatcaaagggcatttgaaccgtctcgcctcggcttgcgttggcgacatggtgatggccaccgtgaagaaggggagacccgatcttaggaagaatgttttgccagctgtcattgttcgccagcgcgcaccatagcgcctaaaggacggcgtctacatgtattgcgaagataacgcaggtgtgattgtcaatcccaaacgataaattaaaggttctgctatcactgg

SEQ ID NO: 2393 - DNA, 394 bp, Glycine max
aagaatgtgattggtgctcgcagagcgtcctggaggatcctgtcttccattgagcagaaggaagaaacaaaagggaacgagttgaatgcgaagcggattaaggagtacagacagaaggttgaattggagctatcgaacatctgtaatgatgttatgagagtgattgatgagcaccttatcccttcggctgcagctggtgaatccactgtgttttactataagatgaaaggagattattatcgttatcttgctgaatttaagtcaggcaatgagaagaaggaagctgctgatcagtctatgaaagcatatgagtctgctaccgctgcagcagaggctgatttacctcccacacatcccatccgattgggtctagctttaaatttctctgttttca

SEQ ID NO: 2394 - DNA, 387 bp, Glycine max
gacatcacattttctcaaagtaatttattaattaataaataaatggcggcggcggcggcagtgacggtgctactcccacctaggattccgaccgccaccaacgttacccgctgctctgctttgccttctctgcctcctcgcggcaccaacactaaaaccactttgctcttatcttccctcaaccacttctcagtgtcccgaaaatcttctctgcttcagaccagagcttcttcagaggaatcatcctcagtagatgccaatgaggtgttcacagatttgaaggaaaagtgggatgctcttgaaaacaagtccacagtacttttttatggtggtggggctttagttgctgtttggctatcgtcgattcttgtgagcgccatcaactct

SEQ ID NO: 2395 - DNA, 323 bp, Glycine max
aggccccaactagttgggtcaagaggtaacccacgtcctaaccaagggtaggactgaccgtgtatacatgtttaaaagtatctctaccttaagacttctaacatggccgattctagatagagagcgcggtaaccctactctacaaaaagtggaaaatctcttcatagggtactgtagctgtacagccatagtaccatagggatggtgagagttcatcagagcccgaattgatataggttaaatatccttactcaaattacgaaccctgaacctctttgcgaattcggctgaaccttgatgggaaatctgagatttctgatagg

SEQ ID NO: 2396 - DNA, 361 bp, Glycine max
cacctacttgaagctcttgtgctctgattaccacttgatggaagcttgcttgtggggcttctatggaggctggatctttgagcttcaatgaggtcctttaatggtgattttccaccatggagatgcagcggaagacaaaggagaagaggtgagaggaggcgccatccactagggaataagccatggaagaaggagcttcaccaccaagatgagccttggataagaagcttggaaggatgcttcaatggaggtaaagaaagagggagagaaagagagaggggggagcacgaaattgaaggaataaaagagggagagaagtggaactttgaagtatgtctcataagactctcattcatcaaag

SEQ ID NO: 2397 - DNA, 360 bp, Glycine max
ggcttgctgatcctcatcatgggaaccatttttcctcctcactctctctctccactcctcaacatcaaaccttcaccctcaagaattctcttggctccctctccccaacccaagtcaaattctctcttttgctccaaacccattgtttcaagtctcagaaagaaccaaacttcatctcccaaaccttcatcgggcacaagctggttggctcatgctcaacagggcctagcagctttggctatctccttggcactcaactttagcccagttttgtttaatggcaatgcattggcatctgagtttgatgtgcttaatgagggtccacccaaagattcttatgtgtttgatgatgcaggagtg

SEQ ID NO: 2398 - DNA, 358 bp, Glycine max
gatccactactcttcttagttccagcacaacaagctcttcatttctcccacactttcttttctttcaccaaaaatgtcaccagatttcacacttttgttcttcccggaactcatgcagtcccctatgatcactttccaagccaccctctgcgtccttctcttcaccctcatgttcacgctgctcttcactcctggtgggcttccttgggcctgggcccggcccagacccatcatccctggcccagtaactgccctgttagggatctttactggctccacgcctcaccgtgctttatccaaactcgcccgtaattaccacgcggaaaaactcatggctttctccatcggtttaacccgt

SEQ ID NO: 2399 - DNA, 395 bp, Glycine max
agaaggggaggacccatatttctatcttactaaagaaaactgggcccaataaacttgaaagccctcgatggtgaatgaggagcagatgagcaatctctatctatatcgacgtatcgtctaagctcagtgatcataatctatgccgatcgaaatcccatctaccaatccaatcctctcccaactcacaaggccatgtctccaggtcacgttgtcgacgcgtcgcctgaggttgatgcgcagcaacatgttccctccctcgatcacgccactcagaagaagatacgccaaccacaggaggacgattctcaccttgtcgaggacttgaaggatgatcacaaagacgactacgatcaagacgacaacgatgacgacgaggatgacaacgaacacgatgc

SEQ ID NO: 2400 - DNA, 387 bp, Glycine max
  modified_base (1)..(1): a, c, g, t, unknown, or other
naggggccaagattctcttaaccaaagcaatcttcagttttttttttttctctctcactcccttctctcctccttataaaccaatcaaccttagcctcagccacatccaaaattcagagtgtggttgtaaagttgcaatggaagtgttgagagttcaggtttttgttgtgtccattgtggctcttgctttggcttatgtggcaccttccatcaatgctcaggtccttcctcctgcccctgcccctgcacccacaagtgatgggatatcagttgaccaaggaattgcctatgtgctaatgctgctggctctggtccttacttacatcattcactaacctctctatcaccccattcatctattcactatgtttttcttcaactctattc

SEQ ID NO: 2401 - DNA, 312 bp, Glycine max
gactcaccacttcaaaacactcataacacaaagcacaaagcaaagctcattcttgagttaaaaaatggcagcagcttcttccatggctctctcatccccatccttggctggcaaggccgtgaagctgggcccatcagccccagaagtgggaagggtgagcatgaggaagaccgtcaccaagcaggtctcctcaggaagcccatggtacggcccagaccgagtcaagtacttgggcccattctctggcgagcccccgtcctacctaaacggtgagtttccaggcgactacggctgggacactgctgggctttc

SEQ ID NO: 2402 - DNA, 356 bp, Glycine max
ggagaataaggatcaagcggcagacgtggcttcaaattggggaatccgtctattcggcaacatagtcgacacacggagcattcggtctgttcatcaccgtcaccgttgcgcgcaccctctgttctaacgactcctaaatagcttgagactttgcttccacttcatctttcccagatcgttgcaccctttgcttccatatgcacacgtctgcgccgttcactgtctgcatggaataagcatcaattcacctgtttgatttaccacatcacatggtatcacatgcaacagattgatgtctcaacaagcatgcctacttcacacatgatgaggactgttctcaacgttgtcgatatctc

SEQ ID NO: 2403 - DNA, 350 bp, Glycine max
gagggtttcggagtcgttgcagagctgcgcgttgatctagaaaaatggcgaggataaaggtgtacgagttgaggaataagacgaaggcggagctactgaaccagctcaaggatctcaaggcggagctagccctgctccgcgtcgccaaggttaccggcggcgccccaaacaagctctccaaaattaaggtggtgaggctatcgatagcgcaggttttgacggttatttcccagaagcagaaagcggcgctgagagaggcttacaagaagaagaagtatttgccccttgacctccgtcccaagaagacccgcgccattcgcagacgccttaccaaacaccaggtgtctttg

SEQ ID NO: 2404 - DNA, 389 bp, Glycine max
gaaaacagagagtgatttcagtgagtgatcggtgttcacttgatctcatcataatcgtcagcgtcaattgaagaagatgccgatcagaaacatcgccgtcggaaggcctgaagaggcgactcaccccgacacgttgaaggcggctttggctgagtccatctcaaccttcatcctcgtgttcgccggctcaggctccggcatcgcctacaacaagctcaccgacaacggcgctgccacccctgccggcctcatctccgcctccatcgcccatgcattcgccctcttcgtcgccgtctccgtcggggccaacatctccggcggccacgtcaaccccgccgtcaccttcggcgccttcgtcggcggcaacatcaccttcctccgcggcatcg

SEQ ID NO: 2405 - DNA, 379 bp, Glycine max
gacaataagaattcctctcaaatttcaatttttcatttgaaaataataaaaccctaaaagaggggttgcaagcaaaatgagaagctcgaagatgtggatggttttcatgtgtctgacggtgagcttcttcgctcgcattgaatcgctatccgtgacggtgaacgacgtcgagtgcgtctacgagtacgtacgttacgagggcgacaccgtttcggggaactttgttgtcggcgagcatgacattttctggagctctgatcaccccggcattgatttcaggggtgacaactgctgcagggaataatgtcaagagtatcaagggaacctctggtgacaaattcagttttaaagcccatcacatggaaagtaaaaattttgt

SEQ ID NO: 2406 - DNA, 365 bp, Glycine max
ggttcttttcatgcatgtgttgaatgcacatgctggatctccggtccggttagggcatttctgggaccttaaatcaccaatttctcacccaatcaattccaattaagctgaaggtgtctctgatctatatgtgatgggtgctccgaagcacacatggactgcagaagatgaacaagcacttacagccggagttgtcaaacatggtgttggtaaatggcgcaccatactgaaggatccagagtttagtagtgtcttgtacctgcggtcaaatgtggatctcaaggataaatggagaaatctgactgtgatggcaaatggatggagctctagggaaaaatctaggttatcactcagaagggtgcatc

SEQ ID NO: 2407 - DNA, 366 bp, Glycine max
gactgcaactttgctctctgtgaggcttcaatttccaattagggtttcgcttagagtaaccaattaccatgggagtcttcacctttgtcgttcgcaaatccggcgccgaatggagcgccaagcaacattccggcgacatcgaggcctccgccgactccacctacgatctccaaaggaagctcgtgcaagccgctctcgccgttgattcctccggtggagtccagtcctccttctctcccgtgtctcctacctccgctgtgttccaagtgatagtgggtggtgctgtattcgttggaggtggcggtggtgctgttgcagctgcacctgcaggtggtgctgctgcagctgatgctgccccggctgctg

SEQ ID NO: 2408 - DNA, 379 bp, Glycine max
gaacaaaacagccatcatcatggccacctctgctattcagcaatcagcattcgcaggtcaaactgctctgaagcagctcaatgagttggtccgcaagaccggtggcgccggcaaaggtcgcaccaacatgcgccgtaccgtcaagagtgctcctcagagcatttggtatggccctgatcgtcccaagtacctgggtccattctcagagcaggttccgtcatacctgaccggagaattccccggtgactacggatgggacactgctggactatcagctgacccggaaaccttcgccaggaaccgggagctggaggtgattcacagcagatgggccatgcttggtgcacttggctgcaccttcacagagatccttgagaag

SEQ ID NO: 2409 - DNA, 388 bp, Glycine max
gggctgatatttcctgataagtggacagacgcttaaacagagaaactaacacagatttgcatgcatggggaaaataacgcacattgtagtaattcccagtgcagggtacagccacttcgttcccgttatccacttctcaaagagacttgttgagcttcacccagaaattcacgtcacatgcatcattcccattctggggtctctcccaagtgctgcaaaacccattctccaaacccttccacaaaacatcaacacggttttccttccaccggtgaaccctaatgacctaccacaaggtgttcccgtagttgtccaaattcagctagcaatggctcactccatgccctccatccaccacaccctcaagtccataacttcaaagactccc

SEQ ID NO: 2410 - DNA, 152 bp, Glycine max; identical to SEQ ID NO: 1626

SEQ ID NO: 2411 - DNA, 375 bp, Glycine max
gtcagttcggtggaaggagccgtagcagcagcggaagctctagcttgggcagcgaatcacaatggcgagaggattgaagaagcatttgaagaggcttaatgccccaaagcattggatgcttgacaaactgggtggtgcatttgctcctaagccctcatctggaccacacaaatccagggaatgcctgccactcatactcattttgcgaaaccggctgaagtatgctctgacataccgtgaagtcattgctattctgatgcagcgacatgtccttgttgatggcaaagtcaggacagacaagacatatcctgctggtttcatggatgttgtatcaacccctaaaacaaatgagaacttccgcctgctgtatgacac

SEQ ID NO: 2412 - DNA, 57 bp, Glycine max; identical to SEQ ID NO: 410

SEQ ID NO: 2413 - DNA, 351 bp, Glycine max
aactacaacacaagagactgtagcttctttttgaactctctgtgggttggggttttggagtgggagcaccaatggctttcttgatggcaattgtagtattaagtgttgtcttggtgctctgtttttgctctgctctcttgaggtggaatgaagtaaggtacaggaagaaaggtttgcctcctggcacaatgggttggccactttttggggagacaactgagtttcttaagcagggtccaaacttcatgaaaacccagagagcaaggtatggcagttttttcacatcccacatactgggttgtcctaccattgtttccaggattcaaagcttaacagatacatcctaatgaa

SEQ ID NO: 2414 - DNA, 242 bp, Glycine max
aaggatcacttaaggggtatactacttgactgaatattgaacacgattttgtacaattaatcataatttaaaaaggattcaataaacatttggaaatgatttatacctctaagattgttaacatcttaacgaggatagtgttgatcatcaaaagccctcatctggacaaaaaaaaatgcggctattcaagatgattcattactcatttagtcatgcaagctaattcatcctccaacatgtca

SEQ ID NO: 2415 - DNA, 174 bp, Glycine max
agggatagcaaaatcgtatcgccagtttaatcaccagtgttcaacccaattcccttcctcgttttccattaagagatcaatggcacgtttcaagcaaaacgctcccaagtccaaccgaagaaatggtcccaagaaacaattggtaaccaaagccgctcgcaagtcaacccccgg

SEQ ID NO: 2416 - DNA, 348 bp, Glycine max
ggactgcaaatccctttcagctttctgggtacggagaattttgtaagatggtagagtttcaaaggttgttggtgtgcatcaccacctgcattctatgttggatgcccaatggtgccactgccgccacagatccaaatgatgctgctgctgtgagatttttgtttcaaaatatgaactcaccaccccagctaggttggcctcctaatggtgatgatccatgtggacaatcttggaaaggcattacttgctctggcaatcgtgttacagagattaagttatctaatcttgggctaactggatcgttgccttatggattacatgtcctgacatctttgacctacgtacaca

SEQ ID NO: 2417 - DNA, 343 bp, Glycine max
gcacttgcaatcccttttaacatttagggcaaggttcattttcgcaccaggccccagttccagcggttttcctcttaaccaaccacaggcattccaagtagattacggattgcctccacagtgccaaaaggtcgaactcatggtcgtgcagaatcattaggatcacaaatttggaaacttccacggcaacaagctcgacttcccactacacacgttatatgtgtgccacctagaaagcggataatttgaccgtctctctcctcacatatgagtgttcaggacatcttaaggtaaatggcgagagaccccaaagattccaattcctgacacctctgaactacgt

SEQ ID NO: 2418 - DNA, 367 bp, Glycine max
tgggactcactcatacaatagagaccagcttttgcttctttgtgaacatggagatgaggaaatcatgtggcttcttcttcttgctcctcctccttgtctttgcttcccaggtggtggtgcagacggagggaagagtgtgtgagtcacaaagccacgggttccatggtttgtgtaatagagaccacaactgtgctttggtctgcaggaacgaaggtttctccggtggcaggtgcaaaggcttccgccgccgctgcttttgcaccaggatttgttgagatctcatcaaacactactcttgccatgcaaattaataaatcatagctaggccaaataaattgcatctactctttatccatttgggagctag

SEQ ID NO: 2419 - DNA, 387 bp, Glycine max
tcaggattgaggtcttgggtattttggtattagtagctttccaaataacattgcaaaatgcagggcattttttatgttagcaacaattataactataattaggattgactgtatatgtacaaaatccaaaaaatattactccatccctcctgaagccgtcaccgattcatttctctacatatcaccaccgagggcttccaccagtcactcaaatgccctgtaaaatacagacactgatttacctggtctgcatgcacacgagcagattccagccagcattggggtatacaaaaaaagtgacgaccaaaaatgactgaagggcatggtgggaaaaaaaataagatgttacaatgccaaaatttgtactcatggatatgtacactctga

SEQ ID NO: 2420 - DNA, 377 bp, Glycine max
ggaaacacgagtcttgaacaaacttcgaggaaagggatcgccggcggcaccctccgaagacggagatacacccactcactcaccaccactttcccagaaaataaccaccgcctacaatttctcggaatttattttgcgttttggtgcctttgttgttcggattttcaggtgagggagctcgtgtcgtgtgtcgtttagggttaaaaatggggtttaagtgggtgcactgatgtcattgttgtggcttgtgattcgtcaacttgcagaaatcgaggcaatggctgcatctaagaaactgataacaagagaagagtgggagaagaagcttagtgatgtgaagattagaacagaagacatgaataagttggtaatgaatt

SEQ ID NO: 2421 - DNA, 363 bp, Glycine max
ggaaacacgagtcttgagcatacttcgaggaaagggatcgccggcggcaccctccgaagacggagatacacccactcactcaccaccactttcccagaatataaccaccgcctacaatttctcggaatttattttgcgttttggtgcctttgttgttcggattttcaggtgagggagctcgtgtcgtgtgtcatttagggttaaaaatggggtttaagtgggtgcactgatgtcattgttgtggcttgtgaatcgtcaacttgcagaaatcgaagcagtggctgcatctaataaactgataacaatagaagagtgggagaagaagcttagtgatgtgacgattaaatcagaacgacattaata

SEQ ID NO: 2422 - DNA, 381 bp, Glycine max
gacagcactgcactcttcgcaacacagcaaaaaaagacaacccagagagcgcgtcttaataaacgctcttctctgaaaacccccatttcttttcttctttcttcttctctttcgcttcttcgatcttcgatcttcgtcgctgaaaatgagagagtgcatttcaatccacatcggccaggccgggattcaggttggaaacgcctgctgggagctttactgcctcgaacacgggattcagcctgatgggcagatgccaagtgacaagaccgttggtggaggtgtggatgctttcaacaccttcttcagtgaaactggggcaggaaagcacgtgccccgtgcgatttttgtagattttgagcccactgtgattgatgaggttag

SEQ ID NO: 2423 - DNA, 385 bp, Glycine max
ggccattgttgttgctattatcatccgcagctgcttttattcgcaccgcaaacagtgagccatggccgtcggaaagaacaagcgcatctccaaggggaacaacggtggcaagaagaaggcagctgatccctttgccaagaaggattggtatgacattaaggctccttctgtttttcaagtggaaaatgttggcaaaaccctcgttctcgtactcaaggtaccaagattgcttctgaaggactcaagcatagagtgtttgaggtctccttggctgatcttcaaagggatgaggatcatgcattcaagaagattaggttgagagctgaagatgtgcaatggaagaatgtgctgacaaatttctggggaatggatttcacaacagaca

SEQ ID NO: 2424 - DNA, 279 bp, Glycine max
tgccgttgcgataccactaaacaacggtaccgctgctaaataccacagaaagggtccgccaatttccgtagctactgttcttgcgcgttcacaggcgcaaagtgatccaaaaacataaggtaaccattaccttgtcaaccaaggatgactcttccgtaagcgctcctacaactatgtaaatacatagtttagtcaaacaccacggctcacatagacacgattggcacatcacatcaaagcgatgcacatatacactatatcaactcctcgacctctcat

SEQ ID NO: 2425 - DNA, 266 bp, Glycine max
ggaggaaaagaaagaaagaacaaaaaaaacagcgccctagatttgctcttctttgcttcggaagaaagagaaaaacaaataacaatggcgttcgcttctttcctcggcagagttctcttcgcttccgtcttcatactctctgcttaccaagaatttaacgaatttggagttgatgggggacctgcagcaaaagcactcagacctaagtttgatgcctttacacatcgagtgcattcccaagttggcgttcaacttcctgagattga

SEQ ID NO: 2426 - DNA, 304 bp, Glycine max
gaaagaagttaagagagttttttttgttccacactgaccaacccttggagacgcaagtgatactttcgttacctatcttggtcttgtatcccttagccttattttcaaacatagtctttggtaaatggttcaaattggacgttcattcaagagtaactgggctcgtaacaagttgggaccaatggcattactcacagcatgacactcagggtgacaagcgggtatgcttgccatgatgtgacaagtcacatcgtaggaagcactagcgagagacacacttcgttgttgttcgtgacaagcttcg

SEQ ID NO: 2427 - DNA, 390 bp, Glycine max
gacacaccgtttgttctattcttaactcaacttctgctacccactctcttcttccaagtccaaccacgcttttctctacagtcatgggcaaggtcaagatcggaatcaacggatttggaagaattggccgtttggttgccagagtcgctctgcaaagagacgatgtggagctcgttgccgttaacgaccctttcattaccaccgattacatgacatacatgtttaaatacgacagtgttcacggacactggaagcatcacgatgtcaccgttaaggacgagaagacccttctcttcggtgacaagccagtcactgtttttggacacaggaaccctgaagagatcccatgggggtcaactggagctgatatcattgttgagtccaccggag

SEQ ID NO: 2428 - DNA, 236 bp, Glycine max
gaacgacgtatggactgatctcagtgcatgatctgtgatcaattcatctcatcaaaatcgacagagtcaattcactaaaatgccgatcaaagacatcatcgtcagcaagcctgatgaggcgactcaccccgagacgttcaaagccgctttggctgaattcaactcaagcctcatcttcgtgtacgacggctcaagctccagcatcgcctacaacaagctcaccgacaacggcactg

SEQ ID NO: 2429 - DNA, 353 bp, Glycine max
gacagcaaaacaattttcaggctcacttaccattccataacctaaatctcctctttgtttccgagtcagagagcaatggcacgtaccaagcataccgctcgcaagtccatcggcggaaaggcgccgaggaagcaattggcgactaaagccgctcgcaagtcagctccggccaccggcggagtgaagaagccccaccgcttcaggcccggaacggtggctctgagggagatcagaaagtaccagaagagcactgaacttctgatccgaaaactcccattccagaggctcgtcagagaaatcgctcaggatttcagtacagatcatcgtttcgagagcagcgctgtgtctgcgct

SEQ ID NO: 2430 - DNA, 384 bp, Glycine max
ggtcactcaccacttcaaaacactcataacacaaagcacaaagcaaagctcatccttgagttaaaaaatggcagcagcttcttccatggctctctcatccccatccttggctggcaaggccgtgaagctgggcccatcagccccagaagtgggaagggtgagcatgaggaagaccgtcaccaagcaggtctcctcaggaagcccatggtacggcccagaccgagtcaagtacttgggcccattctctggcgagcccccgtcctacctaaccggtgagttcccaggcgactacggctgggacactgctgggctttccgcagacccagaaaccttcgccaagaaccgtgaactcgaaatgatccactccaagtgggccaatgccgg

SEQ ID NO: 2431 - DNA, 385 bp, Glycine max
gacttcacaactcaaactgcttcattgcataattgcagataagatcaacccttctaccttcagattcgcgggaagatggcatcacttcatgctaatgtgacatcagttgtttacaacagtggcaaccgtgtttctcaatcgaaatttgcaagctcttccttcttgtctgggttcgatgttgttggtcgtgcttcaagtgcttggaagaaggaacttgtcccatcttccatttccttggtgcctagagccaccctaacatttgatcccccaactaccaattcagacataaccaagcaaaagaagcacactcttgaccctgcttctccagattttcttcctcttccttcatttgaacagtgctttccaaagagcaccaaggaacaca

SEQ ID NO: 2432 - DNA, 403 bp, Glycine max
gaagacgacagaagggggcgcaggtagagagagcgagagaacacgaacataagggaaccacagcggcggtaacagaagaacaagcagagaatgggtcgagtgagaacgaagacggtgaagaaatcctctcggcaggtgatagagcgtcactactcgcgcatgaccctggacttccacacgaacaagaagcttctggaggaagtggcgataatcccgtcgaagaggctaaggaacaagatcgcggggttctcgacgcacctgatgaagcgcatccagaagggccctgtgcgcggcatctccctcaagctccaggaggaggagcgcgagcgccgcatggacttcgtccccgacgtctccgccatcaacaccgaccacatcgaggtcgacaaggaaaacctcgaca

SEQ ID NO: 2433 - DNA, 388 bp, Glycine max
gatacctaaaaattgtaccgatatggcttcacttgtgtgtctccttttttccttgcatttcatggttatcatgtcaggttccttaccagcaaatagtgaagtgtttacaaaagagtctcctatgtctctatccacaaaacccgtggaaagactcacccaactccacttttatttccataacaacaaaatgggggaacacccgactgctatgaaaattgttgagcctcctaaggcgtccatttctggttttgggactatttacatgatggatgaccctctaagcgaaggaccaagtccaacttcaaagcttgttggaagatgtcagggaatatatgctgacgcttcgcaacatgaacctgcgatactcatggtaacgaatttgttcttc

SEQ ID NO: 2434 - DNA, 388 bp, Glycine max
gacctaaaaattgtaccgatatggcttcacatgtgtgtctccctttttccctgcatttcacgggtaccatgtcaggttccttaccagcaaatagtgaagtgtttacaaaagagtctcctatgtctctatccacaaaacccgtggaaagactcacccaactccacttttatttccataacaacaaaatgggggaacacccgactgctatgaaaattgttgagcctcctaaggcgtccatttctggttttgggactatttacatgatggatgaccctctaaccgaaggaccaagtccaacttcaaagcttgttggaagatgtcacggaatatatgctgaggcttcgcaacatgaacctgcgatactcatggtaacgaatttgttcttcac

SEQ ID NO: 2435 - DNA, 228 bp, Glycine max
gcccgccgatatgtctattcatagccttgctggaaagccacatttcactacatgtcgaattccacaacaagtcaataccggtggcccctcctgacagttgcgcagccgggatgcccaaggggacgcgctctgtaattgcgcattaagagatgcgggtgtagtcgctacggggcaggatgaacgctacacttaccaattgcctatcgcatggctcggatcacattcttc

SEQ ID NO: 2436 - DNA, 375 bp, Glycine max
tcagcgggatcatcccgacattcagttcataatttctgcggacttcatatatatttcgtacataaagcatggcacgttaggtgtgaaagaatgaagagtcactgcagctgaaagtcgcagggacgactcatgttcattcataagagaatattggaagacaggatgtacaagtggtcatcatatgatctctctacttggcctctgactacaagcagtagctcttgatttacatgggtaaagatttcgagggcatggtccatcaactcacagttggacttgcactggtgctgaaggagttccaccaacttgcaggcacgttatggatatatgaaaagtgggtgttcagactcaagtatgatgatcacatgcatggtg

SEQ ID NO: 2437 - DNA, 383 bp, Glycine max
gaatccgaacagtagtaccaacatggcttcagttgtgtacctccactttggcttccatctcattgttatcatgtcaagttccttacgcgcaatcactgaactgtttgctgaacagtatcaatccacagaacccgtggaagaaaaactcacccaactccacttctatttccataacaacatatccggggaacacccaactgctatgaaaactgtcttgcctcctaaggggtccattcatggttttggggctacttacatgatggatgaccctctaacggaacgaccaagtctaacttcaaagcttgtgggaagatctcagggaatatacgctttggcttcactacatgagcctgagttgctcatggtgacaaatttctcttcac

SEQ ID NO: 2438 - DNA, 304 bp, Glycine max
gaataatagtcccttttctgaaattctcctaactctctctctctctcaacaatggctcctacttttgttcctaagttggtttctgctgcagcattgttgtttaactccacgatggctcaatctccaacttcctcccccgccttaacacccaccaacacgccggttggcactccacctaagagggcgttgtccccgttccctgttcctgctgccgttccaaccgtcgtcctctccctccggggtccacctaccttcttctccttcggaacccccaatttgcagctgctactcccaaacatccctc

SEQ ID NO: 2439 - DNA, 385 bp, Glycine max
agggatacacactctgtcacgcacccaccagtctactacactcctctcactcagtctcactctctgctccgtgatagctgtaccacgtttttctctccatctcgaaacaccatctctgcctcagtcccaacccatcaccattctcatggctgctctagctctagcacttcttcttctggctttcaccggcacttcaagtgctacatggtgcgtttgcaaggatggaagcgacgcgatcctgcagaagacgttagactatgcttgtggagctggtgctgactgtaaccctcttcacctaaacgggccttgttttcagcccaacaccgtcagggcccactgtaactacgccgtgaacatctacttccaaaagaagggtcaagctcaa

SEQ ID NO: 2440 - DNA, 328 bp, Glycine max
gactacctcaacaacaatactacagcagcatacgtcgtcgtcgtcgtcgatgacctctcctccgccgcatcatcatgccttcggtgtccctcatgataatggtggtcgccgcttcttagctgctcgtcgtcggcggtagcaacaacacctccaccaatgataacatcgaagacatccacggctttgttataatagcagaagatgatcataggaatgaatccttgttgtctgatattgatggtgatgttattgatgagcttactgccggtagtgaagaacagctggccgcggcgtcttctggtggtagtggggccgttgtcgttgccgc

SEQ ID NO: 2441 - DNA, 179 bp, Glycine max
caacggggaggtctcgtcacaactttattcaatcatgcttctcctgcgacaagggtattaacggatcctcctccaaaaatacgagaaaatgggtaaagaaaacgcttatctcaatatcgccgacatctctcactctcacaactgggaaatccacttctcttcgtaccttatttacaacc

SEQ ID NO: 2442 - DNA, 349 bp, Glycine max
ggattgattccctcattcttcatccatagacatggccaccgtcacttctgcagccgttgctattccctcattcactggcctcaaggcaagcgcaggcaaagtgagtgccgcagttaaagtctcagctccccaagccacaaggttgggcatcaaggcttcgctgaaagacgttggagtcgctgttgtggccactgccgcgagtgcagtgctggctagcaacgccatggccattgaagtgttgctgggtggtgatgacgggtctctggctttcgttcccaacaatttctccgtggcctctggggagaagatcgtgttcaagaacaacgcaggtttcccccacaacgttgtg

SEQ ID NO: 2443 - DNA, 400 bp, Glycine max
  modified_base (145)..(145): a, c, g, t, unknown, or other
gacattcaatcacacacacatgcccctatcttccatagctacctagattattcactccctccctaacaagccacaacgtttcctgctccaattggcagctttggatctcacaataagcatgttggcactcatagttgttgttgtntctcttggcctgtgggttggtgtcaaggtgcgccacaagttccaagccacttcaattttggtgaatccttgggtgataatgggaacaacaaccagctccaatctttggctaaggctgattacttgccttatgggattgacttccctggtggaccttctggaaagttttccaatggaaaaaccactgttgatgcaattgctgaacttttgggattcgatgattacatacctccaatatgctgatgctagtggcgat

SEQ ID NO: 2444 - DNA, 115 bp, Glycine max
ggattacgtcgcctcatgcgcaaagcatggcaacccaggtcagggacaacggcaccgccatcgtgcaggaacctgccacgtgtgcaaggcaccttttacacgaaccataggacaa

SEQ ID NO: 2445 - DNA, 51 bp, Glycine max
aaacaatatttaagtggtcatcttataaaattttttaatgtcaatgaatcc

SEQ ID NO: 2446 - DNA, 343 bp, Glycine max
ggagcgaagaagatattatggtttttgagtgcggtgcggcgatcctagcactctcttctgcagctttcgccgacagcttcattcaccatggctgagcaaaccgagaaggcttttttgaaacaaccaaaagtgtttctcagctcgaagaaaactgggaagggaaagagacccggaaagggtgggaaccgcttttggaaatccattgggcttggatttaagactcccagggaagccatcgaaggaacctacattgacaagaagtgccccttcactggcaatgtttccatccgtggccgtatcttggctggaacatgtcacagtgcctagatgaacaagactatta

SEQ ID NO: 2447 - DNA, 314 bp, Glycine max
ggaaacagagagtgatttcagtgagtgatcggtgttcacttgatctcatcataatcgtcagcgtcaattgaagaagatgccgatcagaaacatcgccgtcggaaggcctgaagaggcgactcaccccgacacgttgaaagcggctttggctgagttcatctcaaccttcatcttcgtgttcgccggctcaggctccggcatcgcctacaacaagctcaccgacaacggcgctgccacccctgccggcctcatctccgcctccatcgcgcatgcattcgccctcttcgtcgccgtctccgtcggcgccaacatct

SEQ ID NO: 2448 - DNA, 83 bp, Glycine max
gatgatccttcaggcagttaatgggatatgaggagtggcaaaagctcgcaccaaatatgcgagaggggtgtccaccctagcct

SEQ ID NO: 2449 - DNA, 228 bp, Glycine max
ccacaagtccgcccacacatcagtgcagctgcgacaagaccacacatggggactttcgaaacttccgtgccccccagtttccgggtcaaccgagaagttactaaatgaaaacgtgaaccgaaacgaaaacgaacggcggatatcagttgttccatcgaggctcaccgcggcaggctcccccgaatccctgttcacaccttctgcatcgctggaacctcgtcggcatac

SEQ ID NO: 2450 - DNA, 385 bp, Glycine max
ggcagcgcttgagaccaagccccactcaaccaccacaccactctctctgctcttcttctacctttcaagtttttaaagtattaagatggcagagacattcctatttacctcagagtcagtgaacgagggacaccctgacaagctctgcgaccaaatctccgatgctgtcctcgacgcttgccttgaacaggacccagacagcaaggttgcctgcgaaacatgcaccaagaccaacttggtcatggtcttcggagagatcaccaccaaggccaacgttgactacgagaagatcgtgcgtgacacctgcaggaacatcggcttcgtctcaaacgatgtgggacttgatgctgacaactgcgaaggccttgtaaacattgagcagcag

SEQ ID NO: 2451 - DNA, 383 bp, Glycine max
gacgctcaattcattttcttctcctctctctctctcctaaggttagggttttctctcttcatcactctctgtgtcgctccgtttcaatggctcagcaagacgctcaaaacggcgggtcggagaatgccgctgctgctgctacggtgtcgtttgtcgctgtgaagccgcagctcctcgtcgaagctcccaaagccaacgacgccattctgttcttcaaggctgcgtttggcgctgaggaagttggccgtacgctcaaccctaagcgcaaagctgagcacgagctccctctcatactctccgcagaactcaaaatcgctggctccaccattctcgtcgccgacctcgttgatgacacttcttcgccagcgaaaacggggggaaac

SEQ ID NO: 2452 - DNA, 359 bp, Glycine max
gggatccaatctcgttagggtttttgacagttgcaatttgcactttgtaggatcaactcctaacattgatcgattgaaatggcagacgaagctaacagaactgctttccttgaaattcaaagtctcatgatcgatactactggaaaactagtacaggtgcaaacccatatgcgttccacagaagcagaacataagcgtgcttttctgaccatggaggagctgattcaagttcctgatgatacgaatgtttacaaatccattgggagaatgtttgtaatggagaccaaagcaacattaatgaatgaacacgagaccaagtttaatgatggtgaagcttcagttactgcattacagagctc

SEQ ID NO: 2453 - DNA, 372 bp, Glycine max
gactcatgcgatatagaccatcttttgcgtccttgtgaacatggacatgaggaaatcatgtagcgtcatcgtcttgcacctcctccatgtcgctgcctctccagatgtggtggtgcagactgacggaagagtgtgtgagtcacatatccacgggttccatggtttgtgtaatagagaccacaactgtgctttggtctgcatgaacgaacgtttctccggtggcaagtgcaaaggcgtctgccgctcgcatgcgtttgcaccaggatttgttgacatctcatcaaacactacacttgccatgcgaattagtaaatcatagctaggccacatatattgcatctactcgttatccatttgggatctagctaccac

SEQ ID NO: 2454 - DNA, 320 bp, Glycine max
gaagcttagcttcaccgtcagttgcaggaaaaatggtttcgctgaaactgcagaagcggctcgccgcgagcgtgctcaagtgtggcagaggaaaggtttggcttgaccccaatgaagtcaacgaaatctccatgggcaattctcgccaaaacataaggaagctggttaaggatgggtttatcatcaggaagcccaccaagattcactctcgctcacgtgctcgtcgaatgaatgaagccaagaggaaaggacgtcactctggatacggtaagcgtaagggtacaagggaggcaaggcttcccaacaaaattctatggatg

SEQ ID NO: 2455 - DNA, 377 bp, Glycine max
ggtagcgcagagaaagaactagaactagggtttcatctttgccatcagtaaacgacaatgatttacgacgttaactctcctcttttccgatccttcctcagccagaagggaggctcctctgataagaggaaatcggacgaacagaagccaaaagagcagaaacccaaagccagcgagaacaaacctataatgactgagtgataacagctgagctgcattcagttgtagaatgaaaataggtggtaggtattgtatttggtgctaaactaagatctttttggctgtgttctgaagtatatgccggcgatgttggtctttgttattgtaatggtttgattttggatatgggttatacgaaaaccttatatgggcacaag

SEQ ID NO: 2456 - DNA, 389 bp, Glycine max
accatcgaaattctagacacacaacacataaaagatttccttgttctttttactgcttaactgttcggctatctcatatatgaacaacaacatgttaggaatgaagagacggagagatgataatgaagggtccttggatttggcaaaatgtcttatgctgttttcttgtccaatagaaagcaacaagacacaacagaaaagttttggttctgtggaatttgagtgcaagacgtgcaaccgcaagttctcttcttttcaagcactgggagggcacagggcaagccacaagaggcagaagctggagggggaagaactgaaagaacaggccaaaagtcttagcttgtggaacaaacccaaaatgcacgagtgctccatttgtggccttgaat

SEQ ID NO: 2457 - DNA, 367 bp, Glycine max
ggttctagtgtgtgattgtttgttgttgtaactcgttcttcgtcctttgttgttctgtgtttgtgtttgttttttctctcacctgaaaatgtcttgctgcggtggtaactgtggttgcggaagctcctgcaagtgcggcaacggctgcggaggctgcaagatgtacccagacttgagctacactgagtcaaccaccaccgagaccttggtcatgggagtggcacctgttaaggctcaatttgagggtgctgaaatgggtgtgcccactgagaacgatggctgcaaatgtggaccaaactgctcctgcaacccctgcacttgcaagtgaggtgttgggaaagcaagcttcaagcaaagataaccctta

SEQ ID NO: 2458 - DNA, 360 bp, Glycine max
gactcactcatacaatatagaccagcttttgcttctttgtgaacatggagatgaggaaatcatgtggcttcttcgtcttgctcctcctccttgtctttgcttcccatgtggtggtgcagacggatggaagagtgtgtgagtcacaaagccacgggttccatggtttgtgtaatagagaccacaactgtgctttggtctgcacgaacgaaggtttctccggtggcaggtgcaaaggcttccgccgccgctgcttttgcaccaggatttgttgagatctcatcagacactactcttgccatgcaaattaatacatcatatctaggccaaataaattgcatctactctttatccatttgggag

SEQ ID NO: 2459 - DNA, 386 bp, Glycine max
acccaggcgtcagcccacgcgtcagcggacccgtcagattgctgccagacgacaactgaacggggtccgcgcacatctcacagcataactgtacacaatgcgcaatctctcatttctctcatattacgaatgccctaacgttcatctcggtttcaccgattctcggcatgccgaaagtgtcatacgatgctatcgtcgccgatagccggttgaagcacacaggcgctggtgcttgaatgaatcaatcttggatagctgatatggatcctaacattccaatcagatctccacacgctttcgtcatattcaagtccgagttcagagagcattttaaggaggagcattctaacaacaagtccgtctctgtagtcggtaaagctggtggt

SEQ ID NO: 2460 - DNA, 375 bp, Glycine max
  modified_base (206)..(206): a, c, g, t, unknown, or other
  modified_base (271)..(271): a, c, g, t, unknown, or other
taatttgggaattattgctcccatcgccattggtttcattgtcggcgctaacattttgttgggtggggccttctctggagcggccatgaaccccgctgtgacatttgggcctgctgtcgtgagctggacctggaccaaccactggatctactgggccgggcctctcatcggtggtggaatcgctggccttgtttacgaggttgtcnttatcagccacacccacgaacagccttccaacaactgactactagaggggggaaattgaaattanaaaaaaaaaattgtgtattattgaatttctctggaatcttcttcggtgtatggttttcgttccttgtgttttcttcccaattcactttcgagggttgtacttgt

SEQ ID NO: 2461 - DNA, 361 bp, Glycine max
gatttttctgccgaggaaaagaaagaaagaaaaagaagaacagcgccctagatttgctcttctttgcttcggaagaaagagaggaacaaataacaatggcgttcgcttctttcctcagcagagttctcttcgcttccgtcttcatactctctgcttaccaagaatttaacgaatttggagttgatgggggacctgcagcaaaagcactcagacctaagtttgatgcctttacacatcgagtgcattctcaagttggctttcaacttcctgagactgatcggaaatttttaattgctggggctattgctcataaaggccttggaggggttctttgcagatgtggcagctcttttggagcttc

SEQ ID NO: 2462 - DNA, 359 bp, Glycine max
ggcacttcaattgcaatcaaattagttcattctctttgcgcagttccctacctctcctttcaagatgcagatcttcgtcaagaccctcaccggaaagaccatcacccttgaggtggaaagctctgagaccatcgacaacgtcaaggccaagatccaggacaaggaaggaattcccccggatcagcaacgtctcatcttcgccggaaagcagctcgaggacggccgtaccctcgccgactacaacatccagaatgagtcaacccttcacgttgtccgtcgtctccgtggtgggatgcagatcttcgtcaagactctcactggcaaaaccataaccctagcagtcgaaagctctgacacca

SEQ ID NO: 2463 - DNA, 379 bp, Glycine max
gagagagaaattgaaattgaaactgaaacgaaacagcgtcttcgctttgctgctgcttctgctgagtcgtgcgtggatctacctttgaaccctaaacttattgctgattgctgatctcagttagaaatctgtggatatggcgacggggaagtcatctcgctccagaagcgcagtgtccagtgccaaggacaacggtcctaagctcgaagaaggtctcaatcccttcaagtctgataaattcgatgccgagtcctatgtccagtccaattgctccctcaacgataaggaaattaagcaattgtgcacatatttggtggacttgaagaaagcgtctgctgaggagatgcgtcgaagtgtctatgctaactatgcagctttc

SEQ ID NO: 2464 - DNA, 374 bp, Glycine max
ggccattgttgctgtcatcatccgcagctgctgttattcgcaccgcaaacaaacagtgagccatggtcgtcggaaagaacaagcgcatctccaaagggaaaaagggtggcaagaagaaggcagctgatccctttgccaagaaggattggtatgacattaaggccccttctctttttcaagtgaaaaatgttggcaaaaccctcgtctctcgtacgcagggtaccaagattgcttctgaaggacttaaacatagagtgtttgaggtctccttggctgatcttcaaggggatgaggatcatgcattcaagaagattaggttgagagctgaagatgtgcaagggaagaatgtcctgacaaatttctggggaatggat

SEQ ID NO: 2465 - DNA, 373 bp, Glycine max
ggatccatttctcgcaacaacgcttaacctctctcattccccatttcctcacctccttcaaccgctgctaaattctagggttccgaaatggacgctggcggaaagatcaagaagggcgccggaggtagaaagggcggcggcccaaagaagaagccggtttcaaggtccgtcaaagccggtctccaattccccgtcggaagaatcggccgttatttgaagaaaggaaggtacgctcagcgtgtcggtaccggtgctcccgtatacatggctgcagttctcgaatacctatctgccgaggtgcttgagttggctgggaatgccgcacgtgacaacaagaagaacaggattattccaagacacgtgcatttggcag

SEQ ID NO: 2466 - DNA, 185 bp, Glycine max
aaagagacccggaaaaggtgggaaccgcttttggaaatccattgggcttggatttaagactcccacggaagccatcgaaggaacctacattgacaagaagtgccccttcactggcaatgtttccatccgtggccgtatcttggctggaacatgtcacagtgctaagatgaacaagactattattg

SEQ ID NO: 2467 - DNA, 376 bp, Glycine max
gggatccgaggttcttaagtaacagaacacacaaaaccctagttagtgttagtgttcctcaagccaccgtaccgtgttgcctctctgcaatctacagccaaaatgcctttcaagaggtacgttgagatcgggagggttgcccaaatcaactacggcaaggaatatggcaggctcgtcgtcattgtcgacgtcattgatcagaacagagctcttgtcgatgcccctgatatggtgaggtcccaagtcaatttcaaaaggctttccctaaccgatattaagattgacattaagagggtccctaagaagaaagatcttgtcaaagccatggaggatgctgatgttaagaccaagtgggagaagagttcatggggcagga

SEQ ID NO: 2468 - DNA, 357 bp, Glycine max
gaagtatataacttcttcgaagtgtccggaaatcgttcctatcatcacttctcaaatctcgaaccctctcgttcgtgccgatcactaagtcacacttcatcaatggcgggtagaggcaaaaccctatgattcagcgccgctaaaaaggtcacctcaaggagcaccaaagccggtctccaattccccgtcggtcgtatcgccaggttcctcaaggccggaaagtacgccgagcgcgtctgcgccggagcccccgtctagctcgccgccgttctcgaatatctcgctgctgaggttttggaattggctggaaatgctgcgagagataacaagaagactcgaattgttccacgccacatc

SEQ ID NO: 2469 - DNA, 361 bp, Glycine max
ggcactgcaactttgctctctgtgaggcttcaatttctaattagggtttcgcttagagtaaccaataaccatgggagtcttcacctttgtcgtccgcaaatccggcagcgaatggagcgccaagcaacattccggcgacatcgaggcctccgccgattccaccttcgatctccaacggaagctcgtgcaagccgctctcgccgttgattcctccggtggagttcagtcctctttctctcccgtgtctcctacctccgctgtgttccaggtgatagtgggcggtgcagtattcgttggaggtggtggtggtgctgttgcagctgcacctgcacgtggtgctgccgcagctgatgctggccca

SEQ ID NO: 2470 - DNA, 367 bp, Glycine max
tgtggggcagtgtaggtaccaggagctgagaaggaggcaggttaagattgagactgagacgtgggaagaggcggcaaaggagtatagggagcttttgatggacatgtgtgagcataagctggcacccaatttgccgtacatgaagtcgctctttctcggctggtttgagcctctgagggatgccattgtcaaggaacaggagatgtatggtgaagggaagaataggacggcctatgtgccatactttgttcagttgccggcagacaagatggctgttatcgcaatgcataagttgatggggctgttgatgacaggaacagaacatgccaccgttggcactgccagcgttgtgcaggctgcgtgtggc

SEQ ID NO: 2471 - DNA, 358 bp, Glycine max
gaatgaatttatttttaccagcttcagatacctgaaaagagaagagcgagatggcgtcggtggtaaagaacgtactcaaatccgtcagagaaaagggtttcggcgctttcctcagagagctcaaggatgaaggctacctgagatgccttccggatggaaatctcttgcaaaccaagatccacaatattggggcaacgcttgttggtgttgataaatttggtaacaagtattatgagaagcttggagacacacagtatggaaggcacacgtggattgaatatgcagagaagactagatataatgcctcccaagttccagctgaatggcatggttggctccacttcataaccgattacac

SEQ ID NO: 2472 - DNA, 382 bp, Glycine max
  modified_base (368)..(368): a, c, g, t, unknown, or other
gacaatcgaacgggaaaaggcgtcttcataaacgccgcccaaaacttctcatacccttttattcattccattcgtttctagggttttcttttctttgccgagaaaatgagagagtgcatttcgatccacattggccaggccggtatccaggttggaaacgcctgctgggaactctattgccttgaacacggcattcagcccgatggacagatgccgagtgacaagaccgctggcggaggagacgacgccttcaacacatttttcagcgagaccggcgctggaaagcacgtgccccgcgccgtcttcgtggatcttgaacccaccgtgatcgacgaagtccgaaccggtgcgtaccggcagctcttccnaccggagcagctga

SEQ ID NO: 2473 - DNA, 185 bp, Glycine max
  modified_base (33)..(33): a, c, g, t, unknown, or other
ggaaggatagtgattttagagtagaaaaagcanaaaaaaaaaaaaaaaaaaaaaaaaaaaaccggccgcccaaaaggatcaaacctaacttacccttgaatgcaacttcaaactcctccaagagtgccaccaaaatacaatacagggcccctctttaaacaatctcgacacggaaaaaacccggg

SEQ ID NO: 2474 - DNA, 359 bp, Glycine max
gagcgaaacagagagtgatttcagtgagtgatcggtgttcacttgatctcatcataatcgtcagcgtcaattgaagaagatgccgatcagaaacatcgccgtcggaaggcctgaagaggcgactcaccccgacacgttgaaggcggctttggctgagttcatctcaaccttcatcttcgtgttcgccggctcaggctccggcatcgcctacaacaagctcaccgacaacggcgctgccacccctgccggcctcatctccgcctccatcgcccatgcattcgccctcttcgtcgccgtctccgtcggagccaacatctccggcggccacgtcaaccccgccgtcaccttcggcgccttcg

SEQ ID NO: 2475 - DNA, 349 bp, Glycine max
ggttcattttgttgttcgaagccaaaaccctagcagccggcgagaatggcagacgttgaggttgatgcggcggcagcggcaggggcagcgcagccgaagaagagaacgttcaagaaattcagcttcaggggcgtggatctggacgcgcttctggacatgtccaccgacgaactggtgaagatgttcagtgcgcgtgcacgtagaaggttccagagaggtctgacgaggaagcccatggccttgattaagaagctccgcaaagctaaaagggaagcaccagcaggtgagaagccagaaccagtgcgcacccatctccgcaacatgattattgtgcctgagatgattggta

SEQ ID NO: 2476 - DNA, 331 bp, Glycine max
gatttcttcttaacatagtatatttataataaatcagttacagaaacatagtttatgatgtactatatttcacattttaattaatatttcgactacacgcctaaacagcactactagtagacggtgttagatctagtgtgtacagacaatcaaacaaacctttcgtcgaacaccttctctgcatcgagcgcgccttttacgttgaactcgggagtggagggagcagagaacaccatcaccatgtttggctccgctcaaccttcttcttcacccttcggcaccccttcttctacccctgcttttggcaccccttcttcgatccctgcttttg

SEQ ID NO: 2477 - DNA, 305 bp, Glycine max
  modified_base (269)..(269): a, c, g, t, unknown, or other
  modified_base (280)..(281): a, c, g, t, unknown, or other
tttcctgttttcattttcattgaaaatgttttcagaaatccaaccaaacacattttcatcactattttctgttttcagtgaaaatgaaaacagaaaacaaccaaatcaaacatcccctatttaatctaagtgaaagtggattgggcttgaatttcttagatgagatctcaagtttgaattttgggatgataaactttacttaaggtgattaaacaagttttataacaaagattagttattaataaaatcaatagatacttcataccganaaaaaaaaaannaaaaaaaaaaaaaaaagcggccgc

SEQ ID NO: 2478 - DNA, 358 bp, Glycine max
ggcagcgcttgagaccaagccccactcaaccaccacaccactctctctgctcttcttctacctttcaagtttttaaagtattaagatggcagagacattcctatttacctcagagtcagtgaacgagggacaccctgacaagctctgcgaccaaatctccgatgctgtcctcgacgcttgccttgaacaggacccagacagcaaggttgcctgcgaaacatgcaccaagaccaacttggtcatggtcttcggagagatcaccaccaaggccaacgttgactacgagaagatcgtgcgtgacacctgcaggaacatcggcttcgtctcaaacgatgtgggacttgatgctgacaactgc

SEQ ID NO: 2479 - DNA, 338 bp, Glycine max
actgttcctcctactttccaagcttcctggcacactttgataagttttttgtgcagctccaatggcaacctctcaaatcacttcatcattgaggaacttgcctgcatttgaaaggtttcaaccttcaacgcttcgatttccttctgctgggcacgtcagaattgggacactgacacaaacctcgtttccctctttcgttgtcaaagccgccactgttgtcgcccccaagcacaccactgttaagcctctgggtgatagagtactggtgaaaattaaggatgcagaggagaagactgcaggtgggattttactgccagcaactgctcaaggcaagcctc

SEQ ID NO: 2480 - DNA, 342 bp, Glycine max
ggaaatcgagaagaagaagaagaagaagatggagaagtatcagatctggagcaggagaatagcgttggcagcgtttgcgtttgctctgctgttccaatcggcctcagcagacgacgtcgttgtgctctctgaagataacttcgagaaggaagttggtcaggacagaggagctctcgttgagttctatgctccttggtgtggacactgcaaaaagcttgctccagaatatgaaaagcttggtagcagcttcaagaaagccaaatctgttttaattggcaaggttgactgtgatgagcataagagtttgtgcagcaagtatggagtctctgggtacccaacaat

SEQ ID NO: 2481 - DNA, 369 bp, Glycine max
gatccataaccatggcgtctaactctgcttccgctctttacttccttttatgcctatcgcccatcactttgcttctttctgcgtttcgtgctcaagctcaatctcatgctccagctcccactttcaagtactgtgaaaagaatgcagactatgctgtgaaggtgagtggagtggaaatattgcctgaccccgtggagagaggagtgccattcacctttaagatcccagcttatactcctgaaccaattcaaagcggggacttgttatatgaaatttcttatgctggaatagaagcacaacctgctacatttctccatgatctctgtgaggaagcaccatgcccagtacctgcaggcaactttggtgccg

SEQ ID NO: 2482 - DNA, 286 bp, Glycine max
gacagtttccccatagaatttctcgtctgcaacgcactacccagacaccgcgtctccggttcgaaaccagcatagggaagataacgttgtgctgcgccgccacactgggaccttgcttaaggttgcaggcgtacattcacctacatcagaatatgtaactcgtcttaagtgtcaccactctattggtctatggcagtcacatcatacattcttgactggcaaaacttggtggtaagcctgcatagacggcatgctgcacaactctctttgacaagctagggtaata

SEQ ID NO: 2483 - DNA, 357 bp, Glycine max
ggactctcaaaggaatttatgcaacaagacagcgacacaaagttcccacttccagatctacttctgttctgtcagtcaccacagatagtttaactccactcacctctcaccgcaaccttaacttactatgtacctttcttcttcttttctttgtgtaaagtttaaaacttgaagcaaaaccaattgccccatttgccatttggtggtaataatcgatcgatggagttcactgaatcttacaagcaaacgggtccctgttgtttctctcccgacgctcgcttcattgccgttgctgttgattatcgtctcgtcattcgggagaccgtttctttcaaggttgtgcagttgttttcatgc

SEQ ID NO: 2484 - DNA, 407 bp, Glycine max
agggagcaactcgagaggaatactatatggtaacaacaagaaattctttggcacttaatcgagatattcatgatgaacagactgttccagcccgataccgtcacgaatttcatacgattgcatgggaacaagttcatcttcgacgtctttttcccttccaaaaagttttctacttggagcttctctgattccttttattgaacattgtgatgccaatcgagctttaatgatttctaatatccaacgtccagcagttccgctttcgcagtccgaaaaatgcattgttcgaactggattggaacgccaagtatctttacattcaggagtttccgctcataccggtcacgaaggatacatcattcataccactacttgacggatatttttaggtcgaaatggacagactc

SEQ ID NO: 2485 - DNA, 346 bp, Glycine max
ggcgcctctgcttgcaagagtgaaaaccttctcttacccttctctcaagtttcaagagatttcatcatggctccaaagaaagacaaggctccaccaccttcctccaagcccgccaaatctggcggtggcaagcagaacaagaagaagtggagcaagggaaagctaaaggagaaggtgaacaatatggtgctgtttgctcagggcacctatgacaagctcctttctgaagctcccaaatacaagctcatcactcctgccactctctctgatcgtttgaggattactggatcacttgcaacgaacgccatcggagaattaatggcaacacgttcgatcaggatggtgt

SEQ ID NO: 2486 - DNA, 333 bp, Glycine max
  modified_base (259)..(259): a, c, g, t, unknown, or other
gacatgccaaaattaacacccctgaatttcacactccctctcccaaactcatcatcctataatacaaagggtttggaatatatatcaaatatcaaaatacatcacaacatcaaaatggcctcaattgttactatggccaccattgtcacattagtcctcgcactagcatgttgtggcatgtctgccccgacctcagtgccgaaaaccactgcagcggccccggccccggagagcaatggctgcttgatggcactagcanacatgtcagattgtctgacctatgttgaggatgggagtaagttgtcaaagcccgacaaagggtgctgccctgag

SEQ ID NO: 2487 - DNA, 262 bp, Glycine max
gatccccagtcacatacaaaagttagggttcataactttcccattccctctcgcatgccaatctcaatacaataatcaagtctttcgtacatttttcatcaatctcgtctagatcacaacatcacgctgaccacttctgttagcaaggccttcaatgtcacagaagtcctcgcactagcatctcataccatgtctgacatgatcgcagtgcagcgcaccaatggcgcgatcccggtcccgaacatcactagcagcatgatgg

SEQ ID NO: 2488 - DNA, 378 bp, Glycine max
gattcacacaactaactaagaaagtcttccatagccccccaaaaatgaagagcaccatcttctttgctctctttctcttttgtgccttcaccacctcatacctaccttcagccatcgctgatttcgtgctcgataatgaaggtaaccctcttgaaaatggtggcacatattatatcttgtcagacataacagcatttggtggaataagagcagccccaacgggaaatgaaagatgccctctcactgtggtgcaatctcgcaatgagctcgacaaagggattggaacaatcatctcgtccccatatcgaatccgttttatcgccgaaggccatcctttgagccttaagttcgattcatttgcagttataatgctgtgtg

SEQ ID NO: 2489 - DNA, 392 bp, Glycine max
gatctcaagccacgtcagagaaaatggcggtacctctgctctcgaagaagatcgtgaagaagagggtgaagaagttcaagaggcctcagagtgacaggaaaatttccgtcaagagaaactggcgtagaccagagggtatagattcccgtgttacgagaaagttcaagggatgcactttgatgccaaacatccgttatggttctgacaagaagacccgccactatctccctaatggtttgaagaaatttgttgttcacaatgtgaaggacttggaactgctcatgatgcacaacaggacttactgtgctgagattgctcacaatatatccacaagaaagagaacagatatagttgagagagctgcgcaacttgatgttgttgtgacaaacaaa

SEQ ID NO: 2490 - DNA, 381 bp, Glycine max
ggttctagtgtgtgattgtttgttgttgtaactcgttcttcttcttttgttgttctgtgtttgtgtttgttttttctctcacctgaaaatgtcttgctgcggtggtaactgtggttgcggaagctcctgcaagtgcggcaacggctgcggaggctgcaagatgtacccagacttgagctacactgagtcaaccaccaccgagaccttggtcatgggagtggcacctgttaaggctcaatttgagggtgctgaaatgggtgtgcccgctgagaacgatggctgcaaatgtggaccaaactgctcctgcaacccctgcacttgcaagtgaggtgttgggagagcaagcttcaagcagagataacccttaattaagaataatga

SEQ ID NO: 2491 - DNA, 348 bp, Glycine max
gactcaccacttcaaaacactcataacacaaagcacaaagcaaagctcatccttgagttaaaaaatggcagcagcttcttccatggctctctcatccccatccttggctggcaaggccgtgaagctgggcccatcagccccagaagtgggaagggtgagcatgaggaagaccgtcaccaagcaggtctcctcaggaagcccatggtacggcccagaccgagtcaagtacttgggcccattctctggcgagcccccgtcctacctaaccggtgagttcccaggcgactacggctgggacactgctgggctttccgcagacccagaaaccttcgccaagaaccgtgaact

SEQ ID NO: 2492 - DNA, 208 bp, Glycine max
gagtaatacagacagcaacatgcgcccagcggttattctcaaaactaccatctctcttttggaggcgtcgtcgtcctcaacaccctgtgatggcagactcaacactctcgctagacacgtccttccacaaatggcttctcatgacatgatctgagaatcttcaacctacgcatctgaatccgtcatcaatcatctcgttcgtactccc

SEQ ID NO: 2493 - DNA, 394 bp, Glycine max
ggagagagagagtaatgaaatgagtgaagaagctaaaaagaacttcgtccgcgctctaacggcgacgcccacctccgatgaccagaaacaagcgccggcgctgaatgtccctccgaagaacgtcatcatcaagagcgctgatatgatccccgacatgcagaatgaggccgttgatatcgctgtcgctgcgtttgagaggtacaatgtggagaaagacgtcgcggaatagataaagaaggagttcgataagatgcatggccccacttggcattgcatcgttggtcgtaattttggttcatatgtgactcatgaaacaaaccactttgtttatttctacttggatcagaaagcggttttactctttaaatctggctagccttattgtggtagcaaa

SEQ ID NO: 2494 - DNA, 311 bp, Glycine max
ggagtgtagaagacgaaaagagagtggagagagagagaagtgagagtgtgagagggagcacagtgaagaagagaacgaaggaacgaagatggagactcctcctccgcaacaaggcgtggtgaagaagaacgagactaggggccgaaaacccaggccgagagacgaacacgccaaggcgttgaatgaagggagaataacacagcaacagcaacatgatcagcagcaacaacaacaacagcaacatcaaccttcggtggacgagacatacacgcagtggaagtcccttgttcctgtcctctacgactggcacg

SEQ ID NO: 2495 - DNA, 392 bp, Glycine max
ggagaagggttttacattttattcgttctccggtgaaacagaaacagagagagagagtgagaaaaaacgaaacgatggagggaggagtctcctacgcgcgcatgcctcgtgtcaaaatccgcgagctgaaggacgactacgccaagttcgagctccgcgacaccgacgcgagtatagccaacgcgctgcggcgcgtgatgatcgcggaggtgccgacggtcgccatcgacctcgtggagatcgaggtcaactcgtcggtgctcaacgacgagttcatcgcgcacaggctcggcctcattcccctcacgagcgagcgcgccatgtccatgcgcttctcacgtgactgcaatgcctggaacggtgacggacagtgcgagttttgctccgtcgag

SEQ ID NO: 2496 - DNA, 346 bp, Glycine max
gagtccactcgattttagaatttgacgtgtctggtgccttgacctgtactgcattgtgccccttcgctgacattgcagatatgtttttagtgctgacgcatcgtggtggggagatattcactacccttgaggggtgttctgctactgttcggtctggtttcatcatgaaaggcagaatatgtgaagtgtcgcgaccgtaacgcgtcactgaatgtctaatgcagtgacgtgttgaagctaatgtcactcaaagataagataggccagatgacacagattgaatggagtgtcgccacacctgatgtgatgatcatgtacttcaattggactgtgctcagtaggggat

SEQ ID NO: 2497 - DNA, 355 bp, Glycine max
gtccaggaacatttctgttacaagaagtggcgaaaagtgcacataattgttgaatgcattcttaattgtactttcttcatttaggtattgttgtatactatgtttagtttataaaaaaaaaaaaaaaaaaaaaaaaaaaaaaaaaaaaaaaaaaaaaaaaaaaaaaaaaaaaaacaaaaaaaaaaaaaaaaaaaagtaaaaaaaaaaaaaaaaagaaaaaaaaaaaaggggcggctcaaaaggttcaatgctaaattcccgttgaagggaacgtaaaaacttttcaaacagtcaactaaaattcatttcaagggcgttcttttaaaaaattgtaaacgggaaaaccctggggttt

SEQ ID NO: 2498 - DNA, 381 bp, Glycine max
gacccctcctctcgtcgaaactctccgaccccatctccgaattcgcctccggcatcgtaccatgtaacgcctcgccggtacagttcagtttctttcctcccctaaccctaatcttcgcgttttctaattttcgcgcagttctctctgtaacacatccgcgattcgcttcttcttccgtacatggctcaaccagacactctcactatcactcccaccagttctaaggatgaaagggaatccttgaagaatgacactccaattgacaacaatgcttgtaataattctacagatgaaagggaatccttgaagaatgacactccaattgacaacaatgcttgtaataattctacagatgaaagggaatccttggagaatgacact

SEQ ID NO: 2499 - DNA, 388 bp, Glycine max
gacctaaaaattgtaccgatatggcttcacttgtgtgtctccttttttccttgcatttcatggttatcatgtcaggttccttaccagcaaatagtgaagtgtttacaaaagagtctcctatgtctctatccacaaaacccgtggaaagactcacccaactccacttttatttccataacaacaaaatgggggaacacccgactgctatgaaaattgttgagcctcctaaggcgtccatttctggttttgggactatttacatgatggatgaccctctaaccgaaggaccaagtccaacttcaaagcttgttggaagatgtcagggaatatatgctgaggcttcgcaacatgaacctgcgatactcatggtaacgaatttgttcttcac

SEQ ID NO: 2500 - DNA, 317 bp, Glycine max
gacagcacaatagaacgcgcacgctctcatttgcgcgccgtcttttgttctcgcatcgcatagacactatcgttcgtctcgtattcgccgattctcgccaggctgaaagcgagatccgacggtaaagacgcagatagcacgttgaaacagaaaggcgctggagctgggatgaaacaatcgaggaaagctgcgaaagaccctaagcaaccgaaaatgattacaagcgcattgttctgatttatgtctgagttaagagagcaattcaggaaggagcatcataacaacggatccgtcgatgttgtcggcaaagctggtgg

SEQ ID NO: 2501 - DNA, 395 bp, Glycine max
gaggcgaaagagaagatggccaccgttccagggcagctcgtgtgggagatcgtgaagaaaaacaactcctttttggtcaagcagttcggaagggggacccagagcgtcgaattcagcagagagagcaacaatctctacaacctcaattcgttcaagtactctggtttggcaaacaagaaaactgttacggtacagcctgagggtaaagatcaggctgtgttgttggctacaacaaagacaaagaagcaaaacaagcctgctgcattgcttcacaaatctgtgatgaagaaggagttcaggaggatggcaaaggctgttgaaaatcaggtggcagaaaattactacaggcccgatctcaagaaagccgcccttgccaggttgagtgctgttcacag

SEQ ID NO: 2502 - DNA, 386 bp, Glycine max
tgggagtttgcgtttggcgtaagtggaagaagaagagaaaagagagagaagggtaaggtaaccctagagtggtgaatcgaatctgcaaagatggaagctgcttctcgaagaagaggtggaggcattttcgaaagcctctacacggtcgttatgcgtcgcaactctgtctacgttaccttcgtcatcgctggcgccttcctcggagaacgggctgtagattatggagtccacaagctctgggaggctaataatgttgggaaacgatatgaagacattcctgtgctaaggcaaaggcagtcagaatagtgaccagcttgttagccattttgaagttttattattttcatgaaaatttgaagtgattaagagctggaagcagtttccat

SEQ ID NO: 2503 - DNA, 370 bp, Glycine max
gctagtggcagtgaccaaactccatttctcactcgccgtcgtctcttccgtctagggtttctcctcttcacaaaaatggttgccgcaaaaaaaaactaagaagacccatgagagcatcaacaacaggctcgctctcgtcatgaagagtggcaaattcaccctcggttacaagaccgttctcaaatctcttaggagctccaaagggaaattgattatcattgctaacaactgcccccctttgaggaagtcagagattgaatactatgctatgttggcaaaggttggggttcatcattacaatgggaacaatgtggatttgggcactgcatgtggcaaatattacagagtgtgctgccttaacattattgat

SEQ ID NO: 2504 - DNA, 364 bp, Glycine max
gacttcaattggaatcagattatttcaatctcctagcgcagttccctagttctcccttcaatatgcagatcctcgtcaagaccctcatcggtaagaccatcacccttgaggtggaaagctctgacaccatcgacaacgtcaaggccaatcatccaggacaaggaaggaattcccccggatcagcaacgtcccatcttcgccgagagagcacctcgaggacggtcgtacccatctccgactacaagatccacaatgagtcaatccttcaccgtgtcctacgtcaccttggtggcaggcagatcttcgtcaagactctcactggcagtaccattaccctatacgtctagagctctgacaccattga

SEQ ID NO: 2505 - DNA, 397 bp, Glycine max
gtcccgtcgtcgcaggcgcagagtagagcagcacagaagagggaaaacggcaccgccgccgtagaagaaaacaaccatggtgcacgtctccttttacaggaactatgggaagacattcaagaagccgcgtcgtccgtacgagaaggagcgtctcgacgcggagttgaagctggttggtgagtacgggcttcggtgcaagagagagctgtggagggtgcagtacgcgctcagccgcatccgcaacaacgcgcggaacctcctcaccctcgacgagaagaacccgcgccggatcttcgagggagaggcgctgctccgaaggatgttccgttacggtctcctcgatgagacacagaacaagcttgattacgtcctcgccctcaccgtcgagaactttctc

SEQ ID NO: 2506 - DNA, 206 bp, Glycine max
tccacctaataacagcttatggtggatacctcagcacccagagacgacgaaaggcctactatgcgacaaaatgcctctgggacttgtacctattcgtagatctagggaatcccgattctacgtcaacccttcgtcactgctgctaagtccactcgccacgcaagatacaacctggtgaactgatacatcttatctagccacaggaa

SEQ ID NO: 2507 - DNA, 355 bp, Glycine max
gcatagaattctttcaccaaagctaggtctatgctcccatcgaccaaattggtgaggcgtttatggaaattatgcctctccaattcagccttaaattcatctagctcaaaatgatatatctctactttcctctctagtaaaatatttctcccctgaacattatctgtgtatctagtccaagaatctaaggaagagaatctccttgtgttatactgcactgtgggtcttgaaccaatacttttacgtttcctagaaaccatttgcaaataaagaaaccaaatagttgatcagggcccaatttattaaaaatcaaaactgaaaaagacactggccgcctagctggcctttacaataa

SEQ ID NO: 2508 - DNA, 361 bp, Glycine max
gactcacaatcgaacgggaaaaggcgtcttcataaacgccgcccaaaacttctcatacccttttattcattccattcgtttctagggttttcttttctttgccgagaaaatgagagagtgcatttcgatccacattggccaggccggtatccaggttggaaacgcctgctgggaactctattgccttgaacacggcattcagcccgatggacagatgccgagtgacaagaccgttggcggaggagacgacgccttcaacacatttttcagcgagaccggcgccggaaagcacgtgccccgcgccgtcttcgtggatcttgaacccaccgtgatcgacgaagtccgaaacggtgcgtaccgg

SEQ ID NO: 2509 - DNA, 397 bp, Glycine max
ggtcgtcgcaggcgcagagtagagcagcacagaagagggaaaacggcaccgccgccgtagaagaaaacaaccatggtgcacgtctccttttacaggaactatgggaagacattcaagaagccgcgtcgtccgtacgagaaggagcgtctcgacgcggagttgaagctggttggtgagtacgggcttcggtgcaagagagagctgtggagggtgcagtacgcgctcagccgcatccgcaacaacgcgcggaacctcctcaccctcgacgagaagaacccgcgccggatcttcgagggagaggcgctgctccgaaggatgttccgttacggtctcctcgatgagacacagaacaagcttgattacgtcctcgccctcaccgtcgagaactttctcgagc

SEQ ID NO: 2510 - DNA, 357 bp, Glycine max
gacaccatccagtactcttcttttcagcacaacctcgtcatctcgcacaggctttcttttctttgcaacaacacgtagcaaatacatgtcaccagatttcacactgtatgttctccccggaactcatgcagtcgtctaacatcaatttccaagccactttctgtgtccttctcggcaacctcatgttcacgcccttcatcaatcctggtgggcttccttgggcctgggcccggatcagaaccatcatccctggcctagtaactgccctgatcggggtcttcacgggttccacaccgcacaacgctttatccaaactggcccgcatttatgacgcggaaaagctcatggctttctcca

SEQ ID NO: 2511 - DNA, 345 bp, Glycine max
gaagtgatccactccacgtgggccatgctcggagccttgggctgcgtcttcccggagttgctgtcccgcaacggggtgaagttcggagaagccgtgtggttcaaggccgggtcccagatcttcagcgagggtgggctcgactacttgggcaacccaagcctgatccacgcccagagcatcctcgccatctgggccacacaagttatcctaatgggtgccgttgaaggttaccgtattgctggtggccccctcggtgaggtcactgacccaatctactcaggtggcaacatcgacccattgggccctgctgatgacccagaggcttttgctgagcttaaggtgaag

SEQ ID NO: 2512 - DNA, 381 bp, Glycine max
gcagcaactcattctgtttcttcagtttggtataactttagccgaggtcaggaggagcactagctaagttcacaatttcaaaatggctaggggactaaagaagcatttgaaaaggctcaatgctcctaagcattggatgcttgacaaactgggtggtgcatttgcgcctaaaccctcatctggaccacacaaatcgagggagtgcctccccctcattcttattctgcgaaaccggctgaagtatgctctgacataccgtgaagtcattgctattctgatgcagcgccatgttcttgttgatggcaaagtcaggactgacaagacttaccctgctggtttcatggatgttgtttcaatcccaaaaacaaatgagaacttccg

SEQ ID NO: 2513 - DNA, 231 bp, Glycine max
agggacaccatccagtactcttcttttcagcacaaaatcttcatctctcccagactttcttttctttgcaacaacactaccacaaatgtcaccagatttcacacatttgttctccccgggaaacatgcagtcccctatcatcacattccaagccactttctgtgtccttctcttcaccctcacgttcacgccgttcttcactcctggtgggcttccttgggcctgggcccg

SEQ ID NO: 2514 - DNA, 79 bp, Glycine max
cgggactcaccacttcagaacactcactacacacagcacaaagcaaagctcatccttgagttaaaaacatggcagcagc

SEQ ID NO: 2515 - DNA, 141 bp, Glycine max
gaatgcgcaatccaagcctaagctccgtatacaataacatgggacaacaccacacgatcccgatactatcgcgttcgtcttcgggatcggagtcatcatcaaaagggacagtccgggggagtcgtaattcatagtcagaag

SEQ ID NO: 2516 - DNA, 341 bp, Glycine max
gatcactctcacgcttctgattattcctcttcccattctagggttcccaaatggacgctggcggaaagatcaagaagggcgcccgaggaagaaagggcggcggccctaagaagaagccggtttcaaggtccgtcaaggccggtctccaattccccgtcggaagaattggccgttatttgaagaaatgaaggtacgcccagcgtgtcggtaccggtgctcgcgtttacttggccgcagttctcgagtacctagctgctgaggtgcttgagttggctgggaatgctgcacgtgacaacaagaagaacaggattattccgagacatgtgctgttggctgtaagg

SEQ ID NO: 2517 - DNA, 386 bp, Glycine max
gatgccgaaaagtagtaccaagatggcttcagttgtgtatctcctctttggcttccatctcattgttatcatgtcaagttccttacccgcaactagtgaagtgtttgcaaaacagtatccatccacagaacccgtggaagaaaaactcacccaactccacttctatttccataacaacataacgggggaacacccaactgctatgaaaactgttttgcctcctaaggggtccattcatggttttggggctacttacatgatggatgaccctctaactgaaggaccaagtccaacttcaaagcttgtgggaagatctcagggaatatacgctttggcttcacaacatgagcctgggttgctcatggtgacaaattttctcttcactt

SEQ ID NO: 2518 - DNA, 349 bp, Glycine max
gactgcgaaccagtagggactcccattccgactcttagccgccgatctctcagggcttgcatcttctcagctgtgaagatgtacacatcaaggaagaaaatccacaaggataaggatgctgaaccaactgaatttgaagagtcggttggacaggcattgtttgatctggaaaataccaatcaggagcttaaaagtgatctgaaggatttatacataaactcagccgtgcaagttgatgtttctggaaaccgcaaggctgttgttattcatgtcccttacagattaaggaaaggtttccgtaagattcatgttaggcttgtcagggagcttgagaagaagtttagtggca

SEQ ID NO: 2519 - DNA, 195 bp, Glycine max
gagcgaaacagagagtgatttcagtgagtgatcagtgttcacttgattacaacaaagtcgtcagagtcaattgaagaagatgccgatcagaaacatcgccgtccgcaggccggtagaggcgacgcaccccgagacgttgaaggcggatttcggcgagttcatcacaaccttcatcttcatgtgcgccggctcaag

SEQ ID NO: 2520 - DNA, 386 bp, Glycine max
acatccacacatttatagaacagaaggaacacgtatccacaaagtacttcatgaataattcttcattcagagttgtggccactggtggcaagaagatcaagactgacaagccttatggaattaatggtggcatggctttgagggaaggagttgatgcatctggcaggaaaggaaagggaaagggcgtttaccagtttgtagacaaatacggtgctaatgtcgatggttacagtcctatctacgacaccaaggactggtctccaaccggtgatgtctacgctggcggtaccactggcttggctaactgggctgtgactctacttggtcttcatgctggtggtgcacttcctgtctacaacacaagtgctttggcgcaataaaccttg

SEQ ID NO: 2521 - DNA, 311 bp, Glycine max
aaggtatgtagaagatattttccagatcgtcaatttactttcgttttttaaaaaaattttggttggggttgctcataaatgtatgatatggtttgtaatttgaatagtcactgtcgttatttctgcaagcgtacttttaatgtatcaaaagttttcctttctagcatctatgccatcagttgtggctgggctttgtatatcctaggcaagtttgcatttgtgttttggacaaaatcaattgatacgtttaagtgtgtataaattataatacatgtcatacaaaataaatgacatcagcgagaaggaaaaag

SEQ ID NO: 2522 - DNA, 287 bp, Glycine max
gaaagtggacagaagagagcgtcctagtcgcaaccctaataagaagaaccacagcttcaagcgagtgacatccaccagccatgggtcgtatgcacagccgcggtaagggtatatcctcttctgctttgccctacaaaaggacaccccctagctggctcaagatctcttcgcaagatgtggaagaaaatatctgcaagtttgcgaagaagggtttgaccccgtctcagattggtgtcattcttcgagattctcacggtattgctcaggtcaacagcgtcactggcagc

SEQ ID NO: 2523 - DNA, 336 bp, Glycine max
gatacctaaaaattgtaccgatatggcttcacttgtgtgtctccttttttccttgcatttcatggttatcatgtcaggttccttaccagcaaatagtgaagtgtttacaaaagagtctcctatgtctctatccacaaaacccgtggaaagactcacccaactccacttttatttccataacaacagaatgggggaacacccgactgctatgaaaattgttgagcctcctaaggcgtccatttctggttttgggactatttacatgatggatgaccctctaaccgaaggaccaagtccaacttcaaagcttgttggaagatgtcacggaatatatgc

SEQ ID NO: 2524 - DNA, 297 bp, Glycine max
aaatggagtctcactgtcatacaatgttggacggaaatttgaatttctattcaaatttcaccgtcactctgaaggttacattctaaagtcaactttagagccacgatttcactcattaagattatcaaatttcagcaattcgttcagcccacgaattccaacatcaagttcaggaatcaccatgaagtgtaccttggtgtcaccatgcatgtaaaccatgaatggtatacacacagtgtgactataagatgtggacatgtaatgtatcacacaaatgctcagctcggacttacgttg

SEQ ID NO: 2525 - DNA, 321 bp, Glycine max
ggggtctgagagaaaccctagctagccacaatgcagatattcgtgaaaaccctaacggggaagacgataaccctagaggtagagtcatcggacacaatcgacaatgtgaaggcgaagatccaggacaaggagggcatcccgccggaccagcagcgcctgatcttcgccggtaagcagctggaggacggccgcaccctcgccgactacaacatccagaaggagtccacgcttcacctcgtcctccgcctccgcggcggcgccaagaagcgcaagaagaagacctacaccaagcccaagaagatcaagcacaagcacaagaaa

SEQ ID NO: 2526 - DNA, 389 bp, Glycine max
attgtagaactgaacaagggtttctctttctctttctctgtctgcttcttcactttctctcgtttcaatcgaaaaaaatcatgggcagaaaattcttcgtcggtggcaactggaaatgcaatgggaccactgaggaggtgaagaagattgttactactttaaatgaagctaaagtccctggagaagatgttgtagaagttgttgtgagccctccttttgtgttccttccttttgtaaaaagtttgctgcgccctgatttccatgtctcggcccaaaattgttgggttcgcaaaggtggtgcttatactggagaggttagtgctgaaagtgcttgttaatttgggaattccttgggttaatagtggtcactctgaacggagggagctttt

SEQ ID NO: 2527 - DNA, 356 bp, Glycine max
ggttctagtgtgtgattgtttgttgttgtaactcgttcttcttcttttgttgttctgtgtttgtgtttgttttttctctcacctgaaaatgtcttgctgcggtggtaactgtggttgcggaagctcctgcaagtgcggcaacggctgcggaggctgcaagatgtacccagacttgagctacactgagtcaaccaccaccgagaccttggtcatgggagtggcacctgttaaggctcaatttgaaggtgctgaaatgggtgtgcccgctgagaacgatggctgcaaatgtggaccaaactgctcctgcaacccctgcacttgcaagtgaggtgttgggagagcaagcttcaagcaga

SEQ ID NO: 2528 - DNA, 259 bp, Glycine max
gctacttctcaagaaaattagggtttgcagtcactgctttgtttagatcagaaccagatcgtgttctcttcttccattggcaaacatggcaactcaaatgagcaagaagagaaagtttgtggcggatggagtgttcttcgccgaactgaacgaggttctgacacgtgagttggcggaggacggttactccggcgtggaggttagggttacgccgatgcgcaccgagattatcatcagagccaccagaacccaagccgtt

SEQ ID NO: 2529 - DNA, 153 bp, Glycine max
gtgctttcctagtcttttctaatccagtgctgtgtagtgataaggaggacattgtattcaagggaatcaccagctacaggcaaccacggaccctggaacccctgacccaattttcaaaggcaccatttttggctaataaatttccaaagaaat

SEQ ID NO: 2530 - DNA, 285 bp, Glycine max
gagcaacatggtgaagctggtggagagatttacttgccagaagcttacgttagaaccaagaggactacttaatggagcaaatcagttggaagaacttgtaactagcttcccaactggccttaccgagtgtggagaagcaataacaagccttaagaataagagaacgaatactggttgtgaagaatgtccaagggttaagaaatccgtccttaatcaacctgtgtggtttggtaatcagttctcaacaataaactgctctgggaatccaatttcacgttcaatgcc

SEQ ID NO: 2531 - DNA, 266 bp, Glycine max
taggtgtgcaatttgtccatgtcaggggtcaatcgtaggttccatctgccatacctacccatgcactataccaaaccttaccaatccatttctaaatctcctccttttttcccccgggaggcttatccaatcaatcggtccattttccttattagctttcatcaatcaccggcttcatcttaaaggccaaccgttacctccccactctaaacctctcaacactttcccataaacaaccccatgattcctttccacaattctcccta

SEQ ID NO: 2532 - DNA, 260 bp, Glycine max
ggctgcaagggatcaactgaggagagtgagagaaaagagaagagaagatgacaacacgcttcaagaagaacaggaagaagaggggccacgtcagcgctggccacggtcgaatcggaaagcacaggaagcaccctggaggacgcggtaacgccggaggcatgcaccaccacaggatcctcttcgacaaataccaccctggttcttcggcaaggtaggaatgcgctattttcacaagcttcgcaacatattctactctccga

SEQ ID NO: 2533 - DNA, 393 bp, Glycine max
ggacgggaagaaacgcatcgagcgtggagaaagagaaggatgatgaggttaaggtggagtgtactcgtaatggtcacgttcgctgtttcactgttttggcttggacccctgcaagtcaaagcctctaattctgtttccgccttcgttcaaaacgccatctactccaacagaatcgccgttttctccaaatcctattgcccctactgtttgcgcgccaaacgcttgcttgctgaactcaatgaaaaaccttttgtggtggagctcgatttgcgagatgatgggtttcaaattcagagtgttcttctggatttgatacgtagaaggacagtcccgcaagtgtttgtgaatggcaagcatattggtggatccgatgatctcagtgctgccgtccaa

SEQ ID NO: 2534 - DNA, 208 bp, Glycine max
gagggtttttgtcgtcgcgactaatagttgctgcgtcatcagccactccgcatctcgcagcgtctgtgccctcaacaaacatggctgaaatcgaaactaccgttccagattccagccaaatcgacgtcaaactcttcagtcgctggagcttccaggatgttgaggttaatgatatgtcgctggctgattacattggagtgtccccatc

SEQ ID NO: 2535 - DNA, 395 bp, Glycine max
gactcaccacttcaaaacactcataacacaaagcacaaagcaaagctcatccttgagttaaaaaatggcagcagcttcttccatggctctctcatccccatccttggctggcaaggccgtgaagctgggcccatcagccccagaagtgggaagggtgagcatgaggaagaccgtcaccaagcaggtctcctcaggaagcccatggtacggcccagaccgagtcaagtacttgggcccattctctggcgagcccccgtcctacctaaccggtgagttcccaggcgactacggctgggacactgctgggctttccgcagacccagaaaccttcgccaagaaccgtgaactcgaagtgatccactccaggtggggcatgctcggagccttgggctgcg

SEQ ID NO: 2536 - DNA, 175 bp, Glycine max
cacccatgtagctataggccaaattgtaccataggaacttatagctaacagtggaaataagtgcatttgtagatattcatttgtaaggtaggaacacgactttcaaaccagttcattgaacctccaaaatgagagcaagttgtaagattttgtcttttgttcgaaatttatgaag

SEQ ID NO: 2537 - DNA, 371 bp, Glycine max
gacgccaaagccctctcttatttccagacgcggggggttcttcatccgtttttgtcaatcggggttgaaaatggcgacttacgctgcgatgaagcccacaaagcccggcttggtggagccccatgaacagattcacaagatgaagatcaccctttcctccaagcacgtcaaaaacctcaagaatgtttgtgtcgacatgggtcgcggtgcacaggaaaggcgcctcagggttaatggacctgtcatgatgcccactaaaggtcttctcagcactaccatgaagtcgccctgtggtcaaggtagcaatacatgggacacgcttgaagatcgtgtgcactagagagtgcttgacctccacacttttccagatg

SEQ ID NO: 2538 - DNA, 415 bp, Glycine max
acataagtcattttctcgcctaataaaaaaataaaataaatttccaccgatcatttgaattgtaatattcattaatttcttttaaaatgaaatccgaccgttcggtcatgccgtaaccacgttggaaaccaaaaagaggtaaaataataatataataatcaaaaaaatatcttttagtaaaataaagcaaaaaaatcaatcggacgtttctctttgggatttctctttcttaattgaattgactaataactaaagtgaaactaaggataaaatcaactagcaaagtcaagctcgtctgcaaaaaaaatcactaaaaaggattttaaggttcgatacctcagtttttctcactaagtaaaaatggataattttaaggtccaatgccttaaaaagaccaccttccaagtaaaaagaa

SEQ ID NO: 2539 - DNA, 325 bp, Glycine max
gatcagtcacactagtctctgtgaaaggcgacacgacacaacacaacacaagctttaatctttttcttcgcttcttctgtacagcacccaagattgaagatgatagaccttgcgcgcgtgcagaaggagcttgtggaatgcagcaaggacgcggagggatcgggcatcaaagtcagccccaaaaacgacaaccttgttctcttgatcggcaccattcctggccccgtcggaactccatatgaagggggcattttccagattgatagcacattgcctgatgggtacccgtttgaaccccccaagatgcagtttaaaaccaaagttt

SEQ ID NO: 2540 - DNA, 324 bp, Glycine max
agatggactgataaaacttaaaagagaggtggggattgccaaacttttgatagtgattggattagtcatcttatttttctctagtggcattttaaagtttcttcaattgattggtggtgttgtgtttggagtcttgtcaatcggatcgatcaccacccgcattgtacttttctatgcaaatgtttgcgccactatttaaaagttgtagagaaggtagcgaaaagaaagggaaaaaaattcgtttgactacatagattagaatcacaaagtcagtgtggttctgtaatttcagttaatgttggatctttatcattatccacttga

SEQ ID NO: 2541 - DNA, 383 bp, Glycine max
catgagagtgagaataaatcggggtcttctttgtcctcgtgtgaaaaaaaaaaaaaaaaaaaaaaaaaaaaaaaaaaaaaaaaaaaaaaaaacaaaaaaaaaaaaaaaaaaaaaaaaaaaaaaaaaaaaaaaaaaaaaaaaaaaaaaaaaaaaaaaacccaaaaaaaaaaaaaaaaaaaaaaaaaaaaaaggggccccccaaaaggttccaagtttatttccccggaaaaggaaccccaaagcccctcaaagagggcccccaaattaaattccggggccctttttttaaaaaactgcacggggaaaaaccctgggtttaccccaataaaaccccttgaaaaaaaacccccttttccaaaggggtataataccaaaaagccccc

SEQ ID NO: 2542 - DNA, 313 bp, Glycine max
ggagcgaagaagatattagggtttttgagtgcggtgcggcgatcctagcactctcttctgcagctttcgccgacagcttcattcaccatggctgagcaaaccgagaaggcttttttgaaacaaccagaagtgtttctcagctcgaagaaaactgggaagggaaagagacccggaaagggtgggaaccgcttttggaaatccattgggcttgggtttaaggactcccagggaagcgatcgaaggaacccacattgacaacaagtgccccttcactggcgatgtttccagccgtgggcggtagcgtggcgggaac

SEQ ID NO: 2543 - DNA, 345 bp, Glycine max
gacagaaactgaaaagaaaaacttactcgagaaaatgtctggaaaggcgaagaggagagacgacgacgatgcttccgacgccgactccgaaggccacgcgccgcccatgaagtccctcaagaaggattccgacgacgatcccgactctgttaccatttgcgaaatttcgaagaacaggagggttgccgtgaggaactggaaaggcagcattatggttgacattcgcgagttttacgtcaaagatggcaagcaattgcctggcaggaaaggtatctcgttgaccatggatcagtggaatgtgcttcgtaatcatgttgaagaaattgacaaggcagttaatgagaa

SEQ ID NO: 2544 - DNA, 361 bp, Glycine max
gtctgcatattcctttttaaagagagaattaaaatttgttaggggaaatttttaaacttaattcaccccccccccccctcttaagttattgaggccacttgtttaacaatccacgtgaggagcatcctcagcaacaacagcgacttcccgttgcctacgtgcggatgttgtgggcctttgccgctgaggagcatcatctgaatcacgattatcttctctctctctagggctcttcctataactctacctaaggtacgacctaaacctctaattctaaccataatctgcaaatttgcacatacataaaaatttatgtcaaaattcaaaacaatacttaaatcaattacaataatatcattcc

SEQ ID NO: 2545 - DNA, 406 bp, Glycine max
agaacaactgtccgtatgttggaaagtttgatacgcctagctcaagcccatgcaaggttgatgttcagaaatgaggtgactcgactagatgccatcacggctattttatgcatagaatcctccatgactacctcagctattgtggattgcattgggaatgctctgcattccaattttactgacaaccctgatcaggaatatgcgaggcaagaaagattgatcctagaaaaattgggatcaatagacgacatttgatgaatagcatggaggagtgaacgcagagaaaggaaaacaagatggaagagtcatgttgtatcatgaactggtttgttttgcttggctttgctattttttagtacaatgaaattgattgctttagcaatgaagggggccatagtttttgttt

SEQ ID NO: 2546 - DNA, 406 bp, Glycine max
gagatcccaaaggtactcttatagtacttcttctctttctctcactgtttttgttgcttattctgccttatcctgtctccctctcttcactacccttttttttttttcactttccttcttatcatctttttttcttttttggtttatattttgggggggtatttttcttttcatttgtacttttttatttattgatcttgggttttggtttattttattgtgtgtggaatacaagtggtgaagttagaaattttgttgtttcccatctgcatgtggagtttgaggtcagctttgtgtttgttaaggttacatgaagccatttctctttttaaatcttcccaacaccgagttcaattcttcacaagttgattgtcaccactcaatggctcattcttcttatccctag

SEQ ID NO: 2547 - DNA, 215 bp, Glycine max
tcaactactctcagcatcaatcacaaaaccctgattagctgattccctaatgagttggaattaaatggtcatacttcagatttagtttatgtacgagcatgtgtgatgtctcaaatgaaatacagatttgatagttttttaaaagaggtgtattccgaaaattagatagcatcttatctagacgaatgtcctaaccgacaacgtccaattgatta

SEQ ID NO: 2548 - DNA, 406 bp, Glycine max
gagggtttttgtcgtcgctactaagagttgctgcttcttcagccactccgcacctcgcagcctctgtgccctcaacaaccatggctgaaatcgaagctaccgttccagatcccacccaaatcgacgtcaaactcttcaatcgctggagcttcgaggatgttgaggttaatgatatgtctctggctgattacattggagtgtccccatcaaagcatgctacatatgttcctcacactgctggtaggtactcagtgaagaggttcaggaaagcgcagtgccccattgttgagaggctcaccaactctctgatgatgcacgggaggaacaatggaaagaagctcatgggtgtcaggattatcaagcatgccatggagatcatccacttgctcactgacctgaacccaat

SEQ ID NO: 2549 - DNA, 402 bp, Glycine max
aaagcagtcatcaaagaaactctgagattacatcccgcaactcccgtattgattccaagggaatcaatgcaagacaccaaagtgatgggttatgacattgcagctggcacacaagtactagttaacgcgtgggcgatttcggtggatccttcatattgggatcagcctctggagtttcaaccagagagacacttgaacagttcaattgatatcaaaggacatgattttcaatttatcccttttggagctggaaggagggggtgtcctggaatagcatttgccatgcttctgaatgagttggtccttgcaaacattgtgcaccaatttgattgggcagttcctggtggacttttgggggaaaaggcattggatttgtctgaaactactggattgtctgttcac

SEQ ID NO: 2550 - DNA, 413 bp, Glycine max
ggtgtagtataggattctcttctttattccttttgtaatttcattcattcttaatctttgtgaaaaataatgttcatcgagaattttaaggttgagtgtcctaatgtgaagtacaccgagactgagattcagtccgtgtacaactacgaaaccaccgaacttgttcacgagaacaggaatggcacctatcagtggattgtcaaacccaaatctgtcaaatacgaatttaaaaccaacatccatgttcctaaattaggggtaatgcttgtgggttggggtggaaacaacggctcaaccctcaccggtggtgttattgctaaccgagagggcatttcatgggctacaaaggacaagattcaacaagccaattacgttggcccctcaaccaagcctcagctatccgagttgggtcc

SEQ ID NO: 2551 - DNA, 409 bp, Glycine max
gacccttaacctctctgctgcgtttgcttctcctccacccatccacaaacgaacacacactttgattgagaatggggcgtgtccgcacaaagacagtgaagaagtcctcgcggcaagtgatcgagaggtactactctcgcatgacgctggacttccacacgaacaagaaggttctggaagaggtggccatcattccctccaagaggctccgcaacaagatcgcgggattccccacccacctcatgaagcggatccagaagggtcccgtacgtggaatctccctcaagctgcaggaggaggagcgcgagcgccgcatggacttcgtccccgatgtctccgccatcagaaccgaccagatcgaggtcgacaaggagacgctcgacatgctcgccgccctcggaatgtccga

SEQ ID NO: 2552 - DNA, 348 bp, Glycine max
gactcaccacttcaaaacactcataacataaagcacaaagcaaagctcatccttgagttaaaaaatggcagcagcttcttccatggctctctcatccccatccttggctggcaaggccgtgaagctgggcccatcagccccagaagtgggaagggtgagcatgaggaagaccgtcaccaagcaggtctcctcagggagcccatggtacggcccagaccgagtcaagtacttgggcccattctctggcgagcccccgtcctacctaaccggtgagttcccaggcgactacggctgggacactgctgggctttccgcagacccacaaaccttccccaagaaccgtgaact

SEQ ID NO: 2553 - DNA, 260 bp, Glycine max
acgcgtccaaccgaggccaaaagacaaccgaagggggccattattgctgtcaacatccgcagctgctgttattcgcagcgcaaacaaccagtgagccatgggcgtccgaaagaacaagcgcagctccaaagggaaaaagggtggccagaagaaggcagctgatcgctttgccaagaaggattggtatgacactaaggccccctccctctttcaagtgaacgatgtgcgcagaacccgcgtcgctcgtacgcacggtagca

SEQ ID NO: 2554 - DNA, 185 bp, Glycine max
cgggattcaatcactcacacatgcccctatcttccttagctacctagattattcacttcaattcctcacaagcaacatcgtttcttgctccaatggcagctttgtatctcccaataagcatgttggcactcattgttgttgtttctcttggtttgtggagtggtgttcaaggtgcaccacacgtg

SEQ ID NO: 2555 - DNA, 414 bp, Glycine max
ggtcaacaacagtgttcccataggagataataaaaatcctctcatcattctgcctcagcctcattgcatcccacaaactataggatcctcacattgctagcaccatgatcaagaccttgaatccttacccaaatccagcaaaaactgctgagatcatgtcgaggtaccggccaatagcaccaaagcctgaaacctctccaaactccatgagtgagggcccttcttcctcttctctctcccagaagatcaagcaatctccttaccttaggaatttatggccacagcttcaagccagacccaccaggaccagaaagagaggtaaagctcctttgacactaccctcttcctccctcaagagacacaagacaacacatcatcatgtcctaagattttgtcccccttgtcatcatgttg

SEQ ID NO: 2556 - DNA, 393 bp, Glycine max
gagggtttttgtcgtcgctactaagagttgctgcttcttcagccactccgcacctcgcagcctctgtgccctcaacaaccatggctgaaatcgaaactaccgttccagatcccacccaaatcgacgtcaaactcttcaatcgctggagcttcgaggatgttgaggttaatgatatgtctctggctgattacattggagtgtccccatcaaagcatgctacatatgttcctcacactgctggtaggtactcagtgaagaggttcaggaaagcgcagtgccccattgttgagaggctcaccaactctctgatgatgcacgggaggaacaatggaaagaagctcatggctgtcaggattatcaagcatgccatggagatcatccacttgctcactg

SEQ ID NO: 2557 - DNA, 404 bp, Glycine max
gacggcactcgttttcgttctcgttctggtttatagatctttgcgaaggaggtttacagcgctcaaccaaagatgcagaacgaggaaggacagatcactgagctttacattcctaggaagtgctccgccacaaacagattgattaccgctaaggaccatgcttcggttcagatcaacattgggcatgtggatgagaacggcgtctacaatggccatttctccacttttgccctctgcggattcatccgtgctcagggtgatgctgacagtgctctagaccgcttgtggcagaagaagaaagttgaagttaagcaacagtagacacccatgatagtttgttacttcgttatgtattaatttctactcttgctagagatatttgagtactacgattgtcgttttga

SEQ ID NO: 2558 - DNA, 409 bp, Glycine max
gagagaagttattagggtttttgagtgcggcggtccaaacactcttctctgcagcttttgcctacaactcccttcaccatggctgaacaaaccgagaaagcttttctgaagcaaccaaaagtgtttctcagcacaaagaagactgggaagggaaagagacctggaaaaggtgggaaccgcttttggaagtccattgggcttggatttaagactcccagggaagccatcgaaggaacctatattgacaagaagtgccccttcactggcaatgtttccatccgtggccgtatcttggctggaacatgtcacagtgctaagatgaacaggactattattgttagaaggaattatctccattttatcaagaagtacagaagtacgagaagaggcactcaaatattcctgctca

SEQ ID NO: 2559 - DNA, 384 bp, Glycine max
ggattgagaagtaagatggaggttgttatgcgccgtaagtaatttgtttgttggattggaattgagaaaacagcaacaaggggaaatgggagatagagaagaacaaggcgagggtgctggctcctccttggaattggaagctcctattccagagacccaaaaagaaatcccaatttcagatggcatcgcattcaacaatcagagcgcgattttccaagccatcgaggttgtggaacgagactcgttggccatcgctcagagtttcacttctctcttcgcttccctccgattggctctctccgaatccacatccacctctcgccatcacatgcagtgcttcaccgatgccaccggtcgccttcaggaatctggtgcttgcttgat

SEQ ID NO: 2560 - DNA, 349 bp, Glycine max
ggtgttcaccacagtttacacgcacgagagtacccattttctcttctcaatttctcaagtgtgccgagaaaatcatggtggacgcagcagaacgtagatacttggaggatgatgattcatctctcatgaaaactatcaagggcgcaacaactggtttagtggctggaactatctggggtactgtagttgccacctggtatgatgtcccccgtgtcgagagaaatgttgctcttccagggctgattaggactatcaggatgatgggcaactatggtctgagctttgctgccagaggaggagtcgaccatagtgtagagccattggtgcagaactatatgatgaagaggga

SEQ ID NO: 2561 - DNA, 357 bp, Glycine max
gattgtaaagcattcttcgcctttctctctcttctttttactctctctctgtctctctctacgctttctcgttcgagatccctcaagggatccactaactgaaggagaaatggggttgacattcaccaagcttttcagccggcttttcgccaagaaggaaatgcgaattctgatggtgggtctcgatgcagctggtaagaccaccatcctgtacaagctcaaacttggagagatcgttaccacaattcccagcattgggttcaatgtggagactgtggaatacaagaacattagtttcactgtctgggatgttggtggccaagacaagattcgtcgcttgtggaggcactacttcca

SEQ ID NO: 2562 - DNA, 64 bp, Glycine max
gagttgtgaactggccattcaggactctgtagtgaggattttccttctaaacctagttatggtg

SEQ ID NO: 2563 - DNA, 54 bp, Glycine max
acgcgtccggagtaaatagcaccaataccaagtctcgcgttaagcacgggagac

SEQ ID NO: 2564 - DNA, 360 bp, Glycine max
aaagagacccggaaagggtgggaaccgcttttggaaatccattgggcttggatttaagactcccagggaagccatcgaaggaacctacattgacaagaagtgccccttcactggcaatgtttccatccgtggccgtatcttggctggaacatgacacagtgctaagatgaacaggactattattgttaggaggaattatctccattttatcaagaagtaccagaggtacgagaaaaggcactccaacattcctgctcatatatcacctgctttccgtgtgaaggaaggagatcacgttattattggtcaatgcaggccactttctaagactgtgaggttcaatgtgttgaaagttattcc

SEQ ID NO: 2565 - DNA, 410 bp, Glycine max
ggccgaaaagtagtatcaagatggcttcagttgtgtatctcctctttggcttccatctcattgttatcatgtcaagttccttacccgcaactagtgaagtgtttgcaaaacagtatccatccacagaacccgtggaagaaaaactcacccaactccacttctatttccataacaacataacgggggaacacccaactgctatgaaaactgttttgcctcctaaggggtccattcatggttttggggctacttacatgatggatgaccctctaactgaaggaccaagtccaacttcaaagcttgtgggaagatctcacggaatatacgctttggcttcacaacatgagcctgggttgctcatggtgacaaattttcccttcactttgggcatttacaatgggagcaccctc

SEQ ID NO: 2566 - DNA, 378 bp, Glycine max
gattctcacctttccatgcatatagcttagctagctccttcacctccttagtttcgaaagcatggcttccctggcggcttccaccgcggctatgtcagaaatccttggaaaccccgttaacctcagatgcgcaaccaggtctgctccatcaccaactacacctgccaccttcaagaccgtcgcacttttctccaagaagaagccagctccacctccaaagaaaaagcctgccgctgtatcccccgccaatgaggaactcgccaagtggtatggtcctgacagaaggatcttcttgcctgagggtctcttggaccgatctgagatccccgagtatttgaccggagaagtgcctggagattatggttatgatccgtttgg

SEQ ID NO: 2567 - DNA, 232 bp, Glycine max
tgacgtagcaacaacacaaccttctggttctgtcggcattaaattatctcacggtaacgctactacaataccacaaagggattcagttccgatgacaattccgaacttgttaggttcacaacaaagtatcgtttggtacagtcgttagtgacgaaaaaattctgcctctgcaccaacaggtaatagtgactattttcaactgaaggttccagtatccatttggactaaaatc

SEQ ID NO: 2568 - DNA, 313 bp, Glycine max
gacatacaaacgacgcatccttctctttctttcggctttgatttctctctcctcgactcgatcccaattccactagggattcaattccgatgcgattccgagcttgttagatccacgacaaggtttcgtttcccagattcttttgtaaaaaaaaattcttcctctgcccaacaggtattggacactagttgaactgaggggtcatgttatcatgtggaatgaaatctataataacactaaaaacagggctagctgactatcttttaacaaggagtagtttgtaaaaaaatggaccatgacaagacggggtgcc

SEQ ID NO: 2569 - DNA, 385 bp, Glycine max
gccacaacacagaacaaaaacaaagaaaaaaaaaaacccttagccaacacaaccatcatggccacctctgctattcagcaatcagcattcactggtcaaactgctctgaagcagctcaatgagttcgtccgcaagaccggtggcgccggcaaaggtcgcactaacatgcgccgcaccgtcaagagtgctcctcagagcatttggtatggccctgaccgtcccaagtacttgggtccattctcggagcagattccatcatacctgaccggagaattccctggtgactaccgatgggacactgctggattatcagctgacccggaaaacttcgccaggaaacgggagctggacgtgattcacaacagatgggcaatgcttggtgccc

SEQ ID NO: 2570 - DNA, 51 bp, Glycine max
cctttgatcccttttttcttcttctaaaaaccttcaaaaaacagcacggtg

SEQ ID NO: 2571 - DNA, 349 bp, Glycine max
ggccgtccccaaaatcccttcttctctctctcaattagggtttgcgttttcacactctctcccacacactcctctctctctcgcgtttcaatgcctgccaaatccgtctccaaattccaaacagtgccaagccgttctattttcaagcgaattcggcgttcggttcagttcatatcacttcttccccttattttactatagggctcctcccatggcgccgagccgcagaaggggcgtcagtaaggcggcagccgcggccgccgcttgccgccagttccaagtccgcgatcttgtgcgtgccaaagtaaaggggttccctgcatggcctgccacggtaagtgagccggag

SEQ ID NO: 2572 - DNA, 388 bp, Glycine max
gaccacaccgagtcgcagaaaaagaaaaaagcgatcatagtttcacttcggccttatccagtttagggtttcggttctctaccctatctttcacgtatcgaaaccttaaatttacgatcaggtctgagcaatctggttggtagaacctttggtcttagtgagtcaagttttatgtctgaattagacgatcaaattcctactgccttcgatccttttgctgatgcaaatgctgatgactcgggtgctgggtcaaaggagtatgtgcatattcgtgtacagcagcgaaatggtaggaaaagcctgacaaccgttcaaggattgaaaaaggaattcagctataacaagatacttgaagacgtcaagaaagagtactggttcaatggaacag

SEQ ID NO: 2573 - DNA, 130 bp, Glycine max
tacctctttccaacaatgatgcacttgctgaacttagaagcgctcagatatgggtccactctcccattgagatttgtgaatttgacacaacattgacatgttaagaaataatgaatattattaattactt

SEQ ID NO: 2574 - DNA, 410 bp, Glycine max
agaaggggactgcgagagtgtgggagccagaaaactgctgcttctcgacccacttttgaagttcaaaacttaaaccctagttctctctctctttctttctcctgcatcttcaaccatgtcagcaatgctgcaacctcagatcattctgctcaaggaaggcacggacacttcgcaagggaagccacagctggtgagcaacatcaatgcctgcaccgccgtcgccgacgtcgtccgcaccaccctcggccctcgcggcatggacaagctcatccacgacgacaagggaaccgtcaccatctccaacgacggcgccaccatcatgaagctcctcgacatcgtccaccccgctgcaaaaatcctcgccgacatcgccaagtctcaggactccgaggttggcgatggaaccacca

SEQ ID NO: 2575 - DNA, 395 bp, Glycine max
ggaaattctaagagcttgttccgtcgtcccccaagtgctgcagagccgcattttgcttgcaattcagaaactttgtgcgtagaggggacgaaacaatacaatggcttacgctgcaatgaagcctactaaggccggcttggaggagcctcaggagcagatccacaagattaggatcaccctttcctctaagaacgtcaagaatctcgagaaagtgtgcgccgaccttgttcgtggtgccaaggacaagcgcctcagggtgaagggacctgttaggatgccaactaaagtacctaacatcaccaccaggaaatccccgtgtggtgaatgcaccaacacatgggacaaatttgagctgcgtgtgcacaagagaattattgatctctacagttcccctg

SEQ ID NO: 2576 - DNA, 417 bp, Glycine max
gacaacacaacgcaacacaacgcgcactctctcttttctctcttaacacaaaaaccctatcgttcttcgcggtttcgccgattctcgccatgccgaaagccaaatccgacgccaaagccgccgatagccggttgaagcgcaagggcgctggtgctggaaggaagcaatcgaagaaagctgctaaggatcctaacaagccaaagagacctccaagcgctttcttcgttttcatgtccgagttcagagagcagtttaagaaggagcatcctaacaacaaatccgtcgctgttgtcggtaaagctggtggtgacaaatggaaatcgctgtctgatgctgaaaaggcccccttcgttgccacggccgaaaagaagaaacaagagtatgagaaaactattttggcttacaataagaaattgg

SEQ ID NO: 2577 - DNA, 401 bp, Glycine max
gagaccttgaattgttggtttgcttcttataaggcttgtagttgacgcctttaggaatctctcaaggatgggtttctcagtggcagcttcgttgggtacctatgttgtgctgagagacactcatgaaacaagaatcaagtgccaatttttgtgcagaaaagaacagaatagtagaattggtttcaagttttcaaagcacaaggccattcaaagtgcaattttttttagcaagcatgagttcactgatttggatgagaggaagagctcagatggggttaaagaagagattaaaaaatgttatgaactcataaacagattagggagaggagttgtgtatctgggttcttcaaggatgggacctagccattcacattatgtgcaagcacaagagctggctaaag

SEQ ID NO: 2578 - DNA, 344 bp, Glycine max
gattcctcaaaatctaacctctctcattagctaacatctcaccaaaacagagtactgtgttgagtttttgttcttctttttctttgagttatttccctagatatacacacactcacatctctgtctctgtgcaaccaacagcctctgcttcttaattctcatcacttatgcctcattcttattaaggggtttttgttcatgaaagaattgaatatgccgggaattgttacaaacggggttcaagatgaaggggggagtaatgagatgaatggggaccaggattcaccttttaatggaaccttgaatctggttaagtcccccaggggtggttctgtgagtcccgg

SEQ ID NO: 2579 - DNA, 372 bp, Glycine max
gaacatacctaaaaattgtaccgatatggcttcacttgtgtgtctccttttttccttgcatttcatggttatcatgtcaggttccttaccagcaaatagtgaagtgtttacaaaagagtctcctatgtcactatccacaaaacccgtggaaagactcacccaactccacttttatttccataacaacaaaatgggggaacacccgactgctatgaaaattgttgagcctcctaaggcgtccatttctggttttgggactatttacatgatggatgaccctctaaccgaatgaccaagtccaagttcaaagcttgttggaagatgtcagggaatatatgctgaggcatcgcaacatgaacctgcgatactcat

SEQ ID NO: 2580 - DNA, 363 bp, Glycine max
ggtttaccgtttcgtttgtttctgcggaaaatgggaggtgaagaaaatgtaaagcatcttgaagattgttctgtttccaatgcattgggcacttgggtattctcagttgcaggagctttgctggctattccagtggggataaagcgcaaatctctggcaccccttgtattttttggcaccactggtactatgttggatattattatgggaattagtgcttgcgaaagggaacatgcacagcgccaaatgaagttacttgaagcgcaaaatgctgctgccgagacttctttgggtgaaacagaaattgattcataaactgctatgttgaagttgtcagcattgtcaaatttaattggtcatgat

SEQ ID NO: 2581 - DNA, 364 bp, Glycine max
ggcccaaattttttcatagcattttcagaggaacaatggcgggtagggtttcgacgtgcttcttcttcgtgtttgctccttctctccttcttccttttcagatctccgctgaggaatcatcggagaaagagttcgtactcacattggatcactctaactttcacgacactgtcagcaagcacgatttcatcgtcgtcgagttctacgctccatggtgtggccactgtaagaagcttgctcccgagtatgagaaagctgcctctatcttgagtagtcatgatcctccggttgttttggctaaaattgatgcccatgaggagaagaacgcagaccttgcatctcactacgacgttacgggataccc

SEQ ID NO: 2582 - DNA, 260 bp, Glycine max
acacaccgtttgttctattcttaactcaacttctgctacccactctcttcttccaagtccaaccacgcttttctctacagtcatgggcaaggtcaagatcggaatcaacggatttggaagaattggccgtttggttgccagactcgctctgcaaagagacgatgtggagctcgttgccgttaacgaccctttcattaacaccgattacatgacatacatgtttaaataccacagtgttcacggacactggaagcatcacg

SEQ ID NO: 2583 - DNA, 412 bp, Glycine max
gaacatttgtctctcatctttcaatttcaatcaacggttatacccttttctatttgagcatcatcatgtccaccgcagcgcagcccaaggccaagaaaacggcgtcgtccaagaagcccctctcccatcctaccttcgccgcgatgatagcggaggcgatagcgagtctgaaggagagaaccggttcgagccaatacgcgataaccaaattcatcgaaggcaagcacaaggagttgcctccaacctacaagaagcttgttctcgttcatctcaagaagtctgttgctgctggcaagctcgttaaggtcaaaaactctttcaagctcgcaccgactaagtctgctcctgttaaagccgctgctgctcccaagaagcccaccaaagctgcggctaagcccgccgccaagcccgc

SEQ ID NO: 2584 - DNA, 397 bp, Glycine max
gattgttggcttgtgctctgctcgtgcctctagggttatcatatctccatttccatttcctctctctcagtttccaagaatcttaagctatgggaaagtcttacccaaccgtgagcgctgattaccagaaggccgttgagaaggcgaagaagaagctcagaggcttcatcgctgagaagagatgcgctcctctaatgctccgtttggcatggcactctgctggaacttacgacgtgagctcgaagaccggtggtcccttcggaaccataaagcacccctccgaactcgctcacggcgctaacaacggtcttgacatcgctgttaggcttttggagccactcaaagcggagtttcctattttgagctacgccgatttctaccagttggctggcgttgt

SEQ ID NO: 2585 - DNA, 314 bp, Glycine max
gaacggatgtctaattgtctgttgaccggctattgcctatttcggtgttccttcctcgtttacgtcgcccccattgacacgttgttcccaaaatttaagcactataaatttcgacacttgccaagtactccaacgcctacttcatctctcttataatcacacacacctaccttatagctatggaaactggaggctttcatggctaccgcaagctccccaacacaacctctgggttgaagctgtcagtgtcagacatgaacatgaacatgaggcagcagcaggtagcatcatcagatcagaactgcagcaaccac

SEQ ID NO: 2586 - DNA, 401 bp, Glycine max
gagggatagggatagggatggagaaagtgaaggtgcttcggcgactcctcgagacaccaggggttcaccaggggccagcctgtttcgacgctctgggtgcgaagctcatagaatccgctggcttcccctactgcatcaccagtggcttctccatcgccgcttccaggttggctctgcccgacaccggcttcatctcctacggcgaaatgctggagcagggccaactcatcacccaagccgtttccattcccgtcattggcgacgccgacaacggctacggcaatgccatgaacctcaagcgaaccgtcaagggtttcattgccgccggtttcgcaggaatcattctggaagaccagattgcgccgaaagcgtgttgggacacgcgcgggaggaaagtgata

SEQ ID NO: 2587 - DNA, 398 bp, Glycine max
gatggaatggttagagaaaagagaggcccatatagtgatccacagcatccttacttttatgaagaagaggatgtgtggatggcacctggcttcattaaccagttttatgaagtccctgattactggaaagtatatgtgcatgaagttgatcaagaaagagaaatgtggttaaactctttttataaagctcctcttaggttacccatgccagctgagctagagcactggtggtcaaaagaggagaatcataagattcctgaatttgtccttattaacaaggaaccggagcctgatcctgaagatccttcaaagcttatatatactgaggatcctctcatcctccatacaccaactggaaatattatcaattatgtccaggatgagaaatatggaatacg

SEQ ID NO: 2588 - DNA, 416 bp, Glycine max
ggatacagtgtgggcataaaattttcgaagttgaagcgagaacttgccatttcaagggttttagggttagggttttctcaaattgcaaggacatgggtttcaaccttcaaccatatgggattcaatccatgctcaaggaaggccataagcacctttctggcctcgacgaagcggttctcaagaacatcgacgcttgcaaacaactttccactattactcgaacttccctcggtcccaatggaatgaataagatggttataaatcacttggacaagctttttgtcacgaacgatgctgggacaattgtgaatgaacttgaagttcagcatcctgctgccaaggttttggttttggctgggaaggctcaacaagaggagattggggatggagctaatttaactatttcatttgctggg

SEQ ID NO: 2589 - DNA, 377 bp, Glycine max
gagggttttgcgctgttgttgctgctcatcctccgtaacctccgagctctgcaccgaagaacgaagccatggggaagacacatggaatgggatctgctcgcaagctcaagtcccaccgcaggaggcaaaggtgggctgacaagtcatacaagaaatcacatcttggaaatgaatggaagaaaccttttgctggttcatcccatgccaagggaattgtccttgaaaagataggtattgaggctaagcagcccaactctgccattcgtaagtgtgccagggttcaacttatcaagaatgggaagaagattgccgcttttgtccctaatgacggttgcttgaactacattgaagagaatgacgaagtcttgattgctgga

SEQ ID NO: 2590 - DNA, 119 bp, Glycine max
gacaacaaaatttgccacatgccaattcacgcctcaatttctttcctcaacgtttccatcacacatagatcccaatcctctcccatgccctatgttcccctcacttccatgggcacaca

SEQ ID NO: 2591 - DNA, 199 bp, Glycine max
ggatagctgagagagaaaggaaaggttaactaagaagcaatacttcaatggccacccttgttgttcataaccaaggttcttctgctcaagatgctgaggctctcgaacaggctttcaaaggatggggggctgatgacaatgccattatagcaatactgagtcacagaaatgttcatcagaggcaagaaatcagaaaagc

SEQ ID NO: 2592 - DNA, 300 bp, Glycine max
gagatagctcagagagaaaggaaaggttaactaaagaagcaatacgtcactggacacgcttgttgttcatatccacacgtcttctactcaagatgccgacgctctcgaacaggctttcaaaggatggggggcttgatgacaaggccattataccagtactgggtcacagtaatgttcatcagaggcaatgcatcagaaaagcttatcaggagatttactaataggatctcagcaagcacctttagtccgacatctctggtgactttgctaaatctatataccgatggatgttgcagcctg

SEQ ID NO: 2593 - DNA, 382 bp, Glycine max
gattgtgattggttgtagtgttatgttactgttactaaaggaaagaagaaaaagggaggaagtggatgacgagtgcacacgtgggagccatgtctagttctacatgcttcccttcacttcctcgacttcttcgaccttctttcaccaaaaccaaatcatcacctaagttcagcatgagcatgagcaaggatccggttcgtgagtggattctttctgatgggaaagctatggagataaccaaaattagccctgttggtgggggttgtatcaatcttgctagtcgctacgacaccgatgctggttcactcgttgttaaaacaaacaggagtattggaccatccatgtttgaagctgaggctcttggtttaggagctatgtatga

SEQ ID NO: 2594 - DNA, 320 bp, Glycine max
ttcatagatttagggaatcgattactatactaataataaattgtacaaaaaataaagatataaataatataaatataaaaagaacaaacacaaattttatgtgattagtcgccgtatttaaaataaaaaaagggaggagggaaataaagaaggaaaggagatgtttggataaagggaagtccccgtcgagttcggaggttttgagaggacagggaaggaggggatgttttattatgctctaggagagacagtaagaagattatatgagatatctgctgtggaagtaagtcaacatttctattggcaaatagggagtttcc

SEQ ID NO: 2595 - DNA, 322 bp, Glycine max
  modified_base (220)..(220): a, c, g, t, unknown, or other
gacctcacccagttgcagaaagaaaagaccatcaaagtttcacttcagccttatccggtttagggtttcggtttttgacccaacctttgacgtatcgaaaccttaagtttcggatgaggtcggagcaatctggttggtagaacctttggtcttagagagtcaagttttatgtctgagttagacgatcaaattcctagggcgggggatccttttgctgatngaagtgcggatgactcgggtgctgggtcaaaggagtatgtgcatattcgcgtacagcagcgaaatggaaggaaaagcctgacaaccgttcagggattgagga

SEQ ID NO: 2596 - DNA, 332 bp, Glycine max
gaacagcgaaacagagagtgatttcagtgagtgatcggtgttcacttgatctcatcataatcgtcagcgtcaattgaagaagatgccgatcagaaacatcgccgtcggaaggcctgaagaggcgactcaccgcggaggaggtggaaagcggctttggctgagttcatctcaaccttcagcttcgtgttcgccggcgcaggctccggcatcgcctaggagaggggcaccgacaacggcgctgccagggcctgccgggctcatctccgcctccatcgcccatgcattcgccctcttcgtcgccgtctccgtcggcgccaagatctccggcgggc

SEQ ID NO: 2597 - DNA, 391 bp, Glycine max
gaaaattctaattaaaaaaaagacaaaaataatttatattttcttaaagaacaaaatgtttgttatgcttaatatctttaatttggtctgtatttgtattcactccgtcctttattcaagtagttttttctcggcgaaggtggcgcgaagcctacgctttcttgaatccaattgtggatattatgccagtgatacccttaggcgtttttcttttagcttttgtggggcgagctgctgtaagtttgccgggagatctgtaatttgagtaatgtcttaaaaaaaaattaagaatttatcagaaaactaaaattcgaacattttaacaatttaaaagatgggataagtcttacagtgtgaattagggattccgagattgaaatttttggatata

SEQ ID NO: 2598 - DNA, 316 bp, Glycine max
tggaagctacagcactgagcgtgaaagagcccaactggattgcaactggttggaacgttggatgtcatcacaatcacccaacttaagaccacgtgagaccctttataggacgcgtgccaatgctacttccaccactgattacatgtctgaagaaaagacacttgagagggacatgggtgcaactctggacgcgggggcatgctaatatgggcttcaggaatggagaatcttttgacacaagcccaatttctaataggtaccatcagcgccaccacagtgctggtgtctctagctacatggccccaaaccagtctgc

SEQ ID NO: 2599 - DNA, 90 bp, Glycine max
gaggacctctatgctgcgtgtttcctttggattatgctattacctcacctggtttgcttttaatgaaaggttgataacaaatttatatag

SEQ ID NO: 2600 - DNA, 386 bp, Glycine max
gatctcattaacgtttcttctcgtcactctgcccgctgcatcaatggcttcagagaagaaactttcgaacccaatgagggagataaaagtgcagaagctcgtcctcaatatctctgttggcgagagtggagatcgtctcgggagggcgtccaaggtgttggaacaacttagtgggcaaaccccagtgttttcgagggcagcgtagactgttcgttcctttgggaggggggaaatgagaagattgcatgcgatgtcactgtcagaggtgacaaggcaatgcaacttttggagagtggtttgaaggtgaaggaatatgaacttctcagaaggaacttcagtgagactgggtgcttcggcgttgggagtcagggacatattgatttggg

SEQ ID NO: 2601 - DNA, 309 bp, Glycine max
gaccgcaaactctctctgtaaagtgcaaagcctctattttttcttgtgaatttgaaggacgatgagttccacagaggtcgcagccacaacgaagaagggtggaagagggaaacccaagaccacaaagtccgtttcccgttcctccaaagccggccttcagttccccgtcggccgcgtcgctcgctacctcaaggccggtcgctatgcccagcgcgttggttccggttcccctgtttacctatctgcggttctcgactaccttgccgctgaggttttggagcttgccggccacgctgcgacggacacccg

SEQ ID NO: 2602 - DNA, 359 bp, Glycine max
gacttgcggctgcagcagagaagcactcatcattcttcgtttgtctaagatccgccttctctgaattgtaaaaatgtcgctcggagaaactgcttgttcatacgcagctcccaaccttcaataagatggaatcagtgttactgccgacaagattagcaccctgttgggaactggcaaaggtcaagttgatacctattggccaaccttatttgcgaaacttgctgagaagaaaaatcttggcgatttgatagccaatgcagcatgcggtggtgcaccaattgctgttgcaagtgcccctgttgctgcctcacgtggtggtggtgccgctgatggcgcaccagctgccgacgagaaaaaga

SEQ ID NO: 2603 - DNA, 318 bp, Glycine max; identical to SEQ ID NO: 491

SEQ ID NO: 2604 - DNA, 377 bp, Glycine max
gaccctgcggtgtcgtccccgccagtgccgcgcacacagcatcagtgagccaagaacatgaagtaacgcgacaacatcagctgcctggaaacacctttccggctttccttcgcaaccctggcccccctgggtcctggcgggcataaattgacttgagaatggaatacgtcagcccaaaaggacttcgcttggatggccgccgaccaatggaaatgcgacaaattcgtgcagagattggtgctgtatccaaagcagatggttctgccatttttgagatgggtaataccaaagttattgctgctgtttatggccccagagaggtgcaaaataggagccagcaaataagtagccatgccctggttcggtgtgagtactgc

SEQ ID NO: 2605 - DNA, 383 bp, Glycine max
gcagcgcttgatttgaggccaggcaagccccactcaaccaccacacctctcctcgttcacgctacccctttctgctcttcttctacctttcaagttttaaaagtataaagatggcagagacattcctatttacctcagagtcggtgaacgagggacaccctgacaagctctgcgaccaaatctccgatgctgtcctcgacgcttgcctcgagcaggacccagacagcaaagttgcctgcgaaacatgcaccaaaaccaacttggtcatggtcttcggagaaatcacgaccaaggccaacgttgactacgagaagatagtgcgtgacacctgcaggaacatcggcttcgtctcaaatgatgtgggactggatgccgacaactgc

SEQ ID NO: 2606 - DNA, 340 bp, Glycine max
gaccgtgcgctagttctgagtattctgatcgctccctgagagagctcgtcgcggcggttgcagaagaagattgcaagatgaagttcaacatcgcgaatcccaccactggatgccagaagaagctcgagatcgacgacgagtggaggcggggagcattttgggacaagaggatctcacaggaggtcatcggagatgcactcggtgaggaatttaagggctatgtcgggaggattaccggaggttgtgacaggggagcgatttccaatgaagcagggagtgctgactcctggtcgtgttagacttttgcttcacaggggaactccttgcttccgtggagatg

SEQ ID NO: 2607 - DNA, 408 bp, Glycine max
gagggttttgtgctgttgtcgctgctcatcctccataacctccgagctctacaccgaagaacgaagccatggggaagacacatggaatgggagctgctcgcaagctcaagtctcaccgcaggaggcaaaggtgggctgataagtcatacaagaaatcccatcttgggaatggatggaagaaaccttttgccggttcatcccatgccaagggaattgtccttgaaaagataggtattgaagctaagcagcccaactctgctattcgtaagtgtgccagagttcaacttatcaagaatgggaagaaaattgcagcttttgtccctaatgatggttgcttgaactacattgaagggaatgacgaactcttgattgctggatttggacgaaagggtcatgctgtgggagata

SEQ ID NO: 2608 - DNA, 412 bp, Glycine max
ggttctagtgtgtgattgtttgttgttgtaactcgttcttcttcttttgttgttctgtgtttgtgtttgttttttctctcacctgaaaatgtcttgctgcggtggtaactgtggttgcggaagctcctgcaagtgcggcaacggctgcggaggctgcaagatgtacccagacttgagctacactgagtcaaccaccaccgagaccttggtcatgggagtggcacctgttaaggctcaatttgagggtgctgaaatgggtgtgcccgctgagaacgatggctgcaaatgtggaccaaactgctcctgcaacccctgcacttgcaagtgaggtgttgggagagcaagcttcaagcagagatagcccttaattaggaataatgataaactattaatgtgtagctaaaaacttatg

SEQ ID NO: 2609 - DNA, 323 bp, Glycine max
  modified_base (232)..(232): a, c, g, t, unknown, or other
  modified_base (237)..(237): a, c, g, t, unknown, or other
ggttctagtgtatgtgattgttgtgactcgttcttcttcgtcgttatcttcttcttttgttgtttgtgtgtttgttttttctctcacctgaaaatgtcttgctgcggtggtaactgtggttgcggaagcgcctgcaagtgggggaagggctgcggaggctgcaagatgtagccagacttgagctacaccgagtcagccagcagggagaccttggtcatgggagtggggccanttaangctcaagtcgagagtgctgaaatgggtgttcccgctgagaacgatggctgcaaatgtggagctaactgcacctgcaacccctggac

SEQ ID NO: 2610 - DNA, 372 bp, Glycine max
gacagacagacacacactcggttctgccttcacaaaataattatcgagatcccctttttctcctaagaaaagccatggctaacggtcccggtctctactctgacatcggcaagaaagccagggatctgctgttcaaggactaccacagtgaccagaagttcaccatcaccacctactcacccactggagttgctataacagcatcaagaaccaggaaaagtgaactgtttgtggctgatgtcaacacccagttgaagaacacaaacatcactactgatatcaaagttgatacagattctaatctcttcacaactatcactgttaatgaacctgctcctggtctgaacgctatttttagcttcaaagttcctg

SEQ ID NO: 2611 - DNA, 352 bp, Glycine max
gatgccgaaaagtagtaccaagatggcttcagttgtgtatctcctctttggcttccatctcattgttatcatgtcaagttccttacccgcaactagtgaagtgtttgcaaaacagtatccatccacagaacccgtggaagaaaaaggcacggagctccacttctatttccataacaacataacgggggaacacccaactgcgatgaaaactgttttgcctcctaaggggtgcagtgatggttttggggctagttacatgatggatgaccctctaactgaaggaccaagtccaacttcaaagcttgtgggaagatctcagggaatatacgctttggcttcacaacatgagcct

SEQ ID NO: 2612 - DNA, 354 bp, Glycine max
gacaccacacacacacactgtctatgaagccgaaaaatcggttctcccatcgatgaatccccgtggataagatcaaggactaaaatttgttcttttttataatattactgccccaaagaagttacctttcaattctttccccttccctatatataatcctttcataaccccttcaaactaccactcctgcagtttttgagttaccttgcatgcctaaagaaatcactcgttctttagagcacttttcattttcctctcttctttaactctcagaggattattttcgctaatatccaagctttaagatcatggaagttgcgcatttcattttcgggatatttgggaatgtttctg

SEQ ID NO: 2613 - DNA, 335 bp, Glycine max
gatcacaacactaacacagattttgattcgattcgattcgattcagtcgaggttttaagcagcagcaagatgtctgggcgtggaaagggaggaaagggattgggaaaaggaggagcaaaacgacatcgtaaggtgctccgcgagagacattcagggaattacgaagccagcgattcgtcgtttggctcgcaggggtggcgtgaaaggtatcagcggtttgatctacgaggagactcgcggtgttctcaagatggtcgtggggaatgtcatccgtgacgccgttacttacacggagcacgctaggaggaagaccgttacggctatggacgttgttt

SEQ ID NO: 2614 - DNA, 330 bp, Glycine max
gtctctctcacacacacacatcccagccatgagcctcttcggtataggcagaaaccagagaacattccgcccgaaaaaaagtactccttctggaagtaagggagctcaacttcgaaaacatattgatgccacgttaggtagtgggaggctgagggaagcagtaaagctacctcctggggaggatttaaatgagtggctagctgtcagcactgttgatttcttcaaggaggggggtctgctttatggtaccgttagagagttctgtactcctgagaattgtcgggcaatgtctgcaggacccaagtatgaatagagatgggcagatggtgt

SEQ ID NO: 2615 - DNA, 310 bp, Glycine max
  modified_base (239)..(239): a, c, g, t, unknown, or other
gagaggcggaagcggcaaatcgcttcgaccgagttccacaacagcagcttagcttagtagcttaactctttctactggcgtggcgctgctggatgcttttgatcaatagaacaggaagaggagtcagccaaaaagaaagaccgggagggagggatgaccaccaagatatgcatagtgagtcgatcgtttggatgagccagttttggggaggcagtttggggggcttcaggggggacacngaagattggattaggggaatcacgagtcttatatactgtgttacgatcacctcagattgataaaaagtcca

SEQ ID NO: 2616 - DNA, 338 bp, Glycine max
gactcaccacttcaaaacactcataacacaaagcacaaagcaaagctcatccttgagttaaaaaatggcagcagcttcttccatggctctctcatccccatccttggctggcaaggccgtgaagctgggcccatcagcgcgagaggtgggaagggtgagcatgaggaagaccgtcaccaagcaggtctcctcaggaagccgatggtacggcccagaccgagtcaggtggttgggcccattctctggctgaggcgccgtcctacctaaccggtgagttcccaggcgactacggctgggacactgctgggctttccgcagacccagaaagcttcgccaag

SEQ ID NO: 2617 - DNA, 302 bp, Glycine max
ggaccccattaagaaccacttcctatacattggatgcaaccaaacaacagtattgattaggatttcagaaattttgacaaaaaatcaaaataaaataaaatgtgtaaatccatgggacgttttggaacaactagagcatggagaaccatggtttatttttggaataggaagggcatatcaaaatttagttacttgagagggggacagaacactcataggcagggtggcagtaatttagttttgatgcattttccatgtatagatttttacactgtctgacaattagaaatcactctatacat

SEQ ID NO: 2618 - DNA, 330 bp, Glycine max
gatatatatatatatatatgtgtgtgtgtgtgtgtgtgtgtcaaactctatttttgtttcattcatacaaatacaaattaataaaaacaacaggttctttgctccttgtggctctcatcaggctctgatcacacttcgatggcaaagtttggattatctccactcttggtgctttccatattgttgctgatcatgagtggtggtgcagtgagaggccaaagagaaatggtgcctgccttgttcatatttggtgactctctcattgacaatggcaacaacaacaaccttccttcctttgctaaggccaactattacccttatggcatcgac

SEQ ID NO: 2619 - DNA, 328 bp, Glycine max
ggccgcgctcttgaaagcttgaactgagatacgatttttttttcagcgtttaggcgaattcaccgagagttgcggctgggaatggacggtgacggcgaggagttgactgcgcaggagaccgctttgtatgaccgtcaaattagggtttggggagctgatgctcaaagaagattaagcaaatctcatgtcttaggcgagggaatggggggaactgtagctgagttgtgcggggatattgttctggctggagtgagggtagtcggactttagtagatgaccgggttgccactgaggaagtgctttcctcgaattttctcatccctcctga

SEQ ID NO: 2620 - DNA, 256 bp, Glycine max
gggttttggctcgagctctgcgagatcttcattcgccgattttaaaagatgagtaagcctcagagtgatgcttttccttaaaccaattcaaggatcaagggcgaatccaaggagaagaatcccaaatttgtggagaccatcgaactccaaatcgggttgaaaaactacgatccacagaaagacaagcgtttcagtggctctgtcaagctgccccacatccctcgccccaagatgaaaatttgcatgcttggtgatg

SEQ ID NO: 2621 - DNA, 57 bp, Glycine max
gagacctcaggtcaagcggggctacccgctgagtttaagcatatcaataagcggagg

SEQ ID NO: 2622 - DNA, 281 bp, Glycine max
gagggttacaatccttggtgttgatccaaaacgtccacacattcgtcatggacatatacacaatgggtccgacagaaacgtgtcaaagggtccgttgtaacagcgaacaagaatgttcaggaaaaggtcatcaatcctttgttcgagaagcgtctcaagcagttcgggatcggaggcgcgctgccgccaaaaccggacctgacgccgttcgtgaagtggccgaagaaagtccaaatccaacgcaagaagcacatcctcaagcagaggctcaaggtccctct

SEQ ID NO: 2623 - DNA, 318 bp, Glycine max
ggtggtggggtgtgcagaagagcgtcgcagttgtaaccctaatcagaagaagcgcagcttcaagcgagtgacagccaccagccatgggtcgtatgcacagccgcggtaagggtatatcctcttctgctttgccctacagatgcggaggctcctagctggctcaagatctcttcgcaagatgtcgaagaggatagctgcaggtttgcgaggagaggtttgaccccgtcggagagtggtgtcattctcagagaggcggcggtattgctcaggtcaatagcgtcactggcagcaaaatccttcgcatcctcaaggctcacg

SEQ ID NO: 2624 - DNA, 283 bp, Glycine max
  modified_base (180)..(180): a, c, g, t, unknown, or other
ggagaaaggctctttggcttgtattgaaaggtaagcaattgaaggttagaggccgaaagagagtggaataacagactagtcttaggaggtcgctagtgaaggtgaaacctgctctaagtgaagcaaaatcacttgcttgtgaagaagctcacaaaatctcttgcaagtgaaggggtgtangctctgaccttgttttggggaattgcaagctaagctggtttagttagtagctagcctttctcgcccttcttatatatattccacaattcaacaatcaatcagc

SEQ ID NO: 2625 - DNA, 62 bp, Glycine max
gttcaagattttgccttgtttaaataatgaataccatgtcttcttttgagttccatgtttac

SEQ ID NO: 2626 - DNA, 378 bp, Glycine max
  modified_base (247)..(247): a, c, g, t, unknown, or other
caacataggtcatcgaaaggatctcgaagacccaccaacgcacgaaagccgggatctttcagaaaatggattcctattcgaagggtgcataaccgcatggataagctcacactaacccgtcaatttgggatccaattcggtgccggaggaggtatcgggaaggaattttggaatgtaataatatcgattcatacagatacagaggaaagggttctctattgagtgagaggctctacctacgagatgnggatagagaaagaggaaaaaaccgaggatttcacatagtacttttggtcgaaaaatcgatctgatttttttcgtacttttcgctcaatgatgaaatgggtcagattcgacaggaccagagcttggtggagt

SEQ ID NO: 2627 - DNA, 318 bp, Glycine max
gaaggttttgtgccgttgtcgctgctcatcctccataacctccgaactctactcctaataacgacgccatgctgaagacacatggttcgtcacctgctcgcatcctcatgtctcacctcatgaggtactggtgggctgagaggtcgatttcaatctcccatcttgagaatgattttcaggtcccttttgccggttgagcgcatgccaggggaattgtccgtgaggggcgaggtattgaaactaagcaggggaactctgctattcgtaagtgtgccagcgttcaacttatcaataatgggaactgaattgcagcttttg

SEQ ID NO: 2628 - DNA, 241 bp, Glycine max
gacagcactgcactcttcgcaagagaacagaaaaagacaacacagagagaagcgtcttaataaacgctcttctctgaaaaacctgatttcttctcttcttctcttctctttcgtttcgatcttcgatctctgaaaatgagagggggcgggtcaatccacatcggtcaggccggtagtcaggtcggaaacgcctgcggggaagggggggggctcgaagacgggaggggggctgatgggcaga

SEQ ID NO: 2629 - DNA, 289 bp, Glycine max
gagggtttcaaagtggacagaggagagcgtcctagtcgcaaccctaataagaagaaccacagcttcaagcgagtgacatccaccagccatgggtcgtatgcacagccgcggtaagggtatatcctcttctgctttgcgtgggggaaggacacctcctagctggctcaagatctcttcgcaagatgtcgaggaggggatctgggggtttgcgaagaagggtgtggggggcgtctcagattggtgtcattgggcgggagtctcacggtattgctcaggtcaacagcgtcac

SEQ ID NO: 2630 - DNA, 310 bp, Glycine max
ggcgataaacacgtactagtacagagcatacctcaccaaaacccagcgtttcacattatcttcgtttttatttctccaatgggacaagcagcgtccacgccggtttcttcgacggacctgagtcaccgggatattttcagaggggggggggccatcggccgcgactacaccgccggcatccccgaggagtgccgggcgggagggggcgagtttctaagcgcggggggggcggaaaacctgctccgtggcgggggggcggtggctgcgcgtggacggcgagaaccgccagcgcctctccctggacgcgaag

SEQ ID NO: 2631 - DNA, 314 bp, Glycine max
gacgacagaggcatgaggatgaggaggaggacaagttcactgtagcattgctcgactgtgttgttgtgtttgtgtgtacctatgttaaaataacagcaacaacaactaagactgaaaccagagctccataataagtgaggcgtggtgttttttcttgtgtctagttccccgagacaaagggttaaaggaggttgaacttgggggttgagactcgaaacgggcggcggttctgtctttaacacagatgggggggagttagaagttttctggcgctttctgaggggctatttttagcgggttgaagttgaagctgt

SEQ ID NO: 2632 - DNA, 351 bp, Glycine max
ggaaacagagagtgatttcagtgagtgatcggtgttcacttgatctcatcataatcgtcagcgtcaattgaagaagatgccgatcagaaacatcgccgtcggaaggcctgaagaggcgactcaccccgacacgttgaaggcggctctggctgagttcatctcaaccttcatcttcgtgttcgccggctcaggctccggcatcgcctacaacaagctcaccgacaacggcgctgccacccctgccggcctcatctccgcccccatcgcccatgcattcgccctcttcgtcgccgtctccgtcggcgccaacatctccggcggccacgtcaaccccgccgtcaccttcggcgc

SEQ ID NO: 2633 - DNA, 378 bp, Glycine max
gaaccaagtttgcttgcgtgtatattcattttagcatcaaggttgaatctcagagaaaaagaaacatcgacaagcatgtctggaagaggaaagggaggcaagggtctcggatagggaggagccaaacgacaccgtaaggttctgagggataacattcagggaatcaccaagcccgcgattcgccgtctggccagacgtggtggcgtcaagcgtatcagtggtcttatctatgaagaaactcgcggtgttctcaagatctttctagagaacgtcattcgcgacgctgtcacctacactgaacacgctcgccgcaagaccgtcactgccatggacgttgtttacgcgctcaagatgcacgggaggaccctctacggattt

SEQ ID NO: 2634 - DNA, 304 bp, Glycine max
gaaagtagcagagcagagtaaccagcgaggtagggttttctctttctcacgttcctcttcgcagcgccacagtagcttcgcattagcaatggcgagaatcaaggtgtacgagctgaggtacaagacaaaagcagagcttctgaggcgagcggaaggatctcaaagcagaactcgctctcctccgcgtcgctaaggtcacgggcgggggcgcagacaagctttccaggggcggagtggttcggctttcgagagggcgggtgctgacagtgatttcccagaagcaaaaggcagcgttgagggaagc

SEQ ID NO: 2635 - DNA, 267 bp, Glycine max
ggtgtcgacgtgtattcagcacacagcatagctcctctctcccccatggtttggaatcgaatgccgtagagtacatgaggggggcgctttcttgtagcatttctaagctatcacagctccagctcctggttgcagtttcgcgcgtcacaaagtgaaccgggtgggggataacaccgtttcaaggatgggtgctctcaacgttccatgaaaatctttttgtagtactgagggtgtgaagattgctggttgccctagtccagaggtttc

SEQ ID NO: 2636 - DNA, 306 bp, Glycine max
gagtatcacaacttggtttacaccaataattggaagacaaatgttatattcactctattttttttttaagtacacttccattttattttaatttaaattttttactaccattaatatttcgaaaagtaatttttaagatggggggtgagtttattcaagttcaaaaagtaattttcggaatgcgaatatggagggagattgggggggagagagcaggagcggggaggggttgagcgtttgagatgtagggggggtccgaatgttagacagagaggccaatcagacaagaaagacgggaacaagata

SEQ ID NO: 2637 - DNA, 279 bp, Glycine max
gactcctcaacgctttctcatcgctgatcaaacttcaaaccctagctaggatttcaaggtacacttaacgatggcttcaaaacgcattactaaggagttgaagggtcggcagcaggaccctcctgtttcctgcagtgctggccctgttggtgatgagaggtttcagggggaagctacaattaggggtggagcggacagtccttatgctggtggggtagtcctggtgaccattcacttcccaccagattatccatttaagccaccaaaggtttccttccg

SEQ ID NO: 2638 - DNA, 303 bp, Glycine max
ggaaacagagagtgatttcagtgagtgatcggtgttcacttgatctcatcataatcgtcagcgtcaattgaagaagatgccgatcagaaacatcgccgtcggaaggcctgaagaggcgactcaccccgagggggtgaaggcggctttggctgagttcatctcagccttcagcggcgtgtgtcgggggcgcaggcgccggcatcgcctagaggaagggggccgacaacggcgctgcgacgggggccgggctcatctccggctccatcgcccatgcattcgccctcttcgtcgccgtctccgtcg

SEQ ID NO: 2639 - DNA, 298 bp, Glycine max
gatagctcacacactaaggatttgatttctcacatcccacacttcagcgtcaagctctgctttcataatctcacttcttcagctcaagatgctgaagtcctcaatcacgctttcagatgatgaggagctgatcactatggtcggagttcatcactgtgtcacagttgtgttcatcagacgtaggtaagcattgatcttagtgggagatttaacaggtggagtgggagcatatcccttgagtccgatgtcgcaggggacgttgggatagccattcacccgtgtctgttgctgcctgtgg

SEQ ID NO: 2640 - DNA, 359 bp, Glycine max
ggaagaaatgcaacagattatggaagaaaacaggactttgcatgaacttaacttctcttccaccaggtcattgaaaaatcagcaaatggaaatttctgagctgaagaagatcaaagagaaacttgaacgagagtttgctgtaaaagttgaagaaagtaatgtcctccaatgggaatctcatcaaataaaggatgaaatcctgggcttgaataatagataccaggctatactggaagaactaggctctgtgggtttgaatcctaaatcttttgcagcatctgtgaaggatttacagaaggagaatacaatgataaaggatgcttgcaaaatggagcgagatgagaaagaagctctgcatg

SEQ ID NO: 2641 - DNA, 340 bp, Glycine max
gaaaacttgaaatacctccaactccaagaacacaaccactcaaaagggttgaaagagagaaaagggtttaaaaagtagtgaagtgatcaatgtctacagaggaagagagtgcggtgaaggagcctttggatctcattaggctcagcggcgacgagcgtatctatgtcaaactccgttccgacagagagcttcgtggcaaacttcacgcgtatgatcagcatcttaagatggggcgtggcgatgttgaagagatgagtactacagtggaaatcgatgatgagacatacgaagaaattgtgaggactacaaagcggacagttcctttcctgtttgtcagggg

SEQ ID NO: 2642 - DNA, 344 bp, Glycine max
gaattccccattgagcgcaccgaaagcaaagtgtctctctaacctctgcaaaagtccaaggttgcacggttttaactgcttaggtttttgtcttcaaaattaaaactgtgcaactttggttgcaaagtcataggggttaagttgtgtttgcatgaaagtgggcttgagataattgtgcctcttgtatgatggaatccctttggaagcttttgtatttgctggagcctgcgcctgtcacacttatcactacagctgtggctgtgacatttggtgctgcttttcgagctctaaactatgggaaagaaatggagcgtaatcgggacttctctgaagcatcgattaca

SEQ ID NO: 2643 - DNA, 375 bp, Glycine max
gctagcaatactaatagcaaaaactcattcgcgatctcgttccgtacgtgcagccgcagcaagtgatcgaagcgaaagagagagaaattcatcgtcgcagtaatcatgggtaaggttcatggatcacttgcacgtgctggtaaggttagagggcaaaccccgaaggtggccaagcaggataagaagaagaagccacgtggccgcgcccacaagaggatgcagtacaatcgccgattcgtcaccgccgtggtgggattcggcaagaagaggggacccaactcgtctgagaagtgaggccgaggcttgaggaatatgttgctactctatttgatttatctttgttgttttttatttatgtttaatttgtatgttttg

SEQ ID NO: 2644 - DNA, 375 bp, Glycine max
gagggtttttgtcgtcgctactaagagttgctgcttcttcagccactccgcacctcgcagcctctgtgccctcaagaaccatggctgaaatcgaaactaccgttccagatcccacccaaatcgacgtcaaactcttcaatcgcgggagcttcgaggatgttgaggttaatgatatgtctctggctgattacattggagtgtccccatcaaagcatgctacatatgttcctcacactgctggtaggtactcagtgaagaggttcaggaaagcgcagtgccccattgttgagaggctcaccaactctctgatgatgcacgggaggaacaatggaaagaagctcatggctgtcaggattatcaagcatgccatggaga

SEQ ID NO: 2645 - DNA, 296 bp, Glycine max
  modified_base (137)..(137): a, c, g, t, unknown, or other
cggggcgagagaagttattagggtttttgagtgcggcggtccaaacactcttctctgcagcttttgcctacaactcccttcaccatggctgaacaaaccgagaaagcttttctgaagcggggaggagtgtttctcancacaaagaagactgggaagggaaagagacctggaggaggtgggaagcgcgtttggaagtccagtgggcggggatttaagactcccatggaggggggcgaaggaacctagattgacaagaagtgccccttcactggcaatgtttccatccgtgggcgtat

SEQ ID NO: 2646 - DNA, 325 bp, Glycine max
  modified_base (239)..(239): a, c, g, t, unknown, or other
gagggttttgcgctgttgttgctgctcatcctccgtaacctccgagctctgcaccgaagaacgaagccatggggaagacacatggaatgggatctgctcgcaagctcaagtcccaccacaggaggcaaaggtgggctgacaagtgggagaggaaatcacatcttggaaatgaatggaagaaaccttttgctggttcagcccatgcgaagggaattgtccttgaagggagggggattgangctaagcagcgcagggcggccattcgtaagtgtgccaaggttcaacttatcaagaatgggaagaagattgccgcttttgtccctaa

SEQ ID NO: 2647 - DNA, 325 bp, Glycine max
ggctgtgagtgagattacccatagatagagagcgcggcataacctaaacttacccttcttctctctgtgtgtgtgcgcatcaaacgcaaccagaagcagccatggccactgcaagaactgtgaaggacgtttctcctcatgagttcggtcgaagcttactcttctcacctcaagcgatctggcaagatggagctgccagagtggacggatattgtgaaaactgcaagatgtgagggagttggctccttattatcgtgactggtactatgtcagagctgcttccatggcaagaaagatctacgtgagaggaggacgtggtgttggt

SEQ ID NO: 2648 - DNA, 367 bp, Glycine max
gagagattccatctgggtctccctcattcaccaccaatggagaccagcacacccttccaagaccttccagaagcatctccaaagcccttcgtcaagaaaagcacactcacttccttcatcatgtcttcaacaccttccttcaaggaagacacctactacatctcccacctcaaatcctccgagaaaaaaagccctccaagacctcaagaacacactccaatcttctgagtcttccaccccgtccatgtggggcgttcctttactcaacaacaacaacgccgacaacgccgacgtcatcctcctcaagttcctccgagcccgtgacttcagggtccacgacgccctctccatgctcctcaagtgcctc

SEQ ID NO: 2649 - DNA, 322 bp, Glycine max
gagggttttgcgctgttgttgctgctcatcctccgtaacctccgagctctgcaccgaagaacgaagccatggggaagacacatggaatgggatctgctcgcaagctcaagtcccaccgcaggaggcaaaggtgggctgacagcggagagaggaaatcacatcttggaaatgaatggaagaaaccttttgctgggtcagcgcatggcgggggaattgtccttgaggaggggggtattgaggctaagcaagccggaggcggccattcgtaagtgtgccagggttcaacttatcaagaatgggaagaagattgccgcgtttgtcc

SEQ ID NO: 2650 - DNA, 144 bp, Glycine max
gattgaagtggcaacatgtattgattatacacgaacgcagtattgtttactattaaaaaaaaaaaacccaagacaaccaacagatacaatcacatccgcacaccaaatcaaataaaaacaaaccaaaacaagaaaaaccggccg

SEQ ID NO: 2651 - DNA, 130 bp, Glycine max
gggcttttcccattcgctcacgtgagtgttttgtttgcactctcctctccccttagcagtaccacaggattcagacaggattagatctagaggagaagttttaactgtccaacagcatcaccgcgactac

SEQ ID NO: 2652 - DNA, 283 bp, Glycine max
  modified_base (206)..(206): a, c, g, t, unknown, or other
gaacacacacaaactctctatcattttgcttttgtgccttctctaacataaaccaagcatgagtaagatcacggtcctgttcttcactgttctgttcctctgggggagtgatcacccactccacgcgccctcaaccagcttttcacaaggaatcttgtgggtcggagtccatcaggatgctgaggggggggatgaaagctgtgaancgatggggggagaggagtgtttgataaggaggacacttactgcacacatccattatatttatacgcagaagcataat

SEQ ID NO: 2653 - DNA, 268 bp, Glycine max
  modified_base (181)..(181): a, c, g, t, unknown, or other
cccacgcgtccgacgacagaaggggagagtggtggagtgtgcaaaagagcgtcgtagtcgcaaccctaatcagaagaagcgcagcttcaagcgagtgacagccaccagccatgggtcgtatgcacagccgcggtaagggtatatcctcttctgctttgccctacagggggggggctcctanctggctcaagatctcttcgcaggatgtcgaggagggtggcggcagcgtggggaggaaaggtttgggggcggcggagattggtgtcag

SEQ ID NO: 2654 - DNA, 403 bp, Glycine max
gaccaaaccattctccaaacccttccacaaaacatcaacacggttttccttccaccggtgaaccctaatgacctaccacaaggtgttcccgtagttgtccaaattcagctagcaatggctcactccatgccctccatccaccacaccctcaagtccataacttcaaagactccctacgtggccatggtggttgattctttcgccatgcatgccctagatttcgctcacgagttcaacatgttgtcctacgtttacttccctatatcagccaccacactctccatgcacttgaacttgcccttgttggacgaggaaacatcatgtgagtacagatatctgccggaggctatcaaattaccgggttgcgtgccgtttcacggccgcgatctctatgcccaagccc

SEQ ID NO: 2655 - DNA, 171 bp, Glycine max
  modified_base (21)..(21): a, c, g, t, unknown, or other
gggatggacaacgttgtgganggaggttgaaaaggtaaaaaaggaatggaataaaccatccaaaaaaccccacgaccacattaaggcaaccccaaactacggcaaatcaccaaaaccaaaagaggaaaataattcccttgccaaatgagggggaagcccccaggatggctt

SEQ ID NO: 2656 - DNA, 378 bp, Glycine max
gggtgccgtttattcatggaccagaagaatacatcatagcttctttctcatttcacacacacaagaaccttgagacatcatgaagatttcaagttccaagcaattggctgtgggatttgcacttggcaatgaaggataggcaacgttggagagctgaagaggatgctttacttcgtgcatatgtcaaacagtatggtcctagggaatggaatctcgtgtctcagcgcatgaacacacctcttaacagggatgccaagtcatgcttagaaaggtggaagaactacctcaaacccggcattaaaaaaggatctcttactgaggaagagcagcgtctagtcatcaatcttcaagcaacgcacgggaacaagtggaagaaaa

SEQ ID NO: 2657 - DNA, 351 bp, Glycine max
gacaaaagacaaaaacaaggttttcttcctctgctatcaatctatcgaagggtcacttccgaatcagattccgattcagacgcataaccctttcagtgctttattgaactaacgaggttttcttcacgcagcttgatatcattgcattgtattctaattccatggaggagtcttcgtacatcggtcttctcactagccatttgctcggttcacttcctgctgtcataactgacgaagataatgccacgatacatgtggccaccggtgcatatatgcatacattctctcccaacagtggatgagacagtggaccacgacatcaatctcctggcagtcctattgaaacttttg

SEQ ID NO: 2658 - DNA, 292 bp, Glycine max
ggtgtgagtgcgagagacacgaagacaggtccttggatagtaatacgtggattacgttttcagtcgccaaaatttggtttacaaaagccattcgccagaacaaccacaaaaggaaacaacgaacactggttttgaatccgttagcggcggcgttagctgatttagcttacgaacacacacctctagctctgtgttgatcgtttgcaggtcacagtgaccaggaggagaggggtttcgaaggtcctgtgatagcgtggaatgtaaaatcactctggcaatgggactgggaaca

SEQ ID NO: 2659 - DNA, 219 bp, Glycine max
cccacgcgtccgcccacgcgtccgactcctggaaagaagtctcttgctattgaggcattctcccgtgcactcgtggctattccaacaatcattgctgataatgctggtttggacagtgctgagttgatttctcagctccgtgcagagcatcagaaggagggctgcactgcggggagtgatgttatttctggctctgttggagacatggctgaagggggg

SEQ ID NO: 2660 - DNA, 325 bp, Glycine max
ggcagtttcaaattttcttttccgtcactttcccgagaaaaaaataacacttttcactttcttcactacgttctcacttcgatatggctcgtacgaagcaaaccgctcgcaagtccaccggtggcaaggcgccacgtaaggagggggcgcggcaaggccgctcggaagtccgctccggcgaccggaggagtgagggggcgccagcgggtcaggccgggaaccgtggcggggggggaaatcagaaagtagcaggggggcagcgagcttctcatcaggaagcttccatttcagaggctcgtgagagaaatcgcgcacgatttcaaga

SEQ ID NO: 2661 - DNA, 305 bp, Glycine max
gaacagccagaacactttccacttgtctccgaattagttatcttgagaaacattattcccattgctatatattatggctagcatgaaggttacatgggtggttgtgatcatgtgcatggccgtgggagggtggagcgatgatggcgcaagccatgacatgcagtgatgtggcggtgagcagtggacacgggcgatcctacctgatgcgggggggggcaccttcaacactttgcttggagggggtcaagaacattcttggcgctgctgtcaccaccgttgacagacaaactgtgtgcaactgtctc

SEQ ID NO: 2662 - DNA, 317 bp, Glycine max
ggagagagagtagtacatcggaagactcagtgagtttactgtttctctgactttgatgcatgcaggttgaagagtggaagacggtgaaaactaagaataatagaattaaataaaattcagagtaaatgaaaaaaagaaggaggtggagagagtgatgtagtgagtagtgagtgtagacaaggtttggtctttggggcggatgtggagcagtgcagggttgccgcaggggggtttctctccgagtgggagggggggagatgatgatttcagccttttaagaggaatgtgacactaggataatgctgaagaatggaaaa

SEQ ID NO: 2663 - DNA, 349 bp, Glycine max
ggaatcgccaagttctgctcgtaaagtggttgttcatctcagagccaccggcgatgctcctattctcaagcaatccaaattcaagatagcaggaactgataaattcgctaaagtgatagactttcttcgccgacagctccggagggaaacattgtttgtatacatcaatagtgctttttcaccaaaccctgatgaattgggcagtgatttgtttaataagtgtgggggtgatggcaaactggtggtcggggacgcgtgttctatggcatggggctaaccctgaatgatggctgcaggttacaaaagctccatattgtgaagacattgtttccgttcagaaattcgggac

SEQ ID NO: 2664 - DNA, 187 bp, Glycine max
tacggctgccaaaaaacaacaaaaggttacgcttccaaaaaaccaccaaaaggtaccgcttccaaaagaccacaacacggtaccgcttccaaaaaaccaccaaatggtaccgcttccaaaacaccacccaaaggtaccgctgccaaaagaccacactaaggtacagctgccaaaagaccacacaatg

SEQ ID NO: 2665 - DNA, 402 bp, Glycine max
cggacgcgtggggacagaagggggacagaacacaaggcacagcacagcgcagcgccgcctcaacatctcaactttcccttcgatctcattctcaggtgttgttgaagcttcctgtgttggcttggtatccctgcaagtgctgctgtagcagattccaaggtgaaaggttcacgttgaactttctttcatgtttgaacgggctattatccatttgggagcaattgagttgcttagagagtgtttttcttcttctagaaaaaagaacaggcccttgcctacaagacccacctgtatgcactgcctggaatacaccaacctttgttgttgttcttgacaaccttcgctacatttgcttcccaagccaaaggcgtctgttgtgatttttctgtctttggaactttt

SEQ ID NO: 2666 - DNA, 356 bp, Glycine max
gggtctctctctctttatctcactgcgactcactctagtgagagaaggaagaagcgaagaacaagtacacacacacacaaacacaagcatagttgaaaatggctctgcttagcctctcgtcgctgcaatgaagaaacgtatgtttttcttctccgaagaagaaaaatggctctcggcgacgatgcgcagcatgactctccctcgttcctcgatgcccttcgctgcgaagagcgagaaaccttcgaggaagactttgatgagaacggttatgagcgtgagaccgatgacaacgaaccctctgtgataaagtcgcaatctttgcccttggttttgcacgataatgacctgttctggga

SEQ ID NO: 2667 - DNA, 328 bp, Glycine max
gaacatttgtctcgcatctttcaatttgaatcaacggttatacccttttctatttgagcatcatcatgtccaccgcagcgcagcccaaggccaagaaaacggcgtcgtccaagaagcccctctcccatcctaccttcgccgctgcggggggcggaggcgatagcgagtctgaaggagagaaccggttcgagcgaagaggcgggtgcgaggttcatcgagggcaagcggagggggttgcctccaacctacaggaggggtgttctcgttcatctcaggaagtctgttgctgctggcaagctcgttaaagtcaaaagctctttcaagctcg

SEQ ID NO: 2668 - DNA, 174 bp, Glycine max
gactctcaagagatacgacacattaccagtcttcataaaaccccaaagcactctctctcgtgactcaatcacttcgttttctccgctttcatcttctcatctcttctcttttccctgctaatcatggcaaccttgtcaactgtgtgggggtcgccccattgcatgtttcaaaca

SEQ ID NO: 2669 - DNA, 245 bp, Glycine max
  modified_base (202)..(202): a, c, g, t, unknown, or other
gggtcttggcctgtatttgtatcatgaggatcaaatgtctaatttttaagcttctaaatttttgttttggttggatgtgatattgtattgtttcttctcgttgatgtgaatagaagtagacaataggtggctgttaggtacgtgggggagggcactgtcaagtatggtggaaaacttgaagccatagcgttggtgggaggantgggggatgcgtaggtgtagggagggggttttattgctcaggt

SEQ ID NO: 2670 - DNA, 74 bp, Glycine max
aaggtgaaaatcagcgacgcaagtcttcatttgctctcttctcttcttcgtcatgttcatatcttatgagctgg

SEQ ID NO: 2671 - DNA, 180 bp, Glycine max
ggtcacattctacaagaacgaagtactactacaagggaagaaaaacttagctactacggacggatcagagagagtggctcaagcaatggcatcgaattctggcttgcgtggttcctctcaggatgtgttggaaggtagccctcatgtgagtggctccacacgcctgaatgtggggagtgg

SEQ ID NO: 2672 - DNA, 344 bp, Glycine max
ggtgtgagtgaagaagcagagggagtagcggcattaaaaatgcagatcttcgtgaaaactctgacagggaagactataaccctcgaggtcgagagcagcgacaccatcgacaatgtcaaggccaagattcaagacaaggaaggcattcctccggatcagcagcgtttgattttcgccggaaagcagcttgaagatggaaggaccctggccgattacaacatccagaaggaatcaacccttcatctcgtcctcaggcttcgtggtggcatcattgagccttccctcatggctttggctcgcaaatacaaccaggacaagatgatttgccccaggtgctatgcccg

SEQ ID NO: 2673 - DNA, 362 bp, Glycine max
gatctttcactcgttctctgaaattttaattgacttttctcccctcataaaaaaaacctaccaatggctcccgcaaaggcagagaagaagcccgcggagaagaagccggcagagaaggccccagcggagaagaagccgaaggcggagaagaagatatcgaaggaaggaggaagcgagaagaagaagaagagaacaaagaagagcgttgagacctacaagatctacatcttcaaggtgttgaagcaagtgcaccccgacatcgggatctccagcaaggctatggggatcatgaacagtttcataaacgacatcttcgagaagctcgcccaggagtcatcgcgtctcgctaggtacaacaagaa

SEQ ID NO: 2674 - DNA, 320 bp, Glycine max
ggccatttttcgtagctgctgttcttgcgcgtgaacaagcctcaggtaagccaaaaccatggttaagcataacaatgttatcccaaacggacacttccgtaagcactggcagaactatgtgaagacttggttcaatcagccagcacggaagacaaggagacgattggctcgtcagaagaaagctgtgaagatattccccagacctacggctggacctctcaggcccattgtacatggtcaaactttgaaatacaacattaaagttagacgtggaaggggattttctcctgaagaactccagggaacagggattcccaaaa

SEQ ID NO: 2675 - DNA, 301 bp, Glycine max
gatgccgaaaagtactaccaagatggcctcagttgtgtatctcctccttggcttccatctcaatgttatcatgtcaagttccttacccgcaactactcaactgtttgcaaaacagtatccatccacagaacccgtggaagaaaaactcacccaacaccacgtcaatatccataacaccataacgggggaacacccaactgctatgaaaactgttttgactcctaaggggtccattcatggttttggggctacttacatcatggatgatcctctatctaaaggaccaagtccatcttcaaag

SEQ ID NO: 2676 - DNA, 195 bp, Glycine max
taagttgggaattattgctcccatcgccattggtttcattgtcggcgctaacattttgttgggtggggccttctctggagcggccatgaaccccgctgtgacatttgggcctgctgtcgtgagctggacctggaccaaccactggatccactgggccgggcctcgcatcggtggtggaagcgctggccttgttta

SEQ ID NO: 2677 - DNA, 59 bp, Glycine max
tggggaggtaagaagttgtgctttggcatcaccgtggcttcgggacgagaatctcaatg

SEQ ID NO: 2678 - DNA, 262 bp, Glycine max
gatgcttatgagataaactgcaggcgtaacaaaagttgcgtagccatactctgattcattagtgaagaaaaatggcaaccatcatcgccggcatcccaactacatcgatcactcgcgcaggtcttgtgctcaaacgacctgttggagcctcgtcctctaccgttcttggattgccagcactggctaaggcagggaaagtgaggtgctccatggaggaaaagccttcaagcagctcacatatacggatgggggcattcttgtt

SEQ ID NO: 2679 - DNA, 141 bp, Glycine max
gacctaaaaattgtaccgatatggcttcacttgtgtgtctccttttggccttgcatttcatgggtatcatgtcaggtgcgttaggagcaaatactgaagtgtttacaaaagagtctcggacgtctctatcgaggagaaccg

SEQ ID NO: 2680 - DNA, 197 bp, Glycine max
ggaaaaaaaggttatgatgccagaaaagaaaagaaaaaacacttgggacgggatttttaaatccaaggcagatagatctgtagactgaagttaattgtccaaaattcgccagttagtcactgagttcatccattcatccttcgcttatccctcgtgtttgggtcatggcaatttgttcctcactttcatcgtcatcg

SEQ ID NO: 2681 - DNA, 187 bp, Glycine max
acaaggactctcggcaacggatatctcggctcttgcatcgatgaagaacgtagcgaaatgcgatacttggtgtgaattgcagaatcccgtgaaccatcgagtcgttgaacgcaagttgcgcccgaagccattaggccgagggcacgcctgcctgggtgtcacacgagagggggggggggggggcggg

SEQ ID NO: 2682 - DNA, 289 bp, Glycine max
gactcacgacgccagactactcatctactcattttcattttctaagtactttgctctttctcacattcaaatgcaaagcccgccaccctttttcttccttgatgtagcaaaattcaaatcccactttagattgttcccaattcccatcgccttttctatttggaaactatggctttatcattggaagtttgagattccaacacccccatttcacttttcctttgtttggttttaaaaatttagttttttttcttcttttcttctcactttgcctgtttcccttttgttt

SEQ ID NO: 2683 - DNA, 373 bp, Glycine max
ggaggcggaacctggagtggaagtgcgatcccagtgttagtgtgtatttcctctcttctcactccgggatcgatattttcaagaacagatcgaaaagccgttcatcgatttgttggatctgtgagtgagaagatggttactaagacagaggagactcaattgaacaggctcgaaaaccaggtcgataacggcggcggcggcgcgtgggagtacctctgcctcgtgcggaagctcaaagttcggcggtcggagaaagttctgaagcacggtctctccatccttaacgacctcagacaacgattctctctcggctccgatgaatggaccttgtatgagcaggttgctgttgctgctatggactgccaatgtctcg

SEQ ID NO: 2684 - DNA, 336 bp, Glycine max
gattgagtacaacttcacattttagaagaataccccctcttttgctgcatcagaggagttgtaaattaagagcatggctgcacaagctcttgtatcatcatcttctcttaccttctcagcggaggctgcaagacaaagtcttggaccaagatcactccaatctccatttggcttctccagaaaagcctcctttcttgttaaggcagctgctaccccccctgtcaagcaaggatcagacagacctttgtggtttgcatcaaagcaaagtctttcttacttggatggcagccttccgggtgactatggatttgaccctctgggactttcagaccctga

SEQ ID NO: 2685 - DNA, 200 bp, Glycine max
gattgagtccaacttcacattttagttgagtacgtcatcttttgcggcatcagaggagttgtcacttaacagcattgctgcaatagctcttactctcatcatcttctcttactttctcatcagaggctgcatgtcaaagtcttggacgcacatcattcacgtccagatttggtttctccagatatgcatcctctcttgtt

SEQ ID NO: 2686 - DNA, 304 bp, Glycine max
ggcacttcaattgcaatcaaattagttcattctctttgcgcagttccctacctctcctttcaaggttcgtagatttcttctgtttttttttcttcttctttattgtttgttctacatcagcatgatgttgatttgattgtgttttctatcgtttcatcgattataaattttcataatcagaagattcagcttttattaatgcaagaacgtccttaattgatgactttataaccgtaaattaggtctaattaaagtttttttcataaagattttcagatccgtttacaacaagccttaattgttg

SEQ ID NO: 2687 - DNA, 207 bp, Glycine max
gagagaacaagaatcaaagaatggcaactatgactggtgtgagcctttcaagccccagggttttcttcaacgcatcaccctcgccgcaaaacacgtacgccgtaaagttcgcagttccactcagccaagggactcgacttggtagtgtcaggttgggtcgggtgatgaggatgcgagccgttcgcgcagctccagagcgcagttcgg

SEQ ID NO: 2688 - DNA, 300 bp, Glycine max
gcagctgcgaaaacctagtgcaccgtaagggttgtgaagcaggcagagaagagccatggtgcacgtttctttctagcgaaactatgggaaaacgttcaagaagcctcgtcgtccctacgagaaggagcgtttggacgccgagttgaagctggtcggtgagtacgggcttcgctgcaagagggagttatggacggtccagtacgccctgagccgcatccgtaacaacgccagaaacctattggaccttgatgagaagaacctcgccgtatcttcgaggggtaagcccttctccgaagaatg

SEQ ID NO: 2689 - DNA, 366 bp, Glycine max
gactcctttccgtcacttttggggaagaggtcgagtttcacagcagcaatggtgtacgtcaaggctcagaaatcaaaagcctacttcaagagatatcaagtcaagttcaagagaagaagagagggaaaaaccgattaccgtgccaggattcggttgattaatcaggacaagaacaaatataacactccgaaataccgatttgttgttcgctttagcaacaaggacattgttgcacaaataatatctgctagcattgctggcgatattgttcttgctgcagcatatgcacatgagctgccacaatatggtcttgaagttgggcttacaaattatgctgcagcttattgcactggtctcctgttgggc

SEQ ID NO: 2690 - DNA, 119 bp, Glycine max
gagggtgtttgtcgtcgctactaagagttgctgcttcttcagccactccgcaactcgcagcctctgtgccctcaacaaccatggctgaaatcgaaactaccgttccagatcccacccaa

SEQ ID NO: 2691 - DNA, 310 bp, Glycine max
gggtgaagtctggaaagaccagcgtgcaggttcttcaatcttctagagagagaaagttaaggattgaaatttggatcggagagagagagagagatagcgttgaatcctcaattgtttcctaatggaatgcccgttcctttcgtgaacgagatgtttgtgttggccagagacggcgtcgaattcgaggtcgatcggattcctgcctctggaaatcatgggggtcatctcaaaacagagggaatcgtgtatttgtcaaatattcggatggtcttcgttgctaaaagttcagttggacacttcactgcgtttg

SEQ ID NO: 2692 - DNA, 306 bp, Glycine max
gacgtaagatccattctttcttaattctcacctccctcactcgttcattcgaacaaaaccctttttagtttttttccgcctctgtttctctctctgcgctgcattttggtggcatcatcagagatagagacttgagtgtgagagccacaacttctccaattcttcaaaagggtgaaagtttgaaggaaaagaaatggttggtgcgataaaggcacggattggagacgcggtgttgacgttcatgtgcgtgttctgttcctctgtgttgggaattgcctcatggtacataaacaatgcacttaacct

SEQ ID NO: 2693 - DNA, 357 bp, Glycine max
ggaaggaacttttgtactttctctggggtgtgtgtgtgtgcctgtctcacaccacaaacactgaaagtacaatcttcttgtggttacaaaaactctgaaaaacacacacacacacacacttcttatgcctatggctggtgagcaaggtgatagattctcctccattaccataccccttctcgatgatgaaaaattgcaccaagtgaatggttcagatgaggctttggtggccaaaacttgtgatctacacacacctcatgtggataacacctcctttttcaagacctgcttccacctcattaatgccctctcaggagttggtattatttccatgccttatgcactggcatctggggg

SEQ ID NO: 2694 - DNA, 330 bp, Glycine max
gctctttctaaaaaccagaaacaacaaacacaaaccgaaaaggcgaaaggggttttccgagtgagatctagggtttccatcgattcggagagaggatattgatcgaacgacctcagcgagcaaggacaggaggtggagtactagatcatggattcggtgccttcgaattcgcatggaaacctcgatgagcagatttctcagctcatgcagtgcaaacccttgtccgagcaagaggtatgggtcttgtgtgataaggcaaaagagattttgatggaagagagcaatgtacagcctgtgaaaagtcctgttacaatttgtggtgatattcat

SEQ ID NO: 2695 - DNA, 243 bp, Glycine max
gatccttcgtccagctagcaccacattcacctgaggcttccaaagcaatggcgtcccttgcagcatccactgctgctgcttcccttggcatgtcagaaatgcttggaaaccccatcaacttcagtggtgccacagggccagctccatctgcggtcagtcctgcctcctgcaagacggtggctcgtttctccaaacggaatgctacaccacgacctccaggaaaagctgctgctgctgctcctg

SEQ ID NO: 2696 - DNA, 369 bp, Glycine max
gaatgaaacaaaatattactacttcccttacctttctctctctctcaaaacctcatttgtcgtcctcttcatcaacctctttcttctgcctcaccaaccaatttgttttctttttgcaatgctggtgcttggaagcatctctccattgaatgtgatagcttcaattctccaacatttgtagaaatagtttaacatcgacaagtgtgaagctctgatattaatttggtcagggcgatggtccagacagttatgttagtgttccatgcagcagtttgctcaccatagttacggttagatgtggacactgtgccaatttgctgacagttaacatgggagcatcacttcaaacttttccttctcaagacacta

SEQ ID NO: 2697 - DNA, 292 bp, Glycine max
ggctagagtggattctggctcgcatggttctccaccctgaaatccaagcaaaggcacagcgcgaaatagacttcgtttgcggatcctccaggctcgtatccgaagcagacattccgaacctgcgctaccttcaggtgcatagtaaaagaaaccctccgtgtgcagccaccaggcccgctacgctcgtgggctcgccttgctgtgcacgacgttacggttggcggcaagcacgtgattcccaagggcaccaccgcgatggtgaacatgtgggccatagacccacgacgagagg

SEQ ID NO: 2698 - DNA, 73 bp, Glycine max
aggggtgcttcgtctcagatcattctgcgcaagtgggacagagagaccgaagtgacctcagcggcgggtgcgg

SEQ ID NO: 2699 - DNA, 108 bp, Glycine max
acccacgcatccaaccgctcgtaagtaacgatgcaaggggactacacacgggggctagagaagtgatgagggtctttgagtgccgcagtggacgccctcgacgatgca

SEQ ID NO: 2700 - DNA, 368 bp, Glycine max
ggagttgagaggatcgtgagaggggcagtagccgagattccgtgagttgcaaaaatgaagacgattctttccatcgagaccatgaacatcccggacggcgtgagcatcaaagttcatgccaaggtcatcgaagttgagggcccccgcggaatattggtgcgagacttcaagcatttgaatctcgattttcagctcattactgacgaaaacggtaaaagaaagctgaaaatcgacgcgtggtttggttctcggaaaacatccgacgccattcgcaccgccttgagccacgtggagaatcttatcaccggcgtcaccaacggctaccgctacaaaatgaggttcgtttatgcccattttcccatcaacgc

SEQ ID NO: 2701 - DNA, 135 bp, Glycine max
ggcagttcaattctaatctattcgattctctctgtgtatttccctatctctcccttcaagatgcatatcttcgtcaagaccggggcggcgataccatcatccttgaggtgggagggtctgacaccatcgacaacg

SEQ ID NO: 2702 - DNA, 216 bp, Glycine max
gattccaattcaaacagaaaacctaatttctcaaagttgagttcgcaccaaattttcctcactaaaatgtctggtcgtggaaagggtggcaagggtttgggaaagggaggtgccaagaggcacaggaaggttctgcgcgataacattcaaggaatcacgaaacctgcgattcgtgagttagcgagaagaggtggggtgaaaaggatgagtggtttg

SEQ ID NO: 2703 - DNA, 152 bp, Glycine max
gagagaaagagagagaacgatgtcgaagcgtggtcgtggtggttcggcggggaatgagttccgcatgtcgctgggtcttccagtggcggcgacagtgaactgcgcctacaacacggcggcgaagaagctgtagatcagttcggtgaaaggga

SEQ ID NO: 2704 - DNA, 285 bp, Glycine max
ggagtaagaggctgccgtcaccgtcaccatcaccgttaccgttactgtcagcgtccgttatcctctccgaacccgtgaaaccctcgttccaccggtttcctctgttctcgaatcctcacactcttcgaaccatgaggctctccaagtgtgtctctcacgccggggccaaacccgaatccgaggcggaagcggaacccgattcacctcagactctcgttgtggtttcattcggcaagttcgcggatttccccgaccacgccctcttgcgatatcccttgaagcaac

SEQ ID NO: 2705 - DNA, 302 bp, Glycine max
gctgaatcgtcgtttacttctcagcagcttcggctagggttcagaaacgaaaaagggttcggtgttctgttcgcgatgagagccaagtggaagaagaagcgtatgaggaggttgaagaggaagcgccgaaagatgagacagagatccaagtagtgcgttaaacctagtttgttgctgttgcttttacaattgcgtaggttgtcgaaggggacacccagttgttagtggcactggtttctccgttttgatgtgtgatacattttgttggattcaagtagtttacgttcgtcctaggttattag

SEQ ID NO: 2706 - DNA, 195 bp, Glycine max
tgggagggttagattcgttgatgttgttctaaaacgtcgacacattctccgtcgccacaacagcaatggctccgaacaaaggtgtgaaacgttcggttgacagcacacaataagaacgttcacgaaaacgtgacgaatcctttgttcgagaagcgtccgaagcaattcgggatcggaggcgcactgccgtcgaat

SEQ ID NO: 2707 - DNA, 287 bp, Glycine max
ggagcgaagaagatattagggtttttgagtgcggtgcggcgatcctagcactctcgtctgcagctttcgccgacagcttcattcagcatggctgagcaaaccgagaaggcttttttgaaacaaccaaaagtgtttctcagctcgaagaaaagtgggaagggaaagagacccggaaagggtgggaaccgcttttggaaatccgttgggcttggatttaagactcccagggaagccatcgaatgaacctacattgacaagaagtgccccttcactggcaaggtttccat

SEQ ID NO: 2708 - DNA, 313 bp, Glycine max
gacttcatttcactcacccctttaactgccatccattctttctctcttgaggggcaggggtaccacttcaaaaaatatcctctttgatccctttctctgtttccttttctttatcattattatataataacaccctctaaatacttcctttacccctctttctctctctcatcttaaacacaaacaactatactactacttcaaactttgacatccaactgtgctgtacaactctatctcacccatcaccgcctacaaaggcacacgcactatcacgataccaaccccatctgccgacaagatccaactcact

SEQ ID NO: 2709 - DNA, 334 bp, Glycine max
gaaccaagtttgcttgcgtgtatattcattttagcatcaaggttgaatctcagagaaaaagaaacatcgacaagcatgtctggaagaggaaagggaggcaagggtctcggaaagggaggagccaaacgacaccgtaaggttctgagggataacattcagggaatcaccaagcccgcgattcgccgtctggccagacgtggtggcgtcaagcgtatcagtggtcttatctatgaagaaactcgcggtgttctcaagatctttctagagaacgtcattcgcgacgctgtcacctacactgaacacgctcgccgcaagaccgtcactgccatggacg

SEQ ID NO: 2710 - DNA, 298 bp, Glycine max
gaaatacaacctcacaacacactttgtacactccgtccctcttacctgtcgctcaaatggcttcactgacgcaaactttcatgtccctcgcctctcttcccaatccagtacccggtaccaggatatcccagccaagtgcacttgccctcgcaattaaggacggaagaagtttcccatccatgacattgcagcccagatgatgtcggtttcgatttagatctgtggcaaaaccacacacagtgaagaaggtgtgacacacagttcagacgcaattagcactaccagaggaatcatctgt

SEQ ID NO: 2711 - DNA, 150 bp, Glycine max
gcttcttcagccatttagctccatagctgcagcattagggtttttcatctgcttcaatggggaagggaacagggagttttggtaagagaaggaacaagactcacactctctgtgtgaggtgtggccgccggagcttccatcgccagaaga

SEQ ID NO: 2712 - DNA, 126 bp, Glycine max
ggctttcttctccaccatcatcgtgatcatgtcacatcacaaccaatccaccgactaggcttatttggtccaagacatcgctcatatcctgcatgctaccaacacacacagataatgccttccaca

SEQ ID NO: 2713 - DNA, 174 bp, Glycine max
gagaataaggttaaataaattctcgtagcagcgttttgtttcccagggccggcttttgctctgcctctgtgcagacatgttgttcttctcgtacttcaaggatttggtggggagggaagtaatcgtggagctgaagaacgatttggccatcagaggagcattgcattctgttga

SEQ ID NO: 2714 - DNA, 333 bp, Glycine max
ggtgacagtgaagagatggaaggcatagtacacaggacagttgaagtgaatggcataaaaatgcatgttgctgagaaaggtgaaggtcccgtggtcttgttcctccacggcttcccggagctctggtactcctggcgccaccagattctggctctcagcaacctcggctaccgcgccgtggctccagatctccgcggctacggagacaccgaggcaccagcttcaatcagcagctacaccatcctccacttagtttctgacatcgtcgcgctcattcactcacttgctgtggattaagtcttcctcgtagcccatgattggggggctgtcata

SEQ ID NO: 2715 - DNA, 367 bp, Glycine max
ggagaaaaacgagccaattcatcattttctctcttctctgcttcttcttgttcaaatcttaggagctgaggagaatcaatcgagagaaatatgtctggtatcgctcgtggacgccttgctgaggaacgaaagtcatggcgcaaaaaccatccacacggtttcgttgccaagcccgagactctacctgatggcaccgtaaatttgagtgtctggcattgcactattcctggcaagagggggactgattgggaaggtggatattttccactgacaatgcacttcagtgaagaataccctagcaagcctcccaagtgcaaattcgctcaaagtttctttcaccctaatgtgttaccatctggaactgttt

SEQ ID NO: 2716 - DNA, 354 bp, Glycine max
gaacctttgcattctattcattcaagattcagcaagtgcgttttggaagcagagaccgaaatacttcgagatggcccgtacaaagcaaactgctcgtaagtcaactggaggaaaagctcccaggaagcagcttgcaaccaaggctgcacgtaagtctgcaccaacaactggtggtgtgaagaagcctcatcgttatcgccctggaactgttgctcttcgtgagattaggaaataccagaagagcactgagctcctaatcaggaagcttcctttccagaggttggttcgtgaaattgcccaggatttcaagactgatctgcgtttccagagccatgctgtgcttgcattgcaaga

SEQ ID NO: 2717 - DNA, 359 bp, Glycine max
ggacgacttaaccccaaacgaagaaaaaagactgagagcaattgcatcaacaacaaattgaaaggatgtcgatcttcgagtacaacggaagcgccgtggtggctatggtcggcaagaactgcttcgccattgccagcgaccgaaggctcggcgttcagctccaaaccatagccacggatttccaacgcatttccaagattcacgacaagctcttcatcgctctctctggcctcgccaccgatgctcaaacattgtatcagcgtcttgttttccggcacaaactgtatcagcttcgtgaagagaaggatatgaaaccagagacctttgccagcttagtctctgctctgctttatgagaaa

SEQ ID NO: 2718 - DNA, 60 bp, Glycine max
gacatgttctgataccgaccatggcgcacgagtaagaaagatagaatctcggtactttcc

SEQ ID NO: 2719 - DNA, 380 bp, Glycine max
gaatgcataacactggaagccaaaatcaattgtatttcttgtttgtttttgtttaacgctgttgcgattcactcttcttcttctctttagggtttttgtctgttctctgaatctcacactatgaatccgcttccttttcaatctgcaccgccgccccctcctccatggtttccgatattaccctccgaaccaccaaattcaacctccttttgggacaacagaaatgtctgcgatcgcctcagagaattgcaacacactctccatctcgcaaagtcaatgcagaaggagttagagatgttgaagatgataaaagatggtaaagggtctttagaagatgtaaaagatgcttcaaacgaaccttgtccttctggttttgtaaa

SEQ ID NO: 2720 - DNA, 287 bp, Glycine max
ggtgttgctttagaatctgggtgctgcggctgaagatctcgattagccgaaaattgcaagaacggcttcaggctcttgcgatcaacaaacgcagcgttttgatctcagatttgagggggagagaatggcaacaacagtgagaagtctgaagataaagacaagtacgtgcaaacgtatagtgaaggagctgcattcttatgagaaggaagttgagagagaagctgccaaaacagctgatatgaaggaaaaaggagccgatccctatgatctcaagcaacaggaaaatg

SEQ ID NO: 2721 - DNA, 389 bp, Glycine max
ggagagagagagagagagttggaagaagaagaagggaagatgaacttgagatggatggaagcggtgctgccgctgggaatcatagcgggaatgctctgcgtcatgggaaacgctcagtattacattcacaaatccgcgcatggcagacctaagcacatcgggaacgatatgtgggacgtggccatggaacgaagggacaagaagcttgtcgagcaagcctctccctccaattaacatcgttgttttgccaatgacattgtgaagaaaataaactgctcacctggatttacgactgtgttctagggaagcagggttaatcacaagaatcaaattccgtctgttttcttgtatgcaattcaacataagatttataaatatatctatgttcc

SEQ ID NO: 2722 - DNA, 399 bp, Glycine max
  modified_base (260)..(260): a, c, g, t, unknown, or other
gacaaacagacacacagtcggttcttccttctcaaatattcttgagatccccattttctccgaagcaaagccatggctaagggtcctggtctctactctgacatcggcaagaaagctagggatctgctgttcaaggactaccacagtgaccagaagttcaccatcaccacctactcaccgactggagtggctattacagcatcaggaaccaggaaaagtgaactgtttctggctgatgtcaacacccagttgaagaacanaaacatcactactgatatcaaagttgatacagattctaatctcttcacaactatcactgtcaatgaacctgctcctggtctgaaggctatttttagcttcaaagttcctgaccaaaggtctggaaaggtggaagttcag

SEQ ID NO: 2723 - DNA, 362 bp, Glycine max
ggcagacgccgtgactagacactcatctcactcgcgccatcttagggtttctccttttgtttcgcaacatggttgccgctaagaaaactaagaagacccatgagagcatcaacaacaggctcgctcttgtcatgaagagtggcaaattcaccctcggttacaagaccgttctcaaatctcttaggaactccaaaggaaaattgattatcattgctaacaactgcccccctttgagaaagtcagagattgaatactatgctatgttggcaaaggttggagttcatcattacaatgggaacaatgtggatttggggactgcatgtggaaaatattacagagtgtgctgccttagcaatattgat

SEQ ID NO: 2724 - DNA, 388 bp, Glycine max
acacttcaaaatcctctggtaacccttattttatctattctctctctttcttttgtgttctaagcagctagaagcaatggagaggaaaagatgccatgcctctttcaccatgtttgcaatgcttgttggagtgatctctcagagccttgtcattcctgtagtagtccaagtactccatcaacaccctcaggtggaaactgtggatcatcacctccacaacatcatgattcaacaacaccctcaactccatcaacaccaacaaaccctccctcaggtgatactatggaggtacccctcaacacctgtcactgtgagcccagcaactactccagttgaccctggaacccctagtattccctcatcatcacccattccttcaccatctccc

SEQ ID NO: 2725 - DNA, 217 bp, Glycine max
ggagactgtagattctgggaatgattcttaaggagcaggtggagggtttggtgggtgttaatatttgacttgtgcattccacacgctgcttccgattgaaggcatctaaggagagaaaaatgcacgatttctgcttcacgattccctacggattgatgttagtgggtggtcgactgttcgcctaccactgccacacggatcatcgcttctctcgccc

SEQ ID NO: 2726 - DNA, 221 bp, Glycine max
cggggttggtccctacattgccttctttgcttttctcgggctagcagtcgacgacgccgttttgacccggcgaccggcaaatggtggagccggtggagcttcgctgcgacgaccagctctcgcatctgtcagattcaagcaatggtgatccgtcgtggcggttgaacttccacgggtttcagccatcctccaaacaagcggaaaagcagttgaacccccct

SEQ ID NO: 2727 - DNA, 283 bp, Glycine max
gagtgttagtgttcctcaagccatcgtaccgtgttgcctctctgcaatctacagccaaaatgcctttcaagaggtacgttgagatcgggagggttacccaaatcaactacggcacggaatatggcaggctcgtcgtcattgtcgacgtcattgatcagaacagagctcttgtcgatgcccctgatatggtgaggtcccaagtcaatttcaaaaggctttccctaaccgatattaagattgacattaatagggtccctaagaagaaagatcttgtcaaagccat

SEQ ID NO: 2728 - DNA, 176 bp, Glycine max
gactcaccacttcaaaacactcataacacaaagcacaaagcaaagctcatccttgagttaaaaaatggcagcagcttcttccatggctctctcatccccatccttggctggcaaggccgtgaagctgggcccatcagccccagaagtgggaagggtgagcatgaggaagaccgtca

SEQ ID NO: 2729 - DNA, 275 bp, Glycine max
gacacagactttattacagttgttgtattgtaattaagcaagaatattaggcaatggagtcttctggaacttcaactactcttgctctttttttaaccatcaatttgcttttctttgtcatggcaagtggctgcgacacttgcacagagcctaagccaaagcctatcccattccgttaccctaaccctagtgcgtgcgcgaagaggtgccccagggacggacttaagctcggaatgtgcgggaacgtgcttaatggaccaattggtgctattgta

SEQ ID NO: 2730 - DNA, 228 bp, Glycine max
gggtcatagaatcttttggcaaaatgcaaaagtgctagcatgatttcgtgttcttccgctaatgtgtaaattttccgttggatttgcttgctataagtttaggagggaacttttgttttttctcctatgcactgttttcaggttttgccagagaacgctttcgtgcaaattttgagattgagcgattgaatgaaaatttgaatcaggcgctcggcccagtagttgcaa

SEQ ID NO: 2731 - DNA, 365 bp, Glycine max
gactcatctcttacaacgaaaccctcttcatcttgttctatctgtgacgagcatcatggcctcaagagcagtgttattgttggctatgtgtgtgcttccggcgatggttgtggccattcgcccagcaaagaaccctttttgcgtgaagggtcgtgtctactgtgacccttgccgtgctggttttgagacctcagctaccacctacattgctggtgctgagattatgttgcaatgcaagagcagggttagcaacgaggttgtgtacacgaagaaggggtacaccgactcaaccggagcatacacaatgtacgtggatgaggatcacgcagatcagatctgcagtgccaagctttgtagcagccctc

SEQ ID NO: 2732 - DNA, 91 bp, Glycine max
cttgaacatacgaacttgtataaattactgggaattggtaactacgttttttgagctgaaacttttactgaattttctagacatctggacc

SEQ ID NO: 2733 - DNA, 307 bp, Glycine max
taatttgggaattattgctcccatcgccattggtttcattgtcggcgctaacattttgttgggtggggccttctctggagcggccatgaaccccgctgtgacatttgggcctgctgtcgtgagctggacctggaccaaccactggatctactgggccgggcctctcatcggtggtggaatcgctggccttgtttacgaagttgtctttatcagccacacccacgagcagcttcccaccactgactactacagggggggaaatgaaattaaatgcctgcacaccttacccttaaaaaaaaccgccgcc

SEQ ID NO: 2734 - DNA, 142 bp, Glycine max
gattgccgtcacacagagagagaagagacaatgaagtttaacccaacggtttcctcaagccgtccaaagagccgcaaggctcacttcaccgctccgtcgagcgtgcgtcgcgtcctgatgagcccgcctctctcgaccgatc

SEQ ID NO: 2735 - DNA, 271 bp, Glycine max
gggttattaaggagcatagggtgaagagggagaggggtgactgtgtgaaggatgaacgatctgaggattttgttgatgttctgcttgatttggacaatgaaaccatgctcagtgaagctgacatgattgctgttctttgggaaatgatattcaggggaactgacacggtagcaattctgctagagtggattctggctcgcatggttctccaccctgaactccaagcaacggcacacctcgaaatacacttcctttgcggatcctccaggct

SEQ ID NO: 2736 - DNA, 217 bp, Glycine max
gctcttaaagaatctcagtgctgaagagaaactcataagcatggcggtttgctagtcagtgcttgacttccttgcttctggttgtagtgttcaacgtggctcaatggcagcctctggtccctgccctgttcatatttggggactctgtggttgatctgcgaaatgattcccacctatacaccgttgttgtcgcacacttcccacattttggacgaga

SEQ ID NO: 2737 - DNA, 397 bp, Glycine max
gacctaaaaattgtaccgatatggcttcacttgtgtgtctccttttttccttgcatttcatggttatcatgtcaggttccttaccagcaaatagtgaagtgtttacaaaagagtctcctatgtctctatccacaaaacccgtggaaagactcacccaaccccacttttatttccataacaacaaaatgggggaacacccgactgctatgaaaattgttgagcctcctaaggcgtccatttctggttttgggactatttacatgatggatgaccctctaaccgaaggaccaagtccaacttcaaagcttgttggaagatgtcagggaatatatgctgaggcttcgcaacatgaacctgcgatactcatggtaacgaatttgttcttcactgagggcat

SEQ ID NO: 2738 - DNA, 351 bp, Glycine max
gatgccgaaaagtagtaccaagatggcttcagttgtgtatctcctctttggcttccatctcattgttatcatgtcaagttccttacccgcaactagtgaagtgtttgcaaaacagtatccatccacagaacccgtggaagaaaaactcacccaactccacttctatttccataacaacataacgggggaacacccaactgctatgaaaactgttttgcctcctaaggggtccattcatggttttggggctacttacatgatggatgaccctctaactgaaggaccaagtccaacttcaaagcttgtgggaagatctcagggaatatacgctttggcttcacaacatgagcc

SEQ ID NO: 2739 - DNA, 375 bp, Glycine max
aggaaaaagggttgagtagtagtgttgaggacaaggtgagttgtgttggggacaaggtggttgttgtggaaaaagtgagtagtgttgaggagaaacaagtggtttcgaaaacgattgagcaagggaaaagggtggtggaccctgtggaggaagaaaaaactgtcacaagcacgaggagtgtgaacttggtgtttggtgaagatataaggtgggcagagttagccgtgcattgtactgtgaagctggctacggatataactagggatcggtatccaggtctgaagggtgctcttgtcaagtacaaggatacacagggtgaattggttacaatcactgccaccgaataactgcggctagctgaacaatctgcccctg

SEQ ID NO: 2740 - DNA, 194 bp, Glycine max
ggcatcacacacagacaaacactcccattttctctctttctctttctctccgacctagcgagaccgagcgatccgatcctaatcccgcgatgctccgccgcgcaaccacctccctcatctccggcgcctcccgccgctgcctctccaccgacgtgccggcgacgccggcggcggattccgtcttcgcggacgcg

SEQ ID NO: 2741 - DNA, 65 bp, Glycine max
aacccacgggaggaaaacgggttcagtcgtattgttcaggcgatggtgatttgtctcggggacaa

SEQ ID NO: 2742 - DNA, 342 bp, Glycine max
gagagtggtggagtgtgcaaaagagcgtcgtagtcgcaaccctaatcagaagaagcgcagcttcaagcgagtgacagccaccagccatgggtcgtatgcagagccgcggtaagggtatatcctcttctgctttgcccgacagaaggacacctcctagctggctcaagatgccttcgcaggatgtcgaagaagatatctgcacgtttgctaagaaaggtttgaccccgtcgcagattggtgtcattcgcacagattcgcacggtattgctgagggtaagagcgtcgctggcagcacaatccttcgcatccccaaagctcatggacgtgcgcccgagagtccag

SEQ ID NO: 2743 - DNA, 401 bp, Glycine max
agaaggggacttcaacatctcttaataaagattagaaatcgacatatggggggagcaaagagttactcttgttttgcagtaatagctgtggccttggttttgctacttctgaatgtggctgtggtttgcaatggaggcaagacaagcacattcattaggaaggttgagaaaactgaggacatgccccttcatagtgatgtatttgttgccccttctggctataatgctcctcagcaggttcatataacacaaggtgaccaagtgggaagggccatgatcgtgtcatgggtgactgtggacgaaccaggaaagagtctagtgcattactggagtgacgccagccagcacaagagagtggccaagggaaatcatgtcacatatagatacttcaattattcttc

SEQ ID NO: 2744 - DNA, 362 bp, Glycine max
cggctgccagacgactgaaggggacttcatcatcgcttaacaaagattagaaatcgacatatggggggagcaaagagttactcttgttttgcactactagctgtggccttggttttgctacttctgaatgtggctgtggttttcactggacgcaagacatgcatattcattaggaaggttcacaaaactgacgacatcccccttcatagtgatgtatttgttgccccttctggctataatgctcctcagcatgttcacatgacacatcgtgaccaagtgtgaagggccataatcgtgtccccggtcactgtgcattaatcaggaactagtctatgtcatctctggactgactcccgccagcc

SEQ ID NO: 2745 - DNA, 76 bp, Glycine max
ggggaaggggtcagatttatcttgacgggagcaagagtaataataatgtgtataatgctacatcagcgggtatggt

SEQ ID NO: 2746 - DNA, 57 bp, Glycine max; identical to SEQ ID NO: 410

SEQ ID NO: 2747 - DNA, 316 bp, Glycine max
acttgagacacaaactcacacactttgtactctccgtccttccttcttcgatccagatctctctccttctccctcaaatggcttcccttctgcaatgttccatgcccctcgtctctctttccaatcgagctctggtacccggtaccaggatctccaacccaagttcagtttccctttcaattaagggaagaagtttcccatccgttacattgcagcccagagggcgtcggtttcagcttagatgtgcggcaaaaccagagacagtgaagaaggtgtgtgacatagtcaagaagcaattggcactgccagatgaatc

SEQ ID NO: 2748 - DNA, 388 bp, Glycine max
gacttcaattgcaatcaaattagttcattctctttgcgcagttccctacctctcctttcaagatgcagatcttcgtcaagaccctcaccggaaagaccatcacccttgaggtggaaagctctgacaccatcgacaacgtcaaggccaagatccaggacaaggaaggaattcccccggatcagcaacgtctcatcttcgccggaaagcagctcgaggacggccgtaccctcgccgactacaacatccagaaggagtcaacccttcaccttgtccttcgtctccgtggtggcatgcagatcttcgtcaagactctcactgggaaaaccataaccctagaagtcgaaagctctgaaaccattgacaacttcaaggccaagatccaggacaa

SEQ ID NO: 2749 - DNA, 392 bp, Glycine max
ggttggacgcatggaagcaaagcaaaggctgataatggcggcaacccataactcaatcataaatccccacatcaaccccaccctttctccattacaacacctggcactagagggataccatcttttattattatctatcttcactattactgttagatggatagacattgccataaacagcactttcctccccttacctgaaaagtttggtttctgattcttttttccatttcagcaaagtgggtgtggtttaatttaatttacttttagtatgagttatgggtgaattatttggcgttggaaaaagaaggaacatcagcagcagcaacaacaacaacaacagttctagtactagcgttcttgggttggatgtgaaggtgcaacagagccct

SEQ ID NO: 2750 - DNA, 390 bp, Glycine max
ggtggtgtcgagctgagaataccagttgctccagtagccggcactaaacaacatggcggacaaggcagtcaccatccgaaccaggaagtttatgacaaacaggcttctctccagaaagcagttcgtcgttgatgtccttcatccagggagggctaatgtttccaaggctgaactgaaggagaagctgggaagaatgtatgacgtgaaagacaccaacactgtatttgtcttcaagttccgaactcattttggtggtggcaagtccactgggtttggtttgatctatgattcagttgagaatgctaagaagtatgagcctaaatacaggcttatcaggaatggacttgataccaaagtagagaaatcaaggaagcacatgaaggagagaaa

SEQ ID NO: 2751 - DNA, 398 bp, Glycine max
tattcacacaactaactaagaaagtcttccatagccccccaaaaatgaagagcaccatcttctttgctctctttctcttttgtgccttcaccacctcatacctaccttcagccatcgctgatttcgtgctcgataatgaaggtaaccctcttgaaaatggtggcacatattatatcttgtcagacataacagcatttggtggaataagagcagccccaacgggaaatgaaagatgccctctcactgtggtgcaatctcgcaatgagctcgacaaagggattggaacaatcatctcgtccccatatcgaatccgttttatcgccgaaggccatcctttgagccttaagttcgattcatttgcagttataatgctgtgtgttggaattcctaccgagtgg

SEQ ID NO: 2752 - DNA, 165 bp, Glycine max
ggaggccatagtaaccattagttatactggtcttcgcctatcattaatcatgacgcaccaatctttctattcctcacagtcgcatatcacacgtttatccatgcccaccttccagactatgatggtcactctcacgatcgtccagatggaatgacatcatttcac

SEQ ID NO: 2753 - DNA, 304 bp, Glycine max
gaatgaaactagattccatgttccaaccacagtgctacgaaagtgcgtgcgagaaagagatcacatcacacatgggctattacccacagtttcctgcacgatcatgctcatgccacacctgccagattgccatgcccacacatcataggaagtcccaatcctaaccagcttgcttccgtggcacataagcatgatgatagttacgtcagccgaagctctcgccggtcagctcgcagagtgcgcataggtgcagccgccgttggctctcaggtccaccctgatgaagcaacatatcgggacactg

SEQ ID NO: 2754 - DNA, 309 bp, Glycine max
accactaccaaaggccccaagagaagccaaatacctactagtcgtcattgactacttcaccaagtggataaaagcaagaccactgtgggaaattacagctaacgaggtggaaaatttcacctagaaacacctcatctgcagctacggcctcccatacgccattgttgtggacaacgacactcagttcgaagcttagacttctgaataattcttgacaaggataggcatcaagcacctagtcacctttgttgaacatcctcaaactaacggttgggtagagacaaccaatagagtccccttgagagccct

SEQ ID NO: 2755 - DNA, 387 bp, Glycine max
ggatttggagaaaagaaaaagaaagaagacatttccttccgaattgaggaagggaaaggtgtcttggatggccaagtcatcttccttagctatcacgttgatctgcgccgccacggtattggtggcgatgagtcggtggccgacagccgtgggcggcggggaccaccacttgggaatgggatgggtttccagcacgtgcaaggggaccattgctgattgcctgggaggggaggagtacgagttggattcggagatcaaccggcgcatcttagccaccaacaagtacatcagctacgttgcgctgcagaggaacactgctccctgctctcgccgcggcgcctcctactacaattgccgacccggagcacaggccaatccttacagccg

SEQ ID NO: 2756 - DNA, 316 bp, Glycine max
ggagcatgttccctacacggatccatacactcccagaaaacatttttcattctatttctcagcaccagtcagcaacaacaacacccctttcctttccacaagacaccaaacaaagttcacagctttttttgttctttcacctcgattcacgaactgggtcatcctctgattgtggattattggatttcattttgagctacaccacacccccaagactttgactttcaacccaaaaccagctctttgtggtttgccaggttgccagttactgtgatatcataatggattccccaaaatctgttgtgtcacccttcag

SEQ ID NO: 2757 - DNA, 278 bp, Glycine max
ggattgaggaaggttaggcgaggaagggaaaaagaggacagaggttgcttgcgcaaatctagctaatctgggctttctgggacaaccagtagagaaagtaaaaggattgagattgagatttgagagaaagagacagagaaagagaaagaagaggttaaacacacacaaaacagaataagagaactctcccaccatgccatgcccaaaaccgtactacacaataatgcacaccaaccattcatttccttttgcccacatttactatcccacattatgtt

SEQ ID NO: 2758 - DNA, 254 bp, Glycine max
ggctcttggctgatatttcctgataagtggacagacgcttaaacagagaaactaacacagatttgcatgcatggggaaaataacgcacattgtagtaattcccagtgcagggtacagccacttcgttcccgttatccacttctcaaagagacttgttgagcttcacccagaaattcacgtcacatgcatcattcccattctggggtctctcccaagtgctgcaaaacccattccccaaaaccttccacaaaaca

SEQ ID NO: 2759 - DNA, 370 bp, Glycine max
gatcgacaaacacagctcaacaactgtgtctgcccaaaagtcatgttgatgttcttcttcttctccttgttcgcctccacttttcactgaacacttattactcactccttcatggccacttcgctctctttctccatttctcccaaaaccactgccacaacctcagccttccgattcaaagtctccgccatggctaccaccatcgccgccccttctaccaaggtggctcccgccgtcattgtcggcggcggaagagtgggtagggccttgcaggacatgggcaccggtcaagacctcctcgttcgccgaggagagtccgtacctcccaattttgagggtcgcatttttgtgtgcacaatgaacgatgatc

SEQ ID NO: 2760 - DNA, 373 bp, Glycine max
gactgatacaggaacagcagagaaacaaagttagaagtaaagaagatcatggcttctctagcaaccttggctgctgttcaaccagctacgatcaatggccttgctggaagttccctctctggaactaagctctctttcaagccctctcgccacagtgtcaaatccaagaacttcaggagtggtgccgtggtagcaaagtatggtgacaagagtgtgtactttgatttggaggatctgggcaacactacagggcagtgggacttgtatggctcagatgcaccttcaccctacaaccctcttcagagcaagttcttcgagacatttgctgctccattcacaaagaggggattgttactcaagtttctgatattgg

SEQ ID NO: 2761 - DNA, 389 bp, Glycine max
gaacgcttcatttgaatcaacactccttcctcttcctctctctcgtctattttagttgtaagactaagatctcatcttagattccattttgtctcttcattgcccccaaaataactttattttctctgaattattgcctacagcaactttgaataattctccttcgtatcaagtcttcctcatcttcaccacctttttatatttatgtgtctaagaacataaactataaaaccaaggcgagtgaaagaaaaaaaatgtcaggtgtgtctctagcagtgtctggtccaccagcagcaacagtggctgaagcagcaggtacaaagcctaaacgaagaacagaacaggcaccaatgggtggcatgatgggttcactgcgcgtgatagaactt

SEQ ID NO: 2762 - DNA, 207 bp, Glycine max
  modified_base (8)..(8): a, c, g, t, unknown, or other
cccacgcntcccatacagtcgtcaatacagtaccgacaggagtacagaacggaaatatacccttgaagggtatcaacccctttttgtaccccacttcgcctgcatttacgtctccgttggaagacatctactgaacctcctttaaccatactgggccttcacgtggcattgtttcaatacatggctgtaccttggctgaaacatgtc

SEQ ID NO: 2763 - DNA, 337 bp, Glycine max
gatgactgaactttgaagtataccgattctgggagacatcagaggaagcaatcatgagttccaaaggcaaagtgatgagagtgagagaagtggctgggtgaaagtcaaggagctcagatagatcacagcaagattaatgatagtggagtgagtaaggtttttggccaattagtgaacaacacaatgtgttccttttttgcaggcattttggttacagatacaatacaagaactgttcttagttacctcatagttcctacagatacacacacaacctgggttaagagagagagacattgagaggaagcatagcatggtactcttgaataaatggggcc

SEQ ID NO: 2764 - DNA, 60 bp, Glycine max
gtgttgatgcccagccatgaatatttgatgttagaatattgaaatattgcaattttattt

SEQ ID NO: 2765 - DNA, 165 bp, Glycine max
ttcttttgttccccctcccgcctcgtcgtttctccgcctgtcttgcccttctcgtcttcctttcgtctctgtcgtcttcggtctccctggctttgtgtggcgtggttctgggcgccttgggctctcgcttgttctgccttttgtttgttgcttcgtttccctctc

SEQ ID NO: 2766 - DNA, 265 bp, Glycine max
gcttgcaggcgaaagagaagatggccaccgttccagggcagctcgtgtgggagatcgtgaagaaaaacaactcctttttggtcaagcagttcggaagggggacccagagcgtcgaattcagcagagagagcaacaatctctacaaactcaattccttcaagtactctggtttggcaaacaagaaaactgttacggtacagcctgagggtacagatcacgctgtgttgttggctacaacaaagacaaagaagcaaaacaagcctgc

SEQ ID NO: 2767 - DNA, 360 bp, Glycine max
gataacactgtggctcttacaatcccagctcatagcattcttcatcttccaacgagaatcagtctttgtgttccaaatggctcgtacgaagcaaacagcaagaaagtccaccggaggaaaagctccaaggaagcagctcgccaccagggcagcacgtaagtccgctccggcgacgggcggcgtgaagaagccccaccgtttcaggccggggacagtggctctgagggagattcggaagtaccagaagagcacggagcttctcataaggaagcttccgttccagaggctcgtaagggaaatcgctcaggacttcgagagcgatctacgcttccagagcagttctgtctgcgctcttcagga

SEQ ID NO: 2768 - DNA, 298 bp, Glycine max
gggcgcgggtgaggtagaacccttccacggtggtgactgcgcgatgggtgcctacaagtatgtttcagagctattgcgcaaggaacagtctgatgtcatgcgcttcttgcagcgggtgaggtgctgggagtataggcagcaaacttccattgttcgcttgacaaggtcgacccgccctgacaaggctcgtcgcttgggcttcaaggccaagcacggctatgtgatataccgtgttcgtgttacgatgggtggcccacataggccagttcccaaagggtattgtttatgggaagcccac

SEQ ID NO: 2769 - DNA, 232 bp, Glycine max
ggttctagtgtgtgattgtttgttgttgtaactcgttcttcttcttttgttgttctgtgtttgtgtttgttttttctctcacctgaaaatgtcttgctgcggtggtaactgtggttgcggaagctcctgcaagtgcggcaacggctgcggaggctgcaagatgtacccagacttgagctacactgagtcaaccaccagcgagaccttggtcatgggagtggcacctgttaag

SEQ ID NO: 2770 - DNA, 390 bp, Glycine max
gactgtttcatatcagaactataaccttgctactctgtaaaaccttaaatggaatcttcctatctccacgcaactcatttccaatctatccaaatttgcaagctaacatcatgtctacctccacactcaaatgctcagatcacatcaattccatttcctactactcattatctgtacaaccactgcaacagcttcatcatccctttaagtttcactgttcccctcaaagcattatccacttccatccattcctcactttcttcccctaagccacctatcacaaaggaggatgccatacttcaggccaaaacatccctttcagcaaccttagagaagcccctaaacaataccaaactaataggcaaattcaagaaactaaggcaacccaag

SEQ ID NO: 2771 - DNA, 385 bp, Glycine max
gaacggtgcgtttaaacttttaaagtgtgaacagtgaccgacattgcttcttccctgcgtcgtcgtttttttcttctctcctctttgttagggtttgctcggttccatttttcccaaaccattcggcacaacatcgaaatttccccattgtccgcttccgcaacgaaataactctaccgtgccctacgataaggggtttctcagagcaggagcaatgtcttccccttatctacctgccacaactgactcacttgctctcgcaactgaggccaaagacccatctgaggccatctccattctttatcgggtgcttgatgatccttcttcttcaccagatgctctgcgtatgaaagagcacgcaatcacaaacctcactaagcttctc

SEQ ID NO: 2772 - DNA, 326 bp, Glycine max
ttgtgcaatttaatttctaattaagttcaattctcatcagtaaaaaagtggtacacccaaaaatacagataattcgccagctttatgtgcaatttgtgtcccattcaaattatcttcaatacgagtcaagggaataaacccctgttctatggtttccagataaacgatactctcaaaagtactggtacgagtaaaaataccctcttctttaacttctgttaatattctgatggagtgaagctcgttcataggtatttcgagaataatacgacgattttttccaggaaatccccaacaaacaaacgttaccttttccctttttaatg

SEQ ID NO: 2773 - DNA, 285 bp, Glycine max
cggggagtgatccttctacactaactagagccgagcagcgagagagagaaaccctagcaaaaatgccggctggtcacggtttgagatcccgcaccagagattccttctctcgtcccttcacgaagaacggtaccatcgccctcaccacatacctcagaacctaccacgtcggcgattatgtccacctcaaggttaacggcgccgtccacaagggaatgcctcacaagttctaccatggccgcaccggtcgcctctggaatgtcaccaaacgtgctgttggggtcg

SEQ ID NO: 2774 - DNA, 288 bp, Glycine max
aggagcagcaaaggcagtggcccttgtcctcccaaccctcaagggcaaactcaatggcattgcactccgtgtgccaacaccaaacgtctcagtggtggacctcgttgttcaggtctcaaagaagacctttgcagaagaagtgaatgcagcattcagagagagtgcagacaatgagctccagggaatcctctctgtgtgtgatgagccacttgtgtctgttgacttcaggtgcactgatgtgtcctcaaccgttgactcatcgttgaccatggtcatgggagatgacat

SEQ ID NO: 2775 - DNA, 265 bp, Glycine max
tcatatctaataaactcattttttattattaaatttataattttactcatgaatgtttttcactatgtctaaggatccttctgctccaaaagcaaaagctcaggccatcaccgagtaatgctcatcagcacccgttgtcttcaagttcataattttgttaaatcgccaacaatttgaattggtacacaacatagagttgaatgtcatatacaataattttatattactacttaatgatccattaccatttgaattactttaacat

SEQ ID NO: 2776 - DNA, 390 bp, Glycine max
ggtgcaaaactgaattataaacttgaaatacatcaaagcagttttgttcctctcttcgtcttcatatacgtttatgttttatgatttatacttcactacttttatgcttccacttagtttgattgcatagtctgatcagatctttgctcagtttgatagctatttctgctttagtctggtagtgtcatagtctgatagcatcagtttgaaagttgttttcttcagtctgatatatcatgtgttctgtttttacaacatagcttgttacccttttatgcttcagtctttttccctctgccatattcaaacagtctcaatatatggagtgacaaatggttcccaaactctcttgataatgttattcactgggattagaatccagatattgat

SEQ ID NO: 2777 - DNA, 265 bp, Glycine max
gactcactcacttcagtgtcattttttcttattctcttcctctctctctactctgagacacaaaggagaattataagaaattatggctggttattcaaaagcttcagctctttggatcctttttcttctctttggcttctctgtagctaaggaaattttggttggaggtaagactgatgcatggaaggtttcagcctctgaatcagattcactcaaccaatgggcagaaaagtctcgtttccaagttggagacgagcttgtttgg

SEQ ID NO: 2778 - DNA, 389 bp, Glycine max
ggaagatctattaaaattgacgcgaacacgaaaagactagaaaaaagggttaagaagtaaaagtttggtgtgaggtgtgagtgttctgcacgcaccgaatcaacaataatttctcaaacagcgttgtaaaagaaacacattagactaggcagataactatggctgtacattctgattcggcttcatccgagaagaaatcaaccaatggagtgaatgagttgctgacttttaatgccgagaacatgcaaagcaacatgaaaattatctattacagccgaacatttttatctataattggtggagttgttgctggtagtttgggatttacacgcttgaaaggatttgtgttttacttacttctcatggcatttacgtcacttgggctcgtg

SEQ ID NO: 2779 - DNA, 180 bp, Glycine max
ggtctcgtggaagtttaagcaagcagaattctaccggcgcctgctttctttgttcgtgttatgcatcatgatggagtcttaggtgaagcacgcacttgttgtcatagttatgggtcgtactggatccagaggacctgtgacccaggttagagtgaagttattggatgattatgaacgtca

SEQ ID NO: 2780 - DNA, 352 bp, Glycine max
aggggcgtacacagcctcaacaaccctaacgcgtgcagagcagagagagacgcagccatggggcgaagacccgcgaggtgttataggcaaattaagaacaaaccataccccaagtcacggttttgccgtggtgttcctgatcccaagatcaggatttacgatgttggtatgaagaagaagggtgttgatgagtttcctttctgtgtccatctggttagttgggagaaggaaaacgtttctagtgaggccctggaagctgctcgtattgcttgcaacaagtacatggccaaatttgctggaaaggatgctttccacttgagagtcagggtgcacccattccatgttcttagga

SEQ ID NO: 2781 - DNA, 365 bp, Glycine max
gacttccagatttcaaagaaggcgtcttcataaacgcctttcttctccgtttccgtttcctcgttcgaattcgctttttgatctgcgaaaatgagagagtgcatctcgatccacattggtcaggctggtatccaggtcggaaatgcttgctgggagctctactgcctcgagcacggcatcgggcccgatgggcaaatgccaagtgacaagacagttggcggtggtgatgatgctttcaatactttcttcagccagactggtgctggaaagcacgtgccacgtgcagtgtttgtagatcttgagcccactgttattgatgaggtgagaaccggaacttaccgccagcttttccaccagagcagctc

SEQ ID NO: 2782 - DNA, 353 bp, Glycine max
gaaacagagagagcgaggacaccatggccaacaacaacgaagaggaagaggaagcagtggcgccaatggtgaagttgggttcttacggtggtgaggttcggttggtggttggtggggaggaatccgctgccgaggagaccatgctgctttggggtattcagcagcccacactttccaaacccaatgccttcgtctctcaagcttccttgcaactctccctcgactcttgtggccactctctctccattcttcaatccccttcctcattgggaacgcctggagtaactggagcagtgatgtgggacagtggagttgtactgggaaagtttctagagcatgctgttgactcaggg

SEQ ID NO: 2783 - DNA, 366 bp, Glycine max
ggagtgaacacacacctacgaacaaacccaaccccgaatggcacagaagcagcacctccttctggatctatcccaaatctcaatctccaaaccctagaacattcaactctcccccgttccctttcaaaaaccttccctttccactcttccgccgcgattcgatctccgggctgccttcctttccgcgatttcgatctgaaactcgaggttgcggaattcggaaattgacattgaagtgttcaattggcactgtcaatgccattggtgtggtttgtgaagaatttttctgtggtgttttgataccggaaaaacacaatgtcttgggcaaggccctgggatatttacctttctacttcacttgccagc

SEQ ID NO: 2784 - DNA, 410 bp, Glycine max
gggcagttggaatcttggacaaggttgtcctacgatggaggagaaaaggagctggtttacgaggtttccgacaagagatggacatcaatgaaaatgaagatgaagatattctcaaggtgttccgaaaacagaaattagatgtagaaattgaagaggctgtttcaagggtgctgtccatggttgactcaccggattctcgtgagcaatatcatcgcatgcttgagaaatatcgtcaagctaaggctgaacttgcgggtacgagtgacgaagcatcattatcaacttctgtaggagatgacttatttatggatgagttttatccatttccctaagagcaaacgctagccttgttaatcttcattcttctgaactatcaatttgtggaacaagctgacttattagtttgagac

SEQ ID NO: 2785 - DNA, 362 bp, Glycine max
gctagtggcagtgaccaaactccatttctcactcgccgtcgtctcttccgtctagggtttctcctcttcacaaaaatggttgccgcaaaaaaaaactaagaagacccatgagagcatcaacaacaggctcgctctcgtcatgaagagtggcaaattcaccctcggttacaagaccgttctcaaatctcttaggagctccaaagggaaattgattatcattgctaacaactgcccccctttgaggaagtcagagattgaatactatgctatgttggcaaaggttggggttcatcattacaatgggaacaatgtggatttgggcaatgcatgtggcaaatattacagagtgtgctgccttagca

SEQ ID NO: 2786 - DNA, 425 bp, Glycine max
  modified_base (370)..(370): a, c, g, t, unknown, or other
ggagagagagagagaaacaaagcagcacccatttggatcctctcttctcttctttgatctccgttaccctttttgttttctcaacagagagagagagagagaatctttcgaagttcgtttgcgtgtgttgtgtggtcagtcaccgatggcagcaccacctgcgagggcacgtgccgattacgattacctcatcaagcttcttcttattggcgatagcggtgtgggaaagagttgtctgcttttgcgattttctgatggttccttcacaaccagttttatcaccaccattggcattgattttaagataagaaccattgaacttgatggcaaacgcattaagttacaaatctgggatacagctggtcaggancgatttcgaactattaccacagcttattaccgtggagccatgggtatcttgctcg

SEQ ID NO: 2787 - DNA, 54 bp, Glycine max
gagggaaagaagttggtctctgctactaaggaaggcctgaaacttgacgagagc

SEQ ID NO: 2788 - DNA, 330 bp, Glycine max
gggatcgtccttgtcctattaaataacaccgcccaccgactgtgtgagtccgagtgtgagagaaaccagtgactgacttttcgagaaagaaaaacaaaaatgagtttccgtcattccatcatgaacgctcttcccattctcctcttcttcctcttcgtttctgcattagtttctgcgaagaaaactggtgatgtgacggagctgcaaattggcgtgaagcataaaccagtatcatgtgaagttcaggcacacaaaggtgacagagtcaaagtacactataggggaaaactcactgatggaactgttttcgattctagctttgaaagaaat

SEQ ID NO: 2789 - DNA, 196 bp, Glycine max
agggtcaaacgaagaaaggcttatggtggatacctaggcacccacagacgaggaacggcgtagtaagcgacgaaatgcttcggggagttgaaaataatcgtagatccggggattcccgatataggtcaacctttcgaactgctgctgaatccacgggcaggcaacacacaacctggtgaactgaaacatcttagta

SEQ ID NO: 2790 - DNA, 382 bp, Glycine max
ggatcctttgtattctattcttcaagattcaggtactgcgtttcggaagcagacacagatggctcgtacgaagcaaaccgctcgtaagtccacaggaggaaaggctcctaggaagcagcttgcaaccaaggctgcacgtaagtctgcaccaactactggtggtgtgaagaagccccaccgttatcgtcctggtaccgttgctcttcgtgagattaggaaataccagaagagtaccgagcttttgatccggaagctccccttccagaggctggttcgtgaaattgctcaggacttcaagactgatctgcgtttccagagccacgccgtgcttgcattgcaagaagctgctgaggcaaaccttgttgggctctttgaagacact

SEQ ID NO: 2791 - DNA, 383 bp, Glycine max
ggttgtgttgtgtctcttctcttcccaaactctcttcttctattccaaagacccttttgaagtaatcgatggagtttcagtctctttccagattctaccttcttctttccttaaccattctcttccttgcaccctttcacgctcaggctaaaattaaagtcacttactgcgataagaggcagactatcctgtgaaggtgtctggagttgaaatatcaccagaccctgtggagagtggcaagcctgctacctttaagatctcggctacttctagtaaagctatttatggtggagaagttgtaattggagtttcatacgttggggtgcctgtccatactgaaagaattgatctctgtcatgaagtatcctgtcctgttgccaatg

SEQ ID NO: 2792 - DNA, 369 bp, Glycine max
gaaacacacttgattagctgaggaggaagagagaaaaaccatggcaataacactcaacaatggcttcaagatgcctatcattggattgggcgtgtggcgcatggaaggaaacgaaatcagggacctaattctcaattccatcaaaattggttatcgccattttgattgtgctgctgactacaaaaacgaagcagaagttggagatgcgcttaaggaggcttttgatagtggccttgtgaagagagaggatctcttcattaccaccaagctttggaaattctgatcaaggccacgttcttgaggcgtgtaaagacagtctcaagaagcttcagttaacgtatctagatttatatcttgttcactttcctg

SEQ ID NO: 2793 - DNA, 229 bp, Glycine max
gactcattcacttactttgacattcacattcagaagacaagcagaatgcagagaggcacgccggtgagaaagccacacaccatcagctccgatctcctcacttggtcggaaaggcctccgccggattccgccgccggcgccatgagtcgctctgggcagccttccgatacaatcagtaaggttcgccaagggagccagcgcaccgactaagaagctcagaggctaacca

SEQ ID NO: 2794 - DNA, 397 bp, Glycine max
gaggaaggtaaaagaagcaaacgcaagagcaagagcaagagcgaaagcggcagagaagattgaaggagaagagggttctcagcagccacaattggtgctcgcggacaagctattccttctccggcaacccgatgtgcaagacattgacaaggttcgctacaaagaggatgtcttcactcatgtcaaggaaaacgatatggtccctctgtacgaaaccctagtcgctgattccgtgttggacttggatcgtgcccttttggactctatgcgcgctaaaattgacgacgagctcaccaagctcgagcagaagatgctgaatccgaggaaaacttatgagagagtgaagttcgtgaggctcatttggcaaaatccttggttttcatccggattagggaca

SEQ ID NO: 2795 - DNA, 224 bp, Glycine max
  modified_base (33)..(33): a, c, g, t, unknown, or other
agggcagaacacttgggtggataagaaacttanatttgcattgcatgtgaaacatgtggcatgcgttgtgactacttttgaggtttactacgcagaatactgctgggttggttttaaggtggcatgagctgagttggaatgctttgggtatggaaagattttggcacacctcatgcctaaaatactttttgtggttcttgtaatacgttttatggttcatctgt

SEQ ID NO: 2796 - DNA, 543 bp, Glycine max
gaagtaattacatctcaatttttgtttcgaagaaacacaaagataagcaaaagtgggagcgaagaatggagaaccccagcagtagtgaaaggagcagagcaggaatcgaagataacatgctggccatgtttgatgcctccgaaaccaaagatgctcaccaagatgccctagatgaccggattgcttttattgatgctgttcgtgcttcttgtgaacatggaaaaccgcccacttcaaaaatttttggggcggtttttcacatgctgaggacagggaagtctctagagttgattgtgggaagttataagcttctggttgatttagacaagcacttccctcgcgtggtatttagctggcacggatgattcccgatcatcagcgaactctccatcaaaattggttgtggttaaagaggcatggtctcccagtatcgattttgtggataaggccacggctgttagtgaagctgggtagaaacagtcgggtggatgggcgggaccctctagctttcaagtcgtgattaaagggctggctgaagtttta

SEQ ID NO: 2797 - DNA, 56 bp, Glycine max
gagacctcaggtcaggcggggctacccgctgagtttaagcatatcaataagcggag

SEQ ID NO: 2798 - DNA, 178 bp, Glycine max
gatgtcatagtattatcattcattctcatctttctctcttctctctccacccaaaccctaacttccgaccctgttcccctctcgtagccgtcatgaaaggaggaaagtccaagaccgaatctaagagagccgatcccaaagttgctgtgaataagaaaggagccgccaccaaggctag

SEQ ID NO: 2799 - DNA, 320 bp, Glycine max
gacttctcttcacacctttgttcactcttcttctcttgcggctagggttttagcgcagcttcttctagatttaaggaagatgggtaaggaaaaggttcacatcagtattgtggtcattggccatgtcgactctgggaaatccactaccactggtcacctgatttacaagcttggaggcattgacaagcgtgttattgagaggtttgagaaggaagctgctgagatgaacaagaggtctttcaagtatgcctgggtgctggacaaacttaaggctgagcgtgaaagaggaatcaccattgatattgctttgtggaagtttg

SEQ ID NO: 2800 - DNA, 431 bp, Glycine max
acagaaggggatgccgaaaagttataccaagatggcttcaattgtgtaacccctccttggcttccaacccaatggtaacaagtcaagttccctaaccgcaactaatgaaatgtttgcaaaacagtttccatccacaaaaaccgttgaagaaaaactcagccaactccacttctatttccataacaacataacgggggaaacaccaactgctatgaaaactgttttgcctcctaaggggtccattcatggttttggggctacttacatgatggatgaccctctaactgaaggaccaagtccaacttcaaagcttgtgggaagatctcagggaatatacgctttggcttcacaacatgagcctgggttgctcatggtgacaaattttctcttcactttgggcatttacaatggcagcaccctcagcattcttg

SEQ ID NO: 2801 - DNA, 387 bp, Glycine max
  modified_base (303)..(303): a, c, g, t, unknown, or other
  modified_base (338)..(338): a, c, g, t, unknown, or other
  modified_base (366)..(366): a, c, g, t, unknown, or other
ggcgcctctgcttgcaagagtgaaaaccttctcttacccttctctcaagtttcaagagatttcatcatggctccaaagaaggacaaggctccaccaccttcctccaagcccgccaaatctggcggtggcaagcagaagaagaagaagtggagcaagggaaagcaaaaggagaaggtgaacaatatggtgctgtttgatcagggcacctatgacaagctcctttctgaagctcccaaatacaagctcatcactccttccattctctctgatcgtttgaggattaatggatcacttgcaaggaangctataagagaattgatggcaagaggttctatcangatggtgtctgcccatgcaagtcagcanatttataccagggcaacaaac

SEQ ID NO: 2802 - DNA, 434 bp, Glycine max
agggcttcaactacataactccatcactgcagcattaaggtttaacatctgcctcaatggggaaaggaacaaggaacttcggttagaagaagaacaagacccacactctctgtgtgaagtgtggccgccgcaacttccacctccagaagagtcgctgcgccgcttgtgctttccccgctgcacgcacgcggaaatataactggagcgtcaaggcaattcgcagaaagaccaccggaactggcaggatgagatacttgcgtaacgtgcctcgccgtttcaagagtggcttcagagaaggtaccgaagctgcaccaaggaagaagggagcagctaccactgcatagacctttcaaagatcgttctcgttgggtacggatttacaggaatagattgctttttgtgcttttggcaagtattttggaacatttattttt

SEQ ID NO: 2803 - DNA, 323 bp, Glycine max
agaacaaagaagagcgttgagacctacaagatctacatcttcaaggtgttgaagcaagtgcaccccgacatcgggatctccagcaaggctatggggatcatgaacagtttcataaacgacatcttcgagaagctcgcccaggagtcatcgcgtctcgctaggtacagcaagaagcccaccattacttccagggagatccaaacggcggtgcgtttggtcctccctggggagttggccaagcatgccgtttctgaaggcaccaaggccgtcaccaaattcaccagctcttgagtggtttcgtgtgtttaggtcaggcttttctg

SEQ ID NO: 2804 - DNA, 379 bp, Glycine max
gagcgccaatgtttttttcagaggagtttcatcttgtaatcgaaagagtttatcttatagtaagaaatcgatgtcttactcgagttgaaggaactgggcaagagaacaatagcctgacaaagggtttagccataaaatcgaatccatcattgagttgagatattgataaggtgaatactcatttctcgtcaatgctaggcataatgcgggtatagggacctgagaaagattatcttttcttcctatcttatgaactttaaggtgtatgaagtgtcatttcctagcgtagagttgaatttgagtaggtagagtgggagtcgatttaacttaagttgatctaggccagaggcagacctacgtcgagataagcgttcgttga

SEQ ID NO: 2805 - DNA, 252 bp, Glycine max
tagagtcagtggtttatcgctgttcaaatgctccttcatgattgctctccagcatcatcatcatcaccgttaagttcgaaaggggtcatcaagtgtcatcgccatcggaaggcctcatgacgctactcagccccgcactttgagcgcggggtttgctcagttcatctccaggttgatcttcgtgttcgcccgttcacgttccggcaatcccctacagcgtgctcacggacactggccgccgtcactcccgcc

SEQ ID NO: 2806 - DNA, 341 bp, Glycine max
ggttctagtgtgtgattgtttgtttttgtaactcgttcttcttcttttgttgttctgtgtttgtgtttgttttttctctcacctgaaaatgtcttgctgcggtggtaactgtggttgcggaagctcctgcaagtgcggcaacggctgcggaggctgcaagatgtacccagacttgagctacactgagtcaaccaccaccgagaccttggtcatgggagtggcacctgttaaggctcaatttgagggtgctgaaatgggtgtgcccgctgagaacgatggctgcaaatgtggaccacactgctcctgcaacccctgcacttgcaagtgaggtgttgggagag

SEQ ID NO: 2807 - DNA, 359 bp, Glycine max
gactcactcatacaatagagaccagcttttgcttctttgtgaacatggagatgaggaaatcatgtggcttcttcttcttgctcctcctccttgtctttgcttcccaggtggtggtgcacacggacggaagagtgtgtgagtcacaaagccacgggttccatggtttgtgtaatagagaccacaactgtgctttggtctgcaggaacgaaggtttctccggtggcacgtgcaaaggcttccgccgccgctgcttttgcaccaggatttgttgagatctcatcaaacactactcttgccatgcaaattaatacatcatagctaggccacttaaattgcatcctactctttatccatttggg

SEQ ID NO: 2808 - DNA, 321 bp, Glycine max
gagttcggtggagggagggagccgtagcagcggaagctctagcttgggtagcgaatcacaatggcgagaggattaaagaagcatctgaagaggcttaatgccccaaagcattggatgcttgacaaactgggtggtgcatttgctcctaagccctcatctggaccacacaaatcgagggaatgcctgccactcatactcattttgcgaaaccggctgaagtatgctctaacataccgtgaagtcattgctattctgatgcagcgacatgtccttgttgatggcaaagtcaggactgacaaaacataccctgctggttttatg

SEQ ID NO: 2809 - DNA, 81 bp, Glycine max
tgcgaaaagaagaaagaaagggtttattctaaaatttaaaccaaaaaaaaaaaaaaaaaaaaaaaaaaaaaaacgggcggt

SEQ ID NO: 2810 - DNA, 388 bp, Glycine max
gatacccttctctcttatttctctttcaattttcaccttactcattgtttctcccaccttacctctttgtccctctgcttctcgctgtgaaacttcattatctttctctttctttatttactaataccacttcacctcactttgctttcattctccataccctatcaaactccactttccttttttcctctctttgtctctctctttctacctcacatcacacattctcatcctctttttatatccttcccctccaaagctgagagagccacaacacaaccaaaaccctatattattcacttggtcaaacactctttcacttgacaaacaaacactttgtgtagctacaatggaagcgtattactacaagaggcaacatgttccagca

SEQ ID NO: 2811 - DNA, 454 bp, Glycine max
  modified_base (62)..(62): a, c, g, t, unknown, or other
ggagaaaaacgagccaattcatcattttctctcttctctgcttcttcttgttcaaatcttangagctgaggagaatcaatcgagagaaatatgtctggtatcgctcgtggacgccttgctgaggaacgaaagtcatggcgcaaaaaccatccacacggtttcgttgccaagcccgagactctacctgatggcaccgtaaatttgatggtctggcattgcactattcctggcaagaccgggactgattgggagggtggatatttcccactgacaatgcacttcagtgaggattaccctagcaagcctcccaagtgcaaattccctcaaggtttctttcaccctaatgtgtatccatctggaactgtttgcttgtctatacttaatgaagatagtgggtggagaccagctataacagtgaagcagattcttgtgggcatccaagacctgcttgatc

SEQ ID NO: 2812 - DNA, 440 bp, Glycine max
gggctgccaaaagaccaaagaaagggggaaggcaaagaaaagattggcaacgttccaagggaactccttttggaaattcttaagaaaaacaactcctttttgggcaacaatttcgaaaggggaaccaaaacgttcaatttaacaaagagagcacaatcctcacaacctaaattcgttcaagtactctggtttggcaaacaagaaaactgttacggtacagcctgagggtaaagatcaggctgtgttgttggctacaacaaagacaaagaagcataacaagcctgctgcattgcttcacagatctgtgatgaagaaggagttcaggaggatggcaaaggctgttgaaaatcaggtggcagaaaattactacaggcccgatctcaagaaggccgcccttgcaaggttgagttctgttcacaaaagcctcaaagttgccaagt

SEQ ID NO: 2813 - DNA, 261 bp, Glycine max
gaaccaagtttgcttgcgtgtatattcattttagcatcaaggttgaatctcagagaaaaagaaacatcgacaagcatgtctggaagaggaaagggaggcaagggtctcggaaagggaggagccaaacgacaccgtaaggttctgaaggataacagtcagggaatcaccaagcccgcgattcgccgtctggccagacgtggtggcgtcaagcgtatcagtggtcgtatctatgaagaagctcgcggtgttctcaagatcgtt

SEQ ID NO: 2814 - DNA, 248 bp, Glycine max
ggtggtcagcattagaccatgaatctattctttccaaacctcactcactccctcttctctcacaatgccatctgtggccactttacagaacagttagttaatgaggccacctttggtggtcctcaagggctgcaagggtctcttctccgcgcccagttcccaagcgaagacaccctcactcatctctaaactcgtgacaaggggtccaccattcacaacaagcccacaacagcgcaaacccgtgttcc

SEQ ID NO: 2815 - DNA, 326 bp, Glycine max
gtacgcgcgagaagacacagaagggagggagattagcattagccaatcaaaacacagactgggcacatggcatccacaatggaaagtgaaatcactaacacatgtgcgtgtgctcaatcacaagtgaagttgaactgcagtgaatttcagacaaattttgttgagaacccatcaattttgaacatttctggcaatgtgtgtcgtctaaaaaacggtcttcccattggtatacgtgaaactgtagagtttttgtatgcatggcttcctaagtttccagttcaacccatttcttcgagaggagattgcaactaattgatcttaagtag

SEQ ID NO: 2816 - DNA, 339 bp, Glycine max
ggcagccaagaaaagaaaatcctcacccattttcttcgtagccaaacactctgaaattctcagttatgtcgtggcaagcgtatgtggatgatcacctactgtgtgaaatcgaaggtaaccacctcactcacgccgctatcatcggccaagacggaagcgtttgggctcagagcaccaacttccctcagttcaaacctgaggaaataactgccatcaataatgactttaatgagcctggatcacttgctccaactggattgtatatcggtggcaccaaatacatggtcatccagggtgagcctggtgctgtcattcgagggaagaagggtcctggtggtg

SEQ ID NO: 2817 - DNA, 150 bp, Glycine max
tctcggggggttctcctaccgattcttcagccggggcgattttggatccgaacctcttctgcggcgtcgctctgggacactccatcgttcggcattcgcaccctctcgtctacggtcctggttctcgcatttgccgagtgtgtgggattc

SEQ ID NO: 2818 - DNA, 430 bp, Glycine max
  modified_base (82)..(82): a, c, g, t, unknown, or other
  modified_base (211)..(211): a, c, g, t, unknown, or other
gcagaatgcaaggaacgcaaggaaagttaacaatgaccagaatttacagggagacaatggacaaagagttggatactcatangctggagcatggtcccaagaaaagaaagatccctgacgaaaacaataatgacgacgatgatgatgtggaagatataaatgtgggagaggatgacatgatggatgatgaattagacgatgattctagtangaggattgatgaaacaaccaagacggaagcacgtagtgccagttcagatcctgcagctgatgctgataatgcgggagggaagtgatcacccgcaaggacacaattttcaatagttttgagttatttatgtttttgtagtttattccttggtattctaacttttacgtaattggatttatagccgttgtagtttctgtatgcaaatgaaatttcttcact

SEQ ID NO: 2819 - DNA, 255 bp, Glycine max
aatccgagaagtgatttactcattcaacctgccaaggagcttgtgacagaggagaggccggccttgtactcaccaatgacctatgaggaagacagactttacattaggctaaatggaccttgtggaaaggcccaagttgaatcactggctttccaacgatgacttaataatgtcaattaataacgtgtttggtttcacaatgtaattttctatgtttcatgtggaattttaagttgagagttataacttaagggg

SEQ ID NO: 2820 - DNA, 350 bp, Glycine max
gactctctctctctcctcagtctgatccaaatggaagatctctagagagagaaactaatggttggatttttttggttcagttgccacgacagcctctgactgtctagagggacattggctccccacggatgtgcccagagcaagattgttgcacctactgtaagcacaaatcagatgccatccctaaaagtgaagagcaaagtaagcgtgagctgtttaacagagacaaaggatcttcatgtgtgtccgaaatcaaaaataatttccaaaagcccgtgttctaaaatcatgatttctacacaaaaggctgaaatagacaccactgttcaaaattgcctagatgtttcctc

SEQ ID NO: 2821 - DNA, 215 bp, Glycine max
gagcaacatggtgaagctggtggagagatttacttgccagaagcttacgttagaaccaggaggactacttactggagcacatgagtgtggaagaacgggtggctagcttcgcaggctggcttatctgagtgtggagaagcattatggagccttaggagtacgagaacgagtactgtttgtgatgaaggtcgagtgggttaggaaatctgtcgtta

SEQ ID NO: 2822 - DNA, 316 bp, Glycine max
ggttgcagcaaagaacccaaaaacaaaaggttgaagaatttgacagagtgagagtgtaaggtacagtcagtcagagatagagaaatggcttcgtggtgcagtgttcgaagcttccaggttccggcgatggaaggcagcgcagtgcgcaaccgtgcttcattggccgccagagtggggtgtttgtccgtggccggcacctccttctggcgttcctcttcgtcagcgaagcactctttgtcagtcacatgcgtgagcatttcttccgaaacgcgtatgaaggagaatgtgcaagcagaagggcgacctgcggctctgg

SEQ ID NO: 2823 - DNA, 408 bp, Glycine max
gatgcatagcaattcccaattcctaattgtttaaacctaattctcatttcttcatcgttcgattcttctcctcctaaagatgcagatcttcgtgaaaactttgaccggtaagaccatcacccttgaggtggagtcctccgacaccatcgataacgtgaaagctaagattcaagacaaggaagggatcccacctgaccagcagagacttatctttgcgggtaaacagcttgaggatggtcgaacccttgccgactacaacatccaaaaggaatccactctccacctcgtgcttcgcctcaggggtggcatgcaaatctttgtcaagactttgactggcaagaccatcagcctcgaggtccaatcctcggacacgattgataatgtcaagggcaagatccaggaacagga

SEQ ID NO: 2824 - DNA, 107 bp, Glycine max
  modified_base (51)..(51): a, c, g, t, unknown, or other
aggggcgattcaatcttaaaaaaaaagccgtagtttaattggaaaaggtcntttttccttcctacttggaaagtttcttcttcgtatttctcgtaaaactctcaacc

SEQ ID NO: 2825 - DNA, 259 bp, Glycine max
gaataatagtccctttgctgaaattctcctaactctctctctctctcaacaatggctcgtacttttgttcttatgttggttgctgctgctgcattgttgttgagctccacgatggctcaatcgccagcttcttcgccggctttatcaccgaccaacacgccggtggccactccaccgaggagggcgttgtctccgtctcctgttcctgctgcggtgccaccgtcgtcttctcctccggctccacctacgtcgtctcctt

SEQ ID NO: 2826 - DNA, 446 bp, Glycine max
ggaacctgatcgatctctttaccagttgccacactacaccgagattccccctaaacccgtttgcgttgttgtttgcgaagaaatggcgactaagaggagcgtgggaacgttgaaggagggtgatttgaaagggaagagggtgttcgtgagggtcgatctgaacgtgcctttggatgacaaccttaacatcaccgatgacactagagtccgtgctgctgttcccaccatcaagtacttaactggtcatggagccaaagtgatcctttctagccacttgggacgtcctaaaggtgtaacacctaaatacagtttgaagcctcttgtgccaaggctgtctcaacttctcggaattgaggttacaatggcaaatgactctattggggacgaagttgagaagttggttgcacaacttccagaaggtggtgttttgcttctagagaatgtga

SEQ ID NO: 2827 - DNA, 226 bp, Glycine max
gaaaagctttgtttattaataataataacaagcgaggtaaaacacttcgagcggcggggcaggggcagagttgattgcagttgagagagttgtagtgagtaacgagtacgatgatctgttcaagcttctcctaatcggcgacgcttccgttggaaaatcctgcttgcttctcagattcgctgaggactccgacgtcgacagctacatgagtaccagtggacttgat

SEQ ID NO: 2828 - DNA, 51 bp, Glycine max
gggtttctgtttaggtttatgtgtgttgttgggttgaggtggtttggtttg

SEQ ID NO: 2829 - DNA, 328 bp, Glycine max
tgggacaaacaatttactttactacaagctatctcagcttgttagcactttctttttcttcatttcattatttttctcataatgtcaactttcatgtcgatcatcttccttctaatttccatctttcaaatctctttcgccactaggatgtctaatgagttagttcaggacctaactcagcttcttcgttaccacaatggccctcttctctctggcataatctccattaacctcatttggtactgccacttcatcgcttcccagagcgcaatagtctccgatttcatcaactcgctgatcactctcataggtccacatcatccaatca

SEQ ID NO: 2830 - DNA, 367 bp, Glycine max
  modified_base (274)..(274): a, c, g, t, unknown, or other
tggtcccccactaatattcacaaatttggtccttctattttgtaaaattgtgcaatgttggtcctccagaccataattggacgttgaggttaacaagtgatgttgattgccacgtgtcatgttctgattggatatcaactccatgaaagatgaaataaattattgttttcattgatcaatcaaaacatgacacgtggcagtcatcattcaataagaacgtgacacgtgacagtcgacatcacttgttaacgattaacgtccaattgtgacctangggatcaacattgcacaattttactatataaggagaccaaatttgtgaattaaattacttgaggaccaaattcgaaactggagataaactgag

SEQ ID NO: 2831 - DNA, 366 bp, Glycine max
gactgcaactttgctctctgtgaggcttcaatttccaattagggtttcgcttagagtaaccaattaccatgggagtcttcacctttgtcgttcgcaaatccggcgccgaatggagcgccaagcaacattccggcgacatcgaggcctccgccgactccacctacgatctccaaaggaagctcgtgcaagccgctctcgccgttgattcctccggtggagtccagtcctccttctctcccgtgtctcctacctccgctgtgttccaggtgatactgggtggtgctgtattcgttggacgtggcggtggtgctgttgcagctgcaactgcaagtggtgctgctgcagctgatgccggcccggccgcct

SEQ ID NO: 2832 - DNA, 174 bp, Glycine max
atcatttatcatactcacgcattgcatttgcctaagtcatcgcattatcatacatcttcatctaacatgtttttgttttgccaattgcatacattctattttcatcgttcatatgtgatgttcactaatgcttgatcctgacacatagttgctcatgccttgcattttcctcac

SEQ ID NO: 2833 - DNA, 72 bp, Glycine max
ccaacgcgtccgcccacgcgtccgcccacgcgtccgcccacgcgtccgcccacgcgtccgcccacgcgtccg

SEQ ID NO: 2834 - DNA, 329 bp, Glycine max
gagggttacacgccgtcgtcgctgtttttgtgtgtcgcttcttcgtaggtgcagctgcaatggtgaagggacgccaaggagaacgtgtcagactctacgtgaggggtacaatccttggatacaaaaggtccaagtcaaaccagtatccaaatacatccctgatccaaattgagggtgtgaatgccaaagaagaagtagcatggtatgctggcaagaaaatggcctatatctacaaggctaatgtgaagaagaatggaagccattaccgctgcatatggggcaaggttacaaggcctcatggtaacagtggtattgtccgtgcaaaattc

SEQ ID NO: 2835 - DNA, 331 bp, Glycine max
tcatatctaataaactcattttttattattaaatttataattttactcatgaatgtttttcactatgtctaaggatccttctgctccaaaagcaaaagctcaggccatcaccgagtaatgctcatcagcacccgttgtcttcaacttcataattttgttaaatcgccaacaatttgaattggtaaataagaaagagtttaatgtcatataaaataattttatattattatttaatgataaattatcatttgaattattttaaaatttaataaatttatcctacattataaattgtaatcaaatacaaaatgtgtaaacaaatttacaccac

SEQ ID NO: 2836 - DNA, 291 bp, Glycine max
gacaacacaacgcaacacaacgcgcactctctcttttctctcttaacacaaaaaccctatcgttcttcgcggtttcgccgattctcgccatgccgaaagccaaatccgacgccaaagccgccgatagcaggttgaagcggaagggcgctggtgctgggaggaagcaatcgaggaaagctgctaaggaccctaacaagccgaagagacctgcaagcgctttcttcgttttcatgtccgagttcagagagcagttcaagaacgatcatcataacaacaaatccgtcgctgttg

SEQ ID NO: 2837 - DNA, 341 bp, Glycine max
gggatggaatcctaagacttcactttgggacctgcttgaatccactctgacatatcagcacaggacatatgctgaagccgttaagaaagtcattgcaaaacccctcgcaagttaagcttttacagtgatggtgatgtgctacctttgagaaggggtgttcttgcccaagtgttctgccatattttactggttggttttatataaaatcgcaaattttcctccttttggtttcgttagccagtaggcaatatagcccacataagccccaatgccttggtgtatgttcctggagaagtacgaatttatatatagggcaatctgtgctgctatgtaattttaat

SEQ ID NO: 2838 - DNA, 380 bp, Glycine max
ggtagcaatagcatactcttactctgattcgttagtgaagaaaaatggcaacaatcatcgccggcaccccaactacatcaatcactcgcacaggtcatgtgctcaaacgacctgttggggcctcatcctctaccgttcttggattgccagcaatggccaaggcggggagagtgaggtgctccatggaggaaaagccttcaagcagctcaaacctaaggatgggggcatccttgttagcagctgcagctgccgcaaccatgtcaagcccagcagccatggctttggttgatgagagactcagcactgaaggaactgggcttccctttgggcttagcaacaaccttcttggttggatcctgtttggtgtccttggtctcata

SEQ ID NO: 2839 - DNA, 389 bp, Glycine max
gacagcactgcactcttcgcaacacaacaaaaaaagacaacccagagagcgcgtcttaataaacgctcttctctgaaaacccccatttcttttcttctttcttcttctctttcgcttcttcgatcttcgatcctcgtcgctgaaaatgagagagtgcatttcaatccacatcggccaggccgggattcaggttggaaacgcctgctgggagctttactgcctcgaacacggcattcagcctgatgggcagatgccaagtgacaagaccgttggtggaggtgatgatgctttcaacaccttcttcagtgaaactggggcaggaaagcacgtgccccgtgagatttttgtatatcttgagcccactgtgattgatgaggttaagactggga

SEQ ID NO: 2840 - DNA, 157 bp, Glycine max
gttgggaacttaagatattcttgctgcataatacatgacatcattgattatgcataacatacagttcttgtatttctgtcccctatactgtaaatctgtaatctagatatgattttcattcaatttgaagaatttgaagttgttaagttgggatttc

SEQ ID NO: 2841 - DNA, 245 bp, Glycine max
gattgcattgtggtgaatgtttgagtgcagaaggtaaaaaagaaaatggtggtgaagattcgattggcaacgctcgggtgccggaaccacccattcgatcgtgtggttgttacggatagtggaacggcaagagatggcaagcaacttgaagttttaggtttctacaagcccgtcgcaggcaaggatgatgacaaaagaatgagcctcagactggagagaatcaagtagtggcgttccggttggag

SEQ ID NO: 2842 - DNA, 306 bp, Glycine max
gaaggcaacaaactgaaccagagccaatccttttcttctcccttgttttgaacaccctctgtggatacccttttgttaaagccaattgttttctcagatttgaggacaaggaggtggtgggggaggagataatacagggagaaaaacataatagagagaacaataaaagcacaaacgtgaggctcttgttgaaacacacaattagatataccagttgtcaatttgtcatatctgaaatttctcaagttgtgtttgtttgtcgtacaattgtaagttcagctgcatccttatattttggttcacata

SEQ ID NO: 2843 - DNA, 360 bp, Glycine max
gagggttacacgccgtcgtcgctgtttttgtgtgtcgcttcttcgtaggtgcagctgcaatggtgaagggacgccaaggagaacgtgtcagactctacgtgaggggtacaatccttggatacaaaaggtccaagtcaaaccagtatccaaatacatccctgatccaaattgagggtgtgaatgccaaagaagaagtagcatggtatgctggcaagaaaatggcctatatctacaaggctaaggtgaagaagaatggaagccattaccgctgcatatggggcaaggttacaaggcctcatggtaacagtggtattgtccgtgcaaaattcaagtcgaaccttccacccaaatcaatgggag

SEQ ID NO: 2844 - DNA, 301 bp, Glycine max
gtagaatccccattccagagccaaggtaggttaaacactcttcttcatcgtcgtcgcaatgggacgtgtgatccgtgcgcagcgtaagggagcacgctcggtcttcaagtcccacacgcaccaccgcaagggccctgcccgcttccggagcctggatttcggagagcgcaacggctacctgaagggtgtcgtcactgacgtcatcgacgatcctggccgtggcgcgcctctcgctaaggtcgccttccgccaggcgttccgctacaagaagcagaacgagctcttcatcgccgccgagggt

SEQ ID NO: 2845 - DNA, 168 bp, Glycine max
gatagtcaattcattttcttcttctgcttcaccttctcttctcttctctcagagggttagggtttttttctcttcattgctctctctgtcgttttatttccatggctcagcaagatgctcagaatggtgggtcggagaatggcgctgctgcggtgtcgtttgtcgctt

SEQ ID NO: 2846 - DNA, 367 bp, Glycine max
ggagtaagcaggcggcatggcattctcagcggtctggcgactagcgaatcttgggcgacacttggatttgagtgaatcagtgaacaaggctgcgccagttgggtcaatcaagttgaaggtagcttcagaggtttctgaagcattatcactgggtcgtgctgttgttgctcttgaatctaccattatttcgcatgggatgccatatccccaaaatttggaaactgcaaaagaggtggaacgtattgtaagagagaacggtgcagttcctgcaaccattgcaattttagatggcacgccttgtgtaggcctaagtgtagaagaacttgaaaggctagctattttgggaaccagagctcagaggacagct

SEQ ID NO: 2847 - DNA, 323 bp, Glycine max
gaatttcaatatccgctcaaaccctatcctaactcctcgcgtcgtcacataaagtcttcttctccgatcgttacgatgttggaactccgtctcgtgcaatgttcccttctgaacaaggttctggaatcgatcaacgagctcgtagacgacgcgaacttcgactgctcctccaccgggttctccctctaggccatggattccaggcacatcgccctcgttgcgctcctcctccggtccgagggctttgatcactagcgctgcgaccgcaatacctccatgggcatgaacctcaacaacatggccgagatgctcaagtgcgccgg

SEQ ID NO: 2848 - DNA, 218 bp, Glycine max
atacaggcgtcagacagactacaaaaagaggaggaaagggggagcgaaagaggggttttggaacctgcagcattcggtgctccaatctcagctatccgtgaaggctccatcaccgatcgacaatcctgtcaccgattcgtggtacacccaccgtcccgtcttcacgctcgcaatcggacacgtcttaagtgcctcattcttcacttattacgcaacat

SEQ ID NO: 2849 - DNA, 258 bp, Glycine max
ggcccaaattttttcatagcattttcagaggaacaatggcgggtagggtttcgacgtgcttcttcttcgtgtttgctctttctctccttcttccttttcagatctccgctgaggaatcatcggagaaagagttcgtactcacattggatcactctaactttcacgacactgtcagcaagcacgatttcatcgtcgtcgagttctacgctccatggtgtggccactgtaagaagcttgctcccgagtatgagaaagctg

SEQ ID NO: 2850 - DNA, 347 bp, Glycine max
gctctgaaaactgaaaagtaaaggcgaaagactttaggtttggaattgggaattagggttgttcgcgtcacgaagatgatcgaggtggtgttgaacgatcgattggggaagaaggtgcgcgtgaagtgcaacgacgatgacaccatcggcgacctgaagaagctggtggcggctcagacgggcacaagagccgacaagatccgcatccagaagtggtacaccatatacaaggatcacatcactctcaaggattacgagatccacgacggcatgggtctcgaactctactacaactaaacacaaagtgtgttttatgcatgatatattactatgatctgggaatggga

SEQ ID NO: 2851 - DNA, 52 bp, Glycine max
aaaaactttaatttttttatggtaaaaaattcaattatacctgttatttcac

SEQ ID NO: 2852 - DNA, 362 bp, Glycine max
ggcgtacgcagcttcatccctaacgcgtgcatagcagagtcagagacagagacgcagccatggggcggagacctgcgaggtgttataggcaaattaagaacaagccataccccaagtcacgtttctgccgtggtgttcctgatcccaagatcaggatttatgatgttggtatgaagaagaagggtgttgatgagtttcctttctgtgtccatctggttagttgggagaaggaaaatgtttcaagtgaggccctggaagctgctcgcattgcttgcaacaagtacatggccaaatttgctggaaaggatgctttccacttgagagtcagggtgcacccattccatgttcttaggattaacaag

SEQ ID NO: 2853 - DNA, 284 bp, Glycine max
tggaagaaggggaagctggccatgacggtcgaggtattcgaggtggcgccggaggtttcggtggttgagttcgccaagtctgctggagacacgcttgaatacattaaattctgtgaggaccaagtcagaccttctctcaaagacattgtgtggagttggcaaggggacgctaattgccaccagtaacgcaatggagttactttccgttatgtcttaatcttttgcgtgtttccattatcacaatccgtttgggtttagatttattacccatgtaatgtaatatt

SEQ ID NO: 2854 - DNA, 344 bp, Glycine max
ggaaacccacatcatgagcacactttgtatggcggaaaatatgaaggaggtggaagttgaagatggatatgtcttgaaagaagagatccatctcacggtgctaaaaacctctctgttcttcgcgggcgatggcttcagcgtcgacgattgcaaaggtcaactcgtgttcagagttgactcttatggacccgacactcgcgacatagacgaactcgttctcatggatcctaacggacgttgcctcctcagcgttcgtcgaaagcggccgagtttgcatcaacggtcggaaggtttcaaaggggagagaatgggacggtgagaagaccatcttcagcgtgaggaga

SEQ ID NO: 2855 - DNA, 105 bp, Glycine max
tgattggggccattgttgttgctattagcatccgcagctgcttctattcgcaccgcacacagtgagccatggccgtcggaaacgacaagcgcatctccaagggga

SEQ ID NO: 2856 - DNA, 196 bp, Glycine max
gacccccaaactctgcatcggaagaaaccctagccactctcccggcgtcacgatgcagatcttcgtgaaaagcctaacgggtaaaacgatcacgttggaggtggagtcttcggacaccatcgacaacgtgaaggccaagatccaggacaaggaaggcatccctccggagcaccagcgcctcatcttcgccgggaag

SEQ ID NO: 2857 - DNA, 198 bp, Glycine max
gaagagtgatccttctacactaactaaagccgagcagcgagagagagaaaccctagcaaaaatgccggctggtcacggtttgagatggcgcaccagagattccttctctcgtcccttgaggaagaatggtaccatcgccctcaccacatacctcagaacctatgacgtcggcgattatgtccacgtccatgttaacgg

SEQ ID NO: 2858 - DNA, 302 bp, Glycine max
gggtggatagaggggcactgactcacacccacaatagtcgggggcagcttcaaagtacctccacattgtctcctactcttactgttctcttctcttctcatcatttttattttttccaatcaaaccaaacaaaacataagcaccgctcttttctctccgaaatccccatctcccttcacttctgagctctggacgagatcccagatctcaccatctttcacgcactcttccatcagattcaccctttcgtttaacgcaaactcataacttgaaggttaatggctgctccaccggcaagggct

SEQ ID NO: 2859 - DNA, 353 bp, Glycine max
accacgcgtccaataaggcgccaaaaaaataacaaaagggaattgcaaaccattaggaacccccatcccaattcttagccgccattttcccagggcttcaacctttcaagttaacccataaaaatttccacaccttggatgaaatccctcaaggataaggatcctaacccatctaaatttgaaaattcatttggacaggcaccgtttgatctggaaagtaccactcaggagctcaaaagtgatctgaaggatttatacagacacccatccgtgccagttgacgtttctggataccgtatagctgtagtcattcatgtcgcttacatattaaagataggtttccgtaagattca

SEQ ID NO: 2860 - DNA, 385 bp, Glycine max
gattactcgaaactatttttgagccactagggtacgtgttcgataatactgtggtttctgttcttccagactaaggtaaacgaaagtgcgcaatgcatgcaagcagcaaaatgggtgaaaaatataaaccttggatcatctttcttcatctactagtaatcacgtgttcctgcaatagaagctgcagagccaggggattgattgaaacagaagacaaattcttcaaagcaacctcaaatgatcatcatgaaacagaacatgcacatgctcactctcacgtggatcacatagatccttctgtgatggtgtttttcaacatcgaagatttgaaggttgggaaaacaatgcctattcattttcccaagagggaccctgcaacatcccc

SEQ ID NO: 2861 - DNA, 388 bp, Glycine max
ggtacacagcctcaacaaccctaacgcgtgcagagcagagagagacgcagccatggggcgaagacccgcgaggtgttataggcaaattaagaacaaaccataccccaagtcacggttttgccgtggtgttcctgatcccaagatcaggatttacgatgttggtatgaagaagaagggtgttgatgagtttcctttctgtgtccatctggttagttgggagaaggaaaacgtttctagtgaggccctggaagctgctcgtattgcttgcaacaagtacatggccaaatttgctggaaaggatgctttccacttgagagtcagggtgcacccattccatgttcttaggattaacaagatgctttcgtgtgctggagctgataggctccaa

SEQ ID NO: 2862 - DNA, 225 bp, Glycine max
gagcaacatggtgaagctggtggagagatttacttgccagaagcttacgttagaaccaagaggactacttaatggagcaaatcagttggaagaacttgtagctagcttcccaactggcttatctgagtgtggagaagcattatcaagccttaggagtaggagaacgagtactgtttgtgatgaatgtctatggtttaagacatctgtctttagtcaccttgtgtg

SEQ ID NO: 2863 - DNA, 62 bp, Glycine max
gtgctttgttgtggttgttaaggtttgattcgacaggtttagacgatcttacagcgacgcac

SEQ ID NO: 2864 - DNA, 366 bp, Glycine max
gacaacacaacagagaaagaaaagagtaagagtatgggaggctcatggtcatggcagctcacatgtgccctcttgctactcttctccgccgtagtcaccgccactgaccacattgtgggtgcgaatcgtggctggaaccctggctttaactacactctttgggccaacaaccacactttctatgttggcgatcttatctcattcaggtaccaaaagaaccaatacaatgtgtttgaggtgaaccaaactgggtatgacaactgcactacagaaggggcagtggggaattggagcagtgggaaggatttcataccccttaacaaggccaagagatattacttcatttgtggcaatggccaatgcttc

SEQ ID NO: 2865 - DNA, 321 bp, Glycine max
gacgctttacgatttctctttttttgttttttgttgcgtgtgttagggttttaaggaagcatgggaaaggttcaggtgagtgacaaggaagaattctctcaaatggagaacaacgatttcagtgattcgcagttagttcatcacttcagaggtgtgcttgttgcagtgacaacgggtgatcgagagaattacgatgagctcgttggttatttgcaaccgaagaaacatcttaatcctgatgaggttgctatacttgtgacaactttgaaagcgctttctggagcagtgtcctatatagattctgttcatcatgaatccctg

SEQ ID NO: 2866 - DNA, 168 bp, Glycine max
gacaccatcgactactcttcttagttccagcacaataagctcttcatttctcccagactttcttttccttcaccagcaatgtcagcaggagttcacacttttgttcttcccggacctcatgcagtcccctatgatcactttccatgccaccttctgggtccgtctctt

SEQ ID NO: 2867 - DNA, 347 bp, Glycine max
aaagagacccggaaatggtgggaaccgcttttgggaatccattgggcttggatttaagactcccagggaagccatcgaaagaacctacattgacaacaactgccccttcactggcaatgtttccatccgtggccgtatcttggctggaacatgtcacagtgctaagatgaacaggaccattattgttaggacgaattatctccattttatcaagaagtaccagaagtacgagaaaaggcactccaacattcctgctcatatatcacctgctttccgtgtgaacgaatgagatcacgttattattggtcaatgcatgccactttctaagactgtgacgttcactgtgt

SEQ ID NO: 2868 - DNA, 330 bp, Glycine max
aaagggacacttaagggaaaaatacccggcaaaggttggaaacgcttttggaaatccattgggcttggatttaagactcccattgaatccatctaaagaacctacattgacaataagtgccccttcactggcaatgtttccatccgtggccgtatcttggctggaacatgtcacagtgctaagatgaacaggactattattgttaggacgaattatctccactttatcaagaattaccacaggtacgacaaaaggcattccaacattcctgctcatacatcaactgctttccatgtgaacgaacgagatcacgttactattggtcaatgc

SEQ ID NO: 2869 - DNA, 363 bp, Glycine max
ggcggcaaaagaacaacaaaaggggcttgttggctccctttggattccccggctttcaaatacacaccacaaaaccccccttttttttcaaaaaccctccgagaaaaaccagatgggtgaaaagcaccacaaccatccaccgccaccggttcaggcacctccggcaggtccacaaccgccaaacctagcactttcaagaggccccgtttggcatccacctgaacaactctcgcagcttcactattgcatccactcaaatccttcatggccggtggcaattctactgggttttcagcactacattgtgatgcttggaacaacggttctgattgcaaccacactggttcctgcaatgggtgggga

SEQ ID NO: 2870 - DNA, 383 bp, Glycine max
gaagaagaactagtctaagcagaaatggcctcttcagtgatggcatctgtggccctcaaacctgcccctttcactgttgagaagtcctcagttagaggccttccctccctctcaaggaactcctcttcattcagagttgtggccagtggtggcaagaagatcaagactgacaagccttatggaattaatggtggcatggctttgagggaaggagttgatgcatctggcaggaaaggaaagggaaagggcgtttaccagtttgtagacaaatacggtgctaatgtcgatggttacagtcctatctacgacaccaaggactggtctccaaccggtgatgtccaccctggcggtacgactggcctggctatctgggctgtgactct

SEQ ID NO: 2871 - DNA, 393 bp, Glycine max
gatttcgcttcttttcctaacctaaaccctactcattctccatacctcaacgaagaggttaaagagacggcaacactttgctgtccgccttgaccgagcagagcttcgtcttggccctcgattttgccctaaagtactctcagtcacaacagacaccgtcgtcgtcgtcgtcgtcatcaatggcaccgaagcagaccaaggctgagaagaagatcgcttacgatgcgaagctgtgcgacctaatggaggagtacggccagatcctcgttgtgaactccgataacgtgggatcgaaccagctccagaacattcgcaagggtctccgtggcgactccgtcgtcctcatgggggaagaacaccatgatgaagcgctcagtcaggatgcacgctgag

SEQ ID NO: 2872 - DNA, 362 bp, Glycine max
ggttttgattagggtttgtcattagcacttcttcttttcacactgccgctgcaacaatggcttcagagaagaaactttcgaacccaatgagggagataaaagtgcagaagctcgttctcaatatctctgttggcgagagtggagatcgtctcaccagagccgccaaggtgttggaacaacttagtggccaaaccccagtgttttccaaagcaaggtacactgttcgttcctttgggattagaagaaatgagaagattgcatgctatgtcactgtcataggtgacaaggcaatgcaacttttggagagtggtttgaacgttaacgaatatgaacttctcagaagggaattcagtgatactggg

SEQ ID NO: 2873 - DNA, 125 bp, Glycine max
ggatatcagaagcgcagacctacgatttcggccgtttgctccccagggaaagaagcagggtgtttcttttgaaatcggctacaatagatgtcaggtgaagacgtagctgttgcagttgatgcacc

SEQ ID NO: 2874 - DNA, 175 bp, Glycine max
gatcccataaaaaacacaagcaaaaaaaaaaaaaaaaaaaaaacaaaaaaagcggccgcccaaagaagaagccggtttcaaggtccgtcaaagccggtctccaattccccgtcggaagacatggccgttatttgaacaacggaaggtacgctcagcgtgtccgtaccggtgctcc

SEQ ID NO: 2875 - DNA, 317 bp, Glycine max
gagcgaaacagagagtgatttcagtgagtgatcggtgttcacttgatctcatcataatcgtcagcgtcaattgaagaagatgccgatcagaaacatcgccgtcggaaggcctgaagaggcgactcaccccgacacgttgaaggcggctttggctgagttcatctcaaccttcatcttcgtgttcgccggctcaggctccggcatcgcctacaacaagctcaccgacaacggcgctgccacccctgccggcctcatctccgcctccatcgcccatgcattcgccctcttcgtcgccgtctccgtcggcgccaacatct

SEQ ID NO: 2876 - DNA, 354 bp, Glycine max
gaggcatggattcgttaccacctgcaaaacggcgtcgtgagagcaaagacggcgagactgaagcttcaacgttgtcaccggttgtgatcttcgctcacggtgccggtgctccttcctcttctgattggatgcaaagatggaagaacatgataaaggaggcactgcgcgctgtcgatgttgtcacttttgactatccttacatgtctgcgaaaaagaaggcccctcctaaggcggaaaaactggtggagtttcactcacattttgtcaaggaacctgcaactaattaccctggccatcccctgatacttccacgcaaatcactgggttcacgagttcgctgcctggtggccaccc

SEQ ID NO: 2877 - DNA, 325 bp, Glycine max
gaagatttgtgagagaaagggagaaagggtgtgagaatggagagcaaagaggaagatgtaagggttggagcaactaggttctcagaaaggcacccaattggtacagcagctcacggtgacaaggactacaaagaaccacccccagcacctttgtttgagcctggtgagctaaagtcatggtccttctacagagctggaagtgctgagtttgtggccagtttcctgttcctccacattaccatcttaagctgtcatgggtgtcaacacgtcacccttccaagtgtgcctctgtgggcattcaatgcattgcttgggcctttggggg

SEQ ID NO: 2878 - DNA, 78 bp, Glycine max
ggggatcatatgtgtttgacactttttgtgacaaacattatctggcaccgcttaaatgatcatttgttttgatgatgt

SEQ ID NO: 2879 - DNA, 200 bp, Glycine max
gagggctgccgctaagggaagccagttggattcacacaagaacgccatgtctattcagtgcaaggtgtgcatgcaaacatttatatgcaccacatcagaactgaagtgcaacgagcatgctgaagccaaacaccccatatctgatctccatgtttgttctcctcatcttagaacgtgaaagagtgcactgttcagacgtg

SEQ ID NO: 2880 - DNA, 397 bp, Glycine max
  modified_base (370)..(370): a, c, g, t, unknown, or other
ggaactcattcttcttcaactcaacagagcaagggttcgcactcgcagattcttgagcaagaataatggggaagaaaagaaaacacagtgagactactcaagctgtagcacaacccaaaaaggaagaggctgctccagagagaccggctaggacccttttggggtggaaggataagaatcaagttgaggatgattcaccaatatttaggaacaaagagaagctattggtcacttgctctaggcgcatcaattacaggtaccggcatttgatgttgaatttggtcacacttttgcctcattgtaagaaggataacaaagttggattaaaggaaactaaaggagccaccctcaacgagcttgttgagctaanaaattgttcctcttgtttaatttttga

SEQ ID NO: 2881 - DNA, 224 bp, Glycine max
gactcgagcttccctcacacattctctgtgactgcctctgttccgccgaacccagcattttcccaccgttcgggccaccggcggagttagttttccggcaaggatgggtgctgctctgctgtctgagcttgcgacggagatagttgtgccggcctgcgccgtcatcgggatcgtgttctcgttggtgcagtggttccccctgtcgcgcgtcaagctcactcccc

SEQ ID NO: 2882 - DNA, 354 bp, Glycine max
ggctagctagcgggccaaagtagtgcctaagtcttcctcatatcttccaccctttggcttattagtgggagcaatacatatcattcattcagaggcaacaaaggagttgtaaattaagagcatggctgcacaagctcttgtatcatcatcatctcttaccttctcagccgaggctacaagacaaagtcttggaccaagatcactccaatctccatttggcttctcaagaaaagcctcctttcttgttaaggcagctgctactctccctgtcaagcaaggatcagacagacctttgtggtctgcatcaaagcaaagtctttcctacttggatggcagccttccgggtcaccatgg

SEQ ID NO: 2883 - DNA, 366 bp, Glycine max
aggggtatagagggagctacatacaaagagtgtgatagtaagagtaatagaagagcggtctggtccaagtgctgcaatatgcaaggcaaagacatggaatggttgtcgtcttcgtcggcgattgcacagaaaacatgggaactcgagaacaacatcagcccaatggacactccgggcggcgccgccatctcctccacaaccaccacgactagcgccgacgagtcgatcttctactacgacgaggcgggccagaacgagttccagcgcgacaagccctgagccaacgacccccactacttcaagcgcgtgaagatctccgcactcgcgctcctcaagatggtcatccacgcccgctccggcgggacc

SEQ ID NO: 2884 - DNA, 374 bp, Glycine max
ggtgctcactcatctatctattataaacaaacactcttcttcatattcttcttcttcttcttgttcttgttctatctgtgacgagcatcatggcctcgagagcagtgctattgttggctatgtgtgtgcttccggccatggttgtggccattcgcccagcaaagaaccctttttgcgtgaagggtcgcgtctactgtgacccttgccgtgctggttttgagacctcagcaaccacctacattgccggtgctgagattatgttgcaatgcaagagcagggttagcaacgaggttgtgtacaccaagaacgggtacactgactcaactggagcatacacaatgtacgtggaccaagattacgcagattaaatatgc

SEQ ID NO: 2885 - DNA, 356 bp, Glycine max
  modified_base (331)..(331): a, c, g, t, unknown, or other
  modified_base (337)..(337): a, c, g, t, unknown, or other
gactcaacatttgcatttcctccttcatatacagtacacacttcagctggtggtagcctggtacatagtgtgcttccaaaatgaagaacagtaggaagactttactattgctgctgctcatggctgcaactctcttttgcatgccaattgtgtcgtatgctgtttctaatgtcaacattcaagaccatctcaccaatatttctgagctggtaaaaggtccaaatataatgcttttgtcatttgtggattgtggagagaggtgcatggtgaggtgcagtttgcactcaaggccaaagatttgcacgagagcttgcgggacatgctgtatgangtgcangtgtgttcctccggggcac

SEQ ID NO: 2886 - DNA, 399 bp, Glycine max
  modified_base (315)..(315): a, c, g, t, unknown, or other
ggcattttcatttcattttgaattgaaaccgcggagagtttgctgctacatcgatcatcatcacctcatggacggacacgatccacaagacccaaagcagagccctgctgacatgactgcctttgtgcaaaatcttcttcagcagatgcaaaataggttccagacaatgtccgactccattgttacaaagattgatgatatgggaagtcgcataaatgagttggaacaaagcatcaatgacctgagagcagagatgggagtggagtcctctccatcacctgcagcccctgctaagctaacggaggagataaccanagaagaaggttcagcttaagtggcattctgatttcagttgctcattattcatgcattgtattgcacaaggattgatattctgca

SEQ ID NO: 2887 - DNA, 308 bp, Glycine max
ggctcccagcagctaaggaatcaaatcggaaattcagactctcactcttcccttctcccctctccttagcttccactcattgtacacaagattctgcagagacagagagaaaagtgttgaacatggcaggaagagaagttcgtgaatacaccaacctcagcgaccccaaagataagaaatggtgcaaggggaaagataagattgacgatgaagacattagtttccaacgcatggttgcaaagatgcgagaggttgctggggatcccggaggttagcttcatggacgaggcgccttggacagtgagtga

SEQ ID NO: 2888 - DNA, 390 bp, Glycine max
gaaggggttccagcattaagaaatggatagaatttagacaactaagaaagaaaaagaagaaacaaagccaaggcgttgctgaatcgcgactatgatcattccttactttgttccttgttctgtgttcttcatgtgaccgtcggttagttttgttttttagatttaaatgtgatctatgtacccttaggggtcccccttgttattatgtgcacatccatcttccccatctatcatcggcgatctcctttttctttgtaaagttcaatcttaaccgatcactagtgttgtaaagttgtctttaaagagattgacagttaataagcaacaccaagatataagcaactcacaactaacttctttttatcaaatatcacttgagatcgtttcaag

SEQ ID NO: 2889 - DNA, 73 bp, Glycine max
gtatggcgcaacccaattcttgtactatacttggcaagttctactctcctatcccttttattaatttcggaat

SEQ ID NO: 2890 - DNA, 270 bp, Glycine max
ggtccaaaatcctcactccagccacacgcctcagtagaccatggcctcattgggtgggttacaaaatctaagcggcatcaattttcttatcaaaaaagagggtccaaaagtcaatgcgaagttcgagctgaagccgccaccatatccactgaatggtttggagccggtgatgagccagcagacacttgagtttcattgggggaaacaccacaagacatatgtggaaaatctgaaaaaacaaattcttgggacagagcttgatgggaaatc

SEQ ID NO: 2891 - DNA, 365 bp, Glycine max
ggtgtagaggcagctaaaaacaaagagtgtgatagtaagagtagtagaagagcggtctggtccaagtgctgcaatatgcaaggcaaagaaatggaagggttgtcgtcttcgtcggcgatcgcgcagaaaacatgggaactcgagaacaacatcatcccgatggacactccgggcggcgccgccatctcctccacaaccaccacgacaagcgccgacgactcgatcttctactacgacgaggcgggccagaacgagttccagcgcgacaagccctgggccaacgacccccactacttcaagcgcgtgaagatctccgcactcgcgctcctcaagatggtcgtccacgcgcgctccgggcgcaacat

SEQ ID NO: 2892 - DNA, 322 bp, Glycine max
gcatttggagagacagagtagtgagtagtgagagggcgaagcgatgaatgccccagatcgttacgagcgtttcgtcgtccctgaaggcaccaaaaaggtttcttatgagagggacacgaagatcatcaatgcggcgtccttcaccatcgagagagaggagcacactatcggcaacatcctccgcatgcagctgcacagagaccccaatgtcttgtttgccggatacaagcttcctcatcctcttcaatacaaaattattgtcaggatacacaccactagtcagtcctcgccaatgcacgcatataaccagtccgttaatgat

SEQ ID NO: 2893 - DNA, 356 bp, Glycine max
ggcgtacacagcctcaacaaccctaacgcgtgcagagcagagagagacgcagccatggggcgaagacccgcgaggtgttataggcaaattaagaacaaaccataccccaagtcacggttttgccgtggtgttcctgatcccaagatcaggatttacgatgttggtatcaagaacaagggtgttgacgagtttcctttctgtgtccatccggttagttgggacaaggaaaacgtctctagtgaggccctgcaagctgctcgtactgcctgcaccaagtacatgggcagatctgctggaaaggatgctttccacttgagagtcacggtgcacccattccatcttcttaggatcccccc

SEQ ID NO: 2894 - DNA, 299 bp, Glycine max
ggttgaacttcattgtttttggctaagcctcgaaatccagaaaaatcgtgagcgaagatgatgcacatgaccttttactggagcaggaaggtgaatctcctaatagattcatggaagaccaacgattggacggagtatctcatcactctgctcgcatgcctcgtcgttgccgccttctaccagttcctagagaatcgccgcatccgcctcaagctcatcggcgccggaaatcccttcccggcagagatctaggccccgcttctgcgacggaagcttgccggaaaccgcgccaaggtggg

SEQ ID NO: 2895 - DNA, 349 bp, Glycine max
ggagggttattggacacattcttcagcgactgcgtttttggatcggaacctcttctgcggcgtagcaatgggacactccaacgtttggaactctcacccaaaaaactacggtcctggttctcgcacttgccgtgtgtgtgggaatccacatggactgatcaggaagtatggccttatgtgctgcaggcagtgcttccgtagcaatgccaaggaaattggcttcatcaagtatcgctaaaagagcagttgtcaactacggaccaatattgtgttctggcactaggatgttttgaggatgttatgtttgaagaaacttgagactttcttttttcatctaattaattatcag

SEQ ID NO: 2896 - DNA, 381 bp, Glycine max
gagtgagagagagagaaggcaagatgtcgaagagaggacgcggtggttcggcggggaacaagttccggatgtcgctgggtctgccggtggcggcgacggtgaactgcgccgacaatacgggggcgaagaacctctacatcatatcggtgaaagggatcaaagggcgtttgaaccgtctcccctcggcttgcgttggcgacatggtgatggccaccgtgaagaaggggaaacccgatctgaggaagaaggttttgccagctgtcattgttcgccagcgcaagccatggcgccgaaaggacggcgtctacatgtatttcgaagataatgctggtgttattgtcaatcccaaagggagaaaataaacgttctgctatcactggt

SEQ ID NO: 2897 - DNA, 348 bp, Glycine max
accaaggcgtccgacgacagaaggggaagtatataacttcttcgaggtgtccggaaatcgttcctatcatcacttctcaaatctcgaaccctctcgttcgtgccgatcactaggtcacacttcatcaatggcgggtagaggcaaaaccctaggattcagcgccgctaagaaggccacctcaaggagcagcaaagccggcctccaattccccgtcggtcgtatcgccaggttcctcaaggccggaaagtacgccgagcgcgtcggcgccggagcccccgtctaactcgccgccgttctcgaatatctcgctgctgaggttttggaagtggctggaaacgctgcgacaga

SEQ ID NO: 2898 - DNA, 278 bp, Glycine max
ggctctgtggctctctacatgtcagcaatcagcgcgaaacaggctctcgaagttgccgttaacgctgctgtttgtggatcaaaaggtcacagatattgtccagtttcccaaagggtcctcctaagattaaacgacaataaaatcgcttacacactccacctcaacgattgcagtagtatacccgtaaggtttttgggtgtgaatcccaaagggaacgttccactggttccttttgatggcaaatgggtggctgactctgatgtgattgtggggatact

SEQ ID NO: 2899 - DNA, 364 bp, Glycine max
gacaccgaagcactcgcgattccagccatagcacagaactctttgcaagacagttgctgaatgacgccacagatagaagcgtcttagttcacgctcatcgctgaaaaacctgaattcttctcttcatctcttcacattcgtttcgatcttcgatatctgaaaatgacagtgtgcatttcaatccacatcggtcatgccggtattcacgtcggaaaaacctgctggtagctctattggctcgaacacggcattcagcctgataggcaaatgctaagtgatacgactgttggtggacgtgatgatgctttgaacatcttcatcagtgaaactgggtctgaatagcacgtgcctcgtgcgatttttg

SEQ ID NO: 2900 - DNA, 335 bp, Glycine max
gagattatctttatccttttagcctttgggtacccctctgtgtggcagtgcatcttcatctgaagtgggaagctaaactcaaaggtcaaaaagagcacaggttagtcatgacatcctcattctcaacgcagttggtgcaaagtcagaacctacctcctcgttttcatctccatgtccaggggaattttagccaacatgtgtcaaatgtttcaatgacacatgtggtccgtagcagtaacaaatcacagcttggtttacggtaaaacgttggcatcaagatctcactatgctgccagattttcagtctcaggacaatctgaagcaaaatcaatcac

SEQ ID NO: 2901 - DNA, 362 bp, Glycine max
  modified_base (304)..(304): a, c, g, t, unknown, or other
gagggatctcactcactaaaattccaagtagccacagctctcctctcactttcatttctacatccctggctctgttccgtcgatgacgatggcgtttagggtgcgaaaccctgacctccgctttctcattcttctctctctcttgtccatcacttccgccaaggtcttcttcgaggagcgtttcgatgacggatggggaaatcgttgggttaaatcagattggaaaaaagatgagaacctggctggggagtggaaccacacctctggccaatggaatggagacgctaacgacaaaggtattcanaacagtgaaggatacagattctacgctaattcagctcagtaccctgaattcagcaaca

SEQ ID NO: 2902 - DNA, 343 bp, Glycine max
ggtagcgctagtttgtatgttcctgcgattgcaattttcaagttgccgacgttttgaggagaatcaaaagagcaaaagcaaaggcaaatgatcctaaagagactgttactgctactaaaacccttaagtgtatcttcaccaccttcccacatcaaccctcagatcttacagttcttggagaataggagaaaggtgcaccatgatgcaataaacttttgtcaagccattctgcaaaaaaagtcaattgaatggaaagctgtgcaccgtaacaatttgtcacaggccatcaatgatgttgacctagttgttacagttggtggtgatggaactcttctgcaggcca

SEQ ID NO: 2903 - DNA, 326 bp, Glycine max
gggaaataatagtcaaccatggcagggagattgaccaacgcagcatcgaggatcttgggcggaaacggcgtcgtttaacgatccgtagcttcctctcttcggctccgctccggcatgggcctccccgtcggcaaacactacgttcccgacaaaccccttcccatgaatgaagaactcttgtgggacaatggcactgcatttccagaaccgtgcatacatcgtactgctgacactgtccgaaagtatgaagcattggcctggctatgtgggggattgagttttttcgcgtctctgggactgtttggctgtgtggaatgacaaagcct

SEQ ID NO: 2904 - DNA, 384 bp, Glycine max
  modified_base (295)..(295): a, c, g, t, unknown, or other
ggacgaagaagaaaatgatggcaacaaccgcgcctgtgcggtggcaaccaccaaacattaggtttaggattgagccgaagagagcgatgagagtgaaagcctttggtaagggaggcagggatatggatagggtttggagtgaggcgtggcgaagtgctaacgatgggtttgagcggttcgtcttcgaagcgaagaagactgcggagcgcatcgaccggcgctattccctttcgcggcgtctctcctccgtggcaagggcggccgcagaccgagcccgcgagattgatcgtgagtntgagattggaaaacgttaccgcactttgagcatcgattttcaaaggaaactggcccaagtacaggaaacagctcaaggactttctggat

SEQ ID NO: 2905 - DNA, 358 bp, Glycine max
gacacctttgttcactcttcttctcttgcggctagggttttagcgcagcttcttctagatttaaggaagatgggtaaggaaaaggttcacatcagtattgtggtcattggccatgtcgactctgggaaatccactaccactggtcacctgatttacaagcttggaggcattgacaagcgtgttattgagaggtttgagaaggaagctgctgagatgaacaagaggtctttcaagtatgcctgggtgctggacaaacttaaggctgagcgtgaaagaagaatcaccattgatattgctttgtggaagtttgaaacaacaaagtattattgcacagttattgatgcgcctggacataagg

SEQ ID NO: 2906 - DNA, 242 bp, Glycine max
ggggggtcagagtgagaaagagaaagagagaattcgtaaaccctaatttcggaaagatcggcgatgactgcctccaaggatcgcgagaacttcgtctacatcgccaaactcgccgagcaggccgagcgttacgaagagatggtggaatcaatgaagaacgttgcgaatctcgacgttgaactgacggtggaggagcggaatttgctttctgttgggtacaagaatgtgattggtgctcgcag

SEQ ID NO: 2907 - DNA, 85 bp, Glycine max
gttccaaaagaactacgtaggtctgattttctcatcccaaattgaggaatacgtaggagcaaagggaaacacccttgtcgaccat

SEQ ID NO: 2908 - DNA, 298 bp, Glycine max
aggaaaaagggttgagtagtagtgttgaggacaaggtgagttgtgttggggacaaggtggttgttgtggaaaaagtgagtagtgttgaggataaacaagtggtttcgaaaacgattgagcaagggaaaagggtggtggaacctgtggaggaagaaaaaactgtcacaatcactacgagtgtgaagttggtgtttggtgaggatataacgtgggcagagttacccgtgaactgtagtgtgaagctggtgagggatatacctagggatcggtatccaggtttgaacgggtgccctgtcaa

SEQ ID NO: 2909 - DNA, 347 bp, Glycine max
gacatcacatttcgttgcgcctctgttctctgtcactgctgcgtctctcgtaaccatgcctaagcaaatccacgagattaaggatttccttctcactgctagaaggaaggacgcaaggtcggtgaagatcaagaggagcagagatgtggttaagttcaaggtcagatgctcgaagtacctctacacactttgtgtgtttgacccagagaaagctgataaattgaagcaatctcttcctccaggtttgagtgttcaagacctgtaaaggtacagggcgagagaccaagaagaagcaattcattgattcttctgaacttcgtttctccgtagttgaaacttgagattct

SEQ ID NO: 2910 - DNA, 399 bp, Glycine max
  modified_base (308)..(308): a, c, g, t, unknown, or other
gagttcataatcaaacccttcaggaaccttgataaccttcgaaggatcaccgtcctgcactattatcaaatgataaccctcgaagaagggcctccacatccccaagaagtccaggttacgtatcgtgggaatcactatgtccacctcctccttcagaatcggcgttgctgctgctgtgcttcccgatgacgaagacatcgttccttcctcttcctcggatcgtaggttttgctgagaaagacaacgttgttgttgttcttgttgctgctgctttcgagcttcgaggagcacgaggatggtgctgtgtntgttactactttgtctgcattggagtggggggcttatgtagtagttcaaactctcgggatttggcacgtgccgaaagcgtgtatgtgtgag

SEQ ID NO: 2911 - DNA, 308 bp, Glycine max
ggaacaacagttgcggagtcaatcgaaatcggcggagatggttgccatgaggtttcaccagtaccaggtggtgggaagggctcttcctaccgaatccgatgagcatcctaagatctaccgcatgaaactctgggccaccaacgaggtccgtgccaaatccaagttctggtattttttgagaaaattgaagaacgttaagaaaagcaatggacaagtgctagccatcaatgagatttttgagaacaatcctaccaagattaagaattatggaatttggccgcgttatcagacgcgcactggttatcaca

SEQ ID NO: 2912 - DNA, 397 bp, Glycine max
aaaagggcactgaacgctatcgcttgcaggttgccacactacggtgatgtttccaccaaacccgtttgcgttgttgtttgcaaatacatggcaacgataaggatcctaggaacgctgaaagagggtgacttgcatgggaaaacggtactcgttaaggtccatcttaacgtgactttggatgacacccttaatatcagcgatgacactaaagtccgtgctgctgttcccaccatcaagtacttcactcggaacggtccaaaagtaatcctttccagccatttgcgacgttcaagatgtttaacacctaaatacagtttgaaccctcttgtgccaacgctgtcacaacctcctggaactgaagttactattgccaacgaacccaattgggaagaaattt

SEQ ID NO: 2913 - DNA, 383 bp, Glycine max
ctgccaaaagaccactgaaaggggttcctaatcgtgtccctgaaaaagcctaaactataaacactccagtctgagtattgatcgttctctttcagcgttcctcaggtccatagggcattctaagcttcgcgagcaataagttcgaatgctttcccaacatgaccgccttcaactagattaagcacatagagataccaattcgccgcaaggaagaatcactggaagaaccggaagtgccgaaatacagagatcgagctaaagagcgtagagaggatcagaatcctgattatgaacaaactgagcttggatttcatgcagttgctccacctggtactgtggatattccgtcatctgatgcgcacaagttatctattgagaagagc

SEQ ID NO: 2914 - DNA, 389 bp, Glycine max
agctacgagacgacagaaggggagatatacattctcttgtcacagttttctgtgtcaccggaactcgtttctttcaaaacacttcaaacatctcgaacgctctctttccggcaactaggttaaagttcatcaatggcaggtcgcggcaaaaccctaggatctagcgccgccaagaaggctacctcaaggagcagcaaagccggcctccaattccccgtcggccgtatcgcccgtttcctcaaggccggaaaatacgctgagcgtgtccgcgccggcgcccctgtctacctcgccgccgtactcgaatatctcgcggctgaagttttggaattggctggaaacgctgccagagacaacaagaagactcgaattgtgccgcgccacattca

SEQ ID NO: 2915 - DNA, 372 bp, Glycine max
gattcacaactttacccactcttcattctagcaattcgaattcccaatccaaaaccctaataccttcaaagaacctagtagtgaatcagtgatggcacctaaggcagagaagaagccagcggagaagaagccggtggaggagaagaagtcgacggtgggagacaaggctccggcggagaagaagccgaaggccggaaagaagcttccgaaggagggaggagccggcggagaaggggggaagaagaaaaagaggaacaagaagagcgtggagacatacaagatatacatattcaaggttctgaagcaggtccaccctgacattggtatctcaagcaaggccatgggaatcatgaacagcttcatcaacgacat

SEQ ID NO: 2916 - DNA, 354 bp, Glycine max
tgggacatcacatttcgttgcgcctttgatctctgtccccgctgcgtctctcgtaatcaagcctaagcaaatccacgagattaaggatttccttctcactggcaaaacgaaggatgcgaggtcagtgaagatcaagaggagcagagatgtggttaagttcaaggtcagatgctccaagtacctctacacactttgtgtgtttgacccagagaaagctgataaattgaagcaatctcttcctccaggtttgagtgttcaagacctgtaaaggtactgggcgagagatcacgaggaagcaatccattgattcttctgaagtttgattctctgtcagtgaagcttgagatttttgtc

SEQ ID NO: 2917 - DNA, 67 bp, Glycine max
gggttgcaccgccgaccgaccctgatcttctgtgaagggttcgagtgagagcatacctgtcgggacc

SEQ ID NO: 2918 - DNA, 385 bp, Glycine max
ggagagagggagtcagagaaaccctaggtaagaagaaaagatgccggctggtcatggtttgagatcccgcaccagagattccttctctcgtcctttcaggaagaagggaaccatcgccctcaccacatacctgagaacctaccacgtcggcgactatgttgacgtcaaggttaacggtgccgttcacaagggaatgccccacaaattctaccatggccgcaccggacgcgtctggaatgtcaccaaacgtgctgttggcgtcgaagtcaacaagcaggttggcaacagaattataaggaagaggattcatgtgcgggtagagcatgttatgccttcaaggtgcgctgaggagttccgcctcaggaagattaagaatgatcagcta

SEQ ID NO: 2919 - DNA, 391 bp, Glycine max
ggctgtgagtgagattacccatagatagagagcgcggcataacctaaacttacccttcttctctctgtgtgtgtgcgcatcaaacgcaaccagaagcagccatggccactgcaagaactgtgaaggacgtttctcctcatgagttcgtcaaagcttactcttctcacctcaagcgatctggcaagatggagctgccagagtggactgatattgtgaaaactgcaagatttaaggagttggctccttatgatcctgactggtactatgtcagagctgcttccatggcaagaaagatctacttgagacgaggacttggtgttggtgcctttcagaggatttatggtgggagcaagaggaatggtagccgccctcctcatttctgcaagagcag

SEQ ID NO: 2920 - DNA, 385 bp, Glycine max
  modified_base (52)..(52): a, c, g, t, unknown, or other
ggtgtagttccaccgagtaacaacaatgtcgaagcgaggtcgcggaagatcngcgggaaacaagttccgcatgtcgctgggtctgccggtggcggcgacggtgaactgcgccgacaacaccggcgcgaagaacctctacatcatatcactgaaggggatcaagggtatgctgaaccggttgccgtcagcttgcgtcggagacatggttatggccaccgtcaagaagggaaagcccgatctccgtaagaaggtgctgcccgccgtcatcgtccgccagcgcaagccttggcgccgaaaggacggtgtttacatgtacttcgaagataatgctggtgttatcgtgaatcacaatggtgaaatgaaaggttctgctatcactggtcca

SEQ ID NO: 2921 - DNA, 393 bp, Glycine max
ggcccttctagctttttcccagtccaagcagcctccaattcgtgccactctcttcaaaatggccgttaccttctcaaatctccacacagaatcaggtctcaagtccctcgacgacttcctctctgggaaggtctacgtttctggggatcagttcacaaaggacgacatcaaagtgtatggtgctgttttggagaagccaggtgactcttttcccaatgctgccaagtggtacgaggttgtctcatctcagcttgctgcaagcttccccggcaatgctcaaggggtgagattcagtggcaaagcttctgctccagcggaggctgctcctgcgaaaccggatgcttctgctgctgaagatgatgatgaccttgatctctttggcgatgagactga

SEQ ID NO: 2922 - DNA, 401 bp, Glycine max
  modified_base (166)..(166): a, c, g, t, unknown, or other
ggtagttccaccgagtagcaacaatgtcgaagcgaggtcgcggaggatcggcgggaaacaagttccgcatgtcgctgggtctgccggtggcggcgacggtgaactgcgccgacaacaccggcgcgaagaacctctacatcatatcagtgaaggggatcaagggtangctgaaccggttgccgtcagcttgcgtcggagacatggttatggccaccgtcaagaagggaaagcccgatctccgtaagaaggtgctgcccgccgtcatcgtccgccagcgcaagccttggcgccgaaaggacggtgtttacatgtacttcgaagataatgctggtgttatcgtgaatcccaagggtgaaatgaaaggttctgctatcactggtccaattgggaaggagtgtgct

SEQ ID NO: 2923 - DNA, 325 bp, Glycine max
ggttctagtgtgtgattgtttgttgttgtaactcgttcttcttcttttgttgttctgtgtttgtgtttgttttttctctcacctgaaaatgtcttgctgcggtggtaactgtggttgcggaagctcctgcaagtgcggcaacggctgcggaggctgcaagatgtacccagacttgagctacactgagtcaaccaccaccgagaccttggtcatgggagtggcacctgttaaggctcaatttgagggtgctgaaatgggtgtgcccgctgagaacgatggctgcaaatgtggaccaaactgctcctgcaacccctgcacttgcaag

SEQ ID NO: 2924 - DNA, 361 bp, Glycine max
ggagagtgagtgagatagagagagacgcttcgcaaatctcaatcgaatctcagaaaaatgagagaaatcatcagcattcacataggtcaggccgggatccaggtcggaaactcctgctgggaactctactgcctcgagcatggcatccagcccgacggcatgatgccttctgactccaccttcggtgtagcccacgacgccttcaacaccttcttcagcgaaaccggatctggcaagcacgtcccccgtgctgtcttcgtcgacctcgaacccaccgtcatcgacgaggtccgctgcggcacctaccgtcaactcttccaccccgaacaactcatctccggcaaggaagacgccgccaaca

SEQ ID NO: 2925 - DNA, 405 bp, Glycine max
gggcatagcaaaatcgtttctccaatttaatcaccattgtacaacccaattcccttcgtcgttttcgattaagagagcaatggcacgtaccaagcaaaccgctcgcaagtccaccggaggaaaggctccgaggaagcaattggcaaccaaagccgctcgcaagtcagccccggcgaccggcggagtgaagaagccccaccgcttcaggccaggaacggtggctctgagggagattcgaaagtaccagaagagcaccgaacttctgatccgaaaactcccattccagaggctcgtcagagaaatcgctcaggatttcaaaaccgatctccgctttcagagcagcgccgtttcggctcttcaggaagccgcggaggcttatctcgttggactctttgaggacactaa

SEQ ID NO: 2926 - DNA, 342 bp, Glycine max
ggtagttccaccgagtagcaacaatgtcgaagcgaggtcgcggaggatcggcgggaaacaagttccgcatgtcgctgggtctgccggtggcggcgacggtgaactgcgccgacaacaccggcgcgaagaacctctacatcatatcagtgaaggggatcaagggtaggctgaaccggttgccgtcagcttgcgtcggagacatggttatggccaccgtcaagaagggaaagcccgatctccgtaagaacgtgctgcccgccgtcatcgtccgccagcgcaagccttggcgcccaaaggactgtgtttacatgtacttcgaagataatgctggtgttatcgtga

SEQ ID NO: 2927 - DNA, 59 bp, Glycine max
ggagagagagagagaaatggagaagacaggagtgttatcggcgaaggagggagggagag

SEQ ID NO: 2928 - DNA, 157 bp, Glycine max
tcaaacgaagaaaggcttatggtggatacctaggcacccagagacgaggaagggcgtagtaagcgacgaaatgcttcggggagttgaaaataagcgtagatccggggattcccgatataggtcaacctttcgaactgctgctgaatccacgggcagg

SEQ ID NO: 2929 - DNA, 362 bp, Glycine max
  modified_base (355)..(355): a, c, g, t, unknown, or other
gatgtcttggacaaagcatcttgtgaatgtgacagagtgttggggttgaacacctgaacagaacttgaaccctgcctctgcgctcttgtggaatctgtgcagtgcttgaaccctaataatggctgctttcttgagaaggtttgcgagggccactccgatcctattcgctgcccaatccaattcctctcacaccaatctccgccttcccttcactgccatcgccgccatttccggcggagtctccttcctttactaccattcctctcccaacttcgctcattcacaagaagcagaacaagtggaaagtaaaaacatcgcactcgttccggataaatgggtcgagtttaagttgcangacactg

SEQ ID NO: 2930 - DNA, 362 bp, Glycine max
gactcactcatacaatagagaccagcttttgcttctttgtgaacatggagatgaggaaatcatgtggcttcttcttcttgctcctcctccttgtctttgcttcccaggtggtggtgcagacggagggaagagtgtgtgagtcacaaagccacgggttccatggtttgtgtaatagagaccacaactgtgctttggtctgcaggaacgaaggtttctccggtggcaggtgcaaaggcttccgccgccgctgcttttgcaccaggatttgttgagatctcatcaaacactactcttgccatgcaaattaataaatcatagctaggccaaataaattgcatctactctttatccatttgggagct

SEQ ID NO: 2931 - DNA, 397 bp, Glycine max
gatccaaattcaagttcgcaccaaattttcctcccaaaatgtcaggccgtggaaaaggtgggaagggtttgggaaagggaggagctaagaggcacagaaaggttcttcgtgacaacattcaaggaatcacgaaacctgcgattcgtaggttagcgagaagaggtggcgtgaagaggaccagtggtttgatttacgaggaaaccagaggagttctgaagatattcttggggaacgtgattcgcgatgctgtaacctacactgagcacgctaggaggaaaactgttactgctatggatgtcgtttatgctctcaagagacagggaaggaccctctatggctttggaggctaaagaatagaatctttaggtttaatgactgtgttgcaggataaaacatt

SEQ ID NO: 2932 - DNA, 394 bp, Glycine max
ggtttttgtttcccatagcatagaagaagcagaaagagaagcattagcaaaagcaagaagaactagtctaagcagaaatggcctcttcagtgatggcatctgtggccctcaaacctgcccctttcactgttgagaagtcctcagttagaggccttccctccctctcaaggaactcctcttcattcagagttgtggccagtggtggcaagaagatcaagactgacaagccttatggaattaatggtggcatggctttgagggaaggagttgatgcatctggcaggaaaggaaagggaaagggcgtttaccagtttgtagacaaatacggtgctaatgtcgatggttacagtcctatctacgacaccaaggactggtctccaaccggtgatgtcta

SEQ ID NO: 2933 - DNA, 392 bp, Glycine max
gatctcattaacgtttcttctcttcactctgcccgctgcatcaatggcttcagagaagaaactttcgaacccaatgagggagataaaagtgcagaagctcgtcctcaatatctctgttggcgagagtggagatcgtctcaccagagcctccaaggtgttggaacaacttagtggccaaaccccagtgttttccaaagcaaggtacactgttcgttcctttgggattagaagaaatgagaagattgcatgctatgtcactgtcagaggtgacaaggcaatgcaacttttggagagtggtttgaaggtgaaggaatatgaacttctcagaaggaacttcagtgatactggttgcttcggctttggtattcaagagcatattgatttgggaatca

SEQ ID NO: 2934 - DNA, 358 bp, Glycine max
gacggcactcgttttcgttctcgttctggtttatagatctttgcgaaggaggtttacagcgctcaaccaaagatgcagaacgaggaaggacagatcactgagctttacattcctaggaagtgctccgccacaaacagattgattaccgctaaggaccatgcttcggttcagatcaacattgggcatgtggatgagaatggcgtctacaatggccatttctccacttttgccctctgcggattcatccgtgctcaaggtgatgctgacagtgctctagaccgcttgtggcagaagaagaaagttgaagttaagcaacagtagacacccatgatagtttgttacttcgttatgtattaat

SEQ ID NO: 2935 - DNA, 374 bp, Glycine max
ttttcatcaaagggtaagccaccaagatcttttgttactaccatctccagttctggattgtttgtgagccaaaagcttgggaaatcaaatgctccgcggtctcaacatcaacccaaatgtgtaaagcctttgcaaactgttccagatgatgactctcctgtcacctgcatcaaaacttcttctcccaacggcaagaggatctcctctcctaattgtgacgtgggatcatcacctactactcgcagaggtgggaggaagttgatattacaatctatctcttcatttccttctctcaaccctcaccattagaatgaagatcttcatcttcggcttaagttagcctacccccaaccctcttcccttggttcacgttt

SEQ ID NO: 2936 - DNA, 392 bp, Glycine max
gatgtcatagtattatcattcattctcatctttctctcttctctctccacccaaaccctaactcccgaccctgttcccctctcgtatccgtcatgaaaggaggaaagtccaagaccgaatctaagagagccgatcccaaacttgctgtgaataagaagggagccgccaccaaggctaggaaacccgccggcaaggggaaggcagcgaaagatcctaacaagccaaagaggcctccaagtgctttcttcgttttcatggaggagttcaggaaggtattcaacaaagaacatcctgaaaacaaagcagtgtctgctgtgggcaaagctgctggagcaaaatggaagaccatgtctgatgctgacaaagcaccttatgtggcaaagtctgagaaa

SEQ ID NO: 2937 - DNA, 384 bp, Glycine max
  modified_base (354)..(354): a, c, g, t, unknown, or other
gatgccgaaaagtagtaccaagatggcttcagttgtgtatctcctctttggcttccatctcattgttatcatgtcaagttccttacccgcaactagtgaagtgtttgcaaaacagtatccatccacagaacccgtggaagaaaaactcacccaactccacttctatttccataacaacataacgggggaacacccaactgctatgaaaactgttttgcctcctaaggggtccattcatggttttggggctacttacatgatggatgaccctctaactgaaggaccaagtccaacttcaaagcttgtgggaagatctcaaggaatatacgctttggcttcacaacatgagcctgngttgctcatggtgacaaattttctcttcac

SEQ ID NO: 2938 - DNA, 387 bp, Glycine max
gatgtacagaaaggaggatgagacgacgtatgaggataagaaaaactagacaagcttatggtaaaaatgaagacaacgaggactggatcagtgagagagaagttgatggtgaaactgaggacgatggggacatgatcagtgagaggaaaagaaacattagagaagttgatgctgatgttcaagatagggtcataaaatatgctctgttgcacaatgtccagaagttgaaaatgaatataaattcaacaacctatagacccaattttaagtccctccctttaatctttcgcagtcagtctttgacatctcttgagctttccaataagttgagcccttctaggttaaaacttccaaaatctctatgcttgcctgcattgaaaagcttgc

SEQ ID NO: 2939 - DNA, 395 bp, Glycine max
ggagcagcagaatcttcaggccaagccaggtaagcaagcacaacacaaccccgaaatggcttctgcttctgttcccatggctttctcgctgagctctgttatcaacaacaacaagccttcatccgaagccttcttcaggccactacccctacggcaaccaaagaggaccctcttcaccacaaaggcagtgtcaaactccaaggctcaaatcaatgcatctttgaaggagaaggcagttgcaggactcacagcagcttctgtgacagcatctatggtggttccggaggtggctcatgctgctggatatgagttctccccttccctcaagaactttctgctaagcatctttgctggtgggtttgttctagtagccatatttggagccgttattgggg

SEQ ID NO: 2940 - DNA, 369 bp, Glycine max
aaagagacccggaaagggtgggaaccgcttttggaaatccattgggcttggatttaagactcccagggaagccatcgaaggaacctacattgacaagaagtgccccttcactggcaatgtttccatccgtggccgtatcttggctggaacatgacacagtgctaagatgaacaggactattattgttaggaggaattatctccattttatcaagaagtaccagaggtacgagaaaaggcactccaacattcctgctcatatatcacctgctttccgtgtgaaggaaggagatcacgttattattggtcaatgcaggccactttctaagactgtgaggttcaatgtgttgaaagtgatcccagctggatc

SEQ ID NO: 2941 - DNA, 65 bp, Glycine max
ggttctcgagtgtttgaaccccccttccttttctgctttgaattaaagattcgtgttttatatgt

SEQ ID NO: 2942 - DNA, 397 bp, Glycine max
tattttagggaggaatttatttcattgctacaaatatggattatttaaaagaataagacatgtatttggatatttcccttcaacttaacaaaaattgaatttttttccatacacgcacgaatagttgaagggaactctccgaagaaaaaatggattatgggagtaacaaaaaaacctgacttgaatgatcctgtattaagagctaaattggctaagggaatgggtcataattattatggagaacctacatggcccaacgatcttttatatatttttccagtagtaattctaggtactattgcctgtaacgtaggcttagcggttctagaaccatccatgattggggaacccgcggatccatttgcaactcctttggaaatattacccgaatggtatt

SEQ ID NO: 2943 - DNA, 249 bp, Glycine max
gagtctaaggttacgccgtcgtcgctgtttgtgtgtgtatcaagtgcaactaccaacgatggtgaaaggtcctcaaagagaacgcgtcagactctacgtgaggggtacaatccttggatacaaaaagtccaaatccaaccaatacccaaacacatccctgattcaaattgaaggagtgaacaccaaagaagaagtaagatggtatgcttgcaaaaaaattggctaaatctacaaagctaaagtgaaaaa

SEQ ID NO: 2944 - DNA, 386 bp, Glycine max
  modified_base (322)..(322): a, c, g, t, unknown, or other
ggccgaatgtgtctctccgcagcagccacacttcttcgccgtttcagctgaagagccatccgcaggtaagcaatggttaagcataataatgttatccccaatgggcacttccggaaacactggcaaaactatgtgaagacttggtttaatcaaccagcccgaaagaccagaagacggttggctcggcagaagaaggctgtcaagattttccccaggcctactgctggatctctcaggcctattgttcatggccagactctgaaatacaacatgaaagtcagagccgggagaggattttcactggaagaattgaaggctgcangaattcccaagaaacttgctccaactattgggatttctgttgatcaccgcagaaagaatcgttc

SEQ ID NO: 2945 - DNA, 380 bp, Glycine max
ggcactcattctttcattctcattgccgtcacagagagagacaagaaacaatgaagtttaaccctagggtttcctcaagccgtcgcaagagccgcaaggctcacttcaccgctccgtcgagcgtgcgccgcgtcctgatgagcgcgcctctctccaccgatctccggtcaaagtacaacgtgcggtccattccggttcgcaaggacgacgaggttcaggtcgtgaggggaacctacaagggccgcgagggcaaagtggtccaggtctatcgccgcaagtgggtcatccacatcgagcgcaccacccgcgagaaggttaacggctccaccgttaacgttggtattcacccttccaatgttgtcgtcaccaagctccgaatg

SEQ ID NO: 2946 - DNA, 391 bp, Glycine max
gatacctaaaaattgtaccgatatggcttcacttgtgtgtctccttttttccttgcatttcatggttatcatgtcaggttccttaccagcaaatagtgaagtgtttacaaaagagtctcctatgtctctatccacaaaacccgtggaaagactcacccaactccacttttatttccataacaacaaaatgggggaacacccgactgctatgaaaattgttgagcctcctaaggcgtccatttctggttttgggactatttacatgatggatgaccctctaaccgaaggaccaagtccaacttcaaagcttgttggaagatgtcagggaatatatgctgaggcttcgcaacatgaacctgcgatactcatggtaacgaatttgttcttcact

SEQ ID NO: 2947 - DNA, 372 bp, Glycine max
gacagcgaaacaaagagtgatttcaatgaatgattgggggtcacttgatctcaacaaaatcctcaaggtcaattgaagaagatgccgattagaaacatcgccgtccggaagctgaagaaggactcacccgacacgttgaaagcggctttggctgagttcaacccaaacttcatcttcgtgctcgccggctcaagctccggcatcgcctacaacaagctcaccgacaacggcgctgccacccctgccggcctcatctccgcctccatcgcccatgcattcgccctcttcgtcgccgtctccgtcggcgccaacatctccggcggccacgtcaaccccgccgtcaccttcggcgccttcgtcggcggcaacatc

SEQ ID NO: 2948 - DNA, 158 bp, Glycine max
acctccgatctaattacgttataagaaataagttctagtgtaaaattcactacatcatgtttcttatatattgaacgatatatagtattttaaaatgttaatgacaatttacatactttctaaaataatcccttaccttagcaagtaatcaatgtgtg

SEQ ID NO: 2949 - DNA, 398 bp, Glycine max
ggaatcacagtggtgccttatcgctgtggttatcatcttcttcttcctctttcttagatctcttctttctctacgccgcacgccgaaaccatggccggaaaaggagagggtcctgctatcggaatcgatctcggaaccacctactcttgcgtcggtgtgtggcaacatgaccgcgttgaaatcatcgccaacgaccaagggaacagaaccacgccgtcttacgtcggattcactgacaccgagcgtctcatcggtgatgcggccaagaatcaagtcgccatgaaccccatcaacaacgtcttcgatgccaagaggttgattggtcgtagattcagtgattcctctgttcagagtgatatcaaatttgtggctttcaaagtcgttcctggtgctgctga

SEQ ID NO: 2950 - DNA, 381 bp, Glycine max
  modified_base (326)..(326): a, c, g, t, unknown, or other
  modified_base (359)..(359): a, c, g, t, unknown, or other
ggtacgcagcttcatccctaacgcgtgcatagcagagtcagagacagagacgcagccatggggcggagacctgcgaggtgttataggcaaattaagaacaagccataccccaagtcacgtttctgccgtggtgttcctgatcccaagatcaggatttatgatgttggtatgaagaagaagggtgttgatgagtttcctttctgtgtccatctggttagttgggagaaggaaaatgtttcaagtgaggccctggaagctgctcgcattgcttgcaacaagtacatggccaaatttgctggaaaggatgctttccacttgagagtcanggtgcacccattccatgttcttaggatcaacangatgctttcgtgtgctggtgct

SEQ ID NO: 2951 - DNA, 385 bp, Glycine max
  modified_base (297)..(297): a, c, g, t, unknown, or other
gagggtttttgtcgtcgctactaagagttgctgcttcttcagccactccgcacctcgcagcctctgtgccctcaacaaccatggctgaaatcgaaactaccgttccagatcccacccaaatcgacgtcaaactcttcaatcgctggagcttcgaggatgttgaggttaatgatatgtctctggctgattacattggagtgtccccatcaaagcatgctacatatgttcctcacactgctggtaggtactcagtgaagaggttcaggaaagcgcagtgcccattgttgagaggctcancaactctctgatgatgcacgggaggaacaatggaaagaagctcatggctgtcaggattatcaagcatgccatggagatcatccacttg

SEQ ID NO: 2952 - DNA, 391 bp, Glycine max
gatagatagagagcgcggcataacctaaacttacccttcttctctctgtgtgtgtgcgcatcaaacgcaaccagaagcagccatggccactgcaagaactgtgaaggacgtttctcctcatgagttcgtcaaagcttactctcctcacctcaagcgatctggcaagatggagctgccagagtggactgatattgtgaaaactgcaagatttaaggagttggctccttatgatcctgactggtactatgtcagagctgcttccatggcaagaaagatctacttgagaggaggacttggtgttggtgcctttcagaggatttatggtgggagcaagaggaatggtagccgccctcctcattttctgcagagcagtggtgctgttgctcgtcac

SEQ ID NO: 2953 - DNA, 401 bp, Glycine max
gtattaaactttgaaataaataaataaataaacgggaattaagcttcccttttaataaaaaaattacacagaaaagtatgaaatgactaattaatttttggccaaactaaatgtatccttcaccgaaaataatcttggtcaagccaaactattatgaatagcaaatacaaagtcattgtttaatttaaaaactgtgacacaatgaaatagtcgaatttgattgagtcaagcatggtgatacagattgcaaaaggccatagtcaagctcagcaacaagtgtggccttgtattcaacaattgtacagtagcttcaagtttgaacacttcactatgactgcgagtgagacagaacaattcattcaaatacaacaacaatgattcacattacaaccacaaccatg

SEQ ID NO: 2954 - DNA, 393 bp, Glycine max
gacagcacagcactctttgcaacacaacaaaaaaagacaacacagagagaagcgtcttaataaacgctcttctctgaaaaacctgatttcttctcttcttctcttctctttcgtttcgatcttcgatctctgaaaatgagagagtgcatttcaatccacatcggtcaggccggtattcaggtcggaaacgcctgctgggagctctactgcctcgaacacggcattcagcctgatgggcagatgccaagtgataagactgttggtggaggtgatgatgctttcaacaccttcttcagtgaaactggggctggaaagcacgtgcctcgtgcgatttttgtagatctcgagcctactgtgattgatgaagttaggactgggacataccggcaacta

SEQ ID NO: 2955 - DNA, 386 bp, Glycine max
gttcccaattcatcgttgtctccgccttcttttatctctctctccactcccatatcgaaacaaagtcgttttgagttccgccgaaggcaccgtacgttgcagcagctatggatttggcatccaatctcggtggcaagattgacaaagccgaagttctctctgccgttcagaagtatgagaagtatcatgtttgctatggaggtcaagaggaagagagaaaagctaattataccgatatggttaataaatactatgatcttgttaccagcttttatgagtttggctggggggaatctttccattttgcacccagatggaaaggagaatctcttcgagagagcatcagaagacatgaacacttccttgcttcacaacgtggactgaag

SEQ ID NO: 2956 - DNA, 377 bp, Glycine max
  modified_base (363)..(363): a, c, g, t, unknown, or other
aggcgtcagacagctgcaaaaagagtacagaatgggactcagaacttcaatccctctattgctttatcaaattccattttccaattcaaaagcctaaatccgttcgaagcaccaaatcgtgatggaacaataggcagataagaagccagtatagatgaaaccagtggaagagaagaaatccacggtgggatacaaagctccggcagataacaagtcagctgccggagacaagcttccgagagaaggacgcgcctgccgagaatgtatgaagaagaagagagataatatgagcatcgagacatactatatctacatcggaaacgttcagaatcacgttcaccctgacattggtatctcatgcanagacatgggaatca

SEQ ID NO: 2957 - DNA, 385 bp, Glycine max
gagagtggcactccactgttactaaataaaggtttcaactttgaggataaacctcaccagttccctggttgaaacgaagcgaaatttccacctgcatcatcttcaaacctgcgcttcttttgaaccgatttgtgctgttttgttagtgaagcacatcgagtgcaaactgtcgaacaggcatggcaagcctgttgacaacatcagccatcacctattctcctctcaacaatggttccaaggatttcagaaagtcagggaattcttctaaaggaaggtgttgcataaaagcaatggggatagagaaatccttggaggaattgtacaatgtgaaggtggaaagaaaagtgtctcctgagaaactagctgagcttggagtttcaaaatg

SEQ ID NO: 2958 - DNA, 383 bp, Glycine max
ggaacctgatcgatctctttaccagttgccacactacaccgagattccccctaaacccgtttgcgttgttgtttgcgaagaaatggcgactaagaggagcgtgggaacgttgaaggagggtgatttgaaagggaagagggtgttcgtgagggtcgatctgaacgtgcctttggatgacaaccttaacatcaccgatgacactagagtccgtgctgctgttcccaccatcaagtacttaactggtcatggagccaaagtgatcctttctagccacttgggacgtcctaaaggtgtaacacctaaatacagtttgaagcctcttgtgccaaggctgtctcaacttctcggaattgaggttacgatggcaaatgactctattgggg

SEQ ID NO: 2959 - DNA, 392 bp, Glycine max
  modified_base (287)..(287): a, c, g, t, unknown, or other
gatacctaaaaattgtaccgatatggcttcacttgtgtgtccccctttttccttgcaattcaagggtaacaagtcaaggtccttaacaacaaataatgaaatgtttacaaaagaatctcccaagtctccaaccaaaaaacccgtggaaaaactcaaccaactccacttttaattccaaaacaacaaaatgggggaacaaccgactgctatgaaaaatgttgaacctcctaaaggcgtcatttctggttttgggactatttacatgatggatgaccctctaaccgaanggacaagtccaacttcaaagcttgttggaagatgtcagggaatatatgctgaggcttcgcaacatgaacctgcgatactcatggtaacgaatttgttcttcactg

SEQ ID NO: 2960 - DNA, 395 bp, Glycine max
gatcatggcatctgctagggttttcggagcgatcgccgggagagcgttcatggccgcggcgtcgaagagttcggccaagaagaaacccgttccgtccggcggagccgctgcaaaagccgccgtgaaaaagccggccgcgcctaggaccaccaactccggcatacagaaggtggttccggtgtcttccgagctcggagacttcctcggcgctcctcaagtgtcgcgaaccgacgccgtcaagaaagtctgggcctacatcaagctgcagaatcttcagaatccagcaaataagaaggagatcttttgtgatgaaaagctgaagaccatttttgaggggaaagataaggttgggttcacagagattgctaaattgctgtctagccattttgtgaaat

SEQ ID NO: 2961 - DNA, 383 bp, Glycine max
gacaacttcaatccctcttttgctttaccaaattccattttccaattcaaaaccctaactccgttcgaagcaccaaatcgtgatggcaccaaaggcagagaagaagccagcagagaagaagcctgtggaggagaagaaatcgacggtgggagacaaggctccggcggagaagaagccaaaggccggaaagaagcttccgaaggagggaggcgccggcggagaaggtaagaagaagaagagaaacaagaagagcgtggagacatacaagatctacatcttcaaggttctgaagcaggttcaccctgacattggtatctcaagcaaggccatgggaatcatgaacagcttcatcaacgacatcttcgagaagcttgcccaggaat

SEQ ID NO: 2962 - DNA, 399 bp, Glycine max
ggcctctgacccaggtatggcttcgagacgcatcctgaaggagctcaaggatttgcagaaggatcctcctacgtcatgcagcgcaggtcctgtggctgaagacatgtttcactggcaagccacaatcatgggacctgctgatagcccatatgcaggtggtgttttcttagtttcaattcattttcctcctgactatcccttcaagccaccaaaggttgcttttcggactaaggtgttccacccaaacatcaacagcaatggcagtatatgtcttgacattctcaaggaacaatggagcccagctctaaccatttccaaggtccttttgtcaatttgctcattgttgacggatcccaaccctgatgaatcacttgtacctgagattgcacacatgtacaa

SEQ ID NO: 2963 - DNA, 185 bp, Glycine max
tctatactgagactggtatcaccattaaagacaagttaagcatgtgtagcatcctcatggaccacttctgtaaccatggccatgatatcatctatagtacccgttatatcattatcaccagtatgacgtcaaaggaaattcagaccgcggtcaagcttgtaccggccgctcaattggatacacac

SEQ ID NO: 2964 - DNA, 371 bp, Glycine max
tggtaccgctgccaaaaaaacacagaaggggaactcaaccaattgccgtaaaaaagacaatcaaatttcaccttcagcctaaccggttttaggtttcagtttttgaaccaacccttgacgtaacaaaacctaagtttcggatcaagtctgaccaatctggttggtagaacctttggacttacagagtcaagttttatgtctgaattagacgataaattcctactgccttcgatacttttgctgatgcaaatgctgatgactcgggtgctgggtcaaaggagtatgtgcacattcgcgtacagcagcgaaatggaacgaaaatcctgacaaccgttcaaggattgacaaaagaattcagctataacaagata

SEQ ID NO: 2965 - DNA, 367 bp, Glycine max
  modified_base (254)..(254): a, c, g, t, unknown, or other
gactgccgcgaaaacagaacagggactcactctggcagcggcactctcggtggctataatctttctgtggtgagttgtcaagatgtacacatcaaggaagaaaatccacaaggataaggatgctgagccaactgaatttgaggaatcagtcggacaggcattgtttgatctggaaaatgccaacaatgagctgaaaagtgatctgaaagatttatacataaactcagctgtccaaattgatgtttctgggaacncgcaagctgtggttatccatgtcccctacagattaaggaaaggattccggaagattcatgtcaggcttgtgagagaacttgagaaaaagtttagtggaaaggatgtaatcctg

SEQ ID NO: 2966 - DNA, 391 bp, Glycine max; identical to SEQ ID NO: 348

SEQ ID NO: 2967 - DNA, 144 bp, Glycine max
gttcctgagtatcgatatggcatcttaattctaccacattctaccttggtggtttgttgaacttggactatgatggttgatttagcttgacccgtgcacttactaatataatcactgttagtaggtgacggcgatttttgtttg

SEQ ID NO: 2968 - DNA, 389 bp, Glycine max
  modified_base (373)..(373): a, c, g, t, unknown, or other
gaagcctcagtctcaacacagaagcagaaggaggagaagcagaaagaggagacgaagcaatggcgccgaagaagccccgaaccacgtcgaggaaccctgatttggtcaggggaattggcaaatattcgaggtcgcagatgtaccacaagaggggcatctgggccatcaaggccaaaaacggcggtgttttgcccctccacgatcccaagcccaaacccgaggccccggcccagaagccgcccaagttctacccggccgatgacgtgaagaagcccctcgtcaacaagcacaagcccaagcccgcgaaactcagggctagcattactccagggactgttctgatcctgcttgctgggaggttcaagggaaaganggttgttttcttgaag

SEQ ID NO: 2969 - DNA, 376 bp, Glycine max
  modified_base (290)..(290): a, c, g, t, unknown, or other
  modified_base (337)..(337): a, c, g, t, unknown, or other
tcacaatgaggatacaaaagctccctcttctgatttaaagttgaggaaaattgctggcagaatcgaaccataaaatcttagccatcactgagtgatctcttttccccagttatcttttgcctctttctgatttttcgatccctaaatttcactttattttttttcttagtctaattatatttgtgaatgtgtttttagttgtgttctatttgaatgtgttgaggtcagtgatgaattcaatttgcctacattggctgagtatctggtttttattagattatgatgtgtcncaacagtctgaggcctctgagtctgtgtattccattttgtaatacanaaatgtaattttaattttgtatcgcgtaggattgaatct

SEQ ID NO: 2970 - DNA, 380 bp, Glycine max
atgacagtgagtgagagaaagagatcatatatcagaatggcttccactcaatgtttcttgcaccaccatgctcttaccacccctgccagatccccatcagaccgcatcatggttagcaccaatcctaaccagcttgtttgcaaagcacagaagcacgaggatattgatgtcagcccaatctctcgccggttagctctaactgtgctcattggtgctgctgctgttagctccaaagtccaacctgctgatgcagcttatggggaagctgccactgtgtttggaaagccaaacacagacacagatttcctgccatgacaaggatatcgattcaaactattgattccctcaaagtggaacccaagcaaagacgtttagtacac

SEQ ID NO: 2971 - DNA, 376 bp, Glycine max
  modified_base (311)..(311): a, c, g, t, unknown, or other
gtccgccatttttcgtagctgctgttcttgcgcgtgaacaagcctcaggtaagccaaaaccatggttaagcataacaatgttatcccaaacggacacttccgtaagcactggcagaactatgtgaagacttggttcaatcagccagcacggaagacaaggagacgattggctcgtcagaagaaagctgtgaagatattccccagacctacggctggacctctcaggcccattgtacatggtcaaactttgaaatacaacatgaaagtgagaggtggaaggggattttctcttgaagaactcaaggcagcanggattcccaaaaagcttgcaccaaccataggtattgctgttgatcatcgtcccaagaaccgttct

SEQ ID NO: 2972 - DNA, 366 bp, Glycine max
  modified_base (311)..(311): a, c, g, t, unknown, or other
  modified_base (343)..(343): a, c, g, t, unknown, or other
aagccaaatggaagattcttcagctataatccagcaacaaagaagacaaccctgcttgcccaagacctctactttgccaatggggttgcagtttcagcagatcaacaatttgtggtcttctgtgaatctgtcttgatgagatgcaataaatatttcgtcctgggccctaaaacaggaaccatagagaagttctgtgacctgcctggcatgcctgataacattcattatgatggacaagggcactatttgattgcaatgttcacggccctttctcccgaattggaattggcatatagataccctttcattangaaggcttttgcaatgtttacaaagtatgtanggagtctatctatctcgaagaat

SEQ ID NO: 2973 - DNA, 373 bp, Glycine max
gattctcacctttccatgcatatagcttagctagctccttcacctccttagtttcgaaagcatggcttccctggcggcttccaccgcggctatgtcagaaatccttggaaaccccgttaacctcagatgcgcaaccaggtctgctccatcaccaactacacctgccaccttcaagaccgtcgcacttttctccaagaagaagccagctccacctccaaagaaaaagcctgccgctgtatcccccgccaatgaggaactcgccaagtggtatggtcctgacagaaggatcttcttgcctgagggtctcttggaccgatctgagatccccgagtacttgaccggagaagtggctggagattatggttatgatccg

SEQ ID NO: 2974 - DNA, 335 bp, Glycine max
ggcacaagtttgttgagatagctagaagcaataagatgaaaatgaaagtgcttgttttgtttgttgctacagttttggtagcatatgaatgccatggctcagactaccagaagttccctctccaaatgaaaactgggtttggtgggcaatacagcaatgaggtggcatgtgccagttggaggcttggcgtggaagcaaacaacgtagtcaagtggcaaactgttcctgcagcttgcggagagtacatagctgactacgttctaggagaccaatatagatcagattccaaaacagttaagcaacaagcttatttctatgctaaatccctcaaactc

SEQ ID NO: 2975 - DNA, 347 bp, Glycine max
  modified_base (281)..(281): a, c, g, t, unknown, or other
ggggttattggacacattcttcagcgactgcgtttttggatcggaacctcttctgcggcgtagcaatgggacactccaacgtttggaactctcacccaaaaaactacggtcctggttctcgcacttgccgtgtgtgtgggaatccacatggactgatcaggaagtatggccttatgtgctgcaggcagtgcttccgtagcaatgccaaggaaattggcttcatcaagtatcgctaaaagagcagttgtcaactacggaccaatattgtgttctggcactangatgttttgaggatgttatgtttgaagaaacttgagactttcttttttcatctaattaattatcag

SEQ ID NO: 2976 - DNA, 195 bp, Glycine max
catattccatgattgtgtcatgcatctcttcatggcatcgtgatgggcatatcattcctgcatttatcatattcatggattgcattttgcatgagtaattgcattatcatgcatcttcattcaacatgctttttgttctacaaactgcataccttttcatgttcactcatgcatagtccttgcattttcctctac

SEQ ID NO: 2977 - DNA, 395 bp, Glycine max
gacttttctcagctgctgttcctgcgcgtgaacaagcctcaggtaagccaaagccatggttaagcataacaatgttatccccaacggacacttccgtaagcactggcagaactatgtgaagacctggttcaatcagccagcacggaagacaagaagacggttggctcgtcagaagaaagctgtgaagattttccccagacctacagctggacctcttagacccattgtacatggtcaaactttgaaatacaacatgaaagtgagagctggaaggggattttcccttgaagaactcaaggcagcagggattcccaaaaagcttgcaccaacaattggtattgctgttgatcatcgccgcaagaaccgttctttggaaagtctgcaagctaatgtgc

SEQ ID NO: 2978 - DNA, 323 bp, Glycine max
ggcctgcaagtgtgagtgatatttgagcttaaaccctagccgctcttctcttcattcttcactttggaaacaatcataatggcgttctgtaataaggttggaaatgtcttgaggcagggtgctgctcgcagcacacatgcccctgttgcgtccatgcttaattacatccgctgcatgtcttcaagcaagcttttcattggaggcctttcatatggagttgatgaccagtctcttaaggatgcattttctggctttggagatgtggttgatgcaaaagttataactgatagagacagtggaagatcaaagggatttggatttgt

SEQ ID NO: 2979 - DNA, 346 bp, Glycine max
gacttgagacacaaactcacacactttgtactctccgtccttccttcttcgatccagatctctctccttctccctcaaatggcttcccttctgcaatgttccatgcccctcgtctctctttccaatcgagctctggtacccggtaccaggatctccaacccaagttcagtttccctttcaattaagggaagaagtttcccatccgttacattgcagcccagagggcgtcggtttcagcttagatgtgcggcaaaaccagagacagtgaagaacgtgtgtgacatagtcaagaagcaattggcactgccagatgaatcagctgttactggagagtctaaatttgctg

SEQ ID NO: 2980 - DNA, 373 bp, Glycine max
gaatgcaaacccacccaccattttgtgcttctttctgtgtgcaagaaaggtaaaagctttcacacaccaagaaaagtagccatggctgcttgctcaagaacttctcttttgctccttttctttctctttggattctccgcagctaaggaactattggttggaggcaaaatagatgcttggaagattccatcttctgaatcagattccctcaatcaatgggctgaaaggtctcgtttcagagtcggcgatcatcttgtgtggaaatatgagaatgggaaggactcagtgttggaagtaacaagggaagattatgccaattgcagcacatccaagcccatcaaagagtacaatgatggaaacacaaaggtgaagc

SEQ ID NO: 2981 - DNA, 375 bp, Glycine max
gacaacacaacgcaacacaacgcgcactctctcttttctctcttaacacaaaaaccctatcgttcttcgcggtttcgccgattctcgccatgccgaaagccaaatccgacgccaaagccgccgatagccggttgaagcgcaagggcgctggtgctggaaggaagcaatcgaagaaagctgctaaggatcctaacaagccaaagagacctccaagcgctttcttcgttttcatgtccgagttcagagagcagtttaagaaggagcattctaacaacaaatccgtcgttgttgtcggtaaagctggtggtgacaaatggaaatcgctgtctgatgctgaaaagggccccttcgttgccacggccgaaaagaagaaac

SEQ ID NO: 2982 - DNA, 400 bp, Glycine max
agagtccggaaaccctaacaacacaggcgcagacgcaaacgcaaacgcaaacgcaaacgcaaacgcagagcgtgatccattgacgaagatggtgcagcgtctcacctaacgcaagcggcacagctatgccaccaagtccaaccaacacagggtcgtcaaaacccctggtgggaagctcgtttatcagacgaccaagaagagggccagcggacccaagtgccccgtcactggcaagaggattcacgcgattccacacttgaggcctgcagagtacaagaggtcaaggttacccagaacacgtaggactgtcaaccgtgcatatggtggagttttatctggaagtgccgtcacggagacgattatccgagccgtcttagttgaagagcaaaagattgtgaag

SEQ ID NO: 2983 - DNA, 393 bp, Glycine max
ggggaaaatttgtcaaataaattcatctaaccccaaacaaaaccctagcacacttttatcgcttagtggcagcagcagtggcggcaagcaactccatccgcaatgggaatcgatttgaaggcaggaggtaagtccaagaagaccaagcgaaccgcccccaaatccgatgatatctacctcaagcttctcgtcaagctgtaccgttttcttgttcggaggactgggagtaacttcaatgctgttgtcctcaagcgccttttcatgagcaaggtcaacaagcgcccgctatccctctctagattgatccgttacacgaagggaaaggaggataagatagctgtggttgttggtgccgtgaccgatgacattaaggtttatgaagtccctgctctg

SEQ ID NO: 2984 - DNA, 386 bp, Glycine max
gacggctttcaccattattttcctttctctctcactcgaaacaaaacaaaacaacacaaccggaaaaccaaaccacctctccctgctcccgccgctgttttccgccgctgtcgccgtcgttcccacctcaccgtggcggcgcgcgcgtctccgatgggaaagtacatgaagaaagcgaagccgaaaggagaactcgcgctcgtcgaatccaccaccagcaacaccaccacctcctacatgggggtccgaacccgcgccaaaaccctagcgcttcagaaatcgcacgcgcagcagcacgagctcgccgccacctccgactcctacctccagctccggagccgtcgcctccagaagcctccgattttggtccactctccgaagcgccc

SEQ ID NO: 2985 - DNA, 395 bp, Glycine max
gcgaacttctcacgttcatttctacacatccctagctctgtcgttccgtcgttgacgatggcgtttcgggtgcgaagccctgacctccgctctctctttcttctctctctcttgtccatcgcttccgccaatgtcttcttcgaagagcgtttcgatgacgggtgggaaaatcgatgggttaaatcagattggaaaaaagatgagaacgtggctggggagtggaaccacacctctggtcaatggaatggagacgctaatgacaaaggtattcaaaccagtgaggattacagattctatgctatttcagctgagtaccctgaattcagcaacaagggtaagacactagtctttcaattttctgttaagcacgaacagaagcttgactgtggtggtgg

SEQ ID NO: 2986 - DNA, 187 bp, Glycine max
gaggatatccctcttgaaaagtgagtaggttttaaatttaagcagcagcagtcgtcgtgcatgttgtattaagtagaggctagaaggcagggagacgtacacagaactctcactgtgggaaaatattttatatccgttgggttaaacaaaaaataaataaaaatggatcaattaatttagtcccctg

SEQ ID NO: 2987 - DNA, 403 bp, Glycine max
ggttgacaaaggaaacgtgtagtacgagggccaatttccaaaaaccttttgtctcgcaacctcacctcttcctccttcaatctctttcggaatttcccaaaatccttagtgggaggaagagatggttctgactcagaagattcacgaagctttcaaaggcaccgtcgagaggatcactggcccccgaaccgtttccgccttcaaagaaaaaggagttctcagtgtctccgagttcgtcaccgccggcgataatctcgttgccaaatgccccacctggtcctgggaatcgggtgatccaggcaagaggaagccatacttgccacctgagaaacagttcttgattactagaaatgtgccttgtcttcggagagctgcatctgttgaagaagaatatgaagctgct

SEQ ID NO: 2988 - DNA, 415 bp, Glycine max
gaagtcaccacaacacgaagttcattgcacagtgttagtttgagtagcagcatcaatggctccaattgcagtgggaaacgtgattccaggcggcagtttggcttacttggatgaacaagacaaacctcaaaccgtctccattcactctctcgccaccggtaagatagtcatcatctttggggttcccggtgccttcactcatacttgcagcttgaagcacgttcctggcttcattgacagagcagtagagctgaatgggaagggtgtggacggcataatctgtatcagtgtgcatgatccatttgtgatgaactcatgggccaacacattcgcagagaacaagcatgttaagttccttgctgatggtgcatccaaatacaccaatgcccttggtcatgagcttgacctcactgac

SEQ ID NO: 2989 - DNA, 353 bp, Glycine max
agggaaccacacaccacatcggagcaattaaggtccgtagattccgttaacctcctcccaaatttcacatttgcgggtccaatccccgtttccgaacgctcgaaaaggtggaatggcatccccgaccgaagttatcgacgtcgacgccgaaaacgctcctactcctactccacctcctcttcctccaccgcaagatccgaaatcgaatcgcgccaagaccatcatgcggaagcggaagaaggttccctcgttgctgcaaaacctaaagagctacgaggagaagcaagcgcacatcgaaaccctcgagaaggagctcgacgcgctgttccgctactaccaagaagccatggctc

SEQ ID NO: 2990 - DNA, 357 bp, Glycine max
gctctgaatggaacagttacagtcagaccccttccaattggatcatcagtcagtggaaaggtagagaagcaatgtgctcatttcattggtgtgacaataaatgagcagcaagctgagtcaggcattgtagtaagagttacttcaactgcacaaagcagattaagttgctcgactttgaacaggatgccaatggaggctatggtttggcattgcatgaagacagtgataagactggcaaggtgacatctgcaggaatgtatttcttacatttccaattgtaaaaaagggatcaaccggtaaaggcttaaccaatggcaaaggatccggaaggggccttttttaaaaaattggaaggtc

SEQ ID NO: 2991 - DNA, 359 bp, Glycine max
ggtagcgcagagaaagaactagaactagaactagggtttcatctttgccatcagaaacaacaatgatttacgacgttaactctccccttttccgatccttcctcagccagaagggaggctcctccgataagaggaaaacggatgaacagaagccaaaagagcagaaacccaaagccagcgagaacaaacctataatgacagagtgacaacaaatttgctgcattcagttgtagaatgataatacgtggtagatattggcatttggttctacacaattaagatcattttggctgtgttctgacgtatatgtggtgttttaagacttgttagtgtaatgggttgattttggatatggttat

SEQ ID NO: 2992 - DNA, 406 bp, Glycine max
ggtgtgagttgagtctgtgatgataatgatgatgatgatgtgttccatgtggatgtgggttgtccttgtggccattgctggtgcccttttagtcctaagatctatcctcaagaatgtaaattggtggctctatgaatccaaattgggtgtgaagcagtactctttgccaccaggtgacatgggatggcccttcattggcaacatgtggtcctttctcagtgctttcaagtccaaggaccctgattccttcatctcctcctttgtctccagatttggaagaactggaatgtacaagaccatgatgtttggaaatccaagtataattgtgacaacacctgaaatatgcaaaaaggtgcttacagatgacgataaattcacacctggttggcctcaatctactatagag

SEQ ID NO: 2993 - DNA, 308 bp, Glycine max
  modified_base (32)..(32): a, c, g, t, unknown, or other
gaagcactacaattcgctcagaggagagaganagtgttggtgtgttttttagagagagagagaaagaaaagactgtgtgagtgtagtgtgtgtcgttctcccatggtctctatgccgttgcggccgcagcaactgcttcaaaccgccgcgccgctagtggagaatgacgcgatgaaagtggactctcgcggcggctccgacgccagcgccgaaaaggaaaatgtcagctcctgtcgcaaatggtaatgatgccctcactggtcacataatctcaaacacaattggaggcaaaaatggtgaacctaaac

SEQ ID NO: 2994 - DNA, 424 bp, Glycine max
ggagtttgagtgaaaccctagctagccacaatgcagatattcgtgaaaaccctaacggggaagacgataaccctagaggtagagtcttcggacacgatcgacaatgtgaaggcgaagatccaggacaaggagggcatcccgccggatcagcagcgcctgatcttcgccggaaagcagctggaggacgggcgcacccttgccgactacaacatccagaaggagtccaccctccacctcgtcctccgcctccgccgcggcgccaaaaaccgcaggaagaagacctacaccaagcccaagaagatcaagcacaagcacaagaaggtcaagctcgccctcctccagttctacaaggtcgacgactccggcaagctccagaggctccgcaaggagtgccccaatgccgaatgtggcgccgggaccttca

SEQ ID NO: 2995 - DNA, 398 bp, Glycine max
ggagttggaataccaattttggcgctctctctgtatttctcttccttctctttcatttcccctctcttgttggttcaaaattatactctctctaagttttaaccttatgaatatggatatgtgccaaaatgtatcagtttccggtgagtgccaacaagtgcaggtttttgccccttcttgctcaagcagccttgatgacctcttctctgctcagaacacggaagtggatgttgagttggagtggctttcagagtttgttgaagactgtttttcaagccctccaagctgtgtcttggtacctattggtgtcaagactacaagcacaagcaccaacctttcttcaggcacattgaagagaccccaacaacaaaatgagtcacctttgcaaaactttgctg

SEQ ID NO: 2996 - DNA, 322 bp, Glycine max
gactcaactttatccatagagcacaatttttttgcttcaacgggccttaccttacctgaagatggcttcagtgtcctttgccgtgggattattaccttgctcgtcttcatcctgctatacccgcgtctcttatggttcagttcgatttcccgtattgaacaacgccaactcactgaaactcagctcctcagctaagatctccagtccaattcttcaacaaaagctttgtactggtccgtctccccttgctcgagaggctcgccctctcaacattgtatccgctaagggctacaaaatgaaaacccacaaagcatctgcaaag

SEQ ID NO: 2997 - DNA, 260 bp, Glycine max
gtgaatgctacagatgttaaaacatcacagaatgcgccagtttcccgaacgagttgatggtttagtatgcatttctcaagcaacgtgtcttcagttctaaaccagcatatggaataccagagtgaatggtatcaaataaattctaacgatcttttagctactactgagtttgaactaatgactccctccgtactataccagtactctaaccactgaattacgtaggtcatttatcaacacccccccccataagaaaaccc

SEQ ID NO: 2998 - DNA, 185 bp, Glycine max
gactccctacgacaaacaacaacaacttctttttactttcatattctctcctctttcattaacgatctctacgaagttctttcactcaaacacacccttaatacacccttaattatatcgcattcgccttctcgtaccgttagaattagattgcacttattcctctctctccctctttttctgga

SEQ ID NO: 2999 - DNA, 402 bp, Glycine max
gacctgatgcagatgcagcctatcatggcagcctactaccccaacaacgtcaccactgatcacattcaacagtacctggatgagaacaagtccttgatcctgaagattgttgaaagccagaattctggcaagctgagcgagtgtgcagagaaccaatcaaggctgcagagaaatctcatgtacctagctgcaatagctgattctcaaccccaaccatctccaatgcctggtcagtatccttctagtggacgtatgcagcagggagcacactacatgcaggctcagcaggctcagcagatgtcacaacaacagctaatggcttcgcgctcctcactcttgtactcgcaacagcctttctcagtgcttcaacagcagcaaggcatgcacagccaacttggcatg

SEQ ID NO: 3000 - DNA, 383 bp, Glycine max
gaggattggatttaaaaaagaaaagacaaaaaccgcattgagtggggcctgccctaaaatggcccttacagagcttctctatcaagagctgctagttggtggttgaggagtaataggttccgcataagctacatttcgtgggggaggcacctatccagtacttccgaactcgtctttcatctacagacattgggtcgctaaagccaatagttcggtgtccgggcaacagccaagccactcatctttggttgcagcttcggcggaagcctatgctttcagttcagttccattccttggttctccggttgattgccctgcccgcgtcacaccttaaaaagctttggaacggcagtttcacttacttctcacggacattggacctt

SEQ ID NO: 3001 - DNA, 244 bp, Glycine max
  modified_base (6)..(6): a, c, g, t, unknown, or other
gaacanaaacttcctttgacagacgaaacgctgcgttgagagtagtggcgcccatattctgcactgaaccgaactctctgttcgttcgcgttgcgctctctccgaaggattcgtttcaattcgaaaactctctgaagtgttctgatggatgtggagtggtctgagtcacggtacgatggtacaaatgataagggggattccccggtgagggagcactatgacaatgatggggcggagaaatcta

SEQ ID NO: 3002 - DNA, 396 bp, Glycine max
ggagatagagttatcgatccctttggggagataagaaaatgtggcttgtgcagctctcaaccccatttctgaacggccatggccatggctccagccttctctggaaacccagttcggcggtgactcagacccactgggccccgccgagtttgctgcctcaaatcaatgcgatgaagacgatgcagggaaaagtggtgtgctccacgaacgacaagactgtggcagtggacgtggtgcggctggcccctcacccacagtacaagaggcgcgtgaggaagaagaagaagtaccaggcccacgatcccgataaccaattcaatgtcggcgacatcgtccagctccagaagaccaggcccatcagcaagaccaaggcctttctcgcactccccgttccca

SEQ ID NO: 3003 - DNA, 299 bp, Glycine max
gagtttggtataactttagccgaggtcaagaggagcactagctaagttcacaatttcaaaatggctatgggactaaagaagcatttgaaaaggctcaatgctcccaagcattggatgcttgacaaactgggtggtgcatttgcgcctaaaccctcatctggaccacacaaatcgagggagtgcctccccctcattcttagtctgcgaaaccggctgaagtatgctctgacataccgtgaagtcattgctattctgatgcagcgccatgttcctgttgatggcaaagtcaaggactgaca

SEQ ID NO: 3004 - DNA, 204 bp, Glycine max
gagggcgaggaagccacatacagacacaatacagagtgagttgttgctccttcgccacaactctctgccaacatgggtatctccagagattctatgcacaagaggcgtgccactggtggcaagaagaaggcctggaggaaaaagagaaagtatgagcttggtcgccagcctgctaacactaagctgtcaagcaacaagacagtc

SEQ ID NO: 3005 - DNA, 411 bp, Glycine max
gatccacacctctctctctctcagaatttctatctatctcttgtttcaatttcaacaacggttactcctttttcgttttgagtttcaatcaagccatcatcatgtctaccgcatcgcaacccaaggccaagaaaacggcgtcgtccaagaagcccctctcgcagggtctcttcgccgtgatgatagcagatgcgattgcgagtctgaaagagagaaccggttcgagccaatacgcgataagcaggtggatcgaagggaagcacaaggagttgcctgcatcctacaggaagcttgtcctcgttcatctcaagaaatctgttgctgctggcaagcttgttaaggtgaaaaactcctttaagctcgcaccgactaagcctgctccggttaaggccgctgctcccagaaagccaa

SEQ ID NO: 3006 - DNA, 292 bp, Glycine max
gaacaattcaaaggaaaatcctccctaacaaaagccttccaaaaacgaaaaaaaaaggaagagcaattttcccccaccaaagaagaagaagcaaacaagggccgataaacttaccgatgaaaagatctccgagttcaaggaagccttcagcttgttcgacaaagacggcgatggtttgttctcgctctctctctctcaagttttgtgtatttgatttgatttgatttatgcgtttgtgggttttgtagatcggtgttccgtgtcgtgatagtggattaggaaaattagatga

SEQ ID NO: 3007 - DNA, 346 bp, Glycine max
gacttcacacactctcctcactcgctcgacctagttagaactgtgctagggttttacgaaaccaccgaagttgcagaaagaagaagaaaaatggtggctgacaggagcaagaagccgaaggtctccgacaagggcgaaaacctcgatgaaatcgacggagaactcgtcctctccatcgagaagttgcaggagatccaagacgagcttgaaaagatcaacgaggaagccagtgacaaagttctggaaatagagcagaagtacaatgagatacggaagcccgtttatgataagcgcaatgatattatcaatgccattcctgatttccggttaactgcttttttgagtc

SEQ ID NO: 3008 - DNA, 303 bp, Glycine max
gagcgaaacagagagtgatttcagtgaatgatcggtgttcactttattccaacaaaatcctcaacgtcaaattaagaaaatgccgatcagaaacatcgccgtcggaaagcctgaagaggcgactcaccccgacacgttgaaagcggctttggctgagttcatctcaaccttcatcttcgtgttcgccggctcaggctccggcatcgcctacaacaagctcaccgacaacggcgctgccacccctgccggcctcatctccgcctccatcgcccatgcattcgccctcttcgtcgccgtctccgt

SEQ ID NO: 3009 - DNA, 338 bp, Glycine max
ggagatagaaaagctctttggcttgtaatgaaaggtaagcaattgaacgttagaagccgaaagagagtggaataacaaactagtcttaagaactccctaatgaaagtgaaactttccctaagttaagcaaaatcacctgcctgtgaagaagctcacaaaatctcttgcaagttaagtttgtatgctctgaccttggttttgggaattgcaaactaaactgggttaattaagaactaacccttctcgcccttcctatgtagattccacaattcaacaatcaatcatcatgcctaattgcctcctgttgtgaacggagaaagaagattctcatcatcatc

SEQ ID NO: 3010 - DNA, 329 bp, Glycine max
ggagagagaaaggctctttggcttgtattgaaaggtaagcaattgaaggttacgggccgaaagagagtggaataacagactagtcttaggaactccctagtgaaggtgaaacttgctctaagtgaagcaaaatcacgtgcttgtgaagaagctcacaagatctcgtgcaagttaagtttgtacgctctgagcttgtttttgggaattgcaagctaagctggtttagttagtagcgaggcccttcgcgcccttcttagagggaggcgaagattcaacaatcaatcatcatgcctaattgcctcttgttgtgaaaggagaaagaagattct

SEQ ID NO: 3011 - DNA, 433 bp, Glycine max
  modified_base (402)..(402): a, c, g, t, unknown, or other
gatccatttctcgcaacaacgcttaacctctctcattccccatttcctcacctccttcaaccgctgctaaattctagggttccgaaatggacgctggcggaaagatcaagaagggcgccggaggtagaaagggcggcggcccaaagaagaagccggtttcaaggtccgtcaaagccggtctccaattccccgtcggaagaattggccgttatttgaagaaaggaaggtacgctcagcgtgtcggtaccggtgctcccgtatacttggctgcagttctcgaatacctagctgccgaggtgcttgagttggctgggaatgccgcacgtgacaacaagaagaacaggattattccaagacacgtgcttttggcagtgaggaacgatgaagagttgggaaattgcntgctggagtgacaattgcacatggtggcgtg

SEQ ID NO: 3012 - DNA, 440 bp, Glycine max
  modified_base (345)..(345): a, c, g, t, unknown, or other
gccgcagcaagtgccattttattttgccctacctcctcgattctagggtttcaacaatggcgctgttccttccctacgaatccgcttcgggctacagcctgttcgaggttcacggcgtcgatgaaatcggccagaacaccgaagcggttcggaactccgtttcggacctcaacaggttcggcaaagtcgttaagcttcgctccttcaaccctttcacttccgctctcgatgctctcaaacagtgcaacgccgtctccgaaggcatattaactgatgagctgaggactgtcttggagaccaacttgcctaaagtgaaggaaggtaagaagtccaagttcagtttangtgtgtccgatcctaagattggttcccagatatctgaagtgactaagattccttgccaaagtaatgagtttgtgagtgaacttcttcgtggtgtg

SEQ ID NO: 3013 - DNA, 434 bp, Glycine max
  modified_base (239)..(239): a, c, g, t, unknown, or other
gaagtcgtacacgtttaaacggagttctaaatttccggcgagttttcctctctcgaatctgcgacaccgacgaatctcgctcaccggaatttcgcattcagaaaatggctttaggtggaacagctcccccaagaggaagtgcagcggctactgcaagcatgaggagaaggagaacaaccggtggtgcggcctctggaggagcagctggaactatgctccaattttacacagatgatgcncctggactcaagatctccccaaatgttgttcttgtaatgagcattggcttcatagcatttgttgccatccttcatgtgatgggcaagctgtactttgtgcgtagggaggcttagagaatagatcaagatgttaggtccaattttttggattttcaatacacctctgttatgaaatttagatttttttgttgctgg

SEQ ID NO: 3014 - DNA, 173 bp, Glycine max
gcgtcacttttcacatctgctgttcctgcgcgtggacactcctcaggtatgccgagaccatagttacacataagagcgttagtcccgccggggacttccgtttgcactggtacatgtacgtgcagacctgtgtcactgatccaggactggctgcatcaacatggttgcatcgt

SEQ ID NO: 3015 - DNA, 426 bp, Glycine max
gtcagctgcgaaaacctagtgcaccgtaagggttgtgaagcaggcagagaagagccatggtgcacgtttctttctaccgaaactatgggaaaacgttcaagaagcctcgtcgtccctacgagaaggagcgtttggacgccgagttgaagctggtcggtgagtacgggcttcgctgcaagagggagttatggagggtccagtacgccctgagccgcatccgtaacaacgccagaaacctattgacccttgatgagaagaaggctcgccgtatcttcgagggtgaagcccttctccgaagaatgttccgttacggactcctcgacgagacacagaacaagctggattatgtgttggctctcaccgtcgagaactttctcgaacgccgcctcaaaaccctcgtcttcaagtctggcatggccaagtcat

SEQ ID NO: 3016 - DNA, 418 bp, Glycine max
ggtgaacaggtgctcgctgatgccactattaagagagtgaagggagcgagtaacagaatcacgcttcaaatcatctgcattcatttttcttctctctacttcttctgcgtcatcttagggttttggtttgtgctcctctcactgattttctggagatggcttctttcgggccaaatggaactgaaaatgaggattcgttgcctcgcccacctcccgttgtaccatcagatgttgtacctgtggaggcggagccggagaagaaaaaggcttcaaggtttccaatagccaggcgtggccttgcttcaaaagggacgaagctgcaacttctcaccaatcactacagagtgaacgttgcaaacactgatgggcatttttatcagtatagtgttgctcttttttatgatgatggacgacctgt

SEQ ID NO: 3017 - DNA, 358 bp, Glycine max
ggcagcagttgagaggaggcactgtggcagaagtcctaggagtgtaaaacagagacgcacaatgaagacgatcttgtcgtctgagaccatgaatattcccgacggcgtgagcatcaaggttcacgctaaggttatcgaggttgagggccctcgtggaaaactcgtgcgagacttccaccatctgaacttggacttccaacttattaccgacgatggcggtaaaaggaagctcaagattgattcttggtttggttctcgtaaaacctccgccgccatccgcaacgccctcagccacgttgagaatttgatcaccggcgtcaccaagggatggcgatacaaagtgagattcctgtacgct

SEQ ID NO: 3018 - DNA, 407 bp, Glycine max
gacttctcttcacacctttgttcactcttcttctcttgcggctagggttttagcgcagcttcttctagatttaaggaagatgggtaaggaaaaggttcacatcagtattgtggtcattggccatgtcgactctgggaaatccactaccactggtcacctgatttacaagcttggaggcattgacaagcgtgttattgagaggtttgagaaggaagctgctgagatgaacaagaggtctttcaagtatgcctgggtgctggacaaacttaaggctgagcgtgaaagaggaatcaccattgatattgctttgtggaagtttgaaacaacaaagtattattgcacagttattgatgcgcctggacatatggatttcattaagaatatgattactgggacatcccaaactg

SEQ ID NO: 3019 - DNA, 429 bp, Glycine max
gggttttgattagggtttgtcattagcacttcttcttttcacactgccgctgcaacaatggcttcagagaagaaactttcgaacccaatgagggagataaaagtgcagaagctcgttctcaatatctctgttggcgagagtggagatcgtctcaccagagccgccaaggttcacttcactcattgctcccgctttttttttttttttaatttttaatttctgtttttcttcttgcaggtgttggaacaacttagtggccaaaccccagtgttttccaaagcaaggtacactgttcgttcctttgggattagaagaaatgagaagattgcatgctatgtcactgtcagaggtgacaaggcaatgcaacttttggagagtggtttgaaggttaaggaatatgaacttctcagaaggaatttcagtgatacg

SEQ ID NO: 3020 - DNA, 356 bp, Glycine max
gagagtgatccttctacactaactaaagccgagcagcgagagagagaaaccctagcaaaaatgccggctggtcacggtttgagatcccgcaccagagattccttctctcgtcccttcaggaagaagggtaccatcgccctcaccacatacctcagaacctaccacgtcggcgattatgtcgacgtcaaggttaacggcgccgtccacaagggaatgcctcacaagttctaccatggccgcaccggtcgcgtctggaatgtcaccaaacgtgctgttggggtcgaagtcaacaagcaggtcggcaacagaatcataaggaagaggattcacgtgcgtgtggagcatgttatgccatc

SEQ ID NO: 3021 - DNA, 167 bp, Glycine max
aacatcaaacatgaatcatcaattcatggcagcaattaaagtgttttggggtatttacatctcatccatgaacttataaacataaacataagatcataaaatctacccatggcacattttcattcatgcaaaggaagaaaaagagagaactcacatcctttaacctc

SEQ ID NO: 3022 - DNA, 285 bp, Glycine max
ggtgtagtataagattctcgtgcattattccttttgtaatttcattcattcttaatctttgtgaaaaataatgttcatcgagaattttaaggttgagtgtcctaatgtgaagtacaccgagactgagattcagtccgtgtacaactacgaaaccaccgaacttgttcacgagaacaggaatggcacctatcagtggattgtcaaacccaaatctgtcaaatacgaatttaaaaccaacatccatgttcctaaattagggggagtgcgtgtgggttgggggtggaa

SEQ ID NO: 3023 - DNA, 378 bp, Glycine max
  modified_base (309)..(309): a, c, g, t, unknown, or other
ggctgtgattgaaattacccatagatagagagcgcggcataacctaaacttacccttcttctctctgtgtgtgtgcgcatcaaacgcaaccagaagcagccatggccactgcaagaactgtgaaggacgtttctcctcatgagttcgtcagagcttactcttctcacctcaagcgatctggcaagatggagctgccagagtggactgatattgtgaaaactgcaagatttaaggagttggctccttatgatcctgactggtactatgtcagagctgcttccatggcaagaaagatctacttgagaggangacctggtgttggtgcctttcagaggatttatgggtggagcaagaggaatggtagccgccctcctcatt

SEQ ID NO: 3024 - DNA, 114 bp, Glycine max
ttttgcttcattgtgaacatggaggttcaggaaatcatgtggcatcatcgtcctgctcatcctccttgtctttgccttccaagtggtagtgcataatgcgggaaaagtgtgtga

SEQ ID NO: 3025 - DNA, 305 bp, Glycine max
cgggaaagagaagcattagcacaagcaagaagaactaatcgaagcacaaatggcctcttcagtgatggcatctgtggccctcaaacctgctcctttcactgttgagaagtcctcagttagaggccttccctccctctcaaggaactcctcttcattcagagttgtggccagtggtggcaagaagatcaagactgacaagccttatggaattaatggtggcatggctttgagggaaggatttgatgcatctggcaggaaaggaaaaggtaagggcgtttaacagtttgtagacaaatacggtgcta

SEQ ID NO: 3026 - DNA, 92 bp, Glycine max
gctttagtataagatcatatgaagttatgggaagaaacatatggttgtgtaagctgtagttgtcacttatttaatgatatgagcaatttggg

SEQ ID NO: 3027 - DNA, 282 bp, Glycine max
cggggaatcgtcttttacttctcagcagcttcggctagggttcagaaacgaaaaagggttcggtgttctgttcgcgatgagagccaagtggaagaagaagcgtatgaggaggttgaagaggaagcgccgaaagatgagacagagatccaagtagtgcgttaaacctactttgtttctgttgcttttacaattgcttatgttgtcgaatgggaaacccagttgttagtggcactggtttctcctttttgatgtttgatacattttgttggattcaattagttt

SEQ ID NO: 3028 - DNA, 410 bp, Glycine max
gacaacacaacgcaacacaacgcgcactctctcttttctctcttaacacaaaaaccctatcgttctccgcggtttcgccgattctcgccatgccgaaagccaaatccgacgccaaagccgccgatagccggttgaagcgcaagggcgctggtgctggaaggaagcaatcgaagaaagctgctaaggatcctaacaagccaaagagacctccaagcgctttcttcgttttcatgtccgagttcagagagcagtttaagaaggagcatcctaacaacaaatccgtcgctgttgtcggtaaagctggtggtgacaaatggaaatcgctgtctgatgctgaaaaggcccccttcgttgccacggccgaaaagaagaaacaagagtatgagaaaactattttggcttacaataag

SEQ ID NO: 3029 - DNA, 422 bp, Glycine max
gagtgtatgtgattgttgtgactcgttcttcttcgtcgttatcttcttcttttgttgtttgtgtgtttgttttttctctcacctgaaaatgtcttgctgcggtggtaactgtggttgcggaagcgcctgcaagtgcggcaacggctgcggaggctgcaagatgtacccagacttgagctacaccgagtcaaccaccaccgagaccttggtcatgggagtggcaccagttaaggctcaattcgagagtgctgaaatgggtgttcccgctgagaacgatggctgcaaatgtggagctaactgcacctgcaacccctgcacttgcaagtgaggtgttggggagctaaagcttcaagcagaaatggcccttagaaataatgataaaaactatatgtagtttcaaaacttcaaaattatgtagtaag

SEQ ID NO: 3030 - DNA, 399 bp, Glycine max
gatcctctgcaacggcaacagactaagttgtttctctctctagccctagggtttcgttctctactaccgttctttcatcagatcgctgccgtttctggcgtcattccgataattcggcggcatgaagctaacagtgaagactttgaaagggagccatttcgaaatcagggttcaaccctccgatactgttatggctgtcaagaagaatattgaagatgtacaagggaaaagataattacgcatgtggacagcaattgttgattcacaatggcaaggttttgaaagatgaaactacattagtagagaataaagtctctcaagatggctttcttgttgttatgcttagtaagagtaaaacatcacgttctgctgcagcttcatccgttcatcctgccagta

SEQ ID NO: 3031 - DNA, 286 bp, Glycine max
gaagggtttcaagttattgtgagcaaagaaagatagtgagtgaagtaactgaagagaagaaaaaatgccgtgcctcaacctcagcaccaacgtgtccctcgaaggcgtcgacacctcttccatcctcgccgaagccacctcctccgtcgccagcataatcggcaaacccgaagcctatgtgatgattgtactgaaaggatcagtacccatagcttttggtgggaatgagcagccagcagcttatggagaattggtttccattggtggtcttaaccctagtgtaaac

SEQ ID NO: 3032 - DNA, 219 bp, Glycine max
ggtcatagtattatcattcattctcatctttctctcttctctctccacccataccctaagtcccgaccctgttcccctctcgtatccgtcatgaatggaggaaagtccaagactgaatctaagagagccgatcccaaacttgctgtgaataagatgggagccgccatcaaggctaggaaacgcgccggcaaagggaatgcagcgaaagaccctaacaag

SEQ ID NO: 3033 - DNA, 434 bp, Glycine max
gtccgttcaaagcacgccgtgtttcgctgtctctcccatcctttcgcattctcaatacccttttgatttgtgaaaggaaagcaaacatggttgatcaggtccaacaccctacaatcatggacaaggttgctggtcagctccatctccgttctggtctttcatctggtattagaagttatgatggagcctaccgccacccagctatgtaccaaagaccctcttttgggaattactcgaatgctgcattgcagtttcctgtgatgcccacatgcaaagctaccatggatttgtctgctactgcaacatctgcctcacccgtctttgttgctgctccagcagagaaaggccattttcttttagactttctcatgggaggtgtttcagcagctgtctccaaaactgctgctgctcccattgaacgtgttaagcttttg

SEQ ID NO: 3034 - DNA, 102 bp, Glycine max
tcttgaataacacaattaaagagagcttaagacttattttgattcacaaatccaaccacaactcagcaccacaactcaacttcatcataggcatcatgtagg

SEQ ID NO: 3035 - DNA, 275 bp, Glycine max
aggattctgatgtggcacacaatgcaactttctcctatacatatgacgatcaggcatggagagcagaatttggagcaatatatcaggagcattactaattgactgttggtattattagcatttgataaatttccttttggatcaaactccaaacaatttgtctggcatatcctacttgggtcaaagggcatcccttaatgccattattctttttgtgtatttctagaaattcattatatttttttcgttgctgtgataatccaacagttgttatg

SEQ ID NO: 3036 - DNA, 398 bp, Glycine max
gacgcagcttcatccctaacgcgtgcatagcagagtcagagacagagacgcagccatggggcggagacctgcgatgtgttataggcaaattaagaacaagccataccccaagtcacgtttctgccgtggtgttcctgatcccaagatcaggatttatgatgttggtatgaagaagaagggtgttgatgagtttcctttctgtgtccatctggttagttgggagaaggaaaatgtttcaagtgaggccctggaagctgctcgcagtgcttgcaacaagtacatggccaaatttgctggaaaggatgccttccacttgagagtcagggtgcacccattccatgttcttaggatcaacaagatgctttcgtgtgctggtgctgataggctccaaactggaa

SEQ ID NO: 3037 - DNA, 107 bp, Glycine max
gccacaacacagaacaaaaacaatgaaaaagaaaaacccttagccaacacaaccatcatgggcacctctgctattcagcagtcagcattcactgggcaaactgctct

SEQ ID NO: 3038 - DNA, 139 bp, Glycine max
aggggcccaggctgattacatcactgtgcctgttgagggtccatacaagcctgctcactacatgtactaagtaactgagattatcaacggaaagtgagggaaagacataatcggttttatgaatcaggttgattgatta

SEQ ID NO: 3039 - DNA, 403 bp, Glycine max
gattgttggcttgtgctctgctcgtgcctctagggttatcatatctccatttccatttcctctctctcagtttccaagaatcttaagctatgggaaagtcttacccaaccgtgagcgctgattaccagaaggccgttgagaaggcgaagaacaagctcagaggcttcatcgctgagaagagatgcgctcctctaatgctccgtttggcatggcactctgctggaacttacgacgtgagctcgaagaccggtgggcgcttcggaagcataaagcacccctccgaactcgctcacggagctaacaacggtcttgacatcgctgttaggcttttggggccactcaaagcggagtttcctattttgagctacgccgatttctaccagttggctggcgttgttgccgt

SEQ ID NO: 3040 - DNA, 431 bp, Glycine max
gccactcacaaagtttgtaactctacacaggataaacctgccacacctcattagtagtagccagtatattcaaagttgagagaaacaaacagacaaaacacagccaagcatctcccaacacaccatcatcatcatcatcatcaaagccaagcacaacaatggcactcaaaagggcatcgtggttgctgctgctgccactgttatctgcagttgctggtgctgccaccaacaccaacagtgtgtaccatccttggtgtgaggccaggattcagagatctgatggcttcacttttggcattgccttcagttccagggactcgttcttctacaaccagaagcagtccctccagctctctcccctgtgaccgacgcctctctcgcgcttcctccaacgctcagcttgctctcttccgtcccagagttgatgagat

SEQ ID NO: 3041 - DNA, 280 bp, Glycine max
gaaagtgctatgagtcagctcggcgaactatgtgaccatgttcacattcatgcacagaaaacccttccttccagttccagcagctcggacgatctatgtgctgcaagcggatcaatgcggtgtgtcgagcacgtagatcgtcaaacacgtgcccttccaccaagtcactggcgttcactgcacaagggagctggtgctaacgacatgtggtaaccaaactgaatacctgtgcaacatatcggccgtgaaccagccgttctacctccgaagacggtcggac

SEQ ID NO: 3042 - DNA, 130 bp, Glycine max
tgggggtgtaacgggattaggtaatgtggttacatcaagagctatggtgggaaacctcgtaagaataaacaatactaccgcccctcccataaaaatatggtgtatttcttcaataaaagttaacttatgc

SEQ ID NO: 3043 - DNA, 438 bp, Glycine max
  modified_base (278)..(278): a, c, g, t, unknown, or other
ggtcttgcaggcgaagagatggccaccgttccagggcagctcgtgtgggagatcgtcaagaaaaacaattccttcttggtcaagcagtttggaaggggcacccagagcgtcgaattcagcagagagagcaacaatctctataacctcaattcgttcaagtactctggtttggcaaacaagaaaactgttactgttcagcctgagggcaaagatcaggctgtgttgttggctacaaccaagacaaagaagcaaaacaagcccgctgcattgctccacanatctgtgatgaagaaggagttcaagaggatggcaaaagctgttgaaaaccaggtggccaaaaattactacaggcctgatctcaagaaggctgcccttgcaaggttgagtgctgttcacagaagcctcaaagttgccaagtctggtgtcaagaagaggaat

SEQ ID NO: 3044 - DNA, 57 bp, Glycine max
ggtttgagtagtattattgtgagatcattgtttctagtacataattgatttctttat

SEQ ID NO: 3045 - DNA, 321 bp, Glycine max
ggaaggcatttcattagcagcgttaaagaagagagaagaaaaatgcgaaagttcgatccatggcccgttttcttcaagcgcgagtggaaacgcaactggcccttcctcgttggattcgcagtcaccggagctctaatcaccaaactttcccttggccttaccgaggaagatgctaagaattccaaattcgttaaggcgcacaaaaggtgatttctgaatcgtgacatctgcctggctttgcactttatgttaggtttgtcaagattacgttgcgtgtcgtgattttatggattgtaataacagaagagagatgctctagat

SEQ ID NO: 3046 - DNA, 280 bp, Glycine max
  modified_base (114)..(114): a, c, g, t, unknown, or other
gaagagtgatccttctacactaactaaagccgagcagcgagagagagaaaccctagcaaaaatgccggctggtcacggtttgagatcccgcaccagagattccttctctcgtcncttcaagaagaagggtaccatcgccctcaccacatacctcagaacctaccacgtcggcgattaagtcgacgtcaaagttaacggcgccgtccacaagggaatgcctcacaagttctaccatgggcgcaccggtcgcgtctggaatgtgagcagacgtgctgttggg

SEQ ID NO: 3047 - DNA, 303 bp, Glycine max
cggggagagaaactagtgactgacttttcgagaaaggaaaaaaaaagagtttccggcattactccatcatgaacgctcttcgcattcttctcttcttcctcttcgtttcggcattagtttatgcgaagaaaactggcgatgtgacggaattgcaaattggcgtgaagcataaaccagcatcatgtgaagttctggcacacaaaggtgacagagtcaaagtacactatcggggaaaactcactgatggaactgttttcgattctagctttgaaagaaataatccaattgaatttgagcttggta

SEQ ID NO: 3048 - DNA, 265 bp, Glycine max
cccacgcgtccgaagggcggcaaaagaacaacgaaagggaaaatctgatgctactcaatgatatctgaatctccgtccgaatgcacctgtgacaaactttcagttccacgtcgctgaaacaacatcatcaagactacggtaaagaagtacattcagcctcttcatttttcgaagcgttgctttcgaagcacttcgcgaaatgtccacggttgagatcctcgtgatatgcaatgctcgaacgcatacaatgttccaccaaagactc

SEQ ID NO: 3049 - DNA, 423 bp, Glycine max
gttagtgtgtacttcccaagacgacatagaaaagtgttataatcgctctgtcctcgctgtctctgtctttgaccgaagccaaagaagaggaagaaaccttagcagctttcggcgctcttcttttatctctgattttttttttttttttctctttcccttccaattttttctcatatcatattcatctctgtgcctctatgacagactagtacttgttgttttttgtacccattattacccacacacccccaaatacaaattaaattccaatccattattttaatgttattgttactagtattggtattattaccttaaactaaacagaaataagttgctattgtttttaatgttgttgtgattactactagtatttttttatatatatactggagtgatgtatcttcctagtttctactctct

SEQ ID NO: 3050 - DNA, 254 bp, Glycine max
  modified_base (74)..(74): a, c, g, t, unknown, or other
  modified_base (247)..(247): a, c, g, t, unknown, or other
cgctgcgacatgacgacataatggtaccgctgcgacaacactatacaaggcgactccgcagctgcagcactcangaccctacataggacgatatagcgtgcaactttcggcaaccacagaccatgacattcaagcgcatgaattgaggtcgcaacaaacactgccgctgacatgtcaaattcatccgatgctccaactgcggaaaatgctgccccaaagacaaagccatcaagaggtttttggttangaacatt

SEQ ID NO: 3051 - DNA, 420 bp, Glycine max
ccaggtcaccagcgtccgtaagcgtcagacaacgatcagcgcagatatctgacaaagaatcgaacgttagctaaaagacaatacttcggtgacctcccgtattgttcataaccaaacttcttctgctcaacatgctgacgctctgatacaagctttcataggatggagggctgatgacaacgccactatagcattactgggtcacagatctgtgcatcacatgcaagaaatcagtgaagcttatgacgatatttaccacgaggatctcatcacatgccttgagtccgatatctctagtgactttgatagagctatgtaccggtggatgttgcattctgcagattgtgatactgttatggtgaatgtggaaatcaccagtggcagcacagactaccatgtgattgcagagattgcttgtat

SEQ ID NO: 3052 - DNA, 421 bp, Glycine max
ggttgtcaagcctgccgagaaaaccctagttcgcttgcagtcacacaagaggccaatcctattcatagctcgagatgggtgaagaagtgaaggtagttgttccagaatcagtgttgaagaagcgcaagagggaggaggaatgggcgttggccaagaagcaagaactcgatgctgccaagaagaagagagccgagagccgcaaactcatctacaacagagctaagcagtacgctaaggagtacgatcaccaggagaaggaattgattcggttgaaacgcgaggccaagctgaaaggtggtttctatgtggattcagaggctaagctgttgtttagtattcgcattcgtggtattaatgccatggaccccaaatcaaggaagattctgcagttgttgcgattgagacagattttcaatggtgt

SEQ ID NO: 3053 - DNA, 354 bp, Glycine max
gacaaccaagctcgcttcttccttctcgcatcaacagcatgcagatcatcgtcaagactttgagcggcaagaccatcaccctcgaggtcgagagcagcgacaccatcgacaacgtcaaggccaagatccacggcaaggaatgtatcgctcctgaccagcagaggttgatttttgctggtaagcacctggaagatggtcgcactcgtgctgattataacatacgacaggaatcaacacttcacatggtcttgaggctaaggggaggtaccatgagtagcgtgatgactttaactgggaaagaaattgagattgacattgaagcatctgatacaatcgaccggattaaggaacgtg

SEQ ID NO: 3054 - DNA, 278 bp, Glycine max
gacaactaagagagaatcgtcctgctcacatcaacacaatgcatctctgcgcaaccatgttgatcagaaacaacattactctgcacgacaagatcaggcacaccatcaagctttcaaaggacaggatgcagaagacagagcgaatacctcctgaccaggacacattgatttttaccagaaagcagatggcagatggtcttactcgtgcagtttacaacatgctctcagcatcaacacttcatctgatcttgctgctaacgttaagaaacatgagtaac

SEQ ID NO: 3055 - DNA, 350 bp, Glycine max
gaaatctgctgcttctcaatgttgaaaagaaaccctagcaagtggagcaatggcagacgttgaagtccaagttgccggaacagcaacaacaaggctggccaaaaagagaacgttcaggaagttcagttttcgaggcgtggatctcgatgcacttctcgacatgtccaccgatgaactcgtcaagatgttcagtgcccgcgctcgtagaacgttccagagaggcctcaccagaaagcccatggccttgatcaagaagctccgtaaagcgaaaagggaagctccaccaggtgagaagccagaaccagtacgcacccacctccgcaacatgattattgtgcctgagatgattg

SEQ ID NO: 3056 - DNA, 223 bp, Glycine max
taatattgtaatttagcaaatatcttttgagattctcataaagactgatcatatatggtcttcttacatatattgccctacctattaattagttttcatcacttaaattcatcaaaaacccagtgcttctgagttgtgatcttccatggggtcagccccatgcaaattcagcgggtatgtgctgggtggtcacactacattgttatctgaccttttgtccttt

SEQ ID NO: 3057 - DNA, 360 bp, Glycine max
  modified_base (319)..(319): a, c, g, t, unknown, or other
ggtttcggaaacccgaaacgtttcgcctcgcttcacccgtttcgtgcttatcctcctcctcaatggcggtgcctccgtcttcgctggagaagcaattcgatgactttagggttcagctggaagaatctggaaccttgcgcgaacgaattcgaagcgtcgtttcggagattgagtcctccactaggctcatctatgccacacttcttctcgttcaccagtctcgtcccactcccgagcttttagagaaggccaagtctcatgttaatgtgttaaagaagcagtataagcaacttgctgaagttgttggacgatgccctgngcaatactataggtaccatggtgattggaagagtgagacac

SEQ ID NO: 3058 - DNA, 79 bp, Glycine max
gccggtttcccgaacgatttgatggtttggaatgcatttcccaagcaacgagtcttcggttcgaaaccagcagagagag

SEQ ID NO: 3059 - DNA, 381 bp, Glycine max
ggaacacagagcgagcgaaagtagaatctgaaaaacaatggcggcgaagctagacacccacgccgtggcttccgatctgatcgacttcctcaacgcttctccaacggctttccacgccgtcgacgaggcaaagaggcgtttgcgtagcgcggggtaccaccaactctctgagagggaagtgtgggaactgcaaccgggcaacaagtacttcttcaccagaaatcactccaccatcgtcgccttcgccatcggcaaaaagtacgttgctgggaatggattctacataattggggctcacacggatagtccttgtctcaaactcaaaccctggtcacaagggtgttaaggctggggattttggaggttggggtccaaacctat

SEQ ID NO: 3060 - DNA, 407 bp, Glycine max
ggagttgagaggatcgtgagaggggcagtagccgagattccgtgagttgcaaaaatgaagacgattctttccaccgagaccatgaacatcccggacggcgtgagcatcaaagttcatgccaaggtcatcgaagttgagggcccccgcggaaaattggtgcgagacttcaagcatttgaatctcgattttcagctcattactgacgaaaacggtaaaagaaagctgaaaatcgacgcgtggtttggttctcggaaaacatccgccgccattcgcaccgccttgagccacgtggagaatcttatcaccggcgtcaccaagggctaccgctacaaaatgaggttcgtttatgcccattttcccatcaacgcaagcatcggcaacagcaacaagtctattgagatccgaaa

SEQ ID NO: 3061 - DNA, 389 bp, Glycine max
gacaacgaaactcacagaagaaaggagaaaaagaagcgaaactaaagtcagcattcgaaaaagatgagtagcatcggtacaggttacgatctatcggtcaccactttctcccctgatggacgcgttttccagatcgagtatgccgctaaagccgtcgacaacagcgggactgttattgggatcaagtgcaaagatggggttgtgttgggcgttgagaagcttattccgtcgaaaatgatgcttccgggttccaatagaagagtacactccgttcatcgtcactctgggatggctgtagcaggattagcagctgatggcagacaaattgttgccagggctaagtctgaagctactaactatgacagcgtatatggcgaaccaattcctgt

SEQ ID NO: 3062 - DNA, 450 bp, Glycine max
  modified_base (422)..(422): a, c, g, t, unknown, or other
  modified_base (425)..(425): a, c, g, t, unknown, or other
  modified_base (428)..(428): a, c, g, t, unknown, or other
  modified_base (430)..(430): a, c, g, t, unknown, or other
ggatcttcacgattaggagatggctaagtcgaagaaccacaccgctcacaaccagtcctacaaggcccacaagaatggcatcaaaaagccaaagaggcaccgccacacttccaccaaagggatggatccaaagtttctgaggaaccaaaggtacgcgaggaagcataacaagaagagcggtgaaacagccacggaagaagagtaaagtgtcactctcaaatggggctattaggatttgatttgctattcaagtcccatatgttttgtgtcaaatctatatttagtagtatagtcattttgatgagttaatttaatccagagagaatgcagtacttactcttatagcatcgttgctggtttttgtttgttaaagacccttcaaattttatcgatggattattattcagttgtttaaaaaaaanaanaananaaaaaaaaaaaaagcggccg

SEQ ID NO: 3063 - DNA, 423 bp, Glycine max
ggttgtcaagcctgccgagaaaaccctagttcgcttgcagtcacacaagaggccaatcctattcatagctcgaaatgggtgaagaattgaaggtagttgttccagaatcattgttgaagaacccaagaaggaagaaggaatggccgttggcaagaagccagaaatccgtacctgcaagaagaaaagagaccaagacccacaatctcatctacaacagagctaagcagtacgctaaggagtacgatcaccaggagaaggaattgattcggttgaaacgcgaggccaagctgaaaggtggtttctatgtggatccagaggctaacctgttgtttattattcgcattcgtggtattaatgccatggaccccaaatcaaggaagatcctgcatttgttgcgattgacacagattttcaatgggtgta

SEQ ID NO: 3064 - DNA, 288 bp, Glycine max
gacgctctctcactcacaaacgcacactgaattcaaaaacatcgaaagagagaggcatggccgagcaaaccttcatcatgatcaagccagatggcgttcaaagaggccttattggcgagattattagcagatttgagaggaagggtttttacttgaaagggttgaaactcgttactgtggaccgtccttttgctgagaagcactatgctgatttgtctgcaaagcctttctttagtggtttggtggattacattgtctctggccctgttgttgccaagatctgggaag

SEQ ID NO: 3065 - DNA, 258 bp, Glycine max
atttggggttgtccgctgtgcactgctctttggatttgccgcctagaattaatttacatatcttgaaactatttcctaacataaaatattcaagtttctatttttacttttattgggtatgttttgctaggtctattggagatgagagcctttgcaaggaagtatttgaggagtacattgcacagctaaaagaagaggcaaaagagaatgagcggaaacgaaaagaggaaagggcaaagaaggaaaaagacagggagg

SEQ ID NO: 3066 - DNA, 59 bp, Glycine max
atggatattgcgtaatcaattgacgttgatattcaataacaaagagtaaatcctctaac

SEQ ID NO: 3067 - DNA, 76 bp, Glycine max
agggaaagatcccaaggagtcggtccgaacgaagattccaccccttccttgacgaacacacagacgtgtgttttgg

SEQ ID NO: 3068 - DNA, 408 bp, Glycine max
gacacgcaactatttctgactacgttttgctctacgcctctccctctctctcaaaaatcgttctcttcgattttagggttttgttttgctgctgcctccgttccccccttctcataaacaacgcgttttctcttctgcttcgtatctattctttgcttttggttttggttgattcaaggccttcacagcattcgttgcggcattttaatcgatttatccaagcaggactgaatgaactaatggagtctaaaggtgggaaaaagaagtctagtagtagtagtagtaaatcattgttctacgaagctcccctcggatacagcattgaagacgttagaccaaacggtggaatcaagaaattcagatctgctgcttactccaactgcgctcgcaaaccttcctgatatccat

SEQ ID NO: 3069 - DNA, 278 bp, Glycine max
gatccttcgtccagctagcaccacattcacctgaggcttccaaagcaatggcttcccttgcagcatccactgctgctgcttcccttggcatgtcagaaatgcttggaaaccccaacaacttcagtggtggcacaagggcagctccaactgcttccaatcctggctccttcaagactgtggctcctttctccaaaaagaaggctacaccaacacctccaaaaaaagctgctgctgctgctcctgccaatgatgagcttgccaagtggtatggtcctgac

SEQ ID NO: 3070 - DNA, 324 bp, Glycine max
  modified_base (212)..(212): a, c, g, t, unknown, or other
gagaatagagagctcctccaattagggtttttgtgatctgcagctacgatgggtaagggaacggggagtttcggtaagaggaggaacaagacccacaccctctgtgtgaggtgtggccgccgcagcttccacctccagaagagtcgttgctctgcgtgcgcttaccccgctgcgcgcaccaggaaatataactggagcgtgaaggccattangagaaagaccaccggaactggaaggatgaggtacttgcgtaacgtgcctcgcagattcaagagcggcttcagagagggtaccgaagctgcacccaagaagagaggagctgct

SEQ ID NO: 3071 - DNA, 230 bp, Glycine max
gaacatacctaaaaattgtaccgatatggcttcacttgtgtgtctccttttttccttgcatttcatggttatcatgtcaggttccttaccagcaaatagtgaagtgtttacaaaagagtctcctatgtctctatccacaaaacccgtggaaagactcacccaactccacttttatttccataacaacaaaatgggggaacacccgactgctatgaaaattgttgagcctc

SEQ ID NO: 3072 - DNA, 260 bp, Glycine max
cttcagatcggaaacttcacactttcgaggatgtggcatagcacgaccagaccaatgattgctggctcatcatttctggcaaagtgtatgatgtcacccctttcatggaggatcatcccggacgtgatgaggttttgttatctgcaacatggaaagatgcaaccaatgattttgaagatgttggacacagtgattctgctagagatatgatggaaaaatactaaattggtgagattgattcatcaactgtacaactaaaa

SEQ ID NO: 3073 - DNA, 137 bp, Glycine max
gacacttactagtagtaagcatggagtcctcaaagatctatgcttacctcttcctctgcatgatctttctctcttccgccactcccattctcggttgtggctactgtggcaaaccccccaaaaagcacaagcctggt

SEQ ID NO: 3074 - DNA, 434 bp, Glycine max
gaatcgcacctaggcctccgtcacagccacggtaccgcacgctcgctgcctttctcactcacccacgcgagcgcgcgtcctctcacccacatcattgcaccgccatcccagatgccgccgtgcacttgctgtcgtgcccacactgagattcgcacgtcctctgacccacatcatcgtgtcgccgctgtcgagcccacactaccattgcacacgctgccgcgcacttgccgtcatgcgcacgccagctgtttcgtaatttttatttttttttatcttttgtctgcctcttttttatttgatatgatattttgacattcaggtttacgggttttgttggttggatgaaaaagtaaacactaaactttgaagtttagaatattttgattatgaataactggtgactggttgatgaggttttcttgagatgagattcc

SEQ ID NO: 3075 - DNA, 268 bp, Glycine max
gacgtctctgcggattcatccttttcttctgcagacaaagaaccaacaacacttgtttcttcagccatggccagtcaacctgaatcatctgacgcaaagggcacaaaaagggattttagcaccgccatattagagcgtaagaaggctccgaatcggctcgtggttgatgaagctgtcaacgacgacaactctgttgtcgcgcttcatcctgataccatggagaaacttcaactttttcgtggtgacaccatcttgatcaaggggaaaa

SEQ ID NO: 3076 - DNA, 365 bp, Glycine max
aggaagctttagagcagcaaagaagggaggaagaacgatataaagagctggaagagatgcaaagacagaaggaagaagccatgcgaaaaaagaaacaggaggaggagcaagaacgtctaaaccaaataaagttgttgggtaaaaacaaatcccgaccaaaattgtcatttgcttttggatccaaatgaccattggcttgggcaacctgtgtctatttatttagtctaaagtgtgtttgggcttaattccctatttgtgtctgtaatttgaggaaaatcaggaaattatacacagcctcctcaactataatgtgacagcgttgttaccgttttcagtttgcattagatttcattgtttatcattgc

SEQ ID NO: 3077 - DNA, 51 bp, Glycine max
gcgtaatgaacttgattatttccctaaaatgaagatgttatctttgctcgt

SEQ ID NO: 3078 - DNA, 285 bp, Glycine max
gcttgcaggcgaaagagaagatggccaccgttccagggcagctcgtgtgggagatcgtgaagaaaaacaactcctttttggtcaagcagttcggaagggggacccagagcgtcgaattcagcagagagagcaacaatctctacaacctcaattcgttcaagtactctggtttggcaaacaagaaaactgttacggtacagcctgagggtaaagatcaggctgtgttgttggctacaacaaagacaaagaagcaaaacaagcctgctgcaatgcctcaaaaatctg

SEQ ID NO: 3079 - DNA, 435 bp, Glycine max
gaccctcttgtttgctaatattctcattcttctgtctctgcttcttctccttctgaactaagagatggggttgtctttcaccaagctttttagccggctctttgctaagaaagagatgcgtattctcatggtaggtcttgatgctgctggtaagactaccatcttgtacaagctcaagctgggagaaattgtcacaaccattcccacaattggattcaatgtggagactgtggaatataagaatattagctttactgtatgggatgtgggtggccaagataagatccgtcctttatggagacactacttccaaaacactcaggggcttatctttgttgtggatagcaatgatcgtgaccgtgtagttgaggctagagatgagctccaccggatgttgaatgaggatgagttgagagatgctgttctcctggtatt

SEQ ID NO: 3080 - DNA, 107 bp, Glycine max
gacacaccgtttgttctattcttaactcaacttctgctacccactctcttcttccaagtccaaccacgcttttctctacagtcatgggcaaggtcaagatcggaatc

SEQ ID NO: 3081 - DNA, 434 bp, Glycine max
gcttgtgcgcttagcgcacttatggaccgcttagcacacgttagtgatttttggcttagcgcgcctttctcacttagcggatgaactgaagcggtgcacttagtgagatgaagcggtgcgcttagcgaacctgtacagctcatcttcttccagagtcttcctcgcgcttagcccaggagtgttacgcttagtggacgctcgctaagccagcagattggcttagcgagaaggtgaaaaacaacactttccaaagcttgcctaattaacctgaagttgagagaaaatgattattaaacacacaaaatgaaaatactaagtatttattacctatacttaacagaaaatacttataacactacaaaataaccataaattgggagagtttgatacaatttatacaagttttatacacaaaagttagtcgttttcatcga

SEQ ID NO: 3082 - DNA, 349 bp, Glycine max
gaacagcgccatatcataacccttcgaagtcgccgtttgtgttcatttcgttcgcatcttctctctctctcagaaagatgaaggtggtcgccgcgtatttgctcgccgtcctcggtggcaacaacagcccctccgccgatgtcatcaaggaaatccttggctccgttggagtagaagcagatgacgataggattgaatcgtttttgtctgaatttaagggtaaggatatagttgagcttattgctgccggtagggaaaatttggccacggttccttcaggtggtggtggtgccgttgccgtcgccgcatctcctggggaatgtgctgctgctgctgcacctgctgctga

SEQ ID NO: 3083 - DNA, 419 bp, Glycine max
tggggaacgccattgaactttgaatcagtattcactcgtttcagtcaaacctttatctctctctttctttcttcaaattcaacttgcaattccaattcctggggagttggttccattttccgacgaaccatctcaaatccaccgccacataatgtaactgtatgcgaatgcgaatgtgaacgcggtttcgatttagatccagattcatggggatttgctttagcattgaagaccaaaaccacctttccatctccgattccaacgcgaagcctaaacctgcagtagggtatgaatctggcgctccattggcttccaagaacaacaaagaattccgccaaagtgctggatacaacaatgtggataattttacctacgaggagcttaggctcgcgacgaagcactttcggcccgatttcatc

SEQ ID NO: 3084 - DNA, 411 bp, Glycine max
gaaccaagtttgcttgcgtgtatattcattttagcatcaaggttgaatctcagagaaaaagaaacatcgacaagcatgtctggaagaggaaagggaggcaagggtctcggaaagggaagagccaaacgacaccgtaaggttctgagggataacattcagggaatcaccaagcccgcgattcgccgtctggccagacgtggtggcgtcaagcgtatcagtggtctcatctacgaagagacacgtggcgtcctcaagatcttcctcgagaacgttattcgcgacgctgtcacctacactgaacacgctcgccgcaagaccgtcactgccatggacgttgtttacgccctcaagaggcaagggaggaccctctacggatttggcggttagacaattggggatttcagcactgcg

SEQ ID NO: 3085 - DNA, 405 bp, Glycine max
ggtttctctctgcagttgcactcttgcaggcatgtgcagctgtttcccgttctgctcctctcccaacccctctgtttctttggagtgagaaagtttaatactttagaaccagctagcgagcaattgagccattgtcatacatatatataaataccgtgcgagaaatgcagcagcacctgatgcagatgcagcctatcatggaagcctactaccccaacaacgtcaccactgatcacattcaacagtacctggatgagaacaagtccttgatcctgaagattgttgaaagccagaattctggcaagctgagcgagtgtgcagagaaccattcagggctgcagagaaatctcatgtacctagctgcaatagctgattctcaaacccaaccatctccaatgcctggtc

SEQ ID NO: 3086 - DNA, 343 bp, Glycine max
gaggggatggaggacattgaggatttgctgattggaagtgcaactccaccgggctttcgtttgccattagcagcggctgttggcgtggggacaaagcggaatcaactctcttcttcttcgctttcgccttcacctgcaatccctggcactcagactatcttcataaagacctttggctgctctcataaccagagtgacagtgaatatatggctggtcagctttctgcttttggctattcattgagcgatgatcctgaccatgcagatctctggctcatcaacacttgcacggtcaaatccccaagtcaatctgctatggataccatcatatcgaaaggaaaat

SEQ ID NO: 3087 - DNA, 419 bp, Glycine max
gagatctgctgcttctcattgttgaaaagaaaccctagcaagtggagcaatggcagacgttgaagtcgatgtggcggcagcagcagcagcagggctgccgaagaagagaacgttcaagaagttcagttttcgaggcgtggatctcgatgcacttctcgacatgtccaccgatgaactcgtcaagatgttcagtgcccgcgctcgtagaaggttccagagaggcctcaccagaaagcccatggccttgatcaagaagctccgtaaagcgaaaagggaagctccaccaggtgagaagccagaaccagtacgcacccacctccgcaacatgattattgtgcctgagatgattggtagcattattggagtgtacaatggcaaaacctttaatcaggttgaaatcaaacctgagatgattgggc

SEQ ID NO: 3088 - DNA, 374 bp, Glycine max
gacaacaagaaattatcatcctagcacaagtttaataagagttatgacaaagaaagagatgaaagttattagagttgtgattatgatcctgattatgtttgacttctcacaagctaattacaatccttcatctatgcaaattgggtcaaattatggatctgatggacgattcgcttgtcaaatcaaatgtcagaaaaaatgtcaaaaatatctattacttccaccaggtggtattttttatataatatgttatcattcatgttttcggaaatggtgataaatgcccatcgatgttgctcaagattgtgtcactagttgtgtcctgaccaagccaattgacgtcaacattgatgttcgtggtcctacagatgaca

SEQ ID NO: 3089 - DNA, 429 bp, Glycine max
ttcgttacagttggtgaaagaggcattgtacgcatatggaattccaaaggtgcaggttgcatctttgagcaaaaaacttcagatgttacagccggcatggatgaggatggctcacgtaagggtttcacttctgctgttatgcttgcctcagatcaaggattgctttgtgtaactgcagatcagcagtttctgttttactctctggacttcactgaacagttgttgcaattaaatctaaccaaaagacttgtgggatataatgaagagattgtagatatgaagtttattggggatgatgaaaaattccttgctcttgctacaaatcttgaacagattcgggtttatgacctttcatctatgtcatgttcgtatgtcttatctggtcacactgaaattgttctatgccttgactcctgtgtatcaagttct

SEQ ID NO: 3090 - DNA, 296 bp, Glycine max
ggtgtgttcctcaactcaacacactcctttataattgcagcgtcgacaaaaaccctaactcctaacctttttttcttcctttcacctcttcagcagtcgttacagagactccataacccgaaaatgcctttcaagaggtacgttgagattggaagggttgctcagatcaactatggcaaagagtatgggaggctcgtggttattgtcgatgtcattgaccagaataaggctcttgttgatgctcctgacatggtgaggtccaaagtgaacttcaagagggctatcaccactgacat

SEQ ID NO: 3091 - DNA, 413 bp, Glycine max
gactcaccacttcaaaacactcataacacaaagcacaaagcaaagctcatccttgagttaaaaaatggcagcagcttcttccatggctctctcatccccatccttggctggcaaggccgtgaagctgggcccatcagccccagaagtgggaagggtgagcatgaggaagaccgtcaccaagcaggtctcctcaggaagcccatggtacggcccagaccgagtcaagtacttgggcccattctctggcgagcccccgtcctacctaaccggtgagttcccaggcgactacggctgggacactgctgggctttccgcagacccagaaaccttcgccaagaaccgtgaactcgaagtgatccactccaggtgggccatgctcggagccttgggctgcgtcttcccggagttgctgt

SEQ ID NO: 3092 - DNA, 116 bp, Glycine max
gttgtggccaagaattaggtgcctcgagttaggaggacgatagtctaagcatcttttctcacagggatttttgagtcagtttctgtttatatttattatatgcataattggtttct

SEQ ID NO: 3093 - DNA, 53 bp, Glycine max
gagacctcaggtcaggcggggctacccgctgagtttaagcatatcaataagcc

SEQ ID NO: 3094 - DNA, 359 bp, Glycine max
gatccttcgtccagctagcaccacgttcacctgaggcttccaaagcaatggcttcccttgcagcatccactgctgctgcttcccttggcatgtcagaaatgcttggaaaccccatcaacttcagtggtgccacaaggccagctccatctgcttctagtcctgcctccttcaagactgtggctcttttctccaaaaagaaggctacaccaacacctccaaaaaaagctgctgctgctgctcctgccaatgatgagcttgccaagtggtatggtcctgacagaaggatcttcttgcctgagggtctcttggaccgatccgaaatcccagagtacttgaccggaaaagtccctggagactat

SEQ ID NO: 3095 - DNA, 374 bp, Glycine max
gatgttaagacttgagagtgagagagagagtgagagagtgagtgagatagagagagacgcttcgcaaatctcaatcgaatctcagaaaaatgagagaaatcatcggcattcacataggtcaggccgggatccaggtcggaaactcctgctgggaactctactgcctcgaacatggcatccagcccgacggcatgatgccttctgactccaccttcggtgtagcccacgacgccttcaacaccttcttcagcgaaaccggatctggcaagcacgttccccgtgctgtcttcgtcgacctcgaacccagcgtcatcgacgaggtccgctgcggcaactaccgtcaactcctttcacccgaacaactcatctccagc

SEQ ID NO: 3096 - DNA, 395 bp, Glycine max
gattcctcaagaactatggtttgcagtcactgctctgtttcaccgagtttgggcgtttagatcagaaccaaatcgtgttctcttccattggcaaacatggcaactcaaatgagcaagaagagaaagtttgttgcggacggagtgttccttgccgaactgaacgaggttctgacacgtgaattggcggaggacggttactccggcgtcgaagttagggttacgccgatgcgcagcgagatcatcatcagagccaccagaacccaagccgttctaggtgagaagggaaggagaattacggaacttagctcagtggtgcagaagaggttcaaattccccgaaaacagcgtcgagctttatgctgagaaggtcaacaacagaggcctgtgtgccattgc

SEQ ID NO: 3097 - DNA, 69 bp, Glycine max
aaaaggtaaggcctccaaaaaaacacaaaaagggggttttggctccaactccgccaaattctcaatccc

SEQ ID NO: 3098 - DNA, 340 bp, Glycine max
tggtaccctgtcgtacgctgcggaatcccgaggtcgaccagccgtcggtacgctgccaaaagaacaacaaaagggtcacaatcaaacgggaaaaggcgtcttcaaaaacgcggcccaaaacttctcctacccttttattcattcaattcgtttctagggtttcctttcctttgccgagaaaaatgagagattgcatttcaatccacattggcaaggccggtatccaggttggaaacgcctgctgggaactctattgccttgaacacggcattcaccccgatggacagattcccaagtgacaagaccgttggcggaggagacgacgccttcaacacatttt

SEQ ID NO: 3099 - DNA, 314 bp, Glycine max
  modified_base (201)..(201): a, c, g, t, unknown, or other
attgggcatgtggatgagaatggcgtctacaatggccatttctccacttttgctctctgcggcttcatacgtgctcagggtgatgctgacagtgccctagatcgcttgtggcagaagaagaaagttgaagttaagcaacagtagacacccatgatagtttgttactttgctatgtattaatttctacgcatgctagagatnattgagtactatgattgtcgtcttgagcaaatactcattcgaaattttcgttggtatttggtaccgccagctaaatttgcttttttgacagtttgccagtgcgttgataaata

SEQ ID NO: 3100 - DNA, 263 bp, Glycine max
ggcagtttcaaattttcctttccttcactttcccgagaaaaaaataacacttttcactttcttcactacgttctcacttcgatatggctcgtacgaagcaaaccgctcgcaagtccaccggtggcaaggcgccacgtaagcagctcgccaccaaggccgctcggaagtccgctccggcgaccggaggagtgaagaagccccaccgcttcaggccggggaacgtggcgctgacggaaatcagaaagtaccagaagagcaccgag

SEQ ID NO: 3101 - DNA, 287 bp, Glycine max
ggcgtacacagcctcaacaaccctaacgcgtgcagagcagagagagacgcagccatggggcgaagacccgcgaggtgttataggcaaattaagaacaaaccataccccaagtcacggttttgccgtggtgttcctgattccaagaataggatttacgatgttggtattaagaaaaaggtgttgatgagtttcctttctgtgtccatctggttagttgggagaaagaaaacgtttctagtgagggcctggaagctgctcgtattgcttgcaacaagtacatggccaaa

SEQ ID NO: 3102 - DNA, 141 bp, Glycine max
gaagaaagctgctagcacagggaagttctacacttttttgtttggattgatcgagtgtactttttcttttcgagattggcttggtgtgcagtggaaagagggtggaaaagagtggtaagggggagggcggcgccccttgtc

SEQ ID NO: 3103 - DNA, 377 bp, Glycine max
gagctagggtttcagtggtgttagatctgtacccgcctagccattgatttggaaaagtccaagcttcaaagatgtgtaagcttcagagtgatgctcttagagaagctatctcaggaatcatgactgattccaaggaaaagaacaggaaatttgtggagaccattgaactccaaattgggctgaaaaactatgatccccagaaggacaagcgttttagtggctctgttaagttgcctcacattcctcgccccaagatgaagatttgtatgcttggagatgcccaacacgttgaagaggctgagaagataggattggactacatggatgttgaggccttgaagaagcttaacaaaaacaagaaattggtgaaaaaacta

SEQ ID NO: 3104 - DNA, 174 bp, Glycine max
aatcagcttttccccatcctgtttgttctcatcttcagtctcatcatgcttccctgtttccatctccgattgtggttcaggcgaattctgattcttcgttgacgaaggcaccgtggattccggacgccctcgcccccgctacgagtttgcatattattattgtcattcatgaac

SEQ ID NO: 3105 - DNA, 341 bp, Glycine max
gacctcaaaaaacaaaaatcaataccttagagaaaacaaaagcacagaatcgaaagaagagttcttttttgagagagattgggatggcttcgacgaagaagatcacactgaagagttcggacggcgaggccttcgaggtggaggaggcggtggcggtggagtcccagacgatcaagcacatgatcgaggacaactgcgccgacagcggaattcctctccccaatgttaccagcaagattctggccaaggttatcgagtattgcaagaagcacgttgaggccaattgcgctgacgagaagcccagtgaggatgaactcaaggcttgggacgctgatttcgtc

SEQ ID NO: 3106 - DNA, 389 bp, Glycine max
atcgtgcctatgcacaaggtcaatttcgacgccaagagcgagtacgagatgattcagaactacaaggtccttcaagatgtcttcaacaaactcaaaatcaccaagcacatcgaggtcagcaagctggtgaaaggaaggccactggataacctcgagttcatgcaatggatgaaacgatactgcgattctgtcgattccggccttcagtacaattataatcctctggagaggagagaggtttgcaaaggaggaagagaaacgagcaagaaatctgcaaactcccaaggctcaaccaagggtttctactgcacagagaactcaatcctcccataatgctcgaagaaatgaggtttccaatgcaaaccctacaaatcaggctgcaaaggttg

SEQ ID NO: 3107 - DNA, 400 bp, Glycine max
gactcactcatacaatagagaccagcttttgcttctttgtgaacatggagatgaggaaatcatgtggcttcttcttcttgctcctcctccttgtctttgcttcccaggtggtggtgcagacggagggaagagtgtgtgagtcacaaagccacgggttccatggtttgtgtaatagagaccacaactgtgctttggtctgcaggaacgaaggtttctccggtggcaggtgcaaaggcttccgccgccgctgcttttgcaccaggatttgttgagatctcatcaaacactactcttgccatgcaaattaataaatcatagctaggccaaataaattgcatctactctttatccatttgggagctagcttacacaaccaactcatacttggtcattggattgc

SEQ ID NO: 3108 - DNA, 359 bp, Glycine max
  modified_base (37)..(37): a, c, g, t, unknown, or other
gcctccgaaaaccctaacaacacaggcgcagacgcanacgcaaacgcaaacgcaaacgcaaacgcagagcgtgatccattgacgaagatggtgcagcgtcgcacctaccgcaaacgccacagctatgctaccaaatccaaccagcacagagtcgtcaagactcccggtggcaagcttgtttatcagaccacgaagaagagggccagcggacccaagtgccctgtcactggaaagaggattcaagggattccacatttaaggccagcagagtataatagatcaaggttacacagaaaccgaaggactgtgaaccgtgcatatggtggtgtgttgtctggcagtgctgttagagaaagaat

SEQ ID NO: 3109 - DNA, 163 bp, Glycine max
  modified_base (11)..(11): a, c, g, t, unknown, or other
  modified_base (148)..(148): a, c, g, t, unknown, or other
gaggtttttanggtttacaccgaggagacacaccttcagcagcagcagccatggttctcaaaaccgaactatgccgattcagcggtgccaagatctacccagggaaaaggcatcagattgttcgtggtgattctcaggttttcctgtntgctaactcgaaatg

SEQ ID NO: 3110 - DNA, 294 bp, Glycine max
cacgggactcacgacttcagtacactcataatacatcagcacaaatcaaagctcatccttgagttatgaaatggcagcagcttcatccatggctctctcatccccatccttggctggcaatcgccgtgaagctgggcccatcatccccagaatttggaatggtgagcatgaagaagaccgtcaccaagcaggtctcctcaagaagcccatggtacggcccagaccgactcaagtacttgggcccattctctggcgaacccccgttctaactaacccgtgaatttccaagcgaat

SEQ ID NO: 3111 - DNA, 274 bp, Glycine max
gacagctcttggctttagcaaattccaagtcccaattcccaattcgaaacccttagtcctttcaaagaaccaaattgagtgatcgtgatggcaccaaaggcagagaagaagccagcggagaagaagcccgcggaggagaagaagtcgacggtgggagacaaggctccggcggagaagaagccaaaggccggaaagaagcttccgaaggagggatgcgccggcggagaaaggaagaagatgaagagaaacaagaagagcgtggagacatacaaga

SEQ ID NO: 3112 - DNA, 240 bp, Glycine max
ataaccaaaatggtgtataaacacctaaaatcataagcaagcaaaaaaatgaacatctatacagaccaatgacctttttaggtaaaaataaatttcatgtttgaaacaaaccggtgtgaagtctgaaaaaaattattgtgaataagcttctcgggtccttcaagcttaataagatcgtgttcaaatgaaacacataaatgcaacctagtgaagccttataccaaaaaaggaacaatatac

SEQ ID NO: 3113 - DNA, 280 bp, Glycine max
ggtttttgtttcccatagcatagaagaagcagaaagagaagcattagcaaaagcaagaagaactagtctaagcagaaatggcctcttcagtgatggcatctgtggccctcaaacctgcccctttcactgttgagaagtcctcagttagaggccttccctccctctcaaggaactcctcttcattcagagtcgtggccagtggtggcaagaagatcaagactgacaagccttatggaattaatggtggcatggctttgagggaaggagctgatgcatctgg

SEQ ID NO: 3114 - DNA, 229 bp, Glycine max
gatttcaattcattttgaattgaaaccgcggagagtttgcagctgcatcatcgatcatcgtcacctcatggacggacacgattcacaagacccgaagcagagccctgctgacatgactgcctttgtgcaaaatcttctccagcagatgcaaaataggttccagacaatgtccgactccaatggttacaaagattgatgatatgggaattcgcataaatgatttggaaca

SEQ ID NO: 3115 - DNA, 381 bp, Glycine max
ggcgtacacagcctcaacaaccctaacgcgtgcagagcagagagagacgcagccatggggcgaagacccgcgaggtgttataggcaaattaagaacaaaccataccccaagtcacggttttgccgtggtgttcctgatcccaagatcaggatttacgatgttggtatgaagaagaagggtgttgatgagtttcctttctgtgtccatctggttagttgggagaaggaaaacgtttctagtgaggccctggaagctgctcgtattgcttgcaacaagtacatggccaaatttgctggaaaggatgctttccacttgagagtcacggtgcacccattccatgttcttaggatcaacacgatgctttcgtgtgctggagctgat

SEQ ID NO: 3116 - DNA, 269 bp, Glycine max
gattgtcctctgtattcttcttcttcttctcttactctctctgtaacaacaccaccatcaacaaccctttcaagccggcctaaaccccattacccaaaatctgtttttttttttattttttttcctgcaacactctttattggatcatcttgtatttcattcctcctttacaatttcctttcaaaaaaaattttaaaaaatattaaaaagtgctcttttttgtgaattttgacccatttggccaccgacagatttcgatcttctccgtg

SEQ ID NO: 3117 - DNA, 407 bp, Glycine max
ggttcgtaaacgcaggggaatcgagtgcgtgagggtttgcagtgtgcagtgtgcagtgtgcagtgcacttggatgcatcaataacccccgattcaatttgggaccaagatcctggttcgcgatgaagaggtcatttccatgggaaaatcaaattgatgtctcttcttcttcttctccaaactcccttcgtcctaaccccctaactatccctaactcccccatagataccaagtcccaagatgcactcatcaggcgggcagaaatgtatcaggattacatgaaacagattccaatcccaaatcatcgaagcactatgattccatttacctcatggatgggaataggcagattcatgaaacagatatacggacagcctctgcattacctcagcaatattctcctcaagc

SEQ ID NO: 3118 - DNA, 350 bp, Glycine max
  modified_base (220)..(220): a, c, g, t, unknown, or other
gacttcacaactcaaactgcttcattgcataattgcagataagatcaacccttctaccttcagattcgcgggaagatggcatcacttcatgctaatgtgacatcagttgtttacaacagtggcaaccgtgtttctcaatcgaaatttgcaagctcttccttcttgtctgggttcgatgttgttggtcgtgcttcaagtgcttggaagaaggaacttgtcncatcttccatttccttggtgcctagagccaccctaacatttgatcccccaactaccaattcagacataaccaagcaaaagaagcacactcttgaacctgctttcccagaatttcctcctcctccctcaat

SEQ ID NO: 3119 - DNA, 424 bp, Glycine max
  modified_base (226)..(226): a, c, g, t, unknown, or other
ggtgcctctcgtctccctttgcacaaaccctaacacctaaaagccagaagaagcgaaatcgtaatcgcaatctagcggatatgaaggtcgtcgctgcatacttgctcgcagtgttgggagggaatccatctccttctgccgatgatatcaaaaacatcctcggcgcagttggagctgaggctgagcatgagttgattgagttgctcttgaccgaagtcaagggcanagacttcaatgagctacttgctagtggaagttaaaaaatttctgcagtggctggtggtggtgcagcggttgctgttgctgctgcaccagcgggaggtgctggtggcggtgctgcacctgctgccgaagcaaaagaagaaaagaaagtagaagaagaagaggaatctgatgatgatatgggtttcagtttgttcgacta

SEQ ID NO: 3120 - DNA, 143 bp, Glycine max
gacatacagtcgcagcacaagtcacagaggttgtcggcggcgtgagaaagttggacatcaacctattcacagatgagaagggccacatacctgaactcttaagcgattctcaatgccgtcgtttcgccagcgtctaaatcctc

SEQ ID NO: 3121 - DNA, 384 bp, Glycine max
gtgtgaaaaaaaaaaaaaaaaaaaaaaaaaaaaaaaaaaaaaaaaaaaaaaaaaaaaaaaaaaaaaaaaaaaaaaaaaaaaaaaaaaaaaaaaaaaaaaaaaaaacaaaaaaaaaaaaaaaaaaaaaaaaaaaaaaaccccccccccaaaaggtccaaacctaaatacccccgaaaagcaaaccaaaacccccccaaaaggccccccaaaaccaaatccaaggcccccccttaaaaaaccccctaacggaaaaacccccggcgtaacccaactaaacccccttaaaaaaaaccccccttccccaaaggggggaaaacccaaaaagccccccaccaatcccccccccaaaaaatgccccacccaaaatggcaaaaggaacccccc

SEQ ID NO: 3122 - DNA, 395 bp, Glycine max
gagagtggtggagtgtgcagaagagcgtcgcagtcgcaaccctaatcagaagaagcgcagcttcaagcgagtgacagccaccagccatgggtcgtatgcacagccgcggtaagggtatatcctcttctgctttgccctacaaaaggacacctcctagctggctcaagatctcttcgcaagatgtcgaagaaaatatctgcaagtttgcgaagaaaggtttgaccccgtctcagattggtgtcattctcagagattctcacggtattgctcaggtcaatagcgtcactggcagcaaaatccttcgcatcctcaaagctcacggacttgcgcctgaaattccagaggacctgtaccatttgattaagaaggcagtttcaattaggaagcatcttgag

SEQ ID NO: 3123 - DNA, 403 bp, Glycine max
  modified_base (17)..(17): a, c, g, t, unknown, or other
  modified_base (22)..(22): a, c, g, t, unknown, or other
  modified_base (26)..(26): a, c, g, t, unknown, or other
  modified_base (392)..(392): a, c, g, t, unknown, or other
ggattgaggaaggttangcgangaanggaaaaagaggacagaggttgcttgcgcaaatctagctaatctgggctttctgggacaaccagtagagaaagtaaaaggattgagattgagatttgagagaaagagaaagagaaagagaaagaagaggttaaacacacacaaaacagaagaagagaactctcccaccatgccatgcccaaaaccgtactacacaataaagcacaccaaccattcatttccttttgcccacatttactatcccacattatgtttccacagacaatcgcagtgccacagaaccaactaggcactccttcatgtccttagctagtttagttacctcacttctaactttcccccacaattattccctcccttcaacacantgcaccccttt

SEQ ID NO: 3124 - DNA, 347 bp, Glycine max
ggccgaaaaccctaacaacacaggcgcagagcgtgattcattgacgaagatggtgcagcgtcccacctaacgcaagaagcaaaactatgccaccaaatccaaccaacaaagggtcgtcaaaaccccctggtgggaagctcgtttatcagaccaccaagaagagggccagcgggcccaagtgccccgtcactggcaagaggattcaggggattccacacttgaggcctgcagagtacaagagatcaaggttacccagaaaccgtaggactgtcaaccgtgcatatggcggagttttgtctggaagtgctgtcagggagaggattatccgagctttcttagttgaagag

SEQ ID NO: 3125 - DNA, 423 bp, Glycine max
  modified_base (338)..(338): a, c, g, t, unknown, or other
  modified_base (344)..(344): a, c, g, t, unknown, or other
gaaacctatcttagtgaggaagaagagatgatgatgatggaagagtcagaaatggaaatagagtcacaggtgttcgttgctcacgagattgacttggattacgagttcgacgcagttcgattcttcgatttcggtgcacaagaaactcccgctcaagctcgccaagccgaactctggtttcattccgcccggcagctatcctccttctccttttgtggcgaagttagtggcgagagaggacgacgttagggaatgcgcaaccaccgttcacgctgccaattctaatgttccgtccgggattggattttctcgcaccgtttttcaacatgacggttcanaaaganggggtgggagtgggaacatttctgccttgctgagtggtgttccgcgggatgttaatatgcaactgttacacgtaacctc

SEQ ID NO: 3126 - DNA, 377 bp, Glycine max
  modified_base (190)..(190): a, c, g, t, unknown, or other
  modified_base (209)..(209): a, c, g, t, unknown, or other
gacacttactagtagtaagcatggagtcctcaaagatctatgcttacctcttcctctgcatgatctttctctcttccgccactcccattctcggttgtggctactgtggcaaaccccccaaaaagcacaagcctggtaaaacaccaaaggacacccaaaacacccgttgttaagccaccagtcaccatcnctcccattaatgttcctcncgttgttcttccaccaatagtgaagcccccaggtattctccctccaattccaattattaacccagcaaccacaccagggaatggagggaacactccatgcccaccaccaaagtctcctgcgcaggctacgtgccccattgacacgctcaaacttggtgcctgtgtgga

SEQ ID NO: 3127 - DNA, 390 bp, Glycine max
ggtgtattaggtttttttgcttcttctcatttgctaatagagagggacatgaagaagtaagatagggcatggggtgttggtggcacatataaaacggccaaaagcaatgcttaatttctcttatgctcttcagagtcggcttcattctgtgattcctccctccttttctcttcgcttggttcaagttgttacagtgttaaatttgaggggagtcatatttcttggttctgaaggccaccgttatggctgtacatacagaattccctcttattacttactcacaagagattgtagatggacagcctatttttgtctcttcaaactgtcttcctatcaaggctttgaaatttgaacctgcaggtcattctttccattctgctgcacttaaac

SEQ ID NO: 3128 - DNA, 81 bp, Glycine max; identical to SEQ ID NO: 1774

SEQ ID NO: 3129 - DNA, 334 bp, Glycine max
gatgtgatagtattatcattcattcgcatcggtctcacttctctctccacctataccctaactcacgacactgtacccctctcgaatccgtcatgacacgaggaaagtccaagaccgaatctaagacagcagattgcaaacttgctgtgaataataagggagccgcgaacaatgctaagaaactcgccggcaacgggaatgcagcgaaagatgctaacaagcgaaagaggcctccaagtgcattcttcgttttcatggaggaattcacgaatgtattcaacaaagaacatcctgaaaacaaatcagtgtctgctgttggcaaaactgctggagc

SEQ ID NO: 3130 - DNA, 87 bp, Glycine max
gatcaaattaatttttgatatctttcaaggctttgccttgatttgagtggttgtgtgttatggattttaatatagattatggttctg

SEQ ID NO: 3131 - DNA, 343 bp, Glycine max
ggtgtgagttgagtctgtgatgataatgatgatgatgatgtgttccatgtggatgtgggttgtccttgtggccattgctggtgcccttttagtcctaagatctatcctcaagaatgtaaattggtggctctatgaatccaaattgggtgtgaagcagtactctttgccaccaggtgacatgggatggcccttcattggcaacatgtggtcctttcccagtgctttcaagttcaaaggacccggatcccttaacctctcccttggccccaagattggaagaactggaatgttcaagaccaagatgtttgggaatccaagtataaatgggacaacacctggaata

SEQ ID NO: 3132 - DNA, 394 bp, Glycine max
ggaagagtgaagagaatggctcccaagggtttaacctttctggctgtgttaatatgcgtttcagcactgtcactgagtccttctgttgcgggggaagggcaaaataatggccttgttatgaacttctacaaggaatcatgccctcaggctgaagacatcatcacagaacaagtcaagcttctctacaagcgccacaagaacactgctttctcctggctcaggaacatcttccatgactgtgctgttcagagttgtggtgcttcactgttgctggactccacaagaaggagcttgtctgagaaggaaacagatagaagctttgggttgagaaatttcaggtacattgagaccatcaaagaagctttggaaagagaatgccctggagttgtttcaa

SEQ ID NO: 3133 - DNA, 291 bp, Glycine max
gcttgcaggcgaaagagaagatggccaccgttccaagggcaactcctgttggaaattgtgaagaaaaacaactcctttttggtcaagcaattccgaaaggggaaccaaaacgtctaattctaaaaagagagcacaaatctctataaactcaattcgctcaagtataccgggttttgaaacacaaaaactgttacagtgacaacccaaggggaaaattaagggctgttttttgggacaacaaagaccaagaaaccaaacaaacccgctggaatgcctcacaaatctctgtat

SEQ ID NO: 3134 - DNA, 398 bp, Glycine max
  modified_base (377)..(377): a, c, g, t, unknown, or other
gatatcgtcgacgaatcgaactgttcagaaaccaaactagtcgaagaggaagaggaagacttacagaagcttctagtccctgacttgcagaatcttcctctcactcctgcttccgccgttgaaaccaactttgccatttacttcgccctagatttcatgaagccagctcacgatcagtacgtttaccgccacgccaatggcttgtgtgtgattgggttggctccttcccacattgctttcaatgatgaaggtggaatcacagccgttgatttcaatgttggaaagtctgatcgcagcgggataaaagtcactggaaagcggaagaagaacgcacaacactttgagtccaatacggctctgtgtaaaatttctaccanaaatgatacttatattgtgag

SEQ ID NO: 3135 - DNA, 313 bp, Glycine max
ggtggttcttgtttgcgagatagaagcgtaagcagcggttagcctaacctcgtcttcctctctacgaatttcagctatggccgacgaagctgtggctgttccagatcctacccagatcgatgtcaagctctttaaccgctggagcttcgaggatattgaggttactgacatttcactggctgattacattggagttgcggcatccaagcacgccacatatgttcctcacaccgccggaaggtactccgtgaagcggttcatgaaggcgcagtagcccattgttgagaggctcaccacctctcccatgatgcac

SEQ ID NO: 3136 - DNA, 324 bp, Glycine max
ggaacctttgcattctattcattcaagattcagcaagtgcgttttggaagcagagaccgaaatacttcgagatggcccgtacaaagcaaactgctcgtaagtcaactggaggaaaagctcccaggaagcagcttgcaaccaaggctgcacgtaagtctgcaccaacaactggtggtgtgaagaagcctcatcgttatcgccctggaactgttgctcttcgtgagattaggaaataccagaagagcactgagctcctaatcatgaagcttcctttccagaggttggttcgtgaaattgcccaggatttcaagactgatctgcgtt

SEQ ID NO: 3137 - DNA, 381 bp, Glycine max
ggttttaggttttcttagatagagttgttaccatttgctcccagtacagagcttaaccgagcttcacaaagatgaatcgggaaaagttgatgaagatggccggttcggttagaactgggggaaagggtaccatgagaagaaagaagaaggctgtccacaagacaacaaccacagatgacaaaaggcttcagagcaccctgaagagaataggggtgaatgccatcccggctattgaggaggtcaatatctttaaggatgacgtagttatccagtttctaaatcccaaagttcaagcatccattgctgctaatacttgggttgtcagtggttctccacaaacaaagaagttgcaagatatactccctagcattatccaccaat

SEQ ID NO: 3138 - DNA, 339 bp, Glycine max
ggtgttaagtgtgaatccctttccctctctactcttcactttccatttccatttttttctggttttctttctccatggcctccgccgccgccgtcgccgccgaagacgacgctgtcaacggctccactcggtcggagatgtactcggaaaacctcgccggcactgtcgacgcctacgaccgacacgtgttcctctgctacaagagctacgtgtcctggccggcacgcatcgaggcatccgacgccgatcccttccccaagcgcgtcgccgccaccttcaaagcccgcaagaacgacttgcccctcaagacgaaaatcacggtgtgcgaggcgcgcgaag

SEQ ID NO: 3139 - DNA, 353 bp, Glycine max
ggaattctctcgagtcgaggttgcgtttggactttggagaagaagaaaatggcggagtcgaattacgagtacccaaggctacggcggccggaaatagtcacaatcctagcgcagttgcagatcgcgaacgtgaccgagcaggacttcaccaaccctaaccctgatttcatctccgatctctacactcgcgtcctcattcatctcgacattctcctcgaggaagacaacgagcaactcgagttccacgccctagagcatcttgaaaaccctgatttccacctggattccgttcgcgccgtgaaactctacaaccagatcaacgaggttctcacgacactcgagtgtccgcgcaa

SEQ ID NO: 3140 - DNA, 141 bp, Glycine max
tcatgcatgctccaatgcttttcattttctctctctctttttcactcttcttctagcttcttgtttcatgcaagttatatgcaactggttctgttatatgcatactatctatatcccagctgcactttattttatattttc

SEQ ID NO: 3141 - DNA, 343 bp, Glycine max
  modified_base (247)..(247): a, c, g, t, unknown, or other
gcggggttttggtgttgagggaaaaaagtggcatgtgggctgcagcaacaaaaccattcgtccaattccaattccgcagacacactactacttctctccttccgattcttctgatggcaaaccaagcttcactctccttctcttcggggtctccagttcacgcgcctctgaagcgcgtgggcacgcacaacggaagcttccactgcgacgaagcccttggctgcttcatgattcgcctcacgaacanattcaacagccccgaaatcgttcgctcccgagaccctcaggtgttggaggatcttgatgctgttcttgatgttgggggagtgtatgaccctgctcg

SEQ ID NO: 3142 - DNA, 382 bp, Glycine max
gacaatcgaacgggaaaaggcgtcttcataaacgccgcccaaaacttctcatacccttttattcattccattcgtttctagggttttcttttctttgccgagaaaatgagagagtgcatttcgatccacattggccaggccggtatccaggttggaaacgcctgctgggaactctattgccttgaacacggcattcagcccgatggacagatgccgagtgacaagaccgttggcggaggagacgacgccttcaacacatttttcagcgagaccggcgccggaaagcacgtgccccgcgccgtcttcgtggatcttgaacccaccgtgatcgacgaagtccgaaccggtgcgtaccggcagctcttccacccggagcagctga

SEQ ID NO: 3143 - DNA, 248 bp, Glycine max
  modified_base (173)..(173): a, c, g, t, unknown, or other
gcttcttcagccatttagctccatagctgcagcattagggtttttcatctgcttcaatggggaagggaacagggagttttggtaagagaaggaacaagactcacactctctgtgtgaggtgtggccgccgcagcttccatctccagaagagtcgttgcgccgcttgtgctttncccgccgcacgcactaagaaatataactggagcgtcaaggcaatccgcagaaaagaccaccggaactggcaagat

SEQ ID NO: 3144 - DNA, 314 bp, Glycine max
gtgttggcagaggattgatgggctatcttggaaataagggatccatctcaattagtatgtctgtgcacgaaactagcttttgctttatctgtagccatttaacctcaggacagaaagaaggtgatgaactaagaagaaattctgatgtgatggagattcttaagaagacaaggtttcctcgtgttcaaggtgtggacaatgagaagtctccacagacaatccttgagcatgatcgaatcatatggcttggagatttgaattaccggattgcactctcctaccgatctgctaaagcactcgttgagatgcaaact

SEQ ID NO: 3145 - DNA, 370 bp, Glycine max
gattgtagaactgaacaagggtttctctttctctttctctgtctgcttcttcactttctctcgtttcaatcgaaaaaaatcatgggcagaaaattcttcgtcggtggcaactggaaatgcaatgggaccactgaggaggtgaagaagattgttactactttaaatgaagctaaagtccctggagaagatgttgtagaagttgttgtgagccctccttttgtgttccttccttttgtaaaaagtttgctgcgccctgattttcatgtctcggcccaaaattgttgggttcgcaaaggtggtgcttatactggagaagttagtgctgaaatgcttgttaatttgggaattccttgggttattattggtcact

SEQ ID NO: 3146 - DNA, 342 bp, Glycine max
  modified_base (297)..(297): a, c, g, t, unknown, or other
gatgtgcaatatgcattgtcgtgctttcagcaagctctagctgtcaagggagtacaaaatgaaatgggcaactagtggaagaatttgaatatggcacgttgctgccatattagtcattaaaaaggaattccgtgttccatttgcctttgctcatttgattttcttaaatgtaccctaaagaacatgcaaagatttacatctttgatgttgttccctgttatgaattatgttgactatcaacgtcgttcccctgctaatttagctcattgtttactgtcccattattaagcatgttangcatgtataagatattgtgcaacgttagcaatatatttttaatat

SEQ ID NO: 3147 - DNA, 381 bp, Glycine max
  modified_base (283)..(284): a, c, g, t, unknown, or other
  modified_base (308)..(308): a, c, g, t, unknown, or other
  modified_base (314)..(314): a, c, g, t, unknown, or other
  modified_base (316)..(317): a, c, g, t, unknown, or other
gtcaacctggaggatgtcttgcactgtaaatcaccacaaatttccttcaaaataattgagtgactggttcagtgttgtactatccttgtgatagcgcccttttatttttccttctatttttgtcaaatattttctttttcctttttttcctttttctctcttcattcagaaaacaatgtctcgctgctgattatcagtcttctcgtgttgactggaaaatgtcgtacccttgattcccataaagagctattgaaactattatattagctgaaaaaaaaaaaannaaaaaaaaaaaaaaaaaaaaatanaaaaanannattaaaaaaataaaaaagggaaaatgtataatcacaaaaaaaaaaaaaagcggccgcccaaaag

SEQ ID NO: 3148 - DNA, 345 bp, Glycine max
gatgcagatgcagcctatcatggcagcctactaccccaacaacgtcaccactgatcacattcaacagtacctggatgagaacaagtccttgatcctgaagattgttgaaagccagaattctggcaagctgagcgagtgtgcagagaaccaatcaaggctgcagagaaatctcatgtacctagctgcaatagctgattctcaaccccaaccatctccaatgcctggtcagtatccttctagtggacttatgcagcagggagcacactacatgcaggctcagcaggctcagcagatgtcacaacaacagctaatggcttcgcgctcctcactcttgtactcccaaca

SEQ ID NO: 3149 - DNA, 376 bp, Glycine max
atcaaaatatctttgaataaaataatcaaaaaaatcaattagacgtttttctttggaagtttccttggatcaattgacttataaccaaagtgaaactaaggctaaaatcaactcacaaatcaagctttgtccgcaaaaaatcactaaaaaccattttaaggtccaacgccttaaacgatcctctttgcttttatcggttaacatggaccgttcaaaagcataaaatcaacatgtaactttaacgcttttgcgagaactacgtaggtctgatttcctcttcgatggaggatacgtaagagcaaaagccccacttttgtcgacctcgtgagatggttagaggtccaacgccttagcttttctcaccaagtaaaatgga

SEQ ID NO: 3150 - DNA, 367 bp, Glycine max
gacagcgcagagccgcctcaacatctgaaacagactctatccctaatccctatcttcttctctgctctctccgcacgctttggctcctctgatctcagtttctggttttgaattgtaggtgttgttggcttggtatccgtgcaagttctgctgtagccgatttgaaggtgaaggtgtcaccttaaagtttctttcatgtttgatcaggctactatccatttgggagcaactgagctgcttggagagtatttttcttcttctagaaaaaattacagaccctcatcccagagagttagctgtatgcattgcgagacatatcagaaattcattcagttttctggttgcggttggccaccttccattatac

SEQ ID NO: 3151 - DNA, 394 bp, Glycine max
gagcgccaatgtttttttcagaggagtttcatcttgtaatcaaaagagtttatcttatagtaagaaatcgatgtcttactccattttaaggaacaaaacaagagaacaatagcctgacaaagggtttagccataaaatcgaatccatcattgatttgagatattgataaggtgaatactcatttctcgtcaatgctaggcataatgcgggtatagggacctaaaaaagattatcttttcttcctatcttatgaactttaaggtgtatgaagtgtcatttcctatcttagattttaattttagtaggtagataaagagtccatttaacttaagttgatctaggccagaagcagacctacgtcaagataatccttctttgaaacactttggtagtg

SEQ ID NO: 3152 - DNA, 390 bp, Glycine max
ggctaaggcattgtctggcaacaaggatgtggccttcttctctgctaatgctgcagctcaggcttcaaggaagtcctctccaagagtgacgaacgaggctgttcagaaggctgctgctgcattgaagggttcagatcatcgccgtgcaacaaatgtcagtgccagactggatgctcaacaaaagaagctcaaccttccaatccttccaaccaccactattggatccttccctcagactgtagaactgaggagggtacgccgtgagttcaaggctaacaagatctccgaggaagagtatgttaagtcaattaaggaggaaattcgcaaagttgttgaacttcaagaagagcttgatattgatgttcttgttcatggataaccagagagaaa

SEQ ID NO: 3153 - DNA, 383 bp, Glycine max
gaagggagaattaggtttttagggtttacaccgagcagcgacacctccctcccgcagtagccatggttctcaaaactgaactatgccgattcagtggtgccaagatctaccccggaaagggcatcagatttgttcgtggtgattctcaggttttcctgtttgccaactcaaaatgtaagcggtatttccacaaccgcctgaagccctcaaagctcacctggactgctatgtacagaaagcaacacaaaaaggacattgctcaagaagctgtgaagaagaggagacgcgctgccaaaaagccttactctaggtccattgttggtgccactctggaagttatccagaaaaagagagctgagaagccagaagttcgagatgcagct

SEQ ID NO: 3154 - DNA, 239 bp, Glycine max
ggtctgcgcctgatttctcagttctctcacacactcattcggtgctccgaatctcagattctagggttagggttcccaatttctccaccgatcagaaaatgagttcaactggtggttctaccaagggcggaaggggcaagcccaaagcctccaaatccgtttcaagatcgcagaaagctggtctccaattccccgttggaagaatccctcgaatccttaaaggtgggaaatacgccgaa

SEQ ID NO: 3155 - DNA, 392 bp, Glycine max
gatacctaaaaattgtaccgatatggcttcacttgtgtgtctccttttttccttgcatttcatggttatcatgtcaggttccttaccagcaaatagtgaagtgtttacaaaagagtctcctatgtctctatccacaaaacccgtggaaagactcacccaactccacttttatttccataacaacaaaatgggggaacacccgactgctatgaaaattgttgagcctcctaaggcgtccatttctggttttgggactatttacatgatggatgaccctctaaccgaaggaccaagtccaacttcaaagcttgttggaagatgtcagggaatatatgctgaggcttcgcaacatgaacctgcgatactcatggtaacgaatttgttcttcactg

SEQ ID NO: 3156 - DNA, 378 bp, Glycine max
gatggaggcatagacggagacgcagtcatgaacaggacagagttcagattcttattcagagcaaaatttggggcagcaaggaactaaatcctctatcagcattagtttacctctgcgttctgtctctggtgcaatccagtatagattgttgggtcagttatggcagcgttgatttccaaaagaatcctacgttgttcttcttggtcattgcattcactaggacgatgttactttgattcacctagtgctgggtttgcctctatttataaaccacgtgatgtatgcaacagtttatctggggagagaatgtttcctgcagatcgttctttggtcaggtctatggtccgacagttttctacttctattttaactcctgga

SEQ ID NO: 3157 - DNA, 367 bp, Glycine max
ggtggcacgtgccacgtacacgtgaaaaagaccctgggcctttcggccctccccaatccttcccggcaacggcggaaacttttcctaatcagtcccacagtgaagttgatcggagcccacatacattcaggcacggacccaacggtttgaacagaaataagaataatatgtgttggttgactttgaggggatccagtggatacagatttcaaaacaattgaggcaagcataatgttcaggcttggacaactccaatctgagggtggcatcctacaaagaatggtatacaagaattaagaacagcaccgacgcggttcctatttccagcgtcttttgaaggtaaggagggatttaaggctgctgcaat

SEQ ID NO: 3158 - DNA, 373 bp, Glycine max
tattcaaagttttggaatgctaatccctctgcagaaaagcaggtcaagttgtctagcaaagctggcatgcttttgctgtacactcctgcttttcttgctggccttgcatccttctggatctttcctcatcaaggcctcagatccaccctccttcagtctgcagttaccctgcatttcttcaagagggtctttgaggttgtgtttattcacaaatatagtggtgccatgcttcttgattctgcaatccccatcactctgagttatttcctatcaactgcaactatgatctatgctcaacacttaacacaagggcttccagaaccaccaatcgatctgttgtatcctggcattgttttgtttgtggtgggcatca

SEQ ID NO: 3159 - DNA, 386 bp, Glycine max
gacagctgactcaaaaatgagaatcttgagttacctttacattcttctcctttttcatcaacaccaccaccattattcaagcgagcttaaatagggaaagaggagcaagaccttttcagtacctctaaatccagtttttgcaattccatttgtgagttattggaatttggaagtagctagggagtgtctcaaattaatggcatccatgtctcttattcttctttggttcctaatgtttgctggcgaaatgatgtcaatgggaaatagtttacacaaggggcacatgataatggaagaggaggaatgttgggattgtttgaagtgatgggtgctcttctggaagacccttacagggcccaaacacatccacagccatgtactgatac

SEQ ID NO: 3160 - DNA, 395 bp, Glycine max
ggttgtgaatcaacataaatattccgttttgcgtttctctgcctaaaaggattgaaagatgggtcaagcactaggttgctatcaagttgatcagtcaaatgtggctatcaaggagcattttggaaaatttgatgatgtcctagaacctggatgtcattgcctgccttggtgtcttgggtaccagattgctggtagtttgtcactgcgtgtgcagcaacttgatgttcgatgtgagacgaaaaccaaggacaatgtctttgtcactgtggttgcatctgtgcaataccgagctgtgtctgagaaagcatctgatgcattctataggcttaccaacacaagggagcagatccaatcatatgtttttgatgtcatcagggccagtgtaccatagttgg

SEQ ID NO: 3161 - DNA, 292 bp, Glycine max
gaccagaaaactgtggacgctgcagtgttaaaagccattgagagtgtgccagacttgaagtcctatttgggtgccaggttttctctgaaggccggggtgaaaccacatgagctagtcttctagaggaaagaggggtgttactcttgtttttgatatcgtgtttgtttattgatgctggttcttatagttgccctcttataacattcttgttagcagacaaatgaagaacctaaaattttgttagtcaaattgtgacgcgtgctctttacattttgttgattgtgtgaatttc

SEQ ID NO: 3162 - DNA, 382 bp, Glycine max
ggagcgaaagaaaaacgaacaagaaaaaatcggatgagctatacatttcttagcagaaacttcaccggacctgagaattgagaaagtgtagtttgagtttcacatcaaaagattgtgtgtaagaagcgttttcttcagatcgatggaatatcttgggattgatctaagctgcgccgttggatctctccgccacggccagttaccggagaaggactgcttgctccctctcatttccaaactcctcggctacgccatcgtcgcggcttccaccaccgtcaaactcccccagattatgaaaattctgaagcatcagagtgtgagaggacttagcatgatatccttcgagcttgaagttattggatataccattgccttggcttac

SEQ ID NO: 3163 - DNA, 175 bp, Glycine max
gactattgctttccaattagctgtttttgcattaattgctatttcatttattttattgattagtgtacctgttgtatttgcttctcctgaaggttggtcgaataacaaaaatgttgtattttccggtacatcattatggattggattagtgtttctcgtgggtattcttaattct

SEQ ID NO: 3164 - DNA, 393 bp, Glycine max
ggggttattggacacattcttcagcgactgcgtttttggatcggaacctcttctgcggcgtagcaatgggacactccaacgtttggaactctcacccaaaaaactacggtcctggttctcgcacttgccgtgtgtgtgggaatccacatggactgatcaggaagtatggccttatgtgatgcaggcagtgcttccgtagcaatgccaaggaaattggcttcatcaagtatcgctaaaagagcagttgtcaactacggaccaatattgtgttctggcactaagatgttttgaggatgttatgtttgaagaaacttgagactttcttttttcatctaattaattatcagacgtaatttgtggtactaagaatacttttatataaattgttttgaa

SEQ ID NO: 3165 - DNA, 390 bp, Glycine max
  modified_base (354)..(354): a, c, g, t, unknown, or other
gaaacttctctgtccgtcaatgcatctccaatctcgcttcctcccccaaattcagataccaattccgtttcctccgaaccaaacttgtttttgagaaattcggcaattgattttccatggccaacaatccgtcacagcttctcccatcagagttgattgaccggtgtataagttcgaaaatttgggtgataatgaaaggtgacaaggagcttgttggtactcttagaggctttgatgtttatgtcaacatggtccttgaagatgttactgaatatgagatcactgctgaagggagacggataaccaagcttgatcagattttactcaatggaaacaacattgccattttggtcnctggtggttctcctgagtcagaatgaacagtgctac

SEQ ID NO: 3166 - DNA, 392 bp, Glycine max
gatcgaagaacagcactctggttgccgtgccaccatcttctccaaagttatcatattcgaagagaaaaaaggagtgactgtccaggttgggcaattagggacggaaaaggagaaacacgaaaatgtttttccacatagtactggagcgaaatatgcagcttcatccacgctactttggtcgtaaccttcgcgataatctcgtttccaagcttatgaaagacgtggaaggcacttgcagtggccgacatggatttgtggtggcagttacagggatagagaacatagggaaagggctaattcgtgatggaacagggtttgtgacatttccagttaagtaccaatgtgttgtcttcagaccgtttaagggagagatcttggaagcagttgttact

SEQ ID NO: 3167 - DNA, 393 bp, Glycine max
agtccaggcgtcagacggctgcaagaggagtacagaaggggattcacaccttcactccctctattgctttctcaaattccattttccaattcagaagcctatctccgtgcgaagcagcacatcgggatggcaccaaaggcagataggaagccagtatagaagaagcctgtggaggagaataaatcgactgtgggatacaaagctccggcagatatcaagtcagcggccggagagaagcttccgaaagagggaggagccggcggagaatgtatgaagaataagagaaataagaatagcgtggagacatactagatctagatcggaaacgttcagaagcacgttcacactgacattggtatctcaaccaaagcaatgggaatcataagcagattc

SEQ ID NO: 3168 - DNA, 375 bp, Glycine max
gctgagcaaaaccctaatccctatttttcttcctcagtagtgtcatttacgcttctcttctctgcagcaactatgcctaaccctaaggtcttcttcgacatgaccatcggcggtcaatctgctggccgcatcgtgatggagctctacgccgacgtcactccccgcaccgccgagaacttccgcgcgctttgcaccggcgagaagggcgtagggcggagcggcaagcccctccactacaagggctcgtccttccaccgcgtgatcccgagtttcatgtgtcagggtggcgacttcaccgccggaaacggaaccggcggcgagtcgatttatggcgccaagttcgccgacgagaacttcgtgaagaagcacaccggt

SEQ ID NO: 3169 - DNA, 388 bp, Glycine max
ggcagagtttgtggccacattcttgttcctctacatcactgtcttgactgtcatgggtgtcaacagggcacccaacaagtgctcctctgttggcattcaaggaattgcatgggctttcggtggcatgatctttgccctcgtcgactgcactgctggaatatcaggtgggcacataaatccggcagtgacgttcggtttgtttctggctaggaagctgtccctgacaagagcgctgttctacattgtgatgcagtgtcttggagctatctgtggtgctggtgtggtgaaggggtttgaggggaatgccaggtatgagttattcaaaggtggagccaattttgtgagtcatggatacaccaagggtgatggccttggagccgagattgtt

SEQ ID NO: 3170 - DNA, 393 bp, Glycine max
gagggtttcaaagtggacagaagacagcgtcctagtcgcaaccctaataagaagaaccacagcttcaagcgagtgacatccaccacccatgggtcgtatgcacagccgcggtaagggtatatcctcgtctgctttgccctacaaaaggacaccccctagctggctcaagatctcttcgcaagatgtggacgacaatatctgcaagtttgcgatgaaaggtttgaccccgtctcacattggtgtcaatcttcgagattctcacggtattgctcacgtcaacagcgtcactggcagcagaatccttcgcatcctcagagctcacgggcttgcgcctgaaattccagatgatctttaccatttgattaagagagcagtttcagttacgaagcatct

SEQ ID NO: 3171 - DNA, 380 bp, Glycine max
gacttgaaccacattggtgcctaaccgcggtggttaccacctcctccttccccttcctaaaatcccttctttctcaacgccgcacgccgaaacaatggccggaaaaggagagggtcctggctatcggaatcgatctcggaaccacctactcttgcgtcggtgtgtggcaacatgaccgcgttgaaatcatcgccaacgaccaagggaacagaaccacgccgtcttacgtcggattcactgacaccgagcgtctcatcggtgatgcggccaagaatcaagtcgccatgaaccccatcaacaccgtcttcgatgccaagaggttgattggtcgtagattcagtgattcctctgttcagagtgatatcaaattgtggcctttc

SEQ ID NO: 3172 - DNA, 349 bp, Glycine max
gataggaaaaccaaccaaagttccaaattttttggtttggggatagatagagtgatacgcgtcacattttcataataataaaaaaatggcagcggcggcggcagtgacggtgctactcccacctaggattccgaccaccaccaacgttacccgctgctctgctttgccttctctccctcctcgcgtctccaacaccaaaaccactttgttctcaccttccctcaacaacttttcagtgtcccgaaaatcttctctgcttcagaccagagcttcttcagaggaatcatcctcagtagatgccaatgaggtgttcacagatttgaaggaaaagtgggatgctcttgaaaac

SEQ ID NO: 3173 - DNA, 345 bp, Glycine max
cgggactcaccacttcaaaacactcataacacaaagcacaaagcaaagctcatccttgagttaaaaaatggcagcagcttcttccatggctctctcatccccatccttggctggcaaagccgtgaagctgggcccatcagccccagaagtgggaagggtgagcatgaggaagaccgtcaccaagcaggtctcctcaggaagcccatggtacggcccagaccgagtcaagtacttgggcccattctctggcgagcccccgtcctacctaaccggtgagttcccaggcgactacggctgggacactgctgggctttccgcagacccagaaaccttcgccaagaaccg

SEQ ID NO: 3174 - DNA, 388 bp, Glycine max
  modified_base (361)..(361): a, c, g, t, unknown, or other
ggtagaacggtagaagccactttggctacagagttggtgttgtgtcttgcgaaagaggaaaaacgtagaaagaagcaagcaaggaagcgtgctagctgggtttgtttctgttgtgaattgcgatccttaaacctttctctctcactcactcaatcaaattcaaatggacattgatttcaaagaataccagttgcgctgcgagcttcgcggccacgaagacgacgttcgcggaatatgcgtgtgcggcagcaagggtatagcgacttcgtcaagggaccggaccgttaggttgtggtctttggacgacaaccgcaggttcgcgagttccaagattcttttgggccacaagcttcgtgggtcncttggcatggattcctccgaattcgga

SEQ ID NO: 3175 - DNA, 376 bp, Glycine max
gacacttactagtagtaagcatggagtcctcaaagatctatgcttacctcttcctctgcatgatctttctctcttccgccactcccattctcggttgtggctactgtggcaaaccccccaaaaagcacaagcctggtaaaacaccaaagacacccaaaacacccgttgttaagccaccagtcaccatccctcccattaatgttcctcccgttgttcttccaccaatagtgaagcccccaggtattctccctccaattccaattattaacccaccaaccacaccagggaagggagggaacactccatgcctaccaccaaagtctcctgcgcaagctacatgccccattgacacgctcatacttggtgcctgtgtgga

SEQ ID NO: 3176 - DNA, 56 bp, Glycine max; identical to SEQ ID NO: 2797

SEQ ID NO: 3177 - DNA, 397 bp, Glycine max
gaacacaatacattcatccttgtgtttccgttcccgccattgcaaagggaaaaaaatggcttctgcgccatcgagaaccctaacggactttttccaacccgcttcgaagcgcttggagcccactctccccgcatcatgcaaatccgacgacgccaatgcttccacgctctccgtcgatcagaagttgcgcatggaatacaacaagctcctcgccaagtccaagaggaatctcaaactctgcgtcgagagggtctccaaaagcaaagttcaaaacgcagaatcaggtttaggtggcgtgaagctggaagagctgctggtggaagaaacgtggttggaagctctacctggtgaactccaaaaaccctatgccctcactctctccaaattcgttgaaagt

SEQ ID NO: 3178 - DNA, 389 bp, Glycine max
gggaactcataatattcatcactagaagtgttggatgcatttctatttctaactaattattgtgcttattattattgttgagaaagaaaagaatggcaaagttaataaaattctttgagttgaacacaggggccaagattccttctgttgggttaggcacttggcaagctgagcctggtgttgtagccaaagctgtcaccacagccattctggttggatacaggcatattgattgtgttcaagcgtataacaatcaagcagagattggttctgctcttaagaagctttttgatgatggtgtggtgaagcgtgaggacttatggatcacctccaaactctggtgttcagatcatgcttcagaagatgtgcccaaagcattggataaacat

SEQ ID NO: 3179 - DNA, 384 bp, Glycine max
  modified_base (367)..(367): a, c, g, t, unknown, or other
gaactcagttagactttgttccaagagaaagaccaatcaaagcatcatgactaaagttgtgtgtgcacttcttcttatttttgtcatggcttttgtgactcaagttgcttatggtggcggcgaaggatcacttacgccccaagaatgtccgggggcttgcgattatcgttgttcaaaggctgatcggactaagaaggcgtgcctgaacttctgtaacatgtgctgtgcgaaatgtctgtgcgttccatcaggaacctatggtcacaaggaagaatgtccatgttataacaattggaaaacaaagagaggaacacccaagtgcccctaattcaacttcattattgatattcatcaataaaatgtgtantcctgtggcgtgctatg

SEQ ID NO: 3180 - DNA, 354 bp, Glycine max
gatagcaaaatcgtttccccaatttaatcaccaatggacaacccaattcccttcgtcgttttccattaagagagcaatggcacgtaccaagcaaaccgctcgcaagtccaccggaggaaaggctccgaggaagcaattggcaaccaaagccgctcgcaagtcagccccggcgaccggcggagtgaagaagccccaccgcttcaggccaggaacggtggctctgggggagattcgaaagtaccagaagagcaccgaacttctgatccgaaaactcccattccagaggctcgtcagagaaatcgctcaggatttcaaaaccgattcccgctttcagagcagcgccgtttcggctct

SEQ ID NO: 3181 - DNA, 383 bp, Glycine max
  modified_base (320)..(320): a, c, g, t, unknown, or other
  modified_base (351)..(351): a, c, g, t, unknown, or other
tacggcagcgagaagaagaagaagcgcacgaagaagagcgtggagacctacaagatctacatcttcaaggtcctcaagcaggttcaccccgacattggtatttccagcaaggccatgggcatcatgaacagcttcatcaacgacatcttcgagaagctcgcccaggaagcgtcgcgtttggctcgctacaacaagaagcccaccatcacctcgagggagatccagaccgccgtgcgtctcgtgctccctggtgaattggccaaacacgccgtttctgaagggaccaaggcggttaccaagtttaccagctcttgaattanggtttgttaggcggttgtgttgcagatctanggttttctgtggatttcttttcttaaaaatta

SEQ ID NO: 3182 - DNA, 148 bp, Glycine max
actaatgaaattataaattatccataaattggatagaaagatctttcatccttcattcgccatttttttttatataaatttcttgtcgaaggcttttgaaggatagtgataaaatgaagatggttcaggcaaaaggctcacgatttgg

SEQ ID NO: 3183 - DNA, 385 bp, Glycine max
gaactgttgaatcgtcttgattaccattttgtagcatgttctgtacaactagaatgtgtttgattataagacattattatttattttatctgctgcaagtatctaattaagcaatagtatcattacagtggatgtggaatttgcaggtatataaactgctaattagtcaagttaacttgtctcaaatatcttaaagtgctaatttccttgtgtctgtcctttttatagtttgactattattagtttgttgaattggagaaattgatacaagggcaccaaatttggtgattacagtatttgtttgatgtgttggcatttttaattttttttaaaaaaaacattctaaaacgattctgactgaaaaccgacttagaaacatcacatt

SEQ ID NO: 3184 - DNA, 391 bp, Glycine max
gaaccaaaaacaatggccacttgttcactcatttccacactcttcccttctccttcttcttcttctttttcactctctcgttcttcctcaaacaccaccaaaccaaccaccattcacctctccaaatccctccatctccaaactcccatcctcttcctccttcgccccccaaacccaaaaccgacacttccaataatacccctcttccccaaactcaccattcccaactcccttctccttctctgcacctccctcgctctctccttcactctcctcctctcccccgccgaatccgccgccgcctttgttgtcacctccccaaggaagctccagtccgatgaactcgccaccgtccgcctcttccaagagaacactccctccgttgtctaca

SEQ ID NO: 3185 - DNA, 391 bp, Glycine max; identical to SEQ ID NO: 348

SEQ ID NO: 3186 - DNA, 326 bp, Glycine max
ggtgtcacagtcggaaaaagaaatacatgttcttctcaaaatataattaaataattatcacatctccgtcttctatatattatcagtcgctgagtcccgttaaaaagcaccaccaccaccaccaccacaacactattcttcttcgcagcaatggcgcgagtggatctggacgggaaccccatgaaggcacttacgatctgcatgatcggcgctggcggcttcataggctcgcatctctgcgagaagctcatgttccgaaaccctcacaccgtcctcgccctcgacgtctacaacgacaagatcaaacacctcctcgaaacctccga

SEQ ID NO: 3187 - DNA, 383 bp, Glycine max
gaactcgaagccactccacagagagaaccaagcccaaaaaagctgagaactttggcacaaaaccaacaagcccaccttcaaatcaccccatattccccattcccatgcagagattccatctgggtctccctcattcaccaccaatggacaccagcacacccttccaagaccttccagaagcatctccaaagcccttcttcaagaaaaccacactcacttccttcatcatgtcttcaacaccttccttcaaggaagacacctactacatctcccacctcaaatcctccgagaaaaaagccctccaagacctcaagaacaaactccaatcttcttattcttccaccccttccatgtggggcgttcctttaatcaacaacaacaac

SEQ ID NO: 3188 - DNA, 321 bp, Glycine max
tcataaaaaaaacaaaaaaaaaaaaaacaaaaaaaaaaaaaaaaaaaaaaaaaaaaaaaaaaaaaaaactgataaacaaaaagatataaggcttccctaaaggtatatacaattgttttaactcttctaaaatgtcacaaaatcttcaattcggtgcccgtcttttaacaccgtggtcatcgttttaaacctggggtcctccaaaataccttcccttttaccacttttacctttttgcagcaggtcctcttattggcgagccccctttttttcgcccgggcctgcatttttaccccttcattgggaaaacccccccttttt

SEQ ID NO: 3189 - DNA, 324 bp, Glycine max
gactcacaaaaaccacttacaaagtagtactacttggtttcaatcaaaacaaaaactcacactttggtggccacagcaacaataacaatggcagcctcactacaagctgcagctaccttcatgcaacccaccaaggtgggcatggccactcgcaacctcaaatctacacaatgcatttctaaggcttttggcttggaacccgctgcagctaaactcatttgctcccttaagcccgatctcaaagattttgctcaaaaatgtgtcggcgccaccaaaattgcaggattcgcccttgccacctcagctctcgttgtttctggagcg

SEQ ID NO: 3190 - DNA, 370 bp, Glycine max
ggcacttcaattgcaatcaaattagttcattctctttgcgcagttccctacctctcctttcaagatgcagatcttcgtcaagaccctcaccggaaagaccatcacccttgaggtggaaagctctgacaccatcgacaacgtcaaggccaagatccaggacaaggaaggaattcccccggatcagcaacgtctcatcttcgccggaaagcagctcgaggacggccgtaccctcgccgactacaacatccagaaggagtcaacccttcaccttgtccttcgtctccgtggtgacatgcagatcttcgtcaagactctcactggcaaaaccataaccctagaggtcgaaagctctgacaccattgacaacgtc

SEQ ID NO: 3191 - DNA, 351 bp, Glycine max
tgattaaggtttgtcaatagcacttcctcctttcacactgccgctgcaacaatggcttcagagaataaactttcgaacccaatgagggaaataaaagtgcaaaagctcgttctcaatatctctgttggcgaaagtggagatcgtctcaccagagccgccaaggtgttggaacaacttagtggccaaaccccagtgttttccaaagcaaggtacactgttcgttcctttgggattagaagaaatgagaagattgcatgctatgtcactgtcagaggtgacaaggcaatgcaacttttggagagtggtttgaaggttaaggaatatgaacttctcagaaggaatttcagtgat

SEQ ID NO: 3192 - DNA, 386 bp, Glycine max
ggcgtacgcagcttcatccctaacgcgtgcatagcagagtcagagacagagacgcagccatggggcggagacctgcgatgtgttataggcaaattatgaacaagccataccccaagtcacgtttctgccgtggtgttcctgatcccaagatcaggatttatgatgttggtatgaagaagaatggtgttgatgagtttcctttctgtgtccatctggttagttgggagaaggaaaatgtttcaagtgaggccctggaagctgctcgcattgcttgcaacaagtacatggccaaatttgctggaaaggatgctttccacttgagagtcagggtgcacccattccatgttcttaggatcaacaagatgctttcgtgtgctggtgctgat

SEQ ID NO: 3193 - DNA, 396 bp, Glycine max
gatatcagaagctcagacctagggatttcggccgtttgctccccaaaaaggaaagaagcagattctgtcctttgaaatcaacaagaaaagatgtcaggtgaagaggtagctgttgcagttgaggtacctgctacttcaattccaggtgagccaatggacatcatgactgctctacagcttgtgctgagaaaatctctggcctatggtggtcttgcacgaggtcttcatgaaggtgccaaggtgatcgagaagcatgctgcacagctctgtgttctagcagaagattgtgaccaacctgattatgtgaaactggtgaaggctctttgtgcagagcacaatgttagtcttttgacagttccaagtgcaaagacccttggagaatgggctggtttgtgt

SEQ ID NO: 3194 - DNA, 295 bp, Glycine max
  modified_base (277)..(277): a, c, g, t, unknown, or other
gcacacaaactttattacagttgttgtattgtaattaagcaagaatattaggcaatggagtcttctagaacttcaactactcttgctctttttttaaccatcaatttgcttttctttgtcatggcaagtggctgctacacttgcacacagcctaagccaaaccctatcccattcccttaccctaaccctagtcctgccgcgaagagctgccccagggacgcacttaagctcggagtgtgcgcaaacgtgcttaatggaccaattggtgctattgtanggtcaccaccggaccaac

SEQ ID NO: 3195 - DNA, 379 bp, Glycine max
gggccacgaggtagtgattgtggtatagtgaatgcaaacatacctacaaatggagctgagattggtggtgcctttggtggagaaaaggcgaccggtggtggccgtgaggcgggaagtgactcgtggaagcaatacatgcggcgttctacatgtaccatcaattatggaagtgaactaccattagctcagggaataaactttggctagaaagctatccttgcaaatgaaactgcacaaataatgcgattttgcagcccgaaagagagatgttagtctggctgacatgggttcaaagtgttgtattaacaagatctgcctgctgtaaggatggtaccttcacatgacagtttcaatggtaaagatatcctaaatcctaaat

SEQ ID NO: 3196 - DNA, 63 bp, Glycine max
gagttctagtctaaggttacgccgtcgtcgctgtttgtgtgtgtatcaggtgcagctaccaac

SEQ ID NO: 3197 - DNA, 339 bp, Glycine max
gagggtttacaccgaggagacacaccttcagcagcagcagccatggttctcaaaaccgaactatgccgattcagcggtgccaagatctacccagggaaaggcatcagatttgttcgtggtgattctcaggttttcctgtttgctaactcgaaatgtaagaggtatttccacaacaggttgaagccatcaaagctcacctggactgcaatgtacagaaagcaacacaagaaggacattgctcaagaagctgtgaagaaaagaagacgtgctgccaaaaagccttactccaggtccattgtcggtgccactttggaagttatccagaaaaagagagctgag

SEQ ID NO: 3198 - DNA, 63 bp, Glycine max
gaccgtcctcctctttctctccgtgtggccgttcagtgacaccgagtgtaaagaagaggagag

SEQ ID NO: 3199 - DNA, 249 bp, Glycine max
cccaggcgtcagcacacacgtcagcgcagacatcagtacgggtgcaaaatgacaacaaaaagggacttcataactcacactgcttcattgcatatctgcaaatactgtcacccctgctacctacaaattcgccgaaatatggaatcacttcatgcaaatgtaacatcacttgtatacagcagtggcaatcgtgtatctcactcgacatttgcatgctcttccttcgtgtcagcgttcgatgttgtctgg

SEQ ID NO: 3200 - DNA, 332 bp, Glycine max
gaacgttgaacgggatccctcttcgtagtgaattacattgcattgggttctagcagcgtatttcactcaccatgcaggctagtgataggtttaacatcaattctcagctcgagcatctccaagccaaatatgttggaactggccatgctgatttgaacagatttgagtgggcagtgaacattcaacgtgatagctatgcatcatatattgggcactaccctttactgggattctttgctattgctgaaaatgaatctattggaagagaacgctacagctttatgcagaaaatgctcctgccttgtggtttgcctcccgaaagagaagaagat

SEQ ID NO: 3201 - DNA, 408 bp, Glycine max
  modified_base (190)..(190): a, c, g, t, unknown, or other
gatcgcatttcatagcactcaccctcattaccaacacgaaagcatagccaaaaccttttttcgaagtccctgattttcctaatggctccggcaaaggcagagaagaagccggcggagaagaagccagcggcggagaaagcaccggcggagaagaagccgaaggcggagaagaagatctcgaaggaagganggagcgagaagaagaagaagcgcacgaagaagagcgtggagacctacaagatctacatcttcaaggtcctcaagcaggttcaccccgacattggtatttccagcaaggccatgggcatcatgaacagcttcatcaacgacatcttcgagaagctcgcccaggaagcgtcgcgtttggctcgctacaacaagaagcccaacatcacctcgagggagatc

SEQ ID NO: 3202 - DNA, 373 bp, Glycine max
ggggcgaggtagccagagagtgatacaatacagagtgcgttgttgctccttcgccacaactccctgccaacatgggtatctccagagattctatgcacaagaggcgtgccactggtggcaagaagaaggcatggaggaagaagagaaagtatgagcttggtcgccagcctgctaacactaagctgtcaagcaacaagacagtcaggaggatccgggttagaggtggaaatgtggagtggagggcactgagattggatactggaaattactcctggggaagtgaagctgtaactcgcaagactcgtatactagatgtggtttacaatgcctcaaacaacgagcttgtgcgtactcagactcctgtaaaaagtgc

SEQ ID NO: 3203 - DNA, 365 bp, Glycine max
  modified_base (281)..(281): a, c, g, t, unknown, or other
ggagacattgtgctttcaccttggctccgcactttggtttgctcaaccgatctccgcagcaatggtgaacgttccgaagacaaagaagacctactgcaagagcaaggagtgcaagaagcacacgctccacaaagtcacccaatacaagaaaggcaaggacagcatcgccgctcaaggaaaacgccgttattgacgcaaacagtccggttaccggtggcaagactaaagccgttttccacaaaaaggcgaaaaccaccaagaaaattgtgttgaggctccantgccaaggatgcaagcatgtctcgcagcacgctatcaagaggtgcaagcactttgagatcggtggtgacaagaacggaaaagga

SEQ ID NO: 3204 - DNA, 348 bp, Glycine max
gggtgtagcgcagagaaagaactagaactagggtttcatctttgccatcagtaaacgacaatgatttacgacgttaactctcctcgtttccgatccttcctcagccagaatggaagctcctctgataagaggaaatcggaccaacaaaaaccaaaagaagcagaaacccaaagccagggaaaacaaacctataatgactgagtgataacagctgaactgcaatcagttgtagaatgaaaatacgtggtaagtattgtatttggtgctaaactaagatccttttggctgtgttctgaagtatatgccggcgatgttggtctttgttattgtaatggtttgaatttggat

SEQ ID NO: 3205 - DNA, 382 bp, Glycine max
gaccaaaccaaagtaagtgttctaagagtgagcaacttcaaaacaccatagtgagaaatgacttccaagggtgcaattctcttgtgtctcaatgttctcttcttcactgtggttagttccacatatgttccatgcaacccaccccccaaaactcccaaacacccacctgtcccaaagccaccttccccaaagcaagtttcttgccccaaggacactgttaagtttggtgtgtgtgctgatgtgttaggtttgattaacgtgcaactagggaagccaccaaaaaccccatgctgcagcctcattcagggtcttgctgatcttgaagctgcagtgtgcctttgcactgctctcaaggctaatgtgttgggcatcaacctcaatg

SEQ ID NO: 3206 - DNA, 94 bp, Glycine max
gggggcaaatgcaaatcaaattaaacaagaggaaacagcagttgaagaggagaaaagcaaacaaagcaaagcaaaaaccctggcttcagttcag

SEQ ID NO: 3207 - DNA, 329 bp, Glycine max
gacggagcctcgaccaagaagaatcgcagtgagaagaagagggggtcagagtgagaaagagaaagagggaattcgtaaaccctaatttcggaaagatcggcgatgactgcctccaaggatcgcgagaacttcgtctacatcgccaaactcgccgagcaggccgagcgttacgaagagatggtggaatcaatgaagaacgttgcgaatctcgacgttgaactgacggtggaggagcggaatttgctttctgttgggtacaagaatgtgattggtgctcgcagagcgtcctggaggatcctgtcttccattgagcagaaggaagaaacaaa

SEQ ID NO: 3208 - DNA, 54 bp, Glycine max
tacataccatctgaataaaggaaaatcatgaacaggacaagagaacgaaggtac

SEQ ID NO: 3209 - DNA, 355 bp, Glycine max
gaggacacaagacgataacaaatggcatcatctcagtcgaggaaaagagttgacgccgtcgattctcgcgctgcttccgttctcgttcgcgccaaagatggcagtgcttttgctcgttgcgacgattgcaagaagaatgtgccggttgcactcatcgacatgcacagttgcagccttgaagctaaaattaaaatgaacctagacgctcaagttgtggaacaggctgctgaagctaagaagccggagaggaagaagcccaaatctaaagagcctatggcaaaaaaagctaaagttgggaaggggaagaaagtcaaggatcctaacatgcctaagcgtcctcccacagctttctttg

SEQ ID NO: 3210 - DNA, 342 bp, Glycine max
acggcactcgttttcgttctcgttctggtttatagatctttgcgaaggaggtttacagcgctcaaccaaagatgcagaacgaggaaggacagatcactgagctttacattcctaggaagtgctccgccacaaacagattgattaccgctaaggaccatgcttcggttcagatcaacattgggcatgtggatgagaatggcgtctacaatggccatttctccacttttgccctctgcggattcatccgtgctcagggtgatgctgacagtgctctagaccgcttgtggcagaagaagaaagttgaagttaagcaacagttagacacccatgatagttggttac

SEQ ID NO: 3211 - DNA, 378 bp, Glycine max
ggctacttccaatttgaagaaagagctttgcactctgaaattcaaacaacccctcctgggtttgtggaatatgccattgccatgacatgaagaccttaattgccctaacctttcctcgtgtgctcaaacaatgggttgttttcctcaatgctttggttcctccaaagagcacaaaacctaggcgcaatgcacaccatcaccatcgactcgctagagacaggttagagcaatgctctattcaggattactccgaaacggtggtaattggcactgcatcacaagaagtccaggctaaacctttggagcagataaacgtgagccccaaaaagaaagtaacttttgatgtcaatgtgaaaacgtacgagcctgatgaagttg

SEQ ID NO: 3212 - DNA, 398 bp, Glycine max
ggggctgcgagcgaatccctctctctctttctctttctctctcatccagatcttgcaaaaaaaaaaaaacacaatggcagcgagcgctcccactccacgcgaagagttcgtgtacatggcgaagctggcggagcaggccgagcgctacgaggagatggtggagttcatggagaaggtctccgcctccgccgagagcgaggagctgaccgtggaggagcgcaacctcctctccgtcgcctacaagaacgtaatcggggctcgccgcgcctcctggcgcatcatctcctccattgagcagaaggaggagagccgcggcaacgaggaccacgtcgccgtcatccgtgactaccgctccaagatcgaggccgagctctccaacatctgcgacggaatcctca

SEQ ID NO: 3213 - DNA, 349 bp, Glycine max
  modified_base (170)..(170): a, c, g, t, unknown, or other
gacactacaactaaacacactagctatagctagaatcccctccaatccctctttgtctttgtgcttttctttagttctttccaaaacagcaacaatgatgagttgccaagcatggcctgaacccatagttcgagtccaatccttagctgacagtggcctaagctcaatcncttcacgctatattaggccacactcccaaagaccctccaacaccatgatcatgttaacatccccgttattgacctggaacatcttttctcggaggatgaaatcctccgagaaaagatattccgacacgtggacgaggcgtgtcgggagtgggggttcttccaggtggtgaaccatgggg

SEQ ID NO: 3214 - DNA, 368 bp, Glycine max
ggttctagtgtgtgattgtttgttgttgtaactcgttcttcttcttttgttgttctgtgtttgtgtttgttttttctctcacctgaaaatgtcttgctgcggtggtaactgtggttgcggaagctcctgcaagtgcggcaacggctgcggaggctgcaagatgtacccagacttgagctacactgagtcaaccaccaccgagaccttggtcatgggagtggcacctgttaaggctcaatttgagggtgctgaaatgggttgtccccgctgagaacgatggctgcaaatgtggaccaaactgctcctgcaacccctgcacttgcaagtgaggtgttgggagagcaagcttcaagcagagatagccctta

SEQ ID NO: 3215 - DNA, 348 bp, Glycine max
  modified_base (331)..(331): a, c, g, t, unknown, or other
  modified_base (336)..(336): a, c, g, t, unknown, or other
tacaggcaatagtacctagaattactactggaaaaatatataaaagatcgttgggccatgctggttctccataataattatgacccattcccttagccaatttagctcttaatacaggatcattcaagtcaggtttttttgttattgggataggtgaattcttatagatccatcctccgaaagaaccggatatgataatttttcatcatccggctcgagcactaatcaaagatttcgaatgtatctatagaaaaaatgtatgtgttattcacacatatatgaggattctatgtaagaaaataaactagattctctttttccgaagttacanactantccttaatggag

SEQ ID NO: 3216 - DNA, 331 bp, Glycine max
gaacaaaacaaacacaactttgcgccccttgtaaacttctcaatgggaagtctaaaaacgaaaacattgaagcctttgtggagagctggggtcagaccaaattgccctggaagggtgcacaaatgccccctaacctcaagggtccagaatatgaaggtgttgaagagaccttgaatcccacaaagtgagcctgtcctcctaaagtccaaccctgtgcacaagaaaatcccaattttcctccatggagataaagtcatttgtgaatctgcaatcataagtgagtacattgatgaggcttggactaatgttccctccaaccttccacaaaatg

SEQ ID NO: 3217 - DNA, 373 bp, Glycine max
gatgccttccaatttctcgtcacttctccgcaaatcctcgccgccgccgtcccaccaacacccgcaaattacagaccttagcgtgccaaacaaaccccaaccttgatcaaaaggatacccctaccacggatgaagaaaaacttgtggtcgagcccagcacgagtacaacaacaagttctcttcctcaattgccgaccaaaaacatcaacaacaaaatcgcacttgtttctaccttagcggccttggggcttttcttatctgccaggttggatttcggtgtttccctcaaggatctctctgccaatgcaatgccttacgaagaggctctctccaatgggaagcccactgtggtggagttttatgcagattggtg

SEQ ID NO: 3218 - DNA, 391 bp, Glycine max
  modified_base (374)..(374): a, c, g, t, unknown, or other
gatgagttctccaacttcattatctatgacactatctctgcaactccatttagcagccatggctccccagaggctagtttcttggaaagttttgtgaactatcaggagcagcatgaccaccctacatttgataattgcgcaatgaggacccgaaagcgtgaagccagcgaaccagaaagcattggccggaggcagaattcggtggcagtgcaagggaggaagaagaggagaaggaagccaagggtttgcaaaaacacggaagaggctgagacacaaaggatcacacacattacagtggaaagaaaccgccggaagcagatgaatgagcatcttgctgtccttcgttcactcatgccggagtcctacgtccaaanggggtgaccaggctcta

SEQ ID NO: 3219 - DNA, 309 bp, Glycine max
gtcaagtcataagtgtgtgtataatataactgataactggtgctgtgtgaatgacatatttcaatgttgaacaattccttcttgagttcttctgaaaaaaaaaaaaaaaaaaaaaaaaaaaaaaataaaaaaaaaaaaaaaaataaaaaaaaaaagcataaaaattcaatagaaaaaaacataagcacaataaaaaaaaaaggggggcgcccaaaagtttaaaatttaaattgggtgagaaggaaatttaaaaccttttaaaaggggccacaaaattcaaataaaggggacttcttaaaaaacctttta

SEQ ID NO: 3220 - DNA, 364 bp, Glycine max
aagaaatcttcaaagtttctaccggtcattggttggtcaatgtggttttctgaatatcttttcctggagagaagttgggccaaggatgaacgcacattaaagtcgggcctacagcaactgagggatttccctcttcccttttggttggctctctttgtagaaggaactcgctttacccaggccaaactattagctgctcaggagtatgcagcctcagctggattgcctgttccaagaaatgttttgattccaagaactaagggttttgtttcagcagtaaaccatatgcgctcgtttgttcctgccatttatgatgtaactgtggcaattcccaagagttcacctgctcctacaatgctaagac

SEQ ID NO: 3221 - DNA, 369 bp, Glycine max
gacacaaactttattacagttgttgtattgtaattaagcaagaatattaggcaatggagtcttctagaacttcaactactcttgctctttttttaaccatcaatttgcttttctttgtcatggcaagtggctgctacacttgcacacagcctaagccaaaccctatcccattcccttaccctaaccctagtcctgccgcgaagagctgccccagggacgcacttaagctcggagtgtgcgcaaacgtgcttaatggaccaattggtgctattgtagggtcaccaccggaacaaccatgttgctcagtgctagaagggcttcttgatcttgaagttgcggtttgcctctgcactgccatcaaagccaaca

SEQ ID NO: 3222 - DNA, 79 bp, Glycine max; identical to SEQ ID NO: 3058

SEQ ID NO: 3223 - DNA, 312 bp, Glycine max
aaagagacccggaaagggtgggaaccgcttttggaaatccattgggcttggatttaagactcccagggaagccatcgaaggaacctacattgacaagaagtgccccttcactggcaatgtttccatccgtggccgtatcttggctggaacatgacacagtgctaagatgaacaggactattattgttaggaggaattatctccattttatcaagaagtaccagaggtacgagaaaaggcactccaacattcctgctcatatatcacctgctttccgtgtgaaggaaggagatcacgttattattggtcaatg

SEQ ID NO: 3224 - DNA, 323 bp, Glycine max
ggtgtagtataggattctcttctttattccttttgtaatttcattcattcttaatctttgtgaaaaataatgttcatcgagaattttaaggttgagtgtcctaatgtgaagtacaccgagactgagattcagtccgtgtacaactacgaaaccaccgaacttgttcacgagaacaggaatggcacctatcagtggattgtcaaacccaaatctgtcaaatacgaatttaaaaccaacatccatgttcctaaattaggggtaatgcttgtgggttggggtggaaacaacggctcaaccctcaccggtggtgttattgctaaccg

SEQ ID NO: 3225 - DNA, 251 bp, Glycine max
tcttcacataattttgcatatgggagcttggaaattaaatgatacagtttgttcaatactgcttgcctaaattagagtacacacgggctggtttactagttattactgattcaaaaaagataaatgaatgtttttttattaacaaataatacaaagaaaaacattagggaattccattgttgaagcttcaaataaaaacgctattgattgccgaaagttggtggttgtcaatataggcacacacacacaat

SEQ ID NO: 3226 - DNA, 391 bp, Glycine max
gacagcacaacactctttgcaacacaacaaaaaaagacaacacagagagaagcgtcttaataaacgctcttctctgaaaaacctgatttcttctcttcttctcttctctttcgtttcgatcttcgatctctgaaaatgagagagtgcatttcaatccacatcggtcaggccggtattcaggtcggaaacgcctgctgggagctctactgcctcgaacacggcattcagcctgatgggcagatgccaagtgataagactgttggtggaggtgatgatgctttcaacaccttcttcagtgaaactggggctggaaagcacgtgcctcgtgcgatttttgtagatctcgagcctactgtgattgatgaagttaggactgggacataccgccgac

SEQ ID NO: 3227 - DNA, 164 bp, Glycine max
ggaaacaagctgctgaagatatgcgcagaatatgataacatgtcaccaataatagatttgaatatctgtaatctgacaaatttccctaaatactatgaatcaatttctctgaggttgtgtccgcggattttatgtcaatggttgctgatctatatttgtgtggc

SEQ ID NO: 3228 - DNA, 371 bp, Glycine max
gacttctcttcacacctttgttcactcttcttctcttgcggctagggttttagcgcagcttcttctagatttaaggaagatgggtaaggaaaaggttcacatcagtattgtggtcattggccatgtcgactctgggaaatccactaccactggtcacctgatttacaagcttggaggcattgacaagcgtgttattgagacgtttgagaaggaagctgctgagatgaacaagaggtctttcaagtatgcctgggtgctggacaaacttaaggctgagcgtgaaagaggaatcaccattgatattgctttgtggaagtttgaaacaacaaagtattattgcacagttattgatgcgcctggacatagggatt

SEQ ID NO: 3229 - DNA, 365 bp, Glycine max
ggcactgcaactttgctctctgtgaggcttcaatttctaattagggtttcgcttagagtaaccaataaccatgggagtcttcacctttgtcgtccgcaaatccggcagcgaatggagcgccaagcaacattccggcgacatcgaggcctccgccgattccaccttcgatctccaacggaagctcgtgcaagccgctctcgccgttgattcctccggtggagttcagtcctctttctctcccgtgtctcctacctccgctgtgttccaggtgatagtgggtggtgcagtattcgttggaggtggtggtggtgctgttgcagctgcacctgcaggtggtgctgccgcagctgatgctgcccagctgc

SEQ ID NO: 3230 - DNA, 357 bp, Glycine max
gggtttctgtgttttctaacaagcaatggctatgagatcgtgggtgagtcgaggaggatccatgactcgtttgatggactcaacaaatcgaggggctttgagtcggttcttgagcgacaagggtcgcattctcagcgaggaggaacaggccaaagagaatgtctacatccagaaatgggagagggagaggttggagaaacagaagcaactgtctgagaaggccaaggctctcacggacaaagatgcttctgctgctgctcataagaaacctgaaggtgctcaaaaggactgagtttatctttcacacaacccgtcaaggccactttgtgggaaataaacatggagaaataaacacat

SEQ ID NO: 3231 - DNA, 336 bp, Glycine max
gaacatgccgaaaagtagtaccaagatggcttcagttgtgtatctcctctttggcttccatctcattgttatcatgtcaagttccttacccgcaactagtgaagtgtttgcaaaacagtatccatccacagaacccgtggaagaaaaactcacccaactccacttctatttccataacaacataacgggggaacacccaactgctatgaaaactgttttgcctcctaaggggtccattcatggttttggggctacttacatgatggatgaccctctaactgaaggaccaagtccaacttcaaagcttgtgggaagatctcagggaatatacgcttt

SEQ ID NO: 3232 - DNA, 79 bp, Glycine max
gccggtttcccgaacgatttgatggtttggaatgcatttcccaagcaacgagtcttcggttcgaaaccagcagagagtg

SEQ ID NO: 3233 - DNA, 349 bp, Glycine max
gattgtagaactgaacaagggtttctctttctctttctctgtctgcttcttcactttctctcgtttcaatcgaaaaaaatcatgggcagaaaattcttcgtcggtggcaactggaaatgcaatgggaccactgaggaggtgaagaagattgttactactttaaatgaagctaaagtccctggagaagatgttgtagaagttgttgtgagccctccttttgtgttccttccttttgtaaaaagtttgctgcgccctgatttccatgtctcggcccaaaattgttgggttcgcaaaggtggtgcttatactggagaggttagtgctgaaatgcttgttaatttgggaattc

SEQ ID NO: 3234 - DNA, 363 bp, Glycine max
gttcggtgttgggaggaggatttgcccagcgtggacaatggggattttgcatataaatatgctgctggctaagatggtgcatgctttccactggctgcccaatcccaactctccacccgacccgactgagaccttcgctttcactgttgtcatgaacaaccctctcaagccacttattgtgccacgatccatttaacttatacttatagtgctccttctctgcaaactaaggaatatatcggcttctaaaataacatatgagcacaaggctttttttggaagattgctgattgcagtttgttgccatcgaattccaaccttcgtttatcgcataagatattgcacaattttattgtaatggag

SEQ ID NO: 3235 - DNA, 368 bp, Glycine max
  modified_base (318)..(318): a, c, g, t, unknown, or other
gatgccgaaaagtagtaccaagatggcttcagttgtgtatctcctctttggcttccatctcattgttatcatgtcaagttccttacccgcaactagtgaagtgtttgcaaaacagtatccatccacagaacccgtggaagaaaaactcacccaactccacttctatttccataacaacataacgggggaacacccaactgctatgaaaactgttttgcctcctaaggggtccattcatggttttggggctacttacatgatggatgaccctctaactgaaggaccaagtccaacttcaaagcttgtgggaagatccanggaatatacgctttggcttcacaacatgagcctgggttgctcatggtgac

SEQ ID NO: 3236 - DNA, 386 bp, Glycine max
gaccgccgttctcatctctcttcccagccctcacctcaacgctgcatcttcacgtcgtctcacgaggtgcatatagtagagagggaaaatgagtcgaggaggcgcagtagcagcagcgaagggaaagaagaagggtgctacattcaccattgactgtgcaaagccagtggaagataagatcatggacattgcttctctcgaaaagtttcttcaagagaggatcaaggttggtggcaaagctggtgctcttggtgacagtatcaccgttacccgcgagaagaccaagatcattgtcacctctgacagtaacttttccaaacggtatttgaagtacttgacgaagaagtacttgaagaaacacaatgtgcgagactggctcagagtga

SEQ ID NO: 3237 - DNA, 297 bp, Glycine max
ccatttattgggaatattcttccgctttgatagccttccttcgtctgcctatgccttgagtttcaacacttgagtggagaatatgaaactgttgagttggaaattgatgctctgttgttggatcatgtgacacaggcttagtgattcactcttgctcttccgataaaattgttattttctccacataaggcacgagatcatcaactgtccatgtattcctcccttgtggagacaccatgtactgtaatgtctccgtaacttcagcctgcaattattagggtgagcaaattaatggcc

SEQ ID NO: 3238 - DNA, 396 bp, Glycine max
gggttctagtgtgtgattgtttgttgttgtaactcgttcttcttcttttgttgttctgtgtttgtgtttgttttttctctcacctgaaaatgtcttgctgcggtggtaactgtggttgcggaagctcctgcaagtgcggcaacggctgcggaggctgcaagatgtacccagacttgagctacactgagtcaaccaccaccgagaccttggtcatgggagtggcacctgttaaggctcaatttgagggtgctgaaatgggtgtgcccgctgagaacgatggctgcaaatgtggaccaaactgctcctgcaacccctgcacttgcaagtgaggtgttgggagagcaagcttcaagcagagatagcccttaattaagaataatgataaactattaatgt

SEQ ID NO: 3239 - DNA, 55 bp, Glycine max; identical to SEQ ID NO: 2051

SEQ ID NO: 3240 - DNA, 399 bp, Glycine max
gaggaagccacatagagacacaatacagagtgagttgttgctccttcgccacaactctctgccaacatgggtatctccagagattctatgcacaagaggcgtgccactggtggcaagaagaaggcctggaggaaaaagagaaagtatgagcttggtcgccagcctgctaacactaagctgtcaagcaacaagacagtcaggaggatccgtgttagaggtggaaatgtgaaatggagggcattgagattggatactggaaattactcctggggaagtgaagctgtaactcgcaagactcgtgtactagatgtggtttacaatgcctcaaacaatgagcttgtgcgtactcagactcttgtcaaaagtgctatcggtcaaggtgatgctgctccattcaaa

SEQ ID NO: 3241 - DNA, 351 bp, Glycine max
gagagccggcttcgtcctctgcgcaggaattaggaatattcgacaggtagagtttcttcaatggctcctaaagttgataagaagaatgatccaaaggcccaggccttgaagactgctaaggcagttaagtcaggtgctacctttaagaagaaggtaaagaagatccgaacttctgtcactttccacaggccgaagaccttgaagaaggacaggaaccccaagtaccctcgcattagcgccccgccgaggaacaagcttgatcattatcagatcctgaaataccccctcaccactgagtctgccatgaagaagattgagggacacaacactttggttttcattgtcgacctg

SEQ ID NO: 3242 - DNA, 363 bp, Glycine max
gagtctcagtctctacacacacctcagaagaacagaacagaaccaccacataacagtgcttttcaaaggcggtttgagcaatggcgttcttaaataaaattgggaatctgctcaagaattctgctgtcaagcacatcaatcaggatttttcggcgtctaccccttcacttttccaagcaattagatccatgtcatctgcaaagcttttcgtcggaggtatttcttacagcactgatgatatgagtttgcgagagtcttttgctcgctatggagaagtaattgatgtcaaggttattatggatcgtgaaactggcaagtcaagaggttttggctttgtaacttttgcaacaagtgacgatgcat

SEQ ID NO: 3243 - DNA, 371 bp, Glycine max
  modified_base (349)..(349): a, c, g, t, unknown, or other
gaacacttgtattgtctcaagcaaccatggcaatggcaacccaagcctctctcttaaccccacccctctccggtctcaaagccagcgaccgcgcctccgtgccatggaagcaaaactccagcctctccttctccagcccgaagcccctcaagttctccagaacaatcagagcagcagccgccgacgagaccacagaggcaccagcaaaagtagaggctgcaccggtcgggttcaccccaccagaacttgacccaaacaccccttccccgatcttcgggggcagcaccggcgggctcctgcgcaaggcacaagtggacgagttttatgtcattacgtgggactcacccanagaacagatctttgaaatgcca

SEQ ID NO: 3244 - DNA, 345 bp, Glycine max
acgggtgagacaggagcaaaaaaagggatccacgtgcgtttagattacggttcgacactaaactgtcactggttatactgcctccacttcactgcctttctaaacttttttttcgaacccaattagggatactgtctgaatggctcctgccccatcaacactgtcggccatagtggggattttctcaacacagactgatggtgatgcgcagacttactgaacatgctccattgctctcaacattacggtagactgacctgtcattagggatcataaggtttgtgactcatgcagtgcatctcacaggggtgagtttcaaagccttccaagatgtgtagaatggtt

SEQ ID NO: 3245 - DNA, 318 bp, Glycine max
ggagcgccaatgtttttttcagaggagtttcatcttgtaatcaaaagagtttatcttatagtaagaaatcgatgtcttactccattttaaggaacaaaacaagagaacaatagcctgacaaagggtttagccataaaatcgaatccatcattgatttgagatattgataaggtgaatactcatttctcgtcaatgctaggcataatgcgggtatagggacctaaaaaagattatcttttcttcctatcttatgaactttaaggtgtatgaagtgtcatttcctatcttagattttaattttagtaggtagataaagag

SEQ ID NO: 3246 - DNA, 282 bp, Glycine max
gagtaacgtttgtctcaataaaccccagtgtaggccgcctggatctattgcctaccatcaacatgtggcgcctagcgagcaagtcagcacttaaccgagtctgatcgaattgacatcggcttagcgcaaccatggacatgatgtctgtctatatctgactgtcagtcaatggttcaacaataaacgtttcagactccccgcttatcccattactaattgtgcgcttaccgctatgcctgagcttacctaagtcacagtttttcatcatggttttctgatttg

SEQ ID NO: 3247 - DNA, 375 bp, Glycine max
  modified_base (328)..(328): a, c, g, t, unknown, or other
ggcgtacgcagcttcatccctaacgcgtgcatagcagagtcagagacagagacgcagccatggggcggagacctgcgaggtgttataggcaaattaagaacaagccataccccaagtcacgtttctgccgtggtgttcctgatcccaagatcaggatttatgatgttggtatgaagaagaagggtgttgatgagtttcctttctgtgtccatctggttagttgggagaaggaaaatgtttcaagtgaggccctggaagctgctcgcattgcttgcaacaagtacatggccaaatttgctggaaaggatgctttccacttgagagtcanggtgcacccattccatgttcttaggatcaacaagatgctttcgtgtg

SEQ ID NO: 3248 - DNA, 276 bp, Glycine max
gatagcaaaatcgtttctccaatttaatcaccattgtacaacccaattcccttcgtcgttttcgattaagagagcaatggcacgtaccaagcaaaccgctcgcaagtccaccggaggaaaggctccgaggaagcaattggcaaccaaagccgctcgcaagtcagccccggcgaccggcggagtgaagaagccccaccgcttcaggccaggaacggtggctctgagggagattcgaaagtaccagaagagcaccgaacttctgattcgaaaactccc

SEQ ID NO: 3249 - DNA, 248 bp, Glycine max
ggaagacgaagattgcattaatacaggctacgtgacatgtaggccatgcaggatgtcaccatttctataccacccgtgatggtcgccacttaacacttctgacatggtccgacgtgatataattttgccagccatgtttcctgttattcccgtcaccatgtgcccgaaatagcatcgttatgaaatggtcgttcgacactcattcacttttgatcccaccccctggatctgatgttcgaatccggaat

SEQ ID NO: 3250 - DNA, 327 bp, Glycine max
agggagggtgctctctctgcattccttccagttctgccatatctccctgtttcagcagatggatcagatggcctaaactatgatggtagagatggtaaaagacatggacgtggacattcatattcaagtgggtatggaggctcaagtgatttagcagctggtgacgtctatggaagctatgatggttctcagcttggaagcaacagtgcttatggggcttatggaagttattctttgggacggtctagtactgctgggttgtcgagtcagagtggtgtttctaggaggagagaccatgcttactagacataatggtctatgcagctg

SEQ ID NO: 3251 - DNA, 319 bp, Glycine max
gctaattcccaatttaataaagtagataaatatgcttgaaacggtggtgtgtgggttttagggtttttggcagcaaggatggcgtcgagaccagaggtagttgcgccgcctgagattttctacgacgatgccgaagctcgcaagtacacctcttcttcccgtattgttcaaattcaggcgacgctgtcagagagagctctcgaactacttgctttgcctgatgacagcgttcctaaattactccttgatatcggttgtggatcgggacttagcggtgagacactctccgagaatggacaccattggattgggcttgaca

SEQ ID NO: 3252 - DNA, 340 bp, Glycine max
cacctcatgttatcaccgttggagttggggaggacattgtagcaaagttattgtcatttgcaaggcagagaccaagggctgtgtgcatcttaacaggaactgggacaatttcttcagtcactctgcgccaacccgcttctactagcatcagtgttacatatgagggccgatttcaaatattatgcttgtctggttcttacttggttgctgaagaaggtggacctcacaatagaacgggtggcatgagtgtttccctttctagtcctgatggtcatatcattggtggtggtgttactaggcttgttgctgcaagcccagtgcaagtggtagcatgcagttt

SEQ ID NO: 3253 - DNA, 364 bp, Glycine max
gagagactttggtctcatgaacctgcagtgactagaacctgcttctttgcctcctttcaagaatggtttacactacagttagtttgtagtgtagtgtgtgtgataatagtaacttcacttcaaggacattatccacttgaggtttgtttgtaactgataagcagtaattgaaaacatgaagaacgtttctggcttctttgttttgctcttggtacttggagcaactctgtcgttccttaacttcttaagtcccacttgtgcctcatggttttctgatttgattgctaccaactgtggtgataaagctacactgattgcactaagcatgaaacttaacgaaagtgacactagtactattaaaagc

SEQ ID NO: 3254 - DNA, 363 bp, Glycine max
ggaacttctcacgttcatttctacacatccctagctctgtcgttccgtcgttgacgatggcgtttcgggtgcgaagccctgacctccgctctctctttcttctctctctcttgtccatcgcttccgccaatgtcttcttcgaagagcgtttcgatgacgggtgggaaaatcgatgggttaaatcagattggaaaaaagatgagaacgtggctggggagtggaaccacacctctggtcaatggaatggagacgctaatgacaaaggtattcaaaccagtgaggattacagattctatgctatttcagctgagtaccctgaattcagcaacaagggtaagacactagtctttcaattttctgtta

SEQ ID NO: 3255 - DNA, 393 bp, Glycine max
gacatttctgcgtggcgtctccggtgagggaaaagtagtagaagagaagatgtcgaccgtaccaggacagctcatctgggagatcgtgaagaagaacaactcctttttggtgaaagagttcggaaggggcactcagagcgtgcagttcagcagagagcccaacaatctctacaacctcaacactttcaagtactccggtttggcgaaccagaaaactgtcactgttcaacctgctggtaaagaccagtccgtgttgctcgcaacaaccaagacaaagaagcaaaacaagcctgctgctttgcttcacaaatctgtcatgaaaaaggagttccgtaggatggcaaaggctgtgcaaaatcaggtagcagataactactacaggcctgatctcaa

SEQ ID NO: 3256 - DNA, 355 bp, Glycine max
gactgcaaacagagtcaacaacaacacacacaaacacaacgtcatgaaatcgccgcagcacaaaaacaaaacaccaaaatcccgatcagatcctcaacaacaacaaaaatccaattccctggccgtcaccgttttccgaaatgcacccgattattattcctgcgacccccttattccgttaagcacgtgcctccccgcctcgggcacgtgcgccgccagaatgcgcctactgccgcatgcagatcaggctctcagtctccgccgctccccccgcttcaattctgctccggccgccgtggatggcggcaatgcgggctccagaaagcggaagcggtcgccggaaacggcggcgacg

SEQ ID NO: 3257 - DNA, 323 bp, Glycine max
gaccataaccgaggtcgacgcttcgcgagtgcgcatcctaagacccacgtcttttttgttgtcgtggcctcaacgcaacatcattatcactgtcactataaaaaccctacttggctcttttcttcacttgttcactttcttccaacctctaacctacctctttttcttctctctcaacaacttcaccttcttcctcctcgatcatgtctcacttcaagggcaagtaccatgatgagcttatcgccaatgctgcgtacattggcactcctggaaagggtattcttgctgctgatgagtcaacagggacaattggcaagcgtttg

SEQ ID NO: 3258 - DNA, 360 bp, Glycine max
gattctgttccgcagaaaaccctagcccaaccggatcttcacgactaggagatggcaaagtcgaagaaccacaccgctcacaaccagtcctacaaggcccataagaatggcatcaaaaagccaaagaggcatcgccacacttccaccaaagggatggatccaaagtttctgaggaaccagaggtacgcgaggaagcataacaagaagagcggtgaaacagccaccgaagaagagtaaagtgccactctcaaatgggcctattaggatttgatttgttatttaagccccatatgttttgtgtcgaatctatctttagtagtatagtcatttttatgagttaacttaatccagagagaatgc

SEQ ID NO: 3259 - DNA, 245 bp, Glycine max
atcaaaaaagaaggtccaaaagtcaatgcgaagttcgagctgaagccgccaccatatccactgaatggtttggagccggtgatgagccagcagacacttgagtttcattgggggaaacaccacaagacatatgtggaaaatctgaaaaaacaaattgttgggacagagcttgatgggaaatcactagaagagattatagtgacatcatataataagggtgacattcctccagctttcaacaatgc

SEQ ID NO: 3260 - DNA, 338 bp, Glycine max
ggtacgtcgtatatgtggttgatcttttgctggttgtttgttttgttccttccaattgtcagatctgaatcaccggactcactcttcacactcactcacactgaatggcttctgaaggcgaccatcaccaccaccaccaccaccatcaagatcacgatcatcatcatcatgatcatgatcaccatcatcatcacgatggagagggagagaccaactcatgggtaggtaaggatgggaaggtgtaccatagccacgatggtctggcgccgcattctcacgaacccatttactcccccggctacttcaccagaagagctccaccgcttctcaacagaaac

SEQ ID NO: 3261 - DNA, 55 bp, Glycine max
gttccggttgccaaaaaacaacaaaagggtacggctgcaaaaaaacgacataatg

SEQ ID NO: 3262 - DNA, 337 bp, Glycine max
ggattcgtaaagattttttttttcttttactcacagtcatcccgcaatccccaaatcgcccctcctctcgtcgaaacccgaccccatctccaaattcggctccggcatcgtaccatttctctcactacttcggggattcgctccttcttccgtccatggctctcccagacactctcactagcactcccaccagttctatggatgaaagggaatccttgaagaatgacactccaatttgcagcaatgcttgtaaggatgtgacaaaggagaaaaccttctatcttcaaccagtgtcacctttttcttctggtgtaggtttgccatatggcactgaagg

SEQ ID NO: 3263 - DNA, 344 bp, Glycine max
gactccgcagctgcagcactcaaaaccctagagaggacgagagagcgtgcaactttcggcaaccacagaccatgacattcaagcgcaggaatggaggtcgcaacaaacacggccgcggccatgtcaaattcatccgatgctccaactgcggaaaatgctgccccaaggacaaggccatcaagaggtttttggttaagaacattgttgaacaggctgcagtcagagatgtgcaggaagcttgtgtctatgaacaatatacacttccaaaactctatgtgaagatgcagtactgtgtttcctgtgctatccactctcatgttgtgagggttcgattccgcaccgac

SEQ ID NO: 3264 - DNA, 352 bp, Glycine max
gacacaccatccgttctagtctcaacttctgctcttccaactcctacaacgcttttctctgcactcatgggcaaggtcaagatcggaatcaacggatttggaagaattggccgtttggttgccagagtcgctctgcaaagagacgatgttgaactcgttgccgttaacgaccctttcattaccaccgattacatgacatacatgtttaaatacgacagtgttcacggacactggaagcatcacgatgtcaccgttaaggacgagaagacccttctcttcggtgacaaggcagtcactgtttttggacacagaaaccctgaagagatccatgggggtcaactggagctgacat

SEQ ID NO: 3265 - DNA, 336 bp, Glycine max
gacaacacagaacaataacaaagaaaaaaaaaaacccttagccaacacaaccatcatggccacctctgctattcagcaatcagcattcactggtcaaactgctctgaagcagctcaatgagttcgtccgcaagaccggtggcgccggcaaaggtcgcactaacatgcgccgcaccgtcaagagtgctcctcagagcatttggtatggccctgaccgtcccaagtacttgggtccattctcggagcagattccatcatacctgaccggagaattccctggtgactacggatgggacactgctggattatcagctgacccggaaaccttcgccaggaa

SEQ ID NO: 3266 - DNA, 349 bp, Glycine max
gatctcaatttcttttctctttgtcgcaaagagaagagatctgcctcctttttatcaaatctatctcttcttcaagaatagttgaaaatggggttgtctttcaacaagttgttcagccgactgtttgccaagaaagagatgcgtatactgatggtgggtctcgatgctgcgggtaagaccaccattctgtacaagctcaagcttggagagattgtcaccaccattcccaccattgggtttaatgtggaaactgtggaatataagaacatcagcttcactgtctgggatgttggaggtcaggacaagatccgtcctttgtggagacattacttccaaaatacacaaggac

SEQ ID NO: 3267 - DNA, 371 bp, Glycine max
aggctggtcatggcccaatataaagggatgcttagtttgtaataggcagcagagaaaaataatagagtttccttcttcacgttcttgcttcttgggagggtcctagacctcaaatgctaggaaacattgagctgattttcagttcataacatgtaacaaccttaataacttctttgacatatatgcgttccttcaaataattatacttaaagtaccaaactattaactcaatcaccggtggcttctcttctcttccacaatgccttgctatctcatcatcacttcatgatttggatctacaactgaacaagcttcatggaactttgccaagtacctttgcaaaggactgttggctcataacataatgcatc

SEQ ID NO: 3268 - DNA, 396 bp, Glycine max
  modified_base (377)..(377): a, c, g, t, unknown, or other
gacttccagatttcaaagaaggcgtcttcataaacgcctttcttctccgtttccgtttcctcgttcgaattcgctttttgatctgcgaaaatgagagagtgcatctcgatccacattggtcaggctggtatccaggtcggaaatgcttgctgggagctctactgcctcgagcacggcatcgggcccgatgggcaaatgccaagtgacaagacagttggcggtggtgatgatgctttcaatactttcttcagcgagactggtgctggaaagcacgtgccacgtgcagtgtttgtagatcttgagcccactgttattgatgaggtgagaaccggaacttaccgccagcttttccacccagagcagctcatcagcggcanagaagatgccgccaacaac

SEQ ID NO: 3269 - DNA, 359 bp, Glycine max
gagggttttgcgctgttgttgctgctcatcctccgtaacctccgagctctgcaccgaagaacgaagccatggggaagacacatggaatgggatctgctcgcaagctcaagtcccaccgcaggaggcaaaggtgggctgacaagtcatacaagaaatcacatcttggaaatgaatggaagaaaccttttgctggttcatcccatgccaagggaattgtccttgaaaagataggtattgaggctaagcagcccaactctgccattcgtaagtgtgccagggttcaacttatcaagaatgggaagaagattgccgcttttgtccctaatgacggttgcttgaactacattgaagagaatgac

SEQ ID NO: 3270 - DNA, 362 bp, Glycine max
tggtgcattactggagtgacgccagccagcacaagacagtggccaatggaaatcatgtcacatatagatacttcaattaatcatctggttttatacatcactgcacccttagagatttaaagtttaacacaaaatattattatgaacttggaattgggcataactactaggcaattttggtttgtgactcctcctgaagttcaccctgatgcgccttatacatttggtctcattggtgatctgggtcaaacttttgattcaaacaagacccttgttcactatgaatcaaaccctcacaaaggacaagctgtgttgtatgttggagacctctcttatgcagataatcacccaaatcatgataa

SEQ ID NO: 3271 - DNA, 358 bp, Glycine max
gattcagaggcaacaaaggagttgtaaattaagagcatggctgcacaagctcttgtatcatcatcatctcttaccttctcagccgaggctacaagacaaagtcttggaccaagatcactccaatctccatttggcttctcaagaaaagcctcctttcttgttaaggcagctgctactccccctgtcaagcaaggatcagacagacctttgtggtttgcatcaaagcaaagtctttcctacttggatggcaggtaaatttcatcctagttcatcaatagcttaacgtaacgatatgatcatgtctggatatataaacttctcatgagcacttgaagaataaaaaggtaaaatgaagttt

SEQ ID NO: 3272 - DNA, 349 bp, Glycine max
  modified_base (267)..(267): a, c, g, t, unknown, or other
gaggtcgcgagcgagcatcttcgagttgcatttcgcagtgtgtgtgagaagaagagaaaaatggagaaaatgatgcgactgagaccactgttccgatcactgagttgcagatcttatcatgccttcccattcatcaaccatgtcgttcttcgaccttctcttaactctcgctctcccaatcctcttccttctccttcacactcagaatgcatgtctcctttctcgatgggtttagggagcatgcgattctatagtgaagatttgacncacgtgcccaatattaaggaccctgcactttacaatgctttcaaggatttgatggcagtaagttggagtgagcttcccggat

SEQ ID NO: 3273 - DNA, 378 bp, Glycine max
gaaatctatttcagtttgaattttgaaagtgagtgtggcgtaccgtgtacgtatctgcagaaagtgaatgaatggtaatgggggaagaagggtgcaaggtatgtgttacaggaggcagtggttacattggttcctggctcatcaagaagctactggccaagggctacacagtccatgcaactctcagagacttgaagaatgagtcaaaggttggcctcttaaagagccttccacaatcagaaggaaaactggtgctgtttgaagctgatatttacaacccaaatgattttgaccttgcaattgaaggctgcaagtttgtgtttcatgttgctactcccatgatccatgaacctggctcccagtacaaggatactagtg

SEQ ID NO: 3274 - DNA, 359 bp, Glycine max
ggttttgattagggtttgtcattagcacttcttcttttcacactgccgctgcaacaatggcttcagagaagaaactttcgaacccaatgagggagataagagtgcagaagctcgttctcaatatctctgttggcgagagtggagatcgtctcaccagagccgccaaggtgttggaacaacttagtggccaaaccccagtgttttccaaagcaaggtacactgttcgttcctttgggattagaagagatgagaagattgcatgctatgtcactgtcataggtgacaaggcaatgcaacttttggagagtggtttgaaggttaaggaatatgaacttctcagaaggaatttcactgatact

SEQ ID NO: 3275 - DNA, 359 bp, Glycine max
ggttctagtgtgtgattgtttgttgttgtaactcgttcttcttcttttgttgttctgtgtttgtgtttgttttttctctcacctgaaaatgtcttgctgcggtggtaactgtggttgcggaagctcctgcaagtgcggcaacggctgcggaggctgcaagatgtacccagacttgagctacactgagtcaaccaccaccgagaccttggtcatgggagtggcacctgttaaggctcaatttgagggtgctgaaatgggtgtgcccgctgagaacgatggctgcaaatgtggaccaaactgctcctgcaacccctgcacttgcaagtgaggtgttgggagagcaagcttcaagcagagat

SEQ ID NO: 3276 - DNA, 353 bp, Glycine max
ggttctagtgtatgtgattgttgtgactcgttcttcttcgtcgttatcttcttcttttgttgtttgtgtgtttgttttttctctcacctgaaaatgtcttgctgcggtggtaactgtggttgcggaagcgcctgcaagtgcggcaacggctgcggaggctgcaagatgtacccagacttgagctacaccgagtcaaccaccaccgagaccttggtcatgggagtggcaccagttaaggctcaattcgagagtgctgaaatgggtgttcccgctgagaacgatggctgcaaatgtggagctaactgcacctgcaacccctgcacttgcaagtgaggtgttggagagctaaagct

SEQ ID NO: 3277 - DNA, 312 bp, Glycine max
ggcagtttcaaattttcttttccttcactttcccgagaaaaaaataacacttttcactttcttcactacgttctcacttcgatatggctcgtacgaagcaaaccgctcgcaagtccaccggtggcaaggcgccacgtaagcagttggcgaccaaggccgcccggaagtccgctcccgcgaccgggaggagtgaagaagccccaccgcttcaggccgggaaccgtggcgctgagggaaatcagaaagtaccagaagagcaccgagcttctcatcaggaagcttccatttcagaggctcgtgagagaaatcgcg

SEQ ID NO: 3278 - DNA, 353 bp, Glycine max
attcgagcgggcgcattatattttgggatggttatattcttctttgctcatttagatcttcaatttaaacaacgctctactcaaaattgaaacacaaggtctgcttaatgtcaactgagacaaatgatgggtactaacaatgcacaaaatatggaatctacgctttttaaaaaagttttcttcatgattaaccataaagctgcctaagtactagtactaccctaaataatcccaatcttgtttgccacatccaatgcatcggaatcaggtgtcaacctgacatatgacttcctggtgacatcaggcctggataaagtgttcaattttttgagcctggatgtcacatattttct

SEQ ID NO: 3279 - DNA, 346 bp, Glycine max
gacggacgagggtttcgtttcgggtttgacgttgttcacaatcactttctgcgcttcactcactcccttcgtgcggttttctttctttgtcgaactcgtgcgaaaatgcgtgagattcttcacatacagggagggcaatgcggaaaccagatcggagcgaagttctgggaggtggtgtgcgcggagcacgggatcgattccacggggaggtaccagggggacaacgagttgcaactcgagcgagtcaacgtctattacaatgaagcgagttgcggaaggttcgtgccgagggcggtgctcatggatctagagccggggaccatggacagcgtcagatctggtccct

SEQ ID NO: 3280 - DNA, 280 bp, Glycine max
gacagcgaaacagagagtgatttcagtgagtgatcggtgttcacttgatctcatcataatcgtcagcgtcaattgaagaagatgccgatcagaaacatcgccgtcggaaggcctgaagaggcgactcaccccgacacgttgaaggcggctttggctgagttcatctcaaccttcatcttcgtgttcgccggctcacgctccggcatcgcctacaacaagctcaccgacaacggcgctgccacccctgccgggctcatctccgcctccatcgcccatgcat

SEQ ID NO: 3281 - DNA, 333 bp, Glycine max
ggcgcattgaacgaaaattaaggtttgtagtgtagcaggaagaagcagcaatggcgccgaagataacacgtaaggttagcagaaaccctgaattgataaggggaatcggaaagtactcgaggtcgcagatgtaccacaagaggggcatttgggctatcaaggccaaaaacggtggtgttttacctcgccacgaccctaaacccaagcctgaagctcctgccgaaaaaccacccaaattttaccctgctgatgatatcaagaagccccttgtcaacaagcacaaaccgaaaccagctaagctcagtgcaaccatttggcatctgataatgtaaa

SEQ ID NO: 3282 - DNA, 57 bp, Glycine max; identical to SEQ ID NO: 942
  modified_base (15)..(15): a, c, g, t, unknown, or other

SEQ ID NO: 3283 - DNA, 325 bp, Glycine max; identical to SEQ ID NO: 2923

SEQ ID NO: 3284 - DNA, 63 bp, Glycine max
ggggccttcactctgaaccaaataccatagtcttctctttgtccgtgacaaaacagttcccac

SEQ ID NO: 3285 - DNA, 350 bp, Glycine max
gggacgggaagaaacgcatcgagcgtggagaaagagaaggatgatgaggttaaggtggagtgtactcgtaatggtcacgttcgctgtttctctgttttggcttggacccctgcaagtcaaagcctctaattctgtttccgccttcgttcaaaacgccatctactccaacagaatcgccgttttctccaaatcctattgcccctactgtttgcgcgccaaacgcttgcttgctgaactcaatgaaaaaccttttgtggtggtgctcgatttgcgagatgatgggtttcaaattcagagtgttcttctggatttgataggtagaaggacagtcccgcaagtgtttgtgaatg

SEQ ID NO: 3286 - DNA, 334 bp, Glycine max
gatcaccactttcattttgagcgtgtcgtgtctgtttctgagttatggcacagaagacgtttctgattctcagaaattaacatgaagggcatggttttgaagtaaataaatccagctgtgtcttgattgatgagtttggaagcattgcatttacattttgcagtgttggtgggtagttgttgctctctatagccatttctgaagtacactatagtgtgtatgtgtgtgtgtgatagagtgtcgagtttgaagattaagctacaaaggtttgtcctgttgtcttagttgctcattcttaaagaaacagtggggaacaacagtgatagctcttgac

SEQ ID NO: 3287 - DNA, 330 bp, Glycine max
gattttcgtcgtgagtggtgacgtgccctagccccatatctagtctccctctctcaatctcacatctctcgtcgccaccgccgcgccgcacggaggcacccacggaaccaatctagccatcagttgaaacagtgagcttacaaaaaatggcaactgcacctgcacaaattcctacaagctttggccatgagttgagggcttgtcttcgttgccgccttgtcaaaacctatgatcagttcagagagtcaggctgtgagaactgctcattctttaagatggaagaagatcacgagcgtgttgttgattgcactactcccaattttaatggga

SEQ ID NO: 3288 - DNA, 363 bp, Glycine max
ggttggtagaagaaattgggcgtgtgggagttgttgaatcgggaagcaaaaaaaatgagaatccatcacatagcatgcctccaagacaattattcctatctgatcgtagacgagagcacgaaggaagccgcggcggtggacccggtcgaaccggagaaggttcttgaagttgccagctcgcacggcctcactctcaaattcgtcctcaccacccaccatcactgggatcatgctggtggaaacgacaagataaagcagctggtgccaggaatcaaagtctatggtggttccattgaaaacgtcaagggttgcactgacaaagttgaaaacggtgataaggtctctcttggaagctgaatcact

SEQ ID NO: 3289 - DNA, 314 bp, Glycine max
gacaccatccactactcttcttagttccagcacaacaagctcttcatttctcccacactttcttttctttcaccaaaaatgtcaccagatttcacacttttgttcttcccggaactcatgcagtcccctatgatcactttccaagccaccctctgcgtccttctcttcaccctcatgttcacgctgctcttcactcctggtgggcttccttgggcctgggcccggcccagacccatcatccctggcccagtaactgccctgttagggatctttactggctccacgcctcaacgtgctttatccaaactcgcccg

SEQ ID NO: 3290 - DNA, 353 bp, Glycine max
  modified_base (79)..(79): a, c, g, t, unknown, or other
gaatcctcagaatcagcttcagcctttctctctaactccctcactcacactcacagttaagcaatggcggggaaaagangaaaagggcttcttgcagcgaaaaccaccgcggctaacaaggacaaagacaaggacaagaagagacctatttctcgttcatctcgtgccggaatccagtttcctgtgggacgtatccataggcagctgaaacaaagggtccaagctaatggacgtgttggtgccactgctgccgtatacttagcctcaattcttgagtatcttactgctgaagttcttgaacttgctgggaatgcaagcaaggatctgaaggtgaaaaggataacaccaaggca

SEQ ID NO: 3291 - DNA, 349 bp, Glycine max
ggctcttactctctttcgtcagtttcgggggaagagatccagcagcaatggtgtacgtcaaggctcagaaatcaaaagcctacttcaagagatatcaagtcaagttcaagagaagaagagagggaaaaaccgattaccgtgccaggattcggttgattaatcaggacaagaacaaatataacactccgaaataccgatttgtggttcgctttagcaacaaggacattgttgcacaaataatatctgctagcattgccggcgatttagttcttgctacagcatattcacatgagctgccacgatatggtcttgaagtaggacttacaaattatgcagcagcttattgcac

SEQ ID NO: 3292 - DNA, 336 bp, Glycine max
gacacaccatccgttctagtctcaacttctgctcttccaactcctacaacgcttttctctgcactcatgggcaaggtcaagatcggaatcaacggatttggaagaattggccgtttggttgccagagtcgctctgcaaagagacgatgttgaactcgttgccgttaacgaccctttcattaccaccgattacatgacatacatgtttaaatacgacagtgttcacggacactggaagcatcacgatgtcaccgttaaggacgagaagacccttctcttcggtgacaaggcagtcactgtttttggacacagaaaccctgaagagatcccatggggg

SEQ ID NO: 3293 - DNA, 397 bp, Glycine max
ggacaacacagaacaaaaacaaagaaaaaaaaaaacccttagccaacacaaccatcatggccacctctgctattcagcaatcagcattcactggtcaaactgctctgaagcagctcaatgagttcgtccgcaagaccggtggcgccggcaaaggtcgcactaacatgcgccgcaccgtcaagagtgctcctcagagcatttggtatggccctgaccgtcccaagtacttgggtccattctcggagcagattccatcatacctgaccggagaattccctggtgactacggatgggacactgctggattatcagctgacccggaaaccttcgccaggaaccgggagctggaggtgattcacagcagatgggcaatgcttggtgcccttggctgcacctt

SEQ ID NO: 3294 - DNA, 355 bp, Glycine max
ggcgaaacagagagtgatttcagtgagtgatcggtgttcacttgatctcatcataatcgtcagcgtcaattgaagaagatgccgatcagaaacatcgccgtcggaaggcctgaagaggcgactcaccccgacacgttgaaggcggctttggctgagttcatctcaaccttcatcttcgtgttcgccggctcaggctccggcatcgcctacaacaagctcaccgacaacggcgctgccacccctgccggcctcatctccgcctccatcgcccatgcattcgccctcttcgtcgccgtctccgtcggcgccaacatctccggcggccacgtcaaccccgccgtcaacttcggcgcct

SEQ ID NO: 3295 - DNA, 361 bp, Glycine max
ggtgttcctgacaaatctgaggatgaaacaccagagaaatctgaaagtgaagacaaaagtgattctggaagtgaatctgaagatacgaaagaaaagaaaaaacctaaaacatcatccacaaagaaagaatctgctaagaaaagtaaaattgagaaaattaaagttgcaactaaatctcgctcaccacaaaaaagaacacctaagaaatcatcatccaacctctcaaagtctgatgatgacagtgatgaaagtccaaatccaaaggtcttttcaaggaagaagaaaaatgagaaaggaggaaagcagaagattgatgatagtgatgaaagtccaaatccaaaggtattttcaaggaagaaga

SEQ ID NO: 3296 - DNA, 345 bp, Glycine max
gattcacacaactaactaagaaagtcttccatagccccccaaaaatgaagagcaccatcttctttgctctctttctcttttgtgccttcaccacctcatacctaccttcagccatcgctgatttcgtgctcgataatgaaggtaaccctcttgaaaatggtggcacatattatatcttgtcagacataacagcatttggtggaataagagcagccccaacgggaaatgaaagatgccctctcactgtggtgcaatctcgcaatgagctcgacaaagggattggaacaatcatctcgtccccatatcgaatccgttttatcgccgaaggccatcctttgagcctta

SEQ ID NO: 3297 - DNA, 355 bp, Glycine max
ggacaacacaacgcaacacaacgcgcactctctcttttccctcttaacacaaaaaccctatcgttcttcgcggtttcgccgattctcgccatgccgaaagccaaatccgacgccaaagccgccgatagccggttgaagcgcaagggcgctggtgctggaaggaagcaatcgaagaaagctgctaaggatcctaacaagccaaagagacctccaagcgctttcttcgttttcatgtccgagttcagagagcagtttaagaaggagcatcctaacaacaaatccgtcgctgttgtcggtaaagctggtggtgacaaatggaaatcgctgtctgatgctgaaaagcccccttcgttgc

SEQ ID NO: 3298 - DNA, 225 bp, Glycine max
tttctcgatttcgaaatatatcaaaaccttgggtagaaaaaaaaagtggtatgctgtgtttccaagattggatttcatattcgaatgaacctcgtaatcgtaagaaagtgggttttttaactacgggtctagcaaacgaaaaattgagataggattcaatccaataagatctcccctttcaaaatcggacgtgaaggtttcctttcaatcggctcaagtagttat

SEQ ID NO: 3299 - DNA, 317 bp, Glycine max
aagcacaaatcataaaatagtagcatagaattgaaaagggaaaaattacttcaaaaccccatcttgaattcaacaattgtaaaactaaatgacaaacataaatttcaaattacaagttttgactctcagatttcatttcccctaataagtccaatgtacattcccattcaaacaactaaaacggcagaaatgactctggtctaaggtttaccaaatcttactagacattgaaagcctaatcaacagccacaattactccgaacctactttattctaaagtaaaatgtacacttgaaaccaaaattgtagtcattccc

SEQ ID NO: 3300 - DNA, 317 bp, Glycine max
  modified_base (18)..(18): a, c, g, t, unknown, or other
gctggccattccgtttcncagatctgctccttccgttccccctcagaaatcagttgaagagcatgggtcgtggagttagcagtggtggtggtcaaagttcattgggttatctttttggcagtggagaggcccctgccccaaaaccagcaacaaataatgccccagcccaacctgaagtgcaggctgtaaataatgtgcctcctccaaaagcatctcctcctactaaaacaatagaccctaacaaggctgctggtatcaacagtcattctactgatggccagaacaccggcaacttcatcacgggccgaccctcaacc

SEQ ID NO: 3301 - DNA, 367 bp, Glycine max
  modified_base (279)..(279): a, c, g, t, unknown, or other
gaggttttggagttacagccgcagcttgaaacagagcagagcgaccttgaagagctatggctgtcggaaagaataagaggatttccaagggaaagaagggtggcaagaagaaagccgctgatccctttgccaagaaagactggtacgatatcaaggccccttccctcttccaggtcaagaatattggcaaaaccctcgtctctcgtacccagggaaccaagattgcatccgaaggactcaaacatcgggtttttgaggtctcattggctgatctccaangggatgaagaccactccttcaagaagattcgtttgagagctgaggacgttcaagggaagaatgttctgacaaacttctggggaatgga

SEQ ID NO: 3302 - DNA, 342 bp, Glycine max
agaaggggatatattatcaactcaatcccaaaccctagaatttcagatcctcaatcggccagcaccaacagcatcggcggcgacagtcactctccgacaacaacacttccgcggcgaaaaatgtctctggtggcgaacgaggatttccagcacattctgcgtgtgctgaacaccaacgtggatgggaagcagaagataatgttcgctgtgacctccatcaagggtattggaaggagattcgccaacatcgcttgcaagaaggccgatgttgacatgaacaaaagggctggtgagttgagtgctgcagagttggatagtgtgatgactgtggtggcgaaccct

SEQ ID NO: 3303 - DNA, 379 bp, Glycine max
gaaaacaagaagcaataacactcaaaaactcctctcttttcctctcctcacatttctccccgaacctctccccacattactgcactgtgaggtgtctgaaatagaatagcttcttctgtttcatttgttactatatcacccaccagcaccagcctttgtgctagctctttgattcctttttactcttttttcgtttttttttcctgttctttccctttcccctctgctcgatgatgaatggaaggaacgttgacacaaacaggttccccttcactccttcccagtggcaagagcttgaacaccaagccctcatctacaaatacatggcttcaggtatttccatcccccctgacctttctcttaacatcaaaggaacaac

SEQ ID NO: 3304 - DNA, 312 bp, Glycine max
ggccgaatgtgtctctccgcagcagccacacttcttcgccgtttcagctgaagagccatccgcaggtaagcaatggttaagcataataatgttatccccaatgggcacttccggaaacactggcaaaactatgtgaagacttggtttaatcaaccagcccgaaagaccagaagacggttggctcggcagaagaaggctgtcaagattttcccccaggcctactgctggatctctcaggcctattgttcatggccagactctgaaatacaacatgaaagtcagagccgggagaggattttcactggaagaatt

SEQ ID NO: 3305 - DNA, 354 bp, Glycine max
ccctgaaggagaaaaccccatcaacgaacgatgctaacatcatcatagccacaccaatttcgccatcatccgaaaaggcggcacaagttgttccctcaaagaaaaaacaagattcaaagaagcagcaatctttcgaaaaagaattgctggagatgcaggaaatgctgcagcagatgcgcctcgagaaggagaagaccgaagagctcttgaaggtcaaggacgaggctctcaagctgaaggaagaagagcttgaaaaccgtggccgggagcaagagaagcttcagaccgagctcaaaaaattgcagaagttgaaggagtttaaaccctacatgaatttgcctgtgttgaaagata

SEQ ID NO: 3306 - DNA, 301 bp, Glycine max
gatacttcattcattttatcgctcgcagctgaaaagaaactcaactctactctgcaactcattcctaggatttctacacctcgacgaatcctaggtacttcagaaattttgaatgaatggagatgacaatgtcagcagcaacttgttccaacatgactagattcagtggcattctccggacaacatgtgtatcatcatctcccaagaggaagcatgcaaaaggaatcttgagaaattttaccatatgtgcctcaccatttatatcttcagttgaccctataattgttaattccccttcctt

SEQ ID NO: 3307 - DNA, 355 bp, Glycine max
ggcagcgtcccaagttccaggtttcagcgagcattctacaatggctactataccagttaatcccaagcctttcttgaacaatttgactgggaagcctgtaattgtgaaactgaagtggggaatggagtacaagggctatctcgtttccgttgattcctatatgaacttgcagctggccaacaccgaggagtacattgagggacaatttactggaaatttgggagagattttaatcagatgtaacaatgttctctaccttcgaggagtaccggaggatgaggaaatcgaagatgctgctgaagactagagagtgatagaagctgctaatggctatgacataaacagaactcgaatt

SEQ ID NO: 3308 - DNA, 334 bp, Glycine max
gattcgatcaaatactcagaactgttcggtttttctggaaatttttcttctctcagccatctctctctctctctgcgtccatggagttttggggtgttgaggtgaaaagtggagaatctctcaaggttgatccgggagatgacaagattatccacctttcaaatgcatgcctgggggatgtcactaaggataaagaaggtctaccagtaaccctgtatgtcaagtttggtaaccaaaagcttgtacttggaacgctttcttctgaagcttttcctcagatatcttatgatttggtatttgagaaggaatttgagctatcccataactggaaaca

SEQ ID NO: 3309 - DNA, 320 bp, Glycine max
gattcattgctccctcgaactgttgtttggtctcttctctcttatccatggcatcaacgtttctcaccctaccaactcccttcctacacaaaaccaatgccatcagtttctctaacaagagaccctcatttttgcagaggagctctctgaagattcatgcaattaccaaaaaatgggaacccacaagggttgtgcctcaggctgatagagttcttattcgtttggaggagctttcagataaaacagttggtggagttttgctgcctaaatcagctgttaaatttgagcgctatcttgtgggagaaatcctaactgttggt

SEQ ID NO: 3310 - DNA, 336 bp, Glycine max
gaacgccaatgtttttttcaaaggagtttcaacctggaatcaaaagagtttaacctaaagtaagaaatccaagtcctaatccaatttaagggacaaaacaagagaacaataacctgacaaagggtttaaccataaaatcgaatccaacattgatttgagatattgataaagtgaatactcatttctcgtcaatgctaggcataatgcgggtatagggacctaaaaaagattatcttttcttcctatcttatgaactttaaggtgtatgaagtgtcatttcctatcttagattttaattttagtaggtagataaagagtccatttaacttaagttga

SEQ ID NO: 3311 - DNA, 326 bp, Glycine max
gaaggttagattcgttgttgttgttctaaaacgtccacacattctccgtcgccacaacaacaatggctccgaagaaaggtgtgaaaggttccgttgtagcagcgaagaagaaagttcaagagaaggtgacgaatcctttgttcgagaagcgtccgaagcaattcgggatcggaggcgcgctgccgccgaagcgggacctgacgcggttcgtgaagtggccgaagaacgtccaaatccaacgcaagaagcgcatcctcaagcagaagctcaaggtccctcctgcactcaaccagttcaccaaaaccctagacaagaatctcgccacg

SEQ ID NO: 3312 - DNA, 351 bp, Glycine max
ggcgccccatatcttccaccctttggctattcctaaccattgagtacaacttcacattttagaagaataccccctcttttgctgcatcagaggagttgtaaattaagagcatggctgcacaagctcttgtatcatcatcttctcttaccttctcagcggaggctgcaagacaaagtcttggaccaagatcactccaatctccatttggcttctccagaaaagcctcctttcttgttaaggcagctgctaccccccctgtcaagcaaggatcagacagacctttgtggtttgcatcaaagcaaagtctttcttacttggatggcagccttccgggtgactatggatttgacc

SEQ ID NO: 3313 - DNA, 312 bp, Glycine max
ggagttgagaggatcgtgagaggggcagtagccgagattccgtgagttgcaaaaatgaagacgattctttccaccgagaccatgaacatcccggacggcgtgagcatcaaagttcatgccaaggtcatcgaagttgagggcccccgcggaaaattggtgcgagacttcaagcatttgaatctcgattttcagctcattactgacgaaaacggtaaaagaaagctgaaaatcgacgcgtggtttggttctcggaaaacatccgccgccattcgcaccgccttgagccacgtggagaatcttatcaccggcgtc

SEQ ID NO: 3314 - DNA, 306 bp, Glycine max
gatcactctcacgcttctgattattcctcttcccattctagggttcccaaatggacgctggcggaaagatcaagaagggcgccggaggaagaaagggcggcggccctaagaagaagccggtttcaaggtccgtcaaggccggtctccaattccccgtcggaagaattggccgttatttgaagaaaggaaggtacgcccagcgtgtcggtaccggtgctcccgtttacttggccgcagttctcgagtacctagctgctgaggtgcttgagttggctgggaatgctgcacgtgacaacaagaagaaca

SEQ ID NO: 3315 - DNA, 363 bp, Glycine max
gagagaagttattagggtttttgagtgcggcggtccaaacactcttctctgcagcttttgcctacaactcccttcaccatggctgaacaaaccgagaaagcttttctgaagcaaccaaaagtgtttctcagcacaaagaagactgggaagggaaagagacctggaaaaggtgggaaccgcttttggaagtccattgggcttggatttaagactcccagggaagccatcgaaggaacctatattgacaagaagtgccccttcactggcaatgtttccatccgtggccgtatcttggctggaacatgtcacagtgctaagatgaacaggactattattgttagaaggaattatctccattttatc

SEQ ID NO: 3316 - DNA, 342 bp, Glycine max
caaactgttgctgtgggagtcatcaataacgttgagaagaatgatcctaccggagccaaggtcaccaaagctgcccagaagaagaagtgaatcgtgcgggctggttcatcaagggatgttggttacaataaatgttggtttcttttctgtactcttgtgtcttcttttctaagtagcttgtttttcggacaaagtttgaaatctccaccatcatctcgcaactgttgttcccagaactgggttcttgatcgacggtggcaaaattgcttttacttatctgtgttttaatgtgttgtgtttgtcggaacccctgattacatttttgttaagcgcaaccaattt

SEQ ID NO: 3317 - DNA, 337 bp, Glycine max
ggtccaaaatcctcactccagccacacgcctcagtagaccatggcctcattgggtgggttacaaaatctaagcggcatcaattttcttatcaaaaaagagggtccaaaagtcaatgcgaagttcgagctgaagccgccaccatatccactgaatggtttggagccggtgatgagccagcagacacttgagtttcattgggggaaacaccacaagacatatgtggaaaatctgaaaaaacaaattgttgggacagagcttgatgggaaatcactagaagagattatagtgacatcatataataagggtgacattcttccagctttcaacaatgcagca

SEQ ID NO: 3318 - DNA, 339 bp, Glycine max
gatccacatcacaaaaattacaacaccaatctcacccatttcaaaaaaaggccgttagtgttactattcgtaaaatggccactcttgttctttaccaattctttctcaaactcttgctcctaatttcagtctttcagctttcctttgctgctaggagactcaaccagctggttcaggaccagtcacagttactccattaccacaacggtcctcttctatacggcaaaatcgccgtgaacctaatctggtatggtcacttcaaaccatcccaaaaggccatcatcaccgatttcgttacctcactgtcatccccatcgtctcagagcagccagccatctg

SEQ ID NO: 3319 - DNA, 356 bp, Glycine max
ggggaattgtctttcatctggtaagactgatgacgaagttgttatcaccttcagcaccaccatgtccatgtctaagggttccaattccaaatccaaccgtaaaatatcgatatgcatacagtcacagagggcaattgcgtgttcgatgcagtgataatagtgatgaagagaaggataaggagaagaagaagaagaacgaaaagcggttgtctcagcagtcgtcgtgggaagcccaagacgctgagggaagagactatctctaccgacttgggaaagaggctgataacatgaacatcgccgtcggccagcgtgctggcgtcatcgattctcttttcgccggcaattttctcggcaaa

SEQ ID NO: 3320 - DNA, 349 bp, Glycine max
gactcagcacttcaaaacactcataacacaaagcacaaagcaaagctcatccttgagttcaaaaagttggaacagcttcttccatgggtctctcatccccatccttggctggcaagggcgtgaagctgggcccatcaagcccaaaaatgggaacggggagcaatgagaagaccgtcaacaaacatgtctcctcatgaagcccatggtacgggccagaccgagtcaagtacttgggcccattctctggcgagcccccgtcctacctaaccggtgagttcccaggcgactacggctgggacactgctgggctttccgcagacccagaaaccttcgccaagaaccgtgaact

SEQ ID NO: 3321 - DNA, 348 bp, Glycine max
  modified_base (342)..(342): a, c, g, t, unknown, or other
gatgagctcaaagactaagatgttttcacttgtggagctccaaatgctatgaggacggcgtggaccttggtcattgcagagtgctttattccctggtttggtaatcattggagctagacattcctagcatttaaaaacagaacagtgtttctaattgtaactcttggatgcaatgcttgtattggtagcatgaagttgagtatctcgctgtagatctgcttttaatttgtgctctaaattcactaacgtgttcatgaactttggcatccttgactatggtagtagctaccttgcatattggttggtttttggcaatgaagtttatcataatgcatccaaaanaacaaa

SEQ ID NO: 3322 - DNA, 317 bp, Glycine max
gaagaaagtgagggaaaaaagtagagtggtatgtgggttgctgcggcaacaaaaccattcatcaaattccaattccacagacacactacttctcttccgcttcttctgatggcaaaccaagcttcactctccttttcttcttccgtgtctcctgttcacgcgcctctcaagcgcgtgggcacgcacaacggaagctttcattgcgacgaggccctcggctgcttcatgattcgcctcacgaacaaattcaacagcgccgaaatcgttcgctcccgagaccctcaagtgttggaggttctcgatgctgttctcgatgt

SEQ ID NO: 3323 - DNA, 361 bp, Glycine max
agggcactgcaactttgctctctgtgaggcttcaatttccaattagggtttcgcttagagtaaccaattaccatgggagtcttcacctttgtcgttcgcaaatccggcgccgaatggagcgccaagcaacattccggcgacatcgaggcctccgccgactccacctacgatctccaaaggaagctcgtgcaagccgctctcgccgttgattcctccggtggagtccagtcctccttctctcccgtgtctcctacctccgctgtgttccaggtgatagtgggtggtgctgtattcgttggaggtggcggtggtgctgttgcagctgcacctgcaggttgtgctgctgcagctgatgctgccc

SEQ ID NO: 3324 - DNA, 328 bp, Glycine max
  modified_base (317)..(317): a, c, g, t, unknown, or other
ggccgaaaagtagtaccaagatggcttcagttgtgtatctcctctttggcttccatctcattgttatcatgtcaagttccttacccgcaactagtgaagtgtttgcaaaacagtatccatccacagaacccgtggaagaaaaactcacccaactccacttctatttccataacaacataacgggggaacacccaactgctatgaaaactgttttgcctcctaaggggtccattcatggttttggggctacttacatgatggatgaccctctaactgaaggaccaagtccaacttcaaagcttgtgggaagatctcanggaatatacgc

SEQ ID NO: 3325 - DNA, 327 bp, Glycine max
gagagtggcactccactgttactaaataaaggtttcaactttgaggataaacctcaccagttccctggttgaaacgaagcgaaatttccacctgcatcatcttcaaacctgcgcttcttttgaaccgatttgtgctgttttgttagtgaagcacatcgagtgcaaactgtcgaacaggcatggcaagcctgttgacaacatcagccatcacctattctcctctcaacaatggttccaaggatttcagaaagtcagggaattcttctaaaggaaggtgttgcataaaagcaatggggatagagaaatccttggaggaattgtacaatg

SEQ ID NO: 3326 - DNA, 312 bp, Glycine max
gacaacgcaactattgacaatctctctttattctattcactccctccatttcttcaaactaaatttcctgagaatggcgaaggctgcggagaaaaagcctgcggccgagaaggctccggcggagaaaaagccaaaggcggagaagaaggttccaaaggaaggcagcggcggagagaagaagaagaagaggtcgaagaagagcgtggaaacgtacaagatctacatattcaaggtgctgaagcaggtacatcctgacatcggcatttcgagcaaggccatggggatcatgaacagcttcatcaacgatatatt

SEQ ID NO: 3327 - DNA, 277 bp, Glycine max
cggggcgacagaagttattacggtttttgagtgcggcggtccaaacactcttctctgcagcttttgcctacaactcccttcaccatggctgaacaaaccgagaaagcttttctgaagcaaccaaaagtgtttctcagcacaaacaagactgggaagggaatgagacctgtaaaaggtgggaaccgcttttggaagtccactgggcttggatttaagactcccagggaagccatcgaatgaacctatattgacaagaaatgccccttcactggcaatg

SEQ ID NO: 3328 - DNA, 62 bp, Glycine max
atgtgaaaaaacttttttgttagtaatcatgcttcttcaacaatgtctccaatttgtttctc

SEQ ID NO: 3329 - DNA, 331 bp, Glycine max
  modified_base (254)..(254): a, c, g, t, unknown, or other
gagttttctgttggcgcgggtgaggtagaacccttccacggtggtgactgcgcgatgggtgcctacaagtatgtttcagagctatggcgcaagaagcagtctgatgtcatgcgcttcttgcagcgggtgaggtgctgggagtataggcagcaaccttcccttgttcgcttgacaaggtcgacccgccctgacaaggctcgtcgcttgggcttcaaggctaagcagggctatgtgatataccgtgttcgtgttangaggggtggccgaaagaggccagttccccgaagtattgtttatgggaagccacaaacaaggtgttacccaactgaaa

SEQ ID NO: 3330 - DNA, 392 bp, Glycine max
cccacgcgtccgaagacgacagaagggggctcagtggtcactcactcaccccttcctttctaactcctcaaattgtgtgttctgagaatggaaatgcctccttctccatcggggcattccgcactctccatcccataaaagtcccagatccaagatggcttaccaccatcaaaaatcccttttggacaccctatactgctccgaagagcattggataggggaaggtgaatttgaccaagcagaggaggagtacggtaacagtaatagcaatagtagcagcaccttagtaaacaactcccctgagtcctcccctcatttgttgctcgaaagcgacatgttttgggacgaacaagagttggcatcgctgttggagaaagaacacacaacccact

SEQ ID NO: 3331 - DNA, 381 bp, Glycine max
gcaggaagacaacgacggggacgtgcacaacctcaacaaccctaacgcgtgcagagcagagagagacgcagccatggggcgaagacccgcgaagtgttataggccaattaggtacaaaccaaaccccaagtcacggttttgccgtggtgttcctgatcccaagatcaggatttacgatgttgggacgaataagaagggtgttgatgagtttcctttctgtgtccatctggttacttgggagaaggaaaacgtttctagtgaggccctgtaagctgctcgtagtgcttgcaacaagtacatggccaaatttgctggaaaggatgctttccacttgagagtcagggtgcacccattccatgttcttaggatcaacaagatgct

SEQ ID NO: 3332 - DNA, 366 bp, Glycine max
ggagagagaaaggctctttggcttgtattgaaaggtaagcaattgaaggttagaggccgaaagagagtggaataacagactagtcttaggaactccctagtgaaggtgaaacttgctctaagtgaagcaaaatcacttgcttgtgaagaagctcacaaaatctcttgcaagttaagtttgtaggctctgaccttgtttttgggaattgcaagctaagctggtttagttagtagctagcccttctcgcccttcttatatatattccacaattcaacaatcaatcatcatgcctaattgcctcttgttgtgaagggagaaagaagattctcatcatcatcacattcatcattttaggttttgaaaaac

SEQ ID NO: 3333 - DNA, 357 bp, Glycine max
tcaaaggggcctacttcatctctcttatggtcacacacacctaccttatagctatggaaactggacgctttcatggctaccgcaagctctccaacacaacctctgtgttgaagctgtcagtgtcacacatgaacatgaatatgaggcagcagcatgtaacatcatcagatgagaactgcatcaaccacagtgcatcaggagacgataacgaatacaccgttatggaacatgacaggttcatgtcaatcgctaacctgaatcggatctatgcacaatattctccctccacacgcaaaaatctccgatgatgcaaacgacacaatccacgagtgcgtgtctgagtgcatcagcttcatc

SEQ ID NO: 3334 - DNA, 335 bp, Glycine max
ggaacctcaaaatcagtctctaatatttttctcactgtcttgtctctccagagaactgtatagagagagatggcagctgcaacatctggtgctgtgttaaatgggttgggatcttccttcttgagtggaggaaacaggagccaaacccttctggccactgctattggaggcaaagttggtgctgctgctgttactgttagtcctagaagactcattgtggtagctgctgctgcaccagagaagtcatggctccctggtgtcagaggtggtggcaacctcgtcgacccagaatggcttgatggatcgctaccaggtgactatggctttgacccact

SEQ ID NO: 3335 - DNA, 352 bp, Glycine max
ttcatagatttagggaatcgattactatactagtaataaattgtacaaaaaataaaaatataaataatataaatataaaaagaacaaacacaaattttatgtgattagtcgcggtatttaaaataaaaaatgaaagtagacaaataaaaaaggaaaggagatgtttgaataaaaataattccccttcaagttcttattttttgagaggacaggacaatatgaatgttttattatgctctagcaacacattaaaaagattatatgatatatctgctgtggaagtaggtcaacatttctattggcaaatagggagtttccaagtacatgcccaagtacgtagtacttcttgggt

SEQ ID NO: 3336 - DNA, 393 bp, Glycine max
  modified_base (321)..(321): a, c, g, t, unknown, or other
gaggtttgtgattgtctttgcctcactttgctgccgtacctaatcggagagctcccgctgactgcgatcggatttcatggctcctaagaaagacaaggctcccccaccttcatccaagcccgccaagtctggtggtgggaagcagaagaagaagaagtggagcaagggaaagcaaaaggagaaggtgaataaccaggtgctgttcgatcaggctacctatgacaagctcctctccgaggcacccaaatacaaactcattactccttccattctctctgaccgtttgaggattaatggatcacttgcaaggaaggctattanggaattgatggccaaaggttcaataaggatggtgtctacccatgctagtcagcaaatttacactagagcgac

SEQ ID NO: 3337 - DNA, 409 bp, Glycine max
agaaggggaggccccatatttctatcttactaaagaaaactgggcccaataaacttgaaaaccctcgatggtgaatgaggagcaaatgagcaatccctatctatatctacttatcgtctaagctcagtgatcagaacctacgccgagcgaaaccccaaataccaatccaatcctctcccaactcacaaagccatgtctccaggtcccgttgtcgacgcttcccctgaggttgatgcagagcaacaacttccctccctcgatgacgccactcagaagaagataccccaaccacaggaggacgatgctccccttgtcgaggacttgaaggatgatgacaaagacgacgacgatgaagacgacgacgacgacgacgaagatgacaaggaagacgatgctcaaggtggtgctg

SEQ ID NO: 3338 - DNA, 369 bp, Glycine max
  modified_base (296)..(296): a, c, g, t, unknown, or other
  modified_base (329)..(329): a, c, g, t, unknown, or other
ggttctagtgtgtgattgtttgttgttgtaactcgttcttcttcttttgttgttctgtgtttgtgtttgttttttctctcacctgaaaatgtcttgctgcggtggtaactgtggttgcggaagctcctgcaagtgcggcaacggctgcggaggctgcaagatgtacccagacttgagctacactgagtcaaccaccaccgagaccttggtcatgggagtggcacctgttaaggctcaatttgagggtgctgaaatgggtgtgcccgctgagaacgatggctgcaaatgtggaccanactgctcctgcaacccctgcacttgcaagtgangtgttgggagagcaagcttcaagcagagatagcccttaat

SEQ ID NO: 3339 - DNA, 327 bp, Glycine max
gcctagcaattcggggcaatcatcgtctgcttcaaggaaggagagcttgttattccctatcaacaaggtaaatgtcaggtgaaaacgttgttgttgcagctgagccaactgctgccatcccaggcgagcctatggatagcatgagtgccttgcaacttgtgctcagaaaatctctggcttatggtggtcttgcacgaagccttcacgaaggggcaagagtgattgacaagcatgctgcacaactctatgttctagcagaagactgtgaccagcctgactatgttaaactggttaagggcctttgtgcagagcacaatgttagcctgc

SEQ ID NO: 3340 - DNA, 340 bp, Glycine max
actcgaattgttccacgccacatccaattggcggtgaggaacgacgaagagttgagcaagcttctaggagatgttaccattgctaacggcggtgttatgcctaacattcacaaccttcttcttcccaagaaggctgggggctcatccaagggtgctgctgctgacgatgactcttaaatagggattcactgttcacaaagttcttgaatttagattcgatgtttgctctctttttttttcctttttatttgtagttagtataattgtgccctttgtagtagtagttaggttttcagtcagatgtgtttaaggaatgctcttacgcatcaagaaaggttgt

SEQ ID NO: 3341 - DNA, 405 bp, Glycine max
gacttctcttcacacctttgttcactcttcttctcttgcggctagggttttagcgcagcttcttctagatttaaggaagatgggtaaggaaaaggttcacatcagtattgtggtcattggccatgtcgactctgggaaatcgactaccactggtcacctgatttacaagcttggaggcattgacaagcgtgttattgagaggtttgagaaggaagctgctgagatgaacaagaggtctttcaagtatgcctgggtgctggacaaacttaaggctgagcgtgaaagaggaatcaccattgatattgctttgtggaagtttgaaacaacaaagtagtagtgcacagttattgatgcgcctggacatagggatttcagtaagaatatgattactgggacatcgcaagc

SEQ ID NO: 3342 - DNA, 325 bp, Glycine max
gacccttaacctctctgctgcgtttgcttctcctccacccatccacaaacgaacacacactttgattgagaatggggcgtgttcgcacaaagacagtgaagaagtcctcgcggcaagtgatcgagaggtactactctcgcatgacgctggacttccacacgaacaagaaggttctggaagaggtggccatcattccctccaagaggctccgcaacaagatcgcgggattctccacccacctcatgaagcggatccagaagggtcccgtacgtggaatctccctcaagctgcaggaggaggagcgcgagcgccgcatggacttcgt

SEQ ID NO: 3343 - DNA, 99 bp, Glycine max
gaaggacacaaaaaccagaacgtagagtcacaccaccacagcagagcacagcaaccctcaaatccctttcctttttcccccctgatttaacagaagaaa

SEQ ID NO: 3344 - DNA, 395 bp, Glycine max
  modified_base (382)..(382): a, c, g, t, unknown, or other
gagagtggtggagtgtgcagaagagcgtcgcagtcgcaaccctaatcagaagaagcgcagcttcaagcgagtgacagccaccagccatgggtcgtatgcacagccgcggtaagggtatatcctcttctgctttgccctacaaaaggacacctcctagctggctcaagatctcttcgcaagatgtcgaagaaaatatctgcaagtttgcgaagaaaggtttgaccccgtctcagattggtgacattctcagagattctcacggtattgctcaggtcaatagcgtcactggcagcaaaatccttcgcatcctcaaagctcacggacttgcgcctgaaattcccagaggactgtaccatttgattaagaaggcagtttcaattangaagcatcttgag

SEQ ID NO: 3345 - DNA, 364 bp, Glycine max
cggggcgtacacagcctcaacaaccctaacgcgtgcagagcagagagagacgcagccatggggcgaagacccgcgaagtgttatacgcaacttaagaacaaaccataccccaagtcacggttttgccgtggtgttcctgatcccaagatcaggatttacgatgttggtatgaagaagaaaggtgttgatgagtttcctttctgtgtccatctggttaattgggagaaggaaaacgtttctagtgaggccctggaagctgctcgtattgcttgcaacaagtacatggccaaatttgctggaaaggatgctttccacttgaaagtcacggtgcacccattccatgttcttaggatcaacaagatgc

SEQ ID NO: 3346 - DNA, 376 bp, Glycine max
  modified_base (344)..(344): a, c, g, t, unknown, or other
gagtctcgtgtggtgtcataacttctgcatgctctctattaagaagtgtattcaatgaaattagtttttatacaaagttgtaaagctaactaactaactaattttgtgaagcaacaatgtggaagataactgtacagtgccaacagctacaacaggcacaacaatatgatttggtaaagtgattgccttattgaacactattgacaagcaacatgagtgctagcacctgaatcaacaagccagcaatcacgaaggagattaaaggaggaggcagacataatcataccattagaatcaccatgattctgatggggaacagtgacatttgaagtttgaccctgtangagactcatcaactggttgtactgctgtgctg

SEQ ID NO: 3347 - DNA, 312 bp, Glycine max
gagttttctgttggcgcgggtgaggtagaacccttccacggtggtgactgcgcgatgggtgcctacaagtatgtttcagagctatggcgcaagaagcagtctgatgtcatgcgcttcttgcagcgggtgaggtgctgggagtataggcagcaaccttcccttgttcgcttgacaaggtcgacccgccctgacaaggctcgtcgcttgggcttcaaggctaagcagggctatgtgatataccgtgttcgtgttacgatgggtggccgaaagaggccagttcccgaaggtattgtttatgggaagcccacaaac

SEQ ID NO: 3348 - DNA, 370 bp, Glycine max
gatagtgggttaagcctcgcttctaacgtcaccgactcagttgttgtcagcgagtgagtgagtcgtttctctgcagcaacaatgtttagccactccaaacacaccagaaatgggtcgtggggtcagtgctggtggtggtcagagttccttacgttatcgcattggcactggggtgcctgccatcagtgcacacagtcagcctgcaaatggtgctcgcactcaaaatgctaatgctccttcaccagcagtcgatacgcaaagtctagcaccagcaccagcaccatcaccagcacctgcatcatcaccatttgataagcagattctagctggaattcgtggaagtctcactaacacttaccatcgtgctgat

SEQ ID NO: 3349 - DNA, 354 bp, Glycine max
ggaatttgtgtggagtttaactaaggtttttggaatttcgaataaagggaaaagaaggtgcaaggtgcatcttctttttgttgttctctcaaactttaataatctcataaattagcagaacgaagaggaacaaaaacaagaagaagaattggattcgaaaatcgtagcgtagcgttggtgcgattgaacgatacgatgggaagaggaaaattcaagagcaagcccactggtcgccgccagttctccaccccggaagatatgcttgctggaacctctaaccgtcctcgaacttttagacagaaagaagctgagcatgaagaggaagaacccgaggaagtatctggagatgaatct

SEQ ID NO: 3350 - DNA, 330 bp, Glycine max
ggagagagaaagagaaatggcaacaagcgaagaagtggttgcggcggcgccggaggcagccgcgccggaggcagggttgaagcacaaactggagagaaaatggacgttttggtgcgacaaccaatccaaacccaagcaaggcgctgcgtggggaacctctcttcgcaaggtctacaccttcgagaccgttgaagagttctggtgtttgtatgatcaggtattcaagcccagcaagttgcaaatcaatgccgagtttcagttgttcaagactgggattgaccctaaatgggaagatccagagtgcgccaatggaggaaagtgggtctatca

SEQ ID NO: 3351 - DNA, 398 bp, Glycine max
ggcaatcaatttgcaaaccaaacacaacacaaggagaagaaccagatctctctttctcaaatcaccaagaatagttgaaaatggggctgtctttcacgaagctgttcagccggctctttgcgaagaaggagatgcgtattcttatggtgggtctcgacgccgccggtaagaccaccattctctacaaactcaagctaggagagatcgtcacaaccattcccaccattgggtttaatgttgaaactgtggaatacaggacgatcagcttcactgtctgggatgttggtggccaggacaagatccgtcctctgtggagacactacttccaaaatacgcaggggcttatctttgtgggtgataggagtgaccgggatcgtgtggttgaagctagggatgag

SEQ ID NO: 3352 - DNA, 370 bp, Glycine max
gacctccacaacattgcatacccttttgagttttgattctctctcctcacataactaggtggtatcgaatatttttggggtgtgtcaaagtttgtgaaggaacttgaagaagtaaatgcatggatcgaggggaccaaatgacattacctggctctgcatcttactatatgcagagaggaatacctggtgctggaaaccaacctgtactgcacaattcacctaatattggaccattgtctaaccctaatctaccatgtcaatcaagcattgggggtggtggtaccattggatccacattacccttagagtcttcgggaatttcagctccatgtgtgaatgtgagtgctccttctgggactctgcctgggga

SEQ ID NO: 3353 - DNA, 351 bp, Glycine max
gatccacacctctctctctctctcagaatttctatctatctcttgtttcaatttcaacaacggttactcctttttcgttttgagtttcaatcaagccatcatcatgtctaccgcatcgcaacccaaggccaagaaaacggcgtcgtccaagaagcccctctcccaccctcccttcgccgtgatgatagcagaggcgattgcgagtctgaaagagagaaccggttcgagccaatacgcgataaccaaatacatcgaagggaagcacaaggagttgcctgcaacctacaagaagcttgtcctcattcatctcaagaaatctgttgctgctggcaagcttgttaaggtgaaaaa

SEQ ID NO: 3354 - DNA, 238 bp, Glycine max
gatttcacggtctcattactcatccctgtaattcaaggttggaaatccagacatcaaactgacattaggatggcctcagtacacacctattggaccattgcctccgtacatcacctccgtgcctctgctctcgttcatctcgccatgtcttagtcacaccccgaagatgcaatgtatgattcagacaccgcaaatgtaatcgacgctgctgatgaatcagttgataacttcagtgatg

SEQ ID NO: 3355 - DNA, 328 bp, Glycine max
gggtgttgtaactgaaggaacatgaaagggtacaaggtttggaactcaaccttcatacctttcaataataatctctccccaaattaccccttaaccccttcctcctatactgcttcaaactacaccccatccttccagaaccaaagaccaaaacttaaagctcagaatttcaaagcccacattcttctatgcgcctctctgcccagtccgcaggcaagcagtgcttccacggctcaagctgaggatcaagaggttgaaattgcaaggggttacactatgacacaattttgtgacaacatgatagatttctttttgaatgaaaaaacta

SEQ ID NO: 3356 - DNA, 404 bp, Glycine max
  modified_base (310)..(310): a, c, g, t, unknown, or other
  modified_base (367)..(367): a, c, g, t, unknown, or other
gaggtgtgatggcggcttcattggggtttcccttcacaagtgcacaatggagggagcttgaaaggcaggctatgatatacaagtacatgatggcttcagttcctgttccacctgatctcctcattcctacttcactcacatcctcttctcgctcttcctgcatggatggtggtttcaatctgaggttggcaaatagcactgaccctgagccaggtaggtgcagaagaacagatggaaaaaaatggagatgttcaagagacgtggctcctaaccacaagtactgcgagcgccatatgcatagaggccgtcnccgttcaagaaagcctgtggaagttaacaccaacaccactcccactagcatcaacancaacaataacaaccaccaaatcaaaagggctcgccat

SEQ ID NO: 3357 - DNA, 384 bp, Glycine max
  modified_base (368)..(368): a, c, g, t, unknown, or other
tcactcactcatacaatagagaccagcttttgcttctttgtgaacatggagatgaggaaatcatgtagcttcttcttcttgctcctcctccttgtctttgcttcccaggtggtggtgcagacggagggaagagtgtgtgagtcacaaagccacgggttccatggtttgtgtaatagagaccacaactgtgctttggtctgcaggaacgaaggtttctccggtggcaggtgcaaaggcttccgccgccgctgcttttgcaccaggatttgttgagatctcatcaaacactactcttgccatgcaaattaataaatcatagctaggccaaataaattgcatctactctttatccatttgggagctagctnacacaaccaactcata

SEQ ID NO: 3358 - DNA, 381 bp, Glycine max
  modified_base (361)..(361): a, c, g, t, unknown, or other
  modified_base (370)..(370): a, c, g, t, unknown, or other
atcgtgcctatgcacaaggtcaatttcgacgccaagagcgagtacgagatgattcagaactacaaggtccttcaagatgtcttcaacaaactcaaaatcaccaagcacatcgaggtcagcaagctggtgaaaggaaggccactggataacctcgagttcatgcaatggatgaaacgatactgcgattctgtcgattccggccttcagtacaattataatcctctggagaggagagaggtttgcaaaggaggaagagaaacgagcaagaaatctgcaaactcccaagcctcaaccaagggttctactgcacagagacctcattcttctcataatgctcgaagaaatgaggtttctaatgcanaccctacanatcaggctgca

SEQ ID NO: 3359 - DNA, 381 bp, Glycine max
ggcgtgtgttcctcaactcaacacactcctttaaaattgcagcgtcgacaaaaaacctaactcctaacctttttttcttcctttcagctcttcagcagtcgttacagagactccataacccgaaaatgcctttcaagaggtacgttgagattggaagggttgctcagatcaactatgggaaagagtatggggaggctcgtggttattgtcgatgtcattgaccagaatagggctcttgttgacgctcctgacatggtgaggtcccaagtgaacttcaagaggctatcactcactgacatcaagatcgatattaagaggatccccaagaagaaggatctcattcaagccatggaggctgcggatgttaagaacagatgggag

SEQ ID NO: 3360 - DNA, 331 bp, Glycine max
agaagttggggttttacatggagctatgagctacctgctgcaggatgatgatggacaaatagttgagcctcactcaattagtgcaggcttggactaccctggtgtgggtccggaacataactttttgaaagatttagggcgtgctgaatatcatagcatcacagatgaagaagcattggaagcttttaagagagtttcgcgacttgaacgcataattccagctctggaaacatctcatgcgttggcatatctagagaaagtgtgtccaacccttcctaatggagccaaggttgtggttaacttcagtggccggggtgataaggatgttcaa

SEQ ID NO: 3361 - DNA, 335 bp, Glycine max
ggcagtttcaaattttcttttccttcactttcccgagaaaaaaataacacttttcactttcgtcactacgttctcacttcgatatggctcgtacgaagcaaaccgctcgcaagtccaccggtggcaaggcgccacgtaagcaggtcgccaccaagggcgctcggaagtccgctccggcgaccggaggagtggagaagccccaccgcttcaggccgggaaccgtggcgctgagggaaatcaggaagtaccaagaggaggaccgagcgtctcatcaggaaagcttccatttcagaggctcgtgagagagatcgcgcaggatttcaagaccgatttgc

SEQ ID NO: 3362 - DNA, 288 bp, Glycine max
ggcaattgcagagtttaacgtttggccatcacagaagggggaatggagttttctcaagatgattttgatcggttactgttattcgagcacacgcgaaagagcgctgaagcaaactacgcagagaatcctctagacgctgataatctgaccaagtgggggggagctttgatcgagttgtcatcgttccaagctcctaaggatgccaaggcaatgattgatgatgccctttcaaagctggaggaaggtttgctgatcaatcgagctaagcatgacactctttggggcttg

SEQ ID NO: 3363 - DNA, 123 bp, Glycine max
tacctattttttatgctctagtttctaacttaaatttaaaagtaactttttaagtaaaaaataagttgggtcaaacatacccttaaagcaagcacctggccatattaaattagactgtattag

SEQ ID NO: 3364 - DNA, 95 bp, Glycine max
caaaaaaaaaaaaaaaaaaaaaaaaaaaaaaacgggcgccccaaaagattcaaacctaagtaaccctgcaagcgaagtcaaaacccctccaaaag

SEQ ID NO: 3365 - DNA, 359 bp, Glycine max
  modified_base (267)..(267): a, c, g, t, unknown, or other
gctgcaacatcagctttaaacgccgacgacagttcatccaatctccgaagcccttcagcgcactgcaaccactgtcgagaagaacggttacagagtcacaggaagaaaacgtgactctgggcccagctgttagagatggcgatcatgtctttggcgtcactctcatctttgcctccttcaatgataccttcattcatgtcactgatctgtccgggagggaaacacttgtctgcagcacaagtggaatgaccgttaacgctgacacanatgactcgtcaccctatgctgctatgcctgctgcacaggacgttgctgccagatgcatcgaactgggcataactgctcatcacatcaagctc

SEQ ID NO: 3366 - DNA, 395 bp, Glycine max
  modified_base (305)..(305): a, c, g, t, unknown, or other
  modified_base (366)..(366): a, c, g, t, unknown, or other
ggtcttgcaggcgaagagatggccaccgttccagggcagctcgtgtgggagatcgtcaagaaaaacaattccttcttggtcaagcagtttggaaggggcacccagagcgtcgaattcagcagagagagcaacaatctctacaacctcaattcgttcaagtactctggtttggcaaacaagaaaactgttactgttcagcctgagggcaaagatcaggctgtgttgttggctacaaccaagacaaagaagcaaaacaagcccgctgcattgctccacaaatctgtgatgaagaaggagttcaggangattgcaaaagctgttgaaaaccaggtggccaaaaattactacaggcctgatctcaagaanggctgccttgcaaggttgagtgctgttca

SEQ ID NO: 3367 - DNA, 328 bp, Glycine max
ggtgctctgctcgtgcctctagggttatcatttctccatttccattttctctcccacttttcaagaatcgtaagctatgggaaagtcttacccaactgtgagtgctgattaccagaaggccgttgagaaggcgaagaagaagctcaaaggcttcatcgctgagaagagatgcgctcctctaatgctccgtttggcatggcactctgctggaacctttgacaagggcacgaagaccggtggacccttcggaaccatcaagcaccctgccgaactggctcacagcgctaacaacggtcttgacatcgctgttaggcttttggagccactc

SEQ ID NO: 3368 - DNA, 392 bp, Glycine max
  modified_base (384)..(384): a, c, g, t, unknown, or other
gattgctgacgttaaaatagagtatagaattagagtcagcgagcgaaagaggggttttggaacgtgcaagatccggtgctctaatctctgcattctgtgatggctccaaaaccgataacgagtcccgtccccgattcgtggtaccccacgctctccgtcttcaccctcgccatcggcctcgtcttaaccgcctctttcttcatttatgaagcaacatcttctaggaaaagtcgttcacttgttcaggagctgacaactggtgcagtggcttcagtcttcttgggttttgggtccttgttcctcctacttgcttctggtgtttatgtctaatttaaacattgaattggatgaaaattttgctaagcagatagctttaaatgaaanattgcatt

SEQ ID NO: 3369 - DNA, 146 bp, Glycine max
gacgtgaagttgaatccttgctgatgcccatcatgggaactacttttcctcctcactctcgctcgggaagcgtcaacatcaaatcttcagccgcaagaattctcttgggtccctcgccgcaaaccaggtcaggttctctcttttgg

SEQ ID NO: 3370 - DNA, 332 bp, Glycine max
ggacatgcctaacttgaacccaacacttcaagtacttgcttcttcatacccttaccagatcccaaaggtcttgatctaattttaagtgattcttctgatgactatattgaaggttacatgaagccatttctctttttaaatcttcccagcaccgagttcaattcttcacaagttgattgtaatcactcaatggctcattcgtcttatccctacggcgatccaatttttgcttatggaccacaagctattagtcatccccaaatgatacccccgatgctgggactagcatccaccagagtggctttgccacttgatcttgcagaagatggacc

SEQ ID NO: 3371 - DNA, 250 bp, Glycine max
gaatgtgcgagcacttactcgtctcactgtcttgctatatttgggtgagaacacagaggatagtggagttcaacgagatggagcacataaagcacagaacagttgaagtgaatggcataaaaatgcatgttgcagagaaaggagagggtccagtggtgttgttcctccacggcttccctcagctctggtactcatggcgccatcagattctctctctcagctccctcggctaccgcgccgtcgctcccga

SEQ ID NO: 3372 - DNA, 271 bp, Glycine max
gggtggagagaggggcactgactcacacccacaatagtcgggggcagcttcaaagtacctccacattgtctcctactcttactgttctcttctcttctcatcatttttattttttccaatcaaaccaaacaaaacataagcaccgctcttttctctccgaaatccccatctcccttcacttctgagctctggacgagatcccagatctcaccatctttcacgcactcttccatcagattcaccctttcgtttaacgcaaactcataacttg

SEQ ID NO: 3373 - DNA, 375 bp, Glycine max
gaaggtttttgtcgtcgctactaagaattgctgcttcttcagccactccgcaactcgcagcctctgtgccctcaacaaccatggctgaaatcgaaactaccgttccagattccacccaaatcgacgtcaaactcttcaatcgctggagcttcgaggatgttgaagttaatgatatgtctctggctgattacattggagtgtccccatcaaagcatgctacatatgttcctcacactgctggtaggtactcagtgaagaggttcaggaaagcgcagtgccccattgttgagaggctcaccaactctctgatgatgcacgggaggaacaatggaaagaagctcagggctgtcaggattaacaggcatgccatggaga

SEQ ID NO: 3374 - DNA, 344 bp, Glycine max
  modified_base (327)..(327): a, c, g, t, unknown, or other
gagccacaacactttccacttgtctccgaattagttatcttgagaaacattattcccattgctatatattatggctagcatgaaggttacatgggtggttgtgatcatgtgcatggccgtggtgggtgcaccgatgatggcgcaagccatgacatgcaatgatgtgacggtgaacatggcacagtgcctatcctacctgatgcagggaggaacaccttcaacactttgctgcagcggagtcaagaacattcttggctctgctgtcaccaccgttgacaaacaaactgtgtgcaactgtctcaaggcggatgctgctaggtacaacantcaatgacagtatgctc

SEQ ID NO: 3375 - DNA, 386 bp, Glycine max
agacgacagaaggggacacttactagtagtaagcatggagtcctcaaagatctatgcttacctcttcctctgcatgatctttctctcttccgccactcccattctcggttgtggctactgtggcaaaccccccaaaaagcacaagcctggtaaaacaccaaagacacccaaaacacctgttgttaagccaccagtcaccatccctcccattaatgttcctcccgttgttcttccaccaatagtgaagcccccaggtattctccctccaattccaattattaacccaccaaccacaccagggaagggagggaacactccatgcccaccaccaaagtctcctgcgcaggctacgtgccccattgacacgctcaaacttggtgcctgtg

SEQ ID NO: 3376 - DNA, 342 bp, Glycine max
ggagtggaagtagtagcaagtacgtcgtatatgtggttgatcttttgctggttgtttgttttgttccgtccaattgtcagatctgaatcaccggactcactcttcagactcactcacactgaatggcttctgaaggcgaccatcagcagcagcagcaccaccatcaagatcacgatcatcatcatcatgatcatgatcaggatcatcatcacgatggagagggagagaccaactcatgggtaggtaaggatgggaacgtgtaccatagccacgatggtctggcaccgcattctcacgaacccatttactcccccggctacttcaccagaagagctccaccgc

SEQ ID NO: 3377 - DNA, 331 bp, Glycine max
gagaccatccagtactcttcgtttcagcacaagctcgtcatctctcccaagctttcttttctttgcaacgacactatcaaaaatgtcacgagatttcagacttttgttctccccggaactcatgcagtcccctatcagcactttccaggcgacgtgctgtgtccttctcgtcagcctcaggttcacgccgttcttcactcctggtgggcttccttgggcctgggcccggcccagaagcatcatcgctgggccagtaactgcgctggtcggggtcttcacgggttccagacctcacagcgctttatcgagactggcccgcacttatcacgcg

SEQ ID NO: 3378 - DNA, 278 bp, Glycine max
ggaggaagagaagtttgtattctagtcttgtgataaaatgtttggcattttaggcacactagagaggctgcaagtccccttaattttgccattttttatttgccattttgtttaacggtagcagaatgagaatatcacgatgtataaactttggtatagagatgagtgcagtgctgaaatcttagataatagtttgtttgatacagttgaattaatcaattgctagtttttatgagtgagtgaagggtggcgagagggtgggacgaggcggccgctct

SEQ ID NO: 3379 - DNA, 397 bp, Glycine max
gacaacacagaacaaaaacaaagaaaaaaaaaaacccttagccaacacaaccatcatggccacctctgctattcagcaatcagcattcactggtcaaactgctctgaagcagctcaatgagttcgtccgcaagaccggtggcgccggcaaaggtcgcactaacatgcgccgcaccgtcaagagtgctcctcagagcatttggtatggccctgaccgtcccaagtacttgggtccattctcggagcagattccatcatacctgaccggagaattccctggtgactacggatgggacactgctggattatcagctgacccggaaaccttcgccaggaagcgggagctggaggtgagtcgcagcagatgggcaatggttggtgcccttggctgcaccttc

SEQ ID NO: 3380 - DNA, 328 bp, Glycine max
gactgcaactttgctctctgtgaggcttcaatttctaattagggtttcgcttagagtaaccaataaccatgggagtcttcacctttgtcgtccgcaaatccggcagcgaatggagcgccaagcaacattccggcgacatcgaggcctccgccgattccaccttcgatctccaacggaagctcgtgcaagccgctctcgccgttgattcctccggtggagttcagtcctctttctctcccgtgtctcctacctccgctgtgttccaggtgatagtgggtggtgcagtattcgttggaggtggtggtggtgctgttgcagctgcacctgc

SEQ ID NO: 3381 - DNA, 399 bp, Glycine max
  modified_base (308)..(308): a, c, g, t, unknown, or other
  modified_base (330)..(330): a, c, g, t, unknown, or other
  modified_base (362)..(362): a, c, g, t, unknown, or other
aggagggagcggagccacatgattgggagatcccttgatccgtatttcttatttgtttccattttttcctgttacatatcatcttatttttgtttgactaagggactaacgtttgtttcgttttgattgacttttgttttgtacatacatatcgtttgagttgttacgtcagtacttgtttcgttgttttcaatagtgtttgtagaaattccggaatcgcgtagaatttttttttttcatttaggaacgtcgttctaaaaataaaatgaaccaaaatcatgataaaaagagagaagtgtagtgaatanaatttttgcgtatataaagaanaaggaaaatgtgcatagaagggtttttataanaaaatatgtgtagaaagattcttgtgtgtgtgaacaa

SEQ ID NO: 3382 - DNA, 390 bp, Glycine max
  modified_base (294)..(294): a, c, g, t, unknown, or other
  modified_base (318)..(318): a, c, g, t, unknown, or other
  modified_base (349)..(349): a, c, g, t, unknown, or other
ggtaagtgtacatttcatcttagttagggttcaattctcaatcttggtctttgcagttcctagttcctactaccgtgaccttaattctcgggtttcttctgagcgagcagaaggatttcagcatcggagaccgaatcgttcgggtgaggggagtaaataaacagagtgaaccaactcaagcccccaagtagaactgataattagttgcaattttaaaagattgtgattgttgggattgcagagagaagggtggttagtgttagaataggctgagtgtggatggggaaagaggangaagagatgaggggtgagattgangaacgactgattaatgaagagtacaagatantggaagaagaacagtcctttcctgtatgatctggtcattac

SEQ ID NO: 3383 - DNA, 322 bp, Glycine max
ggaacagagtgaaaagaagggtttgtaagagaaagaaaaaagaggtacggtggtggtggaggaggtggtggcggcggaggaagctgctacagctgtggagagtctgggcatttcgccagagattgcccatcaagtgctcgttgaaattactgttatggtggtttatgttatgcggattgttttaagtttttactttaacatgttgtagagattttaatggtttctgtcaaagctgtggcttcttataagtagatgcgtgagatttttcttttttttggttatttaaatgaaagtttctgtgttatcgttacaatctgcaaac

SEQ ID NO: 3384 - DNA, 412 bp, Glycine max
  modified_base (345)..(345): a, c, g, t, unknown, or other
  modified_base (392)..(392): a, c, g, t, unknown, or other
gacagcaaaacaattttcaaactcaattaccattccataacctaaatctcctctttgtttccgagtcagagagcaatggcacgtaccaagcaaaccgctcgcaagtccaccggcggaaaggcgccgaggaagcaattggcgactaaagccgctcgcaagtcagctccggccaccggcggagtgaagaagccccaccgcttcaggcccggaacggtggctctgagggagatcagaaagtaccagaagagcactgaacttctgatccgaaaactcccattccagaggctcgtcagagaaatcgctcaagatttcaaaacagatcttcgtttccagagcagcgctgtntctgcgcttcaggaagccgcagaggcttatctcgttggactcttcgnagggacacaactctgcgcta

SEQ ID NO: 3385 - DNA, 260 bp, Glycine max
ttccgggcctacacacgcgtcaaaccggtcgacagaaagggacttacgggtaaatgtttccgtcactcttcgtctcttaccgactactgtacacgctctccctatacgatacaatactacatacgtgtacagtctacgttatcatcactcaagtgggtctcgttgcgtcttctcctggctctccgttctctattgtcttcccagttttattcacttgctcgccatttccaacgctcgccagttgcacatctctcattgaa

SEQ ID NO: 3386 - DNA, 373 bp, Glycine max
cgtacgctgccagaaaacaacaaaaggggggggccccaaaacccttaacacaattaaaagtacaatttgcagggatggcctcaacctcctcctccacactctctatatcctcttcatcgacccttgttgatgccaatgctccaagtccaagacaatccccacaatgtgtctcccctccacctgttcactctccttggaagaccactgctttctgtatgtcaattcagttattacaactcctttgtcttataactcaacttcattatacactatggtttgattctttcaggtcgcaggattgcaagcaatgttatggcaatggctaccaccagagacgcacccgcagcagaagttgccacgaccgagctctctg

SEQ ID NO: 3387 - DNA, 300 bp, Glycine max
gattgttggcttgtgctctgctcgtgcctctagggttatcatatctccatttccatttcctctctctcagtttccaagaatcttaagctatgggaaagtcttacccaaccgtgagcgctgattaccagaaggccgttgagaaggcgaagaagaagctcagaggcttcatcgctgagaagagatgcgctcctctaatgctccgtttggcatggcactctgctggaacttacgacgtgagctcgaagaccggtggtcccttcggaaccataaagcacccctccgaactcgctcacggcgcta

SEQ ID NO: 3388 - DNA, 354 bp, Glycine max
gacaactaaacacactagctatagctagaatcccctccaatccctctttgtctttgtgcttttctttagttctttccaaaacagcaacaatgatgagttgccaagcatggcctgaacccatagttcgagtccaatccttagctgacagtggcctaagctcaatcccttcacgctatattaggccacactcccaaagaccctccaacaccacttcttttaaactttcacaaaccgaacatgatcatggtcacggtcgagagactcgtgaccatgatcatgttaacatccccgttattgacctggaacatcttttctcggaggatgaaatcctccgagaaaagatattccgacacg

SEQ ID NO: 3389 - DNA, 262 bp, Glycine max
ggatgaccctcaaccaccctaagggaccttcttccaaattcccaatttcatctgccgttcgatttcagactcttcattcgggatttggcacaacgagatcatggctcgcattcagtcgatgcgtgctcgttcggctgttctcgtgcgtccagtgatcagttccgtgtcagtcgatttaagcttgcatgacaggtgaaggcccggatcttgcagagctctcagccatgggtcaagacatacttaccacagcaagtggaagatg

SEQ ID NO: 3390 - DNA, 357 bp, Glycine max
gacccttaacctctctgctgcgtttgcttctcctccacccatccacaaacgaacacacactttgattgagaatggggcgtgttcgcacaaagacagtgaagaagtcctcgcggcaagtgatcgagaggtactactctcgcatgacgctggacttccacacgaacaagaaggttctggaagaggtggccatcattccctccaagaggctccgcaacaagatcgcgggattctccacccacctcatgaagcggatccagaagggtcccgtacgtggaatctccctcaagctgcaggaggaggagcgcgagcgccgcatggacttcgtccccgatgtctccgccatcagaaccgaacaga

SEQ ID NO: 3391 - DNA, 391 bp, Glycine max
taaaaaagaaaagacaaaaaccgcattgagtggggcctgccctaaaatggcccttacagagcttctctatcaagagctgctagttggtggttgaggagtaataggttccgcataagctacatttcgtgggggaggcacctatccagtacttccgaactcgtctttcatctacagacattgggtcgctaaagccaatagttcggtgtccgggcaacagccaagccactcatctttggttgcagcttcggcggaagcctatgctttcagttcagttccattccttggttctccggttgattgccctgcccgcgtcacaccttaaaaagctttggaacggcagtttcacttacttctcacggacattggaccttcttcaaactggcctttgaac

SEQ ID NO: 3392 - DNA, 142 bp, Glycine max
ggctgtgagtgagacaccgatagatagatagcgcggcataacctaaacctatctttcttctctccctgtgtgtgcgcgtcaacggcaaacagaaggcaccatggtcactgccaggactgtgaaggatgtttcacctcatgag

SEQ ID NO: 3393 - DNA, 360 bp, Glycine max
gaccctagctcgcgttcttcgttcgtcttttacatcaggatggagtctcaggtgaagcacgcacttgttgtcaaagtaatgggtcgtactggattcagaggacaggtgacccaggttagagtgaagtttctggatgatcagaaccgtcagatcatgaggaatgttaaaggaccagtgagagaaggagacattctcaccctagtcgagtctgaaagggaagctagaaggttgcgctaagagggtccttctttcttgatctttatggtagttagtcggtgctaaaggttatagcaccctatcttgtcttggatctattttcattcgaattatggcttgagttttgctgttttgagtcgaagc

SEQ ID NO: 3394 - DNA, 392 bp, Glycine max
ggggtttctccacacattctttatctaccaatcttcttccactactttcccttcgttccctctcactctcttcatttgtaagctttttgcgctagggttttctctgcaatctcttgtactcgaagttcgttccttcttccggatctcaatctatggatatccgcaagaggggaagacacgaaaccggcttcagcttaaatggaggattcaagagatccaagcaagaaatggagtccttatcaactggtgtaggaagcaaatcgaagccatgtaccaagtttttcagcactgctggttgcccaattggtgagggctgccacttcttgcactatgttcccggtggttataatgcagttgcccatatgatgaatttaacagctgcagcacctcct

SEQ ID NO: 3395 - DNA, 367 bp, Glycine max
ggattgcagcgtcactgttagttattgtatcctagaggaccctatcttctcccacccccttcctatattacataaccttgcatttcattgcatgcccttcttcttgttctgatcttttggggtgtgcgtgtgtgtgaggttgattgattgattgtttgtttgttccttcatcaacacaatgaagatatctgatgagaacagttctaaaccaatcaaccctacaagttttcaaggagggatagaatgtgtggggaacagaaagatggggcagaacagaagggctttaagcgtgatcaatcaggatctggtggcggaagggagaccttacccttgtgttgttaacaagagggcagtggcagaaaaacac

SEQ ID NO: 3396 - DNA, 324 bp, Glycine max
gatccaaatccaccccaacacaaatcttagccgctattgatttttcctcttccatttctcttactttctcagcctttttcgattacccatttggttatttcgccctaatggctcttgctccatccaaagtttccaccttttctggtttttctcccaaacccagtgttgggggtgctcagaaaaacccaacttgctctgtttctctgagctttttgaatgagaaacttggaagcagaaaccttagggtttgtgcctcaacggtgcctctcactggggtgatttttgaaccgtttgaggaggttaagaagagcgagcttgctgttc

SEQ ID NO: 3397 - DNA, 372 bp, Glycine max
gaacatgccgaaaagtagtaccaagatggcttcagttgtgtatctcctctttggcttccatctcattgttatcatgtcaagttcctttaccgcaactagtgaagtgtttgcaaaacagtatccatccacagaacccgtggaagagaaactgagccaactccacttctatttccataacaacataacgggggaacacccaactgctatgaaaactgttttgcctcctaaggggtccattcatggttttggggctacgtacatgatggatgaccctctaactgaaggaccaagtccaacttcaaagcttgtgggaagatctcagggaatatacgctttggcttcagaacatgagcctgggttgctcagggtgac

SEQ ID NO: 3398 - DNA, 396 bp, Glycine max
  modified_base (370)..(370): a, c, g, t, unknown, or other
ggttgtcaagcctgccgagaaaaccctagttcgcttgcagtcacacaagaggccaatcctattcatagctcgagatgggtgaagaagtgaaggtagttgttccagaatcagtgttgaagaagcgcaagagggaggaggaatgggcgttggccaagaagcaagaactcgatgctgccaagaagaagagagccgagagccgcaaactcatctacaacagagctaagcagtacgctaaggagtacgatcaccaggagaaggaattgattcggttgaaacgcgaggccaagctgaaaggtggtttctatgtggatccagaggctaagctgttgtttattattcgcattcgtggtattaatgccatggaccccanatcaaggaagatcctgcagttgttgc

SEQ ID NO: 3399 - DNA, 306 bp, Glycine max
agtgcatgtaattcatattcataaagagaaaacccttagccaacacaaccatcatggccagctctgctattcaatactcaccaatcaatgcttacattgcacttcatcaccccactaaattcttccgcaagatcagttcaccgggcatcggtctcaataatattcaccgcaacgtccctagtgttcctcagattatttggtatggacctgatcgtcctatctacatctgtccaatcacggagcaggttcgatcatatctgacttgacaattctttggtaactacagatgcgacactgatgcattat

SEQ ID NO: 3400 - DNA, 181 bp, Glycine max
  modified_base (120)..(120): a, c, g, t, unknown, or other
cgggactccgcagctgcagcactcaaaatcctagagaggacgagagaacctgcaactttcggcaaccacagaccatgacattcaagcgcaggaatggaggtcgcaacaaacacggccgcngccatgtcaaattcatccgatgctccaactgcggaagatgctgccccaatgacaaggccat

SEQ ID NO: 3401 - DNA, 322 bp, Glycine max
  modified_base (291)..(291): a, c, g, t, unknown, or other
gaacaacatggtgaaactggtggagagaattacttgccaaaagcttacgttagaaccaagaggactacttaatggagcaaatcagttggaagaacttgtagccagcttcccaactggcttatctgagtgtggagaagcattatcaagccttaggagtaagagaacgagtactgtttgtgatgaatgtctatggtttaagaaatctgtctttagtcaacttgtgtgttttgttattcagttctcagcaataaactgctctggcaatctagtttcatgtccaaaagagaaatngagaaaaagaaaaaaaaaaagcggccgctct

SEQ ID NO: 3402 - DNA, 326 bp, Glycine max
gattgccaaagtaatcattagtgcagtataatggtggaggttggagtggtgtggagcagcctctggagtctggccatcaatgcagacctgtagctgagtttgtcatgtagcagggattgtggcttctaattgcagccactatggttgacagggaaattcccttcgttacccctgtttttgtgtgagggctaaactactttttgggaaataggcgttgggcactagattcagtgtttctctatctcgaggatgaacagaagaaataccgaagagcagcacacctgtttccaccaaattgttatcaaggaagaagaaggttttcgggt

SEQ ID NO: 3403 - DNA, 293 bp, Glycine max
gacaactgagaaaggcaagaagcagccgtgtgggtcacctcattggactgacttcaccgcagaaatgggacggaactgcacatccgcaattcactctctcccgataacgccacagcacagtttctttgtaattcacagtacaatcaaatcgcttgtccatctaaacatgggagaatatgcttcgagaaccaatcttagctactgtccagattatcgcattgacgaggactccatagatgacatgcctttaacaagtgaccccgaatgctatgacgatgatcgccatcttaaac

SEQ ID NO: 3404 - DNA, 152 bp, Glycine max
  modified_base (97)..(97): a, c, g, t, unknown, or other
gattgttgttgctattatcatccgcagctgcttttattcgcaccgcaaacagtgggccatggccgtcggaaagaacaagcgcatctccaaggggaanaagggtggcaagaagaaggcagctgatccctttgccaagaaggattgggatgaca

SEQ ID NO: 3405 - DNA, 71 bp, Glycine max
gactctttatttctcgttttctctctctacactcctttcagcacagcacaacacaacacaaaaccctttcc

SEQ ID NO: 3406 - DNA, 353 bp, Glycine max
  modified_base (346)..(346): a, c, g, t, unknown, or other
cccacgcgtccgcccacgcgtccggacgacagaaggggacaacacagaacaaaaacaaagaaaaaaaaaacccttagccaacacaaccatcatggccacctctgctattcagcaatcagcattcactggtcaaactgctctgaagcagctcaatgagttcgtccgcaagaccggtggcgccggcaaaggtcgcactaacatgcgccgcaccgccaagagtgctcctcagagcatttggtatggccctgaccgtcccaagtacttgggtccattctcggagcagattccatcatacctgaccggagaattccctggtgactacggatgggacactgctggattatcnagctgac

SEQ ID NO: 3407 - DNA, 363 bp, Glycine max
gatccacacctctctctctctctcagaatttctatctatctcttgtttcaatttcaacaacggttactcctttttcgttttgagtttcaatcaagccatcatcatgtctaccgcatcgcaacccaaggccaagaaaacggcgtcgtccaggaagcccctctcccaccctcccttcgccgtgatgatagcaaaggcgattgcgagtctgaaagagagaaccggttcgagccaatacgcgataaccaaatacatcgaagggaagcacaaggagttgcctgcaacctacaagaagcttgtcctcgttcatctcaagaaatctgttgctgctggcaagcttgttaaggtgaaaaactcctttaagct

SEQ ID NO: 3408 - DNA, 359 bp, Glycine max
ggtgagacgagggtaaggtcgcgttgtgttgcgtcgtgtcgtgcgctgttcctctgtctgtcgtttttgttttcagaccaaaccctagctccgcatcgcaaccatgtcgaccaagcaaggtggaaaagctaagcctttgaagaaacccaagtctgataagaaggattacgacgaggttgacatggctaacattcagaagaaaaaggaagaggagaaggcgctaaaggagttgaaagccaaggcgcaacagaagggaagctttggaggttctgggctcaagaaaagtggaaagaaataagggctctttatcatgattgtatacatccaatattgagccctgtagtttaaaatacatgata

SEQ ID NO: 3409 - DNA, 319 bp, Glycine max
ggtgcttcgtctcagatcattctgcgcaggtaagacagagagaaagaactgacctcagcggcggcggcggcggcaacagaagaacaaccaccaccacacacaatgggtcgcgtgagaacaaaaacggtgaagaaatcctcccgccaggtgattgagcgttactactcgcgcatgaccctcgacttccacacaaacaaaaagcttctcgaagaagtggccatcatcccttccaagaggctgcggaacaagatcgcgggtttctccacgcatctcatgaagcgcatccagaagggtcccgttcgcggcaatctcctcaagc

SEQ ID NO: 3410 - DNA, 301 bp, Glycine max
gagcgaaacagagagtgatttcagtgagtgatcggtgttcacttgatctcatcataatcgtcagcgtcaattgaagaagatgccgatcagaaacatcgccgtcggaaggcctgaagaggcgactcaccccgacacgttgaaggcggctttggctgagttcatctcaaccttcatcttcgtgttcgccggctcaggctccggcatcgcctacaacaagctcaccgacaacggcgctgccacccctgccggcctcatctccgcctccatcgcccatgcattcgccctcttcgtcgccgtctcc

SEQ ID NO: 3411 - DNA, 333 bp, Glycine max
gatggttgcatgaacatggcaggtttcgcggcaaacatcggcttcaacatctcgtcccactttccctgtcgcgttttttcaattcaccggagtatttggaagtttcagattgtctgcttgaagagaagagagtatagttcttctgttcctattaggtacatttccagcacatcctgcagggtgaaaatacttgaaactgcactgccagtgaaaagccttggatattgtagctgtcctgatgttaatgtgctcaagataaatggtggaaaagatgtgcaggcaacaattgcacattgtgaaatttctcaagacccgaatgaaatttgccctgac

SEQ ID NO: 3412 - DNA, 313 bp, Glycine max
taattagtccttttgggccgttgtgcaaacgaaagtgaagaaagagttgcagttgcagtagagaaagagttgttgttacaatacaattaacttacatcccaatagagacagcactataatgttgcttttggggggttgggttggggtttccattttgaagaaacaacaaaagttctttatcctgaaactgcatgaggagccacagttggtgttgatgataagcaagagtgctacctggagacaaacactcacgtacaattgcatgtcatgcatggtttattgtgaacagtgtcaatccatgaagaagaacatc

SEQ ID NO: 3413 - DNA, 362 bp, Glycine max
ggaggtcatcttgttggtccattcgtgcggtaacggaaggagacaataagcgtctccgtcgcttaaattgccgagaacttcattacccattatctgttacagttctacgctctcgctccaaaccccacttcagatttggtttactggaaggaaagtgcttgaaggacccaatctacacgagagatgcaatggcaataaacacacacatgttagcttcaatgtgttattattgctgccactgtgattaatgagtaagtcactgtgtcaaaggatatagagctgttttcttccagtgcatctttggtttgagatttatgtagttttctctgaaaagtgattactagtttccctcaaacaataat

SEQ ID NO: 3414 - DNA, 365 bp, Glycine max
gatcatcaataggtgttttcatttgggattcaaactcaccatggtggacgccttcaaactttgcatcttccttcttgcgtcgatctgtgctttcctagtcttttctaatccagtgctgtgtagtgataaggaggacagtgtattcaagggaatcaacagctacaggcaaacacggagcctggtacccctgagccaagtttcgaaggcaacatgtttggctgatgaagttgcagaagaaatagagaagatgccctgtgaaaacgtgaaccaatactacccttcatctgttcctggtagtgggaacctcaaaatcccaaacttgcagaagcacattaataaatgtgacattaactttcaaacacaca

SEQ ID NO: 3415 - DNA, 411 bp, Glycine max
  modified_base (397)..(397): a, c, g, t, unknown, or other
ggagagaagttattagggtttttgagtgcggcggtccaaacactcttctctgcagcttttgcctacaactcccttcaccatggctgaacaaaccgagaaagcttttctgaagcaaccaaaagtgtttctcagcacaaagaagactgggaagggaaagagacctggaaaaggtgggaaccgcttttggaagtccattgggcttggatttaagactcccagggaagccatcgaaggaacctatattgacaagaagtgccccttcactggcaatgtttccatccgtggccgtatcttggctggaacatgtcacagtgctaagatgaacaggactattattgttagaatgaattatctccattttatcaagaagtaccagaggtacgagaagaggcactcnaaatatcctgctca

SEQ ID NO: 3416 - DNA, 364 bp, Glycine max
  modified_base (353)..(353): a, c, g, t, unknown, or other
ggggttattggacacattcttcagcgactgcgtttttggatcggaacctcttctgcggcgtagcaatgggacactccaacgtttggaactctcacccaaaaaactacggtcctggttctcgcacttgccgtgtgtgtgggaatccacatggactgatcaggaagtatggccttatgtgctgcaggcagtgcttccgtagcaatgccaaggaaattggcttcatcaagtatcgctaaaagagcagttgtcaactacggaccaatattgtgttctggcactaggatgttttgaggatgttatgtttgaagaaacttgagactttcttttttcatctaattaattatcagacgtantttgtggtact

SEQ ID NO: 3417 - DNA, 79 bp, Glycine max; identical to SEQ ID NO: 6

SEQ ID NO: 3418 - DNA, 304 bp, Glycine max
gagcgaaacagagagtgatttcagtgagtgatcggtgttcacttgatctcatcataatcgtcagcgtcaattgaagaagatgccgatcagaaacatcgccgtcggaaggcctgaagaggcgactcaccccgacacgttgaaggcggctttggctgagttcatctcaaccttcatcttcgtgttcgccggctcaggctccggcatcgcctacaacaagctcaccgacaacggcgctgccacccctgccggcctcatctccgcctccatcgcccatgcattcgccctcttcgtcgccgtctccgtc

SEQ ID NO: 3419 - DNA, 405 bp, Glycine max
  modified_base (324)..(324): a, c, g, t, unknown, or other
ggagttcagttgcagaccttcacatggcaaaatcattcttcacttagttaggaaccgaaccatggctataacgttcggtttagtgactcctaactccaacactttgtgtctcactctcaccacaccacccctcatcgccaatcatcgtactactaatgttgtgttctctggtcaaagtgtcttcagctatggacacactaatctttcttattcacaccaaagggcttcttcctttgccactattgtctgttctgctgctaataaaccatcctcttcttctgaaattagctctacagccaagataaggagcgaggttctctctcnctttcgttcagttaggatgttcttttatattgcttttgttgcaagtggtgctcttgggggaatcatagcaaccacacaact

SEQ ID NO: 3420 - DNA, 372 bp, Glycine max
  modified_base (216)..(216): a, c, g, t, unknown, or other
gttaaatggcccattataaagccttctaatttgcactttgtctctctctttccgttcccttgatgtaatggctttatgccgattcgcttactcttattctcctgcttctgctttcaccatttttcgtttcccgaaatacccttcgaaacacactaaattctccttgctaccactctcattctcaacgatgggagctcctccagaaggctatcgtangaacgttggtatctgtctcatgaacaatcacaaaaagattttcgcggcttcgaggctcgacattcccaatgcttggcaaatgccttaaggtggtattgatgaaggtgaggattcaagaaatgcagctatcaaggagttacgagaagagacaggagt

SEQ ID NO: 3421 - DNA, 304 bp, Glycine max
agcgaaacagagagtgatttcagtgagtgatcggtgttcacttgatctcatcataatcgtcagcgtcaattgaagaagatgccgatcagaaacatcgccgtcggaaggcctgaagaggcgactcaccccgacacgttgaaggcggctttggctgagttcatctcaaccttcatcttcgtgttcgccggctcaggctccggcatcgcctacaacaagctcaccgacaacggcgctgccacccctgccggcctcatctccgcctccatcgcccatgcattcgccctcttcgtcgccgtctccgtcg

SEQ ID NO: 3422 - DNA, 357 bp, Glycine max
  modified_base (322)..(322): a, c, g, t, unknown, or other
gaaatctatttcagtttgaattttgaaagtgagtgtggcgtaccgtgtacgtatctgcagaaagtgaatgaatggtaatgggggaagaagggtgcaaggtatgtgttacaggaggcagtggttacattggttcctggctcatcaagaagctactggccaagggctacacagtccatgcaactctcagagacttgaagaatgagtcaaaggttggcctcttaaagagccttccacaatcagaaggaaaactggtgctgtttgaagctgatatttacaacccaaatgattttgaccttgcaattgaaggctgcaagtttgtgtntcatgttgctactcccatgatccatgaacctggct

SEQ ID NO: 3423 - DNA, 309 bp, Glycine max
cgccgagcctcccccggaggagaaggaggagcccaaacctgaagccaaggctaagaaaaccaaggaacccaaacctaaaaaggtttccagaccacgcaaccctcccactcatccttcctacgaggagatgattaaagacgcaattacctcgctgaaggagaaaaccggttcgagccaacacgcgattgcgaagttcatcgaggagaagcacaagcagcttccaccgaacttcaggaagcttcttctctaccatttgaagaaacttgtagccgctggaaaactcgtcaaagtcaaaggctccttcaagct

SEQ ID NO: 3424 - DNA, 383 bp, Glycine max
gatacatagctatctatttatctatagcaagtgcgtcaagagacacgtggtaccctagctagagtgccattctgtggtttctttctttctttctttctgcatcacatcacaatttgcattgcctcgtgtcctttttcttctttgctctccaaaaatctcacacacacaggtatctagcaaatgggttctcaccaacaagaaccatggctattggagaatgggaaaccaagggttttgaccaaggagaccaggcatggccgttctgcacacagaatgtcctccacctctttgcgcaagaaatctagccgaactcttgtctcaaaggttccatgtgccactctcagaaactttcttcaaaatttgcaaaggttaatcctgggaac

SEQ ID NO: 3425 - DNA, 283 bp, Glycine max
ggtccctctgcgtttttgacaccgtgtttgttgttgtgtgtgttttccgcggaaaatcaagatgggtatcattgaaaagatcaaagaaattgaagccgagatggctcggacccagaaaaacaaagccacagagtatcatctcgggcagctcaaggcaaaaatagcaaaactgaggacacaattattggagcctccaaaaggttctagtggaggtggagaaggatttgaagttacaaaatttggtcatggacgtgttgcactgattggatttccaagtgtgggg

SEQ ID NO: 3426 - DNA, 397 bp, Glycine max
gagggttacacgccgtcgtcgctgtttttgtgtgtcgcttcttcgtaggtgcagctgcaatggtgaagggacgccaaggagaacgtgtcagactctacgtgaggggtacaatccttggatacaaaaggtccaagtcaaaccagtatccaaatacatccctgatccaaattgagggtgtgaatgccaaagaagaagtagcatggtatgctggcaagaaaatggcctatatctacaaggctaaggtgaagaagaatggaagccattaccgctgcatatggggcaaggttacaaggcctcatggtaacagtggtattgtccgtgcaaaattcaagtcgaaccttccacccaaatcaatgggagcccgagtaagagtattcatgtatccaagcaacatatg

SEQ ID NO: 3427 - DNA, 380 bp, Glycine max
gaccaccctcctaaccaatcaaaattcatgcatacccgtcacactcactctctactcattttccctcaacttagcaaacaagttaggttctctctctctctcaccaaaaacgcttcagatgaccctcaattgaaccaagagcactcatatcctcttctgaaacacacaaattcgttaaccaccaagtaggaaggaagagtcactctaaaatctttgcactagttttgtgttgtgcttgcaaggcttggaagcttacataatcttaaccacctcttcctctaattttcatgtagcagtgaaatctatggtcagcaggtctttttggtgaacgcaaccctggaaaccatggatcatactacggggtaaagagatgacactat

SEQ ID NO: 3428 - DNA, 363 bp, Glycine max
gagttgtctgcaacagagtaagagggcaaaaccctagctttagtgtcttcccgcccatctcttgcaatctcatagattttagcagccatggcgagtaccaaagttcagagggttatgacccaacctattaacttgattttcaggtttcttcagagcaaagcgcgcatccagatttggctctttgagcaaaaggatttgaggattgaaggccgaatcattggttttgatgaatacatgaatttggttcttgatgatgctgaagaagtgaacgtcaagaagaaaagcagaaagacattagggaggatccttcttaaaggagacaacataaccttgatgatgaacacggggaaaatgatgaacaac

SEQ ID NO: 3429 - DNA, 340 bp, Glycine max
acttacaaatattttgaggtcattctggtggatgttgcccacactgctgtaagaaatgatccaagaatcaactggctctgcaatccagtccataaacacagggaactgcgtggcctcacttctgctgggaaaagcaataggggtttacgtggcagaggacatctctaccacaaaaatcgtccatcacgcagggcaacctggaagagaaacaataccctctcccttcgtcgctaccgttgattttgttgcagttatcgtatgttgcttcattttctgagtatttggaggaaaatcgtcagttttggatccctgaatcatgccttttttccccgataatgtc

SEQ ID NO: 3430 - DNA, 53 bp, Glycine max
gagacctcatgtcaggcggggctacccgctgagtttaagcatatcaataagcg

SEQ ID NO: 3431 - DNA, 335 bp, Glycine max
gaattcagttgaaggaattgttgtaactttttgattcctaaattctctaaaattcgaaattctaatttcgttaggggaaagagattgtttgtgtgtgagtgagtatggctggaaaaggcgagggtcctgctatcggaatcgatttgggaacgacgtactcttgcgtcggcgtgtggcaacacgatcgtgttgaaatcatagccaacgatcagggtaacagaactaccccatcctacgtggctttcaccgacacagaacggttgatcggcgatgcggcgaagaaccaggtcgctatgaacccaaccaacaccgtttttgatgctaagcgtttgatt

SEQ ID NO: 3432 - DNA, 243 bp, Glycine max
aatcatgtgcactcaattaggctctctcgcgctggaacgtcgaccattcatgaaggcacaaggctcttttccgatctgcgcagcaaggcctccccttggaaaatcaccacgcggttcaatcgactatcgagcaccgcccaaacaccttagtatgaacgttttcatctaaactcacagtggctctcaattcctggttgtgctgaatccgtcggaaactccttctgcatcgacaataccaacata

SEQ ID NO: 3433 - DNA, 318 bp, Glycine max
gagcgaaacagagagtgatttcagtgagtgatcggtgttcacttgatctcatcataatcgtcagcgtcaattgaagaagatgccgatcagaaacatcgccgtcggaaggcctgaagaggcgactcaccccgacacgttgaaggcggctttggctgagttcatctcaaccttcatcttcgtgttcgccggctcaggctccggcatcgcctacaacaagctcaccgacaacggcgctgccacccctgccggcctcatctccgcctccatcgcccatgcattcgccctcttcgtcgccgtctccgtcggcgccaacatctc

SEQ ID NO: 3434 - DNA, 379 bp, Glycine max
ggacccaaaatacaaaccttcatttttctcattcacggctataaataatctcaaaaacccttccaaaccctcacttcgccttccgcttccggcgccatatcgcgtatctttctctgttctattcctacgatggagttttggggtgccgaggttaaggttggtgagtctgttaaggtagatccagccgaattcgaggcatgcatacacctttctcaggctgctcttggtgaggcaaagaaagacaaatcaaatgaaccagttgttctctacttgaaagttggtcaacagaaatttgtcttgggaaccctttccagggagaaaattcctcaaatacctctggaattggttttggaaaaggagtttgagcttttccacaact

SEQ ID NO: 3435 - DNA, 368 bp, Glycine max
  modified_base (305)..(305): a, c, g, t, unknown, or other
  modified_base (354)..(354): a, c, g, t, unknown, or other
  modified_base (359)..(359): a, c, g, t, unknown, or other
gatcatcaaatcaaaaaccctaattcccaaattctctcatttttcaagtttcaaccaagaaaagcagcaacaatgtcgggtcgcggaaagggtgggaagggtttaggaaagggaggagcaaagaggcatcgcaaggtgctccgcgacaatatccagggaatcacgaagcccgcgattcggagactggcgagaagaggtggcgtgaagagaatcagtggtttgatctacgaagagaccaggggcgtgctcaagatctttctcgagaacgtgattcgcgatgccgtgacgtacacggagcacgctangagaaagacagtgacggccatggatgtcgtttacgctctcaagaggcanggaangactctcta

SEQ ID NO: 3436 - DNA, 333 bp, Glycine max
  modified_base (296)..(296): a, c, g, t, unknown, or other
atcatcgccagtgacaaaattgcatgcagaaggtataggaacagtttgcagcaggttatacattggaacagccaagaacataccaccatcagagcttattgatacaactggtgctggagatgcatttattggagccgttctctatgctatctgtgccaacttcgagccagagaaaatgctgtgctttgctgctactgtggcagcttccaagtgcagagctcttggagcaagaagtggtctcccttaccgcatagattcatgcttggcatccttcatgcagtagcaatccttactancactgaagtgaaccaaatgggttagaataaatttttt

SEQ ID NO: 3437 - DNA, 341 bp, Glycine max
gaggcaggtacgcaacaaagcgatagcagtgtggaagtatttgcagaactttgtttcccaacctccattgcctccgcttctacctcgctaccatgatcattcctgagaagaaccgcaaggagatctgcaaatacctcttccaagagggagtttgctttgcgaagaaggacttcaatttggcgaagcaccctgagattgacgtgccgaatctgcaggtgattaagctgatgcagagtttcaagtctcgcgagtatgtgagggagacttttgcttggatgcactattactggttcctcaccaacgatggaatcgagtttctcagaacttaccttaaccttcct

SEQ ID NO: 3438 - DNA, 397 bp, Glycine max
ctgtgccgagattaccattgtgctttgctacttccaattgtgcagtgaggattacaattggtggtggagatcttacctcactgctgggtcctctgcgctgtaccttttcctctactcaattttctacttctttaccaagttggagatttcaaagctggtctcgggcatcctttactttggatacatgataattgtttcatatgccttctttgtgttgacgggaactatcggcttctatgcatgcttctggtttgttcgcaagatctactcgtcggtgaagattgactgatttcaggcatcaatcatataatatgaccgatgagtacaaccggaaactgatactgagatgactcaaccaaatactgccgggaagttacctttcccccaactctgaaaa

SEQ ID NO: 3439 - DNA, 311 bp, Glycine max
  modified_base (304)..(304): a, c, g, t, unknown, or other
gcatacaatagagaccagcttttgcttctttgtgaacatggagatgaggaaatcatgtggcttcttcttcttgctcctcctccttgtctttgcttcccaggtggtggtgcagacggagggaagagtgtgtgagtcacaaagccacgggttccatggtttgtgtaatagagaccacaactgtgctttggtctgcaggaacgaaggtttctccggtggcaggtgcaaaggcttccgccgccgctgcttttgcaccaggatttgtcgagatctcatcaaacactactcttgccatgcaaattaatanatcatag

SEQ ID NO: 3440 - DNA, 303 bp, Glycine max
  modified_base (290)..(290): a, c, g, t, unknown, or other
gacttctcaagaaaattagggtttgcagtcactgctttgtttagatcagaaccagatcgcgttctcttcttccattggcaaacatggcaactcaaatgagcaagaagagaaagtttgtggcggatggagtgttcttcgccgaactgaacgaggttctgacacgtgagttggcggaggacggttactccggcgtggaggttagggttacgccgatgcgcaccgagattatcatcagagccaccagaacccaagccgttctcggtgagaagggaaggagaattagggaactntactcagtggtgc

SEQ ID NO: 3441 - DNA, 324 bp, Glycine max
agcttacaagattgcggctcatgctgctgatttagccaaaggccatccatatgctcaagcttgggatgatgaattgagcaaggcaagatttgagttccgatggatggaccagtttgctttgtcattggatccgatgacagccacgtccttccatgacgaaaccctaccggcagatggtgcgaaagtggcccatttctgctcaatgtgtggccctaaattctgctctatgaagattacagaggatgtgaggaagtatgctgcggaacatggctatggaactgatgaagctttgcagcgtgggatggatgctatgagtgctgaatt

SEQ ID NO: 3442 - DNA, 337 bp, Glycine max
gacgttcacattcaggaatcgttttcttcagaaatttgccatcgttgagggaagcgcgagagccttcgttgttcaagatgagagctaagtggaagaagaagcgcatgaggaggttgaagaggaagcgccgaaagatgagacaaagatctaagtaggtgcttgaacaaggagtggagatgatgtgcttttccatctgctaccagcttcatgacattttatgctgtcatggctcttatgatgatcttgaggtctagtggcgaggggagcttccatcttgactttagtttagctttactggtctaaagattgctgttttagtgtgggttaagttatgata

SEQ ID NO: 3443 - DNA, 307 bp, Glycine max
aacaatagcctgacaaagggtttagccataaaatcgaatccatcattgatttgagatattgataaggtgaatactcatttctcgtcaatgctaggcataatgcgggtatagggacctaaaaaagattatcttttcttcctatcttatgaactttaaggtgtatgaagtgtcatttcctatcttagattttaattttagtaggtagataaagagtccatttaacttaagttgatctaggccagaagcagacctacgtcaagataatccttctttgaaacactttggtagtgctcttagattgtaatcc

SEQ ID NO: 3444 - DNA, 363 bp, Glycine max
gatcaccactttcattttgagcgtgtcgtgtctgtttctgagttatggcacagaagacgtttctgattctcagaaattaacatgaagggcatggttttgaagtaaataaatccagctgtgtcttgattgatgagtttggaagcattgcatttacattttgcagtgttggtgggtagttgttgctctctatagccatttctgaagtacactatagtgtgtatgtgtgtgtgtgatagagtgtcgagtttgaagattaagctacaaaggtttgtcctgttgtcttagttgctcattcttaaagaaacagtggggaacaacagtgatagctcttgacaggatcaagtctttgaagatttagcaact

SEQ ID NO: 3445 - DNA, 386 bp, Glycine max
ggaggcgacggtaaggtcgcgttgtgttgcgtcgtgtcgtgcgctgttcctctgtttctcgtttttgtgttcagaccgaaccctagctccgcatcgcaaccatgtcgaccaagcaaggtggaaaagctaagcctttgaagaaacccaagtctgataagaaggattacgacgagattgatgtggctaacattcagaagaaaaaggaagaggagaaggcgctaaaggagttgaaagccaaggcgcaacagaagggaagctttggaggttctgggctcaagaaaagtggaaagaaataagggctctttatcatgattgtatgcattcaatattgagccctgtaattacagttgctaccatgataacttctcttattattgtggcctact

SEQ ID NO: 3446 - DNA, 275 bp, Glycine max
gacagacaagggtttcttccgggttcacgtttcacaatcactttttgcgcttctctcactcactcactcttcttcttcctcttcgtgtggttttctttctcgaactcgaacgaagatgcgtgagattcttcacatccagggagggcaatgcgggaaccagatcggagccaagttctgggaggtggtgtgcgcggagcacgggatcgattcaacggggaggtaccaaggggacaacgagttgcaactcgagcgagtcaacgtctactacaatgaag

SEQ ID NO: 3447 - DNA, 330 bp, Glycine max
actaataaccaaagtgaagctaatgctaaaattaactcacaaatcaagctttgtcattaaaaaatcacctaaaaaccattttaaggtccaacgccttgaatgatcctctttgcttttatttggttaaacgtggacttttgaaagcctatagccaacgcataactttgtcactactttcaagaaaccaagatatcattaatggtccaatgccttaatgttttctcttctttcaaaaagaatcaaaagatcatttaaatggtccaaagccttaaaacgaccttttttggtcataacatatcttgcaaaaaagataaaaacacttaacaaacg

SEQ ID NO: 3448 - DNA, 337 bp, Glycine max
gattcggagctgggtttgttttcggcctttgatcttcgattctctctctttttctctcgcgaaaaccgtatcagcaatgtctggagaatcagccagcgctattcacaagggtcaagtcgatctcttagacttcattgactggtctggggttgaatgcctcaatcaaagctccacccactctctccccaatgctatcaaacagggttatagagaagacgatggtttgcatctggagagtgatgcagacgagcagcttttgctctatattcctttcactcaagtcgttaaactttattcctttgttatcaaaggtcctgaagaagaagggcccaagaca

SEQ ID NO: 3449 - DNA, 160 bp, Glycine max
gaagaaagtagaaaggatttggattcgaggcttgctaggtgaagtcaacaaagaaagaaaaaaagctttctccgagaaagcttctgttcacgtcagggtccggggtaggcttcttcattgagattgggttggtgttcagtgtgaatgcatttccagtgac

SEQ ID NO: 3450 - DNA, 354 bp, Glycine max
  modified_base (331)..(331): a, c, g, t, unknown, or other
  modified_base (343)..(343): a, c, g, t, unknown, or other
ggcattaccactatgcgttaagttaaccatttctagcgttagggtttttgcttctcggaagattcgaaatggaagaagattacggctacagaaggacggcgaagatagcacttgtcgcaatcatggtgctcgcttccgtcgccgtctttgcattgctcgttgtcttcgcttactactgctacatcctcaacaaggtctcgaatcgtcgcaaaagcctcaaaaaagttgaagatgccaaccttaacgagaaaagtgactttgcaaatctgcaagttgttgctgagaaaggacttcaggtgtttactttcaagcagctgcattctgcaacggngggattcagcangtcaaatgtca

SEQ ID NO: 3451 - DNA, 355 bp, Glycine max
  modified_base (255)..(255): a, c, g, t, unknown, or other
  modified_base (308)..(308): a, c, g, t, unknown, or other
gaactacaacacaagagactgtaccttctttttgaagtctctgtgggttggggttttggagtgggagcaccaatggctttcttgatggcaattgtagtagtaggtgttgtcttggtgctctgtttttgctctgctctcttgaggtggaatgaagtaaggtacaggaagaaaggtttgcctcctggcacaatgggttggccactttttggggagacaactgagtttcttaagcaaggtccaaacttcatgaaaacncagagagcaaggtatggcagttttttcaaatcccacatactgggttgtcctancattgtttccatggattcagagcttaacagatacatcctaatgaatg

SEQ ID NO: 3452 - DNA, 394 bp, Glycine max
  modified_base (378)..(378): a, c, g, t, unknown, or other
gatttctcttcactccttcgttcactcttcttctcttgcggctagggttttagcgcagcttcttctacatttaaggaagatgggtaaggaaaaggttcacatcagtattgtggttattggccatgttgactctgggaagtccactaccactggccacctgatctacaaacttggaggcattgacaagcgtgttattgagagatttgagaaggaagctgctgagatgaacaagaggtctttcaagtatgcctgggtgcttgataagcttaaggctgagcgtgaaagaggaatcacaattgatattgccttgtggaagtttgaaaccaccaagtactattgcacagtcattgatgcccctggacacagggatttcatcangaacatgatcactggg

SEQ ID NO: 3453 - DNA, 379 bp, Glycine max
cccacgcgtccgagcggctaccctaacctcgtcttcctctctactaatttcagctatggccgacgaagctgtggttgttccagatcccacccagatcgatgtcaagctctttaaccgctggagcttcgaggatattgaggttactgacatttcactggctgattacattggagttgcggcatccaagcacgccacatatgttcctcacaccgccggaaggtactccgtgaagcggttcaggaaggcgcagtgccccattgttgagaggctcaccaactctctcatgatgcacggtagaaacaatggcaagaaactcttggctgttaggatcatcaagcatgctatggagattattcaattgttgactgaccaagaaccc

SEQ ID NO: 3454 - DNA, 332 bp, Glycine max
gaagtccgaagcgatcggcaggcagtgatagcaaagagaagatcatttcataatcagactcacctaactccgccatggctgctgttccctctactttcgctctaaccaaatctgcattgtccataaacaagctggaccactctctggtcaagatcaaaccatacagcttctctctgaatctaaaccgtctagggaggatggaaacatctttaaccagaaggcctctaacaatccaagccacatatagtgatggtggaaggcccagcagtgctagtgtatttgttggtgggtttctcttgggaggattaatagttggcactcttggttgtgtg

SEQ ID NO: 3455 - DNA, 302 bp, Glycine max
caattagagggtttaaattgattctttctggagaattagatggtcttcctgaacaagccttttatttggtaggtaatatcgatgaagctactgcgaaagctacgaacttagaaatggagagcaatttgaagaaatgactttaaatctttgtgtactgacccccaatcgaattgtttgggattcggaagtgaaggaaatcattttatctactaatagcggacaaattggagtattaccaaatcatgcgcctattgccacagccgtagatataggtattttgagaatacgtcttcttaaagacc

SEQ ID NO: 3456 - DNA, 335 bp, Glycine max
ggaagagagagagagagagagagagagtcctgaaacttgggtgcgattccttcactcacaacaacaacacatcactatggctcttctgagtcgagcctcttcacgcttccctcagctggtttcccctcaaagggtagtttcactccacacaacgctcccatctctgaacgcatccccatccacagccacgcctacaccatatgccccgccaccgcctccgtccgcttcctctcccgccggcgtttcgaaggcggcggagttcgtgatctcgaaggtggacgatctgatgaactgggcccgccgcggctccatctggcccatgaccttcggcctcg

SEQ ID NO: 3457 - DNA, 343 bp, Glycine max
gggagtgaacaacatcaacatctctgattcttacaagaagaatcgcattcaggtctccaacaccaaaaagcctctcttcttctacgtcaatctcgccaagaggtatatgcaacagcataatgaggttgagctctcagcactaggaatggctattgctacagtggttactgttgctgaaatcttgaaaaacaatgagcttgctattgaaaagaaaatcacgacatcaacagttgacatcaaagatgattctagaggcagacctgtccaaaaggccaagattgaaatattacttgggaagactgaaaaatttgatgagttgatggccgctgctgctgctgctgct

SEQ ID NO: 3458 - DNA, 309 bp, Glycine max
tcagacagctacaaaagggtaaggctgcggcaatacgacatacggggagatctgctgcttctcattgttgaaaaggaagcccaacaggttgcacactggcatacgtttacatccaagttgcggcagcatcaacagcatggcctgccgttcaaatagaacgttcatcaagttcagttttcgaggcgtggatcacgatgcacttctcgacatgtccaccgatgaactcgtcaagatgttcactgcccgcgctcgtagaaagttcgacagaagccttagcacatcgcacatggtcttgatcaagaatctcca

SEQ ID NO: 3459 - DNA, 414 bp, Glycine max
  modified_base (392)..(392): a, c, g, t, unknown, or other
  modified_base (398)..(398): a, c, g, t, unknown, or other
gagatagatctgcttcttgttgttggaaagaaaccctagcaagcggaacaatggcagacgttgaggtcgatgtggcggctgcagcagcagcagggcagccgaagaagagaacgttcaagaagttcagtttcaggggcgtggatctcgatgcgcttctggacatgtccaccgatgaactcgtgaagatgttcagtgctcgcgcacgtagaaggttccagagaggcctcaccagaaagcccatggccttgatcaagaagcttcgcaaagcgaaaagagaagctccaccaggtgagaagccagaacctgtccgcacccacctccgcaacatgattattgtgcctgagatgattggtagcattattggagtgtacaatggcaagacctttaatcanggtganatcaaacctgagatga

SEQ ID NO: 3460 - DNA, 126 bp, Glycine max
gactctctatgcaatgaacaaagcaactgaagttgttgctttttagcttcaacaatttctcagtccaaccaaccgcatcagtcaaatctagcggcatatctcagccttcactctcacaacacttgc

SEQ ID NO: 3461 - DNA, 354 bp, Glycine max
gcattctcattgccgtcacacagagagagaagagacaatgaagtttaacccaagggtttcctcaagccgtcgaaagagccgcaaggctcacttcaccgctccgtcgagcgtgcgtcgcgtcctgatgagcgcgcctctctcgaccgatctccggtcgaagtacaacgtgcggtccattccggttcgcaaggacgacgatgtgcatgtggtgaggggaacctacaagggccgcgagggcaaagtggtccaggtctatcgccgcaagtgggtcatccacatcgagcgcatcatccgcgagaaggttaacggctccaccgtcaacgttggcattcacccttccaaggttgtcgtcac

SEQ ID NO: 3462 - DNA, 411 bp, Glycine max
gggttggaattgtatggaatggagggttagctaagaagaaaataggagagggttagtttttaggggctgcggaaaaaagatagtgagtggtggccaatgggagcggagaggttttcccacgaccatgctcccttgattctgggtctccagccatccgccctggtcgacaacgttgccaccgtcgattggtccttgctccatcgcattcccggcgagcgcggtggctccatccctgtccaaattgaagaactggaatccatactgagagaggttaaatccaaatcccacgatgacatcaaaactctcgctggtggcagcgttgccaacacaattcgcggtctcagtcgcggttttggaatttccaccggaattattggagcttatggagaatgacaacaaggggcagctttt

SEQ ID NO: 3463 - DNA, 340 bp, Glycine max
gatccatttctcgcaacaacgcttaacctctctcattccccatttcctcacctccttcaaccgctgctaaattctagggttccgaaatggacgctggcggaaagatcaagaagggcgccggaggtagaaagggcggcggcccaaagaagaagccggtttcaaggtccgtcaaagccggtctccaattccccgtcggaagaattggccgttatttgaagaaaggaaggtacgctcagcgtgtcggtaccggtgctcccgtatacttggctgcagttctcgaatacctagttgccgaggtgcttgagttggctgggaatgccgcacgtgacaacaagaagaa

SEQ ID NO: 3464 - DNA, 377 bp, Glycine max
gacatataaaaccttctttggcgcctgacatagagaagaagaagagagagtgatggagtgcgtattcggattggtgggtaatgggtttgcgatcgtggtggctgattcatcggcggtgcacagcatcctcgtccacaagtccaacgaggacaagatcatgctcctcgattcccacaaactcattgccgctagcggcgagcccggagacagggttcagttcacagagtacattcagaagaacgtcgccttgtatcagttccgtaacggcatccctcttaccaccgccgccgccgccaatttcacgcgtggcgaactcgccactgctctccgcaagacccatactctgtgaacatccttcctgctggttatgacaaaga

SEQ ID NO: 3465 - DNA, 382 bp, Glycine max
gatttttatttctatccaatcatccatggccgaggaaccccaaaaaccagcctccgctgaagaagtggtcgctgttcctgcggagaacccaccatctgaagccgaagctgaaaacatcgaagcagagaaggcccagagtggtgtagaagacaagatttcccagtcggtttcgttcaaggaggagaccaacgtggttggcgacctccccgaggcgcagaagaaagcccttgatgagctcaagaagcttgttcaagaagcgctcaacaaccatgagctaactgctcccaagccagaaccggagaagaagaaaccagcagcagagaagaaggaggaagttgaagtgacagaagggaagaatgaagctgaagtcatagaagagaag

SEQ ID NO: 3466 - DNA, 313 bp, Glycine max
ggccttgtttcagttctttctttggtcactcagtgctctctaacctagttccacatttttccactcaccaagtctctatctttcatctcacatttcgcttcattcacatcacttctctgatctgtctcttcactctctttgacccacatcaaattttttaccttttgttcctctctctttctctccgttagtgctttgcttcaaatcattctcattaaacccaatgcttccatctgggtctaccctctttctggatttttgttaactgattttgtaatatgggttgttttttatatgccaaactttgattcaa

SEQ ID NO: 3467 - DNA, 396 bp, Glycine max
taaaatatattgacgaacataatttttaaataacatttaaaaaaatactaaaaattattaaaaatattatttatcaaataattaaacaaacattttaactcataaaaaaagaaaaaatgaattgaaataatttgtccagcatattcattatcgaaaaagttagtgttcatgggactactctatttaatttggcatatctttagcatgtataaaacggcactctaaaagtaaatcatataaaatgattgaaaaaatttatttcacatgcttcgtttatgatccttaagcaaggctgttaaaagaactgagagaattggactcaaccaaacggtccaaaccataaataatcagatattttaaaattgataagaaaaatatgagtaaattgggcttttt

SEQ ID NO: 3468 - DNA, 296 bp, Glycine max
  modified_base (215)..(215): a, c, g, t, unknown, or other
gattcaccacaaccctctctctatattccattgccacccagttttgaatatatttttattccttctttgtttcttcactttcttccatacacataaccatgtcttctcagactgttgtcctcaaagttggtatgtcatgtcaagggtgtgctggagcagtgaacagggttttgggaaaaatggaaggtgttgagtcatttgacattgatctgaangagcagaaggtgacagtgaaaggaaatgtggagccagatgaagttctgcaagccgttttcaaatctgggaagaagactgca

SEQ ID NO: 3469 - DNA, 346 bp, Glycine max
gacggttttgtgctgttgtcgctgcgcatcctccatagtctccttcctctacatctcaacatgaagccatggggaatacacatggaatgggagctgctcgcaagctcacagtctcaccgcacgaggcaaaagtgggctgatatgtcatacggtatatcccatcttgggaatccatggcagaaatcttttgccggttcagcccatgccaatggaactgtccttgaaagcataggtattgtatctggacatcccaactctgctattcgtaactgtgccatagttcaacttatcaataatgggtaataaattgcagcttttgtctctaatgatggatgcatgaactaca

SEQ ID NO: 3470 - DNA, 383 bp, Glycine max
cttcccaggcctacgaacgcgtccgacaggaggacagaaggggatggctgctaccatcatcacatgcaagctctcactgcttttaagccttctctcagtttcactattgctgggtgtgagttcatcagatacccttcagaatgtaggggcaattcccccaacatgcaagcgcatagagtgtcccagctatgatgtcattcactttggcaacggctacgaaatccgtcgctataattcacccgtttggatttcgaacagccccattctagacatttctctggttgaagccacaagaaccggcttcaggaggctatttgattatattcaaggtaagaataactacaagcagaaaattgagatgacagcgcctgtgatcagtgaag

SEQ ID NO: 3471 - DNA, 256 bp, Glycine max
ggaagtatgcctggaaagcaaaagtgaggggtagtggtagaaggataaggtgactataaaccgtggaaacggtggtgtagtgtgtgagtgtcattgtgaagttggaaacaatgctagcttcttcgctctccttcctccattcttgcacattcccctcttcctcctccttattgtcaatttcaactccaaaccccaaaccctctcacttcctaactttcgttgtccaagccaaagacaagacccgcaaggaaaacaa

SEQ ID NO: 3472 - DNA, 272 bp, Glycine max
ggaactgccaatatagtttgcaggcagaatacttctgtggacaagcctgaagaagctactgtcattgagatgaatgaacctgtgtccttgacatttgctttgcgatatatgaactcttttacaaaggcaacgccattgtccaacacagttaccattagtctgtcaaatgagctgccagttgtagtcgagtataagattgctgagatgggttatgtgcggttctatttggctcccaagatagaagaggatgaagaagatacgaaacctcaagt

SEQ ID NO: 3473 - DNA, 151 bp, Glycine max
gacggcactcgttttcgttctcgcactggtttaaagatctctgccaatgacgctaacagctgcgcaaccaaagatgcagaacgacgaaagacagatcactgagctttacattcctaggaagtgctccgccacaaacagattgaatatcgct

SEQ ID NO: 3474 - DNA, 248 bp, Glycine max
taatttgggaattattgctcccatcgccattggtttcattgtcggcgctaacattttgttgggtggggccttctctggagcggccatgaaccccgctgtgacatttgggcctgctgtcgtgagctggacctggaccaaccactggatctactgggccgggcctctcatcggtggtggaatcgctggccttgtttacgaggttgtctttatcagccacacccacgagcagcttcccaccactgactact

SEQ ID NO: 3475 - DNA, 354 bp, Glycine max
gtcgaatatattcacaagcatgtttggagctgtgccgtgagatgaacatcatggcaattgatctgtggtctgcactccagaaaagggttgactggagagaagtttgcttcacggatggaattcatcttacttctgacgggagcaatatagtggcaaaagaggtattgaaggtcatcaaagaagcaaactgggaaccttgcctgcactggaggtcaatgccaactgaatatggagaagattcaccttatgatcctgttggccctgatggtaagacaagtttaaatatctccaactggatcttccttgaaaccaaggaatgggactagagttatgtgtatttgaaaactatagaca

SEQ ID NO: 3476 - DNA, 397 bp, Glycine max
  modified_base (373)..(373): a, c, g, t, unknown, or other
ggatgcagatgcagcctatcatggcagcctactaccccaacaacgtcaccactgatcacattcaacagtacctggatgagaacaagtccttgatcctgaagattgttgaaagccagaattctggcaagctgagcgagtgtgcagagaaccaatcaaggctgcagagaaatctcatgtacctagctgcaatagctgattctcaaccccaaccatctccaatgcctggtcagtatccttctagtggacttatgcagcagggagcacactacatgcaggctcagcaggctcagcagatgtcacaacaacagctaatggcttcgcgctcctcactcttgtactcccaacagcctttctcagtgcttcaacagcagcnaagcatgcacagcaacttggcatg

SEQ ID NO: 3477 - DNA, 369 bp, Glycine max
ggttctagtgtgtgattgtttgttgttgtaactcgttcttcttcttttgttgttctgtggttgtgtttgttttttctctcacctgaaaatgtcttgctgcggtggtaactgtggttgcggaagctcctgcaagtgcggcaacggctgcggaggctgcaagatgtacccagacttgagctacactgagtcaaccaccaccgagaccttggtcatgggagtggcacctgttaaggctcaatttgagggtgctgaaatgggtgtgcccgctgagaacgatggctgcaaatgtggaccaaactgctcctgcaacccctgcacttgcaagtgaggtgttgggagagcatgcttcaagcagagatagcccttaat

SEQ ID NO: 3478 - DNA, 53 bp, Glycine max
gagacctcaggtcaagcggggctacccgctgagtttaagcatatcaataagcg

SEQ ID NO: 3479 - DNA, 326 bp, Glycine max
gagggtttttgtcgtcgctactaagagttgctgcttcttcagccactccgcacctcgcagcctctgtgccctcaacaaccatggctgaaatcgaaactaccgttccagatcccacccaaatcgacgtcaaactcttcaatcgctggagcttcggggatgttgaggttaatgatatgtctctggctgattacattggagtgtccccatcaaagcatgctacatatgttcctcacactgctggtaggtactcagtgaagaggttcaggaaagcgcagtgccccattgttgagaggctcaccaactctctgatgatgcacgggaggaac

SEQ ID NO: 3480 - DNA, 225 bp, Glycine max
gcgcgctagaattccttataaataacagggttatatgcttatgcgttggggaaacatgacaatgagtgttcttggggatagtaaaaatgtaaaatgggttgggccaatccaatcactcaatttaatccaccatttgttcggtgtgtgcctaaagaagtcaactattttatctgtattatctgcattatccattttaactttattatcaattgaggtcttttttac

SEQ ID NO: 3481 - DNA, 387 bp, Glycine max
gtccttctccttcctcctcgtcttctctcttctccttcctctcaagtattgcaacctaaaagaatcactttctttaccacagcctttttcacacccatgacatttcctctttgccaccgcattcccttccccaaccttgcctgggtttgtatcccagacggaagttctgaaccaaatgcggtttcttggtcttttttgccatctggttatgggaaaaatgggtttgtggaggaggtatttttggtgtttaatgtgatttgcttgttgtgttgttaagtgcaatgagtttacctcccccaatacgcttacgacatgttcaatgaagaagggggatttgaacttacgatggctgtggttagaaggttcgagtatggagaatttgttgtg

SEQ ID NO: 3482 - DNA, 316 bp, Glycine max
  modified_base (307)..(307): a, c, g, t, unknown, or other
ggcaaatgcttcattccaagatagttaggactctgtaagctgataaagacaacactcataccgttggaaagaaagatgctgctggccatgttgcttaatttaattcctgcttcctttggcctcttgaattttaacaaaaaccggaattcaaggattactagctccttcaatccgtcaaaatgggccggagttgacatcccccttgatcatgaagcatttgcagttccaaagggttataatgcacctcaacaagtgcacatcacgcaaggtgactatgatggaaaagcagtaatcatctcatgggtgnacacagaag

SEQ ID NO: 3483 - DNA, 381 bp, Glycine max
  modified_base (202)..(202): a, c, g, t, unknown, or other
  modified_base (313)..(313): a, c, g, t, unknown, or other
gagtacagaaaacgcagttctcaccatttccctctcgattgtgagacttgttgttgttaactgaacttttctgagcaagaatgtctgggcgtggaaagggaggcaagggtttgggaaagggaggagcgaaacgacaccgtaaggtgctgcgcgataacattcagggaatcaccaagcccgcgattcggcgtttggctcgtangggtggcgtgaagcgtatcagtggtctcatctacgaagagacacgtggcgtgctcaagatctttttggagaacgtgattcgtgacgccgttacctacactgagcatgctangagaaagaccgttacggcaatggacgtggtttatgctctcaagagacagggaaggaccctctacggat

SEQ ID NO: 3484 - DNA, 395 bp, Glycine max
gacacaccgtttgttctattcttaactcaacttctgctacccactctcttcttccaagtccaaccacgcttttctctacagtcatgggcaaggtcaagatcggaatcaacggatttggaagaattggccgtttggttgccagagtcgctctgcaaagagacgatgtggagctcgttgccgttaacgaccctttcattaccaccgattacatgacatacatgtttaaatacgacagtgttcacggacactggaagcatcacgatgtcaccgttaaggacgagaagacccttctcttcggtgacaagccagtcactgtttttggacacaggaaccctgaagagatccatgggggtcaactggagctgatatcattgttgagtccaccggagttttca

SEQ ID NO: 3485 - DNA, 327 bp, Glycine max
gagcatactttattctcgcttggttgcagcttcagcagcagcggcaagcaactccatccgcaatgggaatcgatttgaaggcaggaggtaagtccaagaagaccaaacgtacagcccccaaatccaatgatatttacctcaagctcctcgtcaagctgtaccgttttcttgttcggaggactggtagtaacttcaatgccgtcatcctcaaacgccttttcatgagcaaggtcaacaagcccccgctatccctctctagattgattcgttacaccaagggaaaggaggataagatagctgtggtagtcggggccgtgaccgatgaca

SEQ ID NO: 3486 - DNA, 116 bp, Glycine max
aatctaaattgattcaaccccatgtcctgcgtaaaaattcgcaatacttcatctgtgtatcattcacatacgtccatgcttttcattggttgcattgctcattgcattctttccgc

SEQ ID NO: 3487 - DNA, 240 bp, Glycine max
gacagacagacacacactcggttctgccttcacaaaaaaattatcgagatcccctttttctcctaagaaaagccatggctaagggtcccggtctctactctgacatcggcaagaaagccagggatctgctgttcaaggactaccacagtgaccagaagttcaccatcaccacctactcacccactggagttgctataacagcatcaggaaccaggaaaagtgaactgtttgtggctgatg

SEQ ID NO: 3488 - DNA, 272 bp, Glycine max
gaggaaaaggaaaggaaagggaagccaaagcgaaaccctaaccctagcggagagatggcggagcacttggcatcgatattcgggacggagaaggacagggtgaactgtccgttctacttcaagatcggcgcgtgcaggcacggcgaccggtgctcccggcttcacacgaagcccacaattagcccaacgttggttctgtcgaacatgtaccagaggcccgacatgagcatgaacatcgtcaccaaccccgattagccccaaccccaatctct

SEQ ID NO: 3489 - DNA, 225 bp, Glycine max
ggagacagggatttccatagctcgcaatacatcacacatgtctgagcacatccctgcgttaaaaaatgggagcaggttcttccatgggatctctcatcgacatccgtgggtgggaatgccgtgaagctgggcccatcagccccacaagtgggaaaggtgagcatgaggaaaaccgtcaccaaacaggtctcctcaggaaacccatggtatggcccataccgactc

SEQ ID NO: 3490 - DNA, 177 bp, Glycine max
tgccaaaaaaccaccaaaaggggaagctacgttcagcatccccataattgagaaagatgagcatgaagaaaacagtcaccaaacgaagtcccctcaagacacactatgatctgacaaaaccgatctccagtacttgcagccaagtctctgacgacccttttgtcctactctaatgcg

SEQ ID NO: 3491 - DNA, 367 bp, Glycine max
gacagcaaaacaattttcaaactcaattaccattccataacctaaatctcctctttgtttccgagtcagagagcaatggcacgtaccaagcaaaccgctcgcaagtccaccggcggaaaggcgccgaggaagcaattggcgactaaagccgctcgcaagtcagctccggccaccggcggagtgaagaagccccaccgcttcaggcccggaacggtggctctgagggagatcagaaagtaccagaagagcactgaacttctgatccgaaaactcccattccagaggctcgtcagagaaatcgctcaggatttcaaaacagatcttcgtttccagagcagcgctgtttctgcgcttcaggaagccgcag

SEQ ID NO: 3492 - DNA, 375 bp, Glycine max
gacaaccctagctagcagtccctcagcattgtgtgcccacaaagcagctccttttcctgttccgttgagagaagatgggattttgggggacgcgggtgatggagattgtgaagaagcatgattctggagggctggtttggaagagaatcaagctcaccaccacccgaaaagccaatgctaagaagcgtcttcttcgggtttggcagaatgaagctgtcctcaaagcctgttctgctactcccaacgaacctcaacctacaccagtggctacaccagtggctagttaagttcaagcccagccatctcaatttcattacttttcttttcccttcccttcacaaatattgtcactacttttacggcttcagttacata

SEQ ID NO: 3493 - DNA, 400 bp, Glycine max
gaacatttgtctctcatctttcaatttcaatcaacggttatacccttttctatttgagcatcatcatgtccaccgcagcgcagcccaaggccaagaaaacggcgtcgtccaagaagcccctctcccatcctaccttcgccgcgatgatagcggaggcgatagcgagtctgaaggagagaaccggttcgagccaatacgcgataaccaaattcatcgaaggcaagcacaaggagttgcctccaacctacaagaagcttgttctcgttcatctcaagaagtctgttgctgctggcaagctcgttaaggtcaaaaactctttcaagctcgcaccgactaagtctgctcctgttaaagccgctgctgctcccaagaagcccaccaaagctgcggctaagcccgc

SEQ ID NO: 3494 - DNA, 270 bp, Glycine max
gtcgctctgaccgggaaaagaaaaaccagctttcttcaagcacctagatttcctctctctctaaatggcgttctcttcttttctcggcagagtcctcttcgcctctgttttcatcctctcaggttaccaagaatttaattcttatggagttgttgggggagtcgcagtaaaagcactcagaccgaagtttggtgccattgcacatcaggtacattcgaaggttgactttcaacttcgagatattgcgatgcaatttttaggtggggtggg

SEQ ID NO: 3495 - DNA, 381 bp, Glycine max
gaagggaatgggtgggtctagcagtagcagcaaggacgcccaagaccttttccgcgctctttggtctgcttatgcttcaaccccaacaaatctcaagatcattgacctctacgtaatctatgccgtcttcaccgctctcatccaggttgtttacatggctttggtgggatcatttccatttaactccttcctatcaggagtactttcttgtgtaggaactgctgttcttgctgtctgtctcatgatccaagtgaataaagataacaaggaattcaaggatcttgcacctgagcgtgcttttgcggattttgttctctgtaatttggtgcttcatttggtgatcatgaacttccttggttaaattgggtcgtgtggctgttg

SEQ ID NO: 3496 - DNA, 251 bp, Glycine max
ggttcaaattcgaatcaagcgcttcgcctatgcttttgcctactgttcacactgtcactaccactgttcaagttctaactaaacacttcggcgcagtctgtggttctgcacatgatgtccctggcagtgatgggtccgaacgatgtcctgatgaccaaatccggtgcaattcgcatcatcatcatgctcgctagtggtccccgtgatatcatccttaccaaactcggtcacactcgcatgatcgagatgca

SEQ ID NO: 3497 - DNA, 350 bp, Glycine max
gagttcacattaagggatcgtcttctgcagaaatttgcgccatcgtcgagagaagcgtgagagacttctcgtttatgatgagagctaagatagtttagttgtcaagtcataaatcagtatcatcactttaaatttcattagaagctgtcaaaatgtcacggaagggtttgatggagcaagacctgagtaagttggatgtaacaaagttgcatccactttctccagaagtcatatctcggcaggctactattaatatcggcactataggtcacgtggcccatggcaagtcaacagttgtgaaagcaatatcaggtgtccagactgtgcgtttcaaaaatgagttggagcgt

SEQ ID NO: 3498 - DNA, 400 bp, Glycine max
gacacttactagtagtaagcatggagtcctcaaagatctatgcttacctcttcctctgcatgatctttctctcttccgccactcccattctcggttgtggctactgtggcaaaccccccaaaaagcacaagcctggtaaaacaccaaagacacccaaaacacccgttgttaagccaccagtcaccatccctcccattaatgttcctcccgttgttcttccaccaatagtgaagcccccaggtattctccctccaattccaattattaacccaccaaccacaccagggaagggagggaacactccatgcccaccaccaaagtctcctgcgcaggctacgtgccccattgacacgctcaaacttggtgcctgtgtggatcttcttggagggttggttcacat

SEQ ID NO: 3499 - DNA, 386 bp, Glycine max
gagcgaaacagagagtgatttcagtgagtgatcggtgttcacttgatctcatcataatcgtcagcgtcaattgaagaagatgccgatcagaaacatcgccgtcggaaggcctgaagaggcgactcaccccgacacgttgaaggcggctttggctgagttcatctcaaccttcatcttcgtgttcgccggctcaggctccggcatcgcctacaacaagctcaccgacaacggcgctgccacccctgccggcctcatctccgcctccatcgcccatgcattcgccctcttcgtcgccgtctccgtcggcgccaacatccccggcggccacgtcaaccccgccgtcaccttcggcgccttcgtcggcggcaacatcaccttcctccgcg

SEQ ID NO: 3500 - DNA, 356 bp, Glycine max
gaggaacaagaagcgaaaatataacaaataatttgtactttcatcaaaacaaaatcccgttgtatttttctcagatggctcgaacgaagcaaacggcccgcaagtccaccggcggcaaggcgccgcggaagcagctggcgactaaggcggctcgcaagtcggctccggcgaccggcggcgtgaagaagccgcacagattcaggccgggaaccgtggcgctgcgcgagatccggaagtatcagaagagcacggagctactcatccggaagcttccgttccagcgcttggtccgcgagatcgcgcaggacttcaagaccgacctccggttccagagctccgccgtctccgcgctccag

SEQ ID NO: 3501 - DNA, 319 bp, Glycine max
gacttcacaactcaaactgcttcattgcattattgcagataagatcaaccctactcccttcagattcgggccaagatggcatcacttcatgctaatgtgacatcagttgtttgcaagagtggcaaccatgcttctcaatcgaaattcacaagctcttcattcttgcctgggtttgatgttgttggtcgtgcttcaaatgcttggaagaaagaacttgtcccatcttccatttccttggtgcctagagccacactaacatttgatcccccaactaccaactcagacaaaaccaaacaaaggaagcacactgttgaccctg

SEQ ID NO: 3502 - DNA, 319 bp, Glycine max
ggggaaaccctaattctgcgtggtgagtgaaaatggcggtacccttgctctccaagaggatcgtgaagaagcgcgtcaagaagtttatacgcccccagagtgatcgcaagatctccgtcaagccaagctggcgcagacccaagggtattgattctcgtgtcaggagaaagttcaaaggatgcactttgatgcccaacattggttatggctcagacaagaaaacccgccattatctaccaaatggtttcaagaaatttgtcgtgcacaatgtgaaagacctggaacttctcatgatgcataacaggacatactgtgctga

SEQ ID NO: 3503 - DNA, 389 bp, Glycine max
ggattcggatagcgaaagcaatcccccacccctaattttgatttgtgtcgaggaaaggacaggtcttggaaccctaaccgcacctctctctttcttcccgtgtgcgtcaaagcgaagcaacgcgacacgatggtgttctacttcaaagcgcgccccgaagccggcgatttcaccatcttcatgggccttgacaagtacgagaacgaggaactcatcaaatacggttttcccgaagacatctggttccatgtcgataaaatgtcttcagcccatgtctatgtcaggttgcacaaaggccagaccatcgatgacatgagtgaaggtttactggaagactgtgctcagcttgtcaaagcaaattcaattcaaagaaataaagtgaacaatgt

SEQ ID NO: 3504 - DNA, 392 bp, Glycine max
gggacttgtgcgttgaagttatagagagagacgagtttggagagaagagtgaagaaggcaaatcgcgaagactagatctgatctgagagaatggctcctcggtctagcagcaaggacgcccaagaccttttccgcgctctttggtctgcttatgctgcaacccccactaatctcaagatcattgatctctatgtcatctatgccgtattcaccgctttcatccaggttgtttacatggctttggttggatcatttccatttaactccttcctatcaggagtactttcttgtgtaggaactgctgttcttgctgtttgtctcaagatccaagtgaataaagagaataaggaattcaaggatcttgcacctgagcgcgcttttgcggattttgt

SEQ ID NO: 3505 - DNA, 356 bp, Glycine max
gacacagacgaatattcattgcatttagatgcagcatcagcttataacaacaattaaacatgagtgcagccagcatagcttggtttgtggcatcaagcagtggagcagtggatgcattgaacgatcgattgggggtgtgcaagtggaaccatgcattgaggtcactgcagcatcaagccaggagcgtcattatctgctacaggcaagccaatcccttgtcatctgctacttcagctgcggtcgccaataaggtcaataggaccaaggacgagtccatgaggaaagtcatggacttgagctgttgaggtcacaatacatcaacgtttcactgtgtggactattcgaattgcattcat

SEQ ID NO: 3506 - DNA, 360 bp, Glycine max
taatttgggaattattgctcccatcgccattggtttcattgtcggcgctaacattttgttgggtggggccttctctggagcggccatgaaccccgctgtgacatttgggcctgctgtcgtgagctggacctggaccaaccactggatctactgggccgggcctctcatcggtggtggaatcgctggccttgtttacgaggttgtctttatcagccacacccacgagcagcttcccaccactgactactacagggggggaaatgaaaataacaaaaaaaaaattgtgtattattgaatttctctggaatcttcttctgtgtatggttttccttccttgtgttttcttcctaattcactttc

SEQ ID NO: 3507 - DNA, 395 bp, Glycine max
gaaagaaaaatgaaaatagtagaaaagaaggcattaggttaagagtgaaggcagtgagcgaaagagagcatagtaatacttactgagtgcttacagttgctgcgtcgcaaggtaccggcggcgacggagaactatcttctcaattttcgatcactgcattggttctgttgacaagggttttgttcttcctgacttgcatacttgatggcttcaaagttgcagaagttgcaggccacagcctctcaagcgtctcaatttgtatccagtcgtggaactaactactacaagcaattgctggaacagaacaagcaacacattcaggagcctcctacagtagagaaatgcaacctgttggcaaagcaattgttttacactcgccttgctagtattccgag

SEQ ID NO: 3508 - DNA, 388 bp, Glycine max
gggttgctttcacttcttcctctctgcttcttcttcttccttgccctctctcgctattgagcttttctttttaacacggaatatgagtgacacaaaagggttttgaggctttctatcactctaaagctcttagctcattcacctcttgggtggtgtggtctattatgtaaattaccatttgtgcaattttttctcagatctatccaacttctcttttttatcctttattctgtttgcaaatcgccatcatcaccatttgatttgcaagaccataatttttctgctttggctttcccctcttccacatcatttttcaattttttttcctctgggtgttttcttcctgagaaaattttgttctttttggctaccctccaagcagatccta

SEQ ID NO: 3509 - DNA, 364 bp, Glycine max
ggtagagactctattcaaacccacatctcagtctctatctcaagctacttcacagaaaatggcggtgcctctgctctcaaagaagatcgtgaagaagagggtaaagaagttcaagaggcctcagagtgacaggaaaatttccgtcaagactaactggcgcagaccaaagggtatcgattctcgtgttaggagaaagttcaagggatgcactttgatgccaaacattggttatggttcagacaagaagacccgccactatctccctaatggtttcaagaaatttgttgttcacaatgtgaaggatttggaactgctcatgatgcacaacaggacttactgtgctgaaattgccacaatatatcca

SEQ ID NO: 3510 - DNA, 375 bp, Glycine max
ggaagaaaacccagaatcaaatcaaaaggtaaaaaacaaattaaaagaaaaagggaaaagtatactacgcagaagaggtggttcaaaattcaatggctgagaagaaggaaatgattccgcaacaatttgacatcgatgccaaatgggacgcctgcattgatctcaccgtccgtcgcttcgtctactccgcaaccgccggtgcatttggcggtctcctatttttcaggagtcctgtgactcgatgggcatctattgcttttggtgctggagttggaattggatctgcatatgcagaatgttctcgtctgttcgatggacctccaacaaatttacccttacctaaggtctccgaaactgctactcaggactctgatt

SEQ ID NO: 3511 - DNA, 371 bp, Glycine max
gggatccgaggttcttaagtaacagaacacacaaaaccctagttagtgttagtgttcctcaagccaccgtaccgtgttgcctctctgcaatctacagccaaaatgcctttcaagaggtacgttgagatcgggagggttgcccaaatcaactacggcaaggaatatggcaggctcgtcgtcattgtcgacgtcattgatcagaacagagctcttgtcgatgcccctgatatggtgaggtcccaagtcaatttcaaaaggctttccctaaccgatattaagattgacattaagagggtccctaagaagaaagatcttgtcaaagccatggaggatgctgatgttaagaccaagtgggagaagagttcatgggg

SEQ ID NO: 3512 - DNA, 350 bp, Glycine max
gactcttttcattctttctctgttctcatttcatcttctacacgcgtttctaatcattattagactcgatctcaacgatgaaggcaacactgctttgtccttgttcttctgctcctctgattctcgacacgcatagcaaccgaacctcggcaacgagacacgcttccaccgttgtttgttgttcgtcgaggaatcaaccctacatcccgaagctcgagccttttagccgaaccaaatttgaaagggccgttaaggaccctcctttgatcgaaaaatccgagagagagatcttagattattgttcaacgcttgaaggagaccaatcctatagctgctggcaggcttatttt

SEQ ID NO: 3513 - DNA, 282 bp, Glycine max
gacagtgattcattttttcgaaaaccaaatccctaattttctgtctcttcaatggcgcctcagaaactgaccgattacgagcgcaaacggctcgagaacattcgccgcaacgatgaaatgatggctgcactcaaactccattccaaagctactcaactctccaacttcaagcgtccaagggtgggaaccaaatcctacaacatgaaatcggaaaagaaacccaaaaccgaaaccccaattgtgattaggcgctccctgcgaaacaagggaattttccgcaga

SEQ ID NO: 3514 - DNA, 335 bp, Glycine max
cgcgtcacgacgggctgccgagaaaaacgacaaaaaggggatcaacattcaagttcgcaccaaattttcctctcaaaatgtcacgccgtggaaaaggtgggaaaggtttgggaaagggaggagctaagaggcacagaaaggttcttcgtgacaacattcaaggaatcacgaaacctgcgattcgtacgttagcgagaagaggtggcgtgaagaggatcagtggtttgatttacgaggagaccagaggagttctgaagatattcttggagaacgtgattcgcgatgctgtaacctacactgagcacgctatgaggaaaactgttactgctatggat

SEQ ID NO: 3515 - DNA, 332 bp, Glycine max
gaagcctaaaaataaaatatcttgtcattcaattccactcacattcgccatatcgtcttctcccatggccgccaccgatgaatccctccgcaaatccctcgccgagaagcacgccgcagtggaagcccaaggcaacgccgtccgcgccctcaaggccgccaaagccgccaaacccgaaatcgacgccgcaatcgaagccctaaacgcgctgaagctcgaaaaaagctccatcgagcactccctcctcggcggctccgacagccgcgaggccttccgtcagtccgtggtgaacacccttgaacggcgcctcttctacatcccctccttcaaga

SEQ ID NO: 3516 - DNA, 254 bp, Glycine max
atgctcctgttttctcacagtcccacaacagcaatggtagcaatcacacacggagttaataacatcaacatctctgattcttataataagaatcgcattcaggtctccaacaccaaaaagcctctcttcttctacgtcaatctcgccaagaggtatatgcaacagcataatgaggttgagctctcagcactaggaatggctattgctacagtggttaatgttgctgaaatcctgaaaaacatttagcttgccat

SEQ ID NO: 3517 - DNA, 225 bp, Glycine max
ccgattgcttcatagaaatgtgtaaaaaatagaatcgctcttaaaagccgagtactctaccattgagttagcaaccccaatacaatttagaaaataacgtgggtgtatatatccaatcgcaataaaaacaataaaatgaaaagattgaattgtctaataaaatatcagacattcaaaaaaatagaaaaactcaaaatgttgaagtcgaattgattctcaacatac

SEQ ID NO: 3518 - DNA, 372 bp, Glycine max
gactcaccacttcaaaacactcataacacaaagcacaaagcaaagctcatccttgagttaaaaaatggcagcagcttcttccatggctctctcatccccatccttggctggcaaggccgtgaagctgggcccatcagccccagaagtgggaagggtgagcatgaggaagaccgtcaccaagcaggtctcctcaggaagcccatggtacggcccagaccgagtcaagtacttgggcccattctctggcgagcccccgtcctacctaaccggtgagttcccaggcgactacggctgggacactgctgggctttccgcagacccagaaaccttcgccaagaaccgtgaactcgaagtgatccactccaggtgggc

SEQ ID NO: 3519 - DNA, 166 bp, Glycine max
gggagggcgtgggcgagggaatcaagcagagcttgtactactatttatcttcatcctcatttttgtcgtcgtcgttcttcctttttccgttgttcatctggttcgtctcgcagggggagggcgggagtcgatcttgcgcgcttcgaggcttttcgaattgcgttca

SEQ ID NO: 3520 - DNA, 376 bp, Glycine max
gatccaactctctaaacaacacattaacctttctcattccccatctcctcaccttattcagccactgctaatttctagggttccgaaatggacgctggcggaaagatcaagaagggcgccggaggaagaaagggcggcggccctaagaagaagccggtttcaaggtccgtcaaggccggtctccaattccccgtcggaagaattggccgttatttgaagaaaggaacgtacgcccagcgtgtcggtaccggtgctcccgtttacttggccgcagttctcgagtacctagctgctgaggtgcttgagttggctgggaatgctgcacgtgacaacaagaagaacaagattattccgagacatgtgccattggctgtga

SEQ ID NO: 3521 - DNA, 405 bp, Glycine max
gaagctcagtgatcacaacctacgccgagtgaaaccccaatcccaatacactcccaactcacaaagccatgtctccaggtcctgttgtcgacgcttcccctgaggttgaagcagagcaacaacttccctccgtcgatgacgcaacccagttgaagaaatcccaaccgcaggaggatgatgctcccgttgtcgaggacgtgagggatgatgacaaggacgacgacgatgaggacgacgacgacgatgatgaagatgacaaggaagacgatgctctaggtggtgctgagggttcaaagcagagcagaagtgagaagaagagtcgaaaagcaatgttgaagctgggactaaaacctgtcaccggtgttagtagggtcacaatcaagagaacaaaaaatattcttttct

SEQ ID NO: 3522 - DNA, 326 bp, Glycine max
taatacaacattttaacatgtgttggagttcagctccaaaactgatacacatttgtggatccatgatcgatctctcaaagcattgttgtccaaaaaagagagaaatgttttgaatgaagtgttattttcagccctgaggagggtttagaaactgaggcagctttttcagacacagcaaaaacaaaattgtaacagagggctttggcatttaattttgtggcagagtgtggcacacgagagggcatggcatcttcatatatcaaattacttttggagacagtgaaactaccataatgcaaaagccaaaagcagacaatttttttttc

SEQ ID NO: 3523 - DNA, 399 bp, Glycine max
gagttatttattatctgaagttgcgagagtgaagaaatggcgcaagacttggcattggatttggaggagcttcgccgcctccacagcatcgccaaaagacctcgaaccctctctcttctctcctccgaaattcgtaacctcgaaaagttatcgtcagaggaagcttctgcgcagattccggcgccgatttcgaccggaactaaagtggcgccttcacctgcgctgaagtatgcggcactcgcgtcgttcagttgggaccaggatagtgacaaagttaagatatatgtgttaatggagggaatcgatgagaataaggttgaatccgagtttaagtcgatgtcattcgatgttaagttccatgatgttcaagggaagaactaccgatgtgcaatatcaaaa

SEQ ID NO: 3524 - DNA, 395 bp, Glycine max
gggggaacacccaactgctatgaaaactgttttgcctcctaaggggtccattcatggttttggggctacttacatgatggatgaccctctaactgaaggaccaagtccaacttcaaagcttgtgggaagatctcagggaatatacgctttggcttcacaacatgagcctgggttgctcatggtgacaaattttctcttcactttgggcatttacaatggcagcaccctcagcattcttggcagaaaccctacatttataaaagttagagaaatgccaattgttgggggtactgggatcttcaaatatgcaaggggttctgctgtgcttacgacatatgtgtatgacatcaccggtggtgttgcaattgttgaatacaacgtgactgccatgcatg

SEQ ID NO: 3525 - DNA, 217 bp, Glycine max
gactccgcagctgcagcactcaaaaccctagagaggacgagagagcgtgcaactttcggcaaccacagaccatgacattcaagcgcaggaatggaggtcgcaacaaacacggccgcggccatgtcaaattcatccgatgctccaactgcggaaaatgctgccccaaggacaaggccatcaagaggtttttggttaggaacattgttgaacaggctgc

SEQ ID NO: 3526 - DNA, 117 bp, Glycine max
ctctgaggatgatgagaaaatataactttcattcttccgagtttcccatgaggaaagtacatggagacctcaggtcaggcggggctacccgctgagtttaagcatatcaataagcgg

SEQ ID NO: 3527 - DNA, 71 bp, Glycine max; identical to SEQ ID NO: 3405

SEQ ID NO: 3528 - DNA, 259 bp, Glycine max
caaaggggaaagagaatgttaccaattaacccacactttaccaattattcactcactcactcactgttgcagcaacgccattgtgtgaaatcaatgttttgagatttgttgggaacaatggggagcgtttcgtccgaagatggttccgaccgttgtgggagttatagcctcagtgctgatgtcagcgagtccgagagctgcagcaacttctccgcacaccgcttcgactccgacggagcttccagctccgccaacctct

SEQ ID NO: 3529 - DNA, 302 bp, Glycine max
gaaacactcttttgctaactcccaagagctcaccacaacagcatgatgcacaccaattctcatgctgaatattgggccatacttgtctgccaaggatcctaacgttatgtaaggtggctgagtggaaccacctaagaggtgaagatgaccgatcaaaggccagccaccgcctgctgccggtggcttgcgggcagaacctgctgtagcccttttgatgaagtaagaaactaagattatgccaataattgcggcaactgatgcctccaggtactgaatcctgagacccatgacagtttgagaaa

SEQ ID NO: 3530 - DNA, 62 bp, Glycine max
caaaaaaccacaaaaagggaagaaaaattccaaaaaaaggctccaaaatttggcaagttaac

SEQ ID NO: 3531 - DNA, 425 bp, Glycine max
gctcctttgtttgattagggttttttcgcttcttctattcactctgttacggtgcaacctagcagcctccaaatccaatggcttcagagaagagactttcgaacccaatgagggagataaaagtgcagaagctcgtcctcaatatctctgttggtgagagtggagatcgtctcaccagagccgccaaggtgttggaacaacttagtggccaaaccccagtgttttccaaagcaaggtacactgttcgttcctttgggattagaagaaatgagaagattgcatgctatgtcactgtcagaggtgacaaggcaatgcaacttttggagagtggtttgaaggtgaaggaatatgaacttctcagaaggaacttcagtgatactggttgctttggctttggtattcaagagcatatcgatttgggaatc

SEQ ID NO: 3532 - DNA, 84 bp, Glycine max
ggattgattccctcattcttcatccatagacatggccaccgtcacttctgcagccgttgctattccctcattcactggcctcaa

SEQ ID NO: 3533 - DNA, 395 bp, Glycine max
  modified_base (382)..(382): a, c, g, t, unknown, or other
gactcttacaaacataacacattcagatactcactcacctgtttttagtagtttcttccctattttctgttcataactcagtttgtaactatgactgctgaggttatggctcaagaggagacacaagcagctgaggttgttgttgctgttgagcccctgaaagaggagaaggttgctgaagaaaatgtgaaaccaagagagtcatcagtggaagcatccaaacccaaaatggtggagaaaagctcttcttacaaggaagaaagcaactacctttctgatctcaaggagtttgaaagaaaggctttgagtgaactcaagtcaaagcttgaggaagctatcttggggaacaccctttttgagccaaagaaggaggctttgctanagaatgaagagaa

SEQ ID NO: 3534 - DNA, 375 bp, Glycine max
  modified_base (257)..(257): a, c, g, t, unknown, or other
gctccttttcttctctccagacaatttctctcgcctctctctctctacaaatccttcattctttcttctcttcgctgctcactgtagccatggctttcagagtatgatgagcgggagggggaaatgtctcttctggcatgggtgttgctgagcataatgtaaacaccttcctggaattgcagaggaagaaagttcatcgctatgtgatttttaaaaatgatgagaaaaagaaaaggttatcgtttgaaaaactgganggcctgctgagagctatgatgatttcactgcatccttgcctgaacatgattgccgatacgctgtctttgactttgattttgtgacatctgagaactggcaaaagagccaaatcttttt

SEQ ID NO: 3535 - DNA, 351 bp, Glycine max
ggaagagaggatactgcagcagcaggaggaatttgacactcctgaaaaggagactggaaaaaattgagttgcacctgtgttcaaagcaagggtgtaaagaggaaaatgagtcaaaagatgtggagtcaagtgggtttatgaggaggctattgcgtgtttacaaaagtgaggatgatcctggaatggtgaagtcaatggatttggacatggatgatcaagaaccccttggccgcaaggtaaacatcgttggtggagttatgtgcaggagtgattacaatgttaaacaagactcttcaaatcaacctggtccgaatgctttgactggtgtaaaagaagatgctcaagtttttt

SEQ ID NO: 3536 - DNA, 138 bp, Glycine max
  modified_base (13)..(13): a, c, g, t, unknown, or other
aaacctaaccggnaggagtatgcaagatcttaaaaatcacaaaccggcagtcctaaaggttcaaacctaacttatccttgaatgcaagttcaaaccccttcaatatggtcaccaaatttcatttcattggccttcgtt

SEQ ID NO: 3537 - DNA, 426 bp, Glycine max
gactttcacaccaccttcttcttcttcttaagggttcccattcaatttatatttctttcacttcatggaaacgtaaaactcttctctctcttcatctttctctgttcctcacaattcactaccccctacaaatatattcaaggtcccatttttctcatctgggtcatcaacttaatcatctctctcttgttctctatccaattaattgcttttccctctgagtttctctccaccttgttgttgttgcaacttgatttcatggttgcaaaatgaagtgtttcttctttaaggagaagagcaaatccgccccggaactgcacaagaagaaaacccccgccgtgaaccgcgccgcaaactccaccggctcagtgtcttcaccgaagagcgtgaaggacttgtacagagagaaagagcacagcttcagag

SEQ ID NO: 3538 - DNA, 335 bp, Glycine max
accacaccctcaaaaccatttccaactaccaactactctctctatcactctcccatggcttcctcttccctctttctctcactctctctcaccctttgccttgtttcctctctctgctatgctcacaaatcttccttaaccctacctgtgacaaaagacgattcatcccaccattacctaacaaccctctcttatggcacccctgttgagtctgcaaaattcgtgcttgatctccgtggttcaatcctctgggctgactgtgcatccagaaccaccccatcttccacccttgccccaatctttcaccgttcagttcgctgcctcacggcaaaggg

SEQ ID NO: 3539 - DNA, 413 bp, Glycine max
ggcgttccttctccttctgtccgctgcgactctctttccttccctctttttccgaatctgaatcgaaatggcttcggagactgagacgtttgcttttcaggccgagatcaaccagctcctcagtctaatcatcaacaccttctacagcaacaaggagatctttcttcgtgagctcatcagcaatgcctctgatgctttggacaagattcgatttgagagtcttacagacaagagcaagcttgatgctcagccagagttgttcattcacattattcctgacaagaccaacaacacattgtctatcattgacagtggtattggcatgactaaggccgatttggtgaataacctcggtactattgcaaggtctgggaccaaggaattcatggaagccctggctgctggtgctgatg

SEQ ID NO: 3540 - DNA, 290 bp, Glycine max
ggttcccaattcatcgtggcctccgcctcctttaacccccccctccaatcccaaatcgaaaaaaattcgttttaagttcccccaaaggaaccttaggttgcacaaccaaaggatttggaaccaatccccggtggaaaaattgcaaaacccaaatttcccccggccgttaaaaattatgaaaattaccatgtttgctatggaggtcaagaggaagagagaaaagctaattataccgatatggttaataaatactaagattctgttaccagcttttatgaatttggctgggg

SEQ ID NO: 3541 - DNA, 240 bp, Glycine max
cccacgcgtacgaccgctgctacgaagacacatcaggggacatctcagttcagatgtcacacaaccagagacagagtattcatacatattagcagtctcgtactctcgcatggagatttcggcgtctcaaattgtctctgtgtagctagctaggatttcgatgatattcagtttgttgagcgaacgagtttggatggggatcataatatgcagttcatggtgtacaccatttcgggtcct

SEQ ID NO: 3542 - DNA, 363 bp, Glycine max
gacaacacagaacataaacaaagaaaaaaaaaacccttagccaacacaaccatcatggccacctctgctattcagcaatcagcattcactggtcaaactgctctgaagcagctcaatgagttcgtccgcaagaccggtggcgccggcaaaggtcgcactaacatgcgccgcaccgtcaagagtgctcctcagagcatttggtatggccctgaccgtcccaagtacttgggtccattctcggagcagattccatcatacctgaccggagaattccctggtgactacggatgggacactgctggattatcagctgacccggaaaccttcgccaggaaccgggagctggaggtgattcacagcaga

SEQ ID NO: 3543 - DNA, 368 bp, Glycine max
  modified_base (349)..(349): a, c, g, t, unknown, or other
gatactcaattcattttcttcttctgcttcaccttctcttctcttctctcatagggttagggtttttttctcttcattgctctctctgtcgttttatttccatggctcagcaagatgctcagaatggtgggtcggagaatgccgctgctgcggtgtcgtttgtcgctttgaagccgcagctcctcatcgaagctctcaaagcgaacgacgccgttctgttctacaacgccgcgtttgccgctgatgaggttggccgtacgctcaaccctaagcgtaaagcggagcacgagcttcctctcatactctccgcagagctcaaaatcgctggctctaccattctcgttgctgnactcgttgatgactctgct

SEQ ID NO: 3544 - DNA, 397 bp, Glycine max
gactcaccacttcaaaacactcataacacaaagcacaaagcaaagctcatccttgagttaaaaaaatggcagcagcttcttccatggctctctcatccccatccttggctggcaaggccgtgaagctgggcccatcagccccagaagtgggaagggtgagcatgaggaagaccgtcaccaagcaggtctcctcaggaagcccatggtacggcccagaccgagtcaagtacttgggcccattctctggcgagcccccgtcctacctaaccggtgagttcccaggcgactacggctgggacactgctgggctttccgcagacccagaaaccttcgccaagaaacgtgaactcgaagtgatccactccaggtgggccatgctcggagccttgggctgcgt

SEQ ID NO: 3545 - DNA, 353 bp, Glycine max
gacagcaaaacaattttcaaactcaattaccattccataacctaaatctcctctttgtttccgagtcagagagcaatggcacgtaccaagcaaaccgctcgcaagtccaccggcggaaaggcgccgaggaagcaattggcgactaaagccgctcgcaagtcagctccggccaccggcggagtgaagaagccccaccgcttcaggcccggaacggtggctctgagggagatcagaaagtaccagaagagcactgaacttctgatccgaaaactcccattccagaggctcgtcagagaaatcgctcaggatttcaaaacagattttcgtttccagagcagcgctgtttctgcgct

SEQ ID NO: 3546 - DNA, 226 bp, Glycine max
ggttccagttccacttagagccatgacagacatctcgaagtcccttctctttacctttaccatcatcatcagctttggcgtgtgcattctttatgcatctgcaaaactccagagatttgcacactcttccaaacatgatggtgctcttagcttcttggtgcttggtgactggggaagaagaggtgcttacaagcaatcagtagttgctttccagatgggaaaggtt

SEQ ID NO: 3547 - DNA, 417 bp, Glycine max
  modified_base (314)..(314): a, c, g, t, unknown, or other
ggttcttcctttgccttctccttcttcttcaaccctttttctttctctttctttcgcactttcattctctaaaaaaatctaagtccctttggtcttcatcttctgttctgatccaggtatggcttctaaacgcatcttgaaggagctcaaggatttgcagaaggatcctcctacctcatgcagtgcaggccctgtggctgaggacatgtttcactggcaagccacaatcatgggacctgctgatagcccatatgcaggtggtgttttcctagtttcaattcattttcctcctgactatcccttcaagccaccanaggttgcttttcggactaaggtgttccacccaaacatcaacagcaatggaagtaaaggtcttgacattctcaaggagcaatggacccaagccctaacaatttc

SEQ ID NO: 3548 - DNA, 368 bp, Glycine max
ggatgaaggaaggaggcactccaaaaaatgctaaaactttgttggacatgaggttttatgttgttgtgttttggtaatttcaattcaagcagcacaacgcaaaggtaaaaacagagagagagagagagtgtcccattcccatcccccacacaaaaggtggtggaaaaaaagttctttttgtacacactgcgatgatggcgatgatgatgcctgcaatctccaacacaaacacaaacacaaacacaaacaccatttcctcctcctcctcctcctcttcttctctctcttttatcactccctctacttcctagttctcagccaaccatggtttgcttcatgttctcactcactagaaaggaaccatgaat

SEQ ID NO: 3549 - DNA, 415 bp, Glycine max
tgtaggccttagatctcattggtgcaaaatccaaagcagtgttttgtgagaagcaaggatttcttgcttttgcttgaacgctggtttgaaggctctataacataaaaacaaatatgtatatcgttgggggttgtatgacgttttctttgaaccagatagcaagctggttgtagataaaataaatggttcaaatgatgttgtatttgaattagacagcttagttagtgagtgtggtcacttattgattgtcaatcaaatctttcatgtgagtttccttaggaaagcatattaataatattgtgcatgttcttgctacggtgacactatattgtcctagtctccatgttttcagcaaaatcctcactgtagtgctcaatttggcacataataaaattgatataaacgttgttttggt

SEQ ID NO: 3550 - DNA, 363 bp, Glycine max
gacagcaaaacaattttcaaactcaattaccattccataacctaaatctcctctttgtttccgagtcagagagcaatggcacgtaccaagcaaaccgctcgcaagtccaccggcggaaaggcgccgaggaagcaattggcgactaaagccgctcgcaagtcagctccggccaccggcggagtgaagaagccccaccgcttcaggcccggaacggtggctctgagggagatcagaaagtaccagaagagcactgaacttctgatccgaaaactcccattccagaggctcgtcagagaaatcgctcaagatttcaaaaacagatctccgttccaaaagcagcgctgtttctgcgcttcaggaagc

SEQ ID NO: 3551 - DNA, 416 bp, Glycine max
  modified_base (354)..(354): a, c, g, t, unknown, or other
gatgccgaaaagtagtaccaagatggcttcagttgtgtatctcctctttggcttccatctcattgttatcatgtcaagttccttacccgcaactagtgaagtgtttgcaaaacagtatccatccacagaacccgtggaagaaaaactcacccaactccacttctatttccataacaacatgacgggggaacacccaactgctatgaaaactgttttgcctcctaaggggtccattcatggttttggggctacttacatgatggatgaccctctaactgaaggaccaagtccaacttcaaagcttgtgggaagatctcagggaatatacgctttggcttcacaacatgagcctgngttgctcatggtgacaaattttctcttcactttgggcatttacaatggcagcaccctcagca

SEQ ID NO: 3552 - DNA, 67 bp, Glycine max
acgagctaagacgacagaaggggagacctcaggtcaggcggggctacccgctgagtttaagcatatc

SEQ ID NO: 3553 - DNA, 285 bp, Glycine max
gaaggtatatataagccacccttcagagcaatttgtccatcttcttcaatttattagcagaagatgtggtgcattagattaccttagtctttgtcctagtgtcttccacaggaacttggtcgaacgtttccagatattcacataagagaagaacaatagttctctccctataaactcatgatatgctagataagccatccttaggagcaatatatccgtcctcttcaatttattagcagaaggtgtgttgcgtagtagaccatagtcattttgtcattgttgttt

SEQ ID NO: 3554 - DNA, 264 bp, Glycine max
taggtagagatggttgccaaatctgtgatactgtttataatcaggtggagtatatattaaatatgattaaatatggcaccagcattgattccttatcaagatgggatctttcttttgcactgtttccggtgacagcttaagaaatactgcctaatccttacaccacttattttctgtggaaacacttataggaaaccaagtaaaaaaataaaataaattgagtttttttcacacaagctaattagctaaagtcaattcacatac

SEQ ID NO: 3555 - DNA, 361 bp, Glycine max
gacatcagagaaagtaaagagtctgagtatgggaggctcatggtcatggcagctcacatgtgccctcttgctactcttctccgccgtagtcaccgccactgaccacattgttggtgcgaatcgtggctggtaccctggctttaactacactctttgggctcaacaacatactttctatgttggcgatcttatctcattcaggtaccaaatgaaccaatacaatgtgtttgcagtgaaccaaactgggtatgacaactgcactacataaagggcagtggggaattggagcagtgggaaagatttcataccccttaacaaagccaatagatattacttcatttgtggcaatggccaatgcttc

SEQ ID NO: 3556 - DNA, 375 bp, Glycine max
  modified_base (182)..(182): a, c, g, t, unknown, or other
gtattttgatagctgttggtgaggcagttgcctatgttctttcggggatgtatggcaatgtggggcaacttggagtatggaatgccatcctcatcatcatccagctatgttttgcgggtataattgtgatatgtctagatgagcttcttcaaaaaggatatggtctggggtctggaatatcnctattcattgcaaacaatatctgtgaaaacattatatgggatgcatttagtccaaccaccatcaacagtggacgtggagctgaatttgaaggtgctgttattgctctgttccatttgttgataactagaacagacaaggtccgtgctcttcgtgaggcattttaccggcaaaatcctcccaatgtgacaaatt

SEQ ID NO: 3557 - DNA, 422 bp, Glycine max
gacgttcacattcaggaatcgttttcttcagaaatttgccatcgttgagagaagcgtgagagccttagtcgttcaagatgagagctaagtggaagaagaagcgcatgaggaggttgaagaggaagcgccgaaagatgggacaaagatctaagtaggtgcttgagcaggagttgagatgagctttccatctgctaccagcctcatgacattttaggctgttatggctcttatgatcttgaggtctagtcgctaggggagcttcactcttgacttagtttgctttactggtcctggtcctggtccaagactattgagtgtgggttaagttgtgatgtttagtgttttgtggtatctaattatgtactggtttttatactttttggttgaatagctatatattagtatcgagacttccaggcgag

SEQ ID NO: 3558 - DNA, 351 bp, Glycine max
gactttccattctcttcaaacctaacgcagcatcgctattctcttcattccatggctttgcccaaccagcaaaccgtggattaccctagtttcaaactcgttatcgtcggcgatggtggcacaggaaagacaacctttgtgaaaaggcatctcaccggagaattcgagaagaaatatgagccaaccatcggtgtggaggttcacccattggattttttcacaaactgtggaaagattcgattttactgctgggatactgctggacaggagaaatttggtggcctcagagatggatactatatccatggacaatgtgctattatcatgtttgatgttactgcccggctaaca

SEQ ID NO: 3559 - DNA, 423 bp, Glycine max
gaaaaacatcatatcatttaagcaaaggctaaccctaaattgcgctgtctctcgtcactatcgggagaagtaatcgagcttcagcaatggtgtacgtcaaggctcagaaatcaaaagcctacttcaagagatatcaagtcaagttcaagagaagaagagagggaaaaaccgattaccgtgccaggattcggttgattaatcaggacaagaacaaatataacactccgaaataccgatttgtggttcgctttagcaacaaggacattgttgcacaaataatatctgctagcattgccggcgatttagttcttgctacagcatattcacatgagctgccacgatatggtcttgaagtaggacttacgaattatgcagcagcttattgcactggtctcctgttggcccgaagagtcctcaaaacac

SEQ ID NO: 3560 - DNA, 361 bp, Glycine max
gaatcgcacctaggcctccgtcacagccacggtaccgcacgctcgctgcctttctcactcacccacgcgagcgcgcgtcctctcacccacatcattgcaccgccatcccagatgccgccgtgcacttgctgtcgtgcccacactgagattcgcacgtcctctgacccacatcatcgtgtcgccgctgtcgagcccacactaccattgcacacgctgccgcgcacttgccgtcatgcccacgccagctgtttcgtaatttttatttttttttatcttttgtctgcctcttttttatttgatatgatattttgacattcaggtttacgggttttgttggttggatgaaaaagtaaacactaaa

SEQ ID NO: 3561 - DNA, 363 bp, Glycine max
gattcaaaacttcaatccctcttttgcttaccaaattccattttccaattcagaaccctaactccgttcgaagcaccaaatcgtgatggcaccaaaggcagagaagaagccagcagagaagaagcctgtggaggagaagaaatcgacggtgggagacaaggctccggcggagaagaagccaaaggccggaaagaagcttccgaaggagggaggcgccggcggagaaggtaagaagaagaagagaaacaagaagagcgtggagacatacaagatctacatcgtcaaagttctgaagcaggttcaccctgacattggtatctcaagcaagggcatgggaatcatgaacagcttcatcaacgacat

SEQ ID NO: 3562 - DNA, 358 bp, Glycine max
gagggttttgtgctgttgtcgctgctcatcctccataacctccgagctctacaccgaagaacgaagccatggggaagacacatggaatgggagctgctcgcaagctcaagtctcaccgcaggaggcaaaggtgggctgataagtcatacaagaaatcccatcttgggaatgaatggaagaaaccttttgccggttcatcccatgccaagggaattgtccttgaaaagataggtattgaagctaagcagcccaactctgctattcgtaagtgtgccagagttcaacttatcaagaatgggaagaaaattgcagcttttgtccctaatgatggttgcttgaactacattgaagagaatga

SEQ ID NO: 3563 - DNA, 348 bp, Glycine max
gaaaccggaaaaaaaatggattcattgagtgatcggtgttcacttggatctcatcataatcgtcagcgtcaattgaagaagatgccgatcagaaacatcgccgtcggaaggcctgaagaggcgactcaccccgacacgttgaaggcggctttggctgagttcatctcaaccttcatcttcgtgttcgccggctcaggctccggcatcgcctacaacaagctcaccgacaacggcgctgccacccctgccggcctcatctccgcctccatcgcccatgcagtcgccctcttcgtcgccgtctccgtcggcgccaacatctccggcggccacgtcaaccccgccgtcacc

SEQ ID NO: 3564 - DNA, 354 bp, Glycine max
ggtctgcgcctgatttctcagttctctcacacactcattcggtgctccgaatctcagattctagggttagggttcccaatttctcaaccgatcagaaaatgagttcacctggtggttctaccaagggcggaaggggcaagcccaaagcctccaaatccgtttcaagatcgcagaaagctggtctccaattccccgttggaagaatcgctcgattccttaaggctgggaaatacgccgagcgtgttggtgctggtgctcctgtgtacctctctgcagtgctcgaatatctcgctgctgaaggttttggaattggctgggaatgctgctagggataacaagaagaatcgtattgtt

SEQ ID NO: 3565 - DNA, 388 bp, Glycine max
cggggtccctcttactaacactagggtttacagagaagcgaagaggcgcagccgtagcagtaactcgtggaattgctagcaatggcgaggatcaaggtttacgagctgaggcagaagacgaaggctgatctgttgaatcagcggaaggatctcaaggtcgagcttgccttgcttcgtgttgctaaggtcaccggcggtgcatctagcaagctctcgaagatcaaagggggtaatgttgaacattgcccaggttttgacggtgatttctcagacgcagaaggccgcgttgagggatgcctactcgaacaataagtacatgcctctcgatctccgccctaagaagaccatggccattcgcatgaggcttactaagcaccaggcatcattg

SEQ ID NO: 3566 - DNA, 398 bp, Glycine max
gacaccccatctatacacgactcattctcactacacacgctcaacacattacttcctctttcgtgccctcaaattgagatggcctgtagggtcgatgaaaggatctcactgcgcaaccaacatcacattgtccgactacgtacctgctcaagctcatcctgcagtgtctctcttgacataagtagcgtatcacgcctacacattcacttcctcgcaatgggcattgacagtatacattactggcagctctttgctaccatatcacagttcatctagcctaaccaaccatgtcttgatacaacatggatgttccaaatggcacggtttgtgcatgaacgtttaaggcgagggtcacatgcaagaagagaggtgccactctcgtgtctagtttagacgtc

SEQ ID NO: 3567 - DNA, 328 bp, Glycine max
gatgccgaaaagtagtaccaagatggcttcagttgtgtatctcctctttggcttccatctcattgttatcatgtcaagttccttacccgcaactagtgaagtgtttgcaaaacagtatccatccacagaacccgtggaagaaaaactcacccaactccacttctatttccataacaacataacgggggaacacccaactgctatgaaaactgttttgcctcctaaggggtccattcatggttttggggctacttacatgatggatgaccctctaactgaaggaccaagtccaacttcaaagcttgtgggaagatctcaaggaatatac

SEQ ID NO: 3568 - DNA, 389 bp, Glycine max
ggtgtctgctcactcgctcttctccgccacttctgaatctattgaatcaacaatcatgtcggacgaagagcaccatttcgagtccaaggccgacgccggagcctccaaaacctacccgcagcaagccggtaccatccgcaagaacggctacatcgtcatcaaaggccgcccctgcaaggttgtggaagtttcgacttccaaaactggaaagcacggtcacgctaagtgtcactttgttggaatggatattttcactgccaagaaacttgaggatattgtgccctcttctcacaactgtgaagttccccaagtgaatcgtactgattaccagctcattgatattgctgaagatggatttttgagtctgcctactgaaaatggtaacacta

SEQ ID NO: 3569 - DNA, 409 bp, Glycine max
aagcctgatagcacgcagagactaacgtcgtctcctgcgcccttcgtcaatcgcggccgacaagcccgttgacacgcagagatttacgtcatcttctgcgctcacaagatctgtcatactgacttttgagtcgcgctgacgggcggaaatatccgagtggttatccgtataaacattcttttgctatctgtaagacagaacgcttgatagcatgcagagactgacatcgtcttctgcagcttttgttcccccggggacaacaagttatttgcatgtggagatgttatggtcacccgcgactctcgtcaaacgagaggaacgaaattagtggcctaacctttactcccttttatctccaataaaagacaagtaaagaggggtaactgtcaatacctaatttcgtccgggg

SEQ ID NO: 3570 - DNA, 335 bp, Glycine max
gcacaatcgaacgggaaaaggcgtcttcataaacgccgcccaaaacttctcatacccttttattcattccattcgtttctagggttttcttttctttgccgagaaaatgagagagtgcatttcgatccacattggccaggccggtatccaggttggaaacgcctgctgggaactctattgccttgaacacggcattcagcccgatggacagatgccgagtgacaagaccgttggcggaggagacgacgccttcaacacatttttcagcgagaccggcgccggaaaacacgtgccccgcgccgtcttcgtggatcttgaaaccaccgtgatcgacg

SEQ ID NO: 3571 - DNA, 407 bp, Glycine max
gactcagctttatccataaagcacaatttttttgcttcaacgggccttaccttacctgaagatggcttcggtgtcctttgccgtgggattattaccttgctcttcttcttcttgctatacccgcgtctcttatggttcagttcgatttcccgtattgaacaacgccaactcactgaaactcagctcctcagctaacatctccagtccaattcttcaccaaaagctttgcactgttccttctccccttgctctaaggcctcgccctctcaccattgtatccgctaagggctacaaaatgaaaacccacaaggcatctgcaaagcggtttaaggtgacggggcgaggcaagatagtgcgtaggagagctggcaagcagcatttgctcgttaagaagaataccaagcgca

SEQ ID NO: 3572 - DNA, 433 bp, Glycine max
gaaaccacaagtaaaagaaagaagctttcttgagttgagttaacagcatggagagggaggaagatgttaaggttggagcacagaaattctcagagaggcaagcattggggacaggagctcagggtgacaaggactacaaggaggcaccaccagcacccttgtttgagccaggggagttaaagtcatggtctttttacagagctgggattgcagagtttgtggccacattcttgttcctctacatcactgtcttgactgtcatgggtgtcaacagggcacccaacaagtgctcctctgttggcattcaaggaattgcatgggctttcggtggcatgatctttgccctcgtcgactgcactgctggaatatcaggtgggcacataaatccggcagtgacgttcggtttgtttctggctaagaagctgtccctgac

SEQ ID NO: 3573 - DNA, 427 bp, Glycine max
ggggaagagagaaagttagttacggctggtggcatttttcatttgaaagcgcagctgcagatagaggaaatggaaaagggtgccaaatcggaagcagcggcctcactgcgtcgctgtgcaaaagctgcattgcttctccatagcttgaattccccaatctcccaaaatcagtggaagagggaaatccatgacctgaaaattgaattgctgaaggagcgtttcatgaggaagaagatgaagctctgcgctatcacggagttgttcgttcagctcctcttgttgctctccgtttgtaacttcgtccttctctaatttctttgatattttcctctgcgttacgacttcagagagtgctcttcctccatgctctgttctacttccgtttacgcagctttaaactgctttagctcgttgatgaccgtaaacg

SEQ ID NO: 3574 - DNA, 357 bp, Glycine max
gacgaaaaagaaaaacaacgttttcttcttctgctatctatctatctagggctcaattccgattccgattccgattcatactcataaccctttcaatgctttattgaactaacgaggttttcttcacgcaccttgttttctctgcattgtttcgaattccatggaggagtcttcgtacaccggtcttcccactagccacttgctcggttcagttcctgctgtcataactgaagaaaataatgccacgaaacatgtggccaccggtgcaaatatgcaaacattccctcccaacaatggaggagacagaggaccaggacatcaaactcttggcagtcctactgaagcttttgaacaaca

SEQ ID NO: 3575 - DNA, 248 bp, Glycine max
gaaacagaattagaataatcccttgcgaaaaagcaaaaccctaaaccctcgcttgcactgttctgggtcctcctccgatctgatctcatcggcaatggcttccgcgtggagcagaatcgcgcagtcaacatcaatttcgtccatcagatcatccagcaaatccaacattcgcgcttcatcttcggtctccaaagcagcttcctcctcgtcgcctcgtcggcaaaccgtagtgaccaggatttcggggg

SEQ ID NO: 3576 - DNA, 341 bp, Glycine max
cggggaagttattacggtttttgagtgcggcggtccaaacactcttctctgcagcttttgcctacaactcccttcaccatggctgaacaaaccgagaaagcttttctgaagcaaccaaaagtgtttctcagcacaaagaagactgggaagggaaagagacctggaaaaggtgggaaccgcttttggaagtccattgggcttggatttaagactcccagggaagccatcgaaggaacctatattgacaagaagtgccccttcactgacaatgtttccatccgtggccgtatcatggcttggacatgtcacagtgctaagatgaacaggactattattgttac

SEQ ID NO: 3577 - DNA, 357 bp, Glycine max
  modified_base (184)..(184): a, c, g, t, unknown, or other
attctcagattgcaaagagtgagaaggatgtgcgagttgatggcagagaagacgacaacaaggatatcagatatgaacgggatagccataatgattcaaaaggtgacattaagacagacaaggatggctatggtatggtaagcagcagcagccacctgagttggaaagaatcaaaagagtatangggtaagagattttctgatgcccctggtgggagtttggattcctggcatacatcacgtggcaatacacctactgaagttggaaaggacagttcaatggcagaagaaagggactatttggaaacacatgaggctgttggagaaaacaaaattgattctaaaagtgaagatagaa

SEQ ID NO: 3578 - DNA, 399 bp, Glycine max
gagtctcggaatccatcgatccaaaaccctaattgaagttgtcttgtctgcgttctcaaacgttgttgcttgctgctgctgcatagttgatcgaaagcatgacaacatcattgtccagcatccttttcaagggaattgcagctcgttctttcaccgcccctctaactaggtcctgttatcatggaatgagatactttgctactgtatcaaatgatcctgacacacatgatgacttcaagccagctaataaacttgagaattccaacatttctttggctgatgttattgagcaagatgtcaaggataatcctgttatgatttgcatgaaaggtgtgcctgattttccacagtgtggatttagttctcttgcagttagagtgttacaacaatatgatgttc

SEQ ID NO: 3579 - DNA, 426 bp, Glycine max
gagttgggaaaccctaattctgcgtggtgagtgaaaatggcggtacccttgctctccaagaggatcgtgaagaagcgcgtcaagaagtttatacgcccccagagtgatcgcaagatctccgtcaagccaagctggcgcagacccaagggtattgattctcgtgtcaggagaaagttcaaaggatgcactttgatgcccaacattggttatggctcagacaagaaaacccgccattatctaccaaatggtttcaagaaatttgtcgtgcacaatgtgaaagacctggaacttctcatgatgcataacaggacatactgtgctgagattgctcacaatgtatccacaaggaagaggaaagacatagttgagagagctgctcagcttgatgttgtcttgacgaacaagacggccagactacgtagccag

SEQ ID NO: 3580 - DNA, 417 bp, Glycine max
ttccagtagtaattctaggtactattgcctgtaacgtaggcttagcggttctagaaccatccatgattggggaacccgcggatccatttgcaactcctttggaaatattacccgaatggtatttctttcccgtatttcaaatacttcgtacagtgcccaataagttattgggcgttcttttaatggtttcggtacctacaggattattaacagtaccctttttggagaatgttaataaattccaaaacccatttcgccgtccagtagcaaccaccatctttttgattggtactgtagttgccctttggttaggtattggagcaacattacctattgagaaatccctaactttaggtcttttttaaacttataaaattgattccattttgaaataaaaaaaaataaaatgccatgtgt

SEQ ID NO: 3581 - DNA, 102 bp, Glycine max
gagacacgccactcaattatttctgtccatttcttcttcccatattgttctcgtgtgttgtgtgtgtcagtgttttggggtgtgtgtgtgagtgagtgagat

SEQ ID NO: 3582 - DNA, 398 bp, Glycine max
gacagaacaaaaacaaagaaaaaaaaaaacccttagccaacacaaccatcatggccacctctgctattcagcaatcagcattcactggtcaaactgctctgaagcagctcaatgagttcgtccgcaagaccggtggcgccggcaaaggtcgcactagcatgcgccgcaccgtcaagagtgctcctcagagcatttggtatggccctgaccgtcccaagtacttgggtccattctcggagcagattccatcatacctgaccggagaattccctggtgactacggatgggacactgctggattatcagctgacccggaaaccttcgccaggaaccgggagctggaggtgattcacagcagatgggcaatgcttggtgcccttggctgcaccttcccagag

SEQ ID NO: 3583 - DNA, 256 bp, Glycine max
ggtttctgttccttcgtctgcaaccctagctttcagctgtttgcagtcaatgggtggtgaatctgatgtaccggaaaacaccctctcttgtgctaattgtggcaaacctgcgaagctgcagtactttcgctttatctgtgtctgtgtgtgtgttctagagcgtgcgcagaagtaacaggagctgtgcccccactttgtctttttttatgatgtaggttgttgtggagtgtgggatgctatttttgcatttgatatg

SEQ ID NO: 3584 - DNA, 234 bp, Glycine max
gaacggcgtttccaccagcggtgactctctgagatctattcctacgccgtttctcaccaaaaccttccaactcgtccacgatcacaccatcgaccatgtgatttcgttgaacgactctggattctccttcatcgtctggaacaccaccgcttttcgccaaaggatttgcttcctaaatatttcaatcacaacaacttctccaacttcattccccaactcaacacttacggattc

SEQ ID NO: 3585 - DNA, 413 bp, Glycine max
ggcagccatcatttcccttctcttagtaatcctctttgtccttcttcttcacctctacgccaagtggttcctcgctcaagcacaggctcaggccaacgcccgccgccggaggcggcgccgtcgcacgacggtgaccgtctccgacgtcctaggcccggcaaggttccaccacttccacagcttcaccatagaagacagttcacccctctcaacaaaagggttagattcttcaaccattagaacaattccactgttcatctatgaacacaacaacaacaacaacaaaaaggtcgaagaagaagaagaagaacttgaatgtgtgatttgtttgagtgcatttaagaatggtgaagtgggaaggtgtttgccaaagtgtggccatggcttccatgtggagtgcattgacatgtggt

SEQ ID NO: 3586 - DNA, 60 bp, Glycine max
aacgagacctcaggtcaggcggggctacccgctgagtttaagcatatcaataagcggagg

SEQ ID NO: 3587 - DNA, 159 bp, Glycine max
gacatctttcactcgttctcagatatttcaagtcaattttctcccctcataaagctcacccatcactggctctcgttcaggcacacatcaatcccgcggctatcaatcccgtagaaaaggtcccatcggacactcaacctcttgcagacaaaaagctat

SEQ ID NO: 3588 - DNA, 53 bp, Glycine max
gacagctcttggctttagcaaattccaattcgcagatctcacttagacaccct

SEQ ID NO: 3589 - DNA, 130 bp, Glycine max
gggagttacacattattctctctctcactcacacacactcagagtgcaagctagagagagagagatggacgatctcgaggatgaagagaacggagccgaggaggtgttggggtcaagcttgaccatggag

SEQ ID NO: 3590 - DNA, 334 bp, Glycine max
  modified_base (280)..(280): a, c, g, t, unknown, or other
gagagtggtggagtgtgcaaaagagcgtcgtagtcgcaaccctaatcagaagaagcgcagcttcaagcgagtgacagccaccagccatgggtcgtatgcacagccgcggtaagggtatatcctcttctgctttgccctacaaaaggacacctcctagctggctcaaggtctcttcgcaagatgtcgaagaaaatatctgcaagtttgcgaagaaaggtttgaccccgtctcagattggtgtcattctcagagattctcacggtattgctcaggtcaatancgtcactggcagcaaaatccttcgcatcctcaaagctcacggacttgcgcctga

SEQ ID NO: 3591 - DNA, 267 bp, Glycine max
ggtgtacatgatgaactctaggaagtttgcaaaacggataaagagtgagcggaagttatattccggatagttatatttcagtcgtagtgtttttttgttttccctagataagcagaccgtggaaaactgctagtaaaagctggagcttttgcttcgatcacatttgactatttcactgattagaacaggcaaagatgtctctcttgggttgatctttttatgtttcgatcaattgagtttcccattatgacgcttcctgaaaatcta

SEQ ID NO: 3592 - DNA, 125 bp, Glycine max
aagattcctaaagaagctagagcttagctacacatacctctctaatagctaagctcacctccttgagatgagaagctagaacttagctacacaccccccataatagctaagctcacccccatgac

SEQ ID NO: 3593 - DNA, 345 bp, Glycine max
  modified_base (74)..(74): a, c, g, t, unknown, or other
  modified_base (114)..(114): a, c, g, t, unknown, or other
ggtgacagtgaacagatggaaggcatagtacacaggacagttgaagtgaatggcataaaatgcatgttgctganaaaggtgaaggtcccgtggtcttgttcctccacggcttcncggagctctggtactcctggcgccaccagattctggctctcagcaacctcggctaccgcgccgtggctccagatctccgcggctacagagacaccgaggcaccagcttcaatcagcagctacaccatcctccacttagtttctgacatcgtcgcgctcattcactcacttgctgtggattaagtcttcctcgtagcccatgattggggggctgtcataggttggtacctcg

SEQ ID NO: 3594 - DNA, 313 bp, Glycine max
gttcgcggctctcttcaaatacgcgacacccgaactcgctgactgaaacgcgcacgcataagggttttgccatgatggcactgtccaaactcgtccgatcggcaatctctctcatctccagatccacgttcctcacctccgagcgatccagtctctaccgattcttcattgaccattccatctccgtcgcctccagaaattacaccaacatgacggggcacaatgacttcacggttaaggtcgcactggctttgtttggacgttcaggatactatgcctgtgcattgtacaatgcatctgctatagctaatgc

SEQ ID NO: 3595 - DNA, 405 bp, Glycine max
  modified_base (294)..(294): a, c, g, t, unknown, or other
gacaccaagtcctgctcttcttccagagcaacaacaaacaaaccctttctttctggcttcagtttttgcagtgaaaatggcggtgactttaacatcaaccctctttatggctttgctatttgctgcttcagcttttgctgctcttcagcctagagtacctgaagcttaccttcaaaatggaaactttgaggagcagccaaaccccaaaaacctccagaaaacaaagctcatggggaaatattctttgcccaaatgggaagtcaatggtctggttgagtatgtctctgggggtcnccaacctggaggcatgttcttcccagtgactcatggaatccatgctgtgaggcttggcaatgaggcctcaatctcccaaaatatcaaggtcaaacccggtcaactgtatgc

SEQ ID NO: 3596 - DNA, 230 bp, Glycine max
gactttctattggccttaaaccaaacgcagcatcgctattctcttcattccagggcttagcccatgcagcaaaacgtggattaacctaatttcaaactcgctatcgtccgctatggtgtgacaggtcagacatcgcttgtcaacaggcatctcaccggagaactcgacatcaaatatgagccaatcatcggtgtggaggttcacccattggcttttttcacaaactgtgg

SEQ ID NO: 3597 - DNA, 263 bp, Glycine max
gggccgtacgggcaaatcgtcaagttcgacaactttgtgtttgggcagtcctgcgcatggaacaactgggccaacgggcattacaccgagggtgtggaattgaatgactccgttctcgatattgtgcacaacgacgctgataactgcgaatgcatgcaaagttttcacgtgtgccaatccctggggggaggaactggatcaggaatgtgaaccatgctgagttctacgatcaaggaatactacccagatagaatgatgcttaa

SEQ ID NO: 3598 - DNA, 328 bp, Glycine max
gaagaaggtaaagaagatccgaacttctgtcactttccacaggccgaagaccttgaagaacgacaggaaccccaagtaccctcgcattagcgccccgccgaggaacaagcttgatcattatcagatcctgaaataccccctcaccactgagtctgccatgaagaagattgaggacaacaacactttggttttcattgtcgacctgcgtgccgacaagaagaagatcaaggatgcggtgaagaaaatgtatgacatccaggccaaaaaagtgaacaccttgatcaggcctgatggcaccaagaaggcatatgtcaggttgacacctgat

SEQ ID NO: 3599 - DNA, 435 bp, Glycine max
  modified_base (391)..(391): a, c, g, t, unknown, or other
gttgaacttcattgtttttggctaagcctcgaaatccagaaaaatcgtgagcgaagatgatgcacatgaccttttactggagcaggaaggtgaatctcctaatagattcatggaagaccaacgattggacggagtatctcatcactctgctcgcatgcctcgtcgttgccgccttctaccagttcctagagaatcgccgcatccgcctcaagctcatcggcgccggaaatcccttcccggcagagatcgaggccccgcttctgcgacggaagcttgccggaaaccgcgccaaggtgggcgtgaaggtagccggagcgtttctgttcgggctgagctcggcgatcgggtacttgctgatgttgtcggtgatgtccttcaacggtggggtgtntgtggccgtcgtcgtgggtcttgctgttggttacttcttcttca

SEQ ID NO: 3600 - DNA, 337 bp, Glycine max
ggcgcctgatttctcagttctctcacacactcattcggtgctccgaatctcagattctagggttagggttcccaatttctccaccgatcagaaaatgagttcaactggtggttctaccaagggcggaaggggcaagcccaaagcctccaaatccgtttcaagatcgcagaaagctggtctccaattccccgttggaagaatcgctcgattccgtaaggctgggaaatacgccgagcgtgttggtgctggtgctcctgtgtacctctctgcagtgctcgaatatcgcgctgctgaggttttggaattggctgggaatgctgctagggataacaagaag

SEQ ID NO: 3601 - DNA, 336 bp, Glycine max
  modified_base (92)..(92): a, c, g, t, unknown, or other
gaccaccgcaaagcaatgggcgctatactttctgccttaactggcggtgccgcaacggcggcgacgtcttcgccggagagttctgcttctanggtccagtctttccactcttcggcgcgctggcagctccacttcaacgagctcaaagaaaccaataagctcgttgtgatagatttctcggcgtcgtggtgcggcccttgcaaattcatagagccagcgattcacgccatgtccgaaaagttcaccgacgttgacttcgtcaagatcgacgtcgacgaattgcgggatgtggcgaaggagtttaatgtggatgcgatgccgacgttcgtgttgtgt

SEQ ID NO: 3602 - DNA, 324 bp, Glycine max
  modified_base (95)..(95): a, c, g, t, unknown, or other
  modified_base (155)..(155): a, c, g, t, unknown, or other
  modified_base (239)..(239): a, c, g, t, unknown, or other
gaaattaaatcgttcaacactggaactctttgatataatatagaaagagacagagagagagagacagacaagaagaacaaagatgcaatcttcanaggagaagctgaaaaacatgaccagtgctgccaaggagcaagtcgacatctataaagcanaaatagacgagaaaggtcagcttttccatctctatacatccatatatttttgttccattatacaatgattcatttgtggcgtanctaggcatcaatatcatgaaagtagaatcgtgatatataattatatatgtatgtaacctcttcaacaagtttttttttttttttt

SEQ ID NO: 3603 - DNA, 254 bp, Glycine max
  modified_base (7)..(7): a, c, g, t, unknown, or other
gctgcgnagaaggacgacagacagggaggaaagggaatccaatgcgaaaccctaaccctaacggagagatggcggcgcacttggcatcgatattcgcgacggagaaggacatggtgaactgtccgttctacttcaagatccgcgcgtgcacgcacagggaccggtgctcccggctttacacgatgcccacacttatcccaccgttggttctgtccaacatgttccagatgcccgacatgaacatgtacatcatc

SEQ ID NO: 3604 - DNA, 224 bp, Glycine max
gccaatctcgcaacgcaagcgacaacaatcgtcacagctcagcagcacaatcaaaaccaaaactccctccccttgcgacatttttacaaacaccttctgcctacaaataaaagatatttcagttttcatgtcctcgtagtggttgggtttgagtgcgtgtgtgtgagaatggaagagagtggtgatgcgagggatcttcagaaaccgttcctccacacagggag

SEQ ID NO: 3605 - DNA, 348 bp, Glycine max
tagtaaacatgggggtgcaaatagaaaccaggcccacttgggccttccaggaagttctccagaaggcggtgccttatgtaggaagcaacctagctcgcctgggcgagctgggtggcaagccctccctcattttcctataaatagggggaggagggaagaacaaaaatgttcaaccctcctggtatctgagattcacttaaaattagtcagaaaaattgtttcggtgaaaaaaatccaagccgaggcgcttccgtaacgcttccgagatgtttccgtgggtgatttcgcgaagattttcaaccgttcttcgtcgttcttcggtcttcaaccggtaagttgccgaaatcg

SEQ ID NO: 3606 - DNA, 280 bp, Glycine max
gagttccaaggcggagaaaacactaatggccaccaacgatgagacggatatggagaacaagaagagtgaggaagaactgaagcatctcgggtttgtgaagattgcggcaatgaaagccttagtgtgtgtgtcgaatctctacggcttcgcaaagcaaaactcgggacttttgagatctgctgttggaaccgtggaagacactgtaaccaccgttctgggtcccgtctaccacaaattcaacgctgttcccaaccacatcctcctttttgtcgacaacaag

SEQ ID NO: 3607 - DNA, 402 bp, Glycine max
gaggttttcttagatagagttgttaccatttgctcccagtacagagcttaaccgagcttcacaaagatgaatcgggaaaagttgatgaagatggccggttcggttagaactgggggaaagggtaccatgagaagaaagaagaaggctgtccacaagacaacaaccacagatgacaaaaggcttcagagcaccctgaagagaataggggtgaatgccatcccggctattgaggaggtcaatatctttaaggatgacgtagttatccagtttctaaatcccaaagttcaagcatccattgctgctaatacttgggttgtcagtggttctccacaaacagagaagttgcaagatatactcgctagcattatccagcaattaggaccagataacatagaaaacctg

SEQ ID NO: 3608 - DNA, 296 bp, Glycine max
tggatctcgcgggtcgacacaagactctatacagactcgtattaagcagagaaagggctacattttgggaggttttcgtatagagaattgttatcatttgctccgagtacataactaattacatccttcatagtcatgaatctgtgatggttttccaaaatcgccggttctgttacaattgggggaatcggtaacatgacaagaaagaataaggctgtccacagcagacgcaccaacaggttacaagctgcttcaaaccagcctggcaagtctaagggcgactgccatctcagcta

SEQ ID NO: 3609 - DNA, 264 bp, Glycine max
  modified_base (156)..(156): a, c, g, t, unknown, or other
  modified_base (247)..(247): a, c, g, t, unknown, or other
agggacggtttttgtcgtcgctactaagagttgctgcttcttcagccactccgcacctcgcagcctctgtgccctcaacaaccatggctgaaatcgaaactaccgttccagatcccacccaaatcgacgtcaaactcttcaatcgctggagcttcnacgatgttgaggttaatgatatgtctctggctgattacattggagtgtccccatcaaagcatgctacataggttcctcacactgctggtangtactcagtgaacaggt

SEQ ID NO: 3610 - DNA, 203 bp, Glycine max
gccactacaaaaagacaacagaggggtacggctgcaaacaaaacgacaaaaagggagggtttttatcatcactacaaaaagttgctgcatcatcatacactcgacacctcacagccgctgtacactcggcccccctagaggttcaaccctactttcgttctgcatcccacccaagtccccttcaaactcttcacgcaatttaa

SEQ ID NO: 3611 - DNA, 322 bp, Glycine max
ggttttcatttgggattcaaactcaccatggtggacgccttcaaactttgcatcttccttcttgcgtcgatctgtgctttcctagtcttttctaatccagtgctgtgtagtgataaggaggacagtgtattcaagggaatcaacagctacaggcaaacacggagcctggtacccctgagccaagtttcgaaggcaacatgtttggctgatgaagttgcagaagaaatagagaagatgcgctgtgaaaacgtgaagcaatactacccttcatctgttcctgggagtgggaggctcaaaatcccaaacttgcagaagcacataa

SEQ ID NO: 3612 - DNA, 333 bp, Glycine max
gagtacagaaaacgcagttctcaccatttccctctcgattgtgagacttgttgttgttaactgaacttttctgagcaagaatgtctgggcgtggaaagggaggcaagggtttgggaaagggaggagcgaaacgacaccgtaaggtgctgcgcgataacattcagggaatcaccaagcccgcgattcggcgtttggctcgtacgggtggcgtgaagcgtatcagtggtctcatctacgaagagacacgtggcgtgctcaagatctttttggagaacgtcattcgtgacgccgttacctacactgagcatgctaggagaaagaccgttacggcaa

SEQ ID NO: 3613 - DNA, 93 bp, Glycine max
agtcgcaacttttcaacttctatctctttctcccttactatttcatgttctgcggcgcaaatccgatttatgatcactcatgttttttctcta

SEQ ID NO: 3614 - DNA, 313 bp, Glycine max
gattttccctcttctctttttctctctcgtgagtctcgtccctgaagcgaaattctagaatggcggaagaagctcctgcatctgaaacctccgtcacaatgcctcaaccggcggaagtcatcaccgtcgacggaaccctaacctcttccgagaatgacaagagcggaatctccgtcgatgccgccgcgcacggcggtgaaaagacggtgtccaacgctgaaccttccggtagcgatcctcagaagtctctggagttggcgaacgagctgatggaagagggaaacaaggcaattaaggagaacgattttggaga

SEQ ID NO: 3615 - DNA, 375 bp, Glycine max
  modified_base (292)..(292): a, c, g, t, unknown, or other
gatagctgagagagaaaggaaaggttaactaagaagcaatacttcaatggccacccttgttgttcataaccaaacttcttctgctcaagatgctgaggctctccaacaggctttcaaaggatggggggctgatgacaaggccattatagcaatactgggtcacagaaatgttcatcagaggcacgaaatcacaaaagcttatgaggagatttaccaagaggatctcatcaaacgccttgagtccgagatctctggtgactttgagagagctatgtaccggtggatgttgcancctgcggatcgtgatgctgttttggtgaatgtggcaatcaagaatggcaccatagactacatgtgattgcagacattgcttgt

SEQ ID NO: 3616 - DNA, 323 bp, Glycine max
gattgttggcttgtgctctgctcgtgcctctagggttatcatatctccatttccatttcctctctctcagtttccaagaatcttaagctatgggaaagtcttacccaaccgtgagcgctgattaccagaaggccgttgagaaggcgaagaagaagctcagaggcttcatcgctgagaagagatgcgctcctctaatgctccgtttggcatggcactctgctggaacttacgacgtgagctcgaagaccggtggtcccttcggaaccataaagcacccctccgaagtcgctcacggcgctaacaacggtcttgacatcgctgtt

SEQ ID NO: 3617 - DNA, 374 bp, Glycine max
gatcggatgtcagagcactcaacctcagtaccgctacgaaagcataaccaaaagcttttgacgaagtctcagattttcctaggggctccggcaaaggcagagaagaagccggcggagaagaagccagcggaggagaaggcaccggcggagaataagccgaatgcggacacgaagatctcgaacgaaagagggagcgacaagaataagaatcgcacgatgaagagcgtggagacctagatgatctacatcttcaaggtcctcaagcatgttcaccccgacattggtatttccagcagggccatgggcatcatgaatagcttcatcaacgacatcttcgagaagctcgcccaggatgcgtcgcgttgggctcgcta

SEQ ID NO: 3618 - DNA, 445 bp, Glycine max
gtttccctttcgactgtgattttttgttaactgaacttttcgagcaaaatgtctggacgtggaaaggggggcaagggtttgggaaagggaggagcgaaacgacaccgtaaggtgttgcgcgataacattcagggaatcaccaagcctgcgattcggcgtttggctcgcaggggtggtgtgaagcgtatcagtggtctcatctacgaggagacacgtggcgtgctcaagatctttctggagaacgtgattcgtgacgccgttacctacactgagcacgctacgagaaagaccgttacggcaatggatgtggtttatgctctcaagagacaacgaagaaccctctacggatttggaggctagtttgtttttttattatttttctaatttttattgttacgtttcgtttgttttggaagtttatgtgggatgtaagagacccttgcta

SEQ ID NO: 3619 - DNA, 379 bp, Glycine max
gacaccatccagtactcttcttttcagcacaacctcttcatctctcccaggctttcttttctttgcaacaacactaccaaaaatgtcaccagatttcacacttttgttctccccggaactcatgcagtcccctatcatcactttccaagccactttctgtgtccttctcttcaccctcatgttcacgccgttcttcactcctggtgggcttccttgggcctgggcccggcccagaaccatcatccctggcccagtaactgccctgctcggggtcttcacgggttccacacctcacagcgctttatccaaactggcccgcacttatcacgcggaaaagctcatggctttctccatcggtttaacccggttcgttatctcc

SEQ ID NO: 3620 - DNA, 330 bp, Glycine max
gagcgaaacagagagtgatttcagtgagtgatcggtgttcacttgatctcatcataatcgtcagcgtcaattgaagaagatgccgatcagaaacatcgccgtcggaaggcctgaagaggcgactcaccccgacacgttgaaggcggctttggctgagttcatctcaaccttcatcttcgtgttcgccggctcaggctccggcatcgcctacaagaagctcaccgacaacggcgctgccagccctgccggcctcatctccgcctccatcgcccatgcattcgggctcttcggcgccgtctccgtcggcgccaacatctccggcggcgaggt

SEQ ID NO: 3621 - DNA, 323 bp, Glycine max
  modified_base (278)..(278): a, c, g, t, unknown, or other
ggcgcctctgcttgcaagagtgaaaaccttctcttacccttctctcaagtttcaagagatttcatcatggctccaaagaaggacaaggctccaccaccttcctccaagcccgccaaatctggcggtggcaagcagaagaagaagaagtggagcaagggaaagcaaaaggagaacgtgaacaatatggtgctgtttgatcacggcacctatgacaagctcctttctgaagctcccaaatacaagctcatcactccttccattctctctgatcgtttgangattaatggatcacttgcaaggaaggctataacagaattgatggc

SEQ ID NO: 3622 - DNA, 329 bp, Glycine max
ggttgggatgggtcagaatgatgcttacgtgggtgatgaagcccaatcaaaaaggggtatactcaccttgaagtatcctatagagcatggcatagtcagcaactgggacgatatggagaagatttggcatcacacattttacaatgagctacgtgttgcccctgaagaacaccccgtacttcttaccgaggcaccactcaatcccaacgccaacagagagaagatgacccaaattatgtttgagactttcaatgtgcctgccatgtatgttgcaattcaggctgtcgtgtctctgtatgccagtggacgtactacaggtattgtgcttg

SEQ ID NO: 3623 - DNA, 323 bp, Glycine max
gatagcaaaatcgtttctccaatttaatcaccattgtacaacccaattcccttcggcgttttcgattaagagagcaatggcacgtaccaagcaaaccgctcgcaagtccaccggaggaaaggctccgaggaagcaattggcaaccaaagccgctcgcaagtcagccccggcgaccgggggagtgaagaagccccaccgcttcaggccaggaacggtggctctgagggagattcgaaagtagcagaagagcaccgaacttctgatccgaaaactcccattcgagaggcgcgtcagagaaatcgctcacgatttcaaaaccgatc

SEQ ID NO: 3624 - DNA, 322 bp, Glycine max
gtcatagtgaaagtggttgttgtgtgtgtgacattggcttggagctcttgggctgcatatcctttcatgagttctgcagtcaaccccaggagaaaagctcttgcactcgagccagtttttctcatgtatgtatctgttggttttctcatcattgccattgactaaatgcatcaatgcttctgatttctttattacgataacgacctggaatctgcgtctaaataggaatttttgtttgatgatcaaccatttttttttaattcttttctgggcctccgtttgtctgttgagaatttggttagatatatttgaagacaaacag

SEQ ID NO: 3625 - DNA, 337 bp, Glycine max
  modified_base (175)..(175): a, c, g, t, unknown, or other
gatcgttattgtgttgcttaatcttttttccacaaccttgaatgtttaccgccccgccgggataaggagaaagagaaagaggatctgcgtcgcaggcactgttcatcgccatgtctcgggttgataacagaaattcctcagccaccaagcgtgctaggactgatggtagtcgtanggaagatgattggacatgccccagctgtggcaatgtcaatttctctttcaggacaacttgtaacatgcgtaattgcactcaaccaaggccggctgatcataattcgaaatctgctgccaagcctctacaagctccgcagggttattcatcctcagctcctta

SEQ ID NO: 3626 - DNA, 141 bp, Glycine max
ggagaacctttgatgtttagggaaaaggagagaaaaatgaatggtgaaaatttgatttctgaaagacttctgttgaaatctgtgtccatgtaaacattactcttctggttgatatttagtaacaagtgtctctttctgtcc

SEQ ID NO: 3627 - DNA, 340 bp, Glycine max
gattgcacagtgttattttcagtatcagcatcatggctccaattgcagtgggagatgtcattccagacggcattttggcttacttggatgaagaaaacaaaccccaaactgtctctattcactctctcgccgccggcaagaaagtcatcatctttggggttcccggtgccttcactcctacatgcagcttgaagcacgtgcctggcttcattgagagagcagaagagctgaaaggaaagggtgtggacgaaataatctgtatcagcgtgaatgatccctttgtgatgaactcatgggccaaaacgttcccagagaacaagcatgttaagttccttgctga

SEQ ID NO: 3628 - DNA, 309 bp, Glycine max
gacactaaacaagttaaaagaagagcatcactgaactaacaaagcaaccctatgtcgaaggtggtttgtgtcaccggagccagcggcgccatcggatcatgggtggtcctactcctcctccagcgtggttacaccgtccatgccaccgtccaagatatcaaggatgaaaatgacacgaaacatttggaggaaatggaaggagcaaagagtcatcgccatttttttgaaatggatcttcttgacatcgactccattgccgctgccagaaagggttgttccggcgtaatccaccttgcatgtcctaacatc

SEQ ID NO: 3629 - DNA, 410 bp, Glycine max
gaacgttttcatactttgcagcatccattcttgttctcttctttctttcgatcagggtttcccctcgtctccgggctcgtttcgttctcgaataatcgatctacgataatgactcgcggtagccagagggatcgtgatcgcgaaagggctcaggctagaactggtgctaaaggcaagcagaaagatgatggattgacccctgaacagcgcagggaaagagatgcaaaggcgctgcaggagaaggccgcaaagaaagcggcacagggtgcaggagggaataatgcagctggaagcaaaaaataggcaataattcaatgagtagtttgagtttgccgtatgttgattgtggacatggaatttgtggaaattttatgttgcattaatcatggagtatgatgtgtttattaatg

SEQ ID NO: 3630 - DNA, 274 bp, Glycine max
ggtctagcccgccgagaaaaccctaattcgctcgcagtcacccaagaggcgaatccttaccattgctcgagatgggtgaagaagtgaaggccgtggttccagagtctgttttgaagaagcagaagagagaggaggaatgggcgttggccaagaagcaagacctcgacgctgcgaagaagaagagagccgagagccgcaaactcatctacaacagagctaagcagtacgctaaggagtacgatcaccaggagaaggaattgattcggttgaaacg

SEQ ID NO: 3631 - DNA, 253 bp, Glycine max
catccatgatctggatgtgaatgagtcaaattacttatccctcggtcttttaatgaggtagctctccaggaattgtgcattaatgttctatgaaacgtattcatgttactgcttcgacgcatattccctacaatttacatgcggttctaatacatcctaataactgagatacatgtattgttatacaactgattcttatttcagaacatcgaccttactttatcagtctttcaaacaataagggatttcactt

SEQ ID NO: 3632 - DNA, 301 bp, Glycine max
atctgctctatagcactcaaccacacgatctccttcccaatggtcaacattgcgcgatctaaatcagcgctaggtgcagtcgtcgtcataaatagccaagttcaagctaacgtaagctcctctttgtgcaagctctgtatgatccatttctggatccacgtgactctgacgtcacaacgctaccatgacacgctctcatgtcctcttcaatgtccgtcgatttcaattccacgaacctcgcatcaagtctagtgacacagtctaaccgtcgctcaaccaatccaccttgcgtcacaacaaa

SEQ ID NO: 3633 - DNA, 328 bp, Glycine max
gactttccattctcttcaaacctaacgcagcatcgctattctcttcattccatggctttgcccaaccagcaaaccgtggattaccctagtttcaaactcgttagcgtcggcgatggtggcacaggaaagacaacctttgtgaaaaggcatctcaccggagaattcgagaagaaatatgagccagccatcggtgtggaggttcacccagtgggattttttcaggaactgtgggaagattcgattttactgctgggatactgctggacaggagaaatttggtgggctcagggatggatactatatccatggacaatgtgctattatcatg

SEQ ID NO: 3634 - DNA, 102 bp, Glycine max
ctacacttaaaattacaattttagcgtgggaaacgtcgctgttttatttatgttcaatgcagtttgacaactgcagaaaatgacatatgcagatattgcgga

SEQ ID NO: 3635 - DNA, 113 bp, Glycine max
gcacctaaggggagacatcttcggatttcagcatttctactctccaaacattcgaattcgcattctcatcactctttcgccattccatggcttcgggatataacacatcggcg

SEQ ID NO: 3636 - DNA, 286 bp, Glycine max
tacaacagcagagaaagggaaagttaatgggagcctctcatcttctgtcgaccagcttttgcttcgttgtgaacatggacatgaggacaacaggttgcatcctcatctagccctgcatccgagttcatgcgtcttagatggtgtcacaaactgcaggacaagtgtgttagtcattacagcgtcgggttcgaggaggatgtttaagagacacaacatctgcgccttggactgcaggaacgattggtgctctggtgtcatgtccaaaaggttcggacggatcggcctt

SEQ ID NO: 3637 - DNA, 362 bp, Glycine max
agacttctgccaaaaagccttactccaggtccattgtcggtgccactttggaagttatccagaaaaagagagctgagaagccagaagttcgagatgcaaatatggaagctgcccttcgtgaaattaaggagacgaacaagaaaacaaaggatgagaagaaggctaagaaagcagagtttgccaagtcccaaaaatcacaagggaagggaaatgtttcgaagggtgccatgcccaaaggtcccaggcttggtggtggaggcgggaaacgctgagcctttactttggttcccatttttggctacatttaaaagagtgttgtgttgaatctgtactattttactgttttagtaaaccgttggttg

SEQ ID NO: 3638 - DNA, 418 bp, Glycine max
cagcggtaaagttgtgccttggtgacctgttggtcatgggttcgaatccggaaacagcctctttgcatatgcaagggtaaggctgcgtacaacatccctcccccataccttcgcatagcgaatagcctctgggcaatgtggtactaagttttttatgagataagattttttattgttttactgataagggactgcaatcattcattccatcacttgtatatgctgcctatagatggtaaacttagaacagtatgctatagagaataatggatgaatacagaatactccacatatatgaatataatacacagtaacatttttggtattttccttgacagactgatctgtaatatatttacaaatttcatcattatctataatttctattagaatattcactttaagatggattgattca

SEQ ID NO: 3639 - DNA, 359 bp, Glycine max
cccacgcgtccggcgagaagtacgagagaacggggcactttcattctctaggaaaatctaattcgctttggtcttcatcctctgttctgatccaagtatggcttctaaactcatcttgaaggagctcaaggatttgcagaaggatcctcctacctcatgcactgcatgccctgtggctgacgacatgtttcactggtaagccacaatcatgagacctgctgataccccatatgcaggtggtgttttcctagtttcaattcattttcctcctgactaacccttcaagccatcaaaggttgcttttcggactaaggtgttccactcaaagatcaacagcaatggcactatatgtcttgaca

SEQ ID NO: 3640 - DNA, 443 bp, Glycine max
  modified_base (425)..(425): a, c, g, t, unknown, or other
ggaaagtgcctgaagctaactccaacactctaataatcattcggattcaggggaaaaaggacatgcatccgaggacgaggaaggtgttgtacagcttggggttgaggagaagattcagtgctgtgtttgtgaagccaagtgagggaataatggccaagcagcagagggtggaaccatatgtcacctatggatatcctaatcttaaaagcataaaggagctaatttacaaaaaaaggacatgcaaggatggaacagcgaaaagttcccttgactgataataacattattgagcaggaattaggaaagttcggtattgtatgcatagaagacatggttcatcagatttataatgctggtccacactttaaggaagttgttagatttatgtggccctttgagctcaacatgccagctgaaggattganaagatcaaaaacctcatt

SEQ ID NO: 3641 - DNA, 135 bp, Glycine max
gtttcattttgattgacttttgttttgtgcatacatgtcatttgaactgttacgttagtatttacttcgttgttgtcaatactgtttgttgaagttccgaaatcgcgtagaatttttcatttaggaacgtcgtcc

SEQ ID NO: 3642 - DNA, 300 bp, Glycine max
ggcgtgtgttcctcaactcagcacactcctttataaatgcagcgtcgacaaaaaccctaactcctaacctttttttcctccatgcagctcttcagcagtcgttacagagactccataacccgaacatgcctttcaagaagtacgttgagattggaagggttgctcagatcaactatgggagagagtatgggaggctcgtagttagtgtccatgtcattagccagaatatggctcttgttgacgctcctgacatggtgaggtcccaattgaacttcaagatgctagcactcactgacatca

SEQ ID NO: 3643 - DNA, 251 bp, Glycine max
gccctaaaaccctcgctgccgtcgtggtggccgcccaagaaaagagaatagagagcgcaaacgagtcttcatcttcgactcaccatgaagctcgtcaggtttttaatgaagttgaacaatgaaaccgtgtcaattgagctcaagaatggcactattgttcatggcaccattacaggtgttgatatcagtatgaacacacatttgaaaacagttaaactaactctgaaagggaaaaatccagtgactctgga

SEQ ID NO: 3644 - DNA, 302 bp, Glycine max
  modified_base (185)..(185): a, c, g, t, unknown, or other
gacggataactattcggtggcacaggcggtgatcactccatgggctcacctcgctttgactgagacacgacattcggtggtcatcgtaatggacacactggaggtcgacgcggacctgtcagtgattacggtgactcagttggcgctcctgctgattacacgacttcatttgggggttgtcctgnccgactgccttgattgagttctggatcatgtggatatcgcgcaccgactaattgatacattcggtcgtacatattggatatcagtgctctagtgggtgctgttggggcagtcatagg

SEQ ID NO: 3645 - DNA, 338 bp, Glycine max
atacaacggtacagctggggggggaccactgtttgggatcgtgcgcaacttgtgaatattctgatctctccatgagatagctcgactcggaggtagttttctgtgattgctgaatttagttaaggatgttgaatctgagattcttgtgctacaagatgctcgtagatcaacgacgatgttaagcacgtaagcattgttgggacattgaggttctcacaggcaagtcatcagagactgtcatctgatgggtaagtgcagcataggttttgagacttacccatggttgtgacaatttgcgtggtcgatgcaattacatattgtcgcatcatgatcttgtt

SEQ ID NO: 3646 - DNA, 363 bp, Glycine max
gatccaactctctaaacaacacattaacctttcgcaatccccatctcctcaccttagtcatccactgctaatttctatggctccgaaatggacgctggcggaaagatcaagaagggcgccggaggaagaaagggcggcggccctaagagaaaaccggtttcaaagtccgtcaaggacggtctccaattctccgtcggaagaattggccgtaatttgaagaaaggaaggtacgcccagcgtgtcggtaacggtgctcccgtttacttggccacagttctcgagtacctagctgctgacgtgcttgagttggctgggaatgctgcacgtgacaacaagaataacaggattattccgagacatgtg

SEQ ID NO: 3647 - DNA, 333 bp, Glycine max
gattataacactgtcactcttacattctcagtccaaatcattcttcttcttccatcgacaatcagtctttgtgtttcaagatggctcgtacgaagcatacagcaagaatgtccaccggaggaaaagctccaaggaagcagctcgccaccaaggcagcacgtacatcggctctcgcgaccggtcgcctgatcaagctccaccgtttcaggcctgagatagtggctctgagggagattcagcattaccataacagcactgaacttttcattaggaacacttcctttctagatgctcgtaaaggaaatctctcatgacttcaaaaccgatctatgc

SEQ ID NO: 3648 - DNA, 366 bp, Glycine max
  modified_base (161)..(161): a, c, g, t, unknown, or other
cacgcgtcaacccaagcgtccgacggcagaaaacgacataaggggactctcactctcactctcactctctcagctcaggagtgtataaccctgacaagtcaatctgaggtcccttgccctaaaggaaaagttggttgactattcgtcagttcgatggatcntgttattttgtggtccttcccatctccttcaacatttatttccttacataccttggggatgtaagatctgagtggaagtcctataagacgcgtcagaaggaacatgatgagaatgtgaaaaaaggtaacaaacgtctcaaacaaaggaatccatcaaaagatggtcttgtctgtaccgctcgtaagccctggattgctgttggga

SEQ ID NO: 3649 - DNA, 340 bp, Glycine max
ggatatgaacggtgaaccggatcccccttcgaagtgaattatattgcagtgaatcacacacactctgaacaacgcccaccatgcaggccagtgataggtttaacatcaattcccagcttgagcatctccaagccaaatatgttggaactggccatgccgatttgaacagatttgagtgggcagtgaacattcaacgagatagctatgcatcatatattggacactaccctttactgggattctttgctaatgctgaaaatgaatctaatgggagagaacgctacagctttatgcagaaaatgctcctgccttgtggtttgcctcccgaaagagaagaaga

SEQ ID NO: 3650 - DNA, 108 bp, Glycine max
gagggttacacgccgtcgtcactgtttttgtgtgtcgcttcttcgtatgtgcagctgcaatggtgaagggacgccaatgagaacgtgtcagactctacctgaggggta

SEQ ID NO: 3651 - DNA, 332 bp, Glycine max
tgggggccgaaaagtagtaccaagatggcttcagttgtgtatctcctctttggcttccatctcattgttatcatgtcaagttccttacccgcaactagtgaagtgtttgcagaacagtatccatccacagaacccgtggaagaaaaactcacccaactcgacttcgatttccataacaacataacgggggaacacccaactgctatgaaaactgttttgcctcctaaagggtccattcatggttttggggctacttacatgatggatgacactctaactgaaggacaaagtccaacttcaaagcttgtcggaagatttcaaggaatatacgc

SEQ ID NO: 3652 - DNA, 355 bp, Glycine max
ggagagtaagggcggtgcagtgcttcaaacccctttttctcttctcatttcctttcatcactcttgcatcatttcttcttctcgcaattttccattttcacacttttagcaacatcttttaatggcgtcccaaatccgtgagtggtctggaatcaatacattcgcacctgctacccagactaagttgcttgaactcttgggaaatcttaaacatgagaatgtgaactccttgactatacttgtgatgggaaaaggaggtgttggaaaatcttcaactgtgaactccatcattggggaaagagtggtttcgattagtcctttccagtcggaagggccaagacctgtgatggtgtca

SEQ ID NO: 3653 - DNA, 296 bp, Glycine max
gtattggtcaaacgggtatcatcagctgaagaaagttttgatagagcgctacaatcattttcctcatgagtgtcgatgattgaatttctttcaagagttgaatggtgtgaggtcttcccgtgcaatttttacaccttatcgtggctagtgtattggttgcgtatcttagaacataatcaactgggtaatgtgtcatagtagtcaaatttgttatgtttttggttacttgagtcttgatgttgtaaaagcgtgatcggagattaatttttagacatggtcatttaaaagaggggggg

SEQ ID NO: 3654 - DNA, 429 bp, Glycine max
ggaagagtgttgtgttgagatgggttggtattgaggggaatgttggctggctcgaggcttttcacaaatgaggttcacagtggatggaactataaggcttcggaccaggcttcattcccctcaaaagttcttcctttcatttgtttctacttcaaacttcaaacacaagatcatgtgtgttgtgtgtggttgagaacttgacatgcttcttcttcctagcttgcaaaggtgaggttgagaggaatgttgtctggctcgaggtcatggaggaggaggaggagtagagtactgagatcagtgaaagtttccaatggaaatttaccctcttacacaaaaaaatgattctcggaccaggcttcattccccccacccaacttttgctttttccttaatttaaatttctttctctccattttcatatctcgcatg

SEQ ID NO: 3655 - DNA, 395 bp, Glycine max
gacacaccgtttgttctattcttaactcaacttctgctacccactctcttcttccaagtccaaccacgcttttctctacagtcatgggcaaggtcaagatcggaatcaacggatttggaagaattggccgtttggttgccagagtcgctctgcaaagagacgatgtggagctcgttgccgttaacgaccctttcattaccaccgattacatgacatacatgtttaaatacgacagtgttcacggacactggaagcatcacgatgtcaccgttaaggacgagaagacccttctcttcggtgacaagccagtcactgtttttggacacaggaaccctgaagagatcccatgggggtcaactggagctgatatcattgttgaatccaaccgagttttc

SEQ ID NO: 3656 - DNA, 336 bp, Glycine max
agaaggggagcgaaacagagagtgatttcagtgagtgatcggtgttcacttgatctcatcataatcgtcagcgtcaattgaagaagatgccgatcagaaacatcgccgtcggaaggcctgaagaggcgactcaccccgacacgttgaaggcggctttggctgagttcatctcaaccttcatcttcgtgttcgccggctcaggctccggcatcgcctacaacaagctcaccgacaacggcgctgccacccctgccggcctcatctccgcctccatcgcccatgcattcgccctcttcgtcgccgtctccgtcggcgccaacatctccggcggccacg

SEQ ID NO: 3657 - DNA, 275 bp, Glycine max
gagggatcgcatttgtaatcacaataacagattttcaaactcatcaagcttcaaagcgaatcttattgagaaaatgtctggtcctggtaaaggtggcgacggtttaggaaatggaggtgtcaataagcataagaaggttcttcctgacattcatctagtgcatcacaaaacctgtcattcgtaggttagcgacaagatgttgcatgaaaaagatcagtggtttggtctacgaagcaaccagcagaattctgaccatactcctggggaacgtgaat

SEQ ID NO: 3658 - DNA, 338 bp, Glycine max
ggagcatcctcactgcatttgttcaataaagggaagatggtctcttgcatatacctaaagtgttgaagctgatggctctatgatgcagcaaactggcatgtttatatctcttctgaagcaacaccttggcttggtctatgatatgcctgtaatagttagatatgcttgccacccaagagatatacggtgactttgtgaattgggtggctgcattgtgactagtctcattatgctcgtgctcatgtttctgcaagcaacaccagccgttctcaattaggatcacagctacctcctacctgtaaaggcagccaatgatgaacagaaaataccgtttttac

SEQ ID NO: 3659 - DNA, 316 bp, Glycine max
gacttcaattgcgatcaaattagttcattcactttgcgcaattccctacctctcctttcaagatgcagatcttcgacaagactctcaccggaaacaccatcagccttgaggtggtaagctctgacaccatcgacatcgtcaaggccaagatccaggacaaggaaggaattcccccggatcagcaccgtctcatcttcgccggaaagcagctcgaggacagccgtacgctcgccgacgagaacatccagaaggagtcaacccttcatcttgtccttcgtcgccgtgggggcatgcagatcttcgtcaagactctcac

SEQ ID NO: 3660 - DNA, 340 bp, Glycine max
gaccgtgcgctagttctgagtattctgatcgctccctgagagagctcgtcgcggcggttgcataagaagattgcaagatgaagttcaacatcgcgaatcccaccactggatgccagaagaagctcgagatcgacgacgatctgaaactgcgagcattttgggacaagaggatctcacacgaggtcatcggagatgcactcggtgaggaatttaagggctatgtcttcaaaattaccggaggttgtgacaaacaaggatttccaatgaagcaaggagtgctgactcctggtcgtgttagacttctgcttcacaggggaactccttgcttccgtggatatgg

SEQ ID NO: 3661 - DNA, 384 bp, Glycine max
agggattatcatagtagatattcattccccttatctttctctcttctctctccccgcccaaaccctaactccctaccctattccgctttctctcatccatcatgaaaggaggaaagtccaagaccgaatctaaaagagccgatgccaaacttgctgtgaataagaagggcgccgccaccaagactaggaaacccgccggaaaggggaaggcagcgaaagatcctaacaagccaaagaggcctccaagtgctttcttcgttttcatggaggaattcaggaaggtgttcaacaaggaacatcccgacaacaaagcagtgtctgctgtgggcaaagctgctggagcaaaatggaagacgatgtctgatgctgaaaaagcaacttatg

SEQ ID NO: 3662 - DNA, 193 bp, Glycine max
tgtagttcagcgtcatcctttcattagcataccattatatcagattccaaagttcattatccgcatgaatgacactaagaggatttctgtcattattggagaagggtggggctcttacgtacaatcattaccaactcattccgagtggcttccaagttgcgtatcttagaacataatcaaatggcgtgcgctc

SEQ ID NO: 3663 - DNA, 308 bp, Glycine max
ggtgtcccacgagtccataaagctgcaaaatgagaaattcgtcgtcactttcacactttctctcgcattcactcatgcacacgtatcattgcataaaggtgacggaaggcgcttcgtgcatcgaaaatcaccgcggcgaattctgacaaagctacggacagtaacaaacctaattctcgctcttcccgtgctgaaatccagtttcctgtcggacgtatccataggcagctgagacagatggtccaatccaactagacatgttgaggcaacagctgcactgtacttagcctcaactctagagtatctga

SEQ ID NO: 3664 - DNA, 268 bp, Glycine max
  modified_base (190)..(190): a, c, g, t, unknown, or other
  modified_base (213)..(213): a, c, g, t, unknown, or other
gacgccaaaaccactgtatcagtgtgtccttccattccaggtttttccaccacactagaaagtaactttaaggttactatgatcttttttcaacatgattcatcacattttcaagcacacactgcattaagaagcgagaaatcataactcatacatatatatggtcacttataaataattcttatagcanaacggatggcatggaaagcgtanggaagaatgtgcctgtaattgtccttgtccaaattaaagtctgtaattggccttt

SEQ ID NO: 3665 - DNA, 192 bp, Glycine max
gagctttcagttggcgcgggtgaggtagaacccttccactgtggtgactctgcgatgggtgcctacaagtatgtttcagagctatggcgcaagaagcagtctgatgtcatgcgcttcttgcagcgggtgaggtgctgggagtataggcagcaaccttccattgttcgtttgacaaagtctacccgccctgac

SEQ ID NO: 3666 - DNA, 375 bp, Glycine max
gacatagcagaatggcttctactcaatgtttcttgcaccaccatgctcttaccacccctgccagatccccatcacaacgcatcatggttagcaccaagcctaaccagcttgtttgcaaggcacagaagcaagaggatattgatgtcagcccaatctctcgccggttagctctaaccgtgctcattggtgctgctgctgttggctccaaagtccaacctgctgatgcagcttatggggaagctgccaatgtgtttggaaagccaaagacagacacagatttcctgccatacaatggagatggattcaaactatcgattccctcaaagtggaacccaagcaaagaagttgagtacacaggtcaggttgttagatatg

SEQ ID NO: 3667 - DNA, 363 bp, Glycine max
ggttcaaagttgaagctgaaagtgtctgaaactggaagttgatatctataaagcgctcactctgtcttaggtggggttttaagtgttgtgttaataacagaacttcatcgtgacaatggttttgataagtggcaacaacaaaagtgtcttacaacaaacaaatgatgagagggccaaagcacaaggtgttacagtgcttcagaattcacatcagcatggaaacaagaacattgaaagtgggcgtacacagaatgtggtcaactctgggttgaccaaagcaatatcaacaatggatgaattcaagtgtggatttccatcagaaggcctatcgaccacatcaaataaatggtggggaaatagtga

SEQ ID NO: 3668 - DNA, 365 bp, Glycine max
ggtttctgcagcagttgagaggaggcactgtggcagaagtcctaggagtgtaaaacagagacgcaaaatgaagacgatcttgtcgtctgagaccatgaatattcccgacggcgtgagcatcaaggttcacgctaaggttatcgaggttgagggccctcgtggaaaactcgtgcgagacttccaccatctgaacttggacttccaacttattaccgacgatggcggtaaaaggaagctcaagattgattcttggtttggttctcgtaaaacctccgccgccatccgcaccgccctcagccacgttgagaatttgatcaccggcgtcaacaggggataccgatacaaaatgagattcgtgtacgctc

SEQ ID NO: 3669 - DNA, 273 bp, Glycine max
tcacaatgaggatacaaaagctccctcttctgatttaaagttgaggaaaattgctggcagaatcgaaccataaaatcttagccatcactgagtgatctcttttccccagttatcttttgcctctttctgatttttcgatccctaaatttcactttagttttttcttagtctaattatatttgtgaatgtgtttttagttgtgttctatttgaatgtgttgaggtcagtgatgaattcaatttgcctacattggctgagtatctggtttttatt

SEQ ID NO: 3670 - DNA, 386 bp, Glycine max
ggagcaaaaccctaatccctatttttcttcctcagtagtgtcatttacgcttctcttctctgcagcaactatgcctaaccctaaggtcttcttcgacatgaccatcggcggtcaatctgctggccgcatcgtgatggagctctacgccgacgtcactccccgcaccgccgagaacttccgcgcgctttgcaccggcgagaagggcgtagggcggagcggcaagcccctccactacaagggctcgtccttccaccgcgtgatcccgagtttcatgtgtcagggtggcgacttcaccgccggaaacggaaccggcggcgagtcgatttatggcgccaagttcgccgacgagaacttcgtgaagaagcacaccggtcccggcatcctct

SEQ ID NO: 3671 - DNA, 381 bp, Glycine max
ggtgttgtgccttttcactactactttgttcggtagctacttcgcttctaccctccattccattctctgaagtgcaggaacaatgtctgagaaaatcacagctgaaaaccttttaaacacccttgtggaaacacttactgagaagcaaaaatctggatcattttttgaagaagacaagtcaagctcagtgagctaccaattcaacagactgtttggacgccagaaacctgtgcaccatattttacggggtggaaaatctgctgatgtcttgttatggaggaacaagaagatctctgctagcgttttatcggcagcaacagctatatgggtgctttttgaatggcttaattataatttcataactattttagtcattgttgt

SEQ ID NO: 3672 - DNA, 81 bp, Glycine max
gccggtttcccgaacgatttgatggtttggaatgcatttcccaagcaacgagtcttcggttcgaaaccagcagagagagac

SEQ ID NO: 3673 - DNA, 281 bp, Glycine max
  modified_base (255)..(255): a, c, g, t, unknown, or other
  modified_base (262)..(262): a, c, g, t, unknown, or other
gacgttcacattcaggaatcgttttcttcagaaaatttgccatcgttgagggaagcgcgagagccttcgttgttcaagatgagagctaagtggaagaagaagcgcatgaggaggttgaagaggaagcgccgaaagatgagacaaagatctaagtaggtgcttgaacaaggagtggagatgatgtgcttttccatctgctaccagcttcatgacattttatgctgtcatggctcttatgatgatcttgaggtctantggcgangggagctttcatcttgact

SEQ ID NO: 3674 - DNA, 433 bp, Glycine max
gaatcctcagaatcagcttcagcctttctctctaactccctcactcacactcacagttaagcaatggcggggaaaggaggaaaggggcttcttgcagcgaaaaccaccgcggctaacaaggacaaagacaaggacaagaagagacctatttctcgttcatctcgtgccggaatccagtttcctgtgggacgtatccataggcagctgaaacaaagggtccaagctaatggacgtgttggtgccactgctgccgtatacttagcctcaattcttgagtatcttactgctgaagttcttgaacttgctgggaatgcaagcaaggatctgaaggtgaaaaggataacaccaaggcatttgcagcttgctatcagaggagatgaggagttggacaaccttattaaagggaacattgctggtggtggtgtcattcctc

SEQ ID NO: 3675 - DNA, 379 bp, Glycine max
  modified_base (331)..(331): a, c, g, t, unknown, or other
  modified_base (342)..(342): a, c, g, t, unknown, or other
gtcagcaacagcagttacagcactcaaaaacctagagcgaagagcgtgaaggcaccggccgccggccatgacattcaagcgcagggacggaggtcgcaacaaacacggccgtggccatgtcgaattcatccgatgctccaactgcggcaaatgctgccccaaggacaaggccatcaagaggtttcttgtgaggaacattgttgaacaggctgcagtcagagatgtgcaggaagcctgtgtctatgaacaatacacgcttccgaaactatatgtgaagatgcagtactgtgtttcctgtgctatccattctcatgttgtgagggttcgatcncgcactgatangaggaagcgtgagcctccacagcgattcatcaggcgc

SEQ ID NO: 3676 - DNA, 273 bp, Glycine max
gccttcctctcagtgcagcatcgtagagaaataagggaaaaatggtgtcgctgaaactgcataagcgcctctccgcaagcgtgctcaagtgcggcagacgaaaggtttggcttgaccccaatgaagtcaacgaaatctccatggccaattctcggcaaaacatcatgaagttggttaatgatgggtttatcatcaggaagccaaccaagattcactcccgctcacgtgctcgtaagatgaatgaggcaaagaggaaaggccgccactccggtt

SEQ ID NO: 3677 - DNA, 334 bp, Glycine max
gaacatcaactaactccttcttagttcaacaaaaaaggtcctcaattttccacactttcctttccttcaacaaaaaatgtcaacagatttcacgcttttgttcttcccggaactcatgcagtcccctatgatcactttccaagccaccctctgcgtccttctcttcaccctcatgttcaagctgctcttcactcctggtgggcttccttgggcctgggcccggcccagacccatcatccctggcccagtaactgccctgttagggatctttactggctccacgcctcaccgtgctttatccaaactcgcccgtaattaccacgcggaaaaactc

SEQ ID NO: 3678 - DNA, 331 bp, Glycine max
gtgctgagattgcccacaatatatccacaagaaagagaaaagatatagtcgagagagccgcgcagcttgatgttgttgtgacaaacaaaacggccagattacgcagccaggaggatgaatagtctaaatgactgaaaaagtcacttatctgtagtgattctgtagttcaatatcgaagttgcagtttaattttaaattgaattttgcttcagtgtattttgcttcagtgtattttgcttattgggaaccaggtttttgatgtgcctctttcatgtaagtcgtatcttgatttgtttttaggaacaaaaatatacgaaaccttaatctaaac

SEQ ID NO: 3679 - DNA, 347 bp, Glycine max
gggtggagtgtgcaaaagagcgtcgtagtcgcaaccctaatcagaagaagcgcagcttcaagcgagtgacagccaccagccatgggtcgtatgcacagccgcggtaagggtatatcctcttctgctttgccctacaaaaggacacctcctagctggctcaagatctcttcgcaagatgtcgaagaaaatatctgcaagtttgcgaagaaaggtttgaccccgtctcagattggtgtcattctcagagattctcacggtattgctcaggtcaatagcgtcactggcagcaaaatccttcgcatcctcaaagctcacggacttgcgcctgaaattccagaggacctgta

SEQ ID NO: 3680 - DNA, 410 bp, Glycine max
  modified_base (397)..(397): a, c, g, t, unknown, or other
gtctttttgctgtgggaagaggaaccctagctagggtttggcagaagctgatccgagaagatggtgcagcgtctcacctaccgcaaacgccacagctatgctaccaaatccaaccagcacagagtcgtcaagactcccggtggcaagcttgtttatcagaccacgaagaagagggccagcggacccaagtgccctgtcactggaaagaggattcaagggattccacatttaaggccagcagagtataatagatcaaggttacacagaaaccgaaggactgtgaaccgtgcatatggtggtgtgttgtctggcagtgctgttagagaaagaatcattcgagctttcttggttgaagagcaaaagattgtgaaaaaggtcttgaagattcaaaagacanaggaaaaacaagc

SEQ ID NO: 3681 - DNA, 353 bp, Glycine max
ggccctagtttttcttcctccttcagccgttgccctgcttcaaccttgcggaagaagaagacgccgcagccatggtgaagtactccagagaacccgacaatcccaccaagtcctgcaaggccagaggcgctgaccttagagtgcatttcaagaacactagggagactgcctttgccatcaggaagttgcccctggttaaagctaaaagatacctggaggatgttttggcccacaaacaggccatccctttccgacgcttctgtggtggtgttgggaggacagcccaagctaagagcagacactccaatggtcaaagacgctggcccgtcaaatcagctaagttcatcctagat

SEQ ID NO: 3682 - DNA, 104 bp, Glycine max
tgcccagtgatggaaaaataaacctattgaacggctacatgattatgttcgtaactggatctgcaccattctcattctctctctctctctctctctctcccccc

SEQ ID NO: 3683 - DNA, 407 bp, Glycine max
  modified_base (252)..(252): a, c, g, t, unknown, or other
  modified_base (328)..(328): a, c, g, t, unknown, or other
gcaggctcgtttatataaaagggagtccttatcttctcgcattgttttaggttttcttagatagagttgttaccatttgctcccagtacagagcttaaccgagcttcacaaagatgaatcgggaaaagttgatgaagatggccggttcggttagaactgggggaaagggtaccatgagaagaaagaagaaggctgtccacaagacaacaaccacagatgacaaaaggcttcagagcaccctgaagagaatangggtgaatgccatcccggctattgaggaggtcaatatctttaaggatgacgtagttatccagtttctaaatcccanagttcaagcatccattgctgctaatacttgggttgtcagtggttctccacaaacaaagaagttgcaagatatactccct

SEQ ID NO: 3684 - DNA, 54 bp, Glycine max
agagtaagagaatttctatactccctttgttccagattgtatgacattttagag

SEQ ID NO: 3685 - DNA, 401 bp, Glycine max
agaagggcacaaaaacaagatttgtaacataaactgtcctttttattatgcttttacccccaaacaaaaaacacaaaatcacccttaaaaaaaaaaaaacaaaaaaaaaaaaaaaaaaaaaaaaaaaaaaaaaaaaaaaaaaaaaaaaaaaaaaaaaaaaaaaaaaaaaaaaaaaaaaaaaaaacaaaaaaaaaaaaaaaaaaaaaaaaaaaaaaaaaaaaaaaaaaaaaaaaaaaaaaaacggccccacaaaaaaataaccaaacttcaacaacatccctagaacgacaaaacccctcttagggacccaccaaataaacatccgcgggccctttttaaaaaacacccgtcaggaaaaaccccatgaacccccacacataacccccttacaaaaagccccc

SEQ ID NO: 3686 - DNA, 322 bp, Glycine max
gagtcacacagctaactaagaaagtcttccatagccccccaaaaatgaagagcaccatcttctttgctctctttctcttttgtgccttcaccacctcatacctaccttcagccatcgctgatttcgtgctcgataatgaaggtaaccctcttgaaaatggtggcacatattatatcttgtcagacataacagcatttggtggaataagagcagccccaacgggaaatgaaagatgccctctcactgtggtgcaatctcgcaatgagctcgacaaagggattgggacaatcatctcgtccccatatcgaatccgttttatcgc

SEQ ID NO: 3687 - DNA, 367 bp, Glycine max
ggatttggatttgggggaacatttggttgattagggtttcttcgggtgctaatgctcttgttttctcacagtcacacagcaatggaagcaatcacagagggagtgaacaacatcaacatctccgattcttacaagaagaatcgcattcaggtctccaacaccaaaaagcccctcttcttctacgtcaatctcgccaagaggtatatgcaacagcataatgaagttgagctctcagcactaggaatggctattgctacggtggttactgttgctgaaatcttgaaaaacaatgagcttgctgttgaaaagaaaatcacaacatcaacagttgacatcaaagatgattctagaggcagacctgtccaaa

SEQ ID NO: 3688 - DNA, 191 bp, Glycine max
gtcgaatcgggatcaactaggacagaaatcaagcattgggtcgaactcttctttgatgtcaaagtaatagctatgaatagtcatcgactcccggtaaagggtagaagagtacgacctattatgggacatacaatgcattacagacgtatgattattacgcttcaaccgggttattctattccacctcttag

SEQ ID NO: 3689 - DNA, 318 bp, Glycine max
gatagaagaagcagaaagagaagcattagcaaaagcaagaagaactagtctaagcagaaatggcctcttcagtgatggcatctgtggccctcaaacctgcccctttcactgttgagaagtcctcagttagaggccttccctccctctcaaggaactcctcttcattcagagttgtggccagtggtggcaagaagatcaagactgacaagccttatggaattaatggtggcatggctttgagggaaggagttgatgcatctggcaggaaaggaaagggaaagggcgtttaccagtttgtagacaaataccgtgctaatg

SEQ ID NO: 3690 - DNA, 368 bp, Glycine max
gacttcacaactcaaactgcttcattgcattattgcagataagatcaaccctactcccttcagattcgggccaagatggcatcacttcatgctaatgtgacatcagttgtttgcaagagtggcaaccatgcttctcaatcgaaattcacaagctcttcattcttgcctgggtttgatgttgttggtcgtgcttcaaatgcttggaagaaagaacttgtcccatcttccatttccttggtgcctagagccacactaacatttgatcccccaactaccaactcagacaaaaccaaacaaaggaagcacactgttgaccctgcttctccagattttcttgcccttccttcatttgaacagtgctttccaaa

SEQ ID NO: 3691 - DNA, 106 bp, Glycine max
attactattactgatcaatcaaaatatctatcaaaagtaaaaagcgaagagaagggaaaaactttaatttttttatggtaaaaaattcaattatacctgttatttc

SEQ ID NO: 3692 - DNA, 361 bp, Glycine max
ggccgagcgtgtctctccgcagcagccttcttcgccgtttcagctcaagagccaccagcaggtaagatatggttaagcataacaacgttatccccaatgggcacttcaggaaacactggcaaaactatgtgaagacttggtttaatcaaccagcacggaagaccagaaggcgtttagctcggcagaagaaggctgtcaagattttcccaaggcctactgctggacctctcaggccaattgttcatggccagactctgaaatacaacatgaaagtcagatctgggagaggattttctctcgaagagttgaaggctgtgggaattcccaagaaacttggtccaactattgggatttctgttga

SEQ ID NO: 3693 - DNA, 312 bp, Glycine max
  modified_base (238)..(238): a, c, g, t, unknown, or other
  modified_base (242)..(242): a, c, g, t, unknown, or other
gatcatcaataggtgttttcatttgggattcaaactcaccatggtggacgccttcaaactttgcatcttccttcttgcgtcgatctgtgctttcctagtcttttctaatccagtgctgtgtagtgataaggaggacagtgtattcaagggaatcaacagctacaggcaaacacggagcctggtacccctgagccaagtttcgaaggcaacatgtttggctgatgaagttgcagaaganatanagaagatgccctgtgaaaacgtgaaccaatactacccttcatctgttcctggtaatgggaaactcaaaat

SEQ ID NO: 3694 - DNA, 393 bp, Glycine max
ggacgttatatctgccagttgcctagatgacactctcacgtctcatctgcggcgctctactgtctatgatttccgtccactaatggtagtatagacctctacttctcgacagtatattcataatgactcagcaatctttctcattgtctctgttcatctaccttcagaatccttgtcaagttcgtctcattctgtctaaactcccatatattgtccctatcttgtcttcaaaagtgcagctgagctgcattggatatcgtgttcgcataaaaagttgtagtcataattgaacaattagacccggtatagaatagatcaagagcacaaaatctcgtgtcaatgatactgtgtttcatgccaacttcaagtgtcttgctgatcaaataaacctga

SEQ ID NO: 3695 - DNA, 346 bp, Glycine max
ggagcgaagaagatattagggtttttgagtgcggtgcggcgatcctagcactctcttctgcagctttcgccgacagcttcattcaccatggctgagcaaaccgagaaggcttttttgaaacaaccaaaagtgtttctcagctcgaagaaaactgggaagggaaagagacccggaaagggtgggaaccgcttttggaaatccattgggcttggatttaagactcccagggaagccatcgaaggaacctacattgacaagaagtgccccttcactggcaatgtttccatccgtggccgtatcttggctggaacatgtcacagtgctaagatgaacaagactattattg

SEQ ID NO: 3696 - DNA, 275 bp, Glycine max
gacattgctcgctctctctcactctctctctctctcgctctctctcatcacgttcgatcattcgcatctgaatctccaacgatggtgctcgacgagactataatttgtgatgacaagtcagaatggattcgtaacggggattactcaccatcacgatttcaaacccaagcattacgccgtcaatcttaattgcggtgctaaaacccaatcgaatccagaagatactgtgagagttctcacgaaggccgagaatggcgttcgtgttatggtgatcc

SEQ ID NO: 3697 - DNA, 298 bp, Glycine max
ggttctagtgtgtgattgtttgttgttgtaactcgttcttcttcttttgttgttctgtgtttgtgtttgttttttctctcacctgaaaatgtcttgctgcggtggtaactgtggttgcggaagctcctgcaagtgcggcaacggctgcggaggctgcaagatgtacccagacttgagctacactgagtcaaccaccgccgagaccttggtcatgggagtggcacctgttaaggctcaatttgagggtgctgaaatgggtgtgcccgctgagaacgatggctgcaaatgtggaccaaac

SEQ ID NO: 3698 - DNA, 351 bp, Glycine max
  modified_base (312)..(312): a, c, g, t, unknown, or other
ggagagggagagggagagagaaagaaaggtgaattggattgcatctctctctgtgtgttggaagaggggaatcgtagatctgagttctttctttctttttaataattttgtgatcagaattattgagctgaacaaaagacaatgggattgtgggaagcttttctcaattggcttcgcagccttttttttcaagcaggaaatggagttatctctaataggacttcagaatgctgggaagacttcccttgtaaatgtagttgctaccggtggatatagtgaggacatgattccaactgtgggattcaatatgangaaagtgacaaaagggaatgttacaataaagttatggga

SEQ ID NO: 3699 - DNA, 371 bp, Glycine max
gagtttcaggctgtgtcttctcttgttttttgcaaattcgcaacccacacagcaagggaaggtgcgagtgagtgagtatggcgtctccattatcagctcaattggttcaatgtcagaactcacttccacctcttcagggtaattttagccaagatgtgtctaaggttcaaaggtcgcgtgtggtatgttacggtaccagatcaccgcttggttattatggtaaagcattgacatcaagatcacataacgccctgaggttttctgtcacgcgacaatctgaagcacggtcaattggatataggagaatgacatgtgtcaatgctgcagacaatgttgtagagcttcaagccaaggtgacaaccaagtgtttc

SEQ ID NO: 3700 - DNA, 268 bp, Glycine max
ggagtgaggggtagtgatagaaggataaggtgaggtgacgataaaccgtggaaagtggaaacggtggtgtagtctgtgagtgtcattgtgaagttggagacaatgttagcttcttctctctccttcctccattcttgttcatcttcctctttcttattgtcaatttcacttcctaatcccaaaccctctcattccctacctttcgtgctcgaagccaaagacaggacccgtaaggaaaacaggtccgcgcgccacactcgcatcagaa

SEQ ID NO: 3701 - DNA, 360 bp, Glycine max
gacagcaaagcaattttcaaactcaattacaattcaataaccaaacctccccttggtttccaattcaaaaagaagtggcacttccaagccaaaccgcccacaattcaaccgggggaagggccccggggacgcaattggagactaaagccgctcacatgtcagctcgggacaccggcggtgtgaaaaagccccagcgtttcaggcccgaaactgtggctctgagggatatcagattgtaccagaagagcactgatcttctgatgcgaaaactcccattccagaggctcgtcagaaaaatcgctcaggatttcaaaacatatcttcgtttccagagcagcgctgtttctgctcttcaggaag

SEQ ID NO: 3702 - DNA, 360 bp, Glycine max
gagggtttacactgaggaggcacaccttcaggagcagtcatggttctcaaaaccgagctgtgccgattcagcggtgccaagatctacccagggaaaggcatcagatttgttcgtggtgattctcaggttttcctgtttgctaactcaaaatgtaagaggtatttccacaacaggttgaagccgtcaaagctcacgtggactgcaatgtaccgaaagcagcataagaaggatattgctcaagaagctgtgaagaagagaagacgtgctaccaaaaaaccttactctaggtctattgttggtgctactttagaagttatccagaaaaagagaaccgagaagccagaagttcgagatgcagct

SEQ ID NO: 3703 - DNA, 285 bp, Glycine max
gatgtggttgcgcctctgcctgtaagagtgaaaaaaccttctcttttccttctctcaagtctcaagagatttcatcatggctccaaagaaggacaaggctccaccaccttcctccaagcccgccaaatctggcggtagcaagcagaagaagaagaagtggagcaagggaaagcaaaaggagaaggtgaataacatggtgctgtttgattagggcacctatgataagctcctttctgaagctcccaaattcaagctcatcactccttccattctttctgatcgttt

SEQ ID NO: 3704 - DNA, 80 bp, Glycine max; identical to SEQ ID NO: 537

SEQ ID NO: 3705 - DNA, 257 bp, Glycine max
agggatcaacatttgtctcacatctttcactttcagtcaacggttaatcccttttcaaaatttagcatcaacatttccaccgcaacgtaccccaaggtcaatataacggagtcttcaaataaccacctctcacatcctaccttccccttaatgaaatcggatcgcgatacctattctcaaggataaaaccggttctagccattacaccataactacaattcatcgaaaggacgcacatggacttgcttccaacctac

SEQ ID NO: 3706 - DNA, 355 bp, Glycine max
gacaacacacaactcgtcacatcacatcacatcacatctattttcattacttcatcattttcactgcaattttcacaccacacacacaccacagtcatggcagttgatagtacgtttctgaacactggcctcctccttgtggccacaatccttgtggtcaagctcatctcagccttcatagtgcccaaatccagaaagagggtacccccagttgtgaaggggtggcccttaattggaggactcatccgtttcctcaaaggtccaatctttatgctccgtgacgagtaccctaagcttggaagtgtcttcactctcaaactcttccacaatagcatcaccttcctcattgggcctg

SEQ ID NO: 3707 - DNA, 340 bp, Glycine max
gattctctctctttcacagcacactcctcccagggtttctccaccaagagggaaatggctcccaaaccgcctagtacgggtctgtttgttggactgaacaagggacatgtcgtcaccaagaaggaattgcccccacgcccctcggatcgtaaggggaaaacaagcaagagggtgcactttgtgaggaacctcataagagaggttgctggttttgcaccctatgaaaagcgtataactgagttgctgaaggttgggaaggataagagggcacttaaggttgcaaagagaaagcttggaacccacaaacgtgcaaagaagaagcgtgaggaaatgtccaatg

SEQ ID NO: 3708 - DNA, 196 bp, Glycine max
ggctgggtgtttgttttgttccttccaattgtcagatctgaatcaccggactcactcttcacactcactcacactgaatggcttccgaacgcgaccatcaccaacaccaccatcaccatcaagatcacgatcatcatcatcatgatcatgatcaccatcatcatcacgatggagacggagagacccactcacgggt

SEQ ID NO: 3709 - DNA, 407 bp, Glycine max
  modified_base (32)..(32): a, c, g, t, unknown, or other
  modified_base (72)..(72): a, c, g, t, unknown, or other
  modified_base (364)..(364): a, c, g, t, unknown, or other
  modified_base (366)..(366): a, c, g, t, unknown, or other
gagattcgtcttcagtttcagcctttctctcncactcactcactcacaggtaagcaatggcgggaaaagganggaaggggcttcttgcagcgaaaaccaccgcggcgaataaggacaaagacaaggacaagaagagacctatttctcgctcttcccgtgctggaatccagtttcctgtgggacgtatccataggcagctgaaacaaagggtccaagccaatggacgtgttggggcaacagctgcagtgtacttagcctcaattctagagtatctgactgctgaagttcttgaacttgctgggaatgcaagcaaggatctgaaggtgaagaggatcacaccaaggcatttgcagctggctatcangngagattaagagctggacactcttatcaaagggaccattgct

SEQ ID NO: 3710 - DNA, 432 bp, Glycine max
  modified_base (377)..(377): a, c, g, t, unknown, or other
gacagagatattccaatatatacattgtttttcttaaaagaaaaaagttatgttctttaaatacgaaaattccaaatccaccttcatggttttggtagatgggtaggttacgggtctaagcaaatggctaattacagcttgagcagacaagacgcgctttatttgctttcattagcttttcaactttgagtttgaaatgcaagctaggttgcacaccattggctttattcttggaaaattggaatattgaaccctcgatttccttacaaatttcccgttgcaagccgtgaatgagttggaagcgccgggtgtttaagtcttcaccagtggcatcaaacaatagttagatcagatgtgtaacagaaggtatgaaacanatcaccagtaacttggacttttttaacattttctttataagatatagtcaataaa

SEQ ID NO: 3711 - DNA, 160 bp, Glycine max
gattcacacaactaactaagaaagtcttccatagccccccaaaaatgaagagcaccatcttctttggtctccttcccctttggggcttcaacaactcatacctaacttcagccatcgctgatttcgtgcccgataatgaaggtaaccctcctgaaaatgg

SEQ ID NO: 3712 - DNA, 329 bp, Glycine max
ggagttcaacgagatggagcaaataaagcacagaacagttgaagtgaatggcataaaaatgcatgttgcagagaaaggagagggtccagtggtgttgttcctccacggcttccctgagctctggtactcatggcgccatcagattctctctctcagctccctcggctaccgcgccgtcgctcccgatctccgtggctacggtgacaccgaagcaccaccttcaatcagcagctacaactgcttccacatagtgggtgatctcgttgcgcttattgactctctgggtgtccaacaagtgttcccttgtggctcatgactggggagccatc

SEQ ID NO: 3713 - DNA, 275 bp, Glycine max
gactttcgattctcttcaaacctaacgcagcatcgctattctcttcattccatggctttgcccaaccagcaaaccgtggattaccctagtttcaaactcggtatcgtcggcgatggtggcacaggaaagacaacctttgtgaaaaggcatctcaccggagaattccagaagaaatatgagccaaccatcggtgtggaggttcacccattggattttttcacaaactgtggaaagattccattttactgctgggatactgctggacaggagaaatt

SEQ ID NO: 3714 - DNA, 283 bp, Glycine max
ggcagccaagaaaagaaaatcctcacccattttcttcgtagccaaacactctgaaattctcagttatgtcgtggcaagcgtatgtggatgatcacctactgtgtgaaatcgaaggtaaccacctcactcacgccgctatcatcggccaagacggaagcgtttgggctcagagcaccaacttccctcagttcaaacctgaggaaataactgccatcaataatgactttaatgagccgggattacttgctccaactgtgattgtacatcggtggcaccacataca

SEQ ID NO: 3715 - DNA, 84 bp, Glycine max
cccactcctccataacgatgcgatgggacgacaggaggtgacactcaacaggtaaaaggttggtacataacggcagccaaaaac

SEQ ID NO: 3716 - DNA, 361 bp, Glycine max
ggttctagtgtgtgattgtttgttgttgtaactcgttcttcttcttttgttgttctgtgtttgtgtttgttttttctctcacctgaaaatgtcttgctgcggtggtaactgtggttgcggaagctcctgcaagtgcggcaacggctgcggaggctgcaagatgtacccagacttgagctacactgagtcaaccaccaccgagaccttggtcatgggagtggcacctgttaaggctcaatttgagggtgctgaaatgggtgtgcccgctgagaacgatggctgcaaatgtggaccaaactgctcctgcaacccctgcacttgcaagtgaggtgttgggagagcaagcttcaagcagagatag

SEQ ID NO: 3717 - DNA, 366 bp, Glycine max
ggagcgaagaagatattagggtttttgagtgcggtgcggcgatcctagcactctcttctgcagctttcgccgacagcttcattcaccatggctgagcaaaccgagaaggcttttttgaaacaaccaaaagtgtttctcagctcgaagaaaactgggaagggaaagagacccggaaagggtgggaaccgcttttggaaatccattgggcttggatttaagactcccagggaagccatcgaaggaacctacattgacaagaagtgccccttcactggcaatgtttccatccgtggccgtatcttggctggaacatgtcacagtgctaagatgaacaggactattattgttaggaggaattatctccat

SEQ ID NO: 3718 - DNA, 360 bp, Glycine max; identical to SEQ ID NO: 1517

SEQ ID NO: 3719 - DNA, 339 bp, Glycine max
gatacctaaaaattgtaccgatatggcttcacttgtgtgtctcctttttttccttgcatttcatggttatcatgtcaggttccttaccagcaaatagtgaagtgtttacaaaagagtctcctatgtctctatccacaaaacccgtggaaagactcacccaactccacttttatttccataacaacaaaatgggggaacacccgactgctatgaaaattgttgagcctcctaaggcgtccatttctggttttgggactatttacatgatggatgaccctctaaccgaaagaccaagtccaacttcaaagcttgttgggagatgtcacggaatatatgctg

SEQ ID NO: 3720 - DNA, 54 bp, Glycine max
gagacctcaggtcaggcggggctacccgctgagtttaagcatatcaataagcgg

SEQ ID NO: 3721 - DNA, 400 bp, Glycine max
ggcagttcaaagcgaagaaagattcgaaacgaagaaagaaagcgttgtgaagaatggcggaagagggacaagtgatcggtgtccacagcgtagaggagtggaaggaacatctcaagaagggagaagggtccaagaaattgattgtggtggattttactgcttcttggtgcggtccatgccgtttcattgccccaattcttgcagagtttgctaaaaagttgccgaatgtcaccttcctcaaggtggatgtggatgaattggagactgtttccaaggagtggggaattgaggctatgccaaccttcctgttcttgaaagaaggcaagctggtggacaaggttgtgggtgccaagaaagaggagctgcaattgacaatagccaaacatgccgcaattgctgc

SEQ ID NO: 3722 - DNA, 384 bp, Glycine max
  modified_base (329)..(329): a, c, g, t, unknown, or other
  modified_base (372)..(372): a, c, g, t, unknown, or other
ggttctagtgtgtgattgtttgttgttgtaactcgttcttcttcttttgttgttctgtgtttgtgtttgttttttctctcacctgaaaatgtcttgctgcggtggtaactgtggttgcggaagctcctgcaagtgcggcaacggctgcggaggctgcaagatgtacccagacttgagctacactgagtcaaccaccaccgagaccttggtcatgggagtggcacctgttaaggctcaatttgagggtgctgaaatgggtgtgcccgctgagaacgatggctgcaaatgtggaccaaactgctcctgcaacccctgcacttgcaagtgangtgttgggagagcaagcttcaagcagagatagcccttagttangaataatgataa

SEQ ID NO: 3723 - DNA, 336 bp, Glycine max
gaggtttgaagcaagcaagttccgcaatgagtgaacccagatagagagatagatagtggcgcaatccgggtttggtttgtccccaaataacagaaaatgacgatgctttccaagatatcatcatcactgttactatcactatcctccaaacccaaacccaaacccatttgcaacccctttctgctttctcgttcagccgccacaaaacatcagaagaataaaaaggagaacgcaaaagcagcgttggcgaaggagaagcgcagaacccgttccgataagcagttcaacagagacgcaataatcgagcgttgcagaataaacgacattgacaccgaa

SEQ ID NO: 3724 - DNA, 423 bp, Glycine max
  modified_base (372)..(373): a, c, g, t, unknown, or other
  modified_base (380)..(380): a, c, g, t, unknown, or other
gagaagccttaaagctcttctctgctttgaaaatggctgattggggcccggtggtgatcgcagtggtgctgttcgtgctgttaagcccggggcttctgtttcagatgccagccaggggaagggtagcagagtttgggaacatgcaaaccagtggggcctccattttggttcacgccatcatctactttggcctcatcactatcttcctcattgccattggcgttcacatctacactggctaactcctggatctggttcagtttcacccatctatgtttatctctgccttttaattagtctttttagctttacaataatttccttgtttgatctctatgtatcttatgtgggggttggtcatgggtgccagannaaaacantaaatcagataaggataatcctccgtgggggtttttttttttt

SEQ ID NO: 3725 - DNA, 400 bp, Glycine max
ggtgagttgagaggatcgtgagaggggcagtagccgagattccgtgagttgcaaaaatgaagacgattctttccaccgagaccatgaacatcccggacggcgtgagcatcaaagttcatgccaaggtcatcgaagttgagggcccccgcggaaaattggtgcgagacttcaagcatttgaatctcgattttcagctcattactgacgaaaacggtaaaagaaagctgaaaatcgacgcgtggtttggttctcggaaaacatccgccgccattcgcaccgccttgagccacgtggagaatcttatcaccggcgtcaccaagggctaccgctacaaaatgaggttcgtttatgcccattttcgcatcaacgcaagcatcggcaacagcaacaagtctattga

SEQ ID NO: 3726 - DNA, 336 bp, Glycine max
ggaacaacaatgactctctatatgcaactggaaggcccaacctaaaagaaagagcatttaactaaccctaattcgccattgaagcctagacattgtgctttcaccttggctccgctctttggtttgctcaaccgatctccgcagcaatggtgaacgttccgaagacaaagaagacctactgcaagagcaaggagtgcaggaagcacacgctccacaaggtcacccaatacaagaagggcaaggacagcatcgccgctcagggaaaacgccgttatgaccgcaaacagtccggttacggtggccagaccaagcccgttttccacaaaaaggggaaaa

SEQ ID NO: 3727 - DNA, 428 bp, Glycine max
acgcgtctaacataaatcatcttcttgaaaagcttcgcaggtcttcctgggatgctgcagtgcaagatattgaagaccttaaggaattctccaaaagtcagggagcattggaagctggtgatttgactcattgggacattacctattggagtgagaggctacgtgagtcaaaatatgatattaatgaggaagaactgcgtccctttttctctctgccaaaggttatggatggactctttaaccttgcaaaatcactttttggcattgaaattgagccagctgatggtctagctccggtctggaataatgatgtcaggttcttctgtgttaaggattcttctggtagtccaattgcgtatttttattttgatccttatagtcgtcctgctgaaaaaaggcaaggtgcatggatgaatgaagtctttgct

SEQ ID NO: 3728 - DNA, 337 bp, Glycine max
gattgcttttgctcagaagcaaactgttgctgcttaaatttccttgtcagcaggtggtttcttgggttatggatttatttgagcataaatactacttagaggacttacgttgcagatttgttgtatcatctttactgcttccagaacttatgattcagactttctatgtatcaattctacttccagttttgttagtacaacgggaggacgcttccatttctgttctctaaaccgagcttaagttttggtcagaaatcttcaaagatgtaagcattataatgtagaattgagaaaaaatgtaaacgttgctttttgaaaaaaagtcaaaaaagaaaaa

SEQ ID NO: 3729 - DNA, 255 bp, Glycine max
gacacaactaactaagaaagtcttccatagccccccaaaaatgaagagcaccatcttctttgctctctttctcttttgtgccttcaccacctcatacctaccttcagccatcgctgatttcgtgctcgataatgaaggtaaccctcttgaaaatggtggcacatattatatcttgtcagacataacagcatttggtggaataagagcagccccaaccggaaatgaaagactccctctcactgtggtgcaatctcg

SEQ ID NO: 3730 - DNA, 194 bp, Glycine max
  modified_base (149)..(149): a, c, g, t, unknown, or other
gacctcaaaaaacaaaaatcaataccttagagaaaacaaaagcacagaatcgaaagaagagttcttttttgagagagattgggatggcttcgacgaagaagatcacactgaagagttcggacggcgaggccttcgaggtggaggaagcngtggcggtggagtcccagacgatcaagcacatgatcgaggacaac

SEQ ID NO: 3731 - DNA, 357 bp, Glycine max
gaccccacgaatttgcaaatctcaaacgaagcccttttctctctctcttcaatttcacccttttagcatttgtacattcctttcccttccttgaatcgttcttaattgcgagaggggatatcggagaagttgattggcctcccattaattgcaggtctgaatgatctgatggagtctaaagttgggaagaagaagtcgtctagtagtaagtcccttttgtacgaagctcctctcgattacaccattgaagacgttcgaccacacggtggaattaagaagttcagatctgctgcttactccaactgcattcgcaagccatcctgagattccctaggttgtgtgacaacatagcccccg

SEQ ID NO: 3732 - DNA, 361 bp, Glycine max
gaagacagctgggagggaagaatagaatgggatctggaagtggaagacacactggatagttcctcacgtgaacggatgcatgaaggaagcatccgacgctcatgactcagctccgccactccatgcctgtccttggcaacgctctcgtcggcgtcagtatcgacctcttccgccaacaactctatactacgcactatgctttcgatactcagtcgatttctcacgtggcagccggggatcaccactaaacgtttggacggacgcactccagtccatcatcacctcctagtcttgctaccatattctcgcaggctttaatgtttacacttcacatcatgttcacatctttggcactcactat

SEQ ID NO: 3733 - DNA, 114 bp, Glycine max
gggtcgatcaatcggcgcgccagagtcaacaaaaggggatctccatctcagggtcgtatcatccacatttcatcaccagttcatacaccctgcatcgcgtgtacaaacacgtgg

SEQ ID NO: 3734 - DNA, 383 bp, Glycine max
agaacaaggataggctagacaagtctgacctaagattgtccaaggcagtaattcattctaacatggatttgataaagcagctagatagtaaggcagccaagcaaggaaagaaaggtgatacattctcactggttcacccctcacaaccaccttctttgctacagctgaaagatgttgtcttgtcctctgctcttgatctgagacgaacagttccaagacctgtggttgcaccatcaggagtaagttccagatctgtctcccctttctctagaagaccaagcccccctcgttcagctacgcctattccaacaacttcaggacttgccttctcaaaaagtatttctgatagtttgaacaaaacaaatgaacttttaaatcaagaa

SEQ ID NO: 3735 - DNA, 324 bp, Glycine max
ggttctagtgtatgtgattgttgtgactcgttcttcttcgtcgttatcttcttcttttgttgtttgtgtgtttgttttttctctcacctgaaaatgtcttgctgcggtggtaactgtggttgcggaagcgcctgcaagtgcggcaacggctgcggaggctgcaagatgtacccagacttgagctacaccgagtcaaccaccaccgagaccttggtcatgggagtggcaccagttaaggctcaattcgagagtgctgaaatgggtgttcccgctgagaacgatggctgcaaaatgtggagctaactgcacctgcaaaccccgcac

SEQ ID NO: 3736 - DNA, 338 bp, Glycine max
cgggtggcaaaagaacaacgaaggggaatgtctgagagtcgggtctatacgtgtcgggctgtgcggatcttcacttacactctccaaatcacacaccaaaccacgcagcgagagaaacctaaatgccgttctaagtgacactcaaatcgatcgactatggatgcggtgtattacgtgaatatattgggcatcggctctgtcgactgccttcaaattgtcttccctccgtcgatagtcactcgctcttgcaaagcacacgaagcactttggctgtggagactaaatcgctggcaaacttactcagattgggaacagattcaggggagatgaccagcctg

SEQ ID NO: 3737 - DNA, 391 bp, Glycine max
gactcacatgtccttctctcttttcactctccactttccttcctgtgttatttagatcctcccctttgttcttcattgtactacactactaccactactactattatctgctttaagaagtgagaaacccaaaaagagagagtgcaagtggaacctgttcgtgtcctaacttttttttttctttcttttgcttagccattgtttgttataagttcccacttacttaccactttcatgggacacaacaacacttgtcatcatcatgtcaaaggtttccacgcagacccttttagccatagcctctcttctgcttcaaatggtggtgataggaggagaaaatgtgggaacaatgaaaaaagtggtggtagtggtttcattttctttacctttt

SEQ ID NO: 3738 - DNA, 279 bp, Glycine max
gacacaccgtttgttccactctcaactcaacttctgctacccagtctcttcttgcatgtcagatcactgttctctctatactcatgggcatggtcaacatctgaatcatgggatttgctagagttcacgctttggttgccatactcactctggcatatagacgatgtgtggctcgttaccggcatgttctcaacttttgcactctgaggattctcacgtgatccaggtgcacctgtcatcaccatgtcccgcgtgtccacgatgtcgcttttagcgatt

SEQ ID NO: 3739 - DNA, 423 bp, Glycine max
  modified_base (400)..(401): a, c, g, t, unknown, or other
gaccaacaacacgtagtattatttcattgatttctccctcttcgctctctctcagtgaccagagacagatgatgatggagatggcgaagcgaaacgctgtcgttgcggcactcgcggcgttggtgctactcgcggcgagtgtggcggtggatgctcaggagaactcggacgtgaagacgctggtgaagtacaagcacgggaagaagtactgcgacaaaggatgggaatgtaagggctggtcaatttactgttgtaacctcaccattaccgattatttccagacctaccagttcgagaatctgttctccaagcggaactcgccggtggcgcacgcggtcggattttgggactaccactccttcatcgccgccgccgcgctttttgagccggaagggttcgnngcacacgggaacaagacgatgc

SEQ ID NO: 3740 - DNA, 316 bp, Glycine max
gaggaaaaggaaaggaaagggaagccaaagcgagaccctaaccctagcggagagatggcggagcacttggcatcgatattcgggacggagaaggacagggtgaactgtccgttctacttcaagatcggcgcgtgcaggcacggcgaccggtgctcccggcttcacacgaagcccacaattagcccaacgttggttctgtcgaacatgtaccagaggcccgacatgagcatgaacatcgtcaccaaccccgatcagccccagccccaatctctcgaccccgataaggtccaggatcacttcgacgacttctacgaag

SEQ ID NO: 3741 - DNA, 292 bp, Glycine max
ggccttttcctcaagtgttgccgtgaggttgcagagaaatatcctgagataacttatgaggaagttgtcattgacaattgctgcatgatgcttgtgaagaatcctgcacttttcgatgtactagtgatgcctaacctttatggtgatattatcagtgacctttgtgctggcttgattggaggattgggcttaacaccaagctgcaacattggtgagggcggtattgcacttgctgaagctgtacatggttcagcacctgatattgctggaaagaatttggctaatccaactg

SEQ ID NO: 3742 - DNA, 364 bp, Glycine max
gactgccttcttaaaaccctatctctcaccaacttccgctacttcctactccaaccactttcttttttcccgcagtcatgggcaaggtcaagatcggaatcaacggatttggaagaattggccgtttggtggccagggtggctctgcagagagacgatgttgaactcgttgccgttaacgatcctttcattaccaccgattacatgacatacatgtttaaatacgacagtgttcacgggcactggaagcatcacgatgtcaccgttaaggatgagaagacccttctcttcggtgacaagccagtcactgtttttggacacaggaaccctgaagagatccatggaagtcgactggagctgacatc

SEQ ID NO: 3743 - DNA, 321 bp, Glycine max
  modified_base (278)..(278): a, c, g, t, unknown, or other
gactcaccacttcaaaacactcataacacaaagcacaaagcaaagctcatccttgagttaaaaaatggcagcagcttcttccatggctctctcatccccatccttggctggcaaggccgtgaagctgggcccatcagccccagaagtgggaagggtgagcatgaggaagaccgtcaccaagcaggtctcctcaggaagcccatggtacggcccagaccgagtcaagtacttgggcccattctctggcgagcccccgtcctacctaaccggtgagttcncaggcgactacggctgggacactgctgggctttccgcagaccc

SEQ ID NO: 3744 - DNA, 310 bp, Glycine max
gacgttcacattcaggaatcgttttcttcagaaatttgccatcgttgagagaagcgtgagagccttagtcgttcaagatgagagctaagtggaagaagaagcgcatgaggaggttgaagaggaagcgccgaaagatgagacaaagatctaagtaggtgcttgagcaggagttgagatgagctttccatctgctaccagcctcatgacattttaggctgttatggctcttatgatcttgaggtctagtcgctaagggagcttcactcttgacttagtttgctttactggtcctggtcctgggccaaagact

SEQ ID NO: 3745 - DNA, 370 bp, Glycine max
tgcattttgtggttccgacaccacagcaacagagctatctgtaatcgagagtgttttcaagctgagagaagcgcagcctagcgcaattgtggacgatgagatgaagaaaaccattgcaaaagcatggactgatgctagaactgggaaaactgctgaccctttaagtagctaccgttgagcgaccaaaagaggttcagatgcttagttcctgtttctagagaatgatttgctctatttaattacattatcttgttttaaagtgaatgtttggcctgtgttcatggtacttgtagaagattagatgtgcagttattgttaccaaagttatactttgatataatgatgcgattttcgtctgtggttgctcaaa

SEQ ID NO: 3746 - DNA, 402 bp, Glycine max
ggcatttcaacattgtatcaatttgagcctcaaccatttaaagttgtatcaaaacaagttgtttactacaagggtcatcaagtgcacaatctcaatgaattggaatacataaatggtgaagtttgggccaatgttttgccgactgactgcattgtaagaatctctccccatgatggaagggttcttggatggattctcctccaaaatttgaggaaagaacttgtggaagctggggagattagtgatcgtgatattttgaatgggatagcatgggatggtgagcagaatcgtatttttgtgactggaaaacaatggccaaagctgtatgaaatcaaggtttcacctataaagaaaccaattgaagaagggatcatcgagcaactttgcttgtatgagcctttg

SEQ ID NO: 3747 - DNA, 343 bp, Glycine max
ggagacattttcataatcgaaattggaagcgaggaaggaaaacccaaatcgaaaatggcagtgatggagaggttgaagatgttcgtcgttcaagagccagttgttgccgcttcctgtctcatcgctggcttcggtctttttcttccagcttttgtgaggcccatgttggattcatatcaggcaaccaagcaacctccccagcctgctttaagtgacgtggttgcaggaatgactggtaaaaagtaaaggtgatttacttgacagatgcaagggcaaatttgctaagtttcttgtttgaacttattttaagtctcaaatgtgagagaaattagagtactgaata

SEQ ID NO: 3748 - DNA, 365 bp, Glycine max
gaaacgcatatctctgtcatttgtgtctgctcagtcgctcttctccgctacttctgagatcttttagtcaagtttcatgtctgaccaagagcaccatttcgagtccaaggctcactccggagcctcgaaaaccgactctcaccaagccggtaccatccgcacgaatgggtacctcgtcatcaaaggccgcccctgcaaggttgtggaagtttcgacttccaaaactggaaagcacggtcacgcgtagtgtcactttgttggaattgatattttcactgccaagaaactttaggatattgtgccctcttctcacaactgtgatgttcctcatgtgaatcgtactgattaccagctcattgatattg

SEQ ID NO: 3749 - DNA, 327 bp, Glycine max
ggtgattgtttgttgttgtaactcgttcttcttcttttgttgttctgtgtttgtgtttgttttttctctcacctgaaaatgtcttgctgcggtggtaactgtggttgcggaagctcctgcaagtgcggcaacggctgcggaggctgcaagatgtacccagacttgagctacactgagtcaaccagcaccgagaccttggtcatgggagtggcacctgttaaggctcaatttgagggtgctgaaatgggtgtgcccgctgagaacgatggctgcaaatgtggaccaaactgctcctgcaacccctgcacttgcaagtgaggtgttggg

SEQ ID NO: 3750 - DNA, 353 bp, Glycine max
gagacataccactatgcattcatttagattcatcacaagcttagaagaacaattaaacatgagtgcagccagcagagcttggattgtggcatcaagcattggggcagtggaggcattgaaggatcaattgggggtgtgcacgtgggaccatgcagtgaggtcactgcagcagcatgccaagagcaacatgagatcctacactcaggccataaccttgtcatctgctacatccgctggagtctccagttcggtcaagaggaccagggaggactccataaggaaagtcatggccttgagctgttggggtcccaatacgtcaaggtttgagtgtgtggaccattccaattgcattc

SEQ ID NO: 3751 - DNA, 401 bp, Glycine max
  modified_base (41)..(41): a, c, g, t, unknown, or other
gcgtcagcccacacgtccgacaggctgcgaagaggacgacnagacgagggtattcatatcatgtccattgtcattctataacataataacaacaaacaaaacaccattcaaacaataagaacttggaccgtcgtggataacatcggagcttcacaagcattgacggatcgaatgaaggtgtcccagtcgcaacatgcattgaggtcactgcagcagcatgccaggcgcactataagatccaaccctcaggacacgtgcatgccatctgctacctctgctacagtctcacctacagtcaataagaggaccgtggagtacaacatgatgatcgggaaaatcctctgtttacgtaacataatctcacttgcatcacagtgccctttcgccaacttgcgtacaac

SEQ ID NO: 3752 - DNA, 342 bp, Glycine max
ggtgtgtagtataagattctcttctttattccttttgtaatttcattcattcttaatctttgtgaaaaataatgttcatcgagaattttaaggttgagtgtcctaatgtgaagtacaccgagactgatattcattccgtgtacaactacgaaaccaccgaacttgttcacgagaacaggaatggcacctagcagtggattgtcagacccaaatctgtcaaatacgaatttagaagcaatatccatgttcgtaaattaggggtaatgcttgtgggttggggtggaaacaacggctcaacgctcaccggtggtgttattgcgaaccgagagggcatttcatggg

SEQ ID NO: 3753 - DNA, 331 bp, Glycine max
gatccaagagtgacccgagacacagattcttaccaaataaacaaacaaaaaaacacacacacacacactttccattttctgtggttcttcttctcacttctctaatcttctcccccctctgttactccccgcttctctgaatccctttctgttaatcatctgtctttcacctcgtgattccaaaaagattcaaactttgaaaatttttctcgaaagccaggtgttttcagaatcgagatccagtttctttttatccttttgttaagaaattattattttctttcattcagccaagagggttgtttttgatccctcaacgcttttttctttc

SEQ ID NO: 3754 - DNA, 388 bp, Glycine max
gacgcactcatacaatagagaccagcttttgcttctttgtgaacatggagatgaggaaatcatgtggcttcttcttcttgctcctcctccttgtctttgcttcccaggtggtggtgcagacggagggaagagtgtgtgagtcacaaagccacgggttccatggtttgtgtaatagagaccacaactgtgctttggtctgcaggaacgaaggtttctccggtggcaggtgcaaaggcttccgccgccgctgcttttgcaccaggatttgttgagatctcatcaaacactactcttgccatgcaaattaataaatcatagctaggccaaataaattgcatctactctttatccatttgggagctagctaccacaaccaactcatacttgg

SEQ ID NO: 3755 - DNA, 371 bp, Glycine max
ggaagcaagaggttgtattttggcatccccgtggcttcaagaagagaatctcaatggaggcccaggagctgaagcgcgtgttccacatgttcgaccgcaacggcgacgggagaataacgaagaaggagctgaacgactcgctggagaacctgggcatcttcatctctgacaaggacctgagccaaatgatccaaatgatcgacgtcaacggcgacggttgcctggacatggacgagtttggggagctgtatcagaccataatggacgagcgcgacaatgacgaggacatgagggacgccttcaacgtcttcgaccagaacgccgaccgcttcatcaccgtcgacgagttgaggaccgtcttgtcctccctc

SEQ ID NO: 3756 - DNA, 343 bp, Glycine max
gacacttcaaaatcctctggtaacccttattttatctattctctctctttcttttgtgttctaagcagctagaagcaatggagaggaaaagaagccatgcctctttcaccatgtttgcaatgcttgttggagtgatctctcagagccttgtcattcctgtagtatccaccactgttgaagatcagaagaactactacaccccagatccacatgctggaagtcccccctcaggctcacacagtagtactcctccatctcatggccatggaagctctccaccctcacatcatcacagtagtccaagtactccatcaacacgctcaggtggaaactgtggatcatc

SEQ ID NO: 3757 - DNA, 373 bp, Glycine max
ggacgtattttggggtttgggtttgggtttggattgtaccggccaacttagggtggactcactctcgatctcaccgatcaccaaccaacgtggcttcttctcctcaggttctctaagtcaactttcagtttttgattgttgaggatggtgctggttttggccctgggggatttgcacataccccacagggctcctgatcttcctgctaagttcaaatccatgcttgtccctggcaagatccagcacataatttgtactggaaatttatgtattaaagaaattcatgactacgtaaagactctttgtccagacttgcatataactcgtggtgagtatgatgaagagacaaaatatccggagaccaaaacactaa

SEQ ID NO: 3758 - DNA, 141 bp, Glycine max
gacacacagagagaagagacaatgaagtttaacccaagggtttcctcaagccgtcgaaagagccgcaaggctcacttcaccgctccgtccagcgtgcgtcgcgtcctgatgagcgcgcctctctcgaccgatctccggtcc

SEQ ID NO: 3759 - DNA, 398 bp, Glycine max
ggccacggcattctccggccccattgtcaccgtgaaggtgtttgaagacaacgtgttggtgagggagcttgttgagacgaaaggcgaaggaagagtattggttgttgatggaggaggaagcttgaggtgtgcattgatgggagggaatttggtacagattgcatataacatggggtgggctgggattgtggtgaatggttgcgttagagatgtggatgatatcaatgcgtgtaatattggcgtcaaagccttggcttctcatccactcagatccaacaaaaagcgcactggtgaaaagaatgtccctgtttatgttggtggaacatttattcgtgaaggagaatggttgtatgcagataatgatggcatcctcgtatcagaatttgagttgtcaaact

SEQ ID NO: 3760 - DNA, 395 bp, Glycine max
gattcccaaagtttctcattctccctttcctctccgaaccctcgatcactctcacgcgctcctatattcgctcctccaccgtcgctctctcgaacaaccacaacaccatcttcatcacatggcaaacgcagcatctggtatggcagtccatgatgactgcaagttgaggtttttggagctgaaggcaaaaaggacacaccgtttcatagtttttaagattgaggagcagcagaagcaggtcattgtggagaagcttggtgagcctgcccagggctatgaagatttcactgccagccttcctgctgacgagtgccgttatgctgtttatgattttgagtatctgactgaagggaatgtccctaaaagcagaatttttttcattgcgtggtcccctg

SEQ ID NO: 3761 - DNA, 361 bp, Glycine max
gagcgaaacagagagtggtttcagtgagtgatcggtgttcacgtgatccttcataagtcgtcatcatcatcatcatcatcaccgttgattgaagaagatgccgatcagaaacatcgccatcggaaggcctgaagaggctactcaccccgacacgttgaaggcggggttggctgagttcatctccaccttgatcttcgtgttcgccggttcaggttccggcatcgcctacaacaagctcaccgacaacggcgccgccactctcgccggcctcatctccgcttccatcgcccatgctttcgccctcttcgtcgccgtctccgtcggcgccaacatctccggcggccacgtcaaccccgccgtc

SEQ ID NO: 3762 - DNA, 402 bp, Glycine max
gaagcaggcggcatggcattctcagcggtctggcgactagcgaatcttgggcgacacttggatttgagtgaatcagtgaacaaggctgcgccagttgggtcaatcaagttgaaggtagcttcagaggtttctgaagcattatcactgggtcgtgctgttgttgctcttgaatctaccattatttcgcatgggatgccatatccccaaaatttggaaactgcaaaagaggtggaacgtattgtaagagagaacggtgcagttcctgcaaccattgcaattttagatggcacgccttgtgtaggcctaagtgtagaagaacttgaaaggctagctattttgggaaccagagctcagaagacagctcgaagggacatcgcacatgttgtagcttgcggtggaaat

SEQ ID NO: 3763 - DNA, 203 bp, Glycine max
ggcatctcagctagaatgtcaacaggagtgagccaccataggaaggactacgtcaactctcgtctagcccccctcatcgacttggccgagattcagctctggtccttcgtcagagccctcatcctcgagtttaactccacactcctcttcctctacatcatcgttgccaccgtcattggccacaaaaaacagaccggaccatg

SEQ ID NO: 3764 - DNA, 373 bp, Glycine max
gggaaacacgcgaatggctgctactgctccttggttttttagttgttgtgttgttgtcttcaactccacacagttccctcacttctcttccctttgaccattcaaccttcctcgcctttgcctccgtttccgtgactgagatggctggaggtgttattcagcagatattgaggaggaaactccaccctcggtttactaactctcccttgttgtcacccatcgtagcaaaaaaagatgatgctggctctactggcagtcagtccttaagagcacttgcattaattggagctggtttgtcaggtcttttcagtttttcaacaatggcagcagctgatgaagctgaacatggcctggcatgtccaagctatcaatg

SEQ ID NO: 3765 - DNA, 343 bp, Glycine max
gactcactcatacaatagagaccagcttttgcttctttgtgaacatggagatgaggaaatcatgtggcttcttcttcttgctcctcctccttgtctttgcttcccaggtggtggtgcaggcggagggaagagtgtgtgagtcgcaaagccacgggttccatggtttgtgtaatagagaccacaactgtgctttggtctgcaggaacgaaggtttctccggtggcaggtgcaaaggcttccgccgccgctgcttttgcaccaggatttgttgagatctcatcaaacactactcttgccatgcaaattaataaatcatagctaagccaaataaattgcatctact

SEQ ID NO: 3766 - DNA, 364 bp, Glycine max
gatcccatttgaaatcaatatcaacaacaccaaatcctctaattcaagtttgcaccatgttttcctgagaaaatgtctggtcgtcgacacggtggaaatggtttgggaaaaggatgtgccaagaggcacatgaaggttcttcacgacaacattcatggcattacgaaacctgcgattcgtaggtcaccgagaatacgtggcctgaaaaggatcagtgctttgatctacgaggaaaccagaggggttctgaagatattcttggataacgtgattcgcgatgcagtgacctagacctatcacgctaggaggatgacggttactgccatggaatttgtttatgcacccacgacacagggaaggaccc

SEQ ID NO: 3767 - DNA, 379 bp, Glycine max
cattctcaaattatcttggtgacaataaatctgagtgggaggattacgatgccactcgtttagtaacaaagtttcccaatgtttcgtccaccattttgattgatcagggagaagatgacaaatttttgcctgataaactgttgcctcacaagtttgaagaggcttgtaaaaaggccaacgttcccctactgttacgtttccaacctggttatgaccacctttactactttataaccacattcatagatgatcacatccgacatcatgctcaagctcttagacttaattaagttatgtgcactctgattatctataactattttgtcaactcttctaactttactaagctgttcatttgctcgtggtaccatgggttgta

SEQ ID NO: 3768 - DNA, 223 bp, Glycine max
ggtgtgtttctcagagaatcgctcttcttccatcctttcctctcctctctccgcatttcccaagagcagatattagaagatggcagacgctgaggatattcaaccccttgtttgcgacaatggaacaggaatggttaaggcaggatttgcaggagatgatgccccacgtgctgtgtttcctaccattgttggtcgtcctcgtcacactggtgtgatggttggt

SEQ ID NO: 3769 - DNA, 249 bp, Glycine max
ttccgagttaaaagggtatatgcttcgttacattaccctgaaccattattgttcgttcttttttgtttttgctcctgctgtgtgatatagttctccattattcaaactgtgaagtgatcaacattatgcttctatttggtggtttaaaaaactaaaaaaaaaaaagcaaaaaaaaaaaaaggtacagagaaaaaagcgaacaacaaacagagacacaattaaaaaaaaagcgggcgcctaaaaggatcc

SEQ ID NO: 3770 - DNA, 370 bp, Glycine max
gactcaccacttcaaaacactcataacacagagcacaaagcaaagctcatccttgagttaaaaaatggcagcagcttcttccatggctctctcatccccatccttggctggcaaggccgtgaagctgggcccatcagccccagaagtgggaagggtgagcatgaggaagaccgtcaccaagcaggtctcctcaggaagcccatggtacggcccagaccgagtcaagtacttgggcccattctctggcgagcccccgtcctacctaaccggtgagttcccaggcgactacggctgggacactgctgggctttccgcagacccagaaaccttcgccaagaaccgtgaactcgaagtgatccactccaggtgg

SEQ ID NO: 3771 - DNA, 348 bp, Glycine max
ggcgcattgaacgaaaattagggtttgtagtgtagcaggaagaagcagcaatggcgccgaagataacacgtaaggttagcagaaaccctgaattgataaggggaatcggaaagtactcgaggtcgcagatgtaccacaagaggggcatttgggctatcaaggccaaaaacggtggcgttttacctcgccacgaccctaaacccaagcctgaagctcctgctgaaaaaccacccaaattttaccctgctgatgatatcaagaagccccttgtcaacaagcacaaacccaaacccgctaagctcagggctagcattactccgggaacagtgttgattcctcttgctggta

SEQ ID NO: 3772 - DNA, 395 bp, Glycine max
gatgccgaaaagtagtaccaagatggcttcagttgtgtatctcctctttggcttccatctcattgttatcatgtcaagttccttacccgcaactagtgaagtgtttgcaaaacagtatccatccacagaacccgtggaagaaaaactcacccaactccacttctatttccataacaacataacgggggaacacccaactgctatgaaaactgttttgcctcctaaggggtccattcatggttttggggctacttacatgatggatgaccctctaactgaaggaccaagtccaacttcaaagcttgtgggaagatctcacggaatatacgctttggcttcacaacatgagcctgggttgctcatggtgacaaattttctcttcactttgggcattt

SEQ ID NO: 3773 - DNA, 345 bp, Glycine max
gatggtcttatgtggggtcacataggtagggcaggagagcttacattgccgatttcgtttcatttgtgaaaaagaggaacctgagagagagaatcagaggaagaagatgatctataggaagtggagtctccttaccggcccggtcgccattctcggcggcgtagtcgtcgccatcgccgccgcaaacgtcatcttcgtcaagaatgatcctttcctcaaaccagaggagaggaagtatgaaaatgaacctgctaccaagtaggagaaaagagacaacagaagtttgcgttttgatgtcttttaaaccctgatttatgagctctgtatactgttttgcaagacatg

SEQ ID NO: 3774 - DNA, 306 bp, Glycine max
gagcaaaaccctaatccctatttttcttcctcagtagtgtcatttacgcttctcttctctgcagcagctatgcctaaccctaaggtcttcttcgacatgaccatcggcggtcaatctgctggccgcatcgtgatggagctctacgccgacgtcactccccgcatcgccgagaacttccgcgcgctttgcaccggcgagaagggcgtagggcggagcgggaagcccttcgactacaagggctcgtcctttcagcgcgtgatcccgagtttcatgtgtcagggtggcgacttcaccgccgggaacgga

SEQ ID NO: 3775 - DNA, 335 bp, Glycine max
cgggacctaaaaattgtaccgatatggcttcacttgtgtgtctccttttttccttgcatttcatggttatcatgtcaggttccttaccagcaaatagtgaagtgtttacaaaagagtctcctatgtctctatccacaaaacccgtggaaagactcacccaactccacttttatttccataacaacaaaatgggggaacacccgactgctatgaaaattgttgagcctcctaaggcgtccatttctggttttgggactatttacatgatggatgaacctctaaccgaaggaacaagtccaacttcaaagcttgttggaagatgtcagggaatgtat

SEQ ID NO: 3776 - DNA, 261 bp, Glycine max
aatgaaaataaaatcagtgcggagactctgaaccgtattgaagatcactttactgttctaaatttaaggtgtattgaacgtctatatggtgatcatggtctggacgttatagacatcttgcgtaaaaacccaacccatgccctgcctgtaatattgactcgactgaagcagaagcaagaggagtggactaagtgtcgttcagatttcaataaagtatgggctgagatttatgctaaaaatcactacaaatcacttgatcat

SEQ ID NO: 3777 - DNA, 372 bp, Glycine max
gggaatcggaagaagataatgtcggaggcggaggagctaccccggtctattgtgcgccgcgtagtgaaggataagctgtcgcgttgctccgaagacagagaaatttccgtcagcaaagacgctcttctcgcagtctccgaaagcggtacgatcttcatccactacctttccgcaacggataatgatatatgtaaggagtctagtatgcagattatcaatgttgaggatgttgtcaaagctcttgaggaaactgagttccctgagtttcttcgtcctctgaaagcttcccttgaagactttaggaagaagaatgctggaaagaaagctgcagtgttcaaaggaaaggatgatgagccgagaatgaaaaggaaa

SEQ ID NO: 3778 - DNA, 364 bp, Glycine max
gcagctgcgaaaacctagtgcaccgtaagggttgtgaagcaggcagagaagagccatggtgcacgtttctttctaccgaaactatgggaaaacgttcaagaagcctcgtcgtccctacgagaaggagcgtttggacgccgagttgaagctggtcggtgagtacgggcttcgctgcaagagggagttatggagggtccagtacgccctgagccgcatccgtaacaacgccagaaacctattgacccttgatgagaagaaccctcgccgtatcttcgaaggtgaagcccttctccgaagaatgttccgttacggactcctcgacgagacacataaccagctgggattatgtggtgggcctcaccgt

SEQ ID NO: 3779 - DNA, 355 bp, Glycine max
gacctcacccagttgcagaaagaaaagaccatcaaagtttcacttcagccttatccggtttagggtttcggtttttgacccaacctttgacgtatcgaaaccttaagtttcggatcaggtctgagcaatctggttggtagaacctttggtcttagagagtcaagttttatgtctgaattagacgatcaaattcctactgccttcgatccttttgctgatgcaaatgctgatgactcgggtgctgggtcaaaggagtatgtgcatattcgcgtacagcagcgaaatggaaggaaaagcctgacaaccgttcagggattgaaaaaagaattcagctattacaagatacttaaagatg

SEQ ID NO: 3780 - DNA, 347 bp, Glycine max
gggagccccaatcacttgagcagcagaatcttcaggccaagccaggtaagcaagcacaacacaaccccgaaatggcttctgcttctgttcccatggctttctcgctgagctctgttatcaacaacaacaagccttcatccgaagccttcttcaggcgactacccctacggcaaccaaagaggaccctcttcaccacaaaggcagtgtcaaactccaaggctcaaatcaatgcatctttgaaggagaatgcagttgcaggactcacagcagcttctgtgacagcatctatggtggttccggaggtggctcatgctgctggatatgagttctccccttccctcaagaac

SEQ ID NO: 3781 - DNA, 229 bp, Glycine max
gatacctaaaaattgtaccgatatggcttcacttgtgtgtctccttttttccttgcatttcatggttatcatgtcaggttccttaccagcaaatagtgaattgtttacaaaagattctccaaggtctcaatcaacaaaacccttggaaagactcacccaactcaactttaatttccataacaccaaattgggggaacacccaagggctataaaatttttagacccccaa

SEQ ID NO: 3782 - DNA, 180 bp, Glycine max
  modified_base (26)..(26): a, c, g, t, unknown, or other
  modified_base (153)..(153): a, c, g, t, unknown, or other
gacctccaatttgcgtgagaacgaanaaagaaaaaaaaaccctaacgcactcgagaccctgagatttttcatcttcgtttctcattctctttttgatcatggacgtcgaggtgcggcagatcttcaacaagttcgacaagaacggcgacgganaaatctcggtaacggagctgaaggaca

SEQ ID NO: 3783 - DNA, 424 bp, Glycine max
aaggcccccttcattccggatgcaaaaggacaacaaaagggaaaaggctctcccttgcattcccaaaggaaaaccctacctagtattccatttcgtttgagagagaaaaaatggcagacggtctcgttctccgcggaaccatgcgcgcccacaccgacgtcgtgacggcgattgccactcccatcgacaactccgacatgatcgtgacggcgtcgcgcgacaaatccatcattctctggcacctcaccaaggaggacaagacctacggtgtcccccgccgccgcctcaccggacattctcacttcgcccaggacgtcgtcctctcatccgacggtcagttcgccctctccggctcctgggacggcgagctccgcctctgggaactcgcggctggcacctcttcccgccgcttcgttggccacac

SEQ ID NO: 3784 - DNA, 388 bp, Glycine max
aggggaaacacaatcctgaacaactccaaaaaaaggattccccgcggcaccctccgaagacggagatacacccactcactcaccaccactttcccagaaaataaccaccgcctacaatttctcggaatttattttgcgttttggtgcctttgttgttcggattttcaggtgagggagctcgtgtcgtgtgtcgtttagggttaaaaatggggtttaagtgggtgcactgatgtcattgttgtggcttgtgattcgtcaacttgcagaaatcgaggcaatggctgcatctaagaaactgataacaagagaagagtgggagaagaagcttactgatgtgaagattagaaaagaagacatgaataagttggtaatgaatttcctcgtcact

SEQ ID NO: 3785 - DNA, 79 bp, Glycine max; identical to SEQ ID NO: 3058

SEQ ID NO: 3786 - DNA, 320 bp, Glycine max
tcaggctgctacaacataactgaagggataccattcttggaaatttaatggccatttgagaaagacggggattcgtgaagataccagctttcattatcatgcattgcgacttaatgattgacgtacatgtcccacaagattcatctaacagacctgttctaaacacttcgtggctttcaagtccctagcgttctttatcatcattgtgctttgcaatatcgcctcatcacctgatagaggcctcttttagaggactggatcaatttcatgtcctcatagttgcacatccccaatggctcagcgtacacaccctatttcat

SEQ ID NO: 3787 - DNA, 370 bp, Glycine max
ttcttgagttaattcgttcagtaagtcgactcttgagtaaattcttttttttagtagacttttggtaaactttataaattctaagtaaattcggtagaatttggagtttacaattgagtcaataagttaaaaaaataagacaaaaatataaattattttgggttattttttgtttgtttagtgttaaacataactttatttggtgtgttatttttaaatacaaaaattttcacttttaataacattaaactcttgttctctaataacatcaaatcctccatgagaatcatctatcattattataacatttaaaagttattatccagtgatgcattaatagacttgattatttaagtattgtaaaatttat

SEQ ID NO: 3788 - DNA, 383 bp, Glycine max
gactgcgaaccagtagggactcccattccgactcttagccgccgatctctcagggcttgcatcttctcaggtaagctgtgaagatgtacacatcaaggaagaaaatccacaaggataaggatgctgaaccaactgaatttgaagagtcagttggacaggcattgtttgatctggaaaataccaatcaggagcttaaaagtgatctgaaggatttatacataaactcagccgtgcaagttgatgtttctggaaaccgcaaggctgttgttattcatgtcccttacagattaaggaaaggtttccgtaagattcatgttaggcttgtcagggagcttgagaagaagtttagtggccaggatgtaatcttggttgccacccggaag

SEQ ID NO: 3789 - DNA, 343 bp, Glycine max
ggcaacaacaaagatcaccaacactttgctggtgccattctttctgacctctcttccaaaaacacttcctccacccaccttaaaaaaacagaggacagccatgagtcgcagaaacgaaagtggtccaaagcttgacttgaagctgaacctgtccccaccgagggctgatcggagactggattcgccgacacgatcggcgacggcgtctccgacgtcaccgccgagctcgtgcgtgtcttcggagctgaaccaagaggacaagagttactctaacagccctgaagccacttccatggttcttgtgggttgccctcgctgcctcatgtatgtgacgctctcctga

SEQ ID NO: 3790 - DNA, 399 bp, Glycine max
gatctgcgtatggtttcgggggagtttcttcttggatcttaccctcttgtttgctaatattctcattcttctgtctctgcttcttctccttctgaactaagagatggggttgtctttcaccaagctttttagccggctctttgctaagaaagagatgcgtattctcatggtaggtcttgatgctgctggtaagactaccatcctgtacaagctcaagctgggagaaattgtcacaaccattcccacaattggattcaatgtggagactgtggaatataagaatattagctttactgtatgggatgtgggtggccaagataagatccgtcctttatggagacactacttccaaaacactcaggggcttatctttgttgtggatagcaatgatcgtgaccg

SEQ ID NO: 3791 - DNA, 264 bp, Glycine max
ggtcctaaatcctcattccagccacacgcttcagaagacatggcctcattgggtgggttacaaaatgtgagcggcatcaattttcttatcaaagagggtccaaaagtcaatgcaaagttcgagctgaagccgccaccatatccactgaatggtttggagccggtgatgagccagcagacacttgagtttcactgggggaagcaccacaagacttatgtggaaaatctgaaaaaacaagttgtttggacaaaaccttaatggaaa

SEQ ID NO: 3792 - DNA, 359 bp, Glycine max
gaattcccaacgcttcttcaaatcttttatttcattcttcagaccaaaaaaagaaaaagggaacattgttcaacgaagcaagatgcttagcaaccgcatatggcagaggagagctttgatctccgcccggaccttattttctggctctgcttctcactcttcatcatcttcccatgcgatctcgcttcgcttcgccaaaactaatgctccttcttcttcacatgtcattttcaattttgcacgtgtggacaaatattggttttctactcaacccgccctagagcttcccgccagcaagatcgtggacgtgccgttggcacaaactggtgaaggcatcgcagaatgtgagcttcccaaat

SEQ ID NO: 3793 - DNA, 355 bp, Glycine max
gcccccgaaaaacccttaaaccccgaccttcatatttgcagtgctagtctgtttatttcgtcagctatgtttttgtcacgaacacttggacgaacactatttgctgcagctgccagatcaaaacaatatgccactacagcagctgctgctactggcacagaaggacacaacccccttcaggagttctttgaggcagacaggagccctgatgatgacaaacctgttgtttatggtcggagttggaatgcgtctgaactgcgtctgaagtcttgggacgaccttcataagttgtggtatgtgttgttaaaggaaaagaacatgttgatgactcaacgtcaaatgcttaatgcacaga

SEQ ID NO: 3794 - DNA, 375 bp, Glycine max
gagggtttacaccgaggagacacaccttcagcagcagcagccatggttctcaaaaccgaactatgccgattcagcggtgccaagatctacccagggaaaggcatcagatttgttcgtggtgattctcaggttttcctgtttgctaactcgaaatgtaagaggtatttccacaacaggttgaagccatcaaagctcacctggactgcaatgtacagaaagcaacacaagaaggacattgctcaagaagctgtgaagaaaagaagacgtgctgccaaaaagccttactccaggtccattgtcggtgccactttggaagttatccagaaaaagagagctgagaagccagaagttcgagatgcacatagggaaactgcc

SEQ ID NO: 3795 - DNA, 364 bp, Glycine max
gggtcacttccaccacctcctctctcttcttggcttggtagagagaaaataaaaaaaaacacaaagctaaacacagacactactgttacagaatctagtaaaacagtctccagaaacacaaacctgagttaagaaaaacaacaaacaactgagcttttgattgaatttttaaccattctcatctgaacatggcttgttcagtgcatctccttcttcttcttacttcacttctggctttgttctttaacccaacatgtgtctatggcaatgatgagcttagaacacttttggacgtgaaatctagtttggatccagaagggcactttctgtcctcatggactagtgatggcaacccatgtggtgg

SEQ ID NO: 3796 - DNA, 283 bp, Glycine max
gagcaacatggtgaagctggtggagagatttacttgccagaagcttacgttagaaccaagaggactacttaatggagcaaatcagttggaagaacttgtagctagcttcccaactggcttatctgagtgtggagaagcattatcaagccttacgagtaggagaacgagtactgtttgtgatgaatgtctatggtttaagaaatctgtctttagtcaacttgtgtgttttgttattcagttctcagcaataaactgctctggcaatctagtttcatgtcaaaaa

SEQ ID NO: 3797 - DNA, 326 bp, Glycine max
attgttggcttgtgctctgctcgtgcctctagggttatcatatctccatttccatttcctctctctcagtttccaagaatcttaagctatgggaaagtcttacccaaccgtgagcgctgattaccagaaggccgttgagaaggcgaagaagaagctcagaggcttcatcgctgagaagagatgcgctcctctaatgctccgtttggcatggcactctgctggaacttacgacgtgagctcgaagaccggtggtcccttcggaaccataaagcacccctccgaactcgctcacggcgctagcaacggtcttgacatcgctgttaggc

SEQ ID NO: 3798 - DNA, 395 bp, Glycine max
ggttgttacttttgctttaacacattacactcacactctttgtgacaaaggggagtttcttattctttctagacgcttccattgatcggcgatttcttagacatggcggagcatcacgaacacgaggaagtgaagggtgagtccttgttggagaagatttctgggaagatccacgaccacgattcgtcatcttcgtcggattccgacaacgagaaaaccagcgcttctgactccttgaagtcaaaggttttcgggcttttcggcagagaaaatcccattcaccatgttcttggtggcggaaaaccggccgacgtttttctctggagaaacaagaagatatctgcatcgacactcggagttgcgaccgctatatgggttctgtttgaattgcctga

SEQ ID NO: 3799 - DNA, 120 bp, Glycine max
tacagttgcgagaaaacgaccgaatatggccgcagatcagcatcaccactttgggctgcaccacatgatgcagatttaagtcaccctgccagcaacctcttcacgcgtctagagcgtata

SEQ ID NO: 3800 - DNA, 157 bp, Glycine max
gtgattaagctttcgataagagacatagagagaactcaaaggaaaaacatcaaagccttttactattttttcttttgcatcatttgaatcttgattggaagagcttcgaattggggtgttttagccatcaattcaatgttgatgccgtgccttctac

SEQ ID NO: 3801 - DNA, 207 bp, Glycine max
gaaaaacaacgattctatcatatgaatcagcgctgtttggggttgtctcctactcctacaccctgaattgaagcccgcctttgttttcctccaattcacttcttcgctatctcctgcttccacattccctttcccggattccaactataatggcttgtgggagtaagagcgggaaaagtgagatcagtgaacgaggtgcaaatgatt

SEQ ID NO: 3802 - DNA, 299 bp, Glycine max
gtataggcattatttttttcttctaaaaaaataaaattaagaaattttcatggtaaccattcgtgcagatgaaattagtaaaattatccgtgaacgcattgagcaatataatacggaagtaaaaattgtaaatacgggtaccgtacttcaagtaggcgacggtattgctcgtatttatgggcttgatgaagtaatggcgggtgaattagtggaatttgaagagggtactataggcattgctttgaatttggaatccaaaaatgttggtgttgtattaatgggtgatggtttgatgatac

SEQ ID NO: 3803 - DNA, 432 bp, Glycine max
gagattatcataaaacacttgaacaaggaacaagatgctgatcaaagcaacttccgtgattcagccacctctgcagagttggaagttcaggagaagatgcccttgcttgagtggtttgccaatgagtacaaaaaatttggatgctccttggaatttgtgaccaacaaatctcaagaggggtcacaattctgcagagggtttggtggcattggtggaattcttcgttaccagcttgacatcagatcatttgatgagttatctgatgatgaagtgtatgaggattctgattaagtgcctggtactgcagaacccttactttgttttggatgattgcgtcctccaagcatgatttggatactattgattatggttctaagacttaaactttgccctttggttttttgatcataagatgtgtagcattcacttttt

SEQ ID NO: 3804 - DNA, 96 bp, Glycine max
gggaagcggctgctggtgaggataccttctgtggttcacgcacctctgccgtcttggctcttcaggggtgtctgcccgtgcctgtttggtgggcgt

SEQ ID NO: 3805 - DNA, 188 bp, Glycine max
acgcaaccgccaacgcgtccgtacagccgtcagcacacgactcagcgggtgcttcaagaccattgactgggggagtttgtcgtgtggtgttccagtgtcaatactggccgctctatacgatccttgcctacgtgcccttgcatgctccgttctctctcttctatagtctcagctaatttcaattcatt

SEQ ID NO: 3806 - DNA, 394 bp, Glycine max
ggcagttcaattccaatatattccattctctctgtgtatttccctacctctcccttcaagatgcagatcttcgtcaagaccctcaccggcaagaccatcacccttgaggtggaaagctctgacaccatcgacaacgtcaaggccaagatccaggacaaggaaggaatccccccggaccagcaacgtctcattttcgccggaaagcaacttgaggacggccgtacccttgctgactacaacattcagaaggagagtactcttcacctcgtcctccgtctccgtggtggcatgcagatcttcgttaagacactcaccggcaagaccataaccctagaggttgaaagctccgacaccatcgattacgtcaaggccaagatcaagacaaggagggtat

SEQ ID NO: 3807 - DNA, 152 bp, Glycine max
gaattggggaaatgccacatcaaacgatctaaagacagaccattattcacatctcatcgggttcactggagtcatgcatcatcactgatctgtaagaaccatacaattcacactcacttcgtcacctcaaatcaactaagaacatatcccca

SEQ ID NO: 3808 - DNA, 382 bp, Glycine max
cacctacttgaagctcttgtgctctgattaccacttgatggaagcttgcttgtggggcttctatggaggctggatctttgagcttcaatgaggtcctttaatggtgattttccaccatggagatgcagcggaagacaaaggagaagaggtgagaggaggcgccatccactagggaataagccatggaagaaggagcttcaccaccaagatgagccttggataagaagcttggaaggatgcttcaatggaggtaaagaaagagggagagaaagagagaggggggagcacgaaattgaaggaataaaagagggagagaagtggaactttgaagtatgtctcataagactctcattcatcaaagttacaacaagtgttacacatg

SEQ ID NO: 3809 - DNA, 380 bp, Glycine max
ggctgccggtctctgataaatacagatagtgtgggagagagaagagtggaaggtaaagtgacgaccaggttctaagaataacaggaatgaagagaggtcacgtcagcgccggacacggccgtatcggaaagcaccgcaagcatcccggaggtcgctgtaacgccggtggcatgcatcaccaccgtatcctcttcgacaagtaccatcctggtttcttcgggaaggtatgcatgcgctacttccacaaagttcgcaacaaattctacaatccgatcatcaacatcgacaagctgtggtctctcctcacccaggatgccatagacaaggccaccgccgataaagcatccttgctcgatgtcacccagttccgttactttaag

SEQ ID NO: 3810 - DNA, 346 bp, Glycine max
ggcttgctgatcctcatcatgggaaccatttttcctcctcactctctctctccactcctcaacatcaaaccttcaccctcaagaattctcttggctccctctccccaacccaagtcaaattctctcttttgctccaaacccattgtttcaagtctcagaaagaaccaaacttcatctcccataccttcatcgggcacaagctggttggctcatgctcaacagggcctagcagctttggctatctccttggcactcaactttagcccagttttgtttaatggcaatgcattggcatctgagtttgatgtgcttaatgagggtccacccacagattcctatgtgtttg

SEQ ID NO: 3811 - DNA, 306 bp, Glycine max
gacacaaaacatttctagagcgagaaagtgagaggagagagaaagtagctgatcctccatggcctccaccaaggaacgcgaaaactttgtctacaccgccaagctcgccgaacaagccgaacgctatgatgaaatggtggaagcaatgacgaatgtggcgaagctgaacgtggaattgacggtcgaggagcggaaccttctgtcggtagggtacaagaacgtggtgggtgctcgtacggcttcgtggaggattctatcgtcgattgaacagaaagaagaagctaaagggaacgaagtgagtgtgaa

SEQ ID NO: 3812 - DNA, 402 bp, Glycine max
gtaaaatggtaagaaaaccgggtccgcaattttccgtgccgtcaaatctcacaatcgataactaaactcatcgcctttattcagaatgtcggaagcaccattcagaccacgagaaaagcttgctgagaagcaaaaatatttccagagtatccacaggcatacctacttgaagggacccatggataagattacatctgtggccataccactggctttggctgcaacatcaatttacatgattggacgagggatctataatatgtcgcatggaattggaaagaaagaatgacctggaaatttctgattgaggaggtttttccacacatagcctccttaatatggactagtggttttctttgcatttatgtttgttctcttaataaaattgcttagttgcagatt

SEQ ID NO: 3813 - DNA, 434 bp, Glycine max
  modified_base (328)..(328): a, c, g, t, unknown, or other
actcacgcgtcagctcacgcggtcagaaagacgacagaaggggcccagtttcccgcacacacttcttgtctcttctctctctctctatattttgggtttcattgttgggtgctgaagcaaatttgcggtgtagcagaggcaatggaggttcaaagtctcagctttgagaataacattttgtgggttggctcttttgtggaggctttggtgcttgacactttccttgccactgccaaatctcttgcttgctttgtcatcttgactggatctctccttacggatgtcaataatttagtgtcaccgatggtggatggaaggtttcctttanaccaactgtgcaagggataacatacttttgaagaaaacaaagatgctagtgatacagacgatgatgatgatgacgacaatgtgaatgatggagacgacgacaatga

SEQ ID NO: 3814 - DNA, 388 bp, Glycine max
ggaacggaaaagcactggcgcagctaccctgaggcttctcttctcttctcttctctgtcgtgagtcaccatggtgagggttagtgtgttgaacgatgctctgaagagcatgtacaatgctgagaaaaggggaaagcgccaagtcatgattaggccatcctccaaagtcattatcaaattccttttggtgatgcaaaagcacggatacatcggagaatttgagtatgttgatgaccacagggctggtaaaatcgtggttgaattgaacggtagactgaacaagtgtggggttattagtccccgttttgatgtgggcgtcaaagagattgaaggttggactgctaggcttctcccctcaagacagtttgggtatattgtattgactacct

SEQ ID NO: 3815 - DNA, 259 bp, Glycine max
aaaatacggttctggctccaaaacaccacctcacggttccggtcccaacagaccacagtaagggttccacctctaaataatcacagtccggtcgttttaaaacaggaaatttagtttgtcatttctacatgatcgatctcgcaattaagattgacaaactcccctctacatgatccaaccaaagctgcccctctatatgatcttctctcacttccatcattcttgcctactttttactatacatagtctcccctcaact

SEQ ID NO: 3816 - DNA, 378 bp, Glycine max
gtctgatagtagattgagcaaacaaaggaacaatgtcgaagaagaacaacctcgccaagagaaagaagcaatacgaattcgatctccaaagagagaaacaagagaagataaagaaagagcagaagctccatgcgaagaagaacaagatgaaagttgatggtagtggcaagaaaaagaaaggtgggagtggatttcaggtggggaagagaaaagtgaagaccaagttgactgcccttgctaaagctaaggctgcccaggcaatggagcttgacaaatgaggttcgacttgtgtaattttagacaatgtgttgaaaattggtagatgacagtgttgttttgaggctcaatatccttgttctgttctgctatatgactatg

SEQ ID NO: 3817 - DNA, 91 bp, Glycine max
gtttactgtttttcatgtgcatctatttaattgacttgtaaggtgagggttgccccccacttatatgtgcacttatgcagtgatcttgcat

SEQ ID NO: 3818 - DNA, 404 bp, Glycine max
gatcgctctcacacctgtgattattcctcttttaacaatccacacccaaattctagggttccgaaatggacgctggcggaaagatcaagaagggcgccggaggtagaaagggcggcggcccaaagaagaagccggtttcaaggtccgtcaaagccggtctccaattccccgtcggaagaattggccgttatttgaagaaaggaaggtacgctcagcgtgtcggtaccggtgctcccgtatacttggctgcagttctcgaatacctagctgccgaggtgcttgagttggctgggaatgccgcacgtgacaacaagaagaacaggattattccaagacacgtgcttttggcagtgaggaacgatgaagagttggggaaattgcttgctggagtgacaattgcacat

SEQ ID NO: 3819 - DNA, 129 bp, Glycine max
ggcggcactcgttttcgttctcatgctggtttatacatctttgctaacgaggtttacagcgctcaacctacgatgcagaacgacgacggacggatcacatgatctttacattcctatgaagtgctccgc

SEQ ID NO: 3820 - DNA, 157 bp, Glycine max
gcgtcaatcgggaggccgaaagccggcaaaagggtgagaggtgctcctagatgatcatccaggatactgtgatccattcaacagcaagcatagactcacgggaaggactatagttacatgcagctctatgagtgctgagggaacgtcaaagttgtcc

SEQ ID NO: 3821 - DNA, 432 bp, Glycine max
ggagaatagagagctcctccaattagggtttttgtgatctgcagctacgatgggtaagggaacggggagtttcggtaagaggaggaacaagacccacaccctctgtgtgaggtgtggccgccgcagcttccacctccagaagagtcgttgctctgcgtgcgcttaccccgctgcgcgcaccaggaaatataactggagcgtgaaggccattaggagaaagaccaccggaactggaaggatgaggtacttgcgtaacgtgcctcgcagattcaagagcggcttcagagagggtaccgaagctgcacccaggaagagaggagctgctgcctctgcctaagctttgaatgaatgacagcaatttttgctgggtcagtgaattataggagttaatgtttctgtgtttgtgccaaactccttggaacacattttcct

SEQ ID NO: 3822 - DNA, 340 bp, Glycine max
ggagactcgcgactcaccaccactgctcgccggcctctaattttgaaagcttctgcgcctcccacgccatttttgatactctctttgtgttcgcatagtgagatatggggaagaaggcgaagaaagctatgaagaagaatttgaaaagggcttcctttaataagaatccatctgaggatgctgatttcttgcccttggaaggtggccctgctcgtaagctcgccggccagcagaagccgccgccgccgccggagaacaccgccacggttttgtacgtcggtcggatcccacatgggttctatgagaaggagatggaaggttattttgggcaatttggaac

SEQ ID NO: 3823 - DNA, 384 bp, Glycine max
  modified_base (42)..(42): a, c, g, t, unknown, or other
  modified_base (275)..(275): a, c, g, t, unknown, or other
  modified_base (322)..(322): a, c, g, t, unknown, or other
gagttgctcttttctccctctccgcatacactctgctcgtanggtttctccacctagagggaaatggctcccaaaccgcctagtacgggtctgtttgttggactgaacaagggtcacgtcgtcaccaagaaggaattgcctccacgcccctcagatcgtaaggggaaaacaagcaagagggtgcactttgtgaggaacctcataagagaggtagccggttttgcaccctatgaaaagcgtataactgagttgctgaaggttgggaaggataaganggcactgaaggttgcaaagagaaagctcggaacacacaaacgcgcanagaagaaacgtgaggaaatgtccagtgttctcaggaagatgagggctggtggtgctggagac

SEQ ID NO: 3824 - DNA, 337 bp, Glycine max
ggtgagttgaaaggatcgtgaaaggggcagtacccgagattccgtgagttgcaaaaatgaagacgattctttccaccgagaccatgaacatcccggacggcgtgagcatcaaagttcatgccaaggtcatcgaagttgagggcccccgcggaaaattggtgcgagacttcaagcatttgaatctcgattttcagctcattactgacgaaaacggtaaaaagaaagctgaaaatcgacgcgtggtttggttctcggaaaacatccgccgcaattcgcaccgccttgagccacgtggagaatcttatcaccggcgtcaccaagggctaccgctacaaaa

SEQ ID NO: 3825 - DNA, 269 bp, Glycine max
cggcgtgatcatcagtgttcatgccagggtcaccgacgttaacggcctccgcggacagctgtgtgcgagacttcctgcacttgaatctcgattttcagctcacttctgacgaattcggtgaaagaccgctgaaaatcgacgcgatgtttggttccctgaaatcatccgccactattcgcaccgccttgagccaggtggcgaatctgatcacaggcgtcacgagaggctagcgctcacaaaatgacgttcgtttatgccaattttcccat

SEQ ID NO: 3826 - DNA, 214 bp, Glycine max
acgcgaccgtgcagctgcaggagaacacataggggaaactcacaactcagcatgactgctcacctggctcgattgctgttcgtgtttgcaccgcgaacgtggtttatgatatgcgctttgttgatcacgctttaagatgtagcgattacggcgaagattactatactgtggaagttgaagttgagttcatttaataggagtccatctgaggatt

SEQ ID NO: 3827 - DNA, 123 bp, Glycine max
cacgcaaccgtgatgccgcgacgccaccggatggggagactcgcgagtcagcaacactgcgcgctggcctctaattctgacgtgcttgtgcgcctctcacgccattttttatacactctttgt

SEQ ID NO: 3828 - DNA, 189 bp, Glycine max
gggaatctgaagaagatcacgtccgaggtcgatgaggtatcccggtctaatgggcgccgcgtagtgaaggataagctgtcccgttgcaccgaagacggataactttccgtcagcacagacgctcttctcgcattctccgaaagcggtatgatcttcatgcacgacgttttagcagctgctaacggggaa

SEQ ID NO: 3829 - DNA, 358 bp, Glycine max
gatccattcctcgcaacaacgcttaacctctctcattccccatttcctcacctccttcaaccgctgctaaattctagggttccgaaatggacgctggcggaaagatcaagaagggcgccggaggtagaaagggcggcggcccaaagaagaagccggtttcaaggtccgtcaaagccggtctccaattccccgtcggaagaattggccgttatttgaagaaaggaaggtacgctcagcgtgtcggtaccggtgctcccgtatacttggctgcagttctcgaatacctagctgccgaggtgcttgagttggctgggaatgccgcacgtgacaacaagaagaacaggattattccaagaca

SEQ ID NO: 3830 - DNA, 341 bp, Glycine max
gaagccaatcctttgtgtaagtgctcaaccctagtaagccgcaatggtgaagtactcaagggagcctgacaatccaactaagtcttgcaaggctagaggcgccgaccttagggttcattttaagaacacaagggaaactgcctttgcaatcaggaagttgcccttggtcaaggctaaaacgtacttggaagatgttcttgcccacaagcaggcaattccattcagacgtttttgtcgaggtgttggaaggacagcccaggctaagaatagacactctaatggccaaggacggtggcctgtcaagtcagcaaaattcagtcttgatttgctcaaaaatgctg

SEQ ID NO: 3831 - DNA, 264 bp, Glycine max
gatctttcatctgtgacatacaacaggtacagagttttctgatgctatgcctctatctctccactactcttacgctaaatagactcaacattacctccattctctcaaaagcaaactcaattctctccagcaacatcagcatactctcagtccatgtgatgaccggactgtaccgatcagtacctaaatctcatagctggagtgagcagggaatcccttatggtgaattggtgtccattagtacttctaaccctgacgtcacac

SEQ ID NO: 3832 - DNA, 370 bp, Glycine max
ggtcaagcctgccgagaaaaccctagttcgcttgcagtcacacaagaggccaatcctattcatagctcgagatgggtgaagaagtgaaggtagttgttccagaatcagtgttgaagaagcgcaagagggaggaggaatgggcgttggccaagaagcaagaactcgatgctgccaagaagaagagagccgagagccgcaaactcatctacaacagagctaagcagtacgctaaggagtacgatcaccaggagaaggaattgattcggttgaaacgcgaggccaagctgaaaggtggtttctatgtggatccagaggctaagctgttgtttattattcgcattcgtggtattaatgccatggaccccaaatc

SEQ ID NO: 3833 - DNA, 417 bp, Glycine max
ggcggcactcgttttcgttctcgtgctggtttatagatctttgcgaaggaggtttacagcgctcaaccaaagatgcagaacgaggaaggacagatcactgagctttacattcctaggaagtgctccgccacaaacagattgattaccgctaaggaccatgcttcggttcagatcaacattgggcatgtggatgagaatggcgtctacaatggccatttctccacttttgccctctgcggattcatccgtgctcagggtgatgctgacagtgctctagaccgcttgtggcagaagaagaaagttgaagttaagcaacagtagacacccatgatagtttgttacttcgttatgtattaatttctactcgtgctagagatatttgaataccatgattgtcattttgagcacaaatgctca

SEQ ID NO: 3834 - DNA, 70 bp, Glycine max
attgatgtagtcactacaacatgttagtatttatctattaggtttctagttgacagcgttgatattaggg

SEQ ID NO: 3835 - DNA, 247 bp, Glycine max
tcactatcttgattcttttgaatcatgtaaaaaaaaaaaaaaaaaaaaaaaaaaaaaaaaaaaaaaaaaaaaaaaaaaaaaaaaaaaaaaaaaaaaaaaaaaaaaaaaaaaaaaaaaaaaaaaaaaaaaaaaaaaaaaaaaaaaaaaaaaaaaaaaaaaaaaaaaaaaaaaaaaaaaaaaaaaaaaaaaaaaagaggggcaaaaaaaaaaaaaaaagttaaatacgaggtaaagaaaattaaaaact

SEQ ID NO: 3836 - DNA, 311 bp, Glycine max
gacatacaacagctgcagagtgaaacgatgccgtgcctcaacctctccaccaacgttaacctagacggcgtcgacacctcctccattctctccgaagccacctcaaccgtcgccagcatcatcggcaaacccgaggcctatgtgatgattgtattgaaaggatcagtgcctatatctcatggtgggagtgagcagccagcagcttatggtgaattggtgtccattggtggtcttagccctgacgtgaacaagaaacttagtgctggcattgcttcaattctcgaaaacaagttgtctgtgccagagtcgcg

SEQ ID NO: 3837 - DNA, 434 bp, Glycine max
tgggactctgctgcctcgctctgtttctgtctctgtgtttgcggctgatgattccgaacgatcgaccttcttcgtttctcgcaaagtttaactcatcattggtaacgaaaagactcatatcaacattttcgtcattggacatgtcgactctgggaagtcatctaccactggtcatttgatctacaagcttggaggtattgacaaacgtgtgattgagaggttcgagaaagacgctgctgatatgaacaagaggtcattcaagtatgcctgggtgcttgacaagctcaaggctgatcgcgaaataggaattaccattgatattgctttgtggaagtgtgaaaccaccaagtactactgcacagtcatcgatgcccccggacatcctgaccttatcacgaacatgattactggtacctcccatgctgattgtgctg

SEQ ID NO: 3838 - DNA, 170 bp, Glycine max
ggaacctttgcattctactcattcaggatccatcaagtccgtttaggaatcagagacagagatacttctagatggcccctaaattcaaaacagcacggatgtcagctggaggaaaagctcccatgaagcagcttgcaaccatggttgcacgtaattctgctccaacagtt

SEQ ID NO: 3839 - DNA, 356 bp, Glycine max
gcccagtttcccgcacacacttcttgtctcttctctctctctctatattttgggtttcattgttgggtgctgaagcaaatttgcggtgtagcagaggcaatggaggttcaaagtctcagctttgagaataacattttgtgggttggctcttttgtggaggctttggtgcttgacactttccttgccactgccaaatctcttgcttgctttgtcatcttgactggatctctccttacggatgtcaataatttagtgtcaccgatggtggatggaaggtttcctttagaccaactgtgcaagggaaaacatacttttgaagaaaacaaggatgctagtgatacagaggatgatgatga

SEQ ID NO: 3840 - DNA, 326 bp, Glycine max
gagggttttgcgctgttgttgctgctcatcctccgtaacctccgagctctgcaccgaagaacgatgccatggggaagacacactggaatgggatctgctcgcaagctcaagtctcagcgcaggacgtaaaggtgggctgacaagtcatacacgagatcacatcttggacatgaatggaagaaaccttttgctggttcatcccatgccaacggaattgtccttgaacagataggtattgaggctaaacagcccaactctgccattcgtaagtgtgccacggttcaacttatccggaatgggaagaagattgccgcctttgtccctaa

SEQ ID NO: 3841 - DNA, 103 bp, Glycine max
tgagtgcagctgagaattcatcactaatgcggagggtgattcccagtgattcagaagcttagtctgaggacgacgagaacgatatggaagatgaagaggattg

SEQ ID NO: 3842 - DNA, 350 bp, Glycine max
gtcatcacaatctcattcgttaacacatcaatttctatctctcttatactctcactactctctttgctctttcttttctccactatggctgcacaagaaaacaacttccaagactacttgcctgtgatggccaacaagcttggtggggatggcctaattgatgaactgtgcaatgggttcgatcttttgaaggattctgataaaagggtcatcacttttgagagcctcaagaggaattcttacttgcttggtcttcaaggtctcagtgatgaggatcatcgctccatggttttggaaggtgactttgatggtgacggtgcactcaaccagatggagttatgtgtcctgat

SEQ ID NO: 3843 - DNA, 332 bp, Glycine max
gtctcttcctacttgaagaaagtaggatacaaccctgacaagattccttttgttcctatctctggttttgagggagacaacatgattgagaggtccacaaaccttgactggtacaagggtccaactctgcttgatgcacttgaccagattagtgagcccaagaggccctctgacaagcccctcaggcttccccttcaggatgtgtacaagattggaggtattggaactgtgccagtgggacgtgttgagaccggtgtcttgaagcctggaatggtggtgacttttgcaccaactggactgacaactgaactcaagtctgtggagatgcacca

SEQ ID NO: 3844 - DNA, 407 bp, Glycine max
ggctgtgagtgagacaccgatagatagagagcgcggcataacctaaacctatctttcttctctctctgtgtgtgcgcttcaacggcaaccagaagcagccatggccactgcaaggactgtgaaggatgtttcacctcatgagttcgttaaggcgtactcctctcacctcaagcgatccggcaagatggagctgccagagtggactgatattgtgaaaactgcaagatttaaggagttggctccttatgatcctgactggtactatgtcagagctgcttccatggcaagaaagatctacttgagaggaggacttggtgttggtgcctttcagaggatttatggtgggagcaagaggaattgtagtccccctcctcatttttgcaagagcagtgggtgcattgctcgtc

SEQ ID NO: 3845 - DNA, 386 bp, Glycine max
acgcgaccgacagctgctagagactacagaaagggattccacacactataagactcctcaatcatccatagacatggacaccgtcacttctgcagcagtttctattccctcattcactggcctcaaggcaagcgcaagcaaagtgagtgccgccgcagttaaagtctcagctccccaagccacaatgttctgcggcatcaaggcttccctcaaagacgttggagtcgctgttgtggccactgctgcgagcgcagttctagctagcaacgccatggccattgaagtgttactgggcactgatgacgggtctctggttttctctcccaactctttctccatggcccctggggaaaagatcgtgttcaagaacaacgcaggtttcccca

SEQ ID NO: 3846 - DNA, 73 bp, Glycine max
acgcgaccgacggctgctacaaaaggagagaaggggactgcacgggatagcaattcgttcgacttctctcgac

SEQ ID NO: 3847 - DNA, 300 bp, Glycine max
gactcaccacttcaaaacactcataacacaaagcacaaagcaaagctcatccttgagttaaaaaatggcagcagcttcttccatggctctctcatccccatccttggctggcaaggccgtgaagctgggcccatcagccccagaagtgggaagggtgagcatgaggaagaccgtcaccaagcaagtctcctcaggaagcccatggtacggcccagagcgaatcaagtacttgggcccattctctggcgagccaccgtcgtacctaaccggtgagttcccaggcgactacggctgggacac

SEQ ID NO: 3848 - DNA, 240 bp, Glycine max
acccacgcgtcagtccagatgacgacagaaggggtctcgatcatttcagaattgtgcaattatggtctctaaatcttttttattggcacatttactcgccatatttttacaatctagcgggtttgatctattgtttgccgattgtcaagtttttagaaacaattattgatatgacatcgtcgtactgtcttcatcggaggatgttaacatgacacgtagatcatcagtctgttttgagcc

SEQ ID NO: 3849 - DNA, 203 bp, Glycine max
ggcgaaacagagagtgatttcagtgagtgatcggtgttcacttgatctcatcataatcgtcagcgtcaattgaagaagatgccgatcagaaacatcgccgtcggaaggcctgaagaggcgactcaccccgacacgttgaaggcggctttggctgagttcatctcaaccttcatcttcgtgttcgccggctcaggctccggcat

SEQ ID NO: 3850 - DNA, 411 bp, Glycine max
  modified_base (320)..(320): a, c, g, t, unknown, or other
  modified_base (386)..(386): a, c, g, t, unknown, or other
gatccaaattcaagttcgcaccaaattttcctcccaaaatgtcaggccgtggaaaaggtgggaagggtttgggaaagggaggagctaagaggcacagaaaggttcttcgtgacaacattcaaggaatcacgaaacctgcgattcgtaggttagcgagaagaggtggcgtgaagaggatcagtggtttgatttacgaggaaaccagaggagttctgaagatattcttggagaacgtgattcgcgatgctgtaacctacactgagcacgctaggaggaaaactgttactgctatggatgtcgtttatgctctcaagagacanggaagggacctctatggctttggaggctaaagaatagaatctttaggtttaatgactgtgttgcangataaaacattgggtcttttgaatt

SEQ ID NO: 3851 - DNA, 412 bp, Glycine max
ggccgaaaagtagtaccaagatggcttcagttgtgtatctcctcgttggcttccatctcattgtgatcatgtcaagttccttacccgcaactagtgaagtgtttgcaaaacagtatccatccacagaacccgtggaagaaaaactcagccaactccacttcgatttccataacagcataacgggggaacacccaactgctatgaaaactgttttgcctcctaaggggtccattcatggttttggggctacttacatgatggatgaccctctaactgaaggaccaagtccaacttcaaagcttgtgggaagatctcagggaatatacgctttggcttcacaacatgagcctgggttgctcatggtgacaaaatttctcttcactttgggcatttacaatggcagcaacctcag

SEQ ID NO: 3852 - DNA, 264 bp, Glycine max
  modified_base (16)..(16): a, c, g, t, unknown, or other
tggggtcgaaatgtantttcacgatggcttcacttctgtatctcttctgtggtgtccatcgcattgttggcatgtcaagtgcatgacccgcaacgagtgaagtgtttgcaaaacagtatccatccagagaacccgtcgaacaaatcctcagtcaactccacttcgattgctataacaggataatgggggaacacccaactgctatgaaaactgttttgcctcctacagggtccattcatggctttggggctacttacatgatgg

SEQ ID NO: 3853 - DNA, 316 bp, Glycine max
gatacaactactctattctaccacatctgagtctctgtccgaagccacttgagagaaaatggcggtgcctctgctctcaaagaagatcgtgaagaagagggtaaagaagttcaagaggcctcagagtgacaggaaaatttccgtcaagactaactggcgcagaccaaagggtatcgattctcgtgttaggagaaagttcaagggatgcactttgatgccaaacattggttatggttcagacaagaagacccgccactatctccctaatggtttcaagaaatttgttgttcacaatgtgaaggatttggaactgctc

SEQ ID NO: 3854 - DNA, 151 bp, Glycine max
tggttgttccatatgcctatcacacagtccactcacactctttgtgaaaaacgggagtttcttactctttctgataccttccacttatccgtgatttctacgtcatggctcatcatcactatcaccaggatttaattggtgagtccttgtt

SEQ ID NO: 3855 - DNA, 240 bp, Glycine max
gaaaccacacttgattttcttgtaggatggtgttgcatttggtggctctggcgaatctccacgggctaaggcccgcggtggtctggctggcgtgcccgcttgtcctcaagttcttgatgggcttcaggatcttccgatacgacgtccttcaccactcaggactcttccttttccaattgggtcacatactcttcagcattcaagcccatatctcctgcctgctcagaatagaacgtgctc

SEQ ID NO: 3856 - DNA, 120 bp, Glycine max
cggggttttctcgtcagaagcctaggtagcctctttctgtcgccactgcaatcaacggcacggcccacagtaatgacaggagagagactgaatctcaacgcttaccctttggccgattcg

SEQ ID NO: 3857 - DNA, 215 bp, Glycine max
cttgcgcagcatgtgtttcaacatctggttctctctttcaagaactctatggaactctccctttttttatgtgggttttcgtctcaattttgtcttcttgcttcgagatactcaatcttttttgatgtgggttacataaggatctacgaatctcttgatcgaacctgtggacaattttcaagcaatctgaatctacgttcgtttgggtccagatg

SEQ ID NO: 3858 - DNA, 335 bp, Glycine max
gaaggtttacaccgaggagacacaccttcagcagcagcagccatggttctcaaaaccgaactatgccgattcagcggtgccaagatctacccatggaaaggcatcagatttgttcgtggtgattctcacgttttcctgtttgctaactcgaactatttgacgtatttccacaacaggttgaagccatcaaagctcacctggactgcaatgtacagaaagcagcacaagaaggacattgctcaagaagctgtgaagaaaagaagacgtgctgccaaaaagccttactccaggtccattgtccgtgccactttggaaattatccagaaaaagacagc

SEQ ID NO: 3859 - DNA, 165 bp, Glycine max
  modified_base (49)..(49): a, c, g, t, unknown, or other
gcttctgaatcgtcttttacttctcagcagcttcggctagggttcaganacgaaaaaaggttccggttttccgttcccgattaaaacccaattggaaaaaaaaccttttaaggaggttaaaaaggaacccccaaagaataaaacagaaatccaattattccttta

SEQ ID NO: 3860 - DNA, 102 bp, Glycine max
ggagcatgttccctacacggattcatacactcccagaaaacatttttcattcgatttctcagcaccagtcagcaacaacaacagccctttccattccacaag

SEQ ID NO: 3861 - DNA, 221 bp, Glycine max
ggaaaccaaattttcttccttcgttggcatccgtgatctcatctcctcacaatgagcagatcacggcaaccaccggatttgaagaagtacatggacaagaagcttcagatcaagctgaatgcaaatcgcatggttgttggtactctccgtggcttcgaccagtttatgaatttacttgttgacaacactgtggaagtgaatggcaatgagaaaaatgacat

SEQ ID NO: 3862 - DNA, 195 bp, Glycine max
gacaaagtagcacagcagagtaaccagctaggtacggttttctctttctcacgttccccttcgcagcgccacagtagcttcgcattagcaatggcgagaatcaacgtgtacgagctgaggtacatgacataagcaaaacttctgaaccaacttaacgatctcaaagcagaactcgctctcctccgcgtcgctaag

SEQ ID NO: 3863 - DNA, 275 bp, Glycine max
ggatgataacaaaaacatcgacgacgagatcgaagagatcgagcttgagataaagcgccttaccacgcgcctcgacgcgctccgtctcgagaaggcgaagcgggggaagcgcgtggtgatgggcagagtcgtccccgcgaagttcatggagccgcgcccaagcgccgtcgtttcaagaaaacccgaagaaacgccgaagacaaaagttagggttagtagtagtagtaacaatgataataatgcgtggccgcgacggatgagtcttggaccgaatg

SEQ ID NO: 3864 - DNA, 406 bp, Glycine max
ggcgaaacactcccctttgccgctgttgttgttgctgcaccaccgaacaacttccccggtaaacccgtttccgttggtccaaggtttaaaagattgctgatgctgaagacattcaacctcctgttgttgataatggaactggaatggtcaacgctggttttgcaggtgatgatgctcctaaggccgtgttccccagcattattgggagaccacgccatactggtgtaatggttgggatgggtcagaaggatgcttacgtgggtgatgaagcccaatcaaaaaggggtatactcaccttgaagtatcctatagagcatggcatactcagcaactgggacgatatggagaagatttggcatcacacattttacaatgagctacgtgttgcccctgaagaacacccgta

SEQ ID NO: 3865 - DNA, 160 bp, Glycine max
aaaaaacaacgaagggggaaatccaaatttgcgtccttccttggcatctgtgatctcttctcctcacactgagcagattaaggcaaccaccggacttgaacaagtacatggagacaaagctccagatcaagctgaatgcaaatcgcatggttgttggtac

SEQ ID NO: 3866 - DNA, 391 bp, Glycine max
ggtccacccgttcgttagatctaacaacgacgtatcccctttctccttctaacgagtgaggaaaaatggcgcgtaagaagatcagagagtatgacacatagaggttgttgaaggagcactttaagagactctctggcaaggagttgccgatcaagtctgcacaaattagcgcatcaactgatttcactgagctacacgagaaggaagtctgactttcatcttctaaattggttgttaaacctgacatgtgatttggaaaacgtggcaaaaatggtttggttgccctgaatttggcatttgcacaagttgatacatctgtgaaggagcgtcttggaacagacgttgagatgagtggatgcaaaggatccatactaactgtcactgttgaacc

SEQ ID NO: 3867 - DNA, 297 bp, Glycine max
ggcgctaacagcaactaacgtgcaagttccatggcggagagaacaataatggccaccaacgacgagagggatatggagaacagcaagagtgaggaagaactgaagcatcacgggtttgtgaagattgccgcaatcaaagccttactgtgtgtgtcgaatctcaacggtttccaaaagcaaaccccggaacttttgaattcggcggttggaaccttgaacaatactgtacccaccgtcctgggtcccttctaccacaaattcaacgcggtccccaaccacatcctcctttttgtcaac

SEQ ID NO: 3868 - DNA, 390 bp, Glycine max
gacaaattcacacattttttgttgcattatcacaaacacctcgtccctcacaatgcagctagcaatggcggccaacgctgtcgtttcaccgtcgccgttccgacctcagccctttctccggtcatccttctccggcgtctccgtcaagctcactccctaatccataacgctttcacactccaggcatctcaccgtcgtcgccgccaccaagaaggccgtcgccgtcctcaacgggacctccgccgtcgaaggcgtcgccactctcatccaagaagacgatggcccgacgacagtttctgttcgcatcactggccttactccggggcttcatggttttcacctacatgagtatggtgatacgacaaatgggtgtatgtctacgggagcaca

SEQ ID NO: 3869 - DNA, 260 bp, Glycine max
gaaacttatttactttatctcttaattagtatcatgtttttacttcttcttcttcgtcttcttgttttaatttcgaacatttacgtgagtgttccttgcactagcttgttcacgactgtcactgtgagatgtggtcattgcacctatcttctctcagtcaatatgcctggactgcttctccttagtgccaatcagcttcaccttggccacatcttcttcactcctcaaaatcttctggaggagattcgtaatgcactttc

SEQ ID NO: 3870 - DNA, 53 bp, Glycine max; identical to SEQ ID NO: 1282

SEQ ID NO: 3871 - DNA, 180 bp, Glycine max
tacggctgcaggtcacgacagaatggtaccgctgctaaaacacgacagtaaggggttcatgttttatgctgtggaaaaaatgaatacgttccttgctggggggttttggtagttttacaactttggacgcctttttacaactgttgggtttgatgttgttttaactcaaccttttttgtt

SEQ ID NO: 3872 - DNA, 398 bp, Glycine max
  modified_base (337)..(337): a, c, g, t, unknown, or other
  modified_base (352)..(352): a, c, g, t, unknown, or other
gatctaactttgattttgtatgcacttcaaacagtttgggcgtcatgtggagagagagagcgttattggtgatcctgctactgcttctagtccagcaaatttgtgctaccaagaagcaagatcatggttgccccctttcttcctgcggcaaaatcaccaacataacttacgcatttcgattaaagggccaccctaaagctgcggcgacaataggtatgagctagcttgtgaaaacaatgttactgtgttacatttgtactctggaaaatattatgtgcaggcaatcaactacaataatttcactatccgagtggttgattcaggagtcgatcaacanacaaattgctcctcncttcctcgctatttcctgtctcgctccaatttcactgatacttaca

SEQ ID NO: 3873 - DNA, 306 bp, Glycine max
aggggtttaaagataaaaaaaaaaaaaaaaacacaaaaaaaaaaaaccggcggcccaaaaggttcaaacctaacttagccttgaaggcaacttaaaacccctccaaaagggccaccaaaatcaaattaacgggcggtcgtttaaaaaggtcttaacgggaaaaaccctgccgtaaccaaactaaaccgccttgaagaaaatcccccttccgcaaccggccgtaaaaccaaaaaggcccgaacgattagcccttccaaaaatttgcgcaccttgaatggcaattgagacccgccctgtaacggggca

SEQ ID NO: 3874 - DNA, 319 bp, Glycine max
gataacacagactcacacaaagagttacaagagaaatcatcatgggatcatcaccaactatgtatgcgtagttacctattgttgcaacttccaacatctactcaagggtggtcatgtttaacatcaataacaatacttctaggtttgttgtacaggcatcagattagcctgcagcagctgcatccgcctgcgccacatccccatttgaagctgaagcttaatcacaaccacgacctattggcatcaccataggtgctaatgtgaagattcatatgaaagaatcatactggtacaaacgcaccggttcagtggttgctgt

SEQ ID NO: 3875 - DNA, 418 bp, Glycine max
  modified_base (202)..(202): a, c, g, t, unknown, or other
gactcactcatacaatagagaccagcttttgcttctttgtgaacatggagatgaggaaatcatgtggcttcttcttcttgctcctcctccttgtctttgcttcccaggtggtggtgcagacggagggaagagtgtgtgagtcacaaagccacgggttccatggtttgtgtaatagagaccacaactgtgctttggtctgcangaacgaaggtttctccggtggcaggtgcaaaggcttccgccgccgctgcttttgcaccagaatttgttgaaatctcatcaaaaactattcttgcaatgcaaattattaaatcatagctaggccaaataaattgcatctactctttatccatttggaagctagctaccacaaccaactcatacttggtcattggattgcttccctttggcttctgcc

SEQ ID NO: 3876 - DNA, 92 bp, Glycine max
agatatgatcgctcaagagttctccttagtaatgataatgttttttgtgttctctaaagctctcccttcgattgttttattaagattgttgc

SEQ ID NO: 3877 - DNA, 431 bp, Glycine max
gaaccaaaaacaatggccacttgttcactcatttccacactcttcccttctccttcttcttcttctttttcactctctcgttcttcctcaaacaccaccaaaccaaccaccattcacctctccaaatccctccatctccaaactcccatcctcttcctccttcgccccccaaacccaaaaccgacacttccaataatacccctcttccccaaactcaccattcccaactcccttctccttctctgcacctccctcgctctctccttcactctcctcctctcccccgccgactccgccgccgcctttgttgtcacctccccaaggaagctccagtccgatgaactcgccaccgtccgcctcttccaagagaacactccctccgttgtccacataaacaaccttgctgtcaagcaagatgcgtttacattgga

SEQ ID NO: 3878 - DNA, 407 bp, Glycine max
gattacacgggatttacatcaccgtccgcactttccttcccccctacacaaaacatggctttgcccaatcagcacaccgtcgattaccccaacttcaagcttgtcatcctcggcgacggtggcacaggaaagacaagcttcgtgaacaggcatctcactggtgacatcgagaagaactatgaaccgaccattggtgtggatgttcatccgttggattttttcacgaactgtggaaagagtcgcttcgattgttgcgatactgctgagcaagacaagtttggtggcctcagagatcgctattatagccatgggcactgtgcgattagcatgtttgatgtgactgcccgtctaacatatacaactgtcactacctgtcaccgtgatcattgccgggtctgtgaaaacat

SEQ ID NO: 3879 - DNA, 373 bp, Glycine max
  modified_base (314)..(314): a, c, g, t, unknown, or other
gacacaccgtttgttctattcttaactcaacttctgctacccactctcttcttccaagtccaaccacgcttttctctacagtcatgggcaaggtcaagatcggaatcaacggatttggaagaattggccgtttggttgccagagtcgctctgcaaagagacgatgtggagctcgttgccgttaacgaccctttcattaccaccgattacatgacatacatgtttaaatacgacagtgttcacggacactggaagcatcacgatgtcaccgttaaggacgagaagaccttctcttcggtgacaagccagtcactngtttttggacacaggaaaccttaaagagattccatgggggtcaactggagctgatatca

SEQ ID NO: 3880 - DNA, 409 bp, Glycine max
agaggggcacatgaagcacgctgaaagtgaagaagaaacaaaaagattattgcatttgcaggaacaggaaccaccccacaagcttttactggaatcagtttctgagggagaaggatccaaagtctcttctgttgtcgggggttgtaaacaggaagatatcagttcagccaggagtgatattttggattcagatagtccacattacaccgatggagttaactccgcactgctagagcatggtgattcttcttatgtgtttgagcatgatcaatcggatatgtcacaagatgaagaagataacctcagcaaaagtctctacccttcgtacctctttcccaaacttgaggaagatgtggattactccgacccgcctgaaagttcttgtaaatttggattttctgaggaagat

SEQ ID NO: 3881 - DNA, 309 bp, Glycine max
acgcgtcaatccggacgtccgccgacgcctcaggggaatcctccgtgccgctccgagacacccacagattgtgcgcttatgcagtgaagaagcttggtcatcttaaggatattgtttcagcaggctgtctactctgctcaggcttccttgactgtgcttttcaattgcttgctcttctatggtgtgaccgggcccgttttactggccgtcgtttttgatcttcgtgtactgtgaaatcctgccgttgagcaccatattcaccgttctgtagatctcccttccagtttctggagtcagttccaataggcc

SEQ ID NO: 3882 - DNA, 395 bp, Glycine max
gatcccgataacaccatcatcactttcagtcactgtcgcttccataccatgtcatggtactgttgtacatcaacgatagaatggtaacactgatcaaacacaccacactgtctcccactcccattgtgtacacctcactcaatctcgatgatcatggcatcatccatttcaagcacttgtgacaaacctcaattccctcaccctctctcctcctctttctcttcatctgcatcattaataagagatctgggcttccacataatgtttcagcagaagcccattagaaatgtagttgattggtgctcaaattcccacctagtgattcatttcccacaacagtcctacaacaaaactgaaattaacaaaaaaaccaataacttcaacggcggaaaggc

SEQ ID NO: 3883 - DNA, 415 bp, Glycine max
  modified_base (383)..(383): a, c, g, t, unknown, or other
gatagtattagcttggcttgactcctctcatcagaagaaagcgaagaaagcaaaaatgcaatctatgtccctgacgctgagcaagaggctctccaattcaaagcctctcttcagaatctcttccagcctcgtcgctcacgcatcctccgccacaacctctccgccgccaccttcgccgccagtcccctctccctccgccctcaacagcctcctcaccgctccgtggtccgccactcagtcacgcggaatcacgctttccggatctgatattagagtcgggaatctcattggaaaccgaggacgcgctcacgaggttctcaaactgtatcgccctcttgaaggaacgggcaaagccactcttgaggttccgcctcaaagtgtanctggttatggcacagttgctactacagaggat

SEQ ID NO: 3884 - DNA, 355 bp, Glycine max
ggctcgctctctagggtttttctttttctcttctcactgcatcgcttcaggttcttctgaaaagatgtctcgcgtgtatgttggtaacttggattcacgagtcactgagagagatctcgaagacgaattccgcgttttcggagttattcggagtgtttgggttgcacgtagaccacctggttatgcttttattgactttgatgaccgcagagacgcacaggatgctatccgtgaattggatggcaagaatggttggagggttgaactttcccacaactctagaagtggaagttgtggtcgtggtggtcgctctggtggttctgaattgaaatgttacgaatgtggtgaacctggt

SEQ ID NO: 3885 - DNA, 305 bp, Glycine max
tttcctgttttcattttcattgaaaatgttttcagaaatccaaccaaacacattttcatcactattttctgttttcagtgaaaatgaaaacagaaaacaaccatatcaaacatcccctatttaatctaagtgaaagtggattgggcttgaatttcttagatgagatctcaagtttgaattttgggatgataaactttacttaaggtgattaaacaagttttataacaaagattagttattaataaaatcaatagatacttcattacgaaaaaaaatagaggtaaaaataaaaaaaaaacggccgc

SEQ ID NO: 3886 - DNA, 407 bp, Glycine max
gagggtttacaccgaggagacacaccttcagcagcagcagccatggttctcaaaaccgaactatgccgattcagcggtgccaagatctacccagggaaaggcatcagatttgttcgtggtgattctcaggttttcctgtttgctaactcgaaatgtaagaggtatttccacaacaggttgaagccatcaaagctcacctggactgcaatgtacagaaagcaacacaagaaggacattgctcaagaagctgtgaagaaaagaagacgtgctgccgaaaagccttactccaggtccattgtcggtgccactttggaagttatccagaaaaagagagctgagaagccagaagttcgagatgcaaatagggaagcagcccttcgtgaaattaaggagaggaacaagaaaac

SEQ ID NO: 3887 - DNA, 392 bp, Glycine max
gacagcagtgcactcttcgcaacacggcacagctggacaacccagagagcgcgtcataataaacgctcttctctgaaaacccccatttcttttcatctttcttcttctctttcgcttcttcgatcttcgatcttcgtcgctgacactgagagattgcatttcaattcacatcggataggccgggattcacgttggaaacgcctgctgggagctttactgcctcgatcactgtattcagtctgatgggcaaatgccatgtgataagaccgttggtggacgtgatgatgctttcaacattctcttcagtgaaactggggcaagaaagcacgtgccatgtgcgatttttgtagatcctgagcctactgtgattgatgacgttacgactgggagat

SEQ ID NO: 3888 - DNA, 391 bp, Glycine max
gcaattggcaagtgataataatagcaaactaattatacgtttcttttcttccccgtctcaactcaattccattctcttctctgagtctcaacctaattccccattcatccatctttacgtgtttgttggattccatggccaaaagctccttcaagcttgaacatcccttggaaagaagacaggctgagtctgctcgcattagagacaagtatcctgatagaatacctgtgattgttgagaaagcggaaagaagtgacatcccagacatcgataagaagaagtaccttgtcccagcggatttgactgttggtcagtttgtttatgttgtccgtaaaaggattaaggtcagtgcggagaacgctatttttgtttttatctacaacactctacc

SEQ ID NO: 3889 - DNA, 402 bp, Glycine max
gagccttgggtaggtagctgccaatgctgtcccaccacaagtccacttgtcctctcaaaacttaatttgatcaccgcatcccaacttccactccaagctgttgtgaaaagccagcacttgttgtgggtgatggagtgccaatgttcagatggctccaccactcagaatcattagaacctctagatgcttcatctaagctcctctaagctccatacattgattccagtactttagcccaaagatcgatggggtattggaataagctccatctccattttcacatcaaagcaaggttaaagctgttgacatccttgattcctatccgccctctttcttttgggaggcatatcgtcatcccatgttgacccatgagatcgtagattggtcatggctggcctccca

SEQ ID NO: 3890 - DNA, 396 bp, Glycine max
gatccaactctctaaacaacacattaacctttctcattccccatctcctcaccttattcagccactgctaatttctagggttccgaaatggacgctggcggaaagatcaagaagggcgccggaggaagaaagggcggcggccctaagaagaagccggtttcaaggtccgtcaaggccggtctccaattccccgtcggaagaattggccgttatttgaagaaaggaaggtacgcccagcgtgtcggtaccggtgctcccgtttacttggccgcagttctcgagtacctagctgctgaggtgcttgagttggctgggaatgctgcacgtgacaacaagaagaacaggattattccgagacatgtgctattggctgtgaggaacgatgacgaattgggg

SEQ ID NO: 3891 - DNA, 263 bp, Glycine max
gaagactgtctctaaggaggaagcgtctgccatcaaggctgctgggaaagcatggtatcacactatggtgtcagattctgattatacggaattcgacaacttttctaagtggttgggtgtttcacagtaaacttcatgatttattttttcgtattagaattttgttttttatgctcatcagaactaaatatccttatctttggtttttttgttttgcgggttaaggttgtcatcataattatgcagacaatgtggaaattttg

SEQ ID NO: 3892 - DNA, 215 bp, Glycine max
gtttcaactgagtgttaatttccctgtctctttgttgaaaaagaactggcaaaatgtcaggtgcctgtatctgaagagtacaatggggaaatcttaccgtgtcttttgaggaattttttttaatccggtgaatttgtgatcgcgcttgatacattgattatcctaatagctagatacagactatcatcttgttacaattttgttggctggatttt

SEQ ID NO: 3893 - DNA, 144 bp, Glycine max
ggaagtcgccgtttgttttcttttcgttcgcatcatctctctctctctcagaaagatgaaagtggtcgccgcgtaattgctcgccgtcctcggtggcaacaacatcccctccgccgatgtcctcaatgaaatccttggctccgt

SEQ ID NO: 3894 - DNA, 361 bp, Glycine max
gattcactcactcacgtcactgtcattttttcttatgctcttcctctcacactactctgagagacacacgaaaattataataaattatggctggttattcaaaagcttcagctctttggatacattttcttctctttggcttctctgtagctaatgaaattttggttggatgtaacactgatgcatggaatgtttcagcctctgaatcagattcactcaatcaatgggcagaaaagtctcgtttccaagttggagactatcttgtttgaaaatattatggtggaaaagactcagtgttgcaagtgagcagagagaactatgtgaattgcagcatctcaaaccccataaaggactacaatga

SEQ ID NO: 3895 - DNA, 375 bp, Glycine max
ggttgttggcttgtgctctgctcgtgcctctagggttatcatatctccattgcgattctcctcgctctcagtttccatgaatctgaagctaagggaaagtctcatccaaccgtgagcgctgattaccataaggccgtgtagaatgcgaagaagaagctcagaagcttcatggcggagaagagatgcgctcctctaatgcacagtttggcatcgcactctgctggaacttacgacatgagcgcaaagatcggtggtcccatcagaaccataaagtaactctccaaagtcactcacggtgctaacaaccgtcttgacatccctgtgaggcgtttggacccactctaagcggagtatctgacattgagctacgccgat

SEQ ID NO: 3896 - DNA, 383 bp, Glycine max
ggtagttccaccgagtagcaacaatgtcgaagcgaggtcgcggaggatcggcagggaacaagttccgcatgtcactgggtctgccggtggcggcgacggtgaactgcgccgacaacaccggcgcgaagaatctctacatcatatcagtgaaggggatcaagggaaggctgaaccggttgccgtcagcttgcgtgggtgacatggttatggccaccgtcaagaagggaaagcctgatctccgtaaaaaggtgctccccgccgtcatcgtccgtcagcgcaagccgtggcgccgaaaggacggtgtttacatgtacttcgaagataatgctggggtcatagtgaatcccaagggtgaaatgaaaggttctgctatcactggtcct

SEQ ID NO: 3897 - DNA, 422 bp, Glycine max
ggttaccatttgtgatttgtgagttcctacacagtgttctctttcgttgttgttggtcgtgctcgtcctcctttctctcggcgattcgaagcgcaaaaccatcgcaatctctacgaatttcgtgtctcgatcccgaatctcaagctgaaagagatgaattggattcagcgcaagatctacctttacaatgtgacttttgggctgtatatgttggactggtgggagcgttgtaccttcaatattgtggtgattatattaatgtgtttcgttctacgatacgttactcagttcttcaagatgtacgtttggtaagaagcacaaccattgtcacgggaagaatcaaatgtagattggtgtagctgaatagggaatatcttgatataacctgacttggaatttcttaaagctacccagaaattgag

SEQ ID NO: 3898 - DNA, 221 bp, Glycine max
gatgcttgagttgacacaagttgaaaattttggttaattaaaaggcttgccttggttccccaaccatgtcccagaaacatgcccttctgtaaagaatgtccttcctttggattccgatgggaaacatgttgcggtcaaatacgtctctgaagactggccgacaaatagtgccaaggaaaattttgagaaagttgtattcaacaagactcagaaaaccaatg

SEQ ID NO: 3899 - DNA, 443 bp, Glycine max
  modified_base (379)..(379): a, c, g, t, unknown, or other
acccttcggacggtgcaagaggacaacagaaggggacagcatggaattcttcgcaccacaccaaaaaaggacaacccaaaaagcgcgtcttaataaaggctcttctctgaaaacccccatttcttttcttctttcttcttctctttcgcttcttcgatcttcgatcttcgtcgctgaaaatgagagagtgcatttcaatcaacatcggccaggccgggattcaggttggaaacgcctgctgggagctttactgcctcgaacacggcattcagcctgatgggcagatgccaagtgacaagaccgttggtggaggtgatgatgctttcaacaccttcttcagtgaaactggggcaggaaagcacgtgccccgtgcgatttntgtagatcttgagcccactgtgattgatgaggttaggactgggacattacgccaactattccat

SEQ ID NO: 3900 - DNA, 374 bp, Glycine max
gacacagcagcatcttctaccttgtgttgtgtctgtttgtgtgagtggcataagcataaccaatggacgccatgaatgtagtgacgctgaaagcaatcgaagcaactccgtcaaccttcaaagactacggtcaggtcatcaaggcttcgccggacggccaggaatttggttcccacgatgctcaactcgacctttctcaaggaactccaaggttctacattatgcatattgaaaatcgcccgcttaagttttctagtattacacatcatgcaagcgtgactcagtgcctcgggtctattggtggccatgtttggtatcttggactggccaagtcatccattgttgattcaaatgaaatcaacgatggcacaagc

SEQ ID NO: 3901 - DNA, 436 bp, Glycine max
ggcctcagcagaagcagaacgaggagaagcagaaggagcaaaagcaatggcgccgaagaagccgagaaccacgacaaggaaccctgatttggttagggggattggcaagtattcgaggtcgcagatgtaccacaagaggggcatctgggccatcaaggccaaaaacggtggcgttttgccccgccacgatcccaagcccaagcccgaggccccggcccagaagccgcccaagttctaccccgcggacgatgttaagaagcccctcgtcaacaagcacaagcccaaacccgcgaaactcacggctagcattactccagggactgtgttgaccctgcttgctgggaggttcaagggaaagagggttgttttcctgaagcagctcccatctggattgcttcttgtaactggtccctttaagatcaatggggttcctccc

SEQ ID NO: 3902 - DNA, 393 bp, Glycine max
gacacatgcccatcatcaaagtttcttcctttctctgctctttgtcttctctgacacatttggggccctgttgagtgtgtttttgcaagacggtatggcgaatgacgttgacgttgctgatcgtggctccttctctgggaaggactaccagtaccctccaccagcaacactcattgatgctgatgagctcacaaagtggtccttttacacggctcttattgctgagttcattgccactttgcgcttcctctacattactgtgctcacagttataagggtaaagcaccatacggatcattctgatgcgtctggtggggttggcattcttggcattgcatgggccgttggtggcatgatcttcatccttgtctacttcactgctgggatttcagg

SEQ ID NO: 3903 - DNA, 408 bp, Glycine max
tgggaactttaaaaattgaaaccgcatccctcattttctctcattcacccaatggctgctacggcttctgtttcctcttctatctgcaacagaatatacaacctttccttcacacacccttccctttcactcaccagcagcaacttccctcaaagacccgtatctcaaaaaccactcagtctcaacctcgagtcccaaagtttcgctctttcctttctcccacttcaccgtcttcccccacctttcgctgcctttgatgggttggaagtagctcaagataccacagagtcccaacaagacgaaccagaaccagaaaccgttgaaaaaacagaacaagaggaagagcaaaaggtttcagactccaatgatgctgggaagctctatgttggaaacttgccatattcaatc

SEQ ID NO: 3904 - DNA, 238 bp, Glycine max
aacagaacagaaaggggtagtccgtacgtctacgcactaacctcgcacattccctcagtactggcatcgctggaaaattcaatctgggactcaactgaactgatcactcatgattcaccatggatgcattggatctcaacggtgtgccactctgaattctaagtcacgcaactatggcatacctaaatactctgcctttcgttgcgcctcgctaatgactcccaaggttgccgtcact

SEQ ID NO: 3905 - DNA, 421 bp, Glycine max
ggacttcaattgcaatcagattagttcattctctttgcgcagttccctacctctcctttcaagatgcagatcttcgtcaagaccctcaccggaaagaccatcacccttgaggtggaaagctctgacaccatcgacaacgtcaaggccaagatccaggacaaggaacgaattctcccggatcagcaacgtctcatcttcgccggaaagcagctcgaggacggccgtaccctcgccgactacaacatccagaaggagtcaacccttcaccttgtccttcgtctccgtggtggcatgcagatcttcgtcaagactctcactggcaaaaccataaccctagaggtcgaaagctctgacaccattgacaacgtcaaggccaagatccaggacaaggagggaatccccccagaccagcaacgtctca

SEQ ID NO: 3906 - DNA, 200 bp, Glycine max
cagaatataggccctttccttcatacatccttccctttcacacagtacgcacaacttatctcaactatccgtagctcacatgccacttaatcacaacctcaactcgtaaagtttctcactttcatttctcgcacttcaccgtcgtcccccaccttacactgctcttgatgtcttggttatagctcatgatactacacagt

SEQ ID NO: 3907 - DNA, 376 bp, Glycine max
gacaacacaacgcaacacaacgcgcactctctcttttctctcttaacacaaaaaccctatcgttcttcgcggtttcgccgattctcgccatgccgaaagccaaatccgacgccaaagccgccgatagccggttgaagcgcaagggcgctggtgctggaaggaagcaatcgaagaaagctgctaaggatcctaacaagccaaagagacctccaagcgctttcttcgttttcatgttcgagttcagagagcagtttaagaaggagcatcctaacaacaaatccgtccctgttgtcggtaaagctggtggtgacaaatggaaatcgctgtctgatgctgaaaaggcccccttcgttgccacggccgaaaagaagaaaca

SEQ ID NO: 3908 - DNA, 385 bp, Glycine max
gggctgatatttcctgataagtggacatacgcttaaacagagaaactaacacagatttgcatgcatggggaaaataacgcacattgtagtaattcccagtgcagggtatagccacttcgttcccgttatccacttctcaaagagacttgttgagcttcacccagaaattcacgtcacatgcatcattcccattctggggtctctcacaagtgctgcataacccattctccaaacccttccacaaaacatcaacacggttttccttccaccggtgaaccctaatgacctaccacaaggtgttcccgtagttgtccaaattcagctagcaatggatcactccatgcgctccatctaccacaccctcaagtccataacttcaaagact

SEQ ID NO: 3909 - DNA, 409 bp, Glycine max
gatccttcgtccagctagcaccacattcacctgaggcttccaaagcaatggcatcccttgcagcatccactgctgctgcttcccttggcatgtcagaaatgcttggaaaccccatcaacttcagtggtgccacaaggccagctccatctgcttctagtcctgcctccttcaagactgtggctcttttctccaaaaagaatgctacaccaatacctccaaaaaaagctgctgctgctgctcctgccaatgatgagcttgccaagtggtatggtcctgacagaaggatcttcttgcctgagggtctcttggaccgatccgaaatcccagagtacttgaccggagaagtccctggagactatggttatgacccatttggtcttagcaagaagccagacgactttgccaaata

SEQ ID NO: 3910 - DNA, 235 bp, Glycine max
agatgacgatgatgacgaagatgatgaggaagaaagcaagactaataagaagtcatcagcacctaagaagagtggaagagcacagcttggtgatggccatcagggtgagcgacctccagagtgcaagcagcagtagatgcagaaggtcatttatgtacttgttgagttttgttggtgttcgagaatgtttgatgtgaaagtgggtttcatgttttaatgcttcgtaagttgattt

SEQ ID NO: 3911 - DNA, 363 bp, Glycine max
aatcaatcaatcaatttaatggcaatttttcctaatcccctcctccccccccaatccgaaacacaaaggaaaattattagaaattaaggctggttattcaaaagcttcaactccttggattccttttcctctccttggcttctctgtaactaaggaaattttggttggaggtaagactgatgcatggaaggtttcagcctctgaatcagattcactcaaccaatgggcagaaaagtctcgtttccaagttggagactatcttgtttggaaatatgatggtggaaaagactcactgttgcaagtgagcaaagagaactatgtgaattgcagcatctcaaaccccataaaggagttcaatgatga

SEQ ID NO: 3912 - DNA, 187 bp, Glycine max
gatcatcactaggtgtttacatttgggattacctctcgtcatggtgggacaccctcataacttgcatcatccatcttgcgtcaatctgtgctttcctagtcttttctaatccagtgctgtgtactgataatgaggacagtcttttccatggaatcaacatctacacgcaaacacagagcccggtaac

SEQ ID NO: 3913 - DNA, 411 bp, Glycine max
  modified_base (395)..(395): a, c, g, t, unknown, or other
gattcccctttttgttaaaactgtatctattcctaaactccagtagtggatccgaagccagcttcagctctgagcgtagaatccaaatcctgaacctcaacaacctgcggcatcaccatctgctggattatcaacagtatcacccctgtaatccgcgtcgatcacgcccgctcccacatcagtgtcattctaacaaactaacatttgcacaaaacacgccaaaaggagtgaagatctaaacaagcaatctgtgtgtgttccgccatgaacgaagaacaacagtgtctgcttctcagctcagcttctcgcttctggccccccaaaggagtgaagctatcgtacggcactgcgggcttcagggccgatgcatcacttctccaatcgacggtgtacanagtgggaatccttgca

SEQ ID NO: 3914 - DNA, 418 bp, Glycine max
cggggcctttgaggaaaagaaaggaagagatgcaagaagcaggcttgggaatgatgggtgaggtctccggcgatcagcaccgtcagctgaaggcggagatagcgactcatccgctgtacgagcagcttctggcagcacacgtggcatgcctccgtgtggcgactcccatcgatcagcttccactcattgatgctcaattatctcagtctcaccatcttctacgctcttatgtctcacacaacactctttctctctcccctcatcaccgccaagaacttgacaacttcctggcacaatatttgatagttttgtgtacatttaaagaacagcttcagcaacatgtcagagtccacgccgtcgaggctgtcatggcctgccgtgatatcgaaaataccttacaagctctcactggagtgag

SEQ ID NO: 3915 - DNA, 335 bp, Glycine max
  modified_base (285)..(285): a, c, g, t, unknown, or other
  modified_base (323)..(323): a, c, g, t, unknown, or other
gacctaaaaattgtaccgatatggcttcacttgtgtgtctccttttttccttgcatttcatggttatcatgtcaggttccgtaccagcaaatagtgaagtgtttacaaaagagtctcctatgtctctatccacaaaacccgtggaaagactcacccaactccacttttatttccataacaacaaaatgggggaacacccgactgctatgaaaattgttgagcctcctaaggcgtccatttctggttttgggactatttacatgatggatgaccctctaaccgaanggacaagtccaacttcaaagcttgttggaagatgtcanggaatatatgct

SEQ ID NO: 3916 - DNA, 348 bp, Glycine max; identical to SEQ ID NO: 2491

SEQ ID NO: 3917 - DNA, 421 bp, Glycine max
  modified_base (404)..(405): a, c, g, t, unknown, or other
agtgagaagaaagaaaagctgcattgggtaggttaggcgttgcagaaccgaaacacgtcacctctgccagccattttttctttttttcttttttcggattatagagaacgtgagcgcgaagatcggatactcgcaccgatttccttcattatcacagtttcaaccgaacgaacgactcctctccaaccatttctcgcagaattccagttccagtttcaggttcactttgttgatggctaaagttggtaagttgcggagcaaggctcaaggtcagagggcaaccccgcatcttttatcgtgtgcaagaaaaaatctgaaagatgttaatgtaaggaacaactcttctaaagcatcggagaagaaagattgggaagatgcaacctgctcagtctgtatggaggtcnnccacaatgctatcctt

SEQ ID NO: 3918 - DNA, 426 bp, Glycine max
  modified_base (378)..(378): a, c, g, t, unknown, or other
  modified_base (381)..(381): a, c, g, t, unknown, or other
  modified_base (386)..(386): a, c, g, t, unknown, or other
ggagttgaaatcgaaagggaagcggtggtttaggttaggatttggtgagtgagtggggatggcgaagttcaatgtggtgcagaagcgaaggagagctctaatagcagagaagaagagacagcttcacggagaccctttaaccggcaagctcaagatcaaggaccaacccctttccctatccggaaaacgcaaacgcaagctcttcaaaaaatggcgccgggaccaaaaggacgccttacagaatggtttggtaaccatggaagatgttcaaatggcagttgctgaaggggataccaaagatacccctagaccttcaccaaaaattcacttaaagaagaaggccttgaaacttaaacagctcaggcgcaaagggaagancangaganaatctgatgtgcctgctgatgtttcggctgatgcaatggt

SEQ ID NO: 3919 - DNA, 411 bp, Glycine max
gacccaccattttgtgcttctttctgtgtgcaagaaaggtaaaagctttcacacaccaagaaaagtagccatggctgcttgctcaagaacttctcttttgctccttttctttctctttggattctccgcagctaaggaactattggttggaggcaaaatagatgcttggaagattccatcttctgaatcagattcccccaatcaatgggctgaaaggtctcgtttcagagtcggcgatcatcttgtgtggaaatatgagaatgggaaggactcagtgttggaagtaacaagggaagattatgccaattgcagcacatccaagcccatcaaagagtacaatgatggaaacacaaaggtgaagctagagcatgctggtccattctacttcataagtggagcaaaggggcactg

SEQ ID NO: 3920 - DNA, 303 bp, Glycine max
gggtcacacgcagttgtattgtagaactgaacaagggtttctctttctctttctctgtctgcttcttcactttctctcgtttcaatcgaaaaaaatcatgggcagaaaattcttcgtcggtggcaactggaaatgcaatgggaccactgaggaggtgaagaagattgttactactttaaatgaagctaaagtccctggagaagatgttgtagaagttgttgtgagccctccttttgtgttccttccttttgtaaaaagtttgctgcgccctgatttccatgtctccggccaaaattgttgggt

SEQ ID NO: 3921 - DNA, 413 bp, Glycine max
gctttttgtgcgtagcgtagaaatgactccatctttgcgattctcaactttctctctctaaaaaacccatcagagcatgaggagagagaaacttccctgcccttccatttccctctcgattccttcgcctttgctttcgatcctttgctagaagagaaccttattcctctctgtctctcccccttcaaattcccttccttttcttccatattcactctctcttcctaaccgcccgatgcactttggttttgcaaactaattcgttggctaaattactccgattgtgaactggttctgttggaatatccaaaatggcaaaaggtagcaggggaagacacaggattgcttctcgtcaattcagagtgactccatacccactggcttcttgcaaaagggacatttgtgaggacatg

SEQ ID NO: 3922 - DNA, 276 bp, Glycine max
gatagcaaaatcgtttctccaatttaatcaccattgtacaacccaattcccttcgtcgttttcgattaagagagcaatggcacgtaccaagcaaaccgctcgcaagtccaccggaggaaaggctccgaggaagcaattggcaaccaaagccgctcgcaagtcagccccggcgaccggcggagtgaagaagccccaccgcttcacgccaggaacggtggctctgaaggagattcgaaagtaccagaagagcaccgaacttctgatccgaaaactccc

SEQ ID NO: 3923 - DNA, 282 bp, Glycine max
gaggacaaatcactgtttcgttctgtcacgctatgactatcgttcatcaatggccaccctcaacctctcttcgttgcaagctctctcctcgaagattttatgctcgtcttttctgcataatacctctaccccttccttcaatttccagctaataccctcaattgacccgcgctcaatttctctgaaaccctacgtttccgagaagcctcacgcgcatgtggtggcattagacgtgaagagcctcggcgatactgatggcctggaggtgttccctgaataatg

SEQ ID NO: 3924 - DNA, 416 bp, Glycine max
agggacatcacattttctcaaagtaatttattacttactaaataaatggcggcggcagcagcagtgacggtgctactctcatctatgattccgaccgccaccaacgttacacgctgctctgctttgccttctctgcctcctcgcggcatcaacactaaaaccactttgctcttatcttccctcaaccacttctcagtgtcccgaaaatcttctctgcttcagaccagagcttcttcagaggaatcatcctcagtagatgccaatgaggtgttcacagatttgaaggaaaagtgggatgctcttgaaaacaagtccacagtacttttttatggtggtggggctttaattgctgtttggctatcgtcgattcgtgtgagcgccatcaactctgttcccttgcttccaaagattatgga

SEQ ID NO: 3925 - DNA, 393 bp, Glycine max
caacagagaacccaaattgttcaaggcaacatccaattggcggtgaggaacgacgaaaagttgagcaagcttctaggagatgttaccattgctaacggcggtgttatgcctaacattcacaaccttcttcttcccaagaaggctgggggctcatccaagggtgctgctgctgacgatgactcttaaatagggattcactgttcacaaagttcttgaatttagattctatgtttgctctctttttttttcctttttatttgtagttatgataattgtgccctttgtagtagtagttaggttttcagtcagatgtgtttaaagaatgctcttacgcatcaagaaaagttgttcaaaatttaaattaatttaatgtcacctttgagtcttgatcta

SEQ ID NO: 3926 - DNA, 377 bp, Glycine max
gatctcgcgttggtgcaaagcatccttcgcttcaatctctctctctctctttgcgctttctgcagaccgaacatttcatctccaaagggatcaacaggtcgaaggagaaatggggctgacattcacgaagcttttcagccggcttttcgcgaagaaggaaatgcgaattctgatggttggtcttgatgctgctggtaagaccactatcctctacaagctcaagctcggagagatcgttactacaattcctaccattgggttcaatgttgagactgtggaatacaagaacattagcttcactgtttgggatgttggtggccacgacaagattcgtcccttgtggaggcactacttccagaacacccagggtcttaatt

SEQ ID NO: 3927 - DNA, 386 bp, Glycine max
ggttttgcatggagacaaagaatccatgggaacttcaacggcctcacgggtttctctgacggcgaacgggaagagttcacacggatcgagagctgcggaacatcgatccgctagcgagtgcctgaacgagtcgacgacatgggcgatgcgaaaagcgagagtcatcactcacgacggtttcaccccattcgtcatcgtcaacgatatgaactctgaccccaagcccccactttcatcagcatcacaaccccgtctgatccatctcttcaattcatccatcatcaacgcgacatcattctcattgtcctcgtattttgcccccattcatacatatgcaactttcgttatggatcaattttcacttgcacatcgcacgtagcatggtg

SEQ ID NO: 3928 - DNA, 153 bp, Glycine max
gaatacacaagcgaagtgaagagagagtgagtatcgtttgaacaatggagttcactttcgacgagaaggacatcgcgtcgtgctgctgaagcaccaaattcgctaaggaaatggcttcggcctctcctttccgttcgttccaggacgctgttt

SEQ ID NO: 3929 - DNA, 367 bp, Glycine max
ggatcctttgtattctattcttcaaaattcatgtactgcgtttcggaagcatacatacatagctcgtaggaatcaaaccgctcgtaagtccacaagatgaaaggctcctatgaagcagcttgcaaccaatgctgcacgtaagtctgcaccaaccactggtgatgtgaataagccccaccgttatcgtcctgataccgttgctcttcgtgagattaggacataccagaatagtaccgagcttttgatccggaagctcctcttccagaagctggttcgtgaaattgctcaagacttcaagactgatctgcgtttccagagccacgccctgcttgcaatgcaagaaactgcttaagcataacttgttagg

SEQ ID NO: 3930 - DNA, 353 bp, Glycine max
gacggcattcaccccaccttgttgttctttccatttttctgacttgctccttttttctctcaaacacttcatttcttgagtttttttcactaagtttgttagggagatttacacaatggccaaacactttcttctgcttctttttgcagtatgcgttgctgctattgatgaagaaccatttataggggtgaatattggaagagacctctcagatatgcctcaccccactcaagtagtagcactacttaaagcacagcaaattcgacatgttaggttgtatgatgctgaccaagctatgctcattgcccttgcaaacacaagaattcaagttgctgtatctgtccctaatcaag

SEQ ID NO: 3931 - DNA, 143 bp, Glycine max
ggttttaaagggaacatcattccaactttttcaagaaacgattgcgatgtacagtgttgcatgatctgtgcctgagttcctggtgaatcatatgaatcgtacatacgtatgtttgtgtacttttttctttttgtcagagaaga

SEQ ID NO: 3932 - DNA, 374 bp, Glycine max
gtatgatgacatcgtgacagaagtctcttcttacttgacgaaggttggttacaacccagacaacattcgctttggtctcatctctggatttgaaggtgacaacatgattgagaggtccaccaatcttgactggtacaagggaacaactctccttgaggctcttgatcaaatcaatgaacccaagaggacctccgactagcctctaatgcttccattgcacgatgtctacaatattgatggtattggtactgtgccaatgggacgtgtagagactgaggttgttaagcctgttaaggcgatgacttttggtcacactgggctgacaactgaagttaagtctgttgagatgcaccatgacgctctcacacacgctc

SEQ ID NO: 3933 - DNA, 350 bp, Glycine max
cgatagaacattgcttttggactgcttaccctcagtgccactccttgcatcccttttccaccagccgatgcaatcactgagttctgcaaccatgcacccaaagattggcatttgacatagtccaaaatgcacatgtcttgtgttggaattggatttagtgcattcacctttccacatattcagtaaatttataaccattgaatgaaaattggactgacttagatttttaaatgtgttttaagttgattgactgagagaaaatgattcgtctaaggctgaatggtcattttggtacctgaaagtgtatagtgattctaagtaagtccctgaattcaagtgggtcttaaaaa

SEQ ID NO: 3934 - DNA, 404 bp, Glycine max
gagggtttttgtcgtcgctactaagagttgctgcttcttcagccactccgcacctcgcagcctctgtgccctcaacaaccatggctgaaatcgaaactaccgttccagatcccacccaaatcgacgtcaaactcttcaatcgctggagcttcgaggatgttgaggttaatgatatgtctctggctgattacattggagtgtccccatcaaagcatgctacatatgttcctcacactgctggtaggtactcagtgaagaggttcaagaaagcgcagtgccccattgttgagaggctcaccaactctctgatgatgcacgggaggaacaatggaaagaagctcatggctgtcaggattatcaagcatgccatggagatcatccacttgctcactgacctgaaccca

SEQ ID NO: 3935 - DNA, 215 bp, Glycine max
  modified_base (15)..(15): a, c, g, t, unknown, or other
gaggggaatttggcnaatcattggaagaaaatggcgggtggtggaaaggtttcgtccaaagtcacactaacctccgatccaaaattacccttcaaagtggttagcgttcaaaaggctgcgccttttactgccgttctcaaattcgccaccgaagaattcaaagtcccgccccaaacaagcgctatcatcaccaatgatggtgttggcataaatcc

SEQ ID NO: 3936 - DNA, 255 bp, Glycine max
ggtctacgaatatattctaattatcaacgaatccctcgaattttagggggcatggggattgtaattctttcaacttctagaggtataatgacagatcgagaggctcgattagaaagaattggcggagaagttttatgttatatatggtaatctttctaacacccgaattatatgagaaacttcgatccatttttggtaaaaaaaaaaagaacgagaaaacgcaagtttctaaaagaacttccccctttatgtaaa

SEQ ID NO: 3937 - DNA, 412 bp, Glycine max
  modified_base (329)..(329): a, c, g, t, unknown, or other
ggccgaatgtgtctctccgcagcagccacacttcttcgccgtttcagctgaagagccatccgcaggtaagcaatggttaagcataataatgttatccccaatgggcacttccggaaacactggcaaaactatgtgaagacttggtttaatcaaccagcccgaaagaccagaagacggttggctcggcagaagaaggctgtcaagattttccccaggcctactgctggatctctcaggcctattgttcatggccagactctgaaatacaacatgaaagtcagagccgggagaggattttcactggaagaattgaaggctgcaggaattcncaagaaacttgctccaactattgggatttctgttgatcaccgcagaaagaatcgttctttggagagtctgcaggccaatgtgc

SEQ ID NO: 3938 - DNA, 294 bp, Glycine max
gggggttgggacacgagagagagtgggagtcacagagcaaagtaaagcagccgattggactttgagtccgtttgttccttggttttgttatcttcagatatctttcattctttcgtattatctgtcgtttcaccccacacagatatgttggcatccatttagacctcatcactacattatctctatagcatcagaacataggacacaccttcgtttcgtttcgttcccacggccgtctccatgtccgcctcctccgcgattgcttctttcaactcctaactctccacgtgcttg

SEQ ID NO: 3939 - DNA, 386 bp, Glycine max
gggcactgtggataatgatcgttggtgcaggaaccctagatcgtgagttccctgcctacacatctctcaggtaacagaataaagattctccggtgtttctctctatagtggaaaaggaatggggaacgaagcggttggtttggtttatgacaaatgcttgaaccagtcaggtagcatttgcatgcccggttcgcttgaaccgggtctggttcgtgggaacgtggttgtttgcgaccgtggaatcaacacgcgggtggagaaaggtaaggtggtgcgtgatgccggtggtgttgggatgattctcgcgaacatagcaccgagtggggaagagttagttgcggatagtcaactgctaccggctgtggcagtgggaagaatcgtggggg

SEQ ID NO: 3940 - DNA, 392 bp, Glycine max
gatccacgattccttttccagtaaaacacagacgcattttagtttttttagtttctgcataaaaaacaaacccctgccacactctatctaaccttcttcttttccacgtttctttctacacacttcattttcaaaacaaggatcgtagaaaagcggttgcgttccggttcggttaattaacacaccagaaccaaaccaacctttctccgtcaacatttaattccttccgtcgctagaaaaatgcccaagccacgtctggatcggaaaaattagggcgctagggttttgttcgcttcatccgattctgcttcggattccgatcggaaatgtccgaacctcattcatcgccccgaacctccgcgtatctcgacgcgctctctcaggcgattcac

SEQ ID NO: 3941 - DNA, 312 bp, Glycine max
gaagagtgatccttctacactaactaaagccgagcagcgagagagagaaaccctagcaaaaatgccggctggtcacggtttgagatcccgcaccagagattccttctctcgtcccttcaggaagaagggtaccatcgccctcaccacatacctcagaacctaccacgtcggcgattatgtcgacgtcaaggttaacggcaccgtccacaagggaatgcctcacaagttctaccatggccgcaccggtcgcgtctggaatgtcaccaaacgtgctgttggggtcgaagtcaacaagcaggtcggcaacagaat

SEQ ID NO: 3942 - DNA, 144 bp, Glycine max
ggagagagatgcctccatttataaaacatcgtgtgcgcactctctcttctcctaagtttcgctcccatcaacagcaacgatggtgtagaggctcacttatcgcatgcgccatagctttgctaacaaatgcaaccagcaccgggt

SEQ ID NO: 3943 - DNA, 393 bp, Glycine max
  modified_base (154)..(154): a, c, g, t, unknown, or other
ggaagacgaaaagagagtggagagagagagaagtgagagtgtgagagggagcacagtgaagaagagaacgaaggaacgaggatggagaaccctcctccggcaacaaggcttgtgaaggagcacggaaccagggggccgaaaccccaggcggaanacctaaacaccaaaggctttaacggaaggaagaataccacagcaccaccaacttgttcacaagcaataccagcaacaccaatatcacccttcggtggaagagaaatacacgcagtggaagtcccttgttcctgtcctctacgactggctcgccaaccacaacctcgtctggccctctctctcttgccggtggggccctcagcttgaacaagccacttacaagaatcgtcaaagactcta

SEQ ID NO: 3944 - DNA, 417 bp, Glycine max
gacactacaactaaacacactagctattagctatagctagaagtccctccaatccctctttgtctttgtgcttttctagttccttccaaaataccaacaaaagcaaagacaatgagttgccaagcatggcccgaacccatagttcgagtccaatccttagctgaaagtggcctaagttcaatcccttcacgctacattaggcctcactcccaaagaccctccaataccacttcttttccaactcctaaaccttttcaaactgatcatcatcatggtcatgatcagaaaacttccgatcatgaccatgatcatgatcatgttaacattcgcgtcattgacctgaaacatgttttctcggaggatccgatcctccgagaacaagtgtttgggcagggtggacaggcatgtcgggagtgg

SEQ ID NO: 3945 - DNA, 356 bp, Glycine max
aaataaagtgaacccaatgagggagataaaagtgcagaagctcgtcctcaatatctctgttggcgagagtggagatcgtctcaccagagccgccaacgtgttggaacaacttagtggccaaaccccagtgttttccaaagcaaggtacactgttcgttcctttgggattacaagaaatgagaagattgcatgctatgtcactgtcagaggtgacaaggcaatgcaacttttggagagtggtttgaaggtgaacgaatatgaacttctcagaaggaacttcagtgatactggttgctttggctttggtattcaagaacatatcgatttgggaatcaagtatgatccttcaactggta

SEQ ID NO: 3946 - DNA, 365 bp, Glycine max
gatccatttctcgcaacaacgcttaacctctctcattccccatttcctcacctccttcaaccgctgctaaattctagggttccgaaatggacgctggcggaaagatcaagaagggcgccggaggtagaaagggcggcggcccaaagaagaagccggtttcaaggtccgtcaaagccggtctccaattccccgtcggaagaattggccgttatttgaagaaaggaaggtacgctcagcgtgtcggtaccggtgctcccgtatacttggctgcagttctcgaatacctagctgccgaggtgcttgagttggctgggaatgccgcacgtgacaacaagaagaacaggattattccaagacacgtgctt

SEQ ID NO: 3947 - DNA, 355 bp, Glycine max
gaactacaacacaagagactgtaccttctttttgaagtctctgtgggttggggttttggagtgggagcaccaatggctttcgtgatggcaattgtagtagtaggtgttgtcttggtgctctgtttttgctctgctctcttgaggtggaatgaagtaaggtacaggaagaaaggtttgcctcctggcacaatgggttggccactttttggggagacaactgagtttcttaagcagggtccaaacttcatgaaaacccagagagcaaggtatggcagttttttcaaatcccacatactgggttgtcctaccattgtttccatggatccagagcttaacagatacatcctaatgaatg

SEQ ID NO: 3948 - DNA, 416 bp, Glycine max
  modified_base (357)..(357): a, c, g, t, unknown, or other
gaacatgccgaaaagtagtaccaagatggcttcagttgtgtatctcctctttggcttccatctcattgttatcatgtcaagttccttacccgcaactagtgaagtgtttgcaaaacagtatccatccacagaacccgtggaagaaaaactcacccaactccacttctatttccataacaacataacgggggaacacccaactgctatgaaaactgttttgcctcctaaggggtccattcatggttttggggctacttacatgatggatgaccctctaactgaaggaccaagtccaacttcaaagcttgtgggaagatctcagggaatatacgctttggcttcacaacatgagcctgngttgctcatggtgacaaattttctcttcactttgggcatttacaatggcagcaccctca

SEQ ID NO: 3949 - DNA, 395 bp, Glycine max
ggcagacgccgtgactagacactcatcgcactcgcgccatcttacggtttctccttttgtttcgcaacatggatgccgctaagaaaactaagaagacccatgatagcatcaacaacatgctcgctcttgtcatgaatagtggcaaattcaacctcggttacaagaccgttctcaaatctcttaggaactccaaaggaaaattgattatcattgctaacaactgcccccctttgagaaagtcagagattgaatactatgctatgttggcaaacgttggagttcatcattacaatgggaacaatgtggatttgggcactgcatgtggaaaatattacagagtgtgctgccttagcattattgatcctggtgattctgatatcatcaagacactgcct

SEQ ID NO: 3950 - DNA, 394 bp, Glycine max
gcccgccgagcttagtagaacagaaaaggaggagcaggaggcatcaccgttaccaaacatggtgaaagggcgccaaggagagcgtgttagactttacgtcaggggttcaatacttggatacaagaggtccaagtcaaatcaatacccaaacacctcattaatccagattgagaatgtacacactaaggaagaagttgcgtggtactgtgggaagcgtatggcttacatttacaaagccaaggtaaagaaggacggaagccactatcgctgcatttggggtaaggtcaccaagcctcatggtaacagtggtatagttcgtgctaagttcaagtccaatctgccgcccagatcaatgggagcaacggttagagtcctcatgtatccaagcaatata

SEQ ID NO: 3951 - DNA, 328 bp, Glycine max
cgggaaccaagtttgcttgcgtgtatattcattttaccatcaccgttgaatctcacaaataaaggcgcatcgacatgcatgtctcgaagaggaaagggaggcaacggtctcggacagggacgagccacaggacaccgtatggttctgacggataacattcagggaatcatcactcccgcgattcgccatctggccagacatagtggcatccagcgtatcagtggtcatagctatgacgaaactctcggtattctcaagatcattctacagaacgtcagtctcgacgctgtcatctagacttaagactctcgccgcaagatcgtcactg

SEQ ID NO: 3952 - DNA, 100 bp, Glycine max
gactgatacaggaacagctagcagagaaacaaagttacaagtaaagtaaattaagaagatcattaatggcttcccttgcaaccttagctgctgttcaacc

SEQ ID NO: 3953 - DNA, 165 bp, Glycine max
aagctattttgaagcatggctgagactttttattttaaaaactttaaaagttaaaattttgaaattataaaatataaaaaagtaaaaaaaaaatgggtcaaacagattacttttatgtagccgtgttagtcattcagagtcgtataccttatcaaaatcgtgtcg

SEQ ID NO: 3954 - DNA, 152 bp, Glycine max
acgcgtcagaacacgactcaacggtaacgtcgctacagcagcaaaaaaagggaattctggtaaggctgctatacaatcaccgtcgggatactgatgaggttattaacacagcgtaatttttctttacagtacatcgctaatgacatagttat

SEQ ID NO: 3955 - DNA, 392 bp, Glycine max
ggcgtttttcacttctttttttttttcattttgttttgctaccctaatagacacgaggactatttaaaaacccggaccgtcgtatcgttccaccggcgccgtcaacctccaaggctcgaaccaccatccttccactcaaccgcgcacttgcactcgtcggctcaagctaccaccgcagcacgcctcagccgccgccagttaacaagcatttgctcataaagaatgaaggaagatggtgtttgggcaagtactggttggtcctcctggctctggaaaaacaacttactgcaatggcatgtctcagtttcgcagtcttattggaaggaaggttgctgttatcaatttggatcccgctaatgattcgttaccctaggaatgttctgtgaacatca

SEQ ID NO: 3956 - DNA, 110 bp, Glycine max
aggtgagctgaaagtgttactgaattttctagacatctggaaaaagttagaaaaaaagaaacaagtgatttggataagagtaaaacataagaaaaatcacacaagttgac

SEQ ID NO: 3957 - DNA, 355 bp, Glycine max
gacttcacaactcaaactgcttcattgcataattgcagataagatcaacccttctaccttcagattcgcgggaagatggcatcacttcatgctaatgtgacatcagttgtttacaacagtggcaaccgtgtttctcaatcgaaatttgcaagctcttccttcttgtctgggttcgatgttgttggtcgtgcttcaagtgcttggaagaatgaacttgtcccatcttccatttccttggtgcctagagccaccctaacatttgatcccccaactaccaattcagacataaccaagcaaaagaagcacactcttgaccctgcttctccagattttcttcctcttccttcatttgaac

SEQ ID NO: 3958 - DNA, 166 bp, Glycine max
cgctcttaacgtgagatcgtgtgaagtttaagctaccttaagcaaaaggagaaagacacaccgaaacttagaactctctcttgaatacacccaaagcctgatataccaaactcttgtaatgtaactcttccttactatttatttaatgcaatttcagttctaaaaa

SEQ ID NO: 3959 - DNA, 317 bp, Glycine max
tctcattgtattgattgatatgcaaaagattcaaatcttacattaagcttaagggttgtttgggtaagcttcattagaagtatttctaattgatagagcctattctagagccgatacgtaattaacaactagcaagcattcctaatgagcatactaaccgactaatacaaccatcataactagtcgtatcgatcactatttattgttaaaattaacacacttatcggatgagaatgtacaactatttagaataatttatttagaacaggtcgataagcacagaatgtatcctctatctggtggcagacattaccata

SEQ ID NO: 3960 - DNA, 296 bp, Glycine max
ggatatacattctcttgtcacagttttctgtgtcaccggaactcgtttctttcaaaacacttcaaacatctcgaacgctctctttccggcaactaggttaaagttcatcaatggcaggtcgcggcaaaaccctaggatctagcgccgccaagaaggctacctcaaggagcagcaaagccggcctccaattccccgtcggccgtatcgcccgtttcctcaaggccggaaaatacgctgagcgtgtcggcgccggcgcccctgtctacctcgccgccgtactccaatatctcgcggct

SEQ ID NO: 3961 - DNA, 270 bp, Glycine max
gacattcatacgtgccatgcgtgtcccttccaattgcccacattttcacgctcgcgaatcactcctctctctccaccaatggccgagcagctcacggatgacgagatcgccgagttcaaggcggacatcagcctcatcgaaaatgactgcgatggctgctatattactattgcacctgggactgtgatggggtcaccacggcaaaatccagctgatcgcagagatgcatgatattattaatgacgttgatgctgatggcaatggaagcat

SEQ ID NO: 3962 - DNA, 215 bp, Glycine max
ggtgctctgctcgtgcctctagggttatcatttctccatttccattttctctctcacttttcaagaatcgtaagctatgggaaagtcttacccaactgtgagtgctgattacaagaaggccgttgaaaaggcgaagaagaacctcaaaggcttcatcgctgaaaaaaaatgcgctcctcaaaggctccgtttggaatggaattcggctggaacct

SEQ ID NO: 3963 - DNA, 360 bp, Glycine max
gagaataaggttaaataaattctcgtagcagcgttttgtttcccatcgcccccttttgctctccctctgtgcagacatgttgttcttctcgtacttcaaggatttggtggggagggaagtaatcgtggagctgaagaacgatttggccatcaaaggaacattgcattctgttgatcagtacctcaacatcaagctcgaaaacactagcgtcgtcaatcaagaaaagtaccctcacatgctttctgtaagaaactgcttcatcagaggttcggtagtgagatatgtgcaattgcctccagaaggggtggacattgaattattgcacgatgccacaagaagagaagcccggggcggttagtg

SEQ ID NO: 3964 - DNA, 404 bp, Glycine max
gaatccaacataacagaactactaccatgttgctgtcacaagccaaactgcacatcagcaacaacatctccaatgccattaacatgattatgaagaagaagggtaataacaataacaacaatcattgttcacctgctatactttatcactacccttgccctgatggtgcttttgctgcccttgctgcacacctttactttaaggccacttcatcattctctcctcttttctttcccaacactgtcttcaaccccctcagtgctgaagatcttcctctgaatgaaattggtgatctttatctcttagattttgtggggcccgatggttttgttcaggaaatctccaccaaagttccaagggtgattgttttggaccatcacaaaactgctcttgagaggctaggc

SEQ ID NO: 3965 - DNA, 318 bp, Glycine max
  modified_base (255)..(255): a, c, g, t, unknown, or other
gactcagctttatccataaagcacaatttttttgcttcaacgggccttaccttacctgaagatggcttcggtgtcctttgccgtgggattattaccttgctcttcttcttcttgctatacccgcgtctcttatggttcagttcgatttcccgtattgaacaacgccaactcactgaaactcagctcctcagctaacatctccagtccaattcttcaccaaaagctttgcactgttccttctccccttgctctaanggctcgccctctcaccattgtatccgctaagggctacaaaatgaaaaaccacaaagcatctgc

SEQ ID NO: 3966 - DNA, 348 bp, Glycine max
aggggcagctgcgaaaacctagtggcacgtaagggttgttaaacaagcagagaagaaccatggtgcacgtttccttctaacgaaactatgggaaaacgttcaagaagcctcgtcgtccctacgagaaggaacgtttggacgccgagttgaagctggtccgtgagtacaggcttcgctgcaagagggagttatggagggtccagtacgccctgagccgcatccgtaacaacgccagaaacctattgacccttgatgagaagaaacctcgccgtatcttcgagggtgaagcccttctccgaagaatgttccgttacggactcctcgacgagacacagaacaagctggaat

SEQ ID NO: 3967 - DNA, 321 bp, Glycine max
ggtggcaagaagttcataactctcttggacttgaagcgtccatttaaaccaatgaaggatttggacatggacaaggtcatctcggacatcattgaggaaatatcaaagactagttgatttcagctgttttgcaagagcctttttatggcttgacttacagtgaagctagatatattttgttcacatggtagaaatcctacaatggaaacttgttcaaaatgtgttatagccatgtatgggagttttagtttgaggtgagacatcattttggatatgttccttgtctcggacaagtaccaattttaatttgcattttgagat

SEQ ID NO: 3968 - DNA, 429 bp, Glycine max
gacgcctcagttccattttcaattttaaattcctcccaaaacctaaccccaaacctaaacctccccgttaccaaagaaaaacccccttggccgattaacgtcgtcaagatgttggaactccgtctcgtgcaaggctccctcctgaagaaggttttggaatccgtcaaggagctcgtgaacgacgcgaacttcgactgctcctccaccgggttctccctccaggccatggactccagccacgtcgccctcgtcgctctcctcctccgatccgagggcttcgagcactaccgctgcgaccgcaacatctccatgggcatgaacctcaacaacatggccaagatgcttaagtgtgctggtaatgacgacatcatcaccaatcaagccgacgactgcagcgacactgtcactttcatgtccgaaagccctaca

SEQ ID NO: 3969 - DNA, 347 bp, Glycine max
gatcatcaataggtgttttcatttgggattcaaactcaccatggtggacgccttcaaactttgcatcttccttcttgcgtcgatctgtgctttcctagtcttttctaatccagtggtgtgtagtgataaggaggacagtgtattcaagggaatcaacagctacaggcaaacacggagcctgatacccctgagccaagtttcgaaggcaacatgtttggctgatgaagttgcagaagaaatagagaagatgccctgtgaaaacgtgaaccaatactacccttcatctgttcctggtagtgggaacctcaaaatcccaaacttgcagaagcacataaatgaatgtgaca

SEQ ID NO: 3970 - DNA, 417 bp, Glycine max
gatgccgaaaggtattaccaagatggcttcagttgtgtatctcctctttggcttccatctcattgttatcatgtcaagttccttatccgcagctagtgaagtgtttgcaaaacagtaatcatccacagaacccgtggaagaaaaactcaccgaactccacttctatttccataacagcatatcgggggaacacccaactgctatgaaaactgttttgcctcctaaggggtccattcatggttttggggctacttacatgatggatgaccctctaactgaaggaccaagtccaacttcaaagcttgtgggaagatctcatggaatatacgctttggcttcacaacatgagcctgggttgctcatggtgacaaattttctcctcactttgggcatttacaatggcagcaccctcagcat

SEQ ID NO: 3971 - DNA, 351 bp, Glycine max
tatgtgatgatgttttgtaaaaaaaaaaaaaaacaaaaaaatcaaaaaaaaaaacagaaataaaaaaaaaaaaaaaacaaaaaaaaaaaaaaaaaaaaaaaaaaacaaaaaaaaaaaaactttaaaaaaaaaaaaaaaaaaaaaaaaaaaaaagggggccccccaaggggtccaacctttctttcccggggatgcgacttcaaaacccctccaaaggggcccccaatttcaattcccggggcgtccttttaaaacctcttgacggggaaaacccgggggtttccccatttaaccccctttgaaaaaaacccccttttcccaagggggggttatacccaaggggcccccccc

SEQ ID NO: 3972 - DNA, 391 bp, Glycine max
gatacacaacacacatacaattactattaaactctctataatatttgctgaatccggtataattttctaataatggcgacagacgttcagcacgtcatagtttacagttaacattccacgaacgacaattataaccctccgctggcaccgttgatggagccatatgatctcagtaagtggtccatgtacagaaccgccatatctcactttatagcattactcccttctctttatatcaccgatgttgaccattagtggggataagagacattatgacactaaggtcttgtgtaatacagaatatgacggcgttggaatttagtgcatcatcttggaccttcagtcatatgatcgtcatccttgtttactggactgcctgaatcacgggatg

SEQ ID NO: 3973 - DNA, 64 bp, Glycine max
cactctaggtgcaaaaaaagggctcttaataattattcaaatgggtgttccttaatcatccaca

SEQ ID NO: 3974 - DNA, 159 bp, Glycine max
ggatgcgtctacactaactaaagccgagcagcgagagagagaaatcctagcaaaaatgccggccggccagggttcgagatcgcgcaccaaagattccctctctcgtcgcttcaggaagaatggtaccgaacgcctcatcacaggactcagaagctacca

SEQ ID NO: 3975 - DNA, 383 bp, Glycine max
ctctataatgagtcataatacaacagaagggcgtcaaacaaattgatgataatctttaaaggtacacatatttagaagtcatgataaattctagaccgaattggtttggaatgttgtaggatgccttgaatagactgagcataatcccaaacggtacacaacacttgaaagtcatgagagccccttactggatttgaactatattgaatgtgcaagtggttgacgtggacatatggcttttactcatccccattttcattcgtcattttcttctatttctaggtatgatgctttggcttaacacatttggattttagagggtgtggttgcaacttgagataagatctccatgaatattgatggggttaattggtcataatact

SEQ ID NO: 3976 - DNA, 283 bp, Glycine max
caatactgatacttatttaattcaatgaaacaagcatcaatcacacaataacacaccaatcaaacacaatcaaaatcttagaatcaaatacaatcaatcaatcattaaccacaaatatttcaatcaaccaatcaatccttatttatccaaatcactaatatataacaggcctaattctcttctaatggaaaagaatgtttctttggggataggttttgtgaagatatcagcaagctgattctttgcatcaacaaattctagcacacaatctcccttttaaaca

SEQ ID NO: 3977 - DNA, 402 bp, Glycine max
ggtcctaaatcctcattccagccacacgcttcagaagacatggcctcattgggtgggttacaaaatgtgagcggcatcaattttcttatcaaagagggtccaaaagtcaatgcaaagttcgagctgaagccgccaccatatccactgaatggtttggagccggtgatgagccagcagacacttgagtttcactgggggaagcaccacaagacttatgtggaaaatctgaaaaaacaagttgttgggacagagcttgatgggaagtcactagaatagattattgtcacatcatacaataagggtgacattcttccagctttcaacaatgcagcacacgttatggaacatgacttcttctgggagtgcatgaaaccaggtggaggtggaaagcatccggggagc

SEQ ID NO: 3978 - DNA, 226 bp, Glycine max
aggggaaaacagaacatggactcactctggcacctgaactcacagtggctaaaatcgttctgtggtgaattgtcaagatgttcacatcaatgaagaaaatccacaaagagtcagatgctgatccaacttaatttgacgaatcagtcagacaggcattgtttgatctgtgaaataccaacagtgacctgaaaactgatctgagagatttatacataaactcatctgt

SEQ ID NO: 3979 - DNA, 176 bp, Glycine max
ggcacttcaattgcaatcaaattagttcattcgctttgcgcagttccctacctctcctttcaagatgcagatcttcgtcaagaccctcaccggaaagaccatcacccttgaggtggaaagctctgacaccatcgacaacgtcaaggccgagatccatgacaatgaaggaagtcccc

SEQ ID NO: 3980 - DNA, 400 bp, Glycine max
gattgcatcgtaggagtctcttattttcctttgtaatggaaagttagaaaccctcatcgtcaaagcacgcgtttttttgaatctctctctctcaacaaatatttgtgggtagattcaattcaccatgtcgagctcatcggagtactctgaattttccggccagaaaccggcgaggtcgccggagaaatcgagcttctctcagacttgcagtctgttgagtcaatacatcaaggagaagggtagcttcggagatcttaccctcggaatgacatcatgtgggtcacctgagacatcttgtcaatctgctacaagcatgaacttgtttcctcccaaggaaaacaacgtggcagcaaagaacctgacagctatggatttgctctctccacaagcttcctcctat

SEQ ID NO: 3981 - DNA, 357 bp, Glycine max
  modified_base (347)..(347): a, c, g, t, unknown, or other
gatcgcatttcatagcactcaccctcattaccaacacgaaagcatagccaaaaccttttttcgaagtctctgattttcctaatggctccggcaaaggcagagaagaagccggcggagaagaagccagcggcggagaaggcaccggcggagaagaagccgaaggcggagaagaagatctcgaaggaaggatggagcgagaagaagaagaagcgcacgaagaagagcgtggagacctacaagatctacatcttcaaggtcctcaagcaggttcaccccgacattggtatttccagcaaggccatgggcatcatgaacagcttcatcaacgacatcttcgagaagctcgnccaggaagcg

SEQ ID NO: 3982 - DNA, 362 bp, Glycine max
  modified_base (213)..(213): a, c, g, t, unknown, or other
gacgccaaaaccactgtatcagtgtgtccttccattccaggtttttccaccacactagaaagtaactttaaggttactatgatcgtttttcaacatgattcatcacattttcaagcacacactgcattaagaagcgagaaatcataactcatacatatatatggtcacttataaataattcttatagcaaaacggatggcatggaaagcgtanggaagaatgtgcctgtaattgtctttgtctaagtagagtctgtaattgtctttttgagaaaacaacagctaaagtaattacatagagccatatttcatctataaaatagcctgaaatctcatctgccactagttcttgaagaccacact

SEQ ID NO: 3983 - DNA, 331 bp, Glycine max
ggcctttgaggaaaagaaaggcagatatgcaagaatcatgcttgggaatgattggtgaggtctccggcgatcagcaccgtcagctgatagcggagatagcgactcatccgctgttcgagcatcttctggcagcacacgtggcatgcctccgtgtggcgactcccatccatcagcttccactcattgatgctcaattatctcagtctcaccatcttctacgctcttacgtctcacacaacactctttctctctctcctcatcaccgccaagaacttgacagcttcctggcacaatatttgataattttgtgtacatttaaagaacagcttca

SEQ ID NO: 3984 - DNA, 387 bp, Glycine max
gaacatgccgaaaagtagtaccaagatggcttcagttgtgtatctcctctttggcttccatctcattgttatcatgtcaagttccttacccgcaactagtgaagtgtttgcaaaacagtatccatccacagaacccgtggaagaaaaactcacccaactccacttctatttccataacaacataacgggggaacacccaactgctatgaaaactgttttgcctcctaaggggtccattcatggttttggggctacttacatgatggatgaccctctaactgaaggaccaagtccaacttcaaagcttgtgggaagatctcatggaatatacgctttggcttcacaacatgagcctgagttgctcatggtgacaaattttctcttcac

SEQ ID NO: 3985 - DNA, 213 bp, Glycine max
gaagtctcatctaatctataccccgtctaaatctccgagtggttgacaccgatcgaagtagcagcacacagaaaatgggcactcgagaggtgtacgaagaaaaactaaaggacgggaatccccaacacgattccaacatcaaccctgggctccggtccgctccaagccctcgctgtctcctctcccttcaaccctaatttcaaaaaaggcaat

SEQ ID NO: 3986 - DNA, 126 bp, Glycine max
tatttacatgataatgtcaccatatacacaaatggttttgtaactgatactaagaggaaaagtaaaaaacaaaaagtctggacattataattaaacaccttttttcacaaagttcttttttaactg

SEQ ID NO: 3987 - DNA, 396 bp, Glycine max
  modified_base (365)..(365): a, c, g, t, unknown, or other
gactcaccacttcaaagcactcataacacatagcacaaagcaaagctcatccttgagttatggaatggcagcagcttcttccatggatctcgcatccccatccttggctggcaaggacgtgtagctgggcccagcagccccagaagtgggaaaggtgagcatgaggaagaccgtcaccaagcaggtctcctcatgaagctcatggtacggcccagaccgagtcaagtacttgggctcattctctggcgagcctgcgtcctatctaaccggtgagttcgcacgcgactacagctgggatactgctgggctttccgcagatccagagaccatcgccaagaatcgtgaactctatgtgatcactctangtgggccatgctcggaaccttgggctgcgtc

SEQ ID NO: 3988 - DNA, 222 bp, Glycine max
ggtagcaagtaagtctaaacacgaagctcgcaaattccctcaacactggagtcgctggaatattcattctgggactcatcttaactgactcagcatgattcaaaatggttgcattgtatcccaaaggtgtgcccctctgaattctaagttacacaatcatggcatagctaatacctttgcctttcgttgcccctcacaaatgcctctcaaagtttccctctc

SEQ ID NO: 3989 - DNA, 228 bp, Glycine max
ctagggtgcagcttcgagaacacgacatctggggactcatctcttacacctattctctcttcatcctgttctatctgtgacgagcatcatggcctcaagagcagtgttactgttggccaagtgtatgcatcctgacatgggtgtggacattccctcatcactcatcccttttttccttaaaggtcttgtacagggtgacgcttgacatgctcgtttttggaactcacc

SEQ ID NO: 3990 - DNA, 263 bp, Glycine max
ggagctttagattcttttcccctagattcagccacagttggaaaaaaaaaaaaagttgttcgagatggcacgtacgaagcaaactgctcgtaagtccacaggaggaaaggcacctaggaagcagctcgcaaccaaggctgcacgtaagtctgcaccaactactggtggtgtgaagaagccacatcgttatcgtcctggtaccgttgctcttcgtgagattaggaaataccagaagagtaccgagcttttgatcaggaagctcc

SEQ ID NO: 3991 - DNA, 267 bp, Glycine max
tgggagcaacatggtgaagctggtggagagatttacttgccaaaagcttacgttagacccaggaggcctacttaagtggccaatccattgggaaaacctggtgccaacttcccaactgggttaaccgagtgtggagaagcattatcaagccctatgagtatgagaaccagtactgtttgtgaagaatgtctatgggttaagaaatctgtctttagtcaacttgtgtgttttgttattcagttctcagcaataaactgctctggcaat

SEQ ID NO: 3992 - DNA, 369 bp, Glycine max
ggagagagagagttggaagaagaagaagggaagatgaacttgagatggatggaagcggtgctgccgctgggaatcatagcgggaatgctctgcgtcatgggaaacgctcagtattacattcacaaatccgcgcatggcagaccgaagcacatcgggaacgatatgtgggacgtggccatggaacgaatggacaagaagcttgtcgagcaagcctcgccctccaattaacatcgttgttttgccaatgacattgttaagaaaataaactgctcacctggatttacgactgtgttctagggaagcacggttaatcacaggaatcaaattccgtctgttttcttgtatgcaattcaacattagattttataa

SEQ ID NO: 3993 - DNA, 417 bp, Glycine max
gatacctaaaaattgtaccgatatggcttcacttgtgtgtctccttttttccttgcatttcatggttatcatgtcaggttccttaccagcaaatagtgaagtgtttacaaaagagtctcctatgtctctatccacaaaacccgtggaaagactcacccaactccacttttatttccataacaacaaaatgggggaacacccgactgctatgaaaattgttgagcctcctaaggcgtccatttctggttttgggactatttacatgatggatgaccctctaaccgaaggaccaagtccaacttcaaagcttgttggaagatgtcagggaatatatgctgaggcttcgcaacatgaacctgcgatactcatggtaacgaatttgttcttcactgagggcatttacaatggcagcaccct

SEQ ID NO: 3994 - DNA, 385 bp, Glycine max
  modified_base (42)..(42): a, c, g, t, unknown, or other
gggttagagaaacaagacataatccttttcttcttccattcncttctcctttcaatctctagaattaacaccatgtcactgacacttttcctgaagacccttttcctcttcttcccttgctacctgtgcctccttgactcagcaacaacaacaacaacccttaagcccattttgctaaccccatccaagcctgcaacgacaatccctgcattcccagaacaatctgatgtctcagggtgccctctcaccctctcagatgagctctttgatgggattaagagtgcatgtagtggtgccaaaagtggtgctgacatggagctccaccacagcacgtgctggtcagtgcttgcagcatggttgtaatctgcatattctgccactgcac

SEQ ID NO: 3995 - DNA, 301 bp, Glycine max
tgtaagtaaattcccctaacgttcataacctaatttgactagtcgttactaaataaaattgtttgtaaattaggttgttttctatcatactcgaaccgagttgttttgaatttgtagagtggttggaaaatgataaaaataaaaaaggaagggaaaaaaaatcacagtttggatttttcaacttacatttttaatcaatattaacacattaacatttatcaataaaaaaattctccatatcctaattttttcaagtgggttttttttaatgataacccaacttatcattgacgcatttttg

SEQ ID NO: 3996 - DNA, 280 bp, Glycine max
tgacagtagagtaccctgacattctagctcgatatgtccaacaccatcctgtctgacgatgagtagcatttcgattcgattgccagaatccggcgcctcgaattgttatgctcatctagcctgtatgagtcgctagaacggttacatcggcatggaaggacgctcatgctttgttgttgtacatctctactttttaatctggaattcacggtcacgcctttgtgccattttgttggtctctcgaaaccttcactttttcagaatgcgtatgtatttagtg

SEQ ID NO: 3997 - DNA, 254 bp, Glycine max
gtcatagatgatatcagaactattcaagctaccgaggaatggacaagattgatacattagctatgaatatgtttgctaactatcaagttaggagaaactttgcttagggatagttcttttttaaatgtaatttgctattgctgacaaactttgtgtgctttgttactattgtacttttctattgaagatggacttttatgtactttgctattgcataaaaactttgcttgaaataaaacacaaactggcataat

SEQ ID NO: 3998 - DNA, 318 bp, Glycine max
gtggggaaggttaaggacccgtatggcttcgtttggctcttctgcactccagggaagaagtgtgctgacgtggaggcttaatggcctttgatgttgttctgagtctaattgtttggattatcagttttagttgtagaattgattagggaaaggtcgtacgtgtctagttaagacatttctcttcttcagtctttcagtcttttatatctaagtgggattagtattaatctaatggttacgcgtgtatttctattttgaatattttgaagtgcttctcgtttgtcattagactcattgtgaatgacattagttgttggc

SEQ ID NO: 3999 - DNA, 390 bp, Glycine max
gtgaaaggcattcaatttttgcacacagggatagtgcctggactatattcaaataatctgaagataacagatattcttttggataacaatcacaatgttaaaataagcagttataatctaccactctctgctgaaaataaaagaatgatcagcaagggaacctcccctggattaaaaggaaaagtccaagcaaggatccaggatgcagacaagaatgatgtctatgatattggagtagtcttgctagaaaccattctgggaagaccaataatgttccacaatgaagttggaacactaaaagatcttttacaggtaagcatcaaaaccgatgacatagctagaaggagcattgttgacccagcagttcataaggaatgttcagatgagtca

SEQ ID NO: 4000 - DNA, 300 bp, Glycine max
gatcacatttaaaatcaaaacaacaaattttcagactcaacaagcttcgaaccaaatcttattgagaaaatgtctggtcgtggaaagggtggaaagggtttgggaaagggaagtgccaagaggcacaggaaggttcttcgtgacaacatccagggcatcacgaaacctgcgattcgtaggttagcgagaagaggtggcgtgaagaggatcagtggtttgatctacgaggaaaccagaggagttctgaagatattcttggagaacgtgattcgcgatgctgtgacctacactgagcacgct

SEQ ID NO: 4001 - DNA, 418 bp, Glycine max
tcttactcatcacatgaacccctaaatcctaattgctttgttttcccccaattcccaatggcgaacgactcgtcgtttttgttcgccggcattcgtttcgatagaaagaagttcggcgccgatattgccaggttccagaaaaaagacagtgatactgattcggcgatgattttgagcgccgccgaagacgaaggcgagaaaacaatagaacctctggaagaagagaaagtcgcggcgtcaacgacgaagaagaggaagcgcaagggaacctcttccgaaacggtcgaaggattcaatgtgttcagaagttcgacgtctgtggcgcagtcgaatgatgaagtccgagtcattgaggagtccgttgagctgtataataataataagaaggaacaaaataagcaactcgagcgggacgcaa

SEQ ID NO: 4002 - DNA, 312 bp, Glycine max
gaagttaatttgcgtctagagtcaatttggaatctaggatgaatctcaacggacagagaagagccataaccatgtctggaatatgaaagggacgcaggggtctcggatcgggaggagcgaagcgagaccgtacggttctgagggataacagtcaaggtacaacgaagcccgcaattcgccgtctcgcgagacgtgacagcttgaagcgtatcactggtcacagctaccatcaaacacgaagtgttctcaatatcttccatgataatgtcattcgctgagctgtcagctagactgaacacgctcgacgctcga

SEQ ID NO: 4003 - DNA, 408 bp, Glycine max
  modified_base (361)..(361): a, c, g, t, unknown, or other
gagcctcagcagaagcagaacgaggagaagcagaaggagcaaaagcaatggcgccgaagaagccgagaaccacgacaaggaaccctgatttggttagggggattggcaagtattcgaggtcgcagatgtaccacaagaggggcatctgggccatcaaggccaaaaacggtggcgttttgccccgccacgatcccaagcccaagcccgaggccccggcccagaagccgcccaagttctaccccgcggacgatgttaagaagcccctcgtcaacaagcacaagcccaaacccgcgaaactcagggctagcattactccagggactgtgttgatcctgcttgctgggaagttcaagggaaaganggttgttttcctgaagcagctcccatctggattgcttcttgtaactg

SEQ ID NO: 4004 - DNA, 351 bp, Glycine max
ggtttcagagtggtggggtgtgcagaagagcgtcgcagttgtaaccctaatcagaagaagcgcagcttcaagcgagtgacagccaccagccatgggtcgtatgcacagccgcggtaagggtatatcctcttctgctttgccctacaaaaggacacctcctagctggctcaagatctcttcgcaagatgtcgaagaaaatatctgcaagtttgcgaagaaaggtttgaccccgtctcagattggtgtcattctcagagattctcacggtattgctcaggtcaatagcgtcactggcagcaaaatccttcgcatcctcgaagctcacggacttgcgcctgaaattccagagga

SEQ ID NO: 4005 - DNA, 292 bp, Glycine max
  modified_base (57)..(57): a, c, g, t, unknown, or other
ggatccgtgctctgtgattccagaccttaatttttctctcattcgcttcaaatttcnggaaatcaattatggctcaaccctcaacaagaataggccttgctggactggctgttatgggccaaaatctagcactcaatattgctgagaaaggctttcccatttctgtttataaccgaaccacttccaaggttgatgagactgtagaacgagcaaaacaagaaggaaatcttccagtttatggctaccatgaccccgaagcttttgttcattccattcaaaaacctaaggtgat

SEQ ID NO: 4006 - DNA, 289 bp, Glycine max
gattcattcataaatcttagttactttatcagtatcattcattatcactacgattgttctaaaagcaattattactcttgagaagaattaaaagatcatcatcacaataacaagatgagttcaggaattagagcatggagtgtggcagctagtgttggagttgtggaggccttgaaagaccaaggcatatgcaggtggaatcatgctttaagatcagctcaacaccatctcaaaaaccatgttggctcattctctcaggctaacaagctttcttcttctgctatgatct

SEQ ID NO: 4007 - DNA, 360 bp, Glycine max
gatatcagaagcgcagacctaggatttcggccgtttgctccccacggaaagaagcagagtgtttcttttgaaatcagctagaaaagatgtcaggtgaagaggtagctgttgcagctgatgcacctgctgcttcaattccaggtgagccaatggacatcatgactgctcgacagcttgtgctgagaaaatctctggcctatggtggtcttgcacgaggtcatcatgaacgtgctaaggtgatcgagaagcatgctgcagagctctgcgttccatcagcagattgtgaccaaactgattatggtgaactggttgaagctcattgtgcagagtcacaatgttagtcttatgacagttccaagt

SEQ ID NO: 4008 - DNA, 358 bp, Glycine max
gagcgaaacagagagtgatttcagtgagtgatcggtgttcacttgatctcatcataatcgtcagcgtcaattgaagaagatgccgatcagaaacatcgccgtcggaaggcctgaagaggcgactcaccccgacacgttgaaggcggctttggctgagttcatctcaaccttcatcttcgtgttcgccggctcaggctccggcatcgcctacaacaagctcaccgacaacggcgctgccacccctgccggcctcatctccgcctccatcgcccatgcattcgccctcttcgtcgccgtctccgtcggcgccaacatctccggcggccacgtcaaccccgccgtcaccttcggcgccttc

SEQ ID NO: 4009 - DNA, 372 bp, Glycine max
  modified_base (273)..(273): a, c, g, t, unknown, or other
agtcgagaatgatgggagattctagttacaagaacacccttgattgttttatcaaaacattgaagaatgatggacccttagccttttataaagggttcctcccaaattttggacggctgggatcttggaatgtgatcatgtttctaaccttagaacagactaaaaagttcgtcaaaagtttagagtcgtcctgaggcgagttcccgttgagaattttctaaggggactggttgcaactgcaaatgtagtggaaattgtagaaaataaaggtcnctttctcttcattctgctaaccaggatgtggtcaaacatttttttacggaagaaaaatttgatagtaaaatgagaatgctattcatatatactagcttt

SEQ ID NO: 4010 - DNA, 417 bp, Glycine max
ggttttcattgggtgctgatcggaacaaacagggaatagaagagaggagaagatgggtttcataatggaatttgcggagaacttggtattaaagttgatggaagatccgaaggaaagggatcggaggttcagggagcacgtttatagagtgaaggacaggtgcgagaagacgaaggagatgtggagctaccctatgcgaccctatgggttttggacattcgaacgccacaattctcagcttgcttgggatgcacagattagccaagtggccgggaggagggacccttatgatgatctcctccaacatttctctaccccacctaagtgagtgttgctgaacttgccacaagcattatcggtgaaaaggatgaatttgtcgtaatttccccttgtaatatcctgtcctgttgcatgttg

SEQ ID NO: 4011 - DNA, 401 bp, Glycine max
gatgtggttgcgcctctgcctgtaagagtgaaaaaaccttctcttttccttctctcaagtctcaagagatttcatcatggctccaaagaaggacaaggctccaccaccttcctccaagcccgccaaatctggcggtggcaagcagaagaagaagaagtggagcaagggaaagcaaaaggagaaggtgaataacatggtgctgtttgatcagggcacctatgataagctcctttctgaagctcccaaattcaagctcatcactccttccattctttctgatcgtttgaggattaatggatcacttgcaaggaaggctataagagaattgatggctaggggttcaatcaggatggtgtctgcccatgcaagccagcaaatttacaccaaggcaacaaacacct

SEQ ID NO: 4012 - DNA, 341 bp, Glycine max
gacacaattaatcttgtgcataacaatttcacaagtgctattttcagtacattttcttagttgtgataatatgagagtgagcgcagagtttgagcgtgttctcaagtatttcgatgaagatggggatggtaagatttccccatctgagcttaggaaccggctatgcatgatgggtggtgagttattgttcaaagacgctgaaaagttgattgaggaattggattctgacggtgatgggtttttgagtttggaagattttgtgaagataatggacgcagcaggggaagatgagaagttgaaggatttggccgaagcttttgagatgttcatgacactgaaat

SEQ ID NO: 4013 - DNA, 415 bp, Glycine max
gacacaccgtttgttctattcttaactcaacttctgctacccactctcttcttccaagtccaaccacgcttttctctacagtcatgggcaaggtcaagatcggaatcaacggatttggaagaattggccgtttggttgccagagtcgctctgcaaagagacgatgtggagctcgttgccgttaacgaccctttcattaccaccgattacatgacatacatgtttaaatacgacagtgttcacggacactggaagcatcacgatgtcaccgttaaggacgagaagacccttctcttcggtgacaagccagtcactgtttttggacacaggaaccctgaagagatccatgggggtcaactggagctgatatcattgttgagtcaccggagtttcaccgataaggacaaggccgccgc

SEQ ID NO: 4014 - DNA, 354 bp, Glycine max
ggaagagtgaagagaatggctcccaagggtttaacctttctggctgtgttaatatgcgtttcagcactgtcactgagtccttctgttgcgggggaagggcaaaataatggccttgttatgaacttctacaaggaatcatgccctcaggctgaagacatcatcacagaacaagtcaagcttctctacaagcgccacaagaacactgctttctcctggctcaggaacatcttccatgactgtgctgttcagagttgtgatgcttcactgttgctggactccacaagaaggagcttgtctgagaaggaaacagatagaggctttgggttgagaaatttcaagtacattgagacaatc

SEQ ID NO: 4015 - DNA, 288 bp, Glycine max
ggtcttgcaggcgaagagatggccaccgttccagggcagctcgtgtgggagatcgtcaagaaaaacaattccttcatggtcaagcagtttggaacgggcacccagagcgtcgaattcagcagagagagcaacaatctctacaacctcaattcgttcaagtactctggtttggtaaacaagaaaactgttactgttcagcctgagggcaaagatcaggctgtgttgttggctacaaccaagacaaagaagcagaacaagcccgctgcattgctccacacatctgtgatg

SEQ ID NO: 4016 - DNA, 367 bp, Glycine max
gatacaaacatccatcatcattattattttactccgaacgagttgacaccgattccactcactcaaccatgagccgattcaggcgttttgagctcatagaacaaccacctttcttccactcctgctactctttcccttccttcgtcctccaagactcactctctctcgacctcgacctcttgccacttcccagccacttcgacgctttcgcagatctggtgcacgcgccgtcgttcgcttaccggcgcgtggagaggcatctcgagaatgagttgcgtttgcagagcctctctgaccgtgtggcggagctggagtcgcggttcgaccgtgtgctcggcggagatcggaagtacacgtggacagcgga

SEQ ID NO: 4017 - DNA, 342 bp, Glycine max
ataatatcacaagagcatgtaaggtgatctctatcagaaaatgatttagcaataaaaaaatatcacatgggccaatgggacagcaggtatatcttacagcataattctaacttgtaggacaatgagttacactttcaacatttcatctaacacttatgtgttcaggtggatggcataagggtcaagagatggcaatgttggtggctggctgtagtttggtccatttggcagatgcaaaacagagttatcttctccaatgcacttttcaatggcaacaagttgctcgaggatgctatagtcttaatgtggacttggctaagaaacatggagaaagattttaca

SEQ ID NO: 4018 - DNA, 319 bp, Glycine max
ttccgggtgcgccccacgcgtccgggcagccataagacgagagacggggacttcctcgattgaagtcttcctcaaaaccatctttcgtgatctccaccctctctctaattttcacacgcagcggcttcatcgtccgttttcatgactcggtgtgcatactggcgacgtctgctgtgatggaccccaccttgccagggttggaggagtcccaggaattgattgatcagatggagatcatcctgtcctcgagacaggtctgttagctcgagactgtttgtgcggacatggttcgtggtgcaaacgacatgcgcctcacggt

SEQ ID NO: 4019 - DNA, 364 bp, Glycine max
gacaacttctctctctattcccacttctcttctgtgttccttagaagaattaagatggctaccttgactgtacccccagttcctccttcccccagagatgatgccatgcagctctaccgtgcttttaagggatttggatgtgatactagtgctgttatcaatattcttgctcatcgagatgctacacagcgtgcctacatccaacaagaatacagatcaatgtattctgaggaactttccaaacgcttagcttcagagcttagtggaaagttagagactgcagttctgctctggttgcatgaccctgcgggacgtgatgcaacaatcattaggaagtctctaacagccgacaacagaagcattg

SEQ ID NO: 4020 - DNA, 325 bp, Glycine max
gacaatacaacttcagtttcaacaacaatctctcttttttccattctcatgcctcttgtcttcttgtaacacacccttttctcttttctctctaactcccctccaagaaattctgagagaatagaatagaaaagagggtgagtggttttttgagttttgatagaatagctgcatggggaagctggttgagattcttgaccaatgggtcaggattgctgcaaggtttcactctaattgcccccaaacaggccgtaagtactaccactctctatccctctccgagaagtacggccaccactaccatggtggtgccaatcaattcagc

SEQ ID NO: 4021 - DNA, 342 bp, Glycine max
  modified_base (328)..(328): a, c, g, t, unknown, or other
gagggtttttgtcgtcgctactaagagttgctgcttcttcagccactccgcacctcgcagcctctgtgccctcaacaaccatggctgaaatcgaaactaccgttccagatcccacccaaatcgacgtcaaactcttcaatcgctggagcttcgaggatgttgaggttaatgatatgtctctggctgattacattggagtgtccccatcaaagcatgctacatatgttcctcacactgctggtaggtactcagtgaagaggttcaggaaagcgcagtgccccattgttgagaggctcgacaactctctgatgatgcacgggaggaacantggaaagaagctca

SEQ ID NO: 4022 - DNA, 379 bp, Glycine max
  modified_base (60)..(60): a, c, g, t, unknown, or other
  modified_base (65)..(65): a, c, g, t, unknown, or other
  modified_base (70)..(70): a, c, g, t, unknown, or other
  modified_base (256)..(256): a, c, g, t, unknown, or other
gggtcaaaactcaaaagctcacaaagcaagaacactgttccaatacggaatctaaggcanagcanaccanacatcttgaatcatgggttcaacacgtgagactcagattaccccaacccacgtatctgatgaagaagcaaaccttttcgccatgcaactagccagtgcttctgtccttccaatgatcctcaaatcagcacttgagcttgatctgttggaaatcatagccaaggctggccctggtgttcatctttcncccactgacatttcttctcagctcccaacacagaaccctgatgcacccgtgatgttggagcgtatattgcgcctattggcttgctacaatatcctctcttttttctctccgcaactctccctg

SEQ ID NO: 4023 - DNA, 295 bp, Glycine max
ggagttgaaggggttagggtttaggaagggatggaagcggcagtggtggacgtcggctctaagctcctcaaagcgggctttgcaattcctgaccagactcctgccatggcccgcacttggagaggttttatctccttcaatgcataattctaagtttctaacccacttagctattctcaaataattcccactcagatgaagcaattactcgatgatggatccgtcgcagataattcactggctgacaatgtcaccgttgattccgttgtgcgaggatttattagagattgggatg

SEQ ID NO: 4024 - DNA, 57 bp, Glycine max; identical to SEQ ID NO: 2337

SEQ ID NO: 4025 - DNA, 329 bp, Glycine max
ggaggtgagggttggttcatttgatctgcgactgagagaagagaagagaattgtgatggggggaggacagggtcacggcacaacctacaaaggtgttaccattcatcagccaaagcgctggcacactatcaccggcaagggtttgtgcgcggtcatgtggttttgggtattctacagggcaaagcaagatggtcctgttgtattgggctggagacatccttgggagggtcaccatgatgatcatggcaagggccattagcattccttaggcatgagctccaagaacaggaagaacagaatttgaagtgtcggttgctgtggatgtgttg

SEQ ID NO: 4026 - DNA, 336 bp, Glycine max
aaagagacccggaaagggtgggaaccgcttttggaaatccattgggcttggatttaagactcccagggaagccatcgaaggaacctacattgacaagaagtgccccttcactggcaatgtttccatccgtggccgtatcttggctggaacatgtcacagtgctaagatgaacaggactattattgttaggaggaattatctccattttatcaagaagtaccagaggtacgagaaaaggcactccaacattcctgctcatatatcacctgctttccgtgtgaaggaaggagatcacgttattattggtcaatgcaggccactttctaagactgtgag

SEQ ID NO: 4027 - DNA, 410 bp, Glycine max
ggttcaaagcacgccgtgtttcgctgtcactcccatcctttcgcattctcaatacccttttgatttgtgaaaggaaagcaaacatggttgatcaggtccaacaccctacaatcatggacaaagttgctggtcagctccatctccgttctggtctttcatctggtattagaagttatgatggagcctaccgccagccagctatgtaccaaagaccctcttttgggaattactcgaatgctgcaattgaattttcctgtgatgcccacatgcaaagctaccatggatgtgtctgcaactgcaacatctgcctcacccgtctttgatgctgctccatcagaaaaacgccattttcatttagactttctcatgggacgtgtttcaacaactgtctccagaactgctgctgctcc

SEQ ID NO: 4028 - DNA, 283 bp, Glycine max
acgaatcgaaaatgccgtcgcacaagacattcagaatcaagaagaagttggcgaagaagatgaggcagaacaggcccattccctactggatccgcatgaggaccgataacaccatcaggtacaacgcgaagcgccgtcactggcgtcgcaccaagcttggattctgaggtgtatgctctgcctaggttcaatttatccaattaattagtgttttattttcttgaggcaaaaacaatgttttgagtttttaatattttccatttgttcgaagactatattgtgt

SEQ ID NO: 4029 - DNA, 389 bp, Glycine max
gagggagaattaggtttttagggtttacaccgagcagccacacctcgcgcagcagccatggttctcaaagctgaactatgccgattcagtggtgccaagatctacccaggaaagggcatcagatttgttcgtggtgattctcaggttttcctgtttgcaaactcaaaatgtaagaggtatttccacaatcgcctgaagccttcaaagctcacctggactgcaatgtacagaaagcaacacacataggacattgctcaagaagctgtgaggaagaggagacgtgctgccacaaagccttactctgggtccattgttggtgcgaccttggaagtaatccagaaaatgagagctgagaaaccagaagttcgaaatgcaactaagggaagctg

SEQ ID NO: 4030 - DNA, 191 bp, Glycine max
tgggttgcaacgtgtactcaaacatgtcctagctaactcattaagaaaacacctttcctgaactttttccattgccattctacgagaacgttaaagttgatgtcgttgggtggaagcctccatagcattgtctagtaatacgtctgaaatacgtgccattaatgtaaaaatatacctgtgcagaaaccaaa

SEQ ID NO: 4031 - DNA, 393 bp, Glycine max
gggaggtcagaacagttgttgattcccaaattttggaatcctacatgagtgtgacaattgaagccatggcaaaagcctttggagtgagagtacagttcattgatgtggagctatcatgtaatagtgcaccagggacgctacagtggtcgattgataaagttgcaagtgttcttgaaactaaccgacctgatgcgaacaaggctcgttaccacgcaactatcaagcaaggggacttcctgctgaagcggatccagaaactgtcacctgtgataaatcgtcaggtcacctctcgcatgttagagtaaaagttactggagaggcatagatagtgacaacatcaaagttgatcgacatccttatgaagacattactgtaatccatatgaggtccaga

SEQ ID NO: 4032 - DNA, 124 bp, Glycine max
gattcacacaactaactaagaaagtctttcatagccccccaaaaatgaagagcaccatcttctttgctctctttctcttttgtgccttcaccagctcatacctaccttcagccatccccgattt

SEQ ID NO: 4033 - DNA, 294 bp, Glycine max
gacagacacatgcgcctatctgcgatagctacctaaattattcactccctccctaacaagccacaccgtttcgtgctccaatggcagctttggatctcactataagcatgttggcactcataattgttgttgtttcacttggcgtgtgcggtggtgttcaaggtgcgccacaagttccatgctacttcacttttggtgattctttggttgacaatgggaacaacaaccagctccaatctttggctaaggctgattacttgccttaagggattgacattcctggtggaccttctg

SEQ ID NO: 4034 - DNA, 55 bp, Glycine max
tggatttagttggaggggttcatagatttagggaatcgattactatactagtaat

SEQ ID NO: 4035 - DNA, 173 bp, Glycine max
tctctttgagaactgatgatgcattctaggatttatgtttgcttattagtagatggcatcaaggaaaaattaagtattgtttgctgagaattttacaatttgtatttttgttaaatgtttaacctttattctagtttggagttttggtcattaaggttttgatttaagttcgc

SEQ ID NO: 4036 - DNA, 345 bp, Glycine max
gattctgaagttgaacggcggagaagaagatgttgtgcgcttgttcttccggggagcagttcaaattcgaagagccgccacactcgccggagtccctcgccaccagggatttctccgccagcggactctcttccaggaccggagaatgggaacctaaattcgatgatacgcaagttgaagaagctgaatctactcttaaagatgctctttccttaaactacgaggaggctacggctttgttggggaggcttgaataccagagagggaactttgatgctgcacttcaagtgtttcaaggtatggatatcacgggtttgaccccaagaatgatcaaggctattgctg

SEQ ID NO: 4037 - DNA, 340 bp, Glycine max
gcttcttcatcatagtcgtggccgtgtcgcagcaaaaccaaaccacatattaacttgtttgctctaagtcatggctctgatcttgcacgcaaccaaagcaaacaagaatgctttcaagactctgattgcggcagagtacagtggcgtccaagtggaattggcccctaatttcgagatgggtgtctctaatagaactcctgaattccttaaaatgaatcccatatgaaaggttcctgtcttggaaacgcccgatggtccagtctttgagagcaatgccattgctcgttacgttgctcgagtcaagggtgacaacgctttgttctcatcttcggccattgat

SEQ ID NO: 4038 - DNA, 273 bp, Glycine max
cccacgcgtccgcccacgcgtccggaaccacttggagtaacataactcctaacactggaaactttgctgtttctgaatcttcaattcacttttcagtcagtaccatgtctcctttgcaattaagagataccaagacaaatgattctgtatctgatgatgcttttccaaactgtattgggaatgatatagctagttcaggatcagcatcatctgataattataagatgaattcttccaaggggaagaatttcgcgttcaacaagagcagtgttt

SEQ ID NO: 4039 - DNA, 353 bp, Glycine max
gagggacatggtggttctggtggagagatttacttgccaaaagcttacgttagaaccatgaggaccacttcttggatcagctcagttagtagaacctgtatctagcttcccaacgggcttatctgagtgtgtagaaacactcacgtgccccaggagtcggagaacgagtattgtatgtgatcaatgtctatggtttacgatctctgtccttagtcacttgtgtgttttgttactcagttctcaggactttactgctcaggctctcaagtttcagatacatgctgccaaaaagccttactctgtgtccattgtttgtgcgatctttggaagtaatccagaactggagagctgag

SEQ ID NO: 4040 - DNA, 401 bp, Glycine max
  modified_base (218)..(218): a, c, g, t, unknown, or other
  modified_base (307)..(307): a, c, g, t, unknown, or other
ggccattgttgctgtcatcatccgcagctgctgttattcgcaccgcaaacaaacagtgagccatggccgtcggaaagaacaagcgcatctccaaagggaaaaagggtggcaagaagaaggcagctgatccctttgccaagaaggattggtatgacattaaggccccttctctttttcaagtgaaaaatgttggcaaaaccctcgtctctcgtacgcanggtaccaagattgcttctgaaggacttaaacatagagtgtttgaggtctccttggctgatcttcaaggggatgaggatcatgcattcangaagattacgttgagagctgaagatgtgcaagggaagaatgtcctgacaaatttctggggaatggattcacaactgacaagctgaggtcattgg

SEQ ID NO: 4041 - DNA, 353 bp, Glycine max
  modified_base (265)..(265): a, c, g, t, unknown, or other
  modified_base (292)..(292): a, c, g, t, unknown, or other
  modified_base (294)..(294): a, c, g, t, unknown, or other
agtctcagtgtcatacaaaattggagggaaatttgaatttctattcaaatttcacttcaatttgaatttgaatttgtagagccaaatttagagccaaaatttcactaattatgattagtgaatttcagctatggttcagcccactaatccaagatcaaattcaagattctccactaagtgtactttggtgtcatgaggcatgtaaagcatgaagggtatacacaaagtgtgactatatgatgtggcaatggaatgtagcaagcanatgctcacctcccccttaagttggtcnanaatttaaattggatacgcttctccaaatcaaataaattctctcccacacacacatcaat

SEQ ID NO: 4042 - DNA, 364 bp, Glycine max
gattcttcttcccttcgtctgaaaaccctaaaacattgaatcttagatggacttgacatggttgagtgccatcctggtgggggctggttaccttgctttgggttacttcattggttctcagtatccccctcgtttcctcttctcacataaattatcgactaaacataaagaagatgcttcacttctcaatgacaacgacaataagaagaggaatactaagtccaaactcaaagaccccctggagattgaacaactcgctgaaatcctcgatgattttaagatgatactcgttgtcaggaatgatcttaaaaggggtaaagggaagattgctgctcaatgcagtcatgcaacgttaggtctctat

SEQ ID NO: 4043 - DNA, 51 bp, Glycine max
taatgggaacttcgtccctccctttgtcattcactctctgagtgacatcgg

SEQ ID NO: 4044 - DNA, 124 bp, Glycine max
gatacagtttcaggttgagtttgtttcgttagattagacacttttggtttgttatggaccaccaccttcttttggttgaagggcacttcaacactgattttaattatgccttgcatttggtgct

SEQ ID NO: 4045 - DNA, 230 bp, Glycine max
caaaacgtgtacgcgagactgaaaactttggggatatttgtttgatgtttgagcataaaattttcgaccatttattatatgaagttgtcaatgaagttttagaactttattattgagaattttgtcatcttgatgtgtaaagtatcaatatatagatgtaggatattacgtgatgattttgcaaatgaactcttctgtttgctacatgatacataaaactaacttcaagc

SEQ ID NO: 4046 - DNA, 63 bp, Glycine max
gccggtttcccgaacgatttgatggtttggaatgcatttcccaagcaacgagtcttcggttcg

SEQ ID NO: 4047 - DNA, 294 bp, Glycine max
ggagtggcagataagttcgacgaagatagccagacacttaggctatgattgtccacaacatgtggatagcaggaaaaacgagtgtagcagatctcaacgatccttccctttgcatcgatcactcccatcactcatcttcttcatcgtcacttgtacactcttcaaccactcatcatagtggttggtttttggtgcgaaagccatggcatctacatcctctctgcatctatctcacgcccttctggcacgtgctgtgtaccttcatggcacgtcgtctgaacgtgtctcactctc

SEQ ID NO: 4048 - DNA, 417 bp, Glycine max
ggcacttagccagttcggtccctcacttaagccactgtgtggaactaacaacaacacaaggccatcatcatggcagctgcttctcctatggcaagccaactcaagtccaccttcactaaaactcttgtagctcccaagggcctctctgcctcttcaccactccacctcctgccttctaagaggcaatttagcttcactgttagggccatccaatcagaaaagccaacctatcaagtgattcaaccaatcaacggtgatcccttcattggaagccttgaaaccccagttacatccagccccttgattgcatggtacttatcgaacctccccgcatacaggaccgcagtgagcccactactaagagggatcgaggtgggcctggcccatggctaccttctggtgggcccattcgtgaag

SEQ ID NO: 4049 - DNA, 236 bp, Glycine max
gaccgaaagcgaaatcggaagcgtgatcgttcgtttaaacgtacgttgacactgatggagagactaacttctaggacatcttctcgcaaatccgcgccacgcgcagcgacatgcacatcgacgtcaacgcaatcgccatcacctgccccaacacatacgacgagagctaagcagatagctccgcaactggagcctgaggacgagggagaggctcaagggcggaataagtcgggaac

SEQ ID NO: 4050 - DNA, 348 bp, Glycine max
ggtgtctcactcacatcacacacactctcatagctgtagcggcgacactaagatcggagaaagaatggcgaaaacgacgtcgttgctgctctttacactgctcctcttcggaaccctagctctcatccaggcgaagaaatcgaaggaggatttgaaggaggtgacccacaaggtttactttgatgttgagattaatggaaaagaagcaggtcgtattgtaatgggtctttatgggaaggctgttccaaaaactgcagaaaacttccgagcactttgcacatgggaaaagggaactggtaagagtggaaagcctctccattacaaaggtagctcattccatagaattat

SEQ ID NO: 4051 - DNA, 366 bp, Glycine max
  modified_base (281)..(281): a, c, g, t, unknown, or other
gtcatcaaggatttcatgattcaaggaggagactttgacaaaggaaatggaactggaggcaaaagtatatatggtcgtactttcaaagatgagaattttaatttgtctcacactgggccgggtgttgttagcatggcaaatgcaggacccaacacaaatgggagtcagtttttcatatgcactgtcaagacaccttggctggatcagagacatgtagtatttgggcaagttttggaaggcatggatattgttaggttgatcgaatcacaggagacagatangggtgaccgtcctacaaagaaggtgagcatcagtgactgtggtgagcttccaaatgcttgaggtggttcctgtgtaattttgttg

SEQ ID NO: 4052 - DNA, 422 bp, Glycine max
  modified_base (14)..(14): a, c, g, t, unknown, or other
  modified_base (42)..(42): a, c, g, t, unknown, or other
  modified_base (380)..(380): a, c, g, t, unknown, or other
  modified_base (383)..(383): a, c, g, t, unknown, or other
aggggcagtttcanattttcttttccttcactttcccgaganaaaaataacacttttcactttcttcactacgttctcacttcgatatggctcgtacgaagcaaaccgctcgcaagtccaccggtggcaaggggccacgtaagcagctcgccaccaaggccgctcggaagtccgctccggcgaccggaggagtgaagaagccccaccgcttcagggcgggaaccgtggcgctgagggaaatcagaaagtaccagaagagcaccgagcttctcatcaggaagcttccatttcagaggctcgtgagagaaatcgcgcaagatttcaagaccgatttgcgtttccagagcagcgctgttttcgcgcttcaggaggctgctganggntacctcgttgggttgttcgaggacactaacctctgcgcg

SEQ ID NO: 4053 - DNA, 273 bp, Glycine max
  modified_base (220)..(220): a, c, g, t, unknown, or other
gctggaaagcgttcgcgtcggctcgtcacgttcccgctcactccctctcgcgttcgccctctgagcatagtggatatggaatgtgtggttcagggaattatagagactcagcatgttgaggccttggagattcttcttcaaggactatgtggtgttcagagagaacgattgacgatccatgaaatatgcctcaagagtggtccacatctgggcactgtancctcagatgttcgactcttgtgtgacctagagcaagctgaaccttcctggact

SEQ ID NO: 4054 - DNA, 414 bp, Glycine max
ccttacggctgcaaaaaaacaacaaaagggaaaagaaggagaaattgaaaaatcctccggaaaccccacctgacaaaaaaagggtgcaacggtcctccgccctaaatcccacctccgacgcccctccaaggaaacaagctgtcaagaaagatgtgttccgggtgtttgctgagaaggttagagaccataaagaattggtttcaagatgggctgttctacaggagacgcgtgttgagtattttagagggaaggatttcgtgagcttcttaaaaagccatccggagctcaaagatgttctagaattagataggattttggaaacagaggagattgccaacattctacttgcaaaaaatcttttagtgcgctgtgatcgtgttgtaaaaactgttcgtcctgggaagaaaaagctgt

SEQ ID NO: 4055 - DNA, 435 bp, Glycine max
gaagcttctttcttcttcgccaattcagatcgcagacagacacagagagtgagagagggagatggggagcgacagcgaggcagagaagtcggtgcagaaagagaaggagaagaagaagatgttggccctggctcccattgctaaacctcttgctgggaagaagctttgcaagcgaaccctaaaacttgttcgtagagctgccgaacacaaatgcttgaaaagaggagtgaaggaggtcgttaaaagtataaggagaggtcataaaggattgtgtgtgattgctgggaacatatcaccgattgatgtcatcactcatgttcctattctttgtgaagagtctgacattccttatatttatgtcccatctaaagaagatcttgcaggcgcaggagcaacaaagaggcctacttgctgtgttctggtacagacaaagcc

SEQ ID NO: 4056 - DNA, 401 bp, Glycine max
gactcattctttcattctcattgccgtcacagagagagacaagaaacaatgaagtttaaccctagggtttcctcaagccgtcgcaagagccgcaaggctcacttcaccgctccgtcgagcgtgcgccgcgtcctgatgagcgcgcctctctccaccgatctccggtcaaagtacaacgtgcggtccattccggttcgcaaggacgacgaggttcaggtcgtgaggggaacctacaagggccgcgagggcaaagtggtccaggtctatcgccgcaagtgggtcatccacatcgagcgcatcacccgcgagaaggttaacggctccaccgttaacgttggcattcacccttccaaggttgtcgtcaccaagctccgaatggacaaggaccgcaaatccttgct

SEQ ID NO: 4057 - DNA, 280 bp, Glycine max
gagcaacatggtgaagctggtggagagatttacttgccagaagcttacgttagaaccaagaggactacttaatggagcaaatcagttggaagaacttgtagctagcttcccaactggcttatctgagtgtggagaagcattatcaagccttaggagtaggagaacgagtactgtttgtgatgaatgtctatggtttaagaaatctgtctttagtcaacttgtgtgttttgttattcagttctcagcaataaactgctctggcaatctagtttcatgcccg

SEQ ID NO: 4058 - DNA, 194 bp, Glycine max
  modified_base (173)..(173): a, c, g, t, unknown, or other
ggccgctctctgagaaaaacagatagtgtgggagagagaagagcggaagagaaaatgacgaccaggttcaagaagaacaggaagaagagaggtcacgtcagcgccggacacggccgtatcggaaagcaccgcaagcatcccggaggtcgcggtaacgccggtggcatgcatcnacaacgtatcctcctcgacaa

SEQ ID NO: 4059 - DNA, 387 bp, Glycine max
gggtttacaaaccggttttggatgtccaaagattaacacagtacccaatggagttccaaagtcagtacaagttcaatgaaacaagagaagccgatgaagatgaaaccaatggcaagggcccctaaaattaccaacaactgttagaaaattccgaaattcctggttaagtcttccaaaaattgcaacaatttgttccatgaatcggttggtcaatgcacttcaattgtgtttgatattgatcccaagaacttccgcggttgagctgtgcacgactgtgcaacttatatactatgaacatggcaagctgtacccaatttatgctattactgagcatttcctccctcgtttttttttgttgtaacatggatgcacaatcatcaatagaga

SEQ ID NO: 4060 - DNA, 289 bp, Glycine max
tcaagacgtcatgcatctggtcatgaatcagatgaaggacgacacgaaagacacaagagagaccaccgcagagaaggagatcttgaagatggggaatttggtgatgatcatgtggatagatggtagccatgttattctatttgaactcctattattaccttttgtttagctcaacatgtattatttttcaaaagaaaatattatgatatacaacttttaagagaactcccttgtattccaaggttttgcactgaagaatttgctactagaatgaaaggttaagttctca

SEQ ID NO: 4061 - DNA, 143 bp, Glycine max
ggaaagtgaaaagtgtatttatttatttttatttttatttttaaagaaaaaaaaacaataaaaagaggagagtttgttgctgtgctgggttgtatgagcggttcaacaggaaaatctcgcgggccaaaaaagatgtgtaattg

SEQ ID NO: 4062 - DNA, 408 bp, Glycine max
gacccaacaacttaatttattttgtaacgccaaacgtccatccaaaattgcgttcctaaatcgccgctaccgaacacagccgtagacttttaagtcattccgctgcgtttctttctctgcacttcaaagttcaaaccctagcgaagcatccactgtcgccgtcgcacactcgcacgccgctcacaggtttatgggctacgctgatgtcctgaatttgttgttggccgtggtggtttggtgcactgcttacgttactgttgtagttctcgcttcctttcgagccgtttgcactttctgaaaccttgcaatttcattgataacatgggttatgcacagcttgtcataagtcctgctggtagtggcaagtccacgtattgctcaagtttgtatgaacactgtgttgctgca

SEQ ID NO: 4063 - DNA, 400 bp, Glycine max
gaaagattagaagtcgacatatggggggagcaaagagttactcctgttttgcagtaatagctgtggccttggttttgctacttctgaatgtggctgtggtttgcaatggacgcaagacaagcacattcattaggaacgttgagaaaactgaggacatgccccttcatagtgatgtatttgttgccccttctggctataatgctcctcagcaagttcatataacacaatgtgaccaagtgggaagggccatgatcgtgtcatgggtgactgtggacgaaccaggaaagagtctagtgcattactggagtgacgccagccagcacaagagagtggccaacggaaatcatgtcacatatagatacttcaattaatcttctggttttatacatcactgcaccct

SEQ ID NO: 4064 - DNA, 325 bp, Glycine max
  modified_base (268)..(268): a, c, g, t, unknown, or other
gagtcaccacagagagagaggttttgatgcaacgctgtcactgagaaaggatctctatctacgaaggagcggaataaaacccttctctctgtgattaagagaatggcttcagatcggaaacttcacacttttgaggaggtggcaaagcacaaccagaccaaggattgctggctcatcatttctggcaaggtgtatgatgtcacccctttcatggaggatcatcccggaggtgatgaggttttgttatctgcaacaagggaagatgcanccaatgactttgaagatgtggggggcactgaatctgctagagatatgatggaaaaat

SEQ ID NO: 4065 - DNA, 327 bp, Glycine max
gaggctttaatgaatggcggttctgcatctagtaacttaagggcagctctctcccattgcgtacaacaagtgcgaagttatgattatcatcactatctttgccttctcgagctgcctccgtctatgcggaaggctgcatttgcactccgtgccttgaatgttgaaacagcgagggctatggatgttgcctcagatcccaggatcggccttatgcgccttgtttggtggcaggaagccatagacaaaatgttcgccaataaactgattgaacacccaacagcagaggccctggcatctgtgatagctgaaacaaactcagcaagatat

SEQ ID NO: 4066 - DNA, 385 bp, Glycine max
gacttcaacatctcttaataaagattagaaatcgacatatggggggagcaaagagttactcttgttttgcagtaatagctgtggccttggttttgctacttctgaatgtggctgtggtttgcaatggaggcaagacaagcacattcattaggaaggttgagaaaactgaggacatgccccttcatagtgatgtatttgttgccccttctggctataatgctcctcagcaggttcatataacacaaggtgaccaagtgggaagggccatgatcgtgtcatgggtgactgtggacgaaccaggaaagagtctagtgcattactggagtgacgccagccagcacaagagagtggccaagggaaatcatgtcacatatagatacttcaa

SEQ ID NO: 4067 - DNA, 312 bp, Glycine max
gatcgcatttcatagcactcaccctcattaccaacacgaaagcataaccaaaaccttttttcgaagtctctgattttcctaatggctccggcaaaggcagagaagaagccggcggagaagaagccagcggcggagaaggcaccggcggagaagaagccgaaggcggagaagaagatctcgaaggaaggagggagcgagaagaagaagaagcgcacgaagaagagcgtggagacctacaagatctacatcttcaaagtcctcaagcaggttcacaccgacattgggatattcagcacggccatgggcatcatg

SEQ ID NO: 4068 - DNA, 416 bp, Glycine max
gattcctctgcattcattcagcgttcatctcaatctagatttgtgtgcggtgcgtctccggtgaagagaagaagatggcgaccgtaccaggacagctcatatgggaggtcgtaaagaagaacaactctttcgtggtgaaagagttcggaaggggcactcagagcgtgcagttcagcagagagcccaacaatctctacaacctcaacactttcaagtactccggtttggcgaacaagaaaactgtcactgttcaacctgcgggtaaagaccagtctgtgttgctggcaacaaccaagaacaagaagcaaaacaagcctgctgctttgcttcacaaatctgtcatgaaaaaggagttccggatgatggcaaaggcagtgcaaaatcaggtagcagataactactacaggcctgatctc

SEQ ID NO: 4069 - DNA, 356 bp, Glycine max
tgagttccgatggatggaccagtttgctttgtcattggatccgatgacagccacgtccttccatgacgaaaccctaccggcagatggtgcgaaagtggcccatttctgctcaatgtgtggccctaaattctgctctatgaagattacagaggatgtgaggaagtatgctgcggatcatggctatggaactgatgaagctttgcggcgtgggatggatgctatgagtgctgaatttcaagctgccaagatgaccatcagtggggaagaacatggtgaagctggtggagagatttacttgccagaagcttacgttagaaccacgacgactacttaatggagcacatcagttggaagaa

SEQ ID NO: 4070 - DNA, 311 bp, Glycine max
gagagtgatccttctacactaactaaagccgagcagcgagagagagaaaccctagcaaaaatgccggctggtcacggtttgagatcccgcaccagagattccttctctcgtcccttcaggaagaagggtgccatcgccctcaccacatacctcagaacctaccacgtcggcgattatgtcgacgtcaaggttaacggcgccgtccacaagggaatgcctcacaagttctaccatggccgcaccggtcgcgtctggaatgtcaccaaacgtgctgttggggtcgaagtcaacaagcaggtcggcaacagaat

SEQ ID NO: 4071 - DNA, 428 bp, Glycine max
gatacctaaaaattgtaccgatatggcttcacttgtgtgtctccttttttccttgcatttcatggttatcatgtcaggttccttaccagcaaatagtgaagtgtttacaaaagagtctcctatgtctctatccacaaaacccgtggaaagactcacccaactccacttttatttccataacaacaaaatgggggaacacccgactgctatgaaaattgttgagcctcctaaggcgtccatttctggttttgggactatttacatgatggatgaccctctaaccgaaggaccaagtccaacttcaaagcttgttggaagatgtcagggaatatatgctgaggcttcgcaacatgaacctgcgatactcatggtgacgaatttgttcttcactgaaggcatttacaatggcagcaccctcagcattcttg

SEQ ID NO: 4072 - DNA, 429 bp, Glycine max
ggttctttgcgagatagaagagaaagccgtcgctatcctagtctcttcttcccctctacccatttcagtttcaggatggaatctcaggtgaagcacgcccttgttgtcaaagttatgggtcgtactgggtctagggggcaggtgactcaggttagagtgaagtttttggatgatcaaaaccgacacatcatgaggaacgtgaagggacccgtgagagaaggagacattctcaccctacttgagtctgaaagagaagcaagaaggttgcgctagaggatctcttcatggtttggctcaggacttaaacaaaacatcgttgtttttgttgtagttaaaggatgtcaaatgttaattgtcatggacctgaattatgcacctactatgtttgacattatgccattatgtgtgtggctgagttatgactaaatt

SEQ ID NO: 4073 - DNA, 78 bp, Glycine max
  modified_base (15)..(15): a, c, g, t, unknown, or other
ccctcttctaattcntctctcaaaaggactgaacgaaaaaaccttaaggttcctctgttcctcttcgccccccaaaaa

SEQ ID NO: 4074 - DNA, 436 bp, Glycine max
  modified_base (155)..(155): a, c, g, t, unknown, or other
  modified_base (168)..(168): a, c, g, t, unknown, or other
  modified_base (361)..(361): a, c, g, t, unknown, or other
ggtcctccgatagttaaaatataaccatgttacgttcaaattccaagccaatccccggcccaatccccttcctccttcccttttccctaaaaagatccaaaaacgtcttcaaaaaacaagccaataataaagggctgtcgattcccttcttccanaaaagaacatcanattcggggagtttgtggacgggaatggaaacgtagctgtcggtttgaagttgcataataaaccaagtaatgatggccttaaccgacagtttcctctagagattccgccgattctatttgaagagacttcacttccagcaggattgcacggttcacatactaaagatgtttatagtatttcagtgttgcctgangaagatgaaaatgcaaattgcgcttcaccactacctttcttgagcatcctaagggtttcctaatcaagttaaaag

SEQ ID NO: 4075 - DNA, 161 bp, Glycine max
gaacctttttccccttcctttcacctcctcagcattcgtcagaaaaaccccataacccaaaaatgcctttcaaaaggtactttaaaattggaagggttgcccagtataccaagggcaaaaattacggccgcgccttaataattgtcaagttcattgaccaa

SEQ ID NO: 4076 - DNA, 111 bp, Glycine max
gaatctttgttctcttcctttcagctcctcagcagtcatcagatatacgccactctccatgattgtctttcaagaggtaggtttagcttgggatggttgctcaaatgagct

SEQ ID NO: 4077 - DNA, 296 bp, Glycine max
gaggtttcagatccttaatcggccaggaccaaacagcatccgcggcagcgacggtaaccctccaacaacaacacttccgctgcgaaaaatgtctctggtggcgaacgaggatttccagcacattctgcgtgtgctgaacaccaacgtggatgggaagcagaagataatgttcgcaatgacctccatcaagggtattggaaggagattcgccaacatcgcttgcaagaaggctgatgttgacatgaacaaaagggctggtgagttgactgctgctgagttggatagtgtgatgactg

SEQ ID NO: 4078 - DNA, 138 bp, Glycine max
ggactctcaccgttccttcagagtggaaccctagttgtctctatccttaaggttccgccaccgcaccaagtctcagcacccaaccaggtcttctttcattcatggcggaggaacttatttctcaattaaacaatatgc

SEQ ID NO: 4079 - DNA, 417 bp, Glycine max
  modified_base (385)..(385): a, c, g, t, unknown, or other
gacacacgttctctgtgactgcctctgttccgccaagcgcagcattttcccaccgttcaggccaccggctgagttaggtttccggcgaggatgggtgctgctctgctgtcggagcttgcgacggagatagtcgtgccagtgtgcgccgtcatcgggatcgtgttctcgctggtgcagtggttcctcgtgtcgcgcgtcaagctcactcccgaccgcaacggaacgacgtcgtcgccgcgcaacaacaaaaacggctacggcgacttcctcattgaagaggaagaaggcatcaacgaccacagcgtcgttgtgaaatgcgctgagatacagaacgctatctccgaaggtgcaacatcctttcttttcactgaatatcaatatgtgnggattttcatggttgcttttgcaatactgatc

SEQ ID NO: 4080 - DNA, 425 bp, Glycine max
gacagcaaaacaattttcaaactcaattaccattccataacctaaatctcctctttgtttccgagtcagagagcaatggcacgtaccaagcaaaccgctcgcaagtccaccggcggaaaggcgccgaggaagcaattggcgactaaagccgctcgcaagtcagctccggccaccggcggagtgaagaagccccaccgcttcaggcccggaacggtggctctgagggagatcagaaagtaccagaagagcactgaacttctgatccgaaaactcccattccagaggctcgtcagagaaatcgctcaggatttcaaaacagatcttcgtttccagagcagcgctgtttctgcgcttcaggaagccgcagaggcttatctcgttggactcttcgaggacaccaacctctgcgctattcacgccaagag

SEQ ID NO: 4081 - DNA, 240 bp, Glycine max
gatagcatcagtgttgaaattatctcaaaaaacgaaaatatatcagccacattttaccctatcaattgagggcttgtatcagatgtaccaggctggcagtgtgtgtaatcaagccataaaaagcataaaccatagcttgcgcttgaagcatacttatgaatgcacctcctgtttccattttcatgatgaatcaggaaaggctacaaagctttcttatccgggcaactacaactgctttac

SEQ ID NO: 4082 - DNA, 393 bp, Glycine max
gatagcgaaacagagagtggtttcagtgagtgatcggtgttcacttgatccttcataagtcgtcatcatcatcatcatcatcaccgttgattgaagaagatgccgatcagaaacatcgccatcggaaggcctgaagaggctactcaccccgacacgttgaaggcggggttggctgagttcatctccaccttgatcttcgtgttcgccggttcaggttccggcatcgcctacgacaagctcaccgacaacggcgccgccactcccgccggcctcatctccgcttccatcgcccatgctttcgccctcttcgtcgccgtctccgtcggcgccaacatctccggcggccacgtcaaccccgccgtcaccttcggcgccttcgtgggcggcaacatc

SEQ ID NO: 4083 - DNA, 358 bp, Glycine max
cttgcactaacaaccttgaaacccgggtcaaccgaaacccctcaaccaaccaagtccaagaaaaaaggttaaaaacccaaaggaggaaatgttaacccgggttcaaccggtaaaaaatgggaacaacttttttgcctttcccccaaccttggcccccttcaacaaaaccttcaccaaggtcactaattttccggcaaggaaaacccttgtccgaatcactggtggtatgaaagttaaacctgacaaaaatgaatcatctccttatgctgctatccttgcagctcaggatgttgctgccagatgcaaggaactgggcataactgctcttcatatcaagctccgtgctactggtggaaac

SEQ ID NO: 4084 - DNA, 397 bp, Glycine max
  modified_base (196)..(196): a, c, g, t, unknown, or other
  modified_base (237)..(237): a, c, g, t, unknown, or other
gaaaattggaggtgacgatggaattggaagttgacgagaacgacttgaaagccgccggcgctgaactcctcgccgaaggtggcccggcaggcattcgtatcaatggctggttgatcgagactcggaggcactccatactgaactcttccacattccaagagtgggaacagaaactcgatacgtctcatttacaganatggtttttggggaaaacactttgattctaaaacacttgancagtggaaccaacattcattttaatgcatttgatgctctacgtggctggaaacaagaagccttgccgccagttgaagttcctgcggcggctaaatggaaatttagaagcaagccctctcagcaagtaatactagattacgactatacatttacaacacct

SEQ ID NO: 4085 - DNA, 356 bp, Glycine max
gttctagtgtatgtgattgttgtgactcgttcttcttcgtcatgatcttcttcatttgttgtttgtgtgtatgtctttactctcaactgatgaatgtcatgctgcagtggtaactgtggttgctgaagcgcctgcaagtgcagcaacggctgctgaggcagcaagatgtacttagacttgagctacactgagtcaaccaccatcgagaccatggtcatgggagtggtaccagttaaggctcaattcgagagtgctgaaatgagtgttaccgctgataacgatggctgcaaatgtggatctaactgcacctgcaacacatgcacttgcaagtgaggtgtaggagagctaaagcttca

SEQ ID NO: 4086 - DNA, 391 bp, Glycine max
ggaggaagaaacgggagcttttagtagtagtaataaccagttgacgctttcgcccctaattcaaggctttaccaaactcccaaccctcaaccctttcaatttcaccaccctttgccttcttccttctcccctctccttgcagttccaaccacacaacctcttctcaacctccctttccctcaggccgaaaaagaaatggagtgcgtggaggcagcgttgaagagcaattataggaaagaaatgaccttaaaactgagcccacaaaccttcacggaagaggttagtgtccaaaacggcacaacctgcgacgaacttttcgttaacgacctccttgacctctctcacggtcaaagaagaacccgaacaacaagaagacactccctgtgtctcc

SEQ ID NO: 4087 - DNA, 221 bp, Glycine max
ggcctcattcgggactttcactacccgcagcagcctcaggaggagaataaggatgtctcacaggaatttcgagcacccaaggcacgggtcactgggatttctccccaggaagcgtgctgctcgtcacaggggaaaagtgaaggcattccccaaggatgacccatccaaggcacccaagctcactgcattcttgggttacaaggctggtatgactcacattg

SEQ ID NO: 4088 - DNA, 420 bp, Glycine max
  modified_base (399)..(399): a, c, g, t, unknown, or other
gctagcaattcggcgcaatcgtcttctgcttcaaggaaggagagcttgttattctctatcaacaaggaaaatgtcaggtgaagaggttgttgttgcagctgagccagctgctgccatcccaggcgagcctatggatatcatgactgccttgcaacttgtgctcagaaaatctctggcttatggtggtcttgcacgaggccttcacgaaggggcaaaagtgattgagaagcatgctgcacaactctgtgttctagcagaagactgtgaccagcctgactatgttaaactggttaaggccctttgtgcagagcacaatgttagcctgctgacagttccgagtgcaaagacccttggagaatgggctggtttgtgcaagattgattccgaaggaaaagctangaaagttactggttgctcctg

SEQ ID NO: 4089 - DNA, 436 bp, Glycine max
gacacacactctgtcacgcacccaccattctactacactcctctctctcactctcactctctgctccgtgatagctgtaccacgtttttctctccatctcgaaacaccatctctgcctcagtcccaacccatcaccattctcatggctgctctagctctagcacttcttcttctggctttcaccggcacttcaagtgctacatggtgcgtttgcaaggatggaagcgacgcgatcctgcagaagacgttagactatgcttgtggagctggtgctgactgtaaccctcttcacctaaacgggccttgttttcagcccaacaccgtcagggcccactgtaactacgccgtgaacagctacttccaaaagaagggtcaagctcaagggtcatgcgagtttgcgggaacagccactgttactgcatctgaccccagctct

SEQ ID NO: 4090 - DNA, 390 bp, Glycine max
gaatcaatcaatctcttctgtgaactgtgatgcatgcgagttgaaattgaatcgaaggcaaagcgaagaagatcaaagagagagaatggtttcgtatgtgaacatcttgctgtacggcgtgggagggttggtggtggcggggatggcattgctggtggcgtttcaggagaagctggtctacgttccggtgttgcctggcatcaccaagtcctacgccattaacccctctcgcctcagactcatctacgaagacgtctggctccaatcctccgatggcgttcgccttcacgcttggttcatcaagctcttccctaattgccgaggtccgaccattttgttttttcacgaaaatgctggaaatattgctcaacgtccaaaaatggtccgaat

SEQ ID NO: 4091 - DNA, 128 bp, Glycine max
cttccaacagctgcaaaaaaaccacaaaagggtacggctgcaaaaaaaccaaaaaaggggaatttaaaaattggaactttaaccaaaaaaaaaaaaaaaaaaaaaaaaaaaaaaccggccccccaaaa

SEQ ID NO: 4092 - DNA, 347 bp, Glycine max
gggcatgttactattctttcttcttccactactctactcattgatcgaaattcgaatgatcgctttctctgatctaaactaactgtgactgaaccggaaaatcaaccacccccaccatcattttcattctcattctcctctctctgttttttctatttcctttctttcttatcgctccccatttacttgttttttcatttttgcagggtttcttttgctcatcaccaccttcttcatattccctctccaaccatggacgtgggatcgtggagttcttctcactccaagatcaagtcgcgattcaccttccaagatcgcctcttccgcagaaagaattctcaggaaaa

SEQ ID NO: 4093 - DNA, 420 bp, Glycine max
tattaagctgtaattaactgagattaaccacaacaaagttgattgagtgacaaaaaaaaaaaaaaaaaaaaaaaaaaaaaaaaaaaaaaaaaaaaaaaaaaaaaaaaaaaaaaaaaaaaaaaaaaaaaaaaaaaaaaaaaaaataaaaaaaaaaaaaaaaaaaaaaaaaaaaaaggggccgcccaaaaggatcaaacctaactaacccttgaaggcaacttaaaacccctccaaaagggccaccaaaatcaaatcaaggggccgccgtttaaaaactccgaaacgggaaaaacccgggcttaaccaaattaaacccccttgaaaaaaaccccccttccccaagcgggctaaaaaccaaaaaggccccaaccaatccccttcccaaaaatttgccaacccaaaaggccaaagggaaccccc

SEQ ID NO: 4094 - DNA, 271 bp, Glycine max
ctcctccccttccgcgaagggtttaacccaacctcctccaaaattaaaggataaaggttaagagaaagggtacacacctatagtggggatagtccaaatttacactgggaaatctccaatcacagggcacaccatatataaacttttaggcgcttacaaacgtgttatagtgagatatttgaaagaaactgctcagataaaaactacgtctctcaaatatacccttgtgcgttaaaaaccttaagcgcaacctgtaataagaaacacaaat

SEQ ID NO: 4095 - DNA, 435 bp, Glycine max
gattaccttcatctcgtcatcgtttcgttcaactttcaacgccagttcacactctctgcttcgcgtgtaccaacaagtgcaagttcgaatcaatggccagcgctcagctcacagcaatagcgtcatcgatctctacggcgtcgtttgaagggcttcgaccttccgctgttcagtttgcttccacgggcagaattagaattggcaatctctcccaaaggtccttccggggcttggttgtcaaagccgccaccgttgttgcccccaaatacactgcgataaagcctctgggagatagagtgctaataaaaattaaggaagcagaggagaaaactgagggtgggattttgcttccatcaactgctcaaacgaagcctcaaggaggtgacgtggttgctgttggggaaggaaagacagttgggaagaacaatgtagaga

SEQ ID NO: 4096 - DNA, 208 bp, Glycine max
gaaatacatattctcttctcaaatttctcagtctccggaactcgtttctaccttcacttctcacatctcgaaccctctctttccggcaactaggttaaagttcatcaatggcaggtcgtggcaaaaccctatgatccatcgccgccaagaaggccacctcaaggagcagcaaatcctgcctccaattccccgtcggccgtatcgcccg

SEQ ID NO: 4097 - DNA, 353 bp, Glycine max
ggtactccttcgacgatcgtcttcgccaatcgcctgcgtctctctctgaattgactagcttaaatggctggtcctaggattgcccatgctaccttgaaaggtccgagtgtggttaaggagatcataattggaataacacttggcttagctgctggtggtgtgtggaagatgcaccactggaatgaacagaggaaaaccaggaccttctacgatttactggaaaagggtgagattactgttgttgcagaggaacagtgaaaatgttcttgttttgttgcctatgctctccatttataggcttttttttcccgtgttatattcaattggctcttcaaatgtaaatgagccaacat

SEQ ID NO: 4098 - DNA, 384 bp, Glycine max
ggggagagagaaaaaggagaaccttcttttctctctgttttgttgttattcttatttcagacctaaaaaccaaaagcaccgattctgctttctagaattacatcatcgtatcaagaaaaccttggaactacacgaaaatggtgtcggcgaacaaggagatggtcgtgtactgcttcgacaccctcctcgctcactacaacagcacggaagctccttcccctgccttcgattaggctcaacatccattgtttgttacatggaagaaagtggtgaatggtggagatcctcgtcttcggggttgcatcggaactctggaagcacgcagcttgattaatgggctcaaagattatgcactgaccagtgccctcagggaccggagatttc

SEQ ID NO: 4099 - DNA, 258 bp, Glycine max
tatgtacagtattcgtaggcagatagtatagtacagcatgcacactcttgtggtagggtatgcgcattgtgcactcttctgtattcttacacttggatggatgattcttcccctaagttctagtgtttgtttattttttgtacaaataaaaaggaactaaaagagtgtagtgtggtgggtggtatctggcatggttgacggtgcaattatcattttgtttcggtcagaccaaatagaaaataaagagtacaatacagc

SEQ ID NO: 4100 - DNA, 170 bp, Glycine max
gaagggataggaaaaaggaaaatgggaaaattattccggaaaccctaaccttggcaacccggaattgcccaatccgaacccggttgcctcctccacaaaagggtccgattcgccgccctcgccggtcccaaaaaattcaatccccaaaagttgcaactccccaatccatt

SEQ ID NO: 4101 - DNA, 404 bp, Glycine max
ggtccctcttactaacactagggtttacagagaagcgaagaggcgcagccgtagcagtaactcgtggaattgctagcaatggcgaggatcaaggtttacgagctgaggcagaagacgaaggctgatctgttgaatcagctgaaggacctcaaggccgagcttgccttgcttcgtgttgctaaggtcaccggcggtgcacctaacaagctctctaagatcaaggtggtgaggttgaacattgcccaagttttgacggtgatttctcagaagcagaaggccgcgttgagggatgcctacaagaacaagaagtacttgcctctcgatctccgccctaagaagaccaggccattcgcaggaggcttactaagcaccaagcatcattgaagacagagagggagaagaag

SEQ ID NO: 4102 - DNA, 404 bp, Glycine max
ggtgtgtagtataggattctcttctttattccttttgtaatttcattcattcttaatctttgtgaaaaataatgttcaccgagaattttaaggttgagtgtcctaatgtgaagtacaccgagactgagattcagtccgtgtacaactacgaaaccactgaacttgttcacgagaacaggaatggcacctatcagtggattgtcaaacccaaatctgtcaaatacgaatttaaaaccaacatccatgttcctaaattaggggtaatgcttgtgggttggggtggaaacaacggctcaaccctcaccggtggtgttattgctaaccgagagggcatttcatgggctacaaaggacaagattcaacatgccaattactttggctcactcacccaagcctcagctatc

SEQ ID NO: 4103 - DNA, 420 bp, Glycine max
tgggagggttttgcgctgttgttgctgctcatcctccgtaacctccgagctctgcaccgaagaacgaagccatggggaagacacatggaatgggatctgctcgcaagctcaagtcccaccgcacgatgcatatgtgggctgacaagtcatacaagaaatcacatcttggaaatgaatggaagaaaccttttgctggttcatcccatgccaagggaattgtccttgaaaagatacgtattgacgctaagcagcccaactctgccattcgtaagttgtgccaggttcaacttatcaagaatgggaagaagattccgctttttgtcgctaatgacggttgcttgaactacattgacgagaatgacgaagtccttgatgctggatttggacgaaaaggtcatgctgtgggagaatatcctggtg

SEQ ID NO: 4104 - DNA, 360 bp, Glycine max
atgcgcatgaaatttttcaatctcgagggagtccagcataatgggaaaggaaaatcacattcttgagatgtcatcaatgtgaagagaaagcttgtatgatataaatgaattacagaacaaatgactaaacattgtttacaccaaggacagcaacaagaaaatattgacagtatcttatattgatgtattcattccaagtctactatcccaaaattcgatagaaggatcttcacttgatcaacaaagtctgaacctgttgcatactctgttagcaaccctacagcaaaaccaaacattgcccatctgtagaaatgaaattactgattagtaagtcaaaatacagcagaacttgcaactgat

SEQ ID NO: 4105 - DNA, 239 bp, Glycine max
tctgaccaagactacgctctagatccatcccacttcgagctcccgtcacagtcactcgtaaatgtgctccccatggcgaggatcaatgtttacaagctgcagcaaatcaccaaggctgatctgttcaatcagctgatagacctcaaggccgaacttgccctacttcatattgccaccgtcaacggctgtgcacctaacaagctctctcacatcaatgtcgtgacgttgaacattgccca

SEQ ID NO: 4106 - DNA, 399 bp, Glycine max
  modified_base (393)..(393): a, c, g, t, unknown, or other
ggccctttcgcctacgcagagagaaattgagtttctgagataaccacttttctctttgattcatcaatggcaaccgcgaggaccgtgaaggatgtttcgcctcacgatttcgtgaaggcttacgcctcccatctcaagcgttccggcaagatggagcttcctgagtggactgatattgtaaaaacagcaaaatttaaggaattggctccatatgatcctgactggtattatgttaaggctgcctcaatggcaagaaagatttatttgagaggcggtcttggtgttggggctttccagaggatctatggtggaagcaagagaaatggaagccgttccccacatttctgcaagagcagtggggctattgcaagacacattctgcaacaattgcanaacatg

SEQ ID NO: 4107 - DNA, 382 bp, Glycine max
ggttctagtgtgtgattgtttgttgttgtaactcgttcttcttcttttgttgttctgtgtttgtgtttgttttttctctcacctgaaaatgtcttgctgcggtggtaactgtggttgcggaagctcctgcaagtgcggcaacggctgcggaggctgcaagatgtacccagacttgagctatactgagtcaaccaccaccgagaccttggtcatgggagtggcacctgttaaggctcaatttgagggtgctgaaatgggtgtgcccgctgagaacgatggctgcaaatgtggaccaaactgctcctgcaacccctgcacttgtaagttaggtgttgggagaacaagcttcaagcagagattacccttaattaggaataatgat

SEQ ID NO: 4108 - DNA, 318 bp, Glycine max
tcaatgcgacgttcacattcacgaatcgttgtcctcatatgatttgccatcgttgagggaagcgcgagagccctcgttgtgcacgatgagagcgaagtggaagacgaagcgcatgaggaggtctaacaggaatcgccgatggatgagacgaagatctaagtaggtgcttgaacagcgagtggagatgatgtgcttttccatctgcgagcagcttcatgacattttatgctgtcatggctcttatgataatcgtgacgtctagtggccatgggagcgttgatcatgactttattttagctttactggtctacagattgc

SEQ ID NO: 4109 - DNA, 408 bp, Glycine max
  modified_base (232)..(232): a, c, g, t, unknown, or other
  modified_base (258)..(258): a, c, g, t, unknown, or other
ggtgtgtattaaaggattcccttctttattccttttgtaatttcattcattcttaatctttgtgaaaaataatgctcatcgagaattttaaggttgagtgtcctaatgtgaagtacaccgagactgagattcagtccgtgtacaactacgaaaccaccgaacttgttcacgagaacaggaatggcacctatcagtggattgtcaaacccaaatctgtcaaatacgaatttanaaccaacatccatgttcctaaattangggtaatgcttgtgggttggggtggaaacaacggctcaaccctcaccggtggtgttattgctaaccgagagggcatttcatgggctacaaaggacaagattcaacaagccaattactttggctccctcagccaagcctcagctatccgag

SEQ ID NO: 4110 - DNA, 384 bp, Glycine max
gcactcactcagagaatagagaccagcttttgcttctttgtgaacatggagatgaggaaatcatgtggcttcttcttcttgctcctcctccttgtctttgcttcccaggtggtggtgcagactgagggaagagtgtgtgagtcacaaagccacgggttccatggtttgtgtaatagagaccacaactgtgctttggtctgcatgaacgaaggtttctccggtggcaggtgcaaaggcttccgccgccgctgcttttgcaccaggatttgttgagatctcatcaaacactactcttgccatgcaaattaataaatcaaagctaggccaaataaattgcatctaatctttagccatttgggagctagctacaaaaccaactcatac

SEQ ID NO: 4111 - DNA, 183 bp, Glycine max
tagtaataattctaacaccgatgtcgtatgatatatgatgaacaaataattatatttgataaatatgtgattagaagtttaattcttaaatttggatgtataacgaaacatttattaagggagatagctagactctttaaataaattttcttaattcaataaattagtctttaacccataacc

SEQ ID NO: 4112 - DNA, 268 bp, Glycine max
tgtctacgatctgctttctctgaactgtgacaatgtcgctcggagaaactgcttgttcatacgcagctctcatccgtcatgaagatggaattagtgtaactgctgacaagatcagcaccttgttgaaaactgcaaatgttccagtagactcttattggccaaccttgtttgctaaacttgctgagaagaaaaatcttggcgatttgatagcaaatgcggcacgcggtagtgcaccagttgctgttgcagctgcacctgttgctgcctc

SEQ ID NO: 4113 - DNA, 440 bp, Glycine max
  modified_base (385)..(385): a, c, g, t, unknown, or other
  modified_base (426)..(426): a, c, g, t, unknown, or other
gatcaacatttgtctctcatctttcaatttcaatcaacggttatacccttttctatttgagcatcatcatgtccaccgcagcgcagcccaaggccaagaaaacggcgtcgtccaagaagcccctctcccatcctaccttcgccgcgatgatagcggaggcgatagcgagtctgaaggagagaaccggttcgagccaatacgcgataaccaaattcatcgaaggcaagcacaaggagttgcctccaacctacaagaagcttgttctcgttcatctcaagaagtctgttgctgctggcaagctcgttaaggtcaaaaactctttcaagctcgcaccgactaagtctgctcctgttaaagccgctgctgctcccaagaagcccaccanagctgcggctaagcccgccgccaagcccgcttccaagcccnaaagctgctgcact

SEQ ID NO: 4114 - DNA, 326 bp, Glycine max
ggaaaagggttttacattttaatcgttctcccgtgtaacagagacacagagagagagtgtgaaaaaacgagaccatagagggaggagtctcccaaacgcgcatacctcgtgtcataatccgcgagctgatgagaggactactccacgttctagctcctcgacaacgacgcgactattaccaacacgctgctgcgcctcatgatcaccgaggtgccgacagtcgccatcgacctcgtcgagatatatgtacgcacctccgtgcgcacccaccagttcatcgctcacacacacgggctcattcacctcactaacgagcgagccatgtc

SEQ ID NO: 4115 - DNA, 413 bp, Glycine max
aggggttgacaaaggaaacgtgtagtacgagggccaatttccaaaaaccttttgtctcgcaacctcacctcttcctccttcaatctctttcggaatttcccaaaatccttagtgggaggaagagatggttctgactcagaagattcacgaagctttcaaaggcaccgtcgagaggatcactggcccccgaaccgtttccgccttcaaagaaaaaggagttctcagtgtctccgagttcgtcaccgccggcgataatctcgttgccaaatgccccacctggtcctgggaatcgggtgatccaggcaagaggaagccatacttgccacctgagaaacagttcttgattactagaaatgtgccttgtcttcggagagctgcatctgttgaagaagaatatgaagctgctggaaggg

SEQ ID NO: 4116 - DNA, 405 bp, Glycine max
  modified_base (367)..(367): a, c, g, t, unknown, or other
gtactctcatatcttaaccttttgtctttctccactctcatattttcttctcttctcttcaacatgaccggtgttgctgatgaagcccccgttaccctcgacacgctgaagcaattaatggctcagttcgccaaagagagagactgggaccgttttcacagcccaagaaaccttcttttggctctggtgggtgaagtacgagaattgtctgagatatttcagtggaaaggtgaggttccaaagggtcttccagattggaaagaagaggaaaaggttcatcttggggaagagctttctgatgtgttgctttaccttgtcaggctctctgacatttgtggcgttgatcttggtaaagctgctttacganaggttcaactcaatgccatcaaatatcctgcaaaagtt

SEQ ID NO: 4117 - DNA, 311 bp, Glycine max
gccccaaaacacaagagagagaagaaagacgaatggagggtgagggtgcagcagtgtggcaaggtgcggttttaggtggaataatcttctggcttgtttctgcttcataccttaacgctactcgcaaacttaggtctttcttacaaccttgggttactcatcacgttgacactcaaacccctattatcctcaagatccagagttacgggtttgggttcctggatgcacttttctctgggttgtcttgcgttgtttctgtgcccttttacactgcttttctccctctgctattctggagtggtcatggcaaa

SEQ ID NO: 4118 - DNA, 373 bp, Glycine max
gacacttactagtagtaagcatggagtcctcaaagatctatgcttacctcttcctctgcatgatctttctctcttccgccactcccattctcggttgtggctactgtggcaaaccccccaaaaagcacaagcctggtaaaacaccaaagacacccaaaacacccgttgttatgccaccagtcaccatccctcccattaatgttcctcccgttgttcttccaccaatagtgaagcccccaggtattctccctccaattccaattattaacccaccaaccacaccagggaagggagggaacactccatgcccaccaccaaagtctcctgcgcaggctacgtgccccattgacacgctcaaacttggtgcctgtgt

SEQ ID NO: 4119 - DNA, 292 bp, Glycine max
gacaccacctggttccgggtcacactacgtgcgcaggatcaagagccttctcatgcatcagccgattcaagtgtcttccgcctttcgcatgcagcagctgtagggaactcccatcgactctttggcgagataatcacaccaacagcaaaatgctcgttttttgctttgtgggtattgttcttgatcatttgagttgggaccatcgaccatggtgggtagattttcgagattctctgtcggaagaaatgtccacctgacagcgctaagtgccctgcatgacacggaagtgatg

SEQ ID NO: 4120 - DNA, 147 bp, Glycine max
tgcgaaaacacgacaggggggaatacagaacatcgttgagatctagaagatctacatcatcagggtcttgaagcagctgcacgccgacatcgtgatctccagcgcggcggtgaggatcatgagacattttcatagacggcatcgtcg

SEQ ID NO: 4121 - DNA, 368 bp, Glycine max
  modified_base (103)..(103): a, c, g, t, unknown, or other
gacaccacctggttccgggtcacactacttgcccaggatcaggacccttctcatgcaacaaccgattcaagtgtttttcgcctttcgcaaacaacaactatanggaactaaaatcgaccctttggctagataatcacaccaacatcaaaaaaatcgttttttgctttgtgggtattgtttttttttttttgagttgggacaaaaaaacatggtgggtatattttcgagattctctgtcggaagaaatgtccaccgacgaacgcaaagttgcctggatgagaaggaagtgatgcccccaaacccagaagctgttgctgcagtggcaagtgctgcaactgccacttctcatggaattgaagtggctgtgg

SEQ ID NO: 4122 - DNA, 416 bp, Glycine max
gatgccgaaaagtagtaccaagatggcttcagttgtgtatctcctctttggcttccatctcattgttatcatgtcaagttccttacccgcaactagtgaagtgtttgcaaaacagtatccatccacagaacccgtggaagaaaaactcacccaactccacttctatttccataacaacataacgggggaacacccaactgctatgaaaactgttttgcctcctaaggggtccattcatggttttggggctacttacatgatggatgaccctctaactgaaggaccaagtccaacttcaaagcttgtgggaagatctcagggaatatacgccttggcttcacaacatgagcctgggttgctcatggtgacaaattttctcttcactttgggcatttacaatggcagcaccctcagca

SEQ ID NO: 4123 - DNA, 250 bp, Glycine max
acacgaactaatgtatgccaatggttatatcgctgtaagtgaaacacccattagtcaatggttgctactacaactttagaatgatgagtgaggtactagtgtaacatcgtcgccatgatctactccaacattattgtcaaatcaacatcaacaggaaagacagtcaaaatgagatttcttcatgactaaaaagatgttcggtactcaaacagttgtattggatcattgtcaaagcgcaaaatattttcca

SEQ ID NO: 4124 - DNA, 360 bp, Glycine max
gcactcccgcaactgctggctcaatccctcaatcccccaagaatttataatcctgaacgaagtcaaatttccaagctcccttgcgccctaagaggaagaaggtttgggtggactattttgttcagtttcgatggatccttgttatttttgtggtccttcccatctccttcaccatttatttccttacataccttggggatgtaagatccgagtggaagtcctataagacgcgtcagaaggaacatgatgagaatgtgaagaaggttatcaaacgtctcaaacagaggaatccatcaaaagatggtcttgtctgtactgctcgtaagccctggattgctgttgggatgcgaaatgttgact

SEQ ID NO: 4125 - DNA, 383 bp, Glycine max
gatgccgaaaagtagtaccaagatggcttcagttgtgtatctcctctttggcttccatctcattgttatcatgtcaagttccttacccgcaactagtgaagtgtttgcaaaacagtatccatccacagaacccgtggaagaaaaactcacccaactccacttctatttccataacaacataacgggggaacacccaactgctatgaaaactgttttgcctcctaaggggtccattcatggttttggggctacttacatgatggatgaccctctaactgaaggaccaagtccaacttcaaagcttgtgggaagatctcagggaatatacgctttggcttcacaacatgagcctgggttgctcatggtgacaaattttctcttca

SEQ ID NO: 4126 - DNA, 437 bp, Glycine max
cagtaagagcatccgaaagggattacccaatcaggagacacagtatatgagttgtgtaagctatatgatctttcagcccttcggaatctcaccacgaactattactcatatgcaatcatcacgtcatccgctatgaatatcacactgaccattgcggatggcaatgctctctccctcaacaacctcatattttgtcattctaagacgacttacacctgcatagccatctacagtcccctgattgtcatcactgaacaaagcctacccaacaccattgattatacagttatctatgttgacaaatctggcatcaaggtttctccctggcatgatattcccttgcagttaagtgatgatatctttaacttcattgtctagattcctacagaatccagtgcaaagatggaagttgccactgatgagtctttcactcccat

SEQ ID NO: 4127 - DNA, 412 bp, Glycine max
  modified_base (319)..(319): a, c, g, t, unknown, or other
ggaagtaagggatcgagcctcggaggagggaatcgcagcgaagtccactatgccgaagcaaattcacgagattaaggacttcctcctcactgctaggaggaaggatgcacgctctgtgaaaatcaagcggagcaaggatgtggtgaagttcaaggtccgttgctccaagtacctttacaccctctgtgtgtttgattctgagaaggctgataagttgaagcaatcacttcctccaggtttaagcgtgcaggatgtgtgattcttactgctgtatgaagatcaggtttttctctggattttggggattcatagttagtanaatggttcagagaattttcgtatttgttgttacattcgggattatgttagtattttgtttaagacggatccaacttgcttggggattatgtgg

SEQ ID NO: 4128 - DNA, 424 bp, Glycine max
  modified_base (394)..(394): a, c, g, t, unknown, or other
ggcacttcaattgcaatcaaattagttcattctctttgcgcagttccctacctctcctttcaagatgcagatcttcgtcaagaccctcaccggaaagaccatcacccttgaggtggaaagctctgacaccatcgacaacgtcaaggccaagatccaggacaaggaaggaattcccccggatcagcaacgtctcatcttcgccggaaagcagctcgaggacggccgtaccctcgccgactacaacatccagaaggagtcaacccttcaccttgtccttcgtctccgtggtggcatgcagatcttcgtcaagactctcactggcaaaaccataaccctagaggtcgaaagctctgacaccattgacaacgtcaaggccaagattcaggacaagganggaatccccccagaccagcaacgtctcatc

SEQ ID NO: 4129 - DNA, 61 bp, Glycine max
agaaggggattgcgattcacagaaaacaccaccaactcaacacagtcatcatcgtcactac

SEQ ID NO: 4130 - DNA, 370 bp, Glycine max
  modified_base (294)..(294): a, c, g, t, unknown, or other
gacaacacaacgcaacacaacgcgcactctctcttttctctcttaacacaaaaaccctatcgttcttcgcggtttcgccgattctcgccatgccgaaagccaaatccgacgccaaagccgccgatagccggttgaagcgcaagggcgctggtgctggaaggaagcaatcgaagaaagctgctaaggatcctaacaagccaaagagacctccaagcgctttcttcgttttcatgtccgagttcagagaacagtttaagaaggagcatcctaacaacaaatccgtcgctgttgtcngtaaagctggtggtgacaaatggaaatcgctgtctgatgctgaaaaggcccccttcgttgcacggccgaaaagaag

SEQ ID NO: 4131 - DNA, 294 bp, Glycine max
aggggcagttcaagtgcaatcaaattagttcattcactttgcgcagttccctacctctcctttcaagatgcagatcttcgtcaagaccctcaccggaaagaccatcacccttgaggtggaaagctctgacaccatcgagaacgtcaaggccaagatccaggacaaggaaggaattcccccggatcagcaacgtctcatcttcgccggaaagcagctcgaggacggccgtaccctcggccgactacaacatccagaaggagtcaacccttcagcttgtccttcgtctccgtggtg

SEQ ID NO: 4132 - DNA, 264 bp, Glycine max
  modified_base (46)..(46): a, c, g, t, unknown, or other
cccacgcgtccgcccacgcgtccgcccacgcgtccggcggaacganaccacaaacacggctacaccagattaacttctctgaagacatcgctgttaatgactcgtcggttttgtttgaggatggtcgtggtggtcacttcatctagtatctttaagttgtatgctacttgtaacacgatcttgtccttgatcaagaacatctgatgagcactgatgtatggtcatggagcaggtacgtacattgctttcgtcagcgttactagg

SEQ ID NO: 4133 - DNA, 417 bp, Glycine max
ggaacccttgcattctattcattcaagattcagcaagtgcgttttggaagcagagaccgaaatacttcgagatggcccgtacaaagcaaactgctcgtaagtcaactggaggaaaagctcccaggaagcagcttgcaaccaaggctgcacgtaagtctgcaccaacaactggtggtgtgaagaagcctcatcgttatcgccctggaactgttgctcttcgtgagattaggaaataccagaagagcactgagctcctaatcaggaagcttcctttccagaggttggttcgtgaaattgcccaggatttcaagactgatctgcgtttccagagccatgctgtgcttgcattgcaagaggctgctgaggcataccttgttgggctctttgaggacactaacttgtgtgccattcacgcca

SEQ ID NO: 4134 - DNA, 152 bp, Glycine max
gcatccctacatgggcgtgacgcagcaggatcagacgcttaggacccgaaactgcgaagtttcccgtaaatctggagagacacgagaagtgactcgacgagaagtacctagctggcagtggacagcgaatgaagcatctttctcgtgcgcct

SEQ ID NO: 4135 - DNA, 226 bp, Glycine max
cacataaggggttgtgtgtaattctgtatttatatgcaatagcgatgtagaaaaacacgttatgctgtttttgtatgaagggaatctgtatattggagatcagtctgacgcacctgagttgacttttgtcatttgggttacacggagttaactatatgtgattattccaaatatgccccaacaacacttccctttagacctctttttttttttttgtttctgtgat

SEQ ID NO: 4136 - DNA, 390 bp, Glycine max
gattccattctctaaaccctaaacgactctatctctcttcgttttgttcttccttgcgctcctcctcgttcgttcgttctccctcgcgtagatcggcaatggcggagaccgagacgtttgctttccaggctgagatcaaccagctcctcagtctcatcatcaacaccttctactccaacaaggaaatcttccttcgtgaactcatcagcaacgcctctgatgctttggacaagattagatttgagagtttgacggacaagagcaagctcgatgctcagccagagttgttcattcatattattcccgacaagactaacaattcgctgaccattgttgacagtggcattggcatgaccaaagctgatttggtaaacaacttgggtacaattg

SEQ ID NO: 4137 - DNA, 261 bp, Glycine max
cgggaatcataatcccgttgtaattcgacaaactgctctacaaccacacttcctcgatgtcaatgtcatgcgcactgtacctgaatagcacgtcgtttcgcctcacgcgccagtcgccttttccttttctccgccggcgcttcaatctacaggctttccgatcagtttcgccgttgagttctagcccctctgcatcactcttcgatctcagatggggcaagggaaggagttgattccatgacgttgagctgaacgtgcgcg

SEQ ID NO: 4138 - DNA, 333 bp, Glycine max
  modified_base (269)..(269): a, c, g, t, unknown, or other
  modified_base (287)..(287): a, c, g, t, unknown, or other
ggcctacttcatctctcttataatcacacacacacctaccttaatagctatggaaactggaggctttcacggctaccgcaagctccccaacaccaccgctgggttgaagctgtcagtgtcagacatgaacatgaggcagcaggtagcatcatcagatcacagtgcagccacaggagaggagaacgaatgcacggtgagggagcaagacaggttcatgccaatcgccaacgtgattaggatcatgcgcaagattctccctccacacgcanaaatctcggacgatgcanaagaaacaaccaaagagtgcgtgtctgagtacatcaccttcatcac

SEQ ID NO: 4139 - DNA, 284 bp, Glycine max
cagcaacattgatggcagcaacaagttctggcactcttaaagcaactcctttcctaggccaaggcaagggtgccaatgccaatgctcttacggatgttgtttccatgggaactgggaagtacaccatgggcaatgatttgtggtatggaccagacagagtgaaatacttgggacccttttcagctcagaccccttcatacttgaaaggagaattcccaggggattatggatgggacactgctggcttatctgctgacccggaagcatttgccaagaacaaggct

SEQ ID NO: 4140 - DNA, 165 bp, Glycine max
acgaaagggaataccaataagttatcctccaatagttttccaggtacctcacggtttcaacctcaggagtttggaatccaggcaacgtcccttatgggaaccaccagttctggcactcctaaagcaactcccttcctaagccaatgcaacggtgccaatgccaat

SEQ ID NO: 4141 - DNA, 396 bp, Glycine max
gaaagaaacagtgtttcatcatttgggtttcgcagaagagagagaaacccatttctagagagagaaactcgcagtcgcagacatgtcttccttcgatgccttcgccgacgacttgaacgtcaactcttcttccagtcgccagcacgacgatgacgaggacaacttctctggctacggcggctactcctccttcaccggaggattctccgccgacggagatgtcgccgtcgatcactccgccgccgcgtcgccggagatctacggcttcactgattcgaatcgcgcttactctcagtctcccttcgaatcggccaccgtagagaacgaaaacggaaacggatacggcgacggcgacggtgtttttgtctccgacggtccggtgcttcctccgccgac

SEQ ID NO: 4142 - DNA, 243 bp, Glycine max
aggaggatggagaaataactagtggatcttcttcaaaatctgccccatctagcgatgaagattagcatgaagaggaaagagagtcaaaatgagatttgttcatgattagaatgatgttgggtaatcaagcagttgaattggatgattgtcacagagaaaataatttccatgcaaggtgactttatcaagggaagttacgctctttgatcattgatactgggagttgcactaatgtgcctaatg

SEQ ID NO: 4143 - DNA, 386 bp, Glycine max
gaacgaagtttgcttgcgtgtatattcattttatcatcaaagttgaatctcagagaatgagaaacatcgacaagcatgtctggaagaggacagggaggcaagggtctcggaaagggaggagccaaacgacaccgtaaggttctgaaggataacattcatggaatcaccaagcctgcgattcgccgtctggccagacgtggtggcgtcaagcgtatcagtggtcttatctatgaagaaactcgctgtgttctcaagatcgttctagagaacgtcattcgcgacgctgtcacctacactgaacacgctcgccgcaagaccgtcactgccatggacgttgtttacgcgctcaagatgcacgggaggaccctctactgatttggcggtta

SEQ ID NO: 4144 - DNA, 372 bp, Glycine max
ggttcatctattttcatcatcacttccacacgtcctgtgccgagtacgattcccactcgcatcgtcatcatgattgggaccttactctggcatcattatcatctctttggtcacgcgaccttccgcattcacttttggccctgattatataactattactctcaagtaactcacagcaaacaccatttcacatcagtcaactcacgagaacgatcatcattgaaatcaatgagacatgcccggtgttattatatgtccagtgatagagtaaaatactgatgataattcattatattgaactgtatcatgttttctcccattatattattcttctctggcttacgctttggataatattggatcatcaagttt

SEQ ID NO: 4145 - DNA, 424 bp, Glycine max
ccaacgcgtccgtagggtgccaaaagaacaaagaagggggtacttccattttcacatcacttccacacgtcctgtggcgggtaggactcccgcatgcatcgtcatcatcactgggatcttactctggcatcattatcatctctttggtcacgcgaccttccgcattcacttttggccctgattatataactattactttcaagtaactctcggcaaacacgatttcacattcgtcgactcacgagatcgctcatcattgaactgattgagacatgcccggtattattatcatgtccactgctagagtagaatactgaagatactcatgtagtggaagtgtatcatgttttctcccattaattttttcttcactggtctaagctttggatattcttggatcatcaactttagtgatccgaagatg

SEQ ID NO: 4146 - DNA, 419 bp, Glycine max
  modified_base (399)..(399): a, c, g, t, unknown, or other
ggtccacccgttcgttagatctaacaaccacttatcccctttctccttctaacgagtgaggaaaaatggcgcgtaagaagatcagagagtatgactcaaagaggttgttgaaggagcactttaagagactctctggcaaggagttgccgatcaagtctgcacaaattaccgcatcaactgatttcactgagctacaagagaaggaaccctggctttcatcttctaaattggttgttaaacctgacatgttatttggaaagcgtggcaaaagtggtttggttgccttgaatttggattttgcacaagttgtttcatttgtgaaggagcgtcttggaaaagaggttgagatgagtggatgcaaaggacccataacaactttcattgttgaacctttcatcncacacaatgaagagttttac

SEQ ID NO: 4147 - DNA, 229 bp, Glycine max
cacactgagtatataaaaaataatctaagttcgattctcacataatacatccttggagaagagtgtgcaactttaagtgtgattaagtttcagatcaaagattaatcccataatcaactcaaagaaacgaaacttatgagaatactttagagtctcactggggaaccaagtcaaaaatatatattaaaagtttaccattttaaggcactaaaacctatcattaaggact

SEQ ID NO: 4148 - DNA, 354 bp, Glycine max
ggccgaagaccctaagatcacaggcgcagagcgtgatccattgacgaagatggtgcagcgtctcacctagcgcaagatgcacagctatgccaccaagtccaagcaacacaaggtcgtcaaaacccctggtgggaagctcgtttatcagaccaccaagaagagggccagcgggcccaagtgccccgtcactggcaagaggattcaggggattccacacttgaagcctgcaaattacaagagatcaaggttacccagaaaccgtaagactgtcaaccgtgcatatggcggaattttgtctggaagtgctgtcagggagaggattatccgagctttcttagttgaacagcaaaagat

SEQ ID NO: 4149 - DNA, 409 bp, Glycine max
gagatctgctgcttctcattgttgaaaagaaaccctagcaagtggagcaatggcagacgttgaagtcgatgtggcggcagcagcagcagcagggctgccgaagaagagaacgttcaagaagttcagttttcgaggcgtggatctcgatgcacttctcgacatgtccaccgatgaactcgtcaagatgttcagtgcccgcgctcgtagaaggttccagagaggcctcaccagaaagcccatggccttgatcaagaagctccgtaaagcgaaaagggaagctccaccaggtgagaagccagaaccagtacgcacccacctccgcaacatgattattgtgcctgagatgattggtagcattattggagtgtacaatggcaaaacctttaatcaggttgaaatcaaacctgag

SEQ ID NO: 4150 - DNA, 428 bp, Glycine max
gatgccgaaaagtagtaccaagatggcttcagttgtgtatctcctctttggcttccatctcattgttatcttgtcaagttccttacccgcaactagtgaagtgtttgcaaaacagtatccatccacagaacccgtggaagaaaaactcacccaactccacttctatttccataacaacataacgggggaacacccaactgctatgaaaactgttttgcctcctaaggggtccattcatggttttggggctacttacatgatggatgaccctctaactgaaggaccaagtccaacttcaaagcttgtgggaagatctcagggaatatacgctttggcttcacaacatgagcctgggttgctcatggtgacaaattttctcttcactttgggcatttacaatggcagcaccctcagcattcttggcagaa

SEQ ID NO: 4151 - DNA, 421 bp, Glycine max
  modified_base (367)..(367): a, c, g, t, unknown, or other
ggaagtaagggatcgagcctcggaggagggaatcgcagcgaagtccactatgccgaagcaaattcacgagattaaggacttcctcctcactgctaggaggaaggatgcacgctctgtgaaaatcaagcggagcaaggatgtggtgaagttcaaggtccgttgctccaagtacctttacaccctctgtgtgtttgattctgagaaggctgataagttgaagcaatcacttcctccaggtttaagcgtgcaggatgtgtgattcttactgctgtatgaagatcaggtttttctctggattttggggattcatagttagtaaaatggttcagagaattttcgtatttgttgttacattcgggatcatgtnagtattttgtttaagacggattcaacttgcttggggaatatgtggctagttgat

SEQ ID NO: 4152 - DNA, 408 bp, Glycine max
  modified_base (395)..(395): a, c, g, t, unknown, or other
ggtagttccaccgagtagcaacaatgtcgaagcgaggtcgcggaggatcggcgggaaacaagttccgcatgtcgctgggtctgccggtggcggcgacggtgaactgcgccgacaacaccggcgcgaagaacctctacatcatatcagtgaaggggatctagggtaggctgaaccggttgccgtcagcttgcgtcggagacatggttatggccaccgtcaagaagggaaagcccgatctccgtaagaaggtgctgcccgccgtcatcgtccgccagcgcaagccttggcgccgaaaggacggtgtttacatgtacttcgaagataatgctggtgttatcgtgaatcccaagggtgaaatgaaaggttctgctatcactggtccaattgggaaggantgtgctgatctgt

SEQ ID NO: 4153 - DNA, 395 bp, Glycine max
  modified_base (377)..(377): a, c, g, t, unknown, or other
gggaaaggcaagagtgagagagaaatggagaatgcggaggagatgatgcagcaaaacgacgaggttttgtcggttgaacttccagctccttccggttggaataaactgtttttccctaagaaactgggaacaccaagaaaaagtgagattgtattcattgctccaactggagaggagatcagtaccaaaaaacaattggagcagtacctaaaggcacatcctggcaatcctgtcatttcagagtttgactggggaactggtgagacccctaggcgatcagcaaggatcagtgagaatgtcaagtcaactccaccagcagatagtgatactccaaagaaacgagctcggaaatcatcaggattaaagaaggataacanagaaactgaatctgcatc

SEQ ID NO: 4154 - DNA, 367 bp, Glycine max
ggagagatgctaatgttgaacattggatcaatgtcgacgggggctagagtagttgctgtgaagaatgacttggcgaagttgcaacttacttcccctgtgtgcactagcaagggtgagaagattgcacttagtcgacgtgttgagaagcattggcgtcttatcgggtggggacaaatccaagctggaatcactcttgatgtcccccccgccccccatctgagttgaacactgatcacaagaaacaccagcagctataaaaaactgagatgaatttagatatgtgggaagggaggcaattgttgggaaacatttttgtgaagtggagaagaaaacgtttttttgattgttgtcttctattttgttttca

SEQ ID NO: 4155 - DNA, 383 bp, Glycine max
ggtcttggtttatctaacaatggaagttctcttttgggggcatctggggcctctgctgtttctaagaatgacggaagtggtttggcaatgcacgaggttgttgttgaaaccggggaagaaaatgaggaagtggtttttaatgcacactcagtgttgtttgagtttgctgatggaagttggaaggaacgtggaaaaggataactgaaagttaatgtttccagtgaaaccaatacagccaaacttcgaatgacgtctaacggaaattttacattgattttgaatgcacgtctctaccctgatatgaagctcacaaatatggacaacaacggtgttacttttgcctgcatcaatagtgccagcgaacggaaaagtggtctttcaac

SEQ ID NO: 4156 - DNA, 435 bp, Glycine max
agacgacagaaggggacaaaaaccaagtactacaagggaagaagaacttagctacaagctaaggaaggatcaaagagaatggctcaagcaatggcatcaatgactagcttacgtggttcctctcaggctgtgttggaaggtagccttggctccacacgcttgaatgtggggagtggaagcagggtggcctcagtcacacgtgcagggttcacagttagagcacagcaacaacaagtgaatggtggtgaggtacaaagtagccgtaaggcagtgctttcacttgttgctgctggtttgaccactggctcttttgttcaagctgtgcttgctgatgccaaacctatcaaagttggaccacctcccccaccttctggcggattacctggaacattgaactcagatgaaccaagagaccttaagctgccattgaaagat

SEQ ID NO: 4157 - DNA, 417 bp, Glycine max
gattggcattgccagatgcacttgttctctctgctgatctctgctccttcttccactctgtttcgattttccacttccaaggataagcatccttatgagttatttttctcggctggtcaaagccattttttagttcctggtggaatagcattttcaactatggcgctctatggaaccaccttatccttcaatggaatttcttctactaccaaggagtttaatatcttaccatgctcattcaccagtagctttcggaagctacatcatgtttgtctaccttcctttactccaaacagattagttttgggcaaaagctttggaagaggagaccaactgtgtcttttacctggtcatatttcaaagttgcaaatgggaagattgagactgggagtaaaaagtgaagactctgagagcata

SEQ ID NO: 4158 - DNA, 401 bp, Glycine max
  modified_base (384)..(384): a, c, g, t, unknown, or other
gacacacagtgaatgaaggaagagagtatcatccatggcggccaccagagcagtaaccattgccagcaactccacatgctctctgcttgcaaagaaaacctttgtgggtggcactgctctttccctcaacaacctcaaattttgtcgtactaggaggtcttacacctgcagagccatctacaatcccctggttgtcgtcaaggaagaaggccaacccgaaacctttgattatagagttttctttgttgacaaatctggcaagaaggtttctccctggcatgatattcccttgcggttaggtgatgatatctttaacttcattgtcgagattcctaaagaatccagtgcaaagatggaggttgccactgatgagtctttcactcncataaaacaagatacaa

SEQ ID NO: 4159 - DNA, 388 bp, Glycine max
gaaccaagtttgcttgcgtgtatattcattttagcatcaaggttgaatctcagagaaaaagaaacatcgacaagcatgtctggaagaggaaagggaggcaagggtctcggaaagggaggagccaaacgacaccgtaaggttctgagggataacattcatggaatcaccaagcctgcgattcgccgtctggccagacgtagtggcgtcaagcgtatcagtggtcttatctatgaagaaactcgcggtgttctcaagatcgttctagagaacgtcattcgcgacgctgtcacctacactgaacacgctcgccgcaagaccgtcactgccatggacgttgtttacgcgctcaagaggcacgggaggaccctctactgatttggcggttaga

SEQ ID NO: 4160 - DNA, 178 bp, Glycine max
gtaaatgaaaattaactcggtattttatcaatctattttctactctctttttagaatttgtaaagtagaaaaatgggaatttaaaaatattagaaaaaaagaaaaaaaaattgaaaaaaattataaaattataatagatatatataatgaaatgattacattaaaacaatttttatac

SEQ ID NO: 4161 - DNA, 366 bp, Glycine max
gacattacttgtttttatttttcagcatttgaagtttcactctcttcagaggaatgatgacagcatgcaaatgcatcaaacaactagtagattgatgaatctttaggtcacattttcagtttcactctctcttcttccatggaattgtcagattttaggacaagagcttccatgtttatcagattgtgatctcaaaatggggaaatcaccaggaaaatggatcaaaatcgtactatttgggaaacagtcatccagatcaaatatttcaaagggaagagagatgattgtcaataaaaatgcagttgttgcttccaacgagttggaacatggtttgtccttagatccaacccccaatgagattgctac

SEQ ID NO: 4162 - DNA, 402 bp, Glycine max
  modified_base (370)..(370): a, c, g, t, unknown, or other
gacaccaagtcctgctcttcttccagagcaacaacaaacaaaccctttctttctggcttcagtttttgcagtgaaaatggcggtgactttaacatcaaccctctttatggctttgctatttgctgcttcagcttttgctgctcttcagcctagagtacctgaagcttaccttcaaaatggaaactttgaggagcagccaaaccccaaaaacctccagaaaacaaagctcatggggaaatattctttgcccaaatgggaagtcaatggtctggttgagtatgtctctgggggcccccaacctggaggcatgttcttcccagtgactcatggaatccatgctgtgaggcttggtaatgaggcctcaatctcncaaaatatcaaggtcaaacccggtcaactgta

SEQ ID NO: 4163 - DNA, 399 bp, Glycine max
gctccacaacacagaacaaaatcaaagacaaaaaaaaacccttagccaacacaaccatcatggccacctctgctattcagcaatcagcattcactggtcaaactgctctgaagcagctcaatgagttcgtccgcaagaccggtggcgccggcaaaagtcgcactaacatgcgccgcaccgtcaagagtgctcctcacatcatttggtataggcctgaccgtcccaagtacttgggtccattctcggagcagattccatcatacctgaccgtagaaatccctggtgactaccgatgggacactgctggattatcaactgaaccggaaaccttcgccaggaaccgggatctggaggtgattcacagcagatgggcaatgcttggtgcccttggatgcacct

SEQ ID NO: 4164 - DNA, 177 bp, Glycine max
tcagatgatgttgatcacgtttagtgcactcctcaggcttcactttgcattgtgcacagacatcaagcttctgatgacacacactcttcttcatattcttcttcatcatcgtgtgcttgttcggattgtgactaacatcatcgtgtacgcgagcattgctattgtcggcaatgtgtg

SEQ ID NO: 4165 - DNA, 66 bp, Glycine max
ctatttgaatttaaagacatgatcttttacttcattcttcaatgaagatatcttgagatttttcac

SEQ ID NO: 4166 - DNA, 363 bp, Glycine max
gatagcaaaacttcagcaacccttttgcatctgatctaagaatcccaacctcaaatacccattttttgtcatttcatgatctaggttatagttcgtgaaaatgacgaggatgacccgtgattttggggatactatgcaaaaagatgcagtgccggcggtgtcggctgatataatatttgcttctcttcggtttcctaattacaaaatcggagttaacaatcagatcatggagacaaaggatagtccaaaagtgctatctatgaaggaggttgttgcgcgagagactgcacagctgttggaccagcagaaacgtctgtcggttcgcgatcttgccagtaaatttgagaagggtttggcagctgc

SEQ ID NO: 4167 - DNA, 300 bp, Glycine max
gatagcaaaacttcagcaacccttttgcatctgatctaagaatcccaacctcaaatacccattttttgtcatttcatgatctacgttatagttcgtgaaaatgacaaggatgacccgtgattttgaggatactatgcaagaagatgcagtgccggcggtgtcggctgatataatagttgcttctcttcggtttcctaattacacaatcggagttaacaatcagatcatggagacagaggatagtccaaaagtgcgatctatgaaggaggttgtttcgctagagactgcacagctgttgga

SEQ ID NO: 4168 - DNA, 420 bp, Glycine max
gacagctcttggctttagcaaattccaattcccaattcccaattcgaaacccttattcctttcaaagaaccaaattgagtgatcgtgatggcaccaaaggcagagaagaagccagcggagaagaagcccgcggaggagaagaagtcgacggtgggagacaaggctccggcggagaagaagccaaaggccggaaagaagcttccgaaggagggaggcgccggcggagaagggaagaagaagaagagaaacaagaagagcgtggagacatacaagatctacatcttcaaggttctgaagcaggtccaccctgacattggtatctcaagcaaggccatgggaatcatgaacagcttcatcaacgacatcttcgagaagcttgcccaggaatcttctagacttgcccgttacaacaagaagccc

SEQ ID NO: 4169 - DNA, 391 bp, Glycine max
ggagttcgatccttttccgatgtacggaaccgagaataaccgagatgattcggagcgaacggcgttcagaagagcagagaagaagtacaagctcgacgacgactacaatgcttcttccaagaacgaacagaaagaacaacctaaacccgtggacttagcggaggtccttgacgttagatctagtcgagaatgctatcaccaaaacgctgtgcttccttcgggtgttatcgttcttcacgacaagttcacgtctccggtttttgctttacaaaatcgcccaggcttttatttgaatcctggggcattaagcatagagaaacaatgtagtttgataacggacagtttgactgattttccgcagccacctaacagaacagatcacaatgccttg

SEQ ID NO: 4170 - DNA, 57 bp, Glycine max; identical to SEQ ID NO: 2337

SEQ ID NO: 4171 - DNA, 388 bp, Glycine max
ggtaatttgtagaattgaagagtaatttgtgaagccttcctccatcacaagtcttcaactagggtttcatatcaggctcatgagtgtgcccttcactcctatcgattatcaaatagcttcggtgatcatcataacgaactccacatttgtttgtttatcatttccatgctcgtatcattgtctaacaccagcaacaatgtcactggggtcgacttcacgttcagaagataatttgatcgagaagagtatctagaacgagcacgggagcgcgagagacacgatgatgagggtctagcgaagactatagcgatatgtccgcccgtgcagaggaatctcttgaaacatacacattatcaagtggaccttgaatcccgcttgggcaagactc

SEQ ID NO: 4172 - DNA, 403 bp, Glycine max
gacacactcaaaccatcccttttattgaaatcctcaagcttcaatttgctttgtgctcactcatctatctattataaccaaacactcttcttcatattcttcttcttcttcttgttcttgttctatctgtgacgagcatcatggcctcgagagcagtgctattgttggctatgtgtgtgcttccggccatggttgtggccattcgcccagcaaagaaccctttttgcgtgaagggtcgcgtctactgtgacccttgccgtgctggttttgagacctcagcaaccacctacattgccggtgctgagattatgttgcaatgcaagagcagggttagcaacgaggttgtgtacaccaagaaggggtacactgactcaactggagcatacacaatgtacgtggacga

SEQ ID NO: 4173 - DNA, 183 bp, Glycine max
agcgtgaacttcgacctgaaaagacggatttgagcagaccatgtccgaatctgctgacccacatccacgtttgtacttcgtacaccagatcgtggatcactcactcactgatgtacaactttccgaactctttgccgactatggtacaactgactcgtgcaatgtcatgcgacgaccgactgg

SEQ ID NO: 4174 - DNA, 183 bp, Glycine max
gtcatagcttcaacaaaatggagaggaaaaaaaaaggcttgtcacagcacatgcaaataagtataatttcgaaagctccatctttcaccctctttaagtactagttagaagcctagtatgtcttacatctgatatgttctgaaaaatggacaaaagtaactttgtttcattaggtattttttc

SEQ ID NO: 4175 - DNA, 98 bp, Glycine max
ccaacaaaaaatgggcctttgaaactaaagaaaaacaaactaagattggcccaaactgaagaaatacaaaaaaatggcttgagatcaagcctaaccac

SEQ ID NO: 4176 - DNA, 409 bp, Glycine max
gactccactcacaactgaaaccaaaactgaaaaaaaaaacaaacaataccataacatggcttcttccaccatcacctcctccttcctaacatcacccccttcatctctcttcaacaaatcatcatccccttccttccatgccacccctactctccgccccctcgcgccacgcgcctccatgcccgcctcagcgccgccctacgacttcggatcgttccggttcgatccgattagagagtcgattgtgtcgcgcgagatgacccgcaggtacatgatcgacatggtcacccacgccgacaccgacgtcgtcatcgttggcgcgggctccgcgggtctctcgtgcgcctacgagctctccaaaaacccctccatcaacatcgccattgttgagcagtccgtcagccccggc

SEQ ID NO: 4177 - DNA, 428 bp, Glycine max
gggaacgaaagagaatggagaacagggtaatattacaggaatggtttgaccgcgttgactcggagaaaagtggaagcataacagcggtacagctgaagactgctcttgctgtgggcaacctggaatttccgctctcagttgttcagcaaatgatcaggatgtacgatttcgacaggaatggtactatgagctttcaagaatttgttgcactcaacaacttccttcttaaggttcaacatgcattttctgatctagagaggggtcgtggttttcttgtacctgatgatgtatttgaggctttgggaaaaattggtttcatgctggattctcctgctttttactctgtctgcgagagctttgatcaaagtaaaaatgggaagtttcggctggatgacttaatatcaatctgtatattcctacaatcagca

SEQ ID NO: 4178 - DNA, 365 bp, Glycine max
accttcggcacctcatgttatcagcattggacaacttatggaatcggcattagaggtagctggtcaagtggcaggaacagctatctccacttcgccccttccgtacaacaccatggctagccagtgtgaatcactcggtacatgtgcaaggaaaaagctttcaaattggctggcctttgagaatcattacagccaagcacttgatgataaatcgtttttggcaattgctgatattaggaactcagcacctgagaaggtttgatgtgcccttatttgtcattattaccaggatacagactctcttctttccttcactcaatgcccactgtactaccactatcgatcaatcgtcgttatttttagat

SEQ ID NO: 4179 - DNA, 420 bp, Glycine max
ggagctgacacatacaaacatccatcatcattattattttactccgaacgagttgacaccgattccactcactcaaccatgagccgattcaggcgttttgagctcatagaacaaccacctttcttccactcctgctactctttcccttccttcgtcctccaagactcactctctctcgacctcgacctcttgccacttcccagccacttcgacgctttcgcagatctggtgcacgcgccgtcgttcgcttaccggcgcgtggagaggcatctcgagaatgagttgcgtttgcagagcctctctgaccgtgtggcggagctggagtcgcggttcgaccgtgtgctcggcggagatcggaagtacacgtggacagcggagatcaagggagcggagaagaacgggttcgataagaagtacaag

SEQ ID NO: 4180 - DNA, 187 bp, Glycine max
gggcatagcaaaatcgtgtctccaatttaatcaccattgtacaacccaattcccttcgtcgttttcgattaagagagcaatggcacgtaccaagcaaaacgctcgcaagtccaccggaggaaatgctccgaggaagcaattggcaaccaaagccgctcgcatgtcagccccggtcagcggcggagtg

SEQ ID NO: 4181 - DNA, 62 bp, Glycine max
cgggatgctttcttgagtggtcgttctgcagctatttgcttgatggctgctctctccctttg

SEQ ID NO: 4182 - DNA, 415 bp, Glycine max
gatgcttcacaattaatagtgctattagattcttaggaactttactccttcaattaattatttatgcatttggtacattatacatgcaagctgtaactagtaaaaaaaaattgaatttgaaggaggaggtgaaggctgaagtgtggagaaggattagggtttgtgtttatatatttagatatagaatagcagaaaatttggattgtgagggaaaaaatgggtagcgaagaggattcgattgagcaaagcgttgcgtcccgtcgcgaaagactgctagctctcagagccgctcaggagttgtcgagtgttcccgaacctgaacctaacggcaacaaggacgatgataatgaagaagatcaagaacctcaagaaatgaagttccgtaactacgttcctcacgacaaaaacctccagg

SEQ ID NO: 4183 - DNA, 388 bp, Glycine max
caggggtgatttgagaggatcgcgagagggacggtagcagagattccgtgagttgcacaaatgaaaacaaatctttctgcagagaccatgaacatcccggacggcgtgagcgtcaaggttaatgccaaggtcatcgaaattgagggcccccgcggaaaattggtgcgaaacttcaagcacttgaatctcgattttcagctcatcactgacgagaacggtaaaaggaagctgaaagtggaggcctggttcggttctcggaaaacatccaccgccaatcgcagcgcactgagccacgtggagaatctgatcaccggcgtcaccaaaggctaccgctacaaaatgaggttcgtttatgcccactttcgcatcatcgcaagcatcggtaacg

SEQ ID NO: 4184 - DNA, 395 bp, Glycine max
gaaaggtctcgtctttgacaagaaggtcagccacgccgccgggggacccacccgcatggagaacgccaagatcgccgtcattcaattccagatttcgccgcccaaaaccgacatcgaacagagcattgtggtgagtgattactctcagatggatacgattctaaaagaagagcgtagttatattctcagcatgattaagaagatcaaggccactggttgtaatgtgttgttgattcagaagagtattttgagggatgcagttactgatttgtccttgcattaccttgcaaaagctaagattttggtcattaaggatgtggagagggatgagattgagttcattaccaagacactgaattgtttgcccattgctaacattgagcattttcgcactg

SEQ ID NO: 4185 - DNA, 355 bp, Glycine max
atagcaaaatcgtttctccaatttaatcaccattgtacaacccaattcccttcgtcgttttcgattaagagagcaatggcacgtaccaagcaaaccgctcgcaagtccaccggaggaaaggctccgaggaagcaattggcaaccaaagccgctcgcaagtcagccccggcgaccggcggagtgaagaagccccaccgcttcaggccaggaacggtggctctgagggagattcgaaagtaccagaagagcaccgaacttctgatccgaaaactcccattccagaggctcgtcagagaaatcgctcaggatttcaaaaccgatctccgctttcagagcagcgccgtttcggctcttc

SEQ ID NO: 4186 - DNA, 321 bp, Glycine max
aatttcgaagttttatattatgttttggttttattgtaaaccaaaaaaaacccctcctactttctaataaaaaacatatgttttaaataaattttgtgactactattaattttgacacacatcccttacttacatttaatggttcaaacaattctactcaactttaaaataaatgagcccttagattatacatatttatcatgcaggaacaaccagctatcattttacattgaactagaaattcatttagaagatcaaagacaaaattttccgattaaaacgtacttaaattgaagaggggttgttggcattgtgcaccac

SEQ ID NO: 4187 - DNA, 384 bp, Glycine max
gatccaactctctaaacaacacattaacctttctcattccccatctcctcaccttattcagccactgctaatttctagggttccgaaatggacgctggcggaaagatcaagaagggcgccggaggaagaaagggcggcggccctaagaagaagccggtttcaaggtccgtcaaggccggtctccaattccccgtcggaagaattggccgttatttgaagaaaggaaggtacgcccagcgtgtcggtaccggtgctcccgtttacttggccgcagttctcgagtacctagctgctgaggtgcttgagttggctgggaatgctgcacgtgacaacaagaagaacaggattattccgagacatgtgctattggctgtgatgaacgat

SEQ ID NO: 4188 - DNA, 416 bp, Glycine max
atatcaataagcggaggtgatcaccatttatatagtctgtattctccttgcctgttggacatgtttagattcttttgtagaagtttatgtgagaaagaaattcgaacagaaattgcgtatcaagactttattacagattactctttatgcaaaaaaaaaaaaaaaaaaaaaaaaaaaaaaaaaaaaaaaaaaaaaaaaaaaaaaaaaaaaaaaaaaaaaaaaaaaaaaaaaaaaaaaaaaaaaaaaaaaaaaaaaaaaaaaaaaaaaaaaaaaaaaaaaaaaaaaatttaaaaaaaaaaataaaaaaaaaaaaaaaagggggcgccccaaaaagtttacagttttttttacggggtgtgagggtttaaaactcctttaaggggggcccaaattttatatagggggcgggtttttta

SEQ ID NO: 4189 - DNA, 411 bp, Glycine max
ggacctatgtcaaggaataatagcttcagtacaactgcaaatagtgattcttctgctgctggtggcaacaatggattaaaccacagaacatctgagatgccacaaaatctacatttgcaagatgtggttcaggatattggcaatgaattcacggataatcccttccttaacagtgatcttgatgataacatgggttttggctggaaggcacgactaacacaatcttggacatgaaatcggcatatcatgtgttgatgaagtgtttatcttattatctttgtacaggacactttaaatagatgctgtttttttccttgtttttccctgttattttcttgatggaatttgtttggactcggactcggactcgagtaggtttttagagattttatttgagggtttttgtcctgc

SEQ ID NO: 4190 - DNA, 393 bp, Glycine max
gacacttactagtagtaagcatggagtcctcaaagatctatgcttacctcttcctctgcatgatctttctctcttccgccactcccattctcggttgtggctactgtggcaaaccccccaaaaagcacaagcctggtaaaacaccaaagacacccaaaacacccgttgttaagccaccagtcaccatccctcccattaatgttcctcccgttgttcttccaccaatagtgaagcccccaggtattctcgctccaattccaattattaacccaccaaccacaccagggaagggagggaacactccatgcccaccaccaaagtctcctgcgcaggctacgtgccccattgacacgctcaaacttggtgcctgtgtggatcttcttggagggttgg

SEQ ID NO: 4191 - DNA, 388 bp, Glycine max
  modified_base (340)..(340): a, c, g, t, unknown, or other
  modified_base (360)..(360): a, c, g, t, unknown, or other
  modified_base (364)..(364): a, c, g, t, unknown, or other
ggtgccttacatcaaacattattgagtagtattaagagcattgcaatgatgatagctatctctgcaacttttatgattttcttcttgtgttcgccatcagtggctatactaatcatcaggttgccgctaccctcaccagtgacaggccctgagtccgtagcattcgaccggaacggtggagggccatatgtcggtgtttctgatggaagaattctcaaatatgctggtccaaccgatggcttcaaggaatatgctttcacttcaccaaacagaaacaagacaatctgtgatgggcttgctgatttctcagaactccaggcagcatgtgggatgccattangattgcgttttcaacatcanacantcgaactatacgtagctgatgctt

SEQ ID NO: 4192 - DNA, 378 bp, Glycine max
ggttgagtgtagaacgctgctgccgaagcccttccggaaccctaaggtaagtgagtaatcagtggttgagaatggtggagaaggcgaagggtagaaaggaggaggtggttacacgtgagtacaccattaacctccacaagcgcctccatggctgcacatttaagaagaaagctcctaaagctattaaggagataaggaaatttgcccaaaaggccatggggaccaatgatgtgagggtggatgtgaagttgaacaagtttgtctggagccagggaatcaggagtgttccaaggaggattagagtaagaattgctcgcaagagaaatgatgatgaagatgccaaggaagagctgtactctcttgttaccgttgttgaga

SEQ ID NO: 4193 - DNA, 362 bp, Glycine max
gagattcgtcttcagtttcagcctttctctcccactcactcactcacaggtaagcaatggcgggaaaaggagggaaggggcttcttgcagcgaaaaccaccgcggcgaataaggacaaagacaaggacaagaagagacctatttctcgctcttcccgtgctggaatccagtttcctgtgggacgtatccatatgcagctgaaacaaagggtccaagccaatggacgtgttggggcaacagctgcagtgtacttagcctcaattctagagtatctgactgctgaagttcttgaacttgctgggaatgcaagcaaggatctgaacgtgaagaagatcacaccaaggcatttgcagctggctatc

SEQ ID NO: 4194 - DNA, 419 bp, Glycine max
ccatcaagccccaaactgacagatgggtcttccctgagaccaacaccggtatcattgtcttggctgagggtcgattgatgaacttgggatgcgccactggacaccccagttttgtgatgtcctgctccttcaccaaccaggtcattgctcagcttgagttgtggaaggagaagagtaccggcaagtacgacaagaaggtttacgttttgcccaagcaccttgatgagaaggtggctgcacttcatctgggcaaacttggatctaagctgacccagcttagcaagtcccaggctgattacatcagtgtgcctgttgagggtccatacaagcctgctcactacacgtactaagtgattgagatgatcaactgaaaagtgagtgatggaaagacaaaaatcggttttatcaatcggatttga

SEQ ID NO: 4195 - DNA, 418 bp, Glycine max
  modified_base (328)..(328): a, c, g, t, unknown, or other
  modified_base (400)..(400): a, c, g, t, unknown, or other
gggagggttactttggggtttctctcgctaaccaagaaggaactaaggttttacagaatacaagctctctctctctctcgtcggttttcgtcaatcaaatccaatccaatatcaaatatgagtcgtcatcccgaggttaagtgggctcagaggcttgacaaggtctatatcacggtgcaattggctgattcaaaaaatgcaaaagtggatcttacgccagatggtatttttaccttctccggtagtgctggtgctgaagaccatcagtatgagctaaaactggagctctttgataaggttaacgttgaggagagcaaaattaatgtangagagcgaagcatattcattgtagtgcagaaggcagaggatggatggtggaaaaggttactgcgtggagaangcaagactccacattatg

SEQ ID NO: 4196 - DNA, 398 bp, Glycine max
ggcaacgagacctaggaagcacgacgacaacaacactcgtcctcacaccgactgccaccgcgtccaaagatgattgatgatcaagatctgggtttctttgccaattttcttggcgtcttcatctttgtactggtcatagcgtatcattttgtcatggctgacccaaagttcgaaggaaactaggaatgtagactgaggtgctttgcaaatggaaatgaatttgatgcaatcaagaactgtagtttgggaatgtgaacgttaagcttactaaaactttcataaacatcaaaggagcataacatttcaattttcgctatacttatgcgtgctcccttaagttatgttttgcagttaaggaactttcgttgatagactaatgaaaacactgaatttgcttt

SEQ ID NO: 4197 - DNA, 165 bp, Glycine max
atactactcaggagaaactacatattctcaacccatcattttccagaaaactcaaatcatcttccttaccaaatgcctcctaagtatttacgtaactggttgttgagtccattaattttgtctgcaccttggactggaacgatacttcctccccccttacatttt

SEQ ID NO: 4198 - DNA, 243 bp, Glycine max
cgggggttcaaaccttcatcagctatgcgattgtctccttgtgcgaacaccacttcaatgagttccggatcgggttcacttttgtggttccggaacggtcttcggatccatgacaaccccgctctcgaagtcgcttcgcgtggagcctctcatctctaccctgtctttgtcatcgacccgcatttcatggaacccgacccgaattcttccgcacccggatcctctcgcgcgggtctgaaccgc

SEQ ID NO: 4199 - DNA, 363 bp, Glycine max
gaagaaattggtctgtttatggtggagatcatgcatatgcgacacaaatttgatgttgacacacgcttggttgagggtattgtccttgatcatggttctaggcaccctgacatgaagcgacgtgcagaaaactgctatatcttgacatgtaatgtatctttggagtatgagaagagtgaagtaaactcaggctttttctactcaagtgcggaacagagagaagctatggttgcagctgaaagacgacaggttgatgaaaaagttaaaaaaatcattgaactgaagaataaggtttgttctggtaatgatagcaattttgttgtcctcaatcaaaaaggaattgattccccatctctggacctg

SEQ ID NO: 4200 - DNA, 146 bp, Glycine max
gaattgcaatcaaattagttcatgctctttgcgcagttccctagctctccgtgcaagatgcagatcgtcgtcaagaccctcaccggaccgacgatcacgcttgaggtggacagctctgacaccatcgacaacgtcgcggccaagat

SEQ ID NO: 4201 - DNA, 276 bp, Glycine max
gattcagagttgcatcgactgaaacccctagaaaagacgccactttctctctttcactagctccgttcaagttctaactaagcacttcgtcgctgcttttgcttctgtaggagatgtctctgcgagtgctgaaccctaacgccgaagtgctgaacaaatcggcggcacttcacatgaacatcaatgccgccaagggtctgcaagatgtcctgcaaaacaacctcggtcccaaaggaaccatcaaaatgctcgttggtggtgccggtgatatcaagc

SEQ ID NO: 4202 - DNA, 442 bp, Glycine max
  modified_base (87)..(87): a, c, g, t, unknown, or other
  modified_base (411)..(411): a, c, g, t, unknown, or other
  modified_base (430)..(430): a, c, g, t, unknown, or other
gacacaactaactaagaaagtcttccatagccccccaaaaatgaagagcaccatcttctttgctctctttctcttttgtgccttcancacctcatacctaccttcagccatcgctgatttcgtgctcgataatgaaggtaaccctcttgaaaatggtggcacatattatatcttgtcagacataacagcatttggtggaataagagcagccccaacgggaaatgaaagatgccctctcactgtggtgcaatctcgcaatgagctcgacaaagggattggaacaatcatctcgtccccatatcgaatccgttttatcgccgaaggccatcctttgagccttaagttcgattcatttgcagttataatgctgtgtgttgaattcctaccgagtggtctgttgtggaggatctnaacagaggacctgctgtcnaaattggtgaga

SEQ ID NO: 4203 - DNA, 317 bp, Glycine max
gacacttactagtagtaagcatggagtcctcaaagatctatgctcatctcttaaccttcaagtttttaaagtattaagatggcagagacattcctatttacctcagagtcagtgaacgagggacaccctgacaagctctgcgaccaaatctccgatgctgtcctcgacgcttgccttgaacaggacccagacagcaaggttgcctgcgaaacatgcaccaagaccaacttggtcatggtcttcggagagatcaccaacagggccaacgttgactacgagaagatcgtgcgtgacacctgcaggaacatcggcttcgt

SEQ ID NO: 4204 - DNA, 200 bp, Glycine max
aaaaggggacaatggggtgtcgctgcaggttggtttgagtgcgtagagcatacgtcattgcgctcacgatcttttgtgcgaacaggaccgtttggacgtcctttcaggcatcggtgagttcgtgctcgagagcgtctgtagcattctgtgagctggtgagatctacgagctcttgtcagagatgtgatcacttggtggag

SEQ ID NO: 4205 - DNA, 91 bp, Glycine max
aagacgggtgggttaagcaacagacaaaaggaacacaagaagaaaatgcccttggctgcaaagagagataaggtatcaagaactcggatag

SEQ ID NO: 4206 - DNA, 442 bp, Glycine max
gacacttactagtagtaagcatggagtcctcaaagatctatgcttacctcttcctctgcatgatctttctctcttccgccactcccattctcggttgtggctactgtggcaaaccccccaaaaagcacaagcctggtaaaacaccaaagacacccaaaacacccgttgttaagccaccagtcaccatccctcccattaatgttcctcccgttgttcttccaccaatagtgaagcccccaggtattctccctccaattccaattattaacccaccaaccacaccagggaagggagggaacactccatgcccaccaccaaagtctcctgcgcaggctacgtgccccattgacacgctcaaacttggtgcctgtgtggatcttcttggagggttggttcacattggtttgggtgaccctgttgcgaaacagtgctgccccgtgct

SEQ ID NO: 4207 - DNA, 424 bp, Glycine max
  modified_base (370)..(370): a, c, g, t, unknown, or other
gaagtaagttcatttgactctcacaaaccttgcatccatccacacatggctggcatgaactctagcgtattggcctgtagctatgccatatctggtgcagcatgctccgagctcaatgggaaggtcacttccgtggcctctgttgcatcctctggctacaagttgccattgatcaaatgtgaggccagagttcccaaagccaaagaatctgaaggaaggagaggtgcccttgttctcttggcagctacccttttcatctctgcagcctccaattcttttgccaatgctgggatcattgatgattaccttgagaggagcaaggctaacaaggaattgaatgacaagaagaggttagctactactggagcanactttgcaagagcatacaccgtggaattcggtagttgcaagttccctgagaaac

SEQ ID NO: 4208 - DNA, 406 bp, Glycine max
  modified_base (400)..(400): a, c, g, t, unknown, or other
aacaacatatattaaaaaaataacaacatatattaaaaaagtcagaataaaaaaacaaatcctttatagtatttcttgtaataaatgtgatttttggaatagggataaataaaccatggaaaaatctaagcgactctttatgaaatccaagcgatcttttcgtaggcgtttgcccccgatccaatcgggggaccgaattgattataaaaacatgggtttaattagtcgatttattagtgaacaaggaaaaatattatccagacgcgtaaatagattgaccttaaaacaacaacgattaataacaattgctataaaacaagctcgtattttatctttgttaccttttcttaataatgaaaaacaaattgaaaaaagcgagtcaaccgctagaactactacntttaag

SEQ ID NO: 4209 - DNA, 245 bp, Glycine max
gcaacataggtcatcgaaaggatctcgaagacccaccaacgcacgaaagccgggatctttcagaaaatggattcctattcgaagggtgcataaccgcatggataagctcacactaacccgtcaatttgggatccaattcggttccttaggacgtatcgggaaggaattttggaatgtacatatatcgattcatacagataccgaaaacaaggttctctattgattcaaacgctctacctaccaga

SEQ ID NO: 4210 - DNA, 372 bp, Glycine max
ggaccaaaccattttagtttagttttgaatcactggtgagggccttccatggcttccgcttgtgcttcctctgcaattacagctgttgccatctctacgccgagttccgggcagaagaatcgatcaggaagttgttttcttaatggaaggaaattgagggtgaaaaacgaaatagcagcacttgtaggacgatcgatgggcactacagtttgcacagttgctgagcctgacagacctctatggttcctacgcagcagacctcctcgatggcttgatggcactctacctggagacttcggctttagaccacttggtcatggatctgacccagacagtctgagatggacatgtcatgcagagctagtgtactgc

SEQ ID NO: 4211 - DNA, 254 bp, Glycine max
ggaactcataatattcatcactagaagtgttggatgcatttctatttctaactaattattgtgcttattattattgttgagaaagaaaagaatggcaaagttaataaaattctttgagttgaacacaggggccaagattccttctgttgggttaggcacttggcaagctgagcctggtgttgtagccaaagctgtcaccacagccattctggttggatacaggcatattgattgtgctcaagcgtataacaatc

SEQ ID NO: 4212 - DNA, 402 bp, Glycine max
gaatcataatcccgttgtagttccaaaaaatgctctacaaccacacttcctcgatgtcattgccttccccattgtacctgaatactacgtcgtttcgcctcacgcgccaatctccttttccttttccccgccggcgcttcaatccaccggctttccgatcagtttcgccgttgagttccagcccctctgcatcactcttcgatctcagagggggcaaaggaatgagtggattccatgacgttgaactgaaggtgcgcgactatgagttggattagtacggtgtggttaacaatgcagtttatgctagttattgccagcacggtcgtcatgaactcttgcaaaacattggtattaattgcgatgctgtggctcgcagtggtgatgcattggcattgtctgaac

SEQ ID NO: 4213 - DNA, 408 bp, Glycine max
ggttgttcgctttgcaattttttcttctagaacaccgcctcagccacactacaaagacgcgacgacgcacagaaggcgaagaagctaaacgacgacgcagcgttatggaagacgaaatgtacggcgtgtcgtccacgacggagtactcggacggggcgctgatgacgccggagaacatattcccggcggagtaccacagcttcctaatgtcctccgccgcccggattccgatgttcggatccgacgagcttctctccgccgtcaccgccggcaacgaaaccgaaccctaccctggcgccaccatcgcaccggaaattcagcgccaaaacgacgcctcctctctcatcaaagccaaaatcgcctctcaccctcactaccctcgccttctccaagcctacatcgattgcc

SEQ ID NO: 4214 - DNA, 427 bp, Glycine max
ggcagcagaagaacaagtagttgagaactaagaaggagaagcaaatggcttcctcaatgatctcttccccagctgttaccactgtcaaccgtgccggtgccggcatggttgctccattcactggcctcaagtccatggctggcttccccaccagaaagaccaacaatgacattacctccattgctagcaacggtggaagagtgcaatgcatgcaggtgtggccaccagttggcaagaagaagtttgagactctttcctacctgccagaccttgatgatgcacaattggcaaaggaagtagaataccttcttaagaagggatggattccttgcttggaaatcgagttggagcacggtttcgtgtaccgtgagcacaacaggtcaccaggatactacgatggacgctactggaccatgtggaagctgcc

SEQ ID NO: 4215 - DNA, 400 bp, Glycine max
aacaacatagattaacgcaatagcaacatatcttccaaaagtccggcttcagcaacactaccttgacgcgactacgcgcagaaggcgaggaatctaaacgacgacgcaacgaaaccatggaaaaatctaagcgactctttatgaaatccaagcgatcttttcgtaggcgtttgcccccgatccaatcgggggaccgaattgattataaaaacatgggtttaattagtcgatttattagtgaacaaggaaaaatattatccagacgcgtaaatagattgaccttaaaacaacaacgattaataacaattgctataaaacaagctcgtattttatctttgttaccttttcttaataatgaaaaacaatttgaaaaaagcgagtcaaccgctagaactaatac

SEQ ID NO: 4216 - DNA, 385 bp, Glycine max
ggaaactcaactttcaatattgcaacgctttaccgcattcatataaattacacaattgatcgaggtgctctgaaagtgagcatagacatttcagaggcatagtatcgctaatcaaactcactagctcaccacatttgagagaatactcaataccatgtgtcgagcacataataggaatgtacggcactaatattccatccactgtgacgggtaaagaaccatatatacagagaagatgatggtggctgcatgagtgcgagtgagggagtatgcggtgagggatctcttacactggtcgtttcactatattagtacacggtcagattacctatgtgatcactatcttacgtacttttgcaatttgatcccttaacttttgaaaaat

SEQ ID NO: 4217 - DNA, 403 bp, Glycine max
ggtgctccacctttatcttgctgagactctgatcagttagagttgcattcatcaatgactatcacttatttacctccggagctgcatgaaatcatgcaccgaatccgactcggattccgactgggacgattcggaagaagatcccgatttccacttgctcgtagaaactcatatcaagttctcaaagctctcacttaagcacaaggctaacgccggtgggacggttagagaacttgatagtggatgattgcaagttgtatccgacgaacattggtctgaggctaactggtacacaagatccacctatcccaagcatgcataagcatttagagtacttaatagttttgccatagcaaattgtacgatttctctgattcaccttgggattcacgattttagctgg

SEQ ID NO: 4218 - DNA, 303 bp, Glycine max
gggaagattgaagaacaatcgtcggggcaacgctcgcccttcgccgctgcaccatcatcgtgcccttctcaaagcgattttaacctaaccgcgttctttatttcttcaaagatcgagcataatgatttgaggattgaagtattgaacaccacatcctttatacttgttgggcaagaatggagggacaaaggagacacacacaaatgtttttccacatagtgctggaacgaaatatgcatctgcatccacgctactttggtcgcaaacttcctgatgatctcgtatccaagctaatgagagatg

SEQ ID NO: 4219 - DNA, 300 bp, Glycine max
ggatctatgggagatagagtagagagccgtcgctatcctagtctcttcatcccctctagacatttcagtttcaggatggaatctcaggtgaagcacgcccttgttgtcaaagttatgggtcgtactgggtctagggggcaggtgactcaggttagagtgaagtttttggatgatcagaatcgacacatcgggacgaacgtgaaaggacccgtgagagaaggaaacagtcgcactgtagttgagtctgagagagaagcaagaaggttgcgctagaggatctcttcagcgtttggctcagga

SEQ ID NO: 4220 - DNA, 439 bp, Glycine max
ggggacagtttttgtttgacaccactcggaaatttctctgcgtctctcctattttttctgaatctaacattaacaacaagaatggcatccaacaggggtcaaggtggaattcagcagctgttggctgctgaacaagaggcacaacggattgtgaatgctgcgaaaaatgaaaaattggctaggttgaagcaagccaaggaagaggctgaaaaggagattgctcaataccgagctcaactagaggctgagtttcaaaagaaagtgtcagacagtactggagattctggagctaatgtcaagcggcttgagcaagagactgatgaaaaaatccagcacctgaaaacggaggctgcaagaatatcggatgatgttgttgccatgcttctcaagcatgtaacaagtgtgaaaaattacgaccctttgatatatattggtgctg

SEQ ID NO: 4221 - DNA, 430 bp, Glycine max
gactccttctggtcactcttgggagaagaggtcgagtttcacagcagcaatggtgtacgtcaaggctcagaaatcaaaagcctacttcaagagatatcaagtcaagttcaagagaagaagagagggaaaaaccgattaccgtgccaggattcggttgattaatcaggacaagaacaaatataacactccgaaataccgatttgttgttcgctttagcaacaaggacattgttgcacaaataatatctgcgagcattgctggcgatattgttcttgctgcagcatatgcacatgagctgccacgatatggtcttgaagtacggcgtacaaattatgctgcagcttattgcactggtctcctgttggcccgaagagtcctcaaaacacttgacatggatgaggagtatgaacgacatgttgaggctactgga

SEQ ID NO: 4222 - DNA, 90 bp, Glycine max
gctctcaattcctcacattaatgtgtgtctgtcacgagaaccataatgctgacacattacagtaactctctttcccgacctgaataagaa

SEQ ID NO: 4223 - DNA, 250 bp, Glycine max
ggttgtcctacagattcttcaggaactgcgattttggatcggaacctcatctgcggcgtagcaatgggacactccaatgtttggaattctcattcaaagaactaccgtcctggttcgcgcaattgccgaatgtgtgggaatccaaatagattgatcaggaagtacggccttaggtgtctgcatgagtgcttccgtagcaatgacagcgaaagatggcctcatcaagtaccgcgaacagagcggttgtcac

SEQ ID NO: 4224 - DNA, 364 bp, Glycine max
tcgacagctgcaaagacacaaaaggggactttcaaatttcttttccttcactttcccgagaaaaaaaaaacactctttcactttcttgactacggtctcacttcgacatggctcgtactaagcaaactgctcgcaagtccaccggcggcaaggcgccacgtaagcagttggcgaccaaggccgcccggaagtccgctcccgcgaccggaggagtgaagaagccccaccgcttcaggccgggaaccgtggcgctgagggaaatcagaaagtatcagaagagcaccgagcttctcatcaggaagcttccgtttcagagactcgtgagggaaatcgcgcaggacttcaagaaccgatttgcgttttc

SEQ ID NO: 4225 - DNA, 426 bp, Glycine max
gattgttggcttgtgctctgctcgtgcctctagggttatcatatctccatttccatttcctctctctcagtttccaagaatcttaagctatgggaaagtcttagccaaccgtgagcgctgattaccagaaggccgttgagaaggcgaagaagaagctcagaggcttcatcgctgagaagagatgcgctcctctaatgctccgtttggcatggcactctgctggaacttacgacgtgagctcgaagaccggtggtcccttcggaaccataaagcacccctccgaactcgctcacggcgctaacaacggtcttgacatcggtgttaggcttttggagccactcaaagcggagtttcctattttgagctacgccgatttctaccagttggctggcgttgttgccgttgaggtcaccgggtgacctgaag

SEQ ID NO: 4226 - DNA, 426 bp, Glycine max
gacacaaactttattacagttgttgtattgtaattaagcaagaatattaggcaatggagtcttctagaacttcaactactcttgctctttttttaaccatcaatttgcttttctttgtcatggcaagtggctgctacacttgcacacagcctaagccaaaccctatcccattcccttaccctaaccctagtcctgccgcgaagagctgccccagggacgcacttaagctcggagtgtgcgcagacgtgcttaatggaccaattggtgctattgtagggtcaccaccggaccacccatgttgctcagtgctagaagggcttcttgatcttgaagttgcggtttgcctctgcactgccatcaaagccaacattcttggcattaaccttaacatccccatttcgcttagcttgatacttaacgcctgcg

SEQ ID NO: 4227 - DNA, 394 bp, Glycine max
aaagttgtgaaaagtttttcgaacacccaaaatggacttggatggatgcatgaattgacaaaagagtatgttttggaaacattgggttgacttgagtaggaaaaatgaatcctgagccctagtgtcacatgaccataaaaacttgatgcttgagtgtccacatgggtgcatgcatgactgattttgcataaaatttctgaatcatcattgttgtgtgtgtatcatggaaataatatgggacattcctttatccctgaaccgctggccaaaccaacaccctgacgtacatcgtgtctggccattctgcaagccttttgtgccaagacctcaaaccaccataaaccttgacaaaggatgagaatttccatccttgtccttggaagaaggaaccatg

SEQ ID NO: 4228 - DNA, 310 bp, Glycine max
gtcgccgaaaaccctaacaacacaggcgcacagcgtgatccattgacgaagatggtgcagcgtctcagctatcgcaagaggcagagctagtgccaccaagttcaaccaacacagggtcgtcaggacgcctggtgggaagctcgtttatcataccaccaagaagagggccagcgggcccaagtgccccgtcactggccagaggattcaggggattccacacttgaggcgtgcagagtacgggagatcaaggttgcccagagaccgtaggactgtcacccgtgcagatggcggagtattgtcaggacgtgct

SEQ ID NO: 4229 - DNA, 155 bp, Glycine max
gtccggcaagccatagagacacgcctcagtgcggttgtcagaagagcagatattggtagacctaagcatacagtggttacaatgcgtcataagtgatcacttaatccttcaggaatcgtcatcataagcatcatcatcatcgttcattgacaaac

SEQ ID NO: 4230 - DNA, 411 bp, Glycine max
gagcgaaacagagagtgatttcagtgagtgatcggtgttcacttgatctcatcataatcgtcagcgtcaattgaagaagatgccgatcagaaacatcgccgtcggaaggcctgaagaggcgactcaccccgacacgttgaaggcggctttggctgagttcatctcaaccttcatcttcgtgttcgccggctcaggctccggcatcgcctacaacaagctcaccgacaacggcgctgccacccctgccggcctcatctccgcctccatcgcccatgcattcgccctcttcgtcgccgtctccgtcggcgccaacatctccggcggccacgtcaaccccgccgtcaccttcggcgccttcgtcggcggcaacatcaccttcctccgcggcatcgtctacgtcatcgcccagct

SEQ ID NO: 4231 - DNA, 371 bp, Glycine max
gcctcaatcggcccgcaccaacagcatcggcggcgacagtcactctccgacaacaacacttccgcggcgaaaaatgtctctggtggcgaacgaggatttccagcacattctgcgtgtgctgaacaccaacgtggatgggaagcagaagataatgttcgctatggcctccatcaagggtattggaaggagattcgccaacatcgcttgcaagaaggccgatgttgacatgaacaaaagggctggtgagttgagtgctgcagagttggatagtgtgatgactgtggtggcgaaccctaggcaattcaagattccggattggtttttgaacaggaagaaggattacaaggatggaaagtactctcaggttgtgt

SEQ ID NO: 4232 - DNA, 292 bp, Glycine max
  modified_base (53)..(53): a, c, g, t, unknown, or other
  modified_base (285)..(285): a, c, g, t, unknown, or other
ggatgcatgttcattcttcactgtaacaccctttcctttcatttattgcctgnggagtgtgagcaaacgaggcagaaatgaaagtcaccaacaacacaacacaaaagcaaccaattttctttttctctctctttccctcattttctatatcagtttcctcaccttctcaatttttgaacgagacacagtgaggaaactgaacccttttgtttattcagctaaaaaatcacaccatttttttttctttttatttcggggatagtgatttttatcacagaatctaanggttttg

SEQ ID NO: 4233 - DNA, 393 bp, Glycine max
gaccggaacttcaagcgagtaaacaaacaactactagggcaagaaagaaactagagaaaaagatatggcttccacttctgcagtttcaatggttatgccggtaacttatgccagccagaagagagtggtgcctagctctgatgcattcttcaagccactcacactacggtcctccaaggtagtggcggcatcaaattccaatggaaggtttcaggtgaggacctccatgaaggagaaagttgtaacagggctcacagcagctgcattgacagcttcaatgatggttcctgatgtggctgaggctgccgtctcaccttctctcaagaacgtcttgctcagcatctcggcatgtggagttgttgttgttgccattagtggtgctgtgattcgtgt

SEQ ID NO: 4234 - DNA, 439 bp, Glycine max
ggaagattgaagaacagtcgtcggctccacgctcgcccttcgctgctgcgccatcaccgtgcccttctcaaagcgattttaacctaaccgcgttctttttttcttcagaaatcgagcataaggatttgaggattgaagtattgaacaccacatcctttatacttgttgggcaagaatggagggaaaaaggagaaacacaaaaatgtttttccacatagtgctggagcgaaatatgcagctgcatccacgctactttggtcgcaaccttcgtgatgatctcgtttccaagctaatgaaagatgtggaaggcacttgcagcggccgacatggatttgtggtggcagtgacagggatagaaaacatagggaaagggctaattcgtgatggatcacggtttgtgacatttccggtgaagtaccaatgtgttgtcttcagacca

SEQ ID NO: 4235 - DNA, 212 bp, Glycine max
ggctgccgcctcttcttcgagttgtacactctctcttcaaccctactttaaggtttatctcctaaaacccttttcatgttgattggatgacatcaacctgctcgtgttgtctgaaactcctgcggattttaccatgattcacatgctggatcaaggtctgccatctcaacttcaggatttctccagtacttcatgtactacatagtgcgttt

SEQ ID NO: 4236 - DNA, 374 bp, Glycine max
gagttttggtgagttgtgtaattttgtttgttcatcttgtgttgttcactgttctttcccagacccacctcaaagttgaaagcagccatgggttttttcttgaaatgggtcaacttgtttgtcttttttcatttccttgctgcaacacccatcttctcagattcctcctccagctcaaatgcaatcgccaccaccaagttccttgatttagccaaggatcctcgggttttttgattggatggttggtatcaggaggaagattcatgagaatccagaactgggttatgaggaatttgagaccagtaagctgattagagctgaattggataaactgggcatctcatataaacacccagttgcagtcacgggtgttg

SEQ ID NO: 4237 - DNA, 329 bp, Glycine max
gatctggcagcagacaaacaagtagttgagaactaagaagaaggaaatggcttcctcaatgatctcctccccagctgttaccaccgtcaaccgtgccggtgccggcatggttgctccattcaccggcctcaaatccatggctggcttccccacgaggaagaccaacaatgacattacctccattgctagcaacggtggaagagtacaatgcatgcaggtgtggccaccacttggcaagaagaagttcgagactctttcctacttgccagacctcgatgatgcccaattgggaaatgaagtcgaataccttctaagggaaggatggattc

SEQ ID NO: 4238 - DNA, 400 bp, Glycine max
gatagtctgaggaaagtgagtgagagaaagagatcgcagacacagagcagaatggcttctacccaatgtttcttgcaccaccatgctcttaccacccctgccagtgccagatccccatcactacgcatcttggttagcaccaagcctaaccagcttgtttgcaaggcacagaaacaacaaacaccacaagaggatattgatgtcagcccaatctctcgccgtttagctctaactgtgctcattggtgctgctgctgttggctccaaagtccaacctgctgatgcagcctatggtgaagctgccaatgtgtttggaaagccaaagacagacacagatttcctgccatacaatggagatggattcaaactatctattccctcaaagtggaacccaagcaaag

SEQ ID NO: 4239 - DNA, 131 bp, Glycine max
aaatgatcttggcagcagagctctcagtacagctatcaagacgacgattaatgatgacacattcgtcgatggatgctccactaagagcatacgagcaatataaaagcggccgctcgacacgatacaggctt

SEQ ID NO: 4240 - DNA, 269 bp, Glycine max
ttcatcagcgagacgcagcgaaacgggaatgccacgatcagacgcgaggtacatcctcaacagtagggtccgatgcgctgccatcgctattctcacatatttcaatcgctacatgtcgtaactctcataatcatttcaattggcatgaccaaacaatgctatatcaccaatatcactggaaacaggcagggaagaagaatcagccatatgacttcatgtggaacaggacctgggacaacaaccaacgggaacattactactagaactgg

SEQ ID NO: 4241 - DNA, 442 bp, Glycine max
  modified_base (404)..(404): a, c, g, t, unknown, or other
gactcactcatacaatagagaccagcttttgcttctttgtgaacatggagatgaggaaatcatgtggcttcttcttcttgctcctcctccttgtctttgcttcccaggtggtggtgcagacggagggaagagtgtgtgagtcacaaagccacgggttccatggtttgtgtaatagagaccacaactgtgctttggtctgcaggaacgaaggtttctccggtggcaggtgcaaaggcttccgccgccgctgcttttgcaccaggatttgttgagatctcatcaaacactactcttgccatgcaaattaataaatcatagctaggccaaataaattgcatctactctttatccatttgggagctagctaccacaaccaactcatacttggtcattggattgcttcnctttggcttctgcctttgcttatctctctacctctacg

SEQ ID NO: 4242 - DNA, 357 bp, Glycine max
gaagactgcgacgacgatccatgtgatagactctcgtcgcgatggaacgtgtcgctgaatgcgagcgaattctgtacccagacttgactggatcctctgtagtcgctatcacgttcaacgatgggattctaatggccgctgacatgggatgttcgtagggatctaccctgcggtataagagtgttgagcgtatcatgcctattggaaagcattctcttcgtggtgctagcggggagatcagtgactttcaggagattctgcgtgaccttgacgagcttatcggatatgaccacatgtgggatgatgggaattcctcacggccgaaggatgtgcccaattatttaacccgtgtgaggt

SEQ ID NO: 4243 - DNA, 318 bp, Glycine max
gaacacaccgcacttcaccgcccctcgtttcttcacactctgccgtgctctttcggcgcacgtcaagagattcgcaatagaaagtgagaaaaaaaaatgagtcgaggaagtgcaactgctgcgaacggcaagaagaacggtgcgacattcaccattgatttcgcgaagccggtggaggacaagatcatggacattgcgtctctccgagaagttccttcaagagaggattaaagttggtggcaaggccggtgctctcggcgacgccatcagcggtcgtacgtgagaagaccaggctcattgttacttccgacagcaaat

SEQ ID NO: 4244 - DNA, 384 bp, Glycine max
ggcagaatcggaggtcaagccaaccactcaaaaacccacctgtgtgttgtcaccgttgcttcagttatcgtgtccatcgtcaccgccgcttcagctgccatgttgattgttgtcatcgcagtttgagctgagagcattgtttcgcctactcccttgcactgctgcttctttctccttcttcttcgcgtgtttggtctcctcgtgtctttgcgtctttcacaaaaccagcttctacgacctcccatcctcgaatacgtggtcgctctgcaagggcagcagcgccgcgcgagctcagaggactggaggagctcttggaagcgccgcgcgtcatcccctattagatgggatttgtttcgaaaatcttcctgagattattcaagaaaa

SEQ ID NO: 4245 - DNA, 371 bp, Glycine max
  modified_base (97)..(97): a, c, g, t, unknown, or other
  modified_base (114)..(114): a, c, g, t, unknown, or other
gaccctagaatcccagttcaaaggtaaggtaggttaacactcttcttcatcgtcgtcgcaatgggacgtgtgatccgtgcgcagcgtaagggagcangctcggtcttcaagtcncacacgcaccaccgcaagggccctgcacgcttccggagcctggacttcggggagcgcaacggctacctcaagggcgtggtcaccgacgtcatccatgaccctggccgcggcgcgccgctcgccaaggtcgccttccgccaccctttcagatacaagaagcagaacgagctcttcattgccgccgagggcctctacaccggtcagttcatctactgcggcaagaaggccaccttgttgtcgggaacgttcctaccctg

SEQ ID NO: 4246 - DNA, 296 bp, Glycine max
gccgttttggtttgttcgtcgccgctgcgagagagtgccctagctacctctcgagcttgccacctacgcgactgaaaagtccatttgtttttttctctcgcttttcgattgtgaaacagcgtcgcaaggagaaagaaatggatgagggaaagcataaatcgaggaaagaaaatcatgaggtgaaagatggggattctaagaggagtcaccgcgatcgtgaccgtgatagaactgacagagtaagagagaaagaaagagagagggaaagaaaagaggataaggagaggatcagagag

SEQ ID NO: 4247 - DNA, 423 bp, Glycine max
ggggcgaggtagccagagagtgatacaatacagagtgcgttgttgctccttcgccacaactccctgccaacatgggtatctccagagattctatgcacaagaggcgtgccactggtggcaagaagaaggcatggaggaagaagagaaagtatgagcttggtcgccagcctgctaacactaagctgtcaagcaacaagacagtcaggaggatccgggttagaggtggaaatgtgaagtggagggcactgagattggatactggaaattactcctggggaagtgaagctgtaactcgcaagactcgtatactagatgtggtttacaatgcctcaaacaacgagcttgtgcgtactcagactcttgtaaaaagtgctattgttcaggttgatgctgctccattcaaacagtggtaccttcagcact

SEQ ID NO: 4248 - DNA, 421 bp, Glycine max
  modified_base (393)..(393): a, c, g, t, unknown, or other
gaaagacaaaaaacattatcttcaactcctttgctcgtgttgtgttttggatatttgagtgagagaacagtgaatgaggagttccaattcccatattcaatttcaaatgttcttctccatgcagcttctttgcttctacaagcacccaccaccactgtttgtacacaatattaatgaaggcatttttaagtacaagaggtttttcacaaacccttcttcttcttctcgtggcatagttcatgcagtgaaggaagattcacaatcacagcaatatgaggtagacccagataaagccagagaagcactcaaaaagcttgatgagcaaatccagtctctctccaataaaaaacaagtctccactccaaaactcagagtttcggacatgaagcttcncacagagcaagccagtcgcaatgatgag

SEQ ID NO: 4249 - DNA, 276 bp, Glycine max
gactctcgctcaaagcataatacagtgagtttgatcttggttgggacgctcgacataatgtcgtcgacaatgcagaatcgtcattcatcctttacttcctctacagcgtcatctctgtgaacagcgacatgacttctatcttcggtgtcgttgtggtcgtcttcaggtacatgctaaagggttactactcagaacgtggttgtgaagatagcgctcctcgtcatcctcatgaatcggaggtacacgtcatcgtcttccacatcctctttggtgcaa

SEQ ID NO: 4250 - DNA, 101 bp, Glycine max
tttcaaacgtactaaggtcaaacatttacattggtaaattaaccttgctgctctcacggattcaagttcacatatacgtacatggaacgtaaaagtccttc

SEQ ID NO: 4251 - DNA, 75 bp, Glycine max
tgggacatctaaggtcacgcagcgctatcctctgagtttatgccttcctgtatgggagcgcgcgacccctcgtgg

SEQ ID NO: 4252 - DNA, 441 bp, Glycine max
ggatcctttgtattcgattcttcaagattcaggtactgcgtttcggaagcagacacagatggctcgtacgaagcaaaccgctcgtaagtccacaggaggaaaggctcctaggaagcagcttgcaaccaaggctgcacgtaagtctgcaccaactactggtcgtgtgaagaagccccaccgttatcgtcctggtaccgttgctcttcgtgagattaggaaataccagaagagtaccgagcttttgattcggaagctccccttccagaggctggttcgtgaaattgctcaggacttcaagactgatctgcgtttttcagagcacgccgtgcttgcattgcaagaagctgctgaaggataccttgttgggctctttgaggacactaacctgtgtgccattcaggccaagcgtgtaaccattatgcccaaggatattcagctggc

SEQ ID NO: 4253 - DNA, 382 bp, Glycine max
ggatcctagattaagccctagctagaggagagggtttaaagctctgaagcttctttcttcttctccaattaagatcgcagagagagatggggagtgacagcgaggcagagaaggagaagaagaagatgcttgcgctcgctcccattgctaaaccccttgccggaaagaagctttgcaagcgaaccctaaaacttgttcgtagagctgccgaacacaaatgcctgaaaagaggagtgaaggaggttgttaaaagcataaggagaggtcataaaggattgtgtgtgattgctgggaacatatcgccgattgatgtcatcactcatcttcctattctctgtgaagactctgacattccttatatttatgtcccatcgaaagaaga

SEQ ID NO: 4254 - DNA, 280 bp, Glycine max
gagatctgagatagaaacgaaacgttaactaagaatcaatacctcaatggccacccttgtcgttcataaccaaaattcttctgctcaagatgctaaggctctccaacaggctttcaaaggatggggggctgatcacacggccattatagcaatactgggtcacaaaaatgttcatcagaggcacgaattcagaatagcctaagaggagatttaccaagatgatctcatcaaacactttgagtcgtagatctctggtgactgtgagatagctatgtaccgg

SEQ ID NO: 4255 - DNA, 326 bp, Glycine max
  modified_base (271)..(271): a, c, g, t, unknown, or other
gactcaaaaacacactcttcaaattccaatccaaaccaacaataatgtctctcttccattgccatgcctttcaccaccgcatggccactctctcacccttctcaaccttcaattccaaacccctctttgcttttctaccaaacccctctttcttaactcatcatcatcaacaacaacaacatccttatcctctcaccaaaaccacaaccactgacctcaacaacaataggcctctttcactctccacactgcccagaaagttgctctgcanaccaccccaggggaaatatgtcagagaggactatctagtgaaaaagttgtcagct

SEQ ID NO: 4256 - DNA, 266 bp, Glycine max
ggtgtgtagtataggattctcgtctgtattccttttgtaatttcattcattcttaatcattgtgaaaaataatgctcatcgagaattttaaggttgagtgtcctaatgtgaagtacaccgagactgagattcagtccgtgtacaactacgaaaccaccgaacttgttcacgataacaggaatggcacctatgagtggattgtcaaacccaaatctgttaaataagaatttagcaccaacatgcgatgttcgtaaattagaggtaat

SEQ ID NO: 4257 - DNA, 385 bp, Glycine max
ggtccgaagccacttgagagaaaatggcggtgcctctgctctcaaagaagatcgtgaagaagagggtaaagaagttcaagaggcctcagagtgacaggaaaatttccgtcaagactaactggcgcacaccagagggtatcgattctcgtgttaggagaaagttcaagggatgcactttgatgccaaacattggttatggttcacacaagaatacccgccactatctcgctaatggtttcaagaaatttgttgttcacaatgtgaaggatttggaactgctcatgatgcacaacacgacttactgtgctgagattgcccacaatatatccacaagacagagaagagatatagtcgagagagccgcgcagcttgatgtagttgtgac

SEQ ID NO: 4258 - DNA, 178 bp, Glycine max
aaggcatagccataaattctttgaataagaaaatggtatattatattatgatatatattggcttagctataatcactagaattattatatactaagtataaatatatagaaattccagtgattatagactatctttatataatagtataaataaattaaattcactgaccgtcaaaaa

SEQ ID NO: 4259 - DNA, 348 bp, Glycine max
gaatctcccgtttctgactccctggaactggttgttggatccccgtggaagcatcataaggatgaagagcgtttcaagtcaaagcactgcaacatagtgagatctgactcataatttggcgacactctatgaaattatgaggttacctggattttgtgaggttgtcatggtattggagtcatggcgggtgaggttgtgggatttcaaaaggatcaaggcacacttgacaatggttctgacgtatgaacacctgtattgaatgacaacgataatggcaagctgcaatgttatgtgggatccgctgcggatgccatcagatttgggacacatggagaggaatctgcaaaa

SEQ ID NO: 4260 - DNA, 362 bp, Glycine max
gataccagcaacaatttaatacctcaaaaatggttcactctctgctcctacttcatctcctcctcactctcactgcaacctctgctcaacatgacggcccttcgatcacagccaccatggagcaattctccggttacaaaatccacgaacctcactctttccaaccctcttcactctccgttgatgctcacgctcttcagaaccatattgatgagcttgcggcgtattctgactcacctgctccatcagtaaccagcgtcttgtatactgataaggatgttttacgtcgcacgtatgtaaaaacccacatggaacttgctggcctatctgtgacagaagatgctgttggtaacatatttggt

SEQ ID NO: 4261 - DNA, 365 bp, Glycine max
  modified_base (339)..(339): a, c, g, t, unknown, or other
aaagtggtaatgagcatggaggcaggcattggagtgatgggcaccaagttgggtatgatgagctatttcgaatccgacggagaggttgttcctgtcactgtcgtgggtttcaaagaaggcaacatcgtcacccagatcaaaactgaggccaccgatggatacgacgccgtccaggttggttaccgaagggtcagagatcgcaaattgaccaaacccgaaatcggtcatctccagaaggtcggcgccattcccatgcgccatcttcaggagttccgtcttcgagccatcgatggcttcgaccttaaccagcgccttgtttttgatgaaattttcaagganggtgatcatgttgatgtctctggcac

SEQ ID NO: 4262 - DNA, 437 bp, Glycine max
gacaaagcctaactttcgagttctcgcatctcgcgcggttctctcggttctcggcgccggtgccgccgcgtctcgagactgttcgtcgattgcacggagccagagagcaattccgtcgcactctaagcctgcagcttcaacacgccgtcgtacctgaagcagttccgtcggactcatgccctaatctctgcatcgttgtttttcagtgatgggaaagatgcacaagaatatgaaacaagctggtgggcatggaactcgaagagaagacaccgatatgcacgaacatgaaatggacataaggaagattatgacagatgtggaaaatttaagctactcatatatgtcatggaaagaacgcagatggattgagaatagacatgttgtctctcatggtgggaagcccaaaagaatcagagattacctttacgtgtggcacg

SEQ ID NO: 4263 - DNA, 388 bp, Glycine max
gacttcacaactcaaactgcttcattgcataattgcagataagatcaacccttctaccttcagattcgcgggaagatggcatcacttcatgctaatgtgacatcagttgtttacaacagtggcaaccgtgtttctcaatcgaaatttgcaagctcttccttcttgtctgggttcgatgttgttggtcgtgcttcaagtgcttggaagaaggaacttgtcccatcttccatttccttggtgcctagagccaccctaacatttgatcccccaactaccaattcagacataaccaagcaaaagaagcacactcttgaccctgcttctccagattttcgtcctcatccttcatttgaacagtgctttccaaagagcagcaaagaacacaggg

SEQ ID NO: 4264 - DNA, 103 bp, Glycine max
aacgggatcaaggtttggctcccagcatacaaattcacggaacaggatctgtgcttaacgacattcgaatccacatgtccaccgcatcgcagcccaaggccac

SEQ ID NO: 4265 - DNA, 390 bp, Glycine max
gatagtctgaggaaagtgagtgagagatagagatcgcagacacagagcagaatggcttctacccaatgtttcttgcaccaccatgctcttaccagccctgccagtgccagatccccatcactacgcatcttggttagcaccaagcctaaccagcttgtttgcaatgcacagaaacaacacacaccacacgaggatattgatgtcagcccaatctctcgccgtttagctctaactgtgctcattggtgctgctgctgttggctccaaagtccaacctgctgatgcagcctatggtgaagctccaaatgtgtttggaaagccagagacagacacagatttcctgccatacaatggagatggattcaaactatctattcgctcaaagtggaac

SEQ ID NO: 4266 - DNA, 367 bp, Glycine max
ggtaagaaaacacaaacaacacaaaattcattgcacagtgttattttcagtatcagcatcatggctccaattgcagtgggagatgtcattccagacggcattttggcttacttggatgaagaaaacaaaccccaaactgtctctattcactctctcgccgccggcaagaaagtcatcatctttggggttcccggtgccttcactcctacatgcagcttgaagcacgtgcctggcttcattgagagagcagaagagctgaaaggaaagggtgtggacgaaataatctgtatcagcgtgaatgatccctttgtgatgaactcatgggccaaaacgttcccagagaacaagcatgttaagttccttgctg

SEQ ID NO: 4267 - DNA, 130 bp, Glycine max
aaaaccttaggtcaggcggggtaacttccgtatttaaatcatggcaccaactgagatcggaaatgtcaatccaaacggcattttggccgacatgcgctaagatatcactcccatacactctcaattcaca

SEQ ID NO: 4268 - DNA, 435 bp, Glycine max
  modified_base (348)..(348): a, c, g, t, unknown, or other
  modified_base (395)..(395): a, c, g, t, unknown, or other
gatgtggttgcgcctctgcctgtaagagtgaaaaaaccttctcttttccttctctcaagtctcaagagatttcatcatggctccaaagaaggacaaggctccaccaccttcctccaagcccgccaaatctggcggtggcaagcagaagaagaagaagtggagcaagggaaagcaaaaggagaaggtgaataacatggtgctgtttgatcagggcacctatgataagctcctttctgaagctcccaaattcaagctcatcactccttccattctttctgatcgtttgaggattaatggatcacttgcaaggaaggctataagagaattgatggctaagggttcaatcangatggtgtctgcccatgcaagccagcaaatttacaccagggcaacanacacctaagtgtggaactgatcttagcttacggagtattg

SEQ ID NO: 4269 - DNA, 335 bp, Glycine max
cgggatagtgtgttaagcctcgccgactcggttgctatcagcgagtgagagtgagtgagtggttctcttgcagcaacacagtttagtgacaccaaacagacgggaaatgggtcgtggggtcagtgctggtggtggacagagttccttggattatctctttggcagtggggtacctgccagcagtgcaaatggtgctcgcactcaaaatgcaagtgctccatcaccaccggttgataagcaaagtccagcaccagcaccagcaccagcacctgcacctgcagcagcagcaccagcacctgcaccagcaccagcaccagcatcagctgataagcaaa

SEQ ID NO: 4270 - DNA, 57 bp, Glycine max; identical to SEQ ID NO: 410

SEQ ID NO: 4271 - DNA, 343 bp, Glycine max
acgcgtccgccaacgcgtccggacgacagaagggggagttgagaggatcgtgagatgggcagtagccgagagtccgtgagttgcaaaaatgaagatcaggctttccaccgagaccatgaagatcacggacagcgtgagcatcaaagtccacgccaaggtcatccaagtttaaggccctcgcggaaggttggtgcgagacctcacgcatatgactcgcgattttcagcccatgactgacgagaaccgtactggaaagctgaacatccacgcgtggtttggttctcggaaagcattcaccgccattcgcagcgccttgagccatgtggatattcataccaccggc

SEQ ID NO: 4272 - DNA, 417 bp, Glycine max
cacgcgtccgcacaggcgtcagaccgacactagaagacgacatacggagagatgctacatgaataaataacgtgatatcggtgaatcaagtatccttttgcatctgatctaagaatcaaaacgcaaagaccagattttgtcattacatgatcaacgttatagttcgtggaaatgacgatgatgacgcgtgattttggggatactatgcagaaagatgcaatgacggccgtgtcggctgataaaatatatgattctcttcggtttcctaattacaacatcagagttaacaatcagatcatggagacaaaggatagtccataagtgctatctatgaaggatgttgttgcgcgagagactgcacagctgttggaccagcagaaacgtctgtcagttcgcgattcttccagtaaaattgag

SEQ ID NO: 4273 - DNA, 155 bp, Glycine max
gaaactgcggagtcacatggagagttcgatcctggctcaagaataacggctgcgtcgacaaggattacaagctgaccatacgcgatgcatagctacgtgcatcgagctttcgatacgggtcacctaaatcctattcaccggccgtcggatgggaa

SEQ ID NO: 4274 - DNA, 342 bp, Glycine max
  modified_base (338)..(338): a, c, g, t, unknown, or other
ggtttgtgtgtagattctgtatttatatgcaatagcgatgtaaaaaaagaggtgtatgctgtttttgtaggaaaggaatctgtatagtggaaatgagtctgaggcacctgagttgacttttgtcatttgggttacagggagttaagtagaggtgattattccaaatatgccccaacaacacttccctttagatttttttttttttttttgtttctgtgatattcatagtccctttagatgttttgtttcttcaacaggacaatgttttaataggttgaacaaatttcttaccccctttttggggcatagtatatgtgtgatttgtgtgtaaaaaaaanaaaa

SEQ ID NO: 4275 - DNA, 283 bp, Glycine max
  modified_base (157)..(157): a, c, g, t, unknown, or other
  modified_base (279)..(279): a, c, g, t, unknown, or other
gagcaacatggtgaagctggcggagagatttacttgccagaagaatacgttagttccaagaggacttaaatggagcaaatcagttggaagaacttggagctagcttcccaactggcttatcagggtgtggagaagcattattaagccttaagaatangagagtaagtactgtttgtgaatgtctttggtttaagaactccgtcttatgtcaacttgtattctgttatacagttctcagcaataaactgctctggcaatctagtttcatgcaaaaaaaanaaaa

SEQ ID NO: 4276 - DNA, 79 bp, Glycine max
gattgacctttggtcatcacaagcgaaaacccacttctggatcttctggtatggttcccctgttgcaaaaaaaaaaaca

SEQ ID NO: 4277 - DNA, 337 bp, Glycine max
ggttatagtagcaagagccattggaattttttttttatacattggaagaatccatttttgttattaatagactagtaagaagaaaagaataactgagaaatcaaatagttattcatcaaagtctcaattattcaatgaccagaattaaacgaggatatatagctcggaaacgaaggacaaaaattcgtttatttacatcaagttttcgaggagctcattcaagacgtactcgaacgattactcaacagaaaataaaagctttggtttcggctcatcgggatagagatagcaaattcgatgggaggtgcagaaaaaagaaggcggccgctctagagga

SEQ ID NO: 4278 - DNA, 261 bp, Glycine max
gtgatctctaactcactgttgagctagtcatacatcttcaagtgattgacgcattgttctatactcatttaattacattcgatgtacgtaatcgtgatggatatgccccgtttgttcaataaacttcaaccaacatttccggccgcacgagacgattcaagcttacgtccgcgtgcatgcgatgtcatacctcttcaatagcgtcaccctccctcatttccatggctcgtctttttacaccatctcgactgggaaaatcct

SEQ ID NO: 4279 - DNA, 65 bp, Glycine max
gtacgggctgcgaaaagaagacgaaacagaaggggtacgggctgccgaaagaagacgaaacagaa

SEQ ID NO: 4280 - DNA, 352 bp, Glycine max
  modified_base (324)..(324): a, c, g, t, unknown, or other
ggcctcacaacagcagctgcagcagtaatggctcccaaacgaggtggaaaggctccggctcttgccgctaagaagaagcctgagaaggtcacgaatccgttgttcgagaagcgtccgaagcagttcggaatcggaggggcgttgcctccgaagagagacttgactaggttcgtgaagtggccaaagaatgttcaaattcagaggaagaagaggattctgaagcagaggttgaaggttcccccagctttgaaccagtttaccaaaactcttgacaaaaacctagcaacaagtctgttcaagttgcttctgaagtacaggcccgangacaaagctgaaaagaaagagaagctct

SEQ ID NO: 4281 - DNA, 204 bp, Glycine max
  modified_base (193)..(196): a, c, g, t, unknown, or other
  modified_base (198)..(198): a, c, g, t, unknown, or other
  modified_base (203)..(203): a, c, g, t, unknown, or other
caataaaaaaaacttcgtaccccattgcccagaggctcttcgttatgcgaaggtatgggggagggatattgtacgcagccttacccttgcatatgcaaagaggctgtttccggattcgaacccatgaccaacaagtcaccaaggcacaactttaccgctgcaccagggctcgccctccgaacacaatatacannnnanaaaana

SEQ ID NO: 4282 - DNA, 151 bp, Glycine max
tcccgggtggccccacgcgtccgcccacgcgtccgaaggatgtcagggatttcaattttgagattcatcggttgtaatggaggataatgctagccccctagtagtatcaatcatagcaggacctgttttgtgatgttccttaatttgtttg

SEQ ID NO: 4283 - DNA, 151 bp, Glycine max
caaaaggttcaagcctaagttagccttgaagggaacttcaaacccctccaaaatggccaccaaaatccaatcaatgggcgtccgtttaaaaactcctgaactggaaaaacctggcgttaaccaacttaaacccccttcagcaaatccccct

SEQ ID NO: 4284 - DNA, 366 bp, Glycine max
  modified_base (351)..(351): a, c, g, t, unknown, or other
ggagagtcagattcgcacgcattgcttcgcctcacaacagcagctgcagcagcaatggctcccaaacgaggtggaaaggctccggctcttgccgctaagaagaagcctgagaaggtcacgaatccgttgttcgagaagcgtccgaagcagttcggaatcggaggggcgttgcctccgaagagagacttgactaggttcgtgaagtggccaaagaatgttcaaattcagaggaagaagaggattctgaagcagaggttgaaggttcccccagctttgaaccagtttaccaaaactcttgacaaaaacctagcaacaagtctgttcaagttgcttctgaagtacaggcccgangacaaagctgaaaag

SEQ ID NO: 4285 - DNA, 394 bp, Glycine max
acgcgtccgacaactgatagatacagatgcaaggggcatacacaaggggttattccacttgttgcattgtacttaggcaagagtattaggcaacggagtcttctctaacatcaacgacacttgctcatttgctaaccaacaatttgcgtttctttgtcatcgcaaatggctgctagacatgtacacaccataagccaaaccgtatccgattcccttacgctgagcttagtcgtgccgcgaagaactaccccagggaaccacataatcctcgagtgtgcgcaaacttgcatactggaccaagtggtgctacagtggggtcaccacgcgatcacccatgttgctcagtgccagaatggtatcctgatcttgaagttaccattagcctcagcactgt

SEQ ID NO: 4286 - DNA, 167 bp, Glycine max
  modified_base (69)..(69): a, c, g, t, unknown, or other
tgagactcaggtcaggcggggctacgcgctgagtttaagcatatcactaagcggaggagaagcaagaanacggccgctcgaaaagatcggacgctctatacgattgaatctgacgtccgcgtgcatccgacgtcggagctctactcaagtgtcacccaattgcaatt

SEQ ID NO: 4287 - DNA, 459 bp, Glycine max
  modified_base (298)..(298): a, c, g, t, unknown, or other
  modified_base (362)..(362): a, c, g, t, unknown, or other
ttcaagggtcaaccaacccttcgttaaggttgcaaaagaagaacagaaggatacggttgcaaaaaaacaacagaagggaatcaatccatacattaaaaacaacctttggcttctttgtaaacatggaaataaggaaatcaggtggcttcttcttcttgctcctcctcccttgtctttgcttcccaggtggtggtgcagacggagggaagagtgtgtgagtcacaaagccacgggttccatggtttgtgtaatagagaacacaactgtgctttggtctgcaagaacgaaagtttctccngtggcaagtgcaaaggcttccgccgccgctgcttttgcaccaggatttgttgagatctcatcanacactactcttgccatgcaaattaataaatcatagctaggccacataaattgcatctactctttatccatttgggagctagcctacacaaacaactc

SEQ ID NO: 4288 - DNA, 173 bp, Glycine max
taccgctcccataagacgacagatgggggcatccagtttatccacgaactcactgtgacagccacttgtgccaaacctcaagtccctcacactcggctgctctacaggctccacgcctacatcagcgtgcatgcaacttcatatctcttctatgttgccacctaaattcaatt

SEQ ID NO: 4289 - DNA, 215 bp, Glycine max
gacactactaacatttctctcaaatctgtggtgctgcatttcaattgcctccgcttccacctcgcaaccatcagcagctctagaggatacacgcttagatatccgtgcatgccacgtcatagatcgactatgctgccccataaatgccattcactgggcgtcgcattaagacatcgagatggcgaatcagctggtgttacccctgatacacactt

SEQ ID NO: 4290 - DNA, 88 bp, Glycine max
ggagagaagctggtgactgactttccaaatcactcctggtgaagaacactcagagtgcggtcgctctagaggatccaatcgtacctac

SEQ ID NO: 4291 - DNA, 71 bp, Glycine max
tagaggattcaagcttacgttcgcgttcaatccaagtcataactcctccaaaatgtcacccaaattcaatt

SEQ ID NO: 4292 - DNA, 346 bp, Glycine max
cacgcaaccgtacagcagcgaaagggacactgaaggggaccttactagctattagctcaagatagaaatacttctaataccccgttgtcctagcgcttcactagtgtcatccaaaatagcatcaaaagtaccgacaatcagttacaaggaaagtcaagactctacagtgacattcgaatccttaaagtcaaagttgccgacgttcaggtcccgatcgctacattaggctgaagtcccaaatacgctgcaataccactacgttgacaagtcctcaaccattacacactgatcagcaccatggtcataatcaaaagacttccgatccctatgattatcatgatcatgt

SEQ ID NO: 4293 - DNA, 271 bp, Glycine max
attcacgggctgacgcacgcgtcaatacggatgcaaaaaaacaacaaaaggggagtctcatatctgactcacatcgtcatccattttgctcctttcaatcaataccaacaccttctttgctctcatgctcatctataccttcaacgtttcatgtctaactttaaccttcactgatttcgtgctccattctgtatgtaaccctcatgacaatggtcgtatacattagaacatgtctgacataaaaccatttattgtaaaaccgaacatccct

SEQ ID NO: 4294 - DNA, 303 bp, Glycine max
cacgcgtccgcccacgcgtccgacagcagcgaaaggtccagatgcgggggaactaccacatgctaccgtcgatcaacaataatattttgcgacaaatcaggtgacgccgagtcaactcacgcattcatgcatcgattcaggcgttttgagctcatagaacagccacctttcttccactcctgccactctgatccttccttcgttctccatgactcaatctctctcgacctcgacctcttgccacttctcaaccacttcgacgctttctcaaatctgttgcacgcgccatcattctcttatcag

SEQ ID NO: 4295 - DNA, 111 bp, Glycine max
attcacgggccgaggcacgcgtccatacggacgtcagaagaggagagaggggggcatcgccggggagccaggccaatagtggcttcaatgcgtgcttcgtggtcacctcat

SEQ ID NO: 4296 - DNA, 72 bp, Glycine max
actcaatagtgagtcgtatgatctgtacggtggaatcttacgtacgcatggttgcgacgtcaaaactcttcc

SEQ ID NO: 4297 - DNA, 122 bp, Glycine max
ggaaagaaaaagcaagccaacgtctctcatgcaattatggaggactttgagagaggaccaaggtaccacgcatacgctgcgttgagggaaacaaagcttcgcatgaggcaaaaaaataaaaa

SEQ ID NO: 4298 - DNA, 348 bp, Glycine max
aacggttccgcttccaaaagaacacctaacggttccgctgccaaaagaccaccaaaagggtttcacgtcaaaatgataactgtccggtccttttaataatggaaatttacattatcacatccaatgatacatgtcgcaattaagattcacaaacggctgctctacaggatccaagcttacctgcccctccatacgatctcagctcacttccacattctcaccacatctcagctcatcgaccgtctcatcacaatttcattccctggacatccttttactacctcatcataggcaccatcctgcacattcccaattcactcgccgtcctactaatcaccatttccccac

SEQ ID NO: 4299 - DNA, 158 bp, Glycine max
tgagacctcaggtcaggcggagctaccccctgagtttaagcatcccatatgcaaaaaattcacaatcatcagtcaagcggctcgctctacatgatccaagcttaattacgcttgcatgcaacatcctagctcttctagactgtcacctaaattcagat

SEQ ID NO: 4300 - DNA, 114 bp, Glycine max
ccagaatttcaccagcccaaaaaaaacaaaaaaagaggcagcaccagacgatccaaacgatccaaatccacctacgcgtgcacgcgacctcaaaacgcttccacaacgacacca

SEQ ID NO: 4301 - DNA, 407 bp, Glycine max
cggtcacgaattaccgggctgacccacgcgtcaggcgagaacacgacagccaggaagagtgtgcttggtgctcccagatcgtcctggaggatcctgtcatccattcaacaccacgcatatactaacgggaactacttgagtgccaaccagcatattgagtacatacggacagttgaattggatctagccatcatctgctgtgatgttatgatagtgattgatgagcaccttatgccttctgctgcaactggtgaatccaccgtcttttactatcacatcatacgacattattatcgttatcttgctaaatttcagtcaagccctgacaccaacgaagctgctgatcagtctactatagcatctgagtctgctaccgctgcattcacaagctgatttacctcccacac

SEQ ID NO: 4302 - DNA, 197 bp, Glycine max
tacagtgacacaatccgtgagtttccgtaacattttgaaagctaaaaaaggagtaattacataagatgtatggttccgtaaccttacatgcgacgtcataactcttcaaaaataacacggacgctcaatacgatggaagcctacgtacacctgcatgccaggtcaaaactcttcgatactgtcacctaaactcaatt

SEQ ID NO: 4303 - DNA, 113 bp, Glycine max
tggggaaaatgtactactaccgtggcataaacaaaatgaaaatgtaggtgctgaaatgtttcttatcttggttacaataaagtgattttgctgattccaaaaaaaataaaaat

SEQ ID NO: 4304 - DNA, 269 bp, Glycine max
ggaatgtggcagtcatattaaacaatcaaaacccaaggtagatataatccagctacaaggcaaaattcattctcatggaataacccaaaatgagatgcataagatctatgaatcttgcaactcattgtgaaacatgctgcataactctgtgttctaacaaaagattgtgatgatcctaaccatgttaaactggataatgccctttgtccaaagctcaatgtgaccatgctgaaagttaccattacactgaaccttgtttacttgactgg

SEQ ID NO: 4305 - DNA, 99 bp, Glycine max
gatatatattggcttagctataatcactagaattattatatactaagtataaatatatagaaattctagtgattatagactatctttatataataatat

SEQ ID NO: 4306 - DNA, 113 bp, Glycine max
aaaaggccaacggaaggtacggtagcggcaagaccattatacggactcacgaaatatataacgcgaagaaagcagaaaaaatcggcggctctagaggattcaagcgttcgctc

SEQ ID NO: 4307 - DNA, 55 bp, Glycine max
gaggtaccgctaccatgatacgatacaagggtacggccgaaaagaccacatacgg

SEQ ID NO: 4308 - DNA, 188 bp, Glycine max
ttggagaataaaaaaaaaaaaaaaaaaaaaaaaaaaaaaaaaaaaaaaaaaaaaaaaaaaaaatatttaaaaaaaccaaaaaaaaaaaaaaaataataaataaaaaagcggccgccctaaaggttccaaccttacttacccttgaatgcaacttcaaaccccttcaaaagtgtcacctaatttcaatt

SEQ ID NO: 4309 - DNA, 221 bp, Glycine max
caggtgcgaaaagaacagaaaagggttgccaatcacatacttggaaagcaaactatatctcagggtaacattcatcaattcagccactgttactcagatttccttacgcgaaaataaaaaaatgcataaaaaacaaaagagcggacgcacgagaggatccaaacttacgtacgagtgcatggaacgtcatagatcttctagagtgtcacctaaatacaatt

SEQ ID NO: 4310 - DNA, 154 bp, Glycine max
gaataaagaagaaaacaaaaaaaaggtaaagatgaaaagaaaaaaaaaaaagggaaagagataataaaaagcgggcgctccaaaggattcaagcttaagtacgcctgcatgcgaagtcaaagctcctccaaaagggcacccaaattcaattcaa

SEQ ID NO: 4311 - DNA, 155 bp, Glycine max
caggtaaccactgatttacgtaggtcatttatcaaccccccccccaaaagggacgctcaagaggatccaagcttacggacgctcgaaaggatcgacgcttacctacgcgtgcatgagacatcataactccactagactgtcacctaaattcactt

SEQ ID NO: 4312 - DNA, 264 bp, Glycine max
gattctatatttcacgttttcacactcttatacatcattctcaacacattcacaacacaatcattattgccattctatctggtcgtggaaagggtggaaagggtttgcggacgcgcaagtaggatccaagcatacgtacgctcttatgcaacgtatcaacggctaccatagtgtcagctaatctcaagtcactgaccgtcggtttagtgcatcggatcagtgaattgcttgacgatgcccaccttagacttcttgcaatatacc

SEQ ID NO: 4313 - DNA, 58 bp, Glycine max
ataagctgtaagaagaggagagaaaggtaaatagatagtaaggaacattaactcataa

SEQ ID NO: 4314 - DNA, 312 bp, Glycine max
ccctgaaagcaaaggtggcggaggcaatggacgtcctaagaaatgttgctcagcaacaggctggcggtactgcggatcagctggcttcattatctcttaatgacaaccttgtttcttaaggtttatattttggatttatttagtgacgatgggttgttattttcggcactggctctgatacagtttcaggttgagtttgtttcgttagattagacacttttggtttgttatggaccaccaccttcttttggttgaagggcacttcaacactgattttaattatgccttgcatttggtgtaaaaaaaaaaaca

SEQ ID NO: 4315 - DNA, 273 bp, Glycine max
cggtacttctcctacaaaaccacacactggtaccgtcgctacaagacgacacatcggtactgtctgccacaacaccacactatggtactgctgcgatacaatcacagaaggggatgagggtaatgtgtaggatgttgatgaaaaggttcattcctcttcattgaaagaaatgcggccgctcatatacgatccaatcttatctacgcgtacatgctacgtcacatctcttctatattgtcacctaacttcacttcagtggtcgtcgttttacaa

SEQ ID NO: 4316 - DNA, 210 bp, Glycine max
ttgagattccaatacactcacattagggataacgatagcatcatcttactaatctatttctctcactctaatccactttcaactcgctcttgtctttcttatggccactctaaatgctccaaacttatatttccatacctatctgatcaattatcgtctatagtgttagttacgatcgactaattgactgtctttgtacaaggtttgatc

SEQ ID NO: 4317 - DNA, 356 bp, Glycine max
gagagtcagattcgcacgcaatgcctcgcctcaaaacaacagctgcagcagcaattgctcccaaacgacgtggaaaggctccggctcttgccgctaagaagaagcctgagaaggtcacgaatccgttgttcgagaagcgtccgaagcagttcggaatcggaggggcgttgcctccgaagagagacttgactaggttcgtgaagtggccaaagaatgttcaaattcagaggaagaagaggattctgaagcagaggttcaaggttcccccagctttgaaccagtttaccaaaactcttgacaaaaacctagcaacaagtctgttcaagttgcttctgaagtacaggcccgaggacaaa

SEQ ID NO: 4318 - DNA, 121 bp, Glycine max
attactattactgatcaatcaaaatatctatcaaaagtaaaaagcgaagagaagggaaaaactttaatttttttatggtaaaaaattcaattatacctgttatttcacaaaaaaaaagaaa

SEQ ID NO: 4319 - DNA, 330 bp, Glycine max
  modified_base (194)..(194): a, c, g, t, unknown, or other
ggagagtcagattcgcacgcatttgctcgcctcacaacagcagctgcagcagcaatggctcccaaacgaggtggaaaggctccggctcttgccgctaagaagaagcctgagaaggtcacgaatccgttgttcgagaagcgtccgaagcagttcggaatcggaggggcgttgcctccgaagagagacttgactangttcgtgaagtggccaaagaatgttcaaattcagaggaagaagaggattctgaagcagaggttgaaggttcccccagctttgaaccagtttaccaaaactcttgacaaaaacctagcaacaagtctgttcaagttg

SEQ ID NO: 4320 - DNA, 327 bp, Glycine max
aaatcttcaatttaaacaactctctagtcaaaattgaaacacaaggtctgcttagtgtcaactgagacaaaagatacaaaataacaaaacacaaaatatagaatctatgctttttaaaaaagttttcttcaagaataaccatagagctgcctaagtactagtactaccctagataatcccaatcttgtttgccacatccaatgcatcgtaatcaggtgtcaacctgacatatgccttcttggtgccatcaggcctgatcaaggtgttcacttttttggcctggatgtcatacattttcttcaccgcatccttgatcttcttcttgtc

SEQ ID NO: 4321 - DNA, 111 bp, Glycine max
  modified_base (6)..(6): a, c, g, t, unknown, or other
cagaanagaagcaaaaaaaacaaaaaaaaagcgggcgccccagaaggttcaagcctaagttacccttcaagccaagttcaaactcttccaaaagggcacctaaattcaatt

SEQ ID NO: 4322 - DNA, 121 bp, Glycine max
agatgttgggaaaaaaaaaaaaaaaaaaaaaaaaaaaaaagcggccccacaagatgatccaagcttacgtcctcgtgcatacgacatcacacctcttcaatattgtcacctatcttcacat

SEQ ID NO: 4323 - DNA, 388 bp, Glycine max
  modified_base (370)..(370): a, c, g, t, unknown, or other
ggagtcagattcgcacgcattgcttcgcctcacaacagcagctgcagcagcaatggctcccaaacgaggtggaaaggctccggctcttgccgctaagaagaagcctgagaaggtcacgaatccgttgttcgagaagcgtccgaagcagttcggaatcggaggggcgttgcctccgaagagagacttgactaggttcgtgaagtggccaaagaatgttcaaattcagaggaagaagaggattctgaagcagaggttgaaggttcccccagctttgaaccagtttaccaaaactcttgacaaaaacctagcaacaagtctgttcaagttgcttctgaagtacaggcccgaggacaaagctgaaaagaaggangggctcttgaaaaaggct

SEQ ID NO: 4324 - DNA, 447 bp, Glycine max
gtaccggtcaggaattcccgggccgacacacgtccgatcaggtggcaaaaaaccacagaaaggggggccaaaagttattacaaaaagggcttcagttgggtatcccctccttggcttccatctcaatggtatcatgtcaagttccttacccgcaactagtgaagtgtttgcaaaacagtaaccatccacagaacccgtggaagaaaaactcacccaactccacttctatttccataacaacataacgggggaacacccaactgctatgaaaactgttttgcctcctaaggggtccattcatggttttggggctacttacatgatggatgaccctctaactgaagggacaagtccaacttcaaagcttgtgggaagatctcagggaatatacgctttggcttcacaacatgagcctgagttgctcatggtgacaaattttctcttcac

SEQ ID NO: 4325 - DNA, 386 bp, Glycine max
taatttgggaattattgctcccatcgccattggtttcattgtcggcgctaacattttgttgggtggggccttctctggagccgccatgaaccccgctgtgacatttgggcctgctgtcgtgagctggacctggaccaaccactggatctactgggccgggcctctcatcggtggtggaatcgctggccttgtttacgaggttgtctttatcagccacacccacgagcagcttcccaccactgactactagagggggggaaatgaaaataaaaaaaaaaaaaaattgtgtattattgaatttctctggaatcttcctctgtgtatggttttccttccttgtgttttcttcctaattcactttcgaaggttgtacttgttcctttcgt

SEQ ID NO: 4326 - DNA, 123 bp, Glycine max
cgtagtaagcgacgaaatgcttcggggagttgaaaataagcgtagatccggggattcccgatataggtcaacctttcgaactgctgctgaatccacgggcaggcaagagaaaaaaagataaag

SEQ ID NO: 4327 - DNA, 137 bp, Glycine max
  modified_base (27)..(28): a, c, g, t, unknown, or other
atgagcattgttgagattgatacaacnnacaaaaaaaaaaaaaaaaaaaaaaaaccggccccccaaaagattcaaacctaacttagcctgcaagccaagtcaaaactcctccaaaatggccaccaaaatcaattcaa

SEQ ID NO: 4328 - DNA, 294 bp, Glycine max
  modified_base (279)..(279): a, c, g, t, unknown, or other
gggtcgaccgacgcgtcgggaatagacgacagaaggggacttcacaactcaaactgcttcattgcataattgcagataagatcaacccttctaccttcagattcgcgggaagatggcatcacttcatgctaatgtgacatcagttgtttacaacagtggcaaccgtgtttctcaatcgaaatttgcaagctcttccttcttgtctgggttcgatgttgttggtcgtgcttcaagtgcttggaagaaggaactgtccatcttccatttcctggtgcctanagcaccctaacattt

SEQ ID NO: 4329 - DNA, 158 bp, Glycine max
cccccacccattgatgggcataatatctgaattgtttaacttctatggcaacaaacaaaagatcaaaaaacaaaacagtttttgctgttccttgaaccaatgaacaagcatatcatgtaagtaatggatgcgctaaaattattgtgaagacgacagca

SEQ ID NO: 4330 - DNA, 256 bp, Glycine max
actggtaccctgctcgtacggcccagaattcccgagtcgacgcatgcatccgcgcatgcgtccggtaggctgcgaacaagacgacggtacgggatacatccttttatccccgggtctagctccaaaaacatcatctcgtggtcaagattcgaaagctcactagagagtactgaagtgaaacaacgactgaaggctatggtttcgagcttgatacattcgacgccttccatttccaggctcaatgccacggtagtgt

SEQ ID NO: 4331 - DNA, 164 bp, Glycine max
aatcttgattgtgttgagcatcttcttgatcaaatcttgaagatacagcaaaaggaaagaggaggggaaaaaaaggggcgctccagagggattaagcttaagtaagccttgaagggaagttaaaactcctccaaaagggccactaaaatcaaattaagtggcgt

SEQ ID NO: 4332 - DNA, 124 bp, Glycine max
gaaattgtgttggagcaaaataccatcatgaagctaagaagcattctccttattgtgtgggctttgtttgctctcttgagccacgcttatggggaaatccgtttttgccaaaaaaaaataaaag

SEQ ID NO: 4333 - DNA, 152 bp, Glycine max
agggaattaaattccaaattgaattgttaccaggaggggcaacggtaatgccttgccaaaatgatcattaaattcatgaccccccttatggcaaaggaacccaacttaaaaacttccttaagcaaccaaaaaccggtttcggccctggtccg

SEQ ID NO: 4334 - DNA, 304 bp, Glycine max
ggagagtcagattcgcacgcattgcttcgcctcacaacagcagctgcagcagcaatggctcccaaacgaggtggaaaggctccggctcttgccgctaagaagaagcctgagaaggtcacgaatccgttgttcgagaagcgtccgaagcagttcggaatcggaggggcgttgcctccgaagagagacttgactaggttcgtgaagtggccaaagaatgttcaaattcagaggaagaagaggattctgaagcagaggttgaaggttcccccagctttgaaccagtttaccaaaactcttgacaaaa

SEQ ID NO: 4335 - DNA, 62 bp, Glycine max
gacagcatttttgaagtagtttgtgtaaacttaaagaagagttaacgaaaaaaaaaagaaag

SEQ ID NO: 4336 - DNA, 91 bp, Glycine max
  modified_base (65)..(66): a, c, g, t, unknown, or other
ggtagttagttagtagtgaaaaaatgaaaatggaacaagacgtttcagtttcacactcaacacannacccaaagccctaaaggaaagacga

SEQ ID NO: 4337 - DNA, 154 bp, Glycine max
gacccacgcatccatcaggtggcaaaaagacaacgaacggggtcatgcgttagtactgaagaactgaacatggatcacgaggtttcagtttcagactcactacatcacctacccccttatcgggcgggcgccctccctcggcggtcaggtcggc

SEQ ID NO: 4338 - DNA, 76 bp, Glycine max
aagagttctttgttatacttatgtttcaaaaaaaaccaaaaaataaagcggccgttctagaggatccaagcttacg

SEQ ID NO: 4339 - DNA, 181 bp, Glycine max
gacccacgcgtcagcccacgcgtccgaagacgacagaagggggatcgctctcacacctgtgattattcctcttttaacaatccacatccaaattctagggttccgaaatggacgctggcggaaagatcaagatgggcgccggacgtataaagggcagcggcacaaggaagaacccggtttc

SEQ ID NO: 4340 - DNA, 165 bp, Glycine max
ggggatatggcgaaattggtagacgctacggacttaattggattgagtcttggtatggaaacttaccaagtgagaactttcaaattcagagaaaccctggaattcacaaagggcaatcctgagccaaatcctgttttccgaaaacaaggaagaaggggggaaagg

SEQ ID NO: 4341 - DNA, 111 bp, Glycine max
ggatcactcagtaaatgtattttgtaccaaccggtcgctcgataggatcaaagcttacgtacccgtgcatgcaacgtccaatctccactatcgtgtcacctaaatacaatt

SEQ ID NO: 4342 - DNA, 351 bp, Glycine max
ctaatatcgcaatcgctgaacaatgttatttaacaaaaggatcgaccacaaataaaaacaacccaactccaatcatcatcaccacgtccagcaaaatacattcaaaagctatctaaaaatttgaggaacccacagtggcgcattagaaaccatgaccatagaatttatgagagaaatattatgggcaccgtgcctctccaacaatccccaaaacgttgcttaggcttcagcaaacccaagctcagaaagcttttggtgagcctcagcgtaatcagcgaagaaggcatcttcgtccgatgcatatttctcaacaagagggcggaacacagggtcagacaaaagtgccttgtc

SEQ ID NO: 4343 - DNA, 123 bp, Glycine max
aatgaataatacaagaaaaaaaaaaaaaaaaaaaaaaaaaaaacgggcgctccaaaagattcaagcttaagtaagcgtgcaatggaagtcatagctcctcgataatgtcacccaaattcaatt

SEQ ID NO: 4344 - DNA, 403 bp, Glycine max
ccgggtcgaccacgcgtccatccacacaacgggacagaaccataagcttcagcaatgggaaccacacatttcgagaaaaacagcttttacatccatgaacttatgggtattctcgtatactcttgaatcttcgacatgtcatcatacttgacccttattcccattcggtgatgattacagccggaatagtgtatgcgtcatacagacaatggttcaaaggtttgtgtaatatagaccacaactgtgctttggtctgcaagaacataggtttctacgttggcatgtacacaagcttctgccgctgctacatttgcaccaagatttgttgagatctcattagtcactactcttgctaagcagattaataaatcatttcctaagccaaatacattgcatctactct

SEQ ID NO: 4345 - DNA, 215 bp, Glycine max
gaggttaaggttgccgtgctggtggtcgagtacagatggcgggtagggtttcgacgtgctatcatccggctgttcgctcggattcacgctcatctatgcctgcatgcgacgtcatgactcttcggggatgtcattcatattcaaatcagttgacgccattttacaccatcctgactgggaacaccatttcatcacccacgatttctaccctccat

SEQ ID NO: 4346 - DNA, 170 bp, Glycine max
gagacctcaggtcacgcggggctacccgctgagtttaagcagatcaatacgcggaggagtcctgctgcatactacatgagatcattcgagcggccgctctataggatccaggggtatctagtcctgcatccgacgtcctatctctctctaagtgtcatccaatctcattt

SEQ ID NO: 4347 - DNA, 118 bp, Glycine max
ggagacaatggttcaccgacttggttcccttcagtgcggccgctctacaggatcaatacttacgtaagcgtgcgcgtgacttcatagctcttccatctcgtcacgtggcttcaagggc

SEQ ID NO: 4348 - DNA, 366 bp, Glycine max
acgcgtcagagacgacagaaggggctcattacagatcttccaaacttcagagcgcaggcaaacaacttcttctctcagacatggcatctcaagatggtgtgagaaaatgaagctgtgttgcacacattctgcttgcatttgctttcatggaggagaagcttctgatatttgtgcaagggaagcgtgtggcagtcaagtattactcagatgactggccaacaaacaatgcaaagttagcttttgagaagtttgtatttaccaagactgttaagacaaatgctcgtacagaagctgaggtaacactacttgagaacaatatcattatttacaaatttgtaacagacctgcatttttttgtcactggtg

SEQ ID NO: 4349 - DNA, 284 bp, Glycine max
cgcgtccatacaggcgtcagaacacgagtcagtggcgctgctataacacgacagaaagggattccaagtttcagtgcaaaaaaaaaaaaaagaaaaaaaaaagcggcagctgctagacgatcaagatttaagtatacgtacatgtgaattcaaagttctaccacagtgtcaccgaaatccaattcaatggcagtcgtcttagaacgtcatgatcgggaaagacaaaacgttacccataattaaactcattgcaccatgaaccacatttcgccattcggagtaat

SEQ ID NO: 4350 - DNA, 254 bp, Glycine max
aggcgtcagacggctacaagaagagaactgataggtgttgctgcggtattattacagaaggggacaccatccagtactcttcttttcagcagatcctcatgatctctgctaagctttcttttctttgaagtcatacgtcttcaatgtcatcacatttcacacttctgtggtcgtcggatttcatgctgtctgctgtcgacacttctcgagtctacgttctgtgtccttctcttcaccctcatgttttacgcctt

SEQ ID NO: 4351 - DNA, 303 bp, Glycine max
attcccgggactgacccacgcgtccgcccacgcgtcagtacaggcgtcagagggctacgaaaagacaaggtctgggagacggtcagttctattcgggagatcccgatgttctccggtccagtgccatggcttggggtcctggtcgctactctgagatccgcatgagggctacggatgggctgttcacggactaccacagtgacgacgaggttcatcatcaccagctactcacctactggagtggctattacagcagtcaggaaccacgagaagtgacctgtgtctggctgatgtcggcaccca

SEQ ID NO: 4352 - DNA, 398 bp, Glycine max
cgggtcgaggcacgcgtccacccacgcgtccgaattcgagcggccgctttatccagcgactcctttacctccaaaggccacatttcttgatgatccattacgagttcttcgagcaattagatttggtgctagatttgaatttactctagatgaagatctgaaagtagctgctgcatgtgatgatgtgaaagatgctctagctgctaaaattagcagagagcgcattggaactgagagtgatctgatgatatccggaaatcaacctgtcaaagctatgacgtataattgtgatcttacactattttggattgtattcagtcttcctcctgaatttgaaccttacatttcagatgggtgttaaaggctttgcatttcttacttggatactgcatggaacc

SEQ ID NO: 4353 - DNA, 349 bp, Glycine max
aattcgccggtcgacccacgcgaccacccacgcgtccgcccacgcgtccgggctgccatcatctacaacagagaccatgcatgggatgaccaatggattttctgggttggacctttcattggagctgcccttgctgctgtgtatcaccagatagtcatccgagccatccctttcaagacaagggcttaggctcttgtttttgtatgtgcttgcttgtattagttgttatttatgtatctggagtcttcttcatttggaaattcatgtgaatctttttgttttaatccactgtatggatgtaaattatgacatgattagttccttgattgtatctgtgacactctgcaaa

SEQ ID NO: 4354 - DNA, 143 bp, Glycine max
gctggcgggctccctcacgttcttctgagtaaaaaaagaggaagaggaaagagttggagcaaaagtagaagaggaaaaaacaagaaggggaacaaaaaaaaaaaagcggccgccctagaggatccaagcgtacgtacgcgtgc

SEQ ID NO: 4355 - DNA, 118 bp, Glycine max
gggcacaatgcaaggtaacacatcgacttgaaattcggccgctctagatgatccaggcgtacgtatgcgtgcatgctacgtcagagctcttccacgagtgtcacctacattcgcctcg

SEQ ID NO: 4356 - DNA, 345 bp, Glycine max
tttttgtttttttgccttctcatcatagggtctcttttgttcttctgtcatgtttttccactcttcggctgtgatctttggaacctccaagaaattcttgttctcagcaacaagagctgcccgtcaatcactagtgaacaagaaataagctgacatggggtgcttcggtttcaatggatccttctcattcttgttcttcttgccctcattttctgcctcttgtttgaattgcatgtactgttcgagcaactccatggcagtcttctgcttctgcacgtcttccaacaacctcattgcctcagtctcacgtttttcctttgcaatcatttgcaaataagcttcttt

SEQ ID NO: 4357 - DNA, 179 bp, Glycine max
ggattgtcacatgtcacttaacactagagataacccatttttcaaggactaaaaacaccattaaacccaaaggatcaaacttaaagtaaacataaaaaccaggtgctctataggatccaagcttacctacacttacatgagaggtcatagctcttcaatattgtcaccgaaattcaatt

SEQ ID NO: 4358 - DNA, 317 bp, Glycine max
taacttatagcctagatgaacttaacaattatgattgcctagatgttgtgaaaatacgacatgacacacactacgagggtcagtttaaggaaattgtgagtgagattgtgaagaacaaacacaaatttcaacaatcatgggtgatacacatcatgaggaaagcacataagttggcttactcttttgttaaagcgggactatctttatcatcttatttatgtctgtatgactaagtaacttttaatcgttgtctggggtttctttgtccaagtaatggagcttgccggcaacgctacaagcggccgctctagaggatc

SEQ ID NO: 4359 - DNA, 76 bp, Glycine max
acaagatgatcccagcttacgtccgcctgcatacgacgtcacacctctacaatagcgccacctaaaatcaaatcag

SEQ ID NO: 4360 - DNA, 92 bp, Glycine max
gccggtttcccgaacgatttgatggtttggaatgcatttcccaagcaacgagtcttcggttcgaaaccagcagagagggaaaaaaaaagagc

SEQ ID NO: 4361 - DNA, 276 bp, Glycine max
  modified_base (269)..(272): a, c, g, t, unknown, or other
taatttgggaattattgctcccatcgccattggtttcattgtcggcgctaacattttgttgggtggggccttctctggagcggccatgaaccccgctgtgacatttgggcctgctgtcgtgagctggacctggaccaaccactggatctactgggccgggcctctcatcggtggtggaatcgctggccttgtttacgaggttgtctttatcagccacacccacgagcagcttcccaccactgactactagagggggggaaatgaaaaannnngaaa

SEQ ID NO: 4362 - DNA, 153 bp, Glycine max
gaatcgcatgggcaaaccaaattcggcgctttcaacacggacactcttcacgatccacgcttaagtcctcatccatacgacatcatagcacgtctataatggcccatacattcagattcacagggcttacgtgtttgaatcatcgtgaccagt

SEQ ID NO: 4363 - DNA, 127 bp, Glycine max
gatactgaatatttcgactatcacacaaggagtttccaccgtatatccggctgcgctcgacgttctaagcttacgttcgcgtgcctgcgacttcatacctcttccatcgtttcacctactctcaatt

SEQ ID NO: 4364 - DNA, 59 bp, Glycine max
gattcacatacttactactgtcagtggcagagagagagaaagatgaaaacaacaaaaac

SEQ ID NO: 4365 - DNA, 358 bp, Glycine max
gccgaaagatgagacaaagatctaagtaggtgcttgaacaaggagtggagatgatgtgcttttccatctgctaccagcttcatgacattttatgctgtcatggctcttatgatgatcttgaggtctagtggcgaggggagcttccatcttgactttagtttagctttactggtctaaagattgctgttttagtgtgggttaagttatgatagtgagagttttgtgttatctaattatgtactggtacgttttgtatactttttggtttatcttactagcttaaatattaatattttgcagatagcaaaggctgttgagaatcaaggtaagcgggcgctctagaggatccaatcttacg

SEQ ID NO: 4366 - DNA, 137 bp, Glycine max
taccggtcaggaattcccgggccgacccacgcgtcagcccacgcgtccgaattggagcgacagcactacaggatggacgctaaagtgcgcgtcaatgcgacgtcatcactcatccataatgtcaccaagattcaatt

SEQ ID NO: 4367 - DNA, 328 bp, Glycine max
ggatgctttgccttttctattttctagtaactttgactcactaccattgtgtttctgcttgaggagatcactgtcttcaaccacagtaaccaagccaagagacacactttatcttccttcatgagaatatgagaatgaaactcactgtgccaccactcatatcaacttggtggtaggtagggcttgtgtgtggttcagaaagaagctttacttgtaaaaaaaaggagtgagaaagatggccactacagaatagagagagaaagagccacccaatactgagcagcttgtgggccattttgaagcggccgctctttaggattcaagctta

SEQ ID NO: 4368 - DNA, 127 bp, Glycine max
agggtggatgtcaatgcgcgaaaaaaaaggagaaacaaaaaataaaacgggcgcgctacaagatgcgatcttacgttagcgtgcatgcgaagtcataacacttctacaatgtcaccgaaattcaatt

SEQ ID NO: 4369 - DNA, 337 bp, Glycine max
agggtcacaactcagactgcttcaatgcataattgcagataagatcaacccttctaccttcagattcgcaggaagatggcatcacttcatgctaatgtgacatcagttgtttacacacagtggcaagcgtgtttctcaatcgaaatttgcaagctcttccttcatgtctgggttcgatgttgttggtcgtgcttcaagtgcatggaagaaggaacttgtcccatcttccatttccttggtgcctatagccaccctaacatttgattccccaactaccaattcacacataatcaagctagataagcacactcttgaccctgcttctccagattttctt

SEQ ID NO: 4370 - DNA, 271 bp, Glycine max
gttcgctacggagtaaatacacaaatggaaggtaagaaagaatcgtcttttaacttcgtcctttgtctcgtgtttatcggtactatattggacagcatgcattctgacaatattggcagcaacatttatggatagatggtaaactatcaccatagccatagatatgacagtctacgaaacgtacaaaggcgccactcgataggatccagtgcttacgtaagcgtgcatgctacgtgataatgacttctaaagtgtgacgatctcatcaatt

SEQ ID NO: 4371 - DNA, 128 bp, Glycine max
aacaacgacgttaagagcaaacaacggtacggctgttaaatacaacagcgggcgttctacaggatccatgcctacgtacccgtgcatgcgacctcgtaactcttcgacaatgtcacctagattcaatt

SEQ ID NO: 4372 - DNA, 327 bp, Glycine max
caatatatagaacgtagtatgggtgttgtgtccgtgttggccactgacacggacgtgggtcgaccatcggacacgacaatgggctggggtgtccgtgcttcataggttattggatcatcagatcatagatttgatatctgataactttggcagctatttttatttaactgggccttgtataacttttatttacgtcacttcatcaataaaacttccattgccttgaagtcaatgatgttcacattcacagttgacgtcacatgcaacacatccccctttcgccaactagagctgccgctcaagaggatccaagctttcgtacgcctg

SEQ ID NO: 4373 - DNA, 194 bp, Glycine max
ggtacatttcatttgaaccgatatggcgtcacttgtatgtcaccatttttccttgcatttcatggttatcatgtcaggttccttaccagcaaatagtgaagtgtttacaaaagagtcgccgatctcacgatccacactaaccttggaatgactcacacatctcaacttttatttccagaaccccaaattggggg

SEQ ID NO: 4374 - DNA, 359 bp, Glycine max
  modified_base (35)..(35): a, c, g, t, unknown, or other
ggtctagaattaccgggccgacccacgcgtccaanaggatacaagggccctgtgatgggggatgcttgacgccatgcgtgatacgggccgtgctgcttttagaccaatagtggataagattcaggattctgaatgttcgcagtgcttgcattatacaatatgattgcgtgaatttcatttgcctcccatatgtattaattggttgtgactcaagtattgacatctgcatttgcgtcagcatctcctgtgatcttatacattggaatcacagatcatacgcgtatttcaaattctggggtttcttccacactacacatgatctaaagcgtcagttcatcggggtacttaaaacgagcatc

SEQ ID NO: 4375 - DNA, 418 bp, Glycine max
  modified_base (157)..(157): a, c, g, t, unknown, or other
cgggtccgacccacgccgtcagaacggttgcaaaaaaccaacaaaagggggtaccttcctttaaaaattaaaattagatccataaccgttaacaaaactccaaacaaaggccctttccgctcctaacaaccctccgcgggtcaatttccttgggaanactcgtttccacaagaaaatcgattttccctggaaaacaaacactcccgaatctccgatgcgactcgtttcactttaattcgatgatgatcgccactatatgccgccctgtgcgttccccgtgggaggaaccaatggatcgctgcttccgattttttccatgcctcgccgatcctggtcgaaggtcttcgttgtgcttgaagttgtgcttagtgacgattcacctgatttatgctggcgtgctcttcttgttccatgggga

SEQ ID NO: 4376 - DNA, 61 bp, Glycine max
ggtccaggattcccgggtccaaccaagcgtccgaacggtggcaaaaaaacacaaaaagggg

SEQ ID NO: 4377 - DNA, 276 bp, Glycine max
ggttctagtgtgtgattgtttgttgatgtaactcgttcttcttcttttgatgttctgtgtttgtgtatgttttttctctcacctgaagatgtcttgctgcagtggtaactgtggttgcggcagctcctgcaagtgtagcaacggctgcaggagctgcaagatgttcccagacttgaactatcatgaggtcaaccatcgacgagaacttggtcatgggagtggcacgtgttaaggctcaattttagggtgcttaaatgggtgtgcccgctgagaacg

SEQ ID NO: 4378 - DNA, 107 bp, Glycine max
aggctttgttcacaaaagaactacgtaggtctgattttctcatcacaattgaggaatacgtaggagcaaagggaaacgcccttgtcgaccgaaaaaaaaaaaataac

SEQ ID NO: 4379 - DNA, 248 bp, Glycine max
ggtaccggtcaggaattcccgggccgacccacgcgtcagaccgctggtacgacacacacatcagggaaatacgtccatctgatgggatcttagaagcgtgtgcacgatttgagcacacaactggcatttgacgtcctcatcgtcgttttcgattaagagagcaatgacacggacgatccaaagggttcacacttacatcggaggaaaggtccgtcgaagcacttggcaacgatagccgctcgcaagtc

SEQ ID NO: 4380 - DNA, 178 bp, Glycine max
ggtcaggaattcccgggccgacccacgcgtcagcggatgcgacagtacggctgagagggaactcaaaactgagacagctttaatgcgttctcggagatttgatctgaccttccacccttcaattcgcgggacgatggcaggatctcacgctggcgtgacagaagttctcgacgacggt

SEQ ID NO: 4381 - DNA, 449 bp, Glycine max
  modified_base (368)..(368): a, c, g, t, unknown, or other
cggtctagaattcccgggccgacccacgcgtcagatgtttgaagtagatggcttcttcaagttttttatgtctgtgtttgatgtttgcttttgttgtggcttgctttgctcgtggcattcccacagaccaaccacccgtgctctacggagacacacacaagaatccatctacttcaaacattgagcatcatcaatggtcgggagacaaagttacacacccaatttcaacccatgtcaagttctcaagtttcacagagaattcagaaaggatactgacagaggtagattatgacggtccacatacacacccaaatccacctcctcatgctcagaagtttcgattgtaaacattgtcttctcaatgacanaaaataaataagattattatgtcacaattttaatttttcttatccttaatgtgccaaaatatttcgcatctttatgacctt

SEQ ID NO: 4382 - DNA, 177 bp, Glycine max
gggtcgagtcacgcgtcgagtcacgcgtcgcatcggtgcaagaatacgagcagcgggggggaaagggtcagatttatcctgacaggagcaagagttatagcacagtgtagtttgcttcagcagcaggtatgggcatgttgcagagaaaggagagggtccaatgcggtcgttcctcaa

SEQ ID NO: 4383 - DNA, 113 bp, Glycine max
agtgcggtctagaattaccgggtcgacgcacgcgtccacccacacgtccgacgacagaaggggaaacaaacaaagaactcactcaaactcaacatagagagagagagagagag

SEQ ID NO: 4384 - DNA, 146 bp, Glycine max
tccagatgcgacaatacaatcgaagggggatgtggcagaaagaaatcaggacgtgcaaacggaaagcggggactctaaaggatccaagcttacatacgccttcatgcgacgtcataactcttccatagtatcaccgaaattcaatt

SEQ ID NO: 4385 - DNA, 350 bp, Glycine max
  modified_base (269)..(269): a, c, g, t, unknown, or other
  modified_base (280)..(280): a, c, g, t, unknown, or other
gccttagggttagattcgttgttgttgttctaaaacgtccacacattctccgtcgccacaacaacaatggctccgaagaaaggtgtgaaaggttccgttgtagcagcgaagaagaaggttcaagagaaggtgacgaatcctttgttcgagaagcgtccgaagcagttcgggatcggaggcgcgctgccgccgaagcgggacctgacgcggttcgtgaagtggccgaagaacgtccaaatccaacgcaagaagcgcatcctcaagcagangctcaaggtcnctcctgcactcaaccagttcaccaaaaccctagacaagaatctcgccacgaatctatttaagatgctgct

SEQ ID NO: 4386 - DNA, 355 bp, Glycine max
gtctagaagtcccgggtcgactcacgcgtggatgcaataagactacacaaggggaacgtaatgtaaatcagaaacctgctgtattgcgcgtagtaattcacaatttgtggtaaaccaaatggcgaaagttttcggtgattttcggttccttcactgggttgccgctggcgtcttcagcaatatccagataaggcttttcgcaactcaatcacaatatgctgatcgcctacctgcagctattgaagctgacaaccattgtgcaagtcaaacgcgatcactgattgatcagattagcttgcaacaaggacgaattgtggccctagaagaagaacggaaacgcctagaccaaaaatgt

SEQ ID NO: 4387 - DNA, 385 bp, Glycine max
gacctaaaaattgtaccgaaatggcttcacttgggtgtcccctttttcccttgcattcaagggtaacaaggtaaggttcctaacaacaaaatagtgaaattgtttaaaaaagaatcccctaagtctctaatcacaaaaacccgtggaaagactcacccaactccacttttatttccataacaacaaaatgggggaacacccgactgctatgaaaattgttgagcctcctaaggcgtccatttctggttttgggactatttacatgatggatgaccctctaaccgaaggaccaagtccaacttcaaagcttgttggaagatgtcagggaatatatgctgaggcttcgcaacatgaacctgcgatactcatggtaacgaatttgttc

SEQ ID NO: 4388 - DNA, 53 bp, Glycine max
  modified_base (42)..(42): a, c, g, t, unknown, or other
  modified_base (44)..(44): a, c, g, t, unknown, or other
  modified_base (49)..(49): a, c, g, t, unknown, or other
gagacctcaggtcaggcggggctacccgctgagtttaaacanangatanaaaa

SEQ ID NO: 4389 - DNA, 152 bp, Glycine max
taaatactaaattaggtttttcaaaaggagaaaagaggaaaagagcaggggagaaagagaggaagggggaaaaaaagcgggcgctctagaggatcaaagcttaagtaggcgggcatgcgaggtcatagcgcttcgagagggtcaccggaaag

SEQ ID NO: 4390 - DNA, 387 bp, Glycine max
cgggccaacccacgcttcgaccaaaccttcgttccggtgccaaaagaccacaaaaaggggaagaagaagaagaacgagatggcgtcaattgtgaagaacgtactcaaatccgtcaaagaaaaaggtttccgggccttcctcaaggaactcaaaggtgaaaggtacctgaaaagccttcccgattggaatcccctgtcaaccaagattcacaataatggggcaacacttgttggtgttgataaatttggtaacaagtattatgagaaacttggagacacacagtttggaaggcacacgtgggttgaatatgcagagaagactagatataatgcctctcaagttccagctgaatggcatggttggctccacttcatcactgatcacaca

SEQ ID NO: 4391 - DNA, 75 bp, Glycine max
agacgacagagaggggttgacaaacgaaaaatgtcggccgcccgcaaggttccaagcttacttaggcttgcaggc

SEQ ID NO: 4392 - DNA, 219 bp, Glycine max
  modified_base (13)..(13): a, c, g, t, unknown, or other
  modified_base (189)..(189): a, c, g, t, unknown, or other
aggagaaaaaganagagttatatttcccactaaggaaatatgctatcaaggtgtaactttagagcaatcttatcggttaattggacatttacctcctttatactcgacaagttttgatatatctcgttttgtagtttcatgtttattgcttattggctgtgttaaacttcatgtcttctttagacctgnggtttcttgaagctaccaggatttatggac

SEQ ID NO: 4393 - DNA, 245 bp, Glycine max
gtgacattttagattccaatgcacataaaatttatgtatataaagatggacactgaaatcaaatcaggcatttcatttagtcctttgtactgtatactagtagtatgttgctggccatcatttgttgaaaacttaaaatgttagaaatagtaaaagggtgacaaattgtaataatgtatttatcaaaaaaaacaaaaaaaaaaaaaaaaaaaaaaaaaaaaaaaaaaaaaagaaaaaaataaaaa

SEQ ID NO: 4394 - DNA, 193 bp, Glycine max
aaaaaaaaaaacggccgctctaaaggatacaggccgatctacacgatccagccacatctaagctcgcctacgacgtcacctatcttcaattcagtggccgacattcatattcactggccatcggtaaaaacgtcgtgtaagggaaaaaactgccgtgaaccaaattaatcttctctgcagcagagctcctttc

SEQ ID NO: 4395 - DNA, 147 bp, Glycine max
gtatgtcgtgctgctgttctagatccttatgtgactcatttatttagacgatagtgatacaatctgcctctcaaaatgatcccatcatatatacgcgtgcagttacattcacacttcttcaaggttgtccccttttatccattcaga

SEQ ID NO: 4396 - DNA, 163 bp, Glycine max
cttatcaaaaaaaaactcacacaaaaatacaaatgaacaaacaatttcaaaaaaaatatttaatccatcattgaaatcaatcggctgctccaaaggatccaagcttactctatcccatgaatgctatctcaaaactcttcaagactgtcacctgatttcaatt

SEQ ID NO: 4397 - DNA, 379 bp, Glycine max
gggccgagccacgcgtcagtacaacctgtcaggacaacagtccgggagtcgtcatttcaattttcaatgtggatattccactgtaaagcatcaagacttaactcgaaccctccccgtcacaaaagaatatcctctttgtctgattatcgtcgtcaagatgttggatctccgtctcgagcaatgctcgctcctgaagaaagttttggaatccgtcaaggagctcgataacacgtatacttcactgcaccccatgtgttcgactccaagcactggattctactacgtgaacctcattgctcaccacaatctatacgcaggtttctatcagtacgactgcgacagcaacatctccatgggcatgaatctcaacaagatggcc

SEQ ID NO: 4398 - DNA, 78 bp, Glycine max
aacaacaaaagaaagaagaaaagaagaagggaaaaagcggccgactctaaaggatccaagcttccgtcgccctacagg

SEQ ID NO: 4399 - DNA, 137 bp, Glycine max
tcccggcacgaattcccggctcgaccacgcgtcagttgcgatgcgacaacacaacggaacgggtacaaccaagatatcacacggtacaggtgctagaaaactacaacagggtacagtttccaaaagacgacagaaag

SEQ ID NO: 4400 - DNA, 384 bp, Glycine max
ggagagtcagattcgcacgcattgcttcgcctcacaacagcagctgcagcagcaatggctcccaaacgaggtggaaaggctccggctcttgccgctaagaagaagcctgagaaggtcacgaatccgttgttcgagaagcgtccgaagcagttcggaatcggaggggcgttgcctccgaagagagacttgactaggttcgtgaagtggccaaagaatgttcaaattcagaggaagaagaggattctgaagcagaggttgaaggttcccccagctttgaaccagtttaccaaaactcttgacaaaaacctagcaacaagtctgttcaagttgcttctgaagtacaggcccgaggacaaagctgaaaagaaggagaggctcttgaaa

SEQ ID NO: 4401 - DNA, 293 bp, Glycine max
ggagagtcagattcgcacgcattgcttcgcctcacaacagcagctgcagcagcaatggctcccaaacgaggcggaaaggctccggctcttgccgctaagaagaagcctgagaaggtcacgaatccgttgttcgagaagcgtccgaagcagttcggaatcggaggggcgttgcctccgaagagagacttgactaggttcgtgaagtggccaaagaatgttcaaattcagaggaagaagaggattctgaagcagacgttgaaggttcccccagctttgaaccagtttaccaaaac

SEQ ID NO: 4402 - DNA, 164 bp, Glycine max
gtgaccaactgtgacatcaatatggatcatctttcaaatatcattatactcgaatgctcaattcctatgacacctcatgatcgcggcagcacggctacgatccaggttgagctagacgggattgctacatcagcgctcttctgtacaggcacctagattcaagt

SEQ ID NO: 4403 - DNA, 165 bp, Glycine max
caagaaagggaagtgtgcacctaaaaaaggaagcaggctttattgtataaaatgcttgcagggtcacttcaattatagcaacaatgaagattcatgttcgatcatgaaaaaaaaagaatgacgaaagtctacagcggcctctctagaggatgcaagcttaagtat

SEQ ID NO: 4404 - DNA, 286 bp, Glycine max
gggtcgacacaagcgtccgcccagacgttcgacagctgcgaaaagaccacagaatggggaaacactcccctttggcgctgttgttgttgccgcagcaccgaacaacttcccctgttaatcgcgtttcgtttgtgcaatgttttaaaagattgctgacgctgaagacattcaacctcctggtgttgataaaggaactggaatggtcaacgctggttttgcacgtgatgatgctcctaaggccgtgttccccagcattaatgggaaaccacgccatactggtgtaatg

SEQ ID NO: 4405 - DNA, 168 bp, Glycine max
ggaacgattcgacctaccaatacatacagtttcatacttcacacaatcgagaccatgataaatttccaaacttcatccatcaacaatgcggccgctctagatgatacaagcttaagtactcttgcatacaacatcctagctcttccacagtgtcacctaaatccagtt

SEQ ID NO: 4406 - DNA, 323 bp, Glycine max
gtcgacccgacgcgtcagcccacgcatccgtagaagacgacagaagggggcacccagagaggaggaagctttgagagagagagagggaggagggagagtgttgacgctccatcaagatgggtatttctagggattccatgcacaagaggcgtgccactggtggcaagaagaaggcatggagaaagaagagaaagtatgagcttgggcgtcaggccgcaaacaccaagttatcaagcaacaaaactatccggaggattcgtgttcgaggtggcaatgttaaatggagggcattgaggttggataccggcaattactcatggggt

SEQ ID NO: 4407 - DNA, 283 bp, Glycine max
  modified_base (271)..(273): a, c, g, t, unknown, or other
  modified_base (275)..(275): a, c, g, t, unknown, or other
  modified_base (277)..(278): a, c, g, t, unknown, or other
taatttgggaattattgctcccatcgccattggtttcattgtcggcgctaacattttgttgggtggggccttctctggagcggccatgaaccccgctgtgacatttgggcctgctgtcgtgagctggacctggaccaaccactggatctactgggccgggcctctcatcggtggtggaatcgctggccttgtttacgaggttgtctttatcagccacacccacgagcagcttcccaccactgactactagagggggggagatgaaaataannnanannaaaaa

SEQ ID NO: 4408 - DNA, 284 bp, Glycine max
agggacgaggaattgagttgatatcgaaagggaaacggtggtttaagtgacgatttgctgaataagtggagatggcaaacttcaatgtcatgcataaacaaacgatagctctcatagcagccaagatcagagatcctcactgagacgctttaatcggctttctcaatatcaatgaccaatccctttccctaaccggaaaacacagagctgccccttcattacatggctccgggacctttaggactccttacaggatgccatggtcaccatagaagatgttcaca

SEQ ID NO: 4409 - DNA, 341 bp, Glycine max
ccggtcagaaattcccgactcgaccaaccactcattcggccaagccttcgaacggtgccaaaaaaacacagaaaggaattgacaaataatatatatatatataaaagtttgctaatataaagtcaagaatataaagatatattataatatcaataactaaaatttagacaaatataacttcttttagatgaatttttctttaaaaaaattataaattgatcactatttcacttcacgcaccaatagaatttggagtgattttttctaataaaataaggaaataacaaaacaatatactacactacgtatatagtgatagatagcctcacacatgaagataa

SEQ ID NO: 4410 - DNA, 405 bp, Glycine max
taccggtaacgaattcccggctcaacccacgcgtcagaccgctgctacataacgacacaaggggacatcaacttgagacaaacacttaaatacctatcatgggaagaaataaactacagaataagaagtggcttcaatctccgaaatctccatgtacacgtgagcaacttatgctaaccagattacggtgctgtctaactcggattcattcctcaagctactgacactacagtcttccaccgtagtgacaccatcacactcaatgtaatgtttcaactaagagcctccataatggagaaagtatgtcacggagtgcaccgcaacttcattgatagcttcaatgatgctaccggatgttgatgacgctgccattaaagcttctcacaacaacttcgtgctcatgat

SEQ ID NO: 4411 - DNA, 344 bp, Glycine max
gaacggacgattggccatgttctctatgtttggcttccttgttcataccattgtcaccggaaagggtccattggagaacctcgccgatcaccttgctgaccctgtcaacaacaacccctgggcctatgccaccaacttcgtccccggaaagtgagcgtcaaagaacgaaatgacttttgagagtttttagctttgtgtttggtgaagtacttcagataatgtgaattatcttgtgtaaccaaatccaacttaatgttacttgctttttacaacactgtagcagcgcattaagcgcaaaaagctgccgctctaaacgatccaatcttacgtacacgtgcatgcga

SEQ ID NO: 4412 - DNA, 298 bp, Glycine max
aattcccgagtcgacccacgcctcagataggctgaaaaaaaacaacagaaggggacgccgatcagtagtacaaccatagcctcaattgtatatcgcctcattggcttcgatcccaatggtgacatgtaacatttctcatacgcaacaaggtcaaatgtttgatgcacagtatccagctaaagaagccactagaacaacagatcaggcaacgccacttcgattatcaaacaaacacttcagtggaacacccagatgcaactaaaactgtattgccaccaactgggtccactcattgttt

SEQ ID NO: 4413 - DNA, 333 bp, Glycine max
ggttactctcgtggtggtgacggtggtgatggaggctggagaaactagggcttgatgtcgttgattagggtttatgattatgctcagtaattttagttgtgtttgagtttgagtatctttatggttttgtgtcaccgtggttcttgtttttgaccaatatatctggttgtttatagtcgatttaatgaaatgataatcagaaattggagtaaaaaaaaaaaaaaaaaaaaaaaaaaaaaaaaaaaaaaataaaaaaaaaaaaaatcaccaaaataaaaaaagaaaaaaataaaaaaaaaggggccgctcaaaaggttccaaccttacttaccc

SEQ ID NO: 4414 - DNA, 315 bp, Glycine max
  modified_base (6)..(6): a, c, g, t, unknown, or other
aattcncgtaccgacccacgcctcagcccacgcgtacgtacaggcgtcagtacagcagcgagaggcagacagaaaggaatattccctacaattaaaccggccgcacgatccaatccaagctcacatagggtcgcaggacacatcatgacgcttccaaattggcacctaatgtcagtacattcgccgatcttttacaacatcttaactgagaagtcccaggttttaccgaacttggacaccgtgcatcacatccgcctttcgcaatctggcgtcatagttaaaaggcccaccacgctttacctacctaacatttgc

SEQ ID NO: 4415 - DNA, 71 bp, Glycine max
taaaggatcaaagctaacttacccgtgaatgcaacgtcaaacccctccaaaagggtcaccaaaattcaatt

SEQ ID NO: 4416 - DNA, 103 bp, Glycine max
aggtaaagctgccacacgacaagatccaggcatagctgcgcgtgcatgagacatcggtactcttctaaaatgtcaacaaaatgcaactgacgggacatcatta

SEQ ID NO: 4417 - DNA, 318 bp, Glycine max
ctcacaagactctcattcatcaaatttacaacaagtgttacacatgcttctatttatagactaggtagcttccttgaaaagatttcttgagaaaacttccttgagaagcttctttgagaaaactctcttgagaagctagagcttagctacacacacccctctcataactaagttcacctccttgagaagcttcctttagaagattcctaaagaagctagagcttagctacacatacctctctaatagctaagctcacctccttgagatgagaagctagagcttagctacacaccccctataatagctaagctcacccc

SEQ ID NO: 4418 - DNA, 345 bp, Glycine max
aggaggtgagaaaacaccacaaaggggattgcaaaaaaaaaaaaaaaaaaaaaaaaaaaagcggacgctctaaaggatccaagcttaagtaaaaccggcaggccaagaggatccacgcctacgtagtcatgcatgttaagttcaatggcctccatattgtcacctaaattcatgtcaaaggccttcggttaacaaagttaagcacggtaaaacacaggcgctttcaacatagtcgctttgaaccaaaacgccctttcggatcgtggttctaataagtagcacgaccgtaactgatcgcccttcacaagacttgtacaggctcaatggccaatggggatctccctg

SEQ ID NO: 4419 - DNA, 422 bp, Glycine max
cccgggtggccccacgcgtcagaataatatactagttaattaaacagcattcattaatcattacgaaacataaaccctgaacatggagatgaggaaatcatgtggcttcttcttcttgctcctcctccttgtctttgcttcccaggtggtggtgcagacggagggaagagtgtgtgagtcacaaagccacgggttccatggtttgtgtaatagagaccacaactgtgctttggtctgcaggaacgaaggtttctccggtggcaggtgcaaaggcttccgccgccgctgcttttgcaccaggatttgttgagatctcatcaaacactactcttgccatgcaaattaataaatcatagctaggccaaataaattgcatctactctttatccatttgggagctagctaccacaaccaactcatac

SEQ ID NO: 4420 - DNA, 92 bp, Glycine max
gccggtttcccgaacgatttgatggtttggaatgcatttcccaagcaacgagtcttcggttcgaaaccagcagagagagaaaaaaaaaaaga

SEQ ID NO: 4421 - DNA, 262 bp, Glycine max
ggtctctagggtttttgatcgttgttgttctaaagcactcatccacacattctccgtcgccacgacaacaatggctccaaaaaaaggtgcgaaaggtggacttgtagcagcaaacaagaaggttcaggaaaaagtaacgaaccctttgttcgagaagcgtccgaagcagttcgggatctgaggcgcgctgccgccgaagcgggacctgactcgcgtcgataagtggccgaagaacgcccatatccaacgcaagaatcacatc

SEQ ID NO: 4422 - DNA, 306 bp, Glycine max
gagacctcacgtcaagccgggctacccgctgagtttaaacatatcagtaacccgttgaacacaactctctgccaacatgggtaatctaccagacgctctatacgatccaagcttacctatgcttgcatgcaaaatgactgctcgtctaaaatgtcatctaaacttagttcactggctgtcatttttaaactttcagactggaaaacacttaggatgatccatcttaaacgtcttgctgtaaaatccccgttattcagattgcgtactagcaattacgcctgcagaaatcacactttcaatcacttg

SEQ ID NO: 4423 - DNA, 132 bp, Glycine max
cggctcacatattatgggtggcaaaattaaattaaacaacaaactcaaaaagcggccgccctagaggatccaagcataattacacctgaatgcgacctcatagctcttcgaaacagtcacctaaattcaact

SEQ ID NO: 4424 - DNA, 228 bp, Glycine max
  modified_base (190)..(190): a, c, g, t, unknown, or other
ctaccaatggctcccgcaaaggcagagaagaagcccgcggagaagaagccggcagagaaggccccaggggagaagaagccgaaggcggagaagaagatatcgaaggaaggaggaagcgagggagggggggggagagcggggggagaagcggcggctctagacgatgcaggcttacgtaggcgtgcatgcnacgtcatagctcttcgatagtgtcacctaagttcaatt

SEQ ID NO: 4425 - DNA, 248 bp, Glycine max
gtgacatgtgggtgatatctacagtagttgaattttctaactgaaatactgtatgacattctgaatgatctcaagctctctagtattatattcaggtagcatttacattcttccatgcgtgggggtgaaagaagtggttcgaatggtcgtctcaagaggatgaaaacttacgtgggcgtgcatgcgatctcatatctcgtcgctagtgtcgagtaaatgcagttcacagggcgtcttatatcaagttc

SEQ ID NO: 4426 - DNA, 112 bp, Glycine max
ttaccccaagcgtttaataatatggccgtgatctgtcattaggtgcgacgagcgccactgggaaagaaaaaaggaaaacgagggaaaaaaagcggccgctctagaggatcca

SEQ ID NO: 4427 - DNA, 137 bp, Glycine max
agacgtcagaacgaggagagaaaggacaaagataagataacagtaagagactcagagatgtctttgcaaagcggtcgatctagaggatttaagcttacgtactcatccatgagacgtcacaacgcttccatagtgtc

SEQ ID NO: 4428 - DNA, 130 bp, Glycine max
gaaacacaaacctcacaaaaaaaaaaaaaaaaaaaaaaaaaaaaaagcgggcgccccaaaaggttcaagcctaagtacgcctgcaagccaactcaaaactcctccaaaatgtcacccaaattcaattcaa

SEQ ID NO: 4429 - DNA, 153 bp, Glycine max
cgggtcgactcacgcgtcagcccgcgcctacaacaggagcgaaagagagactcaatggggcactcttcttcgtcacactaatcttcgaaactacacgacagcctatgtggtcgaaaatggcaaatgcccctcttcgcgtacggaaggttggag

SEQ ID NO: 4430 - DNA, 88 bp, Glycine max
aagagaaaaaaaaaaaaaaaaaaaaaaaaagcgggcgctctagaggatcgaggtgtacgtatacgtacatgtgaagtcatagctcttc

SEQ ID NO: 4431 - DNA, 351 bp, Glycine max
gtttttaatctttatctttggtattacaacttgattgtctaagtaactgctagttcttttctggattgtattgcgattactataataatagttttaagaactcagtcattttgtttccgttgaatgaaattgattgtcaaaatcacgtccattaagtatttgaatttttttagacatttttctacttcaaaaaaaaaaaaaaaaaaaaaaaaaaaaaaaaaaaaaaaaaaaaaaaaaaaaaaaattaaaaaaaaaaaaaaaaaaaaaaaaaaaaaaggggccgcccaaaaggttcaaaccttacttacgcgtgaatgcaacttcaaaacccttccaaagggtccccaaaat

SEQ ID NO: 4432 - DNA, 245 bp, Glycine max
ggaaagatttgatcagctggaaagcaaaagagaaaacagaaaaaaaaaaaaaaaaaaaaaaaaaaaaaaaaaagaagaacaaaaaagataaaaacaaaaaaacgaaaaaaaaaaaaaaacaaaacacaacaaaagcggccgcccaaaaggatccaaccttacgtccccttacaagcaacgtcaaagcccttcaaaaggggcaccaaaattcaatccacgggccgccgattaacaactccccaacg

SEQ ID NO: 4433 - DNA, 194 bp, Glycine max
tggtgaaacagccaccgaggaagagtgaaatggcactttctaacggaaccattagggtttttttatgctcatttttttggttaaactttgtttgaaatcaacgttcagcagtataattaatttgtttacagagaatgcagtacttttatcgcaattttcctggtttctactgaaaaccctccaaaaaaaaaaga

SEQ ID NO: 4434 - DNA, 293 bp, Glycine max
gacagcaaaacaattttcaaactcaattaccattccataacctaaatctcctctttgtttccgagtcagagagcaatggcacgtaccaagcaaaccgctcgcaagtccaccggcggaaaggcgccgaggaagcaattggcgactaaagccgctcgcaagtcagctccggccaccggcggagtgaagaagccccaccgcttcaggcccggaacggtggctctgagggagatcagaaagtaccagaagagcactgaacttctgatccgaaaactcccattccagaggctcgtcag

SEQ ID NO: 4435 - DNA, 178 bp, Glycine max
atacgaggttctctacatggttgatgctaatgatgagtatgctgttggccagcttaaggaatttgagggaaagaacttggtcactgctgcgaacgaaggcctaaaagttgatgatagcgatgacgaaaaaacaagagaaaattcaaattcagaaaaagccgccgcgctagaggatcca

SEQ ID NO: 4436 - DNA, 175 bp, Glycine max
gagacctcaggtcaggcggggctacccgctgagtttaagcatatcaataaacaaaaaagagaagaaaaaaaaaaagggccgctctagaagatgcaagctgatgtaagcttacatgcgaggtcatagcacttcgagagggtcacctaaagtcagggtgactggacgtcattttaca

SEQ ID NO: 4437 - DNA, 409 bp, Glycine max
aagacgacagaagggggcaggtagagagagcgagagaacaagaacataagggaaccacagcggcggtaacagaagaacaagcagagaatgggtcgagtgagaacgaagacggtgaagaaatcctctcggcaggtgatagagcgtcactactcgcgcatgaccctggacttccacacgaacaagaagcttctggaggaagtggcgataatcccgtcgaagaggctaaggaacaagatcgcggggttctcgacgcacctgatgaagcgcatccagaagggccctgtgcgcggcatctccctcaagctccaggaggaggagcgcgagcgccgcatggacttcgtccccgacgtctccgccatcaacaccgaccacatcgaggtcgacaaggaaaccctcgacatgctccact

SEQ ID NO: 4438 - DNA, 305 bp, Glycine max
gatttcttcttcttccacattctggtagttggtgtgctctttactctttatgtaatcaccgtctatgtgtctgtcatttccatgtgttacaactctgtgagatgcgatggatacataaacaggaagacgaacttcgctcacacttgctttcgatggtctgctcaatctgaacctaattgtgatgctagggtacattttccacaccatgaaatcggaaaagaaacccaaaaccgagcggccgctcgagatgatgcacgcttacctaagcatacgtgctacgtcatagcccatcggtcgtgtcagct

SEQ ID NO: 4439 - DNA, 184 bp, Glycine max
cgacggcagtgtttgtgttttgatttgaaaaaaaaaaaaaaaaaaaaaaaaaaaaaaacaaaaaaaaaaaaaaaaaaaaaaaaaaaaaaaaaaaaaaaaaaaaccggccgcccaaaaggatcaaacctaacttacccgtgaatgcaacgtcaaacccctccaaaagtgccaccaaaattcaatt

SEQ ID NO: 4440 - DNA, 57 bp, Glycine max
  modified_base (15)..(15): a, c, g, t, unknown, or other
gagacctcaggtcangcggggctacccgctgagtttaagcatatcaataagcgaagc

SEQ ID NO: 4441 - DNA, 83 bp, Glycine max
gtcaggaattccgggctcgacccacgacttcagtagggctgcaaaagaacaacggagggggtaaccataatgctccataattt

SEQ ID NO: 4442 - DNA, 406 bp, Glycine max
  modified_base (17)..(17): a, c, g, t, unknown, or other
ccgggccgacccacgantcaacgggcgcgagaggacgacagaaggggagggttttgcgctgttgttgctgctcatcctccgtaacctccgagctctgcaccgaagaacgaagccatggggaagacacatggaatgggatctgctcgcaagctcaagtcccaccgcaggaggcaaaggtgggctgacaagtcatacaagaaatcacatcttggaaatgaatggaagaaaccttttgctggttcatcccatgccaagggaattgtccttgaaaagataggtattgaggctaagcagcccaactctgccattcgtaagtgtgccagggttcaacttatcaagaatgggaagaagattgccgcttttgtccctaatgaccgttgcttgaactacattgaagagaatgacg

SEQ ID NO: 4443 - DNA, 315 bp, Glycine max
gtccatgaaattacgtgtatttaaaaaaaattacccacacgtatgtttgttaacaagtcttttaacccatgatttaaattgacgaagataaaaaaaaaaatgcacttaacccacacagattgcaatttgcaacctatatagtcagtgggtatcatcactatcatggaaagggtgcggtgttgcggtgagtttggtattgagtggctaagttcattgaagttagacgttagttagtccactgcaactgtaacggaataaagttagcattagacgtctatgaataccttctaattgtgccttccaaaaaaaaataaa

SEQ ID NO: 4444 - DNA, 333 bp, Glycine max
gaccacgcgtcagacgacagatgggggataaacaaatcgttacggttttttggttgtgcgagtgagagtgagagagagcaatggaagacatagcagagggagtgaataacatcatcatctctgattcgtatcagagtaatcgcattcatgtctctaacaccaagaagcccctcctcttctatgttaatctggccaagagatatatgcaacatcatcatgaggtctagctctcaactctaagaatggctattgccacagtagtaactgttgctgaaattttgaaaaacaacagacttgccgttcaaaagaatatcaggacatctactgttcaca

SEQ ID NO: 4445 - DNA, 414 bp, Glycine max
tgccaaaaaaacaacaaaagggaaaccacaaaatttatgtaactgatcaatctctttctctctctatctgtcgcttccatgcaatggcatatttgaagtcataaggttcaaaattggacaagttccgatctcacaatggggaaatcatcatcaaaatggatcatcaatgtactgtctgagataacgtcatccatatcaaatatttaaatacgcagaaagaatcatgttaatcatacaagaaagacttttaataacgtcaaaagtactataaaatggtttagccttaaaaccaaactcccatatcattgccacactttaggaagacctacagctggaaaatttagaagcagaaaaagtaatacttgagaatcaagaaatatacacaatgggatcaatttatgacaatgctgcact

SEQ ID NO: 4446 - DNA, 68 bp, Glycine max
aattcccgggccgacccacgcgtccaaccacgcgtccgagacgacagaaggggcatatcaataagcag

SEQ ID NO: 4447 - DNA, 97 bp, Glycine max
gccggtttcccgaacgatttgatggtttggaatgcatttcccaagcaacgagtcttcggttcgaaaccagcagagagagacaaaaaaaccaaaaacc

SEQ ID NO: 4448 - DNA, 282 bp, Glycine max
cgggccgacccacgcgtccaaccaatcgtccgacggctgcgaaagggcgaccgaacggggaacctgatcgatctcattaccagttgccacactacaccgagattccccctaaacccgtttgcgttgttgtctgcgaagacatggcgacaaccaggagcgtgggaacgttgaacgagggtgatttgaaagggaagatggtgtgcgtgagggtcgatgtgaacgtgcctttggataacaagcttaacatcaacgatgacactagagtccgtgctgatgttgcca

SEQ ID NO: 4449 - DNA, 359 bp, Glycine max
gcgtccgacaggagccaaaagacgaccgaaagggctgatgctggatctcccggaaatccttaacctagcatttatggcatgaagccagtccaacctgcagtggacaattttcctcaatatggacctgggcctgctgcttggggtgcacatgacatgcaacgagctcaaggacgccgataaattcctgttaagcaatcttattactggtaccttgggttgcaactttcaagatgattgactcatggttttaagaattaactactcctgaacgtcattgaatttgtctaataaatagtccctgaacttgtacgaacttttaaatacgcatatgttggttgaaggtgcagtagatgatgttt

SEQ ID NO: 4450 - DNA, 230 bp, Glycine max
aacgaaacgacgacagaatggagattttatacagaagtaatcgatttcagtcacatagaattcacacaaaataaatgtggcaaaaacacagagaaaaaaaaacaacaaagagcggtcgctctaaaagatccaagctgacgtaggcgtgcatgcgaagtcataactcttcaacattgtgacctaaagtcaattcactgggcgtccttttacaacgtcatgagtgggaaaac

SEQ ID NO: 4451 - DNA, 138 bp, Glycine max
ctcctcttttttcgttcactttgaattagctaggttaatttttttaacgcaaatttggtcaaggttattgaaatttctgtgtacggtgcagtgctaaaagaagatggcagtagaagtattagttttaaaaaaattatt

SEQ ID NO: 4452 - DNA, 280 bp, Glycine max
ttacagctgctagacgacgaaatatagctcacgataagaaatcgatgtcttactccattttacggacgctctaaaggatccaatcttactgtacacatggattagacatcatatctcttctatagtgacattgagatacagatcacgtgacgtcgcattacaccttcatgacaggcaaaatcctggtattaggaaacttaatcgactagcatcacatcccaccttcgcaagcttacgttatatcaaatatgacctcatagattacacttcacaataatta

SEQ ID NO: 4453 - DNA, 419 bp, Glycine max
  modified_base (102)..(102): a, c, g, t, unknown, or other
gacccacgcgtccaccacgccttcgttacggttccaaaaaaacaacaaaagggaaggtttcaagcccttcgtcgctgttttttgtgtgtcgcttcttcgtangtgcagctgcaatggtgaagggacgccaaggagaacgtgtcagactctacgtgaggggtacaatccttggatacaaaaggtccaagtcaaaccagtatccaaatacatccctgatccaaattgagggtgtgaatgccaaagaagaagtagcatggtatgctggcaagaaaatggcctatatctacaaggctaaggtgaagaagaatggaagccattaccgctgcatatggggcaaggttacaaggcctcatggtaacagtggtattgtccgtgcaaaattcaagtcgaaccttttcaccaaatcaatgggagcccga

SEQ ID NO: 4454 - DNA, 365 bp, Glycine max
tgggagggttagattcgttgatgttgttctaaaacgtcgacacattctccgtcgccacaacaacaatggctccgaagaaaggtgtgaaaggttccgttgtagcagcgaataagaaggttcacgagaaggtgacgaatcctttgttcgagaagcgtccgaagcagttcgggatcggaggcgcgctgccgccgaagcgggacctgacgcggttcgtgaagtggccgaagaacgtccaaatccaacgcaagaagcgcatcctcaagcagaggctcaaggtccctcctgcactcaaccagttcaccaaaaccctagacaagaatctcgccacgaatctatttaagatgctgctcaagtacaggccggag

SEQ ID NO: 4455 - DNA, 410 bp, Glycine max
acgcgtccaatcgatgctacaagaccacagaaagggacacttctcataatttatgttgtgaagtttgtttactctcagaacgaatagaagatttaacgccatggatgagatattgaacaaagtggggtcttactggttctccaacaaggccatcaaggaatttaactctgtcggctatgatatcaactcactgtcaaccactattgaatgcggaaccaaatggttggtcaacaacttaaaacgaaagatgcacaaggcattaacagcagttgctaaaggagtatgatctacccataggaatctttcctctcgatgcgacatatttcgaatttaacgaacagacatgaaagcttgttgtttacattcctcaactgtgtgaagttggccacatggatacgtcagttctgcgt

SEQ ID NO: 4456 - DNA, 90 bp, Glycine max
gagcagatcacaaagatccaagcttacgtaacgcgtgcaagccagctgctcgataggctataagctcacgtacgcgtacatgacaggtca

SEQ ID NO: 4457 - DNA, 95 bp, Glycine max
ggtaactaaggtgctcccaatactaatcaccatgagcaacgttcaagggctaacgaacaacagctgccataatattgctgactagcgcaatctca

SEQ ID NO: 4458 - DNA, 126 bp, Glycine max
ggttactaagggcgttacaatacacagccacataagacacttcaaacggccgttcgacacgatgcatccttacttacgcgtgcaagcgacgtctcagcacttctatattgtcacctaggttccatt

SEQ ID NO: 4459 - DNA, 323 bp, Glycine max
gagagtcagattcgcacgcattgcttcgcctcacaacagcagctgcagcagcaatggctcccaaacgaggtggaaaggctccggctcttgccgctaagaagaagcctgagaaggtcacgaatccgttgttcgagaagcgtccgaagcagttcggaatcggaggggcgttgcctccgaagagagacttgactaggttcgtgaagtggccaaagaatgttcaaattcagaggaataagaggattctgaagcagaggttgaaggttcccccagctttgaaccagtttaccaaaactcttgacaaaaacctagcaacaagtctgttc

SEQ ID NO: 4460 - DNA, 322 bp, Glycine max
ggagtcagattcgcacgcattgcttcgcctcacaacagcagctgcagcagcaatggctcccaaacgaggtggaaaggctccggctcttgccgctaagaagaagcctgagaaggtcacgaatccgttgttcgagaagcgtccgaagcagttcggaatcggaggggcgttgcctccgaagagagacttgactaggttcgtgaagtggccaaagaatgttcaaattcagaggaagaagaggattctgaagcagaggttgaaggttcccccagctttgaaccagtttaccaaaactcttgacaaaaacctagcaacaagtctgttc

SEQ ID NO: 4461 - DNA, 321 bp, Glycine max
gacgcattgcttcgcctcacaacagcagctgcagcagcaatggctcccaaacgaggtggaaaggctccggctcttgccgctaagaagaagcctgagaaggtcacgaatccgttgttcgagaagcgtccgaagcagttcggaatcggaggggcgttgcctccgaagagagacttgactaggttcgtgaagtggccaaagaatgttcaaattcagaggaagaagaggattctgaagcagaggttgaaggttcccccagctttgaaccagtttaccaaaactcttgacaaaaacctagcaacaagtctgttcaagttgcttctg

SEQ ID NO: 4462 - DNA, 300 bp, Glycine max
aggcaaaaagacaaccaaggggaagcaaaagggggaagctggtggacagatttacttgccagaagcttacgttagaaccatgaggactacttaatggagcaaatcagttggaaaaacgtgtagctagcttcccaactggcgtatctgaatgtggagaagcattatcaagccttaggagtaggacaacgagtactgtttgtgatgaatgtctatggtttaagaaaactgtctttagtcaacttgtgtgttttgttattcagttctcagcaataaactgcactggcaatctactttcatgtt

SEQ ID NO: 4463 - DNA, 145 bp, Glycine max
ggatgaccggttaacaggaaaatctcgcgggccaaaagaaacgaaaaagcagaagaagaaaaaagcggccgctctaaacgatccaagcttacttacgcgtgcatgcaacgtcatagctcttccatagggtcaccgaaattcaatt

SEQ ID NO: 4464 - DNA, 301 bp, Glycine max
gatgccgaaaagtagtaccaagatggcttcagttgtgtatctcctctttggcttccatctcattgttatcatgtcaagttccttacccgcaactagtgaagtgtttgcaaaacagtatccatccacagaacccgtggaagaaaaactcacccaactccacttctatttccataacaacataacgggggaacacccaactgctatgaaaactgttttgcctcctaaggggtccattcatggttttggggctacttacatgatggatgaccctctaactgaaggaccaagtccaacttcaaag

SEQ ID NO: 4465 - DNA, 249 bp, Glycine max
atcagattgaaggttttagtcctgagggccaaggtctgcaattttcccccttaatcagcaagcatgcaatgatgcattgtaaatgaaagtcaatcatctgaaagcttgagaaaaaattatttgattgagctaaccatgcacaattttcttttcaaagttcatgtttaataataaacttaggcattacattagctaaaacatttcaaagttcatttgggcattagatcaaacacataacttgcaactcat

SEQ ID NO: 4466 - DNA, 259 bp, Glycine max
  modified_base (25)..(25): a, c, g, t, unknown, or other
  modified_base (35)..(35): a, c, g, t, unknown, or other
  modified_base (42)..(42): a, c, g, t, unknown, or other
gtctgatttccttatcgcaattaangaatacgtangagcaanggaaacaccctcgtcgaccgcaaaaaaaaaaaaaaaaaaaaaaaaaaaaaaaaaaaaaaaaaaaaaaaaaaaaaaaaaaaaaaaaaaaaaaaaaaaaaaaaaaaaagaaaaaaaaaaaaaaaaaaaaaaaaaaaaaagggccccccaaaaggatcaaacctaacttacccttgaatgcaacttaaaaccccttcaaaaatgtcaccaaaattaaatt

SEQ ID NO: 4467 - DNA, 57 bp, Glycine max
catgtataattgagagaaggtgggaattttatattcttagttttatcctttttgaag

SEQ ID NO: 4468 - DNA, 200 bp, Glycine max
gttcgcaagttaagcagttaggggcagctgtagtattagaaatgctattttttgtttcccttttctgtggtagtgatgtctgtggaagtataagtaaacgttttttttttctctggcaattttgatgataaagaaaatttagttcttcaaaaaaaaaaaaaaaaaaaaaaaaaaaaataaaaaacaaaaaaaaataaaag

SEQ ID NO: 4469 - DNA, 249 bp, Glycine max
attcccggatcgacccacgcgcccacccacgcgtcagggctgccaaaaaaacaacaaaagggaaccaaacttaatccccccttggttgcagcttcagcaccaccggaaagcaattcaatccgcaatgggaaccaatttgaaggcaggaggtaattccaaaagaaccaaccttaaagccccaaatccaatggtaattaactcaaactcctcctcaaaccgttacgttttcctggtccgaagactgggaat

SEQ ID NO: 4470 - DNA, 390 bp, Glycine max
acgcgtcaacccactcgtccgtcgggttgcttgtggtgggttcccgtgggttcattctctttgcgcagttcctttcttcatagcctaccacttttctgctttcatctactctcacttcgcttcacaaactgccatgcagagggaaactcggataccagctgcaatgtctatgccaatatctaggatcatgaaggaattcccccggatcagcaaagtctcatcttcgccggaaagcaactcgaggactgccgtaccctcgccgactacaacatccagaacgagtcaacccttcaccttgtccttcgtctccgtggtggcatgcagatcttcgtcaagactctcactggcaaaaccataagcctagaggtcgaaagctctgacaccattgac

SEQ ID NO: 4471 - DNA, 161 bp, Glycine max
gagattagggtttctgcagccgccacactccctttctgaacgagatctcagatctctggttgatgcttcaaagaaccctaatctcatggctattgtttcctgcacttccatcattgcttccaaatgaatgaatgaatgaatgaatatcaaaaaaaaaagaa

SEQ ID NO: 4472 - DNA, 278 bp, Glycine max
aattcccggatcgacccacgcctccatccggtcgtaagaacacgcgtcaggggtacaacagtatgacaacgggggattcactcatctctcactccctcagcatttctatctatctcatgtttcaactttcccaacgggcactcatttatctctttgagttacaatcacgcccgcaacaagtcgacagaatcgcaatccacagccacgacttcagcctccattacatcacaccactcgtatactcgcatcaccattgtgatatttgacgccaatgcgag

SEQ ID NO: 4473 - DNA, 233 bp, Glycine max
cacgttttgcgcacaatcctgcgtaaacgcagatggacccatgttacttcctcatgatttggcttcagatgcgtacaacatcaccatcacttgagactgctcaaaagaaagagttatctccagagcagagcgggctaatataccacccttcctgcaactgatcaaaatagcttgctaggagatttaataagaggatgctctaaaggatccaagcttacataatcctgcatgcc

SEQ ID NO: 4474 - DNA, 267 bp, Glycine max
gcttgttggaaatgcacctgcatagtctagtgcttaattaggttgctgaagagtgaagaatgagacagcctggttcgaaggggaaaagcctaaggatatatcaaaggatcctatatgtataaattaaatgttgcttttttaccttcggtattgatatctgaattctaatttgacatcctatatatgaatatatgatcaatgtgtttctttaaaaaaaaaaaactacatcacaaaaaaaaagcggccgctctagaggatccaagctta

SEQ ID NO: 4475 - DNA, 159 bp, Glycine max
gaatatcaatatacgaagaaaaaaaaaaaaaaaaaaaaaaaagaaaagaaaaaaaaaaaaaaaaaaaaaaaaagcggacgcgctacacgataggatctaaccttaccttccattgcatgtcatatcacatctcttctatcatgtaacttaaattcaatt

SEQ ID NO: 4476 - DNA, 258 bp, Glycine max
tacggggaactaggatccacacaacgaaaatcacttgccattcgttggttattgggggcatcccgaaatcgtccgggtcgatatatggctttcaaattaagttccgaattagtggatgctgccacatgtagtggcgatgccagacacaaaataaaagacggttacggcagctaacaagcggacgctcaagaagatccaagcttacttacgcatgcatgcgacatcatagctcttctatggtgtcacccaaagtcactt

SEQ ID NO: 4477 - DNA, 331 bp, Glycine max
agatgtcagtacagcagagaaaggtccagatgcgggaatagtagagacaggctgacattacgatacagctgccataatccgaaaaaaatgatacggctgtcaaaagggttcaaactgacattgctgtgcattcaacatcaaaaggtatcgatgatgtcaccctacttcaagttaatggcccttcgattataaattccggtactggaaaaaccatgcctttaccggctttatcgcccttacaacaaatccccgttccgcaaccaacattatgaccaaaaggtgcattccaaattcccttcccaaaatttgctcacccggatattgcaatggg

SEQ ID NO: 4478 - DNA, 203 bp, Glycine max
aggtacagctgcgaggagcacacagcagggattgtagcatgactagtaaatgtcaattttaaaacttagtttcaattctactccgcatcgccgattctcgccatgccgaaagccaagtgggcgctctaaaggatcgaaacttaggtacacgtgaatgcgacgtcataggtcttcgaaactgtcacctaaatctcacttcagat

SEQ ID NO: 4479 - DNA, 250 bp, Glycine max
cgggccaaaagtggctttgctaataccattgtggctatgagtggtatgatatcatacttgtttacaattaagttttgaatagtacaacccttcacatgattatcactgataactggccgtcaaacccaaacccaaagccatttccttgcaaaagcggccttccaataggatccatccttacgtacacatgcatgccacttcataggtcttctacattgtccaccaaattcagttcaccggacgtcgtttt

SEQ ID NO: 4480 - DNA, 327 bp, Glycine max
taaagagaatgagacatacgggggtcctctgagcagtcacgtagggctcgcatttcgcgatcgccctatacggtcgctctttcctatccttgcatgcgatctaaaagatctaccattatgtaagtgcagttcaatacattgaccgtgcttttagaaactattaactgagaagcagttgcagggatttaacttacgctccttgcaggagacgtgtcttacgttaccctgctgcatatgtaacaagtcggacccaatgtatattcacaccagttgataaccccgaatggggattgaaaggcacctactttcgacaccttcatcacagcg

SEQ ID NO: 4481 - DNA, 370 bp, Glycine max
ttcccgactcgacccacgcgtaaggaggatgcgacagaacgggactcagcatttgcatttcctcttcatatacagtacacacttcagctggtggtagcctggtagatagtgtgcttccaaaatgaagaacaaaaggaagactttactattgctgctgctcatggctgcaactctcttttgcatgccaattgtgtcgtatgctgtttctaatgtcaacattcaagaccatctcaccaatatttctgagctggtaaaaggtccaaatagaaggcttttgtcatttgtggattgtggagagaggtgcagggtgaggtgcagtttgcactcaaggccaaagatttgcacgagagcttgcgggacatgctgtatg

SEQ ID NO: 4482 - DNA, 289 bp, Glycine max
taattcttgagtattaatgttgattgcttgtgtcaatatgtccaagggattgggtatcagcaagtagtttagaatttgcaaccatgcggaagctagggtagaatacattagtgaattggggatgagcaagagagatgagtagagaattggggatgagcaagttcaaacctagacattcattaatcaagatcgacgtcacaatccaagtctagtatttctatctttacttaattattttattgtcatttaatttttattgcaatttattttatgttatttatttcatggc

SEQ ID NO: 4483 - DNA, 128 bp, Glycine max
aaaaactgacggcaacatgatgtgatgtgaatgtgaatgtaatggcggccgcactagatgattcaggcttacgtccgcgtgtatgcgacgtaatacctcttctatgttgtcatctaaattcagttcag

SEQ ID NO: 4484 - DNA, 137 bp, Glycine max
agtttaagcatatcaataaagcggaggagacgctcaaaaggatcaaagcttaagtaagcggtcgatctaaaggaataaagcttccatacgcttgcatgcgatctcatcactcgtcgacattgtcacctatcttcact

SEQ ID NO: 4485 - DNA, 322 bp, Glycine max
gaattgcatttgtgttgagtttcttcttctgttgcgttgtgtgtgagtgtgggcacggtaagatgcagaccattgctaggcgcttagggcagcaatcgctgaggccatcgacgtcgctcaagtccatctatccaatttccgatcaccattatggaatggatcacgagcgttacgtttctaccctcgccaccaagggagttggtcacctcgttcgtaagggcactggtggacgatcctccgtcagtggcattattgctacagtattttggggcaactggattcttaagtcgttatgttgtccaacaacttgctaaaatgggat

SEQ ID NO: 4486 - DNA, 452 bp, Glycine max
  modified_base (431)..(431): a, c, g, t, unknown, or other
aattcccgggtcgacccacacgtccacccacgcgtccgaagacgacagaagggggcctacttcatctctcttataatcacacacacctaccttatagctatggaaactggaggctttcatggctaccgcaagctccccaacacaacctctgggttgaagctgtcagtgtcagacatgaacatgaacatgaggcagcagcaggtagcatcatcagatcagaactgcagcaaccacagtgcagcaggagaggagaacgaatgcacggtgagggagcaagacaggttcatgccaatcgctaacgtgatacggatcatgcgcaagattctccctccacacgcaaaaatctccgatgatgcaaaggagacaatccaagagtgcgtgtcggagtacatcagcttcatcaccggggaggccaacgagcgttgccaganggagcagcgcaagaacataac

SEQ ID NO: 4487 - DNA, 424 bp, Glycine max
aattcccggccgacccacgacgtcagcccacgcgtccggtctcaacttctgctcttccaactcctacaacgcttttctctgcactcatgggcaaggtcaagatcggaatcaacggatttggaagaattggccgtttggttgccagagtcgctctgcaaagagacgatgttgaactcgttgccgttaacgaccctttcattaccaccgattacatgacatacatgtttaaatacgacagtgttcacggacactggaagcatcacgatgtcaccgttaaggacgagaagacccttctcttcggtgacaaggcagtcactgtttttggacacagaaaccctgaagagatcccatgggggtcaactggagctgacatcattgttgagtccaccggagttttcaccgataaggacaaggctgccgcaca

SEQ ID NO: 4488 - DNA, 453 bp, Glycine max
tttctcaacaacttctgctacttcctactccaaccgcacttctgctccgcaattatcatgggcaaggtcaagatcggaatcaacggatttggaagaattggccgtttggtagccagagtggctctgcagagagacgatgttgaactcgttgccgttaacgaccctttcatcaccaccgattacatgacatacatgtttaaatacgacagtgttcatggacactggaagcatcacgatgtcaccgttaaggacgagaagacccttctcttcggtgacaagccagtcactatttttggacacagaaaccctgaagagatcccatgggggtcaactggagctgacatcattgttgagtccaccggagttttcaccgataaagacaaggccggcgcacattttgaaggtggtgccaaagaaggtattatttctggccccagtaaggatgcccccatg

SEQ ID NO: 4489 - DNA, 441 bp, Glycine max
  modified_base (317)..(317): a, c, g, t, unknown, or other
  modified_base (369)..(369): a, c, g, t, unknown, or other
  modified_base (376)..(376): a, c, g, t, unknown, or other
tttctaatctcattctccttctgttcaaacactctctctcatggcatcagataagaagattaggatcggcatcaacgggtttggaaggattggccgtttggtggccagggttgcccttcaaaggaatgatgttgaacttgttgctgtcaacgatcctttcatcaccactgattacatgacatacatgttcaagtacgacaccgttcatggccagtggaagcattttgatgtgaaggtgaaggactctaagacccttctctttggtgagaagcccgtcaccgtttttggaatcaggaaccctgaggaaattccatggngtgaggttggtgctgattatgttgttgagtcaactggtgtattcactgacanggacaangctgctgctcacttgaagggtggtgccaagaaggttgtcatctctgccccaagcaaagatgcacc

SEQ ID NO: 4490 - DNA, 448 bp, Glycine max
aacttctgctacttcctactccaaccgcacttctgctccgcaattatcatgggcaaggtcaagatcggaatcaacggatttggaagaattggccgtttggtagccagagtggctctgcagagagacgatgttgaactcgttgccgttaacgaccctttcatcaccaccgattacatgacatacatgtttaaatacgacagtgttcatggacactggaagcatcacgatgtcaccgttaaggacgagaagacccttctcttcggtgacaagccagtcgctatttttggacacagaaaccctgaagagatcccatgggggtcaactggagctgacatcattgttgagtccaccggagttttcaccgataaggacaaagccgtcgcacatttgaagggtggtgcaaaagaggttattatttctgcccccagtaaagatgcccccatgtttg

SEQ ID NO: 4491 - DNA, 220 bp, Glycine max
tcgtccgctttttctttttttttttatgatttctgttttagctacacaaagtgtttattccgaattcgcactggtttaatctcgatttagataaaaatttggaacggtgtatcgttgatattcaagctcagactcaattctataatccactgatgcaaagtggacaatcaaattaattacacatgaactttaaccccattctttgtcataccaataaaca

SEQ ID NO: 4492 - DNA, 436 bp, Glycine max
  modified_base (415)..(415): a, c, g, t, unknown, or other
gttcatctcttgtggaggaagacaagcttagccttgcaactacacttctcgaaaaggccaaggctaaaggggtttctttgttgcttccaactgatgtggtcatagcagacaagtttgctgctgatgctaacagcaagactgtgccagcatcaagcatcccagacgggtggatgggattagatattggtcccgattccatcaagacatttggtgaagcattggataagacccagaccgtcatttggaatggaccaatgggtgtttttgagtttgataagtttgccacaggaacagaggccatagccaagaaactggcagagctgagtgggaagggagtaacgaccatcattggaggaggtgactctgttgccgctgtggagaaggttggtcttgcagacaagatgagccacatctncactggtggtggtgccagctt

SEQ ID NO: 4493 - DNA, 410 bp, Glycine max
gctgcaaccaatgtcatctttggccttgctctgggatacaagtctgtcattattcctatttgggccatcgcaatcagcatttttgtgagttttacttttgctgcaatgtatggcattgctgtggctgcccttgggatgctgagcaccattgcgacagggttggctattgatgcctatgggccaatcagtgacaatgcaggaggtattgctgagatggcaggcatgagccatcgtattcgtgagagaactgatgcccttgatgctgctggcaacactactgctgccataggcaaaggatttgctaatgggtctgctgcttttgtgtctttggccctaattggtgcatttgggaaccgaacttgaattttgacttgtgatgtcttgacttccaaagtctttattggactcat

SEQ ID NO: 4494 - DNA, 431 bp, Glycine max
actgatttgcctcttcttctagttggatatggatttggtgcctcctttgttgcactatttgcccagttgggtggtggaatatacacaaaggccgctgatgttggagcagaccttgtcggaaaagtagaacagggaatacctgaagacgaccctaggaatcctgctgttattgctgatctggttggtgacaatgtgggagattgtgctgctcgaggtgctgatctttttgaaagtattgcagctgaaataattagtgccatgatacttggtggaacaatggcacaacgctgtaaaattgcagatccatctggcttcatcttgtttcctcttgttgttcactcattcgatctgatagtttcatcagctggaatattttctatcaagggtacacgtgaaactggagttatagttcctgtggaggattcaatgac

SEQ ID NO: 4495 - DNA, 443 bp, Glycine max
tggggttgtggctgtgaacaacaacatcaacaactatgaatccaaggcaacttccaccgtcaccattaagggcattctcagccttctaatggaaagcattgatgatgagaattgtgatggtggtggaagcaagaagagagttatttctcttggtatgggtgacccaactctcaccacattgttccacacaccaaaggttgttgaagaggctgtcgctgatgctcttcaatctcgcaagtttcatggctatgctcccactgctggacttctccaggctagaattgcaattgctgaatatctatctcgtgacctttcttatcaattatcacgagatgatgtcttcatcacttgtggatgcacacaagccattgatgtttcggtggccatgcttgctcgccctggtgcaaacatcttgcttccaaggccaagctttccaatctatg

SEQ ID NO: 4496 - DNA, 265 bp, Glycine max
taagcagtgtgaggagcttgggattcttgttgacagagatgatcagggcactctgcttcagattttcaccaagcctgttggggacagggcaacgatattcatacagataattcagaggatccggtgcatggtggaggatgacgaacggaacgtgtagcagaacggtgcatgtgggggttttgggaaaggcaatttttctgagcttttcaaatccattggagaatatgagaacactttggtagctaaaagaaccgcgtaagcacat

SEQ ID NO: 4497 - DNA, 473 bp, Glycine max
accggcttcgcggaggtgcgcctctacggcgacgtggtgctccgctacgtcagctacaaggacgccgcgccgcatgcgccacacgcagatccgtcgcggtggttcctgccgggattcgaggccgcggcgtcgtcgtcttcgtttccggagctggactacgggatccggcggctggaccacgccgtcgggaacgttccggagctggcgccggcggtgaggtacctgaaaggcttcagcggattccacgagttcgcggagttcaccgtggaggacgtgggaacgagcgagagcgggttgaactcggtggttctggcgaacaactcggagacggtgttgctgccgctgaacgagccggtttacggaacgaagaggaagagccagattgagacgtatttggaacacagcgaatgtgctggtgtgcagcaccttgcgcttgttactcacgacatcttcaccacactgagagagatgag

SEQ ID NO: 4498 - DNA, 441 bp, Glycine max
  modified_base (369)..(369): a, c, g, t, unknown, or other
gccaatacccatgtgcaacgaaattcaagcccaagcccaagcccaagcccaagcccaacctgggttgaagctcgtcggttgcaagaacttcgtccgaaccaatcctaagtcggaccgctttcaagtcaaccgcttccaccacatcgagttctggtgcaccgatgccaccaacgcctctcgccgattctcttggggacttggaatgcctattgtggcaaaatctgatctctccaccggaaaccaaatccacgcctcctacctcctccgctccggcgacctctccttcctcttctccgctccttactctccctctctctccgccggctcctccgctgcctcctccgcctccattcccagtttcgacgccgncacctgccttgccttcgctgccaaacacggcttcggcgtccgcgccatcgccttggaagtcgccgacgcgga

SEQ ID NO: 4499 - DNA, 381 bp, Glycine max
cccacgcgtccgcccacgcgtccgcccacgcgtccgacaacttctgctacttcctacgccaaccgcacttctgctccgcaattatcatgggcaaggtcaagatcggaatcaacggatttggaagaattggccgtttggtagccagagtggctctgcagagagacgatgttgaactcgttgccgttaacgaccctttcatcaccaccgattacatgacatacatgtttaaatacgacagtgttcatggacactggaagcatcacgatgtcaccgttaaggacgagaagacccttctcttcggtgacaagccagtcactatttttggacacagaaaccctgaagagatcccatgggggtcaactggagctgacatcattggtg

SEQ ID NO: 4500 - DNA, 405 bp, Glycine max
cagaagcatggtgctactggatggcttgttaacactggttggtctgctggaagctatggtaatggaagccgtattaaactacaatacacaaggaaaatcattgatgctattcactccggaagtctcctgaatgcagagtacaagaagactgaaatttttgggcttgagattcccaccgaagtggagggtgtcccttcagaaattctggatcctatgaacacttggtcaaacaaaaaggcctacaaggagacactattgaagttggctggattgttcaagaacaattttgaaaccttcaccaactacaagattggcaagggaaacaacaacctgacagaagagattctcgcagctggtccaatcttttgagacaatgttatgcaacatgttgtgtggttgggaatg

SEQ ID NO: 4501 - DNA, 357 bp, Glycine max
  modified_base (250)..(250): a, c, g, t, unknown, or other
gaacagctgaggctttggctgcacaagtgagccaagagaactttgataagggactcatatacccaccattcaccaacatcagaaagatttcagcacacatagctgccaatgttgctgctaaggcttatgaacttggcttggccactcgccttcctcaacctaaagatttagtgaagtttgcagagagctgtatgtataccccagcctacagaagctaccgatgaaaagtgataataataaataggcgctnttttctttttcatttatcatgaaatcatttcattggcaattttttaaatttttaccttccttaaggtcctggtatggtttttggaaagtatttggattgggtgggtt

SEQ ID NO: 4502 - DNA, 357 bp, Glycine max
agcggacgcgtgggcggacgcgtgggcggacgcgtgggcggacgcgtgggcggacgcgtgggcggacgcgtgggtgcaagtggaagcccttttgaaaatgtagatcttggaaatggagaagttggccatgtaaatcaagccaacaacatgtacctgtttccagggtaggcatgcctttgtggcttatattttttcacggatcatgccactcagtggaaacattggcagaatgttcgaccgcaacatttcatttcaggattggtttggggacacttttatcacgtgctcgtcatataacagatggaatgttgcgagcagcagccgaatgcgcagtaatgcaggtgtggcaaaatggga

SEQ ID NO: 4503 - DNA, 370 bp, Glycine max
atcaaatctctctttatatataaccctcacaatgcggaaatatgctgcagacagattcaggcaccttttcaaccgttcactccttcttctgcgtcaccgtcaccatcataatcaccatccctttccttattcttcttctgtttcatccctctccccattttctcgctctcgtttcttgtcctctactcctttctccatggcttctgattcccctttccctgtcaccgctcaaaacatcaaccccaaggttctgaaatgtgagtatgctgttagaggagaggttgtcacacttgcccagaatttgcaaaaggatttacaggccaatccaggttctcacccatttgatgagatactttactgcaacattgga

SEQ ID NO: 4504 - DNA, 418 bp, Glycine max
cccacgcgtccgcccacgcgtccgggcaccttttcaaccgttcactccttcttctgcgtcaccgtcaccatcataatcaccatccctttccttattcttcttctgtttcatccctctccccattttctcgctctcgtttcttgtcctctactcctttctccatggcttctgattcccctttccctgtcaccgctcaaaacatcaaccccaaggttctgaaatgtgagtatgctgttagaggagaggttgtcacacttgcccagaatttgcaaaaggatttacaggccaatccaggttctcacccatttgatgagatactttactgcaacattggaaatcctcagtctctgggccagcagccaataacttttttccgagaggttcttgcattatgtgaccatccagctatattggacaa

SEQ ID NO: 4505 - DNA, 381 bp, Glycine max
cccacgcgtccgcccacgcgtccgggcaccttttcaaccgttcactccttcttctgcgtcaccgtcaccatcataatcaccatccctttccttattcttcttctgtttcatccctctccccattttctcgctctcgtttcttgtcctctactcctttctccatggcttctgattcccctttccctgtcaccgctcaaaacatcaaccccaaggttctgaaatgtgagtatgctgttagaggagaggttgtcacacttgcccagaatttgcaaaaggatttacaggccaatccagcttctcacccatttgatgagatactttactgcaacattggaaatcctcagtctctgggcccagcagccaataactttttttccgaga

SEQ ID NO: 4506 - DNA, 287 bp, Glycine max
caggcaccttttcaaccggtcactcattcttctgggccaccggcaccatcaccaggccttggcttcttcttcttctctctccccattttctcgctctcggttcttctcctctacgccgttctccatggcttctgattccccttttcctgtcaccggtcaaaacatcaaccccaagggtcttaaaatgtgagtatgctgttagaggagagggtgtcacacttgcccagaatttgcaaaaggatttacaggccaatccaggctctcacccatttgatgagatactttac

SEQ ID NO: 4507 - DNA, 427 bp, Glycine max
  modified_base (378)..(378): a, c, g, t, unknown, or other
cccacgcgtccgcccacgcgtccgcttttctattctattaattacagggaccatcaaaaccaaaaaagccaattaatagttattcttttggattcttattgttcatcgcagactcaacactctctccagacacttccttcatcaaatggcttctcacgacggcatctccgctgcttcttcagattccgtcttcaatcacctcgttcgtgctcccgaagatcctatcctcggggtaactgttgcttataacaaagatccaagtccagttaagctcaacttgggagttggtgcttaccgaactgaggaaggaaaacctcttgttttgaatgtagtgaggcgagttgagcagcaactcataaatgacgtgtcacgcaacanggaatatattccgattgttgggctagctgattttaataaattgagtgct

SEQ ID NO: 4508 - DNA, 440 bp, Glycine max
  modified_base (376)..(376): a, c, g, t, unknown, or other
cggacgcgtgggttccgcaaatggcttctcacgacagcatctccgcttctccaacctccggttctgattccgtgttcaatcacctcgttcgtgctcccgaagatcctatcctcggggtaactgtcgcttataacaaagatccaagtccagttaagctcaacttgggagttggtgcttaccgaactgaggaaggaaaacctcttgttttgaatgtagtgaggcgagttgaacagcaactcataaatgacgtgtcacgcaacatggaatatattccgatcgttgggcttgctgattttaataaattgagtgctaagcttatttttggggctgacagccctgctattcaagacaacagggttaccactgttcaatgctngtctggaactggttctttaagagttgggggtgaaattttggctaaacactatcaccaacggact

SEQ ID NO: 4509 - DNA, 385 bp, Glycine max
  modified_base (349)..(349): a, c, g, t, unknown, or other
attaatagtaatacaaacagcagcatgcgcccacccgttattctcaaaactaccaccgtgtttgtggaatctttcttctcgtcaccaccctgtgatcgcagactcaacactctcgctagacacttcctttcgcaaatggcttctcacgacagcatctccgcttctacaacctccgcttctgattccgtcttcaatcacctcgttcgtgctcccgaagatcctatcctcggggtaactgtcgcttataacaaagatccaagtccagttaagctcaacttgggagttggtgcttaccgaactgaggaaggaaaacctcttgtttttgatgtagtgaggcgagttgaacagncactcataaatgacgtgtcacgcaacaaggaatata

SEQ ID NO: 4510 - DNA, 455 bp, Glycine max
  modified_base (435)..(435): a, c, g, t, unknown, or other
  modified_base (442)..(442): a, c, g, t, unknown, or other
ctctccctctctgttcgcactctgtctttcccctgtttccgcgtcactgagtcatggcgattcgcaactcgctcaccggccaattcctccgccgcagctccgtcgccggagcaaggctcatgtcttcttcgtcctcatggttccggagcatcgagcccgctcccaaggatcctatcctcggagtcactgaagctttcctcgccgatcagagtccaaacaaagtcaacgtcggagtgggtgcgtatcgcgatgaccacggaaaacctgtggttttggaatgtgttagagaagcagagaggagggttgccggaagtcaattcatggagtatcttcccatgggtggaagcataaaaatgatagaagaatcgctgaagctggcatttggagacaactctgagttcatcaaggataaaagaatagctgcagtgcatgctntatctgngactggtgcatgt

SEQ ID NO: 4511 - DNA, 417 bp, Glycine max
cccacgcgtccgggcgggcacagaagataggtattaaggagcctcaggcaactttttcagcttgttttggtgcagcattcattatgctacaccctacaaagtatgcagcaatgcttgctgaaaagatgcagaagcatggtgctaccggatggcttgtcaacactggttggtctgctggcagctatggctatggaagtcgcattaaactacaatacacaagaaaaatcattgatgctattcactcaggaagtctgctgaatgcagagtacaagaagactgaaatttttgggcttgagatccccaccgaagtggacggtgtcccttcagaaattctagaccctgtgaacacttggtcaaacaaaaagggctacaaggagacactattgaaattggctggattgttcaagaacaattttg

SEQ ID NO: 4512 - DNA, 415 bp, Glycine max
  modified_base (329)..(329): a, c, g, t, unknown, or other
cgcggatgaactgcgttctgatgttattttcagtgtttctagaactgggggccatttgggctcaagccttggtgtggtggaactcactgttgcacttcactatgtcttcaatgcccctcaggacaagatactgtgggacgttggtcaccaggttggttttcaacttccttgctgctttttgctttacttgttctaaactaaattggacaaccttgtatgaatttgcagtcttacccgcataagatactcaccggtagaagggaccagatgcataccatgaggcagacaaatggcttatctggcttcaccaaacgttctgagagtgaatntgattgttttggcactgggcacagctccaccaccatttcggcaggacttggaatggctgttgggagggatctgaaagggaagaaag

SEQ ID NO: 4513 - DNA, 387 bp, Glycine max
cccacgcgtccgcccacgcgtccgggtcacaacaaccattggttatggttctcctaacaaggctaactcctacagtgtgcatggaagtgcactgggtgccaaagaagttgatgccacaaggcagaaccttggatggtcacatgagccattccacgtgcctgaggatgtcaaaaagcattggagtcgccacacccctgagggtgctgcacttgaagctgaatggaatgctaagtttgctgagtatgaaaagaaatacaaggaggaagctgcagaattgaaatctattatcaatggtgaattccctgctggttgggagaaagcactttcgacatacactccagagagcccagcggatgccaccagaaacctgtctcaaacaaaccttaa

SEQ ID NO: 4514 - DNA, 352 bp, Glycine max
ccaacttccgctacttcctactccaaccactttcttttttcccgcagtcatgggcagggtcaagatcggaatcaacggatttggaagaattggccgtttggtggccagggtggctctgcagagagacgatgttgaactcgttgccgttaacgatcctttcattaccaccgattacatgacatacatgtttaaatacgacagtgttcacgggcactggaagcatcacgatgtcaccgttaaggatgagaagacccttctcttcggtgacaagccagtcactgtttttggacacaggaaccctgaagagatcccatggaagtcgactggagctgacatcattgttgagttcacc

SEQ ID NO: 4515 - DNA, 352 bp, Glycine max
catggccgtatctccaattttgtcgttgttggctatctgctatctcatttatggcacgggtggtcttcccattgaatctacccaccatgtttacagaaatcttcagactctatcttctgattcctctgatcaaccttatagaaccgcttaccatttccaacctcccaaaaattggataaatgaccctaatggaccaatgaggtacaaatgactttatcatctcttctaccaatacaattcaaaaggtgctgtatggggtaatattgtgtggccccactcagtatcaaatgatctcgtgtattggactcctctagatcatgccatctaccctcctcaaccttatgatatcaac

SEQ ID NO: 4516 - DNA, 396 bp, Glycine max
attccattaaaagctataccatggccatatctccaattttgttgttggctatcttatctgtcatttatggcaatggtgttcttcccattgaagctacccatcatgtttacagaaatcttcagactctatcttctgattcctctgatcaaccttatagaactgcttaccatttccaacctcgcaaaaattggataaatgaccctaatggaccaatgaggtacaaaggactttaccatctgttctatcaatacaatccaaaaggtgccgtatggggcaatattgtctgggcccactcaatatcaaatgatcttgtgaattggactccactggatcatgccatctacccttctcaaccgtctgatataaacggttgttggtcaggctcagccacaatac

SEQ ID NO: 4517 - DNA, 451 bp, Glycine max
  modified_base (401)..(401): a, c, g, t, unknown, or other
ggccgtatctccaattttgttgttgttggctatcttctctctcatttatggcaatggtattcttcccattgaagctacccaccatgtttacagaaatcttcagactctatcttctgattcctctgatcaaccttatagaaccgcttaccatttccaacctcccaaaaattggataaatgaccctaatggaccaatgaggtacaaaggactttatcatctcttctaccaatacaatccaaaaggtgctgtttggggtaatattgtgtgggcccactcagtatcaaaggatcttgtgaattggacccctctagatcatgccatctacccttctcaaccgtctgatatcaacggttgttggtcaggctcagccacaatacttcctgggggcaaaccagccattntatacacaggaattgaccctaataatcaccaagttcaaaacttagcccta

SEQ ID NO: 4518 - DNA, 437 bp, Glycine max
ctctcatgcttttttccacttgcaaacttcaaattcactctgacagtttttgcagctaagtaagaagaacttaacagacatataaacatagtgatcgttatgtctacgcaaccaaagcttggtcggattcccagtatcagagaccgagttgaagacactctctctgctcaccgtaacgaactcatttctctcctctccaggtatgtggctcaagggagagggattttgcaaccccataatttgattgatgaacttgacaacatccctggcgatgatcaagcaatagtggatcttaaaaatggtccctttggtgaaatcgtcaagtctgcaaaggaagccatagttttgcctccttttgtggcaatagcagttcgtccaagacctggtgtttgggaatatgtccgtgttaatgtctctgagctcagcgtggagcaatt

SEQ ID NO: 4519 - DNA, 455 bp, Glycine max
caggtacacgtggaagatttattccgaaaggcttatgactttggcgggagtttatagtttctggaaatgcgtttccaaattagagaggcgtgaaactcgacgatatcttgagatgttctatatcctcaagttccgtgatttggcaaattctgttccgctagctaaggatgatgcaagttaactagctatataatttcaccaaaggcttgacagcagacataataagagtcatttatgtaaatataatagtctgcttctcgtgttttgaaatctagtgaggcgacctagaggagtttcatggaagacttgtcttgtctatgttaacttcgattatgtaagagatggcgagcactggttgttgaatttggatgtctcttgttttcgtttgattagtagtcatcaatgatatagacctggaaattacctgtgacttgaggatgttatccttactgatg

SEQ ID NO: 4520 - DNA, 430 bp, Glycine max
aatgacacagttggaacagtggctagagcaagattcagcaatcaggatgtcattgctggagtgatccttggtacggggacaaatgcaccttatgtagagtgtgcacatgcaattccaaaatggcatggtcttctaccaaaatcaggagagatggttattaacatggagtggggtaatttccgttcctcgcatcttcctctaacagaatatgatcatgctctagatgcagagagcttaaaccctggagaacagatttttgagaagataatttctggtatgtatttgggtgaaattgtaaggagagttttgttgaagttggctgaagaagttgacttctttggagatactgttcctccaaaattgagaattcctttcgtacttaggacacctgacatgtctgcaatacatcaagatacatcttcagatctga

SEQ ID NO: 4521 - DNA, 402 bp, Glycine max
tgctaatcggggagcccgcctttctgctgctggtatttttggcatcctcaagaaaataggaagagacacagtaaaggacgggaagaaatcagtagtagcactggatggaggattgtttgaacactatactaaattcagaagttccttggagagtacactaaaggagttgttgggagatgaggcagctgagacaattggcattgagcagtctaatgatggctctggaattggagcagccctcctggcagcttctcactcccagtatttggaagtgcaggagtcctgaagatgtggtttaatgtcaaggtaaatcagtgtaacactagtttcatttttttgtatacctactagatcaacagattgaaacagaaaagtcttcgttactagtcctagagagctttt

SEQ ID NO: 4522 - DNA, 389 bp, Glycine max
  modified_base (340)..(340): a, c, g, t, unknown, or other
accacgcgtccgtttcaaactcatcgatacaacaaacatgtgggtgagtttaagagccatcaagaggtttgttgacactgttgaagtaaggcagaagaagccctcattttcaaaggacacagcagctggaccagcaataaagttctttgataatgtatttggtgtctccgtgcccgaatctcgctttcttcccttggatgcaacatcagatctattacttcttcagtcagatctatacacttgtagagaaggtgttttaactcgaaatccagctagaactaaccctttaaatcctgtgatagacttgggacctgaatttgaaaagtttggtgactttcanagtcgcttcagatccattccaagcatcattgaggttggacagtttgatg

SEQ ID NO: 4523 - DNA, 325 bp, Glycine max
gggccgacccactcgtccgcgctggttccctttctaaagccctcgcattcacgtccgtcgtcccgagcaggacgcgcgagctgcctagaaggcgacgccaaacgggcttgcgcggatcgagacgaccgggaagaagaagcaggacaacggcgtgtggtacgacgacagctcggcgccggtgcgcgcgcagaccatcgacgagctgcactcgctgcagcggaagcggtcggcgcccagcacgcccaagcggtcggcgcccaccacgcccatcaagggcggtgcccactcgcccttcgtcgacgcgatcagcgaggaggagcgccac

SEQ ID NO: 4524 - DNA, 440 bp, Glycine max
ggccccccgccagataagtgccctatcgttgaaagccttaattaatttatacatataatggggtacataatatacatacatccctgatgaaagtggaggaaaaggttccctccaaaatagtgcatgctagtttagtttagtgtacaaagtggataactgggtgggtgacaggtgtatccgccccactcctgaagagctggagaattttggtactccggacttcactatatacaatgctggacagttcccctgtaatcgttatactcactacatgacatcctccactagtatagatcttaatcttgctaggagggaaatggtcatcctcggcacacaatacgccggggaaatgaagaagggtcttttcggtgtcatgcattatctcatgcctaagcgccaaatcctctccctacactctggatgcaatatgggcaaagatg

SEQ ID NO: 4525 - DNA, 433 bp, Glycine max
ctcgtttcgtcttcacacttgcaacgcaacaacgtaacgttgctaattgcttgcacttcgcatggtcgcttcttttgtttcacattagctgtttttgtttttgtcttagttttacacctttcctcatttccgcagtagcaacctgcgaatcaacctctctgagaaaaaaaatggcgtcgaacgggaatggcagcgttgcgaacggtaacgggagcgctaggaacggacttgcgaagattcagacgcagaagaagcatgacgggatttgtcacgacgacagcggtccaacggtgaaggctcagaccattgacgagcttcactcgctgcagaagaagaaatccgcacccaccacccccgttacggggtttcaggctcctttcgccaccctcaccgaagaagaacgtcataagcaacaactccaatccatcagtgc

SEQ ID NO: 4526 - DNA, 324 bp, Glycine max
aaaggatcattcatcacttcaaccggggcattggcaacactttctggggccaagacaggtcgctctccaagggacaagcgcgtcgtcaaggatgatcttactgagaacgagctttggtggggaaagggttcccctaacatcgagatggacgaacacactttcatggtgaacagagaaagagctgttgattacttgaactcgttggacaaggtcttcgtcaacgaccaattcttgaattgggacacagagaacagaatcaaagtccggattgtctctgccagagcttaccattcagtggtcagtcacaacatgtaattgaaaact

SEQ ID NO: 4527 - DNA, 437 bp, Glycine max
  modified_base (14)..(14): a, c, g, t, unknown, or other
cgaaaaaccatttntgaggatggaaagaacagtaaggtcttattgggttgggttaatgaatcctcaagtgtttcggatgatatcaagaaaggatgggctggaatccatactattccaagggccatctggcttcataaatctggaaaacagttggtgcaatggccggtggtggaacttgaaagcttacgtgtgaatcctgtccactggcccaccaaagtggtcaaaggtggtgaaatgcttcaagttactggtgttactgcggcacaggctgacgttgaaatttcatttgacgtgaatgagtttggaaagggcgaagtattggaccaatgggtggatccccaaattctgggtagtagaaagggtgcagccgtaaagggtggtttgggaccctatggcttgctagtttttgcttctcgtggcttgcaagagtacacggc

SEQ ID NO: 4528 - DNA, 444 bp, Glycine max
gcgttcgccacgcgttcttaaaatgtggtgtttgatgagcatgatcgagaagttgattacgctgacgtgtcagggacagagggtactcgtgcagcttatcctatagagtacattccaaatgcaaagttaccttgtgttggccctcacccaaagaatgtcatacttttggcatgtgacgcatttggtgtactcccacccgttagcaagctaaacctggcacagaccatgtaccatttcatcagtggatatactgctttggtggctggcacagaagaaggtattaaggagcctcaggcaactttttcagcttgttttggtgcagcattcattatgctacaccctacaaagtatgcagcaatgcttgctgaaaagatgcagaagcatggtgctactggatggcttgttaacactgggtggtctgctggaagctatggtaatggaagc

SEQ ID NO: 4529 - DNA, 363 bp, Glycine max
ctcttttttactattgtttgttttaggtactgggaagaccactctttccaccgatcgcaatatgtagttaatcggagatgatgaacactgttggggtgacaatggtgtctccaacattgaaggtggttgctatgccaaatgcattgacctctcacgggagaaagagccagatatttggaatgcaatcaggtttggcacagtgttggaaaatgtggtgtttgatgagcatgatcgagaagttgattactctgacaagtcagttacagaaaatactcgtgcagcttattctatagagtacattccaaatgcaaagttaccttgtgttgggccttacccaaagaatgtcatacttttggcatgtga

SEQ ID NO: 4530 - DNA, 442 bp, Glycine max
cccactcgtccgcccacgcgtccggtgaattgcaatcagaagaaaataaagtctccaatgagaaaaataagaaaagaaagctgaaaacaccggcgcagcttaaagccttggaggatttttataatgagcacaaataccccacggaggaaatgaaattagtacttgctgaggagttaggattgacagaaaagcaaatatctggatggttttgccacagaaggttaaaagataaaagattgatgaaagatgaagccgttgctaatgggagacaagatcgttcaagtggtgtcatccaagatcgtggcagtggacttgggcaagattcatgcggaagcagtaagcatgctgatcacaggtatctggatccgaaggaggttgagagccatggcctctacaatcacgaattgtcagttgcagatatgacccacagacgtaggaacca

SEQ ID NO: 4531 - DNA, 445 bp, Glycine max
aagacacatacgaccacgcgattcgaattaatggaactagaaatggtgcccttgggctggtgcatgctgagcttcaagttctttctcccttggttcctgttcgtgaggtcaattttctacgcttttgcaagcagcacgcataggggttatgggcagtggtagatgtgtccatatataccatccgagaaacttctggagcacccacttttgcgaactgtacgaggcttccttctggttgcgtggtgcaagatatgccaaatggttactctaaggtgacatgggtggaacatgcagaatactacgaacgccaaattcaccagctctttagacccttgttgagctcatgcatggggtttggtgcacaacgtttggttaccactcttcaacgccaatgcgagtgcctacccattctaatgtactgagcatctccctctagagaacattc

SEQ ID NO: 4532 - DNA, 421 bp, Glycine max
  modified_base (368)..(368): a, c, g, t, unknown, or other
  modified_base (409)..(409): a, c, g, t, unknown, or other
aacttcaatttattcatctctgacaccctcttaattctgcttccagttcctctgagtgatgggttcaaaacccgtggttgattttgagaatgtaagtgggagcaggatgacggataggcctttctttcaagcgttggagaaggaagagaactgtgatgaggattacgaggggtgtttccaccaaccggggaagaaaaggaggctcacaagcgaacaagttcagttccttgaaaggaactttgaggtagagaacaagcttgaacccgaaaggaaagtccaacttgcaaaagagcttggcttgcagccaaggcaagttgctatatggttccaaaaccgaagggcaaggttcaagaccaagcagctagaanaagactatggcgtgttgaaagctagttatgacagactcaanagtgactatgaa

SEQ ID NO: 4533 - DNA, 429 bp, Glycine max
cggacgcgtccgcccacgcgtccgaataaatggaactagaaatggtgcccttcagctgatgcatgctgagcttcaagttctttctcccttggttcctgttcgtgaggtcaattttctacgcttttgcaagcagcacgcagaggggttatgggcagtggtagatgtgtccatagataccatccgagaaacttctggagcacccacttttgtgaactgtaagaggcttccttctggttgcgtggtgcaagatatgccaaatggttactctaaggtgacatgggtggaacatgcagaatacgacgaaagccaaattcaccagctctttagaccctcgttgagctcaagcatggggtttggtgcacaacgttgggttaccactcttcaagccaatgcgagtgcctagccattctaatgtcctcagcagctccc

SEQ ID NO: 4534 - DNA, 396 bp, Glycine max
ttcaggagcttagagcactgaaactttccccacagttttacatgcaaatgggcccacccgggacgctcaccatgtgcccctcttgcgagcgtgtggctgttccgtcctccgccgtcgatgctgccacgcgtcatcatcccatggcccaagcccatgcccatgcccagattcagcacaagcccattggcccgtgggctttcgactctcccattacgcaccggccgtttgatgtcttccaccactgatcttgaaggtgttttggtcattgggaaattattattatttactattctgggcctacttgtaccaacctgtaagtgtgtaaccccaaaaggggaagaaaattgggggaaacagaaagaatgaaggaaccgtcgaaacaacctgctttggaat

SEQ ID NO: 4535 - DNA, 429 bp, Glycine max
  modified_base (344)..(344): a, c, g, t, unknown, or other
cccacgcgtccgcccacgcgtccgtccacgcgtccgctcgaacctgaccgaaagttgaagctggcacaagaacttggcttgcaaccaagacaagttgcggtttggttccaaaaccgtcgtgccagatggaagacaaagcaattggaaagagattacggcgtcctcaaagccaattatgaatcacttaaacttaactacgacaccctccaacaagaccacgaagccttactcaaagagataaaggaattgaaatcgaggctggtgcaagaagagaacaacaacaacactgaaagcgatgtttcggtgaaggaagagatgctgaccaccacgctctgtgaaaccgncattcctggatcgtacacgaaggatttgagttacgagtggtttaaacaggagtgataagggtggaggggtttcttctgtgttcca

SEQ ID NO: 4536 - DNA, 278 bp, Glycine max
  modified_base (82)..(82): a, c, g, t, unknown, or other
  modified_base (257)..(257): a, c, g, t, unknown, or other
gacgacgcgtcaatatggcatggccagatacgctgtcatatgccagaaaaagggctgggtccattgttgagcctgagatccntgttgatggatctcatgacattcacaagtgtgctgccgtcaccgaacgtgtccctgcagcatgctacaaagctttgaatgatcaccacgtccttcttgaggggtacctattgaagccaaacatggtcacccccgggatcaaatctgctaagggttcccctcaggttggtgcggancacaacggttaaagcccttca

SEQ ID NO: 4537 - DNA, 379 bp, Glycine max
ctacctctttctcttctatctcaacaactacaccttcttgctactggatcatgtctcgagttcaagggcaagtaccatgatgagcttatcgccaatgctgcgtacattggcactcctggaaagggtattcttgctgctgatgagtcaacagggacaattggcaagcgtttggccagcatcagtgtagagaacattgaatccaacaggcgagctcttagggagctgcttttcactgctcctggtgttcttcaatatctcagtggtgtcatcctctttgaggaaaccctctaccagagcacagctgcaggcaagccctttgtgaatgtcttgaaagaagctggtgtgcttcctggcatcaagggtgacaagggcacagtcg

SEQ ID NO: 4538 - DNA, 446 bp, Glycine max
aaaaaccctacttggctcttttcttcacttgttcactttcttccaacctctaacctacctctttttcttctctctcaacaacttcaccttcttcctcctcgatcatgtctcacttcaagggcaagtaccatgatgagcttatcgccaatgctgcgtacattggcactcctggaaagggtattcttgctgctgatgagtcaacagggacaattggcaagcgtttggccagcatcagtgtagagaacattgaatccaacaagccaactcttaaggagctgcttttcactgctcctggtgttcttcaatatctcagtggtgtcatcctctttgaggaaaccctctaccagagcacagctgcaggcaagccctttgtgaatgtcttgaaggaagctggtgtgcttcctggcatcaaggttgacaagggcacagtcgagcttgctggaact

SEQ ID NO: 4539 - DNA, 370 bp, Glycine max
cccacgcgtgcgcccacgcgtacgcctacctatttttcttctctctcaacagcttcaggttcttcctcctcgatcatgtctcacttcaagggcaagtaccatgatgagcttatcgccaatgctgcgtacattggcactcctggaaagggtattctcgctgctgatgagtcaacagggacaattggcaagcgtttggccagcatcagtgtacagaacattgaatccaacaggcgagctcttagggagctgcttttcactgctcctggtgttcttgaatatctcagtggtgtcatcctgtttgaggaaaccctttaccagagcacagctgcaggcaagccctttgtgaatgtcttgaaagaagctggtgtgc

SEQ ID NO: 4540 - DNA, 215 bp, Glycine max
catggcgcggaaaagaagagattgtgaagaaggctcaggaagcccttttggtaagagccaaggctaactcagaggcaactctgggaacctacaagggtaactcacagcttgctgatggtgcctcagagagcctccatgtttcgaactacagctactgatcaatcgaagttggtgttgtttgaagagactagtgcgagtaggaatcggtattatgg

SEQ ID NO: 4541 - DNA, 430 bp, Glycine max
ctaaacctgctggtttcaagtttgaagcttcgagggaaacggctgttgttatcatgaagcatgttaaccttgttgagatcctcatggacgtgaaccaatggtccacagtgttcgctggcatagtctcaagagcaatgactttggaagtgttatcaacaggggtggcagggaattacaacggtgcattgcaagtgatgacagcagaagtgcaagtaccttcacctctggtgccaactcgagagagctattttgtgaggtattgtaagcagcacggtgacgggacttgggcagtagtggacgtgtcattggataatttgcgtcctagtccttctgccagatgtagaagaaggccctcaggttgcttaattcaagaaatgcccaatggctactcaaaggtcatatgggttgagcatgtagaagtggatgacac

SEQ ID NO: 4542 - DNA, 428 bp, Glycine max
aaccgttgtcttctcacttcgtcaaaaccaaccaaacccctccccaattctcaagccaaccagggtcttccttcaagagcaagtaccaagatgaactcattgccaatgctgcttacattggcaccccagggaagggtatccttgctgctgatgagtcaactggtacaattggcaagcgattggccagcattaatgtcgagaatgttgaagcaaataggcgtgctcttcgtgaactcctattcaccacacctggtgcttttgagtgcctcagtggtgtgatcttgtttgaagaaaccctataccaaaagacagcttcaggaaaacccttcgtagagttgatgaaggaaagaggagttctccctggtatcaaggttgacaagggcacagtagagcttgcaggaactaatggggagactactacttaaagg

SEQ ID NO: 4543 - DNA, 398 bp, Glycine max
  modified_base (281)..(281): a, c, g, t, unknown, or other
  modified_base (318)..(318): a, c, g, t, unknown, or other
gaataaatggttaaggcaaaaaggattacggtgataaggaataatcctgcacctttgctggctttatgttggtattgggctacagatggtgtaggatcaaaagatatggttatccttccatataaggacagcttgttattatttagtagatacttgcaacagttggtcatggaatctctaagcaaggagtttgacttgaatggtaatcgggttaatcaaggaattagtgtctatggaaataaaggaagcacagatcagcatgcctacattcagcaactganggaaggtgtgcacaatttttttgtgacattcattgangtgctacgcgatagaccacctggtcatgattgggagcttgaacaagtgtcacatgtggtgactacctgtttggtatgcta

SEQ ID NO: 4544 - DNA, 436 bp, Glycine max
  modified_base (402)..(402): a, c, g, t, unknown, or other
ctgcctctgttccgccaagcgcagcattttcccaccgttcaggccaccggctgagttaggtttccggcgaggatgggtgctgctctgctgtcggagcttgcgacggagatagtcgtgccagtgtgcgccgtcatcgggatcgtgttctcgctggtgcagtggttcctcgtgtcgcgcgtcaagctcactcccgaccgcaacggaacgacgtcgtcgccgcgcaacaacaaaaacggctacggcgacttcctcattgaagaagaagaaagcatcaacgaccacagcgtcgttgtgaaatgcgctgagatacagaacgctatctccgaaggtgcaacatcctttcttttcactgaatatcaatatgtggggatcttcatggttgcttttgcaatactgatcttnctttttctgtgctctgtggaaggcttcagtacta

SEQ ID NO: 4545 - DNA, 339 bp, Glycine max
cgtccgatggattaaaggatagtcaaactgtcctaagatatgactatggaaaatattatgcctcaaaaaccatttttgaggatggaaagaacagaatggtcttattgggttgggttaatgaatcctcaagtgtttcggatgatatcaagaaaggatgggctggaatccatactattccaagggccatctggcttcataaatctggaaaacagttggtgcaatggccggtggtggaacttgaaagcttacgtgtgaatcctgtccactggcccaacaaagtggtcaaaggtggtgaaatgcttcaagttactggtgttacttgcgcacaagctgacgttg

SEQ ID NO: 4546 - DNA, 445 bp, Glycine max
ggaacatcaagttgggttccaaaggctgtgtagtcatcttcatcggacaagcgtgcggggagctcacaacaaaagaatctgccctctcttgaaaatgatgttggtcaatccagtactagtagtgttataccatctgaacatttgttctgtgcatttgctgctgccaactgcccccttgaagataaatgttctcgcattcatggaaatcagtgcttatactgtagaaaattatgcttacatcctactgatcgaaaggaaaaagaaaaccatttgagaacttgtgagaaaaaggaaaaataccttcaggctttgaaagatagtcaagacgtagagtgcaatgtttgtttggaacgtgttctgtccaaacctaaaccagctgattgtaggtttggtctgcttcctgaatgtgaccatgctttctgtttatcctgtatccgcaattggc

SEQ ID NO: 4547 - DNA, 355 bp, Glycine max
ggcaaacacaccaaacaccaaacaccaaactagttggctcaattctctttgaatggctttggaggctttgaattcaccaacagcagccaccactccgttccgtggctaccaagaagaggaggaggacgaggaggctgaccttcacttacgtgagccttgggctaaaaggaaacgctccaaacgaccgcgttttgagacggaggaagagtacctcgctctttgcctcatcatgctcgcacaaagcggtaacaccagaaacatccacaacaacaacacccaattaccgtcttcttcactgtcagacaaagaagcgtcgccgccggtgaaactaacacacaggtgcaccgtttgcaac

SEQ ID NO: 4548 - DNA, 416 bp, Glycine max
ctcaaattacatggtcatagtgtacacctagttaggcaaacacaccaaacaccaggcaccaaactagttggctcaattctctttgaatggctttggaggctttgaattcaccaacagcagccaccactccgttccgtggctaccaagaagaggaggaggacgaggaggctgaccttcacttacgtgagccttgggctaaaaggaaacgctccaaacgaccgcgttttgagacggaggaagagtacctcgctctttgcctcatcatgctcgcacaaagcggtaacaccagaaacatccacaacaacaacacccaattaccgtcttcttcactgtcagacaaagaagcgtcgccgccggtgaaactaacacacaggtgcaccgtttgcaacaaggcctttggttcttatcaagcactc

SEQ ID NO: 4549 - DNA, 415 bp, Glycine max
atggtcatagtctacacctaattagccaaacacaccacagcaccaaactagttggctcaaggctctttgaatggctttggaggctttgaattcaccaacagcagccaccactcccttccgtggttaccaagaagaggaggaggaggttgaccttcacctacgcgagccttgggccaagagaaaacgctccaaacgacctcgttttgagtcggaggaagagtacttggctctttgcctcatcatgcttgcacaaagcggtaacaacaacaacacccaattaccgtcttcgtcacagtcacacaaagaagcgtcaccgccgctgaaactatcacacaggtgcaccgtttgcaacaaggcttttccttcttaccaagcactcggtggacacaaggccagccaccgcaaggcctcgtcg

SEQ ID NO: 4550 - DNA, 288 bp, Glycine max
cccacgcgtccgcttttgttccccacagcagattcagcaaggccattttcaatgcttggccttggtgatattgttatccctggtatttttgtagcattggctttgcgatttgatgtatctagaggaaaacagccccagtatttcaagagtgcatttgtaggatacactgttggcttggtccttacaattgttgtgatgaactggtttcaggctgcacagcctggtcttttggatattgtaccttctggaattggatttttggctgctcattggttatggaatggtgat

SEQ ID NO: 4551 - DNA, 434 bp, Glycine max
  modified_base (414)..(414): a, c, g, t, unknown, or other
  modified_base (423)..(423): a, c, g, t, unknown, or other
cccacgcgtccggcaatccaaatcgctttgggcaagagaatgctatccaatagggaatcggcacgtagatcgaggatgaggaaacagcagcacctggaaggtctcagtgcccaattggatcagctaaaaaaggagaacacccaaatgaacacaaacataggcatcagcacgcagctgtacctcaacgtggaagctgagaacgcgattctgagggctcaaatggaagaactgagcaagagattgaactctctgaacgaaatgataagtttgattaactccaccaccaccaccaacaactgcttgatgttcgatgaggcacaggagactacgactcagttgttcaatgattgtggcttcatggatgcttgggaatacggaataccactcaatcaacaaatcatggcttacgctgancatgacatngtgatgatgga

SEQ ID NO: 4552 - DNA, 387 bp, Glycine max
gcttgaaagagtacccaaagcttgatgatagggttccttcctcttcttctctgtcagtgcagatggattggattatggaactgttggagagcaatttggaagcaaagtccaaaatttacaaggaccctgctttgtgttatattttcttgatgaacaatgggaggtacattgttcagaagaccaaagatagtgaattgggaaccctcttgggagaagattggatcagaaaacacgctgcaaaagttaggcaattccatgtgcactatcaaagaagctcgtggaataagctattagggattctgaagttggatagtaatgggtcaatgccccatattaacttggcaaagtcaatgaaggagaaactcaagtcgtttaacacagtttttg

SEQ ID NO: 4553 - DNA, 429 bp, Glycine max
tgcttatactaactaactcttcttgagatactctttctcacacgccaagagtaacatgggatttccagtggggtacacagagttgatgctgccgaaggtgtttctgcaggtgctatccgtattgggcttgataagaaaactcatcaccgtcctcttgtgctacatgggcttccacgatttcttcgaatccgacattgcgtggccggagagggcgccggaattccagtcggtgtgggcggtgctcataagggaaatcctaccggtggtgaagttctcggagatggagatggagatggcggaggcgccggagagctgcgcggtgtgtctgtacgagttcgagggagaggacgagatcagacggctgacgaactgccgtcacatattccacagagggtgtctggaccgttggatgggatacgatcaaagaac

SEQ ID NO: 4554 - DNA, 395 bp, Glycine max
agcccacgcgtccgcccacgcgtccgtacggtttctgtgactgtgctccacaaccgagtcgccatggcgtcgcaggagagtatccaatagatgcaggcacggcagaattaccggaatttatggcacaccgatctcatgagatccattcaagccgatactccctattgttgcctcgcgttgtggtgtgcaccatgtgtgtcttaccttcttcgcaaacgagctcactatgatgatatgtcaacgtgcacatgttgtgctggctacatgccttgcagtggcaggtgtggagaacgtaaatgtcctgaattttgcctttgcactgacgttttcctctgctttggaaattcagtcgcctcaactcgctttctagtgcaagatcaatttaacattcaaac

SEQ ID NO: 4555 - DNA, 340 bp, Glycine max
attaattagggtttttgtgactgtgctccacaaccgagtcgccatggcgtcgcaggagagtatcgaaaagatgcaggcacggcagaattaccggaatttatggcacaccgatctcatgagatccattcaggccgatactccttattgttgcctcgcgttgtggtgtgcaccatgtgtgtcttaccttcttcgcaaacgagctctctatgatgatatgtcaaggtacacatgttgtgctggctacatgccttgcagtggtaggtgtggagaaagtaaatgtcctgaattttgcctttgcactgaggttttcctctgctttggaaattcagtcgcctcaact

SEQ ID NO: 4556 - DNA, 429 bp, Glycine max
gccgcgagggaggtttcgtttcgtttcgttcagttcacacattctattctctatcgattggtcttccctttttctcaatccactacaccacagttatgaggagccaacttgtgtgtaatgggtgtaggagcatcttggtttaccctagaggagcaaccaatgtttgctgtgcgttgtgcaacaccattacctctgttcctcctcctggaatggacatgtcacaactctattgtggaggctgtacgacattgctaatgtacacacgtggtgctacaagtgtgagatgttcctgctgtcacactattaaccttgtaccagaatctaatcaagtcattcattgtgcgaactgccggacaacactcatgtatccttatggagcttcctcagtcaaatgtgcaatttgttgctatattactaatatcagtatga

SEQ ID NO: 4557 - DNA, 428 bp, Glycine max
tgataatgtaattactagcttgcctcctcctgatgaagggcctaatttgagcgatcagtcgtcttgaggatcaattggcacttcttggaaaggtgttgagtgctggtgatgatcaagttggattagagcaactagatgaagatgcagatgaaattgcccttcagagtgcccgtcgctctcaaggatccatgagtgcaatgtcaggtgcaaaagggatggtttatatggagtacagtactgtgcgtaaaggccaacaaggacagatcaagagcaagccgaaagatccagcgaagagacatttcttgtttaaaagaagatatggggcaacctaaatgtgccgtctttgtaatggtaccatacgaaaagttatcaagtatgcaggattgatggcttacttgacataacgcttggtgcctttttcttaaaaa

SEQ ID NO: 4558 - DNA, 369 bp, Glycine max
gcaaggcaccactctgagaagaaacgacgactaaacgtagatcaggtgaaggccttggagaagaacttcgaagtagagaacaaactggaacctgaccgaaaggtgaagctcgcgcaagaactcggcttgcaaccaagacaagttgcggtttggttccaaaaccgccgtgccagatggaaaacaaagcaattggaaagagattacggcgtcctcaaagccaattacggatcacttaaacttaactttgacaccctccaacaagacaacgaagccttactcaaacagataaaggaattgaaatcgaggctggtgcaagaagagaacaacaacaacactgaaagcgatgtttcggtgaaggaagagatgata

SEQ ID NO: 4559 - DNA, 384 bp, Glycine max
  modified_base (321)..(321): a, c, g, t, unknown, or other
aaggactcgacgaagaagggtgcgtggaagaaccagggcaccactctgagaagaaacgacgactaagcgtggatcaggtgaaggctttggagaagaacttcgaagtagagaacaaactcgaacctgaccgaaagttgaagctggcacaagaacttggcttgcaaccaagacaagttgcggtttggttccaaaaccgtcgtgccagatggaagacaaagcaattggaaagagattacggcgtcctcaaagccaattatgaatcacttaaacttaactacgacaccctccaacaagaccacgaagccttactcaaagagatanaggaattgaaatcgaagctggtgcaagaagagaacaacaacaacactgaaagcgatgtttccg

SEQ ID NO: 4560 - DNA, 249 bp, Glycine max
gaagaaaccaaacgcggccttgaagttgcgagttgcgagttgcagagagagcaatgagtgaggaatcgtttatatatggcttcgtggctcgggggacgatggtgttagccgagtacaccgagttcactggtaatttccctgcaattgcagctcactgtctcgagaaactttcctattacaatatcaagttcacctacaattgcgaccaccataccttcaattgtctcgttcaagatggctacgcttact

SEQ ID NO: 4561 - DNA, 315 bp, Glycine max
  modified_base (133)..(133): a, c, g, t, unknown, or other
atcaggagcgactcaagccgcaggatgagaaggccgaggaagacagatccaaggtcgatgatctccgaggctctcccatgagcgtcggaaacctcgaagagctcatcgacgagaatcacgctattgtctcctnctccgttgggcctgagtactatgtcggaatcctgtctttcgttgataaggatcagttggagcctggttgtgctattttgatgcataataaggttctttctggtgttgggcttcttcaagatgaagttgatccaatggtctctgtcatgaaagttgagaaggcctctctggaatcttatgctg

SEQ ID NO: 4562 - DNA, 435 bp, Glycine max
cacgcgtccaacagcttttgttctagcacttcgctgtctgaggttctggattctcagtgtttgcggagcgcagcgtcatcttttagggaagaatggatcatcaagggcatagccagaacccatctatgggggttgttggtagtggagctcaattagcatatggttctaacccatatcagccaggccaaataactgggccaccggggtctgttgtgacatcagttgggaccattcaatccaccggtcaacctgctggagctcagcttggacagcatcaacttgcttatcagcatattcatcagcaacaacagcaccagcttcagcaacagctccaacaattttggtcaagccagtaccaagaaattgagaaggttactgattttaagaaccacagtcttcccctggcaaggatcaagaagattatgaacgctgacg

SEQ ID NO: 4563 - DNA, 358 bp, Glycine max
cccacgcgtccgcccacgcgtccgcccacgcgtccgcccacgcgtccgctcaagtggccagccatgctcagaaatatttcatcaggcaaagcaatgtgtccaggcgaaaaagacggtccagcttgtttgatattgttgcagatgaagcagctgacactgcaatggtacagcaagacttcttgtctgctaatgagttaccaactgaaacagaaggcaataaccccttgcctgctcctccttccctcgatgaagagtggtgaatcaatgggattcacaaactcaaatgatggagagcctgccccatcaaagccagaaaacacacatccatcttatcctatgttatatcctgcgtattatt

SEQ ID NO: 4564 - DNA, 415 bp, Glycine max
cccacgcgtccgtccacgcgtccgcccacgcgttcgcccacgcgttcgaaagaactaggtaggtggagtctgagaactctagcatgtactagtactactcctacattcctccatcttcctttgtactattttttttttaaccataaaagcaagagcacaaagatggtgagagctccttgttgtgaaaagatgggtttgaagaagggtccttgggctcccgaggaagatcaaatcctcacatcttacattgacaaacatggtcatggcaattggcgtgccctcccaaagcaagcaggcttgttaaggtgtgggaaaagctgtagactccgctggattaactatttgaggcctgatattaaaagagggaatttcacaattgaagaagaagaaactatcattaagctgcatgacatgc

SEQ ID NO: 4565 - DNA, 443 bp, Glycine max
cccacgcgtccgcagtgctctgtcttctcccccaccaccgcactctctcagatattatgatttgatatcacacattcacatcctatcatcatcgacaacacgctatccccattgcttcttctcttctccctctctcgtttcctacttgacggcgccgtttcgttctccagaagatgcttctgagtacttcgcgctgcaactagacatgatgagttcaagtttcaagacatgggctgtgggatttgcacttggaaatgaacgagaggcaacgttggagagctgaagaggatgctttattacgttcttatgtcaaacagtatggtcctagggaatggaatcttgtgtctcagcgcatgaacacatatcttaacagggatgctaagtcgtgcttggagaggtggaagaactacctcaagcctggcatcaaaaaaggctctcttact

SEQ ID NO: 4566 - DNA, 268 bp, Glycine max
gccacgcgtccgattaacacactacgcgtgcaaagaacctgtgctctcctcttgcttttgggagagaagaaagaagcgagaagatgtcagacgcgttctgcagcgactgcaagaggcagacggaggtggtgtatgaccactctgccggcgacacggtgtgctcggagtgcggcctcgtactggagtcccactctatcgacgagacctctgagtggcgtaccttcgccaacgagtccggtgacaacgatcccaatcgtgtcggcgggcc

SEQ ID NO: 4567 - DNA, 426 bp, Glycine max
caaaatactactagtaccttaataaacaaataaataaataaggtgagagaaaaaaaaaaatgtagaggaacctggaaacttccacgaggttttcggtgaaaaccaaatttggggctttgcatcgcaagatttaccctttccaatcaaaattcttctgccttcccctaccaattctttctctcaaccgatttatctgagtgaggggtttggccaatgacgagtggttttggtgaatcaacgagagcgtctgcaccgagcccatcatgctcggggaacagttcaaacgatgccggtgaatttgaatgcaacatatgcttcgatttggcgcaagaccctgtgatcacactctgtggtcacctattctgttggccatgcctttataggtggctccaccatcactcccattctcaagaatgccctgtttgc

SEQ ID NO: 4568 - DNA, 436 bp, Glycine max
cccacgcgtccgctcgatttccttctctataacacaacgctctcttctctggcgaccaaagtacttgttccagtgtctactctactcaaaaaggatttgggacatcatgtgcagtgattcgaaaagtaaactttcttccccaaccctcgtcgtcatggagaatagtaacattcagaagcagaatctggatggtctctacaactcggttttgcttgaattgtctgcatctgatgattatgaagctttcaaaagagaggtggaggaaaaaggcttagatgtgaacgaggcaggcttttggtacggtagaagaattgggtcaaagaagatgggatctgaaacgaggacccctctgatgattgctactttgtttggaagcgccaaggtgctcaattatattcttcttcagaaaggaggaggtgttgatgtgaacagggtc

SEQ ID NO: 4569 - DNA, 406 bp, Glycine max
gtgcggcaagcagcaatggctttcaaatgtttgttgcttatttactacaaaaatggaagaggggataacttccgtcggcagggtcaaatgttaactctggtcgagtatactctgctgctgtatcgtgccttgttgccaacaccagtttggtaccgatttttcttgaacaaggattatggaagtctcttttcctcactgaccacaggattgtatctaactttcaagctaacatcagtagttgagaaggtccagtgcttcgtttctgccttaaaagcattatcaaaaaaggaagttcattatggggttcatgccacaacggaacaggtgaatgctgctggtgacatgtgtgctatatgccaggaaaagatgcaggcttccatattggtgagcctgtaacacatgttct

SEQ ID NO: 4570 - DNA, 411 bp, Glycine max
  modified_base (385)..(385): a, c, g, t, unknown, or other
ggaattcctcctgtctgtgaaagaggcagtacaagcagatatttcaatgctgcaagtgcagctgagcgtcctacatcttcagaattgtggccagagaagcccaatatggattctctatatatgccttgggatcatgttaatatgacacccacatttagaggtagaggcctttctatacggggcgagggtcctttaaggaatgtgaggagccgttctgcacttgatttggaatccaacctggctagggcccatttatcaaatactcatccacacaactcatactctactggtctaccagttgaccattcttctagcgtggtcgatctgtcaactcaaacttctggcactttgacacgggattggagcccaatgagttcatgtcctnctcatggaagggtgtcatcatcagat

SEQ ID NO: 4571 - DNA, 413 bp, Glycine max
gcagggcgaccggaagccggacggcggcgacaagaaggagaagaagttcgagccggcggcgccgccagcacgcgtggggcggaaacagcggaagcagaagggcccggaggcggcggcgcggctgccgacggtgactccggtgacgaagtgcaagctgcggctgctgaagctggagcggatcaaggactacctactgatggaggaagagttcgtggcgaatcaggagcgactcaagccgcaggaggagaaggccgaggaagacagatccaaggtcgacgatctccgaggctctcccatgagcgtcggaaatctcgaagagctcatcgacgaaaatcacgctattgtttcctcctccgtcgggcctgagtattacgtcggaatcttgtctttcgtcgataaggatcaattggagc

SEQ ID NO: 4572 - DNA, 432 bp, Glycine max
ctagaaatgatttcccgtaatacaaatcaacaagttgcatgaccgatgaagaacaacacaaataaacaagcaaagtcaatgacgattgaaatgataatcccgagagaatggccaaaaaatttgaggagccctaacctccatgaaattcaaatgagcctcgagaaggtgcatgtagaccaaccaatcaccattcccagtagaagaaggcattggcatgacatagccagaatctccaccccaaggaaaatggtacgatgcaaacacgggctttccccacccaaaatcaacctttgactccggaaacctttgaccagaagaaaccacaaaacttggtccttcttccttgccatgcccacaataaatcctagacaaaccaggagctggtcgatgtacctcaacccaatcaacaagtcccaaaaaatgctcttctgt

SEQ ID NO: 4573 - DNA, 375 bp, Glycine max
  modified_base (271)..(271): a, c, g, t, unknown, or other
ctagaaatgatttcccgtaatacaaatcaacaagttgcatgaccgatgaagaacaacagatataagcaagcaaagtcaatgacgattgaaatgataatcccgagagaatggccaaaaaatttgaggagccctaacctccatgaaattcaaatgagcctcgagaaggtgcatgtagaccaaccaatcaccattcccagtagaagaaggcattggcatgacatagccagaatctccaccccaaggaaaatggtacgatgcaaacacgggcttnccccacccaaaatcaacctttgactccggaaacctttgaccagaagaaaccacaaaacttggtccttcttccttgccatgcccacaataaatcctagacaaacc

SEQ ID NO: 4574 - DNA, 438 bp, Glycine max
acgcgtccgaaaatattgaaaagccgcgagggaggtttcgtttcgtttcgttcagttcacacattctattctctatcgattcctcttccctttttctcaatccactacaccacagttatgaggagccaacttgtgtgtaatgggtgtaggagcatcttggtttaccctagaggagcaaccaatgtttgctgtgcgttgtgcaacaccattacctctgttcctcctcctggaatggacatgtcacaactctattgtggaggctgtacgacattgctaatgtacacacgtggtgctacaagtgtgagatgttcctgctgtcacactattaaccttgtaccagaatctaatcaagtcattcattgtgcgaactgccggacaacactcatgtatccttatggagcttcctcagtcaaatgtgcaatttgttgctatattact

SEQ ID NO: 4575 - DNA, 431 bp, Glycine max
gaaatatggggagagtgaagcttccgatcaaaaagattgagaacacaaccaataggcaagtcactttctccaagaggaggaatggactcatcaagaaagcttacgaactttctgttctttgtgatgttgatgtggctctcatcatgttttccccatcaggaagagccactttcttctctggcaacaaaagcattgaagaaattctagaacgatatgttaatctttcggagggtgaacacggaaggatgcataataaagagcacattcaaaagttgcttagtaagttgaaagatgaagctggtcaaatatgtcaagcccctagctcaatgacttcagattcccaaattgaggatcttcgaagagaaattttcacttgcaagtctcaattggaagagatggagaagcgactaaggatatttgaaggtgatcct

SEQ ID NO: 4576 - DNA, 427 bp, Glycine max
ctaagtcccaaaacacacataaattgagcacattagagattaggttagtgtgacactcgcctcaccctctctctgtctctcccctgcggctagggttttgtctttcactcactctcttctctttcttttcttctcattccccttctctttcgatctgaacaataataattaaccatggaaccgtcgctgagttaacctttttcttctgcgcggtgctgttctcttttgttgtttgggttttttttttctttctgagaagggcttgttgttgttgtgtttcgaaataatggcgactacgaatccctttgatttgttgggcgacgacgccgaagacccctcacagttgatcgcggcggagcaactgaaggccgcggcagccgcggccaccgcgccacccaagaaggaccaggccaagcccggagctcgc

SEQ ID NO: 4577 - DNA, 404 bp, Glycine max
  modified_base (384)..(384): a, c, g, t, unknown, or other
cctcgtactgtaaaggaaatttgctctgttgccaatggggccacaaagaaggaaattggccgagctaaagaatacatagtaaaacaactgggtttggagaacggtaatgctgtggagatgggtacaatacatgcatgggacttcatgaggcgattctggtctaatcttcgtatgaataatcaagctgttaaagctgctcaggaagctgtgcataaatcagaagaatttgatataaggaggagtcccatttcaattgctgcagcagttatatacatcataactcagctttctgatgataagaaacctctcaaagatatatcacttgccacaggcgttgcagaaggaacgattaggaactcctacaaggatctttatccccatgtntccaaaataataccaaattg

SEQ ID NO: 4578 - DNA, 370 bp, Glycine max
caaaactcatcatcaggaatgaggcctccaactctcaacattttcccctctaagcctgggcatgtagagccatcatcatccaaggccaaggctaacatagagctagtttctccacaaacaagtggatcaaagaggccatcagagccgtcgatggagttggccaaccctcgaaacgaaactgcttctgcccctcagccacccaaacctgtcaagcgagagagcaaccgcaaaggtccaacgtcaagttctgaacatgaaggacctaaaacaccagatcctaagacactcagaagacttgctcaaaataaagaggcagctaggaaaagcaagcttaggaaaaaggcatatgttcaacaactagagtcgagta

SEQ ID NO: 4579 - DNA, 374 bp, Glycine max
aagaatttgaacccatggagactacttctcaagaaaatgcgcaacagaccaatgaaactatgatgggatcaatcggactgacaccaatggctcctcatggattctttcctgcatatttacctgttccatttcccatgtggccatcaactgtggctcccccgtttgaagaagttaagggaggagagacatcccaccatcagatccacaagccaatcccagtcattcccaaggaacctgttaatgttgacgaacttgtgggaatgtctcatctaagcattggggaagcaaaggtacgtgatagagagccttcccctctttccttaaagttgttaggagagccctcaaggcagtcagcattccatgcaaatgctcca

SEQ ID NO: 4580 - DNA, 444 bp, Glycine max
gctatttccagagaaagggtcaagctcagggaagctgtgatttttctggtgctgccacccctagtcaaacaccacccactgcagcatctacatgtgtttacccctctagtcctagcaatgctggaacaggcaccacagcaactccaacaaccactacaccaacaacaggcacaccacccaccaccttaactccaaccacccccactactaccactccaggcacaaccaccggtaccagcccaaccactggcactggtaccggcaccggcaccggcaccaccataggttaccctaatgtgtttggaatgagtccaacatcttcaactggaacaggatgaggcttcaatgacccaaacaaaggagtggttcatttgcaagacattatcatgttgctagagtcccctggtatcacacttttgctaggaatgtttagggtctaataat

SEQ ID NO: 4581 - DNA, 384 bp, Glycine max
gggaagttctatcttttggatccacatgcttaacttaactggatcacattggctatgttaaagatgggctgcaatagctttataccttccacagagaacagacaatgacataaagaactattggaacacccatttgagaaagaagctgaagaagatgcaagtaggttgtgaaagtggtagctttggagaaaggttttcagcctcaaggcaaatccctagaggccagtgggaaagaaggctccaaactgatatcccaatggcaaacagagccctcagtgaagctctttcaccagagaagccatcttgtaatttatctggcataaactcaaacccttcagatatgttcagcttcatctttttcacaaaaccaacttctacacaaac

SEQ ID NO: 4582 - DNA, 439 bp, Glycine max
gagatgaattgcctaagcttcctccttcgcagaaccgatttggtcaacactcgcctagcagttcaatagatggtaagacatctgaaacaagcatggagtttggaaatggtgaattcagctcagaggagctaaagaaaataaaggagaacgataaacttgctgaaattgccatggctgatcctaagcgtgcaaaaaggattttggctaatcgtctatcagctgctcgctcaaaagagaggaagatgcggtacatttctgaattagagctcaaagttcaaacacttcagactgagacaaccacattgtctactcagtttaccaaattacagatgaataattcagagcttaaaagtgagaataatgagtacaaattaaggattcaagccttggaacagcagtcccaactgaaagatgctctgaatgagaacttggatgctga

SEQ ID NO: 4583 - DNA, 429 bp, Glycine max
cccacgcgtccgcccacgcgtccgcccacgcgtccgcccacgcgtccgcacgttaaaaaaaaaaaaaaccaaaagcatgggtcagggaacaccgggcggtctgaaccggcagggtcttccgggggaccggaagccggacggcggcgacaagaaggagaaaaagttcgagccggcggccccgccggcccgcgtggggcgtaagcagcggaagcagaaggggccggaggcggcggcgcggctgccgacggtgacgccgctgtcgaagtgcaagctgcggctgctgaagctggagcgcataaaggactacctcttgatggaggaggagtttgtggcgaaccaggagaggctgaaaccacaggaggagaaggccgaggaagatagatccaaggtcgatgatctcagaggttcccctatgagcgttggtaacct

SEQ ID NO: 4584 - DNA, 425 bp, Glycine max
cttctctaactttcgcatattcgaaaaccaaaagcatgggtcagggaacaccgggcggtctgaaccggcagggtcttccgggggaccggaagccggacggcggcgacaagaaggagaagaagttcgagccggcggcgccgccggcccgcgtgggccgtaagcagcgtaagcagaagggcccggaggcggcggcgcggctgccgacggtgacgccgctgtcgaagtgcaagctaaggctgctgaagctggagcgcataaaggactacctcttgatggaggaggagttcgtggcgaaccaggagaggctgaagccgcaggaggagaaggccgaggaagacagatccaaggtcgatgatctccgaggttctcctatgagcgttggtaacctagaggaactcattgacgagagtcatgccataggttcg

SEQ ID NO: 4585 - DNA, 439 bp, Glycine max
gataactcaatgtataacattcccactgtacctagtgactacccgtctgctggaaatgagcctggtgcaaataacgagataaaaggtggaaggcctggtccatacatgcaacctcctccttcaacgtggacgaaccagaaccagaaccaaagggctccacttgacgtcaatgttgcttacgtggaagggcgggatgaggcggaaagaggagcttcaaatcaacctctgacacaggacttcttcatgtcctcggggaagcggaaacgtgatgaaattgcttctcaatataatgctggtggatatatacctcagcaagatggagctggagatgctgcttctcaaatttttgaaattgaagtgtatggagggggcatgtccattgatgcaggtcactctacttctaaaggaaaaatgccagcacaatcagacaggccagctt

SEQ ID NO: 4586 - DNA, 438 bp, Glycine max
cccacgcgtccgcggacgcgtggggcaggaccctcctgaagatgctgttgtttcagtttgtggtcatgttttttgtaaccagtgcatttgtgaatatcttactggtgatgacaatcagtgccctgctccaaactgcaaaactcgactaagcacgccttcagtgttttccaaagtcacactgaatagttctttttctgatcagccttgtgataatttgcctgattactctggttgtgaagtggaggaatctgagttttgttctcaggctcagccatatgattcttcaaaaattaaggctgcacttgaggtgttgcagtcgttgtctaaaccacaatgctttgcttcccaaaacaattctgtgcagagcacttctggggaaagtaccgatggccttggtagctcctctagtgctgacagaatgaaatccttgaatgaaat

SEQ ID NO: 4587 - DNA, 435 bp, Glycine max
atttgctcccagtacagagcttaaccgagcttcacaaagatgaatcgggaaaagttggtgaagatggccggttcggttagaactgggggaaagggtaccatgagaagaaagaagaaggctgtccacaagacaacaaccacagatgacaaaaggcttcagagcaccctgaagagaataggggtgaatgccatcccggctattgaggaggtcaatatctttaaggatgacgtagttatccagtttctaaatcccaaagttcaagcatccattgctgctaatacttgggttgtcagtggttctccacaaacaaagaagttgcaagatatactccctagcattatccaccaattaggaccagataacttagaaaacctgaagaagctagccgagcaattccagaagcaggctcctgaaagagccgtcggttcaaccaca

SEQ ID NO: 4588 - DNA, 474 bp, Glycine max
tcgtccacgcgtccggatcttcgcaatctcagaagtccctggtgggtactggctgggccatcgtaagctgtgagctatgtcaaattcttggactctgaaacacttgtttctgcttctactgataatacattgaagatctgggatctcaataaaacctctcctgtgggtgcatccattaatgcttgcagcctaactctgtcaggacatactaatgagaagaattttgtgggtctatcggtggctgatggatatattgcatgcggttcagaaacaaatgagatttacacctactatagatcgcttcccatgccaatcacttcacacaaatttgggtccattgatcccatttctggtaaagacactgatgatgacaatggtcagtttgtttcaagtgtatgctggagagggaaatcagacatgcttattgcggccaattcaagtgggtgtgtaaaagtgttacagatggtttaagga

SEQ ID NO: 4589 - DNA, 345 bp, Glycine max
tgttaccatttgctcccagtacagagcttaaccgagcttcacaaagatgaatcgggaaaagttgatgaagatggccggttcggttagaactgggggaaagggtaccatgagaagaaagaagaaggctgtccacaagacaacaaccacagatgacaaaaggcttcagagcaccctgaagagaataggggtgaatgccatcccggctattgaggaggtcaatatctttaaggatgacgtagttatccagtttctaaatcccaaagttcaagcatccattgctgctaatacttgggttgtcagtggttctccacaaaccaagaagttgcaagatatactccctagcat

SEQ ID NO: 4590 - DNA, 402 bp, Glycine max
aattaacatttgctcccagcactgagcttaaccgagcttcacaaagatgaatcgggaaaaattgatgaagatggccggttcggttagaactgggggaaagggcaccgtgagaagaaagaagaaggctgtccacaagacaacaaccacagatgacaaaaggcttcagagcaccctgaagagaataggggtgaatgccatcccggctattgaggaggtcaatatctttaaggatgacgtagttatccagtttctaaatcccaaagttcaagcatccattgctgctaatacttgggttgtcagtggttctccacaaacaaagaagttgcaggatatactccctagcattatccaccaattaggaccagataacttggaaaacctgaagaagctggccgagcaatt

SEQ ID NO: 4591 - DNA, 403 bp, Glycine max
gcggtgaagtgtgtgatgcactctatccttctttctcttgaacccataattccatgactcggggtgggtcccactgcagcaacaacggccacaattcccggacatgcccttcgcgtgggggcggatgtgtgaagcttttcggggtcaggctgacggatggatcaatcattaagaagagcgccagcatgggcaacctaaacctctactccgccggcgcacatcaccaattccattcatatgcttcttcttccaacctcgccggcgacccctcatcccccaatccaagctccccatgctacgacccttcccaaggttacttgatcgatgaccccgcccatgtctacaccttcgctaaccgccgcagtgatagaaaaaaaggtgttccatggactggaaaagaaca

SEQ ID NO: 4592 - DNA, 265 bp, Glycine max
  modified_base (243)..(243): a, c, g, t, unknown, or other
aaagagggttagagaaataaaaagagaaagccgacagcacatagatagagagaggaaaacgacttaatattctttttccttgagacctgaaggggctaaggaaaattagaaggacacacaagtataaaggcggtgaaataaaagagaaagacaagaagaagacatgggaagacaccttgttgtgacaaagaaggggtcaagaaagggccttggactcctgaagaagacatcatattggtgtcntatattcaggaacatggtcctg

SEQ ID NO: 4593 - DNA, 433 bp, Glycine max
  modified_base (365)..(365): a, c, g, t, unknown, or other
cggacgcgtgggagaaataaaaagagaaagccgacagcacatagatagagagaggaaaacgacttaatattctttttccttgagacctgaaggggctaaggaaaattagaaggacacacaagtataaaggcggtgaaataaaagagaaagacaagaagaagacatgggaagaccaccttgttgtgacaaagaaggggtcaagaaagggccttggactcctgaagaagacatcatattggtgtcttatattcaggaacatggtcctggaaattggagggcagttcctgccaaaacagggttgtcaagatgcagcaagagttgcagacttagatggactaattacctgaggccaggaatcaaacggngcaacttcacagaacaagaggagaagatgataatccatcttcaagatcttttaggaaacagatgggct

SEQ ID NO: 4594 - DNA, 450 bp, Glycine max
  modified_base (368)..(368): a, c, g, t, unknown, or other
  modified_base (385)..(385): a, c, g, t, unknown, or other
cccacgcgtccgtagagaaataaaaagagaaagccgacagcacatagatagagagaggaaaacgacttaatattctttttccttgagacctgaaggggctaaggaaaattagaaggacacacaagtataaaggcggtgaaataaaagagaaagacaagaagaagacatgggaagaccaccttgttgtgacaaagaaggggtcaagaaagggccttggactcctgaagaagacatcatattggtgtcttatattcaggaacatggtcctggaaattggagggcagttcctgccaaaacagggttgtcaagatgcagcaagagttgcagacttagatggactaattacctgaggccaggaatcaaacggngcaacttcacagaacangaggagaagatgataatccatcttcaagatcttttaggaaacagatgggctgcaatagcttcata

SEQ ID NO: 4595 - DNA, 445 bp, Glycine max
ggagatgtaaaagtgattctggcaaccaacagaattgaaagtcttgatccagctttgctacggcctggtcgaattgacaggaagatagaatttcctcttcctgatatcaaaacaaggagacgcatctttcagatacacacatcgaggatgacattagctgatgatgtcaacttggaagaatttgttatgactaaagatgaattctctggagctgatataaaggcaatatgtactgaagccggtttacttgctctacgagaacgccgaatgaaggtgactcatgccgactttaagaaggccaaggataaagtgatgtttaagaagaaagaaggggtgcctgaagggctgtatatgtgaaatactatcctctatcatcctcgctcctcctgtctttttttcaatgttctagttatgcgaacaaatgataattcatttggattatgcg

SEQ ID NO: 4596 - DNA, 431 bp, Glycine max
  modified_base (424)..(424): a, c, g, t, unknown, or other
acgtcagcatggatcggataaaagggccatggagtcctgaagaggacgaagcgttacggaggttggttcagacttacggccctaggaactggtccgttataagcaaatccattccgggtcggtctgggaaatcgtgccgcttgcggtggtgcaacgagctgtctccggaggtggatcgccggcctttcacggcggaggaagacgatgcgatcctgaaggctcacgccaggttcgggaacaagtgggccaccatcgcgcgcttcctcaatggccgcaccgacaacgccatcaagaaccattggaattccaccctcaagaggaattgctccgagcctctctccgagcctcggcctctgaagagatccgccaccgtctcgggtagtcaatccggatccgatttgagcgaatcgggtttacccattantcttgca

SEQ ID NO: 4597 - DNA, 396 bp, Glycine max
attatattctctcactctcttactctttcactctacttctctctcctattgcggctagggtttaggtgtttctttcaccgtctccgttccttcaatcttcttattctctttcatctctgatggagacgttgcgggtttagttctaaggggtggttctggccttgggtttttggaacgtacggtgtcgttttggggttgggaaaacaaattctgagagatggcaaccacgaacccttttgatttgttgggtgacgacgctgaggacccttctcagctcatcgccgccgagcaactcaaggcggcggctgcggcctcggctgccacctgggctcccaagaaggcgccggctcagcataacaagccggctcagctccctaccaagccgtcttcttcggc

SEQ ID NO: 4598 - DNA, 407 bp, Glycine max
caattccatttgctctctggaccgagtcaggcggcggcgaatcggcatgactcggcgctgctgccagggcaccaacaacggccacaactcccggacatgcccgtcgcggggagggggcggcgtcaagctgttcggggtgaggctgacggatggatcaatcataaagaagagcgctagcatggggaaccttaacctctcctccttctcctcctccgccgccgccgcacatctgcaattccgttcatctccttcttcttccaacctccccgcggcctcatcgcccaatccaagctccccgtgctccgacccgccccaaggctacttgtccgatgaccccgcccacgtctccaccttcgctaaccgccgcggtgatagaaaaaaaggtgtgccatggactgaagaaaaca

SEQ ID NO: 4599 - DNA, 348 bp, Glycine max
  modified_base (89)..(89): a, c, g, t, unknown, or other
cccactcgttcgcccactcgtccggggaggagaaaagtggaaagaagacaaagatgacggcgagtgcttcgagccgggctgtttgtcangtggaagattgtagggctgatcttagtaatgcgaaggattaccatcgccgtcacaaagtttgtgatatgcattctaaggctacccaggcactagttggaaatgttatgcagagattctgtcaacagtgtagcaggtttcatgttcttcaagaatttgatgaatggaagagaagctgtcgtaggcgtctggcatgccacaataaaaggaggaggaaaacacttcctgatgcaactgtagttaatggatgctctctgaatg

SEQ ID NO: 4600 - DNA, 449 bp, Glycine max
agaaaattgatacggattcctgggaatttgccaatgaacactttgttaggggtcaaaagcatttgttgaagaatatacatacaaggaaacatccacacagtgcagatcagcaaaaggcattgccacagcaagacaattgtgatgaaccatcccaagaagcaccaaatcatggcctttggaaagaagttgagaatctaaaacttgataaaaattcgctcacacaggaattggtcaaacttaggcaacatcaggaatctgctgagagtaagttgctgctcctgagtgatcgccttcaaggaatggaaaagcatcagcagcagatgttgtcattcttagtcatggttgtgcaaagccctgtgttcatggttcagcttcttcatcctaatgaaaataattggcgtctggctgaatcatggaatagattggatcaagatacacaagatgacaag

SEQ ID NO: 4601 - DNA, 426 bp, Glycine max
cccacgcgtccgaacatttggtggcaaaaggttgcaaaaagatggtggttgtcaatagaactgatgagagagttgctgcaatacgtgaagaactgaaggatattgagattatctacaaacccctttcagaaatgctcacctgtgctggcgaagcagatttagttttcaccagtactgcatcagaaaacccattattcttgaaagaacatgtcaaggaccttcctcctgcaagtcaagaagttggaggccgtcgctttttcattgatatctctgttccccggaatgtgggttcatgtgtctcagaccttgagtctgtgcgagtttacaatgttgacgaccttaaagaggttgtggctgccaataaagaggatcgcctaagaaaagcaatggacgcacaggcaatcattgctgaaaaatctaagcaat

SEQ ID NO: 4602 - DNA, 378 bp, Glycine max
ggaggctacaatttttgagctacgttatcgaacaaatgtgggtgagttgcttgggcgtgtgcgcaaagagctgccatggggtgatgcaaaagttgccaagcaacttgttgatgcgcaactatatgaactacttggtgatcggacagcagcagatgatgaaaagccttctagaaagaagaaggagaaacctgctaaagtagaggataaggcagctcctgtttctacccctgaaaagtcacctgaagaagacgttaatccatttttaatattccctaatccagaggaaaatttcaaggtgcatactgaagtgccttttagtgatggtagtattttgagatgttgcaatacaagagatctgcttgacaaacacttaaaagc

SEQ ID NO: 4603 - DNA, 442 bp, Glycine max
ataaggctttgcatttcatttgagagagagagcgtcttacctttccattatcaaaatgggtgggtcggctatcacaggagcgaggctaaccctagggatagggttggcgatacctctttcctctcccacgcgctctcgaaccgtcgcaatggccgtatccgtcgaccccaagaccgacaacaaactcactcttaccaagtccgaggaagctttcgctgctgccaaggtacgcatgacctccctcttccttccttccttcctcctttcaattttgatttttgatttttgatttcaggagctgatgcctggaggtgtcaactccccagttcgtgccttcaaatccgtgggtggtcaaccaattgtgattgattcagtcaaagggtctcgtatgtgggacatcgacggcaatgagtacattgactacgtcggttcttggggtccc

SEQ ID NO: 4604 - DNA, 440 bp, Glycine max
gggttctcctgaatccgcaatggccgtttcaaccactttctccggtgccaaattggaggggctattgctcaaatgttcttcctcctcttcctcaccaccgccttcaaggtcatcattcaccacttttcccggccaaaacagaagaaccctcattcagagaggggttattcgctgcgacgctcagccctctgatgcatcatctgttgctccaaataatgccaccgctctctccgctcttgagcagctcaagacttctgcagctgatagatatacaaaggaaagaagcagcattatcgccattgggctcagtgtgcacactgcacctgtggaaatgcgtgaaaaacttgccattccagaagcagaatggcctagagctattgcagagctgtgtagtctgaatcatatttgagaagcagctgttctgagtaccctgcatcgaa

SEQ ID NO: 4605 - DNA, 383 bp, Glycine max
gctaaagggaaggttttgatgcaagctatgtatggagtaaaggtgcagacagtattgttatgcagtgtgtttgctgcggctttttcgggctctacaaagaatatgtcagatttggatgtggctgatgtatattcttgggctccaacctttaaaagtttgcaagatcttgtaaatggggaaattagagttagaagtgggcgatttactatattgaatgagttggaagtagttgattcctctgtgaaggaattatatcctattatccagggcgtctcagatgccattgagacagaatcacttgcgaagattgttggggaattaggcagagcaacagagaagctttcacaaggactagatcttcttacaaaggaagtcgatagctt

SEQ ID NO: 4606 - DNA, 465 bp, Glycine max
cccacgcgtccgcccacgcgtccgcaactttggaagagaggctgaaaaagcttattcccaagagcaaggatgagatcctcagcttgtcttggatgactttggctatgcagtcactttgtgagagccataatgacattaaaaccatcataacagagcttgagcttcctgtacatgattgggatgagaaatggatagacgtgtacttggacattagtgtgaagttgctagatatatgcattgcatttagctctgaattatcacgcctgaaccagggtcatcttttacttcagtgtgcattgcacaatttaggttcttcctcttcagagcagtatgttcgggcatgttcttcacttgatggttggaaacagcatattggttctggaaaccctaggattgagaaatgtggcagcattttggatgatcttctgcggtcacttgatctttcaaaaggtaaaaagtccgctt

SEQ ID NO: 4607 - DNA, 415 bp, Glycine max
gtcactccttgctcttagccctgctcctcttcgccgccgtggccaccggcgcgatggcggtgtccgatttcgacgccgtctgacatactgatccgtcaggtggtgccagatgttggcgaagccgaagaggaggacaacctgctgaacgccgagcaccacttcgcgagcttcaaggccaagttcgccaagacctacgccaccaaggaggagcacgatcatcgcttcggcgtcttcaagtccaacctccgcagagccaggctgcacgccaagctcgacccctccgccgtccacggcgtcaccaaattctccgatctaactccggccgagttccgccgtcagttcctcggcctcaagccgctccgcttcccggcgcacgcccagaaggcgcccatcctgcccaccaaggatcttccca

SEQ ID NO: 4608 - DNA, 336 bp, Glycine max
ttttacttcccctatggctcgtcacttcttgctcttagccctcctcctcttcgccgccgtggccaccgccgcgatggcggtggccgcgtccgacgccgacgacatcctgatccgtcaggtggtgccagatgttggcgaagccgaagaggaggacaacctgctgaacgccgagcaccacttcgcgagcttcaaggccaagttcgccaagacctacgccaccaaggaggagcacgatcatcgcttcggcgtcttcaagtccaacctccgcagagccaggctgcacgccaagctcgacccctccgccgtccacggcgtcaccaaattctccgatctaac

SEQ ID NO: 4609 - DNA, 375 bp, Glycine max
gtgtcttccaagattggagttattgaatccttgttggagaaagttaatgttctcttgcttggtggaggaatgatctttaccttttacaaggctcagggttattcagttgggtcatctcttgtggaggaagacaagcttagccttgcaactacacttcttgaaaaggccaaggctaaaggggtttctttgttgcttccaactgatgttgtcatagcagacaagtttgctgctgatgctaacagcttgactgtgccggcatcaagcattccagatgggtggatggcgttggatataggtcctgattccatttagtcatttgttgaatcatcggtttctactctttcctttatttgcaatgtactcttgtgtgttttt

SEQ ID NO: 4610 - DNA, 414 bp, Glycine max
cccacgcgtccggcacctttctcttcctccgatggctaatctctcactcttgttcttggggggcctcctattctccgctgccgtagccaccgtcgaacgaatcgacgatgaagacaaccttctgatccgtcaagtggtgccggacgcggaggaccaccacctgctcaacgcggagcaccacttctccgacttcaagacaaagttcgccaagacctacaccacgcaggaggagcacgaccaccgtttccgtatcttcaagaacaacttgctccgcgccaagtcgcaccagaaattggacccctgcgccgtccacggcgtcaccaggttctccgatctcactccgtctgagtttcgcgggcagttcctcggcctgaagccgctccgtcttcccttcgacgctcataatgctccgat

SEQ ID NO: 4611 - DNA, 288 bp, Glycine max
agcaagacaaagagggtatcccaccagaccaacagaggctgatctttgctggaaagcagcttgaggatggccgtacccttgccgattacaacattcagaaagagtccaccctccacctggtgctccgtcttcgtggtggcatgcaaatctttgtcaagaccctcactggaaagaccatcacccttgaggtggagagctctgacactattgacaatgtcaaagctaagattcaagacaaagaaggtatcccaccagaccaacagaggctcatttttgctggaaaacagc

SEQ ID NO: 4612 - DNA, 429 bp, Glycine max
gaggaagcatatccctacacaggaaaagatggtgtctgcaaattctcagctgaaaatgttgctgttcaagtccttgactctgtgaatatcaccttgggtgctgaagatgaactaaaacatgcagttgcatttgttcggccagttagtgtggcctttcaggtggtgaatgggttccatttctacgagaatggagttttcactagtgacacttgtggtagcacttcccaggatgtgaaccatgccgttcttgctgttggatatggagttgaaaatggtgtcccatattggctcataaaaaattcatggggagaaagctggggtgaaaatggctacttcaagatggaattggggaagaacatgtgtggtgttgcaacttgtgcatcttatccaattgtggcataaattgcataacaatatggtccctggtga

SEQ ID NO: 4613 - DNA, 402 bp, Glycine max
ctaaaattaaattaccatatatagtcacattttctttacactttgtgaggtctaaaatgttgtccatttttcacaaggggtttgctcacccacctgaagagcttaaaagccctgcatctaacagtggctccaacaagcctaagattcctgaggaaactctaagagaatttctttctcatcatccccataacactttttctctgagttttggtcactctgctgttctagcttatactcgtcctgatccaccttcctttgttcatcaaaggttgttttgtgggattgatgacatatactgtatctttttggggagcttgaacaatttgtgctcactcaacaagcagtatggtttggcaaagggcaccaacgaaaccatgtttgtgattgaagcttacaagacac

SEQ ID NO: 4614 - DNA, 446 bp, Glycine max
  modified_base (416)..(416): a, c, g, t, unknown, or other
ttcaggacaaagagggtatcccaccagatcaacagaggctcatctttgctggaaagcagcttgaggatggccgtacccttgctgattacaacatccagaaggagtccactcttcacttggtactccgtctacgtggtggaatgcaaatctttgttaagactctgaccggaaagacaatcacccttgaggtggagagctctgacaccattgacaatgttaaggctaagattcaggacaaagagggtatcccaccagaccaacagaggctcatctttgctggaaagcagctagaagatggccgaaccttggctgattacaacatccaaaaagaatctaccctccacttggttctccgccttcgtggtgggatgcaaatctttgtcaagactctcactggaaagaccatcacccttgangtggagagctctgacactattgacaatgtc

SEQ ID NO: 4615 - DNA, 341 bp, Glycine max
ctaccctccacttggtgctccgtctgcgcggtggtatgcaaatctttgtgaagaccctgactgggaagaccattactttggaggtagagagctcagacacaattgacaatgtgaaggcaaagatccaagacaaggagggtatcccaccagaccaacagaggctcatttttgctggcaaacagcttgaagatggccgaaccttggctgattacaacatccaaaaagaatctaccctccacttggtgctccgtctgcgcggtggtatgcaaatctttgtgaagacccttactgggaagaccattactttggaggtagagagctcagacacaattgacaatgtg

SEQ ID NO: 4616 - DNA, 418 bp, Glycine max
agacactccgtgaccgtggtccataccctgcagatcaagttgtgaaggatcttgatggcagggttggctttgttgtctatgacagcaaggttggcagtgtctttgcagcactgggttctgatggtggaattaagctgtattggggtattgcagctgatgaatctgtggtaatctcggatgatctagatgtcatgaaagaggggtgcgccaaatcctttgctccctttccaccagggtgtatgtttcacagtgaaggaggattgatgagctttgagcatccaatgaacaagttgaaagcaatgcctagaatagacagtgaaggggccatatgtggagccaacttcaaggttgacaagtacgcaagggtcaacagcatacctcgagtatgaagccaggctaattggatggaatggaccca

SEQ ID NO: 4617 - DNA, 446 bp, Glycine max
ctggaaagaccatcacccttgaggtggagagctctgacactattgacaatgtcggagccgagattcaggacaaagaaggtatcccaccagaccaacagaggctcatttttgctggcaaacagcttgaagatggccgaaccttggctgattacaacatccaaaaagaatctaccctccacttggtgctccgtctgcgcggtggtatgcaaatctttgtgaagacccttactgggaagaccattactttggaggtagagagctcagacacaattgacaatgtgaaggcaaagatccaagacaaggagggtatcccaccagaccaacagaggctcatttttgctggcaaacagcttgaagatggccgaaccttggctgattacaacatccaaaaagaatctaccctccacttggtgctccgtctgcgcggtggtatgcaaatctttgtg

SEQ ID NO: 4618 - DNA, 380 bp, Glycine max
taccttttcaactttcaagggcagatctttttgagacgccactggtaagacaatcacccttgaggtggagagttcagataccatatataatgtaaagtccaagattcaagacaaggaagggatcccaccagaccagcaacgtctcatttttgctggcaagcagcttgaggatggacgtacacttgctgattacaacatccaaaaggagtccactccttacttggtgctgcagctccgtggtggaatgcaaatctttgttcatacattgaccgtaaagacaatcactcttgatgtccagagctcttacaccattgacaatgttaaagctaagattcatgacaaagagggtatcccaccagaccaacaaaggcttatctttg

SEQ ID NO: 4619 - DNA, 449 bp, Glycine max
aagaaagaaaaccctagcttaccttttcaactttcaagatgcaaatcttcgttaagacactcactggtaagacaatcacccttgaggtggagagttcagataccatagataatgtaaagtccaagattcaagacaaggaagggatcccaccagaccagcaacgtctcatttttgctggcaagcagcttgaggatggacgtacacttgctgattacaacatccaaaaggagtccactcttcacttggtgctccggctccgtggtggaatgcaaatctttgttaagacattgaccggaaagacaatcacccttgaggtcgagagctctgacaccattgacaatgttaaggctaagattcaggacaaagagggtatcccaccagaccaacaaaggcttatctttgcaggaaagcagctagaagatggcagaaccttggctgattacaatatc

SEQ ID NO: 4620 - DNA, 434 bp, Glycine max
agccattcgtattgtcgcagagaaagaaaaccctagctcaccgtttcaagatgcaaatcttcgttaagaccctcactggtaagaccatcactctcgaagtcgagagttcagataccatagacaatgtaaaggccaaaattcaagacaaggaagggatcccaccagatcagcaacggctcatttttgctggcaagcagcttgaggatggacgtacccttgctgattataacatccaaaaggagtccactctccacttggttcttcgtctccgtggtgggatgcaaatctttgttaagaccttgacgggaaagacaatcacccttgaggtcgagagctccgacaccattgacaacgttaaggctaagattcaggacaaagagggtatcccttcagatcaacagaggctgatctttgctggaaagcaacttgaggat

SEQ ID NO: 4621 - DNA, 401 bp, Glycine max
cccacgcgtccgcccacgcgtccgcgattttcgattctcttctctgcaactatgcctaaccctaaggtcttcttcgacatgaccatcggcggtcaacctgccggccgcatcgtgatggagctctacgccgacgtgactccgagcaccgccgagaacttccgcgcgctctgcaccggcgagaagggcgccgggcggagcggcaagcccctccactacaaaggctcgtccttccaccgcgtgatcccgaacttcatgtgccagggcggcgacttcaccgccggaaacggcaccggaggcgagtcgatctacggcgccaagttcgccgacgagaacttcgtgaagaagcacactggtcccggcatcctctccatggcgaacgctcgtcccggaaccaacggatc

SEQ ID NO: 4622 - DNA, 430 bp, Glycine max
ctaatccctatttttcttcctcagtagtgtcatttacgcttctcttctctgcggcagctatgcctaaccctaaggtcttcttcgacatgaccatcggcggtcaatctgctggccgcatcgtgatggagctctacgccgacgtcactccccgcaccgccgagaacttccgcgcgctttgcaccggcgagaagggcgtagggcggagcggcaagcccctccactacaagggctcgtccttccaccgcgtgatcccgagtttcatgtgtcagggtggcgacttcaccgccggaaacggaaccggcggcgagtcgatttatggcgccaagttcgccgacgagaacttcgtgaagaagcacaccggtcccggcatcctctccatggcgaacgccggtcccggaaccaacggatctcagttcttcatttgcacgga

SEQ ID NO: 4623 - DNA, 402 bp, Glycine max
gcgattgtcgattctctactctgcaactatgcctaaccctaaggtcttcttcgacatgaccgtctccggtcaacctggcgggcgcatcgtgatggagctctacgccgacgtgactccgagcaccggcgagaacttccgcgcgctctgcaccggcgagaagggcgcctggcggagcggcaagcccctacactacaaaggctcgtacttccaccgcgtgatcccgaacttcatgtgccagggcggcgacttcaccgtcggaaacagctaccgaagcgagtcgatctacggcgccaaattcggcgaccaagaacttcgtgaattaagcacacttgtcccgggatcctcttcatggcgaacgccggtcccggaaccaacggatctcagttcttcatctgcacgact

SEQ ID NO: 4624 - DNA, 439 bp, Glycine max
ggagaagcggactgggaacaagtgttacatgctttccgctagagatctgagcattatatggggtgacactactcattattgggagtggacaaccctaccagagtccaggttcgaagaagttgctaggcttcgagctgtgtgttggtttgacattactgggaggatgaacacccgcgttttgtcgccaaatactaattatgcagcttttcttgtgttcaagatgatcgatgccggtggatttcactacgatcctgcggtgttatcagtaggtattttgggaggcaatagcagtaccaaaaatgtttgtttggatcccaacttagtagataatcgacttgatgatagattccatggactccaacgtccaactgtgaggagcgatgggtggctggagattgagatgggtgagttcttcaatccaggcctagaagaagatgag

SEQ ID NO: 4625 - DNA, 401 bp, Glycine max
cacacgcgtccgtctctgtaagccttgctttcaattttctccttacaaaaaaatcctttcccttctctagtccccataactagcaaaagaagccaatagaaaactgttccatatagtttcccattcaaacttgttttgattttcattttaactcaatggagaatagaacaagctctgtactcccacctggcttcaggtttcaccccactgatgaggaactaattgtgtactacctttgcaaccaagcctcatcaaggccatgccctgcatcaatcattccagaagtggatatctataagtttgatccatgggaattacctgataaaacagactttggagaaaaggagtggtacttctttagcccacgagagaggaagtatccaaatggggtgaggcctaat

SEQ ID NO: 4626 - DNA, 446 bp, Glycine max
cccacgcgtccgctctaagctttgctttcaatcttctccttacaaaaaaaaatcctttccctctcttgtcccaataattagcaaaagaagccaacagaaaactattccatatagttttcaattcaaacttgttttgattttcattttaactcaatggagaacagaacaagctctgtactcccacctggcttcaggtttcatcccactgatgaagaactaattgtttactatctttgcaaccaagccacatcaagaccatgccctgcatcaatcatcccagaagtggatatctataagtttgatccatgggaattacctgaaaaaacagactttggagaaaaggagtggtacttctttagtccacgagagaggaagtatccaaatggggtgaggcctaatagagcaaccgtgtctgggtattggaaggccactggcacagataaagc

SEQ ID NO: 4627 - DNA, 337 bp, Glycine max
cgatgatgtggggtatcccgaagagttgaacttggacagaagttctggtgatgattctatggaagaggatttgcctgagactaagcaaattgattctaagtttaatgttgatgaacttaaagacaaaatagagattgaagagcctattgtgaaggaggaaagtagtactatagctgttggagatggtctgtctgcaggagaaagtgatatccaccaagatattgacattagtccagttgctccaacagagaaacgaaaatttaatgaacaagcatcagttgggaacaatgagcctgcaaaaaggcaacgcatgtggaacactgaaacagttaaaggt

SEQ ID NO: 4628 - DNA, 445 bp, Glycine max
ttctttctttttcattttgttttgctaccctaatagacacgaggactatttaaaaacccggacgcgtcgtatcgttccaccggcgccgtcaacctccaaggctcgaaccaccatccttccactcaaccgcgcacttgcactcgtcggctcaagctaccaccgcagcacgcctcagccgccgccagttaacaagcatttgctcataaagaaggaaggaagatggtgtttgggcaagtagtggttggtcctcctggctctggaaaaacaacttactgcaatggcatgtctcagtttctcagtcttattggaaggaaggttgctgctatcaatttggatcccgctaatgattcgttaccctatgaatgtgctgtgaacatcgaggatctcgtgaaactaagtgatgtaatggtggaacattcgcttggaccaaatggaggtcttgtgt

SEQ ID NO: 4629 - DNA, 455 bp, Glycine max
  modified_base (388)..(388): a, c, g, t, unknown, or other
cggactcgtgggcatccagctaagtataggatgctggtcggaatggttgatgtcatattttcggatgtggctcagcccgatcaggcaaggattttggggctgaatgcttcatattatctgaaagcaggaggtcattttgttatttcaatcaaggctaactgcatagactccacagtccctgccgaggcagtgtttgaaagcgaagtgaacaagttgaaggcagatcaattcaaaccattcgagcaagtcacccttgaaccatttgagagggaccatgcctgtgtggttggtggatacagaatgcccaataagaacaaagatgctgctgagtagattgctttccggtagccagtaggcttaatgtcatttcacgagattgtgttaattntgttttgaaacctcggttatcaaacatactttgtaccttttctatagtagtaatgtagtcaagtttg

SEQ ID NO: 4630 - DNA, 168 bp, Glycine max
atttcagaaaatcataattttcgcagcaacaaaactacaagtttaccataacatatcacaagatggcccgttctccctcgcaagccaaacgtattggtgttcctgttgctcaatctatctccctaattcccgtccatcggcgatgttacgcagtggcatccgatgtat

SEQ ID NO: 4631 - DNA, 398 bp, Glycine max
  modified_base (394)..(394): a, c, g, t, unknown, or other
atcaaagaaaggggtggtggctgcttcgaaagcttaataatttgtttatttccagaacatcagagggttcgcagcagcaaactaacaaattactcatatcatataataagatggcccgttctctctcgcaagccaaacgtattggtgtccttgttgctcaatctatctccctaattcccgttcatcggcgaggttacgcagtggcatccgatgtatcggtaagagttggattgggtaatattgggcgaaggaatggaatcgtgggaggtgtagaagagaagcctgatacaagagatggttcaaaagcctactcaactgattgggccccagacccagtaacaggttactataggcccattaaccacacccctgaaattgaacccgtggagcttcngcat

SEQ ID NO: 4632 - DNA, 421 bp, Glycine max
accgtccacgcgtacgttaaagatcttgcaacatctgatgcaattaaaatttcccgtgaagtgggccgtactggagataggaccattggagttttgacaaagattgatcttatggacaagggtactgatgctgttgatatattggaaggaagagcatataggttaaagtttccctggattggtgttgtgaatagatcacaacatgacataaacaagaatgttgacatgattgctgctaggcgtagagaacgtgagtacttcaatagtacccctgaatataaacaccttgcgaacagaatgggttccgagcatctggcgaagatgctctcaaagcatttggagacagtaatcaagtccaaaattcctggcattcaatctctaattaacaaaacaattgctgaacttgaagctgaactaactc

SEQ ID NO: 4633 - DNA, 339 bp, Glycine max
caaggatatcgtcgtctaattgaatcttctctaataactattaggggccctgctgaggcagctgttgatgcggttcactcgctgttaaaggacttggttcacaaagctatcagtgagactttggacttgaagcagtatcctggtctccgggttgaggttggggctgctgctgttgattcactagaaagaatgagggatgaaagcaaaagagcaacactgcagctagttgatatggagtgtggctatctgactgttgatttctttcggaagcttcctcaagatgttgataagggtggcaatcccacacattcaaatttttgatagatataatgattcata

SEQ ID NO: 4634 - DNA, 291 bp, Glycine max
aacgacgtagtgcgctcgcaaagagactatagttataccggagtgcacaagctgaaataggttcagttgcttggtctaagtagatatatgtatgccagatcacgtttatacgagagccagcagtgtcattattcattgtttccctatttccagttcattattcatactcattttttgttgtcatcttatccacttgtattgtcatcttaaatagatgagacgattctgaaaagggaaaaaaaatgattttttgggttatacaattgagtgtccccgtatatttcatttttc

SEQ ID NO: 4635 - DNA, 403 bp, Glycine max
cgggaaaattctgcattcgtgagcactcgtgtggattggaaggagaccccagaagcacacgtattcaaggctgatattccagggctgaagaaggaggaagtgaaggttcagattgaagatgataaggttcttcagataagcggagagaggaacgttgagaaggaagataggaataacacgtggcatcgcgtggagcgtagcagcggcaagttcatgaggaggttcagattgccggagaatgcaaaagtggataaagtgaaggcttctatggaaaatggggttctcactgtcactgttcccaaggaagaggttaagaaggctgatgtgaagaacattcaaatctctggttaagcaaaagcaaattgttgctggtcttttgtgtttatctttggtgtttgagaaa

SEQ ID NO: 4636 - DNA, 322 bp, Glycine max
acggcaccaccaccagcaccaccaccagcaccgttctattcttctttcacaatgggtatgtctcgtgattccatgcacaagaggcgcgccaccggcggcaagaagaaagcttggaggaagaagagaaagtatgagcttgggaggcagccagcaaacacaaaactatcaagcaacaagacggtgaagaggattaaggttcgcggtggaaacgtgaaatggcgtgctttgaggcttgataccgggaactactcttgggggagtgaggctgtgacccgcaagacaaggattcttgatgttgtgtacaatgcattcaacaatgagc

SEQ ID NO: 4637 - DNA, 352 bp, Glycine max
tgccgatcttcaatctctgagccaatcgctttccgatccatctcaccatgatttgctccgcgagattcaattgcgcgttgaggaccttgcgaagcttgcagaggctgcacctgttcgtcgatctaaagttgaggatatgagtgctgatgttgtagatagcaatccttatcgtcggcttatggcacttcacagaatggctattgtggacaactatgaactaatacgcgatttatacggagccatagacggagtaagcggtgtacgaagtgtttcggctgagatgctaactagatgtggcatatgtacactcttgctgaatgattatgacatagtagagctagcgaacctgaat

SEQ ID NO: 4638 - DNA, 435 bp, Glycine max
cgccgatcttcaatctctgagccaatcgcttcccgatccatctcaccatgatttgctccgcgagattcaattgcgtgttgaggaccttgcgaagcttgcagaggctgcacctgttcgtcgctctaaagttgaggatatgagtgctgaggttgtagatagcaatccttatagtcggcttatggcacttcagagaatgggtattgtggacaactatgaaagaatacgcgatttctccgttgccatagttggagtaggtggtgtacgaagtgtttcggctgagatgctaactagatgtggtataggtagacttttgctgtatgattatgacaaagtggagctagcaaacatgaataggttgttctttcgtccagatcaggttggcatgacaaagactgatgcagctgtacagactctgtcagacataaaccctgatgt

SEQ ID NO: 4639 - DNA, 414 bp, Glycine max
ccggaactagattcactgccacactctcctatgcaacttattctcaaggcttcacaagacaaacgcttcgtatgtgaggcagctgagaaaagccttgatagcactgactacttggatttgccctatttctttattgccaaaattgcaaccatgccttaagaataagaatcctcgtatccgtgcaaaggcatcaatgtgcttttctcgaagtgtttcacgactgggggaagaaggcataaagacatatgggattgacaaattgatccaagtagctgcatctcagttgagtgaccagctccctgagtccagggaagcagcccgaactctacttcttgagcttcaaaatgggtatgagaaatcttctcatgatctcatgccagctactcctgtccataatgatcataataatgtcaa

SEQ ID NO: 4640 - DNA, 397 bp, Glycine max
gttcagcaacaacgtgatcggactcctgaacttcctgaccttcctcctctccatcccgatgctggtggccggagtgtggctgagcaagcagggcgccaccgagtgcgagcggtggctggagaagccggtgatcgcactcggcgtcttcctcatgctcgtctcactcgccggcctcgtcggcgcgtgctgtcgcgtgtcgtggctcctctggctctacctcctcgtcatgttcgtcctcatcgttcttctcttcgccttcaccatcttcgccttcgttgtcaccaacaagggcgctggcgaagttgtgtctaatagagggtataaggagtataggcttggggattactcgaactggttgcagaagagggttaacaacactaagacgtggaacaagatc

SEQ ID NO: 4641 - DNA, 378 bp, Glycine max
tccgcccacgcgtccggccggaaaacaggtcggttaggtgttaccggcaaacctcgctggaatgtcgaggattcagctctacggatttcatgtctcaaatgaagaatctgatcgaacagaaccagcaacaggccaggcagatcctcatccaaaatcctatgttaaccaaagcgcttttccaggcacaaattatgcttggaatggtgcaagcacctcaagtggttccaaaagttcagccaatggtttcacagaacaatcagcagccagtacaaccaacacaacagccaaatattcagcctgctccattattgcctgggcatggtggtgcacaggatcaagcaggtgtatctcaaacccaaattcctctgaggaaacacc

SEQ ID NO: 4642 - DNA, 430 bp, Glycine max
  modified_base (357)..(357): a, c, g, t, unknown, or other
  modified_base (421)..(421): a, c, g, t, unknown, or other
acgacgcgtcagcccacgagtccgcccacgcgtccgcccacgcgtccgccttgcagtgccgccaaagcaaccctgccctaaaaattgaacagggcagagagcgagtgaacatgggaacctccgcgaacgctgtcgcaggtggtcgtggcggcgcccctgtccccaaagacgtcgactacgccaattacttctgcacctacgctttcctctaccaccagaaggagatgctctccgaccgcgttcgcatggacgcttatttcaacgccatttttgaaaacaaacgccacttcgctggcaagactgttttggatgtggggactggaagtggcattcttgctatatggtcggcacaagcangtgcgaagaaggtgtatgcagtggaagctaccaagatgtcggaacacgcacgtgcactcatcanagcgaataa

SEQ ID NO: 4643 - DNA, 378 bp, Glycine max
cggagctgtctgtgcaaatttgcgttgttcttcgcggcacacctcactcactgaacggtaagtatggcggacaaggctgttacaatccgaacccgaaagttcatgaccaacaggcttctttccaggaagcagtttgtcgttgatgtccttcatccagggagggcaaatgtttccaaggctgaacttaaggagaagctggctaggatgtatgaagtgaaagaccctaatactgtatttgtcttcaaattccgaacacattttggaggtggcaaatccactggatttggtttgatttatgatacagtggagaatgccaagaagtatgagcccaaatacaggcttatcaggaacggccttgacaccaaggtagaaaagtca

SEQ ID NO: 4644 - DNA, 408 bp, Glycine max
agcaggaagttccatcaaccctagtgagagaacctatccagaggagatgatacagacaggaatatctaccattgatgtcatgaattctattgctagaggtcaaaagatccctctattctcagctgctggtctcccccataatgaaattgctgcacagatatgccgtcaggctggcttagtcaagcgactagaaaagtctgataatcttctcgagggtggaggagaagaggacaattttgccattgtgtttgcagctatgggagttaacatggagactgcacagtttttcaaacgtgactttgaggaaaatggctcgatggagagagtgacccttttccttaatctggcaaatgatcctacgattgagcgtatcatcactcctcgtattgctcttactactgctgaata

SEQ ID NO: 4645 - DNA, 372 bp, Glycine max
caaacttggcaagatgctcattttgggatctatcttcaagtgtttggatcccataatgactattgctgctggtcttagtgtaagagatccatttgtaatgccgtctgacaagaaggatcttgcatagtctgccaaagcccaatttgctgctcgtgactatagtgatcatcttgcactcatccgggcttatgatggttggagagatgctgaagcgcatcatgctggttacgagtactgttggcgaaattttctttcttctcaaacacttagggccattgactctcttctaaagcaattctcttatttgctcaaagatatttgtctggctaataacaattctgaaacctacaatacatggagtcatgaagagca

SEQ ID NO: 4646 - DNA, 196 bp, Glycine max
ctttattggcctcaagctcgtcagacatactctccagagatcattgactatataaagtcactggatgctgatgaagatattgcccttttgaagttacatggatggaatctgccagttgaatgcgcgcgcactcttcaaaatctaaccatgcttctgaagaaaggagtgaagagagggatgaacccctttgccattg

SEQ ID NO: 4647 - DNA, 438 bp, Glycine max
  modified_base (322)..(322): a, c, g, t, unknown, or other
  modified_base (428)..(428): a, c, g, t, unknown, or other
cccacgcgtccgtaaaaaacagagcaactactcaattcttcactctgtttccccttacgttacacactctaacacatggattcaccttcctccttcttcaactcaccctcttccggcttctgctccgaatcttcctctccggaagccttctcgtgggaagggtacctacccttcaacgagaacgacccgtaggagatgcttctatacggcatgatcgccggcgcgacaaccgaggagcactccggcgagagggcgagctcggaggagagtgctgcagcacggaaggagaagtcgtaccgcggcgtacggcggcggccgcggnggaagttcgcggcggagataatggactccacgcgccacgggatgagggtgtggctggggacattcgacagcgccgaagccgcggctctggcttacgaccaagccgngttctccatg

SEQ ID NO: 4648 - DNA, 399 bp, Glycine max
gagcaactactcaattcttcactctgtttccccttaccttacacactctaacacatggattcaccttcctccttcttcaactcaccctcttccggtttctgctccgaatcttcctctccggaagccttctcgtgggaagggtacctacccttcaacgagaacgacccggaggagatgcttctatacggcatgatcgccggcgcgacaaccgaggagcactccggcgagagggcgagctcggaggagagtgctgcagcacggaaggagaagtcgtaccgcggcgtacggcggcggccgtgggggaagttcgcggcggagataagggactccacgcgccacgggatgagggtgtggctggggacattcgacagcgccgaagccgcggctctggcttacgac

SEQ ID NO: 4649 - DNA, 385 bp, Glycine max
tcgctgaactattatccagaggtcctggaatgactgttcccggaggttggtgcatagggaagggggagaatggcaccgatccctgctctgaagtcggtgatactaacgttctgaggcctggcccaggttccaagagacttgaaacattaatcaactcattgttgtcgaatgaaaagttccggccaagacagtgcatgtgaggtgaaaaacaagaatcaactggctaaggccaaagacagttctggaggattattttccactggctttagtttacatgtgcacatttagttagcatgatcagtaaattagtttttcttttcagtaggagaagaaatagtgaaagcatacacactcttcaatattgagaagaaaaaagtgtgagaca

SEQ ID NO: 4650 - DNA, 294 bp, Glycine max
tcgccttcttagacacatatgattgatacggactttatcatggacatgaaattctgagagcaggggctttaaaagagcttgctcgggaaaaagcccagtcggctacaaaattagccacttgttagatctgatggcgcgttagctggggtcaaaggtactcctgaatatgtgcggcagtgctgtgaatgtagtcttaagcgccttgatgttgaatgcattgaccgatactctcatcattcagttgacacttgagatccaaatgtagacaccgatatgggagctcaaaaagctggc

SEQ ID NO: 4651 - DNA, 374 bp, Glycine max
cagaaagtggagaagaaaaagatggagaaaatagagcacaaaacggtgaggacgaatggaataaacatgcacgtggcatccattgggtcaggcccagttgtactgttcctccacggcttcccggagctttggtacacgtggcgccaccagcttctgtccctctccgccgtgggctaccgggccatcgcccccgacctccgcggctacggcgacaccgacgccccgcccgacgcttcctcgtactccgccctccacatcgtcgccgacctcgtcgggcttctcgacgctttgggaatcgagcgagtttttctggtgggccatgactggggagcctccatagcctggcatttctgcttgctgaggcccgatcgtgt

SEQ ID NO: 4652 - DNA, 449 bp, Glycine max
ctcaccggcatctcgctggtggcgctgcaattcaaggccttgctgaagaaaaatctcttgctgtcatggcggaacaagagagccagcctcttacagttactctcccctctcatattcattttcctcatcttcgcaatcgacaaggccatcaaggcacagacctcgacctcctcctcctacaagagcgtcactgaccctcccatggaaccttctccccccatcactccctgcgaggacaagttcttcatcaaactcccctgctacgacttcgtctggagcggccacgccagccccacgttccagaccatcgtcgcccgcatcatgaacaacaaccccggccgtcccatccctccctccaaagtgaagtcttttaaggaaaagagtgaagtggatgcgtggcttctcagcaaccctatgcggtgccctggagcgcttcatttttcggagag

SEQ ID NO: 4653 - DNA, 449 bp, Glycine max
cccacgcgtccggcagattgtttttgtctgttctaattggggaatcctatctgcttcagtttgatcaggggttccactaatccggccctaccaatggcaaagcttgcttatgccagttttaccaaatggcatgctcgagtttctggatgcacctgtcccctacatagttggtatcaagaacaagaccaatgaagttcagtcaaagttaactaataatgttatcctgattgacgtcagcagaaaccaggtgaagtcatcaacagtacctcaactgccaaggcagaaagagttaatctcttctttacgtccttatcatgaaactcttgtgggagaaagttacttgggtaggagaaggccagtgtatgaatgcacggaagtgcagacagaagctgctaaggggttcctatcggagttaaggtcttatttggattctctttgctataacattc

SEQ ID NO: 4654 - DNA, 439 bp, Glycine max
cccacgcgtccgaaaaaaacaaaagcaaaacacaataaaaaaaaaaaaaaaaaaaaaaaaaggaaatgagttaattcattcgagcaacaacaataattaagttaattatacaaaattttactgaattatatattctgcagtaatgtatgaaaattctgatatcattaaaaaattgtttcaattcttgttttcttctaatgggatttataattttgtgtttaaaggtactaaattttaacatatggtattgcctcatttaatgtttgaatgatttaacttatttggcttaatgctttattgatgatattgttctacttcattgatcaccacgatgagcaatttcaattatgggcaagaatttatagtctttgcaatttatataaatcatattatgttattttttattcaacttacaatccaatatttgcatattgattct

SEQ ID NO: 4655 - DNA, 443 bp, Glycine max
gagaaaccaaacacaaggaattagaatggcaaaggtaagagatcagaagctatacgtcaccgttccgagtctctttcggtgcccaatctccatggacgtgatgcgctctcccgtaagcctctgcaccggcgtcacatacgatcgcgccagcattcagcactggctcgactcaggacacgacacgtgtcccgccaccatgcaggttcttccctccaaagacttcatccccaatctcacgctccaccgcctcatccgcctctggctcctctcctccccctcctcctcctccgccgccgaacctccctccccctcctcctccgccgaccacctccgccctctcctccgccaaatccaaacctccgacgacaacgtccccggtattctctccaaaatcgccgaattcgccaagaaatccggtgagaatcgccggtctctcgccgcct

SEQ ID NO: 4656 - DNA, 414 bp, Glycine max
  modified_base (356)..(356): a, c, g, t, unknown, or other
  modified_base (383)..(383): a, c, g, t, unknown, or other
  modified_base (392)..(392): a, c, g, t, unknown, or other
caattttcaaagccagacagacaaacatgtccgagaatattgagtccaattctccttcgctttccctctttatctgaaaggtatggagtgttttgacttctggaagagataatggtgcagtgcctagacggattaaagcatttgtgtgctgctctggtaaattgttgtgatgccgattcgtcaaagcaacctacaggtttagaaaatccagaagttcttgcaagagaaacagtgtttagtgtaagtgagattgaagcgctatatgaattgttcaagaagatcagcagtgcagtgattgatgacggactaattaataaggaagaatttcagttggcattgttcaagacgaacaaganagagagcttatttgcagatagggtgtntgacttgtntgatacaaagcacaacgggata

SEQ ID NO: 4657 - DNA, 427 bp, Glycine max
  modified_base (10)..(10): a, c, g, t, unknown, or other
cccacgcgtncggtgaaatggttggagctaaatctcgtaatatctcttatttaaaagggagggtagcttcttggattggaagtcctacctcggttgccataccatttggagttttcgaacatgttctttctgataaaccaaaccaggcagtggctgagagggtcaataatttgaaaaagaagttaattgagggagacttcagtgttctcaaggagattcgtgaaacagttctacaattgaatgcaccatcccatttggtagaggagttgaaaactaaaatgaagagttctggaatgccgtggccgggtgatgaaggtgaacaacgatgggagcaagcttggatagctataaaaaaggtgtggggctctaaagtggggaatgaaagagcatacttcagcacaagaaaagtgaaactcgaccacgaata

SEQ ID NO: 4658 - DNA, 429 bp, Glycine max
cgcagttcaagaattgaattcgttaatattttttcttctcttttatctgaatggcgaagcgcaggcttgaagacgggaagaagggcgtggtcgatctcatgcctcttttcgccaaggaactcctcgccggtggcgtctccggcggctttgccaagaccgtcgtcgctcctctcgaacgtgtcaagattctctttcagacgcgaaggaccgagtttcagagcacagggttgattggatcagctgttagaattgcgaaaacggaaggccttttgggtttctacagaggaaatggagcaagtgttgcaaggattattccttacgcagctattcattatatgtcctatgaggaataccgcagatggattatacaaacttttcctcatgtttggaaaggccctacccttgaccttgtggcaggctcactctctg

SEQ ID NO: 4659 - DNA, 460 bp, Glycine max
gttcttgctttcaacgataaacctgtgaagaatctgaagagcttggccaacatagttgagagctgtgatgatgattatctaaagtttgatctggaataccaacagaaggtagtgttgaagactagcactgctaaggccgcaaccttagacatcctcaccacacattgtataccttctgcgatgtctgatgacctgaagacataaaaagttttggtgaaagttatttaaattactcccattggcctcatcttaatttttttttaagtgttattacacctagttcactataagattgcggtactattggatctgcactagtcaatgagataaaaaggcttcacatacagatgattagagaatcagaggatggggaaggaattagcataatacaacttacgcttcattaaattatcattaagtttatctctttcgagttggggtgttctgtactctatttata

SEQ ID NO: 4660 - DNA, 448 bp, Glycine max
gcggcacaacaagtacggcgctttgccttcggcagctgagacttacaactatcgcacaaaaaagacccgttgctgccaaaccgggctcactttcaccaattcattattcccattttctccagaaccacaagaagaagaagtttgtaacaataatgggaatgaagggtgctcccgccactctctccgacgacgacgtcgttctcaagtccccaaacgaccgtcgtttgtaccgcctcatccacctgcccaacggccttcgcgccctgctcgttcacgatcccgagatttaccctgaggggcctccgaagcatgtttcaaacgaggacgaaattgaagaagaagatgatgatgatgaagaaaaagacgaggatgaagaaaaaaaagaagaagatgaagatgatgatgatgaagatgaagaagaagaagaaggaaatgaaatggatggggt

SEQ ID NO: 4661 - DNA, 443 bp, Glycine max
gcacaacaagtacggcgctttgccttcggcagctgagacttacaactatcgcacaaaaaggacccgttgctgccaaaccacgctcactttcaccaattcattattcccattttctccagaaccacaagaagaagaagtttgtaacaataatgggaatgaagggtgctcccgccactctctccgacgacgacgtcgttctcaagtccccaaacgaccgtcgtttgtaccgcctcatccacctccccaacggccttcgcgccctgctcgttcacgatcccgagatttaccctgaggggcctccgaagcatgtttcaaacgaggacgaagttgaagaagaagatgatgatgatgaagaagaagacgaagatgaagaagaagaagaagaagatgaagatgatgatgatgatgatgaggaagaagaagaaagaaatgaaatggatggg

SEQ ID NO: 4662 - DNA, 392 bp, Glycine max
agcaaagcttattccatcatacatgactcatgtcagcacacgtgtggcatgaacaataggttatttggcaccagagtatgcaataagggggcagctgacacgtacagcagatatttacagctttggtgtccttctcgtggagatagttagtggaagatgccacacaaattcacgattaccaataggagagcaatatcttttggaaatgacatgggaacgttatcagaatagagaattggtagggcttgtagacatatcactagatggccatttcgatgccgaggaggcatgtaagtttctgaaaattggacttctttgcactcaggacacgtcgaagctccgggcgaacatgtcatctgtggtcaaaatgctcacaagagagatggatattg

SEQ ID NO: 4663 - DNA, 410 bp, Glycine max
caagaggtctttcctggggtggttgtgcctgatgttagagccttttctgctgcttcaagagatgggttggttcctggggatgtgatccttgaggtcaatggaagtgagttttcaaaaccaggtccaagtgcggtttctgaagttgttgatgttatcaagaggaaccccatgagatatgttttgctcaagattaaaaggggggagcagaattttgatataagggtcaccccatatgagaattttgatggaactgggaaaattggagttcagctatcccctaatgtgaagatagctaatgttaggccaaaaaatttggtgcaagctgtggagtttactgggcaagagttttggggtctggcctctaatgttttacatgggttaaagcagacttttttgaacttctcccagtc

SEQ ID NO: 4664 - DNA, 421 bp, Glycine max
gaattctggttcatttttctttgtctgaatcgaacacacgtgagtatgtctgatcacgaggaccatgcagactacgcagacaatgaatcctttgcaaagcgtaggttcagggataggtccaaggaggcattgtccaaacaagccgttaagttagccaaacaagctgaagagcatgaaaggttcatcaacaaggtgactcatcttttgggggttcttggctttggttggttttgcttcatctttggggcaaggccacaagccgttcccttggtatattgtttgttctatgtggtatttgttcctctccgttggatatattacaggttcaagaaatggcattactatctcctggatttttgctattatgccaatacaatcttcttggtttacctccttttctacccaagcaatgaaaagcttt

SEQ ID NO: 4665 - DNA, 412 bp, Glycine max
gccatccctcacagggatgtttacctgtctgataaaagtgctccatgggatgattctgttggtggatatagatcttctgcgagtaggactcattatgaaccgtcattatattcaaattctggatcaagtacaggagctcctttagcctttgatgtactctgtccatcaaaagtctactgtggcgtactttcttgtcaattgaattctggatttggcactggatccctatggtccagacagccttttgagcaggtcgacgtgtatgataaaattcataatgctgcaacagacgatgttggaaatacgcctagtgcaactactcatgaaattactgtaggtgtggatattgatggcaagctctttcaatcttttagacactgtatgttgaaactcttaaaattggaacggtctg

SEQ ID NO: 4666 - DNA, 424 bp, Glycine max
catccttctcttcagatgatgaaggtttctatgcatttgaatcagaggatgacgtagatcgttcgattagatatgttggaaccaattaccctcatgttaagcggcgtaagaaattgcctgaccctgtagaaaaagagaaaggtgtcagtctttggtcaatgattaaggataatatagggaaggatctaacaaaagtttgccttcctgtttattttaacgaacctctttcctccctgcaaaaatgttttgaagaaatggagtattcatatcttctggaccaagcatatgaatggggaaaaaggggtaatagcctcatgaggattctctatgttgcggcttttgctgtatctggctatgcttcaactgaaggaagagtttgcaaaccatttaatccggtacttggggaaacatatgaagctcacta

SEQ ID NO: 4667 - DNA, 458 bp, Glycine max
ctggaagcccaggtggccagctcatatcacctggatcagcattttcaacttctggcacctgaaccgcattccctgatagaccccctacacttgaattccccaaaggggaaacaccaaagatcttgggtgttgaacacttctccacccgaagatggggttctagactgggatctggatcattgacgccagacagtgcatggcaaggttcaagactaggttcgggatccttgactcctgatggtgttgggcttgcttcgcgattaggctctgggtgtgtgacacctgatggtctggggcaggaatccaggttaggttctggctgtttgacacctgacagtgctgggccaaccaatcaaaacaacatctctgtgcaaaaccagatttctaaagaagcaactcttgcagattcagacaatggacatccaagcaatgcaacattgggtgatcacagagtttca

SEQ ID NO: 4668 - DNA, 395 bp, Glycine max
cccacccgttcgcttctaaatatatggggggaaacttttagatctcctcaatgaacggaaaaaggtttgcatgagggaggatgggaaacagcatgtttgcattgttggcttgcaagaatatagagtatctaaagttgagacaatcaaggaatttattgagagaggtaattccacaagaagtactggtacaactggagcaaatgaggaatcctctcgatcgcatgctatacttcagctttgtatcaagagatcagctgatgggactgaatcaaagcctacccgacttgtgggcaaactatcttttatagatctggctggaagtgaacgttgtgcaaatacgacagataatgataagcagactaagattgaaggggcagaaataaataaaagtttac

SEQ ID NO: 4669 - DNA, 430 bp, Glycine max
cctaaccttccttccattcactactcctccttcacttaaaaaatttcagccttgcagggcctcaacttttacaattattacaatttagcatcactctttctcttcctcaatccaatcccctctcgatcgaaccaagaaaatttaagaacccaaaccatgtatttatcggagaagcctcgccccatcgatttctacaaggaggaaggcgcgcgtgacatgatgatcgaggtcgtctccaacggcgacctccctcctccgcctcctccgccgcctccgccgatgatcctcggcgagagcagcggcgaggaccccgaggtcgagataaaggccccgaagaagcgcgccgaaacctgggttcaggacgagacgcgctccctcattggccttcgccgcgagatggactcgctcttcaacacctccaagtccaaca

SEQ ID NO: 4670 - DNA, 364 bp, Glycine max
actacccctgttgttcaacgcatttcagaatgcttcgtcaaaccacatggtttaacccaggtggcaaaccaaatatgtcatttaacacaatgggatattgttatgttgtctatgcactatatccagaagggtctactcttcaagaaacccacacctcttgttgatcaacatgatttcatagagaatctcttggagaagctcaaacactctctttctctcactctctcccatttctatcctttggctggccgatttgtcacccacaaaacacaagaccctccttcttatgctgtttctgttgattccaaaaacagtgatggagccagattcatctatgcaactctggatatgaccatatctgaca

SEQ ID NO: 4671 - DNA, 455 bp, Glycine max
tcgcccacgcgtccgcccacgcgtccggatttgtgcacatagagacaccatctccacctgctgctggtggttatggcaatactgcatatagctacggaaaaaagccccattcctcctctgagaataccccgaaatatggttcaaagaaagcattgcttggagataatggagatagaggagatgcaacaagggttgctaaggctttcaagaaatcatcaccaaggatatgtaaatactggatcaacaacaattgtgcacatggtgaacaatgcctgtatctgcattcatggtttcatggtgatgggttttccacagtaacgaaacttcatgaacataagaagggtatcactggcatcgcacttcctgttggatccgacaaactttattctggcagcactgatgggacaagtaagatatgggactgccatactggtcaatgtgctaaaagcatcaat

SEQ ID NO: 4672 - DNA, 442 bp, Glycine max
gcatgatgtgttttctgggtgtggttcacttcactgttgattcaggcacgctgtggtggaggaactagcggagtttggtgccacagtgtacacttgttccaggaatgaatcagagttgaatgcatgcttgaaggagtggagcagaagggattttcggtttctgggttggtttgtgatgcgtcttctccaccccaaagagagaaactcattcagcaagtggcaactgccttcaacggcaagctcaacatacttttgcttggcaacaaacaagttgttaatgagataacatctcaaacgccgattaagccgatggcagaaacgcatgaagtttcaaccttggtgactttcctttgtctgccagcagcatcctacatcactggacagattgtttctgttgatggaggattcactggtaatggatttcaaccaacatgagaaattc

SEQ ID NO: 4673 - DNA, 472 bp, Glycine max
tctcctccatggacccaacttcgatccctacccctccggccaccaccgtccccttcactgtgggacccatcaatcacgtgacccccgccgacaacaccaacaccaaccaccctccttacgatgagatgatatacacagcaatcggggctctgaaggagaaagatggttcgagcaagcgagccataggaaagtacatggaacaagtgtacaaggaccttccacccacccactctgctttgttgactcaccatctcaaccgattgaaatccgctggtcttctcatcctcgtcaaaaaatcctacaagctccccggatctgatcctcttcccgtgctccaggcccaaaagccccgcggtcgccccccaaagctcagatcccagcccaacactgagctcacatggcctgcgctagccctcaacgacaaccctgctcttcaatccgcaaaaagaggcccgggtcgtcccaaaaagat

SEQ ID NO: 4674 - DNA, 437 bp, Glycine max
ctctctctctctgtctctctgtctcctccatggccatctgcttcagtcccaaacacccgtgcttacgatgagatgatatagacagcaatcggagctctgaaggagagggatggttcgagcaagcgagccataggaaagtacatagaacaagtctacaaggaccttccacccactcaccctgctttgttgactcaccatctcaaccgattgaaatcctctgccctcctcgtcctcgtcaagaaatcctacaagcttcctggatctcatcatctgcctgcgctccagccccaaaagacccgtggtcgtcctcccaagcccaagccccaccccgtctggcctgctgcagccctcaccgacagccctgctcttctatccgccaaaagaggccccggtcgtcctaaaaagattggtgtcagcccgccaggcccaaggggtcg

SEQ ID NO: 4675 - DNA, 367 bp, Glycine max
attgatctctcctggaagttgattttatctgtccttcagtatacaccagcaattgataggtggagcattggatgcatttttgcgaaggtgttgccaggaaagccacttgtttcctggtaaaagtgtcgtgcatcaattagatttgattactgatcttcttgggacaccaccacctgaaactattgcaggagttcgaaatgacaaggcaaggaagtacttgatggaaatgcggaagaaatctcctgtgccatttgaacagaaatttccgaatgcggatccattggcacttcgcctattgcaaagacttttagcatttgatccaaaggatcgaccaactgctcaagaggcactagctgatcccttcttt

SEQ ID NO: 4676 - DNA, 371 bp, Glycine max
ctatatgctaatgagcctgctaatgcggaaaatccagttagcatgcctgttggtacagctgagccagaacgaacaagagatgctggtagtggtggcaatactaatcatgccagacctgctagcaatattgtaaacattgtaaagccagtaggctattcagcttcagtagccagtggaatgcaggatgttttagtaacctttgtggcttcaaagtctgatggaacagaagtgatggttgacaacaagtatctaaaagcatttaatccacttgttgtgatcaatttctatgagcagcatgttcgctacagccctacattgtgaccaaacagagaatagagtgtgcttttgagtttggagttaggttcacacga

SEQ ID NO: 4677 - DNA, 430 bp, Glycine max
agcatcacttgccacgcttggagccctgaccaatccatggttgctttatgcccaaacaataatgaagtgcacatctataggttggttgaagacaaatgggaaaaggtgtatgttcttcaaaagcatgaccaggtaatttctgggatagactggagtgcaagatcaaatagaatagttactgcatcccatgatcggaattcatatgtctggaaccttgaaggatcagaatgggtgccaactcttgttatccttagactaaaccgtgctgccctttgtgttgaatggagtccaaaagaaaacaaatttgcagtgggaagtggagccaaaactgtttgtatatgctactatgagcaggagaacaactggtgggtcagcaaacttatcaggaaaagacatgattcttccgtgacaagtgtttcttggcatcctg

SEQ ID NO: 4678 - DNA, 437 bp, Glycine max
cccacgcgtccgcaaacttccttcgcttgtagtactgccctaattccccaaattcgggtcttttttttttcttttttttttttttgttctttcttctcagatcccggtggccttttccctccctttctcaggaaaattcccccgattttctcgagaaagtgaaacggaattatgagctttcaggacatcgaggccgggcgccccttcggttcgaggcgcgggttgatgaatgggaagcaagaccccacgcaagcggtggctgccggcatattccagatcaacactgccgtctccaccttccagagactcgtcaacaccctcggaacccccaaagacaccctcgacctccgcgaaaagctccacatgacatgactacatattgggcaattggtaaaggatacatcagctaaacttaagcaagccagtgacattgatca

SEQ ID NO: 4679 - DNA, 247 bp, Glycine max
gatcttttgactttgccttcattgatgctgtacaaggagaactatgtgaactaccatgagaggcttataaagctggtcaagattggggggttgcttgtgtatgacaacagactgtggggtggacgtgtttgctggcctgaagacaaagttccaccacacgctggatcagggagggacgctgcaattgaatttaacataacaatcacaaacgattctcgtggtgaatttgctcttacttccgtagggg

SEQ ID NO: 4680 - DNA, 439 bp, Glycine max
aaaaatgtcgtcgttgataacagatttgctccgtcaaaccggcggcaccgccgtcatcgacggcggtctggcgacggagctggagcgccatggcgccgacctcaatgatcctctttggagcgccaagtgcctcttttccttccctcacctcattcgccaagtgcaccttgattacctggaaaatggtgcagacattataatcacagcatcttaccaagccaccattcaagggtttaaagccaaaggctattctgatgaagagagtgaagccttgctcagaagcagtgttgaaattgcacgggaggcacgcgaagtttactataaaaattgtgctggatgtcgttcgggtgatggggatgatgatggtagaatcctcaaacaacggcctatcttggttgctgcatcagtagggagctatggggcttatttggccgacggg

SEQ ID NO: 4681 - DNA, 457 bp, Glycine max
aggcagcctcggatgttgttgttgtcgtcgtcgtgttcttaggttttgttctgagacgcggtttttcattcttctaatggcccagtccttcggtcagaccgagatcaactgggacaagctagataaaactagattctatgtcgtaggagctggactctttacaggtgtttcggtggcactttatcccgtttctgttgtgaaaactaggctgcaggttgccacaaaggatgctgtagagagaaatgtgttttctggtgcaaaaggactacttaaaacagacggcatccctggtttgtatagagggtttggcacagttatcactggtgcaattcctgccagaatcatattcctctccactctagagaccacaaaggtgactgccttcagaatgcttgagccatttagactatctgaaacttctcaggctgccattgcaaatggagttgcatgcatgaca

SEQ ID NO: 4682 - DNA, 428 bp, Glycine max
cccacgcgtccgcgcagccttttcaccaaattgtcgaccaaccatcttcgttatttgcaggtttggtttcctttgaattacaatttacaagacaaggaaggcagcctcggatgttgttgttgtcgtcgtcgtgttcttaggttttgttctgagacgcagtttttcattcttctaatggcccagtccttcggtcagaccgagatcaactgggacaagctagataaaactagattctatgtcgtaggagctggactctttacaggtgtttcggtggcactttatcccgtttctgttgtgaaaactaggctgcaagttgccacaaaggatgctgtagagagaaatgtgttttctgttgcaaaaggactacttaaaacagacggcatccctggtttgtatagagggtttggcacagttatcactggtgcaat

SEQ ID NO: 4683 - DNA, 354 bp, Glycine max
atttgccaactaagaaaccccaaaagttgttccaaatctggatttcaaaacaaaatataggttcgccgcaacccatttgaatctctgagagaaggggcatatcaaaatcaattttttttttttctttcttcttttccctgaagagcaaatgggggcgtatagagctgatgaggattacgattatttgttcaaggtggtactgattggggactctggtgtgggaaaatcgaaccttttgtcgaggttcaccaagaacgaattcagccttgaatcaaagtccaccattggggttgagtttgccaccagaagcattagggttgatgataaagttctcaaggctcagattttggacac

SEQ ID NO: 4684 - DNA, 399 bp, Glycine max
cccacgcgtccgcatttgaggaacttgccatgggagtgcacagaggaggaactgattgagcttgggaagccgtttggcaaagttgttaacacaaaatgcaatgttggggcgaatagaaatcaagcttttattgaatttgcagatttgaatcaagccattgcaatgatatcgtactatgcctcatcatcagagcctgctcaagtacgtgggaaaactgtatacctacaatattcaaataggcaagaaatagtgaataacaaaactactgcagatgttcccgggaatgtattgttggtaacgattgagggtgcagatgcacgtcttgtcagcattgatgtcctgcacttggttttttcagcctttggatttgtgcataagattaacaatttcgagaagaca

SEQ ID NO: 4685 - DNA, 395 bp, Glycine max
gagacatcagtgcctccttctggtctttctggtgttggtctcctactctgcgcgatcgtaatcagcgctgggcggctggagccccatcaaggacgtaaacgacagccacgtggcggagatcgccaactactcgctgagcgagtacgacaagcgttctggggccaatctcacccttgtcaaagtcgtcaagggcgagactcaggtcgattccggcaccaactaccgactcgtcctcaaagccaatgatggatccgccacggccagttacgaagccatcgtttgggacaagccttgtctccatttcatgaatctcacttccatgaaacccctttattaatcgtaaacccatactttatttcactggctctcttatcatatttcatgtgttagctatt

SEQ ID NO: 4686 - DNA, 381 bp, Glycine max
cttgtgttgtgctggtgcattcttctacttcaattctcagccatgtcggtggttgcttgcgattgcaaccacaccacagagaaagataaccttagtggtgaaagtgagagctttcacaagttttttgagtgctggatttctgagcaaaaacaacatctgaaggaccttttaactgctgaatcaacccagctaattagtgatgaggagcttcaggcactgaatgataaagtggttgagcattatgagtactactacaaggccaagtcaaggtgtgcaaagcaagatgtattggccatgctgttcccaacatggatgagttccttggaagaagcttttctttggattggtggatggagaccaactatggcatttcacttgata

SEQ ID NO: 4687 - DNA, 373 bp, Glycine max
gtgcattcttctacttcaattctcagccatgtcggtggttccttgcaattgcaaccacgaccacagagaaagataaccttagtggtgaaagtgagagctttcacaagttttttgagtgctggatttctgagcaaaaacaacatctgaaggaccttttagctgctgaatcaacccagctaattagtgatgaggagcttcaggcactgaatgataaggtggttgagcattatgagtactactacaaggccaagtcaaggtgtgcaaagcaagatgtattggccatgctgtccccaacatggatgagttccttggaagaggcttttctttggattggtggatggagaccaagtatggcatttcacttgatatattc

SEQ ID NO: 4688 - DNA, 438 bp, Glycine max
gcaaaacttttcaaacccaaaaaaaatccaaaaaaagaaaaacaaaacgcttaacgcaatacaaaaaccacagtttcaatcacatctctctctctctttctcgcaaatttctactttctgggttttctatttgagattcgttgttccaatgagcgatcacttggtggtgttcgttgaccgtctcgcgcgccctgtccccgttgacccggtggcgcagccgccttccgagccgtctcctcctccggcccccgtgaatgctgacgcttccgggagctccggcaccgctccggtggaggattgtgacggagagggcggcggcgaggaggagccgctgatccagatggcggagtgccgcatctgccaggaggaggacggcgtttccaacttggagacgccctgcgcctgtagcggcagtcttaagtatgctcacagaaagtg

SEQ ID NO: 4689 - DNA, 402 bp, Glycine max
aatttctctatcaggttgttactctatttataactcagatatttgagaaggctttaagagatggtgcttttgggacttctcttggtgggatttctctcgcagctgggttcatcagtttcagcttctggttatggttggatggatgcacatgcaaccttctacggatggggtgatgcctctggcaccatgggtggagcatgtggatatgggaacttgtacagctagagctatggaggacagactgctgctttgagcatagccttgttcatcaatggtttaagctgtggggcatgtctccatattaggtatgttaatgatcatatgtgcgtgccttctacgctcacttattgtcactgcaaccagtttctgtctccgttacaaaggattccctattaatgcatg

SEQ ID NO: 4690 - DNA, 426 bp, Glycine max
cccacgcgtccggttactctatttataactcagatatttgagaaggctttaaaagatggtgcttttgggacttctcttggtgggatttctctctcagctgggttcatcagtttcagcttctggttatggttggatggatgctcatgcaaccttctatggagggggtgatgcctctggcaccatgggtggagcatgtggatatgggaacttgtacagccagggctatggaacaaacactgctgctttgagcacagccttgttcaacaatggtttaagctgtggggcatgtttcgagattaggtgtgttaatgaccaaaggtggtgccttccacgctcagttattgtaactgcaaccaatttctgtcccccaacaatgcactccctattaatgcaggtggatggtgcaaccctccccttcaccacttc

SEQ ID NO: 4691 - DNA, 441 bp, Glycine max
cccacgcgtccgcccacgcgtccgcccacgcgtccgaaaagaagaagaagaagaagagaggaaagtagtagaagaatacagggcagagctgcagccaacaccacccatggctgaatccgtttcagtggacatggagatgatctttctcggcggaaaggaacatcatattcaaactggctgtggttctgtatctgtaatagtctgtggggatcaagaaaaaccagctctgatcacttatccagatatagcgctaaattatatgtcatggttccaagggttatttttctggccaaaagccacttctttggttcttcacaacttctgcatctatcatatcaatccttctgggccttaattgggaaccggttcaatttggtctgatgatccatcccttctgcttgagacttagcagatcaaataattgaggttctcaattatttt

SEQ ID NO: 4692 - DNA, 445 bp, Glycine max
cagctttctgtcgcaaattgatgatatttgggtgttgatgcgcttctgtcatttggtttagattcaggatgaaaatgtcactggtttggcctctcttaacgaggcgaggattcagcacaagctctgagaatcttgttgcttctgtgctctttgagagattgccagtggtcattcccaaaattgatcctgtggtttatgcatttcaagaattctcgtttcgatggcgacaacaatatcaacgcagataccctgatgaatttcttgacaaatctgatgcaagggggaaaggtgattatcagattgactatgtgccagcaccacgaatcactgaagccgaccaaagtaatgaccgaaggtcattacaaagagctcttgacagaagactctaccttcttctctatggtaatgcatatggggctccaagtgggaagcctgtgtggcattt

SEQ ID NO: 4693 - DNA, 413 bp, Glycine max
caggaaaattaaaaagatcgaccaaaatgatgagtgctttacgaacaaatggattaagaatgtgaggtttctcagggcttcgtactttcaatcctttggatactatgttgagacctggaatagattttcattctaaggtatccattgcaacttcttcacggcgagcaagagctaccagatgcgtgcccaaagccatgtttgagcgtttcactgagaaagcaatcaaagtaattatgctagcccaggaggaagcaagacgtcttggtcacaattttgttggaacagagcaaattctattgggtcttatcggcgaaagaactggtattggttgctaagtgcttaaatcaatggggatcaaacctaaagatgcacgaatggaaattgaaaaaattattggaaggggtaatggattt

SEQ ID NO: 4694 - DNA, 429 bp, Glycine max
cttttggggagaccaccggagatatgtacggacggagtgattcttacgaatccgatttggcgcttctggattcgattcgccgccacttgctgggagagtccgaattgatattcggagccccgaatttcggttcgggtcggagctccagtttcagcagcttggactcgtgtttgagtgatgattggggagagcttccgtttaaggaggacgattcagaagatatggtgttgtacggcgttctccgtgacgcagttaatgtggggtgggtcccatccctcgatgccggctcgcccgagagcgtctcgtcgggttttccggcggtgaagctggagcctgatgtcatgccggcgttgattaatccgtgtccgccttcggcgccggcggtggaggagaagaagttgttccgccgaaggggaagcactaccgcgg

SEQ ID NO: 4695 - DNA, 445 bp, Glycine max
agcttggctacttctgatgctgaaaatcacagttccgaagccggtgttcagcttgtggaaagcgtctcagcatgcagtgttgagtctgttcagccaactaaggtcgattccccccctagcagtgtgtcgacaaatggggtttcttccccttctgtgccagcaaactcagaatcatctgatgctgctgctgctgcttctaagtctcccattcaggagcaagtttcaggcaccaaagaggacaaaaatgtggatgccaaagatggtgagagtgattcctcatgtggggttcctattgattcattccctaagcctgttgtgagtgtgaacattgagcctgagccaaaggttgtgcagcaggatatagtagacatgtacatgaaaagcatgcagcaattcactgagtcgctagcaaaaatgaagcttccgatggacttggaaagtgaac

SEQ ID NO: 4696 - DNA, 369 bp, Glycine max
ggaaaaatcaagtttactcctgtatatccatattaaccttctggaatcagcatgactacacctaatggacggttcatgacacataaaaagatctgtttgtctatgagtgactttcatccagaaagttggaatcccatgtggtctgcatcaagcatattaacagggcttctctcattcatgatggacaacagtccaaccactggcagtgtaaacaccaccactgctgacaagcatcgtctagcaaaatcttacatttctttcaactgcaagaatgctacattcaggaagatgctccctgagtatgttgagaagtacaaccagcaacagctttctgagcaggctgctacatagagggtctcatcggatacg

SEQ ID NO: 4697 - DNA, 434 bp, Glycine max
gtggtgtataacactcgatccagcacattaacaatggaaacgcagctttacgtgttcgctctctagactctgctctcaaacgccgtcgttttggaactctttttcttttccctttgattcttctctgtctttgtaaccgaaagaggggaaaatataattaataccgatttcgcaaccaattcttctcttgcgttgaattgggacaacgagaaattttggatctcagtttttggcaggaaaaaaaattgcatttgagtaaaaataacagagtgtagtgtagggtcttgttcttgatactgtgctaaatttgttggatggcggagaaatcatgcatcaagcgccttcagaaggaatatagagccctttgtaaagagccagtttctcatgttgtggctcgtccttcaccgagtgatattcttgagtggcattatgtg

SEQ ID NO: 4698 - DNA, 415 bp, Glycine max
cccacgcgtccggtccgccatctccgccgtcctcctccagctctgcagccactgcgggcaggtggtcgtctccagagcgctgtaccgtgggacccacgcgctcctctcacactttctcccgcgcacgtgcggaatatccactagcttcagggaggcgacggatcttgacatgggtgatgctgccataatagaagggaaaacaaaagggctttacttcgaatctgcttccaaccccacccttacggttgcgaacatacctgaactgtgccacatggcacaccggaagggagtgactgtggtggtggacaacacgttcgcgcccatggtgctttcgccagcgcgtcttggtgcttatgttgtcgttcacagtatctccaagttcatcagcggtggggccgatatcattgcatgagcg

SEQ ID NO: 4699 - DNA, 380 bp, Glycine max
cccacgcgtccgatcgtaacaagatcacatttgttttgttttgtgttgtttgtgttggggttgtgttgttgatctgataataacaacatggagggtgagaacaagaagtacatcacatctgaggagctgaaggagcacaataagccaggggatttgtggatttcaatccaagggaaggtttacaatgtttcagattgggcaaaggaccaccctggaggagaggttcccttgttgaaccttgcaagccaagatgtgactgatgcattcgtagcataccatccaggctcagcatggaagtatcttgatcccttcttcacagggtaccacctaagagatttcaaggtctcagaggtgtcaaaagattacagaaagcttgtgtc

SEQ ID NO: 4700 - DNA, 438 bp, Glycine max
atacaactgaatctaattgcaattcctgtgagccgtggcaaagcttttgaatttagtgcgctctcctctctgtttacccttccagatattgcagatacagcaagatcatgagtgggacttcggaaaagaaacttgtaagaatcgatgttagttctgatactgtatgcccatggtgctttgttggcaaaaaaaatctagacaaggccatagctgcctccaaggataaatacaactttgagataatatggcatccctttcaacttagccctgatgcccctaaagaaggcattgacaagagggagtattacagaagaaaatttggatctcaatcagaacggatggaagctcggatgtcagaggtgttcaagaatgttggcttggaatatagcttgtctggactcacgggaaacactattgacagccacaggcttatatatt

SEQ ID NO: 4701 - DNA, 431 bp, Glycine max
acgcgtcagcctcaaaccaaaccctcccgaattgaggtgacttgattttccctcttctctttttctctctcgtgagtctcgtccctgaagcgaaattctagaatggcggaagaagctcctgcatctgaaacctccgtcacaatgcctcaaccggcggaagtcatcaccgtcgacggaaccctaacctcttccgagaatgacaagagcggaatctccgtcgatgccgccgcgcacggcggtgaaaagacggtgtccaacgctgaaccttccggtagcgatcctcagaagtctctggagttggcgaacgagctgatggaaaaaggaaacaaggcaattaaggagaacgattttggagaagcagctgataacgtcagccgtgctctcgaaatcagagtggcacattatggtgaacttgctcctgagtgtgtgca

SEQ ID NO: 4702 - DNA, 415 bp, Glycine max
gtttccttctctctttcaccgataaaacaaactaaattcttcttctttctactgaaaacgatagtaatggcgacgaatccaatcgaagcggggaacggcgacgccgctcctaaccctaacgcgactaccaaaccctccgtctacctccaagacacggaggagctgaagcgagtcttcagccgcttcgacgctaattgcgacggcaagatctccgtcaccgagttggacaacgtcctccgctccctcggatccggcgtcccgccggaggatatccagcgcgtcatggacgacctcgacaccgaccacgacggattcattaacctctcggagttcgccgtcttctgccgctccgacaccgcggatggcggcgacgccgagctccacgatgctttcaacctgtacgatcatgacaaga

SEQ ID NO: 4703 - DNA, 423 bp, Glycine max
tcggaaagggtgcttcctgagtggtacacagagtaaggggtagagttaatacttagcacagaaatagtcaatgtggaccttgcggcaaaatctctgatcagtgcgggaggagaaacattcagttatcagattttgattgttgcaactggctcaacagatataaagctgacagattttggtgtacaaggagctgatgcgaaaaacatcttttatttgaaggaggtcgatgatgctgacaaattgtatgaggcaatcaaggcaaagaagaatgggaaagctgtggttgttggcggaggatacattggtctggagcttagtgcagtgctgaaactcaacaagtacgatgttaccatggtctacccggagccttggtgtatgccacgactgtatacagctggtatagctgaattctatgatgagtat

SEQ ID NO: 4704 - DNA, 397 bp, Glycine max
cccacgcgtccgacccggagccttggtgtatgccacgactttttacggctggtgtaggtgaattctatgagggatattacgcaaataagggtgtaaatatcattaaaggaactgttgctgttggattcacttctaattctgatggagaggtaaaagaagtcaaactaaaggatggcagggtcctggaagctgatattgttgttgttggtgttggaggaaggcctcaaacagtcttagtcaaagggcaggttgaagaggagaagggtggaatcaagaccgatgctttcttcaaaactaatctctccgatgtatatgctgttggtgatgttgctactttccctttgaaattatacggtgaattgagaagagttgaacatgttgatcattctcgcaaatc

SEQ ID NO: 4705 - DNA, 424 bp, Glycine max
cccacgcgtccgcggacacagaaccgagcttgcagcagcgatttctcatttcattggtcacacttcaacaatggcgaaaaccttcaaatacatcatcctcggtggaggagtttccgctggttatgcggcgagggagtttgccaaacagggcgttaagccaggggagttggctatcatttcgaaagaagcggtagcaccttatgaacgtcctgctctgagcaaggcttacctttttccagagtcccctgctagacttcctgggttccatgtctgtgttggaagtggaggagaaaggttgcttcctgagtggtacacagagaaagggatagagttaattcttagcacagaaatagtaaaggtagaccttgctgcaaaatctctgatcagtgctggaggagaaacattcagttatcagattttgatt

SEQ ID NO: 4706 - DNA, 160 bp, Glycine max
cgactttttacggctggtatagctgaattctatgagggatattacgcaaatgagggtgtaaatatcattaaaggaactgttgctgttggattcacttctaattctgatggagaggtaaaagaagtcaaactaaaggatggcagggtcctggaagctgata

SEQ ID NO: 4707 - DNA, 425 bp, Glycine max
accaaagccaaaaccatgttaggcactcctcacaccctcatactccttctcttcctcttgctcatcaccaccttctcccactcccttgtcttcaacataaccaacttcgacgaccctgccgccgccaccgccatatcctacgagggcgacggaagaaccaccaacggctccatcgacctcaacaaagtcagctacctcttccgcgtcggaagggccatctactccaaacccctccacctgtgggaccggtcctccgaccttgccatcgacttcgtcacgcgtttcaccttctctattgagaagttgaacttaaccgaagtcgcctatggagacggcttcgcgttttacttggctccgttggggtaccggattccgccgaactccggcggcggaacctttgggcttttcaacgctaccaacaacag

SEQ ID NO: 4708 - DNA, 356 bp, Glycine max
cttatataatccattcttctccctggttttttctttcttcattccccattaccatgggttgcctttccaccaccccttttcttcccttcactgcaaaaaatgcttctactagaatccctcctcccacatcattctcttacagcaagcaacgtagtaacagggatcccaagaaggttgtctgcgcctgcatcgctcctcctcaaaacttcaagagccaggactcttccgccattcatttcaatggttcgtccaaatcagagcaattgagcactgcgcgggatcatgaggatgattctgatgttcttattgagtgtagagacgtgtacaagtcttttggggaaaagaaaatcttaaat

SEQ ID NO: 4709 - DNA, 427 bp, Glycine max
ctcagaaagattttcaaaacttgctgtccaattatggtggtgctccaagagacattgggactgagctgtccactgctgcccttagtccacagccatttggggtgccagacatgccttttaagcctggatgctcaagtgatattgccatcaatgatcctggggttttgaataatggcttgtgggctaatcagactcaacgaatgcgaacatatactaaggttcaaaaatgtggctctgttggaagatgtattgatgtcacccgttacaagggatatgatgaactccggcatgatttggctcggatgtttggaattgaaggacagctagaagatcctcaaaggaccgagtggaaactagtatatgtggatcatgaaaatgacattcttcttgttggtgatgacccttgggaagaatttgtaagctgtgt

SEQ ID NO: 4710 - DNA, 376 bp, Glycine max
acttaatttccacttctaattaacaaagttaagcaagcattgacttggtacctataaggagtaatggctgtggctttgacgattgtgttgagcttgctctcggttctctcttctgcatcttgtgcacgaatggtgggggggaagacggaggtccccgacgtgagaacaaacagggaagtgcaagagcttggaaggttcgcggtggaggagtacaaccgcggtttgaaacagtggaagaacaatgggagtgaacagttgaacttttcggaggtggtggaagcgcagcaacaagtggtgtcaggaatgaagtactacttgaagatctcagctactcataaaggggttcacaaaatgttcacctcttgtgtggtggtca

SEQ ID NO: 4711 - DNA, 359 bp, Glycine max
aaaaaataaataaataacaaatttaaagctagcatagactagaaacctaaaaaatagaaatggctagaaggctatgacgattgtgttgagcttgctctcggatctctcttctgcatcttgtgcacgaatggcgggggggaagacggaagtccccgacgtgagaacaaacagggaagtgcaagagcttggaaggttcgcggtggatgagtacaaccgcggtttgaaacagtggaagaacaatgggagtgaacagttgaacttttccgaagtggcggatgcgcatcaacaagtgatgtcacgaatgaagtactacttgaagatctcagctactcataaaggggttcacaaaatgttcacct

SEQ ID NO: 4712 - DNA, 401 bp, Glycine max
cttccgaaactctggacaatctttactccgagaagaggtcactgaccttgatattacagagattgttagcaaatggaccggtataccattatcaaacctccaacaaacagagagagaaaagttagtcttgctggaacaggttcttcacaagagggtggttggtcaggatactgctgtaaaatctgtcgctgatgcaattcgccgttcaagggctggattgtctgatccaaatcggccaattgcaagcttcatgttcatgggtccgactggtgttggcaaaactgagcttgccaaggctttggctggttacttgtttaacactgaaaatgctcttgttagaattgatatgaatgagtacatggagaaacatgctggttcacgtctaggtggagccccttctg

SEQ ID NO: 4713 - DNA, 355 bp, Glycine max
gtgaatcctccgccgagcacttcccgccaccactcgatccgccgaaacctgagaatgtcccttaacaacaacgattcaaagctgaacccttcttctctgctgaattccgtcaccaaattactatggggccaatcgctcccgccggggctcctcgtcgccaccgtccgcaccgcctggaactccacgtggcacctcatgatgtcgcagctcgccccctccgactcctcaggcggctactcccgccccgccttcaaattccgcttctcctcaaccaccccttcccagggcagcagcctccacctctacgtgggcctggcatgcccatgggcccaccgcaccctcatagtgcgcgcgc

SEQ ID NO: 4714 - DNA, 329 bp, Glycine max
  modified_base (264)..(264): a, c, g, t, unknown, or other
gtttacatcacgagaaacaacgccacgctgaaatcccttttttgtgtccatgggcagcagcaggctgaggctagtgttgggcttgtctgttttgagttgtgtgcttgtgacatcctcagctcaaacgtgcagaaaccaaacattctcaaacagggtgtttgccacatgtcgtgatcttccacagttgacggcttacctgcactggacatacgaccaggctagtgggaggttggagatagcattcaaacacgctggaatcacctngaccaacaggtgggttgcatgggccatcaatcccagaaacaccctcgacccaaccatgattgggg

SEQ ID NO: 4715 - DNA, 354 bp, Glycine max
tcgtccacgcgttcgtccactcgtccgtgcatgcaggccggtgctttggaggatgttgttagggcatctcatcttgagatcattgagcttaagcatactgggggtgaattaaaggcagaattgaacttacttaagcagcatatagaagctcaagtcaaggagcttgaccatagaatgcatcggatagaggaacttgaagagaaagagagagtggcaaacgaaaatattgaaggactgatgatggacattgctgctgctgaagaagaaattaacagatggaaagtggcagcagagcaagaagctgccgcaggcagaggcgtcgaacaggaatttgtggcacagttgtcagcactt

SEQ ID NO: 4716 - DNA, 426 bp, Glycine max
ggcaactctaacgtttctggaactctgggcccagaacttggccagctacagcatctgcggtacttggagctctacaggaatgagataacaggaaagattcctaaggaacttggtaacttgaaatcacttattagcatggatttgtatgataacaagttggagggtaaaattccaaaatcatttggaaagttgaagtcacttaaattcttgcggctaaacaacaacaagttgacaggatccatcccaagagaactcactcgtctcactgatctcaaaatctttgatgtttctaataatgatctctgtggaacaataccagttgagggaaactttgaatctttcccaatggaaagttttaaaaaccacagggttagtggtcccgagcttgaaggacttggttcatatgaatttggatgctgaagaaga

SEQ ID NO: 4717 - DNA, 468 bp, Glycine max
gttatggcaggacagaacttgtgcgcatactattgcagattgctgaaagaaacagctaggatgttgatgatgacttggcgttgggttttgcctcccattatggcaagatatgaactatggattgcttggtggaagatggaaatgccatacactttatgggccctttgatgagagctgctgagaggcgttgcatgcaagtagttgagtggtttgtgcagaggggttgtcgagacatgctactatgccttgaacttacagctgccacttatagctgccatgttcacattgcagctgatcttctgacgcacgtacctcatgatgtcctagcagcactgagtgttgaaattcttaatgcgcgtgctgagcgcaacagaggatctcttgatggtgtagcattatttctccaatctgacttcttaagtgatcctgcagctacttatgctgttgcagatattattgctaaatcag

SEQ ID NO: 4718 - DNA, 434 bp, Glycine max
gtttctcatccctaatgggaaaatgtttcctacagtgggaaggattcacatggctccttgcagtgatgaatatttgtttgttgaaattgctaataaggccctgttttggcagcagcaaaactattatggtgttgatttgacgcccttacatgggactgcctttcaaggatacttttctcagcctgtggtggatgcttttgatccaaggttgttaatagctgctcctatgttccatgtgttagactttaccaaaataaaggaagaagagctgtatgaaattgacattcctctcagattcacagccactgtgggtgccaggctacatgggttggcatgttggtttgatgtactgttcaatggaagtactgcacgaaggtggcttaccactgcccctggttcacctacaacccactggtatcagttacgctgtgttc

SEQ ID NO: 4719 - DNA, 433 bp, Glycine max
gtctgatcatcacatccagcgtgtgacgctcattaatcatatcactaggtctgatgatgagaatgttggatctcatgggcgtactggcaatctagggtattcaactgaatgcggtgtctggagcaaaccttattatgtcaatcggaattgctgtcgcgttctgtgtgcatatagtacatgcttttacggtaagcttgggggataggagccaacgagcaaagacagcattgtgtaccatgggggcttccgtattcagtggaatcacacttacaaaattagtcggagtcctcgtcctttgcttctcaacatcacaaatttttgtggtgtattacttccaaatgtatctggccttggttctcattggcttcttacacggtcttgtgtttctacctgtggttttgaacttgtttggtcctccattaagatatacagt

SEQ ID NO: 4720 - DNA, 417 bp, Glycine max
cggacgcgtgggctttgatgaagtcatatactctgttgacatgccacaggaaatgaaggaacagggtgtacaataggacagattggtgcttttgaagggtgttagtggtgcattcaggcctggtgttctcacagctttgatgggtgtaagtggagctggtaagactactttgatggatgttctggctggtaggaaaaccggaggatatattgatggaagcatcaaaatttctgggtaccctaagaagcaagaaacatttgctcgtatctctggctactgtgagcaaaatgatatccactcacctcatgttacagtttacgaatccttgctctactctgcatggcttcgtttaccttcaggtgttgattccaaaaccagaaaggttagttagtgtgaactacaaacagtaaaacatgt

SEQ ID NO: 4721 - DNA, 305 bp, Glycine max
actttgccgacaagccacaggaaacgaaggacggtacgtacaagaggagagaggggagctaatgaagggagtaagaggagcatacaagcctggagttctcacagcttttatgggtgtaagtggatctgttaagactacttttatggatgttctgtctggttggaaaaccggaggatatattgatggaatcatcaaaatttctgggtaccctaaaaagcaagaaacatttgctcgtatctatggctactgtgagcaaaatgatattcactcacctcatgttacagtttacataatcctagctctac

SEQ ID NO: 4722 - DNA, 248 bp, Glycine max
tggttggattgaccggcttcagtggtctcttaactgaacaacgaaagagactgactgtggcgggtgaattactggctgacccgtccataattttcatggatgagcctacttctgggttagatgcaagagctgctgcaattgttatgagaacagtcatgaatactgtggacactgcaagaaccgttgtttgcaccatacatcagactaacattgacatatatgaagcattccatgagctattactaatg

SEQ ID NO: 4723 - DNA, 383 bp, Glycine max
gtgattgtgggaaaaagatgccgcagaggcactcgaagaacaacaacgatcttgcgttgttcacgtacgatgagaagcgaaaactaggttatgggacccagaaggagaggttgggcaaggactccattaagcccttcgatgcttgctctctctgcctcaaatccctaattgatcctatgagctgccagaaaggccatctcttttgcaaagagtgcattcttcagtgcctcttgtctcagaagaaagacattcaaaggaagcttgcagcccatgctgctcagcagaagcaagaaaaagaggaagaagaagagaagttgaagttgcaaaaggctaaagagcttgatgcatttgatcaacaaaatcatggtgcttgtccacaattc

SEQ ID NO: 4724 - DNA, 468 bp, Glycine max
tctgcttcttcttcttctctattcctatgtttccataacaacaccgccgattcattgcgtcagcgtcactaacttcatcatcataaaacattttcatataaataaatatattcattcattcattcattcacataataatcattaactatcattctctcttctctctctctctttcaattttagacagacaaaagaaagaaagaagagaacaacagagcaatggaaggaggaggagctgctccgtcggccgacaccgtgatgtccgacgcggcgccaccgtcgcagcagcctccggtggcgatggggatcgagaatattccggcgacgctgagccacggtggcaggttcatccaatacaacatattcggcaacatattcgaagtcaccgtcaaatacaagccacccatcatgcccatcggaaaaggcgcatacggcatcgattgctcagtttgaactcggagacgaatg

SEQ ID NO: 4725 - DNA, 440 bp, Glycine max
gaccgactcgtcctctttgctagctcaccgttagcatcttgatttccggtgagttaattgttcattttgcaaatgccaccttatataggtaggttattaacaatttaacttattgttctgtacattactttgtgttttccaaactctaccttcctctacttttgcacttttgatacctactatactgtaaatttataacgtaaattttttaaaatgctattttttaaatcacacttattgacaatacaaaagattgcattatgaaattgacaagcattaatgcggtctggatacattttcacgtagttatgaaaaatttggcttacaacgcatgtattatatctagagtttaatatcttacatgtgcacatctttggttcataaattatttatgtcaaattcctaagatgataaatagcttaatcaatcccacatatcta

SEQ ID NO: 4726 - DNA, 413 bp, Glycine max
  modified_base (371)..(371): a, c, g, t, unknown, or other
cgcgtccgctttgctagctcaccgtgagcatcttgatttccggtaagttaattgttcatttttcaaatgccaccttatataggtagtttattaacaatttaacttattgttctgtacattactttgtgttttccaaactctaccttcctctacttttgcacttttgatacctactatactgtaaatttataacgtaaattttttaaaatgctattttttaaatcacagttatggacaatacaaaagattgcgttatgaaattgacaagcatgaaggcggtctggatacattttcacgtggttatgaaaaatttggcttccaacgcaggtattatttctagagtttaatatcttacatgtgcacatctttgnttcataaattatttatgtcaaattcctaagatgataaatagc

SEQ ID NO: 4727 - DNA, 435 bp, Glycine max
ctttgctagctcaccgtgagcatcttgatttccggtaagttaattgttcatttttgaaatgccaccttatataggtaggttattaacaatttaacttattgttctgtacattactttgtgttttccaaactctaccttcctctacttttgcacttttgatacctactatactgtaaatttataacgtaaattttttaaaatgctattttttaaatcacagttatggacaatacaaaagattgcgttatgaaattgacaagcatgaaggcggtctggatacattttcacgtggttatgaaaaatttggcttccaacgcaggtattatttctagagtttaatatcttacatgtgcacatctttgtttcataaattatttatgtcaaattcctaagatgataaatagctaaatcaatccaacatatctattgctgatc

SEQ ID NO: 4728 - DNA, 439 bp, Glycine max
  modified_base (382)..(382): a, c, g, t, unknown, or other
  modified_base (426)..(426): a, c, g, t, unknown, or other
cccacgcgtccgtgagtcttcaaaaagctcatatgatgaagaattccctggctgctgagatgcggatcagaaatagattttactgcagaatgcaacaagggtcactgatactgcacagttcatgaagatatatcggagtagagaagttggtcaatcatatataacctgcgtttggactacttttgttgcaatggtgcatgcgctatggctaatgattaaaattagacctgaagtgatactttgcaatggacctggaacttgcattcccctctgtgctattgcatttatatttaaggatcgtattcccttccttattcttctatcatttccataatttcatttatccacttcatttgataaattatggttctactgaaattgntcaagcttctgtgcaggtactgggaatcagatggtcattaattntctacgttgagag

SEQ ID NO: 4729 - DNA, 391 bp, Glycine max
accacgcgtactgtgggatgaaaagtccacccgtttgacaaactgtgatcctcatggggaacacgcagttgtcaattgtaacaatcctcaagaggtagaagataacagagaaattatcttcacatatgatgttgatttccaggagagtaatgtgaagtgggcttcaagatgggatgcctatttgctgatgagtgatgaccaaattcactggttctcaattgtgaactcattgatgattgttctctttctttcgggcatggtagcaatgataatgctgcgtacactttaccgtgatatttcaaagtacaatgagttagagacccaatacgaagcacatgaagagactgttttgaagcttgtccatggtgatgtttttaggccatcaaacaac

SEQ ID NO: 4730 - DNA, 452 bp, Glycine max
gcttcttagagggactttcggaagacaattcagagagttcttagtgtccagtattccggtccggacggtgttcaaatatctccagagtgtcgccaccttatttcaaggatctttgtttttgacccggcagagagaatcaccatgtctgaaatctggaaccatgaatggtttctgaagaatctcccggcagacctgatggacgagaagataatgggcaatcaatttgaagagccagaccaacccatgcagagcatcgatacgatcatgcagataatttcagaagctaccgtaccagcagttgggacctattcttttgaccagtttatggaggaacaaatttatgacttggaatctgaatctgatgctgaatctgatcttgatatagatagcactggggagatagtgtatgccatatagtttgatcttagctacacttgaaagacaacaacata

SEQ ID NO: 4731 - DNA, 431 bp, Glycine max
gcagggcagaggagaaggccttgtgattcatcatgacgaatgaacccaacaacaagtgacgaggtttttctgtgtttagttggcccagatacccgctacaccttcgctggtaatctctataatgctttgcgccgcaacagaatcaatacctttttcacagaagataatcatcatgatgagctactactcatgaatggcgaccaaatttcaccctttgctctaagagcaattaaagaatcaaacttgttaattgttgttctctctccaaactacgcatcatccccaaggaatcttgatgaatttgtggccatcgttcggtgtataaagaggaagaagcaactgctgcttcccgtcttttacaaagtggaacgaggggaaataatggatgcaatatttagtggacctgatcaacaagcgctctgtgtattcga

SEQ ID NO: 4732 - DNA, 416 bp, Glycine max
cccacgcgtccgcccacgcgtccggccatatatggatgaaatatttcatataccacaggcagagcagtactgcaagggaaattttggaagttgggaccctatgattaccactcctcctggcctgtactatctttcacttgcccatgttgcttctttgtttccaggcttttactgtgtagaagctgcttcaatttctgacttgtgctctgctgcaattcttcgatcaattaatggtgttttagcagttgtctgtagtttaattctatatgacatagttactcacttgaagccaacacttaatgataggaaggcgatgcttcatgcagtggtcctatccttgtacccccttcactggttcttcacttttctctattatacagatgttgcatctgttactgcggtgctggctatgtatc

SEQ ID NO: 4733 - DNA, 292 bp, Glycine max
cccacgcgtccggccttttctttcctagctactacactttcattctttgcttcagagaatgaactagctaggatggtcagtgttgaagagatccgtaatgcacaacgtgcagagggccctgccactgtcatggctattggcaccgcaacttctccaaactgtgtcgatcagagtacctatcctgactattatttccgcatcaccaacagcgagcacatgaccgagctcaaagaaaaattcaagcgcatgtgtgataagtcgatgattaagaagcgatacatgtacttaaaat

SEQ ID NO: 4734 - DNA, 433 bp, Glycine max
ataacaagaaggcatgtgtgggacataattgaaaatgcaaagagagggcgtgccattgttgttacaacgcactctatggaagaagctgacattctaagtgaccgtataggaatcatggcaaaaggaagtcttcgctgcattggcacctcaatcagattgaagtcccgctttggtactggttttattgctaatatcagcttcaatggaaacaatatcgaacatagtcctgccaatggagatgcaatatctacagaacgtcgtgaggcaatgaagaaattctttaagaatcatttagatgtagtgccaaaagaggagaaccataacttcctaactttggagattcctcatgacagagaggcgctcatgacgaatttcttttcagagctccaagatagagaagaagaattcgcatatctgatatccagctgggtct

SEQ ID NO: 4735 - DNA, 381 bp, Glycine max
cttcttgttaaggttgtcggtgatgcaattgttgttggttttgtgctaagagaagaaggtgttgggaaggtttctttcgtcttttgatgatgatgtcacacaacttaacggggcagcttgtgggtgcagagatacatggctttcacacgttggatgatttggatgttagtaatactatggaggaagcaaaaagcagatggcttcgtcccaatgagattcatgccatactctgtaatcacaaatatttcaagatcaatgccaagccagtaaatttgcccaaaagtggtactattgtactatttgaccgcaagatgcttatgaacttcagaaaagatgggcacaattggaaaaagattaccgatggaaaaactggtaaagaag

SEQ ID NO: 4736 - DNA, 387 bp, Glycine max
  modified_base (319)..(319): a, c, g, t, unknown, or other
cttattgttaaggttgtcggtgatgcaatagatgtcggttctgtgctaagagaagaaggtgtggggaatgtttctttcgtattttgatgatgatgtcacactacttaacggagcatcttgtggttgcatagatacatggctttcacacgttggatgatttggatgttagtaatactatggatgaagcataatgcagatggctttatgccaatgagattcatgccatactctcgaatcacatatatctcacgatcaatgccaagccagtaaatttgcccataagtggtactattgtactatttgaccagacgatgctaangaacttcagaatagatgggcacaattggaaaaagaaaaccgacggaaaaactgtttaagaatcccatg

SEQ ID NO: 4737 - DNA, 431 bp, Glycine max
ctctgattggagtaaatggatatgttcaatttaaattcatgaagggattcagtgcggatggaaagatgatgtacgaggaagcaagccaagttgctaatgatgcagttggaagcataagaacagttgcttctttctgtgctgaagacaaggttatggaactatacaagaataaatgtgagggccccatgaaaacagggatactgcaagggttgatcagcggatcaggatttggggtttcatttttcttactgttttgtgtttatgcaaccagtttctacgcaggagctagacttgtggatgctgggaaggcaacattctcagatgttttccgggttttctttgcattaactatggcagctattggagtttcccaatcaagctcctttgctcctgacttaagcatagccaagtcagctactgcttccatattt

SEQ ID NO: 4738 - DNA, 412 bp, Glycine max
aatttttcatcaaagaccaaactagctttattcgactcaaccactatcctccatgccgttatcctgaccttgctcttggcgtcggtcgacacaaggaccctggtgccttaaccattcttgcacaggatgaggttggaggacttgaagtgagacgtaaagcagatcaagagtggataagagtgaaacccaccccagatgcttatatcatcaacattggtgacactgttcaggtgccagtgtagtaccatattgaaaactgaaaattttgaaatttcggtgtctggttctaacacactctatgattggttgaaatttattagaaactacaaaatcatgaaaggaccgttaagtaagacgtcagaagcacaattttcttgtaattttcaataaatttaaaccaatggtaagtgtg

SEQ ID NO: 4739 - DNA, 419 bp, Glycine max
aaaatttcatttggaaaagaatctgtcaattttgcggtgtgatatttaggttggagagaagggaagatgccgttgtaggtgttagaggcgacagtgtctagtttcgatgtggtttttgagaagttccgatcagagtgctctacagaacaaggccaatctcattctcttcttgtcggacaatgacccggctacctatctcagctggtgccctgattgtgtgagagcagaacctgtgatatacaagaagctggaggcttcacctgatgacattgctctattgagagctcatgttggatatagaccaacatggatgaatcctcagcatacatggatgatggatcctaggatcaagctcactggagtgcctacgttgatccggtgagatatcaacaccgtcaaatgtcgcttggaggatcatt

SEQ ID NO: 4740 - DNA, 412 bp, Glycine max
  modified_base (262)..(262): a, c, g, t, unknown, or other
cccacgcgtccgcccacgcgtccggagagatggcagcttctggttcgtggaagagtgggagtggttcttcgatgggtctggagaggatgagcgtggagcagctgaaggcggtgaaagagcaagccgatctggaagttaatcttctccaagacagcctctccaacattcgcaccgtcaccacccgcctcgagatcgcctccttcgccctcaacgatctctccctccgcccccagggcaaccacatcctcgtccccctcaccgncttcctctacgtccccgccacccttcacgactcccaacacgtcctcgtcgacgtcggcaccggctacttcatcgagaaaaccatgcccgaaggaaaagattactgcgaccgcaaaatcaacttgctcaaatctaactttgatcaactcgt

SEQ ID NO: 4741 - DNA, 358 bp, Glycine max
  modified_base (310)..(310): a, c, g, t, unknown, or other
gagaagggtcagcattgccttggaaatcttgatgaggccaaggttgcttttccttgatgagccaaccagtggacttgacagtgcttcagctttctttgtgactcagacactacgtgccttggcaagggatggaagaaccgtgatagcctctattcatcaaccaagcagtgaagtgtttgagctatttgaccaattatacttgctctctagtggcaaaactgtttattttgggcaagcttcagaggcatatgagttctttgcacaagctggctttccatgtcctgctttgaggaacccttctgatcacttnctcaggtgcatcaattctgactttgacaaagtcaaggccacccttaaa

SEQ ID NO: 4742 - DNA, 442 bp, Glycine max
cccacgcgtccgcccacgcgtccgtggaccttttcccactgctgttaccagcttgttggatcttacacggcttgatcttcacaataacaagttgacagggcctattcctcctcaaattggacggttgaagcgtcttaaaatactaaatttgaggtggaacaaactacaggatgcaattcctccagaaattggtgagcttaaaagtttgacgcatctgtacctaagcttcaacaatttcaagggagaaattcccaaggagctagcaaatcttccagaccttcgctatctatatctccatgaaaaccgtttagctggaagaataccaccggaattgggcacactgcaaaatcttcggcacttggatgctggtaacaatcatttagtgggtaccataagggaactcattcgtattgaaggttgctttcctgcactacgcaatctg

SEQ ID NO: 4743 - DNA, 365 bp, Glycine max
ggctgctaaagtagatgctaatggtggtggtggtaagggtggggtttctgcagtttctgggaaggttccagcagtggcacatacattggctgaaaagcctgatgaggtcgcattcaatattagttaccatgctcagttcagtcctcatttttcccctttcaagtttgagctggaacaagcttactatgccactgcatgagagtgttcgtgaccgtatgattcggcaatggaatgaaacgtaccttcattttcacaaagttgatcccaagcaaacttactacttatcgatggagctccttcaaggtcgagctttgaccaatgccattggaaatctgaatatacaagatgcatatgctaatgctttg

SEQ ID NO: 4744 - DNA, 322 bp, Glycine max
ggagaacgggctagaacaaaggacaacaatcttctcgggaagttcgagcttacagggatccctccagcaccaagaggagtgcctcagatcaatgtctgcttcgacatcgacgctaacgggattctgaatgtctctgcagaggataagactgctggtgtgaagaacaagatcacgatcacaaacgacaagggtaggttgagcaaggaggagattgagaaaatggtgaaggatgcagagaggtacaaggcacacgatgaagaggtgaagaaaaaagtggaggctaaaaattcgcttgagaattacgcgtataacatgaggaaca

SEQ ID NO: 4745 - DNA, 426 bp, Glycine max
cccacgcgtccgggaaaggacctggtttcttctctgagatcggcaagagaggcagagatatcctcacgaaggattacaattccgatcaaagattcaccatctacttctgcaccaactccggtctcgacctgaagtcaacactggtgaagagtagaggactttcctctggtgatgtggctgcagaatttaagtataagaacaaggcggttaatgtcaaagttgatactgaatcaaatgtgttgacgacattcactgtctctgatgttgtgccatccgcgaaaaccattgcttctattcgtctgcctgattacagttctggcaaggttgaggttcagtatcttcatgagcatgttgcttttactcttggtgttggtttagaccgctcccctgttattgactattctgggacgatgggtactcctagca

SEQ ID NO: 4746 - DNA, 441 bp, Glycine max
accaagcgtccgatcagaacatcgaggaaatagcagcattggatgccattgatgcagggaagttgtaccattggtgcaaggctgttgacattcctgctgcagcaaatactattcgttactatgccggtgctgcggataaaattcatggggaggtcttaaaagcgtctagggagttccatgcatatactttgttagaaccaattggtgttgtaggacacattattccgtggaatttccccagcaccatgtttgttgccaaggtgagtccttccttggctgctggttgcacaatggtcctcaagcctgctgaacaaacacctccctcggccttgttttatgctcatctttgcaacctggctggaattccagatggagtgcttaatgtagtacccggatttgggcaaactgcaggtgctgcaataactcacacatggacattga

SEQ ID NO: 4747 - DNA, 447 bp, Glycine max
  modified_base (418)..(418): a, c, g, t, unknown, or other
aaaagcattataccaatagtggtgcttattggagccatgtagtgtttgagcaccctgcaacatttcaaacactagctatggatccaaaggagaaggaaatgatcattgatgatctcataacattcagcaaggcaggggagttctatgcaaggattggaagggcatggaagagagggtatctgctttatggtcccccagggaccggtaagtccacgatgattgcggccatggcgaatttcttaggctatgatttgtatgatcttgagttgactgctgtgaaggacaacactgagttgaggaagctcctcattgagacatctagcaagtctataattgtgattgaggatattgattgttcacttgatttaaccggtcaacgaaggaagaaaaaggaagaagtggaagagaaggatcaaangcaaaaacaacaaggaatgcaagaaagag

SEQ ID NO: 4748 - DNA, 399 bp, Glycine max
  modified_base (279)..(279): a, c, g, t, unknown, or other
tgacgatccattgataaagacacgagcagtccttgagcttgacgatgacattatgatgccatgcgatgatgttgagcgaggttttaacgtgtggcgtcagcacccagatcggattgttggattctatcctcggctcattgatgggagcccgttaaaatataggggagaaaaatacgcccggtcgcataaggggtacaacatgattcttactggtgcagcttttattgattctcaagtggctttcaagaggtacgggagcaaggaagccgagaaaggtanggaactggtggacaagatatttaactgtgaagacgtgctcttaaactatttgtatgcaaatgcaagctcatcgtcaaggactgttgattatgtgaaaccagcttgggcaattgacacttc

SEQ ID NO: 4749 - DNA, 450 bp, Glycine max
tgatggagttgcaaggcttgaaggccgtggacaaggaggagccgccgaggattctgcatttcaatccgaggctgagaggtgattggagtgggaagccagtgattgagcagaacacttgttataggatgcagtggggttctgctctcaggtgtgaggggtggaagtctcgtgcggatgaagaaactgttgatggacatgtgaaatgtgaaaagtggattcgtgatgacaataatcgttctgaagagtggaaggcgacatggtggttaaacagattgatagggcgaaaaaagaaggtgacggtagactggccatatccttttgctgagggcaagttatttgttctcaccataagtgctggcttggaaggttaccatgttagtgtggatgggaggcatgtgacatcctttccctatcgcacgggatttgctcttgaggatgctactggactat

SEQ ID NO: 4750 - DNA, 390 bp, Glycine max
accaagcgtccgagaacccaggccatgactcagatgaatggtgtttactgttctagcaggcctatgcgtattggagctgcaactccaaggaaatcatctggccatcaacaaggtgggcagtcaaatggcacagccaaccaatctgaagcagattctacaaacacaactatatttgttggaggactcgaccctaatgtttcagatgaagatctcaggcagccattctcccagtatggtgagatagtctctgttaagatacctgttggaaagggctgtggttttgtccaattcgcaaacagaaataatgctgaagaggccttgcagaagctaaacgggacatcgattggcaagcaaacagttcgtctttcttggggccgtaatccagcaaat

SEQ ID NO: 4751 - DNA, 427 bp, Glycine max
  modified_base (420)..(420): a, c, g, t, unknown, or other
gagacaacaaagctcttcaagtagctcttgcttctcagtcagttgtgcagattggatttttgttagccttgcctatgttgatggaaattggcttggagaggggatttcgtgaggctttaagtgaatttgtactaatgcaactacagttggctcctgtatttttcacattttctcttggaacaaaaacacactattatggaaggacattgcttcatggaggtgcagagtacaaaggcactggtcgtggttttgtggtgtttcatgccaaatttgctgataactataagctctattctcgcagccattttgttaaaaggattgaattgatgattctgcttgtggtctaccatatatttggccatggatacagaggagtggttgcctatattttaattaccgtaaccatgtggttcatggtanggacatg

SEQ ID NO: 4752 - DNA, 415 bp, Glycine max
cgcgaatttcattgctagagtgttatttagagtattagcatcaatggctccaattgcagtgggagacatgattccagacggcattttggcttacttggatgaagaaaacaaaccccaaactgtctccattcactctctcgccaccggcaagaaagtcatcatctttggggttcccggtgccttcactcctacttgcagcttgaagcacgttcctggcttcattgagagagcagaagagctgaaagggaagggtgtggacgaaataatctgtatcagtgtgaatgatccatttgtgatgaactcatgggccaaaacattcccagagaacaagcatgttaagttccttgctgatggtgcagccaaatacaccaatgcccttggtcttgagcttgacctcactgacaagggtctcggc

SEQ ID NO: 4753 - DNA, 455 bp, Glycine max
gtttgcttcccaagtctctcgaagcatctttctttctcttcctgcagaagctatccgtgttagggggttcccaagtctccaacaagcaaagtacatggttgatttggaaatccaggtccccagcgcattcgacccgtttgccgaggcgagagaatcagatgcccccggggcaaaggagtatgtgcacatacgaattcagcagaggaatggaaagaagagtctgacaacagtgcaagggctgaagaaggagttcagctacgagaagatcctcaaggacctcaagaaggacttctgctgcaacgggactgtggtgcaggacaaggagcttggcaagattatccaactccaaagcgaccagcgcaagaacgtatcccatttcctcgttcaggccggtcttgtccggaaagaccaggtcaagattcatggattttgatttaacgattggtccttgttat

SEQ ID NO: 4754 - DNA, 316 bp, Glycine max
  modified_base (307)..(307): a, c, g, t, unknown, or other
cccaagtctctcgaagcatctttctttctcttcctgcagaagctatccgtgttacttgttcccgagtctccaacaagcaaagtacatggttgatttggaaatccaggtccccagcgcattcgacccgtttgccgaggcgagagaatcagatgcccccggggcaaaggagtatgtgcacatacgaattcagcagaggaatggaaagaagagtctgacaacagtgcaagggctgaagaaggagttcagctacgagaagatcctcaaggacctcaagaaggacttctgctgcaacgggactgtggtgcangacaaggag

SEQ ID NO: 4755 - DNA, 282 bp, Glycine max
acgctctcgaatcatctttctttctcttcctgcagaagctatccgtgttacttgttcccaagggtccagcaagcaaattacatgggtgatttgcaaatccaggtccccagcgcattctacccgtttgcctacgcgagagaatcagatgcccccggggcaaaggagtatgtgcacatactaattcagcataggaatggaaagaagagtctgacaacagtgcaagggctcaataaggagttcatctacgataagatccttaaggacctcaagaaggacttctgc

SEQ ID NO: 4756 - DNA, 399 bp, Glycine max
aacgaaaacactttctctccgattctcagcatccaatcagaggttccatttctcttgattccctctcacccaagttccaatcgctcactactgcactatatgcttccaactaagagaccttgcgaaggactggttgcagaagaagagactcacaacaacaacgacaacaacaacaacagcaacaacaacaacaacaacaacaacaacaacaacaacaataacaacagcaacaacagcagcagcagcagcagttctctcaagaagaatcggatcgccgctgccagaaccgccgattctacggtgaagaactacgaaagcaccgaccagagcttcaacaacaacaacagcaacagcggaaacgcgagtgagggagcgtcggatatggctttgggtgaatcg

SEQ ID NO: 4757 - DNA, 443 bp, Glycine max
gtttgggatgttggaggacaagagaaactaaggccactttggaggcactattttaacaacacagatggcctgatttatgttgttgatagcttggatcgtgagagaataggtaaagcaaagcaggaatttcagacaatcataaatgacccatttatgctcaatagtgtcatcttggtgtttgccaacaaacaagacctgagaggggcgatgacgccaatggaagtatgtgaaggactaggtctctttgatctaaagaatagaaaatggcacatacatggcacttgtgcactcaagggagatggtctttatgagggcctggactggttggcttcaacactgaaggaaagaaaagctgctggatactcttcaataggaacctcatccttctaatctaagtattttgtcattgaggaacgtgcaaggtttggccagtttcattcaag

SEQ ID NO: 4758 - DNA, 435 bp, Glycine max
  modified_base (399)..(399): a, c, g, t, unknown, or other
tctaattctgcaacaagttccaaactttcaaatctcaccgccccaaaaattctttttgggttacccatttgactttagcctctgcaacagagtctcagatctctgcattccaattcccatggctggtcgctatgacagtaaccccttcgatgaggaagaagttaaccctttctctaatcctggaagtgttcccgctgccaccaattcaaggcttccacctcttaagccagaacctgttgattataattatggctttggtgcgacagttgatatacctcttgattcatcaatggatttgaaaaagaaggagaaggaacttcaagccaaggaaactgaattgagaaaaagggaacaggaagtgagacggaaagaagaagctgcttcacgagctggaattgntcttgaggaagaagattggccggctttttttccaat

SEQ ID NO: 4759 - DNA, 446 bp, Glycine max
  modified_base (423)..(423): a, c, g, t, unknown, or other
attaaaacaaaaaatgtgcgctgccatatccgtagtggaacaagaagagttgctcgaaaaaggggaggtgttcaagatcaaaggcagggacaagcatggccgcaagatccttcgcattatcgccaaattcttcccagcacggttggtgagtgttgaggttctgaaaaagtacctggaggagagggttttcccgaagctgatggggaagaggaaattcgcggtgctgtacgtgcacaccggcgtccagaggagcgagaattttcccggaatctccggtctccggtggatctacgatgcgattccggcgaacgtgaaggagaatctcgaagccgtttattttattcacccgggcttgcatgcccgccttttcctcgctacattcggccgctttctctttaacgctgggctgtatggaaagctgangtacgtaagcagggttgattatc

SEQ ID NO: 4760 - DNA, 374 bp, Glycine max
gaggagaggagagaagagaggaagttttggggtttgaatctatagaatagaatcaaaccaaattgaaagaagatcgatcgatcgatcgatggctctggtcggagttgaagtgaagcatgcggcggagggcgcaccggaggagaattgctccgccaagcccaccaagcagggcgagggcctccgccactactattctcacaacatccacgagcatcagctccgtcgccgtcaaaaggagcataacctcagacgtcttgaggctcagagaaacgagctcaattccagggtgaggatgctgcgcgaagaagtacagcttttgcaggaaccaggctcttatgttggtgaagttgtcaaagtcaggggcaagaacaaag

SEQ ID NO: 4761 - DNA, 387 bp, Glycine max
  modified_base (327)..(327): a, c, g, t, unknown, or other
agcgagaggagaggagagaagagaggaagttttggggtttgaatctatagaatagaatcaaaccaaattgaaagaagatcgatcgatcgatcgatggctctggtcggagttgaagtgaagcatgcggcggagggcgcaccggaggagaattgctccgccaagcccaccaagcagggcgagggcctccgccactactattctcacaacatccacgagcatcagctccttctccgtcaaaagacgcataacctcaaccgtcttgaggctcagagaaacgagctcaattccagggtgaggatgctgcccgaagaattacagcttttgcanggaacaggctcttatgttggtgaagttgtcaaagtcatgggcaagaacaaagtccttgtc

SEQ ID NO: 4762 - DNA, 430 bp, Glycine max
aattgaaagaagatcgatcgatcgatcgatggctctggtcggagttgaagtgaagcatgcggcggatggcgcaccggaggagaattgctccgccaagcccaccaagcagggcgagggcctccgccactactattctcacaacatccacgagcatcagctccttctccgtcaaaagacgcataacctcaaccgtcttgaggctcagagaaacgagctcaattccagggtgaggatgctgcgcgaagaattacagcttttgcaggaaccaggctcttatgttggtgaagttgtcaaagtcatgggcaagaacaaagtccttgtcaaggtccacccagaaggaaaatatgtcgttgatattgacaaaagtattgacattacaaagattactccatccactagagttgcacttcgcaacgacagttatgttctt

SEQ ID NO: 4763 - DNA, 453 bp, Glycine max
cccacgcgtccgcaagacgagagaatagaggaagcttggggtttgaatcgaatcgaagggaagcgattcatcgatcgatcgatggctcttgtaggagttgaactgaagcatgcggcggagggcgtaccggaggcgaattgctccgccaagcccaccaagcagggcgagggcctccgccactactattctctcaacatccacgagcatcagctccttcttcgccaaaagactcataacctcaaccgtctcgaggctcagagaaacgacctcaattctagggtgaggatgctgcgcgaagaattacagcttctgcaggaacccggctcttatgtcggtgaagttgtcaaagtaatgggcaagaacaaagtccttgtcaaggtccacccagaaggaaaatatgttgttgacattgacaaaaatattgacattacaaagattactccatccactaga

SEQ ID NO: 4764 - DNA, 432 bp, Glycine max
  modified_base (374)..(374): a, c, g, t, unknown, or other
ggaagttttggggtttgaatctatagaatagaatcaaaccaaattgaaagaagatcgatcgatcgatcgatggctctggtcggagttgaagtgaagcatgcggcggagggcgcaccggaggagaattgctccgccaagcccaccaagcagggcgagggcctccgccactactattctcacaacatccacgagcatcagctccttctccgtcaaaagacgcataacctcaaccgtcttgaggctcagagaaacgagctcaattccagggtgaggatgctgcgcgaagaattacagcttttgcaggaaccaggctcttatgttggtgaagttgtcaaagtcatgggcaagaacaaagtccttgtcaaggtccaacnccagaaggaaaatatgtcgttgatattgacaaaagtattgacattacaaagattactc

SEQ ID NO: 4765 - DNA, 433 bp, Glycine max
acagaggaagttttggggtttgaatctatttattagaatcaaaccaaattgaaagaagatgggtcgatcgatcgatggctctggtcgcagttgaagtgaagcatgcgtcggatggcgcacctgaagagaattgctccagcgagcccacccatcatggcaagggcctgcggcactactattctcacaacattcacgagcatcaggtccttctccgtcaaaagacgcataacctacaccgtcttgaggctcatagaaacgagctcaattccagggtgaggatgctgcgcgaagaattacagcttttgcaggaaccatgctcttatgttggtgaagttgtcaaagtcatgggcaagaacaaagtccttgtcaaggtccacccagaaggaaaatatgtcaatgatattgaccaaagtattgacattacaaagattac

SEQ ID NO: 4766 - DNA, 430 bp, Glycine max
ccgccctttacaatatcttatctgaaacactcttctcatatctctctcactcaaacctactttctcctttctttctcttctggaaacaattactaaaggatgagtaaacaagacgtcttgaaagttcagagctgtgttctcaaggttaatatccactgcgatggttgtgagcaaaaagtcaagaaactgctgcagaaaatcgatggggtttattctgtgagaatagatgcagatgaagggaaagtggtagtggcaggagatgtggatccagcgaaactggtaaaaaagctaaagacgggatggaagcatgctgagatatggcagaaccagaaaggagaaatgatgtacaatcacaagtatcccatcaaccagaacatgatgcaacttgggggaatggacaataattagtctcaaaatcaaaatggtcaga

SEQ ID NO: 4767 - DNA, 443 bp, Glycine max
gggccgacccacgaatccacccacgcgtccggtttcattgctctctctcttgtgcggacacaatttttgatggggatatacctcagcactcccaaaacagagaaggcctctgaagatggtgagaacgacaagcttcgcttcggtttgtcttccatgcagggctggcgtgctaccatggaagatgctcatgcagctcatccatgtttggacgagtccacgtcatactttggtgtttatgatggccatggaggcaaagcagtttcaaaattctgtgccaagtatctacacctgcaggtgcttaagagtgaagcttacttagctggagatttaggcacatctttacagaaatcttttctcagaatggatgagatgatgcgtggacaaagagggtggagagaattagcaatcttgggggataaaatagaaaagttgtctggtatgct

SEQ ID NO: 4768 - DNA, 435 bp, Glycine max
cccacgcgtccggtttcattgctctctctcttgtgcggacacaatttttgatggggatggacctcagcactcccaaaacagagaaggcctctgaagatggtgagaacgacaagcttcgcttcggtttgtcttccatgcagggctggcgtgctaccatggaagatgctcatgcagctcatccatgtttggacgagtccacgtcatactttggtgtttatgatggccatggaggcaaagcagtttcaaaattctgtgccaagtatctacacctgcaggtgcttaagagtgaagcttacttagctggagatttatgcacatctttacagaaatcttttctcagaatggatgagatgatgcgtggacaaagagggtggagagaattagcaatcttggggggattaatagaaaatttgctggtatgctagatggctttat

SEQ ID NO: 4769 - DNA, 400 bp, Glycine max
cggacgcgtgggttggccattctatgatttttactcatgactcctccaagttgatagtagcaggtcacgataaaaggatatatgttgtgcatgttgggggggcagatgaagttaagtcagaattactgcatacttttacaccccttcgcgaatcacaagatcaagaattacctccaactgagccacccataacaagattgtttactagttctgatgggcagtggttggcagctgtgaactgctttggggatatatatgtatttaacttggagatactaagccagcactggttcatttcaagattggatggcgcctctgttacagctggtggctttcctccccagaacgacaatgtactgatagttacaacttcctcaaatcaagtgtatgcatttgacat

SEQ ID NO: 4770 - DNA, 435 bp, Glycine max
cacgcgttcggctatgcgaaaaatgaaaaatgagtttatggtaaagggcgatggtctgcgtgcaaaagataaagagcgtgtacttgttcttgctgctacaaacaggccttttgatcttgatgaggctgttattaggaggcttcctcgacgattaatggttaatttgccagatgctccaaacagagaaaaaattctcagtgtcattttggcgaaagaagatttggcacctgacattgattttgaagcaatagctaatatgacagatggatattctgggagtgacttaaagaatctgtgtgtcacagcagctcactgtccaatacgagagatcttggagaaggaaaagaaggagagaagcttagcattgtctgagaacaaacctttacctggattgtgtagcagcggtgacattcgtcccttaaagatggatgattt

SEQ ID NO: 4771 - DNA, 424 bp, Glycine max
  modified_base (66)..(66): a, c, g, t, unknown, or other
aagtatggacataaaattctacagggcattcaaaatgagaacaagaacatgaaaaaatcaggtaangacgtggttactgagaatgaatttgagaaaaaactacttactgatgttattccaccgactgatattggggtcacatttgacgatattggagctttagaaaatgttaaggaaaccttgaaggaattggtcatgcttcctcttcaaaggcctgaattgtttggcaaaggacagctggccaagccttgcaagggaatattgctttttggcccccctggcacaggaaaaacaatgcttgcaaaggctgtggcaactgaagctggagcaaattttattaacatttcaatgtccagcattacatccaagtggtttggtgaaggagaaaaatatgtcaaagcagtcttttctcttgccagcaaaa

SEQ ID NO: 4772 - DNA, 469 bp, Glycine max
cccacgcgtccggctgttcaccattttcaattttctaagtggtttggcttggtttgacatacataaacctttcaagatctcagaggggcagaagatcaaagccaagacatcctctcgtatataaagagtgtctctgatttgatctttgtttcttctctttctctcgtttgagatttttcagtactccaccaaggttttgtcagaaaagcttgaatttttcgcctaccctttacaatgatctcttcgttgagacagcctgttgtagggatcagtggttctgatcttcttttgaggcaaagacatgcaactccaattaaggcaaggtcgtttttaccctctttgtcaagagaaaagggtcaaggatctcttgtttcagttcaaaagccactccacattggtgcttctcttggtgttggaaattttgtgtcagtgaagagtgatgctaaaagggggtgattggtgaagtgtg

SEQ ID NO: 4773 - DNA, 325 bp, Glycine max
ctcacgcgtccgaaggtcccaattttttcgtaaaccctagaacacacactctctctcggagaagaagaagctgctgcagaagagaatttccaaaatgtcgatgtcgaagagttccaagatgcttcagtacatcaactaccgtatgcgtgtcaccattcaggacggtcgccagctcgtcggaaaattcatggccttcgaccgccacatgaacctcgtcctcggcgactgtgaggagttccgcaagcttcctccggccaagggcaagaagccagccgaaggcgccgaccgcgaggaccgccgcacgctcggcctcgtcctcctccgc

SEQ ID NO: 4774 - DNA, 283 bp, Glycine max
ctctcatctgtcaacaacattcttcaaatcacaagctgacctattcgtttcaccattcaagacagtctccagctcctctgaaaattcatggccttcgaccgccacatgaacctcgtcctcggctactgtgacgagttccgcaagcttcctccggccaagggcaagaagccagccgaaggcgcctaccgcgaggaccgccgcacgctcggcctcgtccttctccgcggcgaggaggtcatctccatgaccgtctagggccctcctccgccggaagagtcccgct

SEQ ID NO: 4775 - DNA, 382 bp, Glycine max
atggaggttgcggcaaccttcgatcttaatcccacggggcaacgttggatctgttgaacttcttcttttatatgcactctgtgatttcgctacaccctcactccgcttcgccaccctatgggggacaacaacagcaacaacgatgccttcatgcgcaaccaaaacgccgccgttcaggcccgcaccaaagcgcagaaccgttccaacgtccttcagctcaaactgattggacagagtcacccaaccggtctaacagcgaacctgttgaagctcttcgagcctaggcctccgttggagtacaatccgcctccggagaaacggaaatgtccaccgttatcagggatggctcaatttgtgagcaagtttgcccagcctggcgatc

SEQ ID NO: 4776 - DNA, 427 bp, Glycine max
  modified_base (365)..(365): a, c, g, t, unknown, or other
gtggcggttgcggcaaccttcgatcttaatcccacggggcaacgttggatctgttgaactgcttcttttatatgcactctgtgatttcgctacaccctcactccgcttcgccaccctatgggggacaacaacagcaacaacgatgccttcatgcgcaaccaaaacgccgccgttcaggcccgcaccaaagcgcagaaccgttccaacgtccttcagctcaaactgattggacagagtcacccaaccggtctaacagcgaacctgttgaagctcttcgagcctaagcctccgttggagtacaagccgcctccggagaaacggaaatgtccaccgttatcaaggatggctcaatttgtgagcaagtntgcccagcctggcgatccagaatatgctccacctgtcccagaaaccgagactcctgcacaaa

SEQ ID NO: 4777 - DNA, 397 bp, Glycine max
cccacgcgtccgcccacgcgtccgcccacgcgtccggtctgcaccaataacccctagagcagctgcagtagtatgaacacctgttgtggcatctccacctgtgtcatgtccaccctctcagcttcactcaccatctctaacaaggtcacctctacttcaccctgaggatggagatgcaccacgtcgtaaaacatctaagactccaaagactccaagaacccctagaacccctagaaccccacttataatctctaatttgactccaaagttcatcaccccttttggaaaccctatgaaaaaagctctggaggtcaccaaccttgatcctcaagatgcttggcttccaatcacttgaatcagggaatggaacaagtactaatctgcttttcacaccctt

SEQ ID NO: 4778 - DNA, 407 bp, Glycine max
cccaagcgtccgctggaggtcaaattgacaaacatcatcatacaacaacttgatgatgcagccggtgatgtttccggacttgctgtcaaatgtcctgctccgttagtgaggaaggtgagtgaggtaagggttgtggaaatgaccagtaaactatgtgacaaattgctaaatgggaaggatcagcatcgcgacattgctagcatagctttgaagacagttgttgcagaagtttctactcagtctcttgcacaatctattctccagactctcacgccgcaattgataagaggaattactggtcctggaatgggttccgagattaaatgtgaatctctggatattttatgtgatgtccttcataaatttgggaatctaatggcagcggatcatgaactattactaagttc

SEQ ID NO: 4779 - DNA, 433 bp, Glycine max
cagatgaaattccttcagaacaaaatggtgttgaccaacaagccaaggacaatagtgttgtctccaaaacagatgaaaacccccactctgaaattacttcaggagaaaatgaccaaatggtaacagaaaatgttggcgatgatgaagaaaactctgagacgaaagaagcaaaggaaactgaaagtgaagaaaacaatgggatgaaagaaggaaaggtaaccgaaggtgaagacaagaaacgacaagctgtggaaaattttctgccgctgcttacaaggacaacatggatgttgtctcacgtgaggatttgaagagtgtctttgagaaatttggtacagtgaagtacattgatttcaagattggagcagagtcaggatacattcgctttgaagaaactgaagctgctcagaaagcacgtgctgctgcagttatt

SEQ ID NO: 4780 - DNA, 429 bp, Glycine max
gatagggcttggtctaatcaatggtgaatggattcttgcatacaagactctatctggagctaaaagacttcaaagaatccgttcatcttgcgttacagtttgccgctctcattttgagctatgattggtgtactgggctgcttggaagtttcacattgacaagggcattgacaatgtctacagcctgcattcatggctaggccttgcatgcctttacctattcaccatacagtgaggtgctggctgcgcaacattatggtacccacgatggtcaagaaatagtagagctgccttattgccatggcatgtgtactatggtatctatatctaatgcttggctatagccacatctgctactggtattcatagaaaagctacattccttcagttaacaacatcatatcacgcgtttccaatgatggacttttg

SEQ ID NO: 4781 - DNA, 351 bp, Glycine max
  modified_base (270)..(270): a, c, g, t, unknown, or other
  modified_base (339)..(339): a, c, g, t, unknown, or other
caacattctccaaaatcacctcaaaaaatttcaagtgctcgccatggctgatggcagtagtagcaacaccaagagcaattccctgatcctccatcaccccacaaacttgaagggtggttggaatgctgccatcttcatcatatttgtggaatttgctgagagatttgcttaccaagggttggcaagtaatctcatccaataccttacaaatgttctgaatgaaccaatcacacaagcagccaaagatgtgaacacatgggttggtgcctnctctctcttccctttgcttggtggcttcatagctgattcctatctgggtcgcttcaacaccatactctngtcctcagtcat

SEQ ID NO: 4782 - DNA, 232 bp, Glycine max
aagaaaagtaaacactgccacagcaagagtgttcaaatgggagagggaaaaggaagagtgtgcgtcactggatgcacaggattccttggttcatggataatcaagagcctccttgaacatggatatgctgttaataccactataagatctgacccaggacgcaagagagatgttggcttcctcacaaacctacctggtgcatcagaaaagcttaagatggttcaacggctga

SEQ ID NO: 4783 - DNA, 434 bp, Glycine max
  modified_base (401)..(401): a, c, g, t, unknown, or other
gttgaggatagcacaaagaaaagtaaacactgccacagcaagagtgttcaaatgggagagggaaaaggaagaatttgtgtcactggaggcacaggattccttggttcatggataatcaagagcctccttgaacatggatatgctgttaataccactataagatctgacccaggacgcaagagagatgttagcttcctcacaaacctacctggtgcatcagaaaagcttaaaattttcaacgctgatctcagcgacccagagagttttggtccagcagttgagggttgtgttggaatttttcacactgccaccccaattgattttgcggtgaacgagccagaggaagtggtgaccaaaagagccattgatggagcactaggcatattgaaagcaggcctaanagcaaagactgtgaagagggttgtttacacttc

SEQ ID NO: 4784 - DNA, 378 bp, Glycine max
cccacgcgtccgcccacgcgtccgcgagaaagcatggtaggtcagacagtgaaccctctgttgaacatccagatgatgaaattgaagggaagaggagtagactggctggaaatgagagcagaatcaatataactgggcctcggcctcaatctcacagcttctgcttccagagctcaactgtcagctacggtggtccaaatgggatgtattatacatcctcaagggcaaggaggagtggaagtgatggagtgacctttgaagagaggaaggaggctgatagttcaacaaggaaagcttctcacctaatttctagaggcattcgtggcaagggacattctctctcaagaaatctgaattcagatgggtaggtagatacta

SEQ ID NO: 4785 - DNA, 430 bp, Glycine max
cccggctggccccacgcgtcagaaatactagttctactcttatcattgtgaaacaaattgcccaattgttcgaggttgaatatcaggttgaaccttgcagcaaaggctacaatagtagtgcttgcattgatgtcagaaagacaagcttccctatgcaaactggtggatatgtcatctatggtgttggtcatcagcatgttggtgcaaatgaatcaactctatacggacaggatgggggagttatttgttcttcaataccaaaatatggaaatggaaacgaagcagggaatgagaaagggtatgttgtaggaatgtctacatgttaccctcgacgaggtactatcaaaataaaagatggtgaaaccctaactctagagattatctacagcaacaaccaaagccacagtggagtaatggggcttttctacat

SEQ ID NO: 4786 - DNA, 412 bp, Glycine max
  modified_base (332)..(332): a, c, g, t, unknown, or other
cccacgcgtccggcttccctatgcaaactggtggatatgtcatctatggtgttgggcatgagcatgttggtgcaaatgaatcaactctatacggacaggatgggggagttatttgttcttcaataccaaaatatggaaatggaaacgaagcagggaatgagaaagggtatgttgtaggaatgtctacatgttaccctcgacgaggtactatcaaaataaaagatggtgaaaccctaactctagagattatctacagcaacaaccaaagccacagtggagtaatggggcttttctacatcttggtggctgaacaactgtcacaccaacacctnctttgacattattatgtgtcctaagtaaattcatcttggaatggatccaagagactattatattatatgatatctatatg

SEQ ID NO: 4787 - DNA, 415 bp, Glycine max
tgggacccgaatacgaagtcgacgctgacacagatccctctgctggggacgaaggctggtccacgagacggggcggcatggacgcagaggctgaaggaagagtacaaggctctgatagcgtacacgcaaatgaacaagtccaacgacaacgattggttccgcatctccgccgccaatccggaaggcactcgctggaccggtaaatgctggtacgtctacaacctcctcaagtacgaattcgacctccaattcgatgtccccgtcacttacccttccaccgcccccgaactcgaactccctcaattggatggcaaaacccaaaagatgtataggggtggaaagatctgcttgactgtgcacttcaagcctctctgggccaaaaattgccccagatttggaattgcacatgcacttt

SEQ ID NO: 4788 - DNA, 442 bp, Glycine max
actcaagcgtccgccgaatacgaagtcgacgctgacacagatccctctgctggggacgaaggctggtccacgggacggggcggcatggacgcagaggctgaaggaagagtacaaggctctgatagcgtacacgcaaatgaacaagtccaacgacaacgattggttccgcatctccgccgccaatccggaaggcactcgctggaccggtaaatgctggtacgtctacaacctcctcaagtacgaattcgacctccaattcgatgtccccgtcacttacccttccaccgcccccgaactcgaactccctcaattggatggcaaaacccaaaagatgtataggggtggaaagatctgcttgactgtgcacttcaagcctctctgggccaaaaattgccccagatttggaattgcacatgcactttgcctaggccttgcaccgtgg

SEQ ID NO: 4789 - DNA, 419 bp, Glycine max
aatacattgatgagttgaaacagattgttgaggagtggaaagcaaagaagtcttggcttgcacaagaacgagtagacgaggtcataaaaagttctgaaaaattgaagaattggttggatgagaaagaagctgagcaaacaaagacttctggattcagtaagccagcatttacatctgaagaagtatatctgaaggtgcttgatctgcaaaccaaggttgccagtattaatagaattcccaagcccaaacctaaggttcagaagcccgtaaaaaatgaaaccgaaagcagtgagcagaatacagagaattctgattctaactcagctgatagttcctctttaagtgattcatccgttaacagttcagaaagcacaagcgaagaaacggtaactgagcaaactggaggtcatgatgagcta

SEQ ID NO: 4790 - DNA, 434 bp, Glycine max
  modified_base (345)..(345): a, c, g, t, unknown, or other
  modified_base (383)..(383): a, c, g, t, unknown, or other
cgcgtcaagacgaaacagagggattataaaaagagaagttactcgatagttcaaatcagaagatggttcctgtcacaccaactcaataacagatcaaaccaaacccaaactgttaggtttcctttgtttggtgtgaagccatggctgattcttcttccaacctgaaatccgacgcgataatggagcagatgaagcaacacctcgccaccgacgctggcaaacaagtcaccaataaaattggactcgtttatcagtttcacattgctcctaagaaacttggattcgacgaggtcgtctacaccgttgatctcaagaaaggagaagtcaccaaagggtcatatgaangaagaaagcctgatgcatctttttcgtttaaggatgangactttgttaaggttgccttaaggaagatgaatccgcagattgctttcatg

SEQ ID NO: 4791 - DNA, 429 bp, Glycine max
atggagcagatgaagcaacacctcgccaccgacgctggcaaacaagtcaccaagaaaggtggactcgtttatcagtttcacattgctcctaagaaacttggattcgacgaggtcgtctacaccgttgatctcaagaaaggagaggtcaccaaagggtcatatgaaggaggaaagcctgatgcatctttttcgtttaaggatgaggactttgttaaggttgccttagggaagatgaatccgcagattgctttcatgaggggtgcgatgaagattaagggaagtttgagtgctgctcagaaatttactccggatatcttcccaaagccttctaagctgtgagctgagatttctgcaactacctgcacaaggttgctagaaatatcggttggctgcagtcaaacaaatagatagcaatcatagtagcatcaa

SEQ ID NO: 4792 - DNA, 411 bp, Glycine max
cccacgcgtccgctttcacatcatttctcaatcttacttgcttgcactctcatcagaggaggaaagcttttgataaagaaagaaacagaaagaaccttgtaacttttggcttgaaaagccatggccagggagcaaattcaggtgctaaatgcgcttgatgtggcgaaaacacaatggtaccatttcactgcaatcatcattgctggaatgggcttcttcaccgatgcatatgatctattctgcatatcccttgttacaaagttgcttggccgcatatactatcacgttgatggcacagcaaagcccggaacattgccttcaaatgtttcagctgctgtaaatggcgtggctatctgtgtaacactctcaggccagcttttctttggctggcttggtgataagatgggaagg

SEQ ID NO: 4793 - DNA, 429 bp, Glycine max
  modified_base (347)..(347): a, c, g, t, unknown, or other
tcgctcaatcttccttgcttgcactctcatcagaaaaggaaagcttttgataaagaaggaacgggagggaaccttgtaactttgggctggaaaagccatggccagggagcaaattcaggtgctaaatgcgcttgatgtggcgaaaacacaatggtaccatttcactgcaatcatcattgctggaatgggcttcttcaccgatgcatatgatctattctgcatatcccttgttacaaagttgcttggccgcatatcctatcacgttgatggcgcagcatagcccggaacattgcctccaaatgtttcagctgctgtaaatggcgtggctttctgtggaacactctcangccagctttttcttggctggctcggtgataagatgggaagaaaaaagtctatggcatgactctgatgctgatggtaatatgc

SEQ ID NO: 4794 - DNA, 398 bp, Glycine max
cccacgcgtccgcccacgcgtccgcccacgcgtccgggatgttttaattctcttgcaagaaggtgacactgcttacaaagtctgtttatctgaggtagagtgggagagagtcacagcagttaccagctacttgaagctttttgttgaggttatcaatgttttcactaagagcaagtatccaactgcaaatatatatttccctgagctctgtgatgttaagttgcatttgattgaatggtccaagaattcagatgagtttatcagttctttggcgtcaagattgagaagcaagtttgatgagtattgggagaaatgtagcttaaggttggctggtgctgcaatggtagacccttcgttcaagatgaaattggtagattattattatccgcaaatttttg

SEQ ID NO: 4795 - DNA, 393 bp, Glycine max
aaaatattttgttgtcagaaactgcctgcctaatgtcaagtcagatatgcttttgtcagcatggaatcctccatccgaatggggaaaatagagatttatccccttaagatccatttaacagagacgatgtacagaatgatgtgggaatatttcttcccagaagaagaacaagattcccaacgtcgtcaggaggtttggaaggtttcaaccactgctggtgcaaggcgtgtaaagaaaggttcatcagttcttgaagcttctgcttcaaacagtcacacaacaaaagagtctgaggcttcatccaaatctggcatatctgcaatgctatttcccacatcaagtcagccttcaacccatgttgactcagctcaagcatccaaaacacaaaatgtc

SEQ ID NO: 4796 - DNA, 395 bp, Glycine max
  modified_base (295)..(295): a, c, g, t, unknown, or other
cccacgcgtccgcagagagtgaagagaagagaagaggttgatgggtcggcgaaagaacaagagcagcaacaatcagtgctcctcaagcaaggaagacgctgacatgaatagcaaccaccttcggtttgaagaagctgacgaggctgtcgacgagagttccaacctcgaccaatccatgtgcgacatcgaagaatccgatgataaaaccagcgccgactattacttcgattcctactctcattttggaattcacgaagaaatgttgaaggacagtgtgagaaccaagacatatcanaatgttatttatcagaaacaaattttattcaagaaataagtagttcttggaggtggggcttggactgggaatttatcactaatttggggccaaacaaggg

SEQ ID NO: 4797 - DNA, 431 bp, Glycine max
cccacgcgtccgggaggacaagaaatatatgttgggccgctgggtcgtcactctagtcatttgatcaagtattttgagagcattgaaggggtgagcaaaatcaaagacggatataacccagctacttggatgttggaagttacaacttcagcacaagaacttagtttgggtgttgattttactgacttgtacaagaattctgatctatataggagaaacaagcagcttatacaagaactgggtcagcccggctcccggttcaaaggatctttatttccctactcaatactctaagtcattctgggcccatggccaaccttgctaatgaaaccaccgttgtcataatggcgtaatccaccatacactgctgtgaggtttttcttcactactttcatagccctgatgtttggaacaatgttctgggacctcgg

SEQ ID NO: 4798 - DNA, 360 bp, Glycine max
agagatttgagagggctcctcctcctcctcctcctccccatctaagttaccgtgaaggacgtccccgagattatgatgctctgtctggctcaaaacgttcttatgctgctatagatgatgttcctccacgatatgctgatactggtgctcgccaatcaagagctcgactggactatgactatggcggtagtgcttcacagtatggagatgcttatggtgatagacttggaagatctagtatgggatatggtggtggcagcagaagttctatttccagtcaagattcacatgggttgtatagcagtcggcagggcatgagttatggaggaggttcttttggtagtggtgatgttggtggca

SEQ ID NO: 4799 - DNA, 446 bp, Glycine max
gtggcactgctgctcttgggtttgcccaatatgttcccaatgagaaccttctcatgacaaaggagcagctttttgatatgacttgtatgacacttggcggtcgggctgctgagcaggttcttatagggagaatctcaacaggagcacaaaatgacttggaaaaagtgaccaagctgacgtatgcccaagtagcagtttatggttttagcgacaaagtaggcctcctctccttccctccaactgagggctcatatgagttttccaaaccatacagcagcaaaactgctgcaatcattgatagcgaagtgcgtgattgggtggacaaagcatacaaacatacgattcagcttatcgaggaacacaaggagcaagttactcaaattgcagagttgctgcttgaaaaagaagtacttcaccaggacgacttgcttcgagttttgggcgag

SEQ ID NO: 4800 - DNA, 418 bp, Glycine max
aaacgatgcgccactgctagcgcatactctgaactctcaccatatatatataatgcgcgggcggtgcgcatggagataacctacgcatcccctagcttctccgacctccgcgccatgccgtcgacggcgaccgccgcgcgtcccgtcaggatcattcccctgcagcacccgaccgccacgacgtcgtcgccgcagccgaacgccgccttctcgcgctggacggcgaagctccggcgaatgacgtggctggagtggattgaattcttcctcccttgcctccgctggattcgcatctacaactggcgcgagtatttccaggtcgatctcatggccggaatcaccgtcggcgtcatgctcgttcctcagtcgatgtcgtatgcgaaatttggctggacttcaaccgatatatggactctac

SEQ ID NO: 4801 - DNA, 387 bp, Glycine max
cccacgcgtccgatttattggacatactgctagtgttgaagatctgcaatggagccctacagaatctcatgtttttgcttcttgttctgtggatggaaacattgcaatatgggatacccgtttggggaagtcaccagctgcatcttttaaggcacataatgctgatgtgaatgtaatgtcatggaacaggttggctagttgtatgttggcctcggggagtgatgatgggactatttctattcgtgatctcagactgctcaaggaaagaaattctggtggagcccatttcggaatttaccagcacccaattacattcattgagtggagtccacattaagccttttcattggcaggttcttcatctgataatcaacttaccatattgga

SEQ ID NO: 4802 - DNA, 446 bp, Glycine max
ggcgttttgggcgcaagggggctgtatttaacctgatatgtggtgaattggatgaaagggtcatgtcgataatgaaagatatagaaaaagagaattctaagtgtcaggttcttttgttttctgctacatttaatgacaccgtcaagaatttcgtttcaaggacagtcaggatggatcataataaactctttgtaaagaaagaagaactatctttagatgcagtgaagcaatataaagtgtattgtcctgatgaacttgctaagattgatgtggtaaaagattacatatttgaaataggagagaatgtggggcaaacaattatatttgtgcgctcaaaaattactgcaagattaacacatgaagcacttgttaagttgggctatgaggttacatctatacaaggttctcttagtaatgaagagagagacaaaattgtcaaagagttc

SEQ ID NO: 4803 - DNA, 455 bp, Glycine max
  modified_base (424)..(424): a, c, g, t, unknown, or other
cccacgcgtccgagagacccaattattgtatctgttggatggaggcgttaccagacaaccccaatttatgccattgaggatagtaatggaagggatcgtatgctaaaatatactccagaacacatgcattgccttgctatgttttggggccctcttgctcctcccaacactggggttgtagcctttcagaacttatcaaacaatcaggcaacatttaggattactgcaactgcagttgtacttgagtttaatcatgcagcaaggatagtgaagaaaatcaaattggttggttatccatgcaagatattcaagaagacagcacttatcaaggatatgtttacctcagatcttgaagtagctcgttttgaaggtgcagctattcggacagtcagtgggattagggggcaggtcaagaaggctgcanaagaagagataggtaatcaagcgaaaaggaa

SEQ ID NO: 4804 - DNA, 400 bp, Glycine max
tcgcggacgcgtgggcggacgcgtgggtggcacaagaaagttttgaagactagagacccaagtatggtatctgttggatggaggcgttaccagacaaccccaatttatgccattgaggatagtaatggaagggatcgtatgctaaaatatactccagaacacatgcattgccttgctatgttttggggccctcttgctcctaccaacactggggttgtagcctttcagaacttatcaaacaatcaggcaacatttaggattactgcaactgcagttgtacttgagtttaatcatgcagcaaggatagtgaagaaaatcaaattggttggttatccatgcaagatattcaagaagacagcacttatcaaggatatgtttacctcagatcttgaagtagctc

SEQ ID NO: 4805 - DNA, 442 bp, Glycine max
  modified_base (420)..(420): a, c, g, t, unknown, or other
cccacgcgtccggggggcgcgggttttagacgggagtgcgaatgcgatgatgaagggagagggaagcgaagacgatcgtccatggcaatcttaccacactgtttacacaaccgccaaagcaggaatggaattggttgacaaggagaaagttcaaagggtagtttatgaaatgagcaaaggatccaaatattttcaaaacgaggaacgcaaggaagcttttattaagcagaaaattgataacctgcgaattcagtgtgcaaacctcacacaagaagacttggcccattatcaaaaggttgctgatagaagaattgttgagctggaagcttcgcgtgacctttcaaggatttggttacatgtagatatggatgctttctatgctgcagttgagactttaagtaaccctacattaaagggcangccaatggcttgtgggagcatg

SEQ ID NO: 4806 - DNA, 436 bp, Glycine max
  modified_base (394)..(394): a, c, g, t, unknown, or other
cccacgcgtccggaatttaagggacaggctttatcgtgaacttgagcggaatctggctatgaaagttgaagatggtgaaacagctgatacatttgttgtcagtgggcgtggaactttgcatatcaccatacttatagaaaatatgcgaagagaaggatatgaattcatggttgggcctcccaaagttatcaacaagaaggtggatgaaaaactgttggaaccgtatgagattgcaactgtggaggtaccagaagagcacatgggagctgttgttgaacttcttggcaagagacgaggacaaatgttcgatatgcaaggagttggattggaagggactacactacttaaatttagaatccaaaccggtggccttcttggattgcggaattcaatnttaacttgcctcccgagggactgctattctcaacactggttt

SEQ ID NO: 4807 - DNA, 386 bp, Glycine max
ggaatctagtccaattcctttcacaaatgcaacgtactacagggttggattttatggtgttagagttgggaaacttgataaaaaggagtatgtatatcgtgagcctcgtgatgtacgtctaggtgacataatggaaaaacttagtcacacatacgagtctagaatggatggtaatcacactttgcatattattccagattctagacaagtgaaggcagaggagttgcagcctggtgtctgttaccttcagattactgccgttgatccagtaatggaagatgaggatttaggaagtaggagagaaagaattttctctctctctactggaagcgtccgagcccgcgtatttgaccgattcttgtttgacaccccatttaccaaaaatg

SEQ ID NO: 4808 - DNA, 392 bp, Glycine max
atcgactaataatacatcagagctgtcagcataggcagggactcttggtgaaactttggatggagatgcaaagtgggggaaaacattggatgagcgtcacaaacaaaaaataatgagagaagtagaacaactacggcatgccaaccttgttaaaaaattagaacagaagctttcctttgctgaaagaaagttaacgatagctgaaaaagccttaatgaaggtggagtcgtttttgaagccatcagaatacaaagcagatcctgaaagtataactgatgaagagagatttatgtttcgcacattatgattgacgatgaaagctttcttacttcttggtagacgtggggttttagatggtactattgagaacatgcacttgcattggaagtacc

SEQ ID NO: 4809 - DNA, 337 bp, Glycine max
cccacgcgtccgccacaacggactaccttatacttcttccactactaatgggcatggcatggataaacattcatgtattcatctatagctccaaaccactcaaatcctctaaaaatcctgcggctcctcgcccttttacaatcataggaaacatctaggagctaggcaaccagccttaccaatcacttgccaagctttctcaaatttatggtcctataatgagtctcaagcttggtaagactaccaccattgtcatttactctccacaagttgccaaagaagctctacaagcacatgatcaaattggtgctaatacgacaatctgtaatactctagg

SEQ ID NO: 4810 - DNA, 231 bp, Glycine max
gcacaatggactaccttctacttcttccactaataatcaccatagtatggataaacattcatgtattcatctctagcttcaaaccactcaaatcctctaaaaatcccccgggtcctcgcccttttccaatcataggaaacatcttggagcttggcaaccagcctcaccaagcacttgccaagctttctcaaatttatggtcctataatgagtctcaagcttggtaagacta

SEQ ID NO: 4811 - DNA, 429 bp, Glycine max
gcacaatggactaccttctacttcttccactaataatcaccatagtatggataaacattcatgtattcatctctagcttcaaaccactcaaatcctctaaaaatcccccgggtcctcgcccttttccaatcataggaaacatcttggagcttggcaaccagcctcaccaagcacttgccaagctttctcaaatttatggtcctataatgagtctcaagcttggtaagactaccaccattgtcatttcctctccacaagttgccaaagaagtgctacaaaaacatgatcaaattcttgctcataggacagtccctgatactcttcgagcactcgatcatcacatactttctgtggtgtggatgccacctttagcacaatggaggacccttaggcgagtttgtgctaccaaagagttctcttctcatcagc

SEQ ID NO: 4812 - DNA, 439 bp, Glycine max
gcacaatggactacctttttcttcttccactaatcaccatagtgtggataagcattcaggtactcatctctagcttcaaaccactcaaatcttctaaaaatcccccggggcctcacccttttccaatcataggaaacatattggagcttggcaaccagcctcaccaagcacttgccaaactttctcaaatttatggtcctataatgagtcttaagctcggtaacactaccaccatagtcatttcctctccacaagttgccaaagaagtactgcaaaaaaatgatcaaatcttagctaatagaatggtcccagattgtgttcgagcacttgaccatcacatactttcggttgcatggatgccacctttaccacaatggagggcccttaggagagcttgtgccaccaaagtgttctcttctcagcagctcaatttcacaca

SEQ ID NO: 4813 - DNA, 339 bp, Glycine max
atttgcatcgcatcgcacagagatgaattcaattacaagaagcggatcgcttagtatcatcctcgttgttttcttctctttgcacttcattcttggtttttccgacgactcatcacctgcttcaaaagatgctacaaagacagaacctcatgccggaagaagcactagtgctatagttatcattgtattaattgtgcttgtgttcttttctttgttctcctttgtactttttaagctgtggcggaagaagaaaagggaggagcaatatgctcgtcttttgaaattagttgaagaggatgatgagttagagcttgagcttggcctaagggactgagactc

SEQ ID NO: 4814 - DNA, 416 bp, Glycine max
tctagttcgagttcgacaacaaacgtggtgactctgaaggcggcgtgggttctcccggagcggaggcagaacatccgtgaggtgtacgaggtggggcggaagttggggcagggtcaattcgggactaccttcgagtgcacgcgccgcgcgtccggggggaaattcgcgtgcaagtcaattcccaagcggaagctgctgtgcaaggaggactacgaggacgtgtggcgggagattcagataatgcaccacttgtcggagcacgcgcacgttgtccgcatcgaagggacgtacgaggattcctcggcggtgcacctcgtcatggagttgtgtgagggtggcgaagtgtttgacaggatcgtgcagaaaggacactacagcgagagacaggctgccagggtgataaagacgattgttga

SEQ ID NO: 4815 - DNA, 459 bp, Glycine max
actaaacacaaaccccaaaaaccaaaatcacaactcccaaagcaaaaacccaaatcccagaggatggtagtaacatgagatgacagacgaccgcgtgcatccaatcccaaacctagctatgtctccggccaccgtccactggacctctgacgccatccacggcggacccctccgtcgtgtcgacctcgactccggcaccaacggctgggcctcccctcccggtgacctcttcctcctccgctcccccaattatttcaccaaacgccagaaatcacccgccggcgactacctcctctccccctccggtatggactggctcaaatcccaatccaaactcgacaacgtcctctcccggcccgacaaccgcatggcccaggcccttcgccaggcccaggcccaaagcaaatccctcaaaagcttcatcttcgcagtcaacctttaagtccctggaaaagaaca

SEQ ID NO: 4816 - DNA, 405 bp, Glycine max
ctccaaatacgatttcgtcaaggtgaaggtgtggttgggtgataatgcggatcactactatgtgctctcccgatttttgctcagcagaatgctaacggtaaccaagattccaaaccacgttgctatcaaaattgctctcgaattgaagaagctgctcacagataacagccttctagatgtctctcaatctgacttggaagtcaacctatttaagcttatggagcggcggggatatggagaagaatacataaatcgttacaagatgatgacgagatttcatcatcaaagagttccgttagtaatccttgtttgtggaactgcttgtgttgggaagtctactattgccacccagcttgcacagaagctaaatttaccaaatgtattacagacagatatggtttatga

SEQ ID NO: 4817 - DNA, 436 bp, Glycine max
cccacgcgaccgaaaagcgcaaattaaagcgcaaaaaccattctccttcggtgctcttgaaaacatgggaaaacagagcacagaattctctgccctcaactgcatcgacctctccaaccctgagatcaaccaatccgtcaatttactcaaacaggcatgtttggattccggttttttctacgttgtcaatcatggaataagccaggaattcatggaagaggtttttgcacagagcaagaaattcttctctcttcctcacaaggagaagatgaagattctcaggaatgaacaacacaggggatacacccctgttcttgatgagttgcttgatcctgaaaaccaagtgcatggagactacaaagaggggtattatattggagttgaaaaaggttaagatgacccagaatcgatataacctttttatggaccgaataac

SEQ ID NO: 4818 - DNA, 459 bp, Glycine max
attcgccggtcgatccatgcgaccacatagcgcaaattaaagcgcataaaccattctccttcggtgctcttgaaaacatgggaaaacagagcacagaattctctgccctcaactgcatcgacctctccaaccctgacatcaaccaatccgtcaatttactcaaacaggcatgtttggattccggttttttctacgttgtcaatcatggaataagccaggaattcatggaagaggtttttgcacagagcaagaaattcgtctctcttcctcacaaggagaagatgaagattctcaggaatgatatacacaggggatacacccctgttcttgatgagttgcttgatcctgataaccaagtgcatggagactacatagacgggtactatattggagttgaaagatgtgaagatgacccagaatcgaataaaccttgttatggaccgaataactgggccgcac

SEQ ID NO: 4819 - DNA, 425 bp, Glycine max
cacgcgtccacaacgcgtccgcccacgcgtccggcaaattaaagtggttcacgaaccttagcataggctctccttgggtgctcttcaaacatgggaaaacagagcataccccaattctctgccctcaactgcatcgatctctccaaccccgagatcaatcaatccgtcaacttactcaaagaggcatgtttggattccggttttttctacgttgtcagtcatggaatacggcaggaattcatggacgaggtttttgcgcagagcaataagttcttctctcgtcctcacaacgagaagatgaagacgctcaggaatgaacaacacaggggatacacccctgttcttgatgagttgcttgatgctgaaaaccaagtacatggagattacaaagaggggtattatattggtgttgaggaaggtgaaga

SEQ ID NO: 4820 - DNA, 430 bp, Glycine max
gaataactggcccgcaccaggtgttcttccagggtggagggagaccatggaaaagttcgatagagagacattagaagtagggaaagcagttgcaaagataatagcccttgcacttgatttggatgctaatttttttgatcagccagaaatgcttggagagcccattgcaactctgcgtttgctgcactatgaaggtcaagtttcggatcccttgaaaggattatatggagctggagctcatactgactatggtttaattacactgttagcaacagatgatgtctcgggtcttcaaatatgcaaagatagggatgctaaacctcagaaatgggaggatgtagcaccattgaagggagcattcatagtgaatcttggtgacatgctggagcgctggagcaactgcgttttaagtccacactgcacagagttc

SEQ ID NO: 4821 - DNA, 437 bp, Glycine max
cgcaaattaaagcgcaaaaaccattctccttcggtgctcttgataacatgggaaaacagagcacagaattctctgccctcaactgcatcgacctctccaaccctgacatcaaccaatccgtcaatttactcaaacaggcatgtttggattccggttttttctacgttgtcaatcatggaataagccaggaattcatggaagaggtttttgcacagagcaagaaattcttctctcttcctcacaaggagaagatgaagattctcaggaatgaaaaacacaggggatacacccctgttcttgatgagttgcttgatcctgaaaaccaagtgcatggagactacaaagaggggtattatattggagttgaaaaaggtgaagatgacccagaatcgaataaacctttttatggaccgaataactggcccgcaccaggtgtt

SEQ ID NO: 4822 - DNA, 420 bp, Glycine max
  modified_base (405)..(405): a, c, g, t, unknown, or other
taaattcttctgcctcaatgctttcattcaatggaagtccatactggatggcacctgagggggtaatgaatacaaatggctatagtcttccagacgatatatggagcttgggatgcacaattattgaaatggcaacatcaaaacctacatggaatcagtatgaatgggtagctgccatatttaaaattgggaacagcaaagatatgcctgaaatcctcgagcatctttcgaacgatgcaaaaaatttcatcaagctatgcttacaaagagacccattagctagcccgacagcccataagttactagaccaccccttcattcgagatcaatcggcaacaaaagctgcaaatgtcagcataaccagagatgctattccttgcatgtttgatggaagccgtacaccgnctgtgttagagtccc

SEQ ID NO: 4823 - DNA, 385 bp, Glycine max
cgagcccaagatcagtgctgagaaagcggtgcaactgtgtgatcggaacttgggcgttggagctgacggagttatctttgtcttgcctggcatcagtggcaccgattataccatgaggatttttaactctgatggtagtgagcctgagatgtgtggcaatggagtgcgatgctttgccaaatttgtttctcagcttgagaatttacatgggaggcatagttttaccattcatactggtgctggtctgattattcctgaagtcttggaggatggaaatgtcagagttgatatgggggaaccaattcttaaagcctcagatgtgcctactaaattacatgcaaataaagataatgctgttgtaaaatcagaactagttgtagatgga

SEQ ID NO: 4824 - DNA, 435 bp, Glycine max
tcggtgaagcatcccccggttgtggtgagtggaatatgccaatgaagaggaatccagcttacagagggaaatggcatgccccgctaatcgaaaatcctgcttatatgggaatcctgaagcctcatgacattccaaaccctgactactttgaaattaaaaaacctgattttgagcctattgctgatattggcatcgagatttggacaatgcacgatggtatattggacgacaacatcttgatagctaaagatgataaaattgccgactactaccgggacactacatgctaatcccaattttaccgtcgagaaagaaaaacagaaggaagaacattcggaagctgcatcaagttgtcttgctggcttccagaagaacgtatttgacctgttatacaagatcgcagacatttccttactgagtgcatacaagcttaaa

SEQ ID NO: 4825 - DNA, 280 bp, Glycine max
  modified_base (211)..(211): a, c, g, t, unknown, or other
accacgcgtccgatcttgattccagtagtgctctctatggtatgggttgcactcctgagtatgtagtttatcatgagttaatcctgaccacaaaggagtacatgcattgtgcaacagcggtggagccccagtggctggctgagctgggacccatgtttttgtctgttaaagattctgatacatcattacttgagcataagaagatgactantcaagagaaaacagccatgatggaggagatggagaacttgaagaaggtgcaagcagaggttgagaaaaa

SEQ ID NO: 4826 - DNA, 442 bp, Glycine max
gtttttgcaacatcaaacagcagaggtaccattgttgattctggaacaactttggcgtacgttgcggaagaggcttatgatccctttgtctctgcgattacagcttcaattccacaatctgtacacactgttgtttccaggggaaatcagtgttatttaatcacatccagtgtcactgaagtttttcctcaagtaagtctgaactttgctggtggtgcatctatgattttaaggcctcaggactacctgatacagcagaattccattggtggtgcagcagtgtggtgtattggctttcagaaaatccagggtcaagggataacaattctaggagatctcgtattaaaagacaaaattgttgtttatgatctggctggtcaacgcattggatgggctaactatgactgttctttgtcggtgaatgtctctgcaacaactggca

SEQ ID NO: 4827 - DNA, 445 bp, Glycine max
gcttcaatggtcactggaagtattgggatgcttccttctgctagcctgggggcttcgggacctggactttttgaacccatacatggttctgcacctgatattgctggacaggacaaggcaaatccatttgccactgttcttagtgctgctatgcttttgagatatggcctaggagaagaaaaggcagctgaaagaatagagaatgcagtgatggacactttgaacaggggatttcgaactggtgacatatattctgctggaacgctggtaggatgcaaacagctaggtgaggagatactgaagtcagttgaatctaacgttcctgctggtgctgctgcaatgtgattttgaaaccaactcgccatagcattttgggttctggtttaggttggaggccactatgactgccaaagccgagaaagtctccctagtctattaagttctg

SEQ ID NO: 4828 - DNA, 384 bp, Glycine max
cccacgcgtccgcccacgcgtccggagtatgttgttttcgacgaggctgattgtttatttggcatgggtttcgccgagcagttgcatcagattcttgctcagctcggggagaaccgtcagaccttgcttttcagtgccacactgcccagtgctcttgctgaatttgccaaggctggcttgagagaccctcagcttctccgcctcgacttggaaactcgaattagccctgacttgaagcttgccttcttcactttgaggcaggaagagaagtactccgcgttgctgtatttgattagggagcacattggttctgatcagcagacattgatttttgggtccaccaaacctcatgtggaagttctcaaccttttggttcctgaaaaa

SEQ ID NO: 4829 - DNA, 181 bp, Glycine max
cacgcgtccgtccacgcttccggatattttgtttcgacgaggctgattgtatgtgcaggttttacgacgggcagttgcatcaaattcttgctcagctcgtggagaaccgtcagaccttgcttttcagtgccacactgcccagtgctcttgctgaatttgccaaggctggcttgagagaccc

SEQ ID NO: 4830 - DNA, 401 bp, Glycine max
ggattggctgttgtggattaaagagtaatcttctcttgagcggacgcgtgggcggacgcgtgggcagggaactactcaattgcagtggtgcaagctaattcatccttggaagaccaagcacaagtatttacctctccctccgcaacctttgttggtgtatacgacggtcacggtggtcctgaagcttcccgtttcatcaccaaccacctcttctccttccttcgcaaggagggtggtttgtcggaggaagttataaagaaggcgttcgaggcaacggaagatgagtttttgcgtgtagtgagggaatcatggattgcgcggccacagatagcttccgtgggttcgtgttgtcttctgggagcgatttcaaagggagttctttatgttgctaatctcgggga

SEQ ID NO: 4831 - DNA, 396 bp, Glycine max
acaacaacactctgaaactaacaacaacaataaaagaccatgtcggtgaaggagtgcgagcaccacaaggggaagaagaggaagatcttccggcaagtgttctggtgcttagtggtgttccttttcatcgtgctggtcacaattcttttgatatgggcaatccttagacccaccaaacccaccttcacgctccaagacgtcaccgtctacgccttcaacgccaccgtggcgaacttcctcacttcgaattttcaggtcacgctcatctcgcgtaacccgaacgaccgcatcggtgtttactatgatcgcctcgaaaccttcgtgacctaccggagccagcaggtcacgtaccgaaccgccatcccttcgacatatcaaggccataaagagatcaat

SEQ ID NO: 4832 - DNA, 397 bp, Glycine max
  modified_base (330)..(330): a, c, g, t, unknown, or other
ataaaagaccatgtcggtgaaggagtgcgagcaccacaaggggaagaagaggaagatctttcggcaagtgttctggtgcttagtggtgttccttttcatcgtgctggtcacaattcttttgatatgggcaatccttagacccaccaaacccaccttcacgctccaagacgtcaccgtctacgccttcaacgccaccgtggcgaacttcctcacttcgaattttcaggtcacgctcatctcgcgtaacccgaacgaccgcatcggtgtttactatgatcgcctcgaaaccttcgtgacctaccggagccagcaggtcacgtaccgaaccgncatcccttcgacatatcaaggccataaagagatcaatgtttggtctccgtttgttatggcaccaaca

SEQ ID NO: 4833 - DNA, 363 bp, Glycine max
caacaacaaagaaaaaaacgagcagaagaagtcccacatcggataagctgaagaatcaacacccctgtgagaagcaggcgatgaaaccgtacagaggaataaggatgcgaaagtgggggaagtgggtggcggagatcagagaacccaacaagaggtcgaggatttggttgggttcgtacacgacacccatggccgccgcacgcgcctacgacacagccgttttctacctccgaggtcccaccgcacgccttaacttccccgaactcttgttccaggacgaccaggaggagggcaatgattcggtgcagcacggtgcagcagcaaggaacatgtccgctgattccattcgccgaaaagccacgc

SEQ ID NO: 4834 - DNA, 444 bp, Glycine max
ggaagggtgttggaagatggtaatggaaaggattctgtggcggaaggaatttcgacgaaggaatatccaaaattctcggctttctttaagaagattaccatatacttggatcagggtttgtaccaggataaccatgttgttgtgtgggatagtgctcattcggcggctgcgcagcagcgtgatggttttgaggtgaagaggaaaggagataaggaattcactgcggtggttaggatggcgatgaattattcgcctgacaagtttgtggtttcaccgcaactggctagagttttaggggttgagtttgactcgcgctgcaggatcatagctgctctttggcactatgtgaaggctaagaagctgcagagtcccaatgacccttcgttcttcatgtgtgatgcttctctccagagggtgtttggggaaggagaagatgaaattctc

SEQ ID NO: 4835 - DNA, 270 bp, Glycine max
accacaccaccccttcttccttttcatcaggtttattccttttcttttggttcaattgtgctggatggagagtgcaagaatcagcaaatggttaaatcttctagtttgtgtactgctattgcttaaggcagaaggatctcttgttccattgactttggtgaacaatgcagaatcaaaaggagctgtttgtttggatggaaaccccccagcataccactttgacaacggatttgaaaaagggattaaaaacttgattggtcacattgaagg

SEQ ID NO: 4836 - DNA, 436 bp, Glycine max
accacaccaccccttcttccttttcatcaggtttattccttttcttttggttcaattttgctgaatggagagtgcaagaatcagcaaatggttaaatcttctagtttgtgtactgctattgcttaaggcagaaggatctcttgttccattgactttggtgaagaatgcagaatcaaaaggagctgtttgtttggatggaagccccccagcataccactttgacaacggatttgaagaagggattaagaactggattgttcacattgagggaggaggatggtgcaacaatgtagagagttgcctttaccgtaaggatagtcgcttaggttcatctaagcaaatggaggatctttacttttctgcaattttaagcaacgaacaagagtataatccagatttctacaattggaatagagtcaaggttaggtactgtgat

SEQ ID NO: 4837 - DNA, 440 bp, Glycine max
cgagaatggacaaggaagtggagcttggttcccttgaaggtgaaatggccacccagcacaggtcacaaccacagaagcgcaagggtggtcttgttaccatgcctttcatcattgcaaatgaggcacttgcgagggtggcaagtttgggccttttgcccaacatgatactgtatttgatggggacctacaggcttcaccttgcccaagcaacccagatacttctctggtcccatgctaccagcaatttcacacctgtggtgggtgctttcattgctgattcttatctgggtcgattcctcgctgttgggttgggttcggccatcacttttctgggaatgacactgctgtggttaacagctatgatcccacaggcacggcctcccacttgcagtagcaataaagctggaggctgtaaatcggcaacaggagggcaaatggca

SEQ ID NO: 4838 - DNA, 382 bp, Glycine max
ctgattaacgagaatggacaaggaagtggagcttggttcccttgaaggtgaaatggccacccagcacatttcacaaccacagaagcgcaagggtggtcttgttaccatgcctttcatcattgcaaatgaggcacttgcgagggtggcaagtttgggccttttgcccaacatgatactgtatttgatggggacctacaggcttcaccttgcccaagcaacccagatacttctctggtcccatgctaccagcaatttcacacctgtggtgggtgctttcattgctgattcttatctgggtcgattcctcgctgttgggttgggttcggccatcacttttctgggaatgacactgctgtggttaacagctatgatcccacaggca

SEQ ID NO: 4839 - DNA, 437 bp, Glycine max
accacgcgtccgctctccctcactctcaccatggaggcgcaaccaccaaccccctcgactgcgccgccgcctctgccgccacacctcagctaccccgactccgtggaatcctcgcctcgctcccgcaacaccgactcctgggacgagcccttcgcgccggcgtccaccaagctccgtctcatgtgcagctacggcgggcacatcgtcccccgcccccacgacaagtccctctgctacgtgggtggcgacacgcgcatcatcgtgtccgaacgcgccacctcactcgcagacctctccatgcgcctctcgaaaactttcctgaacggaagactcttcacgctcaagtaccagctccccaacgaggacctcgattccctcatctccgtcaccaccgacgaggacctcgagaacatgatcgacgagtacgaccgcaccgc

SEQ ID NO: 4840 - DNA, 418 bp, Glycine max
  modified_base (402)..(402): a, c, g, t, unknown, or other
ggcgcaaccgccaaccccctcgaccgccccgccgcctccgccgcagcacctcagctaccccgactccgtggaatcctcgccacgctcccgcaacaccgactcctgggacgagcccttcgcgccggcgtcgacgaagctccgcctcatgtgcagctacggcggccatatcgtcccccgcccccacgacaagtccctctgctacgtcggcggcgacacgcgcatcatcgtctccgaacgcgccacctcactcgcggacctctccacgcgcctctcgaaaacattcctgaatggaagacccttcacgctcaagtaccagcttcccaacgaggacctcgattccctcatcttcgtcaccaacgacgaggaccttgagaacctgatcgacgagtatgaaccgaacgncggcggcggcaacttc

SEQ ID NO: 4841 - DNA, 403 bp, Glycine max
accacgcgtccggttgattgttgattggagatgtgaggtggcccgtaataccccatatgaagttaatatcacaatccctgttgagggttatgagccaattgaatttgtgcttacaaaaacatgtgactataaacaggatccagggggaggtcgcacaagaggatgggcaatatttggagtgctatcttgcatattttttgtctcttcaacactcttttgttgtggagggttcatttacaagacaaaagtggaacgccagcgtggaattgatgcattgcctggcatgacaattctttctgcgtgcttagagacagttagtggagctgggcaaggctactcacggccagaagacatcaatagtgcatttggcagtgaaacctcttgggaacgtcctcctggtcct

SEQ ID NO: 4842 - DNA, 415 bp, Glycine max
  modified_base (304)..(304): a, c, g, t, unknown, or other
  modified_base (313)..(313): a, c, g, t, unknown, or other
  modified_base (353)..(353): a, c, g, t, unknown, or other
gaaaatcctgtttcccgataaaaaccccgttcgtacatggtctggtcacgcggatcgggttgattgagatgcacaccgcgagcaggagcaacggcggcggcggcggcgtgctggcgtcgcggacgagttcgcggtcggtgacggagacggtgaacgggtcgcacaagttcgtgataaagggatactcgctggcgaaggggatcggagtcggaaaacacatcgcgagcgagacgttcacggtaggagggtaccagtgggcgatatacttctaccctgacggcaagaacccagaggacaacttcgnctacgtctncgtcttcatcgggctcgccttcgagggcaccgacgtccgngccctgtttgagctcacgctgctcgaccagagcggggaatgggaagcacaaggtgcatagcc

SEQ ID NO: 4843 - DNA, 440 bp, Glycine max
caaaagcctacaagaaatggacaaagaaaatatcagaaatcaagccaccaactagtcccttaagaaggagggcaaaatcatcaaagaagcaaccagaaaaagagctttatgctatcatatcacaacgcaaacatgagaggaaagaccactttgattccatgttctcatctctaatttcaaagtatggtgggggtcaaatgccagaaccctctgaagaggaatttgaagctgcacagagaaaggtggaaagtggaaggtcctcaaaaaaattaaagcgaaaataacaaacttatatctgtgtacaattcgtttaagtgtgaacggtacttcagcttttgttagtggaaattcttcttttctgatgaagtacgggaagttagttattttcatgtgtatgttaatgttactggttactgtcaatagtgtcaatggtgaaacag

SEQ ID NO: 4844 - DNA, 472 bp, Glycine max
ctcatccctctcaacgacgaccttgccattcccaaccccaacgccgtttcccctccctcagattgggcactctccggacttcaacccttctcgctcgccgtctccgtctccttcgcccacccgcaccctctacgagctccgatcccgtaggtctctcggcaagaaaccctccaccagtcgccaaggcaaaattcgcaccctcggcgatctcaaacgcccctcccgcgacgaccatgattccgggtccgatcctgatttcgaacccgaccagtactacaccggctgctaaaagagtgggatgcttgttcgagatcctaccagaggaaacaacaacaacaatttggatgatattttcgatcaagcaaggcatgttgctagtgatgcgcccccggagaatcctcgaagctcttcgaggtcgagaagttttagtggcacggcgaggttgctctccggagagactgtgccatctgct

SEQ ID NO: 4845 - DNA, 417 bp, Glycine max
cccacgcgtccgcacaatcccaaattcccaattctctcttccttctccacaccaattggcaaaaccctaacccccaaattctccttcagcgattcatctctcttgaatcgaatcgatggcacggatgggcccagggttccgattccaccccaccgacgaagagctggtggtgttctacctgaagcgcaagatgaccggaaacctctcccgctacgaccacatcgccgttgtcgacgtctacaagctcgagccctgggaccttccccgttagcacccaattatcttcttccttccccttttttgtggtctcaatagataggcttttgagaattttggaagtgttttaatttgtttcggtgtttcagctctgtcgaagctgaagacgaaggacttggaatggtacttcttcagcgcgct

SEQ ID NO: 4846 - DNA, 430 bp, Glycine max
aacttcttcttgagtgttttctcagttcctcacatcatgtaccgctttggaacctccctcggctgcaaagctagaattgccaggagcagcactcaacagattggaagtagggtcacttggaacaggaattatgcggccaaagacattaagtttggtgtggaggctcgggctctgatgcttaagggtgtcgaagagctcgctgatgccggtaaagtaacaatgggccctaaggggcgtaatgtggttattgagcaaagttttggagcacctaaagtgacgaaagatggagtaaccgttgctaagagcattgaattcaaggacaaagtcaagaatatcggtgccagtcttgtaaagcagggtgctaatgctactaatgacgtggctggtgatggaaccacttgtgctacaattcttactaaagcaattttta

SEQ ID NO: 4847 - DNA, 421 bp, Glycine max
cccacgcgtccggttttgttgttggtgggtttcagcgttccgcttcaacttcaaattctcagtgaagccaattcagttcagtccaaatcccaaatccgaagtgagatttgcgatggagaggcttcagcgaatgttcgcaggtgcaggtggagctctagggcaccctcccccagattccccaactctcgattcctccgagcaggtctacatctcctcactcgctctcctcaagatgctgaagcacggaagggctggggttcccatggaagtgatgggtttgatgcttggagaattcgtggacgagtacaccgttcgtgtggttgatgtcttcgcaatgccgcagagtggtactggtgttagtgttgaagcttgtgatcatgtttttcagactaatatgcttgacatgctcaaacaaaccgga

SEQ ID NO: 4848 - DNA, 433 bp, Glycine max
acggatatttcccaaaaccaattgcatcactctcgtccgataccgacgctgccctagaccacgggcaagcggggtcgcacaccgccttcatccggtagggcaaaaatgagtcgaggaagtggaggtggatacgatcgtcacatgactattttctcccctgaaggacgtctctttcaagtggagtatgctttcaaggctgtgaaggctgcaggaatcacctcgattggtgtacgaggaaaggattcaatttgtgtcgttactcataagaaggttccggataagcttttggacaacacaagtgttacacacctctttccaatcaccaaataccttggattattggctactggcatgacagctgatgctaggacactggtccaactagcaagaaatgaaacagctgaatttcgctttacatatgggatatgagatg

SEQ ID NO: 4849 - DNA, 295 bp, Glycine max
ggccacgaaaaaaagaaaacccagaaaaactctgaagaagagttcgttgctttctgcttgactgcgaagatgaacggaggcccatctggtttcacaaatgctcccgtcacaagggctttcatcatcacttcggcgcttttcacaatcttctttgggatccaaggccgtttcagcactctggggttgtcgtatcaggatatttttggaaagcttcgcctttggaagttgatcatttccatattttccttctcgtcaacaccagagttgatgtttggattgtatcttctatattact

SEQ ID NO: 4850 - DNA, 343 bp, Glycine max
gaagtaatgacccggatctaaaggaggagatggagaagcagtttgtggaccttctcagcgaggagttgaagttgcaagagtctgttactgaagcaaacactcggcacatgaacataactttggctgaagcaaaaagagtggcgtctcagtaccagagagaggcagataaatgcataactgcaactgaaacatgcgagcaggcaagagaacgtgctcaggccatactcacaaaggagaaaaagatgacttacgtgtgcgagaaacgagctcgtcaaatgggttgggaaggagaataactgcataagtcatggtatttatatgctttatggctataatcatgatc

SEQ ID NO: 4851 - DNA, 429 bp, Glycine max
aaataacaaggctcctcggttagaattcctgatcggtcatggctgattttcagacctctacccacagagccaagtggattttctctcctcaacagctggttgagaaatatagagctgccaatcagagagccaaacaaattctagagaagtgtggagcaacactaatggaagtagatgttgatggatcgttgtcatatcctgaaccccaaatgactgcaaaggatagtgctgaaaagcattctcgaacaaaacctcttactattgaagaagaacaatgtataaaggtattttatgaaaacaagctacaagaagtatgtaacaatttccgcttccctcataagatccaggcaacagcccttatctattttaaaagattctatctgcaatggtcagtgatggaacatcaaccaaaacacattatgttgacct

SEQ ID NO: 4852 - DNA, 434 bp, Glycine max
agagaagaagcatatatatcaaaatggctgcagagatggagagggagtcattgataactgaagctcctaatgcaccagttactgcacagagaagggtcagaaatgacttagaaaattctctaccaaaaccatacttgccaagagcattgaaagctcctgatacgggtcacccaaatggaacagcaggccacaggcaccacaacttatctgttcttcagcagcattgtgctttttttgatcaagatgacaatggaatcatttacccttgggaaacttacatggggctgcgttctattggatttaatgttgttgcatctgttattatggctattgttatcaatgttggattgagttaccccactctacctaattggttcccttctctcttttttctatctacatacacaacatacccaaagcaaagcatgggagtg

SEQ ID NO: 4853 - DNA, 310 bp, Glycine max
aacgtgttcagtaagtatgctcgtacagttcctgacaagctcacacttggggaggtctgggacatgacagagggaaacagaaatgcgtttgacatatttggctggcttgcagctaaacttgaatggggggttctgtacattctggctagggatgaggaaggtttcctctctaaagaagctgttagaagatgctttgatgggagcttatttgattaatgtgctaaaatgcatgctactagtgatgccaagatgggttgaaattggattatgtagtactatatagtgtgtatgtatagttacgttatgtgtc

SEQ ID NO: 4854 - DNA, 359 bp, Glycine max
cggacgcgtgggcggacgcgtgggcggacgcgtgggaaaaaaaatcgtagttggaggcgccgcactccactccactccaatcaatcagatactagcgatggggaggaagcgaaaggtagcaccgaaatcttctgtatccgccgagcccccgctgaagcaacaccaaccaaaacccgaaaatgccgctcaggaatacgaagaagaggtcgaagaggaagttgaggaagacgaggtagaggaagaggtcgaagaggaagacgaagatgaggaggacgaagaggacgaggaagaagaagaagaagaccataaagaccaataccagcaccaacaacaacagcaagacgaagacgacgacccga

SEQ ID NO: 4855 - DNA, 421 bp, Glycine max
cccacgcgtccgctaatcagaaaaaaaaaaccctagtaatgccgccgatggggaggaggcgaaaggtagcacccaaatcttctctatccaccgagccacctctcaagcagcaacaaccaaaacccgaaaatccccctcaagaatacgaagaagtcgaagaggaagttgaggaagaagaggtagaggaagaggtcgaagaggaagaagaagaagaagaggagagaaagatggagaagcaacaacaacaagcaccatctaaggaaacaaaagcacagagtgatgaatcagttaaagaaagcagcactgaagggcttccaatggaggatagtccctatgtgaaatacaaggatttggaagattataagcgtcagggttatggtacacaaggtcatcaagaaccaaagacaggtcgtggagcttg

SEQ ID NO: 4856 - DNA, 464 bp, Glycine max
ccggagatgacgccggcgatcgcgagtgggatctcacacgccgccgccttaaacaggagtggcgtcagccggcgccggattccacgtgacacggaggagcaccggcgcgtgggtggactgtcactggcgtttgaagctccggctagtggctcgtcgccgaggatggtgcaccagtttcgggcgcgtgaggagatgacgtcgacgccgcgagggcgccacatggcgacgtcggcgccggtgaacgtgccggactggagcaagatactccgagtcgactcggtcgagtcgataaacgacgaggacggggacgaatcggaaatgatgccaccgcatgaatacttggcgcgtagccagaagatggtggctaactcggtgtttgaaggagtgggccgcacgttgaagggccgcgacttgagccgggttcgtgacgccgtgtggaaccagaccgggttcgacggttaaca

SEQ ID NO: 4857 - DNA, 269 bp, Glycine max
  modified_base (65)..(65): a, c, g, t, unknown, or other
  modified_base (187)..(187): a, c, g, t, unknown, or other
  modified_base (256)..(256): a, c, g, t, unknown, or other
cccatttttgtactaagaagcatttgttacatttatgtaaccaaaggaaaatcaaaagtacgcangaggtgaagctcggtggcgaaatcaacatgcaacgcagtgaaagcatgcgactaaaggagaaaaaagtgaaggatttgatggttgacaagaagaggctagtggaggtgccgtacatggcgtncctggcccacacaatgactacactggtggcgaacaaggttgtggcggtgccggtggctgcgccgccggngcaatggatcgga

SEQ ID NO: 4858 - DNA, 446 bp, Glycine max
gccgtacatggcgtgcctggcccacacaatgactacactggtggcgaacaaggttgtggctgtgccagttgctgcgccgccggggcaatggatcggagccggagggtccatgatcgttgagtctgataagcaaaccggaaccgtacggaagcactacatagggatggtgactatgcttgacattgtggtccacattgctggtgataaccacttgagtggtgacgatgatgatatcaccaaagaccttgatcaaaggatgtctggccctgtctcctccatcattggccactcctttgaaggccttagcttgtggactctcaatcctaataccaggttatatatatatagtgttttgtcttttatattacttttcattgagagaatcaaacatgggaaatttattggtatgtgtgaaaataccagggattctttacatgacacaaata

SEQ ID NO: 4859 - DNA, 419 bp, Glycine max
tcgggcaaaagatgtcacaagagaaatggatcaacaaggcaatcttaaaacagaaaattgtaggcatgacaatgacgagaagggttatggtggagcaaagtacaccattggtagtgtggaccacattactacaccatttattgtagaggccaatcttaaatcagaaaatcagatacaagacaatggccaaaagggttatggtggagcaaaggacacaattggtagtgtagaccacattactacaccacttgctgaaaaggccaaagctgctggtagcaccactgctcagtatgttggggagaaagcagcacaagccaaagatgctactgtgcaaactggcaagagtgctgcaaaagttgcctcagatttgagggacaaggctttggccacaaggtggagtgctgcacattattctactg

SEQ ID NO: 4860 - DNA, 429 bp, Glycine max
aggtggacctttcccttttctcttttgaaacagagaatggctggtggaggagtagagattggaggaccaggaaaaagggctcatctttacgagcacaagttcagttggtatttcgtctatacatgcttcgttggggcccttggcggttctctctttggctatgatctcggtgtttcaggtggggtgacttcaatggatgatttcctgaaggaattcttcccaaaggtttacagaaggaagcagatgcatctgcatgaaacagactattgtaaatatgacgaccaagtgctgacactgtttacatcatctctttatttctcagcacttgtcatgacattctttgcttccttcttgacaagaaagaagggaagaaaggccagtatcattgtgggagcccttagcttcctggctggggctatcctcaatgcc

SEQ ID NO: 4861 - DNA, 412 bp, Glycine max
accaggccttggagaagattgtgtgctttaccagcattttgggtagggttattgtacgatgaactttctctaaaaagtgttttggatatgacagctgattggactccagaagaaagacaaatgttaaggaataaggttcctgtaactggtctgaagacaccattccgagacggtttgctgaagcatgttgctgaagatgttctaaagttggcaaaggatggcttggagagaagaggcttcaaggaatcgggatttttgaatgaggttgccgaggtggttagaacaggtgtcactccagctgagaggcttttggaattgtatcatggaaagtgggagcaatccgtagatcatgtgtttgaggaattgctttattaaggtagtattgtctttcaaaggtctgtggaagattgtg

SEQ ID NO: 4862 - DNA, 418 bp, Glycine max
agctcggaggttactttaagggatgtcccaccggaagctttcaaggctatgcttaactttttatatgatgggcaattgaatgacaaagttatagattctggtgctttgttgctccaactccttctattagctgatcaatttggagtgacttttcttcaacaagaatgctgcaaaatgcttttagaatgtctctcagaggactcagtatgtctactcctccaagtggtttcttcaatgccatcatgtagacttattaaagaatcattgcagaggagaatttccatgaactttgactattatatcagtgcgagtactgactttgtgttattagatgagacaactttaatcaatatcattaagcatccagatctgacagtaacgtctgaagagaaagtccttaatgcaattctaatgtttg

SEQ ID NO: 4863 - DNA, 377 bp, Glycine max
cccacgcgtccgaaaagagaaggctaaatcagagacaagggattggttaaacaatgtggttggagagttagaatcccaaattgataactttgaagcggagcttgaagggctttccgttaagaaaggaaagagcaggccacccagattgacacatttagagacatcaattactcggcacaaggctcatataaaaaaatgtgaattcattttgaggctactagataatgatgaattaagtcctgaggaggttaatgatgtcaaagatttcttagatgactatgttgagcgtaatcaggatgattttgatgaatttgatgatgttgacgaactatacagttcattaactttagataaggtggagactctagaagatcttg

SEQ ID NO: 4864 - DNA, 440 bp, Glycine max
gtcttgaagcacaaaatctttcatcggatgagagagaaaagcggagtgaattgataggccttctttgtgggtgcatgcaagtaattattcagaaactagggtctttggattctaccaaatatgtgttggtgcagtattctgatcagataatgagactattcttcagggtctttgcttgtagaaatgccactgcacacgaggaggcaatgctagccattggagcccttgcctactcaataggccaggagttttccaattacatgccagaattttacaagtttctcgagatggaccttcagaactttgaggagtaccaagtttgtgctgtcactgttggtgtcataggggacatatgcagggcattggagttaaaaatactgccttattgtgatgggattatgacacaactcctcaagaatttgtcaagtgataatttgcac

SEQ ID NO: 4865 - DNA, 429 bp, Glycine max
tgcaaactgtttttctctcttagcttaaaagttctctcttgctatccctcctcgattaaccccattaataataagcaccatcaatttccttaattgcttcatatataggaaaatacaatgaccaagatctttgtgctgttatgtctgctcttcttagcttcttctgggtttgtccatggctcttctaagaaggatcatattaggttatttgagctcaagaaaggtgatttttctataaaggtcaccaattggggtgcaacacttgtgtccgtaatacttcccgataagaatgggaagttgggtgatattgttcttggatatgattctcccaaggcatacacaaatgatacatcatactttggagctactgtgggccgggttgctaacagaattggaggagctcagttcactctaaatggaatccattac

SEQ ID NO: 4866 - DNA, 470 bp, Glycine max
ggaacgagtatctgcagagcatgagagacccttctaaggctcagagctggggtcaacagcgtgttcagccttacatttcacaaaccagaatcacttgcatcactgtaggaaatgaggtattcaactacaatgatacacagctcacagcaaatcttctcctagcaatgcaaagtgtgtataatgcccttgttaatctaggactagcacaacaagttactgttacgactgctcattctttcaacattttagccaattcttttcctccttcatctggggcattcaggcaagatctgatacaatacattcaacccctccttagctttcatgctcaaatcaaatcacccttcctcattaatgcatatcccttttttgcatacaaggacaatccaaaccaaatctccttgaactatgtgctatttcagccaaatcaaggggccactgatccaaacaccaatttgcattatgataac

SEQ ID NO: 4867 - DNA, 364 bp, Glycine max
attccattttcatttctttcgcaaaagttgcaactacttcctcagaaaaaaagtttctaagttaaggaaatccagagagacaaaaatggccggtgacggtgcagctacatgcatagacatcctccttgccatcattctccctcctcttggagtctttctcaaatatggctgccaggtggagttctggatttgtttggtgctgaccctttttggttatatacctggaattatctatgctgtctatgctatcaccaagtgatcaccctttaactttgtgtggacaataaacaaatgtcatgggcgtttctgtctttcaactcagatattagtgtttctttaatatatcgccaatgttgtcatattc

SEQ ID NO: 4868 - DNA, 437 bp, Glycine max
  modified_base (70)..(70): a, c, g, t, unknown, or other
acgcccacgcgtccggcttcgcaaaagttgcaactacttccacagaaagaaaaaaagtttctaggtgaangaaatccagagtgaagaaaaaaaaatggccggtgacggtgcagctacatgcatagacatccttcttgccattattctccctcctcttggtgtctttctcaaatatggttgccaggtggagttctggatttgtttggtgctgaccctttttggttatatacctggaattatctatgctgtctattctatcaccaagtgatcgtcaccctttaacttttgtggacaataaacaaatgtcatgggcgtttctgtctttcaactcagatattactgtttcttcaatctatcgttgtcaatgttgccattttcttttgttctgtttttaaaaacccttctgtttttagcttaagcgagagtggaatgtgtag

SEQ ID NO: 4869 - DNA, 411 bp, Glycine max
caaaattttacttccaaacccaaccaaatcaaagaaatgaaggataaggagacatgccctattgcgaaaaaggaagcctctgattcaggtttattcggaagaggaagctacaaattctgggcactagctgccatgctgctcttggcattctggtccatgttcaccggcacagtctctctccgctggtccggcaccctcaacactttctcccacgcgtcccttcacgaccacctcgacgtcctcgaaatcgaagagcgggagaagctggtgaggcacatgtgggacgtgtacacgaataaccgtaggatcaggttgccgcggttctgggaaaaggccttcgaggctgcctacgaggatttgaccagcgacgccgccgatgttagagacgttgccgtcgccgagatcgttaac

SEQ ID NO: 4870 - DNA, 332 bp, Glycine max
taaggatcgcctgcctcctgcaaattgtttcggggaaggccatgtcgatatcaaagacttgcaggtcagatatcggccaaacactccttcggttcttaaaggcattaccctaagcatcaacggaggggaaaagattggagttgttggtcgaacaggaagtggaaaatcaactttaattcaagttttcttcaggctggtggaacctacaggaggaaaaataatcattgacggcattgacatatccgacttggggcttcatgatcttaggtcacgggttggtatcatccctcaagagcctgtactttctgaaggaaccgtcagaagtaccattg

SEQ ID NO: 4871 - DNA, 429 bp, Glycine max
  modified_base (407)..(407): a, c, g, t, unknown, or other
aaaattcttggccaacagctttcttgtaattcctcttgcttgggtaaacatttggtaccggggttattttcttgcttcatctcgcgagttaactcgtctggattcaattacaaaagcaccagtgattcaccatttctctgaaagcatttccggggtcatgacaattcgcgcattcagaaagcagaaggaattttgcggagaaaacatttaacgggtgaatgctaatttgggaaatgatttccacaacttcagttccaatgcgtggttgggtttccgcttagaattgcttggaagcttagttttttgcctttctgcaatgttcatgatcatgttacccagcagtatcataaagccagaaaatgttggttggtctctctcatatggcttgtcattaaatgccgggatgntctgggctatatacatgagctg

SEQ ID NO: 4872 - DNA, 381 bp, Glycine max
  modified_base (321)..(321): a, c, g, t, unknown, or other
atcagcttcttctctgcatcatcacaatggctgaagtacgttcacaacaacaacaaccccagcatgtgcaagtccacgcaaccacaacacacaccccacaacaccatggcggggaaggtggcagcggcattctgaacctcatcccggagatgtccctcacgggttcccaactcctagctctcctcgccggcgttccccttggtgcaatgctgctcctcctctccggcatctcgctcatcgccagcctcttggggctggcggtggcgacgccgctcttcatcttcttcagcccgctgctggtccccgccgccttcgccatangaatggcggtgaccgcggtgctggcggcgggggcgtgcgggctggcggggctcgtgttgt

SEQ ID NO: 4873 - DNA, 345 bp, Glycine max
cttcatcatcatcttcttcttctctgcatcatcacaatggctgaagtacgttcgcaacaacgtgaaccccagcatgtgcaagtccactcaaccacaacacacacgccacatcaccatggcggggaaggtcgcagcggcattctgaacctcatcccggagatgtccctcacgggttcccaactcctagctctcctcgacggcgttccccttggtgcaatgctgctcctgctctccggcatctcgctcatcgccagcctcttggggctggcggtggcgacgccgctcttcatcttcttcagcccgctgctggtccccgccgacttcgtcataagaatggcggtgacc

SEQ ID NO: 4874 - DNA, 450 bp, Glycine max
  modified_base (63)..(63): a, c, g, t, unknown, or other
  modified_base (429)..(429): a, c, g, t, unknown, or other
cccacgcgtccgcccacgcgtccgcccacgcgtccgcaggctgcaaggtctttgggtccgtcnggaaattgtacttgcgatcataatgaagctgttgacagcattgtgtgtaccctacgttttggccaaaggtgtatttccagtgcttgggtatcccttggtaataaattctgccgtctatcggtttgcatggttgggatgcctctctttcagttttgtgtgcttctgtgccaagagattccatgtctggttcacaaatctccataattcaatacgcgatgaccggtatctgattggccggaggttgcataactttggagaacatgctgagaaagcaaatgtagcagaaacttctacaggggagcaggaagctattttactaggtacaggtttaaaccaacaagatcacgaagcagatgttggactacngttgaggcacgtaaatcaaca

SEQ ID NO: 4875 - DNA, 375 bp, Glycine max
cccacgcgtccgaagagaactccaagaagaggcaggcactttacgtaatgaatcctaataagttcagagcgtgtgagtttctcataaatttccatgaagggacacgtggtgataaaattatagtctttgctgataatctgtttgctctcactgagtatgccatgaaactccgcaaaccaatgatatatggtgctacaagccatgttgagagaacaaaaattttgcaagcattcaaaactagcaaagatataaatactatatttctttccaaggtgggcgacaactcaattgatattcctgaagcaaacgtaataattcagatctcttcacatgctggttcaaggcgacaagaagcccagcgtctgggtcgtattc

SEQ ID NO: 4876 - DNA, 443 bp, Glycine max
cccacgcgtccgttccattccattccttcattgctatgcccacataacaacaccgaaaaggatggcacttgtgagccacgtttgtgtgagatgtgtagccacacccacttccccagagtccccaaattcggcacccttgccagacccaaggcaaaccaaggttctccttccgaagaagaagcctcagaaatggtccaccggggtggctcccggggagtacggtggccctcccaccaccaccaaactccgcaaatactggggcggcgatgacgaagaccctttggcctctgatgactatatgtggaacaaggagtttatgggtcgcttccaaaagttgattgaggaacccaatgctcaaccccctcctgcaaaggaagagccttcagggtttctaagcttaaatagagtcatgagcctggacagtttgaaagttgatttgagca

SEQ ID NO: 4877 - DNA, 434 bp, Glycine max
agtgtttcgttcaggtcgttacagtcggaaccgggaggttctagaagttggttgagttcgttcggaagcgagcgcgagcgaccggggaaggaacgcaagggatggtccataacggttcacgatctttccggttcaccggtggccgcagcttctatggtcacgcctttcgtcgcttcgcccggttcggaccgggtgagctgctccaaccctggttcgtggctaattcttcgcccgagcgacggcacgtggaagccatgggggaggctcgaggcgtggcgcgagcgcggcggctccgacggcctcggctaccgcttcgagctcataccggacaccaacggcggcatgagcgccgccggtatagtgcttgcggaatccacgctgagctccaacaaaggagggaagttcgtcatcgatttgagttgccgcaacgccgt

SEQ ID NO: 4878 - DNA, 403 bp, Glycine max
ttcaaaagcatataagagatggggttagaagggaaggaaacgccgtcgtttatgagggattttctcgataagtgtggtggctgcgccgttattgacggtggttttgccactgaacttgaaaggcatggggcggacctcaatgacgaactctggagtgccaaatgccttattagctccccacatcttgtccgaagggttcacctagattacctcgatgcaggagcaaacataatattaacagcatcttatcaggccactattcaaggttttgaggccaaagggttctctagagaagaaggtgaaactatgcttaaaagaagtgtggagattgcacgtgaggcacgagaaatttattatgataggtgcaccataaattcttctgactttattaaagatgaaagat

SEQ ID NO: 4879 - DNA, 377 bp, Glycine max
  modified_base (157)..(157): a, c, g, t, unknown, or other
acctaaccctacaattatgccccattaacacaaatcgcaattaccccaaattcctcaccctaccgtagatccatctcctcttccttcgtgaattctggttcagggtggttgccatgtatggcacttagtattttttttccctttttaggattattangggtgggtgggttgtgtctcgcttagggttccaaagtttgtcgctttgaatggaacctcgtgttgggaataagtttcgcctgggtaggaagatcggaagcggctcctttggggagatctatttaggcactaatattcagacaaacgaagaggttgcaataaagctcgaaaatgtcaagacaaagcatccccaattgctgtatgagtccaagttgtacaga

SEQ ID NO: 4880 - DNA, 365 bp, Glycine max
aaaatattaaactctgtacactattgtatccaacactttgtgaagtgactactatgacgaaaccttgtacaaatttgttgtatggtttaatgtatcactatttattaaaaaaaaaaaaaaaaaaaaaaaaaaaaaaaaaaaaaaaaaaaaaaaaaaaaaaaaaaaaaaaaaaaaaaaaaaaaaaaaaaaaaaaaaaaaaaaaaaaaaaaaaaaagtaactgacattcaaatagttcaaatgacttgggtataggctcgaaagactaatcttaccgtctagtacctgaaaaacatacgaagtttccctcatgataacaggagcactcgggcaaattctatcagttaacgtcaatgatcacatgcat

SEQ ID NO: 4881 - DNA, 419 bp, Glycine max
cccacgcgtccgcccacgcgtccgcccacgcgtgcgcaaatttgcaaccttctgaataaacctgacatagtgaaccaagcagggcaagaacacaaacccttacaatcgaaatttgtgttgcagaaaagccatgacgggggaagagactaccgggaagaagagggtggtgacagaatccctgggatggctaacggaatcgtcgataatgccaaagaagcaccgagccatagcgggcgttggcgcatcctcaattctcgaattgaaggccgaactgtacaagtctcaggaagattccaaaaagtctcgcgaattggcaggccccgatgccgagtaccaacgcgccaagaacaaaatcgcccccaaagacaaattctccgtcaaaaaccgcggcgtcgatgcccgcgctcacaaggacaagc

SEQ ID NO: 4882 - DNA, 443 bp, Glycine max
  modified_base (336)..(336): a, c, g, t, unknown, or other
cggacgcgtgggcaaatttgcaaccttctgaataaacctgacatagtgaaccaagcagggcaggaccgcaaacctttacaatcgaaattggggttgcagaaaagccatgacgggggaagagactaccgggaagaagagggtggtgacagaatccctgggatggctaacggaatcgtcgataatgccaaagaagcaccgagccatagcgggcgttggcgcatcctcaattctcgaattgaaggccgaactgtacaagtctcaggaagattccaaaaagtctcgcgaattggcaggccccgatgccgagtaccaacgcgccaagaacaaaatcgcccncaaagacaaattcttcgtcaaaaaccgcggcgtcgatgcccgcgctcacaaggacaagcttgagttgaaagcggtgagtgatggaacggcgagctatgtggcgctcg

SEQ ID NO: 4883 - DNA, 420 bp, Glycine max
agaagttattaatgagaaggtggacatatgggctcttgggtgtctcctttttcgcatgtgctacttcaaaagtgcttttgatggggagtcaaagctccaagtcttaaatggaaactaccgcattcctgaattaccaaaatacaattcacctgtgacggacttgataagagacatgctccaagctagaccagataacagaccagatatcacgcaggtctggtttcgtgttaatgagcaactacctattaatttacagaagtcattacctgacagaccacctgaattgccctcatccaacgatcatgaaggtgtgtcaatgccctcaaacagatcacctgcaatgcctcgtaggaacccaccttctccaccttcatctggagaacccaaaacttcaccacagccatcccctgcttctagggg

SEQ ID NO: 4884 - DNA, 455 bp, Glycine max
tgatcactcagttacaagagagaaaattgaaggaagagctataacaccgagaaagcaaaatggcaagtctactatgtcaagggaagagttcgtggcctgaggttgtgggaacaaacggggtggtagcagtggagaagattgagagagagaatgataatgttcgtgcaagattggtgggagaaggatctatggtgacaatggacttttggtgcaaccgagtttgggtttgggtcgacaaaattggggtggtcactcgtgtgccaaagataggttagctaggcatgcaccttgtatgtatgtatcatgtatggaataatatatatatatatataatagccattaattacttacattaatggttcttatatatatatatatatacttcttactcttaaataaggcatcgcatgctcaggacgattatgcacattaatcccatcatgtcttcaacttga

SEQ ID NO: 4885 - DNA, 402 bp, Glycine max
ctcagttacaagagagaaaattgaaggaagagctataacaccgagaaagcaaaatggcgggtctactatgtcaagggaagagttcgtggcctgaggttgtgggaacaaacggggtggtagcaatggaaaaaaatggaaagaaagaatgataaggttctgccagaatggttggaaaaaggatctatggtaccattggactttgggggcaaccaatttgggttttgggtcaccaaaatggggggggcaattcttgtgccaagaataggttactctggctatgcacctggatgtgtggattaagtgttggaaaaatatatatatatatataatcgccataattctctcacataaggggctcatatatatatatatatacactttacactctaatatagggtatca

SEQ ID NO: 4886 - DNA, 420 bp, Glycine max
  modified_base (388)..(388): a, c, g, t, unknown, or other
  modified_base (400)..(400): a, c, g, t, unknown, or other
gtcaaacttagccttcttgtttcatctataagagtagcaaccatgtggtctgcagtaacagatcccattagagctttttttgcaaattttctccgccatttcatccacaaagacttccatgaagcagtggccagaatgaccataatagatgctttcctcttcgttattgtgcactccattgataagttggggatatggccacgcttgccggttttcttagggctattgtacctggcgattcggcggcggcttcatcaggagtacaacctcttcaacgttggaacaacaccggtgggggttaggtttaaccattctgattttccatacagaacagctgatggaaaatataatgaccctttcaacgaagttgctggcagccatgggactntctttggcaganatattctccctgtggatcag

SEQ ID NO: 4887 - DNA, 287 bp, Glycine max
cccacgcgtccgagcagtttcttggaattgtaggcgatacagcaaacactgttgctaagaagccacccccacctcctcctctggtgtcacgcaaaccggcgttcattgatgcattcttgtataagatgaagaagaatccaaatcttttgttgaacaagaccatttggtcacggagatcgactatcttgccagaatttggtgatagcactggcaagaattacaatgggaaaaccactattcggtgtaagatcacttaaggaaaaggtggtcattaggttgggaaagtt

SEQ ID NO: 4888 - DNA, 294 bp, Glycine max
ctagaaatgaagcagcacggtgttgttcgacttcatttcgaagatccactcaagagaggaagagaaaaaaaaaaaaagagagataattaataattaacaaatatttagtgttggtgttagtgagagtggagatgaaggcggagacggtgacgctgttgctggtgaacctggcggggataatggagagggccgacgagtcgctgcttccgggagtgtacaaggaagttggcacggcgcttcacaccgaccccaccggtttgggttacctcactctcttccgatccatcgtacagt

SEQ ID NO: 4889 - DNA, 391 bp, Glycine max
cccacgcgtccgatggacatcaaaacctttgctttcgccccatcttctccgccgttaccggtaatcgccgccgccaagctcgccggaatctctccctcgattgatacctctctctctcctgactcacctcccgcatttatcttctccgatgggctcaagttgcatggagcatatgctcttctacgttatatcggccgagttgccagccttcccaatttctatgggcaaaatgcattagaatctagccagattgatgaatggctggactatgctcctatcctctcatctggccctgcttttgagaatgcatgcaaatatatagatgaatacctggaaaaaggtacctttttgggtgggtaatcaatggccattgccaaacctaccatttggg

SEQ ID NO: 4890 - DNA, 431 bp, Glycine max
ccacaggggtatgattttgtctttggcaatgtctcctgatggtcgctatatggcatctggcgatgaagatggcacaatcatgatgtgggacctctctagtggccgctgtctcacacctttgattgggcacacatcatgtgtctggtccctcgctttcagttctgaaggttctgtgatagcatctggatctgctgattgcactgtaaaattgtgggatgtaaatacgagcaccaacgtttctagggctgaagaaaaaggtgggagtgctaacagacttagatcgctgaaaactctaccaaccaaatctactccagtttactcattgcggttttctcgaacgaatcttctttttgcggctggtgctctatcaaaaagtggctaatatatgagtatgtctactaatagataagatcagatcataggggttgaag

SEQ ID NO: 4891 - DNA, 384 bp, Glycine max
ctgtattatttccttcttcagcttagctcaaccacttccacttcaacaatcaacatggcttcatcactcgcaaccatactcgtcgccttgccccaaaccccgcaatgccgtagcaccttccgatccgatccacccaaactatccctaaccctaaaacccaaggccactgttacatgtaaggccaccctgtccactaccctggagactagcatccagcagcagcagcagcaagatgaccaaaaacaaaagcccgtggccgaggtgtggcgcaagatccacggggaggacaactgggccgggcttctggacccgatggacccggttatgcgaggcgagctgacccgctacggcgagatggcccaggcctgctacgacgcattcgac

SEQ ID NO: 4892 - DNA, 385 bp, Glycine max
ctcgtattgatttttatgctctcactcgaatcttgcatttgaggcattacattggatgtctttattttgtgcctgcacctggatttgaagcttacggggaccccactagttaccctggaagttctaataacaaaggcagcaatagtgaactaattgatgaggaacctttgaagttacaaaggctaggctatcaaggacctgaaattgacctggagaatcagagttggagagttttaaatggaccatttatttctgtctggcttcacaatgtggcttggggtgctgaaaacaccaaggcagcaccagatgcaaagttctcagatggttatctggacttgatcattacgaagaattgcccaaagttaccattgctgtcgttgatgtc

SEQ ID NO: 4893 - DNA, 458 bp, Glycine max
atttgttgtctgttacgttaacgtccctgcctccgattctttccacttcttacttggggtctagtttctcttttccctctcacacaacacaagagaacacgaataaaacgcactgcacgtgaatcgcaattattagggtttacacaccctcgcagatggtttgagattgcgaattcgacgacgatgatggaaggagcgagcaatggagggatgctgtaccacgaggtgcaggagtcgaagctctgcgcggtgcattgcgtgaacacggtgctgcagggcccgttcttctcggagttcgatttggccgcgcttgcctccgatctcgaccgcaaggagcgtcaggtcatgctcccagcgctcgcgtcggcggatttcgagtcgcacaatgtctcgctcgacggagatttcagcatccaggttatacaaaaggctctggaagtttgggacctacaagttat

SEQ ID NO: 4894 - DNA, 392 bp, Glycine max
gaacagtgctcatgaatgttacaggaatcaagaagggctgaagagcatgatactggtacaagataatatcgaaggatgagtccattgtaaaatcacgatctatgcactacaaatttgctgctagtgactctccagaagctccgtaggtggtggcaactcctatgaaagtcagctcaatcagcatgtctggaaagcgacatggttaaacctctgtgtacattatctctttaaaggtttcaaatttctagtgttaggagtgtctatgaagtttgaacaatatacttgcttgtatccaagtttgaaatgctactatccctctgtaaagcacttattaggttgccctgtatgtattaccttctgtgttgcgattagtctgggattgctgactgaat

SEQ ID NO: 4895 - DNA, 265 bp, Glycine max
agcgtacgcatcaacctcgctaatgatggattcctctgtcgcagatccaccgctcaagggaagaatgcgagtagtgtgtgttgcacgagagatcccaaattcaaaactaacattactactgatgaagagtttctgccacgtcagagtggtgatcttaccattatgtatgatgtgatcagaacttatgattcaaattactgtgctgatgttactattgcgaaccataacccacttgggaagcttgaccactggaaggtgagcttgg

SEQ ID NO: 4896 - DNA, 452 bp, Glycine max
cccacgcgtccgggaagcccatctcactaccggaaactacccctccgggacccctcttgttcggcgccggccaccgttgacgacgtcttctcctccgctgcaaccactactggcggctatgactccgattccgatttggtgaacctcaagatcagcttgttgggtgattgccatattggaaaaactacttttgtgatcaagtatgtggggaatgagcaagaaaagggaagcttacagatggaaggattgaatctaatggacaaaactttgtctgttcaaggagctcgtatttcgtttagaatatgggatgttgcaggagataaaaggtccctggatcaaattcccatggcttgtaaagatgcggttgcgattttgattatgttcgatctcaccagtcgttgtacactaaatagtgttgttggatggtatagtgaagcaagaaagtggaatca

SEQ ID NO: 4897 - DNA, 402 bp, Glycine max
gcgtcagacactatgtaactctttattttattttctttctttctttctccgatcgcatagctcgctcgcaaccaccatgccttcccgaagaagaactctcttgaaggtcatcattctcggtgacagtggggtggggaagacatctttgatgaagcaatatgtgaataagaagtttagtaatcagtacaaggcaaccattggagcggattttttaaccacagaagtgcaattcgaagataggcttttcatcttacagatttgggatacagctggccaagaaagattccaaagccttggagttgctatctatcgtggtgctgattgttgtgttcttgtatatgatgttaattcgatgaaatcatttgagaaccttaataactggacggaggaatttctgattca

SEQ ID NO: 4898 - DNA, 434 bp, Glycine max
ctccgatcgcatagctcgctcgcaaccaccatgccttcccgaagaagaactctcttgaagggcatcattctcggtgacagtggggtggggaagacatctttgatgaaccaatatgtgaataagaagtttagtaatcagtacaaggcaaccattggagcggattttttaaccaaagaagtgcaattcgaagataggcttttcaccttacagatttgggatacagctggccaagaaagattccaaagccttggagttgctttctatcgtggtgctgattgtcgtgttcttgtatatgatgttaattcgatgaaatcatttgacaaccttaataactggagggaggaatttctgattcaagcaagtacttctgatccacagaagtctccttttgttgtcataggacacaaaatagatattgatggtgggaacagcag

SEQ ID NO: 4899 - DNA, 357 bp, Glycine max
cccacgcgtccgctccgatcgcatagctcgcaaccacaatcatgccttccggaagaaggactctcttgaaggtcatcattctcggtgacagcggagtggggaagacgtctttgatgaaccagtatgtgaataagaagtttagtaatcagtacaaggcaaccattggagcggattttttaaccaaagaagtgcaatttgaagataggcttttcaccttacagatttgggatacagctggccaagaaagattccaaagccttggagttgctttctatcgtggtgctgattgatgtgatcttggatatggatgttaattcaatgaaatcatttgacaaccttaacaactggatggaggaa

SEQ ID NO: 4900 - DNA, 433 bp, Glycine max
cgctcgcaaccaccatgccttcccgaagaagaactctcttgaaggtcatcattctcggggacagtggggtggggaagacatctttgatgaaccagtatccttcggtttctgtctacaaactccgtgttctttacttttttttttttaatttgcgtttcaatttgttttctattgtttagtactgcatgaaaactatgtattttcccctaacatacgcaatttagatatgtgaataagaagtttagtaatcagtacaaggcaaccattggagcggattttttaaccaaagaagtgcaattcgaagataggcttttcaccttacagatttgggatacagctggccaagaaagattccaaagccttggagttgctttctatcgtggtgctgattggtgtgttcttgtatatgatgttaattcgatgaaatcatttg

SEQ ID NO: 4901 - DNA, 339 bp, Glycine max
cccacgcgtccgtagaaattagggttcatatctcatttcctctgatttcatctcagatttcgccttcgttcgtatcgaagaagaagaagatggggaaacagattgtgccggtgaaatcagtgatctacgcgctctcccctttccagcagaagataatgccgggtctctggaaggacttgcccacaaagattcaccacaaggtctccgagaattggatcagcgccactctcttgcttggtcccctcgtcggaacctacacgtatgttcagaactacctggaaaaggagaagctgtctcacaggtactgaactcatgcaagagctgattggataaccttct

SEQ ID NO: 4902 - DNA, 436 bp, Glycine max
cccacgcgtccggagattctcaaatttgaatctaacatacccataccagacatcaaggaagacgaagtgctcatcaaggttgtggctgcggcgcttaatcctgcagattatatgagggctcttgggtttttcaaggacactgatgcacccttacctattgttccagggtttgatgctgctggtgtggtggtgagagtgggaagtaaagtgagcaaattcaaggttggagatgaagtttatggtgatatcattgagtatgcttggaataatccaaagaccattgggactttggcagaatatactgctactgaggagaaagtgttggctcacaaaccctccaatttaagctttattgaagcagctagccttcctgcagccatcatcactgcttatcaaggatttgataaaattgagttttctgctggcaaatctatac

SEQ ID NO: 4903 - DNA, 441 bp, Glycine max
gaacaagacacacataattagcatagttattatggggagggttgagtactccccattgtgtgagacaagaaagtgcagaggaaggttcatctacaggtcctttgcaatctcattatttgtggccatatgctttatatggcattacagatttagccacataacaaagggtgaagatggaaactgggcatggcttggtatgcttgcttcagagctgtggtttggcttttactgggtccttactcaagcccttagatggaaccttgtgttcagacaacccttcaaaaacagactctctcaaagatatgagaaaaagttgccaagagtggacatatttgtgtgcacagcagatccagatattgagccagcaatgatggtgattaacacagtgctatctggtatggcttatgattatccaactgaaaaattgagtgtgtatctctc

SEQ ID NO: 4904 - DNA, 440 bp, Glycine max
ctttaccatgacccttggtatgtggaagtgaatatggattctgctgctattgtctggccattatttaacagcctgcaggcattttggcctggccttcatgttttagctggagatatcaatcccgcaattcgcacccatgctgccttcttgagtgtctggagaagatatggttttactcctgagggctttaatcttgctagtctcagtgttcagcatgggcagaagagttacccgttgcggccagagctaatcgagagcacctatcggctatacatagctaccagagatcctagatatctcgatgctgggagggacatggttgctagtttacagtatggaactcgatgcccttgtggatattggcacatttctgatgtcgagaatcaccaaccagaagatcacatggagagcttcttcttagctgagacagtcaagtatct

SEQ ID NO: 4905 - DNA, 363 bp, Glycine max
aggctgaaacaaagaagtgaaaataacagcaaaaagtagcagctgctgcagctcccccgaagcttatctcagcagcagatactcaaccctgtttgagtagccgagaataacaccaatgggagaggaggaaaagaaaccagaggaacaacccaaggcagaggagaaaaaaccagaggaagagaagaagaaagaagaagcagcagcagcggaaaaaccaagcgaagagaaaaaaccggaacaagagtcgaaagaggaagttgctgctccgccaccgccaccgccaccggccgagattgtgctcaaagtgttcatgcattgcgagggttgcgctcgcaaggttcgtcgctccctcaaaggattccc

SEQ ID NO: 4906 - DNA, 439 bp, Glycine max
gtgaaaataacagcaaaaagtagcagctgctgcagctcccccgaagcttatctcagcagcagatactcaaccctgtttgagtagccgagaataacaccaatgggagaggaggaaaagaaaccagaggaacaacccaaggcagaggagaaaaaaccagaggaagagaagaagaaagaagaagcagcagcagcggaaaaaccaagcgaagagaaaaaaccggaacaagagtcgaaagaggaagttgctgctccgccaccgccaccgtcaccggccgagattgtgctcaaagtgttcatgcattgcgagggttgcgctcgcaaggttcgtcgctccctcaaaggattcccaggtgtcgacgatggtgtcaccgattgcaaatctcacaaggtggtcgttaagggagagaaagcggatccgttgaaggttttggagagaatac

SEQ ID NO: 4907 - DNA, 430 bp, Glycine max
caggtatctggatccgaacgaggttgagagccatggcctctacaatcacgaattgtcagtggcagatatgacccacagacgtaggaaccattatcctgaaaatgttagtggagtggatgacacatcatctgagagcagctgattcttgcaagaaaggttttctcaaggtcacgatccgcatgatatggagccttctagacatcttacacctaatggagctcttgcacccctaaatcccaaaggtgcagatagagatggggcacaaaccatcaggatatttgaaagtgacgggccagatacatcatgctgctatcactgctgttagaaagcaatttggaaggcattatcatggaagatggtacactacttggcatacaattcgatgcactgtcttcagggcatttgaatgccgaactgcatatacagctaa

SEQ ID NO: 4908 - DNA, 429 bp, Glycine max
cccacgcgtccgcttgttgtccatgggattgctggtgctggttcggtggctttagccagggccttggcttaccctcgggacaccatgaaagtcctcattcaagttggttccatcaccggtaaagaattggaccatgcccatgttttgaccagactactctctgtatccggcaatgcaggtttgttcaatggttttggctggttgttggttggaaggatttttggtctgggagcacgatttggggtttatgaaatcctgtctgccttttataaagatggtctggaaaataattatttgtttgcttctgaagctcttttggctggcgttgtaactggtgccattgaggcagtcataagctctccattcgaaacttcatcaagcttagtatgcaagttaactctgcttcatatgttcctagctgcaactttg

SEQ ID NO: 4909 - DNA, 424 bp, Glycine max
cgacaacgacgagtacggcgagttcctccacctccccggccggaaattccacgaggtctccgagattcgcagggaaattcaggctgaaactgatagggaagcgggtgggaacaaaggtgtatcagacaagcagatccgacttaagattttttcaccaaatgttcttgatatcacactggtagatctcccaggcattacaaaggttcctgtgggtgaccagccttctgatattgaagctcgcatcagaacaatgatcatgtcatatatcaaaactcccacctgtctcattctagctgtcacaccagctaattcagatttggctaattcagatgctcttcagatggcaaggattgctgatcctgatggtaatagaacaaatcgtgtaatcacaaagttggatttaatggacagaagtactgatgcc

SEQ ID NO: 4910 - DNA, 379 bp, Glycine max
  modified_base (313)..(313): a, c, g, t, unknown, or other
tcggctatcggtattttcattcgagttgcagtttggcggttaaacgtcttcttctcttctggtctcggcatccatcagatccaaattttctcgcgatacgaaggagcaatgtcagatgctaaagttgaggatttgaagaaggaagaagaagttggtgatgattctcctaagaacgaagttgacagtgaaaaatctgcggatgatctgaaagattcggataacgataaaagcgatggaaaccccatgccctcatcccagcatgaggaagcagctgttaagaaaaagtatggagggatgttaccaaagaagcctncactaatatcgaaggatcatgaacgtgcttactttgactctgctgattgggctttggggaagcaag

SEQ ID NO: 4911 - DNA, 414 bp, Glycine max
  modified_base (392)..(392): a, c, g, t, unknown, or other
cggctcgacccaagcgtcagcccacgcgtccggcaccatttgttacacatccaagagaggtaagggagattcctatagaggttaaggatggtagtcaatccactcctcaagctggtcatgttccatccattgaagatgtcactggaaatgttgatgcccatggtccagatatccatgggactgtcataattgatgatgaagatgacgaaaatattccacctgcccagattgcacatcaagatgagcaaacacacaagatcttggctgacacttcactcaatagcagtgctagacctagtgctcctgaatctgagaatttgccagattatagcaatgacatagaagaagaaatgattcgtgcagccattgaggcttctaaacgggaagctgangaaaattatagaaatcacaaac

SEQ ID NO: 4912 - DNA, 455 bp, Glycine max
gaacaaagcaatggttcctgttgcaaggttgttcgggccagccatatttgaagcctcagaactgaaggttttgttcttaggagtggacgaaaataaacacccaggaaatctcccaaggacttatacgctaacccatagtgatataaccgctaagctcaccttggcaatctctcaaaccataaataattctcagctgcaggggtggtacaacagatttcaaagggacgaagtggtggcacagtggaaaaaggtgaagggaaggatgtctctgcacgttcactgccacattagtggaggtcattttctcttggatatattagcaaggttaagatacttcatcttctgcaaggagctaccagtggtgttgaaggccgtcgttcacggcgatgaaaacctattcaacagctacccagaattgcaagatgccttggtttgggtctactttcacttaaaca

SEQ ID NO: 4913 - DNA, 445 bp, Glycine max
cccacgcgtccgttcacagttttgcaattgtaatggcttctgcttctaatgccggcatcgaatgcacctcttcgtcttcttcttcgtttgagtatgacgtgtttgtgagcttccgcggtgaagacacacgcaacagcttcaccgcttttctttttgaagctctgaaaaaacaaggcatcgaggccttcaaagatgataaagatatcaggaaaggcgaatccatagcaccagagctaatacgagccattgaagggtctcatgttttccttgttgtcttttccaaggactatgcttcctcaacttggtgcctgcgtgaactagcacatatctggaattgctttcaaccatctaccagacatcttctgcctattttctatgatgttgatccatcacaagtgcgaaaactgagtggagactatgagaaagcctttgcccaacaccaaca

SEQ ID NO: 4914 - DNA, 468 bp, Glycine max
aatccgtcttttgactcataagtaaccaaccgcttctttcaatcaactgaaagtcgttaggttttcttaaggttactgtctgtctctgttttatatgtggcatgggcatgagatggatctgtattccatcatgtccatggaagaatagttaactactttccttttttggtgatttctaaggttctaatttataatatgggagtggaggagaacacccctaactccatttctacctcacaatgccacgaagaacaaagcatcaacaaaatcaacacgcatgtgctcttgaatgtctacgatctcacccctgtcaataattacgtctactggtttggatttggcatctttcactctggcattgaagtacatggtaaggagtatggttttggagcccatgacttcccagctagtggagtttttgaagtggagccaatgaaatgccctggattcatatatagatgttccatc

SEQ ID NO: 4915 - DNA, 407 bp, Glycine max
cgaacctcaacaacgctgaacgcagaaaggggaaaaaggggattagggtttaggaagcagcgacaacaatggatttcacagcggagaagaaggaatcagagagcaacaccgaaaatgctcatccaacaactttagattcttcttctcaattggcatcggcacttgattccagcaacaaagaaatcgaagaacgacaagctcgtgaactcaaagccggtcttcaccccctcaagcacaagtttgtcttctggtacacgcgccgaacacctggagttcgaaatcaaacatcatacgaggacaacataaagaaaattgttgaatttagtacggttgaaggattttgggtctgctactgccatcttgctcgtcccgcttctttacctagtccaacagatttgcaccttttc

SEQ ID NO: 4916 - DNA, 399 bp, Glycine max
agttgacactgctatgaattctcagaggccatctgtggtatattcattgaaaaatgatcatggtggcagccaacttcaaaggctgcagtatcaagttacgaaaatgataaaaggattttctagccctccagaagttaaatatacaaattacaatccggaaatcttgacaactcagaagcgtcaatgggctgcaaactttcagttgcagtacacggaccataagtcttggaaggagccaacaaagctgtttgaaagcatggtggttgctggacttcatcctaattgtgatattcaggcactgcaaaggcaatgttttttaagaaagtctgaaagccctggtaaattgagaagtgcacttggttatcagaatcagtcccgtgtggaagtggaacccaatct

SEQ ID NO: 4917 - DNA, 437 bp, Glycine max
cccacgcgtccggggagctcagaatagcttgtacgttggcacaaatggagcgtgaaggagggatcagtccccgagtatcacctttggcacaggttcgagatgctgggaatcttttgactagggcaggtttcacccttccaggggttgatgttgatgagtatgtagttaaatatgaaagtgctctggagcttatagaacatctccgtgcaatgggtgaaacaaatgctctttatcaaatgaacaatatcctaaagagggacacagcgttagcaactgcagctatttatgattcaatgttttctgcagaagacggcactgtacctgcaacattccaggttatatacatgacggggtggagagaacatccttctcagcagaaaggcaaaagaaggggatcagccactatatctttcaacgatattcagaagcaatttgga

SEQ ID NO: 4918 - DNA, 457 bp, Glycine max
gcttcaagcctgtaaaaatgctcaccacaatgccaccgttgagacccactttcttgttgctgacgaagagtttcttcctatcaaagaaagctctgtggatttggttgttagttgcttgggactacactggactaatgatctgcctggagcaatgatacagtctagattggcattgaagcctgatggcttatttttagcagctattcttggtggagaaacattaaagtgacaatgtttatttttatttcttgaaatttctttggaacagaaatggatgggggcattctaattaatgatatttgtgctgctaccagggagctcagaatagcttgtacgttggcacaaatggagcgtgaaggagggatcagtccccgagtatcacctttggcacaggttcgagatgctgggaatcttttgactagggcaggtttcacccttccaggggttgatgttgatg

SEQ ID NO: 4919 - DNA, 419 bp, Glycine max
  modified_base (330)..(330): a, c, g, t, unknown, or other
agctcaaacattgcatccctcttgatttgtagtttgttttgtgctttagataaaagttctgccaaatcaagacgggttttaagatcatactgtgtgttttgcaacaatggctaagttctttgctgctatgatcttggcactctttgccatttccatacttcaaacagtggtaatggctgctaatgaacaaggaggccacttgtatgacaacaagagcaaatatggaagtggaagtgtcaagagttaccaatgcccatcacaatgctcgaggagatgtagccagacccaataccacaagccctgcatgtttttctgtcagaagtgctgcangacatgcctgtgtgtgcccccggggtattatggtaataaagctgtgtgcccttgctacaacaactggaagaacaaggaatgaagaccca

SEQ ID NO: 4920 - DNA, 389 bp, Glycine max
gaaggatgaccccaacgcgatttccaacttcaggatttcggaaccattgagggagaaagtgaaggagaagggtatcgaatcgctgtttcccattcaggccatgaccttcgacaccgttctcgatggttctgatttggttggccgtgctcgcactggtcagggtaaaactctggcatttgtgttgcccatattagagtctttaataaatggtccagcaaaatctgcgagaaagactggctacgggaggactccgagtgttctcgtgcttctacctactagggaattggcttgccaggtgcatgctgattttgaagtgtatggtggggcgatgggattgagttcatgttgtttatacggtggagctccatatcaaggtcaagaacttaagc

SEQ ID NO: 4921 - DNA, 383 bp, Glycine max
  modified_base (46)..(46): a, c, g, t, unknown, or other
cagttttgcctatggagtcttgaggagatttttgcctgaagagaangttgaggccgtgaaaggtctttcaatcactgctgatggaaatggcgttgtttttgatgtagcagctaaagatttagacatatatcttaacggtcaggaaaatgcctcgaatgtaagtttagagatagtgaaaacattgccacagttgcaacagatggagcaacaccaaagaggtggcagatttggtgatggtggtggtcgtggttaccggtttggtggaagaggtggaggaggcaggaatggtaggttctccaatggtggcggaagaggtggacgtggcggcaacctggggtggaaagagatggtgaagctgagaaaggacttagggagttgagttt

SEQ ID NO: 4922 - DNA, 396 bp, Glycine max
gtccgaagaaaaagaacagcctttgttggtaacggagcctaaagaagaaaagaaggatgaccccaacgcgatttccaacttcaggatttcggaaccattgagggagaaattgaaggagaagggtatcgaatcgctgtttcccattcaggccatgaccttcgacaccgttctcgatggttctgatttggttggccgtgctcgcactggtcagggtaaaactctggcatttgtgttgcccatattagagtctttaataaatggtccagcaaaatctgcgagaaagactggctacgggaggactccgagtgttctcgtgcttctacctactagggaattggcttgccaagtgcatgctgattttgaagtgtatggtggggcgatgggattgagttcatg

SEQ ID NO: 4923 - DNA, 351 bp, Glycine max
cccacgcgtccgtatgacagggccaaggatcaagcgcgggaagccaaagacagaacagaggatttcgcacacgacgcataggagaagacgaaggacgctgcggggtcgatgagggacagggcggagagtgcggcggagaagacgaaagagtatgcttacgacacataagagagtgccaaggacgcggcgggaacggtggcggacaagagtagggagggggctgagaggacgaaggagaagacggaggaggtggcggcgtcggcggtggaggcgctgaagaacgtgggggagaaggcgaagcagggcgtgcaaggtgcgtgggagacggcgaaggacactacggcagcagaa

SEQ ID NO: 4924 - DNA, 375 bp, Glycine max
atcgacgaacatcccaacttatgtcaatctgatgatgaatgcatgaagaaaggaagtggcaatttttgcgctcgttaccctaataattatatcgattatggatggtgttttgattctgattctgaagcactgaaaggcttcttggccatgcctagggcaaccaccaagtaatatggtgggtatgccaaagtgggcatgcttgatgcatcttctactacttaaaaataaaagcttatgatgcatctactgctttaaacaaaagagtgctccactacgcaactttagtttccaacttatagttggttacgttttatgtaaactcaacccatgtatgttttggagcattccagttaataaaaaatgtttctataaaaa

SEQ ID NO: 4925 - DNA, 385 bp, Glycine max
tcatgatggtccatacaatgtgataaagaattgggactacactcgctttgtggacgcgatccataatgggcaaggcaaatgctggactgccaaggtacgtacagaggatgatctgactgaagcaattgcaaaagctactggaccacagaaagattcactatgttttatagaagtttttgtacacaaggatgacaccagcaaagaattgctggaatggggatctcgtgttgctgctgctaacagtcgtcctcctaatcctcaatagaaaatcatttcctaattattggcctgttttgtgtattttgttgaatagagttccactactggatatttacaagagaaaaacgacaaaaatgaaaaataagttgaaataaatgtttgcttt

SEQ ID NO: 4926 - DNA, 435 bp, Glycine max
  modified_base (345)..(345): a, c, g, t, unknown, or other
aaactaacaaacaaatcccagggagccactcaaccatggcttccaagctctgcgactcatgcaaatcagccactgctaccttgtactgccgccccgacgcggccttcctctgcggcgcctgtgactctaaggttcatgccgccaacaagctcgcatcgcgccacccgcgctcgtgctctgcgaggtgtgcgagcaggcgcccgcgcatgtgacctgtaaagccgacgccgccgcgctctgccttgcctgcgatcgcgatatccactccgccaaccccctcgccagccgccacgagcgcatccccgtcacgccgttcttcgagtccgtacattcagtcaaggcctnctcgccgatcaacttccaccaccgcttcttctccgacgccgacgctgatgctgacgtcagcaccgaggaggccgaggccgcgtcatggct

SEQ ID NO: 4927 - DNA, 420 bp, Glycine max
aacttattgaaaatgatctcattttaattggtagcacagccattgaagacaagcttcaagagggagtaccagcttgcatagagactctgcaaagagctggtattaaaatttgggttcttacaggggacaagattgaaacagcgataaacatagcctatgcatgcaacttgataaacaatgagatgaagcaatttgttattagttcagaaactgatgaaattagagaagttgaagacaggggtgaccaagtataaattgcacggtttattaaagaagtggtgaaaagagagctgaagaaatgcctcgaggaagcacaaagctcctttcaatcgctacgttggacataattagcacctgtagttgatggaaaatgtctgatgtatgcgttggatccaagtttaagagtgatgctgctgaatc

SEQ ID NO: 4928 - DNA, 347 bp, Glycine max
cccacgcgtccggcaaacctagtcacgttcctctctctctgagctcgatctatcgggctcttcgaattcggttcccgatttccgacccataaaagctagcaagttccttcacttcaatcttcagaaatgcctctcagactcgaaatcaagcgaaagcttgcccaaagatcagagagagtaaagtctgtggatctacatccaacagaaccatggattctagcaagtttgtactctggaactgtctgtatctggaactaccaatctcagaccatggccaagtcttttgaagttactgagttaccagttaggtcagccaagtttattgcacgcaaacagtgggttgttgc

SEQ ID NO: 4929 - DNA, 443 bp, Glycine max
cccacgcgtccgcccacgcgtccgcccacgcgtccgcccacgcgtccgagcgttttgggtcacttgtcaagatgccactattgaaatctgataggaatccccttcctgagccagtgcagtctgttttggaggaaggaattgatctatataaacttcacactaagagacatggaagattagagtctaccaaaggatcctacgcaaaagaatggataaaatgggaaaaacagttacgggatattctttgtggaaatgctgagtattttaattctattcaggttccatttgagtttgctgtcaagcaagtgttggaacaattgagaagcattgctaagggagagtacacaccaccagatactgaaaggaggaaatttggtaccattgtttttgctgctctcagcatgccagttactgaaattcatggcgtcctcaataaattggcg

SEQ ID NO: 4930 - DNA, 396 bp, Glycine max
cgaaccgcactctttatctctttctccgccgcaaactatccttctccggcggcgccaccgtacaaccctcgagttaagcaaaggagcaacagaaggaagtgcttggttgcaaatggcggccaccgcaagcaacaacgacatcgtcgtcaccgtcgacagccctttgatgagcctaatcaacaagcgcctccgcgccctccgcaagaagctgaaccgcatcctcgccatggaagaggccgtcacccagggcaagcctctgaacaaggatcatgaagaggttctccgctccaaaccatccgtccttgctctcatcgacgagctcgagaagctacggcagcctctcgccaccgaactatacgaagagcttactaaaacaacgggaccttctttaaaact

SEQ ID NO: 4931 - DNA, 435 bp, Glycine max
ctctctctttctccgactcattgccgatcttccagcaatggccacacacgtgagtcacgggatattatcggcatgcattgggggctacttcttctgcctatctgtatattcttctccatataccattctcaccgatccgctgcaatcaacctcttaactgccactcccacacgcttagaatacgcgttctatgcgcttagagtttttcagatgcttgtaatcgaagagaataatactcctgtgaacgaggacacgattcagaaagttgtcgaaagtctagcctcggcttctcctatcaaggattagttctatgccttgaaagttaacgccattttaaaatgcaatgtcaatgggaacgtttttaaggatattggtctcagacttaaagccactgaacatgaagcgagtgctttgattgacatctactattcaatt

SEQ ID NO: 4932 - DNA, 312 bp, Glycine max
tggatttgtaggttccactatttgagagtatggatgagagattgcttgatgccatatgtgagagactgaaaccgtgtttatttacagagaatacttacattgttcgggaaggagatccagttgatgagatgttgttcatgatacgtggtcgccttgagagtgttaccacagatggtgggaggagtggatttttcaaccgaggttttctaaaagaggctgacttctgtggggaggagcttttaacctgggccctggatcctaaatctggttctaatcttgcatcttgtactagaacagttaagggcataatgg

SEQ ID NO: 4933 - DNA, 438 bp, Glycine max
ctggaggtagaggtttctatctcaaaggagatggtgttcgtcttaatcaagctctaatagggtttgggcttgattttttggaaaaaagggagtatactttattgcatactcctttcttcatgagaaaagatataatgtcaaagtgtgctcaactagcccaatttgatgaagaactttataaggtaactggtgaaggagatgacaaatatctgattgcaacagctgagcagccactctgtgcatatcatttagatgattggatccaccctacccagctaccattaagatatgctggatattcatcatgctttcgtaaagaagctggatctcatggtcgagacactctaggaatattccgagtccaccaatttgagaaagtggagcagttttgcctcactagcccaaatgacaatgattcatgggacatgcatgatgaaa

SEQ ID NO: 4934 - DNA, 467 bp, Glycine max
  modified_base (374)..(374): a, c, g, t, unknown, or other
tgttgatgtagatttatgcaatgccagtgtttgacatgattgaaacggtgatggtcaagaaattgggtttcgaaccaagcagaatgcttcgttttgttgtacgtaatgtatatgtggcattcactatgttcattgctattaccttcccatttttcgatggtctcctaggattttttggagggtttgcttttgctccaacaacatactttctcccctgcatcatgtggcttgcaatccacaaaccaaagagatacagcttgtcttggttcattaactggatctgcattgtgcttggcctatgtttaatgattttatcacctattggaggattgaggacaatcataattaaagccaagacctacgaattttactcnttgactctttctactcttgactcagtcattggaaagttaactatatgggaaatgtgtgtgaattatcatatgtcgctccttaatttactattg

SEQ ID NO: 4935 - DNA, 471 bp, Glycine max
cccacgcgtccgcccacgcgtccgatcctgcatggcttcctcttctctgtttcaggctctccggttctctctccaaacctctaaaccctacgcgcctcccaaacccgccgcccacttcgttgtccgcgcccaatcccccctcactcagaacaacaactcctcctgcaagcatcgccgccccgccgacgagaacatccgcgacgaggcccgccgcatcaatgcgccccacgaccaccacctcttctcggccaagtacgtccccttcaacgccgactcctcctcctcctcctccacggagtcctactcgctcgacgagatcgtctaccgctcccaatccggcggcctcctggacgtccagcacgacatggatgccctcaagcgtttcgacggcgagtactggcgcaacctcttcgactcgcgcgtgggcaaaaccacctggccttacggctccggcgtctggagcaaaaaaga

SEQ ID NO: 4936 - DNA, 425 bp, Glycine max
  modified_base (411)..(411): a, c, g, t, unknown, or other
gaggagagagaaagtagcagatcctccatggccttcaccaaggaacgtgaaaacttcgtctacgtcgccaagctcgccgaacaagccgaacgctatgaagaaatggtggaagcaatgaagaatgtggcgaagctaaacgtggaattgacggtagaggagcggaaccttctgtcggttgggtacaagaacgtggtgggtgctcgtagggcttcgtggaggattctttcctcgattgaacagaaagaagaagctaaagggaacgatgtgagcgtgaagaggataaaggagtataggctgaaggtggagtctgagttgtccaatatctgcagtgatatcatgactgttattgatgaataccttattccctctagctcatctggtgaacctagtgtctttttctacaaaatgaanggggactattaccg

SEQ ID NO: 4937 - DNA, 442 bp, Glycine max
  modified_base (385)..(385): a, c, g, t, unknown, or other
caaaccgtgtgtctggttactgtgcgccagaggtcactgatgcacgcaaaatatcccggaaagccgatgtctatagctttggtatcatgcttttggagctgcttacagggaaggctcctactcattcttcacttaatgatgaaggggtggaccttccaagatgggtccaatctgtgattcaagatgagtggaacactgaggtatttgacatggagcttctaaggtaccaaagtgttgaggaggaaatggtcaagcttttgcagcttgcccttgaatgtactgctcaatatcctgataagagaccttcaatggatgtggtggcaagcaagattgaggaaatttgtcatcctagtttagagaaagaggaagagaagaatcatgattntaaagatgctgataatggattttcccaacagtaccattctgttgactcgggtgtgtc

SEQ ID NO: 4938 - DNA, 339 bp, Glycine max
gaacaaaacaaaaaagaagaagaaagaaatatggctggaggatcatacgaggaagccattgcggcgttgacgaagcttctcagcgagaaagccgacctgggtggtgtcgccgccgcaaagataaaacagctgacggcggagctggataccgccaccgcaaacgggtcgacgccgtttaacccggacgagaggatccgaaccgggttcgcccacttcaagaacgagaaataccagaagaacccggaattatatggcgaacttgccaaaggccagagtccaaagtttatggtttttgcttgctcagactctcgagtttgcccatcccacattctggatttc

SEQ ID NO: 4939 - DNA, 438 bp, Glycine max
cccacgcgtccgcccacgcgtccgcaaaacatataagaagaagaaagaaatatggctggaggggcatacgaggaagccattgcagcgttgacgaagcttctcagcgagaaagccgacctgggtggtgtcgccgccgcaaagataaaacagctgacggcggatctggataccgtcaccgcaaacgggtcgacgccgtttaacccggacgagaggatccgaaccgggttcgcccacttcaagaacgagaaataccacaagaacccggaattatatggcgaacttgccaaaggccagagtccaaagattatggcttacgattgctcagactctcgagtttgcccatcccacattctggatttcaatcccagtgaagcctttgaggtccgaaatatcgtcaacatggttccaccatatgacatgaccaagtattcatgaacc

SEQ ID NO: 4940 - DNA, 400 bp, Glycine max
catattctaagagacgagccagtggcatggctttatgagcttgggaagttgggtgggggagatgggaaatgtacatggtcgtgttgatggagctaaagctttattgattggatctcacatggtacatgcataggctaaaatcaaaagatctctcaatatgccacaatatgatcctactgggatcttgtataatgaagccgaatgctacaaactgaaatgatgcttgcgctgtgacatggcccaactttaccgatgtatacccttttgcaccgattgaccaaaactaaaggttatcagcatatctggtattaggaaatgttcaacaatttgagtgaactgttgctggacaaattctccttacatagccgactggtggttattcgtgcacattattttattt

SEQ ID NO: 4941 - DNA, 425 bp, Glycine max
  modified_base (402)..(402): a, c, g, t, unknown, or other
attggctctattgaagggtgtcagtggagctttcaggccaggtgttctcactgctctagtgggtgtcacaggtgcaggcaaaacaactctgatggatgtactcgctggtagaaaaactgggggatatattggggggaatatcacaatctctggttatccaaagaagcaagaaacatttgcacggatttctggatactgcgagcaaaatgatatccactctcctcatgttactgtatatgaatctttgctttactcagcatggcttcgactgtccccagaaatcaatgctgacaccaggaagatgttcatcgaggaagttatggaacttgtggaactgaaagcactaaggaacgcattagttggattgcctggtattaatggtctctcaacagagcaacgcanaaggttgactattgcagttgaac

SEQ ID NO: 4942 - DNA, 360 bp, Glycine max
cacaaatctgtcatgaaaaaggagttccgtaggatggcaaaggctgtgcaaaatcaggtagcagataactactacaggcctgatctcaaaagggcagctctggcaagattgagcgctgtcaataggagcctcagagtagctaagtctggtgtgaagaagaggaacagacaggctgtgaaggtccccagcaggaagtgaatttagaagagttaaattgcattctaaatttcttccatcctttccccattttgtagtttgtgttccagaactcaattctagattttctagttttgtttggagaggcaatttattgtgttttcaatatacaacaaccggaactactatgttatagctttcaac

SEQ ID NO: 4943 - DNA, 428 bp, Glycine max
  modified_base (403)..(403): a, c, g, t, unknown, or other
cccacgcgtccgcccacgcgtcctgtagtacctcggatctcgcactgacctgcagtgtctgctataccaacctgatcatgctctcagcctcattcaccttgctctcataattcacttggtacgcctccagcattggaaatcttctcctcatttgctgaatccacgactcgtcttcttccaggaatatcgtccttcccccgtgattcagcgcattccacatcaggctgtcgtgccccaacccgaacaccaggaaattgcacggcgacttcttctccagaactcttgctgtcactgatatctctttcaccgtttgctgtggggttatgcttgatgttgagtagtggatcagtgcttccgacaccgatcccggtatcttcatcttgttgcaactcccatcactctntactgataatgcctactgctgcttc

SEQ ID NO: 4944 - DNA, 412 bp, Glycine max
  modified_base (166)..(166): a, c, g, t, unknown, or other
  modified_base (312)..(312): a, c, g, t, unknown, or other
  modified_base (399)..(399): a, c, g, t, unknown, or other
accaagcgtccgatcatggccgacaataattctactactgatcattatgatatgggcatggaaaatgctgaactggttatggctgaggccaaaaaggcttgaaaggcttctgagagaacaaggccttcaaggcaactcatacacgctttttgttggggacttgaangagtttggcaagatgcgaaatgaagccttatccaaacccatgaatctcttctctcatgacatagcgccgcgcgtgttatcctttatccaacacactgtcaacaagcatggcaaaaattcttttatctggtttgggccaataccaanggtgaccctcacagatcctgagcaaatcaaagatgtactcaacaagatttatgactttggaaagcctgatatgaatccgcatgttangttactagctcct

SEQ ID NO: 4945 - DNA, 300 bp, Glycine max
aggagaaatggaagcagcatcatggccgacaataattcgactactgatcattatgatatgggcatggaagatgctgaactggttatggctgaggccaaagaagcttgaaaagcttctgaaaaaacaaaggcttcaaggcaactcatacacgctttttgttggggacttgaaagagtttggcaagatgcgaaatgaagccctatccaaagccatgaatctcttcgctcaagacataacgccgcgcgtgttaacctttaaccaacacactgtcaagaagcatgggaaaaagtcctttaaccg

SEQ ID NO: 4946 - DNA, 286 bp, Glycine max
  modified_base (238)..(238): a, c, g, t, unknown, or other
tactgctgccctcccatttgggacgattgcggttatagttctcatatggacacttgttacgtgtccttggcttgtattgggagggattgctgggaagaatagcaaggctgaatttcaagctcctgttcggacaactaaatatccaagggagattccacctctgccttggtatcgtggaacaattcctcagatggcgatggcaggatttttgcctttcagtgctatatacattgaactntactatatatttgccagtgtttggggccacagaatttacaccatctac

SEQ ID NO: 4947 - DNA, 388 bp, Glycine max
agctaattcacttttgcaacctcaatttcctggaacccttgtattggaacttgattggttgcccttgcgaactgttaagaatgatccactggtactgtgcattgctggagcagatagtagttttcgtcttgttgaagttaatgcaaatgataaacgatttggttatgcaccccatatcagaaatacaaaggagagattccggtcaatgcctatatgttgtcccatacttcttcctttaccacatgccttggcattgcgcatgattttacaattgggtgttaaaccttcttggtttaacacttgcagtacaaccatagaaaagagacctcacttaattccaggaactccttcatctaaaggggatcttcgcacctacatgatcgacata

SEQ ID NO: 4948 - DNA, 286 bp, Glycine max
cccacgcgtccggcgaagatgtagagaacaaagaatgagagagagatttgaatgtaaggggggaatcataaccaaaattggccccaggccaaaaagatgctctcatcgccggcgttgaaaagcacggccccggaaagtggtagaacattctcaaggatccccaattcgcccctttcctcacttaccgttccaacatcgacctcaaggataaatggcgcactttgagcgtcagtaacggtgctcatggctccaaagaaaaatctaaggttcccaagcttaaagccct

SEQ ID NO: 4949 - DNA, 294 bp, Glycine max
catggtagcaattctcaagagacagggagaaaacgaatccgaagaaaccatcataggcttggcaaaaagtctcatgcaactctcgcgtgtccaacaacaaagcaataagcctcttctcaaaaccttttctccaacggagttcgagtgcaaaacttgtaaccgcaagttttcatcttttcaagctcttggtggccacagggctagccacaagaagcccaagttcgaagctgaagaactcaaagaagaagccaggaagactaaacccaggatgcacgagtgttcaatttgtggcat

SEQ ID NO: 4950 - DNA, 391 bp, Glycine max
agatttagattttagggtttctctcttaatataatcttttgacacttccgtaacaaacaaaaaaattacataaattttcccttataattattattatttggcttttatctttggattaactaggcttgagctatcacaaataattgtttcggagaatggaaaagaaaaaggtggcagttcccctcgtgtgccacggtcattctcgccctgtggttgatctcttctacagtcccgttacgcctgatgggtttttcctcatcagtgccagcaaggattcgagtcctatgctcagaaatggagagactggagattggattggaacatttgaagggcacaaaggtgctgtgtggagttgctgcttggataccagtgccttacgtgccgcaactgc

SEQ ID NO: 4951 - DNA, 395 bp, Glycine max
tctctctctctctcataaattcaatgctctcatcgttttccctcataaaccgctttctcgtgttgtaacacactcatcactcatcatattcattcacacttcccactttccaatatggaatgctgcataatcgccaggctcaagacccaacctttatggttcgcgctgctcttcgttgtcggattgttaacgattctcaaattggctttcgttgttttcagatgggtctacgtcaatttcctccgaccaccgaagaatctcaaaaagtacggatcttgggcagtggttactggacccactgacggcattggaaagagcttcgctttcgagctcgctcgcaagggcctgaacctcgtccttgtcggaaggaaccccgacaagctcaaagacgtgtc

SEQ ID NO: 4952 - DNA, 377 bp, Glycine max
ctctctctctcataaattcaatgctctcatcgttttccctcataaaccgctttcgcgtgttgtaacacactcatcactcatcatattcattcacacttcccactttccaatatggaatgctgcataatcgccaggctcaagacccaacctttatggttcgcgctgctcttcgttgtcggattgttaacgattctcaaattggctttcgttgttttcagatgggtctacgtcaatttcctccgaccaccgaagaatctcaaaaagtacggatcttgggcagtggttactggacccactgacggcattggaaagagcttcgctttcgagctcgctcgcaagggcctgaaccttgtccttgtcggaaggaaccccgacaa

SEQ ID NO: 4953 - DNA, 436 bp, Glycine max
gagagtataatgtaagtatttactttcctgtcttaagttccatggaactcagatagcggagatgccattcattggaactcgccatatatataggcgccaggggatgtgccgccggcttttttccgccattgaatcgaccctatgctctctgaaggttgaaaaactagttattcctgccattgctgaagtcacaaatacatggacgacagtttttggcttcacacatctggacaaatcactcaggcaagaaatgaagtcactgaatatgatggtcttccctggtatagatatgttacagaagctgttagtggaacaaggaaaccatgagggttctgagaaaatggaaaatgaagacgatgattttatcaagaccaaaatggaaagtaggtcagatgtgggttcttcaactccacaagatcctcatggtagtgatgat

SEQ ID NO: 4954 - DNA, 415 bp, Glycine max
cattgccatccaaattctcagccgcggcttcttccctctctgggctggagttctaatcactgcttcagattgctttttctttctatttcttgagaactatggagtgaggaagttggaagctgcttttgcggttctcatcgctgttatgggtctttcttttgcctggatgttcggcgatgctcaacctaatagaaaagagcttttaatgggtatttcggttccaagactaagctcgaaaacaattcgtcaggctgtgggtgttgtgggttgtgtcattatgcctcacaatgtattcctgcattctgctttggtgcaatcaaggaaggttgatcctaacacgataggtcccgtgcacgaggctctcaactactattcacttgaatcgtcggcggcacttgcattctgattcatgatc

SEQ ID NO: 4955 - DNA, 302 bp, Glycine max
atggaatatccacacaatgctgttcttcttctttgttcttctcatgacaagggttgccgtcccgatatgggtggaactagctttcgtcattctaactgtcttgatcagtacaagaaagcttatactaaagtaatttcacctaataagcaacctatgcaaggcactccaggtgtgctacaagattcaaacttgcctcttgagaagagtgaagccacagagcttgcatggtctctatgcaagggtcaggtgaaaggttggactgttgtggaacctgttcgggactatctgaatgcaaagaaaaa

SEQ ID NO: 4956 - DNA, 393 bp, Glycine max
cccacgcgtacgctttagtcattctaactgtcttgatcagtacaagaaagcttatactggagtgatttcacctaataggcaacctatgcaaggcactccaggtgtgctacaagattcaaacttgcctcttgagaagagtgaagccacatagcttgcatgtgctctatgcaggggtcaggtgaaaggttggactgttgtggaacctgttcgggactatctgaatgcaaagaaaagatgctgcatgcatgatgactgcttgtatgttgagagctataaggagttgaataatcctgtgctgacagagcattcgtcggcacggccacggattgaggatcctgctgatgaacagaaatggacatggctctagtgggagcgtgaaagaaaagatgatat

SEQ ID NO: 4957 - DNA, 304 bp, Glycine max
  modified_base (159)..(159): a, c, g, t, unknown, or other
  modified_base (168)..(168): a, c, g, t, unknown, or other
  modified_base (204)..(204): a, c, g, t, unknown, or other
gaatgttaccaatgatgaagtatatcgagttaccgtaaaaccaattattcccacaatttttgagaaacccaaagctacttgttttgcttatggtcagacaggaagtggcaaaacatacacaatgcaaccgttgccgctcagagctgcagaagaccttgntagacaatngcatcgaccagtatatcgaaatcagagatttaaatngtggcttagttactttgagatatatggtggaaaaacttttgatcttcttagtgatagaaagaaactctgcatgagagaagatggcggcaacaaatgtgta

SEQ ID NO: 4958 - DNA, 468 bp, Glycine max
cgagtttagagaaacaagtgccgttcttcaggttaaagagtcagagcttgttgatgctgggctagagatccatcgtttgaaatctgaaaaggcttctcttcagggtatcttggaggagaaagacttggagctttccagtgctaggaaaatgctgggggatgttaaccaggaaatctatgatcttaagatgcttatgcacagtaaagaaacccagctcattgaagcaaacagtatgctaagggacaaagatgagcatgtgaaggtaatccagaacaagttgaataatacaaaccagaaggcttttgaggctgaaactgtggtagaaagaattttagatctcacaaacagacttgttgcttccattaaggatgaagatatgaactcatcaaaaccactactagatgaaatgggtaaccaactacttgatcaactattggagaaaccttgttatgaattgaaatgccaaca

SEQ ID NO: 4959 - DNA, 370 bp, Glycine max
cccacgcgtccgttttcaacactcattagatcccagtcatcaattgcgttaacgaactggtaaggcaaccatgaggggcattctttctgtaaggacagccttggttcaacatcgtagtgagaaattgggccttggtttcaggctatttagcactcaaggtgcttccactgctagtaccccacagccgccgccaccaccttcaccaccagagaaaacccattttggtggccttaaggatgaggacaggatatttactaacttatatgggctgcatgatccttttctcaaaggtgccatgaaacgaggggattggcatcgaacgaaagatttggtacttaacggtactgattggattgtgagttaaatgaat

SEQ ID NO: 4960 - DNA, 396 bp, Glycine max
accacgcgtccgataactatgagaagatattgtctcacatgaagccaaacagtatacttgggctttcccatggttttcttcttgggcatttacaatcagtgggacttgactttccaaagaacattagtgtaattgctgtgtgcccaaagggaatgggtccatctgtaaggacgctctatgtccaaggcaaagagataaatggtgctggaattaatgcaagttttgcagtccaccaggatgtggatcgcagggctactgatgttgctttgggatggtctgttgcccttggttctccattcacttttgccactacattagagcaggaatacaggagtgatatgtttggggagagaggcattttacttggtgctgttcatggggttgtggagtccctgt

SEQ ID NO: 4961 - DNA, 381 bp, Glycine max
cttttccacacttccatcgtccggcacttcatggccgcggcggagcccactataagcccatctaacacgcgcgtgggctggatcggcacgggcgtcatgggccagtccatgtgcgcccacctcatccgtgccggctacaccctcaccgtcttcaaccgcaccccctccaaggcccagcccctcctcgacctcggggcctacttcgccccctacccccacgccgtcgcagcccgctccgacgtcgtcttctccatcgtcggctacccctcggacgtccgctcagtcctcctacacccctcctgcggcgccctctacggcctccgacccggcggcgtgctcgtcgacatgaccacctccgaacccttgctcgccgtcgaaatc

SEQ ID NO: 4962 - DNA, 388 bp, Glycine max
ctccttcaaacttttcgtcccttttgacactgctctctcactcgcatcacacacaaacgagcgggcccattctctctctctctctctctctccgacctagcgagaccgagcgatccgaccctaatctcgcgatgctccgccgcgcaacctcctccctcctcaccggcgcctcccgccgccgactctcctccgacgtgccggcgacccccgccgcggattccgccttcgcggacgcgtggaagaaagtgagccccaacatcgacccgccgaagacgccgctggcgtacatgaagccccgaccacccactccctcggctctcccttccaagctcacagtcaacttcgtcttgccctactcctctgaattggccgcaaaagaaggtgatat

SEQ ID NO: 4963 - DNA, 362 bp, Glycine max
ctccttcaaactcttcctccctctcgactcttctctctgactcgcatcacacacacacagacacgttcattctctctctctctcgctctctccgacctatcgagacctagcgatccgaccctaatctcgcgatgctcctcctcgcaacctcctccctcctcaccggcgcctcccaccgccgcctctcctacgacgtgccggcgacccccgcctcggattccgccttcacggacgcatagaagaaagtgagccccaacatcgacccgacgaatactccgctggcgtacatgaaaccccgaccacccactccctacgctctcccttccaagctcacagtcaacttcgtcttgccctactcttct

SEQ ID NO: 4964 - DNA, 444 bp, Glycine max
aaggggtggaatgaaaattggaaccgggctctggatgatgaacgattcacaggccagagaccaagaactttcttcttcttctggttgtggcgcttcttccattcacagtaactccaattccatagaaagatgggtaccggggattcggattcggaatcgaatggatggaaccgtgctcgtgggttggcgcttaagactctgctactaattggtggcgcacttctcgttaagcgcctccgcaagtccaccacgcgttgggaccacgctcatttcgtcttcaactcccttaacggcgaaaagtattccaaggagcaagcttccagagacccggataactatttcaacattagaatgcttacatgccccgcagcggagctagtggatggttccaaggtcttgtattttgaacaggctttttggaagactccacaaaaaccctttcgg

SEQ ID NO: 4965 - DNA, 416 bp, Glycine max
agtctggatcttacttttagcattgatgcagatgaggaaaagttgattttgtatgagcggacagaggtgactgattatgagctaattcctggtggacggaatacgaaagttacggaggagaataagcaccaatatgttgatttggttgctgagcatcggttgaccactgctattcgacctcaaataaatgctttcttggaagggttcaatgaattaattcccagggagttaatatctatattcaatgacaaagagctggaattattgatcagtggacttcctgatattgatttggatgacttgagagcaaatacagaatattctggatatagtggtgcctcaccagttatccaatggttttgggaggctgttcaaggtttcagcatagaagacaaagctagattgctgcagtttgt

SEQ ID NO: 4966 - DNA, 369 bp, Glycine max
gtagactacaaatcaactagaaaggagtcattttatgaccttcagcttgatgttaaaggttgtcgtgatgtttatgcttgctttgataagtatgtcgaagttgaaagtcttgagggggataacaaatatcatgctgaacagtatggtttgcaggatgctaagaaaggtgtcctatttattgattttcctcctgtccttcaactccagctaaaaagatttgaatatgattttatgcgggatactatggttaagattaatgaccgttatgagtttcccttacaacttgatcttgatcgtgaagatgggaaatatctatcacctgatgctgataggagtgtccgcaatctttacacacttcacagtgttttg

SEQ ID NO: 4967 - DNA, 393 bp, Glycine max
ctgtaagtttgcaacttttttcctttcattcattattcttctcttgccttgagttgaggatgggcaatgtgaacgtgactcctgaagaagaagaagtttctgcaagtgcatgggcaaccgatgagaacgccatgcctgagtctgctgccacctgtcctacagctatccatttccccctcatattcgctcctcaagttccggtggttccgctacaaagacctgatgagatgcatgttccaagttgttcctggatggacacaacttcagggtatgaagatgtgtaccgtgaagtaggaattccaacagtgattacttggagttatgatggaaaggaagtagctgtggagggatcgtgggataatcggaaaacatgaatgcccctggagagatcat

SEQ ID NO: 4968 - DNA, 406 bp, Glycine max
cggctcgacccaagcgtcaggaagtgactaagattccttgccaaagtaacgagtttgtgagtgaacttcttcgcggtgtgcggttccattttgatacgtttgtcggtgatcttaagtctggagatttagaaaaggcacaacttggtctggggcatagttacagcagagcaaaggtgaagtttaatgttaaccgtgttgacaacatggttattcaagctatcttccttcttgatacacttgacaaggatgttaattcgttctccatgagagtcagagagtggtattcatggcactttcctgagctggtgaaaattgtaaatgataattatctgtatgccaaagttgcaaaatttattgaggataaggcaaagttggctgaagacaagattccagccttaactgacat

SEQ ID NO: 4969 - DNA, 416 bp, Glycine max
atttggggatggtctagaaaatgattatcaactaattaaggagttcattgataaagactgtaaatttttattggaaatttcttcagctgaaaattcaggtttgcatgtctttgacttcttagccaattcaatccttaaggaggttctctctgcaattcagaagggaaagccaggtgcattttctcccggaaggccaacagagttcttgaaaaattacaaatcaagcttagatttcttggcttttctagaaggctactgtccatccagatctgctgttgctaaatttcgatctgaagcaatttatacagaattcatgaagcaatggaacattggagtatatttctctttgaggtttcaggaaatagcagggtcactagattctgtgcttacaacatccagtcttgtccctgttcaaa

SEQ ID NO: 4970 - DNA, 420 bp, Glycine max
cccacgcgtccggccaggtgcattttctcccggaaggccaacagagttcttgaaaaattacaaatcaagcttagatttcttggcttttctagaaggctactgtccatccagatctgctgttgctaaatttcgatctgaagcaatttatacagaattcatgaagcaatggaacattggagtatatttctctttgaggtttcaggaaatagcagggtcactagattctgtgcttacaacatccagtcttgtccctgttcaaaattcagatgctggcgaagcaaattatcaaggtttaacattaaagcaaagtgttactttgttggaaaagttgagatcatgctggagaagagatgttcttgtcccttcttgttctgacagattccttcggctatccttgcagcttctttctagatactcaag

SEQ ID NO: 4971 - DNA, 432 bp, Glycine max
gtcacagattcagaagctttgagaaagagagtattttatggtggacttgagcacgagttacaaaatgaggtatggggtttgcttttgggatattatccatatgaatcaacatatgctgagagagaattcctgaagtcagttaagaagttagaatacgagaacataaagaaccagtggcagagtatatcctcagcacaggctaaaagattcacaaaattcagggaaaggaaagggcttattgagaaagatgtggtgagaactgatagatcactcgctttctatgaaggcgatgataatccaaatgtaaatgttctgcgagatatcctgttgacatattcattctacaactttgatcttggttattgccagggaatgagtgatcttctatctccaatattgtttgtgatggataatgaatcagaggcattttgg

SEQ ID NO: 4972 - DNA, 433 bp, Glycine max
cccacgcgttcgccgtgaaacaacttcacaactttttggagaaaaccagagtaatggatggagtgccattgacaggaggacgcatatccagactaaccttgatcatcctaagtcttccaatgttgaggaaaatacctctgttgaaagtcctgttgtcttggattctcaggagttcgataatttatcgttagtatggggaaaaccaaggcaaccccctttgggttctgaagagtggaatgccttcttggattctgaaggacgagtcacagattcagaagctttgagaaagagagtattttatggtggacttgaccacgaattacaaaatgaggtatggggtttgcttttgggatattatccatatgaatcaacatatgctgagagagaattcctgaagtcagttaagaagttagaatacgagaacataaagaac

SEQ ID NO: 4973 - DNA, 432 bp, Glycine max
  modified_base (400)..(400): a, c, g, t, unknown, or other
cccacgcgtccgcccacgcgtccgggattggtatgcaaactatacatgattatgaggtggagctgggtagatatctgtatgaaaggcttctttcagtcccaaatattcgcatctatgggccagcgccttcagaaaaagtcgaacgagctgccctttgttcttttaatgttgagaatttgcaccctactgatcttgcaacacttctggatcaacagcatggagtggcaatcagatcaggtcaccactgtgcccagcctctccatcgctatttaggcgtcagctcaagtgcacgtgctagtctctatttttataacacaaaggaggatgtagacaactttatccatgccctcaatgacacagtcagctttttcagttcattgatgtaagtggaatgtatttntatgtatattatattttgtttatacacgaatg

SEQ ID NO: 4974 - DNA, 388 bp, Glycine max
cccacgcgtccgcccacgcgtccgcgaggtgttgggagcagtaggtgaaaccgtggctgagattggacagaacatgatgaagccagcggagatagttcaggaacgcgctcacgttcgacaagcgggtggggtcttggatgccattggtgaaaccattgctgagattgctgaaacgactcgagtcatggtttctggagaggacgagagagtgctgaggcagagcgtggtgttggagactcgcgtaactggtcgtgccaagcatgaagaagggtcgcacggtgcttgagtctcttgagtgaacgctgtgttttttaaggtttatttctgttaatgtcatgtttagtctgtgtcaagtttcatgtttcgggtttggtgactttggtctatg

SEQ ID NO: 4975 - DNA, 339 bp, Glycine max
cttttattacctgcgtgaacttaatgactcgttgacttatgcccttggagctggtcctctgtgggagggttcacaggattctgactatgtgcacactcttcttgctaaagccattgatgaatatgccagccttaagtctaaggcatcagagtcaagtgatgaatctatcacagtggacccactgttggaagcaattgtggagaggctgtcggataagtgaatcgtggatggaaaatcccaacaagctatggcaactgctaccgaatgcaggagcatagataaactagaggatgcaattacaaggagtgacactgttcaaggaactttatcatatcgcat

SEQ ID NO: 4976 - DNA, 408 bp, Glycine max
gcgcggacgcgtgggccgcgggtgggatgcttgcgatgctgaactagccacatctctcgctgaaggttcacgcggtgttcaacctcaacaactgggtcgacaccttctggcccgagatcttcaccagactcccgaagatagagagtttgcatgaagatgaggagtttgatcatcatcgaatgctacttgctgcacttcttgtatcaaaggtcttgtattacttgggggaacttaatgattccgcatcgtatccccttggagctggtcctatggttgatgtctcagaggattctgactatgtgcacactcttcttgctgaaggcatagatgaatatgctagcctcaagtctaacgcagcagagttaagtgttgaatctatcagaatggacccaatgttggaagcaattg

SEQ ID NO: 4977 - DNA, 424 bp, Glycine max
  modified_base (331)..(331): a, c, g, t, unknown, or other
  modified_base (365)..(365): a, c, g, t, unknown, or other
gtttcagtggtgctgatataacagagatttgccagcgcgcgtgcaagtatgccattagagagagcattgagaaggacattgagagagaaaggaggaaaagagataaccctgaagcaatggaagaggatgatgttgaagatgaaatagcagaaatcaaggcagctcattttgaggaatcaatgaaatatgctcgaaggagtgttagcgatgccgacattcgcaagtaccaagcatttgcccaaacattacagcagtcaagagggtttggaagtgagttcaagtttgcagattccaccttcagtggtggtgctgccaccgcatctgatccatntgcttctgctggtggagctgatgaagatgatctntacagttaggtcaacttgaatggtagtaaatgccgtgctatcttagttatgtacttctc

SEQ ID NO: 4978 - DNA, 393 bp, Glycine max
attgatttatgctagtagaaagagtgagactgatgttgacaagcagttgccagatcacaaagactcttctagtagagttacgaatactttggttgctcttaaatcatctcagcttgtggcgtcaatctctcctagcatagaaattacccttgatgatctattgaatgcagacacggctgtgtcttgctttatgaggttgtgtggagaagctactgaagatctccaccttgatgctctgctggctattttggaagagtgggatggacttttcactgcaaggaaagatgaagaaaccactgttgaaacatctgatggaggaaatgactggaacaatgatgattgggacgagggatgggaaagccttgaggaagtagacaatcctgagaaagagaa

SEQ ID NO: 4979 - DNA, 409 bp, Glycine max
  modified_base (94)..(94): a, c, g, t, unknown, or other
  modified_base (100)..(100): a, c, g, t, unknown, or other
  modified_base (174)..(174): a, c, g, t, unknown, or other
gcggacgagcgcgacaagaagcggcggggttacccaaaccttgggcttcaagccgtaccgtgcacctgaaagtgtaaccgaccatgaaaacgcngtgtcntgcgtgaagttctcgaacgatggaaccctcctagcctcggcctccctggacaaaaccctaatcatatggtcctncgccaccctcaccctctgccaccgcctcgtgggccactccgagggcatctccgacctagcctggtcctccgactcccactacatctgctccgcctccgacgaccgcaccctccgcatctgggacgccaccgtcggcggcggctgcatcaagatcctccgcggccacgacgacgccgttttctgcgtcaacttcaacccccaatcgagctacatcgtgtccggttccttcgacgag

SEQ ID NO: 4980 - DNA, 367 bp, Glycine max
agcaagatcggaagcggatccttcggcgaaatttacctcgacactcatattgataccttcgagatcgtcgacgtcaagattgaaaacggtataacgtagcatgcgcaattgctttatgaggccaagctctacaatattcttcaaggaggaagtggaatcccgagcataaaatggtgtggtgtaaacagtgaggataatgtgcttgctatggactagctgggacctagactagaggatccatatggctactgtggaagaaagttctgtctcagatgcgtgttgatgatggccgatcaaatgatgactagaatcgaatatgtgcattctagaggattcctacacatggatataagacctgacaactttc

SEQ ID NO: 4981 - DNA, 426 bp, Glycine max
  modified_base (64)..(64): a, c, g, t, unknown, or other
  modified_base (407)..(407): a, c, g, t, unknown, or other
gccatggagcgcatcatctgcgccaagtacaagctaggtcgcaagatcggaagcggatccgtcngcgaaatctaccttgcgacgaatattgataccttcgagatcgtcgccgtcaagatcgagaacggtaaaacgaagcatccacaattgctttacgaggccaagctctacaatattcttcaaggaggaagtggcatcccgaacataaaatggtgcggcgtagacggggaggataatgtgcttgttatggacttgctgggacctagtcttgaggatctttttgtctactgtggaagaaagttctccctcaaatctgtgttaatgttggccgatcaaatgatgactagaatagaatatgtgcattctaaagggaatttcctacacagggatataaaacctgacaactntctcatgggacttggtcgg

SEQ ID NO: 4982 - DNA, 444 bp, Glycine max
ctttcccgaatcttttccaatctcccttcgccgatccttcgcgcgttccgccaccaccgccggcgttctcagctccccgcttccggaaaattatgtatagtgttttcttggctgcttcatagtcctccctcccttgccaccggtgaatatttgattggcaatcctgtccttattagtcaagttttagaatacaaagaagcttcaatggccaagaaaccaggaccaagatccagtaaattgtcagtgtacctttacattcctaatataattggatacatccgggttcttttaaactgttttgccttctcccaatgtttatcaaacaaaatcttattctctattctgtattttttaagctttgtatgtgatgctgctgatggctggtgtgcccgcaaatttaatcaagtgtcaacctttggagctgtgcttgacatggtaacagac

SEQ ID NO: 4983 - DNA, 359 bp, Glycine max
gcgcccacgcgtccgcccacgcgtccgacaaatccgaatcagtttccgtctctaaccgccgttaagtccgcggaggctcaaacctcgtgctggctaagaaacgagaaacacgtgctggatcgcctaggttcgtcgtctccgaggataattcgctgcttcggagacgactgcagtttcgagaacggcgttgagtactacaatctgttcctcgaatacgccgccggcgggagccttgccgatgaattgaagaatcacgatggccagatttccgagcatgaggctcgggaatacacgagggccatcgtggagggtctgagccacgtgcacaaaagcgggtttgttcactgcgacatatagct

SEQ ID NO: 4984 - DNA, 434 bp, Glycine max
ctaaccctaaccctaaccagaggtaatggattcagtgcctcgaagaagcagaggaggaggcgttttggaaaacctcgacaaggtcctaatgcgtcgcaactgagtctacgtcaccttcgtcatcgcaggcgccttcctcggagaacgggctgtggattacggagctcacaagatcggggagcacaataacgttgggtccaaatggcacctagatggaaaggaaaagatgcaaaagctaaaaaggatgcacaagctgaagcgctcaaggaacccatgtcaaagattgtatctcaacttcagtcttctctagttcaatcaaatacttgtggatttctctctggtagtagtgtacacttagcagtgggagcagaacaacttcatttgctcgataaagcatgctttggctcacctgtgagaacagttgaaaaggacaa

SEQ ID NO: 4985 - DNA, 457 bp, Glycine max
cccacgcgtccgcccacgcgtccgcccacgcgtccggttttggcgacactcattaatgatgttctagatctttctcgacttgaagatggtagcctcgaattagaaaagggaaaattcaaccttcatggtgttttgggagagatcgttgaactgataaaaccaatagcatctgtgaaaaagttacctatcaccttaattctgtctcctgatctgcctactcatgccattggtgatgaaaagcgacttacacaaactcttttgaatgttgtgggtaatgctgtcaaattcactaaggagggctatgtttctataagagtatcggttgcaaaaccagaatctttacaggattggcgacctccagagttttatccagcatctagtgatggccatttctacatacgagtccaggttaaggactctggatgtggcattccccacaagaaatccgcatctcttt

SEQ ID NO: 4986 - DNA, 188 bp, Glycine max
ggagaatgaaccagcttcagaaacatctcagtgatgaagatcatccgtatcataaatgtagtgcagggaactgggacactttggaagttagaccaaaagcaaaaggattagatacaaggagcgagcttctcaaattctatgaagaaaactattctgctaatctaatgcatctagttatatacacaaat

SEQ ID NO: 4987 - DNA, 428 bp, Glycine max
  modified_base (396)..(396): a, c, g, t, unknown, or other
cctgaggaggttggtcttattttgcgtgcattgggttttgacaattctaccaggatatatctggcagctggtgaattgtttggtggggatcgatttatgatgccatttcgaagtttgttccctcgacttgaaaatcattcttctgatgaaaactctgaagagcttgtcgaaaacactaagggattggccggatctgctgtggattacatggtctgtcttctttctgacattttcatgccaacttatgatggcccaagcaactttgccaacaatctccttggacatcgcctgtattatggcttacggactactatcagacctgatagacaatctcttgcccctatcttcatcgatagtgataaatgggcgaacggctggtttttaggaagctattangaaagtcatgctcaaaacaaacttttgagaac

SEQ ID NO: 4988 - DNA, 456 bp, Glycine max
cttctccaatgtccgattctctcaccgatcttgctccaaatacaaattcgttacatcctaacggagggttccgacgagcatggtggacggtccgacgagtccaggcaatggtagccatgagagtggcgagcatagccctcgctctaacgtgcgcgagtaggacaggtacctccccatcgctaacataagccccatcatgaagaaggcactacctacgaatggtaaaatcgccaaggacgccaaagagactgttcaggaatgcttatccgagtttttaagatcaacctttcagacacatgtattgagatggatggattacattcagcacaagcaagaatttgcaggtttatttgagaaaatattgttgcagaagcctggatttgagcccccggtaacacatcctgctggagttgtggaagctgatttaaaatcaaacaacactgagcaaagcgtaaa

SEQ ID NO: 4989 - DNA, 411 bp, Glycine max
tcctggacgcgcaggcctgggagagcctcaagtttcccgtgatagcgaagcctctcgttgccgacggcagcgccaagtcgcacaagatggcgctcgtgttcacgcgcgacgcactgaacaagctcaagccgccgatcgtgctgcaggagttcgtgaaccacggtggcgtgatcttcaaggtgtacgtggtgggcgagcacgtgcgctgcgtgaagcgcaagtccctccccgacgtgtccgacgaggagaatgcgctcggcggcgtttccgaggacctgatgtcgttctcgcaggtctccagcctcgccaacgtgaacgactgcgacggctattaccgtttgatggatctcgacgacgacaccgaaatgccccccgatggccttcgtcgtcgacatcgctgggggcctcagg

SEQ ID NO: 4990 - DNA, 402 bp, Glycine max
ccaccctcctggacccgcaggcctgggagagcctcaagtttcccgtgatagcgaagcctctcgttgccgacggcagcgccaagtcgcacaagatggcgctcgtgttcacgcgcgacgcactgaacaagctcaagccgccgatcgtgctgcaggagttcgtgaaccacggtggcgtgatcttcaaggtgtacgtggtgggcgagcacgtgcgctgcgtgaagcgcaagtccctccccgacgtgtccgacgaggagaaggcgctcggcggcgtttccgaggacctgatgtcgttctcgcaggtctgcaacctcgccaccgtgaacgactgcgacggctattaccgtttgatgcatctcgacgacgacaccgaaatgctccccgacgccttcgtcgtcgacatcg

SEQ ID NO: 4991 - DNA, 418 bp, Glycine max
  modified_base (303)..(303): a, c, g, t, unknown, or other
gtgcaatccatttaacagtgatctcacatatcggtcatgtgcagatggggaagtttcggtggacaacgctgctgatgtgtggaagaactatacttgtgaggtttcttcctgacgcatttgcaagacgcctggtcggatgaccccgaccatttatggccaaatggaggctgcaatgaatgtaagctatggcttatatcattatggtccattctcggctgatctacaagactgcactttcgtgcggaaaacattcacagacatcagcaatgatcactgacctggtctgcagagaaacagtcaatngatctatattggattgggtctggtatcagctgctcgaatgctgtctttgatcttttgggtcatctacgcatgagagctgcggtaccgtgtttatactaaacagctcattgagggc

SEQ ID NO: 4992 - DNA, 436 bp, Glycine max
cccacgcgtccgattagggtttgcagagttgcactttccctttcttccaatggatgcgttttgttttcgagtccctttctctatcacgccaaatcccaccgaatcgtgcgacgcggtatattggaatctcacttgggctctaattgatgcattcacaccgttagcggttgggctccaattctccaagatgagcaattctcactctgaaaatcatgatgaagtaactgtggcgggatttgaagttccaaaatctcctgattctagttataacaatgtctaccctggaaatgaagatgacgcaagggatccacctatggtcccttcacatttacagcatactttgctaaattatcctgctaatagagacactgcatgaactgttccattgcctcagaatgtgattctaaatcatctgtacatcgagaatagagaatca

SEQ ID NO: 4993 - DNA, 405 bp, Glycine max
caacgcgccactctctccctctcttttcctcctcttgctctctccaaacccgccatgtgctccgccgctccggtcaccgaactcagcgacgagtccgacttcgaatctctcctctctcccgacggccacatctccatctgcggcttcggctctctcctctccgagagaagcgcccgaagcactttccccgacttggccaacttccggaccgcacggttgaaccggttccgccgcgtcttcgcgcacgtcgctccggttttcttcgagcgcggcattgccaagccagaaaccatggagatttccagcttgagtgtggagccatgtgaaggagaaactcttggggtgacagtctttgagattagaaaatcggagattccaagatttatcaagaagggaggtgagttt

SEQ ID NO: 4994 - DNA, 361 bp, Glycine max
accacgcgtccgatttagttccccaaataaacaataccaatgttgacaagagtgtagcagccattcatgcaacggtgttcagctgtcttcgaaggcgtgaggttggggaacaactatatgatcctgttagaaatactgtgactgttgtttatgaggaatatagaaatcaatgtgcagccaattctttgagctcgaaaggaatgtttcaactgatccaaagaaaaggttcttcaaggaatctgatggctcttgttaatgatgatggatctgtggcaaaggcttggcctgttaatttagttgactgtaatgggaagcctgtatggtgccatggacctgagaatggagttggacatccaatgta

SEQ ID NO: 4995 - DNA, 425 bp, Glycine max
ctccgcccctggacaaaatcaaggtcctatttatgcaagctttgattcacattcctgttcgtttttccttcgcaccttttcttcttcttcgctccgtgccatgtcttcctctctcgctcttccttccactcccttcttcgccaatggaacaagaatcttcgctctcaagcactctctccctcgctctagggtttccatgagcgtctccgctggatctcaggcttccgttcaccaggctttgttcgccgattacaaggcctccacttcattcctcttcccgggccagggtgctcaagctgttggaatggggaaagaagctcaaaatgtgcctgctgctgcggttttgttcaacaaggcaaatgacattttggggtttgatcttcttgatatatgcatcaatgggccaaaagaaaagttagattcca

SEQ ID NO: 4996 - DNA, 182 bp, Glycine max
atgggtagtgaaggaagccagaatccctcttcctgctttatgatataatacaaataaaatagcgattccggaaatcatgtctgtagctgctctttttatttatgtgataaatgtaaaacgctttggtttggcttggccgttgtgcattaggttgaaaaaataaatgttataattactcagaa

SEQ ID NO: 4997 - DNA, 443 bp, Glycine max
gccatataatttttttttatttgaaataatgtccgggatcatccacaagattgaggagacccgccatgtgggagggcacaagaaagaggagcacaaaggagaacaccatggtgagcacaaaggtgaacacaaaggagaacaccatggtgagcacaaaggtgaacacaaaggagaacaacaccatggggagcacaaggagggacttgtggataagatcaaggacaagatccatggtgatggccatgacaagggtgagaaaaagaagaagaaggacaagaagaagaaggagcatggacatgaccatcatggtcatagcagcagcagtgacagtgattagatcttatatgttaagcaggtgtacggtacgatggtagtgaagagccagaatccctctttctgctttatgatataatacaaataaaatagcgattccggaaatcatg

SEQ ID NO: 4998 - DNA, 392 bp, Glycine max
  modified_base (356)..(356): a, c, g, t, unknown, or other
cccacgcgtccggagaacaacaccatggggagcacaaggagggacttgtggataagatcaaggacaagatccatggtgatggccatgacaagggtgagaaaaagaagaagaaggacaagaagaagaaggagcatggacatgaccatcatggtcatagcagcagcagtgacagtgattagatcttatatgttaagcaggtgtacggtacgatggtagtgaggagccagaatccctcttcctgctttatgatgtaatacaaataaaatagcgattccggaaatcatgtctgtagctgctctttttatttatgtgataaatgtaaaacgctttggtttggcttgggccgtgtgcattangttgaaaaaataaatgttataattactcagaatctc

SEQ ID NO: 4999 - DNA, 243 bp, Glycine max
  modified_base (48)..(49): a, c, g, t, unknown, or other
  modified_base (189)..(189): a, c, g, t, unknown, or other
  modified_base (203)..(203): a, c, g, t, unknown, or other
gaaataatgtgcgggatcatccacaagattgaagagagcctccgtgtnngaaggcacaagaaagaggagcacaaaggagaacaccatggtgagcacaaaggtgaacacaaaggagaacaccatggtgagcacaaaggtgaacacaaaggagaacaacaccatggggagcacaaagagggacttgtggantagatcaaggacangatccatggtgatggccatgacaagggtgagaaaaagaag

SEQ ID NO: 5000 - DNA, 462 bp, Glycine max
cccacgcgtccgattgttttttatttgaaataatgtccgggatcatccacaagattgaggagaccctgcatgtgggagggcacaagaaagaggagcacaaaggagaacaccatggtgagcacaaaggtgaacacaaaggagaacaccatggtgagcacaaaggtgaacacaaaggagaacaacaccatggggagcacaaggagggacttgtggataagatcaaggacaagatccatggtgatggccatgacaagggtgagaaaaagaagaagaaggacaagaagaagaaggagcatggacatgaccatcatggtcatagcagcagcagtgacagtgattagatcttatatgttaagcaggtgtacggtacgatggtagtgaagagccagaatccatcttcctgctttatgatataatacacataaaatagcgattccggaaatcatgtctgtagctgctctt

SEQ ID NO: 5001 - DNA, 433 bp, Glycine max
aaatgcaccgcctggatgccgttttaaattaaagtctgtccccttcagtaaaaacactatgtttggaattgaagatgttaaggagctgatctctatcttgtctgatggtgatggtcatgtggaatgttccatagttggtagctataaactggacacctcagattctgtttgcccttcaagagttcgtgcaatgttggcatcacgagcatgtcgatcatctattatggttggtgatgcacttggaagaaatgaaatgcagaagatacttgagcatatggctgagctgaaatccccatggaattgtccccatggcagaccaaccatgcgccatttagtcgacttaacaaaaattcacaagagctatgaacttacaatgcagatgtaattaataatggacttttttccctaatccccatcgttaacttagaagttc

SEQ ID NO: 5002 - DNA, 392 bp, Glycine max
tttaaattaaagtctgtccccttcattggacactggatttggaattgaagatgttaacgagctgatctctatcttgtctgatggtgattgtcatgtagaatgttccatagttggtagctataaactggacacctcagattctgtttgcccttcaagaattcgtgcaatgttggcatcacgagcatgtcgatcatctattatggttggtgatgcacttggaagaaatgaaatgcagaagatacttgagcatatggctgaactgaaatccccatggaattgtccccatggcataccaaccatgcgccatttaatccacttaacaaaaattcacaagagctatgaacttacaatgcacatgtaattaataatggacttttttccctaatacccat

SEQ ID NO: 5003 - DNA, 347 bp, Glycine max
ggagattggatcggatagctaaggatggtgcacttcacaaaaaattgattcaggcagaaatagtaactgtagaagatttcctacgtcttcttgttcgtgagccacaaaagttaagaagtatacttggtagtggaatgtccaatagaatgtgggagaatactgtggagcatgccaagacatgtgtcttgggtggcaagctctttgtatactacactgatgaaaccaatagtgctggcattgtgttcaacaatatatacgagctgagaggcctcatttctgatggccaatttttctctttggaatcacttgctccaaatcagaagatgtctggagattccttggtgaag

SEQ ID NO: 5004 - DNA, 406 bp, Glycine max
cccacgcgtccgtgttaggttacctctgtgacatttgtgctgctagttcatataggggcggctgacaccgagaaggaaagcaggaaacaaacaaaaaggagcagatgggtagctcaggtttctcatggaaattggcggatcatccaaagcttccaaagggtaagactgtggctgctgtggtattggatggttgacgagaggccacacccaatgagtacaactgcatccacaaggctgaaacaccctgcatggattcacttaaaaagggtgctcctgaacggtggagattggtcagggctcatggtactgctgtaggacttccaacagaagatgacatgggcaatagtgaagttggtcacaatgcccttggggctggtcgcatatttgctcagggtgctaagcttgt

SEQ ID NO: 5005 - DNA, 410 bp, Glycine max
ctttggctggctacaaaccgtctcagactcagttactctttcctgcaaagcttgttgatactgtgaacacagagcatattgagctggatttctctgatgtctttggtcctgttacgttagatttgaataacattgattccactaccagtgagcctatggaagaagtgaacgagctggtttatgatgacccaccagtgatttacactcgctcacattctctggttggcccttcaacttgtgttagtcaatcacttaagcttggcaaactcaccatacatgagactgaggattcattggaactagtggagcatgtcaatggagaggccattaaagacatcaaagaatcttcctttgttgaagaatcattgaaagatgaagaatggaatctcatgaagatcacagagttagca

SEQ ID NO: 5006 - DNA, 409 bp, Glycine max
cccacgcgtccgctttgttgccataggtactgttgttttagcagagcacacgcaatataccgggaatttcagtaccattgccgttcagtgcctgcagaagctgccatcaaatagcagcaaatacacgtattcctgtgatggtcacaccttcaatttcctcctagacaatggatttgttttccttgttgttgctgatgaatcgattggcaggagtgttccttttgtatttcttgaacgggtgaaggatgactttatgaagcgctatggtgctagcattaagaatgacggtgcccatccacttgccgatgatgaggacgatgacgatttgtttgaggacagatttagcattgcatataatcttgacagagaatttggaccagcactcaaggagcatatgcagtattgcatg

SEQ ID NO: 5007 - DNA, 403 bp, Glycine max
cacgatagcccttagagatattgctatacccaaggaagatacctcgtatagtcttgtcttcaagcttgtgcctcttcacgtctggaatatgaatgtagcatatagatccaaatacccttaggtgctttgcaaatggttttttcccgttccaagcttcaatttgagtcttgtcttttacagacttagttggacatctgttaagtatgtaaacaacagtgtagactgcttcagcccagaatgtgttaggtagtcccttctccttgagcatcgatctagccatttccataactgtgcgattctttctctcggacactccattttgttgaggagaatatgtgactgtaagttgtcgctcaatgccttcatcctcacaaaatctttcaaactcgcaagaggtgtactc

SEQ ID NO: 5008 - DNA, 433 bp, Glycine max
ggattttcatttttcactacatgcaatcttctcaactcagcaggttcctttcttctacttcaggttcttgagatataggagcggttcaagctgtgtcccgtgaggcttatttcacagccattgacggtaccggggctgataatagtggaggtttgccaccagaaatttcaagcgccaagaaaaatcgtttgccaggtcttaaaggagagaccagtaacaaatctcttgaggccatggtgaagagcacgggcaaagagtccttacagtggggagtggctgcaggattgtattcaggtctcacatatgggctaaaggaagctcgtggagctcatgactggaaaaacagtgcagttgctggagcaatcactggggcgacccttgcacttacattggaagactccactcatgagcagattgtgcaatgtgccatcac

SEQ ID NO: 5009 - DNA, 453 bp, Glycine max
  modified_base (367)..(367): a, c, g, t, unknown, or other
cagaagcctggttctttgcggagtgaaagcagctttgcgctagtgacaggaaacacatgtatggattcagcagagaagaggctcaatgagcttggttacaagcaagaactgagaagagaaatgactgtgtttaagactctggcaatatcattgtccacaatgacccttttcactggaattacacctctctatggttctagtcttcaatatgcaggccctgcaactcttgtttgggggtggatagtggtttctttcttcacttggtttgttgggattgcaatggctgagatatgctcatccttcccgacgactggttctctgtacttttgggctgcccatttagctggtccaaaatggggaccatttntcttcatggtgctgtgctttggcttgagaccatagggcttatagctgggatagggactcaggcatatgcaggttcacaaacgttgc

SEQ ID NO: 5010 - DNA, 413 bp, Glycine max
cttcatgagacagccccgcatctggtggattccatatgtgcatatcgtggtggctacggggcaaaggaaagaagaaaaatagagagttcattttttggtggtaaaatatgtggtgttgctgcaactaatgctcttgagttgggcattgatgttggagaaattgatgccactctgcatctaggatttcctggtaatattgcaagcttgtggcaacaagctggtagaggtgggaggagagatagaccatctcttgctgtctatgttgcatttggtgggcctcttgatcaatacttcatgaaaaatcccaagaaactctttgaaagaccaattgaatgttgccatgttgattcccaaaacaagcaggttcttgaacaacatttggtctgcgcagctcatgaacaccctttgagtgt

SEQ ID NO: 5011 - DNA, 393 bp, Glycine max
agcgccaaccacctccatccgaattgggaatcgatttgaaggcaggaggtaagtccaggaaaagcaaacgtacagcccccaaatccaatgatattaacctcaagctcctcgtcaagctgtaccgttttcttgttcggaggactggtagtaacttcaatgccgtcatcctcaaacgccttttcatgagcaaggtcaacaagcccccgctatccctctctagattgattcgttacaccaagggaaaggaggataagatagctgtggtagtcggtgccgtgaccgatgacattagggtgtatgaagtccctgctctgaaggtaactgccctgaggttcactgaaactgccagagctagaattgagaaagctggtggcgaatgcctcacctttgatc

SEQ ID NO: 5012 - DNA, 439 bp, Glycine max
cccacgcgtccgcttggttgcagcttcagcagcagcggcaagcaactccatccgcaatgggaatcgatttgaaggcaggaggtaagtccaagaagaccaaacgtacagcccccaaatccaatgatatttacctcaagctcctcgtcaagctgtaccgttttcttgttcggaggactggtagtaacttcaatgccgtcatcctcaaacgccttttcatgagcaaggtcaacaagcccccgctatccctctctagattgattcgttacaccaagggaaaggaggataagatagctgtggtagtcggggccgtgaccgatgacattagggtgtatgaagtccctgctctgaaggtaactgccctgaggttcactgaaactgccagagctagaattgagaaggctggtggcgaatgcctcacctttgatcaactggctcttaa

SEQ ID NO: 5013 - DNA, 430 bp, Glycine max
ttggttgcagcttcagcagcagcggcaagcaactccatccgcaatgggaatcgatttgaaggcaggaggtaagtccaagaagaccaaacgtacagcccccaaatccaatgatatttacctcaagctcctcgtcaagctgtaccgttttcttgttcggaggactggtagtaacttcaatgccgtcatcctcaaacgccttttcatgagcaaggtcaacaagcccccgctatccctctctagattgattcgttacaccaagggaaaggaagataagatagctgtggtagtcggggccgtgaccgatgacattagggtgtatgaagtccctgctctgaaggtaactgccctgaggttcactgaaactgccagagctagaattgagaaggctggtggcgaatgcctcacctttgatcaactggctcttagagct

SEQ ID NO: 5014 - DNA, 414 bp, Glycine max
gtgttctgtttgtgctgccggattcgtatgttgatcctgagaacaaggactatggtgctgaattatttgtgaatggagagatcgtccagagatcacctgaaagacagagaagggtggaaccacagccacaaaggcatcaggacagaccacgatacaatgatagaacaaggtatgtccggcgcagagaaaacatgcagtgaaggaccaatttgagatagggagagggatgtgatgtacatacactatggaagtactttgttacatgcactattttagtcttgcctttggagacattccatatatttccggtggggtaactcaaatgtttgttgtcaaacttctatggctgtatcagatggacacctcttcgttatcatttttactataaacataatgttggactcttttcacgtc

SEQ ID NO: 5015 - DNA, 435 bp, Glycine max
acgcgtcaacttgtgacactcagttactctctctctctctggagcgtcgtcgtttcgttagggcacaaaaccccttttcggatcggtggagcaaggcctcgccggcgagattcccgaggctgttcaatcagcgatcgagcaccggcgaaaagcggcgaagatgaaggttttcgtgaagactctcaagggcacgcacttcgaaattgaagtgaacccttcggacacgctttctgaagtgaagaaaaatatagaaactgttcagggtgcagatgtctatcctgctgcacagcaaatgcttattcatcaaggaaaagttctaaaggatggtactactttggaggaaaataaagtacctgaaaatagttttattgtaattatgttatcaaagactaagagttcatctggtgaaggatctactacttcaactgctccttc

SEQ ID NO: 5016 - DNA, 418 bp, Glycine max
cttttatttcgttcctctattcgctacgtcgtcgttagggtcgtcttcggatcggtggaacttgactgcgccggcgtgaattccgacgctgcgagtggcaccgaattgcgatagcggtgacgaatatgaaggttttcgttaagactctcaaaggcactcacttcgaaatcgaagtgacgccgcaagacacggtttctgaagtgaagaaaaatatagaaactgttcagggtgcagatgtctatcctgctgcacagcaaatgctaattcatcaagggaaagttcttagggatgcttctaccttggaggagaataaagtagttgaaaatactttcattgtaattatgctatcaaagagtaagagcccatccggtgaaggatctactactttaactgctccatcaaccaaggccccacagac

SEQ ID NO: 5017 - DNA, 410 bp, Glycine max
caggctagcacaatcttgatatgggtggagggagctgggacagggatactgtcgtccgggctcttcgagcatgcctacaacaaccctgagagagctgtggaatatttgtatacaggtatccttgatcaagctgaaactacaattgtaaccaggacgcctgtaagtgctcaacctacaaatcctactgatgatgctgcacagacagcacaacctgctgaacttacctcagatggacctaacgctaatcctttagacctttgtccccagggtcttcgtaatgtgggttatggtgctgctggtgctggttcatcggactgtttacgcaacagtcaacaatggcaagcctcgcgagctatggtgcatgctaatccacatatattgcactcaatgctacaagagcttgacaagca

SEQ ID NO: 5018 - DNA, 443 bp, Glycine max
ctttcttcgctacgtcgtcgttagggtcttcttcggatcggtggaacttgaccctgccggcgtgaattccgacgctactcgtggcgccgaattgctatagcggtgacgaatatgaaggttttcgttaagactctcaaaggcactcacttcgaaatcgaagtgacgccgcaagacacggtttctgaagtgaaaaaaaatatagaaactgttcagggtgcagatgtctatcctgctgcacagcaaatgctaattcatcaagggaaagttcttagggatgctactaccttggaggagaataaagtagccgaaaatactttcattgtaattatgctatcaaagagtaagagcacatctggtgaaggatctactacttcaactgcattatcaaccaaggctccacagacaagtacaggtcccgcttcaacccctccagtgtcagtagc

SEQ ID NO: 5019 - DNA, 313 bp, Glycine max
ctcagttactctctctctctctggagcgtcttcgtttcgttagggcacaaaacccctttggggatcggtggagcaaggcctcgccggcgagattcccgaggctgttcaatcagcgatcgagcaccggcgaaaagcggcgaagatgaaggttttcgtgaagactctcaagggcacgcacttcgaaattgaagtgaacccttcggacacgctttctgaagtgaagaaaaatatagaaactgttcatggtgcagatgtctatcctgctgcacagcaaatgcttattcatcaaggaaaaagtctaaaggatggtact

SEQ ID NO: 5020 - DNA, 426 bp, Glycine max
gtcgtttcggggcattcttgtgcactcagttactctctctctctctggagcgtcgtcggttcggtagggcacaaaacccctttgcggatcggtggagcaaggcctcgccggcgagattcccgaggctgttcaatcagcgatcgagcaccggcgaaaagcggcgaagatgaaggttttcgtgaagactctcaagggcacgcacttcgaaattgaagtgaacccttcggacacgctttctgaagtgaagaaaaatatagaaactgttcagggtgcagatgtctatcctgctgcacagcaaatgcttattcatcaaggaaaagttctaaaggatggtactactttggaagaaaataaagtagctgaaaatagttttattggaattatgttatcaaagactaagagttcatctggtgaaggatctactac

SEQ ID NO: 5021 - DNA, 462 bp, Glycine max
cgtaggagccttacctctctctctctctctctctctctctccattccgtagtatccctctgtgcgacccttttacttagcattccctgtttccggtattcgctccctttttttttctgcattctgtctggttttacttagatctctgtcccgcaccagatctggtgcagggtgagagggttgggttcattaattttgtatcaatcttccttctgagcggtaggcgtggggataccagagtcttttcgggaagcaagagagggttctctccgttttcaatagatctctcactgtcttcttttgagggggaagccggggcctcggcctctgcggctgtcaaagcccccaccttcacagccctatcaacaaaaccctaaccctattgttctcttcttcattatctaattcaattttgatcgtcgccgtcactagagatgcctgtcctggcttgttgcgtggatgc

SEQ ID NO: 5022 - DNA, 413 bp, Glycine max
  modified_base (185)..(185): a, c, g, t, unknown, or other
cccacgcgtccgggacccttatctctctctctctctatctctcccgaattattgttcgtgcgggccttttacttagtgttccctgtttccggtattcgctcccttttttctgcattctggttttacttagatctctgtcccgcaccagatctggtgcagggtgagagggttgggttcattaattntgtatcaatcttccttctgagcggtaggcgtggggataccagagtcttttcgggaagcaggagagggttctctccgttttcaatagatctctcactgtcttcttttgagggggaagccggggcctcggcctcggcggctttcaaagcccccaccttcacagccctatcaacaaaaaaccctaaccctatttttttcttcattttctaattcttttttgatcgtcgccg

SEQ ID NO: 5023 - DNA, 436 bp, Glycine max
aaaaaaataaaaatcccacttccttttgcttctttttttgttctttgttttttgtttggtgagaaactgcgagaagaaagtaaaaggttcaatttttacccttttttcttcccagaagcgatctctgaagccgacccattttggaattcggaaaacccagtgctgatcgctctctgggtgttcccaaaatgaagcttcggagatcttcgctgtgcgtctttctagggtttctggtgctgttcctttcgccgccgccatctatggcgaaattcgtggtggagaagaacagcttgacggtgacgtcgccggacgacatcaagggcacgcacgatagcgcgattgggaacttcgggataccccaatacggtggcagcatggccgggaacgtgttgtacccaaaggacaacaaatagggttgcaaggagttcgatgagta

SEQ ID NO: 5024 - DNA, 397 bp, Glycine max
cgtttgcctgcaaaatatatcagattcatgatctgaatgatgtgtttgcgtcgttgccgatgtctgatgttgatccattcttgagtgtcagtgatgattatcatgtatatgctaagatccatgtggatgtgagagaatatggtactgctgctgataatcagttagcatgttcaatgttgtcagagttacagaacaaaatacgggaatgtcaatcgatcataagggatgctttggttcataatttagctaacgtcactgagctggatgcagatgaactggctatgctattgtcagagaaattcaagcctgatgaagagtttgtgttcggtccacagtcaatgcttgatcagaatcaaataatttttcattcccaggagtcactgtcatttgatgggga

SEQ ID NO: 5025 - DNA, 400 bp, Glycine max
cgttcctttccgatgggtcgtatggtatttgtgattggtggagatttgacggcacgcgcattatcaaaatccttactgtgtttctttcgcggtcattgcctcttttctgttcgtggcttcaggattattttaattctgcagctccgaaatatagataaaccaatcatcaggctgtacaggagaatggcagaatctatatctagcttctggggtccagtcacgttcaccaaagacgtgttgtgaattaaattatgcttattgctcttacattgctgaattctttaatacaacatccagcattgcaacaatactttcggctctgattgtgcttataaatgcattaagacaacagattcgagaaaagattgagggttcttcatgtttcagatatgacacttgc

SEQ ID NO: 5026 - DNA, 466 bp, Glycine max
gactgccactgctgcattgcatagtgaattctttacaacaaaaccatatgcttgggagccctctatccttccaaaatatcctcccagcaaggagatggatgcaaagctacgggatgaagaagctagaagattgagagcagctggtaaagctaatgctgatggtgtcaagaaatctcgtccacgtgagcgagttgggaggggagttccagttccagaggccaatgctgaactgcaagcaaatattgatagaccgcggctgatcacacatgcaaatgctaagagcaagagtgagaagtttcctcctccccaccaagatggagctctaggctatcctttgggttcttcacatcacatggatccagtttttgatccccctgatgttccatttagttctacaaacttatcacaacctatagcaaatatccaaacctggtctggcccgttggtagatccttctggtgtgggt

SEQ ID NO: 5027 - DNA, 406 bp, Glycine max
cccacgcgtccgatttacctcttgagttaaaatgggatgatacatgtcttgataaaggtgtttcttgatctttatcattaacaaagtatatgtgaggttgtcttatgtttgattagtaagatacaagtgtctaaatattatgcttggctagaccctatctaagtttatacttgcactaattctgaaattcacatttattgatgaagaaacattttttgtttgattttcttttccagcctacaaatgagagagtacatcagattatttcaaggactgcaacatttgtcagcaaacattgaagccaatcagaaatcatcctgagggtgaaacaaggagacaatccaacttttggattcctaatgcctgatcatcatcttcatgcgtattttaagtttctcgttgatca

SEQ ID NO: 5028 - DNA, 170 bp, Glycine max
gcgttcgcatgactaatcgggtggttaccctttggtaccgacctcttgagttgcttcttggtgcccgcagatattgggcggccattgacctttggagtgttggttgcattttatgagagttattggcagggaagcctattttgcctggtcgtacggaggtggaacaactg

SEQ ID NO: 5029 - DNA, 433 bp, Glycine max
cccacgcgtcctcccacgcgtccgcggacgcgtgggtttttctgaaaacttaatttctgggtgattttctccctcacttttatttctctctttctggattattctctctgtgtagattgtggcgtgttctcgatgatgatgatgatgagccgcagcggcgccaaccgggtagcgaacaccgcaatgtttgtggcgaagggtttaagcggcgaagttggtggtttaagagcattatatggcggtggtgtgaggagtgagagcactttggctttgtcagagaaggaaaagattgagaagaaggttggtttgtcttctgctggtgggaacaaagaagaaaaagtgatcgtgagttattggggcattcaaccctccaagatcacataaaaagatggcacagaatggaagtggaattgctttaagccatgggagacat

SEQ ID NO: 5030 - DNA, 464 bp, Glycine max
aattgatgcttgtgctgttaaaggtggcgtaaaatttggtgattatcaatgtaataatgcgatgggtatatggtctaagatgaagggaaagcagacaggatttaggggtcccccagcaattggtcaggctatcgttaacaatcttcctccatctgaaatgatagattcgtgctctgtagctggtcctggatttgtcaatgttgtattgtcaaagaagtggatagctgagagcttacagagaatgctaattgatggtatcaattcatgggcacctcgacttccagtcaagagggctttgattgatttttcctcacctaatatagcaaaggaaatgcatgttggccacctgagatctaccattatcggtgatacattagctcgtatgcttgaattttcacgtgtagagtgtgtaatccgtagaaatcatgttggtgactggggaacacagtttgggatgctgatta

SEQ ID NO: 5031 - DNA, 471 bp, Glycine max
aaacaattcaagaagagttcgtaggaggactatagttgatgttgatctagaagatcaggctaggctcatcaaacgccgaagagaattgccaaatctgattattaattgtgataagtatataaatttggaaggcggtatcagttccatggatcaaagttttaaaaagccacctgaacctacaaaggagcttgtcttcaactgtccaatatgtatgggccctatggtacatgaaatgtcgacaagatgtggtcatattttttgcaaggattgcatcaaagctgctataagtgctcatggtaaatgccctacctgtagaaaaaaggttgttgcgaaagatcttataagggtgtatctcccatcgactagttagaggctctccgtggaagctgtaaagaggagaacaaggattggaagacacgtcattgtactttggacaatactgaatggctgtgttgtttctaatatgttccc

SEQ ID NO: 5032 - DNA, 402 bp, Glycine max
cgataatgagcaaaaagagaaaggcatctcaaacaagaagaaaaagcttcaacggagggtgaaaattgctgaactgaaacaaatttgcttgaggccagatgttgttgaggtgtgggatgctactgcatcagacccaaagttgctggtgttcttgaagtcttatcggaatactgtacctgtacctaggcattggtgtcagaagagaaaatttttacagggtaaacgaggtatagagaaaccaccctttcagcttcctgatttcattgctgccactggaattgagaaaatcagacaggcttatattgagaaagaggatagtaagaagctgaaacaaaagcaaagggagcgcatgcaaccaaaaatggggaaaatggatatagattatcaggttcttcatgatgc

SEQ ID NO: 5033 - DNA, 471 bp, Glycine max
gaaaaaggggttagggtttgttcttgtgatcgaagctaagcgaagcaaaatgggtggatcagggagggacgtgaagtcgaagggcgaggtcgacgaggtggtggcgagtggctctccggttatcctccacttctgggcgtcctggtgcgaagcttccaagcacatggaccaactcttctctcacctttccactgatttccccaacgcccgcttcttaagggtcgaggccgaagagcaacccgagatttctgaggcttactccgtctccgctgttcctttctttgccttctgcaaggatgggaagacttttgatacattggaaggagctgatccgtcaagcttagccaataaggttgctaaagtagcaggctcaattaaccctggagaagctgcatctactgccagtcttgggatggctgcaagggcttctggtcttgaaacggtgaaagaattagcaaaagacaatgattc

SEQ ID NO: 5034 - DNA, 454 bp, Glycine max
  modified_base (397)..(397): a, c, g, t, unknown, or other
attttgtcgtagagggatccctctggtgtaggattgtgtgtatcttcggcgatggaagcgtgtttcggatcaagacactagtatatgcactcactgtgatcgggctattcctgctgcaaatattgacttgcattatgctcattgctctcggaagcttgaaaaatgcaaagtttgtggtgatatggttcccagaaaaaatgcggaggatcactatctaagcacccatgcaccggtttcttgttcattatgcagtgagacaatggagcgtgatattttagatatccataaaggtgaaaattgccctcaaaggattgtcacttgtcagttctgtgagtttccattgccagcaattgatctggccgagcatcaggaagtatgcgggaatcgaacagagctntgtcacctttgtaacaaatatgttagactgcgtgaaagattcagccatgaagctcga

SEQ ID NO: 5035 - DNA, 422 bp, Glycine max
attttgtcgtagagggatccctctggtgtaggattgtgtgtatcttcagcgatggaaggtgtttcggatcaagacagtagtatatgcactcactgtgatcgggctattcctgctgcaaatattgacttgcattatgctcattgctctcggaagcttgaaaaatgcaaagtttgtggtgatatggttcccagaaaaaatgcggaggatcactatctaagcacccatgcaccggtttcttgttcattatgcagtgagacaatggagcgtgatattttagatatccataaaggtgaaaattgccctcaaaggattgtcacttgtcagttctgagagtttccattgccagcaattgatctggccgagcatcaagaagtatgcgggaatcgaacagagctttggcacctttgttacatatatggtag

SEQ ID NO: 5036 - DNA, 477 bp, Glycine max
  modified_base (416)..(416): a, c, g, t, unknown, or other
tcgagagagagagagagagcattgcattggcgagaccaccgcggtggagcgagcgagcgagcaagcgacgacgaaaattgaattgctcgtgcgcgtgcgtgcgtgatcgtttgattgtttggatcttgtggtcgatcgaggacgatgtcggagatggcgagcccagatcccgagggactcgacggagtccggatgacgtggaacgtgtggccgcggacgaaggtggaatcaagcaagtgcgtgatccctctggcggcgactgtggctctgatccgtccccaccctgacatcccccgcctaccgtacgcccctctccgttgtaagacctgctcctccgtcctcaaccccttctgccgcgtcgacttcaccgtcaagatctggatctgccccttctgctaccagcgcaaccacttccnccctcactaccacgccatctccgaaaccaacttacccggcgaactctacccccaatacacc

SEQ ID NO: 5037 - DNA, 442 bp, Glycine max
  modified_base (419)..(419): a, c, g, t, unknown, or other
tcgcggacgcgtgggcaaggagcctctcctctggcgcaccatcgacatgcgcaattggggcgagattggattggatttccatttattggccatgtgccaccgcgcaattgactacagctccggccacttgctccatatcaatgtcgagtatttcggcaccgatgatctcctccaccacatcacccattctacaagtaatctacgaagcctacgtcttgcatgttgctatcagatttcagatgaaggactgtgtgaaattgcagaaaagcttcctcagctggaggagcttgatatatcaatcagcaacttaaccaaggaccctctagaagctattggccagtgttgcccacacttaaaaacactgaaattcaatatggaaagttacagacgttcgcacattgagtgtgatgaggaggctnttgctattgcagaaaccatgccc

SEQ ID NO: 5038 - DNA, 451 bp, Glycine max
  modified_base (427)..(427): a, c, g, t, unknown, or other
gaaccatttaagtcagaaagagtttggggtgtgcttgagcttgatgaaggagcttctctctggcgattgttctgaccctttgctggtttcccagcttgggtacatgcagttgcagattggggacttggagggtgcgaaagtttcgttcttgaaggtggaggagttggggaagagtaatgggtcgttgagcgaggttgagtttaggaaccttgtgaataggaacaaggcgttggtgtatttggttgggaaggattatgtgtcggcggtgagggagtacgaggagtgcattgagagggacagtgcggatgttgtggcggtgaacaacaaggctctgtgtttgatgtatctgagggacttgtcggattctattaaggtgttggagagtgcgcttgagagagttcccactgtggctctcaatgagactctngttgtcaatttgtgtagtatgtat

SEQ ID NO: 5039 - DNA, 410 bp, Glycine max
attttccagaaaaaaaaaaaaaaaaagatagatagaaatggcgcatattcctcagacccccaccaatgacgcggcggcttctggtgcaaatccgtcgatgacgaccatctcgttgtacgtcggggatcttgaccacgacgtcaacgatccgcagctctatgatctcttcaaccaggttgcccaagtcgtttccgttcgaatttgcagggacgtggccacccaacaatcccttggttacggctacgtcaatttcagcaacgctcgagatgccgcaaaagcaatggatgtgctgaatttcactccgctaaatggcaaaaccattagaataatgtactctattcgggaccctagtgctcggaagagtggtgcagctaatgttttcataaagaatttggacaaggcaatcgatc

SEQ ID NO: 5040 - DNA, 448 bp, Glycine max
cccacgcgtccggtttctcccgcaaaatgataggaaagaaattcttatgcgttgttgtagcggtggcctttgttatgataacaaaggtgccccaaaatgtgagtgctcaaaactgtggttgtgctgaagggttatgttgcagccaacatgggtattgtggtaacggtgaggagtactgcggcacagggtgcaagcagggtccttgttattcgagcacaccaagtactaacaatgttaatgtggctgacattgtcacaccacaattcttcagtggcataattgatcaggctgactctggctgtgctggcaagaacttttactcacgagatgcttttcttaatgctctcaattcctataatgactttggtagacttggttcccaggatgactccaagcgcgagattgcagctgcttttgcccatttcacacatgaaactggacatttttg

SEQ ID NO: 5041 - DNA, 419 bp, Glycine max
cccgcaaaatgataggaaagaaattcttatgcgttgttgtagcggtggcctttgttatgataacagaggtgccccaaaatgtgagtgctcaaaactgtggttgtgctgaagggttatgttgcagccaacatgggtattgtggtaacggtgaggagtactgcggtacagggtgcaagcagggtccttgttattcgagcacaccaagtactaacaatgttaatgtggctgacattgtcacaccacaattcttcagtggcataattgatcaggctgactctggctgtgctggcaagaacttttactcacgagatgcttttcttaatgctctcaattcctataatgactctggtagacttggttcccaggatgactactagcgcgagattgcagctgctttttgccatttcacacatgaaact

SEQ ID NO: 5042 - DNA, 435 bp, Glycine max
cccacgcgttcggaaattcttatgcgttgttgtagcggtggcctttgttatgatgacagaggtgccccaaaatgtgagtgctcaaaactgtggttgtgctgaagggttatgttgcagccaacatgggtattgtggtaacggtgaggagtactgcggtacagggtgcaagcagggtccttgttattcgagcacaccaagtactaacaatgttaatgtggctgacattgtcacaccacaattcttcagtggcataattgatcatgctgactctggctgtgctggcaagaacttttactcacgagatgcttttcttaatgctctcaattcctataatgactttggtagacttggttcccatgatgactcctagcgcgagattgcaactgcttttgcccatttcacacatgaaactggacatttttgccacattgaaga

SEQ ID NO: 5043 - DNA, 447 bp, Glycine max
atgtgggtgttggagggtacggttatccagctttagtggcccttaaccttaagaaagctgtgtatgctcctctcaagagtgcttttgaacttgaccagattatagaatttgtgaaagaagctggacgtggaggcaaagggaatttgcccctgcaaggcactccaaccattggtaagacagaaccatgggatggaaaagatggagaaataattgaagaagatgaattttctcttgaagaactaatgggggaagatgcttcaagcaaggatgagctatgatcaatttattagggatttataccaaattaaaggttcaaccaccgatttttacgttacaggcaacttgtttctcatgattattgtgatcactattctggttttccatgtgtcaagttaaaaaaccagtctagtgatgagtgatcttctctgaggattttgatatatgtca

SEQ ID NO: 5044 - DNA, 403 bp, Glycine max
caaggccaccgttttcgccaccgacacgattctgtccactctcatgtgtgcccctcgggctagttattcctgggacattggcgtccaacgtgtcggaaacaagcttttctttgataagcgcgatgggtcgcagctcgatttgctctctggtcatgaaacctcgcaagaaccattgcctgagtcgaaggatgatattaactctggccattcgttgagcgttgaggctgcttatatcaaccagaatttctctcagcaggtgctcattatggatgggaataagggtactcttgatgaggctaacccttttgctaatgaaggtgatgaggttgctgctgtcgcttataggtatacgaggtggaagctcgatgatgatatgtatcttgttgcgaggtgtgaggatcat

SEQ ID NO: 5045 - DNA, 423 bp, Glycine max
  modified_base (395)..(395): a, c, g, t, unknown, or other
gaacctcagagatcttcaacgcgaattgtagaacaaagccaatgatctcagcaagcttgaaaaggaaattgcgaagaatcaccaaatgagaaagaaatacacggtccagcttggcgagaacgagctcgtccttaaggaactggatttattgaaagacgacgcaaatgtttataagttgattgggccagtacttgttaagcaagatttggccgaggccaatgcaaatgtccgcaagagaatcgaatacatctcagctgaattgaagcgtctggatgccactgttcaagatttggaagagaagcaaaatagcaagaaagatacgatactaaaattgcaacaaaggattcaatcatttcaggctgggaaaggcaaggcgtaattttcccttacatatnggtccaggcattgggatttaaccgggct

SEQ ID NO: 5046 - DNA, 305 bp, Glycine max
gcctgcagaaccacgtgcttcagttttggacaaggttaagttaggagagcctgtatacggggatgggtattatgctgaaaaatttggtgcattggatccggataagattgacaaaatcaagaaagatacactcttaaaatatgtacaaggcctttgttgggtttgttggtactactaccaagggtgtatagctcatggtaatggtactacctataccattatgctccttctgcttctgatcttaaagatctacatgatctggagataacattacttttgcgagaaccatgtaaaccatttgatca

SEQ ID NO: 5047 - DNA, 419 bp, Glycine max
cccacgcgtccggctacacactttcttcaacggtaaatccctctctgcacttcgtctctgggagggattaatcattattttccgcgcaccaaacagccaaagtcaattttcttctctcttctaagacacaccaatgccagagaagaagaacaagaaagtttctttcaccgaagaagatgctgttacgctcatgcagaggtacgacgcaactacggtgttcactttacttcaggaagtggcgcattaccctcaccccaagattgattggtgcgagttggtgaagaaaagcgcgactgagatttctaacgccagagaatatcaaatgctatggcggcacttggcgtatcgccattctttgcctgaaattttcgaagatggggatgaacctttggatgatgatagtgacctaaagtgtgagc

SEQ ID NO: 5048 - DNA, 455 bp, Glycine max
cccacgcgtccgcaagaaggctgaaaagctagccggaacaattcagcctggaaattattggtgtgattttcgggctggattttggggtgtcatgggagggccttgtcttggaataattcctccatttatagaagagttcaatcatcccctcccagacaaatgttctggtgggagtactggtgttttagtaaatggtagggaacttcaccaaaaagacttagatttgctatctgggagaggactccccacagatatagatagatcttatatcattgaaatttctgggagagtcctggatgaagacacaggtgaagagctggacagcctaggcaaacttgcaccaacggtggagaaagtaaagcatggatttggcatgaaagcacctagagcagctacataagctaaatgtataaaaaaagattctgcgacaggttggagaaggtgaattttgctcc

SEQ ID NO: 5049 - DNA, 387 bp, Glycine max
cccacgcgtccgatccacagctattgtatgtagcaaagttctatagtattcttcaaggagaaagtggtattccaagtatgaagtggtgtggcactgatggagacaataatgttctagttattgatcttctgggacggagtcttgaagacttttttgtctactgcaggaggaagttttcattaaaaacagttttgatgttggccgatcagatgctgacaagaatagagtgcatgcattccaaagtatttacgcatagagacatataaccagatgacttccttatgggtcttgtgatgaaatcaaatcagcttatattattgatttcggactatcaaaaagatatatggaccctaacacagacgaacatattccttacagagagaataa

SEQ ID NO: 5050 - DNA, 383 bp, Glycine max
agcagcacttgctttcctttcctttgctgaccaaacttcactatgctatctatcgtcggtatgcgttggccagaacaggaatcctcaccttgtgccctctgctccctttcatcaaaacctctccaaaactataccttcctgtcaccgagcgcactgtaagtgacaccaaaaactggcgcgatgcgcctgctttgatagtcattgctggagggttgacttcaatggcaacagccggttccattctggctgtgatcacataggtttcttcctcggcaaacatttgtgaccgtgcgcgtgacaacttgagttctcacaagatgggaaattgttattgatggggggttaaaatttgatggttggcccatggaggggtaccatggggg

SEQ ID NO: 5051 - DNA, 410 bp, Glycine max
  modified_base (363)..(363): a, c, g, t, unknown, or other
aggacattcaagcttacagatccatcgtcagagcactgccctcctggagagttcgtccgagaaatccctctttcaacccgaattcctgaagacgccaacatagaagcatactacgatgggccaggatctgtgcttgagatcctggtgccaaaacatcgcgtgggacctgaagagcatgaagtccgtgtttgcctccgccctcatctgggagggaatgatcttaagttaacttgagataataggcacttaaaaaaattgttaggcattccagtatggttcgtatgtcattgtttttctaaccttgtaccatacactgttatttgcaataagaattgtgtgtcttatgtttgtctctagcaattntagctcactgactgccctggttcttttggttccgtgcatctgtatgc

SEQ ID NO: 5052 - DNA, 400 bp, Glycine max
caacccttttaaacaaatatcgtaccgaggttttggaatttctgaatgacatatttgacaccctgctcaaggcactttcagatccatctgatgaggttgttcttctagttcttgatgttcatgcatgcattgcaaaagatcctcagcactttcggcaacttgttgtcttcctagtgcacaatttccgggtagacaattcccttttggagaagcgtggtgctttgataattcgtcgactttgtgtgcttttgaatgctgagagagtctaccgtgaactttctacaatactagaagcggaatctgacttggattttgcatcaattatggttcaggctttgaatttgatcttacttacatcatcggaactatctgagattcgagatcttttgaagcaatcact

SEQ ID NO: 5053 - DNA, 371 bp, Glycine max
  modified_base (352)..(352): a, c, g, t, unknown, or other
gtctcacaggacacgttgcattgcgcaggatggggagagacggtgagattgacggcggagtgcggcggagaggatgcacgttcaggcggaacgacttcttcccggaggagtcgttcaagagttggggaaactacgctcgagcggtgctggagacgccgtggaggctgaaggatcgtgtggtgacgcgatcggaggaccagacggagttggtggagatgaaggctcgtagcaaccacgagatgaagaaaacgctgaactggtgggacctcatgtggttcggaatcggtgccgtcattggctccggcatattcgtcctcactggcctcgaggcaaggacggcggtcggacccgncgtcgtgctcttctacgtc

SEQ ID NO: 5054 - DNA, 397 bp, Glycine max
cccacgcgtccgcggtggtctgccttgtcgttttctctgaaactcaagaaccgggttgttttatgaataaaatataggtattttttttgtgtgtgtggtggttttttggtttggtttgaaggagagagaaataaaaatgaagtttatgaagttgggttcgaagcctgatgctcttcaaagtgatgaaaaatctatcaggtatatatcatctgaattggttacagatattatcataactgttggtgaagttaagtttcacctgcacaagttccctctactgtccaagagtaatcgtttacaaaagttgctgtcaaaggctattgaagagaatgctgattaaattcaattggatgattttcctggtggtccaaaggtttttgaaatttgtgcaaagttt

SEQ ID NO: 5055 - DNA, 452 bp, Glycine max
  modified_base (442)..(442): a, c, g, t, unknown, or other
ctttcacttcccgcattctcctcttggttgcctccatgttcctcctcgcagccttcgttctcgccctctacttctcctccccaacgtcgtcgtcgccgtcgctgcctccgccacgcgccaagctcccccacccggtggtgatcctcatttcctccgacggcttccgattcgggtaccagttcaagacccccgctcccaacatccagcgtctgataaaaaacggcaccgaggccgagaccggactcatccctgtctttcccaccctcaccttccccaaccactactccatcgtcaccgggctctaccctccccaccacggcatcgtcaacaacgtcttcttcgaccccctcaccggcgagaagttcaccatgcaatcccaccaacccaagtggtggctcgcccagcccctctgggagaccgtccttcttcacaaccttttcgncggcacctac

SEQ ID NO: 5056 - DNA, 453 bp, Glycine max
cttttatgaattccctattttgcaggcaagatttttctttcagcaactaatatctggagttagctattgtcattccatgcaaatatgtcatagagatctgaaattggaaaacactctactggacggaaatccagctcctagacttaaaatttgtgactttggtttctccaagtctgctttgctgcactctcaacctaaatcaactgttggaactcctgcatacattgctccagaagttttgtcgcgaaaggaatatgatggaaaggttgccgatgtttggtcgtgtggtgtgacactttatgtcatgttagttggagcatacccatttgaagatccagaagatcctaaaaatttcagaaagagtattggggtgaactcttacttgacttaaaagagatcttttatgattaatatctttgatccatagcagcaagtttaaactctgattctctc

SEQ ID NO: 5057 - DNA, 381 bp, Glycine max
  modified_base (330)..(330): a, c, g, t, unknown, or other
atacaattaatttcactgaatcttattgaagatgtttctcacaagaactgagtatgaccgacgagtcaacaccttttctcctgaaggccgtttatttcaggttgaatatgcaatcgaagccatcaagctgggatcaactgcgattggattgaagacgaaagatggtgttgtccttgcagttgaaaagcgcatcacttcaccactgctggagccaagtattgttgacaaaattatggaaattgatgagcacatacgatgtgcaatgagtggattgattgctgatgctcgaacacttgtatagcatgcacgggttgaaactcacaatcatangttctcctatggtgaaccaatgactgttgagtctacaacccaagctctttg

SEQ ID NO: 5058 - DNA, 404 bp, Glycine max
  modified_base (22)..(22): a, c, g, t, unknown, or other
cccacgcgtccgcccacgcgtncgttcacgtttccgcccacgcgtccgcgcttctgattgtctctctactcgttttgaagatgtttctcacaaggactgagtatgaccgaggagtcaacaccttttcccccgaaggacgtttgtttcaggttgagtatgcaatcgaagccatcaagctgggatcaactgcgattgggttgaagaccaaagagggtgttgtcctcgcagttgaaaagcgcatcacttcgccgctcctggagcctagtagtgttgagaaaattatggaaattgatgagcacataggttgtgcaatgagtgggttgattgcagatgctcgaacacttgttgagcatgcacgggtggaaactcagaatcataagttctcctatggtgagccgatgact

SEQ ID NO: 5059 - DNA, 446 bp, Glycine max
gaacaagcaaaattaagcacaaaagcccaaccctctctctcgctgttggtctctcctatttggcattcgcagatcgattacgaagtaatttcactgaatcttattgaagatgtttctcacaaggactgagtatgaccgaggagtcaacaccttttctcctgaaggccgtttatttcaggttgaatatgcaatcgaagccatcaagctgggatcaactgcaattgggttgaagacgaaagagggtgttgtccttgcagttgaaaagcgcatcacttcgccgcttctggagccaagtagtgttgagaaaattatggaaattgatgagcatataagttgtgcaatgaatgggattgaatgctgatgctcgaacacttgttgagcatgcacgggtttgaaactcagaatcattaggtctcatatggtgaaccaatgactgttgagtccac

SEQ ID NO: 5060 - DNA, 433 bp, Glycine max
  modified_base (397)..(397): a, c, g, t, unknown, or other
cccacgcgtccgatccgatccccgatggcggcggcgtcgcggcggctccgggacctgcagtcctcggcggggaacaagatctgcgtggactgctcccagaagaaccctcagtgggcctccgtctcctacggcgtcttcatgtgccttgagtgctccggcaagcaccgcggcctcggcgtccacatctccttcgtccgatccgtcaccatggactcctggtcagacatccagatcaagaaaatggaagccggcggcaacgacaaactcaacgccttcctcgcccagtactccatccccaaagaaactgacatcgtcacgaaatataacaccaacgccgcttctgtgtaccgcaaccggatccaggccatcgctgagggacgtccctggcgcgatccgncggtggtgaaggaaaacctcttccgcccgaaagggg

SEQ ID NO: 5061 - DNA, 418 bp, Glycine max
  modified_base (354)..(354): a, c, g, t, unknown, or other
  modified_base (359)..(359): a, c, g, t, unknown, or other
ggggaacaagatctgcgtggactgctcccagaagaaccctcagtgggcctccgtctcctacggcgtgttcatgtgccttgagtgctccggcaagcaccgcggcctcggcgtccacatctccttcgtccgatccgtcaccatggactcctggtcagacatccagatcaagaaaatggaagccggcggcaacgacaaactcaacgccttcctcgcccagtactccatccccaaagaaactgacatcgtcacgaaatataacaccaacgccgcttctgtgtaccgcaaccggatccaggccatcgctgagggacgtccctggcgcgatccgccggtggtgaaggaaaacctctccgncgganaggggaaaccgccgctgacacaaacgcggaggaacaacgattctggatgggatgatggg

SEQ ID NO: 5062 - DNA, 305 bp, Glycine max
gtgaaaactgaactatgcaagctggaagatacgctttctgcgttgaggtcttggatgcggtctcagtctccaccgcttgatgcctcagttggtccttctgtagattatcaccagagcgaatatgtgtactcacgagacaagcgccgcgaattcggataccgcttcactggaagtgccggctaggcacttataacacagaatgaagcactgctgaggactgatggacgatgtctattgcatgctgatcaagaacttagtgctcagtggaagcttatgcgtattggtgaagatcctgctgtaaatat

SEQ ID NO: 5063 - DNA, 462 bp, Glycine max
cggacgcgtgggcggacgcgtgggcttccacaaaggatggtcttgattatcgacatgaacatgcaaataggaccgagttccatgaccagtaccatgtcgataatcaagaccatccttccacaaaggaattcgagcaagaatatcaagagaatgcccatttgtcatggaattgggtcctattcgaatgttcatgaaggacctcacttaatcagtttcagaccacaggctcgaaatgtaccattgcaatcttccatgactgttacagatgaacctggttactatgaggatggagagtttgggataagattggagaatgtgcttattgtcaaagaggctggtacaaatttcaattttggtgatagaggttacttatcttttgaacacattacctgtgcaccatatcagaccaagttgattgacctgaaccttctatgtcctgaggagatagattggctgaactcg

SEQ ID NO: 5064 - DNA, 344 bp, Glycine max
cccacgcgtccgaggagactgagaaaacagaactatacaaaatggaagatacactttctgcgttgaggtctttgatgctttctcagtctccaccgcttgatgccttagttgttccttctgaagattatcaccagagcgaatatgtgtccgcacgagacaagcgccgcgaattcgtttccggcttcactggaagtgccggcttggcacttataacaaagaatgaagcactgctgtggacggatggacgatattttttgcaggctgagcaagaacttagtgctcagtggaagcttatgcgtattggtgaagatcctgctgtagatatctggatggccgataatttg

SEQ ID NO: 5065 - DNA, 415 bp, Glycine max
cggacgcgtgggcaagcagcctccaattcgtgccactctcttcaaaatggccgtggcggtctcaaatctccacacagaatcaggtctcaagtccctcgacgacttcctctctgggaaggtctacgtttctggggatcagttcacaaaggacgacatcaaagtgtatggtgctgttttggagaagccaggtgactcttttcccaatgctgccaagtggtacgaggttgtctcatctcagcttgctgcaagcttccccggcaatgctcaaggcgtgagattcagtggcaaagcttctgctccagcggaggctgctcctgcgaaaccggatgcttctgctgctgaagatgatgatgaccttgatctctttggcgatgagactgatgaagacaaaaaggcagcagaggaaagggaggct

SEQ ID NO: 5066 - DNA, 406 bp, Glycine max
cccacgcgtccgcagctacgatgggtaagggaacggggagtttcggtaagaggaggaacaagacccacaccctctgtgtgaggtgtggccgccgcagcttccacctccagaagagtcgttgctctgcgtgcgcttaccccgctgcgcgcaccaggaaatataactggagcgtgaaggccattaggagaaagaccaccggaactggaaggatgaggtacttgcgtaacgtgcctcgcagattcaagagcggcttcagagagggtaccgaagctgcacccaggaagagaggagctgctgcctctgcctaagctttgaatgaatgacagcaatttttgctgggtcagtgaattataggagttaatgtttctgtgttggtgccaaactctttggaacacattttctttct

SEQ ID NO: 5067 - DNA, 360 bp, Glycine max
ggaaattccttcttgttgtctgaaggccaaggcttcaatccccgagtcagaggcaaaagtccattccactgttgtggctgggtggttctcagcttctcaaacttgctctgggaaatctgggaaagctgtttatttcaacaacccaatgtggccaggagaagcccattcaatcaaagtagaaaagatcttatacaaggaaaagtcggagtaccaggaggtcttggtttttgagtcatcaacttatgggaaagtgcttgtacttgatggaatagttcaattgactgagaaggatgaatgtgcttaccaggagatgatagctcatcttcccctctgttcaattcagtcccccaaaactgtttt

SEQ ID NO: 5068 - DNA, 424 bp, Glycine max
gctattatccccagacgccaccgtcgctacaccagaagaagaagaagagtgatggcggagtacgacctaactccgcggatggcgccgaatctcgacaggcaccttgtgttccctctcctggagttcctgcaggagcggcagctctacgacgacgaccacatcctgaaggcgaagatcgaccttctcaacaacaccaacatggttgactacgctatggacatccacaagagcctctaccacaccgaggacgtcccgaacgatatggtcgaccgccgcgccgaggtcgttgcccgccttaagtcgctcgaggaggccgccgcccccctcgtcgccttcctccagaacgaggctgctgtgcatgagctccgaacggacaaacagtacaatctccagatgcttaacgaccgatttcagattggtcctg

SEQ ID NO: 5069 - DNA, 426 bp, Glycine max
cccacgcgtccgtccacaagagcctctaccacaccgaggacgtcccgaacgatatggtcgaccgccgcgccgaggtcgttgcccgccttaagtcgctcgaggaggccgccgcccccctcgtcgccttcctccagaacgaggctgctgtgcaggagctccgagcggacaagcagtacaatctccagatgctcaacgaccgatatcagattggtcctgcacagatagaagcgttgtaccaatatgccaaattccagtttgagtgtggaaactactctggtgctgctgactatctttatcagtacagagctttgtgcacaaatagtgaaaggagtttgagtgcattgtgggggaagctggcagctgaaattttgatgcaaaacttgggacatcgctcttgaagagctcaaccgcttgaaggaaatcatt

SEQ ID NO: 5070 - DNA, 437 bp, Glycine max
  modified_base (399)..(399): a, c, g, t, unknown, or other
cccacgcgtccgattatccccagacgccaccgtcgcagcaccagaagaagaagaagagtggtggctgagtgcgacctaactccgcggatggcgccgaatctcgacaggcaccttgtgttccctctcctggagttcctgcaggagcggcagctctacgacgactaccacatcctgaaggcgaagatcgaccttctcaacaacaccaacatggttgactacgctatggacatccacaagagcctctaccacaccgaggacgtcccgaacgatatggtcgaccgccgcgccgaggtcgttgcccgccttaagtcgctcgaagaggccggcgcccccctcgtcgccttcctacagaacgaggctgctgtgcaagaactccgagcggacaagcagtacaatctncagatgctcaacgaccgatatcagattggtcctgcaca

SEQ ID NO: 5071 - DNA, 403 bp, Glycine max
  modified_base (1)..(1): a, c, g, t, unknown, or other
nccacgcgtccgtactggacctgccattgtcagtggcattttataagcttgttctctggcaaggtcttgatttgcatgacattctgttcattgatgctgagcttgggaagactttacaagagttcaatgcccttgtttgtcggaaacattatatagaatctattggtggtagctatacagatacaattgttaacttgtattttcatggtgcaccaatcgaagatctttgcttagattttactctccctggttatcctgaatacaccttgaagccaggagatgaaattgttgatatcaacaatttggaggagtatatatccttggtgatcgatgcaactgtcaagactggaatcatgcggcaaataaaagcatttaaagcacggtttaaccaggtttttgatat

SEQ ID NO: 5072 - DNA, 368 bp, Glycine max
cccactcgtccggtttatggaggcgaataggatgaaagctaattgaagattagcgccagtgttctattggatgtcccacgggactctttgattatgaatgacgagatatttggtcctttacttcccatcctcacggttgataaaatagaagaaagctttgacgtaatcaattcaggatcaaagcctctcgctgcatatatatttacaaataccaagaagcttaatgagcaatttgttatgactatttcacctggcggtttggttgttaatgacactactttacatcttgcagttcatactttaccatttgggggagtcggtgagagtggaatgggtgcataccatgggaaattcacatttgaagcttt

SEQ ID NO: 5073 - DNA, 405 bp, Glycine max
agtaagctaaagtttgcccccttacacgttttttgtcttcttttttctcccatctttgtttcgagaagcatttgacgaagagaagagacagtgaatcgcggtttcaattcaacccacttcatctcaggtgtttgaagttgagataaaaatgagcggaacagagaaagcaggatcaggaaccaccaaaacccccgccgatttcctcaaatccattcgtgggaggccggttgtcgtcaagctcaattctggtgttgattacagaggtatacttgcttgtctagatggctatatgaatattgcaatggagcagacagaggagtacgtcaatggacaactgaagaacaagtatggtgacgctttcatccgagggaataatgttctatacatcagtacctcaaagaggac

SEQ ID NO: 5074 - DNA, 437 bp, Glycine max
gggacacgtagcgaaagatcgtgaaatttaagcttacggggttattttttgacatagccacgtgcatgaggggcagttacgggattatagtaaacacgtgtgaagccatcgaagagagtgtgttggaagcgttcaacgaagggttgatggaaggaaccacgccgaaagtgttttgcattggacccgtgatttcttctgctccttgtagaaaggatgataacgggtgtctgagttggttaaactcgcaaccgagtcagagtgttgtgtttttgagttttggaagcatgggaagattctcgaggactcagttgagagagattgctattgggttggagaagagtgaacaaaggtttctgtgggtcgtgaggagcgagttcgaagagggtgagtcggcggagccaccgagtttggaggagttgttaccaggaaggtttttg

SEQ ID NO: 5075 - DNA, 467 bp, Glycine max
agacattgtacaatgagttggaagtcgttgaaggaatgaagctcgacaggggatacatggctccatatttcataacaaaccagaagaaccagaaatgtgaacttgaggatcctctcattataatccatgaaaagaaaatctcaagcataaatgctatcgttaaagtattagagttagctttgaagagacaaagatctttattgattgtcgccgaggatgtggaaagtgatgcccttgcaactcttattctaaataaacttcgtgctggaatcaaggtatgtgccatcaaagctcctggttttggtgaaaaccgtaaatctggtctccaggatcttgctgttcttacaggaggtcaacttatcaccgaagagcttggtttgaatcttgaaaaagtagacctggacttatttgggctctggcagaagataacaatttctaaagatgacactgtcagtcttgatggagct

SEQ ID NO: 5076 - DNA, 436 bp, Glycine max
cccacgcgtccggtcagtctcatggagattgaaactagatcccgagcacagacccctgcgtcatctgctgttgcagttaaagcacgtttaaaagatgttagtaatgctttaatgacatccaaagagctacttagaattataaaccgcatgtggggtcatgaagatcgtccttcatctagtatgtctcttatctcagctctgcatactgagctggagagggctcgcctacaggtcaatcaacttatccaggaacagcgctcagatcagaatgagataaattatttgatgaagtgttttgctgaagaaaaggctgcttggaaaaaaaaggaggaagaaattgttgaagctgcaattgaatctgttgctggtgaactcgatgtagagaggaaactcaagagacgattagaaagcttgaacaagaagcttgggagagaac

SEQ ID NO: 5077 - DNA, 364 bp, Glycine max
ggaaacgcttgtgcaaaaggaaaaccagttgctcatgtctcttgctccaatttttctggaggtgagaagcatgcaagtaggccaaagcagtattcaaattcttctgaacaactatctgctccaataacttcagaattaaatgttcccaaatccttctccagtaacctaaaatccttcagcttgaatgatcttaaagaggccactaagaacttccggcaagaaaatttaattggagagggaaggattcgggcgcgtcttcaaaggatggatcgatgagaacacatatggtcccaccaaaccaggcactggaattgtagtgcccattaaaaacctaaagccagaaagcttccaaggccacaaggaa

SEQ ID NO: 5078 - DNA, 315 bp, Glycine max
gcgtacctcaaaaggatatttcgtgacctgtttattcgtgaaggattccagtttgattatgtctgtgactggaccattttgaagtatcagcaatcacagctagccactcctccaacacgggccattggtcctagtgctggaaccagttctggaatgccccccgctgttactaatgctgataggcatacaggaggggaagaaggtagacctcctgctttggtttcagtggattcctcgaggcgcagaatgtcagggcccattttaaatactttatcaagtgccaatgccttgggtcaatcaagtggatcatctagg

SEQ ID NO: 5079 - DNA, 404 bp, Glycine max
  modified_base (216)..(216): a, c, g, t, unknown, or other
  modified_base (240)..(240): a, c, g, t, unknown, or other
gtcctatcactttccacgtaagtctccaaaaacagaaccactcattccaatggaaattgacggcaacgttctcgcggcgaagtcgctggttcacttcggcgtgcagcacatgttcggcgtcgtggggattccggtgacctcgctggccaaccgcgccgtctcgctcggcgtgagattcatcgccttccacaacgagcagtccgccggctatgccgnctccgcctacggctacctcacggngcgccccggcgtcttcctcaccgtctccggccctggctgcgtccacggcctcgccggcctctccaacgccttcgtcaacacctggcccaccgtcatgatctccggctcctgcgaccaaaacgacgtctgccgcggcgattttcaagaactcaaccagatcgaag

SEQ ID NO: 5080 - DNA, 335 bp, Glycine max
  modified_base (57)..(57): a, c, g, t, unknown, or other
gttgaagatatcctgtcaagaaacaagccttcagctaatgtcccaacaataccacanacagttgtaatgcctccaaataacaagtcagcattattcatatggtaaatgctgtatcctgcctttgggccccagtatgagtaagctccaatgacaaaattgtatgctatgtaccctagaacatttataacatacacttggtcatgcaagagctccttcatatctttggagaagatggtgaactgattccacaatttggatgttgacttggatcctttgagcaaggcttgatcttcagcaagcgtgtcatcatctctatgggtgaactactgattttt

SEQ ID NO: 5081 - DNA, 415 bp, Glycine max
cggacgcgtgggcggacgcgtgggtggctgctctttggcgctgtcgccgttcttagccctagtctgtctgtctctcgacgcctctctgcaagttagctgggacaagccaccaaggaaaacattttactgtgaagaacaatgaggaagcttaagtttcatgaaaagaagcttttgaagaaggttaattttttggaatggaagacggaagggggtcacagagagaacctcattatgcaacgctaccatgttactggacgggacgattacaaaaaatattcaggtttatgccatatggttcagaagttagtaaacatattgaaacagatggacccaaaggatccctttcgggttgatatgactgataagctattggagaaactctacaacatgggtgtgattccaaccaggcaaagca

SEQ ID NO: 5082 - DNA, 375 bp, Glycine max
tggaaatgtttccaggtggtacaagcacattgatgctttgttgagaatctctggtgttactggcgagggatctggtgttattgttgagggatctctagttgcagagcctgttgcaactccccctgctgcagacacaaaggctgctgttgctgaggatgacgatgatgatgatgtggatttgttcggtgaagagacagaagaagagaagaaggcagcagaggaacgggcagctgcagtgaaggcatctacaaaaaaaaaagagtctgggaaatcatctgttctgttggatgtgaaaccatgggacgatgaaactgacatgaagaagctcgaagaagcagtgagatctgttcagatggaaaggttgctttggggtgc

SEQ ID NO: 5083 - DNA, 448 bp, Glycine max
cttaaaaatgcacaatctgataccaattttatatgtaaatgcagccaaacaatggaggaggatattgaccaactggttacgctggcagagaagttatctgagcttatgagtgaaaatcttggtttggagaaaaactacattaaggaggcattttctggaacaaatggacctgctatgggaacaaaagtggccaagtaccctcaatgtccacaccctgaactggttagaggacttagagaacacacagatgctggtggcatcatcctattgctccaagatgaccaagtgcctggcctagaattcttcaaagatggcaagtgggtggagattccaccctccaagaacaatgccatttttgtgaacacaggtgaccaagtagaagtgttgagcaatggcttttataaaagtgttgtgcacagggtcatgcctgacaaaaacggaagtagac

SEQ ID NO: 5084 - DNA, 432 bp, Glycine max
  modified_base (10)..(10): a, c, g, t, unknown, or other
  modified_base (13)..(13): a, c, g, t, unknown, or other
  modified_base (22)..(22): a, c, g, t, unknown, or other
  modified_base (359)..(359): a, c, g, t, unknown, or other
cccacgcgtncgnccacgcgtncggtcagggctgaaggaattgctgaagaaagggttaggtttaggcgacatggcgttcaacgccggcggcggagccataacctggttccccggccacatggccgccgctacacgtgccatccgccaccgcctcaaactcgctgacctcgtcatcgaagttcgcgacgctcgcattcccctctcctccgccaacgccgacctccagccacacctctccgctaaacgacgcgtcgtcgcactcaataaaaaagacctcgccaaccctaacatcatgcataaatggacgcattattttgagacgtgtaatcagaattgcgttgcgatcaacgcgcacagcnagagttccgtgaagaagcttctggacgtggtggagttcaagttgaaggaagtgatttgcaaggagccgacgct

SEQ ID NO: 5085 - DNA, 356 bp, Glycine max
cggacgcgtggggccgctgagctacaggtttattctcacgtttctcggaatgtggaaagagatgcaagaatgttacaaatgccaatatcagcaaattgttgaagccaaaactttagatgccttatcgttaaacacaaagcctggcaatgctcatattgatgcaacaataaaactcaaatctgaggtacagaaatggaatttgagcttcttagattggattcacgcccagaggtcccatgtgaaagccttgaatggttggctggtaagatgtctattatacgaacccgtagaagtacccgatgattcaacttcctttctacctagcatgattagggcaccacctgtgtatgtgatct

SEQ ID NO: 5086 - DNA, 413 bp, Glycine max
acgagcgtgaattacaaccacgtacatttccacgaccagaggagcatgaaggagaacagtggaaaggaaggcatcgtcatgaagacccggaagagagggcgagaatgagactgagggaagcagaaagaatagagagggaaagggaggaacagagggtgagggaggaggaagagaaactacggcgacgtgagaagaaggaacaacgggaagagaaagatgaagaaggtcaaggttcggaagactcacactcaaaaagacagaacaacccttttcacttcagctgtaacaagttccaaacgctcttcaagaaccaacatgtgtacattcgcgttcttcagagattcgaccaacgcttcctacaacttgagaacctttgagactaccgtgttgtatagctcatggctaaacccaac

SEQ ID NO: 5087 - DNA, 380 bp, Glycine max
cccacgcgtccgggtcagatgtcttggatcctgcacttcgccggccaggaagatttgatcgtgtagttatggtagaagcacctgatagaattggaagagaagccatcctaaaagttcatgtttccaagaaggaacttcctttagccaaggatgttgacctcagtggcattgcttgtatgaccactggttttactggagcagatcttgcaaacctagtaaatgaggctgctttactggctgggagacaaaataaagttgtggtggagaaacttgatttcatccaagctgtagaaagatctatagctggcatagagaagaagactgccaagttgcgaggaaatgagaaggcttgtattgcacgacatgaggcctgtcatgct

SEQ ID NO: 5088 - DNA, 438 bp, Glycine max
cttctctctctctcggttgtgagtgcagatttcttgcgcggtttatcatgggggatagtgagtattcgttttctgtcaccacatttagcccttctggaaagcttgttcagattgagcatgctttgacggctgtcgggtctggacaaacgtctttgggaattaaagctgcaaatggagttgtcattgctaccgagaagaaattgccatctatattggttgatgaagcatcagtccagaaaattcagttattaacaccaaatataggtgtcgtatatagtggcatgggtcctgattttcgagttttggttcggaaaagcaggaaacaagccgagcagtatcaccgtttatataaagaaccaattcctgtcactcaacttgtcagggaaagtgccgccgtaatgcaggaatttactcaatctggtgggtgtaggccctttg

SEQ ID NO: 5089 - DNA, 414 bp, Glycine max
cccacgcgtccgttcaacttcagcagccgcgcctctaacttgtagcagcgatacctcgtctcttatcactaaaaaatgaccaagagaaccaagaaggccggtattgttggaaaatacggcacccgatatggtgctagtttaaggaagcaaatcaagaagatggaagttagtcagcacagtaaattcttttgtgagttctgtggaaagtacgctgttaagaggaaggccgtgggtatttggggctgcaaagattgtggaaaagtgaaggctggaggtgcttacacattgaatactgcgagtgctgtcactgtccggagcaccattcggaggctgagagagcagactgagagttgaaagcagtttacacttttcatttgtttccaaagcttattttaaaattatcatacaattttg

SEQ ID NO: 5090 - DNA, 408 bp, Glycine max
cccacgcgtccgtttccgcttcatgtagtttctgcgttcccaactccttctcccgacggtaccctgactcgcccgagtccacactcaaacccgcgctcatggcaaataacccttccgacgctcccgccgatgacttccttgaacaaatcctcggcctcccgaacttcgcttccgccgactccggcctttccgctgccgatgtcggcctcgccggtgcggccactcaggctccgatgatgctgcaactcaactccgccgacgccaacgctcacctcgccggcgccgccttccacgcgcccgtgtatcaactagggctgagcttggaccaaggcaaaagtgggttcatgaagcccgaggaagcctccgctagcggaaagcgctttcgcgacgacgtccttgataatagag

SEQ ID NO: 5091 - DNA, 379 bp, Glycine max
agggagtttcttattggatgtttgctaattatctcattcttctggctctgcttcttcttcttgtagttgaattaagagatggggttgtctttcaccaagctttttagccggctctttgccaagaaagagatgcgtattctcatggtaggtcttgatgctgctggtaagactaccatcttgtacaagctcaagctgggagaaattgtcacaaccattcccacaattggatttaatgtggagactgtggaatataagaatattagctttactgtatgggatgtgggtggccaagataagattcgtcctttatggagacactacttccaaaacactcaggggcttatccttgttgtggataacaatgatcgtgaccgtgttg

SEQ ID NO: 5092 - DNA, 410 bp, Glycine max
ctccttcgcactcctctttctctccgtgttgccgttcagtgacagcgagtgaaagaatagaagagaagagaacataaccgaaagagaagaagaagaagaaagctagggtttttgcaattgcaacgatggcgcatcaaggagaaccggcgaagctgcgatggggagagctggaggaggacgactgagaggatttggacttcctcctgccgccgcggcaggtgatagggcccgacgagaacgggataaagaaggtgatcgagtacaagttcgacgaggacgggaacaaggtaaagatcaccaccaccacacgcacgcgcaaactcgccaacgcgcgtctcagcaaacgcgccatcgagcgccgctcctggcccaagttcggcgacgccgtacacgaagacgttggcgcccgt

SEQ ID NO: 5093 - DNA, 433 bp, Glycine max
atgcagagtccctcacaatggcggaatcgtgccttctatccctgccttccctcttctacgccgaaaacaatacccgggtctctctcaattcccaccaagcccctcaacctccatcttccatgctccaactcttcgctctttcccctcaccaccaaaacaacgcgccactcttctctcctcacattcgtggctcagacatcggattgggccaaagaagaagaggaagaagaaacctcgtgggagaaccaaggcgacaccgcgtggggaactgaagaaggtggccacgaagaagggggtttcgctgaaaaagctgaggaagataagatcttcgttgggaacttgcctttcgacatcgacagcgagaatttggcgtcgctcttcgggcaagctggcaccgttgaggttgctgaggttatttataataaggccactg

SEQ ID NO: 5094 - DNA, 244 bp, Glycine max
aaactttgaagggacacctttgtttcccagtgatcctgccaagaaagagttcggtgagcaattgatatcccatgttgatacattcagcaaagacctgttcgtttcattgaaaggggatgctgtacagcaagccagtcacgcttttgaatacgtggagaatgctcttggtaaatttgatgatgggccattcttgcttgggcaattcagtttggtggagattgcttatattccatttgttgaaaga

SEQ ID NO: 5095 - DNA, 424 bp, Glycine max
  modified_base (388)..(388): a, c, g, t, unknown, or other
acgtagcaaatcttaaaaatattcagtgaagatcaacctcaatggcatctcttggcgtgcgaccagttcttccccctccattaacttccatctccgacccacctcctcttttcgatggcaccaccaggttgtacatcagttattcttgcccctatgcacaacgtgtgtggatcgctaggaactacaaggggctacaagataagatcaatttggtccctattaaccttcaagacaggccagcttggtataaggagaaagtctaccctgaaaataaggtgccatccttggagcacaatggcaaggtgttgggagaaagtcttgatttgatcaaatatgtagatgcaaactttgaagggacacctttgtttcccagtgatcctgccaaganagagttcggtgagcaattgatatcccatgttgatac

SEQ ID NO: 5096 - DNA, 433 bp, Glycine max
aatccatccaaaccttaaaaagattcagtgaagaacaacgttaatggcatctcttggtgtgcaagcagttcatcctcctccattaacatccacctccgacccacctcctctttttgatggcaccaccaggttgtacatcagttattcttgcccctatgcacaacgtgtatggatcgctcggaacttcaagggactaaaagacaagatcaatttggtccctataaaccttcaagacaggccagcttggtataaggagaaagtctaccctgaaaataaggtgccatccttggagcacaatggcaaggtgtttggagaaagtcctgatttgattcaataagttaaatgaaaacttttgaaaggacacctttgtttcccagagattctgccaagaaagagttcggagagcaattgatatcccatgttgatacattca

SEQ ID NO: 5097 - DNA, 264 bp, Glycine max
gtccatccaaaccttaaaaagattcagtgtagaacaacgttaatggcatctcttggtgtgcaagcagttcatcctgctccattaacatccacctccgacccacctactctttttgatggcaccaccaggttgtacatcagttattcttgcccctatgcacaacgtgtatggatcgctcggaacttcaagggactaaaagacaagatcaatttggtccctataaaccttcaagacaggccagctttggataaggagaaagtctac

SEQ ID NO: 5098 - DNA, 407 bp, Glycine max
  modified_base (392)..(392): a, c, g, t, unknown, or other
attcagtgaagatcaacctcaatggcatctcttggcgtgcgaccagttcttccccctgcattaacttccatctccgacccacctcctcttttcgatggcaccaccaggttgtacatcagttattcttgcccctatgcacaacgtgtgtggatcgctaggaactacaaggggctacaagataagatcaatttggtccctattaaccttcaagacaggccagcttggtataaggagaaagtctaccctgaaaataaggtgccatccttggagcacaatggcaaggtgttgggagaaagtcttgatttgatcaaatatgtagatgcaaactttgaagggacacctttgtttcccagtgatcctgccaagaaaagagtcggtgagcaattgatatnccatgttgatacatt

SEQ ID NO: 5099 - DNA, 284 bp, Glycine max
aaatcttaaaaatattcagtgaagatcaacttcaatggcatctcttggcgtgcgagcagttgttccccctccattaacgttccagtctccgacccacctcctcttttcgatggcaccaccaggttgtacatcagttattcttgcccctatgcacaacgtgtgtggatcgctaggaactacaaggggctacaagataagatcaatttggtccctattaaccttcaagacaggccagcttggtataaggagaaagtctaccctgaaaataaagtgccatccttgga

SEQ ID NO: 5100 - DNA, 366 bp, Glycine max
cccacgcgtccgcttaaaaagattcagtgaagaacaacgttaatggcatctcttggtgtgcgggcagttcatgcggctgcattaacatccacctccgacccacctcctctttttgatggcaccaccaggttgtacatcagttattcttgcccctatgcacaacgtgtatggatcgctcggaacttcaagggactaaaagacaagatcaatttggtccctataaaccttcaagacaggccagcttggtataaggagaaagtctaccctgaaaataaggtgccatccttggagcacaatggcaaggtgttgggagaaagtcttgatttgatcaaatatgtaaatgaaaactttgaaaggacacctttg

SEQ ID NO: 5101 - DNA, 337 bp, Glycine max
gaagaacaacgttaatggcaggtcttggtgtgcatgcagatcattctgctccattaacatccacctccgacccaccttctatttttgatggcaccaccaggttgtacatcagttattcttgcccctatgcacaacgtgtatggatcgctcggaacttcaagggactaaaagacaagatcaattaggtccctataaaccttcaagacaggccagcttggtataaggagaaagtctacccttaaaataatgtgccatccttggagcacaatggcaatgtgttggaagaaagatttgatttgatcaaatatgtagatgaaaactttgaatggacacctat

SEQ ID NO: 5102 - DNA, 441 bp, Glycine max
gtccatccaaatcttaaaaatattcagtgaagatcaacctcaatggcatctcttggcgtgcgaccagttcttccgcctccattaacttccatctccgacccaacctcttttttccatggcaccaccaaggtgtacatcaattattcttgcccctatgcacaacgtgtgtggatccgctggaactacaaggagctacaagataagatcaatttggtccctattaaccttcaagacaggccagcttggtataaggagaaagtctaccctgaaaataaggtgccatccttggagcacaatggcaaggtgttgggagaaagtcttgatttgatcaaatatgtagatgcaaactttgaagggacacctttgtttcccagtgatcctgccaagaaagagttcggtgagcaattgatatcccatgttgatacattcagcaaagacctg

SEQ ID NO: 5103 - DNA, 422 bp, Glycine max
  modified_base (238)..(238): a, c, g, t, unknown, or other
  modified_base (266)..(266): a, c, g, t, unknown, or other
  modified_base (356)..(356): a, c, g, t, unknown, or other
aaaaccctacccttctcagttgcagagccatgtctcactccgacagcagcaagaagaagaagcagcagcagcgtagcaagcacgaaggaggaggaggagaggaagaatcgaaagacgaaggcgggttgatgatcaagccgcagagcttcactcccccaatcgacacctcccaatggcccatcctcctcaaaaactatgagcgtctcaatgtccgcaccggccactacacccccatccnctccggctactcccccttgaagcgcccnctcgccgagtacctcaaatacggcgtcctcaacctcgacaagcccgccaacccttcctcccacgaggtcgtcgcctggatcaagcgcctnctccgcgtcgaaaagaccggccactccggcaccctcgaccccaaggtcaccggcaacctcatcgtc

SEQ ID NO: 5104 - DNA, 465 bp, Glycine max
ccgactcaagcccccatgttgaacggataattagttgcaattgcaaaagattgtgattgttgggattgcagagagaagggtggttagtgttagaatagattgagtgtggatggggaaagaggaggaggagatgaggggtgagattgaggaacgactgataaatgaagagtacaagatatggaagaagaacagtcctttcttgtatgatctggtcattatgcatgccctcgagtggccttctctcactgtggagtggcttcctgaccgccacgaaccacctggcaaagactattccctccagaaggtcatcttgggcacccacacttctgagaatgagcccaattacctcatgctggcccaagtccaactccctcttgatgatgctgagaatgatgcccgccactatgacgatgatcgccccgacattggtggctttggctgcgccaatggcaggttcagatcatt

SEQ ID NO: 5105 - DNA, 362 bp, Glycine max
gactaagccttcgaatctctctgaaacttttctcttctctttgattcttctctatcagttaaacatgagaatgagccgttcacaggatccacacccttcccgatctttcttcccttttggaaatccttttcggatgatatcacctaaaggctctcgcatgtctccacaacttcttgcagtgttgcaagcttttgaggcaacattggcagagaggctgaaaaatcttatgcctaaaagcaaggatgaaatcctcaccttgtcttggatgactttagctatgaagtcactttgtgaaagtcacaatgacatacggtcccttatgactgcccttgaacttcctgtgagtgattgggaggacaaat

SEQ ID NO: 5106 - DNA, 437 bp, Glycine max
  modified_base (350)..(350): a, c, g, t, unknown, or other
cgaagccttcgaatctctctgaaacttttctcttctctttgattcttctctatcagttaggcgttagaatgagccgttcacaggatccacacccttcccgatctttcttcccttttggaaatccttttcggatgatatcacctaaaggctctcgcatgtctccacaacttcttgcagtgttgcaagcttttgaggcaacattgtcagagaggctgaaaaatcttatgcctaaaagcaaggatgaaatcctcaccttgtcttggatgactttagctatgaagtcactttgtgaaagtcacaatgacatacggacccttatgactgcccttgagcttcctgtgagtgattgngaggacaaatggattgatgtgtacttggacataagttcaaagttgctagacatttgcaatgcattcagctctgagctttcacgtctg

SEQ ID NO: 5107 - DNA, 401 bp, Glycine max
  modified_base (393)..(393): a, c, g, t, unknown, or other
tcgcaacaatggcttatgagccttaaccaggaatctgccttctaaccttaatcttcttatcgggcttgagcattattgcgcatgcaattggttcttaaaacgaaaccttcaaatttgaaaactcaggtgaactttgaccctacatcgttgagtaccgggcaaattaccgaatggttagcattttcaacttttcattcccaggtggtttcttccacaacaacccaaattgctttaattttacctttgctggtagggctccaaccttggtacaagctatttcgttgggtttgggaggccaatagggccaacccagttggagaaaatgccactttttcacttggcactgatgggaaccttgtgttggcagatgctgatggcagaattgcattgcanactaacac

SEQ ID NO: 5108 - DNA, 411 bp, Glycine max
attttatttacaacaacaatggcttctgtgcctcaaccaaaaatctcccttctaaccgtatgcttcttctcttccttcaccatcattgcgcatgcaattgttcctcaaaacgaaaccttcaaatttgagaactcaagtgaacttggaccctacatcgttgagtacggtgcagattacagaatgataagcatcttcaactctccattccaagttggtttctacaacaccaccccaaatgccttcactctagctttgcgtgtagggctccaacgctcggagcagctatttcgttgggtttgggaggccaacagggccaacccagttggagaaaatgccactttttcacttggcactgatgggaaccttgtgttggcagatgctgatggcagaattgcatggcaaactaacact

SEQ ID NO: 5109 - DNA, 351 bp, Glycine max
aacaatggcttctgtgcctcatccaaaaatctcccttctaaccttattcttggtctctggcttcaccatcattgcgcatgcaattgttcctcaaaacgaaaccttcaaatttgagaactcatgtgaacttggaccctacatcgttgagtacggtgcagattacagaatgataagcatcttcaactctccattccaagttggtttctacaacaccaccccaaatgccttgactctagctttgcgtgtatggctccaacgctcggagcagctatttcgttgggttttgggaggccaacagggccaacccagttggagaaaatgccactttttcacttggcactgattggaacc

SEQ ID NO: 5110 - DNA, 357 bp, Glycine max
ctctcgcgtccgactcgctgcacgctgggtatgattccgacgaggaggtttatgctgctgccaaagctgtggatgctggtatgattgagtatgattctgatgataaccctattgttattgacaagaagaaaattgaacccattcctgctctcgatcactcttccattgattacgagcctttcaataaggatttttatgaggagacaccttcaatatcaggtatgagtgagcaggatgtaagtgaatacagaaagagtttggctattcgtgtatcgggttttgatgtttccaagccaataaagacatttgaggactgtgggttttcttcgcagattatgaatgctattaaaaaaacaa

SEQ ID NO: 5111 - DNA, 428 bp, Glycine max
taagagagtggaaggagttgttgccatgtatcagcactttgtgcttgtacatggcataggtggaggaagttggtgctggtacaaaatccggtgccttatggagaattcaggctgcaaggtctgatgcatagacctacaaagtgctggaattgatcaatctgatgctgattccgagctatctttagatgattacaataaaccacttatggatttcatgtctgatttgactgagaacgaacaggttatattggtggtgcacagcgctggagggttgagcattactcatgcctgtcacaagtttgcaaacatgattcgtttaactgcttatgcggcagcaactatgctcaagttcagattcctgaccgatcaagatcttaaagatcgtgtgccagatttatccgagtatggggatgtgtatgaactgtgat

SEQ ID NO: 5112 - DNA, 441 bp, Glycine max
acgtacatttggggcactgaagcaaaagggccatcgccatcaccttacggcgcggcccttggggctcttctccaagctggtttttgcatggccatgtatttaaacctcgtgcctcattttcctttgtccaaatttactgatcctacctaccatgaatggtgtttctggaaaaaattaagttaccagtatatgtctggctttactgcacgctggaagtattatttcatctggtcaatttcagaagcttctattatcatctctggcctggggttcagtggctggactgattcgtccccacctaagcctcgctgggaccgggccaaaaatgttgatataattggtgttgagtttgcaaagagtgcagttactattccagctgtgtggaatattcaagtcagcacctggcttcgtcattatgtttacgaaaggcttattcagact

SEQ ID NO: 5113 - DNA, 393 bp, Glycine max
gagacagatgcgatatgaagtcagtcactggaaggaaaaggagattaatgggaccgagaggagattgcttggaggttgtccattaactccaaaggaaacgtccctattacttaaagcactgggttttccatcacacaccacgatttttctggtagctggaaaagcatattgaagaagaagtatgaaatatcttgaggatgatttccccaacattttctctcattcctctctgtcctcttgaaaaaaattgaatcctttcaagaatcatcagaacatgttggctggtttaaactatgttgttgcccttaaaaatgatgtatttctctacacttatgatggaaatatggcaaaggccgtacaatgtcataagcgctttgaagacttcaagaaaac

SEQ ID NO: 5114 - DNA, 429 bp, Glycine max
  modified_base (392)..(392): a, c, g, t, unknown, or other
  modified_base (403)..(403): a, c, g, t, unknown, or other
tcttcatttcattaaactacattttttggtacaacatgaaacgttttgtgttttctctagcatgggtttttgctcttgtgctagcttcttcgttggctcatgctgcggttgtggaacacacttttaatgtggaggacattactgtgcagcgtttgtgtcgtcaacaattgatcactgccgttaatggaaccctaccaggaccaacaattaacgctcgagagggtgatactattgtcgtccacgtattcaacaagtcaccctataatcttactcttcattggcacggtattattcaatttttaactccttggtcagacggtcctgaatttgtaactcaatgcccaataccttccggtagcagatacacatacaaatttaacctaacgggacangaagggactcnttggtggcatgcacactcatcatttc

SEQ ID NO: 5115 - DNA, 424 bp, Glycine max
accacgcgtccggcaatttttgtagtttctcttacttacctgtgtctatggagaagaagcaagaaaaagggaaagagattaccacctggtccaaaagggttgccaattttgggaaaccttcacaagttggggtcaaatcctcatcgtgatctgcatgaactagcccagaaatatggacctgtcatgtacttgcgcttaagatttgtgccagccataattgtttcttcaccccaagcagctgaactgttcctcaagacccatgatcttgtctttgctggtagaccacctcatgaagctgcaaagtatatggcttgggagcagaagaacttggcttttggtgaatatggttcttactggcgcaacgtgcgcaagatgtgcacattggaattgctaagccaaaccaaaattaactccttcagaacca

SEQ ID NO: 5116 - DNA, 352 bp, Glycine max
atcttttacgtgcccatcaaacaaataagctctccactctatttcagtcaccaatcaccaatgagtccttctgtcactaacgtcaaaatcttctcttctctcgtcctagacggattcttcaacgctctcaccagacgcgggtacgcggtggcatcacaaagcgcaacaaaggaaggagtgggctttatgagcggcaagatggcaccaaagtcaggggaagacaacaaaggggtgtctacgtacaaggtttcgtgggtgccagatcctgtcactggttactacaaacccgagaacatcaacgagattgaccctgcagaattgcgcgcgatgcttctcggcaaaaaaatcgaca

SEQ ID NO: 5117 - DNA, 434 bp, Glycine max
  modified_base (383)..(383): a, c, g, t, unknown, or other
attgctgaaagttaaaattaagaaggctaccaaaaaatccgggaaaaacttgggaaggtccataaaattaggttgcattgaaaacacgggaaatcataagcgcattacaccattattgaggttttacacttccaaaagtgaggaggaacttaaaagcctagatgattatgttgaaaacatgggagaaaaccaaaaggctatcttttacctagcaactgacagcttgaagagtgcaaagactgctccatttttggagaaattggttcaaaaagatattgaggttctttatttggttgaacctattgatgaggttgccattcagaacctacagacctacaaagaaaagaaatttgttgatatcagcaaggaagatttggaattangtgatgaggatgaggtcaaagagagggaaaacaagcaagaatacaacctac

SEQ ID NO: 5118 - DNA, 391 bp, Glycine max
gtaaccctggacggaggtgaaacgtggcaagtgtgcacactggactgtccggagaagccgaacaaatatggaaagtactggtgttggtgtttttggtctgtggaggttgaggttttggacctgctcggagccagggagattgcggtgcgtgcttgggacgaggccctcaacacccaacctgaaaagctcatttggaatgttatgggcatgatgaacaactgctggttcagagtgaaaaccaatgtgtgcaggccccacaagggtgagataggtatagtgtttgaacaccccacccaaccaggcaaccaatccggcggatggatggcaaaagaaaaacacctagagaaatcatctgagtccaacccaaccctcaagaagagtgtcttcttcc

SEQ ID NO: 5119 - DNA, 391 bp, Glycine max
attttgtgggaatgtggagttatgctggctcactgaacaggtcgttttctctgaccgttataaagtttctcaatatagtcgttgtacttccccgctatcttgatcgtgatgctgaggctgttcgggaagacaatctgctgaagcttgaagttgctgagctgaaatccaagttcattgaaagggcccaggcactaatacatggagatctacacactggttctgtgatggttactcgtgaatcaactcaagttattgatccagaatttgcattttatggaccaatgggttttgatattggagcattcttgggaaacttgattttggctttctttgctcaatatgggcatgctgatcaagcaaatgatcgaagattctataggaatggattctt

SEQ ID NO: 5120 - DNA, 453 bp, Glycine max
cccacgcgtccgcccacgcgtccggcaagatatcaaagggcaataaatgtgactgaactgcagcatgaccttgagttactgccgggtggtgatcttactgaaattggtgaaagaggggtaaacatcagcggtggccaaaagcagagagtatccatggctagagctgtctactccaattctgatgtgtacatctttgatgatcccctaagtgctctggatgcgcatgtggctagacaggtttttgataaatgcatcaagggagatttgagagggaagacccgagttcttgtcacaaatcagctgcattttctttcgcaggttaatagaatcattttggtccatgaaggtatggtgaaggaggagggaacttttgaggaactctctaaccatggaccgctgtttcaaaagcttatggaaaatgcgggaaagatggaagagtatgaagaagaagaa

SEQ ID NO: 5121 - DNA, 382 bp, Glycine max
aaaaataagacattgtttggtttggttacttgctcgaatttcctcgaatcgcttaatttgtatttgattagttaaaccgcaacgcggaatctcttttctcgaactggctaactctcaggcaagtggttcggacgctgattccagcaacaagcggctggtgctcgcactgtatgacgccctaaactccggcgactccgacgccgtcgtcaagatcgtcgccgccgacctcgagtggtggttccatggtccgccctcacaccagtttttgatgcgcatgctcaccggcgactccgctgccgacaactccttccgcttccttccgcagtccatcgccgccttcggctccaccgtcatcgtcgagggctgcgacaccgcccgcaac

SEQ ID NO: 5122 - DNA, 393 bp, Glycine max
tcctcgaatcgcttaatttgtatttgattagtgggaccgcaacgcggaatctcttttctcgaactggctaactctcaggcaagtggttcggacgctgattccagcaacaagcggctggtgctcgcactgtatgacgccctaaactccggcgactccgacgccgtcgtcaagatcgtcgccgccgacctcgagtggtggttccatggtccgccctcacaccagtttttgatgcgcatgctcaccggcgactccgctgccgacaactccttccgcttgcttccgcagtccatcgccgccttcggctccaccgtcatcgtcgagggctgcgacaccgtccgcaacattgcctgggtccacgcctgcacccttactggtgggataattactcagatc

SEQ ID NO: 5123 - DNA, 421 bp, Glycine max
  modified_base (337)..(337): a, c, g, t, unknown, or other
caaaaataagacattgtttggtttggttacttgctcgaatttcctcgaatcgcttaatttgtatttgattagttaaaccgcaacgcggaatctcttttctcgaactggctaactctcaggcaagtggttcggacgctgattccagcaacaagcggctggtgctcgcactgtatgacgccctaaactccggcgactccgacgccgtcgtcaagatcgtcgccgccgacctcgagtggtggttccatggtccgccctcacaccagtttttgatgcgcatgctcaccggcgactccgctgccgacaactccttccgcttccttccgcagtccatcgccgncttcggctccaccgtcatcgtcgagggcttgcgacaccgccgcaacattgcctgggtccacgcctgcaccgtcacggatgggat

SEQ ID NO: 5124 - DNA, 429 bp, Glycine max
gtttggtttggttacttgctcgaatttcctcgaatcgcttaatttgtatttgattagttaaaccgcaacgcgggatctcttttctcgaactggctaactctcaggcaagtggttcggacgctgattccagcaacaagcggctggtgctcgcactgtatgacgccctaaactccggcgactccgacgccgtcgtcaagatcgtcgccgccgacctcgagtggtggttccatggtccgccctcacaccagtttttgatgcgcatgctcaccggcgactccgctgccgacaactccttccgcttccttccgcagtccatcgccgccttcggctccaccgtcatcgtcgagggctgcgaacaccgccgcaacattgcctgggtccacgcctgcaccgtcacggatgggataattactcagatcagagagtact

SEQ ID NO: 5125 - DNA, 254 bp, Glycine max
  modified_base (215)..(215): a, c, g, t, unknown, or other
ctcgaatttcctcgaatcgcttaatttgtatttgattagttaaaccgcaacgcggaatctgggttctcgaactggctaactctcaggcaagtggttcggacgctgattccagcaacaagcggctggtgctcgcactgtatgacgccctaaactccggcgactccgacgccgtcgtcaagatcgtcgccgccgacctcgagtggtggttccatggntccgcctcacaccagtttttgatgcgcatgctcaccggc

SEQ ID NO: 5126 - DNA, 433 bp, Glycine max
  modified_base (369)..(369): a, c, g, t, unknown, or other
aagacattgtttggtttggttacttgctcgaatttcctcgaatcgcttaatttgtattggattagttaaaccgcaacgcggaatctcttttctcgaactggctaactctcaggcaagtggttcggacgctgattccagcaacaagcggctggtgctcgcactgtatgacgccctaaactccggcgactccgacgccgtcgtcaagatcgtcgccgccgacctcgagtggtggttccatggtccgccctcacaccagtttttgatgcgcatgctcaccggcgactccgctgccgacaactccttccgcttccttccgcagtccatcgccgccttcggctccaccgtcatcgtcgagggctgcgacaccgnccgcaacattgcctgggtccacgcctgcaccgtcacggatgggataattactcagatcagagag

SEQ ID NO: 5127 - DNA, 460 bp, Glycine max
  modified_base (386)..(386): a, c, g, t, unknown, or other
attgaccatatcaaggcaggattgtctgtgttggcaaaatatagaaggcctatagttgtgcatgctgagattcaacaagattttgaaaatcatttggagcttaatgaggataaccttgatccacgtgcttacttgacctatctcaataccaggccaccttcatgggaggaggcagccattaaacaacttgtaagtgttacgaaggacacaagaaaaggtggccctttagaaggagcacatgttcacatcgtccacttgtctgattcaagtgcttccttagatctgattaaggaagcaaaaagtcatggtgacagcataagtgttgagacttgtcctcattacttagctttcacgtctgaagagataccaaatggggatactcgttntaagtgttccccacccattcgtgatgcataccacatagacaaattatgggaggctgtattagagggacacattg

SEQ ID NO: 5128 - DNA, 373 bp, Glycine max
aatgggtgtatctgcaaattagacattagagtgtgaactccaaactctgaaaccctggactcgcatccaatccttaggtgggtaccgaattggagtccaaccaaatcctaaacacatggactcaactctgtcacgggtgcatctccacaatctgcctactctttcctccgtcgctcaccgtcctctcttgcagcctctcaccgccgtcgcttctttctaccgctcttctcctcctctaccacgcctacgtctatcgccgcttctcgctgctaacaccctcaccgctaatgacgtctcgccaagaagtggactatacactgtcagtgactttatgacaaagaaagaggatttacatgtggtgaaacccacaaca

SEQ ID NO: 5129 - DNA, 377 bp, Glycine max
ggttacttcttcttcttcttcttcttcttcttcttctctctggaattttccgtgacttgggtgtgcatcgatggcggcgatcagtctccggaaggggaacacgcggctgccgtcggaggtgaaccgcgtgctgtacgttcggaaccttcccttcaacatcacgagcgatgagatgtacgacatcttcagcaagtactgcgccattcggcatatccgcatcggcaccaacaaggacactcgcggaacggccttcatcgtctacgaggacatctacgacgccaaaaccgccgacgaccacctttccggcttcaacgtctccaaccgctacctcatcgatctctactaccagcaagcgaagatgatcaagaagttcgatc

SEQ ID NO: 5130 - DNA, 431 bp, Glycine max
gcaacataaaaaaaaaaaatagaaagaaaaatgatgctcggagaacaccatcgcgggaatccgacggtcctcgtgccaccgtggccagcccacgacgatccgacggctgagatgtactccgcgttcttaacaaacgacgtcaatgctggtgagtactctccgtaccatcttcaagaagcactaacggcgctgcagcgttttctgccgtcaaacgaaacggacgcagactcggactcctcggaggcggctcagcccgacgcggcggtggacgcgtacacgtgcgaccatttccgcatgtacgagttcaaggtccgtcgatgcgcacgtggcaggtcacacgactggacggagtgtccgtacgcgcatcccggcgagaaggcccgtcgacgtgacccgcggaggttccactactctggcgtggcgtgcccgga

SEQ ID NO: 5131 - DNA, 428 bp, Glycine max
cccacgcgtccgaagttttggtcattcattcttcaaggactcttttaagcgagtttttgaggatggggagcaatctcttggtctttgtttcaatggaaccctagagataaattgctccaaggaaatcaaaattcagggaattattggaccttgcacctcgttggaaaagaaagggccttctgttgctgatactgttataggagagggaaacacaacagcatggaagatgtgtggccttgacaagagtacatgcttgactgtgatgtttgatctttcatcaagtgatcgttcaaatacccctggtgctgttaacccacaattgtacctacagttccttacaagttaccaggacccaagtggtcaatcagtgcttcgtgtcacaacagtaactagaagatgggtggatagttctgttagctctgaggaat

SEQ ID NO: 5132 - DNA, 370 bp, Glycine max
cccacgcgtccgcccacgcgtccgcaaaaccctagctcgcgttctgctttcgtcttggacatcagcaggatggagtctcaggtgaagcacgcacttgttgtcaaagttatgggtcgtactggatccagaggacaagtaacccaggttagagtgaaatttttggatgatcagaaccgtcacatcatgaggaatgtgaaaggacctgtgcgagaaggagacattctcaccctactcgagtctgaaagggaagcaagaagattgcgctagatggtttcttttggcttgcctccaaattcgaacaaaacattgtgattttgttgattttaatggtagttggtggatgtcaaatgttttatcaccctatcttatt

SEQ ID NO: 5133 - DNA, 462 bp, Glycine max
aagcaagcaaaaccctagcggcgcctgctttctttgttcgtgttttgcatcaggatggagtctcaggtgaagcacgcacttgttgtcaaagttatgggtcgtactggatccagaggacaagtgacccaggttagagtgaagtttttggatgatcagaaccgtcacatcatgaggaatgtgaaaggacctgtgagagaaggagacattctcaccctactcgagtctgaaagggaagcaagaagattgcgctagatggtctcttttttttggcttgcctccaaattcgaacaaaagcaatatttttcttgatatttatggtagttagtcggtgctaaaggggttatagcaccctatcttattgttttggatctattttcattcgaattattgcttgaattttgtatgtttaaacttcgagattgaggtatgctttggtttaatatatgatttgaattatggctt

SEQ ID NO: 5134 - DNA, 427 bp, Glycine max
acaaattcttctgttcaacaggtgtgtgctttggaatcagcatttggctatttggtctttgccaatggatgctaagtctgctgtagaattaatggagtcttcctcagaggttcatttttctggatttcacatggatggttttgagcaaagaaaggctagcatagaacaaccaacaacctcagaaactgacatgtataaacaaccttttgtcataggtgttgctgggggtgcagcatctggcaagacaacagtttgtgatatgattattcagcagcttcatgatcaacgagttgtacttgttaatcaggattctttttacaataacttgacggaggaggaacttacaagagtacaagattacaactttgaccatcctgatgcttttgatactaagcaattactacatgttatggacaagttgaagcat

SEQ ID NO: 5135 - DNA, 414 bp, Glycine max
caaattcttctgttcaacaggtgtgtgctttggaatcagcatttggctatttggtcgttgccaatggatgctaagtcggctgtagaattaatggagtcttcctcagaggttcatttttctggatttcacatggatggttttgagcaaagaaaggctagcatagaacaaccaacaacctcagaaactgacatgtataaacaaccttttgtcataggtgttgctgggggtgcagcatctggcaagacaacagtttgtgatatgattattcagcagcttcatgatcaacgagttgtacttgttaatcaggattctttttacaataacttgacggatgaggaacttacaagagtacaagattacaactttgaccatcctgatgcttttgatacctaaccattactacatgttatggac

SEQ ID NO: 5136 - DNA, 445 bp, Glycine max
cccacgcgtccggcgacgccgtttgggtcctcttccacctcgccttcttctcccaatgccttccctccgcctgggcccactcggcgatcctcctcccgggtcaactcgcccgtgactcaccgcagagctgccccgcccctgaccccaacctctactacaagccagtcatcggaatcgtcagccatcccggcgacggcgcctccggccgcctcagcaacgccaccggcgcctcctacatcgccgcctcctatgtcaaattcgttgaggccgccggcgcccgtgtcgttcccctcatctataccgagcctccggagaagcttctcaagaagctcgaattggtaaatggggttctcttcactggtggatgggctaaaagtgggttatattttgaaactgtcgacaaaatatttaagaaaattttagaagagaatgatgctggagatca

SEQ ID NO: 5137 - DNA, 469 bp, Glycine max
ccctaacaactctctccacctcaaccctctcttcacgcgcccttctctctccctgaggcgccgctcgcacactcgccgctccttcgtcgtcaaagcctcctccagcgagcttccgctagttggaaacaccgcaccggatttcgaagcagaggctgtgtttgaccaggagtttatcaacgtgaaactatctgattacattgggaagaaatatgttgtgctcttcttctacccgttggacttcacttttgtttgtcccacagaaatcactgctttcagtgaccggcatgcagagttcgaggcactaaatactgagatattgggtgtttcagttgacagtgtgttctcgcaccttgcatggatccaaacagatagaaagtcacgtggccttggtgacttgaattatcctttgatttctgatgtcaccaaatccatatcgaaatcttatggtgttctcattcctgaacaggga

SEQ ID NO: 5138 - DNA, 430 bp, Glycine max
ctcaataaataacagaacttcatctgttttctttgtcctcaccaagccagagagagagatggaagaagcatcatgtgtatgcttagttgtcatactgatacttgctctaacattggcatggagggtgctgaactggttatggctaaggccaaagaggttagagaggctcctaagagagcaaggccttcaaggaaatccctacaggcttttggttggggatttaaaggagattatgaatatgcaaaaggaagtcacatccaaacccatgaatctctcccatgatatagtgcctcgtgtcttttcctttctccaacacactctcaacacacatggcaagaattcttttattcggtttgggcgaaaaccaagggtgatcatcacagagcctgagttaatcaaagatgtacttaataagatgcatgatttccca

SEQ ID NO: 5139 - DNA, 426 bp, Glycine max
gggccatctggctggcttccactttctctttatggtaattcacactctgcagcttctgccaagaccaacacaacaggaagctatgcatcctctcttccatcaaacctttgtcgtcatttctcatttgctgaaatcaaggctgccacgaacaactttgacgaggctttgcttcttggtgtgggaggatttggtaaggtttacaaaggggaaattgatggtggaacaaccaaggtagcaattaaacgtgggaatccactatctgagcagggggtgcatgagttccaaactgagattgaaatgctctcaaaacttcgtcaccgccaccttgtttcactgattggctactgtgaagaaaacactgaaatgatccttgtgtatgactatatggcctatggaaccactcaggagcatctgtacaagactcag

SEQ ID NO: 5140 - DNA, 421 bp, Glycine max
ttctgccgtcatactcacaccactcttcttccattttcattttctctgcgaatgcctagtcccatacacaaaccaaatgggtattaagggtttaacaaagcttttggcggacaatgccccgaagtccatgaaggagaacaaattcgagagctacttcggtcgcaagatcgccattgacgctagcatgagcatttaccagttccttattgttgtgggaagaagcggaactgaaatgctcactaatgaggctggtgaagttaccagtcatttgcaagggatgttttcgcggacaatcagacttctagaagctgggataaaaccagtatatgtttttgatgggaagccaccagatttgaagaaacaagagctggccaaacgttactccaagagagctgaggctactgaagatttgtcagaagcc

SEQ ID NO: 5141 - DNA, 390 bp, Glycine max
tgccgtcatactcacaccactcttcttacattttcattttctctgcgaattcctattcccgtacgcaaaccaaatgggtattaagggtttaacaaagcttttggcggacaatgccccgaagtccatgaaggagaacaaattcgagagctacttcggtcgcaagatcgccattgacgctagcatgagcatttaccagttccttattgttgtgggaagaagcggaactgaaatgctcactaatgaggctggtgaagttaccagtcatttgcaagggatgttttcgcggacaatcagacttctagaagctgggataaaaccaatatgtttttgatgggaagccaccagatttgaagaaacaagagctggccaaacgttactccaagagagctg

SEQ ID NO: 5142 - DNA, 413 bp, Glycine max
acgtgccgtcatactcacaccactcttcttacattttcattttctctgcgaattcctattcccatacagaaaccaaatgggtattaagggtttaacaaagcttttggcggacaatgccccgaagtccatgaaggagaacaaattcgagagctacttcggtcgcaagatcgccattgacgctagcatgagcatttaccagttccttattgttgtgggaagaagcggaactgaaatgctcactaatgaggctggtgaagttaccagtcatttgcaagggatgttttcgcggacaatcagacttctagaagctgggataaaaccaatatgtttttgatgggaagccaccagatttgaagaaacaagagctggccaaacgttactccaagagagctgaggctactgaagatttgtca

SEQ ID NO: 5143 - DNA, 432 bp, Glycine max
  modified_base (400)..(400): a, c, g, t, unknown, or other
cccacgcgtccgaaaacctcatccatggcttctcttctccgcttcaacggcgtctcccgctttcccttaccttcccaacccacacgtgaccccatcctccccaaaccgtcacgcctcgtaacggtgcgcgcggaggtgaaagagacctccgcacccgccgccgccacatcctccgacgaaaagatccgcgaaatcctccgcaaccgtgactacgacaagaaattcgggttcagcgtggagatcgagtccttgacgatcccaaaagggctctcaaaagaaaccattggtctgatctcgtccctgaaggaggagccccactggatgctcgaattccgcctgaaggccttggataaattcctctccatgaaggaacccacgtggtctgacaacacttaccctnccatcgacctccagaatatctgctactactcc

SEQ ID NO: 5144 - DNA, 426 bp, Glycine max
cgaaggttgttgtttgatttactcacatcatcaagaagggagagccaacttttagtgggcttgtgtcaagattcttgctcggaaaagcattcccaataccagtttatctgtcactgctgccaattattggtggtggtgcactagctgcagtgactaagctcaatttcaacatgattggcttcacgggggctatgatatcaaatttggaatttgtctattgcaatatattctcaaagaaggggatgaagggaatgtctattagtggaatgaacaactattcttgtttttccataatgttactgtcaattctcacaacttttgccattgttgttgaggaccccaaggtttgggctgcaggctggcaaacaaatgtgtctcaaattggtcccaattttgtatggtgggtagctgctcagagcgtcttct

SEQ ID NO: 5145 - DNA, 325 bp, Glycine max
ggcagttgatgaaacaaccgcactattgcagcaaaagtgggacaagattttctacacaggcaatggaaaagtgggaagaatagtgatgactgctgctgcaaaacaccttacaccagttgtgctggagcttggaggaaaatctcctgttgttgttgattccaatgtcgatttgcagatagcagctaggcgaataatttctggcaagtggggattgaataatggacaagcctgcatttctccagattatgttataacaaccaaagattgtgctcccaagttggtggatgccctaaagactgaattggagaaatgttattgaaagaac

SEQ ID NO: 5146 - DNA, 460 bp, Glycine max
gttgacagaaagtttgctcaactgtcccattattggcgttagctatgctacccactggagcaggagagacccaattacgtgagagcaacagtcagaaggtccatcctcaaccaatagaagaggccatgaatcagaatccagaagcaatggaaaccctaatatctaaagtttttatgaatatctcttccttgaagtcagcttatattgagcttcaagctgctcatactccctacgaccctgataaaattcacactgctgataaacttgttattagtgagctgaaaaatctgtctgaactcaagcatttctacagggagaacaacccaaaaccagtgtgtgtttctccccaagactcacgtttagctgcagaaattcaagaacaacagagccttctgaaaacttatgaggtcatggtgaagaagttccaatctgaaatccagaataaagattcagagatcca

SEQ ID NO: 5147 - DNA, 472 bp, Glycine max
gtggagtaatacttgtgtatggcacataatattaatgccaggccactttaaactactccttgtgtgtgtgccaatgaatcatgtgggtatcttgcatggcttgttttgaagcctatccataaaggagcagtgcctaacttcaactttgattcttgttctttatatatggttgttattctattgcactttacctttatctttttattgtttccttgtttttcttttttaattgtcttttacttttttttcttttttttttttttttttatttttattctattttttttttttattttttttttattttattctatttttttttttttttttttttctttctttttcttttctattttttttaatttctttttttttttttatttttttcttttttatttttttctttctttactttttttctttttttttatcttttttttattctttcttattttttctatttttttttttt

SEQ ID NO: 5148 - DNA, 409 bp, Glycine max
cggacgcgtgggttctggtacatcattgtctttggctctcggtgagggttttagggcacacaccgcagggagacggtttctttcactctctgcaattcgcgatggctgacgaggactatgaagatattgacatggggtacgaagatgaaccgccagagcccgagattgaggaaggtgcagaggaagatgtggagaacaaaaacgatgaaataactggagagcctattgacaccgaggataaggaagaggaacaaccagtgaagcggcctcgaaagacatcgaaatatatgactaagtatgagcgtgctagaattttgggcacccgtgctcttcaaatcagtatgaatgcacctgtcatggtcgagttggagggggaaactgacccactccagattgctatgaaagagct

SEQ ID NO: 5149 - DNA, 408 bp, Glycine max
  modified_base (400)..(400): a, c, g, t, unknown, or other
ctctgtctctcttcctatcacatcataaattctatcatgattcatgcttatgttttttttattctctttcgaggtattgcatagagatttggggtgttcattatacttttttcaatagttttgcatagagatttggggtgttcattatacttttttcaatagttttatcacttgattgattatatatatccaccatgattcgtgcttaagtagttgattaacaatatgtcattttctgtgttgaaggtaaaccatgggaatctagtgaagttggagggattttgcatagacccagaagaagcaaattgctatctagtctatgaatatgtagagaatggatctctatactcatggctgcatgagggcaaaaaagaaaagttgagctggaaaataaggctangaatagcc

SEQ ID NO: 5150 - DNA, 461 bp, Glycine max
  modified_base (38)..(38): a, c, g, t, unknown, or other
  modified_base (330)..(330): a, c, g, t, unknown, or other
cccacgcgtccgcttgtgacatcacaaaccgtaccctntttgtttatttcctttgtgggtggtgaattcgtgcaaatttctgcgacacccagatggattttgcgctgaatccgtgtcctttgcgatcttctacgttcgtgaatttcgtcgagagggttaaacagcttggtaccctcgccttttctgcagtcattgggaacatcttctccgcgatcttgaccttctgcttcgcattagttggcactttgttgggggctttgactggagctttgataggacaagaaactgagagtggcttcattcgaggggctgctgttggtgccatatcangagctgttttttccattgaaagggttgaatcctctcttgttctctggcaatctgatgaatctgggattggctgtgtcttatacttgattgatgttattgccagcttactgagtgggagacttgtgcgtgag

SEQ ID NO: 5151 - DNA, 363 bp, Glycine max
cacaggtccaaatgggcagcatctttgcatggtccttgagtttcttggcgatagcttgcttcgcttgatcagatacaaccgctataaaggtcttccattgaataaagttagagagatttgcaaatgtgttttgactggtttggattacttacatactgatcgtggtatgatccacactgacctaaaacctgaaaacattcttctatgttcaaccattgatcctgccaaagaccctttaaggtctggactttccccaattcttgagcggcctgagggaaacacaaatggtggagttacaagtcttattgagaaaaggttgagaaggagagcaaggacagcagttgctaagatatctggaagaag

SEQ ID NO: 5152 - DNA, 430 bp, Glycine max
  modified_base (16)..(16): a, c, g, t, unknown, or other
atcaaacaagggctgncctgaaggcaaatcaagttctggatgaaccctgtttggtgcctactgtgtggtagaatgggctctccaagttggaaatcatgctgcagggaaagtggatggccaactcatgctgtaacctgtggagctggtactggagtgtttctgttgattaagagaacaacaatcctactacagagatctgcacgtcaggccccctggccctctccttacttagatgcttttggtgaggaggattttgaaatgcatcgaggcaagccactttatctgaatgaggaacgctatgcagctttgacttatatggtcgcttctcatggtctggaccggagttccagggtccttggtcagaccactattggttccttctttcctggtttagttcaaattctacatgtttattttgtgtgaagaatgt

SEQ ID NO: 5153 - DNA, 336 bp, Glycine max
caggatctgagcttcagtgggtttttttttttttttacaatggcaacgaattcttctaatggagcaacaaagcaacctgccatgccatctcccttgcgtttttccaagttctttcagtccaatatgagaattctggttactggaggagctggatttattggctctcacctagttgacaaattgatggaaaatgaaaaaaatgaggtcattgttgctgacaactacttcactggatctaaagacaaccttaaaagatggattggccatccaagatttgagctaaattcgcatgatgtcacagagcaaattgtgattgaagttgatcaaatctatcat

SEQ ID NO: 5154 - DNA, 354 bp, Glycine max
gtgaaaaatctggttatggaaaacttaggaagagatatcaacaaattgagaagaatgctaaaattattcatgtgccactttcaaaggcagttcaagctaaggtagagaggaaggcagcatatgaaatatcaaagaaagatgtcaccaagtggcagcatattattcagagaaatagagaggccccaactattttctttgatgaaaatgtaaatttagggttttcaactgtaggagcaatagcttctgaatttgaacccagaactgaatttgagaagaaaattgctgcactagtttatgatgaggaagttatggaagctcataaaaaggatggttctaagcttcttgaaaagaaca

SEQ ID NO: 5155 - DNA, 370 bp, Glycine max
caggtagcagttgccctttcacatgctgctattttggaggagtctatgcgtgcccgggatcaagtcatggagcagaatgttgctttagatttagcccggcgagaggcagagatggcaattcatgctcgcaatgattttcttgctgtcatgaatcatgaaatgaggacaccaatgcatgcaattatagcattgtcatcacttctcttggagactgaactgacgccagagcaaagggttatgatagagacagtgttgaagagtagtaatgttttggcaacactcattaatgatgttctagatctttctcgacttgaagatggtagcctcgaattagaaatgggaaaattcaaccttcatggagttttgggag

SEQ ID NO: 5156 - DNA, 432 bp, Glycine max
cccacgcgtccgcccacgcgtccgaaaaaagagtagatcggtttaagcttggtgaaggtgtgatgccagctagtttcaaagttcttcatgatcctattaggaaaacagatactcttattgcagattttggtgaaagtgcaattggaagagttgctccagttgattctggattctggtggataattttacttcgtgcctacacaaagtctacaggggatttatctttggctgaatcaccagattgtcaaaagggaatgaaacttatactgactctatgcttgtcagaggggtttgatacatttccaactttgctttgtgctgatggatgttgcatggttgatcgaagaatgggcatttatggctatccaatagagattcaagcacttttcttcatggcattgagatgtgctttgtcaatgctgaaacaggatg

SEQ ID NO: 5157 - DNA, 425 bp, Glycine max
aatcaaagcaagccaattggtctctctcttacaccatgagtgcatcaaccaaagcttggattgtggcatcaagcataggggcagtggaggccttgaaagaccaattaggtgtatgcagatggaactatgctttaaggtcactacaacaacatgcaaagaacaacatcagatcttatagtcaagctaggaaattgtcctctgcatcctctgctgcggtttccaacaaggtcaagagaaccaaagaagagcatatggggaaagtcatcgaattcaattgctggggtcctagtactgcaaagttttaattagttaatatttatcttacgtgttgctacgatgagacggtgaatagagactgcttttttccatattcaatcccaatatcccccattaagcatcattatgtatctcaattccaatgtcta

SEQ ID NO: 5158 - DNA, 444 bp, Glycine max
cccacgcgtccgctttctccaaacaaagatccccaagatgcctccttgcaagtactttgcagttccgtcgattctcttcttcctgctaagcttcttaatctttccaaccaaagcagctccaatttacagttcccatgcgtgcacagactcttctaaataccaaccaaacagcacattccaaaccaacctcgacctcctcctctcttacctttcttccaacgccacccaaggcgtccacttttacaaaacaacagttggcagtgaaacccccaacgccgtcaaggggccttttctttggccgccagacaaccttaacggcctgtgccaccaatgggttaacgccggaagccaagacctgacacgccggtgcccaattgagaaagaaggccttatctggtaccacctgtgcctgggacgctacttcaacccaaacttccttaacaa

SEQ ID NO: 5159 - DNA, 444 bp, Glycine max
ctttgcaattccctcgattctcttcttcctcctaagcttcttaatctttccaaccaaagcagcgccaatttacagttcccatgcgtgcacagactcttctaaataccaaccaaacagcacattccaaaccaacctcgacctcctcctctcttacctttcttccaacgccacccaaggcgtccacttttacaaaacaacagttggcagtgaaacccccaacgccgtcaagggcctcttcctctgccgccgagacaccctcaccgccgtgtgccacgattgcgtcaacgccgcagccaaagacctgacacgccggtgcccagttgagaaagaggccataatctggtacgacgtgtgcatggtacgctactccaaccaaaactacctcaacaacatagtacccgcagtggacatgtctgactccaaaagcgtggctggcgctgatct

SEQ ID NO: 5160 - DNA, 414 bp, Glycine max
gttatcgatcacaagaccggtaaggctcagatctgggacactgccggccaagaacgatgcagagcagatacgagtgcatattacaggggtgctgtgggggcaatgttggtttatgacatcactaaacgccaaacctttgatcacataccacgttggttagaagaactgcgcaaccatgctgacaagaacatagtcatcattcttacaggcaacaaatgtgatcttgagaaccagcgtgacgtacccactgaggatgcaaaagaatttgctgagaaagaagggttgtttttcttagagacctcagcactagaagcaactaatgttgaaacagccttcataactgtcttgacagaaatatacaacattgtcaacaagaagaacctaactgctgatgaaaatcacggaaatgggaac

SEQ ID NO: 5161 - DNA, 437 bp, Glycine max
acaatgtttaaccaactggattctcatccccctcatataagttcttatatgaagcttccaactcctgagggcatggttcatcatgactcaccaccaaatcatcaatttccaggaaatatgcttcgtcctccttttcgtcaaccaaacagtggacttgcagggccagggtttgatcctccagttcatcattctatgttacaacaacaaatgcatatgcaaggaaaccttcccccacctcatttattacgtggattcccaaggggtgcacctatgccatctcatgctagcaatccaatgactggcttcatgcaggaaccaaacccaatgcaaggccaaggcttcccatttagtggtcaccagcatcctacttttggtggccctggaatgcaattacaagctcctgatgttggtggtggaagaaatcatccagaagcact

SEQ ID NO: 5162 - DNA, 454 bp, Glycine max
  modified_base (322)..(322): a, c, g, t, unknown, or other
  modified_base (327)..(327): a, c, g, t, unknown, or other
cccacgcgtccgggtgggggcagtgttgggctgatgggcttaatatctcagagagtgtatgatggaggctgccatgtcctagggatcattccaaaagctctcatgcctctcgagatatctggtgaaacagtaggtgaagtgaggattgtttcagatatgcacgagcgtaaggctgcaatggcacaagaagctgatgcatttgttgctctccctggaggatatggaaccatggaagagctgttggagatgataacttgggcccaacttggaatccataaaaaaccggttggtctactgaatgttgacggttactataactgtntgctngcattatttgacaatggtgttaaagaaggtttcattaagccttgtgcacggaatatagttgtctctgctacgtcagccaaagaacttatgatgaaaatggagcactacactccttcgcacgaacatg

SEQ ID NO: 5163 - DNA, 432 bp, Glycine max
agcaaatggagatagtgaggaggatggctagggactgttgtaagtatgggacagagaatcttggtagtagttacctccttgcaagggcttctcttcaatttggtaacacatatgatacaatggaaaatgagagagagactctgctcgggatcttaggcgatcaggtttgtatagatctctgagccactacgggcacagataacaggagctcctttggaggatgcacgccacctcactcgccgctatgacaaacttcatcaagaggtagaagcccaggctgctgaagttttgaggcgtcgatcaaagttgaagaattcttctgtttctgcagagagttccgcgaggcttcaaaatgcataaacaaggttgaaagaacttaaatttgccttggcagcacttggtagaaaaaccaacctctgctatgttgtctgt

SEQ ID NO: 5164 - DNA, 445 bp, Glycine max
caaaatctggaattcaaacactctctttaccttgtgtttgtgagatacggcttcgaggttttcctgttcaaacatcatcagtccccgtgatatcctccacagaagttatacctgatactcagaacgttgcttttagcttttaccttgaggaatctgatttaaaagcgttgttagctcccggttgcttctacaacactcatgcttgtttggagattgcggtgttttcagggaggaagggatcccattgtggagttggcaacaaaaggcagcaaattgggatttttagaatgcaggttggccccgagtggggtgaaggaaagccagtgattctttttaatgggtggataggtattggcaagaacaaacaggataatggaaagccgggtgcggagttacatttaaaagtgaaactagatcctgaccctagatatgtgttccagtttga

SEQ ID NO: 5165 - DNA, 388 bp, Glycine max
cccacgcgtccggttcggcataattgtatcgatcgatggcggcgttgataaggtcagcggcggtgatactggcgatcctgacgatctcggcgtgcatcgcgtgtacggcgtcgtacgggggattggtcgggggaaggtcgaagatccctgacgtgaaggcgaacaagaaggtgcaggatctagggcggttctcggtggaggagcataaccggatgctgaggcaggcgcagaatgaggaggagcaagtcacgttcgtggaagtggtggaggcgcaacaacaagtggtgtctgggatcaagtactacatgaagatatcggccacgcagggtggcgacggtggagattccagaatattcgaatccgttgtggtggtgaagccgtgggctcg

SEQ ID NO: 5166 - DNA, 355 bp, Glycine max
  modified_base (8)..(8): a, c, g, t, unknown, or other
cgttcgangttaacatgttcggtttaattttgcgatcgatggcggcgttgataaggtcaggggcggggatactggcgatcctgacgatctcggcgtgcatcgcgtgtacggcgtcgtacgggggattggtcgggggaaggtcgaagatccctgacgtgaaggcgaacaagaatgtgcatgatctagggcagttctcggtggaggagcataaccggatgctgatgcatgcgcataaggaggaggagcaagtaacgttagtggaagtggtaaatgcgcaacaacaagtggtgtttgggaacaattactacatgaagatatttgccacgcaggatggcgactgtggagattccagaat

SEQ ID NO: 5167 - DNA, 468 bp, Glycine max
  modified_base (217)..(217): a, c, g, t, unknown, or other
gcgcccacgcgtccggaacactgttattcagacctgtgttgttgcttgctatggccttgccttcagtggggggggtggttcatccttgattgccatggatcagagaacatatgaactcataggccctgattaccctggtaatagagctgaagatgttaaaaaccctggcttgggttggatgatgggtttcatgtttgttgtcagtttccttggactntttagtcttgtgccacttcgtaaggttatggtcttggattataagcttacatatcccagtgggacagctacagcaatgctaaataacagtttccatacaaaaactggagcagaacttgctgggaaccaagttctgcagctttgtgaagtatctaagcataagtttctgctggagttgctttaagtgggtcttaatggtattggggattcatgtgggtttgacaactttcctagctttggtttgacactttt

SEQ ID NO: 5168 - DNA, 239 bp, Glycine max
aataacactgatactggaacaagagatggagcgagaaataacaatggtaataaaagcgagttgggtagggaagagagtccagactcagaatcacaaggttggggtcccaataagcttcagaaagtgaacccttccaatcctatggatcaatccactgcagaagccacaatgagaaaagctcgtgtctcagttcgtgcccgatcagaagctcccatgattagtgatgggttccaatggag

SEQ ID NO: 5169 - DNA, 407 bp, Glycine max
cactctggcaaattattgaaccatacgacggatccatccactagtccggaagccgctgtgagaaaagctcgtgtctcagttcgtgcccgatcagaagcacccatgatcagtgatgggtgccaatggcgaaaatatggacaaaagatggctaagggaaacccttgtcctcgagcatactacagatgcaccatggcagttggttgcccagttcgcaaacaagttcaacgttgtgcggaggacagaacaattttgacaacaacgtacgaggggacccataaccatccactgccaccagctgcaatggctatggcatcgaccactgcagctgctgctagcatgttgttgtctgggtcaatgaccagtgctgacggaataatgaaccccaatttgctaactagagctattct

SEQ ID NO: 5170 - DNA, 319 bp, Glycine max
ggctcgacgccacgcgttcgataattaataataattagtatctattcaagtatcaacaatataagcaataggttgctgtggctaaagctcgatattaatttcgtggtgttgtaatataggttcaacgttgtgctgatgatagaaccattttggttacaacatatgaaggcacgcataatcatccactgccacctgctgctatggccatggcattaaccactacagatgctgctagcatgttgctttctggatcaatgtccagtgcagatagtataatgaacccaaatatgctagctagagcaattcttccttgctctac

SEQ ID NO: 5171 - DNA, 410 bp, Glycine max
cggacgcgtgggttaatttccactcatatgcacctttgtagtttgtactaacacaagcagcaagtgcttggtctatatccacaaacatggtagttggaggttcgaataccggtgttcatggatggcgagacatcaagagtctcaccgtccaagtcatcaccgggagatggttcgtggtgttcgcctcctttctaatcatggccgccgctggagccacctacatgttcggtctctattccagcgacatcaaaacaaccctcggttacgaccaaaccactctcaatctcctcagtttcttcaaggacttgggcaccaacgttggggtcatctcaggcctaatcaacgaggtcgctccaccttgggttgtcctcgccattggtgccatcctcaacttctttggctacttcatg

SEQ ID NO: 5172 - DNA, 477 bp, Glycine max
  modified_base (284)..(284): a, c, g, t, unknown, or other
cggacgcgtgggcggacgcgtgggttacagagtgaagattttatttttctttctttctgtggaggataaagaatgggtgctaagtccgaaaccgcttgcgttactggggcttctggttacatcggatcatggcttgtcatgagactcatcgagcgtggctataccgttcgagccaccgtactcgacccagctgatatgagggaggtgaagcatttgctggatctgccaggtgcagagagcaagctgtctctgtggaaggcagaacttacagaagagggaagctnttatgaagccattaaagggtgcacaggtgttctccacttggccacccccgttgactctaagtccaaagacccagagaatgaaatgataaagcctacaattcaaggagtactaaacatcatgaaagcatgcctgaacggcaaaactgttcgaaggctagtattcacgtcctcagcccgaactaccaacattact

SEQ ID NO: 5173 - DNA, 455 bp, Glycine max
gcaagaattgggctcccttgtttgcttattatgcgtgcctttatggggattgggtgttgccatgcctgctatgaataatatgctttccaagtggattcctgtttcggagagaagcagatcacttgccctagtatatagtggcatgtacctaggttctgtggttggcttggcattctcaccattgctaatccaaaaatttggttggccatcagtgttttactcctttggatctcttggaagtatctggtttgccttgtggttgagaaaggcatatagctccccaaaagatgaccctgatcttggggtagaggagaaaaggctcatactggaaggcaatgtatcaaatgcacctgtttcttccattccttggaaattaattttatcaaaagcacctgtttgggctcttataatcttccacttctgtcacaattgggggacatttattctttaacctg

SEQ ID NO: 5174 - DNA, 347 bp, Glycine max
cggacgcgtgggtttcgattgaacgtagtccgccgattgaggaggttatacagactggtgtggtttctcgctttgttgagtttctcatgagggaagactttccacagttgcaagttgaggcatcctgggctttgacaaatatagcttctgggacgtctgaaaacaccaaggttgtcattgatcacggtgctttcccaattgtcgtgatgctacttgcttctcctagtgatgatgtccgtgaacaggcagtgtgagcattatgcaatgtcgcgggtgattcacctagatgtcgtgatcgtgttctcagtcatggggctttgcttcctgtgtagcacaattaaatgaac

SEQ ID NO: 5175 - DNA, 383 bp, Glycine max
cccacgcgtccgtccacgcgtccgcacacgcgtacggaagcatgctggaccatggcgggcatcacagctgggaacacaaagcagattcaggatgtaattgaggctagtataattgctcctttagtccatgtgcttcaaaatgctgagtttgatatcaagaaagaggctgcttgggcaatctcaaatgctacttcgggtggatctcatgaacaaatcaagttcctggtaaggcaagggtgtattaagccctggtgtgatcttcacatatgtcctgatcctaggattgcgacagtgtagctggaatggcttgagatcattttcgaagtactgaagctgagaaaaatgtgaaccatactcatggtgtgaatgtaaatgcatatact

SEQ ID NO: 5176 - DNA, 367 bp, Glycine max
cggacgcgtgggtttcgattgaacgtagtccgccgattgaggaggttatacagactggtgtggtttctcgctttgttgagtttctcatgagggaagactttccacagttgcagtttgaggcagcctgggctttgacaaatatagcttctgggacgtctgaaaacaccaaggttgtcattgatcacggggctgtcccaattttcgtgacagctacttgcttctactagtgatgatgtccgtgaacaggcagtgtgggcattaggcaatgtcgcggaggattcacctagatgtcgtgatcttgatctcagtcatggtgctctgcttgctttgtatgcacaattaagtgaacatgccaagctttctatgc

SEQ ID NO: 5177 - DNA, 441 bp, Glycine max
  modified_base (67)..(67): a, c, g, t, unknown, or other
cccacgcgtccgctccaaacaaaaactactacttgcttagcacacaatattatgaaaaccgccgcanaggttgtttcatctcattgtcttgttgtagcagagtgctctcaatccagccccacacaactttctgctatggaacctcagattctgaatttggggtgcatgcattacagaaggagatgcaagatcagagcgccgtgctgtgatgaggtttttgactgtaggcattgccataatgaagctaagaattctgaggaggttgatgctgtggatcgtcatgatgttccacgccatgaaattaagaaggttatctgctccttatgtgatgtagagcaagatgttcagcagtactgtataaactgtggaatatgcatgggcaagtacttttgtactatatgcaaattctttgatgatgatatttcaaagaatcaataccac

SEQ ID NO: 5178 - DNA, 433 bp, Glycine max
  modified_base (338)..(338): a, c, g, t, unknown, or other
gcaacttgttccatttttcttccttcctcattcctcacttgcgtcccgaaaatggcttcgagtggcgttgcgggaactgccacacccgaattctaccagaacgtcgtcgtaatgcgtcacggcgatcgcatcgacaacttcgaacccatgtgggtgtccaccgctacccgaccctgggacccaccccttatccaacagggtcgggtccgagccttcgccacgggtcgcaagttccgcaacaacctccctttcactctccaccgcgtcttcgtctctcccttcctccgatgcatccaaaccgccgccgaagtcgtcgttgcactctctgccatcgccgncggcgacgaccccaacgtcatcgtcggcgatgacgtcccaatcgatccctccaaactcaaggtctctgttgaatatgggttatgtgaaatgatga

SEQ ID NO: 5179 - DNA, 413 bp, Glycine max
cgggctttctcttcttttcctctggcttcatcatcatctctctatctgcaccccttttgagagacttcaacttgttacttaattactctactctcccctttctagcttctgtgttcttcttcttcggttctctcttcatggggtgctgcttaagtgccaggatcaaagctgagagcccttcacgcaatggtttgagttcaaaggatggtaacaaggaagaagatggcttaagcagcaaggcctcaactccctctgttcctccaactccgcggacggagggagagatcttgaagtcctcaaacatgaagagcttcaacttcagtgagctaaaaactgctacaagaaactttcgtccagatagtgtggtgggtgaaggcgggtttggttgtgtttttaaggggtggattgatgaa

SEQ ID NO: 5180 - DNA, 238 bp, Glycine max
tcgcagcagttcaaagaccggggaagaacaatttgggaatgggattgggtgcggggttgcttggaggagccttgggtggacttctaattggggacatgatttctgatgccggttcttacgacgctggttttggagatttcggtggatttgatttttaaatctcttgttagttttctttgtttgggggtagttttttatgttcaaatgtgaacttaaattagaatatgttttttgcagt

SEQ ID NO: 5181 - DNA, 347 bp, Glycine max
cggacgcgtgggtttgaacgttcctcttactgctaagtggcaccaaatgtctgcctttgtgtactttctggtgaccaatgcaatagcatgcacgtatgcagccatgtctctactacttgcccttgtgaacagaggtaaaagcaaaggcttgtggacattgatcgctgttctcgacacattcatggtggctttgctcttttccggcaacggcgccgctgcagcagtcggtatccttggctacaaaggaaactctcatgtgaattggaacaaggtgtgcaatggctttgggaaatattgtgatcaagaggctgcttcgattggtgtgtcactgattggatcattagcat

SEQ ID NO: 5182 - DNA, 420 bp, Glycine max
cccacgcgtccggaaaattggaacctgcctctgttgttaaagtttgtatttttttttgagtgggtggattgagagaactgtgcaagctttggaacttcttcaaagtctggtacttcaatggctactgaagaggttaataaacttcaatcacttcctccttaccctgagatgatagtgaaagcacttgaagccctgaatgaggctgatggatcgagtaaatcagcgatatcaaagtacatagaaaccacctacggtgagttgccagatgaaactgttttggggagtcacctgaacaagatgaaagagagtggagagcttgcgttcaaacagaacaattacatgaaagctgatccaaatgccccaccaaagaagggacgtggaaggccaccaaagccaaaggttccattgccaccaggcact

SEQ ID NO: 5183 - DNA, 388 bp, Glycine max
cccacgcgtccgtccacgcgtccgctctgcgctctctctctctgtctcctacgattcgtttggcccctttggttgccctaatttcaaccatgcctcgccgtagctccggtggaagatctgcccgtcctgctcctcgggcatctcctcgtcctgctccagttcaccatgctccttctccagcccctgctcagagtggtggtggatctatgcttggtggcattggttcaaccatagctcaaggtatggcttttggcaccggaagtgcattggcacacagggctgtggatgcagtcatgggtccacgtaccattcaacatgaaacagttgttacagaggctgctgctgctgcccctgcacccactgcaaatacttttggtggcgatgcatg

SEQ ID NO: 5184 - DNA, 409 bp, Glycine max
gccctcactcttccctcttttctttctttcatccccaaatcaaaacctaaattcggaccttcaactttctcccccaaatcgaccaccaccactgtcaagcccattcatttatattttattcgtatatatacatacagagagtgagtgagagagagagagagaagaatggattcggatcaaggcaagcttttcatcggtgggatttcatgggatacgacagaggacaagctcaaggagcatttcggtaactacgacgacgttttgagcacttccgtcatgcgggagaagaacactgggaagccaaggggcttcggtttcgtcgtttttgcggatcctaacattctagatagggttatggaagacaaacatggcatagatggcagaacggtaacgcttctatcattttttt

SEQ ID NO: 5185 - DNA, 439 bp, Glycine max
gtgggaaatggcgtacctgaacgctaggcgcaccttagcatctaccctgtcacgagctcttgcttcttcatccggtagcgcctctcgctttcgcttcgcattcgcattcgcgttgctccccgccaaacaaaccgcacccaaccctcactgggcgagtttcgcggttcggactcaatcttcgggttcgggttactcgcccctgaacgacccgtccccgaactggagcaaccgtcccccgaaggagaccattcttctcgatggctgcgactacgagcactggctcatcgtcatggagttccccgataaccctaaaccctctgaggaccacatggtcaacgcctatgtcaaaaccctagctcaagtccttggaagtgaggaggatgccaaaaacaagatatactctgtttccacttctacatacacaggtttcggcgctctc

SEQ ID NO: 5186 - DNA, 431 bp, Glycine max
gaacgctcgctcgcactgtccagatcttaatcaagaggagtgagttttgtttttccaggcatgacgccgctgatcctgcatgctgggaaaaccaacaaaaattcttacaagacactcattgcagccgagtatgctggcgtccaagttgattttgcccctaattttgagatgggtgtctccaataaaactcctgaatttctcaagatcaatcctattggcaaggttcctgtgctggaaacccccgatggtccaatattcgagagcaatgccattgctcgctatgttacccggctgaaaggtgataacactttgtatggatcttccttgattgaatatgcccacattgaacagtggattgatttttcatcattggagattgatgctaatattatcaagtggtatgccccaagagttggacgaggaccatatct

SEQ ID NO: 5187 - DNA, 441 bp, Glycine max
cccacgcgtccgcccacgcgtccgatactaccagaaaaagaagaacccttctaaaaacctgcggcagaaagaaccaacaatgtcgccgagcttcgtcttcgaccctcctagcgacgaagaaatcgaacactccgaacacgaagaagaagaagaagaagaatcagtaggagaaccagagtcaggatcagaatcagagtcagaaggagaaggaggagaagtagaagaagggcataaagaagcgcgggttccgaagaagaagaagaagaaaacacagtctccatgggacttcgccaaatacacggaatcagtggccgaggaacacgctcgcaggagcacaacctcggtcgacgagaaaatctcaaaagcactcaaacaacgttccacgcctctcgttgctgagctcgaccacagctccgagtccgaacctgatgaacaagaaga

SEQ ID NO: 5188 - DNA, 377 bp, Glycine max
ggaccaaccatgtcgcctagtttcgtcttcgacccgcctagcgacgaagaaatcgggcactctgaacacgaagaagaagaagaatccgaagaagaaccagagtcaggatcaggaacaggatcagaatcagagtcagaaggagaaggagaagaagaagaagggcacgaagaagcgcgggttccgaagaagaagaagaagaaaacgcagtctccatgggactttgctaaatacacggaatcagtggcggaggaacacgctcgcaggagcacaacctcggtcgacgagaaaatctccaaagcactcaaacaacgttccacgccgctcgttgctgagcttgaccacagctccgagtccgaacctgatgaacaagaagatta

SEQ ID NO: 5189 - DNA, 438 bp, Glycine max
gaaagaagaagaagaagcgttctttcggagagttcgaagatgtcgggcgttaccggcaacgacgaggaagacaagaagccaaccgaacagggagcacacatcaaccttaaggttaaggggcaggatgggaatgaagtttttttcaggatcaagagaagcactcaattgaagaagcttatgaatgcttactgtgaccgacagtcggtggatttcaactccattgcttttctgtttgatggacgccgcctccgagctgagcagactccagatgagttggaaatggaggacggggacgagattgatgccatgcttcaccagacaggaggttctgttgtctgaaggatgtgattactttgctcctcattataagtaggaattagttaacttagagctatgtatggcataagatacatattttattatctgctattatataca

SEQ ID NO: 5190 - DNA, 380 bp, Glycine max
agagagggtgtgtttctgggttttggaaatttcagccaatatcgaaaaacaagaagccccatcaataataatcatcgaaggaatttgaaaggtcgaaacttgagcatctgggatcgcgaaattggggtttttggttaaaagggtattatcttcggaactgattgatggcaaacctgtacgtgaaggcggtgccaccggcggatctgaacaggaacacggagtggttcacgtaccctggcgtttggaccacatacatcctcatccttttcttttcttggatcctcgtactctccgtcgtcagttgttcccctggcatcgcttggactatcgttaatctcgcacactttgctgtaacaatatcacttttatcactggaagaa

SEQ ID NO: 5191 - DNA, 425 bp, Glycine max
gagagggtgtgtttctgggttttggaaatttcagccaatatcgaaaaacaagaagcgccatcaataataatcatcgaaggaatttgaaaggtcgaaacttgagcatctgggatcgcgaaattggggtttttggttaaaagggtattatcttcggaactgattgatggcaaacctgtacgtgaaggcggtgccaccggcggatctgaacaggaacacggagtggttcacgtaccctggcgtttggaccacatacatcctcatccttttcttttcttggatcctcgtactctccgtcttcggttgttcccctggcatcgcttggaccatcgttaatctcgcacactttgctgtaacatatcacttttttcactggaagaaaggaactccatttgcggatgaccaatggatctacaatagattgactt

SEQ ID NO: 5192 - DNA, 433 bp, Glycine max
gtttccactatcattatttgcccattaaaaatcaatttttagctctcattttcatgtttgggcaattcctccacacacaccatccaattcccgtctttgatattttaatcacagagagagaagagggtttgtttctgggttttggaaatttcagcccccatcaaagaagaagccccataatcttcgaatcgaaggcatttgattgaaaggtcgaaactttagcatctgggatcgcgcaattggggttttttttggttaaaagggtatcttcggaattcatggcaaaactgtacgtgaaggcggtgccaccggcggatctgaacaggaacacggagtggttcacgtaccctggcgtttggaccacttacatcctcatccttttcttttcttggatcctcgttctctccgtcttcggttgcttccccggcatcgc

SEQ ID NO: 5193 - DNA, 196 bp, Glycine max
  modified_base (59)..(59): a, c, g, t, unknown, or other
caaaatgccttaggtggtggtccaactatcccatccacaacaccgaatgatactggttnttcagaacaaaaagtacagccgttgtttcagcctctggttcatctgaaagaaatttatcaacatctgctttgatggaaagaatgccaagtaaatggccacgtcctgtatggcacgcaccatggaagaactacagggt

SEQ ID NO: 5194 - DNA, 434 bp, Glycine max
gtaggtagcttatctagtggactctgtaggcatcgcgcaattctcttcaagagattggcggattacataggtttgccatgtcgaattgctcggggttgtaggtactgtgtttcagatcatagatcgtcttgccttgtcaagattaaagatgatagacagctctcaagggaatatgtagttgatctggttggggaaccaggaaatatccatgggccggattcctctattaatggagcatatgtgtcttcaataccttccccatttcaaatttctcatttgaaagaatcccaatcaccatatgtggatgttgcagcatgttctcaatctcttggtaacacttctttaggctgtgtacaggaagatcaacaagctgaagaaactgatctgcagaaaaataataatggctctatttatcctgcaatagatcaaactcg

SEQ ID NO: 5195 - DNA, 429 bp, Glycine max
gccacgtcatatcccagatcttacataatctccacctgaatcacagaaatgcatgattccgatcacccaaataaaactttctaacaagggagtctgttttaaattctattagtaaccggtagatgaaaccaaaacattatgctcctttaaacgtttctgaaaatgagctaaacgggtttgcaactgcaggatgccagcagccttctgagaaagaatggcgtttagtcttgttatgtaatcatccagctgattccctggttgatctgcttcaaccaagaggttcatctcctctctaacaatgttcatggtctcctctacttgtgtccggtgagcatttacaaggtcctcttcttcctgtaggagggcatttaaatcatcctcagcatgtgtggtttgaggttcaacttttgggaggtccttccatttgat

SEQ ID NO: 5196 - DNA, 398 bp, Glycine max
cccacgcgtccggtttacctatgcaattctaatacttttatgatgctggattcataatgtaaggccagttattccttcaaactgtccacctgcaatgcgagctttaatcgagcaatgttggtctttgcatccggacaagaggcccgagttctggcaggttgttaaggtattagaacaatttgagtcttcgcttgctcatgatggaactctgactctggtggaaaatccttgttgccctgatcataagaaagggcttctccattggattcaaaagcttgttcctgttgcatcataataatggccctgtgcctaaaccgaaatttacatgagtcttcaaagtgtcctggctttttgtagtattccggtttcattgtaattaatattgaatggttttaaat

SEQ ID NO: 5197 - DNA, 361 bp, Glycine max
tgcagccagatctggaaaagggtgataaaattatcatgcctccctcagcccttgatcgccttgcgtctttgcacatagagtaccccatgttatttcaaattaaaaatccttctgctgaaagagttactcactgtggggtgctagaattcgtatctgatgaagggatcatatatatcccatactggatgatggaaaatatgctcctccaagagggagacattgtaaaagtgaaaaacaccaaccttgcaaaaggaacgtatgtgaagctgcagcctcacacaaaggattttttggatatctccaatccaaaagccatgttagtatttcttttctaatatctagttatacctttaacagtgtc

SEQ ID NO: 5198 - DNA, 436 bp, Glycine max
gttcgtggcgatgaggctgcacacgagggaccaggccagggagggcgagaaggaggtcaagcagcccgaggagaaagccgttaccaagtgggacccatccgtcgaagggtacctgaaatttcttgtggacagtaagctcgtttatgacacgctggagaaaatcgttcaagaggctcctcatccttcttatgctgaattcagaaacactggattggaaaggtctgcaagtttggcagaagatttggagtggttcaaggagcaaggttataccattcctgaaccttcttctcctggtcttacctatgcacaatatcttaaggagttatctgtgaaggatccccaagcattcatttgccatttttacaatatctactttgctcattcagctggtggtcgaatgattgggaaaaaggttgctgaaaagttacttaacaac

SEQ ID NO: 5199 - DNA, 429 bp, Glycine max
tagaccaattcatgacaatccagatgaaatgactgctgctttgtatctacagagtcagtatagttagccaggctttgatatttgtcacccgttcgcgcagctggtccttcatcgaacgccctggattgctgttagtgactgctttcgttattgctcagctgattgctacagtaatagcagtgtatgccaactggggctttgcaaggatccaaggaattggttggggttgggcaggagtgatttggctctacagtattgtcttctatttcccacttgacatcatgaagttcgccatccgctacattttgagtggcaaagcatggaacaatctcctagaaaacaagactgccttcaccaccaagaaagactatggtaaagaggagagggaagctcaatgggctcttgctcagaggaccctgcatggacttc

SEQ ID NO: 5200 - DNA, 386 bp, Glycine max
  modified_base (312)..(312): a, c, g, t, unknown, or other
  modified_base (315)..(315): a, c, g, t, unknown, or other
  modified_base (352)..(352): a, c, g, t, unknown, or other
caacgcctgggtactaaccctcgacggcgacgacggcgacgtccaacaccgcctcaacccaggcctaattgattccctcctctcaacgcttaaccgtctcgcatctcaagccactcccggctccgtcctcgtcaccaccgccaccggcaaattcttctccaacggcttcgacctttcctgggcgcgcgccgccgcttccgcctccgccgccaccgaccgcctccagttcatggtggactccctcaagcccgtcttggcggcgatcatgtcccttcccatgcccaacatcgtcggcatcaacggccacgcctncgncggcgggttccttctcgcggtcagccacgattacgtnctcatgcgcagcgaccgcggcgtgctctacatgc

SEQ ID NO: 5201 - DNA, 377 bp, Glycine max
atgaacttgagacaaaggcttcaactactttagttaaatgcaaatttggatcagttgaggctgcagcaaaggtgcgtactttggaagagcaggggagttcggcagacaaaattaaaaacttcgaatataattgtttgggagaaattagaattcttggtgctttaaaacacccttgcatagtggaaatgtacggacaccaaatttcatgtcaatggtctgtctcagctgatggtaatcctgaacaccgtgtattaagatctgcaatttttatggagtatgtggaagggggctccttaaaaaattatctggagaagctgtcagaagctggtgaaaagcatgttcctgtggagttggctttgcatatcgccaaagatgtc

SEQ ID NO: 5202 - DNA, 413 bp, Glycine max
gttttcattatcttcttctgatgcgaaagtgaagactgaagagaagataagacaatgctagcgctactccagaactgctccatgcccctcgcacgtgcggtgcggtctccacctcgcacgcacgtgcgaccttgtttcacggccgtggcctacgcatccatttcctcacgtgctaactcccagtctcaggttctcctcggcttgtccgagaaggagctgcaacaactcgcccttgacctcaatcaggaaacctataggggcaaacaacttcatcattttttataccagaggaagctcagagaaattcaggatttcactcaattgcctcagggatttaggaatactcttgaggaaactggatggaaggtgggccggtctcctattttaaaactgtaactgcagctgatggaact

SEQ ID NO: 5203 - DNA, 385 bp, Glycine max
  modified_base (335)..(335): a, c, g, t, unknown, or other
cccacgcgtccgcccacgcgtccgcccacgcgtccggctgagtggactgaaatcggtggagaacgcgcacgatgattcggtgtgggcggtcacatgggtacccgcaaccgccaaccggccaccgctcctcctaaccggttccctcgacgagaccgtcaggctctggcgctccgacgacctcgttttggagctcaccaacaccggccactgcctcggcgtcgcctccgtcgccgtccaccccctcggctccgtcgtcgcctcctcctccctcgacagcttcgtccgcgtgttcgatgtcgattccaacgccaccatcgtcaccctcgaggctcctncctctgaagtctggcaaatgcgcttcgatcccaagcgacaagtgttgaaa

SEQ ID NO: 5204 - DNA, 433 bp, Glycine max
ctctgaaggaaaaggatgcgggaaatgcatcttataagaagaaggattttgataccgcgattcaacattacacaaaggctttggagttggatgatgaggatatttcgtatctcactaaccgcgctgctgtctacttggaaatgggaaagtatgaggaatgcataaaagattgtgacaaggctgttgaaagaggaagagaactaagatcagattttaagatgatagcaagagctttgacaaggaaaggaaatgccttggtgaaattggcgaagtgctcaaaggattatgagcctgccattgagacataccagagagcactcaccgagcaccgcaaccctgacactttaaagaaacttaatgaagccgaaaaggcaaagaaagaactagaacaacaggaatattttgatccatagttggctgatgaggagagaga

SEQ ID NO: 5205 - DNA, 448 bp, Glycine max
cccacgcgtccgtctttagctgtgtatagacttaacaactacaaaggcagagtaagttaatctacatgtaatgacaagtgtcttggaagttgaaatgtgattccatttgggcaagtaggttctcctacatgaaagaaagaattgaaggtacctaaagtcactataatggttggaggaagcttcggtgcaggaaactatgcaatgtgtggtcgtgcctatagtcccaacttcttgttcctttggccaaatgctagaatatctgtaatgggtggtgctcaggctgctggtgtgctggcccaaatagagaaaggcaacaagaaaaggcaaggaattcagtggagcaaggaagaagaggataagttcaaagggaaagtggtggaggcatatgagagagaagcaagtccttattactcaacagcaaggctttgggacgatggaatcattgatc

SEQ ID NO: 5206 - DNA, 389 bp, Glycine max
aggaaaaaggacgtcacttcctcgccacaccctgcttcgtgaatcttagtgcatcaagatctctgtctctctgtctctctgcaatcgaaaatgagcaagggaccgggtctcttcaccgatatcggcaaaaaatccaaagatcttttgactaaggactacagctccgatcagaaactcaccgtttcctcctacagcgtctccggagtgaccctcacttcaacatctgtgacgaaaggaggactctcaacaggggatgtggcagcactgtacaagtataagaacactgttattgatgttaaacttgacaccgcatcaactatctccacaaccctcacatttaatgacgttcttccatccaccaagactattgcttcatttaagctgcctga

SEQ ID NO: 5207 - DNA, 431 bp, Glycine max
caaccatcatggagcgtgaggactgctttagttgcactgattgcgttcatgcctaccaacgcaaatggtgcattgggatctttagactacaagaaagaagagaggcatacactggccattaagtctcgtgaagcttctccaaaattcgggactcctgaacgtcaaaagctgattgatgagatacacgagtacatgctaagcaaagcaccacctgttcctcaacctagtgccacagaggcttctgaagagaaccccagaaatgaagaggccgagacacaggtcaattcaccaaatcccgagtccttacctgcaggagagggtattacagatcaagaagttgatggaattgtggaagaacaagaagtcatccttgcaaaccctgcaggagttgaagcttcaagggaggttcaaccaagtgtttcaaggaatga

SEQ ID NO: 5208 - DNA, 376 bp, Glycine max
ctcaccgtggagacctcggtgcccttcaccttccacaactgcgatgcgcctccacgcgccgtggagacgtcctcggcggagctcttctcgttcttccgtgacatggcgctgatgcggcggatggagatcgcggcggactcgctctacaaggccaagctcatacgcggcttctgccacctctacgatggccaggaggccgtcgccgtcggcatggaggccgccatcacgcgcaaggattgtatcatcaccgcctaccgcgaccactgcaccttcctcgcccgcggtggaaccctaatcgaggtcttcgctgagctcatgggccgtcgcgacggctgctccaaggggaaaggaggatccatgcacttttaccgcaaag

SEQ ID NO: 5209 - DNA, 439 bp, Glycine max
ggggtttaaccgtgtacctctcacttcttctacgaccatcatcttccttccttccttcagtcgttctaactcttagcagccatggcgagcaccaaagttcagagggttatgactcagcccattaacttgattttcaggtttcttcagagcaaagcacgcattcagatttggctatttgagcaaaaggatttgaggattgaaggccgaatcattggttttgatgaatacatgaatttggttcttgatgatgctgaagaagtgaacatcaagaagaagagcagaaaaacattagggaggatccttcttaaaggagataacataactttaatgatgaacacggggaaatgatgaacactccttgacagttgttaactatgttcctatcaaacaagaaggcataatgatcttttccttgggtttggattcatctaacaaactc

SEQ ID NO: 5210 - DNA, 370 bp, Glycine max
  modified_base (24)..(24): a, c, g, t, unknown, or other
gtgatgtataatatacgtaacaangttaaccttctgtggaatgcacttgtacttgggggggtgaaaaacgggcagaagtaccttggcatggttaacatgattggcattaattttgaggacaaccatgtagcaaccgggcttggaaatcatctcgctaggccaattctccgtgatgagtggcatgaaaacttgacctttgaagagggcgtcaagttactggaaaaatgcatgcgtgtgcttttataccgtgataggtctgctgtcaacaaaatccagatatctaaaattacagatgaaggtgccactgttttcccaccattcttattgaaaacgtactgggagttctctgccttcaataatccaactgttg

SEQ ID NO: 5211 - DNA, 334 bp, Glycine max
tcgcttcttcttcttctcttcttcttcaagattgctacgacgatccaagtgatagacactcggtgcgattgaacttgtagctgaatccgagcgaactctgtacccatacgtgactggatcctctgtagtcgctatcaaatacaaagatgggattctaatggccgctgacatgggaggttcgtatggatctaccctgcagtataagagtgttgagcgtatcaagcctattggaaagcattctcttattggtgctagcggggagataagtgactatcaggaaattttgcgctaccttgacgaagctatcctttatgacaacatgtgggaggatggg

SEQ ID NO: 5212 - DNA, 421 bp, Glycine max
acggatggcaccatatcatttacagttttatcatgtgacaaacaagcgggtttggttcaatgccgatgcgagaactctgccactcttggtgagaggaagaatgttaatttgcctggagtgatagtggatctcccaactttgacagacaaagacaaggaagatatcttggcctggggagttcccaataaaattgacatgattgctctttcttttgttcgaaaaggttctgacctggtggaagtcaggaaagttctgggaaaacatgccaagaacattatgctcatgtctaaggttgaaaaccaagaaggggttgcaaattttgatgaaatccttgcaaattcagatgcatttatggtggcacgtggtgaccttggaatggaaattccaatagagaagatatttcttgcacagaaagtgatga

SEQ ID NO: 5213 - DNA, 422 bp, Glycine max
cgattctcaccttcggcccccacgccgtctactattctgccacgcccttatctgagtatgatacactcggcacctctatcaaagccgctgttgtttatcttgcaacggcattagtgaagcttatttgtctagctacttttctcaaggtatcagagagcgatagctttgatccgtatcaggagtttttgaaggcgttaataggttttatagatgttgctgggctttattttgccttgacccagttgactcacaggaacatctctcagaatcataaatttcaagcagttggacttggctgggcatttgctgactctgtgctgcatcggttggctccactttgggttggtgccagaggattagaatttacttgggattacattcttcagggccttgaggctaatgcaaatttggtgttgagcata

SEQ ID NO: 5214 - DNA, 436 bp, Glycine max
gggaaagaacgaggcggacgactagaagcgagagctggtgttcaaggaggacgggcaggagtacgcgcaggtgctccggatgctgggtaacgggcggtgcgaggcgatgtgcatcgacgggacgaagaggctctgccacatccgcgggaagatgcacaagaaggtgtggatcgccgccggagacatcatcctggttggactcagggactaccaggacgacaaggctgacgtcatcctcaagtacatgcccgacgaggccaggctcctcaaggcctacggcgagctccccgacaccactcgcctcaacgagggcatcggcgccggcttggacgaggaggacgacgccaccgtcaacgactacatcgagttcgaggatgaggatattgataaaatctaatcaccctcgcaatcgcaattatcattcatatctgtctct

SEQ ID NO: 5215 - DNA, 397 bp, Glycine max
atcatcgaataaaactagggtttccgatcgtcgtcgaggagaatgccgaagagcaaggggaagggaggaaagaaccggaagcgcgggaagaacgaggcggacgacgagaagcgggagcttgtgttcaaggaggacggtcaggagtacgcgcaggtgctccggatgctggggaacggccgctgcgaggcgatgtgcatcgacggcaccaagcgcctctgccacatccgcggcaagatgcacaagaaggtctggatcgccgccggcgacatcatcctcgtcggcctccgcgactaccaggacgacaaggccgacgtcatcctcaagtacatgcccgacgaggccaggctcctcaaggcctacggcgagcttcctgacagcaccaggcttaacgagggca

SEQ ID NO: 5216 - DNA, 438 bp, Glycine max
acaaaatcaccaccttcaaagtcttctctctcgagaatcatcgaataaaactagggtttccggtcgtcgtcgaggagaatgccgaagaacaagggaaagggaggaaagaaccggaagcgcgggaagaacgaggcggacgacgagaagcgggagcttgtgttcaaggaggacggccaggagtacgcgcaggtgctccggatgctggggaacggccgctgcgaggcgatgtgcatcgacggcaccaagcgcctctgccacatccgcggcaagatgcacaagaaggtctggatcgccgtcggcgacatcatcctcgtcggccttcgcgactaccaggacgacaaggccgacgtcatcctcaagtacatgcccgacgaggccaggctcctcaaagcctacggcgagctttctgacagcaccaggcttaacgagggcatcggc

SEQ ID NO: 5217 - DNA, 429 bp, Glycine max
cccacgcgtccgaggagaatgccgaagaacaagggaaagggaggaaagaaccggaagcgcgggaagaacgaggcggacgacgagaagcgggagcttgtgttcaaggaggacggccaggagtacgcgcaggtgctccggatgctggggaacggccgctgcgaggcgatgtgcatcgacggcaccaagcgcctctgccacatccgcggcaagatgcacaagaaggtctggatcgccgccggcgacatcatcctcgtcggcctccgcgactaccaggacgacaaggccgacgtcatcctcaagtacatgcccgacgaggccaggctcctcaaggcctacggcgagcttcctgacagcaccaggctcaacgagggcatcggcgctggccttgatgaggaggaggatggggccggaaatgattatatcgagttc

SEQ ID NO: 5218 - DNA, 286 bp, Glycine max
cgaagaacaagggaaagggaggtaagaacaggaataggggaaagaacgaggcggacggcgagaagggagagctggtgttcaaggaggacgggcaggagtacgcgcaggtgctccggatgctgggtaacgggcggtgcgaggcgatgtgcatcgacgggacgaagaggctctgccacatccgcgggaagatgcacaagaaggtgtggatcgccgtcggagacatcatcctggttggactcagggactaccaagacgacaaggctgacgtgattctcaagtacatgcc

SEQ ID NO: 5219 - DNA, 354 bp, Glycine max
cacatcccttcgtcaacacctctccgactcttctcgttctctccatggcttcagtcgctgcttcaaggtggcgaggagcaaacgcgttacgacaccgatcacttggagctcttcaggcacgagagttacttcgcttacttgtttggagtcatagagcctggattctatgcagctattgacgttgcaactgggaattctatcctatttgctcctaggttaccttctgagtatgctgtttggttgggggagattaagccactctcctactgtaaggaacactacatggttaccacgtgttgcttctcagatgaaattgaaagtgtattgcaacaacattaccaagggtccgggaaa

SEQ ID NO: 5220 - DNA, 390 bp, Glycine max
gtcaaaaacagggagaagcttctcacatcccttcgtcaacacctctccgactcttctcgttctctccatggcttcgtcctccttcaaggtggcgaggagcaaacgcgttacgacaccgatcacttggagctcttcaggcaagagagttacttcgcttacttgtttggagtcatagagcctggattctatgcagctattgacgttgcaactgggaattctatcctatttgctcctaggttaccttctgagtatgctgtttggttgggggagattaagccactctcctactttaaggaacactacatggttaccacgtgttgcttctcagatgaaattgaaagtgtattgcaacaacattaccagtgttccgggaaacctttgctggttctc

SEQ ID NO: 5221 - DNA, 393 bp, Glycine max
caggaaccaaaactaatttaataccgcattcacattattcctccgaagatgacagtggcgagtggagaagaagaaggcgccgttggaggagttcagatccaacacaggagcagaatggtgctcccagattttctccagagcgtgaatctcaagtacgtgaaattaggttaccactacttgatctccaacctcgtaaccttattccttgtccctcttatgctcgtcacgctcattcatgtttttcagaccaccgacatcgcccacctccgctacctctggctccacctccagtacaacctcctcaccatacttacctgctccgtcgtcctcgtcttcagtctcactctctacgccgtcactcgcccacgggccgtctaccttcttgacttcggc

SEQ ID NO: 5222 - DNA, 425 bp, Glycine max
gaacaacgccaattctgaaacttcttctccttcttcttcttcttttgtttctcttgcgtgcttctacttcttctgaacatggaactgttgtctctgagactcaccccttcaccttcgagttcgacttcatcgcttcctgcagcacttgctcactgctccaagctatgtgaatttcatccgaggaagaagaagaaggcgtgcttcgacgcgcctaggcttgcggtgcggtgtgtgaaggcctcggcggagcgaaccggtgatacgatcgatgatggggaagctcgtagcgggttcaccacacctgccatggaagtcaccacattcaatcgaagcactttcagcgatgctgctgactttcccgtttgggaaaagattggtgctgtcgtcagactcagttatggtatcgggatttatggtgccatggc

SEQ ID NO: 5223 - DNA, 438 bp, Glycine max
gttgtcttgaagagatgttggctagcccgctactggggtcttgctgtaaaacatggcatatgtgcagatatagcacaatccaagcatgagcattggtcttctctagctcctcttccttttgaacttgtcatctatgctggacaaaaggctaaagaggaatcctggaacaaaagtgctgatggtccagatagaagcaaacttgttcgtgatttgaatgatcttgctggggaaggaaatattgagagtatgctctcagttgagatgggtttgagggaacttgcttccttaaaggttgaggatgctgttgtgcttgcattagcccaacacagactgtcaaattcggttcgacaatccgttttagattccaaatcacgtggtgatgccaaatattcagaagcatttgaattaagtgaagaggaagcagaagatgttcttttc

SEQ ID NO: 5224 - DNA, 445 bp, Glycine max
ctctctctctctctctcttgaagtgttggaatttgttttcaacttcccaagggggaaaaaagtcaaaaaacaagaaaaaaaaggggattgtgtttgtgactttttatcgagacaaaatcgagtctttatttataaagtgatatattttgcaattatatgtatgaatatgtaccaattgcaacagtttcatattcaacccatgatgatgaagatggataatacgatgaggaagagggagagaagcaaggccatggagaaagagaggcttcatgtgatggacttgagtggcatgtccttggagtttcttcccaaaccttcgcttgatttagccaccatttgcaagttggacctatctaataacaatctccaggaaattccggaatccttaacggcaagacttctaaacgtggaagtgttggacgtgcgttccaaccagctaaagtcc

SEQ ID NO: 5225 - DNA, 445 bp, Glycine max
cagtttcatattcaacccatgatgatgaagatggataatacgatgaggaagagggagagaagcggggccatggagaaagagaggcttcatgtgatggacttgagtggcatgtccttggagtttcttcccaaaccttcgcttgatttagccaccatttgcaagttggacctatctaataacaatctccaggaaattccggaatccttaacggcaagacttctaaacgtggaagtgttggacgtgcgttccaaccagctaaagtcccttcctaattccattggctgcctttctaagctcaaggttttgaatgtctcaagcaacttcatcgaatccctccccaaaaccattgagaattgcagagccttagaagaactgaatgcaaacttcaacaagctgagcaagcttccagacacaatagggtttgagctcgtaaacctaaagaagc

SEQ ID NO: 5226 - DNA, 372 bp, Glycine max
  modified_base (344)..(344): a, c, g, t, unknown, or other
agcccacgcgtccgcccacgcgtccggagttaggaaaatggggaagaagaagaagagaagtagggtttccgaagacgaggaaatcgaatccgataccaaccccttcgataaaaacgaaaactctctctatcaggttcttggtgtggagaaaacagcatctcaacaggaaataaagaaggcatactacaagttggcattgaggctgcatcctgataagaaccctggtgatgaggaagctaaagcaaagtttcagcaattgcaaaacgttattgctattcttggggatgaagaaaaacgggccgtttatgatcagactggttgtgttgatgatgctgaacttgcangggatgttgttcagaatcttaaagaata

SEQ ID NO: 5227 - DNA, 345 bp, Glycine max
ctcttaggttcttggtgtggagaaaacagcatctcaacaggaaataaagaaggcatactacaagttggcattgaggctgcatcctgataagaaccctggtgatgaggaagctaaagcaaagtttcagcaattgcaaaacgttattgctattcttggggatgaagaaaaacgggccgtttatgatcagactggttgtgttgatgatgctgaacttgcaggggatgttgttcagaatcttaaagaatatttcagagcaatgtacaagaaggtcactgaagctgatattgaggaatttgaagcaaactatagggggtctgacattgagaaaaatgatttgaatgatct

SEQ ID NO: 5228 - DNA, 378 bp, Glycine max
ttcgcttttccattccaacctctttcacacttcagatctgtttcttcatcggttgttcaagtaaatggcctttgtcaccactgctgaagtgtgtgatgcgaacccacagttaattttgagtggggagcttcgtgcccttcagccagtttttcagatttatggccgtcgacaggttttctctggacctatagttaccttgaaggtgtttgaagacaatgttttggttcgtgagttccttgaagagaaaggcaatggaagagttctagttgttgatggaggcgcgagtttacgctgcgctatattgggtggcaaccctgtggtacaagctcaaaacaatggatgggcaggtattattgtgaatggatgtataagagatgt

SEQ ID NO: 5229 - DNA, 454 bp, Glycine max
ctaacgttcattccgctcttcgctttctttcacatccaatcaacgaaaaatgctggctggtttcgacaaatcggtggcaaagagcccagagggtcttcagagccctcactcaaattccgtctcagccctaaaagacgtttttctcgcagagcacttctcttccgttcaccctggttccgtcaccgttaaccttggctcttccggtctcttggcctattctcttcacaaacagaaccccctcctcccaaggctgtttgcagtcgtggatgacattttctgtttgtttcaaggtcatcttgagaatgttgctaaccttaagcaacaatatggattgaacaaaacagcaactgaggtgatcattatcattgaagcatacaggactctaagagatcgtggtccctatcctgctgctcaggttgtgagagacttccaaggcaaatttgcatttattctg

SEQ ID NO: 5230 - DNA, 433 bp, Glycine max
cccggctggccccacgcgtcaggattggagatccgtaacacgagcacggaagctgccaaatgatgagataacaagttgcaaattggccataagcaatcgatcaagattggaaccgcctcttccacacgagtactttggaaacgcagttgatgtggtgagcactgcagggttcacggcaggggaattgcttgagaaggatctaggatgggcagcatggaaggtgcacgtggctgttgcgaaccaaaacgacaaagcggtgagacaaaagctcaaagagtggttgaagcttcctgtggtgtaccaacttggtgtgcactttgatccttgtactgtgaccatgtcgagttccccgaggttcaacatgtatgggaatgaatttgggatggggaaagcggttgcagttctgagtggatatgccacacaaaatgatggg

SEQ ID NO: 5231 - DNA, 411 bp, Glycine max
gcaaagctgaaagcaagggctaactctgagtccaaatccaaaaccagcgaaatctcttcgttggaatggttatcagcgcatgtttggagatccgtaacacgagcacggaagctgccaaatgatgagataacaagttgcaaattggccataagcaatcgatcaagattggaaccgtctcttccacacgagtactttggaaactcagttgatgtggtgagcactgcatggttcacggcaggggaattgcttgagaaggatctaggatgggcagcatggaacgtgcacgtggctgttgcgaaccataacgacaaagcggtgagacaaaagctcaaagagtggttgaagcttcctgtggtgtaccaacttggtgtgcactttgatcctcgtactgtgaccatgttgagttccccg

SEQ ID NO: 5232 - DNA, 413 bp, Glycine max
  modified_base (141)..(141): a, c, g, t, unknown, or other
  modified_base (368)..(368): a, c, g, t, unknown, or other
atagattaaaggcctggttctttaaacattcccaatggcccgcccaaaaccttcggcttcgggaagcttgggaactaatgccgctattaatcctccctggatgtctgaaaagtggttcattgtgctgggaattgattattntgttttgtatttcatttaatttttataagttttgtatacaagtttttctcaccaattttttattttggcattttgtcacattgatccacgccaatgatgataaatccaaaggcttgtttctcaaaacattcgcagtggccgcctaagagctttcgccttcgccaggcttgagagcttgtgctgcttttatccttccttggatgtctgaggtcattatattatttctntgttgaccattttcgtctgtggttgattgatgctgtaagttagta

SEQ ID NO: 5233 - DNA, 339 bp, Glycine max
  modified_base (267)..(267): a, c, g, t, unknown, or other
  modified_base (274)..(274): a, c, g, t, unknown, or other
ggcagatgtgcgtattcctctgcattggtggcaacagcactacctggatgaacaccgccgttctagtcacatgcatccgcaacttccgccgcaacagaggccccgtttccggcattctcaaaggctttgtcggtttgagcaccgccatattcaccgacctctgttccgctctcttcgccgacgaccctgcttcctttctcctcatgctcgccctcatccctttcgccgtttgcctctccggaatgtttttcctccgtgagattcctnccgccgncaccaacgaccaggaagagtctacttatttcgcggttttcaacgcggttgccgtggtccgtcgcg

SEQ ID NO: 5234 - DNA, 457 bp, Glycine max
ctttttgaacagacgaaggaaaaacgcagtgattaagcgcagacatgtatcatccaacaggaggtggcgttcgtggcggtcgagatcaattcacttgggaggatgtgaaagttgataagcatagggagaactatcttggtcacagtatcaaggctccggttggaagatggcagaaagggaaagatcttttctggtataccagggataaaaagtcccaaaatgcagaaatggaggctgcaaaagaagagataaaaagaattaaggaagaagaggagcaggcaatgagggaagctcttggcttagctcccaagcgttctaaccatcctcaaggtaaccgtcttgataaacatgagttttcagaactggtaaagcgggggtctacagcagatgacttaagtgcaggtcatgctgaagcttgcagggttcaaggtcttggttttgcaagagaaccacgccc

SEQ ID NO: 5235 - DNA, 427 bp, Glycine max
ggacatattgcttgctctacttgctgtgtgagactcagtaacaagtgtcctatgtgtttaatgcccattggttataaccgttgccgggctattgagaaggtcttggagtgtattaaaatgtcatgcccaaatgcaaactatggctgcaaagagacatttagttacagcaggaaaaacaaccatgagaaggaatgcatctatctaccatgttcatgccctcttactggttgtgattttgttgcctcatccaaggagttattcctccacttcagccatagacatgtaggcatgggaacacggttcgcatatgataaatttttcactgtattcttaagtattaaccagagaacaattgttcttcaagagaaaaatgatggtaatctgtttattgttcacaataaccattaacatcttggggacatagtcc

SEQ ID NO: 5236 - DNA, 409 bp, Glycine max
  modified_base (319)..(319): a, c, g, t, unknown, or other
gtaagggacaaggtgtatcctttacaaatctttttatcatatgggtggtggtgctgtgtgccgcactgccaatatcatcgctctatccattcctttatttcatggtaagggattttaatattgcgaaaacagaagctgatattagttcttatgctggttatgtgggttctgcattcatgcttggcagatgtttgacatctttgttgtggggaactatagctgatcgctttggtcgaaaacctgtttttgttataggaattattgcagttgtcattttcaacacactatttggccttagcacaagtttttggatggctgntatcatgaggtttcttatgggaagtttaaatggtttgcttggaacaacgaaggcgtatgccactgaaatatttcgagaagaacaccaagc

SEQ ID NO: 5237 - DNA, 347 bp, Glycine max
catgtatggaatatggtgcttcatcacggtcctgttgttctccccagtggcgttttcggagactgtgcaacccacaggacaagaaagtgctgctccaaatcaagaaggacttcaacaacccttacctgctagcctcctggaaccctaacaccgattgctgcaactggtactgcgtccagtgccaccccgaaacgcaccgcatcaactccctcgtcatattatcctctgttccccaaaccaatttatccggcccaataccaccctccgtcggtgacctaccttttcttgagacccttcaattccacaagctccctaaactcaccggcccaattcagcccactatagcc

SEQ ID NO: 5238 - DNA, 339 bp, Glycine max
accacgcgtccgatagaggaaggggaagcaaaagcacgtgagctcaatgtcatgttcattgaaactagtgctaaggctgggtttaatataaaggccctagttcgaaaaattgctgcagcactacctggaatgggaacactatcttctgcaaaacaagaagacatggttgatgtaaacttaaagtctacaaatgggactgctcagtctcaacctcagtcaagtggatgtgcttgttaagtatactttagcatgtgcggtccacctttttgtgtcatgctttttgttttatgcgggtttttctagagtcttctacagcattatatgaaaagatgaaagaat

SEQ ID NO: 5239 - DNA, 323 bp, Glycine max
ggcttattcacattcctgaaatggcatctgcatcaactctatccaattacaagctcgagctacttgggtgaccaatccgtgagcaatatctacatcattactcgcttcatgtacgataaattcgataacacctatcatgctacaattggtattgattttctatcaaaaactatgtatctcgaagatcgaactgttcgactgcagttgtaggatacagctggccaggaaagatttagaaatcttattccaagctacattagggactcatatgtagctgttattgtatatgatgttgcaagccggcatactttactaaatactgc

SEQ ID NO: 5240 - DNA, 425 bp, Glycine max
cccacgcgtccggtcttctcaactacgctactatgtatatatgtttttgcattttgctgggtctacattgtaagaattatggcatcagaggagacaacaatttggaaggcaatgataaaaactccagcctccatagtgttgataatttacacctttatatcaatgtggtttgtaggtggcctcactgccttccatttgtatttgataagtaccaatcagactacatatgaaaacttcagataccgatatgatcggcgagccaacccatataatgaaggagtgttgaataattgcaaagagatattctgcatcagcattcccctttcaaagaacaattttagggcaatggtgccaagagaaccagcattacctactcgatcagtgtgtggaagctttatgaaccataatttgagaaaagctgggga

SEQ ID NO: 5241 - DNA, 454 bp, Glycine max
gtgactgcacccttttggaaatcaatcccattgcggagacagctgataaccaattggtggctgctgatgctaagttgaattttgacgataatgctgcatatcgccagaaagagatatttgctctccgtgatacaacacaagaggaccctcgagaggtgactgctgcaaaggcagacttaaattatattgggttagatggagaaataggctgcatggtgaatggagcagggttagcaatggccacaatggatataattaaattgcatgggggtactcctgccaattttttggatgtaggtggcaatgcctctgaaggccaggtggttgaggcatttaaaatattgactgctgatgacaaagtgaaggcaattttggttaacatttttgggggtataatgaagtgtgatgttatagcaagtggaatagtgaatgctgcaaaagaggttgcactgaa

SEQ ID NO: 5242 - DNA, 207 bp, Glycine max
ccacgcgtcagggcaaagataagcgccaattcaccatgtactttttccttccagaaacaaaagatgggctgttagctttggctgagaagttggcttccgaatcctgggttcctggaacgcaagcttcctaaccaaaaagtggaagtaggggacttcaagatcccaagattcaaaatttcttttgggtttgaagtccccaaagttgct

SEQ ID NO: 5243 - DNA, 446 bp, Glycine max
ccgtgaatcgataagcaaccaaaccgacgtggccctgagcatctcaaagctcctgttgtcgaaagaagctcgggacaagaacctcgtgtattcgccgctgtcgttgcacgttgttctgagcatcatcgccgctggctccaagggccccacactcgatcagcttctctccttcctccgatccaaatccaccgatcatctcaactccttcgcctctcagctcttcgccgtcgtgctctccgacgcctctcccgccggcgggcctcgcctctccttcgccgacggcgtgtgggttgagcaatccctctcgcttctcccttccttcaaacaacttgtcagtgctgattacaaggccactttggcttcagttgatttccagaccaaggctgttgaagtggccaatgaagttaattcatgggctgaaaaggagacaaatggacttgttaaag

SEQ ID NO: 5244 - DNA, 317 bp, Glycine max
gggttttcccaaccctcttcccttgttcgaaactagcctaatcaaaaccgaaacagacgattacaaaaacaagaaaagaagaaaaataatcattcattgctcggtgagaagagagagaggaacggcccgatgaccgggaaggcgaagcccaagaagcacacggcgaaggaaatcgccgcgaaggtggacgccgtcaccactaaccgcggcggcgggaaggccggcctgaaggaccgatccgggttggagaagggcgggcacgcgaaatacgagtgccctcactgcaaagtgacggcgccggacgtgaaatcaatgca

SEQ ID NO: 5245 - DNA, 372 bp, Glycine max
ctcagcaagttgtcaagacatattgttcaatgaagccagcatggatttgcttcaaatgtggtagaaaaatgtttggagtatggtgatgccactgaacgggagttgctaattgcagagatatttgggcatgatgaccaatgtgataatttattgacaatgatgaaagatcaatttgcgaattatgtggtccagaaggtcattgatatctgttctgaaaatcagcgagcaatgttgctttctcacgtaagaatccatgctcatgctttgaagaaatacacttatggaaaacacattgtggctcggttggaacatcaatttggagagaatcaaacacccagctcatgatagaataaagagacaaagccatgggtc

SEQ ID NO: 5246 - DNA, 395 bp, Glycine max
agcccacacgtccggaagagccttccatatatagcctctcaaacacatgaacagtactatctctttggctccctttccaaattgtggccccaacttcaacatatcagccttcagccaccgctgatattgtattcgacaccgaatgcaatcctactccaaacggcggcacatactatgtgttgccacttataagatgaaagggcggcggaatagaatttgccaaaaccgaatcagaaacatgccctctcactgttgtgcaatctcactttgaggtctcaaacggtctaccactgaaaatttcatccccatttaaaatccttgacatcaccgaatgacttattttgagcctcagtttcacttaagtacccccctgtgcctcaactccttctcggtgg

SEQ ID NO: 5247 - DNA, 443 bp, Glycine max
  modified_base (386)..(386): a, c, g, t, unknown, or other
  modified_base (409)..(409): a, c, g, t, unknown, or other
  modified_base (425)..(425): a, c, g, t, unknown, or other
tatagaagagccttccatatatagcctcccaaaaaaatgaagagtactacctctttggctctctttctactttgtgccctaacttcatcatatcagccttcagccaccgctgatattgtattcgacaccgaaggcaatcctattcgaaacggcggcacatactatgtgttgccagttataagaggaaagggcggcggaatagaatttgccaaaaccgaaacagaaacatgccctctcactgttgtgcaatctccctttgaggtctcaaagggtctaccactgataatttcatccccatttaaaatccttgacatcaccgaaggacttattttgagcctcagtttcacttatgtacccccctgtgcctcaactccttctcggtggancgttattctcaagggtctgccanaagaactccatgtcanactcactggctacaaaaa

SEQ ID NO: 5248 - DNA, 364 bp, Glycine max
gggtctaccactgataatttcatccccatttaaaatccttgacatcaccgaaggacttattttgagcctcagtttcacttatgtacccccctgtgcctcaactccttctcggtggaccgttattctcaagggtctgccagaacaactccatgtcaaactcactggctacaaaaacacaatagatggttggtttaggattcaaagagcttcctctgaatccaactactataagttggtgttttgtacatctaatgatgatagttcgtgtggggatattgtggctcccatcgatcgtgaaggaaacaggcctttgattgtgactcatgatcagaatcatccagtgttggttcagtttcagaaagtt

SEQ ID NO: 5249 - DNA, 376 bp, Glycine max
cacacgcgtccgcccacgcgtccggaagagccttccatatatagcctcccaaaaaaatgaagagtactacctctttggctctctttctactttgtgcccgaacttcatcatatcagccttcacgcaccgctgatattgtattcgacaccggaggcaatcctagtcgaaacggcggcacatactatgtgttgccaatttataggaggaaagggcgcgggaatagaatttgccaaaaccgagagagaagcatgccctctcactgttgtgcaatctccctttgaggtctcaaagggtctaccactgataatttcatccccatttaaaatccttgacatcaccgaaggacttattttgagcgtcagtttcacttatgtac

SEQ ID NO: 5250 - DNA, 114 bp, Glycine max
gcgtccgacagaacttccatatatagcctcccaaaaaaatgaagagtactacctctttggctctctttccactttgtgccctaacttcatcatatcagccttcaaccaacgctg

SEQ ID NO: 5251 - DNA, 433 bp, Glycine max
gaagagccttccatatatagcctcccaaaataatgaagagtactacctctttggctcgctgtctactttgtgccctaacttcatcatatcagccttcagccaccgctgatattgtattcgacaccgaaggcaatcctattcgaaacggcggcacatactatgtgttgccagttataagaggaaagggcggcggaatagaatttgccaaaaccgaaacagaaacatgccctctcactgttgtgcaatctccctttgaggtctcaaagggtctaccactgataatttcatccccatttaaaatccttgacatcaccgaaggacttattttgagcctcagtttcacttatgtacccccctgtgcctcaactccttctcggtggaccgttattctcaagggtctgccagaagaactccatgtcaaactcactggcta

SEQ ID NO: 5252 - DNA, 438 bp, Glycine max
  modified_base (231)..(231): a, c, g, t, unknown, or other
acgcgtccacccaagcgtccggatagatatatagaagagccttccatatatagcctcccaaaaaaatgaagagtactacctctttggctctctttctactttgtgccctaacttcatcatatcagccttcagccaccgctgatattgtattcgacaccgaaggcaatcctattcgaaacggcggcacatactatgtgttgccagttataagaggaaagggcggcggaatanaaatttgccaaaaccgaaacagaaacatgccctctcactgttgtgcaatctccctttgaggtctcaaagggtctaccactgataatttcatccccatttaaaatccttgacatcaccgaaggacttattttgagcctcagtttcacttatgtacccccctgtgcctcaactccttctcggtggaccgttattctcaagggtctgcca

SEQ ID NO: 5253 - DNA, 417 bp, Glycine max
cccacgcgtccggcctcccaaaaaaaatgaagagtactacctctttggctctctttctactttgtgccctaacttcatcatatcagccttcagccaccgctgatattgtattcgacaccgaaggcaatcctattcgaaacggcggcacatactatgtgttgccagttataagaggaaagggcggcggaatagaatttgccaaaaccgaaacagaaacatgccctctcactgttgtgcaatctccctttgaggtctcaaagggtctaccactgataatttcatccccatttaaaatccttgacatcaccgaaggacttattttgagcctcagtttcacttatgtacccccctgtgcctcaactccttctcggtggaccgttattctcaagggtctgccagaagaactccatgtcaaac

SEQ ID NO: 5254 - DNA, 255 bp, Glycine max
tagatatatagaagagccttccatatatagcctcccaaaagaatgaagagtactagggctttggctctctttctactatgtaccctaacttcatcatatcagccttcagccaccgctgatattgtattcgacaccgaaggcaatcctattcgagacggcggcacatactatgtgttgccagttataagatgaaagggcggcggaatagaatttgccaaaaccgaaacagaaacatgccctctcactgttgtgcaa

SEQ ID NO: 5255 - DNA, 408 bp, Glycine max
atcatatcagccttcagccaccgctgatattgtattcgacaccgaaggcaatcctattcgaaacggcggcacatactatgtgttgccagttataagaggaaagggcggcggaatagaatttgccaaaaccgaaacagaaacatgccctctcactgttgtgcaatctccctttgaggtctcaaagggtctaccactgataatttcatccccatttaaaatccttgacatcaccgaaggacttattttgagcctcagtttcacttatgtacccccctgtgcctcaactccttctcggtggaccgttattctcaagggtctgccagaagaactccatgtcaaactcactggctacaaaaacacaatagatggttggtttaggattcaaagagcttcctctgaatccaacta

SEQ ID NO: 5256 - DNA, 448 bp, Glycine max
accagacagacatatacacgagccttccatatatagccttccaaaactatgaagagtagtacctggttggctctgtttctacttcgtgccctaacttcatcatatcagccatcatccaccgctgatattgtattcgacacctaaggcaatcctattcgaaacggcggcacatactatgtgttgccagttataagaggaacgggcggctgaatagaatttgccaaaaccgaaacagaaacatgccctctcactgttgtgccatctacctttgaggtctcaaagggtctaccactgataatttcatacacatttaaaatccttgacatcaccgaaggacttattcagagcctcaggatcacttatgtacccccctgtgccttaactccttctcggaggaccgttattctcaagggtcttccaagaacaacttccatgtcaactcactggc

SEQ ID NO: 5257 - DNA, 431 bp, Glycine max
cccacgcgtccgatagaagagccttccatatatagcctcccaaaaaaatgaagagtactacctctgtggctctctttctactttgtgccctaacttcatcatatcagccttcagccaccgctgatattgtattcgacaccgaaggcaatcctattcgaaacggcggcacatactatgtgttgccagttataagaggaaagggcggcggaatagaatttgccaaaaccgaaacagaaacatgccctctcactgttgtgcaatctccctttgaggtctcaaagggtctaccactgataatttcatccccatttaaaatccttgacatcaccgaaggacttattttgagcctcagtttcacttatgtacccccctgtgcctcaactccttctcgggggaccgttattctcaagggtctgccagaagaactccat

SEQ ID NO: 5258 - DNA, 405 bp, Glycine max
ttcactcgtacgatggtagagccgaacttttatagccttccaaaaaaatgaagaagtcgtcctttttggctctctctctactatggggcctaacttaacgtataagcttcagcgccggttatattggattctacacctaaggcgatcctattcgaaacctcggcacatactatgtgttgccagttataatatgaaagggcagcagaatctaatttgccaaaaccgaatcagatacatgcactataactgttgagcaatctaccttagaggtctcacagggtctaccactgataataccatccccatttaaaatccttgacatcaccgaatgacttatattgagcctcaggttcacttatgtacccacctgagcctcaactccttctcggtggaccgttattctca

SEQ ID NO: 5259 - DNA, 442 bp, Glycine max
atagaagagccttccatatatagcctcccaaaaaaatgaagagtactacctctttggcgctctttctactttgtgccctaacttcatcatatcagccttcagccaccgctgatattgtattcgacaccgaaggcaatcctattcgaaacggcggcacatactatgtgttgccagttataagaggaaagggcggcggaatagaatttgccaaaaccgaaacagaaacatgccctctcactgttgtgcaatctccctttgaggtctcaaagggtctaccactgataatttcatccccatttaaaatccttgacatcaccgaaggacttattttgagcctcagtttcacttatgtacccgcctgtgcctcaactccttctcggtggaccgttattctcaagggtctgccagaagaactccatgtcaaactcactggctacaaaaa

SEQ ID NO: 5260 - DNA, 438 bp, Glycine max
  modified_base (353)..(353): a, c, g, t, unknown, or other
aagagccttccatatatagcctcccaaaaaaatgaagagtactacctctttggctctcggtctactttgtgccctaacttcatcatatcagccttcagccaccgctgatattgtattcgacaccgaaggcaatcctattcgaaacggcggcacatactatgtgttgccagttataagaggaaagggcggcggaatagaatttgccaaaaccgaaacagaaacatgccctctcactgttgtgcaatctccctttgaggtctcaaagggtctaccactgataatttcatccccatttaaaatccttgacatcaccgaaagacttattttgagcctcagtttcacttatgtacccncctgtgcctcaactccttctcggtggaaccgtattctcaagggtctgccagaagaactccatgtcaaactcactggctacaaaaa

SEQ ID NO: 5261 - DNA, 403 bp, Glycine max
aattccaggcgggcgtacgctagaacagcctcccataaatagccccgcagcaaaatgaatagtactacctacttggctctctggtactttgtgccctaacgtcatcatatcagccttcagccaccgctgatattgtattcgacaccgaaagcaatcctattcgaaacggcggcacatactatgtgtcgccagttataagaggaaagggcagcggaatagaatttgccaaaaccgaaacagaaacatgccctctcactgtcgtgcaatctccctttgaggtctcaaacggtctaccactgataatttcatccccatttaaaatccttgacatcaccgaatgacttattttgagcctcagtttcacttatgtacccccctgagcctcaactccttctcggtggac

SEQ ID NO: 5262 - DNA, 464 bp, Glycine max
tagatatatagaagagccttccatatatagcctcccaaaaaaatgaagagtactacctcttgggctctctttctactttgtgccctaacttcatcatatcagccttcagccaccgctgatattgtattcgacaccgaaggcaatcctattcgaaacggcggcacatactatgtgttgccagttataagaggaaagggcggcggaatagaatttgccaaaaccgaaacagaaacatgccctctcactgttgtgcaatctccctttgaggtctcaaagggtctaccactgataatttcatccccatttaaaatccttgacatcaccgaaggacttattttgagcctcagtttcacttatgtacccccctgtgcctcaactccttctcggtggaccgttattctcaagggtctgccagaagaactccatgtcaaactcactggctacaaaaacacaatagatggttg

SEQ ID NO: 5263 - DNA, 428 bp, Glycine max
atagaagagccttccatatatagcctctcaaaaaaatgaaaagtactacctatttggctctctgtggactttgtgccctgtcttgatcatatcagccttcagccaccgctgatattggattcggcaccgagagcaatcctagtcgaaacggcgtcacatactacgagacgacaggcataagaagaaagggccgtggaatagaatgtggcgaaacctatacagaaacatgccctctcactgttgtgcaatctacctttgatgtcgcaaagggtgtaccactgatcatatcatgcccagttatgatgcttgacatgatcgaaagacttatatcgagcctcagttgcacttatgtacccatgtgtgccctaactacgtctcggtggaccgggaatctaaagggtatgccagattaacaccatgtgagacta

SEQ ID NO: 5264 - DNA, 371 bp, Glycine max
cccacgcgtccgatagaagagccttccatatatagcctcccaaaaaaatgaagagtactggctctttggctctctttctactttgtgccctaacttcatcatatcagccttcagccaccgctgatattgtattcgacaccgaaggcaatcctattcgaaacggcggcacatactatgtgttgccagttataagaggaaagggcggcggaatagaatttgccaaaaccgaaacagaaacatgccctctcactgttgtgcaatctccctttgaagtctcaaagggtctaccactgataatttcatccccatttaaaatccttgacatcaccgaaagacttattttgagcctcagtttcacttatgtacccccc

SEQ ID NO: 5265 - DNA, 454 bp, Glycine max
atatagaagagccttccatatatagcctcccaaaaaaatgaagagtactacctcttgggggctctttctacttggtgccctaacttcatcatatcagccttcagccaccgctgatattgtattcgacaccgaaggcaatcctattcgaaacggcggcacatactatgtgttgccagttataagaggaaagggcggcggaatagaatttgccaaaaccgaaacagaaacatgccctctcactgttgtgcaatctccctttgaggtctcaaagggtctaccactgataatttcatccccatttaaaatccttgacatcaccgaaggacttattttgagcctcagtttcacttatgtacccccctgtgcctcaactccttctcggtggaccgttattctcaagggtctgccagaagaactccatgtcaaactcactggctacaaaaacacaatagat

SEQ ID NO: 5266 - DNA, 379 bp, Glycine max
tcgtccgatagatagagccttccatttatagcctcgcttataaaatgaagagtactacctctttggctcgctttggactttgtgcgcctagacttcatcatatcagccttcagccaccgctgatattgtattcgacaccgaaggcaatcctattcgaaacggcggcacatactatgtgttgccagttataagaggaaagggcggcggaatagaatttgccaaaaccgaaacagaaacatgccctctcactgttgtgcaatctccctttgaggtctcaaagggtctaccactgataatttcatccccatttaaaatccttgacatcaccgaaggacttattttgagcctcagtttcacttatgtacccccctgtgcctta

SEQ ID NO: 5267 - DNA, 368 bp, Glycine max
  modified_base (330)..(330): a, c, g, t, unknown, or other
gatagatatatagaagagccttccatatatagcctcccaaaaaaatgaagagtactacggctttggctctctttctactttgtgccctaacttcatcatatcagccttcagccaccgctgatattgtattcgacaccgaaggcaatcctattcgaaacggcggcacatactatgtgttgccagttataagaggaaagggcggcggaatagaatttgccaaaaccgaaacagaaacatgccctctcactgttgtgcaatctccctttgaggtctcaaagggtctaccactgataatttcatccccatttaaaatccttgacatcaccgaanggactattttgagcctcagtttcacttatgtacccccc

SEQ ID NO: 5268 - DNA, 421 bp, Glycine max
cttccaacgttgcttattcacacaaacggaacaagatagatatatagaagagccttccatgggtagcctcccaaaaaaatgaagagtactacctctttggctctctttctactttgtgccctaacttcatcatatcagccttcagccaccgctgatattgtattcgacaccgaaggcaatcctattcgaaacggcggcacatactatgtgttgccagttataagaggaaagggcggcggaatagaatttgccaaaaccgaaacagaaacatgccctctcactgttgtgcaatctccctttgaagtctcaaagggtctaccactgataatttcatccccatttaaaatccttgacatcaccgaaggacttattttgagcctcagtttcacttatgtacccccctgtgcctcaactccttctc

SEQ ID NO: 5269 - DNA, 449 bp, Glycine max
atagaagagccttccatatatagcctcccaaaaaaatgaagagtactacctctttggctgtctttctactttgtgccctaacttcatcatatcagccttcagccaccgctgatattgtattcgacaccgaaggcaatcctattcgaaacggcggcacatactatgtgttgccagttataagaggaaagggcggcggaatagaatttgccaaaaccgaaacagaaacatgccctctcactgttgtgcaatctccctttgaggtctcaaagggtctaccactgataatttcatccccatttaaaatccttgacatcaccgaaggacttattttgagcctcagtttcacttatgtacccccctgtgcctcaactccttctcggtggaccgttattctcaagggtctgccagaagaactccatgtcaaactcactggctacaaaaacacaata

SEQ ID NO: 5270 - DNA, 350 bp, Glycine max
gaagagccttccatatatcgcctcccaaataaatgatgagtactacctcttcggctctatgtctgctttgcgccctaacttgatcatatcagacttcagccaccgctgatattgtattcgacaccggaggcaatcctattcgaaacggaggcacatactatgcgttgacagatataagatgaaagggccgcggtatagaatctgccaaaaccgagacagaaacatgccctatcactgttgcgcaatctacctttgaggtcgtaaagggtgtaccaccgagaattgcattcccattcaagatccttgacatcaccgaaggacttactctgagcctcagtttcacttatgta

SEQ ID NO: 5271 - DNA, 463 bp, Glycine max
  modified_base (431)..(431): a, c, g, t, unknown, or other
tcgaccgcacgcgtccgcccacgcgtgcgggataccgtcccgtgattttccaattcgacgaataagggtatcacgtctcttaatcaaaacgtgttacccgaatttttggtaaacctaaacaggaagccaatactctaaccactttggataagttaaatgagacacttgaaatgttggagaaaaaggagaaagtactcctaaaaaaggctgctgcagaagttgaaaaagccaaagaattcactagggcaaagaataaaagggcggcaatacaatgtttgaagaggaagaggctatatgaacagcatgtagagcagcttggaaatttccagctgcgtattcatgaccagatgataatgttggaaggtgccaaggcaaccacagaaactgttgatgcattgagaactggagcagctgctatgagggctatgcanaaagcaacgaatattgatgatgttgacaagac

SEQ ID NO: 5272 - DNA, 373 bp, Glycine max
cacttgaaatgctggagaaaaaggagaaagtgctccttaaaaaggtggcagcggaagttgaaaaggccaaagaattcacaagggggaagaacaaaagggcggcaatacaatgtctgaagaggaagaggttatatgaacagcaaatagagcagcttggaaatttccagttgcgtattcatgaccagatgatattgttggaaggtgctaaagctaccactgaaacagtagatgcattaagaactggagcagctgctatgaaggctatgcaaaaagcaacgaatattgatgatgttgacaagaccatggatgagatcaatgaacagaccgagaacatgaaacagattcaggatgcattgtcagctccaattggtgc

SEQ ID NO: 5273 - DNA, 400 bp, Glycine max
acgcttggtggtacatcccatgtctccgcaagtaatgtttcttatcgtgttacagtgcttttctttggtggtggtgatgatcatgaagcccttgcttatggagctcgtatggctgagcaccctggcatcagattgctggttattcgctttgtaggggaaccaatgaatggagagattgtaagagttgatgtgggtgactccactagcaccaaattaatctcacaggatgaggaattcctcgatgaaattaagacgaaaatagccaatgatgactccatcatctatgaagagaaagtagtaaaagatggtgcagaaacagttgctattatccgtgagttgaaaagctgcaatctgtttcttgtgggttcaaggccagccagtgaagttgccagtgctatga

SEQ ID NO: 5274 - DNA, 342 bp, Glycine max
accagtgagatcttgcagtcatccaatttaaagagctttaccttgtcagaacttaagacggccactagaaatttccgtccagatagcgtgttaggagaaggtggttttggatcagtttttaaggggtggattgatgagaattcattgaccgctaccaaacctggcactggcattgttattgctgttaaaagacttaatcaagatggcatccagggtcacagggagtggttggctgaagtcaactatcttggacagctttctcatcctcatctagtgagattgattgggttttgccttgaagatgaacacggccttctcgtctacgaatttatgccacgtgga

SEQ ID NO: 5275 - DNA, 421 bp, Glycine max
ctgcacaggatttatgtgatcgcaacatgggagtttgtttgagcgcccaaattaaagctgaaagcccatataacactgggttcaattcaaagtatgtgagtacggatggaaatgatttcggcagcacaaacgataaggtttcagcaaactcaattcctcaaactcctcggagtgagggtgagatcttgcggtcatccaatttgaagagctttcccttgtcagaacttaagacggccactagaaatttccgtccagatagcgtgttaggagaaggtggttttggatcagtttttaaggggtggatcgatgagaattcattgactgctaccaaacctggcactggcattgttattgctgttaaaagacttaatcaagatggcatccagggtcacagggagtggttggctgaagtcaactatct

SEQ ID NO: 5276 - DNA, 407 bp, Glycine max
agtggtatcttatacactcctggcattaactcgatcatatgggatgcaagcgctggaatgggcaaaaaagagtgttttgttaattccatcaacagctgttacagatgtagagcgatcaagattcttaaaagcactttctgatgcagcatccggaggggatactaatggacttactgttcctgttgaagagctgtcagatgtttgccgacgtaacagggccgttcaggaaatagttcaggaagctttgagaccgcttgagttgaatatggtgaatgtatcatagaggattggtaaatgccattgatagagagggccattttgtttagggtcctgtctgttagttaggctagttggttgtgtattatctatctgttatattcatttttttttatccattatcattctcc

SEQ ID NO: 5277 - DNA, 406 bp, Glycine max
agcccacgcgtccgggatggaagtgatgcaattctccttggagcagagaccctgcggggacaataccctgtagagaccatttctatagttggaaaaatatgtgctgaggcagagaaagttcataatcaagatttgtattttaagaaggctgtcaaatatgtgggagagccaatgagccatttggaatcaattgcttcctctgcggttcgagcagctatcaaggttaaagcctctgttattatttgcttcacttcatctggaagagctgcaagattgattgctaagtacagaccaattatgcctgtcatatccgttgtcattcctcaactgaagacaaatcaactccgatggacattcaccggtgcttttgaggctaggcaatctcttattgtgaggggtctttttc

SEQ ID NO: 5278 - DNA, 442 bp, Glycine max
ctttttctcaaacaaacgactactttcctttcctgctgcgttcattccaaattgcaaacccaccataatatctagcttcttgtgaaggctgctagtttgatttagaagttgatattgataatttgctgcgatgggtggccaaaggagtggttatggtaagcgttcccactctcaatctgaccatgataatgggccaaataaaaggaggaatcatggtgatgacagagagcagtttgtgattgatttggaggatactgtgtatcgatacgtgtgcccgggtcgaaagattggcagtgttattggtaggggaggtgagattgttaagcagctgacggtggagactaaagctaagattaggattggtgagacggtgccgtggtgcgaagagcgtgtcgatactatttatagtcccagtgatgagactaatgcatgtgaaggtggt

SEQ ID NO: 5279 - DNA, 423 bp, Glycine max
ccgcggatcaaactgtggtcatcacatgttctactcaggggttgttgccggagccagggaggcgttgttatctggtgtaccagctttatcgatgtcattaaattggaagaaggatgaaagtcaagaaaatgatttcaaggatgcagtgtcagtctgtttaccgttaataaatgcagctattagggatgttgaaaagggaacttttcccaaaagctgttttttaaatatagaaattcccacatctcctttgaatagcaagggtttcaaattgaccaaacaaagtatatggagatccactccaaactggctagctatttcctccagccgctatccaactggtcatttcttagccaatcaaggtggccttggtcttcagtttgcacagcttggccgagatgcttctgctgctggtgcagctcgtcg

SEQ ID NO: 5280 - DNA, 455 bp, Glycine max
gttcccttctgccgaggaacctccacgtcgcagaggtactgaaacaagtagtgatctttctgggtgtgccaagaaaggaatagcagtgaaaccgcatagaggggacgcacttcttttcttcagtcttcacacaaatgctaccccagacactagcagtctccatgctggatgccctgtaatcgaaggtgagaaatggtccgcaacgaagtggattcatgtagactcgtttgataagactgtgggagctggaggtgattgttctgatcatcatgtaagctgtgagagatgggcttcacttggagaatgcactaaaaatcctgagtatatgattggatcttcagacgttcctggctattgtaggaaaagctgcaagtcgtgttaaaaattttactgaatgcttcccaagatactacatgttatctctgccacgggtttcaaatttcaactagttcttg

SEQ ID NO: 5281 - DNA, 412 bp, Glycine max
ggacgtttgattgattgtttggagcgccgctatgctgtgctcaaccagtgcagctatgttgttcttgatgaggccgatcgtatgattgacatggggtttgagccccaggtgatgggtgtcctcgatgccatgccttccagcaatctcaaaccggagaatgaggatgaggagcttgacgagaagaagatttaccgcaccacctatatgttcagcgccaccatgccacctgctgtggagaggcttgctaggaaatatttgaggaaccctgttgtggtcaccattggcactgctggaaaggcaactgatttgatcagccagcatgtgatcatgatgaaggaggccgagaagttttccaagcttcataggttgcttgatgagcttaacgacaagactgcgattgtgtttgttaaca

SEQ ID NO: 5282 - DNA, 411 bp, Glycine max
gttgttatgcgccgaaagtaatatgatggttgcattggaattgataaaacagcagcagggggaaatgggagatctagaggaacaaggcgagggtgctggctcctacttggaattggaagctactattccagagacccatgctgaaattccaatatcagatggcatctgattcaacaatcagagcgcgattttccaagccatctaggttgtgtaacgagactcgttggccatcgctcagagtttcacttctctgttcgcttccctgcgattggccctctccgaatccacatccacctctctgcatcacatgcagtgcttcaccgatgccttcggtcgccttcaggaatctgtgcttgatgcagctaccatagagaatcgctatataaattcctgtctcagatagaatgagga

SEQ ID NO: 5283 - DNA, 392 bp, Glycine max
  modified_base (161)..(161): a, c, g, t, unknown, or other
gtgatatcataatggattcccacaatctgttgtgtcacccttcaagagctcagtgttgggtgagggtgagaagcaaagttctgatgttttctcaggaaactctagtccttttgtcaaggacattgaagtgaatggcaaggaagtagtcatgtcaaatgtanaggagtttcttggagtgcttgatgtttacatacatcaagccacggacattcaaaacatttgcatataccacaagcaagatgtttatgccaaagattagtctgaccagtaatcctgagaccaccatgtccaccaaaaccatcaattgaagaagaaagaaccctgttttcaacgagaatcttcgtattgatgttaagactgttgatgcatctctcaagtgtgagatatggatg

SEQ ID NO: 5284 - DNA, 313 bp, Glycine max
cgcgtccgagcaagcgtccggtgatatcataatggattccccacaatctgttgtgtcacccttcaggagctcagtgttgggtgagggtgagaagcacaagtctgatgttttctcaggaaactctagtcctttgtccaacgacattgatgtgaatggcaacgaagtaatcatgtcaagtgtagaggagtttcttggagtgcttgatgtttacatacatcaagccagggacattcagaacatttgcatataccacaagcaagatgtttatgctaagattagtctgaccagtaatcctgagaccaccatgtctacc

SEQ ID NO: 5285 - DNA, 455 bp, Glycine max
cccacgcgtccgcatcgcctcctccaacaccaccgccacctcctggattcgcagaagcggcgccgcctaccacccctccacccgcatcgccgccgtctccctcggcgacgaggtcctctcctccctcccctccgccgtccccctcctcctccccgccctccgctccctccacgccgccctcgtctattccaatctccataacgacgtcttcgtttccacccctcactccgacttcgtcatcctcaaccccttccctacctcccaagccttcttcaaccaaaccctagaaaccttcattctccctcttctccatttcctctctcaaacaaattcccccttaatgctcaacctctacccttactacgtcttcatgcagaacagaaacctcgtccctctcgaaaacaccctcttcaaacccctccctttctccaaacaaatgctcgaccccaacactc

SEQ ID NO: 5286 - DNA, 419 bp, Glycine max
  modified_base (395)..(395): a, c, g, t, unknown, or other
  modified_base (407)..(407): a, c, g, t, unknown, or other
acgcccacgcgtccgcccacgcgtccgaagaaacgaacggcgggttctggtggcggtggacgaaggcgaggaaagcatgtacgctctttcttggagcctcaagaacataattttccaaaattccagcgatacccttatccttctttacgtcaagccccctcatgccgtttattcccccttagattccacagccaggatagatcatcctgaaactccaggatatttgttttcgtcggacgtaagtgcggccatcgagaagtatggccaagaagtggcagattgcgtgttagagaaagcaaaaaaattgtgtaaagatctccaaaacgtcaaggtggaaacccgggtagaaattggagacccaagggacgtgatctgtgacatgtctcaaaagttgngtgctgacttgntaatcatgggta

SEQ ID NO: 5287 - DNA, 445 bp, Glycine max
  modified_base (328)..(328): a, c, g, t, unknown, or other
cgaaggcgaggaaagcatgtacgctctttcttggagcctcaagaacataattttccaaggttccagcgatacccttatccttctttacgtcaagccccctcatgccgtttattcccccttagattccacagccaggatagatcatcctgaaactccaggatatttgttttcgtcggacgtaagtgcggccatcgagaagtatggccaagaagtggcagattgcgtgttagagaaagcaaaaaaattgtgtaaagatctccaaaacgtcaaggtggaaacccgggtagaaattggagacccaagggacgtgatctgtgacatgtctcanaagttgggtgctgacttgttaatcatgggtagccacggctatggagttgtaaagagggctttccttggaagtgtgagcaattactgctcacagaacgtgaagtgcccaattttgata

SEQ ID NO: 5288 - DNA, 429 bp, Glycine max
  modified_base (425)..(425): a, c, g, t, unknown, or other
ctgaaacggactgataaaataagtagatgccttaatttgggatcatacaactatcttggttttgcggcagcagatgaatactgcacgcctcgagtagttgatacgttgaagaagtattctccaagcacttgcagtacacgtgtggatgggggaacaactgtgcttcaccttgaattggaggagtgtgttgcaaactttgttgggaagccagctgctatagtttttggtatgggctatgtgacaaactctgctattcttccagtcttgatggggaagggaagtttgattattagtgattcattgaaccacaactccattgttaatggtgcacgaggatcaagagcaacaattcgcgtttttcaacataacgagccatctcatctagaagaagtgttgagagaacaaattgctgagggacaacctangaca

SEQ ID NO: 5289 - DNA, 383 bp, Glycine max
cccacgcgtccgggagggtaaaagtcaaggtcaaggttcagaaggaggttctgaatggagcaatactcgaacagtcttatcccgtcgagtatgttcaacaagaacatatgtgtgaatcctgttctagggtccaagctaatcctgaccagtgggttgctgctgtgcaactcaggcaacacgtttctcacaggcgtactttcttttatttggagcagctgattctgaagcatggtgctgctgccactgctatacgaatcaagcagatggaacaaggtatcgacttctttttctctaatcgaagtcatggagtcaaatttgtggagtttattgggaaagtttctccggtaaggagccgccatgataagcagcttggttctcatgat

SEQ ID NO: 5290 - DNA, 420 bp, Glycine max
  modified_base (340)..(340): a, c, g, t, unknown, or other
  modified_base (404)..(404): a, c, g, t, unknown, or other
gcaatatctagagcttttggagaccactgcatgaaggactttggactaatctccgtgcctgatgtcacacacagaataattaccaccagggatcaatttgtcatcttggcaacagatggggtatgggatgttatatccaaccaggaagcagtgaagattgtttcagcaacgtcacataaagaaaaagctgctcataggcttgtgaaatgtgccatacatgaatggaaacggaaaaaaagtggcattgcgatggatgatatgtcagctatttgcctcttctttcactctcgcgcctctcatcaactccccccagccatcaaaattgttgattaagaatgtngagtggttaaacaggtcattacagctttctttgtaagttgtaacacagaaattcatttagactngtatataaacttatca

SEQ ID NO: 5291 - DNA, 437 bp, Glycine max
cccacgcgtccgcccacgcgtccgcccacgcgtccgctttttgacaggattattgccaagggccactacagtgaaagggctgctgcttcaatatgtaggcaggttgttaaggttgttaacacctgccattttatgggtgtcattcatagggatctcaagccagagaatttcttgctatctagtaaggatgacaagggacttctcaaggccacggattttggcttgtcagtcttcattgaagaaggaaaggtgtatcgagatatagttggcagtgcttactatgttgctccagaagttctacgtcgtaactatgggaaggaagcagatatatggagtgcaggagttatattgtatatcttacttagtggtgtaccttcattttgggcagagacgggaaagggaatatttgatgtcatattgcaaggtcatattgattt

SEQ ID NO: 5292 - DNA, 430 bp, Glycine max
cccacgcgtccggatttcagaaggaggtagaaagcgagcttttctctttgggaatgaccaagtttaacgtggaagaagagtctactagtgacttggaggaggaactgaagcgggtgactgcagaaaacaagaagttggccgaaatgctctcagtggtgtgtgagaactacaacactttgagaaaccatttgatggaatgcatgaggaaaaatggtgaaaaggaggtcagcccaacatcaaagaaaagaaagtctgaaagcagcaacaacaatagtaatttgatgggaactaacaatggaaactcagagagcagttctactgatgaagaatcttgcaagaaaccaagggaagaaatcatcaaagcaaaaatttcaagagtttatgtcaagactgaagcatctgatactagccttattgttaaagatggata

SEQ ID NO: 5293 - DNA, 428 bp, Glycine max
gttgatttcagaaggaggtagaaagcgatcttttctctttgggaatgaccaagggtaaggtggaagaagagtctactagtgacttggaggaggaactgaagcgggtgactgcagaaaacaagaagttggccgaaatgctctcagtggtgtgtgagaactacaacactttgagaaaccatttgatggaatgcatgaggaaaaatggtgaaaaggaggtcagcccaacatcaaagaaaagaaagtctgaaagcagcaacaacaatagtaatttgatgggaactaacaatggaaactcagagagcagttctactgatgaagaatcttgcaagataccaagggaagaaatcatcaaagcaaaaatttcaagagtttatgtcaggacttgagcatctgatactagccttattgttaaagatggataccaatgg

SEQ ID NO: 5294 - DNA, 424 bp, Glycine max
tcgcccacgcgtctcgacctgcttctggggttagagatgtgaatgcaagttctgttgctgttgaaaggttgcctgatgagatgaatggcatgaaaattagggatgaaagggaaatggaagcaactgtggtagatggaaatgggactgaaacaggacatataattgttactaccattggtggtaaaaatggccagccaaagcagacaataagctacatggctgagcgagttgttggaaatggatcatttggtgtagttttccaggcaaagtgcttggagacaggggaaactgtggctataaagaaggttcttcaagacaagaggtacaagaaccgggaattgcaaaccatgcgtcttctggatcaccccaatgttgtaactttgaagcattgcttcttttcaacaactgaaaaagacgagcttta

SEQ ID NO: 5295 - DNA, 395 bp, Glycine max
actgaaacaaaacaagtgacttctgcatgtcgggtgtgcccttttggaagtaaagcaatgtgtagggtgcaacaatggagagctcttcatttggagcatccgttctctaaatatatgaaatggttcatcatctgaacatagttatcagaatactcctttgctcaaacttaacttatgatacaagtctgactgcatttccataggatcaataaaatgggctcatgctggaggaaaggctagtcgactatatattatggcagcctatgactgtgcaacttcaaacttgttgcaagtagtgacgctgaatgatcatacagaaactcgcacaattaatctgggacttcatatgtctgaatgctgtattgacatggagatcatatcaacttcaactgagc

SEQ ID NO: 5296 - DNA, 320 bp, Glycine max
gtggaattttgcacctttttaggtcataatcctttcaaaattccgtgcttcggctggacatcgatttctctgcactgcccaaagaattggttgtgcagtccttgttttcagacaccgtctttaagttactgtcgacgtttgagttctataatgcccagtgattcttctgtaatctccaatggacacagcaatggcagtgtcaatccactacctaacctgcaaaggacttaccaagtggtagtggctgccactcaagattggggcatcggtaaggatgggaaattaccctggagattgcctactgatctcaagttttttaa

SEQ ID NO: 5297 - DNA, 346 bp, Glycine max
aatcactcatagtggtcctaatgtgaatggtagtttgcttgggatgggaaggccagttctgaggccaatgtctgatatgtggataccccatggagacccccatatgtcagcattgcagccaatgttttcaggaagaccaaggggagcacccagactaatgggcatgatgggggcacatagaggtataagtattccttcaatgcatagactcccattggggcctaatgcaccagggagtagtcctaatgcaatgccacaaaaaccaagaagttttgatgatgatatgaaggatcttgaagcattgttgaataagaaatcatttatggagatgcaaaaatcgaaaact

SEQ ID NO: 5298 - DNA, 436 bp, Glycine max
  modified_base (394)..(394): a, c, g, t, unknown, or other
cccacgcgtccgcccacgcgtccgcgagatataattctaaactttgttattgcggggaaggacacgacggctgccacactttcttggttcatgtacatgctgtgtaagtatcctgaagttcaagaaaaagcagcagaagaagtgaaagaagcaacaaacacaaaaagaattagtagctataatgagtttgtgtacagtgtcacagatgaagctcttgaaaggatgaactatctccatgcagcaattactgaaactctcagactttatcctgcagttcccgtggatgcaaagatttgtttttctgatgatacactacctgatggatatagtgtaaataaaggagatatggtatcttaccaaccttatgcaatgggtcggatgaaatttatatggngtgatgatgcagaggattttagaccagaaagatggcttgatg

SEQ ID NO: 5299 - DNA, 417 bp, Glycine max
gacccccgcgtgcgcccactcgtccgaccacgcgtccgtttttttaaaaaaaaaattccttgaaaaaatgaataagactaggttcttcgctctctgtgtgggttgtgccttcacctcatacctaccttcagccaccgctgatactatcttcgacataaatggtgattttgtccgaaacggtggcacatactacatcttgccagttataagaggagactgaggtggaatagaattcgccgcaacaggaaacgaaacatgccctctcactgtagtgcaatctccccttgaggtctctaagggtctaccactaatcatttcatcaccattcgaaatccttatcatccaagaaggccttattttgaacattgggttcacttttgtgcccccctgtgccctaattccttctgagtggactac

SEQ ID NO: 5300 - DNA, 433 bp, Glycine max
aaaagcctttttttttaaaaaaaaaattcctttaaaaaatgaagaatactatcttcttcggtctgtttcttgtttgtgccttcacctcatacctaccttcagccaccgctgatactatcttcgacataaatggtgattttgtccgaaacggtggcacatactacatcttgccagttataagaggagactgaggtggaatataattcgccgcaacaggaaacgaaacatgccctctcactgtagtgcaatctccccttgaggtctctaaaggtctaccactaatcatttcatcaccattcgaaatccttagcatccaagaaggccttattttgaacattgggttcacttttgtgcccccctgtgccctaattccttctgagtggactactgttaagggtttaccagaaggactcgctgttaaacttactgggta

SEQ ID NO: 5301 - DNA, 391 bp, Glycine max
tcgtccacgcgtctcgcccacgctgtccgccttcgcgtctcgaccacgccgtccgctggatgtgcggcgcctgtgtccctacattcctatctgagtgcgactactagttaaggtgtttaccagcaatgactcgcatgttaaacttactggctatgaaaataaagtgcctgattggtttaaaattgatagagtttcccttgaattcaatgactataagcttgtgttctgtgcaactgatgatagcacgtttgatgatattggcgctcatattgatggtgaatgaaacaggcgtctggaggagactgagaataatgatccagtattggttcactttaagaaacttgaagttgaatcatcagctactgcttgaggtggccttaaaaaatcatgt

SEQ ID NO: 5302 - DNA, 357 bp, Glycine max
ctcatgcttccaatcctaagaacattttggactctgtcaaaaatgtattgtctgctttctagtggttttcctatccatacacaatgattggcataacattatgcgcattttcttcatctcttctcgcggtggaaaaattatcagatatatctttatcatttttaattggcgtgttacagggtgtgctgcctcaattgtttattgaaatttatctttgtggtgtgaatcaactgtatgaccttgaaatagacaagattaacaaaccacatctttcaatggcatctggacaattttcctttaaaaccggtgtcattatttctgcagcatttttagctctgagttttggatttacttgga

SEQ ID NO: 5303 - DNA, 388 bp, Glycine max
  modified_base (286)..(286): a, c, g, t, unknown, or other
gcaggagcgagtgattgcagaacacccagcgcgaatgagaatggaggaagcccttgcggggctggagcgagtccaaacccagctcctgcaacgcatatcgaaactggagcgttcgcatcttccatcaccctcttcccaaaacgacaccgtcgaagacactgccacggacaccgtggctcgcctctcctccattctgcgcagcaacggcgttcccgatttctccttcaagagagtcccttccgattactacgactggcccctcgaaacccgtcgcgacgccctctcncgtcgctaatccaccatctctgcaaaagcatcgttctcgttaacacgcaagcccccggcaacgtcgtcgatgcaacgaccgcaagaattcccaatactatgt

SEQ ID NO: 5304 - DNA, 445 bp, Glycine max
aattaatttacaatggccgtcacgaaaagcctctcaatcttcctcttcatcgcaatgagctgcgtcgccgcagctcaggcagcgaacttcaacatcacaaataactgcacctacacggtgtgggccgctgccgtgcccggcggcggcgcaaggcttaaccctggcgaatcgtggaacatcagcgtgacgaacggcacaacaggaggacgcatctggggtcgaacaaactgcaccttcgacaacgcgggacgcgggaagtgcctcaccggcgactgcgagggtgttctggagtgcaacaaaacaggtacacccccgaacacggtcgttgatttcgcgttgaaccagtataacaacctcgacttctacgacatctccctcgtcgacggtttcaacgttcccctacagctgaccccgacctacaactgcagttccgttaaatgcgccg

SEQ ID NO: 5305 - DNA, 425 bp, Glycine max
ccacaatggccgtcacgaaaagcctctccatcttcctcttcatcgccataagctgcgtggccgtagctcaggcagcgaacttcaacatcacaaacaattgcacctacacggtgtgggccgcacgatcgtgcccggcggcagctcaaggcttaaccctggcgaatcgtggaacatcagcgtgacgaacggcacgacttgaggacgcatctggggtcgaacaaactgcaccttctgcaacgcatgactcgggaagtgcctcaccggcgactgcgacggtgttcttgagtgcaacaaaacaggtacaccttcgaacacgttggtggaattcgcgttgaaccagtacaacaacctcgacttctacgacatctccctcgtcgacggtttcaacattcccttgcaggtgaacccgacctacaactgcagct

SEQ ID NO: 5306 - DNA, 380 bp, Glycine max
cgaacggcacaacaggaggacgcatctggggtcgaacaaactgcaccttcgacaacgcgggacgcgggaagtgcctcaccggcgactgcgagggtgttctggagtgcaacaaaacaggtacacccccgaacacggtcgttgatttcgcgttgaaccagtataacaacctcgacttctacgacatctccctcgtcgacggtttcaacgttcccctacagctgaccccgacctacaactgcagttccgttaaatgcgccgccgacatcatcggagagtgccccactcagctccaggttcctggcggctgcaacaacccctgcacggttttcaatacgactcagtactgttgtagcaccggagctgctgggtgcggtcccaca

SEQ ID NO: 5307 - DNA, 381 bp, Glycine max
gcgcgtcaacaaacgccacaatggccgtcacgaaaagcctctccatcttcctcttcatcggcataagctggggggccgtagctcaagcagcgaacttcaacatcacaaacaattgcacctacacggtgtgggcccgcccccgtgcccggcggcggcttaaggcttaaccctggcgaatcgtggaacatcagcgtgacgaacggcacgacaggaggacgcatctggggtcgaacaaactgcaccttccacaacgcaggacgcgggaagtgcctcaccggcgactgcgacggtgttcttgagtgcaacaaaacaagtacacctccgaacacgttggtggaattcgcgttgaaccaagacaacaacctcgacttctacgacatc

SEQ ID NO: 5308 - DNA, 265 bp, Glycine max
cttcaacaaacgccacaatggccgtcacgaaaagcctctccatcttcctcttggtcgccataagctgcgtggccgtagctcaggcagcgaacttcaacatcacaaacaattgcacctacacggtgtgggccgccgccgtgcccggtttctgctcatggcttaaccctggcgaatcgtggaacatcatctttacgaacggtactacaggaggacgcttctgtggtcgaacaaactgcacctttgacaacgcatgactcgttaagtg

SEQ ID NO: 5309 - DNA, 237 bp, Glycine max
aaacgccacaatggccgtgacgaaaagcctctgcatcttcctcttcatcgccataagctgcgtgggcgtagctcaggcagcgaacttcaacatcacaaacaattgcacctacacggtgtgggccgcctccgagcccggtggcggctcatggcgtaaccctggcgaatggtgtaacatccacatgaccaagagatctacaggatgacgcatctggggtcgaacaaactgctgcttcta

SEQ ID NO: 5310 - DNA, 242 bp, Glycine max
  modified_base (130)..(130): a, c, g, t, unknown, or other
aaacgccacaatggccgtcacgaaaagcctctccatcttcctcttcatcgccataagctgcgtggccgtagctcaagcagcgaacttcaacatcacaaacaattgcacctacacggtgtgggcccgccgncgtgcccggcggcggctcaaggcttaaccctggcgaatcgtggaacatcagcgtgacgaacggcacgacaggaggacgcatcttgggtcgaacaaactgcaccttttacaac

SEQ ID NO: 5311 - DNA, 369 bp, Glycine max
cccacgcgtccgcccacgcgtccggcagaatcaggctgaggcacttgatctggaaaaaaccgtgcttgagacagtagaggaagctgcagaggactggaggattgatgatattaaagggctccttgggcgttgtaattttaaagctgatatgcttgaccgaaaagtttcactattgagtggcggtgagaaggcacggctggctttttgcaaattcatggtaaaaccatcaactctgcttgtgttggatgaaccaaccaatcacttggatataccttctaaagaaatgctcgaggaggcaatatatgaatacgaaggcactgttatcacagtatctcatgaccgatactttattaagcaaattgttaatag

SEQ ID NO: 5312 - DNA, 382 bp, Glycine max
cccacgcgtccgttttttttttaaagggaaaatgaaattcacacaagaagccaaagaaagcagaaacagaggaagagagagaaacaccaaagatgggtctttgctttggttgcttcggcgtagacaaacgcatgagcaaggaagaagagagattggcctctgaagaagcgcgtgccaaagctgctgaagccgcacagaaaaggcaagagcaatttgagaattctgcagcaggacgagctgctcgtgcacagcaacaagcaatggcaaagcaatctgcaaataccaacaaaggcgaaccagttctaaagtggcaaaatgagttgaggttagacattctgtcagttggagttaacttttaattacgtgtaagtatcgatgacag

SEQ ID NO: 5313 - DNA, 393 bp, Glycine max
gttacagggataacatacgacagagaaagcatcgaacaatggttgctaaaagcgaaagattgcacgtgtccaatcacaaagcaacgattgccacgaagcacagagttcttaaccccaaaccacacgcttcggaggctaatccaagcgtggtgctcagcaaacgaagccaatggcgtagaccaaattccaaccccaaaatcccctcttagcatcgtcaacgttgagaaactcgtgaaggatctcgaagtatcttcccgttttcaaagggcattggagaagttgcacgatcttgcaatagagaacgggaggaacagaaggtgcatggcttctgcgggtgtagcaaaagctatggtgcacgtgatcacaaagagttttatccaaggtaacaaaacg

SEQ ID NO: 5314 - DNA, 404 bp, Glycine max
ctcaagagagggtctgcctgtctttgcaagtggtgttgggcttagcacatttgacaaagcatctgttcattagtatgtgcagtcacacattcaaattaatgaatatcgtgagcgtataatcttgccttctgcatcaaagaagcaggggcgacctattaccacttgtataaaggttttagacatgactggtctgaagttatcagccctgaatcagattaagttgctaactattatatcatccattgatgatctgaactaccctgagaagacaaatacttattacattgtaaatgctccatacatattttctgcttgttggaaggttgtgaagccacttttacaagagatgacactaagactgatacaggtgttaccaggttgtggacgatatgagctattgacta

SEQ ID NO: 5315 - DNA, 433 bp, Glycine max
acggacgcgtgggcggacgcgtgggcggacgcgtgggcggacgcgtgggttgtcaccgaaactttaatgcggtttctaaaagcaagggactgggatccttgcaaggcacataaaatgttggttgactgtttaaattggagggtgcaaaatgagattgacaatatattatctaaaccaattgttcctgctgatttatacagagcggtgcgtgattcacaactcataggattatcaggttactcaagagagggtctgcctgtctttgcaattggtgttgggcttagcacatttgacaaagcatctgttcattattatgtgcagtcacacattcaaattaatgaatatcgtgagcgtataatcttgccttctgcatcaaagaagcaggggcgacctattaccacttgtataaaggttttagacatgactggtctga

SEQ ID NO: 5316 - DNA, 347 bp, Glycine max
  modified_base (21)..(21): a, c, g, t, unknown, or other
  modified_base (24)..(25): a, c, g, t, unknown, or other
  modified_base (36)..(36): a, c, g, t, unknown, or other
ccacgcgtccgcaactttggnagnngatgtgccttngcgattaacgtttcagaatgttcatcaagggtttgtcaccgaaactttaatgcggtttctaaaagcaagggactgggatccttgcaaggcacataaaatgttggttgactgtttaaattggaaggtgcaaaatgagattgacaatatattatctaaaccaattgttcctgctgatttatacagagcggtgcgtgattcacaactcataggattattaggttactcaagaaagggtctgcctgtctttgcaattggtgttgggcttagcacatttgacaaagcatctggtcattattatgtgcagtcacaca

SEQ ID NO: 5317 - DNA, 465 bp, Glycine max
  modified_base (367)..(367): a, c, g, t, unknown, or other
gttttgggaagttctcaaaggcttttcactggaaaacaggaagaaatttctgaagtttgtgacaggttgctctcgtgggccattgcttggtttccgatatcttgaacctatgttttgcatacaaagggcttccggtaatgccgctgaggaatcacttgaccgattaccaacatcggctacttgtatgaatctactaaagcttccgccttatacaagcaaggagcaattggaaaccaaattactgtatgccataaatgccgatgctggctttgatttaagttaaaaggaggcagcggagtttacgatatctttaggtttgaagccggtagaaaatgactcacagatgaccattaattggaaacgacanataatatggtggatagaattgaataaatttatcctgtgtgagagtttatgtatatatattcttaattttattcaatcttcattgtcaattggtatctc

SEQ ID NO: 5318 - DNA, 419 bp, Glycine max
acgcgtccaccacgcgtccggcactttagataatgactgccataaagacaaacaatattctttcaatactcatcatcatttgagactaattaagcttgcgtgattcctagaattgagaagagaaaagaatattttgttgttgggcttatgatatctagttgggaccccagcagcttaagtacatgacagttctcaaagactcttctgattgatttgccttctcatgttttagtgttgtggagatcatagcagaagaagaaagcttgttagcctgagagaatgagccaacatggtttttgagatggtgttgagctgatcttaaggcatgattccacctgcatataccttggtctttcaaggcctccacaattccaacacttgctgccacactccatgctctaattcctgaactcatcttg

SEQ ID NO: 5319 - DNA, 385 bp, Glycine max
agctttagtgttttctcttgtcacataaaagtcatctaagaagaattacaagatcatcatcacaataacaagatgagttcaggaattagagcatggagtgtggcagcaagtgttggaattgtggaggccttgaaagaccaaggcatatgcaggtggaatcatgccttaagatcagctcaacaccatctcaaaaaccatgttggctcattctctcaggctaacaagctttcttcttctgctatgatatccacaacactaaaacatgagaaggcaaatcaatcagaagagtctttgagaactgtcatgtacttaagctgctggggtcccaactagatatcataagcccaacaacaaaatattcttttctcttttcaattctaggaat

SEQ ID NO: 5320 - DNA, 418 bp, Glycine max
acattatcagtatcattcattgtcactacgattgttctaaaagcaattattactcttgagaagaattaaaatatcatcatcacaataacaagatgagttcaggaattagagcatggagtgtggcagctagtgttggagttgtggaggccttgaaagaccaaggcatatgcaggtggaatcatgctttaagatcagctcaacaccatctcaaaaaccatgttggctcattctctcaggctaacaagctttcttctactgctatgatctccacaacactaaaacatgagaaggcaaagcaatcagaggagtccttcagaactgtcatgtacttaagctgctggggccccaactagatatcataagtccaataagaaaatattctttctcttttaatttctaaaaattatcaagcttagtc

SEQ ID NO: 5321 - DNA, 382 bp, Glycine max
ctttatcagtatcattcattgtcactacgattgttctaaaagcaattattactcttgagaagaattaaaatatcatcatcacaataacaagatgagttcaggaattagagcatggagtgtggcagctagtgttggagttgtggaggccttgaaagaccaaggcatatgcaggtggaatcatgctttaagatcagctcaacaccatctcaaaaaccatgttggctcattctctcaggctaacaagctatcttctactgctatgatctccacaacactaaaacatgagaaggcaaagcaatcagaggagtccttcaaaactggcatgttcttaagctgctggggccccaactagatatcataagtccaataagaaaatatatct

SEQ ID NO: 5322 - DNA, 436 bp, Glycine max
aaaagcaagaacaattactttagtgttttctcttgtcacataaaagtcatctaagaagaattacaagatcatcatcacaataacaagatgagttcaggaattagagcatggagtgtggcagcaagtgttggaattgtggaggccttgaaagaccaaggcatatgcaggtggaatcatgccttaagatcagctcaacaccatctcaaaaaccatgttggctcattctctcaggctaacaagctttcttcttctgctatgatatccacaacactaaaacatgagaaggcaaatcaatcagaagagtctttgagaactgtcatgtacttaagctgctggggtcccaactagatatcataagcccaacaacaaaatattcttttctcttttcaattctaggaatcaagcaagcttaattagtctcaaatgatgatgagta

SEQ ID NO: 5323 - DNA, 420 bp, Glycine max
  modified_base (375)..(375): a, c, g, t, unknown, or other
caagatgagttcaggaattagagcatggtgtgtggcagcaagtgttggaattgtggaggccttgaaagaccaaggcatatgcaggtggaatcatgccttaagatcagctcaacaccatctcaaaaaccatgttggctcattctctcaggctaacaagctttcttcttctgctatgatatccacaacactaaaacatgagaaggcaaatcaatcagaagagtctttgagaactgtcatgtacttaagctgctggggtcccaactagatatcataagcccaacaacaaaatattcttttctcttttcaattctaggaatcaagcaagcttaattagtctcaaatgatgatgagtattgaaagaatattgcttgactntatggcagtcattatgtaaattttgatattgatagtgatgagctg

SEQ ID NO: 5324 - DNA, 420 bp, Glycine max
cttagtcactctatcagtatcattcattatcactacgattgttctaaaagcaatgattactcttgagaagaattaaaagatcatcatcacaataacaagatgagttcaggaattagagcatggagtgtggcagctagtgttggagttgtggaggccttgaaagaccaaggcatatgcaggtggaatcatgctttaagatcagctcaacaccatctcaaaaaccatgttggctcattctctcaggctaacaagctttcttcttctgctatgatctccacaacactaaaacatgagaaggcaaagcaatcagaggagtccttcagaactgtcatgtacttaagctgctggggccccaactagatatcataagtccaataagaaaatattctttctctttaatttctagaaatatcaagctta

SEQ ID NO: 5325 - DNA, 414 bp, Glycine max
  modified_base (398)..(398): a, c, g, t, unknown, or other
cccacgcgtccggttactttatcagtatcattcattgtcactacgattgttctaaaagcaattattactcttgagaagaattaaaatatcatcatcacaataacaagatgagttcaggaattagagcatggagtgtggcagctagtgttggagttgtggaggccttgaaagaccaaggcatatgcaggtggaatcatgctttaagatcagctcaacaccatctcaaaaaccatgttggctcattctctcaggctaacaagctttcttctactgctatgatctccacaacactaaaacatgagaaggcaaagcaatcagaggagtccttcagaactgtcatgtacttaagctgctggggccccaactagatatcataagtccaataagaaaatattctntctcttttaatttcta

SEQ ID NO: 5326 - DNA, 420 bp, Glycine max
  modified_base (348)..(348): a, c, g, t, unknown, or other
gttactttatcagtatcattcattgtcactacgattgttctaaaagcaattattactcttgagaagaattaaaatatcatcatcacaataacaagatgagttcaggaattagagcatggagtgtggcagctagtgttggagttgtggaggccttgaaagaccaaggcatatgcaggtggaatcatgctttaagatcagctcaacaccatctcaaaaaccatgttggctcattctctcaggctaacaagctttcttctactgctatgatctccacaacactaaaacatgagaaggcaaagcaatcagaggagtccttcagaactgtcatgtacttaagctgctggggcncccaactagatatcataagtccaataagaaaatattctttctcttttaatttctagaaattatcaagcttag

SEQ ID NO: 5327 - DNA, 361 bp, Glycine max
cttagttactttatcagtatcattcatcacaacaacaagatgagttcaggaattagagcatggagtgtggcaactagtgttggagttgtggaggccttgaaagaccaaggcatatgcaggtggaatcatgcattaagatcagctcaacaccatctcaaaaaccatgttggctcattctctcaggctaacaagctttcttcttctgctatgatctccacaacactaaaacatgagaaggcaaagcaatcagaggagtctttcagaactgtcatgtacttaagctgctggggccccaactagatatcataagtctaataagaaaatattctttctcttttaatttctagaaattatcaagctt

SEQ ID NO: 5328 - DNA, 411 bp, Glycine max
gttttctcttgtcacataaaagtcatctaagaagaattacaagatcatcatcacaataacaagatgagttcaggaattagagcatggagtgtggcagcaagtgttggaattgtggaggccttgaaagaccaaggcatatgcaggtggaatcatgccttaagatcagctcaacaccatctcaaaaaccatgttggctcattctctcaggctaacaagctttcttcttctgctatgatatccacaacactaaaacatgagaaggcaaatcaatcagaagagtctttgagaactgtcatgtacttaagctgctggggtcccaactagatatcataagcccaacaacaaaatattcttttctcttttcaattctaggaatcaagcaagcttaattagtctcaaatgatgatgagt

SEQ ID NO: 5329 - DNA, 429 bp, Glycine max
cttagttactttatcagtatcattcattatcactacgattgttctaaaagcaattattacgtgctggagaagaattaagagatcatcatcacaataacaagatgagttcaggaattagagcatggagtgtggcagctagtgttggagttgtggaggccttgaaagaccaaggcatatgcaggtggaatcatgctttaagatcagctcaacaccatctcaaaaaccatgttggctcattctctcaggctaacaagctttcttcttctgctatgatctccacaacactaaaacatgagaaggcaaagcaatcagaggagtccttcagaactgtcatgtacttaagctgctggggccccaactagatatcataagtccaataagaaaatattctttctcttttaatttctagaaattatcaagcttagtcac

SEQ ID NO: 5330 - DNA, 441 bp, Glycine max
ctttagtgttttctcttgtcacataaaagtcatctaagaagaattacaagatcatcatcaggatagcaagatgagttcaggaattagagcatggagtgtggcagcaagtgttggaattgtggaggccttgaaagaccaaggcatatgcaggtggaatcatgccttaagatcagctcaacaccatctcaaaaaccatgttggctcattctctcaggctaacaagctttcttcttctgctatgatatccacaacactaaaacatgagaaggcaaatcaatcagaagagtctttgagaactgtcatgtacttaagctgctggggtcccaactagatatcataagcccaacaacaaaatattcttttctcttttcaattctaggaatcaagcaagcttaattagtctcaaatgatgatgagtattgaaagaatattgcttgtctt

SEQ ID NO: 5331 - DNA, 390 bp, Glycine max
agcagagttctcggcgcagtttgccttcgtttgagctctgttctgttctgtgcctccacaaaccaaaccaggcacaagtaatacggtttaaccaaacaaactaaattaaaccaagtgaaaggaagtagtcaagttaaagaaaatggcgaagtcattgagatcgaagagggagaagaggctgagggctattccgaaggagattgttgaacctttctatgacaagaaagaagctgctaagcttgctgcccaagaagctgcccttgccgcccctaagctggaggttccttcgaaaccaaatactgctatggaagcatccgcttccactgacaacaccaacatggatgtggaggtggctgatggaagccaaagcatggcttccttaaagcctgt

SEQ ID NO: 5332 - DNA, 432 bp, Glycine max
agagaggttggaagacttgtgatgtggagtatcaatcttactttgctcttgatgatctctgggaatcgtttaaggagtggagtgcgtatggagcaggagtccctttggtacttgatcaaagacaatctgttgtgcaatattatgttccgtatttgtcggctattcaagtatatggtcaatcagataagaagtcaaatgctaagccaaggtacaccagtgaagatagtgacggtgattactgccgagattcaagcagcgatggaagcagtgacagtgaatttggaaaaaggactgaactttttacagcacaaagaaatagtcactatcatacaggtgatgcttcgtttcaaatgagcaggctatctgtacatgatcacaatacaatgcaagacggattttctagtgacgatagtgaaactgggaatcctaaag

SEQ ID NO: 5333 - DNA, 426 bp, Glycine max
acgttttgcgcgttgtttatgtgcagggtttttacattgtctcttatggactcggaatgtaccttctgaatctcttgattggttttctctcccctttggttgatcctgagctcgatccctccgactcccctttgcttccaaccaaaggctccgatgagttcaaacccttcattcgccgccttccggagttcaagttctggtattctttcaccaaggctctctgcatagcgtttgtgatgacctttttttccctgtttgatgttcctgtcttttggcctatattactctgttactggtttgttctctttgtccttacaatgaggcgccaagttgctcacatgatcaaatacaaatatatccgcttcaacttggggaagcagaagtatagcggtaataaatcttctgcaaggagcagtagctctcgtg

SEQ ID NO: 5334 - DNA, 446 bp, Glycine max
aaattacttgtttatgggagattatgttgttcgtggctattattctgtcgaaactgttgcgcttttggttgcccggaaagtgcgttatcgtcagcgtattactattctgaggggaaatcatgaaagtcgccagattactcaagtttatgggttttatgatgagtgcctgcggaagtatggtagtgctaatgtttggaagatctttaccgatttgtttgactactttccgttgacagcattggttagtatactattacataatttttggaaaggattgtgggatattttgttagattgtcatttttctcaggtccaaggtagtttgttcaattcaatgatcctgggcacccttattatgctggcttgcatttaagattacaccatggtggaattggctgctatcgctgtgctgtattgtggaatctgttggagcagatgaccctatt

SEQ ID NO: 5335 - DNA, 419 bp, Glycine max
ctcaagagctttttgaaaagcccttcttttcgtcagttgcaaaggctcttcgtccaggtggagttgtgtgcactcaggcagaaagcatatggcttcatatggatataattgaggacattgtggctaattgtcgccagatttttaaaggctctgtcaactatgcttggactactgttcctacatacccaagtgggatgattggttttatgctttgctcaactgagggaccacctgttgatttcaagcatccagtgaatcccatagatgaaaatgagagtcagaagtcagtaagaccgctgaaattttacaactctgagattcataccgcagctttctgcttgccgtcgtttgcgaagaagaagattggttctaaagcaaattaagaagattttctaaacctttgaaagagctcatgtggc

SEQ ID NO: 5336 - DNA, 468 bp, Glycine max
cccacgcgtccgcccacgcgtccgtcttagttgtgataatatgagagtgagcgcagagtttgagcgtgttctcaagtatttcgatgaagatggggatggtaagatttccccatctgagcttaggaaccggctatgcatgatgggtggtgagttattgttcaaagacgctgaaaagttgattgaggaattggattctgacggtgatgggtttttgagtttggaagattttgtgaagataatggaggcagcaggggaagatgagaagttgaaggatttggcggaagcttttgagatgtaccatgacactgaaatgtttgggtttattacacccaaaagcttgcaaaggatgctgaataggttgggagaatcaaaatccatggagcaatgcatagcaatgattggccattttgatttgaatggagatggcgtgcttagctttgatgaatttggagtgatgatgcagtgatg

SEQ ID NO: 5337 - DNA, 415 bp, Glycine max
caaaattcaattttgagcactaaccagcaccacttccaatggcttcaaatcatgaagaagtgatacttttgggcaagtgggccagcccatttagcaacagagtagaccttgctctcaagctcaagggagttccctacaaatactccgaggaagatcttgctaacaagagtgctgatcttctcaggtacaaccccgtgcacaagaaggttccggttttggtccacaatgggaacccattacccgagtcacttatcattgttgaatacatcgatgagacatggaaaaataatcccctcttgcctcgagacccttatgagagagccctggctcgtttctggtctaagaccttagatgacaagatcttgcctgctatatggaatgcttgctggagtgatgagaatggacgtgagaaagc

SEQ ID NO: 5338 - DNA, 404 bp, Glycine max
tttccgctttcacttcttctctctcaccctccaactatgagttactacaaccagcagcagccacccgtcggtgttcctcctccccaaggttacccaccgccggaatcttacggaaaggacgcgtaccctccgccagggtaccctccacagggaggataccctccgcaggcgtatccagcacaggggtaccctccaccctacgcgcctcctcagtacgctcagcctccgccgcaacaacaccagaattcatctggcccgggttgcttagaaggatgtttggctgctctctgctgctgttgcctgttggatgcctgcttctgagaaagaaaagagaggttgctttgcacaaattggatttgaaactgtgttttgactttgaacatgaccattatcgctcttagttt

SEQ ID NO: 5339 - DNA, 443 bp, Glycine max
  modified_base (362)..(362): a, c, g, t, unknown, or other
caacgatgagttactacaatcagcagcaaccacccgtcggtgttcctcctccccaaggtgtacccaccgccggattcttacggaaaggacgcgtaccctccgccagggtacccgccgcaaggaggataccctccgcaggcgtatccagcacaggggtaccctccaccctacgcgcctcctcagtacgctcagcctccgccgcaacaacaccagaattcatctggcccaggttgcttagaaggatgtttggctgctctctgctgctgctgtctgttggatgcgtgcttctgagaggagaagaggttgctttgcacaaattggatttgaaactgtgttttgactttgaatatcgtcgttagttnttattattctatgttgatttacatttcgtggatatgaaatattgcttcgaaagatatgttctgtttcatttacaggattct

SEQ ID NO: 5340 - DNA, 416 bp, Glycine max
  modified_base (368)..(368): a, c, g, t, unknown, or other
cttcaaggtggaaagaaaaacccacccactatcccaattccaataaataccttcctctggatattttcgcacaataccctctcacccttcaacgatgagttactacaatcagcagcaaccacccgtcggtgttcctcctccccaaggttacccaccgtcggattcttacggaaaggacgcgtacccttcgccagggtacccgccgcaaggaggatacccttcgcaggcgtatccagcacaggggtaccctccaccctacgcgcctcctcagtacgctcagcctccgccgcaacaacaccagaattcatctggcccaggttgcttagaaggatggtaagtctctctctctctctctctctctgcatatntctgagtgaaagtgttcgtggcaactcagatcgggattcactcgattg

SEQ ID NO: 5341 - DNA, 443 bp, Glycine max
ggaaatagctttcctcggttataaccttcaaggtggaaagaaaaacccacccactgtccggattccaataaataccttcctctctatattttcgcacaataccctctcacccttcaacgatgagttactacaatcagcagcaaccacccgtcggtgttcctcctccccaaggttacccaccgccggattcttacggaaaggacgcgtaccctccgccagggtacccgccgcaaggaggataccctccgcaggcgtatccagcacaggggtaccctccaccctacgcgcctcctcagtacgctcagcctccgccgcaacaacaccagaattcatctggcccaggttgcttagaaggatgtttggctgctctctgctgctgctgtctgttggatgcgtgcttctgagaggagaagaggttgctttgcacaaattggattgaaact

SEQ ID NO: 5342 - DNA, 338 bp, Glycine max
gcgccttgctgtgtgagagaaagagaaatggcaacaagcgaagaagtggttgcggctgcgcgggatggggccgagccggaggcagggttgaagcacaaactggagagaaaatggacgttttggtgcgacaaccaatccatacccaagcaaggcgctgcttggggaacctctcttcgcaaggtctacaccttcgacaccgttgaagagttctggtgtttgtatgatcaggtattcaagcccagcaagttgcaaatcaatgccgattatcacttgttcaagactgggattgaccctaaatgggaagatccagagtgcgcccatgggatgaaagtggtcta

SEQ ID NO: 5343 - DNA, 414 bp, Glycine max
cggataacgaaagcaattttgatttgtgtcgaggaaaggacaggtcttagaacccttcttttcttcctcgtgtgcgtgaaaacgaagcaacgccacacgatggtgttctacttcaaagcgcgccctgaagccggcgatttcaccatcttcatgggcctcgacaagttcgagaacgaggaactcatcaaatacggttttcccgaagacatctggttccatgttgataaaatgtcttcagcccatgtctatgtcaggctgcacaaaggccagactctcgatgacctgagtgaggctttactggaagattgtgctcagcttgtcaaagcaaattcaatttcagggaattaagtgaacaatgttgaagttgtttacactccctggtctaaattaaagaaaactgcttcaatggatgtt

SEQ ID NO: 5344 - DNA, 360 bp, Glycine max
ggagtgagtctcggggcatcaaagaagtcagatgggagacgtggcagataaattggcgtatgtacaagcgattaccggtttagaagatccggaactatgtacagaaatcctggctgaccacaattgtgacctgaaactcgatatgtctacttttacctctaccttaaactctaacaaccatccaccgactcctgctctggcttggaaactcattaccctactcgtttccgtaatctacgccagtataggcttaagtttcggcgctatcggcttgggcctatgggccgcggtatgcgtcctctcctattccctcggcctcgtgggcctgggctcgcccttgggctcattggtttccgtaac

SEQ ID NO: 5345 - DNA, 462 bp, Glycine max
agaaaatgttcaaaaaattttcaggtgaagatgtatctgcacagaaccaagtgaaggcatctgtgtcaacgaaaaatacggcaaagtattgctgaagagtatccgggtcttgaacctgtgttggatgatatacttcccaagaagtcccctctaatagttgctaaatgtcagaaccatctcaatctggttcttgtgaacaacgtgccactgtttttcagtgtccgtgatggaccatacatgcccaccttgcgtcttctccatctatatccaaatataatgaaaaagttacaagttgaccgtggtgcaattagatttgtcttggcgggtgcaaacataatgtgtcctggtcttacatctcctgggggtgttttggatgaggaagtaggggcagaatgtcctgtggccatcatggctgaaggaaaacagcatgctcttgctattggctttacaaaaatgtcagca

SEQ ID NO: 5346 - DNA, 433 bp, Glycine max
cttctctctctcacactttctctcagcgttgaaacttgaaattcttcttctccgaaacctctttgaaccgggtcaagaaataaacctcgctgggaaccgttgattgggtttgtacgaataatttgaaatgaagattcagtgcaacgtgtgcgaggccgcggaggccaaggttctgtgctgcgcggacgaggcagcactgtgctgggaatgcgacgagaaggttcacgcagcaaacaagctcgccagcaagcaccagagggtccctctctctctctccgcctctcacatgcccaagtgtgacatatgccaggaaatggttggttatttcttctgtttagaggatcgagctttgctatgtaggaattgtgatgtatctatacatacagcaaatgcctgtgtctctgatcatcaaaggtttttgcttactggtgtg

SEQ ID NO: 5347 - DNA, 389 bp, Glycine max
cggacgcgtggggtcaattcttttgaattcctgcaccctctacttaggagtttggattatgaactgccaaagacttccctaccggtcgaccgtgctcttgttctcagcaggatttgctgggctgtttatacaatcctatatccatggctcaatcggtggtggcttccacagccattcatccttccctctgaagtacacaaggtgggagtgacccattatttctcttatcttaaagccaaagaggagattggctattttcccatggtgacctcgcgagaggggatggctttgaccatatcttactggcaagagaggaaacgaacaactctggatggaccaacaatctacgcgtggttgttttgtgtcattggaatgatctcactgttttg

SEQ ID NO: 5348 - DNA, 240 bp, Glycine max
gttttagcaatggtgaaactggtgatgaaggacgtccaagaagagcatttgaacgccacagtgggactggacgatgaaatgaattcaaacgggaacggtctggacctggtaactggggtacacagaatgatgacattgctgacgtgactgaggaagtggtgaatgaaactgaaaacgttcttgctgatgacaagcctgtacgagacgaagatgcagcagaagggaacaaggacagtcctg

SEQ ID NO: 5349 - DNA, 351 bp, Glycine max
atctgaacaataataattaaccatggaaccgtcgctgagttaacctttttcttctgcgcggtgctgttctcttttgttgtttgggttttttttttttctttctgagaagggcttgttgttgttgtgtttcgaaataatggcgactacgaatccctttgatttgttgggcgacgacgccgaggacccctcacagttgatcgcggcggagcaactgaaggccgcggcagccgcggccaccgcgccacccaagaaggaccaggccaagcccggagctcgcaacggcgcgccggcccagttgccgtcgaagccgctttcttccttttaagctgtaagggaagctaaaaatgaaac

SEQ ID NO: 5350 - DNA, 438 bp, Glycine max
atgatgagctgcgtttcgatttcgagttcagtgacaagaggcgctattagcgtgggttcctcttcatctttgtgtttcggcacacccaagttgttcaattcagcaagggtagcggtgaatggtcggcgaagaaacaaaggtttgagttgcaacgccatgttcggtctgggggtgcccgaactggtcgttattgccggcgtggccgccctggtttttgggcccaagaaattgcctgaagtcggccgtagcatcggcaagactgtaaagagcttccaacaggctgcaaaggagtttgagtcggagcttaagaaggaacctgattccacccaaggggactcatccgagaaacctattggtacagtcactgagcagcagcaggaggacaatgaggtgtctacttctaaggagactgtatgatattttcgccatgaaataaac

SEQ ID NO: 5351 - DNA, 402 bp, Glycine max
  modified_base (232)..(232): a, c, g, t, unknown, or other
attttcataaccaaatttaatctcaaaagaatacaaaatgccgcgcccgtcttaagggctaaggcttctcagtcctctaaaaatttctagagtctctttcttcactttcttcctccacatggcagagacaccaaccctcagaatccacgaagtctgccccatctcgccgccacaagaaaccccatcaaccactattcccttcaccttcttcgacgtcctatggctacgcctncccccagtggagcgtctgttcttctattccttcccaaacccaacaacaacctcttcattcttcgacaccaccattctcccaaatctcaaacactccctctccctcactctccaccacttccctcctctcgccggcaccatcacatggccacttcacacaccccttcccct

SEQ ID NO: 5352 - DNA, 408 bp, Glycine max
tccatcgtccgaagtagagacatatggccgtctaaaccttctcattaatgcgtctgggattctttcaatacctgaagtaatacatccagaaacaacattgaacaaagtggagaaatcatctttaatgcttgcatatgaggttaatgcagtgggtcctatcttagttatcaagcacatgtggcctcttctaaaagtaggaggcggccacgggactggaagaagtgctgcagtggtggctagtttgagtgcaagggttgcatctattggggacaatcgtcttgggggctggcactcatatcgatcttcaaaggctgctcttaatcaattatcaaagactgtctccctggaatttgcaagaaagaaggatccaattgtatgcattttactgcatcctggtacagttgacac

SEQ ID NO: 5353 - DNA, 452 bp, Glycine max
  modified_base (396)..(396): a, c, g, t, unknown, or other
  modified_base (403)..(403): a, c, g, t, unknown, or other
aagacactgaggttaaggaaacaattgaaggtaaacaagaaaatgaaaaagtggaagctgagaaaccagaagtagatgctatggaagtagagagtggcattccgcagaaggaggggagtgataaaaaggagaaaaaagatgtggcgatggaggaggaggatgaagatgagggtaaggataatattgataagtcaaaagaagaagagaaggcagaagatagtaagggtgagaaaagatcaaaaaaacgtgggagagggaatatcaatggggagaaagtgaaggagaaaagaaaggaactgaagaaaacagagccaagaactcctactattgatcgccctgtgcgggaaaggaaatcagttgagaggttggtagcatcaattgagaaagatgcatcanaagaatntcacattgaaaagggtcgtggtacacctttgaaagatataccaaatgtg

SEQ ID NO: 5354 - DNA, 405 bp, Glycine max
gcattattctcccctctcactctgttccttcctcatccacaattcaatggtattggtgagactggttcccatggcttcttcttcaatacgacccgctctctcaacaccttcctccttttctctcttcagcccttctcgccgtatctctttctcccatcttccctctccctctgtgtctcaatccaatagttttggcctcaaagcttccagagtgttgagacaatatggtaactccacgagaatcatggcatcaggggacttgtctcattcagttgcggctgcttcaccagaaaatgtgcttgagtgggtcaaacaggacaagagaagaatgcttcatgttgtatatcgtgttggggacctggacaggaccataaagttttatacagagtgcctaagaatgaaact

SEQ ID NO: 5355 - DNA, 430 bp, Glycine max
gacatacttttcaaggtcaaaagtgaaagcttcaaagctcataagttgatacttgcagcccgatctcctgtgtttagagcccagttttttgggcttgttggggatcctaccttagaggaagtagtggtagaggatattgagccctttatcttcaaggcaatgcttctctttgtttactctgacaaacttcctggcatatatgaggttatggactcaatgcccttgtgctcatacaccgtcatggtgcagcatctcttggctgctgctgatctctataatcttgatcggctcaaactgctttgcgaatcaaaattgtgtgaagaaatcaatactgacaatgtggccacaacacttgcgctggcagagcaacatcactgtccacagcttaaggcaatctgtttaaaatatattgcaaatcctgcaaacttgg

SEQ ID NO: 5356 - DNA, 446 bp, Glycine max
  modified_base (350)..(350): a, c, g, t, unknown, or other
  modified_base (352)..(352): a, c, g, t, unknown, or other
cccacgcgtccgcttttcaagtttagaagaggcctatgaggccctaagagtttttgagaggcttgggattgggaataagcctgatgtgagcacaaccacttgcaagaaagtagcagaaaaccttgagttgtcatcgcctgtgaaggatttgttctattcgttaaaggttaatggcatattaaaatgcaaggttgatggggatgttttcaaggatattgctttgagacttaaagccactgtcaatgatgcaagtactttggtggacatgtactattcaataggaagtctggttcttataaaggaccaggcttctgatgttgatgtgcttcttactgatgctgatgggactntncattcaatcaaggctctgagtcaaagtgatggaagatggcgttatagttctgataatccaaaatctagtacctatgctggttgattagcacttg

SEQ ID NO: 5357 - DNA, 429 bp, Glycine max
  modified_base (3)..(3): a, c, g, t, unknown, or other
ganaggcaaaggggatcgctgaaatcaattagtctggttgtagtgggaaaagaaaagaaaatgaaaatgggtggtgggtgcaagtgtttggtatcgttggtgttggctttggtgttgatgaggagtttggcggaggcgcaatcgggcaccagcaccacttgcgcccaggagctaattccatgtgtgaactttctgaatgggacaaccaccccaccaagctcttgctgtgaccctctcaaacaaaccgtggaaaaccaactggattgcctctgcaacatcttcttcagccccggcttgcttcaaagcttcaacgtctctgttgatcaggctctcgctctcagtcgccgctgcggcgtcaccaatggtatcaccagctgctcaaacgggtcagctccagcttcgggttcagggccaccaccagtcacacct

SEQ ID NO: 5358 - DNA, 430 bp, Glycine max
gaaaggcaaaggggatcgctgaaatcaattagtctggttgtagtgggaaaagaaaagaaaatgaaaatgggtggtgggtgcaagtgtttggtatcgttggtgttggctttggtgttgatgaggagtttggcggaggcgcaatcgggcagcagcaccacctgcgcccaggagctaattccatgtgtgaactttctgaatgggacaaccaccccaccaagctcttgctgtgaccctctcaaacaaaccgtggaaaaccaactggattgcctctgcaacatcttcttcagccccggcttgcttcaaagcttcaacgtctctgttgatcaggctctcgctctcagtcgccgctgcggcgtcaccaatggtatcaccagctgcacaaacgggtcagctccagctccgggttcagggccaccaccagtcacacctg

SEQ ID NO: 5359 - DNA, 388 bp, Glycine max
ggcaaaggggatcgctgaaatcaattagtctggttgtagtgggaaaagaaaagaaaatgaaaatgggtggtgggtgcaagtgtttggtatcgttggtgttggctttggtgttgatgaggagtttggcggaggcgcaatcgggcagcagcaccacctgcgcccaggagctaattccatgtgtgaactttctgaatgggacaaccaccccaccaagctcttgctgtgaccctctcaaacaaaccgtggaaaaccaactggattgcctctgcaacatcttcttcagccccggcttgcttcaaagcttcaacgtctctgttgatcaggctctcgctctcagtcgccgctgcggcgtcaccaatggtatcaccagctgcacaaacgggtcagc

SEQ ID NO: 5360 - DNA, 451 bp, Glycine max
cttgcgatgtgtaatcattttcttttgttttaatgaaggtgtcttgatagagcggctggggtgtctgatgctgagagcaaaagtggtgattattctaaccagtggagactttgcaccgtgacacaagtagaggaattgaaaatcttgattcgaatgtttccagtttgggctactgggattgtttttgctgctgtttatgctcagatgtcaacattgtttgtggaacaaggaacgatgatgaacacaaattttggttccttcaggattcctccagcttccctctcgagttttgatgtgataagtgttattttctgggtccctgtctatgacaggattattgttcccattgcaaggaaatttacaggcaaggagaggggcttttcagagttgcaaagaatgggaattggcctttttatttcagtcctgtgcatgtcagcagctgctatagtgg

SEQ ID NO: 5361 - DNA, 369 bp, Glycine max
accacgcgtccgcccacgcgtccgcataacttcaacaacttctttcttctcgatctcacgatggctcatttggccctgtctcagatggctgtaactgttcctgttggcaacgatttgtctctcagaagatctgcagttaaggcccctaacttgaacttttgggataaatcatgggcaccagtatttactttggacttgaagccaaacaacccaagtttaagaagtcgtcatgtggtatgcatgtccgtgcaacaagcaagtgtatccaaagttaatgtctcacctttagaattggaagatgctaaagaacctccattgaacttatacaagcctaaagaaccctatacagcaacaattgtttctgttgat

SEQ ID NO: 5362 - DNA, 396 bp, Glycine max
gtgctggcataacttcaacaacttattctttgttctcgatctcacgatggctcatttggccctgtctcagatggctgtaactgttcctgttggcagcgatttgtctctcagaagatctgcggttaaggcacctaactttaacttttgggataaatcatgggcaccagtatttactttgtacttgaaggcaaacaactcaagtttaagaagtcgtcatgtggtattcatgtcagtgcaacaagcaagtgtacccaaagttaatgtatcacctttagagttggaagatgctaaagaacctccattgaacttacacaagcctaaagaaccctatacagcaacgattgtttctgttgataggctagtgggaccaaaggctcctggggaaacttgtcatat

SEQ ID NO: 5363 - DNA, 467 bp, Glycine max
ggtttttctgattcttaccattgttactgtttgtgtgacaattgtggggacatacttttggttaaatgctgagaactaccactggcaatggacttctttcttttcagctgcctcaacagctgtttacgtgtatttgtactcagtatactactactatgtgaagacgaagatgtcaggcttcttccaaaccagcttctattttggatacactttgatgttttgtcttgggctgggaattctgtgtggagctgtgggttatcttggttcgaatttgtttgtgaggaggatctacagaaacatcaagtgtgactaaggcttttgtaggagtctgagaccagagcacttccatatgtttgttgctggagacaataaatttcttagaggaagcctctggtcatgtgtggggaccatacaatgtttgcaggtagtaagtatcacaaggttgaggatggatggggatgcatttt

SEQ ID NO: 5364 - DNA, 377 bp, Glycine max
tatagctatcttctttaataagataagatctcatccttcactaccacaaaagatgaccggggtcactgccctatttgtcaccttattactctgctacatgctcgtacatgccatgtccatactccttgaaccagcttttcaccaagaatccttatccaaaccgcaccaacagagcgttgaggcggttgatgagagctgcgaaggcgttggagacgatgaatgcttgatgaggagaacacttgccgctcacgttgactatatttatactcaaaagcataataatccttgaaatatagtactcgcagctagtactatagcatgcacaaatgcacttatggaaagatatatgaacgagaatctatgtttgattgatctta

SEQ ID NO: 5365 - DNA, 403 bp, Glycine max
cccacgcgtccggaaacattggatgacgccagaaaaggttaaaacgtcaatcagaacttttccttcttcagctgaaatagtacctgaaccgctgggtgtcgtgttagtcatctctgcatggaactatccaatcttgttgtcccttgatccagtagttggagctatagcagctggtaatgctgtggttctaaagccatcagaaattgctccggccacttcatcagtactagcaaagttgatagagaagtatatggataactcatttgtaagagttgttgagggggcagttgatgaaacaactgcactattgcagcaaaagtggaacaagattttctacacaggtaatggaagagtgggaaaaatagtgatgactgcggctgcaaaacaccttacaccagttgta

SEQ ID NO: 5366 - DNA, 450 bp, Glycine max
ggacagtcaagtatgttggagaacccatgacccacttggaatctattgcatcctctgcggtacgggctgcaattaaggtgaaagcatctattataatttgtttcacttcatcaggaagggctgcaagattgatcgcaaagtataggccaacaatgccagtactatctgttgtgatcccccgactcaagacaaatcagctaaagtggagctttagtggagcttttgaggcaagacaatcacttatcgtgagaggtctctttcctatgcttgcagatccacgacatcctgctgagtcaacaagtgcaacaaatgagtctattcttaaggttgcccttgatcatggaaaatcattgggagttattaagtcacatgaccgggtagttgtttgccagaaacttggtgatgcatctgtggttaagattattgagcttgaagattaaactattaaag

SEQ ID NO: 5367 - DNA, 402 bp, Glycine max
acatccccttattgttaaaccctttgtttgcacaagaaaagagttacttcatcatcatcatcaacatgagtcgcttcaacaatcagcaagaatcccctgtatcatatcctccagcactgtatgttagtgccccaccacctatgggttatccttccaaaggtgatcctacagctgtagggtacccccaacaaagagttccagaagaaaccacaagcaggggtgatggattttggaagggatgttgtgctgctttatgctgctgctgggtcctggattgttgcttctgattgaatcatagcacagatttgtgtttgtcaccatgttttctttttcacattgccagtttcctatttgtattctttgtagtttagaagaataaggatctttgtcctcttggacagc

SEQ ID NO: 5368 - DNA, 399 bp, Glycine max
acggaaagaatgaacaacaacgaaatcggtggaacgcgtcagtttaaggatatacttgatgttttgttggacatacgcgaagatgacagttctgaaatcaaattaaccatagagaacattaatgccttcatcatggatatatttgttgccgggactgacacgtcagctgcaaccatggaatgggctatggcagagttaatcaacaatccatgtgtgttggagaaggcaaggcaagagatagatgcagtggttggaaatagtagaataatagaagaatcagacattgtcaaccttccttacctacaagccattgttagagaaacacttaggattcacccaggtggtccattgattgttagagagtcatcaaaaagtgttgtggtttgtgggtatgaaatt

SEQ ID NO: 5369 - DNA, 422 bp, Glycine max
gtactcaagcaagctaaggcattattatggcttatcaagtgttgctaatttgtttggtctccaccatagtgtttgcatacatactatggagaaaacaaagcaagaaaaaccttccaccaagtccaaaggcccttcccataattggccacctccaccttgtgtccccaattccccaccaagatttttacaagctctcaacccgccacggacccatcatgcaacttttccttggctcagtcccttgtgtggtggcttccaccgcagaagccgccaaagagttccttaaaacccacgaaatcaacttctccaaccgccccggccaaaacgtcgccgttaagggcttagcctacgattcccaagacttccttttcgcgtttgcacccttcggaccctactggaagttcatgaagaaactctgcatg

SEQ ID NO: 5370 - DNA, 320 bp, Glycine max
  modified_base (169)..(169): a, c, g, t, unknown, or other
catcaacaaaaaaagcacctgataattgatagtattatatattatggcttatcaagtgttggtgatttgtgtggtctccagcatagtgtttgcatacatagtatggagaaaagaaaggaagaaaaagcttccaccgagtccaaagggccttcccatcattgggcacctncaccttgtgtccccaataccccaccaagatttttacaagctctcactccgccatggacccatcatgcaacttttcctcggctcagtcccttgtgtggtggcttccaccgcggaagccgccaaagagttcctcaaaacccacgaaatcaact

SEQ ID NO: 5371 - DNA, 415 bp, Glycine max
cgctgagtcagaagacttctgagaacgacaaccaggctgaggagatgaagaagctcgtgtcggatatcggggagctcatggggaagttcaacgtttcggacttcatttggtacctgaagcctttcgattcgcaggggttcaacagaaaactcaaggagactcgggacaggtttgacgttgtggtggacggaatcataaagcagcgtctagaggaaagaaggaaaaacacagaaacgggcacagcagaacagtttaaggacatgcttgatgctttattggacatgcacgaagatgataatgctgaaatcaaattagaccaaaagaacattaaggccttcatcatggacatatttgttgctgggactgacacgtcagctgtaagcatagaatgggctatggcagagttaatcaacaa

SEQ ID NO: 5372 - DNA, 427 bp, Glycine max
gacagaatcatcaagcagcgtgaagaggaaagaaggaacaacaaggaaatcgggggaacgcgtcagtttaaggatatacttgatgttttgttggacataggcgaagatgacagttctgaaatcaaattaaccaaagagaacattaaggccttcatcatggatatatttgttgccgggactgacacgtcagctgcaaccatggaatgggctatggcagagttaatcaacaatccatgtgtgttggagaaggcaaggcaagagatagatgcagtggttggaaatagtagaataatagaagaatcagacattgtcaaccttccttacctacaagccattgttagagaaacacttaggattcacccaggtggtccattgattgttagagagtcatcaaaaagtgttgtggtttgtgggtatgaaattccag

SEQ ID NO: 5373 - DNA, 447 bp, Glycine max
  modified_base (302)..(302): a, c, g, t, unknown, or other
  modified_base (330)..(330): a, c, g, t, unknown, or other
ccgacacaaacacactccaagcgcacgttagcagtctccgccgtcttcgccaccgtgccatcgccgtcgatggagtctctcttcggctcgatcaacgttcgcgacctcctctcggcgcaggacctctcggaccctaactcccctctctcagcgccggatctccgtctcctgatccagcgcctggagtcgcagtccttccagatccgttctcaggtgcagtcctaccttgtctcgcaccacgaagacttcgcgcgcctcttctctctttgtaacgacaccgtttcgcagacgcgcgaggtctncgatgatgtttccgccatcctcggcctnctctccgaccacccgatcgatgccgaggtgcgcgagatcgtgtcggagacgaagtcgaagaaggaggagctgaagatgaagaaagagctgctgggattggtcggaacccgtgtggcc

SEQ ID NO: 5374 - DNA, 422 bp, Glycine max
cccacgcgtccgcccacgcgtccgctcctcttgacctagtcaagtgtaatatgcagattgatcctgctaagtacaagagcatctcttctgggtttggagttttgcttaaggagcagggattcaggggctttttccgtggctgggtgcctaccttgcttggttacagtgcccagggtgcttgcaaatttggcttctatgagttctttaagaagtactattctgatattgctggcccagagtatgcaagcaagtacaagaccttgatctaccttgctggttcagcatctgctgaggttattgctgatattgctcttttcccaatttgaggctgtgaaggtccgtgtccaaactcagccaggttttgcaaggggtttgtctgatgggctcccaaaatttgtcagatccgaaggaaccttagggct

SEQ ID NO: 5375 - DNA, 415 bp, Glycine max
  modified_base (332)..(332): a, c, g, t, unknown, or other
  modified_base (357)..(357): a, c, g, t, unknown, or other
gttttgcttaaggagcagggattcaggggcttttttcgtggctgggtgcctaccttgggtggtgatagtgctcagggtgcttgcaaatttggattttacgagttctttaagaagtactattctgatattgctggcccagagtatgcaagcaagtacaagaccttgatctaccttgctggttcagcatctgctgaggttattgctgatattgctctttgcccatttgaggctgtgaaggtccgtgtccaaactcagcctggttttgcaaggggtttgtctgatgggctcccaaaatttgtcagatctgaaggaaccttatggctgtacaaggngttagtgcctctctgtggacgacanattccatacacaatgatgaagtttgcttcttttgagaccattgttgagctgatctata

SEQ ID NO: 5376 - DNA, 407 bp, Glycine max
agaccctatagcttctctctggctctcctttgacgcttatgacactgcgcctctactttcggtgcgagtcctaatggctctccccgactcttgctcgtgccacagctgcctgatcccctacttcatctactactcttactccaaaacgctccctatacaccacatgctcaactccgacttcggcgccgccctctcccagccgtcggaaaacctacacgccggatcgcgcggcctcatgattccctctgccaacgagccacgcaagatcgagatgtactccgctgacttctacgtcgactgcaccgacagtggaatcctgagctgaggcctcactcacatggccgacactcctgttgacctagtcaagtgtaatatgcagattgatcctgctaagtacaagagcatct

SEQ ID NO: 5377 - DNA, 301 bp, Glycine max
gaaagccagtgaatagggaccataaataaatagaggactgctgaatgaagttgcttgagtggagactcaagcttggttggataatattcttttaaagttcagacattgtttccatttttcttatatttaagtattttgaatttttgggaggatggttttgctctcatccttccacttgctgaaaactttgtaggtaggaatgatataattttgcatgttaggttctctacatgccaattgtcaaacgggaacacatttgttttcttgtctgtgcataagcaccgacacatatgcaatgcct

SEQ ID NO: 5378 - DNA, 457 bp, Glycine max
aaattccatacacaatgatgaagtttgcttcttttgagaccattgttgagctgatctataagcatgccatcccaacaccaaagaatgagtgcaccaaaagcctgcaacttggtgtcagttttgctggtggatatgttgctggtgtactttgtgcaattgtgtctcatcctgctgataatcttgtctcttttctgaacaatgcaaaaggagcaacagttggtgatgcggtgaagaagcttggtttgtggggtctctttacgcgtggtcttccccctccgaattgttatgattggaactcttactggagcccaatggggaatatatgatgcattcaaagtcttcgtcggattgccaaccactggtggtcctgctcctgcagctgctccagcttctggttctgagctagcaaaggcatagaatgtccaatgatgacaagcaacaatgttgtacgaaactt

SEQ ID NO: 5379 - DNA, 353 bp, Glycine max
gaggaaattcttcctcttggtcccctgaatgattatgagagggagagtttggggaaggccaagaaagagttagcagcaagcattgagaagggcatttctttcatcagaaaatgagtagttgatgatagtacgtcccgaaaataaatggttagattgtgctgtgtccattgtgagatcatatagatttataattagttatgtgatatgtatgaatatcgagttctatctagaaacatgtaaatgtaataattggaataccgaattccatttattattccgtctcgagttatccccgtgaagtttgagtttgagtctaaaaatcaattcagatttttgtattatctatagacgaa

SEQ ID NO: 5380 - DNA, 433 bp, Glycine max
ccatgacccttcaagctgattcagcaccagtaccaccaccgccaccggattgcgcagcgaccaacggcatctcccccaccgcagaggaagccccacaaccaccgtcaccaccaccgccgcatccaaccccacctccagaactgcgcgtcccaatatggtggccggaagacgggaacctcagcatggattgggtggacaacctgatgcggtgcttcgattggtcctctcggaacgtcccaccctcggagctcccttcggttctccccgtcggagtcttcgattcgctcatcctcgtcgcctccaagatgctccacaaggagcccaattgcgtcaccgtagaccccttccgccctagctccgatgatgataacactcccttcgctgcctcctctgttgtcgtcgtcggcgatgttcacggccaactgcatgatct

SEQ ID NO: 5381 - DNA, 445 bp, Glycine max
gcagttatacaccctcgagaatggtgaaattccaggcaaaattataaaaccattttttgctctccgtccaaacggcagatccgatccgccctacaatcccctctcagtttttctctcgaggatccggtgaaacgacatggcgatggtggaccagcctctgtatccgattgccgttttgatcgacgagttgaagaacgaggacattcagctgcgcctgaactcgatccggaggctctccacgatcgcgcgcgcgctcggcgaggaccgcacgcggaaggagctgattccgttcctcagcgagaacaacgacgatgacgacgaagtgcttctcgcaatggccgaggaattaggcgtcttcattccctacgtcggaggcgtcgaccacgccaacgtgcttcttccttccttggagactctcttgcaccgtgaggaaacctgcgtcaga

SEQ ID NO: 5382 - DNA, 420 bp, Glycine max
tcgggaatttcttagacaggcaaaggctgctcaacttttcatggcatcagagtcatttgttgtcgatgatatgcttgagtctgatctttccaaggcttttggcgggatggatagacttgacatgttttttccatttgatccatgtttgttgaagagaagtgaaagctacataaggccacattttgttcgctggtcaaaagtcagaactacatatgatgacgataacgacaatgatgaagtcagtgatagtggcagtgaattatcagatgatgattttattgacaggaacgccaaggatatgattgacgatgatatgatggtgagcgttgaaggcgctgattttaaccctgacttgaacaaaatgtctattactcccagaaaatcttgttaacattggtttgagacaccgttgaattaatg

SEQ ID NO: 5383 - DNA, 435 bp, Glycine max
  modified_base (364)..(364): a, c, g, t, unknown, or other
  modified_base (414)..(414): a, c, g, t, unknown, or other
cccacgcgtccggcaacgtgcgccctcctcgggtcaagctcagtcagcactgcaccggagggttttctttgcccctttcgatgagtaacgccacagactccgccggcgagatcccaccggagacgaggtccgccgagagtgacggtggtgggccccggcccacgattaagatcaatgttacgcacggttcctctcaccacgatttacacctcccggcccaatcaacttttggggatgttaagaaactccttgtcaataaaactggtttagagcctgcagagcaacgacttttcttcagagggatagaaaagggtgataaccagcgtttgcaggctgaaggtgtaaaggataagtcaaaactttntcttttggagggcattggtagcaaagagaggaaacttgaggaaaccaganagaaaatgagatgtctaaagc

SEQ ID NO: 5384 - DNA, 455 bp, Glycine max
  modified_base (439)..(439): a, c, g, t, unknown, or other
gtttgtggcatcatcacctgttatttcagcttgatggcttatatgccttggcatgcgagtgcgtttgtaaccatcaggaaaaacaaatgcagggagttgctttcgacgaacatgagaaacaaaaatatccatccctggcttccagtacatgtacatatttatttcttgtctgaattcatcaactgttccacgtatatcaaattgctgcccctcttgacctcttactccctctttcctttgcaagcccatgaaaaatgcagaatgtgcacatggcttggatgtgtctacatactcatgtgggtaaggatggcactgcagcatcccatttgtatctcgctctatcttcagggtaagcattctcaaccgagattctacccatcccctccatgctagtaaatcatccgtgtctgatgcaattatgtccacttgtaaatagttnttgtatgcctcaaaaa

SEQ ID NO: 5385 - DNA, 424 bp, Glycine max
gcaatatttgaaggttgtgttattctgaaagagaagatagggagggcggtttggtttggggcaaatggattccttagaagacagcggctgttgggattttctcgattactctttcatcgatcaagcgccccctgatttcctttggtccaataacaataatagtgtgagcaccgaaattgacattccaggtgatgctgttgcttgtcaagagaacaccaagaagaggggacgcaccgattcatgcttcaaggcgggatcaaaagcttgccgtgaaaaattgcgaagggagagactcaatgaaaggttctgtgacttgagctctgttttggagccagggagacctgtgagaacagataaaccagctatacttgatgatgctatcagagtcttgagccaacttaaaaccgaagcccatgagctcaaa

SEQ ID NO: 5386 - DNA, 467 bp, Glycine max
ctattcttgcactttctctcaaccgacttcctatttgcgggcaagaggagctcgggctgggattggcgagtttgttgagtatgacttagataatgaagatgaggattggctttttgagtttaatgaagagaggaacattttgacacctgaaatgtttgagagtcttcttttcaagttggaggtattggatcataaagctcgtgaaagagctggacttataacacctacacttggttcaccaattcctgtgcaactacggcttgatactgctattgaggccttacaagcacagggcttcaaatattcaattatccagtctgtatatgattattggaaagagaagcgagaacgatggcaaaagccggttttgcgacgtttgcagccgtcttcaccggttaacgacaccaacccgtataatgtctttcggccaagggagaatgcccacagacttcacacatgacggatgc

SEQ ID NO: 5387 - DNA, 352 bp, Glycine max
  modified_base (14)..(14): a, c, g, t, unknown, or other
  modified_base (25)..(25): a, c, g, t, unknown, or other
cccacgcgttcgancacgcgtatcnggtttcgtgggcggacgcctttgccgtggttgagaaagccgagagcttcggctgcacatcggagccagactacgaccagaaccaccaccgtcacccgacgaaccaccacatgaaccctccctccgggcttaccccgctcgagttcgcctgcctcatacccttcgtcgccgagcaccactcctacctcgtcggctccgggcaatgcttctcactcctcgtccaacgcgttcaagcaccggccgacgccgtctggtccgtcgtccgccgctttgacaagccccaaacctacaagcactttatcaagagctgcgccgtcaaaagaccctt

SEQ ID NO: 5388 - DNA, 275 bp, Glycine max
cgtgattcccggcaagtgaacaccgatccggtacactgtttgtcgaatgcttttttctcttccggaatggataccgttgaagcaactccatcagaggatgtgaagggatttatacgataaaatgcttgactctgtaaaagttaaacgatcaatgcctccaaatgcttggttatggtcaatgattgcaaattgcaaacagcagcacgatattagacttctgttcgacattttgcagaaccttcgcagatttaggttgtcgaatcttcgaattcatg

SEQ ID NO: 5389 - DNA, 440 bp, Glycine max
gccacctggaacccacaactgagtcgtgtttcggttctttcacactgaaccatgcaagttttctgtaacgctcgccgagcctcttggcttctcctctttcctcatctccgaacctcggaagctcctcactccaccgggctctctctcttctcagggctcgcgcaacgtgattcccggcaagtgaacaccgatccggtacactgtttgtcgaaggcttttttctcttccggaatggataccgatgaagcaactccatcacaggatgtgaaggaattatacgataaaatgcttgactcttgaaaagttaaacgatcaatgcctccaaatgcttggttatggtcaatgattgcaaattgcatacagcagcacgattttagacttctgttcgacattttgcagaaccttcgcagatttaagttgtcgaatcttcgaattcatga

SEQ ID NO: 5390 - DNA, 452 bp, Glycine max
ctacccaacaacgttaattgaccaaaacccatctttgttgttcttcaaaatttccatatgttgaaccattttatttgtggcagtttccatcaccaagaagaagatgtaccatgttcaagccccaagaagtactccaggagaaaagaaagtaggaatattaacaaaaacccatactccaatcgaggcttagacaagttttctgcacttttggctgatcttgacgagagaaggcaaaaggtttactcacagatgagtcctcaggacatatcttttgttcggtttgcgtattccagcaatgatgatttcgttcccatagtggtcaaagtgaaaaaaaataataaggatcagaagaagcacaagagtgaagaactcaaagcaagacacataacatctttctcggagcaattggagaaatcttctgaagaaacaccttgaaagaaaggaactaaaac

SEQ ID NO: 5391 - DNA, 437 bp, Glycine max
  modified_base (417)..(417): a, c, g, t, unknown, or other
cccacgcgtccgcccacgcgtccggtacttacaagaaaaatgggactgctgctgcaattcaatatggtaccggagcaatttctggtttctttagctacgacagtgtcagagttggtgatatatttgtaaagaaccaggaatttattgaagcaactagggagcctggtgttacatttttggcagccaagtttgatggtatactgggacttggatttcaagagatatcagttggaaatgctgttccagtgtggtacaacatggttgaccaaggtcttattaaggaaccagtattttcattttggttcaaccgcataccggaggaagaggaagggggtgagattgtttttggtggtggtggatcctgctcactataagggaaagcacacttatgtgcctgtgaccagaaaaggatattgncagtttgatatgggagatgt

SEQ ID NO: 5392 - DNA, 394 bp, Glycine max
ggacaaacaatattggatttgcttttgtctgaaacacagccgaagaagatctgttcccgagttggattgtgtgcttttgatgggactcgtggtgttgatgtggggatcaagagtgttgtggatgagaatgaaagaaaatcatcgggtggtcatcatggtgctgcttgtcctgcgtgtgagatggctgttgtttggatgcagaaccagctgatccgaaatcagacacaagatcagatactaagttacatcaaccagctttgcgataaaatgcctagcccgatgggagaatcagctgttgacttggggaatatctcttcattacctgtagtgtcctttactattggtggaagaacttttgagcttagcccaaaggagtacatacttaaggtgggtg

SEQ ID NO: 5393 - DNA, 424 bp, Glycine max
ctgttccgttctgatcagaaagggaataacggtaacggagatatggggcttctgtctggcagagtaactagagagagcctgaaaccaggggatcacatctactcttggaggactgcttacatatacgctcatcacggcatttatgtcggcgatgacaaagtcattcacttcactagacatgggcaagaagtaggaaccggtactgcactagatcttctcctcatcagttcaggaccagccaagcctcgagaaagttgcccaacttgtacagcaccccaagaggaacacggggttatctcctcatgcatgaactgcttcctagctggtggcgttctgtatcggttcgagtatgccgttaccccagcccttttccttgcgaaagcccgcggtggaacgtgtactcttgctgtctctgatgacgatg

SEQ ID NO: 5394 - DNA, 441 bp, Glycine max
acccacgcgtccgcccacgcgtccggttcatgaaactcttcttcgtcactgtggttgaaaatcgaatgctttcgctctctctctctctaggcaataaagtgaaacgcatcagagaaattcaattcaatggatgcaaatcgcgagcaaattgtggacgttgggtcggtggtggaagccgtttctgctgacgacggtgacgctcctctctacagcctcgaaagtctctgcatgcgttgcggtgaaaacgggacttcaagatttttattgactttaattcctaactttagaaagattttgttgtcagcttttgaatgtccacactgtggtgagaggaacaatgaattacagtttgctggtgaaattcaaccacgtggttggagttactccttggagatcccattatgcgaacaaaaaatgcttaatcgacaagtggtaaaagct

SEQ ID NO: 5395 - DNA, 387 bp, Glycine max
aggccctttttttttttttttcccttcatctttcccatcatcttctttccccttgactttctctgcatcaattttgtcatactttttcttctttgtccttcttctcttcatcatccttcccatcatcttctttcttcttgatcttctctgcatcagttttgccatcattgtctttcttctcctttttcttcttttccttcttctcttcatcatctcgggacaagtcccagcaccaccatctgcttctacaattccatcgccactgtctcctttggcaccttctataccactaccgtcccgttctcttcctgcgcctccaatgtctcttacgccaccagttccatctacagattccgctcgcagtcctccaccacctattgggtttgg

SEQ ID NO: 5396 - DNA, 462 bp, Glycine max
gtcttagacacatatatggctcgacttgtattgttcttctcagcattttctcttttcctgctaaattctactatcacggcacaagtcccagcaccaccatctccttctacaattccatccccaatgtctcctttggcaccttctacaccaccaccgtcccgttctcttcctgctcctccaacgtctcttacgccaccacttccatctacagattccgctcccactcctccaccacctattggatttggaggaggtggtggaagtggaattggaaaaggtggtggtggctcaggcgttggaataggctcaggaagtggtagtggtggcgttcaaggtggtggtggacaaggacgtggtgttgggataggaagtggcgttggcagtggtaccggctatggtggcggtggaactggcattggcagtggtgacagtagtagaggaggtggatgacgctttctggtg

SEQ ID NO: 5397 - DNA, 432 bp, Glycine max
cttgcaattccattaactcaccgtggcattgcaaatagtgtgagattcctcacagggcatgcaaggaaaggaggatccgatcctctctttgtatcggaaaatgctgctgatccggattctaccttggtggtttacatgggcttggcgaccttcccttcacttgcacagaagctaatgcatcatggtctgtcccctcagaccccaactgcagccattgagcgaggaaccacacttcatcagcgcacggtgtttgctgaactaaaggaccttcacgagaaaattacatctgctcagctggtgtcaccaacgctgattattataggaaaagttgttgaactatcaccattttggccaattcctacaaaagaagaatcatgtttaatgcaggcatgatggatgttgtcaagagatattattgtgaagcttggtggc

SEQ ID NO: 5398 - DNA, 433 bp, Glycine max
  modified_base (403)..(403): a, c, g, t, unknown, or other
cccacgcgtccgagagcttggaattccattaactcaccgtggcattgcaaatagtgtgagattcctcacagggcattcaaggaaaggaggatccgatcctctctttgtatcggaaaatgctgctgatccggattctaccttggtggtttacatgggcttggcgaccttcccttcacttgcacagaagctaatgcatcatggtctgtcccctcagaccccagctgcagccattgagcgaggaaccacacttcatcagcgcacggtgtttgctgaactaaaggaccttcacgagaaaattacatctgctcagctggtgtcaccaacgctgattattataggaaaagttgttgaactatcaccattttggccaattcctacaaaagaagaatcatgtttaatgcangcatgatggatgttgtcaagaaatattatt

SEQ ID NO: 5399 - DNA, 329 bp, Glycine max
cagaaggcctgcttctaatatggatccatatgtagtcacctccatgatcgcagagactaccatcctctggaaaccatgaaaaacagtcatatagtctctagatttggaccactaaaaattgtgttcaatagtcatttgatctaaaaatttatatttgcaaggtgatgtttagttaggaatttctaagtggtctttttgagcctccatgtgccatgtctatggttgagaataatttcgtcattaataacaagaatttcccataaaagaaaaaagtaaaaaaaagcaacagaaaaaaaaaaagtaaaacaaaaaatgaaagcgtcgggagc

SEQ ID NO: 5400 - DNA, 284 bp, Glycine max
aggaaggcctgcttctaatatggatccatatgtagtcacctccatgatcgcagagactaccatcctctggaaaccatgaaaaacagtcatatagtctctagatttggaccactaaaaattgtgttcaatactcatttgatctaaaaatttatatttgcaaggtgatgtttagttaggaatttctaagtggtctttttgagcctccatgtgccatgtctatggttgagaataatttcgtcattaataacaagaatttcccagacaagacacaagtcaagaaaggc

SEQ ID NO: 5401 - DNA, 396 bp, Glycine max
aagaaagctacctagagcttgcacctattggtatcttctacaatatcctctcatagtgctcttcttcttcttcattttcattatcaagatgtctttgctttcggatctcatcaacctcaatctctcagaatccacagaaaagatcgttgctgagtacatatgggttggtggatctggtatggacctcagaagcaaagccaggactcttcctgggccagtgagtgaccctgcaaagcttccaaagtggaactacgatggctctagcacagaccaagctccaagggatgacagtggaatcatcctatacccacaagctattttcaaggacccctttaagagaagcaacaatattcttgggatttgtgatgtttacacccccgctggtgagccactttc

SEQ ID NO: 5402 - DNA, 392 bp, Glycine max
aagaaagctacctagagcttgcacctattggtatcttctacaatatcctctcatagtgctcttcttcttcttcattttcattatcaagatgtctttgctttcggatctcatcaacctcaatctctcagaatccacagaaaagatcgttgctgagtacatatgggttggtggatctggtatggacctcagaagcaaagccaggactcttcctgggccagtgagtgaccctgcaaagcttccaaagtggaactacgatggctctagcacagaccaagctccaggggatgacagtgaagtcatcctatacccacaagctattttcaaggacccctttaggagaggcaacaatattcttgtgatttgtgatgtttacacccccgctggtgagccac

SEQ ID NO: 5403 - DNA, 399 bp, Glycine max
agcaagaagctaagattaacacaccaacccactagaaacatgaaaacccctaacaaagcctcattactcttattccctctcttgtccctttccttatttatcaaccattcccatgcagcaggaatcgctgtgtactggggccaaaacggtggagaaggcaccttagcagaagcttgcaacacaggaaactaccaatatgtgaacatagccttcttgtccacttttggaaatggccaaaccccacaactcaaccttgctggtcattgtgaccctaacaacaatggttgcacagggttgagcagtgatatcaatacttgccaagaccttggcatcaaagtgttgctctctcttggaggtggtgctggaagctactccctcagctcatctgatgatgccaca

SEQ ID NO: 5404 - DNA, 412 bp, Glycine max
ctagaaactaccaatatgtgaacatagccttcttgtccacttttggcaacggccaaactccacaactcaaccttgcaggtcattgtgaccccaacaacaatggctgcactgggttgagcagtgacatcaaaacttgccaagaccttggcatcaaagtgttgctctcccttggtggtggtgctggaagctactccctcagttcagctgatgatgccactcaacttgcaaactacctctggcagaatttccttggaggtcaaaccggatcacggccattaggtaatgttatattggatggcattgactttgacattgaatctggtgggagtgaccattatgatgacctagccagggcatttaatagcttcagctcacacaggaacgtgtacttgtctgcagcccacagtgcata

SEQ ID NO: 5405 - DNA, 370 bp, Glycine max
  modified_base (22)..(23): a, c, g, t, unknown, or other
  modified_base (48)..(48): a, c, g, t, unknown, or other
gacgacgcgtcaaatacacaannacccaacatgaaaacccttaacaanagcctcacttattttattccctctcttgttcccttccctattcaagcattcccatgctgcaagaatcgctatctaatggggccaaaacggtggaaaaagcaccttaacagaagcttgcaacactagaaactaacaatatgtgaacattaccttcttgtccacttttggcaactggcaaactccaaaactcaaactttcaagttaatgtgaacccaaaaacaatggctgcactgggtttagcaatgacattaaaactttccaagaacttggcatcaaagtgttgctctccccttgttgttgttctggaaactactccctcaat

SEQ ID NO: 5406 - DNA, 413 bp, Glycine max
caaaacccaacatgaaaacccttaacaaagcctcacttattttattccctctcttgttgctggccctattcaagcattcccatgctgcaggaatcgctatctactggggccaaaacggtggagaaggcaccttagcagaagcttgcaacactagaaactaccaatatgtgaacatagccttcttgtccacttttggcaacggccaaactccacaactcaaccttgcaggtcattgtgaccccaacaacaatggctgcactgggttgagcagtgacatcaaaacttgccaagaccttggcatcaaagtgttgctctcccttggtggtggtgctggaagctactccctcagttcagctgatgatgccactcaacttgcaaactacctctggcagaatttccttggaggtcaaacc

SEQ ID NO: 5407 - DNA, 415 bp, Glycine max
  modified_base (393)..(393): a, c, g, t, unknown, or other
  modified_base (409)..(409): a, c, g, t, unknown, or other
ctactccctcagttcagctgatgatgccactcaacttgcaaactacctctggcagaatttccttggaggtcaaaccggatcagggccattaggtaatgttatattggatggcattgactttgacattgaatctggtgggagtgaccattatgatgacctagccagggcattaaatagcttcagctcacaaaggaaggtgtacttgtctgcagccccacagtgcataatccctgatgctcacttggatagagccatccaaactgggctttttgactatgtgtgggttcaattctacaacaacccttcatgccaatactccagtggaaacaccaacaatttgatcaattcatggaaccaatggatcacagtgccagcttctcaaatcttcatggngcttcctgcatctgangcagct

SEQ ID NO: 5408 - DNA, 355 bp, Glycine max
gagaatacaccaaaacccaacatgaaaacccttaacaaagcctcacttattttattccgtctcttgttcctttccctattcaagcattcccatgctgcatgaatcgctatctactggggccaaaactgtggagaaggcaccttatcagaagcttgcaacactagaaactaccaatatgtgaacatagccttcttgtccacttttggcaacggccaaactccacaactcaaccttgcaggtcattgtgaccccaacaacaatggctgcactgggttgagcagtgacatcaaaacttgccaagaccttggcatcaaagtgttgctctcccttggtggtggtgctggaagctactccc

SEQ ID NO: 5409 - DNA, 423 bp, Glycine max
cccacgcgtccggagaatacaccaaaacccaacatgaaaacccttaacaaagcctcacttattttattccctctcttgttcctttccctattcaagcattcccatgctgcaggaatcgctatctactggggccaaaacggtggagaaggcaccttagcagaagcttgcaacactagaaactaccaatatgtgaacatagccttcttgtccacttttggcaacggccaaactccacaactcaaccttgcaggtcattgtgaccccaacaacaatggctgcactgggttgagcagtgacatcaaaacttgccaagaccttggcatcaaagtgttgctctcccttggtggtggtgctggaagctactccctcagttcagctgatgatgccactcaacttgcaaactacctctggcagaatttcctt

SEQ ID NO: 5410 - DNA, 409 bp, Glycine max
  modified_base (18)..(18): a, c, g, t, unknown, or other
cggtcgacgccacgcgtncgaatacaccaaaacccaacatgaaaacccttaacaaagcctcacttattttattccctcgcttgttcctttccctattcaagcattcccatgctgcaggaatcgctatctactggggccaaaacggtggagaaggcaccttagcagaagcttgcaacactagaaactaccaatatgtgaacatagccttcttgtccacttttggcaacggccaaactccacaactcaaccttgcaggtcattgtgaccccaacaacaatggctgcactgggttgagcagtgacatcaaaacttgccaagaccttggcatcaaagtgttgctctcccttggtggtggtgctggaagctactccctcagttcagctgatgatgccactcaacttgcaaacta

SEQ ID NO: 5411 - DNA, 214 bp, Glycine max
gctaagattaacacaccaacccactagaaacatgaaaacccctaacaaagcctcattactctgattccctctcttgtccctgtccttatttatcaaccattcccatgcagcaggaatcgctgtgtactggggccaacacggtggagaaggcaccttatcagaatcttgcatctcaggacactaccaatatgtgaacatagcctacttgtccact

SEQ ID NO: 5412 - DNA, 436 bp, Glycine max
  modified_base (380)..(380): a, c, g, t, unknown, or other
gccacgcgtacgggaatcgctatctactggggccaaaacggtggagaaggcaccttaggggaagcttgcaacactagaaactaccaatatgtgaacatagccttcttgtccacttttggcaacggccaaactccacaactcaaccttgcaggtcattgtgaccgcaacaacaatggctgcactgggttgagcagtgacatcaaaacttgccaagaccttggcatcaaagtgttgctctgccttggtggtggtgctggaagctactccctcagttcagctgatgatgccactcaacttgcaaactacctctggcagaatctacttggaggtcaaaccggatcacggccattaggtaatggtatattggatggcattgactntgacattgaatctggtgggagtgaccattatgatgacctaaccagggcattaaata

SEQ ID NO: 5413 - DNA, 348 bp, Glycine max
tcgaatacaccaaaacccaacatgaaaacccttaacaaagcctcacttattttattccctctgttgttgctttccctattcaagcattcccatgctgcaggaatcgctatctactggggccaaaacggtggagaaggcaccttagcagaagcttgcaacactagaaactaccaatatgtgaacatagccttcttgtccacttttggcaacggccaaactccacaactcaaccttgcaggtcattgtgaccccaacaacaatggctgcactgggttgagcagtgacatcaaaacttgccaagaccttggcatcaaagtgttgctctcccttggtggtggtgctggaagc

SEQ ID NO: 5414 - DNA, 427 bp, Glycine max
aaaaataaagttgaaaatcagggtgctggtaatattccaagatacttgaatcttgaaccggcacttgcaatggattggcttgagataccatgggatgatttgcgaatcaaagagcgtgttggtgccggatcatttgggactgtgtatcgtgctgaatggcatggatcagatgttgctgtcaaagttttaacagttcaggatttccaagatgatcaattgaaagagtttctaagagaggttgcaataatgaaacgagagaatacaccaaaacccaacatgaaaacccttaacaaagcctcacttattatattccctctcttgttcctttccctattcaagcattcccatgctgcaggaatcgctatcttaactggggccaaaacggtggagaaggcaccttagcagaagcttgcaacactagaaacta

SEQ ID NO: 5415 - DNA, 430 bp, Glycine max
caagaagctaagattaacacaccaacccactagaaacatgaaaacccctaacaaagccgcattactcttattccctctcttgtccctttccttatttatcaaccattcccatgcagcaggaatcgctgtgtactggggccaaaacggtggagaaggcaccttagcagaagcttgcaacacaggaaactaccaatatgtgaacatagccttcttgtccacttttggaaatggccaaaccccacaactcaaccttgctggtcattgtgaccctaacaacaatggttgcacagggttgagcagtgatatcaatacttgccaagaccttggcatcaaagtgttgctctctcttggaggtggtgctggaagctactccctcagctcagctgatgatgccacacaacttgcaaactacctctgggagaatttcctg

SEQ ID NO: 5416 - DNA, 408 bp, Glycine max
  modified_base (208)..(208): a, c, g, t, unknown, or other
  modified_base (260)..(260): a, c, g, t, unknown, or other
gggattcagggttattcccctaaaagttaaggttttggctggatcctgctaaggatccaggttttgtcgcaaggccttggccaagtaacatgatacgattttttaggacccaggatgaatcatggagccatgaggttgccatatcagtgaaaccattgaaagtgcaaaactggattctttctgaaatgcctgggcttattactgattntctgatttctcttgatgatcggtttctgtattttgtaaactggcttcatggngatataaggcagtataacatcgaggacgttaaaaatcctaaactgactggacaagtatgggttggtggacttatccagaaaggaagccctgagtagctataactgatgatggtgaaacatggcaagctgaagtccagagattcaggga

SEQ ID NO: 5417 - DNA, 419 bp, Glycine max
  modified_base (362)..(362): a, c, g, t, unknown, or other
cggacgcgtgggcggacgcgtgggtgtggatccaaactctccaacttattccaaagtcatccataggcttcctgttccttatttaggtgacgaattgcatcacacaggctggaattcatgcagctcttgccatggagacccctcagcagaccgacgatttctcatcgtacctgcactcgtatcaggtcgagtatatgtggttgatgtgaaaacaaatccaagggctccatctttgcacaaagttgtcgagcctgccgatatcatacagaagactggattagcttatccacacacatctcactgccttgcttctggtgatataatgatctcgtgtcttggagataaagatggaaatgctgcangaaatggatttcttcttcttgattctgagtttaatgtgaagggaagtgggagaaacc

SEQ ID NO: 5418 - DNA, 304 bp, Glycine max
ttcagggcttatacccttagagataaggtttttgcatgatcctgctaaagatacaggttgtgtcggcagtgcattgacaagtaacatgatacgattttttaagacccaagatgaatcatggagccatgaggttgccatatcagtgaaaccattgaaagtgcaaaactggattcttcctgaaatgcctgggcttataactgattttctgatttctcttgatgatcggtttctgtattttgtaaactggcttcatggggatttaaggcagtttaacatcgaggacgttaaaaatcctaaactgact

SEQ ID NO: 5419 - DNA, 398 bp, Glycine max
gcaaaacatctcagtttttgaattccaccttctccgaccaatggctgccaaacctcttactaccgaggcgattgcgcttacggaaaagaagatggacatgacactagatgacataatcaaaatgtctaaaaacccgaagaataagaagcaaagaagggttccgaacaaaagtcaaaaattttcaaacaattttactcaggataagtctgcaaaggtccagcgttatatggaatcgagatcttctcttagacagggggctcttgcaaaaagaaggtctaatttccagggaaaccaatttcctgctgcagttgaagttgcgcgaaaagctgttactgctcctctgcacaatagagtccctaatcgtaataaggtggctaactggaataaaacaagatttc

SEQ ID NO: 5420 - DNA, 363 bp, Glycine max
gctgttgaattcttcaatcatgtgaatctgctatatggtacccttacagagctcgggtctcgtgagaattgggggacaatgtctgcaagacccaagtatgaatatagatgggctgattgtgtacaaattgagaaacctattgaggaagctgctccaaaatatgtttaatatataatggactggattgaagcacagttttatgatgaatccatattcccacagaagcttggttcaccattttctcccaactttaaagaagcttttgaagacaatattcaagcgtgtgatccgtgtatatgctcacatataccattctcacttttataaaattgtgagccttaaagaagaagtccacttaatcac

SEQ ID NO: 5421 - DNA, 313 bp, Glycine max
gcagttgaaaagtctggaatagccaaagatgttacagaactgattggcaaaaccccaatagtatgtctgaataaaatcgcagacggttctgttgcccgggttgctgccaaactggaattgatggagccatgctctagtgtaaaagacaggattgcctatagtatgattgctgatgcagagaagaagggacttatcacacctggacagagtatcctcattgagccaacaagtggtaatactggtattggattagcattcctggcagcagccaagggctacaagcttataattacaatgcctgcttcaatgagtc

SEQ ID NO: 5422 - DNA, 402 bp, Glycine max
ctcgattttgtgatcctcctacttggttcctagaaagctttgtagtgagcatatataatggctgttgaaaggtccggaattgccaaagatgttacggaattgattggtaaaaccccattagtatatctaaataaacttgcggatggttgtgttgcccgggttgctgctaaactggagttgatggagccatgctctagtgtgaatgacaggattgggtatagtatgattgctgatgcataagagaaaggacttatcacacctggaaagagtgtcctcattgagccaacaagtggtaatactggcattggattagccctcatgggagcaacccggggttacaagctcataaatacaatgcctgcttctatgagtcttgagagaaaaatcattctattatccttt

SEQ ID NO: 5423 - DNA, 334 bp, Glycine max
acgcccacgcgtacggatttcttactgtattgttcaggtggacagaggtgttacattgagtggggctctacgtaaagcatgacaaatggcttgagaagaacggaataaagaattccaactttgctgtggttacatggtccaactgggattgtcgggtgatgcttgaatctgagtgccgattcaagaacatacggaagcctccttacttcaaccgctggatcaacttaaggattcctttccgtgaggtatttggtgctgtgaaatgcaatctaaaggaagctgtagacataatcgccttggactacgattgtccaacacattgtggtcttgatga

SEQ ID NO: 5424 - DNA, 443 bp, Glycine max
gcgggacgtagaggaatttgcctgcacaagatacaaggccgcgtatcccatttttggaaaggtgcgtgtgaatggacctgatacagcacctgtctacaaattccttaaagcaaataaatcaggatttctgggttctaggataaagtggaatttcaccaagtttttggttgacaaggaagggaatgtcctccggcgttatggttcaaccacctcaccgttttccattgaaaatgacatcaagagagcattgggggaggcttgaaaaactctacaatcacttcaaattggtgctcttgttgaagatgattgaaacataaggaatgtatatttgtagatgtttcttctagtgattatttcttaaaaatttcatgtctaggtttttttgtgtttgttgtattagaaatctgttttggaatcgttatttaaaacttaattaatgggca

SEQ ID NO: 5425 - DNA, 430 bp, Glycine max
acggacgcgtccgcccatgagtccggtcgtggtctttagcatttctcaccgactgcgaagggagagcgaataaaaaaaggcaaatcaaattcgagagaaggagagaatttagagagggaaaggatgaagatcacggcgttgttggtgcttaaatgcacgggcgagggatccgatccggtgattctggcaaacgcttccgatgtcagccacttcggctacttccagcgttccagcgttaaggaattcatcgttttcgttggtcgtacagtcgccagtcgcactcctcagggccaacgccaatccgtacaacacgaagagtacaaggtgcacacatacaacaggaatggtctttgcgcgttgggatttatggatgatcattacgcgattcggagtgcgttttctcttctcaatcaggtaatagatgaatatc

SEQ ID NO: 5426 - DNA, 357 bp, Glycine max
  modified_base (30)..(30): a, c, g, t, unknown, or other
acgcgtccgcccttgcgtccgcccattcgnccgcggacttgtgggtccgagagagcatcaaaagacatggacactttcttgcttcacaacttggactgaagccagggcagaaggttttggatgttggatgtggaattgggggaccattaagagaaatttctcgattcaggtaaacaagattgatttcatataggtttcctcttcctttgtctttcactgtttaactttactagctaataaaaatcaaggggtatctgtgcagcataacttcaattaccgggttgaataacaatgaggtccagattacaagatgaaaggaacctaatcgcattgcttgagtggacaagacttgcaatt

SEQ ID NO: 5427 - DNA, 438 bp, Glycine max
  modified_base (209)..(209): a, c, g, t, unknown, or other
  modified_base (274)..(274): a, c, g, t, unknown, or other
cccacgcgtccgcccacgcgtccggagaaaagcgtgaatcatgtcggacgaagagcatcacttcgattctcaggcggatgcgggagcgtccaagacgtatcctcagcaggctggtaccattcgcaagaatggctacatcgtcatcaaatccaggccttgcaaggttgtagaggtctctacgtcaaagacaggcaagcatggacatgcanagtgtcactctggtgcaattgatattggtaatgggaaaaaagctcgaagatattgttccatcatnccacaactgtgatgttccacatgtgaaatcgcactgactatcagcttattgatatctctgaagacggctttgtgagtctgttgactgataatggaaataccaaggatgatctgaagcttcctactgatgaggcattgcttgctcagattaaagatggattttct

SEQ ID NO: 5428 - DNA, 391 bp, Glycine max
ggcaaagagagagagagaaaagcgtgaatcatgtcggacgaagagcatcacttcgattctcaggcggatgcgggagcgtccaagacgtatcctcagcaggctggtaccattcgcaagaatggctacatcgtcatcaaatccaggccttgcaaggttgtagaggtctctacgtcaaagacaggcaagcatggacatgcaaagtgtcactttgttgcaattgatatttttaatgggaaaaagcttgaagatattgttccatcatcccacaactgtgatgttccacatgtgaatcgcactgactatcagcttattgatatctctgaagacggctttgtgagtctgttgactgataatggaaataccaaggatgatctgaagcttcctactgatg

SEQ ID NO: 5429 - DNA, 339 bp, Glycine max
  modified_base (36)..(36): a, c, g, t, unknown, or other
cttcttcttcttttgtttctttgtttttctgcgtangcaaagagagagagagaaaagcgtgaatcatgtcggacgaagagcatcacttcgattctcaggcggatgcgggagcgtccaagacgtatcctcagcaggctggtaccattcgcaagaatggctacatcgtcatcaaatccaggccttgcaaggttgtagaggtctctacgtcaaagacaggcaagcatggacatgcaaagtgtcactttgttgcaattgatatttttaatgggaaaaagcttgaagatattgttccatcatcccacaactgtgatgttccacatgtgaatcgcactgactatc

SEQ ID NO: 5430 - DNA, 389 bp, Glycine max
cgcatcagagataattcactggctgacaatgtcaccgttgatcccgttgtgcgaggatttattagagattgggatgcaattgaggatttgttgcaccatgttttgtataccggcctcggatgggaaattggcaatgaaggacaaatactatttacagatccactttgtaccccaaaggcgaacaaagaacagttggtgcaactaatgtttgaaacattcaatatatcaggattttatgcctcagaacaagcagtgttatcactctatgctgtgggacgtatctcaggctgcactgttgatattggacatggaaaaatagatattgcaccggtaattgaaggtgctgttcaccacatcgcctcgagaagatttgagtttggaggtactga

SEQ ID NO: 5431 - DNA, 448 bp, Glycine max
  modified_base (418)..(418): a, c, g, t, unknown, or other
gtatacctctaaagttgacatgtgggcaatgggtgctataatggctgagcttttctctcttcgtcctcttttcccaggtgccagtgaagcggatgagatttacaaaatatgtggtgtgataggcaatccaacctttgaatcatgggcggatggactcaaacttgcaagggatattaactaccagtttccacagcttgccggtgtgcatctttctgctttaattccgtctgctagtgatgatgcaatcagccttattacatcactttgctcctgggatccctgcaagaggccaacggcttcagaggcacttcaacatcctttcttccagagttgcttttacattcctccatcccttcgcaacagagcagtagcgagaactcctccacccgctggaacaagaggagcactggatcagcanggagtcaagagatattccggtgctttacct

SEQ ID NO: 5432 - DNA, 383 bp, Glycine max
aggtagttatccagtttctaaatcccaaagttcaagcatccattgctgctaatacttgggttgtcagtggttcaccgcaaacaaagaagttgcaggatatactccctagcattatccaccaattaggaccagataacttggaaaacctgaagaagctagccgagcaattccagaagcaggctcctgaaggggccgctggttcaaccacagctcaagaggagaatgatgacgacgtcccaaagcttgttccaggccaggattttgagacagctgctgaggagaccaacgctgcttcttagattgtgccatcgctaaatatctcctgtgttttaattttttcgtcttcctgattttccattttaagtatttcaggtgtttggttc

SEQ ID NO: 5433 - DNA, 436 bp, Glycine max
ggtggccccaaatcggtttatcaaaagatcaaaattctcctccttacaagaagcctcatgacctgaagaaggcgtggaaagtcggtgttctgactgcagttattaagcacatgtctcctgatattgcaaagattcgcaagcttgtgaggcagtccaaatgtcttcaagataagatgacagcaaaggaaagtgcaacctggcttgcaatcatcaatcaagaggaggccttagcaagagagctataccctgattatatccccccattagcctcagctggaggtagtggatctttggtgatcaatgatagcaatgagtatgatgttgaagggggtgaggatgagcctaactttgacgtggaagactgcaaacatgagaatcttcacacatccaatcttgggatggaaagagtgagggtaactctgccagttcaacagcc

SEQ ID NO: 5434 - DNA, 430 bp, Glycine max
gactggagcatctgataatcttcgtgaatggtggaaggacaaagtccggtttgatcgaaatggtcctgctgccataaccaagtatcaagctgataacgctattccggggaagaatgatggatgcaatccgatcggtccaacaccacacaccttgcaagagctgcaagacacaaccttgggttctctcttgtcagcactcatgcagcactgtgatcctcctcagaggcgttatccattggagaagggcgttcctacaccatggtggcctaatggtaatgaagagtggtggccccaaataggtttgcctaaagatcaaggtcctccaccttacaagaaacctcatgacctgaagaaggcatggaaagttggtgttctgactgcagttatcaagcacatgtctcctgatatcgcacaaattcgcaagctcgtg

SEQ ID NO: 5435 - DNA, 403 bp, Glycine max
ggggatttggatatgttttctgctccccttggagaaggggatattaccgcccggcaaactgagccagaggtgatagttgaggatgattatagtgatgaagaaatcgatgtagatgagctcgagaggaggatgtggagggacaaaatgcgtctcaagcgattgaaggagcaaagtaaacctaaggaaggatttgatgcagtcaagcagaggcagtcccaagaacaggcaagaagaaaaaagatgtcaagggctcaagatggaatcttgaagtacatgctgaagatgatggaggtttgtaaggcccaaggttttgtctatgggataattcctgagaagggaaagcctgtgactggggcatctgataatcttcgtgaatggtggaaagataaaagttcgtttgatc

SEQ ID NO: 5436 - DNA, 381 bp, Glycine max
cccacgcgtccgctttgatataaacttgagttgtttggatggcattcaaggtcctgtttatgggggtactggatgtgtctttaatagaacagctttgtatggctacgagccttctattaaacccaagcataaaaagcctgggttgctttcttgactctgtggtggtaaccgaaagaagagatcaaaatctagcaagaaaggctcagacaagaaaaaatctagcaagaatgttgacccaactgtgcccatctttagtcttgaggatatagaagagggggtggaaagtgctggatttgatgatgagaaatcactacttatgtcacaaatgagccttgagaaaaggtttggtcagtctgctgtctttgatgactttacactcat

SEQ ID NO: 5437 - DNA, 415 bp, Glycine max
  modified_base (390)..(390): a, c, g, t, unknown, or other
cccaaaccaatcagtgggtgccgcggggaagtggttttcccatgatgtcacgttttatgcatgcgccttctcccgttctgtcttcttcgcatcctcatttgggagttggccacaagagagagcgtgaagatgacactggcgctggtgcgagtggaggtgttgctattgcagcagcttcttcacaaacgcaaacacaagagattgaaagtgctggcggcgacaggaggaggagatacaggggagtgaggcagaggccgtgggggaaatgggcggcagagattcgcgatcctcacaaagcggcgagagtgtggcttgggacattcgacactgccgaggctgcggccagagcctacgatgaagccgcattgaggttcagaggtaacagagcanaacttaatttccccgaaaacgttgt

SEQ ID NO: 5438 - DNA, 428 bp, Glycine max
aaaagaatcactcccttatccatttccacaccacaccatggcctcaaccaacgctctctcttcagcctccattctacgctctcccaaccgccagtctctgacccgaagagcgaaccataatggaagagtaaattaccggaaaccgaataaccgtttctccgtgaaagcctccgccaaagagattgcctttgaccagcattcccgctctgctatgcaggccggcattgacaagctcgccgacgctgttgggctcactcttgggcccagagggaggaatgttgtgttggatgagtttggaagtcctaaagtggtcaacgatggtgtcaccattgctcgcgcaatcgagcttcccgatcctatggagaatgctggtgcagctcttatcagagaggttgctagcaagactaacgactctgcgggtgatggga

SEQ ID NO: 5439 - DNA, 235 bp, Glycine max
  modified_base (156)..(156): a, c, g, t, unknown, or other
gaaaccgattaacggtttttccgtgaaaggcctccgccaaagagattgcctttgaccagcattcccgctctgctatgcaggccggcattgacaagctcgccgacgctgttgggctcactcttgggcccagagggaggaatgttgtgttggatgagnttggaagtcctaaagtggtcaacgatggtgtcaccattgctcgcgcaatcgagctttccgatcctatggagaatgctgg

SEQ ID NO: 5440 - DNA, 382 bp, Glycine max
ccgtttctccgtcaaagcctccgccaaagagattgcctttgaccagcattcccgctctgctatgcaggccggcattgacaagctcgccgacgccgtcgggctcactcttgggcccagggggaggaatgttgtgttggatgagtttggaagtcctaaagtggttaacgatggtgtcaccattgctcgcgccatcgagcttccagatcctatggaaaatgccggtgcagctcttattagagaggttgctagtaagactaacgactctgccggtgatgggactaccacggcttcagctcctgctcgcgagataattaagctggggcttcttagtgcgacttctggggctaatcctgtgtctcttaagagaggggatgatataact

SEQ ID NO: 5441 - DNA, 412 bp, Glycine max
aagaatcactcccttatccatttccacaccacaccatggcctcaaccaacgctctctctgcagcctccattctacgctctcccaaccgccagtctctgacccgaagagcgaaccataatggaagagtaaattaccggaaaccgaataaccgtttctccgtgaaagccttcgccaaagagattgcctttgaccagcattcccgctctgctatgcaggccggcattgacaagctcgccgacgctgttgggctcactcttgggcccagagggaggaatgttgtgttggatgagtttggaagtcctaaagtggtcaacgatggtgtcaccattgctcgcgcaatcgagcttcccgatcctatggagaatgctggtgcagctcttatcaaagaagttgctagcaagactaacgactc

SEQ ID NO: 5442 - DNA, 431 bp, Glycine max
ctcgcctcaatttgttacaaaccctgagaagttgattgttgaatttgagaatgcgagagtgttgattacagatcagaagatttcagcaataaaagacattataccactgttggagaaaaccactcagttgagagctcctttgcttatcattgccgaggatgtcactggtgaggctttggccacccttgtcgtgaataagctgcgtggtatccttaacgttgctgccattaaagctcctggctttggtgagcggcgaaaggccctgcttcaagacattgctatattgactggtgctgagttccaagctagtgatctgggtctgcttgttgaaaacacctcagtggagcagcttggtttggctaggaaaattaccatctccaaggattctaccactgtcattgctgatgctgcgacaaaggatgagttgcaag

SEQ ID NO: 5443 - DNA, 427 bp, Glycine max
cgcattcctccttgcctctttgttctctctttttctctctccttctttctttgtttctgtgtgttcgagattgaagaagatgatgcaggctggacccggcggcatggcccaacaagcgaaccaacaatacgcacagcaacagcaacaaccctacatgatgatgccgccgcagcctcagccccctcagatgtgggccacatcggcccagcctccgtcccagtcggtggctcctccgcaacccaccagcgccgatgaggtccgtaccctctggatcggtgatttgcagtactggatggacgaaaattatctctacacctgtttggcacacaccggcgaggtggcttcagttaaagtcattcggaacaaacaaactagtcaatcggagggatatggggttattggagtttactagtcgtgctggtgctga

SEQ ID NO: 5444 - DNA, 456 bp, Glycine max
gttagggtttgagtctcaaccactctttctttaaagcacagtctcacatacctcattggctcggcttcgttctctctctgtctctctctctcttttctctgcgtgtgtgcgtggattggtgaatatgagattgaagaagatgatgcatgctggacccggcggcatggcccaacacgcgaaccagcactacgcacagcaacagcaacaacaacaacaacaagcctacatgatgatgccgtcgcagcctcagccccctcagatgtgggccccatcggcccagcctccgtcccaatcggtagctcctccgcaacccaccagcgccgatgaggtccgtaccctctggatcggcgatttgcagtactggatggacgaaaattatctctatacctgtttcgcacacaccgacgagctggcttcagtcaaagtcattaggaacaaacaaactagtcaatcgga

SEQ ID NO: 5445 - DNA, 421 bp, Glycine max
gtaaaactttatatgtaccagattttcagggggctggcttatatacacactgtgcccaaagtttgccacagagacttgaagcctcaaaatatattggtggatcctcttacacaccaagtgaagctatgtgattttggaagtgcaaaagttctagtaaaaggtgaagctaatatatcatacatatgttcacgattctatcgtgctccagaacttatatttggtgccacagagtatacaagttcaattgatatttggtcagctggctgtgtccttgctgagcttcttttgggccagccattattccctggcgaaaatgcagtagaccagttcgtacatataataaaggtgcttggaacaccaattcaaaaggaattcccctgaatgaatccaatttccatggccttaaggtttcaacagttaa

SEQ ID NO: 5446 - DNA, 463 bp, Glycine max
tcggaagcccaaacagggaagagcaaagtggtggagtttgggaacatgcaaacgagggcagtggctatcttggtccacacaatcatcttctttggtctcattaccatctttcttgttgctattggctaaatgcttggaaactggcgagccagtggccattaagaaggttttactggacaaaagatataagaatcgtgagctacagttaatgcacttgatggatcatccaaatgtgatctctctgaagcatcgtttcttttccactacaagtgcagatgaactttttcttaatttgattttcagggggctggcttatatccacactgttcctggaggttgccacaaagatttgaagcctcaaaatatactggttgaccctcttacacaccaggttaagatatgtgattttggaagtgcaaaagtgctggtcaaaggtgaagctaatatatcacatatatgttca

SEQ ID NO: 5447 - DNA, 445 bp, Glycine max
ctccttcatattttctctctcaccattctcttcttcttctccctttcttagaggctcgctcttttctctctgccctccgccatgactgaggataaggagatgtcttcctctgtcaccaatggcgatgattccctcactggtcacatcatatctacaactattggaggcaaaaatggggaacccaaacagactattagttacatggcagaacgggttgtaggaactggatcatttggaattgttttccaggcaaaatgcttggaaactggggaagcagtggctattaaaaaggttttacaggacagaagatacaagaatcgcgaactacagttaatgcgtgttttggatcatccaaatgtgatctctttgaagcattgtttcttttcaactacaagtacagatgagctttttcttaatttggtgatggaatatgttccagagtcta

SEQ ID NO: 5448 - DNA, 414 bp, Glycine max
ttttaagcttggaagcacatgcactgtttttgtggttctgctacaccgctaaacacagagaaaggcacagcacgatgacgatgaagataatggtagcgattaagcgagtggtggactacgccgtgaaaatcagggtgaagggcgacaagacaggggtggtgacccataacgtgaaaatgtcgatgaaccccttctgcgagatcgcgctggaagaggccctccgcatcagggagtctggcttggcctccgaggttgtcgccgtcaccatgggaccctctcaatctgtagacactctccgaaccggtcttgccatgggagccgacagaggcatccatgtcgagtcaacttgctttctctaccctgtctctgatgccaagaatttgagaaaactcgtcgagattgagaaacccggtc

SEQ ID NO: 5449 - DNA, 388 bp, Glycine max
cccacgcgtccggaaacaaagggacagcacatgataaagcattacaagaaatgtgccacttgtgatgacattgttcgcattgacaatgaagaaaaaaataaggaagtgcaacaggagtaagtatttccatcagaatgttaatggcagcaaacatcttggtctgtggaaactggcagaagcatggcagcaacaataaatagaaatgtcattggaggatcaacgacttttgtctagttacctccctttactgagagagtttattcctaatgcggctgcaaaggttgaaactgatttgattgctcagttggttggtcattccaaagaagaaaattatgtgtacgacctctacaccgtgaaagatgagatggatataaacattgatgattct

SEQ ID NO: 5450 - DNA, 315 bp, Glycine max
gtcatacgttattccccagacgtttcgatgtttgcatcaggggatgtcaatcgagaagctgtagtgtgggaccgtgcctcccgagaggtgaagctgaagaacatgttgtaccatactgctaggataaactgcctagcgtggtcccctgatagccataggattgctacaggatcactcgacacatgtgtcatcatatatgaagttgatcagcctgcatctagtagaattaccataaagggtgctcatttaggtggggtttatgggttagcatttactgatgaatatagtttggttagcttaagtgaagatgctttt

SEQ ID NO: 5451 - DNA, 447 bp, Glycine max
gacccaaacgtcagcgaggctgctaggattagggagaaatacccagaccgtatcccggtgattgtggagaaggcagaaagaagtgatatcccaagtattgacaagaagaagtaccttgtccctgctgatctgacagttggacagttcgtctatgttatccgcaaaaggattaaattaagcgcagaaaaggcaatctttatctttgtggacaacgtccttccaccgacaggagcaattatgtctgccatatatgatgagaagaaggatgaggatgggtttctttatgttacttacagtggagagaacacctttggggatctgacttcccactagcattattttaaagattggcactataatctgattgcattctcattggctagtctcataaatttgtatcaatactcgatatcaaagtacattgctctcaatataatgtacagtttg

SEQ ID NO: 5452 - DNA, 437 bp, Glycine max
ggaaatcctggaaaagctggtgctggggctattctacgagctaatgatggaagtttgatgtgtagattgcgtgaaggtgtgggtatagcaacaaacaatgctgctgaatatcgtgcaatgatattgggaatgaaatatgctcttaaaaagggatttactggtattcgtatccaaggtgattccaaacttgtttgcatgcagattgatggttcctggaaggtcaagaatgaaaacttgtctacattgtataatgtggcaaaagaactcaaggataaattttcctcattccagatcagtcatgttctaaggaacttcaactctgacgctgatgctcaagcaaatttggccataaatcttgcagatggccaagttcaagaagagtgtgtgtaattcactcatggcagctgatgattatgttttgggtttgttgcaaaaca

SEQ ID NO: 5453 - DNA, 397 bp, Glycine max
agcccatctgatcatataacacaacacactgcaggcttgttgtgttgtgctgtgttcattctgaaactttgatctatgtgagacaagttgtggctaccctgcaaagccagaaaaaatggtgccagagaacttgaagaaacaacttgctttggctgtgagaagcatccattggagctatgcaatcttctggactgattcaactacccaacccggggtgttgagctggggggaagggtattacaatggagacattaagactaggaaaacaagtcaaggagtagaactcaattctgaccaaatagggttgcagaggagtgaacagctgagagaactattcaaatccctcaaaactgtagaagtcacccctcaaaccaaaaggccttcagcagcagcactg

SEQ ID NO: 5454 - DNA, 439 bp, Glycine max
gctggcagcttgctcttataatccttgctttggtgcctcttctaggactaaatggagatctgcaattcaagttcttaaaaggattcagtgcagatacaaagaaattgtatgaggaagcaagccaagtggcaaatgatgctgtggggagtataagaacagttgcttctttctgtgctgaagagaaggtgatggaattataccaggaaaaatgtgaaggaccaattaagacaggcaaaaggcaagggataataagtggaattagttttggagtatcattctttgtgctgtattcagtttatgcaaccagtttttatgctggagctcgactggtcgaggatagaaaagcaacattcacagatgttttccgggtcttttttgctctcagcatggccgccataggaatctctcaatctggctctttggtccctgattcaactaa

SEQ ID NO: 5455 - DNA, 455 bp, Glycine max
  modified_base (14)..(15): a, c, g, t, unknown, or other
  modified_base (414)..(414): a, c, g, t, unknown, or other
acccacgcgtccgnnttgttttgtttacctttttgtctccattccttctttatttatttgttgttacttgttgctgttgtccctctccctgggagaaaaaagaagaagaagaagaaagagtttgaagtgaaatgtgagatatgggaagtggagtttcaacactctgttggtgctctgggaccaacaacgagcccgacgttattttcagcgccaccgacccactggacgaaaccctaggccactccttctgctacgtcagatcctccgcacgcttcctctctcccactcactccgatcgcttcctcagtccttctacttcccttcgtttctcttcgacccatacccgacccgaatttcacgaaaccgggttcaaagccatttccggagccttcgtcagcgccaacagcttccttncgacaacagtcattcacttggacgaagaggtgaacggagtt

SEQ ID NO: 5456 - DNA, 428 bp, Glycine max
acgcgtcagaaaccttggaggtacactgggaaggaggagaatatggagagagaagatatcaagatgttagtgaaaaagtggtgggatatatatgaggatgagactttggactacaacaatccactcaatgtggataagttcactgcggcacttatggaggttggtgaagtcaagttcgtccgtgccccatctgctgcttaagagtgtctttggaaatcaagtgtgatccaagtacatgtacaaagtcatacatcattacattaacttttatgtatttctaaaagtcatacatcattacattaagttttatgtatttctaaagtcttaagacttaagaggaccttttttatgtgtcccgcttttctttttttctttttccaattctgtcattgtaaagcagtgaataccgtatccttaattttataaat

SEQ ID NO: 5457 - DNA, 404 bp, Glycine max
ctcatggtcaattgggggacgcttttaaaagttatgtccgtactcgggattattgcactacatcaaagcacattgttcatatgtgtatgagtgcaattctggtcagcattgaaatgggtcaatttcctcatgttacaagctatgttagcaaggcagaacagtcaccagatgcccttgaagcagtaacagttgcaaagctacgatgtgctgcaggattggctaatctagaagccaaaaagtacaagcttgctgcccgaaagtttctagaaacaggacctgaactgggaagtcactataatgacgtaattgcacctcaagatgttgcaacatatggaggactttgtgcacttgcaacatttgatcgggcagagttaaaggcaagctctccattatattgttgtgat

SEQ ID NO: 5458 - DNA, 405 bp, Glycine max
cacgcgtcagaaaaagttgatgtagcatgccataaaagcaagagctcttgttccttgtcatccagaaagaaatactgtagatctgggttaacaatggctcctggaagcaatgttttcaaagaagttcttgaatctcacctgatgtcctcagattatgaaatgggaaaagctaaatctgaaggcaagagttacaatacatctacaaaatccaacaatgggtttaattgaaagaatggaaataattccaacaatgggcttttagaaataatttgaatgccccttttgcagaaatttgagttacccccaaattcacagttgccaaaatggcaatacattaggttcccaattgtaaagttgaagtccataatatctgcccgtcctgccatcatgatcttgggaaatata

SEQ ID NO: 5459 - DNA, 439 bp, Glycine max
ctcaattggtcagattttgccacagattacaaggatgccaaattttttgtcatcaaatcttacagtgaagataatgttcacaagagcattaaatatggtgtctgggctagtacaccaaatggaaacagaaagttagatgctgcatatctccaagcaatggagaagcaagatgcctgtcctatatttctttttttttcggtaaaatgctattgctcagttctgtggggtagctgaaatggttggacctgtcaattttgacaagagtgtggacttttggcagcaagacaagtggagtgggcagtttcccgtgaagtggcacataattaaagatgttccaaacagtcagtttcgtcacattgttcttgaaaataatgataacaagcctgtgaccaacagtcgagatactcaagaggtgaagttgacacaaggggttgaaatg

SEQ ID NO: 5460 - DNA, 380 bp, Glycine max
agagaagaagaatagagagtgatggagtgcgtattcggattggtgggtaatggattcgcgatcgtggtggctgattcatcggcggtgcacagcatcctcgtccacaagtccaacgaggacaagatcatgcttctcgattcccacaaactcatcgccgctagcggcgagcccggagacagggttcaattcactgagtacattcagaaaaacgtcgccttgtatcagttccgtaacggcatccctctcaccaccgccgccgccgccaatttcacacgtggcgaacttgccactgctctccgcaagaacccatactctgtgaacatccttcttgctggctatgacaaagagacaggccctgaactgtactaaattgactacat

SEQ ID NO: 5461 - DNA, 434 bp, Glycine max
  modified_base (275)..(275): a, c, g, t, unknown, or other
cataacccttacctttggtatagagaagattaatagagagtgatggagtgcgtattcggagtggtgggtaatggattcgcgatcgtggtggctgattcatcggcggtgcacagcatcctcgtccacaagtccaacgaggacaagatcatgcttctcgattcccacaaactcatcgccgctagcggcgagcccggagacagggttcaattcactgagtacattcagaaaaacgtcgccttgtatcagttccgtaacggcatccctctcaccaccgncgtcgccgccaatttcacacgtggcgaacttgccactgctctccgcaagaacccatactctgtgaacatccttcttgctggctatgacaaagagacaggccctgaactgtactatattgactacattgcaacgcttcacaagcttgaaaagggggcttt

SEQ ID NO: 5462 - DNA, 435 bp, Glycine max
gacgacgcgtcaggggttcaaaagccatcatggtttctgatgacctgttgcttacctcctctggcgcttgatggccgttttatacggaaatgcaagcaagggtgtttgcagtttgtgattttgaagcccattttagttgttgttacacttatactttatgcaaaggggaaatataaggatggaaatttcagtccaaagcaatcatacttgtatcttacaatcatctatacgttctcatacacaatggctctctatgctcttgttttgttttatgtggcatgcaaggatctgcttcaaccattcaatccagtcccaaagtttattataataaaatctgttgtattcctaacttattggcaaggtgtcttagttttccttgcggcaaagtcagaatttgttaaagatgcagatgaaactgctctacttcaagatttt

SEQ ID NO: 5463 - DNA, 411 bp, Glycine max
aggggcatgatatgattatcttggctggtgctgagtatgggagtggaagctctcgtgattgggctgcaaaggggccaatgctactgggcgtgaaagctgtcatagcaaaaagttttgaaaggattcaccgaagtaatttggtgggaatgggtatcattcctttgtgttttaagcccggggaggatgctgattctcttggattaactggtcaagaacgttacaccattgatctaccaagcaatgtgaatgaaatacgacccggtcaagatgtcacagtggtgacagacaccgggaaatcatttgtatctacattgagatttgatactgaggttgaactagcttacttcaaccatggaggtatcttacaatatgtcatcagaaacttgatcaatgctaaacattgaatcagat

SEQ ID NO: 5464 - DNA, 440 bp, Glycine max
cccacgcgtccgcccacgcgtccgaaatacttcccttacccccccctctctctctctcggaaaacaaacgaacaaacaaatatgcaagtggcggcagaactccaacgcgcccatcaccaccaccaaaggcacaaacaagacactcccatgtgccgccaaatccagctcactatctccgatcacaccaccgccggagacgacgacggcgaggatctcttcattccgcccctcaacttcgccatggttgataatggcattttccgctccggcttccccgaacccgccaacttctccttcctccaaaccctcggcctccgttccatcatatatctgtgtcctgagccgtatccggaggccaatatggagttcctcaagtcaaatgggatcaagctttttcagtttgggattgagggtcataaggagccttttgtgaacatccc

SEQ ID NO: 5465 - DNA, 397 bp, Glycine max
tgatttgacttccggttcacgcaatctttcctctacgctggataaggtccttctttgggagaagaaactctttaatgaagttaaggcggaggaaaagatgcgggtcatgcacgataggaagtgtcacaggttgaagcgtttggatgataggggttctgattttcataaagtcgattcgactcgaactttgattaggaatctgtccacaaaaattagaatggcaattcaggtggttgataagatttctatgactataaataagataagggatgaagaactgtggccacagctgaaggaattaatccaggggttgaccagaatgtggaaatccatgcttgaatgtcatcatgaacagggtgaagcaattaaagaagccagaatactgggttccattgga

SEQ ID NO: 5466 - DNA, 438 bp, Glycine max
gcccaacagtgtcgtttacgtgaattttggtagcatcgcggttatgacaagtgaggaatggattgagtttgcatggggtcttgctaatagcaacaaaacctttttatgggtcataagaccagatcttgtggcgggcgaaaacgctcttttaccttcagagtttgtgaaacaaactgaaaaaagaggactattgtctagttggtgctcccaggaacaagtgctgactcaccctgcaattgggggatttttgacacacagtggttggaattcaacgttggaaagtgtatgtggaggtgttccaatgatatgttggcctttctttgcagagcaacaaaccaattgttggttttgttgtaaggagtgggggattgggttggagattgaagatgttgagagggacaaaatagagagccttgtgagggagttgatggatggtga

SEQ ID NO: 5467 - DNA, 393 bp, Glycine max
agctctctctctctctcacccttcccagtgatcaattcaacgatgttagagcagttgctgatattcacgcgcggagggctcatcctctggacctgcaaccacctcagcaacgccctgaggggatctccgatcgacacgttgatccgatcctgcctcctggaggagcgatccggtgcggcctccttcaactacgacgcacctggagccgcatactctctcaaatggaccttccacaacgacctaggcctcgtctttgtcgccgtctatcaacgcgtcctccacctcttgtacgtcgacgatttgctcgccgccgtcaagcgcgagttctcgcgcctctaccacccccaaaaaaccgcctaccgagattttgacgagatctttcagcagctccag

SEQ ID NO: 5468 - DNA, 365 bp, Glycine max
caaacacgttcgtctcgtttcgttcccatggcggtctccgtttccgcgtcctccgcgattgcttgtttgaactccgaacgctccacgcgcttggcaccctcactcgtctccgcatcttcttccgccaagcaatcctcgctgcaattcacgtcgcccacgcgccttcttcggattagtactccacgcgctcccgctccttcgcgacctcgattccttcctctggttcaagcgaagaaacaaacctataactcgtttgaagatttgcttgccaattctgaaaagcctgtgttggttgacttctatgcaacctggtgtggtccttgtcaattcatggttcccatactcaatgaagttagcactcggct

SEQ ID NO: 5469 - DNA, 441 bp, Glycine max
gtgagatacggtattggagcataaacaatggcagttgtgctagagtgggcaagggtggcaccacacagatgagatttcagcctcgtctcgggaggtaccttgctgcagcggcagagaatattgtgtctatatttgatgtggagacacaagcgtgtcgatattcactaaagggacacacaaaaccagtggattgtgtttgttgggatccttctggggagttgctggcatctgtgagtgaggactctgtcagggtttggactcttggatcagggagtgaaggggaatgtgttcatgaacttagctgtaatggcaataagtttcatgcatctgttttccacccaacgtacccttcattgctggtcattggctgttaccagtcattggagctgtggaatatgagcgagaacaagacaatgactctgtctgctcatgatggtctca

SEQ ID NO: 5470 - DNA, 424 bp, Glycine max
cccacgcgtccgcttcggtgatcatcgtaactacctctacatttgtttgtttatcatgtctttgctcgtatcaatgtctaacaccagcaacaatgtcgctggggtcgacaacacgttcagaagaaaatttgatcgagaagagtatctagaacgagcacgggagcgcgagagacaggaggaggagggtcgagcgaaacctaaagccaaaggtcctcccgtgcagaggaagcccttgaaacatagagattatgaagtggaccttgaatcccgcttgggcaagactcaggttgttacgccggttgcaccactaagtcagcaggctggatactactgctcagtttgtgagtgtgtggtgaaggactctgcaaactacttggatcatattaatggaaagaaacatcaaagagccttgggcatgtccatg

SEQ ID NO: 5471 - DNA, 259 bp, Glycine max
ttggaactgcaaacccaccaaaccgtgttgatcagagcacctatcctgattactactttagaatcagcaactgtgaccacatgaccgagctcaaagagaaatttcagcgcatgtgtgacaagtctatgatcaagacgagatatatgtacctaaactaagagatcttgaaagagaatccagacatgtgtgcttacatggcaccttctttggatgctaggcaagacatggtggtggttgaggttccaaagctagggaaaga

SEQ ID NO: 5472 - DNA, 427 bp, Glycine max
ataatccagacatgtatgcttacatggctccttatttggatgctaggcaagacatggtggtggtagaggtaccaaagctagggaaagaggctgcagtggaggccataaaggagtgtagccagccaaagtcaaagattacccacttgatcttctgcaccactatcggtgaggacatgcctggtgctgattaccgactcaccaaacaattggaccttagcacttatgtgaagaggtacatgatgtaccaacaaggttgctttgcatgtggcacgggtcttcattaggccaaggatttggctgagaactacaagggtgcacgtatgcttgacgtctgctctgacattactgcggtcacatttcgtgcgccaagtgacactcaccttgatagtcttgtggaccatgcattgcatggagatggagctgctgc

SEQ ID NO: 5473 - DNA, 404 bp, Glycine max
gcaccactagcggtgtggacatgcctggtgctgattaccaactcaccaaacaattgggcctgcgcccttatgtgaagaggtacatgatgtaccaacaaggttgctttgcaggtggcacggttcttcgtttggccaaggatttggctgagaacaacaagggtgcacgtgtgcttgttgtctgctctgagatcactgcagtcacattccgtgggccaagtgacactcaccttgatagtcttgtgggccaagcattgtttggagatggagctgctgcagtcattgttggttctgacccaattccacaagttgagaagcctttgtatgagcttgtttggactgcacaaacaattgctccagacagtgaaggtgctattgatggacaccttcgtgaagttggactcaca

SEQ ID NO: 5474 - DNA, 425 bp, Glycine max
  modified_base (354)..(354): a, c, g, t, unknown, or other
cccacgcgtccgggatgttcccgggattgtctcaaagaacattgataaggcactttttgaggctttcaacccattgaacatctctgattacaactccatcttttggattgcacaccctggtgggcctgcgattttagaccaagttgagcaaaagttgggtctcaaacctgagaagatgaaggccactagagatgtgcttagtgaatatgggaacatgtcaagtgcttgtgttcttttcatcttggatgagatgaagaagaaatctgctgaaaatggacattaaaccacaagtgaaagacttgaatggggtgtggtggtcggttttggacctggacttaccattgaaactggtgntttgcataatgtggccatctgagatgcctcatatattatttcattattgtgtaccacttttcaaacttgct

SEQ ID NO: 5475 - DNA, 400 bp, Glycine max
cccacgcgtccgtctactactgctagctgtgacttgttttgagttcaatcaaatcgcattggtgtctgaaaggaggaaagatggttagcgtagctgagatcaggcaggcacaaagggcagaaggcccagcaaccatccttgccattggaactgcaaacccaccaaaccgtgttgatcagagcacctatcctgattactacttcagaatcaccaacagtgaccacatgaccgagctcaaagagaaatttcagcgcatgtgtgacaagtctatgatcaagacgagatatatgtacctaaacgaagagatcttgaaagagaatccaaacatgtgtgcttacatggcaccttctttggatgctaggcaagacatggtggtggtagaagtaccaaagctagggaa

SEQ ID NO: 5476 - DNA, 421 bp, Glycine max
  modified_base (404)..(404): a, c, g, t, unknown, or other
cacctatcctgattactacttcagaatcaccaacagtgaccacatgaccgagctcaaagagaagtttcagcgcatgtgtgacaagtctatgatcaagatctcttcgtttaggtacatatatctcgtcttgatcttgaaagagaatccaaacatgtgtgcttacatggcaccttctttggatgctaggcaagacatggtggtggtagaggtaccaaagctagggaaagaggctgcagtaaaggccataaaggagtggggccagccaaagtcaaagattacccacttgatcttctgcaccactagcggtgtggacatgcctggtgctgattaccaactcaccaaacaattgggccttcgcccttatgtgaaaaagtacatgatgtaccaacaaggttgctttgcangtggcacgggtcttcgt

SEQ ID NO: 5477 - DNA, 363 bp, Glycine max
cttctacaaaattttctgttcgatctcaaccaaggttgttccttccaccgccatgagtttcatcttcggaaagcgaaaaacacccgcagagcttctgcgggaaaataagaggatgctggacaaatcaatcagagaaattgagcgcgagcggcaaggcttgcaaacgcaagagaagaaattgattgcggagataaagaaaagtgccaaacagggccagatgggaactgttagagttatggcaaaagatcttgttagaacaaggcatcacgttgagaaattttataagctaaaatctcagctccaaggtgtatcactcagaattcagactttgaaatcaacacaagcaatgggtgaagctatgaa

SEQ ID NO: 5478 - DNA, 365 bp, Glycine max
tcgtcttctacaaaattttctgttcgatctcaaccaaggttgttccttccaccgccatgagtttcatcttcggaaagcgaaaaacacccgcagagcttctgcgggaaaataagaggatgctggacaaatcaatcagagaaattgagcgcgagcggcaaggcttgcaaacgcaagagaagaaattgattgcggagataaagaaaagtgccaaacagggccagatgggagctgttagagttatggcaaaagatcttgttagaacaaggcatcaggttgagaaattttataagctaaaatctcagctccaaggtgtatcactcagaattcagactttgaaatcaacacaagcaatgggtgaggctatg

SEQ ID NO: 5479 - DNA, 428 bp, Glycine max
ggaggctaatctattaggcgctgttctctcgtcttctacaaaattttctgttcgatctcaagcaaggttgttccttccaccgccatgagtttcatcttcggaaagcgaaaaacacccgcagagcttctgcgggaaaataagaggatgctggacaaatcaatcagagaaattgagcgcgagcggcaaggcttgcaaacgcaagagaagaaattgattgcggagattaagaaaagtgccaaacagggccagatgggagctgttagagttatggcaaaagatcttgttagaacaaggcatcaggttgagaaattttataagctaaaatctcagctccaaggtgtatcactcagaattcagactttgaaatcaacacaagcaatgggtgaggctatgaaaggcgtgacaaaggccatggggcaaatgaatag

SEQ ID NO: 5480 - DNA, 458 bp, Glycine max
caaaattttctgttcgatctcaaccaaggttgttccttccaccgccatgagtttcatcttcggagagcgaaaaacacccgcagagcttctgcgggaaaataagaggatgctggacaaatcaatcagagaaattgagcgcgagcggcaaggcttgcaaacgcaagagaagaaattgattgcggagataaagaaaagtgccaaacagggccagatgggagctgttagagttatggcaaaagatcttgttagaacaaggcatcaggttgagaaattttataagctaaaatctcagctccaaggtgtatcactcagaattcagactttgaaatcaacacaagcaatgggtgaagctatgaaaagcgtgacaaaagccatggggcaaatgaataggcagatgaacttgccatcattgcagaaaatcatgcaagaatttgagagacagaatgagaagatggaat

SEQ ID NO: 5481 - DNA, 445 bp, Glycine max
ttggcatcccagttgagtttcatggggtgccagtttttgctccagatgtgacaagggagatgcttgatatcaggccaggagaggccttggctgtgaacttccccttgcaactccatcacacagctgatgagagtgttcatgtgagcaacccaagggatggacttttgagattggtaaggtcactttctcccaaggtgaccacattggtggagcaggaatcaaacacaaacacaacccctttcttcaacaggttcattgaaaccttggattactacttggcaatctttgagtccattgatgtcaccctcccaagagacagcaaggagaggattaatgtggagcaacattgtctggccagggatattgtcaatatcattgcttgtgaaggcaaggaaagggttgagagacatgaactgttcggcaagtggaagtcaaggttaaagat

SEQ ID NO: 5482 - DNA, 377 bp, Glycine max
agaaagaagcaagcatgtgtggcggagcaatcatcgcagatttcatacctcggcagcgtccccgcaccctcacagcctccgaactctggcccaagcgcagcgaacctcaacctcaacctcctcctcctccagttaagaggcagaggaaaaacctctacagagggatcaggcagcggccctggggcaaatgggccgcggagattcgcgatccacgtaaaggagttcgtgtctggcttggcaccttcaacaccgccgaagaagccgccagagcctacgacaaagaagcccgaaaaatccgcggcaagaaagccaaagtcaatttccccaacgaggacgaccctctgccgcaatacggatcttgcaagagcctcaacttg

SEQ ID NO: 5483 - DNA, 443 bp, Glycine max
gaagcacgcatgtgtggcggagcaatcatcgcagatttcatacctcggcagcgggccggcaccctcacagcctccgaactctggcccaagcgcagcgaacctcaacctcaacctcctcctcctccagttaagaggcagaggaaaaacctctacagagggatcaggcagcggccctggggcaaatgggccgcggagattcgcgatccacgtaaaggagttcgtgtctggcttggcaccttcaacaccgccgaagaagccgccagagcctacgacaaagaagcccgaaaaatccgcggcaagaaagccaaagtcaatttccccaacgaggacgaccctctgccgcaatacggatcttgcaagagcctcaacttggagttcggttacgatctcaaccaaacagggcttttcccttcttctaacgctgatgagaattgcgggtccca

SEQ ID NO: 5484 - DNA, 416 bp, Glycine max
cccacgcgtccgaattacctttagataggcattttgatatcaacaatgtgaagaggattgtgttagaagcagatggttatcagccgtatcttatttcccctgaaaagggattgagatctctaatcaaaggggttctagagcttgcgaaagagccatcacgtctttgtgttgatgaggtacatcgtgtcctgatagatattgtttcgtctgctgccaatgctacacctggtttgggaagatacccacctttcaagagagaggttgtggctattgcaacttccgcactagaagggtttaagaatgaatcgaagaaaatggttgttgcactcgttgatatggagcgtgcttttgtcccacctcaacacttcattcgcttggtacaaagaaggatggaaagggcaacgtcagaggaggag

SEQ ID NO: 5485 - DNA, 388 bp, Glycine max
cggacgcgtgggcggacgcgtgggcggacactgtggttgaaattgttttccatttgtttgatgcaaatcgggatggaaacctaagttttgacgagtttgtcagagtgctacacaagcgcgaaagggacattgcacaacccgtggagacaggaatacggggttggttgtcttgcggttggaactgtacgcataacttctcatcttcatgattgttttcctgatatagaagatttaatgccacaaacatttcaagaacagacataacagaatggattggaacccttgatgggaagagaaaaacgaaagaaaaacaaaggaagagatgggtagtgatggttggtctgggactggagaagtttcccgtaaaatacatttgtgggtcaaacac

SEQ ID NO: 5486 - DNA, 423 bp, Glycine max
gaagaacaataatccagacacgaagatatatgacagggatgagcttcttgcacggatgcagtcagaggcagaaaagatagtagagatgaggagaaattctagctctgacacagggccgtctaacattcaatcttctggtgaaaatgttggtggtagttcctcatcaaataatgtaattgtgggatttgttgggtatcctaatgttggcaaaagttcaactattaatgctctggttggtaaaaaaaggacaggtgtcacctctactccagggaagacaaagcatttccaaacattaattatttctgaccaactgaccctttgtgactgtcctggattagttttcccatctttcttaagctcaaggtataagatgattgcttgtggagtgttgcctatcgataggatgactgaacataaggaggc

SEQ ID NO: 5487 - DNA, 351 bp, Glycine max
  modified_base (1)..(1): a, c, g, t, unknown, or other
ntcttcagcaaggcttgacatcacatagttgttatctgcgtcactatactctgggtacatgctcatagcatgctacgcctgctttgtcgcaaccggaaccataggattctatgcgtgctcttggttcacacggctgatctactcgtgagtcaagattgattagttatagcaaccactggtttggatcaatctactacacttctgaaaggatgaagaccggtttgtgtaacgattttgaaactcaagaactgtcatgttctgaatcagatgttacctaattctatacaattgtgaatcgcgacgacactgttaatgttatgtttcactatcttccactggcctgagttatcg

SEQ ID NO: 5488 - DNA, 414 bp, Glycine max
tgaatcgtgaaaatgttcagaaaccagtacgacacggacgtgaccacatggagccctgcggggaggctgttccaggtggagtacgctatggaggcggtgaagcagggctcggcggcgatagggctccgatcgaagacccacgtggtcctcgcatgcgtcaacaaggccaactccgaactctcctcgcaccagaagaagatcttcaaggtcgacaatcacatcggcgtcgccatcgctggcctcaccgccgatggccgcgtcctctcccgctacatgagatccgaatgcatcaactataattacacctacgagtcgccgctccccgtcggcagactagtcgttcagctcgccgataaggctcaggtttgcacacagcggtcttggaaacgtccttatggggttggactcctggta

SEQ ID NO: 5489 - DNA, 440 bp, Glycine max
tgccagcttagtctctgctctgctttatgagaaaaggtttggtccatacttttgtgagcctgtaattgctggattaggggatgaagacaaaccattcatctgcacaatggattgtcttggggcaaaggagcttgcaaaagattttgttgtttctgggactgcatctgagtctctgtatggtgcttgtgaggcgatgtttaagcctgacatggaaccagaggaattgtttgagaccatctcccaagcactgctatcatctgtagatcgtgattgtttgagtggctggggaggacatgtctatgttgtcacgccaaccgaagtgaatgaaaggattttgaagggaaagatggattaacttgtaagccacctgagttttctgttaagtttggaattgaatggcatgacatttacaatccctttgttaaagggacctttgttat

SEQ ID NO: 5490 - DNA, 399 bp, Glycine max
acgcgtcagcccaagcgtccggcagtgttgattccattcttccagcaactcactggaatcaatgtcatcatgttttacgcgccggtcctgttcagctccatcgggtttaacgatgatgctgctctaatgtcagctgtgatcaccggcgttgttaatgttgtcgcaacttgtgtctcaatttatggtgttgacaagtggggtaggagagcccttttccttgaaggtggagtccaaatgctcatttgccacgctgtagttgcagctgcaattggagcaaagtttggaactgatgggaacccacgtgatttgccaaagtggtatgcaattgttgtggttctcttcatttgcatttatgtatcagcatttgcctggtcatggggtcccctaagttggttggtg

SEQ ID NO: 5491 - DNA, 407 bp, Glycine max
gtccttccagacactcccaattccatgattgaaaggggtgatcgcgagaaggccaaggctcagcttcagagaattcgcggcatcgacaatgttgatgaagagttcaatgaccttgtggcagcaagtgaatcctctagccaagtggagcacccttggaggaacttgttgcaaagaaagtacagaccccacctcaccatggcagtgttgattccattcttccagcaactcactggaatcaatgtcatcatgttttacgcgccggtcctgttcagctccatcgggtttaaggatgatgctgctctaatgtcagctgtgatcaccggcgttgttaatgttgtcgcaacttgtgtctcaatttatggtgttgacaagtggggtaggagagcccttttctttgaaggtggagt

SEQ ID NO: 5492 - DNA, 426 bp, Glycine max
ctctctctcgtaattttctctcttattgaggctagaaaaagagagcaaaaaaactaaaggatgcctgcagtcggaggtataaacaccggagggggcaaggagtaccctggaagcctaactctatttgtgacggtaacatgtatagttgcagacatgggtggtttaatcttcggttacgatatcggaatttcatgtggagtgacgtccatggatccgtttctgctcaagtttttaccgtcagtgttccggaagaaaaactcctacaaaacggtgaaccagtactgccaatacgacagccagacactgacgatgttcacgtcgtccatgtacctctacgcttagctgtcatcgttggttgccgtcaccgtcacgcgtaaattctgacggaaactctccatgctttacggatgcttgcttatactcgtc

SEQ ID NO: 5493 - DNA, 392 bp, Glycine max
gtttatttcacttgtatattcatcacagatacaggcattagctgccttgtggcggcttttcaggggtcggaaatggaatcctctgaggcagcggttagatagctttgactatactgtgaagcaacacattgttggatcacttttatttacaccacttctacttcttttaccaactacttctgttttctatatattctttagtatcatggacacaaccattaaccttgtctgtctactgattgaagtcactatttcggtaattcatgttaccccttataccaagatatttctttggttggtaagaccaagaagattcccttctggaatatggcttgaaattattggttgtcagagtaataagactgcttcttcaagtgctgatattactgatg

SEQ ID NO: 5494 - DNA, 435 bp, Glycine max
cccacgcgtccgcccacgcgtccgcaattatcgtgtcttcttggctctctgtttaggatcgacatggatttcttttttccattggcaatacttgtgatgatattaggcacaccatactctagtgcttctggaaagagtgaaagtaatgtgaaaacagctgtttttctgtctcctaagtttgaacttggaccgggatcggttgcaaataaatatgattatgatattgattttccaagaggtcatatagcacttaagagtttcaatgcagaggtagttgatgaagcagggaaccctgtgcctcttcatgaaacttatcttcaccactgggttgttggaagatactatcaacctaaatatgtgacgacacacacaaactatgatggacataagatacttcacaactttgaccatatatttgtgaggaacaacggcata

SEQ ID NO: 5495 - DNA, 419 bp, Glycine max
  modified_base (324)..(324): a, c, g, t, unknown, or other
  modified_base (340)..(340): a, c, g, t, unknown, or other
agcccacgcgtccgcctaaacctaaacataaactgaatttcccaaatccccttcccaattttcaccaaaacctaatactcccaaaccaatcttcgatcatggccgccgaatcacaacctcaactaatcgaagagagaagagaggagcaagaacttaagtacctggaatttgtgcaattcgcgaccatccaggccctgatgcgctgcgccatcctctactcctacgccaaggagcgcgcgggtcctctgaagcccggcgtcaacaccgtcgaggaggccgtgaagaccgtcgtggctccggtctacgacaggttccacctcgtcnccggcgaggtcctcanatacgccgatcgcaaggtcgccgaattggaccgccacgttccctcaaacgtgaagaaagtctcctcccaagcccgctcc

SEQ ID NO: 5496 - DNA, 428 bp, Glycine max
aggccctgatgcgctgcgccatcctctactcctacgccaaggagcgcgcgggtcctctgaagcccggcgtcaacaccgtcgaggaggccgtgaagaccgtcgtggctccggtctacgacaggttccacctcgtccccggcgaggtcctcaaatacgccgatcgcaaggtcgccgaattggaccgccacgttccctccaacgtgaagaaggtctcctcccaggcccgctccgtcgtctccgaagtccgccgtgatggtgtctccgcctacgccaaaatcgtttactcgaagtatgagcccacggcggagcagtgtgccgtctccgcatggaggaagctcaaccagcttccgctcttccctcaggttgccaatgtcgtgttgcccaaagctgcctactgcactgagaagtacattgaggcggttgtttcc

SEQ ID NO: 5497 - DNA, 445 bp, Glycine max
cacttgacccctaaattcgtgcccattcccacaactgcacattcttctttctatatattccaaatcccttttccgatttccaccaaaatctaaaccgaaattcccaattacccttcccaattttcaccaaaacctaatactcccacaccaatcttcgatcatggacgccgattcacaacctcaacaactcgaagagagaacagaggagcaagaactgaagtacctggaattcgtgcaattcgcgaccatacaggctctgatgcgctgcgccatcctctactcatacgccaaggagcgcgcgggtcctctgaagcccggtgtcgacaccgtggaagaagccgtgaagaccgtcgtggctccggtctacgataggttccaccttgtccccggcgaggtcctcaaatacgcggatccggagggtggcgagttagacagccacgttccc

SEQ ID NO: 5498 - DNA, 342 bp, Glycine max
caccaatcttcgatcatggacgccgattcacaacctcaacaactcgaagagagaacagaggagcaagaactgaagtacctggaattcgtgcaattcgcgaccatacaggctctgatgcgctgcgccatcctctactcatacgccaaggagcgcgcgggtcctctgaagcccggtgtcgacaccgtggaggaggccgtgaagaccgtcgtggctccggtctacgttaggttccaccttgtccccggcgaggtcctcaaatacgcggatcggaaggttgccgagttagacagccacgttcccttcaacgtgaagaaagtctccttccaggcctgctccgtcgtc

SEQ ID NO: 5499 - DNA, 391 bp, Glycine max
gaaattcccaattacccttcccaattttcaccaaaacctaatactcccacaccaatcttcgatcatggacgccgattcacaacctcaacaactcgaagagagaacagaggagcaagaactgaagtacctggaattcgtgcaattcgcgaccatacaggctctgatgcgctgcgccatcctctactcatacgccaaggagcgcgcgggtcctctgaagcccggtgtcgacaccgtggaggaggccgtgaagaccgtcgtggctccggtctacgataggttccaccttgtccccggcgaggtcctcaaatacgcggatcggaaggttgccgagttagacagccacgttccctccaacgtgaagaaggtctcctcccaggcctgctccgtcgtc

SEQ ID NO: 5500 - DNA, 415 bp, Glycine max
atcacatgcctcttttctataaattcccaatccctttcccagtttccaccaaaacctaaaggtaaacctaaacctaaacctaaacataaactgaatttcccaaatccccttcccaattttcaccaaaacctaatactcccaaaccaatcttcgatcatggccgccgaatcacaacctcaactaatcgaagagagaagagaggagcaagaacttaagtacctggaatttgtgcaattcgcgaccatccaggccctgatgcgctgcgccatcctctactcctacgccaaggagcgcgcgggtcctctgaagcccggcgtcaacaccgtcgaggaagccgtgaaagaccgtcgtggctccggtctacgacaggtcccacctcgtccccggcgaggtcctcaaatacgccgatcgcaag

SEQ ID NO: 5501 - DNA, 334 bp, Glycine max
cacttgacccctaaattcgtgcccattcccacaactgcacattcttctttctatatattccagagagtggcttttccgatttccaccaaaatctaaaccgaaattcccaattacccttcccaattttcaccaaaacctaatactcccacaccaatcttcgatcatggacgccgattcacaacctcaacaactcgaagagagaacagaggagcaagaactgaagtacctggaattcgtgcaattcgcgaccatacaggctctgatgcgctgcgccatcctctactcatacgccaaggagcgcgcgggtcctctgaaaccccgtgtcgacaccgtg

SEQ ID NO: 5502 - DNA, 418 bp, Glycine max
  modified_base (414)..(414): a, c, g, t, unknown, or other
accaattaccctttgcaattttcaccaaaagctactacttctacaccaatcttggatcatggacgccgggtcacaacctcaacatcttgaagagagaacagaggcgcacgaactgatgtacctgcaattcgtgcaattcgcgaccatacaggctctgatgcgctgcgccatcctctactcatacgccaaggagcgcgcgggtcctctgaagcccggtgtcgacaccgtggaggatgccgtgaagaccgtcgtggctccggtctacgataggttccaccttgtccccggcgaggtactcaaatacgcggatcggaaggatgccgagttagacagccacgttccctccaacgtgaagaaggtctcctcccaggcctgctccgtcgtctctgaagtccgccgcgatggcgtctccgnctac

SEQ ID NO: 5503 - DNA, 372 bp, Glycine max
cacttgacccctaaattcgtgcccattcccacaactgcacattcttctttctatatattccggatgccttttccgatttccaccaaaatctaaaccgaaattcccaattacccttcccaattttcaccaaaacctaatactcccacaccaatcttcgatcatggacgccgattcacaacctcaacaactcgaagagagaacagaggagcaagaactgaagtacctggaattcgtgcaattcgcgaccatacaggctctgatgcgctgcgccatcctctactcatacgccaaggagcgcgcgggtcctctgaagcccggtgtcgacaccgtggaggaggccgtgaagaccgtcgtggctccggtctacgatag

SEQ ID NO: 5504 - DNA, 374 bp, Glycine max
tcgcacttgacccctaaattcgtgcccattctcacaactgcacattcttctttctatatatggcaaatgccttttccgatttccaccaaaatctaaaccgaaattcccaattaccctttccaattttcaccaaaacctaatactcccacaccaatcttcgatcatggacgccgattcacaacctcaacaactcgaagagagaacagaagagcaagaactgaagtacctggaattcgtgcaattcgcgaccatacaggctctgatgcgctgcgccatcctctactcatacgccaaggagcgcgcgggtcctctgaagcccggtgtcgacaccgtggaagaggccgtgaagaccgtcgtggctccggtctacgata

SEQ ID NO: 5505 - DNA, 441 bp, Glycine max
gtggctggcagatgaatcagaacattcctcttgttcctcccaacttttcttgcgttttcagttccaattccaattacaattccaatgtccttcaaaacgccttcaataagaatgttgttcagccttcagcctcatatcctcaatgcttggctattgagtttgatcaacagagggagattgatcaccatatcagatcacataacgaagaattgaggattttgttgcaagagcaaaggaaacagcatgtggcagagttattgaagaacgtggaatcgaatgctcttcatttgttgagacagaaagatgaagagatagcgcaagcgacaaagaagagcaccgatttgaaagaatttatgacaaggttggaggtggagaaccaatcatggcgtaaggtagccgaggaaaacgaggctatggtattgtcccttcacaacaccttag

SEQ ID NO: 5506 - DNA, 456 bp, Glycine max
cttgacttgcagctttactcctggttcttgttctttaactgcatataagctcactccatctggttacgaatgggggcgtgtaaataaggatacgggaagcaatccacatggttaccttcccacccattatgagaaggttcagatgctccttagtgatcgcttccttggtttctacatggttcctgataatggtccatggaattacaacttcatgggggtgagacacgcatcagggatgaaatatggagtgaagctcgggactcctagggaatattaccacgaggaccatagaccaacccatttcttagagttcagcaatatggaggaagtggagacagctgctgagggagatcgagaggatacattctcttgagagataaaaatatttttgtttgagatatataagtggcaagtcctttaattttttaaacttgtcataatatgttgtatcatcta

SEQ ID NO: 5507 - DNA, 420 bp, Glycine max
gaatcccggtcgacgacgcgtccgcccacgcgtccgctctccgcagcagccacacttcttcgccgtttcagctgaagagccgtgggcaggtaagcagggggtgagcataataatgttatccccaatgggcacttccggaaacactggcaaaactatgtgaagacttggtttaatcaaccagcccgaaagaccagaagacggttggctcggcagaagaaggctgtcaagattttccccaggcctactgctggatctctcaggcctattgttcatggccagactctgaaatacaacatgaaagtcagagccgggagaggattttcactggaagaattgaaggctgcatgaattcccaagaaacttgctccaactattgggatttctgttgatcaccgcaaaaagaatcgttctttggagagt

SEQ ID NO: 5508 - DNA, 450 bp, Glycine max
gggaaatatcaggaggtgcgagtaccggagccaaacgcgggtgtgtgtgtgtgtgagggagagagagatgcagttccattcagaaactccaaactaaacatccctggcgacaaccttaggaatctcgatcgctgaaaaaacctatgcagccccgaacacactctctgcattccaacttgtttaagtcatgcctttcgattcacccttctctcaataaatttttaatcagattcttggccaccgtcacactcataataaagttttgtttttccaaataaagggaatggcgactcctgttgagcctgcaaatgggatcagaactgaagggaagcattattattccatgtggcaaaccctgtttgagatcgactcaaaatacgttcccatcaagccgattggtcgcggagcatatggaattgtgtgctcttctgtgaatagagagataaatga

SEQ ID NO: 5509 - DNA, 251 bp, Glycine max
  modified_base (243)..(243): a, c, g, t, unknown, or other
gcgtcaactcttaactttctcttgttaactaattaaaatgactctcaaaaaaggcctgttccttgttaacgctctaagctgcacctctggcgcaaatgccgcaacgtttgacatcacaaaccgatgctcataccctgtttgggccgcagctgtgcctggcggtggcatgaggctgaactcgggccagtcatgggctttagacgtgcctgcaggaacgacaggggcccgcgtttgggcccgaancggctgca

SEQ ID NO: 5510 - DNA, 386 bp, Glycine max
  modified_base (5)..(5): a, c, g, t, unknown, or other
  modified_base (293)..(293): a, c, g, t, unknown, or other
gcgtncgatctttctcttgttaactaattaaaatgactctcacaaaggccttgttctttgtgaccgctctatgctgcacctctgccgcatatgctgcaaggtttgacatcacaaaccgatgctcataccctgtttgggccgcggctgtgcctggcggtggcaggaagctgaactcgggccagtcatgggctttagacgtgcctgcaggaacgaaaggggcccgcgtttgggcccgaaccggctgcaacttcgacggctcgggccgcggtggatgccagaccggtgactgcggnggtgtcctcgactgcaaagcttacggcacgccttccaacaccctagcggaatacgcgctgaaccaattcagcaatttggacttcttcgacatc

SEQ ID NO: 5511 - DNA, 381 bp, Glycine max
cgacccacgagtacggtgctgctggtgcttcatcccttgtgtttgtttactctcttgactatgcccgataccgtcttgccaatgatgctaacgctgcaatgaagggaggagatagacagttcaatggccttgtcgatgtctatctgaagactttggcatctgatggtgttgctgggctctaccgtggtttcaacatctcatgtgttggaatcagtgtgtatcgtggtctgtactttggcatgtatgattccgtgaaatcagttgtcctcaccggatcattgcaggatatctttgttgctaccgttgcgctctgatggcttatcaccaatggtgcatgtcttgcatcaaacgcaattgacactgttacaataagaatgagta

SEQ ID NO: 5512 - DNA, 433 bp, Glycine max
gtctctcccatcctttcgcattctcaatacccttttgatttgtgaaaggaaagcaaacatgggggagcaggtccaacaccctacaatcatggacaaggttgctggtcagctccatctccgttctggtctttcatctggtattagaagttatgatggagcctaccgccacccagctatgtaccaaagaccctcttttgggaattactcgaatgctgcattgcagtttcctgtgatgcccacatgcaaagctaccatggatttgtctgctactgcaacatctgcctcacccgtctttgttgctgctccagcagagaaaggccattttcttttagactttctcatgggaggtgtttcagcagctgtctccaaaactgctgctgcttccattgaacgtgttaagcttttgatccagaaccaggatgagatgatccaa

SEQ ID NO: 5513 - DNA, 439 bp, Glycine max
gtctctcctatcctttcgcattctcaataccctatggatttgtgaaaggaaagcaaacgtggttgatcaggtccaacaccctacaatcatggacaaggttgctggttagctccatctacgttctggtctttcatctggtattagaagttatgatggagcctaccgtcacccagctatgtaccaaagaccctcttttgggaattactcgaatgctgcattgcagtttcctgtgatgcccacatgcaaagctaccatggatttgtctgctactgcaacatctgtctgacccgtctttgttgctgctccagcagagaaaggccattttcttttagactttctcatgggaggtgtctcaccagctagctgcaaaactgctgctgctcccattgaacgtgttaagcttttgatccataaccaggatgagatgatcaagactggt

SEQ ID NO: 5514 - DNA, 413 bp, Glycine max
cccacgcgtccgccggtttcccagatctgctccttcctcaccccacagaagtcagttgaagagcatgggtcgtggagttagcagtggtggtggtcaaagttccttgggttatctttttggcagtggagaggcccctgccgcaaaaccggcaacaaacaatgccccagcccaacctgaagtgcaggctgtaaataatgcgcctccttcaaaagcatctcctcctactaaaacaatagaccctaacaaggctgctggtataaacagtcattctactgatggccagaacaccggcaacttcatcacggaccgaccctcaaccaaggtccatgctgcccctggtggtggttcttctctgagttatctctttggtggacctggagaggggaaatgataccttgcttgcaaagcttttg

SEQ ID NO: 5515 - DNA, 443 bp, Glycine max
  modified_base (428)..(428): a, c, g, t, unknown, or other
ccgggttggaccaagccttccggtaccagcatttaaaactggcctttgcttttggttactcatttttaacctaacttggaatccttctcaggctcagatcagaaccttagccttggcaacgttccaaaggatcaaggtcgccaaccccatcgtccatatggacggagatgaaatgactagggttatctggaagtcaatcaaggacaagctcattttgcccttcttggagttcgacctcaagtattatgacttacgcctttcttaccgtgatgagaccgatgagtaagttacaattgaaagtgccgaagcaactctcaagtataatgtggcaattaagtgcgcaactattactccagatgaagctcgtgtgaaggagtttggtctgaagtcaatgtggaagagtccaaatgggacaattaggaacattntgaatggaactgtct

SEQ ID NO: 5516 - DNA, 391 bp, Glycine max
  modified_base (274)..(274): a, c, g, t, unknown, or other
tacttatactagttttctacgattattcatagtgaggcaatagtagcagccattcacgctggtctttgcttctcgttactcatttctcacctaactttctattcttctcagtctcagatcagaaccttatccatggcagcgttccagaagatcaaggtcgccaaccccatcgtcgagatggacggagatgaaatgactagggttatctggaagtcaatcaaggacaagctcattttgcccttcttggagttggacatcaagtattatgacttangccttccttaccgtgatgagaccgatgataaagttacaattgaaagtgcggaagcaactctcaagtataatgtggcaattaagtgcgcaactattactccagatgaagctcgtgtga

SEQ ID NO: 5517 - DNA, 444 bp, Glycine max
cccactcgtccgcccacgcgtccgccttgctccactcctcatattatctttttgtgaggaaacacataatcatggaggggtctcacatggggttgttgctcttcttttgttcttccatgctttttgctgccttcgctgctgcctcctccagaaacttgcccataataccctttgatgaaggctacgcgcccttgtttggggacagcaacttggtcatccatagggatggcaaatcggttcatctttcactcgatgagagaacaggttcaggatttgtgtcgcatgatctttaccttcacggatatttcagcgcttctattaagttgccttctgactacactgcacgagtcgtggttgccttctatatgtcaaatggtgacatgttccacaataaccatgatgaaatcgactttgagtttttggggaacattagaggcaaagact

SEQ ID NO: 5518 - DNA, 293 bp, Glycine max
gacgtacgcgtcaggtgaggccagaggagcaggtatcaaaaccaggggagtttagtcaccaagagaatgagtcaaagggcagcatatatagtgagaattatcttgagagggatgaggtcaaaatggtgatggctaaacttggattttttttcagctcagaaagtgaggaacttcaggagaagtatggttccaaggagctttctgaactgtttgaggagcaggagccaagtttggaggaggtgaagcaggcttttgatgtttctgatgagaaccgcgatggctttattgattct

SEQ ID NO: 5519 - DNA, 437 bp, Glycine max
  modified_base (344)..(344): a, c, g, t, unknown, or other
cccacgcgtccggttccttggtacggaaaccatatcacttggacgagtcggtgatgattgttggtgcacggacccagctggagatccaaacggtacctattggctgcaagggtgtcacatggtgcactgtgcttacaacagcttgtggatgggaaatttcatacacccagattgggacatgttccaatctgatcatgcttgtgccgaattccacgctgcttctagagccatttctggtggaccaatttatgtaagcgactctgttggaaaacacaacttcaagttgcttaagaagcttgttctacctgatggctccattttgcggtgtcaacattatgcacttnccacccgagactgcttatttgtagatcctttacatgatgggaaaacaatgctcaaaatttggaacctcaataaatgttccggggttttgggtc

SEQ ID NO: 5520 - DNA, 391 bp, Glycine max
  modified_base (42)..(42): a, c, g, t, unknown, or other
  modified_base (52)..(52): a, c, g, t, unknown, or other
accgacgcgtcaacccacgcatccgcggacgcgtgggaaaanaatgtttgcntgatgccattgcccgtatggaaagggcagctgaacaaaggaaaagcaattgcagcagctgttgaaggagttgcaatacactggggaacatcagactccaatacatcagtcattgagactctgcgggagcaaatattcaagccatcattgtccacaatcattcccgagaattcaaaacttgtaacagtatcaccaacagattcagttctgacagcaacaaagatgatggttgaatttcgtgcaagttgtgcagttgtgacactttaatgacaaacctcgtggcatctttacttcacatgatattttgttccgggtaagtgcccacatctttctccagaat

SEQ ID NO: 5521 - DNA, 270 bp, Glycine max
cggaattccgggtcggaccaagccttccggtgcctataaaaaagggagtagatatggggttggacccttgcaatggttctgtactcaggtatgcgcgcacgaaaggcgacagaggaaaactcaaacaagttttgtgcaatttactgagcaatgctgttaaatttaccgaggaggggcacatagctgatcgagcatgggctcagaagccaagcttgcagagctcaatgattgctactcaccaatactggtccagtagacttttgacgcgct

SEQ ID NO: 5522 - DNA, 387 bp, Glycine max
gtgacacttcttctgtgtcagagtttgagaagtgaaccccatcaacatagtcccagagtaatgagtgaagaatggaaacttgggtcttgatctcaaactctcagttcctgtgtctgatcaatctaattatgccaagttcttgactgaaagtggtacttttaaggatggggatctgcttgtcaacagggatggagttcgaattgtctctcagaatgatgtcgaagctacacctccaatcaagcctacagacaaccagttagctttagcagacatagatgtaatcaaagttgttggaaagggaaatggaagggtagtccaattggtacaacacatatggactaatcagtcttgtgcgttgaaggtaattcagatgaatattgatgagtc

SEQ ID NO: 5523 - DNA, 336 bp, Glycine max
  modified_base (4)..(4): a, c, g, t, unknown, or other
ctgngtcagagtttgtgaagggaatcgcataattatgaagaaaggaaacttgtgacttggtctcaaactctcagttcctgtgtctgatcaatctaattttgccaggttcctgactgaaagtgggacttttaaggatggggatctgcttgtcaacagggatggagttcgaaatgtctctcataatgatgtcgaagctccacctccaatcaagcctacagacaaccagttaactttggcagacatagatgtaatcaaaagttttggaaagggaaatggaggggtatatcaattggtgcatcacaaatggacttctcattttttagcgtttgaaagtaa

SEQ ID NO: 5524 - DNA, 469 bp, Glycine max
  modified_base (402)..(402): a, c, g, t, unknown, or other
ggtgaacctgtgaacaagttaatgacctcatggacaaagcagaagggatatcctgttgtatgtgttaaagtcaatgatcagaaattggaatttaatcagtcgcaattcttgtcaagcggtgctcaaggagaaggccattggattgttccaataacattatgctttggctcttatgatgtccacaagagtttcctcttgcaatcaaaatctgaaacacatgatgtcaaagatttccttggttccacacacaaaggtttaaattgttggattaaacttaatgtggatcaggctggtttctacagggtgaagtatgatgagctgcttgctgctagacttagatatgcagtagagaaacaactcttatctgcatcagaccgatttggcattttggatgattcattngcactttgtatggctcgccaggaaatcattgaccttcttgattaactttgatgggatcttacaggga

SEQ ID NO: 5525 - DNA, 368 bp, Glycine max
ccgggccgacccacgagtccaaaagatggagtgaaatttaccaacacgaagctcaagaaactaggggaccaatagcaacaaattcttgaggagtataaaagttgtcaaaaaaagttagttgatagagtagttcaaactgcggcaactttctctgaggtgtttgaatctttagctgaaataatttctgaattggatgtattactgagctttgctgatttggcttctagttgtcctactccctacacaaggcctgacatcacttcatcggacgaaggagatattactttagaaggatgcagacagccttgtgtagaggcacaagactgggtgaagtttatgcgaggtgattgtaagcgtgtcagaggaaa

SEQ ID NO: 5526 - DNA, 417 bp, Glycine max
ctccccttccaaacacaaacacaaacacaaacacaaacacatcgcaactcaagaaatgaaactagcttggtcaccagagagagcatccaaagcatacatcgacacagtccaatcttgccaggttttccgcgaatccggagtggcggagtttatttcggccatggcggcggggtggaactcgcagctcatagtggagacgtggtcgcagggaggacttattgccaccagcgtgggattagccctggcgaggtctcacacgtgcggaagacacgtgtgcgtagttcccgacgagcgggcgaggtcggagtacgcggagagaatgggcgaggcgggcgtgacggcggagatcgtggtgggggaaccggaggaggtgatggaaggtttggtcggcgtggacttcttggtggttgattctcg

SEQ ID NO: 5527 - DNA, 344 bp, Glycine max
  modified_base (283)..(283): a, c, g, t, unknown, or other
  modified_base (306)..(306): a, c, g, t, unknown, or other
cccacgcgtccgcccacgcgtccgcccacgcgtccgcccacgcgtccgatggcgacgagggatcgcactctgcttttcagaaagcacagagatgcgttgaagagtgttcgggttccctccatctcctcgccggcattcaccggttccggcgccggcggtggccccgtcatcgaattggccaccacctcgtttctcaatcccaatcgctcttacgcaccggtaagtaccgaggatcccggcaattccagtaggggtccaaatgcaattacagtggggctacctncggcgtgggtggatttatcagangaaatatcagcaaatgtgcaacgtgcacgcacaaaaat

SEQ ID NO: 5528 - DNA, 413 bp, Glycine max
gcgcaaccatctttggatcaaccctccaatttgtttacaatatggaacagaccctctcctttgaatgttgagcatgaatttgttcaaaacacggcaagagtgaaatctgttgatatgcatccaactgagccatggattctactgggtttgtattcaggaactatttctatttggaactatcagacaaagactgaagagaagtctttaaaaatcagcgaatctccagtgagatcagcaaagttcattgctcgggaaaactggattgttgcagctacggatgacaaaaacattcacgtctacaattatgacaaaatggaaaagatagtagaatttgcggaacataaagattatatcaggagtttagctgttcatcctgtcctgccatatgtaatatcagctttagatgatcaggt

SEQ ID NO: 5529 - DNA, 394 bp, Glycine max
  modified_base (346)..(346): a, c, g, t, unknown, or other
gcgcgacaacctcggctcagtgtctctctgcactgcaaactccctataacccttcccttcctcgcacttcattcttttatttcatttatttatactcttcatgaaaaattaagggaattttcagagagagagagagggagagagtagttatggaaggagaagaaggaggaattgcaacaaagaagagagggaaagagggtgaaactgagacgacgcgctacaaaggaatcagaatgagaaagtggggcaagtgggtcgctgagattcgagaacccaacaagcgttcaaggatttggctcggttcttactccacgcccgtcgcggcggcgcgtgcttacgacaccgncgttttccacctccggggcccctctgcgcgcctcaacttccccgagct

SEQ ID NO: 5530 - DNA, 445 bp, Glycine max
ttctttctctgtcgtcgctctttcttcaacttcaagcttaattcctcatgtctttcagaggcctcagccggccaaatgccacatcaggcatgggtgttgctgatcacagcaaaaacaccttcatggaattgaagcagaagaaggttcatcgttatgtgatctttaaggtcgatgagaagaaaagggaggttgtggttgagaagactggtggcccggctgagagctatgacgattttgctgcatctttgccggagaatgattgcagatatgctgtctttgactatgatttcgtcacttctgagaactgtcaaaagagcaaaatcttcttcattgcatggtccccttcaacatctcggatccgtgccaagatgctctatgccactactaaagacaggtttagacgtgagctagatggtgtccattatgaaatccaggctactgaccc

SEQ ID NO: 5531 - DNA, 373 bp, Glycine max
ctctgtcgtcgctctttcttcaacttcaagcttaattcctcatgtctttcagaggcctgagccggccaaatgccacatcaggcatgggtgttgctgatcacagcataaacaccttcatggaattgaagcagaagaaggttcatcgttatgtgatctttaaggtcgatgagaagaaaagggaggttgtggttgagaagactggtggcccggctgagagctatgacgattttgctgcatctttgccggagaatgattgcagatatgctgtctttgactatgatttcgtcacttctgagaactgtcaaaagagcaaaatcttcttcattgcatggtccccttcaacatctcggatccgtgccaagatgctctatgc

SEQ ID NO: 5532 - DNA, 385 bp, Glycine max
atttccacgcgcctctcttcctcttcacgccgtcaccattatcgatctgatctgtacgcggaggagagtgaagggaacgatgatttcagggcggagtttctatgccctttctgcgccgaggattacgacgtcgtttccctctgttgccacattgacgaccaccaccctatccaagccaaatacggggtgtgtcccatttgtgggaagaaggttggagtggatcttggtggacattttactactcaacatgggaacttcttgagggtgcagcgcataaggagggtcaagtaaggaggctctgcttcaacaatttctatatcgagaacagggttacaagaaggagccttgcattcccttctttgaggttcttcatacttagctttct

SEQ ID NO: 5533 - DNA, 407 bp, Glycine max
cgtttttctgacactgcattctcttcccctttcaaagatttaaccttatttgctcgcagatatgcgcggttactgattcgtcgatggtatctgtcgaaaaaattcacatcgaaagggaacgaacacggaaacgccctcgtctcgcgtgggacgtagctcctccctccgcgtctgaggtaagcttccttcaattccctaattcatattaaattacggtttcttcttttcatagctttttcatcgtttattgtacgcacaacgggctctgccggtgcccggtgatgaaggtttcgaaagaaagcatgtttcgcctccgaaaatggacgacgatcgagagggccattatgtcttcaatcttggcgaaaatctcactcctagatataaaatcctcagcaagatgggtgaag

SEQ ID NO: 5534 - DNA, 418 bp, Glycine max
  modified_base (402)..(402): a, c, g, t, unknown, or other
aaaattttctgaatcacatcagattcaattgaattatacccctcaatgcaatggtggtctgcaaatgtcgcaaggctactaagttatattgcttcgtgcacaaagttcctgtctgtggggaatgtatctgcttcccggagcaccaaatctgcgtggtccggacttattcggaatgggttatagatggggagtatgattggcccccaaaatgctgccaatgccagtctgttttggaagagggggatggatctcaaacaactcgactgggttgcttgcatgttatccacacaaattgcttggtctcgcatatcaagagttttcctccacatactgcccctgcaggatatgcgtgtccttcatgttctacttcaatatggcctcctaaaagtgtgaaagattcangatcacgtcttcattc

SEQ ID NO: 5535 - DNA, 382 bp, Glycine max
ggaaaagcaatcacaaccatccctgaaaatttcacacctcatagagcagtgaagaggatatatgaacaacgggcccaaatgattgaaactggggaagatattgactggggatttgcagaggcgcttgcttatgctaccttgcttattgaaggtaaccatgttcgattaagtggtcaggatgttgaaagaggaacttttagtcaccgccatgctgtagttcacgatcagacaacaggagagaaatattgtcccctggacaatgttataatgaaccaagatgaagagatgtttaccgttagcaatagttcactttctgagtttggtgttcttggatttgaattgggttactcaatggaaaatcccaattcattgataatttggg

SEQ ID NO: 5536 - DNA, 434 bp, Glycine max
  modified_base (386)..(386): a, c, g, t, unknown, or other
  modified_base (414)..(414): a, c, g, t, unknown, or other
aaaccaaaccctaatatcaacttcatctgtttcatttgattttgattcgaacccagacagagacatagcctctttctttcgtttggagaaacaaacccctcgtttcaatcattgatcctttcctgttagatacgaattactcttccaatttcatcatggccaaaacctccttcaagcttcagcatcctttggaaagaaggcaggctgaagcttctcgcattagagagaaatatcctgatagaatacctgtgattgtggagaaagctgaaagaagtgacattcctgatattgataagaaaaaataccttgtccctgctgatttgactgttggccagtttgtatatgttgtccgcaaaaggattaagctcagtgcagagaaggctatntttgttttcatcaataacactctgcctncaactgctgcattgatgtct

SEQ ID NO: 5537 - DNA, 446 bp, Glycine max
aaaccctaatatcaacttcatctgtttcatttgattttgattcgaacccagacggagagatagcctctttctttcgttaggagaaacaaacccctcgtttcaatcattgatcctttcctgttagatacgaattactcttccaatttcatcatggccaaaacctccttcaagcttcagcatcctttggaaagaaggcaggctgaagcttctcgcattagagagaaatatcctgatagaatacctgtgattgtggagaaagctgatagaagtgacattcctgatattgataagaaaaaatacccttgtccctgctgatttgactgttggccagtttgtatatgttgtccgcataaggattaagctcagtgcagagaatgctatttttgttatcatcaataacactctgcctacaactgctgcattgatgtctgctatttatgaagaaa

SEQ ID NO: 5538 - DNA, 435 bp, Glycine max
cctaattccccaatcaatcatctttacgtgtttgttcgagaccatggccaaaagcccctgcaagcttgaacatcccttggaaagaaggcaggctgagtctgctcgcattagagacaagtatcctgatagaatacctgtgattgttgagaaagctgaaagaagtgacatcccagacatcgataagaagaagtaccttgtcccagcagatttgactgttggccaatttgtttatgttgtccgtaaaaggattaaggtcagtgcagagaaggctatttttgtttttgtcaataacactctacctccaactgccgctttgatgtcttctatttatgaggaaaataaagacgatgatggttttctttacatgacttacagtggagagaacactttcggttctcgctagggtcaaatttaataatatatgagatcctctgt

SEQ ID NO: 5539 - DNA, 387 bp, Glycine max
gagaagaggagggtggaggagttaggtgggttcattgatgatggatatctcaatggtgatctttgagtaactcgagcccttggggattgggacttgaaatttccacttggtgctgcatcccctcttattgctgagccagatgttcggctggttacattgactgagggtgatgagttcttgatcattgggtgtgatgggatttgggatgtaatgtctagccaagttgcagttagtcttgttcgccgaggattaagaaagcatgatgacccacagcaatgtgcccgagagctagtcaaggaagcattgcgcctaaatacatcagataatctcactggcattgttgtatgcttgtcgcccattggaagcataggcgaatcatgttcaccc

SEQ ID NO: 5540 - DNA, 458 bp, Glycine max
  modified_base (332)..(332): a, c, g, t, unknown, or other
gtttgataaaatattgtacacataaatctagctccaattcctaatcacctggttaatttcttcacatagagctatcaagatccaacgttaacatgaagaatgttttagtaaggtcagctgcgcgagctctgcttggcggcggtgggcggagctactaccgccagctctcaacggcggcgatcgtggaacagagacaccagcacggtggcggcgcgtttggaagcttccacttgcggaggatgtccactcttccagaggtaaaggatcagcactcagaggagaaaaagaacgaggtcaacgacaccagtaacgccgtcgttacgagttactgnggaatcacaaggcccaaggttcgtagggaggacgggacagagtggccgtggaactgcttcatgccatgggatagttaccactctgatgtgtcaatagacgtgaccaagcatcatacaccaaagtca

SEQ ID NO: 5541 - DNA, 425 bp, Glycine max
tagagattttccaaatcagcctccgattgtgtatgactataccgacccaaacataacgagcactacagaattagccttcaaaatcggacccaaatcaacgaaagtgaagacgttgaagttcaattcaactggtcagattggacttcaaaacacgggcattggctctgcagagaaccaccccattcacattcaccggttcaatttccatggtttggctcaagggttccggaattacaaacgccctagaagccagccccaggtcaaatcttgtcaaccctcagatacggtacacaaatttctgtccccgtcggaggatggtccgttgttagattccaagcaaataatccaggtgtttggcttgtgcattgccatttggaaactcatttgccgtgtgggctagccatggctttcgaggttgagaatgg

SEQ ID NO: 5542 - DNA, 430 bp, Glycine max
ctcacgcgttcgatcctgtgccatcgaaggctgaataagtgacctgcgtcgcaggcactgttcatggccatgtctcgggttgataacagaaattcctcagccaccaagcgtgctaggactgatggtagtcgtagggaagatgattggacatgccccagctgtggcaatgtcaatttctctttcaggacaacttgtaacatgcgtaattgcactcaaccaaggccggctgatcataattcggtatgatattatatgtaatgtcattttttttttaaaatgtgattttcatttcgttaatgatttatggttaacatttatttgatgatttctttttatcaatttctctctttttgcttgtgattcttattgggctttcttttattttcctattttacggtcactcgagttccatgaagttttttacccaatt

SEQ ID NO: 5543 - DNA, 394 bp, Glycine max
  modified_base (266)..(266): a, c, g, t, unknown, or other
ccaatactgagcggggcagcattgagaccagaggtggctttgtctcaaacatgccaggagatgttgcaagagtgaatgggcagctagcagtttctcgagctttcggagacaaaaacctcaaaacgcacttgcgatctgatcctgacattcagtatactgacattaccccagatgttgagcttttgatacttgctagtgatggtctatggaaggtaatggcaaaccaagaagctgttgatgttgcaagaaggataaaggatccacanaaggcagcgaaacaactagccactgaggcattgaacagagacagtaaggatgatatttcctgcattgtagttcgtttcaagggttgaaaaagggaacatacatactctctaaattcagggtatatata

SEQ ID NO: 5544 - DNA, 330 bp, Glycine max
cccacgcgtccgcgggtgtgtagtagaattgcagtgaaattggagagaaaaaaaaaaatacgctcaaacatggagggctatgagatcctcaaagatattggttctggaaattttgctgtggccaagcttgttagagacaactgcaccaatgagctttttgctgtcaagtttattgagagaggccagaagattgacgagcatgtccagagggaaatcatgaaccacagatcattgaaacaccccaatattattagattcaaagaggttctgttgacaccaactcatttagccatagtaatggagtatgcttctggaggagaactctttgag

SEQ ID NO: 5545 - DNA, 409 bp, Glycine max
atcccccaaagcttcaatctttgtattcaattcaccctttctctctctccatgggcacttgtgttgatgccccaacccctctttctcggaagcctaacgggtcccaatccgatgatcgttccttcaattacatgaaattctgccgacccactttctctgatcgcgttccctgcatacccatttgcaagaatcgtgacactgccttcacacgcgtggaggagtttgacacatgtgtggaggataatgatgatattgaagttgaggttgtggagggtgttgatctttggttgaagattcaagaggaggcaaggttagatgttgatcaagaaccaatcttatgcagctactatttcagttccattttgtctcacacatctttggagagtgccttggtcaaccacctctccac

SEQ ID NO: 5546 - DNA, 385 bp, Glycine max
cagagtttgctcacccctactcttcttccagtctctatctcaatctccatgaaatttaactatggctactgaagaggttttggttgatgaaatcacttaccctaccaagatcactactaccaagcccctatctttgcttggccatggaatcaccgacatggagattcacttcatccatgtgaaattctattcaatcggggtttatttggagccagaagtagtacgccacttggaccagttcaaaggaaaatctgcataggagctggaagataatgaagagttcttcaatgctctcatttctgccccggtggagaagtttattagacttgtggtgatcaaagagatcaaaggtgcacagtatggggttcagattgagactgcagtg

SEQ ID NO: 5547 - DNA, 436 bp, Glycine max
cccacgcgtccgagcatttagtgacaatgctctggcttaccttgccagcttctgcagaaaactgaaagtggtaaatctttgtggatgtgttagagctgcatccgatactgcattacaggctattggacaatactgcaatcagctacaatctttgaaccttggatggtgtgataatgttggcgatgttggagtgactactttagcatatgggtgtcctgatcttaggatagttgacttgtgtggctgtgtccgtataacagatgacagtgtgattgctttggcgactagatgcccccatctgaggtccctaggactgtactactgcaagaacatcacagatagagcaatgtattccttggcacacagcatggtgaacaacaggatgtggggaactgtgaaaggaggaggaaatgatgaagatggcttaaggactttg

SEQ ID NO: 5548 - DNA, 407 bp, Glycine max
  modified_base (315)..(315): a, c, g, t, unknown, or other
ctaattttaagcattcccttctcttttccattgcagctagcaaagaagcgaagaccccttttgctggttattaacagagtcataaaaaaccaaagttttctattctctgtagctcacatggtgggctaagaatatctgactttggggtggaaagtatggttggcaaggagagtttgagaactgaggtcttgaacttgagctttgagaagcttatgatggttgaatgtggtggaaatagtgggaaaggagtgaacattaaagctggtgtgatcacggagtggaaggatattccagttgagcttttgatgcaaattntgtcacttgtggatgatcaaacggttatcatagcttctgaagtgtgtcgtgggtggagagagggcaattgctttggccttactcggtatcac

SEQ ID NO: 5549 - DNA, 403 bp, Glycine max
acacaccactttatatacgcacacgagagtcggaagcactactctcttcgccggttgctcgctctctctcgctctttcagctttgactttggtggaaactaaagactagtcaaaatggtgaagttcacagctgaagagctgcgtcgcattatggactataagcataatatccgtaatatgtctgtcattgcccatgttgatcacggaaaatcaaccctgactgattctcttgtggctgctgctggtattattgctcaagaagttgcaggtgatgtccgtatgactgatacccgtgcagatgaagctgagcgtggtattacaatcaagtctacgggtatctcactctactatgaaatgactgatgaagctctcaagagttttaagggagagcgcaatgggaatg

SEQ ID NO: 5550 - DNA, 424 bp, Glycine max
ggagaatttgtatgagggtccccttgatgatcaatatgcttcggctatcagaaactgtgatcctgagggtcctctgatgctctatgtctcaaagatgattccagcatctgacaagggcagattttttgcttttggtcgtgtattctctggcagagtttcaactggtttgaaggtgaggattatgggaccaaattatgtccctggggagaagaaggatttgtatgttaaaagtgttcaaagaactgtcatttggatgggaaaaagacaggaaactgtggaagatgtcccctgtggtaacactgttgctatggttggtttggatcagttcataacaaagaatgctactttgactaatgaaaaggaagttgatgcccatcccattcgagctatgaagttttctgtctcacctgttgttcgtgttgct

SEQ ID NO: 5551 - DNA, 354 bp, Glycine max
ccggtctctgaattcgacgcacgcgtgacgctatctctctcgctctttcagctatcacttttgggtttaactaaagactactcaaaatggtgaactgcacaatttaaaagctgcgtggcattatcgactataatcataatatccccaatatgtctgtcattgctcatgttgatcactcaaaatcaaccctgactgattctcttgtcgctgcttcttgtattattgctcaagaagttgcatgtgatatccgtatgactgataccccttcacatgaagctcaacgtattattacaatcaactctactactatctgactctactatgaaatgactgattaagctctcaaaattttta

SEQ ID NO: 5552 - DNA, 410 bp, Glycine max
acgctgacttccaaaaagaagacaaaatcctctgcgagagagaaagagagaggcggtgatgtcttcaattagattcctatggatcctgatggtgtctttgacggcatcatgcgcgttaagccaaccgcagaagctatcggcgtacgatgttctgatggagtacgggttcccggtgggtcttcttcccaagggagccatagggtattcgctcaacagagacagcggcgagttcgcagtgtatttccaaggagcgtgcagcttcgacatagagtcctacacgctcaagtacaaatccaccatcacgggtgttatctccaagggcaggctctataatctcaaaggtgtcaccgtcaaaatcttgctcctttggctcaacatcgtcgaggtctctcgtcaggggaacgatattt

SEQ ID NO: 5553 - DNA, 383 bp, Glycine max
agcctatatttcctggaaaagatgagccagaggaattaaataaaatatatgagctgtgtggagcaccaaatgaagtcaattggcctggggtttccaagataccttattataataaatttatgccaacaaggccgatgaaaagacgtttgagggaagttttcaggcattttgatcatcatgctctggaattgttggagaagatgttgacacttgatccggctcagagaattactgcgaaagatgcacttgatgctgagtatttctggacagatccattaccgtgcgatcccaagagtttacccaagtacgaatcatcacatgagtttcagactaagaaaaagcgccaacaacaacggcaaaatgaagaaatggctaagcgtcag

SEQ ID NO: 5554 - DNA, 355 bp, Glycine max
ctttgacattcaaaacatttgaaagcggctagcttacactgttttaggggagagcccattttaaaaattttcaagaaattaaactttgctggtggggctgtgacattttttggtgaaaatgtgtctactgggctgaaagttgaggatcagattgctgtcgggaaacgcgtggtattagtaggtagcacaggggttgtgaagtctcaaactgattctgcttatggtgccaatgttgaagtgcggcttaaagaggcagattttccaattggccaagaccagtcttcaactgagcctttctcttgtgaagtggagaggagacctggctttgggggctaatcttcagtcccaattttct

SEQ ID NO: 5555 - DNA, 278 bp, Glycine max
tttttgctccgatcaacatgaagttgatcaataaaccatcgaaactacgttcctttttgagccttttgtgctccattttgctgctctgggaattagctttcgtggctgcggaggacccttatagattcttcgactggaccattacctatggtgacatttatcccctaggagttaaacaacagggtattcttatcaatggccaattcccaggccctgaaatctattctgttaccaatgacaatttgatcattaacgtgcacaataacttgaccgagccg

SEQ ID NO: 5556 - DNA, 397 bp, Glycine max
agagtacaagatttaaacacgcgaacaccgtgtttgaaaatcgaacataagagaagagggcgcaatcgttagggtttccaagatggaaggcatggttgatcacctggctttcgagcggaacaattcgcagttcgatgtcgacgagatgaagatcgtttgggccggttctcgtcacgcttttgaagtatctgacaaaatggctcgcctcgttgccagcgatccggcattcagaaaggatgatagagttgtgcttgataggaaggctttatttaagaacactttgaggaaagcagcttatgcatggaaaaagattattgagctccgtctcaatgaagaggaagctgctatgctcagatcctttgtggaccaacctgcttttacggatctacattgggga

SEQ ID NO: 5557 - DNA, 371 bp, Glycine max
cccacgcgtccgagaagctgtaaagaaacgatgaatgcttcagactcagagaaagaggacgcagaaattgaagcaacagaaactgcacccgatgaagagaatgcgaaattgaagaagaaagagaagaaaaagaagaagaaagcttcgtcgaaggatgcagagaagaagcgcggcgtgtgctatatgagtcgaatcccccctcacatggaccacgtcaagcttcgccacattctctctcagttcggcgatattcaacgaatttttctcgctcctcaagattcttctgtccaagtgtctgccaagaggtcacgtggatcccgagaccaagcatattcagaaggatgggttgaattcggtaataaaagtgttgc

SEQ ID NO: 5558 - DNA, 346 bp, Glycine max
gtcgaaacgacgtcgttcattgtgcgatgaaagtagctcaacaagtgttgaatctctgaactgtttgggattcgaatcttgagtcgttgatcgtttccggcaatggattcgtggctcaaagccgctgaaggtttatttgaagttgtagatcgacgagcgaaggctgttgccagtgacttatcagaggagcagggtgattctaagtctccagcatcaaatgggcaaggatctcagggcaagaggacaaaatcaaaaccaaaggctcaaaaggcactatccgactcaccaactataattagtgatactactcacgagaaaagtggatcttcatcagcacctgtggaca

SEQ ID NO: 5559 - DNA, 392 bp, Glycine max
gacccacacgtcaggccaattgttaggatctccctcaggttatgttggttatggagagggtggcgttttaacagaagcaattagaagataactattcacactgttattgttggatgaagtagaaaaagctcatccagatatattcaacatgcttcttcagattttagaagatggtcaacttactgattctcagggtcggagagtttcagttaatgatgcactggtggtgatgacgtcaaatgtggggtcgagtgccattgctaagggtcgacacagctccagaggtttcttgattccagatgataaaacaatatcatacaatggcttgacatcgatggtaattgaagaactgaggtcatattttcgtctagaactgctcaacaggatagatg

SEQ ID NO: 5560 - DNA, 427 bp, Glycine max
agctgatgagaataaaaaacatcttgaaaggcaaaggatggaaatgcaagaggacatagatgtacttgttgacctcaacaggaagctgaaaaatcagcgggaacaatttattgtggaaagacgacgctttattgagtttgttgagaaacttcggagttgccagaactgtggggaaatgatctctgaatttgtgctttctgatttacaatcctctgttgacattgagaacttggaagtgccatctctcccaaaattagcagctgatattgtacagggagtttctaatgaaaatttagcttcttcaaggcaaaatactggattgtctcctgcaactgatcccaagtcacctgtttctggtggcactgtctcttggctacgtaaatgcacctctaagatttttaaaatcttcccgattagaaagattgaa

SEQ ID NO: 5561 - DNA, 416 bp, Glycine max
cggacgcgtgggttccaaatcatttttacatagggacatcaagccagacaacttcctaatgggttgggggaggcgtgcaaatcaagtttatgccattgactttggtcttgctaagaagtacagagacacctctacccatcaacatattccttacagagagaataagaatttgactggaactgctagatatgctagtatgaatactcatcttggaattgagcaaagccgtaaggacgacttagaatcacttggatttgttcttatgtattttttgagaagaagtctcccgtggcacggattgaaagcaggtactaagaagcaaaagtatgagaaaatcagtgagaagaaagtttctacttctatcgagtctctgtgccgtggctacccctcagagttcgctttatactttcattact

SEQ ID NO: 5562 - DNA, 436 bp, Glycine max
gcttcttcgagtttcacagccaagtcgtaaaagggtttcaagggatggaaaacatgcagagcttctggcaattgggtgatgaactccgtgggcactcaaaagcatcggaggatcacaagtggttaatggttgcctcgaaactggccgaacagacaagattgaagggggagcgtgtgaacaaccttgatctttcaaagggacccattgaaacaaggtcaagggataaatttgggttccaggaagagaacaaatttgattctcttaacttgagcatgttgaacctggactctaaatttactgagaatgtgagcaaaagctcacttcgaaatggtgtttatggtatgaatgcagtgtatcagaaaaacaatgcaaacttggtgagtaatgtcaggccagtattgcatcattatgacgggccaaagtttcgtcttgaact

SEQ ID NO: 5563 - DNA, 442 bp, Glycine max
cccacgcgtccgaaaaacaccaattctccaccctctcattgaaaaaaaaacaaccaaacaaaaaaaatcaatcattttattttatttttctacgaaaatggttgatttacattggaaatcaaagatgcctagttccaaaacaccaaaactctctctctccgacaacaagtccttaccctctttgcaactacccttccgcaccacagatatctctcccgccgctccttccgtttgcgccgcttacgactactatctccgtcttcctcaactcagaaagctttggaactccactgattttcctaattggaacaacgaaccgattctaaaaccaattttgcaagctctcgaaatcacgttccgctttctttccattgttctctccgatcccagaccttactccaaccacagagaatggactcgccggatagagtctctcatcatg

SEQ ID NO: 5564 - DNA, 414 bp, Glycine max
caaaactctctctctccgacaacaagtccttaccctctttgcaactacccttccgcaccgcagatatcgctcccgccgctccttccgtttgcgccgcttacgactactatctccgtcttcctcaactcagaaagctttggaactccactgattttcctaattggaacaactaaccgattctaaaaccaattttgcaagctctcgaaatcacgttccgctttctttccattgttctctccgatcccagaccttacttcaaccacagagaatggactcgccggatagagtctctcatcatgcatcaaattgaaatcattgccatactttgtgaagaagaggaacaaaattccgacacacgtggcactgcatcaaccgctgatctcagcagcagcaatagcagcgtgagcagaaact

SEQ ID NO: 5565 - DNA, 461 bp, Glycine max
aaaattaatcatcttacttatttattctccgaaaatggttgatttacattggaaatcaaagatgccaagttccgacatgccttccaaaactctaaaactctctctctccgacaacaagtccttaccctctttgcaactacccttccgcaccacagatatctctcacgccgcaccttctggttgcgccacttacgactactatctccgtcttcctcaactcagaaagctttggaactcctcagattttcctaattggaacaacgaaccaatcttaaaacctatcttgcaagctctcgaaatcaccttccgctttctctccattgttctctccgatccaagaccttactccaaccacagagaatggactcgcaggatagagtctcttatcacacatcaaattgaaatcattgccatactttgtgaagatgaggaacaaaattccgacacacgtggcactgcac

SEQ ID NO: 5566 - DNA, 319 bp, Glycine max
acggcggggaagccgagcctgctctacgatctcttgtgcaagccgaatgagatccacgctctgaagactacgccgggggaggagcgcgtggagaaccacgagaaccacgcggtgcacgccacgcaccagatcgcggagtcgtggattcacgcgtcgcggaaggttcttgatagaatcgcggactctgtgctctccagaacctttctgaaagcagtatatgactgctactccgtggagaggatctggaagcttctctcggaggtggaggacctccaccttattatggatccggacgattttttgaggctaaagaatcaac

SEQ ID NO: 5567 - DNA, 448 bp, Glycine max
caaaaacaccaattctccaccctctcattgaaaaaaaaaacaaccaaacaaaaaaaatcagtcattttattttatttttctacgaaaatggttgatttacattggaaatcaaagatgcctagttccaaaacaccaaaactctctctctccgacaacaagtccttaccctctttgcaactacccttccgcaccacagatatctctcccgccgctccttccgtttgcgccgcttacgactactatctccgtcttcctcaactcagaaagctttggaactccactgattttcctaattggaacaacgaaccgattctaaaaccaattttgcaagctctcgaaatcacgttccgctttctttccattgttctctccgatcccagaccttactccaaccacagagaatggactcgccggatagagtctctcatcatgcatcaaattgaaatca

SEQ ID NO: 5568 - DNA, 315 bp, Glycine max
agcttatgtgcttcactcttgggctggagggttaactgagttcacagatggaaggaatcaagagagcacaagtgaggctgtgagtgcatattattctgctgctttgatgggattagcatatggtgatgtacctcttgttgcacttggatcaacactcacagcattggaaattgaagggactaaaatgtggtggcatgtgaaagaaggaggtactttgtatgagaaagagtttacacaagagaatacggtgatgggtgttctatggtctaacaagaaggacactggactttggtttgctcctgctgagtggaaaga

SEQ ID NO: 5569 - DNA, 426 bp, Glycine max
cccacgcgtccgaggaaatagctagtgagactaatccatcgcacaaacctcaccgattcagtgacctctaagctaattgcttccaatctccgtcaccaaatcacaaaatcagcccaaaacctccgccgccagctcctatccacggcggcggcggcagtgccggaacacgatgggaacaactccaactctttgggaatgacgatgaagggcgttcgaatctccggaagacccctttacctggacgtgcaggcaacatctccggtggacccgcgcgtacttgacgcgatgctccctttctacatctctcgctacggaaaccctcactctcgcacccacttctacggctgggaatccgacgaggccgtggagcacgcgcgcgctcaggtcgcttccctcatcggcgcttcccccaaggagatagtcttc

SEQ ID NO: 5570 - DNA, 358 bp, Glycine max
ccacgcgtcaggcaaaaccctagctgaaccctctttcccttctccggccaccgcaatggacttcactacgccgccgatcgaggacggtttcaccgccgagaagctcttcacgcacggcttctcctacacctacgatgacgtcatcttcctcccccactacatcgacttcgccgccgacgccgtggacctctccacgcgcctcacgcgccgtctccccctcgccgtgccgtttgtggcctctcctatggacaacgtgtccgagttcggcattggcgccgccatggcctccctccgggggatccccgttcttcaactcaaagttcccgccgccgatcatgcggccatcctccgcagagcg

SEQ ID NO: 5571 - DNA, 266 bp, Glycine max
ccgggttggaccaagccttcggccaacgcttccgggaagattgcaagaggtgttgccttcccgacatgtgtgcctgtgaacaacactgcctgccacttctatcttcttgccagtgatgaaacattgttggaagacggcgatatattgaaaattgacatggcttgtcttttacatgggttcattgttgctgtggctcacacccatgttcttcatgaggggcctgttacgggacggccagctgatgctattgcagcagcaaacaccgc

SEQ ID NO: 5572 - DNA, 404 bp, Glycine max
agactgtcaatgaagctgctaaattcagataccggagtggtaaccaatttaatcgcgcaggcttaacagttagagccccttatggagctgtgagtcatggtgggcattaccactctcagtctcctgaggctctcttctgtcatgttcctggtatcaaagtggtcatgcctcgaagtccactggaagcataagggttattgctatcttgcgtacgagatccaaatgctatcgtattctttgaaccgaagtggctatatcgttcggctgttgaagaagttccagaggatgactacatgctgcctttatctgaagctgaggtaattcggcaaggaagtgatataacacgtggtggatggggaactcaattatctataatggaacatgcttgtcttgatgctgaaaaa

SEQ ID NO: 5573 - DNA, 402 bp, Glycine max
  modified_base (247)..(247): a, c, g, t, unknown, or other
aggcaaactctggtggcagatgcctctcagttgaatatacagacagagttggagagttagctaagaagcatggactgaagcttcacattgatggggcccgtatttttaacgcatcagttgcacttggtgttccagtggataagcttgtccaggcggctgattcagtttccgtttgcctatctaaaggtataggtgctccagttggatctgttattgttggttccaagaattttattgccaaggctanacgactccggaaaaccttaggacgtggaatgagacagattggcctcctttgtgccgctgcacttgttgccttgcaggaaaatgttgggaagctggaaagtgatcacaagaaagctagacttttggctgatggattaaaagaagttaaaggactga

SEQ ID NO: 5574 - DNA, 325 bp, Glycine max
  modified_base (238)..(238): a, c, g, t, unknown, or other
attcagcgattagcaaaaagcagaagaagaatgagaacccgacaaaaatggaagaggacgacggcgaaggcgaaaaagaagaagaggaagaagaggaagaagaagaagaagaagaagaagaagaagtgtgggacgattgggaaggagaagacgaaggagagagagaatctgaattcgtgtgtctattctgtgactcccggtacagttcgtgcggttccttgttcgaccactgcgcctnccttcaccgctttgatttccacacgatcagaacaactctcagcttggatttctatgcctccttcaagctcattaacttcattcgctc

SEQ ID NO: 5575 - DNA, 432 bp, Glycine max
cccacgcgtccgcccacgcgtccgggaaggtcctgttactggaagggcagctgatgtgattgctgctgctaatactgctgctgaggtggccttgaggcttgtcaggccgggaaagaagaacaaggatgtaagtgatgcaattcaaaaggttgctgctgcctatgactgtaaaattgttgagggtgttcttagccaccaaatgaagcagtttgttattgatgggaataaagttgtgcttagtttgtctaatccagacacaagggttgacgaagcagagtttgaggagaacgaagtttatgcaattgatatagtaacaagcactggggatggcaagcctaagctgttggatgagaagcagacaactatttataagagggctgttgacaagagttatcacttgaagatgaaagcgtctaggttcattttcagtga

SEQ ID NO: 5576 - DNA, 363 bp, Glycine max
cccacgcgtccgcagagatactgaaaaatagactcaaccaatatgttcaaggaaacaaagagggttttgttaatgatgcagaagctgaagtagcccggctatctaatgcagcttatggggttgatatgttgaataccattggctacatatacgcaaggcaggcagcaaaagagctagggaagaaagcaatttatttgggtgtgccttttattgctgagtggtttagaaacaaagggcactctattaaatctcaagttacagcagcaacaggggcaattgctttaatccaattgcaggaggatatgaaaaagcaactcagttcagaaggggactatactgaagaagagcttgaagaatacatgc

SEQ ID NO: 5577 - DNA, 421 bp, Glycine max
cccacgcgtccgcccacgcgtccgggaaaatggtctgttgtttgttccaaagggccaggggcagaatccgcaagcacagatgttctctgatccgaacatggccatggatatgatgaagaaaaacctttcaatgatcattcctcagactcttacttttgcttgggtgaactttttcttttctggatttgtagcagccaagataccctttccattgacacagaggtttaggtcaatgctacagaatggaatagaccttagcaccgtagatgttagctatgtcagcagtcgctcttggtacttcctcaatctgtttggattaagaggattgtttagtctcatattgggtgaagaaaatgctgtagatgatacacaacgtatgatgcaaatgggtggatttggatttgatccttcaaagggtctg

SEQ ID NO: 5578 - DNA, 430 bp, Glycine max
gtgaccccattaaaagtggcacaatcattatattgcagcacatgagaacaaggaagtgggtgcacaggcattttcatgcatccccgatatcaagcaatcttgaggtcagtcgttttggaggataatccgaatctgacaccggtgactattgaaagcttataatagaatgatatgctaagacttgtaaacactatcaaaagattcgtcttcagcatattgacactggaggctatctacatagtcatgataagaaatacatccctattgctactggtcagcacgcagtatgttgtgctcctgaaaagcatgctgtcaatgcgcagctgtcaaccgaatgtgactacgattcccttacgcaaagcatatgatatactcagtatctgttcttattctaaacgggtaaaccattcatagtgagagatcattgcta

SEQ ID NO: 5579 - DNA, 435 bp, Glycine max
cccacgcgtccgcccacgcgtccgcccacgcgtccgcccacgcgtccggcaaaagtgatatatcgagacttcaaagcttcaaatatcttacttgattcgaattacaatgcaaaactttctgattttggcttggcaaaggatggaccagctggtgataagagccatgtctctacaagggtaatgggcacatatggctatgctgctcctgaatatatggccacaggtcacttgacaaagaagagtgatgtatacagcttcggggttgttctgcttgaaattatgtccggcaaacgtgcacttgacagcaacaggccaagtggggagcacaatttaattgaatgggccaaaccttacctcagcaacaagcgcaggatcttccaagtcatggatgcgcgcattgaaggccaatacacgttgcgcgaatcaatgaaagta

SEQ ID NO: 5580 - DNA, 446 bp, Glycine max
agttactgttgatgttggccacacaccaagggaaaatcaaagcacagggaaaatggtcttgccctttgagccactgtcaatagcatttaaggatgttcagtattttgttgacattcctccggagatgaaaaaacatggttccgatgagaaaaggctacaattgctttgtgatatcacaggagcctttaggccaggaattctcactgcactgatgggggtcagtggagcaggaaagacaactctgatggatgttctttcaggaagaaaaactggaggtatcattgaaggagatataagaatcggaagctaccccaaagtgcaaaagacatttgaaagagtttcaagttactgtgagcagaatgacatacattctccatatataaccgttgaagaatctgtcacatactcagcttggttgcggttgccaacagaaattgattctgtca

SEQ ID NO: 5581 - DNA, 435 bp, Glycine max
  modified_base (356)..(356): a, c, g, t, unknown, or other
ttgcaaattgagaaacgtttgagaactgatttggaagaggaaaaggcacaagaaattgctaagttacaggaagctttacatgcaatgcaaatacaagtagaagaagcaaataccaaggtcatcaaagagcgcgaggcagcacgaaaggccattgaagaagcacctccagttgttaaggagactcctattataattcaagatactgaaaagattaattcattattggctgaagtcaatagtttgaaggaatcactcctattggaaaaagaggctaaagaagaggccagaaaagctcaggctgaggctgaagctagaaataaagagatggttaaaaaggttgaagattctgaccgcanagtggatcaacttcaagaattggttcagagattggaggaaaagatttccaatgcagagtcagaaaatcaagttcttcgc

SEQ ID NO: 5582 - DNA, 415 bp, Glycine max
agggaccttaaagttaaaggatataccatatcaacacatataagaagaccgctacaataagagtcttcaacttcttggatacaacacagtatacaatagcactccagtgcttgtccaacaacgggaaaacccttaatgtgtagtctattgccttacttgttgaaatacaattgaatgagattttggtcaaataaatcataactcctgcggatccctacgaaagaaccctggaaaggttttgggttaaatatgctgatgatgacatgttttctgcagttattgcattcttccttatcactaatgatgaagagcgagaaaagagcatagagaagatatgggagcatctcaaggttgttgagaatcagtgttttggtgatcagaagaaattttttgggggagacattattaacattat

SEQ ID NO: 5583 - DNA, 414 bp, Glycine max
agcagaggtgaagcttcatggattttggtatagtccctacactttgagggtggtatggaccttaaagttaaaggatataccatatcaaaacatagaagaagaccgctacaataagagtcttcaacttcttgaatacaacccagtatacaagaaaactccagtgcttgtccataatggaaaacccttatgtgagtccatgcttattgttgaatacattgatgagatttggtcacataattcattacttcctgctgatccctacgagagagctctggcaaggttttgggttaaatatgctgatgatgacatgttttctgcagttattgcattcttccttagcaataatgatgaagagcgagaaaagagcatagagaagatatgggagcatctcagggttgttgagaatcagtgttt

SEQ ID NO: 5584 - DNA, 363 bp, Glycine max
gcagaggtgaagcttcatggattttggtatagtccctacactttgagggtggtatggaccttaaagttaaaggatataccatatcaaaacatagaagaagaccgctacaataagagtcttcaacttcttgaatacaacccagtatacaagaaaactccagtgcttgtccataatggaaaacccttatgtgagtccatgcttattgttgaatacattgatgagatttggtcacataattcattacttcctgctgatccctacgagagagctctggcaaggttttgggttaaatatgctgatgatgacatgttttctgcagttattgcattcttccttagcaataatgatgaagagcgagaaaag

SEQ ID NO: 5585 - DNA, 424 bp, Glycine max
  modified_base (408)..(408): a, c, g, t, unknown, or other
ggtgaagcttcatggattttggtatagtccctacactttgagggtggtatggaccttaaagttaaaggatataccatatcaaaacatagaagaagaccgctacaataagagtcttcaacttcttgaatacaacccagtatacaagaaaactccagtgcttgtccataatggaaaacccttatgtgagtccatgcttattgttgaatacattgatgagatttggtcacataattcattacttcctgctgatccctacgagagagctctggcaaggttttgggttaaatatgctgatgatgacatgttttctgcagttattgcattcttccttagcaataatgatgaagagcgagaaaagagcatagagaagatatgggagcatctcagggttgatgagaatcagtgttntggtgatcagaagaaa

SEQ ID NO: 5586 - DNA, 384 bp, Glycine max
acaggtgaagcttcatggattttggaagactgcctacactgtgagggcggtatggaccttaaagtgaaaggatataccatatcaaaacatagaagaagaccgctacaataagagtcttcaacttcttgaatacaacccagtatacacgaaaactccagagcttgtccataatggaaaacccttatgtgagtacatgcttatcgctgaatacattgatgagatacggtcacataattcattacttcctgctgatccctacgagagagctctggcaaggttttgggttaaatatgctgatgatgacatgttatctgcagttattgcattcttccttagcaataatgatgaagagcgagaaaagagcatagagaagatatgggagca

SEQ ID NO: 5587 - DNA, 453 bp, Glycine max
cagaggtgaagcttcatggattttggtatagtccctacactttgagggtggtatggaccttaaagttaaaggatataccatatcaaaacatagaagaagaccgctacaataagagtcttcaacttcttgaatacaacccagtatacaagaaaactccagtgcttgtccataatggaaaacccttatgtgagtccatgcttattgttgaatacattgatgagatttggtcacataattcattacttcctgctgatccctacgagagagctctggcaaggttttgggttaaatatgctgatgatgacatgttttctgcagttattgcattcttccttagcaataatgatgaagagcgagaaaagagcatagagaagatatgggagcatctcaggggtgttgagaatcagtgttttggtgatcagaagaaattttttgggggagacattattaaca

SEQ ID NO: 5588 - DNA, 430 bp, Glycine max
  modified_base (385)..(386): a, c, g, t, unknown, or other
tgaagcttcatggattttggtatagtccctacactttgagggtggtatggaccttaaagttaaaggatataccatatcaaaacatagaagaagaccgctacaataagagtcttcaacttcttgaatacaacccagtatacaagaaaactccagtgcttgtccataatggaaaacccttatgtgagtccatgcttattgttgaatacattgatgagatttggtcacataattcattacttcctgctgatccctacgagagagctctggcaaggttttgggttaaatatgctgatgatgacatgttttctgcagttattgcattcttccttagcaataatgatgaagagcgagaaaagagcatagagaagatatgggagcatctcannggttgtgagaatcagtgttttggtgatcagaagaaattttttgg

SEQ ID NO: 5589 - DNA, 381 bp, Glycine max
cagaggtgaagcttcatggattttggtatagtccctacactttgagggtggtatggaccttaaagttaaaggatataccatatcaaaacatagaagaagaccgctacaataagagtcttcaacttcttgaatacaacccagtatacaagaaaactccagtgcttgtccataatggaaaacccttatgtgagtccatgcttattgttgaatacattgatgagatttggtcacataattcattacttcctgctgatccctacgagagagctctggcaaggttttgggttaaatatgctgatgatgacatgttttctgcagttattgcattcttccttagcaataatgatgaagagcgagaaaagagcatagagaagatatggg

SEQ ID NO: 5590 - DNA, 418 bp, Glycine max
gcggggaagcttcatggattttggtatagtccctacactttgatggtggtatggaccttaaaggtaaaggatgggccatatcaaaacatagaagaagaccgctacaataagagtcttcaacttcttgaatacaacccagtttacaagaaaactccagtgcttagccataatggaaaacccttatgtgagtccatgcttattgctgaatacattgatgagatacggtcacataattcattacttgctgctgatccctacaagagagctctggcaaggctcagggttaaatatgctgatgatgacatgttttctgcagatatacgcattctttcttagcagtaatgatgaagagcgagataagagcatagagaacatatgggagcatctcacggttgttgagaatcactgtttaggtgat

SEQ ID NO: 5591 - DNA, 304 bp, Glycine max
  modified_base (241)..(241): a, c, g, t, unknown, or other
gtgaagcttcatggattttggtatattccctacactttgagggtggtatggaccttggagttagaggatataccatatgaaaacatagaagaagaccgctacaataagagtcttcaacttcttgaatacaacccagtatacaagaaaactccagtgcttgtccataatggaaaacccttatgtgagtccatgcttattgttgaatacattgatgagatttggtcacataaatcattacttnctgctgatccctacgagagagctcttgcaggttttgggttaaatatgctgatgataacatgtt

SEQ ID NO: 5592 - DNA, 450 bp, Glycine max
agcttcatggattttggtatagtccctacactttgagggtggtatggaccttagggttaaaggatataccatatcaaaacatagaagaagaccgctacaataagagtcttcaacttcttgaatacaacccagtatacaagaaaactccagtgcttgtccataatggaaaacccttatgtgagtccatgcttattgttgaatacattgatgagatttggtcacataattcattacttcctgctgatccctacgagagagctctggcaaggttttgggttaaatatgctgatgatgacatgttttctgcagttattgcattcttccttagcaataatgatgaagagcgagaaaagagcatagagaagatatgggagcatctcagggttgttgagaatcagtgttttggtgatcagaagaaattttttggcggagacattattaacattatgg

SEQ ID NO: 5593 - DNA, 385 bp, Glycine max
tgattgctgcctgctgatacctacgagagagctctggcaaggttttgggttagatgtgctgatgatgacatgtgtgctgcagttattgcatgctgccttagcaataatgattaatagcgagaaaagagcatagagaatatatgggagcatctcacggttgttgagaatcaatgttttggtgatcagaagaaattttttgggggagacattattaacattatggacatagctattgggtccatatataaaattcttggggttgcagaagatattattgactcgaatgtgctggaagattagaaattccctcacttgcattcatggtataataatttcaaggatgtagcacatattaaagaaaacctcccagaccatgagaaaatgg

SEQ ID NO: 5594 - DNA, 460 bp, Glycine max
cagaggtgaagcttcatggattgtggtatattccctacactttgagggtggtatggaccggaaagttcaaggatataccatatcaaaacatagaagaagaccgctactataagagcattcaacttcttgaatacaacccactatacaagaaaactgcagtgcttgtccataatggaaaacccttatgtgagtccatgcttattgctgaatacattgatgagatttggtcacataattcattacttactgctgatccctacgagagagctctggcaaggttctgggttaaatatgctgatgatgacatgttttctgcagttattgcattcttccttagcaataatgatgaagagcgagaaaagagcatagagaagatatgggagcatctcagggttgctgagaatcagtgttttggtgatcagaagaaattttttggtggagacattattaacattatgga

SEQ ID NO: 5595 - DNA, 434 bp, Glycine max
gtgaagcttcatggattttggtatagtccctacactttgagggtggtatggaccttaaagttaaaggatataccatatcaaaacatagaagaagaccgctacaataagagtcttcaacttcttgaatacaacccagtatacaagaaaactccagtgcttgtccataatggaaaacccttatgtgagtccatgcttattgttgaatacattgatgagatttggtcacataattcattacttcctgctgatccctacgagagagctctggcaaggttttgggttaaatatgctgatgatgacatgttttctgcagttattgcattcttccttagcaataatgatgaagagcgagaaaagagcatagagaagatatgggagcatctcagggttgttgagaatcagtgttttggtgatcagaagaaattttttggggg

SEQ ID NO: 5596 - DNA, 422 bp, Glycine max
gctcgtaccggaatctgcatttccgagccaggcgtccgcagaggtgaagcttcatggattttggtatagtccctacactttgagggtggtatggaccttaaagttaaaggatataccatatcaaaacatagaagaagaccgctacaataagagtcttcaacttcttgaatacaacccagtatacaagaaaactccagtgcttgtccataatggaaaacccttatgtgagtccatgcttattgttgaatacattgatgagatttggtcacataattcattacttgctgctgatccctacgagagagctctggcaaggttttgggttaaatatgctgatgatgacatgttttctgcagttattgcattcttccttagcaataatgatgaagagcgagaaaagagcatagagaagatatgggagc

SEQ ID NO: 5597 - DNA, 402 bp, Glycine max
cccacgcgtccgcccacgcgtccggcagaggtgaagcttcatggattttggtatagtgcgtacactttgagggtggtatggaccttaaagttaaaggatataccatatcaaaacatagaagaagaccgctacaataagagtcttcaacttcttgaatacaacccagtatacaagaaaactccagtgcttgtccataatggaaaacccttatgtgagtccatgcttattgttgaatacattgatgagatttggtcacataattcattacttcctgctgatccctacgagagagctctggcaaggttttgggttaaatatgctgatgatgacatgttttctgcagttattgcattcttccttagcaataatgatgaagagcgagaaaagagcatagagaagata

SEQ ID NO: 5598 - DNA, 436 bp, Glycine max
gaagcatcaagatttagccccaagcctgatataattttgcagaggtgtgatccaacataccaagcaacaaaattgcattttgaagacctagctaagagatatggcaatccaattattgttctgaatttgattaagacagttgagaagcggcctcgagaaatgatgttgaggcgtgaatttgcaaatgctgttgggtatctgaaccaaattctaccagtggagaaccatcttagatttattcactgggattttcacaagtttgcaaagagcaagtctgccaatgttttggcagttttaggagctgtagcaagtgaagcgcttgatttaactggtttttactacagtggtaaacccagcatcattaagagagccaacaagagcaatcaaacaagcacagggagggatacttcactgagagatctgaaagctagttctg

SEQ ID NO: 5599 - DNA, 440 bp, Glycine max
cccacgcgtccggttcaaaacaaggtttccatcaactggctactcgaccaaggtcccagcttaggtattgtccgagtgcatggggttgggcttttacacaccgagctagtgtctggaatccctgtaattttcttccagtttgtagccaacctcccagccttccatcaggtcctagttttcctatgcatcaaacatgtgccggttccacatgttaaagctaaggaacggtttctagttggtcgtattggtccaaaagagttcagaatctaccggtgcatagtgcgatacggataccatgacgttcacagagatgattttgagtttgagaatgatcttatatgcagcatagctgagttcatacgcacagaaagaaccgaatcgaactctccaaatgatgagcccctaaaggatgacagaatggcaattggaaggacatgttc

SEQ ID NO: 5600 - DNA, 366 bp, Glycine max
cccacgcgtccgatacccacctgaagcaaattatttatttctcggagattatgttgatcgtggtaagcagagcatagagacaatatgtttactcctcgcctacaagatcaaatacaaggagaatttctttcttctcaggggcaaccatgagtgtgcatccatcaatcgtatatatggtttctatgatgagtgtaagaggaggtttaatgttcgcctctggaagacatttactgattgctttaattgccttcctgtcgctgctctgatagatgagaagatcctttgcatgcatggtggactatcgcctgatcttaaacacttggatcagattcgaagtattgctcgtcctattgatgtgccagatca

SEQ ID NO: 5601 - DNA, 432 bp, Glycine max
acctggaaattttccttccctcaaacctaaaatggccaaggtggtgttccggttccccccaaagcacccctgagattcgttcgcaaaaagcttaataagaacaaaaaataaaaataatattcttcgttattatttcatttcaatttcgttttcgttttcgttttctgttttgatttgatcttccaatggcgtccgatggctttaccgacaagaacaccgtgttcagaaagctcaaggcgaagtctgaaaataagatgtgtttcgattgcaatgcgaagaaccctacctgggcgtccgtcacgtatgggatctttctctgcatcgattgctccgccgtacaccgcagtctcggcgtgcacatcagcttcgtgaggtctacaaatttagactcatggagtcctgagcaactaaaaacaatgagctttggaggaa

SEQ ID NO: 5602 - DNA, 448 bp, Glycine max
ctgcctgcaaattttcttcccctcaatctatattactcaggtggtgttcctgttcccctcaagcacccctgagattcattcccaaaaagcttaaaaaattctattcaattcaaattctaaatttaatttccatttcgttttcgttttctgttttgatttgatcttccaatggcgtccgatggcttcaccgacaagaacaccgtgttcagaaagctcaaggcgaagtccgaaaataagatgtgtttcgattgcaatgcgaagaaccctacctgggcgtccgtcacgtatgggatcttcctctgcatcgattgctccgccgttcaccgcagtctcggcgtgcacatcagcttcgtgaggtctacaaatttagactcatggagtcctgagcaactaaaaacgatgagctttggaggaaacaatcgtgcacatggtttctttaagcaacatg

SEQ ID NO: 5603 - DNA, 400 bp, Glycine max
aaagcttctctcgagtcagatattgagtgttttataagtgaaaagattatacttgccaacaaggtgatagtgaagcatgctgtcaccaaaataagagatggtgatgttcttctaacttttgggtcttcatctgctgttgaaatgatactattgcatgcacatgagttgggaagacagtttcgtgttgtggtagttgactctcgtccgaagcttagagggcaacttttacttcgccggcttgtggagaacggtcttagctgtacatacactcatataaatgctgtttcctacataatgcacgaagttactcgagtttttctgggtgcatcagcagttttgtctaatggaacagtatattcaagagtggggactgcatgtgttgcaatggttgctcatgcat

SEQ ID NO: 5604 - DNA, 389 bp, Glycine max
atttccggcgagttttcctctctcgaatctgcgagaccgacgaatctcgctcaccggaatttcgcattcagaaaatggctttaggtggaacagctcccccaagaggaagtgcagcggctactgcaagcatgaggagaaggagaacaaccggtggtgcggcctctggaggagcagctggaactatgctccaattttacacagatgatgcccctggactcaagatctccccaaatgttgttcttgtaatgagcattggcttcatagcatttgttgccatccttcatgtgatgggcaagctgtactttgtgcgtaaggaggcttagagaatagatcaagatgttaagtccaatttttttggattttcaatacacctctggtatgaaatttag

SEQ ID NO: 5605 - DNA, 394 bp, Glycine max
  modified_base (333)..(333): a, c, g, t, unknown, or other
ggagttctaaatttccggcgagtttccctctctcgaatctgcgacaccgacgaatctcactaagcggaacttcgcattcagaaaatggctttaggtggaacagctcccccgagaggaagtgcagcagctactgccagcatgaggagaaggagaacaaccggtggtgcggcctctggaggagcagctggaactatgctccaattttacactgatgatgcccctggactcaagatctccccaaatgtggttcttgtaatgagcattggctttatagcatttgttgccatccttcatgtgatgggcaagctgtactttgtgcgtagggaggcttangaaatagatcaagatgttaggtccatttttggattttcaatacacagtctctgatatgaaa

SEQ ID NO: 5606 - DNA, 418 bp, Glycine max
ctacgtctcatcgaataatttcagatctcgtcgatctgagctcaaaacaatggcgaaacgaaggtactctcgtcttccacctcgcaagtcatcgtcgtcttccacgctgattctgactctgttcctggtcttcaccttcctcgttctaattctcctggctctcggcatcctctccattcctagctcctcgcgtggaaatttgcccaaacctaacgatctcgcatccattgctcgcaacacaatccacacttccgacgatgacgacgtgaggggagagcagtgggttgaagtagtgtcgtgggagccgagagcctttgtctatcacaattttctgacgaaggaggaatgcgagtatctaattgacatagcaaagccaaatatgcataagtcatcagttgttgatagcgaaaccggaaag

SEQ ID NO: 5607 - DNA, 471 bp, Glycine max
ctcgtcttccacctcgcaagtcatcgtcgtcttccacgctgattctgactctgttcctggtcgtcacggtcctcgttctaattctcctggctctcggcatcctctccattcctagctcctcgcgtggaaatttgcccaaacctaacgatctcgcatccattgctcgcaacacaatccacacttccgacgatgacgacgtgaggggagagcagtgggttgaagtagtgtcgtgggagccgagagcctttgtctatcacaattttctgacgaaggaggaatgcgagtatctaattgacatagcaaagccaaatatgcataagtcatcagttgttgatagcgaaaccggaaagagtaaagacagcagagtacgtacaagctctggaacttttctggccagaggtcgggataagattgtcagggatattgagaaaagaattgctcactatagttttattcctgttgagcatggtg

SEQ ID NO: 5608 - DNA, 449 bp, Glycine max
cccacgcgtccgaagatcaccaacactttgctggtgccactctttctgacttctcttccaaggacacttcctccaccaaccttaaaaaaacagaggaaagccatgagtcgcagaaacgaaagtggtccaaagcttgacttgaagctgaacctgtccccaccgagggctgatcggagactggagtcaccgacacgatcggcgacggcgtcgccgacgtcaccgccgagctcgtgcgtgtcgtcggagctgaaccaagaggacaaaagttactctaacagccctgaagccacttccatggttcttgtgggttgccctcgctgcctcatgtatgtgatgctctctgaggatgatccaaagtgccccaaatgcaaaagcaccgttttgcttgattttctccatgacaccaaaaaccccaccataaggaggagttagactgatagagttatgat

SEQ ID NO: 5609 - DNA, 456 bp, Glycine max
  modified_base (448)..(448): a, c, g, t, unknown, or other
gtgaatttgaaattgaattagctggggcatgtgggtatggctctttggcactagacataagtggtgggcaccttgcagctggtgtggcttctctcttcaaagatggagcagtttgtggtgcctgctttcagataagatgcaagaacccaactctatgcagcaaagaaggtaccagagtggtattgactgatcttaatcacaataatcaaactgattttgtgctaagcagcagagcctttgcgggcatggctcaaaagggtatgggcaaacaaatattgaagcttggcattgctgacattgaatacaagagagtaccttgtgaatacaaaaaacagaatttagccgttcgtgttgaagaatcaagcaagaagccagaatacttagcaattaaatttttgtatcaagggggacaaacggagatagtagcccgtgatgtggctcaagttgngtcttcaa

SEQ ID NO: 5610 - DNA, 405 bp, Glycine max
atgaatcattagttagggtttattctccaagaaaagcaatgagtgcgtccaggttcatcaagtgtgtcactgtgggtgacggtgccgttggcaagacttgcatgctcatctcctacaccagcaacacttttcctacggactacgtgccaactgtctttgacaatttcagtgcaaatgtagttgtggatggaagcactgtgaatcttgggttgcgggatactgctggccaagaagattacaatagattaagacccttaagctatcgtggagcatatgtattcctgcttgctttctctctcatatgcagggctagctatgaaaatgttgccaagaaatggattcctgagttgaggcattatgctcctggtgttccaattattcttgttggaacataacttgatcttc

SEQ ID NO: 5611 - DNA, 391 bp, Glycine max
ccaaaccagggacccaaaacattgaggtagaacaactgaagaaccaacaagaggggtattgagattgagattcaagtaatggggaagagcaaggttcttgtggtggggggaactgggtacatagggaggaggatagtgagggcaagcctggcactgggccatgagacctatgtggttcagaggccagagttgagcctccagatagagaagctgcagaggctcctctccttcaagaagcaaggtgctcatctcattgaggcctctttcaatgatcacaagagccttgttgatgctgtgaagcacgttgatgttgtcatcagtgccatctctggtgttcacatcaggagccacagcatcactctgcaactcaaacttgttgaggccatcaaag

SEQ ID NO: 5612 - DNA, 407 bp, Glycine max
agaggaagggtagcatttgaggacatgatggctgtaaggaaagcactagaggaagctaatatccctttcacttagatctccgcaaacgctctttgctggatactttgctggcagcctctctcagatggggtcctttgtgccaccaacggacaaggtgcatctctttggagatggcacactcatagctatttttctggatgaagatgatgttgcaacatatacaatcaaggcaatagatgatccacgatcccttaacataacattgtacctaaagcctccagacaatattatctctcaagcatagcttattggaatttgggagagacttattggaaaggaactagagaagacatacatacctccagaacgctttctgacaacactgaaaaggttggattataaacttc

SEQ ID NO: 5613 - DNA, 436 bp, Glycine max
caatgaactaaaatgcgctattgaccacattttggatgcccagagaaaaggcgagatcaacgaagacaacgtcctttacattgttgaaaacattaatgtcgctgcaattgagacaactctatggtcgattgaatggggcattgctgagcttgtgaaccacccagagatccagcagaaggtgagggatgaaattgatagagttcttgaagcagggcaccaagtgactgagccagacatccaaaagctgccataccttcaagcagttgtgaaggaaactcttcggcttcgaatggcaatccctttccttgtcccacacatgaacctccacgatgcgaagcttggtggctatgacatcccagcagagagcaagatattggtgaatgcatggtggctggccaacaaccctgcacactggaagaagccagaggagttccgg

SEQ ID NO: 5614 - DNA, 432 bp, Glycine max
tgattcgtccacgacggagcagaaagcgccgccgccgaggcaatcaccggcggtggcgaggccgcagcaatggctgccgatgcagtaccctgcggcggcgatggtaatgccgcaccacatgttgccgcctcagcattacgcgccgccgccctacgtgcccttccaccaccaccaccaccatcaccagtacgcggcgccgcacgtgccgaaccaacatcagcagcagcagcagcatcaccaccatcagaacggatccggcggcgagaacaaaaccatctggatcggcgatttgcatcactggatggacgaaaactatctccatcgctgtttcgcttccaccggcgagatttcctccatcaaggttattcgcaataagcaaactggcttatcagagggttatggatttgtggagttctattcacatgctacagc

SEQ ID NO: 5615 - DNA, 446 bp, Glycine max
cccacgcgtccgcccacgcgtccggaaattgggcgtgtgggagttgttgaatcgggaagcagaaaaaatgagaatccatcacatagcatgcctccaagacaattattcctatctgatcgtagacgagagcacgaaggaagccgcggcggtggacccggtcgaaccggagaaggttcttgaagttgccagctcgcacggcctcactctcaaattcgtcctcaccacccaccatcactgggatcatgctggtggaaacgacaagataaagcagctggtgccaggaatcaaagtctatggtggttccattgaaaacgtcaagggttgcactgacaaagttgaaaacggtgataaggtctctcttggagctgaaatcactatattggcccttcacactccttgccacacacaaggtcatataagttactatgttactggcaaagaggatg

SEQ ID NO: 5616 - DNA, 364 bp, Glycine max
ctctctctctctctctctctctcttcacgttcgatctttcgcttctgaatctccaacgatggtgctcgaggcgactatgatctgtattgacaattcggaatggatgcgtaacggggattactctccttctcgatttcaagcccaaacagacgccgtcaatcttatttgcggtgctaaaacccagtctaatccagaaaatacggtgggagttctcacgatggcggggaagggcgttcgtgttttggtgacccctaccagtgatctgggcaagatcttagcttgcatgcatggactagaaataggcggtgagatgaatctagctgctggcattcaggttgcacaattggctcttaagcatcggcag

SEQ ID NO: 5617 - DNA, 405 bp, Glycine max
  modified_base (338)..(338): a, c, g, t, unknown, or other
tttttgtattgtttctatttttatctttattttgttttggactaaaatttggtaaaacttagtttacattgcacactgtattgtgaaaacactcataccgctagatcttaaattttgggattctgctaggtgtggacattgcaaaagtcttgctcctgtaagtatatctttgaggttccttgttatcaatttaaggttgggacctttaattttcataaaaccaatattgtggaacctgactatgctcttttttccctccagacttacgagaaagttgccacagcatttaaattggaggaagatgtagtaattgcaaatctggatgctgataaatatanggatctggctgaaaagtacgacgtgagtggatttcctaccttgaagttcttcccaaagggcaacaaa

SEQ ID NO: 5618 - DNA, 394 bp, Glycine max
gaagaagaagatggagaagtatcagatctggagcaggagaatagcgttggcagcgtttgcgtttgctctgctgttccaatcggcctcagcagacgacgtcgttgtgctctctgaagataacttcgagaaggaagttggtcaggacagaggagctctcgttgagttctatgctccttggtgtggacactgcaaaaagcttgctccagaatatgaaaagcttggtagcagcttcaagaaagccaaatctgttttaattggcaaggttgactgtgatgagcataagagtttgtgcagcaagtatggagtctctgggtacccaacatttcaatggtttccaaaaaggatctcttgaaacccaaaaagtatgaagggccacgcactgctgaatcacttg

SEQ ID NO: 5619 - DNA, 463 bp, Glycine max
gaagtatcagatctggagcaggagaatagcgttggcagcgtttgcgtttgctctgctgttcgaatcggcctcagcagacgacgtcgttgtgctctctgaagataacttcgagaaggaagttggtcaggacagaggagctctcgttgagttctatgctccttggtgtggacactgcaaaaagcttgctccagaatatgaaaagcttggtagcagcttcaagaaagccaaatctgttttaattggcaaggttgactgtgatgagcataagagtttgtgcagcaagtatggagtctctgggtacccaacaattcagtggtttccaaaaggatctcttgaagccaaaaagtatgaagggccacgcactgctgaatcacttgttgagtttgtgaatacggaaggaggaacgaatgtaaagattgctacagtttcctttcatgtagtggtgcttacacctgaaaatttt

SEQ ID NO: 5620 - DNA, 400 bp, Glycine max
  modified_base (369)..(369): a, c, g, t, unknown, or other
agaagacgaacatggagatgtatcagatctggagcatgagaatagcgttgagagcgtgcgcggttgttctgctctggctatcggcctcagcagacgacgtcgttgtgctctctgaagataacttcgagaacgaagttggtcatgacagatgagctctcgttgagttctatgctccttggtgtggacactgcaaaaagcttgctccagaatatgaaaagcttggtagcagcttcaataaagccaaatctgttttaatcggcaaggttgactgtgatgagcacaagagtttgtgcagcaaatatggagtctctgggtacccaacaattcagtggtttccaaaaggatctcttgaacccaaaaagtatgaanggtcacgcactgctgattcactagctgagtt

SEQ ID NO: 5621 - DNA, 394 bp, Glycine max
cccacgcgtccggatgtatcagatctggagcaggagaatagcgttgggagcgttcgcgtgtgttctgcttttcctatcggcctcagcagacgacgtcgttgtgctctctgaagataacttcgagaaggaagttggtcaggacagaggagctctcgttgagttctatgctccttggtgtggacactgcaaaaagcttgctccagaatatgaaaagcttggtagcagcttcaagaaagccaaatctgttttaatcggcaaggttgactgtgatgagcacaagagtttgtgcagcaaatatggagtctctgggtacccaacaattcagtggtttccaaaaggatctcttgaacccaaaaagtatgaagggccacgcactgctgattcacttgctgag

SEQ ID NO: 5622 - DNA, 435 bp, Glycine max
caaatatggagtctctgggtacccaacaattcagtggtttccaaaaggatctctggaaccgaaaaagtatgaaggggcgcgcactgctgattcacttgctgagtttgtaaatacggaaggaggaacaaatgtgaagattgctacagctccttccaatgtagtggtgcttacatctgaaaattttaatgaggttgtcttagatgaaaccaaagatgtcttggttgagttttatgcaccctggtgtggacattgcaaaagtcttgctcctacttacgagaaagttgccacagcatttaaattggaggaagatgtagtaattgcaaatctggatgctgataaatataaggatctggctgaaaagtatgatgtgagtggatttcctaccttgaagttcttcccaaagggcaacaaagctggtgaagagtacggaggtgg

SEQ ID NO: 5623 - DNA, 348 bp, Glycine max
cccacgcgtccgcccacgcgtccgcccacgcgtccgcagaggagctctcgttgagttctatgctccttggtgtggacactgcaaaaagcttgctccagaatatgaaaagcttggtagcagcttcaagaaagccaaatctgttttaatcggcaaggttgactgtgatgagcacaagaattttgtgcagcaaatatggagtctctgggtacccaacaattcagtggtttccaaaaggatctcttgaacccaaaaagtatgaagggccacgcactgctgattcacttgctgagtttgtaaatacggaaggaggtactgcttgagcttttgaaacctttgtgcttaatttct

SEQ ID NO: 5624 - DNA, 424 bp, Glycine max
gaagatggagatgtatcagatctggagcaggagaatagcgttgggagcgttcgcgtttggtcggcttttcctatcggcctcagcagacgacgtcgttgtgctctctgaagataacttcgagaaggaagttggtcaggacagaggagctctcgttgagttctatgctccttggtgtggacactgcaaaaagcttgctccagaatatgaaaagcttggtagcagcttcaagaaagccaaatctgttttaatcggcaaggttgactgtgatgagcacaagagtttgtgcagcaaatatggagtctctgggtacccaacaattcagtggtttccaaaaggatctcttgaacccaaaaagtatgaaaggccacgcactgctgattcacttgctgaatttgtaaatacggaatgaggaacaaatgtgaag

SEQ ID NO: 5625 - DNA, 390 bp, Glycine max
cccacgcgtccggtacggaggtggaagagacttggatgactttgtggcttttatcaatgggaaagctggaacaagtcgagatgtaaaaggacaacttacttcccaagctggtatagtagaaagcttggatgtcttggttaaggagtttgtagctgccagcgatgaagagaagaaattcgtgtttacccgaatggaagaggaagttgagaagctgaagggttctgcctcaaggcacgggaagatttacttgaaagctgccaagaattacttggaaaaaggttctgattatgctaagaacgaaatccagcgcctacagcgcatacttgacaagtccattagtcctgccaaagccgacgagttaactctaaaggaaaatatcttgtcgacata

SEQ ID NO: 5626 - DNA, 327 bp, Glycine max
cccacgcgtccgcccacgcgtccgtttttccctttaataggcaaggagattcatatatcatggatgggacaaaatggtggacaagtggtgctatggatccaagatgtagaattctgatagtcatggggaaaactgacttcaatgcagtgaagcataaacagcaatctatgatcttagtggatgtccagactcctggcgttcacataaagagaccattgacagtgtttggctttgatgatgcaccgcatgggcatgcagaagtaacatttgaaaatgtttgtgtgcccgcaaaaaacatcatacttggcgaaggacgtggatttgaga

SEQ ID NO: 5627 - DNA, 435 bp, Glycine max
ttccattctctctctatctgttcaatcttctctcccttctacttctagggtttagcttcggcatcggacatgtcttcttcaactcatcacagttgactttactagcgaattcaatcaggcttgagaaggtatcctgatgtttcttgttcaccatcatatccatgatggaatactgtaaagatgtcctcagctatcttgattctgatacatctattaagatactcatgtctctggatgatctggctgaccttgttcgggccacctgtgtctcgcgctcttggagagacattgtgattgcaaatggtctttgcaagcagctgtgcttgagaatgtttcctcagttatctagagttgcttttgttgttgaactgaatcaaaatggagcgaatgaacatgcagaggttggatctagctattctatggaatggctatctc

SEQ ID NO: 5628 - DNA, 451 bp, Glycine max
cccacgcgtccggtgttggagaatgaaaactgtaacagagccaaatgaaaccgagtcagatgggagcgagttgactcgcgagtgcctcatcaacatcctctctcgactcagcgtcgaggatcgatggcgcggcaccatgctcgtttgcaagtcatggttcagcgtcttcaaggaaccctctcttcacttcgtcttcaacctcgaccctcaattcgactcgcccaccgaatcaactcgctggtggacccccgagttcgaggccaagatcgataacatgcttcgatctgtcgtcgaatgggcccaatcctctctcacccatatacgcattcgccactgttctgatcgttctctcgccctcgtcgcccaaagttgcccaaaccttgaggtgttgtttatcagaagctgtcctcgtgttaccgatgattctatctctaggatagctttgagttgt

SEQ ID NO: 5629 - DNA, 446 bp, Glycine max
ctctctctcgatctgggtactaaccctaacccgcttcgaaccgtggcttcctcaggctcgcagaacctctctcgaagaaaaccttcttcttcttcgtcttcgtcttctcaacaaacacccgggtcgacccggatcgtttaccgagaatctcggatcccatcggaatccgatttcccgatctggcagcagaactggttcatcgcattgctcttcgtcatggctctcggattcttcgccctcgccattttcctcttcctcactctcgactctgacatcgctccttcttccaccgcctccgcctccgcctccgccgcttcctccgaaggcgtcgaggtgcaggttacttacggcacggttctgaagcttatgcacgagaagaccaaatttcggttgcattctcatgacgtgccctacggttctggcagtggacaacaatcggttactgg

SEQ ID NO: 5630 - DNA, 468 bp, Glycine max
ggagaaagggtgggtattgcttcacacaaacacaacagtgtctgctgcacctggcgaatggtggcgctatcaacatggtttcgctacattgcccacaagctcgaatactccttctccctcagctggaagaactacaaaggaggtcaaattacagacagagaggtacgtgatgttgtttggaaaaacttctttcaaggaaagctgacgtacttgcactggaataaaggagaggagatggcccctactattgatggaaaagcagtaactcttgttcggaaattaccagttgtagacccaacgtaatttcacacactccttttgtgcaaatctattgactgttattgttagttgtttggcgtgtttttgtaggagatgttgcggttgtgaaggaccctgagaagccagataactacctactcagaagattaactgcaattgaaggctatgaaatgggttctacttgatgaa

SEQ ID NO: 5631 - DNA, 434 bp, Glycine max
cccacgcgtccgtggagctgaatatggctgtggaagctctagagattgggctgccaagggtccaatgctactgggagtcaaagctgtgatagccaagagtttcgagagaattcatcgtagtaacttggtaggaatgggtatcattcctctttgcttcaaacccggtgaggatgcggacacattgggattaactggtcatgaacgttattcaattgacctaccaagtaaaatcagtgagattaggcctggccaagatgtgacagtcacaaccgataatggaaaatctttcacctgcacagtacgctttgacactgaagtcgaacttgattacttcaaccatggaggcatacttccatatgtcataaggaacctcattaagcagtgaaggccattgtcgatggaaaaattccaggtcattgtcccaatatgctttt

SEQ ID NO: 5632 - DNA, 431 bp, Glycine max
ggtccaatgctactgggagtcaaagctgtgatagccaagagtttcgagagaattcatcgcaggaacttggtaggaatgggtatcattcctctttgcttcaaacccggtgaggatgcggacacattgggattaactggtcatgaacgttatacaattgaactaccaagtattatcaatgagattaggcctggccaagatgtgacagtcacaaccgataatggaaaatctttcacttgcacagcacgctttgacactgaagtcgaacttgcttacttcaaccacggaggcatacttccatatgtcataaggaacctcattaagcagtgaagccatagccgattgaaaattccaaggtcattgttcccatatgcttttaaagttgtaaaatgtgagaataattttctgagagataggaaaagatcccttttttt

SEQ ID NO: 5633 - DNA, 379 bp, Glycine max
  modified_base (280)..(280): a, c, g, t, unknown, or other
agaacatcaacgactacaactaccaaaccttgaaggacaacgtggacatgttggagctgagccaattaggtctgactttctccgacgagaatggtaacctccctacctgcggcacggagagcacctgcatctggcaattcaacttccgcgagttcaacatcagcgaagacatcttcgcgagcgactcgatcgagttgctgcgccagtgcgggatcgacttcaagaagaacagcgagaaagggatcgacgtgaaccggttcggggagctcctcatgtcctncgggatcgtcgtgaacgacgccgtgcactgggttaccttccacagcgggtacgatttcgggtaccctctgaagctgttgacatgccggagcttgccgga

SEQ ID NO: 5634 - DNA, 437 bp, Glycine max
gaagaattgaattcgaaaaatcgtagcgtagcgttggttgcgattgaaacggtacggtgggaagaggaaaattcaagagcaagcccaccggtcgccgccagttctccaccccggaagatatgcttgctggaacctctaaccgtcctcgaacttttagacagaaagaagctgagcatgaagaggagcctgaggaagtatctggggatgaatctggagaagaatcagaagaggaaacttctaagaaaaaaggaacacaaggagttattgagattgaaaatcctaacttggtaaagccaaagagcttgaaagctagagatgttgatgttggaaaaacaacagaactttcaaggcgtgaaagagaggagatagagaaacagagagcccatgagcgctatatgaggctgcaagagcaaggaaaaacagaacaagcaaagaaa

SEQ ID NO: 5635 - DNA, 362 bp, Glycine max
ttctattcctcactcaagggatgcgtcggaacagccctgcatactacagtcctccgcggcgaggatacggcggtggtggccgaggaggaggaggaggaggaggaggaggagggtccggcaggagggggttcggtggaggcaggcgcagggacagcaatgggagcctcttggttcgtaacattcccctcgattgcagacccgaggagcttcgcgtccctttcgagcgatttggacctgttcgtgacgtttacatacccaaggattattactctggagaacctcgaggctttgcctttgtgcaatttgtggatccttatgatgcctcagaggcacaataccatatgaacagacagatttttgct

SEQ ID NO: 5636 - DNA, 370 bp, Glycine max
cccacgcgtccggaagaacgaatcgaataaagaaagatcatggcgatggcaaacttggctcgacggaagggttacgccgtcgttttgtcgtcgaggtcgtcgctttgtctgacaaggtggagggggttcgcgtccggatctgacgaaaacgacgtcgtggtcatcggcggcggtcccggcggctacgtggcggccattaaagcggcgcagctgggtctgaaaaccacttgcatcgaaaaacgtggcactctcggcggtacctgcctcaacgtcggatgcatcccttccaaggcacttttgcattcttcccacatgtatcatgaggctaaacatgcatttgccaaccatggggtcaagttttcatctgtcg

SEQ ID NO: 5637 - DNA, 439 bp, Glycine max
ctcttctcttcgctcctgcacttgttgtttctttgcccttcatggcatctcaagctagccttgtccttcaaaagcagctcaaagatctttgcaaaaaccccgtcgacggcttctctgccggtttggtcgatgaaaccaacatttttgaatggagtgtcaccataattgggccgcccgatactctctacgaggggggatttttcaatgctattatgagtttcccatccaattacccaaatagtccaccttcagtgaagttcacctcagagatatggcaccccaatgtatatcctgatggccgggtttgcatatcaattcttcatcctcctggtgaggatccaaatggttatgagcttgcaagtgagcgctggacacctgttcatactgtagagagtatagtattgagtatcatatcaatgctttccagccctaatgatga

SEQ ID NO: 5638 - DNA, 431 bp, Glycine max
acccacgcgtccgccctcgcgtccgctcgcttacaaagccggttcctccatctacacgcgcttcatcgcgctgggcgggttcgaaaacggtgtcgttcccgaaaccgttctcgccctaacaccccaacagcttcgccagattggggtttctgggcggaaggcgagttaccttcatgatttggcgaggaagtatcagaacgggatactctccgattccgccattgtgaacatggatgataagtcgctctttaccatgctcaccatggtcaatggcattggctcttggtctgttcacatgttcatgattttctcactccacagacccgatgttctccccatcaatgaccttggcgtcaggaaaggagttcagcttctctacaaccttcaggacttaccccggcccttgcagatggaccagttgtgtgacaagt

SEQ ID NO: 5639 - DNA, 226 bp, Glycine max
gcgtccaaaaggaaatggctgaagcacaactacgagaccagcatggcaaccctgtcccactcaccgatcaatacggtaatccggttatcttaactgacgagcgcggtaatcccgtccaactcactggtgtcgctaccaccgctaccggcacagcaggttctgggtttgggtcctatggtatcggtgcttaccgtggtggtgcaagtgcaaccaccgttgcagatct

SEQ ID NO: 5640 - DNA, 344 bp, Glycine max
gaaggaaatggctgaagcacaactacgagaccagcatggcaaccctgtcccactcaccgatcaatacggtaatccggttatcttaactgacgagcgcggtaatcccgtccaactcactggtgtcgctaccaccgctaccggcacagcaggttctgggtttgggtcctatggtaccggtgcttacggtggtggtgcaagtgcaaccaccgttgcagatcttttggcaacccaaccaaggagtggcagggaggctatagagcttcgtcgttcctccagttcaagctctagctcgttttggatgaatgttttatagtctgaggatgatgggcaagggtggaggagga

SEQ ID NO: 5641 - DNA, 351 bp, Glycine max
ggaaatggctgaagcacaactacgagaccagcatggcaaccctgtcccactcaccgatcaatacggtaatccggttatcttaactgacgagcgcggtaatcccgtccaactcactggtgtcgctaccaccgctaccggcacagcaaggtctgggtttgggtcctatggtaccggtgcttacggtggtggtgcaagtgcaaccaccgttgcagatcttttggcaacccaaccaaggagtggcagggaggctagagagcttcgtcgttcctccagttcaagctctagctcgtctgaggatgatgggcaaggtgggaggaggaagaagggagtgaagggttaaattaaaggaga

SEQ ID NO: 5642 - DNA, 418 bp, Glycine max
ggaaatggctgaagcacaactacgagaccagcatggcaaccctgtcccactcaccgatgaatacggtaatccggttatcttaactgacgagcgcggtaatcccgtccaactcactggtgtcgctaccaccgctaccggcacagcaggttctgggtttgggtcctatggtaccggtgcttacggtggtggtgcaagtgcaaccaccgttgcagatcttttggcaacccaaccaaggagtggcagggaggctagagagcttcgtcgttcctccagttcaagctctagctcgtctgaggatgatgggcaaggtgggaggaggaagaaaggagtgaaggataaaataaaagagaaactaccaggggtaggaggagggaataataataaggagcatgcacacacaacaactgctccaaccacc

SEQ ID NO: 5643 - DNA, 361 bp, Glycine max
ctgaagcacaactacgagaccagcatggcaaccctgtcccactcaccgatcaatacggtaatccggttatcttaactgacgagcgcggtaatcccgtccaactcactggtgtcgctaccaccgctaccggcacagcaggttctgggtttgggtcctatggtaccggtgcttactgtggtggtgcaagtgcaaccaccgttgcagatcttttggcatcccaaccaaggagtggcatggaggctagagagcttcgtcgttcctccagttcaagctctagctcgtctgaagatgatgggcaaggtgggaggaggaagaaaggagtgaaggattaaatatatgagaactaccaagggtaggagga

SEQ ID NO: 5644 - DNA, 300 bp, Glycine max
  modified_base (106)..(106): a, c, g, t, unknown, or other
ggaaatggctgaagcacaactacgagaccagcatggcaaccctgtcccactcaccgatcgatacggtaatccggttatcttaactgacgagcgcggtaatcccgtncaactcaatgggggcggttccaacggttcccggaccagaaggtcctgggttggggtcctatggtcccggtgcttacggtggtggtgcaagtgcaaccaccgttgcagatcttttggcaacccaaccaaggagtggcagggaggctagagagcttcgtcgttcctccagttcaagctctagctcgtctgaggata

SEQ ID NO: 5645 - DNA, 416 bp, Glycine max
gacaacgcgtcagctaactagctgagcagacggaggagaactcgactgaagctgcctctgcgacgccgtttcgattcagcctcagacatttccgttgcagtcatggtgcaagaaaatggcaagaggaagaaaccaaacattctggtgactggcacaccggggacaggaaagacaactgtgtgcactgctctagctgaagccacccagctctgccacatcaatgtcggagaattagtcaaagaaaagaacttgcatgatggatgggatgatgagcttgattgttaccttcttaatgaagacttggtttgtgatgaacttgaggatgttatggaagaggggggaaacattgtggactaccatggctgtgatttctttcctgagcgttggtttgattgcgtggttgtacttcaaactga

SEQ ID NO: 5646 - DNA, 333 bp, Glycine max
tcatggtgcgggaaaatggcaagaggaagaaaccaaacattctggtgactggcacaccggggacaggaaagacaactgtgtgcactgctctagctgaagccacccagctctgccacatcaatgtcggagaattagtcaaagaaaagaacttgcatgatggatgggatgatgagcttgattgttaccttcttaatgaagacttggtttgtgatgaacttgaggatgttatggaagaggggggaaacattgtggactaccatggctgtgatttctttcctgagcgttggtttgattgcgtggttgtacttcaaactgataacaccattttgtatg

SEQ ID NO: 5647 - DNA, 375 bp, Glycine max
gacgtgagagagattgagaagtgtgctcatagcggatcaagaaattctccgctatatgtacacactttaactgagtttgtgaagacatataattactagctactaaaagatggccacagttggaaggaacgcagcatcttcctagctgtttcttaacttgatcatgtattctattgacctaggcttagctagtatggtgcctgaacaaggacatcaatggccaaacttaccaccctagctttgctggaaatggtgcatctatgtattgctaaatcttctacatactagcatccgatgagggcatagtgatcaagcttttgggtgcgcatcacatgatgacatggacgaatgacagtttagcatctgcaggagcca

SEQ ID NO: 5648 - DNA, 437 bp, Glycine max
gagagattgccaagtcaaaatcggtgcacgaaattctccactttatctaaggcaattcggggagtttgtgaagacagataatcactagctactcaaaaatggctcacagtaggaaggaacgttgcagctcctttgatgttacttaactagatcatctattttattgttcttggcttcgctagttgatgcctcaacacgatcatctatggccaaacttaccaccctagtttaggttgaaatagtgcaaccatgtctttcttaaccttatctatactaacagctgttctgggcatcatgtacaaacttgtgggtcggaatcacatgacgacattgaagagtgacagtttagcatttgctggagccacatcaatggatgcttgttcaggcacagctctagcattatggatggcttagaagcaaatacacttatgatggca

SEQ ID NO: 5649 - DNA, 425 bp, Glycine max
gagattgtgaagtagaaatcggtgcaagaaattctccactttatctaaaaaaattcggtgagggtgtgaagacaaaaaatcactagctactcaaaaatggccacagtaggaaggaacgttgcagctcctttgctgtttcttaacttgatcatgtattttattgttcttggctttgctagttggtgcctcaacaggttcatcaatggccaaacttaccaccctagttttggtggaaatggtgcaaccatgtttttcttaaccttctccatactagcagctgttctgggcatcgtgtccaaacttttgggtgggaatcacatgaggacatggaggagtgacagtttagcatctgcaggagccacatcaatggttgcttgggcagtcacagctctagcatttgggttggcttgcaagcaaatacactt

SEQ ID NO: 5650 - DNA, 446 bp, Glycine max
  modified_base (378)..(378): a, c, g, t, unknown, or other
ctttcttctaaaccctatggccgacgaagccaaagccaaaggcaacgcagccttctcctgcggggactatcctgccgccatccaccacttctccgatgccatcgccctggctccctccaaccatgtcctctattccaaccgatccgccgcatacgcctccctcaaaaactacgcagatgcattagcggatgccaaaaagacagttgaactcaagcccgactggtccaagggttacagccgtctcggtgccgcgcatcttggcctttcccaatacgatgatgctattttggcttacaaaaggggtctcgaaatcgaccctcacaacgagccccttaagtctggtttggcagatgcgcagaaggccttggccgcggcctncaggcctcgcccctcggcctctaaccccttcggtgatgctttctctgggcctgagatgtgggcccgtc

SEQ ID NO: 5651 - DNA, 334 bp, Glycine max
tctaaaccctatggccgacgaagccaaagccaaaggcaacgcagccttctcctccggggacgatcctgccgccatccaccacttctccgatgccatcgccctggctccctccaaccatgtcctctattccaaccgatccgccgcatacgccttcctcaaaaactacgcagatgcattagcggatgccaaaaagacagttgaactcaagcccgactggtccaagggttacagccgtctcggtgccgcgcatcttggcctttcccaatacgatgatgctattttggcttacaaaaggggtctcgaaatcgaccctcacaacgagccccttaagtct

SEQ ID NO: 5652 - DNA, 481 bp, Glycine max
cccacgcgtccgaacaatggcgtctctctctcacctcaacaaactcctctgcatgcccccgcgcgactctggaccctctatttcgccaccacgcagcagcgtcggaatttggaccaaacctgtcggaaggccgaggctactggtgcgtgtccgagcggtcacgagcgacgacgagtgggggccggagaaggaggaggcgtacggcggcggcgtagcggtggaggagaaaccgacgaagtcggagacggagacggagaagctgaagaaggccttggtggattcggtttatggcaccgatcgtggactgaaagcaacgagcgaaacgagagcggagatcgttgaactcatcacacagctcgaggccaagaaccctaaccctgttcccaacgacgccttgactcttcttaacggaaaatggattctcgcgtatacatactttgcaagtttattcccattggtgacaagtgggacactaccattg

SEQ ID NO: 5653 - DNA, 397 bp, Glycine max
agcccacgcgtccgcccacgcgtccgcccacgcgtccgcgattatccgaaatacctgctaagcagttggaaaatgataaatctgagcagaaaaaaattgttattagacctaggcctaataaaaacagtttgaatgatgctaacggagttgggaggaaaggaaaccctttaagaagtgtggaagaaaggaaggaggaatatgaccgggcacgggcacgtatctttagtagccctagaagctctgaatcaggtgatacctcatccgtggttccaatggatgggagatattcttctactagcaaggatgagaatgaaactagcaagaaccccatggctgattcagaaagatatatcagtaccagggatagttgttcgactcgagttgccatactcagaga

SEQ ID NO: 5654 - DNA, 438 bp, Glycine max
gttgggttgagttgggtttggattggatttctaatctaatctatacctttctttttcctattgttttaaggcacaaatccttctgccttctctcttctttcttcttcttctcctgacccttattattattccttgcccttaccctttaggcaagggaaggaagaaagaataactatattattatctttattgtaatctatctttttattataattataattataattattgttgttattattccttaaatatggattcgccgtgtctctccaacgattcggtttctggattcaaagacaaggagtcaatggttgacccctttttggtcgaagctctccagaaccctcgtcaccggcttaccattttgaggatggagctggagatccaaaagttttgaataatgctgatcagctgcatttgagtttcatcaattccctt

SEQ ID NO: 5655 - DNA, 439 bp, Glycine max
gaagttgttgggttgagttggattggatttctaatctaatctatacctttcttttttcgtatgcttttaaggcacaaacccttctttcttccctcttctttcttcttcttattgttattccttgcctttaccctttagggaaggaagaaggaacaactatactactattatccttattattgttattattgtaattaatctttttattatagttattgttgttgttattattcctcaaatatggattcgttgtgcctctccaacgactcagttgtttctggattcaaagacaaggagtcaatggttgacccctttttggtcgaggctctccagaaccctcgtcaccggctcaccattttgaggatggaactggacatccagaagtttttgaataatgctgatcagcagcattttgagtttcaacatttcccttcttcct

SEQ ID NO: 5656 - DNA, 417 bp, Glycine max
tggagatccagaagttctcgaataatgctgatcagctgcattttgagtttcatcatttgccttcttcctatctccgactggctgcacaccgtgttgctcaacactacaacatgcaaacaatggttcaagataatggcttagatggccagggaagtaaaattctggttaggaagttacctgaaagcaagtaccctgtagttcgattatccgaaatacctgctaatcagttggaaaatgataaatctgagcagaaaaaaattgttattagacctaggcctaatataaacagtttgaatgatgctaacggagttgggaggaaaggaaaccctttaagaagtgtggaagaaaggaaagaggaatatgaccgtgcacgggcacgtatctttagtagccctagaagctctgaatcacgtgata

SEQ ID NO: 5657 - DNA, 397 bp, Glycine max
ccggtaaagtggacgggagaggccggttgccgcttccgccatttacttcctcaacctccgcggcgacgttctcatcaaccgcctctatcgcgacgatgtcgggggaaatatggtggatgcttttaggacgcatattatgcaaacgaaggagcttggtacttgcccagtgaggcagattggtggatgctctttcttttacatgaggatcagtaatgtctacattgtcattgttgtcagcaacaacgccaatgtcgcttgcgctttcaagtttgatgttgaggctgttgcattgatccgatcatactatggtggagcttttgacgaggatgcaattcgcaataaattttgtactcatttatgagcccctagatggaactatgggacttggttacccaca

SEQ ID NO: 5658 - DNA, 473 bp, Glycine max
gtgagatgggtatgtcatggctgtgctgctgagaatggctcagcctcacaatggcagcaccagcaacacttcaaaccagcaattggtactccatgactttctgggtatgaggcccgccgccgattcccccaaaaccgccgatgtcaggttaccggagccttcggcctccgcctcttccaccggaggacgcggccccttctccgccacctccgacatcgcttccgaaaaacaggtacgaaatcatctcgagggagtttcattctatggcccgaggagtgatttttctggcactgagataagcaacagattagtgtgaagcaagagatgtaattctgattccacttttatgggttcctccagagatgccttccaattggtccctgattcctttcaagactcacatttgatgaaggttctccggaatgcagctggaggagaaagggctataagcccaatgatgatgcagtgttact

SEQ ID NO: 5659 - DNA, 405 bp, Glycine max
cccacgcgtccgcccacgcgtccggttgatttgagagcattggctaggcacactcaagggttcagtggtgctgatattacagaaatatgccagcgagcatgcaaatatgccataagagaaaacatagagaaggacattgagcgagagaggaagagtagggaaaaccctgaggccatggatgaagataccgtcgacgacgaagttgcggagatcaaggctgctcattttgaggagtcaatgaagtttgcacggaggagtgttagtgatgctgatattcgcaagtatcaagcatttgctcagaccttacagcaatcaagagggtttggaagtgaatttaggtttccagagtctggagataggactactactggatctgacccctttgcagcttctgctggtggggct

SEQ ID NO: 5660 - DNA, 392 bp, Glycine max
  modified_base (110)..(110): a, c, g, t, unknown, or other
ggaattcaatgaggtggatcatctgttcaagcatcggattaatagcagtgtattacatgctagtaactatatcaagcaatttccttcgcctatcatatctatcattgcanaattcatctcatttgtatcgggtggctttgctgcaattctgatcatcattgcttttctagaggagtctctgctggagggtcatatatttggtcggaacttgttctggtatgctgctgtttttggaactataactgctattagacgggcttcaattacagatgagcttctagtcatagaccccgaaggagcaatgtcaatggtagttgagcatacacattatatgcccaagagatggcggggaaaagaaagtactgaaatggtccggatggagtttgaaacct

SEQ ID NO: 5661 - DNA, 445 bp, Glycine max
  modified_base (389)..(389): a, c, g, t, unknown, or other
ttttcattttctaatctctctctctcccacctttcacactctgtttttcctctggctttctgaggcttctcaacacaaaatacacccttctacatggcgactgaagctgagttcgaatatgaagaggcgagtgaagctgagatcaaatatgatgaggaatacgtacagaattctcgaggcttgaagctttttgcatgccgatggcttccggcgaatggaagtccaaaagcgttaatcttcctgtgccatggctacgccatggaatgcagcatcacaatgaaaagcacaggaacaaggctcgcaaaagcgggttttgcagtgtatgggattgattatgaagggcatggaaaatcagaaagagttcctggccttgttatgaattatgattntgtcatcgacgattgctcccaacatttcactagaatttgtgaaaaagcagagaaca

SEQ ID NO: 5662 - DNA, 332 bp, Glycine max
ggaaaaaaaaagaaggaaatgcttccgagattgttattaagtcacaagcacttcaacagcttcaaatcaatttaccccttttcaggaaactatgtattttgaaaggtgtaactccccgggagcccaagaaaaagttcaagggaactcatcaaacttattaccatgtcaaggatgtttccttccttcatcacgagcctttggttgaaatacatagagcgataagagtgcatgagagaaaaattaagaaagccgaggcaaagaaaaaccttgaacgtgctaacaggcttcgcgagaaaacacccaaaccgaagatcgctaggattattcggcag

SEQ ID NO: 5663 - DNA, 315 bp, Glycine max
ggagagcgcctgaaaatcggaggcgtggaagtggggagaaagatgagcgaggggatgagctccatgagtttcaagctcaaggagttcttccagcctgggcccaatcaggccgacaagcttgtggaggacgctacttccgaggccctggacgagcccgaatgggccctcaatctcgatctctgcgacctcgtcaacaccgacaagctcaactgcgtcgaactcgtccgcggaatcaagaagcggatcattctcaagagccctagggttcagtacctcgcccttgtccttctcgaaaccctagtcaagaactgcgag

SEQ ID NO: 5664 - DNA, 409 bp, Glycine max
aattccggtcgaccacgcggcggggatatcgtgtctgctggagtatatcgtgtctttgggtcagaaatagctgagcttccattgggtgctacgactgctgatcatcaaggacagggttattttcagtgcctgttatcttgtattgagacgctacttggatctttaaatgtgaaaaaccttgttctaccatctgccgatgaaactgattcaataggactggtgaatttgggtttacaaagctaccccaagatgagataaacaaatataagaaattatatcgcatgatgatatttcaagggacctcaattgtacagaatcctgtttctgaaacactctgagctactttctagctggagtttgtgtaaagtttttttgtatgccccttatgcaatatactattttcttggtt

SEQ ID NO: 5665 - DNA, 439 bp, Glycine max
cccacgcgtccgcggggagaatgtgctcttaatgattcagactgtgtgataactattgatgacatttataaatggcttgcggctactttctttctctggtttgttctggccatttactttgacaatataatcccaaatgcatcaggtgtgaggaaatcaatattgtactttctaaatcccagttattggatgggaaaaggaggtcaaaaagtgaaagagggtggggtttgtagctgtataggttcagccccacgtcaagaacaaagtacaccagatgatgaggatgtccttgaagaagaaaacaaagtgaaacagcaactaacagaaggtcttcttgatgcaaatgttgctgttcagatacgtggccttgcaaagacatatcctggcacacgtagcattggttgctgctttaaatgtaaaagaactttaccttacaatg

SEQ ID NO: 5666 - DNA, 404 bp, Glycine max
acccaagcgtcagaaaaaaatggatttccacggcggaggaccactccgttcccgcagttcccagtccccttctccctctcactccgcctccgcctccgccacctcctccatccagaagcgcaagctcgtgtccgaggaccacgcgcctcccttccccccctcctccttctccgccgacacccgcgacggtgccctcacctccaacgacgacctcgagagcatctccgcccgcggcgccgactccgactccgactccgaatccgaggacgccgtcgtcgacgacgacgaggacgactacgacaacgacaacgacaacgactcctccatgcgcaccttcaccgcctccaggctcagcaaccctccctccgctccccgcaacaccaagctcaagaccgataactcca

SEQ ID NO: 5667 - DNA, 369 bp, Glycine max
acccacgcatcagcccacgcgtccgttagaattaaaaagcgtgaaggacagtgataggtttggtttggaaggaagaagaaaatgaaggccatagtgataacgaggccaggaggtcccgaagtgctccaacttgaggaagtggaagatcccctagtcggagacgacgagcttctcatcggagtccacgccacttcccttaacagagccgatacctttcagaggaaaggctcctaccctccccctaagggcgccagcccttacctcggtctcgaatgttccggaactgtcctttccctgggtaaaaacgtttccagctggaaaatcggtgatcaggtgtgtgctcttctcgccggaggcggatatgccgag

SEQ ID NO: 5668 - DNA, 374 bp, Glycine max
aacaggattgagtctcgccgccccgagcaaaactttaccatattgagggaactggatatccggcaaaggcaggaagacgacatagctagagtagcggcagttctttccatacctcgggtttctgcgagcatcctacttcgtcactacaactggagtgttagtaaggtgcatgatgcttggtttgctgatgaagatcaagtccgaaaaacagttggtttgttggagaagccagttttccagaattctaatactagagagcttacttgtggcatctgttttgaaatgtatcctcgtgcacgggttgaatctactgcttgtggccacccttaatgctattcatgctgggcaggataatttagcacatcaattaatga

SEQ ID NO: 5669 - DNA, 348 bp, Glycine max
accggattgagtctcgccgccccgagcaaaactttaccatattgagggaactgtataggcggcaaaggcaggaagacgacatagctagagtagcggcagttctttccatacctcgggtttctgcgagcatcctacttcgtcactacaactggagtgttagtaaggtgcatgatgcttggtttgctgatgaagatcaagtccgaaaaacagttggtttgttggagaagccagttttccagaattctaatactagagagcttacttgtggcatctgtttttaatatgtgttctactgcacgggtgggatcttctgcttgtgtgctcgcttactgctatggatgctgtgca

SEQ ID NO: 5670 - DNA, 418 bp, Glycine max
cacgcgtccggaaagaactggtggtttttatgcttgcaatcgatatgaagcagctaaacaagggggagtgtatgatgatactgaaagaagaagggaaatggcaaagaattcgctggagagatacactcattattatgagcggtgggccagcaatcaatcttcaaggcaaaaagctcttgcagatctacagcagatgcaaactgttcatattgagaagcttagtgacatacagtgtcagcctgagtcacagcttaagttcataactgaagcctggctacaaataattgagtgtagaagagtgctgaaatggacatatgcatatgggttctatttgccggagcatgagcatgcaaaaaagcagttctttgagtacttacaaggtgaagcaaaatctggtcttgagagacttcatcaatgc

SEQ ID NO: 5671 - DNA, 442 bp, Glycine max
tccggctcaccacgcgtcagagcagttccaggtatagttcatgtgctgaagaagggaagcatggaggctcgggaaaatgcagcagcaacacttttcagcctttcagtaatagatgaaaacaaggttacaattggatctttaggagccataccaccactagtgacactgctaagtgagggtaaccaaaggggtaagaaagatgctgcaacagcactcttcaatttgtgcatttatcagggcaacaagggaaaggcagtgagggctggcgttattcccacgctgatgcgactactgactgaacctagcgggggaatggtggatgaagcattagctattttggcaatattggctagccatcctgaagggaaggctactattagagcttcagaggcagtgccggttttagtagagtttattgggaatggctcaccaaggaacaaag

SEQ ID NO: 5672 - DNA, 436 bp, Glycine max
gcagttccaggtatagttcatgtgctgaagaagggaagcatggaagctcgggaaaatgcagctgcggcacttttcagcctttcagttatagatgaaaacaaggttacaattgggtctttaggagccataccaccactggtgacactgctaagtgagggtagccaaaggggtaagaaagatgctgcaacagcactcttcaatttgtgcatttaccagggcaacaagggaaaggcagtgagggctggcgttattcccacactgatgcgactactgaccgaacctagcgggggaatggtggatgaagcattagctattttggcaatattggccagccatcctgaagggaaggttactattagagcttcagaggcagtgccagtgttagtagagtttattgggaatggctccccaaggaacatagagaatgctgctgctg

SEQ ID NO: 5673 - DNA, 380 bp, Glycine max
tcggaagaagggacgcatggcagctcggtaaaatgcagctgcaacactgttcagcctttgggttatacatgaacacagggttgcacttgcgtctttaggagccataccacctctggtgacactgctaagtgagggtagccaaaggggtgagatagatgctgctactgcactcttcaatttgtgcatttaccagggcaacatgggaaaacgactgtgggctaacgttattcccacactgatgcaactactgaccgaacctagcggaggaatggtggattaagcattagctattttggcaatattggccagtcatgctgaatgaaaggttactattagagcttcagaggcagtgccagtgttactagagttcatagcgaatg

SEQ ID NO: 5674 - DNA, 415 bp, Glycine max
gcgtcagtaacaatccgcatggttactggtgataacataaatacagctaaagctatagctaaagaatgtggtttacttacagagggtggtctagccatagaaggtccagattttcgtgacttgtctcctgagcaaatgaaggatgttataccaagaatccaggtgatggcacgatccttacctctggacaagcacagattagtaaccaatttgaggaaattgtttggtgaggttgttgctgttactggtgatggaactaatgatgctcctgcactgtgcgaggcagacattggacttgcaatgggcatagcaggaactgaggttgccaaagaaaatgccgatgtcattataatggatgataacttcacgactattgtcaatgttgtcaaatggggacgtgcagtatacataaaca

SEQ ID NO: 5675 - DNA, 383 bp, Glycine max
cttggggaaggtttacagaaaggagtgggtgttatcaaccatggatatggactgcaggaaaccatgaaattgattttgctccagaaattggtgaaactgtacctttcaagccttatacccaccgttaccatgttccttataaagcatctcaaagtacttcacccttctggtattctatcaagagagcttcagcacacatcattgttttggcctcatattcagcgtatggaaaatatacaccacaatataaatggcttgaaaaggagctaccgaaagttaacaggacagagactccttgggtgattgtactcatgcattcaccttggtataatagctacaattatcactattatggaaggtgaaacaatgagagtcaatgtatg

SEQ ID NO: 5676 - DNA, 420 bp, Glycine max
  modified_base (395)..(395): a, c, g, t, unknown, or other
cccacgcgtccgcccacgcgtccgcacaatcagccccttcgtcaggaaagttgagaaggctgtagatatgccacttgacagcgatgtctttgctattcctcctggttataatgccccccagcaggttcatataacgcaaggtgacctagtggggaaagcagtgatcgtgtcatgggtgactgtggatgagccggggtcgagcgaagtgcgttactggagtgagaacagtgaccagaagaagatagttgaaggaaaacttgttacttataggttcttcaattacacatctggttttattcatcacaccaccatcagaaatttggagtacaacaccaaatactactatgaggttggacttgggaacacaacacggcagttttggtttgtgactcctnctgaaatcggtcccgatgtgccata

SEQ ID NO: 5677 - DNA, 436 bp, Glycine max
cccacgcgtacgcccacgcgtccgcccacgcgtccggctttgttgtacgtgtgaaactgtacctttcaagccttatacccaccgttaccatgttccttataaagcatctcacagtacttaacccttctggtattctatcaagagagcttcagctcacatcattgttttggcctcatattcagcgtatggtaatgctagatgtcttttgcatgatacatatatatgtagagagcactggctgattctatgatttcagacaaacacgattctgaatgtaataattacaccttactgattacctatatgacttggaaaagatcaaatttgactgaataatttcagttcttagatctatatatatctatctgtatgtatgtatgttaccattaaatgtggaatgttaaatatcacagacaaacacttgccttaaatgatc

SEQ ID NO: 5678 - DNA, 388 bp, Glycine max
tcgacaacaccaaatactactatgaggttggacttgggaacacaacacggcagttttggtgtgtgactcctcctgaaatcggtcccgatgtgccatatacatttggtctcataggggatcttggtcagagttttgattcaaataaaactctttctcactatgaattgaacccaagaaaaggacaaactgtactattcgttggagacctctcttatgcggataactacccaaatcatgataacattaggtgggattcttggggaaggtttacagaaaggagtgttgcttatcaaccatggatatggactgcaggaaaccatgaaattgattttgctccagaaattggtgaaactgtacctttcaagccttatacccaccgttaccatgt

SEQ ID NO: 5679 - DNA, 357 bp, Glycine max
atcattataaagatcagacagtgccttggcataataaattcgcgagtgttgcgaccctggatcactagaatcacgggttttgagcaacatgggtgttgtggatggtctcttggcattgggtttgattctgaatgtgtgtgttgtgtgcaatggatgcacaagcagccccttcgtcaggacagctgaaaaggctgtagatatgccacttgacagctatgtctttgctattcctactggatataaagccccccagcacgttcatataacgcaaggtgacctagtggggaaatgcatgatcgtgtcatgggtgacttgggatgagccgtggtcgagcgaagtgcgttactggagtgagaa

SEQ ID NO: 5680 - DNA, 397 bp, Glycine max
gagagagtccatggggagtcaccggagagaatcatcctgaacccaaagctcaccgctgcaatgaccgtgtcgaggacgttattcaggcttgctttgagggaaacccattcaagactgttccgggacctttcaagctcttctggcagtgcatgcgttccaaacccggtgaggaaccaacagccccatttacttatctggatttggagcctctaaagagagaaacggaacctgtgaaacctgagtagtgtcacttttacttacaaatgccttaacagctttggcactgcatggtcctttagtggtttctaaatttccctccgtgtggatttttttttttgagaaaaatatgttactaaattgtttttgttgctttgctacataaaacagacgtcctatg

SEQ ID NO: 5681 - DNA, 357 bp, Glycine max
  modified_base (312)..(312): a, c, g, t, unknown, or other
aagatgagtagttcatcaaggccggtgccgaggagagagagtccatggcgagtcaccgtatagaatcatcctgaacccaaagctcaccgctgcaatgaccgtgtcgaggacgttattcaggcttgctttgagggaaacccattcaagactgttccgggacctttcaagctcttctggcagtgcatgcgttccaaacccggtgaggaaccaacagccccatttacttatctggatttggagcctctaaagagagaaacggaacctgtgaaacctgagtagtgtcacttttacttacaaatgccttaacagctntggcactgcatggtcctttagtggtttctaaatttcccttcgtgt

SEQ ID NO: 5682 - DNA, 422 bp, Glycine max
gacccacgcatcagaaaaataacaattaaccacacgactcacgacccagtaaccgggttctgcaaatttcgccacttgcagatgaaaagttccaaactttccactccaatccccggttaaatcctaaccccttgttcctttcactggttcttagaactactaggaccttgccaccaccatggctgccaaaaaggcatgtgagacattctcaaagtcattgattgaggaagtgaatagatggggttgcttgaagcagacaggggtgagtctcaggtacatgatggaattcgggtccaaacccactaacaagaatttgctgatctctgcccattttcttcacaaggaacttgccatcagaattgccagaagggccgttgaacttgagaatcttccctatggtttgtctcaaaaacctgctgttc

SEQ ID NO: 5683 - DNA, 345 bp, Glycine max
agggccattgagcttgagaatcttccctatggtttgtctcaaaaacctgctgttttaaaggttagggattggtatgtggattctttccgtgatctcagagccttccccaacatcaagaatgtgaatgatgaacaagatttcactgaaatgatcaaggccatcaaagtgaggcacaacaatgtggtacccacaatggccttgggtgttcagcaattgaagaaacgtatggatccaaagattgtttatgaagatcttgttgagattcatcagtttctagaccggttctacatgtcaaggattggaatccgtatgcttatcgggcagcatgttgagttgcacaatccc

SEQ ID NO: 5684 - DNA, 420 bp, Glycine max
atccagatctgtgttgtgatggcagcagcaccagcagctaccttcgctattggaaccaccggttccctcggccaaagaggaagctcgcttcctcaatcaaagtcctttgggttgaaattcaactctctgaatcatttgaagagcttctgtggcctcaaggccatgtcatccgtgagatgtgagtcggaatcctccttcttcggtaacaaaaccggtgctgctctacgggcgtcttttgcatccaaagctcaaaaggaaaacaaccacaactcgcagcctcaggcttcgtacaaagttgcggttcttggtgctgctggagggataggtcagccgctctcgcttctcatcaagatgtcgcctttagtttccaacctgcatctctatgatattgcgaatgtcaagggatttgctgctgatatc

SEQ ID NO: 5685 - DNA, 448 bp, Glycine max
ctcctctctccgattccttttattaattggagttttctcgctcctttttctttccctgagaacatttcatcttcgtattgatgtcggaaaagggtcggccacttcccaaatttggtgaatgggatgtcaatgatccagcctcagctgaggggttcacagtgatttttaataaggccagggatgagaaaaagacaggtggcaacccagagtcaccaggaaagactgctactgatcctcatagcaaacctgcagtagagcctggcaaaactcagactaaaaaatggttttgctgcatgcaaaacccttctgccgaatcatagcatagcaatggttgctcctgtgaaaagcctgaacagaagaacaatgtttatgtgtaactagcgtcacagtattttctcaaagataagagctgtagagccataagcgaattctacggaatttatatttt

SEQ ID NO: 5686 - DNA, 434 bp, Glycine max
  modified_base (373)..(373): a, c, g, t, unknown, or other
ccaagcctgagactcgcgactcaccaccactgctcgccggcctctaattttgaaagcgtgtgcgcctcccacgccatttttgatactctctttgtgttcgcatagtgagatatggggaagaaggcgaagaaagctatgaagaagaatttgaaaagggcttcctttaataagaatccatctgaggatgctgatttcttgcccttggaaggtggccctgctcgtaagctcgccggccagcagaagccgccgccgccgccggagaacaccgccacggttttgtacgtcggtcggatcccacatgggttctatgagaaggagatggaaggttattttgggcaatttggaaccattaagaggttgagaatcgcaaganataaaaagtctggaaaatcaagacatttgggttcatagaatttgaatctcccgaggtagca

SEQ ID NO: 5687 - DNA, 444 bp, Glycine max
tgcttcacaagccaaatctaacttgtctctgtgttctccgatctagtactactatcaatggccggaaaaggagatggtcctgctatcggaatcgatctcggcaccacctactcctgcgtcggagtgtggcagcacgaccgtgtcgaaatcatcgccaatgaccagggtaacagaaccacgccgtcttacgtcgctttcactgattccgagcgtttgatcggtgacgccgccaagaaccaggtcgccatgaaccccgtcaacaccgtcttcgatgctaagcgtttgattggaaggagattttctgatgcctccgttcagagtgacatgaagctatggccatttaaggtcatccctggtcctgctgacaaacctatgattgtggtcaactacaaaggtgaggacaagcagttctccgctgaggaaaattcttccatggttctcatg

SEQ ID NO: 5688 - DNA, 457 bp, Glycine max
cccgactactgattcctagcaaaccaactagagagttttcccttgatatggaggatttggacggaccgtggactgatcttgatttaaaagggagaataggatcaggttcttttggaactgtacatcatgcagagtggaatggctcggaggttgctgttaaaattctgatggaacaagacttcaaaggtgaacgcttcaaggaattcctgagggaggttgcaataatgaaaggcttacggcatccaaacattgttttacttatgggtgcagtcactaagcctcctaatctatcaattgtcacagaatatttgtcaaggggtagcttgtataggctgttgcataaacctggtgccacagagatgttggatgagagacgtaggcttagtatggcttatgatgtggctaaggggatgaattatcttcataaacgcaatccttccattgttcatagagatct

SEQ ID NO: 5689 - DNA, 419 bp, Glycine max
gctaaagaggtcaagcatccattcaggaatcttctcaagcgcaggaaccgaccccaacttgtcatttccgttgccctacagatattccagcaattcacaggcatcaacgcaatcatgttttatgccccggtgctgttcaacacgttaggattcaagaacgatgcatccctgtattctgctgtgataactggggctgtgaacgtgctctccactgttgtatcgatctactcagtggacaaagtgggacgtcgcattctgttgctggaagctggtgtgcagatgttcttgtctcaagtggtgattgcaatcatactgggaataaaagtgacggaccattctgatgacctttcaaaaagcattgcaattctggtgggtgtgatggtctgcactttcgtgtctttcttgcatggtcttggggt

SEQ ID NO: 5690 - DNA, 427 bp, Glycine max
  modified_base (362)..(362): a, c, g, t, unknown, or other
attcactccctctctcttgtcttttcctctacgttcctgcattgctcgtgtgaaacgcggaccatggccggcggaggtttcaccagcggcggcggcgccggagatttcgaggccaaaatcactcccatcgtcatcatttcatgtatcatggctgccaccggaggtctcatgttcggctacgacgtctgcgtttcaggtggtgtgacgtctatgcccccgttcttgaagaagttttttccgacggtatacagaaagacagtggaagagaaaggactggacagtaattactgcaaatacgacaaccaatgattacagcttttcacgtcgtctctgtatctggctggtttgacttcgacgttctntgcttcatacacgactcgtaggttgggaagaaggctgaccatgttgattgctggggtattcttca

SEQ ID NO: 5691 - DNA, 292 bp, Glycine max
ctttgcttcatacacgactcgtaagttgggaagaaagctgaccatgttgattgctggggtattcttcatctgtggagttgtccttaatgctgctgctcaaaaccttgccatgctcatcgttggcagaatcttacttggctgtggtgttggctttgctaatcaggccgtgccagtgttcctctctgagatagcaccttcaagaatacgaggagcattgaatatattgttccagctcaatgtcacaattggcattctatttgctaaccttgtcaactatggcaccaacaaaatc

SEQ ID NO: 5692 - DNA, 428 bp, Glycine max
  modified_base (13)..(13): a, c, g, t, unknown, or other
  modified_base (20)..(21): a, c, g, t, unknown, or other
cccacgcgtgcgnaatactnngaagagctttcgcatcaaccttaggagctagggtacgacccgaacgtttgtgcccgactcggtaaaatcttttgtggttcacctgtaccgtcacatccgtgaaaagaacgtgtacgagatccaccagatgtacgagagctccttccagaccctctcggagcgtctcttcaaggataccccgtggccctccgtggacgccgtcgcgcactacgtcgacaacgaccacgtcttctgcctcctctaccgcgagatgtggttccgccacctctacgctcgtctcactccgacgctccgccagcgcatcgactcgtgggacaactactgcagcctcttccaggttgtccttcacggtgtcgtcaacatgcagcttcttaaccagtggctatgggacatggtcgacgagttcg

SEQ ID NO: 5693 - DNA, 390 bp, Glycine max
tcgtccacgcgttcgtccacgcgttcgcacgtctatattggatatggctggagttttgttacctttgttgaagtggtttattggaggaagctcttcaaatggtcctaaagtactcaattttcttgtacgttctccgtggagtactattgatgttgttggccagatcaaacaacctatcctttttctctctggattgcaagatgagatggtccccccatcacatatgcaaatgctatatgctaaagcagctgctcgaaataatcagtgtctctttgtggattttcctactggcatgcatatggatacttggctggctggtggtgatcagtactggagaacaattcagcagtttcttgagcagcatgccccagagcaaaaagaagacagatc

SEQ ID NO: 5694 - DNA, 408 bp, Glycine max
cccacgcgtccggttcactcactcaaccgttcctttatcttttggattcccttctgattcactttcactttcactccttagcctggttataggagctagggtttatcgagggtttcgttccttcctctctgcaacaacaatggcgaaacctgggcgaggtcgtcgctctccctccggttccgtttccggctcctcctctcgctcctcttccccctccgactctcgttcctcctctcgctcgcgctccctttctcggtcccgttctccctcgcgctccagatcctcttccccctcctcctgctcttcctcccgaagctcccgcagccgcagccctcccccgcagaggcgccgaagtcctgctgacgcaactaggcgaggtcggtctcctccacctcagtctaagagagc

SEQ ID NO: 5695 - DNA, 411 bp, Glycine max
  modified_base (399)..(399): a, c, g, t, unknown, or other
agctttgctcgcttgtcaaagctcttgaatgatgataaggtttctggcaagattgtttatggaggcgaaaaggatgaaaagaaattaaggattgctcccactattttattggatgttccgcaagattcttcgataatgggtgaggagatatttggtccattgcttcccatcatcacggtcaataagctcgaagaaagtatagatgtgatcaactcaggagcaaagcccctcgctgcatatgtatttacaaccgacaacaagttcaaggagcagttcgtaaagaatgtttctgccgggggtttgctcgtcaatgacactgccttacatcttgtggttgataccttgccatttgggggaattggggagagtggaatgggtgcataccatgggaagttctcntttgatgctttt

SEQ ID NO: 5696 - DNA, 394 bp, Glycine max
gcccctcgctgcatatgtatttacaaccgacaacaagttcaaggagcagttcgtaaagaatgtttctgccgggggtttgctcgtcaatgacactgccttacatcttggggttgataccttgccatttgggggaattggggagagtggaatgggtgcataccatgggaagttctcttttgatgcttttacacacaaaaaagcagttctttatcgcagttttgctggggattcaaccataagggtcccaccataccacgatacaaaactgagattgatgaaggctcttcgcggtggtcgtatcctcggaataattcgtgctcttttcggatggtcctaagcttaacttggtttgaaacctaactattttttatggattcttcggtccgggtttttt

SEQ ID NO: 5697 - DNA, 440 bp, Glycine max
  modified_base (424)..(424): a, c, g, t, unknown, or other
atccactcttgcctcatctcctgaatcagattcatccttttttaagacacactcctcaggtcctcttgtacaaagtggctctggcagtgatgttgtgtacacaccatctgaccctggtggactaggcaactcaaggtcatggttttcatatgaagaactaatcaaggtcacaaatggtttctcaactcaaaatcttttgggcgagggtggatttggttgtgtgtataaagggtgccttcctgatgggagagacatagcagtcaaacagctgaagattggtggaggtcagggagagagagagttcaaggccgaagtggaaattattggtcgcatacatcatcgccatttggtttctctggtgggatactgcattgaagacagcagaagactacttgtctatgactatgtccctaacaataacctntattttcatctacatg

SEQ ID NO: 5698 - DNA, 440 bp, Glycine max
cccacgcgtccgtaaagaagaaactaaccatagatgatatccatgacatttatgggctgcgcttgattgttgacaaggaagaagactgttacaaagctttgacagttgttcatcgattatggtctgaggtgcctggaaagctgaaagattacatatgtcgtcccaagttcaatggatatcaatctctgcatactgttgtgatgggtgaaggcaaggttccccttgaagtacaaattcggaccaaagatatgcatttacaagcagaatttggatttgctgctcattggagatacaaggaagatgattgtcagcattcttcatttgtgcttcagatggttgagtgggctcgatgggttgtcacctggcagtgcgaagcaatgagtagagattgttcatctgttggatatgctgattcagtcaatcccccatgcaagttccct

SEQ ID NO: 5699 - DNA, 406 bp, Glycine max
agctcaggttatggtttccttggggtacatgcacagtcaaggtgttcataccctttttatataacattctcaagaaagcaaacttatggtacttttttttttggtctatttacatgatataattattgtaggtgataatgggttaatgaccttaaaaaacaaattataagggagaagttagctacttagtttgagaagaatgatcttcggaagctgaagtacattcttgggatagaagttgcctactctaagtaaggtatctttaattctcaaaggaaatatgtgcttgatctccttaaatagactggtaagttgggttgtaagatgtgcttgaccatgtgtacagggcccttaaccagctaaaatactcctaaagaaagacacatcagataaatctggattctac

SEQ ID NO: 5700 - DNA, 384 bp, Glycine max
ctactgggatttgacaatttcatcccacgcgttgcaaacactagtggctcagacacacttaagggtgtgaactatgcatccggagcagctgggattctaccagagagtggtacacatatgggtgccaacatcaatttgagggtacaaatgttaaatcacctattcatgtactccacaattgctatcaaacttggaggttttgtcaaagctaaacagtacctcaacaagtgtttgtactacgttaatataggaagcaatgattacataaacaattacttccttccccagttttacctaacaagccgcatctatacccctgatcaatatgccaacattcttattgcccagctatctcaatatatgcagacactgcatgacgaaatt

SEQ ID NO: 5701 - DNA, 426 bp, Glycine max
  modified_base (394)..(394): a, c, g, t, unknown, or other
tttttggaattcattattattattccacttattttgtctcattactaatagtttctctaggatgaagctaaacctaatcatgcgtagttctaccttttcttctattggttgcaattttcatgcaacaatgtgtccatggagaatcgcaagtgccctgcctttttgtctttggggactctctgtctgataacggaaataataacaaccttccaagcactacaaagtccaattacaaaccatatggcatcgacttcccaaccggcccaacaggacgatttacgaatggacaaacatctattgacctaattgctcaactactgggatttgagaatttcatcccaccctttgcaaacactagtggctcagacacacttaagggtgtgaactatgcatncggagcagctgggattctaccagagagtggta

SEQ ID NO: 5702 - DNA, 421 bp, Glycine max
cccacgcgtccgcaattacttctggaatcataattaataatccaacttattttgtgtcatgactatagtttctctagatggaagctaaaactaagtcatgcgtagttctaccttttcttctattggttgcaattttcatgcaacaatgtgtccatggagaatcgcaagtgccctgcctttttgtctttggggactctctgtctgataacggaaataataacaaccttccaagcactacaaagtccaattacaaaccatatggcatcgacttcccaaccggcccaacaggacgatttacgaatggacaaacatctattgacctaattgctcaactactgggatttgagaatttcatcccaccctttgcaaacactagtggctcatacacacttaagggtgtgaactatgcatccggagcagc

SEQ ID NO: 5703 - DNA, 407 bp, Glycine max
acgcccacgcgtccgacttctggaatcataattaataatccaacttattttgtctcattactatagggtctctagatggaagctaaaactaagtcatgcgtagttctaccttttcttctattggttgcaattttcatgcaacaatgtgtccatggagaatcgcaagtgccctgcctttttgtctttggggactctctgtctgataacggaaataataacaaccttccaagcactacaaagtccaattacaaaccatatggcatcgacttcccaaccggcccaacaggacgatttacgaatggacaaacatctattgacctaattgctcaactactgggatttgagaatttcatcccaccctttgcaaacactagtggctcagacacacttaagggtgtgaactatgc

SEQ ID NO: 5704 - DNA, 383 bp, Glycine max
ctggaatcataattaataatccaacttattttgtctcattactatagtttctctagatgggagctagaactaagtcatgcgtagttctaccttttcttctattggttgcaattttcatgcaacaatgtgtccatggagaatcgcaagtgccctgcctttttgtctttggggactctctgtctgataacggaaataataacaaccttccaagcactacaaagtccaattacaaaccatatggcatcgacttcccaaccggcccaacaggacgatttacgaatggacaaacatctattgacctaattgctcaactactgggatttgagaatttcatcccaccctttgcaaacactagtggctcagacacacttaagggtgtgaac

SEQ ID NO: 5705 - DNA, 447 bp, Glycine max
ctggaatcataattaataatccaacttattttgtctcattactatagtttctctagatggagtctagaactaagtcatgcgtagttctaccttttcttctattggttgcaattttcatgcaacaatgtgtccatggagaatcgcaagtgccctgcctttttgtctttggggactctctgtctgataacggaaataataacaaccttccaagcactacaaagtccaattacaaaccatatggcatcgacttcccaaccggcccaacaggacgatttacgaatggacaaacatctattgacctaattgctcaactactgggatttgagaatttcatcccaccctttgcaaacactagtggcttagacacacttaagggtgtgaactattcattcggagcagctgggattctaccagagagtggtacacatatgggtgccaacattaatt

SEQ ID NO: 5706 - DNA, 448 bp, Glycine max
  modified_base (426)..(426): a, c, g, t, unknown, or other
gtctcattactatagtttctctagatggaagctaaaactaagtcatgcgtaggtctagcttttcttctattggttgcaattttcatgcaacaatgtgtccatggagaatcgcaagtgccctgcctttttgtctttggggactctctgtctgataacggaaataataacaaccttccaagcactacaaagtccaattacaaaccatatggcatcgacttcccaaccggcccaacaggacgatttacgaatggacaaacatctattgacctaattgctcaactactgggatttgagaatttcatcccaccctttgcaaacactagtggctcagacacacttaagggtgtgaactatgcatccggagcagctgggattctaccagagagtggtacacatatgggtgccaacatcaatttgagggtacanatgttaaatcacctattcatgt

SEQ ID NO: 5707 - DNA, 409 bp, Glycine max
cccacgcgtccgctggaatcataattaataatccaacttattttgtctcattactatggttgctctagatggaagctaaaactaagtcatgcgtagttctaccttttcttctattggttgcaattttcatgcaacaatgtgtccatggagaatcgcaagtgccctgcctttttgtctttggggactctctgtctgataacggaaataataacaaccttgcaagcactacaaagtccaattacaaaccatatggcatcgacttcccaaccggcccaacaggacgatttacgaatggacaaacatctattgacctaattgctcaactactgggatttgagaatttcatcccaccctttgcaaacactagtggctcagacacacttaaaggtgtgaactatgcatttcgagc

SEQ ID NO: 5708 - DNA, 396 bp, Glycine max
atcaattactcgtgcaatcataattaataatccatcttatttggtctcattactatagtttctctagatggaagggaaaactaagtcatgcgtagttctaccttttcttctattggttgcaattttcatgcaacaatgtgtccatggataatcgcaagtgccctgcctttttgtctttggggactctctgtctgataactgtaataataacaaccttgcaagcactacaaagtccaattacaaaccatatggcatcgacttaccaaccggcccaacatgacgatttacgaatggacaaacatctattgacctaattgctcaactactgggatttgagaatttcataccaccctttgcaaacactattggctcatacacacttaagggtgtgaacta

SEQ ID NO: 5709 - DNA, 451 bp, Glycine max
atcaatttgagggtacaaatgttatatcatttattcatgtactccacaattgctgggaaggttggaggttttgtcaaagctaaacagtacctcaacaagtgtttgtactacgttaatataggaagcaatgattacataaacaattacttccttccccagttttacctaacaagccgcatctatacccctgatcaatatgccaacattcttattgcccagctatctcagtatatgcagacactgcatgacgaagttggggccagaaaattcgtgctagttgggatgggtcttataggttgcactccaaatgccatctctacccataatacaaatggatcttgcgttgaggagatgaataatgctacgttcatgttcaatgcaaagcttaaatctaaagtggaccaattcaacaacaagttctttgctgattccaaattcatcttttataaca

SEQ ID NO: 5710 - DNA, 414 bp, Glycine max
taataatccaacttattttgtctcattactatagtttctctagatggaagctaaaactaagtcatgcgtagttctaccttttcttctattggttgcaattttcatgcaacaatgtgtccatggagaatcgcaagtgccctgcctttttgtctttggggactctctgtctgataacggaaataataacaacctttcaagcactacaaagtccaattacaaaccatatggcatcgacttcccaaccggcccaacaggacgatttacgaatggacaaacatctattgacctaattgctcaactactgggatttgagaatttcatcccaccctttgcaaacactagtggctcagacacacttaagggtgtgaactatgcatccggagcagctgggattctaccatagagtggtacaca

SEQ ID NO: 5711 - DNA, 430 bp, Glycine max
cacaaatttacattaagcatagtacaaaacaatgaagaccaaactgctagcatttctgctcttctttgccttgactacaaaaccactactacttggagcagctggagctgctccagagccagtgattgatacatcaggcaagaagctgagagctgatgcaaattaccatatcatccctgcagtgcccttcaccatatgtggctttgttggctgtttcactggtggaggcctttcactagacagcatagatgaatcttgccctcttgatataataatcgagaaagccaatgaaggcctaccactgagattctcaccagttaacaccaaaaaaggtgttattcgtgtctccaccgatttgaacatttttttctctgattctgatgaaaggtgtccacaccattccactgtgtggatgcttgatcaatttgat

SEQ ID NO: 5712 - DNA, 433 bp, Glycine max
atgaagaccaaactgctagcatttctcctcttctttgccttgactacaaaaccactacgtacttggagcagctggagctgctacagagccagtgattgatacatcaggcatgaagctgagagctgatgcaaattaccatatcatccctgcagtgcccttgaccatatgtggctttgctggctggttcactggtggaagcctttcactagacagcatagatgaatcttgccctcttgatataataatcgtgaaagccaatgaatgcctaccactgagattctgaccagttaacaccaaaaaaggtgttattcgtgtctccaccgatttgaacattattttctctgattctgatgaaaggtgtgcacaccattccactgggtggatgcttgatcaatatgatgcctgtattgtacagacatatgtgaccactggt

SEQ ID NO: 5713 - DNA, 437 bp, Glycine max
gttgctctctactctgcttagggttccaactttcaacccaacacttaatggtctcatgcaacaagggaaaatgaagcctattttctgtggaaattttgaatatgatgcccggcagtcagagctggagcggctttttagacgatatgggaaggttgatagggtggatatgaagtctggttttgcttttatctatatggaagacgagagagatgctgaagctgctattcgtgctcttgatcgagtagaatttggtcggaagggacgcagactccgtgtggaatggacaaagcatgaacgtggtgttagaaagcctgctagttcaagaagatcttcagctaatgggaggccatcaaagaccttgtttgtaattaattgtgatacataccataccagaacaagggacttggagaggcactttgaaccatatggaaagatag

SEQ ID NO: 5714 - DNA, 411 bp, Glycine max
aggacaattcgggcttctcgggcccgcgccgcagccccagtttcaacaacacgtgtggccgtggcgggagccgtggtggcggtggtgccggtgccggtgccggtagaggggtggtggtgaatgcagagaaagtctgtaattattggattcaggggaattgtagttatggagagaggtgcaagttccttcacacttggagtgtgggggatgggttttctttgctgacccagcttgaagggcatcagaaggctgtgagtgcaattgcctttccctctggttcagataagctgtataccggaagcactgatgagactgcaaggatttgggactgccaatctggaaagtgtgtacgtgtgatcaatcttggtggtgaagtacgttgtatgatcagtgaaagcccttgggtccttg

SEQ ID NO: 5715 - DNA, 378 bp, Glycine max
agggcgaataatacgttaggtgggagtattcctaaagagttatgggacctgcctgtgcttaattatcctgatctttcaaggaatcagttctctggtgagattccaattgagctgcagaagttgaagcctgatttgttgaatttgtcgaacaatcagctttctggggtgattcctcctctttatgctaatgagaattatacaaagagttttcttgggaatcctggtttatgcaacgctctctctggattgtgtccaagcttgggtggtgacagtgatggtaagagcagaaagtatgcgtggattttccggttcatatttgtgcttgctgggattgtgttaattgttggggtggcgtggttttacttcaaattccgggac

SEQ ID NO: 5716 - DNA, 445 bp, Glycine max
ttcttcattctccctttttttgccctaaattagatcctttcttttacaatcattaattaattagattagaattgatttgatttgatttaccttaatccttcgtctgctttttccttcccttaactccaccattcctgaattttctgcatcaatctatcaagttcattgtaggtgtatatccttgattttgtgtgggtttgagttagggtgcatgtgaatgaaaaggagatttgctggaggtgatgcatttgcatagatgaaggcagaaaaagtttggcgtttaggcagcatgggtgatatgcaaatactgcctgggtctcgccaccgtcctcccatgaagaagccgatgtggattattgtcttggtgttgtttgtctgtgtctttctaatctgtgcttatatctacccaccgcagagcagttcagcctgttatgtcttctctttc

SEQ ID NO: 5717 - DNA, 411 bp, Glycine max
  modified_base (117)..(117): a, c, g, t, unknown, or other
  modified_base (303)..(303): a, c, g, t, unknown, or other
gattccatctctcacatcatttcccactcccgcgtttcctttatcatattcttattccgccatgtcccagttgaacggagcctactatggcccctccatcccgccgccgaaaacctnctaccaccgcccagggcgcggcggaggctgctgctgcggctgcctcttcagcctcatcttcaagctcatcttaaccgtgataatcatcgttggcatcgccgggttcgtgttctggctcatagtccgtccgaacgtggtgaaattccacgtgaccgacgccaccctgacgcagttcaactacaccgncaacaacactctccactacgacctcgccctaaacatcacggtccgaaaccccaacaagaggctcggaatctactacgaccgcatcgaggcgcgtgcaatgttccacga

SEQ ID NO: 5718 - DNA, 434 bp, Glycine max
atttcgtgtgaaaacaagttccaaaactagaggtttcttgagtcttttttttagttttgcttgctctactctagagccattctaagtttctctttgagtcctagcttgcttttatgtgcttttcatcgctttaattgttgaataatacttgaaaatttgtcttgttaaaactatattgttttagctttcatttcatttttttggtcattggttattgcttgtctctttgtttccttgtttgtgagttgccatatagggaatttgaaaaaaggattagtgccatcccttgaagaatttgagtcaagaagcaaggggaaaaccaccttaagagctattggactaagaagcactccaaattgagtaaatcaccaaagacagaacaaccacccaaattgaggacctttttgtaattttgtaattgacaatttacttac

SEQ ID NO: 5719 - DNA, 427 bp, Glycine max
gtcaaacacaaataccactcctttcttcaacaggtttatagaaaccttggattactacggggcaatgtttgagtccattgatgtgtctcttccgagaaagagcaaggtgcacattaatatggagcaacattgatcggctcgggatattgtcaacattattgcttgtgaagggaaggaaagggtagagagacatgagctgctacgcaagtggaagtctaagttaacaatggctggctttcatcaatatgctttgagttcttatatgaattctgtcataagaagcctgctgaggtgctattcaaaacattataatcttgtggagaaggatggtgccatgctactggcatggaaggacagaaatttgatttcaacttcagcttggtatcgattacatgcagataggaaataatgcagtggtagaaatatg

SEQ ID NO: 5720 - DNA, 398 bp, Glycine max
gcgccaaacggcttgatagcatatggggtgcttggtttttcttcagattttacttcaagccggcattggttgagaagtccaaggccaaggttgttagggacagcaatggtgtttcggggttcgataaatccgatatcaagcttgatgttttcatggttcaacacgacatggaaaacatgtacatgtgggttttcaaggagaagccggagaatgctttgggtaagatgcagttgaggagctacatgaatgggcattcccgccaaggggagcgcccatttccatttagtgctgaccggggttttgttcgatcccaccggatgcagcggaagcattatagaggactttcaaatccacaatgtgtgcacggcattgagggtgttccatcacccaatcttatg

SEQ ID NO: 5721 - DNA, 429 bp, Glycine max
ttatcctttcctgaaccttcttgtgatctcaaagcttaacgaatcaatcaaccgctgacatggcagaagaagaagaagaacgcaggatcctggtggccgtggatgaaggcgaggagagcatgtatgctctctcatggtgcctcaagaacctttcttttcaaaattccaaagacacccttattctcctatacgtcaagccccctcgagtcacttattcagccttcgatggcacaggatatttttttgcctctgacataacggctaccatggagaggtatagccaacaagttgccgattgcgtcttggagaaagccaagaaattgtgtaaaaatattgaaaatgtggagactagggtagagaatggcgatacaagggatgtgatttgtcagatggttcaaaagtagggtgctgatgtcttaatcatgggaa

SEQ ID NO: 5722 - DNA, 291 bp, Glycine max
cacgcgtcaagcaacgcgtccgcccacgcgtccgataaaatcgaagtcccttaggtcttcatcttctgttctgatccatgtatggcttcataacgcatcttgaacgatctcaaggatttgcaaaacgatcctcctacctcatgctgtgcaggccctatggctgaggacatgtctcactggcaagccacaatcatgggacctgctgatcacccataatcatgtggtgtattcctagtttcaattcattttcctcctgatcatcccttcaagccaaccaaagttgcttttccg

SEQ ID NO: 5723 - DNA, 429 bp, Glycine max
cccacgcgtccgcttcatcttctgttctgatccaggtatggcttctaaacgcatcttgaaggagctcaaggatttgcagaaggatcctcctacctcatgcagtgcaggccctgtggctgaggacatgtttcactggcaagccacaatcatgggacctgctgatagcccatatgcaggtggtgttttcctagtttcaattcattttcctcctgactatcccttcaagccaccaaaggttgcttttcggactaaggtgttccacccaaacatcaacagcaatggcagtatatgtcttgacattctcaaggagcaatggagcccagccctaaccatttccaaggtccttttgtcaatttgctcattgttgacggatcccaaccctgatgatccactcgtaccagagattgcacacatgtacaagactgacag

SEQ ID NO: 5724 - DNA, 330 bp, Glycine max
tccgggtcgacgacgcgtccgctttggtcttcatgttctgttctgatccaggtatggcttctaaacgcatcttgaaggagctgaaggaggtgcagaaggatccttctacctcatgcagtgcacgccctgtggctgacgacatgtttcactggcaagccacaatcatgggacctgctgatagaccatatgcaggtggtgtttgcctagttacaattcattatactactgactatcccttcaagccaccaaaggttgcttttcggactaacgtgtttcacccacacatcaacatcgatggccgcatatgtcttgacattctcaaggaccaat

SEQ ID NO: 5725 - DNA, 361 bp, Glycine max
cccacgcgtccgcccacgcgtccggattttttcacgaactgtggaaagattcggttcgattgttgggatactgctgggcaagagaagtttggtggcctcagagatggatattatatccatgggcaatgtgcgattatcatgtttgatgttactgcccgtctaacatacaaaaatgtccctacctggcaccgtgatctttgccgggtctgtgaaaacatcccaattgttctttgcggtaacaaggttgatgtcaagaataggcaagtgaaggcaaagcaggttactttccacaggaagaagaatttgcagtactatgagatatctgctaagaaccaccttccatttttgaaaggccattttt

SEQ ID NO: 5726 - DNA, 432 bp, Glycine max
ctccgctctaaattctctgtctctctctctctctctcgatcaatcatggctttgcccaatcaggaaaccgtcgattaccctagtttcaaactcgtcatcgtcggtgacggtggtacaggaaagacaacgttcgtgaaaaggcatcttaccggtgaatttgagaagaaatacgaaccgaccattggagtggaggttcacccattggatttcttcacaaactgtggaaagattcgcttctactgttgggatactgccggacaagagaagtttggaggcctcagggatggatattatatccatgggcaatgcgccattatcatgtttgatgttactgcccgactaacttacaaaaatgtccctacctggcatcgggatctttgccgggtctgtgagaacatcccaattgatctttgcggtaacaaggttgatgtg

SEQ ID NO: 5727 - DNA, 443 bp, Glycine max
  modified_base (15)..(16): a, c, g, t, unknown, or other
  modified_base (31)..(33): a, c, g, t, unknown, or other
  modified_base (108)..(108): a, c, g, t, unknown, or other
  modified_base (122)..(123): a, c, g, t, unknown, or other
gcgacgccagcgcgnntccgcccacgccgtnnncggcagcatcgcttatactttcttcatttccatggggctttgcccaatcagcagaaccgtggggattaccctagntttcaaacctcgtnntatcgtcggtgaatgggtggcaccaggaaagaacaacctttgtgaaaaggcatctcaccggagaattcgagaagaaatatgagccaaccatcggtgtggaggttcacccattggattttttcacaaactgtggaaagattcgattctactgctgggatactgctggacaggagaagtttggtggcctcagagatggatactatatccatgggcaatgtgctattataatgtttgatgttactgcccggctaacatacaaaaatgttcccacctggcaccgtgatctttgcagggtctgtgaaaacatcccaattgttctt

SEQ ID NO: 5728 - DNA, 369 bp, Glycine max
ccacgcgtccgcttggcttcatttcttttcaatctctcttaatacatatcactttcttcaccgttcgctctgtctttctcccctacacaaaacatggctttgcccaatcagcaaaccgtcgattaccccagcttcaagcttgtcatcgtcggcgacggtggcacaggaaagacaaccttcgtgaagaggcatctcactggtgaattcgagaagaaatatgaaccgaccattggtgtggaggttcatccgttggattttttcacgaactgtggaaagattcgcttctattgttgggatactgctgggcaagagaagtttggtggcctcagagatggatattatatccatgggcaatgtgcgattatcatg

SEQ ID NO: 5729 - DNA, 411 bp, Glycine max
gactcacgcgtcagcccacgcgtccgctctataagaaggtgttcccgcacttctacatactgggctggtattcgactgggagtgatgcagaggaatcagatatgcatattcacaaagctttgatggatatcaatgaaagtccagtttatgttcttctcaatccttctatcaaccattctcagaaggatctacctgtcagtatttttgaaagtgaactgcatgtcatagatgggattccacaacttatctttgttcgctcaagttatactattgagactgttgaagcagaacggatatcagttgatcatgttgctcatcttaagccatctgatggtggttcagctgctacacaattggctgctcaccttactggtacacacagtgccatcaaaatgcttcatagcagaataa

SEQ ID NO: 5730 - DNA, 420 bp, Glycine max
gttttggttttggctgggaaggctcaacaagaggagattggggatggagctaatttagcggtttcatttgctggggaactcctgcagggtgctgaggaacttatcaggatgggtttgcatccgagcgagatcatcagtggatacactaaagcgatcaacaagactgttcaaatattggatgaactggttgagaatggttcagagagtatggatgttcgtgataaggaacaggttgtttctagaatgaaagcagctgttgccagcaagcaatttggccaagaagataccttatgttcgcttgttgctgatgcatgcatccaagtgtgtcccaaaaaccctgcaaactttaatgtggacaacgttcgtgttgcaaagctcttgggagggggcttgcataacagtactgtcgttcgaggattg

SEQ ID NO: 5731 - DNA, 173 bp, Glycine max
cgcccacgcgtccgttcaaaccgacaaaaaaacttgttacgatggtttcttccgacaaggagccaggagaggaagtccttcaagcatggtacatggatgatagtgattaagatcaaagactcccccaccacatagaacccaatgagtttgtctcgttggaccaacttgctgaa

SEQ ID NO: 5732 - DNA, 386 bp, Glycine max
  modified_base (362)..(362): a, c, g, t, unknown, or other
  modified_base (371)..(371): a, c, g, t, unknown, or other
gaaaaacttgtcaccatggtttcttccgagaaggatccacgagaggatgtccttcaagcctggtacatggatgatagtgatgaagatcaaagactcccccaccacaaagaacccaaggagtttgtctcgttggaccaacttgctgaacttggagtccttagctggaaactagatgctgataaccatgaaaatgatccagagctgaagaagattcgtgaagagcgtggttacacctacatggatgtttgtgaggtctgcccagaaaagttgccaaattatgaacagaaaatcaaaagcttctttgaagagcatcttcacactgatgaggagatccgcttttgtgctgctggaagtggctattntgatgttanggatcgcaatgaagc

SEQ ID NO: 5733 - DNA, 405 bp, Glycine max
acagcatcgaacccgtcgtagcagataatcttgtcaccatggtttcttccgacaaggatccacgagaggatgtccttcaagcctggtacatggatgatagtgatgaagatcaaagactcccccaccacaaagaacccaaggagtttgtctcgttggaccaacttgctgaacttggagtccttagctggaaactagatgctgataaccatgaaaatgatccagagctgaagaagattcgtgaagagcgtggttacacctacatggatgtttgtgaggtctgcccagaaaagttgccaaattatgaacagaaaatcaaaagcttctttgaagagcatcttcacactgatgaggagatccgcttttgtgctgctggaagtggctattttgatgttagggatcgcaatg

SEQ ID NO: 5734 - DNA, 360 bp, Glycine max
tccacgcgtccgcagaagacaggttcaaaccggagcaaaaaaacttgttacgatggtttgttgcgacaaggatccacgagaggaagtccttcaagcatggtacatggatgatagtgatgaagatcaaagactcccccaccacaaagaacccaaggagtttgtctcgttggaccaacttgctgaacttggagtccttagctggaaattagatgctgataaccatgaaaatgatccagagctgaaaaagattcgtgaagagcgtggctacacctacatggatgtttgtgaggtcttgccagaaaaagtgccaaattatgagcagaaaatcaaaagcttctttgaagaacatcttcacactga

SEQ ID NO: 5735 - DNA, 308 bp, Glycine max
ctcaaaggaaagaaaaggaaagaaaagaaaagaaaaagaagagagtgtaggtaaacagaagcacacactacacagttaccaaaatcaggttcaaacgcacagatctgggagaagagaagaagaagaagaagaagatgggacaggatcagaaccagagatcgctgatctacgcgttcgtgtctcgcggcacggtgattctcgccgagtacactgaattcagtggcaacttcaacacaatcgcgttccagtgccttcagaagctccctgccttcaacaacaagttcacctacaactgtgacggccacacc

SEQ ID NO: 5736 - DNA, 397 bp, Glycine max
gcggaagaacgaagcctcctcgttcttcttcttctgcgctttctctctccctctctagaaccgtaaccgtcgtttctttctttctctctcctcaaccagagataaagagtcaccttcttatttttctgaatctcgcggcgttgttctttctgctgctgcggctgtggttccggcggcgatgggacagcaatcgttgatctacagcttcgtcgctcgaggcaccgttatcctcgcggagtacaccgagttcaccggaaacttcaccggcgtggcggcgcagtgcctccagaaactcccttcctccaacaacaagttcacctacaactgcgatggccacaccttcaactacctcgtcgataacggattcacttactgtgtggttgccgttgagtctgct

SEQ ID NO: 5737 - DNA, 368 bp, Glycine max
cgaagccttctcgttcttcttcttccgccctttctctctctagaaccgtacgggcgtgtctttctctctgctcaaccggagacagcgtcgccttcttttctgaatctcgcggcgttgttagttctgcggcggttgtagttccggcggcgatgggacagcaatcgttgatctacagcttcgtcgctcgcggcaccgtgatcctagcggagtacaccgagttcaccggaaacttcaccagcgtggcggcgcagtgccttcagaaactcccttcctccaacaacaagttcacttacaactgcgatggccacaccttcaactacctcgttgataacggattcacttactgtgtggttgctgttgagtctgct

SEQ ID NO: 5738 - DNA, 429 bp, Glycine max
cccacgcgtccgaatttgttgaggcacattaccttggacaacaatgagaacaaacctggcagtaacagtagggatacacaagaggttatgttggagcctgggctgaaattaattaaaattttcaaggaatataccagcaagacatgcattttggatgattttggcttctatgaggctcgtcagaaaactattttggagaagaaagcaaagcaacaattcccaaagcaggtatgggaagggaaacctgctgatgagaagattgagataaatggggaagttaatactcaaaaatctgaagttagctcggaattgctcaaggagtctacccttgctgagaaggatagtgatgaccacaaagttcccgagaatggatctgctacaaaaactggagatgccccaaagggtgctaaaccagttgttcccgagagt

SEQ ID NO: 5739 - DNA, 418 bp, Glycine max
  modified_base (378)..(378): a, c, g, t, unknown, or other
  modified_base (407)..(407): a, c, g, t, unknown, or other
cccactcgtccgctcaaacctcttcgttccttcgattcattccatttcttccaaaatggccaaagacccagttcgcgttctcgtcactggagccgcagggcaaattggatatgctcttgtccctatgattgctaggggagtgatgctgggtcctgaccagcccgtgatcctccacatgcttgacattcctccagcagcagagtcgttgaatggggttaaaatggaattggtggatgctgcattccctcttcttaaaggtgttgttgctacaaccgatgtggttgaggcatgcactggggtcaatattgcagtgatggttggtggattccctagaaaagaaggtatggagaggaaggatgtgatgactaagaacgtctncatttacaagtcccaggcttctgcccttngaaagcatgct

SEQ ID NO: 5740 - DNA, 382 bp, Glycine max
agcccacgcgtccgcaatgccctatatatgggtgatgttcgagaacgtgtgaagatattggaaaatgtgggccatttgcctcttgcttacatcactgcatcagtccatgggctacatgatgttgcagaacggcttgcagctgaattgggagataatgttccatctttgcctgcaggaaaagtgccttctctcgtgatgcctccatcacctgtcatgtgtggaagtgattggcctcttctcagggtcatgcgaggcatgtttgatggggtgcttgacaatacaggtcggggagttgctgatgaagaagagtatgaggctgctgatggtgattggggtgaggagcttgacatagttgatgcagatgggttacaaaatggagatg

SEQ ID NO: 5741 - DNA, 464 bp, Glycine max
acggattagcatcaaagcaagttaacaaaatttgggtgcgtcctggattgacccttttggcccctctccctcaccctccactaactcctcctttttggtttttataaagcacattcccaatagaggagggtccctacacaacacaacccttcaatgacgtccatggccactttcttcgcccaaacctccttcccctcccactctctctccaaaaccttcgatacccatttcgcccctgccccgaaagtcaacgtctttgtgaacttcagggcgaggaggcacgttggggtgcgagtttcgaacgcgctgatcgaaccagatggagggaagctcgtggagcttgtggtgacggattttgagagggatttgaagaagggtgaagctctttcgttgccgaggatcaagctctcaaggattgacctttgagtggtccatgtcctcagcgaaggattggccacacccct

SEQ ID NO: 5742 - DNA, 427 bp, Glycine max
agcggacgcgtgggcggacgcgtgggcggacgcgtgggcggacgcgtgggttctcttcctccctggaagaaaaagaagagtcaccgctacgacgccgttcgtgcttttttgaggtgccacagtcatgtttgggcgtggtggaccaaggaggagtgacaactccaaatattatgatattctcggggtttccaaaaatgccagtgaagatgaaatcaagaaggcctatagaaaggctgctatgaagaaccatccagataagggaggagatcctgaaaagttcaaggagttaggtcaagcatatgaagttttaagtgatcctgagaagaaagacctgtatgaccagtatggtgaagatgcccttaaagaacgaatggggggaggaggctcgtttcataatccatttgatatatttgaatcattttttggg

SEQ ID NO: 5743 - DNA, 429 bp, Glycine max
cggacgcgtgggacgaagtgcaaatagcaattccgctactcacaaaaaaccttttcctattccctttctctttcctgaacccaacacaacaacacaacacaggataaataaattaaattaaaaactagctaaattcctctctctctctctttctcttcgagggtttgggtttctcttcctcccttggagaaaaagaagagccaccgctgcgacgccgttcgtgcatttttgaggtgccgctgtcatgtttgggcgtggtggaccaaggaggagtgataactccaaatattatgatattctcgggatttccaaaaatgccagtgaagatgaaatcaagaaggcctatagaaaggcggctatgaagaaccatccagataagggaggagatcctgaaaagtttaaggagttaggtcaagcatatgaagtttt

SEQ ID NO: 5744 - DNA, 386 bp, Glycine max
cccacgcgtccgggatttccccgactcagggtttctttcccctgaccaatgccagttattggaaaaggtgttgcctcagaagagcagcaagcacgtctcagatatggagctggatgattgtgaggagaccactttgcatgatgtcaactttaaggaggagatgagacgaaagcagcaacagcaacaccgcgaggcatacgacgaagatgatgatgagccatctggtcaccgagtgcaatgtgctcaacagtagtgcaatttatggtagtagaggttctataatttctgcttggtttatcttttgtttggataatgcagttataactgcgtgataaatttacctttaggttttggctggtaatgttatttagtttacagttcttggc

SEQ ID NO: 5745 - DNA, 395 bp, Glycine max
ggcaggtactggaaaaggtgttacctcaaaagagcagcaagcatgtgtcagacatggagctggatgattgtgaggggaccactttgcatgatgtcaactttaaggaggagatgagacgaaagcagcaacagcaatatcgcgaggcatatgatgaagatgatgatgagccatctggtcaacgagtgcaatgtgctcaacagtagtgcaatttatggtagtagaggttctataatttctgcatggttattatcttttgattgcataatgcagatataactgcgtgataaatttaccctttaagttttggctggtaacggtatttagtcttggcagatttctaaagtctgttatttggtggaatatatgaaaattaaatgatttggtacaaagcgcgc

SEQ ID NO: 5746 - DNA, 449 bp, Glycine max
  modified_base (411)..(411): a, c, g, t, unknown, or other
aaagaaaagaagaacaaagatgcaatcctcaaaggagaagatgaaaaacatggcaagtgctgccaaggaacaagtcgacatctataaagccaaaatagacgagaaggcagagaaagcaacggcaagaacagaagaggagagggtgatagcccatgagcacgcaaaggcaaaggaagctggagcaaagatggagctgcatgaagctaaagcaaggcatgcagcagagaagctaagcgccaaccaatcacattatggtctccaccatggccacaacaaccctcccttagtaggaacaactcagactcactaccagcaagggcaccagcaccagccacttggggcagttcctatgcctggaaccacttatccatcttatccactaggagggaaatcctaacctccaaggaacanacatatataatagatctatctgtgttttgctgtagtac

SEQ ID NO: 5747 - DNA, 429 bp, Glycine max
gaaaagaagaacaaagatgcaatcctcaaaggagaagatgaaaaacatggcaagtgctgccaaggaacaagtcgacatctataaagccaaaatagacgagaaggcagagaaagcaacggcaagaacagaagaggagagggtgatagcccatgagcacgcaaaggcaaaggaagctggagcaaagatggagctgcatgaagctaaagcaaggcatgcagcagagaagctaagcgccaaccaatcacattatggtctccaccatggccacaacaaccctcccttagtaggaacaactcagactcactaccagcaagggcaccagcaccagccacttggggcagttcctatgcctggaaccacttatccatcttatccactaggaggaaaccctaacccttcaaggaacaaacatatataatagatctatct

SEQ ID NO: 5748 - DNA, 412 bp, Glycine max
aaaaaagcttctttgtctctcgtgccgattctccaccactattcccttcaccggaatgacactttccgctattagtgtagaagatgagtacgctggatgcaacaagggctgaacttggtcttcttgttttatatttgggcaaggctgaagcaagggacaaaatatgcagggcaatacaatatggttccaaatttttgagtaatggggaacctggtactgctcagaatgtagacaaaacaaccagcttggcacgaaaagtcttccgtctctttaagtttgtcaatgacctacatgctttgataagtccaacaccacaggggacacccctccccctagctctgttgggaaagtccaagaatgctctactctccactttcttggttcttgatcaatttgtgtggcttggcagaac

SEQ ID NO: 5749 - DNA, 406 bp, Glycine max
  modified_base (402)..(402): a, c, g, t, unknown, or other
  modified_base (404)..(404): a, c, g, t, unknown, or other
aattgatactgtggtagcagtaggactgcttcaattggcacccaagacagttactcctcgcgtaactggggcttttggatttgtttcgtctctaatatcttgctatcagttgcttcctgccccggtcaagtccaaaactgtgtgaagtgtggaagaatagaaaggttctcatgacgtgtctgtcgtcaaataattatatgaattggtcaggaaatgtcggttggtgtgagcattgaccaattttcatcatagttacaattgttctctaaaactgttgtgtagggcatctttctattttggtctttcaaaatatatgcaactataatatgttgctccataatttacaaatacatgaatttgtcccctaaaagacatgcaatatcaaattggttcccccacttncnct

SEQ ID NO: 5750 - DNA, 377 bp, Glycine max
  modified_base (3)..(3): a, c, g, t, unknown, or other
canaactcatctcgaaaccctaagcactcgctcgggttcgtgtagtgccaaaccctagggctcattttccagatctattcagtttttctctcctctcttttccgatccaccgttggagatcgaagatggtgtccgacgccagcaagaagaaggccgcacagaagaaggccgtcgccgccgccaagagaggtggcaaagctgccgccgctgccgttatggccgtcacctcttgcaaagccgccgacaaggtcgccaacggaatcgccgatattcagatttcggatcggacctgcaccggcgtcctctgttcgcatcctctctccagagatattcgaatagagtctctatccgtcacattccatggacatgatctcatt

SEQ ID NO: 5751 - DNA, 347 bp, Glycine max
cccacgcgtccgacaacatcgtattctgcaaattcaaaccgggtcttggttttctgaaagatgggaggtggcaaggacaagcatcatgatgaatctgacaaaggaattttttcacaccttgctcatggggtagctggtgcagcacatggtggacatgggtacccacctggggcttacccaccaccacctggggcataccctccacaacaaggatatcctccagctgggtatcctccacaacaagggtattctccagctgggtacccttcacatcaaggctatcctcctgctggttaccccccagctggttatcctggttcatcacatgcaccaggttctcatgggca

SEQ ID NO: 5752 - DNA, 399 bp, Glycine max
  modified_base (267)..(267): a, c, g, t, unknown, or other
  modified_base (300)..(300): a, c, g, t, unknown, or other
  modified_base (366)..(366): a, c, g, t, unknown, or other
caatttctctctttttgctcagtttctgttgtattttctcaattacaacatcgtattctgcaaattcaaaccgggtcttggttttctgaaagatgggaggtggcaaggacaagcatcatgatgaatctgacaaaggaattttttcacaccttgctcatggggtagctggtgcagcacatggtggacatgggtacccacctggggcttacccaccaccacctggggcataccctccacaacaaggatatcctccagctgggtatcctncacaacaagggtatcctccagctgggtaccctncacatcaaggctatcctcctgctggttaccccccagcttgttatcctggttcatcacatgcaccangttctcatgggcacggcggtatgggagcaatgc

SEQ ID NO: 5753 - DNA, 430 bp, Glycine max
tgcaatttctcaattactacatcgtattctgcaaattcaaactgggtcttggtttgctggaagatgggaggtggcaaggacaagcaccatgatgaatctgacaaaggaattttttcacagcttgctcatggggtagctggtgcagcacatggtggacatgggtacccacctggggcttacccaccaccacctggggcataccctgcgcaccaagggtaccctccacaacatgggtatcctccggctgggtaccctccacatcaaggttaccctcctgctggttacccaccagctggttatcctggttcatctcatgcaccaggttctcatggtcacggcggcatgggagcaatgctcaccgtgggtgctgccgcggctgctgctgcttatggtgctcaccatgtctctcatggctcccatggctcctatg

SEQ ID NO: 5754 - DNA, 178 bp, Glycine max
ggaaaaatggtttcgctgaaactgctgaagcggctcgcagccagcgtcctcaagtgtggcagatgaaaggtttggcttgaccccaatgaagtcaacgaaatctccatggctaattctcgccaaaacataaggaacctggttaaggatgggttaataatcaggaaccccttcaagattc

SEQ ID NO: 5755 - DNA, 444 bp, Glycine max
tcccgggcaataacacactgtaaccgttccgttccgttttcctctgttttttttttctttctttcaaatccccgcttcgtggaaatcccgaaccagaaaccatgcttctccgaaccgctgctgcttctgcttcgtccctctccctcttcagcccgaacgccgaacctccccgttcggttcccgctcgtggattggtggttcgcgcagcgaaaggatccacgaaccaccgcgccctgaccggagtgatttttgaaccgttcgaagaggtgaagaaggagctcgatctcgttcccaccgttccgcaagcttctctcgcgcgccaaaaatacgttgacgaatctgagtccgccgttaacgaacaaatcaatgtggagtataacgtttcgtacgtgtaccatgccatgtttgcgtacttcgatacggacaacgttgcgctgagaggac

SEQ ID NO: 5756 - DNA, 392 bp, Glycine max
cccacgcgtccgcccacgcgtccgtctgagtccgccgttaacgaacaaatcaatgtggagtataacgtttcgtacgtttaccatgccatgtttgcgtacttcgatagggacaacgttgcgctgagaggacttgccaagttttttaaggaatcgagtgaagaagaaagagagcatgctgagaaattgatggagtatcagaacaaacgtggtggaaaagtgaagttgcagtcaattgtgatgccgctttctgattttgatcatgcagataagggagatgcgctgcacgcaatggaactcgctctgtcattagagaagctaaccaacgagaagctccttaacttgcacagtgttgccacaaagaatggtgacgtgcagttggctgacttcgtgga

SEQ ID NO: 5757 - DNA, 443 bp, Glycine max
accacgcgtccgaaaaaaaattagaaaacaatatagatacgatcttttatcctataattttatcaattatgcagataagaaagactcatatatttatggatatagatccctatttcaagtaaaaaaaaaccaagtgatttcttctaattacaacacgtataaaaaagaattattggatatcatagataatctctttatcaagaattatatatcggaagatgcgattctagatatggaaaaaaatatgtatagaaagtattttgattggatgggaatcaatagagaaatactaaatcgttccatatcgaatccagaattttggttcttttcaaaatttgtgatattttatgacgcatataggggtaactcgcaggttataccaatcaaattactttttttttcttctaatgtaaatcaaaatgttagtgaaaataaaaagaaca

SEQ ID NO: 5758 - DNA, 413 bp, Glycine max
agcttttcgtctcaaaccttggcacaaatctaagctacgatccaatgaaaagaaaaaggatctaatgaaaaaaaagaacttttgttttctaacagtttgggggatggaagtcgacttgcccttttctggttctccccaaaaaaatagattttcatcattttttgaccccatttttaaagaactaaaaaaaaaaacgaaacaatttcaatttttcacttttcgagttctaaaagttttaagtgaaaaattgaaattgtttctaactatcttaatagaaaaagcaaaaaggattagcaaaagtattatcgaaagtattcttaaaagtattctcaaaagtattctaagcctaacgaaaataaaacaatttttcaaattgctatttattaaatttaaattcaaaaagatagatgaat

SEQ ID NO: 5759 - DNA, 381 bp, Glycine max
attttcttcatccttctctgttctcctagaacttgattacttgaacattccctatgacagatgaggtggttcttctggatttctggccaagtccatttgggatgagggtcaggattgcacttgctgaaaagggtatcgaatatgagtacaaagaagaggacttgaggaacaagagtcctcttctcttacaaatgaacccggttcacaagaagattccggttctcatccacaatggcaaacccatttccgaatccctcattgctgttcagtacattgaggaggtttggaatgacagaaatcccttgttgccttcagacccttaccagagagctcaggctagattctgggctgattatgttgacattaagatacatgatcttg

SEQ ID NO: 5760 - DNA, 367 bp, Glycine max
cccacgcatccgcttgatccttctttttctccttgaactcaaacatggcagatgaggtggttctgctagatttctggccaagtccatttgggatgagggtcaggattgcacttgctgaaaagggtatcaaatatgagtacaaagaagaggacttgaggaacaagagtcctcttctcctccaaatgaacccggttcacaagaagattccggttctcatccacaatggcaaacccatttgtgaatccctcattgctgttcagtacattgaggaggtttggaatgacagaaatcccttgttgccttctgacccttaccagagagctcaggctagattctgggctgattatgttgataagaagatatatga

SEQ ID NO: 5761 - DNA, 467 bp, Glycine max
ccggtcaagacttcccggcttctactttgagtcatcttgatccttctttttctccttgaactcaaacatggcagatgaggtggttctgctagatttctggccaagtccatttgggatgagggtcaggattgcacttgctgaaaagggtatcaaatatgagtacaaagaagaggacttgaggaacaagagtcctcttctcctccaaatgaacccggttcacaagaagattccggttctcatccacaatggcaaacccatttgtgaatccctcattgctgttcagtacattgaggaagtttggaatgacagaaatcccttgttgccttctgacccttaccagagagctcaggctagattctgggctgattatgttgataagaagatataggatcttggaaggaagatttggacatcaaaacgagaagaagaagaagctgccaagaaagagttcataaaagcccttaaat

SEQ ID NO: 5762 - DNA, 376 bp, Glycine max
aggtttggaatgacagaaatcccttgttgccttcagacccttaccagagagctcaggctagattctgggctgattatgttgacattaagatacatgatcttggaaagaagatttggacatcaaagggagaagaaaaagaagctgccaagaaggagttcatagaggcccttaaattgttggaggaacagctgggagataagacttattttggaggagacaatattggttttgtggatatagcacttgttccattctacacttggttcaaagtctatgagacttttggcagcctcaacattgagaatgagtgccccaagtttgttgcttgggccaagaggtgcctacagaaagagagtgttgcaaagtctcttcctga

SEQ ID NO: 5763 - DNA, 442 bp, Glycine max
  modified_base (411)..(411): a, c, g, t, unknown, or other
cggacgcgtgggcggacgcgtgggcggtcgcgtgggcggacgcgtgggcagttttctacttgaatcttcgttatccttctttttttctccttgaactcgaatattcactatggcagatgaggtggttctgctagatttctggccaagtccatttgggatgagggtcaggattgcacttgctgaaaagggtatcaaatatgagtccaaagaagaggacttgcagaacaagagccctttgctcctcaaaatgaacccggttcacaagaaaatcccggttctcatccacaatggcaaacccatttgtgaatctctcgttgctgttcagtacattgaggaggtctggaatgacagaaatcccttgttgccttctgacccttaccagagagctcaggctagattctgggctgactntgttgacaataagatatttgatcttggaaga

SEQ ID NO: 5764 - DNA, 422 bp, Glycine max
attttcttcatccttctctgttctcctagaacttgattacttgaacattccctatgacagaggaggtggttcttctggatttctggccaagtccatttgggatgagggtcaggattgcacttgctgaaaagggtatcgaatatgagtacaaagaagaggacttgaggaacaagagtcctcttctcttacaaatgaacccggttcacaagaagattccggttctcatccacaatggcaaacccatttccgaatccctcattgctgttcagtacattgaggaggtttggaatgacagaaatcccttgttgccttcagacccttaccagagagctcaggctagattctgggctgattatgttgacattaagatacatgatcttggaaagaagatttggacatcaaagggagaagaaaaagaagct

SEQ ID NO: 5765 - DNA, 410 bp, Glycine max
cccaattccgacccgcacgtacgcatctcttgatccttctctgttctcctataacttgattacttgaacattccctatgacagatgaggtgcttcttctggagttgtggccaagtccatttgggatgagggtcacgattgcacttgctgaaaagggtatcgaatatgagtacaaagaagaggacttgaggaacaagagtcctcttctcttacaaatgaacccggttcacaagaagattccggttctcatccacaatggcaaacccatttccgaatccctcattgctgttcagtacattgaggaggtttggaatgacagaaatcccttgttgccttcagacccttaccagagagctcaagctagattctgggctgattatgttgacattaagatacatgatcttggaaaga

SEQ ID NO: 5766 - DNA, 432 bp, Glycine max
gaaaagggtatcgaatatgagtacaaagtagaggacttgaggaacaagagtcctcttctcttacaaatgaacccggttcacaagaagattccggttctcatccacaatggcaaacccatttccgaatccctcattgctgttcagtacattgaggaggtttggaatgacagaaatcccttgttgccttcagacccttaccagagagctcaggctagattctgggctgattatgttgacattaagatacatgatcttggaaagaagatttggacatcaaagggagaagaaaaagaagctgccaagaaggagttcatagaggcccttaaattgttggaggaacagctgggagataagacttattttggaggagacaatattggttttgtggatatagcacttgttccattctacacttggttcaaagtctatgag

SEQ ID NO: 5767 - DNA, 418 bp, Glycine max
gtcttcttgtctctagaactgtttctgaacattccctatgacagatgaggtggtcttctggatttctggccaagtccatttgggatgagggtcacgattgcacttgctgaaaaggtatcgaatatgagtcaaagaagaggacttgaggaacaagagtcctcttctcttacaaatgaacccggtcacaagaagattccgttctcatccacatggcaacccatttccgactccctcattgctgtcagtacattgaggaggttcggaatgacagaaatcccttgttgccttcagacccttaccagagagctcaggctagattctgggctgattatgttgacattaagatacatgatcttggaaagaagatttggacatcaaagggagaagacaaagaaactgccaagaaggagttcataga

SEQ ID NO: 5768 - DNA, 415 bp, Glycine max
gaatcttcgttatccttcctttttttcttccttggaactcgaatattcactatggcagatgaggtggttctgctagatttctggccaagtccatttgggatgagggtcaggattgcacttgctgaaaagggtatcaaatatgagtccaaagaagaggacttgcagaacaagagccctttgctcctcaaaatgaacccggttcacaagaaaatcccggttctcatccacaatggcaaacccatttgtgaatctctcgttgctgttcagtacattgaggaggtctggaatgacagaaatcccttgttgccttctgacccttaccagagagctcaggctagattctgggctgactttgttgacaataagatatttgatcttggaagaaagatttggacatcaaagggagaagaaaaag

SEQ ID NO: 5769 - DNA, 419 bp, Glycine max
tcgatctattctactttgagtcttcttgatccttgtacctctccttgaactcaaacatggcagatgaggtggttctgctagatttctggccaagtccatttgggatgagggtcaggattgcacttgctgaaaagggtatcaaatatgagtacaaagaagaggacttgaggaacaagagtcctcttctcctccaaatgaacccggttcacaagaagattccggttctcatccacaatggcaaacccatttgtgaatccctcattgctgttcagtacattgaggaggtttggaatgacagaaatcccttgttgccttctgacccttaccagagagctcaagctagattctgggctgattatgttgataagaagatatatgatcttggaaggaagatttggacatcaaaaggagaagaaaaa

SEQ ID NO: 5770 - DNA, 427 bp, Glycine max
tgaatcttcgttatccttctttttttctccttgaactcgaatattcactatggcagatgaggtggttctgctagatttctggccaagtccatttgggatgagggtcaggattgcacttgctgaaaagggtatcaaatatgagtccaaagaagaggacttgcagaacaagagccctttgctcctcaaaatgaacccggttcacaagaaaatcccggttctcatccacaatggcaaacccatttgtgaatctctcgttgctgttcagtacattgaggaggtctggaatgacagaaatcccttgttgccttctgacccttaccagagagctcaggctagattctgggctgactttgttgacaataagatatttgatcttgggaagaaagatttggacatcaaagggagaagaaaaagaagctgccaaaaa

SEQ ID NO: 5771 - DNA, 356 bp, Glycine max
cttcatccttctctggtctactagaacttgattacttgaacagtgccgatgacagatgaggtggttcttctggatttctggccaagtccatttgggatgagggtcaggattgcacttgctgaaaagggtatcgaatatgagtacaaagaagaggacttgaggaacaagagtcctcttctcttacaaatgaacccggttcacaagaagattccggttctcatccacaatggcaaacccatttccgaatccctcattgctgttcagtacattgaggaggtttggaatgacagaaatcccttgttgccttcagacccttaccagaaagctcaagctagattctgggctgattatggtga

SEQ ID NO: 5772 - DNA, 381 bp, Glycine max
cttgaattttcttcatccttctctgttctcctagaacttgattacttgaacattccctatgagagatgaggtggttcttctggatttctggccaagtccatttgggatgagggtcaggattgcacttgctgaaaagggtatcgaatatgagtacaaagaagaggacttgaggaacaagagtcctcttctcttacaaatgaacccggttcacaagaagattccggttctcatccacaatggcaaacccatttccgaatccctcattgctgttcagtacattgaggaggtttggaatgacagaaatcccttgttgccttcagacccttaccagagagctcaggctagattctgggctgattatgttgacattaagatacatga

SEQ ID NO: 5773 - DNA, 380 bp, Glycine max
  modified_base (3)..(3): a, c, g, t, unknown, or other
  modified_base (8)..(10): a, c, g, t, unknown, or other
ctngaatnnncttcatccttctctgttctcctagaacttgattacttgaacattccctatgacagatgaggtggttcttctggatttctggccaagtccatttgggatgagggtcaggattgcacttgctgaaaagggtatcgaatatgagtacaaagaagaggacttgaggaacaagagtcctcttctcttacaaatgaacccggttcacaagaagattccggttctcatccacaatggcaaacccatttccgaatccctcattgctgttcagtacattgaggaggtttggaatgacagaaatcccttgttgccttcagacccttaccagagagctcaggctagattctgggctgattatgttgacattaagatacatg

SEQ ID NO: 5774 - DNA, 415 bp, Glycine max
gaattttcttcatccttctctgttctcctagaacttgattacttgaacattccctatgacagatgaggtggttcttctggatttctggccaagtccatttgggatgagggtcaggattgcacttgctgaaaagggtatcgaatatgagtacaaagaagaggacttgaggaacaagagtcctcttctcttacaaatgaacccggttcacaagaagattccggttctcatccacaatggcaaacccatttccgaatccctcattgctgttcagtacattgaggaggtttggaatgacagaaatcccttgttgccttcagacccttaccagagagctcaggctagattctgggctgattatgttgacattaagatacatgatcttggaagaagatttggacatcaaaaggagaagaaa

SEQ ID NO: 5775 - DNA, 414 bp, Glycine max
cttcatccttctctgttctcctagaacttgattacttgaacattccctatgacagatgaggtggttcttctggatttctggccaagtccatttgggatgagggtcaggattgcacttgctgaaaagggtatcgaatatgagtacaaagaagaggacttgaggaacaagagtcctcttctcttacaaatgaacccggttcacaagaagattccggttctcatccacaatggcaaacccatttccgaatccctcattgctgttcagtacattgaggaggtttggaatgacagaaatcccttgttgccttcagacccttaccagagagctcaggctagattctgggctgattatgttgacattaagatacatgatcttgggaagaagatttggacatcaaagggagaagaaaaagaa

SEQ ID NO: 5776 - DNA, 424 bp, Glycine max
cccacgcgtccgcttcatccttctctgttctcctagaacttgattacttgaacattccgtatgacagatgaggtggttcttctggatttctggccaagtccatttgggatgagggtcaggattgcacttgctgaaaagggtatcgaatatgagtacaaagaagaggacttgaggaacaagagtcctcttctcttacaaatgaacccggttcacaagaagattccggttctcatccacaatggcaaacccatttccgaatccctcattgctgttcagtacattgaagaggtttggaatgacagaaatcccttgttgccttcagacccttaccagagagctcatgctaaattctgggctgattatgttgacatttagatacatgatcttggaaagaaaatttggacatcaaagggagaagaaaaag

SEQ ID NO: 5777 - DNA, 376 bp, Glycine max
  modified_base (317)..(317): a, c, g, t, unknown, or other
cccacgcgtccgcccacgcgtccgtgaatcttcgttatccttctttttttctccttgaactcgaatattcactatggcagatgaggtggttctgctagatttctggccaagtccatttgggatgagggtcaggattgcacttgctgaaaagggtatcaaatatgagtccaaagaagaggacttgcagaacaagagccctttgctcctcaaaatgaacccggttcacaagaaaatcccggttctcatccacaatggcaaacccatttgtgaatctctcgttgctgttcagtacattgaggaggtctggaatgacaganatcccttgttgccttctgacccttaccagagagctcaggctagattctgggcttgactt

SEQ ID NO: 5778 - DNA, 440 bp, Glycine max
gcgcccacgcgtccgattttcttcatccttctctgttctcctagaacttgattacttgaacattcggtatgacagatgaggtggttcttctggatttctggccaagttcatttgggatgagggtcaggattgcacttgctgaaaagggtatcgaatatgagtacaaagaagaggacttgagtaacaagagtcctcttgtcttacaaatgaaccctgttcacaagaagattccggttctcatgcacaatggcatacccatttccgaatccctcattgatgttcagtacattgaggaggactggaatgacagaaattccttgatgacttcagacccttaccagagagctcaggctagaatctgtgctgattatgtcgacattaagatacatgatcttggaaagaagatatggacatctaaggaagaaggaaacgaagctgtc

SEQ ID NO: 5779 - DNA, 404 bp, Glycine max
  modified_base (14)..(14): a, c, g, t, unknown, or other
  modified_base (19)..(20): a, c, g, t, unknown, or other
  modified_base (26)..(27): a, c, g, t, unknown, or other
  modified_base (33)..(33): a, c, g, t, unknown, or other
cccacgcgtccgantttcnncattcnnttttgncctccgagtttcttgactacttgaacattccctgtgacagatgaggtggttcttctggatttctggccaagtccatttgggatgagggtcaggattgcacttgctgaaaagggtatcgaatatgagtacaaagaagaggacttgaggaacaagagtcctcttctcttacaaatgaacccggttcacaagaagattccggttctcatccacaatggcaaacccatttccgaatccctcattgctgttcagtacattgaggaggtttggaatgacagaaatcccttgttgccttcagacccttaccagagagctcaagctagattctgggctgattatgttgacattaagatacatgatcttggaaagaagat

SEQ ID NO: 5780 - DNA, 123 bp, Glycine max
tgggatgagggtcatgattgcacttgctgaaaagggatcgaatatgagtacaaataaatacttgatgaacaagagtcctcttctttaaaatgaaccctgtcacaagaagattccgttctatca

SEQ ID NO: 5781 - DNA, 417 bp, Glycine max
cccacgcgtccgcttgaatcttcgttatccttctttttttctccttgaactcggatattgactatggcagatgaggtggttctgctagatttctggccaagtccatttgggatgagggtcaggattgcacttgctgaaaagggtatcaaatatgagtccaaagaagaggacttgcagaacaagagccctttgctcctcaaaatgaacccggttcacaagaaaatcccggttctcatccacaatggcaaacccagttgtgaatctctcgttgctgttcagtacattgaagaagtctggaatgacagaaatccccttgtgccttctgacccttaccagaaagctcagggtagattctgggcttgactttgtgacaataagatatttgatctttgaagaaagatttggacattaaaggga

SEQ ID NO: 5782 - DNA, 419 bp, Glycine max
gaattttcttcatccttctctgttctcctagaacttgattacttgaacattccctatgacagatgaggtggttcttctggatttctggccaagtccatttgggatgagggtcaggattgcacttgctgaaaagggtatcgaatatgagtacaaagaagaggacttgaggaacaagagtcctcttctcttacaaatgaacccggttcacaagaagattccggttctcatccacaatggcaaacccatttccgaatccctcattgctgttcagtacattgaggaggtttggaatgacagaaatcccttgttgccttcagacccttaccagagagctcaggctagattctgggctgattatgttgacattaagatacatgatcttggaaagaagatttggacatcaaagggagaagaaaaag

SEQ ID NO: 5783 - DNA, 345 bp, Glycine max
caccaccaccaccaaccaaccaccccttccagacaaaaaagtggtgtcatcatgtgagaagaagaagaagaaaagtgtgagtgcagaaaagaagagtggtgggcgagctcggaagaacgtgtacagaggaatcaggcaaaggccgtggggcaagtgggccgcggaaataagggacccacataagggcgtccgcgtctggctcggcaccttccccaccgccgaggaagccgcccgagcctacgacgacgccgccaagcgcatccgcggcgacaaggccaagctcaacttcccggccaccgctccgccaccctccaaaaaacaacgctgccttaggcctgattccac

SEQ ID NO: 5784 - DNA, 446 bp, Glycine max
gtttgtcacgagacccatagtgctgccaaattatagtaactctctttctctatctgaagaagaagaagttctgaagaagcatgtgtggaggtgctatcatctcagacttcattggtgtgaagcgtggccgcaacctcgccgcgcaggaactgtggtccgagcttgaccctttctctgacctccttggcttcgataccaccaccaccaccaccaaccaaccaccccttccagacaaaaaagtggtgtcatcatgtgagaagaagaagaagaaaagtgtgagtgcagaaaagaagagtggtgggcgagctcggaagaacgtgtacagaggaatcaggcaaaggccgtggggcaagtgggccgcggaaataagggacccacataagggcgtccgcgtctggctcggcacctttcccaccgccgaggaagccgcccgagcctacgacgac

SEQ ID NO: 5785 - DNA, 355 bp, Glycine max
cccacgcgtccgcacgagactcatacattgtgctgccaattatagtaactctctagttctctttccatctctcaagttctgaagaagaaacatgtgtggaggtgctatcatctcagacttcattggtgtgaagcgtggccgcaacctcgccgcgcaggaactatggtctgagcttgaccctttctctgacttccttggcttcgataccaccaattccaaaaaccaaccacccctgcagaaaattccagacaaaaaagtggtgtcatcatgtgagaagaagaagaaaagcgtggtgggtgcagaaaagaagaagagtgatagtgggcgagctcgtaaaaacgtgtacagaggaatc

SEQ ID NO: 5786 - DNA, 408 bp, Glycine max
acgagactcatacattgtgctgccaattatagtaactctctatttctctttccatctggcaaggtctgaagaagaaacatgtgtggaagtgccatcatcttagactctaatggtgtgaaacgtgggcgcaaactctccgcgcacgagctctatgctgagctcgagcctttctctgacactcttggctttgataccccccatttcaaaaacccaccacacctgtgcaaaatttcacacacaaaagaggtgtcgtatcatgagaaaaagaaaaaaaacagggtgggtgcagcaaagaagaagaagagtgatagtgggcgagctcgtaaaaacgtgtacagaggaatcaggcaaaggccatggggcaagtgcgccgcggagataagggacccacacaggggtgttcgtgtc

SEQ ID NO: 5787 - DNA, 466 bp, Glycine max
gtttgtctgtcacgagactcatacattgtgctgccaattatagtaactctctatttctcttggcatctctcaagttctgaagaagaaacatgtgtggaggtgctatcatctcagacttcattggtgtgaagcgtggccgcaacctcgccgcgcaggaactatggtctgagcttgaccctttctctgacttccttggcttcgataccaccaattccaaaaaccaaccacccctgcagaaaattccagacaaaaaagtggtgtcatcatgtgagaagaagaagaaaagcgtggtgggtgcagaaaagaagaagagtgatagtgggcgagctcgtaaaaacgtgtacagaggaatcaggcaaaggccatggggcaagtgggccgccgagataaaggacccacacaagggtgttcgtgtctggctcggcacctttcccaccggcgaagaagcccgcccaagcctacgacg

SEQ ID NO: 5788 - DNA, 436 bp, Glycine max
gtcacgagacccatagtgctgccaaattatattaactctctttctctatctgaagaagaaggagttctgaagaagcatgtgtggaggtgctatcatctcagacttcattggtgtgaagcgtggccgcaacctcgccgcgcaggaactgtggtccgagcttgaccctttctctgacctccttggcttcgataccaccaccaccaccaccaaccaaccaccccttccagacaaaaaaagtggtgtcatcatgtgagaagaagaagaagaaaagtgtgagtgcagaaaagaagagtggtgggcgagctcggaagaacgtgtacagaggaatcaggcaaaggccgtggggcaagtgggccgcggaaataagggacccacataagggcgtccgcgtctggctcggcacctttcccaccgtcgaggaagccgtccgagccta

SEQ ID NO: 5789 - DNA, 432 bp, Glycine max
cccacgcgtccggtcacgagactcatacattgtgctgccaattatagtaactctctattgcggtttccatctctcaagttctgaagaagaaacatgtgtggaggtgctatcatctcagacttcattggtgtgaagcgtggccgcaacctcgccgcgcacgaactatggtctgagcttgaccctttctctgacttccttggcttcgataccaccaattccaaaaaccaaccacccctgcagaaaattccagacaaaaaagtggtgtcatcatgtgagaagaagaagaaaagcgtggtgggtgcagaaaagaagaagagtgatagtgggcgagctcgtaaaaacgtgtacagaggaatcaggcaaaggccattgggcaagtgggccgcggagataaggacccacacaagggtgttcatgtctggctcggcacct

SEQ ID NO: 5790 - DNA, 445 bp, Glycine max
gcacaagttgaacttcgtgacgagcatgggaacccagttgaactaacagatgcatatgggaatccggtttggttaacggacgagaaaggcaacccggtgcacctcacggctgtggcaaccaatgcacacaaatctatgcttcagaatgacaccccacaagagcttcctcactccaagagttcaagctcgtctgaggatgaagggcatggagagaggatcaggaagggactgaaggataacatagaagaaaagttaccagctggagaaggagtagtgaaggagaataaacacaccacaattgctgcttctacttctacaacagatactagtgatgctaatcaccacccaaccactgagcatgagaagaagagtatcatagacaagattaaagaaaaattccaataaatcagcagtgaatattaatatatattcacgaattgaagct

SEQ ID NO: 5791 - DNA, 440 bp, Glycine max
atctgtattctcttctcatcgcgcgtaagatacacattttagttgctactaatgggaactgttgaagctgcgaacaaggatgcaaatggaagtctcctagagaaaaatccttcagttgtttttgtgttaggtggcccaggaagtggaaagggtacccaatgtgcaaatattgtccaaaattttgggtatactcatctcagcgctggtgatcttctgcgagcagaaatcaaatctggtcctgaaaatggtacaatgattcagaatatgattaaagaaggaaaaattgttccctctgaggtaacaattaagctcttacaaaaagcaatgcaggaaagtggcaatgacaaatttcttattgatggttttccccgcaatgaggaaaaccgggcagcatttgagaaagtgacaggaatagagccagcatttgtcttattttttga

SEQ ID NO: 5792 - DNA, 430 bp, Glycine max
cccacgcgtccgattaagaaccctccagaagttaagaaaggatccaaagacaagaaggcgatgaggagagctgagaaggagagacagaaggaaggtgaattagctgatgaggaacagaagaaagtgaagaaagaggttaagaagaaaggctcttcatcttctaaggatggcactgctaaatcaacctcttctaagaaaaaagcaagtggctctgatgaagaccacacttcacctactcacagtcaaattgacgagaaagaggaggctccagatgaagatgatgacgacgacgtgcaatggctgacagatacatcacttgatgctgcccgtcaacgtatccaagaacagttaagtgctgtgacagctgataattggttatgctttctacagatgaaccagagaagaagaaaaaaacaataagtaacagaaa

SEQ ID NO: 5793 - DNA, 348 bp, Glycine max
  modified_base (329)..(329): a, c, g, t, unknown, or other
atgcgatacagtggttggaggggaaccagttggcggaagtggatgagtttgaggacaagcagaaggagttggaagggatctgcaaccccatcattgcgaaaatgtaccagggtgctgctgctagacctggtggagatgttcctacgggtgatgatgacatgcctggtgctggtggtgctggttctggcgcgggacctaagattgaagaagttgactaagcttgtgcatgtgactaactcaaaaactttggttaggttcttgttatttggtctaataatgtaagttttagtgatgatgtaaggtttcaggaatcgtgaataagtcttttntgcttcatgtgatgagtgt

SEQ ID NO: 5794 - DNA, 417 bp, Glycine max
attgattttcagttgcgttttcgatttggcagacaaggagatccaggaaggtccggctttttctggagtgtggaagataacatatttcgtatttttggtggagatcgaattcagggcctaatgcaagcgttcagagttgaagacctacctattgaatccaagatgttgaccaaagctttagatgaagcccaaaggaaagtggagaactatttctttgacattcggaagcaatttgttgagtatgaagaagtacttaacagccaaagagatcgagtttatacagagagaagactagcccttgaatctgacaatcttcagtctctttctaatgaatatgctgaattgacaattggatgacattttagaagcaaacattggttcttatgctccaaaagacagctgggaatcttgaaaaac

SEQ ID NO: 5795 - DNA, 326 bp, Glycine max
agacttaatggatgcattgaggattatggtgctgatgcatttcctttcacaaggaagaagcatgaagaattgatagccatagatataaggaagcgtgaggaagcaaacttggaagaattattgggacacaaaaggtgccactttctcatctcaagagatgatagaaaggtgcccatatctgaactagctggtaaaaccataggcctttattttggggcctattggtctcctccttgctgcgccttcactgtccaacttaccgatgcatacaacaatctcaaggtggaaaaaggcgactgctttgagaatgtttcaatctcaacaga

SEQ ID NO: 5796 - DNA, 446 bp, Glycine max
tcgtccacgcgttcgagaatgtacagtgagcttatttcaaagagtattacagaaggtggaccttttgcatctagaacatcctatgtcaaacttctacgttcggttaagagggagacacttaagctgattgagacattcttggataaggcagaagaccagccacaaatcggcaaacaatttgtgccgccaatgatggatcctggtcttggagattactccaggaatgttcctgatgcaagggaatcaaaggttttgtcactttttgcaacaattgttaacaaatataaagctgcaatgattgaagatgtacctcgcatatttgaagctgtttttcagtgcacacttgagatgattacaaaaaaattttgaagattacccagagcatcggctcaagttcttctctctacttcgtgccatagctactcattgtttcctgcattaatctg

SEQ ID NO: 5797 - DNA, 397 bp, Glycine max
caaacacgtcactaatcgtatcaacaattcaccatgcgcttgagctgcaatggatgccgcgttctccgcagagggtgcaccactgagtgccccattcgcatctccctccaatggatcaattcccctaactcccaatccaacgcaaccctcttccttgcaaagttctatggccgccaaggcctcctcaccctcctcaccaacgctccctcacaactacaacaagccgttttaaaatctttgctttacgaagcatgcggtcgaatagtgaacccggttctcggctcgaccgggttgctctccaccgggaattggcatttgtgcgaagccgcggtcaaagccgttcttaatggcgcgccgattgagcaggctcctttggacggcgccacaagcctgcagc

SEQ ID NO: 5798 - DNA, 424 bp, Glycine max
gaccacgcgtcagggagtccctaaatacatgtgaatggttcagcgatttttgtccagttcgtgcacaccataataaccaatcactggcccatcaagcctacttctatgttgccatgaaattcaaggacctttatgcatccctcacagggaaaaaactctttgtggcacaagccagggcaatggaccgagtaactgttgatgaggcattcaagtacataaaagatatcctgaaatgggatgaatagaacgaggataatttctatggtccacctgaggattcattttacagcacagacataagctcctctacctttatcatacaatagtgaatgagtgtccataaaataatacattattacttggctgttgaaaacggttaaaaatgtaacgtgctggccagcttgtgttctgtgatcctatatgt

SEQ ID NO: 5799 - DNA, 376 bp, Glycine max
tctcctaattctctctcactacatccatcctgcggagacaaaacaagcctcttagcgtgcgttcaagtttcacacgttcttccactatgtcctggttgagacacctctcctccaagttctcctccaccaccatcacaagcacgcgccgcttcacttccctgtcccggttcagtacctcgaccgctccggctcgtcatgcgggcctggggcccactcaggcccatgagaaagcccaggtggtggtgctgggctcccggttggcccgggtggccgcttagaaagggctcgacactgcaatctacgacgtcgtttgcgtgatcccttgcatccacatggtcttcacgcctctcttggcctccacggtgtgggaactttt

SEQ ID NO: 5800 - DNA, 358 bp, Glycine max
  modified_base (13)..(13): a, c, g, t, unknown, or other
gtccggccgtctnctgcatcagtttcaactgcactttcaaattcgccaccagtttcccccaagtggttctcaccgccgcttccttcgacccaaacctctggtaccaaatcagcaagactattgggaaggaagcgagggcggtgtacaatgcggggcaagcgacggggatgacgttctgggctccgaacataaacgttttcagggatccacggtgggggagagggcaagagactgcaggggaagaccctctgatgaatgccaagtatggtgtggcgtatgtgagagggcttcaaggggattcctttgaaggagggaaactgggtgagaggcttcaagcttcggcgtgttgcaagcactt

SEQ ID NO: 5801 - DNA, 435 bp, Glycine max
ctttccacacacacaacacaaatacctctctttctctctcttcttcgcattctgcggacatacaaaaactcacactctctctctctctcttcaaatcaaaacccctcacaaaattcacaacaacatacacacaaatcccaaatcctgtcttctcatataaaagaacccttctttcgaatccttcccgctctctctctctcttattctttttccctatccgattcaattcgcgcgcagttccaaaccctagtccccctctccgagctctgtgattcttgggttgataaaaaaaattagggtttgatggctgaccaaggattggaagggagccaaccagtggatctacagaagcatccttctgggatcgtgcctacccttcaaaatattgtgtccacagtcaatttggactgtaagttggacctcaaaacaattgcc

SEQ ID NO: 5802 - DNA, 460 bp, Glycine max
cccacgcgtccgtttctctctcttcaaatcaaaacccatcacaattcacaacaacatgcagatcccaaatcctatcttttctcttctcatataaaagaacccttctttcgaatccttcccgctcttttccctctgatttaattcatgcgcagatccaaaccctaatccatctctccgagctctttgatttttgagttaataaaaaaaaaaaaaattagggtttgatggctgaccaaggattggaagggagccagccggtggatctacagaagcatccttctgggatcgtgcctacccttcaaaatattgtgtccacagtcaatttggactgtaagttggacctcaaaacaattgcacttcaagctcgtaatgcagagtacaatcccaagcgttttgctgctgtcattatgaggataagagatcccaaaacaactgcacttatttctgcttctggcaagat

SEQ ID NO: 5803 - DNA, 373 bp, Glycine max
acagaatatatggagttgggatcatcgtattacttgatacatttgaacggtcaaaagaagaagcttgattggcggataagactgaggatgttgcgtgacatatgcaagggtttgatgtgcatacacagaatgaacgtgtgtcaccgtgatctgaaaagtgcaaattgtctagtgaataagcattggactgtcaaaatatgtgatattgagctttcaagaataatgacagagtctcccatgagagattctgtatcaactggaacgccaaaatggatggctcctgagcttattcgaaatgaaccgttcacagaaaaatgtgatatcttcagacttgtggtgataactgtgggaaactctgtgacctgtgaacaga

SEQ ID NO: 5804 - DNA, 428 bp, Glycine max
ggaaccttggccacagatatcggagagtgccaagagccttgtgcggcgaatgttggagccggatcctaaaaagcgcttgacagcggaacaggtgcttgaacatccctggctgcaaaatgcaaagaaagctccaaatgttccattaggagatattgtgaggtcaaggcttaagcagttttctgtgatgaatagattcaaaaagaaagctctgcgggtaattgcagaacatttatctgttgaagaggtagaaataatcaaagacatgtttacattgatggatactgacaaagatggcagagtaacatttgaggaactgaaggctgggttgaggaaagttggttcacaattggctgagccggagattaagatgctgatggaagtggctgatgttgatgggaatggagtacttgactatggagagtttgtag

SEQ ID NO: 5805 - DNA, 409 bp, Glycine max
gctatggcggcctccttgttggggaagcttgttagccaaccaatgcacggaccaagagtggctatcacacttgcaaggtttctccctgatggccttgtatcagtaatcagggatggacctggtgaagcagttgtagttgcccttgagcagactacagagacaccagaacttgtatggacgccagcgatggcgacttccttatctgcacaaatttccactatggcatcagagctataccgtgagcagatgaaagggcgtgttgttgattgggatgtgcctgagcaggcatctggacagcaggaaatgagagatgagccacaggttggtggcatctatgttaggctgtttctgaaagatcccaaattccctcttagaaaccctaaaaggttcttggaaggtctactagatc

SEQ ID NO: 5806 - DNA, 429 bp, Glycine max
aaaggaccttaaggcaagggacattgaagcctacagattgcaaactcttccaccacaatcggtggggtaatgtggtcattacaactcctgatggcatttgggatcatgaagaggccattaggaagaatgtaggtggccaggttcttggttactttcactaaaatgatcattactgtgctgttttggccaggtattaagttctgctatgtttccacataaacattccataaatgttttatgcgattacagaattttttctcttcctgtatgaatgttataacatggctgctcatgcatgatgagtatgatggattggatttgatgctctgtggaaatttttcctgagtttgataaatggtgtactagacatgaatggttattatatccttagtttgtaatctatttcaaattcaaattccatgtagtcat

SEQ ID NO: 5807 - DNA, 375 bp, Glycine max
tgatgacgggaagaacatgacatgattaagatgagccatctcgagctgtgtaccagctctccgcgctcggtctcaacctccttcgctcgcctctgtcgtcgttgacgttctctgacgaggttccgccgttggcggcgtcacggcgtcccgggctgggtcagatatcgccggcgggattcgcctccttgctgttgggaatatcgctggcgttgatgctgtgtggatcggtgacgttcttcatcgggttcgtgttgatgccatgggttctgggattggtcatgctcttctacgtcgccggaatcctctccagcctctccgtcttcggccgctccattctctgctacgccaccgctacaccctcgccacgtaaggaca

SEQ ID NO: 5808 - DNA, 385 bp, Glycine max
ctcgtaccgattcgcaggtccgaccaaggcgtccgtgttatttccgttcccaggtcaggggcacttgataccaatgagtgatatggcgagagcatgtaatggaagaggggtgaggacaaccatagtgaccactccactcaacgtagccactattcgtggaacaataggaaaagagacagagacagatatagaaatcctgacggtgaaattccctagtgcagaggctggtttacctgagggatgcgaaaatacagagtcaatcccctcccctgacttggtactgactttcttaaaggcaatcaggatgttggaagcccccttggaacacctactccttcaacaccgtcctcattgccttatagccagtgctttcttcccttgggca

SEQ ID NO: 5809 - DNA, 379 bp, Glycine max
gggcgggggaatatggatggggaactacacataatgttatttccgttcccaggtcaggggcacttgataccaatgagtgatatggcgagagcatttaatggaagaggggtgaggacaaccatagtgaccactccactcaacgtagccactattcgtggaacaataggaaaagagacagagacagatatagaaatcctgacggtgaaattccctagtgcagaggctggtttacctgagggatgcgaaaatacagagtcaatcccctcccctgacttggtactgactttcttaaaggcaatcaggatgttggaagcccccttggaacacctactccttcaacaccgtcctcattgccttatagccagtgctttcttccctt

SEQ ID NO: 5810 - DNA, 394 bp, Glycine max
  modified_base (384)..(384): a, c, g, t, unknown, or other
gttagaacgggcacatatgggcatctttactgagttaggagttctgtatgctagagacggccctgagaagcttatggagcatatcaaactattctcaacccgcctcaatattcctaaactcataagagcttgtgatgaacaacagcattggaaagaattgacctatttgtatatacaatatggtgagtttgataatgctgcaactaccatcatgaaccattcacctgaagcatgggatcacatgcaattcaaagatgttgttgttaaagttgccaatgtggagttgtactacaaggctgttcacttctacttggaagagcatccagatcttatcaatgatgttctgaacgtccttgcacttcgtgtggaccatgcacgtgttgntgacatcatg

SEQ ID NO: 5811 - DNA, 437 bp, Glycine max
aactttgatcaaataggccttgctcaaaagattgaaaagcatgagcttcttgagatgagacgtgttgctgcttatatttacaagaaggcaggtaggtggaagcagtctattgctttgtcaaagaaggataacctttacaaagatgccatggagacagcctcccaatccggggagcgtgaacttgctgaggagttgcttgtttatttcattgatcagggaaagaaggaatgctttgcctcatgtctatttgtttgctatgatctcatacgggcagacattgttcttgaactagcttggatgcacaatatgattgactttgcctttccatatctattgcagtttattcgtgagtacactggcaaagtcgatgaactagtgaaagacaaaattgaagcacaaaatgaagtgaaagctaaagagcaagaagaaaaggatgt

SEQ ID NO: 5812 - DNA, 366 bp, Glycine max
  modified_base (290)..(290): a, c, g, t, unknown, or other
acgcgtcctaactttgatcaaataggccttgctcaaaagatttaaaagcatgagcttcttgagatgagactgattgctgcttatatttacgggaaggcaggtaggtggaagcagtctattgctttgtcaaagaaggataacctttacaaagatgccatggagacagccttccaatccgtggagcgtgaacttgctgaggagtcgcttgatcatttcattgatcagggaaagaaggaatgctttgcctcatgtctatttgtttgctatgatctcatacgggcagacattgntcttgaactatcttggatgcacaatatgattgactttgcctttacatatctattgcaggtcattcgtgagtacact

SEQ ID NO: 5813 - DNA, 431 bp, Glycine max
  modified_base (126)..(126): a, c, g, t, unknown, or other
tccggcaatgttaaccatgacttggtgaaatacttgctaatggtaagaggggaagcaaaagaacccaaggtcgacagtgagctcatttatgcatatgcaaaaatagataggctgagtgacattgangagttcattcttatgcctaatgttgctaatcttcaaaatgttggtgaccggttgtacgatgaagcattatatgaagctgcaaaaatcatatttgcttttatatctaactgggccaagttggctatcacactggtcaaattacaacagtttcaaggtgctgttgatgcagcaaggaaagccaacagctcaaagacatggaaggaagtttgctttgcttgtgttgatgcagaggagtttcgtttggcccaaatttgtggactaaacattattattcaagtggatgacttggaagaagtcagtgaata

SEQ ID NO: 5814 - DNA, 422 bp, Glycine max
  modified_base (382)..(382): a, c, g, t, unknown, or other
caaaatatcatttcatgcagtatgctgaccaaattatgggtttgtttttgagagtgtttgcttctcgaagtgcaacagctcatgaggaggctatgcttgccattggggctttggcctatgcaaccggtgctgattttgcgaaatacatgacagaattttacaagtatttggagatgggtctccaaaatttcgaggactaccaggtttgtgctatcacagtgggtgtggttggtgatgtatgcagagccttggaggagaaaatactgccttattgtgatgggataatgacccaacttcttaaagatttgtctagcaatcagttgcataagtccggtaaagcttctaatttttcatgttttggaaacattgccttggcattggnagaaactttgagaaatacctgttatatgcaatgcctatgc

SEQ ID NO: 5815 - DNA, 422 bp, Glycine max
aaacacatcattagagggactttacaaatcatatgggaatttctgtactcaatgtgaggctgaaggcttccgtaaaattacatcttatcaggatcgacctgatataatggcaaaatatacagttcgcattgaggcagataaatcactgtatccagtgatattgtctaatggaaacctagctgaacaaggtgacttataggatggcaggcactatgctgtttgggaggaccccttcaagaaaccttcttatctgtttgccttggatgctgggcaattgcagagcatagatgacacatttatcacccattcagggcggatggtgacccttaggatatggacacctgcagatgatgtacctaagactgtacatgctatgtattctctgacagcagctatgacatgggatgaagatgtttttggac

SEQ ID NO: 5816 - DNA, 390 bp, Glycine max
attcctatgttgccaatcagatattcccaaattccaccctcgcaccctggaacggggagtccgattccgacaccaccgccaccaacgcccccgtggtggcgatggccgaggccgaggccgaggctgtggtggaacaagaagaggaacagaaaaaaatggaagaagtggaagagaaagatgatgatgaggaggatgagggggaggaggaggaggaggaggaggaagaggagaaggagaagagattgatgtggtggaaggttccttttgatgtgaactggtcacgctcgtatacttgagtgtactccatgtaatgactagtctatatatgtctaagccgtcgatgctcttctgagacttttattcctgggacggaggttgcacagaaagagg

SEQ ID NO: 5817 - DNA, 445 bp, Glycine max
  modified_base (212)..(212): a, c, g, t, unknown, or other
  modified_base (248)..(248): a, c, g, t, unknown, or other
cacgcgtcaggcttaccctttcaatctcatcagatcctttcgtggttgcgcgaaaccctaattttgaatccgcaaacatgtctgcagctatggaaatgtcgctcgacgacataatcaagaacaacaaaaaatctggattcggaagttcccgtggccggattcgaccctccggttccggaccttctcgccggttccccaaccgtgccgccaancgcgccgctccttatgccaccgctaaggcgccggangcgacgttgcaacaagaattaaaaggcaaatcagcaagtggctgcggcggggtaccctgctcaaggtggtcgtgcggcttccatagaaactgggactaagctttacatttcaaacttggattatggtgtttccagtgacgatattaaggaattgtttgctgaagttggtgacctgaaacggcatgcggttcattatg

SEQ ID NO: 5818 - DNA, 443 bp, Glycine max
gccttagtgatccaagctagtattttagggatcagggcatgaagtctattcaaactgggcaaccagcaccagatccatttggtttgcttggcctgttaagtgtgatcaggatgagtgatcctgacctgacatctcttgctcttggaattgatcttactacactggggttaaatttgaattcatcagaaaatcttcacaagacctttgggtctccatggactgatgaatcagctaagggagatccagagtttacagtgccacaatgttattttgccaaacagccacctgctctacatcaaggttatttttccaagttttcggtggaaacattgttttacatattttatagcatgcccaaagatgaagcccaattatatgccgccagtgagctttacaacagaggttggttttatcacatagaacatcgtttatggttaataaga

SEQ ID NO: 5819 - DNA, 307 bp, Glycine max
agtataaccattcaaaatcctaatgcacttgacagcaaggttcttctggattttgatcatgttaaaaatagtttgaaagttgatgatgaagaactacagaaaatgagttcagatccaacctataacataaacatgtcgggtgatataaagcaaatgcttaaggagcttggaactgagaaaggaaaggaaactgcattgcatgggggaggcggtggcaaggcacaaaaagaaagagctgctgcacttgctgccatcttagctgcaaggtcacgtgttgaagaagattccaaatcaaatccaaataaag

SEQ ID NO: 5820 - DNA, 376 bp, Glycine max
  modified_base (151)..(151): a, c, g, t, unknown, or other
aggagaatatcattgtccagtgctaaacaaagttttcactgaatttactcatattgtggcagtgaagaccacaggaaatgtgttctgctatgaggctgttaaagagttaaatattaagacaaaaaactggaaggagctcctcaccgatganccattcactaaggatgaccttataaccattcaaaatcctaatgcacttgacagcaaggttcttctggattttgatcatggttaaaaaataggtttgaaagttgatgataaggactacagaaaatgagttcagatccaacctataacataaacatgtcgggtgatataaagcaaatgcttaaggagcttggaactgagaaagggaaggaaactgcattgcatgggg

SEQ ID NO: 5821 - DNA, 438 bp, Glycine max
  modified_base (432)..(432): a, c, g, t, unknown, or other
agaaaacgctgtgctgtggctgagaaggggaaaggcgcggttgaaagattgaaagctcgacatgtcagggaaaggcgcaaagggtttgataactgctaaggacaaagataagaaaaaaccaatttctcgctcctcaagagccggtcttcagtttcctgttggacgcattcatcgtcttctgaagtcaagggtgacagcacatggaagagttggggcaacagctgcagtttattctgctgccatcctggagtatttaactgcagaggtgttggagttggctggcaatgcgagcaaggatctgaaggtgaagcgtattaccccaagacatctacagcttgccatccgtggagatgaagaacttgataccctcatcaaaagaacaataactggtggaggtgttattcctcatatccacaagtcccttatcaacanatcttc

SEQ ID NO: 5822 - DNA, 167 bp, Glycine max
aggcagaggttggtgtcctcgaagagcacaacgaggtaggcctctgcgacttcttggagagtggagacggcgctgctgtggaagtagagattggtcttgaagtccagagcgatttcccttacaagtctttggaaaggaagcttccttatgagaagctcggtgttcct

SEQ ID NO: 5823 - DNA, 421 bp, Glycine max
ccgggtcggaccaagccttccgccaagccttccgattaattgcagggcgagcaaccatttcaaatatttcatggttttgccgttggtccgattgaattctaaatttccctcaagtgacaatgctattgggagaattaaagctaagttgatctctggagggggtgatctactttcctatccaaatggcaatggcattgtgataggtaaaaatctggttggtgatgaatctgttcgaattgaagtacagccgaatagaacactggcagcagacacagggctaacaagcaatgttttctctattgacaacgatgaatttgatttggacagccccacagcaggttttgcttccatttctgaggcaattgaagacattcgccagggaaagatggtagtggttgtggacgatgaagatcgagaaaat

SEQ ID NO: 5824 - DNA, 251 bp, Glycine max
gtttgaaaaagtttctacaagtgaggaacgccagtccttcattgataagcttgatcaggtgcaagattggttgtatacagatggtgaagatgccaatgccacagagtttcaagagcgtctagatcagttaaaagctgttggagatccaattttcttcaggttaaaagagcttacagctcggccagcagcagttgagcatgctaataaatacattgatgagttgaaacagattgttgaggagtggaaagcat

SEQ ID NO: 5825 - DNA, 320 bp, Glycine max
aaaagatgcagacagaaaaagaacagctgagttaaagaataatttagaaggatatatatatactaccaaggaaaagattgaaacgcttgaggagtttgaaaaagtttctacaagtgaggaacgccagtccttcattgagaagcttgatcaggtgcaagattggttgtatacagatggtgaagatgccaatgcaacagagtttcaagagcatctagatcagttaaaagctgttggagatccaattttcttcaggttaaaagagcttacaactcggccagcagcagttgagcatgctcataagtacattgatgagttgaaac

SEQ ID NO: 5826 - DNA, 336 bp, Glycine max
  modified_base (1)..(1): a, c, g, t, unknown, or other
  modified_base (14)..(14): a, c, g, t, unknown, or other
nccacgcgtacggncacctcttgtgtggcctaatcttcaaggaagaagttcagttggtgtctttcatatttgcacacagcattgtctatgcttttaggacctttgagcaagtttgggaggagctttgtgttgatatcaaggaaggtgtccttaacagcaaggtcacagtgccctccattatggaagccatgtctaaactcctaaaacctgaccctgagctggccaacttgatccacaacaagtgcatggggcttagcaactggtatggcctaataccagagctttttcccaatgttaagtatgttcatgggatcatgactgggtcaatggaacctt

SEQ ID NO: 5827 - DNA, 202 bp, Glycine max
atgaagcaggagttagaatattggtatttaattgatcttcgagattctggtaaggatctcatccagaatcatcttaccttctgcatttacaaccatactgcaattatggccaagcatcactggccttccaggtttagatgcaacggacacattatgctcaattctgagaaaatgtccaagtccactggaaatctcaggactt

SEQ ID NO: 5828 - DNA, 197 bp, Glycine max
  modified_base (3)..(3): a, c, g, t, unknown, or other
gangtgatttcgaacattggctcgcaagacagagggttttcaggttcagatatatctgtctgtgtgaaggatgttttatttgaacctgttcgcaaaacccaagatgccatgtttttctttaggaatcctgaagatatgtggatcccatgtggaccaaagcaacagagtgcagtacaaactacaatgcaggatcttgc

SEQ ID NO: 5829 - DNA, 352 bp, Glycine max
atttggctaagcaagcttttgatgaggcaattgcggagttggacaccctgagtgaagagtcatacaaggacagcactttgatcatgcagctgttgagagacaacctgactctctggacctctgatttgcctgaggatggaggtgaggacagcataaaagctgaagaaaccaaaccttctgagcctgagcattgatgtgattcaatagtcagaaatctaaggtactctcaaagaggacattttctagcaatggatttggacccggacaatagggactgtggttggtggccatttcataattcttatgctctttaatatctttacccaagctagaagatctgaccctttttttt

SEQ ID NO: 5830 - DNA, 339 bp, Glycine max
  modified_base (198)..(198): a, c, g, t, unknown, or other
aacataaggaacttctatcgtgttcaagaggttcctcatgaagggcccatgtgcgatctgttgtggtctgatccagatgataggtgcggcttgtgaatttcttcttgtggtgctggatatacatttggccaggatatatccgaacaatttaatcactcaaacaagctcaagttaattgctagtagctcattagctggntatggatgtatttaactaggctcatgaatgaaaggtggataccatttttagtgcacctaactactgttatcgatgtgggaacatggcttccattttggaggttgatgatatcaagggccatacgtttatacagtgtgatcc

SEQ ID NO: 5831 - DNA, 363 bp, Glycine max
gcacaagccactcatgcgtgacaagactgtgctggtaaccggcggagccggttagatgggcacccacaccgttcttcagctcttgctcggaggttgcagaaccgtcgtcgtcgacaatctcgacaattcctccgaggtttctatccaccgagtcagggagcttgccggcgaatttgggaacaacctctcctttcacaaggtggacctacgggacaaggatgcactagagcaaatttttgtttccacacaatttgatgctgtcatacactttgctggactgaaagcagtaggagaaagtgtgcaaaaacctttactatactattacaacaacttgactgggacaatcactctattggaagtcat

SEQ ID NO: 5832 - DNA, 405 bp, Glycine max
tttcttgcagattcgatgctgtcatacattttgctggactgaaagcagtaggagaaagtgtgcaaaaacctttactatactataacaacaacttgactgggacaatcactctattggaagtcatggctgcccatggatgcaagaagctcgtgttttcatcttcagcaactgtatatggttggccaaaggaggttccatgcacagaagagttccctctgtcagcaatgaacccatatggacgaactaagcttatcattgaagaaatttgccgtgatgtccactgtgcagagccagattgtaaaataattttgttaagatacttcaacccagttggtgcacaccccagtggttatattggggaggatcctcgtggaattccaaacaatctcatgccatttgttcagc

SEQ ID NO: 5833 - DNA, 436 bp, Glycine max
cacaattcattttcgaacgaacgtgtcacagaattctcgccttttccgaatatggcatcgcgcgtcagcattggcaatctcacttcctccgcgccgtatattaattcccctcattttcgctcacaacttaagctttccagcaactcctgtttgcacaagccactcatgcgcgacaagactgtgctggtaaccggcggagccggttacatcggcacccacaccgttcttcagctcttgctcggaagttgcagaaccgtcgtcgtcgacaatctcgacaattcctccgaggtttctatccaccgagtcaaggagcttgccggcgaatttgggaacaacctcttctttcacaaagtggacctacgggacaaggatgcactagagcaaatttttggttccacacaatttgatgctgtcatacactttgctggactgaaag

SEQ ID NO: 5834 - DNA, 437 bp, Glycine max
aaactcgctcagatctacacgtctctgctgattcatccttttcttctgcagaggaaagaaccaaccaacacttgtttcttcagccatggccagtcaacctgaatcatctgacgcaaagggcacaaaaagggattttagcaccgccatattagagcgtaagaaggctccgaatcggctcgtggttgatgaagctgtcaacgacgacaactctgttgtcgcgcttcatcctgataccatggagaaacttcaactttttcgtggtgacaccatcttgatcaaggggaaaaaaagaaaggatacaatatgtatcgcacttgctgatgagacatgcgaggaaccaaaaataagaatgaacaaggttgtaagaaacaaccttaaggttaggcttggagatgttgtttcagtgcatcagtgtcctgatgtcaaatatggaaagc

SEQ ID NO: 5835 - DNA, 414 bp, Glycine max
cggagccacattcgtgtctccgaagttcgaacttcgattagagagctattccacgtttggtcgagtggaaataagaacgagtctagttatactttggtggatattacgcaatggttcgcgtatttaactttcaacatggttgtgcgaatggtcgttgggaagaggtattttggtgtcatgcacgttgaaggcaaagacaaagcagaaaggtttatgaaaaatataagagagttcatgaatttgatggggactttcacggtggcagatggggttccttgtttgaggtggttggatttggggggttatgagaaggccatgaagggaaccgctaaggaaattgataaattattgagtgagtggttggaggagcaccttcagaagaagcttttgggtgaaaaggttgaaagtgataga

SEQ ID NO: 5836 - DNA, 382 bp, Glycine max
cctggaattaagcacgttatttcattagggttggttttgttgaacagaaaaaaagagagaaaaaaattatgggaagcgatggcgtgaggaaaccaagattcctatgccttcatgggttccgaacaagcggagaaatattgaaaacacagttacataagtggcctcaatcggttctagacaacctcgatctagtatttgtggatgctccttttccttgccttcgcaaatccgatgtagaaggcatttttgatcccccttactacgagtggtttcagttcaacaaggaatttacagagtacaccaactttgacgagtgccttcagtacattgaggaatgcatgatcaagtaccgacctattgataggcttcttgggtttttaca

SEQ ID NO: 5837 - DNA, 439 bp, Glycine max
  modified_base (311)..(311): a, c, g, t, unknown, or other
aaaccctggaattaagcacgttatttcattagggttggttttgttgaacagaaaaaaagagaaaaaaaaattatgggaagcgatggcgtgaggaaaccaagattcctatgccttcatgggttccgaacaagcggagaaatattgaaaacacagttacataagtggcctcaatcggttctagacaacctcgatctagtatttgtggatgctccttttccttgccttggcaaatccgatgtagaaggcatttttgatcccccttactacgagtggtttcagttcaacaaggaatttacagagtacaccaactntgacgagtgccttcagtacattgaggaatgcatgatcaagtacggacctattgatgggcttcttggtttctcacagggatcaatattatcggctgcgctgccgggtcttcaggagaaaggcgtggcac

SEQ ID NO: 5838 - DNA, 417 bp, Glycine max
ggaacatttggatatttggccccagagtactttatgcatggagttgtggatgagaaaactgatgtatttgcttttggagttttgctgttggagctcataacaggtcaccgtgctgttgattcgaatagtagacaaagtcttgtcatctgggcaaagccactgctggacacaaacaatgtaaaggatttagcagaccccagattaggagaggaatatgatcttactgaaatgaagcgcaccatgttgacggcttccatgtgtgtccaccatgcatcctccaagcggccatacatgaatcaggttgtgcttctactaaagggtgaagagacaattatagaaccaaagaaaaatttagttgcacagaaatctctcatgttagaggcatgtgacctagaagattatacttgctcaagttac

SEQ ID NO: 5839 - DNA, 414 bp, Glycine max
cttttcttattgcttgttgcgttctccctcgttttcgcggccgtgtcggcctcttcggacggcggcaacgaggaaccgctgatcatgcaggtggtcgatggcggtgacgtccggctgggagcagagcaccactttttggagttcaagcgcaggttcgggaaggcgtacgattccgaggacgagcacgattacaggtacaaggtgttcaaggctaacatgcgccgcgcccgccgccaccagagtctggacccttcggcggctcacggcgttacgcgcttctccgatcttacgccgtcggagttccggaacaaggtgttgggtctgagaggtgtgaggttgcctttggacgcgaacaaggctcccattctccccactgataatcttccgagtgattttgattggagagatcacgga

SEQ ID NO: 5840 - DNA, 311 bp, Glycine max
gaccaatgctcgaggtgaacttaaatacccaatcaagggaatcactatctggatagctgatggaaaaagtgctagagacagctttctgatgaatggttatgctctaaatactggccgtgctgctcaaggaatgccttttagggttgcccctgcaagaattgcctgtcttgatctctatcttcagaagacaaaaatgcagttgcgtgttcaagttctagttacagatcctagggagctagagaaagttcgttaaaaacaggctgatatgactaacgaacgtattgaaaaactgctgaaggctggatctaatg

SEQ ID NO: 5841 - DNA, 451 bp, Glycine max
gtgaagccctagactacactacacactttgcaatggcggttgttgcgcaaacccctgacatcggcggcgagcgacagtccggccaagacgttcgcacccaaaacgttgtggcatgccaagccgttgccaacatcgtcaaaagctctttaggccccgttggcctcgacaagatgctcgtcgacgacattggcgacgtcactatcaccaacgacggtgccacgattctcaagatgcttgaagtggagcatcctgctgccaaggttttggtggaactcgccgagcttcaggaccgagaagtcggagacggcactacttcggtcgtcattgtcgctgctgagcttctcaaaagggcaaatgaccttgtcaggaacaagattcatcctacctcgattatcagtggatatagacttgctatgcgtgaggcttgtaaatatgtagaagaaaaactagc

SEQ ID NO: 5842 - DNA, 435 bp, Glycine max
gagtgataacacccaccaaagaaccatggctacgcagttcctcaaatgcctccttctcctgtggaccttaaccctaaccatctcagcagaatacacaggctttgagggcacaatagacccaaagtccataggcataaagcacaagaaaaccctaagccacttcagattctactggcacgaagtcttcagcggagaaaaccccacatcggttagaatcattcccgcactccccaaatacaacacaaccacaacctttggttcggttgggatcttcgacaacgctttaactgtgggacccgaggtttactccaaggttgtcggaaaagccgagggcttgattgcctccacgtcgcaaacgcagttggatcttttgctgattttcaacttcgcattgacacaagggaagtacaacggcagcaccatcacgttcactgg

SEQ ID NO: 5843 - DNA, 469 bp, Glycine max
taccggtacggcagttcggggaacacgagacccaaagtccataggcatacaccacaagaaaaccctaagccacttcaggttctactggcacgagggcttcagcggagaaaaccccacatcggttagaatcattccctcactccccaaatacaacgcaaccacaaccttcggctccgttggaatctttgacacccctttaaccgtgggacctgaggtgtactccaaggttgtcggaaaagccgagggcttgtttgcctccacgtcacaaacgcagtttgacctgttactgatttacaacttcgcgttgacccaagggaagtacaacggcagcaccatcacgttcacggggaggagccccctctcggagaaggtgagggagctgcccattgttggtggtagtggggtcttcaaatttgccactgggtatgttgagtctaggacgctaagttttgatccccaaacaaggaat

SEQ ID NO: 5844 - DNA, 454 bp, Glycine max
tcgagcaaagcgtccggccacgcgttcggctatcgaaccgggcgagggggtgggccatcccagggcgaatccggatatggatccccagcagcgtccgttaatgtcggaccgggtcaccgttaacggctccgtcacgccgcttgctcttctcgccgacggccgtctatggtggtctgagggaatccaacggtgtttgtcgatcgaaaaggacgtcctcgggatcgttgccagtgggccctacataaaaatcaagagcctcgtggagacccgagacggatgctgcatcaccagcgcccctgcaagactcgttagaaacgacgtcgtctttatgccttcctacgaggaatctcacaggctctggtgccataaacttcgtgaattcattgattctctcggtcgtcctaagaggttgttggttgatgctaatcccgttggtgggaagaaatccgctacg

SEQ ID NO: 5845 - DNA, 419 bp, Glycine max
  modified_base (278)..(278): a, c, g, t, unknown, or other
aaaagctcagaaactcttaatgttgttccgagagcagcgacgggacccttcaccaggtaagacacataagtgcccacctgaaactgctagtgatttgtctatgccacctgctgaaatgaaaccgatatgcaagtcgattttgagaagaaagtccgggagagcttttagctttttctggaaaaacaagagctattctgtataccagtgttaagttccattggttgttgtaaatctgtgttagcatcttttatttttgtggccctgcttttatcctcctnctctacttcttggtcccatggggtgctctggttaattttggttcaaagcgaaaaaaaaatgtacaagccctgtgtaatttatggatttgttttcttctttcgcttttctctttgtgaaaatcaaatttccagggttttttc

SEQ ID NO: 5846 - DNA, 428 bp, Glycine max
caagcttaagaaaagagctttaagggtgattgctgagcatttgacggtagaagaagctgccgggctaaaagagggattccaggttatggatacaaacaacagaggcaagattaacattgatgaattacgagtagggttgcataaacttggtcatcaagttcccgaatcagatgtccaagctcttatggatgctggtgatgtagacggggatgggcacctagattatggagagtttgtagccatttctgttcatctgagaaagatgggaaatgatgagcatcttcgcaaagccttccaattttttgatcagaacaaaagtgagtatattgagattgaggagctgagtagcgccttatctgatgatcttgacacaaacagtgaagaagttgtcaatgcaattatgcatgatgtggacacagacaaggatg

SEQ ID NO: 5847 - DNA, 387 bp, Glycine max
ggcctcgaaagccttaagcctgaactcaaatcatcaattgagaagggaatcaaatttgccaaccagtaattgaacatgttatcacatacatgtctggtaggttactggatattcctttaagaaccaaatcaaattttgcattctcagaaccattgatgtattgttgtcggcagtggtgtggcggttttgttgttttatttagtgtaggtatacgccatggtttaataattaaagtctgagagctgtttgttgccaaagggattgaacgatcttaaaaccaggtttaggatttggcattccattaataatggtcccttttaactgtatggtttcacttaatgtaatttgcagggtgttgtaccctttattcacatttttttctcactt

SEQ ID NO: 5848 - DNA, 352 bp, Glycine max
ctcagaaccttctgaggttaaagcatacaacaaagagagagagagagagaagatgaggaagccatctatgctgagatctctccactccgccgccacccgcggcgcctctcatctcttccgccgtgggtacgcctccgagccggtgccggagcgcaaggtagccgttctcggcgccgccggcgggatcgggcaggctctctcccttctgatgaagctcaagcccctcgtttagagcctctccctttaccatatcgccggaactaccggcgtcgccgtcgatatcagccacataaacaccagatctgaggtagtggggtaccaaggagatgaatagcttggaaaagctttggag

SEQ ID NO: 5849 - DNA, 434 bp, Glycine max
cccacgcgtccgagattcaatttcgaagggcacaaggggatggaaggagaggctcttgtctcccaattcttctatgtcagaacttggttcagaagttaggagagaattgaatgctaaaattgctagcgtgtcccgattgatggagcgccttgaaacaagagaaaataatagtgctgcaggaacttctttatcaaatcatttggtgaaccgttccattgcagagacaagcaaccaaagcaatgtggaagctcgtggagagaactctttgcatggcaataatactccaactactttttctgcaagctcagattcaaaatgatctctagtttgcttctgtgaaggcatctttgctcaacgtatcatgtttgaaggctaactgtttgctcagacatgacatgatgaggaatatatgctcatggcagttgttggatttc

SEQ ID NO: 5850 - DNA, 443 bp, Glycine max
tctccttttctctctctagaattctcagatttgcggggcgagatgatgcagcagccaggacccggcatggcacctcccaccatgggccagcagccgcagcaacagtaccagcagcagcctccgccgcagcagcaacaaccctacgtcatgatgccgccgcagcatcaggcgccgcagcctatgtgggccccatccgcccagcctccgctgccgcagcagcctgctagcgccgacgaggtccgaaccctctggatcggggatctgcagtactggatggacgagaactatctctacacctgctttgctcataccggcgaggtttcgtcagttaaagtgattcggaacaagcaaactagtcaatctgaaggttatgggtttattgagtttaatagtcgtgctggagctgagagaattctccaaacatataatggggctattatgcc

SEQ ID NO: 5851 - DNA, 429 bp, Glycine max
tttctctctctagaattctcagatttgcggggcgagatgatgcagcagccaggacccggcatggcacctcccaccatgggccagcagccgccgcaacagtaccagcagcctccgccgcagcagcagcaaccctacgtcatgatgccgccgcaggcccaggccccgcaggccatgtgggccccctccgcccagcctccgcctcagcagcagcccgccagcgccgacgaggtccgaaccctctggatcggggatctgcagtactggatggacgagaactatctctatacctgctttgctcacaccggcgaggttacatcggttaaagtaattcgaaacaagcaaactagtcaatctgaaggttatgggtttattgagtttaatagtcgtgctggagctgagagaattcttcaaacatataatggggcaata

SEQ ID NO: 5852 - DNA, 418 bp, Glycine max
aaaaaaaaaaacgaaaatgctgagaatcgccgcaagcgcaaagagaattgttcaaacggcgtcgttggaggcgccaccgttggggattagggttctgccgcgtctctaccacgagagggtggtggaccactacgacaacccccgcaacgttggatccttcgacaagaacgaccccaccgtcggaacgggtcttgttggtgcacccgcgtgtggcgacgtcatgaagctccagattaaggttgacgacaaaacggggaagatcgtcgatgctcgcttcaaaaccttcggttgtggatccgccattgcttcttcctccgtcgctactgaatgggtgaagggaaagcaaatggaggaagttttgaccattaaaaacactgaaattgcaaagcatctttcacttccaccagtcaagcttcac

SEQ ID NO: 5853 - DNA, 433 bp, Glycine max
attttctgtatcaattgttacgagggctcaaatatgtacattcagcaaatgttttgcaccgagatctaaagcctagtaatttgctattgaatgccaattgtgaccttaagattgcggactttggtcttgctagaaccacatctgaaactgactttatgactgagtatgtggtcactagatggtaccgagctcccgaattgcttcttaattgttcagaatatacagcagccattgatatatggtctgttggttgcatacttggtgaaatcataacaaggacaaccgctctttcctggcaaagattatgttcatcagctgagacttatcacagagctgataggttcgccggatgatgccagccttggatttctacgaagtgataatgctcgtagatacgtaaaacagcttccgcagtatccaaaacaaaactttt

SEQ ID NO: 5854 - DNA, 398 bp, Glycine max
aaaaaaagaaacaattgttacaagggcattaaatttgtacattcagaagatgttaagatgcgagatctaaaacctagcatatatgctattgaatgcaaattagagaccttacgattgctgacttgggtcttgctagaaccacatatggatactgactttatgactgagtatgtggtcactagatggtaccgagctcccgaattgcttcttaattgttcatagtgtacaccatccattgatatatggaactgttggttgcatacttggtgaaatgataacatgacatccgctctataatggccaagatgatgtgcattagctcagacttatcacacagctgataggttcgcccgatgatgccagcctcggattaatacgaagtgataatgctcgtacat

SEQ ID NO: 5855 - DNA, 370 bp, Glycine max
aagacatcaaggaactcatctggagagaatctgtgaagttcaatcctgttccaccaggctactgagattttgtatttatgttgtatatgtttagtgaaatatctgatgactaatatatacattttatgaccactacttggcaagttgcagcgcacagaagatatgaaaacgtattggagatactgagattcactgagtttgttgaaggtttctttcgttttagtctcatctcagatacttggataatcatattgttgagatgtactgaggaaagaaaggatcaaaatatgtttcagcagaatatcctaaagctccaactcctttgtgtacttctatccttctttttagaatcaagtccataagttagtgc

SEQ ID NO: 5856 - DNA, 414 bp, Glycine max
cccacgcgtccgcccacgcgtacgggaagatggcttgggtcaaaattctcattctctgaagaagggctgtgattgtgtaggctatatcaaatactctgatgcgcatttcacaaacttctatggaggtgttgaaacaatcgaaaactgtgtttgtttgcacgaagaagatcatggtattttatggaagcatcaagattggacaacaggtttggctgaagttcgaaggtctagaatgctgacagtttcgtttatatgcactgtggctaactatgagtatggatctttctggcacttttatcaggatggcaagatagaagcagaagtcaagctcacaggaattctcagcttacgagcattgcagccagatgcatctcgaaattatggcacaaccatcgcacctggactatacgcgcc

SEQ ID NO: 5857 - DNA, 338 bp, Glycine max
tcgaagcaatgcgtgattgtgaccctttatctgctcgtcactggattgttaggaacactaggactgtaaaccgaactgggcatctaactggttacaagctagtacctggctcaaattggttacctttagctggctcagaggccaagtttttgagaagggcagctttcttgaaacacaacctttgggttactccttatgcacgcgatgaaatgcatcctggaggagagttccctaatcaaaatccacgtgttggaaaaggtttggctacttgggttaagcaaaatcgatcactggaggaagctgatataggtctttggtacgtatttggagtgacacac

SEQ ID NO: 5858 - DNA, 379 bp, Glycine max
aaaacttccattcttggttttgattgtcaagaatctaaagaagtatttcacatttgagattcaagttttggatgataagaatgtcagacgacgatttcaagcctcaaattttcaagtgtgctgtcactcgggtaaagccctacattgcactatgccactgagaatgatgaggggtggaatcaaatccagtttaacctggctgatttcaccaagagagcatatggtactaattatgtggagacactgcaagttcaggtccatgcaaactgtcgcctgagaaggatttacttctctgaccgcctctactctgaagaggaactccctccagagttcaaattgtaccttccaatgcagaaatcatgaaaaaatgggagtttgg

SEQ ID NO: 5859 - DNA, 403 bp, Glycine max
  modified_base (305)..(305): a, c, g, t, unknown, or other
  modified_base (385)..(385): a, c, g, t, unknown, or other
cccacgcgtccgaaatacctaagattcgctaaaatcccttccccgtcgccagatcgcatggacccttgaattccgattcggataggcatgtccggagcggccttgtcgccgccgacgaattcgaagtcgctgacgcagacggtgagcgggtcgcacaagttcgtgatcgagggctattcgctggcgaaggggatgggagtggggaagcacattgcaagcgacgtgttcaccgtcggaggttaccactgggcgatctacttctaccccgacggcaagaatcccgaggacaattccgactacgtctncgtcttcatcgtcttggccagcgaaggcaccgacgtcagggcgcttttcgagctcacgctcctcgaccagagcggccagnggaagcacaaagttcata

SEQ ID NO: 5860 - DNA, 432 bp, Glycine max
aggaagcgtgggtcacaaaggagcagctccactctctcgtcacgcaggccgtggatatgtttcccgaattcgtcgatagcgtgcgccggcttgctgacgtggaccctgcgcacaggaaaatcttcgtccatggccttggctgggacgccactgccgatactctaaccgccgtgttcgggaaatacggcgagatcgaggattgcaaggccgtcaccgacaaggtctccgggaaatcaaagggttacgcctttatcctcttcaagcacagggacgatgctcgcaaggcgctgaaacaccctcaaaagaagatcggaaaccgcaccacctcgtgccagctggcctccgccggccccgttccggctccaccgccgaacgtgaccccggtgtctgagtacacccagaggaagatttttgtgagcaatgtgaatgctg

SEQ ID NO: 5861 - DNA, 433 bp, Glycine max
ccgctcgaccacgcgtccgagaggatcagctcttctctttcggcatgcaagccgcggatatgtatcccgaattcggcgattttttaagcctgcttgatcacgtgtaccctgcgcacaggaaaatcttcgtccatggccttggctgggacgccactgccgatactctaaccgccgtgttcgggaaatacggcgagatcgaggattgcaaggccgtcaccgacaaggtctccgggaaatcaaagggttacgcctttatcctcttcaagcacagggacgatgctcgcaaggcgctgaaacaccctcaaaagaagatcggaaacctcaccacctcgtgccagctggccttcgcctgccccgttccggcttcaccgccgaacgtgaccccggtgtctgagtccacccagaagtaagattttgtgatcaattgtaatgc

SEQ ID NO: 5862 - DNA, 439 bp, Glycine max
ccgccggccccgttccggctccaccgccgaacgtgaccccggtgtctgagtacacccagaggaagatttttgtgagcaatgtgaatgctgagattgatcctcagaagctgcttgaattcttcaagcagtttggggaggttgaggatggtcctcttggtttggataagaacactgggaaacctaagggttttgcgctttttgtgtacaagtctgtggagagtgccaagaaggctttggaagagcctcataagaactatgaggggcatactttgtattgtcagaaggctgttgatggtcctaaggggagcaaggggtatcatcatcagcagcattctcatcctcatcaccaccaccaccatcagcctcattaccagaggaaggagaagaacacgtattcctctggtggtggtggaccatcgcatggaagtggtcatttgat

SEQ ID NO: 5863 - DNA, 304 bp, Glycine max
ggaacctcatcaaaaccaagaacagcttcgtcacaaccatcagaaacttcgtccaagcgcaaaggaggagttttccaaaaagaattgcagcacatgatgtatggctttggagatgatcctaatccacttcctgaaagtgtggctcttatggaggacattgttgtggagtatgtcacagaactggtacataaagcccaagatattggatctcagagggggaagctatcagttgaggatttcctctatttgattcgcaaggattcgccaaaacttaaccgctgtacagaactactttctatgaatg

SEQ ID NO: 5864 - DNA, 465 bp, Glycine max
  modified_base (439)..(439): a, c, g, t, unknown, or other
cccacgcgtccgcccacgcgtccgcagaaacaaacattatttggttttctgaattgtttggattgcgagaaaaaaaaagggggggaaatggcaaaggatattcgattcttcgacctcaacacgggcgccaagatcccttcagtcggcttgggaacttggcagtctgatcctggccttgttgctgaagccgtcgcggcggccatcaaggttggttaccgccacattgattgtgctcaaatctatggcaatgagaaggagattggctctttgttgaagaatctgtttgaggagggtgtagtgaagcgcgaggatttgtggattacatctaaactctggaatactgatcatgctccagaagatgtaccactggcactggaccggaccttgaaagatttgcagctggattatgtagaattggatcttatccactggcctgctncgatgaaaaaaggatcaactggcttt

SEQ ID NO: 5865 - DNA, 381 bp, Glycine max
  modified_base (356)..(356): a, c, g, t, unknown, or other
gttttgtcccattggccaattcggccactctcctctgagaaagcctccagcctctcctccaaagtcccctgcggttcgttcggttattcttcgaaccgttgtctgaagtttacaactcaaaacttcaccgaacgcatttcattcaccaattcgtccaagtctcgtatcaatcaatcagcctatccgtcttgcggttggagagatcggaggggagagcagccatggcgcatcgagtagaccacgagtatgactatctgttcaagatcgttttgatcggagactcaggtgtaggcaaatccaacatcctctccaggttcactcgaaacgagttctgtttggagtccaaatccactatncgagttgagttcgccaccagaactc

SEQ ID NO: 5866 - DNA, 349 bp, Glycine max
atgcgtgctcttactactgaatacgatgagcgtactaagatctaccgcatgaaacttctgggccactctacgaggtacgtgccaaatccaagttctggtattttttgagaaaattgaagaaggttaagaaaagcaatggacaagtgctagccatcaatgagatttttgagaagaatcctaccaagattaagaattatggaatttggctgcgttatcagagccgcactggttatcacaatatgtacaaggaataccgagatacaactgtgaatggtgcagttgaacatatgtacactgaaatggcatctggtcatagggtgaggcattcatgcattcagataattaagac

SEQ ID NO: 5867 - DNA, 451 bp, Glycine max
ctcgtactcggtacctgaatgtctcggactcgacgcgacgcggtctgctcactccgtgaatatgatgagcgtactaagatctaccgtatgaaaatctgtgccaccatacgtaggtcacgtgccaaatccaagttctggtattttttgagaaaattgaagaaggttaagaaaagcaatggacaagtgctagccatcaatgagatttttgagaagaatcctaccaagattaagaattatggaatttggctgcgttatcagagccgtactggttatcacaatatgtacaaggaataccgagatacaactctgaatggtgcagttgagcatatgtacactgaaatggcatctcgtcatagggtgaggcatccatgcatacagataattaaaactgccaacatcccagctaagctgtgcaaaagggagagcaccaagcaatttcacaattcttaaa

SEQ ID NO: 5868 - DNA, 413 bp, Glycine max
  modified_base (390)..(390): a, c, g, t, unknown, or other
cgccggcatggagccacgcataatccgcgagatcgacgccatgcgccgcctccaccagcaccctaacatcctcaaaatccacgaggtgctcgccaccaaaaccaagatccacctcgtcgtggagctcgccgccggcggcgagctcttcgccaaaatctcccgccgcggaaagcttccggagtccaccgcgcgccgctacttccagcagctcgtctcggcgctccggttctgccaccgcaacggcgtggcgcaccgcgacctgaagccgcagaatctcctcctcgacggcgacggcaacctcaaggtctgcgacttcgggctctccgcgctgccggagcagctcaagaacggcctcctccacaccgcctgcggcacgccggcgtacaccgngccggagatcctccgccagagcg

SEQ ID NO: 5869 - DNA, 440 bp, Glycine max
cccacgcgtccgcccacgcgttcgcccacgcgtccgctgattttctgatgtggcagaggaagtgaaggcaaaatatcctaaaattacatatgcagatctcttccagcttgcgggtgttgttgcagttgaggttactgggggtccaacaattgatttcgttcctggtagaagagattcaaaagtatctcctaatgaagggcggcttcctgatgctaaaaaaggtgttccacatctccgtgatatcttttatcgaatgggcttgactgaccgagatattgttgcactatctggaggacatacactggggagagcacatccagagagatcagggtttgatggcccttggacggaggaccctctgaagtttgataactcatactttgtggaacttttgaaagaagattctgctgggctgcttaaacttccaacagacaaggctt

SEQ ID NO: 5870 - DNA, 330 bp, Glycine max
actctgggtaggcggttgatcaagcaatcctggcagaagaggagcgtctggtcgtgatccgtttcgggcacgactgggacgaaacctgcatgcagatggacgaggtgttggcgtcggtggcggagacgataaagaactttgcggtgatatacctggttgacataacggaggtgccggatttcaacaccatgtacgagctctacgacccttccacggtgatgttcttcttcaggaacaagcacatcatgattgatctgggaaccggtaacaacaacaagatcaactgggctctcaaggacaagcacgagttcatcgacattgttgagaccg

SEQ ID NO: 5871 - DNA, 435 bp, Glycine max
ggaaacgtgaaattagggttcatcgaggaggaagaagaagaagaagatgtcgtacctggggcctcacttgcactctggatgggccgtcgatcaagcaatcctcgccgaagaggagcgtctcgtcgtcatccgtttcggccacgactgggacgaaacctgcatgcagatggacgaggtgttggcgtcagtggcggagacgataaagaactttgcggtgatatacctggtggacataacggaggtgccggatttcaacaccatgtacgagctctacgacccttccacggtgatgttcttcttcaggaacaagcacatcatgattgatctcggaaccggtaacaacaacaagatcaactgggctctcaaggacaagcaggagttcatcgacattgttgagaccgtctatcgtggagccaggaagggacggggtctcgt

SEQ ID NO: 5872 - DNA, 411 bp, Glycine max
atctagccttctttctttttttcaatttccaaatcacgaaactcaagaagatggagaaagcgatcaacagacagaagattttgcttcatcatctcaacccttcatcatccacccaccccaacgaatcatcctccctccatgcttcagcatgtgtggcgggggatagcgctgcttatcaaaggacatcgacattcggggacgatgttgtgatcgtggctgcttatcggactgctcattgcaaagctaaacgaggtggtttcaaagacactcttcctgatgatctactggctcctgttttgaaggctgtaattgagaaaaccaatgtgaacccaagtgaagttggggatattgttgtacgtagtgtattggctcctggagctcagggagctagtgaatgccgaatgggtgcat

SEQ ID NO: 5873 - DNA, 440 bp, Glycine max
  modified_base (388)..(388): a, c, g, t, unknown, or other
accaagcgtccgcttctttctttttttcaatttccaaatcacgaaactcaagaagatggaaaaagcgattaacaaacaaaagattttgcttcaacatcccaacccttcatcatccaaccaccccaacgaatcatcctccctccatgcttcagcatgtgtggccggggatagcgctgcttatcaaaggacatcgacattcggggacgatgttgtgatcgtggctgcttatcggactgctcattgcaaagctaaacgaagtggtttcaaagacactcttcctgatgatctactggctcctgttttgaaggctgtaattgagaaaaccaatgtgaaaccaagtgaagttggggatatttgtgtaggtagtgtattggctcctgaagctcanagagctagtgaatgccgaattgctgcattttatgctggttttcccgaaactg

SEQ ID NO: 5874 - DNA, 417 bp, Glycine max
tagcctactctctttttttcaatttccaaatcacgaaactcatgagatggagaaagcgatcaacagacagaagattttgcttcatcatctcaacccttcatcatccacccaccccaacgaatcatcctccctccatgcttcagcatgtgtggcgggggatagcgctgcttatcaaaggacatcgacattcggggacgatgttgtgatcgtggctgcttatcggactgctcattgcaaagctaaacgaggtggtttcaaagacactcttcctgatgatctactggctcctgttttgaaggctgtaattgagaaaaccaatgtgaacccaagtgaagttggggatattgttgtaggtagtgtattggctcctggagctcacagagctagtgaatgccgaatggctgcattttatgctgg

SEQ ID NO: 5875 - DNA, 432 bp, Glycine max
  modified_base (371)..(371): a, c, g, t, unknown, or other
  modified_base (398)..(398): a, c, g, t, unknown, or other
caggtctagagcttgatgatattgatctttttgaaataaatgaggcatttgcctcccagttcgtgtattgccgtaacaagctagggcttgatccagaaaagatcaatgttaatggaggtgcaatggcaattgggcatcctctgggttcaacaggtgctcgatgtgttgcaactctgttgcatgaaatgaagaaacgtgtcaaggactgtcgatttggagttatatctatgtgcataggtactggaatgggggcagctgctgcttttgagagtggtgattgtgctgatgagctatgcaatgcccggaaagtggatgaccttcttttatccaaagatgctcgcttgaaataggtactttatactcactatatntggtcatcatataagaaatcacagtanagtctttttctatggtagtgataatgtcaaccac

SEQ ID NO: 5876 - DNA, 431 bp, Glycine max
  modified_base (373)..(373): a, c, g, t, unknown, or other
  modified_base (402)..(402): a, c, g, t, unknown, or other
ctttctttttttcaatttccaaatcacgaaactcaagaagatggagaaagcgatcaacagacagaagattttgcttcatcatctcaacccttcatcatccacccaccccaacgaatcatcctccctccatgcttcagcatgtgtggcgggggatagcgctgcttatcaaaggacatcgacattcggggacgatgttgtgatcgtggctgcttatcggactgctcattgcaaagctaaacgaggtggtttcaaagacactcttcctgatgatctactggctcctgttttgaaggctgtaattgagaaaaccaatgtgaacccaagtgaagttggggatattgttgtaagtagtgtattggctcctggagctcanagagctagtgaatgccgaatggctgcatnttatgctggttttcccgaaactgtgcctg

SEQ ID NO: 5877 - DNA, 389 bp, Glycine max
ccagatcacgaaactaaagaagatggagaaagcgatcagcagacagaggattttgcttcatcatctcaacccttcatcgtctacccacgtcaacgaatcatcctccctctatgcttcagcatgtgtggcgggggacagcgctgcttatcaaaggacatcgacattcagggatgatgttgtgatcgtggctgcttatcggactgctcattgcaaaggtaaacgtggtggtttcaaagatactcttcctgatgatctactggctcctgttttgaaagctgtaattgagagaaccaatgtgaaccccagcgaagttggggatattgtcgtaaggagtgtattggctcctggagctcaaagagctagtgaatgccgaatggctgcattttatg

SEQ ID NO: 5878 - DNA, 390 bp, Glycine max
gagaaatctgtcaccatttctgttgatgatggaattcgacctggcacaacagtgtctgatctaggaaggctcaaacctgtgttcaagaaagacggaagcactactgctggtaattctagtcaggtgagtgatggtgctgcagctgttctgctgatgaaaagaagtgttgcgttgcaaaaggggctacccattcttggtgtattcaggactttcgcagcagttggtgttgatcctgccataatgggtgttggtcctgctgctgcaattcctgttgctgttaaggctgcaggtctagagcttgatgatattgatctttttgaaataaatgaagcatttgcttcccaggtcgtatattgtcgtaacaatctaaggcttgatccaaaaaagatc

SEQ ID NO: 5879 - DNA, 404 bp, Glycine max
cttgttctcaatttccaaatcacgaaactcaataagatggagaaagcgatcaacagacggaaggttttgcttcatcatctcaacccttcatcatccacccaccccaacgaatcatcctccctccatgcttcatcatgtctggcacgggatagctctgcttatcaaaggacatcgacattcggggacgatcttgtgatcgtggctgcttatcggactgctcattgcaaagctaaacgaggtggtttcaaagacactcttcctgatgatctactggctcctgtttcgaaggctgtaattgagaaaaccaatgtgaacccaagtgaacttggggatattgttgtacgtagtgtattggctcctggagctcaaagagctagtgaatgccgaatggctgcattttatgc

SEQ ID NO: 5880 - DNA, 437 bp, Glycine max
cggacgcgtgggttctttttttcaatttccaaatcacgaaactcaagaagatggagaaagcgatcgacagacagaagattttgcttcatcatctcaacccttcatcatccacccaccccaacgaatcatcctccctccatgcttcagcatgtgtggcgggggatagcgctgcttatcaaaggacatcgacattcggggacgatgttgtgatcgtggctgcttatcggactgctcattgcaaagctaaacgaggtggtttcaaagacactcttcctgatgatctactggctcctgttttgaaagctgtaattgagaaaaccaatgtgaacccaagtgaagttggggatattgttgtaggtagtgtattggctcctggagctcaaagagctagtgaatgccgaatggctgcattttatgcctgtttttccgaaactgtg

SEQ ID NO: 5881 - DNA, 274 bp, Glycine max
cccacgcgtccgcacgaaactcaagaagatggagaaagcgatcaacagacagaagattttgcttcatcatctcaacccttcatcatccacccaccccaacgaatcatcctccctccatgcttcagcatgtgtggcgggggatagcgctgcttatcaaaggacatcgacattcggggacgatgttgtgatcgtggctgcttatcggactgctcattgcaaagctaaacgaggtggtttcaaagacactcttcctgatgatctactgcctcctgtt

SEQ ID NO: 5882 - DNA, 372 bp, Glycine max
  modified_base (309)..(309): a, c, g, t, unknown, or other
tcatccacccaccgcaacgaatcatcctccctccatgcttcagcatgtgtggcgggggatagcgctgcttatcaaaggacatcgacattcggggacgatgttgcgatcgtggctgcttatcggactgctcattgcaaagctaaacgaggtggtttcaaagacactcttcctgatgatctactggctcctgttttgaaggctgcaattgagaaaaccaatgtgaacccaagtgaagttggggatattgttgtaggtagtgtattggctcctggagctcaaagagctagtgaatgccgaatggctgcattntatgctggttttcccgaaactgtgcctgttaggaccgttaataggcaatggtcatctgggctc

SEQ ID NO: 5883 - DNA, 435 bp, Glycine max
cccacgcgtccgcttagagagaaaaaaaaatggctgatacaggtggaggagatgcagtgagaccagtggtaatatgtgataacaagtgtggctgcacacttccatgcactggtggttccacttgcaggtgcacaagtgctggcactgccacaggagggggtgatcacgtgacatgctcgtgcggagagcactgtggttgcaatccatgctcatgtcccaagattgcggctgctggaagtggttgcagatgtggcacagattgtgcatgtgcctcctgccgcacttagtatcacaccttaaggcttaaacttcacgttttattttatgtcttcaaatcttgaatacgttttctatatattagtcttgtttaaagttcaaagtgtggacgtggtttctacttagtactcaaacgtattagtaattggtatcaaaact

SEQ ID NO: 5884 - DNA, 449 bp, Glycine max
tcttcttactccttacaagatgggcaaattcaatctgtcccatagagttgttttggcaccgctgaccagacagaggtcttacgacaacgtcccacaaccccatgccatcctctactactcccagagaacttccaacggaggccttctcattactgaagccactggcgtctctgacacggctcaaggctatccgcaaacccctggcatatggactaaagaccatgttcaagcttggaaacccattgtcgatgccgtccacgccaaaggcggtgttttcttctgtcagatttggcacgttggaagagtttcagattcagtttatcagccaaatggacaagcacccatatcttctacggacaagccactcacaccccaaattcgaagtaatggcattgatcaagtacaatttacccctccaaggagattaaggactgatgaaattccgcata

SEQ ID NO: 5885 - DNA, 432 bp, Glycine max
cccacgcgtccgggcttctcctcttcttactccttacaagatgggcaaattcaatctgtcccatagagttgttttggcaccgctgaccagacagaggtcttacgacaacgtcccacaaccccatgccatcctctactactcccagagaacttccaacggaggccttctcattactgaagccactggcgtctctgacacggctcaaggctatccgcaaacccctggcatatggactaaagaccatgttcaagcttggaaacccattgtcgatgccgtccacgccaaaggcggtgttttcttctgtcagatttggcacgttggaagagtttcagattcagtttatcagccaaatggacaagcacccatatcttctacggacaagccactcacaccccaaattcgaagtaatggcattgatcaagtacaatttac

SEQ ID NO: 5886 - DNA, 413 bp, Glycine max
gatggcttctcctcttcttactccttacaagatgggcaaattcaatctgtcccatagagttgttttggcaccgctgaccagacagaggtcttacgacaacgtcccacaaccccatgccatcctctactactcccagagaacttccaacggaggccttctcattactgaagccactggcgtctctgacacggctcaaggctatccgcaaacccctggcatatggactaaagaccatgttcaagcttggaaacccattgtcgatgccgtccacgccaaaggcggtgttttcttctgtcagatttggcacgttggaagagtttcagattcagtttatcagccaaatggacaagcacccatatcttctacggacaagccactcacaccccaaattcgaagtaatggcattgatcaag

SEQ ID NO: 5887 - DNA, 467 bp, Glycine max
  modified_base (392)..(392): a, c, g, t, unknown, or other
cccacgcgtccgcccacgcgtccggtaatttcccccaccttttgctcctgccaaatactagtgtttcaaataccctgccaaatactaacatcatatccatggctgtgcaaattgtaggttttgatggggttgagatccatggggctcatggctacctgcttgagcaatttatgaaagataaagtgaatgaccgaacagacgaatatggtggatcccttgagaaccgctgccgatttgctttggaagttgttgaagcttgtgttaatgagataggggcggacagagttggaattaggctatcgccattcgcagaatattcagagtctggagactctaatccaaaagaattggggctttacatgatgaatgccctcaataagtatggtattctntactgtcacatggtggaaccaagaatgaagactgttggagaaaaaactgaatgccctcatagcctggtgcctatg

SEQ ID NO: 5888 - DNA, 455 bp, Glycine max
aagagatggcttctcctcttcttactccttacaagatgggcaaattcaatctgtcccatagaggtgttttggcaccgctgaccagacagaggtcttacgacaacgtcccacaaccccatgccatcctctactactcccagagaacttccaacggaggccttctcattactgaagccactggcgtctctgacacggctcaaggctatccgcaaacccctggcatatggactaaagaccatgttcaagcttggaaacccattgtcgatgccgtgcacgccaaaggcggtgtattcttctgtcagatttggcacgttggaagaggttcagattcagcttatcagccaaatggacaagcacccatatcttctacggacaagccactcacaccccaaattcgaagtaatggcattgatcaagtacaatttacccctccaaggagattaaggactgatgaa

SEQ ID NO: 5889 - DNA, 435 bp, Glycine max
cccacgcgtccgggcttctcctcttcttactccttacaagatgggcaaattcaatctgtgccatagagttgttttggcaccgctgaccagacagaggtcttacgacaacgtcccacaaccccatgccatcctctactactcccagagaacttccaacggaggccttctcattactgaagccactggcgtctctgacacggctcaaggctatccgcaaacccctggcatatggactaaagaccatgttcaagcttggaaacccattgtcgatgccgtccacgccaaaggcggtgttttcttctgtcagatttggcacgttggaagagtttcagattcagtttatcagccaaatggacaagcacccatatcttctacggacaagccactcacaccccaaattcgaagtaatggcattgatcaagtacaatttacccc

SEQ ID NO: 5890 - DNA, 445 bp, Glycine max
gagagagagagaggagagagtattggcgcttcatcaagatgggtatgggtagggattccatgcacaagaggcgtgccactggtggcaagaaaaaggcttggagaaagaagagaaagtatgagcttgggcgtcaggcagcaaacaccaagttatcaagcaacaagacaatcaggaggattcgtgttagaggtggcaatgttaaatggagggcattgaggctggatactggcaattactcatggggtagtgaagcagttactcgcaagactcgtattctagatgttgtttacaatgcctcaaacaacgagcttgtgcgaactcagaccctggtcaagagtgctattgtccaggttgatgctgctcctttcaggcagtggtaccttcagcactatggtgttgaaattggtagaaaaaagaaagtggcagccaagaaggattctactga

SEQ ID NO: 5891 - DNA, 382 bp, Glycine max
  modified_base (356)..(356): a, c, g, t, unknown, or other
ctttgagagagagagagggaggagggagagtgttgacgctccatcaagatgggtatttctagggattccatgcacaagaggcgtgccactggtggcaagaagaaggcatggagaaagaagagaaagtatgagcttgggcgtcaggccgcaaacaccaagttatcaagcaacaaaactatccggaggattcgtgttcgaggtggcaatgttaaatggagggcattgaggttggataccggcaattactcatggggtagtgaagcagttactcgcaagactcgtattctagatgttgtttacaatgcctcaaacaatgagcttgtgcgaactcagaccctggtcaagaatgctattgntcaggttgatgctgctcctttcaagc

SEQ ID NO: 5892 - DNA, 340 bp, Glycine max
  modified_base (311)..(311): a, c, g, t, unknown, or other
ggaagcttagagagagagagagagagagagagagagaggagagagtattggcgcttcatggagatgggtatttctagggattccatgcacaagaggcgtgccactggtggcaagaaaaaggcttggagaaagaagagaaagtatgagcttgggcgtcaggcagcaaacaccaagttatcaagcaacaagacaatcaggaggattcgtgttagaggtggcaatgttaaatggagggcattgaggctggatactggcaattactcatggggtagtgaagcagttactcgcaagactcgtattctagatgttgnttacaatgcctcaaacaacgagcttgtgc

SEQ ID NO: 5893 - DNA, 432 bp, Glycine max
  modified_base (241)..(241): a, c, g, t, unknown, or other
  modified_base (277)..(277): a, c, g, t, unknown, or other
  modified_base (347)..(347): a, c, g, t, unknown, or other
gccaagctcgcgtctcacttctctctcttatattaatcactcccgcacacagagcatggttcacctttcttttccgaccaaaggttcgccagaaaatgcttctatcctcctcctgctccgccgccggctccgccgtctccggcgagatcatgctgttcggcgtgagagtcgtagtggactccatgaggaagagcgtgagtatgaacaacctctcgcagtacgagctccctcgcgacgccgncaacgccaaagacgacgtcgctgccggctacgcctncgctgacgatgccgctccgataaactccggcaagaaccgcgaccgcaagcgagggattccatggacggangaagagcacaagctattcttggtggggttgcagaaagtggggaaaggtgattggagagggatctcaaggaactatgtcaaaacga

SEQ ID NO: 5894 - DNA, 403 bp, Glycine max
  modified_base (368)..(368): a, c, g, t, unknown, or other
aattctaaggccgaccgacgcgtcaacccacgagtccgcttctattaacaagagacctattaatctttctctttccaaccctacgttcacagtcagaatgcactgctgaagaagcttacaagtggagccagggacgtgccatttttgcaagtgggagtccatttccccctgttgagtacgagggcaaagtgtttgtgcctggccaggccaataatgcatacatattccctggatttggtctcggtttaataatgtctgggaccattcgagtgcatgatgacctgcttctggctgcctctgaggctttgggcggcacaagtgagccaagaaaacttttgataaggactcatatacccaccatttcacancatcagaaagatttcagcacacatagctgccaatg

SEQ ID NO: 5895 - DNA, 444 bp, Glycine max
cagggaacagcatccgtggttcttgctggactagttgcatctctgaagttggttgggggtaacttagctgatcacagattcttattccttggtgctggagaggctggcactggcatagcagaactcatagcacttgaaacatcaaaacagacaaatgctccactggaggaagtgcgcaagaatatttggctggtggactcaaagggattgattgtcagttctcgcaaagattcgctccaacattttaagaagccctgggctcatgagcatgaacctgttaaaaatcttctagatgctgttaataaaattaagccaacagtgttgattggaacatcgggacaaggaagaacttttactaaagaagtgattgaggcaatggcttctattaacaagagacctattattctttctctttccaaccctacgttacagtcagaatgcact

SEQ ID NO: 5896 - DNA, 283 bp, Glycine max
cttattcttgtgtatcaccatcagggacgtgccatttttgcaagtgggagtccatttgcccctgttgagtacgagggcaaagtgtttgtgcctggccaggccaataatgcatacatattccctggatttggtctcggtttaataatgtctgggaccattcgagtgcatgatgacctgcttctggctgcctctgaggctttggctgcacaagtgagccaagagaactttgataagggactcatatacccagcattcaccaacatcagaaagatttcagcacaca

SEQ ID NO: 5897 - DNA, 368 bp, Glycine max
gcagggtctaatgggtaactgcctagattcttctgccaaagttgatgcagctcagagcgtccagatccactgctgcatcaggaatctcaaaaactactccttccagtgtatctattccatcatacagtgaaaaaagcaatgcctcaagtcttcccacaccaacgtccgagggtgaaatcttgtcttctgccaatcttaagcccttcacattcaatgagctgaagaatgccaccagaaattttcgccccgatagtcttctcggtgaagggggatttggatatgtctacaagggatggattgatgaacacacatttacagcttcaaaacctggatcaggaatggttgttgctgtaaaaaggcttaaacct

SEQ ID NO: 5898 - DNA, 438 bp, Glycine max
cgggccgaccgacgcgtgcgcccacgcgttcgcccactcgtccgctcactcttgcgaccggctattggtgtatgagtctaggcctagggggagcttatagatccatctatttagaagaggacctcaaccactctcttggtcggtgaggatgaaagtggctattggtgctgccagaggactctcctttcttcataatgccaaatcacaagtcatataccgtgattttaaagcttctaacatcctgctggatgctgagtttaattcgaaactctctgactctggtttagctaaggcgggtcctactggtgatagaactcatgtgtctactcaagtcatgggtactcaaggatatgcatcacctgaatatgctgcaactgatcggttgacggccaaaagtgatgtctacagcttcggagttgtgttgcttgaacttctatc

SEQ ID NO: 5899 - DNA, 237 bp, Glycine max
tgcagaccgagctagctagctagcaagcaagcacagagatggaggcaaagcgaggcgatgccctcatgtgcttggcacgtgtttcactcttcctctgcgctctaaccctatccgctgctcacggaagcaccacggttcaagacatcgcgagaaagttgaaactcggggacaacgagcttctgcgcacggagaagaagttcaaggttttcatggaaaattacgggaggagctactcca

SEQ ID NO: 5900 - DNA, 215 bp, Glycine max
taaaaaatggtacacttgctatgggcgtgaatgcaattttcatgcagacatacattggtggtgtctcatgcactgtgatatgtagcaagaaaaggctgaaccatggtgtgttacttgtgagatatggtggaaaaggattctgaatagaagagatggtgggcaagccatgatggagcatgaggaattcgtggggggagaaatggggagaagatggc

SEQ ID NO: 5901 - DNA, 386 bp, Glycine max
  modified_base (322)..(322): a, c, g, t, unknown, or other
tgcagaccgagctagctagctagcaagcaagcacagagatggaggcaaagcgaggccatgccctcatgtgcttggcacgtgtttcactcttcctctgcgctctaaccctatccgctgctcacggaagcaccacggttcaagacatcgcgagaaagttgaaactcggggacaacgagcttctgcgcacggagaagaagttcaaggttttcatggagaattacgggaggagctactccacagaggaagagtatttgcgccgtttggggattttcgcccagaacatggtcagagcggcggagcatcaagcgctggaccccaccgncgttcacggcgtcacgcagttcttcgatctcaccgaggaccagtttgaaaagctctacactggc

SEQ ID NO: 5902 - DNA, 326 bp, Glycine max
atggagcattacaggaggagctactgcacatacgacgagtcttagcaccagttgtggatgctcgcccagaacatggtcagagccgcggatcatgaggcgctggaccacaccgtcgtccacggcgtcacgcacttcttcgatctcaccgaggacgagtttgagaagctgtacgctggcctcaatggcggcttcccgtgatcgaataatgcctccggcggtattgcccccccgtttgaggtggactggctggcggacaatcttgattggaaagaggaaggaactgtcaccggagctaagttacagggtaaatgtcgatcatgctgggc

SEQ ID NO: 5903 - DNA, 405 bp, Glycine max
  modified_base (308)..(308): a, c, g, t, unknown, or other
  modified_base (351)..(351): a, c, g, t, unknown, or other
  modified_base (367)..(367): a, c, g, t, unknown, or other
gctagctagcaagcaagcacagagatggaggcaaagcgaggccatgccctcatgtgcttggcacgtgtttcactcttcctctgcgctctaaccctatccgctgctcacggaagcaccacggttcaagacatcgcgagaaagttgaaactcggggacaacgagcttctgcgcacggagaagaagttcaaggttttcatggagaattacgggaggagctactccacagaggaggagtatttgcgccgtttggggattttcggccagaacatggtcagagcggccgagcattaagcgctggaccccaacgncggtcacggcgtaacgcagttctcgatctcaccgaggacgagnttgagaagctctacanctgcgtcaatggcggctttccgtcatcgaataatgccg

SEQ ID NO: 5904 - DNA, 419 bp, Glycine max
cccacgcgtccgacgggaggagctactccacagaggaggagtatttgcgccgtttggggattttcgcccagaacatggtcagagcggcggagcatcaggcgctggaccccaccgccgtccacggcgtcacgcagttctccgatctcaccgaggacgagtttgagaagctctacactggcgtcaatggcggcttcccgtcatcgaataatgccgccggcggtattgcgccgccgttggaggtggacgggctgccggagaattttgattggagagagaaaggagctgtcaccgaagttaagttacagggtagatgtggatcatgctgggctttcagcaccacaggatctatagaaggagccaattttcttgccaccggaaagctcgtcagtcttagtgaacaacagctccttgactgtgac

SEQ ID NO: 5905 - DNA, 440 bp, Glycine max
gggctttcagcaccacaggatctatagaaggagccaattttcttgccaccggaaagctcgtgagtcttagtgaacaacagctccttgactgtgacaacaagtgtgacataacagaaaagacttcatgtgacaatgggtgtaatggaggtcttatgacaaatgcctacaattatttgctcgagtctggtgggttggaggaggagtcttcatatccctacactggggagagaggtgaatgcaagtttgatccagagaaaatagcagttaagatcacaaatttcaccaatatccctgctgatgagaaccaaattgccgcatatttagtaaaaaatggtccacttgctatgggcgtgaatgcaattttcatgcaaacatacattggtggtgtctcatgccctctcatatgtagcaagaaaaggctgaaccatggtgtgttactt

SEQ ID NO: 5906 - DNA, 389 bp, Glycine max
tgcagaccgagctagctagctagcaagcaagctcagagatggaggcaaagcgaggccatgcggtcatgtgcttggcacgtgtttcactcttcctctgcgctctaaccctatccgctgctcacggaagcaccacggttcaagacatcgcgagaaagttgaaactcggggacaacgagcttctgcgcacggagaagaagttcaaggttttcatggagaattacgggaggagctactccacagaggaggagtatttgcgccgtttggggattttcgcccagaacatggtcagagcggcggagcatcaggcgctggaccccaccgccgtccacggcgtcacgcagttctccgaatctaccgaggacgagtttgagaagctctacactggcgtc

SEQ ID NO: 5907 - DNA, 417 bp, Glycine max
cccactcgtccgcccactcgtccgcgcactcgtccgcgagcttctgcgcacggagaaggagttcaaggttttcatggagaattacgggaggagctactccacagaggaggagtatttgcgccgtttggggattttcgcccagaacatggtcagagcggcggagcatcaggcgctggaccccaccgccgtccacggcgtcacgcagttctccgatctcaccgaggacgagtttgagaagctctacactggcgtcaatggcggcttcccgtcatcgaataatgccgccggcggtattgcgccgccgttggaggtggacgggctgccggagaattttgattggagagagaaaggagctgtcaccgaagttaagttacagggtaaatgtggatcatgctgggctttcagcaccacaggatc

SEQ ID NO: 5908 - DNA, 280 bp, Glycine max
tcccactcgtcctcccactcgttcgtgcactccttctctagcttctgcgcacggataatagctcgagtgctttcatggagaattacgggacgagctactccacacatgaagagtatttgcgccgtttggggattttcgcccataacatggtcagagcggcgtatcatcaggcgctggaccccaccgccttccacggcgtcacgcagttctccgatctcacctaggactagtttgagaagctctacactggcgtcaatggcggcttcccgtcatcgaataa

SEQ ID NO: 5909 - DNA, 433 bp, Glycine max
gcagaccgagctagctagctagcaagcaagcacagagatggaggcaaagcgaggcgcataccctcatgtgcttggcacgtgtttcactcttcctctgcgctctaaccctatccgctgctcacggaagcaccacggttcaagacatcgcgagaaagttgaaactcggggacaacgagcttctgcgcacggagaagaagttcaaggttttcatggagaattacgggaggagctactccacagaggaggagtatttgcgccgtttggggattttcgcccagaacatggtcagagcggcggagcatcaggcgctggaccccaccgtcgtccacggcgtcacgcagttctccgatctcaccgaggacgagtttgagaagctctacactggcgtcaatggcggcttcccgtcatcgaataatgccgccggcggtattgc

SEQ ID NO: 5910 - DNA, 330 bp, Glycine max
cccacgcgttcgcccacgcgttcgagctagctagcaagcaagcacataaatggaggcgaagcgaggccatgccctcatgtgcttggcacgtgtttcactcttcctctgcgctctaaccctatccgctgctcacggaagcaccacggttcacgacatcgcgagaaagttgaaactcggggacaacgagcttctgcgcacggagaataagttcacggtttacatggagaattactggaggagctactccacagaggaggagtatttgcgccggatgtggatactcggccagaacatggtcagagcggttgaccattaggcgctggacctcac

SEQ ID NO: 5911 - DNA, 418 bp, Glycine max
cgcaagggggaaccgattaaaaaaaggcaaatcaaattcgaaagaaggagagaatttacagaggtgaatgcaagtttgatccagagaaaatagcagttaagatcacacatttcaccaatatccctgctgatgagaaccaaattgccgcatatttagtaaaaaatggtccacttgctatgggcgtgaatgcaattttcatgcaaacatacattggtggtgtctcatgccctctcatatgtagcaagaaaaggctgaaccatggtgtgttacttgcgggatatggtgcaaaaggcttctcaattcttaggcttggcaacaaaccatactggatcatcaagaattcgtggggggagaaatggggagaagatggctattacaagctctgcatagggcatggcatgtgtggaataaacactat

SEQ ID NO: 5912 - DNA, 453 bp, Glycine max
agttgaaactcggggacaacgagcttctgcgcacggagaagaagttcaaggttttcatggagaattacgggaggagctactccacagaggaggagtatttgcgccgtttggggattttcgcccagaacatggtcagagcggcggagcatcaggcgctggaccccaccgtcgtccacggcgtcacgcagttctccgatctcaccgaggacgagtttgagaagctctacactggcgtcaatggcggcttcccgtcatcgaataatgccgccggcggtattgcgccgccgttggaggtggacgggctgccggagaattttgattggagagagaaaggagctgtcaccgaagttaagttacagggtagatgtggatcatgctgggctttcagcaccacaggatctatagaaggagccaattttcttgccaccggtaagctcgtcagtcttaagtgac

SEQ ID NO: 5913 - DNA, 365 bp, Glycine max
atcagcccacgcgtccgcccacgcgtccggggctatggcatttgatgtagaatatgcaaggtggctggaagagcagaatcgacaaattaatgagctaagagcaggtgtacattctcatgcaggtgatacagaacttcgcatgattatcgatggtataatggcacattatgatgagatatttaggctgaaggccaatgcagctaaggctgatgtcttccatttgctgtctggaatgtggaagacaccagcagagaggtgttttctatggcttggtggttttcggtcatctgaactcctcaagctcctggtaaatcaattggaacctctgacggagcaacagttagtgggtatcatcaacttgcagc

SEQ ID NO: 5914 - DNA, 435 bp, Glycine max
acccacgcgtccggaaaaagtcggttgagaaagaaagcttatgttcaacagcttgaaagtagtcgggtaaaggtaacccaactggagcaagagcttcagcgagctaggcagcagggaatcattatatcaaactcaggtgatcaagcacattcaatgagtggaaatggggctatggcatttgatgtagagtatgcaagatggctggaagagcagaatcgacaagttaatgagctaagagcagctgtaaattcccatgcaggtgatacagaacttcgcatgattatcgatggtataatggcacattatgatgagatatttaggctgaaggccgatgcagctaaagctgatgtcttccatttgttgtctggaatgtggaagacaccagcagagaggtgttttctaatgcttgggggtttttcggtcatctgaactcct

SEQ ID NO: 5915 - DNA, 363 bp, Glycine max
ctggattgttccaaactatacagagggaagcgcaattgattctttttgtgtgtttgactgtgatcaatcagttggatatcgcatagaggattgtgttgccttgaggggaaactcagtttttgactcactaaaagtaagtagccaaacaatttctcggggtcctgttgaagttgattcctttgataagttaccaacttcactcaataaaaacccattaacaagccaaacagagcgacaaagattgcaattacaaaaggttcaattatcaaatctggtcagtggggatacggaacaccaggaagagtctgccatggctgacgccagtcctagaactgatatttctacagatgttgacactgatga

SEQ ID NO: 5916 - DNA, 402 bp, Glycine max
ataaatcttccctttttgtgtcacaaccatgggttgttgtatgagtaaaaaagggtcagagccagaagaacacattgtttacagacatgttgcgggtgctgggggtgctggtgtgtacaataatcacaagagccatgaacccccttctcatcaaccttacccattacctgagaagcatgccccttggaggcctccaccaagcccaaaacatgttcacaagcatgacacaatcactgggaagccatttgaggatgttaaacagcactacacacttgggaaggaattggggagaggccaattcggggtgacttatctctgcactgagaattcaactggttttcagtatgcctgcaagtccatttcaaagaggaagcttgtgagcagagacgacaaggaggacat

SEQ ID NO: 5917 - DNA, 392 bp, Glycine max
gtgagttctatatggcttataaggactacaatgacttaatggatctaacagagcaaatgttgagtggtatggttaaggagcttacgaaaggcagctataaaatcaagtatcatgcagatgggattgataaggaacctattgaaattgactttactacaccttttagaaggattgacatgattgaagagttagagaagatggcaggtctaagtattcccaaagacttgtcaagtgaggaagccaatcaatatttgaaggatgcatgcgtgaagtatgagatcaaatgtcctccccctgagacaactgctcgtttgttggataaacttgtgggtcactttttggaagaaacgtgtgtaaatcctacattcatcaaaaaccatcctgagatcatg

SEQ ID NO: 5918 - DNA, 315 bp, Glycine max
  modified_base (99)..(99): a, c, g, t, unknown, or other
gtctcttcctcctctctctgcatcgctgcgttttccgaatcgaaaggtgaggttagtaagtaacaatggtggagaaggccaagggtaggaaggaggaangttgtcactcgagagtacaccatcaaccttcacaaacgcttgcatggctgcacatttaagaagaaggctcctaaagcaattaaggagataaggaagtttgctcagaaagcgatggggacgaatgatgtaagagtggatgtgaagctcaacaaggctgtgtggagccaggggatccggagcgtcccaaggaggattaaggttcgcattgctcgcaag

SEQ ID NO: 5919 - DNA, 434 bp, Glycine max
aaacactgagctaaggaagctgttgattgagactccgagtaagtctatcacggtgattgaggacattgattgctcactcgatcttaccggccagaggaagaagaaaaaggaagagaatgaggatgaagaacaaaaagatcctatgaggagaaatgaggaggagagtagcaagagtagtaaggtgactctgtctgggttgttgaattttatagatgggatttggtctgcttgtggaggtgagaggatcattgttttcacgacgaattatgtggagaaacttgaccctgctttgattaagagagggaggatggataagcacatagagatgtcttattgttgctatgatgcattcaaggtgctggccaagaactacttggatgttgagtctcatcatttgtttggtgcaattggggaatgttggaagaaacagatat

SEQ ID NO: 5920 - DNA, 434 bp, Glycine max
cccacgcgtccgcccacgcgtccgggaagctgttgattgagactccgagtaagtctatgacggtgattgaggacattgattgctcactcgatcttaccggccagaggaagaagaaaaaggaagagaatgaggatgaagaacaaaaagatcctatgaggagaaatgaggaggagagtagcaagagtagtaaggtgactctgtctgggttgttgaattttatagatgggatttggtctgcttgtggaggtgagaggatcattgttttcacgacgaattatgtggagaaacttgaccctgctttgattaggagagggaggatggataagcacatagagatgtcttattgttgctatgatgcattcaaggtgctggccaagaactacttggatgttgagtctcatcatttggttggtgcaattgggggattgttggag

SEQ ID NO: 5921 - DNA, 403 bp, Glycine max
cccacgcgtccggaagaacaaaaagatcctatgaggagaaatgaggaggagagtagcaagagtagtaaggtgactctgtctgggttgttgaattttatagatgggatttggtctgcttgtggaggtgagaggatcattgttttcacgacgaattatgtggagaaacttgaccctgctttgattaggagagggaggatggataagcacatagagatgtcttattgttgctatgatgcattcaaggtgctggccaagaactacttggatgttgagtctcatcatttgtttggtgcaattgggggattgttggaagaaacagatatgtccccggctgatgttgctgagaatctgatgccaaagtctgtggatgaagatgtggagatttgcctgcacaaattgatta

SEQ ID NO: 5922 - DNA, 411 bp, Glycine max
  modified_base (324)..(324): a, c, g, t, unknown, or other
cggctcgacccacgacgtccgcggacgcgtgggaaaaaataatggcaaggaaggtgggtttgaattttatagggtgctccatcgttgcaatggttttcataattggtgtggctgaagcaacagattatatcgttggtgaaggcttcggatggagcgttccctccaatgagagcttttatacagactgggctagcaccaagagattcttcgttggtgacaatctcattttcaacatcagcggagagcattcggtgggaattagaacagaggctacttattatgagaattgcaacaccagcttattaactggtttcacgttcatangcgtcaatgggagtaattcgatgtttccacataatattattcctccaactgggcctcgctatttcctctgcaccgttggaaatcact

SEQ ID NO: 5923 - DNA, 343 bp, Glycine max
ggcaaggaaggtgggtttgaattttatagggtgctccatcgttgcaatggttttcataattggtgtggctgaagcaacagattatatcgttggtgaaggcttcggatggagcgttccctccaatgagagcttttatacagactgggctagcaccaagagattcttcgttggtgacaatctcattttcaacatcagcggagagcattcggtgggaattagaacagaggctacttattatgagaattgcaacaccagcttattaactggtttcacgttcataggcgtcaatgggagtaattcgatgtttcgacataatattattccttcaactgggcctcgctat

SEQ ID NO: 5924 - DNA, 389 bp, Glycine max
gaaaaaaataatggcaaggaaggtgggtttgaattttatagggtgctccatcgttgcaatggttttcataattggtgtggctgaagcaacagattatatcgttggtgaaggcttcggatggagcgttccctccaatgagagcttttatacagactgggctagcaccaagagattcttcgttggtgacaatctcattttcaacatcagcggagagcattcggtgggaattagaacagaggctacttattatgagaattgcaacaccagcttattaactgggttcacgttcataggcgtcaatggggagtaattcgatgtttcgacataatattattcctccaactgggcctcgctatttcctctgcaaccgtggaatcactgtgaaagag

SEQ ID NO: 5925 - DNA, 429 bp, Glycine max
cgaaaaaaataatggcaaggaaggtgggtttgaattttatagggtgctccatcgttggaatggttttcataattggtgtggctgaagcaacagattatatcgttggtgaaggcttcggatggagcgttccctccaatgagagcttttatacagactgggctagcaccaagagattcttcgttggtgacaatctcattttcaacatcagcggagagcattcggtgggaattagaacagaggctacttattatgagaattgcaacaccagcttattaactggtttcacgttcataggcgtcaatgggagtaattcgatgtttcgacataatattattcctccaactgggcctcgctatttcctctgcaccgttggaaatcactgtgaaagaggccagaagtttagtattcagcgttgagtctcatcctgat

SEQ ID NO: 5926 - DNA, 448 bp, Glycine max
aaaaaataatggcaaggaaggtgggtttgaattttatagggtgctccatcgttgcagggggtttcataattggtgtggctgaagcaacagattatatcgttggtgaaggcttcggatggagcgttccctccaatgagagcttttatacagactgggctagcaccaagagattcttcgttggtgacaatctcattttcaacatcagcggagagcattcggtgggaattagaacagaggctacttattatgagaattgcaacaccagcttattaactggtttcacgttcataggcgtcaatgggagtaattcgatgtttcgacataatattattcctccaactgggccttgctatttcctctgcaccgttggaaatcactgtgaaagatgccagaagtttagtatcagcgttgagtctcatcctgattccgctgctcctactacactgtc

SEQ ID NO: 5927 - DNA, 440 bp, Glycine max
aaaaataatggcaaggaaggtgggtttgaattttatagggtgctccatcgttgcaatggggttcataattggtgtggctgaagcaacagattatatcgttggtgaaggcttcggatggagcgttccctccaatgagagcttttatacagactgggctagcaccaagagattcttcgttggtgacaatctcattttcaacatcagcggagagcattcggtgggaattagaacagaggctacttattatgagaattgcaacaccagcttattaactggtttcacgttcataggcgtcaatgggagtaattcgatgtttcgacataatattattcctccaactgggcctcgctatttcctctgcaccgttggaaatcactgtgaaagaggccagaagtttagtatcagcgttgagtctcatcctgattccgctgctcctacta

SEQ ID NO: 5928 - DNA, 436 bp, Glycine max
cccacgcgtccgtcggatggagcgttccctccaatgagagcttttatacagactgggctagcgccaagagattctgggttggtgacaatctcattttcaacatcagcggagagcattcggtgggaattagaacagaggctacttattatgagaattgcaacaccagcttattaactggtttcacgttcataggcgtcaatgggagtaattcgatgtttcgacataatattattcctccaactgggcctcgctatttcctctgcaccgttggaaatcactgtgaaagaggccagaagtttagtatcagcgttgagtctcatcctgattccgctgctcctactacactgtcattcagaatcttatctgcatttctctctagcttggctgtgtatttcttcactgttactagttagttactttgtcgtgtaactctacg

SEQ ID NO: 5929 - DNA, 399 bp, Glycine max
acatttataaaaaagtcacaaacagagaattaggcaataagataattaaagatgtctgacgattgcaaaggtaagagctcatggcctgagctagttggagtgcaagggacagttgcggaggctacaattgagagagagaaccctttggtggatgctatcattgtgcccgaaggaaacatggtcatcactgatttccgctgtgatatggtttgggtttggatcgataaagatggaattgtcaaggaagttccccacattggatagaaactgctccccactagctagggatcaaataattgtttccagttttatgttattttattcagaataacgtttcacaaatgtcaaaagattactgtaataaaccacctacagttggccttgtataatgttttagac

SEQ ID NO: 5930 - DNA, 424 bp, Glycine max
cccacgcgtccgaaaaaaaaaaaaagtcaaacagagaattaggcaataagctaaagatgtctgacgattgcaaaggtaagagctcatggcctgagcttgttggagtgcaagggacagtggcagaggctacaattgagagagagaatcctttggtgaatgctatcattgtgcctgaaggaaacagggtcatcactgattaccgctgtgatagggttgggtttggatcaacaaagatggaattgtcaaggaagttccacacattggatagaaacttttccctctagctagggttcaaataattgtttccagttttatgttattttattcagaaagtttcagaaatgtcaaaagattaatataataaaccaactagagttggccttgtaaaatgttttagattcaaaatctgttgttgtcattgcat

SEQ ID NO: 5931 - DNA, 443 bp, Glycine max
cccacgcgtccgggcaataagataattaaagatgtctgacgattgcaaaggtaagagctgatggcctgagctagttggagtgcaagggacagttgcggaggctacaattgagagagagaaccctttggtggatgctatcattgtgcccgaaggaaacatggtcatcactgatttccgctgtgatagggtttgggtttggatcgataaagatggaattgtcaaggaagttccccacattggatagaaactgctccccactagctagggatcaaataattgtttccagttttatgttattttattcagaataaagtttcagaaatgtcaaaagattaatgtaataaaccaactagagttggccttgtataatgttttagactcaaaatctgttcttgtcattctatatatataaaaaaaagttaatataacaatctcttatatgc

SEQ ID NO: 5932 - DNA, 428 bp, Glycine max
  modified_base (402)..(402): a, c, g, t, unknown, or other
aaaaaagtcacaaacagagaattaggcaataagataattaaagatgtctgacgattgcaaaggtaagagctcatggcctgagctagttggagtgcaagggacagttgcggaggctacaattgagagagagaaccctttggtggatgctatcattgtgcccgaaggaaacatggtcatcactgatttccgctgtgatagggtttgggtttggatcgataaagatggaattgtcaaggaagttccccacattggatagaaactgctccccactagctagggatcaaataattgtttccagttttatgttattttattcagaataaagtttcagaaatgtcaaaagattaatgtaataaaccaactagagttggccttgtataatgttttagactcaaaatctgntcttgtcattctatatatattaaaaa

SEQ ID NO: 5933 - DNA, 368 bp, Glycine max
aaaaaaagtcaaacagagaattaggcaataagctaaagatgtctgacgattgcaaaggtaagagctcatggcctgagcttgttggagtgcaagggacagtggcagaggctacaattgagagagagaatcctttggtgaatgctatcattgtgcctgaaggaaacagggtcatcactgattaccgctgtgatagggtttgggtttggatcaacaaagatggaattgtcaaggaagttccacacattggatagaaacttttccctctagctagggttcaaataattgtttccagttttatgttattttattcagaaagtttcagaaatgtcaaaagattaatataataaaccaactagagttggccttgt

SEQ ID NO: 5934 - DNA, 432 bp, Glycine max
cacaaacagagaattaggcaataagataattaaagatgtctgacgattgcaaaggtaagagctcatggcctgagctagttggagtgcaagggacagttgcggaggctacaattgagagagagaaccctttggtggatgctatcattgtgcccgaaggaaacatggtcatcactgatttccgctgtgatagggtttgggtttggatcgataaagatggaattgtcaaggaagttccccacattggatagaaactgctccccactagctagggatcaaataattgtttccagttttatgttattttattcagaataaagtttcagaaatgtcaaaagattaatgtaataaaccaactagagttggccttgtataatgttttagactcaaaatctgttcttgtcattctatatatataaaaaaaagttaatataa

SEQ ID NO: 5935 - DNA, 417 bp, Glycine max
ggcaataagctaaagatgtctgacgattgcaaaggtaagagctcatggcctgagcttgttggagtgcaagggacagtggcagaggctacaattgagagagagaatcctttggtgaatgctatcattgtgcctgaaggaaacagggtcatcactgattaccgctgtgatagggtttgggtttggatcaacaaagatggaattgtcaaggaagttccacacattggatagaaacttttccctctagctagggttcaaataattgtttccagttttatgttattttattcacaaagtttcagaaatgtcaaaagattaatattataaaccaactatagttggccttgtaaaatgttttagattcaaaatcttgtgttgtcattgcataaaaaaaagttaatataatcatcttttatatgc

SEQ ID NO: 5936 - DNA, 383 bp, Glycine max
tgcaaaggtaagagctcatggcctgagctagttggagtgcaagggacagttgcggaggctacaattgagagagagaaccctttggtggatgctatcattgtgcccgaaggaaacatggtcatcactgatttccgctgtgatagggtttgggtttggatcgataaagatggaattgtcaaggaagttccccacattggatagaaactgctccccactagctagggatcaaataattgtttccagttttatgttattttattcagaataaagtttcagaaatgtcaaaagattaatgtaataaaccaactagagttggccttgtataatgttttagactcaaaatctgttcttgtcattctatatatataaaaaaaagttaatat

SEQ ID NO: 5937 - DNA, 442 bp, Glycine max
  modified_base (368)..(368): a, c, g, t, unknown, or other
cccacgcgtccgcccacgcgtccgcgaatcggaatcgagttacaatgaaatcaaatgatgttacacgttggttatgttcgatactattttgcatagttttagtttgtgttcaatttgaaggatgtgtgggatccaagactaagaaaacggacgaggcatacgtcactcttttgtacggggatgaattcttgttgggtgttcgagttctgggcaaatcaatacggaacactggatccaacaaggacatggtcgtgttggtctccgatggtgtgtctgattatgccaaaagcctactccgggctgatgggtggatagtggagatgattagtttactggctaatcctaatcgagtgcgtccaaagagattntggggtgtctacacaaagctcaaaatatttaacatgactgactacaagaaagttgtttaccttgatgcggacac

SEQ ID NO: 5938 - DNA, 322 bp, Glycine max
gcaaatttattgacccccatcacagggttccattgaccagccctggtggaactctggggtatagaccaccagaactcttacttggagcctctaattacggagatgctgtggatttgtggagcactggttgcatactgggggaactgaatcgtagcagacctatattacctggaaaaacagaggttgaacaattgcatacgatttttaaactttgtggctcaccatctgacgactattggtgcaagctgtggactccacattcaacagtattcaggcctcctcaccattataggcgttgtgttgctgaaacatttaaagaata

SEQ ID NO: 5939 - DNA, 313 bp, Glycine max
cgtttccattctatctctatcttcacatatctctacctccctcaaacagtttgatgctagctcttgttccaatggcttcctcagttaaactcttatttttgtgctttctctcattgttcatctctttctccatagctcaaccctctttcagaccaaaggcacttgttcttcctgtcaccaaagatgtttctgcctcagttcctcagtatgttacacagatcaaacaaagaaccccacttgtgccagtgaaactaacagttgatcttggtggtggctacttttgggtgaactgtgaaaaaagctatgtctcatc

SEQ ID NO: 5940 - DNA, 414 bp, Glycine max
cgtttccattctatctctatcttcacatatctctacctccctcaaacagtttatgctagctcttgttccaatggcttcctcagttaaactcttatttttgtgctttctctcattgttcatctctttctccatagctcaaccctctttcagaccaaaggcacttgttcttcctgtcaccaaagatgtttctgcctcagttcctcagtatgttacacagatcaaactaagaaccccacttgtgccagtgaaactaacagttgatcttggtggtggctacttttgggtgaactgtgaaaaaagctatgtctcatcaaccttaaaaccagctcgttgtggctctgctcagtgctcacttttcgggttatatggttgcaatgttgaggacagattctgtagtcgttcttttagcaacac

SEQ ID NO: 5941 - DNA, 428 bp, Glycine max
atcttcacatatctctacctccctcaaacagtttatgctagctcttgttgcgatggctgcctcagttaaactcttatttttgtgctttctctcattgttcatctctttctccatagctcaaccctctttcagaccaaaggcacttgttcttcctgtcaccaaagatgtttctgcctcagttcctcagtatgttacacagatcagacaaagaaccccacttgtgccagtgaaactaacagttgatcttggtggtggctacttttgggtgaactgtgaaaaaggctatgtctcatcaacctcaaaaccagctcgttgtggctctgctcagtgctcacttttcgggttatatggttgcaatgttgaggacaaaatctgaagtcggtctctaagcaacactgttactggggtctccacatttgggggaattc

SEQ ID NO: 5942 - DNA, 354 bp, Glycine max
atcttcacatatctctacctccctcaaacagtttatgctagctcttgttccaatggcttgctcagttaaactcttatttttgtgctttctctcattgttcatctctttctccatagctcaaccctctttcagaccaaaggcacttgttcttcctgtcaccaaagatgtttctgcctcagttcctcagtatgttacacagatcaaacaaagaaccccacttgtgccagtgaaactaacagttgatcttggtggtggctacttttgggtgaactgtgaaaaaggctatgtctcatcaacctcaaaaccagctcgttgtggctctgctcagtgctcacttttccggttatatgggtg

SEQ ID NO: 5943 - DNA, 387 bp, Glycine max
tatctctacctccctcaaacagtttatgctttctcttgttccaatggcttcctcaggtaggctcttatttttgtgctttctctcattgttcatctctttctccatagctcaaccctctttcagaccaaaggcacttgttcttcctgtcaccaaagatgtttctgcctcagttcctcagtatgttacacagatcaaacaaagaaccccacttgtgccagtgaaactaacagttgatcttggtggtggctacttttgggtgaactgtgaaaaaggctatgtctcatcaacctcaaaaccagctcgttgtggctctgctcagtgctcacttttcgggttatatggttgcaatgttgacgacaaaatctgtagtcgttctttaagcaacac

SEQ ID NO: 5944 - DNA, 450 bp, Glycine max
  modified_base (305)..(305): a, c, g, t, unknown, or other
  modified_base (340)..(340): a, c, g, t, unknown, or other
  modified_base (390)..(390): a, c, g, t, unknown, or other
tgcttattttaagtatctatctgagtcaatcagtacagggagtccaacttgtgttgcagagatcttgggcatttatcaggtaacatcaaagcacctcaaaggagggaaggaaacaaagatggatgttttggttatggaaaaccttctttacaggcgtaacattagacgactttatgacctcaaaggttcttcccgatcacggtacaatccagatacaagtgggagcaataaagtgctgctggatcagaatctcattgaagctatgccaacctctccaatatttgttgggaacaaggcatagcggntgcttgagagggccgtgtggaatgacactgccttncttgcatcaatatatgtgatggactactcattgcttggtgagtggatgangaaaaacatgagctgggtttaggtatcattgattttatgaggcagtatacatgggacaaa

SEQ ID NO: 5945 - DNA, 437 bp, Glycine max
cagagttcagaggaattcgttttctctgatcgggatctggaagggaagcgaatcgacgtgggtttcttggtgacgacgctgatcttcgtagtgatcggaatcatcgcgtgcctctgcaccagaatttgctgcaacagaggaccttctgccaatctatttcaccttactttggtaattactgcaacaatttgctgctggatgatgtgggcgattgtatatctggcacagatgaaaccactcattgtgcctatactgaacgagggtgaataagtctctgaacagatgtaactccttgtaagttagagaatatggatcgcagattggctgctggatagaatttaatcctggctatcatgagtcgctcagtatctgttcagggtggaactggatttatttctcgatggataatggcattccaggtggcatttctattgcta

SEQ ID NO: 5946 - DNA, 429 bp, Glycine max
attaatgaagaagtggatgttataatttccgaatggatgggctatatgcttctgtatgagagcatgcttggaagtgttattaatgctagagatcgttggctcaaacctggtggtcttattcttccttcaagttcaacgttgtacatggctcctgtcactcatacggacagatacagtgacagtgttgacttctggcgcaatgtttatggaattgatatgtctgccatggtatcactggctaaacaatgcgcatttgaagaaccttccgtggagactataactggtgaaaatgtcttgacatggccacatgtggtaaaatatattgatagttattctgttaccatccaagagttagaatctgtaacagccaagtttaagttcaattccatgatgcgagcaccactgcatggttttgcattttggtttgac

SEQ ID NO: 5947 - DNA, 329 bp, Glycine max
ctccaatctctatcctcaattcaacccttttggtggcaacttctatttatgctacaaaaaatgctgcgattgcacttcaccaccgcactctctcactttgcttccaaggcctcaccttttcctctcacacccgtttccgttaccgtttccagagctattgtttgcaacaaccccaccaggttcagatcgcaaatgggttctttctccacttcctcttcctcttcctccaaactcttgttccgccagctttttgagaaggaatcttccacctacacttaccttctcgctgatgcctcgcacccagaaaaacctgcacttctgattgaccc

SEQ ID NO: 5948 - DNA, 435 bp, Glycine max
ggaaatgttttttagatcctaaattatcttactttcttctcctgaatttcaggctctgtatgagtggttgcgcacatacttgctggaacgacgtgatgttgccaataaatctgaacttggtagaatagcaatggctcaacaaagaactcaacaaagtgtttctggtactactagtgttggttctcttggtgggttgtctgatggaaattcaagagtacaaggtccaggtggcagtaacttgccatctgatattcaagttcaccaaggctcccagccaggtggaattggatctcatgatggtggaaactcacatgggcaagaacccgaaaggtctacaattgcagaaagcagcatacacaatggaaatgaccaacctttgcagcaagtttctggaaatgaaggtggtcaaaatactttaagacgtcctggtgcttt

SEQ ID NO: 5949 - DNA, 382 bp, Glycine max
cttgaatttacttggtgtgaagggtgctagcatggagtcaccaggatcaaactcaagagtctgggccaccattggtgctggatctgttttagcaggagagctgtctctgatgtctgccattgcagcagggcagctagtgaacagccacatgaaatacaacagatcaagcaaagatgtaaccaaaatatcatcatcttgaggtcagggacgtggttgcagtcattaattctggactctagaataaaaaaattgagggtaagcggatttagggaaggaaaatggagaaacattagattagattgttggcatccacgtttggctctgcattgctgtctgtttagatcttttattatttggagagaggaaagtagagtattactct

SEQ ID NO: 5950 - DNA, 427 bp, Glycine max
gactcacgcatccatttgattaatactatcaactaagcccttttctgtttgcaatctggagctatgagttcgtcttcggcagatgtttttccagcaattcaggaagttatgctggagttccgtgctggcaaaatgtttcttgaggaaaaaagggttgttcccgatacacggaaaggacttgttcgaattgctaggggtgaggagggattagtacattttcagtggcttgatcgcacacaaaatgttgttgaagatgatcagataatatttcccaatgaggctatttttgagaaggttaatcaaacatctggaagggtttacatactgaagtttaatagcgatgacaggaagttcttcttctggatgcaggaatcaaatgctgatggtgattcacaactgtgtagctcagtgaatgattacattaata

SEQ ID NO: 5951 - DNA, 407 bp, Glycine max
cccacgcgtccgctcgaatccacagagtgagactcatcgtgtgaacaacgatgactgcgggtttgagcgtacttgagaaatttgagcggccatggacgaaaccgccgtaacgacgaagcctgattggctcaacaaccgcgcgagggtcgccggagagagaaccgaagaatttttctgtggcggcgacgacgaagaggaatgcgactacgaggcttgtgacatgttgactcggagcttctggcaggcgcagactgtgctggacgagaaccgtgcgctgatcgacgaagtgaacagcaaccacgagtcgaagattcctgacaacatggcgaagaacgttggcctcattactcagatccacggtaacatcttcaaagttcgctctatttactccgattaatctgtaaatt

SEQ ID NO: 5952 - DNA, 375 bp, Glycine max
accatttgcattcaggcttagctcgcttaccacactacaccatatggcggttgctgtagccatgttacctcgttggtcggtttttcttctttttctgtttgtcgtgtgtatctcatgagcaaatgttgtcaccattgatgtacgtgcagccaagagtctcatctagaccggttccatttatcctgatgttaggacggtggaggagttcaagaaagggcatgtgtatgcagataatgtccttaacattccatacatgttgaatacacccaagggcaatgtaaagaatggagactttctgaaggaggtttcatcatcatgcaacaaagaagatcatctcgttgtgggttgtcaaagtggggtgagatctctgtatgc

SEQ ID NO: 5953 - DNA, 440 bp, Glycine max
cccatttgcattcaggcttagatcgcttaccacaccacaccatatggctgttactgtggccatgttacctcgttggtcggtgtttcttctttttctgtttgtcttgtgtagctcaggagcaaaggttgtcgccattgatgtacatgcagcaaagcgtctcatccagaccggttccatttatcttgatgttaggacggtggaagagttcaagaaagggcatgtggatgcagttaatgttcttaacattccatacatgttgaatacacccaagggcaaggtaaagaatccagactttctgaaggaggtttcatcagcttgcaacaaagaagatcatctcattttgggttgtcaaagtggcgtgagatctctgtatgcaactgctgatcttctgtctgaaggttataagaatgtgtaagacatggtaagaggttatgtggact

SEQ ID NO: 5954 - DNA, 454 bp, Glycine max
aattttgggtcgacttatgcgtacgctgcattcaggcttagctcgcttaccacaccacaccatatggctagttgctgtatccatgtgacctggctgatcggctcatcttctttttctgtttgccttgtgtatatcaagaacaaaggttgtcaccattgatgtacgtgcagtcaagagtctcatccaaaccggttccatttatcttgatgttaggactgtggacgagttcaagaaagggcatgtgtatgcagataatgtccttaacattccatacatgttgaatacacccaaaggcaaggtaaagaatggtgactttctgaaggaggtttcattatcttgcaacatagaatatcatctcgttgtgggttgtcaaagtggggtgagatctctgtatgcaaccctgctgatcttctatctgatggttttaagaatgcgaaagacatgggaagaggtt

SEQ ID NO: 5955 - DNA, 432 bp, Glycine max
agatttggaggaaggaaggtaaaggaagcaaacgcaagagcaagagcaagagcgaaagcggcagagaagatggaaggagaagagggttctcagcagccacagttggtgctcgcggacaagctattccttctccggcaacccgatgtgcaagacattgacaaggttcgctacaaagaggatgtcttcactcatgtcaaggaaaacgatatggtccctctgtacgaaaccctagtcgctgattccgtgttggacttggatcgtgcccttttggactctatgcgcgctaaaattgacgacgagctcaccaagctcgacgaaaagattgctgatgccgaggaaaacttaggagagagtgaagttcgtgaggctcatttggcaaaatccttgtttttcatccggattatggacaaggagaaagccttggaacatctg

SEQ ID NO: 5956 - DNA, 402 bp, Glycine max
  modified_base (286)..(286): a, c, g, t, unknown, or other
  modified_base (313)..(313): a, c, g, t, unknown, or other
gcaagagcaagagcaagagcgaaagcggcagataagatggaaggagaagagggttctcagcggccacagttggtgctcgcggacaagctattccttctccggcaacccgatgtgcaagacattgacaaggttcgctacaaagaggatgtcttcactcatgtcaaggaaaacgatatggtccctctgtacgaaaccctagtcgctgattccgtgttggacttggatcgtgcccttttggactctatgcgcgctaaaattgacgacgagctcaccaagctcgacgaanagattgctgatgccgaggaaaacttangagagagtgaagttcgtgaggctcatttggcaaaatccttgtttttcatccggattatggacaaggagaaagccttggaacatctgaag

SEQ ID NO: 5957 - DNA, 431 bp, Glycine max
gagagagaaagagaaccaaaccaaataaagctcttggttggttcacccttgtgcttattttttgttgctgagaaagagcaaagaagaagaataagaagaaggttttgatcggatgcgatgagcacacaaggacaagtgattgatgaggcggttctggatgacataatccggcgcctaacggaggtccgattggcccgacccggaaagcaggttcagctctccgagtctgagatcaagcaactttgcgtcgctttcagagacatcttcattaaccagcccaatttgcttgaactcgaagcccccatcaagatttgtggtgacattcatgggcagtacagtgatttgttaaggctatttgaatatgggggtttgcctcctactgccaattatctctttttgggggactatgtggaccgtgggaagcagagctt

SEQ ID NO: 5958 - DNA, 312 bp, Glycine max
actgttggggagttctattctgtggctttgacgaataactatcagcatgcggataccgggaccaagatgatacacaaagggaagaacacgaagagtaggattatatgcaaaggaatatcggctgggcattccaggaactgttatagaaggcttgttcaagttctgtccaaggctgacaatgcccgaaactcgtcacagtgtgaatctatgcttattggtgacaatgctgctgcaaatacctatccttatatccaggtgaaaaattcaaccgcaagaattgaacatgaaactagtacatactaaattggagaa

SEQ ID NO: 5959 - DNA, 293 bp, Glycine max
aaagcagctggtgacaactcaggtcattccgggagcacaaagtctgtgatgacaatagcgtgtccagtttgcgtttgaagtccaccttcaggagaacatagcaaccatggccagacaatatgttcgtagtatcattgcatctgttcaaagggtttcattagcactttcttcttcgcgctttgggtcttacaatgctttccacttaccacctggcacttctgaagcacaaacacttgctcgatggatctggaacagctaccgggtctatcttggggtagaacttctaaaatggg

SEQ ID NO: 5960 - DNA, 389 bp, Glycine max
  modified_base (194)..(194): a, c, g, t, unknown, or other
aggtccacctcattgtatacttgcaagtaacacttccacaattgacttgaatctgattggagagaagacaaagtctcaagatcgaattgttggagcccatttcttcagtcctgcacatgttatgccgcttctggaaattgtacgtaccaagcagacctctccccaagtgatagttgacgtgttagatatttcanagaagataaagaaaactccagtggtggttggaaactgcacaggatttgctgttaataggatgttcttcccatacacgcaagcaggtctcttgcttgttgaacgtggtgcagatgtttatcaaattgatagaataataaccaaatttggaatgcccatggggcctttcagattggctgaccttgttgggtttggtg

SEQ ID NO: 5961 - DNA, 375 bp, Glycine max
  modified_base (281)..(281): a, c, g, t, unknown, or other
  modified_base (320)..(320): a, c, g, t, unknown, or other
  modified_base (327)..(327): a, c, g, t, unknown, or other
  modified_base (338)..(338): a, c, g, t, unknown, or other
cccacgcgtccgcagcgtgtgcttctgctggcggcggcggttcaagctggcgctggcggaggcgccgtcggaaatcaagaccctattcaatgagtactccgagaatgagctcatgacaccttcgcatcttaagagattcctggtcgatgtgcagaggcaagagaaggccactgaagaagacgcgcaagccatcatcgatagcttcaggcatttccatcgcagaggcgctggcctcaatctcgaaactttcttcaagtacctcttcagtgacgataatcctnctcttcttccttctcatggggtgcaccatgatatgactntaccctngtcacattatntcatatatactggccataattcctatttaactgggaa

SEQ ID NO: 5962 - DNA, 455 bp, Glycine max
ggatttgggcacaattaaatctaagctggagaaaaatatttattctggcactgaggagtgtgcagctgatgtcagactgaccttctcaaatgctatgaaatataatcctcccagtaatgatgttcatttgatggcaaaggaactcagcaaaatatttgacagaaaatggaaagacttaggtcggaaatggaagtgtgaagatgagcatgataaaagcgaatctgaaacaattaaggaaactgggagaaaaagtcttgacatgctgtcccggcatagagattccttgcccaaaaagacacaagtatctgaacacaaaagaatgcccaagattagatcaattgcaacaaaattgcaagcgtgtaattacctaatttccagaacaagaggtaattaaaggcagatatagtcaaaagactagaatccaaacaatatgtgcatttacaataattggctgt

SEQ ID NO: 5963 - DNA, 299 bp, Glycine max
tggcaatagcaactgctgctgcaacttccatctttcctgctattgagccagggactgtatgtctcattattgagggtttattgtttacatggtggatgtgtggcattcacactggtcaagtgcgccaatctttacagaagaaatatcacttgaagaattcaccgtgtaatgcatgttgtgtgcactgctgctttcactggtgcgcccctttttctaagaacactaggtatatgaaattgactgttttttgttcctacttttttatctataattgtctctttttaaatcctttttccttt

SEQ ID NO: 5964 - DNA, 426 bp, Glycine max
gcagcgttgcaacgctgtttcctttctgtttcttttcttcttccttccgacgagatctacaacgttgttgttgtttagatcttgaatagtgttttggtgttcggtgagatggaagaaaggaagcaatcacgttatgtgaagttgactaaagatcagacacctctcgaagacattacccctggcgaactcaaccagccaattcaggttcctcagttggacgttcgcaagtgccctgaatgtagacagccgctacctgaaagctatgctcctcctgcagatgaaccttggatgactgggatctttggatgtgctgaagacagagaaagctgcttgaccggactgttttgtccttgtgtattatttgggcgcaatgtagaaagattgaaggaagacactccttggactgggccatgcatttgtcatgcc

SEQ ID NO: 5965 - DNA, 358 bp, Glycine max
cggacgcgtgggtgctgaaacacttgaggattatttacgccgtgaatgtccagagccgtgtaaggaaattcttgttttgtgtgacaatcgttgcgtactttttgataacaagactaaggatgaagggaagcgctttggacaagttcaacaacttctctcttttgtaaacacagttctatcacgtaatggtggacgaccttatacagatgagttatttacacaactgaagaaaggagcaatggagctgcataaccaacaaagagaggttgattctttaaaaggatattcaaaaggagagatattgaagtttaaaaagcaaatgcagcaaacatatgatgaccaattaaagcgaattact

SEQ ID NO: 5966 - DNA, 415 bp, Glycine max
gccacgcgtccgtttatggatgagatcgatgctattggaggtcgccgcttcagtgagggaggaggtgcagatcgtgagattcagagaacgctaatggagctgcttaatcaacttgatggatttgatcaacttggaaaggttcaaatgataatggctacaaacccacctgatgtacttgaccctgctctcctgcgtcctgtgagattggatagaaaaatagaaatccctgtgcctaatgaacaatccaggatggaaattcttaagattcatgctgctggcatcgctaagcatggtgaaatagactatgaagctgttgtgaagcttgcacagggatttaatggggctgatcttcgaaatgtctgcacagaagctggaatggcagcaattcgtgcagagcgtgattatgtgatccatg

SEQ ID NO: 5967 - DNA, 377 bp, Glycine max
ctctttctctctttgaccaatcccaaacccaaaacaaaaaataaaaatggagggggatctgaagcggaagctgttgagaagaagaaaggaagaggaagaagaagaagaagaagagttatcattggccaagagggtgtggaatgagagcaaggttatgtggatagtggcggcaccagccatattcacaaggttttacacctttgggatcagtggtataagccaagcttttgttggccatattggttctaaggaattggccgcttatgctctcgttgtcaccggtctcattaggttcgccaatggtgttctggtaggaatggctaatgcgttgtcaacactatggggacaaacatatggggcaaaaaaattatggcatg

SEQ ID NO: 5968 - DNA, 442 bp, Glycine max
gcttggcatactggattcctaatattggtcaactcatatttgtcacatgtggtgggtgctctgatacatggaaaggtttcacatttttggcattcaaagacctctggcctgttgtcaagatgtccctttcagctggtgccatgttatgtcttgagctctggtacaacacaatattggttcttttgacgggtaacatgaaaaacgcggaggttgaaattgatgctctatccatatgtctcaacatcaatggatgggaaatgatgatatcccttggtttcatggctgcagcaagtgttcgagtagcaaatgaacttggaagaggaagtgccaaagctgcaaagttctctattattgtgtcagtgctcacatcattggccatcggattccttctgtttatattcttcttattttttagagaaagacttgcatatatatttacctc

SEQ ID NO: 5969 - DNA, 456 bp, Glycine max
tcgcgccgttgccgacacctcctccgcgtatccttccattcccggcacggaaaccggtgagtgctccctccgcggcgtgggcgtgggcgacggtgttctggttcctccacggcgagaagtatacgatgaggggcgaatcttcgacatcactcacagatatgtccccgagatgccggtgtgggactcgacggaggggctcgagcaacacttcctgtggctcgataagagcatgaagaatggctcgctcgctaacagctctaacatggagctcggtgttcacaccggcacccatgttgactcgcccggtcacttttacgacaattactacgacgctggcttcgacgttgactcactcgacctaacgctgctcaatggccttgcacttctggttgatgttccgcgggataaaaacattactgctgaggttatgaggtccctgaatatccctagaggtgt

SEQ ID NO: 5970 - DNA, 394 bp, Glycine max
ctttctcagtcaaccatgaactctcgatcactctttgccttcctcttcgcaatgggcgggcactccgtcgccgttgccgacacctcctccgcgtatccttccatccccggcacggaaaccggtgagtgctccctccgcggcgtgggcgtggtcgacggtgttctggttcctccacggcgagaagtatacgaggaggggcgaatcttcgacatcactcacagatatgtccccgagatgccggtgtgggactcgacggaggcgctcgggcaacacttcctgcggctcgataagagcatgaagaatggctcgctcgctaacagctctaacatgaagctcggtgttcacaccggcacccatgtcgacgcgcccggtcacttttacgacaattactacg

SEQ ID NO: 5971 - DNA, 443 bp, Glycine max
ggactttccatgtcaaaggctactgccaagaaaattgtgaaagctgatgcttatgtagctgcttgtgatgtccctggaattaagagattacttccatcaaagtggagggaacaggagtttttcaataacatatatgaactagttggagttcctgtagtcacagtgcaacttagatacaatggttgggttacagagttgcaggatctagaaaagtcaaggcgactggggaaagctgttgggttggataaccttctctatacacccgatgcagatttttcttgctttgcagaccttgcactttcatctccagaagattattacattgagggacaaggatcattgctccaatgtgttctgacgccaggagatccatacatgcccttaccaaatgacgaaattattgcaagggtagcaaaacaggttttagcgctgttcccatcatc

SEQ ID NO: 5972 - DNA, 436 bp, Glycine max
ggggaatggcatggttgcagttgcagagaatcatcaccaataccaagggaggtgctaatttgatctcaccgctcccacgattcttctcgaaatgttccccctatgttttgaaagttggaataccagagtttctaaacgggattgggaagggggttgagtcccacgttcctaagcttgaatctgaaatcggtgatttccagaaacttctcgtcattcgaacccttaaactcaagaagctcggtattccttgcaaacataggaagttaatattgaaatacacacacaagtacaggctgggattatggaagccacgtgctgagttcatcactgcctgattggtttctaagtagtaagtagtcgcttgttgttagaccatattgcaaatgtttagccgcagcagaatgacaatgctctacttgaaaagatcaagtcgcac

SEQ ID NO: 5973 - DNA, 434 bp, Glycine max
aatttagcaatttacccttaaagttgtagcaagaagttaattaataatgagtgcgaatgcggggggggtgttgagcggtgagaggatgggggagaacgagaaaggagagcgatggagcggagcgatgacaaatctgacggagatggcctccaatctcgactctctccagaagcttctcctcaccaaagccgtcttcgtcgacgacgacaccttctccaaagcctacctcgccgccgaccaggcccgcaccatcaagctccttcagcaacgagtccagaccttggagagagaggtcgacgccgtcatcaccaccgccgtccgcgctcgctccgagaagcgccaggccgaggctgctcagaaatccgccgaatccgcggcgctcatcagctcaccgccgaactcgaaaacaccacaaaggtgtttgaactgcacat

SEQ ID NO: 5974 - DNA, 392 bp, Glycine max
ataaacctacgcattctcacaatctcttcacctctgttatgaccatgggatacagaacctgatcactcatcatcatatccgcaatggacatcagtgaacgtttgtctcttctccacgatggccgtatacactgtcgctacgctctccggagaggctctcgatcctcatggcgccaccagccatgtctacaatgacgacggcagtaaccccatgtggcactaccgcgtgaaattctccgtcaacgaatcgctggccaacgagaatcgtttgtctcttgagatcaagcgcgtctcagaccgcaacctcagtgacatcgttatctgcagcgtccatgttcctctcagggaactcatggacaatcgcggagacgacagttccttccgccacatcag

SEQ ID NO: 5975 - DNA, 426 bp, Glycine max
ttccaaacaaaacccatcaaagtctttctccctcagtgatcatatattcattcagttctatacaaaatcctcaaaaactcttcctctctgccatgaccatggaatacagaaccttagaactcaacatcatatccgcaaaggacatcaagaatgttaatctcttctccaagatggacgtatacgccgccgtttcgctctccggtgaccctctccaccctcagggcgccaccacccacgtccacaaagacgccggcagcaaccccacgtggaactaccccgtgaaattctctgtcaacgaatcgctggcgaaggaaaatcgtttatctcttgagatcaagctcatctccgaccgcaccctcggcgacaccgtcatcggcaccgtccatgttcctctcagggaactcctggataaccccggcgatgaca

SEQ ID NO: 5976 - DNA, 476 bp, Glycine max
caagtttcagttccaaacaaaacccatcaaagtctttctccctcagtgatcatatatgcattgagttctatacaaaatcctcaaaaactcttcctctctgccatgaccatggaatacagaaccttagaactcaacatcatatccgcaaaggacatcaagaatgttaatctcttctccaagatggacgtatacgccgccgtttcgctctccggtgaccctctccaccctcagggcgccaccacccacgtccacaaagacgccggcagcaaccccacgtggaactaccccgtgaaattctctgtcaacgaatcgctggcgaaggaaaatcgtttatctcttgagatcaagctcatctccgaccgcaccctcggcgacaccgtcatcggcaccgtccatgttcctctcagggaactcctggataaccccggcgatgacagctccttccgccaagtcagttatcaggtgatgaagcaatc

SEQ ID NO: 5977 - DNA, 400 bp, Glycine max
ccacgcgtcaggaaacatatccttattcactaaagagaaaccagaaggctcaaaatacaaccatgatcaatcatgctctttgtttcttagtattcctagctgcactccatgcattacatggagttgaatacactgtcattaacaacgcactctcaactcttgtcggcgtggctttccgtgacaaaatatgggctgaatacgccaagcgaagacttgactcggccaattaattcagatagatgatctttcagcataacaacccttctgacagaataaatgtgcagaatgtaagcttattcgttgatgacatcgatggtgttgcatatactagcaatagtcaaatccatctcagtgcaagatacgttggagacaattgaggggacgtgaaaagcgatataac

SEQ ID NO: 5978 - DNA, 424 bp, Glycine max
  modified_base (339)..(339): a, c, g, t, unknown, or other
gcgaaggagatagtgaaagagcttcttcctctaattcgagtgtacaaggatggcagcgtggagcgtcttctaagctctgaaaacgtggcagcctcccctgaagatccccaaactggagtctcatccaaagacatagtcatcgcagacaacccctacgtctccgctcgcattttccttcccaaatcccaccacactaacaacaaactccccatcttcctctacttccacggtggcgccttttgcgtcgaatccgccttctcctttttcgtccaccgctatctcaacatcttggcctcagaagccaacataatagccatctccgtcgacttcagactcctnccacaccaccctatccctgctgcctacgaagacggttggaccaccctcaatggattgcttcccacgccaacaacaccaacaccac

SEQ ID NO: 5979 - DNA, 460 bp, Glycine max
  modified_base (96)..(96): a, c, g, t, unknown, or other
  modified_base (322)..(322): a, c, g, t, unknown, or other
  modified_base (338)..(338): a, c, g, t, unknown, or other
  modified_base (364)..(364): a, c, g, t, unknown, or other
  modified_base (377)..(377): a, c, g, t, unknown, or other
ggcgaaggagatagtgaaagagcttcttcctctaattcgagtgtacaaggatggcagcgtggagcgtcttctaagctctgaaaacgtggcagcctnccctgaagatccccaaactggagtctcatccaaagacatagtcatcgcagacaacccctacgtctccgctcgcattttccttcccaaaatcccaccacactaacaacaaactccccatcttcctctacttccacggtggcgccttttgcgtcgaatccgccttctcctttttcgtccaccgctatctcaacatcttggcctcagaagccaacataatagccatctncgtcgacttcagactnctcccacaacaccctatccctgctgnctacgaagaccgntggaccaccctcaaatggattgcttcccacgccaacaacaccaacaccaccaacccggagccatggctactcaaccacgccga

SEQ ID NO: 5980 - DNA, 441 bp, Glycine max
gcagaagattaggagtagaatggcgaaggatatagtgaaagagcttcttcctctaattcgagtggacaaggatggcagcgtggagcgtcttctaagctctgaaaacgtggcagcctcccctgaagatccccaaactggagtctcatccaaagacatagtcatcgcagacaacccctacgtctccgctcgcattttccttcccaaatcccaccacactaacaacaaactccccatcttcctctacttccacggtggcgcctttgcgtcgaatccgccttctcctttttcgtccaccgctatctcaacatcttggcctcagaagccaacataatagccatctccgtcgacttcagactcctcccacaccaccctatccctgctgcctacgaagacggttggaccaccctcaaatggattgcttcccacgccaacaacaccaac

SEQ ID NO: 5981 - DNA, 424 bp, Glycine max
accacgcgtccgctttgtatcacgaaaactatacgattcgattccttgttttcaatggacaccttcttcaattctcaatcttcttcttcttcgagaagccgctggagttacgatactctcaagaatttccgtgagatctctccgctggttcagaatcacatcaaacgggtttattttacgttatgttgcgctgtggtggctgctgctgttggagcttttcttcatgttctgtggaacattgggggttttctcaccacgttggcttccattggaagcatggtttggttgctatctacaccccctgttgaagagcaaaagaggttgtctctgttgatggcttcggccttgtttcagggcgcttccattggacctctgattgatttggctattgccattgattctagccttaatgttagtgcatttg

SEQ ID NO: 5982 - DNA, 367 bp, Glycine max
gaaaactatacgattcgattccttgttttcaatggacaccttcttcaattctcaatcttcttcttcgtcgagaagccgctggagttacgatactctcaagaatttccgtgagatctctccgctggttcagaatcacatcaaacgggtttattttacgttatgttgcgctgtggtggctgctgctgttggagcttttcttcatgttctgtggaacattgggggttttctcaccacgttggcttccattggaagcatggtttggttgctatctacaccccctgttgaagagcaaaagaggttgtctctgttgatggcttcggccttggttcaaggcgctttcattggacctctgattgatttggctatt

SEQ ID NO: 5983 - DNA, 366 bp, Glycine max
cgaaaactatacgattcgattccttgttttcaatggacaccttcttcaattctcaatcttcttcttcttcgagaagccgctggagttacgatactctcaagaatttccgtgagatctctccgctggttcagaatcacatcaaacgggtttattttacgttatgttgcgctgtggtggctgctgctgttggagcttttcttcatgttctgtggaacattgggggttttctcaccacgttggcttccattggaagcatggtttggttgctatctacaccccctgttgaagagcagacgaggttgtctctggtgatggcttcggccttgcttcaaggcgcttccattggacctctgattgacttggcta

SEQ ID NO: 5984 - DNA, 412 bp, Glycine max
tgtctttgtatcacgaaaactatacgattcgattgcttgttttcaatggacaccgtgttcaattctcaatcttcttcttcttcgagaagccgctggagttacgatactctcaagaatttccgtgagatctctccgctggttcagaatcacatcaaacgggtttattttacgttatgttgcgctgtggtggctgctgctgttggagcttttcttcatgtcctgtggaacattgggggttttctcaccacgttggcttccattggaagcatggttcggttgctatctacacccgctgatgaagagcaaaagaggttgtctctgttgatggcttcagacttgtatcagggcgcttccattggacctctgattgatttggctatggccattgatcctagccttattgctagtgcat

SEQ ID NO: 5985 - DNA, 365 bp, Glycine max
gctattgccatcgatcctagccttattgttagtgcatttgtggcaacttctttggctttggcttgcttctatgcggcagctttagttgcaaggcgtatggagtacctataccatggtggtatgctttcttctgggctgtccattcttatgtggatgcactctgcttactctctctttgggggctcaattgcactcttcaagtttgagctgtactttgggctttaggtgtatgacagctacgttatagtagacactcaagatatcattgaaagggctcacatttggtgacctgcattatgtgaagcatgcattgacattgttcactgatttggctgcaatctttgtgcgaattctaataataatgt

SEQ ID NO: 5986 - DNA, 415 bp, Glycine max
cccacgcgtccgcccacgcgtccgcttgagcctggcaaagattactacatcaaacctgccataaccgacgttggaggccgcgtcactttgttaagcagaaacaatccatgccctctatatgtaggtcaagagaattctgatgcagcagagggcttaccccttttcttcaccccttttgcagaagaagatgatgttgtgaaggtgaatagggacttcaaggtgacattctcagctgcctcaatatgtgtgcagggcacaaattggaatttggctgagaaggatagtgagagtggaaggaggctcattgctgcatcaggcagggatgattactttagaattactgagacaccaatcaaaggttcatattatataggttggtgtcctacagatgtatgccccttttgtaggtttgact

SEQ ID NO: 5987 - DNA, 376 bp, Glycine max
aggtgaagcgggtctactatccaggcttgccgagtcaccctgaacatgagcttgccaagaggcagatgactggtttcggtggtgttgtcagttttgaggtgggaatttgacaagttgctattcaaacatgtggtttcctaataacactattttttttttcttttatcaagaatggtgtattggataacatcatgtgccatattttttttatagttaaattgccaatattgcagattgatggagatctacataccacaataaaatttattgattcattgaaaatcccatatattgcggcctcgtttggtggctgtgagagcattgtggatcaacctgctattttgtcctactggtactcatttggaatccatgttca

SEQ ID NO: 5988 - DNA, 398 bp, Glycine max
ggtgaagcgggtctactatccaggcttgccgagtcaccctgaacatgagcttgccaagaggcagatgactggtttcggtggtgttgtcagttttgaggtgggaatttgacaagttgctattcaaacatgtggtttcctaataacactattttttttttcttttatcaagaatggtgtattggataacatcatgtgccatattttttttatagttaaattgccaatattgcagattgatggagatctacataccacaataaaatttattgattcattgaaaatcccatatattgcggcctcgtttggtggctgtgagagcattgtggatcaacctgctattttgtcttactggtactcatttggattccatgttcaatttgtcatgttgatgatttttg

SEQ ID NO: 5989 - DNA, 392 bp, Glycine max
cacgcgtccgcgcacgcgtacgcccacgcgtccggatagaaagagagggagtaagtggataaaggaaagaaaactaaagaaacaaacctaacacaacacaaatccttgaaacgacgacggaaatggccgtttcgagctcgcacatgcgtttcacctttgagtgccgctccgatcccgatttctcgcccgccccgccgtccttcgacaacctccgccgccgaaacttccgctcctccgcaggatccggcgcggcgtttcacggcatctactccctcatcctccgcttccctcccaacttccagcgccagctaagcaccaaggcgcgccgcaactgcagcaacatcggcgtcgcgcaaatcgtcgccgcttcgtggtcgaacaacagcgacaac

SEQ ID NO: 5990 - DNA, 467 bp, Glycine max
cccacgcgtccgcccacgcgtccgtgcagctctactagctagggtttcgcaagtgcgatcgaggaagaacgagggccatggctgctgctctgcgtcgcgaaggaaggcgtttgacccaaccaatcaacgccctgcgttcctctctcatctctcaagaccaatcctctcatggcgctcgcttcatttccactcaagtggtgagaaacctaatgaagagtgtgaggaatatccacaagatcaccaaggccatgaagatggttgccgcatgcaagctgagagccgttcagaccatagctgaaaattcccgcggcctctggcagccgatcaccgctcttctcggcgacaatcccagtgctgatgttaagaaaaacgttgttgttaccatctcttcagacaaaagtctttgtggtggactcaattgcacgtctgttaagataagctgggttttgtccaattgaattctgggc

SEQ ID NO: 5991 - DNA, 395 bp, Glycine max
aagttttgttctttcctagcaattcggcgcaagcgtcttctgcttcaaggaaggagagcttgttattctctatcaacaaggaaaatgtcaggtgaagaggttgttgttgcagctgagccagctgctgccatcccaggcgagcctatggatatcatgactgccttgcaacttgtgctcagaaaatctctggcttatggtggtcttgcacgaggccttcacgaaggggcaaaagtgattgagaagcatgctgcacaactctgtgttctagcagaagactgtgaccagcctgactatgttaaactggttaaggccctttgtgcagagcacaatgttagcctgctgacagttccgagtgcaaagacccttggagaatgggctggtttgtgcaagattga

SEQ ID NO: 5992 - DNA, 406 bp, Glycine max
ttttcttagttccatggctttgaagatgaaagacaaatttgacaggtactggagcaagtgcagtttacctttagctgtagctgcagtcctggatcctcggtttaaaatgaagttggttgagtactacttctccctaatttatggtagcactgctctggagcatatcaaggaagtttctgatggtatcaaagaactttttaatgtgtattctatctgttcaactatgattgatcaaggctcggccttgcctggcagcagtttacctagtactagttgtagttccagagataggctaaaaggctttgacagattccttcatgagacatcacagggtcagtctatgatatcagacttagacaagtacttagaggaaccaatctttccacgcaattctgaatttaacata

SEQ ID NO: 5993 - DNA, 418 bp, Glycine max
  modified_base (383)..(383): a, c, g, t, unknown, or other
accacgcgtccgttctccctccttcttcaatggtcttagggtttccggtgtccatgcgtagcagctcgcactaatgcgcttttgaaacccgtgttcatctgtatccaacgatttactagaaggaggtcgcaatttctccatcttcacatttcgctagcacgtgaaatcaaaagttatcgacactttcgcgcgacacgaaatattgggaaccaagcaaaatatctatggctgacgaaccattatatccaatagcggtgcttatagatgagttgaaaaatgatgacatccagctgcggttaaactcaattcgtaggctatcaacaattgcacgtgctcttggggatgagcgaacccgtcgagaattaattccatttttaagtganaataatgatgatgatgacgaagtacttcttgcaat

SEQ ID NO: 5994 - DNA, 418 bp, Glycine max
gtccatgcgtagcagctcgcactaatgcgcttttgaaacccgtgttcatctgtatgcaacgatttactagaaggaggtcgcaatttctccatcttcacatttcgctagcacgtgaaatcaaaagttatcgacactttcgcgcgacacgaaatattgggaaccaagcaaaatatctatggctgacgaaccattatatccaatagcggtgcttatagatgagttgaaaaatgatgacatccagctgcggttaaactcaattcgtaggctatcaacaattgcacgtgctcttggggaggagcgaacccgtcgagaattaattccatttttaagtgaaaataatgatgatgatgacgaagtacttcttgcaatggcagaaagaagttggagtgttaattccttaggttgggggagtggaaca

SEQ ID NO: 5995 - DNA, 443 bp, Glycine max
cccacgcgtccgcccacgcgtccgcccacgcgtccggtcatcagattcttctgagcaggtccggtctgctttggcttcagtaataatgggaatggctccagtgttgggaaaggaagcaacaattgagcagcttcttcctattttcctttcccttttgaaggatgaatttcccgacgtgcgcctaaacattatcagcaagcttgatcaagtgaatcaggttataggaattgatctgttatctcagtctttgttaccagccattgttgagcttgctgaggataggcattggaaggtccggcttgcaattatagaatatatacccttattggcaagtcacatgggggttaagtttttcgatgacaagctttgtgctctttgcatgcaatggttacaggataagggtcaatcaattcgtgaagcagctgctaacaacttgaaacgcc

SEQ ID NO: 5996 - DNA, 381 bp, Glycine max
cggacgcgtgggcggacgcgtgggggaggctgttaggcgttgggatgtctctaccggtgcgtgcctgcaagtttatgaaaaaaacggtcctggcctcatctcctgtgcatggtttccaagtgggaaatatatactttctggcctcagtgacaagagcatttgcatgtgggatttagatgggaaagaagtggagtcttggaaaggacaaagaacccttaagatttctgatttggaaataacaggtgatggggaacacatgctgagtatttgtaaagacaattcaatactgtacttgaacaaagaaacgagggatgagagatatattgatgaggaccagacaataacttccttctctgtatcaaaggatagcagactcttggt

SEQ ID NO: 5997 - DNA, 414 bp, Glycine max
  modified_base (22)..(22): a, c, g, t, unknown, or other
  modified_base (398)..(398): a, c, g, t, unknown, or other
cacaacccatggccaccacctncgcattcctcctccttcccctcctcctgctgctccacctcgccatcgccgctcacggcatcggcatcaactacggcacgctcggcgacaaccttccaccgcccgcggcggtggcgaacttcctgaagacgaagacgaccatcgaccgcgtgaagatctacgacgtgaacccggacatcctgcgggccttcgccggcagcggcatctccgtgacggtgaccgcccccaacggcgacatcgccgccttaaccaaaatcgactcggcgaggcagtgggtggcgacgcacatcaaaccctttcaccctcagaccaaaattaattacatcctcgtcggcagcgaggttctccactggggcgacaccaacatgatccgcggnctcgtccctgccatga

SEQ ID NO: 5998 - DNA, 438 bp, Glycine max
ggcaggttcaggcccgggtacgcaaagcacgtgttgggcccaatgctgaagtttctgagggagacgagaacacccttgatggtgaacccgtacccgtacttcggttacaacgggaaaaacgtgaactttcttctgttcaggcccaaccgaggcttgtacgacaggtacacgaagaggagttacacgaaccagttcgacgctctgatggacgcggtgcactcggcgatgaatgctttggggtacggtgacgtggacatcgccgtcggcgaaacggggtggccctccgtttgcgacggttgggacgcgtgcagcgtggcgaacgcgcagtcctttaacagggaactggtgaagcacctggcgacggggaaaggaacgccattgatgccaaaccgaagcttcgagacttacatcttcgcgctcttcaatgagaaccaaaag

SEQ ID NO: 5999 - DNA, 418 bp, Glycine max
cccatggccaccacctgcgcattcctcctccttcccctcctcctgctgctccacctcgcggtcggggttcacggcatcggcatcaactacggaacgctcggcgacaaccttccaccgcccgcggcggtggcgaacttcctgaagacgaagacgaccatcgaccgcgtgaagatctacgacgtgaacccggacatcctgcgggccttcgccggcagcggcatctccgtgacggtgaccgcccccaacggcgacatcgccgccttaaccaaaatcgactcggcgaggcagtgggtggcgacgcacatcaaaccctttcaccctcagaccaaaattaattacatcctcgtcggcagcgaggttctccactggggcgacaccaacatgatccgcggcctcgtccctgccatgagaacccttc

SEQ ID NO: 6000 - DNA, 407 bp, Glycine max
atttattttctttttttcatatttttcttctaattttccctttgcataatttctcgcgtaacggaaagccatgaaattcggaaagagcctgagcagccagatcgagaaaaccctgccggagtggcgtgacaagttcctctcctacaaggagctcaagaagaagctcaagcaattcgaccctcccgccgccgccgatgagcgccccggcaaacgcctcaagtccgacgccgttcccgacgccgccgacatgtcgaaggaggagagcgacttccggaacctgctggagaatgaactcgacaaattcaacaccttcttcgtcgagaaggaggaagagtacattatcagactcaaggagttacaagatagggttgccaaagttaaggattcaagtgaagagatgatgaaaa

SEQ ID NO: 6001 - DNA, 443 bp, Glycine max
aggagcccgagcgtgaccgcaagaaaacgaagaacatcaagcacaacggcaacatctcgctagacgacgtcatcgagatcgctagggttatgaggccgaggtcaatggcgaaggacctcagcggcagcattaaggagattctcgggacgtgcgtctccgtcggatgcaccgttgatggaaaggatcccaaggacttgcagcaggagattaccgatggtgatgttgaggtccctctcgattaaggaggaaggctttgttactctctttctctctttttcttttgtctttcttcagatcgtttcgtgttctttttaatataaatttgggggaactatcgaacgttttgtctaaggttattttaccgctttggataatttaaatgaatggttcgagagatattataattatgggctgattagtttctttctctgctcacattatga

SEQ ID NO: 6002 - DNA, 383 bp, Glycine max
ggccctcaaggagcccgagcgcgaccgcaagaagaccaagagcatcaagcacaacggcgagatctcgctcgatgacgtcatcgagatcgctagggttatgaggccgaggtccatggccaaggacctcagcggctccattaaggagattctcggaacatgcgtctcggttggttgcaccgctgatggaaaggatccaaaggacttgcagcaggatatttccgatggtgatgttgaggtccctctcgattgaggaagaagactttgtttatctctctctttgcttctctcttatagacgtttcgagttttttaaatataaatctggggaaactattgaacgtactgcctaaggctattctactggtttggataatttacatgatg

SEQ ID NO: 6003 - DNA, 370 bp, Glycine max
tcttcctcttcgatcatcacctctccacaatgccgccgaagttcgacccctcccagatagtcgaggtgttcgtccgcgttaccggcggcgaagtcggcgcggcgagttccctggccccgaagatcggtcccctcggtctctcccccaagaagatcggagaagacatcgccaaagaaaccgccaaggactggaagggcctccgcgtcaccgtcaagctcaccgttcagaatcgtcaggcgaaggtcacggtggtcccctccgccgtcgtcctcgttatcaaggccctcaatgagcccgagcgcgaccgcaagaagaccaagaacatcaagcacaacggcaacatctcgctcgatgacgtcatcgagatcgc

SEQ ID NO: 6004 - DNA, 464 bp, Glycine max
cccacgcgtccgcaaccctgacactccttcttctccgcttcctcttcgatcatcgggtcagaatgccgccgaagttcgacccctcccagatcgtcgacgtcttcgtacgcgtcaccggcggtgaggtcggcgcggcgagttccctcgccccgaagatcggtcccctcggtctctcccccaagaagatcggagaagatatcgccaaggaaaccgccaaggactggaagggcctccgcgtcaccgtcaagctcaccgtgcagaaccgtcaggccaaggtcacggtggtcccatccgccgccgcgctcgtcatcaaggccctcaaggagcccgagcgtgaccgcaagaaaacgaagaacatcaagcacaacggcaacatctcgctagacgacgtcatcgagatcgctagggttatgaggccgaggtcaatggcgaaggacctcagcggcagcattaaggagattctc

SEQ ID NO: 6005 - DNA, 443 bp, Glycine max
gagacattacagtttgtattattgtagaagagagagggagagagatggagttgagcatgaaagtgttggtgaaagttgcttcgttgcttttcctattggaattcactgcaacagttgttgatgctcgcttcgatccaagttcattcatcactcagtttctccccaatgctgaagccaacaattactatgttaaatccacaacaaaagcgtgctgtaacagctgtccttgcacaaaatcaatccctccacagtgtcgttgttcagatattggagaaacatgtcactctgcatgcaaaacttgtatttgcactcgctcaattcctccacagtgtcattgcagtgacataaccaaccttctgttatgaaccttgcaactcctctgaaaccgaagctcactaggaatattgagcatgttccagtgactaacatgtttgacagagtca

SEQ ID NO: 6006 - DNA, 425 bp, Glycine max
caagaagtggagagaaggttttcatgtcacttcaatggctactgctggaagtcgctggggtgttgttatgtctcgaaatgctggattcagtaaacaggtggttgaacttgattttctctatccaagtgagggcatccataaacgttgggataaaggttataggattacagcaaccgcagctacattggatcaatctgctcttatattaagtattccgaggcgcaaactcagtgatgaaactcaggaaactctacgtacatcgcaatttcccggcacacatgttaaggaaaaatggtcaaaaaacctttaccttgcctgtttgtgctacggacgcacagtatgctgatttccatgacattttaaagcattttattgacaagcggattatgagttgtcatcttgcccaccacaaaagatctttttgt

SEQ ID NO: 6007 - DNA, 407 bp, Glycine max
  modified_base (37)..(37): a, c, g, t, unknown, or other
  modified_base (374)..(374): a, c, g, t, unknown, or other
  modified_base (391)..(391): a, c, g, t, unknown, or other
acccacgcgtccggctgatatggcggttgatcgctcncttacgaagtgctgtagcctcgtactgtggtcgtggatgttgctgaggatgatgatggcgcagggtgcagccgcgagggccaaccggaaggagtgggactcggtcataaagttaccggctgaaccggtcgatgctgactcggatcatgaagtgggaacacgatgggcggttcttgtggctggttcaaacggctatggaaactacaggcatcaagcagatgtgtgccatgcgtaccagttgctgataaaaggtgggctaaaagaagagaacatagtggtgtttatgtacgatgacatagctacagacgagttaaatcccagacctggagtcatcatcnaacaccctgagggacangatgtgtatgctggtg

SEQ ID NO: 6008 - DNA, 379 bp, Glycine max
aagacatgcatatggagggtacaagaagatgctcatatacgtggaagcttgcgaaagggggagcatgtttgagggtataatgcctaaggatctgcagatttatgtcacaactgcatccaatgcacaagagaatagttggggaacttattgccctggaatggatccttctccacctccagagtacatcacttgcctaggggatttgtacagtgttgcttggatggaagatagtgagactcataatctaaaaagggagtccgtgaaacaacaatacaaatcggtaaagcaacggacttcaaatttcaacaactatgcgatgggttcttatgtgatgcaatacggtgacacaaacatcacagctgaaaagctttatttatac

SEQ ID NO: 6009 - DNA, 407 bp, Glycine max
ctgtgagtctttcttagctgatatggcggttgatcgctcccttacgaggtgctgtaggctcgtactgtggtcgtggatgttgctgaggatgatgatggcgcagggtgcagccgcgagggccaaccggaaggagtgggactcggtcataaagttaccggctgaaccggtcgatgctgactcggatcatgaagtgggaacacgatgggcggttcttgtggctggttcaaacggctatggaaactacaggcatcaagcagatgtgtgccatgcgtaccagttgctgataaaaggtgggctaaaagaagagaacatagtggtgtttatgtacgatgacatagctacagacgagttaaatcccagacctggagtcatcatcaaccaccctgagggacaagatgtgtatgctg

SEQ ID NO: 6010 - DNA, 250 bp, Glycine max
agtttaaagggagtacgtgaaacaacggacatgttgattaagcaacggacttcaaatttcaacaactatgcgatgggttctcatgtgatgcaatacggtgacacaaacatcacagctgaaaagctttatttataccaatgttttgatcctgacgctgtgaacttcccttcacataactgatggctagatactaaaatggaagtcgataaccaaatagattcataacttttcttcatgtggcaaatgtatt

SEQ ID NO: 6011 - DNA, 409 bp, Glycine max
aaaaccatgaagaaaggtgaaaatgctattttcaccatcccttccgagctagcttatggtgaatctggttccccttcaactattcctcctaatgctacactccaatttgatgttgagctgctgtcatggactagtgtaaaggacatatgcaaggatggcggtatatttaagaagatagttactgagggggacaaatgggagaaccctaaggatcctgatgaagtattggttaagtatgaagttcatctagaaaatggaaagcttgtagcaaagtctgatggggtggagttcacagtcagagagggtcattattggcctggattggccaaaggctgttaaaaccatgaagaagggagagaaagtgcttttgacagttaagccacaatatggatttggtgagaaggggaag

SEQ ID NO: 6012 - DNA, 460 bp, Glycine max
  modified_base (420)..(420): a, c, g, t, unknown, or other
actaaaactaaaactaaaaccccactcagtcttccagtgaaaaaagaaaggcagcgatggaagaagacttcgacatccccggcggcgaggaaatggatctcggcgaagacaaggtcggcgaggagcgggagatcggctcccgcggcctcaagaagaagctcctcaaagaaggtcaaggctgggaaacccccgaagtcggcgacgaagtccaagttcattacacggggactttgctcgacggaactaagtttgattcgagccgcgacagggattctcccttcagcttcacgctcggacaagggcaagtaattaaaggatgggatgaaggtattaaaaccatgaagaaaggtgaaaatgctattttcaccatccctcccgagctagcttatggtgaatctggttcccctccaactattcctnctaatgctacactccaatttgatgttgagctgctgtcatg

SEQ ID NO: 6013 - DNA, 450 bp, Glycine max
  modified_base (414)..(414): a, c, g, t, unknown, or other
cttgcttacaaaagtttgttttcaaagtgtgttttgtttcccaaatcctactcttgtgggacaacccttcctcctctttcttttgaaacctctttttttctattccccaaccaaacaagcaaacgctactcactcatcatcactgagatcatggctcctaatatcaccactgtcaaaaccaccatcaccgacgctcaagccaaggtcgccaccgatcatggtcgtgcctacgtcaccttcctcgccggaaacggtgactatgtgaaaggtgtcgttggcttggcaaaaggtctgagaaaagtgaagagcatgtaccctctggtggatgcagtgctacccgatgttccccaagatcaccgcaacattctcacctgccaaagttgcattgttagagagattgagcccgtgtacccnccaaagaatcaaacccagtttggcatgggatattac

SEQ ID NO: 6014 - DNA, 389 bp, Glycine max
agcccacgcgtccgcccacgcgtccgcacacacacagctagcagatattacatacacgtgaatcactaattaagccatggagaagaaatcaatagctgggttgtgcttcctcttccttgttctctttgttgctcaagaagttgtggtgcaaactgaggcaaagacttgcgagaacctggctgatacatacaggggtccatgcttcaccactggcagctgcgatgatcactgcaagaacaaagagcacttgctcagaggcagatgcagggacgattttcgctgttggtgcaccaaaaactgttaaatggatccattcactccaacgtgaagaagatgcatgcagcgctattttataaaaaataaaactactatatactatatataataag

SEQ ID NO: 6015 - DNA, 213 bp, Glycine max
cacacacacagctagcagatattacatacacgtgaatcactaattaagccatggagaagaaatcaatagctgggttgtgcttcctcttccttgttccctttgttgctcaaaaatttttggtgcaaactaaggaaaaaacttccaaaaacctgcttgtaaaataaaggggccaatccttaacaattggaacttccaagattaatggaagaacaa

SEQ ID NO: 6016 - DNA, 423 bp, Glycine max
acgtcagcagctagcagatattacatacacgtgaatcactaattaagccatggagaagaaatcaatagctgggttgtgcttcctcttccttgttctctttgttgctcaagaagttgtggtgcaaactgaggcaaagacttgcgagaacctggctgatacatacaggggtccatgcttcaccactggcagctgcgatgatcactgcaagaacaaagagcacttgctcagaggcagatgcagggacgatttttcgctgttggtgcaccaaaaactgttaaatggatccattcactccaacgtgaagaagatgcatgcagcgctattttataaaaaataaaactactatatactatatataataagactggcgctgcatcaatgacctatgtattatagtatatattattaccgatgtcagaacta

SEQ ID NO: 6017 - DNA, 436 bp, Glycine max
accagcagatattacatacacgtgaatcactaattaagccatggagaagaaatcaatagctgggttgtgcttcctcttccttgttctctttgttgctcaagaagttgtggtgcaaactgaggcaaagacttgcgagaacctggctgatacatacaggggtccatgcttcaccactggcagctgcgatgatcactgcaagaacaaagagcacttgctcagaggcagatgcagggacgattttcgctgttggtgcaccaaaaactgttaaatggatccattcactccaacgtgaagaagatgcatgcagcgctattttataaaaaataaaactactatatactatatataataagactggcgctgcatcaatgacctatgtattatagtatatattattaccgatgtcagaactatagatgcatgtactgtgcataac

SEQ ID NO: 6018 - DNA, 424 bp, Glycine max
cacacacagctagcagatattacatacacgtgaatcactaattaagccatggagaagaaatcaatagctgggttgtgcttcctcttccttgttctctttgttgctcaagaagttgtggtgcaaactgaggcaaagacttgcgagaacctggctgatacatacaggggtccatgcttcaccactggcagctgcgatgatcactgcaagaacaaagagcacttgctcagaggcagatgcagggacgattttcgctgttggtgcaccaaaaactgttaaatggatccattcactccaacgtgaagaagatgcatgcagcgctattttataaaaaataagactactatatactatatataataagactggcgctgcatcaatgacctatgtattatagtatatattattaccgatgtcagaactatag

SEQ ID NO: 6019 - DNA, 437 bp, Glycine max
cacacacagctagcagatattacatacacgtgaatcactaattaagccatggagaagagatcaatagctgggttgtgcttcctcttccttgttctctttgttgctcaagaagttgtggtgcaaactgaggcaaagacttgcgagaacctggctgatacatacaggggtccatgcttcaccactggcagctgcgatgatcactgcaagaacaaagagcacttgctcagaggcagatgcagggacgattttcgctgttggtgcaccaaaaactggttaatggatccattcacttccaacgtgaaagaagatgcatgcagcgctattttataaaaaataaaactactatatactatatataataagactggcgctgcatcaatgacctatgtattatagtatatattattaccgatgtcagaactatagatgcatgtact

SEQ ID NO: 6020 - DNA, 421 bp, Glycine max
cggcgcgtgggcacacacacagctagcagatattacatacacgtgaatcactagttaagccatggagaagaaatcaatagctgggttgtgcttcctcttccttgttctctttgttgctcaagaagttgtggtgcaaactgaggcaaagacttgcgagaacctggctgatacatacaggggtccatgcttcaccactggcagctgcgatgatcactgcaagaacaaagagcacttgctcagaggcagatgcagggacgattttcgctgttggtgcaccaaaaactgttaaatggatccattcactccaacgtgaagaagatgcatgcagcgctattttataaaagataaaactactatatactatatataataagactggcgctgcatcaatgacctatgtattatagtatatattattacc

SEQ ID NO: 6021 - DNA, 273 bp, Glycine max
gacacacacagcttgcagatattacattcccctggatcactaattaagccctggggaaggaatcaatagctgggttgtgcttgctcttccttggtctctttggtgctcaagaaagtgtggtgcaaactgaggcaaagacttgcgagaacctggctgatacatacaggggtccatgcttcaccactggcagctgccatgatcactggaagaaccaagagcacttgctcagaagcagattccaggaccattttcgcttttggggcccccaaaact

SEQ ID NO: 6022 - DNA, 432 bp, Glycine max
acacacagctagcagatattacatacacttgaattactaattaagcccttgagaagaaattcattagctgggttgtgcttcctcttccttgttctctttgttgctcaagaagttgtggtgcaaactgaggcaaagacttgcgagaacctggctgatacatacaggggtccatgcttcaccactggcagctgcgatgatcactgcaagaacaaagagcacttgctcagaggcagatgcagggacgattttcgctgttggtgcaccaaaaactgttaaatggatccattcactccaacgtgaagaagatgcatgcagcgctattttataaaaaataaaactactatatactatatataataagactggcgctgcatcaatgacctatgtattatagtatatattattaccgatgtcagaactatagatgcatgt

SEQ ID NO: 6023 - DNA, 366 bp, Glycine max
cacacacacagctagcagatattacatacacgtgaatcactaattaagccatggagaagaaatcaatagctgggttgtgcttcctcttccttgttctctttgttgctcaagaagttgtggtgcaaactgaggcaaagacttgcgagaacctggctgatacatacaggggtccatgcttcaccactggcagctgcgatgatcactgcaagaacaaagagcacttgctcagaggcagatgcagggacgattttcgctgttggtgcaccaaaaactgttaaatggatccattcactccaacgtgaagaagatgcatgcagcgctattttataaaaaataaaactactatatactatatataataagact

SEQ ID NO: 6024 - DNA, 443 bp, Glycine max
cacagctagcagatattacatacacgtgaatcactaattaagccatggagaagaaatcaatagctgggttgtgggtcctcttccttgttctctttgttgctcaagaagttgtggtgcaaactgaggcaaagacttgcgagaacctggctgatacatacaggggtccatgcttcaccactggcagctgcgatgatcactgcaagaacaaagagcacttgctcagaggcagatgcagggacgattttcgctgttggtgcaccaaaaactgttaaatggatccattcactccaacgtgaagaagatgcatgcagcgctattttataaaaaataaaactactatatactatatataataagactggcgctgcatcaatgacctatgtattatagtatatattattaccgatgtcagaactatagatgcatgtactgtgcataacggc

SEQ ID NO: 6025 - DNA, 479 bp, Glycine max
cacacacacagctagcagatattacatacacgtgaatcactaattaagccatggagaagaaagcaatagctgggttgtgcttcctcttccttgttctctttgttgctcaagaagttgtggtgcaaactgaggcaaagacttgcgagaacctggctgatacatacaggggtccatgcttcaccactggcagctgcgatgatcactgcaagaacaaagagcacttgctcagaggcagatgcagggacgattttcgctgttggtgcaccaaaaactgttaaatggatccattcactccaacgtgaagaagatgcatgcagcgctattttataaaaaataaaactactatatactatatataataagactggcgctgcatcaatgacctatgtattatagtatatattattaccgatgtcagaactatagatgcatgtactgtgcataacggctgagttatgtacttatgttaagaataaaat

SEQ ID NO: 6026 - DNA, 398 bp, Glycine max
ctttgttgctcaagaagttgtggtgcaaactgaggcaaagacttgcgagaacctggctgatacgtacaggggtccatgcttcaccactggcagctgcgatgatcactgcaagaacaaagagcacttgctcagaggcagatgcagggacgattttcgctgttggtgcaccaaaaactgttaaatggatccattcactccaacgtgaagaagatgcatgcagcgctattttataaaaaataaaactactatatactatatataataagactggcgctgcatcaatgacctatgtattatagtatatattattaccgatgtcagaactatagatgcatgtactgtgcataacggctgagtaatgtacttatgttaagaataaaataaagtgctcgtgttgc

SEQ ID NO: 6027 - DNA, 479 bp, Glycine max
  modified_base (467)..(467): a, c, g, t, unknown, or other
cacacacacagctagcagatattacatacacgtgaatcactaattaagccatggagaagaaatcagatagctgggttgtgcttcctgttccttgatctctttgatggctaagaagttgtggtgcaaactgaagcaaagacttgcgagaacctggctgatacatacaggggttcatgctttaccactggcagctgcgatgatcactgcaagaacaaagagcacttgctcagaggcagatgcagggacgattttcgctgttggtgcaccaaaaactgttaaatggatccattcactccaacgtgaagaagatgcatgcagcgctattttataaaaaataaaactactatatactatatataataagactggcgctgcatcaatgacctatgtattatagtatatattaataccgatgtcagaactatagatgcatgtactgtgcataacggctgagttatgtacttatngtaagaataaat

SEQ ID NO: 6028 - DNA, 466 bp, Glycine max
cacacagctagcatatattacatacacgtgaatcactaattaagccatggagaagaaatcaatggctgggttgtgcttcctattccttgttctctttgttgctcaagaagttgtggtgcaaactgaggctaagacttgcgagaacctggctgatacatacaggggtccatgcttcaccactggcatctgcgatgatcactgcaagaacaaagagcacttgctcagaagcagatgcagggactattttcgctgttggtgcaccaaaaactgttaaatggatccattcactccaacgtgaagaagatgcatgcaacgctattttataaaaaatataactactatatactatatataataagactggcgctgcatcaatgacctatgtattatagtatatattattaccgatgtcagaactatagatgcatgtactgtgcataacggctgagttattacttatgttaag

SEQ ID NO: 6029 - DNA, 379 bp, Glycine max
cccacgcgttcgcccacgcgttcgcacacagctagcagatattacatacacgtgaatcactaagtaagccatggagaagaaatcaatagctgggttgtgcttcctcttccttgttctctttgttgctcaagaagttgtggtgcaaactgaggcaaagacttgcgagaacctggctgatacatacaggggtccatgcttcaccactggcagctgcgatgatcactgcaagaacaaagagcacttgctcagaggcagatgcagggacgattttcgctgttggtgcaccaaaaattgttaaatggatccattcactccaacgtgaagaagatgcatgcagcgctattttataaaaaataaaactactatatactatatataa

SEQ ID NO: 6030 - DNA, 478 bp, Glycine max
cacacacacagctagcagatattacatacacgtgaatcactaattaagccatggagaagaaaggaatagctgggttgtgcttcctcttccttgttctctttgttgctcaagaagttgtggtgcaaactgaggcaaagacttgcgagaacctggctgatacatacaggggtccatgcttcaccactggcagctgcgatgatcactgcaagaacaaagagcacttgctcagaggcagatgcagggacgattttcgctgttggtgcaccaaaaactgttaaatggatccattcactccaacgtgaagaagatgcatgcagcgctattttataaaaaataaaactactatatactatatataataagactggcgctgcatcaatgacctatgtattatagtatatattattaccgatgtcagaactatagatgcatgtactgtgcataacggctgagttatgtacttatgttaagaattaaa

SEQ ID NO: 6031 - DNA, 449 bp, Glycine max
cccacgcgtccgcacagctagcagatattacatacacgtgaatcactaatggagccatggagaagaaatcaatagctgggttgtgcttcctcttccttgttctctttgttgctcaagaagttgtggtgcaaactgaggcaaagacttgcgagaacctggctgatacatacaggggtccatgcttcaccactggcagctgcgatgatcactgcaagaacaaagagcacttgctcagaggcagatgcagggacgattttcgctgttggtgcaccaaaaactgttaaatggatccattcactccaacgtgaagaagatgcatgcagcgcttatttataaaaaataaaactactatatactatatataataagactggcgctgcatcaatgacctatgtattatagtatatattattaccgatgtcagaactatagatgcatgtactgtgcat

SEQ ID NO: 6032 - DNA, 435 bp, Glycine max
cacacacacagctagcagatattacatacacgtgaatcactaattaagccatggagaagaggtcaatagctgggttgtgcttcctcttccttgttctctttgttgctcaagaagttgtggtgcaaactgaggcaaagacttgcgagaacctggctgatacatacaggggtccatgcttcaccactggcagctgcgatgatcactgcatgaacaaagagcacttgctcagaggcagatgcagggacgattttcgctgttggtgcaccaaaaactgttaaatggatccattcactccaacgtgaagaagatgcatgcatcgctattttataaaaaataaaactactatatactatatataataagactggcgctgcatcaatgacctatgtattatagtatatattattaccgatgtcagaactatagatgcatgta

SEQ ID NO: 6033 - DNA, 417 bp, Glycine max
  modified_base (4)..(4): a, c, g, t, unknown, or other
cgtncgcacttacacagctagcatatattacatacttttgaatcactaattaagccatggagaagaggtcaggttctgggttgtgcttcctcttccttgttctctttgttgctcaagaagttgtggtgcaaactgaggcaaagacttgcgagaacctggctgatacatacaggggtccatgcttcaccactggcagctgcgatgatcactgcaagaacaaagagcacttgctcagaggcagatgcagggacgattttcgcttgtggtgcaccaaaaactgttaaatggatccattcactccaacgtgaagaagatgcatgcagcgctattttataaaaaataaaactactatatactatatataataagactggcgctgcattaatgacctatgtattataagatatattattaccg

SEQ ID NO: 6034 - DNA, 432 bp, Glycine max
cccacgcgtccgcccacgcgtccgcacacacacagctagcagatattacatacgcgtgaatcactaattaagccatggagaagaaatcaatagctgggttgtgcttcctcttccttgttctctttgttgctcaagaagttgtggtgcaaactgaggcaaagacttgcgagaacctggctgatacatacaggggtccatgcttcaccactggcagctgcgatgatcactgcaagaacaaagagcacttgctcagaggcagatgcagggacgattttcgctgttggtgcaccaaaaactgttaaatggatccattcactccaacgtgaagaagatgcatgcagcgctattttataaaaaataaaactactatatactatatataataagactggcgctgcatcaatgacctatgtattatagtatatattatta

SEQ ID NO: 6035 - DNA, 296 bp, Glycine max
cccacgcgtacgcccacgcgtccgggacgattttcgctgttggtgcaccaaaaactgttgagtggatccattcactccaacgtgaagaagatgcatgcagcgctattttataaaaaataaaactactatatactatatataataagactggcgctgcatcaatgacctatgtattatagcatatattattaccgatgtcagaactatagatgcatgtactgtgcataacggctgagttatgtacttatgttaagaataaaatacagtgctgttgttgcaaaaaaaatcatatgcac

SEQ ID NO: 6036 - DNA, 433 bp, Glycine max
cccacgcgtccgcacacagctagcagatattacatacacgtgaatcactaattaagccatggagaagaaatcaatagctgggttgtgcttcctcttccttgttctctttgttgctcaagaagttgtggtgcaaactgaggcaaagacttgcgagaacctggctgatacatacaggggtccatgcttcaccactggcagctgcgatgatcactgcaagaacaaagagcacttgctcagaggcagatgcagggacgattttcgctgttggtgcaccaaaaactgttaaatggatccattcactccaacgtgaagaagatgcatgcagcgctattttataaaaaataaaactactatatactatatataataagactggcgctgcatcaatgacctatgtattatagtatatattattaccgatgtcagaactata

SEQ ID NO: 6037 - DNA, 417 bp, Glycine max
  modified_base (390)..(390): a, c, g, t, unknown, or other
cacacacacagctagcagatattacatgcacgtgaatcactaattaagccatggagaagaaatcaatagctgggttgtgcttcctcttccttgttctctttgttgctcaagaagttgtggtgcaaactgaggcaaagacttgcgagaacctggctgatacatacaggggtccatgcttcaccactggcagctgcgatgatcactgcaagaacaaagagcacttgctcagaggcagatgcagggacgattttcgctgttggtgcaccaaaaactgttaaatggatccattcactccaacgtgaagaagatgcatgcagcgctattttataaaaaataaaactactatatactatatataataagactggcgctgcatcaatgacctatgtnatatagtatatattaataccgatgtca

SEQ ID NO: 6038 - DNA, 433 bp, Glycine max
agctagcagatattacatacacgtgaatcactaattaagccatggagaagaaatcaatagctgggttgtgcttcctcttccttgttctctttgttgctcaagaagttgtggtgcaaactgaggcaaagacttgcgagaacctggctgatacatacaggggtccatgcttcaccactggcagctgcgatgatcactgcaagaacaaagagcacttgctcagaggcagatgcagggacgattttcgctgttggtgcaccaaaaactgttaaatggatccattcactccaacgtgaagaagatgcatgcagcgctattttataaaaaataaaactactatatactatatataataagacttgcgctgcatcaatgacctatgtattataagatatattattaccgatgtcagaactatagatgcatgtactgtgca

SEQ ID NO: 6039 - DNA, 436 bp, Glycine max
acaaaggtgaagctcaggctcaggattggagaggcagaccctccaaccctgccaaacacgggggaatgattcccgctgcttttgttcttgggttgcaagcttttgagataatggcaatagccgcagtggggaacaatctgataacctacgtgacgagtgagatgcacttccctttgtccaaggctgccaacctagtcactaactttgttgggaccatctttctcctcgtcctcctcggcggctatctttccgactcttacctcggcagcttctggaccatgctcatctttggtttccgtgaactttgctggttcatattgctttctgtccaagctcatgttcctcagttgaagccacccccatgcaatatcaacgatttaagagaacagtgcttaaaaaccaaaggcctgaagaccatgatattcttcgtagccct

SEQ ID NO: 6040 - DNA, 451 bp, Glycine max
acaaaggtgaagctcaggctcaggattggagaggcagaccctccaaccctgccaaacactgtggaatgattcccgctggttgtgttcttgggttgcaagcttttgagataatggcaatagccgcagtggggaacaatctgataacctacgtgacgagtgagatgcacttccctttgtccaaggctgccaacctagtcactaactttgttgggaccatctttctcctcgccctcctcggcggctatctttccgactcttacctcggcagcttctggaccatgctcatctttggtttcggtgaactttccggcttcatattgctttctggccaagctcatggtcctcagttgaagccacccccatgcaatatcaacgaattatgagaacaatgctcataagccaacggcatgaagaccatgatattcttcgtagccctcgacttggtggcatt

SEQ ID NO: 6041 - DNA, 444 bp, Glycine max
gaatctttgaattattgctaagaaagttttgcaggaagcttccagccccaatcgcaccctggaccttgcatcttcccttgacgttggtcccagtggaaaccgagcttcagatgaatgtgctggaaattccagctatatgagatctgtgatgacaatagcatttgaatttgcatttgaaagccatatgcaagagcatgtagcagctatggcacgtcaatatgttcggagcattatatcatcggttcaaagggtaggattagcactttctccttctcatttgagttcacatgcagggcttaggtcaccattgggtactcctgaagcacaaacccttgctcattggatctgcaacagttataggtgctacttgggtgtggagctacttaaatctaataacgaagggaatgaatctttgctcaagtccttgtggcatcactcagatgc

SEQ ID NO: 6042 - DNA, 453 bp, Glycine max
gcaaaaagaaaatcagtaggcgtagagaacagcaaagaaagaggaataatggagcaggaagagcacgaagtgtacggtgcagacattcccgacgaggagattgacatggacgcagacgccgagcaacaagatgagcaacttgcccccaatcacacaaacaaggaactggaggacatgaagaagaggctgaaggagatcgaggaggaagctagcgcccttcgcgaaatgcaggccaaggtcgagaaagagatgggcgctgttcaagattcgtcgggcacttccgcaactcaagctgaaaaggaggaagtggatgctcggtcaatctatgttggtaatgttgactatgcatgtacgcctgaagaagtccagcagcattttcagtcctgtggaactgtgaacagggtgacaatactgacagacaaatttggtcaaccaaaaaggtttgcttatgta

SEQ ID NO: 6043 - DNA, 450 bp, Glycine max
agaaaatcagtaggcgtagagaacagcagagaaagaggaataatggagcaggaagagcacgaggtgtacggtgcagacattcccgacgaggagattgacatggacgcagacgccgagcaacaagatgagcaacttgcccccaatcacacaaacaaggaactggaggacatgaagaagaggctgaaggagatcgaggaggaagctagcgcccttcgcgaaatgcaggccaaggtcgagaaagagatgggcgctgttcaagattcgtcgggcacttacgcaactcaagctgaaaaggaggaagtggatgctcggtcaatctatgttggtaatgttgactatgcatgtacgcctgaagaagttcagcagcattttcagtcctgtggaactgtgaacagggtgacaatactgacagacaaatttggtcaaccaaaagggtttgcttatgtagag

SEQ ID NO: 6044 - DNA, 385 bp, Glycine max
cttcctcagaaacacatcctaatggcagagcgcggaggtggcgatcgtggcggcgaccgtggcggtttcggacgtggattcggcgggcgaggacgcggaggtgacaggggccgaggccggcgccgaggcccccgccgcgaggaagaggagaagtgggtcccagtgaccaaactgggccgcctggtgaaggagggaagaatccgaagccttgaacagatctacctccactcgctcccgatcaaggagcaccagatcatcgacacgctcgtgggtcccaccctcaaggacgaggtgatgaagatcacgccggtccagaagcagacccgggccgggcagaggacccggttcaaggcctttcgcgtcgtcggagacaacaacgggcacg

SEQ ID NO: 6045 - DNA, 441 bp, Glycine max
gcgatcgtggcggcgaccgtggcggtttcggacgtggattcggcgggcgaggacgcggaggtgacaggggccgaggccggcgccgaggcccccgccgcgaggaagaggagaagtgggtcccagtgaccaaactgggccgcctggtgaaggagggaagaatccgaagccttgaacagatctacctccactcgctcccgatcaaggagcaccagatcatcgacacgctcgtgggtcccaccctcaaggacgaggtgatgaagatcacgccggtccagaagcagacccgggccgggcagaggacccggttcaaggccttcgtcgtcgtcggagacaacaacggccacgtcgggctgggcgtgaagtgcagcaaggaagtggcgacagctattcgtggcgcgattattctggcgaagctgtctgttatccccgtgaggagggggt

SEQ ID NO: 6046 - DNA, 454 bp, Glycine max
cccacgcgtccggtctgttatccccgtgaggagggggtactgggggaacaagagcggggggccccacaccgtcccgtgcaaggttacggggaagtgcggctccgttaccgttaggatggttcccgcgccgagaggttcggggatcgtggcggctagggttcccaagaaggtgctgcagttcgcggggattgatgatgttttcacctcctccagaggatccaccaagaccctcggcaacttcgttaaggctacttttgattgcttgatgaaaacctatggattcctgacaccagaattctggaaggagactcgcttctccaaatctccattccaagagtacacagatctactggcaaaaccaacaggaaagactctaatcttggaggaggaaagggtggatgcttgatttgctagttttgctttatggatgttttaagaactttattactttaca

SEQ ID NO: 6047 - DNA, 435 bp, Glycine max
cccacgcgtccgccgcagtctcttctctctcagaaaccctaatggcagagcgcgggggtggcgaacgtggcggcgaccgtggcggtttcggacgcggcttcggcgggcgagggcgcggaggcgacaggggccgcggccggcgtagaggtccccgccgcgaggaggaggagaagtgggtcccggtgactaagctgggacgcctggtgaaggaaggaagaatccgaagcctggagcagatctacctccactcgctgcccatcaaagagcaccagatcatcgacacgctggtgggccccaccctgaatgacgaggtgatgaagatcacgccggttcagaagcatacccgggccgggcagagaacccgttttaaggccttcgtggtcgtcggcgacaacaacggtcacgtgggtctaggcgtgaagtgcagcaaggaag

SEQ ID NO: 6048 - DNA, 428 bp, Glycine max
cgagtatggtggaactgtggggattgtaacactcgaagatgttgttgaggaaattgttggtgaaatatttgatgaaaatgactcaaaggaggagatacagaaaaaaactggttacattgtaatgcgagctgagggtgtttttgatgtggatgcaaacacatccattgatcagctctctgaagatttgaacatcaagatgccagagggtcaccaatatgagacggtatcaggctttgtgtgtgaagcatttggatacattccaatgacaggtgagtgcatcaaagtagttcttgaaagggaagatgaagatgataacaatgagtccaatgctgaccagcaggatcagaaggagaagaaccagagtttcaaacttgagatactaactggaaatgccagaaagaaaatggaagagtgatgcaaactcagac

SEQ ID NO: 6049 - DNA, 315 bp, Glycine max
caaaaccgttggccataattggggcaatggcccttgccactgaaccaccaacggcaaggtttggtaaacctggtgtcattgcaccaacaggattaataacggttgcaattttccttcccattgaaatcactcaaaaaagcatagctgtccataacccaacaaaagtggctcggtttgtggtcaggccattggcattggctttccctggtgttgtatcctgtaggaagaattgttacttacctttcaatggggatgctgaaattgcttggcctaaaaggaagaagtgagccatatgtaactgaagatgagctaaaa

SEQ ID NO: 6050 - DNA, 447 bp, Glycine max
  modified_base (384)..(384): a, c, g, t, unknown, or other
cccacgcgtccggaaaaaaagaaaaatgcaggcagcaaagaaagccatagagacctttaaggggaccgcagccaacattggcgcctctgccaagtctggcttggagaaaaccaaggccactatccaagagaagaatgagaagatgaatgcagaagatcaaactcaaatggatatggctaccaagaggaaagaagagaagatcaaccaggctgagatggagaagcagcaggcccgtaagtactacgccgctgcaaaacaatacgccatggctgagcacatggcaaagggcaaccacgacaccgccgggcctagaatcgagactgccacacacatcaccagtgggcccgggactgacaatgctatgtactctaacactgggcctgngactgagactgccacgtacaccactagtgggcttgggcatgacaatgctatacccaccagcac

SEQ ID NO: 6051 - DNA, 435 bp, Glycine max
  modified_base (358)..(358): a, c, g, t, unknown, or other
accacgcgtccgatcaggtcaatcttgaatatcttggaagggttgtattcaacaatgagggcctactctatcctgacagtgtggttgggactgattcacataccactatgatagatgggcttggtgttgctggatggggagttggaggtattgaagctgaggcagcaatgcttggtcagcctttgagcatggttttgcccggtgttgttgggttcaagttatctggaaaactacgcaatggtgttacagcaacagacttagttctaactgtgactcaaattctcagaaagcatggtgttgtggggaaatttgttgaattttatggtgatggtatgggtgaattatctttggctgacanggccactattgccaatatgtctcctgaatatggtgccaccatgggcttcctccctgtggatcatgttacactacaag

SEQ ID NO: 6052 - DNA, 390 bp, Glycine max
atccgagaattgacaggttaccatattccatcagaattctccttgaatctgccattcgtaattgtgacaattttcaagtcaaaaaagaagatgttgagaagattctcgactgggaaaataattctacgaagcaagttgaaattcctttcaagcccgctcgtgttctcttgcaggattttactggagtcccggctgttgttgacctggcctgcatgcgtgatgctatgaataagcttggcagcgattcaaataagatcaaccctctggttcctgtggatcttgtcattgatcattcagttcaagttgacgttacaaggtcagataatgcaatgcaagccaatatggagcttgaatttcagagaaacaaggagagggttgctttttttaaat

SEQ ID NO: 6053 - DNA, 317 bp, Glycine max
gacaaatttgcttgctactgtcttgatcttcctaattgtgatatacttccaaggtttccgtgtggtcttgcctgtaagatcaaagaatgctcgtggacagcagggttcatatccaatcaaattgttttatacctccaacatgcccatcattcttcagtctgcccttgtttccaatctctacttcatctcccagctgctccaccgtaagtacagcggaaacttcttcgtaaatttattgggaaaatggaaagaatccgaatatggaagtggtcagtctgttcctgttggtggcattgcatactatatcactgcaccat

SEQ ID NO: 6054 - DNA, 435 bp, Glycine max
ggcaaatggaaggagtctgaatatggaggtggtcagtctgttcctgttggtggtattgcatactacatcactgcaccttccagcttagctgatatggcagccaatcctttccatgcattattctaccttgtgtttatgttgtcagcctgtgccttgttctctaaaacttggattgaagtctctggttcatctgctagagatgttgcaaagcagctgaaggaacaacaaatggtaatgcctggacatcgggaatcaaacttgcagaaagaactgaaccgatacattcccaccgcggcagcatttggaggcatatgtatcggtgcattgactgtgttggcagatttcatgggggcaattggttcagggacaggaatattgcttgcagtaacaatcatctatcagtacttcgaaacatttgagaaggagagagccagc

SEQ ID NO: 6055 - DNA, 428 bp, Glycine max
gcctggcctgtttcaaagcctcactcatccagattgaacaatgatcacgtgcttgaccaagttgacaaggagagcaaagttgagactgctacaagttatcggttgtttggaattgatcttattgatcattctaggaactctccttcagtagagaaggcatctgcacaagcaggaaatgcacccaaagttactactgaaggctgcaccagtaccttgacccgaactgatgctggccatctgtcggatgtaccaatggcttcttccaaggagaggaaacaagaacagcagcaagtatcaccaaaagagactcagagcaagcaaatttgtagaagtcgaaccaaggttcaaatgcaaggtgttgcagtgggtcgtgctgtcgatttgaccatgttggatggatatgatcaacttataaatgaattggagga

SEQ ID NO: 6056 - DNA, 291 bp, Glycine max
agagagtcttcccgtctcttcctcttcacttcttataccgtcgcccccaaacgacgccgttttctgttctcttatgtaaacgccgttcgagaacaaagcaaaaaaagaaaagaaaatcagttattgccgttgttgttttgtttccggttcggtttatttcaatggatcgggcggcgttgacggttggaccgggcatggacatgccgatcatgcacgacagcgaccgttacgatctggtacgcgacatcgggtccggaaatttcggcgtggccaggctgatgcaggataaac

SEQ ID NO: 6057 - DNA, 424 bp, Glycine max
  modified_base (38)..(38): a, c, g, t, unknown, or other
  modified_base (396)..(396): a, c, g, t, unknown, or other
  modified_base (416)..(416): a, c, g, t, unknown, or other
gtcttaccgtctcttcctcttcacttcttataccgtcngccccaaacgacgccgttttctgttctcttatgtaaacgccgttcgagaacaaaccaaataaagaaaagaaaatcagttattgccgttgttgttttgtttccggttcggtttatttcaatgggatcgggcggcgttgacggttggaccgggcatggacatgccgatcatgcacgacagcgaccgttacgatctggtacgcgacatcgggtccggaaatttcggcgtggcgaggctgatgcaggataaacaaaccaaggaactggtcgccgtcaagtacatcgaaaggggtgataagattgatgaaaatgtaaagagggaaatcattaatcacaagtctctgaggcatcctaacattgntagatttaaagaggtaattntaacacct

SEQ ID NO: 6058 - DNA, 453 bp, Glycine max
gtctgttcctcttcacttcttataccgttgcccccaaacgacgccgttttctgttctggtatgtaaacgccgttcgagaacaaaccaaaaaaagaaaagaaaatcagttattgccgttgttgttttgtttccggttcggtttatttcaatggatcgggcggcgttgactgttggaccgggcatggacatgccgatcatgcacgacagcgaccgttacgatctggtacgcgacatctggtccggaaatttcggcgtgtctaggctgatgcaggatatacaaaccaaggaactggtcgccgtcaagtacatctaaaggggtgataagattgatgaaaatgtaaagagggaaatcattaatcacaggtctctgaagcatcctaacattgttagatttaaagaggtaattttaacacctactcatcttgctattgtaatggaatatgcatctggggg

SEQ ID NO: 6059 - DNA, 427 bp, Glycine max
  modified_base (317)..(317): a, c, g, t, unknown, or other
aaagatttggagattacaaagagagggtgaatgaatggaaggacgccttgctagaagtctacggttggactgctatggaataccaaaatgggtccggatacgaatatgaattcatccgagagattgttgatatagccaagaggcgccagcgccgccgatatgatgtttttctgagttttaggggaagagatacccgccactctttcacaggttttctctataaagccttttgccgggagggattctacgtcttcatggatgatgagggattggagggtgggaatcaaatttcacctacgattatgggagcaattganagatcaaggctttcaattgtagtgttctctgaaaactatgggttattcacgtggtgtcttgatgaactttccaagatcattgagtgcgtgaaaaccaggaatcaaatggt

SEQ ID NO: 6060 - DNA, 456 bp, Glycine max
cgggccgaccgacgcgtgcgatttacagcggcccacatatgttcctgatactggtttgctttgtgatctcctttggtctgggccgggcacagatgttcaaggatggggaatgaatgacagaggagtttcatttacatttggtgctgataaggtctcagagtttcttcagaaacatgatcttgatcttatttgtcgtgctcatcaagttgtggaagatggatatgagttctttgctaatcgacaacttgtaacaatattttcagcacctaattattgtggggaatttgacaatgctggtgctatgatgagtgtcgatgagacactaatgtgctctttccaaatattaaagccagctgataaaaaagcaaagctcaattttggaagtacaaccactgctaagcctggaaactccccagctggtgtaaagtgctttctgggtgcgaaagtatgaaatta

SEQ ID NO: 6061 - DNA, 424 bp, Glycine max
  modified_base (382)..(382): a, c, g, t, unknown, or other
cccacgcgtccgggaagaatttgatgaatcagacaagtcacatcataatgaagctccagaatatagacacctaattgccattcatgctgggaagcctaaaggtggattagtggaatgcctcaaagtggatcctgaaaaagtgagacgtctaagtttaagtgatcaacagcttgaaaaggctgctataaattatggacaacaaattgtcaggtttactcagcggaatatactgagggtgtatccaaaaggtactcgcattgactcatcaaattataacccattaattgggtggatgcatggagctcagatggttgcatttaatatgcaggggtatgggagatctctttggttgatgcatggaatgttcagagccaatggaggntgcggttatgttaaaaaaccaaattttctattggagactggt

SEQ ID NO: 6062 - DNA, 263 bp, Glycine max
ctgggagcttagaagtggcattcgagcaattccactgcatagccaaaagggagataaatacaagactgtaaagcttctcatgcgctttgagtttattaataattgattctgtgcaatgtgcatccttctgctccccattattattattattattatgtacagtcattaagatgtgttagtagcaagagtttgtatgtagtagctggatgatatcgtgaattatgtgccccgttaaatgatgtaagaaacaaaatgtgttgtgt

SEQ ID NO: 6063 - DNA, 365 bp, Glycine max
agcaattctaacatacttttctttcttttttttcccctctttaaaagtctggcttttggtcctttgattcccaacttcacttgtcacatatcatattatgaagctcacaggtttcctgcaagcggtgactcttgctttggtgttagccaccgtctctgcatcagatcctgatcctcttcaagacctctgtgtcgcagaccttgcttcagcggttaaagtgaatggattcacatgcaaagatgctgccaaggtaaatgcgagtgatttcttctcagatatactagccaaaccatgtgccacaaacaacacctatggctccctagtgactggagccaacgttcagaatatcccaggactcaacaccc

SEQ ID NO: 6064 - DNA, 422 bp, Glycine max
caattctaacatacttttctttcttttttttcccctctttaaaagtctggcttttggtcctttgattcccaacttcacttgtcacatatcatattatgaagctcacaggtttcctgcaagcggtgactcttgctttggtgttagccaccgtctctgcatcagatcctgatcctcttcaagacctctgtgtcgcagaccttgcttcagcggttaaagtgaatggattcacatgcaaagatgctgccaaggtaaatgcgagtgatttcttctcagacatactagccaaaccaggtgccacaaacaacacctatggctccctagtgactggagccaacgttcagaaaatcccaggactcaacacccttggcgtgtctatatcacgcattgactatgccccaggtggcatcaacccaccttacacg

SEQ ID NO: 6065 - DNA, 385 bp, Glycine max
agcccacgcgtccggaagaggttcttgaaaaagcactattgatgattcaaaattcccagaagaattacctctataaatgtgaccagttaaagtctattcgccaagacctaactgttcaacgaatacgcaatcaattaacagtcaaggtgtatgaaacacatgcccgattggcactggaatttggggacctgtttgagtataatcagtgccaatctcagttgcaaactctttatgccgaaggcattgaggggtctgatatggaatttgccgcttacaacttgctttgtgtcataatgcattcaaataataacagagatcttgtaaccaccatgggcaaggttatctcacgaagcaaagaaggatgaagctgtaaaacatgcccttg

SEQ ID NO: 6066 - DNA, 365 bp, Glycine max
  modified_base (323)..(323): a, c, g, t, unknown, or other
tcgccgatctcggttggtgtagaactcttcatggtcatgccggaaaggtgtactcattggattggacttcagaaaagaatcgaattgttagtgcattccaagatgggagattgatagtgtggaatgctctaacaagccagaaaacacatgccataaagcttccctgtgcgtgggtcatgacctgtgctttcttcccaaccggtcaatctgttgcatgtgggggccttgacagtgtttgctccctttttaatcttaattcccccactgacagggatgggaatctagccgtttcacggatgcttagtggacattaaagttatgtntcctcttgtcagtatgttccagatgaagatactcacttgatt

SEQ ID NO: 6067 - DNA, 438 bp, Glycine max
ggccttcacgccggaagaggacgtgaccataattagggcccatgctcggttcggtgacaagtgggccaccatagcccggctcctctcgggccgcaccgataacgccatcaagaatcactggaactcaacgcttaaacgcaagtgcgcgtccttcatgaccgccgatgaagccgccgccggcggcttcagcccgaggccgctcaagcgatcgttcagcgccggcacggcggtgcctcctccaggaagcccctcaggatccgacgtgagcgagtccagcgctgctcccggcgtggtctctgtctctgtctctccttcacaagtgtttcgccccgtgccggttcggccggttgtcgaaacggcgtcgttgcaagacgacgccgatgccgactccgaggatgctggacctactacctcgctgtcgctggctctttccggggt

SEQ ID NO: 6068 - DNA, 446 bp, Glycine max
gtcatcagctagacgactgggtcttgtgtaggatctacaagaagaagaacattggaaagtcaatggaggcaaaagaggaatacccaatagcccaaatcaatcttacaccagcaaacaatgacagtgaacaagaaatggtgaaatttccaaggactagttcccttactcatcttttggaaatggattacttgggtccaatatcacatatattatctgatgccacatacaattcaacctttgattttcaaattaacactgccaatggtggaatagacccgttcgtaaaaccacagccggttgaaatcccttatgcagcagattcagggaagtaccaagtgaaacaaaatagcaccatcaaccccaccatatttgtgaaccaagtgtattatcaaagaggataatgccaaaaaaaatattaaaaaaaatgaaattggattatttggaca

SEQ ID NO: 6069 - DNA, 401 bp, Glycine max
cccacgcgtccggatacctgctgcaaaaaccatgaatgccattgacgagggttagagaattgcaagggcacaaacacttattgccctatgtagtacaggatctggctactggttcacagtggctctcattgacaagattggaagatttgctatccaattgatgggattcttgttcatgactgccttcatgtttgctattgccattccttatgaccactggactcatatagataaccggataggattcgtggtgagctattcattgaccttcttctttgcaaatttcgcacctaatgccaccacattcgtcgtgccggcagagattttcccagctagattccgatctacttgccatggaatctcatcagcattcgagaagctcggagctattgctggtgcat

SEQ ID NO: 6070 - DNA, 371 bp, Glycine max
aaaaaacaaacaaatacataatagcaaaaaaccaaaaaagccataaacgaagaaggcagggatacaacaacacaatcacttctatgccctatgtagtacagcatctggctactggttcacagtggctctcattgacaagattggaagatttgctatccaattgatgtgattctagttcatgactgccttcatgtatgctcttgccattccttatcaccactggactcatatggataaccggataggattcgtggtgatttattcgttgaccttcttctttgcaaatttcgcacctaatgccaccacattcgtcgtgccggcagagatttttccagctagattccgatctacttgccatggaatctcatcag

SEQ ID NO: 6071 - DNA, 450 bp, Glycine max
ggaggtgtctgcgagcgttaacgcaaaaaaacgacaccgtttctcttccgaagcgcatggtctctccgctcactcaccgtgcctccgtttcccaacgccaacgcttcttcccccgttttcaccgtacgcgcctctgtcttcgcgcaatggccccacctccgctatttctcttccgagaaaaaagacgaccacagcgacgaagacgatgatggcgatgaggattacgatgatgaagaagaggattatgttgatgacgacgacgatgatgacgtccctgtgtcgagagggaaaaaagtgtacactgcggaggagaaggaagcggaagccgcggcaattgggtacagagtagtgggtccccttcaaaaggacgaagatagcgtttttaagccttacgagcctgtttttgctgttgttcagattggttcgcaccagtttaaagtaagcaaccga

SEQ ID NO: 6072 - DNA, 430 bp, Glycine max
cccacgcgtccgcccacgcgtccggtctgatcctacggagaatgacagtgttgaagggctgcggccaaatgctaggggtccaggattagtcacttttgggcctgatcgagtaatggaattttgcaacaacaatgatcttcagctgattgttcgtgcacatgaatgtgtgatggatggctttgagcgttttgcccaggggcatttgatcacacttttctctgctacaaactactgtggtacggcaaataatgctggggcaatattagttttgggtagagatctcgttgtggttcctaaattgattcatccattaccgcctgcaatttcttcaccagaaacgtcaccggatcgtcatattgaggatacatggatgcaggagttgaatgctaacagaccaccaacaccaactagaggccgtcctcaagtaaca

SEQ ID NO: 6073 - DNA, 360 bp, Glycine max
  modified_base (331)..(331): a, c, g, t, unknown, or other
cccacgcgtccgataccacctattcctttgtctcagccctgctttgttagttgaaaatggaaaattcctcctttctgctaagaggacaaggagaacaacttacactgagtacgttatttccatggatgctgacaacatctctagatcaagtaacacttacattggaaagctgagatcaaattttcttggtacaaagttcattatatacgatacacagcctccatactcttctgcccatatatgccctcctgggactgggaagacgagccgcagattttattccaaaaaggtctcgcctaaggtcccatctgggagttacaacatagctcangtaacatatgaattaaatgtgcttgggac

SEQ ID NO: 6074 - DNA, 385 bp, Glycine max
  modified_base (339)..(339): a, c, g, t, unknown, or other
attttcttctatctcatcctttcttttagttttatttttatttttttatcttgggtaaaaaaaatcatgggtgttttcacttctgaaagcgaacacgtttcccccgtctctgctgcaaaattatacaaagctattgtcctagatgccagcaatgtcttcccaaaagcattgccaaatttcattaagagcgtagaaaccattgaaggagatggagggccaggaaccattaagaagcttactcttgctgaaggtttaggttatgtgaagcaccacgtagatgcaattgacacagaaaactatgtgtacaactatagtgtgattgaaggcagtgcattgtcngagccattggagaagatatgttatgagtacaaactggtggcaaccc

SEQ ID NO: 6075 - DNA, 462 bp, Glycine max
cccacgcgtccgaaaatattttcttctatctcatcctttcttttagttttatttggagttgtttatcttgggtaaaaaaaatcatgggtgttttcacttctgaaagcgaacacgtttcccccgtctctgctgcaaaattatacaaagctattgtcctagatgccagcaatgtcttcccaaaagcattgccaaatttcattaagagcgtagaaaccattgaaggagatggagggccaggaaccattaagaagcttactcttgctgaaggtttaggttatgtgaagcaccacgtagatgcaattgacacagaaaactatgtgtacaactatagtgtgattgaaagcagtgcattgtccgagccattggagaagatatgttatgagtacaaactggtggcaaccccaaatggaagatccattgtgaagtccacaagcaaatactatacccaaggtgatgagcaac

SEQ ID NO: 6076 - DNA, 416 bp, Glycine max
ccttgttcctccaaaattctatgtggtgttgcagatggtgatgattactgcttgggtgagtgaccttttcactggtatgggtggttgttttggatgctgtatgaaacccacaccaattattgctgtggatgaacctgcaaagggactaagaattcaggggcagacagtaagaaaaccacacatatcagatggtttctggagttcaagcacttgtgatctggataacagcaacattcaatctcagagaagtatctcgtctgtcagtacattaaatcaaattctctatcatagcggtggaacttctaccccaggcgccaatcctgaatttgtaaacccaggtcttcttctttggaatgagagcaggcttcagtgggttggaagtggcaaatctaggaagcataaccaacaaaaaagag

SEQ ID NO: 6077 - DNA, 388 bp, Glycine max
aacaaattgaagcactatcagaagaagaacgtggtcaaattatgccgactttgtcagagagattaaagctttcaaagttgcagccaatttccacagatggcatggacatgggtacagaaggtggtggtgctgctggactgaaggttgaggagaaaaaggcagagaaaacagcttttgatgtgaagttggagaaatttgatgctgctgcaaagatcaaggtgattaaggaggtaagagcatttaccaacctaggattgaaagaggccaaagatcttgttgaaaaggttccagttgtgctaaaacaaggagtcacaaaagaggaggcaaatgaaataatagaaaaaataaaagctgctggaggagttgcagtcatggagtagaattttga

SEQ ID NO: 6078 - DNA, 438 bp, Glycine max
attgtttccttttgagacccgacgacagtacttttattctaccgcatttgggttatctcgtgcactgtatcgacttcaacagcagcaaggtgctgatggccatggttcaacaactgagagggaggtgagagttgggagattgcagcgccaaaaggttcgtgtctctcgaaatcgtgtcctggattctgctgcaaaagttatggagatgtattctagccaaaaagctgtacttgaagtagaatattttggtgaagttggcactggtctgggtcccacccttgagttttatacaattctaagtcatgatttgcaaaaagttggactgcaaatgtggagattctagtcttcagacaaacatcaaatgggaatagatggagatgaaaagaacaagaacagtgcaagctccgggcctaatttggctggagatggggaacttgt

SEQ ID NO: 6079 - DNA, 440 bp, Glycine max
atttttcttctttcggactcagcatcgtccccctccactggcgcaaccccaagaccattctcccgatggccctctccattaacaaccatccgcctcgacgactccgtctcctcctcatccgcgtcactctcctcctcatcatcagcatcgacaacgccatcagcaccctcactgtgcccattgttaatcccaaagggccgatcctcctcagcgccgtcaatctcgccgctcccagggtcatcctcttcctcctcctcctcctcatcctcctcctcgtcgtcactctcgggcctctcgttctcctccgcgtccatcttgtccaagtacttcaacgacttgatcaacccgaaaaccctatatcgatagtccttcacgcgcgtcacggggcactcgtacagattcagcgacaccagcttcaactgcgcgagcggtgcgagatc

SEQ ID NO: 6080 - DNA, 416 bp, Glycine max
ctctaagaaaccaaaaagatgaagcaaatcgacgacggcgatgacgagcagcgatccctctcccctctgccggaacaggtcctggagaacgtcctggaaagcgtgctccacttcctcacctcccgtcgcgaccgcaacgccgcctcactggtctgcaagtcctggtaccgcgccgaggccctcacccgccccgacctcttcatcggcaactgctacgccgtttccccccggcgcgccaccgcccgcttcccccgcgtccggtccctgaccatcaagggcaagccccgcttcgccgacttcgacctcatgcccctgaactggggggcccacttcaccccctgggccaccgcactctcccaatcttacccttccttcctcaacaaactccaccttaaacgcatgtccctcaccgacca

SEQ ID NO: 6081 - DNA, 384 bp, Glycine max
aggaagaacaagttcaaaacctcgtccaatcaacggtcgacgcttacggacaagtggacataatgttcagcaacgctgggatccttagtccctcccaacagacggtgcccgaactggacatgtcccaactagacaggctgttcgcggtcaacgtacggggaatggcggcgtgcgtgaaacacgcggcgcgtgcgatgttggaggggcgcgtgaggggaagcatagtgtgcacggcgagcgtgggtgggagccacggtgggccaaatgcgacggactacataatgtcgaagcacgcggtgttggggttgatgcgttcggcgagcgtgcagcttgcggaacacgggataagagtgaactgcgtctcacccaatgggttggcaacgc

SEQ ID NO: 6082 - DNA, 412 bp, Glycine max
agccgcttaagttaagactataacaacagccaagcgcattggcctatatatatcaacacaaaaactctttgattcagaaacatacatatatattcacacaaatatccatttatatatacatatatatagttctatatggcaatgacaacggtggtgtttgtcttgtgcatctttgtagtgttgaatgcaagtgcctctgatgccactcgcttattgctgaacaaaactgcaacaggtaacgtgtccagagagaagattgagagatacttacttgaaaatggactcggccagacaccccccatgggatggaatagctggaaccactttggctgtgatattaatgaaagtttaattcgagaaacagctgatgcattggtgtcatcgggccttgctgccttgggatacaaataca

SEQ ID NO: 6083 - DNA, 386 bp, Glycine max
aatatcaatttacatatacatatatatagttctatatggcaatgacaacggtggtgtttgtcttgggcatctttgtagtgttgaatgcaagtgcctctgatgccacgcgcttattgctgaataaaactgcaataggtaacgtgtccagagagaacattgagagatacttacttgaaaatggactcggtcagacaccccccatgggatggaatatctggaaccacgttggctgtgatattaatgaaagtttaattcgagaaacagctgatgcattggtgtcatcaggccttgctgctttgggatacatatacattaatttagatgattgttgggcctaacttaatcgagaccatcatggaaatatggttcccaaggcttcaacattt

SEQ ID NO: 6084 - DNA, 399 bp, Glycine max
cagccaagcgcattggcctatatatatcaacacaaaaactctttgattcagaggcagacatatatattcacacgaatatccatttatatatacatatatatagttctatatggcaatgacaacggtggtgtttgtcttgtgcatctttgtagtgttgaatgcaagtgcctctgatgccactcgcttattgctgaacaaaactgcaacaggtaacgtgtccagagagaagattgagagatacttacttgaaaatggactcggccagacaccccccatgggatggaatagctggaaccactttggctgtgatattaatgaaagtttaattcgagaaacagctgatgcattggtgtcatcgggccttgctgctttgggatactaatacatttaattaaatga

SEQ ID NO: 6085 - DNA, 289 bp, Glycine max
attcacacaaatatccatttatatatacatatatatagttctatatggcaatgacaacggtggtgtttgtcttgtgcatctttgtagtgttgaatgcaagtgcctctgatgccactcgcttattgctgaacaaaactgcaacaggtaacgtgtccagagagaagattgagagatacttacttgaaaatggactcggccagacaccccccatgggatggaatagctggaaccactttggctgtgatattaatgaaagtttaattcgagaaacagctgatgcattggtgtc

SEQ ID NO: 6086 - DNA, 423 bp, Glycine max
gccgcttaagttaagactataacaacagccaagcgcattggcctatatatatcaacacaaaaactctttgattcagaaacatacatatatattcacacaaatatccatttatatatacatatatatagttctatatggcaatgacaacggtggtgtttgtcttgtgcatctttgtagtgttgaatgcaagtgcctctgatgccactcgcttattgctgaacaaaactgcaacaggtaacgtgtccagagagaagattgagagatacttacttgaaaatggactcggccagacaccccccatgggatggaatagctggaaccactttggctgtgatattaatgaaagtttaattcgagaaacagctgatgcattggtgtcatcgggccttgctgctttgggatacaaatacattaatttagatg

SEQ ID NO: 6087 - DNA, 449 bp, Glycine max
  modified_base (326)..(326): a, c, g, t, unknown, or other
tgccgcttaagttaagactataacaacagccaagcgcattggcctatatatatcaacgcaaaggctctttgattcagaaacatacatatatattcacacaaatatccatttatatatacatatatatagttctatatggcaatgacaacggtggtgtttgtcttgtgcatctttgtagtgttgaatgcaagtgcctctgatgccactcgcttattgctgaacaaaactgcaacaggtaacgtgtccagagagaagattgagagatacttacttgaaaatggactcggccagacaccccccatgggatggaatagctgggaccactntggctgtgatattaatgaaagtttaattcgagaaacagctgatgcattggtgtcatcgggccttggctgttttgggatacaaatacataatattagatgattggtgggccgaacttaatcgag

SEQ ID NO: 6088 - DNA, 405 bp, Glycine max
cccacgcgtccgtgcattggtgtcatcgggccttgctgctttgggatacaaatacattaatttagatgattgttgggccgaacttaatcgagaccatcagggaaatatggttcccaaggcttcaacatttccttcaagaattaaagctctggctcattatgttcatgggaaaagtttgaagttggggatatattcagatgcaggaaatcaaacttgcagtaaacgtatgcctggatcactaggacacgaagaacaagatgcaaaaacatttgcttcttggggaagtgactacttgaagtatgataattgtgaaaataatggtatattagccacagaaaggtatccaccaatgagtgaagctttgttaaaaactggaaggccaatcttcttctctatgtgtgaatg

SEQ ID NO: 6089 - DNA, 375 bp, Glycine max
  modified_base (115)..(115): a, c, g, t, unknown, or other
cccacgcgtccgcccacgcgttcggactataacaaccgccaaacgcattggcctatgtatatcaacaccaaaactctttgaatcaaaaacatacttatttattcacacaaatatncatttatatatacatatatatagttctatatggcaatgacaacggtggtgtttgtcttgtgcatctttgtagtgttgaatgcaagtgcctctgatgccactcgcttattgctgaacaaaactgcaacaggtaacgtgtccagagagaagattgagagatacttacttgaaaatggactcggccagacaccccccatgggatggaatagctggaaccactttggctgtgatattaatgaaagtttaattcgagaaacagct

SEQ ID NO: 6090 - DNA, 407 bp, Glycine max
caacagccaagcgcattggcctatatatatcaacacaaaaactctttgattcagaaacatacgtatgtattcacacaaatatccatttatatatacatatatatagttctatatggcaatgacaacggtggtgtttgtcttgggcatctttgtagtgttgaatgcaagtgcctctgatgccactcgcttattggctgacaaaaactgcacagggaaacgtgtccaaagagaaaatgggaagatactaactggaaaatggactcggccaaacacccccaatggaatggaatagctggaacaactttggttggaatataaatgaaggttaaattcaggaaacagttgtggcatggtggtaatcggccttggtggttttggattccaattccttaatttagatgaatggt

SEQ ID NO: 6091 - DNA, 366 bp, Glycine max
atttgcttcttggggagttgactacttgaagtatgataattgtgaaaataatggtgtagtagccacagaaaggtatccaccaatgagtgaagctttgttaaaaactggaaggccaatcttcttctctatgtgtgaatggggatggcaagacccagcaacttgggccaaaactgtgggaaatagttggagaacaacaggggatattgaagataactggaatagtatgacttccatagcagatgcaaatgacagatgggcatcttatgctggaccgggaggatggaatgatcctgatatgctggaagttggaaatggaaggatgaccacagaagaatatcgtgcccatttcagcatatgggctttagc

SEQ ID NO: 6092 - DNA, 340 bp, Glycine max
gccgaacttaatcgagaccatcagggaaatatggttcccaaggcttcaacatttccttcaggaattaaggctctggctcattatgttcatgggaaaggtttgaagttggggatatattcagatgcaggaaatcaaacttgcagtaaacgtatgcctggatcactaggacacgaagaacaagatgcaaaaacatttgcttcttggggagttgactacttgaagtatgataattgtgaaaataatggtatattagccacagaaaggtatccaccaatgagtgaagctttgttaaaaactggaaggccaatcttcttctctatgtgtgaatggggatggcaag

SEQ ID NO: 6093 - DNA, 396 bp, Glycine max
atgacttccatagcagatgcaaatgacagatgggcatcttatgctggaccgggaggatggaatgatcctgatatgctggaagttggaaatggagggatgaccacagaagaatatcgtgcccatttcagcatatgggctttagctaaggctcctttattggttggttgtgatattcaagcaatggataataccacatatgaactgataagcaaccgagaagttgttgcagtaaatcaagacaaacttggaatacagggaaagaaggtgaaaaacaataatggtttggaggtgtggacaggtcctcttcgtggtaacaaggtagcagtgatcttatggaacagaagttcatcaaatgcatcagtgactggatgttggtctgacattggcttggaacca

SEQ ID NO: 6094 - DNA, 253 bp, Glycine max
gccaatcttcttctctaggagtgggtggtgttggcaagacgcagcaacttgtgccaaaactgtgggaaatagtatgagaacaacatgggatattgaagataactggtatagtatgacttccatagcagatgcaaatgacagatggtcattatatgctgtaccgggaggatggaatgaacctgatatgctgtaagttgtaaatggatggatgaccacataataatatcgtgcccattatatcatatgggcttta

SEQ ID NO: 6095 - DNA, 440 bp, Glycine max
  modified_base (428)..(428): a, c, g, t, unknown, or other
cggacgcgtgggtttcttcattatttcagctgatgcattggtgtcatcgggccttgctgctttgggatacaaatacattaatttagatgattgttgggccgaacttaatcgagaccatcagggaaatatggttcccaaggcttcaacatttccttcaggaattaaggctctggctcattatgttcatgggaaaggtttgaagttggggatatattcagatgcaggaaatcaaacttgcagtaaacgtatgcctggatcactaggacacgaagaacaagatgcaaaaacatttgcttcttggggagttgactacttgaagtatgataattgtgaaaataatggtatattagccacagaaaggtatccaccaatgagtgaagctttgttaaaaactggaaggccaatcttcttctctatgtgtgaatggngatggcaagacc

SEQ ID NO: 6096 - DNA, 377 bp, Glycine max
catcggtggtgtttgtcttgtgcatctttgtagtgttgaatgcaagtgcctctgatgccagtcgcgtattgctgaacaaaactgctacaggtaacgtgtccagagagaagattgagagatacttacttgaaaatggactctgccagacaccccccatgggatggaatagctggaaccactttggctgtgatattaatgaaagtttaattcgagaaacagctgatgcattggtgtcatcgggccttgctgctttgggatacaaatacattaatttagatgattgttgtgccgaacttaatcgagaccatcagggaaatatggttcccaaggcttcaacatttccttcatgaattaaggctctggctcattatgttcat

SEQ ID NO: 6097 - DNA, 280 bp, Glycine max
gactctaggattgctctggttggaccaatggagctgggaagagtacgttactgaagctaatgactggtgatttggaacctctagatggcatggttcgacgccacaatcaccttcggattgcacaatttcaccagcacttggctgagaagctagacttggaaatgtctgccctccagtatatgataaaagaataccctggaaacgaagaggagaggatgagagcagccattgggaaatttggactgtctggcaaagcgcaggtcatgcctatgaagaattt

SEQ ID NO: 6098 - DNA, 432 bp, Glycine max
gaaactttttcacccccttgataccgcttcaattcaccaatggcaagtcgaggaaaaaccgagggatctggcacaaccaaaaagggcatctcccgaagcaacaaagctggtctccaattcccagttggtcgtattgctcgatacctcaagattggcaagtatgctgaccgtatcggttctggcgctcccgtgtatctcgcctctgttcttgaatatcttgctgctgaggttttggagttagcggggaatgccgcaatggacaacaagaagactcgtattatgcctcgccatatccaattggctgttaggaatgatgaaaagttgagcatgcttctcggagatgtgactatcgccagtggtggtgtgacacctaacattcacaacatgttgctgcctaagaaggttgggacctcgaccttaacctttatgggt

SEQ ID NO: 6099 - DNA, 212 bp, Glycine max
ccacgaatccactttgtcattgaagctttttcacccccttgataccgcttcaattcaccaatggcaagtcgaggaaaaacccagggatctggcacaaccaaaaagggcatctcccgaagcaacaaagctggtctccaattcccagttggtcgtattgctcgatacctcaagattggcaagtatgctgaccgtatcggttctggcgctcccgt

SEQ ID NO: 6100 - DNA, 407 bp, Glycine max
ctttttcacccccttgataccgcttcaattcaccaatggcaagtcgaggaaaaacccagggatctggcacaaccaaaaagggcatctcccgaagcaacaaagctggtctccaattcccagttggtcgtattgctcgatacctcaagattggcaagtatgctgaccgtatcggttctggcgctcccgtgtatctcgcctctgttcttgaatatcttgctgctgaggttttggagttagcggggaatgccgcaatggacaacaagaagactcgtattatgcctcgccatatccaattggctgttaggaatgatgaagagttgagcaggcttctcggagatgtgactatcgccagtggtggtgtgacacctaacattcacaacatgttgctgcctaagaaggttgggacc

SEQ ID NO: 6101 - DNA, 434 bp, Glycine max
ccgggtcgaaccagccttcgacaaggcttccggtggaattaccacaaacattgcatgttcagctccaatttctgcagtttatactttctcctatgaatcagttaacgcagctttgcttcctcatcttccaaaggagtattgttcttttgcccattgcgtgggaagtgttgtgcaagcattgccacctctttcatttttactcccagtgagcgaataaagcagcagatgcaagttggttctcattatcgcaactgctgggatgtattggttggaattatcagaaatggtggtttttcctccctatatgcaggttggagagctgtactattccggaatgttccacattcaattatcaagttttacacatatgaaagcttgaagcaagtgatgccatctagtattcaacccaactcggttaagacggtaatgtgtgg

SEQ ID NO: 6102 - DNA, 398 bp, Glycine max
  modified_base (328)..(328): a, c, g, t, unknown, or other
  modified_base (336)..(336): a, c, g, t, unknown, or other
tttctctgcaaaagcaccgatctccatcaagctccatgcttccacctcccttttcttgtcttccaagtcctccttcaaaacgggaagactctgcttccagttatgctccactttgcaagaggtagcagcaacagaagaaacacctgagctaacgcaaccaacagacaacgtaaagaagctgtacgtggttaacttgtcttggtctctgacggcggcagacatcaatgacctctttgcccaaagcggaaccgtaaccgacgtcgagagcaaagacgggaggagcaagggctatgccttcgttactatggcttccggggaagaggctcangctgctgntgataaatttgactcttatgaattatcaggacggataataaaggtagaacttgcaaagagat

SEQ ID NO: 6103 - DNA, 405 bp, Glycine max
cctttttccaaagcgggaccagcacgaagaactatactagctcggtcggaccggaccggtagttaagagagggatcgaattcgaagcgaagttagacggagaaagcgagaatgatgttggacggaaccgaagacgaagagaagtttctcgccgccggaatcgccggccttcagcagaattccttctacatgcaccgtgcattggactcgaacaatctcagggacgctttgaagtattcggctcagatgctctccgagctcaggacttccaagctttcgcctcacaagtactacgaactatacatgcgcgcctttgatcagttaaggaagctggagatgttcttcgaggaagagactcgtcgcggttgctccattattgatctttatgaactcgtccaagacgccg

SEQ ID NO: 6104 - DNA, 378 bp, Glycine max
  modified_base (325)..(325): a, c, g, t, unknown, or other
atcagcttagtgttgcggtggtggagggtttccgtggcctagcagtcacattcaaactagttaaccctaaaaaaggggtcattagggtttctactgacttgaacatcaaaacctccctaactaacacaagttgtagtgagtccacggtctggaagctagatgcctttgatgattcaactggacagtggtttgtgaccactggtggtgtgttgggaaaccctggcaaggataccatcgacaactggttcaagattgaggagtatgatgatgattacaagctcgtgttttgccccacagtgtgcaacttctgcaagcctttgtgtangaatgttggggtgtttagggatagtaatgggaaccagcgcgtggctctcactg

SEQ ID NO: 6105 - DNA, 420 bp, Glycine max
agaagtttatgtatcttgcattcctacttctatttgttttctctagccaattcttgcttggaggagcagatgcttcccccagacaagtgattgacacagaaggcaagaaagttcgagctggcgtagattactatatccgaccggtcccaacaaccccatgtgatgggcgtgggccgtgtgtggttggaagtggctatgttctcatagcaaggtcatccaaccacacttgccctcttagtgttgcggtggtggagggtttccgtggcctagcagtcacattcaaactagttaaccctaaaaaaggggtcattagggtttctactgacttgaacatcaaaacctccctaactaacacaagttgtagtgagtccacggtctggaagctagatgccctttgatgatcaactggacagtggtttg

SEQ ID NO: 6106 - DNA, 444 bp, Glycine max
cccacgcgtccgcccacgcgttcgggttaaccatgaagtttatgtatcttgcattcctacttctatttgttttctctagccaattcttgcttggaggagcagatgcttcccccagacaagtgattgacacagaaggcaagaaagttcgagctggcgtagattactatatccgaccggtcccaacaaccccatgtgatgggcgtgggccgtgtgtggttggaagtggctatgttctcatagcaaggtcatccaaccacacttgccctcttagtgttgcggtggtggagggtttccgtggcctagcagtcacattcaaactagttaaccctaaaaaaggggtcattagggtttctactgacttgaacatcaaaacctccctaactaacacaagttgtagtgagtccacggtctggaagctagatgcctttgatgattcaactggac

SEQ ID NO: 6107 - DNA, 376 bp, Glycine max
accacgcgtgcgattggatctctctatccaattcttgcttggaggagcagatgctggccccagacaagtgattgacacagaacgcaagaaagttcgagctggcgtagattactatatccgaccggacccaacaaccccatgtgatgggcgtgggccgtgtgtggttggaagtggctatgttctcatagcaaggtcatgcaaccacacttgccctcttagtgttgcggtggtggagggtttccgtggcctagcagtcacattcaaactagttaaccctaaaaaaggggtcattagggtttctactgacttgaacatcaaaaccttcctaactaacacaagttgtagtgagtccacggtttggaagctagatgccctt

SEQ ID NO: 6108 - DNA, 333 bp, Glycine max
taaccatgaagtttatggatcatgcattcctacttcgatttgttggctatagccaacacgtgcttggaggagcagatgcttacagcagacaagtgattgacacagaaggcaagaaagttcgcgctggcgtagattactatatccgaccggtgccaacaaccccatgtgatgggcgtggcccgagatgggaatggaagtggctatggactcatagcaaggtcattcaaccacacttgcgctgttagtgtcgctgtggtagacggtttccgtggcctaacagtcacattcaaactagttaaccctaaaaaaggggtcatcaaggattctactgac

SEQ ID NO: 6109 - DNA, 354 bp, Glycine max
caactggacagtggtttgtgaccactgttggtgtgttgggaaaccctggcaaggataccatcgacaactggttcaagattgaggagtatgatgatgattacaagctcgtgttttgccccacagtgtgcaacttctgcaagcctttgtgtaggaatgttggggtgtttagggatagtaatgggaaccagcgcgtggctctcactgatgagccttacaaagttaggttccagccatctgcttgaagcttcattaatgcatatgcatgaaaaaagatatgtaattaatgagaacatgatatttcatctggaaaattaagcatcatcatcatgcacgaataaaattgatgcttttgtc

SEQ ID NO: 6110 - DNA, 413 bp, Glycine max
gtttatgtatcttgcattcctacttctatttgttttctctagccaattcttgcttggaggagcagatgcttcccccagacaagtgattgacacagaaggcaagaaagttcgagctggcgtagattactatatccgaccggtcccaacaaccccatgtgatgggcgtgggccgtgtgtggttggaagtggctatgttctcatagcaaggtcattcaaccacacttgccctcttagtgttgccgtggtggagggtttccgtggcctaacaagcacattcaaacttggtaaccctaaaaaaggggtcaataagggttctactgacctggacattaaaaacctcctaactaacacaagttggagtgagtccacggtctggaagctagatgccttggatgattcaactggacagtggt

SEQ ID NO: 6111 - DNA, 422 bp, Glycine max
cccacgcgtccggtttatgtatcttgcattcctacttctatttgttttctctagccaatgcttgcttggaggagcagatgcttcccccagacaagtgattgacacagaaggcaagaaagttcgagctggcgtagattactatatccgaccggtcccaacaaccccatgtgatgggcgtgggccgtgtgtggttggaagtggctatgttctcatagcaaggtcatccaaccacacttgccctcttagtgttgcggtggtggagggtttccgtggcctagcagtcacattcaaactagttaaccctaaaaaaggggtcattagggtttctactgacttgaacatcaaaacctccctaactaacacaagttgtagtgagtccacggtctggaagctagatgcctttgatgattcaactggacagt

SEQ ID NO: 6112 - DNA, 451 bp, Glycine max
cccacgcgtccgcccacgcgtccgaagtttatgtatcttgcattcctacttctattgggtttgtctagccaattcttgcttggaggagcagatgcttcccccagacaagtgattgacacagaaggcaagaaagttcgagctggcgtagattactatatccgaccggtcccaacaaccccatgtgatgggcgtgggccgtgtgtggttggaagtggctatgttctcatagcaaggtcatccaaccacacttgccctcttagtgttgcggtggtggaaggtttccgtggcctagcagtcacattcaaactagttaaccctaaaaaaggggtcattagggtttctactgacttgaacatcaaaaccttcctaactaacacaagttgtagtgagtccacggtctggaagctagatgcctttgatgattcaactggacagtggtttgtgaccactg

SEQ ID NO: 6113 - DNA, 329 bp, Glycine max
cccacgcgtccggtagattactatatccgaccggtcccaacaaccccatgtgatgggcgtgggccgtgtgtggttggaagtggctatgttctcatagcaaggtcattcaaccacacttgccctcttaatgttgcggtggtggagggtttccgtggcctaacaatcacattcaaactagttaaccctaaaaaaggggtcattagggtttctactgacttgaacatcaaaacctccctaactaacacaagttgtagtgagtccacggtctggaagctagatgcctttgatgattcaacttggcaactgtttgtgaccacttgtggtgtgtt

SEQ ID NO: 6114 - DNA, 432 bp, Glycine max
cccacgcgtccgggttaaccatgaagtttatgtatcttgcattcctacttctatttgggttctctagccaattcttgcttggaggagcagatgcttcccccagacaagtgattgacacagaaggcaagaaagttcgagctggcgtagattactatatccgaccggtcccaacaaccccatgtgatgggcgtgggccgtgtgtggttggaagtggctatgttctcatagcaaggtcatccaaccacacttgccctcttagtgttgcggtggtggaaggtttccgtggcctagcagtcacattcaaactagttaaccctaaaaaaagggtcattagggtttctactgacttgaacatcaaaaccttcctaactaacacaagttgtagtgagtccacggtctggaagctagatgcctttgatgattcaactggac

SEQ ID NO: 6115 - DNA, 454 bp, Glycine max
  modified_base (351)..(351): a, c, g, t, unknown, or other
gttaaccatgaagtttatgtatcttgcattcctacttctatttgttttctctagccaattcgggcttggaggagcagatgcttcccccagacaagtgattgacacagaaggcaagaaagttcgagctggcgtagattactatatccgaccggtcccaacaaccccatgtgatgggcgtgggccgtgtgtggttggaagtggctatgttctcatagcaaggtcatccaaccacacttgccctcttagtgttgcggtggtggagggtttccgtggcctagcagtcacattcaaactagttaaccctaaaaaaggggtcattagggtttctactgacttgaacatcaaaacctncctaactaacacatgttgtagtgagtccacggtctggaagctagatgcccttgatgattcaactggacagtggtttgtgaccactggtggtgtgttgggaaac

SEQ ID NO: 6116 - DNA, 409 bp, Glycine max
cccacgcgtccgcccacgcgtccggttaaccatgaagtttatgtatcttgcattcctactgctattggttttctctagccaattcttgcttggaggagcagatgcttcccccagacaagtgattgacacagaaggcaagaaagttcgagctggcgtagattactatatccgaccggtcccaacaaccccatgtgatgggcgtgggccgtgtgtggttggaagtggctatgttctcatagcaaggtcatccaaccacacttgccctcttaagtgtgccgtggtggaaggtttccgtggcctaacagtcacattcaaactagttaaccctaaaaaaggggtcattagggtttctactgacttgaacatcaaaaccttcctaacttacacaagttgtagtgagttcaccgtc

SEQ ID NO: 6117 - DNA, 416 bp, Glycine max
ggttaaccatgaggtgtatgtatcttgcattcctacttgtatgtgtttgctgtagccaatggtagcttggaggagcatatgcttcccccagacaagtgattgacacataaggcaagaaagttcgagctggcgtagattactatatccgaccggtcccaacaacccgatgtgatgggcatggaccgtgtgtggcttgaagtggctatattctcatagcacggtgatgcaaccacacttgacctcttagcgttgcagtggtggacgttagacgtggcctatcagtcacattcaacctaggtcaccctaataaaggggtcattagggtgactactgagttgaacatcaaaaccttcctaactaacagacgatggatcgaatccacagtatggaagctagatgcctatgatgattcaact

SEQ ID NO: 6118 - DNA, 374 bp, Glycine max
  modified_base (31)..(31): a, c, g, t, unknown, or other
  modified_base (317)..(317): a, c, g, t, unknown, or other
gattcattagaaagtcctctccagatattgntttgttctttgaacggcttgattttatcaatgctggttatgttgacttcccacttttgaaacttgtaactgaagtgtttggctcggcaatttggttcaacaccatcatagtcatgactcattcttcctctgccattccagaaggacctgatggttatacttttaattatgagtcatatatttcttattgtactaatatagtacagcaccatatacaacaggcagtgtttgattctaaggtttgaaaccctgtacttttggtggagaaccattctcgatgcccacanaatattatgggagagaaaattctcccaaatggacaagtttggagatctcaactcttg

SEQ ID NO: 6119 - DNA, 433 bp, Glycine max
cagaaatctcgtcttctccgaaaacgtcctgcgcgtaacaaactcttatataacaacacgccttctggttctcttttcagtttacgtttacgtttacgcattcactcgcttatatcgtcttcctccgtttttttctttctcgtgaaacgcttcttccaactatgcctgccccattgattctggttactggcggagccggttacatcggtagccacaccatccttcagcttctcttcggcggttaccatgtcttcgccgtcgacaacttcgacaattcttccgaaaccgccatcaacagagtcaaggaactcgccggagaattagcaaataacctttccttttgcaagcttgacttgcgggacagagctgccctcgagaaaatattttcaaccgtaaagtttgatgccgtcatacattttgctgggcttaaagc

SEQ ID NO: 6120 - DNA, 345 bp, Glycine max
cccacgcgtccggtcaaaaccaagctaaaaggtcatcagaagagaattactggtcttgccttttctcatgttctaaatgtgcttgtctcatctggagctgactctcagttgtgtgtttggagcacagatggatgggaaaagcaagcaagtaaattcctacaaatgcccagtggacgaccgtctgcacctcttgcagatactcgggtccaatttcatctagacccgacacatttactggctgttcatgtaactctaatagccctatattgtggcacccaagttggaatgtattaagcagttttcacctctggaagccgattcaatcacacatgctgcataactctg

SEQ ID NO: 6121 - DNA, 439 bp, Glycine max
tgatactcgaaatttagctgatgtgaaacccagaattgttgatgaaggtgtggaaaaatctaggatatggaagctgacagaaattaatgaaccatcacaatgccgctccctgaaacttcctgatagtttatcatctatgagggtttctaggttaatttatacaaatcagggggttgcaattttggctttggcagcaaatgctgttcacaagctttggaaatggcagagaaatgagcggaacactactgggaaggcaactgcaagtattcaaccacaactatggcaaccttctagtggaatactgatgactaatgatataagtgatactaacccagaggatgctgtgtcatgttttgcactgtcaaagaatgattcatatgttatgtctgcttcagggggaaaaatttctctattcaatatgatgacatttaagacaatg

SEQ ID NO: 6122 - DNA, 387 bp, Glycine max
cacaaacagaggctacgtacgatcaaattaattaagatggcggaagtgaagaacaaacaagtggttctgagggactatgtgagtggttttcctaaagaatcccacatgaacatagttgaaaggaccacaatattgaaactttcacaaggttccaatgaatggcttttaaaaatctctacctttcctgtgacccttacatgaagaatgcttcatgaccaaggtggaaaggcctcgacgtgtttggcacctatacacctggctctccattaacagggtatggagtgtccaaagtcctagaatctggacacccagattacaagaaaggtgatttaatggtgggatctacaaaatgggaagaattcaacttggtgtccccaactcaaatac

SEQ ID NO: 6123 - DNA, 418 bp, Glycine max
aagaatccgacatgaatattgtcgaaagtaccataacattgaagcttccacaaggttccaatgatgtcttgctcaaaaatttgtacttgtcttgtgatccgtatatgaggaatctcatgaacaagcccgaaggccctcccaatagtcgtgcttacactcctggctctccattaataggatatggtgtgtctaaaagtctggaatctgggcacccagattataaggaaggtgatttagtgtggggctttaccaaatgggaagagtatagcttgttaccctcagctcaaatactcttcaaaattgagcacactgatgttccacttacctactacactggaattcttggtatgccaagagtgactgcatatgcaagtctatttgaagtaggatctcttcagaaaggagaaaatgtttttgg

SEQ ID NO: 6124 - DNA, 426 bp, Glycine max
ggccaatttgctaaattgactgattgttatgtggttggaagtgctggaagtaaagagaaggtggatcttttgaagaataaattaggatttgatgaagcctttaactacaaagaagagtcagacctcaatgcaactttgaaaagatactttccagaaggcattgacatatactttgagaatgttgggggcaagacacttgatgcagtactcccaaatatgagagttcttggtcgcatacctgtttgtggaatggtctcacagtacaatctgacacaacctgaaggtgtaacaaatttggcaaatcttatatttaagcggattcgaatgcaaggttttattgttggtgaattctatcacctatatccaaaattcttggagtttgtcctgcctcatattagagaaaggaaggttgtgtatgtggaagat

SEQ ID NO: 6125 - DNA, 414 bp, Glycine max
cccacgcgtccgaaataatgaaaaagtacaacctaagagagaagggaggttctgaacatcagacatatgctttgggaattaaagaggtttgggaaattgatgagaaaaagcatcaacctggtgctgtaatccacacattgggatggcccttggatcataaaacatacggaggatcttttctgtatcacatgaaagataaacaaatatctataggccttgtggttgctttaaactatcagaaccctttcatgaatccttatgaggaattccagaaactaaagcatcatcctgcaattaaatcatttctggaaggtggaacagttatccagtatggagctcgcactttaaatgaaagtggttttcagtttttcctggaggagcaattattggatgttcagctggcttcatgaatgt

SEQ ID NO: 6126 - DNA, 365 bp, Glycine max
agaaggtcctagaacaattgaacgagttttctgatgaagatattgattctgctgcggaggcattgaatgatatgcctatcagaaagctatacatgttgattgagatggcagcgcaaggggagcaaggtggatctgcagaagccatcttttctggcaaagagaagattaatatcgctcatttctatgattgcctccaggatgttgttagataataagttgtcgtgttaagcgctttctcagttagagtgcatataatccttattgagttgaaatctcattttttttttacaacaattcattcctacattgcttgatactgttcagttgcagagtttgtgtgttggttggttgagctgatagttatt

SEQ ID NO: 6127 - DNA, 425 bp, Glycine max
aacaaacccataaatcctctcaccaaataaacctcaatttattgcattgcataataccatgtcaatgaagttgtatgcttccctcacccttacggtgtggcttttcatggccacattttcgcgagcccaatacgttattgacacaaatggcgaacccgttgacaatgatgatgagtattacatcaggccagccataaccgacaacggagggcgtttcaccttgatcaaccgaaacgggtcgtgccctctctacgtgggtcttgaaaacaccgatacgccacttggttatccagtgaaatttacccattttgccctcaacgttcaagatgaggatataagggtgaacagcgacttgagaatcgaattcctggaagtttccacaacgtgtgtgcaatccacggaatggagggtgggtgagaaccaca

SEQ ID NO: 6128 - DNA, 427 bp, Glycine max
  modified_base (412)..(412): a, c, g, t, unknown, or other
cccacgcgtccgcataaatcctctcaccaaataaacctcaatttattgcattgcataataccatgtcaatgaagttgtatgcttccctcacccttacggtgtggcttttcatggccacattttcgcgagcccaatacgttattgacacaaatggcgaacccgttgacaatgatgatgagtattacatcaggccagccataaccgacaacggagggcgtttcaccttgatcaaccgaaacgggtcgtgccctctctacgtgggtcttgaaaacaccgatacgccactgggttatccagtgaaatttacccattttgccctcaacgttcaagatgaggatataagggtgaacagcgacttgagaatcgaattcgtggaagtttccacaacgtgtgtgcaatccacggaatgganggtgggtgagaacga

SEQ ID NO: 6129 - DNA, 333 bp, Glycine max
gaataaacatgttctggttgtcggatctggcaattccggcatggagattgcgctggacttgtccaattttggtgccaaaccttccatcattgttcgcagcccggttcattttctttcgagggatatgatgtattatgcgtcgcttatgctgaattacttgtcgctgagtacggtggagaaggtgttggtgatggttagcaaggttgtgtatggagatctgagtgagtatgggataccgtatccgagtgaggggcctttcaccatgaagatgaagtatgccaagttcccaatcatcgatgtaggaactgtcaagaaaattaaatctcgagagat

SEQ ID NO: 6130 - DNA, 338 bp, Glycine max
cgtcagatttccccaggaagcagtgggatctcagctggaacgattgttgcaattgtggttccaattacggtcgctgtgcttatatttatagtcggaatttgtttcttgagtagaagagcaaggaagaagcagcagggttctgtaaaggaaggaaaaactgcgtatgacatccccaccgtggactccttgcaattcgatttcagcacaattgaagcggccacaaacaagttctctgccgataacaagttggggggaaggtggatttggtgaggtttacaagggcactctttcaagtggacaagtagtagctgtcaagagactctccaaaagctctggac

SEQ ID NO: 6131 - DNA, 475 bp, Glycine max
ccgggcccggaattcatggccgggtcgacccaagccgtccggcacgtctctctctctctctcgccatggctatggctatgcaaagcggaatcggagtctccaagatcctcatcatagcaggagcaggttacaccggcaccgtcctcatcaaaaacggaaaactctcggatttaatcggcgagcttcagttgctggtgaagggattggaaaaatctggggagcatgctgaaggtgaaggtgaatatgctgatgccatagctgctcaggtgcgtcgcctggcgaatgaagttcggcagctagcatcaaacaggccaatcacagtactgaatgggggttctgaacaaagtaatttatcatcccttgtcgttccagctgctgccttgggcgctctgggttatggctacatgtggtggaagggaatttcattctcagatcttatgtatgtgactagacggaatatggaaaaagctgttgc

SEQ ID NO: 6132 - DNA, 399 bp, Glycine max
tgaaaatgtgccttcaaggattaacagatgtttggaggaaggagccgaagaatttttcttgaagcctgtgaggttgtcagatttgaacaagcttaaaccccacatgaagaaaaccaagttcaaagatcaaaagcaagaaacagtagaaaggtttgaagactcagaagttcaacagcaacagtcacaacaacaaatcatcatccaaaatgagcatcaccaagcaccaaaattacaagttcttcagccagagtcagaatcagagtcacatccacaaccaactattgaacaacagcaacaaattctacaacaagccaacaacaataacaagaggaagaccatggaacagggcctttcacctgagactgacagaacaagaccaagatacagtggcatagccac

SEQ ID NO: 6133 - DNA, 479 bp, Glycine max
ctttcaggtctaatccgcacaaggattgcaagctcctcaaactcttcatggccatgagaagggcatactgagaactcgggggttaagatctggctcgtaattgggtaactcagactgagggtgattatatcttgttcttatgaagggactacatccgagtctactattgaaggtagaaagatgattagcttgcgtgagaatgatgaatgcaactattgacgactatatctttggatctacctcgataaagacgtatctgagaatgtctttatatcatatcaaatgtatgcgttagagatacggcattgacttgccaatgatgactaaggtgctttaatcacagagaatcatcaataatgtgaccatgtcatctgaaaatgtgccttcaaggattaacagatgtttggaggaatgagcatgaagaatttttcttgaagcctgtgaagctgtcagatttaaacaagcttaaaccccatatg

SEQ ID NO: 6134 - DNA, 355 bp, Glycine max
cccacgcgtccgaaatgattgagaagagagcgaagaaaaaaaacagagccaaaccaaaccccaccgtccccgaaacggttcgttttgcccttcttcggaaccctcccttccgcgccgctgctgctgctccggtcgccgtcggcgattctccggtaaccgaacaccatcgatccgtcaggagcctcggatctcggatctgagcgaaacgaatcgaaacgaaacgaaacgatgccgtctcatgcggatctggaccggcagatcgagcatctgatggagtgcaagcctctgccggaagccgatgtgaaggcgctgtgcgatcaggcgagagcgattctcgtggaggagtggaacgttc

SEQ ID NO: 6135 - DNA, 423 bp, Glycine max
ccacgcgtccgcccacgcgtccgaaatcaaaccaggccagcttcaaaacgctgcgtttcgctgccccgtcctcgcgttgcttcgaaaccctaaccctatccacggcattcctccgctcgccgtcgacgccgtcaccgtcgcgccaactgccgcaaaccgaataaaccgaatcgatctgagagaagaagaagaagaagacgcgatctcggaggtgggagcgaaacgaaacgatgccgtctcacgcggatctggaacgacagatcgagcagctgatggagtgcaagcctctgtcggagtcggaggtgaaggcgctgtgtgatcaagcgagggcgattctcgtggaggaatggaacgtgcaaccggtgaagtgccccgtcaccgtctgcggcgatattcacggccagtttacgatctcatcgagct

SEQ ID NO: 6136 - DNA, 421 bp, Glycine max
ccgaaattcgtcgttccgaaacgctatgacattaggctcaagcccgacctcgtcgcgcagcgttttgcatgttccgtcgccgtcaacctcgacatcgtcgccgccacctctttcatcgttctcaatgccgccgaactcgacgttagcaacgacgccgtttcattcaccaaccaagattcctccaaggttattaaaccttctcgagttgagttgtttgaaaatgatgagattctggttttggagttcccagaggaattacctattggcttcggtgtcttgtccattcgctttgaaggaatcttgaatgatagaatgaaaggcttctaccgaagtacctatgagcacaatggtgaggaagaagactatggcagttacacagtttgaaccagctgatgccaggcgatgctttccttggtgggat

SEQ ID NO: 6137 - DNA, 424 bp, Glycine max
ccgaaactcgtcgttccgaaacgctatgacattaggctcaagcccgacctcgtcgcgcggggtggtgcaggttccgtcgccgtcaacctcgacatcgtcgccgccacctatttcatcgttctcaatgccgccgaactcgacgttagcaacgacgccgtttcattcaccaaccaagattcctccaaggttattaaaccttctcgagttgagttgtttgaaaatgatgagattctggttttggagttcccagaggaattacctattggcttcggtgtcttgtccattcgctttgaaggaatcttgaatgatagaatgaaaggcttctaccgaagtacctatgagcacaatggtgagaagaagactatggcagttacacaggttgaccagctgatgccaggccatgctttccttgttgggatgaacc

SEQ ID NO: 6138 - DNA, 369 bp, Glycine max
ggtaaaggtccaggggtcgagggacgcgtccggtcgataaactcatctgtcacaatccattctcgcgccctctaacagaagaacaaaagaataaataaataaataaattctccactcttcctcttctttcagtttcagatctctcagaggtgtgatatgtgatgtgattcaggtttgtaaaaatatggagtgtttgaattcggtggaggacgtggtggaggagataatgaggattcacagatcccttccagcccggtcagggatagacgaagtcgaagtggctagaagtttgatcgggaatgttgaaaaagaagaccaggcgaagctccaagccatagcgcggcaaagcaatggcgttcatgtgcccca

SEQ ID NO: 6139 - DNA, 387 bp, Glycine max
gggccgacctacgaatggaatgaactatttgcaccaaaataatataattcacagggacctcaagactggcaatcttctgatggatgacaatgaagtggtcaaggttgctgattttggggttgccacggtgcaaactcagtctggagtgatgacagctgaaactggaacataccgttggatggctcctgaggtcattgaacacaaaccatatgaccagaacgcagatgttttcagttttggaatagctctttgggagcttttaactggagaactgccttactcttgcctgaccccattagaagcagcaattggccgtggtgcaaaaaggcctgcggcctacaattcccagaaatacgcacccaaagactttctgaacttcttcagcgg

SEQ ID NO: 6140 - DNA, 262 bp, Glycine max
cccataactacgattatctagaaattagccgttgctactaggcaatatatgagattccatctgtcaaagaagacccttccaagtggattccaatcctaaggaaaatatgttggtacttggttctagcgccctatgatccaattcaatcaagctttctcaattccaccttggctgatttgaatctatctgagattccaaacttcaagctactcttgaaacagctggttaccatggaagttatccaatggacaactctatggga

SEQ ID NO: 6141 - DNA, 361 bp, Glycine max
  modified_base (337)..(337): a, c, g, t, unknown, or other
cccacgcgtccgggaatcatccattgttgagtggaatgaaagtgaaggagctgttaaaaggacttaccaaggatttcgtaagcgatctttgggtgtcgtgcaatttgatactaccaaaaatcgatttttggctgctggtgatgatttctccatcaaattctgggatatggataatgttcagcttttgacaactgttgatgctgatgggggtcttcctgcaagcccgcgtattcgcttcaacaaggatggaactcttttagctgtctctgcaaatgagaatggaattaaaattttagccaatggggatggtattcgcttgtcgcgcacactagagaantctttatatgatgcatcaagagca

SEQ ID NO: 6142 - DNA, 386 bp, Glycine max
aggttgctactattgaggatatatatcttgcatatgaacagttgaaagtggatgagaattctctatattcatgcattggaattgctggtgctcagactgcacaagatatagcagctcctttagaagaggaagtagcagatgatgtttatccaggtgttattccggtgggacgaggtttatctacaatgacacggccaacaacctgatatttttggactaagttttggcctgcttgctttaagatcgggaggagccatgtctggaagtttgattacaagttgtcgttcaaaggattagcggcatgtgtgtcacaacacaagaagttgctgcattcatttaacattcaaaccactcggtatacaagctgtttgatcaaacctaagaag

SEQ ID NO: 6143 - DNA, 435 bp, Glycine max
acgcgtcagttttgaaaggacgaccctttggtgtttggatcttcaagaaagagagacccttgggatttcgtcaccatgagtctcttcggtcttggaaacagaaaccaaaaaacatttcgtccaaaaaagagtgctccatctggaagtaagggtgctcaacttcaaaaacacatcgatgccacgttgggtagtgggaacttgagggaggctgttaaactgcctcccggtgaagatattaatgaatggctagctgtaaacaccgtggacttctttaatcaagtgaatatcctgtttggtactcttacagaattctgcacgccaagtaactgcccttcaatgactgcaggaccaaagtatgagtatcgatgggctgatggtgttactataaagaaaccaatagaagtgtctgctccaaaatatgttgagtatttgatg

SEQ ID NO: 6144 - DNA, 434 bp, Glycine max
  modified_base (1)..(1): a, c, g, t, unknown, or other
nccacgcgtccgattaatgaatggctagctgtaaacaccggggacttctttaatcaagtgaatatcctgtatggtactcttacagaattctgcacgccaagtaactgcccttcaatgactgcaggaccaaagtatgagtatcgatgggctgatggtgttactataaagaaaccaatagaggtgtctgctccaaaatatgtcgagtatttgatggactggattgaatctcagctagatgatgaaacgattgtccctcaaagattgcgtatgtatgacatattgataaagctagttggccagttagctgaatcatctggattgttatttgctaataatatgcatcatagcactattttaattaattgctgcatagctataagggcctcctttccaaccaatttccgagatgttgtcaagacaattttgaagcgatt

SEQ ID NO: 6145 - DNA, 376 bp, Glycine max
ccaagcatccgctcacgttctggcagttgttgccagcgtcttggtcgtggtctgggtcgtcaatttcaggggtggcttggcttgggattctgataacaagtccctcatcttcaacattcaaccagttcttaatgttattggcttactacttcaagggggtgaagctattataagttacaaaacttttcccctaaagaagggagttaagaaatttatacaccttgttttccatgccatcgcattaatacttgggatagttggaatttatactgccttcaagtgtcaaaatgaaagtgggatttgcaatctctaaagcttgcattcatggcttgggattgggggtaatgtcctttaggcattcaggtaaacaaaacac

SEQ ID NO: 6146 - DNA, 415 bp, Glycine max
gacccaagcgtcagcccacgcgtccggccaaacgtttcctagccgaaaccctagctagctctttcttaatccataatctctcttctcttcttctctttctatctgcaaaacaaaaatgtctcacttcggacgttcgggtcccccagacatttccgacacttactctcttctcgttctcaacatcaccttccgtaccaccgccgacgacctattccctctcttcgacaagtacgggaaggtcgtcgacatcttcatccccaaggatcgaagaactggtgagtcaaggggttttgcattcgtgcgttacaagtatgctgatgaggctcagaaggccgttgagaggctcgacgggagaatggttgatggtcgtgaaataaccgtccagtttgcgaaatatgggcctaatgctgagaag

SEQ ID NO: 6147 - DNA, 439 bp, Glycine max
ctcacgcatttcctcgtttttttcttcccttttcgctttctccggcgacgatctcagattccggccactcctctcgccggcgagcccttactcttccctcctccgtcgagccctctccgattcgaatcgttcccagcctcgcaccaccatgaatcccgaatacgattatttgttcaagcttttgctgattggagattctggtgtaggcaagtcatgtcttctcctgaggtttgctgatgattcataccttgacagctatatcagtaccattggagtggactttaaaatccgcactgtggagcaggatgggaagactattaaacttcaaatttgggacactgcgggtcaggaacgtttccgaacaatcactagcagctattatcgtggggctcatggcattattgtgagtcttttaaactggtcctcctttttgagttaa

SEQ ID NO: 6148 - DNA, 435 bp, Glycine max
ctcagattccggtcactcctctcgccggcgatcccttattcctccgtcctccgtcgagtcctttccgattcgaatcgttcccagccttgtgccaccatgaatcccgaatacgattatttgttcaagcttttgctgattggagattctggtgtaggcaagtcatgtcttctcctgaggtttgctgatgattcataccttgacagctatatcagtaccattggagtggactttaaaatccgcactgtggagcaggatgggaagactattaaacttcaaatttgggacactgcgggtcaggaacgtttccggacaatcactagcagctactatcgtggggctcatggcattattgttgtttatgatgtcactgaccaagagagcttcaacaatgttaagcagtggctgaatgaaattgaccgttatgcaagtgaaaat

SEQ ID NO: 6149 - DNA, 455 bp, Glycine max
cccacgcgtccgcccacgcgtccgcccacgcgtccgcccacgcgtccgggacaatcactagcagctactatcgtggggctcatggcattattgttgtttatgatgtcactgaccaagagagcttcaacaatgttaagcagtggctgaatgaaattgaccgttatgcaagtgaaaatgttaacaagcttctagttggaaacaagtgtgatcttacggcaaataaagttgtgtcctctgagacagcaaaggcatttgctgatgaaattggaattcctttcatggaaactagtgctaaaaatgccaccaatgttgaacaggctttcatggccatggctgctgaaattaaaaacagaatggcaagccaaccagtgaacaatgccaggccttcaacagttcaaattcgaggacagccagtgaaccagaaggctggttgctgctcgacttagaaagagacg

SEQ ID NO: 6150 - DNA, 428 bp, Glycine max
  modified_base (339)..(339): a, c, g, t, unknown, or other
cttcctcacgcatttcctcgtttttttctttccttttctctttctccggcgacgatctcagattccggccactcctctcgccggcgagcccttactcttccctcctccgtcgagccctctccgattcgaatcgttcccagcctcgcaccaccatgaatcccgaatacgattatttgttcaagcttttgctgattggagattctggtgtaggcaagtcatgtcttctcctgaggtttgctgatgattcataccttgacagctatatcagtaccattggagtggactttaaaatccgcactggggagcaggatgggaaagactataaaacttcaaatttgngacactgcgggtcaggaaccgttccgaacaatcactagcagctattatcggggggctcatggcattaattggtgttatgatgtcactga

SEQ ID NO: 6151 - DNA, 446 bp, Glycine max
  modified_base (382)..(382): a, c, g, t, unknown, or other
cccacgcgtccgggctcatggcattattgttgtttatgatgtcactgaccaagagagcttgaatgatgttaagcagtggctgaatgaaattgaccgttatgcaagtgaaaatgttaacaagcttctagttggaaacaagtgcgatctcacggcaaataaagttgtgtcctatgagacagcaaaggcttttgcagatgaaattggaattcccttcatggaaactagtgctaaaaatgccaccaatgttgaacaggctttcatggccatggctgctgaaattaaaaacagaatggcaagccagccagtgaacaatgcgaggccttcaacagttcaaattcgaggacagccagtgaaccagaaggctggttgctgctcgacttanagagagacgaagtatttggggtcttagaagttcatgtgtctcagtggcatctaaaactagcttt

SEQ ID NO: 6152 - DNA, 453 bp, Glycine max
ctcttctctctctttctccggcgacgatctcagattccggtcactcctctcgccggcgatcccttattcctgcgtgctccgtcgagtcctttccgattcgaatcgttcccagccttgtgccaccatgaatcccgaatacgattatttgttcaagcttttgctgattggagattctggtgtaggcaagtcatgtcttctcctgaggtttgctgatgattcataccttgacagctatatcagtaccattggagtggactttaaaatccgcactgtggagcaggatgggaagactattaaacttcaaatttgggacactgcgggtcaggaacgtttccggacaatcactagcagctactatcgtggggctcatggcattattggtgtttatgatgtcactgaccaagagagcttcaacaatgttaagcagtggctgaatgaaattgaccgttatgc

SEQ ID NO: 6153 - DNA, 331 bp, Glycine max
gactgcactgacctacattgattctgatggaaattggcatagagctagcaaaggggctcctgagcagataatcaccctttgcaactgcaaagaggatgtcagaagaaaggtccatgctgtaattgataagtttgctgagcgtggacttcggtctttaggtgtcgcaagacaggaagtacctgaaaaatcaaaagatagtcccggtggaccatggcaatttgttggtctgctaccattgtttgatcctcccaggcatgatagtgctgaaaccattcgaagagctcttaaccttggtgtcaatgttaagatgattactggggatcagcttgcc

SEQ ID NO: 6154 - DNA, 400 bp, Glycine max
gtggacttcggtctctaggtgttgcaagacaggaagtacctgaaaaatcaaaagatagtcctggtggaccatggcaatttgttggtctgctaccattgtttgatcctcccaggcatgatagtgccgaaaccattagaagggctctgaaccttggtgtgaatgttaagatgattactggggatcagcttgccattggaaaggaaacgggccgaaggcttggaatgggaacaaacatgtacccttcatctgcattgcttggccaagacaaggatgcttctatttcagctcttccagttgatgagttgattgagaaggctgatggatttgcaggagtatttcctgaacacaaatatgaaattgttaagaagctgcaagagaggaaacatatatgtggaaatgt

SEQ ID NO: 6155 - DNA, 435 bp, Glycine max
gtggacttcggtctctagtgttgcatttcagttagtacctggaaaatcaaaagataggcctggtggaccatggctatgtgttggtctgctaccattgtttgatcctcccaagcatgatagtgccgaaaccattagaagggctctgaaccttgttgtgaatgttaatatgattactggggatcagcttgccattggaaaggaaactgtcctaatgcttgtaatgggaacaaacatgtaccctacatctacattgcttggccaagacaaggatgcttctatttcagctcttacagttgatgagttgattgacaaggctgatggatatgcaagagtatttcctgaacacaaatatgaaattgttaagaggctgctagataggaaacatatatgtggaaatgtacggtgatcgtggtgttgaactcgagaatgagtttt

SEQ ID NO: 6156 - DNA, 411 bp, Glycine max
ctggaaagccacctgttgattaccaaggagcaagagatgtcaaaccaattgctgaatcggcacttcaacaggtaaaggctcttttgaaggatcggttaagtggaaaagcaacaggaggatctagtgacaagacagaaaccagttcttcagtagaattgaactctggcaactttgatgaattggtgatcaaaagcaaagaactctggattgtggaatttttcgcaccttggtgtggacattgtaagaaattagctcctgagtggaagaaagcatccaatagtttgaaagggaaggttaaactgggccatgttgactgtgatgctgaaaagtctctaatgagcatgttcaaagttcatggattcccaactatcttggtgtttggtgctgataaagatagtcctattccttatg

SEQ ID NO: 6157 - DNA, 403 bp, Glycine max
caacagtgcactctggctcctcagatttcctgcagctggggaaatgagactgagagcatgtgctgctgcacaaggggtacagccggatcaaattattttcacagatgttgcaatgaagaatgaacacatcagacggagttctttagcagacttattccttgactcgcctttatgcaatgcacatacaacaggaacagatatactatgggcaggtttgccaatggttactctgcctcttgagaaaatggctactagggttgctgggtcactctgtcttgccactggactaggggaggagatgattgttagcagcatggaagagtatgaagatagagcagtctcattggctctgaatcggccgaagcttcaggctcttactaataagcttaaagctgtacgcatg

SEQ ID NO: 6158 - DNA, 305 bp, Glycine max
tgcgatctctccttcctcaaacacaggcatttacctcaatttctggcctgagatctgcttcaatttccagctttgggagaaagaatgtttcttttagcttgcagccacgctcgattcgccttaaaatttcctgtgctgctaaaccagagacagtagagaaggtgtgcaaaatagtaaagaagcagctggctatgcctgaaactgatgttgagacgggggagtcaaaatttgcaactataggtgctgatatccttgacacggatgagatcgtgatggctcttgaggaagcatttggtattgccatt

SEQ ID NO: 6159 - DNA, 373 bp, Glycine max
cagaccctttctcaccaccatcttctttctcacactcacagtgctcaaggtttcagcaggatcctcagtgattttctacaacaagtgccagcacccagtgtggcccgggatccagcccagcgcaggaaagcccgttctggcccgcggaggcttcaagctcgccccaaaccgggcctactcccttcagctccccgctctatggtccgggcgcttctggggccgtcacggctgttccttcgacgccggcggccgggggcgctgcgccaccggggactgcagcgggtccctgttctgcaacggcatcggcggaagcccaccggcgacccttgcggagttcacccttggcaacgagcatgacttctacgacgtgagc

SEQ ID NO: 6160 - DNA, 356 bp, Glycine max
caggattttatggaggtggtggaatttcttaagaagcctgagaggttcactgctgttgggggtcgcataccaaaaggtgttcttcttgttggtcctcctggaactgggaagacacttttagcaaaggctattgcaggtgaagcaggtgtcccatttttctcaatctaaggtcctaagttggtaaaaatgttggttggtgttggtgcttctcgagtccgcgatttattcaggaaggccaaagagattgccccatgcattgtttttgttgatgaaattgatgctgttggaaggcaaagaggtactggaattggtggagggaatgatgaaagagaacagaccctcaatcaacttttgac

SEQ ID NO: 6161 - DNA, 448 bp, Glycine max
cccacgcgtccggcggcaacgagaggtgttcggttgaagctcagatcagcgagggcagcagggacccgcacttctctgcggttcctcctctcagtctccgtaaccctaactctcgctcacctcgccgcctcaaattccgaaggcgacgctctctacacgctgaaacggagcctctcggaccctgacaacgttctccagagctgggatcccactctcgttagcccctgtacttggttccacgtcacctgcaaccaggacaaccgagtcactcgcgtggatcttggtaactctaacctatctggacatttggtacctgaacttgggaagctggagcatctacagtatcttgagttgtacaaaaacaacattcaaggaactattcctccagaacttggaaacctgaagagtctcgttagcttggacttgtacaacaacaacatatcaggca

SEQ ID NO: 6162 - DNA, 412 bp, Glycine max
  modified_base (350)..(350): a, c, g, t, unknown, or other
ggcagcagcaacccgcacttctctgcggttccttctctctctctctctagaacttcgtggtccctctgcttctttctttcttagttgcagcgcgattgctgcatcgtcctccaataagagctcgctgctagtgaaccctaacacggcggcaacgagaggtgttcggttgaagctcagatcagcgatggcagcagcaacccgcacttctctgcggttcctcctctcagtctccgtaaccctaactctcgctcacctcgccgcctcaaattccgaaggcgacgctctctacacgctgaaacggagcctctcggaccctgacaacgttctccagagctgggatcccactctcngtagcccctgtacttgttccacgttacctgcaaccaggacaaccgagtcactcgagtggatc

SEQ ID NO: 6163 - DNA, 407 bp, Glycine max
  modified_base (285)..(285): a, c, g, t, unknown, or other
  modified_base (297)..(297): a, c, g, t, unknown, or other
  modified_base (317)..(317): a, c, g, t, unknown, or other
cccacgcgtccgtttcgtttctatcatacccacttcgccttctccgtttctcactagggtcagatcgcgcctccatttcgctgcattccctctgcgttctccaacgaggaaactcatgtcgcacactcttgcacgtgccactcttggtctcacacacccttctaatatcgaaacccccaagatctcttttggtgctaaggatgttgatgtgacggaatggaaaggggacattctggcagtgggtgttacggaaaaagatttggctagagatgcaaactcgaagtntgagaatgtgantttgagcaagattgactcanagttgggtggtttattagctgaagcctcttctgaagaggatttctctggcaaagttggtcagtcaactgttcttagaattacaggacttg

SEQ ID NO: 6164 - DNA, 449 bp, Glycine max
gattggtcttggtcagtcaccttccactcctgcaccttttaagagtcttggcgaggccattgtggcggctgccaagtcttctcaagcaagcagtgttgctgttgctcttgcctcttctgaaggactctccgcacaatcaaagcttagcactgcttatgcaattgcttctggggctgtgctgggattatttgaagataatagatacaaatcagaagcaaagaaatcaacactaaggtccattgactttattggtcttgggacaggacctgaactggagaagaaactgaagtacgcatgagatgtttcttccggaattatctttggaagggagcttgtaaattctcctgctaatgtgctcacaccaggggtgttggcagaagaagcagctaaaattgcttccaactacagtgatgttttcacttgctaaaatattaaattctgaagcatgt

SEQ ID NO: 6165 - DNA, 415 bp, Glycine max
cccacgcgtccggcaggaatggctttgttcggatagaaagagtggtattttttcacgccgagggaccgcaagtacccgaacggttcgcggccgaaccggtccgcgggaaccgggtactggaaggcaaccggagcggataaaccagttggtaaaccgaaaccggttgggatcaagaaagcgttggttttttacgctggaaaagcgcccaagggagagaaaactaactggatcatgcacgagtatcgtcttgcagacgtggatcgttccgttcgcaaaaagaacagcttaaggctggatgactgggtgctgtgccgaatttacaacaagaaaggtgcaattgaaaagcaacaacttccaccaccgagtggggtccgcaaaattgaatgttccgaaatggaggacgagaaaccggaga

SEQ ID NO: 6166 - DNA, 429 bp, Glycine max
acaaaattgaatgttacgaaatggaagacgtgaagccggagtatacggcggcggattgcctgggcttcgaggcttccgactcggtgccgcggctgcacacgacggagtcgagctgttcggagcaggtggtgtcggcggagtttgcgagcgaggtgcagagcgagcggaagaggcagggcaacagcgagttttcgtataattacatggatgccactctcgggaataatcagatgtcgccgctccaggatatcttcatgtacctctccaggcccttctgaaatcaacacgcacgagacggcacgacgtcgttctttgctttgtgtgtgcatgatgcatttttgacgtgcctgctgcattgcatggaagcacgagactgagtgaatgtccgtgagtgtgtccgtgctggtgcgcgtagatgattattattat

SEQ ID NO: 6167 - DNA, 422 bp, Glycine max
ccacgcgtccggtcaccggatggcggaccaactggcgaggcccctgccgattccaattccctgatcaagcttcttcttattggcgatagcggtgtgggaaagagttgtctgcttttgcgattttctgatggttccttcacaaccagttttatcaccaccattggcattgattttaagataagaaccattgaacttgatggcaaacgcattaagttacaaatctgggatacagctggtcaggagcgatttcgaactattaccacagcttattaccgtggagccatgggtatcttgctcgtttatgatgttactgatgaagcatctttcaacaatattagaaattggattcgcaacattgaacaacatgcttctgacaatgtaaacaagatacttgtgggtaacaaggctgatatggatgaaag

SEQ ID NO: 6168 - DNA, 439 bp, Glycine max
caaacgcattaagttacaaatctgggatactgctggtcaggagcgatttcgaactattaccggagcttattaccgtggagccatgggcatattgcttgtttatgatgttactgatgaagcatctttcaacaatattaggaattggattcgcaacattgaacaacatgcttctgacaatgtaaacaagatacttgtgggtaacaaggctgatatggatgaaagtaaaagggctgtgcctacctccaaaggtcaagcccttgctgatgagtatggtatcaagttttttgaaaccagtgcgaagacaaacatgaatgtggaggaggttttcttttcaatagcaagagatatcaagcaaaggcttgcagacacagattctaaggctgaacctcagactatcaagattaaccaacccgaccaggcagccaccgggggtctagct

SEQ ID NO: 6169 - DNA, 440 bp, Glycine max
gaagaagcgaaatctcctagaaagcgagtttctctcttctctctctcaattttcacatagtcagcgaaaacaaacaaactattggaacacgaaacacaaacatcataacataagcagcagcagcagcaccacccaccttgttcattgttttgaattcaactgagaaaaacgacaaacgaggatgtttcaagagagcagcgcgacacggtggccgactcagccgactcagtggactcgctaccacgacaagctcttcgagcgggctctgctggtcgtgccggaggacctgccggaccggtgggagaagatcgccgaccaggttcccggcaagtcggcggtggaggtcagggaacactacgaggccctcgttcacgacgtcttcgagatcgactccggccgagtcgaggtcccgagttacgtcgatgactcggtggcgacac

SEQ ID NO: 6170 - DNA, 292 bp, Glycine max
gacgacgcgtcaacggagacattggccatggattatcatcgaggagctggtgttgaggttcgtattgctcgaattttcaatacatatggaccccgcatgtgtttggatgatgggcgtgtcgttagcaattttgttgcacaggctattcgtaaacaaccattgactgtatatggtgatgggaagcaaacaagaattttccaatatgtctcagatttggtaaatgggctggtggctttgatggaaagcgaacatgtgagacctttcaacctgtgtaaccctggggagtttacca

SEQ ID NO: 6171 - DNA, 439 bp, Glycine max
ccggaagcttgttattgcttccgcttggaggaaacagatgccgaagctcgcgctttcgcttggtctcgctcagcaaatgcctgatatgattgaagagttgatcagcaaagggcagcagcttgatgcggttcactttacctatgaagtgggtctggtggaaaagttccctcctgttcccttgttgaagtcttttctcaaggatgctaagaaagttgcggcttctattttggaagatcctaataatgcaggccgagctgcgtacctagctgcaaggaaagagcagtctgcactcagggctgtgattaaatgcattgaagaatacaaacttgaggatgagttccctccagaaaatctgaagaagcgacttgaccagttagagaaggtgaagaccgagaaaaggaaaccagtggcagttcctgccaataagagaactagagca

SEQ ID NO: 6172 - DNA, 313 bp, Glycine max
  modified_base (4)..(4): a, c, g, t, unknown, or other
tcgnccacgcgttcgggcagcagcttgatgcggttcactttacctatgaagtgggtctggtggaaaagttccctcctgttcccttgttgaagtcttttctcaaggatgctaagaaagttgcggcttctattttggaagatcctaataatgcaggccgagctgcgtacctagctgcaaggaaagagcagtctgcactcagggctgtgattaaatgcattgaagaataccaacttgaggatgagttcccttcagaaaatctgaagaagcgacttgaccagttagagaaggtgaagaccgagaaaaggaaaccagt

SEQ ID NO: 6173 - DNA, 446 bp, Glycine max
ccgatttgtaccggaagcttgttattgcttccgcttggaggaaacagatgccgaagctcgcgctttcgcttggtctcgctcagcaaatgcctgatatgattgaagagttgatcagcaaagggcagcagcttgatgcggttcactttacatatgaagtgggtcttgtggaaaagttccctcctgttcccttgttgaagtcttttctcaaggatgctaagaaagttgcggcttctattttggaagatcctaacaatgcaggccgagctgcgtacctagctgcaaggaaagagcagtctgcactcagggctgtgattaaatgcattgaagaatacaaacttgaggatgagttcccaccagagaatctgaagaagcgacttgaccagttgtgagaaggtgaagacggtgaagaccgagaaaagggaaaccggttgctgtcctgccaataa

SEQ ID NO: 6174 - DNA, 368 bp, Glycine max
  modified_base (251)..(251): a, c, g, t, unknown, or other
caacagctcccccgacggtgaggtcgacgacaccaccggcctgatgctcaaactcaagggcttgtgcctacgcatggacgcattcgggttcttcgccttcgtcagcgccaagaagaaggagctcgacggcctacgcgccgagatgcctgtggctctggcggagtgcgttgatccggcgaaattcgtgctggaggcgatctccgaggtgtttgcggtcgacaagagaggggacaaggccgggcacgacttgngctgggcctgcgtacttgtcctggagtcgctgattccggtcgtggtcgaccccgtcatcggaaaatcgaggctgttggtgactcctattgcgaaggagcaagccacggagatcgcag

SEQ ID NO: 6175 - DNA, 424 bp, Glycine max
cccacgcgtccgtccacgcgtacgccttcgtcagcgccaagaagaaggagctggacgggctacgcgccgagatgccggtggcgctggcggagtgcgtcgatccggcgaaattcgtgctggaggcgatctcggaggtgtttccggtcgacaagagaggggagaaggccggccacgacttgggctgggcctgcgtccttgtcctggagtcgttaattccggtcgtcgtcgaccccgtcatcggaaaatcgaggttgttggttacccctaccgtgaaggagcatgccacggagatcgcggagacttggaagagcagcctggaggatcgtggcggcgtggaaaacctgaagacacctgacgtccacactttcttgcagcacgttgttaccttctggattgtcaagaacgatgacttcgatttgtaccg

SEQ ID NO: 6176 - DNA, 454 bp, Glycine max
ggccgatgcgttggtgcagggctccattgttggctccgcgggcgagctgcccgataggtatatgcaagctgtcatcgccggcactgctgcttctggagtgcttgtttctgccctgaggatatttacaaaagctgtttacccacaagatgcctctggcctgcaaaagagtgcaaatctctacttctctgtatcaatcgtgattgtgttcttatgcatggttttctacaacatggtgcacaaacttcctgtgatgaagtactataaggaacttaaggttgaggcagtcactgcaaatgaagacaatggtcccctgactggacctgtctggaggtcaactgtatggaatattgtgcggagaatcaggtggtacgggtttggcattgtgctcatttatgttgtgactctggcaatatttcctggttacattacagaggatgttcactctcaaattctt

SEQ ID NO: 6177 - DNA, 422 bp, Glycine max
ggggtcgtgttggagtgatcaagaacagagagaagcataagggaagctttgagactatccatgttcaggatgccactggccacgagtttgcaactcgtatgggcaatgtgttcaccattggcaatggaacaaaaccatggatatctcttcccaagggtaaaggtattaaactatcaatcattgacgaagctaggaaaaggattgccgcccaacaagcaactgctgcttaaatctttaggaaatgaatagactttgagtgtttggtagtttttatttaatggttttggtttctaatttattttgtcttgaaattttatccactgaatttcgtctcttaaatgctctatagaactttttattgcggcttctatgttcatgaatgaatctttccaaataaacaatccaataaacaaggcggccgc

SEQ ID NO: 6178 - DNA, 427 bp, Glycine max
accagagaacttccgcctgctgtatgacaccaaaggccgattccgtcttcactcagtcatagatgacgaggctaagttcaagctttgcaaagttcgctcagtgcagtttgggcaaaaaggtatcccatacttgaacacctacgatggtcgcactatccgctacccagaccctctcatcagagctaatgacaccattaagttggatttggaggagaacaagattgtcgatttcatcaagtttgatgttgggaatgtagtcatggtgacaggtggaaggaataggggtcgtgttggagtgatcaagaacagagagaagcataagggaagctttgagactatccatgttcaggatgccactggccacgagtttgcaactcgtatgggcaatgtgttcaccattggcaagggaacaaaaccatggatatct

SEQ ID NO: 6179 - DNA, 157 bp, Glycine max
aaatggcagttcaagctcttctaaggttaggtcagtacagtttggccagaaggggatcccatacctgaacacctatgatggtcgcaccatccgttacccagaccctctcatcatgtcctatgacactgataatctggatcttgaagaataataatat

SEQ ID NO: 6180 - DNA, 427 bp, Glycine max
cccacgcgtccgtattcttcgtgtcttgttgtgtttttcatctgagatgtgtggaggagctatcatctctgatttcattccggcggcggcgatcgccgggtctcgccgcctgaccgccgattacctgtggccggatttgaagaagcggaagtctgacttggacgttgacttcgaggctgatttcagggattttaaagacgattctgatatcgacgacgacgacgacgatcaccaagtcaagccctttgctttcgccgcctcttctcgtctgtctacggcagcgaaatctgtggcattccaaggtcgggctgagatatctgcaaatagaaagaggaagaatcagtataggggaatccgtcaacgcccttggggaaaatgggcagctgagattcgggatccaagaaagggggttcgtgtctggcttgga

SEQ ID NO: 6181 - DNA, 429 bp, Glycine max
  modified_base (348)..(348): a, c, g, t, unknown, or other
gttaaccagtatgttaaccctgccccgttccctggaaacggagttcaagtctcacctgttactccatctgctgatgttactgcttacttcagctctgagcattcgagcaactcgtttgattattctgaccttggatggggtgaacaagtccccaagacccccgagatctcatccttgctttctgctgctcctttggagggtgctgctgatcaggttcagaagaccaacaactcgcaggatgtggtggctgcacaagatgattctgcaaaaaccctttccgaagagcttgcagacattgaatcccagctcaagttctttgagaccccttcttttcttgatgaagcctgngctgatgctacattggcgtctttgctcggcggagacgcaactcatgacgccgccggaaaccctatgaacctttggagcttc

SEQ ID NO: 6182 - DNA, 343 bp, Glycine max
aatgaaagaaaatcttaacactgtgaaaccggaaaatgagccatattgacaatgatgatcacaatcttgaaggctactacagtccaatagatcatgtggaacaagaaccactggttaaccagtatgttaaaccctgccccgttccctgtaaacggattttaagtctcacctgttactccatctgctgatgttactgcttacttcagctctgaacattctagcaactcgtttgattattctgaccttggatggggtgaacaagtccccaatacccccgagatctcatccttgctttatgctgctcctttggaggttgctgctgatcaggttcagaaaaccaaca

SEQ ID NO: 6183 - DNA, 396 bp, Glycine max
ggtgaatccagaggctcagccaatgaaggaaaatctgaacaccgtgaatccggaaatgggccagatgttcaattttggtcacaatctggagggctactacagcccaatagatcaggtggaacagaaaccactggttaaccagtatgttaaccctgccccgttccctggaaacggagttcaagtctcacctgttactccatctgctgatgttactgcttacttcagctctgagcattcgagcaactcgtttgattattctgaccttggatggggtgaacaagttcccaagacccccgagatctcatccttgctttctgctgctcctttggagggtgctgctgatcaagttcagaagaccaacaactcgcaagatgtggtggctgcacaagatgattc

SEQ ID NO: 6184 - DNA, 395 bp, Glycine max
gtgtttttcatctgagatgtgtggaggagctatcatctctgatttcattccggcggcggcgagcgccgggtctcgacggctgaccggcgattacctgtggccggatttgaagaagcggaagtctgacttggacgttgacttcgaggctgatttcagggattttaaagacgattctgatatcgacgacgacgacgacgatcaccaagtcaagccctttgctttcgccgcctcttctcgtctgtctacggcagcgaaatctgtggcattccaaggtcgggctgagatatctgcaaatagaaagaggaagaatcagtatacgggaatccgtcaacgcccttggggaaaatgggcagctgagattcgggatccaagaaagggggttcgtgtctggcttg

SEQ ID NO: 6185 - DNA, 430 bp, Glycine max
  modified_base (349)..(349): a, c, g, t, unknown, or other
ctccgacttcattccagcgggtcccgccggcggggcgcagcgcgtgaccgccgacatgctgtggccgaatttgaggaagcggttctcgaagtcgctgctggacgatgatttcgaggcagggttcagagaattcgaggatgactcggaaatcgaggatgtcgatgatgaggacgatgaagaggaggaggagttgaagaagaagaagccctttgggttctctcgctccaacaacaaggctgcttctaagcctctctctcgtggagcaacaactgtgaaatctgtggaatcaaaggggcaagctgagaagtgtgccaagagaaagaggaagaaccagtatcgcggaatccgncagcgttcatggggaaagtgggctgctgagattcgcgacccaagaaagggggttcgggtttggcttggaactttcagcact

SEQ ID NO: 6186 - DNA, 402 bp, Glycine max
  modified_base (390)..(391): a, c, g, t, unknown, or other
agggatccttggccccaaggccaattgcatctccttcaaggactctgcatgccgttgctttggctacatggtctccaaaaagaagtacatctacaccattgatgatgactgctttgttgccactgatccatctggacacaagattaatgcacttaaacagcatatagaaaacctcctctgtccatccacacccttttttttcaacaccctctatgaacctttccgagaaggtgcagattttgttcgtggttaccctttcagtctccgggaaggtgtaccaactgcagtttctcatggtctttggctcaacatcccagactacgatgctcctacccagcttgtgaagcctcttgagaagaacactaggtatgtggatgctgtttttgacanntacaaaggcac

SEQ ID NO: 6187 - DNA, 409 bp, Glycine max
ttctcaagggctgaacctccaacatccggtttcggcgtaatcggttgccccgccatcggccgcagggtttggggcgcaatttccttggcccccaaggccgccctttacgccgtcggcagccgttccctcgacaaggcgcgtgccttcgccgccgccaacggtttccccgccgccgccaaggtgcacggttcctacgaggcggtcctcgacgatcccgacgtcgacgccgtgtacgtaccgctccccactagcctccacgtgcgctgggccgtgctcgccgcgcagaagaagaagcacgtcttgctcgagaagcccgtcgcgctccacgcggcggagttcgacgagatcgtcgaggcgtgcgaatccaatggggtgcagctcatggacggtacgatgtggatgcaccacc

SEQ ID NO: 6188 - DNA, 428 bp, Glycine max
  modified_base (377)..(377): a, c, g, t, unknown, or other
  modified_base (389)..(389): a, c, g, t, unknown, or other
aaatccttttcccttctcggtccaaaggggtgccctgagatcacattgaacaatggtgaaggctgtggccgttcttggcagcagtgagggtgtcactggaactattcacttcgttcaggagggaagtggtccaaccaccgtaactggatctcttgctggtcttaagcctggtctccatggtttccatgtccatgccttgggggacactaccaatggttgcctctcaactggatcacatttcaatcctaataacaaggagcatggtgcccctgaggatgagaatcgtcatgctggtgatcttgggaatgttaatgtcggtgatgatggtactgtcagcttcactattactgacagccagattcctctcactggaccanacaacatcatangaatggcggttgttgtccatgctgatcctgatgatcttg

SEQ ID NO: 6189 - DNA, 340 bp, Glycine max
cacacgcgtacgctcctttactcttctatgtctaatgggtgccctgagatcacattgagcagtggtgaaggctgtggccgttcttggcagcagtgaaggtgtcactggaactattcactttgttcaggatggaagtggtccaaccaccgtaactggatctcttgctggtcttaagcctggtctccatggttttcatgttcatgccttgggggacactactaatggttgtctttcaactggatcacattacaatcctaataacaaggagcatggtgcccctgaagatgagaatcgtcatgctggtgatcttgagaatgttaatgtccgtgatgatggtact

SEQ ID NO: 6190 - DNA, 344 bp, Glycine max
ctagtttataaaatgattggcaatctgtgatataatgttgtatgaacagagaccaggcgtcttttttttgtgtgtcatatggtattggaaaggatactgtataatgggatatccaattaattattatctgttgcaatctttcttgtgttacttccacagtcccacaacacatagggtcctaactcataagtgcccccattttaaaattttgggtcagcatctggtggtcctataggaactagaaatgtcattgtagcaacattattctcttggaaagaacatttttcattacagctataatggcgcataaaaaaatataataaaaagaaatatgaatacaaggg

SEQ ID NO: 6191 - DNA, 444 bp, Glycine max
  modified_base (323)..(323): a, c, g, t, unknown, or other
gtgtacttggcgaagctgtcggagcaggcggagcggtacgaggagatggtggagttcatgcagaaggtggtggtggggtcgacgccggcgtcggagctcacggtggaggagcgcaacctcctctcggtggcctacaagaacgtcatcggctcgctgcgtgccgcgtggcgcatcgtctcctccatcgagcagaaggaggagggccgcaagaacgacgaccacgtctccctcgtcaagcactacagatccaaggtcgagaacgagctcactcaggtctgcgccagcatcctcagcctcctcgactccaacctcgtaccctccgncttcgccagcgagtccaaggtcttctacttgaagatgaagggcgattaccaccgctatctcgccgagtttaaggttggggacgaaagaaaaaccgctactgaggataccatgttgtcttac

SEQ ID NO: 6192 - DNA, 396 bp, Glycine max
cttttatcagctaaggccacctttggggagaaagaatggtatttcttcagtcctagagaccgaaagtacccaaatggtgcaaggccaaacagggcagctgcttcagggtattggaaggccactggcactgataagaccatagtgacatcattgcaaggaggagcacaagagagcgttggtgtgaagaaggctttggtgttttacaaaggaagacccccaaagggtgtcaagaccaattggatcatgcatgaatatcgccttgtagacaacaacaaacccatcaagctcaaagactcctccatgagagtaagtgtcacatgtccctactagcaataaggttttttagattacattttcatagtaattcttgatattgtcgaacttaggagaaattat

SEQ ID NO: 6193 - DNA, 447 bp, Glycine max
agagcatcaaactcttcttcttcgatttccattgcgaagcgttactttttcttcttctgggtcttgattttcttcgctcttcgatcttcgtccggggactgctccgaataccaccaccaccactcgccgatggccacgatcggaggcttacacgactcccaaggctctcaaaacagcgtcgaaaccgaagccctcgctcgattcgccgtagacgaacacaacaagaagcagaattcgcttctggagtttgctagggtggttagggcacaggaacaggttgttgctggtaccctgcatcaccttactcttgaggctattgaggctggtgagaagaagctctatgaagccaaggtgtgggtgaaaccatggctgaatttcaaagaactccaagagttcaagcctgctggtgatgcaccatcgtttacctctgctgatcttggtgtcaaa

SEQ ID NO: 6194 - DNA, 411 bp, Glycine max
ggaaaagcagaggagaattgccttctagaagcgttatctcgcagagatgggcactgtttctctgcttaggaagtttctgtgctggaatgctcttcactacaaggatatggactatacctgaaaacaacaaaggactagcacggccaacagcctcagaagctgaaaaattgagtttagtttcagaaggctgcaattccagaattttgcaagagatggaaatgaagcacgataaagacacttatggtgaagttttcaagagtcataattccatacaaacattggacaaggctatttcaaacttagagatggaattggctgctgcaagggcaactcaagagtctctacgaagtggtgctcctatttcagatgatataaggttgagtgaatcttcgggtaagagaaagtacctta

SEQ ID NO: 6195 - DNA, 325 bp, Glycine max
gtcatcgtgtcgttcaccgataagatgtcgtattcaaggagatcaaggtattctcgttctccttctccatacaagcgatacagtaggtctgtgtccaggtctctcgcaaggacaagctccagaagccgttcaaggagtttatcaggagatgcagaagatccaggaaacaatttgtatgtgacaggattgtctcctaggatcaccaagagagaactggagaagcatttttctgctgacggaaaagtgatagatgtcgatctggtagttgatccttggacaagggaatcccgtgggtttggctttgtgacaatcgagactcttgagg

SEQ ID NO: 6196 - DNA, 357 bp, Glycine max
gcagatctgagaccacctaccagattgctttgtctatcaaggacgaagtggaagaccttgaaaaggctggcatcactgttatccaaattgatgaagctgctttgagagagggtcttccactgaggaaatcagagcaagctcactacttggactgggctgtccatgccttcagaatcaccaatgttggtgtccaggataccacccaggtacactcttttggatcatcgcatatcactgaattataaattttttttgttcatcctcattttcacatatgtatgtaataatctaacttttcgtatagacagatccacactctcatgtgctacttcgacttcaaccgacttcatccattcc

SEQ ID NO: 6197 - DNA, 304 bp, Glycine max
acgcccacgcatccagagtgaccaaccacgctgttcataaagctgctgctacattgaatgactgggatgatctccgtgcaacaaatgtcagtgccaaactggattctcaacataagaagctcaacctttcaatcctgccaaccaccactattggatccttccctcatactgtataactgatgatggtactccgtgaattcaatgctaacatgatctcctaggaatagtatgtaaagtcaattaatgaggaaattctcaaagttgtttagctctaataatagcttgatatttatgttcttgttca

SEQ ID NO: 6198 - DNA, 335 bp, Glycine max
cccacgcgtccggagtgaccaacgaggctgttcagaaggctgctgctgcattgaagggttgagatcatcgccgtgcaacaaatgtcagtgccagactggattctcaacaaaagaagctcaaccttccaatcctgccaaccaccactattggatccttccctcagactgtagaactgaagagggtacgccgtgaattcaaggctaacaagatctccgaggaagagtatgtaaagtcaattaaggaggaaattcgcaaagttgttgagcttcaagaagagcttgatattgatgttcttgttcatggagaaccagagagaaatgatatggttgagtac

SEQ ID NO: 6199 - DNA, 216 bp, Glycine max
actcccacgcttgctcagtgaccaacgaggctgttcacaatgctgctgctgcatttaaagattcgaatcgtctccattcaacaaatgtcagtgccatactggattctcaacaaaagaaactcaaccttccaatactgtcaaccaccactattgtatccttccctcagactctataactcatgaaggtactccccgaattcaaagctaacaagatct

SEQ ID NO: 6200 - DNA, 421 bp, Glycine max
gatcatcgccgtgcaacaaatgtcagtgccagactggatgctcaacaaaagaagctcaaggttccggtccttccaaccaccactattggatccttccctcagactgtagaactgatgagggtacgccgtgagttcaaggctaacaagatctccgaggaagagtatgttaagtcaattaaggaggaaattcgcaaagttgttgaacttcaagaagagcttgatattgatgttcttgttcatggagaaccagagagaaatgatatggttgagtacttcggtgagcaattgtcaggctttgccttcactgttaatgggtgggtgcaatcctatggttcccgttgtgtgaaaccaccaatcatctatggtgatgtgaaagccgtccaagccaatgactgtcttctgtcatctctggctaaagctt

SEQ ID NO: 6201 - DNA, 393 bp, Glycine max
  modified_base (377)..(377): a, c, g, t, unknown, or other
cggacgcgtgggcggacgcgtgggctgacgcgtggggtacgatcaaaagcattgagattgttgagcctgccaagcccaaaccaccacctcaaccagaaaagcccaaggaaccagagaagccaaaagagccacagaagccgaaagagccagagaagccgaaagagccagagaaaccgaaggagccaccgaagcctaaggaacctgaaaaaccaaaggaaccagagaagcccaaagagcctgagaagcccaaggagccagagaagcccatagagcccgagaagcccaggaacccgagaagcccaaggagcccgagaagcccaagcctgaatgccctcctccggtgccggtttgtcccgcaccggtgccagtgtgtccgncacagccaacaccttc

SEQ ID NO: 6202 - DNA, 382 bp, Glycine max
gttacttactcctcacactttctctatcgttttcatctctgtttcagatctgagctcgcgtatattccccagccatggccgaaaaggtcaccataatgaggctcaaggttgatcttcagtgccacaaatgctacaagaaggtcaagaagattctctgcaaattccctcaaatccgagaccaggtgtacgacgagaagaataacatcgtgaccatcgcggtggtttgctgtaaccctgagaagctcagggacaaaatttgctgcaaaggttgtggtacgatcaaaagcattgaaattgttgagccttccaagcccaaaccaccacctcaaccagaaaagcccatagaaccagagaagccaaaagagccacagaagccgaaaga

SEQ ID NO: 6203 - DNA, 440 bp, Glycine max
cccacgcgtccggctcagacacgcacagatctgatctgatctgatctatctgaagccgaaaacgccgacggtgatgatgaagatggggtgttcacgttgctccttcttcctcttcctcatcctcttagtggcgctcttcccctcgtcgctctccgagatccgcttctccgagatccgaaacgacgatcgccgcatcatccccttcgatcagtttggattcacccacaagggtcgccttgagctcagcgtttccaaaatctcactctccaattccaatttggacctctcgaaggtcggcttctttctctgcaccctcgattcctggcttcatgtcctccagcaactcgaggacggtgagattcggtgcgcccttcaatccgatctggtcaagtccgtctattccttcaattctctaaacggcaaggactctttcagcacgc

SEQ ID NO: 6204 - DNA, 427 bp, Glycine max
aaaacatagaacgaagaagaagaacagatcagaaaaatggcgtccaaagttccaaagaaggccaatctcctggatcaccactccatcaagcacatccttgacgagtctgtctccgaggtcgtaacgagtcgtgggtatgtggaagacgtgagattgagcaatgcgaggcttttcattggggcaatcatcatcgtcattgctttattcgctcaattctacaagaagaagttccccgaaaatagggattttctcatcgcttgcatcgccttgtatgtgatcttcaatgggttgttgcagctgatcatatacactaaggagaaaaatgccattctgtttacttatcctcctgttggatcctttactagtaccggtttggtggtttcctccaaattgcctagattttctgacatgtacacactcactatag

SEQ ID NO: 6205 - DNA, 427 bp, Glycine max
taagggttattaagagagagaaagagatacatagttagagagagagcagagacaccgttcggtgctccgctgaattcggttgtggcccctgcgctccgctgcaattttacactcaaaaggacctcatgtctaacatagaggagaacaaagatctgggacagatggacgtggatgcatctgatgagtcagctaacatgccatcaccccaaaagcaggaggagtctgtaaagaaaaagtatggaggaatgctgcccaaaaagccaccactcatatctaaggaccatgaacgtgcttacttcgattctgcggattgggcacttggaaagcaaggcggagagaagcctaagggaccacttgaggctcttcggcctaaattacagccaacgcatcatcaaacacgttaccggaaatctccttatgctccttc

SEQ ID NO: 6206 - DNA, 409 bp, Glycine max
tgtagttagaattttaaaacttagtagttatttactgtgtttcttttttgtacttttggtgagtgtcaggtacttgatagcctcacacacaacagactatcagaatccaatgttcttattcaacactgttgcagtgattgtgctggttgttgcaaagttcccccacatgcacaaggtcaggatatttggaatcaatgctgataagtgaaatgttgctgtggccatgacacttggttaccactccttacctgctcaagagcctcttgtacttttgttctggaaaaaaaggtcacacctttgtatagaaggcagaactggaaggatactcaagtaatgttttgttgccaactgctttttaagctgcttctaaaagtattattaaacaaagtaatatgttgagttaattctg

SEQ ID NO: 6207 - DNA, 451 bp, Glycine max
  modified_base (419)..(419): a, c, g, t, unknown, or other
cggacgcgtgggttttttcactggaagaaaggaactccatttgcggaggaccaggggatgtacaatagattgacttggtgggagcaggtagacaatggaaagcagcttactcggaacaggaagtttctcacagttgttcctttggtgctgtacttgatagcctcacacacaacagactatcagaatccaatgttcttattcaacactgttgcagtgattgtgctggttgttgcaaagttcccccacatgcacaaggtcaggatatttggaatcaatgctgataagtgaaatgttgctgtggccatgacacttggttaccactccttacctgctcaagagcctcttgtccttttgttctggaaaaaaaggtcacacctttgtatagaaggcagaactggaaggatactcaagtaatgttntgttgccaactgctttttaagctgcttctaaa

SEQ ID NO: 6208 - DNA, 311 bp, Glycine max
cccacgcgtccggtgggacatgtgcacgactattcaaatctgaagtacaatttggtgatgcgggagccaaaagtggtggtgagttggagtctgctcaagcaaagaatcaggcactaagggatgctggagctgttgttcccacatcatatgaagcttttgaagtttcaattaaggaaacatttgataaattggttgaagatgggaagatcacaccaatcaaggaaatcacaccttcaccaatccctgaagaccttagtactgcaattaagagtggaaaagtccgtgctccaacttatattatttccaccatt

SEQ ID NO: 6209 - DNA, 457 bp, Glycine max
cccacgcgtccgcccaactcgccctcgactcacatccttgtccgattccgcgaacgagtcgagtgaatcgggttggtaagatctattctgtttcttcgtcatggcaaccggacaactattctcgcgtactacacaggctttgttttacaactacaagcaacttcccatccagcggatgcttgattttgacttcctttgcggcagggaaacaccatcagttgctggaataattaaccctggttctgagggatttcaaaaacttttttttggtcaggaggaaattgccatcccagtgcatgctaccgttgaagcagcttgtgctgcacatcctactgccgatgtcttcatcaactttgcttcatttagaagtgctgcagcatcatccatggctgctttaaaacagccaacaattagagttgttgctattattgctgaaggagtacccgagtcagacact

SEQ ID NO: 6210 - DNA, 460 bp, Glycine max
cccacgcgtccgcaactataatcaacttcccattcagcggatgcttgattttgacttcgtttggggcatggaaacaccatgagttgctggaataattaaccctggttctgagggatttcaaaacttttttttggtcaggaggaaattgccatcccagttcatgccaccattgaagcagcttgtgctgcacatcctactgctgatgtcttcatcaactttgcttcatttagaagtgctgcagcatcatccatggcagctttgaagcatcctacaattagagttgttgctattattgctgaaggagtacccgagtcagacactaagcaattgattgcatatgcccgatcaaacaataaggttgttattggtccatccactgttggaagcattcaagcaggtgcttttaaaattggtgacacagcttgaacaattgacaatataattcagtgcaagctctaca

SEQ ID NO: 6211 - DNA, 347 bp, Glycine max
cacgcgtcagagagtctagaaacaacacaacacaacgcgaatggctacggcgctggagaagaaagcgaaggaggcattcttcgacgacgaattcggtctggccgtcgatctctactctgaagccatacgattggatccgaacgacgccaatctcttcgcggacagagcccaagcccatatcaaactcaacgctttcactgaagccgtttccgatgccaacaaatccatccaattaaacccttccttgcccaaggcctatcttcgtaaagccaccgcttgtatcaaactccaagaatatcacaccgccaaggtagcgcttcaaaacggtgccgcttttgcccaagacg

SEQ ID NO: 6212 - DNA, 461 bp, Glycine max
cccacgcgtccgacacaacacaacgcgaatggctacggcgctggagaagaaagcgaaggaggcattcttcgacgacgaattcggtctggccgtcgatctctactctgaagccatacgattggatccgaacgacgccaatctcttcgcggacagagcccaagcccatatcaaactcaacgctttcactgaagccgtttccgatgccaacaaatccatccaattaaacccttccttgcccaaggcctatcttcgtaaagccaccgcttgtatcaaactccaagaatatcacaccgccaaggtagcgcttcaaaacggtgccgcttttgcccaagacgattcaagattcgccaacttgattcaacaatgtgatcgctgcattgcagaggaatcaagtggccttactagcaccttgtcttcccatttgagcaatagaaatcatgggatgactaaagaagaagctg

SEQ ID NO: 6213 - DNA, 354 bp, Glycine max
cgtccgaccacacgtccgcccacgcgtccgcccacgcgtccggccttggccgacaggtccgggtaatctttgaaatttcatcgtgatggccggaccaatcttgcattcatcacttgtgtcttcgactgattctcaccctgctaaaaagacatcaacatcaagggcaagtaaaggaaaacttgcgcctgctggtggtggaaggctgggtaagattgatgaagaaaaagctttcagtggaaatccactgaaatcaacatctgaaaacactgagcctcgtagatccattcgcaggattcagccgacgtcaagactattagaaggattgcagagctcttgaattagctcaaagattcc

SEQ ID NO: 6214 - DNA, 444 bp, Glycine max
gtgttctcttcttcacactgcagttgatctggtgaatgagaccaaattggaccaagagattaagtcttggcttgcatttgcagcacaaaaagttgttgaagtaaatgccttggccaaggcattgtctggacagaaggatgaggttttcttttctgctaatgctgctgccttggcttcaaggaagtcctccccaagggtgataaatgaggctgtccaaaaagccgctgctgctctgaagggctctgatcatcggagggccacaaatgttagtgccaggttggatgctcaacagaagaaattgaatctttctgttcttccaacaactacaattggatctttccctcaaactgccgatcttagaagagttcgtcgtgaattcaaggctaacaagatctccgaggaagattatatccgtttcattaaggaggaaatttacaatgttgt

SEQ ID NO: 6215 - DNA, 370 bp, Glycine max
agaaattgaatctttctgttcttccaacaactacaattggatctttccctcaaactggcgatcgtagaagagttcgtcgtgaattcaaggctaacaagatctccgaggaagattatatccgtttcattaaggaggaaatttacaatgttgtaaagctccacgaagaacttgacattgatgtcttggtgcatggaaagcccgagaggaatgacatggttgagtactttggagagcaattatctggctttgcatttactgccaatgggtgggtgcaatcatatggatcccgctgtgtcaaaccttccatcatctatggtgatgtgagccgttccaagcccatgacaagtttctggtcttcaactgctcaaag

SEQ ID NO: 6216 - DNA, 406 bp, Glycine max
tcgacccacgcgtacgattcactaatcactaccaattgctaaagatatttcactcactggtcacactactaatacatctttctggacatggcttcaactgtctcttacatgcttctacttctccttctagtgatggttgcctttgctggggacttacacaaagactttgacatcacatggggagatggccgctccatgatactaaaccatggagagttactcactctttcattggacagagcatctggctcaggttttcaatcaaagaatgagtatctctttgggaagattgacatgcagctcaagcttgtccctggaaactctgctggcaccgtcactgcctattatttatcttcaaaacgatcaacttgggatgaaatatactatgaatttcttggaaatctga

SEQ ID NO: 6217 - DNA, 436 bp, Glycine max
  modified_base (404)..(404): a, c, g, t, unknown, or other
gcatctgcagctatcttcaaaaggatcaacttgggatgaaatagactatgaatcacttggaaatctgagtggcgatccatacatccttgacacaaacgttgctagccaaggcgagggggacagggaacaacaattctatctatggtttgacccaactgctgatttacacacttactccatcatgtggaacccccaaaggattatattctcagttgatggcactcccattagagagttcaagaactcggaggctatcggggatcccttcccaaagaatcagccaatgaggatatattctagtttgtggaatgctgatgactgggcaacaagaggtggacttgtgaagactgattggacacatgctccgttcacagcttgctacagaaactttaatgctgacgctngcatatggtcttctggagcatcttcttgcgct

SEQ ID NO: 6218 - DNA, 384 bp, Glycine max
cccacgcgtccgaattgctaaagatatttcactcactggtcacactactaatacagctttctggagatggcttcaactgtctcttacatgcttctacttccccttctagtgatggttgcctttgctggggacttaaacaaagactttgacatcacatggggagatggccgctccaagatactaaaccatggagagttactcactctttcattggacaaagcatctggctcaggttttcaatcaaagaatgagtatctctttgggaagattgacatgcagctcaagcttgtccctggaaactctgctggcaccgtcactgcctattatttatcttcaaaaggatcaacttgggatgaaatagactatgaatttcttggaaatctg

SEQ ID NO: 6219 - DNA, 468 bp, Glycine max
cccacgcgtccgatcactaccaattgctaaagatatttcactcactggtcacactactaatacagctttctggagatggcttcaactgtctcttacatgcttctacttccccttctagtgatggttgcctttgctggggacttaaacaaagactttgacatcacatggggagatggccgctccaagatactaaaccatggagagttactcactctttcattggacaaagcatctggctcaggttttcaatcaaagaatgagtatctctttgggaagattgacatgcagctcaagcttgtccctggaaactctgctggcaccgtcactgcctattatttatcttcaaaaggatcaacttgggatgaaatagactatgaatttcttggaaatctgagtggtgatccatacatccttcacacaaacgttttcagccaaggcaagggggacagggaacaacaattctatcta

SEQ ID NO: 6220 - DNA, 413 bp, Glycine max
  modified_base (335)..(335): a, c, g, t, unknown, or other
  modified_base (351)..(351): a, c, g, t, unknown, or other
  modified_base (379)..(379): a, c, g, t, unknown, or other
  modified_base (398)..(398): a, c, g, t, unknown, or other
ggaaaatctgccaaagacaatctttgtgatagttagtgaatcaaggatggaccttctaagggctgttataattgaacctcaaggcaccccataccatgatggtcttttctttttcgattgcctctttccttctacctaccctgcaggtccaccgaaagttcactaccattcaggtggcctaaggctaaatccaaatttatataattgtggaaaagtctgccttagtctcttgggcacttggcatggtagtaatagtgaaaattggataccagaaaaatcaaccatgctacaagtgttggtttcgatacaagctctaattctaaatgagaagcctntttttaatgagcctgngtatacgtcaacatatccttgtgctgangggcaaaagaagatctaangagtacaacgagagt

SEQ ID NO: 6221 - DNA, 338 bp, Glycine max
cgtaagcccacacgtccgcccacgcgtccgggaatatgttcaacacaagatgatggatcaagctgcattctctagagagggggccgaaaaggaatatgttcaacacaagatgatggatcaagctgcacagctgtggagtttgatttctcaaagaggttatctttacgtctgtggtgatgccaacggtatggccagagatgttcatcgaactcttcataccattgtccagcagcaggaaaatgtggactcgacaaatgctgagagctatagtgaaaaaacttcaaatggatggacgttacctaaaggatgtgtggtgatttttctgatcattcctctgc

SEQ ID NO: 6222 - DNA, 425 bp, Glycine max
  modified_base (366)..(366): a, c, g, t, unknown, or other
  modified_base (400)..(400): a, c, g, t, unknown, or other
ggactcttgaagtggaaatatgcttatctgaattcagttgattttcttttcgaggttgatggtgatcgtgagctactttttctcaatgagcggggaaagaagaaacttttggaagggaatagggttgaattcacagatggttcagatccctcactttattctggaaagataattgaatgttcttgggattttgacaaactggaatggaagtatatgcgaatcagaacagataaatcaactccgaatgagtttaatacttacaggaaggtgctgcgaagcataagagacaacatcaccgaggaagatttgttgaatgaaataagtgagataattcgccttcccatgtatgctgaccggatcagaatngatagtaaagcgaatcagcatgctaatgtcgcanggcgaaagtgatttggtggggttaa

SEQ ID NO: 6223 - DNA, 433 bp, Glycine max
cccacgcgtccgcacaattgtttgatgagctggttgagtctaaagttcatataaaagtttcaaccctaaatgccatgcttgatgtttactgcttaaatggtttaccgcaggaagcagattcactgtttgaaagagcaattagtataaaaatacatcctgattcatcaacatttaaacttctttataaggcttacactaaagccaaccagaaggagcttcttgataaattgctgaagcatatggataaagatggtattatcccaaataagaggttcttcttggatgctttgggtgctgttgcgtctttaccagcaaattcagaatctgctaatgctgcaactgattcaaacacagcaaattcagaatctgctaatgctgcaactgattcaaacgcatcaaattcagaatctgctaatgctgcaactgattcaaa

SEQ ID NO: 6224 - DNA, 383 bp, Glycine max
cccacgcgtccgcacaaagtcacaatggaccccctctctctcttctgcaccggagccctcgtcgccggcggcctctactggttcgtgtgcgttctgggccccgccgagcagaagggcaaacgcgccaccgatctttccggcggctccatctccgccgagaaagtccaagacaactacaaacagtactggtccttcttccgccgcccaaaggagatcgagaccgccgacaaagtccccgacttcgtcgacaccttctacaatctagtcacagacatctacgagtgggggtggggccagtccttccacttctccccctccatccccggcaagtcccaccgcgacgccacgcgccttcacgaggagatggccgtcgatctcatcga

SEQ ID NO: 6225 - DNA, 469 bp, Glycine max
cggacgcgtgggttggaaagcaatgagggtgatcctgagttacttgtcttcattccattgacttcagatgtcaagattaagagcatatccatagttggtggagctgatggaacaagtccttccaagatgagagtgttcatcaatcgagaaggaattgacttttcagatgcgcaaagcatgcaggctattcaggaatgggatttggttgagaatatgcaaggagtattggaataccagacaagatattctaaatttcaaagcgtggcaaatattaccttgcactttcctgagaattttggtggtgacactactaaaatacactatattggctttaaaggcgaagccactcagttgaaaagggatgttgttgccactattgtttatgagcttatgccaaatccttctgaccacaagacacgtgctgaaagtggatggggtctttctcacatagaatgaaatagttacattt

SEQ ID NO: 6226 - DNA, 371 bp, Glycine max
ggtcctgagttccagccacgcgtccgaccacgcgtccggacgaattggaacccaagaatgttgcgccgtcgtcgttgtaagattacgaaggaggatgagcatgatgttgttgttgagaaggtcgtacgtaacaagcgaaagtgcatcaccactgcgaagggactggaactttttggtgtcaagctcagtgatgcttgcaagaaactcgggaaaaagtttgctactggagcctctgttgtcaagggacctactgagaaagaacaaattgatgttcaaggggatatagcttatgatgttgtggagttcattacagatacatggcctgatgttcctgaaacatcaatgttatatatagaagatgggagaaaggt

SEQ ID NO: 6227 - DNA, 407 bp, Glycine max
tacgatacgaagtttcctctatcttctcttctctgagggtagctttgattcattgaaggtttttccttcaccaactttccagaggaagaaagtgacttgatttctgggcctgctcgttttattactgagaaaccaaatacatgatactaaaaactcaaatggaagaaaagcagttagattttaatcagcctcttttatcggtaaggcgaatctcatcaacggcggcctctgaaaatgacaataaaagaaaagctgataaatcagtgcggaaacgacctcctcttccgttttacaaatcagagttaaaatcaggtccagtgactaaccctggaactgttccttttgtatgggagaagactcctggaagacctaagaatgaaagcaaactacaaacaagggctgtcgaa

SEQ ID NO: 6228 - DNA, 424 bp, Glycine max
aggtcccggccgacccacacgtcagagaacctgtgctttttgaggatatactgtgccagattattgacatgattggacctgaggaagagagctatataactctgcgtgacctgaaaggtggtaaactctcaggaagtgttttcaatatcctgttcaatctgaataagttcatggcctttgaaactcgtgacccatttttgattcgtcaggaacgtgagaatcctacattgacagagtgggatcgctttgctcatagagaatatattatgctttctatggaagaagatgtagaggatgcctctaacggtagtgcagaagtttgggatgaatcactagaggctcccttctgacgtcatttattgtatgaaaagatattaacgccccagatcggatggactggccattgttcagagacacatgactc

SEQ ID NO: 6229 - DNA, 426 bp, Glycine max
cccacgcgtccgctctaaaataaaaaaccctaacttctgaacctttcaccgcatcgcgaccgattccctatctccactaatcaaagaaaagaaaatgagtagacgctcgagcagaactgtctacgttgggaatctacccggtgatatccgtgaaagagaagttgaagatttgtttctgaagtacggacacataacacacatcgacctaaaggttcccccaagaccacctggttatgcatttgtagagtttgaagatgctcaagatgctgaggatgcaattcgtggtcgtgatggctatgattttgatggccaccggttacgggtggagcctgcccatggtgggcgtggtcattcatcctcaaaagatcggcacaatagtcacagcaatggccgaggtggacgtggggtatctaggcgctctgaata

SEQ ID NO: 6230 - DNA, 467 bp, Glycine max
ctctcccgtgtcgtgtcgtgtcttcttctctaaaataaaaaaccctaacttctggacctttggccgcatcgccaccgattccctatctccactaatcaaagaaaagaaaatgagtagacgctcgagcagaactgtctacgttgggaatctacccggtgatatccgtgaaagagaagttgaagatctgtttctgaagtacggacacataacacacatcgacctaaaggttcccccaagaccacctgagtatgcatttgtagagtttgaagatgctcaagatgctgaggatgcaattcgtggtcgtgatggctatgattttgatggccaccggttactggtggagcctgcccatggtgggcgtggtcattcatcctcaaaagatcggcacaatagtcacagcaatggccgaagtggacgtggggtatctaggcgctctgaatatcgtggtctagtcactggattgccct

SEQ ID NO: 6231 - DNA, 421 bp, Glycine max
caaaaaccctaaccaagaaagttttcaccgcatctccacctattctcaatctccacagatcgaggaaaagagaatgagtagacgctcgagcagaactgtctacgttgggaatctacctggtgatatccgtgaaagagaagttgaagatttgtttctgaagtatggacacataacacacattgacctaaaggttcccccaagaccacctggttatgcattagtagagtttgaagatgctcaagatgctgaggatgcaattcgtggtcgtgatggctatgattttgatgggcaccggttacgggtggagcctgcccatggtggacgtggtcattcatcctcaagagatcgatgcactagtcacagcaatggccgaggtggacgtggggtgtctaggcgctctgaatatcgtgttctagtctct

SEQ ID NO: 6232 - DNA, 339 bp, Glycine max
gctagatctgaagagaacagatgttgagaaagagctgaaaagtgtgattcaacagaaggaagaaatattaaaactacaacaatatgaaaaaaaaaagttaaagaatgagaaacaaggcacacaggcatatgtgcaaagggagttagaaactcttaagttggctaaagagtcatttgctgcaaaaatggagttggagaagtcaagcctagctgaaaaagctcaaagtgagaggaaccaaatacttttggattttgagctgcaaaaaaaggaacttgaagctgatttgcagaatcagtttaagcagaaggaaaaagatttgtttgaaaggaagaagttttt

SEQ ID NO: 6233 - DNA, 387 bp, Glycine max
  modified_base (350)..(350): a, c, g, t, unknown, or other
agaatctggataaaaagcagaaagcttccaggggacagaataaagatgtccaagaaagtcgaggacaatccgtagtaggaaatactcaagatgctctagatgaagaagaggaagttaaacaggaaagagttattattacccttaggccattgaatatgcaggatttcaaagaggccaaaaatcaggttgctgcaagctttgcagctgaaggggctggaatgggtgagttgaaacagtggaacgatttgtacggagaaggcggttcaaggaagcagcagcagttgtcttacttcctgtgaattttactgaggatttcaatgaaactgtgtgggaacattttcgtggctacnacatttttcaatgatagtgtggggaaacattttccac

SEQ ID NO: 6234 - DNA, 458 bp, Glycine max
tcaggtttttgtggataagagtgagctataatggctgccaggagaccgggtttaattgctttgtttgatgttgacgggactcttacagctcccaggaaggtggtcacaccggaaatgttgacattcatgcaagaactacgaaaggttgtaacggttggagttgttgggggttctgaccttataaagatatcagagcaacttggcagcacagttaccaatgagtatgattacgtattttctgagaatggtcttgtggctcacaaggaaggaaagctcattggaactcagagcttgaagtcattccttggtgaagaaaagctcaaggagtttattaactttacacttcattatattgctgatttggacatccccattaagaagggaacatttatggagttccgtaatgggatgctgaatgtgtcacctattggccgaaactgtagccaagaagaaagaga

SEQ ID NO: 6235 - DNA, 342 bp, Glycine max
caattcttatatataaacccctttcgagatctgcttcaagctctgtccccttcttgcacttccgcgctcctctcaggtttttgtggataagagtgagctataatggctgccaggagaccgggtttaattgctttgtttgatgttgacgggactcttacagctcccaggaaggtggtcacaccggaaatgttgacattcatgcaagaactacgaaaggttgtaacggttggagttgttgggggttctgaccttataaagatatcagagcaacttggcagcacagttaccaatgagtatgattacgtattttctgagaatgggtctgtggctcacagggaagga

SEQ ID NO: 6236 - DNA, 431 bp, Glycine max
tgatgatgttgatttagagagaattgcaaaagatactcatgggtatgttggtgctgagcttgctgccctttgcactgaagctgctttgcaatgcattagggagaagatggatgtaattgacttggaggatgagacaattgatgcagaagtactgaattccatggcagttacaaatgagcatttccagactgcccttggaacaagcaacccatcagctttacgtgaaactgttgttgaagtgcctaatgtcagctgggatgacattggaggcctcgaaaatgtcaagcgtgaactgcaagagactgtacaatatccagttgagcacccagaaaagtttgagaagtttggtatgtctccatcaaaaggagtactcttctatggtcctccgggatgtgggaaaactttgttagccaaagcaattgctaatgaat

SEQ ID NO: 6237 - DNA, 291 bp, Glycine max
ggcagttacaaatgagcatttccagactgcccttggaacaagcaacccatcagcttgacgtgaaactgttgttgaagtgcctaatgtcagctgggaagacattggaggccttgaaaatgtcaagcgtgaactgcaagagactgtacaatatccagttgagcacccagaaaagtttgagaagtttggtatgtctccatctaaaggagtacttttctatggtcctccaagatgtgggaaaactttgttagccaaagcaattgctaatgaatgtcaagctaacttcatcagtgt

SEQ ID NO: 6238 - DNA, 422 bp, Glycine max
agctaatagccaccgccacaacccttcgagtttcgaaaaccctaaccccacaaccccctctcacaaactcactctttttcattgtttgataattcgaacttcctccatctttcccgaagtttgctatcatggctgggttggcgccagaaggatcacaatttgatgctcgtcaatatgatgctaagatgaatgagttacttggaactgatgggcaagatttttttacttcttatgacgaagtttgtgaaagctttgatgctatgggattgcaggagaaccttctgaggggtatttatgcatatggttttgagaagccctctgcaattcaacaaagggggattgttcctttctgcaaggggcttgatgttattcagcaagcacaatctggaactggaaaaactgctaccttttgttctggagtt

SEQ ID NO: 6239 - DNA, 318 bp, Glycine max
gtgagtcgataatttctatgggcttagcatcaacctgtaataataatatcctggaggtcatgtcacatagatgatgcgtatgacgctatgctttgagagacccacacatacgagtcatgtgtgttatgatttcatatcccttgacttgtctcttattgattggtatgcctaattaaggctataatatcaatgatgccaagtgagacgcccatgcatttggatttggttgttacagaccatgctttgtgagaaccactaatcaatgctaaattgaacatatttggatgttggtggttttataaatttacattgcgtctt

SEQ ID NO: 6240 - DNA, 437 bp, Glycine max
  modified_base (44)..(44): a, c, g, t, unknown, or other
  modified_base (55)..(55): a, c, g, t, unknown, or other
attttgtcaagtatgcacatgatgaagaatctgcggaggatcangaagagactgngtggaaatatatccatggggatgtgtttaggttccccaagtttaagtctctgtttgcggctgcgcttggatctggcactcagttgtttacccttacggtgttcatattcatattggctcttgttggtgtgttttatccgtacaatcgaggggcactgtttactgcactggttgtcatatatgcacttacttcggggattgctggatacaccgcaacttcattctattgtcagttggaaggaacaaactgggttaagaatctgctggtgactggattccttttctggggaccctttgttctgacctttctgttttctaaacactgttgcaattgcttacaaagctactgctgccctcccatttgggacgattgtggttatagt

SEQ ID NO: 6241 - DNA, 424 bp, Glycine max
  modified_base (408)..(408): a, c, g, t, unknown, or other
cccacgcgtccgcaaacctcttcccaatgaggaacctctctttcttcttcttcttcttcttcaccttcttcgccgccgtcagatctgatccctcagatcaccgctacaaagaaggcgaccccgtccctctctacgccaacaaagttggccccttccacaaccctagcgaaacctaccgttacttcgaccttcccttttgtgaaccaggtgatttgaaagagaagaaggaggcgctcggggaggtgctgaatggggaccgtttggttagcgcgccatacaagctggagttccagcgcgacaaggagttggtttccgtgtgcgacaggaagctctccaaacaggacgtggctcggttcagatccgcggtgaggaaggactactacttccagatgtactacgacgaccttnctatttggggctttat

SEQ ID NO: 6242 - DNA, 420 bp, Glycine max
cccacgcgtccgcaaacctcttcccaatgaggaacctctctttcttcttcttcttctggttcaccttcttcgccgccgtcagatctgatccctcagatcaccgctacaaagaaggcgaccccgtccctctctacgccaacaaagttggccccttccacaaccctagcgaaacctaccgttacttcgaccttcccttttgtgaaccaggtgatttgaaagagaagaaggaggcgctcggggaggtgctgaatggggaccgtttggttagcgcgccatacaagctggagttccagcgcgacaaggagttggtttccgtgtgcgacaggaagctctccaaacaggacgtggctcggttcagatccgcggtgaggaaggactactacttccagatgtactacgacgaccttcctatttggggct

SEQ ID NO: 6243 - DNA, 453 bp, Glycine max
attgcaaaagaatatggagttaaaaggtatggttggcttgtttacatggataagaaggctaaggaggaagaaaaaaggcaaaaagagttgatcaaaggtgatcctgcaattaggaagctgagtcgtaaggaaagaaggaaggcttctcagattgaaagggagagagagagagaagccacacggatatctggaactcgtgtgctgcatcatgatccctaccggtagaaaatattgatattttcatccttcagattgagcgaagaatatatgatattgtgctccttctaacgtatgggattgctgattattcttccttgccactcataatgttgcactcaatatatatatatgcagggaaacaaggcaaagtcctacatatgaagcctattctcgatctagaaggtcaaggtctccgttgcggtcatactctccgtcgcattcaaggcgttattc

SEQ ID NO: 6244 - DNA, 448 bp, Glycine max
  modified_base (422)..(422): a, c, g, t, unknown, or other
aaagcagagaaggaccggagggagaagaaggagaagaaaagggaaaagaaagagaggaagagagagaagaaggagaagaaagagagaaggaaagcggagaaagaaaggaaacttaaagaaggagcaagtgcctcccctggcactgatgatggcaaaaagtttaagctcatcaacgaactaaaggaaaccaaagtagatggaaaattgcaaaagggtgaagacagtgagaatgaacaacatgagaggagtggaattacagaggaacttgacctacctgtcacttctgtggagccttgctgcctttctgactgtactcaaagcagtaagagaaaaaggagctccccagaatcaactcatgatcatggatctgctattaaaattcgacttccgttgaggaagcatagagaacctgaagaattganatccaaatcaaaatttcaaagcgggt

SEQ ID NO: 6245 - DNA, 465 bp, Glycine max
  modified_base (414)..(414): a, c, g, t, unknown, or other
ggcactcttaagacctattatgaaactatggtggagtctgatttgaagaagtacctggcggatatattgtcggttttggcactcacaatgtctgctgaaggagaacgagaaagcctcaagtacagattattgggttccgagggtgacattggttcctggggccacgagtatgttaggaatctagctggagaaattgctcaggaatacacaaaacgacagagtgaagaggcccccatagatgatctcatggaacttgtgcaacaaattgttgcttttcacatgaagcataatgcagaacctgaagctgttgatcttttgatggaggttgaagatctggatatgttgagtggacatgttgacaaaacaaattttaaaaggacttgcctatatctcaccagttctgcaagatacctnccaggaccagatgatatgctagttttggacattgcatattcaatttacaaa

SEQ ID NO: 6246 - DNA, 426 bp, Glycine max
cccacgcgtccgcccacgcgtccgcccacgcgtccgcccacgcgtccgggttggtggggccacgagtatgttaggaatctagctggagaaattgctcaggaatacacaaaacgacagagtgaagaggcccccatagatgatctcatggaacttgtgcaacaaattgttgcttttcacatgaagcataatgcagaacctgaagctgttgatcttttgatggaggttgaagatctggatatgttgagtggacatgttgacaaaacaaattttaaaaggacttgcctatatctcaccagttctgcaagatacctcccaggaccagatgatatgctagttttggacattgcatattcaatttacaaacaatttgaagaatatccaaatgcactccaaattgcattgttcatggataattcgcagcatgtg

SEQ ID NO: 6247 - DNA, 421 bp, Glycine max
accacgcgtcaaaggcaatggctatcaggttgatggatttggactctccattcttcaacactctgcacagaatcatggatctgacggaggacgccgagaagaacttgaacgctccgactcggacatacgtgcgcgacgccaaggcgatggctgcgactcctgctgacgtgaaggagtaccctaactcgtacgttttcgtgatcgacatgcctggcctgaaatctggggacattaaagtgcacgtggaggacgacaacgtgcttctgataagcggcgagaggaagagggaggaggaaaaagagaaagaagggggaaagtatttgaggatggagagaacgcttggcaagtttaatgaggaagtttactctccctgagaatgccaacaccgatgctatctctgctgtctgccaagacggtgtgc

SEQ ID NO: 6248 - DNA, 441 bp, Glycine max
cacactagtatttctcataaaagggagattaccttggcagggttatcagggtgacaataaaagttttcttgtttgtaagaagaaaatggccacttccccggagttgatgtgctgctttgttcctgctccatttaagcagtttcttgaagctgttactaatatgagatttgatgaggagcccaattatgccaagcttatatcactttttgaaagcttgattgaaccatgcactccgttgagacctattagaatagatggagctttaaaggttggccaaaagcgaggaaggatgcttataaatctggaagaagatgagcaacctaagaagaaagtgcgattggggagtcctgctactcagtggatatcagtgtataatgctcgccgtcccatgaagcagagatatcactataatgttgcagacactaggctacggcagcatgt

SEQ ID NO: 6249 - DNA, 408 bp, Glycine max
ctttgaatggattctaattcttcttctccaagtcccaacaaccacgcttccacaaccgaaatcaacggtttctttcatcccaagctgggttcccaacctgccaccagctcgcgatctcgtcttgccatggcttctcctgtgaactccgatcctaaggtcgtcaccggcacagccggttacatcctcgaagacgttccgcatttcaccgattacattcccaatctcccaacataccctaatcctttgcaagacaaccctgcttattcagttgttaagcaatattttgtgcatgttgatgacagcgttcctcaaaaggtcgttgttcacaaagatggtgcaagaggggtacattttaggcgtgccgggcctcgtcaaaaggtgtactttgaagctgatgaagttcaagct

SEQ ID NO: 6250 - DNA, 432 bp, Glycine max
aggatttggcataatacattgatttgtttcttaaaaacaacactgcaatgtctgccatatttctgcttgttggaatgctatcgtccattacagttgcacaatccataggagtttgctatggagtgattggtgataatctaacaacaaggcaagaagttgtggacttaatataaacaaatggcattggtaaaaatgcgtatatactaccaagatgaagaagcactccaagcccttagaggttcaggcattgagttgattatggacgtggctaaggaaacccttcaatcattgacagactccaatgctgctacagattgggtcaataaatatgttacaccttactcgcaagacgtcaatttcaagtacatcgctgttggaaatgaaattcatcccaataccaatgaggcacaatatattctatctgccatgacc

SEQ ID NO: 6251 - DNA, 300 bp, Glycine max
gacccaagcgtcaggaggcacaatatattctatctgccatgaccaacattcagaatgcaatttcatcagcaaatttacaaattaaggtgtcaacagctatagactctactttgattactaactcttaccctcccaatgatggcgttttcactagcgatgcggagccatacataaaacccataatcaacttcctagtgagcaatggggccccacttcttgccaacgtgtacccttactttgcttatgcaaatgatcaaagcattcctcttgcctatgctctttttaccaaccagggaacca

SEQ ID NO: 6252 - DNA, 434 bp, Glycine max
gatatggcataatacattgatttgtttcttaaaaacaacactgcaatgtctgccatatttctgcttgttggaatgctatcgtccattacagttgcacaatccataggagtttgctatggagtgattggtgataatctaccatcaaggcaagaagttgtggacttatataaaacaaatggcattggtagaatgcgtatatactacccagatgaagaagcactccaagcccttagaggttcaggcattgagttgattatggacgtggctaaggaaacccttcaatcattgacagactccaatgctgctacagattgggtcaataaatatgttacaccttactcgcaagacgtcaatttcaagtacatcgctgttggaaatgaaattcatcccaataccaatgaggcacaatatattccatctgccatgaccaacat

SEQ ID NO: 6253 - DNA, 479 bp, Glycine max
taccggtcttatcttcccgggccgccccacgcgcgtaccataagatttggcataatacattgatttgtttcttaaaaacaacactgcaatgtctgccatatttctgcttgttggaatgctatcgtccattacagttgcacaatccataggagtttgctatggagtgattggtgataatctaccatcaaggcaagaagttgtggacttatataaaacaaatggcattggtagaatgcgtatatactacccagatgaagaagcactccaagcccttagaggttcaggcattgagttgattatggacgtggctaaggaaacccttcaatcattgacagactccaatgctgctacagattgggtcaataaatatgttacaccttactcgcaagacgtcaatttcaagtacatcgctgttggaaatgaaattcatcccaataccaatgaggcacaatatattctagctgccatgaccaacattc

SEQ ID NO: 6254 - DNA, 323 bp, Glycine max
tttggcataatacattgatttgtttcttaaaaacaacactgcaatgtctgccatatttctgcttgttggaatgctatcgtccattacagttgcacaatccataggagtttgctatggagtgattggtgataatctaccatcaaggcaagaggttgtggacttatataaaacaaatggcattggtagaatgcgtatatactacccagatgaagaagcacgtccaagcccttagaggttcaggcattgagttgattatggacgtggctaaggaaacccttcagtcattgacagactccagtgctgctacagattgggtcaataaa

SEQ ID NO: 6255 - DNA, 433 bp, Glycine max
  modified_base (392)..(392): a, c, g, t, unknown, or other
ggcatacataaaacccataatcaacttcctaatgagcaatggggccccacttcttgccaacgtgtacccttactttgcttatgcaaatgatcaaagcattcctcttgcctatgctctttttacccaacaaggaaacaacgacgttgggtaccaaaacctctttgatgctatgttggattcaatatatgctgctttggagaaagtgggagcgtccaatttgcagatagtggtttctgagagtgggtggccatctgaaggtggagctggagcctcaattgataatgcaggcacttactatgctaatttgattcgtcatgcctcgagtgggaatggaactccaaagaggcctggtgagtctatagagacttacttgttcgccatgtttgacgaanaccagaagcaaggtgctgatactgagcgtcattttggtctc

SEQ ID NO: 6256 - DNA, 447 bp, Glycine max
gcataatacattgatttgtttcttaaaaacaacactgcaatgtctgccatatttctgcttgttggaatgctatcgtccattacagttgcacaatccataggagtttgctatggagtgattggtgataatctaccatcaaggcaagaagttgtggacttatataaaacaaatggcattggtagaatgcgtatatactacccagatgaagaagcactccaagcccttagaggttcaggcattgagttgattatggacgtggctaaggaaacccttcaatcattgacagactccaatgctgctacagattgggtcaataaatatgttacaccttactcgcaagacgtcaatttcaagtacatcgctgttggaaatgaaattcatcccaataccaatgaggcacaatatattctatctgccatgaccaacattcagaatgcaatttcatca

SEQ ID NO: 6257 - DNA, 412 bp, Glycine max
cccacgcgtccgcccacgcgtccgcggactcgtgggtccacccaatgatgctgttttcagtagcgatgcagagccatatgtaaaacccataatagacttcctagtgagaaatgaggcgccacttcttgccaatgtgtacccttactttgcttatgcgaatgatcaacaaaacagtattcctcttgcctatgctctttttacccaacaaggaaacaacgacgctgggtaccaaaacctcttcgatgctatgttggattcaatatacgctgcagtggagaaagtgggagcatccaatttgcagatagtggtttctgagagtgggtggccatctgaaggtggtggaactggagcatcaatcgataatgcatgcacttacaatgctaatttgattagtcatgccttgggtgggagt

SEQ ID NO: 6258 - DNA, 401 bp, Glycine max
gatttggcataatacattgatttgtttcttaaaaacaacactgcaatgtctgccatatttctgcttgttggaatgctatcgtccattacaggagtttgctatggagtgattggtgataatctaccatcaaggcaagaagttgtggacttatataaaacaaatggcattggtagaatgcgtatatactacccagatgaagaagcactccaagcccttagaggttcaggcattgagttgattatggacgtggctaaggaaacccttcaatcattgacagactccaatgctgctacagattgggtcaataaatatgttacaccttactcgcaagacgtcaatttcaagtacatcgctgttggaaatgaaattcatcccaataccaatgaggcacaatatattct

SEQ ID NO: 6259 - DNA, 401 bp, Glycine max
cccacgcgtccgggcataatacattgatttgtttcttaaaaacaacactgcaatgtctgccatatttctgcttgttggaatgctatcgtccattacagttgcacaatccataggagtttgctatggagtgattggtgataatctaccatcaaggcaagaagttgtggacttatataaaacaaatggcattggtagaatgcgtatatactacccagatgaagaagcactccaagcccttagaggttcaggcattgagttgattatggacgtggctaaggaaacccttcaatcattgacagactccaatgctgctacagattgggtcaataaatatgttacaccttactcgcaagacgtcaatttcaagtacatcgctgttggaaatgaaattcatcccaata

SEQ ID NO: 6260 - DNA, 418 bp, Glycine max
gcataatacattgatttgtttcttaaaaacaacactgcaatgtctgccatatttctgcttgttggaatgctatcgtccattacagttgcacaatccataggagtttgctatggagtgattggtgataatctaccatcaaggcaagaagttgtggacttatataaaacaaatggcattggtagaatgcgtatatactacccagatgaagaagcactccaagcccttagaggttcaggcattgagttgattatggacgtggctaaggaaacccttcaatcattgacagactccaatgctgctacagattgggtcaataaatatgttacaccttactcgcaagacgtcaatttcaagtacatcgctgttggaaatgaaattcatcccaataccaatgaggcacaatatattctatctgcca

SEQ ID NO: 6261 - DNA, 364 bp, Glycine max
  modified_base (290)..(290): a, c, g, t, unknown, or other
aaatgaaattcatcccaataccaatgaggcacaatatattctatctgccatgaccaacagtcagaatgcaatttcatcagcaaatttacaaattaaggtgtcaacagctatagactctactttgattactaactcttaccctcccaatgatggcgttttcactagcgatgcggagccatacataaaacccataatcaacttcctagtgagcaatggggccccacttcttgccaacgtgtacccttactttgcttatgcaaatgatcaaagcattcctcttgcctatgctncttttacccaacaaggaaacaacgacgttgggtaccaaaacctttttgatgctatgttggattcaatatatgct

SEQ ID NO: 6262 - DNA, 395 bp, Glycine max
taagatttggcataatacattgatttgtttcttaaaaacaacactgcaatgtctgccatatttctgcttgttggaatgctatcgtccattacagttgcacaatccataggagtttgctatggagtgattggtgataatctaccatcaaggcaagaagttgtggacttatataaaacaaatggcattggtagaatgcgtatatactacccagatgaagaagcactccaagcccttagaggttcaggcattgagttgattatggacgtggctaaggaaacccttcaatcattgacagactccaatgctgctacagattgggtcaataaatatgttacaccttactcgcaagacgtcaatttcaagtacatcgctgttggaaatgaaattcattccaa

SEQ ID NO: 6263 - DNA, 471 bp, Glycine max
attgatttgtttcttaaaaacaacactgcaatgtctgccatatttctgctggttggaatgctatcgtccattacagttgcacaatccataggagtttgctatggagtgattggtgataatctaccatcaaggcaagaagttgtggacttatataaaacaaatggcattggtagaatgcgtatatactacccagatgaagaagcactccaagcccttagaggttcaggcattgagttgattatggacgtggctaaggaaacccttcaatcattgacagactccaatgctgctacagattgggtcaataaatatgttacaccttactcgcaagacgtcaatttcaagtacatcgctgttggaaatgaaattcatcccaataccaatgaggcacaatatattctatctgccatgaccaacattcagaatgcaatttcatcagcaaatttacaaattaaggtgtcaacagctata

SEQ ID NO: 6264 - DNA, 311 bp, Glycine max
tcgcttactagcaggacgtcaatttcaagtacatgtctgtcggaaatgaaatgcattccacgaccagtgaatcacagtataccctatgtgccatgaccaacattcagaatgcaattacatcaccatattcacaaatcaatgtgtcaacagctatagactctactttgattactaactcttacacttccaatgatagcattttcactatcgctgcggttccatacataaatcccatgaccaacttactagcgtgcattggagccacactacttgacaacgtgaacccttactatgcttatgcaaatgatcaa

SEQ ID NO: 6265 - DNA, 446 bp, Glycine max
atttggtataatacattgatatgtttcttaaaaaaagcactgcaatgtcttccatattggtgctagttggaatgttatcgtccattacagttgcacaatccataggagtttgctatggagtactcggtaataatctaccatcaaggcaagaagttgtggacttgtataaaacaaatgggataggtagaatgcgtatatactatccagatgaagaagcactccaagcccttagaggttcaggcattgagttgattatggacgtggctaaggaaacccttcaatcaatgacagaccccaatgctgctacagattgggtcaataagtatgttacagcctactcgcaagacgtcaatttcaagtacatcgctgttggaaatgaaattcaccccaatacccatgaggcacagtacattctatctgccatgaccaacattcagaatgcaatt

SEQ ID NO: 6266 - DNA, 396 bp, Glycine max
gtcaatttcaagtacatcgctgttggaaatgaaattcatcccaataccaatgaggcacaggatattctatctgccatgaccaacattcagaatgcaatttcatcagcaaatttacaaattaaggtgtcaacagctatagactctactttgattactaactcttaccctcccaatgatggcgttttcactagcgatgcggagccatacataaaacccataatcaacttcctagtgagcaatggggccccacttcttgccaacgtgtacccttactttgcttatgcaaatgatcaaagcattcctcttgcctatgctctttttacccaacaaggaaacaacgacgttgggtaccaaaacctctttgatgctatgttggattcaatatatgctgctttg

SEQ ID NO: 6267 - DNA, 349 bp, Glycine max
aaacttcactgcaatgtctgccatattggtgcttgttggaatgctatcgtccattacagttgcacaatccataggagtttgctatggagtgattggtgataatctaccatcaaggcaagaagttgtggacttatataaaacaaatggcattggtagaatgcgtatatactacccagatgaagaagcactccaagcccttagaggttcaggcattgagttgattatggacgtggctaaggaaacccttcaatcattgacagactccaatgctgctacagattgggtcaataaatatgttacaccttacttgcaagacgtcaattttaagttcattgctggtggaaatgaa

SEQ ID NO: 6268 - DNA, 323 bp, Glycine max
gcattgagttgattatggacgtggctaaggaaacgtttcaatcattgacagactccaatgctgctacagattgggtcaataaatatgttacaccatactcgcaagacgtaaatttcaagtacatcgctgttggaaatgatatttatcccaataccaatgaggcacaatatattctatctggcatgaccaacattcagaatgcaatttcatcatcaaatttacaaattaaggtgtcaacagcttatagactctacttttgattactaactcttaccctctcaatgatggcgttttcaatagcgatgcttatgccatacatttaa

SEQ ID NO: 6269 - DNA, 431 bp, Glycine max
aatttcaagtttatctttgatggtttggttattcatcccaataccaatgatgcagaatggattctatcggccatgaccaacattcagaatgcaatttcatcagcaaatttacaaattaaggtgtcaacagctatagactctactttgattactaactcttaccctcccaatgatggcgttttcactagcgatgctgagccatacataaaacccataatcaacttcctagtgagcaatggggccccacttcttgccaacgtgtacccttactttgcttatgcaaatgatcaaagcattcctcttgcctatgctctttttacccaacatggaaacaactacgttgggtaccaaaacctctttgatgctatgttacattcaatatatgctgctttggagaaagtgggagcgttcaatttgcaaataatggtttc

SEQ ID NO: 6270 - DNA, 188 bp, Glycine max
  modified_base (5)..(5): a, c, g, t, unknown, or other
cttanaacacactgcatgtctggcatatttctgttggtggaatgctatcggccgttcaattgcacaatccataggagtttgctatggagtgattggtgataatctaccatcaaggcaagaagttgtggacttatataaaacaaatggcattggtagaatgcgtatatactacccacatgaagaagcac

SEQ ID NO: 6271 - DNA, 379 bp, Glycine max
tggcataatacattgatttgtttcttaaaaacaacactgcaatgtctgccatatttctgcttgttggaatgctatcgtgcattacagttgcacaatccataggagtttgctatggagtgattggtgataatctaccatcaaggcaagaagttgtggacttatataaaacaaatggcattggtagaatgcgtatatactacccagatgaagaagcactccaagcccttagaggttcaggcattgagttgattatggacgtggctaaggaaacccttcaatcattgacagactccaatgctgctacagattgggtcaataaatatgttacaccttactcgcaagacgtcaatttcaagtacatcgcttgtggaaatgaaat

SEQ ID NO: 6272 - DNA, 382 bp, Glycine max
  modified_base (369)..(369): a, c, g, t, unknown, or other
tggcataatacattgatttgtttcttaaaaacaacactgcaatgtctgccatatttcggcttgttggaatgctatcgtgcattacagttgcacaatccataggagtttgctatggagtgattggtgataatctaccatcaaggcaagaagttgtggacttatataaaacaaatggcattggtagaatgcgtatatactacccagatgaagaagcactccaagcccttagaggttcaggcattgagttgattatggacgtggctaaggaaacccttcaatcattgacagactccaatgctgctacagattgggtcaataaatatgttacaccttactcgcaagacgtcaatttcaagtacatcgctgttngaaatgaaattca

SEQ ID NO: 6273 - DNA, 376 bp, Glycine max
cggactcgtggggatttggcataatacattgatttgtttcttaaaaacaacactgcaatggctgccatatttctgcttgttggaatgctatcgtccattacagttgctcaatccataggagtttgctatggagtgattggtgataatctaccatcaaggcaagaagttgtggacttatataaaacaaatggcattggtagaatgcgtatatactacccagatgaagaagcactccaagcccttagaggttcaggcattgagttgattatggacgtggctaatgaaacccttcaatcattgacagactccaatgctgctacagattgggtcaataaatatgttacaccttactcgcaagacgtcaatttcaagtaca

SEQ ID NO: 6274 - DNA, 439 bp, Glycine max
aatacattgatttgtttcttaaaaacttcactgcaatgtctgccatatttgggcttggtggaatgctatcgtccattacagttgcacaatccataggagtttgctatggagtgattggtgataatctaccatcaaggcaagaagttgtggacttatataaaacaaatggcattggtagaatgcgtatatactacccagatgaagaagcactccaagcccttagaggttcaggcattgagttgattatggacgtggctaacgaaacccttcaatcattgacagactccaatgctgctacagattgggtcaataaatatgttacaccttactcgcaagacgtcaatttcaagtacatcgctgttggaaatgaaattcatcccaataccaatgaggcacaatttattctatctgccatgaccaacattcagaatgcaatttc

SEQ ID NO: 6275 - DNA, 434 bp, Glycine max
ctcatttttgcaatttccttagatttgcggttcttaagaaggatcattctttcatggcagttggtggtccatgggaacctgttgatgggggtgatccatctattgacaataactctttaatcaaaactgccctcagatatgcaaaggatgttattcaacttgacttgcagaattgtcaacattggaatccttctcttgagttacattatgatagaattggcaaagatggtttctttagccacaaggaaatcactgttctttatgttcctgatttgtctgactgcctcccttcgttggatgaatggcgtgacaagtggcttgcccacaagaaagctgtggctgaaaaagagcgtcaactttctttgaaaaaagagaaatcaagagataacaaggaagtatctaaagataaatcagataaaaggaaggattctact

SEQ ID NO: 6276 - DNA, 323 bp, Glycine max
cccacgcgtccggtgcttcagttacgacgaggattcaattttttggcagttaaaggatgggctctcacctgaggctgatgttgtttatgtgggatctctcaaggctgatgttgatgcaaatgagcaagagaaagtttcccttcagttgctggaggaattcaattgcgtgcctacttttattccttcagacctctacaaacaattccatgatggtttctgcaagcaacaattgtggcccctattccattacatgttgcccatgtatccaggcaatcgccgctttgataggtcacagtggcaggcttatgtttctgctaacaaga

SEQ ID NO: 6277 - DNA, 440 bp, Glycine max
cctcaggcgtccggtaacgcttccgaagcttcatttatgactaggattcaagttttaggcagttaaaggatggggtatgacctgaggctgatgttggttatgtaggatctctcaaggctgatgttgatgcaaatgagcaagagaaagcttcccttcagctgctggaggaattcaattgcatgcctacttttattccttcagacctctacaaacaattccatgatggagtctgcaagcaacaattgtggcccctattccattacatgttgcccatgtatacaggcaatcgccgatttgataggtcacagtggcatgcttatgctgctgctaacacgatatttgcagataaagtcatggaggtccttaatccataagatgattatgtatgggttcatgattatcatcctatgggccttccaacatttctgcgaaagcggtgt

SEQ ID NO: 6278 - DNA, 461 bp, Glycine max
gtgctgatccctctagatcccttaatatcaaattccctaattctcaaaatctcatgtcgtcttctcctctttcaaatgttgaaccaaattctgttactaatgaacactctaacactgtttctgacttaaacagatatccaagtgaactgtccagtacctcttcttctcagtctcacactgtcagttctccttcttataatcatgttcttcccccacaaaatgtccatcctatgcaaaccagattcaagtttggaattcatcaatctaggttgcatccttcactgtttatggcacattgtgaacctaagacagttaaacaggctcttgctgacccttaatggtttgctgctatgaatcaagagtatgaggctcttcttaacaataaaacatgggatcttgttcctcttcccaaagacaaacaagttgtgggttgtaagtaggtcttcagaattaaggagaat

SEQ ID NO: 6279 - DNA, 456 bp, Glycine max
tcgtagatgatacctgtacatcccttaatgtcaaattccctaattctcaaaaactggggtcgtcttctcctctttcaaatgttgaaccaacttctgttactaatgaacactctaacactgtttctgactaaaacagatatacaagtgaactatccagtacctcttcttctcacactcacactgtaacttctacttcttataatcatgttcttcccccacaaaatgtccatcctatgcataccagattcaagtttggaattcatcaatctaggctgcatccttcactgtttatggcacattgtgaacctaagacagttaaacaggctcttgctgacccttaatggtttgctgctatgaatcaacagtatgaggctcttcttaacaataaaacatggcatcttgatcctcttcccaaagacaaacaagttgtgggttgtaagtaggtcttcacaatta

SEQ ID NO: 6280 - DNA, 441 bp, Glycine max
  modified_base (421)..(421): a, c, g, t, unknown, or other
cccacgcgtccgcaccatgttaaccgcaatcctcagaagaacctgttccactctctgaaggcgcggtttccccgctgccttaatctccgcctccaccgtcggaaaccacttccggccaccctccgcggactttatttccagaaccttccactccaacactggccccttgaatttccgctcctcttcatgtcaccgcgcagaatacgccgtcgacgatttcccttacgaagaaggctccaaagggaacgccgacgactaaggcctcgagatcgcgaagctcggaatttctgaggatattgtctccgctttggccaagaaaggcatcaccaagctcttccccattcagagggctgtgttggaacctgctatgcaaggacgtgatatgattggtcgagctagaactggaactgggaagactctngcttttgggatacccatcat

SEQ ID NO: 6281 - DNA, 386 bp, Glycine max
gaatatattacattaagaaagcccaaagaaagaagaagatggcgtccgagtgcaaaggtaagagctcatggcctgagttggttggagtggaaggaacggtggcggtggctacaattgagagggagaatcctttggtggatgctaacactgtgcttaaaggatccatcgtcaccgctgattttcgatgtgatagggttcgggtttgggtcaccaaacatggaattgtttatcaggctccaagaattggataagaagtgtttacactaaagcacttcatatatatgttatgagtcatgaatataatagtatttaaataaggagttattcttcaaattatggtaatttgattgaaaataaaaacattgactattaaaaaatttgttttt

SEQ ID NO: 6282 - DNA, 388 bp, Glycine max
gacccgcccgtcagcattaagaaagcccaaagaaagaagaagatggcgtccgagtgcaaaggtaagagctcatggcctgagttggttggagtggaaggaacggtggcggtggctacaattgagagggagaatcctttggtggatgctaacactgtgcttaaaggatccatcgtcaccgctgattttcgatgtgatagggttcgggtttgggtcaccaaacatggaattgtttatcaggctccaagaattggataagaagtgtttacactaaagcacttcatatatatgttatgagtcatgaatatgatagtatttaaataaggagttattcgtccaattaggttaattgattgagaataagaacatgaggtataagaaattgtttttt

SEQ ID NO: 6283 - DNA, 304 bp, Glycine max
catggcctgagttggttgcagtggaatgaactgtggcggtggctacaattgagagggagaatcctttggtggatgctaacactgtgcttaaaggatccatcgtcaccgctgattttcgatgtgatagggttcgggtttgggtcaccaaacatggaattgtttatcacgctccaagaattggataagaagtgtctacactaaagcacttcatatatatgtcatgagtcatgaatataatagtatttaaataaggagttattcttgcaattatgttatgtgattgaaaataaattatgtaatttga

SEQ ID NO: 6284 - DNA, 383 bp, Glycine max
  modified_base (369)..(369): a, c, g, t, unknown, or other
cattaagaaagcccaaagaaagaagaagatggcgtccgagtgcaaaggtaagagcgcatggcctgagttggttggagtggaaggaacggtggcggtggctacaattgagagggagaatcctttggtggatgctaacactgtgcttaaaggatccatcgtcaccgctgattttcgatgtgatagggttcgggtttgggtcaccaaacatggaattgtttatcaggctccaagaattggataagaagtgtttacactaaagcacttcatatatatgttatgagtcatgaatataatagtatttaaataaggagttattcttccaattatgttatttgattgaaaataaaaacatgactataagaaatttgntttttcttattttt

SEQ ID NO: 6285 - DNA, 351 bp, Glycine max
gcccaaagaaagaagaagatggcgtccgtttgcaaaggtaagagctcatggcctgagttggttggagtggaaggaacggtggcggtggctacaattgagagggagaatcctttggtggatgctaacactgtgcttaaaggatccatcgtcaccgctgattttcgatgtgatagggttcgggtttgggtcaccaaacatggaattgtttatcaggctccaagaattggataagaagtgtttacactaaagcacttcatatatatgttatgagtcatgaatataatagtatttaaataaggagttattcttccaattatgttatttgattgaaaataaaaacatgactataag

SEQ ID NO: 6286 - DNA, 385 bp, Glycine max
cccacgcgtccgctcatggcctgagttgtttggagttgaaggaacggtggcggtggctacaattgagagggagaatcctttggtggatgctaacactgtgcttaaaggatccatcgtcaccgctgattttcgatgtgatagggttcgggtttgggtcaccaaacatggaattgcttatcaagctccaagaattggataagaagtgtttacactaaagcacttcatatatatgttatgagtcatgaatataatagtatttaaataaggagttattcttccaattatgttatttgattggaaatgataacatgactataagaaatttgttatgtctgatatctaattatgttatgctctgcaaattaatatacaaattgtgtgattc

SEQ ID NO: 6287 - DNA, 410 bp, Glycine max
agcgtccgatacattaagaaagcccaaagaaagaagaagatggcgtccgagtgcaaaggtaagagctcatggcctgagttggttggagtggaaggaacggtggcggtggctacaattgagagggagaatcctttggtggatgctaacactgtgcttaaaggatccatcgtcaccgctgattttcgatgtgatagggttcgggtttgggtcaccaaacatggaattgtttatcaggctccaagaattggataagaagtgtttacactaaagcacttcatatatatgttatgagtcatgaatataatagtatttaaataaggagttattcttccaattatgttatttgattgaaaataaaaacatgactataagaaatttggtttttcttatttttaattatgttatgcact

SEQ ID NO: 6288 - DNA, 420 bp, Glycine max
attacattaagaaagcccaaagaaagaagaagatggcgtccgagtgcaaaggtaagagctcatggcctgagttggttggagtggaaggaacggtggcggtggctacaattgagagggagaatcctttggtggatgctaacactgtgcttaaaggatccatcgtcaccgctgattttcgatgtgatagggttcgggtttgggtcaccaaacatggaattgtttatcaggctccaagaattggataagaagtgtttacactaaagcacttcatatatatgttatgagtcatgaatataatagtatttaaataaggagttattcttccaattatgttatttgattgaaaataaaaacatgactataagaaatttgttttttcttaattttaaaaataagatagaaaaaggggcggccggttct

SEQ ID NO: 6289 - DNA, 409 bp, Glycine max
  modified_base (407)..(407): a, c, g, t, unknown, or other
gccacgcgttcgcccacgcgtccgcccacgcgtccgagaatatattacattaagaaagggcaaagaaagaagaagatggcgtccgagtgcaaaggtaagagctcatggcctgagttggttggagtggaaggaacggtggcggtggctacaattgagagggagaatcctttggtggatgctaacactgtgcttaaaggatccatcgtcaccgctgattttcgatgtgatagggttcgggtttgggtcaccaaacatggaattgtttatcaggctccaagaattggataagaagtgtttacactaaagcacttcatatatatgttatgagtcatgaatatattagtaattaaataaggagttattcttccaattatgttatttgattgaaaataaaaacatgactatanag

SEQ ID NO: 6290 - DNA, 422 bp, Glycine max
  modified_base (391)..(391): a, c, g, t, unknown, or other
cccacgcgtccgagaatatattacattaagatagcccaaagaaagaagaagatggcgtccgagtgcaaaggtaagagctcatggcctgagttggttggagtggaaggaacggtggcggtggctacaattgagagggagaatcctttggtggatgctaacactgtgcttaaaggatccatcgtcaccgctgattttcgatgtgatagggttcgggtttgggtcaccaaacatggaattgtttatcaggctccaagaattggataagaagtgtttacactaaagcacttcatatatatgttatgagtcatgaatataatagtatttaaataaggagttattcttccaattatgttatttgattgaaaataaaaacatgactataagaaatttngtttttcttatttttaattatgttatgcact

SEQ ID NO: 6291 - DNA, 365 bp, Glycine max
gcctatcttacatcatgaaagtccatagaatgaagatgatggcgtccgagtgcaacggtgagagcttatgggctgcgtaggttgaagaggatggaacggtggatgtggctacaattgacagggagaatcctttgacggatgctaacactgtgcttaaaggatccatagtaaccgctgatttacgatgtgatagggttcgggtttgggtcaccaaacatggaattggttatcatgctccaagaattggataagaagtgagtacactatagcacttgatatatatgttatgagtcatgaatataatagtatttaaataacgagttattcttccaattatgttattagattgaaaattgtaacatgac

SEQ ID NO: 6292 - DNA, 340 bp, Glycine max
  modified_base (279)..(279): a, c, g, t, unknown, or other
gaagaagatggcgtccgagtgcaaaggtaagagctcatggcctgagttggttggagtggaaggaacggtggcggtggctacaattgagagggagaatcctttggtggatgctaacactgtgcttaaaggatccatcgtcaccgctgattttcgatgtgatagggttcgggtttgggtcaccaaacatggaattgtttatcaggctccaagaattggataagaagtgtttacactaaagcacttcatatatatgttatgagtcatgaatataatagtatntaaataaggagttattcttccaattatgttatttgattgaaaataaaaacatgactataag

SEQ ID NO: 6293 - DNA, 465 bp, Glycine max
cccacgcgtccgcccacgcgtccgcggacgcgtgggagaatatattacattaagaaagcccaaagaaagaagaagatggcgtccgagtgcaaaggtaagagctcatggcctgagttggttggagtggaaggaacggtggcggtggctacaattgagagggagaatcctttggtggatgctaacactgtgcttaaaggatccatcgtcaccgctgattttcgatgtgatagggttcgggtttgggtcaccaaacatggaattgtttatcaggctccaagaattggataagaagtgtttacactaaagcacttcatatatatgttatgagtcatgaatataatagtatttaaataaggagttattcttccaattatgttatttgattgaaaataaaaacatgactataagaaatttgttttttcttatttttaattatgttatgcactgcaaataaatatacaaatt

SEQ ID NO: 6294 - DNA, 343 bp, Glycine max
cccactcgtccggaatatattacattaagaaagcccaaagaaagaagaagatggcgtgcgagtgcaaaggtaagagctcatggcctgagttggttggagtggaaggaacggtggcggtggctacaattgagagggagaatcctttggtggatgctaacactgtgcttaaaggatccatcgtcaccgctgattttcgatgtgatagggttcgggtttgggtcaccaaacatggaattgtttatcaggctccaagaattggataagaagtgtttacactaaagcacttcatatatatgttatgagtcatgaatataatagtatttaaataaggagttattctttc

SEQ ID NO: 6295 - DNA, 398 bp, Glycine max
ctcacgcgtccgggaaggaacggtggctgcggctacaattgagagggagaatcctttggtggatgctaacactgtgcttaaaggatccatcgttaccgctgattttcgatgtgatagggttcgggtttgggtcaccaaacatggaattgtttatcaggctccaagaattggataagaagtgtttacactaaagcacttcatatatatgttatgagtcatgaatatcatagtatttaaataaggagctattcttccaattatgttattcgattgaaaataaatacatgactataagaaatttgttgtttcttatgtgtaattatgttatgcactgcaaataaatatacaaattgtgtgtttcattatctttatgtacgcaataattaaaccatctatat

SEQ ID NO: 6296 - DNA, 429 bp, Glycine max
tcactcacgagtctcacgcttttcacgatgggcttcattttcggagtggtggtcggaataattgtgggcctggccatcatagtgggcttcgtccgcggcgagaactcccgggccgcccaacgctcccagctcgccaccaccgttgccgccttcgctcggatgaccgtcgaagattccagaaagatcttgccgcctcagttctacccttcctgggtcgttttctcttccagccagaagttaacttggcttaactcgcatctcaccaagatctggccctatgttaacgaggctgcttctgagctcataaaagcgtcggtggaacctattctggaagaatatagacccgtggttttggcggctcttaaattttccaagtttactcttggtactgtagctccacagtttacaggcgtgtctataattgaggat

SEQ ID NO: 6297 - DNA, 368 bp, Glycine max
tcactcacgagtctcacgcttttcacgatgggcttcattttcggagtggtggtcggaagaattgtgggcctggccatcatagtgggcttcgtccgcggcgagaactcccgggccgcccaacgctcccagctcgccaccaccgttgccgccttcgctcggatgaccgtcgaagattccagaaagatcttgccgcctcagttctacccttcctgggtcgttttctcttccagccagaagttaacttggcttaactcgcatctcaccaagatctggccctatgttaacgaggctgcttctgagctcataaaagcgtcggtggaacctattctggaagaatatagacccgtggttttggcggctcttaaatt

SEQ ID NO: 6298 - DNA, 435 bp, Glycine max
  modified_base (380)..(380): a, c, g, t, unknown, or other
  modified_base (408)..(408): a, c, g, t, unknown, or other
ttggattcactcactcacgagtctcacgcttttcacgatgggcttcattttcggagtggtggtcggggataattgtgggcctggccatcatagtgggcttcgtccgcggcgagaactcccgggccgtccaacgctcccagctcgccaccaccgttgccgccttcgctcggatgaccgtcgaagattccagaaagatcttgccgcctcagttctacccttcctgggtcgttttctcttccagccagaagttaacttggcttaactcgcatctcaccaagatctggccctatgttaacgaggctgcttctgagctcataaaagcgtcggtggaacctattctggaagaatatagacccgtggttttggcggctcttaaattntccaagtttactcttggtactgtagctncacagtttacaggcgtgtctataattg

SEQ ID NO: 6299 - DNA, 430 bp, Glycine max
  modified_base (17)..(17): a, c, g, t, unknown, or other
gttttatctggttcatnttatatatgtttatcctcatttttgactcagtcgtatgcttgtgattaaagatgggatttgctgtctgggaaccaccacatggtcattacaaaatgcttaagtatccatggaagaattatgtgaaattaagtggggctctaaggcactgtgcgtttatggtcatggctatgcatgggtgcatactttctgaaatacaggccccagctgagaagagacaagttttccgcagtgagcttcagagggtaggttctgaaggagcaaaagtgttgcgtgaacttggaaacaaagttaaaaagatggataaactaggtcgtggagacttgctgtatgaagtgcactaggcagcaaaagaattgcaacagaagatcgattaaaaatcttaccttcttgtcaattcagagagctgggaaat

SEQ ID NO: 6300 - DNA, 429 bp, Glycine max
cccacgcgtccgtgatcttgtcacaaaaaatttcatgggtgttgcaacatctttggaaggtgttgtcaatcactaccttcattgtgttgaatataagaaggtgccatctaaaattcttacttaccaagctgctgatgacccaatttacagtggctacagatcagctgttgaatctacaagtaaagaagattcattgatgggatttgctgtctgggaaccaccacatggtcattacaaaatgcttaagtatccatggaagaattatgtgaaattaagtggggctctaaagcactgtgcgtttatggtcatggctatgcatgggtgcatactttctgaaatacaggccccagctgagaagagacaagttttccgcagtgagcttcagagggtaagttctgaaggagcaaaaatgttgcgtgaacttggaaa

SEQ ID NO: 6301 - DNA, 342 bp, Glycine max
acgcgaaccctccaacgccgccgccctccgccgcgccgcagtagtctggttccgcaacgacctccgcctcctcgacaacgagtgcctcaccgccgccaacaacgagtccctctccgtcctccccgtctactgcttcgaccccgccgactacggtaagtcggcctccggcttcgacaagaccggcccctaccgcgccgccttcctcatcgactctgtctccgacctccgccgtaacctccaggctcgcggctccgatctcgtcgttcgcgtttgggaacccgacgcggtgctggtggagctcgccaatgccgtccggggccgacgccgtgtacgccgcacgag

SEQ ID NO: 6302 - DNA, 436 bp, Glycine max
ccgcgacccctccaacgccgccgccctccgccgcgccgcagtagtctggttccgcaacgacctccgcctcctcgacaacgagtgcctcaccgccgccaacaacgagtccctctccgtcctccccgtctactgcttcgaccccgccgactacggtaagtcggcctccggcttcgacaagaccggcccctaccgcgccgccttcctcatcgactctgtctccgacctccgccgtaacctccaggctcgcggctccgatctcgtcgttcgcgttgggaagcccgaggcggtgctggtggagctcgccaaggccgtcggggccgacgccgtgtacgcgcaccgagaggtctcgcacgacgaggcgaaggcggaggagagggtggaggcggccatgaaggaggagaatgtggaggtgaagtacttctggggaagcacgttg

SEQ ID NO: 6303 - DNA, 395 bp, Glycine max
agcccacgcgtccggagattccttctttaatggacctaggccttaatccatctgcaacaatgtcacagaatggaaagtgcgttgctaatgcttctatggtaggaggggagactgaggcactgcagaagcttaaaaaatttgcagctgagtgtgcagctcagccacacaaggggtttaaggatggaacacagagtatatatggtgccaacttctcctgcaagatttctccgtggttggcaatgggatgcctttcccctcgcacaatgtatgaagaactgaagaagactgccggcagagtcatttctgcttcgtccaaccggaatgatggtggtaatggctcgtccagaactggaacaaattggttgatgtttgagttgctatggagggacttcttt

SEQ ID NO: 6304 - DNA, 431 bp, Glycine max
  modified_base (430)..(430): a, c, g, t, unknown, or other
caaaaataccagctagcaggaaaattgggtccatgaggctggatgactgggtcttgtgcaggatctataagaagaagagcatggtaaaagcattggagcacaaagaggcacacccagaagtccaaattgctaatcttgcgcctgcaaatcatgatgttgaacagaaaatgatgaaccttcctaggacttggtcccttacttaccttttggatatgaattacttgggtccaattttatctgatggctcttattgctcaaccttggattttcaaattaacaatggggattagacccttttgggaaatctcaaccggttgaaatgaaacattatgtaacaaaatcaaggaaagaccaaggtgaacaaaatagcaacattggacaagccatatatgtgaaacaaatgtatgatttgctaggataaaaccaatang

SEQ ID NO: 6305 - DNA, 438 bp, Glycine max
gcgaccgtgaccctgaacgaaacaggggagcaatactacatttgctccgttggatcacactgttccgctggccagaaactggcaattaacgttaacagagcttcttctaccggtccttcccctgcacctcaacccagaggaagtggttctccaccaagggctagccctgtccccacacaagcaccacaagccagtagccccactcctccaccaaggtctgcaccagcacctgcttttggtccatcctctgaaccagctactttcattgttggggaaaccgctggctggattgttcctggcaacgcttccttttacacagcttgggcctctggcaaaaacttcacggctggagacgtccttgtgttcaactacccatcaattacacacaacgtaaaggaggttacaaaggccaacttcgatgcttgcagctcagcctct

SEQ ID NO: 6306 - DNA, 404 bp, Glycine max
  modified_base (362)..(362): a, c, g, t, unknown, or other
  modified_base (396)..(396): a, c, g, t, unknown, or other
accacaagaagaaaaaaccgacacaaagatctagtcctagctagaatcaaacaggggcgatctcaccttcaagaacacatcgccatggcaaggaacttgcttcttgtgctttttgcagtagccaccctcctccatggctcagcagcccaaaccagacacatggtcggtgatgccacgggctggatcatccctgctggcggcgctgccacctacaccgcctgggcttccaacaaaaccttcaccgtaaacgacactctcgtgttcaacttcgccaccggccaacacaacgtggccaaggtaacgaaatcggctttcgacgcgtgcaacggcgggagcgccgttttcaccctgacctccggtcnagcgaccgtgaccctgaacgaaacaggggagcantactacat

SEQ ID NO: 6307 - DNA, 423 bp, Glycine max
  modified_base (406)..(406): a, c, g, t, unknown, or other
ggagaacaagaagaaaaaaccgacacaaagatctagtcctagctagaatcaaacaggggcgatctcaccttcaagaacacatcgccatggcaaggaacttgcttcttgtgctttttgcagtagccaccctcctccatggctcagcagcccaaaccagacacatggtcggtgatgccacgggctggatcatccctgctggcggcgctgccacctacaccgcctgggcttccaacaaaaccttcaccgtaaacgacactctcgtgttcaacttcgccaccggccaacacaacgtggccaaggtaacgaaatcggctttcgacgcgtgcaacggcgggagcgccgttttcaccctgacctccggtccagcgaccgtgaccctgaacgaaacaggggagcaatactacanttgctccgttggatcac

SEQ ID NO: 6308 - DNA, 412 bp, Glycine max
ctccttcccctgctcctgaagcacatgcaccagcaccaaaagccactagccccatttctgcaccaaggtctacaccagcacctggcccttcctctggatcagttacttacactgttggagagactgcaggctggattgttcctggcaacgcttccttttacccagcttgggcctctgccaaaaacttcaaggttggagacatcctagttttcaactacccatcaaatgcacacaacgtagaggaggtgacaaaggccaactacgattcttgcagctcagcctctcctatcgccactttcaccactccaccggccagagtcccccttagcaaatccggtgaacattactacatctgtggaattccggggcactgtttgggaggacaaaagctttccatcaacgtcaccggcgg

SEQ ID NO: 6309 - DNA, 416 bp, Glycine max
  modified_base (146)..(146): a, c, g, t, unknown, or other
  modified_base (370)..(370): a, c, g, t, unknown, or other
tttcactggaaggagaccaggaagataaaaccgacacaaaaatctagtcctagctaggaatcaaacaggggcgatctcaccttcaagaacacatcgccatggcaaggaacttgcttcttgtgctttttgcagtagccacccttctncatggctcagcagcccaaaccagacacatggtcggtgatgccacgggctggatcatccctgctggcggcgctgccacctacaccgcctgggcttccaacaaaaccttcaccgtaaacgacactctcgtgttcaacttcgccaccggccaacacaacgtggccaaggtaacgaaatcggctttcgacgcgtgcaacggcgggagcgccgttttcaccctgacctncggtccagcgaccgtgaccctgaacgaaacaggggagcaatactac

SEQ ID NO: 6310 - DNA, 425 bp, Glycine max
gcgatttgcagatacttacaagatggagtgccctgcagcgattaaccgtctcgtggtttctggtgtgcctgccaccgtggagcatcgtgcaactgcggctgcctctgcttccacctctgccgctactgtggccgagtgtgttcagaattttattacttcaatggattccttgaaacttaacatggtggctgtggatcaggtgcacccattgctctcggacctttatgcttcgcttaataagttgacaatcctgccgcctgattttgaggggaaaaccaaaatgaaggaatggattgcaaggttatctaagatgggtgcagctgatgagttgacggaacaacaggctaggcaacttcactttgatcttgagtcttcttacaattcctttatggcagccctgcccaatgctggtccttgacttgatt

SEQ ID NO: 6311 - DNA, 412 bp, Glycine max
accacgcgtccgcgttgctctgctttcaattttcggaaaagaagagattctgtacagagatgctctgaaacggtgctactacactctggagcaagggtataactcaatgccaattaacgttccgggaacactgttccacaaggcgatgaaggcaacgaacgagcttgcacaaatcgtggcccaaataatctggagcaggatgcataggaagatgattgattacaaggacttgttgggttcattcatggatgagaaatcagggctcaccgacgaccagatagcggataatgttattggcgtcattttcgcagctcgtgacaccaccgccagtgtgctgacgtggatcgtcaagtacctcggtgaaaaccccagtgtcctagaagctgttaatgaggagcaagagtgcatattg

SEQ ID NO: 6312 - DNA, 384 bp, Glycine max
tgggaagatgcaaaaaagatgccaataacttcaagggtcattcaggagactctaagagttgcttcaattttgtcttttactttcagagaagcagtagaggatgttgaataccaagggtatcttattccaaaagggtggaaagtgctacctctatttaggaacatacaccacagtccagacaacttcaaggagccagaaaaatttgatcccccaagatttgaggctgctccaaagcccaacacttttatgccatttggcagtgggatccacatgtgtccagggaatgaattagccaagttgggagattttggtcctgctacatcatctgaccacaaaggtcaggtggtcttgtgtgggtgcaaagaatgggattcaatatgggcc

SEQ ID NO: 6313 - DNA, 418 bp, Glycine max
  modified_base (349)..(349): a, c, g, t, unknown, or other
ttctccttctaattctttgttacccttcacctattacaagccactcacactaacacaaaaacatggaactaagcaccatgttttgcttgggtgcttcgtttctcttcattgatctcttcagggcactcatcaaaccttattatgtctccaaacgccgtgacttgccactcccacctggctccatgggttggccttacataggagaaacctttcaaatgtattctcaagatccaaatgtcttctttgcctcaaaaataaaaaggtttggctctatgttcaagtcccacattctaggttgtccctgcgtgatgatttccagccccgaggctgcaaagtttgtgctcaacanagctcaactcttcaagccaacattcccagcaagcaaagagaggatgttgggaaaacaagctatcttctt

SEQ ID NO: 6314 - DNA, 408 bp, Glycine max
gccttcttaccgaacatgacttgagctttccatggaagaagaacacgccgcaaaggcgccactgccggacgctttccttcagttcctggagaccaacgggctcgacccttccatttacactgctattgattccaccccacgatacattcggttgaaacccggtttcgaatcatgtattgaagaggttgaagcagaggtgaaatgcaaactcgaaaaattagagtggttaccgggattttactctcttccacctcacgttcaaattgctggttctagggcataccgagaagggaagatatatggaattgatgcagcttctggagctgcagttatggctttaaatatatcacctggggatcatgttctcgacctgtgtgctgctcctggtgccaaactttgtatgatttt

SEQ ID NO: 6315 - DNA, 377 bp, Glycine max
  modified_base (293)..(293): a, c, g, t, unknown, or other
  modified_base (315)..(315): a, c, g, t, unknown, or other
cccacgcaatccgcggacgcgtgggttgagctgttggatgccttattcaaggaatgtttccatgttggagaaaaaatggtttctgaaggtataattacaagagaagacatagaagaagccaaatctggtaatgggagtagagtcattagtattggtttgccagcatattgcttagtccagggactcttgcgctctgcaaaattaaattccgttggtataatgattagtgatgaaactgaactaactatcacaaacagaccaagggagacattttttgactggttcgttaatcnccttttgatcattaaggagcanatcaaagctgaaaatctttctgcctcagaagaggactacctctgcaaattagttctcttggg

SEQ ID NO: 6316 - DNA, 387 bp, Glycine max
aacaatttaattctagtttccactctccttatgttgcttcaactccacttcaccccggcaaaagccgccatcaaaggaggctactggtactccgaaagtggccttgcagtttccaacattaacccctctcatttcacccacctcttctgtgcatttgcccacctcgaccccaacaccaacaaagtcaccatttcctcgtcagactcatctcagttctcaaccttcactcaaaccctccaagcaaagaacccttcagtgaagacccttttgtccataggcggcggtttcggtccttctttggctgcaaatttctccagaatggcaagacaagccaacaccagaaaatcattcatagactcttcgatccaacaagccagatcgaacaac

SEQ ID NO: 6317 - DNA, 372 bp, Glycine max
ctcgaagaacaatttaattctagtttccactctccttatgttgcttcaactccacttcaccggatgaaaagccgccatcaaaggaggctactggtactccgaaagtggccttgcagtttccaacattaacccctctcatttcacccacctcttctgtgcatttgcccacctcgaccccaacaccaacaaagtcaccatttcctcgtcagactcatctcagttctcaaccttcactcaaaccctccaagcaaagaacccttcagtgaagacccttttgtccataggcggcggtttcggtccttctttggctgcaaatttctccagaatggcaagacaagccaacaccagaaaatcattcatagactcttcgat

SEQ ID NO: 6318 - DNA, 312 bp, Glycine max
gccaactcgaaaaccatttaaatcctagtttcaactctcctaatgtggcttcaactccaggtaacgcaatcaaaacccgccttcaaaggaggctactggtactccgaaagtggccttgcagtttccaacattaacccctctcatttcacccacctcttctgtgcatttgcccacctcgaccccaacaccaacaaagtcaccatttcctcgtcagactcatcttagttctcaaccttcactcaaaccctgcaagcaaagaaccctttagtgaagacccttttgtccataggcggcggtttctgtccttctttg

SEQ ID NO: 6319 - DNA, 430 bp, Glycine max
cccacgcgtccgaaagaaaatggccaactcgaagaacaatttaattctagtttccactctgcttatgttgcttcaactccacttcaccccatcaaaagccgccatcaaaggaggctactggtactccgaaagtggccttgcagtttccaacattaacccctctcatttcacccacctcttctgtgcatttgcccacctcgaccccaacaccaacaaagtcaccatttcctcgtcagactcatctcagttctcaaccttcactcaaaccctccaagcaaagaacccttcagtgaagacccttttgtccataggcggcggtttcggtccttctttggctgcaaatttctccagaatggcaagacaagccatacccaccagaaaatcattcatagactcttcgatccaacaagccagatcgaacaacttcctc

SEQ ID NO: 6320 - DNA, 309 bp, Glycine max
gggatgggggcattggcagcgtgcgtgaggtcaggatcacatctgggttacccgctggtgttagtgtggagaggttggacaagctcgatgatgagaagcatgtcttgaagtttagcatcattggtggtgatcacaggcgtgtcaagtatggttcaacgagtactttgcatgaggaggaagaggaataccgtgggaagacggtggcgatagagtcgtacgcggtggatgtcccggccgggactagcggcgacgatacgtgctcttttgctaatactatcatagcttgcaaccttaggtccttggctaaga

SEQ ID NO: 6321 - DNA, 423 bp, Glycine max
  modified_base (26)..(26): a, c, g, t, unknown, or other
accacgcgtccaaaaacagtcaacantagcttgctagctactcctgttgctgtgagaaccgttgatgtagatgctttgcaagcaagatttagagactccaacaataaaagccatgcttaacacctaccatgcctccaaactctcatcaaaccagtgtggttctagccttgtgcaaacaatagatgcacctttacctctcgtatggtccctcataaggcgctttgagtatccagaagggtacaagctctttgtgaagaagtgcaaccttcttgatggggatggtggcattggaagcgtgcgtgaggtcatgatcacatctgggttacccgctggtgttagtgtggagaggttggacaagctcgatgatgacaagcatgtcttgaagtttagcatcattggtggtgatcacagggttgtcaatta

SEQ ID NO: 6322 - DNA, 432 bp, Glycine max
aaaacaatcaacaatagcttgctagctactcctgttgctgtgagaaccgttgatgtaggtgctttgcaagcaagatttagagactccaacaataaaagccatgcttaacacctaccatgcctccaaactctcatcaaaccagtgtggttctagccttgtgcaaacaatagatgcacctttacctctcgtatggtccctcataaggcgctttgagtatccacaagggtacaagctctttgtgaagaagtgcaaccttcttgatggggatggtggcattggaagcgtgcgtgaggtcatgatcacatctgggttacccgctggtgttagtgtggagaggttggacaagctcgatgatgacaagcatgtcttgaagtttagcatcattggtggtgatcacaggcttgtcaattatagttcaacgattactttgca

SEQ ID NO: 6323 - DNA, 415 bp, Glycine max
caacaatagcttgctagctactcctgttgctgtgagaaccgttgatgtagatgctttgcgagcaagatttagagactccaacaataaaagccatgcttaacacctaccatgcctccaaactctcatcaaaccagtgtggttctagccttgtgcaaacaatagatgcacctttacctctcgtatggtccctcataaggcgctttgagtatccacaagggtacaagctctttgtgaagaagtgcaaccttcttgatggggatggtggcattggaagcgtgcgtgaagtcatgatcacatctgggttaccccctggtggtaagtgtgagaggtgggacaagctcgatgatgacaagcatgtcttgaagtttacatcattggtgggatcacaggcttgtcaatatagttcaacgattac

SEQ ID NO: 6324 - DNA, 429 bp, Glycine max
aatcaacaatagcttgctagctactcctgttgctgtgagaaccgttgatgtagatgctttgcaagcaagatttagagactccaacaataaaagccatgcttaacacctaccatgcctccaaactctcatcaaaccagtgtggttctagccttgtgcaaacaatagatgcacctttacctctcgtatggtccctcataaggcgctttgagtatccacaagggtacaagctctttgtgaagaagtgcaaccttcttgatggggatggtggcattggaagcgtgcgtgaggtcatgatcacatctgggttacccgctggtgttagtgtggagaggttggacaagctcgatgatgacaagcatgtcttgaagtttagcatcattggtggtgatcacaggcttgtcaattatagttcaacgattactttgcatg

SEQ ID NO: 6325 - DNA, 425 bp, Glycine max
  modified_base (356)..(356): a, c, g, t, unknown, or other
acaaaacaaggtcattgagaaaccccaaaacaatcaacaatagcttgctagctactcctgttgctgtgagaaccgttgatgtagatgctttgcaagcaagatttagagactccaacaataaaagccatgcttaacacctaccatgcctccaaactctcatcaaaccagtgtggttctagccttgtgcaaacaatagatgcacctttacctctcgtatggtccctcataaggcgctttgagtatccacaagggtacaagctctttgtgaagaagtgcaaccttcttgatggggatggtggcattggaagcgtgcgtgaggtcatgatcacatctgggttacccgctggtgttagtgntgagaggttggacaagctcgatgatgacaagcatgtcttggagtttagcatcattggtggtgatcacag

SEQ ID NO: 6326 - DNA, 405 bp, Glycine max
cggacgcgtgggcaacaatagcttgctagctactcctgttgctgtgagaaccgttgatgtagatgctttgcaagcaagatttagagactccaacaataaaagccatgcttaacacctaccatgcctccaaactctcatcaaaccagtgtggttctagccttgtgcaaacaatagatgcacctttacctctcgtatggtccctcataaggcgctttgagtatccacaagggtacaagctctttgtgaagaagtgcaaccttcttgatggggatggtggcattggaagcgtgcgtgaggtcatgatcacatctgggttacccgctggtgttagtgtggagaggttggacaagctcgatgatgacaagcatgtcttgaagtttagcatcattggtggtgatcacaggc

SEQ ID NO: 6327 - DNA, 411 bp, Glycine max
cccacgcgtccgaaacaatcaacaatagcttgctagctactcctgttgctgtgagaaccgttgatgtagatgctttgcaagcaagatttagagactccaacaataaaagccatgcttaacacctaccatgcctccaaactctcatcaaaccagtgtggttctagccttgtgcaaacaatagatgcacctttacctctcgtatggtccctcataaggcgctttgagtatccacaagggtacaagctctttgtgaagaagtgcaaccttcttgatggggatggtggcattggaagcgtgcgtgaggtcatgatcacatctgggttacccgctggtgttagtgtggagaggttggacaagctcgatgatgacaagcatgtcttgaagtttagcatcattggtggtgatcacagg

SEQ ID NO: 6328 - DNA, 429 bp, Glycine max
cttgctagctactcctgttgctgtgagaaccgttgatgtagatgctttgcaagcaagagttagagactccaacaataaaagccatgcttaacacctaccatgcctccaaactctcatcaaaccagtgtggttctagccttgtgcaaacaatagatgcacctttacctctcgtatggtccctcataaggcgctttgagtatccacaagggtacaagctctttgtgaagaagtgcaaccttcttgatggggatggtggcattggaagcgtgcgtgaggtcatgatcacatctgggttacccgctggtgttagtgtggaaaggttggacaagctcgatgatgacaagcatgtcttgaagtttagcatcattggtggtgatcacaggcttgtcaattatagttcaacgattactttgcatgaggaggaagagg

SEQ ID NO: 6329 - DNA, 439 bp, Glycine max
aaaacaatcaacaatagcttgctagctactcctgttgctgtgagaaccgttgatgtagatgcgttgcaagcaagatttagagactccaacaataaaagccatgcttaacacctaccatgcctccaaactctcatcaaaccagtgtggttctagccttgtgcaaacaatagatgcacctttacctctcgtatggtccctcataaggcgctttgagtatccacaagggtacaagctctttgtgaagaagtgcaaccttcttgatggggatggtggcattggaagcgtgcgtgaggtcatgatcacatctgggttacccgctggtgttagtgtggagaggttggacaagctcgatgatgacaagcatgtcttgaagtttagcatcattggtggtgatcacaggcttgtcaattatagttcaacgattactttgcatgaagag

SEQ ID NO: 6330 - DNA, 460 bp, Glycine max
aaacaatcaacaatagcttgctagctactcctgttgctgtgagaaccgttgatgtagatgctttgcaagcaagatttagagactccaacaataaaagccatgcttaacacctaccatgcctccaaactctcatcaaaccagtgtggttctagccttgtgcaaacaatagatgcacctttacctctcgtatggtccctcataaggcgctttgagtatccacaagggtacaagctctttgtgaagaagtgcaaccttcttgatggggatggtggcattggaagcgtgcgtgaggtcatgatcacatctgggttacccgctggtgttagtgtggagaggttggacaagctcgatgatgacaagcatgtcttgaagtttagcatcattggtggtgatcacaggcttgtcaattatagttcaacgattactttgcatgatgaggaagaggaatacggtgggaaga

SEQ ID NO: 6331 - DNA, 442 bp, Glycine max
cccacgcgttcggaagtgaacaattacagcacaagcctgtgcctgttctttctctgcctaaagaagtcgttttctcttcgccaagaccggttagtgagcttgatgctgccgcaactaaacttcaaaaagtgtacaagagttaccgcactagaagaaaccttgcagattgtgctgttgtggtggaagagctctggtggaaggcattagactttgctgctcttaaacggagctctgtttcattctttgatgtggagaaacaagaaaccgccgtgtcacggtgggcaagagcaaggacaagagcagctaaggttggaaaaggtttgtccaaggatgataaggctcaaaaattagccctccaacattggctagaagctattgacccacgtcatcgctatggacacaatttgcacatgtattacgatatttggtttgagagccaagc

SEQ ID NO: 6332 - DNA, 436 bp, Glycine max
gtgaacaacaattgcagcaccagcctgtccctgttctctctctgcctaaagaagtggttttgtcttcgccaagaccggttagtgagcttgatgctgcggctactaagcttcaaaaagtctacaagagttaccgcactagaagaaaccttgcagattgtgctgttgtggtggaagaactctggtggaaggcattagactttgcttctcttaaacggagctctgtttcattctttgatgtggagaaacacgaaaccgccgtgtcacggtggacaagagcaaagacaagagcagctaaggttggaaaaggtttgtctaaggatgataaggcacaaaaattggccttgcaacattggctcgaagctattgacccacgtcatcgctatgggcacaatttgcacatgtattacgatacttggtttgaaagccaaagcaccca

SEQ ID NO: 6333 - DNA, 413 bp, Glycine max
cattcatttaaattacgatatcaagcagttgaaattatgagcccagaggaagaagcacgtcagatagtagcagcaatgaggattcaacatgcctttcgcaactatgagtcaaagaaaaagatggcagccgctgctcggattcagcttagattccgtacatggaagtaccgtagagaatttctcaatatgcggcgtcaggctattaaaattcaagctgctttcaggggctttcaagcacggaagcaatatcggaaaatcgtatggtctgttggggtgcttgagaaagtgatcctgcgttggcttttaaagagaaaaggcttccgtggtctccaggttaatcctgccgaggaggagacacaggaaagtgatacaattgcagaggaggatttctttcgcaccagccggaaacaagc

SEQ ID NO: 6334 - DNA, 270 bp, Glycine max
tcgcccacgcgtacgcaagaacttagtaagtgaagaccaggagcagattgttgaggggataatgcaaaatattgagaaggatttaattcttcttggtgctactgcagttgaagacaaactacaagatggggttcctgaatgcattgacaagctagctcaagctgggattaagctatgggttttaactggtgataaaatggagacagcaattaatattggatttgcttgtagtttactcagacaaggtatgaaacaaattataattagctc

SEQ ID NO: 6335 - DNA, 422 bp, Glycine max
agagaagtagggttcgaaaatggcagcagaatcatcagagggcgaagaagaaaccaagtgaagcggaggtaaccaattgctcatagttgacgatgacttaacggaaatgggaaagaaagccgcttggagcgtgagttcctgcaaacccggtaacggcgtttcctctctccgtgacgacaatctcgaaacttattggcaatccgacggagggcaaccccatttagttaacattcagtttcagaagaaagttagacttcaattaattgtgctgtacgtggatttcaagcttgacgagagttacacgccgagcaaagtttccatccgtgccggtgatggttttcacaacttgaaggagattaagaccgtggaactcgtgaagccaactggatgggtttatctttccttgtctggagttgatccta

SEQ ID NO: 6336 - DNA, 441 bp, Glycine max
cccacgcgtccggttaacaaccaattgattggagcagaaattctttcactagctgaggaagatgtacctcctgaggatctcgtcttccacaagttctacacaaacaaaatgagtttgtcttctaaaccgaagaaaaagaaaaagaagtcagctgatgaggaagcagctgaggagttgtttgatgttgataatggtgaagttgatggtggggatgagagtgacaatgaagagattgagaatctgttggattccactgatccaactttgggaccagacagtgactatgattatgatgatttggatgaagtagccgatgaggaagatgaggacttgattggtgatgttagtgatgcagagattaattcggagatggatatagatataccctctgatattgatgaggaagagactgatgatgctccaattgatgatgacgacgac

SEQ ID NO: 6337 - DNA, 427 bp, Glycine max
aaagaagagaaagcgtccttgccaagacgctgtggctcccaccacggaagacgacaactgctgcaccaaggccgccgccgcatcacacggtttcatatccgttatagggcggcggcgcgtgatggaggatgcagtgaaggtggttaccggtttggtggcggcggaacaacactgtggcggttacgatttcttcgcggtttacgacggccacggagggaccttggtggccaacgcttgccgcgacaggctgcacttgttgctggcggaggaagtagtgagggggaccgcagcagacaaagggctggattggtgccaggtgatgtgttcctgtttcatgaagatggacaagggagttggtgaggagaacgatgatggcggcggaaacaccatgggttcgacggcggcggtggtggtggtcggaaaggag

SEQ ID NO: 6338 - DNA, 373 bp, Glycine max
aacaatgtccacgcttccgaagcaccaacccgaagcgaaaccccaagatcgccctgcggatcaaccagcttcggcgccctcggatgcaaaacccgaagatcttcatccgaaccagccaggttcggagtctcccgaagccaaagcagagggggaagaagaggatgaagaagaagaaggagagtgcgggttctgcctcttcatgaagggtggtgggtgcagagacgagttcatagggtgggaaaattgcgtccaggaggccgaaaacaacaacgaggacctcctcgagaagtgcgcccaggtcaccgccgctctcaagcgctgtatggacgcccactccgactactacgagcccatgctccgcgccgagaagctc

SEQ ID NO: 6339 - DNA, 360 bp, Glycine max
tccgtatacccgcgtcgcacccacgcgtccgcagcagaatactacaggtctctaccacctgtgagcaagacctatggagtggcctgtttgatgaccacttctgcatattatctgcaactctatgatgcaaggaacatagcacttgattatggcccagtgtttaaaagccttcaagtttggaggcttatcacaaatttcttctttcttggctcattttcattaccatttgcagtccgtctgataatgatagcaaaatatggtgtttcattggaaagagggcccttagactagataactgcatattatgttgtgatgttcataagtggtgcatattttattctttttatttatattctgtat

SEQ ID NO: 6340 - DNA, 416 bp, Glycine max
gggaccatggaggcaaattcaggtgccagcgaccgaatttcgagaatcgccggccacctccgcccccagagagaggatgatgtttgtttgaagcgtagcgattgccgtgcaaaaggtggggtctccggattcaaggtggccatattgggtgccgcaggaggcatagggcaacctctggcgatgttgatgaagatgaatccactcgtttcacttctccacctctacgatgttgttaacacccctggcgtcacttctgatataagtcacatggacaccggcgctgttgttcgaggatttttggggcagcagcagcttgaggatgcacttataggcatggacttggtgatcatccctgctggtgttcctcgtaaacctggaatgacaagagatgatctcttcaatataaatgctggaat

SEQ ID NO: 6341 - DNA, 368 bp, Glycine max
ctttcccgtgaaaagggaccatggaggcaaattcaggtgccagcgaccgaatttggagaatcgccggccacctccgcccccagagagaggatgatgtttgtttgaagcgtagcgattgccgtgcaaaaggtggggtctccggattcaaggtggccatattgggtgccgcaggaggcatagggcaacctctggcgatgttgatgaagatgaatccactcgtttcacttctccacctctacgatgttgttaacacccctggcgtcacttctgatataagtcacatggacaccggcgctggtgttcgaagatttttggggcaacagcagcttgaggatgcacttataggcatggacttggtgatcatccct

SEQ ID NO: 6342 - DNA, 442 bp, Glycine max
ctcggcacacaatacgccggggaaatgaagaagggtcttttcagtgtcatgcattatctcatgcctaagcgccaaatcctctccctacactccggatgcaatatgggcaaagatggggatgtggcactcttctttggactctcaggtactgggaagaccactctttccaccgatcacaataggtatttaatcggagatgatgaacactgttggggtgacaatggtgtctccaacattgaaggtggttgctatgccaaatgcattgacctctcacgggagaaagagccagatatttggaatgcaatcaggtttggcacagtgttggaaaatgtggtgtttgatgagcatgatcgagaagttgattactctgacaagtcagttacagaaaatactcgtgcagcttatcctatagagtacattccaaatgcaaagttaccttgtg

SEQ ID NO: 6343 - DNA, 436 bp, Glycine max
atctacacaaagagaacccaagggcacctttgtttgttgttgggactagcattggagcgtaatattctgataaaatatcttggtgaggatggtgagaatattcctgtagctggagctgtggctgtttgctctccttgggaccttttgataggagacagatttataacccgtaggcatgtgcagaagttttatgataaagcacttgcaattggacttcaaggttatgcaaaattacatcagcctcatttttctcgccttgctaattgggaagggattgaaaagtcaatttccattcgagattttgatcatcatgccacccgcattgttgggaagtatgagactgttgacacgtactatagacgctgcagcagttctacttatgtgcaatctgtttcgattccacttctctgtattagtgctctggatgatccagtct

SEQ ID NO: 6344 - DNA, 400 bp, Glycine max
cccacgcgtccgaatgaaatgtattatattggtgggaattctgagagtgtggaacaagatgtgatgcattcttataacatggcatttggtggtggtggatttgcaatcagttatgcattagcagctcaactagccaaaataatggatggttgtctaagtagatacttctatttttatggttctgatcaaagagtctgggcctgtattcatgaaattggggtgccccttaccagagaaaatggattccaccagtttgacataagaggaaatccatatggttttctagcagctcaccccttggtaccacttgtatcactccatcaccttgaccaattgagccccttctttcccaaccagactcaattacactcaaatgaaaagctcatcagtgcataccaca

SEQ ID NO: 6345 - DNA, 374 bp, Glycine max
gaaaaaacaacaacaacaacaaaaaaaaacatcatcatcaaaaaaacttccgagagtttaatggcaacacgcgtgatccctccaagaatcctcaagaagctccgttacaacacaacaaccaagccactcaacgctgcccacccctcaatctctccagtcatcgccccaccgtcactcttcgagaggtcgccgtcccctgtcgcggatgctgtttcaacaacatccacgactatggagacggcgaatctcaacctcgacgacgcggagcggcttttcgcgtcagtatcgacggaaaagctgctccggtcgtccgcggttttgcatgcgacggcggtggggcccatggtagacctgggaatgtggttgatgaagtc

SEQ ID NO: 6346 - DNA, 427 bp, Glycine max
cccacgcgtccgcccacgcgtccgatcaggtcatgccatggaagactatcttgttgctcaatttaagcaagttgacaacaaagagttgggtttatttgcaatatttgatggccactctggtcacagtgtacctgattacttgaagtctcatttgtttgataatatcttgaaagaggtaatgaggcctaacttctggacagaacctgctgaggctgttaagagagcatatagtataactgattctactattttagacaaatcaggtgaattgggtagagggggttcaactgcggttacagcaatattgatcaacttgttacaagctactagtgggcaatattggggattcccgggctgtcttatgtaagaaatggcgtaccaaacaactatcggtggatcatgaaccaagcatagaaagtgaagatat

SEQ ID NO: 6347 - DNA, 388 bp, Glycine max
cgggtccggaatttttggatttgttaatttcaaccttcaattttttttaaaaaaccaaccaatccgcaaagtgcaaatttcaaatctttcacgtattgggttcttctcttttccctcttcgtctccgatcgatccaattctcttcccatggctacgatcggacacaacaatctcaatgccaaattggttcttctcggggacatgggtgctgggaaatccagcctcgttttgcgctttgtcaagggtcaatttctcgaatttcaggaatcaacaataggggcagcgttcttttcacagacgctggcagtaaatgatgcgacagtgaagtttgagatttgggacacagcaggacaagagaggtaccatagcttggctcccatgtattaca

SEQ ID NO: 6348 - DNA, 362 bp, Glycine max
agagctcagtcggtttagaggcacaggaagaccacccttatccttttgcaggagcttcaaatgttaaagtgcgccttggggttgtttcagtagctggaagctccattacttggatggatcttctctgcgggggcacagaacagcaaaacaatgaggaggaatatttggcaagagtcaattggatgcatggaaacattctcactgctcagattttgaacaggcaccacactaaaataaagatcgttaagtttgatattagaacaggccaaaggaaaaatatattgttcgaagaaaacagcagttggatcaatatacatgactgtttcacacctcttgataaaggagttaccaaattttcgggt

SEQ ID NO: 6349 - DNA, 381 bp, Glycine max
ggatgaggagcatcatgagccccataatcatctccatgttcaacccaaaatccacggtctggtccatactcatcaatatagatttttggacaaggcagcgatcatagatgaaattgatgccaagacgaagacaagagacccttggaggctatgttcagtgacacaagttgaggaagtgaagcttgtccttcgtttgattccaatatggctaagttgcttaatgttcactgctgtacaagctcaagtgcacacatttttcattaagcaaggtgccacaatggtacgtaccataggaccacatttccaagtcccaccagcatcggtacaaggcctagttggaggcacaatactctttgctgagccattctatgaccgtgtctt

SEQ ID NO: 6350 - DNA, 465 bp, Glycine max
tgcgaagttgaagagttcgggagctaaggtttcaatgccagttgcttctaatgaagtgcccagaagttcaagccacattgaaaaggtaaaaagctcccgttctgttcagcaggagaaagaactactgccttccgttccttcaggaccctctttgggagattttgttctttggaaaggagagacaacaagcccatctcctcctccagcatggactaccgattctgctaggattcctaaaccaacatcattaagggacattttaaaggagcaggagaagaagtcctatgcagtactaccaaaccaactgcctacccctcaaaaatcacagcctgcccaagctgcacggaatagtggttcttcacgcccaatttcagcttcatctccatcaaaaactgcaccttctagccagataaactcccaagcttctctgtcaaaatacagaggggatgatgatttgttttgggg

SEQ ID NO: 6351 - DNA, 395 bp, Glycine max
cttagatcggttgggaatcgatgattttgatatggaagaagaggtgagacccgatttcggttgcccctattgttatgaagactttgacatcgcgtctttgtgttctcatcttgaagatgaacattcttgtgaatcaagagtcacgatttgtcctatatgctccgataaagttgcacggaacatgttaagtcacataacgctgcaacatgggcatttattaaagttacagagaaggcgcaggttaagaagagttgctattccaaacagtcagacattgtcccttttgggtcgagatcttcgtgaggctcatctacaggtgcttcttggtggtggaacgtgatggtggataccggtcaaatagtgtagctgcagccgtatctaatgctggtgctact

SEQ ID NO: 6352 - DNA, 472 bp, Glycine max
  modified_base (6)..(6): a, c, g, t, unknown, or other
cgcgtncgattttgattcattagagagaaaatacaagaaagtgttcgacgaatctgttgaaagtggtgactggatttgattcattcacataaccaatttatcatctctccgatctttcaatggattctgacttctggacctcgcgtcttgctgccgctaaacgccaatacacgcttcagcatcaccatccaaattctcacttagatcggatgggaatcgatgattctgatgtggaagaagaggtgagacctgattttccttgcccgtattggtatgaagactttgacatcgcgtctttgtcttctcatcttgaagatgaacattctcgtgaatcaagagtcacgatttgtcctatatgctccgttaaagttgcacggtacatgttaaatcacataacgctgcaacatgggcattgatctaagttacagagaacgcgcaggttaagaagagtcgctattccaaacagtcagac

SEQ ID NO: 6353 - DNA, 436 bp, Glycine max
agagaatagagtgagagaaagagattcatgaacaaaaccagagatgggaaggctatgggaactggaggaacaagcctgctctcagtggctgcaatggtggcatgcttgctgcctcctttgtattagtggttgagatattggagaatctggcatttctagccaatgcaagcaattcggtgctgtatctgaggcagtacatgcacatgtacgcttcaaaatctgccaacaatgtcacaaatttcatgggaacagtcttcctccttgcccttcttggacgtttcttatctgatgcttttttcaccacttatcacatctacctgataagtgcagtcattgaattcctggtatgcaccctatattaattttcatctctctctgtgtcactacttgcgaatataacacttaatttaaattctttcagcatattacataatat

SEQ ID NO: 6354 - DNA, 427 bp, Glycine max
aaggcaactagggagaaggcagagaaagaaataggaaaggaagccaaagaattctacacaaaaatggttgaacaaaaaaatcaggtcatccctcttcttactccttacaggatggggaacttaaatctttcacacagaatcgttttggcgccactatttagagcaagatcttacaacaacgttgctcagccgcatgctattctatattactctcaaagagctaccaagggaggtcttctgattactgaagctactactatttcacccacttctaaataccatccaaacgcagttggtatatggtcaagagagcaaatcgaagcatggaaacccattgtggatgctgttcatgccaaaggtggtatattcttctgtcagattgttcatactggaagggcttacgatccagatcttaagcccgatggac

SEQ ID NO: 6355 - DNA, 448 bp, Glycine max
gcggacaaaggcaactagggagaaggcagagaaagaaataggaaaggaagccaaagaattctacacggaaatggttgaacaaaaaaatcaggtcatccctcttcttactccttacaggatggggaacttaaatctttcacacagaatcgttttggcgccactatttagagcaagatcttacaacaacgttgctcagccgcatgctattctatattactctcaaagagctaccaagggaggtcttctgattactgaagctactactatttcacccacttctaaataccatccaaacgcagttggtatatggtcaagagagcaaatcgaagcatggaaacccattgtggatgctgttcatgccaaaggtggtatattcttctgtcagattgttcatactggaaaggcttacgatccagatcttaagcccgaggacaaaccttaatatcat

SEQ ID NO: 6356 - DNA, 438 bp, Glycine max
tgctctccttcgagcgtcgcctgaaggataacatcgaagcgcgccttaaataccctagcgaaccggaccgcttggccgattccgaagtagaactccacgaagagcttcagaagctgaaggtcctcgccggcgcgccggagctctacccggacctcgtcaacctcaacgtggttccctccatcgtcgacctcctcaaccacgacaacaccgacatcgccatcgacgtcgtgcaattgctccaggacctcaccgacgaggacgttctcgacgacaacgacgactccgctagggttttggtcgacgcgcttgtcgacaacagcgcgctcgagctcctcgtgcagaacctgcaccgcttgaacgattccgatcccgacgagaacgccgccgtgtacggctccctcgccacggtggagaatatgatcgacgtgaagcccgcgg

SEQ ID NO: 6357 - DNA, 441 bp, Glycine max
gcttcctctgccgccatcgacggcgcctgctgcggcggcgagcggcggagcgagcgggcgggcggcgcagcaggtgagtccctttctcggagctggagagactgaaccgcatcgggagcgggagcggcgggacggtgtacaaggtggtccaccgcacgagcgggcgcgtgtacgcgctgaaggtgatatacggtcaccacgaggagtcggtgcggcggcagatccaccgggaaatccagatcctccgtgacgtggacgatgcgaacgtggtgaagtgtcacgagatgtacgatcagaacagcgaaatccaggtgctgctggagttcatggacggaggttctctggaggggaaacacatcacgcaggagcagcagctggcagatctgtctcggcagattcttagggggctggcgtacctgcaccggcggcacatcgtccaca

SEQ ID NO: 6358 - DNA, 402 bp, Glycine max
cgaaaatgtggaagagaacgggttttgaagaagaagcagttcaattgatcaactcggatttcagggacctaagtctagctgctaatagactcgcccatcatgccatcaaacttggtggcattggctttggagcctcttttttcggattgtttgctgccattgctgctatttatctgttgattttggatcgtacaaactggaaaacaaatattctcacagcactactcattccatacattttcttcagcttgccttcattaattttcgacgtcttcaggggagagcttggaaaatggattgctgcagttgctgttgtattacgccttttccttccaagacacttccctgattggctggaattgcctggtgctctgattcttcttatcgttgtagctccttctc

SEQ ID NO: 6359 - DNA, 432 bp, Glycine max
cccacgcgtccgggaagagaacgggttttgaagaagaagcagttcaattgatcaactcagatttcagggacctaagtctagctgctaatagactcgcccatcatgccatcaaacttggtggcattggctttggagcctcttttttcggattgtttgctgccattgctgctatttatctgttgattttggatcgtacaaactggaaaacaaatattctcacagcactactcattccatacattttcttcagcttgccttcattaattttcgacgtcttcaggggagagcttggaaaatggattgctgcagttgctgttgtattacgccttttccttccaagacacttccctgattggctggaattgcctggtgctctgattcttcttatcgttgtagctccttctctaattgcaagcacctttagagacaaca

SEQ ID NO: 6360 - DNA, 364 bp, Glycine max
atcaagggttgtgaaagcagagaagtgagatacactaagttatcctcataaatacactctaattaggtggcaagataagtgtctaaccttagtaacattgccacatattgtgttcattttggaattgtgccactaaaattctattcaattcatctatggctgcctcttcttatgctatgcaatcaatcctggcaaaccctttgatccgcatttccagcgggtctagggtgaaccaatttggcgttcctgctttgcacatgagaaggaatgttggcctgagagttaggtccatggctaaggaagaacaaccaagtgagcctgcaaccccagttacaccgccaccatcagtagaaccaagccacag

SEQ ID NO: 6361 - DNA, 407 bp, Glycine max
caacaataggagatctcctaatcagtcatctccaagtagtcaagacagagcagggccatcagaattacaatcattttcagaatctctgaaatctaaactgaatgctgtatcaacaagatacaaggagtcaatttccaagagcacaagagggtggaaggagagatggttctctcggaacaacactatgtctgaccttggatctgaagttaggcgagaagttaatgcagggattgcaactgtgtcacgcatgatggaacgcctggagaccagcgacaataatagaagcaatagcaattctgcccccagtaatatagaggatggttcagttcaggaatataatggtcaaactttaacaccaggcaatgaaggggacggtcttttgagagacaattacccaaaagcttctt

SEQ ID NO: 6362 - DNA, 479 bp, Glycine max
aaaacttctctctcacactcactttctctctctataactctttctcacccgctagggtttccggttcatcgcatcttgagtttgcaacctcgtcttgtgatttccatggagggtgctgggatggaagagaataatattattaatgatgatgataataataacaagtctgaggcgcatttgacttctgccgctgcttttgtggagggtggaattcaggacgcttgtgatgatgcttgcagtatatgccttgaagctttctgtgatagtgatccttccacggtgacgagctgcaagcatgagtttcatcttcagtgcattctcgaatggtgtcaaagaagctcccagtgccccatgtgttggcagcctatcagtctcaaagatccaacaagccaagaattacttgaagcagtggaaagagagcgaaactttaggttcaatccatctagaaatgccacaatatttcatcatccaacactggg

SEQ ID NO: 6363 - DNA, 428 bp, Glycine max
acgcgtcaggcccgaaggctcccatggcatctatccagagcctcgtgcacttaccacttctgagatatctgaaatagtgcatcattatcgccaagcagctattaatgcaattcgagcaggttttgatggaatcgagattcatggagcacatgggtatctcattgatcaattcttaaaggatgcaatcaatgatagaacagatgaatacggtggaccactagaaaaccggtgcaggttcttaatggaggtagttgaagctgttgtctctgccattggagcggaaagagttgctatcagaatttcaccagcaattgatttcaatgacgcctttgactctgacccacttgggctaggcttagcagtgattgaaagactcaacaatttgcagaaacaagtgggcacaaaactcgcttatcttcatgttactc

SEQ ID NO: 6364 - DNA, 415 bp, Glycine max
gagcgctcaatgggactccactggcagcacatgctgaatactacgctcagagatcaacaccgggtggatttctcatcactgaaggcaccttgatctctccaacttcttctgggtttcctcatgttcctggaatatactcagatgaacaggtagaggcatggagaaatgtagtggacgccgtgcatgccaacggcagctttatcttctgtcaactctggcatgttggccgtgcatcacatccagtgtatcagcctggtggggctctaccctcttcgtccaccagcaaacccatatcagacaagtggaaaattctcatgcccgatggctcccatggcatctatccagagcctcgtgcacttaccacttctgagatatctgaaatagtgcatcattatcgccaagcagctattaatgc

SEQ ID NO: 6365 - DNA, 449 bp, Glycine max
  modified_base (427)..(427): a, c, g, t, unknown, or other
accacgcgtgcggaaaaccggtgcaagttcttaatggaggtagctgaagctgttgtctaggccattggagcggagggagttgctatcagaatttcaccagcaattgatttcaatgacgcctttgactctgacccacttgggctaggcttagcagtgattgaaagactcaacaatttgcagaaacaagtgggcacaaaactcgcttatcttcatgttactcagcctcgattcacacttttggcgcaaaccgagtcagtgagtgaaaaggaggaagctcatttcatgcagaaatggagagaggcttatgagggaacattcatgtgtagtggagcttttactacggactcatgaatggaagctgtagctgaaggccatgctgatttggtatcctatggtcgtcttttcatctgcaatccagacttggttntaaagcttaagctcaatgcacc

SEQ ID NO: 6366 - DNA, 460 bp, Glycine max
acgctgaatactacgctcagagatcaacaccgggtggatgtctcatgactgaaggcaccttgatgtgtccaacgtcttctgggtttcctcatgttcctggaatatactcagatgaacaggtagaggcatggagaaatgtagtggacgccgtgcatgccaacggtagctttatcttctgtcaactctggcatgttggccttgcatcacatccagtgtatcagcctggaggggctctaccctcttcgttcaccagcatacccatatcatacaagtgggaaattctcatgcccgatggctcccatggcgtctatacatagccttgttcacttaccacttctgagatatctgaaatagtgcataattatcgccaagcagctattaatgcaattcgagcaggttttgatggaatcgagattcattgagcacatgggtatctcatttggtcaattctttaaaggat

SEQ ID NO: 6367 - DNA, 277 bp, Glycine max
tttgctgaaacacccaccgcgttagtcaataacatgtttgctcgtccggttcaattcgcgggttctctcttcttcttcctcttctgctcgaccctcatatctcttttcgccggaatcctctgctcttctctcgcatctaaaccttccaactcttctacgacgtcgtcttgttcttaccctctgctgctgcttcttcatcttcttctccttcttctccgtttcggcttcgccttcccaagccttccaccgtgttctctgcttcttcttctgcttcgtc

SEQ ID NO: 6368 - DNA, 436 bp, Glycine max
aactttggtttcacgtatgagctgaagctttcaacgaggccagagaaatacctaggagatattgcaacttgggacaaagctgaaagtgctcttaaagaagctttagatgattttggcaagccttggcagttgaatgaaggggatggtgcattctacggaccaaagatagacatcagtgtatctgatgcattgagtaggaaattccagtgtgcaactttgcagcttgacttccagcttcctgatcgttttaagttggaattctcagctgaggatgaagccaaaattgagagacctgtaatgatacacagagccatcctaggatctgttgaacgcatgtttgccatacttttagagcactacaagggtaaatggcctttctggctcagtcctcgtcaagcgattgtatgccctgtgtctgaaaagtcacaatcttatg

SEQ ID NO: 6369 - DNA, 436 bp, Glycine max
attagcatcaaaaccagtaatccggtgctgctagaggatgggaactagtgaatggcatatcgagcgaagatctagcttcggcactgaatcccccttagcaagagaggcaggaaatgtgcctgaaactgggtcactctctattgttgtgcttggcgcttctggggatcttgctaagaagaagacatttcctgcacttttccatctataccggcagggattcttaccagcagatgaagttcacatttttggctatgcaaggacaaaaatatctgatgatgaattgagaaaccggttgcgtggcttattctggtccaaaccaaagggccttttcccaactggtggaagatgtagaggagtttttacagctgatcaaatatgtaagtggctcttatgattctgaggatggatttcgcttgttggataaagagatttcaga

SEQ ID NO: 6370 - DNA, 428 bp, Glycine max
aaacaacattcgcatcaaaaccacagtggttctagtaatccggcgctgctctaggatggggactagtgaatggcatatcgagcgaagatctagcttcggcactgaatcccccttagcaagacaggcacgaaatgttcctgaaactgggtcactctctattgccgagcttggcgcttctggggatctacgctaagaagaagacatttactgcacttctgcatctataccgtcagttgaatgaaggtgatggtgcattctatggaccatagatagacatcagtgtatctgatgcattgggtaggaaattccagtgtgcaactttgcagcttgacttccagcttactgatcgttttaagttggaattctcagctgaggatgaagccaaaattgacagacctgtaatgatacacagagccattctaagatct

SEQ ID NO: 6371 - DNA, 405 bp, Glycine max
  modified_base (384)..(384): a, c, g, t, unknown, or other
cgaagagaagaagatggaggttagtttatcctcaacatcatgtatacccttaagctcgaagttgaagcataagcatggccttttccactctcaaattcccattcccacagcttcaaccaaaaccagaagaacaaaacctttgtccatagttaacgcctccagacaaaccttgtcctccaactggctcgtttctccacacgatttttctgcatccaccgcttccccatggcttcccagattcgaagagctcgacgccaccaacatgcttctccgtcaaagaattatttttttgggttctcaggtggatgatatgactgcagattttatcattagtcagcttttggttttggatgctgaagactccaagaaagacattaagttatntataaattcacctggtgggtc

SEQ ID NO: 6372 - DNA, 467 bp, Glycine max
aaagaagaggggggcgaagagaagaagatggaggttagtttatcctcaacgggatgtatgcgccttaagctcgaagttgaagcataagcatgatcttttccactctcaaattcccattcccacagcttcaaccaaaaccagaagaacaaaacctttgttgatggttaacgcctccagacaaaccttgtcctccaactggctcgtttctccacactatttttctgcatccaccgcttccccatggctgttcagattcgaagagctcgacgccaccaacatgcttctccgtcaaagaattattttattgggttctcaggtggatgatatgactgcagattgtatcattagtcagcttttgttattggatgctgaagactccaagactgacattaagttatttataaattaacctggtggttctggaactgctggaatgggaatttacgatgccatgaagttgtgcaagg

SEQ ID NO: 6373 - DNA, 318 bp, Glycine max
accacgcgtacgaggaggggttcgggtgtgagagcgagaatcagaccatgaagaaagaggacacagcgacgctgatcagtgcctaaggttctgaatttgtggtctacagagaagctgctatggtttcacagaccatacataacatgcttacttatccaaggagtttcgctgagaaggcacacggtgatattacctatcctgaaatcagcaccaccattctggataagatttgccagtacttttattggcatgtacaattcgccagtgcgaaggatacggaatttaccattgaacctgaattaactctggagctaatga

SEQ ID NO: 6374 - DNA, 433 bp, Glycine max
cttgtcaaccctttgagagttagaatggctgctgctattgaaatccccacaatagtgttgccaaactcctctgcccaacagaggatgccagtggttggaatgggatctgcccctgacttcacatgcaagaaagacacaaaggaggctatcattgaggccgtgaaacagggttacagacacttcgacactgctgctgcttatggctctgaacaggctctcggtgaagctctcaaggaagctatccatcttggcctcgtcttccgccaagacctctttgtcacttccaagctttgggtcaccgaaaatcatcctcatcttgtccttcctgctttgcgcaaatcacttaaaactcttcaactagagtacttggacctgtatctcatccactggcccctgagttctcaaccagggaagttctcattttcaattgaag

SEQ ID NO: 6375 - DNA, 456 bp, Glycine max
caacaagttaatagcattccgcaaaatggctgccaccaccttagtctctgaagtcgctctcggctcctcctccggccagcggaagatgccgctgatgggcctcggcaccgcgccggaagcaaccagcgcggttaccacaaaagatgctgttcttgaggccatcaagcagggctacaggcactttgatgctgcttctgcttatggtgtggaacagtctgtgggagaagccatagctgaagcacttaagcaaggactaattgcatccagagatcaactcttcatcactaccaaattgtgggtcactgataaccatgcccatactattcttcctgccctgcagaaatctctcaggacacttcaactagaatacatagatctctttctgatccactggcccatggctactaagcctggaaaagttgtgtaccccattgaagtatcagagatagtggaatt

SEQ ID NO: 6376 - DNA, 415 bp, Glycine max
ctcccctcctcctccggtcagcggaagatgccgctgatgggcctcggcaccgcgccggaagcaaccagcgcggttaccacaaaagatgctgttcttgaggccatcaagcagggctacaggcactttgatgctgcttctgcttatggtgtggaacagtctgtgggagaagccatagctgaagcacttaagcaaggactaattgcatccagagatcaactcttcatcactaccaaattgtgggtcactgataaccatgcccatactattcttcctgccctgcagaaatctctcaggacacttcaactagaatacatagatctctttctgatccactggcccattgctactaagcctggaaaagttgtgtaccccattgaagtatcagagatagtggaatttgacatgaaaggtgtgt

SEQ ID NO: 6377 - DNA, 413 bp, Glycine max
acggacgcgtgggtttctctctcccttagtcaaagggattcatcgttcttcttcccaggttatttagaaaagcaaaatggtgaagatttgctgcattggtgctggatatgtggggggtcctactatggcagtcattgcacttaagtgcccatccattgaagtcgctgttgttgatatctctaaatcccgcattgcagcctggaacagcgaccagcttcctatctatgaacctggccttgatggtgttgtgaagcaatgccgtggcaagaacctcttcttcagcactgatgttgaaaagcatgtctttgaggctgacatagtgtttgtctctgtcaacaccccaaccaaaactcagggtcttggagctggcaaagcagcagatttgacatattgggagagtgcagctcgcatga

SEQ ID NO: 6378 - DNA, 436 bp, Glycine max
  modified_base (287)..(287): a, c, g, t, unknown, or other
  modified_base (358)..(358): a, c, g, t, unknown, or other
  modified_base (389)..(389): a, c, g, t, unknown, or other
gattcttggggtcaataacgagcagcgtggcatgcctgatttgaattctctaagggaggtgatgcaaaacccagagtttctacgcctgttttcctcacccgagacactgcagcaactcttgtcttttcagcaagctcttctgtctcagcttggtcagcaacaatcaacacaggaaccaggtcaaacaggtggaggcactggaccgatgaacaacttggggctggagatgttatcaagcatgtttggtggactcggagctggtagcctggctgttcctaacagatcanatgagccgccggagcaattgtatgccacccaactttctcagcttcaggagatggggtttcttgacacgcangagaacataaaggctcttattgctacatcanggaatgttcatgcagcagttgagccgcttttggggaactccggacag

SEQ ID NO: 6379 - DNA, 364 bp, Glycine max
tacattcgatgcaggtgaagcttttgccatgatgatggcatcctatgttgctcttgcagagtccagcggagctttcattgctgtctatcggtatgcaagtgcatcaccattaccaccatctatgcttagtcgcggcatcggttggcagggagttggcattctattatcaggattgcttggaactggcaatggatcctctgtatctgtagaaaatgctggtcttttggctttaactcgtgttgacagtcgaagagtggtgcaaatatctgccggagttatgatgctcttttcaattctggggaaatttggagccgtttttgcatccatttcacctgcaaatgtggccggactgtactgcttgatc

SEQ ID NO: 6380 - DNA, 426 bp, Glycine max
cccacgcgtccgcccacgcgtccggcgtaccgaaggcagtggcagcgacgatccggctcacggtgccggccggaggagctcggccggcgccaccggttggaccggcgctgggtcagtaccggctgaacctgatggcgttctgcaaggacttcaacgcccgcacccagaagtacaaggcggagacacccatggccgttacgataacggcgtacaaggacaacaccttcgagttcaccgttaagtcgccgccggtgtcgtggtacctgaagaaagccgccggcgtggaatccggtagcagccggcccggtcacgtgaccgcgtcctcgttgtccgtgcggcacgtgcacgagatcgcgaaggcgaaacagtccgatccgtaccttcagaacatgcctctcgagtccatttctaagtccatcattggaa

SEQ ID NO: 6381 - DNA, 376 bp, Glycine max
acgcgtcagaagaaatgagaagattgcatgctatgtcactgtcagaggtgacaaggcaatgcaacttttggagagtggtttgaaggtgaaggaatatgaacttctcagaaggaacttcagtgatactggttgcttcggctttggtattcaggagcatattgatttgggaatcaagtaagttgaagaacccttggatttttatgctgttgtttttactttgcctgaggtaaacattttaggacttaagggaagctgattatttgatatgggttgtggtgtgcacaatgcatattcaaaattttggatatgacataacatatctcttctcctttaagctgcatttcagttttgacttgaaccaaatgttaactggttc

SEQ ID NO: 6382 - DNA, 456 bp, Glycine max
tcgattcgcacttcttcttttcacactgccgctgcaacaatggctccagagaagaaactttggaacccaatgagggagataaaagtgcagaagctcgttctcaatatctctgttggcgagagtggagatcgtctcaccagagccgccaaggtgttggaacaacttagtggccaaaccccagtgttttccaaagcaaggtacactgttcgttcctttgggattagaagaaatgagaagattgcatgctatgtcactgtcagaggtgacaaggcaatgcaacttttggagagtggtttgaaggttaaggaatatgaacttctcagaaggaatttcagtgatactggttgcttcggctttggtattcaggagcatatcgatttgggaatcaagtatgatccttcaactggtatttatggaatggatttcttttgtgttctggagcgtcctggctatcgt

SEQ ID NO: 6383 - DNA, 308 bp, Glycine max
aattcggggccgaccacgcgtcaacacgcttcttctttttctcttctctcatttttcagtttctccgtttcttattcgttagatctcatcttacactcgccatcaagttcgtctcgcgccaccgtctacgcagctccgatcacctcctttggttccctcactttctcgctctgcttcttctcagaaatatgccttctcagaaggttgaaacgggtcatcaagacacggtcgatgatgttgcgatggattactatggtaagatgctggccacggtttcatcagatcacactagtaagataattggggtc

SEQ ID NO: 6384 - DNA, 433 bp, Glycine max
  modified_base (298)..(298): a, c, g, t, unknown, or other
accctactcattctccatacctcaacgaagaggttaaagagacggcaacactttgctgggcgccttgaccgagcagagcttcgtcttggccctcgattttgccctaaagtactctcagtcacaacagacaccgtcgtcgtcgtcgtcgtcatcaatggcaccgaagcagaccaaggctgagaagaagatcgcttacgatgcgaagctgtgcgacctaatggaggagtacggccagatcctcgttgtgaactccgataacgtgggatcgaaccagcttcagaacattcgcaagggtctncgtggcgactccgtcgtcctcatggggaaagacaccatgatgaagcgctcagtcaggatgcacgctgagaaaaccggaaacaacgcctatctcaaccttattcccgctcttgttggcaatgtgggattgattttc

SEQ ID NO: 6385 - DNA, 473 bp, Glycine max
accaagcatatctcatttgaatacattccttgtagtttatactgaaagatgggtttgaagatggcgttactgatcctaggcctttccctcatgctccttttggtctcctctgaggtggcatccacgaatacaaaagaggaggcaaatggagtggatgatgccaaatatcccggtggaagctatggagggggttacccaggtcatggcggtggcggttatcctggccatggcggtggcggttatcctggccatggcggtggtggtggctatcctggtcatggtggtggccaccctggtcatggtggcggctaccctggccgtggtggtggatactgtaggcatggctgttgcggtggccggacatacaacggaggttgcagaaggtgctgctataacgctggcgaagctgttgctgcacaaactcaagataagactcacgattaagacgatgcagttctacttaattagtactt

SEQ ID NO: 6386 - DNA, 367 bp, Glycine max
tgggaagaaagttgatgataaggagtggtatgttggaaaagcccagaaaaaatctgagcgtgaacaagaactgaaaggacggtttgagcagagtataaaggaatctgctgacaaatatcaaggtgtgaacctgtatctcaagaacttggatgatactatcagtgatgaaaaacttaaggaaatgtttgctgaatatggtacaataacttcatgcaaggttatgcgagaccccactggaatcggtagaggatcaggatttgttgcattttcaactcctgaggaagcatctcgtgctctcggtgagatgaatggtaaaatgattgctggaaaacctctgtacgttgcccttgcacagagaaaagaagac

SEQ ID NO: 6387 - DNA, 333 bp, Glycine max
ttggactaactccgactaggatgttggaacagcccagaaaaaatctgagcgtgaacaagaactgaaaggacggtttgagcagagtataaaggaatctgctgacaaatatcaaggtgtgaacctgtatctcaagaacttggatgatactatcagtgatgaacaacttaaagaaatgtttgctgaatatggtacaataacttcatgcaaggttatgcgagaccccactggaatcggtacaggatcaggatttgttgcattttcaactcctgaggaaccatctcgtgctctcggtgagatgaatggtagaatgattgctggaaaacctctgtacgt

SEQ ID NO: 6388 - DNA, 407 bp, Glycine max
cttaatgggaagaaagttgatgataaggagtggtatgttggaaaagcccagaaaaaatgtgagcgtgaacaagaactgaaaggacggtttgagcagagtataaaggaatctgctgacaaatatcaaggtgtgaacctgtatctcaagaacttggatgatactatcagtgatgaaaaacttaaggaaatgtttgctgaatatggtacaataacttcatgcaaggttatgcgagaccccactggaatcggtagaggatcaagatttgttgcattttcaactcctgaggaagcatctcgtgctctcggtgagatgaatggtaaaatgattgctggaaaacctctgtacgttgcccttgcacagagaaaagaagacagaagagcaaggttacaggctcaattttcacagat

SEQ ID NO: 6389 - DNA, 423 bp, Glycine max
  modified_base (415)..(415): a, c, g, t, unknown, or other
cccacgcgtccgggacaacaatttttgtatgggcaaggacccccagccatgatgcctccacaagctggatttggataccagcagcaactagttcctggaatgagacctggtggtggtcccatgccaagcttctttgttcctatggttcagcaaggccaacaagggcagcgcccagggggccgccgaggaacaggtcctgtgcaacaaccccaacagccaatgccaatgatgcagcagcagatgcttccaagggggcgtgtctatcgttaccctcctggccgcaacatgcaagatgtcccacttcaaggtgtagctggtggaatgatgtcagtcccttatgacatgggtggtctgccaatccgcgatgctgtgggacagccaatgcccattcaagctttggccacggctcttgcanatgctccc

SEQ ID NO: 6390 - DNA, 467 bp, Glycine max
agaggctgtacagaatgctatggacacgctctatggcatgtagatcgatgatcagcatgtctatgaatgccattatgtgcaaaagcactatacagagaatgctctcagtaggacaaaatcgagtaacgtacatgagaaaaacctatcacagtcaaccaccgatgaacgagatgatgaaaatgtatggagaatatggcaccattactagtgctagtataatgagggacgcagacggggaatcaaagtgtgctggctatgccaattttgaaaacccagatgatgctgccaaagctgttgaaggacttaatgggaagaaagttgatgatcaggagtggtatgttggaaaagcccagaaaaaatctgatcgtgaacatgaactgaaaggactggttgagcagagtataaaggaatctgctgacaaatatcaacgtgtgaacctgtatctcaagaacttggatgatactatc

SEQ ID NO: 6391 - DNA, 445 bp, Glycine max
gatttggataccagcagcaactagttcctggaatgagacctggtggtggtcccatgccaagcttctttgttcctatggttcagcaaggccaacaagggcagcgcccagggggccgccgaggaacaggtcctgtgcaacaaccccaacagccaatgccaatgatgcagcagcagatgcttccaagggggcgtgtctatcgttaccctcctggccgcaacatgcaagatgtcccacttcaaggtgtagctggtggaatgatgtcagtcccttatgacatgggtggtctgccaatccgcgatgctgtgggacagccaatgcccattcaagctttggccacggctcttgcaaatgctccccctgaacagcagaggactatgctcggtgaagctttatacccgcttgtggatcagctggaacacgatgctgcagcaaaggttactggcat

SEQ ID NO: 6392 - DNA, 450 bp, Glycine max
acaaaaagctcttttccttctaaatttgattccttagttcagcattctattattatatatggcttcttcaccttcctcagaaaacaaaaacctagagggagtagctggtggtgccggagagaaacccattccacttggtgagaacgttctgcagaagcatgctgcattctttgacttgaataaagatggtgtcatctacccatgggagacttttaaagggttgcgtgaaatcgggactggggttttgctgtccgttggaggtgctattttcatcaatgtgtttctcagtcaaagtactcgtcccggaaaagttccatctatactttttccaatttaaaattaaaaatatccaacgcggcaaacacggcagtgacactggagtctacgatactgaaggaaggtttgtaccttcaaaatttgaagaaattttaacaagcatgcacatacaca

SEQ ID NO: 6393 - DNA, 412 bp, Glycine max
accacgcgtcccaaaaagctcttttccttctaaatttgattccttagttcagcattctgttattatatatggcttcttcaccttcctcagaaaacaaaaacctagagggagtagctggtggtgccggagagaaacccattccacttggtgagaacgttctgcagaagcatgctgcattctttgacttgaataaagatggtgtcatctacccatgggagacttttaaaggttgcgtgaaatcgggactggggttttgctgtccgttggaggtgctattttcatcaatgtgtttctcagtcagagtactcgtcccggaaagtttccatctatactttttccaattgaaattaaaaatatccaacgcggcaaacacggcagtgacactggagtctacgatactgaaaggaaggtt

SEQ ID NO: 6394 - DNA, 403 bp, Glycine max
cttatagcttcatcccaaaaagctcttttccttctaaatttgattccttagttcagcggtctattattatatatggcttcttcaccttcctcagaaaacaaaaacctagagggagtagctggtggtgccggagagaaacccattccacttggtgagaacgttctgcagaagcatgctgcattctttgacttgaataaagatggtgtcatctacccatgggagacttttaaagggttgcgtgaaatcgggactggggttttgctgtccgttggaggtgctattttcatcaatgtgtttctcagtcagagtactcgtcccggaaagtttccatctatactttttccaattgaaattaaaaatatccaacgcggcaaacacggcagtgacactggagtctacgata

SEQ ID NO: 6395 - DNA, 438 bp, Glycine max
atcttcttatagcttcatcccaaaaagctcttttccttctaaatttgattccttagttgagcattctattattatatatggcttcttcaccttcctcagaaaacaaaaacctagagggagtagctggtggtgccggagagaaacccattccacttggtgagaacgttctgcagaagcatgctgcattctttgacttgaataaagatggtgtcatctacccatgggagacttttaaagggttgcgtgaaatcgggactggggttttgctgtccgttggaggtgctattttcatcaatgtgtttctcagtcagagtactcgtcccggaaagtttccatctatactttttccaattgaaattaaaaatatccaacgcggcaaacacggcagtgacactggagtctacgatactgaaggaaggtttgtaccttcaaaatttg

SEQ ID NO: 6396 - DNA, 386 bp, Glycine max
ccatgcctacccacgcgttatagctcataccaaaaagttcttctccttcaaaatttaattctataattgaacattcgattattatatatggcttctttaccttcctaagaatacaaaaacctattgggagtatcttctggtgcctgagagaaacccattccacttggtgagaacgttctgcagaagcatgctgcattctttgacttgaataaagattgtgtcatctacccattgtagacttttaaagggttgcatgaaatctgtactggggttttgctgtccgttggatgtgctattttcatcaatgtgtttctcaatcagagtactcgttccgtaaaagtttcatctatactttttccaattgaaattaaaaatatccaacgcgg

SEQ ID NO: 6397 - DNA, 345 bp, Glycine max
cttttccttctaaatttgattccttagttcagcattctattattatatatggcttctggaccttggtcagaagacaaatacctagagggagtagctggtggtgccggagagaaacccattccacttggtgagaacgttctgcagaagcatgctgcattctttgacttgtataaagatggtgtcatctacccatgcgagacttttaaagggttgcgtgatatctggactggggttttgctgtccgttagaggtgctattatcatcaatgtgtctcttagtcagagtactccgtccggaaagtttgcatctatactttcttcaatggaaatttaaaatatccaacgc

SEQ ID NO: 6398 - DNA, 319 bp, Glycine max
cttcttatagcttcatcccaaaaagctcttttccttctaaatttgattccttagttcagcattctattattatatatggcttcttcaccttcctcagaaaacaaaaacctagagggagtagctggtggtgccggagagaaacccattccacttggtgagaacgttctgcagaagcatgctgcattctttgacttgaataaagatggtgtcatctacccatgggagacttttaaagggaaagtttccatctatactttttccaattgaaattaaaaatatccaacgcggcaaacacggcagtgacactggagtctacgat

SEQ ID NO: 6399 - DNA, 451 bp, Glycine max
cttcttatagcttcatcccaaaaagctcttttccttctaaatttgattccttagttcagcatgctattattatatatggcttcttcaccttcctcagaaaacaaaaacctagagggagtagctggtggtgccggagagaaacccattccacttggtgagaacgttctgcagaagcatgctgcattctttgacttgaataaagatggtgtcatctacccatgggagacttttaaagggttgcgtgaaatcgggactggggttttgctgtccgttggaggtgctattttcatcaatgtgtttctcagtcagagtactcgtcccggaaagtttccatctatactttttccaattgaaattaaaaatatccaacgcggcaaacacggcagtgacactggagtctacgatactgaaggaaggtttgtaccttcaaaatttgaagaaatttttaaca

SEQ ID NO: 6400 - DNA, 437 bp, Glycine max
cccacgcgtccgcaaaaagctcttttccttctaaatttgattccttagttaagcatcggagtaatggtatatggcttcttaaccttcctcaaaaaacaaaaccctaaagggagtacctggtggtgccggaaagaaacccattccactgggtgagaacgtcctgcaaaaccatgctgcattcttggacttgattaaaaatggtgtcatctacccatggaagacttttaaagggaaagtttccatcaatactttttccaattgaaattaaaaatatccaacgcggcaaacacggcagtgacactggagtctacgatcctgaaggaaggtagttgttcaaatatttcttttttcataccttaattgcttccattttagtcatctaattaattttaaaacatttgggttccatattaattttcatggtcatggataaatct

SEQ ID NO: 6401 - DNA, 395 bp, Glycine max
gttctattattatatatgtcgtgtttattttcctcagagagcagaaacctagagggagtagctggtggtgccggagagaaacccattccacttggtgagaacgttctgcagaagcatgctgcattctttgacttgaataaagatggtgtcatctacccatgggagacttttaaagggttgcgtgaaatcgggactggggttttgctgtccgttggaggtgctattttcatcaatgtgtttctcagtcagagtactcgttccggaaagtgtgcatctatacttttttcaattgaaatttaaaatatccaacgcggcatacactgcagtgacactggagtctacgattctgaaggaaggtttgtacctttaaaatttgaagaaatttttaacatgca

SEQ ID NO: 6402 - DNA, 442 bp, Glycine max
gtccgcaatatgctcttttccttctaaatttgatttcttagttcagcattctattattatgtatgggttctttaccttggtgagaaaacaaaaacctagagggagtagctggtggtgccggagagaaacccattccacttggtgagaacgttctgcagaagcatgctgcattctttgacttgaataaagatggtgtcatctacccatgggagacttttaaagggttgcgtgaaatcgggactggggttttgctgtccgttggaggtgctattttcatcaatgtgtttctcagtcagagtactcgttccggaaagtttccatctatactttttccaattgaaattaaaaatatccaacgcggcaaacacgggaatgacactggagtctaccatacttaaagaaaggttgtacctttaaaaatttgagaaaattttaacaagca

SEQ ID NO: 6403 - DNA, 350 bp, Glycine max
aaagctcttttccttctaaatttgattccttagttcagcattctattattatgtatggcttcttcaccttcctcagaaaacaaaaacctagagggagtagctggtggtgccggagagaaacccattccacttggtgagaacgttctgcagaagcgtgctgcattctttgacttgaataaagaaggtagcatctacccatgggagacttttaaagggttgcgtgaaattgggactggggttttgctgtccgttggaggtgctattttcatcaatgtgtttctcagtcagagtactcgtcccggaaagtttccatctatactttttccaattgaaattaaaaatattcaacg

SEQ ID NO: 6404 - DNA, 343 bp, Glycine max
aaaaagctcttttccttctaaatttgattccttattcacattctatatgtattgggcttcttacctgtctcagaaaacaaaaacctaggggagtgctggtggtgccggagaaaacccattccacttggtgagaacgttctgagaagcatgctgcattctttgacttgaataaagatggtgtcatctacccatgggagacttttaaagggttgcgtgaaatcgggactggggttttgctgtccgttggaggtgctattttcatcaatgtgtttctcagtcagagtactcgtcccgtaactctctttatccccataaaaactctctttttttttttttttttaca

SEQ ID NO: 6405 - DNA, 389 bp, Glycine max
ctttcctctccttttccttccaaaccctaatttttgctactgcttatttttattcatcgcggaggcgtgggtttacgggcagaaacatttggtatcccaatccctgactggggtaagaaccctaggaagatggctgaagctgttgatagggtgatagtacctgactttcagcctaagaaagatgtgaaaatagtgacagatgagaaggccaccagtctctctacagcttctatagatgatgcagcggttattaatgatctagtaatcaagttagagaggtgccgggcaaatctttcaccagtgttcaggatgaaaccaatccaatttgagaaggatgatgacacaaactaccatatggatgtgattgctgggcttgccaacatgaaggc

SEQ ID NO: 6406 - DNA, 441 bp, Glycine max
  modified_base (431)..(431): a, c, g, t, unknown, or other
cccacgcgtccgagtacctgactttcagcctaagaaagatgtgaaaatagtgacagatgagaaggccaccagtctctctacagcttctatagatgatgcagcggttattaatgatctagtaatcaagttagagaggtgccgggcaaatcttccaccagtgttcatgatgaaaccaattcaatttgagaaggatgatgacacaaactaccatatggatgtgattgctgggcttgccaacatgagggcccgcaattacagcattcctgaggttgacaagcttaaagccaagtttattgctggaccgatcattcctgcaattgcaacctcgactgccatggcgactggtcttgtctgcctggagctgtacaaagttttggatggagggcacaaagttgaagactacagaaacacatttgctaacttggcactgnctctcttttc

SEQ ID NO: 6407 - DNA, 443 bp, Glycine max
gtgggttcttcttcttctattacaacaacgtcgtccaagaccatgaccatggccatggccacgatcctgctcctgttcacggtcttcgcggtttcatcggccctagacatgtcgataatctcgtacgacaacgcccacgccgccacgtcgcgcagcgacgaggagctgatgtccatgtacgagcagtggctagtaaagcacggcaaggtgtacaacgcgctcggagagaaggagaagaggttccagatcttcaaggacaacctgcgattcatcgacgaccacaactcccaagaggaccgaacctacaagctcggactgaaccggttcgcggatctcaccaacgaggagtacagggccaagtacttgggaaccaagatcgatcccaaccggaggctcggcaagaccccgagcaaccgatacgcgccacgtgtcggcgacaaact

SEQ ID NO: 6408 - DNA, 374 bp, Glycine max
  modified_base (320)..(320): a, c, g, t, unknown, or other
cgtcagggagatatggcacagcactagatcatggtgtcgtggctgttgggtatggtacagctaatggtcatgattattggatcgtaaggaattcatggggtcctagctggggagaagatggctacatcaggttagaaagaaatcttgctaacagcagatcaggcaagtgtggaattgcaattgagccatcttatccccttaagaatggtccaaatccacctaatcctggaccatcacccccttcacctgtgaagccaccaaatgtctgtgacaactactacagctgtgctgatagtgctacttgttgctgtactttccgntttcggaaatgcttgctttgagtggggttgctgtccccttgagggtgctacctg

SEQ ID NO: 6409 - DNA, 384 bp, Glycine max
caagaattggtggattgtgatacaggatataacgaaggatgcaatggaggacttatggactatgcatttgagttcattatcaacaatggcggcattgattctgaagaggattacccttaccgtggtgttgatggtagatgtgacacatataggaaaaatgctaaggttgtttctattgatgactacgaagatgttcctgcctatgatgagttagctttgaaaaaggctgttgcaaatcagcccgtcagtgtagctattgaaagaaggggcagggaatttcaattatatgtatctggtgtattcactgggagatgtggcacagcactagatcatggtgtcgtggctgttgggtatggtacagctaatggtcatgattattggatc

SEQ ID NO: 6410 - DNA, 455 bp, Glycine max
  modified_base (445)..(445): a, c, g, t, unknown, or other
ttcggtcttgccgattccgaagggtcctggtttcccggcttaagttcaactttcggctccaggaaccgtcgatggggcccttaggctgttccttctctgtttctgacaaactgtataactcctatcaaacatgagcggtcgcttttctcgcacaatttatgtcggcaacctgccctctgatataagagagtcagaaattgaagatctattctacaagtatggccgtataatggatattgaattgaaggttcctccccgccctccatgttattgctttgttgagtttgataatgctcgagatgccgaagatgcaattcggggtcgagatggatacaactttgatggttgtcggttaagagtggagcttgctcatggtggtagagggccatcatcaagtgatcgacgtggatatggaggaggaggtggtaatggtggagcaggcggnggtcgttttg

SEQ ID NO: 6411 - DNA, 441 bp, Glycine max
gcgctcggagagaaggcgaagaggttccagatcttcaaggacaacctgcgattcatcggggaccacatctgccaagaggaccgatcctacaagctcggactgaaccggttcgcggatctcaccatcgaggagtacagggccaagtactcgggaaccaagatcgatcccaaccggacgctcggtaagaccccgagcaaccgatacgcgccacgtgtcggcgacaaactacctgaatcggctgatcggacgaaggaaggtgctgatcctccaggcaaagaccaaagaggctgtgggatctgcttggcattctcagcaatcggggcaatggaagggatacatgagcatgtgacaggtgaacctgtttcggtatcagaacaagaattgggggattgcgatacaagatataacgaaagatgcaatggaggacttatggactatgca

SEQ ID NO: 6412 - DNA, 432 bp, Glycine max
atcccatcatcatggcggccataacccgcctcgcgaagcgcgcgttcgtcgtcgcttccctggcgaggaggtgcctgagctcctccgtagtcaactgccacgcgccgccgcacgacgccacgtcgttccgcccgtttccgctgcgtgaagattcgagcaagcggtgcgtgcagtgggtgttcctcggctgccccggcgtcagaaaaagaacgtacgctagtcgcctctcgaacctgctcggcgttcctcacatcgccaccggcgatctcgttcgcgacgaactcaccttctttggcccactttcttcccagctatcagaaattgtaaaacagggtcaattggtgtcagatgaaattatcattagtttattgtcaaagagacttgttgccggggaagctaaaagcgatctgggatttattcttgaaggttttc

SEQ ID NO: 6413 - DNA, 439 bp, Glycine max
  modified_base (251)..(251): a, c, g, t, unknown, or other
  modified_base (394)..(394): a, c, g, t, unknown, or other
gtgcctctcctctcgctgcgttttccaatggcggccataacccgcctcctaaatcgcacctcttccctctcttccgtggcgcgtggattctcatctcacgcatcgccgccgcgcaaggaggagaggaatgtccagtgggtgttcctgggttgccccggcgtcggaaaaggcacctacgccagtcgcctctgcaacctcctcggcgtccctcacatcgccaccggcgatctcgtccgccacgagctcgcctncaacggccccctttcttcccagctatcagaaattgttaatcaaggaaaattggtgtcagatgaaatcatcataagtttattgtcaaagaggctggctgatggggaagctaaaggagaatcgggatttattcttgatggttttncacgaacaataaagcaagcggaaatattggaaggggtaactgaca

SEQ ID NO: 6414 - DNA, 431 bp, Glycine max
ctgaagatggcttcacgcaggctcgtatcttctctgattcgatcctcccttcgtagagctcaatcgaagccctcaatttccgcatcgacatcgaggctcacgtcatccaaccgtgcctcaccgcacggatacttgctgaaccgcgtcgccgagtacgccaccgccgcggctgctgctaccgctcctccctctcctcctcctccggggaagaaggagctcggcggcggcgggaagatcaccgatgaattcaccgggaagggcgcgatcgggcaggtctgccaggtcattggtgccgtcgtcgatgtcagattcgacgagggtttgcctccgatcatgaccgcgctggaggttctggatcactcgtcgaggcttgtgttggaggtggcgcagcatttgggtgaaggcgttgtccgaaccattgctatggatgc

SEQ ID NO: 6415 - DNA, 411 bp, Glycine max
cccacgcgtccgcccacgcgtccggaaagaccatctttctcttttctgtatcaccgttggaagagactgagatgggttcaaaaaccaagacttttacctttgaagaggtggctaaacacaatcacaggaaggattgttggattatagtcaaagggaaggtgtatgatgtcaccccatttttggatgatcatccaggaggtgatgaagttttagtgactgcaacagagaaggatgccaccactgattttgaagatattggccacagtgattcagcaacacagatgatggaaaaatactttgtttggggaggtgacaccaacactcttccagcacaagttaccaaccacaaacagtgtacgccaaccaacacaagcaccacctgcctataacaatcaatcttcaggatttgtt

SEQ ID NO: 6416 - DNA, 438 bp, Glycine max
  modified_base (415)..(415): a, c, g, t, unknown, or other
aattagttcatgtacggtctcttgttcggtctcgccgacacgtgggcggccatgccggataacaaaatggtcggaaaggccatcagggatcccgagaagttgaaggtcatagcgtcgaacccgaggcgctacacgggcccacccagggtggggaccatgcgggagctgcttaaggtgacacagtatgtacaggataatttctccaaggtaacgacgccgtttttcactgctcacggaacttctgacggcgttacctgcccttcctcgtccaagctgctgtatgagaagggttccagtgaggataagacgttgaagctctacgatggaatgtatcactctttgattcagggagagcccgatgagtctgcgaatctcgtgttgggggacatgagagagtggattgatgagaaggttncgacgtatggacctaacaaaaat

SEQ ID NO: 6417 - DNA, 453 bp, Glycine max
  modified_base (419)..(419): a, c, g, t, unknown, or other
tggaaaaagaaaaaggaagaaggaatgagtgcaacagtgactctaactctaaacctatgccgttgttccatcgtcgcttcttgtccacattatagccacaaaccaaaccctaatttcaatgccttttttagcttctctttgtctctgtctctgtctcaccacagacgcatcgttatctacaagaaaccattcccctctagacggacgtggctttatggatatatgaatagagatcgagattatgaattggagaatgggttagccttattcggttctgatgaagaactagcaacacaaattccaactcaggcccagtcacttgttgaaggatcaggctccattcgcatagcggagttcaagcctgttcctgatgttgattatcttcaggagttattggccattcaacagcaaggacctanagctattggcttttttggaactcggaacatggga

SEQ ID NO: 6418 - DNA, 401 bp, Glycine max
acgcacaaattaacacggctagccgtggagacttaagtcctgacgaattgaaggagcgacaggccaaggcaatgcaggatccagaaattcagaacatccttcaagaccctgttatgagacaggtattgattgatttccaggaaaatcccaaggctgcacaggaacacacgaagaatccaatggtgatgaataagatccaaaagctggtcagtgctggaattgtccagatgaagtaagtttgtggcaggtggcagttcgtgtgaaaaagcaatcaagcaatcgataatgatgtctcagtgtgactattttgacatttaaatagatgtgactgggaaaaaagttgggaaattttgagttgctttacctttgtttggtttagtgaattcatataatttacgaat

SEQ ID NO: 6419 - DNA, 392 bp, Glycine max
gaaattcagaacatccttcaagaccctgttatgagacaggtattgattgatttccaggagaatcccaaggctgcacaggaacacacgaagaatccaatggtgatgaataagatccaaaagctggtcagtgctggaattgtccagatgaagtaagtttgtggcaggtggcagttcgtgtgaaaaagcaatcaagcaatcgataatgatgtctcagtgtgactattttgacatttaaatagatgtgactgggaaaaaagttgggaaattttgagttgtttttacctttgttatgttttagtgaattcatataatttacgaatatcaggtgcagtccatttatatttcaatggcttattgtggtgacatgacttccttttaatttaaaatcggta

SEQ ID NO: 6420 - DNA, 434 bp, Glycine max
  modified_base (425)..(425): a, c, g, t, unknown, or other
cccacgcgtccggaaacttaatgaagctgaaaaggcgaagaaagaactagaacagcaggaagtggtttgatccaaagttggctgatgatgagagagaaaaaggaaatgaattcttcaagcagcagaagtatcctgatgctgtgaagcattacacagagtctatacgaagaaatccaaaagatcctagggcttatagtaacagagcagcatgctacactaaattgggggcaatgcctgaagggttaaaggatgcagagaagtgcattgaacttgatccaacctttgtaaagggttatacccggaaaggtgcagtccagtatttcatgaaggaatacgacaaggctttggagacatatagggaggggttgaaatatgactctaacaaccaggagttgcttgaaggcatcagaacatgcatacaacanattaacaag

SEQ ID NO: 6421 - DNA, 291 bp, Glycine max
gggaccactgttgttggacgggaaggagtacaccgtgcccatggccaccactggggggtgtctcgttgcgagcaccaacagagggtgcaaagctatccacgtctccggtggggcctcctcggtgttgctcagagatggcatgaccagagcacccgttgttcggttaccctccgctcagcgcgccgcgcagttgaagttcttcttggaggatcctctcaacttcgattcgcttgctgtcgttttcaataagtcaagcagaattgccaagttgcagaacattcagtgtgctat

SEQ ID NO: 6422 - DNA, 229 bp, Glycine max
attccgtgttttcagctcctgtaacctctccttctccgccgccgttgctatctgggccgtgaccttccatccctcaacgccccacagatcttcaatttgattgcttgggtcaacaatttctgtcattctcaatcatggcaactagacttcagtttgaaaataattgtgaagttggagtcttctctaaactcaccaatgcttactgtttggttgctattggatgttctga

SEQ ID NO: 6423 - DNA, 289 bp, Glycine max
aattcgccggccgacccacgcgaccagtttccttggttcaagacactgcaaatacagcacttcttctgccattgaagaagaacccgttaaaccatcagtgcaagtagaacacacccaactcttaattgatggaaaatttgtagatgctgcttctggtaaaacttttccaactttagatcctaggacaggtgaagtaattgctcatgttgctgagggtcactctgaggatgttgatcgagcagttgcagctgcacgaaaagcatttgatcatggaccatggcctaagatg

SEQ ID NO: 6424 - DNA, 416 bp, Glycine max
aacagctgagcagacaccgttatctgctttatatgcagcaaaactatttcatgaggctggacttcctgctggtgttttaaatgtagtatctggctttggtccaactgctggtgctgctcttgctagccacatggaagttgacaagcttgcttttactggttccactgatactgggaaagttgtccttgaactggcagctaaaagcaatcttaagcctgttactttggaacttggtgggaaatccccctttattgtgtgtgaagatgctgatgtagatcaggctgttgagctagcccattttgctttattctttaatcaaggacaatgttgctgtgctgggtctcgaacatttgtacatgaaagtgtatacgatgagtttgttgagaaagcaaggctcgtgctttgaaccgtgtgtt

SEQ ID NO: 6425 - DNA, 365 bp, Glycine max
  modified_base (287)..(287): a, c, g, t, unknown, or other
gttttgctgcatataaagcagataacggtgtctgctcagctgttttgagaacaatggtgttgccacaggccaatgccggtccaaccttccaggcaaacatgagaagagggaagttccaaggaatgatctgaccggcaacaccaattggttcatgtaatgtttgcacatgatatggtccatcagctggaactgttagaccatggatcttatctgcccaaccagcatagtatcgaatcaggcgaacaagcattggaacttcaatcttagcagcttggttcataaggctntccattatcccaagtctcaagtgctgcaagctcatcattatgcttctcaagcagatcagctgcgcgcaacaagatcct

SEQ ID NO: 6426 - DNA, 387 bp, Glycine max
gcgtccgctggatgatgtgattcatagagtaaataatacactctatggccttgcagcaggggtgttcgcaaagaacattaacacagctaatactttgactagagcattgagagctggaacagtgtgggtgaactgctttgatacatttgatgcagcaattccctttggagggtacaaaatgagtggtcaaggaagagaaaaaggagaatacagtctcaagaattacttgcaagtgaaggctgttgttacatcctagaagaacccagctttggctttgaacatcattagctttagaattatttgatgaaaagattaataaataggctccaattattaaaatcattaaattggggtattccattcaaagtttctgataatgattaaaat

SEQ ID NO: 6427 - DNA, 442 bp, Glycine max
cccacgcgtccggtggagctactcttgaaactggaggagatagatttggcaactcaggctgctatattcagcctactgtcttctcaaatgttaaggatgacatgctgattgcaaaggaagagatctttggtccagtgcaaaccatattaaaattcaaggaccttgatgatgtgattcaaagagcaaataacacacactatggccttgcagcaggggtgttcacaaaaaacattaacacagctaacactttgactagagcattgcgagttggaacagtgtggattaactgctttgatacatttgatgcagcaattccctttggagggtacaaaatgagtggccaaggaagagaaaaaggagaatacagtctcaagaactacttgcaagtgaaggctgttgttacatccttgaagaaccctgcttggctttgaacatcattagc

SEQ ID NO: 6428 - DNA, 434 bp, Glycine max
  modified_base (44)..(44): a, c, g, t, unknown, or other
  modified_base (48)..(48): a, c, g, t, unknown, or other
  modified_base (129)..(129): a, c, g, t, unknown, or other
  modified_base (145)..(145): a, c, g, t, unknown, or other
aattctcgggtcaagcgtcggatcacgcgtccggaggctatcangcangagcttaaggaattgcacccgaatgaccccaaaattgttgtcctcaaacatggattgtggaaagtaaagggaattattcangtttctagatctatangtgacgtatatatgaaacatgcgcagtttaaccgcgaacccattaatgcaaaattcagactccccgaaccaatggacatgcctttcttgtctgctaatccaactattctttctcatactctccaaccaaatgattccttccttatatttgcatcagatggtttatgggagcacttgagtaatgatcaagcagtggatattgttcacagcagtccacgcgcgggtagtgccaagagacttgtcaaggctgccctacacgaagcagcaagaaagcgtgaaatgcgatattc

SEQ ID NO: 6429 - DNA, 287 bp, Glycine max
cccacgcgtccggtactagtacgtagtacattgaggtcggtgcaaattaaactaattaaaaccatatatatgtaatgagatacccttaattattctgagtaatcagcaccgactttatgatccactgtttcaattgaaactgagttggtatttaggtgatttgtcaggcctgaagagaccaaagtgtcgttcgatttcaggaccatccttctcgttttcatcaaacatggcaaagaggtaagtcgcgatgggtgcactaggcctcttgggggttccacctttggcat

SEQ ID NO: 6430 - DNA, 422 bp, Glycine max
  modified_base (12)..(12): a, c, g, t, unknown, or other
gcgggccgcgtncgaacaagtacgtgaaagcatactcacaaaacgtgaaattcaagtacattgcagttggtgacgaaattcaccctggtgactctttagcagggtctgtacttccagcacttgaaaacattcagaaagcaatttctgccgccaatttacaaggccaaatgaaggtgtcaacagcaatagacaccactttacttggcaactcttacccaccaaaagatggcgttttcagcagtagtgcaagttcatacataagaccaattgtaaactttttagcaagaaatggagccccacttctcgcaaacgtgtacccttacttcgcctatgttaacaaccaacaaagcattggtcttgactatgccttgtttactaaacatggtaacaacgaggttgggtaccaaaacctgtttgatgca

SEQ ID NO: 6431 - DNA, 437 bp, Glycine max
cccacgcgttcgcccacgcgtccgtccacgcgtccgctttttagcaagaaatggagcccgagttctcgcaaacgtgtacccttacttcgcctatgttaacaaccaacaaagcattggtcttgactatgccttgtttactaaacatggtaacaacgaggttgggtaccaaaacctgtttgatgcattgttggattctctatacgctgctcttgagaaagtaggggcaccaaatgtgaaggttgttgtgtctgagagtggttggccatctgaaggtggagttggagcaactgttcaaaacgcaggaacctattaccgcaatttgattaatcatgccaaaggtggaacccccaagaggcctagtggacccatagagacttacctctttgccatgtttgatgaaaaccagaaggatggtcctgaaatcgaacgacactttg

SEQ ID NO: 6432 - DNA, 355 bp, Glycine max
cgtccgtccacgcgtccgcttgactatgccttgtttactaaacatggtaacaactaggttgtgtaccagaacgtgtttgatgcatagttggattctctatacgctgctcttgagaaagtaggggcaccaaatgtgaaggttattgtgtctgacagtggttgtccatctgaaagtggagtacggagcaactgttcaaaacgcaggaacctattaccgcaatttgattaatcatgccaaaggtggtacccacaagaggcctagtggacccatatagacttacctatttgccatgtttgatgaacaccagaaggatggtactgaaatcgatcgacactttggtctcttcaagcctgac

SEQ ID NO: 6433 - DNA, 454 bp, Glycine max
  modified_base (358)..(358): a, c, g, t, unknown, or other
gagtttagttcataatagtagttggatcttctgcataatcatattcaatatgattttctgaagaggcaacaccgccatgtctgccatattgctgcttcttggaatattatcttccactggagtagaatttacgggggcacaatctgttggtgtgtgttatggaggaaatggaaacaatctaccaacaaagcaagcagtggtggatctttacaaatcaaacagaataggcaaaatccgtttatactatccagacgaaggagtccttcaagccctcagaggttcaaacatagaggtgatcctcggtgtccctaatgaccaacttcaatctctcaccaacgctggagctgccacaaattgngtcaacaagtacgtgaaagcatactcacaaaacgtgaaattcaagtacattgcagttggtaacgaaattcaccctggtgactctttagcagggtct

SEQ ID NO: 6434 - DNA, 437 bp, Glycine max
gttgaagagtttagttcataatagtagttggatcttctgcataatcatattcaatatgatggtctcaagaggcaacaccgccatgtctgccatattgctgcttcttggaatattatcttccactggagtagaatttacgggggcacaatctgttggtgtgtgttatggaggaaatggaaacaatctaccaacaaagcaagcagtggtggatctttacaaatcaaacagaataggcaaaatccgtttatactatccagacgaaggagtccttcaagccctcagaggttcaaacatagaggtgatcctcggtgtccctaatgaccaacttcaatctctcaccaacgctggagctgccacaaattgagtcaacaagtacgtgaaagcatactcacataacgtgaaattcaagtacattgcaagttgtaacgaaattcacc

SEQ ID NO: 6435 - DNA, 445 bp, Glycine max
cccacgcgtccgcccacgcgtccggtctatagttttggtgtggttcttcttgagcttcttactggcagaaaacctgttgaccataccatgcctagaggacagcagagtcttgtcacatgggctactccaagattaagtgaagataaagtgaaacagtgcgttgacccaaaactgaagggagaatacccccctaaaggggttgctaagcttgcagctgttgcggcgctgtgcgtgcagtatgaagctgagtttaggccaaatatgagcattgttgttaaagcactccaaccacttctgaagtctcccgttcctgctgctccaaaaagttgaaccaattaaaatcgctaaaatgcctgcatcgcttgaccagttcgattcagtattttcaaaatttaatcaattcctgcggtttaaccattcctccataattttttaaaaattttgg

SEQ ID NO: 6436 - DNA, 427 bp, Glycine max
cccacgcgtccggtttcaacaggtgtttgtgagggtggctgtgctgctattgtggattcaggaacatctttgcttgctggtccaactcctgttgtggctgaaatcaaccatgccattggagctgaaggagttctcagtgtagaatgtaaggaagtcgtttctcaatatggagagttgatatgggatctcttggtatcaggggtgaaaccagatgacatatgttcacaagttggtttatgttcttccaaaaggcatcaatctaagagtgctggaattgaaatggtgactgaaaaggaacaggaagagttggcagcgagagatactcctttgtgttcttcttgtcagatgctagttctatggatccagaatcaactaatacataatgcatcgaatgacagagtattcaactatgtgaatcaactgtgtg

SEQ ID NO: 6437 - DNA, 418 bp, Glycine max
ctggccactcccatgggcggtggagtgaactcgctgaacgtgcagctgaggaaggagctcgagctgtacgcctcgctcgtgaactgcttcaacctccctggcctccccacgcgccacgacaacgttgacatcgtcgtcatcagggagaacaccgagggcgagtactccggcctcgaacacgaggtcgtccccggcgtggtcgaaagcctcaaggtaataacaaagttctgctcagagcgcattgctaaatatgcttttgagtatgcttacctaaataacagaaagaaagtgactgctgtgcacaaagcaaacattatgaaacttgcagatggtttattcttggaatcttgtcgagaggttgccacaaggtatcctgggatcaagtacaatgaaattattgtagacaactgctgcatgc

SEQ ID NO: 6438 - DNA, 425 bp, Glycine max
caactactactcacactcactgcagatctcaatccatggctaccattgttagcatcagaggcccgccagatctttgacagtcgtggcaatccaaccgtcgaggtggatttgacatgctccgatggtacttttgctagagctgctgttccaagtggtgcatccactgggatttatgaggcccttgaattgagagatggaggatctgactaccttggaaagggtgtatcaaaggctgttgacaatgtgaacaccattattgcccctgctttggttggcaaggacccaactcagcagactgctattgacaacttaatggttcaacaacttgatggaactgttaacgaatggggttggtgcaagcaaaagcttggagcaaatgccatattggcagtgtctcttgcagtctgcaaagctggtgctgctgt

SEQ ID NO: 6439 - DNA, 414 bp, Glycine max
aacaccctatgccgagtgcattctatgcagtttttgatgggcatggagggcctgatgcggccgcctttgtgaagaacaatgctatgagattattatttgaggatgctgatatgctgcaatcttatgatgctgatgcactttttctgaagaagttggaagattctcatcggagggcatttttgggcgcagaccttgccttggctgatgagcaaagtgttagtagttcctgtggaacaacggcgttgaccgcccttgtacttggaaggcatttgatggttgctaatgctggtgactgtcgagctgttctttgtaggcgaggagttgccgttgatatgtcccaagatcacaggccaagttatttaccagaacgaaggatagtggaggaattaagtggtttcattgatgatgggtatc

SEQ ID NO: 6440 - DNA, 475 bp, Glycine max
gagagcccgtggctcttaaaattcttgacaaggagaaggtgctaaagcacaagatggctgaggagatcaggagagaagtagctacaatgaaactaatcaagcatccaaatgttgttcgattgtatgaggtcatgggaagcaagaccaaaatatatattgttttggagtttgtaactgggggggaactctttgacaaaattgtaaaccatggaaggatgagtgaaaatgaagcacgtagatatttccagcagcttataaatgctgttgattattgccatagcaggggtgtctaccacagagacctgaagccagaaaatttgctattagatacttatgggaaccttaaagtttctgattttggtttgagtgccctctcccagcaagttagggatgatggacttcttcatactacatgtggcactccaaattatgttgctcctgaggtccttaacgatagaggctatgatggggcaac

SEQ ID NO: 6441 - DNA, 423 bp, Glycine max
acgcgtccgaccacacgtccgctccgacacggtggacttccaccacttcctggcgcagcgccgcgccaacgatctccgtctcttctccttctccgacctgaaatccgccacgcgcgccttcagccgcgccctcctcgtcggcgagggaggcttcggctccgtctaccgcggcttcctcgaccaaaacgacgtcgcgatcaagcagctgaaccgcaacggccaccaagggcacaaggagtggatcaacgaggtgaacctgttaggtgtcatgaagcaccctaatttggtgaagttggttgggtactgtgccgaagacgatgagagagggattcagaggcttttggtttacgagtttatgccgaataagagcttggaggatcatctccttgcaagagtgccatcgacgataatcccttggggaac

SEQ ID NO: 6442 - DNA, 441 bp, Glycine max
gaaacgatgaaggaactatgggcacaaatggggtcactaatggccactattgtgttcatgtacacaatctttgagcgcttcttccctccacacttgcgtgaaaaacttcaagcctatactcataaactcaccaaccatttcaacccttacatccaaataagcttccctgagttctcaggggaacgactgaagaagagtgaagcatacacagccatccaaacctacctgagtgcatactcatcccagagagccaaaaggctcaaagctgaagttgtgaatgatagccaaacccctcttgtccttaacatggatgacaacgaagagattactgacgagtttcatggcatcaaactatggtggagtgcaaacaaagtaagcaacaatccacaaagatacaaccctttttcttattacggttcctcagacgagaaaaggttctac

SEQ ID NO: 6443 - DNA, 406 bp, Glycine max
aaacgatgaaggaactatgggcacaaatggggtcactaatggccactattgtgttcatgtacacaatctttgagcgcttcttccctccacacttgcgtgaaaaacttcaagcctatactcaaaaactcaccaaccatttcaacccttacatccaaataagcttccctgagttctcaggggaacgactgaagaagagtgaagcatacacagccatccaaacctacctgagtgcaaactcatcccagagagccaaaaggctcaaagctgaagttgtgaatgatagccaaacccctcttgtcctcagcatggatgacaacgaagagataactgacgagtttcatggcatcaaactatggtggagtgcaaacaaagtaagcaacaatccacaaagatacaacctttttct

SEQ ID NO: 6444 - DNA, 342 bp, Glycine max
gttgcaagcaatcaaagtggagccacattgtgtttgagcaccctgccacttttgaaacagtcgctgtggatcggagaaagaaggaggatatacttaaagaccttgtgaagtttaagaagggaaaggattattatgcaaagataggtaaagcttggaagcgtggctatcttttgtacggtccttcggggactggtaagtctaccatgattgctgctattgctaatttcatgaactatgatgtgtatgatcttgagttaaccgcggttaatgacaacactgagcttaagaagctgttgattgaaactccgagtgagtctatcacggtgattgaagacattgatt

SEQ ID NO: 6445 - DNA, 408 bp, Glycine max
cacaagataagaaaaaagaaaaaatgtttgcagggaaaggggctgtttggttctccagagcggtggcgttggcagcaatcgcggtggtagcttgcgttgggcttacacaggcccaacccgaggccaggttcaagtgcaacagcgcgaacatccccacgtgtcgcgcgctcataagctactctcacccgaacaccaccaccctcggcgacatccaaaagctcttcaacgtgaaacacatcctcgacatcgtgggagcgaacaacctcccaagcaacgccacaaaaacatacgcggtgggccccaacgaggttgtgaaggtccctttcccgtgcaggtgcagcaacaacacgggactctcggaccgggtttcgctgtacaggatcaagaatggggacacgctgtactaca

SEQ ID NO: 6446 - DNA, 412 bp, Glycine max
aaaattgaaaaaaaaagacgggaaaatagaatggacgcagatagtgattgagaattgggggttgcgatggatgggagaaacggaagcggaagcaggaggagtggggaagcaggaggaatggggaaggcgataatcgcgttggtaattgggagtcttgtgtactatcactgtgcctaccgcaattctacccttgtctctcttttttccgatgtcttcatcgtccttctctgctccctcgccattctcggtcttctattccgacaaatgggcatccaggttcctgttgatccccttgagtggcaaatatctcatgagagtgcgaacgcgatcgtggcatggttggccaatacgattggtggcgccgagtcaatgttcaaggtggctgctactgggcacgacaagaggctgtttc

SEQ ID NO: 6447 - DNA, 421 bp, Glycine max
tcgcagagattacaatccgcggttaatgccaaggactctgaatcttcaaattccaataaaatgatttggctgcattttggggttaacagtggtgcgacaaggtttgctatagagaaacaagctgtcaacgaggctaattttcgatgccctgatgaaatgggatggaagccccataaagtccccatagttccttcggatggtggaatttcacgaacaagggagactacacttcctgttgtggagatcaccaaagccttgacagagaatggatatgaagttatggtatcagatgatgcaggcaggtttgtgtgcaattatgtttactatcattcccttcgctttgccgagcataacgggatcaaatcccttttcgtgcacgtgccactctttgtgacaataaatgaagagactcaaatgcaat

SEQ ID NO: 6448 - DNA, 414 bp, Glycine max
caagcattaagcatgcctggactttggtacgtgcatcatgacttttaagaagttacatgaatattttgactgaggacttcttgcttaaggtttcttatttactcttctatgttgcttttagagaatctagagtaagcattgtccatctttaatgcaggtagatgcagtggtctacttggtagatgcatatgacaaggaacgatttgcagagtctaaaaaagagttagatgctctgctctctgatgagtctttgactactgtccctttccttatccttggaaacaagatagatattccatatgctgcctcagaagaagagttgcgttaccatttgggcctgaccaattttaccacaggcaagggaaatgtaaatttgtcagactctaaagtccgtcctatggaggttttcatgtg

SEQ ID NO: 6449 - DNA, 372 bp, Glycine max
cccacgcgtccgggaaaatggagaggatcagatgttgcaattaaaagaataaagaagagctgctgcgctggtcgatcttcagaacaagaaagattgaccatagagttctggcgggaagctgacatactttccaagcttcaccatccaaatgtggtggcattttatggtgtagttcaggatggaccaggagcaacattagcgactgttaccgagttcatggtggatggttctcttaggaatgttttgcttcgtaaggataggtatcttgatcgccgcaagaggctgataattgccatggatgctgctttcggaatggaatatttacactcaaaaaatattgtgcattttgacttgaaatgtgacaatttgctc

SEQ ID NO: 6450 - DNA, 432 bp, Glycine max
gtgctttggttgtagttcccacccgcgaccttgctttgcaggttaagcgcgtcttcggcgcgcttgcatcgccgctgggtctccgtattggcttggctgctggtcaatcttcgcttcgccacgagctttctagcctcatttatctacctggagaagacgatggtccagatcctgggtttttgtctccgttgtggttccaaagcaaggtcgacatattggtagcgacccctggaaggctagtggaccatgtcaacaagttgtcattgaagcatcttcgttatctcgtggttgacgaagcagatcgattgctacgtgaggactaccagtcctggttacctactgtgcttaaattaactcagtctaggctggcaaagatagttttatctgctacgttaactcgggacccaggaagacttgctcaacttaatttgc

SEQ ID NO: 6451 - DNA, 454 bp, Glycine max
cccacgcgtccggtggaatttgatttctcagggaggttatctttatgtttgtggtgatgctaggggcatggcccgagatgttcatcggactcttcataccattgtccagcagcaggaaaatgtggactcttcaaaggcagaggctatagttaaaaaactccagatggatggacgttatcttagagatgtctggtaaattttctgattattcatctttctgggttgtgccttccttgctatttggtctgttaagttcaagattggttgaaggatatttgatactcttctatcacggagttttgggacaccaatgatggaggctgaaatttccttgagaaagcaaatcgttttcgtggacatttgtgtggttttcttatatttttcgccgccttgatattctctcttgtcatgatatttgaactaggattatttttagggggactgatagatagct

SEQ ID NO: 6452 - DNA, 372 bp, Glycine max
gcgcagattagtggcataattgcagccaatgtatgtgtgaatccttttgattatagtgacagtgttacttcaacaactcacaagagtcttcgaggtccaaggggaggcataattttttatcggaaaggtacaaagccttggaacagagggattcttctaagtcagggacatgaaagtgatcaatatgactttgaagaaaagataaattttgctgtttttccatcgatgcaaggggggccacactatatccacattgctgcgcttgctatagctttaaaacatgtggctactcctgagtataaggcatacatgcatcatgtgaagtagtatgcccaagctttatcatgtgctttactgagtagaaaatgccgt

SEQ ID NO: 6453 - DNA, 408 bp, Glycine max
  modified_base (379)..(379): a, c, g, t, unknown, or other
gcaagatttgccagaaggatgcattgcaaaaatactgtcatacaccactcctgtggatggatgcaggctctccttagtttgcaaagcctttcgttctgcagctgaatcagacactgtgtgggattgttttctcctttccgatttcacctctatcattcctatttcctctacctctaagaaggatctctatttcactctctcagaccatcccaccatcatccaccagggtagaaaaagtgttcaattggacaaaaggaccggaaagaagtgttgcatgctttccgctagaaatctgaccattatatggggtgatactgttcaacattgggagtggacaagcctgccagagtccatgttccaaagagttgctatgcttcangctgtgtgctggtttgacattagtgggag

SEQ ID NO: 6454 - DNA, 441 bp, Glycine max
aggggcggtgaaagctatggttgtggctttggggaatgaaggagttgctgaggaagcagctggtgccttggccttgattgttcggcagcctgttggcgccatggcggtggtgagggaggaagcagcagtagccggattgataggaatgatgcgttgtggaacgccgagaggtaaagagaatgcagttgcagcattgttggagctgtgcaggagtggaggtgcagctgcaactgaaagagtggttagggcgccggctttggttggattgcttcaaaccttgctctttacaggtacaaagagggcaagaagaaaggcagcttcactagctagagtgtttcagagatgtgaaaatgcatctctccattatggtggattaggtgtacgttattcatttgctagcgattcagcttcaaccagaaatactacaacctttgtgagtga

SEQ ID NO: 6455 - DNA, 435 bp, Glycine max
gttctgaactttctgaattcttcactttgatcatcatcttcttcaattccagcaagggggtcacagcaaggcgaatcatcggacccgaaatcggggaagaaggacttctcgaccgcgattctggaacgtaaaaagtcgccgaaccggcttgttgtggatgaggctgtcaacgacgacaactccgtagtgaccatgcacccccaaaccatggaaaagcttcagcttttccgaggggacactatccttatcaagggtaagaaacgaaaggatactatttgcatagctcttgctgatgagaactgtgaggagccaaagatcaggatgaacaaagttgtgaggtcgaatttgcgggttcggcttggagatgttgtgtctgtgcaccagtgcccggatgttaagtatgggaaacgtgtgcacattcttcctattgatgat

SEQ ID NO: 6456 - DNA, 459 bp, Glycine max
cccacgcgtccgctttctttgttgcgttgtgaattctgctctttgatcatcatcatcttctggttcttcaagggaagcaagcatgtctcagcaaggcgaatcatcggacccgaaatcggggaagaaggacttctcaaccgcgattctggaacgcaaaaagtcgccgaaccggcttgtcgtggatgaggctgtcaacgacgacaactccgtggtcaccatgcatccccaaaccatggaaaagcttcagcttttccgaggggacactatcctcatcaagggtaagaaacggaaggataccatttgcatagctcttgctgatgagaactgtgaagagccgaagatcaggatgaataaagttgtgaggtcaaatttgcgggttcggcttggaaatgttgtgtctgtgcaccagtgcccggatgttaaatatgggaaacgtgtgcacattctgcctattgatga

SEQ ID NO: 6457 - DNA, 435 bp, Glycine max
acaaattacaactgaagatcaagatttccactacaaagttaattatactaccaatttctcactcaaaacttagggaaaatgattgagatacttctgaatttgcagctgttagctcctttcttccttttcttcatctttccagtgtttttcttcttctttctcacgtcctcatgtcctactaaaagaagcatcactatcccaaaaccatacccactgattggtcactacttagacctcaaaggcatcggcaaccgccgtatccagtggctatccgacatcgtcaaaatctcaccggctaccacgttcaccctccaccgccccttaggccgccgccaagtcatcaccggcaaccccgccaccgttgcgcacattctcaagacccgtttctccaactaccaaaagggctacaccttcattcacaccctctccgatttc

SEQ ID NO: 6458 - DNA, 390 bp, Glycine max
gccacgcgtgcgccagaatccaagggggttcctgctagtgtacagatatttgcttgtggaaatgcgtctcaaagtcaacctgttgctcgacgtatttttttccgatgttcaaccacccaacttaaatggaatcatggctcaactgggcttctagtggtggtgcagtcagatgttgacaaaactaatcagagttactatggagaatcaaagttatgctatctgaccacggatgggatgcatgaaggacttgtgcctcttcggaaagatgggcccattcatgatgctcagtggtcatattctggcttggaatttgctgttgtatatggatttatgcctgctaaagcaactctgttcgacaagaagtgcaatcctctactagagcttggaact

SEQ ID NO: 6459 - DNA, 466 bp, Glycine max
tcgaccgcacgcgtccgatacatttgattatgctcgccactttctttcttgctgcagtagaatgctaggtctggacggtgaatctaagcgaggagatatagggcttgattactttggccgcactatatttattaaaattttgcctgtaagcattcacatgggtaggcttgaatctgtgttaaatctttcttctacatctgctaaactaaaagaggttcatgaagagtttaaggataagaaagtaattcttggtattgatgacatggatatttttaagggcattagtctgaaacttctagctgtggagcatctgctgcagcagaatccagatttgcagggcaaagttgtcctagttcaaattggaaatcctgcaaggggctctgtgaaggatgttcaggaagcatagaacgaaacatatttaattgcccagagaatcaacgatacatatagctcagataattatcag

SEQ ID NO: 6460 - DNA, 420 bp, Glycine max
aacgtcaggcttttcatctctcttcaatgttctctccactggatcgaggccttttctcaccttggagtggtttaaagcatctgggtatctcagctaaaccaaaacctcttcttcacatagatagaaagggagggtgtaagggtaaagtggtatatgcttctctctttggggttggagctcctgaggctttggtaattggggtcgttgctttgttggtttttggccctaaaggtcttgctgaggttgctcgaaatctgggaaaaacattgcgtgcatttcaacccaccattagagagcttcaggatgtttcaagggaatttaagagtacacttgagcgggagattggtcttgatgacaatttaagtcctacccagaacacatacaattccaatgtacgtaataccacaccaacttcatcat

SEQ ID NO: 6461 - DNA, 436 bp, Glycine max
acgcgtcaacccaagcgtccgctcacgcgtccgggcaattgggaacaaagacacagttagtcgtgctcttcgagcagcttataatagcgcagagcgtgctaaagattacgtgtactctggaatcctgaagcagcagaagttgctgtgccaggttcccgaacagctgggatttcttctggagcagttcctgtaggacctcaatgatctcccttaaatatgtttccacaggagacgaattctaacactggtgctggacttggatagctagacttccttagagataagccccagtttcaagcattgcgttcaatggtgcaatccaatccacaaattctacagcctgtgcattaggaacttggtatgcagaatcctggtcttttaagaccgagtcaggaacatcatggggagtttctgcagttgatccatgaacctgttg

SEQ ID NO: 6462 - DNA, 443 bp, Glycine max
aatttgaaagaaatcttataaaaagaagggacaaacattatgagaaggctcctatatgtagagagagagggaggtagtagcaaatatctagcacacagtatatgtaattattgaataaagtagtgataattgactttgcattgcagcagaaaatatggaattctacatgtccagagcatgtgttggaaaatctgaatggttgcacggaagattgtaacacagaacaggagcaagaagctattggttttaaagtgaagaatgcaatgctgtatccgcgtgaagtggagaaaggactatggccagaagattattctttttctgatcatgctagactcacaactgtgtttttaccaacaaggatgagatgttctgcctcacaaaactgaatgtacttcatggcactaatagtcttagcccacagaaaaatattcaattttgggacc

SEQ ID NO: 6463 - DNA, 431 bp, Glycine max
gaattcgctcagatttgaaaatgtgggttaagggtgctcttcttctccttgcagcactttgtgtttgtcacttagccggagcttctcttaatcgtagcagtttttcaccagatttcttctttggaacagcttcttcagcttaccagtatgaaggtgcagcacgtgaatgtggcaatggacctagtatatgggacaccttcactcatagccacccagatagaatagcagaccacagtaatggggatgttgccattgattcataccaccgctacaaggaagatgtggccatgatgaatgatattggattcaatgcctacaggttctccatctcttggccaaggatactacctcgtggaaacctgcatggaggagttaaccaataaggcatcacatattacaacaatctcataaatgaactgatagcaaatgga

SEQ ID NO: 6464 - DNA, 183 bp, Glycine max
cgggaaagagcgcgtgagagtggcgcgcgtgtggaagacgacgcaggggcagcacttcgttgtggagtggcgcgtgggcatcactctcttctcagactgcgttaactcgtatctccgcgatgacaactctgacatcgttgctactgataccattaaaaacacagtgtatgcaaaagcaaagga

SEQ ID NO: 6465 - DNA, 435 bp, Glycine max
agaaaccttaaaaaacaagtagtgttccgaaaagatggctcagcaggaagtggtagaagggttcaagttcgaacagaggcacgggaaagagcgcgtgagagtggcgcgcgtgtggaagacgaggcaggggcagcacttcgttgtggagtggcgcgtgggcatcactctcttctcagactgcgtcaactcgtatctccgcgatgacaactctgacatcgttgctactgataccatgaaaaacacagtgtatgcaaaagcaaaggaatgctcagacatactctctgctgaggactttgctattttgcttgctaagcactttgtatcattttacaagaaggttactggtgctattgtgaatattgtggaaaaaccatgggagcgtgtcattgtggatggtcaacctcatgaacatggtttcaaacttgggtctgagaa

SEQ ID NO: 6466 - DNA, 405 bp, Glycine max
cagaaaccttaaaaacaacaacgtaggagtgttcggaaaagatggctaagcaggaagtggtggaagggttcaagttcgagcagaggcacgggaaagaacgcgtgagagtggcgcgcgtgtggaagacgaggcaggggcagcacttcattgtggagtggcgcgtggggatcactctcttttcggattgcgtcaactcgtacctccgcgatgacaactctgacatcgttgctactgataccatgaaaaacaccgtgtatgcaaaagcaaaggaatgctctgacatactttctgccgaggagtttgctattctgcttgctaagcactttgtatcattttaccagaaggttactggtgctattgtgaatattgtggaaaaaccatgggagcgtgtcactgtggatgggc

SEQ ID NO: 6467 - DNA, 368 bp, Glycine max
cagaaaccttaaaaacaacaacgtatgagtgttcggaaaagatggctaagcgggaagtggtggaagggtgcaagttcgagcagaggcacgggaaagaacgcgtgagagtggcgcgcgtgtggaagacgaggcaggggcagcacttcattgtggagtggcgcgtggggatcactctcttttcggattgcgtcaactcgtacctacgcgatgacaactctgacatcgttgctactgataccatgaaaaacaccgtgtatgcaaaagctaaggaatgctctgacatactttctgccgaggagtttgctattctgcttgctaagcactgtgtatcattttaccagaaggttactggtgctattgtgaatatt

SEQ ID NO: 6468 - DNA, 420 bp, Glycine max
tggtttcaaacttgggtctgagaagcatacaacagaggcaatagtacaaaagtctggttcacttcagttgacttctggtattgaaggattgtcagtgttgaagacaacccagtctggttttgtgaatttcataagagacaagtacacagcacttcctgatacccgtgaaaggattctggcaacagaagtaaccgcactgtggaggtattcgtatgaatcacagtatagcctccctcagaagccattttactttacagaaaagtatcaggaagtgaaaaaagttctggctgacactttttttggcccaccaaatgggggagtctatagcccatctgttcaaaacacactctacctgatggcaaaggccacactgaacagatttcctgacatagcttatgtcagtctaaagatgccaaatct

SEQ ID NO: 6469 - DNA, 189 bp, Glycine max
aattccggtcgacgacgcgttcgtttgctattctgcttgctaagcactttgtatcattttaccagaaggttactggtgctgggcgaaatattgtcgaaaaaccatgggagcgtgtcactggggatggtcaacctcatgaacatggtttcaaacttgggtctgagaagcatacaacagaggcgatagttc

SEQ ID NO: 6470 - DNA, 316 bp, Glycine max
aggccaaattaggattaggattagggctaccaataccaataccaataccaattctattctatggcttgctcaagcgcccaaatacacggtctcggaaccccttcctcccgaaccctatttttaggtcagaggctaaataccaaggccgcctttatcaagctcaagtccacacctagaagactccgccctctcagagtggttaatgagaaagtcgtcggtatcgatttgggaaccaccaactccgccgtggctgccatggaaggcggcaagcccactatcatcaccaacgccgagggccagagaaccacgccctccg

SEQ ID NO: 6471 - DNA, 390 bp, Glycine max
ctcacgcgtcagcaagcaggtctcttacagagtcatcagagacgacaacggcaacgtcaaactcgactgccccgccattggcaaacagttcgctgccgaagaaatttctgcccaggttctgaggaagcttgttgatgatgcttccaagtttttgaacgataaggttaccaaggccgttgttacggtgcctgcttacttcaatgactcccaaaggactgccaccaaggatgctggtcggattgctggtctagaggttcttcgtattatcaatgaaccaaccgctgcatccttagcctatggctttgaaaagaaaaacaacgaaactatccttgtttttgaccttggaggcggtacctttgatgtctccgtgctcgaggttggcgatggagt

SEQ ID NO: 6472 - DNA, 418 bp, Glycine max
cccacgcgtccgggctcttaggaagcttgtggatgatgcttacaagtttttgaacgacgaggttaccaaggctgttgttactgtgcctgcttacttcaatgactcccaaaggactgacaccaaggatgccgatcctattgctggtcttgaagttcttagtattatcaatgaaccaacctctgcatccttgtcctatggcttcgaaaagaaaaacaatgaaacaatccttgtttatgaccttggaagcctcacctttgatgtctctgtgctcgatgttggtgatgagagtgtttgaagtcctctctacttctggtgacacccacttgggtggtgatgactttgataagagaattgatgattggctggctttcaacttcaagagagatgaaggcatatacctttatgaagacaaacaagc

SEQ ID NO: 6473 - DNA, 434 bp, Glycine max
catcaccaacgccgagggccagagaaccacgccctccgtcgtggcctacaccaagaatggggacaggctcgttggccaaatcgccaagcgtcaggccgtcgtcaaccccgagaacactttcttctccgtcaagaggttcatcggccgcaagatgtctgaggtcgacgaagagtccaagcaggtctcttacagagtcatcagagacgacaacggcaacgtcaaactcgactgccccgccattggcaaacagttcgctgccgaggaaatttctgcccaggttctgaggaagcttgttgatgatgcttccaagtttttgaacgataaggttaccaaggccgttgttacggtgcctgcttacttcaatgactcccaaaggactgccaccaaggatgctggtcggattgctggtctagaggttcttcggaatatcaatg

SEQ ID NO: 6474 - DNA, 476 bp, Glycine max
  modified_base (397)..(397): a, c, g, t, unknown, or other
gtctgagcatcggttaacccaactgcacaggtagtctccaaataatggagcctcatgatgagactggatgccaggctcctgaacgccccattctttgcattaataattgtggcttctttggaagagcagctaccatgaacatgtgttccaagtgttacaaggacatgctgttgaagcaggagcaggacaaatttgcagcatcatccgttgaaaacattgtgaatggcagttccaatggcaatggaaagcaggctgtggctactggtgctgttgctgtacaagttgaagctgtggaggtcaagattgtctgtgctcagagttctgtggattcgtcctccggtgatagtttggagatgaaagccaagactggtcccagtagatgtgctacatgccgganacgtgttggtttaactggtttcagctgcaaatgtggcaacctcttctgtgcaatgcatcgctattctgataaacatgat

SEQ ID NO: 6475 - DNA, 436 bp, Glycine max
cccacgcgtccgaagcaacaggttttggaagctaaggaatcttctcctgttcctccaaaactagatctggatgagatgctaaagcaactggcaagggaggtcgatctagaatactctgaggcagttaaagccacgggcttgacagacagtttgttgaaactaagggaggaagtttcgaaagcaaatgcagataatcaaattgttgatccattgctggagggtaagatagaaaagctaagggtggagtttgaacagcaattgcgtgcagcttccaattatggtaggctgcagaataagcttaactatctgagcgaattatgtaaagtaaagcttctgtcagatggaaagaagggcaatgaagctgtcacatttaagcaagagttgaagaaaaaaattgatgatgccttgagtgatccaaaaataagggagacatttg

SEQ ID NO: 6476 - DNA, 260 bp, Glycine max
tgaagatggatttctgaaggcttttaaggttgcaaattttgaatatgttgatgaggctgaagctgcagcagaggggtcatcgccaccgagtttcaaaaagtcactgtctcatacctatgatagaacaatcacttttgcacttctaaacggcagcatcagacatatcttcagactctcaccactagacttgaggaaatgagagtcaaaaggcgttattcagaacagtggatgcaccatcgcttactcccacaagatcttaa

SEQ ID NO: 6477 - DNA, 387 bp, Glycine max
ctctgtcagaaccaaatagtacctttcacatcatcaaaactcatgctccaaatgggggggttacacctttgaattcattttttcacacatggacaagatcgacgtgcctacgttcttcgtgtgccctatttcattagagctcatgaaggaccccgtgacggtctccaccggcatcacctacgaccgcgacagcatcgagaagtggctcttcgccgaggtgaagaacgacacgtgtcccgtcacgatgcatactctccattccggacctcactccgaaccacacgctcctcaaactcatccaagcctggtgcaccttcaacgcctcctacggcgtccagagaatccccacaccaaaaccaccggtcgacaaaaccctcatcgagaaac

SEQ ID NO: 6478 - DNA, 443 bp, Glycine max
  modified_base (388)..(388): a, c, g, t, unknown, or other
ccaaatcaaatctctcacaagtcaaaactcaagctccatatttcttttttctctttacacgtctgaattcatttcttctcacatggacgagatcgacgtgcctcctttcttcgtatgccctatctcattagagctcatgaaggaccccgtgaccgtctccaccggcatcacctacgaccgccacagcatcgagaagtggctcttcgccgccgtgccgaagaacaacacgtgtcccgtcacgaagcagcccctcctcccggacctcactccgaaccacacgctccgcaggctcatccaagcctggtgcaccgtcaacgcttctcacggcgttcagagaatccccacgccaaaaccttccgtcgacaaaaccctcatcgagaagctcctncgggacgccttggcttccgattccccgagccttcaacttcggtcccttcgaaccc

SEQ ID NO: 6479 - DNA, 452 bp, Glycine max
gcaacaggggcttccccacaccatcctctcccaacaagagccccctgcttaaattgtgcactccttctttatcccattctttcctcagattcgcgccaccattggaaaaaaaaaggtttccggtgttggggagcctagggttagggtttctgagagatatgggatgttccatgcattcgtgagccttatcgcacgcggttggaagctgtttgggcacggtgatgacgtcggtaatgtcgccgccgccaccggaagagaatgcaaggaggacctcctctggtttcgcgacatcggaaagttcgctgccggcgatttctccatggccgtcgtccaggccaactaggtcctcgaggtctagagctagatcgagtccggcggcttcagcaccttcatcggcgtctacgacggccacggcggccccgattgctcccgctatgtctgtgataacttgg

SEQ ID NO: 6480 - DNA, 399 bp, Glycine max
gggtgcttgcatgataatttgtgttggtgcactcatgcctgccatttcagtgcgttcatctggtgaaggcctgaaaattgaagcaaagattacaaataaaagtatggtgtctcttatttcttgtgttctactgattggactctttgttatgcaacaccgtggctcctacaaggttgcattcgtgtttccccccataatcatcctatggctactgactattttcatgattggtatttacaatgtcatcaagtggaatccaagagtatatcaggctctatctccatattatatatacaagttctttaggcttacaggaaaagatggttggactaatcttggacgagtatttctgtgcgttacaggaactgaagctatgtatgcagaccttgggtactacag

SEQ ID NO: 6481 - DNA, 427 bp, Glycine max
cccacgcgtccgagaattcttcattttgctattattggaggtggtccaactggagtggagtttgcagcctcactacatgactatgtcactgaggatttggtcaacatatatcctgggataaaagatctagttaaaattacccttctggaggctggagatcatattttgagcatgtttgataaaagaattactgcttttgctgaagagaagttcggaagagatggtatggatgtgaaaactggatccatggttgtgaaggtatccgagaaagaaatttctactaaagaaatgaaaaatggaggagcaattactacaattccatatggaatggctgtctggtcaactggtattggcactcgtccatttataagagattctatgtcacaaattggtcagactaacagacgtgccatagctactgatgaat

SEQ ID NO: 6482 - DNA, 403 bp, Glycine max
cccacgcgtccgcacgaaaccttgcagtaacaaaaaatgcggagtttcactttctttggacgagtttctagagctttccgcgatcatgggtccaacttcaagcttgtactcctctgcaccaccgtaagtggtggagggattgtagcttacggagaggctgctgccgcatctgaagcagcggcggcggcgacggagaagaaaaaggtggtggtgctgggaactgggtgggctggcacgagtttcttgaggaacctggacaaccccaaatatgaggttcatgtggtctcccctcgcaattactttgcattcactcctttgctgcctagtgttacctgtggcaccgtggaagctcgcagcattgtcgaacccgtccgcaatattttcaggaagaaaaagatggaca

SEQ ID NO: 6483 - DNA, 437 bp, Glycine max
caagatcggaaagccccacaccgttccctgcaaggttaccggaaagtgtggctccgtcaccgtccgcatggtccccgcccctcgtgggtccggaatcgtcgccgctagggtccccaagaaggtcttgcagttcgctggaatcgatgacgtcttcacttcctccaggggttccaccaaaaccctcggaaatttcgtcaaggctacttttgactgtttgctgaaaacctacggttttctaacacctgaattctggaaggagactcggttctccaaatcaccattccaagagtacactgatctattggcaaagccaacagggaaggcccttatcctcgaggaggaaacggtggaggcttgagtgagcagaagcagcagcagttttggtggtatccggatgattgtgcctcgtcgtaagcatgctaggacccagtaattag

SEQ ID NO: 6484 - DNA, 392 bp, Glycine max
caacaacatggccgaacgtggaggctgagaccgtgccggtttcggtcgcggctttggcggtcgtggacgcggcggcgacaggggacgagggcggcgcagggcaggagggcgccgcgacgaggaggagaagtgggtcccagtgacgaagctggggcgcctggtgaaggaggggaaaattcggagcctggagcagatctacctacactcgctcccaatcaaggagcaccaaatcattgacaccctcgtggggcccaccctgaaggacgaggtgatgaagatcatgcccgtccagaagcagacccgcgccggtcagcgaacccgcttcaaggccttcgtggtggtcggcgacaacaacggccacgtcggtctcggagtgaagtgcagcaaggaag

SEQ ID NO: 6485 - DNA, 439 bp, Glycine max
ctaaaatcccctccgaagaaacccgattcggaacccgttcaacccgattccgcatccacccccaatcccaccacgcgcggcgtcaaagaggatttttccgagctcaccaaatccttttcccgccagctctggggagtcgcctccttcctcgccccgccgcccgatccccaatccgaaaagcccgtcgccgattccaatcccaatcccactgacgacgacgaagaggaagatatcatcgccaggaatccgaaacgatttcgcggagattagtggcaagttcaagagcgggatctccaaaatttctggtaataagacggtatccgaattcactaagatagcttcgagtttccttcagcctggatccgaggaggaatacgatctccaaggtgtcctcggagttaccgaaggatgtggttgccttcgccagaagcgtagcttt

SEQ ID NO: 6486 - DNA, 397 bp, Glycine max
caaatatgtattctgagctgcgggaggaggctcgtgatcatgcacgcttgcggaatgcatattttgagcaggcgcgacaagcctaccttattggcaacaaggcccttgcaaaggagctaagtgttaaggggcaactgcacaacatgcatatgaaagcagctcatggaaaagctcaagaatctatttaccgccagaggaatcccgttgctccagagaatggaagagggcaccagagaatgatagacctacacggtctgcacgtaagtgaagcgattcacgtgctgaaacacgaactgagtgtgctaagaagcacggccagagccgctgagcagcgtttgcaggtatacatctgtgttggcactggtcaccatactcggggctcccgcactcccgcaag

SEQ ID NO: 6487 - DNA, 384 bp, Glycine max
ggattctggtcctattagtttagtagtaaatgcttgcgcaagcagggatcttcgagataatgttgttggggtttgttttgtggcccatgatataactgctcagaagaatgtcatggacaaatttacgcgtattgaaggtgattacaaggcaattgtacagaaccgcaatccattaatccctcctatatttggcacagatgaatttggctggtgttgtgagtggaatccagctatgacgaagttaactggatggaagcgagaggaggtgatggataaaatgcttttgggagagctttttggcacccatatggctgcttgtcgcctaaagaatcaagacgcttttgttaatttgggtgttgtacttaataaagccatgactggttt

SEQ ID NO: 6488 - DNA, 358 bp, Glycine max
cccacgcgtccgcccacgcgtccgcccacgcgttcgcacaaacatggacgcatcaaaactcaagcaattgaagcatttcatcgaacagtgcaagtccaacccttccctcctcgctgatccttcactctccttcttccgcgactatcttcaaagtctcggcgcgaaacttcctgagtctgcttattccgaatcgacgggcgtggagagggatgaggacatagaggatcttacggaggagcacgagaaggtagaagaagaagaagaagaagaggacgatgtaattattgaatccgatgttgagcttgagggtgaaacctgtgagcctgatgatgatcctccacagaagatgggagacccc

SEQ ID NO: 6489 - DNA, 399 bp, Glycine max
gttcttcatgttcgaattcggcggaactttgcatttgtgcagtttgagacacaagaagatgctaccaaagctatagagtgtacaaatatgagtaagatcctggacagggtggtgtctgtggagtatgctctgagggatgatggtgagaggggggacaattatgacagtcctagaagaggtggttatgagagatcacccagtccttatcacaggcgaccaagtcctgactatggtcgtccacgcagccctgtctatgataggtacaatggtggtggaccagacaggcggaggagtcctgattatggcaggcacagaagtcctgattatgggaggcgcaggagttctgattatggaaggcgcaagagtcctgattatgggaaacccaggagttctgaatat

SEQ ID NO: 6490 - DNA, 441 bp, Glycine max
ctaggggtgaacgtggacgtcatcgtgatggatcgaaggcaaaccagaagccaacaaagaccctttttgtgattaactttgacccaatccgtactagagttcgtgatatagaaaaacactttgaaccttatgggaatgttcttcatgttcgaattcggcggaactttgcatttgtgcagtttgagacacaagaagatgctaccaaagctatagagtgtacaaatatgagtaagatcctggacagggtggtgtctgtggagtatgctctgagggatgatggtgagaggggggacaattatgacagtcctagaagaggtggttatgagagatcacccagtccttatcacaggcgaccaagtcctgactatggtcgtccacgcagccctgtctatgataggtacaatggtggtggaccagacaggcggaggagtcctgattatg

SEQ ID NO: 6491 - DNA, 391 bp, Glycine max
atccatcaccctttctttcattctgttgggaaatggaagtcacactttcagcgtgcaagtccattagctcgccttctgttcccgtcgcagctttatttgcggggaaagcaggaactaagagttcgcaatgcagttttttagctggagcaaacaaagtgaggtttcctaggcaagtcggtcaagttagccacgttcgcaaacagcgccaaacgcgtcactgtggtgctctccacgcgacttgcagcggtgacaagatcctgatcgcgaatagaggcgagattgcggttcgcgttattcgaaccgctcatgaattggggattccgtgtgtggctgtgtactccaccattgataaggacgcccttcatgtcaaactggctgatgaagctgtatg

SEQ ID NO: 6492 - DNA, 459 bp, Glycine max
  modified_base (408)..(408): a, c, g, t, unknown, or other
  modified_base (415)..(415): a, c, g, t, unknown, or other
cccacgcgtccgcaatttcgcacctccctcgtttccatcgacatccgcatcaaaagaccttctctttctcttgccatcatttcattccccatacgctccatccatcaccctttctttcattctgttgggaaatggaagtcacactttcagcgtgcaagtccattagctcgccttctgttcccgtcgcagctttatttgcggggaaagcaggaactaagagttcgcaatgcagttttttagctggagcaaacaaagtgaggtttcctaggcaagtcggtcaagttagccacgttcgcaaacagcgccaaacgcgtcactgcggtgctctccacgcgacttgcagcggtgacaagatcctgatcgcgaatagaggcgagaatgcggttcgcgttattcgaaccgctcatngaatggngattccgtgtgtggctgtgtactccaccattgataaggacgccc

SEQ ID NO: 6493 - DNA, 415 bp, Glycine max
caagaataatacgaaacccacatcatgagcacactttgtatggcggaaaatatgaaggaggtggaagttgaagatggatatgtcttgaaagaagagatccatctcacggtgctaaaaacctctctgttcttcgcgggcgatggcttcagcgtctacgattgcaaaggtcaactcgtgttcagagttgactcttatggacccgacactcgcgacatagacgaactcgttctcatggatcctaacggacgttgcctcctcaccgttcgtcgaaagcggccgagtttgcatcaacggtgggaaggtttcaaaggggagagaatggacggtgataaacccatcttcaacgtgaggagagcgtccattataggacggtcgcgtgcgagtttgacggtggagatgtacgattaccccggtg

SEQ ID NO: 6494 - DNA, 436 bp, Glycine max
gtggatatcatctttgtagatattttttctccccacgtttgcgatagagataacccacccatgcatgcttccatttccatgtaccccacattatgaattattaattaattggtgccataaattgcatatcgtggatgcaagaataatacgaaacccacatcatgagcacactttgtatggcggaaaatatgaaggaagtggaagttgaagatggatatgtcttgaaagaagagatccatctcacggtgctaaaaacctctctgttcttcgcgggcgatggcttcagcgtctacgattgcaaaggtcaactcgtgttcagagttgactcttatggacccgacactcgcgacatagacgaactcgttctcatggatcctaacggacgttgcctgctcaccgttcgtcgaaagcggtcgagtttgcatcaacggtggga

SEQ ID NO: 6495 - DNA, 372 bp, Glycine max
ccgtccggattcccggtcgaccccgcgttcgcatgagcacactttgtatggcggaaaatatgaaggaggtggaagttgaagatggatatgtgttgaaagaagagatccatctcacggtgctaaaaacctctctgttcttcgcgggcgatggcttcagcgtctacgattgcaaaggtcaactcgtgttcaaagttgactcttatggacccgacactcgcgacatagacgaactcgttctcatggatcctaacggacgttgccttctcaccgttcgtcgaaagcggccgagtttgcatcaacggtgggaaagtttcaaaggggatagaatggacagggataaacccatcttcagcgtgaggagagcgtcgatca

SEQ ID NO: 6496 - DNA, 393 bp, Glycine max
gcacactttgtatggcggaaaatatgaaggaggtggaagttgaagatggatatgtcttgaaagaagagatccatctcacggtgctaaaaacctctctgttcttcgcgggcgatggcttcagcgtctacgattgcaaaggtcaactcgtgttcagagttgactcttatggacccgacactcgcgacatagacgaactcgttctcatggatcctaacggacgttgcctcctcaccgttcgtcgaaagcggccgagtttgcatcaacggtgggaaggtttcaaaggggagagaatggacggtgataaacccatcttcagcgtgaggagagcgtcgatcataggacggtcgcgtgcgagtttgacggtggagatgtacgataaccccggtgaggagt

SEQ ID NO: 6497 - DNA, 387 bp, Glycine max
agtcacagttgcagcaaacggagggcaagatttctacgacgtgagcaacgtggatggcttcaacgtgcccatgtccgtaaccccacaaggtgggagtggcgattgcaaaacctcaagttgccctaagaacattaactctgtgtgccctgcggagcttcaagtcaaagggtccgatggcaacgtcatcgcttgcaagagtgcttgcgaagcttttaaggaagatagatattgctgcactggacctaacaacaccgcagaaacatgtccacctacgaactactctcagattttcgaggagcagtgtcccgatgcttattcctacgcttacgatgataagagcagcactttcacttgctccaacaggcctgattatgccatcacattctg

SEQ ID NO: 6498 - DNA, 420 bp, Glycine max
tgcaaaacgaaaattatacatatccaacaatgacgaccacccgtgttgctctctgccttttatttgcattcctcttctacgcggctgaaggagccaaggttagtttcaataacaagtgcacatacacggtatggccaggaaccctaaccggtgaccaaaagccccaattatcaacaactggtttcgagttgggtccaggagcatccaactctgtggaccttccatctccatggtccggtcggttctgggcccgaacaggatgctccaacaacaacggaaggttcagctgcgccaccgccgattgcgcctccggtcaagtcgcatgcaacggtgccggtgcaatcccgccagctactttggtagaaatcacagttgcagcaaacggagggcaagatttctacgacgtgagcaacgtggatg

SEQ ID NO: 6499 - DNA, 422 bp, Glycine max
  modified_base (378)..(378): a, c, g, t, unknown, or other
gaacaggatgctccaacaacaacggaaggttcagctgcgccaccgccgattgcgcctcgggtcaagtcgcatgcaacggtgccggtgcaatcccgccagctactttggtagaaatcacagttgcagcaaacggagggcaagatttctacgacgtgagcaacgtggatggcttcaacgtgcccatgtccgtaaccccacaaggtgggagtggcgattgcaaaacctcaagttgccctaagaacattaactctgtgtgccctgcggagcttcaagtcaaagggtccgatggcaacgtcatcgcttgcaagagtgcttgcgaggcttttaaggaagatagatattgctgcactggacctaacaacaccgcataaacatgtncacctacgaactactctcagaatttcgaggagcagtgtcccgat

SEQ ID NO: 6500 - DNA, 465 bp, Glycine max
  modified_base (333)..(333): a, c, g, t, unknown, or other
cgaatttccgggtcggaccaagccgtccgtgcaaaacgggaggtatccaccattgactaccacccgtgttgctatctgcctttgctttgcattgctttactacgcggctgaaggagccaaggttagtttcaataacaagtgctcatacacggtatggccaggaaccctaaccggtgaccaaaagccccaattatcaacaactggtttcgagttgggtccaggagcatccaactctgtggaccttccatctccatggtccggtcggttctgggcccgaacaggatgctccaacaacaacggaaggttcagctgcgccaccgccgattgcgcctncggtcaagtcgcatgcaacggtgccggtgcaatcccgccagctactttggtagaaatcacagttgcagcaaacggagggcaagatttctacgacgtgagccaacgtgatggcttcaacgtgcccatgtccgt

SEQ ID NO: 6501 - DNA, 408 bp, Glycine max
cccacgcgtccggaagtatccaacaatgtctaccacccgtgttgctatctgtctttgctgtgcattcctttactacgcggctgaaggagccaaggttagtttcaataacaagtgctcatacacggtatggccaggaaccctaaccggtgaccaaaagccccaattatcaacaactggtttcgagttgggtccaggagcatccaactctgtggaccttacatctccatggtccggtcggttctgggcccgaacaggatgctccaacaacaacggaaggttcagctgcgccaccgacgattgcgcctccagtcaagtcgcatgcaacggtgccggtgcaatcccgtcagctacttgggtagaaatcacagttgcagcaaacggatggcaagattactacgacgtgagcaa

SEQ ID NO: 6502 - DNA, 422 bp, Glycine max
cccacgcgtccgcaaaacgagaagtatccaacaatgactaccacccgtgttgctatctgtctttgctttgcattcctttactacgcggctgaaggagccaaggttagtttcaataacaagtgctcatacacggtatggccaggaaccctaaccggtgaccaaaagccccaattatcaacaactggtttcgagttgggtccaggagcatccaactctgtggaccttccatctccatggtccggtcggttctgggcccgaacaggatgctccaacaacaacggaaggttcagctgcgccaccgccgattgcgcctccggtcaagtcgcatgcaacggtgccggtgcaatcccgccagctactttggtagaaatcacagttgcagcaaacggagggcaagatttctacgacgtgagcaacgtgga

SEQ ID NO: 6503 - DNA, 359 bp, Glycine max
  modified_base (287)..(287): a, c, g, t, unknown, or other
  modified_base (299)..(299): a, c, g, t, unknown, or other
cccacgcgtccgccaacaatgactaccacccgtgttgctatctgtctttgctttgcattcctttactacgcggctgaaggagccaaggttagtttcaataacaagtgctcatacacggtatggccaggaaccctaaccggtgaccaaaagccccaattatcaacaactggtttcgagttgggtccaggagcatccaactctgtggaccttccatctccatggtccggtcggttctgggcccgaacaggatgctccaacaacaacggaaggttcagctgcgccaccgncgattgcgcctncggtcaagtcgcatgcaacggtgccggtgcaatcccgccagctactttggtagaaattac

SEQ ID NO: 6504 - DNA, 438 bp, Glycine max
acggaagtatccaacaatgactaccacccgtggtgctatctgtctttgctttgcattcctttactgcgcggctgaaggagccaaggttagtttcaataacaagtgctcatacacggtatggccaggaaccctaaccggtgaccaaaagccccaattatcaacaactggtttcgagttgggtccaggagcatccaactctgtggaccttccatctccatggtccggtcggttctgggcccgaacaggatgctccaacaacaacggaaggttcagctgcgccaccgccgattgcgccttcggtcaagtcgcatgcaacggtgccggtgcaatcccggcagctactttggtagaaatcacagttgcagcaaacggagggcaagatttctacgacgtgagcaacgtggatggctttaacgtgcccatgtccggaaccccaca

SEQ ID NO: 6505 - DNA, 299 bp, Glycine max
cccacgcgtccgtgcaaaacgagaagtatccaacaatgactaccacccgtgttgctatctgtggttggtttgcattcctttactacgcggctgaaggagccaaggttagtttcaataacaagtgctcatacacggtatggccaggaaccctaaccggtgaccaaaagccccaattatcaacaactggtttcgagttgggtccaggagcatccaactctgtggaccttccatctccatggtccggtcggttctgggcccgaacaggatgctccaacaacaacggaaggttcagctgcgcc

SEQ ID NO: 6506 - DNA, 397 bp, Glycine max
cccacgcgtccggcaaaacgaaaaggatacatatccaacaatgacgaccacccgtgttgggctctgccttttatttgcattcctcttctacgcagctgaaggagccaaggttagtttcaataacaagtgcacatacacggtatggccaggaaccctaaccggtgaccaaaagccccaattatcaacaactggtttcgagttgggtccaggagcatccaactctgtggaccttccatctccatggtccggtcggttctgggcccgaacaggatgctccaacaacaacggaaggttcagctgcgccaccgccgattgcgcctacggtcaagtcgcatgcaacggtgccggtgcaatcccgccagctactttggtagaaatcacagctgcagcaaacgga

SEQ ID NO: 6507 - DNA, 442 bp, Glycine max
gcaaaacgagaagtatccaacaatgactaccacccgtgttgctatctgtctttgcttggcatgcctttactacgcggctgaaggagccaaggttagtttcaataacaagtgctcatacacggtatggccaggaaccctaaccggtgaccaaaagccccaattatcaacaactggtttcgagttgggtccaggagcatccaactctgtggaccttccatctccatggtccggtcggttctgggcccgaacaggatgctccaacaacaacggaaggttcagctgcgccaccgccgattgcgcctccggtcaagtcgcatgcaacggtgccggtgcaatcccgccagctactttggtagaaatcacagttgcagcaaacggagggcaagatttctacgacgtgagcaacgtggatggcttcaacgtgcccatgtgcgtaacccca

SEQ ID NO: 6508 - DNA, 467 bp, Glycine max
cggacgcgtgggtgcaaaacgagaagtatccaacaatgactaccacccgtgttgctatctgtggttgctttgcattcctttactacgcggctgaaggagccaaggttagtttcaataacaagtgctcatacacggtatggccaggaaccctaaccggtgaccaaaagccccaattatcaacaactggtttcgagttgggtccaggagcatccaactctgtggaccttccatctccatggtccggtcggttctgggcccgaacaggatgctccaacaacaacggaaggttcagctgcgccaccgccgattgcgcctccggtcaagtcgcatgcaacggtgccggtgcaatcccgccagctactttggtagaaatcacagttgcagcaaacggagggcaagatttctacgacgtgagcaacgtggatggcttcaacgtgcccatgtccgtaaccccacaaggtgggagt

SEQ ID NO: 6509 - DNA, 353 bp, Glycine max
  modified_base (319)..(319): a, c, g, t, unknown, or other
tcgactaccacccgtgttgctatctgtctttgctttgcattcctttactacgcggctgaaggagccgaggttagtttcaataacaagtgctcatacacggtatggccaggaaccctaaccggtgaccaaaagccccaattatcaacaactggtttcgagttgggtccaggagcatccaactctgtggaccttccatctccatggtccggtcggttctgggcccgaacaggatgctccaacaacaacggaaggttcagctgcgccaccgtcgattgcgcctccggtcaagtcgcatgcaacggtgccggtgcaatcccgncagctactttggtagaaatcacagttgcagcaaa

SEQ ID NO: 6510 - DNA, 449 bp, Glycine max
cccacgcgtccgcgagaagtatccaacaatgactaccacccgtgttgctatctgtctttgctgtgcattcctttactacgcggctgatggagccaaggttagtttcaataacaagtgctcatacacggtatggccaggaaccctaaccggtgaccaaaagccccaattatcaacaactggtttcgagttgggtccaggagcatccaactctgtggaccttccatctccatggtccggtcggttctgggcccgaacaggatgctccaacaacaacggaaggttcagctgcgccaccggcgattgcgcctacggtcaagtcgcatgcaacggtgccggtgcaatcccgacagctactttggtagaaatcacagttgcagcaaacggagggcaagatttctacgacgtgagcaacgtggatggcttcaacgtgcccatgtccgtaaccccac

SEQ ID NO: 6511 - DNA, 455 bp, Glycine max
  modified_base (301)..(301): a, c, g, t, unknown, or other
  modified_base (448)..(448): a, c, g, t, unknown, or other
gctcgaccgacgcgtccgcaatgactaccacccgtgttgctatctgtctttgctttgcattcctttactacgcggctgaaggagccaaggttagtttcaataacaagtgctcatacacggtatggccaggaaccctaaccggtgaccaaaagccccaattatcaacaactggtttcgagttgggtccaggagcatccaactctgtggaccttccatctccatggtccggtcggttctgggcccgaacaggatgctccaacaacaacggaaggttcagctgcgccaccgtcgattgcgcctncggtcaagtcgcatgcaacggtgccggtgcaatcccgccagctactttggtagaaatcacagttgcagcaaacggatggcaagatttctacgacgtgagcaacgtggatggctttaacgtgcccatgtccgtaaccccacaatgtgngagtggc

SEQ ID NO: 6512 - DNA, 453 bp, Glycine max
cccacgcgtacgcccacgcgtccgctgcaaaacgagaagtatccaacaatgactacgacgcgtgttgctatctgtctttgctttgcattcctttactacgcggctgaaggagccaaggttagtttcaataacaagtgctcatacacggtatggccaggaaccctaaccggtgaccaaaagccccaattatcaacaactggtttcgagttgggtccaggagcatccaactctgtggaccttccatctccatggtccggtcggttctgggcccgaacaggatgctccaacaacaacggaaggttcagctgcgccaccgccgattgcgcctccggtcaagtcgcatgcaacggtgccggtgcaatcccgccagctactttggtagaaatcacagttgcagcaaacggagggcaagatttctacgacgtgagcaacgtggatggcttcaacgtgccc

SEQ ID NO: 6513 - DNA, 444 bp, Glycine max
tgcaaaacgagaagtatccaacaattactatcacccgtgttgctatctgtctttgcgttggattcctttactacgcggctgaaggagccaaggttagtttcaataacaagtgctcatacacggtatggccaggaaccctaaccggtgaccaaaagccccaattatcaacaactggtttcgagttgggtccaggagcatccaactctgtggaccttccatctccatggtccggtcggttctgggcccgaacaggatgctccaacaacaacggaaggttcagctgcgccaccgccgattgcgcctacggtcaagtcgcatgcaacggtgccggtgcaatcccgtcagctactttggtagaaatcacagttgcagcaaacggagggcaagatttctacgacgtgagcaacgtggatggcttcaacgtgcccatgttcgtaaccccac

SEQ ID NO: 6514 - DNA, 406 bp, Glycine max
  modified_base (370)..(370): a, c, g, t, unknown, or other
cggacgcgtggggcccaacagacccaccatgaagtccttatgagcttgattcttgggttgctgcgctcctggaatgaccctctctatcacctagtcaccgaggtgcggggtatgaaaggagccccagatgctatcctatcgagggccatagagattgaggaagaaaacaaacgacttctggaaggcatggagatgatatttggccaggttattcctggagccaaagagactgagccctaccctgtgtggtcaggactcccgtccctgcaaactaaggatgaagatgcacgttattccgctttttaatacctgctccactgcctgcgcagggattcaagcaagattgacacttaccttaagctcctgaatngcagaatcatctacaacaacaactgctaaacccaca

SEQ ID NO: 6515 - DNA, 418 bp, Glycine max
  modified_base (345)..(345): a, c, g, t, unknown, or other
gtcaaatctactcttgtgccagggtgtggtctccacccccgtctgtcccaatgggcgctggcaactgccaggtatcccttcgagacctgtttgaccgggcagtcatggtgtcccactacatccatgacctctcctcggaaatgttcaacgaatttgataaacggtatgcccagggcaaagggttcattaccatggccctcaacagctgccatacctcctcccttcctacccctgaagataaagaacaagcccaacagacccaccatgaagtccttatgagcttgattcttgggttgctgcgctcctggaatgaccctctctatcacctagtcaccgaggtgcggngtatgaaaggagccccagatgctatcctatcgagggccatagagattgaggaagaaaacaaacgacttctgga

SEQ ID NO: 6516 - DNA, 419 bp, Glycine max
ttgctagtggtactgtcttagctttgattctctgttctctgttttgttctgtttcgcgtattgtcttcatacaggaacttgaacaatgaagaatgcaaagggcaagggagcagcaagggcctcaaaagaatcactgaagcccgttgatgaccggttggaaagcggaaggcttccggtaagcctgggagaagtagtgcaccaaagaaggagaagaaggccaagaaagaccccaacaagcctaaaagaccacccagtgctttctttgtgttccttgaggagttcaggaagacctttaaggctgagaatcctaatgtgaaggctgtatcagttgttgggaaagctggatgagagaaatggaaatccttgtccagtgctgagaaagctccatatgaagccaaggctgcgaaaaggaaagctga

SEQ ID NO: 6517 - DNA, 420 bp, Glycine max
aatgtccggctcgacccacgacgtacgcccacgcgtccgcccacgcgtccgcccacgcgtccgctttatataacctaattgcaaagatgaataccaagcccgttttcttcttgtgcttcctctgtgcactgcttctcatctctgttgtggcaactgagccatccaaagatgagacacaagcagaagaaccaaagacacagccagatgcctggggaagaggtggaagtggggggcatgatggaagctggggacacggtggagactgggggcatggcggaggaggacacggtggaggacatggcggaggaggacacggtggaggacatggcggaggatgcagatgctgcggtcgaaagggctgcaaatgttgctgaagtaaaaatcacaaatatatgaactgaacacactcatatacttgag

SEQ ID NO: 6518 - DNA, 400 bp, Glycine max
acgcgtcagaactaattgcaaagatgaataccaagccctttttctccttgtgcttactctgcgcactgcttctcatctgtgttgtggcaactgagccatccaaagatgcgacacaagaagaaccaaagacacggccagatgcctggagaagtggtggaagtggaggacatggtggaagtgggggacatggtggaagcgggggacacggtggaggctggggacatggtggaggctggggacatggcggtggacatggcggaggatgcaaatgctgcggtcgaaagggctgcaaatgttgctgaagtaaaaaaacacaaacatgaactgaagacacacatacgtgtgtactccatgtaataagtatagtatgtagaattaagaaataaaagcatggaatcta

SEQ ID NO: 6519 - DNA, 431 bp, Glycine max
atctttatataacctaattgcaaagatgaataccaagcccgttttcttcttgtgcttcctctgtgcactgcttctcatctctgttgtggcaactgagccatccaaagatgagacacaagaagaaccaaagacacagccagatgcctggggaagaggtggaagtggggggcatgatggaagctggggacacggtggagactgggggcatggcggaggaggacacggtggaggacatggcggaggaggacacggtggaggacatggcggaggatgcagatgctgcggtcgaaagggctgcaaatgttgctgaagtaaaaatcacacatatatgaactgaacacactcttataacttgaatggactccatgtaataactagtatatatgtaagaaatcagaaattaaagcatggactctattcgtgcttgggct

SEQ ID NO: 6520 - DNA, 419 bp, Glycine max
aattaaactaattgcaaagatgaataccaagccctttttctccttgggcttactctgggcactgcttctcatctgtgttgtggcaactgagccatccaaagatgcgacacaagcagaagaaccaaagacacggccagatgcctggagaagtggtggaagtggaagacatggtggaagtgggggacatggtggaagcgggggacacggtggaggctggggacatggtggaggctggggacatggcggtggacatggcggaggatgcaaatgctgcggtcgaaagggctgcaaatgttgctgaagtaaaaaaacacaaacatgaactgaagacacacatacgtgtgtactccatgtaataagtatagtatgtagaattaagaaataaaagcatggaatctatatccgtgctagggctgtca

SEQ ID NO: 6521 - DNA, 398 bp, Glycine max
attgcaaagatgaataccaagcccgttttcttcttgtgcttcctatgtgcactgcttctgatcgctgttgtggcaactgagccatccaaagatgagacacaagaagaaccaaagacacagccagatgcctggggaagaggtggaagtggggggcatgatggaagctggggacacggtggagactgggggcatggcggaagaagacacggtggaggacatggcggaggatgacacggtggaggacatggcggaagatgcagatgctgcggtcgaaagggctgcaaatgttgctgaagtaaaaatcacgaatatatgaactgaacacactcatatacttgagtgtactccatgtaataactagtatatatgtaagaaataagaaataaaagcatggactc

SEQ ID NO: 6522 - DNA, 348 bp, Glycine max
actaattgcaaagatgaataccaagccctttttctccttgtgcttactctgcgcactgcttctcatctgtgttgtggcaactgagccatccaaagatgcgacacaagcagaagaaccaaagacacggccagatgcctggagaagtggtggaagtggaggacatggtggaagtgggggacatggtggaagcgggggacacggtggaggctggggacatggtggaggctggggacatggcggtggacatggcggaggatgcaaatgctgcggtcgaaagggctgcaaatgttgctgaagtaaaaaaacacaaacatgaactgaagacacacatacgtgtgtactccatgg

SEQ ID NO: 6523 - DNA, 395 bp, Glycine max
taaactaattgcaaagatgaataccaagccctttttctccttgtgcttactctgcgcactgcttctcatctgtgttgtggcaactgagccatccaaagatgcgacacaagaagaaccaaagacacggccagatgcctggagaagtggtggaagtggaggacatggtggaagtgggggacatggtggaagcgggggacacggtggaggctggggacatggtggaggctggggacatggcggtggacatggcggaagatgcaaatgctgcggtcgaaagggctgcaaatgttgctgaagtaaaaaaacacaaacatgaactgaagacacacatacgtgtgtactccatgtaataagtatagtatgtagaattaagaaataaaagcatggaatctata

SEQ ID NO: 6524 - DNA, 375 bp, Glycine max
caaagatgaaaccaagcccgttttcttcttgtgcttcctctgtgcactgcttctcatctctgttgtggcaactgagccatccaaagatgagacacaagcagaagaaccaaagacacagccagatgcctggggaagaggtggaagtggggggcatgatggaagctggggacacggtggagactgggggcatggcggaggaggacacggtggaggacatggcggaggaggacacggtggaggacatggcggaggatgcagatgctgcggtcgaaagggctgcaaatgttgctgaagtaaaaatcacaaatatatgaactgaacacactcatatacttgagtgtactccatgtaataactaggatatatgtaagaaat

SEQ ID NO: 6525 - DNA, 363 bp, Glycine max
ataccaagcccgttttcttcttgtgcttcctctgtgcactgcttctcatctctgttgtggcaactgagccatccaaagatgagacacaagcagaagaaccaaagacacagccagatgcctggggaagaggtggaagtggggggcatgatggaagctggggacacggtggagactgggggcatggcggaggaggacacggtggaggacatggcggaggaggacacggtggaggacatggcggaggatgcagatgctgcggtcgaaagggctgcaaatgttgctgaagtaaaaatcacaaatatatgaactgaacacactcatatacttgagtgtactccatgtaataactagtatatatgtaag

SEQ ID NO: 6526 - DNA, 446 bp, Glycine max
  modified_base (431)..(431): a, c, g, t, unknown, or other
  modified_base (434)..(434): a, c, g, t, unknown, or other
aagatgaataccaagcccgttttcttcttgtgcttcctctgtgcactgcttctcatctgggttgtggcaactgagccatccaaagatgagacacaagcagaagaaccaaagacacagccagatgcctggggaagaggtggaagtggggggcatgatggaagctggggacacggtggagactgggggcatggcggaggaggacacggtggaggacatggcggaagaggacacggtggaggacatggcggaggatgcagatgctgcggtcgaaagggctgcaaatgttgctgaagtaaaaatcacaaatatatgaactgaacacactcatatacttgagtgtactccatgtaataactagtatatatgtaagaaataagaaataaaagcatggactctatccgtgcttgggctggcataggttgaatgttttncgncaaccatgcatg

SEQ ID NO: 6527 - DNA, 348 bp, Glycine max
cccacgcgtccgcccacgcgtccgataccaagccctttttctccttgtgcttactctgcgcactgcttctcatctgtgttgtggcaactgagccatccaaagatgcgacacaagcagaagaaccaaagacacggccagatgcctggagaagtggtggaagtggaggacatggtggaagtgggggacatggtggaagcgggggacacggtggaggctggggacatggtggaggctggggacatggcggtggacatggcggaggatgcaaatgctgcggtcgaaagggctgcgaatgttgctgaagttaaaaaacacatacatgaactgaagacacacatacgtgtggac

SEQ ID NO: 6528 - DNA, 412 bp, Glycine max
aactcatcttatataattaaactaattgcaaagatgaataccaagccctttttcggcttgtgcttactctgcgcactgcttctcatctgtgttgtggcaactgagccatccaaagatgcgacacaagcagaagaaccaaagacacggccagatgcctggagaagtggtggaagtggaggacatggtggaagtgggggacatggtggaagcgggggacacggtggaagctggggacatggtggaggctggggacatggcggtggacatggcggaggatgcaaatgctgcggtcgaaagggctgcaaatgttgctgaagtaaaaaaacacaaacatgaactgaagacacacatacgtgtgtactccatgtaataagtatagtatgtagaattaaggaaataaaagcatggaatc

SEQ ID NO: 6529 - DNA, 417 bp, Glycine max
  modified_base (17)..(17): a, c, g, t, unknown, or other
cgggtcgagcacgcgtncgcaaaatgaataccaagcccgttttcttcttgtgcttcctctgtgcactgcttctcatgtctgttgtggcaactgagccatccaaagatgagacacaagcagaagaaccaaagacacagccagatgcctggggaaaaagtggaagtggggggcatgatggaagctggggacacggtggagactgggggcatggcggaggaggacacggtggaagacatggcggaggaggacacggtggaggacatggcggaggatgcagatgctgcggtcgaaagggctgcaaatgttgctgaagtaaaaatcacaaatatatgaactgaacacactcatatacttgagtgtactccatgtaataactagtatatatgtaagaaataagaaataaaagcatggactcta

SEQ ID NO: 6530 - DNA, 407 bp, Glycine max
aacctaattgcaaagatgaataccaagcccgttttcttcttgtgcttcctctgtgcactgcttctcatctctgttgtggcaactgagccatccaaagatgagacacaagcagaagaaccaaagacacagccagatgcctggggaagaggtggaagtggggggcatgatggaagctggggacacggtggagactgggggcatggcggaggaggacacggtggaggacatggcggaggaggacacggtggaggacatggcggaggatgcagatgctgcggtcgaaagggctgcaaatgttgctgaagtaaaaatcacaaatatatgaactgaacacactcatatacttgagtgtactccatgtaataactagtatatatgtaagaaattagaaattaaagcatggactc

SEQ ID NO: 6531 - DNA, 432 bp, Glycine max
ctcatctttatataacctaattgcaaagatgaataccaagcccgttttcttgttgtgcttcctctgtgcactgcttctcatctctgttgtggcaactgagccatccaaagatgagacacaagcagaagaaccaaagacacagccagatgcctggggaagaggtggaagtggggggcatgatggaagctggggacacggtggagactgggggcatggcggaggaggacacggtggaggacatggcggaggaggacacggtggaggacatggcggaggatgcagatgctgcggtcgaaagggctgcaaatgttgctgaagtaaaaatcacaaatatatgaactgaacacactcatatacttgagtgtactccatgtaataactagtatatatgtaagaaataagaaataaaagcatggactctatccgtgcttg

SEQ ID NO: 6532 - DNA, 476 bp, Glycine max
taattgcaaagatgaataccaagcccgtgttcttcttgtgcttcctctgtgcactgcttctcatctctgttgtggcaactgagccatccaaagatgagacacaagaagaaccaaagacacagccagatgcctggggaagaggtggaagtggggggcatgatggaagctggggacacggtggagactgggggcatggcggaggaggacacggtggaggacatggcggaggaggacacggtggaggacatggcggaggatgcagatgctgcggtcgaaagggctgcaaatgttgctgaagtaaaaatcacaaatatatgaactgaacacactcatatacttgagtgtactccatgtaataactagtatatatgtaagaaataagaaataaaagcatggactctatccgtgcttgggctggcataggttgaatgttttccggcaaccatgcatgtagttgacacatctttttactatac

SEQ ID NO: 6533 - DNA, 410 bp, Glycine max
ctttatataacctaattgcaaagatgaataccaagcccgttttcttcttgtgcttcgtctgtgcactgcttctcatctctgttgtggcaactgagccatccaaagatgagacacaagaagaaccaaagacacagccagatgcctggggaagaggtggaagtggggggcatgatggaagctggggacacggtggagactgggggcatggcggaagaggacacggtggaggacatggcggaagaggacacggtggaggacatggcggaggatgcagatgctgcggtcgaaagggctgcaaatgttgctgaagtaaaaatcacaaatatatgaactgaacacactcatatacttgagtgtactccatgtaataactagtatatatgtaagaaataagaaattaaagcatggac

SEQ ID NO: 6534 - DNA, 474 bp, Glycine max
gcaaagatgaataccaagcccgttttcttcttgtgcttcctctgtgcactgcttctcatctcggttggggcaactgagccatccaaagatgagacacaagcagaagaaccaaagacacagccagatgcctggggaagaggtggaagtggggggcatgatggaagctggggacacggtggagactgggggcatggcggacgaggacacggtggaggacatggcggaggaggacacggtggaagacatggcggaggatgcagatgctgcggtcgaaagggctgcaaatgttgctgaagtaaaaatcacaaatatatgaactgaacacactcatatacttgagtgtactccatgtaataactagtatatatgtaagaaataagaaataaaagcatggactctatccgtgcttgggctggcataggttgaatggttttcgccaaccatgcatgtagttgacacatctttttactatac

SEQ ID NO: 6535 - DNA, 436 bp, Glycine max
ctttatataacctaattgcaaagatgaataccaagcccgttttcttcttgtgcttcctgtgtgcactgcttctcatctctgttgtggcaactgagccatccaaagatgagacacaagcagaagaaccaaagacacagccagatgcctggggaagaggtggaagtggggggcatgatggaagctggggacacggtggagactgggggcatggcggaggaggacacggtggaggacatggcggaggaggacacggtggaggacatggcggaggatgcagatgctgcggtcgaaagggctgcaaatgttgctgaagtaaaaatcacaaatatatgaactgaacacactcatatacttgagtgtactccatgtaataactagtatatatgtaagaaataagaaataaaagcatggactctatccgtgcttgggctggcat

SEQ ID NO: 6536 - DNA, 460 bp, Glycine max
ctaattgcaaagatgaataccaagccctttttctccttgtgcttactctgcgcactgcttctgatctgtgttgtggcaactgagccatccaaagatgcgacacaagcagaagaaccaaagacacggccagatgcctggagaagtggtggaagtggaggacatggtggaagtgggggacatggtggaagcgggggacacggtggaggctggggacatggtggaggctggggacatggcggtggacatggcggaggatgcaaatgctgcggtcgaaagggctgcaaatgttgctgaagtaaaaaaaacacaaacatgaactgaagacacacatacgtgtgtactccatgtaataagtatagtatgtagaattaagaaataaaagcatggaatctatatccgtgctagggctgtcataggttgaccggttttccatcaaccatgcatgtagtttgacacatca

SEQ ID NO: 6537 - DNA, 462 bp, Glycine max
atcttatataattaaactaattgcaaagatgaataccaagccctttttctccttgtgcttactgtgcgcactgcttctcatctgtgttgtggcaactgagccatccaaagatgcgacacaagcagaagaaccaaagacacggccagatgcctggagaagtggtggaagtggaggacatggtggaagtgggggacatggtggaagcgggggacacggtggaggctggggacatggtggaagctggggacatggcggtggacatggcggaagatgcaaatgctgcggtcgaaagggctgcaaatgttgctgaagtaaaaaaacacaaacatgaactgaagacacacatacgtgtgtactccatgtaataagtatagtatgtagaattaagaaataaaagcatggaatctatatccgtgctagggctgtcataggttgaccggttttccatcaaccatgcatgta

SEQ ID NO: 6538 - DNA, 444 bp, Glycine max
cccacgcgtccgctcatcttatataattaaactaattgcaaagatgaataccaagccctttttgtccttgtgcttactctgcgcactgcttctcatctgtgttgtggcaactgagccatccaaagatgcgacacaagcagaagaaccaaagacacggccagatgcctggagaagtggtggaagtggaggacatggtggaagtgggggacatggtggaagcgggggacacggtggaggctggggacatggtggaggctggggacatggcggtggacatggcggaggatgcaaatgctgcggtcgaaagggctgcaaatgttgctgaagtaaaaaaacacaaacatgaactgaagacacacatacgtgtgtactccatgtaataagtatagtatgtagaattaagaaataaaagcatggaatctatatccgtgctagggctgtcat

SEQ ID NO: 6539 - DNA, 427 bp, Glycine max
cccacgcgtccgcgaaagggctgcaaatgttgctgaagtaaaaatcacaaatagatgaactgaacacactcatatacttgagtgtactccatgtaataactagtatatatgtaagaaataagaaataaaagcatggactctatccgtgcttgggctggcataggttgaatgttttccgccaaccatgcatgtagttgacacatctttttactatacagcatatatatttctaaaaaaaaaaaaaaaaaaaaaaaaaaaaaaaaaaaaaaaaaaaaaaaaaaaaaaaaaaaaaaaaaaaaaaaaaaaaaaaaaaaaaaaaagggttaaaaaaaaaaaaaaaaaaaaaaaaaaaggggggcccgtttaaagggaccaaagttaactacccgtgcattgcaacttataacttttcatatggggcccccaa

SEQ ID NO: 6540 - DNA, 432 bp, Glycine max
ctttatataacctaattgcaaagatgaataccaagcccgttttcttcttgtgcttcctgtgtgcactgcttctcatctctgttgtggcaactgagccatccaaagatgagacacaagaagaaccaaagacacagccagatgcctggggaagaggtggaagtggggggcatgatggaagctggggacacggtggagactgggggcatggcggaggaggacacggtggaggacatggcggaggaggacacggtggaggacatggcggaggatgcagatgctgcggtcgaaagggctgcaaatgttgctgaagtaaaaatcacaaatatatgaactgaacacactcatatacttgagtgtactccatgtaataaaactagtatatatgtaagaaataagaaataaaagcatggactctatccgtgcttgggctgg

SEQ ID NO: 6541 - DNA, 389 bp, Glycine max
cccacgcgtccgtctttatataacctaattgcaaagatgaataccaagcccgtgttctggttgtgcttcctctgtgcactgcttctcatctctgttgtggcaactgagccatccaaagatgagacacaagcagaagaaccaaagacacagccagatgcctggggaagaggtggaagtggggggcatgatggaagctggggacacggtggagactgggggcatggctgaggaggacacggtggaagacatggcggaggaggacacggtggaagacatggcggaggatgcagatgctgcggtcgaaagggctgcaaatgttgctgaagtaaaaatcacaaatatatgaactgaacacactcatatacttgagtgtactccatgtaataact

SEQ ID NO: 6542 - DNA, 341 bp, Glycine max
aattaaactaattgcaaagatgaataccaagccctttttctccttgtgcttactctgcgcactgcttctcatctgtgttgtggcaactgagccatccaaagatgcgacacaagcagaagaaccaaagacacggccagatgcctggagaagtggtggaagtggaggacatggtggaagtgggggacatggtggaagcgggggacacggtggaagctggggacatggtggaagctggggacatggcggtggacatggcggaagatgcaaatgctgcggtcgaaagggctgcaaatgttgctgaaagtaaaaaacacaaacatgaactgaagacacacatacgt

SEQ ID NO: 6543 - DNA, 403 bp, Glycine max
cttatataattaaactaattgcaaagatgaataccaagccctttttctccttgtgcttactctgcgcactgcttctcatctgtgttgtggcaactgagccatccaaagatgcgacacaagcagaagaaccaaagacacggccagatgcctggagaagtggtggaagtggaggacatggtggaagtgggggacatggtggaagcggtggacacggtggaggctggggacatggtggaggctggggacatggcggtggacatggcggaggatgcaaatgctgcggtcgaaagggctgcaaatgttgctgaagtaaaaaaacacaaacatgaactgaagacacacatacgtgtgtactccatgtaataagtatagtatgtagaattaagaaataaagcatggaatc

SEQ ID NO: 6544 - DNA, 420 bp, Glycine max
  modified_base (403)..(403): a, c, g, t, unknown, or other
aattaaactaattgcaaagatgaataccaagccctttttctccttgtgcttactctgcgcactgcttctcatctgtgttgtggcaactgagccatccaaagatgcgacacaagcagaagaaccaaagacacggccagatgcctggagaagtggtggaagtggaggacatggtggaagtgggggacatggtggaagcgggggacacggtggaggctggggacatggtggaggctggggacatggcggtggacatggcggaggatgcaaatgctgcggtcgaaagggctgcaaatgttgctgaagtaaaaaaacacaaacatgaactgaagacacacatacgtgtgtactccatgtaataagtatagtatgtagaattaagaaataaaagcatggaatctatatncgtgctagggctgtcat

SEQ ID NO: 6545 - DNA, 446 bp, Glycine max
agcagctatcagaaatatccacaacacagctgagaagttcattttcaaaatggccggtggggtggttcctgtggatgcatcaccgattggaaatggcttcgttggcaagataacgctctcagttatcatcacttgcatcgttgctgcatccagtggactccttttcggatatgacctcggaatttcaggaggtgtcacaacaatggtaccatttctggaaaaattcttcccagatatattgagaaaagttgctggtactgaagtgaacatgtactgtgtgtatgatagtcaagtgttgacattgttcacatcttctctataccttgctgggttagtgtcatctctcgcagctagtcgagtcacagcagcatggggtcggcgaaacaccatcttaattggtggcgttacatttcttattggtggtgcccttaatggaagtgctgaaa

SEQ ID NO: 6546 - DNA, 436 bp, Glycine max
ctccgattctccttgtaaacagcggtgccaggttcgatctttgcgttcttcatgtttttttttgcacgttttatcgatctgctaacttgacatttgatccaacgcaagttcgttgcttttttgattgaaaatcagattttgagataccctttgtgttcccaattaatgggttttttctggtgattgtatgggtgttaatttagaagttgatataggatgggggcaatgatgtcgagattctggttcatgttattccctgcaaaagagtataagattgttgttgttggattggataacgctggaaaaaccactaccctttataaattgcatctgggtgaggttgtaactaccaaccctactgttggtagcaacgtcgaagagctcgtctacaagaatatacgatttgaggtctgggatcttggtggacaagaaagat

SEQ ID NO: 6547 - DNA, 341 bp, Glycine max
acccacgcgtccggtgccatctatcttacttccttttcacatttcttagctgaagaaattgacaatcctgagtaccaaatgttgaggtgtagagtcaactatcatgctttaagatttaagccacatatcgtgaagttaagtcaatcaatagttgaaaagctacgcgaacaaggtcccttcatgtccatacatcttcggtttgagatggacatgttgtcatttgctggatgcttcgatatatttacacctgaggagcaaaagattttgaagaagtaccgaaaagaaaattttgcacctaaaaagacttgtctattatgaaagaaaggcttttgggaaaatgc

SEQ ID NO: 6548 - DNA, 329 bp, Glycine max
attgtaccaggcaccaccttgcaaggagagtaccaacttactaatggttatggtgctaagagagctcctcaaatcatgagggatcactggagtacatacataactgaagatgatttcagattcatgtcagaaaatggcttaaatgcagtgagaatacctgtgggatgggggatagctaaaggtccaaacccttctaaagctttagttggacggacatttgcagcattggacaatgctttcatttgggcacaaaaccatgggatgaaagtgatcatagacttgcatgcagctgaaggttcacaaaatggcaatgaccacaatggcacaag

SEQ ID NO: 6549 - DNA, 428 bp, Glycine max
cccacgcgtccgtactgatcctttgttgcttgaaaggactctatatccatgcatcggatggcaacttcatcccatccagaacagaacagaacagaactggtggttgcattgaatcggaggggtaagtgggaagacgtgtcttgttttgtagctttcccttccctctctcttttccccgccgcatgtgccggattagacgcgaactgcttccataattcacctactgcaatcaaccatcacaagatttcccactgattggatggaagaagcatgtgaatttcgaagttgggctgaattgattcctgatgccctgggggtaatcttcaccaatctttctcttcaggagagggtaacagtgatccccagggtgtgcaaatcatgggctaatgcagtaactggaccttactgctggcaagagatagacatca

SEQ ID NO: 6550 - DNA, 412 bp, Glycine max
  modified_base (396)..(396): a, c, g, t, unknown, or other
  modified_base (399)..(399): a, c, g, t, unknown, or other
gaaagttgccctacttgtatggcaccccaagaggaacacggggttatctcctcatgcctgaactgcttcctagctggtggggtcctgtatcggttcgagtatgccgttacccctgccctcttccttgcaaaagcccgcggtggaacatgtactcttgcagtctctgatagtgatgatatcgtcatccatcgagcaaaatacctgctcgaaaatggctttgggtgctataatgttttcaagaaaaactgtgaagactttgctatctattgcaaaaccgggctcctagaaatcggacaaagtggccaagcagtttccatcatagggggacctcttgctgctgctctatcctcgcccctccgtatggttactactaacgtttatggaatggcaacgacngcnggtggagtctact

SEQ ID NO: 6551 - DNA, 342 bp, Glycine max
gacagagcagcactcacattcacaacgaaggtttcctattcatcagacatggtgaaggcggtcagagttcacgaactcggtggccctcaagttctgaagtgggaggatgtggaaattggagatccaaaagaaggcgaggtccgtgtgaggaacaaagccattggggttaatttcattgatgtctactttcgcaaaggagtttacaaagccccttcttttcccttcactccaggtatggaagctgttggggttgtgacagctgtgggtgctggactcactggtaagcaagttggagatcttgtagcttatgcaggtcaaccaatggggtcatatgctgaagag

SEQ ID NO: 6552 - DNA, 402 bp, Glycine max
agatacctactttcagctcctaagagcacgcatcactgttgcacttcttactcgttctccctcttttttttcttcttcttcttcttcgctaaaccccccctttatttttcctatctcactaacatcgatgggagacgagaataagaccaagtcccctgcttccggcgtgtggtccaccatcaagcctttcgtcaatggcggagcctccggcatgctcgccacctgcgtcattcaacccatcgatatgatcaaggtgaggattcaacttgggcaaggatcagctgcgcaggtcacttccaccatgcttaagaatgagggtgttgctgccttctataagggtctatctgctggattactcaggcaggctacatacaccactgcccgtcttggatcatttaaaat

SEQ ID NO: 6553 - DNA, 439 bp, Glycine max
  modified_base (421)..(421): a, c, g, t, unknown, or other
aacacaacaatgggagacgagaagaagggcaagccttgctgcttccggcgtgtggtccaccagcaagcctttcgtcaatggtggagcctccggcatgctcgccacctgcgtcattcaacccatcgatatgatcaaggtgaggattcaacttgggcaaggatcagctgcgcaagtcacttccaccatgcttaagaatgaaggttttgctgccttctataagggtctatctgctggattactcaggcaggctacatacaccactgcccgtcttgggtcatttaaaatcttgacggccaaagctattgaggctaatgatgggaagcccctgccactgtatcagaaagctctatgtgggctgactgctggtgctatcggagcaactgttggtagtccagcagatttggcactcattcggatgcangctgatgcaacattacct

SEQ ID NO: 6554 - DNA, 484 bp, Glycine max
atactataggtctcgcccaatacctactctccgctcccaagagcacgcaccaccactattgcgcttcttcgtcgttctccctctttttcttcttcttcgctaaacccttttttctatctcactaacacaacaatgggagacgagaagaagggcaagcctgctgcttccggcgtgtggtccaccatcaagcctttcgtcaatggtggagcctccggcatgctcgccacctgcgtcattcaacccatcgatatgatcaaggtgaggattcaacttgggcaaggatcagctgcgcaggtcacttccaccatgcttaagaatgagggttttgctgccttctataaaggtctatctgctggattactcaggcaggctacatacaccaactgccgtcttgggtcatttaaaatcttgacggcccaagctattgaagctaatgatgggaagcccctgccactgtatcagaaaagctctatgtgggctgact

SEQ ID NO: 6555 - DNA, 431 bp, Glycine max
ttcagctcctaagagcacgcatcactgttgcacttcttactcgttctccctctgtttgttcttcttcttcttcttcgctaaaccccccctttatttttcctatctcactaacatcgatgggagacgagaataagaccaagtcccctgcttccggcgtgtggtccaccatcaagcctttcgtcaatggcggagcctccggcatgctcgccacctgcgtcattcaacccatcgatatgatcaaggtgaggattcaacttgggcaaggatcagctgcgcaggtcacttccaccatgcttaagaatgagggtgttgctgccttctataagggtctatctgctggattactcaggcaggctacatacaccactgcccgtcttggatcatttaaaatcttgacggccaaagctattgaggctaatgatgggaagccc

SEQ ID NO: 6556 - DNA, 418 bp, Glycine max
tgagaggtcaacacaaggcctattgaacaatttcacatacacagctgcatagaagctgcatcgaacactttcatcagtggattcaattgtatcagtctcatctccattgcacattaatgctactattcaatcctctggtcatgttatcagccacaccgaggtctatgaaagtgagttcttaaacaacttcaggtaagctgcggtggttcacattctaggaaacacaattgtcagggcaaggagggattcaagattccacaagaaaatagctgatgattatatatatgcatttcttatgaagatatgcatggaaaatagtgtgatcttcaatgttcctcatgagagtctattaaatgttggtcatgttttctatgtatagcctctactcctcttctcttggtaatacttgcgtgaacat

SEQ ID NO: 6557 - DNA, 436 bp, Glycine max
tggaggtggtgcacatgttggtgttcttcttcaggggaaaaaagttagagatgacaatagaacacttgtgcagactggtatatcttgcaatgaaaatttggataccctgagtttcatgttggagcccacttcactacaagcttctccaactgtttgtgttggtgatccttcttctcaatgtgaaacatcccagcctaccaggtccacagaaattcctgtcttagattcaggaattactgataccttgcacgactcacccttgctgacatatccgggcaacctaattgaaagtaaccatgagtctacttcttcacttgcggacactacacttgacaaactaacacctgattccagagcgatagttgttgttccagctaccacagaaacattagctgtggttcctgtgagtcagaaaaccaagcgctctgagtttgta

SEQ ID NO: 6558 - DNA, 447 bp, Glycine max
aagaaatctccatttcataggaaatcttttcccagtgcttccttttccaggagtggggatggtattaagggaggttttagagatgatgacgaaaactttttaaggtgcaaaaagttttgcacgaagccaaaggcttttaggtctccacgacgcattgcacaccgaagaatcaggaatttgatgtcttccaaatactggaagacagctccaaagttgaaggactctgaactttctagatctgatctaggagtacctcgttatcataagaggaagacttgttacggttttgaaagatctcagcacaatgccattgttaaaaagaggaaattcgttgaccgggtttcaggagtaacttctgatggaggattcagtagtgagagtgtgtccaattcaccacagaaagggatggatggagacaagcctagctcatctgcaaaattgcatgta

SEQ ID NO: 6559 - DNA, 340 bp, Glycine max
tgcagatgttgctactgtcaattccactgatggaaacaatcctactaaggtggtttctgtgcctaaattcctcttcatatgtggatcaaatgttgtccaaaaaggccttgctagtggtgtcacaggtatggctggtcttggcagaactaaagtttctcttgcttctcaatttgcctcagctttcagctttcatagaaaatttgccatttgcttgagttcttctactatgacaaatggtgtaatgttctttggtgatggcccttacaattttggttatttgaactcggatctctccaaggttctaactttcacccctctcatttcaaaccctgttagcact

SEQ ID NO: 6560 - DNA, 434 bp, Glycine max
cccacgcgtccgaaataaaaataccacttatggaatacataatactaaagtggattatgtgcctagatacctcttcatatgtggatcaaatgttgtccaatcacggccttggttctggtgtcacctgtatggctggtcttcgcagaactaaactctgtcctgcttctcaatctgcctcagctttgagctttcatagaaaatccgccatttgctcgagttcttctactatgacaaatggcgtaatgttctttgctgatggcccttacaattttggtcatttgaactctgatctctccaaggttctaactgtcacccctctcattatccaccctgttagcactgcttcaagttatttgcaaggggagccctcagtggaatactctattgctgtgaaatctattaaagtctcagactacaatgtaacattgaacaca

SEQ ID NO: 6561 - DNA, 400 bp, Glycine max
cttggagaccacaatttacaaagctgtgtctgaggcctttgtaaaagcagtaggagcgcctacagttgcacctgtggctccatttgggacttgctttgcaaccaaagacattcagtctacaagaatgggccctgctgtgcctgacataaatctagtgctgcagaatgaagtggtgtggagcatcattggtgcgaattcaatggtgtatactaatgatgtaatttgcttgggttttgtggatgctggatcagacccaagtacggcccaagttggatttgtggtgggttattctcaaccaattacttcaatcacaattggagcacatcagttggagaacaacatgctacaatttgacttggctacctcaaggcttggcttccgctccctcttcttggagcac

SEQ ID NO: 6562 - DNA, 369 bp, Glycine max
cggccttgctagtggtgtcacaggtattgctgttcttggcagaactaaagtttccctggcttcgcgatcactctcaacttgcaactgtcttagaaaattccccatttgcttgagttctttcactatgacaaatggtgtcatgttctttcgtgatgggccttataaatctggttatttggactctgatctcttcaaagttgtcactttcacgcctctcattacaaatactgttaacactgctccaagttattttcaaggggaaccctcagtagaatacttcattggggtgaaatccattagagtctctgaccaaaatgtaccattgaacacaacccttttggctataaatagcaatggcattggtgggac

SEQ ID NO: 6563 - DNA, 429 bp, Glycine max
  modified_base (365)..(365): a, c, g, t, unknown, or other
cttctcaattttcctcagctttcagctttcttagaaaattcgccatttgcttgagttcttgcactatgacaaatggtgtcatgttctttggtgatggcccttataattttggttatttgaactctgatctctccaaggttctcactttcacgcctctcattacaaatcctgttagcactgctccaagttatttccaaggggaaccctcagtagaatacttcattggggtgaaatccattagagtctctgacaaaaatgtaccattgaacacaacccttttgtctatagatagaaatggcattggtgggactaagattagtactgttaatccatacactgtcttggagaccacaatttacaaagcnttgttgtctgaggcctttgtaaaagcagtaggagcccctacagttgcacctgtggctccatttg

SEQ ID NO: 6564 - DNA, 425 bp, Glycine max
tcgctaagtctcctcttcatatgcggtagcaaatgttgtacaaaacggcccttgctaggggtggcacaggtatggctggtcttggcagaactaaagtttcccttccttctcaattttcctcagctttcagctttcttagaaaattcgccatttgcttgagttcttccactatgacaaatggtgtcatgttctttggtgatggcccttataattttggttatttgaactctgatctctccaaggttctcactttcacgcctctcattacaaatcctgttagcactgctccaagttatttccaaggggaaccctcagtagaatacttcattggggtgaaatccattagagtctctgacaaaaatgtaccattgaacacaacccttttgtctatagatagaaatggcattggtgggactaagattagt

SEQ ID NO: 6565 - DNA, 439 bp, Glycine max
ctttcacgcctctattacaaatcctgttagcactgctccaagttatttccaaggggaacggtcagtagaatacttcattggggtgaaatccattagagtctctgacaaaaatgtaccattgaacacaacccttttgtctatagatagaaatggcattggtgggactaagattagtactgttaatccatacactgtcttggagaccacaatttacaaagctgtgtctgaggcctttgtaaaagcagtaggagcccctacagttgcacctgtggctccatttgggacttgctttgcaaccaaagacattcagtctacaagaatgggccctgctgtgcctgacataaatctagtgctgcagaatgaagtggtgtggagcatcattggtgcgaattcaatggtgtatactaatgatgtaatttgcttgggttttgtggatgct

SEQ ID NO: 6566 - DNA, 381 bp, Glycine max
cgctgctgtgcctgacataaatctagttctgcataatgaagtggtgtggagcatcatgggtgcgagattcaatggtgtatactaatgatgtaatttgcttgggttttgtggatgctggatcagacccaagtacggcccaagttggatttgtggtgggttattctcaaccaattacttcaatcacaattggagcacatcagttggagaacaacatgctacaatttgacttggctacctcaaggcttggcttccgctccctcttcttggagcacgccaactgtgccaactttaactttacctcttctgcttagaatttgattattctactataatcaaaatttgcattgtaattaagatccatgtgtgtagacaaagttatta

SEQ ID NO: 6567 - DNA, 439 bp, Glycine max
cccaacgcgtccggcacccatcaatggcaggcgtttctctcaagtgcggtgactgcggtgctcggctgagaaccgtagaagaagcgcaagagcacgctgaactcacctcccactccaacttctccgaatccaccgaaccggttctcaacctcatctgcaccgcttgctccaaaccctgccgatccaaaaccgagagtgatttgcacacgaaaagaaccggccataccgagttcgttgacaagacttccgaggccgttaaaccgattagtttggaggctccgaaggtggatgcaactgcttcatcggaaaacccttccgctgctgcatccactgaccaaaatgaagaaatggttgctcctgaagtggacaaaaagctgcttgaggaacttgaatccatggggttttcaacggcacgggcaacgcgggcgcttcattactc

SEQ ID NO: 6568 - DNA, 469 bp, Glycine max
accacgcgttcggccgtattttctgctggtatatgaaggtggagaagagagcaggggaaggataatggtgacggaccaggatatatctaaaggggtggcgtctctactgcgtcactctggcccatactccataactacggttaacagtgtcgatcatcatcttgaggcctaactatggttagacctctatcacatggccatgttcatcagagaccagatcgaccatcttctacggactctatcacaagcattagatcctaactcttctacacttcacaaagactattttgcccctcacccccaaccgcactttccgaccacccactttccttcccattttgccctccatgacgagatcaactttcagcagcacccccgcgctcctacaccgtgcaaagttgagacctttcctcctcaaaatgctcacactgttgccccttctcaagtgcccaaagaaagtgttcaaact

SEQ ID NO: 6569 - DNA, 463 bp, Glycine max
cccacgcgttcggccgtattttctgttggtatatgaaggtggtgaagagagaagaggaaggagaatggtgacggaccaggatatagcgaaaggggtggcgtctctactgcgtcactctgacccaaactccataactacggttaacggtgtcgatcagcatctggaggccaaactagggttagacctctctcacaaggccagtttcatcagataccagatcgaccatcttataccgtcaaaagcccaagcctttggtcctcaaccttcttcaattcacaaagactattttgccccttaaccccaaccggaatttccgaccacccactttacttaccattttgccctacatgacgagatcaacttacagcaacacccccgagcttctccaccgtgcaaagttgaaacctttccttctcaaaatgctcacacttgtgcccctactaagtgcccaaagaaagtgttc

SEQ ID NO: 6570 - DNA, 347 bp, Glycine max
aagcaaccacttgatcggtctcttaaacttcctaacattcctgctgtcgattccgatcctacgaggcggaatatggctgaccagcagggcgaacaacaccgactgcctcaagttcctgcaatggccgctcatcatcatcggcgtcagcatcatggtcgcgtccctggcgggattcgacggcgcgtgttaccgcaacaccttactcatgcggctctacctcgtcgtcatgttcctggtcattgccgttctgatcgggttcatcatattcgcctacgttgtcaccgacaaggagtacggtcggagggtgatgaaccgtgcttacttggagtattatctcgaagactatt

SEQ ID NO: 6571 - DNA, 424 bp, Glycine max
agagcagattgaaaagatgcgagaagttgttgaacttcccatgcttcatccagagaaatttgtcaagcttgggattgatcctccaaagggtgttctttgttatggccccccaggaactgggaaaacacttttagccagggctgtggctaataggactgatgcttgttttataagggttattggaagtgagctagttcagaaatatgttggtgagggggctaggatggttcgtgaactatttcagatggctcgttcaaagaaggcatgcattgtgttttttgatgaagttgatgcaattggaggtgcacgatttgatgatggcgttggtggtgacaatgaggttcagcgcaccatgcttgaaattgtgaatcagcttgatgggtttgatgctcggggaaacatcaaagttttgatggcaactaat

SEQ ID NO: 6572 - DNA, 406 bp, Glycine max
gaactttgcaactttgagcagaaaatctcacagtcgaaggaagaaataatcaccaatggcaattgaacacgaagacgatctcaaagacgagaagaaccctcgacccctcgacgaggatgacatcgccctcctcaaaacctacggtttgggaccttattccacaagcataaaaaaggcggagaaggaaatcaaagatatggccaagaaagtgaatgacttatgtggtatcaaggagtctgatactggattagcagcaccaagccagtgggatcttgtttctgataagcaaatgatgcaggaagagcagcctcttcaggtggcacgatgcacaaagatcataaatccaaactctgaagatgccaaatatgttatcaatgtgaagcagatagcaaaagttgtgttgggc

SEQ ID NO: 6573 - DNA, 419 bp, Glycine max
atggggtctgcgtccatttgtactactcaggaggttcgtgctgtggggcgtggtcaggcgagctgctgtttacaaggtctcgtccattgcttataaaagtggtgttcctgtgattgctgatggtggcatctcaaactctggtcatattgttaaggctttgtcattgggagcgtcaactgatatgatgggaagcttcttagctggtagtcttgaggctactggggcttatgtgtatcacaatggtcaacgtgtgaaaaagtacacatgaatgggttccctagaagccatgactaatgggagcgatgcaaggcacttgggtgatacagcagagctaaaaattgctcatggagttgtaggagctgctaaagataagggctctgtctagaatttcataccatacaccttgcaagcagacacgc

SEQ ID NO: 6574 - DNA, 448 bp, Glycine max
aaaagccatccgaatttcccaattgtggcataggaatgccctcttgttctctatttcaccacacaaattcccaattctaacttggtttttttttgtctctcacacactcctttcaatctccaattaattacttttcttcaatttgaagcgtgtctgaagttggttgaagcattgtgttattgttctggttttggtctccgaggtttgtgtcggattccgatgtattatgtaaaagaagctgcgcatgtcgaccccatgttcgtagctgataacaccaaccccaaggattattacaaagtgctggaggttgaatatgatgcaaccgatgaaaatatcaaattaaattaccgaagactcgcgctgaaatggcatcctgacaagcacggaagagatagtgctgttactgcaaaatttcaagagataaatgaagcttacaatgtattaagtg

SEQ ID NO: 6575 - DNA, 404 bp, Glycine max
agcttgcttcttgcttctattacttgcttctttcttcaccatgtcacttgctgggaaaatcaccactgaaattggggttcatgcaaccgctgcaaagtggttcaacctctttgcaacacaacttcatcatgttcaaaaccttactgatagagtacatggaaccaagctgcatcaaggtgaagactggcatcacaacgagacagtcaaacactggacttataccatagatggtaaggctacaacatgtctggagagtattgaatccattgatgaacagaacaaaacaatcacctacaagctcttcagtggagacattgatcataagtataagaaatttaagttcacctttcaagccattgataaggatcaaggcggtgcttttattaaatggacggttgaatatg

SEQ ID NO: 6576 - DNA, 369 bp, Glycine max
cttcgggtggccggagcattctcgtccgcgattaaaggggctgcactttcccgatctttagggaaaagctcttacaacagagccctcattcgttctgctattgagctaaaccaaggtagagttgaaggccttcaaatcgagtaccttgatatttcgcctttgccccttctcaacaccgatcttgaggtgaatgggacctaccccccacaagttgaagactttctccagaagattctcgcagctgatagtatcctctttgcttcccctgagtacaattactctgtcgcaagtgctttaaagaatgcacttgactgggcatcaagggcaccaaatgtttgggctggtaaacctgctgccatagtgagtgct

SEQ ID NO: 6577 - DNA, 446 bp, Glycine max
cccacgcgtccgcataactagaaggtaggaaatcatggcaccggtgcccgaagcatcctcgtgcgtgattaaggtggctgcactttccggatctttaaggaaaggctcttacaacagagccctcattcgttctgctattgagctaagccaaggtagagttgaaggccttcaaatcgagtacgttgatatttcgcctttgccccttctcaacaccgatcttgaggtgaatgggacctaccccccacaagttgaagcctttcgccagaagattctcgcagctgatagtatcctctttgcttcccctgagtacaattactctgtcgcaagtcctttaaagaatgcacttgactgggcatcaagggcaccaaatgtttgggctggtaaacctgctgccatagtgagtgctggaagaggctttggtggtggaagatcacaatatcatctac

SEQ ID NO: 6578 - DNA, 429 bp, Glycine max
gttttacttctccatgctgcccaggctgctgcccttgaccttggacttgttccacaatctgagaaaagccttgagtctgcaaaatttgtatatttgatgggtgctgatgatgtaaacttagacaagatcccagatgatgcttttgttgtttatcaaggtcaccatggtgacaagagtgtttatcgagcaaattttattttgccagcagcagcattcagtgagaaggaaggaacctatgaaaataccgacggatgcacgcaacaaacattgcctgcagttccaacagttggtgactccagagatgattggaagataattcgagctctatctgaggtggcaggagtgcctttgccctatgatacaattggggccgttcgtgcccgaatcagtactgtagccccaaaccttgtgaacatggatgagagagaa

SEQ ID NO: 6579 - DNA, 363 bp, Glycine max
  modified_base (10)..(10): a, c, g, t, unknown, or other
  modified_base (22)..(22): a, c, g, t, unknown, or other
  modified_base (88)..(88): a, c, g, t, unknown, or other
cccacgcgtntcgccacgcgtncggttcttcacatgatcttcataactcttaatgtgtgtatgatttgcatccggggcgatcacatanagattcagtggagaagaaacaaagaatttccttatggttggtggtatggtgttgtaggccacttggagttatgcgatgggaatgaaaattactgccgttgtcatagtagtgacacagtggtgctagagttcaatcagtacactcctgactcgcgttggaggaagacaactattagtagaaaagatcatagagaggaaggaaatgaagcagatggtttttatggaggaatcagaaagattaagagtgagactgagatttccattttgaaaagcatt

SEQ ID NO: 6580 - DNA, 381 bp, Glycine max
tgttctttttttttgccctatctaattagggttcccgcgatttcaaaccttaatttcttggattactctctctttccatctcatgcgttcttgctctcaacaacaatcacccaccgccatcgaagtcttcgttcttttcttcttcttcactctccttttttctctcgttcgagggttctttcgtggggaaccctgcagatttcaccactcgtgcacatgtccaaagttctcggcttttccggagttgacgatttttgcccgatgggatcaatatatgccaaccccaaggaagcaagtttcttcttgcctcttggccctcaagttgatgtatactttccttctcggaagagatcgcgtgtcaacactccattcgttttcgat

SEQ ID NO: 6581 - DNA, 368 bp, Glycine max
ctcaaggagcccatcggagttgttgcattaattactccatggaactatcctctattgatggctacatggaaagttgctcctgctctagctgctggttgtacagcaatattgaagccatctgaattggcatctgtgacctgtttggagctggctgaaatatgcagagaagttggccttcctccaggggtattaaacattgttactggattaggcaatgaagctggtgctcctttgtcatctcatcctgacgtagacaagatttcctttactggaagctctgcaactggaagcaagattatgacagctgcaacacaacttaccaaacccggttcttttaaacctggtggaaaaaggccaatcattggttt

SEQ ID NO: 6582 - DNA, 440 bp, Glycine max
caataacatagcatagagtgagaagtgagaagagaaaaatggcaatctccatacccagtagacaacttttcatagatggagagtggaaagtccctcttctcaacaatcggtttccgatcatcaaccccgctactgaagacatcatagggcatattccagccgctactaaggaagatgttgaccttgcggtggatgctgctaaaagagccttttcccataacaaaggcaaagattggtcttcagctcctggctctgttcgtgctcgctatcttcgagccatcgcttcaaagataacagagaaaaaggatgaactaggaaagcttgaagcaattgattgtggaaaaccactagatgaagcactggcagacctggatgatgttattggttgttttaactactatgccgagcttgcagaaggattggacgcaaagcaaaatgct

SEQ ID NO: 6583 - DNA, 401 bp, Glycine max
tccacgcgtccgcaaaatttcagatccctttgaagaaggttgtaggctagggcctatggttagtgaaggacagtataaaaaagtgttgaattgtatctcaactgctaagagtgagggtgcaacaattctgattggagggtctcgcccagagcatttgaaaaaggggtactttgttgaaccaaccatcataactgatgtgactacctcgatgcaaatttggacagaagaagtttttggacctgtgctatgtgtgaaaacattcagtaccgaagaagaagctattgaactagcaaatgacacacactacggcttaaggtctgctgtaatgtcaaaagatctagaaagatgcgagcgcatatcaaaggctattcaagctggaattggatggataaattgtgctc

SEQ ID NO: 6584 - DNA, 408 bp, Glycine max
atcttgggttgcttctttacaaagggtcagatatgcagggcaccatctggcttaatggtgcttgaaaggttagcaccagaatttgtgaatagacttgtgcaatgggccaaaaacatcaaaatttcatatccctttgaagaaggttgtaggctaggtcctattgttagtgaaggacagtataaaaaagtgttgaattgtatctcaactgctaagagtgagggtgcaacaattttgattggagggtctcgcccagagcatttgaaaaaggggtactttgttgaaccaaccatcataactgatgtgactacctcgatgcaaatttggagagaagaaagttttggacctgtgctatgtgtgaaaacattcagtaccgaagaaaaagctttttgactagcaaatgacacacac

SEQ ID NO: 6585 - DNA, 445 bp, Glycine max
gaaatatgcagagaagttggccttcctccaggggtattaaacattgttactggattagggaatgaagctggtgctcctttgtcatctcatcctgacgtagacaagatttcctttactggaagctctgcaactggaagcaggattatgacagctgcagcacagctaacgaagcctgtttctctagagcttggtggaaaaagcccaatcattgtttttgaggatgttgaccttgataagactgctgaatggaccatctttggctgcttctttacaaatggtcagatatgcattgcatcatctcgccttattgtgcatgaaagtatatcaacagaatttgtgaatagacttgtgcaatgggccaaaaacatcagaatttcagatccctttgaagaaggttgtatgctaggtcctattgttagtgaaggacagtataaaaaagtgttga

SEQ ID NO: 6586 - DNA, 442 bp, Glycine max
ctcacgctttctactattcttgcaatttccataaacatttacataaaagtatggagcactggatctatggccataggagaacctacaccgtctacgacgccgacaacggacttcaatcaatacggaaatgtttcaacggaaaaccatcgccaagcactcgtcgaaacctactactcggcaagtgtacctctgctacaagagtcacctgtcctgtccccctcgcatctaggcctccgactcctatcccttccccaagcgcgtcgccgacaccttcaaagcccgcaagaacgacttgcccctcaagacgaaaatcaccgtgtgcgaggtgcgtgaggaggctggcttcctcgacggtgacgtgttgattttccccgacatgatcaaatacaggggtttggaggaatcaaatgttgatagctttttcgaagatgttttggtgaat

SEQ ID NO: 6587 - DNA, 400 bp, Glycine max
tgaagctagcttgaagcgtcttgatgttgaatacattgatctctattatcagcacagagtggacacatctgtacctatagaggaaacagtgggtgaacttaagaaattggtcgaagagggtaaagtcaaatatattggattatctgaagccagcccagatacaataaggagagcacacgcaattcatcccatcacagctgtgcaaatagagtggtctttgtggactcgtgacattgaagaagagatagtccctctctgcagggaacttggtattggaattgtaccatatagtcctcttggtcgtggcttttttggcggcaaaggagttgtggaaaatgtgccgacaaatagctccctgaaagcacatccacgctttcagcgccagaacttagacaagaac

SEQ ID NO: 6588 - DNA, 429 bp, Glycine max
accacgcgtccgcccacgcgtccagcccagattcaaccagttaaacttggaacccaaggctttgaggtttcaaaattgggattcggatgtatgggccttactggagcgtacaatgaccctctccaagaacaggatggcatatctgttatcaagtatgcgttcagtaagggaatcacattttttgatactgcggatgtttatggagccaatgctaatgaacttttggttggaaaggctttgaagcagctgcccagagaaaagattcagatagccacaaaatttggtattgcttcacgaggttttcctgatatgaagattaagggttcgcctgaatatgtgcgatcatgctgtgaagctagcttgaagcgtcttgatgttgaatacattgatctctattatcagcacagagtggacacatctgtacctata

SEQ ID NO: 6589 - DNA, 436 bp, Glycine max
aacatctgcaagcatttcagcttgataaccatcggtttgaggtactattaaatacataacgtgcgcttattttgataattgatacaattaatctcattctaggtttcaaaattgggattcggatgtatgggccttactggagcgtacaatgaccctctccaagaacaggatggcatatctgttatcaagtatgcgttcagtaagggaatcacattttttgatactgcggatgtttatggagccaatgctaatgaacttttggttggaaaggctttgaagcagctgcccagagaaaagattcagatagccacaaaatttggtattgcttcacgaggttttcctgatatgaagatcaagggttcgcctgaatatgtgcgatcatgctgtgaagctagcttgaagcgtcttgatgttgaatacattgatctctattatc

SEQ ID NO: 6590 - DNA, 336 bp, Glycine max
tcgacgcacgcgtccggtcatcatgaattgagggtaacaaggctggcaaaggctaatatcaggatgctatttagatatcaataatgtagcccttcttgatgttggacttcctagatatttggttggttaaaatttttaatttagactgtaatactattttatatgcaacagataattatgagcagtttcgaaggcaaaaaaaaaaaaaaaaaaaaaaaaaaaaaaaaaaaaaaaaaaaaaaaaaaaaaaaaagaaggaagaattaaaggataaaaaaattaataactctattaagggacgtaatatttttggtatagagttatggatattcattca

SEQ ID NO: 6591 - DNA, 384 bp, Glycine max
aaatgactcaagcccagattcaaccagttaaacttggaacccaaggctttgaggtttgaaaattgggattcggatgtatgggccttactggagcgtacaatgaccctctccaagaacaggatggcatatctgttatcaagtatgcgttcagtaagggaatcacattttttgatactgcggatgtttatggagccaatgctaatgaacttttggttggaaaggctttgaagcagctgcccagagaaaagattcagatagccacaaaatttggtattgcttcacgaggttttcctgatatgaaaatcaagggttcgcctgaatatgtgcgatcatgctgtgaagctagcttgaagcgtcttgatgttgaatacattgatctctatt

SEQ ID NO: 6592 - DNA, 415 bp, Glycine max
ctcaagcccagattcaaccagtttcaaaattgggattcggatgtatgggccttactggagcgtacaatgaccctctccaagaacaggatggcatatctgttatcaagtatgcgttcagtaagggaatcacattttttgatactgcggatgtttatggagccaatgctaatgaacttttggttggaaaggctttgaagcagctgcccagagaaaagattcagatagccacaaaatttggtattgcttcacgaggttttcctgatatgaagatcaagggttcgcctgaatatgtgcgatcatgctgtgaagctagcttgaagcgtcttgatgttgaatacatcgatctctattatcagcacagagtggacacatctgtacctatagaggaaacagtgggtgaacttaagaaattggt

SEQ ID NO: 6593 - DNA, 418 bp, Glycine max
ccagattcaaccagttaaacttggaacccaaggctttgaggtttcaaaattgggattcggatggatgggccttactggagcgtacaatgaccctctccaagaacaggatggcatatctgttatcaagtatgcgttcagtaagggaatcacattttttgatactgcggatgtttatggagccaatgctaatgaacttttggttggaaaggctttgaagcagctgcccagagaaaagattcagatagccacaaaatttggtattgcttcacgaggttttcctgatatgaagatcaagggttcgcctgaatatgtgcgatcatgctgtgaagctagcttgaagcgtcttgatgttgaatacattgatctctattatcagcacagagtggacacatctgtacctatagaggagacagtgggt

SEQ ID NO: 6594 - DNA, 285 bp, Glycine max
cccagattcaaccagttaaacttggaacccaaggctttgaggtttcaaaattgggattcggatgtatgggccttactggagcgtacaatgaccctctccaagaacaggatggcatatctgttatcaagtatgcgttcagtaagggaatcacattttttgatactgcggatgtttatggagccaatgctaatgaacttttggttggaaaggctttgaagcagcttgccagagaaaagattcagatagccacaaaatttggtattgcttcacgaggttttcctgata

SEQ ID NO: 6595 - DNA, 436 bp, Glycine max
gtcttgatgttgaatacattgatctctattatcagcacagagtggacacatctgtgcctgtagaggaaacagtgggtgaacttaagaaattggtcgaagagggtaaagtcaaatatattggattatctgaagccagcccagatacaataaggagagcacacgcaattcatcccatcacagctgtgcaaatagagtggtctttgtggactcgtgacattgaagaagagatagtccctctctgcagggaacttggtattggaattgtaccatatagtcctcttggtcgtggcttttttggcggcaaaggagttgtggaaaatgtgcctacaaatagctccctgaaagcacatccacgctttcaagccgagaacttagacaagaacaagaatatatatgaacgaattgaaggccttgctaagaagcatcaggccactcc

SEQ ID NO: 6596 - DNA, 439 bp, Glycine max
aaaatgactcaagcccagattcaaccagttaaacttggaacccaaggctttgaggggtcgaaattgggattcggatgtatgggccttactggagcgtacaatgaccctctccaagaacaggatggcatatctgttatcaagtatgcgttcagtaagggaatcacattttttgatactgcggatgtttatggagccaatgctaatgaacttttggttggaaaggctttgaagcagctgcccagagaaaagattcagatagccacaaaatttggtattgcttcacgaggttttcctgatatgaagatcaagggttcgcctgaatatgtgcgatcatgctgtgaagctagcttgaagcgtcttgatgttgaatacattgatctctattatcagcacagagtggacacatctgtacctatagaggaaacagtgggtgaactta

SEQ ID NO: 6597 - DNA, 455 bp, Glycine max
caaaatgactcaagcccagattcaaccagttaaacttggaacccaaggctttgaggtttgaaaattgggattcggatgtatgggccttactggagcgtacaatgaccctctccaagaacaggatggcatatctgttatcaagtatgcgttcagtaagggaatcacattttttgatactgcggatgtttatggagccaatgctaatgaacttttggttggaaaggctttgaagcagctgcccagagaaaagattcagatagccacaaaatttggtattgcttcacgaggttttcctgatatgaagatcaagggttcgcctgaatatgtgcgatcatgctgtgaagctagcttgaagcgtcttgatgttgaatacattgatctctattatcagcacagagtggacacatctgtacctatagaggaaacagtgggtgaacttaagaaattggtcgaag

SEQ ID NO: 6598 - DNA, 409 bp, Glycine max
  modified_base (278)..(278): a, c, g, t, unknown, or other
  modified_base (355)..(355): a, c, g, t, unknown, or other
gggtgaacttaagaaattggtcgaagagggtaaagtcaaatatattggattatctgaagcgagcccagatacaataaggagagcacacgcaattcatcccatcacagctgtgcaaatagagtggtctttgtggactcgtgacattgaagaagagatagtccctctctgcagggaacttggtattggaattgtaccatatagtcctcttggtcgtggcttttttggcggcaaaggagttgtggaaaatgtgcctacaaatagctccctgaaagcacatncacgctttcaagccgagaacttagacaagaacaagaatatatatgaacgaattgaatgccttgctaagaagcatcangccactcctgcccagttggcaataacatgggtacttcaacaaggcgaggatgtt

SEQ ID NO: 6599 - DNA, 440 bp, Glycine max
  modified_base (362)..(362): a, c, g, t, unknown, or other
caaaggagttgtggaaaatgtgcctacaaatagctccctgaaagcacatccacgctttcaagccgagaacttagacaagaacaagaatatatatgaacgaattgaaggccttgctaagaagcatcaggccactcctgcccagttggcattagcatgggtacttcagcaaggcgaggatgttgtacctatccctggaacaactaagattaagaacctggatcaaaacataggtgccttagcagtgaaactgtcagaaaaagacctgagagaaatttctgaggcggttcccattggtgatgtagcaggtggtagatactacaatggattggatcacttttcatggaagtatgctaacacacctncaaaagattcaaaaatctcaacctgacgcacccaaccaaccctttggttagggaatctaccaagtcatcatgaattga

SEQ ID NO: 6600 - DNA, 389 bp, Glycine max
gattaatcagggaaatagccaccgagtgtggagtggactttgatgaggatcctgctgctgtggttgtggatcattcggcatatgcagtctctgctactgaaggagatcatacattgattgctagtgatgattttatcaagtctgacgtcatatttggaagcaaaaaaattgaggctccagtacttttccaggggattgggcattcactaaatcctaccaatagcctggtgttgaaagttctttttgcatctccttcagccttttctgctaacccaaaatctaaagtgacaagtcctccatcactcactggaacttcaatctcattagtttcaattatacaggcaagatataatgcccggatattgatctctggcttaatgagcttgttc

SEQ ID NO: 6601 - DNA, 418 bp, Glycine max
  modified_base (404)..(404): a, c, g, t, unknown, or other
cccacgcgtccgtaattggaagcagagaattaccataccagagattaaaatgcacccttggttcctaaagaatttgccactagaatttatggacgagggcgaaggggtgttgcagaatgatgatcatgtgaatgaagagtcatctgaaatcactcaaagcattgaagaaatactggccatagttcaagaggctaggaaaccgggtgagggcccaaaagttggtgagcaatttgttgggggcagcatggacctcgatgatattgatgcggatgctgacatcgatgacattgagacaagcggtgattttgtctgtgcattgtgaatgatgatgcttgcactttgcacactatttctccctcaaaagcagtttaagataagatgttgttccttgacgagatagatanggaagaatcaaaca

SEQ ID NO: 6602 - DNA, 439 bp, Glycine max
cccacgcgtccggatctttcttcagtcatctgttttgcactcccagccaaaatcaacggtaggaacccctgcctatattgcaccagaggttttgtcaagaagagaatatgatgggaaggtcgcggatgtttggtcttgtggggtgaccttatatgtgatgttggttggagcatatccttttgaagacccagaagacccaagaaacttcagaaaaacacttcagcgaattcttagtgtccactattcaattccagactatgtacgaatcagtaaagagtgtaggcaccttttgtctagaatatttgtggccaacccggaaaagagaattaccataccagagattaaaatgcacccttggttcctaaagaatttgccactagaatttatggacgagggcgaaagggtgttgcagaatgatgatcatgtgaatgaagagtca

SEQ ID NO: 6603 - DNA, 342 bp, Glycine max
  modified_base (305)..(305): a, c, g, t, unknown, or other
  modified_base (316)..(316): a, c, g, t, unknown, or other
caacgaggccttcgatttcaatgtcgcgctctccgatcacgagaagtacgtccgccgcgagcgcgagaaggaggccggccacggtgccgccgccgccgtcgaggagtcgcagatcgacattcaccccgccgtcaatcacaggctcaaggaaggggaaaccattaggattaatgtgaagcacatatcaactagtggaactggcatgctttcagctgctggcctaaccggtgggcatgctgcaacaccaaagccaaaaaccgtgagtcttgctcccccaccaagtggagctgggaaaatcaggtctnctcttccaccnccaccaaatgatcccgttgctgttcg

SEQ ID NO: 6604 - DNA, 345 bp, Glycine max
ggatatctctctattacatgatcgatcattcatagcatagtgtgaaatttgagcgagacgctaagaagaagaagaagaagaagaagaagaagaagatgctcgagaagatgggggtgaacacgaaagccgaggccgccagggctcgtaagagcgcggcggatacggagcggaaggagaaggagagtcgagagaaggaggaccagtactggctagaggcggaaggttcaaagtcacgcgccgcgaagaagaaggaggaagaggccgaaaagagggcggaagcagccgcgcggaaagcggatgcgcgacggttggcggagcatgaggagaaggagctggagaagtcga

SEQ ID NO: 6605 - DNA, 406 bp, Glycine max
gcattttgcagaaaatggaagaattatggggagcttgacaggaataccaactgataaaattgctgacaaattttggttggtcttccaagcacttggtgacattgcctttgcctatccatactccattctccttcttgagatccaggacactctagagtctccttcaccagaaaatcaaacaatgaaaaaggcttccatggttgcaatcttcattacaacattcttctacctgtgctgtggatgctttggatatgcagcttttggaaatgatacaccaggaaacctcttgacagggtttggattttttgagcctttctggctcattgaccttgctaatgcttgcatcattcttcacttggtgggaagatatcaagtactattaatggtacctatcaaaattaacttt

SEQ ID NO: 6606 - DNA, 384 bp, Glycine max
cccacgcgtccgcccacgcgtccgcggggaatttttgtagaaacccttacaacgtgactggggtttgtaaccgaagctcgtgccctttggctaatagtcgctatgccaccattcgcgacgacaatggagtgttttacctttacatgaaaactattgaaagagctcatatgccgaaagatttgtgggaaagagtaaagcttcctaggaattacgagaaggcacttgaaatcatagataaacatctgatgtattggcccaaacttcttatacacaagataaagcaacgtttgaccaaaatgacacagatgcggatacgtatgaggaaacttgctttgaagacaagggagaaaataatgacaactccaaggaaagagaaaaagagag

SEQ ID NO: 6607 - DNA, 423 bp, Glycine max
cccacgcgtccggtgcttgaaaaaatctgcaacttttccaattcctaatacaatgttgccttcaagcccatctgataaggaggctgatacttcagtcacaggaccactcaatgagcattctgctcatcaaacttactcactctcagtatctccgcctgctcctctgaagcttatatctgccatgaaaggtagccgtgagaaacatgggggatcacaggtgaaattgaatgtgaaatgggcctctgatgtgtatgatcctatacctacattattatcacacactgttagaagcaacaagaagcagcagaaatccaggaagaagaagcctgaaaagaagaatggaaagaagggtcaaaagggaaattcatctcgagggggcagcaacaaagattagcaggttcgcaagctaggtgggacttctgg

SEQ ID NO: 6608 - DNA, 429 bp, Glycine max
gtatgatcctatacctacattattatcacacactgttagaagcaacaagaagcagcagaaatccaggaagaagaagcctgaaaagaagaatggaaagaagggtcaaaagggaaattcatctcgagggggcagcaacaaagataagcaggttcgcaagctaggtgggacttctggtttgtgctacaagtcaatggattcttgtgataaagtgcttggagcttctactgaattagatgctcttgaagttcgaagccaggattcatactgtggaactagcttcctgaaaaaatcagttactgaagtgcactactcggttgcagaagcactatgagtgaaatactctgaatgtcttttcctatttccttgaatgtacataaataagcgatattttgctgttggcttatttggtggaaaaattaaaagaaaaag

SEQ ID NO: 6609 - DNA, 430 bp, Glycine max
ttcttaggttaaaagttggaactgagtgattacccaactaatgttatgatcagttggaagcgttggcaagaaagaatacgtaatagtggtgttgtttgttcattttggtcaaagaaatagtatctgggtacccaggatattgtagttgtaagatgggttatctcaattcagttttgtcatcttcaagccaggttcatgttgcagatgatgcaattgtgagcggcgggggtctaagtcacaatggaaaattcagctacgggtatgctagctctcctggcaagagatcttcaatggaagatttttatgagacaagaattgatggtgttgaaggtgaaattgttggccttttcggagtttttgatggtcatggtggtgctcgtgctgctgagtatgtcaagaaaaacctgtttagtaatttgatcagtcaccc

SEQ ID NO: 6610 - DNA, 449 bp, Glycine max
gcaataactgatgcatataatcataccgattctgagttgctgaaatcagaaaatggccataatggagatgctggatcaactgcttccactgctattttagttggtgaccgcttgcttgttgcaaatgttggggattccagagctgttatatgcagggttggtaatgccattgctgtttctcgagatcacaagcctgaccaaactgatgagaggcaaaggattgaagaagcaggaggctttgttatgtgggctggaacttggagagttggaggtgttcttgctgtttctcgtgcgtttggtgatagactcctgaagcagtatgttgttgctgatccagaaattcaggaagaaaaaattgacagctcccttgagtttcttattctggccagtgacgggctatgggatgttgtcacaaatgaggaagctgttgctatgattaaatcaattga

SEQ ID NO: 6611 - DNA, 435 bp, Glycine max
cccacgcgtccggagtgccctagttccaggaggcattcgcattggggcaccagcaatgagaacaagaggacttggtgagaaagaattttcactcattgctgatttcattcatgagggtgtgcaaataagtcttgaagccaaaagtttggtctcaggaacgaagctccaagattttttgaagtttgtaacatcttctgaatttcctttgggagagaaggtatcagagttgcgtaggaaagttgaagctcttactactcagtatccaatacccggagtctaagtgtacccgcataatgaatacttaaaactaagacgctgttaaaaaattttgtacaataatcatgcttcgatgtgtgttgctaataatatgttgtaacattttatggcaaatgcagcagcagctttatgattatcccatttataattggaagcaaa

SEQ ID NO: 6612 - DNA, 376 bp, Glycine max
caaaatcagccatggtttcaaatggtaggatgctgtgttcaagcttgattacagcacgtccgtgatcctccctctccagaactactccatcctacttctgctcatttccttctcgtagaatcatcttcacgccaagaattggatcatctccggccccggcccaggcccaggcccagcccaaggaagccaagctctggggtggcaggttcgaggagggcgtaaccgacgttgtggagaggttcaccgagtcgatctccttcgacaagaagctctacaaacaagacatcacgggaagcagagcacacgcttcaatgctcgctcaccagggtttgataagcgagattgacagagactctattcttcaaggattggatga

SEQ ID NO: 6613 - DNA, 342 bp, Glycine max
caagatggttctgctagagaagctctgggatgacgttgttgctggccctcaacgtgagcggggccttggcaagctcagaaaactcaccaccctcaaaactattgatgaaggagacagtagcaagctgcagaagacgttgtcgatgccgtcgacaccgacaaccccgatgactgccacgactacaacgacaccgggatccgctcgtaaagctgacaacttttggaggagcgtcttccatcctgggagcaacatacgcacagataccaactgtgctcaaatgattgacaaacccctttgcaacgcttccaatggctacgactggctttacagtggggataccag

SEQ ID NO: 6614 - DNA, 418 bp, Glycine max
  modified_base (361)..(361): a, c, g, t, unknown, or other
ggaggcacaccatttttgcgcgcaccagaacgaggagatgaggcagtgccttatgtacgacagccccgagaagaaagccaggctcatagggctggaatacatcatctccgaaaacctttacttgacactccccgaccaggagaagcgtctgtggcactctcacttgtacgaggtcaagagtggcctcttcttcatgcctaaggttcctgctctcattcagcgcccagacatggagactgtctgcaccacttatggcaaagtctttcatttctggcaggtcgataagggtcactctcttccatttgggatacctcagctcatgatggctctcactagagatggccagatctatgatcacctnctccaaagtcagcagagcgcatggggatagactatgaggaagaaagaaaagcgagag

SEQ ID NO: 6615 - DNA, 318 bp, Glycine max
cagtagttgagtctagttgtttcccttaaagccatggaatattctccattgtccattgggattaccttctttgtgttcttgctcttgcattggctagttaaaacttacaagcaaaaatcgagtcacaagttgccccctggcccatggaggttacccatcattggtaacctccatcagctagcattagcagcttcacttcctgatcaagctctccaaaaacttgtccgcaaatatggacctctcatgcaccttcaactaggtgaaatttcaacactttgtgtgtccttccccaagatggctatggagatgatgaaaacc

SEQ ID NO: 6616 - DNA, 445 bp, Glycine max
ggattctcagcaaacaatgaactcctgagaccagtagttgagtctagttgtttcccttaaagccatggaatattctccattgtccattgttattaccttctttgtgttcttgctcttgcattggctagttaaaacttacaagcaaaaatcgagtcacaagttgccccctggcccatggaggttacccatcattggtaacctccatcagctagcattagcagcttcacttcctgatcaagctctccaaaaacttgtccgcaaatatggacctctcatgcaccttcaactaggtgaaatttcaacacttgttgtgtcctcccccaagatggctatggagatgatgaaaacccatgatgttcattttgtgcagaggccccaacttctggctccacaatttatggtctatggggcaacagatattgcttttgctccatacagtgattat

SEQ ID NO: 6617 - DNA, 364 bp, Glycine max
ctcggcacctcgaactcaacacactcttcgaaactctggatctgttcttctgcttctaagagacaacattctcttcttgaatctcaatctctcggaaactaaaccctaagaacagacaaagatggtttacaccatctcgggaattcgatttccggttcttccttcgctgcacaactcccgcttccgtggcgatcgcagaactgcgtctcttcccgtttttctcagaaacaactccttctctcgtaaaacccttgctctaaaatcttcccatgattctgattccttgtcttctgcgattgccaaatctgataaagtacttattcctcaagatcaagataactctgcatccttgacagatcaactt

SEQ ID NO: 6618 - DNA, 385 bp, Glycine max
aacacactcttcgaaactctggatctgttcttctgcttctaagagacaacatgctcgtcttgaatctcaatctctcggaaactaaaccctaagaacagacaaagatggtttacaccatctcgggaattcgatttccggttcttccttcgctgcacaactcccgcttccgtggcgatcgcagaactgcgtctcttcccgtttttctcagaaacaactccttctctcgtaaaacccttgctctaaaatcttcccatgattctgattccttgtcttctgcgattgccaaatctgataaagtacttattcctcaagatcaagataactctgcatccttgacagatcaacttgaaactcctgatataacctcagaggatacacagaactt

SEQ ID NO: 6619 - DNA, 323 bp, Glycine max
aacacactataaaaaactaaagagaatatgaaaaaaagataataaaaaacaacatgataggaaagaatataaatatgtaggggactaaaccctaagaacagacaaggatggtttacaccatctagggaattcgatttccggatcttccttcgctgcacaacttccgcttacgtggcgatcgcagaactgcgtgtcttcccggggatctcagaaacaactccttctctagtaaaacccttgctctacaattttcccatgattctgattgcttgtcttctgcgattgccaaatctgatagagtacttattcctcaagatcaagat

SEQ ID NO: 6620 - DNA, 426 bp, Glycine max
cttgactcgtttattttaaatctaattaggtttttcttgaggtttaagttataatatcagcaactatggatgataagcaagaaaatttgttaacgttgtccttgcctagccaattggtatcaattgatgaggaactatggcggatggctgaagacagggtgcaagagatactatggacaattgaaccaaatgttttatctgaagtgaacagaaaggatgttattgactatgttcagaggctgattaaaggttactatggagcaaaggtcttgccattcggttctgttccactaaaaacctatcttcctgatggagatgttgatttgacaactctcattcatgaagatgcagaggaggatttggcacaagcaatatgcaatatacttaaaagtggagatgactctgaataccaagtaaaagacatac

SEQ ID NO: 6621 - DNA, 431 bp, Glycine max
  modified_base (363)..(363): a, c, g, t, unknown, or other
cttttcttttccgctcccgtaggaatcgaagatttataattccaatcatatatagtaatggtaacatcgtagtataatctgattcatcaacagcgcttgtcggaaacagagtcggtttagtttgttagttagttgtttaatgaacgcaattcggtcccgttggttgacgagaatggcagaagacattgggaaaagcaacctcgaatcctcttctgcttcaacaacttcccgaggcttctggccttctgtcttacgttggatcccctcttccaccgatcacatcatcaatgctgaaaaacgccttctctctcttgtcaagactccgtatgctcaagaacaggtcaatataggttccggtccacncatgatttccaaagttagatggttccgttcatctagcaatgaaccacggtttattaacacggttacat

SEQ ID NO: 6622 - DNA, 423 bp, Glycine max
  modified_base (369)..(369): a, c, g, t, unknown, or other
atttttgtgtgctcttggattggttgttagaatggagggtcagagtaagggtagttttaatgtgatggaagggagtgagggcaaaggaagggagtttgtggtggaaaagtctgcatcatcaatagtgggaacttgtgatttggttctaaggattttggcctttttactaacccttgtggctgctgtagttattgggacagataagcaaactgccattgttccaatcaagcttgtggattctatgccaactttgtacgttcctgttgcagctaagtggcattacttgtctgcctttgtctattatgtgggggcaaatgcaatagcatgtgcatatgcaatactgtctctcttgctcactcttgcaaatangcgtaaaggcaaaggaacgatggaaacattgatcactgtgctggacacagtaat

SEQ ID NO: 6623 - DNA, 423 bp, Glycine max
ccacgcgtcaggtttatgtgtgctcttggattggttgttagaatggacggtcagagtaagggtagttttaatgtgatggaatggagtgagggcaaacgaatggagtttgtggtggaaaagtctgcatcatcaatagtgggaacttgtgatttggttctaaggattttggcctttttactaacccttgtggctgctgtagttattgggacagataagcaaactgccattgttccaatcaagcttgtggattctatgccaactttgtacgttcctgttgcagctaagtggcattacttgtctgcctttgtctattatgtgggggcaaatgcaatagcatgtgcatatgcaatactgtctctcttgctcactcttgcaaataggcgtaaatgcacaggaacgattgagacattgatcactgtgctg

SEQ ID NO: 6624 - DNA, 450 bp, Glycine max
  modified_base (398)..(398): a, c, g, t, unknown, or other
gtttctctcacattacaatgtagtcagtctattgggcttagggtgccaccataatactattaattctcacacataacatataaaataaagttgtggataattaaccacattaaatttattgattcagtgattaaagactcctaggcaccttaagttgtctgtttaagtctcaaaacaggaggaactatcagcagcaagaggaatgctattgatccaagcagtgatatgaaaagggaagcagccacttggtcacaaaatttcccaaactcattgcacactttgttccaatgcacatgtgagtttccttgcaagccaaggagaccaaccgtcatggcggctacgttgccgggagagagcaaagctaccattactgtgtccaacacagtgatcaatgtctncatcgttcctttgcctttacgcctatttgcaagagtgagcaagagagacagt

SEQ ID NO: 6625 - DNA, 374 bp, Glycine max
cccacgcgtccggtttttgtgtgctcttggattggttgttagaatggacggtcagagtaagggtagttttaatgtgatggaagggagtgagggcaaaggaagggagtttgtggtggaaaagtctgcatcatcaatagtgggaacttgtgatttggttctaaggattttggcctttttactaacccttgtggctgctgtagttattgggacagataagcaaactgccattgttccaatcaagcttgaggattctatgccaactttgtacgttcctgttgcagctaagtggcattacttgtctgcctttgtctattatgtgggggcaaatgcaatagcatgtgcatatgcaatactgtctctcttgctcactcttg

SEQ ID NO: 6626 - DNA, 424 bp, Glycine max
cccacgcgtccgattagctattatgtgggggcaaatgcaatagcatgtgcatatgcagtgactgtctctcttgctcactcttgcaaataggcgtaaaggcaaaggaacgatggagacattgatcactgtgctggacacagtaatggtagctttgctcttctccggcaacggagccgccatggcggttggtctccttggcttgcaaggaaactcacatgtgcattggaacaaagtgtgcaatgagtttgggaaattttgtgaccaagtggctgcttcccttttcatatcactgcttggatcaatagcattcctcttgctgctgatagttcctactgttttgagacttaaacagacaacttaaggtgcctaggagtctttaatcactgaatcaataaatttaatggggctaattattcacaacttt

SEQ ID NO: 6627 - DNA, 441 bp, Glycine max
gagtttttgtgtgctcttggattggttgttagaatggagggtcagagtaagggtagttggaatgtgatggaagggagtgagggcaaaggaagggagtttgtggtggaaaagtctgcatcatcaatagtgggaacttgtgatttggttctaaggattttggcctttttactaacccttgtggctgctgtagttattgggacagataagcaaactgccattgatccaatcaagcttgaggattctatgccaactttgtacgttcctgttgcagctaagtggcattacttgtctgcctttgtctattatgtggaggcaaatgcaatagcatgtgcatatgcaatactgtctctcttgctcactcttgcaaataggcgtaaaggcaaaggaacgatggatacattgatcactgtgctggacacagttatggtagccttgctcttc

SEQ ID NO: 6628 - DNA, 413 bp, Glycine max
  modified_base (367)..(367): a, c, g, t, unknown, or other
  modified_base (370)..(370): a, c, g, t, unknown, or other
cccacgcgtccgacaagttctctgagttgttttgtgagatagcacatagcatagcaaggaaggagtattacaaccgaaaccctgaagaaaaaaagagtagaggaagaaaaaacacctgcaccaccaacgatgggtgtggattactacaagatcttgcaggttgataggagcgccaaagacgacgacttgaagaaagcttataggaaacttgctatgaaatggcaccctgataagaaccccaacaacaagaaagaagctgaagctaagtttaagcagatttccgaagcatacgaggtacttagtgatccccaaaagagagcaatctatgatcaatatggagaagaaggtctgaagggtcaggttcctnctnctgatgctggtggtgctggaactggaactatcttcttcttcac

SEQ ID NO: 6629 - DNA, 437 bp, Glycine max
acaatttctctgagttgttttgtgagataatagcacatagcataacaagggaaggagtattaacaaccgcaaacctgaagagaaaaagagcagcagaagaagaaacaccaacgatgggtgtggattactacaagatcttgcaggttgataggagcgccaaagacgatgacttgaagaaggcttataggaaacttgctatgaaatggcaccctgataagaaccccaacaacaagaaagaagctgaagctaagtttaagcaaatttccgaagcatatgaggtacttagtgatcctcaaaagaaagctatctatgatcaatatggggaagagggtctgaagggtcaagttcctcctcctgatgctggtggtgctggaactggaactactttcttctccacaggagatatgccgggatcgtttcggttcaatccgaggaat

SEQ ID NO: 6630 - DNA, 308 bp, Glycine max
cgtctgggcacgatgtcacagaacaacaaaaggatgttggaaggaaaagctatggtgaaagaaacagacatgtcacccaagatgcagatccatgccatggcctctgcttctcaggctcttgatctctacgatgtttatgattgcatctctattgctgcccatatcaagaaggaatttgatagtgtgtatgggaatgggtggcaatgtgtggtgggatccaattttgggtgctatttcacccattcatcatggactttcatctattttgctctggagacccttaagttttcttatctttaagggaacat

SEQ ID NO: 6631 - DNA, 421 bp, Glycine max
agctgctgggcttgtacttggtgtcataggacttgtactgctcgagttacctgccctatcatttgatgaaagcaacttctcactatggggaagtggtgagtggtggatgctacttgcagctcagagtatggcaattggcacggtcatggtccggtgggtctccaagtactctgaccctgtcatggctactggatggcatatggttattggtggtctcccacttgtgctattcgcagttcttaacaatgaccccgcagtgagtttgagtctcaaagagtacagttcgactgatatattggcactcctgtacacatccatttttagaagcgcagtcagctatggtgtgttcttttatagtgcaactaaaggtagcttgaccaagctcagttcacttacgtttatgaccccaatgtttgcttca

SEQ ID NO: 6632 - DNA, 429 bp, Glycine max
ctttgtagtgcattggaatggaagatcagggtcagcagcagcagcagcagcatcaagtgggggcaaagagtccaaggcaaggcaccgagaggagtgaagcggttcggtcaaggtggactccaaagccagaacaaatcctcatactcgagtccatcttcaacagtggcatggttaaccctccaaaggacgaaaccgtcagaataaggaagcttctcgagaaattcggcgccgtcggcgacgccaacgtcttctactggttccagaaccgccgctccagatcccgccgccgccagcgccagatgatgcaacagcaggctactgccaccgccaccgccaccgtcaccacctttgatcaccctcagcctcagactcagactcttgttaatgttggtggtgcaattccacatgatcaccacaccttgggaaacc

SEQ ID NO: 6633 - DNA, 481 bp, Glycine max
aattgattgccgaatttgtggtgatccacattcagttctccgttttgcttttgttgagtttgcagatgagtatggtgcaaggactgctctaaatcttgggggtaccgtgcttggatactatccggtcagggttcttccttcaaaaactgccattcttccggtgaatcctacattcctccctaggtcggatgatgagcgtgaaatgtgtgcccggactatctattgtacaaatattgataaaaaggtttctcaagctgaagtgaagaatttttttgaatcagcttgtggcgaggttatgcgccttaggcttttaggggaccaagtgcattcaactcgaattgcttttgtggaatttgcaatggtaagtcttgactatactagttgccattaattggctgcactacactttcatagtttatgagaataactgcatcatgaacaacttattcaacctatgttgattattttatggattctatgt

SEQ ID NO: 6634 - DNA, 426 bp, Glycine max
caactctgcttcccctggcaaccttcttcttagttctctccgcttcttatctccagattgctggggcgaaagcacaaccgttgactagtctcaagcttaactctccgatccttcaggagtctattgctaaagagatcaatgaaaatcctgaggcaggatgggaggctgctataaatcctcatttctccaattatacagttgaacaatttaagcgccttcttggagtcaaaccaacgcctaagaaggaactgagaagtacacctgctatatctcacccaaagtcattgaaattgccaaagaattttgatgcaaggacagcttggtctcagtgtagcactattggaagaattctagatcagggtcactgtggttcttgttgggcatttggtgctgttgaatcattgtcagatcgcttttgcattcatt

SEQ ID NO: 6635 - DNA, 397 bp, Glycine max
caaccgttgactagtctaaagcttaactctccgatccttcaggagtctattgctatagggatcaatgaaaatgctgaagcaggatgtgaggctgatataaatactcatttctccaattatacagttgaacaatttaagcgccttattggagtcaaaccaactcctagaaatgaactgaatagtacacctgctatatgtcacccaaagtgattgaaattgccaatgaattgagacgctaggtcagcttgatctcactgttgcactattgaaagaattctagatcacggtcactgagattcttgtagggcatttgatgctagcgaatcattgtcagatcgctcttgcattcattatgatgtaaatatgtgtctctattgtaatgaccttcttggatgct

SEQ ID NO: 6636 - DNA, 374 bp, Glycine max
gctgcaactcatctgcttcccctagcaactcttcttcttacttctctccgcttcttatcggcagattgctggggcggaagcacaaccgttgactagtctcaaacttaactctcatattcttcaggagtctactgctaaagagattaatgaaaatcccgaggcaggatgggaggctgctataaatcctcgtttctccaattatacagttgaacaatttaagcgccttcttggagtcaaaccaatgcctaagaaggaacttagaagtacacctgctatatctcacccaaagacgttgaaattgccaaagaattttgatgcgaagacagcttggtcgcaatgtagcactattggaaaaattctagatcatggtcact

SEQ ID NO: 6637 - DNA, 395 bp, Glycine max
acgcgaccattttgaagcgtatcatgctttgtcacacagtgtaagagaccggttgattgaacgcgggcgtgatactcatgtgtacgtcaagagaacaaaacctaagcgcctctacttcctttcgcttgagtttcttatgggtcgttccttgtcaaatagtgtcatcaatcttggcatccaggatcaatatgcagaagccctaagccaacttggatttgagtttgaagttgtggcagagcaagaaggagatgccgccttaggaaatggtggccttgctcgtctatcagcatgccaaatggattctttagcaacattggattatcctgcatggggttatgggctgcgatatgaatatgggctgtttcgtcagatcatagtggatggctttcaacatg

SEQ ID NO: 6638 - DNA, 449 bp, Glycine max
cccacgcgtccggcagaactttggttcccaacctccattgcctccgcttctacctcgctaccatgatcattcctgagaagaaccgcaaggagatctgcaaatacctcttccaagagggagtttgctttgcgaagaaggacttcaatttggcgaagcaccctgagattgacgtgccgaatctgcaggtgattaagctgatgcagagtttcaagtctcgcgagtatgttagggagacttttgcttggatgcactattactggttccctaccaacgatgggaatcgagtttcttaagaacttaccctaaacctcctttcgaaaatgggcctggtaccttgaaagaacaggccaagccaacttgcaggcccttttgccggccattccgtgatcgccctaggggtccaccacgctttgaaggggagcgtaagtttggtggtgatcgtgatggat

SEQ ID NO: 6639 - DNA, 349 bp, Glycine max
atggaattgagttccttaggacttacctcatccttccatccgaaattgtccgtgccactgtcaagaagcaggccaagcccgccggaagaccattcggtggcccacccggtgatcgccccaggggcccacctcgctttgacggagagaggagattcggcggtgaccgtgatggataccgtggaggtccacgcggacctggcggtgatttcggtgacaagggtggagctcctgctgactacaggccttcttttgggggtggtactggcggaaggcctggcttcggtcgtggttccggcggttatggagcaccgactagttcaaacattccttcttaaatataaaataatat

SEQ ID NO: 6640 - DNA, 378 bp, Glycine max
gggaaaaccattgtggatttgttcgcttttgaattcaaaggtcgaccttatgagtattaggtaagtgcagcgaaatgtggaaggattcaagtggatggtgagatggtaccggtgtcatacatagttaaatcatctcaaaagataagccatttcttacacaggcatgaaccacctgtgatggcttgtgaggttcctgttcttcaaaaagatattgatgcgctaactgtttgtaagccagcatatgtcccttaggtgcacccatgtagtcaatatcggaagaacactgttgttggcattcttcaagctagagcatgggctgacccctttatttcctggtcattagactggatcgccttgtctcaggacttcttaatttgg

SEQ ID NO: 6641 - DNA, 425 bp, Glycine max
  modified_base (369)..(369): a, c, g, t, unknown, or other
caactgcatctcgtatatgtgggcctcttcttgattggattgaaacttgggagatggtgtcaagggtcaaatacttaggcacaatgctgtttctacataacttccagaaggctgttaggtggtttcttgcctttacacataccatgcgatcatttttttcctttcttgttcaacctcttgtagagtcattggtggagatttttggatttcttctcccaagcttcaagtttttgtttgaattagctgaaagcatcttttctgtcatttggctcgtagtggatacttcttttgatatagtgggaaatgtactggagctgctcttttcaccattttggtttgtcctcaatgttgcttggagcattgctactngtattcctatatccttattttgggttctctgggaattcctatatgctcctgttcgt

SEQ ID NO: 6642 - DNA, 455 bp, Glycine max
gtctcaagggccaactcatgatgagattgattttgaattcttgggaaacgtgagcggtgaggcttgcattctccacacaaacgtgtttaccaaaagccaagggaacagagagcaacagttctatctctggttcgaccccaccagaaactttcacacttacttcatcatctggaagccttaacacatcatattcttggtcgataacattcccataagggtgttcaagaatgctgagactattggcgttcctttcccgaagaaccaacccatgagaatctattctagcttgtggaacgctgatgactgggccaccaaaggtggtttggtgaaaactgattggtcaaaagcaccctttacagcatactaccgcaatttcaaagccacagagttctccacctcttcttccaattccttctctgatgctgcatggcagagcaacgagcttgatgcctatg

SEQ ID NO: 6643 - DNA, 442 bp, Glycine max
ctccattttccctctgtcttccccccgtcctctacacaaaaatatattattaggatggagaaggtgaattttgtgaagaatggagagcttagattgcctccggggttccgtttccacccgactgatgaggagctggttctgcaatacttgaagcgcaaggtcttctcctgccctttgccagcctctatcattcctgagcttcatgtttgcaagtctgatccttgggatttgccaggttcctttctattttccattcacacccatcatcccctttctctttctctaatttcaattccatgcccccatttttaggtgatttggagcaagagagatacttctttagcaccaaagtggccaaatatcccaacggaaatcgctccaacagagccacaaattcgggttattggaaggcaactggcttggacaaacaaattgttacttc

SEQ ID NO: 6644 - DNA, 451 bp, Glycine max
gaaaactcagcgtgtgattgaaatttgaagagtgtgaagatggcgatggaagtggagcagaatcagaatcatcaattagggtttcccttctggaaaccgctccgtcgcaggttcggacccgaatctcctttcttcgctcatggcaacctcgaacgggaacttctcgccaaacagcttgctttggaattaacagaagagaaacaacagcttgagaaatggatgcaagaggaagaaggaagggaagtcttttgtcccattgtgggttgtggtgcacgcttgacctcaatggaggactttgaaaatcactataatgcaaggcatactgcatcctgttctgtgtgctccagagtttacccgacatcttggttgctcagcatacatgtatctgaagtgcatgattcttttcttcaagcaaaagttgcacgtggctatgatatgtacgaatgcttgg

SEQ ID NO: 6645 - DNA, 413 bp, Glycine max
agcaaagatgctgctggacaagttcgtggttctccaaatgaatttgctggaataggctccacatgagcccttctttggctggctagaaggtttgcaattctatctgggcctaccattcctattattggcgagggtgatgaagaggcaaatgataggtatgtagaacaattagttgcaagtgcagaggctgctgtggaggaagttatccagcgtggggtaagctttatttttactgtatggagaatatgaagtttttagtcagaaatatgatgactcgtgatattttgggttgtcacttgtcacatctaggtggctgatccgaagaaaatagctgttggtggacattcctatggtgcgttcatgactgcttacctgctggcacacgcaccttatttttttgttgtggaattgct

SEQ ID NO: 6646 - DNA, 426 bp, Glycine max
gaacaattagttgcatgtgcagaggctgctgtggaggaagttatccatcgtggggcggctgatccgaagaaaatagctgctggtggacattcctatggcgcgttcatgactgctaacctgctggcacacgcacctcatcttctttggcgtggaattgctcgttctggtgcttacaacagaacacttactcactttggttttcagaatgacgacagaactctttgggacgccactaatacttatgtcgagatgagtccttttatgtcggctaataaaactaagaagcccatcttgcttattcacggtgaagaggacaataatccaagaacattaaccatgcaatcagacaggtctttcaacgctctaaatggtcatggtgctctttgtcggctggtgattatgcctcacgagagtcatggttacact

SEQ ID NO: 6647 - DNA, 438 bp, Glycine max
acccaataaagggtttgctggggcttctgagagggctggtccgagggataggccggtcgagtttgagaatgaagaggctgatccgtttggtttggatcagttcttgactgaggtgaagaagggtaagaaggccatggagaaagtgggtggtggagggactatgagggcaagtgctggatcatctatgcgggatggtaacgagggaggttcaggtaggactcgcattggatttgaaagagggcattaggtaccacaatatttaatgttgcctgacctatttctagtgcgtaatgttgactgttgaatatccaccgtaatggcttaggttgctatgtctgaaaatgggtggttagaacaatgtgcttgtgttagcattttggtttttctccaaccccctgccctgccgccctgcttaagtggtgaaataaactgtttttg

SEQ ID NO: 6648 - DNA, 429 bp, Glycine max
cgctccatctctccactcttatctcgttccctttcacaactcaaacaattcccaaaatcccacccttgtgccctgtggtcctcctccttctccttctgcctccacacactccgcaagtccacttcccctattcgcgcctcttcttctttttctccctccatggctgcttcttctccgctaaacgacgccgtcgaaggcaatcctcttctgcagaacttcgacttcccacccttcgatgtcgtcgagcccaaacacgtgcgacccggcattcgcgccctcctcggcaagctggaaagtgaattggaggagctcgaacggaacgtggaaccgtcgtggccaaagttggtggaaccgttggagaagatcgttgaccggttatctgtagtttggggcatgatcaatcatctaaagtctgttaaggatagttcg

SEQ ID NO: 6649 - DNA, 347 bp, Glycine max
cccacgcgtctcgccacgcgttcggcggtaccagtattgatgtacattataatcaataggagaattagtataaaaagtcatggccaagattaacaaatttggtgaacattaattattcctgaagcactaatgaagccttaccctttccatacaaggacactgaccaagagaaggcagaaagaaagacagcacgagatccggtgcaaaatgagttggcaaccacacaagaaagaggcaaaagatgaaccaagcggagctggacaagcatgcggcgcgttagcataacacggtggccaaacaagacgtcaccacggctgtgcacatgggacatgggcaccacatcaccg

SEQ ID NO: 6650 - DNA, 404 bp, Glycine max
cccacgcgtccgagacgcgcaaacattgcaaggctgagagaactgcatacactgacgggccatgttgagtctgtgtttagactgaagggccttgacattgacacaatacagcaagcatacactatctagaataatgttgagtttcatgcatgaatcgtttatgtttaatgtatgtataatgccgttagaagagtgtgatcatagagcagcaaaaaatatatactttataaatgtttgttcaaagcagttttggtggacttttgtagacatgaaactattggtgcatttaaatgttaaagagttccatttatgcttccaaaaaaaaaaaaagtataaaagtacacatgaaaaacaatacaatgattatgaggttagtaaaataagctgtattctgtggtattatt

SEQ ID NO: 6651 - DNA, 429 bp, Glycine max
ctcactttatttgaatttctaatccgtgaggttgttgcgcttcagaaatggctaccggggctgctgtgccaactacgttttctaccctcaagacatgggattccagtttggggtttgcaaaaaacatagattttgtgagagtttccgatatgaagagcatgaaatcttctgcgaggaaaagggtgtcaattatcaggaactcaaatcctggccaagatattgctgaacttcaacctgcatccccaggaagccctcttttggttcctaggcaaaagtattgtgaatcattgcacaaacccatcatgagaaaaacaagcacagtaatggttggtaacgtggctattggtagcgagcatcctataagaattcagaccatgactacaactgacactaaggatgttgcttggacagttgaacaagtgatgagaa

SEQ ID NO: 6652 - DNA, 385 bp, Glycine max
gtaattttcttgggaattgggtcctcctctactttggttatacctcatccccggatcttgggccagagcaagtccaaattatggccaacgcaattgatatattagaatcaaaacagaatctcaagattctaccagtatttgtttccattgatcctcaacgtgatactccctcacaacttcgtgcttaccttaaagagtttgattcaagaatcataggattaactggacctgttgcagctattaggcagatggctcaagaatatcgtgtttactttaaaaaggtagaagaggatggcaatgattatcttgttgactgttcccacaacatgtatttgctgaatcctaaattggaggttacgagatgctttggagtcgagtatagtgc

SEQ ID NO: 6653 - DNA, 446 bp, Glycine max
  modified_base (302)..(302): a, c, g, t, unknown, or other
  modified_base (381)..(381): a, c, g, t, unknown, or other
taaaagcaaggctagaacacttgcaagttcgaaagagccatttttatttatcagtcaccgaaacaactatggatacaatcaagtccttcaagggctacggcaaagttgacgagttggagcagcaagcctatcagaagaagacacgtaagcgcctcataataatcacagtctcttcaatcgttctaattgcggtgatcatcgccgctatcgcaggggttgtcatacacaagcgcaacacctcatcatctccctcatccgactcgcccccgcaaactgagttaaccccggccgcgtcactcaanagcggttgcgacgtgactcagtaccctaactcgtgcttctccgcaatctcctcgttaccggattccaacactactgatnccggagctctcttcaagctctctctccgcgtcgccattgacgaaatatcaaagctttgagctttc

SEQ ID NO: 6654 - DNA, 376 bp, Glycine max
accaagcgtccgggtggctgctcttggctatgataatggattctattgccctggaagatgctcacaagaatatgggaattgtactgctggcaactcatgcactgaaccttacattgttgcccacaatttgatattgtcgcatgcagcagctgttcaaagataccgagcgaagtaccaagaaaagcaaaatggaacgattgggatcctcttggattttgtttggtatgagcctcttacaagattaaaggctgacaattttgcagctcaaagagccagagactttcatattggatggttcattcatccccttgtttatggagagtaccaaaaatcattcaacatattgtttggaatagactcccaaattcactagtga

SEQ ID NO: 6655 - DNA, 229 bp, Glycine max
ttgtcttggcttttattatgggttctttggcccctggagaatcctcaaaggattttgggaatggtccagttggcacctaaggccctgagccttacatggttgcccacaatttgatattgtcacatgcagctgctgttcaaagataccgagagaagtatcaagaaaagcaaaagggaaggattgggatcctcttggattttgtttggtatgagcctcttaccagatcaaa

SEQ ID NO: 6656 - DNA, 223 bp, Glycine max
  modified_base (66)..(66): a, c, g, t, unknown, or other
  modified_base (78)..(78): a, c, g, t, unknown, or other
ggaaggattgggatcctcttggattttgtttggtatgagcctcttacaagatcaaaggccgacaanttagcagctcanagagccagagactttcatgttggatggttcattcatccccttgtttatggagagtatccaacaaccattcaaaatattgttgggaatagactccccaaattcactagtgaagaagttaaaatcgtgaagggttcaatagattttg

SEQ ID NO: 6657 - DNA, 316 bp, Glycine max
gcccacgcgtccgagaagtttctgtttatcatttccatcgctacaaagaacatatagatctcgtggccagtttgaattgtgatgcctaccggttctcaatctcgtggtccagaatttttccaaatggaactggccaagtaaattgtaaaggtgtagcatactacaatatgctgatcaattacttgctagataaaggtattactccatatgcaaatctctaccattatgatcttcctttagcacttgaagagaggtacaacggattattgatccctcaagttgtgaatgattttgcaaattatgcataattttgttt

SEQ ID NO: 6658 - DNA, 428 bp, Glycine max
caaaaacataaacaaagtaagagttcactcaatctcactgtgttgtgagttgtgtgtgagcaccaaccaacaatggtgtctctgactccgttatgtttctttattaccttgttgatcgctggtgcatactcagcggcggagccccaaacggtgcgttttgacaccggtgggttgagcagagacacctttcccaaaggattcttattcggaacggccacgtctgcgtaccaagtggagggtatggcccacaaagacggtcgcggcccaagcatttgggacgtcttcatcaaaaaacccgggattgtcgcaaataatggcacgggagaagtttctgttgatcagtaccatcgctacaaagaagatatagggatctcatggccagcctgaattttgatgcctaccggttctcaatctcgtggtccagaatt

SEQ ID NO: 6659 - DNA, 422 bp, Glycine max
cggacgcgtgggcggacgcgtgggcggacgcgtgggcggacgcgtgggcaaaaacaaaaacaaagtaagagttcactcaatctcactgtgttgtgagttgtgtgtgagcaccaaccaacaatggtgtctctgactccgttatgtttctttattaccttgttgatcgctggtgcagacgcagcggcggagccccaaacggtgcgttttgacaccggggggttgagcagagacacctttcccaaaggattcttattcggaacggccacgtctgcgtaccaagtggagggtatggcccacaaagacggtcgcggcccaagcatttgggacgtcttcatcaaaaaacccgggattgtcgcaaataatggcacgggagaagtttctgttgatcagtaccatcgctacaaagaagatatagatctcat

SEQ ID NO: 6660 - DNA, 432 bp, Glycine max
cccacgcgtccgcccacgcgtccgaaacaaagtaagagttcactcaatctcacgtgtgttgtgagttgtgtgtgagcaccaaccaacaatggtgtctctgactccgttatgtttctttattaccttgttgatcgctggtgcagacgcagcggcggagccccaaacggtgcgttttgacaccgtggggttgagcagagacacctttcccaaaggattcttattcggaacggccacgtctgcgtaccaagtggagggtatggcccacaaagacggtcgcggcccaagcatttgggacgtcttcatcaaaaaacccgggattgtcgcaaataatggcacgggagaagtttctgttgatcagtaccatctgtacaaagaagatatagatctcatggtcagcctgaattttgatgcctaccggttgtcaatctcgtg

SEQ ID NO: 6661 - DNA, 431 bp, Glycine max
aacaaagtaagagttcactcaatctcactgtgttgtgagttgtgtgtgagcaccaaccaacaatggtgtctctgactccgttatgtttctttattaccttgttgatcgctggtgcagacgcagcggcggagccccaaacggtgcgttttgacaccggggggttgagcagagacacctttcccaaaggattcttattcggaacggccacgtctgcgtaccaagtggagggtatggcccacaaagacggtcgcggcccaagcatttgggacgtcttcatcaaaaaacccgggattgtcgcaaataatggcacgggagaagtttctgttgatcagtaccatcgctacaaagaagatatagatctcatggccagcctgaattttgatgcctaccggttctcaatctcgtggtccagaaattttccaaatggaact

SEQ ID NO: 6662 - DNA, 392 bp, Glycine max
cccacgcgtccgcgctttctttaaccattattgattaaaatattttctatacatttcgataactgtctcttttggtttggtttatatgaacattgaagatgcaaagaacggagtgcctattggtccaagggcttattcttattggctttacaacgtaccatggggcatgtacaaatcattgatgtacataaaggaacgttatggaaacccaactgtgttcttatccgaaaatggcatggatgatccgggtaacgtgactcttcccaagggtttgcatgacaccacaaggataaactattacaaaggctatttgactcaactaaagaaggcagttgatgatggagctaatgtggttggatactttgcatggtcattgctggataactttgaat

SEQ ID NO: 6663 - DNA, 367 bp, Glycine max
cccacgcgtgcgcgctttctttaaccattatggtttaaaatattttctatacatttcgataactggtctcttttggattggcttatctgaacattgaacatgcaaagaacggagtgcctattgctccaagggcttattcttattggctatacaacgtaccatggggcatgtacaaatcattgatgtacataaaggaacgttatggaaacccaactgagatcttatccgaaaatggcatggatgatccgtataacgtgactcttaccaagggtttgcatgacaccacaaggataaactattacaaaggctatttgactcaactaaactaggcaattgatgattgagctaatgttggttggatactttg

SEQ ID NO: 6664 - DNA, 399 bp, Glycine max
gtttaatgaacctcgtgtggtggctgctcttggctatgataatggtttctttgcccgtggaaggtgctcaaaagaatatgggaattgtacagctggcaactcaggcactgagccttacattgttgcccacaatttgatattgtcacatgcagctgctgttcaaagataccgagagaagtatcaagaaaagcaaaagggaaggattgggatcctcttggattttgtttggtatgagcctcttacaagatcaaaggccgacaatttagcagctcaaagagccagagactttcatgttggatggttcattcatccccttgtttatggagagtatccaacaaccattcaaaatattgttgggaatagactccccaaattcactagtgaagaagttaaaatcgt

SEQ ID NO: 6665 - DNA, 382 bp, Glycine max
cacgcgtccggacggttacaacctccccatgatcgtggagccacagggcggaaccggcgccggaaactgcaccgccacggggtgcgtggtggatttaaacacgccgtgcccggcggagctgatggtgatgagcagcggagagggcgtggcgtgcaaaagcgcgtgcgaagctttcgacgatccacagtactgctgtagtggcgcttacgcgacgcctgacacatgcaaacccagttcatactcgcagttctttaagagcgcgtgcccacgcgcttatagttacgcttatgacgatggctccagcaccttcacttgcgccacagcggattataccatcactttctgcccacaaccattcactagttcgattaaatcgggaaat

SEQ ID NO: 6666 - DNA, 441 bp, Glycine max
cgttatcgtctcttcctcaaactctgaaccttccgtgcagcgcagagctttgctggcatacccgccgtgacgaaattaaccgctctacgtaacagcacacagcgatttccccaaatcatcgaaaccctaactcgcgattcccaatcgaaaccctaactcgggatggcgattttgctgggcgaaattcttcaatcgctggagctgtggctgaagctgatcaagaacccgcagccgcagccctacgtaaaccctaatctggaccccgttttgctggtgcccggtgtcggtggctcgatgctgcacgccgttgacgaaaccgactgaagccatgaacgcgtctgggttcgcttcctcaacgccgagtacacgctgaagaccaagctttggtcgcgttacgatccttgcaccggtaggacctagctttcgttttacgaaattaaa

SEQ ID NO: 6667 - DNA, 364 bp, Glycine max
atcgtctcttcctcaaactctgaacctttcgtgcagcgcagagctttgctggcataccgaccgtgacgaaattaacgtctctacgtaacagcacacagcgatttccccaaatcatcgaaaccctaactcgcgattcccaatcgaaaccctaactcgggatggcgattttgctgggcgaaattcttcaatcgctggagctgtggctgaagctgatcaagaacccgcagccgcagccctacgtaaaccctaatctggaccccgttttgctggtgcccggtgtcggtggctcgatgctgcacgccgttgacgaaaccgacggaagccatgaacgcgtctgggttcgctttctcaacgccgagtacac

SEQ ID NO: 6668 - DNA, 386 bp, Glycine max
ctctttctctctctctctatcttcaatttcgagaagtagctccagtattatatggcggccttcagagcattctggaacagtccagttggtcccaaaacaactcacttttggggacctattgccaactggggatttgtagcagctggattggctgacctgaacaaacctccagaaatgatctctggcaacatgacaggagcaatgtgtgtctattcagcattgttcatgagatttgcatggatggttcagccacgcaactatctactttttgcttgccatgcctcaaatgagactgttcaactctatcatttttcccgatgggcaaaggcacaggggcttctgtcggaaaagaaggaagaagcttcatcccagtgatttgatgatgc

SEQ ID NO: 6669 - DNA, 436 bp, Glycine max
ggaaaatgaacacacattggaaaaaattaagttagagaaagataaggagccgccaaagcctgagtataaagaaatacagcacaccgatcaaaaccatacagagaaacctgaagataagattactgtcgaaaatctagaaaatagagcacaaggaggggctgagccaatggagatctcccagagccccatgtcgtcgcctgatgatactccatgtggttatgtaaaacttttgaaaggtcatacatcagaggtttttgcttgtgcatggaatccatcagctccacttcttgcatctgggtctggagattcaacagctcgaatttggaaaattgctgatggagcttgtgactctagtgtgcaaaatgaaccagtaaatgttgtggtgctgcagcacttcaaagaaagcaccaatgaaaaaagcacggatgtgacaaca

SEQ ID NO: 6670 - DNA, 440 bp, Glycine max
caagctactagaacaccgtttgctttgctctcccttcattttgcaaaacctctgggtatcgaactctgcagccatgggaagtttggaagttgaatcaacaaatggtcacacctcaagtcctcacaaaaaaactgaaaaatcggagagagagaggagaattgatgagtggcttccaattacttctaaaaggaatggaaaatggtggtattcagctttccacaatgttactgccatggttggagctggtgttctcggtcttccctatgccatgtcagagcttggatggggtccaggtgtaactatacttatcctctcatggatcatcaccctgtacacactatggcaaatggttgagatgcatgaaatggttccaggaaaacggtttgatagataccacgaactgggccagtatgcctttggtgaaaagctaggcctttata

SEQ ID NO: 6671 - DNA, 442 bp, Glycine max
  modified_base (399)..(399): a, c, g, t, unknown, or other
gaaaatactataatatatatcattgtctgtcttttgttttgaaccattttctgcctataagtactcatacattcgacgtttttcaaaggtgagagccaccctttttctcttacaagctactagaacaccgtttgctttgctctcccttcattttgcaaaacctctgggtatctaactctgcagccatgggaagtttggaagttgaatcaacaaatggtcacacctcaagtcctcacaaaaaaactgaaaaatcggagagagagaggagaattgatgagtggcttccaattacttctaaaaggaatggaaaatggtggtattcagctttccacaatgttactgccatggttggagctggtgttctcggtcttccctatgccatgtcagagcttggatggngtccaggtgtaactatacttatcctctcatggatcatcaccct

SEQ ID NO: 6672 - DNA, 446 bp, Glycine max
ccgggcaaaacacgattctctgatttcattttttctcactacaaaaccacactcactctcctcctctcgcctctttccttgtttctttcgcgcattctcctaaattcctccaaaaaccctaacactctctcattctcagtttttctcaatcttatgattaatggaagaccacgcgcatgctgcactacctcccggttaccggttctacccttccgaagaggttctcgtcggttactacttaaccaagaagaacgagaaccgggaggagggtttctacggttctgatttgatcagagaacttgacctctacgatcacgatcccttcgaattaccggacgctgctgcttgcttttcgtacggttacaaagggaggaagaagcattggttctgttacgctaaagagaccaaacgcagaaacagaagaaaggtgaaaagcgggttctggc

SEQ ID NO: 6673 - DNA, 437 bp, Glycine max
ggcaatgcaaatggcagcgaatatggttgtcttggagcgtgcttgtgattttttctttcgccatgctgcacaactttcaggtgttcccttgagaatggtggagagaagcagaaggcagttccctcttagaaaagcccgtgatgctgcagaagacatgctctctgggctactcaaagccaaggttgatggattcatgacattgatcgaaaatgtaaattggatgtgtgacgaggcacctcagagtggaaatgaatatgtaaacgaggtcataatttatttggaaattttggtttcaactgctcaacagatattgccatctcaagtccttaagagagttttacaggaggtttttgctcacatatcggagaagatagttgggactttagttagtgattctgttaagaggtttaatgtgaatgctattaatggaattgaag

SEQ ID NO: 6674 - DNA, 332 bp, Glycine max
accatgttgggcaagtggagtcaacttatagatcacgggacaagccatatgggcattggggatgctgatagaaatgctgtatcactaacaacaactgtaaacaatcattatggagccgggtttaactctacttctactggtatcttgggcaacaatgagatggatgacttctctacttccactgatatatcccctgataaactaccttcagattcagcaaattttattgaaccaaacagaagaccattgtcttccatgactcctcttatcatcacaaaggatgaccagttagttgcggtacttggatggagctgtggaatgaacattattgc

SEQ ID NO: 6675 - DNA, 441 bp, Glycine max
atccactggaatgattggtctagtttcatccaattccaaggacaagaagaagacacagccggtcaagcaatctgatacaaagagaacgagaagagataggggagagctggaggatataatgttcaagctatttgaaagacagcctaattgggccttgaaacagctcgttcaagagacagatcagcctgcacaattcttgaaagagattctgaacgaactttgtgtttacaataaaagaggtgccaatcaaggaacttacgagctgatgcctgagtacaagaaatctgttgaagatacgagcgccgaataagtgctatgttctttacattatactcttaactctaccgaggcacagaccctccataaatatacgctgatggaagaaagaatcttgggacatcaaacaagatgcaaactttgtatctgaaccgtgaagaatac

SEQ ID NO: 6676 - DNA, 357 bp, Glycine max
  modified_base (40)..(40): a, c, g, t, unknown, or other
  modified_base (331)..(331): a, c, g, t, unknown, or other
aaccaagcgtccgcccacgcgtccggaaagggagtccaangaagcatttagagatagccataagaaggtaagagacagccatgatggtctcatcatttaccgcaacatggcgcttttcttctcgggtggagacaggaaagagttgaagctacgagtaacaggaaggatatggaaagaacagcaaaaccctgaaggtggagtgtgcatacccaacctgtgtagctaggttgattgcatattctcttgattgctatttcttgctgtagataatttgagaagtgttaatctttgactggtgaatggttatggggatatttcaacttccaaacanaataaaaaaactgagttcctaacaaa

SEQ ID NO: 6677 - DNA, 429 bp, Glycine max
cccacgcgtccgcccacgcgtccgcaacaacacttgaaagttgaaacagaaaaacaccaatccctcatcgtactgttccgttatcaattctcgtgtttaaggacacaatttgcttgatacattttcaagttttcatctccatgttttgattttgaagaataaggagtatgcaattgactactacagatatggttttactataagtggcctgtatatggttttgggtcttgcaagtgtaagcagtatggaggatattcaattggatatcagttgggacgatgctgtctgtcccatatgcttggattttcctcataacagtgttctccttcggtgttcattttatgataaaggatgtcgtgcttttgtttgtgacacaaatcaattgcactctaattgtttggatcgctttaaaaattcatgtggcatgcc

SEQ ID NO: 6678 - DNA, 375 bp, Glycine max
gctccaatacaatcatcaaaatgtgcccttccgcctcccatttccgaccggcattccacgtcctcgacgccgaccacgacggcaaaatcagccacgacgacctccgcgccttctacgccggagtcggcggagaaggagacgacgtgatcggggcaatgatgacgctggccgacaccaacaaggacgggttcgtggagtacgaggagttcgagcgcgtggtcgcggcggagagaaaacccgtggggtgtggggccatggaggacgtgttcagggtcatggacaaggacggcgacggcaagctcagccaccgcgacctgaagacttacatggcctgggctggcttttcggccaccgacgacgacatcaacgccatga

SEQ ID NO: 6679 - DNA, 262 bp, Glycine max
  modified_base (149)..(149): a, c, g, t, unknown, or other
ccaatacaatcatcaaaatgtgcccttccgcctcccatttccgaccggcattccacgtcgtcgacgccgaccacgacggcaaaatcagccacgacgacctccgcgccttctacgccggagtcggcggagaaggagacgacgtgatcggngcaatgatgacgctggccgacaccaacaaggacgggttcgtggagtacgaggaggtcgagcgcgtggtcgcggcggaaagaaaacccgtggggtgtggggccatggaggacgt

SEQ ID NO: 6680 - DNA, 414 bp, Glycine max
  modified_base (323)..(323): a, c, g, t, unknown, or other
  modified_base (374)..(374): a, c, g, t, unknown, or other
gctgttcctacaatcattccaaatgtgcccttccggtcgcaccctcctcccttcctcggtctcggatttccgaccggcattggacgtcctcgatgccgaccgcgacggcaaaatcagccgcgacgacctccgcgccttctacgccggagtcggcggcggaggagatgacgtgatcggggcaatgatgacagtggctgacaccaataaggacgggttcgtggagtacgaggagttcgagcgcgtggtctcggcggagagaaagcccgtggggtactgtggggccatggaggacgtgttcaaggtcatggacaaggacggcgacngcaagctcaaccaccatgatctgaagacttacatggcctgcgcttgttttncggccaccgacaacgacatcaacgccatgatccgattcgg

SEQ ID NO: 6681 - DNA, 340 bp, Glycine max
  modified_base (93)..(93): a, c, g, t, unknown, or other
  modified_base (99)..(99): a, c, g, t, unknown, or other
ggcggatcctgcaatcattccaaatgtgcccttcctgtcgcaccctcctcccttcctcggtctccgatttcctaccggcattggacgtcctcnatgccnaccgcgacggcaaaatcagccgcgacgacctccgcgccttctacgccggagtcggcggcggaggagatgacttgatcggggcaatgatgacagtggctgacaccaataaggacgggttcgtggagtacgaggagttcgagcgcgtggtctcggcggagagaaagcccgtggggtactgtggggccatggaagacgtgttcaaggtcatggacaaggacggccactgcaagctcaaccacca

SEQ ID NO: 6682 - DNA, 421 bp, Glycine max
cccacgcgtccgcccacgcgtccgggaaaagaaggagatgcaactccttttacagatgttactgtggacaatatcagtaaagctctacacaaatgtgggtaccaaatgcgtggttttgagactatgtacaatggtcatacagggagacgtctaagtgcaatgattttccttggccctacatattaccaaagactgaagcatatggttgacgacaagatccattctcgtggaaggggtcctgtgcagatcctcactaggcaacctgctgagggacgctcacgagatggaggtctccgatttggagagatggaacgagattgcatgatagctcatggagctgctcacttcttaaaggaaaggttgtttgatcaaagtgatgcatacagggtccatgtatgtgagcgttgtgggttgatagcta

SEQ ID NO: 6683 - DNA, 433 bp, Glycine max
  modified_base (356)..(356): a, c, g, t, unknown, or other
ctgaccttcctcaaactgaagaaattagagatgttttggacacatttcatgtcatagcagaactaccaccagacaactttggagcctatatcatatcaatggcaactgcaccatctgatgtgcttgcagttgagcttctacaacgtgaatgtcacatcaagcatcccttaagagttgtgccattgtttgagaagctagctgatctagaggctgctcctgctgctctggcacggttggtctcgatagactggtacagaaataggatcaatgggaagcaagaagtgatgattggatactcagattcagggaaagatgctgggaggttctctgcagcatggcagctatataaggctcangaggaacttataaatgttgccaagaaatttggtgttaagctaaccatgttccatggtcgcggtggaactgttggaag

SEQ ID NO: 6684 - DNA, 284 bp, Glycine max
tgcatacgatcatgaacacaagctgagtcaaaaaggtagcaccaacgtcaaagaggaagaggtttctgtggagagggagttccagcaccttctggtgccatcatggaggaaccaattgacagagagagcctttgtggtcagctttgcactcagcatactcttcagcttcattgtgatgaagctcaacctcaccactggtattattccttcactcaatgtctctgctggccttatggggttcttctttgtgaagacatggaccaagttcttggaaaaatctaaca

SEQ ID NO: 6685 - DNA, 457 bp, Glycine max
cccacgcgtccgctcggtttccttactaattactttaacccaataatccaatagctacgtacaaagttgaacaataccaccatcatagcgcatcatcatcagaattccaaggggaattgttgatgtggtggtgagaatgatgtatggggagtagaactaccaggagggttgttagtgttgaagatgacaagggagctgaaagaggaatgccgagcttcaattctgagttacccaattccaattcatgctatacagaggggaacacaattgattcttttcgtgtttctgactttggagcatttgatcagtcatatcacatagaggatgctgttgacctcagtggaaacccagtttacaattcactaaaggtaatagccaaacaatttctccgggttctgttcacattagtagccttggtcaggtgagtttttctagttattttcatccaatgaacttc

SEQ ID NO: 6686 - DNA, 424 bp, Glycine max
ccttatgcacatcttcatgcttgttttgttacatatttattatttatatacttatatatggatgatccatagaaataatataaaaaattatgtgatcaataattttatttaccattttttccctttctctttgtgcatgttatccctcactggatccacaacagaaggttgtgttaaaggttatgactatgactgatgacaaaacaaagcaaaaggctatagaagcagctgcagatatctatggggttgattcaattgttgctgatgtgaaggagcagaagttgactgtgattggtcaaatggacacagtgaaaatagtgaagaagctgaagaaagtaggaaaagtggatatagtatcagttggacctgccaaagaagagaagaaggaagaaaagaaagaggagaaaaaggaagaaaaaaaaga

SEQ ID NO: 6687 - DNA, 355 bp, Glycine max
catgcattgaatatattccacaaggggaaatccagtagaagagatacatcaaaattggaagatcaagctgtaaaatctgagaagcaaatagaggagggaactgctatgaaaccagaagcaaagtctgaaaatgccgctcctgtaaaaaaggctgaagcagaaacattaagttcagtgggaaagacagatggtgaaaaatcagttcctgcacccaaagccgctgaagttcctcctgataatgagtttgagaagcgaataaggcccgaggtaatactagcaaatgagattgatgtcacattctctgatattggtgccttagatgagaccaaagaatcccttcaagatctagtaatgc

SEQ ID NO: 6688 - DNA, 384 bp, Glycine max
cccacgcgtccgcccacgcgtccgccgggaaaaccgtttacggccctatttctccaaccggccaccgacctgtctacaaggcaaatggtctgcaagcctattttgtcaccttgattacttattttgctctctggtggtttgggatattcaaccctacgattgtttatcatcatttgggagaaatttattcagctctcatcttcggcagctttctcttctgtgttttcttgtacatcaagggtcatttggcaccgtcttctacagattctggctcatctggaaacttaatcattgatttttactgggggatggaactttatccacgcattggaaaacattttgacataaaagtcttcacaaactgcagatttggaatgatgtcat

SEQ ID NO: 6689 - DNA, 406 bp, Glycine max
ttcacttgcaaaatggttgccttctctttccgaaggcctggttttcctttgccatggttatggtatggaatgcagtggcttcatgagagaatgtggtgtacggctagcgtgtgccaaatatgctgtgttcggtatggattatgaagggcatggacgttctgaaggtgctcgttgttacataaaaaaatttgataacatcgttaacgattgttatgactttttcaagtcagtcagcggtatggatccaaataatttaaattctcaactctattgaaacctgagatattttggcaaaactttatggctcataattcatttgcatatttcagagcttgcagagtataaggcaaaggctagattcttgtatggagagtccatgggaggagcagtgagccttcttttacat

SEQ ID NO: 6690 - DNA, 340 bp, Glycine max
agaaaatggtaaggtaaggtaagatcgatagcagaaaaggaaaaaatgacgatggacgatgatagcgccatatatgtagggggtcttccctacgactccaccgaagaaaccattcgcaccgtcttcaatttgtatggcgctatccttgatgttaagataatcaacgacccacgcaccaggggcaagtgctattgttttgttactttcacaaatcctaggtctgcaattgatgccatcaacgacatgaatggcagaaccattgactgccgtgtggttaaagttaacggggtgaggactcgtgggggcaggtcaaattttggccgagaacgttattactatc

SEQ ID NO: 6691 - DNA, 426 bp, Glycine max
  modified_base (393)..(393): a, c, g, t, unknown, or other
caatatcaagactctagattcccgcatttacagttttcaagtggacaaaaagatgccggtctcgttgttcaaagagaaaattgcaaatgaaattggtgttccagttaatcagcaacggctgatatttagaggaaaagtcttaaaggatgagcacgctctttctgagtattatgttgagaatgggcatacattgcatttagttgaaagacaaccaaatcagtcgcaggcttctggtacgagttctggtgagtcaactggtacaagtggtaaccgaggaaatgatgtaggctcaggggctcctcgtaatcatgttgggcaaatttcacacagtgttgttcttggaacatttaatgtgggcgaacaaggtgaatgaattgttcatgatctcactcnggttattgggcatgttttaaactctattggaaa

SEQ ID NO: 6692 - DNA, 347 bp, Glycine max
acgcgtcaacgcgtgatcaacccttacggctccgcagcttacaactttgtcaccatgggcgcttacagaggtggcctcgacacgttcgctatcataggcatcgcttcgaagcctcttcatgtctacgccaaacccacctacgagtgcgcgtggttctcactcgccggcgacaagaaaaaactttccaccaccgtcggttacaagatcctccccgactggggctacggccgcgtctacaccgtagttatcgtgaactgcacattcccgattcccgtaaacgccgacaactcaggcgggaagctcgtcctctttgcctccacctccggccgcggtggtggataacgtac

SEQ ID NO: 6693 - DNA, 437 bp, Glycine max
  modified_base (377)..(377): a, c, g, t, unknown, or other
  modified_base (422)..(422): a, c, g, t, unknown, or other
ctaaatagtgaattctttaccacagagccttatgcttgtgaaccatcaagtttgccagggtatcctcccagcaaagaattggatgtaaaactgagagatgaagaagcaagaaggcaaaaggctctaaatgggaaagctagtgcagttgatggtgcaaaaaaagtcagagtacgtgagcgtgaacgtggtcgggctgttccagcccctgaagccaacgcagagatccaaacaaacttagataggtggagagttgtgacccatgcaaatgcaaaaagcaagagtgagaaatttccacctcctcatcaagatggagctgttggatacccacaagatgcatcaaataaaggacctgtttcatttggcgccccagacacttncttctcttcagggatatttaattcaaaaccttctggacatgttangaatcatgctgctgc

SEQ ID NO: 6694 - DNA, 151 bp, Glycine max
attcccgcacaagcatacctagcatatgggctgtgggtgatgtcacaaaccgaatgaatgtaactccggtggccttgatggaagcatcgtactttgctaaaactggatttggtgggcaaacaatcaagccagactacagtaatattcccta

SEQ ID NO: 6695 - DNA, 431 bp, Glycine max
aattactgctattacgagacgacgcagatttagttcggattgttcgattgcgatggctaggaaagatgcttatcgatggtgaagctgaattggctcaaggtggtggagaagaagtgtcgaattttgacttcgacttgtttattattggggctggaagtggtggcgttcgtgccgctagattttcatccaattttggagctaaggtggggatttgtgagcttccatttcatccaattagttcagaaacaattggaggagtcggtggaacgtgtgttattcgtggttgtgttcccaaaaagattttggtctatggagcatcttttggaggtgatcttgaggatgccaggaattatgggtgggagttgagttgagaaaaagttgacttcaattggaagaagctcttgcaaaagaagacagatgaaataaacaga

SEQ ID NO: 6696 - DNA, 325 bp, Glycine max
gctattacgagacgacgcagatttagttcggattgttcgattgcgatggctaggaagatgcttatcgatggtgaagctgaattggctcaaggtggtggagaagaagtgtcgaattttgacttcgacttgtttattattggggctggaagtggtggcgttcgtgccgctagattttcatccaattttggagctaaggtggggatttgtgagcttccatttcatccaattagttcagaaacaattggaggagtcggtggaacgtgtgttattcgtggttgtgttcccaaaaagattttggtctatggagcatctttgggaggtgatc

SEQ ID NO: 6697 - DNA, 393 bp, Glycine max
cgcagaccgaggcgtttccagttcgaaagggaaatgaaagtgtctttgttggtgaagggtaggtgagagaaacgaaaggggtgtgtgttgggttgaataggtatagataggatcaatgagcaacaacaacgcaggaaaggtggtgtgtgtgacgggtgcttctggtttcatagcttcatggatcgtcaaattccttctccaacgtggttacactgtcagggccaccgttcgctacccaagtaatctgaaaaaggtagatcacttggttaaacttgagggcgcaaaagagaggttgcagctgtttaaggcaaatctgttggaagaaggttcctttgactctgttgtggaaggctgtcatggtgtttttcatactgcttcacctgtccgttttgt

SEQ ID NO: 6698 - DNA, 272 bp, Glycine max
  modified_base (101)..(101): a, c, g, t, unknown, or other
  modified_base (130)..(130): a, c, g, t, unknown, or other
  modified_base (256)..(256): a, c, g, t, unknown, or other
ccaaaaaaccctaattattattattaaacatgaggccgattctgatgaaaggccacgagaggccactgacgttcctcaagtacaacagggacggcgatctncttttcttctgcgccaaggaccacaaccncaccgtctggttcgccgacaacggcgaacgcctcggcacctaccgcggccacaacggcgccgtttggtgctgcgacgtctcaagagattcgggtcggctcataacgggaagtgcggatcagaccgncaagctatggaacgtg

SEQ ID NO: 6699 - DNA, 403 bp, Glycine max
aagcaacaatggtgccgcaacccattttgcatctaacccttttgtcattaataatctctctgaccactctttccttggtcgatgccgccgatcccacatttggcttcacccctcttggattatctagtagctcaaacttgcaaatccaaaagccttacgacgttgcagtcaacgagcgctacagcttttcaaatggagtgcacagattttgggtatactccacggacaagcctcatatgcaaggcagcaatacgaagccacgaactgagattcgtatcgctggatacgattatacatccggtgtgtggcaatttcaagggtttttttacgtgcctagtggcacaagcggggtgtgcatccagcaagtgtttggtggagtaacttctgccacaacctcgcagac

SEQ ID NO: 6700 - DNA, 380 bp, Glycine max
agagccttactacgttgcagtcaacgagcgctacagcttttcaaatggagtgcacagattttgggtatactccacggacaagcctcatatgcaaggcagcaatacgaagccacgaactgagattcgtatcgctggatacgattatacatccggtgtgtggcaatttcaagggtttttttacgtgcctagtggcacaagcggggtgtgcatccagcaagtgtttggtggagtaacttctgccacaacctcgcagactagggtctatggtggttctctcactcattaccaatcacctagtctggaaccaatcatctataataggtggattcggtttaacgtgatccatgatgtgggtgccaacaatgtgaagatttttccta

SEQ ID NO: 6701 - DNA, 450 bp, Glycine max
tcgggtgccgcaacccattttgcatctaacccttttgtcattaataatctctctgaccactgtttccttggtcgatgccgccgatcccacatttggcttcacccctcttggattatctagtagctcaaacttgcaaatccaaaagccttacgacgttgcagtcaacgagcgctacagcttttcaaatggagtgcacagattttgggtatactccacggacaagcctcatatgcaaggcagcaatacgaagccacgaactgagattcgtatcgctggatacgattatacatccggtgtgtggcaatttcaagggtttttttacgtgcctagtggcacaagcggggtgtgcatccagcaagtgtttggtggagtaacttctgccacaacctcgcagactagggtctatggtggttctctcactcattaccaatcacctactctggaaccaaa

SEQ ID NO: 6702 - DNA, 351 bp, Glycine max
cttggaactgcaacaatggtgccgcaacccattttgcatctaacccttttgtcaggaatggtctctctgaccactctttccttggtcgatgccgccgatcccacatttggcttcacccctcttggattatctagtagctcaaacttgcaaatccaaaagccttacgacgttgcagtcaacgagcgctacagcttttcaaatggagtgcacagattttgggtatactccacggacaagcctcatatgcaaggcagcaatacgaagccacgaactgagattcgtatcgctggatacgattatacatccggtgtgtggcaatttcaagggtttatttacgtgcctagtggcaca

SEQ ID NO: 6703 - DNA, 367 bp, Glycine max
cttcttggaactgcaacaatggtgccgcaacccattttgcatctaacccttttgtcattaataatctctctggaccactctttccttggtcgatgccgccgatcccacatttggcttcacccctcttggattatctagtagctcaaacttgcaaatccaaaagccttacgacgttgcagtcaacgagcgctacagcttttcaaatggagtgcacagattttgggtatactccacggacaagcctcatatgcaaggcagcaatacgaagccacgaactgagattcgtatcgctggatacgattatacattcggtgtgtggcaatttcaaaggtttttttacgtgcctagtggcacaaagcgggtgtgc

SEQ ID NO: 6704 - DNA, 359 bp, Glycine max
  modified_base (301)..(301): a, c, g, t, unknown, or other
gaactgcaacaatggtgccgcaacccattttgcatctaacccttttgtcattaataatgtctctgagcactctttccttggtcgatgccgccgatcccacatttggcttcacccctcttggattatctagtagctcaaacttgcaaatccaaaagccttacgacgttgcagtcaacgagcgctacagcttttcaaatggagtgcacagattttgggtatactccacggacaagcctcatatgcaaggcagcaatacgaagccacgaactgagattcgtatcgctggatacgattatacatncggtgtgtggcaatttcaagggtttttttacgtgcctagtggcacaagcggggtgtgc

SEQ ID NO: 6705 - DNA, 336 bp, Glycine max
cttggaactgcaacaatggtgccgcaacccattttgcatctaacccttttggcattgataatctctctgaccactctttccttggtcgatgccggcgatcccacatttggcttcacccctcttggattatctagtagctcaaacttgcaaatccaaaagccttacgacgttgcagtcaacgagcgctacagcttttcaaatggagtgcacagattttgggtatactccacggacaagcctcatatgcaaggcagcaataccaaagccacgaactgagattcgtatcgctggatacgattatacattcggtgtgtggcaatttcaagggttttttta

SEQ ID NO: 6706 - DNA, 429 bp, Glycine max
cttttgtcattaataatctctctgaccactctttccttggtcgatgccgccgatcccacgtttggctgcacccctcttggattatctagtagctcaaacttgcaaatccaaaagccttacgacgttgcagtcaacgagcgctacagcttttcaaatggagtgcacagattttgggtatactccacggacaagcctcatatgcaaggcagcaatacgaagccacgaactgagattcgtatcgctggatacgattatacatccggtgtgtggcaatttcaagggtttttttacgtgcctagtggcacaagcggggtgtgcatccagcaagtgtttggtggagtaacttctgccacaacctcgcagactagggtctatggtggttctctcactcattaccaatcacctactctggaaccaaacatctataat

SEQ ID NO: 6707 - DNA, 291 bp, Glycine max
tggaactgcaacaatggtgccgcaacccattttgcatctaacccttttgtcattaataatcgctctgaccactctttccttggtcgatgccgccgatcccacatttggcttcacccctcttggattatctagtagctcaaacttgcaaatccaaaagccttacgacgttgcagtcaacgagcgctacagcttttcaaatggagtgcacagattttgggtatactccacggacaagcctcatatgcaaggcagcaatacgaagccacgaactgagattcgtatcgctggata

SEQ ID NO: 6708 - DNA, 452 bp, Glycine max
gcaacccattttgcatctaacccttttgtcattaataatctctctgaccactctttccttgggggatgccgccgatcccacatttggcttcacccctcttggattatctagtagctcaaacttgcaaatccaaaagccttacgacgttgcagtcaacgagcgctacagcttttcaaatggagtgcacagattttgggtatactccacggacaagcctcatatgcaaggcagcaatacgaagccacgaactgagattcgtatcgctggatacgattatacatccggtgtgtggcaatttcaagggtttttttacgtgcctagtggcacaagcggggtgtgcatccagcaagtgtttggtggagtaacttctgccacaacctcgcagactagggtctatggtggttctctcactcattaccaatcacctactctggaaccaaacatctataata

SEQ ID NO: 6709 - DNA, 383 bp, Glycine max
tttgcaactgcaacaatggtgccgcaacccattttgcatctaacccttttgtcattggggatcggtctgaccactctgtccttggtcgatgccgccgatcccacatttggcttcacccctcttggattatctagtagctcaaacttgcaaatccaaaagccttacgacgttgcagtcaacgagcgctacagcttttcaaatggagtgcacagattttgggtatactccacggacaagcctcatatgcaaggcagcaatacgaagccacgaactgagattcgtatcgctggatacgattatacatacggtgtgtggcaatttcaaaggtttttttacgtgcctagtggcacaagcggtgtgtgcatccagcaagtgtttggtgg

SEQ ID NO: 6710 - DNA, 379 bp, Glycine max
caacaatggtgccgcaacccattttgcatttaacctttttgtcattaataatctctcttggcacgctttccttggtcgatgccgccgatcccacatttggcttcacccctcttggattatctagtagctcaaacttgcaaatccaaaagccttacgacgttgcagtcaacgagcgctacagcttttcaaatggagtgcacagattttgggtatactccacggacaagcctcatatgcaaggcagcaatacgaagccacgaactgagattcgtatcgctggatacgattatacatccggtgtgtggcaatttcaagggtttttttacgtgcctagtggcacaagcggtgtgtgcatccaacaagtgtttggtggagtaac

SEQ ID NO: 6711 - DNA, 438 bp, Glycine max
  modified_base (357)..(357): a, c, g, t, unknown, or other
  modified_base (413)..(413): a, c, g, t, unknown, or other
cttggaactgcaacaatggtgccgcaacccattttgcatctaacccttttgtcattaagaatgtctctgaccactctttccttggtcgatgccgccgatcccacatttggcttcacccctcttggattatctagtagctcaaacttgcaaatccaaaagccttacgacgttgcagtcaacgagcgctacagcttttcaaatggagtgcacagattttgggtatactccacggacaagcctcatatgcaaggcagcaatacgaagccacgaactgagattcgtatcgctggatacgattatacatccggtgtgtggcaatttcaagggtttttttacgtgcctagtggcacaagcggngtgtgcatccagcaagtgtttggtggagtaacttctgccacaacctcgcagactanggtctatggtggttctctcactcat

SEQ ID NO: 6712 - DNA, 397 bp, Glycine max
cgggtcggccacgcgtccgaccaagcgtccgtggaagaagctttgaaaatgcgtgaaatgatggaggctaagggattgtaccctggagttgttacttttaattcaattttgcgcaagctgtgccaagatggcaggataagggatgcaaacaaactcttgaatgagatgagtgaaaggaaaattcaagctgacaatatcacatgcaacacactaattaatgcttactgcaagattggagatttgaaatcagctttgaaatttaagaacaagctgttagaagctggtctaaaacctgatccatttacatataaggcactgagtcatgggttctgcaagacgaatgaactagaaagggcaaaggaattaatgttcagcatgcttgatgcctggatttaac

SEQ ID NO: 6713 - DNA, 361 bp, Glycine max
cccacgcgtccgtggaagaagctttgaaaatgcgtgaaatgatggaggctaagggattgtaccctggagttgttacttttaattcaattttgcgcaagctgtgccaagatggcaggataagggatgcaaacaaactcttgaatgagatgagtgaaaggaaaattcaagctgacaatatcacatgcaacacactaattaatgcttactgcaagattggagatttgaaatcagctttgaaatttaagaacaagctgttagaagctggtctaaaacctgatccatttacatataatgcactgattcatgggttctgcaagacgaatgaactataaagggctaaggattttatgtttagcatgct

SEQ ID NO: 6714 - DNA, 427 bp, Glycine max
gggatattttgtttgccaccttctggggtcatccctcttcacaatcaccctggaatgacggttttcagtaagctactttttggcactatgcacatcaagtcatatgattgggtcgttgactcgcctcctgaatctcctacaactctcaaaccatcagaaaaccaaggtcctgagatgaggttagccaaagttaaggttgatgctgatttcactgctccttgcaacccttccatcctttatccagaagatgggggcaacttgcactgtttcacagcagtgacagcatgcgcagttctagatgtgcttggtcctccatattctgatgctgaaggcagacactgcacatactaccacgatttccccttttccaacttttcagtggatggattatccataccagaagaggaaaagaatgcttatgaatggc

SEQ ID NO: 6715 - DNA, 266 bp, Glycine max
attgatgttgtgtgcaacccattggggaagtctggaggtgccctcatccagcaatttatgatattgacttttgggtcactagctaattcaaccccatacttgggaggagtgcttctgctgattggttctgcctggctagcagcggcaaaatccttggatacccaatttactgcattgcgtaaagaggaagaactcgagaaagagatggaacgagcagccgccgtcaagataccagtggtggctgagactgaaagtggaaatgggtc

SEQ ID NO: 6716 - DNA, 415 bp, Glycine max
gcaggaacaaagtaatggttttggaagcagaagaagaagttggcggtggtgagtttgagcatctgcctgaaggttgcatagcgaatataggttcgttcaccactcctccagatgcctgcgttctctctttggtctcttcctccttcagatctgccttagttaccgacttcgtatgggaaaggttcctaccctacgattatcacgctatcatttcccaatcttacaagcactgcactctcaccatttactgttacaagacggacctctacctgcacctatgccataacccgctgctcatagacgctggtgaacagagctttgcactcgactaactgaacggcataatatgctgcatgctctcagccggagtctctcatttgttgggggagacactcccaggacttgaagatggact

SEQ ID NO: 6717 - DNA, 425 bp, Glycine max
ccttcccctacttcatcaccatcaacacatacacctggtgatggattaaatacagcaggcagcatgcagcatgtccaaaagagcatgatgatgtatggtacagaggcaacaggaggccttgcatcatcgtcgaatttgctggacgacatggatcgatttggagatgttgatgctttagatgataatgttgaatcctttctatcaaatgatggcggagatggtgggaatctctatggaacagtgaaacaaagtccagctgagcaacagaaagagtcttctaaaggtttcacctttgctgaagttggttgcagaagaacaaggaacagcaaagttacttgttgtcacttttcttcagatggaaagtggctagccagtgctggagatgacatgaaagttgacatctggaacatggacactttagaaac

SEQ ID NO: 6718 - DNA, 418 bp, Glycine max
ccttcccctacttcatcaccatcaacacatacacctggtgatggattaagtgcagcaggcagcatgcagcatgtccaaaagagcatgatgatgtatggtacagaggcaacaggaggccttgcatcatcgtcgaatttgctggacgacatggatcgatttggagatgttgatgctttagatgataatgttgaatcctttctatcaaatgatggcggagatggtgggaatctctatggaacagtgaaacaaagtccagctgagcaacagaaagagtcttctaaaggtttcacctttgctgaagttggttgcagaagaacaaggaacagcaaagttacttgttgtcacttttcttcagatggaaagtggctagccagtgctggagatgacatgaatgttgacatctggaacatggacactt

SEQ ID NO: 6719 - DNA, 333 bp, Glycine max
gtcccattgtttttcggggctatcacaaagatgaagcccagacgagagatgtcattggtgaagatggatggctacatactggaaatattgggacgtgggtacctggtggtcgtctcaaaattattggtaggaaagaagaatatctttaaattggcacaaagcgagtacattgctcctgagaagattgaaaatgtatacgccaaatgcaaatttgtggcgcaatgctttgtatatggtgatagcctaaattcttctttggtagctgatggctcggtggatcatgataacttgaaagcatgggctgcttcagaagggataatgtataatgatttg

SEQ ID NO: 6720 - DNA, 414 bp, Glycine max
acgattagctttggtcgtcgggtgactgaaggatatggaatgacagagagtacttgtattatgagtttcattgatgagggtgacaaacttggtggtcatgttggctctcctaatctagcctgagagataaaacttgcggatgctccacaaatgaactatacatctgatgatcagcccaatccccgtggtgaaatttgtgtcaggggtcccattgtttttcggggctatcacaaagatgaagcccatacgagagatgtcattgatgaagatggatggctacatactggagatattgggacgtggttacctggtggtcgtctcaaaattattgataggaagaagaatatctttaagttggcacaaggcgagtacattgctcctgagaagattgaaaatgtatacgccaaatgcaaa

SEQ ID NO: 6721 - DNA, 431 bp, Glycine max
cacctcttcctctctcgccccctcagattcaaaagtctttgcgtcgtcaatctcaagagacctgttcccccgctaaaagcatcgatggcggagaccaacaacaacgttgccgtcgaggtcttcgaaaaagaggatcttgccgtgtccctggccaaatacgtcgccgatctctccaacaaattcacttccgaaagaggggctttcactgtctgcttgtctggcggctctttgatcaattatctccggaaacttctggaacctccttatgttgatacccttgaatggtccaaatggcacgtgttttgggtggatgagagagtcgtgcctaagactcacgaagatagcaactacaagcttgctttagatggacttctctccaaggtgccaattcccccgggcaatgtttatgcaatcaatgatgcgctttcagc

SEQ ID NO: 6722 - DNA, 433 bp, Glycine max
gatgaggaagaattgcaacttggagcttcgccttttccctccttccctctgcgatcttggccccatgatggaagcagaagttagtgagagaccccaacaacaggtcgcccaccatcaacagcaacagcaaccacaaccacaacatccgctgaccattttctatgatggcaagatttcagtttcagatgtcacagagcttcaggccagatccatattaatgctagcaaataaagagatggagaaaagagtgatgacaccaacggggtcagaaccatcttcaccaatattactgcaatcacctcataacatgtatagccccggcactggactttacatgaaaagatcactgcagaggtttctccagaagagaaagaatcgtgtgcaagaaacatgcccataccatcacgagctaattaatgttaaattatcaaaa

SEQ ID NO: 6723 - DNA, 411 bp, Glycine max
tgttcgttcctgttatcaaaagacaatgaacggatgaacatgggaagaagtgggtggctttgggtcataagatgcaaataattgattggtatgcccaaactgaacttggccatggatctaatgttcaagggcttgaaacaactgcaacctttgatcccagaacagacgagtttgtaaattataggcccacattgacttcaagcaaatggtggcctggtggattgggtaaagtgtcaacacatgccgtggtttatgcccgactaattactgatggacaagatcatggagtgcatggtttcattgtccaactgcggagcctggatgatcacttaccttttccatgcataactgttggtgatattggaatgaaatttggagatggagcatataactccatggataatgggatgc

SEQ ID NO: 6724 - DNA, 346 bp, Glycine max
cggacgcgtggggggaatgtttgttcctgctatcaaaggacaaggaactgaggaacaggagaagaagtggttgcctttggctcataagatgcaaataattggttgttatgcccaaactgaacttggccatggatctaatgttcaagggcttgaaacaactgcaacctttgatcccagaacagacgagtttgtaattcatagccccacattgacttcaagcaaatggtggcctggtggattgggtaaagtgtcaacacatgccgtggtttatgcccgactaattactgatggccaagatcatggagtgcatggtttcattgtccagctgcggaacctggatgatcac

SEQ ID NO: 6725 - DNA, 390 bp, Glycine max
tgccacattacaacataagaaaccagcttctagtgttgatgctgaaattgtaggtggatcaacgataagttctcaggctatgctgaagcaagaggtttctactgcatcgtcaaagggcactactcttaaagagggtgatcgagtaaaatttgttggtaactttccttctgccgtctcatcactgccaaattatccttcaaggggacctagctatggctcccgaggcaaagttctgcttgcttttgaagataataggtcttcaaaaattggggttaggtttgataaatcaattccagatggcaatgatcttggaggcctttgtgaggaagaccgtgggttcttttgttctgcaaatcatttactacgggtagatggttcttggagggatga

SEQ ID NO: 6726 - DNA, 440 bp, Glycine max
cccacgcgtccgcccacgcgtgcgcccacgcgtccgttccaacattattgagaatgaggctgtttctacttcaaatgtggtcaagtttgaagtgcagctttacaaaacccgggaagaaaagtatctgcttgatcttcaaagggtgcagggtccacagtttcttttcttggatctatgtgctgctttccttgcacagcttcgtgtcctctagagcgaagagcttaggctcaccagagacataaatatgccttgtgtttcatgtgaataagcttacattgtacatacaagtatcttttcggtccaagcttatcctctgttttctacccgtttatctgtgggtaaacattataatgagccaatcccaagtatgggatttgcttcgttaacaatggtgctcgactaggtttcccttctcttgtgattttaattttatcagtgta

SEQ ID NO: 6727 - DNA, 424 bp, Glycine max
gcgatgttttgttcctctttggttcttcgtgcccttcccaatcttcaactttagggttcctgtaatctcgttattcctcttcactcccaaactccgttcactccaacaacactctgatttagaaatggatggaccggctggtcgaggtggtgctggactggacatgtttctgccaaattataaattgggaaaaacacttgggattggatcttttggcaaggtcaaaattgcagaacatgtattgactggccataaggttgcgatcaagattcttaaccgacgcaagataaagaacatggaaatggaagaaaaagtgagaagagaaatcaaaattttaagattattcatgcatcctcacattatacgactttatgaagtcatagaaacttcaactgacatatattttgtcatggagtatgtgaag

SEQ ID NO: 6728 - DNA, 440 bp, Glycine max
acgctttctctctctaaagttgaagctccgtcactgcaacaaaacaagcactcaaagtgcgtcgggttcgtcactgatcacgtttcggcaatgcaccgtgtgggtagtgcgagtaacggaaacaattcaactcgcccgcgcaaggagaagagaataacctacgtgttgaatgattctgatgacacaaagcattgtgcaggcataaattgtctggctctacttacatctgcagcatctgatgggtctgattatctcttcactgggagccgtgatggtaggttaaaacgatgggcactagatgtgaatagagcaacatcatcggctacctttgaatctcatgtcgattgggttaatgatgctgctcttgttggtgatagcacacttggttcttgttcttcagatacaacccttaagacatggaatgcccttgtctttggaac

SEQ ID NO: 6729 - DNA, 417 bp, Glycine max
tcgcccacgcgttcgctttggtttgctcaaccgatctccgcagcaatggtgaacgtggcggagacaaagaagacctactgcaagagcaaggagtgcaggaagcacacgctccacaaggtcacccaatacaagaagggcaaggacagcatcgccgctcagggaaaacgccgttatgaccgcaaacagtccggttacggtggccagaccaagcccgttttccacaaaaaggcgaaaaccaccaagaaaattgtgttgaggctccagtgccaaggatgcaagcatgtctcgcagcacgctatcaagaggtgcaagcactttgagatcggtggtgacaagaagggaaaaggaacatctctcttctagatggaatattagaatttgcaatttcacacactctgtgtacttttctcagtttga

SEQ ID NO: 6730 - DNA, 402 bp, Glycine max
cgacccacacgtacgcccacgcgtccgggcagaacaaaaccgagcgagttgttgtgactgactcagtgagtgagcgagcgagcgagttactcatggcgaacgcggcgcttcggaacgtgaaggtgctcccgaactcggcgaatatggaggaagcgcgtcaccgagtcttcgaattcttcagaacggcctgcagatcgctaccttccgttatggaaatctacaacctctacgacgtcgtttccgtctccgaactccgctcctccgtcgcctcccagatccgcaacaacatccacgtcaccgatcccaaagtgatcgatatgctgcttttcaaggggatggaagagctgaagaatgttgtggaccattcaaagcagaggcatcatattattggtcagtacgtag

SEQ ID NO: 6731 - DNA, 410 bp, Glycine max
gctggggctatagagtttattatatgccatgcagaggtctcaattgcatttgcagaagaaaagaaaatacctgagctattgaagacatttccaaatgcaacaaagtatctcaagacaattgtaagcttcggaaaggttacccctgaacaaaagcaagaagttgaaaattctgggttggaaatatattcatgggatgaattcttacaagtgggtcaaaatcagagttttgatcttcctattaagaaaaggagtgacatctgtacaataatgtatactagtggaactactggtgaccccaagggagtgttgatatcaaatgagagtattattactctcttagctggggttaagcgactgttggagagtgtaaatgaacaattgactgagaaggatgtatacatatcatacct

SEQ ID NO: 6732 - DNA, 398 bp, Glycine max
  modified_base (203)..(203): a, c, g, t, unknown, or other
  modified_base (301)..(301): a, c, g, t, unknown, or other
ccaagccttcggacctgccggacggcttagcctcgggtgcatgattcaatggaccagccttggaaaggtggttgtggggggcctattccgctgcccttttcctggtcctattcctcggcttgaagttggttttccaaagcagaaaattgagaaacataccaccaggtcctcctccttttcccataataggaaaccttaacctnctcgaacagccaatccaccgtttcttccaacgcatgtcgaaacagtacggcaacgtggtttccctctggttcggttcacgtctggccgttgtcatctnctctccaacagcataccaagaatgcttcaccaaacacgacgttgcctttgccaaccggctaccttctctctcgggaaaatacatcttctacaacaca

SEQ ID NO: 6733 - DNA, 381 bp, Glycine max
cccacgcgtccgaataggtaaccttaacctcctcgaacaacctattcaccgtgtcttccaacgcatgtccaaagaatatggaaacatcgtttccctttggttcggttcacgtctcgccgttgtcatttcctcaccaacagcataccaagaatgcttcaccaaacacgacgttgccttggccaaccggctaccttctctctcgggaaaatacatattctacaacaacaccaccgtagggtcctgctcccacggggagcactggcggaacctccgccgcatcaccgccctggacgtcctctccacgcagcgagtccactctttctccggaatccgaagcgacgagacgaaaaggttggtacagaggttgctggccaagaactt

SEQ ID NO: 6734 - DNA, 437 bp, Glycine max
  modified_base (409)..(409): a, c, g, t, unknown, or other
cactatcacacacatagttctcttatctggtgcaagtgcaacaatcaagtactgatcggcatgggaatgttgttgttgttgttgtcttattctctccttttcctggttctattccttacactgaaatcccttttccaaagcagaaaattgagaaacctaccaccaggtcctcctcctcttcccataataggtaaccttaacctcctcgaacaacctattcaccgtttcttccaacgcatgtccaaagaatatggaaacatcgtttccctttggttcggttcacgtctcgccgttgtcatttcctcaccaactgcataccaagaatgcttcaccaaacacgacgttgccttggccaaccggctaccttctctctcgggaaaatacatattctacaacaacaccaccgtanggtcctgctcccacgggcagcactggcg

SEQ ID NO: 6735 - DNA, 309 bp, Glycine max
acgcgtacacccacgcgtccgggaactttgttactctcacacatgtctcgctccgtgcctttggtttcaaccatttttgtcttgcttctgcttctggtggccactgagatgatggggccagcaatggtggcataagcaagaacttgtgagtctcacagccaccgtttcaaggggccatgtttgagtgacaccaactgtggctctgtttgccgaaccgagcgtttcacgggaggacactgccgtggcttccgtcgcagatgcttctgcaccagacattgtgaattttaggaggtgggttaggagtgcgtt

SEQ ID NO: 6736 - DNA, 408 bp, Glycine max
ggttgctgcatggaaagacaaggatggagactggtacgagacaggcctacacgtcttggttggggcttaccctaatgtgcagaacctttttggagaacttggcattaatgatcggttacaatggaaagagcattctatgatttttgctatgccaaataagcctggagagtttagtcgatttgattttcctgaagttcttccctccccattgaatggaatatgggcaatattgaggaacaatgagatgcttacatggccagagaaagtaaaatttgcaattgggcttctcccagctatgcttggcggacagccatatgttgaggctcaagatggtctttctgttcaagaatggatgaaaaaagcaggcgtacctgaacgggtaactgatgaggtgttcatagcaatgtc

SEQ ID NO: 6737 - DNA, 471 bp, Glycine max
cccacgcgtccgcggtctcgtgggtgaaaattgcgaggatctttcttctctccaccatggtggggttgtgtttgcgtgtctctccgtaaattgccttcgactgtgacaacacgcaccgatcgccatgaacatcttcaccaagaaacccaccgtcaaagaggctcttcgtgagagtaaacgtgaaatgacaaacgccagtagaggtatagagaaggaaattggagctctacaatcggaagaaaaaaagcttgttgctgagataaagagaactgctaagacgggaaatgaggcagcaactaaaattctagctcgccagttgatcaggcttaggcaacaaattgctaatcttcaaggtagtcgagctcagatgagaggcatagcaactcacactcaggccatgcatgcacattcttctgttgctgttggcttgaaaggtgctactaaggcaatggcagctatgaataagaaaat

SEQ ID NO: 6738 - DNA, 361 bp, Glycine max
cccacgcgtccgcaacatcaagacataggtttagatgcttatactgaatcaggatgatggaaaattggatctgaattctgtacaaaagatgtttcttaagggaatgtgtagttttggcagtactgattctgacatagttgagatttaccactgctcaggtgcgtcaatgcaagcacgatgggagctgttccagaagcaagctgaaattaccaaaagaaatcatggggaagctaacattcggtatgcttggcttgcttcctctaaaggagaactatctacaatgatgaactatggacttagtcattatggactatctggatcaaagtgcacatatggcattggtggtcatcttgctgctgtt

SEQ ID NO: 6739 - DNA, 392 bp, Glycine max
  modified_base (225)..(225): a, c, g, t, unknown, or other
cgaccatgttggagatgttccattgtctaagaaaattctcgctggatttacaactggtgctatggcaattgcagtggcaaatccaactgatcttgtgaaagttagacttcaagcagaaggaaaattgcctcctggcatgcccaagcgctactctggatcattaaatgcttattcaacaattatgagacaggaaggagttggagcactttggactgggatcggtcncaacatagcaaggaatggtattattaatgctgctgaactagccagctatgatcaaatgaaacagactaattttgaaaatcctggattcaccgacaatgttgttactcaccttcttgctggtccaggagcaagattttttgcagtctgtgttggctcccctgttgatg

SEQ ID NO: 6740 - DNA, 405 bp, Glycine max
tccacttccaattttcaataattcacgactccttccgagatctctctctctcgcccacgatccaggcatggcgaatacggggaatttagacgcggcgatagagcaattgctgaacgtggagaagcagatgaggctcgccggtgacgtggcgggtaccagaaaagcagccaccgatattttgcagctctgcttcgatgcacgagcctggaaaacactcaatgaccagattgtcgttttgtcaaaacgacgtggccagctcaagcaagctgtaacagctatggtgcaacaggctatgcaatatattgacgagacaccagatatcgaaactcgcatagaactcatcaaaacgttgaacagtgtgtctgcagggaagatatacgtggaaattgagagagctcgattgac

SEQ ID NO: 6741 - DNA, 452 bp, Glycine max
aatgttcaataattcacgactccttccgagatctctctctctcgcccacaatccaaccgtggcgagtacggggaatttagacgcggcgatagagcaattgctgaacgtggagaagcagatgaggctcgccggtgacgtggcgggtaccagaaaagcagccaccgatattttgcagctctgcttcgatgcacgagcctggaaaacactcaatgaccagattgtcgttttgtcaaaacgacgtggccagctcaagcaggctgtaacagctatggtgcaacaggctatgcaatatattgacgagacaccagatatcgaaactcgcatagaactcatcaaaacgttgaacagtgtgtctgcagggaagatatacgtggaaattgagagagctcgattgatcaaaaaacttgcaaaggataaggaagaacaaaggcttatagctgaaactgttgatt

SEQ ID NO: 6742 - DNA, 401 bp, Glycine max
caatgaccctgttgtgtccttcaagacagccttgtggtactggatggaacatgtgcgtcctgtcatcaaccagggttttggtgcaaccattatagctatcaatggccgacttgaatgtgatggtgcaaaccctagtactgttcaggctcgtgttaattactacacccagtattgttcacaacttggtgtttcccctggtgacaatcttacttgctaatttatcagtatacatggttccatatgatgacatcatacattcatacggtatatcttaacatatatcagaaaataaaccattcaaggcttacagccttaatttgattattaatgtaattactacttttgggaatattgtatctgattaccatctattatgtgcatccaatattgaataaaactac

SEQ ID NO: 6743 - DNA, 404 bp, Glycine max
acaaacattatgtagctaggatgagcaagttactactcattcgtgttgctgggttcgtggcaacctttgtcaccatggtgatgatgatggtgcccaaaaacgtgagtgcccaaaacataggtgatgacatcgtcacacaagacttcttcaacagcataatcagtcaggctgatgatggttgtgcagggaagaacttctactcacgagatgctttccttaatgctcacaattcctacaatgagtttggtatgcttggtaatcaggatgactccaagcgtgaggttgcagctgctttcgcccatttcacccatgaaacaggacatttttgctacatagaagagattaacggtgcatcaggggactactgtgacgagagcaacaccgagtacccatgtgcccctaac

SEQ ID NO: 6744 - DNA, 426 bp, Glycine max
ctattacatacattttgtagctaggatgagcaagttactactcattcgtgttgctgggttcgtggcaacctttgtcaccatggtgatgatgatggtgcccaaaaacgtgagtgcccaaaacataggtgatgacatcgtcacacaagacttcttcaacagcataatcagtcaggctgatgatggttgtgcagggaagaacttctactcacgagatgctttccttaatgctcacaattcctacaatgagtttggtaggcttggtaatcaggatgactccaagcgtgaggttgcagctgctttcgcccatttcacccatgaaacaggacatttttgctacatagaagagattaacggtgcatcaggggactactgtgacgagagcaacaccgagtacccatgtgcccctaacaaagcgtactatgggcg

SEQ ID NO: 6745 - DNA, 303 bp, Glycine max
aatttctattacatacattttgtagctaggatgagcaagttactactcattcgtgttgctggggtcgtggcaacctttgtgaccatggtgatgatgatggtgcccaaaaacgtgagtgcccaaaacatatgtgatgacatcgtcacacaagacttcttcaacagcataatcagtcaggctgatgatggttgtgcagggaagaacttctactcacgagatgctttccttaatgctcacaattcctacaatgagtttggtaggcttggtaatcaggatgactccaagcgtgaggttgcatctgct

SEQ ID NO: 6746 - DNA, 443 bp, Glycine max
aacattataatttctattacatacattttgtagctaggatgagcaagttactactcattcgggttgctgggttcgtggcaacctttgtcaccatggtgatgatgatggtgcccaaaaacgtgagtgcccaaaacataggtgatgacatcgtcacacaagacttcttcaacagcataatcagtcaggctgatgatggttgtgcagggaagaacttctactcacgagatgctttccttaatgctcacaattgctacaatgagtttggtaggcttggtaatcaggatgactccaagcgtgaggttgcaactgcttttcgccatttcacccatgaaacatgacatttttgctacatataagagattaacggtgcattcagggactactgtgaccagagcaacaccgagtacccatgtgccccttacaaagcgtactatgggcgtgga

SEQ ID NO: 6747 - DNA, 460 bp, Glycine max
ataatttctattacatacattttgtagctaggatgagcaagttactactcattcgtgttgctgggttcgtggcaacctttgtcaccatggtgatgatgatggtgcccaaaaacgtgagtgcccaaaacataggtgatgacatcgtcacacaagacttcttcaacagcataatcagtcaggctgatgatggttgtgcagggaagaacttctactcacgagatgctttccttaatgctcacaattcctacaatgagtttggtaggcttggtaatcaggatgactccaagcgtgaggttgcagctgctttcgcccatttcacccatgaaacaggacatttttgctacatagaagagattaacggtgcatcaagggactactgtgacgagagcaacaccgagtacccatgtgcccctaacaaagcgtactatgggcgttgaccaatccaactatcatggaactt

SEQ ID NO: 6748 - DNA, 426 bp, Glycine max
  modified_base (370)..(370): a, c, g, t, unknown, or other
aaacattataatttctattacatacattttgtagctaggatgagcaagttactactcatgggtgttgctgggttcgtggcaacctttgtcaccatggtgatgatgatggtgcccaaaaacgtgagtgcccaaaacataggtgatgacatcgtcacacaagacttcttcaacagcataatcagtcaggctgatgatggttgtgcatggaagaacttctactcacgagatgctttccttaatgctcacaattcctacaatgagtttggtaggcttggtaatcaggatgactccaagcgtgaggttgcagctgctttcgcccatttcacccatgaaacaggacatttttgctacatagaagagattaacgtgnttgcatcatgggactactgtgacgagagcaacaccgagtacccatgtgcccctaac

SEQ ID NO: 6749 - DNA, 419 bp, Glycine max
cccacgcgtgcgatttctattacatacatttagcagctaggatgagcaagttactactgggtcttgttgctgggttcgtggcaacctctgtcaccatggagatgataatggtacccaaaaacgtgagttcccaaaacatatgtgattacattttcactcaagacttatacaatagtataatcagtcaggctgatgatggttgcgcttggaagaacttctactaacaatatgctttctttaatgctcacaatacctacaatgagtttggtaggctcggtgatcacgatgactgctagcgtgaaggaatacctggttttgcccatataaccctttaaacaagacatttttgctacatagactagattaactgtgcatcatgggactactgtgacgagagcagcaccgattacccaattgcc

SEQ ID NO: 6750 - DNA, 423 bp, Glycine max
gcagatttttgctacatagaagagattaacggtgcatcaggggactactgtgacgagagcggcgaccgagtacccatgtgcccctaacaaagcgtactatgggcgtggaccaatccaactatcatggaacttcaactacggaccagcagggcagagcatcggatttgatggattgaacgctccagagacggtggccaatgaccctgttgtgtccttcaagacagccttgtggtactggatggaacatgtgcgtcctgtcatcaaccagggttttggtgcaaccattagagctatcaatggccgacttgaatgtgatggtgcaaaccctagtactgttcaggctcgtgttaattactacacccagtattgttcacaacttggtgtttcccctggtgacaatcttacttgctaatttatcagtat

SEQ ID NO: 6751 - DNA, 423 bp, Glycine max
  modified_base (233)..(233): a, c, g, t, unknown, or other
caaacattataatttctattacatacattttgtagctaggatgagcaagttactactcattcgtgttgctgggttcgtggcaacctttgtcaccatggtgatgatgatggtgcccaaaaacgtgagtgcccaaaacataggtgatgacatcgtcacacaagacttcttcaacagcataatcagtcaggctgatgatggttgtgcagggaagaacttctactcacgagatgctntccttaatgctcacaattcctacaatgagtttggtaggcttggtaatcaggatgactccaagcgtgaggttgcagctgctttcgcccatttcacccatgaaacaggacatttttgctacatagaagagattaacggtgcatcaggggactactgtgacgagagcaacaccgagtacccatgtgcccttaa

SEQ ID NO: 6752 - DNA, 437 bp, Glycine max
aaaacaaaaacatttccctgctacttcatcttcttcttcttcttcttcatcaccggtggttctgttcattcttccttgcaccttcttctttgaagatcgaaattgtgtttttgaaaaaatgggagttccagagaaagaccctctttcccaattgagtttgcctcctggttttcggttttaccccaccgacgaggagctcctcgttcagtatctatgccgcaaggtcgctggccaccatttctctcttccaatcattgctgaaattgatttgtacaagttcgacccatgggttcttccaagtaaggcgattttcggtgagaaagagtggtactttttcagccctagagacaggaaataacctaacgggtcccgacccaacagagtagccgggtcgggttattggaaagccaccggaaccgacaagatcatcaccaccg

SEQ ID NO: 6753 - DNA, 426 bp, Glycine max
  modified_base (314)..(314): a, c, g, t, unknown, or other
  modified_base (363)..(363): a, c, g, t, unknown, or other
aggtggttcttttccttctgagaagatcgaattgtgttttgcaaaaatgggagttccagagaaagaccctctttcccaattgagtttgcctcctggttttcggttttaccccaccgacgaggagcttctcgttcagtatctgtgccgcaaggtcgctggccaccatttctctcttccaatcattgccgaaattgacttgtaccagttcgacccatgggttcttccaagtaaagcgattttcggtgaaaaagagtggtactttttcagccccagagacaggaaatacccgaacgggtctcgacccaacagagtanctgggtcgggttattggaaagccaccggaaccgacaagatcatcaccancgaaggtagaaaattggcataaaaaaagccctcgttttctacgttggcaaagcccccaaaggc

SEQ ID NO: 6754 - DNA, 423 bp, Glycine max
cacgcgtcagcacaacctagcggcactacacacgttatctctctctctctctctctctctccctctctccttccccaagatgtcgagcgccgattccgagcaccgagaagaagaagaaggacccgccgtcggcgacgacgaggaaaacggagcacacgtcgctcccatcgtcaagctcgaggaggttgctgtcaacaccggcgaggaggacgaagatgcaatcctagatctcaaatcgaagctttaccggttcgacaaggatgggaaccagtggaaggagcgaggcgcgggcaccgtgaagttcctgaagcataaggctacgggcaaggttaggcttctcatgaggcaatccaagacgctcaagatctgcgccaatcatctcattttgcctactatgagtgtgcaagagcacgctgggaacga

SEQ ID NO: 6755 - DNA, 392 bp, Glycine max
cacgcgtcaacgcaaacttacggcactactcacgttatctctctctctctcactcactctcgctctctccttcgccaagatgtcgatcgctgattccgaacatcgacttgaggatgaggcacccgccgtctgcgacgatgaggacaccggagctcacttcgcacccatcgtcaatctctatgaggttgctgtcaccacctgcgaggaggacgaatatgcattcctatatctcagctcgaagctttacaggttcgacaaggatgggaaccagtggaaggagcgaggcgcgggcaacgtgaagttcctgatgcataaggctacgggcaacgttaggcttctcatgaggcattccatgacgcccaagatctgcgctaatcatcgcattttgccta

SEQ ID NO: 6756 - DNA, 419 bp, Glycine max
  modified_base (17)..(17): a, c, g, t, unknown, or other
  modified_base (371)..(371): a, c, g, t, unknown, or other
aacacgcgtccgcacanaccctcgcctcacactcctcaaaccctagcggcactacacacgttatctctctctctctctctctctctccctctctccttccccaagatgtcgagcgccgatcccgagcaccgagaagaggaggaggcacccgccgtcggcgacgacgaggacaccggagcacacgtcgctcccatcgtcaagctcgaggaggttgctgtcaccaccggcgaggaggacgaagatgcaatcctagatctcaaatcgaagctttaccggttcgacaaggatgggaaccagtggaaggagcgaagcgcgggcaccgtgaagttcctgaagcataaggctacgggcaacgttaagcttctcatgangcaatccaagacgctcaagattctgcgcaatcatctcattttgcctac

SEQ ID NO: 6757 - DNA, 428 bp, Glycine max
cccacgcgtccgcacaaaccctcccctcacactctccaaaccctagcggcacgacacacgttatctctctctctctctctctctctccctctctccttccccaagatgtcgagcgccgatcccgagcaccgagaagaggaggaggcacccgccgtcggcgacgacgaggacaccggagcacacgtcgctcccatcgtcaagctcgaggaggttgctgtcaccaccggcgaggaggacgaagatgcaatcctagatctcaaatcgaagctttaccggttcgacaaggatgggaaccagtggaaggagcgaggcgcgggcaccgtgaagttcctgaagcataaggctaccggcaaaggtaggcttctcatgaagcaatccaagacgctcaagaactgcgccaatcatctgattttggctactatgagtgt

SEQ ID NO: 6758 - DNA, 449 bp, Glycine max
cttcttcttctttttcatcaatcatcactagtggttcttttccttctgagaagatcgaattgtgttttgcaaaaatgggagttccagagaaagaccctctttcccaattgagtttgcctcctggttttcggttttaccccaccgacgaggagcttctcgttcagtatctgtgccgcaaggtcgctggccaccatttctctcttccaatcattgccgaaattgacttgtacaagttcgacccatgggttcttccaagtaaagcgattttcggtgaaaaagagtggtactttttcagccccagagacaggaaatacccgaacgggtctcgacccaacagagtagctgggtcgggttattggaaagccaccggaaccgacaagatcatcaccaccgaaggtagaaaagttggcataaaaaaagccctcgttttctacgttggcaaagccccc

SEQ ID NO: 6759 - DNA, 439 bp, Glycine max
gggatattctcatacttaatagttgccggattgtgtcactgaattgagctgtttgtgtccgcttgagtttatttcagctggcaaagttagggttgggtttgaattttgaggcatgactggttgagctttcggggtctgggagtttgttattattgttatttttcattctacatatgtatttgttgcgagtaatgggtcatgttggttggagggtgcagtccagaaagtcaagaactatatacgaacgttttggtaccgacttgtttgagtttcaaaaaaaaaagaatggtactttttcaaccccaaaaaacaagaaatacccgaacgggtctcgacccaacagaataactgggtcgggttattggaaagccaccggaaccgacaagaacattaccacctaaggtttaaaagtttgcataaaaaaagcccttcgtttcta

SEQ ID NO: 6760 - DNA, 427 bp, Glycine max
ctccgaactccgaagcccttcagcaaccatgtcgaggagaaaggttagggagccaaaggaggaaaatgtcactcttggtccagccgttagagacggtgaacatgttttcggcgtggctcgcatctttgcctccttcaacgacaccttcatccatgtcactgatttgtctgggagggaaacccttgttcgcatcactggtgggatgaaagttaaagctgacagagatgaatcatctccatatgctgctatgcttgcagcacaggatgttgctgccagatgtaaggaactgggcataactgctcttcatatcaggctccgtgccactggtggaaacaagaccaaaacacctggtcctggtgctcaatcagctcttcgagcccttgcacgttcaggaatgaaaaatggtcgtatagaggatgttactccc

SEQ ID NO: 6761 - DNA, 396 bp, Glycine max
gccgaagaaggttcatccaatccccgaagcccttcaccgcattgcaaccatgtcgaggagaaaggtcagagagccaaaggaagaaaacgtgactctgggcccagctgttagagatggtgaacatgtctttggcgtcgctcgcatctttgcctccttcaatgataccttcattcatgtcactgatttgtctgggagggaaacgcttgtccgcatcactggtggaatgaaggttaaggctgacagagatgaatcgtctccttatgctgctatgcttgcagctcaagatgttgctgccagatgcaaggaacttggcataactgctcttcatatcaagctccgtgccactggtggaaacaagacatagacacctggccctggtgctcaatcagctcttcg

SEQ ID NO: 6762 - DNA, 448 bp, Glycine max
gcgtccggaaataaggtggagggcttccagcaaaaccttactccagatctgtataaaaacaaaaacgctggctgtgaaaccctaataagcttcatcaatctccgaactccgaagcccttcagcaaccatgtcgaggagaaaggttagggagccaaaggaggaaaatgtcactcttggtccagccgttagagacggtgaacatgttttcggcgtggctcgcatctttgcctccttcaacgacaccttcatccatgtcactgatttgtctgggagggaaacccttgttcgcatcactggtgggatgaaagttaaagctgacagagatgaatcatctccatatgctgctatgcttgcagcacaggatgttgctgccagatgtaaagaactgggcataactgctcttcatatcaggcttcgtgccactggtggaaacaagaccaaaacacct

SEQ ID NO: 6763 - DNA, 350 bp, Glycine max
ctgggagggaaacccttgttcgcatcactggtgggatgaaagttaaagctggcggaggtgaatcatctccatatgctgctatgcttgcagcacaggatgttgctgccagatgtaaggaactgggcataactgctcttcatatcaggctccgtgccactggtggaaacaagaccaaaacacctggtcctggtgctcaatcagctcttcgagcccttgcacgttcaagaatgaaaattggtcgtatagaagaatgtactcccattccttccgataggacacctagaaagaatggtagaaggggtagaagactttaaacctcgtatgggataccactggaggtggtaaatttt

SEQ ID NO: 6764 - DNA, 434 bp, Glycine max
cccacgcgtccgcccacgcgtccgagaacaatcgtatgcagttttaagccacctgcatcgtttggtcatgcgtgcaccttatatattttcctcagactacaaacacttctattgccagtataatgagccatcatatgtcaaaaagttgaagcttgaaatgctgactgcagttgcaaatgaaagtaacacctatgagatagtgacagaattatgtgaatatgctgcaaatgttgacattcccattgcaagggaatcaattcgagctgttgggaagatagcattgcagcagtatgatgtcaatgctattgttgatcgacttctccagtttcttgagatggaaaaggactatgttacttctgaagctctggtgcttgtgaaagatctgctaagaaaatatccacaatggagtcaggattgtatttgctgtgttggaa

SEQ ID NO: 6765 - DNA, 374 bp, Glycine max
cccacgcgtccggtccagatgttcattggagatggagcaaaacttgttcgtgacgcctgtcaactagcaaaagaaaagtcaccatgcattatttttatagatgaaattgatgcaattggaaccaagcgttttgatagtgaagtaagtggagacagagaggtccaacggacaatgttagaattgcttaatcagcttgatggttttagcagtgatgaccggattaaggtgatagcagcaacaaaccgtgcagatattcttgaccctgcccttatgcgttctggtcgattagatcgtaaaattgagtttccacacccaagtgaagaagcaagagctcgaattctacagatccattcgagggagatgaatgttcaccc

SEQ ID NO: 6766 - DNA, 485 bp, Glycine max
aattaatgccccagctgaggacaccattcttcctctaccccatgttgtgcatgtgaatacagctggggctgcacctcctccttctggtctttccggcatgtctgaacgtggatttcgtgtcacacacacttatggtctctcagaaacctatggcccctctgtctactgtgcctggaaaccagaatgggaatcacttccccctgaaaaccaagcccggctcaatgcaagacaaggtgttaggtacattggcttggaaggcctggctgttgtgaacacaaaaaccatggaacctgttcctgctgatggtaaaactgttggtgagattgtgatgcggggtaattctgtgatgaaaggctacttaaagaaccctaaggctaacgaggagacctttgcaaatggatggtttcattctggggatcttgctgtgaagcacccagatggatatatagaaattaaagacagatcaaaggacatcataatctctg

SEQ ID NO: 6767 - DNA, 472 bp, Glycine max
cccacgcgtccgagttcttttctttagcagaagaagctttgaaaatatggtctgagaaggccgggaccttcagccctccacttttaatagtcattggtgatgaaaattgcgaccctaaggcacttaaatatgctctgggcaaaggagccgttgattatgaggattttctccagagtggagatccagaatatgcatggaaacccccagaggatgagtggcagagcatttcattgggttacacatccggtaccactgctagtccgaagggtgtggttttacatcaccgtggagcctatctcatgtctctgagtggagctcttatttggggaatgactgaaggagctgtgtatctttggacacttcccatgtttcattgcaatggttggtgttacacttggacacttgcagctctgtgtggtacaaacatatgccttcggcaggtaacaccgaaagcagtatatgaagccattgc

SEQ ID NO: 6768 - DNA, 402 bp, Glycine max
cccacgcgtccgagttcttttctttagcagaataagctttgaaaatatggtctgagaaggccgagaccttcagccctgcacttttaatagtcattggtgatgaaaattgcgaccctaaggcacttaaatatgctctgggcaaaggagccgttgattatgaggattttctccagagtggagatccagaatatgcatggaaacccccagaggatgagtggcagagcatttcattgggttacacatccggtaccactgctagtccgaagggtgtggttttacatcaccgtggagcctatctcatgtctctgagtggagctcttatttggggaatgactgaaggagctgtgtatctttggacactttccatgtttcattgcaatgggtggtgttacacttggacac

SEQ ID NO: 6769 - DNA, 431 bp, Glycine max
acgcgtccgaccacgcgtccgggcgggtctacagccaagttagttgccaagtataggccatcggttccaataatgtctgtggtggttccagtgttgagcacggactcatttgattggacctgcagtgatgagacgccagcaaggcacagcctgatatagaggggcttgattcttaaactgtgcgagggatctgcaaaggctaccgatgcagaatccacagaggtcattctcgaagctgctcttaagtccgcagcacatagggccctttgtaagcctggtgatgcagttgttgccctgcatcgtattggagctgcctctgtcataaagatctgcatagtctaataatgcatgctcaactcaacgtgccgccaacgaatgcacggttatgtattgcctttgagctctttctttctgctgtttatccgtatcat

SEQ ID NO: 6770 - DNA, 384 bp, Glycine max
gtgatctgcaaaggctactgatgcagaatccacagaggtcattctctaggctgctcttgggaccgtaacataaagggccctttataagcctggtgatgcagttgctgccctgcatagcattggagctgcctctgtcataaagatctgcatagtcaaataatgcatgctcaactcaacgtgcacgcaactaatgcagggttatgctttgacttttattcctttctctctgctgcttatacgtatcatcaaatggaggatttagttactagctgtaaatcgagtggttcatggtatactgctgatatattgccgagcacttctaaatcagattatcatggaaataatactcttaccttttaaaatgtgattggttttgcggaaaaa

SEQ ID NO: 6771 - DNA, 382 bp, Glycine max
tcttcttcatctacattagtagttcttgttattcattattcttcatactcacacagcttcttctgggggcaaaaggggtcatttttcagatccgaggttgagctcctctacccatcatgatggagctcggatacctgaatcagggtcagccttctagaggaacaacaccacttgtcactcttccattgttgctttcaacacttgtgttcttctccactttcacacatgccttctcttcttctgtgtttccggaattgaatcctattaaacctaagcactcacgtcttctcaggagtgctgtgcaacgagaaactcctacatctcagttgtctgaactatggtcacctctggaaagccaaggatggaaaccttatgttgaatc

SEQ ID NO: 6772 - DNA, 451 bp, Glycine max
gaaataattccctctgatggaagacaagaagagccttgcttcatctgaagagcgttggcagataaagggaaaagcttctctattagctgcacttgactactatgttggcttgcatagtgacatcttcatctctgcttccccaggaaatatgcacaatgcattggttggacaccggacatacttgaacttaaagactataaggccaaatatggcattgatgggtcagcttttcctgaataaaaccatagagtggtcagagtttcaggatgcagtggttgaaggtcaccaaaatagacaaggggaactaatgctgatgaagccaaaacaatcaatatatacgtatccagctcctgattgcatgtgccaagcttagtagtgactagtagtagtatatacttaaattattattattgctcacggatgtagcctgtgtattttatagttcggtgtc

SEQ ID NO: 6773 - DNA, 372 bp, Glycine max
aaacaaccaacctcttcagtgatcttttattagtactaagctaaaccatttgggattgcctcaaaatcaaaacctttatctttctagctatttcccttttcaaatcatgccacctaacatcaccaccgttgttgccaatgtcaccaccgagcaattacccaaggctcgtggaggaagtgggcgtgccttcgtgacctttcttgctgggaacggtgattacgtaaagggtgtcgtgggtttggccaaaagactgataaaggccaaaagcatgtaccctttggtggttgctgtgttaccagatgttcctgaagaacatcgtgagattctcaaatcccaaggttgcattgtcagggagattgaacctgtgtaccc

SEQ ID NO: 6774 - DNA, 346 bp, Glycine max
cccacgcgtccgcagagatcggagcgtggaacctctctctctctctctctctctctgcggaaaccggaatatctcagttctctgatcagatccatccgacgtcgtttcagtgataatggctccgttcagcggcgatgagacggcaccgtttttcggcttccttggagccgcagctgccctcgtcttctcctgtatgggagctgcctatggcacagcgaagagtggcgttggcgtggcttcgatgggtgtgatgagaccagagctggtgatgaagtctattgtccctgttgttatggctggagttttgggtatttatggccttattattgctgttattatcagtact

SEQ ID NO: 6775 - DNA, 421 bp, Glycine max
cggcgatgagacggcaccgtttttcggcttccttggagccgcagctgccctcgtctggtcctgtatgggagctgcctatggcacagcgaagagtggcgttggcgtggcttcgatgggtgtgatgagaccagagctggtgatgaagtctattgtccctgttgttatggctggagttttgggtatttatggccttattattgctgttattatcagtactggcattaatcccaaggccaaatcttattacctctttgatggttatgcacatctctcctctggtcttgcctgtgggctggctggcctctctgctggcatggctattggtattgttggtgatgctggtgttagagccaatgcacagcagccaaagctttttgttggaatgattcttatgctcatttgtgctgaagctcttgctctc

SEQ ID NO: 6776 - DNA, 424 bp, Glycine max
cggcgatgagacggcaccgtttttcggcttccttggagccgcagctgccctcgtcttgtcctgtatgggagctgcctatggcacagcgaagagtggcgttggcgtggcttcgatgggtgtgatgagaccagagctggtgatgaagtctattgtccctgttgttatggctggagttttgggtatttatggccttattattgctgttattatcagtactggcattaatcccaaggccaaatcttattacctctttgatggttatgcacatctctcctctggtcttgcctgtgggctggctggcctctctgctggcatggctattggtattgttggtgatgctggtgttagagccaatgcacagcagccaaagctttttgttggaatgattcttattctcatttttgctgaagctcttgctctctat

SEQ ID NO: 6777 - DNA, 404 bp, Glycine max
gtgcggtaggctcatccgagaccggaagcagcaatggggatcgatctcaaggccggaggtaaaagcaaaaaaaccaaaagaacagcacccaagtccaatgatatctatcttaagctcttggtcaagctttatcgcttccttgttcggagaactggcagcaaattcaatgccgttatactcaagagattgttcatgagcaaggttaacaagcccccattgtctttgtcaaggttgattaagtataccaaggggaaggaagataagattgctgtggtggtgggcaatataaccgatgatattcgtgtttatgaagttccagcctttaaaggtcacagcactcaggtttacagagactgctcgggcaagaattgagaaggcaagtggtgaatgcttgacggttgatc

SEQ ID NO: 6778 - DNA, 166 bp, Glycine max
aagtataccaagggggagggttatattagggctggggtggtgggcaatataaccgatgatattcgtgtttatgaagttccagccttaaaggtcacagcactcatgtttacagagactgctctttcaataattgataatgcaagtggtgaatgcttgacgtttgatc

SEQ ID NO: 6779 - DNA, 434 bp, Glycine max
  modified_base (424)..(424): a, c, g, t, unknown, or other
gtgaggtagaacccttccacggtggtgactgcgcgatgggtgcctacaagtatgtttcagagctatggcgcaagaagcagtctgatgtcatgcgcttcttgcagcgggtgaggtgctgggagtataggcagcaaccttccattgttcgcttgacaaggtcgacccgccctgacaaggctcgtcgcttgggcttcaaggctaagcagggctatgtgatataccgtgttcgtgttaggaggggtggccgaaagaggccagttcccaaaggtattgtttatgggaagcccacaaaccagggtgttacccaactgaaatttcagcgtagcaagaggtcagttgctgaggagcgagctggacggaagctgggtggacttagggtcctcaattcttactgggtgaatgaggactctacttataaatactntgaggtgatt

SEQ ID NO: 6780 - DNA, 385 bp, Glycine max
  modified_base (285)..(285): a, c, g, t, unknown, or other
  modified_base (331)..(331): a, c, g, t, unknown, or other
  modified_base (355)..(355): a, c, g, t, unknown, or other
cccacgcgtccggaaatttcagcgcagcaagaggtctgttgccgaggagcgagctggaaggaagttgggtggcctcagggttctcaattcatactgggtgaatgaggactcgacttacaaatattttgaggtcattctggtggatgttgcccacagcgctgttagaaatgatccaagaatcaactggctctgcaacccagtccataaacacagggaactgcgtggcctcacttctgctgggaaaagtaacaggggtttacggggcagaggacatctctaccacanaaatcgtccatcccgcagggcaacctggaagagaaacaacactctntcccttcgtcgctaccgttgattntgttgcagttatcggatgttgcttcatttt

SEQ ID NO: 6781 - DNA, 398 bp, Glycine max
agcagcaattttctattttcttctctcatggcttcagattccaaaaaggatttccctgctgatgacaaagctggaacagcagagaataaagcatccaaagatgaaacgtcatctaaagattctccagcagcacaaagagctactacagctacttctggacctgcaactggttttccaggcaacccttttgatttctctgcaatgtctggcctgctcaatgatccaagtatcaaggaattggctgaacagatagcaaaagatccatcattcaaccagatggctgagcagcttcagaaaacttttcaaggagctccacaggatgctatgcctagctttgataatcaacaatatttttcaaccatgcaacaggttatgcagaatcctaattttatgaccat

SEQ ID NO: 6782 - DNA, 413 bp, Glycine max
  modified_base (406)..(406): a, c, g, t, unknown, or other
ggcgaggtaaaatgtgctcaagttctcctcgaggctggagcaaaagtggatgctttggagaagaataagaacactgctctccattatgcagctggttatggcagaaaggaatgtgtggcccttctccttgaaaatggtgctgcagttactctccagaatatggatggtaaaactccaatcgatgttgcgaagctaaacaatcaaaatgaagtcctaaagctacttgagaaagatgcttttctgtagttgtaatgcatgatgccatgctgtcaccaacaagcaaagggggaaactgaggggaagaaggcatggtgacttcgttattttctcttttggtttcttccagccatttagtgtgttaaactaaattgattagcgttgttggatgagttaccatagaatttgntatctat

SEQ ID NO: 6783 - DNA, 466 bp, Glycine max
  modified_base (436)..(436): a, c, g, t, unknown, or other
ctctcgccgtctaggtttttctctcaaaatttcgaaaccccgattttctctcggttcgagtctgcgattcatcgtaacctaaattattagatagttatattatctctctgcgtttctttcagcaattttctattttctcctctcatggcttcagattccaaaaaggatttccctgctgatgacaaagctggaacagaagagagtaaaacatccaaagatgagacttcatctaaagattctccagcagaacaaagagcgacagctacttttggacctagacctggacctgctgggcatccaggcaacccttttgatctctcagcaatgtctggtctgctcaatgatccaagtatcaaggaattggctgaacagatagcaaaagatccatcgttcaatcagatggctgagcagcttcagaaaacttttcaaggagctncacaagatgctaatcctagcttcgataatc

SEQ ID NO: 6784 - DNA, 442 bp, Glycine max
  modified_base (405)..(405): a, c, g, t, unknown, or other
cccacgcgtccgcccacgcgtccgctctcactcagattcagcaattttctattttctgctctcatggcttcagattccaaaaaggatttccctgctgatgacaaagctggaacagcagagaataaagcatccaaagatgaaacgtcatctaaagattctccagcagcacaaagagctactacagctacttctggacctgcaactggttttccaggcaacccttttgatttctctgcaatgtctggcctgctcaatgatccaagtatcaaggaattggctgaacagatagcaaaagatccatcattcaaccagatggctgagcagcttcagaaaacttttcaaggagctccacaggatgctatgcctagctttgataatcaacaatatttttcaaccatgcaacangttatgcagaatcctaattttatgaccatggctgaac

SEQ ID NO: 6785 - DNA, 440 bp, Glycine max
  modified_base (436)..(436): a, c, g, t, unknown, or other
cccacgcgtccgcccacgcgtccgtatctctctgcgtttctttcagcaattttctatttggtgctctcatggcttcagattccaaaaaggatttccctgctgatgacaaagctggaacagaagagagtaaaacatccaaagatgagacttcatctaaagattctccagcagaacaaagagcgacagctacttttggacctagacctggacctgctgggcatccaggcaacccttttgatctctcagcaatgtctggtctgctcaatgatccaagtatcaaggaattggctgaacagatagcaaaagatccatcgttcaatcagatggctgagcagcttcagaaaacttttcaaggagctccacaagatgctatccctagcttcgataatcaacaatatttttcaaccatgcaacaggttatgcagaatcctaattntatg

SEQ ID NO: 6786 - DNA, 378 bp, Glycine max
  modified_base (322)..(322): a, c, g, t, unknown, or other
gaagttttcaaggaattttatcaaacataaactaagcacaggaaacttacttggatttattccttgggaacctgcaacattagtgggaaattcgatccaaaaactgtggagctgattgtaacaacttaccaggcttcggcattgcttctatttaattcctcagatagactgagttattcggagataatgtctcagttaaacttatctgatgacgatgttattagactgctccactccttgtcatgtgccaagtacaagattcttaacaaggaaccgagcacgaaaacaatatcttctaccgactattttgaatgtaattcanaatttacagacaaaatgaggagaatcaagattcctcttcctactgttgatgagaag

SEQ ID NO: 6787 - DNA, 417 bp, Glycine max
gtccgaaagtatttgtttgctgttatctataggaagttgcttgctcgaaggcttctctttgacaagggtgccattgatgagcatgagcgaagtattttgacaaaattgaagcaacaatgtggtggacagtttacctcaaagatggaaggaatggttacagatttgacactggcaaaggagaatcaaactagctttgaggagtatttaagcaataatcccaatgcagaccctggcatagacttgacagttacagttctgactactggtttctggcctagttacaaatcttttgatctcaatcttcctgcagaaatgattaggtgtgttgaagttttcaaagaattttatcaaactaaaacaaaacacaggaaacttacatggatttattcggtgggtacctgtaatataagtgggaaa

SEQ ID NO: 6788 - DNA, 434 bp, Glycine max
  modified_base (314)..(314): a, c, g, t, unknown, or other
cttcccgccgagagaggaggctcgacgacgacgccgccattcgtgagcaggccatcgccgccgcgattctctttaagcagcaccagcaacaacagcaacagcagcagcagcaattcgatcgctctgcatcgcttcggtatccgaatggagtctccaagaagagtaacgccaacgccttgcccaggagttcgagttccagggcaaggtccctcaccgaccctctccttcaacctcaccagcttctcaatcagggtgtgaatgtcgatgatctcgagacaaatcatgttgtccttgttcatggaggtggcttcggngcatggtgttggtacaaatccatagcacttctagaagaaagtggttataaagtaactgccatagatttaactgggctcggtgtgagttcatttgatgcaaacagcattacaagtctgtcg

SEQ ID NO: 6789 - DNA, 383 bp, Glycine max
aggaacttttatcaaccagttgcctgattggagcatgcttcttgctgctatcacaacaattttcttggccgctgaaaagcagtggatgatgcttgattggaagccacggcgacctgacatgcttattgacccctttgggataggaaaaattgttcaggatggtcttgtgttccgtgaaaacttttctattagatcatatgagattggtgctgatcgtaccgcatctatagaaacagtaatgaaccatttgcaagaaactgcacttaatcatgttaaaagtgctgggcttcttggtgatggctttggttccacgccagaaatgtgcaaaaagaacttgatatgggtggttactcggatgcaggttgtggtggaacgctatccta

SEQ ID NO: 6790 - DNA, 422 bp, Glycine max
cccacgcgtccgcccacgcgtccgggatggtcttgtgttccgtgaaaacttttctattagatcatatgagattggtgctgatcgtaccgcatctatagaaacagtaatgaaccatttgcaagaaactgcacttaatcatgttaaaagtgctgggcttcttggtgatggctttggttccacgccagaaatgtgcaaaaagaacttgatatgggtggttactcggatgcaggttgtggaggaacgctatcctacatggggtgacataatccaagaggacactagtgtttctggatcgaccatcagagcgttgcgccgtgaatggcttttacgtgactgcaaaactggtgaaatcttgacaagagctttcagtgtttgggtcatgatgaataagctaacacggaagctgtctaaaattccagaag

SEQ ID NO: 6791 - DNA, 446 bp, Glycine max
cccacgcgtccgcccacgcgtccgatttgcttcaggggtgacatagttcaagtggacacttgggtttctggatcagggaagaatggtatgcgccgtgattggcttttacgtgactgcaaaactggtgaaatcttgacaagagcttccagtgtttgggtcatgatgaataagctaacacggaggctgtctaaaattccagaagaagtcagacaggagataggatcttattttgtggattctgatccaattctggaagaggataacagaaaactgactaaacttgacgacaacacagcggattatattcgtaccggtttaagtcctaggtggagtgatctagatatcaatcagcatgtcaacaatgtgaagtacattggctggattctggagagtgctccacagccaatcttggagagtcatgagctttcttccatgactttagagta

SEQ ID NO: 6792 - DNA, 360 bp, Glycine max
tcgtccacgcgttcgtccacgcgttcgaccttatcaacatcctttacctcttaatttttctgatcaggttaaaactactattcttcagaaaaaggttaaaaaacccagcaccaagtccaccatctcttccaataatcggaaacctccatcagctgaagaaacagccacttcaccgagccttgtacgacctctcacagaaatatggccctaataatatcctctctctgcggttcgggtcccaacccgtcctcgtcgtttcgtccgcatccgcagcggaagaatgtttcaccaaaaacgacatcatcttcgcgaaccgttttcgctcttcattgacaaagtacatcggcttcaaccacacca

SEQ ID NO: 6793 - DNA, 424 bp, Glycine max
  modified_base (416)..(416): a, c, g, t, unknown, or other
cagcaagctaggctcttccctttgttagcttctgcctatgccttcagatttgttggtgagtggttgaaatggctttatatggatgtgatgaaaagattgcaagccagtgatttttcaaccttacctgaggctcatgcgtgcactgcagggttgaagtccttgactacttcagcaactgctgatggaattgaggaatgccgcaaactatgtggtggccatggttacctttgcagcagtggtctccctgagttatttgcagtctacattcctacctgcacatatgaaggagacaacactgtgctgcttttacaggtggctaggcatctcatcaagactatttctcagttgggctccagaaacaagcctgttggtacaacatcttacattggacgagtggaacagcttatgcaatatcngtctgatg

SEQ ID NO: 6794 - DNA, 385 bp, Glycine max
acgcgtcaggtacaattaaagcatatgtgtctaacaatttatctcttggagaacggcaaattgctgcacagtttcaagaaattccattggatcttcgtatggtggaagctgagcgaattggatttgatatgctgaaggcaaccgcagttgacaaaattccctcagatttagaagggatggaagcatcaatgcaacatctgctagtcttgattgatgacatctacaaatatgttaacgatgttgtggaagggctagttgcaccagacaacaaaatcgggagatttatatcagatgctgtaggttcccttcccaaattgtccccatcagtttttgataagcttgtgaatgacagtttgcaggatcacttgcttttgctgtatttatc

SEQ ID NO: 6795 - DNA, 422 bp, Glycine max
cggacgcgtggggtctgcaccgtcagcaatattctccctgggtttaggatggggtgcgcagatgggtggtgaacttatggattttatagttgttcttcgtgatatgaaagctgtaaagacattctgcagtcatatgcatttttctcttggtgctggttgtagtgctgcagcagggcctgttgggagagtgcttgaagcagatattcgtgctggtgacagaggctctggcatgtgttacacttacagttgcagtaaaggtgcatttgtgggagtttctttggaaggaaatatagttgcaaccaggatggatgccaatttgcgcttctatggtgatccttacctcaccacatctgatattctactgggaatggtggacagaccaaaggctgctcaacccatgtatgccagtcttcaagaactat

SEQ ID NO: 6796 - DNA, 446 bp, Glycine max
ccggaaccatatatctgacaatgtggctgtaaccccatatcgtgatacatctcgctatggaatgggaagtgaaacaccaatgcatccttctcgaactcccttacatccatatatgactccaatgagagatcctggagcaacacctattcatgatggaatgagaacacctatgcgtgacccagcatggaatccttatactccaatgagtcctccaagggataactgggaagatggaaatccaggctcttgggcagccagtccacagtatcagcctggaagccctacttcacggccatatgaagccccaactcctggtgctggttgggctagcactcctggtggaaattatagtgaagctggaacaccgcgggacagttctgcctatgccaatgctccaagcccatatttaccatcaacacctggtggacagcctatgacaccgagtt

SEQ ID NO: 6797 - DNA, 460 bp, Glycine max
gttggcattactgtgagctcccgcaggcagcagcagcactcatagagcttgcgagcgagtggtcacttggccacagttatcgccgtttccccgccgagatctctcaatctccgacgactcagatacctctattaatttttgttcctccggttaggttaggctataatacgtagtttttccttatttatggcttcggagaatgtgaagaccggggattcggccgtgacgacgatcgtcaatctcgccgaggaggccaagctcgccagggaaggcgtcgtcaaggctcccagctacgccctcgccagcatctgcaagtcgctcgtcgccggtggcgtcgccggaggagtgtcacgtactgcagttgctcctctggaacgattgaaaattttgctgcaagtccagaatcctcataacattaaatacaacggaacagtacaaggccctaaatatatatggagaa

SEQ ID NO: 6798 - DNA, 422 bp, Glycine max
aggaggctcaatggatgcacattgacatggctggtcctgtgtggaatgacaagaagcgctgagcaacagggtttggcattgctactttagtggaatgggttttgaaaaatgcttcaaatgccaactgaaatttcaaatcttgttacatcgcatgtgaaacacaggatgagataagctcatcttgtgatgtttgtgcttcaatggggaatggttatatgaaataagttatttaaagggatggaaaatgtggttaaatgaggcatctgttagcgtattcaaactgttttctacatacaaataacaaccttttatgcttgttcacatttaccaatagttcacattgtctgtgatcattcgtcttacttatattgacacgtagactttcccagtagtgatactaatatactatattaaaccgtttc

SEQ ID NO: 6799 - DNA, 326 bp, Glycine max
  modified_base (166)..(166): a, c, g, t, unknown, or other
  modified_base (222)..(222): a, c, g, t, unknown, or other
  modified_base (252)..(252): a, c, g, t, unknown, or other
cccacgcgtccgcttttctcttatcatggcttctcacaacatcaaaatttacgaccacttaagggtggcccctccctcagcaacagaaatatccctctctctcactttcttcgacctgttctggctcaggttccaccccgtggaacgcatcttcttctacaccctncctacaccccattcaaatccatccattttctattccaaacttgttccaaagctcanaacatctctctctcgcactctccaacactntccccctttcgccggcaacgtcgtttggcctgataacaccccaaacccaaccgtccaataaaccccaggggact

SEQ ID NO: 6800 - DNA, 369 bp, Glycine max
  modified_base (307)..(307): a, c, g, t, unknown, or other
atattattctcacgactagtgctatatctaaggcgatatcttccaaggttgaaacaaacagatgctcttttctcttatgatggcttctcacaacatcaaaatccacgaccacttaagggtttcccctccctcagcaacagaaatatccctctctctcactttcttcgacctgttctggctcaggttccaccccgtggaacgcatcttcttctacaccctccctacaccccattcaaatccatccattttctattccaaacttgttccaaagctcaaaacatctctctctcgcactctccaacacttnccccctctcgccggcaacgtcgtttggcctgataacaccccaaaccccaccgtccaatacac

SEQ ID NO: 6801 - DNA, 412 bp, Glycine max
cccacgcgtccgctcaccgtttgccaggtcgtcgatacctccgtcagagaggttcaggctttgatattgtcaccaacgagggaactggcctcgcaaactgagaaggttatattggctattggggatttcatcaatatacaagctcatgcatgcgttggaggtaaaagtgtgggagaagacataaggaaacttgagtatggagttcatgtggtgtctggaactcctggccgagtttgtgacatgatcaaaaggagaacattacgcacaagggctatcaagatgctagttcttgatgaatctgatgaaatgttgagcagagggtttaaagatcaaatttatgatgtgtatagatatctcccacctgaccttcaggtttgtttgatctctgctactcttactcatgaaatactgg

SEQ ID NO: 6802 - DNA, 413 bp, Glycine max
cccacgcgtccgcacagcacggtggggacgaccatggttagagacgatctatgcatcagggttcccagcttcttccgctgccctatatccctcgacgtcatgaaatcccctgtgagcctctgcaccggcgttacctacgaccgttccagcatccaacgctggctcgacaacgggaacaacacctgtcccgccaccatgcaggttctccaaaccagagatttcgttcccaaccgaaccttacagaggctcatccagatctggtctgactcggtcaccctccgagtggactcgcccgagtcacctaccttcacccagtccgaatcagtcctctccaaggaccaaatcctcgtcgccatctccgagttgcagactcactgcgcgaaccgcttcgactcgctcgccaaaatcgcgcg

SEQ ID NO: 6803 - DNA, 431 bp, Glycine max
cccacgcgtccgaacagaatctcctctcaacacctttgccttgctgcagttcgcaactgcaagtgcactcaaatataaatatatatacatatatatatatatatatatatatgtattacttcatggtcacacatagttaagtttattaattactaggtagctggttttgaatagggtagttggtagttatagatggtgtcccagatatggaagaagcaggtttaggagattgttgctcctcgaattcgacgattacgaggaagagcgataagcgaaagcagcaacaccaacaacaagagaagccatacagaggaataaggatgaggaagtggggcaagtgggtggcggagattagagaacccaataagcgttcgaagatctggctgggttcttacgccacccccggcgccgacgcacgcgcctatgacacc

SEQ ID NO: 6804 - DNA, 431 bp, Glycine max
  modified_base (352)..(352): a, c, g, t, unknown, or other
gagtaacttcactttccccaactccacctgagaaaaagatacccataattcgcacgcacgcacgcacgcacttgttctgactcagtgcttgtgttggacgcagaagaaccagaaaagaaaaacaagcacgaggagatgattaacttcgaagaaaccgagttgcgactcggcctccctggcgggtctgcgagtgatcacaacgagtcaacaacggtcaagggcagtggtggaaagagaggcttctctgaaactgcttctgttgatttgaagcttaatctttcttccagtgatgactctgcctcagattcaccttcatctgcgtctacagagaagactaccactgctgcacctnctcctccttctcgagccaacgaccctgcaaaaccacctgcaaaggcacaagtggtgggttggccaccagttaggtcatt

SEQ ID NO: 6805 - DNA, 397 bp, Glycine max
acgcaatgtgagaacccccacgggcaagtgtggaattacaatggaggcctcctacccagggaagaatggtttaaactctgctaattcagtttatgaaagcactgaggtgtatgttagcagtgcttgatataacaaccttcatcgttatttatgatctttggaattgggaagaggaacaagtgctcaagttgcaaatgtttctgttatctttgatgcttctattgaatatgtctgttgggctattcttgtacatatatttcttcaagttaaaaaactgaacctgattatcaatttgtactggttttcactcattgttattccatttgaatgttttatctgaaatccttaatgatatggatgcgctagttatatttctgaaaaaaaaaaatattatttt

SEQ ID NO: 6806 - DNA, 394 bp, Glycine max
cagaaacgaacaccgtgattcctctcgccgtagatctgctccatttcgccgttcatccatggccggcgacttcgaattcgccgacaaagtccctacttccttcgatcgcgcggcttcaaaagggttcaacccagctttaattgttctcctgcttgttggtgggttgctgttgacattcctcattggaaactatgtactctacacatatgcacagaagaccctccctcctagaaaaaagaagccagtctcaaagaagaagatgaaaaaggagagactgaagcaaggcgtctctgcacctggagagtagaactttttcctcactttatattctgtgatgttaaattgtactctctaagaaaaaatttatcgttctgtggtctcttgagttatgtta

SEQ ID NO: 6807 - DNA, 420 bp, Glycine max
cgtttctttcacttcacaaaaatgaaaaacatgaaattgtgttcggtgatgctatgcttatcactagcgttccttcttggggccacagcagaacaatgtggcacacaagctggtggagcgttatgcccaaatagattatgttgcagcaaatttgggtggtgtggtgacacagattcctactgtggagaaggttgccagagccaatgcaaatctgcaacaccctcaacaccaactccaacaacacctagtagtggtggagatattagcagactcattagctcttctctctttgatcaaatgcttaaataccgaaacgatggccgctgttctggccatggattctacagatatgatgctttcattgccgctgctggctctttcaatggctttggcacaaccggtgatgacaacactcgcaag

SEQ ID NO: 6808 - DNA, 363 bp, Glycine max
cgtttctttcacttcacaaaaatgaaaatcatgatattgtgttcggtgatgctatgcttatcactagcgttccttcttggggccacagcagaacaatgtggcacacaagctggtggagcgttatgcccaaatagattatgttgcagcaaatttgggtggtgtggtgacacagattcctactgtggagaaggttgccagagccaatgcaaatctgcaacaccctcaacaccaactccaacaacacctagtagtggtggagatattagcagactcattagctcttctctctttgatcaaatgcttaaataccgaaacgatggccgctgttctggccatggatgctacagatatgatgctctcatt

SEQ ID NO: 6809 - DNA, 445 bp, Glycine max
cccacgcgtccgacttcacatatatgatttacatgaaatggtgttcggtgatgctatgcttatcactagcgttccttcttggggccacagcatatcaatgtggcacacaagctggtggagcgttatgcccaaatagattatgttgcagcaaatttgggtggtgtggtgacacagattcctactgtggagaaggttgccagagccaatgcagatctgcaacaccctcaacaccaactccaacaacacctagtagtggtggagatattagcagactcattagctcttgtctctttgatcaaatgcttaaataccgaaacgatggccgatgatctggccatggattctacagatatgatgctttcattgacgctgctggctctttcaatggctttggcacaaccggtgatgacaacactcacaagaaggagattgctgctttcttggc

SEQ ID NO: 6810 - DNA, 353 bp, Glycine max
cccacgcgtccgtccacgcgttcgcccacgcgttcgaccacgcgtccgatggactgcatctagtgctgacagctcagcgggtcgggctcctggctacggtgtcatcaccaacataatcaacggtggcctcgaatgcggccacggccaggataatcgggtccaagatcggatcggcttctaccgaaggtactgccagatgatgggaataagccccggagacaacttggattgtaacaatcaaaggccatttgcttaagcaaattgctcacatatatcatccatatagagaataaatagtatgtaataaaggatctaccatgatcttacatgtactgggaaacttgtttctaaag

SEQ ID NO: 6811 - DNA, 431 bp, Glycine max
gtttctttcacttcacaaaaatgaaaaacatgaaattgtgttcggtgatgctatgcttatcactagcgttccttcttggggccacagcagaacaatgtggcacacaagctggtggagcgttatgcccaaatagattatgttgcagcaaatttgggtggtgtggtgacacagattcctactgtggagaaggttgccagagccaatgcaaatctgcaacaccctcaacaccaactccaacaacacctagtagtggtggagatattagcagactcattagctcttctctctttgatcaaatgcttaaataccgaaacgatggccgctgttctggccatggattctacagatatgatgctttcattgccgctgctggctctttcaatggctttggcacaaccggtgatgacaacactcgcaagaaggagattgct

SEQ ID NO: 6812 - DNA, 424 bp, Glycine max
  modified_base (42)..(42): a, c, g, t, unknown, or other
tcgcggacgcgtgggtgccgctgctggctctttcaatggctntggcacaaccggtgatgacgacagtcgcaagaaggagattgctgctttcttggctcaaacttctcatgaaaccacaggtgggtgggcaagtgcaccagatggtccatatgcgtgggggtattgttttatcaacgaacaaaaccaggcaacttattgtgatggtgggaattggccatgtgctgctggtaaaaaatattatggccgaggaccaatccaacttacacacaactacaattacgggcaagctggcaaagcacttggtctggatttgataaacaatccggatcttgtagccacagacgcaaccgtgtcattcaagacagccctatggttttggatgactgcacagggaaacaagccattaagccatgatgtgatcact

SEQ ID NO: 6813 - DNA, 414 bp, Glycine max
ccgtttctttcacttcacaaaaatgaaaaacatgaaattgtgttcggcgatgctatgcttatcactagcgttccttcttggggccacagcagaacaatgtggcacacaagctggtggagcgttatgcccaaatagattatgttgcagcaaatttgggtggtgtggtgacacagattcctactgtggagaaggttgccagagccaatgcaaatctgcaacaccctcaacaccaactgcaacaacacctagtagcggtggagatattagcagactcattagctcttctctctttgatcaaatgcttaaataccgaaacgatggccgatgttctggccatggattctacagatatgatgctttcattgccgatgctggctctatcaatggctgtggcacaaccggtgatgacaacac

SEQ ID NO: 6814 - DNA, 416 bp, Glycine max
caaaaatgaaaaacatgaaattgtgttcggtgatgctatgcttatcactagcgttccttcttggggccacagcagaacaatgtggcacacaagctggtggagcgttatgcccaaatagattatgttgcagcaaatttgggtggtgtggtgacacagattcctactgtggagaaggttgccagagccaatgcaaatctgcaacaccctcaacaccaactccaacaacacctagtagtggtggagatattagcagactcattagctcttctctctttgatcaaatgcttaaataccgaaacgatggccgctgttctggccatggattctacagatatgatgctttcattgccgctgctggctctttcaatggctttggcacaaccggtgatgacaacactcgcaagaaggagattgct

SEQ ID NO: 6815 - DNA, 419 bp, Glycine max
  modified_base (360)..(360): a, c, g, t, unknown, or other
accgtttctttcacttcacaaaaatgaaaaacatgaaattgtgttcggtgatgctatgcggatcactagcgttccttcttggggccacagcagaacaatgtggcacacaagctggtggagcgttatgcccaaatagattatgttgcagcaaatttgggtggtgtggtgacacagattcctactgtggagaaggttgccagagccaatgcagatctgcaacaccctgaacaccaactccaacaacacctagtagtggtggagatattagcagactcattagctcttctctctttgatcaaatgcttaaataccgaaacgatggccgctgttctggccatggattctacagatatgatgctntcattgccgctgctggctctgtcaatggctttggcacaaccggtgatgacaacactcgc

SEQ ID NO: 6816 - DNA, 462 bp, Glycine max
atacaccgtttctttcacttcacaaaaatgaaaaacatgaaattgtgttcggtgatgctaggcttatcactagcgttccttcttggggccacagcagaacaatgtggcacacaagctggtggagcgttatgcccaaatagattatgttgcagcaaatttgggtggtgtggtgacacagattcctactgtggagaaggttgccagagccaatgcaaatctgcaacaccctcaacaccaactccaacaacacctagtagtggtggagatattagcagactcattagctcttctctctttgatcaaatgcttaaataccgaaacgatggccgctgttctggccatggattctacagatatgatgctttcattgccgctgctggctctttcaatggctttggcacaaccggtgatgacaacactcgcaagaaggagattgctgctttcttggctcaaacttctcat

SEQ ID NO: 6817 - DNA, 359 bp, Glycine max
gtttctttcacttcacaaaaatgaaaaacatgaaattgtgttcggtgatgctatgcttatcgctagcgttccttcttggggccacagcagaacaatgtggcacacaagctggtggagcgttatgcccaaatagattatgttgcagcaaatttgggtggtgtggtgacacagattcctactgtggagaaggttgccagagccaatgcaaatctgcaacaccctcaacaccaactgcaacaacacctagtagtggtggagatattagcagactcattagctcttctctctttgatcaaatgcttaaataccgaaacgatggccgctgttctggccatggattctacagatatgatgctttc

SEQ ID NO: 6818 - DNA, 427 bp, Glycine max
  modified_base (13)..(16): a, c, g, t, unknown, or other
gggacccacgcgnnnncgggacgcgtgggacaaaaatgaaaaacatgaaattgtgttcggtgatgctatgcttatcactagcgttccttcttggggccacagcaaaacaatgtggcacacaagctggtggagcgttatgcccaaatagattatgttgcagcaaatttgggtggtgtggtgacacagattcctactgtggagaaggttgccagagccaatgcaaatctgcaacaccctcaacaccaactccaacaacacctagtagtggtggagatattagcagactcattagctcttctctctttgatcaaatgcttaaataccgaaacgatggccgctgttctggccatggattctacagatatgatgctttcattgccgctgctggctctttcaatggctttggcacaaccggtgatgacaacac

SEQ ID NO: 6819 - DNA, 375 bp, Glycine max
cacgcgtccgggagtatcgctgcatgctttgctcaaacttttcatgaaaccacaggcggctgggcaagtgctccagatggaccatatgcgtgggggtcttggtatatcaacgtacacatccaggctacttatcgagatggagggaattggccatgtgctgctagtcaaaaatattatggccgatgaccaatccaacttacacacagctacaattacaggcaagctggcaaagcactgggtctggattagataaacaatacggatcttgtagccacagacgcaaccgtgtcattcaagacagccctatggttttggatgactgcacatggaaacacgccattaagccatgatgtgatcactggaagatggactcca

SEQ ID NO: 6820 - DNA, 323 bp, Glycine max
aggagattgctgctttcttggctcaaacttctcatgaaaccacaagtgggtgggcaagtgcgccagatggtccatatgcgtggggtattgtttatcaacgaacaaaaccaggcaactaatggtaatggtggaaattggccatgtgctgctggtaaaaaatattatggccgaggaccaatccaacttacacacaactacaattacgggcaagctggcaaagcacttggtctggatttgataaacaatccggatcttgtagccacagacgcaaccgtgtcattcaagacaaccctatggttttggatgacttgccagggaaacaa

SEQ ID NO: 6821 - DNA, 436 bp, Glycine max
cccacgcgtccggccacatagagacacaatacagagtgagttgttgctccttcgccacaactctctgccaacatgggtatctccagagattctatgcacaagaggcgtgccactggtggcaagaagaaggcctggaggaaaaagagaaagtatgagcttggtcgccagcctgctaacactaagctgtcaagcaacaagacagtcaggaggatccgtgttagaggtggaaatgtgaaatggagggcattgagattggatactggaaattactcctggggaagtgaagctgtaactcgcaagactcgtgtactagatgtggtttacaatgcctcaaacaatgagcttgtgcgtactcagactcttgtcaaaagtgctatcgttcaggttgatgctgctccattcaaacagtggtatcttcagcactatggtgttgaga

SEQ ID NO: 6822 - DNA, 431 bp, Glycine max
  modified_base (382)..(382): a, c, g, t, unknown, or other
cccacgcgtccgtaatgatggagattttgctcaaaagctttcgcatccttcatcaaattggtcaagagaatacattgcaacaattgatggtttagttcacaagaggcacttaatagccataagcgagggaactactgttgagggtgtcctttgtgtgcctgatgttgtggagttacttccacgtcagccagagatgcaaagaactcgaattcgcattgtggttcatgaaggtaggaaacatgaagttcgtgaactcgtcaaaagagctggacttgagattcattcattaaagcgagtacgcattggtgggtttagacttccaccagaccttgggttaggaaagtatattgagttaaataaaacgaatctcaacccgcattgnggtggaagagctaataaagttgcttcttatattactggagctagaaaca

SEQ ID NO: 6823 - DNA, 419 bp, Glycine max
cccacgcgtccgtaatgatggagattttgctcaaaagctttcgcatccttcatcaaattgggcaagggaatacattgcagcaggtgatggtttacttcacaagaggcacttaatagccataagcgagggaactactgttgagggtgtcctttgtgtgcctgatgttgtggagttacttccacgtcagccagagatgcaaagaactcgaattcgcattgtggttcatgaaggtaggaaacatgaagttcgtgaactcgtcaaaagagctggacttgagattcattcattaaagcgagtacgcattggtgggtttagacttccaccagaccttgggttaggaaagtatattgagttaaataaaacgaatcttcaatcgcattggggtggaagagctattaaattgctttttaaattactgg

SEQ ID NO: 6824 - DNA, 417 bp, Glycine max
gtctagaatattcctatctgaaattaaaaaaaaaaaaagaaattgtcttgctcatagggaggacgtctataacctgtcgacattgaaaataacaaataatataaattgatagacgaaaagagtagcgggcagtgacaaagcaaaagcgtggagtgggtcttgcgttgtgttggaatcccaaattcatttctgtttctcattctcaattcttcttctattctcattctgatttgccacacacgcagaaaggttgaaaatagtgggacttgattcactggaggtggagaaagatggctaacaacgcagctgcttgtgctgagagagcaactagtgatatgctcattggtccagactgggcaatcaacatagacttgtgtgatatcattaatatggaccctgggcaagccaaggatgctt

SEQ ID NO: 6825 - DNA, 433 bp, Glycine max
acatagcaaggttcagagactttgccgattcctggaagaagagaagagaaaacctaaatcacagatccatggccgaagaacaccgatgtgaacctgccgaaggtcactgactatgcttcaacaactgccacttcttcagtagcaccgtcacgatgaacctctgctccaaatgctacagcgcgatccgtttgaaggagcaagaagaagcgtcgacgaaatgcacaatcgaaaccgtgctctattctgcctcctcagcaaaaccgtcgtcagtacacgtcacctacgacgtctgcggtcgatgtgctcatggaatctccaccgacgtctgctgcggaggttgacgttgctgtcacggtcacagtcgcggcggcgtcaagttctatttccataaactcaggttcggttgcgcaaccgaaccgttataccacgtgtc

SEQ ID NO: 6826 - DNA, 426 bp, Glycine max
cccacgcgtccggcaaaagacacccgcattcccctggtttcatttactggaagttcaaaggttggcttgatggtccagcaaacagttaatgagagatttggcaaatgcttgcttgagttaagtggtaacaatgcaataatagtcatggatgatgcagatatcaaattggctgtacgatctattttgtttgcagctgtgggtactgctggtcagcggtgtacaacttgccgtagactgtttctgcatgaaagtatttacgcagatgtactagaccaacttattggagtctacaaacaagtcaaaattgggaatcccttggagaaggggactctagttgggcccttgcatactcctacttcagtggaaaactttcagaagggtatttcagtcataaaatctcagggagggaagatcctaacaggtgga

SEQ ID NO: 6827 - DNA, 353 bp, Glycine max
cccacgcgtccgatttcaaaggcatgttttttcaacaaagttcattctacccacgagtcgattcaacaaacccagacgctaattctcccttctctatccccgcaccatcttcttcttcttcttccatttatccctcagtggaaacaacagagaatctcatttgggaagagccaaacacgactacagaagaagccatggaaaacgttctggtcacggtcccgggtgcgattctgcatctgatagaaaaggattccagcgtgcaccttgcttcgggcgacctcaccatatcgaccctcggagaaggcgacaaagtggtggcggttctggcatgcgtcggcgatcaggttcagtgg

SEQ ID NO: 6828 - DNA, 399 bp, Glycine max
  modified_base (67)..(67): a, c, g, t, unknown, or other
  modified_base (98)..(98): a, c, g, t, unknown, or other
aatcaatcacatttcaaaggcatgttttttcaacaaagttcattctacccacgagtcgattcagcanacccagacgctaattctcccttctctatccncgcaccatcttcttcttcttcttccatttatccctcagtggagacaacagagaatctcatttgggaagagccaaacacgactacagaagaagccatggaaaacgttctggtcacggtcccgggtgcgattctgcatctgatagaaaaggattccagcgtgcaccttgcttcgggcgacctcaccatatcgaccctcggagaatgcgacaaagtggtggcggttctggcatgcgtcggcgatcaggttcagtggccgttggcgaaagacgtgtcggcggtgaagctggatgagtcgcactac

SEQ ID NO: 6829 - DNA, 463 bp, Glycine max
  modified_base (270)..(270): a, c, g, t, unknown, or other
  modified_base (423)..(423): a, c, g, t, unknown, or other
catttcaaaggcatgttttttcaacaaagttcattctacccacgagtcgattcaacaaacccagacgctaattctcccttctctatccccgcaccatcttcttcttcttcttccatttatccctcagtggaaacaacagagaatctcatttgggaagagccaaacacgactacagaagaagccatggaaaacgttctggtcacggtcccgggtgcgattctgcatctgatagaaaaggattccagcgtgcaccttgcttcgggcgacctnaccatatcgacccttggagaaggcgacaaaatggtggcgggtctggcatgcgtcggcgatcaaggtcaatggcccgtggcgaaagacgtgtcggccgtgaagctggatgaatcgcactacttcttcacggtccaggtcccacaggagcacggngaggagaagggattcgaggtgttgaattacggtttaacgg

SEQ ID NO: 6830 - DNA, 428 bp, Glycine max
ccaattcgtgctgatcccaggctatttgaatatccagaaaatgcatgagatgacaagaatgaaaagaacaccattgtcttcaagctacatgttcgttgtcaagtgggtcaacctcgtattactgtaaaatcagataaactgaagtggttacctaatgggagtgagcttccctgtgaagatgtcaaaccaaatgcaggttcaaaaccaaaaacatttacatctttcacttgcagccaagattcacttcctgaattttccaacaattcaattggtcttacatattcggatattatattggctaaacttggacctggtcaggaaattgaacttgaagcacatgcagttaaaggcattggtaagacacatgcaaaatggtccccagttgccactgcttggtaccggatgcttccggaggttgtactcttgga

SEQ ID NO: 6831 - DNA, 402 bp, Glycine max
ctacactcattgcaacgaattgctaacgtcccacacgctacagagaagatacgacagagtgagagagaaagaagcacaacaaggatgtcttcgtcgtcatcgtcgtcgtcgtcgtcggaagatgaatctatgtcggaacagagcaatgaattaggacttgatttcatcttgagcttggacaatgttccatcaaagctccctccacacctcgaactctttaaaacacgtgttctttgcaacaacgatgctcctgtgcacactgatactgttcaatattccggtgcctatgctattatgggagttgataatagtgtgcggttggatagcttctgtgaaaactttaaggttgaagtgaagcggctgacggatagcgatattgaatttgatatgattggaatcgat

SEQ ID NO: 6832 - DNA, 454 bp, Glycine max
  modified_base (381)..(381): a, c, g, t, unknown, or other
cttgaaatgagagggtgtgtatttttcagtgaacgtgcacttgctgtggctgcaacacaattgacttctcttaggtacttgtgggtgcaaggttatggtgtatctccatctggacgtgatcttttggtaatgtctcgacccttttggaacattgagttgattccttctagaaaggtggctacgaataccaatccagatgagactgtagttgttgagcatcctgctcatattcttgcatattattctcttgcagggcagagatcagattttccagatactgttgtgcctttggacactgccacatgcgttgatacctagaggccagagctgtgtatatataccagttttcttttgtttttcttctcccctttcatatgctgnttctatgttcctgctctatttgtagttcattttagacaattagtcttgtaataagcctgtgttttcatttgaa

SEQ ID NO: 6833 - DNA, 377 bp, Glycine max
aatttgcacagtaacatattccctgacaacacaacaatgagtcgcaagagagacagggcagctgacttttcccgccacgactccgccaagcgccgcctccccttgccggagcccgcggaggaggagacgcctacgatgagaccggcgccgccgtccgcggtggtcgtgatgggcctcccccaggactgctccgtcctcgatctcaagtcccgattcgagatctacggcgccatctcccgcatccgcatcgaccgcgacgccgtcggatacatcacctaccggaccaaggactccgccgacgctgccatcgccgccggcctcgaccccaccttcggaatcaccgttaactctaaaatggttcaagtgttgtgggcaac

SEQ ID NO: 6834 - DNA, 404 bp, Glycine max
tcggtgaaaaaaaaaagagagagagaagaaaagaacgcagaaactgaactcaacaatggcagaacccaagggtaaatacgatcgccaactcagaatatggggcgaacaaggacaggcagcccttgagaaatctagtatttgcttacttaactgtggtcctactggttctgaaacacttaagaatcttgttcttggtggggttggaagtattactgtagtcgacggatcttaagttgaagtgggtgacctcggaaacaattttttggtggatgaagcaagtcttgggaagtcaaaagccaaatgtgtatgctcatttcttcaagagctgcatgatgcagcttaagcgaaatttgtagaagagtcttcagaaacattgattgagacaaatccatcattcttttctc

SEQ ID NO: 6835 - DNA, 443 bp, Glycine max
ctcaagcaatattatgcaacctgtttttctcttattgccgggataattctttttggtggggggcttgcacctagtggggagcttaagcttggactatggggcacatcttatgcagattttattgaaagtttacatcttcctatgcaactgagtcaggttgatcccatagtggcatcattctctggaggagcagttggagtaatctcggcattaatggtggttgagataaacaatgtaaaacagcaggagcagaaaagatgcaaatactgtcttggtactggatatcttgcatgtgctcgctgttcaagcacaggagcacttgttctgattgaaccagtatccacagtcaaaggtggagataagcctgtttcaccaccaaaaactgagagatgttcaaattgctctggatctggcaaggttatgtgtccaacatgtctgtgcac

SEQ ID NO: 6836 - DNA, 398 bp, Glycine max
cccacgcgtccgccgtcgaggtcttgcccattcaatcaaagcacaaaaatggaggtgactgttttcactcctgcactggaaggaattaagcttgtaaaatcagagcaaggagaaattttgacccagcctttcttggatgcttgcaagcatatacttcctgttatagataagtttggagctgctatggcccttgttaaatctgacattggtggtaacatatcgagattggaatctaagtactcctccaatccaaccaaattcaactacctgtacagtttggtacaagttgaggttgaaactaaaacggctaaatcatcatccagttgtaccaatggacttctttggcttacaagagcaatggatttcttggtggcattgttccaaaacttaattgagca

SEQ ID NO: 6837 - DNA, 348 bp, Glycine max
cagaaacggcactgctgaagaattggatggagctacttcagctgatgcgagatcctgggggggccgtagatcgggcctggtcttttgtgcctgagaagccacttatctacttgcgttgagtgagggagaggatgtctggtggcacacagaagagtctgagaaaagcacttggagcccttaaggacaccacaacagtctcgttggctaaggtcaacagtgattacaaggaattggacattgctatagttagagccacaaatcatgttgaacgtccggctaaggaaaaacatataagagctatattttcagctatctcagctacaagacccaaggctgatgttgcctatt

SEQ ID NO: 6838 - DNA, 427 bp, Glycine max
cgcaaactacaccactctatctctctcttcaattcaactccttcagctacagcgaaatcctggtctatccgtaaatcgtgccttgtctcttgtgcctgagaagccacttctctacttgcgttgagtgagggagaggatgtctggtggcacacagaagagtctgagaaaagcacttggagcccttaaggacaccacaacagtctcgttggctaaggtcaacagtgattacaaggaattggacattgctatagttagagccacaaatcatgttgaacgtccggctaaggaaaaacatataagagctatattttcagctatctcagctacaagacccatggctgatgttgcctatgggatccacgcacttgccaggcgggttatcaatgacacataactgggcggttgctttgaaaactttaattggtat

SEQ ID NO: 6839 - DNA, 433 bp, Glycine max
  modified_base (398)..(398): a, c, g, t, unknown, or other
ctgaatatctcacgccgaagaccgtgcgttgaaatcttgcaaggacgagatccaagcatcgttgttttccttcccagaatttacgctcttcttactatcatcaagatacaaaatggaatatcgacggaccagtggtaggcaggaaaccggtggccgtgacagaagacaatctaaaagggaacaggcatatcaggactctcttattgaggatttgtcacaggattttcgtttgccaatcaaccacagggcaacaaaaaatgttgatttggacaacgtagagcaagcatctttggacacacagataacatcatctaatattggctttaagctcctccaaaagatgggatggaaaggaaagggtcttgggaaggatgaacaagggatcattgagccaatanaatcctggatttagagatcaaacgttggggattgg

SEQ ID NO: 6840 - DNA, 410 bp, Glycine max
gaatatctcacgccgaagaccgtgcgttgaaatcttgcaaggacgagatccaaggatcggtgttttccttcccagaattgacgctcttcttactatcatcaagatacaaaatggaatatcgactgaccagtggtaggcaggaaaccggtggccgtgacagaagacaatctaaaagggaacaggcatatcaggactctcttattgaggatttgtcacaggattttcgtttgccaatcaaccacaggccaacagaaaatgttgatctggacaacgtagagcaagcatctttggacacacagataacatcatctaatattggctttaagctcctccaaaagatgggatggaaaggaaagggtcttgggaaggatgaaccaagaatcattgagccaaataaatctggaattaga

SEQ ID NO: 6841 - DNA, 446 bp, Glycine max
  modified_base (298)..(298): a, c, g, t, unknown, or other
cccacgcgtccgctgtctttttttctctttctctctctagattgtctttcttcttcttcggtatgagccctaactgggggccccatagtcgtcgctgctagctagccatgtcgctgaggaaggtcttccgctcccgcaagttctccaaatcgttcaaagaggtgctgccggcggagggcgccgccgtcgagggcggggtcgccggcaccgtcgaggaggcggcgaatgggaataataatgggtggtctagcatgctgccggagatcctcggcgagatcgtgcggcgcgtggacgccgncgaggagcagtggccgaaccgccaaaacgtcgtcgcctgcgcgtgcgtctgcaagaggtggcgtgacatcacgcgcgaggtcgtgcgtgtgccctcgcataccgggaaaatcactttcccttcgtgccttaaacagccaggaccacgt

SEQ ID NO: 6842 - DNA, 417 bp, Glycine max
ccagctgctactcgtgaatatgcaccattgattgaggaattatggaatgatgctggcattgaggctacatacgaaaggagaagcgaattagaaatgctgcctagtgttgccggttatttcttagagcgggctgttaaaatattaaggacagattatgaactctctgatttagatatcctttatgccgagggagttacttcatctaatggggtggcttgtgtggagttttcatttccccaatcagtgtctgaggaaactgttgacactaccgatcgatatgattctttggtcaagtatcaactaattaaggtgcatgcaagggggctaggagaaaattgcaagtggctagagatgtttgaggatgttgaaatggtcatcttctgtgtttccttgactgactattatcagtttttctgt

SEQ ID NO: 6843 - DNA, 434 bp, Glycine max
  modified_base (279)..(279): a, c, g, t, unknown, or other
cccacgcgtccgagcaactcgaaacagatgctgcagaagaagaagataacgtacaagcagcaatcaagctctcactgctattccccaaaatatttcaaaaaacataacaagaagaagaaaaaactgcaatgtatggaaaagtggttctctcgttcatcttcgtgctcttgctcgtcttctcttactcaattttcattggcaccctcgacattcgatcttatttcttccctcgcctaaagttacccgcggctgcacctgctccctgtgcacccgagcctnctcttcgggttttcatgtacgatctccctcgccgattcaacgtcggcatgattgaccgccggagcgcgtcggagacgcccgtcaccgttgaagactggccggcgtggcccgtgaactgggggcttgaaaagcagcacagcgtggagtactggatg

SEQ ID NO: 6844 - DNA, 424 bp, Glycine max
gaagaatcaagcaatggagcattcaatgagtgagaactcctgccaattgtgtgctgtagagaagcttacctttgaaccaccgcctatttattgcacaacttgtggggttcgcattaaacgaaataatatgtattataccacgggcaccggtgacacacggcattatttttgtcttccatgctataatgatgctcgtacagagaacatcattgttgatgggactcccattgccaaatcaagattggaaaagaagaagaatgatgaggaaactgaagaatggtgggttcaatgtgataaatgtgaagcatggcaacatcaaatttgtgctttatttaatggcagaagaaatgatggtggacaagctgaatatacttgccctaactgctatattcaagaggtagaaagaagagagcgcaagccctta

SEQ ID NO: 6845 - DNA, 453 bp, Glycine max
tgggaattgaagctttgaagtatattagttaccctgctcaggtgctggcgaagtcctctaaagggaggccagttatgctgatgggtactctggtatatggtataagatacacttttccagaatacctttgtacttttcttgttgctggaggggtatcaacatttgcacttctaaagactagctcaaagactatcagcaagctggcacatccaaatgctccccttggatatgggttgtgtttcctgaaccttgcttttgatggatttaccaatgcaactcaggattctttaaaagcaaggtatccaaaaacaagtgcttgggatattatgctgggcatgaatttatggggaaccatatacaatatgatttacatgtttggatggccccgtgccagtggatttgaagcagttcgcttttgccagcagcatccagaagcagcatgggatatttttc

SEQ ID NO: 6846 - DNA, 429 bp, Glycine max
caggaaactctttctcttcttccgtttcctagtctcacacccaaacctcatggaaggcggctgtcaacgaacgtcttgattttgggaagatgggatatgggtgcaatcattaccggagaagatgcaggattcgggctccctgctgcaacgagatctactcatgccgtcactgtcataacgacgctgcgagcttgttgaagaatccctttgatcgccacgagctcggtcgccaagatgttaaacaagttgtttgttcagtttgtgacactgagcaacctgttgctcaaggttgcacaaactggggcgtctaaatgggagaatacttctgcaacatctgcaaattcttcgatgattatgttgagaaagaacaatttcactgtgatgattgtgggatctgcagggttggtggtcgagataattttttccact

SEQ ID NO: 6847 - DNA, 175 bp, Glycine max
cccagacgtccgctgaagatgcttcatttccacagttactacatccagcttcactttcaggaatggttaaatgcatgtgtaggtattttagacactgctatagttccaagcctgtacttgaacttacaatctgagcaatacctgctgacacttgggagcacaaaattgtggaatc

SEQ ID NO: 6848 - DNA, 435 bp, Glycine max
gccccagtatttcaagagtgcatttgtaggatacactgttggcttggtccttacaattgttgtgatgaactggtttcaggctgcacagcctgctcttttgtatattgtaccttctgtaattggatttttggctgctcattgcttatggaatggtgatgtcaaacagttgttggagttcgatgagtcaaagactgccaattcacctcaagagagtgctgacgacaagtctagcaaaaaggttgaataagttgaagcatgcccaataccaatacttccgagtcacagaacaaatactgcttttttctgagaaaaccgtttcttttaaagctaacttatttcagcagcacacctctgtaactgattgtgattaaaaaaaaatgtattacttatttttcaaattggcgttttgcttttactggctgaatgccccaatct

SEQ ID NO: 6849 - DNA, 417 bp, Glycine max
agctcatcaagtccaagaaccaacctaccttttgcaatctcaattcaatggcgtcctctctcattgcgaagcgcttcctctcctcttccctcctctccaggtccctccttcgccccgccgcttccgcttcccaccgctctttcaacaccaacgccatgcgccagtatgacaaccgcgccgacgaccacagcaccgacatcgatcgtcactccgaacgctctttccctagcactgcgcgccgcgacgatatcttctcaggtagttgtagtcgctctctccctaacctcgcactaaccgattctcttaattcttctattttttatgtagtttagttgattcaatcgtggttttaaattgcgttgccgcaattgtccaaatctataaaaaatttatggctcaccgaaagtgcaatcgcaa

SEQ ID NO: 6850 - DNA, 445 bp, Glycine max
gacccacgcgtacacttgctcatcaagtccaagaaccaacctaccttttgcaatctcaattcaatggcgtcctctctcattgcgaagcgcttcctctcctcttccctcctctccaggtccctccttcgccccgccgcttccgcttcccaccgctctttcaacaccaacgccatgcgccagtatgacaaccgcgccgacgaccacagcaccgacatcgatcgtcactccgaacgctctttccctagcactgcgcgccgcgacgatatcttctcagatgtgttggatccattttttccgactcggagtttgagccaggttctgaacatgatggaccaggtcatggacaatccgttcctctccgcgtcgcgcgggatcggagctggcgctggagtgcgtcgcggatgggacgcgagggagacagaggatgctctgcatctgcgcgtgg

SEQ ID NO: 6851 - DNA, 406 bp, Glycine max
  modified_base (229)..(229): a, c, g, t, unknown, or other
  modified_base (268)..(268): a, c, g, t, unknown, or other
aaaaaacattgcccttgtcctttcaaagttacaaaccacaattccacaacacaccagcaccatatggcgtctgaacaattggcccgcaaaaagaacaccaccaccgaaaaggaaattcacgttgaaaaatacagggttcccaaaatggccacccacttcaagcaccttgcggagcaagctaaagaatctgacatcaccgctgggaaggatactccgcagggtagcatanaagccttgcaagctggagagaaggtcaaagatcatgcangaaaagccatgggagatattggtggacgtgggaaagccagagagactcacgagctgggtgcacactttgaatccctggctgacaaagtaactgaccatgcagcagccaatgtagttggaaacaaagagagtcaaagag

SEQ ID NO: 6852 - DNA, 448 bp, Glycine max
  modified_base (432)..(432): a, c, g, t, unknown, or other
cccacgcgtcaggcagaccctcagaaaattcaccctgtgcaccatgatgttgaggcacaaaaccacccttcagcaccattggtgccaaggagcatgtccaaatctgatgcaggtgatccacaacgagtagtaatacaacaacaacaacaaaacattcctctgaagcaaaccaagccaccaccgaaagaaaagaagaagctgctgctgcaggttcttctgttggctaataagcatattgctgattctgatagtggcaattggcatcactgttggaatactctaccttgtcttcaggccaaagcttccaaagtactcggtggacgaacttagagtcacacactttgatcttgcagacaacaacagcttatcagtgacattcaacttgacaataaccgccagaaaccccaacaaaaaaattggaatagactatangggtggcagccacata

SEQ ID NO: 6853 - DNA, 413 bp, Glycine max
ttcttctgtccctaaatggaaggatcaggatccggtgtggttacagtctacggcaacggcgccatcaccgagaccaagaagtcccccttctgcgtcaaagtcggcctagcccagatgctccggggcggcgtcatcatggacgtcgtcgacgccgagcaggcccgcatcgcggaggaggccggtgcctgcgcggtgatggccctggagcgtgttcccgccgacatacgggcccagggcggcgtggcccgcatgagcgatccgcagctcatcaaggatatcaagcgggccgtcaccatccccgtgatggccaaggcccgcatcggccacttcgtcgaagcccagatcctcgaagccatcggcatcgactacgtcgacgagagcgaggtcctcaccctcggcgacgacgccaacca

SEQ ID NO: 6854 - DNA, 416 bp, Glycine max
cttccttctcttctcacacaacaaacatatctcttcctcttctgtccctcaatggaaggatcaggatccggtgtggttacagtctacggcaacggcgccatcaccgagaccaagaagtcccccttctccgtcaaagtcggcctagcccagatgctccgcggcggcgtcatcatggacgtcgtcgacgccgagcaggcccgcatcgcggaggaggccggtgcctgcgcggtgatggccctggagcgtgtccccgccgacatccgggcccagggcggcgtggcccgcatgagcgatccgcagctcatcaaggatatcaagcgggccgtcaccatccccgtgatggccaaggcccgcatcggccacttcgtcgaagcccagatcctcgaagccatcggcatcgactacgtcgacgagag

SEQ ID NO: 6855 - DNA, 332 bp, Glycine max
tctcacacaacaaacatatctcttgctcttctgtccctcaatggaaggatcaggatccggggtggtgacagtctacggcaacggcgccatcaccgagaccaagaagtcccccttctccgtcaaagtcggcctagcccagatgctccgcggcggcgtcatcatggacgtcgtcgacgccgagcaggcccgcatcgcggaggaggccggtgcctgcgcggtgatggccctggagcgtgttcccgtcgacattcgggcccagggcggcgtggcccgcatgagcgatccgcagctcatgaaggatatcaagcgggccgtcaccatccccgtgatgg

SEQ ID NO: 6856 - DNA, 362 bp, Glycine max
gcttgaggccacgatcagtggcttgagggatgatgttgcaaagaacgcttcgattgttgaggatgtggagagggacttagctgttagggatcagaggctgaacgaggtttcggagaatttgagtaaggagcaaagcgaggctttgcagttgaaggagttcgttgctgagtgtgaggagaagttgagtaacttggaatctcggatggaatcgcaaaggcctttgttgattgatcagttgagttttgtttccaaaattcataaccagatatgcaatgttgttaagatacttgatgacggtggcacctcggagctgtctgaatcgttgtttgtcccgcaagaaacagacgttgaggagaatattc

SEQ ID NO: 6857 - DNA, 434 bp, Glycine max
tcggtttgttggtgagtgtgaggagaagttgagtaagttggaatctcggatggaatcacagggagctttgttgattgatcagttgagttttgtttccaaaattcacaaccagatttgcaatgttgttaggataattgaccacggtagcaccgaagagctatctgaatcgttgtttgtcccgcaagaaacggatgttgaggagaatattcgtgcctctttggctgggatggagtccatatatgagttgaccaagattgttgttcataaagctaacgatgtgcttgacgagaaggatcgtgagattaagagtttacatgagacattggctcggttagttatggagaatgatcaaaattgttcttttcttaagagtgctttgtctaagaaggtggcagttgatccgtcttttagaaagagtgaacctgtttaaactg

SEQ ID NO: 6858 - DNA, 359 bp, Glycine max
ccggtttctcttgtcacaccaaatggaccgacccgccgccatattttccgacaccgtcaacctcaacggcacggtgacgcagctgtctctgctcgccgacgggaggctgtggtggccggagggcggtcaacgcaatttgagcatcgagaaagaggttctcgggttcaccggcgacggtcccgatataaggctcaaaacaatcgtggaaaccgaagatggatgctgtggcggtgcaagcagagcaaaactagtccgaaacgacgtcgtttttcggccatcgtccgaggaaacgcataagctctggtgccagaagcttggcgaattcatcgattctctcggacgacccaagaggctttttg

SEQ ID NO: 6859 - DNA, 410 bp, Glycine max
cgcattataaccgaggctgttggtggccaggttgtggagcagtatgtggaggcaactccggttgaggcagggcgaagcagtgcaattaaggagaatgccataacaataggagaggcattggaggcgacggcacagactgtgggtcagaaagcggtggatcagagtgacgcctccgcgattcaggcggcggaggtgagagcaacgggaagtaacgttataacgccgggtggacttgcggctatggctcaatcagctgctgcttataatgctgactgcaagcttgaccaggacaaggtcaagctcgccgacattttggccggagccacagccaagttgcccgcggacaaggccgtcacactgcaagatgctgaaggtgtagcgtgtgctgaggtgaggaacaaccctgatgc

SEQ ID NO: 6860 - DNA, 396 bp, Glycine max
aatgaacaggctggtcttgtcggtcaccaggacgtcaccgacatcaccggcgaccatggcgtcacagtcacagaaactacattccatggaagacgcataataaccgaggctgttggtggccaggtagtggaacagtatgtggagccaaatccagttgaggctggacgaaccagtgcaattaaggagagtgctataacaataggagaggcattggaggccacggcacagacggtgggtcacaagccggtggatcagagtgatgcctcagcgattcaggcggcggaggttagagcaacgggaagtaacgttataacgccgggaggacttgcggctatggctcaatcagctgctgcttataatgctgactgcaagcatgaccaggacaagggcaagctt

SEQ ID NO: 6861 - DNA, 420 bp, Glycine max
  modified_base (401)..(401): a, c, g, t, unknown, or other
  modified_base (403)..(404): a, c, g, t, unknown, or other
caaaaccaaaacagtaaagctaacttcaacacctttaattttctaaaagtaattcagcggctgaataccaagcggagaagatgagtcaggagcagccacggcgtcccaaaggccaaaaccccatcaaatacggcgacgtttttgtcgtctccggcgaccttgcacagaagcccgtcgcaccggaagatgctgccatgatgcaaagcgcggaaactcgagtgctcggacaaacccaacccggcggagcagcttccgtcatgcaatctgccgccaccaggaatgaacaggctggccttgtcggtcaccgggacgtcaccgacgttaccggcgaccgtggcgtcacagtcacagaaactaaagtccctggaagacgcattataaccgaggcttgtggtggccangnntctttttttttctttt

SEQ ID NO: 6862 - DNA, 401 bp, Glycine max
atcaagcaagtggatggtataatcggctcattgggtagactactaatagaagatcaggtcaagatcgttgcagcattaaaagaagctggaaacgttaagagattttttccatctgaatttgggctggatgtggaccgtcacgatgcaactgagccagtcagagaagttttcgaggaaaaagcgaaaatccgaagagtaattgaagctgaaggaattccatacacttacctatgttgccatgcctttactggttacttcttacgtaaccttgcacagattgacatcactgttcctcctagggacaaggttttcattcaaggagatggaaatgtcaaaggagcgtatatcactgaggccgatgtgggagtttttacaatccaagcggcaaatgaccctaatgc

SEQ ID NO: 6863 - DNA, 455 bp, Glycine max
ctaattcaaagcttccaaattcttggagttcctttaatccagggagacctgattgatcatgaaggtctggtgaaagcaatcaagcaagttgatgtagtaatctgctcatttggtagactactaatagaagatcaggtcaagatcgttgcagcaataaaagaagctggaaacgttaagagattttttccatctgaatttgggctggatgtggaccgtcacgatgcaactgagccagtcagagaagttttcgaggaaaaagcgaaaatccgaagagtaattgaagctgaaggaattccatacacttacctatgttgccatgcctttactggttacttcttacgtaaccttgcacagattgacatcactgttcctcctagggacaaggttttcattcaaggagatggaaatgtcaaaggagcgtatatcactgaagccgatgtgggagtttttacaat

SEQ ID NO: 6864 - DNA, 413 bp, Glycine max
gtttagttacgtacatagcttgaaaacacagtgcttgtttagactagtatcttccatggctgcgaaagatagaatcctggttttgggacccacaggagccattggaagacacatagtttgggcaagtgtaaaggcagggaatcccacttttatattggttagggacacccctgcctctgttaacaagccaaggcttgtcactgctgctaatcctgaaaccagggaagagctcattcagagcttccaaaattctggagttactctaatccagggagatatgaacgatcatgaaagtctggttaatgcaatcaagcaagttgatgtagtaatctgctcatttggtagactactaatagaagaccaagtcaagatcgttgcagcaataaaagaagctggaaacgtcaagagatttt

SEQ ID NO: 6865 - DNA, 406 bp, Glycine max
  modified_base (355)..(355): a, c, g, t, unknown, or other
accacgcgtccggacgttcttgcaatccacgccacacgaagggtcgacccaacaacttggcccattggtcacagtcccacaattcctcttttcttgtgcaccttccttccttgttcaaaagggtcttcctagaaacactcaatgtgtggctgggttaggccatgcaccaatttctcttccaaaccaactcgcttcccactttggcctacaacgccaattcaccacttgcctttctcgctaccctacttcatagggtgctataatattcggggatgcacctatcaacatgcgacagtttcaaaaccaagatattttccacgatttggccttcaccccattaaccatcaccctgcanggagagtacaacgtgagagtcaactcaataagaatcaaccagcacagtgtg

SEQ ID NO: 6866 - DNA, 406 bp, Glycine max
tcgcccacgcgtccgcaaaccttgctctatactacacagtacacacactagaagaataatggcttccatcctccactactttttagccctctctctttcttgctcttttcttttcttcttatccgactcagtcacccttacaaaaccaataaaccttgttgttctacccgttcaaaatgatggttccacagggctccattgggccaacctccaaaaaagaacccctctaatgcaagtaccagtcctggtggacctcaatggaaatcacttgtgggttaactgtgagcagcagtactcatccaaaacgtaccaagcacccttctgccactccacccaatgctctagagccaacacccaccaatgccttaattgccccgcggcattaagggccaggtgccacaaaaac

SEQ ID NO: 6867 - DNA, 436 bp, Glycine max
ctaagtgtaatgatgagactgtagacgaatcttcaaatgatgtcaacggttctatcaacttgctaccagtgacatacatgcctactattaactcaagcgacaatacgtctatgcacaccactcaaactcaaggatacattccaactgctgccaaaggccataaagattctgatcatgcactggctatgaatgaaagtggaacaattcttgactctggtggcacacaaaacgttgtgcgtatctgggacacatgatcatgatcaaagactctcaagctaagagggcatacagataacatcagggctctgcttctggattctagcggcagatactgactatcaggatcattagactctatgatcaggcttcgggatataggtcatcaaaaatgtgtgcattcttatgcagttcatacacattctgactgggcactcgc

SEQ ID NO: 6868 - DNA, 446 bp, Glycine max
  modified_base (422)..(422): a, c, g, t, unknown, or other
cccacgcgtccgcccacgcgtccgggagatctcagcgttgatgaggaaaatggggtacaagcggaacgccaaaaggtgcaaagagaagtgggagaacatcaacaagtacttcaagaaggtcaaggaaagcaacaagaagaggcctgaagattcaaagacatgtccctattttcaccagttggaggctctatacagggagaagaacaagggagaggggcagatgaagccggagagcatgatggcgccgctcatggtgcagccggagcaacaatggcctcctcaaacaacgcttgtggtaccgccagaagtaaccatgggagacacccagaatgaccccatggaccggcagtaccatgaggagaatgaggatgacgaggacgacaaggaaattggagatgaagacgaggatgaggacgacgaangaggtgataattatgagatagttg

SEQ ID NO: 6869 - DNA, 438 bp, Glycine max
tttatattgaaaatccttaaacgtacgctattcctataataataataagcgacactatgggaataggtacattgtcaagggttcattcaccgactccttttggttgctacagagacagggagacaagacagagtagtacagattactaccaatggctaccaaggtttacattggttattattctacgtatggacatgttgagaagctagctagagagatagaaaaaggggctgcttctgtggagggagtagaagcaaaactgtggcaggtacctgaaacattgcctgaagaagtccttgctaagttgggagcacctccaaagagtgatgttccaattattactcccaatgagcttactgaggctgatggctttttgtttggttttcccacaagatttggatctatggccgctcaattaaagcatttcttgatgcaact

SEQ ID NO: 6870 - DNA, 413 bp, Glycine max
  modified_base (314)..(314): a, c, g, t, unknown, or other
gtgtcgatggcgggaaaaggagggaaggggcttgtggccggaagaaccacggcagcgaacaaggacaaagacaaggataagaagaggcccgtctctcgttcatcccgtgctgggatccagtttcctgtgggacgtatccacaggcagttgaagcaaagggtgcaagcaaatggacgtgtgggggcgactgctgctgtgtacttggcctccattctggaatatctgactgctgaagtgctggagctggcagggaatgctagcaaagatcttaaggtgaagaggatcacaccaaggcacttgcaacttgctatcangggagatgaagaacttgataccctcatcaaagggaccattgctggcggtggtgtcatcccttacattcacaagtttttgatcaacaaaagcgccaaaga

SEQ ID NO: 6871 - DNA, 412 bp, Glycine max
agtctcttgcacatcaaatgtacaagactggcaattataagcaagccctagaacacagcaacactgtctatgagagaaatccgctccgtactgacaacttactactcctgggtgcagtttattatcagttgcatgattttgatatgtgtgttgcaaaaaatgaagaagcactgaggattgagccacactttgctgagtgttacgggaatatggcaaatgcatggaaggagaaaggaaacattgaccttgcaattcgctactacttgattgccatagagctccgtcccaattttgctgatgcatggtcaaatctagctagtgcatacatgcgtaaaggaagactcactgaagcagcccagtgttgtcgtcaagcacttgctagaaatcctctaatggttgatgcccatagcaa

SEQ ID NO: 6872 - DNA, 327 bp, Glycine max
aagactacccagaaaagcccccaagtgttcggtttcattcacgaatcaatatgacttgtgttaatcatgaaactggagtggttgaatcaaagaaatttggtcttcttgcaaattggcaacggaggtttaccatggaagatatactgacccagctgaagaaggaaatggcgggtttcacataaccgcaagcttgtccaacctcctgaaggtactcactattagtgtccaagatcataccgatattggatcatattgcatttgcagtatgcaatatatagtatgtattactcttgatccttctaaattcaagaacataattgggaatgc

SEQ ID NO: 6873 - DNA, 277 bp, Glycine max
accacgcgtccacgtaactttcatttgttgtgcaatcttacaagttccaaacttctctattttgttattatttgttctcacttctcacacatacagatttgagccttttatattatcatggcttctaaggtggtttcggttttggttatagcgatgatgttgtttgccatgaactgtaactgcactagtgttggccaaatgccttcaaccaaagaggaaggtcacgattttcaggattctaaagccaaaaccaaccaaattgcaaacaaggccatgg

SEQ ID NO: 6874 - DNA, 437 bp, Glycine max
acacatacagatttgagccttttatattatcatggcttctaaggtggtttcggttttggttatagcgatgatgttgtttgccatgaactgtaactgcactagtgttggccacatgccttcaaccaaagaggaaggtcacgattttcaggagtctaaagccaagaccacacaaactgcgaacaaggccatggaaactggtaaagagggacaagaagccgcagagtcatggacagaatgggctaaagagaaactcagtgaaggtcttggcttcaaacatgatcaggaatccaaagaatccaccactaacaaagtctctgattatgccactgacactgcacagaaatccaaggattatgcaactgacactgctcagaaatcaaaggactatgcaggtgatgctgctcagaaatcaaaggactacgcaggtgatgctgctc

SEQ ID NO: 6875 - DNA, 385 bp, Glycine max
cccacgcgtccgcagaaaaccaaggactatgccggtgacactgcacagacatcaaaggactatgccggtgatgctgctcagaaatcaaagggctatgtcggtgatgctgcacaaaagaccaaagaatatgttggtgatgctgctcagaagaccatggattatgccactgatgcagcacagaagaccaaagattatgctactcagaagactaaggactatgcaagtgatgcaactgatgctgcaaaaaagactaaagattatgctgctcagaagaccaaggattatgcaagtgatgcaactgatgctgcaaaaaagactaaggattatgctgcgcagaagaccaaggactatgccagtggtggtgcgcagaagaccaaggactatg

SEQ ID NO: 6876 - DNA, 443 bp, Glycine max
  modified_base (391)..(391): a, c, g, t, unknown, or other
gctcagagaagcaaaggggctgctgaatatgctagtgatgcggctcagaggaccaaagagtatgctggtgatgctaccaagagaagcaaagaggcttctaatgatcatgccaatgacatggctcagaagaccaaagactacgccagtgacactgctcagagaaccaaggaaaaactccaagacattgcatctgaagctggtcaatacagtgcagagaaagctagagaaatgaaggatgcagcagcagagaaggcaagtgacatagcaaaggctgcaaagcaaaaatcacaagaggtgaaagagaaattaggtggacaacaccgggatgccgagctttgagaattgagatgtttgaatcactttgaaccttttaattatgccaacaatagtngtctaaatctgccagaaataatggtgtgtgtatatattatatggcaagatct

SEQ ID NO: 6877 - DNA, 345 bp, Glycine max
gtttggcgttcaatctaacaaacttctctatatcgtgtactttttcaacacacgttacacacttgtttatttgagcctttcatataaacatcatggcttctagggtggtttcggcattggtgatagcgatcatgtcgtatggcatgaactgtaactgcactagtgttggccacatgccttgaaccgaagaggaaggtcacgattttcaggaggctaaagccaagacaacacaaactgcgaacaacggcatggaaactggtaaagatgggaaagaagccgtatagtcatggacagaatgggcttaagagaaactcactgaaggtcttgggttcaaacatgatccag

SEQ ID NO: 6878 - DNA, 289 bp, Glycine max
gtcttcaaacatgatcaagaatccaccactaagaaagtctctgactatgccggcgatgctgctcagaaatcaaaggactatgccggtgacactgctcataaaaccaaggactatgccagtgacactgctcaaaaaaaccaaggactatgcccgttgaaactgcacaaccataaaaggactatgccggtaatgcttataacaaatcaaagggctatgtctggaataccgcacaaaggaccaaggaaaatggtttgaatgctacttaaaaaaccttggattttgccacttt

SEQ ID NO: 6879 - DNA, 294 bp, Glycine max
gctctgaaatcgattagtcttcttcgtttttcttcacattcctcgtgacagatctaatctaatcatgctgttgggggtgactcagacattgcatgcatatcggtggttgtgttggatgctataaaaggcctacactgagtgctactgtggatgtgccatcgaaagggttggccacacatggtaactgactgaggaaaccaagctcatgctaggatttttggaccactagcacgcatgatatggacaacagcgctgtccaatcacaggggagcatatattcagccattctaacaa

SEQ ID NO: 6880 - DNA, 367 bp, Glycine max
  modified_base (348)..(348): a, c, g, t, unknown, or other
cccacgcgtccgctttctctctcaaaaccctaaccctaaccccaatccccagagtctggaagcctctccaatggcgtaccagacccccgatcaagattcaggttccgatccgaagaccccaacgcgcctctacaacccctacaaggatctcgaagtccccattcgcaacctctaccagctcccaacctccccggagtacctcttcgtcgaagaagcccgccgcaagcgccgatcctggggcgagaacctcaccttctacaccggctgcggctacctctccggcgctgtcggtggcgccgactccggcctcgtcggcggcgttaaatccttcgagtccggcgacaccgncaagctccgcgtcaaccgc

SEQ ID NO: 6881 - DNA, 415 bp, Glycine max
cccacgcgtccgccacgcttctctccttccttcaacgtcgctttccactgtggccaccgggtgaacttttcaagtttgtggacacgctttaatgtacagaagcagcaatattgtggccagggtttttgatcgtcaaatttgcactcctgctcctggcactagtgtgtaatttaattcttgcaggttcatcatgctcggcgattctatgaaaatttggtaccaagtcacacagtatatgaggtcgagtgcccagaccattcatttcgtaaattcactgatgatggtcaataccttataagtttcagcagaaatcatcaggagttgattgtttataggcctagatggctttctttttcatgcaaggatgaagattgtgataaacatgatttgccatcaagagcaaagagatttgaca

SEQ ID NO: 6882 - DNA, 406 bp, Glycine max
ctcaaatctgcaaactaggctttttcccaacgggttcagtttattcaagttttacaatttcgtggctctgaaactattagatggggaattgtttgcgcaaggctcatgcggatgatgattctgatcatattgtggagcttgcttctgggaatgtgcaacttattactaccaaagaatcttgggaccaaaagttggatcaagcgaggaaggagagtaaaattgtaattgcaaatttcagtgcaacatggtgtggtccttgtaaggtgattgcaccacattattgcgagttgtccgtgaaatacccgtctatcatgttcttattagtcgatgtggatgaactagctgacttcagcacttcgtgggacatcaaagccacaccaactttcttctttcttaaagatgggaa

SEQ ID NO: 6883 - DNA, 450 bp, Glycine max
cccacgcgtccggttttccatcaaactcaaacataacagggaaatcatttggatttacgggttgttcggaaccaatggctcttaatagaccccaagatacagtttctaatgtcacaggcaaatgaagataaaacatctggagacttcagagaaatgggatttcggcttgcccaggaagtgatcttgttcctgaaaaagaagatggataaagcttcaagaaatggaaacttgaaagatatcaagcttagctttgttggtcattctattgggaatctcattatcaggacagccttgacagagagcgtcatggagccatatctaagatacttacatacatatgtctccatatcgggtccacacttgggttatatgtatagttcaaactctctattcaattcagggttgtggatattgaagaagctcaagggcacacaatgcaatcaccaactt

SEQ ID NO: 6884 - DNA, 386 bp, Glycine max
gccatgaaaaggactatatctggtatgctgggcttgcttccatctgatcagtttcacgttgtcattgaggccttgtgggaacccctttccaagttactaatttcttcaatgatgactgggtatacgctgcacaatgttgaatatagactttgtcttgataaaaaccttgatatgtttgaaggagatatagagaagccaaaggcataaagtacgaaagtggacttacaagggttgatgcatgacagtgtaaatgtaattgactttggtagagataagagcttgtcttctaaagttgaaaagctttcatgaagacgctgacattcaagaacttggtgacatatctgcataagctctgcaatatatttttaatctgcaatctcgcttgt

SEQ ID NO: 6885 - DNA, 438 bp, Glycine max
  modified_base (306)..(306): a, c, g, t, unknown, or other
cccacgcgtccgcccacgcgtccgtttctctcttctctgcttcttcttgttcaaatcttaggagctgaggagaatcaatcgagagaaatatgtctggtatcgctcgtggacgccttgctgaggaacgaaagtcatggcgcaaaaaccatccacacggtttcgttgccaagcccgagactctacctgatggcaccgtaaatttgatggtctggcattgcactattcctggcaagaccgggactgattgggagggtggatatttcccactgacaatgcacttcagtgaagattaccctagcaagcctnccaagtgcaaattccctcaaggtttctttcaccctaatgtgtatccatctggaactgtttgcttgtctatacttaatgaagatagtgggtggagaccagctataacagtgaagcaaattcttgtgggcattc

SEQ ID NO: 6886 - DNA, 331 bp, Glycine max
  modified_base (120)..(120): a, c, g, t, unknown, or other
attttctctcttctctgcttcttcttgttcaaatcttaagagctgaggagaatcaatcgagagaaatatgtctggtgtcgctcgtggacgccttgctgaggaacgaaagtcatggcgcanaaaccatccacacggtttcgttgccaagcccgagactctacctgatggcaccgtaaatttgatggtctggcattgcactattcctggcaagaccgggactgattgggaaggtggatatttcccactgacaatgcacttcagtgaagattaccctagcaagccctccaagtgcaaattcccttcaggtttctttcaccctaatgtgtatcca

SEQ ID NO: 6887 - DNA, 420 bp, Glycine max
agcacggagtgatggctgtgcagctgtgggaaaccctgaaggaagccatcgtagcctacactggcttctctccttccaccttcttcacggtgctggcgcttctttttgccgtttactacgtcgtcacgggtctctttggctcctccgacgatcaccatcaccgccaccgccacgtcgaggaggaggaggagatgccgcctctgcgccccccggttcagctcggcgagatcacagcggaggagctcaaggcctacgacggcaccgatcccgagaagcccttgctcatggccatcaaggcccagatctatgatgtctcccagagcacgatgttttatggacctggtggaccttatgccctatttgctggcaaggatgctagcagagccttagcaaagatgtcttttgaagagaaagatctga

SEQ ID NO: 6888 - DNA, 382 bp, Glycine max
gggagcaacaccatctttcattttccggcgatctcttgtttcttccatcatcaccgttgtccggcgatccctaatcctcgcaaacagaaatgacgacatcaaggcgccttgcggacaggaaggtggagaagtttgagaagaacatcacaaaaagaggatttgtgccagacactaccactaagaagggaaaagactaccctgttggcccagtgctgctcggtttcttcgtctatgttgtcattggatcatctctcttgcagataatcaggacagcaacgagtggaagcatggcttaaatggagcttggtttggattatgtgtcatcttctctttcttagcctcctcgtagaaaatgctaatacttctctacatgtactgtact

SEQ ID NO: 6889 - DNA, 399 bp, Glycine max
gacccaagcgtcagccaatacccatttcggtaaataatataatcgcaatccttcttcactcgcttcgatggcgacagggttactgaagagggcggcgcagaggctcccctcctcgccggggttcaagctggccctcctccgggcccacgcgtcggaggcccaggcccagcaggtggagcccaaggcccgcggcaccccgaccctcaaaaccttccaaatctaccgctggagcccggagaacccctcaaagcccgagctcaaggactaccagatcaacctaaaggagtgcgggcccatggtcctggacgcgctcatcaagatcaagaacgagatcgacccgagcctcacgttccgccgctcgtgccgcgaggggatctgcggctcctgcgccatgaacat

SEQ ID NO: 6890 - DNA, 421 bp, Glycine max
  modified_base (318)..(318): a, c, g, t, unknown, or other
accacgcgtccgatcggatcgatcaagcatcagggagctttgagggttgattctctggtgtagtagcaggcagcacaatagaaaatgttttttgacggatatggatatcatgggacatcatttgagcagatatatcgatgctacccagcttcctttattgaaaagccccaaatccaaagtggtgacaaaattatcatgcctccatcagcccttgaccgtctagcatctctgcatattgattacccaatgttgtttgaactccgtaatgatgctgccgaacgggtttctcattgtggggttctggagttcattgctgangaaggcatgatatacatgccatactggatgatggagaacatgcttttaaaagacggggacactgtcaaagtgaaaaatgtgacacttccaaaggggacatatg

SEQ ID NO: 6891 - DNA, 451 bp, Glycine max
ctctcatgtcatcggatcgatcaagcatcttggagctttgagggttgattctctggtgtagtagcaatcagcacaatggaagatgttttttgacggatatggatatcatgggacatcatttgagcagatatatcggtgctacccagcttcctttattgaaaagccccaaatcgaaagtggtgacaaaattatcatgcctccatcagcccttgaccgtctagcatctctgcatattgatgtcccaatgttgtgtgaacttcgtaatgatgctgacgagcgggttgctcattgtgggggtctagagttcattgctgaggaaggcaggatatacatgccatactggatgatggtgaacatgctttgacaagagggggacattgtcaaattggaaaatggtacactttcaaaggggacatatgttaagttacagccccacacaaaagactttttg

SEQ ID NO: 6892 - DNA, 395 bp, Glycine max
  modified_base (302)..(302): a, c, g, t, unknown, or other
gatcgatcaagcatcagggagctttgagggttgattctctggtgtagtagcaatcagcacaatggaaaatgttttttgacggatatggatatcatgggacatcatttgagcagatatatcgatgctacccagcttcctttattgaaaagccccaaatcgaaagtggtgacaaaattatcatgcctccatcagcccttgaccgtctagcatctctgcatattgattacccaatgttgtttgaactccgtaatgatgctgccgagcgggtttctcattgtggggttctggagttcattgctgangaaggcatgatatacatgccatactggatgatggagaacatgcttttacaaaaaggggacattgtcaaagggaaaatgtgacacttccaaagg

SEQ ID NO: 6893 - DNA, 442 bp, Glycine max
atactggatgatggagaacatgcttttacaagagggggacattgtcaaagtgaaaaatgtgacacttccaaaggggacatatgttaagttacagccccacacaaaagactttttggatatttccaatccaaaagctatcttagaaacaacattgaggaatttttcctgcttgactactggagatagcattatggtggcttacaacaacaagaaatattacatagatattatagaaactaagcctgacactgccataagcataattgagactgactgtgaagtggactttgctcctcccttggattacaaggaacctgaaaaacccactgcacccctttctgctgggaaggcagcagtggctgctgaggtgatccctgctgaagatgagcccaagttcaacccattttctggaactgggagacgcttggatggaaaacctttg

SEQ ID NO: 6894 - DNA, 258 bp, Glycine max
cccacgcgtccgattctcttctcatctatggggcagaagtctctgatctacgcgggggtgtcgcggggaacagtgattctcgcggagtacaccgaattcagcggaaacttcaactccatggccttccagtgccttcagaagctccctgccaccaacaacaagttcacctacaattgcgacgcacacaccttcaattacctcgtcgacaatggctacacatattgtgtaggtgcagatgaatcaattggaagacaggga

SEQ ID NO: 6895 - DNA, 331 bp, Glycine max
gcggccacgcgtacggtctccacgaatcatcgatggtaactgccacgttgatgattgaactctggaggatgggcctgagtctgattctgctggaccaacttcgggaagcactgtctgtgctgtcgctattagaaacaaccaacttgttgttgcaaatgctgctgattcgcgatgtgtgatatctcggatgggccatgcatacaatccgcctatagaccacaaacctgatcttgagattgatatggacagaatcttaaaagcttgagcttacattcatgcacgactagttaatgtaagtttaaatcttgctagagctattggtgacatggaa

SEQ ID NO: 6896 - DNA, 405 bp, Glycine max
  modified_base (369)..(369): a, c, g, t, unknown, or other
caacattttacactcttttcttcttctcgttgttgcttcgctgttgaatcatggatcagggggtcgatttcagcgctgcccattccatgggaaccactatcatcggcgttacttacaacggcggtgtcgttctcggagccgactctcgaaccagcaccggagtgtatgttgccaaccgagcatcggacaaaatcactcagctcactgataatgtatacgtgtgtcgctctggatcggctgctgattctcagattgtctctgattatgtgcgttacttcctccatcaacacacaatacaacttggacaacctgcaacagttaaagttgctgcaaaccttgtccgacttctctcatataacaataagaatntcttagagaccgggttaaattggtggtggatgggat

SEQ ID NO: 6897 - DNA, 378 bp, Glycine max
ccagcgtcgtcacaaccatggataattccaaccttcaacgtctcttcactctcttcctttttgccctaattgcaccctctttggctcaacaatccttcagacccagagccctcgttgtcccagttaaaaaagacgcttccaccctccaatatattactcaaatcaaacaaagaacaccactcgtcccagaaaacctagtacttgacatcggtggccaattcctgtgggtcgattgcgacaacaactacgtctcctccacttaccgccccgcacggtgtggctccgcccagtgctccctcgccagatccgacagctgcggaaactgcttctccgccccaaaacccggctgcaacatcaacacgtgcggcgtcatgccag

SEQ ID NO: 6898 - DNA, 314 bp, Glycine max
tgcttctccgccccaaaacccggctgcaacttcaactacgtgcggcgtcacgccagacaacaccgtcaccggcaccgccaccagcggcgagctcgcgcaagacgtcgtctgcctccaattcaccaacggttttaaccctatacaaaacgccgccgtttcgcgcttcttattctcctgcgctccaaccttcttactccaaggccttgccaccggtgtcagcggcatggccggtctcggcagaactagaattgctctcccctcgcagctcgcttccgctttcagcttgcgtagaaaattcgccgtctgcctctcat

SEQ ID NO: 6899 - DNA, 444 bp, Glycine max
  modified_base (373)..(373): a, c, g, t, unknown, or other
ccaaccttcaacgtctcttcactctcttccttttttccctaattgcaccctctttggctcaacaatccttcagacccagagccctcgttgtcccagttaaaaaagacgcttccaccctccaatatattactcaaatcaaacaaagaacaccactcgtcccagaaaacctagtacttgacatcggtggccaattcctgtgggtcgattgcgacaacaactacgtctcctccacttaccgccccgcacggtgtggctccgcccagtgctccctcgccagatccgacagctgcggaaactgcttctccgccccaaaacccggctgcaacaacaacacgtgcggcgtcacgccagacaacaccgtcaccggcaccgncaccagcggcgagctcgcgcaagacgtcgtctccctccaatccaccaacggtttcaaccctatacaaaacg

SEQ ID NO: 6900 - DNA, 356 bp, Glycine max
  modified_base (19)..(19): a, c, g, t, unknown, or other
cccacgcgtccggataatnccaaccttcaacgtgtcttcactctcttccttttttccggaattgcaccctctttggctcaacaatccttcagacccagagccctcgttgtcccagttaaaaaagacgcttgcaccctgcaatatattactcaaatcaaacagagaacaccactcgtgccagaaaacctagtacttgacatcggtggccaattcctgtgggtcgattgcgacaacaactacgtctgctgcacttaccggcccgcacggtgtggctcctgccagtgctccctcgccagatccgacagctgcggaaactgcttgttcgacccaaaacccggctgcaacaacaacacgtg

SEQ ID NO: 6901 - DNA, 427 bp, Glycine max
cccacgcgtccggcgtgaaatcgattaaaatcgacgaaaagacagtgccgttaaacacgactttgttgtccataaacagcaaaggcgttggtggaaccaagattagttccgttaacccttacactgttttggaggattctatcttcaaagcggtgacggaggctttcgtgaaagcttcttctgctaggaacataacgagggtggcttctgtggcgccgtttgaggtgtgcttcagtagggagaacgtgctcgccacgcggttgggggcggcggtgccaactattgagcttgtgctgcagaaccagaagacggtttggaggatttttggagcgaactcgatggttagtgtgagcgatgataaggtgctatgccttgggtttgtgaatggaagtgagaatccgaggacttcgatagtgattggaggata

SEQ ID NO: 6902 - DNA, 452 bp, Glycine max
  modified_base (381)..(381): a, c, g, t, unknown, or other
gcgaccctacgttcttctccccaacgtcgacgcttctcagctactcaccttcacgccgttattaatgaaccccgtgggcaccgcctctgctttctcccagggagagccttccgccgagtatttcatcggcgtgaaatcgattaaaatcgacgaaaagacagtgccgttaaacaccactttgttgtccataaacagcaaaggcgttggtggaaccaagattagttccgttaacccttacactgttttggaggattctatcttcaaagcggtgacggaggctttcgtgaaagcttcttctgctaggaacataacgagggtggcttctgtggcgccgtttgaggtgtgcttcagtagggagaacgtgctcgccacgcggttggnggcggcggtgccaactattgagcttgtgctgcagaaccagaagacggtttggagggatttttggagcgaac

SEQ ID NO: 6903 - DNA, 385 bp, Glycine max
  modified_base (331)..(331): a, c, g, t, unknown, or other
gtcacaaccatggataattccaaccttcaacgtctcttcactctcttccttttttccctgattgcaccctctttggctcaacaatccttcagacccagagccctcgttgtcccagttaaaaaagacgcttccaccctccaatatattactcaaatcaaacaaagaacaccactcgtcccagaaaacctagtacttgacatcggtggccaattcctgtgggtcgattgcgacaacaactacgtctcctccacttaccgccccgcacggtgtggctccgcccagtgctccctcgccagatccgacagctgcggaaactgcttctccgccccanaacccggctgcaacaacaacacgtgcggcgtcacgccagacaacaccgtcaccg

SEQ ID NO: 6904 - DNA, 388 bp, Glycine max
acgcaaaggcccaggccttgaagactgctaaggcagttaagtcaggtgctacctttaagaagaaggtaaagaagatccgaacttctgtcactttccacaggccgaagaccttgaacaaggacaggaaccccaagtaccctcgcattagcgccccgccgaggaacaagcttgatcattatcagatcctgaaataccccctcaccactgagtctgccatgaagaagattgaggataacaacactttggttttcattgtcgacctgcgtgccgacaagaagaagatcaaggatgcggtgaagaatatgtatgacatccaggccaaaaaagtgaacaccttgatcaggcctgatggcaccaagaaggcatatgtcacgttgacacctgatta

SEQ ID NO: 6905 - DNA, 400 bp, Glycine max
cgcagggtttcccgaagatttaacacctatggctcctaaagctgatagttgaaagaaggctgatccaaaggcacaagccttgaaaactgctaaggctgttaagtcaggtgctactttaaagaaaaagaccaagaagatccgaacatctgttaccttccatcgaccaaagaccttgaaaaaggataggaaccctaaatacccacgcattagtgctccacccaggaacaagcttgatcactatcagatattgaagtatcctctcacaactgagtctgcaatgaagaagattgaagacaacaacactttggttttcatagtcgacttgcgggctgacaagaagaagatcaaggatgcagtcaagaagatgtatgatattcagaccaagaaagttaacacctta

SEQ ID NO: 6906 - DNA, 416 bp, Glycine max
gcaggaattaggaatattcgacaggtagagtttcttcaatggctcctaaagttgataagaagaatgatccaaaggcccaggccttgaagactgctaaggcagttaagtcaggtgctacctttaagaagaaggtaaagaagatccgaacttctgtcactttccacaggccgaagaccttgaagaaggacaggaaccccaagtaccctcgcattagcgccccgccgaggaacaagcttgatcattatcagatcctgaaataccccctcaccactgagtctgccatgaagaagattgaggacaacaacactttggttttcattgtcgacctgcgtgccgacaagaagaagatcaaggatgcggtgaagaaaatgtatgacatccaggccaaaaaagtgaacaccttgatcaggcctgat

SEQ ID NO: 6907 - DNA, 318 bp, Glycine max
taggcctcagcctctccaatatgtggtcaatgcggcctttttggctgccctatatagtgattatcttgatgctgctgatacacctggatggtattgtggacctaatttcttttcaaccgacgtgctccgtagctttgccaagtcccagattgattacatccttggaaataacccaaggaaaatgagttatgtcgtaagttttggtaatcattacccaaaacacgtccaccatagaggagcatctgtaccgaagaacaagatcaagtatagctgtaaaagtggatggaaatggaaggacacttctaagccaaacccaaa

SEQ ID NO: 6908 - DNA, 427 bp, Glycine max
taggcctcagcctctccaatatgtggtcaatgcggcctttttggctgccctatatagtgattatcttgatgctgctgatacacctggatggtattgtggacctaatttcttttcaaccgacgtgctccgtagctttgccaagtcccagattgattacatccttggaaataacccaaggaaaatgagttatgtcgtaggttttggtaatcattacccaaaacacgtccaccatagaggagcatctgtaccgaagaacaagatcaagtatagctgtaaaggtggatggaaatggagggacacttctaagccaaacccaaatacaattgttggtgccatggttgccggtcctgacaagcatgatggcttccatgatgttcgtacaaactacaattacacagagccaacacttgctggaaatgccggttta

SEQ ID NO: 6909 - DNA, 421 bp, Glycine max
cccacgcgtccgaaatctgatgcccacagaatggtgaggactggtcttcaaaaagaaggatcaagagtgatttttggtgttcctaaacctgggaagaaaagaaaatttatggaagtaagcaagcattatgttgcagatgggacaagcaagatcaatgatggaactgattcagtcaagctttcaaatttcttgatacctcaaggtactggatcacgtgggtggaaaaatagttcaaaaaatgataccaaggaaaaactaggagctgactccaggcccacctttaagtctggaaagtcgcagagtgttttgggtagagtggtcccaccaaaagaaaacccattatcaaactctcgtactaatgatttgacaagtcatgcagaaaggatcaaggattcatcaagtcattttaagaatgtatctc

SEQ ID NO: 6910 - DNA, 451 bp, Glycine max
gatggattgccctatgatgaattcttttcacaaagatctgagtctctcttgaaggttcttaggtcaggggccaggataaagaaagaagcctttcaggctgcttcaattcctgttgttttggtcgagaacagtgggagatgcaacaaaatgacagtgatgaaaaggttcttccaaatgggactgcttggattcctaatctagtccagacaatcacagaaatcgcattgaacaaaagtgagtctattcatgttgacaagaatttgattgaagggccaaatccgaatcagagaggaaaattatggattcctctcgtgttcgctctccaatacttccttatcatgaagccaataaaaggactgatcgagaaagacattgcaaatgagagaaagccaacatgggagagacgcgatgctgcttttcggaagagagatttatattaattgtgcatttc

SEQ ID NO: 6911 - DNA, 221 bp, Glycine max
ggacatgcaacaaaaatgacagtgaggaaaatgttcttccaaatgggactgcttggattcctaatctagtccaaacaatcacagatattgcattgaaccaaagtgagtctattcacgttgacaagaatttgattgaagggccaaatccgaatcagagaggaaaattatggactcctcttgtgattattatattattaatctatattatttttaatatatta

SEQ ID NO: 6912 - DNA, 285 bp, Glycine max
tgaactccttaactatacttgtgattggaaaagggggtgtttgaaaatcttcaactgggaactccatcattggggatagagtgggttccaataatcctttccaatccgaaaggcccaaaaccctgattgtgtcgcgaacaaaggcttgttttacattgaacattcatgacactcctggtctcattgaagggggatacatcaatgatatggcacttgatataataaaacgtttccttcttaacaagaccataaatgtactgctttatgtggatcgcttggatgtgt

SEQ ID NO: 6913 - DNA, 378 bp, Glycine max
atcctcacacaaacgaaaacaaatatctttcacttcttctgcatccgacgctagaagaggtgtcggaacaaacaagcttcgtttcgccggaacgatgaccggcggcggatcgacggggaggttgccaacatggaaggagagagaaaacaacaagaggagagagaggagacgaagagcgatcgccgctaagatctacaccggtcttcgagctcaggggaactacaagcttccgaagcactgtgacaacaacgaggtcctgaaagctctatgcgccgaagctggttggatcgtggaagaggatggcaccacttatcgaaagggatgcaagagacccagcgcgagtgagattggaggaacagtggcaaacataagcgcgtg

SEQ ID NO: 6914 - DNA, 370 bp, Glycine max
acggtaaactcaaagatgaatatgctatgctaaatgaagaatctcgtgagttgactctagagaaaactgatctcagggaagagaaggcttctcttaaatcagatattgacaacttgaataatcagtatcagcagcagctcaggaccatgtttccatggactgcaatggagcattcagttatgatggctccatcatcgtatccatatccagtgccaatggcagtacctcctggtccaattcccatgcagccataccccttctttgctaatcaacatcctgcagtcatctccaacccctgttcaacttatgttccttatttagcccccaataccattgttgaacaacaatccaccctgtacgtatcccctcc

SEQ ID NO: 6915 - DNA, 414 bp, Glycine max
ggggaacacggagaagctgatgaaccagatcatggaattgaaattcacttcgaaatcgctgcagcgtcaatcgcgtaagtgcgagaaggaggagaaatcggagaagctgaaggtgaagaaggcgatcgagaaaggcaacatggacggcgctcgaatctacgcggagaacgcgatccgtaagcgcacggagcagatgaactacctccgcctggcctcgcgcctcgacgccgtggtcgcccgcctcgacacgcatgcgaagatgacgacgatcagcaagtcgatgggcaacatcgtgaaatcgctggagtcatcgctggccacggggaacctccagaagatgtcggagaccatggactcgttcgagaagcagttcgtgaacatggaggtccaggccgagttcatggagagcgccat

SEQ ID NO: 6916 - DNA, 430 bp, Glycine max
agaaaaaccagctttcttcaagcacctagatttactctctctctaaatggcgttctcttgttttcgcggcagagtcctcttcgcctccgttttcatcctctccgcttaccaagaatttaattcttatggagttgatgggggacccgcagcaaaagcactcagaccgaagtttgatgcctttgcacatcaagtacattctaaagttggctttcaacttccagatattgatatgaaatttttagtggctggggctattgctctcaagggccttggagggattcttttcatactcagcagctcttttggagctttccttttgcttttgcatcaagtgatcactactccaatactgtatgatttctacaattatcacagtgaggacaaagaatttatccaacttttcatcaaatttactcagaatatggctctc

SEQ ID NO: 6917 - DNA, 444 bp, Glycine max
gacccacgcatccgctccctcatcaccttgctaaattctctggctaattcgcgattttcttgtagtaaacagagcaagcgagcttctccaattcaacatacatggcccccgaaaccgattcaattgaaatgttcttcttccccttcgtaggaggaggccatcagattccaatgatagacgcagcaagagtgtttgcatctcacggagccaaatcaaccattctagccacaccctccaatgctctccacttccataactcaatctcgcatgaccaacaatccggtcttcccatcgccattcataccttctccgccgatatatccgacacagacatgtctgctgccggtcccttcatcgactcctcggctctcctcgaaccgctgaggctgtttctcctgcaacgcccccccgactgcattgtcatcgacatgttccatcgttggg

SEQ ID NO: 6918 - DNA, 413 bp, Glycine max
  modified_base (289)..(289): a, c, g, t, unknown, or other
ctcatcttgcaaaattctctcagctaattcgctattttcttgtagtaaacagagcaagcaagcatatccatttcaacatggccctcaaaactggttcagttgaaatgttcttcttccccttcgtaggaggaggacatcagattccaatgatagacacagcaagagtgttcgcatctcacggagccaaatcaaccattctagtcacaccctccaacgctctaaacttccaaaactcaatcaagcgcgaccaacaatccggtcttcccatcgccattcacaccttcttcgncgacatacccgacacagacatgtctgccggtcccttcatcgacaccttggcccttctcgaacctcttcggcagctcctcatccaacgccccccggattgcattgttgtcgacatgttccatcgc

SEQ ID NO: 6919 - DNA, 352 bp, Glycine max
tcgcctcatcttgcaaaattctctcagctaattcgctattttcttgtagtaaacaaagcaagcgagcatatccatttcaacatggccctcaaaactggttcagttgaaatgttcttcttccccttcgtaggaggaggacatcagattccaatgatagacacagcaagagtgttcgcatctcacggagccaaatcaaccattctagtcacaccctacaacgctctaaacttccaaaactcaatcaagcgcgaccaacaatccggtcttcccatcgccattcacaccttcttcgccgacatacccgacacagacatgtctgccggtcccttcatcgacacctcggcccttctcg

SEQ ID NO: 6920 - DNA, 414 bp, Glycine max
atcctcagagcggtggatagggatttttcactctgcagcgttccgttccattgtgatttgttgaagtttctgatggagcagcgaaagcttgtggttttggggattccgtgggatatcgatactgagggattgagggaatatatgagcaagtttggtgagctggaagattgcattgtcatgaaggagcggtcaactggacggtctcgtggttttggatatgttacatttgcttcagtggatgatgctaaggaagtactatcaagtgagcatattcttggtaataggacgctggaagtcaaagtggcaacaccaaaggaagaaatgagggcaccggtcaaaaaagttactagaatatttgtagccaggattccacaatcagtaacagaagctactttcagaagtcattttgagaaa

SEQ ID NO: 6921 - DNA, 270 bp, Glycine max
gtctatgcatatgctgctgctcaagtgaagaaagccatagaggtgacacattatggggggggagaaaattatgttttctggggtggtcgtgaaggttatcaatctcttttgaacacagatatggagcgagagcttaatcatttggctaggttttttgaagctgctgatgcatacaaaaagaagattggattcaatgggacatttctaatcgaaccatagccacatgaacctacaaaacaccagtatgattgtgatgcttcaaccttaact

SEQ ID NO: 6922 - DNA, 293 bp, Glycine max
ccacgccgacccacgcgtgcggtacactcggagtagacttttggtgttcccacatacagggatatagcactcctgggggaaaaggtcttgaggaatctaatgcaaacttggatgaagtggatgcccttgctcaagagctccagactagagctaaaaaaagagggttatgagtaacagctcattagttcatgcattctccatacatgcatggcgctgctactagctctgaattgaaggcacacgcatatgctgctgatcagatgaagatagccatgaaggtgacacattatatg

SEQ ID NO: 6923 - DNA, 424 bp, Glycine max
  modified_base (404)..(404): a, c, g, t, unknown, or other
ggaacaagagcatctccaatattctggaatgcggggaattatagtggagatactgttatcattgagattttttatctaccagtatggtctggtatatcacttaaatattacgaagaaaggcacaaaaagttttctggtctatggcatttcatggttggtgatattcgtaatattgtttgtgatgaagacggtatctgttgggaggcgtaaattcagtgcaaattttcaacttgtcttccgactaatcaagggaatgatattcctcacttttgtctcgattcttgtcattttgattgctcttccgcatatgacagtgcaagacattgttgtttgcattcttgctttcatgccaactggttggggaatgctgcagattgctcaagcattaaaacctgtagtacgcncggctgggtttttggggatc

SEQ ID NO: 6924 - DNA, 348 bp, Glycine max
ggccttgcctggcgccaccatgttccctcaagtcatctcaaccgctgcttcgtttaatcagtcgctgtggcaggaaattggacgggtggtgtctgatgaagcaagagcaatgtacaacggtggacaggctggtttgacgtattggagtcctaatgtgaacattttccgtgacccacggcggggccgtggccaagagactcccggcgaggacccgacattggccgcaaaatacgccgccagctatgtcaaaggactccaaggcgatggtgccggaaatcgcctcaaggttgctgcttgttgtaaacactacactgcctatgatcttgataattggaatggtgtggacag

SEQ ID NO: 6925 - DNA, 352 bp, Glycine max
gagatggacaaccaaagcagacaatctcttacatggctgaacgtgtggttgggactggttcttttggtgttgtttttcaggctaagtgccttgaaactggtgaatctgttgccataaagaaggtgttgcaagacaggagatataagaatagggaactccaggttatgcgcacagttgaccatcctaatgttgtcaaactaaagcactacttcttttcaactaccgataaagatgaattgtaccttaacctggttttggagtatgtacctgaaactgtctacaaagtttcaaaacactatgttaggatgcaccaacacatgcctatcatttatgtgcaactttatacctacca

SEQ ID NO: 6926 - DNA, 265 bp, Glycine max
agtttcgggactggttctgaccatattggataggtagattgaatctgggcagattcggcctggctatctatacttgcatataaaaataaagataaacttgaagacaagcttgtcactgttgaagacatagttcgccagcattgggctacttatgggcgccattattatactcgatgactatgaaaacgtggatgcatgtgcagcaaaggaactgatggcatatttggtcaagctgcagtccttaattataaaagtcaatcagatt

SEQ ID NO: 6927 - DNA, 422 bp, Glycine max
  modified_base (411)..(411): a, c, g, t, unknown, or other
ggctgaggctgctgcagcctcctttggggaaccagaaagtgagaaacaaaagtttttgggtatttgaagttgccaccttgaagaagattgtgcctctggggatgatgttcttttgcatcctcttcaactatacaatcttaagggacacaaaagatgtgttggttgtgacggccagaggaagcagtgctgagattataccgttttctcaaaacctgggtgaaccttcccatggccattgggttcatgttattgtacacaaagttggctaatgtgttgtccaagcaggctctcttctactctattattcttcccttcattgccttctttggggcctttggttttgttttgtaccctctcagcaactatattcaccctgaggcttttgcggataagcttctcaacatccttggnccacggttcct

SEQ ID NO: 6928 - DNA, 438 bp, Glycine max
ctcaaaattgcatcagagacctcgcctaaccctgcagcttcaattgggttatatcttgactgtggttccatctatgagacgccattttcaagcggggcttcacacttgctagagcgaatggctttcaaaagcacaacaaaccgtagtcactttcgcattgtaagggaagtagaagcaattggtggtaatgtaggagcctcagcctctcgggagcaaatgggttatacatttgatgccttaaagacctatgttccacaaatggttgaattactggttgactgtgtaaggcacccagccttcttggattgggaagtcaatgaagagcttcggaaagtaaaagcagagcttggagaactctctaacaatccccagggcttgcttttggaagcaattcactctgctggttattctggtgcattggcttatcctcttttggct

SEQ ID NO: 6929 - DNA, 373 bp, Glycine max
  modified_base (324)..(324): a, c, g, t, unknown, or other
atcgaagtccttcattttcattctcttccttgtcactgatcgtcatgtacagagttgcagcatgatcattcagaaggcatctcaagggccatggaggtaacttgggatccactaggttttcaacttcagccgcggtagctgcaaggacttcatcaggtggtttgtttagctggcttactggagagcgttctagtgctcttcctcctctggacatgccccttggtggtgttgctctccccgattcacttccagattacgtcgaacaaagcaagaccaagatcacaacactccccaatggactcaaaattgcgtcagagacctctnctaaccctgcagcttcaattgggttatatcttgacttggggtccatcta

SEQ ID NO: 6930 - DNA, 420 bp, Glycine max
  modified_base (382)..(382): a, c, g, t, unknown, or other
gttgccccacttgttgcaacccttcccttggagatcaagggagaaattgaggagtttctcaaagtggttttcactctgtttcaagacctggattttactttcttagagatgaatcctttcacattggttgatggaaagccttatcctttggatatgagaggcgagctagatgacactgctgctttcaagaacttcaagaaatggggagacattgaatttccactgccatttggaagggttatgagtgccaccgagtctttcattcatggattagatgaaaagacaagtgcatccttaaaattcacagtgttgaacccaaagggccgaatttggacaatggtagctgggggaggtgctagtgtcatttatgctgatacggtangagatcttggctttgcatctgagcttggaactatgctg

SEQ ID NO: 6931 - DNA, 305 bp, Glycine max
cccacgcgttcgagcggtgcacccaaagaagaggaggtcttgcagtatgccagagttgtaattgattgtgcaactgcaaaccctgatggccagaagagagctcttgtgataggaggaggcatagccaactttactgatgttgctgccacatttagtggtataattcgggcattgaaggagaaggagtcgaaattgaaagcagcaaggatgcacatctttgtgaggagagggggtcccaactaccagaagggtctagctttgatgcgagcacttggagaagagattggcattcccattgagggtta

SEQ ID NO: 6932 - DNA, 432 bp, Glycine max
atggaagcagatggctgatgctggaataaagtatattcctagcaacaccttctcactttacgatcaagtactggacacaacagccatgctcggggcagttccatctagatataattggaatggtggggagattgggtttgatgtttacttctcaatggcaagagggaatgcatctgtaccagctatggaaatgaccaagtggtttgacaccaattaccattacattgttcctgaattgggtcctgatgttaagttctcctatgcatcacacaaggctgtcgatgaatttaaagaggccaaagttctgggagttaatactgtacctgtgcttgtgggacctgtatcctacttgttgctgtcaaaaccagctaagggtgttgagaagtcattttcccttctttccctaattgacaagatccttcctgtctacag

SEQ ID NO: 6933 - DNA, 429 bp, Glycine max
cccacgcgtccgcccacgcgtccgggcattgtcagcacaatgtccttgtgggcaatactgccattgttggtgttgttttatgtagcatatttatactatcagagcaccgctcgtgaagtaaagcgcttagactcaattagcagatctcccgtttacgcacagtttggagaagcactgaatggcttatcaacgattcgtgcttacaaagcgtatgatcgaatggcagatataaatgggaaatccatggacaacaacatccgattcactctggtgaacataagtggaaaccgatggcttgcaatccgattggaaactttgggaggcctcatgatatggttgactgcaacctttgccgtcatgcagaatggcaaggcggagaaccagcaagaattcgcatccaccatggggttactacttagctatgctctg

SEQ ID NO: 6934 - DNA, 332 bp, Glycine max
agcccacgcgtccgcccacgcgtccgggactggtggaaatttagtagccgccgggtgtaaatcgcagatactgttctgggattggagaaatatgaagcaagttgcatgcctggaggactctcatgtggatgatgtcactcaggttcattttgtccctaatgaacaaggcaagctgatttctgcttcagtagatgggttgatctgcacatttgatgctactggagatatcaatgatgatgatcatctagaatcagtgattaacatggggacttcaattgcaaaggtggggatttttggagagaattatcagaagctttggtgcctaacacata

SEQ ID NO: 6935 - DNA, 358 bp, Glycine max
tgagaggccttctgctatacagcaaaggggaatggttcctttctgcaaaggactggatgtgattcaacaggctcagtctggaacaggaaagacagcaacattttgttctggaattttgcagcagcttgattatggattggttcagtgccaggctttggttttggcaccaacaagggagctagcacagcagatcgagaaagttatgcgagctcttggtgattacttgggagttaaggtccatgcttgtgttggtgggacaagtgttcgtgaggatcagcgcattctccaagctggtgtccatactgttgttggcactcctgggcgagtgtttgacatgctgcggaggcagtctcttctc

SEQ ID NO: 6936 - DNA, 428 bp, Glycine max
caaaagcctaaactcactcagtcctacgatacgattctcttccgcctcccttcccttgaactggccggcgcagatccgaggagtttgggaaaccctaattcattcctctttgcttcttctatctctattcctctaacaccagtgatggcaggtttggctccagaaggatcgcagtttgatgctcggcaatatgattctaagatgaatgaattgctttccgccgatggacaagaatttttcacttcatatgacgaagtctatgatagttttgatgcaatgggccttcaagaaaatcttctgagaggcatatatgcttatggttttgaaaggccttctgcaatccagcagaggggaattgttcctttctgcaagggtctggatgtgattcagcaagctcagtctggaactggaaagacagcaacgttctg

SEQ ID NO: 6937 - DNA, 439 bp, Glycine max
cccacgcgtccggtttaggtgaactaattcggagaccttgcaagacttgatcaatggctgtcaaagtttatattgtgtactactccatgtatgggcatgttgagaaactagcagaagaaataaagaaaggggcttcctctgtggaaggtgttgaggccaagttatggcaggtacctgagacactgctggatgaggtgcttggtaagatgagtgcaccacccaagagtgacgtaccagtcattacccccaatgaactatccgaggctgatggctttgtattcggcttcccaacaaggtttggaatgatggctgctcagtttaaagcctttctagatgctactggaggcttatggagagcacaacagcttgcaggcaagcctgctggcctcttctacagcaccggttcacaaggtggtggacaagagactacagcactcac

SEQ ID NO: 6938 - DNA, 429 bp, Glycine max
  modified_base (366)..(366): a, c, g, t, unknown, or other
catgtatgggcatgttgagaaactagcagaagaaataaagaaaggggcttcctctgtggaaggtgttgaggccaagttatggcaggtacctgagacactgctggatgaggtgcttggtaagatgagtgcaccacccaagagtgacgtaccagtcattacccccaatgaactatccgaggctgatggctttgtattcggcttcccaacaaggtttggaatgatggctgctcagtttaaagcctttctagatgctactggaggcttatggagagcacaacagcttgcaggcaagcctgctggcctcttctacagcaccggttcacaaggtggtggacaagagactacagcactcactgctatcactcnaactggttttcatcatggaatgatattcgttccaatcggttacacattcggtgccggcatgtt

SEQ ID NO: 6939 - DNA, 464 bp, Glycine max
atgaaaacctctcacgacacaatgcagggcttttatggctgccaccctgaactaagtgacgggcctacgcttactgtccaagttcttacaacagggtcttggccaactcagtctagtgttacatgcaacttgccagcagaaatgtctgcgctgtacgagaagtttcggtcattttaccttggcacccatactggcaggagattgtcctggcaaactaatatgggcacggcagacttgaaagcaacctttgggaaggggcagaagcacgagttaaatgtctctacttaccaaatgtgtgttgtcatgctgtttaataatgctgatagactgagctacaaggagattgagcaagcaactgagattcctgcttcggatcttaaaagatgcttgcaatcattggctttagttaagggaagaaatgtccttagaaaggaacctatgggtaaagatattggtgacgatga

SEQ ID NO: 6940 - DNA, 429 bp, Glycine max
acccacgcgtccggagaagaaaggtcaatattctaagttctggaatgagtttggtaaatccattaaacttggtatcatcgaggatgccaccaacagaaatcgtttggcaaaactgctcagatttgagagcaccaagtctgagggtaaattgacatctctggatcagtacatatctagaatgaaaactgggcagaaggatatcttttacataactggaaccagcaaagaacaactggaaaactctcccttccttgagcggcttaagaagaaaaattttgaggttattttcttcacggatccagttgatgagtacttgatgcaatacctgatggattatgaagacaagaagttccaaaatgtgtccaaggagggtttgaaacttgggaaagattcaaaagacaaggaactgaaggaatcttttaaggatct

SEQ ID NO: 6941 - DNA, 385 bp, Glycine max
aattgacatctctggatcagtacatatctagaatgaaaactgggcagaaggatatctttgacataactggaaccagcaaagaacaactggaaaactctcccttccttgagcggcttaagaagaaaaattttgaggttattttcttcacggatccagttgatgagtacttgatgcaatacctgatggattatgaagacaagaagttccaaaatgtgtccaaggagggtttgaaacttgggaaagattcaaaagacaaggaactgaaggaatcttttaaggatcttaccaagtggtggaaaactgctctttccaaagacaatgttgatgatgtgaagatttccaaccgattagataacactccttgtgtagtggtgacatcaaaatt

SEQ ID NO: 6942 - DNA, 323 bp, Glycine max
atcaatattaaatattggtgcacagaaaatacgtcatctgacaataatgaggagaaaggtcaatattccaagttctcgaatgagattcatacatcattaaacctggcatcatcgaggatgccaccaacacaaaacgtttggcaaaactgctcacatttgaaagcaccaagtctgaaggtaaattgacatctcctgatcagtacatatctagaatgaaagctgggcagaacgatatcttttacataactcgaaccagcaaagaacaactggtaaactctccattccttgagcggcttaagaagaaaaattttgacgttattttc

SEQ ID NO: 6943 - DNA, 378 bp, Glycine max
cgtaagtctgtgaaaaaaataatctctgaggatgagcagactcctgtgcgcgaaaaaaccccaaccacaagaacgaaagaaggaaaaatcaagcgtggtagtggtacagaaaaacagaaactgcgggaacaaataagagagatgctgctgaattcaggttggacgatagactatcgacctcgaaggaacagagactacctggatgcagtttacattaatccagcaggtacagcctattggtctatcatcaaggcctatgatgctcttcaaaagcaatcaaatgatgatgctgatgaggtcaagcccaaaggggatagttcttcttttgctcctattgctgatgaagttctcagtcagctaacaaggaaaactaggaag

SEQ ID NO: 6944 - DNA, 445 bp, Glycine max
cccacgcgtccgcgacttttggagagcatggtatgggaaaagggttcttcaaggtatagactctttggcagttgccagaccttccctttctgcagagataaatcgtcttggactgttagctgaaccaatgccatcattggatgaaattgcaatgcatattaacttctcttgtggaggactgccaccagtgcctaccttgcccaagcttgaaagttctccaactcagaatggggatatcagatcaccaaagcgaaatgttttaatggaaagaaattctttcacttcaccagtgaaagatcgccttcttcccttcaacagccttaagtcaaaactacccccacctcctttgcagtcagcatttgccagccccacaaagccaaatccaggaggtggaggggaaacatgtgcagaaactgggatcaacatcttttttggcaagatcatt

SEQ ID NO: 6945 - DNA, 389 bp, Glycine max
acccacgcgtccgcctcaattggcaaagaagttgaacaagattcttgcacaacacatcaagtctgtgttaccagggctgagagcacgtataagcgcttcactagtcactattgcaaaggaacatgcaagctatggagaaatcacagagtccaaggctggacagggtgctcttctccttaatattctttcaaaatactgtgatgcattctcctccatggtagagggaaagaatgaggagatgtctacatctgagctgtctgggggtgcaagaattcattacatttttcaatccatctttgtgaagagcttagaggaggtggattcatgcgaagatttgactgatgatgatattcgcacagccatacagaatgcaactggacctaaatcag

SEQ ID NO: 6946 - DNA, 440 bp, Glycine max
cctcaattggcaaagaagttgaacaagattcttgcacaacacatcaagtctgtgttacgagggctgagagcacgtataagcgcttcactagtcactattgcaaaggaacatgcaagctatggagaaatcacagagtccaaggctggacagggtgctcttctccttaatattctttcaaaatactgtgatgcattctcctccatggtagagggaaagaatgaggagatgtctacatctgagctgtctgggggtgcaagaattcattacatttttcaatccatctttgtgaagagcttagaggaggtggatccatgcgaagatttgactgatgatgatattcgcacagccatacagaatgcaactggacctaaatcagcactgtttgttcctgaagtcccgtttgaagtgcttgtacgcaggcagatatctcgactattgga

SEQ ID NO: 6947 - DNA, 428 bp, Glycine max
cccacgcgtccgcccacgcgtccgccttctcgtccgcccacgcgtccggcaatcactggctcgctcctttgatccattcttgaaattctcgttatcgctcttcgaactcaagctctctcgctagcgattcctacttctgcaccaatttctacgttttctcaagtcacaggtttaagagcaaaggtcgcatttatcccgttattctccccgtccaaaacaacaaagttaatggcaggtgcttcttggtatctccggagtagaactagatatcttagatgagttcaaggatgttgaatatactagaactgatgttgaggtttccttgaaggacaagtctgaaaggttacaagttagcgcttatgtttggagcaacccaaatgatcctaacttatatgcagagtgggattttgaggattgaattgtggatt

SEQ ID NO: 6948 - DNA, 416 bp, Glycine max
cccacgcgtccgcccacgcgtccgcccacgcgtccgcccacgcgtccggcaatcacttgctcgctcctttgatccattcttgaaattctcgttatcgctcttcgaactcaagctctctcgctagcgattcctacttctgcaccaatttctacgttttctcaagtcacaggtttaagagcaaaggtcgcatttatcccgttattctccccgtccaaaacaacaaagttaatggcaggtgcttcttggtatctccggagtagaactagatatcttagatgagttcaaggatgttgaatatactagaactgatgttgaggtttccttgaaggacaagtctgaaaggttacaagtttgcgcttatgtttggagcaacccaaatgatcctaacttatatgcagagtgggattttgaggatt

SEQ ID NO: 6949 - DNA, 301 bp, Glycine max
ctagaatagatagatcctctgatgatgagtcgacggatgatgaaaatgaagctgttgtgagccaaggttacggggatatggatgtggatgatgtactcaagacaaatgaacacctggttgtgaagagtgggtcaaaattgttgccaggacatcttgaatactcaatacttgtgaatgcaaatattcaggaccctgctaatggtcccataaattcattccagttccatccgaatgcgcagttgtttcttgcagctggattggaccggaagcttagattttttcaaattgatggctagcggaa

SEQ ID NO: 6950 - DNA, 333 bp, Glycine max
cgatcatcaagcctaatagagggctaatccttcacttgtttgttttgtggtgtattattacattttgcaccatgccttctctcttcgctagaaaccagaggttctcattggctactctcctgcttcttctggaactattgacaggaaaccttcgcatggcagatgctcaaattggtgtgtgttatggcatgctgggcaacaatctaccgtcagcaaacgatgttataggtctttatagatcaaataacataaagagaatgagactctatgatcctaatcaagctgctctagaagcacttagaaattctggcattgaactcattcttggggtgc

SEQ ID NO: 6951 - DNA, 382 bp, Glycine max
ctctcctgcttcttctggaactattgacaggaaaccttcgcatggcagatgctcaaagtggtgtgtgttatggcatgctgggcaacaatctaccgtcagcaaacgatgttataggtctttatagatcaaataacataaagagaatgagactctatgatcctaatcaagctgctctagaagcacttagaaattctggcattgaactcattcttggggtgccaaactctgaccttcaaggccttgccaccaatcctgacacttctcgtcaatgggtgcaaaaaaacgtgttgaacttttggcctagtgtcaaaatcaagtacgtggcagttggaaatgaaatgagtcccgttggaagctcttcttcggtagcccaatatggtct

SEQ ID NO: 6952 - DNA, 458 bp, Glycine max
cgatcatcaagcctaatagagggctaatccttcacttgtttgttttgtggtgtattatgacattgtgcaccatgccttctctcttcgctagaaaccagaggttctcattggctactctcctgcttcttctggaactattgacaggaaaccttcgcatggcagatgctcaaattggtgtgtgttatggcatgctgggcaacaatctaccgtcagcaaacgatgttataggtctttatagatcaaataacataaagagaatgagactctatgatcctaatcaagctgctctagaagcacttagaaattctggcattgaactcattcttggggtgccaaactctgaccttcaaggccttgccaccaatcctgacacttctcgtcaatgggtgcaaaaaaacgtgttgaacttttggcctagtgtcaaaatcaagtacgtggcagttggaaatgaagtgagt

SEQ ID NO: 6953 - DNA, 460 bp, Glycine max
cccacgcgtccgcccacgcgtccgctaatccttcacttgtttgttttgtggtgtattattacattttgcaccatgccttctctcttcgctagaaaccagaggttctcattggctactctcctgcttcttctggaactattgacaggaaaccttcgcatggcagatgctcaaattggtgtgtgttatggcatgctgggcaacaatctaccgtcagcaaacgatgttataggtctttatagatcaaataacataaagagaatgagactctatgatcctaatcaagctgctctagaagcacttagaaattctggcattgaactcattcttggggtgccaaactctgaccttcaaagccttgccaccaatcctgacacttctcgtcaatgggtgcaaaaaaacgtgttgaacttttggcctagtgtcaaaatcaagtacgtggcagttggaaatgaagtgagtc

SEQ ID NO: 6954 - DNA, 431 bp, Glycine max
gacccacgcatccgaccacgcgtccggaaaaattgaaggttatgttaccaatatttcttgaatgttgtgacgatatggtttccaaatgggaaaggttgttgtcttcaaatgacaaatccgaaattgatgtgtggcctttccttcaaaatttaacatgtgatattatatctagaacagcatttggaagcagttatgaagatgggaaacgtatatttgaacttctgaaagagcaaactggacttatgatgaaattgcagaacgcttacattccaggatggtggttgctgccaacaactacaaataagaggatgaaaaaaattgatactgagatacgagcattacttaaaggtgtcatcaacaaacgagagaatgcaatgaacgctggtgaagtcttgaacaatgacttgttgggcatgcttttggaatcaaac

SEQ ID NO: 6955 - DNA, 418 bp, Glycine max
  modified_base (328)..(328): a, c, g, t, unknown, or other
actcaatatcaaattctttgtcccacaaaagatggggttcactcccacaagtactgcggcgatgctttctcataatagcacctctggttgtgctatggtgttggaagctactaaagtgggtgtggctgatgccaaagagattggagagagcattaagggcacagggccttcaggggaatccctacagcctcttgattggggacactaaggaaatgtacacagtgctcatgcaagctgccagatctcaacaatctacaagttcttttctctctaaagataaagatgcagcaccacatatcacaacctttaaccatcacattgtcaacanattcggcaagaattcatttttttgggaaggtaccaaaccaaaagtggtaatcactgaccctgagcaaatcaaagaagtcttcaacaagat

SEQ ID NO: 6956 - DNA, 362 bp, Glycine max
gtatttcgatattcagatccatggcaaattagcgggtcgcatagtcatgggccggtatgggaacacagtaccgaaaactgcacaaaactttcgagcgctttgtacaggagagaaaggagtgggaagaagtgggaagtctcttcattataaagggagcacattccataggattataccgagctttatggtccaagggggtgatttcacccgtggtgatggaagaggtggagaatcaatctatggtgataagtttgctgatgaaaactttaagctgaagcataccggaccgggatacttatccatggcaaattctggggaagacaccaatgggtcccagttcttcattacaacagttaaaacca

SEQ ID NO: 6957 - DNA, 373 bp, Glycine max
cccacgcgtccgcggacgcgtgggcgccattgctattgtggaaaaacagacaggaggttcgcttatgattcgcttacttgcgtcaactgaaagtaccaaaaccctgccacacctgccctcacaacctcgccttctgttccccctacgatctccgcaatttcatcgtacccggtcacaacaacctctacctcgccgacgtcgccgattccttcgtcttatctctctctgctcatgacaacatatgcagcgtccagattgcgttgaatgtcgttcaacgccggtgtgtcaaagtttcttccggcgattccgtgcaagtgagccgatttgtgcccactgaagacttcaacctcgcactgctaactcttgatttgga

SEQ ID NO: 6958 - DNA, 326 bp, Glycine max
gagagaacccataacagctagttaatggccctcgctttcacttcttcaatttccgcaccaactgccaccttcccatcatcggaacccaaacttccgcaaattgggtcaattaggatttcggagaggcccattggaggcgccgttaatttcaatttatctcaaagacggagcttggtaaagcccgttaacgccgaaccttcacgcaaggattccattgttcctctcgcagcaacaaccatcgttgcttctgcttctgagacgaaagaggaagattttgaacagatagccagtgatctcgacaatgcttcacctcttgaaatcatgga

SEQ ID NO: 6959 - DNA, 326 bp, Glycine max
ggaagagataaccaagaacgacgtcggagtaacctccaaaaccaccagaagcagctccaggttctggcctcgttggattcccacttccaccgatcacatcatcgctgccgagaagcgccttctttccgtcgtcaagactggttatgttcaagagcatgttaacattggctctggtcctcctggctccaaagtgaggtggttccgttcatccagcaacgagccgcggtttattaacaccgttacatttgacagtaaaccccattctccaacgctggtcatgattcatggttatgctgcttcacaggggttcttttttcgcaattttg

SEQ ID NO: 6960 - DNA, 424 bp, Glycine max
cttttgagttttctctctcacaaacacactccacttctcttctcggcgtcgatcttacgcgggggcgtgcatgggcgaattccacaaaacccgacccttccggcggcaggccagccgcctgcagagccgcgccccgtcgtcgctccagataaaccgcaccgtcgagtggaacgtcgcgatcccgctgctgtccccgctggtctcgtcgccccctccgccgccgcagaaggacgagccgtcaccgtcgcagcaacaacgcccgccggaaaaagttgtcttcaaaaagtggcagcaccccgccgcaccgttttgctacgaaccaccttcgcgggttcctcctttcgttaacgtgtaaataataaataaaaaaatgaagaaaaattatgaatatttcttctaacatcttttgttcattttcattttc

SEQ ID NO: 6961 - DNA, 444 bp, Glycine max
cttcatgtctcaaggcaaagggttaaaggtggaggttggatcatggattccatgtcaaatgtgtcaaaaagagaccctgctgcacagttcctcatcatcttcagaagcaaggacacaattggattgcgatcccttgctgctggtggaaaattattgcagatcaatagaagaatggagtttgtatttgctagtcatagttttgatgtttgggagaactggactctagaaggttccttacaggaatgcagactggtgaactgtagaaacccatcagctgttttggatgtacgcgttgagattttggcaactgtaggcgaagatggagttactcgttggcttgaatagagtgattgtaggtctgtaatactcaaaagggagaagcttgtaaatactccaatcccgtgacttaatgatctttcaaatgtctctttgtgaaagatggaa

SEQ ID NO: 6962 - DNA, 387 bp, Glycine max
cccacgcgtccgcccacgcgtccggtacttgaaccctatattggtggtgaagcaatatcagttttggcgcctggttactaatttcttgtactttcgtaaaatggacttggatttcctgtttcatatgttttttcttgctcgttactgcaagcttcttgaggagaactcgttcagggggaggactgctgatttcttttacatgctcttatttggtgccactgtattgactggaattgttcttcttgggggcatgataccttatttatcagagtcgttcgcaaaaataatattccttagcaactcattgacatttatgatggtttacgtgtggagcaaacaaaatcccttcattcacatgagcctcctgggtctctttactttcactgc

SEQ ID NO: 6963 - DNA, 420 bp, Glycine max
ctcagtttctcgttttcccaatcgcagctaaaaaatcctctgtacccttttacccttttctcaataagaagaaattaggaaacgcaacaatggctcaagcggttgaagaatggtataagcagatgcccgtcatcacgcgctcctatctcaccgctgctgttgtcaccactatcggatgctcccttgatataatttctccgtatcatttgtacttgaaccctatattggtggtgaagcaatatcagttttggcgcctggttactaattacttgtactttcgtaaaatggacttggattttctggttcaatatgtatttctgctcggtactggcagcttctttgaggagaactcggtcagggggagaactgctgattcctttaacaggctctaatttggtgccactgtattgactggaattg

SEQ ID NO: 6964 - DNA, 350 bp, Glycine max
ctcagctaaatcttcttatccaccatctcttcgcccataacctaattagtgctcaatcgcaaaacatcaatttctctatgatcatgatgatgatgatgggttcaaacacaaaaccccttgtgcacctttctcttctaattttggttctcttttcttcttcaaccgaatccctcagattcgaactccaatctgggcacaccaaatgcatctacgaggacatcaagagcaattccatgaccgtgggcaagtaccaaattgttaactccaacgagggtcagcctcttcccgattcccaaagagtcacccgtcagggtgacttcgtcttaatggaacaactattactaccggga

SEQ ID NO: 6965 - DNA, 430 bp, Glycine max
aatccctcatctcattgctgagatctgcaagctggctatggactacgaaccctacgacagtagcggaactgatgatgaccttccaccaacccatcaaaatagaatttccaggggaggaggaggacgtctcgctgggaatgggagatctgctgttggttcaattccttacccaaggatgtatggtgaaattgatatggagacccaaattcatcagcttgagcaagaagcatacagttcagttctaagagcctttaaagctcaagccgatgccattacttgggagaaagaaagtttgattacagagctgagaaaagaactgagattgtcaaatgaggagcacagagaacttctaggtcgagttaatgctgatgatgtgatacggaggattaaggaatggagacaggcaggtggccatcagcctggtgtactt

SEQ ID NO: 6966 - DNA, 380 bp, Glycine max
caatccctcatctcattgctgagatctgcaagctggctatggactacgaaccctgcgacagtggcggaactgatgatgacctttcaccaacccatcaaaatagaatttccaggggaggaagaagacgtctcgctgggaatgggagatctgctgttgggtcaattccttacccaaggatgtatggtgaaattgatatggagacccaaattcatcaacttgagcaagaagcatacagttcagttctaagagcctttaaagctcaagccgatgccattacttgggagaaagaaagtttgattacagagctgagaaaagaactgagattgtcaaatgaggagcacagagaacttttaggtcgagttaatgctgatgatgtgata

SEQ ID NO: 6967 - DNA, 346 bp, Glycine max
ggttgagcacctcttctttgctcagcagtaccatgacaggaagcaaagagaggagaggatgagaatgagcagggaagagagggcaaggaccccttatgttgattacttgaggccaatcatagctgatggcgacactggttttggtggtaccacagcaactgtcaagctttgcaagctatttgtggagagaggtgctgccggaatccacattgaggaccagtcttcagtgaccaaaaagtgttggccacatggctggaaaagtgcttgttgccatcagtgaacacatcaataggcttgtggctgcaagacttcagtttgatgtcatgggggtggaaactgttttggt

SEQ ID NO: 6968 - DNA, 402 bp, Glycine max
cccacgcgtccgccttaaagggaagagtttagcaactcttatgcaacaaggcatggctgctgggaagagtggagctgagcttcaggctttggaggatgagtggctctcaaaggcacagttgaagactctctcagaagcagttgtggaggcaattgagaggcagaacattggagaggaagagaagagaaggaagctgaatgagtggatgcaccattcaagctatgaaaggtgtctttccaatgaggagggtagggagatagctgaaaagttaggagtaaggaacctcttttgggattgggacttgcctaggactagagaagggttctacaggttcaaagggtcagtgattgcatcagttgttagaggttgggctttgctccacatgctgatgtgatatggatg

SEQ ID NO: 6969 - DNA, 392 bp, Glycine max
gaaagaaaaaaaagaagaagaaagagttctgaccatggctgcatcattatttatgccttcatccatagtggacgaagaagcgaggtttgaagccgaagtggcggaggtgcaagcatggtggaactctgagaggttcaggctaacaaaaagaccatacacagcaagagatgtggtgtccctccgaggcaacctcagacaaacctatgcctcgaacgagatggcgaaaaagctctggtgccttctgaagaaccaccaagccaacggcacagcctcaaggacttttggtgcacttgatcctgttcaggtcactcaaatggccaagcacttggacacaatctatgtctcagggtggcagtgctcagccacacacaccacgagcaacgagccgggcc

SEQ ID NO: 6970 - DNA, 415 bp, Glycine max
cccacgcgtccgcggacgcgtgggtttatagaaagaaaaaaaagaagaagaaagagttctgaccatggctgcatcattatttatgccttcatccatagtggacgaagaagcgaggtttgaagccgaagtggcggaggtgcaagcatggtggaactctgagaggttcaggctaacaaaaagaccatacacagcaagagatgtggtgtccctccgaggcaacctcagacaaacctatgcctcgaacgagatggcgaaaaagctctggtgccttctgaagaaccaccaagccaacggcacagcctcaaggacttttggtgcacttgatcctgttcaggtcactcaaatggccaagcacttggacacaatctatgtctcaaggtggcagtgctcagccacacacaccacgagcaacgag

SEQ ID NO: 6971 - DNA, 458 bp, Glycine max
gttataacatttatagaaagaaaaaaaagaagaagaaagagttctgaccatggctgcagcatgatttatgccttcatccatagtggacgaagaagcgaggtttgaagccgaagtggcggaggtgcaagcatggtggaactctgagaggttcaggctaacaaaaagaccatacacagcaagagatgtggtgtccctccgaggcaacctcagacaaacctatgcctcgaacgagatggcgaaaaagctctggtgccttctgaagaaccaccaagccaacggcacagcctcaaggacttttggtgcacttgatcctgttcaggtcactcaaatggccaagcacttggacacaatctatgtctcagggtggcagtgctcagccacacacaccacgagcaacgagccgggccctgaccttgctgattacccttatgatactgtcccaaacaaggttgagcacc

SEQ ID NO: 6972 - DNA, 447 bp, Glycine max
aaagaaaaaaaagaagaagaaagagttctgaccatggctgcatcattatttatgccttcatccgtagtggacgaagaagcgaggtttgaagccgaagtggcggaggtgcaagcatggtggaactctgagaggttcaggctaacaaaaagaccatacacagcaagagatgtggtgtccctccgaggcaacctcagacaaacctatgcctcgaacgagatggcgaaaaagctctggtgccttctgaagaaccaccaagccaacggcacagtctcaaggacttttggtgcacttgatcctgttcaggtcactcaaatggccaagcacttggacacaatctatgtctcaaggtggcagtgctcagccacacacaccacgagcaacgagccgggccctgaccttgctgattacccttatgaaactgtcccaaacaagggtgagcacctcttc

SEQ ID NO: 6973 - DNA, 454 bp, Glycine max
cccacgcgtccgcccacgcgtccgaaagaaaaaaaagaagaagaaagagttctgacgatggctgcatcattatttatgccttcatccatagtggacgaagaagcgaggtttgaagccgaagtggcggaggtgcaagcatggtggaactctgagaggttcaggctaacaaaaagaccatacacagcaagagatgtggtgtccctccgaggcaacctcagacaaacctatgcctcgaacgagatggcgaaaaagctctggtgccttctgaagaaccaccaagccaacggcacagcctcaaggacttttggtgcacttgatcctgttcaggtcactcatatggccaagcacttggacacaatctatgtctcaaggtggcagtgctcagccacacacaccacgagcaacgagccgggccctgaccttgctgattacccttatgatactgtcccaaaac

SEQ ID NO: 6974 - DNA, 367 bp, Glycine max
tgaacacatcaataggcttgtggctgcaagacttcagtttgatgtcatgggggtggaaactgttttggtggcaagaacagatgcagaagctgctaatttgattcaatcaaacattgacacaagggaccatcaatttatcttgggagtgaccaaccccaaccttaaagggaagagtttagcaactcttatgcaacaaggcatggctgctgggaagagtggagctgagcttcaggctttggaggatgagtggctctcaaaggcacagttgaagactctctcagaagcagttgtggaggcaattgagaggcagaacattggagaggaagagaagagaaggaagctgaatgagtggatgcaccattcaagc

SEQ ID NO: 6975 - DNA, 332 bp, Glycine max
atttcatacatatgttcacgttactatcgggctccagaactaatatttggtgcaactgaatacacaccttctattgatatctggtcagctggttgtgttcttgctgaacttcttctaggacagccattgtttcctggagaaaatcaagtggaccaacttgtggaaattattaaggttcttggtactccgactcgagaggaaatccgttgcatgaacccaaattatacagattttagattccctcagattaaagctcatccttggcacaaggttttccacaagcgaatgcctcctgaagcaattgaccttgcatcaaggctttcccaatattc

SEQ ID NO: 6976 - DNA, 437 bp, Glycine max
ttcatctccgaaccgcgtttctatttttgactctctctctctactcagtaagaatgtatgctaatattggtatgccaccgggggtacctcagcatcatcctcaacctccaacgagctcacaacctaatctgttcgggaatgcattcaattctgctggttctggactcattcgaggtggattgggtgcgtatggagaaaaaatattaggatcaagctccgagtatgtccaaagcaatataagccggtatttctctgatccccaatactactttcaagtgaatgaccactatgttaagaacaaattaaaggttgtgttgttcccattcttgcaccggggtcattggactaggattactgaaccagtgggaggtaggctctcttataaaccaccaatttacgacataaatgctcctgacttgtacattccattaatggca

SEQ ID NO: 6977 - DNA, 476 bp, Glycine max
tcccattcttgcaccggggtcattggactaggattactgaaccagtgggaggtaggctctgttataaacctccaatttatgacataaatgctcctgacttgtacattccattaatggcatttggtacctatgttgttcttgctggcatctcattgggtcttcgtggaaagtttagtcctgaagctttgaactggttatttatcaagggattggttggttggtttatgcaaacagcactgcttaaagttactttactttcattaggcagtggggaagcacctctattggacattatagcgtacgccgggtacacttttcctggcttgtgtttggctgtttctggaagaataatatggagttactcctactactttctgatgctgtggacctgcttatgtatggcagtgtacttggttaaaacaatgaagagagtcctttttgcagaagttaggagttatgattcaagcaaacaccac

SEQ ID NO: 6978 - DNA, 456 bp, Glycine max
cccactcgtccggacttataattaaaagaaaattattattaataaattactgtattttataagtgtcaattattatttaataaaatttgtaaaatactatattgaaggtattttttttaccgttgtaggatattgtcaacaatttctgtctttagatataaataataaaaagagaaaaagaataaataaaagtggaggaggagggtgtaggtttggttgatttgattgttgtgcatccatcgttaagctagtggcgatcggatccagctacagcatagagatcaaggaaggaaggaaggaagatgttgggtgttataaggcacaagagtattcgccctgccttctccgcaatcagacacttgtcttctgcagctaaagagattactgtcaaggaagctctgaactccgcactcgatgaagaaatgtcagctgatcctaaagtgttcttgatgggtg

SEQ ID NO: 6979 - DNA, 445 bp, Glycine max
ggttatttgattggtgtgcatccatgttaagctagtggcgatcggatccagctacagcctacggcctacagttttggtttggtttgcttgattgaagatcaaggaaggaagatgttgggtgttataaggcacaagagtattcgccccgccttctccgcaatcagacacttctcttctgcagctaaagagattactgtcagggatgctctcaactccgcactcgatgaggaaatgtcagctgatcctaaagtcttcttgatgggtgaagaggttggggaatatcagggtgcatacaagatatccaaggggctgctcgacaagtatggccccgagagggttctcgatactccaatcactgaggctgggtttgctgggattggagttggcgctgcttactatggtctaaggcctgttgtggagtttatgacttttaacttctccatgc

SEQ ID NO: 6980 - DNA, 459 bp, Glycine max
cccacgcgtccgctggttagttctttgcagaaacaaaattctccctattttccgccacagaacagcaggaagaaagtgcatccaaagaatgctgattgtaactcatttattatgttaggctttggtttaaaagattctgtcgtatgcataatactgtcctaattttcaggactcacagatgctatacattttttccccttctcagcatatctgggaggaagttaatgttaaataacttgtacaacaatgacacaaaggcagcaggaagttatctgcggtcatggtttctgcttggcaataactaaaaatcaactttttgaaaaagcaccaatggtgttagtcggggattgatttctcgaaaaggtggcttacaacttatcaatgggagtaaaactgccattggtactaaatacaactgtgcaaattgtggttcctgatgatgctattggctctgtatat

SEQ ID NO: 6981 - DNA, 354 bp, Glycine max
aattccacccagccgtccggccacgcgtcctggttatttgattggtttgcattcatgttaagctagtggcgatcgggtccagggtcagtctacaacctacagttttggtttggtttgcttgattgaagatcaaggaatgaagatgtcgggtgttataaggcacaagagtattcaccccgccttctccgcaatcagacacttctcttctgcagctaaagagattactgtcacggatgctatcaactcctcactcgatgaggaaatgtcacctgatcctaaagtcttcttgatgggtgaagaggtttgagaatatcatggtgcatacaagatatccaatgtgctgctcgacaagta

SEQ ID NO: 6982 - DNA, 442 bp, Glycine max
cccacgcgtccgcccacgcgtccgcccacgcgtccgctcttctgacggtgggactcaaaattcacatcgtgatattgaagctgagttgcgtgaaataaggttgagtctattgatggagatagagaagcggaagcaagttgaagaaacccttgacagcatgcaaagccactgggagagacttgggcaacggttatctcatattggaattgttttgccttcagatcttactgctgagggtgggcagctgagttctgatcctatggaagatgtatgtcagcaactttacattactaggttcatatcaaacactattgggagaggaattgccagggcagaagcagagattgagatggaagctcaattacaatcaaagaactttgagattgctcgactattggaacgtcttcactgttatgagaccatgaatagggagatgtctcaa

SEQ ID NO: 6983 - DNA, 377 bp, Glycine max
tggaggttcacgaccacacctcttacttaatttacttcattagctctattattgtctgcgcgttattcaaattagttcaaggatcggattccaaaacctcctctacctgctgcaaattgcccccaggaccaaggacactaccgctcataggaaacatgcaccagtttgttggctcactgccggttcatcactgcttaaaaaatttggcagataattatgggccgctaatgcatctaaaactaggagaggtatctaacatcatagtcacttcacaagaaatggcacaagagattatgaagacacgcgatctcaacttctctgataggccaaaccttgtatcatctagaacaggttcttacaacggctctaacattgtc

SEQ ID NO: 6984 - DNA, 319 bp, Glycine max
aagcaaatgatggtatacaaaaccttccaggttgcaaattatgcaagatcagaaaggagattgctttctcggaagcaggttgagtgtcaaccttggtctaaccacacatacaaggttgatgacaagatagagttactttgtcaagatagtggcatcagaggctgctggttcaggtgtacagttgttcaggtagcccggaagcagttgaaagtccaatatgatgatgtccaggatgaagatggaagtggaaatcttgaggaatggatccctgctttcaagttagccaggcctgataaacttgggatgaggcattctggcc

SEQ ID NO: 6985 - DNA, 377 bp, Glycine max
acgcgtacgccaacgcgtccgccggcagataaagaacaaaccgtacccgaaatcccgtttctgccgcggcgtgccggagccgaagatgcgaatctacgacgtgggaatgaacaagaacggcgtggacgagttcccgttctgcgtgcacctggtctcgtgggagaaggagaacgtctccagcgaggctttggaggcggcgcgcatcgcatgcaacaggtacatggccaagttcgccggaaaagatgccttccacctgcgcgtgagggtgcatcccttccacgtgctccgcatcaacaagatgctatcgtgcgccggggccgacaggctccagaccggcatgaggggcgcctttgggaagccgcaagggacctgcgcta

SEQ ID NO: 6986 - DNA, 428 bp, Glycine max
cccacgcgtccgcccacgcgtccggccggagccgaagatccgaatctagtacgtgtgaaggaagaataaaggcgtggacgagttcccgttctgcgtgcacctggtctcgtgggagaaggagaacgtctccagcgaggctttggaggcggcgcgcatcgcatgcaacaagtacatggccaagttcgccggaaaagatgccttccacctgcgcgtgagggtgcatcccttccacgtgctccgcatcaacaagatgctatcgtgcgccggggccgacaggctccagaccggcatgaggggcgcctttgggaagccgcaggggacgtgcgctagggttaacattggtcaggtgctgctctcggtgaggtgtaaggatgctaacagtcaccatgctcaggaagctcttcgtaaggccaagttcaagttccccg

SEQ ID NO: 6987 - DNA, 353 bp, Glycine max
gtcaattccaacaacaccacaatgggaagaagaccggcgaggtgttaccggcagatgaagaacaaaccgtacccgaaatcccgtttctgccgcggcgtgccggagccgaagatccgaatctacgacgtgggaatgaagaagaaaggcgtggacgagttcccgttctgcgtgcacctggtctcgtgggagaaggagaacgtctccagcgaggctttggaggcggcgcgcatcgcatgcaacaagtacatgggcaagttcgccggaaaagatgccttccacctgcgcgtgagggtgcatcccttccacgtgctccgcatcaacaagatgctatcgtgcgccggggccgacaggct

SEQ ID NO: 6988 - DNA, 439 bp, Glycine max
cccacgcgtccgtcgtcaattccaacaacaccacaatgggaagaagaccggcgaggtgttaccggcagataaaggacaaaccgtacccgaaatcccgtttctgccgcggcgtgccggagccgaagatccgaatctacgacgtgggaatgaagaagaaaggcgtggacgagttcccgttctgcgtgcacctggtctcgtgggagaaggagaacgtctccagcgaggctttggaggcggcgcgcatcgcatgcaacaagtacatggccaagttcgccggaaaagatgccttccacctgcgcgtgagggtgcatacctttcacgtgctccgcatcaacaagatgctatcgtgcgccggggccgacaggctccagaccggcatgaggggcgcctttgggaagccgcaggggacgtgcgctagggttaacattggtcaagtgct

SEQ ID NO: 6989 - DNA, 350 bp, Glycine max
gtcaattccaacaacaccacaatgggaagaagaccggcgaggtgttaccggcagataaagaacaagccgtacccgaaatcccgtttctgccgcggcgtgccggagccgaagatccgaatctacgacgtgggaatgaagaagaaaggcgtggacgagttcccgttctgcgtgcacctggtctcgtgggagaaggagaacgtctccagcgaggctttggaggcggcgcgcatcgcatgcaacaagtacatggccaagttcgccggaaaagatgccttccacctgcgcgtgagggtgcatcccttccacgtgctccgcatcaacaagatgctatcgtgcgcccgtgccgacag

SEQ ID NO: 6990 - DNA, 381 bp, Glycine max
cagacactgcaccaaacaccaacaacgctttagctctctctcttctctccataaccgcgcaccggcgatctggcactaacagatcgccgctgctacatctgaacccgatccagccaacagatctctccaattcaaatggagaatctaatctctttggtcaacaaaatccagagagcttgcaccgccttaggtgaccacggcgaaaacagtgcactccccacactatgggactctctccccgccatcgccgtcgtcggaggccagagctcaggaaagtcctccgtcttggagagcgttgtcggcaaagatttcttacctcgtggatcaggtattgttacgcgacgaccgctcgtgttgcagcttcacaagattgaaaaggga

SEQ ID NO: 6991 - DNA, 300 bp, Glycine max
ctccataaccgccaccggcgatctggcactaacagatcgccgctgctacaggtgaaccggatccatccaacagatctctccaattcaaatggagaatctaatctctttggtcaacaaaatccagagagcttgcaccgccttaggtgaccacggcgaaaacagtgcactccccacactatgggactctctccccggcatcgccgtccactgaggccagagctcacgaaagaactgcgtcttggagagctgagtcgtcacagatttcttacctcgtggatcaagtattgctacaccacgacc

SEQ ID NO: 6992 - DNA, 442 bp, Glycine max
caaagttttcaatcacccaataagaatgcattgttgatgacatccttaccacaagactcacagtttcagcaacgaatagaccagcaagctagtctcttacagaggcagcagcagcagcagacacagttgcaatcatctccgttgcagttattgcaacaaagcttgtcacagagggcatcacagcaaccacaaatgactcaaatgtgtcagcaaaacagctcagagcaacaaccacagttgcagttgctacaaaaattgcagcaacagcagcagcagcagcaacaacaacaacagcaacaactgctttccacttctagcccacttttgcagtctcagcttctacatcaacaaaatactcatcaacaaaaccagcaattgccgcaacttgctctatcacaaggtcatcagccttaacaagctggaaacaatgctttctcaatgg

SEQ ID NO: 6993 - DNA, 321 bp, Glycine max
  modified_base (264)..(264): a, c, g, t, unknown, or other
cggacgcgtggggtagaatcgtgtggatcgtttgcagaagaagaggtaaagagaaggagtgaccgaagcgaagatgttacccacagcttccaaaggacgttcttcttcctcctcctcttcctctcgacctaacaatcccatgctgcttccctacctccgcagaatcatcaagtggcaacaaatggatattgaatatactttttggcaaatgcttcatctatgtacgtccccgaaagttgtctatcagcatactaaatatcacanacaaaccaagaatcaatgggcacgtgatgatcctgcatttgttgtgatctgcagtct

SEQ ID NO: 6994 - DNA, 435 bp, Glycine max
cccacgcgtccgaaagaatagtagaatcgtgtggatcgtttgcagaagaagaggtaaagagaaggagtgaccgaagcgaagatgttacccacagcttccaaaggacgttcttcttcctcctcctcttcctctcgacctaacaatcccatgctgcttccctacctccgcagaatcatcaagtggcaacaaatggatattgaatatactttttggcaaatgcttcatctatgtacgtccccgaaagttgtctatcagcatactaaatatcacaaacaaaccaagaatcaatgggcacgtgatgatcctgcatttgttgtgatctgcagtcttcttttggcagttgcaactttggcttattgtgcggcgtatgaccatagtactgcacatacacttcttggtatcttctcagtgttggttttccactttatattgact

SEQ ID NO: 6995 - DNA, 382 bp, Glycine max
atttcgatcatctttattttttagaatattcccacttaacatggatcagttaacactaggatttccatttttactaacacttcatctgttagtatcaggtgtagtagcaacaacatcgttcacactggttaacaaatgctactacacattgtggccagacattctctcaaacgcaggaatcgccacgcttacaacaacaggtttcgttcttcaaaccggagagtccaaaaccgtgaccgctccaacctcttggggtggccgtttctggggccgcacactctgcacgcactactccgacgtgaaaattctgttgcctcagcggcgagtgcagctccggcaagctcgaatgcgccggaaacgccgacaggccgactgctacctt

SEQ ID NO: 6996 - DNA, 381 bp, Glycine max
atttcgatcatctctagctattagaatatccccacttaacatggatcagttaacactaggatttacatttttactaacacttcatctgttagtatcaggtgtagtagcaacaacatcgttcacactggttgacaaatgctactacacagtgtggccagtcattctctcaaacgcacgaatcgccacgcttacaacaacaggtttcgttcttcaaaccggagagtccaaaaccgtgaccgctccaacctcttggggtggccgtatctggggccgaacactctgcacgcatgactccgactgaaaattctcttgcctcagcggcgattgcagctccggcaagctcgaatgcaccggaaacgccgtcacgccgactgctacctt

SEQ ID NO: 6997 - DNA, 442 bp, Glycine max
  modified_base (410)..(410): a, c, g, t, unknown, or other
tcttcattgtgatctgcacttcaacccttgtgtgcacaaattggcagagggaagaccagaccgaacaggtttgcggttgtcgaatgagctggccaaacttgatgtttcagtgaaacttctaatagattctgctgttgcatatactatggatgaggtggacatggtttttgtgggtgcggatggagttgtcgaaagtgggggcataatcaacatgatggggacctatcaaatagcattggttgctcacagtatgaataaaccagtttatgtcgctgctgagagctacaagtttgctcgcctttaccctcttgaccaaaaggatttagcccctgcattacgccctattgattttggcgtacctattccatcgaaggttgaggttgaaaggtccgcgcgggactacacccctnctcaatacctgactctgcttttcacagattta

SEQ ID NO: 6998 - DNA, 409 bp, Glycine max
agtccatttccaccatcaatactattttcttgtcgttgagaagcttcgcgaacgaaagcaaagaaccctagaccgtcacagaaccattccatagccatgtctggtgttggccctctttctcaggattgggaacctgtcgtcctccgcaagaaggctcccaccgccgccgccaagaatgacgagaaagccgtcaacgccgcccgccgctctggcgccgaaatcgaaaccctaaaaaagtataatgctgggacaaacatagcagcatctagcggcacttcattgaacactaagaggctggatgatgatactgagagtctagctcatgagaaggtgccaactgaacttaagaaggctataatgcaagctaggatggacaaaaagcttactcagtctcagcttgctcaactga

SEQ ID NO: 6999 - DNA, 335 bp, Glycine max
gcgaggcaataccattctcatcttgcatttgcaccatctatactattttagggtggaggagaagcttcgcgaacgaaagcaaagaaccctagaccgtcacagaaccattccatagccatgtctggtgttggacctctttctcaggatcgggaacctgtcgacctccgcaagaaggctctcaccgccgccgcccagaatgacgagaaagcccgcaacgccgcccgccgctctggcgccgaaatcgaaaccctaaaaaagtataatgctgggacaaacaaagcagcatctagcggcacttcattgaacactaagacgctggatgatgatactgagag

SEQ ID NO: 7000 - DNA, 433 bp, Glycine max
gtttaccttcgcagcgctctttctctctgaaccctaatttacacacactccctttattcgatccctctctccaaccatggcgatcaactcttccaagaatccagatggttctgtccaaaatgcaatgccttcgtatttttattctccaccactagatgtttctgctgcatttccacaagcaacaccagcatcaacgtttcctccttgtgcttcagattattttcaattggacaacttattgacagcagaggagcaagccattaggaagaaagtaagagagtgtatggaaaaagaaattgctccaataatgactgagtactgggagaaggccaaatttccatttcatgttattccaaagcttggtgcattgcgcattgctggtggcacaatcaaggattatggttgtcctggtctttctatcactggaagtgct

SEQ ID NO: 7001 - DNA, 407 bp, Glycine max
ctgaaccctaatttacacacactccctttattcgatccctctctccaaccatggcgatcaactcttccaagaatccagatggttctgtccaaaatgcaatgccttcgtatttttattctccaccactagatgtttctgctgcatttccacaagcaacaccagcatcaacgtttcctccttgtgcttcagattattttcaattggacaacttattgacagcagaggagcaagccattaggaagaaagtaagagagtgtatggaaaaagaaattgctccaataatgactgagtactgggagaaggccaaatttccatttcatgttattccaaagcttggtgcattgcgcattgctggtggcacaatcaaggattatggttgtcctggtctttctatcactggaagtgct

SEQ ID NO: 7002 - DNA, 436 bp, Glycine max
aaaattgcagtcttctgtgaatgttgattataagcctaataatgatggttacaactggaggaagtatgggcaaaaacatgtgaaaggtagtgacttctcaagaagttattataagtgcacacgtccaaattgtcctgtgaagaaaaaacttgagcgttctcttgagggtcatgtgactgcaattatttataaaggagaacacaatcatcaacgtgctcatcgcagtaagattgtgaaagaaacacaaacttcaaatgaaaattcagtgtctaagatggatctagggtctagtcaggccacaggtgaacatggatcaggaacacgtgatagtgaggaagtacatgaccatgaaactgaagcagatgagaaaaatgatgaacctgatgccaagagaagaaacacaggaaccaggatccatgatccagccactttgcat

SEQ ID NO: 7003 - DNA, 447 bp, Glycine max
cccacgcgtccggcgacggtggagctctggtggatgacgtgctttctctaacaactgctctgagaaaagagagagagaatggcggtggagtacacatgctgctcaacggcgttcttcgttcacatagtggtaatcgtgctgctggtgctgttcgcgggcctcatgtcgggcctcaccttgggcctcatgtcgctcagcctcgttgatcttgaggttctcgctaagtccggcactcctcaggatcgtaaacacgctgagaagatattaccagttgtcaaaaaccaacatttattgctatgtactcttctaatttgcaatgctgcggccatggagacacttcctatttttcttgatggtcttgttactgcttggggcgctatcctgatttcagtgacattaattcttttgtttggtgagattataccccaatcagtttgttctcggtat

SEQ ID NO: 7004 - DNA, 428 bp, Glycine max
gaaacaatggcgacggtggagctctggtggatgacgtgctttctctaacaactgctgttggaaaagagagagagaatggcggtggattacacatgctgctcaacggcgttcttcgttcacatagtggtaatcgtgctgctggtgctgttcgcgggcctcatgtcgggcctcaccttgggcctcatgtcgctcagcctcgttgatcttgaggttctcgctaagtccggcactcctcaggatcgtaaacacgctgagaagatattaccagttgtcaaaaaccaacatttattgctatgtactcttctaatttgcaatgctgcggccatggagacacttcctatttttcttgatggtcttgttactgcttggggcgctatcctgatttcaatgacattaattcttttgtttggtgagattataccccaatc

SEQ ID NO: 7005 - DNA, 419 bp, Glycine max
attcggcggccgacccacgcgtacaggagatgtcggtggagcagaaagcagcagggaaggaggaggagggaaaactgcagaagggaattgcagagttctacgacgagtcgtctggcatatgggagaacatttggggcgatcacatgcaccacggcttttatgacccggattccaccgtttctgtttctgatcatcgcgctgctcagatccgaatgatccaagaatctcttcgttttgcctctctgggttctgagaacccttctaaatggcccaagagtatagttgatgttgggtgtggcatagggggcagcggcagatacgtggccaagaagtttggagcaacgagcgtacgcggtactctgagtcctgttcaagcgcagagagcagagtctcttgctgctgctcaacggttgggggac

SEQ ID NO: 7006 - DNA, 257 bp, Glycine max
ctctcagagaggaaagatggcatttttgtggtcagatctgatgcaacaaggggaagcagccaggttctgaaggctggagctcgtaagcatgaattgttagttactaatgcagttgcaacaaaggaaggccgtcctgcggcttctacatcaaaatctgggcatgaacttctcctttttgaggccctacgtgaaggtttggaagaagaaatggatagggatccttgtgtatgtgaaatggtcgataatgtattatatta

SEQ ID NO: 7007 - DNA, 394 bp, Glycine max
  modified_base (363)..(363): a, c, g, t, unknown, or other
  modified_base (379)..(379): a, c, g, t, unknown, or other
cggacgcgtgggaaaaatcaaaggcctgaaagggatgaatccagtggatcaaaagatagagcagatcaaaagacattaagacggcttgctcaaaatcgtgaggctgccaggaaaagccgactgaggaaaaaggcatatgtgcaacaattagagagcagtaggttgaaactgacccaacttgagcaggagctccagcgatctcgccagcagggaatatttatttcaagtactggagatcaggcacagtcaatgagtggaaatggcgctatggcatttgatgtagagtacgcacgatggttagaagagcataatagacaaaccaatgagctaaaggcttgcaataaatctcatgctggaaatatngaacttcgaaccattngtgacaatttcatga

SEQ ID NO: 7008 - DNA, 353 bp, Glycine max
aaggcaatgaatctgatgcaggcggttcgctacgacgcctacgggggaggtcctgccggcctcaagcacgttgaagttgccgttcccagtccaaaggcaaatgaggttttaatcaaactggaagcagttagcattaaccctattgattggaagattcagaagggtcttctccgtcctttatttctccccagaacctttccccacataccttgcactgatgtggctggagaaatagttgagatcggaactcaagtcaaagatttcaaagttggcgaccaagttcttgctaaactcactcatcaatttggaggtgggtttgccgagtttgctgtggctagtgagagcttaacagc

SEQ ID NO: 7009 - DNA, 420 bp, Glycine max
ctttgttgtaagcagcacgttgaagttgccgttcccagtccaaaggcaaatgaggttttaatcaaactggaagcagttagcattaaccctattgattggaagattcagaagggtcttctccgtcctttatttctccccagaacctttccccacataccttgcactgatgtggctggagaaatagttgagatcggaactcaagtcaaagatttcaaagttggcgaccaagtccttgctaaactcactcatcaatatggaggtgggtttgccgagtttgctgtggctagtgagagcttaacagcagccagaccatctgaggtctcagccgctgaagctgcagcattgccaatcgccgggcttacagctcgtgatgccctcactcaaattgcaggagtcaagcttgatgggactggccagctc

SEQ ID NO: 7010 - DNA, 352 bp, Glycine max
ggcaatgaatctgatgcaggcggttcgctacgacgcctacgggggaggtcctgccggcctcaagcacgttgaagttgccgttcccagtccaaaggcaaatgaggttttaatcaaactggaagcagttagcattaaccctattgattggaagattcagaagggtcttctccgtcctttatttctccccagaacctttccccacataccttgcactgatgtggctggagaaatagttgagatcggaactcaagtcaaagatttcaaagttggcgaccaagtccttgctaaactcactcatcaatatggaggtgggtttgccgaatttgctgtggctagtgagagcttaacagca

SEQ ID NO: 7011 - DNA, 438 bp, Glycine max
tgctttctctgtctggcaaagtgcaccatttacgatggttggatttgttcctcgaatgcactggctggataaggagcaaaataatgctgcatattacaggtatggaggatggtggtctgtttggtggatgggcacttatagcatggttctctcaaaggctgcattctttcacaggaaatacttggatttatatactcatgagatgtctccatcaattcaggactatgtttccagggagagaacttgtgaagacattgcaatgtccctttatgttgctaatgctacaagtggtcctccaatatgggtgaaaggcaaaatctatgagattggtgcatcgggtattagcagtctgagagggcatagcaacaggagaaacaaatgtctcaatgacttgatatcactatacggaactcttccacttgtgtcaactaatgtgaa

SEQ ID NO: 7012 - DNA, 428 bp, Glycine max
  modified_base (298)..(298): a, c, g, t, unknown, or other
  modified_base (301)..(301): a, c, g, t, unknown, or other
  modified_base (304)..(304): a, c, g, t, unknown, or other
gaatattttcgttttcgaaatccaccgatctctctcattcttcaatggccaccctttccgcatgcgcttcccctccatggccaaaccctaattctcccaattcaaatccagaccctaatttcctccccgatcaatcccaaaccctcgacttcgactccctcatgcctccgcaacccgaatctccaccgccccaccaccaccactcccccgacgcatcgccgccggaatcctccccatcgctcccgccgccgtcgctcctctacctctccttcaaccaggaccaggcctgcttcgccgncgncgncgacagcggcttccgcatctacaactgcgaccccttccgcgagctcttccggcgcgatttcgacggcggcggaatcggccacatggagatgctcttcctctgcaacatcttcgccctcgtcggc

SEQ ID NO: 7013 - DNA, 440 bp, Glycine max
ggccaccctctccgcatgcgcttctcctccatggccaaaccctgattctcccaagtcaaaggcaaaccctaattgcctccccgaccaatctcaaaccctcgacttcgactccctcatgcctccgcaacccgaatccccaccgcccaaccatcaccactcccccgacgcctctccaccggaatcctccccgtcgccgccgcctccgtcgatcctctacctctccttcaaccaggaccaggcctgcttcgccgccgccgccgacaacggcttccgcatctacaactgcgaccccttccgcgagctcttccggcgcgagttcgacggcggcgggatcggccacgtggagatgctcttccgctgcaacatcctcgccctcgtcggcggcgggcctaaccctcagtacccgcccaacaaggtcatgatctgggacgaccaccagg

SEQ ID NO: 7014 - DNA, 412 bp, Glycine max
ttcaagttttccgattttgtactgagtatacaatagaagagaaagtcattgaaaggggctacaaaaagcttgcacttgatgctctggtgattcagcaagggcgattggctgagcagaagacggtaaataaagatgaattgcttcaaatggttagatttggggctgaaatggttttcagttccaaggatagtacaattacagatgaagatattgatagaattattgctaaaggagaagaagcaactgctgagctagattccaagatgaagaaatttactgaagatgccatcaaatttaagatggatgacactgccgagttatatgattctgatgatgagaaggatgaaggcagattggatataaaaaaattgtgagtgagaactggattgaaccacccaaaagggagcggaag

SEQ ID NO: 7015 - DNA, 384 bp, Glycine max
cccacgcgtccgcccacgcgtccgcccacgcgtccgaaagcctccaaaaccaacccgagcggggcgcgatggcgtgggccctccaaaggcgatgactagcaggttctggtgcagcgtaaatcgaatgcgagagttttgacactaaacaggactaaacagttgaatgccctctctttttatatggtttctcggctacttgaaattttttctgaagatgagaaagattctgatattaaattggttgtcgtgaaaggaaatggaagggctttttgtgctggtggtgatgttgcagctgttgctcgtgattgaagtaaaggtgactggaggtttggtgcaaaattttttcaaagtgaaattaaattggattacttgatggcaacatat

SEQ ID NO: 7016 - DNA, 361 bp, Glycine max
tgaatccaaaaccctagccctcactctgaccaccattttttcaattctggagctatgtttcagggataatagggcagggatgtacaaagaacgagagcgaggtggtgtttccgtttccgcctctaaatccgaggatcggaagcgaatcaacgacgttctcgataagcacttggaacgatcctctccttccacttcccgccccatcaacaccgcttccaagaattccaacctccaagtggaggaatctgagacggagagtgaagagtctgatgttagtggctctgatggggatgacacctcttggatctcgtggttctgtaatctaagagggaatgagttcttttgtgaggtggatgatgat

SEQ ID NO: 7017 - DNA, 431 bp, Glycine max
gggaatgagttcttttgtgaggtggatgatgattacatacaggatgactttaacctgtgtggattgagcagtcaagtgccctactttgattatgcccttgatttgattctcgacgttgagtcatcccatggtgacatgttcacggaggaacagaatgagttgattgaatcggcggcggaaatgctttatggtatgattcatgctcgatatgtgttgaccagcaaaggaatggctgccatgcttgacaaatacaagagctatgattttggtagatgcccaagagtttactgctctggacagccctgccttccagttggtcaatcggacattcctaggtcaagtactgtgaaaatatactgccctaggtgtgaagatctttactatccgcgttccaagtatcaaggcaacattgatggagcttactttggaac

SEQ ID NO: 7018 - DNA, 440 bp, Glycine max
ctgaaacggagagtgaagagtctgatgttagtggctctgatggggatgacacctgttggatctcgtggttctgtaatctcagagggaatgagttcttttgtgaggtggatgatgattacatacaggatgactttaacctatgtgggttgagcagtcaagtgccctactatgattatgcccttgatttgattctcgacgtcgagtcgttccatggtgacatgttcacggaggaacagaatgagttgattgaatcagcggcagaaatgctttatggtctgattcatgccagatatgtgtagaccaagcaaggaatggctgccatgcttgacaaatacaagaactatgaatttggcagatgcccaatgagttactgctcctgacaggcctggctttcagttggtcaatcagacattcctaggtcaagtactgtgaaaatatac

SEQ ID NO: 7019 - DNA, 435 bp, Glycine max
  modified_base (30)..(30): a, c, g, t, unknown, or other
cgggtggagccacgcgtgcgcccacgcgtncgtgtgaagcaagtggacttgggcgttgcaagataaataatggaggctgttggcatgaggctcaaaatggacatgcattttctgcttgtttggataatggaggggtcaaatgccagtgtcccacagggtttaaaggtgatggtgtaaaaaattgtcaagatatagatgaatgcaaagagaagaaggcttgtcagtgccctgactgtagctgcaagaatacttggggaagctatgactgcagttgtagtggagatcttctgtatatgagggaccacgatacctgcataagtaaaactggcagtcagggaagatctacctgggctgctttttggttgattttacttggcgtagttatgattgctggtggggcattccttgtgtacaagtacagaataaagcaataca

SEQ ID NO: 7020 - DNA, 374 bp, Glycine max
aatatatgaagacgagttgagtcacttcgttaatactggcgcacttgatgagctcattcttgccttctctcgagagggacccaccaaggagtatgtacaacataaaatgatggagaaggcttcagaaatttggagcatgatatcacaaggagcttacatttatgtgtgtggtgatgccaagggcatggccagggatgtacaccgcgccctgcacacaattttgcaagagcagggttctctcgatagttccaaggctgagagcatggtaaagaatctacaaactactggcagatatttgcgcgatgtatggtgatgatatctgaatgcaagccgtgggggtgacgaagatattaataaaacatagagttgtggct

SEQ ID NO: 7021 - DNA, 422 bp, Glycine max
attgcctctcagagaagtctccttgaggtcatggctgaatttccatcagccaaacctgcaattggtgtcttttttgcagcagttgctcctcgcctgcagcctagattttattcgatctcctcatctccaagaatggtgccaaacagaattcatgttacctgtgcattagtacatgagaaaatgcccaccggaaggattcacaaaggagtgtgttcaacatggatgaagaattctgtaccattggagaaaagccaggactgcagttgggctcctatttttgttaggacctccaactttagactcccttctgataataaagtgcctataatcatgattggtcctggcactggattggctcctttcagaggtttcttgcaggaaagattagctctgaaagaaggaggagctgaactcggcccctc

SEQ ID NO: 7022 - DNA, 391 bp, Glycine max
ctcacctgctggaaaggatgaatattcagagtgggtgattgcctctcagagaagtcgccttgaggtcatggctgaatttccatcagccaaacctccaattggtgtcttttttgcagcagttgctcctcgcctgcagcctagattttattcgatctcctcatctccaagaatggtgccaaacagaattcatgttacctgtgcattagtacatgagaaaatgcccaccggaaggattcacaaaggagtgtgttcaacatggatgaagaattctgtaccattggagaaaagccaggactgcagttgggctcctatttttgttaggacctccaactttagactcccttctgataataaagtgcctataatcatgattggtcctggcactggattg

SEQ ID NO: 7023 - DNA, 348 bp, Glycine max
  modified_base (309)..(309): a, c, g, t, unknown, or other
  modified_base (335)..(335): a, c, g, t, unknown, or other
ctcccaattactttgttgcatttcacacaccaacttcccatagaagagagaagagagaagagagctgtccttccatccttcaactcaaatcatcatgcaagactccagctcaatgaagatctcccctctggatctcatgtccgccatcatcaagggcaagctcgacccctccaacgtctcctcctccaccaacgccgccgccgccgccgccttcctcctcgagaaccgcgacttcctcatgctcctcaccacctccgtcgccgtcctcatcggctgcgtcgtcgtcttcatctggcgcagatcctcctnccccaaggccaagcctctcgagcctnctaaacgcgtcgt

SEQ ID NO: 7024 - DNA, 430 bp, Glycine max
  modified_base (321)..(321): a, c, g, t, unknown, or other
agaagcttcccgaaatcgaagtcgacgacggcaccaagaaggtcaccatcctgttcggcagtcaaaccggcaccggcgaaggcttcgccaagggcacagcttaagaaggcaaagcgcgataccagaaggccacgttcaaaatcgtcgatatggatgattatgcccgcgatgacgaataatacgaagaaaggttcaaaaaagagactcacgttcttttctttttagctacatatggtgatggtgagccaactgattatgccgcgaggatttattaatgggttacagaggtgaagttgagactgttcccgtgggcataaaggntgagagcttatgtgttgactttgtgtgcttttgtggaggatttaagggggtgagaaaggagaaaggtggcttcagaatcttcactatggtgtgtttggccctggaaaca

SEQ ID NO: 7025 - DNA, 439 bp, Glycine max
cttttctccatggatggataatgggtcaaagccaagttggtgttccttcaatgcttcctcacgtgggtgctagtcgtgacaatctatcccaacagattggttcttcttcttacataatggcatctaatcattccacttctaatgttgatgcagcgatgccatcttcagcaatacctgtcagcatcagcataccgggttcttcaatgagatcaggtttacggaatcacttttcacaatcccgtgtacctgtatctgaatctggcaatcttgctgcttctattaataccccacatgatggatttgatatgcaaaccatcgtaagtcgaattcagtcagaacttgccacatcagtggctgcaacagctgcagagttgccttgcactgtgaagttaaaagtgtggtcacatgacataaaaaatccctgttccccacttaatgc

SEQ ID NO: 7026 - DNA, 410 bp, Glycine max
ctgcgggttagcttggggaattttctgtttttcactattctagctgttctggtggttggtgtgaaaacccagagggatccccgggatagtatgcaccatggaggttggatgatgaaaattatctgctggtgccttctggtaatctttatgtttttcgttccaaatgagatcatcagcttctatgaaacaatatcaaagtttggctcgggcatgtttcttcttgttcaagtcatgctcttgttggattttgttcatggatggaatgacaaatgggttggatatgatgaacaattctggtacattgctctatttgttgtttcccttgtttggtatgtggcaacatttgcattctcaggagttctctttcacttctttacgccatctggacaagactgtggactcaatgtctt

SEQ ID NO: 7027 - DNA, 281 bp, Glycine max
gaggaattcaacggactcaacgttggattcgcgctcgacgaggggcaggcctcgccgggcgaggaatttagggttttctactccgatagggttccgtggaacgtgaagattagggctaaggggaggcccgggcatgggtcgaggatgtatgatgggagtgcggtggagaatttgatggagagcgtggaggtagtgagtaggttcagggtgagccagtttgatgtggtgaaggcctggatagctttgaatggtgaggttgtgtcggtgaatccgttttatgt

SEQ ID NO: 7028 - DNA, 419 bp, Glycine max
gcaaacataacttgcaggaatggcttcaatgaataaccaaaaagaaattgatctggttgggggccaatctcttctgtacatgcagctatatgggcacctaagacctatgtgtcttaagtgggctgttcaactaggtattccagacataatacagaaccatgccaaacccatttctctttctgacttggtctctactcttcaaattccaccagctaacgctgattttgtgcagcggttcatgctcttcttggcacacaatggaatctttgagatccatgagagccaagaagatcatgaactaacatatgctctaacccctgcatcaaagcttcttgtcaatagtagtgatcattgtctatctgcaatggttctagcgtttaccgatccacttccgaacgttaaataccatcacttggggg

SEQ ID NO: 7029 - DNA, 407 bp, Glycine max
  modified_base (389)..(389): a, c, g, t, unknown, or other
aaaacattattctcgaattagggttttccactgatctccgagcacacaccactactctgttcctcagattcaacaccaccttgcgtggcgccaatgggaaaagccttcgacatcggagccgttccgttcaacgccgacgggtggggtccgccggacaacgcgacctcaggcagcaacaacaacaacctccctctgaacgtccccttcgcccccttctcccgctccgacaaattgggccgcatcgccgactggacccgcaacttcaacaatccgacccgctccaagaacccccgccgatgccgttttcgacttcgccaacgacgactccttccccgcctccgccgacgacgacgcctccttccgcctcgtcgacggaaagcccccgccgngccccaaattcggcccca

SEQ ID NO: 7030 - DNA, 436 bp, Glycine max
cccacgcgtccgctccttcatcttcctcatccacatggaaatctccaacctcctcttgaggaagattctcatcaacgaaatagtcatggacgaaacaaagcctaacacacctcaatacaacaagctcgatcacatgatctcttcagaaatggtcactcttgtggtcttcaaaatcgcatacttcactctgctcctcatattctccctcctctccacctcggcagtggtctacaccatcgcctccatctacaccgcaaaagacgtgacattcaagagggtcatgagtgttgtccctaaagtgtggaagaagctcatgttgacctttctatgggcctttgctgctttcttcggttacaatatcatgactgggctaggtatggtcttggccatagtcacaattgggttaagtagtggtgggcttgcggttttggtttcg

SEQ ID NO: 7031 - DNA, 445 bp, Glycine max
cccacgcgtccggctgattgggcagtgaacactaaggtggacatgcgcttcaacgttaagaatgcatattggttaagtgacagggtcagggagaagattttgcaaacggagaaaaaccgtattaacaaggatggggagcttgtgatttcttcaaccaaaactagaacgcagaaggataacattgaggatgctttggcaaagcttcagataaacaaaccggtggaagaatgcagcttaggatggtgacttggtggtagacatatctcttcctcatttctgtattcttgtattgtactcagacattataattcaaatttgaagatttctgttgttggctatttttttttattttcttatgagttagagtagcatcttaatggaaaatggaatatatcttggaggagtttgtacagtggttccttattgtcttctccgctactcattg

SEQ ID NO: 7032 - DNA, 411 bp, Glycine max
cttcggcaaaggacatggatcggataaaagggccatggagtcctgaagaggacgaagcgttacggaggttggttcagacttacggccctaggaactggtccgttataagcaaatccattccgggtcggtctgggaaatcgtgccgcttgcggtggtgcaaccagctgtctccggaggtggagcgccggcctttcacggcggaggaagacgaggcgatcctgaaggctcacgccaggttcgggaacaagtgggccaccatcgcgcgcttcctcaatggccgcaccgacaacgccatcaagaaccattggaattccaccctcaagaggaagtgctccgagcctctctccgagcctcggcctctgaagagatccgccaccgtttcgggtagtcaatccggatccgatttgagcg

SEQ ID NO: 7033 - DNA, 429 bp, Glycine max
  modified_base (4)..(4): a, c, g, t, unknown, or other
tcgnccacgcgttcgtccacgcgttcggtttcgttccgtttcaatggggagcgaagagcagaacggcgaattctacctgcgttactacgtcggtcacaagggcaagtttggtcacgagttcctggagttcgagtttcggccagaccgcaagcttcgctacgccaacaacttcaacttccaaaacgacaccattattcgcaaggagggttacctaacccccggcggtcttcgcgagtgccggcgcatcatcggcgagagcgagattatgaaggaagatgattacaactggcccgaaccggatcgggtggggcggcaggagctcgagattgttatggggaacgagcacatttcgttcaccacgtccaagattgggtctcttgttgatgttcaaagcaatgcttgaccccgaggtcttcgcatcttttacta

SEQ ID NO: 7034 - DNA, 375 bp, Glycine max
agcacagattttgatcatgtataccgaacaatgtccttcagtcggccaacaaacctcttaaatactacagctgctggcacttcatcttctgttccaacgtttcgtggtacaaattctgcagaagggatgcccgagttatctgaggcagacatggttgtgtttcttggtgattttaattatcgacttgatgacatttcttatgacgaagcaagagattttgtttctcaaagatgctttgattggcttagagaaagggaccaacttcgagcagaaatggaagctgggaatgtcttccaaggaatgcgtgaagcaattataacatttcctcccacatacaagtttgaacgggcacaagttggtttggcacggtatgat

SEQ ID NO: 7035 - DNA, 420 bp, Glycine max
  modified_base (45)..(45): a, c, g, t, unknown, or other
ttcattgttttgttttaactgtttcgaatccctgcgcttgcttanggaggaaccgttgaagtggattgacccagtactgctttcaatttgctgctgaaggaaagggttgggatgggttgtgacttttccaagtacacagtgtgctgcacgggttacggagcaagatggtccggctgctgaggctcaggttgatggtggaaacgaagacaatgttgttgagggcgttgacttgccgcggtttcatgaattcacaattgaacagcttaagagggctacatccggatttgccattgaaaatatagtttctgaacatggagaaaaggctccaaatgtggtctataaagggaaacttgataatcagatgcgaattgctgtcaaacggttcaacagaaatgcttggcctgaagcgcaaccattttt

SEQ ID NO: 7036 - DNA, 439 bp, Glycine max
aaattagtccaaaaaaaaccccattggataacaaacccccgtttgggccaatgccgttgcctagagccgagggacatatcagctatggtggagcgcttaagcccggtgaaggtgatgccattgcacagtatgttcaacaagggaagcgtattccgcgaagaggagaagtgggtctttctgcggaggagattcagaagtttgagagccttggttatgtgatgagtggtagtaggcatcagaggatgaatgccattcgtattaggaaagaaaaccaggtttatagtgctgaggataagcgcgctttggctatgtttaactatgaagagaaggctaaaagggagcacaaggttatggctgatttgcagcgcctcgtgcagcggcacattggccaggatgttggcccaactcatgatccttttgctgcaaaagcctctgatgg

SEQ ID NO: 7037 - DNA, 358 bp, Glycine max
gtttgagtctcagaagaaacccgcattggataacgaacccgcggttgggccagggccgttgcctagagccgagggacatatcagctatggtggagcgcttaggcccggtgaaggtgatgccattgcacagtatgttcaacaagggaagcgtattccgcgaagaggagaagtgggtctttctgcggaggagattcagaagtttgagagccttggttatgtgatgagtggtagtaggcatcagaggatgaatgccattcgtattaggaaataaaaccaggtttatagtgctgaggataagcgcgctttggctatgtttaactatgaatagaatgctaaaagggagcacaaggttattgct

SEQ ID NO: 7038 - DNA, 411 bp, Glycine max
gactttatgaagtatgctcaagatgaggaagctgctgatgatcaagaggagacaggatggaagtacattcatggggatgttttccggtttccaaagttcaagtctttcttttcagcagcccttggttctggtactcaattattcacacttacaatcttcatttttatgcttgcactggttggtgtgttttatccatataaccgaggcgctttatttactgcactggtggtcatatatgctctcacatctggcatcgctggctacactgctacttccttctatattcaacttgaagggactaattgggttaggaacttattgctgacaggatgcctcttttgtggccccctattccttatgttctgtttccttaacacagttgcgattgcttatagtgcaactgctgccctg

SEQ ID NO: 7039 - DNA, 403 bp, Glycine max
gaaagatgggaaaattactcaatgtggaaaatataccgatcttcttaatagtggtgctgattttatggaacttgttggtgcacacaaaaaagctttgtctacactagattcattggatggagcggcagtatctaatgaaataagtgtgttggaacaagatgtaaacgtctccgacacgcatggttttaaagaaaaagaggctagcaaagatgagcaaaatggtcaaacagacaataaaagtgaactacaaggccagcttgttcaggaagaagaaagagagaaaggtaaagttgggttttcagtctattggaaatgtatcacaacagcatatggaggagctcttgtaccattcatattgttggctcagattctttttcaagctcttcaaattggaagtaattat

SEQ ID NO: 7040 - DNA, 425 bp, Glycine max
agtcagtccaagttggatgacgagcagtggctagcttattggatcatctattcgttcctgacccttacggaaatggttcttcaacctatcttagagtggataccaatttggtacgatgtgaaactattgacggtggcatggctggtgttaccccagttcgcaggagctgcgtacttgtatgaaaggttcgtgagagagcatataaggaaatacataacggagaaggagtatctctatgtcaaccaccagcaacaaagcaaaaagtctcccaataacgggggcaaggccaagaagttcgttgaattcgtcacacccaagaaaggggatcaggaggtgtattgagttggcaattggacggtgccgagaagtgtagaggtttttaactgaggatcttcgtattggtctttgaatcaactttcctttaa

SEQ ID NO: 7041 - DNA, 217 bp, Glycine max
  modified_base (185)..(185): a, c, g, t, unknown, or other
gcgtccaatggaattccattaggttgggatgaacgtgctgtgacatcagattctggaggactgggtaatcgaagcagaggagccattttccaagggtttcccaatattgaccatactcaggatttcgtgagagaggatatcataggatcgctccgttggctgcgccacgaggtgggcggtccggnatttgcgatttgattttggagaggggttttca

SEQ ID NO: 7042 - DNA, 377 bp, Glycine max
atggaattccattaggttgggatgaacgtgctgtgacatcagattctggaggactgggtaatcgaagcacaggagccattttccaagggtttcccaatattgaccatactcaagatttcgtgagaaaggatatcataggatggctccgttggctgcgccacgaggtgggcttccaggattttcgatttgattttgtaaaggggttttcaccaaaatatgtgaaagaatatattgaaggagcaaagccattgttttgtgttggggagtactgggattcttgcaactacaagggttctaccttggactattaccaaaatagccatttacagctaataatcaattggaatgatggcactggacaacttttaactgcattt

SEQ ID NO: 7043 - DNA, 378 bp, Glycine max
gttatacatcgcgagcggtcccctattcttatattccatattcctggttcacttcatgcgtgattcctattcctctgattttttctcctttttctctctactaatattaatgcatcctacgctctttccttctcagatcaacctggtaactgcgttggtactgaattccttaatcgagtccagtattcataatctttgagttgatatgggcaactggagcagtgaacgtcatcaaaccactcaacaaagtgatctcggtgcaattttgcgtgatggaaaagaagtacttcttcaagcattcaactgggagtccaacaaatacaactggtggaataatttagaaggcaaagtttctgacatagctaaagcaggatttac

SEQ ID NO: 7044 - DNA, 434 bp, Glycine max
cccacgcgtccgcgattctcctttatcctcaaattccatattcctggttcacttcatgcgtgattcctattcctctgattttttctcctttttctctctactaatattaatgcatcctacgctctttccttctcagatcaacctggtaactgcgttggtactgaattccttaatcgagtccagtattcataatctttgagttgatatgggcaactggagcagtgaacgtcatcaaaccactcaacaaagtgatctcggtgcagttttgcgtgatggaaaagaagtacttcttcaagcattcaactgggagtccaacaaatacaactggtggaataatttagaaggcaaagtttctgacatagctaaagcaggatttacttcagtctggttgccaccaccaacccactccttctcacctgaaggttatactccgc

SEQ ID NO: 7045 - DNA, 434 bp, Glycine max
caaaaagatcaagttgaccttcttcattatgatctttgcctctgttcactttgtactgtctcacctgcccaacttcaactccatttctggtgtatctctggcagcagcagttatgtccttgagttactctacaattgcctgggcagcttctgctcataagggtgttcaagagaatgtagaatatggttacaaagctaagagtacatcaggaacagtctttaacttctttagtgcccttggggatgttgcttttgcctatgcttggacacaatgtggtgttggaaatccaagcaacaattccatctacaccagagaaaccatccaagggtcctatgtggagaggagatgttggtgcttacatagttgtggctttatgctacttcccagttgcccttattggttactggatgttcggcaatacagttgaagataac

SEQ ID NO: 7046 - DNA, 322 bp, Glycine max
ctttgctttggcactcatcttgcatgaaaagttcactgttcaagagattttctgggcattttcaatatacttggaggcagttgcaatattaccccaggtggttttggtgcaaaggaatggaaatgtggacaatttgactgggcaatacatattctttcttggtgcatatcgggcattttacatcctgaactggatataccggtatctgactgaaccacattttactagaaggatagcttgggtctcaggtgttgatcaaacagctttgtatgcagaattcttctactattacttcatcagctggaagaacaatttcgaactg

SEQ ID NO: 7047 - DNA, 384 bp, Glycine max
ccgacccacgcgtcccgttcgatcaaaacactcatcttgcatgacaagcagactcactaagagattttctgggcagtgtcaatatacttggaggcagttgcaatattaccccagttgcttttgctgcatatgactggaaatgttgacaatttgactggtcaatacctattctttcttggtgcatatcgtgcatttcacatgctgaactggatctaccggtatctgactgagccaccttttactagatggatagcttgcgtctgacgtcttgttcacacagcttagtatgcagatttcttctactattacgtcatcagctggacgaacactacgaatctgaaggtgcctgcctgaattatctcaagttgttttggaatttagacc

SEQ ID NO: 7048 - DNA, 436 bp, Glycine max
tccgctacttggattcattggaaggctggatcaacagaaaggcattgatctcatagccggggcggttccttggatagtgggccaggatgtgcagctagtcatgttgggaactggaaggccggacttagaagatatgcttaggcagtttgagtcccaacaccgtgacaaagtcagaggatgggttggcttttcggtcaagatggctcaccggataacagcaggtgcagacatattgctgatgccatcaagatttgagccatgtggattgaatcaactctatgccatgaattacggaacaattccagttgtacatgctgtcggtggattgagggatacagtgaagccttttaatccatttgaagagtcgggccttgggtggacatttgacagtgcagaaactaacaagttaataaatgcattagggaactgcttgttg

SEQ ID NO: 7049 - DNA, 275 bp, Glycine max
tgcctctggacattgaatttgacttacaggatctggttgtggacttgcgtcccaatatggttgggtacacttctatcgaggaagtgaatgccgctctagtagaactcgatgaacatgatcggattgactctgctgataaggtcaccactgaaaaacatgctggcactgagaagcctttaattacgaccactttcactactgcagaggctggcaatggacaaagcattgataatggtaccgtacaaaatgaagtgcaagatgatcatgaccgtgag

SEQ ID NO: 7050 - DNA, 402 bp, Glycine max
gtttgtttgttcaaactattttcttctttttttctctgacgcgtggaaatgatatgcacgcacgcttctgtgggagaggaagtaggaaatagcagagtttagactttagactttagagtcagtgtacgcagaagagtaaaatcgattggcgatgatggagttgaaagagattcagagactcgaaggccacaccgataaggtttggagcttggcctggaacccgaccaccggtcacgccggtatcccactcgtcttcgcttcttgcagcggcgacaaaaccgtccgaatctgggagcagaacctctgctctgggctttgggccttgacggcggttctggatgaaacgcacacttgaactggtcgatcttgggcttggtcaccgtcgggtaagctattggccac

SEQ ID NO: 7051 - DNA, 369 bp, Glycine max
  modified_base (270)..(270): a, c, g, t, unknown, or other
  modified_base (276)..(276): a, c, g, t, unknown, or other
  modified_base (283)..(283): a, c, g, t, unknown, or other
  modified_base (298)..(298): a, c, g, t, unknown, or other
  modified_base (345)..(345): a, c, g, t, unknown, or other
ctgcaattgaaagttatcagcagtcaactaatcgactgctcattttgggattcagtggaggtttaacagaaccagttgagaaaacaggtgatcaaattaaagaaatggaactgaaggttcatccaaaattgagacaacctttgacagcactatgcagtgatccaaataccacagttgttgtgctcagtggaagcggtagacaagtcctagatgataacttcaaagaatacgacatgtggttggcagctgaaaatggaaatgttttacatncttcanagggtgnagtggatgactacantgccagagcatctgaatatggaatgggttgatagtgtgaagcatgtntttgagtacttcacagaaagaaca

SEQ ID NO: 7052 - DNA, 444 bp, Glycine max
tgaacttcaattccgggctcgacgcactcgtacgctgcaattgaaagttatcagcagtcagcttttcgactgctcattttgagattcaggggagctttaacagaaccagttgagaaaacaggtgatcaaattaaagaaatggaactgaaggttcatccaaaattgacacaacctttgacagcactatgcagtgatccaaataccacagttgttgtgctcactggaagctgtagacaagtcctatatgataactacaaagaatacgacatgtgggtggcagctgacaatggaatgtttttacatacttcaaagggtgaatcgatgactactatgcctgagcatctgaatataaaatgggttgataacgtgaaacatgttactgagtacttcacagaaagaacaccttcgtcacattttgtttattaataacgggaaacttcactt

SEQ ID NO: 7053 - DNA, 341 bp, Glycine max
  modified_base (24)..(24): a, c, g, t, unknown, or other
cttcgagatacccgactacaccgncgacgtcgtcgccaccggcgccctccgcctcctcgaggccgtccgttcccacatcgccgcctccggccgctcccacatccgctactaccaagccggctcctccgagatgttcggcgccacccctccgccgcagtccgaaaccacccccttccacccccgctccccctacgccgcctccaaatgcgccgcccactggtacaccgtgaactaccgcgaggcttactccctcttcgcctgcaacggcatcctcttcaaccacgagtccccccgccgcggcgagaatttcgtgacccgcaagatcacgcgggccgtgggcc

SEQ ID NO: 7054 - DNA, 290 bp, Glycine max
gaagttgaccaattcattagtcccaaccgttggaggaagcttggcattgctatgattccgaataggtttggtatatcctttacaccaaagcttatgaaccaggcaggtgctctggttcaagtctatacggatggaactgttttagttacccatgggggtgtagaaatggggcaaggtttgcataccaaagttgcccaaattgctgcttcagctttcaacatccctcttagttctgtcttcatatcagatactagtaccgacaaggttcctaatgctttagcaacagcagc

SEQ ID NO: 7055 - DNA, 450 bp, Glycine max
cccacgcgtccggaaatggggcaaggtttgcataccaaagttgcccaaattgctgcttcagggttcaacatccctcttagttctgtcttcatatcagatactagtaccgacaaggttcctaatgcttcagcaacagcagcttctgcaagttctgatatgtatggagcagcggttttggatgcatgtgagcaaataatggcacgcatggaacctattgcttcacagcataacttcaactcatttgctgagctagttggtgcatgctatgcagaacgaatagacctttctgcccatggattttatattactcctgatattggttttgattggacgacgggtaaaggaaaacctttcagatatttcacttatggggctgcatttgctgaggttgaaattgacaccctgactggagattttcacaccagagtggcaaacgtatttttggatcta

SEQ ID NO: 7056 - DNA, 340 bp, Glycine max
gagaagcatgtaatgacttgatggcatattctttaattttgtcttgttgttgctatacttgctgcgtaaggaggaagcttcggaagatgttgaacatcacagggggatttattgatgatttcctctctcatttgatgtgttgctgctgtgcccttgtgcaagaatggagagaagtggatatccgtgggcttagtggttctaataccaatacaagcccttcaccctctcagtacatggaatcttatctaacaaatgagattatcatttggatgttggggattcaaggttccttgaagatcatatgataatataggctatattgctattagaattcttacat

SEQ ID NO: 7057 - DNA, 394 bp, Glycine max
agcattaggatctcatgcgcctgggcacggcggtatgggggcattgcttgctggtggtgctgctgcggcagcagctgcgtatggggctcaccatgtttcccatggccatcatggatatggtgcatatggaggatatggacacatgccccatgggaaattcaaacatcatggcaagttcaagcatggaaagttcggcaagcatgggaaatttaagcatgggaagtttggcaagggtatgttcaagaagtggaagtgatgatattatattaattttctgtacatacaaaccgcgattctggatgctgctgcacattgcttttataataaactctactttgtttgatgtccatctatattttggtggaactctagtattttttttatagtcaaagat

SEQ ID NO: 7058 - DNA, 417 bp, Glycine max
acccaagcgtcaggttcaaggtggcatgcacctgggaaccggcggatgggagcattgcttgctggtggtgctgctgcagcagcaactgcgtatggggctcaccatgtttcccatggccatcatggatatggtgcatatggaggatatggacacatgccccatgggaaattcaaacatcatggcaagttcaagcatggaaagttcggcaagcatgggaaatttaagcatgggaagtttggcaagggtatgttcaagaagtggaagtgatgatattatattaattttctgtacatacaaaccgcgattctggatgctgctgcacattgcttttataataaactctactttgtttgatgtccatctatattttggtggaactctagtatttttttttagagtcaaagatgtatcatcccg

SEQ ID NO: 7059 - DNA, 391 bp, Glycine max
gtaccagtcccggattgaccgatggcatccacgcctaacgtccacgcgtcccctgacgcgtagggttttcatgttctgtccctgtgatgaatggaacaggatttattgagattgaggaccaaagtttgagtagcagctttattcctttcattgttgtggacgaggatgtttgctcagaaatctgtacacttgagcctcttctacaattaagtgaaactgatccagatattgaaggggcatgaaaaatcaaagccttaaattaagccatggatcttattcatgacacgggttggcttcttcacagaagccagttgaacacaaggatggtttataatgtggatctatttccattgaaacagttcaagtggctcatttagtctcccatggatca

SEQ ID NO: 7060 - DNA, 420 bp, Glycine max
ggatctctttccattgaaacggttcaagtggcttattgagttttccatggatcatgattggagggcagcagtgagaaaactgttgaacctactgcttgatggaactgtaaatacaggagatcatccttccttgtatctcgcgctttcagagatgggtctccttcacaaagctgtaacgagaaacagcaagcagttagtggagtgtcttttgagatatgttcctgagaatatttctgataaactaggacctgaagacaaggcactggttgatggcgagaatcagaccttcttgtttagacctgatgttgttggtcctgctggtttgacaccactccatatagcatccgggaaagatggttctgaggatgtacttgatgctatgactaatgatccttgcatggtgggaattgaatcatggaa

SEQ ID NO: 7061 - DNA, 414 bp, Glycine max
  modified_base (360)..(360): a, c, g, t, unknown, or other
acgcccacgcgtccgcccacgcgtccgaaacggatgggttcacatcagggtgcagcatcagatggccttcatttttaatggtcaagttgtcatagatacctccttacctttcagaagtaataattatagcatgatttcgactgttagtccaattgctgcaccagcatcaaagagagctcaattttctgttaagggtgtcaacctgatacgccctgccactaggttaatgtgtgctttagaagggaaatatctggtctgtgaagatgctcatatgtcaatggatcaaagctccaaagagcctgatgaacttcagtgtgtccagttttcatgctctgtccctgtgatgaatggaagaggatntattgagattgaggaccagggtttgagtagcagcttttttcctttcattggtgt

SEQ ID NO: 7062 - DNA, 376 bp, Glycine max
ataagaaatccgcaaaatttttgggaataaaggttggcaacttcgaaaattaacaaaatttcgaaccgaatttgttgcccaaattcccggctgcaaatttgaaaattgagatcttccttctcttgattcctaatgttgtaaaattgtaaaataaagatactgggttataaggtgtgagaatttagatcatttgctttaatttgatttgtttattttcccaggtaacgtctccttatggaaataaccttcaccacaatgaaaatgccacgcaaggtcaatttgcatttacaacagcggagagtgggaactatgtggcatgcttttggatggatggtaaacatcaagaagaagcaactgtaagccttgactggaaaac

SEQ ID NO: 7063 - DNA, 408 bp, Glycine max
tgaagaaatctgcatactttttggtattaaagttggacacttctgacattaggcaaatgtctgagctgatttgttgctcacattccctgctgcagatttgagaattgagatcttccttctcttgattcctaatgttgtaaaattgtgaaataaagatactgggttataaggtgtgagaatttagatcatttgctttaatttgatttgtttattttcccaggtaacgtctccttatggaaataaccttcaccacaatgaaaatgccacgcaaggtcaatttgcatttacaacagcggagagtgggaactatgtggcatgcttttggatggatggttaacatcaagaagaagcaactggtagccttgactggaaaacaggaatttatgccaatgattgggagtctgttgc

SEQ ID NO: 7064 - DNA, 380 bp, Glycine max
atcttggcttcagagtaggaaggataagatagttcatatctacatggctggggatagctggggtgggaacattgtgcaccatgttgccctcaaagccatggagtcgggaattgaagtgtttgggaatatactgctcaacccattgtttggcgggcaagaaagaacagagtccgagaagcgtttagatgggaggtattttgttggagttaaggatcgagactggtattggagggcttttcttcctgaaggggaagatagagaccaccatgcatgcaacccgtttggccccaagggcaaaagccttgaagggataacctttcccaagagccttggggtggttgctggtttaagacctggtcaggactggcagttgggttatg

SEQ ID NO: 7065 - DNA, 359 bp, Glycine max
cctacgaggatgacaatgccgttcatcttgttgtggagctttgtgagggcggggagctcttcgaccgcatcgtggcgcgaggccactacaccgaacgcgccgccgccgccgtcaccaagaccatcgtcgaagtcgttcagatgtgccacaagcaaggtgtgatgcatcgggatctcaagccagaaaactttttgtttgcaaataaaaaggaaactgcggctttgaaggctatagattttgggttgtcggtgttctttaaaccaggggaaaaatttaatgagattgttggaagtccatattacatggctcctgaggtattgaagctaaattatgggccataagtggatatctggaatgct

SEQ ID NO: 7066 - DNA, 413 bp, Glycine max
gacccacgcgtacgcccacgcgtccgccgagatccgctgccggtgcatcaagggaagcaagaggatagagtttgcgctctgtttttcaaatgcacaaagcgcagatctctgtgatataacggaatacaggaaaatcaaagaccaggatgaagttagagatgcgggcgttgaggacgtccgaaaatcattcttgctgtcagtcccagataacgatttgagtgctgaggcataaaccaaaattgacagccatacggagaaagtaaagtggaagctcatgtcagttgttacacttgcattgactgtccttactagttcgcaagccattctaatcgtttggtccaagagagctggcaagtatgagtatagtgtcactactgctaactttatggtggagactttaaaatgtgctatat

SEQ ID NO: 7067 - DNA, 454 bp, Glycine max
aatttgtgcgctgggctctgcaacctactggttatttcaagagttggcatattggtgtccgtgttaaaagttccaaaaagatggttgcctttataacaggtgttcctgctagaatccgagttcatgatgaggttgttcatatggcagagatcaattttctgtgtgtccataaaaagcttctaacaaagaggcttgctcctgtcatgatcaaagaggtcaccaggaaggtgcatctggaaaatatgtggcaggcagcctacactgccggagtagttctttctacacctatagcaacttgtcaatactggcacagatctttgaatcccaagaagctaactgatgttggtttttctcggcttggtgcacgaatgacaatgagtcgaaccatcaagctttacaagctaccagaatcaacaatcaccccagggtttaggaagatggaaattcatgatgt

SEQ ID NO: 7068 - DNA, 377 bp, Glycine max
ggaacccagtgccacctcatcaccaacaagtacggtttggttcatattgctgctggagatttacttagggcagaaattgccactggaagtgataatggaaagcgagccaaacagtatatggagaagggacagttggtccctgacgaaattgttgtgatgatggttaaggagcgtctcttgaaaccagattcgaaagagaatggttggcttttggatggatatcccaggagcttatcacaggccactgcacttgaggctcttggctttcggcctcatatttttcttcttcttgaggtttctgaagatgttcttgtggagagagtagttggacggagattagatcctgttaccggcaagatatatcacttgaagtattc

SEQ ID NO: 7069 - DNA, 435 bp, Glycine max
cagggcagttggatttccacagatggcaaatgctgcagccattgcagctgcctttgggggaggtctacctcctggaataactgggacaaatgacaggtgtacagttcttgtatcaaatcttaatcctgatagaattgatgaggataaactattcaacctgttctctatttatgggaatattgtgagaattaaacttctccgaaataaaccagatcatgcacttattcagatgggagatggttttcaagcagaattggctgtacactttctgaaaggagccatgttgtttgagaaacgattagaggtcaacttctccaagcatccgaacataacccaaagtgctgacacacatgaatacatcaattcaaatctcaatccgttcaaccgtaacgcaaccaaaaactaccggtactgctgcttcccaacaaagatgat

SEQ ID NO: 7070 - DNA, 432 bp, Glycine max
  modified_base (316)..(316): a, c, g, t, unknown, or other
cccacgcgtccgctccagggaaacaacctgagaaagtgtgcacctcggtcaaaaaacggtgccggcactcgtatctgtgacaccgtgttcaattcggatccaaaaatctgatttatcgggtctcttcccaactcccccacctccaaccaacttccaccagtagtaaacagaaatacaagcataagcaaaagaagacccgcgacacatcgcaacatcgtatcatgtctgcaacaaacgtccccaaagtgctgttacaactacaaccaccctgcaaatcgaacccactctgcgtgccggtgataggactcggcaccgncgcggtccacaacgacggtgacacggtgaaggctgcagtcatagaggctatcaaactcggttacagacacttcgacaccgcggcacagtacggatcggagcaagctcttggagaag

SEQ ID NO: 7071 - DNA, 463 bp, Glycine max
ctaacaccgtcctctcttggcgttctggcgtggaaaaggacccggatgaagtgctgcagtcccacactgtttataccaatgtttccaaaggggttcttgccaagtccaaggatttaatttcagcttttggcaccgatgaccactccaaaatttgcttagatattttaaagaaaggggagcttcaggtagctgggaaagagagggaatcattgttatcgagtcagttcaaggatattgcgaccattgtgatgcacaagacttacaatcctgagactcaacgtccatacactatcagtatgattgaacgcctcatgcgggaaatccattttgcttgtgatccacacagcaccttcaagaagcaagctctggagttaattcaagagcttcagaagcacttccctataaaacggtgtccgttgagaatacgtgctactgctcctgatgaccaggtgcctgaactttt

SEQ ID NO: 7072 - DNA, 455 bp, Glycine max
cctcaccttagttgatcgtgttctcaggatgaagtccaactatgctgccagtggaatacgaacgctgcgtggaagctgtcttactgatactgatgggttgaagcgtaagctggcaaggaagctctctgtgaatgaagatggggacgggtcagaatgggaggtgggtgaatgccttggaatgtggtggaggcctgattttgaaacattaatgtatcccttcattccacctaatgtaaaaaagccaaaggagtgtaccaaagtcttccttgtgaagctgccagagagtagaaagttcattgtgcctaaaaacatgagggtgcttgcagttccgttgtgccaagttcatgaaaatcacaagacatatgggcaaattatatcaggggtcccacagctgctgtcaaaattctctttcaacatgatagaatcttgatacctgattgcaacctattttatca

SEQ ID NO: 7073 - DNA, 400 bp, Glycine max
aaacaaacaaaacagccaccgtcatactcaagaagaagaagaagaagaaagtggttggagaggttggtggcaaacatggggatgcgcgacctcgtttcgggcgctgcggcatgtggcgactcttcttcttcttcctccgcaaaccctctcgcttccctcgccaacgcccttattggctcttcctccaaaactccggaaaggttgaaggagattcccacatccactcccactgaccctacatcccaattttactccacagctcttcccgccaatcagcttcccggcaccgaactctatgagcctctattgaatgccaactctcatgcttcggaatttttgcataagttccctggcaccaccggccttgatgagacgtgggatgagatacaacctgatgggg

SEQ ID NO: 7074 - DNA, 443 bp, Glycine max
gacagaccaaagcaaacaaacaaaacagccaccgccattccaattcgaagaagaatagtggttcaagagtttgttggcaaccatggcgatgcgcgacctcgtttctggtgccgcggcatgtggcgactcttcttcttcttcctcaaaccctctcgcttccctcgccaacgcccttattggctcttcgtccaaaactcaggagaggctgaaggagattcccacatccactcctactgaccctgcttcccaattttactccacagctctccccgccaatcagcttcccggctccgaattcgataagcctctattgaatttaaactcccaggcttcggagtttttgcataggttccgtggctccactggccttgaggagacatgggatgagatacagcgtgatggggcggctgcccaaatgcgccaactgccaccggggattcaac

SEQ ID NO: 7075 - DNA, 427 bp, Glycine max
caaggttcatggagccaacttcctcgtggaaagacacacgcgcacgctcctctgccacgcgtgccagtcgcccacgccgtggaaggcctccggcgccgccctcggaaacaccgtctcgctgtgcgagagatgcgccggcggaaccaccgaacaaggtcaagagagccaaggaggcaatgacgacgacatagacaccgacatagacaccgacgatgaggatgactacgatgagagcgaggacgaggttgccgccgacgaggaggacggagacaaccaggttgtcccttggtcctccgagccgccgccaccagccccgagctcttccagcagcgaagaatcggttagccggtgcaacaacgtggacgaggtttcgaccacattgaaacgccgtcgccaggaggacaatgattttcagggttggaattcg

SEQ ID NO: 7076 - DNA, 432 bp, Glycine max
  modified_base (300)..(300): a, c, g, t, unknown, or other
  modified_base (319)..(319): a, c, g, t, unknown, or other
cacctctcattttcccacgacccattttcatttttccaaaaagatctcaactttgcttcagactagagcactccctctttttacgttcccgtttcatgggcatctcttggaatcgggaaccatagacatcgccatggaaaaggacaagtctcacactcacagctttcttcacagtatcgtcaaacacttcaaattcggttcaccgaaagagcgaaacaatgaagctgacgtacaccaaatggctgcacaggagcagaagatctttgcctacgaaaccttgacagctgcaactaagaattntagtgctattcataagctnggtgagggaggttttggaccagtctacaaggggaagctgaatgatgggagagagattgctgtgaagaagttatcacacacgtcaaaaccaagggaagaaggagttcatgaatg

SEQ ID NO: 7077 - DNA, 449 bp, Glycine max
aaccattgttcgttgtggcagtagcaaaacaacacctttttgaaacccgaggttcagagagaaaagaaacattttccaaattaatggggcgttggatgaaaccagaggtttaccctctattggctgcaatgacctttgttaccggcatgtgtgtgttccaactaacaagaaatgtgctcgggaaccctgatgttaggattaacaaaactcggagaagcatggcagtgttggagaacagagaagagggagagaaatatgctgagcatggcctgaggaagttccttcgtactcgaccaccagagattatgccaaccatcaaccacttcttcagcgaggataaatgaaagagtgtcacacgtagtagaataccaaaataattcaacttatggaagaaaaatcaaagtttctaaatctgtcaagcagcttgcatatgaaccttgtcatattac

SEQ ID NO: 7078 - DNA, 408 bp, Glycine max
gttcgttgtggcagtagcaaaacaacacctttttgaaacccgaggttcagagagagaagaaacattttccaaattaatggggcgttggatgaaaccagaggtttaccctctattggctgcaatgacctttgttaccggcatgtgtgtgttccaactaacaagaaatgtgctcgggaaccctgatgttaggattaacaaaactcggagaagcatggcagtgttggagaacagagaagagggagagaaatatgctgagcatggcctgaggaagttccttcgtactcgaccaccagagattatgccaaccatcaaccacttcttcagcgaggataaatgaaagagtgtcacacgtagtagaataccaaaataattcaacttatggaagaaaaatcaaagtttctaaatctg

SEQ ID NO: 7079 - DNA, 366 bp, Glycine max
cccacgcgtccgcgttgtggcagtagcaaagcaacacctttttgaaacccgaggttcagagagaaaagaaacattttccaaattaatggggcgttggatgaaaccagaggcttaccctctattggctgcaatgacctttgttaccggcatgtgtgtgttccaactaacaagatatgtgctcgggaaccctgatgttaggattaacataactcggagaagcatggcagtgttggagaacacagaagagggagagaaatatgctgagcatggcctgaggaagttccttcgtactcgaccaccagagattatgccaaccatcaaccacttcttcagcgaggttcaatgaaagagtgtcacacgtagtag

SEQ ID NO: 7080 - DNA, 385 bp, Glycine max
gaaacattttccaaattaatggggcgttggatgaaaccagaggtttaccctctattggctgcaatgacctttgttaccggcatgtgtgtgttccaactaacaagaaatgtgctcgggaaccctgatgttaggattaacaaaactcggagaagcatggcagtgttggagaacagagaagagggagagaaatatgctgagcatggcctgaggaagttccttcgtactcgaccaccagagattatgccaaccatcaaccacttcttcagcgaggataaatgaaagagtgtcacacgtagtagaataccaaaataattcaacttatggaagaaaaatcaaagtttctaaatctgtcaagcagcttgcatatgaactttgtcatattacg

SEQ ID NO: 7081 - DNA, 410 bp, Glycine max
gcttaatcgaactattcagattctaaaaaatgagttggtggtgggctggagcaatcggtgctgccgggaagaaattcgaggaagaggaaccgccgcgaagcttacagagcgtgggcctggtgatcggcgtgacgggcatcgtgggcaacagcctcgccgagatcctccctctcgccgacaccctcgccggtccatggaaggtctacggcgtcgcacgccgcccccgtccgccgtggaacgccgaccatcctgtctagtacatccagtgcgacgtttacgatcccgccgacgccgaagccaaactcttcggcctaaccgacgtcactcacgtcttcttcgggtcgtggaccaaccgctccaccgaagcagaaaaccctgcgaagttaacggcgctatgttacagaacgtgc

SEQ ID NO: 7082 - DNA, 371 bp, Glycine max
cacgcgtccacatgcccaatccaacaaccgctacgtctttgacacacatggcgaccctcttgaaactgacgatgaatattacatcaggccggccataacagacaacggagggcgtttcacattgatcaacagaaacaggtcgtgccctttgtacgtcggtctcgaaaacaccgacacaccgcagggctacccgatgaaattcaccccttttgccaacaaggacgacgacgataacgtgagggtgaacacggacttgaaagtgacactggtgcaagtttccacaacgtgtgtgcaatccaccgaatggaagttgggttggaatgacacgaggaatggaaggaggctcatcgtcactgggcgagataatggga

SEQ ID NO: 7083 - DNA, 403 bp, Glycine max
cttgcccaatccaacaaccgctacgtctttgacacacatggcgaccctcttgaaactgacgatgaatattacatcaggccggccataacagacaacggagggcgtttcacattgatcaacagaaacaggtcgtgccctttgtacgtcggtctcgaaaacaccgacacaccgcagggctacccgatgaaattcaccccttttgccaacaaggacgacgacgataacgtgagggtgaacacggacttgaaagtgacactggtgcaagtttccacaacgtgtgtgcaatccaccgaatggaagttgggtgaaaatgacacgaagagtggaaggaggctcatcgtcactgggcgagataatgggatacaaagtgcaggtaactattatagaatagtggaaacagaaa

SEQ ID NO: 7084 - DNA, 337 bp, Glycine max
cttttcatggcaacattatcccttgcccaatccaacaaccgctacgtctttgacacacgtggcgaccctgttgaaactgacgatgaatattacatcaggccggccataacagacaacggagggcgtttcacattgatcaacagaaacaggtcgtgccctttgtacgtcggtctcgaaaacaccgacacaccgtcaggctacccgatgaaattcaccccttttgccaacaaggacgacgacgataacgtgagggtgaacacggacttgaaagtgacactggtgcaagtttgcacaacgtgtgtgcaatacaccgaatggaaattgtgtgagaatgaca

SEQ ID NO: 7085 - DNA, 347 bp, Glycine max
cgaaaacctatcaaggtcatgatgaacatgaggccattaaccgccgtctacaacaaggcgatccgggatctttgcaatcgagaactcggccaccttcccccaaggaatttcgctctccgtcttggcgcctccgaggatcttgtccttcgacttgaattactgaggaatctgcaaaaacacagaggttgtgtcaacactgtgagcttcaatgcagatggtgacactctagtctccggttccgacgattggggggttattctctgggactgggaaactggccgcattaaactctacttccattctggtcattctaacaatgttttccaggccaagttcatgccctactc

SEQ ID NO: 7086 - DNA, 455 bp, Glycine max
tcaggtttcaggttcttatcatcactgtctctgtggtttccttctttgtagccgtaggtggttgcatgtacgtgcttccaagccttagccgcgcgtttttcaatggccaagttcccttattatctgaacataacagcaacggatcagtgagagaatgtgatgtctttgatggaagctgggtgcaggttaaagatcacaccttgtacaatgccacagagtgtccttttgtggaacgaggattcgattgtttagggaatgggaggggtgacagggattatcttggttggaggtggaagccgaggagttgtgatattccaaggtttgatgtgcgtggtgtgttggaaatgttgagaagcaaaagggttggttttgttggtgattcaatgagtaggacgcagtgggagtctcttgattgtatgctcatggctggtgttgaagataagaggggtgtttat

SEQ ID NO: 7087 - DNA, 425 bp, Glycine max
cccacgcgtccgctacgtgtttgctcttagcactattttagatcttatatgctttggttatcaaccaaatgaagacattagagatgccattgacgccttaaagaccgcagatatggataaacaagatttagatgatgatgagaaaggggaacaacaaaatttaaatatagcacgaaatatttgttctatcctaaaacaagttgatccaattagaaccaactattggatttggcgcaagagcagacttcctctatcagcttagtaaccaaagtaattaaagggcaactctgggttatgtgtaacctagtttattgaaactggatgtttatttattattattttttatgttgtcatgtatctgtttgtgcaaatttatctttttgtcatgccattactggcatttgagtgtaaggattgaaagccat

SEQ ID NO: 7088 - DNA, 443 bp, Glycine max
  modified_base (16)..(18): a, c, g, t, unknown, or other
cacgcgtccgggattnnntatatcttttaatggagtattttcctggtggagatatgatgacattgctgaggcggaaggatatactaacagaagatgaggccaggttctatgttggggagactgtcctagccatagagtcaattcataaacataattatatccacagagatatcaagcctgacaacttgctgctagatagaaatggccacatgaaattatcagattttggattatgtaaaccgctagactgcagtaatcttcaagaaaaggacttctctgttggaattaacagaagtggagcccttcaaagtgatggacgtcctgcagctcctaatcgaacccaacaggaacaactgcagcattggcagaaaaatcgacgaatgcttgcctattctacagttggaacacctgattatatggcttcagaagttcttctgaagaaa

SEQ ID NO: 7089 - DNA, 417 bp, Glycine max
cccacgcgtccgcttttttcaggttgaacatgtcaaagctgagagaaatctacttgctgaggttgacagcaattgcattgttaaactttattgttcctttcaagatgaggagtatttatatctcataatggagtatctacctggtggagatatgatgacattgctgatgcggaaggatatactcacagaagatgaggccaggttctatgttggggagactgtcctagccatagagtcaattcataaacataattatattcatagagatatcaagcctgacaacttgctgctagatagaaatggccacatgaaattatcagattttggattatgtaaaccgctagactgcagtaaccttcaagaaaaggacttctctgttggaatgaacagaagtggagcccttcaaagtgatgggcg

SEQ ID NO: 7090 - DNA, 428 bp, Glycine max
cccacgcgtccgcccacgcgtccgtttccattcccgtttaaaccctagcagagggttttagctcgcgccacacgaagcttctccatgatccatttcgaaggcgcattctaagccatggctgcttcaaagttaacctcatgcgtggcggtaacttccgcgcggtggtttccatgtccgccttctccgatcgtgcctacgccgattcttacttccgactccctttcttctcctctaaaccttccaatgaaccctcgccgccgaaccagacctccgactccaagtccgagcctccgccgcccgatgaacctaacaaatcgggtggcttcgacccggaatccttagaaagaggagccaaagcactccgtgaaatcaatagttctccctacttcaagcagctgttcgatttaatgcgaaaacaggaggaaact

SEQ ID NO: 7091 - DNA, 443 bp, Glycine max
ggaaaagaaagtccttgatctcatattagtcccaagtggtttccttgtgttgttggcttaccatttctggcttctccaccaagtcatgaaacaacccaccaaaacagtcattggtgtcaatgcaatcaatcgccgtttctgggtccaagccatgatggaggatgcgtccaagaatgggattctagctgtgcaatcattgaggaacaacataatggcatcgacccttttggcatccacagctataatgctgagttccctcattgctgtgttgatgagcagtggcaatgagagaaaaaccgtggtttctgaggtttttggggatagaactgagcttggtttgtccataaagttcttttccatattggtgtgtttcttgttggcatttttgctgaatgtgcagtccataagatactatagccatgcaagcatcttaatcaacgtgc

SEQ ID NO: 7092 - DNA, 415 bp, Glycine max
  modified_base (402)..(402): a, c, g, t, unknown, or other
tccacacccaacattctcacaagtcacagccaaacaccatttcattaattcttgcagaatattgcttagttttgttttatctgaatttggaaacagcttttgaatggctttttcaagagttgcactgctaatatgcacggtcgggtattttgtgattgcctctgccggcaatttccaccaagattttgatatcacatggggagatggtcgggctaagatactcaacaatggagagcttctcactctgtcacttgacaaagcctctggctcgggtttccaatccaagaacgaatacctttttggcaaaattgacatgcaactcaaactagtccctggcaactctgctggcaccgtcactgcctactatgtaagcatataatcatattctaccttactatactntaatctaagtcat

SEQ ID NO: 7093 - DNA, 405 bp, Glycine max
  modified_base (322)..(322): a, c, g, t, unknown, or other
  modified_base (365)..(365): a, c, g, t, unknown, or other
cacacccaacattctcacaagtcacagccaaacaccatttcattaattcttgcagaatgttgcttagttttgttttatctgaatttggaaacagcttttgaatggctttttcaagagttgcactgctaatatgcacggtcgggtattttgtgattgcctctgccggcaatttccaccaagattttgatatcacatggggagatggtcgggctaagatactcaacaatggagagcttctcactctgtcacttgacaaagcctctggctcgggtttccaatccaagaacgaatacctttttggcaaaattgacatgcaactcanactagtccctggcaactctgctggcaccgtcactgcctactanttgtcttcaaaaggagcgacatgggatgagattgactttg

SEQ ID NO: 7094 - DNA, 443 bp, Glycine max
gcgcgacattctcataatcaaataccatttcattcattcttacatattgcttaattttatctggattttgaaagaccttctgaatggctttttcaagagttgcattgttaatatgcactgtaattgggtattttgtgattgcctctgcgggcaatttttaccaagattatgatatcacttggggagatgggcgtgctaagatactcaacaatggcgagcttatcactctgtctcttgacaaagcctctggctcgggtttccaattcaagaacgaatacctttttgataaaattgatatgcaactcagactaggttcaggcaactctgcttgcaccgtcacatgctactacttatgtccataaggatcatcatggtatgagactgactatgaattcttgggtaatatgatcagtgagccatacatgcttcacaccaacgtgttc

SEQ ID NO: 7095 - DNA, 379 bp, Glycine max
  modified_base (317)..(317): a, c, g, t, unknown, or other
gttcatggaccactcattgttattggcatgatttctcagtatcaaggaaagaagggtgggacgccatcaaaataccctggactattggagaaactcttagcatagagccaaacagtgtctggctttttcctggtgcaatatggtcacttgtggcaagaacatcttgacagactatttaatctttactcttcaggaaagctaaaggctgctattgatccaaagaaatttataggcctgcattctgctgcagacgctgctgaatatctccattcaggcaaaagtgttgggaaggttgtcgtctccgtggacccaagctntcttactcaagtggccaaattgtgaatcaacccatgtcaaatgacctcacagattatattat

SEQ ID NO: 7096 - DNA, 353 bp, Glycine max
cttttattctgatgggagtggtcttcccatgccatacactgtgacagttctgaagcatggtagcgtgagagatctttgccaagcattatgcactgcatgctgcttgaagagtgatgaaatgcttttgcttgcagaggtttatgagcataagatttatcgatatctagagaatccgatggaaccattaaattcaattaaagatgatgaacatattgggggctatcgaatcaaaagtggagccaggaaaacgaaagttgaaataatgcatcgatggctggataatatgaagggtggagacaggaagctctttgggaccccgttggtactggtttggaggaaaatcctcaatttgg

SEQ ID NO: 7097 - DNA, 329 bp, Glycine max
tcgcttcagtcatttgaaaggatcttgtttcttgtggagaatgcacattggttttatgaaggtaatgccgtataaaataatccatctctgaagtcattaaatctgaaggagttcacttctttattgttcaatagctgtgatgtttttcagccttatgtggcccatatagatgatattttcaaggacttcacttcctataaggttcgagttcctgtaactggggcaataattcttgatgaaacatatgaaaggtgcttgctagtgaagggatggaaaggtacaagttggagtttccctcgtggaaaaaagagcaaagacgaagaagatca

SEQ ID NO: 7098 - DNA, 357 bp, Glycine max
agaaaatacacattacattactaagtctttgttcatttgagtagtagtgatggctagcctcaaggttgcatgtgtggttgctgtgatgtgcatggttgtggtggccatgagtgctgcacccatggcacaggccgcaatcacgtgcgggcaggtcgccggcgacatgtctccgtgcttcagttatcttcgaagcggcggaaaaccgtcgcaggcctgctgcaacggagtgaagtccctcagcagcgcggcgaagaccaccgccgaccggcagggggcgtgcagttgcctgaaaaaccttgccaataatatgggacaaaatttgaatgccgggaacgcaacctctctccctggcaaatg

SEQ ID NO: 7099 - DNA, 371 bp, Glycine max
caagaatttccattgcatgcaaagcaaatacgcattatattactagttttaatttgtttggtcgtttgcttctgtctttgattaatgatgactagctttaaggttgcatgtgtggttgcgatgatgtgcatggttgtggccatgagtgttacacccatggcacaggccgcaatcacgtgcgggcaggtcgccggcgacgtgtctccgtgcctcagttatcttcgaagcggcggaaaaccgtcggacgcctgctgcaacggagtgaagtcgctcagcggcgcggcgaagaccaccgccgaccgccaggcagcctgcaattgcctgaaaaaccttgccaataatatgggacagagtttgaatgccggcaacgc

SEQ ID NO: 7100 - DNA, 378 bp, Glycine max
gtgcctttaaagggttgaggattaaggtgaagaacccttctcttaggaggttggttagcggtgcctttgctggggcggtttcacggaccactgtggcgcccttggagacgataaggactcatttgatggtggggggtagtggcaattccactggggaggtgttcaggaatatcatgaagactgatgggtggaagggcttgtttaggggtaatttcgttaatgtgattcgggtttgttctggcaaggccattgagctatttgcttatgatactgttaacaagaacctcttgtcaaagccaagggagcagcccaaacttcctatttcagcatcattgatagcaagtgcttgtgctggagtttgtacaactttatgcactt

SEQ ID NO: 7101 - DNA, 354 bp, Glycine max
gtggatgggagagaagtatttgttgcatttctttgactatgatatcgggcataaaaaatacgtcatatggggtttaactgctgggatcttgattagggctgcatcagttgtgtaccaacggcagccagcttttgtggagcagaaccctaaattcaagcttccacaggatgtatccaaggacactacaataccttgagttcattgtttattgtattttgtccttgatacttgtccttaatcgtgcaaaaaaactcgtagcagccagagttctagaattcatagcaagtgtttatatttactgagaaaggaagagggtactatcccatcacttggaattcatattcctacctattg

SEQ ID NO: 7102 - DNA, 326 bp, Glycine max
tgcacctgtgaggtctagcaagcaagaacaaattcacaattccattgtgtctactttgcttgggttgatggatggccttgactctcgtgggcaagttgttttaattggagctactaacaggattgatgctattgatggagccttactgcgccctggtagatttgaccgtgagtttaactttcctctgcctggttgtgaggcacgtggtgagatattagacattcacactcgtaagtggaagcattctcctccaaatgagctgaaaaaggaacttgcagctagttgtgtaggttactgtggtgctgacctgaaggctctttgtactg

SEQ ID NO: 7103 - DNA, 326 bp, Glycine max
ggttgccgaaattaacagagcaagcacgttttgaacaggtgaagagatgcgatgagggtaagctagtagcgggagtgagaagaataggaggatggagaattgggaaacggaggaggttgaaggtgaaagtccccttccggttctggaggctgttgactacagaggtggagcctcggtgagatcgaaatctgggtcatggagatccgctgggtttatcataggtgtggaagtggcggataggattgcatattatgggattcaggggaacctcataacctacctcacgggcccactccatcagactactgccaccgccgccgagaatg

SEQ ID NO: 7104 - DNA, 440 bp, Glycine max
gccaatctctaggtgtttctgccagcaccttgacaaatatatttaattgctccagtgctcgctgttggagtagtgatgcttacaacccagttcctgggctgatggaaggggtgccctcgtcaggggattataacggagggtttgcatccaagcttatggcaaaagacttgaatctagcagtagaatcagctaagctggctggatgtaaatacccactaacatcacaagcgcaaaagatatatactgagctctgcagcgttggccatgaagccaaagacttttcatgtgcttttcgccattattactctggaattgacgaacctcatgatcagtaaattaagacgttggttgtatgcataaaactgttgtgatcccatgcctagtatatatggcaagaagatcaattgagctcaatgaagttgtagaaacagttgcgagtt

SEQ ID NO: 7105 - DNA, 420 bp, Glycine max
agcccacgcgtccgggataatcagctatatgcagttgagcatctgactaacatggtgaaaaaatatgacaaggaaaagaacacctggaatgaattggggaggcttccagtcagggcggattcttctaatggttgggggttggctttcaaggtttgtggagagcaacttttggttgtgggtggacaaaggggtccagagggtgaatctattgtgctgagttcatggtgtcctaagtcagggatcagcaatggcaccatagattggcaggtacttggcgtgaaggagcatgtcggggtgttcgtgtataattgtgctgttatgggttgttgagataattttagattgactcaacagaagatgctggtatccacaatctgacttagccttgaagggtgcctccatgttcaatcacctcattta

SEQ ID NO: 7106 - DNA, 417 bp, Glycine max
cccactcgtgcggaaactattgccaaacatgcatacaccacgaagattgtgctctggctgttttatggatggaaaattctatgtgattggtggcatgtcaagtcctactggttcattgacttgtggcgaggagtctgacctttagacgagaaactggcggataatagagcgtatgtatccatatgttaatggggctgctcaggcacctccacttgtggcacttgtggataaccagttgcatgcggctgagcatctaaccaacatggtgaggaaatatgacacggaaaggaacacctggagtgaatcgggaaggcttgcagtacgtgccgattcttctaatggatggagcctgtctttcaaggctcgtggagagaaacttctgcttgtgagtggacaaaggagtccagaaggtcaagc

SEQ ID NO: 7107 - DNA, 284 bp, Glycine max
gtcaagtacaactgtttcattaagttgtggagaggagtatgatctcaagacaaggagttggcggaaaatagaggggatgtatccatatgttaacgtgggtgttcaggcacctccacttgtggctgttgtggataatcagctatatgcagttgagcatctgactaacatggtgaaaaaatatgacaaggaaaagaacacctggaatgaattggggaggcttccagtcagggcggattcttctaatggttgggggttggctttcaaggtttgtggagagcaacttt

SEQ ID NO: 7108 - DNA, 459 bp, Glycine max
gttgttttttccagcatgaaacaggattatgcaagaatttacttcaggaatatgctcagaaagtgaactatgcaatgccaatgtatcagtgcaagaaggatgaaacaccaggtcgagcatcagtattttcatgtacggttgacattggggggattctatatattgggggagcagcaaaaacaaagaaggaagcagagataaaagctgctagaactgctttattagctatccagtcaagtgcatctcatgcttccgaaaaccaggttggccatccacagttgaccgtccttccatgcagaaaaagggcaacaagttctgttgccatagctgatgagaattcaaatcccccaaagcctaagaaagcgcggtttaaaaagaagtcttccaagaggaaaccctctagagataagatgggccaaattcatacttgaaacttgggcattggagaaattatcaatc

SEQ ID NO: 7109 - DNA, 437 bp, Glycine max
atggatcccccaagagggtcctggtgtgtctgattgagaaggaaattgagtttgaaacagtgcatgttgatctcttcaagggagagaataaggaacctgagttccttaagctgcagccatttggatcccttcctgttattcaagacggtgattatactctctatgaatctcgtgcaataatcagatacttagctgagaagtataaagaccaagggactgacttattgggaaagacaatagaagaaaagggtctagtggaatggcttgaagtggaagctcataactttcacccaccactctacaacttggttattaatgttctgtttgcgccattaacgggggctccttcggaccaaaaagtgatagaagaaagtgataaaaagattgagaaagtgctggatgtttatgaggagaggctgtcaaagagcaagtacttg

SEQ ID NO: 7110 - DNA, 445 bp, Glycine max
tcgcccacgcgtccgattcaggaaaaaaaaaaaaaaacatggtggtgaaggtgtatggtccaacctatggatcccccaagagggtcctggtgtgtctgattgagaaggaaattgagtttgaaacagtgcatgttgatctcttcaagggagagaataaggaacctgagttccttaagctgcagccatttggatcccttcctgttattcaagacggtgattatactctctatgaatctcgtgcaataatcagatacttagctgagaagtataaagaccaagggactgacttattgggaaagacaatagaagaaaagggtctagtggaacaatggcttgaagtggaagctcataactttcacccaccactctacaacttggttattaatgttctgtttgcgccattaacgggggctccttcggaccaaaaagtgatagaagaaagtga

SEQ ID NO: 7111 - DNA, 431 bp, Glycine max
gggggaggcttaattatggtcggtgaaggcatcaatgatgccccagcactagctgctgcgactgttgggatagttcttgctcaccgagctagtgcaactgccatcgctgttgcagatgtattgttgcttagagaaagcatttctgcagtgccattttgtattgccaagtctcgccgaacaacttcactgattaaacaaaatgtggctttagcattgacgtccattctcatggcttcccttccatcagttttgggatttctgccattgtggttaacggttcttttacatgaaggtggaaccctgcttgtctgtctcaattccgtacgtgctctgaatgaaccatcttggtcctggaagcatgatatattccatttgattagcgagattaaatctagactcctgtctctcaagacaaatatcacgggctcaaa

SEQ ID NO: 7112 - DNA, 447 bp, Glycine max
  modified_base (194)..(194): a, c, g, t, unknown, or other
ccttttggaaggaaatatgtggaggttctcaatagttctaaagctgattctgctattagccgaggatgtacaaagtctgaaattcctcagaaggtgttggaatctttgtttaatattcccaaaagcactgaacatgacaaagataccatgaattggagaaatgtagtaaagaaaatccagtctttgggacctgngttcaatgtttctccgcatgttgcagaatctcagcaacatacgtgtgctaagggagatgaatatcatgtgtttagggaagattcaaagcagcaatgggattcagtgaaatcttattatacgaaagctgcaacagcatataccaaacgggaacgagcttatgctgcatatctttctgaccagggtaaagaacaaactagattagctcagaaagcagacactaaggccagccatgacatatttattgctagaaac

SEQ ID NO: 7113 - DNA, 432 bp, Glycine max
cccacgcgtccgtgataatccatcttcaagatcttttaggaaacaaatgggctgcaatagctggatactttcaaaagggaacagccaatggcttaaagaactatgggacacccattttggaaaagaagctgaagaaaatgcaagtaggttgtgaaagtggtagctttgggagaaaggttttcagcctcaaagcaaatccctagaggccagtgggaaagaaagctccaaactgatatccaaatggcaaagagagccctcagtgaagctctttcaccagagaagccatcttggaatttatctgcctcaaactcaaacccttcagatagtagcagctccttctcttccacaaaaccaacaacaacacaaactgtgtgctatgccctaagtgctgacaacataactagaatgctaaagggttggatgaaaaaccca

SEQ ID NO: 7114 - DNA, 264 bp, Glycine max
gggaagttctatcttttggatccacatgcttaacttaactggatcacattggctatgttaaggatgggctgcaatagcttcatgcgctgccacagagaacagacaatgacataaagaactattggaacacccatttgagaaagaagctgaagaagatgcaagtaggttgtgaaggtggtagctttggagaatggttttcagcctcaaggcaaatccctagaggccatgttgaaagaaggcttcaaactgatatccaaatggcaa

SEQ ID NO: 7115 - DNA, 481 bp, Glycine max
aaaaggatgaagggaacgttgtggcagttcaagcacaagatgacacacatgagcatctgtcaagcgagacgtggcaatgcagataccacagtgacaccagaggtgaagaaaactgggaaggttgtccctaaaaaacaatcaaagacccccacgtctgaaaagcgagacaatacagctgattccagtaaaacagaaacaaagtctgacaaagatgacaaaaaggaagaaagagttactggtgaaaaaagtggggcaaagacagacaagctgaaagcctctgataaagatgttaccaatgtaaaggggaaagtgaaagatggggacaagtcaaaagatgagaaagtaacccaagatagggatggaaaggactagtccaaaagcaaatctagtaaggaagtgaaagacatgaggaagtctaatgaacctcctcgacaccctggatttattcttcaaacaaaatggaccaaagattctaaaatac

SEQ ID NO: 7116 - DNA, 443 bp, Glycine max
ggaagtctaatgaacctcctcgacaccctggatttattcttcaaacaaaatggaccaaagattctaaaatacgttctttgtcattgtcactggattcattgctggattatacagataaagatgttgaagaatcaaatcttgagctttcattgtttgctgaatcattttatgaaatgcttcagtttcaaatgggttctagaattttgacatttcttcagaaactgcgcataaaatttgtgatcaaaagaaatcagaaaaagaggcagagggaagatgagcaagagaaggatgatgtaaaaaaatctcctgttaagcgtcaaaagggaaatgatccttcagtgaagaatgagcccacaaatatggacacgttaaatccaaccctactagatgatgagaaagctgttgctaggaatgataactctagtaataaggaggatgatgtg

SEQ ID NO: 7117 - DNA, 394 bp, Glycine max
agcagaggggttaggaagcgaccatggggacgctacgccgcagaaataagagacccatggaagaagacacgtgtctggctgggcacattcgatactcccgaggaggccgccctcgcctacgatggcgccgcccgctccctccgcggtgccaaggccaagaccaacttccctccggcgccgcccctctgcctcgacctcaacgtcccttcctccgatcaccgctggccccaccacgtccccccccgcagcctcgtcctcagcgacttcctccacaccgccgttctcagagatatcgacccgccccaacaacctttcccacccgccgccgcagtagctcaccgaaatccccacggcggagctatgcccgttggcggccgggttcaagtgatggaag

SEQ ID NO: 7118 - DNA, 355 bp, Glycine max
  modified_base (300)..(300): a, c, g, t, unknown, or other
agttagtgttctctcctttcattaacgttgtgttgggtttgctagtgtacttggttttcattatggcgtcttcttcagcctctcgtgagggacactacagaggagttaggaagcgaccatggggacgctacgctgcagaaataagagatccgtggaagaagacacgtgtctggctgggcacattcgatactcccgaggaagccgccctcgcctacgacggcgccgcccgctccctccgcggcgccaaggccaagaccaacttccctccggcgccgcctctctgcctcgacctcaacgtcncttcctccgatcaccgctggccccacgtcccccctcgcagcctcgtcctcagcga

SEQ ID NO: 7119 - DNA, 296 bp, Glycine max
cggccagccgacaatcacgggaggttatgtggtgtccctccacttttatatacacaacaacaacggcacacatactagtcatttgttgttgtgttctcctttcattaaggttgtgttgtgtttgttgggcttcgttactgtactttggtttcattattatggcgccgtcttcttcagcttctgcttctcgtgagggacactacagaggggttaggaagcgaccatggtgacgctacgccgcagaaataagagacccatggaagaagacacgtgtctggctgggcacattcgatact

SEQ ID NO: 7120 - DNA, 436 bp, Glycine max
gctttcttcttttcctttgtcaattgagaattgttcctctcttccattcgtgtacccgcagaagaatcatgacgagttcctctgctgccgctcgcaagaatctgagtaagattgcctgcaataggctccagaaagagctcgtggagtggcaggtcaatcccccaactggtttcaagcacaaagtcaccgacaatctccagaggtgggtggttgaagtcactggagctcctgggacactttacgctaacgagacctaccagcttcaggtcgattttcctgagaattacccgatggaagctcctcaggtgatattcttgcatccggctccgctgcatccccatatctacagtaacggccatatttggttagatatattgtatgattcatggtcccctgcgatgacagttagttctatctgcatcagtattctctcaat

SEQ ID NO: 7121 - DNA, 278 bp, Glycine max
ccccacttgtttcaagcacaaagtcacagacaatctccagaagtgggtggttgaagtcactggagctcctgggacactttacgctaatgagacctaccagcttcaggttgattttcctgagaattacccaatggaggctcctcaggtgatattcttgcatccggctccgctgcatccccatatctacagtaacggccacatttgtttagatatattgtatgattcatggtctccggcgatgacagttagttctatctgcatcagtattctctcaatgc

SEQ ID NO: 7122 - DNA, 415 bp, Glycine max
acgccacgcgttcgaccacgcgtacgtccactcgtcctagaatcttcctgagcgaacttatggatcagtgcttattccacttctgccagacgataatagagctggcgaaacaactcgcaaagggttttattcgtatgatgataaacgcaaggctagtcctgatcctgaattgaagaactatattgagaaggctaggagcatttctggtgtctccggagatccaaagcttgccaaattacaagaaaaggatatcatatagatgatattctttcctgcggtgaatgaggcttgtcaggtccttgatgaacgtatcgcattcaaagcagcaggaccttgatatttcttctatcatgtggcaatgggttttttcccccttacaaggggggcatgcattcatatatctgggcttgattct

SEQ ID NO: 7123 - DNA, 450 bp, Glycine max
  modified_base (421)..(421): a, c, g, t, unknown, or other
caaaccccaacatctctcgatgcagagcacccctccgacaacgaccagcacatgggcttgcgggcgcggagcctgagcggagagtctcgggcggagcaagcgtgggcccattggaccaagctgggccggcccaggttcatagtggccccgatggtcgacaactcggagctgcctttccggatgctgtgccgcaagtacggtgcccagggcgcgtacacgcccatgctccattcccgcattttcaccgagaccgaaaagtataggaacgaagagttcaccacttgcaaggaggatcgaccgttgtttgttcaattctgtgccaacgatccggatgtgttgttggaagctgcacgcaaggtggaacgtttttgcgattatgttgatattaatcttgggtgtcctcagcgcattgctaaacggngatactatggtgccttcttgatggataac

SEQ ID NO: 7124 - DNA, 385 bp, Glycine max
caaaccccatcatctgtcgatgcatagcaccccttcgacaacgaccagcacatgggctggggggcgcggatcctgagcggagagtctcggtcggagcaagcgtgggcccattggaccaagctgggccggcccaggttcatagtggccccgatggtcgacaactcggagctgcctttccggatgctgtgccgcaagtactgtgcccagggcgcgtacacgcccatgctccattcccgcattttcaccgagaccgaaaagtatatgatcgaagagttcaccacttgcaaggaggatcgaccgttgtttgttcaattctgtgccaacgatccggatgtgttgttggaagctgtacgcaaggtggaacgtttttgcgattatgttgata

SEQ ID NO: 7125 - DNA, 440 bp, Glycine max
cccacgcgtccgctcagcactatcaaccgcgaattgctcaagccttctgcttccgtcgcgctccaccgccactccaacgcgctcgtcgaggtgctgccgccggaggccgactccagcatctcgctcctcagccagtccgagaagcctgacgtcacttataatgacattggaggatgtgatatccagaaacaggaaatccgtgaggctgtggagctaccccttacacatcatgaactatacaaacaaattggtattgatcctcctcgtggtgttttactgtatggaccccctggcactggcaaaacaatgcttgccaaagctgttgctaatcataccactgccgccttcatcagggttgtaagatctgagtttgtgcaaaagtatcttggtgagggtccacgaatggttcgtgatgtatttcgtctcgctaaagagaatgc

SEQ ID NO: 7126 - DNA, 446 bp, Glycine max
cccactccaccaccaaaccctattcagcatttcccccaatttcccctcacaccatgggctgctccgcgatggtgttggacccgaaaccgtcgtcggagccaccgccgttcctcgcgtcgacaaaatccgactacctccaaggcggcttcagcggcagcgacgccacggcctccgacgaggacgacctctacagccgcctcaagaccctgcagcgccagcttgagttcatcgacatccaggaagagtacgtcaaggacgagcagaagaatctcaagcgcgagctccttcgcgcgcaggaggaggtcaagcggatccagtcggtgccgctcgtcatcggccagttcatggaaatggtcgaccagaacaatggcatcgttggatccaccaccggatccaactactacgtcagaatcctcagcaccatcaaccgcgagcttctcaagccc

SEQ ID NO: 7127 - DNA, 425 bp, Glycine max
  modified_base (354)..(354): a, c, g, t, unknown, or other
caccacacaaaaaaagcaaaaacagagagtaacaactgttactcacacacgccatgggtaaatgaatggtttttgagcaacagcagttaaaagagaaaagggattcagcgaagatgacatcggttggtgtggcaccaacttcgggtttgagagaagccagtgggcatggagcagcagctgcggatagattgccagaggagatgaacgatatgaaaattagggatgatagagaaatggaagccacagttgttgatggcaacggaacggagacaggacatatcattgtgactaccattgggggtagaaatggtcagcccaagcagactataagctacatggcaaagcgtgttgtanggcatggatcatttggagttgtcttccaggctaagtgcttggaaaccggtgaaactgtggctatcaaaaag

SEQ ID NO: 7128 - DNA, 372 bp, Glycine max
ggtaaatgagtggtttttgagcagaagcagttaaaagagaaagggattcagcgaagatggcatccgttggtgtggcaccaacttcgggtttgagagaagccagtgggcatggagcagcaggtgttgatagattgccagaggagatgaacgatatgaaaattagggatgatagagaaatggaagccacagttgttgatggcaatggaacggagacaggacatatcattgtgactaccattgggggtagaaatggtcagcccaagcagactataagctacatggcatagcgtgttagatggcatggatcatttggagttgacttccaggctaagtgcttggaaactggggaaactgtggctattaaaaaggttc

SEQ ID NO: 7129 - DNA, 461 bp, Glycine max
cccacgcgtccgaaatgagtggtttttgagcagaagcagttaaaagagaaagggattgagggaagatgacatcggttggtgtggcaccaacttcgggtttgagagaagccagtgggcatggagcagcaggtgttgatagattgccagaggagatgaacgatatgaaaattagggatgatagagaaatggaagccacagttgttgatggcaatggaacggagacaggacatatcattgtgactaccattgggggtagaaatggtcagcccaagcagactataagctacatggcagagcgtgttgtaaggcatggatcatttggagttgtcttccaagctaagtgcttggaaactggtgaaactgtggctatcaaaaaggttcttcaagacaagaggtacaagaaccgggagctgcaaacaatgcgccttcttgaccacccaaatgtcgttgctttgaaacac

SEQ ID NO: 7130 - DNA, 431 bp, Glycine max
  modified_base (1)..(1): a, c, g, t, unknown, or other
  modified_base (269)..(269): a, c, g, t, unknown, or other
  modified_base (404)..(404): a, c, g, t, unknown, or other
nccacgcgtccgcttatattcatcgttgtattggagtctgccatcgggatatcaagcctgaaaagctattggtcaatccacacactcaccaagttaaattatgtgacttggaagtgcaaaggttttgggtaaaagcgaaccaaatatatcatacatatgttctagatactatagagcacctgagctcatatttggcgcaactgaatatacttcagccattgacatctggtctgttggatgtgttttagctgagctgctgcttggacagnctctgttccctggtgagagtggagttgatcaacttgttgagatcatcaaggttctgggcactccaacaagggaagagattaagtgcatgaaccctaattatacagaatttaaattcccacagattaaagcacatncatggcacaagatcttccattagcgca

SEQ ID NO: 7131 - DNA, 467 bp, Glycine max
  modified_base (341)..(341): a, c, g, t, unknown, or other
  modified_base (358)..(358): a, c, g, t, unknown, or other
ctggcttggttgggggattgggtttaacaccaagctgcaacattggcgagggaggtattgcagttgctgaggctgtacatggttcggcacctgatattgctggaaagaatttggcaaatccaactgctttactgctaagtggtgttacaatgttgcgccatttgaacctccatgacaaagcagaacagattcaaaaagccatcctgaacacaattgcagaagggaagtaccgaacagctgacctcggtggcagttcaaagacaactgaattcacaaaggcaattattgatcatctttagattttggttttggagtcagcaagaaattcttgcttatgattntgattttcagtcaattntctatttattaacccaattaatccgaaagagtgggattacctcagcttaaaggaaaactcacccatgtgtgtgacattttacaaccaaagacatggaatgggcaggctt

SEQ ID NO: 7132 - DNA, 415 bp, Glycine max
gccacgcgtgcgcatctccataatgaagtgcgatgttgatatcatgcaggacctgtatgggtgcattgttctctcaagaggaacaaccatgttccctggcattgctgtcagaatgagcaaggaaatttctgcatttgcacccagcaacttgaagatcaaggtttttgcaccacctgagagaaaatacagcgtctggatcggtggatctatcttggcatctcttagcaccttccaacagatgtggattgctgaggctgaatatgacgaatctggtacatccattgtgcacagaaagtgcttctaaactgtttcgattgatacggttattgaaaggcaagacttctatcattacgatttgtctggaatcaatgcattgcatactgtaaccctttgattctagcttttggtatccttt

SEQ ID NO: 7133 - DNA, 429 bp, Glycine max
gttaacaacacttttgtcttcgttccattatctagttctcaattctcttcaccctttgccgctgagtgaaatgtgtagtcttgaagcggaaagaacaacagtatgattggcatcatgagacccttcatggattctctgcccatacacttacgatctaagatacacatgccctgatgatgtttacattaaagttcactactgaggaatatgccattctgatctccatcagattaaaaatgatcttgtcatgtccaactatcccatggtcccaggacatgaagtggtcggtgaggtactggaggtgggatcaaacgttagcaggttcagagtgggagagttggtgggagttggactcctcgtaggttgctgcaaaaactgccagtcatgccaacaagacattgagaattactgcatcaagaagatctggtc

SEQ ID NO: 7134 - DNA, 350 bp, Glycine max
tcggattgcaagaggaaaagaagaagagaataggcttcaccgaaatcaatttcccacagaagcaaacagatcgttggagttggaaaacaaaacaagagaaaatgggtggacgcaagtgtttgttaacgttggtgttgagtttggtgttgatgatgagtatggcataggcgcaatctggtactagcgcatactgcgcccaggagctaattccatgcctggactaccttaatggcacgatcaacccaccaagctcctgctgcgaccctctgaaacgaacagtgcaaaacgaactcgcctgcctctgtaacatctacttctgccctggccttcttcaaagcgtcaatgtcact

SEQ ID NO: 7135 - DNA, 348 bp, Glycine max
cccacgcgtccgggcagagtcacattcaccgggctttctttcctcctcttattttgggtatctatgctgtttaattaggaaggtggttctttatccttcggagcctctactatgttgaagttatctttgtatttccacacgttgattattcggtgatcatatgattgtattttcttttcactttttttcttctttagagacctctgattcaattgagtaaaaagtttatttaaacgaaaaaaaaaaaaaaaaaaaaaaaaacaaaaaaaaaaaaaaaaaaaaaaaaaaaaaaaacaaaaaaaaaaaaaaaaaaaaacaaaccaataaaaataaatcgggataagaaat

SEQ ID NO: 7136 - DNA, 285 bp, Glycine max
cacacgcgtccggtactttcttgcgaaacagaacggcgaaggggcaaacacaacttttttgtttttgtgtacagcgagagagaaagaaatgttggggatggtcagcagttccgtggtgtcggcgccggaggagctgctggctgccggcagcagaacgccgtcgccgaagacgacggccgggaagctgctgaaccggttcgtggagaacaaggcggcagcggtgtcgctgcatgtgggagagcacgtgcagttggcgtacacgcaccacaacgagtcagcgtggca

SEQ ID NO: 7137 - DNA, 450 bp, Glycine max
  modified_base (422)..(422): a, c, g, t, unknown, or other
ggtaaggttcctctttattggggaatcacagctgatggatatgtagcatttgctgatgatgcagatttgcttaaaggttcttgtggcaagtcacttgcttctttccctcaagggtgtttctactctacagcagttggaggattgagatgctatgagaatccaaagaataagattactgcaatacctgctgatgaagaggaaatctggggtgcattcttcaaggtggaagggtcagcagtccttgcaggcacagagtaaaagattcattttcaaataaagtaccgtgtgatgtattaatggagtaatgtgtttatgtgcttgtgacggtaaggcttgcatgcggggccatgtaaatacctttaatgataactatgagaagaatgtgactggtagtagagtttatcatggtgttcattagctangattttctctgtttctcttgtacagttg

SEQ ID NO: 7138 - DNA, 246 bp, Glycine max
ttctgatcaagctggtaaggttcctctttattggggaatcacagctgatggatatggagcatttgctgatgatgcagatttgcttaaaggttcttgtggcaagtcacttgcttctttccctcaagggtgtttctactctacagcagttggaggattgagatgctatgagaatccgaagaataagattactgcagtacctgctgaggaagaggaaatctggggtgcattcttcaaggtggaagggtc

SEQ ID NO: 7139 - DNA, 340 bp, Glycine max
tgtactttcttgcgaaacagaagggttaaggggcaaacacaacttttttgtttttttgtagagcgagagagaaaaaaatgttggggatcttcagcagttccgtggtgtcgccgccggaggagctggtggctgccggcagcagaacgccgtcgccgaagacgacggcggggaagctgctgaaccggttcgtggagaacaaggcgtcggcggtgtcgctgcaggtgggagaacacgtgcagttggcttacacgcaccacaacgagtcaccgtggcatcccagatcatttgctgttaaggatgagatattctgcttggttgagggggctctagacaatttggg

SEQ ID NO: 7140 - DNA, 430 bp, Glycine max
cttttgacaggatcaatatggtaaggtacctctatattgcggaatcactgatgatggctacgtagcattcgccgatgatgcagaattgcttaaaggtgctcgtggcaagtcacttgcttctttccctcaacgatgtcactactctacagctgttgcaggattgatgtgctatgataatcctaaagataatattactgcaggtcctgctaatgaggaagaaatctggggagcgactctcaaggtggaagggccagcagttgtcctactcagacaatagattttcctttctgctggtgagatgccatatgatgattagtggaggagactgctaaaggcatacatgatggccaatgtaactaaatggcatggggagtgatcactgtaattgggaaatattatgggtgtaactctgatcattagatagagaatt

SEQ ID NO: 7141 - DNA, 376 bp, Glycine max
cccacgcgtccgctggtgaatgcgtagaaaaggaaaataaagaaattagcgtgaaaaatgttgggggtgttcagcagctccatagtgtcgccgccggaggagctcgttgccgccggcagccgtacaccgtcgccgaagatgacggcggctgcgctgcggaagtggttcgaggagaagaacccctgcgcagtgtcagtggatgtcggagagcatgtccagctcgcttatacccaccagaacgagtcgccgtttcagcccagatcctttgctgtgaaggatgacgtattctgcttgtttgacggagcccttgacaatttgggcaacttgagacaacaatatggattggccaagtcaaccaatgaagtattgttggtca

SEQ ID NO: 7142 - DNA, 391 bp, Glycine max
cccacgcgtccgatggagaatgcgtagaaaaggaaaataaagaaattagcgtgaaaaatgttgggggtgttcagcagctccatagtgtcgccgccggaggagctcgttgccgccggcagccgtacaccgtctcccaagatgactgcggcggcgctgccgaagtggatcgaggagaagaacccctacgcagagtcagtggaggtcgcagagcatgttcagctcgcttatacccaccagaacgagtcgccgtttcaacccagatcctttgctgcgaaagatgaggtattctgcttgtttgagggagcccttgacaatttgggcaacttgagacaacaatatggattggccaagtcaaccaatgaaatattggtggtcattgaggcttacaaag

SEQ ID NO: 7143 - DNA, 294 bp, Glycine max
  modified_base (17)..(17): a, c, g, t, unknown, or other
cccacgcgtccgctggngaatgcgtagaaaaggaaaataaagaaattagcgtgaaaaatgttgggggtgttcagcagctccatagtgtcgccgccggaggagctcgttgccgccggcagccgtacaccgtcgccgaagatgacggcggcggcgctgcggaagtggttcgaggagaagaaccccttcgcagtgtcggtggaggtcggagagcatgtccagctcgcttatacccaccaaaacgagtcggcggttcagcccagatcctttgctgggaaggatgaagtattctgcttg

SEQ ID NO: 7144 - DNA, 386 bp, Glycine max
ggaaaataaagaaattagcgtgaaaaatgttgggtgtgttcagcagctccatagtgtggccgccggaggagctcgttgccgccggcagccgtacaccgtcgccgaagatgacggcggcggcgctgcggaagtggttcgaggagaagaacccctccgcagtgtcggtggaggtcggagagcatgtccagctcgcttatacccaccagaacgagtcgccgtttcagcccagatcctttgctgtgaaggatgaggtattctgcttgtttgagggagcccttgacaatttgggcaacttgagacaacaatatggattggccaagtcaaccaatgaagtattgttggtcattgaggcttacaaagcattgcgtgacagagcaccctaccct

SEQ ID NO: 7145 - DNA, 375 bp, Glycine max
cccacgcgtccggtcggtggaggtcggagagcatgtccagctcgcttatacccaccagaacgagtcgccgtttcagcccagatcctttgctgtgaaggatgaggtattctgcttgtttgagggagcccttgacaatttgggcaacttgagacaacaatatggattggccaagtcaaccaatgaagtattgttggtcattgaggcttacaaagcattgcgtgacagagcaccctaccctgctaatcacgttgttggccatctcagtgggagctttgctttcatagtttttgacaaatctacttctaccctctttgtggcctctgatcaatatggtaaggtacctctatattggggaattactgctgatggctacgt

SEQ ID NO: 7146 - DNA, 444 bp, Glycine max
gggagctttgctttcatagtttttgacaaatctacttctaccctctttgtggcctctgagcaatatggtaaggtacctctatattggggaattactgctgatggctacgtagcatttgccgatgatgcagaattgcttaaaggtgcttgtggcaagtcacttgcttctttccctcaaggatgtttctactctacagctgttggaggattgatgtgctatgagaatcctaaaaataagattactgcagttcctgctaatgaggaggaaatctggggagcgactttcaaggtggaagggccagcagttgtcgtagccagacaatagattttcctttctgctggtgagatgccatatgatgattagtggaggagactgtaaaaggcatccatgagggccaatgtaattaaatggcatggggagtgatcactggaattgggaaatatt

SEQ ID NO: 7147 - DNA, 409 bp, Glycine max
gagagagatgtcatcatcttcagacctggacaggcaaatagagcagttgaagaggtgtgagcctcttaaggagtctgaagtgaaggcgctttgcctcaaagccatggaaatccttgtcgaagagagcaacgttcaaagggtcgacgcccctgtcaccatatgtggtgatattcacggtcagttttatgacatgaaggagcttttcaaagtaggaggggattgccccaaaactaactatttgtttctgggggattttgttgatagagggttttactcggttgaaacgtttctgcttctgctcgctcttaaggtgaggtatccggatcggataacactcattaggggaaaccatgaaagccgtcagatcacccaggtgtatggattctatgatgagtgccttcgaaaatat

SEQ ID NO: 7148 - DNA, 438 bp, Glycine max
  modified_base (104)..(104): a, c, g, t, unknown, or other
ggagaaagcaaggtgggaaggatgtacttgttccactgagagagcttgaagatgtcattgttcccccatccccagtgacgtttcctgaagatcatgagacctgnaatgttcagttgtttagatccattgatggtggggctgcttttgggttcccggagactcctgaagatgctgccagagctggtcttattagtgggaaggataatatcattgatcgtagcattcaagatgcttatattaatgctattcgacgtgcaaagaacttcatctatattgaaaatcagtatttccttggaagctcttttgcctggagtgctgatgatattaagcctgaagacattggtgctttgcatctaatcccaaaggaactttcactcaagattgttagtaagattgaagctggggaaaggtttgctgtgtatgttgtagtcccaatgg

SEQ ID NO: 7149 - DNA, 437 bp, Glycine max
ctcctgcacgcaaagtagcaaacttccctggttatggctatggagaacgccgggaatttggaggcggccatagaacaagtgctgaatgcggagaagcaagcgaggctcgccggcgacgtcgccgccaccagaaacgccgtcactgaaattttacggatgtgcttcgaagcgcgtgcctggaaaaccctcaatgaccagattgttctcttgtccaaacgccgtggccagcttaagcaggctgtgacagcaatggtccagcaggctatgcaatatattgatgagacaccagatcttgaaactcgtatagaactcatcaaaatcttgaacagtgtatctgcaggaaagatatacgttgagattgagagagctcggttgatcaagaaacttgcaaaaatcaaggaagaacaaggacttatagctgaagctgctgatttgat

SEQ ID NO: 7150 - DNA, 440 bp, Glycine max
cggacgcgtggggagagaagtagcaagaatccttaatgacatatttgagattcctgatatgcccttgaaggcaagaaaatttgtggtgaaggtgtgtgatgtggtgactcgtagagctgctcgattggcagctgctggtattgttggtatcctgaagaagattggtagggacgggagtggtggcatcacaggtggacggagtagaagtgatatgaaaatgagaagaacagttgtggcaattgaagggggattgtattctaaatatgcattgcttacggagtacttgcgtgaagctctaaatgaaatattgggagaagatattgccaagcacgtaattctaaaggtcaccgaacatggatccggcattggggctgcactgcttgctgcctcttattcatcctaaactgtggatagagggtacacctgctattaaaatatat

SEQ ID NO: 7151 - DNA, 419 bp, Glycine max
  modified_base (377)..(377): a, c, g, t, unknown, or other
cttagcttaatttcgccaaatcaaccaaagacaaaaaaaaagaatccaaaggaacagaagagaaagcttgaagctatggggaacaccatgggaaggagtaaaaaggccaaggtgatgaaggtggatggagagacgttgaagctgaaaacaccagcgagagcaaacgacgtcgtaaaggactacccgggccacgtgcttctggactccgaagcggtgaaacatttcgggcttcgggccaaacctcttgagccgtaccaggaactgaagcccacaaagatttactttctcgttgagttacccaagattcagcccgaagaggaaaaaacggcgctaccgaggagggtgcgatccagtgggatacgcggcatgaacgcctncgataggctccagcttctcatgctctccaaacgctccgtttc

SEQ ID NO: 7152 - DNA, 418 bp, Glycine max
gattcccaaacttttttactttttattccctttttctcactatacaatacaaatacacattcaacaattttcgattcaagttcaaagccatcgacgagtgttgaggaagaataacaatgggaatgatagtggattttgaaaatgaccaaaacgacgccgttctggttccgccccctaacttcgccatggttgaagactgcgttttccgatccagcttccccaccccttccaatttcccctttctccaaaccctaaaccttcgctccatcatatacctgtgccccgagccttatccggaagaaaatctcgagttcctccgctcgcagaatattcgcctctttcaatttggaattgaggggaaaacggacgtttctatgcctgttctcaaagattctatcatggatgcactggaagtttt

SEQ ID NO: 7153 - DNA, 440 bp, Glycine max
cccacgcgtccgatcgggtctctctgtctctctcggatcatcaaaatcagaaagaattgggggaatggagaacaaccagcaacaaggcgctcaagcccaatcgggaccgtaccccggcggcgccggtggaagtgcaggtgcaggtgcaggtgcaggcgcggccccgttccagcacctgctccagcagcagcagcagcagctgcagatgttctggtcgtaccagcggcaagagatcgagcacgtgaacgacttcaagaaccaccagctccccttggcccgcatcaagaagatcatgaaggccgacgaggacgtccgcatgatctccgccgaggcccccatcctcttcgccaaggcctgcgagctcttcatcctcgagctcaccatccgctcctggctccacgccgacgagaacaagcgccgcacccttcagaaaaacgaca

SEQ ID NO: 7154 - DNA, 369 bp, Glycine max
atgctttcatcggtttggcggttttccttatattgccggtcacacccgagtcagtaggagcaagagaggaagatgaattcagtggtcctattaaaagtggagaagaagcggcagagcctctgttaaggcaagagactccagttgaggagaaagaagcagttgggttcatagaagcatggaaaattccgggggttgctccctttgctctctgtctgttttttgccaaattggtcgcatataggtttctctattgggtcccattctatgttagccacacagcaattgatgggaaatatctatctagtgagacatcaggaactctatccactttatttgatgttggacgggtgctgggtggaattctagccg

SEQ ID NO: 7155 - DNA, 417 bp, Glycine max
aggaacatggaccctaatcacctcttcttcacgcatttccgcgatggtgctattgcctcacgcattgagggccaacacagaggagctcttccttctgttattgtgattggtgctggaatatctggacttgcagcagcacgaagtctctatgatgcatcttttaaggtgactgtactggagtcacgagataggcttggtggtcgcattcatactgacttctcatttggctgtccagttgacatgggagcctcatggctacatggagtttgtaatgagaatccattggctccattgatacgtggcctggggctttcattatatcgtaccagtggtgacaactctgtcttatatgaccatgacttggaaagttatatgctttttaacatcgatggtaagcaagtccacaacagatggtca

SEQ ID NO: 7156 - DNA, 380 bp, Glycine max
cccacgcgtccgaattgtgctagataggcacccagaactaaggcaacaaggacttgcccatgaagtgctacaatggtttatatgcagaatggaagcttggtttgctgctgatgcagatatgatttcactgaaaacctgggatcaggaacatgtcctgtctggtggtcatggactcatggtgcaaggatatgatccaatcataaaagttcttgcaaaagatattgacatatgcttgaaccaaagggtgaaaatgatatctagtggttacaacaaggtaatggtcacggtcgaggatggcaggaactttgttgctgatgctgctatcataactgttcctattggaatcctaaaagccaatttaattcaatttgaaccaaaac

SEQ ID NO: 7157 - DNA, 421 bp, Glycine max
aaggaatgcaaggaaagtgtagtgatggagagagagagcgaaaaggcgaaaccgcacttgatcttcgcgtacggcacgttgaagcgaggctttccgaaccactatctgatggaggagttgaggagcaaagacgacgccgttttgcttggcagctacgtgacgaacgagccttatccgctggtgtgtgggccccacgggatcccatacctgatcaaactacccgggtcggggcatcgcgtgaagggcgaggtctatgccgtgtcggaggaggcggtggttgtgctggacgagttcgaaggcgtgagcgcggggtattacgagcggttagcggtgacggcggcggaggaagaaggaagggggaaaggtggaggcggaggcgtattggggacacaggagattcggtgaagtgttgtggaagatg

SEQ ID NO: 7158 - DNA, 414 bp, Glycine max
gttgtgtacagagagagagagagagagagagagagagagagagagaggctgctatggggaacagagctatgttaaccttgctactactcctcttcttctcgaccaatttggttccttccgcccttgctatctggctgacgttacccaccactggcactaagtgcgtctccgatgaaatccaacacaacgtcgtcgttttggccgactacgtcgttatccccagtgatcacgcccacaacctcaccatcgccgtcaaggtgacatcaccgtatggaaacaatcttcatcacaaggagaacacaacacatggtagtattgcatttacaactcaagaggctgggaactaccttgcatgcttctgggtggatagccctagtcaaggagttggtgaagttaatgtaaaccttgattgga

SEQ ID NO: 7159 - DNA, 449 bp, Glycine max
gctgttctttgcatcaccaaatctggggaggttctaaattatcaggcattcactgatgctaaggggatatacacagtggccgagacaatgccggagagtgatcgttgggatgcatgtcttgcccgaccaatcagtagtttccatgagcaatgcactcaacttggtgaaggcagcattggggttaaattcagttacaatcatccatcaggacattcacacactgtcaggacctttgtttatcgacccaccagtgttccaacttactgcatttgatatatactaatgagtatatgaatctgagagtgtctatgcttgattgaactagtgcaaaactaatgagtatatgagcatattttatttatactatatgtatgtgtagtggtgttccggcatgtatttctatagagcttagtcaaagtaagcatgagacgtttaagtaactgtaaatg

SEQ ID NO: 7160 - DNA, 436 bp, Glycine max
gagcgagtcagagttgggagagccccttacacgacttttacctctcggtctgggtcttctatatcttggaaagcaggacagtgttgaggcaactgccgaagtttcaaagactttcaatgaaaaaattagaaagtactgtgacatgacactcttatcatgtgcctatgctggaactggaaatgttctcaaggttcaaaatctgttgggtcattgttcacaacatcttgataaaggtgaaactcaccaaggtcctgctgtgcttggaattgctatggtagctatggctgaagaattgggacttgagatggcaattcgatcattagaacatcttctacaatatggagagcagaatattcgccgagcagttcctttggcccttggtctactctgtatatcaaatccaaaggtcaatgttatggatacgttaagcagactt

SEQ ID NO: 7161 - DNA, 453 bp, Glycine max
acgaacatgttctacaatatggagagcagaatattcgccgagcagttcctttggcccttggtgggctgtgtatatcaaatgcaaaggtcaatgttatggatacgttaagcagacttagccatgatactgattcggaagtagctatggcggcagctatatgcttgggtctaataggtgctggaacgaacaatgctcgaattgctggcatgcttcgcaatctttcaagctattactacaaggataccagccttctattctgcgtgcggattgcccaaggtcttgtacatttgggaaagggcttattaacccttaatgcatatcattccgatcgcttcctactatcaccgacagcacttgctggattaattaccatgttgcatgcttgcctagacatgaaagctattgtgctgggaaaatatcactatgttctctactttctcgttttggcaatgc

SEQ ID NO: 7162 - DNA, 407 bp, Glycine max
gaaaaattggaatggttaccagaagggtttgaggagagaattttaggtcaaggaaggggtttgatcataagaggttgggcaccccaagtgatgattttggaccatgaatccgttggagggtttgtgacacattgtgggtggaactcagtattggagggggtgtgtgcaggggtgccaatggtgacatggccaatgtacgcagagcaattttacaatgctaagtttttgacggacatagttaagattggggtgagtgtaggcgttcaaacgtggattgggatgatgggaagggaccctgtgaagaaggaaccggttgagaaggctgtgaggaggatcatggttggagaggaggcagaggaaatgaggaacagagcaaaagagcttgctcgaatggcaaagcgtgctgt

SEQ ID NO: 7163 - DNA, 440 bp, Glycine max
ggatggggccttggcttcgccttttgaaaaaccttgcccaagctcataatcttgtccctgaatttgagattactttagaggccactcaccatggaccgttgaccaataagccaaccatgtttttggagattggtagtactgaagactattggaagagacaggatgctgctcaagttatggcacagttagtatgggaaggacttggacttggaggtgtgtcagatgtaggaaactggagcagggagaatgataacaagaaaatccttcttgggataggtggtggacattatgcacctcggcatgtggatgtagtattgaaagataatgtatgggtgggtcacctactttctggatattcgctgccaatggaagatccaaaccagtcaaaaggagaaaaaaatgtggagattggtggaacatggagacagtctataaaagct

SEQ ID NO: 7164 - DNA, 462 bp, Glycine max
cccacgcgtccgaaaaccttgcccaagctcataatcttgtccctgaatttgagattacttgagaggccactcaccatggaccgttgaccaataagccaaccatgtttttggagattggtagtactgaagactattggaagagacaggatgctgctcaagttatggcacagttagtatgggaaggacttggacttggaggtgtgtcagatgtaggaaactggagcagggagaatgataacaagaaaatccttcttgggataggtggtggacattatgcacctcggcatgtggatgtagtattgaaagataatgtatgggtgggtcacctactttctggatattcgctgccaatggaagatccaaaccagtcaaaaggagaaaaaaatgtggagattggtggaacatggagacagtctataaaagctgcatatgaagccacttattctgcatttcctggtggtg

SEQ ID NO: 7165 - DNA, 447 bp, Glycine max
cccacgcgtccgggcaaaaataccaagctgtcttatcctttggaaaaattcagctctgatatttctgggagaagctttcacaatggccgtttcatacagagaatgcgagaaaaggcttcgtctcttccaaatgtaaaattagaacaaggaactgtcacatctctacttgaagagaaaggaaccatcactggggtgcactacaaaatcaaaagtggacaagagttcacagcaaaggctcccctcaccatagtatgtgatggttgtttttccaacttgaggcgttctctttgcaatcctaaggttgacgttccctctcattttgttggtctggtcttggagaattgtaatcttccatatgcaaatcatggtcacgtcatcttaagtgatccttcacccgttttggtttatcccatcagtagcactgagattcgctggtttggttgatgt

SEQ ID NO: 7166 - DNA, 378 bp, Glycine max
cccacgcgtccgggcaaaaataccaagctgtcttatcctttggaaaaattcagctctgatatttctgggagaagctttcacaatggccgtttcatacagagaatgcgagaaaaggcttcgtctcttccaaatgtaaaattagaacaaggaactgtcacatctctacttgaagagaaaggaaccatcactggggtgcactacaaaatcaaaagtggacaagagttcacagcaaaggctcccctcaccatagtatgtgatggttgtttttccaacttgaggcgttctctttgcaatcctaaggttgacgttccctctcattttgttggtctggtcttggagaattgtaatcttccatatgcaaatcatggtcacgtcatc

SEQ ID NO: 7167 - DNA, 423 bp, Glycine max
atatctctatctctctctctcttcatatgaatgcaaacatggcatcttcaccaaccttaataccctttctcctcatcttcttcctcttccacttccaccgttcctcctccctccccctctccgtggagaaccccgaagatgacgtcatagtctcgtcgccgaagggaaccttcaccgcagggttcagccccgtgggggagaacgcgtactccttcgcgatatggttctctacgcaagcgacgacgaagaccgttgtgtggatggcgaaccgcgatcaaccggttaacgggaaacggtccacgctttcgctcctcaagacggtgaacctcgttttaaccgacgcgggacagttcgatgtctggtccaccaacacgctctcctcgaagacgcttgagctgcatttgttcgacaccggcaacctcg

SEQ ID NO: 7168 - DNA, 364 bp, Glycine max
  modified_base (285)..(285): a, c, g, t, unknown, or other
  modified_base (288)..(288): a, c, g, t, unknown, or other
tgaacaacaaccacactctctacaaaattgatggtcccaccgacgagcgggtgccgcaatgggaggccatgaacggcggtgccaccaccgccaccttccgatccatcctcgacaagcccctcaaccagctcaccgaggatgacatttctcagctcactcgcgaagactgtcgcagattcctcaaagaaaaagggatgcgcaagccttcctggaacaaatcgcatgcgatccaacaggtcatttccctgaaagcgctgctggaaccttccgacgatgatactcctnctnctaccggcatgcaccaccggagtcatgctccttcccctacacctcaacctcaatctcaagtgaattcgactgaacc

SEQ ID NO: 7169 - DNA, 433 bp, Glycine max
cccacgcgtgcgctctttggctttccaaagaaaatttattattgtcttttgcacaattcaggggcaaaaccggatctacttcttcaaccgcgtcattcatttcaaccttcaagctacggaagagcgatgaactcatgatattgattagcatctaaaaatgtttattcttcgtcaccatacaaatctcgctatagtcctcactatcttcatagcttgcacaacaagagcacaaaacctcaccacctgcaatggcaaatgcggggagcacacccttcagttcccttatggcttctcccaaggttgtccaatccagcttgactgttccaacgaccaagtccaacttcgcagcgaattcagcgaatctctggtccaaaacgtaacatacagcaacatattcgtaaatctgcctgcaaaatgcaaccgtaccatggaa

SEQ ID NO: 7170 - DNA, 393 bp, Glycine max
cccacgcgtccgacagacttctaattccaactgcatctgccagatatttggagaatgggcttcagatgattgaattccttggaagagtagtgggtaaagctctatatgaaggaatattacttgattactctttctcccatgtctttgtacaaaagctattgggacgatatagctttcttgatgaattatcaacacttgatccagagctatacaggaaccttatgtatgtcaagaattatgacggtgatgtcaaggagctctctcttgatttcacagttactgaagaatcattgggcaaaaggtatgtggtggaacttaaatctggtggcaaagatatttctgtgacaaatgagaacaagatgcagtacatacatgcaatggcagactacaaac

SEQ ID NO: 7171 - DNA, 355 bp, Glycine max
  modified_base (340)..(340): a, c, g, t, unknown, or other
aagaaaagcacgttaaagattgtaataatttgtaaaaactatggctagcgatggcagcgaagagtttaggctagtgtcaccggcgttcagcaacgaggggaagttacctcggaactacactgacgagggccagggtgcgaaaaagaacatatcccctccgttggagtggtacaacctgccggaggggaccaagaccctcgccctcgtcgtggaggatatcgatggatccgattcagatgggcccatcatgccatggacccactgggtcgtcgcaaacatcccggccacggtgaagggcctgccggagggattctccggcaaggctgccgagatgggcggngattacgcgacgatc

SEQ ID NO: 7172 - DNA, 368 bp, Glycine max
ggaggagtggcgttgccagtgacattcgcgtacccatgtttcatgtggcttaagacaaaggggcggaagaagtatagtgccatgtggtggctcaattggttcttggggacattgggagtggctttgagtgccatattggttgcggctagtttatatgtcatcattgatactggtgttaatgtgagctttttcaatcctcagtagtctcacatatagagtgggaaaatgtactaggaaaatgatgttgggaggtaattaattagtaagagaattgctaaggttttctttctttctttttttgagaaattcaaatttgtgaccccactttgtagttctaaaaaaaaaacaaaaatgcaaacatgcataat

SEQ ID NO: 7173 - DNA, 439 bp, Glycine max
  modified_base (408)..(408): a, c, g, t, unknown, or other
ggagaacgaaaccttcatatgcacggtccccatgtttcacatatacggcctggtcgccttcgccacggggcttctggcttccggctccaccatcgtcgtgctctccaagttcgagatgcacgacatgctctcctcgatcgagaggttccgcgccacttacctcccgctcgtgccgcccattctggtggccatgctcaacaacgccgccgctatcaagggcaagtacgatatcacgtcgctgcattcggtgctctccggtggggctccgttgagcaaggaggtcatagagggctttgtggccaagtatcccaacgtcaccatccttcagggttatggtttgacggaatccaccggcgttggggcctccaccgactccttggaggagagtcgaaggtacggcacggcggngctcttgtctccggccacccaggctatgatc

SEQ ID NO: 7174 - DNA, 423 bp, Glycine max
cccacgcgtccgcccacgcgtccgattgcctttccatctccccttccgttcgcggcgccggaggtgtcaccgaccccaacaccgcccgctccaagggttacggcttcgttaagttttctgatgagaatgaacggaaccgcgccatgactgaaatgaacggcgtttattgctccaccaggcccatgcgtattagtgctgctacgcccaagaaaaccaccggtgcttatggtgcacccgccgcgcctgtgcccaaacctgtgtatccggttccggcctatacttcgcctgttgttcaagttcaaccaccggactatgatgtcaataatactaccatttttgttggtaatttggatcttaatgtgtcagaggaggagctgaagcaaaactctctgcaatttggggaaattgtttctgtcaaaattc

SEQ ID NO: 7175 - DNA, 406 bp, Glycine max
gtgcgggttccaagcacgactaaaatcaccgtcatttttctcacaccgacagtttcaaaaggcaaaggaagagttcgcatgaatcatggtggagattcacgaagaaatcaacccctttgatcaagaagaaaatgaagacattggagaggaagaaatcgactatgaccagcttaagaagcggatgtggaaggatcggatactgctgcagaagatgaaggagaaacggcccaaagaagagccagtccaagaagcaaaacaagaagcatctaggcggaagaagatgtcaagagcgcaagactcggtcctcaagtacatgatgaagattatggaagtttgcaatgctcaaggttttgtgtatgggattgtccctgaaaagggaaagccagtgactggttcttctgacagc

SEQ ID NO: 7176 - DNA, 377 bp, Glycine max
  modified_base (344)..(344): a, c, g, t, unknown, or other
ctgagttctatcaatctgtgaaaattggcattgtacaatatatgatactgaagatgatgtgtgcaatagtggcaataattcttgaatcttttggggtttatggagaggggaagtttgaatggaaatatgggtatccttacttggcactagttcttaactttagtcagacatgggccctatattgccttgtacagttctatgctgttattaaagataagttgaaaccaatcaaaccattggcaaagtttctaacttttaagtcaattgtcttactgacatggtggcaaagtgtggctgttgcattactttcttatatgggagcttttaggggatcattggctcangagttgaaagcacgtattcaagactacatcatc

SEQ ID NO: 7177 - DNA, 463 bp, Glycine max
ggcaagatgagtttgttaaaaagcaggattggaagaatcctttgagtgtgggaaaatgagtatgtacggtagggatccgtggggaggcccgctggagattcacgccaccgactccgccacggacgacgagcgcagccggaatctccaggagctggaccgaggcgctttagacgagacccaacagagctggctcttgggcgccggagaacagaaaaagaacaagaaaacctacgtagaccttggctgcatcatcgtcagccgcaagctcttcatctggaccctcggcaccctcgccgtcttcgccttcctctccgccttcatcactctcatcgtcaaaaccgtcccccgccaccaccacaagcccccccctcccgacaactacaccatcgccctccacaaggccctcctcttcttcaacgcccagaaatccggaaagctccctcggcacaacaatgtttcctgg

SEQ ID NO: 7178 - DNA, 374 bp, Glycine max
  modified_base (341)..(341): a, c, g, t, unknown, or other
ccggtcgtgcagaatcacctgaagcaggtttattttactctgtgttttgccgtggttgctgcggctgtcggggcttaccttcatgtcctcttgaacattgggggttttcttactacagtggcatgcatgggaagcagcttttggttactctccacacctccttttgaagagaggaagagggtgactttgttgatggccgcatcactgtttcagggttcctctattggacccttgattgatttggctattcatatcgatccaagccttatctttagtgcatttgtgggaacagctttggcctttgcatgcttctcaggagcagctttggttgcaaggcgtanggagtacctgtaccttggtggcttggttcttct

SEQ ID NO: 7179 - DNA, 447 bp, Glycine max
ctggattgtccatccttctctggttgcactttgcttcttccatctttggaggttcaacagctctctttaagtttgagttgtactttgggcttttggtgtttgtaggttacattgtagtagacacccaagaaatagttgagagggcacacttgggcgatctggactatgtaaagcatgccttgaccttgtttaccgatttggttgcagtttttgtccggattcttgttattatgttgaagaattcggctgagaggaatgagaagaaaaagaagaggagagattgattttcttaccaatctgctcagttaacacttcaactcccttggactgtaatacttaaaacagctgtctatacagtgttgttcacttgttaagcttgctccaactgtgcagtttagtcgtttggttgctttatatcagtagtacactagtacatgttgacatgtt

SEQ ID NO: 7180 - DNA, 426 bp, Glycine max
cggacgcgtgggcgacagagacaacatagctctcaaaggacttgcaaagttcttcaaggaatcaagtgaagaagaaagagagcatgccgagcagcttataaagtatcagaacattcgtggtggacgagtggtgctgcacccaatcacaagtcctccctcggaatttgagcattcggaaaaaggggatgccttgtatgccatggaactagctttgtctttggagaagttgacgaatgagaaacttctgcacgttcacagtgtggcagaacgtaacaatgatcctcaattggcagacttcattgagagcgagttcttgtatgagcaggttaaatcgattaaaaagattgcagagtatgtggctcaactgagattagttggaaagggtcatggtgtgtggcactttgatcaaaagcttcttcacgatga

SEQ ID NO: 7181 - DNA, 437 bp, Glycine max
ctggtactgtttttccaagacagaggcggatgagcaggccttggactttgccaaaagaactggccttgatgtggtaagcatttgcccttcccttgttctcgggccaattttacagtcaaccactgttaatgcaagtagcctggctctcctcaaacttttaaaaggtgtcaactcaatggagaataagatccgttggatagtcgatgtacgagatgtagctgatgcaatacttttggcttatgagaagcttgaggcagaagggagatacatatgccattcacataccatcaagacacgggatatgctggagaaactaaagagtatatatcccaactacaaataccctgcgaagtatactgaagtggatgattacataagtttcagctcagagaaactgcaaaggttgggttggaaatacaggtcactggaggaaacac

SEQ ID NO: 7182 - DNA, 431 bp, Glycine max
  modified_base (413)..(413): a, c, g, t, unknown, or other
agaagatgaacacgaagttgtctgatgtatctgctgagccggagcatgtaactgaagattgtcagtctgatttctttccaatgcttcgttctggagcttgtactgatattggattccggtcaaatatggaagatgcatatgtttgtgttgacaattttatggaggattatggactcaagaaccatatagacggacccagtgctttctatggggtatttgatggacatgggggaaagcatgctgctgactttgcttgtcttcatctgccaaagttcattgttgatgacaaagatttccctagagatattgaaaggatagttgcttcagcatttctgcaagcagacaatgcctttgcagaagcttgctctctggatgccgcacttgcatctgggaccactgcattagctactctngttataggaagtttctga

SEQ ID NO: 7183 - DNA, 447 bp, Glycine max
  modified_base (372)..(372): a, c, g, t, unknown, or other
gcacaagtgagggaggttgaaggcggcgtgagaagcatgttggacatcaacctattcagggaggagaagggccacaaccctgaattcatccgcgaatcccagcgccgtcgtttcgccagcgtcgaagtcgtcgacgaggtcatcaatctcgacaaagaatggcgaaagcgtcaattcgagttggagaatctccgcaaagaatttaacaagatcaacaaggaagtctccaaactcaagcgtgctggcgaggatgcaactaagttcatcagtgaatcagaggaaaccaagaaatcgataggggagaaagaggttgaagttcgggaaactctgaatctcttgaattccaagttggaaactattggaaacctcgtncacgattccgttccaattagccaggatgaggccaacaatgttgtcgttagatcgtggggaagagaagagagtgga

SEQ ID NO: 7184 - DNA, 430 bp, Glycine max
gccagaagaacctctgttattcgcgctctcactcacgacgttgatgaagtttacggcctctgtgatccagataaggataacctgtgcctctatggacatccaaatgaggcctgggaagtaactctgccagcggaggaagttccgccagagctcccggagccggctcttggaatcaattttgctagggatggcatgaaccgcagggactggctttctctggttgctgtccacagtgattcatggttggtttctgtggccttttaccttggggctcgtcttaaccgcaatgaaaggaaacgattatttagcttgatcaatgatcttccatctgtttttgaagttgtgactgacaggaaaccagttaaggacaagccaactgcggatagtggaagcaagtctaggggaagtgccaagagatctaccgatgggc

SEQ ID NO: 7185 - DNA, 441 bp, Glycine max
  modified_base (423)..(423): a, c, g, t, unknown, or other
ccgaggtaaccgcccccactttttttctaatgcagaatatttctctctctctctttccctgtttatcgtcctctttcagattcaccctcgttttccctctttcgcataaataaataaataaatataaacaccatgagcgttcctccgccgtctacggcggcgatgtggacgccgttcacggcagcgcagtggcacgagctggagcaccaggccctcatcttcaagtacctcaaggcgggtctctcggttccccctgacctccttctccccattcgcaagagcctccaattgatatcgtctcacccatcgatggggtattatgggaagaagatagaccctgaaccgtgtcggtgcatgagaaccgatgggaaaaagtggaggtgttcgagggatgcacaccctgacttcaagtactgcgaccgncatatgatacgacgtcgt

SEQ ID NO: 7186 - DNA, 403 bp, Glycine max
ggacaatacaataagagtatggaaccttgaaaccttgcagtgtttacagacactaacagagcacacatctgttgtgatgtctgttctctgctgggaccaattccttttatcttgttcattggataaaacagtgaaggtatggtatgctactgaaagcggaaacttggaagtgacatatactcacaacgaagaaaatggtatacttaccctatgtgggatgcatgattcacaaggcaaacccattttgctgtgcgcttgcaatgataatactgtgcacctctatgatctgccatcatttgcagagagaggcaagatattgacaaaaaaagaggtacgagcaattcagatagggcctaacggcatattcttcactggtgacggtactggtgaaagtagagtgtgg

SEQ ID NO: 7187 - DNA, 271 bp, Glycine max
cccacgcgtccggtttaagtctgcttgatcctacttatgcaagcaagtatataccaatcatggctagtgttagtgagcatcagccacctacttggccttcatactttatggatatcaatgtcttggcattcctcgttccagctggcattattgcatgcttttctcccctatctgatgcaagctcctttgtggtactttatattgttacgtcggtatacttttctggagtcatggttcgcttgatgcttgtacttgctccagcagcatgtat

SEQ ID NO: 7188 - DNA, 428 bp, Glycine max
aatgatgcagcaccagcccgagctcatgttcgagacactcaagcaccgcgcgcaggagtatgtcagccacgacaacgcagcagcgcttctggctgctggccttgctcgcacctttgacagaatgccttatctgctgtctctgtcttcctttgtggctgacgatgttgccgctgctgttcctgctgctcaagatctgggggagcagtggtcttattaatggatgtgcttcaattcaaatagtctcgcactagtcatcattccctttgtttctgttgcttgcttggttgttcttcttcttcttgttgatcgtcgtggtcgttgaggtcttcaattttttttttattattattccgttttcgctgtttttagttttgtcctggatgcaatgcaggataaagacagggtcagtcagttattgttctctgcat

SEQ ID NO: 7189 - DNA, 466 bp, Glycine max
cccacgcgtccgcccacgcgtccggggagaggctgcgcagatctactgcgagctggttcggctcggggcgaacatgcgagtcatcgatattggaggtggactgggcatagattacgacggttccaaatcttgtgactcagatatttctgttgagtacggtctcgaggagtatgctgcagcggttgttcacgcggttcagtgtgtgtgcgaccgaaggtccgtgaaacaccctgtcatctgcagcgagagtgggagagccatcgtgtctcatcattcggtcttgattttcgaggcggttggcaccagcagcacaaacggcggaggagctcccccggcattgtcagcgcattacctggcggaggagctgtcggaggactacggatatctctcggagctggcgttccgaggggactatgaaacgtgcctggtgtacacggaggagatgaaagagccgtgcgtggagcag

SEQ ID NO: 7190 - DNA, 279 bp, Glycine max
aagagagagaaagtagagagagagacacacacaactcccacaattgcggtgcctaaccttaatttcaggacacttcgaagctaccaggaccaattgttgttgttcttccctttttgtgctttttgattcagagatttttggttttcgtttttttttttcacaaggagaaagttcggtgtctttaagttgaataacttgttgggacatatttgatttggcgctttttcttttggtgcttgcctcatgggaaacagtgaggaagagaaatctgttaaaact

SEQ ID NO: 7191 - DNA, 422 bp, Glycine max
acgcgttcgactacgcgtccgctttccctcgatttttaagagagagaaagtagagagagagagaaacacaactgctttgccaaaccttaatttcatggcacttccaagctaacaggaccagttgttgttccctttatgtgttgattgattcagcgatttctggttttcggaacttttctttctttgttacaaggagagttcgatgtctttaagttgaataacttgttgggacatatttgactcggtgcttttcttttggtgcttgcctcatgggaaacagtgaggatgagaaatctgttaagactggaagcccttcttcttcacctgcaacaactgatcagaccaaccaacctaatattcatgtctatcctgattgggctgccatgcagtattatgggccaagagtcaacatttcaccatac

SEQ ID NO: 7192 - DNA, 468 bp, Glycine max
gatgtctttaagttgaataacttgttgggacatatttgactcggtgcttttcttttggtgcttgcctcatgggaaacagtgaggatgagaaatctgttaagactggaagcccttcttcttcacctgcaacaactgatcagaccaaccaacctaatattcatgtctatcctgattgggctgccatgcagtattatgggccaagagtcaacattccaccatacttcaactcagctgtggcttcaggtcatgctccacacccatacatgtggggaccaccacagcctatgatgccaccttatgggccaccttatgcagcattttattcgcatggaggggtttatactcaccctgcagttgctattgggccacacttacatggtcaaggagtttcatcttcacctgctgttgggactcattcaagcatagaatcaccaaccaaattatctggaaatactgatcagggtttaa

SEQ ID NO: 7193 - DNA, 422 bp, Glycine max
gattaagaactggaactacactgggttgattgatgcaatccacaatggtgaagggaaatgcgggactgccaaggtgttctgtgaagaggagctagttgaagcaattgccacagccacaggacacaagagagactccttatgcttcattgaggtgattgttcacaaggatgacaccagcaaagaattgcttgaatggggctcacgagtctctgctgccaatagccgtccccccaatcctcagtaaacttcagatgtcggcctatgattaaattgctgcaattgccctttagctctatgaaattgagaatcatttgagatgttgtccttgtaagaaatttacctttgttaatggcttgaaatatttatgcaaaactgagtccccacttgtttgtgtaaattctttcacttgagataaaaatata

SEQ ID NO: 7194 - DNA, 390 bp, Glycine max
  modified_base (6)..(6): a, c, g, t, unknown, or other
tcccantcccattcctaatcctcctttccctctcctctccgctcctccaattccccccaaactttctccctccgccgcttcgccgccgcctctctcgcttgccctccaccgccgccgccgcccctcgacgccatggcccagaaaatcggaaagtccacgcgccgccccggtgcctcctccaaggcccgcgtctatgccgatgtcaacgtcgttcgccccaaggaatattgggactacgagtccctcaacgtccagtggggggagcaagatgattatgaggtggtgagaaaggtgggtacggggaaatacagtgaggtgttcgaaggtgttcactgcaccgacggtgagaaatgtgtcattaagattcctgaaaccgtgaagaagaagaag

SEQ ID NO: 7195 - DNA, 423 bp, Glycine max
  modified_base (374)..(374): a, c, g, t, unknown, or other
  modified_base (410)..(410): a, c, g, t, unknown, or other
ctttcccattcccattcctattcctcctttccctctcctctccgctcctccaattgcccccaaactttctccctccgccgcttcgccgccgcctctctcgcttgccctccaccgccgccgccgcccctcgacgccatggcccagaaaatcggaaagtccacgcgccgccccggtgcctcctccaaggcccgcgtctatgccgatgtcaacgtcgttcgccccaaggaatattgggactacgagtccctcaacgtccagtggggggagcaagatgattatgaggtggtgagaaaggtggttagggggaaatacagtgaggtgttcgaaggtgttcactgcaccgacggtgagaaatgtgtcattaagatcctganacccgtgaagaagaagaagatcaagagggaaatcanaatattacagaat

SEQ ID NO: 7196 - DNA, 441 bp, Glycine max
cccacgcgtccggcgagaaagcgaagacagccatggcgtcgtttcttcaatcgtttgtggaggggaagaagaactggttcgccgctcagcacatgaaatccctctccaaacgcctccgcaaatatgggctccgatacgacgatttgtacgatccttactacgatctggatgtgaaggaggcgctgaatcggcttccgaaagaggtggtggacgctcgccacgcgcgtcttaaacgcgccatcgatctttccatgaagcacgagtacctccctgacaatctgcagtcaatgcaaacaccattcaggggctaccttcaggatatgctgactcttgtgaagagagagagagcagaacgtgaagcattgggaggtttgcccctatatcaacgatccattccttgagtgcatcaagtatttcatgaaggtattttgattgaagtgg

SEQ ID NO: 7197 - DNA, 303 bp, Glycine max
ggaaccaataaatgaacaagcagtagcaaatatgtatgctgcaatgaggtctgagctcagccaaatttactccaaaataactgaactggagatggaagttagtgagcacacattggttaccaatgccattcaaccacttgaccaatctagacgatgctatcgtatgattggaggggtgcttgtggagagaaccatcaaagaagtcttgcctgctgtgcagcgaaataaagaaaggctctaaaaagttgtggcaaggcttaacgaggcgttggaaaagaagaaaaagggaatttctgagtttga

SEQ ID NO: 7198 - DNA, 436 bp, Glycine max
gttcaaaataaatagttatcaaagttagttttttttttcttttccctaaagagttaggctctattggaccgtacgattaagatcgttcggtgaaattgatcacgctggtgccgcataccctagcgttcctgttattctattgtggctgaaacaaaacagtgttgaacggcgaggtagaacgacgacccccttctgcgttttgaccttcaatctcaatcatggccaaagctgaaggtggcaaggaaccaataaatgaacaagcagtagcaaatatgtatgctgcaatgaggtctgagctcaaccaaatttactccaaaataactgaactggagatggaagttagtgagcacacattggttaccaatgccattcaaccacttgaccaatctagacgatgctatcgtatgattggaggggtgcttgtggagagaaccat

SEQ ID NO: 7199 - DNA, 430 bp, Glycine max
accacgcgtccgtccacgcgtccgttttcctttgcctgtgcgtgtgaaagatcgcagcaactccaccaccatcacaacaggaccgtaaccgatttccaaggttgagttatttgctggtctaacttaaccatactgtctattttgactcctgagattgctagtgagtcatggggcatagacatttatatagctcatctccaatatttgagggtgaacctgaccagaactggaatcatatgcatatggatcaacaatatgtgaaccatggtaggagtaccactttcagacaatggttctttaatttatcctttggaaaatatgtccatagatagcattctttttcattctaatggaaccactgccccagggtcaaccggttttccttcaacaggtctaacattgaagcaccccctcatcaaacagatgtatc

SEQ ID NO: 7200 - DNA, 390 bp, Glycine max
agcccacgcgtccggctatctctcaggacaatggtcttgtgccaatcgttgagcctgaaattcttcttgatggagaccacccaattgagaggacgctggaagtggctgagaaggtctggtcagaagtctttttctatttggctgaaaacaatgtcctttttgagggaattttgctcaaacctagcatggttacacctggggctgaacacaaggaaaatgcttctccagaaaccattgccaaatatactctaatcatgcttagaagaagagttcctcctgctgtccctggaatcatgtttttgtctggtggacaatctgaagtggaagcaacactaaatcttaatgcaatgaaccaaagtcccaacccatggcatgtttcattctcatatg

SEQ ID NO: 7201 - DNA, 441 bp, Glycine max
  modified_base (399)..(399): a, c, g, t, unknown, or other
cccacgcgtccggagccatggtaccatttccctcataaaattctctcttcctttttggggtgtcctattccaagcttcaatcttttctctcttctcacagccttcttcactcacaggaggtgaagatgtcgactccggctaggaagagactgatgagggattttaaaagattgcaacaagatcctcctgctggcatcagtggggctccccaagacaataatattatgctttggaatgctgttatctttggcccagatgacaccccttgggatggaggtacgtttaagttgacacttcagtttacagaggattatcctaataaaccacctactgtgcgctttgtttctcgaatgtttcatcctaacatttatgcggatggcagtatatgcttggacattntacaaaatcagtggagccctatatatgatgtagctgcaattc

SEQ ID NO: 7202 - DNA, 434 bp, Glycine max
  modified_base (418)..(418): a, c, g, t, unknown, or other
caagaacataagggaaccacagcggcggtaacagaagaacaagcagagaatgggtcgagtgagaacgaagacggtgaagaaatcctctcggcaggtgatagagcgtcactactcgcgcatgaccctggacttccacacgaacaagaagcttctggaggaagtggcgataatcccgtcgaagaggctaaggaacaagatcgcggggttctcgacgcacctgatgaagcgcatccagaagggccctgtgcgcggcatctccctcaagctccaggaggaggagcgcgagagccgcatggacttcgtccccgacgtctccgccatcaacaccgaccacatcgaggtcgacaaggaaaccctcgacatgctccactccctcggtatcaacgacatccccggcatcacccaggttgatcctgtncctgttcagcagaact

SEQ ID NO: 7203 - DNA, 459 bp, Glycine max
cggacgcgtgggtggcaaaccccggcagcagagcctgcgaaagctgattgggaattggcattggtagagactgctagcaatttgtcaaagcagaaggcagctttaggtggtgggttggatcctctattgttgactggtatgtatgatcaaggaatggtgaggcagcatgtcagcactacccaactgagtggtgggagtgcaagcagtgtggcattgccgggaccagggaagactccggttttggctctccccgccccagatggatctgtgcagccggttaatcaggatccatttgctgcatcgctgagtgttccaccaccatcctatgtgcaaatggctgatatggagaagaagcagcacttgcttgtgcatgagcagcatgtgtggcatcagtatgcaagggatgggatgcaaggtcaatctagcttggccaaactgaatggcgctggatactatgcc

SEQ ID NO: 7204 - DNA, 424 bp, Glycine max
cccacgcgtccgcccacgcgtccgggttgaggtgagaagggaagggatgtggagggcaacttggagcacagcagcgattccctccgacgaggaacctagcgaatcctcctcctcgtcctccttctccacctctctcttcaatttctcttctggaaacccgagaatcgaggagacccgtggcctcatgcatctcttcccagacgacactccttctactctacccgttggacggaagcctctcgttagcgttgccggcgtcccaaatcacatgacctatgcggatttctgccagttctgtggttccttcattcagcacatgctagagatgcgcatagtcaggatggatgggatggaggatcagtacagtgttttagttcgctttgacgatcaagactccaccgacagcttctacaagcactacaat

SEQ ID NO: 7205 - DNA, 370 bp, Glycine max
ttctaaggcaaattccacaagtgccccacaatcttgtgcaattgtgcctaatgaaacttgcgtacagaatgagcgtgagctgaaacgggagaggagaaaacaatctaaccgtgaatctgctagaaggtccaggctgaggaagcaggccgagactgaagaattggcacgaaaagttgatatgttaactgctgagaatgtgtccctgaagtcagaaataattcaactgactgaaggttctgagcagatgaggatggaaaattctgcattgagggaaaaactgagaaatactcaactgggacaaagggaagagataattttgagtagcatcgagagtaagagggctgcacctgtaagtacagaaaacttggta

SEQ ID NO: 7206 - DNA, 440 bp, Glycine max
acccacgcgtccgcccacgcgtcttcagactttgaaatatcacttatttctctctggctgtgatttgcgattagggaaaggcgataacaaatctggtcctctctggtctaaaaaatgtcactgaaagagggttctgggtcatgggggctgctcaaggtctgcagaaactggtgtcacttactgttacttcctgcaggggaataactgatacaagcatagaagccattggtaagggttgcatcaacctgaagcagttgtgccttcaccggtgttgctttgtttctgacagtggattggtagcattcgccaaagctgcagtatctcttgagagcttgcagctggaggagtgcaacaggttcactcaatctgggattattgttgcccttgcaaacatcaaaaccaaattgaaaactctttcccttgtgaagtgcatgggagtc

SEQ ID NO: 7207 - DNA, 300 bp, Glycine max
cccacgcgttcgatctctctcaaggattgccctcttgttggggatcatggagtgtgtaggctgttggcgtcggcttcgaacttgtcgagggttaagcttcagactttgaaaatcacagatttctctctggctgtgatttgccattatggaaaggcgataacaaatctggtcctctctggtctaaaaaatgtcactgaaagagggctctgggtcatgggggctgctcaaggtctgcagaaactggtgtcacttactgttacttcctgcatgggactaactgatacaagcatataagccatt

SEQ ID NO: 7208 - DNA, 431 bp, Glycine max
gcgtcaagagaagatagatgagattatataccctgaaatatcttcatttctgatgctgaggagggataatgataggcatgtgaggcgagctgctgttttggctctcagcacatttgcacacaataagccaaatctcatcaaggggcttcttcctgatctgctgcctcttctatatgatcaaactattgttaagcaagagctcataaggacagttgatcttggtcctttcaagcatattgtggatgatggacttgaattgaggaaggcggcttttgaatgtgtagacacattactggatagttgccttgatcaagtgaacccgtcatcattcattgttccttatcttaaatctggtttggatgatcattatgatgttaaaatgccatgccacctgatactctcgaaactagctgacaagtgtccttctgcag

SEQ ID NO: 7209 - DNA, 394 bp, Glycine max
  modified_base (388)..(388): a, c, g, t, unknown, or other
tgacaaacccattagagagataccaaaaacttgggctaagcgagtctctaccgaaaacctacagatacccaattgcgtgcagagagctaagctttattctgagggaagcttttcatcaattccccaaaaatttgcaatccatcgtcttccaagacaccctctccgccttccgtctcctcccagaaatacagactcagagtgctgtttcagcagtccacttcctccttcagagtgtagaagcagcactaccaaagcaaaaaaagaatgtggctgtaacagaatttaagcatgcaatggttgctcataagaggcgctgtaaagctcaccaggtagagaaaggttcattgccattgccacaagatattcctgtgctcactttcagttttcntgatat

SEQ ID NO: 7210 - DNA, 449 bp, Glycine max
  modified_base (404)..(404): a, c, g, t, unknown, or other
  modified_base (421)..(421): a, c, g, t, unknown, or other
gattactttaggcatttgcgagaaattgggggacaggatgctgatagagaagatgaaggggacagaaatggtgctcgaattgctagaaggcctcctggacaagttaatcgtaacatcaacaatggtgaggggaatggtgaagatgctggtggagtgcaaggaattgctggggcaggtcaagtaattagaagaaatgctgaaaatgttgctgcaaggtgggagatgcaagcagcacgacttgaggcacatgtcgagcagatgttcgatggtctggatgatgctgatggagcagaagatgttccctttgatgaacttgttggcatgcatggtccagtttttcatttggttgaaaatgcatttactgtgctggcaagcaatatgattttccttggtgttgtaatctntgtgccattttcattgngccgatcatactccattatctatcctgg

SEQ ID NO: 7211 - DNA, 413 bp, Glycine max
aggcatgcttgagttgccaactttaagtttgtcaatttccgtgctgcttggttggttgcaattgcaagtgaacaattggctagtgtgtactagttttgaatcacaatggcagaggatgatggttacacgaaagatggaacagtcgattactgtggaaatccagctaataaaaaggaaactggaacctggaaagcctgcccctatatcttaggaaacgaatgttgtgagagattggcttattatgggatgagcacaaacctggtgctttatttcaagaaccggctaaatcagcatagtgctactgcttccaagaatgtctctaattggagtggaacttgctatatcacaccattgattggggcatatttggctgattcctaccttggaagatattggacaattgctgttttttc

SEQ ID NO: 7212 - DNA, 415 bp, Glycine max
accacgcgtccggtccgtagtgaagtgttcccattatcatccggtgcattccacgtgtgtccgtgagtccccaccggcgccgtaaccactctccgccgtggcctccaccattaatggaccaaatcccctaaacatccttctcccaattccgaatccatggctcgctcttctctccacgcgctctccaccattctcttcctactacgcttgttgttatctccttccacacacgcccttaaactccccttccgagtcaacgatgttctccccgttctcccccacggaatctcctggcccctcctcaacaacctccacagcgccgtcgacttgctcccttccttcgtcggcgccgtcacgcccgacaacggttcccttcagtggaagggcgcctgcttttacgataatcaagcctccc

SEQ ID NO: 7213 - DNA, 426 bp, Glycine max
  modified_base (382)..(382): a, c, g, t, unknown, or other
gcccactaatgtgccaagctcgagagtctaaaattcaaatcctagcttgggttaacttagatatgagttctctatttttaattttccttatccttcttgttgccgatggggtccttgtccgaggaagtataaatattacagaaataagcttcgatcaaaactatgaggttacgtggggtgataatcatgttgtctccttaaaccaagggaaagaaattcagctcacaatggataactcttcaggatccggttttggatccaagatgtcatatggctctggactattccatttgaggatcaaagtaccagataggaattctgctggagttgtcacagcttactacttaacttcacaaggaagaagtcatgacgagttagactntgaattcttgggcaatagagaagggaagccatatagattacaaa

SEQ ID NO: 7214 - DNA, 394 bp, Glycine max
aatgtgccaagctcgagagtctaaaattcaaatcctagcttgggttaacttagatatgagtgctctatttttaattttccttatccttcttgttgccgatggggtccttgtccgaggaagtataaatattacagaaataagcttcgatcaaaactatgaggttacgtggggtgataatcatgttgtctccttaaaccaagggaaagaaattcagctcacaatggataactcttcaggatccggttttggatccaagatgtcatatggctctggactattccatttgaggatcaaagtaccagataggaattctgctggagttgtcacagcttactacttaacttcacaaggaagaagtcatgacgagttagactttgaattcttgggcaataga

SEQ ID NO: 7215 - DNA, 436 bp, Glycine max
cccacgcgtccgccactaatgtgccaagctcgagagtctaaaattcaaatcctagcttgggttaacttagatatgagttctctatttttaattttccttatccttcttgttgccgatggggtccttgtccgaggaagtataaatattacagaaataagcttcgatcaaaactatgaggttacgtggggtgataatcatgttgtctccttaaaccaagggaaagaaattcagctcacaatggataactcttcaggatccggttttggatccaagatgtcatatggctctggactattccatttgaggatcaaagtaccagataggaattctgctggagttgtcacagcttactacttaacttcacaaggaagaagtcatgacgagttagactttgaattcttgggcaatagagaagggaagccatatagattacaaa

SEQ ID NO: 7216 - DNA, 421 bp, Glycine max
aggtggtaatacaagagaggtgcttcataaattcagtgtggatctcccaaagaaacatggaagaggagggcaatctgctctgcgttttgcccgtcttcgcatggagaagcgtcataactatgtgcggaagacggccgagcttgctacccagttctatatcaatcctgctaccagccaacccaatgtttctggattaatactggctggttcagctgatttcaagactgaacttagtcagtcagatatgtttgatcctcgacttcaggcaaaaatactcaatgttgttgatgtctcctacggaggcgagaatgggtttaatcaggctattgaactctctgctgaaattctgtccaatgtgaagtttatccaggagaagcgattgattggaaaatactttgaggaaatcagccaggatactggg

SEQ ID NO: 7217 - DNA, 427 bp, Glycine max
ggcataatgagggagcttctacttgatttctatacaagttctggaaatagggagcccgagaatataatcatattcagggatggtgttagtgagtcccagttcaatcaagttttgaacattgaacttgatcaaattatcgaggcttgcaagtttttagatgaaaagtggaatcccaagtttttggtgattgttgctcaaaagaaccatcatactaaattctttcaacctggagctcctgacaatgttcctcctggaacggtaattgataacaaaatttgtcatcctcggaattatgatttctacatgtgtgcacatgctggaatgattggtactagcatgcctacacactaccatgttctgttagacgagattggcttttcacctgatgatctacaggagcttgtgcattcattatcatatgtgtatt

SEQ ID NO: 7218 - DNA, 297 bp, Glycine max
cgacttggttatgtcggtgttgtaaatcgcagtcaggaggattttcaaatgaaccgcagtgtagaggatgctcttgatgctgaagagaattttttgcgcaatcgtcctgtatacaatggtttagcatatagttgtggtgttcctgaactagcaaagaagttgaaccagattctggcacaacatataaaggctgtgctacctgagctgagagcacgtataagcacttgactagttgctgctgcgatagagcatgcaggctatggagagatcaccgagtgcaatgctgtcatggtgcac

SEQ ID NO: 7219 - DNA, 457 bp, Glycine max
ggggaagcagagcatatcattggagcctggtggtcagtttgaacttagtggagctcctgttgaaaccttgcatcagacttgtgctgaagttaattcccacctttatcaggttaaagctgttgctgaggaaatgggaattggatttttggggattggtttccagccaaagtggggaatcaaagacatacctataatgccaaagggaagatacgacatcatgaggaactacatgcctaaagttggctctcttgggcttgacatgatgttcaggacatgcactgtgcaggtcaatctggactttagttctgaagctgacatgatcaagaaatttcgtgcaggccttgctttgcagccgatagcaacggctctttttgcaaattcaccctttaaagagggaaagccaaatggttttgtcagtatgagaagccatatttggactgatactgataaggaccgc

SEQ ID NO: 7220 - DNA, 441 bp, Glycine max
caagttcggtgattgacgatgtcgggcttgaagcttggcacgactgcttccatctacgttcgaacagcgaaaaccaaaagcaaacccctcttatcatggagaagcccaccccaacacccccgcagccgcaggtacatgctttccccttccaaaaatcaaatcctagggttcacacctagaaacaaattgccatgctattctttgggaagggctggtcttgtcacagattttggttcgtcagtgccccaacctcaacctcaacctcagccaaagccagagccagaaccagaacctgaaccttgcaaattgcttacgttgccaacaattgtgactctaggccgtgtcgccgatgtcccacttattgatgctactatctacatggacggttggcgtggaactgctgctactaccagcattttcgtcgctgcatcaatcactgat

SEQ ID NO: 7221 - DNA, 409 bp, Glycine max
caataaaggaaaagaaaaaagagaaatagtactgggaagaaatgttcataccacatgggtagaagtcacagagcccgaggcagatgacgagatcactggggaccgggaagctcatatggcaagtgtgttggccagatacaaaagagccttgactgaaaggacaaagcaccatttaggctacccctataatttggatttcgattatggtgcactcacgcaacttcagcacttttccataaacaaccttggagatccatttattgaaagcaactatggtgtccactcccggcagtttgaagttggtgttttggattggtttgcccgattgtgggaactggagaaaaatgagtactggggctatataacaaactgtggtacagaaggcaatctccatggcatcctagttggg

SEQ ID NO: 7222 - DNA, 452 bp, Glycine max
cttgggcgaaaccctaatctccccccttcacccttcgtacaccgcgtcgcatctacttccatcttctctcagatccaatctccgattcttgcttcactatcacaagcaaacatgtctgcggctttggatatgaccctcgaagatataattaagaacaacaagaaatcttccctcgccaacaccaggggccgaggccgagcctcgggacccggacccgctcgccgcctccccaaccgtgccgccaatcgcgccgcaccgtatgccgctgccaaggcgccggagacagcttggaaacacgatatgtacgcgaaccagccagtggccgcggcgtatccaggtggtcgagcgtcttccatcgaaacagggactaagctctacatttccaatttggattatggcgtttccaatgatgatattaaggaagtgtttcttgaagttggcgacgtgaaacg

SEQ ID NO: 7223 - DNA, 384 bp, Glycine max
tattattcctcttccatctctattctccataacacccaccacaccacttgtgaaaaacgtcattaatatcacacactgacatgtatctctgagctccaatccaatacaagaccacaccttgtcgtgtcggacgaaccttggtgtctgtttttttttttttttttcattattttctccgaagagatgaggaagggcagaggtggaggcgcctcggcggcggcggtggatgtgaacggatccattttaaaggagcctcggtaccggggcgtgaggaagagaccgtgggggagattcgccgcggagatcagagacccgttgaagaaagccagggtttggttgggaaccttcaattctgccgaggatgctgctcgtgcctacgacgcc

SEQ ID NO: 7224 - DNA, 398 bp, Glycine max
cccacgcgtccgcctacttctacttcccccctttgctctcaaaccttatcacctaatgcttatcctcccaaaccagaaaaccatgtctacctccgcagcttccctcgcactcccaaccctcactctccgaacccgacaacctctatgttctccccaatgcttctcctcgtccctctccctcacacccaacaacaaacccatttccatttctgctgtttttctcaaaccaacaactctgtcgtcgtctcgcttcgttccccacgtcgtggtgtcgtcggatttggggcaggaggaggacaccttcagtgacggagacggccccagcttctcccccgaccttaagctctttgtcgggaaatcttccgttcaacgtcgacagcgcgcagctcgcggagctc

SEQ ID NO: 7225 - DNA, 386 bp, Glycine max
  modified_base (32)..(32): a, c, g, t, unknown, or other
gcaacctttgctgtggtagtggaagcacacanagagcacaacgttacatatagtaactgtggcgagagtgggtagaatgaaacttggttcagaagggtttgaagtgtctatgcagggacttgggtgcatgggcatgtctgcattctatggtcctcctaagccagagcccgatatgattgcactcatccaccacgccgtccaaagcggtgtcacttttcttgacacttctgatgtctatggccctcacaccaatgaactccttctgggaaaggctttgaagggaggggttagaaagaaggttgaattggctaccaagtttggaatcagctatcctgaagggaaatgggagatccgtggtgatccagcatacgtgagggatgcttgtg

SEQ ID NO: 7226 - DNA, 401 bp, Glycine max
agtacggcctcttgctccagtaattcctagacctagaactggggctgctttgtccagcacctcaagggttgaatttttggacacaaacaaggtagtggcaggtcctaagtttcaacctttgaggtgcaacctcagggagaggaattgggggctgaaagtgagtgcccctttgagggttgcttccattgaagaggagcaaaagagtgttgatttaaccaatgggactaatggggttgagcatgagaagcttccagaatttgaccctggtgctccgccaccattcaacttggctgatattagagcagccattccaaagcattgctgggtgaaggacccttggaggtccatgagctatgtggtgatggatgtgattgctgtcattggtttggctgctgctgctg

SEQ ID NO: 7227 - DNA, 401 bp, Glycine max
caaagacacattctttcagcctcccttcaacacccttttggcccttcattcttccaagtctcaaatcgaagctcgaagacctgcgaagaacaaagggttgtttaaattctgtgtggttgttgttggaggttgaaatacaagttgccgcctcaagtgtgtgttaatcttaaatttcacaagcaagttgtatttttggagtattgtattatatgaccaaatattttagtgttttaggactagatattttgcttctggtggcaatttttctcttctccttctggttctcatcttttgtgttcttctttggttctcacctttctgaagatttttccatcttaattcctggaagcaccaagaaccttgaccaaataattaaccttttttttcttctaatttttctg

SEQ ID NO: 7228 - DNA, 407 bp, Glycine max
aatctatcgaaagaaaagagaaagcgaatcggagaagaagaaaaatggggttggctttgttagcttcgaaggccgtgagacccacatcaaggctcctcttcggttcccaaaaccctagcaccttcctcctccgaaccatcgtctccaagccccagcttcggaatcccgaagccaccgccgcgcatccggagcagccgccgcctgccgatctcccgccgcggactccgctcgccggcgcccgcgtccacttcccaaaccccgaggactccatcgaggttttcgtggacggctaccccgtgaaaatccccaagggaatgaccgttcttcaagcctgccaagtcgccggcgtcgacatcccgaggttctgccatcacagcagactctccatcgccggcaattgccgcatg

SEQ ID NO: 7229 - DNA, 325 bp, Glycine max
cacgacactgagcatcagcaatggcaagcgcaagtgttggtaaagaactgacgctgtagtcgtattggaggagctgttgctcccaccgagtccgaatcgctctcaaccatcaagggcttacatacgaatacaagcccgtcaatctgctcaagggagaacaatctagccctgagttactccagctcaatcctgttggttgtgtccccggtctagtggatgaccacgatgctctctatgactctttcaccattattatgtattcggaagatacagtatcctgacaatcctttgctccctcatgatatttacaagagagcaatcaatt

SEQ ID NO: 7230 - DNA, 479 bp, Glycine max
cgctctcaacctcaaagggcttaaatacgaatacaagcccgtcaatctgctcaagggagaacagtctcgccctgagtttctccagctcaatcctgttggttgtgtccccgttctagtggatgaccacgttgttctctatgactctttcgccattattatgtatttggaagataagtatcctcacaatcctttgctccctcatgatatttacaagagagcaatcaatttccaggctgctagtgttgtttcctcaacaatacaacctcttcataacttgagtttactgaactacattggggagaaagttggccctgatgaaaaacttccttgggcccaaagtataattagaagaggctttaaagcactggaaaagctattgaaagaccacacaggaagatatgcaactggagatgaagttttcctggcagatattattttagcacctcagttacatgcagcatttaggagattcaacattc

SEQ ID NO: 7231 - DNA, 394 bp, Glycine max
  modified_base (182)..(182): a, c, g, t, unknown, or other
  modified_base (346)..(346): a, c, g, t, unknown, or other
agcttagtccaaaacctcacacgactccctttgttgcgttgtgtttcctttcgccgaaaccctcgctcgcaacttctacagaatccctttcaccatggatattgaggaggacatccgttctttacagctcgattcagcagaagacaataatggggtggtaaatgcagaggatggaaggccanaagaagttgagaaatctgataagatggatgaagatccaaagcaggatgttgaggctgagccaaaggctgttgaggctgagccaaaagtgaaggataaggaggttccttctgttcaagatgaagaagatgaaccagagattgacaaaagacacttgaatgttgtntttattggtcatgttgatgctggtaagtctacaactgggaggcagata

SEQ ID NO: 7232 - DNA, 379 bp, Glycine max
  modified_base (66)..(66): a, c, g, t, unknown, or other
  modified_base (344)..(344): a, c, g, t, unknown, or other
gtaaaaagatagagcgatctggaaaatcaataagttctcctccagggttgttttttcagcatgcangtcatagggataaagttgttgacttccattggaatgcatatgatccatggacgattgttagtgtgtctgatgactgtgaaagtactggaggagggggaacgttgcagatatggcgcatgagtgatttgatctacagaccagaagatgaggttttggccgagctggagaaattcaaatctcatgttgtggcgtgtgcttcaaagactgaaaaatgacatacgtcgtaggcaaaaatgagttatattattattgcttgtgtatttaatttaacatttgcngtggatgtttcatggcattttaaaaccattcatgt

SEQ ID NO: 7233 - DNA, 369 bp, Glycine max
ctcagaccatgcctccgtggtctccatgaacttatttgtggcacttctttgtggttgtattgggcttggccatcttcttgaggagaatcggtggatgaacgagtctatcactgctcttttgattggtgtttgcactggcatagtcattttgctgtttagtggtggcaaaagctcgcatattcttgttttcagtgaagatcttttctttatataccttctgccgcctataatatttaatgccgggtttcaggtgaaaaagaagcagttttttgtaactttcatgaccataatgtggttggggcctttggccccataaaattctggacccatattacctttgggggcacaccaaatttttagaaggttgat

SEQ ID NO: 7234 - DNA, 441 bp, Glycine max
ggtaaaaagacattgtattccaggggagtcacaatccagtttagaaatgatgaggagagtgcagccgtccattgtgtagttcaacagtggaagaaggaagtaaatgctcaagaaggaaatggacgaaatggaactattacaacttctaaaagcaaatttgatgataagatagagtcatcatcttctaaaatgtattttcattattatggacaacttctgcatcagcaaaatatgttgcaggactatgtgcggacagggacctatcatgctgctgttcttgagaaccgtactgatttcattggtcgtgttgtagttgatgtgggtgctggtagtggtattttgtcattatttgctgctcaggctggtgcaaaacatgtttatgctgtggaagcatctgaaatggcagaatatgcacggaaacttataactggaaacccaaca

SEQ ID NO: 7235 - DNA, 439 bp, Glycine max
  modified_base (353)..(353): a, c, g, t, unknown, or other
cagaaagcaacactggaaattaagagagctgatggtaatgaggccatcattgctgaagaggcatataaaggggtagattgcaaagatggaggcccttttggtgctgttatagttcataatgatgaaatagttgctagttgtcacaacatggttctgtgtaacacagacccaactgctcatgctgaggtgacagcaataagagaggcttgtaagaagcttaagcagatagaacttgcagattgtgaaatatatgcttcttgtgaaccttgccccatgtgctttggtgcaatccacctttctcgaataaagaggttggtttatggagcgaaggctgaggcagcaattgctattgngtttgatgatttcattgcagatgcactgcgaggtactggattctatcagaaagcaacactggaaattaagagagctgatggtaatg

SEQ ID NO: 7236 - DNA, 439 bp, Glycine max
cccacgcgtccgccaagttaataggtctttatatttagttgttgacatcaacaaagtgatggaggaagttaatgtggttcaaaccaagaatggaactgttgcagtagcttctgcgtttgctggacataaggaagctatacagcaaagggaccacaaatttttaagaattgctgttgaagaagcctataaaggggtagactgtgaagatgggggtccctttggtgctattatagtatgtaatgatgaaatagttgctcgatgtcacaacatggttctgaggaacacagaccctactgctcatgcagaagtcactgttataagaaaggcttgtgaaaagttaaaccagatagaactttcagactgtgaaatatatgcttcttgtgaaccttgccctatgtgctttggagcaattcacctttaacgagttaaaaggttggtt

SEQ ID NO: 7237 - DNA, 424 bp, Glycine max
aaaactagtattttcttagccacacgtactcttccacaatgtcttcctcaaagctcttcaccacttttcttttctcactaaacttagctctccttctccaaacatcttttggagccgaccctctcttccatttctgttcaaattctgagaacttcacagccaacagtccctatgaatcaaacttgaaaacactcatcaactcactcatctacaagaccccttcaactgggtttggtgttggctctgtgggccaataccaaaaccaaaaggcatatgcgcttgccctttgccgcggcgacgtgtcggccctagagtgcaaaacttgtgtctctgaggcacccaaagaaatcctcagtcgctgtccatacaacaaaggtgccatcaattggtacgactattgcatgttcaagtacttggacactga

SEQ ID NO: 7238 - DNA, 406 bp, Glycine max
agctcacctttcccttggcgacgccgtgagaaacgaaaagcgaacaaaaaaaaaacagagtggggtgggaggcacacgcacaaacgcagagtcagaatctccaatcttcaatcggagacaaagctagctcgaacgaacgaagtagagtagtgtgctacgaaaaatgtggcggtgcatcgcacgtggtctccgtggacctgcttccaccagatccacctccaatcactcacttggatctcaactttctagattcttctctagtggggcgaactcctcgtacaccgtggtggatcatacttatgatgctgttgtcgtaggagctggtggcgcgggattgagagctgctattggactttcagaacacgggttcaatactgcttgtattaccaagctcttcccaactcgt

SEQ ID NO: 7239 - DNA, 409 bp, Glycine max
cgacgtgagcggttcgctgcccgcgacgttgtgagaagtccactgaaccttatcattaagaagaaggagaagcccaaaatgggaacaatggagagcttgaagttcttggtgtcttcaaagtacatcagagatcttgccactttagtggttgcttatggaatcagcatcaatcttgttgaggttacctggaagtctaagctcaaagctcagtttcctagtcccaacgagtactcttcttttatgggtgacttctcaactgcaactggaattgccacattcacaatgatgcttgtcagccaatttatatttgacaagtatggatggggagttgctgccacgatcacccctacagtcctgcttctgacaggagttggtttcttttctcttatattgtttgggggcccgcttg

SEQ ID NO: 7240 - DNA, 410 bp, Glycine max
agaagaaaacctaagcttagaattagaaacaaagaaaagaagaaaggaaagaattgatcgttgaaaatgcagggaggaaagaaagcgggagagtccattaaggaaacagctacaaacattggtgcttctgccaaggctggcatggagaagaccaaggccactgtccaagagaaggcagaaagaatgacagcacgtgatccggtgcaaaaggagttggcaacccaaaagaaagaggcaaagatgaaccaggcggagctggacaagcaggcggcgcgtcagcataacacggcggccaaacagtccgccaccacggctgggcacatgggacatggccaccacaccaccggaaccgggactggaaccgccacgtattccaccaccggggaatatggtcagcccatggggggccc

SEQ ID NO: 7241 - DNA, 388 bp, Glycine max
  modified_base (341)..(341): a, c, g, t, unknown, or other
gcgtagtgcaaatggggtagatgaaagcaaatattggcgtggtggctatggcgactatggtggttggcgtggtggtggttggcgtggtggctatggaggctggcgtggtggctatggtggtgggcgtggtggctatggtggctggcgtggtggctatggtggtgggcgtggtggctacggaggttggggtggtggctttggccctaacgaacataatgaggctgggattgatgctagccctcacaactaagaaggaaacttgctaaagcttatataggatttaagttatcgtaataaataaaacttcattggaagggtagttataatagatgtggagatcnttcttcgctctggtcatataaaggaataatacttttctattaatttc

SEQ ID NO: 7242 - DNA, 408 bp, Glycine max
gaaattgtgaaggaagtttcttcctatttgaagaaagtaggatacaaccctgacaagattccttttgttcctatatctggttttgagggagacaacatgattgagaggtccacaaaccttgactggtacaagggtcctactctgctagatgcacttgaccagatctctgagcccaagaggccttctgacaagcccctcaggctaccccttcaggatgtgtacaagattggaggaattggaactgtgcctgtgggacgggttgagactggtgtcttgaagcctggaatggtggtgacttttgcaccaactggactgacaaccgaagttaagtctgtggaaatgcaccatgaagctctcacagaggctcttcgcggtgataatgttggattcaatgttaagaatgttgct

SEQ ID NO: 7243 - DNA, 378 bp, Glycine max
agcccacgcgtccgctgaaaatgagttccaaggttttgcttgttctacttatgttcttggccactatacttctgatctcctctgaggttgcacccgatgatgcatacgagaattttgacaaaatagatgggaagcctagtgcagatggggtagatgaaagcaagtattggcgtggcggctatggtggcggctatggtggtggttatggaggtgggcgtggaggctatggaggtgggcgtggaggctatggagggggacgtggtggatatggcggcggacgacgtggctatggtggcgggcgtggtggctatggcggcgggcgtggtggcgggcgtggtggctatggtcctaatgaacataacgatgctggggttgatg

SEQ ID NO: 7244 - DNA, 400 bp, Glycine max
cccacgcgtccgcccacgcgtccgcccacgcgtccgcccacgcgtccgcccacgcgtccgcacacaactactacaagtacttccctacaagcagaaccaacaacaactatggcacgttatcaaaagcactacgatgatcatggtcacaaggttgacgagtatggcaacgttgagaagcacaccgacgaatacggcaacccagtacatgctgctactgtcacctatgtagccaccagaactgctgctggtggttacagtgatgacattaagaggcaacatgataccaccaatgcctacggagtagacactggtagacagcattctagtggtggctacgatggagacactaatagacatcaaggaactactggtggctatgatgctgacaccaatagacatc

SEQ ID NO: 7245 - DNA, 404 bp, Glycine max
  modified_base (361)..(361): a, c, g, t, unknown, or other
  modified_base (393)..(393): a, c, g, t, unknown, or other
agcccaagcgtccgcccacgcgtccgatttcctctcagaaccctcgatcactcccacgcgctcctatatcctctccttcaccgtcgctctctccaacgatcacaacaacatcgtcatcccatggcaaacgccgcatctggtatggcagtccatgatgactgcaagttaaggtttttggagctgaagacaaagaggacacaccgtttcatagtttttaagattgaggagcagcagaagcaggtcattgtggagaagcttggtgagccagcccaaggctatgaagatttcactgccagccttcctgctgatgagtgccgttatgctgtttatgattttgagtatctgactgaagggaatgtcnctaaaagcagaatttttttcattgcatggtcncctgacacatc

SEQ ID NO: 7246 - DNA, 387 bp, Glycine max
agaaaagctcgtggaattgctagcaatggcgaggatcaaggtttacgagctgaggcagaagacgaaggctgatctgctgaatcaactgaaggacctgaaggcggagcttgccttgcttcgtgttgctaaggtcaccggtggtgcccctaacaagctttccaagataaaggtggtgaggttgaacattgcccaggttttgacggtgatttctcagaagcagaaggctgcgttgagggatgcctacaagaataagaagtacttgcctctcgatctccgccctaagaagaccagggctattcgcaggaggcttactaagcaccaggcatcattgaagacagagagggagaagaagaaagagttatatttcccactaaggaaatatgctat

SEQ ID NO: 7247 - DNA, 404 bp, Glycine max
agcccggatggttcggttctccgtgctcagttacctggcaggccaactcgtgattctctatttgtggatccagccagagataggactagcttgctcaaaatatggaacctgaacaaatgctctggagttgttggtgtatttaactgccaaggtgctggatggtgcaagatagagaagaaaacccgcatccatgatacatctcctggtacactcaccgcctctgtctgcgcctctgatgttgacctcatcacacaagtagcaggtgctgaatggcttggagatacaattgtttatgcttacagatcaggtgaggtgattcggctaccaaaaggggtttcaattccagtgacactaaaagttctggagtttgagcttttccacttctgtccaatccaagaaatagc

SEQ ID NO: 7248 - DNA, 402 bp, Glycine max
gcttcttgttgttggaaagaaaccctagcaagcggaacaatggcagacgttgaggtcgatgtggcggctgcagcagcagcagggcagccgaagaagagaacgttcaagaagttcagtttcaggggcgtggatctcgatgcgcttctggacatgtccaccgatgaactcgtgaagatgttcagtgctcgcgcacgtagaaggttccagagaggcctcaccagaaagcccatggccttgatcaagaagcttcgcaaagcgaaaagagaagctccaccaggtgagaagccagaacctgtccgcacccacctccgcaacatgattattgtgcctgagatgattggtagcattattggagtgtacaatggcaagacctttaatcaggttgaaatcaaacctgagatg

(The sequence listing continues in the following parts.)
